United States Patent Application Publication US 2005/0244851 A1 - sequence listing, part 28

SEQ ID NO: 1076905 - DNA, 25 bp, Homo sapien
gactgaagaaggctctgatttatat

SEQ ID NO: 1076906 - DNA, 25 bp, Homo sapien
gcttatatccacagccaatcagagg

SEQ ID NO: 1076907 - DNA, 25 bp, Homo sapien
gaaacgaacccagtcagggcatgtg

SEQ ID NO: 1076908 - DNA, 25 bp, Homo sapien
gccaatcagaggaaacgaacccagt

SEQ ID NO: 1076909 - DNA, 25 bp, Homo sapien
taaaatgatgcttatatccacagcc

SEQ ID NO: 1076910 - DNA, 25 bp, Homo sapien
ttgctactattcaggccatggttat

SEQ ID NO: 1076911 - DNA, 25 bp, Homo sapien
attcaggccatggttataatattgc

SEQ ID NO: 1076912 - DNA, 25 bp, Homo sapien
ggccatggttataatattgctcaca

SEQ ID NO: 1076913 - DNA, 25 bp, Homo sapien
tggttataatattgctcacaaatgt

SEQ ID NO: 1076914 - DNA, 25 bp, Homo sapien
gcaccccagttttaccaagaggaca

SEQ ID NO: 1076915 - DNA, 25 bp, Homo sapien
accagaacagtagttcttctcatct

SEQ ID NO: 1076916 - DNA, 25 bp, Homo sapien
cagagatactgtatacaagagatgc

SEQ ID NO: 1076917 - DNA, 25 bp, Homo sapien
agagatgcaccccagttttaccaag

SEQ ID NO: 1076918 - DNA, 25 bp, Homo sapien
taggtccattagatccagagcagag

SEQ ID NO: 1076919 - DNA, 25 bp, Homo sapien
ctaggtccattagatccagagcaga

SEQ ID NO: 1076920 - DNA, 25 bp, Homo sapien
tactaggtccattagatccagagca

SEQ ID NO: 1076921 - DNA, 25 bp, Homo sapien
actaggtccattagatccagagcag

SEQ ID NO: 1076922 - DNA, 25 bp, Homo sapien
tattttagtttttctccagatgatg

SEQ ID NO: 1076923 - DNA, 25 bp, Homo sapien
tgctggttgtattttagtttttctc

SEQ ID NO: 1076924 - DNA, 25 bp, Homo sapien
ttagtttttctccagatgatggatg

SEQ ID NO: 1076925 - DNA, 25 bp, Homo sapien
ttttagtttttctccagatgatgga

SEQ ID NO: 1076926 - DNA, 25 bp, Homo sapien
ttcctgaagtaagctattatgttgc

SEQ ID NO: 1076927 - DNA, 25 bp, Homo sapien
caagttctgccctcgttcatatcga

SEQ ID NO: 1076928 - DNA, 25 bp, Homo sapien
tcatatcgaagctcattttcagctg

SEQ ID NO: 1076929 - DNA, 25 bp, Homo sapien
gctgagttgcatagaatctggagcc

SEQ ID NO: 1076930 - DNA, 25 bp, Homo sapien
tagaggaacttagattcgtttattc

SEQ ID NO: 1076931 - DNA, 25 bp, Homo sapien
catgaattatcaagtagaggaactt

SEQ ID NO: 1076932 - DNA, 25 bp, Homo sapien
taaagcatttgcccacaagagttac

SEQ ID NO: 1076933 - DNA, 25 bp, Homo sapien
cacatatttgtggatcctatcatga

SEQ ID NO: 1076934 - DNA, 25 bp, Homo sapien
taatcttctctgtatcattccagtt

SEQ ID NO: 1076935 - DNA, 25 bp, Homo sapien
atacggaacgcttcacaaatttgcg

SEQ ID NO: 1076936 - DNA, 25 bp, Homo sapien
ttagtatatgtgctgctaaagtgag

SEQ ID NO: 1076937 - DNA, 25 bp, Homo sapien
tgtcatccttgcacaggggccatgc

SEQ ID NO: 1076938 - DNA, 25 bp, Homo sapien
tactttatgactactaggtaaactg

SEQ ID NO: 1076939 - DNA, 25 bp, Homo sapien
tctcctgggtagtgtttagttgtct

SEQ ID NO: 1076940 - DNA, 25 bp, Homo sapien
tgactactaggtaaactgtatgttt

SEQ ID NO: 1076941 - DNA, 25 bp, Homo sapien
cccaaagccctaggattgtaggctt

SEQ ID NO: 1076942 - DNA, 25 bp, Homo sapien
tcttgggcctgtgatcaaagagtca

SEQ ID NO: 1076943 - DNA, 25 bp, Homo sapien
tactccacaggccaagaaaggtaaa

SEQ ID NO: 1076944 - DNA, 25 bp, Homo sapien
caaacactgttatggccaatgacct

SEQ ID NO: 1076945 - DNA, 25 bp, Homo sapien
cacttaaggttttggcgatgctggt

SEQ ID NO: 1076946 - DNA, 25 bp, Homo sapien
cagactagtctcacttttgagcaaa

SEQ ID NO: 1076947 - DNA, 25 bp, Homo sapien
tcaaaatctgacaagggcattgcaa

SEQ ID NO: 1076948 - DNA, 25 bp, Homo sapien
tacattagagtggatcaacaagcta

SEQ ID NO: 1076949 - DNA, 25 bp, Homo sapien
caaggaagtaaatgacagactagtc

SEQ ID NO: 1076950 - DNA, 25 bp, Homo sapien
tgcatcagcaactttagatttctcc

SEQ ID NO: 1076951 - DNA, 25 bp, Homo sapien
tgtgtttaagtacttccaactccag

SEQ ID NO: 1076952 - DNA, 25 bp, Homo sapien
tcctgaaccagcttttcctgtaggt

SEQ ID NO: 1076953 - DNA, 25 bp, Homo sapien
tctgccgtgagtgaagagcacatct

SEQ ID NO: 1076954 - DNA, 25 bp, Homo sapien
tgctttactttagcttcattttgtg

SEQ ID NO: 1076955 - DNA, 25 bp, Homo sapien
catgttctaatttccgctgcaggtc

SEQ ID NO: 1076956 - DNA, 25 bp, Homo sapien
tgtgagacagactttatgagcatgt

SEQ ID NO: 1076957 - DNA, 25 bp, Homo sapien
tctgaaatacaagtgtctgtgagac

SEQ ID NO: 1076958 - DNA, 25 bp, Homo sapien
tagcataagatgcaaagatgacgcc

SEQ ID NO: 1076959 - DNA, 25 bp, Homo sapien
gctagatatctgctgctcaccttgg

SEQ ID NO: 1076960 - DNA, 25 bp, Homo sapien
tacactttatcaaggttagaggcag

SEQ ID NO: 1076961 - DNA, 25 bp, Homo sapien
ttggcatgacgcaacagccaggcct

SEQ ID NO: 1076962 - DNA, 25 bp, Homo sapien
tgttgctgagaacaggtcatttcca

SEQ ID NO: 1076963 - DNA, 25 bp, Homo sapien
gagaacaggtcatttccagtagatt

SEQ ID NO: 1076964 - DNA, 25 bp, Homo sapien
cctgtgtaactcatctacgttctga

SEQ ID NO: 1076965 - DNA, 25 bp, Homo sapien
ctttatcttgtaaggttctcacttg

SEQ ID NO: 1076966 - DNA, 25 bp, Homo sapien
ttatcgtgaggacagcatcaagcca

SEQ ID NO: 1076967 - DNA, 25 bp, Homo sapien
gaagcatggtatcggcatctggtca

SEQ ID NO: 1076968 - DNA, 25 bp, Homo sapien
cactagcagatggataaaagggcag

SEQ ID NO: 1076969 - DNA, 25 bp, Homo sapien
aattctccactttgacgctgcagga

SEQ ID NO: 1076970 - DNA, 25 bp, Homo sapien
taatgagggatgcactccaatgacc

SEQ ID NO: 1076971 - DNA, 25 bp, Homo sapien
gaaagagtcaataggccccatgcaa

SEQ ID NO: 1076972 - DNA, 25 bp, Homo sapien
caatggtgcaatgcgtaggctccca

SEQ ID NO: 1076973 - DNA, 25 bp, Homo sapien
tatgtgcccacaggtttagtaccac

SEQ ID NO: 1076974 - DNA, 25 bp, Homo sapien
taacaatgatggcatgtccgtgcct

SEQ ID NO: 1076975 - DNA, 25 bp, Homo sapien
caatgatggcatgtccgtgcctgtc

SEQ ID NO: 1076976 - DNA, 25 bp, Homo sapien
gatggcatgtccgtgcctgtcactt

SEQ ID NO: 1076977 - DNA, 25 bp, Homo sapien
tggcatgtccgtgcctgtcacttgc

SEQ ID NO: 1076978 - DNA, 25 bp, Homo sapien
agaactctgacctgacaaaggtatg

SEQ ID NO: 1076979 - DNA, 25 bp, Homo sapien
gacctgacaaaggtatgatgttgaa

SEQ ID NO: 1076980 - DNA, 25 bp, Homo sapien
cctgacaaaggtatgatgttgaaga

SEQ ID NO: 1076981 - DNA, 25 bp, Homo sapien
ctctgacctgacaaaggtatgatgt

SEQ ID NO: 1076982 - DNA, 25 bp, Homo sapien
tgctgtagcttagatagcttctctg

SEQ ID NO: 1076983 - DNA, 25 bp, Homo sapien
ttcttcacgtagagcttccttctct

SEQ ID NO: 1076984 - DNA, 25 bp, Homo sapien
gacattaagcagcttcaataatcgc

SEQ ID NO: 1076985 - DNA, 25 bp, Homo sapien
ccttctcttgctgtagcttagatag

SEQ ID NO: 1076986 - DNA, 25 bp, Homo sapien
acttgactttttgaagcttgacttt

SEQ ID NO: 1076987 - DNA, 25 bp, Homo sapien
ttcatcttcaaattggttaattctc

SEQ ID NO: 1076988 - DNA, 25 bp, Homo sapien
cttcattagttaaacgatacttgac

SEQ ID NO: 1076989 - DNA, 25 bp, Homo sapien
taattctcttatctcgtagttctac

SEQ ID NO: 1076990 - DNA, 25 bp, Homo sapien
ggaagatatcgtccatttgttgctg

SEQ ID NO: 1076991 - DNA, 25 bp, Homo sapien
gcagtgatctggtcctgtattgcct

SEQ ID NO: 1076992 - DNA, 25 bp, Homo sapien
ctctggatggaagatatcgtccatt

SEQ ID NO: 1076993 - DNA, 25 bp, Homo sapien
ttgggcagtgatctggtcctgtatt

SEQ ID NO: 1076994 - DNA, 25 bp, Homo sapien
tattttctttatccatgtaaagtac

SEQ ID NO: 1076995 - DNA, 25 bp, Homo sapien
gtaattgcttattttctttatccat

SEQ ID NO: 1076996 - DNA, 25 bp, Homo sapien
cttattttctttatccatgtaaagt

SEQ ID NO: 1076997 - DNA, 25 bp, Homo sapien
tgcttattttctttatccatgtaaa

SEQ ID NO: 1076998 - DNA, 25 bp, Homo sapien
taattcgctctaagaagccaatctg

SEQ ID NO: 1076999 - DNA, 25 bp, Homo sapien
ctctcctctgcgaatatggatgctc

SEQ ID NO: 1077000 - DNA, 25 bp, Homo sapien
caatctgctgtgtgagacgaagact

SEQ ID NO: 1077001 - DNA, 25 bp, Homo sapien
ggatgctccttataattcgctctaa

SEQ ID NO: 1077002 - DNA, 25 bp, Homo sapien
ttgttgctggtgaagacctcagtgc

SEQ ID NO: 1077003 - DNA, 25 bp, Homo sapien
catctgctcagagtgtttccacttc

SEQ ID NO: 1077004 - DNA, 25 bp, Homo sapien
tctatgccaccattttggaacagga

SEQ ID NO: 1077005 - DNA, 25 bp, Homo sapien
tcaggaactgactcatcctcatgct

SEQ ID NO: 1077006 - DNA, 25 bp, Homo sapien
tacttcggattcaaggatgtcacta

SEQ ID NO: 1077007 - DNA, 25 bp, Homo sapien
tcattcactacttcggattcaagga

SEQ ID NO: 1077008 - DNA, 25 bp, Homo sapien
ctggagtttgataaaggcaatattt

SEQ ID NO: 1077009 - DNA, 25 bp, Homo sapien
cggattcaaggatgtcactaattgt

SEQ ID NO: 1077010 - DNA, 25 bp, Homo sapien
tgggatctgtggtaactcttctcaa

SEQ ID NO: 1077011 - DNA, 25 bp, Homo sapien
ttcagtatagctttaggcaccagtg

SEQ ID NO: 1077012 - DNA, 25 bp, Homo sapien
tgaagacttgcaaatgactctacca

SEQ ID NO: 1077013 - DNA, 25 bp, Homo sapien
aatgtcatggtccaccttttgtcca

SEQ ID NO: 1077014 - DNA, 25 bp, Homo sapien
gttgaattaaccctacatgtgctct

SEQ ID NO: 1077015 - DNA, 25 bp, Homo sapien
tttggtcaatacaaggcatctgagg

SEQ ID NO: 1077016 - DNA, 25 bp, Homo sapien
cctaaataaatcattgaactaaagt

SEQ ID NO: 1077017 - DNA, 25 bp, Homo sapien
gaactaaagtcaatattttggtcaa

SEQ ID NO: 1077018 - DNA, 25 bp, Homo sapien
actgatcctctcctcttggtctcct

SEQ ID NO: 1077019 - DNA, 25 bp, Homo sapien
atcctctcctcttggtctcctccaa

SEQ ID NO: 1077020 - DNA, 25 bp, Homo sapien
ttactgatcctctcctcttggtctc

SEQ ID NO: 1077021 - DNA, 25 bp, Homo sapien
tgatcctctcctcttggtctcctcc

SEQ ID NO: 1077022 - DNA, 25 bp, Homo sapien
tcgggagcgtgggattccggcgaac

SEQ ID NO: 1077023 - DNA, 25 bp, Homo sapien
aagtcgggagcgtgggattccggcg

SEQ ID NO: 1077024 - DNA, 25 bp, Homo sapien
gagcgtgggattccggcgaacctaa

SEQ ID NO: 1077025 - DNA, 25 bp, Homo sapien
agcagaagtcgggagcgtgggattc

SEQ ID NO: 1077026 - DNA, 25 bp, Homo sapien
ctgaccgccaatactgacatcaaag

SEQ ID NO: 1077027 - DNA, 25 bp, Homo sapien
caggacttgaatttgccaccgccat

SEQ ID NO: 1077028 - DNA, 25 bp, Homo sapien
accgccaatactgacatcaaagaac

SEQ ID NO: 1077029 - DNA, 25 bp, Homo sapien
tgaccgccaatactgacatcaaaga

SEQ ID NO: 1077030 - DNA, 25 bp, Homo sapien
gagtccgctctctctgggtgagttc

SEQ ID NO: 1077031 - DNA, 25 bp, Homo sapien
tgcctagccccgagcagtttccctt

SEQ ID NO: 1077032 - DNA, 25 bp, Homo sapien
gcagtttcccttcggcgcaggtgtg

SEQ ID NO: 1077033 - DNA, 25 bp, Homo sapien
cggtaggttcgggtgcaatttcact

SEQ ID NO: 1077034 - DNA, 25 bp, Homo sapien
agaccatgagggcttcacggagcag

SEQ ID NO: 1077035 - DNA, 25 bp, Homo sapien
gatgggctgacccaccaccctgccg

SEQ ID NO: 1077036 - DNA, 25 bp, Homo sapien
gggagagtgtcagaaggcccagtcc

SEQ ID NO: 1077037 - DNA, 25 bp, Homo sapien
ctgcaatcagcgggagagtgtcaga

SEQ ID NO: 1077038 - DNA, 25 bp, Homo sapien
gccgtcttaggcacaacgtctgcaa

SEQ ID NO: 1077039 - DNA, 25 bp, Homo sapien
taaagttctcggccgtcttaggcac

SEQ ID NO: 1077040 - DNA, 25 bp, Homo sapien
ggcacaacgtctgcaaagagctcga

SEQ ID NO: 1077041 - DNA, 25 bp, Homo sapien
acgtctgcaaagagctcgatcttca

SEQ ID NO: 1077042 - DNA, 25 bp, Homo sapien
cagcaggtggttcaccgataccctc

SEQ ID NO: 1077043 - DNA, 25 bp, Homo sapien
cagcaatcattcaaggccagcaggt

SEQ ID NO: 1077044 - DNA, 25 bp, Homo sapien
ctatcactgtcaccagcaatcattc

SEQ ID NO: 1077045 - DNA, 25 bp, Homo sapien
tggttcaccgataccctcactgcag

SEQ ID NO: 1077046 - DNA, 25 bp, Homo sapien
tgcactggagccaaaaggactctcc

SEQ ID NO: 1077047 - DNA, 25 bp, Homo sapien
gcctttccagtttaccatgcactgg

SEQ ID NO: 1077048 - DNA, 25 bp, Homo sapien
ctcctaaagatggttgacagacata

SEQ ID NO: 1077049 - DNA, 25 bp, Homo sapien
aaggactctcctaaagatggttgac

SEQ ID NO: 1077050 - DNA, 25 bp, Homo sapien
ggaaggtgcttcctttgtatcctat

SEQ ID NO: 1077051 - DNA, 25 bp, Homo sapien
tgtggaaggtgcttcctttgtatcc

SEQ ID NO: 1077052 - DNA, 25 bp, Homo sapien
gtatcctattggaaccccatctttc

SEQ ID NO: 1077053 - DNA, 25 bp, Homo sapien
ggtgcttcctttgtatcctattgga

SEQ ID NO: 1077054 - DNA, 25 bp, Homo sapien
ccaccctgaatcatgaaatccttta

SEQ ID NO: 1077055 - DNA, 25 bp, Homo sapien
aacaaaatctccaccctgaatcatg

SEQ ID NO: 1077056 - DNA, 25 bp, Homo sapien
attaacaaaatctccaccctgaatc

SEQ ID NO: 1077057 - DNA, 25 bp, Homo sapien
aaatctccaccctgaatcatgaaat

SEQ ID NO: 1077058 - DNA, 25 bp, Homo sapien
ctttgataggaaaggaatagtactt

SEQ ID NO: 1077059 - DNA, 25 bp, Homo sapien
ttgataggaaaggaatagtacttac

SEQ ID NO: 1077060 - DNA, 25 bp, Homo sapien
ggtctttgataggaaaggaatagta

SEQ ID NO: 1077061 - DNA, 25 bp, Homo sapien
tctttgataggaaaggaatagtact

SEQ ID NO: 1077062 - DNA, 25 bp, Homo sapien
aaatactggcgactccagtaccatc

SEQ ID NO: 1077063 - DNA, 25 bp, Homo sapien
tggagctgagtgtctaagtttaaaa

SEQ ID NO: 1077064 - DNA, 25 bp, Homo sapien
ctggagctgagtgtctaagtttaaa

SEQ ID NO: 1077065 - DNA, 25 bp, Homo sapien
ggtaaatactggcgactccagtacc

SEQ ID NO: 1077066 - DNA, 25 bp, Homo sapien
tgcagtaagtttccccggccatgtt

SEQ ID NO: 1077067 - DNA, 25 bp, Homo sapien
cagtaagtttccccggccatgttag

SEQ ID NO: 1077068 - DNA, 25 bp, Homo sapien
gcagtaagtttccccggccatgtta

SEQ ID NO: 1077069 - DNA, 25 bp, Homo sapien
ctgcagtaagtttccccggccatgt

SEQ ID NO: 1077070 - DNA, 25 bp, Homo sapien
ccatttgtacttggaccactgttcg

SEQ ID NO: 1077071 - DNA, 25 bp, Homo sapien
catttgtacttggaccactgttcgc

SEQ ID NO: 1077072 - DNA, 25 bp, Homo sapien
gccatttgtacttggaccactgttc

SEQ ID NO: 1077073 - DNA, 25 bp, Homo sapien
accatgagacaggagtaggacttac

SEQ ID NO: 1077074 - DNA, 25 bp, Homo sapien
ttacacaggttgagctttcttggta

SEQ ID NO: 1077075 - DNA, 25 bp, Homo sapien
tggaccatgagacaggagtaggact

SEQ ID NO: 1077076 - DNA, 25 bp, Homo sapien
caggttgagctttcttggtaagagt

SEQ ID NO: 1077077 - DNA, 25 bp, Homo sapien
tcatcactagaagtccatcgatgat

SEQ ID NO: 1077078 - DNA, 25 bp, Homo sapien
catcactagaagtccatcgatgatt

SEQ ID NO: 1077079 - DNA, 25 bp, Homo sapien
tctcatcactagaagtccatcgatg

SEQ ID NO: 1077080 - DNA, 25 bp, Homo sapien
tcactagaagtccatcgatgatttt

SEQ ID NO: 1077081 - DNA, 25 bp, Homo sapien
gaggccaaacctcagtgttggccag

SEQ ID NO: 1077082 - DNA, 25 bp, Homo sapien
tggccagacaggctaacttaggtgg

SEQ ID NO: 1077083 - DNA, 25 bp, Homo sapien
ttatcaagtaggcaacaggatcatc

SEQ ID NO: 1077084 - DNA, 25 bp, Homo sapien
taggcaacaggatcatcagaggcca

SEQ ID NO: 1077085 - DNA, 25 bp, Homo sapien
acactgcgagatcaccacaggtagc

SEQ ID NO: 1077086 - DNA, 25 bp, Homo sapien
aggctggaagatgcaaggcattcac

SEQ ID NO: 1077087 - DNA, 25 bp, Homo sapien
agcaggcagtggtaattacgggtaa

SEQ ID NO: 1077088 - DNA, 25 bp, Homo sapien
aatgagtccatgtaggctggaagat

SEQ ID NO: 1077089 - DNA, 25 bp, Homo sapien
agaaatgagtccatgtaggctggaa

SEQ ID NO: 1077090 - DNA, 25 bp, Homo sapien
tgtccccctctctgcagctagcatg

SEQ ID NO: 1077091 - DNA, 25 bp, Homo sapien
gagacatctttcaattctttgtccc

SEQ ID NO: 1077092 - DNA, 25 bp, Homo sapien
tttccatgagctcctgaaaggagac

SEQ ID NO: 1077093 - DNA, 25 bp, Homo sapien
cctgaaaggagacatctttcaattc

SEQ ID NO: 1077094 - DNA, 25 bp, Homo sapien
tacttggcaatgtcactcatattac

SEQ ID NO: 1077095 - DNA, 25 bp, Homo sapien
cactcatattactagtgatcacctc

SEQ ID NO: 1077096 - DNA, 25 bp, Homo sapien
tggaagtgatggatttctcccttgt

SEQ ID NO: 1077097 - DNA, 25 bp, Homo sapien
tactagtgatcacctctgggaatgt

SEQ ID NO: 1077098 - DNA, 25 bp, Homo sapien
ggaggagaggcaatggaaatgggtg

SEQ ID NO: 1077099 - DNA, 25 bp, Homo sapien
tctaagtgaagatatattggtgttc

SEQ ID NO: 1077100 - DNA, 25 bp, Homo sapien
gaggaggagaggcaatggaaatggg

SEQ ID NO: 1077101 - DNA, 25 bp, Homo sapien
tatattggtgttcaaggtattatct

SEQ ID NO: 1077102 - DNA, 25 bp, Homo sapien
ggcaaaggccctgatggacatacat

SEQ ID NO: 1077103 - DNA, 25 bp, Homo sapien
tgtattatgttacttgtgtaaacca

SEQ ID NO: 1077104 - DNA, 25 bp, Homo sapien
cccaaaattagatgggcaaggcaaa

SEQ ID NO: 1077105 - DNA, 25 bp, Homo sapien
gggctttcactttatctgtttggtg

SEQ ID NO: 1077106 - DNA, 25 bp, Homo sapien
cctctggtagtgatcagtggtcagt

SEQ ID NO: 1077107 - DNA, 25 bp, Homo sapien
cagcagccattgaagagggagagca

SEQ ID NO: 1077108 - DNA, 25 bp, Homo sapien
catctggctgaacaagagaggtcca

SEQ ID NO: 1077109 - DNA, 25 bp, Homo sapien
agcatttgctcacacgagttccccg

SEQ ID NO: 1077110 - DNA, 25 bp, Homo sapien
ggttcatttatgctatacataacca

SEQ ID NO: 1077111 - DNA, 25 bp, Homo sapien
tgctatacataaccaaattcatcat

SEQ ID NO: 1077112 - DNA, 25 bp, Homo sapien
tctataactaaagttgtacagacca

SEQ ID NO: 1077113 - DNA, 25 bp, Homo sapien
ctaaagttgtacagaccaggcatgg

SEQ ID NO: 1077114 - DNA, 25 bp, Homo sapien
tagaaatcttgccaacacatccaga

SEQ ID NO: 1077115 - DNA, 25 bp, Homo sapien
cctttgtactggactggaatggact

SEQ ID NO: 1077116 - DNA, 25 bp, Homo sapien
tctacgtgtgtaagacttggctgca

SEQ ID NO: 1077117 - DNA, 25 bp, Homo sapien
gaacatacagtgtcacatgcccagc

SEQ ID NO: 1077118 - DNA, 25 bp, Homo sapien
gctgtgggcaggctcctgggaagtg

SEQ ID NO: 1077119 - DNA, 25 bp, Homo sapien
cagctgtgggcaggctcctgggaag

SEQ ID NO: 1077120 - DNA, 25 bp, Homo sapien
cacagctgtgggcaggctcctggga

SEQ ID NO: 1077121 - DNA, 25 bp, Homo sapien
ctgatgttagccacagctgtgggca

SEQ ID NO: 1077122 - DNA, 25 bp, Homo sapien
gtggagggatcagcaatggattcac

SEQ ID NO: 1077123 - DNA, 25 bp, Homo sapien
gggagcacccactgtctgggcttag

SEQ ID NO: 1077124 - DNA, 25 bp, Homo sapien
aggtggagggatcagcaatggattc

SEQ ID NO: 1077125 - DNA, 25 bp, Homo sapien
cacccactgtctgggcttagacctg

SEQ ID NO: 1077126 - DNA, 25 bp, Homo sapien
ttgcttcaacaagttctcagtccag

SEQ ID NO: 1077127 - DNA, 25 bp, Homo sapien
gacctaagctctgtcataccaggca

SEQ ID NO: 1077128 - DNA, 25 bp, Homo sapien
gtgccaggacctaagctctgtcata

SEQ ID NO: 1077129 - DNA, 25 bp, Homo sapien
tcagcatgatccttgcttcaacaag

SEQ ID NO: 1077130 - DNA, 25 bp, Homo sapien
ctccagtggacaatgggtactggca

SEQ ID NO: 1077131 - DNA, 25 bp, Homo sapien
ttgctccagtggacaatgggtactg

SEQ ID NO: 1077132 - DNA, 25 bp, Homo sapien
ccagtggacaatgggtactggcatc

SEQ ID NO: 1077133 - DNA, 25 bp, Homo sapien
gtggacaatgggtactggcatcgta

SEQ ID NO: 1077134 - DNA, 25 bp, Homo sapien
agatactattgtccccctcctcttg

SEQ ID NO: 1077135 - DNA, 25 bp, Homo sapien
taagtacacccagatactattgtcc

SEQ ID NO: 1077136 - DNA, 25 bp, Homo sapien
taagagaacagagtaagtacaccca

SEQ ID NO: 1077137 - DNA, 25 bp, Homo sapien
cagagtaagtacacccagatactat

SEQ ID NO: 1077138 - DNA, 25 bp, Homo sapien
tggaggtccagaacaaaaagcaatc

SEQ ID NO: 1077139 - DNA, 25 bp, Homo sapien
taattatgcaaaggagtagggtccc

SEQ ID NO: 1077140 - DNA, 25 bp, Homo sapien
cttccttgcaggtttcggtcccaga

SEQ ID NO: 1077141 - DNA, 25 bp, Homo sapien
cacactctgggtttatggccttgaa

SEQ ID NO: 1077142 - DNA, 25 bp, Homo sapien
agctattctctacactcctaatcct

SEQ ID NO: 1077143 - DNA, 25 bp, Homo sapien
gcaaagttgggcagtaaattacaaa

SEQ ID NO: 1077144 - DNA, 25 bp, Homo sapien
aagggtagaacaggtcagattctca

SEQ ID NO: 1077145 - DNA, 25 bp, Homo sapien
tcccaaaagggtagaacaggtcaga

SEQ ID NO: 1077146 - DNA, 25 bp, Homo sapien
gacatcccatatgagacaatgctcc

SEQ ID NO: 1077147 - DNA, 25 bp, Homo sapien
ggaaggggacatcccatatgagaca

SEQ ID NO: 1077148 - DNA, 25 bp, Homo sapien
tatgagacaatgctcccagctattc

SEQ ID NO: 1077149 - DNA, 25 bp, Homo sapien
gcagagacatggaggtcagtgtggg

SEQ ID NO: 1077150 - DNA, 25 bp, Homo sapien
ttatcttactcaagaacaccaccaa

SEQ ID NO: 1077151 - DNA, 25 bp, Homo sapien
gtccagattatcttactcaagaaca

SEQ ID NO: 1077152 - DNA, 25 bp, Homo sapien
gggccagtccagattatcttactca

SEQ ID NO: 1077153 - DNA, 25 bp, Homo sapien
cagattatcttactcaagaacacca

SEQ ID NO: 1077154 - DNA, 25 bp, Homo sapien
ttaaagacaatcttggattctgaat

SEQ ID NO: 1077155 - DNA, 25 bp, Homo sapien
ggattctgaatctctgacacttcca

SEQ ID NO: 1077156 - DNA, 25 bp, Homo sapien
aaacttaaagacaatcttggattct

SEQ ID NO: 1077157 - DNA, 25 bp, Homo sapien
tacagttgaaaacttaaagacaatc

SEQ ID NO: 1077158 - DNA, 25 bp, Homo sapien
gctcagttcttccaggtgttgggga

SEQ ID NO: 1077159 - DNA, 25 bp, Homo sapien
ttatttagcatctattagattccag

SEQ ID NO: 1077160 - DNA, 25 bp, Homo sapien
agctcagttcttccaggtgttgggg

SEQ ID NO: 1077161 - DNA, 25 bp, Homo sapien
ttagcatctattagattccagaagc

SEQ ID NO: 1077162 - DNA, 25 bp, Homo sapien
gcttgtaactactggctgcaggata

SEQ ID NO: 1077163 - DNA, 25 bp, Homo sapien
caggtgcttgtaactactggctgca

SEQ ID NO: 1077164 - DNA, 25 bp, Homo sapien
cttccaggtgcttgtaactactggc

SEQ ID NO: 1077165 - DNA, 25 bp, Homo sapien
taactactggctgcaggatactgca

SEQ ID NO: 1077166 - DNA, 25 bp, Homo sapien
tgcggagtggagaatgggttgcaga

SEQ ID NO: 1077167 - DNA, 25 bp, Homo sapien
gaagagcaattttagagtcataagt

SEQ ID NO: 1077168 - DNA, 25 bp, Homo sapien
agcaattttagagtcataagtaggg

SEQ ID NO: 1077169 - DNA, 25 bp, Homo sapien
cggagtggagaatgggttgcagagg

SEQ ID NO: 1077170 - DNA, 25 bp, Homo sapien
cagtaagactcgaatgtgacattgg

SEQ ID NO: 1077171 - DNA, 25 bp, Homo sapien
cacggtaaatactccagagctgcaa

SEQ ID NO: 1077172 - DNA, 25 bp, Homo sapien
ctcgggaaatgcagtcaagtagttc

SEQ ID NO: 1077173 - DNA, 25 bp, Homo sapien
tttccgcgcacagggtacaggcgag

SEQ ID NO: 1077174 - DNA, 25 bp, Homo sapien
ggatggaatagttcgcgagtcagtt

SEQ ID NO: 1077175 - DNA, 25 bp, Homo sapien
ttttaagcgtctactatcggctggg

SEQ ID NO: 1077176 - DNA, 25 bp, Homo sapien
tcttttttaagcgtctactatcggc

SEQ ID NO: 1077177 - DNA, 25 bp, Homo sapien
tagttcgcgagtcagtttctgcctt

SEQ ID NO: 1077178 - DNA, 25 bp, Homo sapien
tattgaacaagctagcctgttttgt

SEQ ID NO: 1077179 - DNA, 25 bp, Homo sapien
gtttcacaaacgataaaattgaggc

SEQ ID NO: 1077180 - DNA, 25 bp, Homo sapien
gcaacagccacgtgatagagggatt

SEQ ID NO: 1077181 - DNA, 25 bp, Homo sapien
gagggattactatccacgtttcaca

SEQ ID NO: 1077182 - DNA, 25 bp, Homo sapien
cacgcaggctatggcagcccgggtt

SEQ ID NO: 1077183 - DNA, 25 bp, Homo sapien
catgtttagggcgagggtgtgctcc

SEQ ID NO: 1077184 - DNA, 25 bp, Homo sapien
ccttttgtcggagcagtcaccttgg

SEQ ID NO: 1077185 - DNA, 25 bp, Homo sapien
agtcaccttggagggaccacgcagg

SEQ ID NO: 1077186 - DNA, 25 bp, Homo sapien
ctggcgggccccacgttcagggttg

SEQ ID NO: 1077187 - DNA, 25 bp, Homo sapien
gacgggcagaaggaacgtgacttcc

SEQ ID NO: 1077188 - DNA, 25 bp, Homo sapien
gaacgtgacttccacgaggcagccg

SEQ ID NO: 1077189 - DNA, 25 bp, Homo sapien
gccccacgttcagggttgtgtctcg

SEQ ID NO: 1077190 - DNA, 25 bp, Homo sapien
taggcgttgttcactggccagtggt

SEQ ID NO: 1077191 - DNA, 25 bp, Homo sapien
ttttatcagtcctccattctcattg

SEQ ID NO: 1077192 - DNA, 25 bp, Homo sapien
caatccctagcttctattggctaat

SEQ ID NO: 1077193 - DNA, 25 bp, Homo sapien
tctcattggacctttggcggctaat

SEQ ID NO: 1077194 - DNA, 25 bp, Homo sapien
gacaggcgggataagccctacgagc

SEQ ID NO: 1077195 - DNA, 25 bp, Homo sapien
gggataagccctacgagcgacccgc

SEQ ID NO: 1077196 - DNA, 25 bp, Homo sapien
aatggcgggacaggcgggataagcc

SEQ ID NO: 1077197 - DNA, 25 bp, Homo sapien
atcgaactagcgagaatggcgggac

SEQ ID NO: 1077198 - DNA, 25 bp, Homo sapien
ctctggggtccgctctccgctcccg

SEQ ID NO: 1077199 - DNA, 25 bp, Homo sapien
agggctctctggggtccgctctccg

SEQ ID NO: 1077200 - DNA, 25 bp, Homo sapien
ggctctctggggtccgctctccgct

SEQ ID NO: 1077201 - DNA, 25 bp, Homo sapien
ctctctggggtccgctctccgctcc

SEQ ID NO: 1077202 - DNA, 25 bp, Homo sapien
ggtgatggtgactggggccggctgc

SEQ ID NO: 1077203 - DNA, 25 bp, Homo sapien
tggtgactggggccggctgcggcag

SEQ ID NO: 1077204 - DNA, 25 bp, Homo sapien
ggttgcggtgatggtgactggggcc

SEQ ID NO: 1077205 - DNA, 25 bp, Homo sapien
tgatggtgactggggccggctgcgg

SEQ ID NO: 1077206 - DNA, 25 bp, Homo sapien
cggcgggcggctgctgggtctcggc

SEQ ID NO: 1077207 - DNA, 25 bp, Homo sapien
cttggtgtcggcggcgctgagggcg

SEQ ID NO: 1077208 - DNA, 25 bp, Homo sapien
gctgctgggtctcggcctcgctgct

SEQ ID NO: 1077209 - DNA, 25 bp, Homo sapien
ggcggctgctgggtctcggcctcgc

SEQ ID NO: 1077210 - DNA, 25 bp, Homo sapien
cgctccctgcgccgctgcccgtagt

SEQ ID NO: 1077211 - DNA, 25 bp, Homo sapien
ccctgcgccgctgcccgtagtgccg

SEQ ID NO: 1077212 - DNA, 25 bp, Homo sapien
gtgaggccgcccgggccaccgctcc

SEQ ID NO: 1077213 - DNA, 25 bp, Homo sapien
tgaggccgcccgggccaccgctccc

SEQ ID NO: 1077214 - DNA, 25 bp, Homo sapien
gtccccgccggcaggcgccgccgat

SEQ ID NO: 1077215 - DNA, 25 bp, Homo sapien
tgtccccgccggcaggcgccgccga

SEQ ID NO: 1077216 - DNA, 25 bp, Homo sapien
cgatgaccttcttgtccccgccggc

SEQ ID NO: 1077217 - DNA, 25 bp, Homo sapien
tgaccttcttgtccccgccggcagg

SEQ ID NO: 1077218 - DNA, 25 bp, Homo sapien
gctgggctgcccgagggccccaccc

SEQ ID NO: 1077219 - DNA, 25 bp, Homo sapien
ggttccgctgctgggctgcccgagg

SEQ ID NO: 1077220 - DNA, 25 bp, Homo sapien
ctaacggttccgctgctgggctgcc

SEQ ID NO: 1077221 - DNA, 25 bp, Homo sapien
acggttccgctgctgggctgcccga

SEQ ID NO: 1077222 - DNA, 25 bp, Homo sapien
cctccgagcacacgcggaagggagc

SEQ ID NO: 1077223 - DNA, 25 bp, Homo sapien
gctccggcctgcgtaggcggtgcgc

SEQ ID NO: 1077224 - DNA, 25 bp, Homo sapien
gggtgacgcgaacaacggcgtgcgg

SEQ ID NO: 1077225 - DNA, 25 bp, Homo sapien
cgcggacggagagcacgtgagggaa

SEQ ID NO: 1077226 - DNA, 25 bp, Homo sapien
gccgccgccgcacacgtgggtgagt

SEQ ID NO: 1077227 - DNA, 25 bp, Homo sapien
cccgggtgcggggccacgcagtcgc

SEQ ID NO: 1077228 - DNA, 25 bp, Homo sapien
cttgggcatccggtccctcgcacgc

SEQ ID NO: 1077229 - DNA, 25 bp, Homo sapien
ggcatccggtccctcgcacgccggc

SEQ ID NO: 1077230 - DNA, 25 bp, Homo sapien
cggcttgggcatccggtccctcgca

SEQ ID NO: 1077231 - DNA, 25 bp, Homo sapien
gcccggcttgggcatccggtccctc

SEQ ID NO: 1077232 - DNA, 25 bp, Homo sapien
gaaaacaaagcaaaacaagccacga

SEQ ID NO: 1077233 - DNA, 25 bp, Homo sapien
aaacaaagcaaaacaagccacgatt

SEQ ID NO: 1077234 - DNA, 25 bp, Homo sapien
agaaaacaaagcaaaacaagccacg

SEQ ID NO: 1077235 - DNA, 25 bp, Homo sapien
acaaagcaaaacaagccacgattac

SEQ ID NO: 1077236 - DNA, 25 bp, Homo sapien
tgttgatgaaaccatatccgttcct

SEQ ID NO: 1077237 - DNA, 25 bp, Homo sapien
gatgaaaccatatccgttccttaca

SEQ ID NO: 1077238 - DNA, 25 bp, Homo sapien
aaccatatccgttccttacattgaa

SEQ ID NO: 1077239 - DNA, 25 bp, Homo sapien
gaaaccatatccgttccttacattg

SEQ ID NO: 1077240 - DNA, 25 bp, Homo sapien
tactgtctaatcaaagcatctggga

SEQ ID NO: 1077241 - DNA, 25 bp, Homo sapien
tattacatcttcctagaccatgggt

SEQ ID NO: 1077242 - DNA, 25 bp, Homo sapien
tttacttatgtggaaatacaggccc

SEQ ID NO: 1077243 - DNA, 25 bp, Homo sapien
ggagtagttttagccagaaggtcac

SEQ ID NO: 1077244 - DNA, 25 bp, Homo sapien
tacaaatacatcttccttggtgtca

SEQ ID NO: 1077245 - DNA, 25 bp, Homo sapien
ctggtgtacaaatacatcttccttg

SEQ ID NO: 1077246 - DNA, 25 bp, Homo sapien
gtgtacaaatacatcttccttggtg

SEQ ID NO: 1077247 - DNA, 25 bp, Homo sapien
caaatacatcttccttggtgtcatt

SEQ ID NO: 1077248 - DNA, 25 bp, Homo sapien
tcagaagtgcaaatatctacacaag

SEQ ID NO: 1077249 - DNA, 25 bp, Homo sapien
tgcaaatatctacacaagcactcac

SEQ ID NO: 1077250 - DNA, 25 bp, Homo sapien
gaagtgcaaatatctacacaagcac

SEQ ID NO: 1077251 - DNA, 25 bp, Homo sapien
aatcagaagtgcaaatatctacaca

SEQ ID NO: 1077252 - DNA, 25 bp, Homo sapien
catttccacgtatacatttttaagc

SEQ ID NO: 1077253 - DNA, 25 bp, Homo sapien
gaaatgtctaggataattaagtcaa

SEQ ID NO: 1077254 - DNA, 25 bp, Homo sapien
tgtctaggataattaagtcaactct

SEQ ID NO: 1077255 - DNA, 25 bp, Homo sapien
gctactactcctgtcgtaagtaaat

SEQ ID NO: 1077256 - DNA, 25 bp, Homo sapien
tttagaatcatggaataatctgttc

SEQ ID NO: 1077257 - DNA, 25 bp, Homo sapien
tgttcaactttagaatcatggaata

SEQ ID NO: 1077258 - DNA, 25 bp, Homo sapien
ttaatgcagtgagtttgactcaaca

SEQ ID NO: 1077259 - DNA, 25 bp, Homo sapien
gttcatctgaaattaggtataaata

SEQ ID NO: 1077260 - DNA, 25 bp, Homo sapien
tacaggtacacctaaaagcctttga

SEQ ID NO: 1077261 - DNA, 25 bp, Homo sapien
gatttgtccctacaggtacacctaa

SEQ ID NO: 1077262 - DNA, 25 bp, Homo sapien
gattatggagatttgtccctacagg

SEQ ID NO: 1077263 - DNA, 25 bp, Homo sapien
tcttatttacccttgattatggaga

SEQ ID NO: 1077264 - DNA, 25 bp, Homo sapien
tgacagcccttcctatgaaacatgc

SEQ ID NO: 1077265 - DNA, 25 bp, Homo sapien
agtacattcaatgtagcctacagca

SEQ ID NO: 1077266 - DNA, 25 bp, Homo sapien
tacttagggagaaagttcactatgc

SEQ ID NO: 1077267 - DNA, 25 bp, Homo sapien
tacaaagcaccaacctatgacagcc

SEQ ID NO: 1077268 - DNA, 25 bp, Homo sapien
ctgattgggtttgggtgtactagaa

SEQ ID NO: 1077269 - DNA, 25 bp, Homo sapien
aatactgtgtaggacacttcagtga

SEQ ID NO: 1077270 - DNA, 25 bp, Homo sapien
aaattgatatagcttcctccttgtc

SEQ ID NO: 1077271 - DNA, 25 bp, Homo sapien
ggtttgggtgtactagaaattgata

SEQ ID NO: 1077272 - DNA, 25 bp, Homo sapien
gaatctgaggccaattaagtgaagc

SEQ ID NO: 1077273 - DNA, 25 bp, Homo sapien
gacaggacaatcaacgaatctgagg

SEQ ID NO: 1077274 - DNA, 25 bp, Homo sapien
taagacctgagcagccaaagtccca

SEQ ID NO: 1077275 - DNA, 25 bp, Homo sapien
ggtggcaccttgtgaatcagtacaa

SEQ ID NO: 1077276 - DNA, 25 bp, Homo sapien
gaattcaataaatcttgtattagag

SEQ ID NO: 1077277 - DNA, 25 bp, Homo sapien
cccagaattcaataaatcttgtatt

SEQ ID NO: 1077278 - DNA, 25 bp, Homo sapien
tccccagaattcaataaatcttgta

SEQ ID NO: 1077279 - DNA, 25 bp, Homo sapien
cagaattcaataaatcttgtattag

SEQ ID NO: 1077280 - DNA, 25 bp, Homo sapien
cagtttagatgacaggcgagtttgg

SEQ ID NO: 1077281 - DNA, 25 bp, Homo sapien
tctatcccctgaggactgcacttaa

SEQ ID NO: 1077282 - DNA, 25 bp, Homo sapien
taacaaatgaggatatccatctatc

SEQ ID NO: 1077283 - DNA, 25 bp, Homo sapien
ggtggccccacactgcgtcagttta

SEQ ID NO: 1077284 - DNA, 25 bp, Homo sapien
tcaacaacatcaaactccacagtct

SEQ ID NO: 1077285 - DNA, 25 bp, Homo sapien
agtctctccatctcctacactgcga

SEQ ID NO: 1077286 - DNA, 25 bp, Homo sapien
tcctggggttattcttctttatggc

SEQ ID NO: 1077287 - DNA, 25 bp, Homo sapien
atctcctacactgcgaaggtacttc

SEQ ID NO: 1077288 - DNA, 25 bp, Homo sapien
ctttcaaaaggaaatcagaacattt

SEQ ID NO: 1077289 - DNA, 25 bp, Homo sapien
aggaaatcagaacactttcaacact

SEQ ID NO: 1077290 - DNA, 25 bp, Homo sapien
gcaactgcgtgaccaggggtgcaca

SEQ ID NO: 1077291 - DNA, 25 bp, Homo sapien
gccattacatattgatagtgacaaa

SEQ ID NO: 1077292 - DNA, 25 bp, Homo sapien
agtaaggtgggaaccttcgcctgcg

SEQ ID NO: 1077293 - DNA, 25 bp, Homo sapien
agcgtctataatggttacggtctgc

SEQ ID NO: 1077294 - DNA, 25 bp, Homo sapien
ccctgcacaggagggttggaatact

SEQ ID NO: 1077295 - DNA, 25 bp, Homo sapien
gaggacccctacgacgtggatagcg

SEQ ID NO: 1077296 - DNA, 25 bp, Homo sapien
ctatatccccgatacatattctgcc

SEQ ID NO: 1077297 - DNA, 25 bp, Homo sapien
cgtggtctatatccccgatacatat

SEQ ID NO: 1077298 - DNA, 25 bp, Homo sapien
aatcgtggtctatatccccgataca

SEQ ID NO: 1077299 - DNA, 25 bp, Homo sapien
cccgatacatattctgcctcactgg

SEQ ID NO: 1077300 - DNA, 25 bp, Homo sapien
caagactgcttgagtaacacagtgc

SEQ ID NO: 1077301 - DNA, 25 bp, Homo sapien
gagcctgatgcccaaatggctagaa

SEQ ID NO: 1077302 - DNA, 25 bp, Homo sapien
tgtcttcccattaacacatgcgtgc

SEQ ID NO: 1077303 - DNA, 25 bp, Homo sapien
tattcatctcactccaaggttgggc

SEQ ID NO: 1077304 - DNA, 25 bp, Homo sapien
cacacccaccagtgtaaccagttgg

SEQ ID NO: 1077305 - DNA, 25 bp, Homo sapien
tgaacggtgtcaaacttaagaatga

SEQ ID NO: 1077306 - DNA, 25 bp, Homo sapien
tcacaactaactcaccatgtctggc

SEQ ID NO: 1077307 - DNA, 25 bp, Homo sapien
ctgcaatgaacggtgtcaaacttaa

SEQ ID NO: 1077308 - DNA, 25 bp, Homo sapien
ctgggcgtctgcgtcggtaattgaa

SEQ ID NO: 1077309 - DNA, 25 bp, Homo sapien
gtctgcgtcggtaattgaagttgcg

SEQ ID NO: 1077310 - DNA, 25 bp, Homo sapien
ttttctgggcgtctgcgtcggtaat

SEQ ID NO: 1077311 - DNA, 25 bp, Homo sapien
gctggtggatcggctgcttttgtct

SEQ ID NO: 1077312 - DNA, 25 bp, Homo sapien
gatggtagagatggtaagccggcat

SEQ ID NO: 1077313 - DNA, 25 bp, Homo sapien
tgatggtagagatggtaagccggca

SEQ ID NO: 1077314 - DNA, 25 bp, Homo sapien
ccggatgatggtagagatggtaagc

SEQ ID NO: 1077315 - DNA, 25 bp, Homo sapien
gatgatggtagagatggtaagccgg

SEQ ID NO: 1077316 - DNA, 25 bp, Homo sapien
acctctcgatatcatgtaaaaagcg

SEQ ID NO: 1077317 - DNA, 25 bp, Homo sapien
ttttggagggaacaacaatcacgta

SEQ ID NO: 1077318 - DNA, 25 bp, Homo sapien
tgagctaaagtaacaagaacgtaat

SEQ ID NO: 1077319 - DNA, 25 bp, Homo sapien
gataaaccacgtgtcattctaggag

SEQ ID NO: 1077320 - DNA, 25 bp, Homo sapien
gttctatttatctggtcaacgggca

SEQ ID NO: 1077321 - DNA, 25 bp, Homo sapien
taataaaaaccccatgctgcataga

SEQ ID NO: 1077322 - DNA, 25 bp, Homo sapien
acgggcaaaaagcaagcactttagg

SEQ ID NO: 1077323 - DNA, 25 bp, Homo sapien
agcaagcactttaggtcttcagctc

SEQ ID NO: 1077324 - DNA, 25 bp, Homo sapien
aatatttgatgaccacaccaggcag

SEQ ID NO: 1077325 - DNA, 25 bp, Homo sapien
tagactgggtcaagctaagggtcct

SEQ ID NO: 1077326 - DNA, 25 bp, Homo sapien
taatttttagtatgggcccacaggc

SEQ ID NO: 1077327 - DNA, 25 bp, Homo sapien
caaagagttagtcccaagcaggaga

SEQ ID NO: 1077328 - DNA, 25 bp, Homo sapien
tgcctgtattcagcagttacatgct

SEQ ID NO: 1077329 - DNA, 25 bp, Homo sapien
tctgtacctcttctgtgcttagaca

SEQ ID NO: 1077330 - DNA, 25 bp, Homo sapien
ggtttgcatacatactcaatacctt

SEQ ID NO: 1077331 - DNA, 25 bp, Homo sapien
aattcctggtctcccaagatgctgg

SEQ ID NO: 1077332 - DNA, 25 bp, Homo sapien
tagacaaatgcgatcatattaaact

SEQ ID NO: 1077333 - DNA, 25 bp, Homo sapien
taatgagatatgatcttaccctagg

SEQ ID NO: 1077334 - DNA, 25 bp, Homo sapien
gagaaaacttactgaatgggagaaa

SEQ ID NO: 1077335 - DNA, 25 bp, Homo sapien
aatatgtcaacttaatgtccagagt

SEQ ID NO: 1077336 - DNA, 25 bp, Homo sapien
cagcctcttctgtgtatgttcttat

SEQ ID NO: 1077337 - DNA, 25 bp, Homo sapien
tgcctgactgttaattctcattagc

SEQ ID NO: 1077338 - DNA, 25 bp, Homo sapien
agctctctacatctcctaatctaac

SEQ ID NO: 1077339 - DNA, 25 bp, Homo sapien
taatctaactcaatatagctccctt

SEQ ID NO: 1077340 - DNA, 25 bp, Homo sapien
aggtgcgctgtagctgccctatgca

SEQ ID NO: 1077341 - DNA, 25 bp, Homo sapien
tcctggttgctaaggccagtaaaca

SEQ ID NO: 1077342 - DNA, 25 bp, Homo sapien
gaccagccattgtggagatgcggaa

SEQ ID NO: 1077343 - DNA, 25 bp, Homo sapien
atgactgagggttttggcatggacc

SEQ ID NO: 1077344 - DNA, 25 bp, Homo sapien
cctgcaggtcgcctacttcaaggtg

SEQ ID NO: 1077345 - DNA, 25 bp, Homo sapien
aactacctgcaggtcgcctacttca

SEQ ID NO: 1077346 - DNA, 25 bp, Homo sapien
gttccgcaagcggagcccctacaac

SEQ ID NO: 1077347 - DNA, 25 bp, Homo sapien
tcgcctacttcaaggtgcagacctg

SEQ ID NO: 1077348 - DNA, 25 bp, Homo sapien
acagcgccttatcctccccactccc

SEQ ID NO: 1077349 - DNA, 25 bp, Homo sapien
tccccactccctgggctgtgcgagt

SEQ ID NO: 1077350 - DNA, 25 bp, Homo sapien
gacagcgccttatcctccccactcc

SEQ ID NO: 1077351 - DNA, 25 bp, Homo sapien
ccactccctgggctgtgcgagtagg

SEQ ID NO: 1077352 - DNA, 25 bp, Homo sapien
ggcggcgctccttgcctttcaagga

SEQ ID NO: 1077353 - DNA, 25 bp, Homo sapien
gctgcctcgcgggagctgacttccc

SEQ ID NO: 1077354 - DNA, 25 bp, Homo sapien
aagccgtgagctcccgccgtcggcc

SEQ ID NO: 1077355 - DNA, 25 bp, Homo sapien
cgcggagccccgagaccggctgcct

SEQ ID NO: 1077356 - DNA, 25 bp, Homo sapien
caggaacacaagccgtgagctcccg

SEQ ID NO: 1077357 - DNA, 25 bp, Homo sapien
gagcgccacgaggtctaaggggtcc

SEQ ID NO: 1077358 - DNA, 25 bp, Homo sapien
gcgagcgccacgaggtctaaggggt

SEQ ID NO: 1077359 - DNA, 25 bp, Homo sapien
ctgcgagcgccacgaggtctaaggg

SEQ ID NO: 1077360 - DNA, 25 bp, Homo sapien
ctctgcgagcgccacgaggtctaag

SEQ ID NO: 1077361 - DNA, 25 bp, Homo sapien
tggaattacgggcgtctgccaccat

SEQ ID NO: 1077362 - DNA, 25 bp, Homo sapien
ctggaattacgggcgtctgccacca

SEQ ID NO: 1077363 - DNA, 25 bp, Homo sapien
gacatgactccacgccacagagtta

SEQ ID NO: 1077364 - DNA, 25 bp, Homo sapien
ttctttggttctccagcatgccttc

SEQ ID NO: 1077365 - DNA, 25 bp, Homo sapien
ccccttcgctatgaactgcagttac

SEQ ID NO: 1077366 - DNA, 25 bp, Homo sapien
tcagatagcactgtcatgagaaggc

SEQ ID NO: 1077367 - DNA, 25 bp, Homo sapien
gctatgactgtcagcttgttggtgg

SEQ ID NO: 1077368 - DNA, 25 bp, Homo sapien
gttggatttgctcagctatgactgt

SEQ ID NO: 1077369 - DNA, 25 bp, Homo sapien
ggcatttgctcggatgaattcatca

SEQ ID NO: 1077370 - DNA, 25 bp, Homo sapien
ttcttgcaaatgttggatttgctca

SEQ ID NO: 1077371 - DNA, 25 bp, Homo sapien
gcatctctgtgagcatcttccagta

SEQ ID NO: 1077372 - DNA, 25 bp, Homo sapien
tttcactatattacaagctacatgg

SEQ ID NO: 1077373 - DNA, 25 bp, Homo sapien
atggtgcaggttggcatctctgtga

SEQ ID NO: 1077374 - DNA, 25 bp, Homo sapien
gctgaccactctcccgtttatagag

SEQ ID NO: 1077375 - DNA, 25 bp, Homo sapien
gttcccatcagcgtgggttgtaaac

SEQ ID NO: 1077376 - DNA, 25 bp, Homo sapien
ttcccatcagcgtgggttgtaaaca

SEQ ID NO: 1077377 - DNA, 25 bp, Homo sapien
cccatcagcgtgggttgtaaacaaa

SEQ ID NO: 1077378 - DNA, 25 bp, Homo sapien
tcccatcagcgtgggttgtaaacaa

SEQ ID NO: 1077379 - DNA, 25 bp, Homo sapien
gctgtagtttgtaggcaccaaggaa

SEQ ID NO: 1077380 - DNA, 25 bp, Homo sapien
caccaaggaagtcatgtggacaact

SEQ ID NO: 1077381 - DNA, 25 bp, Homo sapien
cactgactggcttagcaacgtgtcc

SEQ ID NO: 1077382 - DNA, 25 bp, Homo sapien
tcaatgtcctcatacggagtccagg

SEQ ID NO: 1077383 - DNA, 25 bp, Homo sapien
gacagcatttacattcacacagggt

SEQ ID NO: 1077384 - DNA, 25 bp, Homo sapien
gagttgcaccaactgtgagacagcc

SEQ ID NO: 1077385 - DNA, 25 bp, Homo sapien
tgaaactgactgacttgggtatctg

SEQ ID NO: 1077386 - DNA, 25 bp, Homo sapien
tccaaagaggatcccgaaagacagt

SEQ ID NO: 1077387 - DNA, 25 bp, Homo sapien
ggtagagtcctacaagagcctagtc

SEQ ID NO: 1077388 - DNA, 25 bp, Homo sapien
caacttgggagactacacagtggac

SEQ ID NO: 1077389 - DNA, 25 bp, Homo sapien
gggtattaccaaacagatcagcatc

SEQ ID NO: 1077390 - DNA, 25 bp, Homo sapien
ggccaattgtcagttcaagtacaca

SEQ ID NO: 1077391 - DNA, 25 bp, Homo sapien
agtcagctagtggaaccccggaagc

SEQ ID NO: 1077392 - DNA, 25 bp, Homo sapien
tggtggctcaaacgccagcactgtg

SEQ ID NO: 1077393 - DNA, 25 bp, Homo sapien
ttatagaggctcgtgtggcaaggaa

SEQ ID NO: 1077394 - DNA, 25 bp, Homo sapien
gaacagccctgaccaataacttgat

SEQ ID NO: 1077395 - DNA, 25 bp, Homo sapien
gatcaagctgatgactgcatgcaga

SEQ ID NO: 1077396 - DNA, 25 bp, Homo sapien
tagtttcccattctgaggtgcccca

SEQ ID NO: 1077397 - DNA, 25 bp, Homo sapien
gaaagagcaatgacaccccttggtg

SEQ ID NO: 1077398 - DNA, 25 bp, Homo sapien
gcactgtggcagatagattctagga

SEQ ID NO: 1077399 - DNA, 25 bp, Homo sapien
gccttgattagggatggaatctcct

SEQ ID NO: 1077400 - DNA, 25 bp, Homo sapien
caaatgtcgtgtcaattctggtcaa

SEQ ID NO: 1077401 - DNA, 25 bp, Homo sapien
taattggtgaaatacaggccctctc

SEQ ID NO: 1077402 - DNA, 25 bp, Homo sapien
cacaaggattttctagccaggacat

SEQ ID NO: 1077403 - DNA, 25 bp, Homo sapien
taagggccaacaaggtagattatca

SEQ ID NO: 1077404 - DNA, 25 bp, Homo sapien
gggatccccactattcaatgcagac

SEQ ID NO: 1077405 - DNA, 25 bp, Homo sapien
ccatctgtataaccacgggccagtt

SEQ ID NO: 1077406 - DNA, 25 bp, Homo sapien
caggattaaggttatggtcagactc

SEQ ID NO: 1077407 - DNA, 25 bp, Homo sapien
gaacatgctgagtcctgagagtggc

SEQ ID NO: 1077408 - DNA, 25 bp, Homo sapien
caaatgtaaatgagcggcaatgagc

SEQ ID NO: 1077409 - DNA, 25 bp, Homo sapien
ggcaatgctccaagcagatgagaca

SEQ ID NO: 1077410 - DNA, 25 bp, Homo sapien
tatttcagcagggacctaaaggatg

SEQ ID NO: 1077411 - DNA, 25 bp, Homo sapien
tctattaacctggacatccccaaag

SEQ ID NO: 1077412 - DNA, 25 bp, Homo sapien
tgctaatatggtagccagcagccac

SEQ ID NO: 1077413 - DNA, 25 bp, Homo sapien
gcagggtagctgagaaagatacccc

SEQ ID NO: 1077414 - DNA, 25 bp, Homo sapien
tacagaacaggaacagtaagttagg

SEQ ID NO: 1077415 - DNA, 25 bp, Homo sapien
ctggcaggcattgtggaggaaggat

SEQ ID NO: 1077416 - DNA, 25 bp, Homo sapien
ctgggccaggctgggaaggcttcat

SEQ ID NO: 1077417 - DNA, 25 bp, Homo sapien
ctgccccgtttcctgtgcggtggag

SEQ ID NO: 1077418 - DNA, 25 bp, Homo sapien
ttgtcagacacgggcaggaagcgca

SEQ ID NO: 1077419 - DNA, 25 bp, Homo sapien
agtggcagcccgtggcgggcactgt

SEQ ID NO: 1077420 - DNA, 25 bp, Homo sapien
agcgcagggcggcttggaggcggca

SEQ ID NO: 1077421 - DNA, 25 bp, Homo sapien
cagacacgggcaggaagcgcagggc

SEQ ID NO: 1077422 - DNA, 25 bp, Homo sapien
cagggggtggtcgtgcggatgtgac

SEQ ID NO: 1077423 - DNA, 25 bp, Homo sapien
cagagatgacactggcaggtaggct

SEQ ID NO: 1077424 - DNA, 25 bp, Homo sapien
ctgcagggggtggtcgtgcggatgt

SEQ ID NO: 1077425 - DNA, 25 bp, Homo sapien
agatgacactggcaggtaggctgca

SEQ ID NO: 1077426 - DNA, 25 bp, Homo sapien
ggccgaggtccctgtacccagtatg

SEQ ID NO: 1077427 - DNA, 25 bp, Homo sapien
caatttgagtgctggccgaggtccc

SEQ ID NO: 1077428 - DNA, 25 bp, Homo sapien
gcaatttgagtgctggccgaggtcc

SEQ ID NO: 1077429 - DNA, 25 bp, Homo sapien
gaggtccctgtacccagtatgaggc

SEQ ID NO: 1077430 - DNA, 25 bp, Homo sapien
catgtgacacttggcactctgtttg

SEQ ID NO: 1077431 - DNA, 25 bp, Homo sapien
gacacttggcactctgtttgggcac

SEQ ID NO: 1077432 - DNA, 25 bp, Homo sapien
tttgggcaccgcctacactggcttt

SEQ ID NO: 1077433 - DNA, 25 bp, Homo sapien
tctgtttgggcaccgcctacactgg

SEQ ID NO: 1077434 - DNA, 25 bp, Homo sapien
gttcgtatgccagagcccctccaaa

SEQ ID NO: 1077435 - DNA, 25 bp, Homo sapien
caaaggtgatcagtagctacatggc

SEQ ID NO: 1077436 - DNA, 25 bp, Homo sapien
agccattgggattcctaagacgttc

SEQ ID NO: 1077437 - DNA, 25 bp, Homo sapien
gatcagtagctacatggccagagcc

SEQ ID NO: 1077438 - DNA, 25 bp, Homo sapien
cagggacctgttccactagatctca

SEQ ID NO: 1077439 - DNA, 25 bp, Homo sapien
ccagggacctgttccactagatctc

SEQ ID NO: 1077440 - DNA, 25 bp, Homo sapien
gacctgttccactagatctcatccc

SEQ ID NO: 1077441 - DNA, 25 bp, Homo sapien
gggacctgttccactagatctcatc

SEQ ID NO: 1077442 - DNA, 25 bp, Homo sapien
ctgggaatggctctggtcatggctc

SEQ ID NO: 1077443 - DNA, 25 bp, Homo sapien
tgggaatggctctggtcatggctca

SEQ ID NO: 1077444 - DNA, 25 bp, Homo sapien
gggaatggctctggtcatggctcag

SEQ ID NO: 1077445 - DNA, 25 bp, Homo sapien
gataaggcactggtaacatccttcc

SEQ ID NO: 1077446 - DNA, 25 bp, Homo sapien
aaggcactggtaacatccttccagg

SEQ ID NO: 1077447 - DNA, 25 bp, Homo sapien
ataaggcactggtaacatccttcca

SEQ ID NO: 1077448 - DNA, 25 bp, Homo sapien
taaggcactggtaacatccttccag

SEQ ID NO: 1077449 - DNA, 25 bp, Homo sapien
gactgccatagctggaatgaactgg

SEQ ID NO: 1077450 - DNA, 25 bp, Homo sapien
gaactgtggcctacccaaagattgc

SEQ ID NO: 1077451 - DNA, 25 bp, Homo sapien
catataatgtctcggacctcccaga

SEQ ID NO: 1077452 - DNA, 25 bp, Homo sapien
aactggtaccgttgagcatgggatc

SEQ ID NO: 1077453 - DNA, 25 bp, Homo sapien
ccaatttggagcatatgttgatgtg

SEQ ID NO: 1077454 - DNA, 25 bp, Homo sapien
tggtcattgccctgactgccatgtc

SEQ ID NO: 1077455 - DNA, 25 bp, Homo sapien
taacaggaagctgaccaggagcatc

SEQ ID NO: 1077456 - DNA, 25 bp, Homo sapien
tgttgatgtggctggtcattgccct

SEQ ID NO: 1077457 - DNA, 25 bp, Homo sapien
caagccgaaggtggtgaagacggca

SEQ ID NO: 1077458 - DNA, 25 bp, Homo sapien
tggtgaagacggcaaagtcattcag

SEQ ID NO: 1077459 - DNA, 25 bp, Homo sapien
gagcagagcggaggccaagccgaag

SEQ ID NO: 1077460 - DNA, 25 bp, Homo sapien
gacggcaaagtcattcagctcggct

SEQ ID NO: 1077461 - DNA, 25 bp, Homo sapien
aagcacaagtggaaagaagcagctg

SEQ ID NO: 1077462 - DNA, 25 bp, Homo sapien
aggaagcataggggcagggtagacc

SEQ ID NO: 1077463 - DNA, 25 bp, Homo sapien
tagtagctctggtccatcatgaaga

SEQ ID NO: 1077464 - DNA, 25 bp, Homo sapien
gaagagaatcatgagtgaggccatg

SEQ ID NO: 1077465 - DNA, 25 bp, Homo sapien
ccatcatgaagagaatcatgagtga

SEQ ID NO: 1077466 - DNA, 25 bp, Homo sapien
atagtagctctggtccatcatgaag

SEQ ID NO: 1077467 - DNA, 25 bp, Homo sapien
gtatctacaggagcgaagaacacta

SEQ ID NO: 1077468 - DNA, 25 bp, Homo sapien
caggagcgaagaacactaagcaata

SEQ ID NO: 1077469 - DNA, 25 bp, Homo sapien
tctacaggagcgaagaacactaagc

SEQ ID NO: 1077470 - DNA, 25 bp, Homo sapien
tcagtagtatctacaggagcgaaga

SEQ ID NO: 1077471 - DNA, 25 bp, Homo sapien
taatagagataggtaagtaactaga

SEQ ID NO: 1077472 - DNA, 25 bp, Homo sapien
agaagtatagcccaatgcagtctca

SEQ ID NO: 1077473 - DNA, 25 bp, Homo sapien
actagagaagtatagcccaatgcag

SEQ ID NO: 1077474 - DNA, 25 bp, Homo sapien
ggtaagtaactagagaagtatagcc

SEQ ID NO: 1077475 - DNA, 25 bp, Homo sapien
atgtacgagagcgaccacatcaggc

SEQ ID NO: 1077476 - DNA, 25 bp, Homo sapien
tctggaaagaagatgtacgagagcg

SEQ ID NO: 1077477 - DNA, 25 bp, Homo sapien
catcaggcagtaaaaagcagacaga

SEQ ID NO: 1077478 - DNA, 25 bp, Homo sapien
gagagcgaccacatcaggcagtaaa

SEQ ID NO: 1077479 - DNA, 25 bp, Homo sapien
tcagtgctgtggcgaaagacaggct

SEQ ID NO: 1077480 - DNA, 25 bp, Homo sapien
agtgctgtggcgaaagacaggctgc

SEQ ID NO: 1077481 - DNA, 25 bp, Homo sapien
tgtggcgaaagacaggctgccttgc

SEQ ID NO: 1077482 - DNA, 25 bp, Homo sapien
gctgtggcgaaagacaggctgcctt

SEQ ID NO: 1077483 - DNA, 25 bp, Homo sapien
ggtacatacaaagctttagtgcagg

SEQ ID NO: 1077484 - DNA, 25 bp, Homo sapien
gggtttctaacttcatggcaacaga

SEQ ID NO: 1077485 - DNA, 25 bp, Homo sapien
gcaggcttgacccaatatgctgaca

SEQ ID NO: 1077486 - DNA, 25 bp, Homo sapien
tctagtatatggcaacacaggtaca

SEQ ID NO: 1077487 - DNA, 25 bp, Homo sapien
taacaggaaggcaccgtctattctg

SEQ ID NO: 1077488 - DNA, 25 bp, Homo sapien
tgaggtacacctttgccatacagta

SEQ ID NO: 1077489 - DNA, 25 bp, Homo sapien
gagtttagtagtttccagcgtagga

SEQ ID NO: 1077490 - DNA, 25 bp, Homo sapien
ccatctgggaggtggaatgtctatc

SEQ ID NO: 1077491 - DNA, 25 bp, Homo sapien
caagcttaggacaaagagaactgcc

SEQ ID NO: 1077492 - DNA, 25 bp, Homo sapien
cagtcacttgattccgcttatcaga

SEQ ID NO: 1077493 - DNA, 25 bp, Homo sapien
catcacggttgttcaatccacaaaa

SEQ ID NO: 1077494 - DNA, 25 bp, Homo sapien
gagtagcagaattctcagtcacttg

SEQ ID NO: 1077495 - DNA, 25 bp, Homo sapien
cctgatgtggtccatccccagtttc

SEQ ID NO: 1077496 - DNA, 25 bp, Homo sapien
ccatccccagtttctcaaaggtaca

SEQ ID NO: 1077497 - DNA, 25 bp, Homo sapien
caagcctcttggtcggcggctccag

SEQ ID NO: 1077498 - DNA, 25 bp, Homo sapien
ctcccggaggcgttgtctgcgactc

SEQ ID NO: 1077499 - DNA, 25 bp, Homo sapien
gaaaggtacagactcccaagcctct

SEQ ID NO: 1077500 - DNA, 25 bp, Homo sapien
aggctccaacttccagtggcccggt

SEQ ID NO: 1077501 - DNA, 25 bp, Homo sapien
caacataagagcaagaggctaccaa

SEQ ID NO: 1077502 - DNA, 25 bp, Homo sapien
gagaagatcctgaatccacaacata

SEQ ID NO: 1077503 - DNA, 25 bp, Homo sapien
tacaactggaatcctcagaaatatg

SEQ ID NO: 1077504 - DNA, 25 bp, Homo sapien
gctgttattgtctgaggataagctc

SEQ ID NO: 1077505 - DNA, 25 bp, Homo sapien
tacctagaagtagtattgccaggtt

SEQ ID NO: 1077506 - DNA, 25 bp, Homo sapien
tatatacctagaagtagtattgcca

SEQ ID NO: 1077507 - DNA, 25 bp, Homo sapien
gcgtttctcagaatatatacctaga

SEQ ID NO: 1077508 - DNA, 25 bp, Homo sapien
ctagaagtagtattgccaggttata

SEQ ID NO: 1077509 - DNA, 25 bp, Homo sapien
tagctggcttgagaatacagctgtc

SEQ ID NO: 1077510 - DNA, 25 bp, Homo sapien
actgcagcagattgaaagatatagc

SEQ ID NO: 1077511 - DNA, 25 bp, Homo sapien
ttttccaattgcatacacttcaacc

SEQ ID NO: 1077512 - DNA, 25 bp, Homo sapien
taaaatcccatcattcaaagtgaca

SEQ ID NO: 1077513 - DNA, 25 bp, Homo sapien
gacagtgtttgttgtcaatgagaac

SEQ ID NO: 1077514 - DNA, 25 bp, Homo sapien
caaagtataattattcagacttggg

SEQ ID NO: 1077515 - DNA, 25 bp, Homo sapien
agtgcacctgtcacttcaggaaaag

SEQ ID NO: 1077516 - DNA, 25 bp, Homo sapien
tgataccctcacaatagcaaaagac

SEQ ID NO: 1077517 - DNA, 25 bp, Homo sapien
tcatggagcaccattcttacctgaa

SEQ ID NO: 1077518 - DNA, 25 bp, Homo sapien
gacaaaatgggaaggatgcataaac

SEQ ID NO: 1077519 - DNA, 25 bp, Homo sapien
gtgagctgaagtaatcgcttgactc

SEQ ID NO: 1077520 - DNA, 25 bp, Homo sapien
cagttacgctgcatatcaaagtatg

SEQ ID NO: 1077521 - DNA, 25 bp, Homo sapien
ggtaaaacagctagcacaaatcagg

SEQ ID NO: 1077522 - DNA, 25 bp, Homo sapien
gcaagaatttctctagagcaccagt

SEQ ID NO: 1077523 - DNA, 25 bp, Homo sapien
caaacacttgaagtccctgaggccc

SEQ ID NO: 1077524 - DNA, 25 bp, Homo sapien
ggtatttcctgctcacatgtgcaag

SEQ ID NO: 1077525 - DNA, 25 bp, Homo sapien
ctgggggtgtacaaattaagacact

SEQ ID NO: 1077526 - DNA, 25 bp, Homo sapien
cattcactgctatatagtagaccat

SEQ ID NO: 1077527 - DNA, 25 bp, Homo sapien
tcacagagcactaggatattcattc

SEQ ID NO: 1077528 - DNA, 25 bp, Homo sapien
aaattaatccaggttgtttcacaga

SEQ ID NO: 1077529 - DNA, 25 bp, Homo sapien
agctccgtactgcaccttttattga

SEQ ID NO: 1077530 - DNA, 25 bp, Homo sapien
gacatgattcctctgagtgttccca

SEQ ID NO: 1077531 - DNA, 25 bp, Homo sapien
ggttcatagtggtaagtagctccgt

SEQ ID NO: 1077532 - DNA, 25 bp, Homo sapien
tgttcccaatgggagtgagcacggt

SEQ ID NO: 1077533 - DNA, 25 bp, Homo sapien
gatgtgggccgggaaaagttcatat

SEQ ID NO: 1077534 - DNA, 25 bp, Homo sapien
atgtgggccgggaaaagttcatatt

SEQ ID NO: 1077535 - DNA, 25 bp, Homo sapien
ggatgtgggccgggaaaagttcata

SEQ ID NO: 1077536 - DNA, 25 bp, Homo sapien
tttgcaagctgggaacactccttcc

SEQ ID NO: 1077537 - DNA, 25 bp, Homo sapien
cttgttcctctcacaggcaaagctg

SEQ ID NO: 1077538 - DNA, 25 bp, Homo sapien
caccttctggatcagggacgcttgt

SEQ ID NO: 1077539 - DNA, 25 bp, Homo sapien
agggagcaggcaagcgcatcaggaa

SEQ ID NO: 1077540 - DNA, 25 bp, Homo sapien
aaaaagcatgaagagagagaggagg

SEQ ID NO: 1077541 - DNA, 25 bp, Homo sapien
agcatgaagagagagaggaggactc

SEQ ID NO: 1077542 - DNA, 25 bp, Homo sapien
catgaagagagagaggaggactcac

SEQ ID NO: 1077543 - DNA, 25 bp, Homo sapien
aaagcatgaagagagagaggaggac

SEQ ID NO: 1077544 - DNA, 25 bp, Homo sapien
tcccaaggcaatcaaatcttcttta

SEQ ID NO: 1077545 - DNA, 25 bp, Homo sapien
ctgatattttcaccaagtgctacat

SEQ ID NO: 1077546 - DNA, 25 bp, Homo sapien
tttcaccaagtgctacattatgtgc

SEQ ID NO: 1077547 - DNA, 25 bp, Homo sapien
aaggcaatcaaatcttctttacatg

SEQ ID NO: 1077548 - DNA, 25 bp, Homo sapien
gtaaaagaactgtgcctccttgtgg

SEQ ID NO: 1077549 - DNA, 25 bp, Homo sapien
cttggcgtgacagagggtataaccc

SEQ ID NO: 1077550 - DNA, 25 bp, Homo sapien
tacctccttgtgatactgtgaccga

SEQ ID NO: 1077551 - DNA, 25 bp, Homo sapien
tggtgctctgggatcacaaaggccg

SEQ ID NO: 1077552 - DNA, 25 bp, Homo sapien
aagacgagagggatgaggcagccag

SEQ ID NO: 1077553 - DNA, 25 bp, Homo sapien
gaagacgagagggatgaggcagcca

SEQ ID NO: 1077554 - DNA, 25 bp, Homo sapien
gacgagagggatgaggcagccagag

SEQ ID NO: 1077555 - DNA, 25 bp, Homo sapien
agccagcagaactcgccatctccat

SEQ ID NO: 1077556 - DNA, 25 bp, Homo sapien
gggacgccaatatcacatgtaccag

SEQ ID NO: 1077557 - DNA, 25 bp, Homo sapien
caactgggagggacggcaggagaaa

SEQ ID NO: 1077558 - DNA, 25 bp, Homo sapien
caagcttccttattctggggacgcc

SEQ ID NO: 1077559 - DNA, 25 bp, Homo sapien
gactctggaaaggattgccagggcc

SEQ ID NO: 1077560 - DNA, 25 bp, Homo sapien
cacgtggaacttgccggcatcccct

SEQ ID NO: 1077561 - DNA, 25 bp, Homo sapien
agagcagctcggctgtgccccctag

SEQ ID NO: 1077562 - DNA, 25 bp, Homo sapien
tgtgccccctagtagggccacgtgg

SEQ ID NO: 1077563 - DNA, 25 bp, Homo sapien
ggaacttgccggcatcccctgcgtg

SEQ ID NO: 1077564 - DNA, 25 bp, Homo sapien
ctgggagcgctgcgggaatggggac

SEQ ID NO: 1077565 - DNA, 25 bp, Homo sapien
cgggaatggggaccgcagccacctc

SEQ ID NO: 1077566 - DNA, 25 bp, Homo sapien
gagcgctgcgggaatggggaccgca

SEQ ID NO: 1077567 - DNA, 25 bp, Homo sapien
tgcgggaatggggaccgcagccacc

SEQ ID NO: 1077568 - DNA, 25 bp, Homo sapien
ggtccttcccatcccggaatatgtg

SEQ ID NO: 1077569 - DNA, 25 bp, Homo sapien
tcccatcccggaatatgtgaacagc

SEQ ID NO: 1077570 - DNA, 25 bp, Homo sapien
atcctggtccttcccatcccggaat

SEQ ID NO: 1077571 - DNA, 25 bp, Homo sapien
agatcttcatcctggtccttcccat

SEQ ID NO: 1077572 - DNA, 25 bp, Homo sapien
tttccaacttggatcagacatcggt

SEQ ID NO: 1077573 - DNA, 25 bp, Homo sapien
taagacccttggtcctcaaggcgca

SEQ ID NO: 1077574 - DNA, 25 bp, Homo sapien
tgcaacctgcaggatcacggtgtcc

SEQ ID NO: 1077575 - DNA, 25 bp, Homo sapien
tcaaggcgcacgtcaaggatctgca

SEQ ID NO: 1077576 - DNA, 25 bp, Homo sapien
gaagtaccctgccttgaggttctct

SEQ ID NO: 1077577 - DNA, 25 bp, Homo sapien
tgctatttggaagagcccagctttt

SEQ ID NO: 1077578 - DNA, 25 bp, Homo sapien
ggatggttcaggacacattccccag

SEQ ID NO: 1077579 - DNA, 25 bp, Homo sapien
gactctgctagacactgctatttgg

SEQ ID NO: 1077580 - DNA, 25 bp, Homo sapien
ggggagagactccccacagatgggg

SEQ ID NO: 1077581 - DNA, 25 bp, Homo sapien
caaaggcacaccatgatgagaagta

SEQ ID NO: 1077582 - DNA, 25 bp, Homo sapien
tgatgagaagtaccaggacaggcag

SEQ ID NO: 1077583 - DNA, 25 bp, Homo sapien
tttgcttccagataaggcaaaggca

SEQ ID NO: 1077584 - DNA, 25 bp, Homo sapien
gaagtaccaggacaggcaggatcac

SEQ ID NO: 1077585 - DNA, 25 bp, Homo sapien
tccgtcacatgttcatagagaagct

SEQ ID NO: 1077586 - DNA, 25 bp, Homo sapien
ccgtcacatgttcatagagaagctt

SEQ ID NO: 1077587 - DNA, 25 bp, Homo sapien
gtcacatgttcatagagaagctttt

SEQ ID NO: 1077588 - DNA, 25 bp, Homo sapien
ctccgtcacatgttcatagagaagc

SEQ ID NO: 1077589 - DNA, 25 bp, Homo sapien
caaggatagcagataatggaatttt

SEQ ID NO: 1077590 - DNA, 25 bp, Homo sapien
acagaatccaggttagtgggtatgg

SEQ ID NO: 1077591 - DNA, 25 bp, Homo sapien
accatcaccaaggatagcagataat

SEQ ID NO: 1077592 - DNA, 25 bp, Homo sapien
tcaggaacagaatccaggttagtgg

SEQ ID NO: 1077593 - DNA, 25 bp, Homo sapien
gcacaattacatctgatatccccat

SEQ ID NO: 1077594 - DNA, 25 bp, Homo sapien
tcaaagcacaattacatctgatatc

SEQ ID NO: 1077595 - DNA, 25 bp, Homo sapien
tgctttaccactgctcttacgagaa

SEQ ID NO: 1077596 - DNA, 25 bp, Homo sapien
gatatccccattccttgctttacca

SEQ ID NO: 1077597 - DNA, 25 bp, Homo sapien
ttgattttacctgcccttggacctg

SEQ ID NO: 1077598 - DNA, 25 bp, Homo sapien
ggtctctactaaactctgcagcctg

SEQ ID NO: 1077599 - DNA, 25 bp, Homo sapien
tcacctggacaacagaaatggcagc

SEQ ID NO: 1077600 - DNA, 25 bp, Homo sapien
cactgccttgaggatccctgattcc

SEQ ID NO: 1077601 - DNA, 25 bp, Homo sapien
tttttctttagcatggtctgaaaga

SEQ ID NO: 1077602 - DNA, 25 bp, Homo sapien
tttggcaaatcagaaggagggcctc

SEQ ID NO: 1077603 - DNA, 25 bp, Homo sapien
tggcaaatcagaaggagggcctcta

SEQ ID NO: 1077604 - DNA, 25 bp, Homo sapien
aatttggcaaatcagaaggagggcc

SEQ ID NO: 1077605 - DNA, 25 bp, Homo sapien
aaacaatttggcaaatcagaaggag

SEQ ID NO: 1077606 - DNA, 25 bp, Homo sapien
caacaggagataagttggtacggaa

SEQ ID NO: 1077607 - DNA, 25 bp, Homo sapien
gagataagttggtacggaagttaca

SEQ ID NO: 1077608 - DNA, 25 bp, Homo sapien
aacaaggggaatgagctatcactgc

SEQ ID NO: 1077609 - DNA, 25 bp, Homo sapien
tggtacggaagttacaagaacatgg

SEQ ID NO: 1077610 - DNA, 25 bp, Homo sapien
tgagtttgctgcagctcttttcaac

SEQ ID NO: 1077611 - DNA, 25 bp, Homo sapien
gagtttgctgcagctcttttcaact

SEQ ID NO: 1077612 - DNA, 25 bp, Homo sapien
ctgagtttgctgcagctcttttcaa

SEQ ID NO: 1077613 - DNA, 25 bp, Homo sapien
caaaatgcaaccgggctcttctcca

SEQ ID NO: 1077614 - DNA, 25 bp, Homo sapien
tatgacctcaagatcgatcacaaag

SEQ ID NO: 1077615 - DNA, 25 bp, Homo sapien
aatattatcagtgctctaaaagagg

SEQ ID NO: 1077616 - DNA, 25 bp, Homo sapien
tacaaagccataaggaggaagtgct

SEQ ID NO: 1077617 - DNA, 25 bp, Homo sapien
gtgctctgagatatggacctatttg

SEQ ID NO: 1077618 - DNA, 25 bp, Homo sapien
taagtgtgtccctcaaaagttcacg

SEQ ID NO: 1077619 - DNA, 25 bp, Homo sapien
ggtctcctggtcgattactaagtaa

SEQ ID NO: 1077620 - DNA, 25 bp, Homo sapien
gtgaaactgctttaatcctcaggaa

SEQ ID NO: 1077621 - DNA, 25 bp, Homo sapien
aaaagaatcttaggtctgccatcac

SEQ ID NO: 1077622 - DNA, 25 bp, Homo sapien
gacaggtgaggcttggaagtatagg

SEQ ID NO: 1077623 - DNA, 25 bp, Homo sapien
agacaggtgaggcttggaagtatag

SEQ ID NO: 1077624 - DNA, 25 bp, Homo sapien
acaggtgaggcttggaagtataggt

SEQ ID NO: 1077625 - DNA, 25 bp, Homo sapien
ctctttaaggcggaaggaggtctgc

SEQ ID NO: 1077626 - DNA, 25 bp, Homo sapien
cacacaccgtggaggctctttaagg

SEQ ID NO: 1077627 - DNA, 25 bp, Homo sapien
cagagcctaggatgctgacaacgaa

SEQ ID NO: 1077628 - DNA, 25 bp, Homo sapien
ggcagccagtcgtgaagtactcaga

SEQ ID NO: 1077629 - DNA, 25 bp, Homo sapien
attcctctgatttgtgtagttctga

SEQ ID NO: 1077630 - DNA, 25 bp, Homo sapien
tgattcctctgatttgtgtagttct

SEQ ID NO: 1077631 - DNA, 25 bp, Homo sapien
tctccattagcatggcctttccctt

SEQ ID NO: 1077632 - DNA, 25 bp, Homo sapien
tggcctggggacaattgattcctct

SEQ ID NO: 1077633 - DNA, 25 bp, Homo sapien
caaggacaggattatatccttcagc

SEQ ID NO: 1077634 - DNA, 25 bp, Homo sapien
gggcaaggacaggattatatccttc

SEQ ID NO: 1077635 - DNA, 25 bp, Homo sapien
tcagggggcaaggacaggattatat

SEQ ID NO: 1077636 - DNA, 25 bp, Homo sapien
cagggggcaaggacaggattatatc

SEQ ID NO: 1077637 - DNA, 25 bp, Homo sapien
tcttgactaaagcttgagggcagga

SEQ ID NO: 1077638 - DNA, 25 bp, Homo sapien
caacctaagaggctgtttgctacac

SEQ ID NO: 1077639 - DNA, 25 bp, Homo sapien
cacttaactgggtcacaagatgccc

SEQ ID NO: 1077640 - DNA, 25 bp, Homo sapien
gcgacgaggcttctgcaatacacac

SEQ ID NO: 1077641 - DNA, 25 bp, Homo sapien
aacgcaagcgacctggcaggaccac

SEQ ID NO: 1077642 - DNA, 25 bp, Homo sapien
caccaataagctttgaccgctggcg

SEQ ID NO: 1077643 - DNA, 25 bp, Homo sapien
ccgctggcgtggcatgctgggagtt

SEQ ID NO: 1077644 - DNA, 25 bp, Homo sapien
tgccacaacgcaagcgacctggcag

SEQ ID NO: 1077645 - DNA, 25 bp, Homo sapien
gctcccgccgctcgatcagggacag

SEQ ID NO: 1077646 - DNA, 25 bp, Homo sapien
cgatcagggacagcgccgcctctgt

SEQ ID NO: 1077647 - DNA, 25 bp, Homo sapien
gcctctgtaggcgagggaaggagct

SEQ ID NO: 1077648 - DNA, 25 bp, Homo sapien
cgccctactactccaggattggttt

SEQ ID NO: 1077649 - DNA, 25 bp, Homo sapien
gagtttcccgcgaagtcgtgtccgc

SEQ ID NO: 1077650 - DNA, 25 bp, Homo sapien
ccactcggtccagggagcaaagcag

SEQ ID NO: 1077651 - DNA, 25 bp, Homo sapien
cttggcttcccactcggtccaggga

SEQ ID NO: 1077652 - DNA, 25 bp, Homo sapien
agggaagtggccgtgtacagagttt

SEQ ID NO: 1077653 - DNA, 25 bp, Homo sapien
taacagggtaattgtacagggaagc

SEQ ID NO: 1077654 - DNA, 25 bp, Homo sapien
ccaatggcggaggtccaagggtaca

SEQ ID NO: 1077655 - DNA, 25 bp, Homo sapien
tagataacgggtcagagatacagga

SEQ ID NO: 1077656 - DNA, 25 bp, Homo sapien
aagagctggtttcagagattgccgg

SEQ ID NO: 1077657 - DNA, 25 bp, Homo sapien
cagctgaagtacagaggcactttca

SEQ ID NO: 1077658 - DNA, 25 bp, Homo sapien
ggcactttcatatcacactgcagag

SEQ ID NO: 1077659 - DNA, 25 bp, Homo sapien
gataaagaggcaactacctactgag

SEQ ID NO: 1077660 - DNA, 25 bp, Homo sapien
tatggaggtccgaagttacaggtct

SEQ ID NO: 1077661 - DNA, 25 bp, Homo sapien
ttaaccattatactattactgaagg

SEQ ID NO: 1077662 - DNA, 25 bp, Homo sapien
cctatgcccatcacttcaaagtcag

SEQ ID NO: 1077663 - DNA, 25 bp, Homo sapien
tttaaccattatactattactgaag

SEQ ID NO: 1077664 - DNA, 25 bp, Homo sapien
gtggcagaactggggcctatgccca

SEQ ID NO: 1077665 - DNA, 25 bp, Homo sapien
tacgcaatgagctattcagcctcca

SEQ ID NO: 1077666 - DNA, 25 bp, Homo sapien
gatgtgatcttaattcacgccacca

SEQ ID NO: 1077667 - DNA, 25 bp, Homo sapien
cataaagctgggtgctcaaatgtct

SEQ ID NO: 1077668 - DNA, 25 bp, Homo sapien
actcctagagtagtggcagccatat

SEQ ID NO: 1077669 - DNA, 25 bp, Homo sapien
tactcagcagagtgtgtgacacatg

SEQ ID NO: 1077670 - DNA, 25 bp, Homo sapien
ctgttgaagacactacgtccaggcc

SEQ ID NO: 1077671 - DNA, 25 bp, Homo sapien
gctgctgttacaactgttgaagaca

SEQ ID NO: 1077672 - DNA, 25 bp, Homo sapien
tgttacaactgttgaagacactacg

SEQ ID NO: 1077673 - DNA, 25 bp, Homo sapien
gccttgaagaaataacgacatttca

SEQ ID NO: 1077674 - DNA, 25 bp, Homo sapien
gagagtggtagcatttcctccgggc

SEQ ID NO: 1077675 - DNA, 25 bp, Homo sapien
agggagggaagcacaaactatcata

SEQ ID NO: 1077676 - DNA, 25 bp, Homo sapien
gcacaaactatcataggacactgat

SEQ ID NO: 1077677 - DNA, 25 bp, Homo sapien
ttacaagtatctacctatatgcctg

SEQ ID NO: 1077678 - DNA, 25 bp, Homo sapien
ttgggataagttcaatttttctgcc

SEQ ID NO: 1077679 - DNA, 25 bp, Homo sapien
tttctgcctaactgtaagttaactg

SEQ ID NO: 1077680 - DNA, 25 bp, Homo sapien
tcatgggcaagtaaaagagctttca

SEQ ID NO: 1077681 - DNA, 25 bp, Homo sapien
ccagatgatatttgtgccatttgaa

SEQ ID NO: 1077682 - DNA, 25 bp, Homo sapien
accaccaccagatgatatttgtgcc

SEQ ID NO: 1077683 - DNA, 25 bp, Homo sapien
cagagcaaaaagaaggcaccggctt

SEQ ID NO: 1077684 - DNA, 25 bp, Homo sapien
agaaggcaccggctttgtccaccac

SEQ ID NO: 1077685 - DNA, 25 bp, Homo sapien
ctgagaatgaacacaaatggccaac

SEQ ID NO: 1077686 - DNA, 25 bp, Homo sapien
gagaatgaacacaaatggccaacac

SEQ ID NO: 1077687 - DNA, 25 bp, Homo sapien
tgagaatgaacacaaatggccaaca

SEQ ID NO: 1077688 - DNA, 25 bp, Homo sapien
aggtgtggttctggactctgctcct

SEQ ID NO: 1077689 - DNA, 25 bp, Homo sapien
cctagctctcgagcccggacagtga

SEQ ID NO: 1077690 - DNA, 25 bp, Homo sapien
gagtttcttgcagttcatccgacag

SEQ ID NO: 1077691 - DNA, 25 bp, Homo sapien
gagcccggacagtgactttctgcca

SEQ ID NO: 1077692 - DNA, 25 bp, Homo sapien
tctgccatggcttttttggatgagt

SEQ ID NO: 1077693 - DNA, 25 bp, Homo sapien
cacactgggcacatataaagggctt

SEQ ID NO: 1077694 - DNA, 25 bp, Homo sapien
ggtgatgcacgccaaagctggagct

SEQ ID NO: 1077695 - DNA, 25 bp, Homo sapien
tccggtgatgcacagctagcgtggc

SEQ ID NO: 1077696 - DNA, 25 bp, Homo sapien
cacagatgtcacagcggtatggccg

SEQ ID NO: 1077697 - DNA, 25 bp, Homo sapien
tggaatctttcccagcctgttcgcc

SEQ ID NO: 1077698 - DNA, 25 bp, Homo sapien
tttcccagcctgttcgcccaagtga

SEQ ID NO: 1077699 - DNA, 25 bp, Homo sapien
ccaagtgagttttctggtggcggat

SEQ ID NO: 1077700 - DNA, 25 bp, Homo sapien
agcctgttcgcccaagtgagttttc

SEQ ID NO: 1077701 - DNA, 25 bp, Homo sapien
tcttcctccaataggttagggtctc

SEQ ID NO: 1077702 - DNA, 25 bp, Homo sapien
aagatcttcctccaataggttaggg

SEQ ID NO: 1077703 - DNA, 25 bp, Homo sapien
tctccctcactctaaatggggctct

SEQ ID NO: 1077704 - DNA, 25 bp, Homo sapien
tccaataggttagggtctctcactc

SEQ ID NO: 1077705 - DNA, 25 bp, Homo sapien
tttccaacacgagaaattggcctgg

SEQ ID NO: 1077706 - DNA, 25 bp, Homo sapien
taaggtgggacctcagatctcttct

SEQ ID NO: 1077707 - DNA, 25 bp, Homo sapien
gagcatgttctgagcctaccctatt

SEQ ID NO: 1077708 - DNA, 25 bp, Homo sapien
ccccagagatctagaagcaaagttg

SEQ ID NO: 1077709 - DNA, 25 bp, Homo sapien
tctacatacggcaaatgcaagtcac

SEQ ID NO: 1077710 - DNA, 25 bp, Homo sapien
taaggttatgggtgatgtcagttcc

SEQ ID NO: 1077711 - DNA, 25 bp, Homo sapien
cacatctcttactggtgaacggcag

SEQ ID NO: 1077712 - DNA, 25 bp, Homo sapien
agtagttcaggtcctacaccccgca

SEQ ID NO: 1077713 - DNA, 25 bp, Homo sapien
gctgtaatgtgagtgaacaggcaaa

SEQ ID NO: 1077714 - DNA, 25 bp, Homo sapien
ctgtaatgtgagtgaacaggcaaag

SEQ ID NO: 1077715 - DNA, 25 bp, Homo sapien
catgaactgagctgggttttcgtcc

SEQ ID NO: 1077716 - DNA, 25 bp, Homo sapien
gagcctgtttggtatccccattggg

SEQ ID NO: 1077717 - DNA, 25 bp, Homo sapien
gaattttttcctaatgtcgggagca

SEQ ID NO: 1077718 - DNA, 25 bp, Homo sapien
taagacagccttctggcccttctgg

SEQ ID NO: 1077719 - DNA, 25 bp, Homo sapien
tattgtattgtggtctctcttcagc

SEQ ID NO: 1077720 - DNA, 25 bp, Homo sapien
taaaagtatagctatccttgcgtgc

SEQ ID NO: 1077721 - DNA, 25 bp, Homo sapien
gggtgtgggagtccccatctattat

SEQ ID NO: 1077722 - DNA, 25 bp, Homo sapien
ggtgttctggtgttgtatgcatata

SEQ ID NO: 1077723 - DNA, 25 bp, Homo sapien
gcaggtgcaattggagtcatgactt

SEQ ID NO: 1077724 - DNA, 25 bp, Homo sapien
acagcaggtgcaattggagtcatga

SEQ ID NO: 1077725 - DNA, 25 bp, Homo sapien
cagcaggtgcaattggagtcatgac

SEQ ID NO: 1077726 - DNA, 25 bp, Homo sapien
ggtgcaattggagtcatgacttggt

SEQ ID NO: 1077727 - DNA, 25 bp, Homo sapien
aagtttatagcattaagtgcccata

SEQ ID NO: 1077728 - DNA, 25 bp, Homo sapien
agtttatagcattaagtgcccatat

SEQ ID NO: 1077729 - DNA, 25 bp, Homo sapien
tgtgttttaactggttagttcattc

SEQ ID NO: 1077730 - DNA, 25 bp, Homo sapien
ggagtattgtcctcgtcctcagtct

SEQ ID NO: 1077731 - DNA, 25 bp, Homo sapien
aattgtaactcctcattatgtggcc

SEQ ID NO: 1077732 - DNA, 25 bp, Homo sapien
gaacaatcctggttgccatagcagt

SEQ ID NO: 1077733 - DNA, 25 bp, Homo sapien
catgtccatcatgaattggctagga

SEQ ID NO: 1077734 - DNA, 25 bp, Homo sapien
gggacccgccaaatggtagggctga

SEQ ID NO: 1077735 - DNA, 25 bp, Homo sapien
ggacccgccaaatggtagggctgaa

SEQ ID NO: 1077736 - DNA, 25 bp, Homo sapien
cgggacccgccaaatggtagggctg

SEQ ID NO: 1077737 - DNA, 25 bp, Homo sapien
aagctaatgctaataccgggtgggc

SEQ ID NO: 1077738 - DNA, 25 bp, Homo sapien
gcccctacgatgagactgaaatgca

SEQ ID NO: 1077739 - DNA, 25 bp, Homo sapien
tctggagctgatttacgggccgact

SEQ ID NO: 1077740 - DNA, 25 bp, Homo sapien
aacagacaacattcgcaccgggaga

SEQ ID NO: 1077741 - DNA, 25 bp, Homo sapien
ctgctttcgcatgtcagcatcactg

SEQ ID NO: 1077742 - DNA, 25 bp, Homo sapien
agcaggctcgagtttaagtttgaag

SEQ ID NO: 1077743 - DNA, 25 bp, Homo sapien
caggctcgagtttaagtttgaaggg

SEQ ID NO: 1077744 - DNA, 25 bp, Homo sapien
tgctttcgcatgtcagcatcactga

SEQ ID NO: 1077745 - DNA, 25 bp, Homo sapien
tttatgattaccattatagatctca

SEQ ID NO: 1077746 - DNA, 25 bp, Homo sapien
tattttatgattaccattatagatc

SEQ ID NO: 1077747 - DNA, 25 bp, Homo sapien
tttcctgttggcttttgcaccaaag

SEQ ID NO: 1077748 - DNA, 25 bp, Homo sapien
ttttgcaccaaagaaggctccctgg

SEQ ID NO: 1077749 - DNA, 25 bp, Homo sapien
gctgagaacgtgctctacctcctga

SEQ ID NO: 1077750 - DNA, 25 bp, Homo sapien
gactgcagggctaggaacaccaaac

SEQ ID NO: 1077751 - DNA, 25 bp, Homo sapien
tgtgaataattaggcaaggcgttag

SEQ ID NO: 1077752 - DNA, 25 bp, Homo sapien
taggccagatggaaagccgagaccc

SEQ ID NO: 1077753 - DNA, 25 bp, Homo sapien
ggtatcttactcctacgacgctgct

SEQ ID NO: 1077754 - DNA, 25 bp, Homo sapien
ctgggtcagtatcgacgtccccgag

SEQ ID NO: 1077755 - DNA, 25 bp, Homo sapien
cactcgagggcccagaacgttggca

SEQ ID NO: 1077756 - DNA, 25 bp, Homo sapien
ggcggagctcattcacactcgaggg

SEQ ID NO: 1077757 - DNA, 25 bp, Homo sapien
cctgaagtcgcacagtgaataagct

SEQ ID NO: 1077758 - DNA, 25 bp, Homo sapien
tcaaagaggttatgtgcctgaagtc

SEQ ID NO: 1077759 - DNA, 25 bp, Homo sapien
ttaacaatggtaccatacaaccact

SEQ ID NO: 1077760 - DNA, 25 bp, Homo sapien
actgtacctttattggacaggctca

SEQ ID NO: 1077761 - DNA, 25 bp, Homo sapien
gaatattcaggacttaacggctcca

SEQ ID NO: 1077762 - DNA, 25 bp, Homo sapien
tacaaagcttctatcccaggaggtg

SEQ ID NO: 1077763 - DNA, 25 bp, Homo sapien
tgagggccacactattaccatgaga

SEQ ID NO: 1077764 - DNA, 25 bp, Homo sapien
tacctgagaccagttgggagcactg

SEQ ID NO: 1077765 - DNA, 25 bp, Homo sapien
tccatcatgggcaacaaggacctgt

SEQ ID NO: 1077766 - DNA, 25 bp, Homo sapien
tgcagaggacaactatggtacacag

SEQ ID NO: 1077767 - DNA, 25 bp, Homo sapien
gaaacagggctcatgctagtggcag

SEQ ID NO: 1077768 - DNA, 25 bp, Homo sapien
ggtacacaggtccagagaacacagc

SEQ ID NO: 1077769 - DNA, 25 bp, Homo sapien
tcatccccgttttctaggtgaggaa

SEQ ID NO: 1077770 - DNA, 25 bp, Homo sapien
tgctccccaccagtaaaaaaggctc

SEQ ID NO: 1077771 - DNA, 25 bp, Homo sapien
gatcaagccggctatagtgggcgca

SEQ ID NO: 1077772 - DNA, 25 bp, Homo sapien
aaacacttgtggagggaattctgcc

SEQ ID NO: 1077773 - DNA, 25 bp, Homo sapien
gatgggtatgcatttccaggcaaga

SEQ ID NO: 1077774 - DNA, 25 bp, Homo sapien
ccattttgctagagaaggccgcgga

SEQ ID NO: 1077775 - DNA, 25 bp, Homo sapien
cccggccggtgcaaaagcaaggctt

SEQ ID NO: 1077776 - DNA, 25 bp, Homo sapien
gcaaggcttggctcacaaacgggaa

SEQ ID NO: 1077777 - DNA, 25 bp, Homo sapien
ctctggtattgcatcgtgggcattt

SEQ ID NO: 1077778 - DNA, 25 bp, Homo sapien
ggtattgcatcgtgggcattttctg

SEQ ID NO: 1077779 - DNA, 25 bp, Homo sapien
cagactctggtattgcatcgtgggc

SEQ ID NO: 1077780 - DNA, 25 bp, Homo sapien
catgcagactctggtattgcatcgt

SEQ ID NO: 1077781 - DNA, 25 bp, Homo sapien
agtttgcgtggttccgtgctggcct

SEQ ID NO: 1077782 - DNA, 25 bp, Homo sapien
cacagaagttgtagagctcttaacc

SEQ ID NO: 1077783 - DNA, 25 bp, Homo sapien
tgaagtgggtgggatactctcagcc

SEQ ID NO: 1077784 - DNA, 25 bp, Homo sapien
tacagaaggagtttgcgtggttccg

SEQ ID NO: 1077785 - DNA, 25 bp, Homo sapien
tagcaattacgtgaagggtccggcc

SEQ ID NO: 1077786 - DNA, 25 bp, Homo sapien
catataaagggcatcccgacagagg

SEQ ID NO: 1077787 - DNA, 25 bp, Homo sapien
ccttttcagagaactccagtgggaa

SEQ ID NO: 1077788 - DNA, 25 bp, Homo sapien
ttgtcagtaaggtggagaatggccc

SEQ ID NO: 1077789 - DNA, 25 bp, Homo sapien
cgtgcagcctcacgcccttcactcc

SEQ ID NO: 1077790 - DNA, 25 bp, Homo sapien
tccagcaaggtattcccagccctct

SEQ ID NO: 1077791 - DNA, 25 bp, Homo sapien
caggtcaagtttaaaccctccagca

SEQ ID NO: 1077792 - DNA, 25 bp, Homo sapien
tccaagcacgcagctcatgaaactg

SEQ ID NO: 1077793 - DNA, 25 bp, Homo sapien
ggtgcctccaggtgtccgtatctca

SEQ ID NO: 1077794 - DNA, 25 bp, Homo sapien
cagagacgtaaaggtgccagagcca

SEQ ID NO: 1077795 - DNA, 25 bp, Homo sapien
cattgttacagggagccataagaga

SEQ ID NO: 1077796 - DNA, 25 bp, Homo sapien
gctgtggaccttcccaatcgctaga

SEQ ID NO: 1077797 - DNA, 25 bp, Homo sapien
tcttgaagcagataagggaagttca

SEQ ID NO: 1077798 - DNA, 25 bp, Homo sapien
tgaagtccaaagtgacgtaccttgg

SEQ ID NO: 1077799 - DNA, 25 bp, Homo sapien
tctgagtttactcttctctggttga

SEQ ID NO: 1077800 - DNA, 25 bp, Homo sapien
cattgagttccttttggaggattta

SEQ ID NO: 1077801 - DNA, 25 bp, Homo sapien
tgagcaactgaatgtgacagccctg

SEQ ID NO: 1077802 - DNA, 25 bp, Homo sapien
tgtcatgctgcgtctaaggaactcc

SEQ ID NO: 1077803 - DNA, 25 bp, Homo sapien
ggacatttcgcctcaatctgaagga

SEQ ID NO: 1077804 - DNA, 25 bp, Homo sapien
ggacttagccgacttctctgggaga

SEQ ID NO: 1077805 - DNA, 25 bp, Homo sapien
tagattattcaggttgggtgcagtg

SEQ ID NO: 1077806 - DNA, 25 bp, Homo sapien
taaagactctaatagattattcagg

SEQ ID NO: 1077807 - DNA, 25 bp, Homo sapien
accctttagttcagatgtatttctc

SEQ ID NO: 1077808 - DNA, 25 bp, Homo sapien
ttaccctttagttcagatgtatttc

SEQ ID NO: 1077809 - DNA, 25 bp, Homo sapien
cttgaagcacacaacagtcagaaaa

SEQ ID NO: 1077810 - DNA, 25 bp, Homo sapien
agcaccaggtttgatatgaggagag

SEQ ID NO: 1077811 - DNA, 25 bp, Homo sapien
ggagagggatccttatccacatctc

SEQ ID NO: 1077812 - DNA, 25 bp, Homo sapien
ggcagaatccagacataggcctgct

SEQ ID NO: 1077813 - DNA, 25 bp, Homo sapien
tgcacagcttagaagcaccaggttt

SEQ ID NO: 1077814 - DNA, 25 bp, Homo sapien
aaaatggaatgctttacgaatctgc

SEQ ID NO: 1077815 - DNA, 25 bp, Homo sapien
cttgcgcagaggccagactaatctt

SEQ ID NO: 1077816 - DNA, 25 bp, Homo sapien
atggaatgctttacgaatctgcata

SEQ ID NO: 1077817 - DNA, 25 bp, Homo sapien
gaatgctttacgaatctgcatatca

SEQ ID NO: 1077818 - DNA, 25 bp, Homo sapien
tgaccttgagggagtcactaaattc

SEQ ID NO: 1077819 - DNA, 25 bp, Homo sapien
aatcctactttctaactgtgtgacc

SEQ ID NO: 1077820 - DNA, 25 bp, Homo sapien
tgctgagccataagaatcacctcta

SEQ ID NO: 1077821 - DNA, 25 bp, Homo sapien
cactaaattcttgctgagccataag

SEQ ID NO: 1077822 - DNA, 25 bp, Homo sapien
caggcccctggacatgtcttgttaa

SEQ ID NO: 1077823 - DNA, 25 bp, Homo sapien
tatatactcaactgaatagttaagg

SEQ ID NO: 1077824 - DNA, 25 bp, Homo sapien
tctccaggtgacaagtcagtaggac

SEQ ID NO: 1077825 - DNA, 25 bp, Homo sapien
tgtcttgttaatgaggggagccatg

SEQ ID NO: 1077826 - DNA, 25 bp, Homo sapien
gatctttacgagaaactacctggca

SEQ ID NO: 1077827 - DNA, 25 bp, Homo sapien
ggcaggagttcccatatcccagtgg

SEQ ID NO: 1077828 - DNA, 25 bp, Homo sapien
tcctagaggtctacagctggcatct

SEQ ID NO: 1077829 - DNA, 25 bp, Homo sapien
caggctcgatggtcaactcctagag

SEQ ID NO: 1077830 - DNA, 25 bp, Homo sapien
tgttagctggcttcaagtgactcaa

SEQ ID NO: 1077831 - DNA, 25 bp, Homo sapien
tataggtggtcacggagtttgtcca

SEQ ID NO: 1077832 - DNA, 25 bp, Homo sapien
aagctcttcactagaaaagggtcag

SEQ ID NO: 1077833 - DNA, 25 bp, Homo sapien
tctttgaagacacaggtagtaggga

SEQ ID NO: 1077834 - DNA, 25 bp, Homo sapien
ctttgaaagacaccattcttaggct

SEQ ID NO: 1077835 - DNA, 25 bp, Homo sapien
gaaagacaccattcttaggctgggt

SEQ ID NO: 1077836 - DNA, 25 bp, Homo sapien
ttgaaagacaccattcttaggctgg

SEQ ID NO: 1077837 - DNA, 25 bp, Homo sapien
tcattttgactttatcagaatgaaa

SEQ ID NO: 1077838 - DNA, 25 bp, Homo sapien
gtggctccccaagggcgatggcctc

SEQ ID NO: 1077839 - DNA, 25 bp, Homo sapien
gcactagtggctccccaagggcgat

SEQ ID NO: 1077840 - DNA, 25 bp, Homo sapien
ctagtggctccccaagggcgatggc

SEQ ID NO: 1077841 - DNA, 25 bp, Homo sapien
tgcactagtggctccccaagggcga

SEQ ID NO: 1077842 - DNA, 25 bp, Homo sapien
acatgctcgttcgctgggtggggcg

SEQ ID NO: 1077843 - DNA, 25 bp, Homo sapien
gccacatgctcgttcgctgggtggg

SEQ ID NO: 1077844 - DNA, 25 bp, Homo sapien
cacatgctcgttcgctgggtggggc

SEQ ID NO: 1077845 - DNA, 25 bp, Homo sapien
ccacatgctcgttcgctgggtgggg

SEQ ID NO: 1077846 - DNA, 25 bp, Homo sapien
gctagtggaggacgcataggtagtt

SEQ ID NO: 1077847 - DNA, 25 bp, Homo sapien
ccttggggctagtggaggacgcata

SEQ ID NO: 1077848 - DNA, 25 bp, Homo sapien
aaggccttggggctagtggaggacg

SEQ ID NO: 1077849 - DNA, 25 bp, Homo sapien
cagaggaagaaaccgagacccagaa

SEQ ID NO: 1077850 - DNA, 25 bp, Homo sapien
cctctgcacattcaggcagcaaaat

SEQ ID NO: 1077851 - DNA, 25 bp, Homo sapien
acaattctttctatggcctagcctc

SEQ ID NO: 1077852 - DNA, 25 bp, Homo sapien
ggcagcaacaggtgatcaaagacag

SEQ ID NO: 1077853 - DNA, 25 bp, Homo sapien
agtcccagcttgactgaaacaagag

SEQ ID NO: 1077854 - DNA, 25 bp, Homo sapien
caaagacagagtaaggtgaaagcca

SEQ ID NO: 1077855 - DNA, 25 bp, Homo sapien
cactctgggcatttgtgaggcatct

SEQ ID NO: 1077856 - DNA, 25 bp, Homo sapien
tgcactgcaagttgggagctatgac

SEQ ID NO: 1077857 - DNA, 25 bp, Homo sapien
acatcctctgtccaggagcaagttg

SEQ ID NO: 1077858 - DNA, 25 bp, Homo sapien
ttggacctgtagatatagtctcccc

SEQ ID NO: 1077859 - DNA, 25 bp, Homo sapien
tttccgactggcttaaacggcgcac

SEQ ID NO: 1077860 - DNA, 25 bp, Homo sapien
ttttccgactggcttaaacggcgca

SEQ ID NO: 1077861 - DNA, 25 bp, Homo sapien
aattacctgggcaatgattctatga

SEQ ID NO: 1077862 - DNA, 25 bp, Homo sapien
tacttaggaataaccttagaggcaa

SEQ ID NO: 1077863 - DNA, 25 bp, Homo sapien
tctcaagggacaaaacaatcgaaaa

SEQ ID NO: 1077864 - DNA, 25 bp, Homo sapien
tgttcactgcaaactacaaattttg

SEQ ID NO: 1077865 - DNA, 25 bp, Homo sapien
cagagggaaaagactgggacttgtt

SEQ ID NO: 1077866 - DNA, 25 bp, Homo sapien
gaaaactgccggagaactgtagacc

SEQ ID NO: 1077867 - DNA, 25 bp, Homo sapien
ctgactcagcttagatgggaacggt

SEQ ID NO: 1077868 - DNA, 25 bp, Homo sapien
caggttggaccccactgaaagcagt

SEQ ID NO: 1077869 - DNA, 25 bp, Homo sapien
gctcaagcagtacttaagtaacatt

SEQ ID NO: 1077870 - DNA, 25 bp, Homo sapien
taacaaagactaataggaatcccca

SEQ ID NO: 1077871 - DNA, 25 bp, Homo sapien
aatttgtggaatgttgctcaagcag

SEQ ID NO: 1077872 - DNA, 25 bp, Homo sapien
cagaagagtatgttctctgactgaa

SEQ ID NO: 1077873 - DNA, 25 bp, Homo sapien
aatccacatgttgcactacaaaagg

SEQ ID NO: 1077874 - DNA, 25 bp, Homo sapien
gaggatgtgcctcggaaaaagagac

SEQ ID NO: 1077875 - DNA, 25 bp, Homo sapien
gacacaagccacagtaggattgtag

SEQ ID NO: 1077876 - DNA, 25 bp, Homo sapien
tcaaggttttgattaggctcactga

SEQ ID NO: 1077877 - DNA, 25 bp, Homo sapien
gaagcagtgcctgttggaggagggg

SEQ ID NO: 1077878 - DNA, 25 bp, Homo sapien
ggtaacacttctgggcttggataac

SEQ ID NO: 1077879 - DNA, 25 bp, Homo sapien
tctggtaacacttctgggcttggat

SEQ ID NO: 1077880 - DNA, 25 bp, Homo sapien
tggtaacacttctgggcttggataa

SEQ ID NO: 1077881 - DNA, 25 bp, Homo sapien
tttctggtaacacttctgggcttgg

SEQ ID NO: 1077882 - DNA, 25 bp, Homo sapien
cagataaatagggacgctaaagccc

SEQ ID NO: 1077883 - DNA, 25 bp, Homo sapien
cattcttggcagtgacaggtatgag

SEQ ID NO: 1077884 - DNA, 25 bp, Homo sapien
tacaggtacggtgagcaggaagtcc

SEQ ID NO: 1077885 - DNA, 25 bp, Homo sapien
ggtatgagaactgcaccagtggaaa

SEQ ID NO: 1077886 - DNA, 25 bp, Homo sapien
gcgccccgctccgaaatcttgatat

SEQ ID NO: 1077887 - DNA, 25 bp, Homo sapien
acacggcctcctacgcagttctgga

SEQ ID NO: 1077888 - DNA, 25 bp, Homo sapien
tctgatccagcctaatagacacggc

SEQ ID NO: 1077889 - DNA, 25 bp, Homo sapien
tgccaaccaatgctaaccctacggg

SEQ ID NO: 1077890 - DNA, 25 bp, Homo sapien
ggcaggtgagtcgtccaggtgattg

SEQ ID NO: 1077891 - DNA, 25 bp, Homo sapien
aaggcaggtgagtcgtccaggtgat

SEQ ID NO: 1077892 - DNA, 25 bp, Homo sapien
ggtaaggcaggtgagtcgtccaggt

SEQ ID NO: 1077893 - DNA, 25 bp, Homo sapien
taaggcaggtgagtcgtccaggtga

SEQ ID NO: 1077894 - DNA, 25 bp, Homo sapien
ggggtggctcgattgggagtgggag

SEQ ID NO: 1077895 - DNA, 25 bp, Homo sapien
gggtggctcgattgggagtgggagc

SEQ ID NO: 1077896 - DNA, 25 bp, Homo sapien
ttggttgggggtggctcgattggga

SEQ ID NO: 1077897 - DNA, 25 bp, Homo sapien
gggggtggctcgattgggagtggga

SEQ ID NO: 1077898 - DNA, 25 bp, Homo sapien
tctccaggatgagagctgtgaattg

SEQ ID NO: 1077899 - DNA, 25 bp, Homo sapien
ctctccaggatgagagctgtgaatt

SEQ ID NO: 1077900 - DNA, 25 bp, Homo sapien
gctgttgtcttgcattccgtgtgtc

SEQ ID NO: 1077901 - DNA, 25 bp, Homo sapien
tacagaccaagttccgtggagaagc

SEQ ID NO: 1077902 - DNA, 25 bp, Homo sapien
cagaccaagttccgtggagaagcca

SEQ ID NO: 1077903 - DNA, 25 bp, Homo sapien
aagttccgtggagaagccagtctca

SEQ ID NO: 1077904 - DNA, 25 bp, Homo sapien
acagaccaagttccgtggagaagcc

SEQ ID NO: 1077905 - DNA, 25 bp, Homo sapien
ctccagagaacacattagatgtgtt

SEQ ID NO: 1077906 - DNA, 25 bp, Homo sapien
cttcattctctgtcaatggccctgc

SEQ ID NO: 1077907 - DNA, 25 bp, Homo sapien
cattagatgtgttccactcttcact

SEQ ID NO: 1077908 - DNA, 25 bp, Homo sapien
cattctctgtcaatggccctgcagt

SEQ ID NO: 1077909 - DNA, 25 bp, Homo sapien
tccaggcaacagcgctcgggtagtg

SEQ ID NO: 1077910 - DNA, 25 bp, Homo sapien
ctccaggcaacagcgctcgggtagt

SEQ ID NO: 1077911 - DNA, 25 bp, Homo sapien
acagtctccaggcaacgcgtccccg

SEQ ID NO: 1077912 - DNA, 25 bp, Homo sapien
gccttccacagtctccaggcaacgc

SEQ ID NO: 1077913 - DNA, 25 bp, Homo sapien
ttccacagtctccaggcaacgcgtc

SEQ ID NO: 1077914 - DNA, 25 bp, Homo sapien
tccaggcaacgcgtccccgctgtct

SEQ ID NO: 1077915 - DNA, 25 bp, Homo sapien
tcacgtgatactgcgtgtagagttt

SEQ ID NO: 1077916 - DNA, 25 bp, Homo sapien
gctccttgaggtacagttcccgcaa

SEQ ID NO: 1077917 - DNA, 25 bp, Homo sapien
ggttcgtagctccttgaggtacagt

SEQ ID NO: 1077918 - DNA, 25 bp, Homo sapien
tcttgcggaggggattcacgtgata

SEQ ID NO: 1077919 - DNA, 25 bp, Homo sapien
tgccaagacatgggcttcctggtga

SEQ ID NO: 1077920 - DNA, 25 bp, Homo sapien
catctgcaggttcctccaggttatc

SEQ ID NO: 1077921 - DNA, 25 bp, Homo sapien
aggttatcatgccaagacatgggct

SEQ ID NO: 1077922 - DNA, 25 bp, Homo sapien
tatcatgccaagacatgggcttcct

SEQ ID NO: 1077923 - DNA, 25 bp, Homo sapien
cgaggtatgagttatgaaggagtca

SEQ ID NO: 1077924 - DNA, 25 bp, Homo sapien
ggtatgagttatgaaggagtcaggc

SEQ ID NO: 1077925 - DNA, 25 bp, Homo sapien
gaggtatgagttatgaaggagtcag

SEQ ID NO: 1077926 - DNA, 25 bp, Homo sapien
gtatgagttatgaaggagtcaggct

SEQ ID NO: 1077927 - DNA, 25 bp, Homo sapien
gtctctgggtacttcttccttggtc

SEQ ID NO: 1077928 - DNA, 25 bp, Homo sapien
caagggctctaagtcccatccaact

SEQ ID NO: 1077929 - DNA, 25 bp, Homo sapien
tgtctctgggtacttcttccttggt

SEQ ID NO: 1077930 - DNA, 25 bp, Homo sapien
gtcccatccaacttcctggttttca

SEQ ID NO: 1077931 - DNA, 25 bp, Homo sapien
tatttcctgaggaaggagccacgct

SEQ ID NO: 1077932 - DNA, 25 bp, Homo sapien
ttcctgaggaaggagccacgcttac

SEQ ID NO: 1077933 - DNA, 25 bp, Homo sapien
tttcctgaggaaggagccacgctta

SEQ ID NO: 1077934 - DNA, 25 bp, Homo sapien
atttcctgaggaaggagccacgctt

SEQ ID NO: 1077935 - DNA, 25 bp, Homo sapien
tactttcttactatgctagcagtgc

SEQ ID NO: 1077936 - DNA, 25 bp, Homo sapien
gttgcagctgatcaagcctcttctg

SEQ ID NO: 1077937 - DNA, 25 bp, Homo sapien
gaacagcatggaatatttgcagacc

SEQ ID NO: 1077938 - DNA, 25 bp, Homo sapien
tgatggcattgtccccaggtttata

SEQ ID NO: 1077939 - DNA, 25 bp, Homo sapien
gtactgagactggaggtatcttgtc

SEQ ID NO: 1077940 - DNA, 25 bp, Homo sapien
gtatcttgtctatccaaggtgaggc

SEQ ID NO: 1077941 - DNA, 25 bp, Homo sapien
gaggctgaatgatggtcattgagtc

SEQ ID NO: 1077942 - DNA, 25 bp, Homo sapien
agatgagaggctgaatgatggtcat

SEQ ID NO: 1077943 - DNA, 25 bp, Homo sapien
gagaataacctacgcacagtcgtgg

SEQ ID NO: 1077944 - DNA, 25 bp, Homo sapien
tgtcacactgcctgactgggaggcc

SEQ ID NO: 1077945 - DNA, 25 bp, Homo sapien
gacccagcgcatgctaggtattcaa

SEQ ID NO: 1077946 - DNA, 25 bp, Homo sapien
taaaagtcggcactctgacacatcg

SEQ ID NO: 1077947 - DNA, 25 bp, Homo sapien
tcagcctgcggtcatggcgttctgg

SEQ ID NO: 1077948 - DNA, 25 bp, Homo sapien
cagcctgcggtcatggcgttctggg

SEQ ID NO: 1077949 - DNA, 25 bp, Homo sapien
tgcggtcatggcgttctgggttgat

SEQ ID NO: 1077950 - DNA, 25 bp, Homo sapien
gcctgcggtcatggcgttctgggtt

SEQ ID NO: 1077951 - DNA, 25 bp, Homo sapien
ctacttgtggtgatcatctcctaag

SEQ ID NO: 1077952 - DNA, 25 bp, Homo sapien
ttgtggtgatcatctcctaagcccc

SEQ ID NO: 1077953 - DNA, 25 bp, Homo sapien
gatcatctcctaagccccacgtttt

SEQ ID NO: 1077954 - DNA, 25 bp, Homo sapien
ggtgatcatctcctaagccccacgt

SEQ ID NO: 1077955 - DNA, 25 bp, Homo sapien
ttaaggcattagatccacagatggg

SEQ ID NO: 1077956 - DNA, 25 bp, Homo sapien
gcacacttaaggcattagatccaca

SEQ ID NO: 1077957 - DNA, 25 bp, Homo sapien
cacttaaggcattagatccacagat

SEQ ID NO: 1077958 - DNA, 25 bp, Homo sapien
cacacttaaggcattagatccacag

SEQ ID NO: 1077959 - DNA, 25 bp, Homo sapien
atcattttactcttatcctctagat

SEQ ID NO: 1077960 - DNA, 25 bp, Homo sapien
aggtgcccgggtgaggagcaggctc

SEQ ID NO: 1077961 - DNA, 25 bp, Homo sapien
tcagttctgttcgtcctcaccctgg

SEQ ID NO: 1077962 - DNA, 25 bp, Homo sapien
tagcttccgggccaagacagctcat

SEQ ID NO: 1077963 - DNA, 25 bp, Homo sapien
tcaaatgtaagtgagcccaggtgcc

SEQ ID NO: 1077964 - DNA, 25 bp, Homo sapien
cggacactttcaaacgccgtagcgg

SEQ ID NO: 1077965 - DNA, 25 bp, Homo sapien
tatccagaggcgctacctgtaggga

SEQ ID NO: 1077966 - DNA, 25 bp, Homo sapien
tagggatcctaagcaacccggacac

SEQ ID NO: 1077967 - DNA, 25 bp, Homo sapien
ctgggtcagcagaccacgcatgtat

SEQ ID NO: 1077968 - DNA, 25 bp, Homo sapien
gatccacattgtacttcacacagtg

SEQ ID NO: 1077969 - DNA, 25 bp, Homo sapien
gcgtctgagctaccacggctgacat

SEQ ID NO: 1077970 - DNA, 25 bp, Homo sapien
gccacgtgggatcgaagaccaaaaa

SEQ ID NO: 1077971 - DNA, 25 bp, Homo sapien
taatgatctgttcatcgaagtagaa

SEQ ID NO: 1077972 - DNA, 25 bp, Homo sapien
accgccgattgggactgatggacaa

SEQ ID NO: 1077973 - DNA, 25 bp, Homo sapien
tcagagatagcgaggtaccgccgat

SEQ ID NO: 1077974 - DNA, 25 bp, Homo sapien
tcccacagccagtagacaagatttg

SEQ ID NO: 1077975 - DNA, 25 bp, Homo sapien
agaactttgcgcttccggcaaggga

SEQ ID NO: 1077976 - DNA, 25 bp, Homo sapien
cacccaggtgtgagctagatagttt

SEQ ID NO: 1077977 - DNA, 25 bp, Homo sapien
ttccctcagcaaaacggagaagctt

SEQ ID NO: 1077978 - DNA, 25 bp, Homo sapien
ttatgctggtctcccaacgctgatc

SEQ ID NO: 1077979 - DNA, 25 bp, Homo sapien
cctgagtgttatcctgtggactgaa

SEQ ID NO: 1077980 - DNA, 25 bp, Homo sapien
tgggaaccgtacacaaactgcacat

SEQ ID NO: 1077981 - DNA, 25 bp, Homo sapien
gagttgtagaggaaaacagtcgcag

SEQ ID NO: 1077982 - DNA, 25 bp, Homo sapien
cagtcgcaggtatgcttgggccaaa

SEQ ID NO: 1077983 - DNA, 25 bp, Homo sapien
ccagagctgaaggactgtgaacaca

SEQ ID NO: 1077984 - DNA, 25 bp, Homo sapien
tctggctatggctactggccgccac

SEQ ID NO: 1077985 - DNA, 25 bp, Homo sapien
gccgccaccatctgttcataggaag

SEQ ID NO: 1077986 - DNA, 25 bp, Homo sapien
gaactgactggtggaaattcaatca

SEQ ID NO: 1077987 - DNA, 25 bp, Homo sapien
gggcatggacatctggctatggcta

SEQ ID NO: 1077988 - DNA, 25 bp, Homo sapien
gatttctctgctctcacggtaaaaa

SEQ ID NO: 1077989 - DNA, 25 bp, Homo sapien
acaggcaaatccctttgaataggct

SEQ ID NO: 1077990 - DNA, 25 bp, Homo sapien
tctgctctcacggtaaaaatccttt

SEQ ID NO: 1077991 - DNA, 25 bp, Homo sapien
tttgaataggctgcaatggcaaaca

SEQ ID NO: 1077992 - DNA, 25 bp, Homo sapien
cttgctgatctctgtcagggacatg

SEQ ID NO: 1077993 - DNA, 25 bp, Homo sapien
catggtgatgctgtagagttggttc

SEQ ID NO: 1077994 - DNA, 25 bp, Homo sapien
tgacttggatcattgctctgcgggt

SEQ ID NO: 1077995 - DNA, 25 bp, Homo sapien
gagaacgtcctgtttgtcagactga

SEQ ID NO: 1077996 - DNA, 25 bp, Homo sapien
cactaaaaacgctgataaaatttgg

SEQ ID NO: 1077997 - DNA, 25 bp, Homo sapien
ccatggcaactaggcaaggaaaata

SEQ ID NO: 1077998 - DNA, 25 bp, Homo sapien
tttgacatgatactagaggttctag

SEQ ID NO: 1077999 - DNA, 25 bp, Homo sapien
tacctctattgcagatgtcatgatc

SEQ ID NO: 1078000 - DNA, 25 bp, Homo sapien
gatcaggtgcattcacggtgttatg

SEQ ID NO: 1078001 - DNA, 25 bp, Homo sapien
caggtgcattcacggtgttatggct

SEQ ID NO: 1078002 - DNA, 25 bp, Homo sapien
attcacggtgttatggctgtagacc

SEQ ID NO: 1078003 - DNA, 25 bp, Homo sapien
acaagatcaggtgcattcacggtgt

SEQ ID NO: 1078004 - DNA, 25 bp, Homo sapien
tttgcggatgcaggtagctagaccg

SEQ ID NO: 1078005 - DNA, 25 bp, Homo sapien
atggatcgatccagagaacaggtgg

SEQ ID NO: 1078006 - DNA, 25 bp, Homo sapien
gtttcataattccaaaggcggatgg

SEQ ID NO: 1078007 - DNA, 25 bp, Homo sapien
aatactcaaagtgagcaggctcccc

SEQ ID NO: 1078008 - DNA, 25 bp, Homo sapien
catcaatgagtagattcatgaggcg

SEQ ID NO: 1078009 - DNA, 25 bp, Homo sapien
catgaggcgtagtttgtcagcaaac

SEQ ID NO: 1078010 - DNA, 25 bp, Homo sapien
cctactacaatgaagtgtccagatg

SEQ ID NO: 1078011 - DNA, 25 bp, Homo sapien
ccagatggatgaaggctgatggaat

SEQ ID NO: 1078012 - DNA, 25 bp, Homo sapien
cgtggtggtgtaaacgtgaatcaca

SEQ ID NO: 1078013 - DNA, 25 bp, Homo sapien
aacaggtgacctccattgctaaagg

SEQ ID NO: 1078014 - DNA, 25 bp, Homo sapien
aatcacatttccattgactgcagca

SEQ ID NO: 1078015 - DNA, 25 bp, Homo sapien
ttcaggcttgagatgttctctaggc

SEQ ID NO: 1078016 - DNA, 25 bp, Homo sapien
ttcatacacagcaccatctgtgcca

SEQ ID NO: 1078017 - DNA, 25 bp, Homo sapien
ctttcctgtggacagattccattca

SEQ ID NO: 1078018 - DNA, 25 bp, Homo sapien
tctgtgccaccagaaatcagtttgc

SEQ ID NO: 1078019 - DNA, 25 bp, Homo sapien
ctgcattccacacaattgagcgaat

SEQ ID NO: 1078020 - DNA, 25 bp, Homo sapien
gcaagacttgagcacgcattctgtc

SEQ ID NO: 1078021 - DNA, 25 bp, Homo sapien
agtaacacagttgtagctgcaagac

SEQ ID NO: 1078022 - DNA, 25 bp, Homo sapien
tggcatcgggggagacagtaacaca

SEQ ID NO: 1078023 - DNA, 25 bp, Homo sapien
tccttgagggtgtggtctgatccaa

SEQ ID NO: 1078024 - DNA, 25 bp, Homo sapien
cagaggcagagggtacttcatggca

SEQ ID NO: 1078025 - DNA, 25 bp, Homo sapien
caatggcggtgtaggtgacatcaaa

SEQ ID NO: 1078026 - DNA, 25 bp, Homo sapien
atggcacgaatggttcccaccgagg

SEQ ID NO: 1078027 - DNA, 25 bp, Homo sapien
aaacatcatgcgtccagaatgcgag

SEQ ID NO: 1078028 - DNA, 25 bp, Homo sapien
tgaacaaggcacgtagcaggcaggt

SEQ ID NO: 1078029 - DNA, 25 bp, Homo sapien
ggatgaacaaggcacgtagcaggca

SEQ ID NO: 1078030 - DNA, 25 bp, Homo sapien
aaacaaagagtatattcatagtcaa

SEQ ID NO: 1078031 - DNA, 25 bp, Homo sapien
caatagatggtgattcaatgaatga

SEQ ID NO: 1078032 - DNA, 25 bp, Homo sapien
tgtgtactcatggtattgcccctgg

SEQ ID NO: 1078033 - DNA, 25 bp, Homo sapien
tggccttttgtaccctcagggagag

SEQ ID NO: 1078034 - DNA, 25 bp, Homo sapien
tggcaaccatttcgcgtgcaagata

SEQ ID NO: 1078035 - DNA, 25 bp, Homo sapien
tgtggtagcacattgcagaattccc

SEQ ID NO: 1078036 - DNA, 25 bp, Homo sapien
gcatgacccacgtgccaggtcaaag

SEQ ID NO: 1078037 - DNA, 25 bp, Homo sapien
gatcacaggcatgacccacgtgcca

SEQ ID NO: 1078038 - DNA, 25 bp, Homo sapien
acccacgtgccaggtcaaagaagaa

SEQ ID NO: 1078039 - DNA, 25 bp, Homo sapien
caggcatgacccacgtgccaggtca

SEQ ID NO: 1078040 - DNA, 25 bp, Homo sapien
aactgatcatcaaaggtaagcaaca

SEQ ID NO: 1078041 - DNA, 25 bp, Homo sapien
accttccaggtgaacaggcagccat

SEQ ID NO: 1078042 - DNA, 25 bp, Homo sapien
tgattccccggccatccttatcaaa

SEQ ID NO: 1078043 - DNA, 25 bp, Homo sapien
agtcacaagcacctcttcggcaaag

SEQ ID NO: 1078044 - DNA, 25 bp, Homo sapien
tagtcggagttgatactcattctcc

SEQ ID NO: 1078045 - DNA, 25 bp, Homo sapien
tagttcatgtcctttagtcggagtt

SEQ ID NO: 1078046 - DNA, 25 bp, Homo sapien
gatgaacttgtctgttagctcctta

SEQ ID NO: 1078047 - DNA, 25 bp, Homo sapien
taattcctccacacgagtctttagc

SEQ ID NO: 1078048 - DNA, 25 bp, Homo sapien
tgtcctgcagttcccggctttgctt

SEQ ID NO: 1078049 - DNA, 25 bp, Homo sapien
tatgtgctcatggtgataaacatcc

SEQ ID NO: 1078050 - DNA, 25 bp, Homo sapien
tggtgataaacatcctgcttctctt

SEQ ID NO: 1078051 - DNA, 25 bp, Homo sapien
gtctaggaggtcttctatgtgctca

SEQ ID NO: 1078052 - DNA, 25 bp, Homo sapien
cgttatcccggagctgtttttcata

SEQ ID NO: 1078053 - DNA, 25 bp, Homo sapien
tttgcctcgtaaaactcagtcagct

SEQ ID NO: 1078054 - DNA, 25 bp, Homo sapien
cctggtacttctcatattctagaag

SEQ ID NO: 1078055 - DNA, 25 bp, Homo sapien
ggctcttggtctcatcgttatcccg

SEQ ID NO: 1078056 - DNA, 25 bp, Homo sapien
gttttgatatcttggatttctcggt

SEQ ID NO: 1078057 - DNA, 25 bp, Homo sapien
cccttgagccgcaggtttgattcct

SEQ ID NO: 1078058 - DNA, 25 bp, Homo sapien
ttggtctcttcaaactcccgcagct

SEQ ID NO: 1078059 - DNA, 25 bp, Homo sapien
cctgtttctcccttgagccgcaggt

SEQ ID NO: 1078060 - DNA, 25 bp, Homo sapien
catcttagccatgaccaagaaggga

SEQ ID NO: 1078061 - DNA, 25 bp, Homo sapien
ttccagagaccggtacaccaagtgg

SEQ ID NO: 1078062 - DNA, 25 bp, Homo sapien
acccctgatggtgagtgaactaaaa

SEQ ID NO: 1078063 - DNA, 25 bp, Homo sapien
gaaagtgggccctaactgatgagcc

SEQ ID NO: 1078064 - DNA, 25 bp, Homo sapien
cagagacttaatgactccttgcagc

SEQ ID NO: 1078065 - DNA, 25 bp, Homo sapien
tagtctcgtctctttcctggatctc

SEQ ID NO: 1078066 - DNA, 25 bp, Homo sapien
cttgaggccttggatgtccttctcc

SEQ ID NO: 1078067 - DNA, 25 bp, Homo sapien
tccttttagggtctcgatgtcattg

SEQ ID NO: 1078068 - DNA, 25 bp, Homo sapien
ggtattgaggtatctgccccacaga

SEQ ID NO: 1078069 - DNA, 25 bp, Homo sapien
gaaaggcatcccaaaagtggaggca

SEQ ID NO: 1078070 - DNA, 25 bp, Homo sapien
gtcagtgcggcaagtgagctgtccc

SEQ ID NO: 1078071 - DNA, 25 bp, Homo sapien
cgtccttggcccttggagaattcca

SEQ ID NO: 1078072 - DNA, 25 bp, Homo sapien
ttttcagatcataaattcgcttctc

SEQ ID NO: 1078073 - DNA, 25 bp, Homo sapien
ctcctttattttgtagtcaagcaca

SEQ ID NO: 1078074 - DNA, 25 bp, Homo sapien
ttctctcgaggttctatttgcttct

SEQ ID NO: 1078075 - DNA, 25 bp, Homo sapien
gctcctttattttgtagtcaagcac

SEQ ID NO: 1078076 - DNA, 25 bp, Homo sapien
cagctcctttattttgtagtcaagc

SEQ ID NO: 1078077 - DNA, 25 bp, Homo sapien
tcacggctaggtagagtagaccctc

SEQ ID NO: 1078078 - DNA, 25 bp, Homo sapien
tatggactatatctggtggacacta

SEQ ID NO: 1078079 - DNA, 25 bp, Homo sapien
tgcgcccgggctgaaagatttttta

SEQ ID NO: 1078080 - DNA, 25 bp, Homo sapien
ccaattaggatgagactagctgtgc

SEQ ID NO: 1078081 - DNA, 25 bp, Homo sapien
gatgttcagctccagttgagtgttc

SEQ ID NO: 1078082 - DNA, 25 bp, Homo sapien
tcagtttctgccacaattctgtgat

SEQ ID NO: 1078083 - DNA, 25 bp, Homo sapien
tgcgcatctcctgatcggtggctct

SEQ ID NO: 1078084 - DNA, 25 bp, Homo sapien
tgcttatggaaattctccagttcag

SEQ ID NO: 1078085 - DNA, 25 bp, Homo sapien
gccgcggttcctgaatataggctac

SEQ ID NO: 1078086 - DNA, 25 bp, Homo sapien
tgctcgctgcacgtacttctcaaag

SEQ ID NO: 1078087 - DNA, 25 bp, Homo sapien
ttttgaccagcgcttccaagtctcg

SEQ ID NO: 1078088 - DNA, 25 bp, Homo sapien
tataggctacgcagttgtggaggtc

SEQ ID NO: 1078089 - DNA, 25 bp, Homo sapien
cgctgccgggtgtactcctgctgca

SEQ ID NO: 1078090 - DNA, 25 bp, Homo sapien
tagtctgtgcggtgcagctcgccct

SEQ ID NO: 1078091 - DNA, 25 bp, Homo sapien
cttcttcttgagagtggccaggttc

SEQ ID NO: 1078092 - DNA, 25 bp, Homo sapien
tgcatgatgcggacgtagtctgtgc

SEQ ID NO: 1078093 - DNA, 25 bp, Homo sapien
cctgtgccaggaacaaactgtgctt

SEQ ID NO: 1078094 - DNA, 25 bp, Homo sapien
taagcactgttctccctgagctgtg

SEQ ID NO: 1078095 - DNA, 25 bp, Homo sapien
tatctcacgagtggtggctacggag

SEQ ID NO: 1078096 - DNA, 25 bp, Homo sapien
tgagctgtgacaaacggtcctctgc

SEQ ID NO: 1078097 - DNA, 25 bp, Homo sapien
ggctccagagttcgtaagcactgtg

SEQ ID NO: 1078098 - DNA, 25 bp, Homo sapien
tatatgacttgctcagttacacagc

SEQ ID NO: 1078099 - DNA, 25 bp, Homo sapien
gagtcaggattccaaccccaacagt

SEQ ID NO: 1078100 - DNA, 25 bp, Homo sapien
taggatatggtctgcccttagcagc

SEQ ID NO: 1078101 - DNA, 25 bp, Homo sapien
tcatagacttgggaccgagtgaact

SEQ ID NO: 1078102 - DNA, 25 bp, Homo sapien
cattaatttccttgatcagagagac

SEQ ID NO: 1078103 - DNA, 25 bp, Homo sapien
ctgcggagctcattaatttccttga

SEQ ID NO: 1078104 - DNA, 25 bp, Homo sapien
tgtggtcggactttcttggtcagtt

SEQ ID NO: 1078105 - DNA, 25 bp, Homo sapien
cgaactccagcgagggtgtggaacc

SEQ ID NO: 1078106 - DNA, 25 bp, Homo sapien
tctctgaggcgctggatttctaggc

SEQ ID NO: 1078107 - DNA, 25 bp, Homo sapien
tcttgctcattcaaccttgcggtgg

SEQ ID NO: 1078108 - DNA, 25 bp, Homo sapien
tctaagtctacctcggagttggaga

SEQ ID NO: 1078109 - DNA, 25 bp, Homo sapien
gaccatacagactccaaccgcaagt

SEQ ID NO: 1078110 - DNA, 25 bp, Homo sapien
gactccaaccgcaagtctggcttgg

SEQ ID NO: 1078111 - DNA, 25 bp, Homo sapien
tgcagggaccatacagactccaacc

SEQ ID NO: 1078112 - DNA, 25 bp, Homo sapien
tacagactccaaccgcaagtctggc

SEQ ID NO: 1078113 - DNA, 25 bp, Homo sapien
gtggctgggtctcccaggatggcgc

SEQ ID NO: 1078114 - DNA, 25 bp, Homo sapien
ctgtgtgtggctgggtctcccagga

SEQ ID NO: 1078115 - DNA, 25 bp, Homo sapien
tgtggctgggtctcccaggatggcg

SEQ ID NO: 1078116 - DNA, 25 bp, Homo sapien
tgtgtggctgggtctcccaggatgg

SEQ ID NO: 1078117 - DNA, 25 bp, Homo sapien
cagtgttgagatagcaggacaccag

SEQ ID NO: 1078118 - DNA, 25 bp, Homo sapien
ggctggccatattttgtataagaag

SEQ ID NO: 1078119 - DNA, 25 bp, Homo sapien
agcctcagctaggtagcccacactg

SEQ ID NO: 1078120 - DNA, 25 bp, Homo sapien
tcctgggaccagcaatggctggcca

SEQ ID NO: 1078121 - DNA, 25 bp, Homo sapien
aatcagttgtcagtactgtgtctgg

SEQ ID NO: 1078122 - DNA, 25 bp, Homo sapien
agtcttggaagtgtgatgatgtgct

SEQ ID NO: 1078123 - DNA, 25 bp, Homo sapien
tatcactgattgaccttcatgtgtg

SEQ ID NO: 1078124 - DNA, 25 bp, Homo sapien
gcagtaaaagttacctaatcagttg

SEQ ID NO: 1078125 - DNA, 25 bp, Homo sapien
tctgggtcttatcaagtaacttgga

SEQ ID NO: 1078126 - DNA, 25 bp, Homo sapien
gtaacttggagtcaagtggaaaggc

SEQ ID NO: 1078127 - DNA, 25 bp, Homo sapien
ttcagattggtgacggtgaaggtca

SEQ ID NO: 1078128 - DNA, 25 bp, Homo sapien
cacaaagcggaaggtgcggacgaac

SEQ ID NO: 1078129 - DNA, 25 bp, Homo sapien
caaaagccccgtgctcattctccct

SEQ ID NO: 1078130 - DNA, 25 bp, Homo sapien
aaaagccccgtgctcattctccctc

SEQ ID NO: 1078131 - DNA, 25 bp, Homo sapien
tccaaaagccccgtgctcattctcc

SEQ ID NO: 1078132 - DNA, 25 bp, Homo sapien
gcctccaaaagccccgtgctcattc

SEQ ID NO: 1078133 - DNA, 25 bp, Homo sapien
aggatgaacaggtgtcgtttccagg

SEQ ID NO: 1078134 - DNA, 25 bp, Homo sapien
ggaggatgaacaggtgtcgtttcca

SEQ ID NO: 1078135 - DNA, 25 bp, Homo sapien
gaggaggatgaacaggtgtcgtttc

SEQ ID NO: 1078136 - DNA, 25 bp, Homo sapien
gatgaacaggtgtcgtttccagggc

SEQ ID NO: 1078137 - DNA, 25 bp, Homo sapien
ggagacacttcacctgcctaacctg

SEQ ID NO: 1078138 - DNA, 25 bp, Homo sapien
acctgcctaacctgcactcaggtga

SEQ ID NO: 1078139 - DNA, 25 bp, Homo sapien
gtttccggggagacacttcacctgc

SEQ ID NO: 1078140 - DNA, 25 bp, Homo sapien
ctagcttggtttccggggagacact

SEQ ID NO: 1078141 - DNA, 25 bp, Homo sapien
ctggatgtgctggatccgatccgag

SEQ ID NO: 1078142 - DNA, 25 bp, Homo sapien
atccgatccgagaaggcagggccga

SEQ ID NO: 1078143 - DNA, 25 bp, Homo sapien
tgctggatccgatccgagaaggcag

SEQ ID NO: 1078144 - DNA, 25 bp, Homo sapien
gatgtgctggatccgatccgagaag

SEQ ID NO: 1078145 - DNA, 25 bp, Homo sapien
ctgaaaatgcttgcacaggtgtgct

SEQ ID NO: 1078146 - DNA, 25 bp, Homo sapien
gaagcgagtgggagaacatgggggc

SEQ ID NO: 1078147 - DNA, 25 bp, Homo sapien
gtggccgtggagtcagtcccagcat

SEQ ID NO: 1078148 - DNA, 25 bp, Homo sapien
ggctgtgacttcgttggtctgaaaa

SEQ ID NO: 1078149 - DNA, 25 bp, Homo sapien
taagtgtgggtgtgggttagtcagc

SEQ ID NO: 1078150 - DNA, 25 bp, Homo sapien
tgaatggttcgtctcttagagcctc

SEQ ID NO: 1078151 - DNA, 25 bp, Homo sapien
gggtgtgggttagtcagcccagagc

SEQ ID NO: 1078152 - DNA, 25 bp, Homo sapien
aggaagcctgaatggttcgtctctt

SEQ ID NO: 1078153 - DNA, 25 bp, Homo sapien
atctaatccacgtcctgtccctggg

SEQ ID NO: 1078154 - DNA, 25 bp, Homo sapien
tcctcctccacgatttctctaaagt

SEQ ID NO: 1078155 - DNA, 25 bp, Homo sapien
aaacatttctctagccagttccctg

SEQ ID NO: 1078156 - DNA, 25 bp, Homo sapien
gttccctgctctcgtatccttggct

SEQ ID NO: 1078157 - DNA, 25 bp, Homo sapien
gtcaccactggttcctcgggaggag

SEQ ID NO: 1078158 - DNA, 25 bp, Homo sapien
tgcctctggctctctcagtcgctgg

SEQ ID NO: 1078159 - DNA, 25 bp, Homo sapien
ggacgaacagccagagataaagcct

SEQ ID NO: 1078160 - DNA, 25 bp, Homo sapien
tcattcaggatcctactcacatggc

SEQ ID NO: 1078161 - DNA, 25 bp, Homo sapien
cagagggttcagatcacagcctgga

SEQ ID NO: 1078162 - DNA, 25 bp, Homo sapien
tcctctcacagtccaggatatggtc

SEQ ID NO: 1078163 - DNA, 25 bp, Homo sapien
ggttcagatcacagcctggagcacc

SEQ ID NO: 1078164 - DNA, 25 bp, Homo sapien
ccattcctctcacagtccaggatat

SEQ ID NO: 1078165 - DNA, 25 bp, Homo sapien
acggccacgacgaagcagagcgccg

SEQ ID NO: 1078166 - DNA, 25 bp, Homo sapien
tgtttcaccagaaccagcagagcca

SEQ ID NO: 1078167 - DNA, 25 bp, Homo sapien
caaacagagcacagtgcccgttgct

SEQ ID NO: 1078168 - DNA, 25 bp, Homo sapien
tgctctgccagcatgtccgggggca

SEQ ID NO: 1078169 - DNA, 25 bp, Homo sapien
gcccagcagcaaaagcgagcccaag

SEQ ID NO: 1078170 - DNA, 25 bp, Homo sapien
agcagcaaaagcgagcccaaggcag

SEQ ID NO: 1078171 - DNA, 25 bp, Homo sapien
cccaaggcagccagagcaatgccca

SEQ ID NO: 1078172 - DNA, 25 bp, Homo sapien
gcagcaccacgagggcgtcggcccc

SEQ ID NO: 1078173 - DNA, 25 bp, Homo sapien
agtggccatacagatggaggggcag

SEQ ID NO: 1078174 - DNA, 25 bp, Homo sapien
gggagtggccatacagatggagggg

SEQ ID NO: 1078175 - DNA, 25 bp, Homo sapien
ggaggggcagtgtccgctcacaccc

SEQ ID NO: 1078176 - DNA, 25 bp, Homo sapien
gaggggcagtgtccgctcacaccca

SEQ ID NO: 1078177 - DNA, 25 bp, Homo sapien
ggatgtggtctcgtgacgccggcca

SEQ ID NO: 1078178 - DNA, 25 bp, Homo sapien
gatgtggtctcgtgacgccggccag

SEQ ID NO: 1078179 - DNA, 25 bp, Homo sapien
atgtggtctcgtgacgccggccagc

SEQ ID NO: 1078180 - DNA, 25 bp, Homo sapien
gaacacatgggcttttaatcacacg

SEQ ID NO: 1078181 - DNA, 25 bp, Homo sapien
tcttcatcatgaggcgtttctgcgc

SEQ ID NO: 1078182 - DNA, 25 bp, Homo sapien
tgctagtgctcaacgggagagtccc

SEQ ID NO: 1078183 - DNA, 25 bp, Homo sapien
tctcctcaatgagcaggcactggtg

SEQ ID NO: 1078184 - DNA, 25 bp, Homo sapien
gagctccccacagcgtctgctgtgg

SEQ ID NO: 1078185 - DNA, 25 bp, Homo sapien
gatggcttcatcgaggacaattaca

SEQ ID NO: 1078186 - DNA, 25 bp, Homo sapien
ctctgcagcacttgttgggccttcg

SEQ ID NO: 1078187 - DNA, 25 bp, Homo sapien
attacattcagcctgggactggcga

SEQ ID NO: 1078188 - DNA, 25 bp, Homo sapien
ttcttaatctggagcgagcaagtga

SEQ ID NO: 1078189 - DNA, 25 bp, Homo sapien
tctggagcgagcaagtgagttgcct

SEQ ID NO: 1078190 - DNA, 25 bp, Homo sapien
taatctggagcgagcaagtgagttg

SEQ ID NO: 1078191 - DNA, 25 bp, Homo sapien
tcttaatctggagcgagcaagtgag

SEQ ID NO: 1078192 - DNA, 25 bp, Homo sapien
attctgcctttgagcctctaggccc

SEQ ID NO: 1078193 - DNA, 25 bp, Homo sapien
gggtgggaggactcattctgccttt

SEQ ID NO: 1078194 - DNA, 25 bp, Homo sapien
actccagaggccgacccaggccagc

SEQ ID NO: 1078195 - DNA, 25 bp, Homo sapien
gctcagcctgtgttggtcagtgtgg

SEQ ID NO: 1078196 - DNA, 25 bp, Homo sapien
gcaagaaagggggcacccgccagac

SEQ ID NO: 1078197 - DNA, 25 bp, Homo sapien
agaaagggggcacccgccagaccat

SEQ ID NO: 1078198 - DNA, 25 bp, Homo sapien
agcaagaaagggggcacccgccaga

SEQ ID NO: 1078199 - DNA, 25 bp, Homo sapien
gagcaagaaagggggcacccgccag

SEQ ID NO: 1078200 - DNA, 25 bp, Homo sapien
ccgcgaagcgtgacctggtgcgaac

SEQ ID NO: 1078201 - DNA, 25 bp, Homo sapien
gggtgcgcacgatacggtcgtcctt

SEQ ID NO: 1078202 - DNA, 25 bp, Homo sapien
tccccagacacgcaagtcaggaaga

SEQ ID NO: 1078203 - DNA, 25 bp, Homo sapien
tgttgtgcacgtagatgacgcgcgt

SEQ ID NO: 1078204 - DNA, 25 bp, Homo sapien
gcacacgtgcagaaagtacagcggt

SEQ ID NO: 1078205 - DNA, 25 bp, Homo sapien
gaaagtacagcggtgtcacctttgt

SEQ ID NO: 1078206 - DNA, 25 bp, Homo sapien
tcttccagatcacgtctgtctgctt

SEQ ID NO: 1078207 - DNA, 25 bp, Homo sapien
ttcacagtgtgtgtgaccttgtctg

SEQ ID NO: 1078208 - DNA, 25 bp, Homo sapien
ttccaggtaagtggcactgtagatg

SEQ ID NO: 1078209 - DNA, 25 bp, Homo sapien
gcacgatgagccgaaagaaggcgct

SEQ ID NO: 1078210 - DNA, 25 bp, Homo sapien
ctgtagatgccgctcgatggtggct

SEQ ID NO: 1078211 - DNA, 25 bp, Homo sapien
gggcttcatgccagtccagggtgta

SEQ ID NO: 1078212 - DNA, 25 bp, Homo sapien
cacaacctctgccctctgcctctga

SEQ ID NO: 1078213 - DNA, 25 bp, Homo sapien
acaacctctgccctctgcctctgac

SEQ ID NO: 1078214 - DNA, 25 bp, Homo sapien
ccacaacctctgccctctgcctctg

SEQ ID NO: 1078215 - DNA, 25 bp, Homo sapien
aggaagtacccatagggctcccagc

SEQ ID NO: 1078216 - DNA, 25 bp, Homo sapien
caggaagtacccatagggctcccag

SEQ ID NO: 1078217 - DNA, 25 bp, Homo sapien
gaagtacccatagggctcccagcct

SEQ ID NO: 1078218 - DNA, 25 bp, Homo sapien
cacaggaagtacccatagggctccc

SEQ ID NO: 1078219 - DNA, 25 bp, Homo sapien
tggcagacacctccatgtaggcaac

SEQ ID NO: 1078220 - DNA, 25 bp, Homo sapien
aacctgggcactccttggtacagcc

SEQ ID NO: 1078221 - DNA, 25 bp, Homo sapien
cattcgccgtcatggtcgtggcaga

SEQ ID NO: 1078222 - DNA, 25 bp, Homo sapien
tgttcacagcgggtgccagtgaagc

SEQ ID NO: 1078223 - DNA, 25 bp, Homo sapien
ccccggcagcctgatatgcctgggc

SEQ ID NO: 1078224 - DNA, 25 bp, Homo sapien
cccggcagcctgatatgcctgggca

SEQ ID NO: 1078225 - DNA, 25 bp, Homo sapien
ccggcagcctgatatgcctgggcac

SEQ ID NO: 1078226 - DNA, 25 bp, Homo sapien
ctccagccagatccacaagagcagc

SEQ ID NO: 1078227 - DNA, 25 bp, Homo sapien
cactggcactggagtcggcaatcag

SEQ ID NO: 1078228 - DNA, 25 bp, Homo sapien
agacacaaccactgaaccggtcaca

SEQ ID NO: 1078229 - DNA, 25 bp, Homo sapien
gagtcggcaatcagccccaaaatga

SEQ ID NO: 1078230 - DNA, 25 bp, Homo sapien
ccggtcacaagtgccaccattctga

SEQ ID NO: 1078231 - DNA, 25 bp, Homo sapien
gtagctctatgctgccccgcacggg

SEQ ID NO: 1078232 - DNA, 25 bp, Homo sapien
gcagctgcacagttgatccggggca

SEQ ID NO: 1078233 - DNA, 25 bp, Homo sapien
caggagcacagtgccgtctggcttg

SEQ ID NO: 1078234 - DNA, 25 bp, Homo sapien
gggcatcgtctctaagttgaactcc

SEQ ID NO: 1078235 - DNA, 25 bp, Homo sapien
ccactgtccgcaagaaccaagcggg

SEQ ID NO: 1078236 - DNA, 25 bp, Homo sapien
tcacattgaccttgaagcgccggct

SEQ ID NO: 1078237 - DNA, 25 bp, Homo sapien
ggcacctcgaactcagctgtggtct

SEQ ID NO: 1078238 - DNA, 25 bp, Homo sapien
ttggccgccagatgtggacacacgg

SEQ ID NO: 1078239 - DNA, 25 bp, Homo sapien
agaccacaagctggcggctctgctt

SEQ ID NO: 1078240 - DNA, 25 bp, Homo sapien
atccccagagaacgagaccagcggg

SEQ ID NO: 1078241 - DNA, 25 bp, Homo sapien
cagtggagatgggtccatccccaga

SEQ ID NO: 1078242 - DNA, 25 bp, Homo sapien
cacaatggtcgaccagtccatggta

SEQ ID NO: 1078243 - DNA, 25 bp, Homo sapien
ttcattaacgtcacgttctcactgg

SEQ ID NO: 1078244 - DNA, 25 bp, Homo sapien
cacgaacactgtatcctgtctttgg

SEQ ID NO: 1078245 - DNA, 25 bp, Homo sapien
tttggcctcaggttcattaacgtca

SEQ ID NO: 1078246 - DNA, 25 bp, Homo sapien
gctgcacacgaacactgtatcctgt

SEQ ID NO: 1078247 - DNA, 25 bp, Homo sapien
aaggaccagctcactcgcagccggt

SEQ ID NO: 1078248 - DNA, 25 bp, Homo sapien
gcaggaaaccgtcgcccaccagtgg

SEQ ID NO: 1078249 - DNA, 25 bp, Homo sapien
gcccgggcaccaagggcaaggacca

SEQ ID NO: 1078250 - DNA, 25 bp, Homo sapien
tgagtcccgtcaggagggcagtgcg

SEQ ID NO: 1078251 - DNA, 25 bp, Homo sapien
ggtgcagtggtagagctgcacatcc

SEQ ID NO: 1078252 - DNA, 25 bp, Homo sapien
agtggtagagctgcacatccagctg

SEQ ID NO: 1078253 - DNA, 25 bp, Homo sapien
gagggtgcagtggtagagctgcaca

SEQ ID NO: 1078254 - DNA, 25 bp, Homo sapien
tgcagtggtagagctgcacatccag

SEQ ID NO: 1078255 - DNA, 25 bp, Homo sapien
tccatgtccattaatctcctacagc

SEQ ID NO: 1078256 - DNA, 25 bp, Homo sapien
atgtccattaatctcctacagcctc

SEQ ID NO: 1078257 - DNA, 25 bp, Homo sapien
tctccatgtccattaatctcctaca

SEQ ID NO: 1078258 - DNA, 25 bp, Homo sapien
ctcctacagcctcccgtgtctccta

SEQ ID NO: 1078259 - DNA, 25 bp, Homo sapien
gctcctggtgatctgtgtcctcctg

SEQ ID NO: 1078260 - DNA, 25 bp, Homo sapien
catgaccctggttctcgccatgaac

SEQ ID NO: 1078261 - DNA, 25 bp, Homo sapien
gcaaggctcagataggaccgggcta

SEQ ID NO: 1078262 - DNA, 25 bp, Homo sapien
catgccctgtgttccgcaagtctca

SEQ ID NO: 1078263 - DNA, 25 bp, Homo sapien
cgtacttggatattggcccaggcag

SEQ ID NO: 1078264 - DNA, 25 bp, Homo sapien
tgtccacgtctatccacagtgggtc

SEQ ID NO: 1078265 - DNA, 25 bp, Homo sapien
tgcttccatgtcagctggatctcgg

SEQ ID NO: 1078266 - DNA, 25 bp, Homo sapien
tactgtgttgctccagtccccgagc

SEQ ID NO: 1078267 - DNA, 25 bp, Homo sapien
tcacttgggccacatgaaggaaggg

SEQ ID NO: 1078268 - DNA, 25 bp, Homo sapien
ccagccctgggacagtggatcatga

SEQ ID NO: 1078269 - DNA, 25 bp, Homo sapien
gatcatgagaatggaaggctgagtc

SEQ ID NO: 1078270 - DNA, 25 bp, Homo sapien
ggtgaaagatcccagtgccaggact

SEQ ID NO: 1078271 - DNA, 25 bp, Homo sapien
agcttctgcggatgcacaccagggt

SEQ ID NO: 1078272 - DNA, 25 bp, Homo sapien
gcgtctccgatgcaggcagcttctg

SEQ ID NO: 1078273 - DNA, 25 bp, Homo sapien
cctgactggtaggtgaaggtgcgtc

SEQ ID NO: 1078274 - DNA, 25 bp, Homo sapien
tcagctgcccggctctcttggactg

SEQ ID NO: 1078275 - DNA, 25 bp, Homo sapien
ttttgtacccttgaacattgttgag

SEQ ID NO: 1078276 - DNA, 25 bp, Homo sapien
aggtagaaacataaacacgggctgc

SEQ ID NO: 1078277 - DNA, 25 bp, Homo sapien
acgggctgcaagcatgcacccaggg

SEQ ID NO: 1078278 - DNA, 25 bp, Homo sapien
cacacacaaggtgtacaaggtattg

SEQ ID NO: 1078279 - DNA, 25 bp, Homo sapien
agggctaagaacatcagccaaagat

SEQ ID NO: 1078280 - DNA, 25 bp, Homo sapien
tgactggcctactggcaggtggcca

SEQ ID NO: 1078281 - DNA, 25 bp, Homo sapien
gactggcctactggcaggtggccac

SEQ ID NO: 1078282 - DNA, 25 bp, Homo sapien
agcagggctaagaacatcagccaaa

SEQ ID NO: 1078283 - DNA, 25 bp, Homo sapien
cacaattctggagtggtagaaacag

SEQ ID NO: 1078284 - DNA, 25 bp, Homo sapien
tgagggccacagaatatgcctcctt

SEQ ID NO: 1078285 - DNA, 25 bp, Homo sapien
agacaactcgggcaggattacaggg

SEQ ID NO: 1078286 - DNA, 25 bp, Homo sapien
ggcggctagaatgtgacaggataaa

SEQ ID NO: 1078287 - DNA, 25 bp, Homo sapien
ggacagagttcagatcctaagtgac

SEQ ID NO: 1078288 - DNA, 25 bp, Homo sapien
taagtgacgacaatgaagaagccct

SEQ ID NO: 1078289 - DNA, 25 bp, Homo sapien
gacaatgaagaagccctcagaggag

SEQ ID NO: 1078290 - DNA, 25 bp, Homo sapien
cagatcctaagtgacgacaatgaag

SEQ ID NO: 1078291 - DNA, 25 bp, Homo sapien
catatgcaggcacatgtaccaggga

SEQ ID NO: 1078292 - DNA, 25 bp, Homo sapien
catgtatgttaaggactgctttccc

SEQ ID NO: 1078293 - DNA, 25 bp, Homo sapien
cattgttacctcgagcttttgggca

SEQ ID NO: 1078294 - DNA, 25 bp, Homo sapien
tgcacacacgtttcctatccatatg

SEQ ID NO: 1078295 - DNA, 25 bp, Homo sapien
tgaaggtgcacaggcatagggacac

SEQ ID NO: 1078296 - DNA, 25 bp, Homo sapien
gggcagcaccatatgtaggtgcatc

SEQ ID NO: 1078297 - DNA, 25 bp, Homo sapien
catcatgtataggtccatacacaca

SEQ ID NO: 1078298 - DNA, 25 bp, Homo sapien
gcttcctaagtgcactgaagtccag

SEQ ID NO: 1078299 - DNA, 25 bp, Homo sapien
cacaggatgagacaagagggcagac

SEQ ID NO: 1078300 - DNA, 25 bp, Homo sapien
tcacaggatgagacaagagggcaga

SEQ ID NO: 1078301 - DNA, 25 bp, Homo sapien
cttcacaggatgagacaagagggca

SEQ ID NO: 1078302 - DNA, 25 bp, Homo sapien
ttcacaggatgagacaagagggcag

SEQ ID NO: 1078303 - DNA, 25 bp, Homo sapien
gccgggtaagtgtcaaggtccctga

SEQ ID NO: 1078304 - DNA, 25 bp, Homo sapien
cactctagcactgggtagctcaggg

SEQ ID NO: 1078305 - DNA, 25 bp, Homo sapien
ggctgcagttttggccgccgggtaa

SEQ ID NO: 1078306 - DNA, 25 bp, Homo sapien
tcaaggtccctgagctgaactgcag

SEQ ID NO: 1078307 - DNA, 25 bp, Homo sapien
gcattttgatggctgcgttcatctt

SEQ ID NO: 1078308 - DNA, 25 bp, Homo sapien
gatggctgcgttcatcttcagcccg

SEQ ID NO: 1078309 - DNA, 25 bp, Homo sapien
cgtccttcttgatcatggcccggat

SEQ ID NO: 1078310 - DNA, 25 bp, Homo sapien
ccttcttgatcatggcccggatgac

SEQ ID NO: 1078311 - DNA, 25 bp, Homo sapien
ctgggatttgtgggacaaaggagag

SEQ ID NO: 1078312 - DNA, 25 bp, Homo sapien
aagaatccaatattattttgccaga

SEQ ID NO: 1078313 - DNA, 25 bp, Homo sapien
ggcctgggatttgtgggacaaagga

SEQ ID NO: 1078314 - DNA, 25 bp, Homo sapien
agaatccaatattattttgccagaa

SEQ ID NO: 1078315 - DNA, 25 bp, Homo sapien
gccccaatttgcacagaacttccag

SEQ ID NO: 1078316 - DNA, 25 bp, Homo sapien
gggtgatgccccaatttgcacagaa

SEQ ID NO: 1078317 - DNA, 25 bp, Homo sapien
ctcccgcaaagtcacgatggtcatt

SEQ ID NO: 1078318 - DNA, 25 bp, Homo sapien
ctcggttcttacaggcccccaggag

SEQ ID NO: 1078319 - DNA, 25 bp, Homo sapien
taacagacagggatgaaggaggatc

SEQ ID NO: 1078320 - DNA, 25 bp, Homo sapien
cctggcaagctactcatgtggtgga

SEQ ID NO: 1078321 - DNA, 25 bp, Homo sapien
gagcaggcacccgatggtaacagac

SEQ ID NO: 1078322 - DNA, 25 bp, Homo sapien
tttagacacaggcaacctagggtgg

SEQ ID NO: 1078323 - DNA, 25 bp, Homo sapien
gagctaagggtagaggctgtcccat

SEQ ID NO: 1078324 - DNA, 25 bp, Homo sapien
tttccgcagaaaatctagcaggttc

SEQ ID NO: 1078325 - DNA, 25 bp, Homo sapien
gcatcactggcgaaacgcagcagct

SEQ ID NO: 1078326 - DNA, 25 bp, Homo sapien
caaaagctgggtcagtctctaggac

SEQ ID NO: 1078327 - DNA, 25 bp, Homo sapien
ctctccccgagaaaggccgaagtct

SEQ ID NO: 1078328 - DNA, 25 bp, Homo sapien
taggttctctccgaccagcacattc

SEQ ID NO: 1078329 - DNA, 25 bp, Homo sapien
gccgaagtctgcaatcttggaggct

SEQ ID NO: 1078330 - DNA, 25 bp, Homo sapien
tgcaatcttggaggctaggttctct

SEQ ID NO: 1078331 - DNA, 25 bp, Homo sapien
aggcacaagccctaagggtgagggt

SEQ ID NO: 1078332 - DNA, 25 bp, Homo sapien
agggcctgtttgaggctcctgtggg

SEQ ID NO: 1078333 - DNA, 25 bp, Homo sapien
ccaggcacaagccctaagggtgagg

SEQ ID NO: 1078334 - DNA, 25 bp, Homo sapien
ggaagggcctgtttgaggctcctgt

SEQ ID NO: 1078335 - DNA, 25 bp, Homo sapien
tggtggtatagacactgtagttcag

SEQ ID NO: 1078336 - DNA, 25 bp, Homo sapien
tcaatggccatccagcgcacaggga

SEQ ID NO: 1078337 - DNA, 25 bp, Homo sapien
ggccatccagcgcacagggagacgc

SEQ ID NO: 1078338 - DNA, 25 bp, Homo sapien
tgtagttcagggactcaatggccat

SEQ ID NO: 1078339 - DNA, 25 bp, Homo sapien
aggtcatgccttagaccacctatga

SEQ ID NO: 1078340 - DNA, 25 bp, Homo sapien
ccacctatgacatttctgagatatg

SEQ ID NO: 1078341 - DNA, 25 bp, Homo sapien
tttctgagatatgtctaggtcaggc

SEQ ID NO: 1078342 - DNA, 25 bp, Homo sapien
aacacagcccaggtcatgccttaga

SEQ ID NO: 1078343 - DNA, 25 bp, Homo sapien
cagcaagccccaccttggctaggta

SEQ ID NO: 1078344 - DNA, 25 bp, Homo sapien
gctaggtactttatacccaagacac

SEQ ID NO: 1078345 - DNA, 25 bp, Homo sapien
atctacctcaggaagcatccgccag

SEQ ID NO: 1078346 - DNA, 25 bp, Homo sapien
cacaaacataatccgaaactacctt

SEQ ID NO: 1078347 - DNA, 25 bp, Homo sapien
gatcagtgtggtaagcagtgagcca

SEQ ID NO: 1078348 - DNA, 25 bp, Homo sapien
gtcatgctctggtaagatcctcagg

SEQ ID NO: 1078349 - DNA, 25 bp, Homo sapien
gaggttagctagattgcccaaggcc

SEQ ID NO: 1078350 - DNA, 25 bp, Homo sapien
ggcagagcaagcgttccaactcagg

SEQ ID NO: 1078351 - DNA, 25 bp, Homo sapien
tctcccaaagaaggactccaaagga

SEQ ID NO: 1078352 - DNA, 25 bp, Homo sapien
caggaggggacaaagtgctctcggt

SEQ ID NO: 1078353 - DNA, 25 bp, Homo sapien
gctccacgtggggtaaggtggggca

SEQ ID NO: 1078354 - DNA, 25 bp, Homo sapien
aggggacaaagtgctctcggtccag

SEQ ID NO: 1078355 - DNA, 25 bp, Homo sapien
gaggggacaaagtgctctcggtcca

SEQ ID NO: 1078356 - DNA, 25 bp, Homo sapien
gaggctgctccatgcggtagccctg

SEQ ID NO: 1078357 - DNA, 25 bp, Homo sapien
gggcagcttttcatagagctcggca

SEQ ID NO: 1078358 - DNA, 25 bp, Homo sapien
cttcatcgtcacagtttcgaggctg

SEQ ID NO: 1078359 - DNA, 25 bp, Homo sapien
agagctcggcacaggtcatgccaca

SEQ ID NO: 1078360 - DNA, 25 bp, Homo sapien
gtcgctcatagggacggtcccgcca

SEQ ID NO: 1078361 - DNA, 25 bp, Homo sapien
ggcttccagcatgcggcctagctgt

SEQ ID NO: 1078362 - DNA, 25 bp, Homo sapien
cgccagcactgacgcatcagctcgt

SEQ ID NO: 1078363 - DNA, 25 bp, Homo sapien
cggcctagctgtagcgcaatctggg

SEQ ID NO: 1078364 - DNA, 25 bp, Homo sapien
ctaagcagtggccttggaagagttt

SEQ ID NO: 1078365 - DNA, 25 bp, Homo sapien
cctggtgtctaaaccagtgagggct

SEQ ID NO: 1078366 - DNA, 25 bp, Homo sapien
gtgactattcatgcactctgctctg

SEQ ID NO: 1078367 - DNA, 25 bp, Homo sapien
aggacaggctgatggcctcagcaga

SEQ ID NO: 1078368 - DNA, 25 bp, Homo sapien
agagcaagctttagtgggggccagg

SEQ ID NO: 1078369 - DNA, 25 bp, Homo sapien
gcagagcaagctttagtgggggcca

SEQ ID NO: 1078370 - DNA, 25 bp, Homo sapien
gggcagagcaagctttagtgggggc

SEQ ID NO: 1078371 - DNA, 25 bp, Homo sapien
gcaagctttagtgggggccaggaat

SEQ ID NO: 1078372 - DNA, 25 bp, Homo sapien
taagtgaagttctcaaacagcgaca

SEQ ID NO: 1078373 - DNA, 25 bp, Homo sapien
aatgcccgcgtaagtgaagttctca

SEQ ID NO: 1078374 - DNA, 25 bp, Homo sapien
caaacagcgacatgttcacataggc

SEQ ID NO: 1078375 - DNA, 25 bp, Homo sapien
cagctgtggcatcaatgcccgcgta

SEQ ID NO: 1078376 - DNA, 25 bp, Homo sapien
acagcagagtttgctccggccagca

SEQ ID NO: 1078377 - DNA, 25 bp, Homo sapien
gactggtcacaggttagacagcaga

SEQ ID NO: 1078378 - DNA, 25 bp, Homo sapien
gatgcccaggatagctatgagacac

SEQ ID NO: 1078379 - DNA, 25 bp, Homo sapien
tttttctgaatgacaggccgggagt

SEQ ID NO: 1078380 - DNA, 25 bp, Homo sapien
ggaatatgactaccatatgttgtct

SEQ ID NO: 1078381 - DNA, 25 bp, Homo sapien
catgcattagtatttcattcaccac

SEQ ID NO: 1078382 - DNA, 25 bp, Homo sapien
caacttccttctagtcctaagcaac

SEQ ID NO: 1078383 - DNA, 25 bp, Homo sapien
gatatgtgcaaccacagtcaaattt

SEQ ID NO: 1078384 - DNA, 25 bp, Homo sapien
ctgccttagcccatcctcccttcag

SEQ ID NO: 1078385 - DNA, 25 bp, Homo sapien
tgccttagcccatcctcccttcagg

SEQ ID NO: 1078386 - DNA, 25 bp, Homo sapien
cctgccttagcccatcctcccttca

SEQ ID NO: 1078387 - DNA, 25 bp, Homo sapien
gctgctgacttgggccaggttttga

SEQ ID NO: 1078388 - DNA, 25 bp, Homo sapien
tggctgctgacttgggccaggtttt

SEQ ID NO: 1078389 - DNA, 25 bp, Homo sapien
cttggctgctgacttgggccaggtt

SEQ ID NO: 1078390 - DNA, 25 bp, Homo sapien
ttggctgctgacttgggccaggttt

SEQ ID NO: 1078391 - DNA, 25 bp, Homo sapien
caaatgttcgggagaaacacttcag

SEQ ID NO: 1078392 - DNA, 25 bp, Homo sapien
cgggtaggcatacagcagctggtat

SEQ ID NO: 1078393 - DNA, 25 bp, Homo sapien
gtatgtcccactgggcgctgcctct

SEQ ID NO: 1078394 - DNA, 25 bp, Homo sapien
agaagcaagtgaggtcctcaaatgt

SEQ ID NO: 1078395 - DNA, 25 bp, Homo sapien
cgagtctggtttaggaacacattct

SEQ ID NO: 1078396 - DNA, 25 bp, Homo sapien
tggaaactggcacacgtatcgggtt

SEQ ID NO: 1078397 - DNA, 25 bp, Homo sapien
tgtccacaaagaggactcgctgagt

SEQ ID NO: 1078398 - DNA, 25 bp, Homo sapien
cagcggaaagaagagacgcacttcc

SEQ ID NO: 1078399 - DNA, 25 bp, Homo sapien
tcgtacctcaggaaatcactgattt

SEQ ID NO: 1078400 - DNA, 25 bp, Homo sapien
ggaccagtggagttcttgggatctc

SEQ ID NO: 1078401 - DNA, 25 bp, Homo sapien
tctctggggccatagcggagttcgt

SEQ ID NO: 1078402 - DNA, 25 bp, Homo sapien
catagcggagttcgtacctcaggaa

SEQ ID NO: 1078403 - DNA, 25 bp, Homo sapien
ggtttctgtggcaatcagctgtatg

SEQ ID NO: 1078404 - DNA, 25 bp, Homo sapien
gcattgtgggctgagcacatggaga

SEQ ID NO: 1078405 - DNA, 25 bp, Homo sapien
caggtttctgtggcaatcagctgta

SEQ ID NO: 1078406 - DNA, 25 bp, Homo sapien
gggcattgtgggctgagcacatgga

SEQ ID NO: 1078407 - DNA, 25 bp, Homo sapien
ctgagatgaggcagcttccaccctc

SEQ ID NO: 1078408 - DNA, 25 bp, Homo sapien
gagatgaggcagcttccaccctctg

SEQ ID NO: 1078409 - DNA, 25 bp, Homo sapien
tgagatgaggcagcttccaccctct

SEQ ID NO: 1078410 - DNA, 25 bp, Homo sapien
gatcccatcaggttcgctgcgcagc

SEQ ID NO: 1078411 - DNA, 25 bp, Homo sapien
tcccatcaggttcgctgcgcagctg

SEQ ID NO: 1078412 - DNA, 25 bp, Homo sapien
cccatcaggttcgctgcgcagctgc

SEQ ID NO: 1078413 - DNA, 25 bp, Homo sapien
atcccatcaggttcgctgcgcagct

SEQ ID NO: 1078414 - DNA, 25 bp, Homo sapien
ggagctagcatggtcctgttgctgc

SEQ ID NO: 1078415 - DNA, 25 bp, Homo sapien
ggtaacattcttcaggtccaaggta

SEQ ID NO: 1078416 - DNA, 25 bp, Homo sapien
tagaagaagccttgggagctagcat

SEQ ID NO: 1078417 - DNA, 25 bp, Homo sapien
gcaccgtgccctgctgtggtagaag

SEQ ID NO: 1078418 - DNA, 25 bp, Homo sapien
ttcgcagttctcccagatggggtac

SEQ ID NO: 1078419 - DNA, 25 bp, Homo sapien
tcttcgcagttctcccagatggggt

SEQ ID NO: 1078420 - DNA, 25 bp, Homo sapien
cttcgcagttctcccagatggggta

SEQ ID NO: 1078421 - DNA, 25 bp, Homo sapien
gagcccaggtagctgtgaacagtac

SEQ ID NO: 1078422 - DNA, 25 bp, Homo sapien
tggcagcgagagaactgtggggtct

SEQ ID NO: 1078423 - DNA, 25 bp, Homo sapien
caggtagctgtgaacagtacccggg

SEQ ID NO: 1078424 - DNA, 25 bp, Homo sapien
catttcgtgacttgaagtggcagcg

SEQ ID NO: 1078425 - DNA, 25 bp, Homo sapien
taagtccttctgtgcacaaggcatt

SEQ ID NO: 1078426 - DNA, 25 bp, Homo sapien
cagggagcagcttaagtccttctgt

SEQ ID NO: 1078427 - DNA, 25 bp, Homo sapien
agccatcggtcagaagggtcagagt

SEQ ID NO: 1078428 - DNA, 25 bp, Homo sapien
tgccaccagagccatcggtcagaag

SEQ ID NO: 1078429 - DNA, 25 bp, Homo sapien
ccagatgcccactggagatctccct

SEQ ID NO: 1078430 - DNA, 25 bp, Homo sapien
ttgataacaggtctcttgggctgcc

SEQ ID NO: 1078431 - DNA, 25 bp, Homo sapien
ccaggacgatgggtgctgccactcc

SEQ ID NO: 1078432 - DNA, 25 bp, Homo sapien
tctcctgtgtatcggagttgataac

SEQ ID NO: 1078433 - DNA, 25 bp, Homo sapien
agaaaacacgcttcccagcaacagg

SEQ ID NO: 1078434 - DNA, 25 bp, Homo sapien
gatagcccagcgtctgtttgaccca

SEQ ID NO: 1078435 - DNA, 25 bp, Homo sapien
agcaacaggatagagcgccctaacc

SEQ ID NO: 1078436 - DNA, 25 bp, Homo sapien
ggcggtcggagattcccacaaagag

SEQ ID NO: 1078437 - DNA, 25 bp, Homo sapien
gagctccagggaccttggtaggtgg

SEQ ID NO: 1078438 - DNA, 25 bp, Homo sapien
tagcgagatcgcgggcgcagctcca

SEQ ID NO: 1078439 - DNA, 25 bp, Homo sapien
agctgtaaacggtagcgagatcgcg

SEQ ID NO: 1078440 - DNA, 25 bp, Homo sapien
cctggcgcgcagctgtaaacggtag

SEQ ID NO: 1078441 - DNA, 25 bp, Homo sapien
cggtggcggtctccaccctagttgg

SEQ ID NO: 1078442 - DNA, 25 bp, Homo sapien
tggcggtctccaccctagttgggtc

SEQ ID NO: 1078443 - DNA, 25 bp, Homo sapien
tctcggtggcggtctccaccctagt

SEQ ID NO: 1078444 - DNA, 25 bp, Homo sapien
ggtctcggtggcggtctccacccta

SEQ ID NO: 1078445 - DNA, 25 bp, Homo sapien
gcactagatgcagagcggtcaccaa

SEQ ID NO: 1078446 - DNA, 25 bp, Homo sapien
tagatgcagagcggtcaccaaggag

SEQ ID NO: 1078447 - DNA, 25 bp, Homo sapien
actagatgcagagcggtcaccaagg

SEQ ID NO: 1078448 - DNA, 25 bp, Homo sapien
agcactagatgcagagcggtcacca

SEQ ID NO: 1078449 - DNA, 25 bp, Homo sapien
agtctcctgcctggcgggggcggta

SEQ ID NO: 1078450 - DNA, 25 bp, Homo sapien
cgccagtctcctgcctggcgggggc

SEQ ID NO: 1078451 - DNA, 25 bp, Homo sapien
ccagtctcctgcctggcgggggcgg

SEQ ID NO: 1078452 - DNA, 25 bp, Homo sapien
ctggtccaccgccagtctcctgcct

SEQ ID NO: 1078453 - DNA, 25 bp, Homo sapien
gtcacagagcgaaccaagaatgcct

SEQ ID NO: 1078454 - DNA, 25 bp, Homo sapien
ccgtaggtgcgcacgggcggtggac

SEQ ID NO: 1078455 - DNA, 25 bp, Homo sapien
cagaggtgacgtgcaggaagtggcg

SEQ ID NO: 1078456 - DNA, 25 bp, Homo sapien
caggaagtggcgaagccgtaggtgc

SEQ ID NO: 1078457 - DNA, 25 bp, Homo sapien
ccggtgcaggtctggaagtgagggc

SEQ ID NO: 1078458 - DNA, 25 bp, Homo sapien
taggacccggtgcaggtctggaagt

SEQ ID NO: 1078459 - DNA, 25 bp, Homo sapien
gcaggtctggaagtgagggccacag

SEQ ID NO: 1078460 - DNA, 25 bp, Homo sapien
ggacccggtgcaggtctggaagtga

SEQ ID NO: 1078461 - DNA, 25 bp, Homo sapien
ttccacttcttcacaggtatctgag

SEQ ID NO: 1078462 - DNA, 25 bp, Homo sapien
cttcacaggtatctgagactgtggc

SEQ ID NO: 1078463 - DNA, 25 bp, Homo sapien
cacttcttcacaggtatctgagact

SEQ ID NO: 1078464 - DNA, 25 bp, Homo sapien
ggttccacttcttcacaggtatctg

SEQ ID NO: 1078465 - DNA, 25 bp, Homo sapien
ctgcaatcttcggtagtccatctgg

SEQ ID NO: 1078466 - DNA, 25 bp, Homo sapien
aggctgcaatcttcggtagtccatc

SEQ ID NO: 1078467 - DNA, 25 bp, Homo sapien
aaggctgcaatcttcggtagtccat

SEQ ID NO: 1078468 - DNA, 25 bp, Homo sapien
ggctgcaatcttcggtagtccatct

SEQ ID NO: 1078469 - DNA, 25 bp, Homo sapien
tggcaatgtgggtggtacagcagga

SEQ ID NO: 1078470 - DNA, 25 bp, Homo sapien
gaatggttggcaatgtgggtggtac

SEQ ID NO: 1078471 - DNA, 25 bp, Homo sapien
tagtggtaggtaggaatggttggca

SEQ ID NO: 1078472 - DNA, 25 bp, Homo sapien
tgctgccaatagcttagtggtaggt

SEQ ID NO: 1078473 - DNA, 25 bp, Homo sapien
cttagtgaaatgagcctgcctgtgg

SEQ ID NO: 1078474 - DNA, 25 bp, Homo sapien
cattaagttatgtgcccaaggttgc

SEQ ID NO: 1078475 - DNA, 25 bp, Homo sapien
gatttgaggtgcactttgcctgggc

SEQ ID NO: 1078476 - DNA, 25 bp, Homo sapien
taactactagtacactcagccgggc

SEQ ID NO: 1078477 - DNA, 25 bp, Homo sapien
tatctttttttgtggtgtggtcttg

SEQ ID NO: 1078478 - DNA, 25 bp, Homo sapien
atctttttttgtggtgtggtcttgg

SEQ ID NO: 1078479 - DNA, 25 bp, Homo sapien
cccggtttcaagtcattcttgtgcc

SEQ ID NO: 1078480 - DNA, 25 bp, Homo sapien
cctcccggtttcaagtcattcttgt

SEQ ID NO: 1078481 - DNA, 25 bp, Homo sapien
tcaagactagtcgggccaatgtggc

SEQ ID NO: 1078482 - DNA, 25 bp, Homo sapien
ttcaagactagtcgggccaatgtgg

SEQ ID NO: 1078483 - DNA, 25 bp, Homo sapien
aagactagtcgggccaatgtggcga

SEQ ID NO: 1078484 - DNA, 25 bp, Homo sapien
caagactagtcgggccaatgtggcg

SEQ ID NO: 1078485 - DNA, 25 bp, Homo sapien
gtgcagaacccgatggagtgcccaa

SEQ ID NO: 1078486 - DNA, 25 bp, Homo sapien
cacgagagtcgtatttatgatgcag

SEQ ID NO: 1078487 - DNA, 25 bp, Homo sapien
tgcagaactcggtgcagaacccgat

SEQ ID NO: 1078488 - DNA, 25 bp, Homo sapien
atggagtgcccaaggcgcttgagcc

SEQ ID NO: 1078489 - DNA, 25 bp, Homo sapien
tggcttacgcctcttaaactctccg

SEQ ID NO: 1078490 - DNA, 25 bp, Homo sapien
tccggagcagttccgaccggcttta

SEQ ID NO: 1078491 - DNA, 25 bp, Homo sapien
gaccggctttaacacgcctggctta

SEQ ID NO: 1078492 - DNA, 25 bp, Homo sapien
taaactctccgctccgagcgcctat

SEQ ID NO: 1078493 - DNA, 25 bp, Homo sapien
tgcagccccttccggcctagcaccc

SEQ ID NO: 1078494 - DNA, 25 bp, Homo sapien
ctggccggccacaaaatcagggcca

SEQ ID NO: 1078495 - DNA, 25 bp, Homo sapien
ggaccccttcgctcctggccggcca

SEQ ID NO: 1078496 - DNA, 25 bp, Homo sapien
aggaggcgacggtgctcaggggaca

SEQ ID NO: 1078497 - DNA, 25 bp, Homo sapien
gcagggggaggggtccttgcagttg

SEQ ID NO: 1078498 - DNA, 25 bp, Homo sapien
ggggaggggtccttgcagttggtgc

SEQ ID NO: 1078499 - DNA, 25 bp, Homo sapien
ccgcagggggaggggtccttgcagt

SEQ ID NO: 1078500 - DNA, 25 bp, Homo sapien
gcccgcagggggaggggtccttgca

SEQ ID NO: 1078501 - DNA, 25 bp, Homo sapien
agtgcaggtcactctcgaacgcgaa

SEQ ID NO: 1078502 - DNA, 25 bp, Homo sapien
gtgggatcggttggcggcccgcatg

SEQ ID NO: 1078503 - DNA, 25 bp, Homo sapien
gcagcgagtgcaggtcactctcgaa

SEQ ID NO: 1078504 - DNA, 25 bp, Homo sapien
gcgctgtgggatcggttggcggccc

SEQ ID NO: 1078505 - DNA, 25 bp, Homo sapien
actcagttcctttggcacctcactg

SEQ ID NO: 1078506 - DNA, 25 bp, Homo sapien
gagaaagtatgaaggctgctctcac

SEQ ID NO: 1078507 - DNA, 25 bp, Homo sapien
tgctctcactcagttcctttggcac

SEQ ID NO: 1078508 - DNA, 25 bp, Homo sapien
aaagagaagacagtctgaccaggct

SEQ ID NO: 1078509 - DNA, 25 bp, Homo sapien
gggatatagcggtcaccgccaggtt

SEQ ID NO: 1078510 - DNA, 25 bp, Homo sapien
ggtcaccgccaggtttgctaggagt

SEQ ID NO: 1078511 - DNA, 25 bp, Homo sapien
tggtgggcgtctggctgttttcagg

SEQ ID NO: 1078512 - DNA, 25 bp, Homo sapien
gtctgaaccttggaactggatttgc

SEQ ID NO: 1078513 - DNA, 25 bp, Homo sapien
aggtcccgtgccttaagcccctctg

SEQ ID NO: 1078514 - DNA, 25 bp, Homo sapien
gaaggagcaagatggtattatccaa

SEQ ID NO: 1078515 - DNA, 25 bp, Homo sapien
tcccgtgccttaagcccctctggga

SEQ ID NO: 1078516 - DNA, 25 bp, Homo sapien
caagatggtattatccaaagaacag

SEQ ID NO: 1078517 - DNA, 25 bp, Homo sapien
tggttttccactgagccgaaggatc

SEQ ID NO: 1078518 - DNA, 25 bp, Homo sapien
gccgaaggatcttggcttcctctac

SEQ ID NO: 1078519 - DNA, 25 bp, Homo sapien
cactgagccgaaggatcttggcttc

SEQ ID NO: 1078520 - DNA, 25 bp, Homo sapien
cctctggcgcattttgtggttttcc

SEQ ID NO: 1078521 - DNA, 25 bp, Homo sapien
ctccctccaggaaccaggaacttcg

SEQ ID NO: 1078522 - DNA, 25 bp, Homo sapien
cttgccctcaatcttagataggaag

SEQ ID NO: 1078523 - DNA, 25 bp, Homo sapien
tgccctcaatcttagataggaagag

SEQ ID NO: 1078524 - DNA, 25 bp, Homo sapien
ttgccctcaatcttagataggaaga

SEQ ID NO: 1078525 - DNA, 25 bp, Homo sapien
gccctcaatcttagataggaagagg

SEQ ID NO: 1078526 - DNA, 25 bp, Homo sapien
ttggctgtagagtactttcagtctg

SEQ ID NO: 1078527 - DNA, 25 bp, Homo sapien
tggctgtagagtactttcagtctgt

SEQ ID NO: 1078528 - DNA, 25 bp, Homo sapien
tgtagagtactttcagtctgttctg

SEQ ID NO: 1078529 - DNA, 25 bp, Homo sapien
gctgtagagtactttcagtctgttc

SEQ ID NO: 1078530 - DNA, 25 bp, Homo sapien
ggatttcaggcgcatccaggatacg

SEQ ID NO: 1078531 - DNA, 25 bp, Homo sapien
tcaggcgcatccaggatacggtctg

SEQ ID NO: 1078532 - DNA, 25 bp, Homo sapien
cgcatccaggatacggtctggcagg

SEQ ID NO: 1078533 - DNA, 25 bp, Homo sapien
tttcaggcgcatccaggatacggtc

SEQ ID NO: 1078534 - DNA, 25 bp, Homo sapien
ccagaactccaatccacaaggttca

SEQ ID NO: 1078535 - DNA, 25 bp, Homo sapien
caggccacagaggatatatattccc

SEQ ID NO: 1078536 - DNA, 25 bp, Homo sapien
ggccacagaggatatatattcccca

SEQ ID NO: 1078537 - DNA, 25 bp, Homo sapien
gaactccaatccacaaggttcaggt

SEQ ID NO: 1078538 - DNA, 25 bp, Homo sapien
tggtcatatttcgaagccgtttctg

SEQ ID NO: 1078539 - DNA, 25 bp, Homo sapien
tagggagcccactcgggcagagtga

SEQ ID NO: 1078540 - DNA, 25 bp, Homo sapien
atatagctgttccagcttagggagc

SEQ ID NO: 1078541 - DNA, 25 bp, Homo sapien
tatttcgaagccgtttctgctgctg

SEQ ID NO: 1078542 - DNA, 25 bp, Homo sapien
actggccaaatgtcgtccatctggg

SEQ ID NO: 1078543 - DNA, 25 bp, Homo sapien
tacccgaacatcatggtggtggatg

SEQ ID NO: 1078544 - DNA, 25 bp, Homo sapien
tggtgttctgctacccgaacatcat

SEQ ID NO: 1078545 - DNA, 25 bp, Homo sapien
accactggccaaatgtcgtccatct

SEQ ID NO: 1078546 - DNA, 25 bp, Homo sapien
ttgacagccccttgatgctgggtga

SEQ ID NO: 1078547 - DNA, 25 bp, Homo sapien
ccttgatgctgggtgaatgtctgca

SEQ ID NO: 1078548 - DNA, 25 bp, Homo sapien
cacacattgaccaagttatcattac

SEQ ID NO: 1078549 - DNA, 25 bp, Homo sapien
tctccaggagcactaggccacacat

SEQ ID NO: 1078550 - DNA, 25 bp, Homo sapien
taacagtccccagattataggtgag

SEQ ID NO: 1078551 - DNA, 25 bp, Homo sapien
tccccagattataggtgagggtctg

SEQ ID NO: 1078552 - DNA, 25 bp, Homo sapien
cttaacagtccccagattataggtg

SEQ ID NO: 1078553 - DNA, 25 bp, Homo sapien
cagtccccagattataggtgagggt

SEQ ID NO: 1078554 - DNA, 25 bp, Homo sapien
agcaggtactagagccagacaagga

SEQ ID NO: 1078555 - DNA, 25 bp, Homo sapien
acagattaacccagtccaatcctac

SEQ ID NO: 1078556 - DNA, 25 bp, Homo sapien
cagcaggtactagagccagacaagg

SEQ ID NO: 1078557 - DNA, 25 bp, Homo sapien
taggggtcacagattaacccagtcc

SEQ ID NO: 1078558 - DNA, 25 bp, Homo sapien
caggacattggactgccagggacac

SEQ ID NO: 1078559 - DNA, 25 bp, Homo sapien
ttgccaggacattggactgccaggg

SEQ ID NO: 1078560 - DNA, 25 bp, Homo sapien
tgttgccaggacattggactgccag

SEQ ID NO: 1078561 - DNA, 25 bp, Homo sapien
ccaggacattggactgccagggaca

SEQ ID NO: 1078562 - DNA, 25 bp, Homo sapien
gggcatccacggcactcagacaggc

SEQ ID NO: 1078563 - DNA, 25 bp, Homo sapien
gggagaggcaggaacaggcaaaaga

SEQ ID NO: 1078564 - DNA, 25 bp, Homo sapien
gcccggtaagaatgcatgtgggaga

SEQ ID NO: 1078565 - DNA, 25 bp, Homo sapien
agaatgcatgtgggagaggcaggaa

SEQ ID NO: 1078566 - DNA, 25 bp, Homo sapien
gaggcaggaacaggcaaaagattac

SEQ ID NO: 1078567 - DNA, 25 bp, Homo sapien
gtagtgggcctccacttggaaggat

SEQ ID NO: 1078568 - DNA, 25 bp, Homo sapien
tggaggatgcattgcaggagataac

SEQ ID NO: 1078569 - DNA, 25 bp, Homo sapien
tgcattgcaggagataacaaagaat

SEQ ID NO: 1078570 - DNA, 25 bp, Homo sapien
caggagataacaaagaatgcttgac

SEQ ID NO: 1078571 - DNA, 25 bp, Homo sapien
ggagataacaaagaatgcttgacac

SEQ ID NO: 1078572 - DNA, 25 bp, Homo sapien
gccatggttgggtacttccaaataa

SEQ ID NO: 1078573 - DNA, 25 bp, Homo sapien
gggtccaactcaaaacagcgccata

SEQ ID NO: 1078574 - DNA, 25 bp, Homo sapien
tcagactcaggacccgggatgtgtg

SEQ ID NO: 1078575 - DNA, 25 bp, Homo sapien
tctgctgctgcggatgccactgtgg

SEQ ID NO: 1078576 - DNA, 25 bp, Homo sapien
catctgggctcatggtcagactcag

SEQ ID NO: 1078577 - DNA, 25 bp, Homo sapien
aaaaacaactgaggtgatgggttgg

SEQ ID NO: 1078578 - DNA, 25 bp, Homo sapien
ataaaaaacaactgaggtgatgggt

SEQ ID NO: 1078579 - DNA, 25 bp, Homo sapien
aaacaactgaggtgatgggttggtc

SEQ ID NO: 1078580 - DNA, 25 bp, Homo sapien
aacaactgaggtgatgggttggtct

SEQ ID NO: 1078581 - DNA, 25 bp, Homo sapien
cacggctttggttcctcacccactt

SEQ ID NO: 1078582 - DNA, 25 bp, Homo sapien
caaggcttatgtggtcaggactgag

SEQ ID NO: 1078583 - DNA, 25 bp, Homo sapien
aagtgcctcaggactgcaccttagg

SEQ ID NO: 1078584 - DNA, 25 bp, Homo sapien
agggcagtgtccgtcagtgccctct

SEQ ID NO: 1078585 - DNA, 25 bp, Homo sapien
taaatatatagagagccagtccagc

SEQ ID NO: 1078586 - DNA, 25 bp, Homo sapien
taaaaatcagatcgccccatttggc

SEQ ID NO: 1078587 - DNA, 25 bp, Homo sapien
tccaagtgtacaggctcgtgaggct

SEQ ID NO: 1078588 - DNA, 25 bp, Homo sapien
agtgattcactatgcttgccccggg

SEQ ID NO: 1078589 - DNA, 25 bp, Homo sapien
tccccagcctatcctaccatttatg

SEQ ID NO: 1078590 - DNA, 25 bp, Homo sapien
agcacttagtacagtatatgaaata

SEQ ID NO: 1078591 - DNA, 25 bp, Homo sapien
aagcacttagtacagtatatgaaat

SEQ ID NO: 1078592 - DNA, 25 bp, Homo sapien
ctgtgacgttaaatgggagtcacac

SEQ ID NO: 1078593 - DNA, 25 bp, Homo sapien
gatgaacagactattctcccatgtc

SEQ ID NO: 1078594 - DNA, 25 bp, Homo sapien
gagtcacacaggtttagctatctgt

SEQ ID NO: 1078595 - DNA, 25 bp, Homo sapien
gtttagctatctgttctaggagtgg

SEQ ID NO: 1078596 - DNA, 25 bp, Homo sapien
tgaacactctgaacaaggtcttgaa

SEQ ID NO: 1078597 - DNA, 25 bp, Homo sapien
gtcttgaagcatgaaaaaacaccgc

SEQ ID NO: 1078598 - DNA, 25 bp, Homo sapien
cgctgttccgtaaccaggtcatcat

SEQ ID NO: 1078599 - DNA, 25 bp, Homo sapien
tctgtcctggacagctttgccttgc

SEQ ID NO: 1078600 - DNA, 25 bp, Homo sapien
tctcctggcattaggtctgtcgaaa

SEQ ID NO: 1078601 - DNA, 25 bp, Homo sapien
aagaggcacgggaatattgacacag

SEQ ID NO: 1078602 - DNA, 25 bp, Homo sapien
gctacagaggtgcacatgagagaat

SEQ ID NO: 1078603 - DNA, 25 bp, Homo sapien
tgactgagcttgtgaaagaggcacg

SEQ ID NO: 1078604 - DNA, 25 bp, Homo sapien
gccagtgagggtgttccactcttga

SEQ ID NO: 1078605 - DNA, 25 bp, Homo sapien
gggccagtgagggtgttccactctt

SEQ ID NO: 1078606 - DNA, 25 bp, Homo sapien
ttgacccctgacctcgctacctcgg

SEQ ID NO: 1078607 - DNA, 25 bp, Homo sapien
cccgggccagtgagggtgttccact

SEQ ID NO: 1078608 - DNA, 25 bp, Homo sapien
ctccggctccgggcgctccgaggcc

SEQ ID NO: 1078609 - DNA, 25 bp, Homo sapien
ccggctccgggcgctccgaggccat

SEQ ID NO: 1078610 - DNA, 25 bp, Homo sapien
tccggctccgggcgctccgaggcca

SEQ ID NO: 1078611 - DNA, 25 bp, Homo sapien
tgactcctaccagcactcgtaaaat

SEQ ID NO: 1078612 - DNA, 25 bp, Homo sapien
tagagagcatgtctgtcttacacgg

SEQ ID NO: 1078613 - DNA, 25 bp, Homo sapien
tctcttgggatcctaacagcctcta

SEQ ID NO: 1078614 - DNA, 25 bp, Homo sapien
tcttaacaaggtaggttgagaacca

SEQ ID NO: 1078615 - DNA, 25 bp, Homo sapien
aaagtcctgagcctctagcatggcc

SEQ ID NO: 1078616 - DNA, 25 bp, Homo sapien
caggcactgtgctgcataccatgta

SEQ ID NO: 1078617 - DNA, 25 bp, Homo sapien
ccatgtataccaggaagaatgaagc

SEQ ID NO: 1078618 - DNA, 25 bp, Homo sapien
tcccctcttgaactggctaaaatct

SEQ ID NO: 1078619 - DNA, 25 bp, Homo sapien
agcttcaagtcctcatatgaatcct

SEQ ID NO: 1078620 - DNA, 25 bp, Homo sapien
atggagcttcaagtcctcatatgaa

SEQ ID NO: 1078621 - DNA, 25 bp, Homo sapien
aatcctccttgagtctgaagttcat

SEQ ID NO: 1078622 - DNA, 25 bp, Homo sapien
tcaagtcctcatatgaatcctcctt

SEQ ID NO: 1078623 - DNA, 25 bp, Homo sapien
tgtgttgactatgctggatactgcc

SEQ ID NO: 1078624 - DNA, 25 bp, Homo sapien
aaattgtacactcttatcgccatgc

SEQ ID NO: 1078625 - DNA, 25 bp, Homo sapien
tcaggtttgacttagctagtgtggg

SEQ ID NO: 1078626 - DNA, 25 bp, Homo sapien
ttagggtgggatactaaaccaggca

SEQ ID NO: 1078627 - DNA, 25 bp, Homo sapien
gtcagccctctagttcttgcctcca

SEQ ID NO: 1078628 - DNA, 25 bp, Homo sapien
cacccccgcacttctcagttgtcag

SEQ ID NO: 1078629 - DNA, 25 bp, Homo sapien
tcaaacctctgtgggtcacagtccc

SEQ ID NO: 1078630 - DNA, 25 bp, Homo sapien
atcaaacctctgtgggtcacagtcc

SEQ ID NO: 1078631 - DNA, 25 bp, Homo sapien
tgagagggaaaacagcagaagtgaa

SEQ ID NO: 1078632 - DNA, 25 bp, Homo sapien
gaaaacagcagaagtgaaaagttta

SEQ ID NO: 1078633 - DNA, 25 bp, Homo sapien
cagcagaagtgaaaagtttacccca

SEQ ID NO: 1078634 - DNA, 25 bp, Homo sapien
caatgagagggaaaacagcagaagt

SEQ ID NO: 1078635 - DNA, 25 bp, Homo sapien
tgtggcctgcacagtttggtgcaga

SEQ ID NO: 1078636 - DNA, 25 bp, Homo sapien
caagccaggcgaacatttcgggaga

SEQ ID NO: 1078637 - DNA, 25 bp, Homo sapien
cagatgactgaggaaccaagccagg

SEQ ID NO: 1078638 - DNA, 25 bp, Homo sapien
cgggagattcgataatcctttttca

SEQ ID NO: 1078639 - DNA, 25 bp, Homo sapien
aactcaatgacaaaccgatactgcc

SEQ ID NO: 1078640 - DNA, 25 bp, Homo sapien
caatgccagtagatgggctaaggtc

SEQ ID NO: 1078641 - DNA, 25 bp, Homo sapien
gacaaaccgatactgccaagccagg

SEQ ID NO: 1078642 - DNA, 25 bp, Homo sapien
tgggctaaggtccaactcaatgaca

SEQ ID NO: 1078643 - DNA, 25 bp, Homo sapien
gatccaggcactcggaagggccgaa

SEQ ID NO: 1078644 - DNA, 25 bp, Homo sapien
gcgggacagggcatggaaaacttca

SEQ ID NO: 1078645 - DNA, 25 bp, Homo sapien
tcatcaaacaagatctcccctgtgg

SEQ ID NO: 1078646 - DNA, 25 bp, Homo sapien
tcaggctggaagtcgatgcaagatc

SEQ ID NO: 1078647 - DNA, 25 bp, Homo sapien
gagagtacaggttcatagtaccatg

SEQ ID NO: 1078648 - DNA, 25 bp, Homo sapien
cacaaccagtaagtggtactgccag

SEQ ID NO: 1078649 - DNA, 25 bp, Homo sapien
cacattcatggcctttcataaccag

SEQ ID NO: 1078650 - DNA, 25 bp, Homo sapien
taaagcacaaagtccttagtgtcac

SEQ ID NO: 1078651 - DNA, 25 bp, Homo sapien
gcgcccagccaggatacatcttgag

SEQ ID NO: 1078652 - DNA, 25 bp, Homo sapien
tgtgatttaacaggatatatcttgt

SEQ ID NO: 1078653 - DNA, 25 bp, Homo sapien
cagccaggatacatcttgagggagc

SEQ ID NO: 1078654 - DNA, 25 bp, Homo sapien
tggccctggggcttaactgatgaaa

SEQ ID NO: 1078655 - DNA, 25 bp, Homo sapien
gcaagtcagtcaataggaacgccct

SEQ ID NO: 1078656 - DNA, 25 bp, Homo sapien
caaactggagggtacactactctct

SEQ ID NO: 1078657 - DNA, 25 bp, Homo sapien
ccaaagtctactgaaggtttacatc

SEQ ID NO: 1078658 - DNA, 25 bp, Homo sapien
cttcaaggtgctgaagcaaggattc

SEQ ID NO: 1078659 - DNA, 25 bp, Homo sapien
tcattgtagatatatggcttctggg

SEQ ID NO: 1078660 - DNA, 25 bp, Homo sapien
ttgttttgctcagaatagctttggc

SEQ ID NO: 1078661 - DNA, 25 bp, Homo sapien
tctgctgctgacatacagaaatgct

SEQ ID NO: 1078662 - DNA, 25 bp, Homo sapien
tagactgctttaggcagtgtgggca

SEQ ID NO: 1078663 - DNA, 25 bp, Homo sapien
aaagatggggtttcaccatcttggc

SEQ ID NO: 1078664 - DNA, 25 bp, Homo sapien
aagatggggtttcaccatcttggcc

SEQ ID NO: 1078665 - DNA, 25 bp, Homo sapien
gcacctgccactgcacccggctagt

SEQ ID NO: 1078666 - DNA, 25 bp, Homo sapien
ctgcacccggctagtttttttgtag

SEQ ID NO: 1078667 - DNA, 25 bp, Homo sapien
caatgccacaggtgcccaagaagat

SEQ ID NO: 1078668 - DNA, 25 bp, Homo sapien
tgggtcaggctagagccaacactgc

SEQ ID NO: 1078669 - DNA, 25 bp, Homo sapien
gaataaagttccctgtagatcctct

SEQ ID NO: 1078670 - DNA, 25 bp, Homo sapien
tgagccctaggttgcagacatggca

SEQ ID NO: 1078671 - DNA, 25 bp, Homo sapien
taccagagtttatgcagagcgtggg

SEQ ID NO: 1078672 - DNA, 25 bp, Homo sapien
cacagcgagaccttctatggagaac

SEQ ID NO: 1078673 - DNA, 25 bp, Homo sapien
ggagaacacagccagtaccagagtt

SEQ ID NO: 1078674 - DNA, 25 bp, Homo sapien
tggtcggccttacacaggaagcgga

SEQ ID NO: 1078675 - DNA, 25 bp, Homo sapien
tggctctggggatcgtactgctgct

SEQ ID NO: 1078676 - DNA, 25 bp, Homo sapien
agagctgctcatatatctgctgcag

SEQ ID NO: 1078677 - DNA, 25 bp, Homo sapien
ggccaccttatcctcaaagaggcag

SEQ ID NO: 1078678 - DNA, 25 bp, Homo sapien
catggtggccaccttatcctcaaag

SEQ ID NO: 1078679 - DNA, 25 bp, Homo sapien
cagatccactggaggagatctgggg

SEQ ID NO: 1078680 - DNA, 25 bp, Homo sapien
tcagatccactggaggagatctggg

SEQ ID NO: 1078681 - DNA, 25 bp, Homo sapien
tctcagatccactggaggagatctg

SEQ ID NO: 1078682 - DNA, 25 bp, Homo sapien
cttctcagatccactggaggagatc

SEQ ID NO: 1078683 - DNA, 25 bp, Homo sapien
tgtcaccatggagacgcctaccttc

SEQ ID NO: 1078684 - DNA, 25 bp, Homo sapien
gatgccctgacgaatcatactgacc

SEQ ID NO: 1078685 - DNA, 25 bp, Homo sapien
ggcccagtaggtcccctgagtctgg

SEQ ID NO: 1078686 - DNA, 25 bp, Homo sapien
tagtaactgcagtgccaagatgccc

SEQ ID NO: 1078687 - DNA, 25 bp, Homo sapien
gaagctggttcagcagtgtctcaca

SEQ ID NO: 1078688 - DNA, 25 bp, Homo sapien
tggtcaccccatccgtgatcacgat

SEQ ID NO: 1078689 - DNA, 25 bp, Homo sapien
tcacagacagcaacatcaggtacac

SEQ ID NO: 1078690 - DNA, 25 bp, Homo sapien
cacagtgccactgcgaagctggttc

SEQ ID NO: 1078691 - DNA, 25 bp, Homo sapien
tggctccggctcaggacaagtggac

SEQ ID NO: 1078692 - DNA, 25 bp, Homo sapien
ggtagacagtcagacccaggttgcc

SEQ ID NO: 1078693 - DNA, 25 bp, Homo sapien
ccaaatgttgccattgcgatgaact

SEQ ID NO: 1078694 - DNA, 25 bp, Homo sapien
aaggaatagaggagaaatgcccggt

SEQ ID NO: 1078695 - DNA, 25 bp, Homo sapien
gctgcttgcagagaccaggtgctca

SEQ ID NO: 1078696 - DNA, 25 bp, Homo sapien
tgtgacctctcggacactgtagccc

SEQ ID NO: 1078697 - DNA, 25 bp, Homo sapien
gacacagtgctgaccaagtcggctg

SEQ ID NO: 1078698 - DNA, 25 bp, Homo sapien
agtgtgcttcttccggcgcaaggcc

SEQ ID NO: 1078699 - DNA, 25 bp, Homo sapien
gatacaatgaacgaatgggctgcct

SEQ ID NO: 1078700 - DNA, 25 bp, Homo sapien
gggtgccatagccacatactcaatg

SEQ ID NO: 1078701 - DNA, 25 bp, Homo sapien
tcatgcaaaatgtcgtagccgcctt

SEQ ID NO: 1078702 - DNA, 25 bp, Homo sapien
cgccggataacatgggtacgataca

SEQ ID NO: 1078703 - DNA, 25 bp, Homo sapien
gaagcgtgaaatgctcaggcactga

SEQ ID NO: 1078704 - DNA, 25 bp, Homo sapien
gatgtagaagagtggcactccgctc

SEQ ID NO: 1078705 - DNA, 25 bp, Homo sapien
actgaaggtgggcaagcatctggtc

SEQ ID NO: 1078706 - DNA, 25 bp, Homo sapien
cactccgctcttggtgctgtcagga

SEQ ID NO: 1078707 - DNA, 25 bp, Homo sapien
tgcatgtgcagccatcgctgccagg

SEQ ID NO: 1078708 - DNA, 25 bp, Homo sapien
tgcatccatggacagcactggcttc

SEQ ID NO: 1078709 - DNA, 25 bp, Homo sapien
ccaggaatttgcatccatggacagc

SEQ ID NO: 1078710 - DNA, 25 bp, Homo sapien
gcaccaggcgatgcatgtgcagcca

SEQ ID NO: 1078711 - DNA, 25 bp, Homo sapien
tagccctcgactagtacgaagctgc

SEQ ID NO: 1078712 - DNA, 25 bp, Homo sapien
tgggagatcctgcactggatagtgc

SEQ ID NO: 1078713 - DNA, 25 bp, Homo sapien
gctgtagcgcccattgctgcccggg

SEQ ID NO: 1078714 - DNA, 25 bp, Homo sapien
tccagtcccgcagcagagaggtcag

SEQ ID NO: 1078715 - DNA, 25 bp, Homo sapien
ccgggccggtgctggtgtgccaatg

SEQ ID NO: 1078716 - DNA, 25 bp, Homo sapien
tacggaccatgtagaaggaattggg

SEQ ID NO: 1078717 - DNA, 25 bp, Homo sapien
aacccaggcgaagaaccatgcatgg

SEQ ID NO: 1078718 - DNA, 25 bp, Homo sapien
gctggtgtgccaatgggaaaaccca

SEQ ID NO: 1078719 - DNA, 25 bp, Homo sapien
ttcaccttgggcgttggctccttgc

SEQ ID NO: 1078720 - DNA, 25 bp, Homo sapien
tcgtttcaccttgggcgttggctcc

SEQ ID NO: 1078721 - DNA, 25 bp, Homo sapien
cttgggcgttggctccttgctttgt

SEQ ID NO: 1078722 - DNA, 25 bp, Homo sapien
ttcgtttcaccttgggcgttggctc

SEQ ID NO: 1078723 - DNA, 25 bp, Homo sapien
gccccagcacggggggtgacttgga

SEQ ID NO: 1078724 - DNA, 25 bp, Homo sapien
ccccagcacggggggtgacttggag

SEQ ID NO: 1078725 - DNA, 25 bp, Homo sapien
cttatgcaggaccacaaggcagggc

SEQ ID NO: 1078726 - DNA, 25 bp, Homo sapien
caggaccacaaggcagggccggtca

SEQ ID NO: 1078727 - DNA, 25 bp, Homo sapien
tatgcaggaccacaaggcagggccg

SEQ ID NO: 1078728 - DNA, 25 bp, Homo sapien
ttgtccagtggcttatgcaggacca

SEQ ID NO: 1078729 - DNA, 25 bp, Homo sapien
gcccggtagtccaagggcagcttct

SEQ ID NO: 1078730 - DNA, 25 bp, Homo sapien
tagaagaggctgagcggcctgacac

SEQ ID NO: 1078731 - DNA, 25 bp, Homo sapien
ggacactccaaagccagcgctgatg

SEQ ID NO: 1078732 - DNA, 25 bp, Homo sapien
ccaatgtcagcaagaagggtgcccg

SEQ ID NO: 1078733 - DNA, 25 bp, Homo sapien
gcaggcgaagtggaatccttcagaa

SEQ ID NO: 1078734 - DNA, 25 bp, Homo sapien
aggcgaagtggaatccttcagaaag

SEQ ID NO: 1078735 - DNA, 25 bp, Homo sapien
ctgcaggcgaagtggaatccttcag

SEQ ID NO: 1078736 - DNA, 25 bp, Homo sapien
gtggaatccttcagaaagtcggact

SEQ ID NO: 1078737 - DNA, 25 bp, Homo sapien
gaagctccagaaccatgttgatgat

SEQ ID NO: 1078738 - DNA, 25 bp, Homo sapien
tccagaaccatgttgatgattcctt

SEQ ID NO: 1078739 - DNA, 25 bp, Homo sapien
attggaagctccagaaccatgttga

SEQ ID NO: 1078740 - DNA, 25 bp, Homo sapien
ctgaattggaagctccagaaccatg

SEQ ID NO: 1078741 - DNA, 25 bp, Homo sapien
gaagaggatgtactggacaacacag

SEQ ID NO: 1078742 - DNA, 25 bp, Homo sapien
aggatgtactggacaacacaggtgt

SEQ ID NO: 1078743 - DNA, 25 bp, Homo sapien
gggaagaggatgtactggacaacac

SEQ ID NO: 1078744 - DNA, 25 bp, Homo sapien
gaggatgtactggacaacacaggtg

SEQ ID NO: 1078745 - DNA, 25 bp, Homo sapien
ccagattgagctctgagtctccctc

SEQ ID NO: 1078746 - DNA, 25 bp, Homo sapien
agcttgcgggatctcagaatacgtc

SEQ ID NO: 1078747 - DNA, 25 bp, Homo sapien
acccacacctcagtgaccagattga

SEQ ID NO: 1078748 - DNA, 25 bp, Homo sapien
tcagaatacgtcaggtcctggaggt

SEQ ID NO: 1078749 - DNA, 25 bp, Homo sapien
gagcctatgcaggcagcatcccgtg

SEQ ID NO: 1078750 - DNA, 25 bp, Homo sapien
tctgggggcagaggaccccattcct

SEQ ID NO: 1078751 - DNA, 25 bp, Homo sapien
ctgggggcagaggaccccattcctt

SEQ ID NO: 1078752 - DNA, 25 bp, Homo sapien
gcctatgcaggcagcatcccgtggg

SEQ ID NO: 1078753 - DNA, 25 bp, Homo sapien
gcagcaatcccattaggtcaaaatg

SEQ ID NO: 1078754 - DNA, 25 bp, Homo sapien
tctcatggacgcaggtgtctcctcc

SEQ ID NO: 1078755 - DNA, 25 bp, Homo sapien
aagggatctcatggacgcaggtgtc

SEQ ID NO: 1078756 - DNA, 25 bp, Homo sapien
aaaatggaaagggatctcatggacg

SEQ ID NO: 1078757 - DNA, 25 bp, Homo sapien
aggcacagcaccatgtcgttggcag

SEQ ID NO: 1078758 - DNA, 25 bp, Homo sapien
caggacaggacccctcggcgaaagg

SEQ ID NO: 1078759 - DNA, 25 bp, Homo sapien
cagcaccatgtcgttggcaggacag

SEQ ID NO: 1078760 - DNA, 25 bp, Homo sapien
caccatgtcgttggcaggacaggac

SEQ ID NO: 1078761 - DNA, 25 bp, Homo sapien
ctggaacgtggcaggtccgccgcag

SEQ ID NO: 1078762 - DNA, 25 bp, Homo sapien
tcagtgggatctcccggtcactcag

SEQ ID NO: 1078763 - DNA, 25 bp, Homo sapien
cagcctggtcaacgggggtcagtgg

SEQ ID NO: 1078764 - DNA, 25 bp, Homo sapien
acctcactcaagaaggcagcctggt

SEQ ID NO: 1078765 - DNA, 25 bp, Homo sapien
gctgccgactgcttgctccttcggg

SEQ ID NO: 1078766 - DNA, 25 bp, Homo sapien
ttgctccttcgggatcccatgaacc

SEQ ID NO: 1078767 - DNA, 25 bp, Homo sapien
tgggtgctgccgactgcttgctcct

SEQ ID NO: 1078768 - DNA, 25 bp, Homo sapien
cagggaagtaaaagcggagtctcct

SEQ ID NO: 1078769 - DNA, 25 bp, Homo sapien
agccttgcatagcagcgccactgag

SEQ ID NO: 1078770 - DNA, 25 bp, Homo sapien
agagatgagaggcttgagagtttca

SEQ ID NO: 1078771 - DNA, 25 bp, Homo sapien
atgctgggggttcacaagccttgca

SEQ ID NO: 1078772 - DNA, 25 bp, Homo sapien
tgagagtttcaggaagacctacact

SEQ ID NO: 1078773 - DNA, 25 bp, Homo sapien
caatccccaaacttaggctttgtct

SEQ ID NO: 1078774 - DNA, 25 bp, Homo sapien
tgggactttgtagctttgatcccag

SEQ ID NO: 1078775 - DNA, 25 bp, Homo sapien
tcccagttcctcctagatctttcag

SEQ ID NO: 1078776 - DNA, 25 bp, Homo sapien
actgaggacagggacgtgggacttt

SEQ ID NO: 1078777 - DNA, 25 bp, Homo sapien
ggtggacttagctctccttgattct

SEQ ID NO: 1078778 - DNA, 25 bp, Homo sapien
ccagcgtaagcctgtaagtctcgac

SEQ ID NO: 1078779 - DNA, 25 bp, Homo sapien
tgtaagtctcgacggaatggtggac

SEQ ID NO: 1078780 - DNA, 25 bp, Homo sapien
gacggaatggtggacttagctctcc

SEQ ID NO: 1078781 - DNA, 25 bp, Homo sapien
cgcctgagggggctgcatgccaacc

SEQ ID NO: 1078782 - DNA, 25 bp, Homo sapien
tagatgtagacaggacaccgggtcc

SEQ ID NO: 1078783 - DNA, 25 bp, Homo sapien
ggcccatccgcactctctgtctggg

SEQ ID NO: 1078784 - DNA, 25 bp, Homo sapien
agcgcttccagtgaacagctgtaga

SEQ ID NO: 1078785 - DNA, 25 bp, Homo sapien
tggcccggcgaggacttaggtcaac

SEQ ID NO: 1078786 - DNA, 25 bp, Homo sapien
caagtgtattcatggcctagcaagt

SEQ ID NO: 1078787 - DNA, 25 bp, Homo sapien
gaacttgaccaactcccttaagtga

SEQ ID NO: 1078788 - DNA, 25 bp, Homo sapien
agcaggatatggcagcaacttacct

SEQ ID NO: 1078789 - DNA, 25 bp, Homo sapien
ggcacagtggttagctgcctccttg

SEQ ID NO: 1078790 - DNA, 25 bp, Homo sapien
ggaggggtggtcgaggaactgagtc

SEQ ID NO: 1078791 - DNA, 25 bp, Homo sapien
ctccttgtaccggggttccatccag

SEQ ID NO: 1078792 - DNA, 25 bp, Homo sapien
acggacatagcaccgctgtgcatgc

SEQ ID NO: 1078793 - DNA, 25 bp, Homo sapien
cacggacatagcaccgctgtgcatg

SEQ ID NO: 1078794 - DNA, 25 bp, Homo sapien
ggacatagcaccgctgtgcatgctc

SEQ ID NO: 1078795 - DNA, 25 bp, Homo sapien
cggacatagcaccgctgtgcatgct

SEQ ID NO: 1078796 - DNA, 25 bp, Homo sapien
cctgtatctcccgcagggccccact

SEQ ID NO: 1078797 - DNA, 25 bp, Homo sapien
ccctgtatctcccgcagggccccac

SEQ ID NO: 1078798 - DNA, 25 bp, Homo sapien
ctgtatctcccgcagggccccactc

SEQ ID NO: 1078799 - DNA, 25 bp, Homo sapien
tccctgtatctcccgcagggcccca

SEQ ID NO: 1078800 - DNA, 25 bp, Homo sapien
cacaggcatctaccgctgtcagcaa

SEQ ID NO: 1078801 - DNA, 25 bp, Homo sapien
tcagaagctaggatagctcgttccc

SEQ ID NO: 1078802 - DNA, 25 bp, Homo sapien
tgtcagcaaatcctgggaggtcaca

SEQ ID NO: 1078803 - DNA, 25 bp, Homo sapien
tgcatgaggcaaaccccaagtgtgg

SEQ ID NO: 1078804 - DNA, 25 bp, Homo sapien
ccggaccggagttccaatctaggag

SEQ ID NO: 1078805 - DNA, 25 bp, Homo sapien
tatagggacttggtctgtgtacccc

SEQ ID NO: 1078806 - DNA, 25 bp, Homo sapien
gagccggcgacaaagcactactgct

SEQ ID NO: 1078807 - DNA, 25 bp, Homo sapien
caagtctctacgttcacggttagca

SEQ ID NO: 1078808 - DNA, 25 bp, Homo sapien
aatgccagggacacgggtgctctga

SEQ ID NO: 1078809 - DNA, 25 bp, Homo sapien
gacacgggtgctctgaaactcaggc

SEQ ID NO: 1078810 - DNA, 25 bp, Homo sapien
ctgaaactcaggctcgcttaggtcc

SEQ ID NO: 1078811 - DNA, 25 bp, Homo sapien
ctcgcttaggtcctcggtctctatg

SEQ ID NO: 1078812 - DNA, 25 bp, Homo sapien
atgaagggcaccatgggcctctcct

SEQ ID NO: 1078813 - DNA, 25 bp, Homo sapien
tggatgacgctatgaagggcaccat

SEQ ID NO: 1078814 - DNA, 25 bp, Homo sapien
cgctatgaagggcaccatgggcctc

SEQ ID NO: 1078815 - DNA, 25 bp, Homo sapien
ctggatgacgctatgaagggcacca

SEQ ID NO: 1078816 - DNA, 25 bp, Homo sapien
ggatactactccctaccctagagca

SEQ ID NO: 1078817 - DNA, 25 bp, Homo sapien
gaaggaggttagaatgtcagtcacc

SEQ ID NO: 1078818 - DNA, 25 bp, Homo sapien
gtcagtcacccctcaacaggatact

SEQ ID NO: 1078819 - DNA, 25 bp, Homo sapien
ctagagcaggacacatgcatacccc

SEQ ID NO: 1078820 - DNA, 25 bp, Homo sapien
tagtggggattggaaggcactgtgc

SEQ ID NO: 1078821 - DNA, 25 bp, Homo sapien
ctgtgcggaagtggagacgactgat

SEQ ID NO: 1078822 - DNA, 25 bp, Homo sapien
ttggaaggcactgtgcggaagtgga

SEQ ID NO: 1078823 - DNA, 25 bp, Homo sapien
ctcgcctgctggatggagggcaata

SEQ ID NO: 1078824 - DNA, 25 bp, Homo sapien
aaactccaggtcactgatttttctg

SEQ ID NO: 1078825 - DNA, 25 bp, Homo sapien
tttttctgtctactgtgtcccgagg

SEQ ID NO: 1078826 - DNA, 25 bp, Homo sapien
tctgtctactgtgtcccgaggcccc

SEQ ID NO: 1078827 - DNA, 25 bp, Homo sapien
tgatttttctgtctactgtgtcccg

SEQ ID NO: 1078828 - DNA, 25 bp, Homo sapien
tctacgtctgacagcgaggcagagt

SEQ ID NO: 1078829 - DNA, 25 bp, Homo sapien
tctcaggcccagtgggtgagtcgcc

SEQ ID NO: 1078830 - DNA, 25 bp, Homo sapien
caggctgcacacaggtactgagctg

SEQ ID NO: 1078831 - DNA, 25 bp, Homo sapien
aggtctgattcacggctctcccggt

SEQ ID NO: 1078832 - DNA, 25 bp, Homo sapien
gacctttggctttccctcgggctgc

SEQ ID NO: 1078833 - DNA, 25 bp, Homo sapien
tttccctcgggctgcctcaaactca

SEQ ID NO: 1078834 - DNA, 25 bp, Homo sapien
ttaggcaggctgttccaggaccttt

SEQ ID NO: 1078835 - DNA, 25 bp, Homo sapien
gctgttccaggacctttggctttcc

SEQ ID NO: 1078836 - DNA, 25 bp, Homo sapien
tgaagacatccagagtcacactgag

SEQ ID NO: 1078837 - DNA, 25 bp, Homo sapien
ctcaagggaactcggcctccaactg

SEQ ID NO: 1078838 - DNA, 25 bp, Homo sapien
ggtgctgagggtccgaggccgtggg

SEQ ID NO: 1078839 - DNA, 25 bp, Homo sapien
acactgaggtccctcaagggaactc

SEQ ID NO: 1078840 - DNA, 25 bp, Homo sapien
tcctccttacttcattcttggactc

SEQ ID NO: 1078841 - DNA, 25 bp, Homo sapien
tcaaggtctccttagtccccaagtg

SEQ ID NO: 1078842 - DNA, 25 bp, Homo sapien
ggagttactatcctaccagggcctc

SEQ ID NO: 1078843 - DNA, 25 bp, Homo sapien
agtcaaaggtcaggagttactatcc

SEQ ID NO: 1078844 - DNA, 25 bp, Homo sapien
gggatcgtggaaatgaagcactgct

SEQ ID NO: 1078845 - DNA, 25 bp, Homo sapien
ctggggatcgtggaaatgaagcact

SEQ ID NO: 1078846 - DNA, 25 bp, Homo sapien
gctgccctggggatcgtggaaatga

SEQ ID NO: 1078847 - DNA, 25 bp, Homo sapien
ccctggggatcgtggaaatgaagca

SEQ ID NO: 1078848 - DNA, 25 bp, Homo sapien
ggcagtgggggcccgaggccatcat

SEQ ID NO: 1078849 - DNA, 25 bp, Homo sapien
cagtgggggcccgaggccatcatct

SEQ ID NO: 1078850 - DNA, 25 bp, Homo sapien
tgggggcccgaggccatcatctgac

SEQ ID NO: 1078851 - DNA, 25 bp, Homo sapien
ctctcctcttctgggggtggcagtg

SEQ ID NO: 1078852 - DNA, 25 bp, Homo sapien
tgtggggcgtggccaaattggatag

SEQ ID NO: 1078853 - DNA, 25 bp, Homo sapien
tggggcgtggccaaattggatagtc

SEQ ID NO: 1078854 - DNA, 25 bp, Homo sapien
gtggggcgtggccaaattggatagt

SEQ ID NO: 1078855 - DNA, 25 bp, Homo sapien
cattcatggtggtctcaatagccag

SEQ ID NO: 1078856 - DNA, 25 bp, Homo sapien
attcatggtggtctcaatagccagt

SEQ ID NO: 1078857 - DNA, 25 bp, Homo sapien
tcattcatggtggtctcaatagcca

SEQ ID NO: 1078858 - DNA, 25 bp, Homo sapien
ctcattcatggtggtctcaatagcc

SEQ ID NO: 1078859 - DNA, 25 bp, Homo sapien
caggagaactatggatatgggcagc

SEQ ID NO: 1078860 - DNA, 25 bp, Homo sapien
gcgaaggcaggtggagcgtccagga

SEQ ID NO: 1078861 - DNA, 25 bp, Homo sapien
gagcgtccaggagaactatggatat

SEQ ID NO: 1078862 - DNA, 25 bp, Homo sapien
cgtccaggagaactatggatatggg

SEQ ID NO: 1078863 - DNA, 25 bp, Homo sapien
aattgtgtgagggaacgctctggcc

SEQ ID NO: 1078864 - DNA, 25 bp, Homo sapien
tccttgaattgtgtgagggaacgct

SEQ ID NO: 1078865 - DNA, 25 bp, Homo sapien
tgtgagggaacgctctggcccaaat

SEQ ID NO: 1078866 - DNA, 25 bp, Homo sapien
tgagggaacgctctggcccaaatac

SEQ ID NO: 1078867 - DNA, 25 bp, Homo sapien
cagggagatggaggcggcggaactc

SEQ ID NO: 1078868 - DNA, 25 bp, Homo sapien
gaagaacatggccagggagatggag

SEQ ID NO: 1078869 - DNA, 25 bp, Homo sapien
cttcaagaagaacatggccagggag

SEQ ID NO: 1078870 - DNA, 25 bp, Homo sapien
tcaagaagaacatggccagggagat

SEQ ID NO: 1078871 - DNA, 25 bp, Homo sapien
gccacaaagaagaagccactgtcag

SEQ ID NO: 1078872 - DNA, 25 bp, Homo sapien
tgccacaaagaagaagccactgtca

SEQ ID NO: 1078873 - DNA, 25 bp, Homo sapien
gctgttggccagctgccacaaagaa

SEQ ID NO: 1078874 - DNA, 25 bp, Homo sapien
ctggctgttggccagctgccacaaa

SEQ ID NO: 1078875 - DNA, 25 bp, Homo sapien
caagcccaggccgctgaagaaggct

SEQ ID NO: 1078876 - DNA, 25 bp, Homo sapien
cctgtcctcatgactgtgccaagcc

SEQ ID NO: 1078877 - DNA, 25 bp, Homo sapien
ctccccttcgatgccttcagccctg

SEQ ID NO: 1078878 - DNA, 25 bp, Homo sapien
ccctgtcctcatgactgtgccaagc

SEQ ID NO: 1078879 - DNA, 25 bp, Homo sapien
tgtggcacgcggggcaggctgatga

SEQ ID NO: 1078880 - DNA, 25 bp, Homo sapien
gatgagggggacaccctcagaatcc

SEQ ID NO: 1078881 - DNA, 25 bp, Homo sapien
ctgatgagggggacaccctcagaat

SEQ ID NO: 1078882 - DNA, 25 bp, Homo sapien
agggggacaccctcagaatcctctg

SEQ ID NO: 1078883 - DNA, 25 bp, Homo sapien
ctggacatgagacttaatccccggc

SEQ ID NO: 1078884 - DNA, 25 bp, Homo sapien
tccacactgccctgactggacatga

SEQ ID NO: 1078885 - DNA, 25 bp, Homo sapien
taggtggtctgagtccacactgccc

SEQ ID NO: 1078886 - DNA, 25 bp, Homo sapien
tgagacttaatccccggctgggccc

SEQ ID NO: 1078887 - DNA, 25 bp, Homo sapien
gacccggacaatgagccagaagtca

SEQ ID NO: 1078888 - DNA, 25 bp, Homo sapien
gtcattgggaccctcactgtctgag

SEQ ID NO: 1078889 - DNA, 25 bp, Homo sapien
ttctcaccaagggtgtcattgggac

SEQ ID NO: 1078890 - DNA, 25 bp, Homo sapien
agtccgcaatgtgaagggggccttc

SEQ ID NO: 1078891 - DNA, 25 bp, Homo sapien
cgtgcatgtgcatacacttccacac

SEQ ID NO: 1078892 - DNA, 25 bp, Homo sapien
catgtgcatacacttccacacggtc

SEQ ID NO: 1078893 - DNA, 25 bp, Homo sapien
tgcatgtgcatacacttccacacgg

SEQ ID NO: 1078894 - DNA, 25 bp, Homo sapien
gcatgtgcatacacttccacacggt

SEQ ID NO: 1078895 - DNA, 25 bp, Homo sapien
aggtggcgacactcagtgcccggcc

SEQ ID NO: 1078896 - DNA, 25 bp, Homo sapien
gcagatctccccaactcgcctcacc

SEQ ID NO: 1078897 - DNA, 25 bp, Homo sapien
tccccaactcgcctcaccaggagct

SEQ ID NO: 1078898 - DNA, 25 bp, Homo sapien
ctgcaggtggcgacactcagtgccc

SEQ ID NO: 1078899 - DNA, 25 bp, Homo sapien
acgtggctgtcatgaaggtcttgaa

SEQ ID NO: 1078900 - DNA, 25 bp, Homo sapien
gtctcactgcgccacagatcttctt

SEQ ID NO: 1078901 - DNA, 25 bp, Homo sapien
agatcttcttcactctcggccacca

SEQ ID NO: 1078902 - DNA, 25 bp, Homo sapien
ccagaagagagttacacacgtggct

SEQ ID NO: 1078903 - DNA, 25 bp, Homo sapien
ggagcccatggccacagtacaatgc

SEQ ID NO: 1078904 - DNA, 25 bp, Homo sapien
ttgtcctgggctttggaagacagaa

SEQ ID NO: 1078905 - DNA, 25 bp, Homo sapien
aatgcctccttcgacccttttcagg

SEQ ID NO: 1078906 - DNA, 25 bp, Homo sapien
tagtgtggcagtacacaggagccca

SEQ ID NO: 1078907 - DNA, 25 bp, Homo sapien
aatggactcggatcacagttcccca

SEQ ID NO: 1078908 - DNA, 25 bp, Homo sapien
caacgtcacaggagaaatggccagg

SEQ ID NO: 1078909 - DNA, 25 bp, Homo sapien
catgctgggccccattttgaggcgt

SEQ ID NO: 1078910 - DNA, 25 bp, Homo sapien
agttccccacacaacgtcacaggag

SEQ ID NO: 1078911 - DNA, 25 bp, Homo sapien
gcattgagcacagagcgcagggcct

SEQ ID NO: 1078912 - DNA, 25 bp, Homo sapien
ttttccggttcaccacagagaaggc

SEQ ID NO: 1078913 - DNA, 25 bp, Homo sapien
catgtttttccggttcaccacagag

SEQ ID NO: 1078914 - DNA, 25 bp, Homo sapien
gcctttgttgctcgctcctggtaaa

SEQ ID NO: 1078915 - DNA, 25 bp, Homo sapien
aggcttcctcagagtagatgggctc

SEQ ID NO: 1078916 - DNA, 25 bp, Homo sapien
agcgcatcccctttccatggccggt

SEQ ID NO: 1078917 - DNA, 25 bp, Homo sapien
tagatgggctcttggcttcgggaca

SEQ ID NO: 1078918 - DNA, 25 bp, Homo sapien
gcttcgggacagagcgagggaaggg

SEQ ID NO: 1078919 - DNA, 25 bp, Homo sapien
ccagcagctggatatgtctgtccac

SEQ ID NO: 1078920 - DNA, 25 bp, Homo sapien
tggaccagcagctggatatgtctgt

SEQ ID NO: 1078921 - DNA, 25 bp, Homo sapien
gcccacaggacgagcagcatctgaa

SEQ ID NO: 1078922 - DNA, 25 bp, Homo sapien
tggatatgtctgtccacttggccca

SEQ ID NO: 1078923 - DNA, 25 bp, Homo sapien
gcacgagctcatccgtgatctcagg

SEQ ID NO: 1078924 - DNA, 25 bp, Homo sapien
gttccgaacaagcataactgtgatg

SEQ ID NO: 1078925 - DNA, 25 bp, Homo sapien
tggtgtcagcttgcagttccgaaca

SEQ ID NO: 1078926 - DNA, 25 bp, Homo sapien
gccgacatagaactcgcacgagctc

SEQ ID NO: 1078927 - DNA, 25 bp, Homo sapien
tccagcctagactgtcctggaacct

SEQ ID NO: 1078928 - DNA, 25 bp, Homo sapien
agaagttccagcctagactgtcctg

SEQ ID NO: 1078929 - DNA, 25 bp, Homo sapien
agttccagcctagactgtcctggaa

SEQ ID NO: 1078930 - DNA, 25 bp, Homo sapien
ctgggaaggatgctggtgcctagag

SEQ ID NO: 1078931 - DNA, 25 bp, Homo sapien
ttgggagagtgcaggaagatgagca

SEQ ID NO: 1078932 - DNA, 25 bp, Homo sapien
aagtggttccggctgttgctatctg

SEQ ID NO: 1078933 - DNA, 25 bp, Homo sapien
gatgagcaagttctgccgtaggtac

SEQ ID NO: 1078934 - DNA, 25 bp, Homo sapien
ttctgccgtaggtaccatgccaggg

SEQ ID NO: 1078935 - DNA, 25 bp, Homo sapien
tacaagtagatgtccaagtcaggga

SEQ ID NO: 1078936 - DNA, 25 bp, Homo sapien
ccaccaggcttgttatacaagtaga

SEQ ID NO: 1078937 - DNA, 25 bp, Homo sapien
gccctgtccaccaggcttgttatac

SEQ ID NO: 1078938 - DNA, 25 bp, Homo sapien
tgttatacaagtagatgtccaagtc

SEQ ID NO: 1078939 - DNA, 25 bp, Homo sapien
gccacaacgccagtgacaagggggc

SEQ ID NO: 1078940 - DNA, 25 bp, Homo sapien
gaggggggccacaacgccagtgaca

SEQ ID NO: 1078941 - DNA, 25 bp, Homo sapien
ggggccacaacgccagtgacaaggg

SEQ ID NO: 1078942 - DNA, 25 bp, Homo sapien
aggggggccacaacgccagtgacaa

SEQ ID NO: 1078943 - DNA, 25 bp, Homo sapien
aacaaccgggcagcggatgacctgg

SEQ ID NO: 1078944 - DNA, 25 bp, Homo sapien
ctgggtcagttgctcaaattcctcc

SEQ ID NO: 1078945 - DNA, 25 bp, Homo sapien
ctgtccacaacaaccgggcagcgga

SEQ ID NO: 1078946 - DNA, 25 bp, Homo sapien
acctgggtcagttgctcaaattcct

SEQ ID NO: 1078947 - DNA, 25 bp, Homo sapien
tcgatgatggcatcggccagggcct

SEQ ID NO: 1078948 - DNA, 25 bp, Homo sapien
ccacacatccaatcgaagccgtggg

SEQ ID NO: 1078949 - DNA, 25 bp, Homo sapien
tttcccacacatccaatcgaagccg

SEQ ID NO: 1078950 - DNA, 25 bp, Homo sapien
aatcgaagccgtggggccccattct

SEQ ID NO: 1078951 - DNA, 25 bp, Homo sapien
cccagggacctcttgacttgcatac

SEQ ID NO: 1078952 - DNA, 25 bp, Homo sapien
ctgtgacattctctggaccccaggg

SEQ ID NO: 1078953 - DNA, 25 bp, Homo sapien
gccacactgtcctgcttggatctgt

SEQ ID NO: 1078954 - DNA, 25 bp, Homo sapien
acactgtcctgcttggatctgtgac

SEQ ID NO: 1078955 - DNA, 25 bp, Homo sapien
gaaaggtgctagctcggcctgcaga

SEQ ID NO: 1078956 - DNA, 25 bp, Homo sapien
tagtttccaacgatccgttcctgag

SEQ ID NO: 1078957 - DNA, 25 bp, Homo sapien
acgccggcccgctttgctgggtgga

SEQ ID NO: 1078958 - DNA, 25 bp, Homo sapien
agcatatcccagaagctacgccggc

SEQ ID NO: 1078959 - DNA, 25 bp, Homo sapien
gttttatatgaaaggacactgtggc

SEQ ID NO: 1078960 - DNA, 25 bp, Homo sapien
tgcattaacaggcatgatcacaacg

SEQ ID NO: 1078961 - DNA, 25 bp, Homo sapien
gggactaaaggtacacgccatggtg

SEQ ID NO: 1078962 - DNA, 25 bp, Homo sapien
ggcagaaaggtagatgcccacttca

SEQ ID NO: 1078963 - DNA, 25 bp, Homo sapien
tctcggttttgtgacgcctccggcc

SEQ ID NO: 1078964 - DNA, 25 bp, Homo sapien
cgagtgtcttctggccgatccagga

SEQ ID NO: 1078965 - DNA, 25 bp, Homo sapien
caggagtccgaacactctcggtttt

SEQ ID NO: 1078966 - DNA, 25 bp, Homo sapien
gtctctgggctccagaatctgagcc

SEQ ID NO: 1078967 - DNA, 25 bp, Homo sapien
atccagcgctgagcaacacgggcaa

SEQ ID NO: 1078968 - DNA, 25 bp, Homo sapien
caatctgaaccataaactccatcca

SEQ ID NO: 1078969 - DNA, 25 bp, Homo sapien
caacacgggcaaacacaggatgaag

SEQ ID NO: 1078970 - DNA, 25 bp, Homo sapien
gcaaacacaggatgaagggtcccca

SEQ ID NO: 1078971 - DNA, 25 bp, Homo sapien
ctcaaagatgcggacactggtgtct

SEQ ID NO: 1078972 - DNA, 25 bp, Homo sapien
gaaccgggacaccatgtgggcagag

SEQ ID NO: 1078973 - DNA, 25 bp, Homo sapien
ggtgtctccagccattgaggtgacc

SEQ ID NO: 1078974 - DNA, 25 bp, Homo sapien
tgcggtgaactcagacaggatggat

SEQ ID NO: 1078975 - DNA, 25 bp, Homo sapien
agggccgaagatctctggctctgaa

SEQ ID NO: 1078976 - DNA, 25 bp, Homo sapien
ccaggggaacaagggccgaagatct

SEQ ID NO: 1078977 - DNA, 25 bp, Homo sapien
cagatgccgctcagctgcagggcgg

SEQ ID NO: 1078978 - DNA, 25 bp, Homo sapien
agatgccgctcagctgcagggcggg

SEQ ID NO: 1078979 - DNA, 25 bp, Homo sapien
tctgccggggagcatttcgccctga

SEQ ID NO: 1078980 - DNA, 25 bp, Homo sapien
gagcatttcgccctgagctcccatc

SEQ ID NO: 1078981 - DNA, 25 bp, Homo sapien
tggctcgaagcgctgcatggctttg

SEQ ID NO: 1078982 - DNA, 25 bp, Homo sapien
cctctagtagcaagagcctctgccg

SEQ ID NO: 1078983 - DNA, 25 bp, Homo sapien
ccataatgatggaagaggccaagct

SEQ ID NO: 1078984 - DNA, 25 bp, Homo sapien
ttttcatctcgcacggggaagtcca

SEQ ID NO: 1078985 - DNA, 25 bp, Homo sapien
gagcccagttgtaggtcagcagctg

SEQ ID NO: 1078986 - DNA, 25 bp, Homo sapien
cgaaccagcgctcggcccaatgctg

SEQ ID NO: 1078987 - DNA, 25 bp, Homo sapien
tccacttccatggtcggcagcagga

SEQ ID NO: 1078988 - DNA, 25 bp, Homo sapien
tgggcacaggaccaagtacggagct

SEQ ID NO: 1078989 - DNA, 25 bp, Homo sapien
gggcgggcagccgtgatatccctta

SEQ ID NO: 1078990 - DNA, 25 bp, Homo sapien
tgccatcttgatctctaggaactgt

SEQ ID NO: 1078991 - DNA, 25 bp, Homo sapien
aacgctgctgccaggttacaaacag

SEQ ID NO: 1078992 - DNA, 25 bp, Homo sapien
tggctggggtagaacgctgctgcca

SEQ ID NO: 1078993 - DNA, 25 bp, Homo sapien
gtggctggggtagaacgctgctgcc

SEQ ID NO: 1078994 - DNA, 25 bp, Homo sapien
gctgctgccaggttacaaacaggtt

SEQ ID NO: 1078995 - DNA, 25 bp, Homo sapien
cagtaatgcaccaggcgggatgact

SEQ ID NO: 1078996 - DNA, 25 bp, Homo sapien
cacagtaatgcaccaggcgggatga

SEQ ID NO: 1078997 - DNA, 25 bp, Homo sapien
ggctgttgcacagtaatgcaccagg

SEQ ID NO: 1078998 - DNA, 25 bp, Homo sapien
tgttgcacagtaatgcaccaggcgg

SEQ ID NO: 1078999 - DNA, 25 bp, Homo sapien
cccgtcagggggtccagaggtctct

SEQ ID NO: 1079000 - DNA, 25 bp, Homo sapien
agccaggcagctgggtcgaagagca

SEQ ID NO: 1079001 - DNA, 25 bp, Homo sapien
gcagccaggcagctgggtcgaagag

SEQ ID NO: 1079002 - DNA, 25 bp, Homo sapien
ccagaggtctctgggggcccatgca

SEQ ID NO: 1079003 - DNA, 25 bp, Homo sapien
gcacaaaacctatgctctgcagata

SEQ ID NO: 1079004 - DNA, 25 bp, Homo sapien
tcccgggggcgacacatccaaggat

SEQ ID NO: 1079005 - DNA, 25 bp, Homo sapien
gaccctgactcagggcgatggcgcc

SEQ ID NO: 1079006 - DNA, 25 bp, Homo sapien
catccaaggattcacagcttgtggg

SEQ ID NO: 1079007 - DNA, 25 bp, Homo sapien
cgggcgggtgaggggggccgcagtg

SEQ ID NO: 1079008 - DNA, 25 bp, Homo sapien
gcgggtgaggggggccgcagtggta

SEQ ID NO: 1079009 - DNA, 25 bp, Homo sapien
tcagacctgtcagtactggccagtg

SEQ ID NO: 1079010 - DNA, 25 bp, Homo sapien
gccagtgggtgaacatgaccaagaa

SEQ ID NO: 1079011 - DNA, 25 bp, Homo sapien
tgcaagtaggcctagcacagaggtc

SEQ ID NO: 1079012 - DNA, 25 bp, Homo sapien
ccctgggccgagaactacatcaaat

SEQ ID NO: 1079013 - DNA, 25 bp, Homo sapien
tttgacagtggatgaaaaggtggct

SEQ ID NO: 1079014 - DNA, 25 bp, Homo sapien
cagtggatgaaaaggtggctgcaga

SEQ ID NO: 1079015 - DNA, 25 bp, Homo sapien
tggatgaaaaggtggctgcagagtt

SEQ ID NO: 1079016 - DNA, 25 bp, Homo sapien
gagatttgacagtggatgaaaaggt

SEQ ID NO: 1079017 - DNA, 25 bp, Homo sapien
gaacatagagcaggggccacaaaca

SEQ ID NO: 1079018 - DNA, 25 bp, Homo sapien
taaggtgaacagctcatttttcgca

SEQ ID NO: 1079019 - DNA, 25 bp, Homo sapien
catttttcgcatacagccactggga

SEQ ID NO: 1079020 - DNA, 25 bp, Homo sapien
tctggagacacgaaagtagctatgt

SEQ ID NO: 1079021 - DNA, 25 bp, Homo sapien
caaggagatgcttgatgcctggtta

SEQ ID NO: 1079022 - DNA, 25 bp, Homo sapien
ggtggagactaagcctctgctactg

SEQ ID NO: 1079023 - DNA, 25 bp, Homo sapien
cttcaagggaggcaaaaacagtgct

SEQ ID NO: 1079024 - DNA, 25 bp, Homo sapien
tcagaggcctactgctcgttacagt

SEQ ID NO: 1079025 - DNA, 25 bp, Homo sapien
agaaggagcctcgaccctctgttcc

SEQ ID NO: 1079026 - DNA, 25 bp, Homo sapien
gggctcccatcagtcttggttttag

SEQ ID NO: 1079027 - DNA, 25 bp, Homo sapien
ctcccatcagtcttggttttagggc

SEQ ID NO: 1079028 - DNA, 25 bp, Homo sapien
aggagaaggagcctcgaccctctgt

SEQ ID NO: 1079029 - DNA, 25 bp, Homo sapien
atgaggatgatgcccccaggcagtg

SEQ ID NO: 1079030 - DNA, 25 bp, Homo sapien
aggtggttaccggagagctagtgct

SEQ ID NO: 1079031 - DNA, 25 bp, Homo sapien
tgcccgctgcaggtggtaggtggtt

SEQ ID NO: 1079032 - DNA, 25 bp, Homo sapien
tgcaggtggtaggtggttaccggag

SEQ ID NO: 1079033 - DNA, 25 bp, Homo sapien
tcgggaacattccagggcaaactgt

SEQ ID NO: 1079034 - DNA, 25 bp, Homo sapien
tgtgagttgacagcctgccccattg

SEQ ID NO: 1079035 - DNA, 25 bp, Homo sapien
cccattgggattcgggaacattcca

SEQ ID NO: 1079036 - DNA, 25 bp, Homo sapien
agcctgccccattgggattcgggaa

SEQ ID NO: 1079037 - DNA, 25 bp, Homo sapien
gatgggcacctagcacgtgctgatg

SEQ ID NO: 1079038 - DNA, 25 bp, Homo sapien
gtaaatgtgattgcggccaaagtgg

SEQ ID NO: 1079039 - DNA, 25 bp, Homo sapien
ggcgcagatggaagtcatagctgaa

SEQ ID NO: 1079040 - DNA, 25 bp, Homo sapien
tagccgtgccgcagcaccagatggg

SEQ ID NO: 1079041 - DNA, 25 bp, Homo sapien
ggcatactcgttgtgttctgggccc

SEQ ID NO: 1079042 - DNA, 25 bp, Homo sapien
ggcgtgatcagccacgtagttgtat

SEQ ID NO: 1079043 - DNA, 25 bp, Homo sapien
cctggccgggccattcgcaatggct

SEQ ID NO: 1079044 - DNA, 25 bp, Homo sapien
cattcgcaatggcttcatgtggtaa

SEQ ID NO: 1079045 - DNA, 25 bp, Homo sapien
tgcagcacagtgacagacaagcaga

SEQ ID NO: 1079046 - DNA, 25 bp, Homo sapien
tggtgtcgaagtccctcagagtcca

SEQ ID NO: 1079047 - DNA, 25 bp, Homo sapien
ttgctcctcaaagggtgcagcacag

SEQ ID NO: 1079048 - DNA, 25 bp, Homo sapien
aaagtcatcctggtgtcgaagtccc

SEQ ID NO: 1079049 - DNA, 25 bp, Homo sapien
gaagaggcgcttccaaagggtgtcc

SEQ ID NO: 1079050 - DNA, 25 bp, Homo sapien
gatttggcatggactgcttctagga

SEQ ID NO: 1079051 - DNA, 25 bp, Homo sapien
cggtccaggcgctagaataagccct

SEQ ID NO: 1079052 - DNA, 25 bp, Homo sapien
gtcgatgtccccaatggatttggca

SEQ ID NO: 1079053 - DNA, 25 bp, Homo sapien
gagaccgtcatggataggaagcagt

SEQ ID NO: 1079054 - DNA, 25 bp, Homo sapien
aagcggcttaggagaactttgatca

SEQ ID NO: 1079055 - DNA, 25 bp, Homo sapien
gatcaggctctggtaccaggagacc

SEQ ID NO: 1079056 - DNA, 25 bp, Homo sapien
gggctttggaaatggcgacagctct

SEQ ID NO: 1079057 - DNA, 25 bp, Homo sapien
tacagcagtgctttcacgcctcagt

SEQ ID NO: 1079058 - DNA, 25 bp, Homo sapien
cctgcaccctgaaatgaatcctctg

SEQ ID NO: 1079059 - DNA, 25 bp, Homo sapien
ttaatgccctgtgctcgtgtccacc

SEQ ID NO: 1079060 - DNA, 25 bp, Homo sapien
cctcatcctaactgaccttggcttc

SEQ ID NO: 1079061 - DNA, 25 bp, Homo sapien
cagtgaacttctgattcagcacaac

SEQ ID NO: 1079062 - DNA, 25 bp, Homo sapien
gtcagtgaacttctgattcagcaca

SEQ ID NO: 1079063 - DNA, 25 bp, Homo sapien
tcagtgaacttctgattcagcacaa

SEQ ID NO: 1079064 - DNA, 25 bp, Homo sapien
agtcagtgaacttctgattcagcac

SEQ ID NO: 1079065 - DNA, 25 bp, Homo sapien
caggctgtgttgatgacagactcca

SEQ ID NO: 1079066 - DNA, 25 bp, Homo sapien
tggtaggtggagaccagttgggcag

SEQ ID NO: 1079067 - DNA, 25 bp, Homo sapien
tccagagggtgaaacaggctgtgtt

SEQ ID NO: 1079068 - DNA, 25 bp, Homo sapien
gggctctcggaaaaccactgtcaga

SEQ ID NO: 1079069 - DNA, 25 bp, Homo sapien
gtgaactcccgagactctaccaggg

SEQ ID NO: 1079070 - DNA, 25 bp, Homo sapien
tggcaggcaatctggtaggcccatg

SEQ ID NO: 1079071 - DNA, 25 bp, Homo sapien
gattcaaggaacagtgacattcagt

SEQ ID NO: 1079072 - DNA, 25 bp, Homo sapien
accctgtgtgaactcccgagactct

SEQ ID NO: 1079073 - DNA, 25 bp, Homo sapien
agcaaagggacttgacggtggccac

SEQ ID NO: 1079074 - DNA, 25 bp, Homo sapien
tgaagacccgaaggctcaagggaca

SEQ ID NO: 1079075 - DNA, 25 bp, Homo sapien
gattggaacccaggtgtcatctcga

SEQ ID NO: 1079076 - DNA, 25 bp, Homo sapien
tcatctcgatgggaatgtccagcag

SEQ ID NO: 1079077 - DNA, 25 bp, Homo sapien
ttttctggagaacctgaggcatgca

SEQ ID NO: 1079078 - DNA, 25 bp, Homo sapien
cccagggagctgatcgaatagcagt

SEQ ID NO: 1079079 - DNA, 25 bp, Homo sapien
ccattgttggtgagaggaccttcct

SEQ ID NO: 1079080 - DNA, 25 bp, Homo sapien
gctacaaaggcttcgtgggctgtga

SEQ ID NO: 1079081 - DNA, 25 bp, Homo sapien
tgcttacaggtagtgatgcttggac

SEQ ID NO: 1079082 - DNA, 25 bp, Homo sapien
tgggagctcagtctgcctaggcaga

SEQ ID NO: 1079083 - DNA, 25 bp, Homo sapien
gggtaggcacctaaccctgtctgga

SEQ ID NO: 1079084 - DNA, 25 bp, Homo sapien
tgatgcatttgaggacaggcctatt

SEQ ID NO: 1079085 - DNA, 25 bp, Homo sapien
caggccgtgcggtatgccaaagccc

SEQ ID NO: 1079086 - DNA, 25 bp, Homo sapien
ggactggagcaggccgtgcggtatg

SEQ ID NO: 1079087 - DNA, 25 bp, Homo sapien
gagacaggcggccttccgagaggga

SEQ ID NO: 1079088 - DNA, 25 bp, Homo sapien
ggagcaggccgtgcggtatgccaaa

SEQ ID NO: 1079089 - DNA, 25 bp, Homo sapien
gggctgcggcttgtactgatcaaca

SEQ ID NO: 1079090 - DNA, 25 bp, Homo sapien
atctgtcctggctattccccgagct

SEQ ID NO: 1079091 - DNA, 25 bp, Homo sapien
cgtaggcgcttttcgtgaaggcccg

SEQ ID NO: 1079092 - DNA, 25 bp, Homo sapien
aacagtgctcgttcgttcgcagggc

SEQ ID NO: 1079093 - DNA, 25 bp, Homo sapien
gtgcgcgtcccatcattgcaaccgg

SEQ ID NO: 1079094 - DNA, 25 bp, Homo sapien
tctctcttgcttcgcgtccggctct

SEQ ID NO: 1079095 - DNA, 25 bp, Homo sapien
tttcaaatgttgcttaacgaacaga

SEQ ID NO: 1079096 - DNA, 25 bp, Homo sapien
gaaagactcagtattaaagtgcgcg

SEQ ID NO: 1079097 - DNA, 25 bp, Homo sapien
cccttgggatgacatgggtttctca

SEQ ID NO: 1079098 - DNA, 25 bp, Homo sapien
ggaaagtctaagcatcccagcctta

SEQ ID NO: 1079099 - DNA, 25 bp, Homo sapien
ccaatcagttgggttattgtagatg

SEQ ID NO: 1079100 - DNA, 25 bp, Homo sapien
ttatctcaagaaacattaagaggct

SEQ ID NO: 1079101 - DNA, 25 bp, Homo sapien
tgctgtgaacatcactttacttctt

SEQ ID NO: 1079102 - DNA, 25 bp, Homo sapien
actcagtgttatcatttgagccacc

SEQ ID NO: 1079103 - DNA, 25 bp, Homo sapien
gccaccagctttctcttgtacaaca

SEQ ID NO: 1079104 - DNA, 25 bp, Homo sapien
tcctggtacacttgtgcaaaacttt

SEQ ID NO: 1079105 - DNA, 25 bp, Homo sapien
catacatgaatgtgctatccaacgt

SEQ ID NO: 1079106 - DNA, 25 bp, Homo sapien
gttttatcagagatgtccatattcc

SEQ ID NO: 1079107 - DNA, 25 bp, Homo sapien
tgtcctcctctagaggtggtcacca

SEQ ID NO: 1079108 - DNA, 25 bp, Homo sapien
taagagaaggctccaatgctaccct

SEQ ID NO: 1079109 - DNA, 25 bp, Homo sapien
atttattgtttcttgtgacagggtt

SEQ ID NO: 1079110 - DNA, 25 bp, Homo sapien
ttttatttattgtttcttgtgacag

SEQ ID NO: 1079111 - DNA, 25 bp, Homo sapien
tggtctgtattcttttttagttgtg

SEQ ID NO: 1079112 - DNA, 25 bp, Homo sapien
atcttgctaacggttattttattat

SEQ ID NO: 1079113 - DNA, 25 bp, Homo sapien
tcacaaacaagggaacggaggtaca

SEQ ID NO: 1079114 - DNA, 25 bp, Homo sapien
gctaggtccagctcacaaacaaggg

SEQ ID NO: 1079115 - DNA, 25 bp, Homo sapien
tttgaagtgagttgctaggtccagc

SEQ ID NO: 1079116 - DNA, 25 bp, Homo sapien
gagacagagatatagggaaccactt

SEQ ID NO: 1079117 - DNA, 25 bp, Homo sapien
tcactcctgaggtcaaccgcaaggg

SEQ ID NO: 1079118 - DNA, 25 bp, Homo sapien
cgcaagggccggctcctgtaaaact

SEQ ID NO: 1079119 - DNA, 25 bp, Homo sapien
caaaactgatactggacaatatggc

SEQ ID NO: 1079120 - DNA, 25 bp, Homo sapien
cttaggtctgctaggcaggcaggtt

SEQ ID NO: 1079121 - DNA, 25 bp, Homo sapien
cagcggtggctctcgaactttggca

SEQ ID NO: 1079122 - DNA, 25 bp, Homo sapien
taacaaagtagaaggcctgctccag

SEQ ID NO: 1079123 - DNA, 25 bp, Homo sapien
taaactcggatacccacaactgagg

SEQ ID NO: 1079124 - DNA, 25 bp, Homo sapien
ttaagagatcaagtagcgccggcac

SEQ ID NO: 1079125 - DNA, 25 bp, Homo sapien
gctcttctccggtggatcattacca

SEQ ID NO: 1079126 - DNA, 25 bp, Homo sapien
gcttttcaggcttagaggggcaaaa

SEQ ID NO: 1079127 - DNA, 25 bp, Homo sapien
gtagctcttctccggtggatcatta

SEQ ID NO: 1079128 - DNA, 25 bp, Homo sapien
gacttgattgagtctgtgtagctct

SEQ ID NO: 1079129 - DNA, 25 bp, Homo sapien
tcaacagacttcccatttcttaagg

SEQ ID NO: 1079130 - DNA, 25 bp, Homo sapien
ctcaacagacttcccatttcttaag

SEQ ID NO: 1079131 - DNA, 25 bp, Homo sapien
caacagacttcccatttcttaaggg

SEQ ID NO: 1079132 - DNA, 25 bp, Homo sapien
gtggtatgcccaaggcccttgctgc

SEQ ID NO: 1079133 - DNA, 25 bp, Homo sapien
aggtggtatgcccaaggcccttgct

SEQ ID NO: 1079134 - DNA, 25 bp, Homo sapien
gggcaggtggtatgcccaaggccct

SEQ ID NO: 1079135 - DNA, 25 bp, Homo sapien
catccccctttatgaggttatagga

SEQ ID NO: 1079136 - DNA, 25 bp, Homo sapien
ttttgcccaggacaaacactcccac

SEQ ID NO: 1079137 - DNA, 25 bp, Homo sapien
tggttttgcccaggacaaacactcc

SEQ ID NO: 1079138 - DNA, 25 bp, Homo sapien
ttagaggatggttttgcccaggaca

SEQ ID NO: 1079139 - DNA, 25 bp, Homo sapien
agaggatggttttgcccaggacaaa

SEQ ID NO: 1079140 - DNA, 25 bp, Homo sapien
tatggtgatagtcgggctgtagcca

SEQ ID NO: 1079141 - DNA, 25 bp, Homo sapien
ctatgcagatcggatagggccttgg

SEQ ID NO: 1079142 - DNA, 25 bp, Homo sapien
gactgagcactctctatggtgatag

SEQ ID NO: 1079143 - DNA, 25 bp, Homo sapien
tgtttggcatgctctatgcagatcg

SEQ ID NO: 1079144 - DNA, 25 bp, Homo sapien
actgtttcaaaaaggctaccctgcg

SEQ ID NO: 1079145 - DNA, 25 bp, Homo sapien
ttcaaaaaggctaccctgcggcact

SEQ ID NO: 1079146 - DNA, 25 bp, Homo sapien
gagtccacgcatgatgattttaggc

SEQ ID NO: 1079147 - DNA, 25 bp, Homo sapien
atggtctgtggaagcagttggtact

SEQ ID NO: 1079148 - DNA, 25 bp, Homo sapien
cagcactggattgggtattgggagg

SEQ ID NO: 1079149 - DNA, 25 bp, Homo sapien
tgggtattgggaggcatgctcaggg

SEQ ID NO: 1079150 - DNA, 25 bp, Homo sapien
caaaggtcatgtcctcgtatcaccg

SEQ ID NO: 1079151 - DNA, 25 bp, Homo sapien
tgcagctgctatgttacaaaggtca

SEQ ID NO: 1079152 - DNA, 25 bp, Homo sapien
aaagaaactgagggattgaacagct

SEQ ID NO: 1079153 - DNA, 25 bp, Homo sapien
tgatagcgtgtaccagagtccaggg

SEQ ID NO: 1079154 - DNA, 25 bp, Homo sapien
gaacagctgatagcgtgtaccagag

SEQ ID NO: 1079155 - DNA, 25 bp, Homo sapien
gggattgaacagctgatagcgtgta

SEQ ID NO: 1079156 - DNA, 25 bp, Homo sapien
gggatggatcttggcagtatgaaaa

SEQ ID NO: 1079157 - DNA, 25 bp, Homo sapien
catgacacaggccatatgccaagag

SEQ ID NO: 1079158 - DNA, 25 bp, Homo sapien
ttgtcgatattccaccaacaagtgg

SEQ ID NO: 1079159 - DNA, 25 bp, Homo sapien
acaacagctctttccgcatcatgac

SEQ ID NO: 1079160 - DNA, 25 bp, Homo sapien
tctgctgttgacctcgtgttctcct

SEQ ID NO: 1079161 - DNA, 25 bp, Homo sapien
tcatcagatctctctgctgttgacc

SEQ ID NO: 1079162 - DNA, 25 bp, Homo sapien
tgttctcctagagagctctcctcag

SEQ ID NO: 1079163 - DNA, 25 bp, Homo sapien
gcgatcactgctccgtctcatcaga

SEQ ID NO: 1079164 - DNA, 25 bp, Homo sapien
ggttacttcagtgccggtgcagaca

SEQ ID NO: 1079165 - DNA, 25 bp, Homo sapien
tcacaatggccgacccttgaaggct

SEQ ID NO: 1079166 - DNA, 25 bp, Homo sapien
cagcttagtgtactcctcagtggcc

SEQ ID NO: 1079167 - DNA, 25 bp, Homo sapien
tctttctaagcatcccacgctgggt

SEQ ID NO: 1079168 - DNA, 25 bp, Homo sapien
ggtttgcacaatcccagagatggtc

SEQ ID NO: 1079169 - DNA, 25 bp, Homo sapien
cacttgtccaacctggtccttggga

SEQ ID NO: 1079170 - DNA, 25 bp, Homo sapien
tccttgggaagataaccctctactc

SEQ ID NO: 1079171 - DNA, 25 bp, Homo sapien
agagatggtcagtccgtgctccaca

SEQ ID NO: 1079172 - DNA, 25 bp, Homo sapien
agggacacatgcagagagtttctgg

SEQ ID NO: 1079173 - DNA, 25 bp, Homo sapien
accatatggctccatgagggacaca

SEQ ID NO: 1079174 - DNA, 25 bp, Homo sapien
gacacatgcagagagtttctggctt

SEQ ID NO: 1079175 - DNA, 25 bp, Homo sapien
ttgaaaaacagagactagagaccat

SEQ ID NO: 1079176 - DNA, 25 bp, Homo sapien
tgacatgcagagaccttccctcctg

SEQ ID NO: 1079177 - DNA, 25 bp, Homo sapien
tgcaccactgtccaatcagtcatca

SEQ ID NO: 1079178 - DNA, 25 bp, Homo sapien
tcaatactgcccgtctcaggcagtg

SEQ ID NO: 1079179 - DNA, 25 bp, Homo sapien
gcccgtctcaggcagtggcatcttc

SEQ ID NO: 1079180 - DNA, 25 bp, Homo sapien
tccccccgcaagccgctagggccgc

SEQ ID NO: 1079181 - DNA, 25 bp, Homo sapien
cgcaagccgctagggccgctgctcc

SEQ ID NO: 1079182 - DNA, 25 bp, Homo sapien
caccgccacccgagctggagccgga

SEQ ID NO: 1079183 - DNA, 25 bp, Homo sapien
accgccacccgagctggagccggag

SEQ ID NO: 1079184 - DNA, 25 bp, Homo sapien
gcctatccaggggccgtcggtccgc

SEQ ID NO: 1079185 - DNA, 25 bp, Homo sapien
ctatccaggggccgtcggtccgcat

SEQ ID NO: 1079186 - DNA, 25 bp, Homo sapien
cctatccaggggccgtcggtccgca

SEQ ID NO: 1079187 - DNA, 25 bp, Homo sapien
cgcctatccaggggccgtcggtccg

SEQ ID NO: 1079188 - DNA, 25 bp, Homo sapien
cctccagggcgttgcacccggttgg

SEQ ID NO: 1079189 - DNA, 25 bp, Homo sapien
agggcctccagggcgttgcacccgg

SEQ ID NO: 1079190 - DNA, 25 bp, Homo sapien
gcctccagggcgttgcacccggttg

SEQ ID NO: 1079191 - DNA, 25 bp, Homo sapien
ctccagggcgttgcacccggttggg

SEQ ID NO: 1079192 - DNA, 25 bp, Homo sapien
aacttaaaggcccatttgtctagag

SEQ ID NO: 1079193 - DNA, 25 bp, Homo sapien
caagtgaggtttttggctgcaccat

SEQ ID NO: 1079194 - DNA, 25 bp, Homo sapien
catttgtctagagatgcccgcaggg

SEQ ID NO: 1079195 - DNA, 25 bp, Homo sapien
tattcaagtgaggtttttggctgca

SEQ ID NO: 1079196 - DNA, 25 bp, Homo sapien
gcaccagaacccgcagccctctctg

SEQ ID NO: 1079197 - DNA, 25 bp, Homo sapien
ctgcaccagaacccgcagccctctc

SEQ ID NO: 1079198 - DNA, 25 bp, Homo sapien
tgcaccagaacccgcagccctctct

SEQ ID NO: 1079199 - DNA, 25 bp, Homo sapien
cggtcactcttgctggatactcagc

SEQ ID NO: 1079200 - DNA, 25 bp, Homo sapien
ttgctggatactcagcaccaagggc

SEQ ID NO: 1079201 - DNA, 25 bp, Homo sapien
tttgcttcttcaccccggtcactct

SEQ ID NO: 1079202 - DNA, 25 bp, Homo sapien
gtctttgcttcttcaccccggtcac

SEQ ID NO: 1079203 - DNA, 25 bp, Homo sapien
cagccagttggccagaatccgtgag

SEQ ID NO: 1079204 - DNA, 25 bp, Homo sapien
gactaactctggaggcaaatgacca

SEQ ID NO: 1079205 - DNA, 25 bp, Homo sapien
cagaggtatcttcctgcggctgtaa

SEQ ID NO: 1079206 - DNA, 25 bp, Homo sapien
aaagggtcagcaggagactaactct

SEQ ID NO: 1079207 - DNA, 25 bp, Homo sapien
cgaggttgagcatcttgtgaatcca

SEQ ID NO: 1079208 - DNA, 25 bp, Homo sapien
actgcggttgcgaggttgagcatct

SEQ ID NO: 1079209 - DNA, 25 bp, Homo sapien
ctgctagcctgactgcggttgcgag

SEQ ID NO: 1079210 - DNA, 25 bp, Homo sapien
gaatccatgcaacggtgttcacagc

SEQ ID NO: 1079211 - DNA, 25 bp, Homo sapien
taggcccccagcatgagcatatctc

SEQ ID NO: 1079212 - DNA, 25 bp, Homo sapien
cgggtataacaatataatagtcaca

SEQ ID NO: 1079213 - DNA, 25 bp, Homo sapien
gcaggcttcatagggacataggccc

SEQ ID NO: 1079214 - DNA, 25 bp, Homo sapien
atcatcgggtataacaatataatag

SEQ ID NO: 1079215 - DNA, 25 bp, Homo sapien
ggggatgtatggaagggcccacaag

SEQ ID NO: 1079216 - DNA, 25 bp, Homo sapien
caggggatgtatggaagggcccaca

SEQ ID NO: 1079217 - DNA, 25 bp, Homo sapien
tggggggcaccaggggatgtatgga

SEQ ID NO: 1079218 - DNA, 25 bp, Homo sapien
gcaccaggggatgtatggaagggcc

SEQ ID NO: 1079219 - DNA, 25 bp, Homo sapien
ccagccacagcccaggacaatcaac

SEQ ID NO: 1079220 - DNA, 25 bp, Homo sapien
cacagccagccacagcccaggacaa

SEQ ID NO: 1079221 - DNA, 25 bp, Homo sapien
cagccagccacagcccaggacaatc

SEQ ID NO: 1079222 - DNA, 25 bp, Homo sapien
gccagccacagcccaggacaatcaa

SEQ ID NO: 1079223 - DNA, 25 bp, Homo sapien
tccctggggctggctcaggggccat

SEQ ID NO: 1079224 - DNA, 25 bp, Homo sapien
tcctccctggggctggctcaggggc

SEQ ID NO: 1079225 - DNA, 25 bp, Homo sapien
cgtcctccctggggctggctcaggg

SEQ ID NO: 1079226 - DNA, 25 bp, Homo sapien
ctccctggggctggctcaggggcca

SEQ ID NO: 1079227 - DNA, 25 bp, Homo sapien
ccagtgcaggcacaaggggcaccat

SEQ ID NO: 1079228 - DNA, 25 bp, Homo sapien
tgtcaccatgggcgcctgccaccaa

SEQ ID NO: 1079229 - DNA, 25 bp, Homo sapien
ccaaaccaagcatcaccagtgcagg

SEQ ID NO: 1079230 - DNA, 25 bp, Homo sapien
tgccaccaaaccaagcatcaccagt

SEQ ID NO: 1079231 - DNA, 25 bp, Homo sapien
gacggcaacattctcgagccaccaa

SEQ ID NO: 1079232 - DNA, 25 bp, Homo sapien
acagctcccggggtatggacggcaa

SEQ ID NO: 1079233 - DNA, 25 bp, Homo sapien
tggcctgacaccccacgagagcgtg

SEQ ID NO: 1079234 - DNA, 25 bp, Homo sapien
ctgccagttacccactgccacctgg

SEQ ID NO: 1079235 - DNA, 25 bp, Homo sapien
actgctttacgtggtgggccttcca

SEQ ID NO: 1079236 - DNA, 25 bp, Homo sapien
catgagggaagctgtcactcgtacc

SEQ ID NO: 1079237 - DNA, 25 bp, Homo sapien
agctgcaggtaccaacagagaagga

SEQ ID NO: 1079238 - DNA, 25 bp, Homo sapien
tttaaatactgatgggagccagcag

SEQ ID NO: 1079239 - DNA, 25 bp, Homo sapien
ctggtcctcagggactttaatgaag

SEQ ID NO: 1079240 - DNA, 25 bp, Homo sapien
tctcctgtagcttggcacacgaagg

SEQ ID NO: 1079241 - DNA, 25 bp, Homo sapien
gatgcgcggcttgggttctcctgta

SEQ ID NO: 1079242 - DNA, 25 bp, Homo sapien
tcgaagcgctgggagctgactttct

SEQ ID NO: 1079243 - DNA, 25 bp, Homo sapien
cacccaggctgttagtagctgtaca

SEQ ID NO: 1079244 - DNA, 25 bp, Homo sapien
tagctgtacactcatagatggcttc

SEQ ID NO: 1079245 - DNA, 25 bp, Homo sapien
tgagagcttggcactagtgttgatc

SEQ ID NO: 1079246 - DNA, 25 bp, Homo sapien
ccgcaatggctggatccgaagcact

SEQ ID NO: 1079247 - DNA, 25 bp, Homo sapien
cacctacggccaggctccacatgga

SEQ ID NO: 1079248 - DNA, 25 bp, Homo sapien
accatcctttcacccagttcctgca

SEQ ID NO: 1079249 - DNA, 25 bp, Homo sapien
ttcacccagttcctgcaggcaccca

SEQ ID NO: 1079250 - DNA, 25 bp, Homo sapien
ccagtccaagtccaaccatcctttc

SEQ ID NO: 1079251 - DNA, 25 bp, Homo sapien
gcaggcacccagctttcttgatcct

SEQ ID NO: 1079252 - DNA, 25 bp, Homo sapien
agggcacggctgtgggggatttggg

SEQ ID NO: 1079253 - DNA, 25 bp, Homo sapien
gggggcactcccacgggctgtggtg

SEQ ID NO: 1079254 - DNA, 25 bp, Homo sapien
tgggggggcactcccacgggctgtg

SEQ ID NO: 1079255 - DNA, 25 bp, Homo sapien
caaagggcacggctgtgggggattt

SEQ ID NO: 1079256 - DNA, 25 bp, Homo sapien
gagaggtagaagctggcttgggttc

SEQ ID NO: 1079257 - DNA, 25 bp, Homo sapien
aaatcaggtagttgacagccccagc

SEQ ID NO: 1079258 - DNA, 25 bp, Homo sapien
tacatcctctgtgctgcaaatcagg

SEQ ID NO: 1079259 - DNA, 25 bp, Homo sapien
gggccacttctacatcctctgtgct

SEQ ID NO: 1079260 - DNA, 25 bp, Homo sapien
gtcatgaggctagggaacacgtaca

SEQ ID NO: 1079261 - DNA, 25 bp, Homo sapien
taaacaggagcacccattcggaagg

SEQ ID NO: 1079262 - DNA, 25 bp, Homo sapien
catttaaaccgccatcctggtgagc

SEQ ID NO: 1079263 - DNA, 25 bp, Homo sapien
caagcaaaccagtaggagggagcac

SEQ ID NO: 1079264 - DNA, 25 bp, Homo sapien
cagtggcgccatctcatatcactgc

SEQ ID NO: 1079265 - DNA, 25 bp, Homo sapien
tcgcttggtcgcctaggctgaagtg

SEQ ID NO: 1079266 - DNA, 25 bp, Homo sapien
tctcgcttggtcgcctaggctgaag

SEQ ID NO: 1079267 - DNA, 25 bp, Homo sapien
cccaccttggcctcccaaagcgctg

SEQ ID NO: 1079268 - DNA, 25 bp, Homo sapien
tatgccaaaacacgtgcgcctggag

SEQ ID NO: 1079269 - DNA, 25 bp, Homo sapien
tccaaaagtcgaaggctgccagatc

SEQ ID NO: 1079270 - DNA, 25 bp, Homo sapien
catgaaggaacctcgtaggtggcag

SEQ ID NO: 1079271 - DNA, 25 bp, Homo sapien
gacacatgcagggacgagacacatg

SEQ ID NO: 1079272 - DNA, 25 bp, Homo sapien
ccatgggcagaagacgatgacaagc

SEQ ID NO: 1079273 - DNA, 25 bp, Homo sapien
ccccatgggcagaagacgatgacaa

SEQ ID NO: 1079274 - DNA, 25 bp, Homo sapien
tggagaggtttggttgccccatggg

SEQ ID NO: 1079275 - DNA, 25 bp, Homo sapien
gagaggtttggttgccccatgggca

SEQ ID NO: 1079276 - DNA, 25 bp, Homo sapien
ccagctcatggggaagacgtggcca

SEQ ID NO: 1079277 - DNA, 25 bp, Homo sapien
ctcatggggaagacgtggccatggc

SEQ ID NO: 1079278 - DNA, 25 bp, Homo sapien
cccagctcatggggaagacgtggcc

SEQ ID NO: 1079279 - DNA, 25 bp, Homo sapien
ctgcccagctcatggggaagacgtg

SEQ ID NO: 1079280 - DNA, 25 bp, Homo sapien
tgaaccaagaaatctcagggtctgg

SEQ ID NO: 1079281 - DNA, 25 bp, Homo sapien
cttgatgcggccgttgctcgtggca

SEQ ID NO: 1079282 - DNA, 25 bp, Homo sapien
tccgcctgcggcacatagcatggtg

SEQ ID NO: 1079283 - DNA, 25 bp, Homo sapien
ccccatgtcgatggaagggaaccca

SEQ ID NO: 1079284 - DNA, 25 bp, Homo sapien
gccttggtcggattcctcactgctc

SEQ ID NO: 1079285 - DNA, 25 bp, Homo sapien
gagttggtcgccacacactcgtact

SEQ ID NO: 1079286 - DNA, 25 bp, Homo sapien
taacgtgtgcctgccgagttggtcg

SEQ ID NO: 1079287 - DNA, 25 bp, Homo sapien
ctcgcacatacaggttcgcaggggc

SEQ ID NO: 1079288 - DNA, 25 bp, Homo sapien
agagactgggcccatggcagtccct

SEQ ID NO: 1079289 - DNA, 25 bp, Homo sapien
atggcagtcccttgcgtgtctgcac

SEQ ID NO: 1079290 - DNA, 25 bp, Homo sapien
ccttgcgtgtctgcaccaagggctc

SEQ ID NO: 1079291 - DNA, 25 bp, Homo sapien
agaagagactgggcccatggcagtc

SEQ ID NO: 1079292 - DNA, 25 bp, Homo sapien
agtggcagacgccaggaacttgccc

SEQ ID NO: 1079293 - DNA, 25 bp, Homo sapien
aatgctcccaagagtggctgcttcc

SEQ ID NO: 1079294 - DNA, 25 bp, Homo sapien
ggcctgcaaggaaggaaggcgaagt

SEQ ID NO: 1079295 - DNA, 25 bp, Homo sapien
gaaggaaggcgaagtagtggcagac

SEQ ID NO: 1079296 - DNA, 25 bp, Homo sapien
accaagaagtcggattggatggctc

SEQ ID NO: 1079297 - DNA, 25 bp, Homo sapien
ctccgggcccatgcggcaagaccta

SEQ ID NO: 1079298 - DNA, 25 bp, Homo sapien
agtcggattggatggctccaaattc

SEQ ID NO: 1079299 - DNA, 25 bp, Homo sapien
caagaagtcggattggatggctcca

SEQ ID NO: 1079300 - DNA, 25 bp, Homo sapien
cacacagataagtgtgcccgtgtgt

SEQ ID NO: 1079301 - DNA, 25 bp, Homo sapien
acagataagtgtgcccgtgtgtgca

SEQ ID NO: 1079302 - DNA, 25 bp, Homo sapien
cacagataagtgtgcccgtgtgtgc

SEQ ID NO: 1079303 - DNA, 25 bp, Homo sapien
ttacacacagataagtgtgcccgtg

SEQ ID NO: 1079304 - DNA, 25 bp, Homo sapien
aaggaaagccaggccaggtatgcat

SEQ ID NO: 1079305 - DNA, 25 bp, Homo sapien
aaagccaggccaggtatgcatgcat

SEQ ID NO: 1079306 - DNA, 25 bp, Homo sapien
ctgaaggaaagccaggccaggtatg

SEQ ID NO: 1079307 - DNA, 25 bp, Homo sapien
ggaaagccaggccaggtatgcatgc

SEQ ID NO: 1079308 - DNA, 25 bp, Homo sapien
ctggcctggtccgttcctgaggcct

SEQ ID NO: 1079309 - DNA, 25 bp, Homo sapien
ctggtccgttcctgaggccttacta

SEQ ID NO: 1079310 - DNA, 25 bp, Homo sapien
ggcctggtccgttcctgaggcctta

SEQ ID NO: 1079311 - DNA, 25 bp, Homo sapien
cctggtccgttcctgaggccttact

SEQ ID NO: 1079312 - DNA, 25 bp, Homo sapien
cacccgaggcaacataaccacaggg

SEQ ID NO: 1079313 - DNA, 25 bp, Homo sapien
gtgctcacccgaggcaacataacca

SEQ ID NO: 1079314 - DNA, 25 bp, Homo sapien
aggtgctcacccgaggcaacataac

SEQ ID NO: 1079315 - DNA, 25 bp, Homo sapien
cagctgaacacaagggttcctccag

SEQ ID NO: 1079316 - DNA, 25 bp, Homo sapien
atctgtacaagaaggctaggtgagg

SEQ ID NO: 1079317 - DNA, 25 bp, Homo sapien
agcacactgtccactcgctcccagc

SEQ ID NO: 1079318 - DNA, 25 bp, Homo sapien
cagctttagtcacccctaggctgtg

SEQ ID NO: 1079319 - DNA, 25 bp, Homo sapien
catgtataccagacccagtgtgttc

SEQ ID NO: 1079320 - DNA, 25 bp, Homo sapien
ttggagtggactcgccagccccaat

SEQ ID NO: 1079321 - DNA, 25 bp, Homo sapien
aggctgtgccgcttacaactccact

SEQ ID NO: 1079322 - DNA, 25 bp, Homo sapien
gctcctctgttggagtggactcgcc

SEQ ID NO: 1079323 - DNA, 25 bp, Homo sapien
gggccaaggctgtgccgcttacaac

SEQ ID NO: 1079324 - DNA, 25 bp, Homo sapien
agagtaaaaacaggccaaccttcat

SEQ ID NO: 1079325 - DNA, 25 bp, Homo sapien
ggcagagtgcgatgaagatgaggag

SEQ ID NO: 1079326 - DNA, 25 bp, Homo sapien
agtttgggttgatggcagagtgcga

SEQ ID NO: 1079327 - DNA, 25 bp, Homo sapien
tgatggcagagtgcgatgaagatga

SEQ ID NO: 1079328 - DNA, 25 bp, Homo sapien
taagatgcaattatcagcaccaaac

SEQ ID NO: 1079329 - DNA, 25 bp, Homo sapien
agcaccaaacaaattaccagcccgg

SEQ ID NO: 1079330 - DNA, 25 bp, Homo sapien
aatgccggcaaacccggcacacagt

SEQ ID NO: 1079331 - DNA, 25 bp, Homo sapien
gctgccgcagagcagtaattaaatg

SEQ ID NO: 1079332 - DNA, 25 bp, Homo sapien
gactatggagaaacagcctttggac

SEQ ID NO: 1079333 - DNA, 25 bp, Homo sapien
gctgcttgagaacaaagatgtcgac

SEQ ID NO: 1079334 - DNA, 25 bp, Homo sapien
catggcaacaaaggactctctgagc

SEQ ID NO: 1079335 - DNA, 25 bp, Homo sapien
tgttctagtgccaggagtctctacc

SEQ ID NO: 1079336 - DNA, 25 bp, Homo sapien
tggcacaaatctgatgccactccct

SEQ ID NO: 1079337 - DNA, 25 bp, Homo sapien
ctggcacaaatctgatgccactccc

SEQ ID NO: 1079338 - DNA, 25 bp, Homo sapien
gctggcacaaatctgatgccactcc

SEQ ID NO: 1079339 - DNA, 25 bp, Homo sapien
gtcactgcctccacctccaggccat

SEQ ID NO: 1079340 - DNA, 25 bp, Homo sapien
ctgccgtggagtcactgcctccacc

SEQ ID NO: 1079341 - DNA, 25 bp, Homo sapien
actgcctccacctccaggccatggc

SEQ ID NO: 1079342 - DNA, 25 bp, Homo sapien
tgccgtggagtcactgcctccacct

SEQ ID NO: 1079343 - DNA, 25 bp, Homo sapien
tgtagttggcagagcgtacgacatt

SEQ ID NO: 1079344 - DNA, 25 bp, Homo sapien
cttcacgtagggcatgggtgcaccc

SEQ ID NO: 1079345 - DNA, 25 bp, Homo sapien
atcatgcccagcgaggagatggcca

SEQ ID NO: 1079346 - DNA, 25 bp, Homo sapien
agctccaggacgttgcggccaactg

SEQ ID NO: 1079347 - DNA, 25 bp, Homo sapien
taataagagcacctatctcccaggg

SEQ ID NO: 1079348 - DNA, 25 bp, Homo sapien
gcctggccagaatcggttacatata

SEQ ID NO: 1079349 - DNA, 25 bp, Homo sapien
tcatggctcactgcgtcactgtagc

SEQ ID NO: 1079350 - DNA, 25 bp, Homo sapien
gatatggattcagaccacactgggt

SEQ ID NO: 1079351 - DNA, 25 bp, Homo sapien
gagacaaagtggaaggctcaaagct

SEQ ID NO: 1079352 - DNA, 25 bp, Homo sapien
ctggagacaaagtggaaggctcaaa

SEQ ID NO: 1079353 - DNA, 25 bp, Homo sapien
aaggctcaaagctgcccgaggtcaa

SEQ ID NO: 1079354 - DNA, 25 bp, Homo sapien
gaaggctcaaagctgcccgaggtca

SEQ ID NO: 1079355 - DNA, 25 bp, Homo sapien
ccatagtaggttacaggctccgagt

SEQ ID NO: 1079356 - DNA, 25 bp, Homo sapien
cacgcgcaggctgtaggtgatgcca

SEQ ID NO: 1079357 - DNA, 25 bp, Homo sapien
gagtatagtagacgcggtatccccg

SEQ ID NO: 1079358 - DNA, 25 bp, Homo sapien
tctgtcaccacaagatcaatcggag

SEQ ID NO: 1079359 - DNA, 25 bp, Homo sapien
ctggtgtccgactccacctcggcct

SEQ ID NO: 1079360 - DNA, 25 bp, Homo sapien
gcccagtacaccagttcatacatga

SEQ ID NO: 1079361 - DNA, 25 bp, Homo sapien
acctcggcctggaagtccgcgggct

SEQ ID NO: 1079362 - DNA, 25 bp, Homo sapien
gcagcagccacgagagctggatcct

SEQ ID NO: 1079363 - DNA, 25 bp, Homo sapien
ccccatatccgagcgtgcagccagc

SEQ ID NO: 1079364 - DNA, 25 bp, Homo sapien
cttcaggtcctctagtgtgtaggag

SEQ ID NO: 1079365 - DNA, 25 bp, Homo sapien
cagctggaagcggtagagtgtgtca

SEQ ID NO: 1079366 - DNA, 25 bp, Homo sapien
aggttgggtcgaaggtcaccttgtg

SEQ ID NO: 1079367 - DNA, 25 bp, Homo sapien
taggctgtctcgcacatatactgtc

SEQ ID NO: 1079368 - DNA, 25 bp, Homo sapien
ggagtatcagtgtctctcacacaga

SEQ ID NO: 1079369 - DNA, 25 bp, Homo sapien
tggtgtctcacagtgtctctcacag

SEQ ID NO: 1079370 - DNA, 25 bp, Homo sapien
gtcagtctcagtgcctcacacacgt

SEQ ID NO: 1079371 - DNA, 25 bp, Homo sapien
taggccacggagtactgggtgataa

SEQ ID NO: 1079372 - DNA, 25 bp, Homo sapien
gataacgccgttgcggctgtcggca

SEQ ID NO: 1079373 - DNA, 25 bp, Homo sapien
ctcatcggtgcgcaccagcaccggg

SEQ ID NO: 1079374 - DNA, 25 bp, Homo sapien
cggtactccgtccacttctccaggc

SEQ ID NO: 1079375 - DNA, 25 bp, Homo sapien
tcatgccaatgtccagccaacgtgg

SEQ ID NO: 1079376 - DNA, 25 bp, Homo sapien
gatcatctgtccctggtgaggcaca

SEQ ID NO: 1079377 - DNA, 25 bp, Homo sapien
gaaagatgagttgacctgggcctgt

SEQ ID NO: 1079378 - DNA, 25 bp, Homo sapien
aagtcaggcctggaggtatcaaccc

SEQ ID NO: 1079379 - DNA, 25 bp, Homo sapien
cagccgcacgtaggtgacctggtag

SEQ ID NO: 1079380 - DNA, 25 bp, Homo sapien
tgggcctcggctagcatgacgtctt

SEQ ID NO: 1079381 - DNA, 25 bp, Homo sapien
gccgcggatctggccatgctgcttg

SEQ ID NO: 1079382 - DNA, 25 bp, Homo sapien
ctagcatgacgtcttggatgatggg

SEQ ID NO: 1079383 - DNA, 25 bp, Homo sapien
gagacaggatggtgaaggactctga

SEQ ID NO: 1079384 - DNA, 25 bp, Homo sapien
agacaggatggtgaaggactctgac

SEQ ID NO: 1079385 - DNA, 25 bp, Homo sapien
gacaggatggtgaaggactctgacc

SEQ ID NO: 1079386 - DNA, 25 bp, Homo sapien
atagtcctcggactcctctggccgc

SEQ ID NO: 1079387 - DNA, 25 bp, Homo sapien
tagtcctcggactcctctggccgcc

SEQ ID NO: 1079388 - DNA, 25 bp, Homo sapien
gcacctgttgtagtgacaattttgg

SEQ ID NO: 1079389 - DNA, 25 bp, Homo sapien
cttggtggtataggcagcaacagta

SEQ ID NO: 1079390 - DNA, 25 bp, Homo sapien
acaattttgggcttgctgcgggcac

SEQ ID NO: 1079391 - DNA, 25 bp, Homo sapien
caacagtaacggagtaggtggtctc

SEQ ID NO: 1079392 - DNA, 25 bp, Homo sapien
tgatgtctcggaacaccacggtgta

SEQ ID NO: 1079393 - DNA, 25 bp, Homo sapien
tgtagctgatgatgcgcccgttcct

SEQ ID NO: 1079394 - DNA, 25 bp, Homo sapien
caagccggaagatgtaggtggtccc

SEQ ID NO: 1079395 - DNA, 25 bp, Homo sapien
gaaatctatggtgttgggccgcgcc

SEQ ID NO: 1079396 - DNA, 25 bp, Homo sapien
tcgccagaggtcagtggctcaagga

SEQ ID NO: 1079397 - DNA, 25 bp, Homo sapien
ctggtggatcacagtcgccagaggt

SEQ ID NO: 1079398 - DNA, 25 bp, Homo sapien
gatcacagtcgccagaggtcagtgg

SEQ ID NO: 1079399 - DNA, 25 bp, Homo sapien
agccacactcgggaagggatgccat

SEQ ID NO: 1079400 - DNA, 25 bp, Homo sapien
gggcacagctgacttataggagtcg

SEQ ID NO: 1079401 - DNA, 25 bp, Homo sapien
gagcagcacagacgtcttcattgca

SEQ ID NO: 1079402 - DNA, 25 bp, Homo sapien
gcagccgccacccggaagttcttgg

SEQ ID NO: 1079403 - DNA, 25 bp, Homo sapien
agtcgggaacctcccagctgagcag

SEQ ID NO: 1079404 - DNA, 25 bp, Homo sapien
aacgagtactctgtgttgggctgca

SEQ ID NO: 1079405 - DNA, 25 bp, Homo sapien
atcagcttccgcatcgagtgcccgt

SEQ ID NO: 1079406 - DNA, 25 bp, Homo sapien
gaagcggccgtcctctatgtaggca

SEQ ID NO: 1079407 - DNA, 25 bp, Homo sapien
cggttcatcagcacaaacgagtact

SEQ ID NO: 1079408 - DNA, 25 bp, Homo sapien
accttggcgtcagcatgctcccgcc

SEQ ID NO: 1079409 - DNA, 25 bp, Homo sapien
cacacggtcaatgggcaccacaaca

SEQ ID NO: 1079410 - DNA, 25 bp, Homo sapien
ggtcaatgggcaccacaacaatgta

SEQ ID NO: 1079411 - DNA, 25 bp, Homo sapien
gggcaccacaacaatgtagaaccac

SEQ ID NO: 1079412 - DNA, 25 bp, Homo sapien
caaagcactggtagctcaagtccgg

SEQ ID NO: 1079413 - DNA, 25 bp, Homo sapien
caaggtaaaggtctccgggagcaca

SEQ ID NO: 1079414 - DNA, 25 bp, Homo sapien
gggagcacatccagttgagcagcca

SEQ ID NO: 1079415 - DNA, 25 bp, Homo sapien
tatggcttcagacgttctgcctgcc

SEQ ID NO: 1079416 - DNA, 25 bp, Homo sapien
ggtgtcacctggaccacgatctcat

SEQ ID NO: 1079417 - DNA, 25 bp, Homo sapien
acgggacccgtcacccacagcatct

SEQ ID NO: 1079418 - DNA, 25 bp, Homo sapien
gaacaagaggatggcgatgacaatg

SEQ ID NO: 1079419 - DNA, 25 bp, Homo sapien
cttttgaacaagaggatggcgatga

SEQ ID NO: 1079420 - DNA, 25 bp, Homo sapien
aggatgcaaggctgcacgctctcca

SEQ ID NO: 1079421 - DNA, 25 bp, Homo sapien
gcaggcctgcagacacaggtaggca

SEQ ID NO: 1079422 - DNA, 25 bp, Homo sapien
caggatgcaaggctgcacgctctcc

SEQ ID NO: 1079423 - DNA, 25 bp, Homo sapien
ggcctgcagacacaggtaggcacac

SEQ ID NO: 1079424 - DNA, 25 bp, Homo sapien
cacagggcagggagggggtagggag

SEQ ID NO: 1079425 - DNA, 25 bp, Homo sapien
cttgacatgagagaacacagggcag

SEQ ID NO: 1079426 - DNA, 25 bp, Homo sapien
tgacatgagagaacacagggcaggg

SEQ ID NO: 1079427 - DNA, 25 bp, Homo sapien
acatgagagaacacagggcagggag

SEQ ID NO: 1079428 - DNA, 25 bp, Homo sapien
tcccaggatctctgagcgcggagga

SEQ ID NO: 1079429 - DNA, 25 bp, Homo sapien
tcttcccaggatctctgagcgcgga

SEQ ID NO: 1079430 - DNA, 25 bp, Homo sapien
ctcttcccaggatctctgagcgcgg

SEQ ID NO: 1079431 - DNA, 25 bp, Homo sapien
gcgcggaggagccagggccagaaca

SEQ ID NO: 1079432 - DNA, 25 bp, Homo sapien
gaggtccaggctgagacagtgacac

SEQ ID NO: 1079433 - DNA, 25 bp, Homo sapien
aggtccaggctgagacagtgacaca

SEQ ID NO: 1079434 - DNA, 25 bp, Homo sapien
ggtccaggctgagacagtgacacat

SEQ ID NO: 1079435 - DNA, 25 bp, Homo sapien
agagacagaagggaggctggtgaga

SEQ ID NO: 1079436 - DNA, 25 bp, Homo sapien
ctagagagacagaagggaggctggt

SEQ ID NO: 1079437 - DNA, 25 bp, Homo sapien
agacagaagggaggctggtgagaac

SEQ ID NO: 1079438 - DNA, 25 bp, Homo sapien
agagagacagaagggaggctggtga

SEQ ID NO: 1079439 - DNA, 25 bp, Homo sapien
gtagttgagcctccgcatctccaca

SEQ ID NO: 1079440 - DNA, 25 bp, Homo sapien
ccgatcgactgctcatccttagagg

SEQ ID NO: 1079441 - DNA, 25 bp, Homo sapien
caaggagtccttcagtccgatcgac

SEQ ID NO: 1079442 - DNA, 25 bp, Homo sapien
gggtctggtagttgagcctccgcat

SEQ ID NO: 1079443 - DNA, 25 bp, Homo sapien
gctttgccacctaagagggtcctgg

SEQ ID NO: 1079444 - DNA, 25 bp, Homo sapien
tctttcatgtggaggcgtcagagcg

SEQ ID NO: 1079445 - DNA, 25 bp, Homo sapien
agcaggaacaagtgcatgcggccca

SEQ ID NO: 1079446 - DNA, 25 bp, Homo sapien
ggtgaggcatctcccactgctaaca

SEQ ID NO: 1079447 - DNA, 25 bp, Homo sapien
gcctcatgttgggtgtcccagctga

SEQ ID NO: 1079448 - DNA, 25 bp, Homo sapien
tggtatccataacaggccagagcgt

SEQ ID NO: 1079449 - DNA, 25 bp, Homo sapien
ggtgcctttacagtgcaaaagcaac

SEQ ID NO: 1079450 - DNA, 25 bp, Homo sapien
acagcaaggctcagagctggctcat

SEQ ID NO: 1079451 - DNA, 25 bp, Homo sapien
tctcaggctttgactaccacatgct

SEQ ID NO: 1079452 - DNA, 25 bp, Homo sapien
agccaacggtcctcccactgggtgt

SEQ ID NO: 1079453 - DNA, 25 bp, Homo sapien
tgggagagcccatctattctcaggc

SEQ ID NO: 1079454 - DNA, 25 bp, Homo sapien
tccatctttccttaatgctgcacca

SEQ ID NO: 1079455 - DNA, 25 bp, Homo sapien
aggtattcgggcaactggggacact

SEQ ID NO: 1079456 - DNA, 25 bp, Homo sapien
gaggtattcgggcaactggggacac

SEQ ID NO: 1079457 - DNA, 25 bp, Homo sapien
ttgaggtattcgggcaactggggac

SEQ ID NO: 1079458 - DNA, 25 bp, Homo sapien
ggtattcgggcaactggggacactg

SEQ ID NO: 1079459 - DNA, 25 bp, Homo sapien
gaggtagggcatacacaggcagcat

SEQ ID NO: 1079460 - DNA, 25 bp, Homo sapien
tgtgtgaccatggagcacttggaac

SEQ ID NO: 1079461 - DNA, 25 bp, Homo sapien
tgccatgagcatgtggagcctgttt

SEQ ID NO: 1079462 - DNA, 25 bp, Homo sapien
tcatcccgggcaccaagtgtgtaga

SEQ ID NO: 1079463 - DNA, 25 bp, Homo sapien
gggatgggtgggtggtctcgcatac

SEQ ID NO: 1079464 - DNA, 25 bp, Homo sapien
gctcgatgttgtccgccaggtcggt

SEQ ID NO: 1079465 - DNA, 25 bp, Homo sapien
gaacttgaggccatcgttggctttg

SEQ ID NO: 1079466 - DNA, 25 bp, Homo sapien
ttgaggcgctcgatgttgtccgcca

SEQ ID NO: 1079467 - DNA, 25 bp, Homo sapien
aactcacaggttaggctcagccaac

SEQ ID NO: 1079468 - DNA, 25 bp, Homo sapien
gcgcaaactcacaggttaggctcag

SEQ ID NO: 1079469 - DNA, 25 bp, Homo sapien
tgtccaccaaccatctactgaggcc

SEQ ID NO: 1079470 - DNA, 25 bp, Homo sapien
aaggcagaacgacaagcacaggctg

SEQ ID NO: 1079471 - DNA, 25 bp, Homo sapien
gcacgcctgtcggtactattcaaca

SEQ ID NO: 1079472 - DNA, 25 bp, Homo sapien
ggaccgcgtcactgcttccgtgaga

SEQ ID NO: 1079473 - DNA, 25 bp, Homo sapien
tgactgactgaacgttaaagacaac

SEQ ID NO: 1079474 - DNA, 25 bp, Homo sapien
gaagttctcagcatagcacgcaatg

SEQ ID NO: 1079475 - DNA, 25 bp, Homo sapien
tttgaattctcccacgtgaactgct

SEQ ID NO: 1079476 - DNA, 25 bp, Homo sapien
attcgcatagcggttcttgggcttg

SEQ ID NO: 1079477 - DNA, 25 bp, Homo sapien
tcgtaggcgatgacattcgcatagc

SEQ ID NO: 1079478 - DNA, 25 bp, Homo sapien
taaggatgactcgagagtggtcgta

SEQ ID NO: 1079479 - DNA, 25 bp, Homo sapien
tgcggtagccatcgatgtagttggc

SEQ ID NO: 1079480 - DNA, 25 bp, Homo sapien
tcatcatgaccacagtggccgtgcg

SEQ ID NO: 1079481 - DNA, 25 bp, Homo sapien
cagaaatcacccatggtctcgggca

SEQ ID NO: 1079482 - DNA, 25 bp, Homo sapien
tgtaggcattctgcttgcggtagcc

SEQ ID NO: 1079483 - DNA, 25 bp, Homo sapien
ctcctggcagggccctgcagcctca

SEQ ID NO: 1079484 - DNA, 25 bp, Homo sapien
tcctggcagggccctgcagcctcac

SEQ ID NO: 1079485 - DNA, 25 bp, Homo sapien
ccgcctcctggcagggccctgcagc

SEQ ID NO: 1079486 - DNA, 25 bp, Homo sapien
gcctcctggcagggccctgcagcct

SEQ ID NO: 1079487 - DNA, 25 bp, Homo sapien
gggatcacttgagcgacttcctcca

SEQ ID NO: 1079488 - DNA, 25 bp, Homo sapien
gaaagcggcacagaagaaggtgccc

SEQ ID NO: 1079489 - DNA, 25 bp, Homo sapien
gtgccctgtatcaccttgtggctgg

SEQ ID NO: 1079490 - DNA, 25 bp, Homo sapien
ggagatgtgttaatgccccaggaac

SEQ ID NO: 1079491 - DNA, 25 bp, Homo sapien
gtctcggtgccacgggctggccagt

SEQ ID NO: 1079492 - DNA, 25 bp, Homo sapien
tgcgaaggtgcgcacagtgtatgtg

SEQ ID NO: 1079493 - DNA, 25 bp, Homo sapien
tgaataaggccacaggtctcggtgc

SEQ ID NO: 1079494 - DNA, 25 bp, Homo sapien
tccactgtgtccaacagggtcacct

SEQ ID NO: 1079495 - DNA, 25 bp, Homo sapien
gggttgcaggccttgacccgtcgta

SEQ ID NO: 1079496 - DNA, 25 bp, Homo sapien
tgggtactcaggaactccatggtct

SEQ ID NO: 1079497 - DNA, 25 bp, Homo sapien
tgacccgtcgtaggaaggccaggat

SEQ ID NO: 1079498 - DNA, 25 bp, Homo sapien
tgaactgaaactgacgcagctcgcg

SEQ ID NO: 1079499 - DNA, 25 bp, Homo sapien
tgtgatcgcatgcaggtcacgtggc

SEQ ID NO: 1079500 - DNA, 25 bp, Homo sapien
ttgaactcgagctccatggcggtca

SEQ ID NO: 1079501 - DNA, 25 bp, Homo sapien
cctcatggatgaacacgtactggtc

SEQ ID NO: 1079502 - DNA, 25 bp, Homo sapien
aatcacgatgaagcagccggtgcgg

SEQ ID NO: 1079503 - DNA, 25 bp, Homo sapien
ggtcaattcgtagggcatgatgttc

SEQ ID NO: 1079504 - DNA, 25 bp, Homo sapien
cttgaacttgttgcagggcaggttg

SEQ ID NO: 1079505 - DNA, 25 bp, Homo sapien
cacgggtcaattcgtagggcatgat

SEQ ID NO: 1079506 - DNA, 25 bp, Homo sapien
cacacacgggtcaattcgtagggca

SEQ ID NO: 1079507 - DNA, 25 bp, Homo sapien
aggcccctgtgtagctatgtaggcc

SEQ ID NO: 1079508 - DNA, 25 bp, Homo sapien
cagaggcccctgtgtagctatgtag

SEQ ID NO: 1079509 - DNA, 25 bp, Homo sapien
gaggcccctgtgtagctatgtaggc

SEQ ID NO: 1079510 - DNA, 25 bp, Homo sapien
tcagcatgacgatgatggtggaatt

SEQ ID NO: 1079511 - DNA, 25 bp, Homo sapien
gattctgggacagatgcctcaggta

SEQ ID NO: 1079512 - DNA, 25 bp, Homo sapien
tcgggcccccataatcaggtgagaa

SEQ ID NO: 1079513 - DNA, 25 bp, Homo sapien
agacagtaacataggcggcagctcc

SEQ ID NO: 1079514 - DNA, 25 bp, Homo sapien
cctcaggtagtaataacgggcgcct

SEQ ID NO: 1079515 - DNA, 25 bp, Homo sapien
gttgtactcagccatcgggtcaaca

SEQ ID NO: 1079516 - DNA, 25 bp, Homo sapien
tgtactcagccatcgggtcaacaac

SEQ ID NO: 1079517 - DNA, 25 bp, Homo sapien
ctcagccatcgggtcaacaacaaag

SEQ ID NO: 1079518 - DNA, 25 bp, Homo sapien
gtactcagccatcgggtcaacaaca

SEQ ID NO: 1079519 - DNA, 25 bp, Homo sapien
gcacctgcccgatgaagtcaatgaa

SEQ ID NO: 1079520 - DNA, 25 bp, Homo sapien
caatgaatccctcgcctgtcttggg

SEQ ID NO: 1079521 - DNA, 25 bp, Homo sapien
ctggaactgccggattgtccttgac

SEQ ID NO: 1079522 - DNA, 25 bp, Homo sapien
tgctccttggtcttatgcacctgcc

SEQ ID NO: 1079523 - DNA, 25 bp, Homo sapien
tcagaaacacagttgggtcaggagt

SEQ ID NO: 1079524 - DNA, 25 bp, Homo sapien
cttgcctcatgcagtgggtctgcca

SEQ ID NO: 1079525 - DNA, 25 bp, Homo sapien
tcaggagtcctgcttgcctcatgca

SEQ ID NO: 1079526 - DNA, 25 bp, Homo sapien
tgggtctgccaggccttcaggccca

SEQ ID NO: 1079527 - DNA, 25 bp, Homo sapien
tgctcagagtgatgaacaccccggt

SEQ ID NO: 1079528 - DNA, 25 bp, Homo sapien
tgcgctccaggacgatgctcagagt

SEQ ID NO: 1079529 - DNA, 25 bp, Homo sapien
tcttcacggtctgaaacatgtcgac

SEQ ID NO: 1079530 - DNA, 25 bp, Homo sapien
caggacgctgtgtacgcagggtctt

SEQ ID NO: 1079531 - DNA, 25 bp, Homo sapien
ctaaagcctagggttcccagcagcg

SEQ ID NO: 1079532 - DNA, 25 bp, Homo sapien
agcagcgctgctgccaaggccctgg

SEQ ID NO: 1079533 - DNA, 25 bp, Homo sapien
agggttcccagcagcgctgctgcca

SEQ ID NO: 1079534 - DNA, 25 bp, Homo sapien
cctagggttcccagcagcgctgctg

SEQ ID NO: 1079535 - DNA, 25 bp, Homo sapien
agggccgcacggtagcacagctgat

SEQ ID NO: 1079536 - DNA, 25 bp, Homo sapien
cccagggatgttctaggctctctga

SEQ ID NO: 1079537 - DNA, 25 bp, Homo sapien
tctgcagatacggattcgcgaaagg

SEQ ID NO: 1079538 - DNA, 25 bp, Homo sapien
ctgaaacgctgtgatccccgtgggc

SEQ ID NO: 1079539 - DNA, 25 bp, Homo sapien
gattggtgtggcaacgttcctgaaa

SEQ ID NO: 1079540 - DNA, 25 bp, Homo sapien
cccagctctgcacgaggaaggcaat

SEQ ID NO: 1079541 - DNA, 25 bp, Homo sapien
tgaaacaggatctcgtctgaagggc

SEQ ID NO: 1079542 - DNA, 25 bp, Homo sapien
tagacgaccagggatgagtgttccc

SEQ ID NO: 1079543 - DNA, 25 bp, Homo sapien
aaggcaatgttctgtccttcagcag

SEQ ID NO: 1079544 - DNA, 25 bp, Homo sapien
tttgcaaacacgatggtgatgagga

SEQ ID NO: 1079545 - DNA, 25 bp, Homo sapien
gatgaggaatgccttgccaggctct

SEQ ID NO: 1079546 - DNA, 25 bp, Homo sapien
tgaggaatgccttgccaggctctcc

SEQ ID NO: 1079547 - DNA, 25 bp, Homo sapien
ggtgatgaggaatgccttgccaggc

SEQ ID NO: 1079548 - DNA, 25 bp, Homo sapien
gaaccccaggcacacggagttgctt

SEQ ID NO: 1079549 - DNA, 25 bp, Homo sapien
ggtgtggcacacaccctaacctgtg

SEQ ID NO: 1079550 - DNA, 25 bp, Homo sapien
caccacaccatactgcaatgctggg

SEQ ID NO: 1079551 - DNA, 25 bp, Homo sapien
tcttgagggtttgaagcagaagcca

SEQ ID NO: 1079552 - DNA, 25 bp, Homo sapien
cctatctagatagcgctgcccagag

SEQ ID NO: 1079553 - DNA, 25 bp, Homo sapien
tcagcaagctgggataataaggact

SEQ ID NO: 1079554 - DNA, 25 bp, Homo sapien
tctacagcactagcatccacaaggt

SEQ ID NO: 1079555 - DNA, 25 bp, Homo sapien
tagaagtccagtagtcttgccacat

SEQ ID NO: 1079556 - DNA, 25 bp, Homo sapien
taacatcgtgtgcttaggaaaccac

SEQ ID NO: 1079557 - DNA, 25 bp, Homo sapien
gcataggtcagacagcgcttcctca

SEQ ID NO: 1079558 - DNA, 25 bp, Homo sapien
ttcctcactttcagcagggctggag

SEQ ID NO: 1079559 - DNA, 25 bp, Homo sapien
tatggaaggttagacagaccagcag

SEQ ID NO: 1079560 - DNA, 25 bp, Homo sapien
tttacaaacgcatgcaactatcacc

SEQ ID NO: 1079561 - DNA, 25 bp, Homo sapien
catcaacaatacatgaggagtccca

SEQ ID NO: 1079562 - DNA, 25 bp, Homo sapien
tacccgtgcccagttataatcagtc

SEQ ID NO: 1079563 - DNA, 25 bp, Homo sapien
ccattctagtgggtgccaagtagta

SEQ ID NO: 1079564 - DNA, 25 bp, Homo sapien
ggccgatcctactgcttttccagca

SEQ ID NO: 1079565 - DNA, 25 bp, Homo sapien
gccactggccgatcctactgctttt

SEQ ID NO: 1079566 - DNA, 25 bp, Homo sapien
ttccagcaggcgaaggccgaaactc

SEQ ID NO: 1079567 - DNA, 25 bp, Homo sapien
ctgctgtcgccactggccgatccta

SEQ ID NO: 1079568 - DNA, 25 bp, Homo sapien
gaggtccctttagtcagacaggaat

SEQ ID NO: 1079569 - DNA, 25 bp, Homo sapien
tttgaggtccctttagtcagacagg

SEQ ID NO: 1079570 - DNA, 25 bp, Homo sapien
tttttgaggtccctttagtcagaca

SEQ ID NO: 1079571 - DNA, 25 bp, Homo sapien
tgaggtccctttagtcagacaggaa

SEQ ID NO: 1079572 - DNA, 25 bp, Homo sapien
ctgggattcagagtttcagactcag

SEQ ID NO: 1079573 - DNA, 25 bp, Homo sapien
gattcagagtttcagactcagaagc

SEQ ID NO: 1079574 - DNA, 25 bp, Homo sapien
tgggattcagagtttcagactcaga

SEQ ID NO: 1079575 - DNA, 25 bp, Homo sapien
tcagagtttcagactcagaagccat

SEQ ID NO: 1079576 - DNA, 25 bp, Homo sapien
agttggataaaaggtcattatccta

SEQ ID NO: 1079577 - DNA, 25 bp, Homo sapien
ttggataaaaggtcattatcctagc

SEQ ID NO: 1079578 - DNA, 25 bp, Homo sapien
tggataaaaggtcattatcctagca

SEQ ID NO: 1079579 - DNA, 25 bp, Homo sapien
gttggataaaaggtcattatcctag

SEQ ID NO: 1079580 - DNA, 25 bp, Homo sapien
cttggctagccctgcccgatgagct

SEQ ID NO: 1079581 - DNA, 25 bp, Homo sapien
ttcaatgtaggcaatgtatctactg

SEQ ID NO: 1079582 - DNA, 25 bp, Homo sapien
tatctactgaagtttcggaactctt

SEQ ID NO: 1079583 - DNA, 25 bp, Homo sapien
gcccgatgagctccttgggattcaa

SEQ ID NO: 1079584 - DNA, 25 bp, Homo sapien
tgttggctggccagtgcattctctc

SEQ ID NO: 1079585 - DNA, 25 bp, Homo sapien
gccagtgcattctctccccttgaag

SEQ ID NO: 1079586 - DNA, 25 bp, Homo sapien
ccagaatactcatgttggctggcca

SEQ ID NO: 1079587 - DNA, 25 bp, Homo sapien
cttgaagaaagtccacatgggaagc

SEQ ID NO: 1079588 - DNA, 25 bp, Homo sapien
ttgtactgagtaaagaggccagact

SEQ ID NO: 1079589 - DNA, 25 bp, Homo sapien
ctgccccgtcaccagctgttgaatg

SEQ ID NO: 1079590 - DNA, 25 bp, Homo sapien
tcatcataggatgctcgtggcttcc

SEQ ID NO: 1079591 - DNA, 25 bp, Homo sapien
tattggctatcttgcggaactctcg

SEQ ID NO: 1079592 - DNA, 25 bp, Homo sapien
tctccttgcaactttagagtcagaa

SEQ ID NO: 1079593 - DNA, 25 bp, Homo sapien
gaacaggtttagactgggacacagt

SEQ ID NO: 1079594 - DNA, 25 bp, Homo sapien
tgttgttataagaacaggaacaggt

SEQ ID NO: 1079595 - DNA, 25 bp, Homo sapien
tttgttgttataagaacaggaacag

SEQ ID NO: 1079596 - DNA, 25 bp, Homo sapien
tacaagacataatcccctattccag

SEQ ID NO: 1079597 - DNA, 25 bp, Homo sapien
gggtttattaggcattatgaacatt

SEQ ID NO: 1079598 - DNA, 25 bp, Homo sapien
ccagtgacagcaagaatttcaaatg

SEQ ID NO: 1079599 - DNA, 25 bp, Homo sapien
tgaacaaggcataatcttggccttc

SEQ ID NO: 1079600 - DNA, 25 bp, Homo sapien
ttcatagagggtaccattcacatct

SEQ ID NO: 1079601 - DNA, 25 bp, Homo sapien
tttttccagtatttccgctcgagct

SEQ ID NO: 1079602 - DNA, 25 bp, Homo sapien
ctcttcaaactcactatagcgtggg

SEQ ID NO: 1079603 - DNA, 25 bp, Homo sapien
gaggattgaatgtaagatttttcca

SEQ ID NO: 1079604 - DNA, 25 bp, Homo sapien
tatgagtgataatccctgaatgccc

SEQ ID NO: 1079605 - DNA, 25 bp, Homo sapien
ccgactatgctaacaacccttgaaa

SEQ ID NO: 1079606 - DNA, 25 bp, Homo sapien
tgcctactacgtgccgggccgaaaa

SEQ ID NO: 1079607 - DNA, 25 bp, Homo sapien
aaaatggcccacaattaggccagca

SEQ ID NO: 1079608 - DNA, 25 bp, Homo sapien
acatttgcatagaaaccgaggctct

SEQ ID NO: 1079609 - DNA, 25 bp, Homo sapien
cagtccagggcaagttacatttgca

SEQ ID NO: 1079610 - DNA, 25 bp, Homo sapien
gtccagggcaagttacatttgcata

SEQ ID NO: 1079611 - DNA, 25 bp, Homo sapien
gttacatttgcatagaaaccgaggc

SEQ ID NO: 1079612 - DNA, 25 bp, Homo sapien
cagtgtgccaagcaaaggatgtctt

SEQ ID NO: 1079613 - DNA, 25 bp, Homo sapien
ccaggattgttctcagccggccaat

SEQ ID NO: 1079614 - DNA, 25 bp, Homo sapien
caatggtgatcccactctccttttc

SEQ ID NO: 1079615 - DNA, 25 bp, Homo sapien
aagtacaggtatggggtgttcacac

SEQ ID NO: 1079616 - DNA, 25 bp, Homo sapien
catagaagcccggtgccgactgcag

SEQ ID NO: 1079617 - DNA, 25 bp, Homo sapien
ctagcatagaagcccggtgccgact

SEQ ID NO: 1079618 - DNA, 25 bp, Homo sapien
tagaagcccggtgccgactgcaggc

SEQ ID NO: 1079619 - DNA, 25 bp, Homo sapien
agcatagaagcccggtgccgactgc

SEQ ID NO: 1079620 - DNA, 25 bp, Homo sapien
gacctagccccgtatctgctgatga

SEQ ID NO: 1079621 - DNA, 25 bp, Homo sapien
taaatgcttgaaaggcctaactggg

SEQ ID NO: 1079622 - DNA, 25 bp, Homo sapien
gatctgacacttaagagacctagcc

SEQ ID NO: 1079623 - DNA, 25 bp, Homo sapien
tattaagtgttcaccatgagccagg

SEQ ID NO: 1079624 - DNA, 25 bp, Homo sapien
gaggcgttccaaccgctttccatgc

SEQ ID NO: 1079625 - DNA, 25 bp, Homo sapien
caaccgctttccatgctcaggtgga

SEQ ID NO: 1079626 - DNA, 25 bp, Homo sapien
ctttccatgctcaggtggaacagag

SEQ ID NO: 1079627 - DNA, 25 bp, Homo sapien
ctttggcgaggcgttccaaccgctt

SEQ ID NO: 1079628 - DNA, 25 bp, Homo sapien
cataggagggtccaatccagcaaac

SEQ ID NO: 1079629 - DNA, 25 bp, Homo sapien
aggagcacagctcataggagggtcc

SEQ ID NO: 1079630 - DNA, 25 bp, Homo sapien
atccagcaaacagaagagacacagt

SEQ ID NO: 1079631 - DNA, 25 bp, Homo sapien
agagcaaggagcacagctcatagga

SEQ ID NO: 1079632 - DNA, 25 bp, Homo sapien
gcttctcatcggaatgataaagagg

SEQ ID NO: 1079633 - DNA, 25 bp, Homo sapien
cactagctccgcaatcctggagtca

SEQ ID NO: 1079634 - DNA, 25 bp, Homo sapien
tgaggatccttatagctccgcacca

SEQ ID NO: 1079635 - DNA, 25 bp, Homo sapien
gaaagggtacaggttaacacagtgc

SEQ ID NO: 1079636 - DNA, 25 bp, Homo sapien
tgcctcacagctttgagcacttcct

SEQ ID NO: 1079637 - DNA, 25 bp, Homo sapien
cttgtggcggagaaatgcctcacag

SEQ ID NO: 1079638 - DNA, 25 bp, Homo sapien
cattaacggggaaatcagggtcatc

SEQ ID NO: 1079639 - DNA, 25 bp, Homo sapien
tcttcagcattaacggggaaatcag

SEQ ID NO: 1079640 - DNA, 25 bp, Homo sapien
gtagcaaaattggtagactccgcac

SEQ ID NO: 1079641 - DNA, 25 bp, Homo sapien
gactccgcacagttaaaaccatggt

SEQ ID NO: 1079642 - DNA, 25 bp, Homo sapien
gcacagcttgcttgccgtactcaat

SEQ ID NO: 1079643 - DNA, 25 bp, Homo sapien
cgtactcaatccaccgacgggtagc

SEQ ID NO: 1079644 - DNA, 25 bp, Homo sapien
atagaaagaaatcaagcagacttac

SEQ ID NO: 1079645 - DNA, 25 bp, Homo sapien
tatagaaagaaatcaagcagactta

SEQ ID NO: 1079646 - DNA, 25 bp, Homo sapien
ttatagaaagaaatcaagcagactt

SEQ ID NO: 1079647 - DNA, 25 bp, Homo sapien
tggctggaactttctcacaaacaca

SEQ ID NO: 1079648 - DNA, 25 bp, Homo sapien
tggaggcagttcactctccttaaga

SEQ ID NO: 1079649 - DNA, 25 bp, Homo sapien
tggcgtgggcagagtatggtcaata

SEQ ID NO: 1079650 - DNA, 25 bp, Homo sapien
tcaccatgtcctttctacaggagca

SEQ ID NO: 1079651 - DNA, 25 bp, Homo sapien
tgggaaggtaagaccatcctcaact

SEQ ID NO: 1079652 - DNA, 25 bp, Homo sapien
tcactctgactcacctcctgtggta

SEQ ID NO: 1079653 - DNA, 25 bp, Homo sapien
tgtccctattcggtgcttggccagg

SEQ ID NO: 1079654 - DNA, 25 bp, Homo sapien
acagagctatgggtgggcctcacag

SEQ ID NO: 1079655 - DNA, 25 bp, Homo sapien
gagcctgagaagacaaggcgtcccc

SEQ ID NO: 1079656 - DNA, 25 bp, Homo sapien
atagaatcccgtgaagagccagagc

SEQ ID NO: 1079657 - DNA, 25 bp, Homo sapien
cccctacagacgcaggattcacaga

SEQ ID NO: 1079658 - DNA, 25 bp, Homo sapien
gattcacagaaagatccaaggcagc

SEQ ID NO: 1079659 - DNA, 25 bp, Homo sapien
ctcgtgcatggctctcccacagtga

SEQ ID NO: 1079660 - DNA, 25 bp, Homo sapien
cactgaaacttctagcggcgcttcc

SEQ ID NO: 1079661 - DNA, 25 bp, Homo sapien
tcccctttggcataactgtgcacag

SEQ ID NO: 1079662 - DNA, 25 bp, Homo sapien
ctgtgcacagtgagaactcccgttt

SEQ ID NO: 1079663 - DNA, 25 bp, Homo sapien
aaacacgtgggctccaacagcagcc

SEQ ID NO: 1079664 - DNA, 25 bp, Homo sapien
tgccgctaaggcaatgaggatcaga

SEQ ID NO: 1079665 - DNA, 25 bp, Homo sapien
tgatcccaaacctccaaacacgtgg

SEQ ID NO: 1079666 - DNA, 25 bp, Homo sapien
gccattctaaccctggtgccgctaa

SEQ ID NO: 1079667 - DNA, 25 bp, Homo sapien
tggagtgaggatatcagggaccttt

SEQ ID NO: 1079668 - DNA, 25 bp, Homo sapien
gtgagtaaggatgctgcagcagtat

SEQ ID NO: 1079669 - DNA, 25 bp, Homo sapien
agtaaggatgctgcagcagtatgga

SEQ ID NO: 1079670 - DNA, 25 bp, Homo sapien
gatatcagggaccttttcctactga

SEQ ID NO: 1079671 - DNA, 25 bp, Homo sapien
gagcttgcttaaaggctgacggcgt

SEQ ID NO: 1079672 - DNA, 25 bp, Homo sapien
tattctcttctagggaaaacatgta

SEQ ID NO: 1079673 - DNA, 25 bp, Homo sapien
ggctgacggcgtcccttggacttct

SEQ ID NO: 1079674 - DNA, 25 bp, Homo sapien
tgcagcacaagtgggtgatggcggg

SEQ ID NO: 1079675 - DNA, 25 bp, Homo sapien
tcaggggtcagctgttcagatgtct

SEQ ID NO: 1079676 - DNA, 25 bp, Homo sapien
gatcatacagacagcgcagtgaggg

SEQ ID NO: 1079677 - DNA, 25 bp, Homo sapien
tgatgataagtctggaagatcatac

SEQ ID NO: 1079678 - DNA, 25 bp, Homo sapien
gggccatggtctcattgaattcctt

SEQ ID NO: 1079679 - DNA, 25 bp, Homo sapien
ctgactatggctacagctcccgggt

SEQ ID NO: 1079680 - DNA, 25 bp, Homo sapien
ggctctcttaccgatctgactatgg

SEQ ID NO: 1079681 - DNA, 25 bp, Homo sapien
ggtgcacagccattatcccggagct

SEQ ID NO: 1079682 - DNA, 25 bp, Homo sapien
cagcatcatacaaaggcccctaggg

SEQ ID NO: 1079683 - DNA, 25 bp, Homo sapien
tcttgcaggaaacgagtatgctggt

SEQ ID NO: 1079684 - DNA, 25 bp, Homo sapien
gcagccagtcgaagtgaagcacatt

SEQ ID NO: 1079685 - DNA, 25 bp, Homo sapien
gaatcaatggcttggtcctctgctt

SEQ ID NO: 1079686 - DNA, 25 bp, Homo sapien
tatgctggtgccatcctcctcaaga

SEQ ID NO: 1079687 - DNA, 25 bp, Homo sapien
tgaacaccgagaacacatccagtct

SEQ ID NO: 1079688 - DNA, 25 bp, Homo sapien
ctttgcaggggggaccccatagcaa

SEQ ID NO: 1079689 - DNA, 25 bp, Homo sapien
agcctttgcaggggggaccccatag

SEQ ID NO: 1079690 - DNA, 25 bp, Homo sapien
ggctgaacaccgagaacacatccag

SEQ ID NO: 1079691 - DNA, 25 bp, Homo sapien
gggcccctcctcgtaatgagcataa

SEQ ID NO: 1079692 - DNA, 25 bp, Homo sapien
cccctcctcgtaatgagcataaaca

SEQ ID NO: 1079693 - DNA, 25 bp, Homo sapien
ggcccctcctcgtaatgagcataaa

SEQ ID NO: 1079694 - DNA, 25 bp, Homo sapien
cagggcccctcctcgtaatgagcat

SEQ ID NO: 1079695 - DNA, 25 bp, Homo sapien
cacagcacatgaaacgtggacccac

SEQ ID NO: 1079696 - DNA, 25 bp, Homo sapien
cggacttctttctgcaatgttgaca

SEQ ID NO: 1079697 - DNA, 25 bp, Homo sapien
cagaattgccacagcacatgaaacg

SEQ ID NO: 1079698 - DNA, 25 bp, Homo sapien
acatccaccggacttctttctgcaa

SEQ ID NO: 1079699 - DNA, 25 bp, Homo sapien
tcttgtgccgaaagcaggtaatgaa

SEQ ID NO: 1079700 - DNA, 25 bp, Homo sapien
cagttcttttcctccgcttcttaca

SEQ ID NO: 1079701 - DNA, 25 bp, Homo sapien
aaaggccagtcgtcaggctgcatca

SEQ ID NO: 1079702 - DNA, 25 bp, Homo sapien
gcagcggccgtgagaacactgcaca

SEQ ID NO: 1079703 - DNA, 25 bp, Homo sapien
gcgcccgttcttatgcttgctaatg

SEQ ID NO: 1079704 - DNA, 25 bp, Homo sapien
ttcacactggtagaagcgcccgttc

SEQ ID NO: 1079705 - DNA, 25 bp, Homo sapien
gattgtcgctgaaggagccatcatc

SEQ ID NO: 1079706 - DNA, 25 bp, Homo sapien
tcatagaaggtctcggtggtgagcc

SEQ ID NO: 1079707 - DNA, 25 bp, Homo sapien
cccattccaaactgcctgagaagct

SEQ ID NO: 1079708 - DNA, 25 bp, Homo sapien
tgcctgagaagctccttgcagatat

SEQ ID NO: 1079709 - DNA, 25 bp, Homo sapien
ctgcctgagaagctccttgcagata

SEQ ID NO: 1079710 - DNA, 25 bp, Homo sapien
gaaacatccccccattccaaactgc

SEQ ID NO: 1079711 - DNA, 25 bp, Homo sapien
aatagggtaccctagcagcacgcag

SEQ ID NO: 1079712 - DNA, 25 bp, Homo sapien
taatttagacggcaacagatgcagg

SEQ ID NO: 1079713 - DNA, 25 bp, Homo sapien
gctagaagaagcaggcatacacaca

SEQ ID NO: 1079714 - DNA, 25 bp, Homo sapien
tctttgcaaagaaagactggtacag

SEQ ID NO: 1079715 - DNA, 25 bp, Homo sapien
cttttaagaacctgccaggagcagt

SEQ ID NO: 1079716 - DNA, 25 bp, Homo sapien
taacttttaagaacctgccaggagc

SEQ ID NO: 1079717 - DNA, 25 bp, Homo sapien
agattccacactgcaactaactttt

SEQ ID NO: 1079718 - DNA, 25 bp, Homo sapien
tccacactgcaactaacttttaaga

SEQ ID NO: 1079719 - DNA, 25 bp, Homo sapien
cagggcagtgagtctaaaaggatgt

SEQ ID NO: 1079720 - DNA, 25 bp, Homo sapien
tcctcatcgtattcccagcataggg

SEQ ID NO: 1079721 - DNA, 25 bp, Homo sapien
tgaaaaagagtcacctaccatggga

SEQ ID NO: 1079722 - DNA, 25 bp, Homo sapien
cagaagcaggtaagtaccccaagtc

SEQ ID NO: 1079723 - DNA, 25 bp, Homo sapien
agttaagtgccagaatcaagagtcc

SEQ ID NO: 1079724 - DNA, 25 bp, Homo sapien
aaaatccagctataacaaacttagt

SEQ ID NO: 1079725 - DNA, 25 bp, Homo sapien
gagggtgaaaggaacgtccacctgc

SEQ ID NO: 1079726 - DNA, 25 bp, Homo sapien
cacctgcacacaaaggtaactgtcc

SEQ ID NO: 1079727 - DNA, 25 bp, Homo sapien
cccttcagcaggaggaccaaactgg

SEQ ID NO: 1079728 - DNA, 25 bp, Homo sapien
caggaggaccaaactggagacagtc

SEQ ID NO: 1079729 - DNA, 25 bp, Homo sapien
gaggaccaaactggagacagtcctg

SEQ ID NO: 1079730 - DNA, 25 bp, Homo sapien
ttcagcaggaggaccaaactggaga

SEQ ID NO: 1079731 - DNA, 25 bp, Homo sapien
ctggtacatttggatagggtgggag

SEQ ID NO: 1079732 - DNA, 25 bp, Homo sapien
tagacttggccgtctgtccatctca

SEQ ID NO: 1079733 - DNA, 25 bp, Homo sapien
aaacttggctccatagacttggccg

SEQ ID NO: 1079734 - DNA, 25 bp, Homo sapien
tacatttggatagggtgggaggcca

SEQ ID NO: 1079735 - DNA, 25 bp, Homo sapien
gttgtgagccatcctcaaactccac

SEQ ID NO: 1079736 - DNA, 25 bp, Homo sapien
cagtctagatttgactctcttggga

SEQ ID NO: 1079737 - DNA, 25 bp, Homo sapien
tctagatttgactctcttgggaagc

SEQ ID NO: 1079738 - DNA, 25 bp, Homo sapien
gtgtatacatcatctctcttaacca

SEQ ID NO: 1079739 - DNA, 25 bp, Homo sapien
catgatggcccggtatagtgcaggc

SEQ ID NO: 1079740 - DNA, 25 bp, Homo sapien
gaaaatctcattgaagcgcatgtct

SEQ ID NO: 1079741 - DNA, 25 bp, Homo sapien
gagttgataactcgttgccgtttct

SEQ ID NO: 1079742 - DNA, 25 bp, Homo sapien
caatataatcttcccggtatcttga

SEQ ID NO: 1079743 - DNA, 25 bp, Homo sapien
tgccacgtgcccagaaatggctcgt

SEQ ID NO: 1079744 - DNA, 25 bp, Homo sapien
ctgtgctgtggaacccagagtgctc

SEQ ID NO: 1079745 - DNA, 25 bp, Homo sapien
cactacagcggaatgcaatgagggt

SEQ ID NO: 1079746 - DNA, 25 bp, Homo sapien
aatggctcgtcctttcactacagcg

SEQ ID NO: 1079747 - DNA, 25 bp, Homo sapien
ttgccctgcataggcaaggaagaaa

SEQ ID NO: 1079748 - DNA, 25 bp, Homo sapien
tttgccctgcataggcaaggaagaa

SEQ ID NO: 1079749 - DNA, 25 bp, Homo sapien
tgccctgcataggcaaggaagaaag

SEQ ID NO: 1079750 - DNA, 25 bp, Homo sapien
gtttgccctgcataggcaaggaaga

SEQ ID NO: 1079751 - DNA, 25 bp, Homo sapien
tctgcacctagagtgttgtgggcac

SEQ ID NO: 1079752 - DNA, 25 bp, Homo sapien
tcttgagacggttccaggcctggac

SEQ ID NO: 1079753 - DNA, 25 bp, Homo sapien
tacacagggtattggtgtgaagccc

SEQ ID NO: 1079754 - DNA, 25 bp, Homo sapien
taaccccttcagtattgccctctag

SEQ ID NO: 1079755 - DNA, 25 bp, Homo sapien
ggtgctcagagccagaagtgtccct

SEQ ID NO: 1079756 - DNA, 25 bp, Homo sapien
ttgtcttaaaatacacagccccgct

SEQ ID NO: 1079757 - DNA, 25 bp, Homo sapien
gaacttcctagggaatgccttactg

SEQ ID NO: 1079758 - DNA, 25 bp, Homo sapien
catacttggcctaatacagagcttg

SEQ ID NO: 1079759 - DNA, 25 bp, Homo sapien
caaagtgctagggtagtcacggcca

SEQ ID NO: 1079760 - DNA, 25 bp, Homo sapien
gcaggttcagcgtgggtgtctctcc

SEQ ID NO: 1079761 - DNA, 25 bp, Homo sapien
gaacatttttagtccgcgcgtggca

SEQ ID NO: 1079762 - DNA, 25 bp, Homo sapien
acatcgagctgtctagaggaaccct

SEQ ID NO: 1079763 - DNA, 25 bp, Homo sapien
catgggcgccgccatagtggggacg

SEQ ID NO: 1079764 - DNA, 25 bp, Homo sapien
cggcgggagcccacaacgcgctggg

SEQ ID NO: 1079765 - DNA, 25 bp, Homo sapien
cccacaacgcgctgggctgcatggg

SEQ ID NO: 1079766 - DNA, 25 bp, Homo sapien
gcggcggcgacagccgcgggggacc

SEQ ID NO: 1079767 - DNA, 25 bp, Homo sapien
atcgcgccccgaagcgcactgggca

SEQ ID NO: 1079768 - DNA, 25 bp, Homo sapien
gttattcgcggtcagccatcgcgcc

SEQ ID NO: 1079769 - DNA, 25 bp, Homo sapien
gggcggagcggcgaccgttattcgc

SEQ ID NO: 1079770 - DNA, 25 bp, Homo sapien
gcgaccgttattcgcggtcagccat

SEQ ID NO: 1079771 - DNA, 25 bp, Homo sapien
gggtttcacacggagatgatctcag

SEQ ID NO: 1079772 - DNA, 25 bp, Homo sapien
ccccgctagagcagtaagcaatgac

SEQ ID NO: 1079773 - DNA, 25 bp, Homo sapien
tctgcgccaaggtgcgcagcgctgc

SEQ ID NO: 1079774 - DNA, 25 bp, Homo sapien
acagcagggcccgaatgacggtgtc

SEQ ID NO: 1079775 - DNA, 25 bp, Homo sapien
tggccctgaaacatacgtaagaaca

SEQ ID NO: 1079776 - DNA, 25 bp, Homo sapien
gaagttccgtatcaaatggccctga

SEQ ID NO: 1079777 - DNA, 25 bp, Homo sapien
tgtgcctaacgcaacagataatggg

SEQ ID NO: 1079778 - DNA, 25 bp, Homo sapien
gcaattatcgcaaaaaggcagactc

SEQ ID NO: 1079779 - DNA, 25 bp, Homo sapien
tttgtgtgtcatcctaatcttctct

SEQ ID NO: 1079780 - DNA, 25 bp, Homo sapien
gtatatgtgctgccaaagcaagccc

SEQ ID NO: 1079781 - DNA, 25 bp, Homo sapien
tgtgtgtcatcctaatcttctctgt

SEQ ID NO: 1079782 - DNA, 25 bp, Homo sapien
atcgttccaattttagtatatgtgc

SEQ ID NO: 1079783 - DNA, 25 bp, Homo sapien
gaaaatgggaaaatgctcagagtga

SEQ ID NO: 1079784 - DNA, 25 bp, Homo sapien
aaaaaggaatcagcctgaggagctc

SEQ ID NO: 1079785 - DNA, 25 bp, Homo sapien
tcttatagcatatagcaggagtgta

SEQ ID NO: 1079786 - DNA, 25 bp, Homo sapien
ctcccactggtcagatctggagcaa

SEQ ID NO: 1079787 - DNA, 25 bp, Homo sapien
gcagattgcgcacaaataccaagag

SEQ ID NO: 1079788 - DNA, 25 bp, Homo sapien
gaggcagagggctagcagcagattg

SEQ ID NO: 1079789 - DNA, 25 bp, Homo sapien
cagagggctagcagcagattgcgca

SEQ ID NO: 1079790 - DNA, 25 bp, Homo sapien
ggctagcagcagattgcgcacaaat

SEQ ID NO: 1079791 - DNA, 25 bp, Homo sapien
gagtaagtgtagcttccacgcagaa

SEQ ID NO: 1079792 - DNA, 25 bp, Homo sapien
tcctcccactggagtaagtgtagct

SEQ ID NO: 1079793 - DNA, 25 bp, Homo sapien
ctcctcccactggagtaagtgtagc

SEQ ID NO: 1079794 - DNA, 25 bp, Homo sapien
tagcttccacgcagaataatacaaa

SEQ ID NO: 1079795 - DNA, 25 bp, Homo sapien
cctggggtgagctagagtgactata

SEQ ID NO: 1079796 - DNA, 25 bp, Homo sapien
cttctcctggggtgagctagagtga

SEQ ID NO: 1079797 - DNA, 25 bp, Homo sapien
tcctggggtgagctagagtgactat

SEQ ID NO: 1079798 - DNA, 25 bp, Homo sapien
tctcctggggtgagctagagtgact

SEQ ID NO: 1079799 - DNA, 25 bp, Homo sapien
cagaggccagaaacatggccagaaa

SEQ ID NO: 1079800 - DNA, 25 bp, Homo sapien
gaaacatggccagaaatgccagcct

SEQ ID NO: 1079801 - DNA, 25 bp, Homo sapien
tccctaagccagaggccagaaacat

SEQ ID NO: 1079802 - DNA, 25 bp, Homo sapien
taagccagaggccagaaacatggcc

SEQ ID NO: 1079803 - DNA, 25 bp, Homo sapien
tgggaaaccgtcctcagacagaaaa

SEQ ID NO: 1079804 - DNA, 25 bp, Homo sapien
tgaacaattccctaccctatgatgg

SEQ ID NO: 1079805 - DNA, 25 bp, Homo sapien
gagaggaggctagttctgataccac

SEQ ID NO: 1079806 - DNA, 25 bp, Homo sapien
gcaaatgtggcgctcacctcgagtt

SEQ ID NO: 1079807 - DNA, 25 bp, Homo sapien
ttggcatttcatgggccacagggaa

SEQ ID NO: 1079808 - DNA, 25 bp, Homo sapien
tcgttgctcttaagtgttgacacct

SEQ ID NO: 1079809 - DNA, 25 bp, Homo sapien
gaacaccagagatatcagttgctgc

SEQ ID NO: 1079810 - DNA, 25 bp, Homo sapien
gttgacacctctcttggcatttcat

SEQ ID NO: 1079811 - DNA, 25 bp, Homo sapien
tgcttgatttgaaggaaaaactagg

SEQ ID NO: 1079812 - DNA, 25 bp, Homo sapien
tctatatgaaacacctacatacaaa

SEQ ID NO: 1079813 - DNA, 25 bp, Homo sapien
cttgatttgaaggaaaaactaggat

SEQ ID NO: 1079814 - DNA, 25 bp, Homo sapien
taaagacagacttctctatatgaaa

SEQ ID NO: 1079815 - DNA, 25 bp, Homo sapien
tcttttatggtttggtatcaagcga

SEQ ID NO: 1079816 - DNA, 25 bp, Homo sapien
aaagctgccaccaacatttgtttac

SEQ ID NO: 1079817 - DNA, 25 bp, Homo sapien
gtttccagtacctggctattgttaa

SEQ ID NO: 1079818 - DNA, 25 bp, Homo sapien
tgttttacttacctactgatggaaa

SEQ ID NO: 1079819 - DNA, 25 bp, Homo sapien
gagtatatgaagatctaccttagcc

SEQ ID NO: 1079820 - DNA, 25 bp, Homo sapien
cacactattatattgccttccagga

SEQ ID NO: 1079821 - DNA, 25 bp, Homo sapien
acaatgcaatgtgcacacctgtaca

SEQ ID NO: 1079822 - DNA, 25 bp, Homo sapien
tgccagcatgaaaggtactgccaat

SEQ ID NO: 1079823 - DNA, 25 bp, Homo sapien
tgagagtagaccaaggcaggagcag

SEQ ID NO: 1079824 - DNA, 25 bp, Homo sapien
ctgagagtagaccaaggcaggagca

SEQ ID NO: 1079825 - DNA, 25 bp, Homo sapien
ggtgcatatacgtacagatttctct

SEQ ID NO: 1079826 - DNA, 25 bp, Homo sapien
aactgacgttctgtgaaggtggctg

SEQ ID NO: 1079827 - DNA, 25 bp, Homo sapien
attttggtgcatatacgtacagatt

SEQ ID NO: 1079828 - DNA, 25 bp, Homo sapien
gatttctctaatgaactgacgttct

SEQ ID NO: 1079829 - DNA, 25 bp, Homo sapien
cctattatacatgatgctggcgtgg

SEQ ID NO: 1079830 - DNA, 25 bp, Homo sapien
ctttctccttcgacttgtggtgcca

SEQ ID NO: 1079831 - DNA, 25 bp, Homo sapien
tctacacttgtacctggagttaggg

SEQ ID NO: 1079832 - DNA, 25 bp, Homo sapien
tgttcagcttcatccaacgagcctg

SEQ ID NO: 1079833 - DNA, 25 bp, Homo sapien
ccccaaagcactaggagccaatgtg

SEQ ID NO: 1079834 - DNA, 25 bp, Homo sapien
tgttttctaagtctcgtccatatag

SEQ ID NO: 1079835 - DNA, 25 bp, Homo sapien
ggttcatgcttcttgtatccttaaa

SEQ ID NO: 1079836 - DNA, 25 bp, Homo sapien
tacctaagtgaaactgtgtttctgc

SEQ ID NO: 1079837 - DNA, 25 bp, Homo sapien
tctgtctaccaggttagagtacaat

SEQ ID NO: 1079838 - DNA, 25 bp, Homo sapien
gtctaccaggttagagtacaatagt

SEQ ID NO: 1079839 - DNA, 25 bp, Homo sapien
ggttagagtacaatagtgcaattat

SEQ ID NO: 1079840 - DNA, 25 bp, Homo sapien
tacaatagtgcaattatagcccact

SEQ ID NO: 1079841 - DNA, 25 bp, Homo sapien
ggagatttagtaacattaataggtc

SEQ ID NO: 1079842 - DNA, 25 bp, Homo sapien
catggtatgtcgatttcaatattct

SEQ ID NO: 1079843 - DNA, 25 bp, Homo sapien
tgaacatggtatgtcgatttcaata

SEQ ID NO: 1079844 - DNA, 25 bp, Homo sapien
acattaataggtcttctgacccatg

SEQ ID NO: 1079845 - DNA, 25 bp, Homo sapien
catttgcgcattatgggttcactga

SEQ ID NO: 1079846 - DNA, 25 bp, Homo sapien
tcttccaatgatttcacattcgtta

SEQ ID NO: 1079847 - DNA, 25 bp, Homo sapien
catcctaacagtagtcatttgcgca

SEQ ID NO: 1079848 - DNA, 25 bp, Homo sapien
tgcatgattctgtaacatcctaaca

SEQ ID NO: 1079849 - DNA, 25 bp, Homo sapien
caggggcacacacctttgaaacagg

SEQ ID NO: 1079850 - DNA, 25 bp, Homo sapien
ccaggggcacacacctttgaaacag

SEQ ID NO: 1079851 - DNA, 25 bp, Homo sapien
tccaggggcacacacctttgaaaca

SEQ ID NO: 1079852 - DNA, 25 bp, Homo sapien
atccaggggcacacacctttgaaac

SEQ ID NO: 1079853 - DNA, 25 bp, Homo sapien
ctgcaggatacgctcagtttcaagt

SEQ ID NO: 1079854 - DNA, 25 bp, Homo sapien
caggatacgctcagtttcaagtcag

SEQ ID NO: 1079855 - DNA, 25 bp, Homo sapien
ctctgcaggatacgctcagtttcaa

SEQ ID NO: 1079856 - DNA, 25 bp, Homo sapien
agttgacttctcatattccccctta

SEQ ID NO: 1079857 - DNA, 25 bp, Homo sapien
agaataagacgtaagcaatgagctc

SEQ ID NO: 1079858 - DNA, 25 bp, Homo sapien
aaagggcaccaagcgtgtagctgga

SEQ ID NO: 1079859 - DNA, 25 bp, Homo sapien
cacaagcgctctagattccaggaaa

SEQ ID NO: 1079860 - DNA, 25 bp, Homo sapien
gaaggctgagtctgtcacaagcgct

SEQ ID NO: 1079861 - DNA, 25 bp, Homo sapien
tgttagcacggctctgtggatatac

SEQ ID NO: 1079862 - DNA, 25 bp, Homo sapien
aaaatgggccctgacggcaaatggc

SEQ ID NO: 1079863 - DNA, 25 bp, Homo sapien
ttgccctagggatacgggtgactga

SEQ ID NO: 1079864 - DNA, 25 bp, Homo sapien
caggacatgcaaatctacggtgaca

SEQ ID NO: 1079865 - DNA, 25 bp, Homo sapien
gcaccaagatgatgtaaggcccaag

SEQ ID NO: 1079866 - DNA, 25 bp, Homo sapien
aaggagacgccatatgatgttgaag

SEQ ID NO: 1079867 - DNA, 25 bp, Homo sapien
tctacatttctatactaagcagctg

SEQ ID NO: 1079868 - DNA, 25 bp, Homo sapien
tatggctgtttcctacaacataagc

SEQ ID NO: 1079869 - DNA, 25 bp, Homo sapien
ctgcaacacaagaggacaagttcat

SEQ ID NO: 1079870 - DNA, 25 bp, Homo sapien
gcctagtgtttgtccagcggagtca

SEQ ID NO: 1079871 - DNA, 25 bp, Homo sapien
cctagtgtttgtccagcggagtcaa

SEQ ID NO: 1079872 - DNA, 25 bp, Homo sapien
tactgagccccagaatggaatttca

SEQ ID NO: 1079873 - DNA, 25 bp, Homo sapien
tgatgagcctaacatgctactggca

SEQ ID NO: 1079874 - DNA, 25 bp, Homo sapien
gaatacggttgtacatgatgagcct

SEQ ID NO: 1079875 - DNA, 25 bp, Homo sapien
attctgacgtgcagttgggagcacc

SEQ ID NO: 1079876 - DNA, 25 bp, Homo sapien
gagtcactggcgtctgtctgctcca

SEQ ID NO: 1079877 - DNA, 25 bp, Homo sapien
ctgagtcactggcgtctgtctgctc

SEQ ID NO: 1079878 - DNA, 25 bp, Homo sapien
tgagtcactggcgtctgtctgctcc

SEQ ID NO: 1079879 - DNA, 25 bp, Homo sapien
agtcactggcgtctgtctgctccat

SEQ ID NO: 1079880 - DNA, 25 bp, Homo sapien
tggcagaccctacgaggcttttctt

SEQ ID NO: 1079881 - DNA, 25 bp, Homo sapien
gctgaagcctggcagaccctacgag

SEQ ID NO: 1079882 - DNA, 25 bp, Homo sapien
gaagcctggcagaccctacgaggct

SEQ ID NO: 1079883 - DNA, 25 bp, Homo sapien
gaccctacgaggcttttcttgaggc

SEQ ID NO: 1079884 - DNA, 25 bp, Homo sapien
gagtcgttctgcaaggccaattaag

SEQ ID NO: 1079885 - DNA, 25 bp, Homo sapien
caggagtcgttctgcaaggccaatt

SEQ ID NO: 1079886 - DNA, 25 bp, Homo sapien
ctcccaggagtcgttctgcaaggcc

SEQ ID NO: 1079887 - DNA, 25 bp, Homo sapien
gtcgttctgcaaggccaattaaggc

SEQ ID NO: 1079888 - DNA, 25 bp, Homo sapien
tgaaaaagaaaagcagaaaatgtca

SEQ ID NO: 1079889 - DNA, 25 bp, Homo sapien
ctgaaaaagaaaagcagaaaatgtc

SEQ ID NO: 1079890 - DNA, 25 bp, Homo sapien
caggaggaagcccaaccgatcatac

SEQ ID NO: 1079891 - DNA, 25 bp, Homo sapien
aggaggaagcccaaccgatcatact

SEQ ID NO: 1079892 - DNA, 25 bp, Homo sapien
ttttggaatatcactagacataagg

SEQ ID NO: 1079893 - DNA, 25 bp, Homo sapien
ttgtagcagtatcatgtttagttac

SEQ ID NO: 1079894 - DNA, 25 bp, Homo sapien
tagatgcagctgtaagtcattaccc

SEQ ID NO: 1079895 - DNA, 25 bp, Homo sapien
ccaatgatgagaagggtatgtccta

SEQ ID NO: 1079896 - DNA, 25 bp, Homo sapien
caccgtgcagagagtcctcggtgag

SEQ ID NO: 1079897 - DNA, 25 bp, Homo sapien
agtaattttttaggctctccaggtg

SEQ ID NO: 1079898 - DNA, 25 bp, Homo sapien
gcagtcaaggccaaaaaccaccgtg

SEQ ID NO: 1079899 - DNA, 25 bp, Homo sapien
atcagtaattttttaggctctccag

SEQ ID NO: 1079900 - DNA, 25 bp, Homo sapien
aaggctgtgtcctcgctcagtgact

SEQ ID NO: 1079901 - DNA, 25 bp, Homo sapien
aggctgtgtcctcgctcagtgactt

SEQ ID NO: 1079902 - DNA, 25 bp, Homo sapien
caatatgtgcaagggtccaaagcag

SEQ ID NO: 1079903 - DNA, 25 bp, Homo sapien
tctcagccgaggatacaatatgtgc

SEQ ID NO: 1079904 - DNA, 25 bp, Homo sapien
gatgaatgacatgcactagtccaag

SEQ ID NO: 1079905 - DNA, 25 bp, Homo sapien
catggtcttgctgctaggacaagga

SEQ ID NO: 1079906 - DNA, 25 bp, Homo sapien
aggtctcaggaaggatagcgcagcc

SEQ ID NO: 1079907 - DNA, 25 bp, Homo sapien
atgaaatgatgtatccagcatgagc

SEQ ID NO: 1079908 - DNA, 25 bp, Homo sapien
catctttgagatactcccaggtctc

SEQ ID NO: 1079909 - DNA, 25 bp, Homo sapien
tgtgttcatgaccaacaaagcagtc

SEQ ID NO: 1079910 - DNA, 25 bp, Homo sapien
catctacgacaaatgctgaagcact

SEQ ID NO: 1079911 - DNA, 25 bp, Homo sapien
gcactgtcaaatgtcttctatcact

SEQ ID NO: 1079912 - DNA, 25 bp, Homo sapien
ctacgacaaatgctgaagcactgtc

SEQ ID NO: 1079913 - DNA, 25 bp, Homo sapien
gccatctacgacaaatgctgaagca

SEQ ID NO: 1079914 - DNA, 25 bp, Homo sapien
gtgggctgtgccaatccattctacc

SEQ ID NO: 1079915 - DNA, 25 bp, Homo sapien
ggcttccaatgtagactcaggtttc

SEQ ID NO: 1079916 - DNA, 25 bp, Homo sapien
taccctagacatcactgactctttg

SEQ ID NO: 1079917 - DNA, 25 bp, Homo sapien
tgctctttgtggcttccaatgtaga

SEQ ID NO: 1079918 - DNA, 25 bp, Homo sapien
tccaaggtctgctgggtcttgcttg

SEQ ID NO: 1079919 - DNA, 25 bp, Homo sapien
tcttgcttgcattgtcaccagtttc

SEQ ID NO: 1079920 - DNA, 25 bp, Homo sapien
aaggtctgctgggtcttgcttgcat

SEQ ID NO: 1079921 - DNA, 25 bp, Homo sapien
ttgtcaccagtttcatcatctaccc

SEQ ID NO: 1079922 - DNA, 25 bp, Homo sapien
tccttaaggacaacttctgtctcct

SEQ ID NO: 1079923 - DNA, 25 bp, Homo sapien
agatcctctcaagccccaagatgga

SEQ ID NO: 1079924 - DNA, 25 bp, Homo sapien
atagatcctctcaagccccaagatg

SEQ ID NO: 1079925 - DNA, 25 bp, Homo sapien
tcctctgactgccacctgtctgacc

SEQ ID NO: 1079926 - DNA, 25 bp, Homo sapien
cccaaccctaaaggaatagatagat

SEQ ID NO: 1079927 - DNA, 25 bp, Homo sapien
cattccctacaatcagcacttcagg

SEQ ID NO: 1079928 - DNA, 25 bp, Homo sapien
gataaggtgtttaaaccttgaatca

SEQ ID NO: 1079929 - DNA, 25 bp, Homo sapien
caggcccctggatggtatctgtaaa

SEQ ID NO: 1079930 - DNA, 25 bp, Homo sapien
cctctgaaaagtttgcgtacttggt

SEQ ID NO: 1079931 - DNA, 25 bp, Homo sapien
ggaagatggccgtcatcaaggctga

SEQ ID NO: 1079932 - DNA, 25 bp, Homo sapien
tctgaaaagtttgcgtacttggtgg

SEQ ID NO: 1079933 - DNA, 25 bp, Homo sapien
ccgtcatcaaggctgaagcatagcc

SEQ ID NO: 1079934 - DNA, 25 bp, Homo sapien
gcttgcatgcggcaaccatgtaggt

SEQ ID NO: 1079935 - DNA, 25 bp, Homo sapien
ctggatacctggcttgcatgcggca

SEQ ID NO: 1079936 - DNA, 25 bp, Homo sapien
cctggcttgcatgcggcaaccatgt

SEQ ID NO: 1079937 - DNA, 25 bp, Homo sapien
tgcggcaaccatgtaggttatcctt

SEQ ID NO: 1079938 - DNA, 25 bp, Homo sapien
aaaagtttctttggccactgatact

SEQ ID NO: 1079939 - DNA, 25 bp, Homo sapien
gtttctttggccactgatactaggt

SEQ ID NO: 1079940 - DNA, 25 bp, Homo sapien
caaaaaagtttctttggccactgat

SEQ ID NO: 1079941 - DNA, 25 bp, Homo sapien
aagtttctttggccactgatactag

SEQ ID NO: 1079942 - DNA, 25 bp, Homo sapien
gcacttcagctccttttccacacca

SEQ ID NO: 1079943 - DNA, 25 bp, Homo sapien
cttcagctccttttccacaccaagg

SEQ ID NO: 1079944 - DNA, 25 bp, Homo sapien
acttcagctccttttccacaccaag

SEQ ID NO: 1079945 - DNA, 25 bp, Homo sapien
cagcacttcagctccttttccacac

SEQ ID NO: 1079946 - DNA, 25 bp, Homo sapien
tggtggtccaagtgcccagacaatc

SEQ ID NO: 1079947 - DNA, 25 bp, Homo sapien
gaaggaacgaaatgaccctgacagt

SEQ ID NO: 1079948 - DNA, 25 bp, Homo sapien
gactgagtcgtataggcttgcaaaa

SEQ ID NO: 1079949 - DNA, 25 bp, Homo sapien
gactgctcacgttagaaaagaaagg

SEQ ID NO: 1079950 - DNA, 25 bp, Homo sapien
aaagctgtgagaactttcagtctcc

SEQ ID NO: 1079951 - DNA, 25 bp, Homo sapien
caagatcacatagcctgtgaagtga

SEQ ID NO: 1079952 - DNA, 25 bp, Homo sapien
ctaaaggctctgctaggtgttggca

SEQ ID NO: 1079953 - DNA, 25 bp, Homo sapien
tagaccatgcctctatgtgagaagt

SEQ ID NO: 1079954 - DNA, 25 bp, Homo sapien
tctggcggagcacatatgcctggat

SEQ ID NO: 1079955 - DNA, 25 bp, Homo sapien
tggcggagcacatatgcctggatat

SEQ ID NO: 1079956 - DNA, 25 bp, Homo sapien
tcacctctggcggagcacatatgcc

SEQ ID NO: 1079957 - DNA, 25 bp, Homo sapien
tgtttttgtctccatgcaccatttc

SEQ ID NO: 1079958 - DNA, 25 bp, Homo sapien
ctttcccagcatagttcaggcatca

SEQ ID NO: 1079959 - DNA, 25 bp, Homo sapien
gacgtctccccagtcaatctctcat

SEQ ID NO: 1079960 - DNA, 25 bp, Homo sapien
catagttcaggcatcagacttcacc

SEQ ID NO: 1079961 - DNA, 25 bp, Homo sapien
atcactcctccagctgaagggcctt

SEQ ID NO: 1079962 - DNA, 25 bp, Homo sapien
cctcacacagctcaggaggagggcc

SEQ ID NO: 1079963 - DNA, 25 bp, Homo sapien
ctggctgggagcctcacacagctca

SEQ ID NO: 1079964 - DNA, 25 bp, Homo sapien
ctcacacagctcaggaggagggcca

SEQ ID NO: 1079965 - DNA, 25 bp, Homo sapien
ctgcttgctcctggctgggagcctc

SEQ ID NO: 1079966 - DNA, 25 bp, Homo sapien
ttcaaactatgttcggaagttgtcc

SEQ ID NO: 1079967 - DNA, 25 bp, Homo sapien
gaaacttccgcatactaagcccttg

SEQ ID NO: 1079968 - DNA, 25 bp, Homo sapien
ttgtccagtgtaggaaacttccgca

SEQ ID NO: 1079969 - DNA, 25 bp, Homo sapien
tcggaagttgtccagtgtaggaaac

SEQ ID NO: 1079970 - DNA, 25 bp, Homo sapien
cagaagagtcttttcagatgtcatt

SEQ ID NO: 1079971 - DNA, 25 bp, Homo sapien
gacttgtgcgaagaaatgtcatcaa

SEQ ID NO: 1079972 - DNA, 25 bp, Homo sapien
tctgtttgtctataaccctggtcca

SEQ ID NO: 1079973 - DNA, 25 bp, Homo sapien
tctgaagcttttcgtgacttgtgcg

SEQ ID NO: 1079974 - DNA, 25 bp, Homo sapien
ttttatgtgcactgcttagacaaga

SEQ ID NO: 1079975 - DNA, 25 bp, Homo sapien
ctcagtcgctgtttttatgtgcact

SEQ ID NO: 1079976 - DNA, 25 bp, Homo sapien
tttatgtgcactgcttagacaagaa

SEQ ID NO: 1079977 - DNA, 25 bp, Homo sapien
tcagtcgctgtttttatgtgcactg

SEQ ID NO: 1079978 - DNA, 25 bp, Homo sapien
atgccatgaaggttcgaaccttctc

SEQ ID NO: 1079979 - DNA, 25 bp, Homo sapien
catgccatgaaggttcgaaccttct

SEQ ID NO: 1079980 - DNA, 25 bp, Homo sapien
tgccatgaaggttcgaaccttctca

SEQ ID NO: 1079981 - DNA, 25 bp, Homo sapien
tacggccctagtccaaataatcatt

SEQ ID NO: 1079982 - DNA, 25 bp, Homo sapien
ccattctctcgaggaggccaggatg

SEQ ID NO: 1079983 - DNA, 25 bp, Homo sapien
atttctggaccactatgatggtcaa

SEQ ID NO: 1079984 - DNA, 25 bp, Homo sapien
accactatgatggtcaatgtgcagc

SEQ ID NO: 1079985 - DNA, 25 bp, Homo sapien
catgtcctgtgctgtgctctagtct

SEQ ID NO: 1079986 - DNA, 25 bp, Homo sapien
ttcccctccttgtatcattgattgc

SEQ ID NO: 1079987 - DNA, 25 bp, Homo sapien
tgttccctcaacatgtcctgtgctg

SEQ ID NO: 1079988 - DNA, 25 bp, Homo sapien
ctccttgtatcattgattgcagctg

SEQ ID NO: 1079989 - DNA, 25 bp, Homo sapien
tctagcccacttgcgaaaggagtca

SEQ ID NO: 1079990 - DNA, 25 bp, Homo sapien
caaaaggcggcacgaactcccggat

SEQ ID NO: 1079991 - DNA, 25 bp, Homo sapien
cttgacctttgatcccaaaaggcgg

SEQ ID NO: 1079992 - DNA, 25 bp, Homo sapien
gaactcccggattctagcccacttg

SEQ ID NO: 1079993 - DNA, 25 bp, Homo sapien
ggtgggctttaggaaaggcaacaga

SEQ ID NO: 1079994 - DNA, 25 bp, Homo sapien
gtgggctttaggaaaggcaacagat

SEQ ID NO: 1079995 - DNA, 25 bp, Homo sapien
gggtcaggcggtactctttggtgac

SEQ ID NO: 1079996 - DNA, 25 bp, Homo sapien
tttggtgactgacaagatggctttg

SEQ ID NO: 1079997 - DNA, 25 bp, Homo sapien
tcaggcggtactctttggtgactga

SEQ ID NO: 1079998 - DNA, 25 bp, Homo sapien
ttggtgactgacaagatggctttga

SEQ ID NO: 1079999 - DNA, 25 bp, Homo sapien
gaagaagaccaatgggcttctggca

SEQ ID NO: 1080000 - DNA, 25 bp, Homo sapien
aagaagaccaatgggcttctggcag

SEQ ID NO: 1080001 - DNA, 25 bp, Homo sapien
agacttgttggcaagaacgcctcca

SEQ ID NO: 1080002 - DNA, 25 bp, Homo sapien
aattcgtgaccccagagacttgttg

SEQ ID NO: 1080003 - DNA, 25 bp, Homo sapien
ttgcccacgatgatgcagcggcggc

SEQ ID NO: 1080004 - DNA, 25 bp, Homo sapien
ccacaatgtcatagtcgtcaattcg

SEQ ID NO: 1080005 - DNA, 25 bp, Homo sapien
tcgtactgctcaggccgctgcatgg

SEQ ID NO: 1080006 - DNA, 25 bp, Homo sapien
cagtgtcgttttgctgcccacgtcc

SEQ ID NO: 1080007 - DNA, 25 bp, Homo sapien
cttgaagccggcgaggacaaagaga

SEQ ID NO: 1080008 - DNA, 25 bp, Homo sapien
caaagagagaatcgcgctcgtactg

SEQ ID NO: 1080009 - DNA, 25 bp, Homo sapien
caagttcacggatgtccctgtaggc

SEQ ID NO: 1080010 - DNA, 25 bp, Homo sapien
agttcacggatgtccctgtaggccc

SEQ ID NO: 1080011 - DNA, 25 bp, Homo sapien
gcctggacaagttcacggatgtccc

SEQ ID NO: 1080012 - DNA, 25 bp, Homo sapien
tggacaagttcacggatgtccctgt

SEQ ID NO: 1080013 - DNA, 25 bp, Homo sapien
tctctcttgcttgctacctacttga

SEQ ID NO: 1080014 - DNA, 25 bp, Homo sapien
ttgacactgcctgtacttggccttg

SEQ ID NO: 1080015 - DNA, 25 bp, Homo sapien
tgctacctacttgacactgcctgta

SEQ ID NO: 1080016 - DNA, 25 bp, Homo sapien
ctgcctgtacttggccttgcttggg

SEQ ID NO: 1080017 - DNA, 25 bp, Homo sapien
accttggctgtagcttctctcccat

SEQ ID NO: 1080018 - DNA, 25 bp, Homo sapien
ttggctgtagcttctctcccatggg

SEQ ID NO: 1080019 - DNA, 25 bp, Homo sapien
ttcagtccctggtactggactggct

SEQ ID NO: 1080020 - DNA, 25 bp, Homo sapien
ccatgggtgacattcagtccctggt

SEQ ID NO: 1080021 - DNA, 25 bp, Homo sapien
ggcaagctatcaagctgttaaatat

SEQ ID NO: 1080022 - DNA, 25 bp, Homo sapien
ttctagcaccgtgcgaggctgaggt

SEQ ID NO: 1080023 - DNA, 25 bp, Homo sapien
atatctgaaagttatgaggcaagct

SEQ ID NO: 1080024 - DNA, 25 bp, Homo sapien
gctgttaaatatattctagcaccgt

SEQ ID NO: 1080025 - DNA, 25 bp, Homo sapien
gatacgttcaaggtcaagcagcctg

SEQ ID NO: 1080026 - DNA, 25 bp, Homo sapien
tcagggtacacgcacagctggtgag

SEQ ID NO: 1080027 - DNA, 25 bp, Homo sapien
tcccaaggtgaaacgatacgacacg

SEQ ID NO: 1080028 - DNA, 25 bp, Homo sapien
cactaagggagctctcaggagtctc

SEQ ID NO: 1080029 - DNA, 25 bp, Homo sapien
caaaggtcagttcaaacattggaac

SEQ ID NO: 1080030 - DNA, 25 bp, Homo sapien
gctgagcaagccgaccccagttttt

SEQ ID NO: 1080031 - DNA, 25 bp, Homo sapien
tggtgggagacagtaggaaacggac

SEQ ID NO: 1080032 - DNA, 25 bp, Homo sapien
gaaccttgtggcaaacttctgtttc

SEQ ID NO: 1080033 - DNA, 25 bp, Homo sapien
tcctttggtggattgtctctgttcc

SEQ ID NO: 1080034 - DNA, 25 bp, Homo sapien
gctgctcctttggtggattgtctct

SEQ ID NO: 1080035 - DNA, 25 bp, Homo sapien
tgctcctttggtggattgtctctgt

SEQ ID NO: 1080036 - DNA, 25 bp, Homo sapien
ctcctttggtggattgtctctgttc

SEQ ID NO: 1080037 - DNA, 25 bp, Homo sapien
aaagaatgtcacagttatcaaaatg

SEQ ID NO: 1080038 - DNA, 25 bp, Homo sapien
tgtaaaagaatgtcacagttatcaa

SEQ ID NO: 1080039 - DNA, 25 bp, Homo sapien
taaaagaatgtcacagttatcaaaa

SEQ ID NO: 1080040 - DNA, 25 bp, Homo sapien
aagaatgtcacagttatcaaaatga

SEQ ID NO: 1080041 - DNA, 25 bp, Homo sapien
gtggacacagcaaaagcgggcctca

SEQ ID NO: 1080042 - DNA, 25 bp, Homo sapien
tgaggcgggagcatgaggcgtttaa

SEQ ID NO: 1080043 - DNA, 25 bp, Homo sapien
gcatgaggcgtttaatggggaaccc

SEQ ID NO: 1080044 - DNA, 25 bp, Homo sapien
cagggaccccaagtagggacagtga

SEQ ID NO: 1080045 - DNA, 25 bp, Homo sapien
cactcgagtggccacagatttccag

SEQ ID NO: 1080046 - DNA, 25 bp, Homo sapien
tcgagtggccacagatttccagaag

SEQ ID NO: 1080047 - DNA, 25 bp, Homo sapien
ggctccttgggcactcgagtggcca

SEQ ID NO: 1080048 - DNA, 25 bp, Homo sapien
ttgggcactcgagtggccacagatt

SEQ ID NO: 1080049 - DNA, 25 bp, Homo sapien
gatgaaatatgggttgaggattcga

SEQ ID NO: 1080050 - DNA, 25 bp, Homo sapien
gaaatatgggttgaggattcgaatc

SEQ ID NO: 1080051 - DNA, 25 bp, Homo sapien
tgaaatatgggttgaggattcgaat

SEQ ID NO: 1080052 - DNA, 25 bp, Homo sapien
ctggatgaaatatgggttgaggatt

SEQ ID NO: 1080053 - DNA, 25 bp, Homo sapien
ggcccatgaggccattgttgaaggg

SEQ ID NO: 1080054 - DNA, 25 bp, Homo sapien
ccccggcccatgaggccattgttga

SEQ ID NO: 1080055 - DNA, 25 bp, Homo sapien
ccatgaggccattgttgaagggcag

SEQ ID NO: 1080056 - DNA, 25 bp, Homo sapien
cccggcccatgaggccattgttgaa

SEQ ID NO: 1080057 - DNA, 25 bp, Homo sapien
tcactgccacactgccaagggtagg

SEQ ID NO: 1080058 - DNA, 25 bp, Homo sapien
atggctgccatgcgaacggtctcat

SEQ ID NO: 1080059 - DNA, 25 bp, Homo sapien
tcgtcacagccgtgtagtgccatgg

SEQ ID NO: 1080060 - DNA, 25 bp, Homo sapien
gttgggtgtgctcatgtcatagcca

SEQ ID NO: 1080061 - DNA, 25 bp, Homo sapien
tctcatagtagtgcaggggtgcgtt

SEQ ID NO: 1080062 - DNA, 25 bp, Homo sapien
gcaagcggagttcagaagggttcag

SEQ ID NO: 1080063 - DNA, 25 bp, Homo sapien
caaagcagaagtgtggcaagcggag

SEQ ID NO: 1080064 - DNA, 25 bp, Homo sapien
ttcaggctgggatcagtggaaggct

SEQ ID NO: 1080065 - DNA, 25 bp, Homo sapien
agctgttgaagaactggcccaagat

SEQ ID NO: 1080066 - DNA, 25 bp, Homo sapien
aaggcaatccctaggtcttactgag

SEQ ID NO: 1080067 - DNA, 25 bp, Homo sapien
taagtaaacgtagaagccaggaggc

SEQ ID NO: 1080068 - DNA, 25 bp, Homo sapien
tgaaccctatccgagacaacaggag

SEQ ID NO: 1080069 - DNA, 25 bp, Homo sapien
cagaaagcccattgcgatttggcca

SEQ ID NO: 1080070 - DNA, 25 bp, Homo sapien
ttgctcaaacctttactgccccttc

SEQ ID NO: 1080071 - DNA, 25 bp, Homo sapien
ggctcggtgccttcttcgtcaccac

SEQ ID NO: 1080072 - DNA, 25 bp, Homo sapien
actctccaatactccgtgactgtgg

SEQ ID NO: 1080073 - DNA, 25 bp, Homo sapien
gatgaagtgatcagttgggcctttg

SEQ ID NO: 1080074 - DNA, 25 bp, Homo sapien
tttctctcgctggatattgtgcgtc

SEQ ID NO: 1080075 - DNA, 25 bp, Homo sapien
ctcgctggatattgtgcgtccagga

SEQ ID NO: 1080076 - DNA, 25 bp, Homo sapien
ctctttctctcgctggatattgtgc

SEQ ID NO: 1080077 - DNA, 25 bp, Homo sapien
tctctcgctggatattgtgcgtcca

SEQ ID NO: 1080078 - DNA, 25 bp, Homo sapien
tccttctctgggtctgaagactcct

SEQ ID NO: 1080079 - DNA, 25 bp, Homo sapien
aatgaggctgagtgctggtctctga

SEQ ID NO: 1080080 - DNA, 25 bp, Homo sapien
tcaaggacccatgctgaatgaggct

SEQ ID NO: 1080081 - DNA, 25 bp, Homo sapien
ccaggagcctgctggccctctggca

SEQ ID NO: 1080082 - DNA, 25 bp, Homo sapien
tgccccacagggagctaacaggtaa

SEQ ID NO: 1080083 - DNA, 25 bp, Homo sapien
ttggtccaggctaaaggcagaaccc

SEQ ID NO: 1080084 - DNA, 25 bp, Homo sapien
gctgaaacctagaacatgtggcaag

SEQ ID NO: 1080085 - DNA, 25 bp, Homo sapien
gcttgggtaagctccttgggcctca

SEQ ID NO: 1080086 - DNA, 25 bp, Homo sapien
cacttgcaaacacgggagtcactgg

SEQ ID NO: 1080087 - DNA, 25 bp, Homo sapien
gcttggagtacggacacacttgcaa

SEQ ID NO: 1080088 - DNA, 25 bp, Homo sapien
ctgcttagggcttggagtacggaca

SEQ ID NO: 1080089 - DNA, 25 bp, Homo sapien
aagtgggtactgagggctgaaggca

SEQ ID NO: 1080090 - DNA, 25 bp, Homo sapien
gagcgaggggtaagccggtccctgc

SEQ ID NO: 1080091 - DNA, 25 bp, Homo sapien
cccgattcttctctcagcggccagt

SEQ ID NO: 1080092 - DNA, 25 bp, Homo sapien
ggctgactgctggtacgtgcagatt

SEQ ID NO: 1080093 - DNA, 25 bp, Homo sapien
gccgagggcgggagaaagtgagtga

SEQ ID NO: 1080094 - DNA, 25 bp, Homo sapien
gcccctcggatatggagagtagaga

SEQ ID NO: 1080095 - DNA, 25 bp, Homo sapien
agtttgtagactcgcgaagtagaga

SEQ ID NO: 1080096 - DNA, 25 bp, Homo sapien
gagaggcacggaaaccgggagttga

SEQ ID NO: 1080097 - DNA, 25 bp, Homo sapien
tagagaactcgagcggtggagaggc

SEQ ID NO: 1080098 - DNA, 25 bp, Homo sapien
ccgccgcagccgtccggtgtcaaat

SEQ ID NO: 1080099 - DNA, 25 bp, Homo sapien
gccgccgcagccgtccggtgtcaaa

SEQ ID NO: 1080100 - DNA, 25 bp, Homo sapien
gccgcagccgtccggtgtcaaattc

SEQ ID NO: 1080101 - DNA, 25 bp, Homo sapien
cgccgcagccgtccggtgtcaaatt

SEQ ID NO: 1080102 - DNA, 25 bp, Homo sapien
gcccgagggacctgctgctggcgga

SEQ ID NO: 1080103 - DNA, 25 bp, Homo sapien
gggctggggcccgagggacctgctg

SEQ ID NO: 1080104 - DNA, 25 bp, Homo sapien
ccaggcccgggtggcagcgagggct

SEQ ID NO: 1080105 - DNA, 25 bp, Homo sapien
tgtctgggggccgggcccaactcca

SEQ ID NO: 1080106 - DNA, 25 bp, Homo sapien
gcagcgggagcctcacattacagtg

SEQ ID NO: 1080107 - DNA, 25 bp, Homo sapien
gcacagtccaacaagcgacaagagg

SEQ ID NO: 1080108 - DNA, 25 bp, Homo sapien
tcacattacagtgggccggcaaggc

SEQ ID NO: 1080109 - DNA, 25 bp, Homo sapien
tccaacaagcgacaagagggactga

SEQ ID NO: 1080110 - DNA, 25 bp, Homo sapien
tagccaaaagtgtggccttggcagc

SEQ ID NO: 1080111 - DNA, 25 bp, Homo sapien
cgaagctcaaacagcgcatgcccag

SEQ ID NO: 1080112 - DNA, 25 bp, Homo sapien
tttagccaaaagtgtggccttggca

SEQ ID NO: 1080113 - DNA, 25 bp, Homo sapien
ccaggactgtacacctggcagtgcc

SEQ ID NO: 1080114 - DNA, 25 bp, Homo sapien
ggtcctgcaccttgttcttctaggc

SEQ ID NO: 1080115 - DNA, 25 bp, Homo sapien
ggggtcctgcaccttgttcttctag

SEQ ID NO: 1080116 - DNA, 25 bp, Homo sapien
cacggggtcctgcaccttgttcttc

SEQ ID NO: 1080117 - DNA, 25 bp, Homo sapien
tcctgcaccttgttcttctaggcac

SEQ ID NO: 1080118 - DNA, 25 bp, Homo sapien
ggaatcaaggcctccgagccaggcc

SEQ ID NO: 1080119 - DNA, 25 bp, Homo sapien
cttggctaagtggaatcaaggcctc

SEQ ID NO: 1080120 - DNA, 25 bp, Homo sapien
gagccaggccagtgactgttgtccg

SEQ ID NO: 1080121 - DNA, 25 bp, Homo sapien
gccagtgactgttgtccgtgatgga

SEQ ID NO: 1080122 - DNA, 25 bp, Homo sapien
cctgagttctctcctctgactatag

SEQ ID NO: 1080123 - DNA, 25 bp, Homo sapien
gtgggagctaatgggccctctgaaa

SEQ ID NO: 1080124 - DNA, 25 bp, Homo sapien
ggatggtgggagctaatgggccctc

SEQ ID NO: 1080125 - DNA, 25 bp, Homo sapien
tctgactataggtgtccctcgatga

SEQ ID NO: 1080126 - DNA, 25 bp, Homo sapien
tctgcgttgtaggtctggagatgcc

SEQ ID NO: 1080127 - DNA, 25 bp, Homo sapien
gacacacttggtcctacagaggcct

SEQ ID NO: 1080128 - DNA, 25 bp, Homo sapien
tggaaggagttatagctggacacac

SEQ ID NO: 1080129 - DNA, 25 bp, Homo sapien
gaagtagctgcactgggaaccttac

SEQ ID NO: 1080130 - DNA, 25 bp, Homo sapien
catcagccattgttgagctgttccc

SEQ ID NO: 1080131 - DNA, 25 bp, Homo sapien
tatcaacaccaggagcgcccatcag

SEQ ID NO: 1080132 - DNA, 25 bp, Homo sapien
gagcgcccatcagccattgttgagc

SEQ ID NO: 1080133 - DNA, 25 bp, Homo sapien
accaggagcgcccatcagccattgt

SEQ ID NO: 1080134 - DNA, 25 bp, Homo sapien
gagaggcctccaagtccaagttcca

SEQ ID NO: 1080135 - DNA, 25 bp, Homo sapien
agaggcctccaagtccaagttccat

SEQ ID NO: 1080136 - DNA, 25 bp, Homo sapien
gcctttcctcagtaccaggtaggag

SEQ ID NO: 1080137 - DNA, 25 bp, Homo sapien
cagtcaagccgcctttcctcagtac

SEQ ID NO: 1080138 - DNA, 25 bp, Homo sapien
cagtaccaggtaggagtcactggga

SEQ ID NO: 1080139 - DNA, 25 bp, Homo sapien
ggtaggagtcactgggagaaccact

SEQ ID NO: 1080140 - DNA, 25 bp, Homo sapien
aatcacctgagtgcaccgaccattc

SEQ ID NO: 1080141 - DNA, 25 bp, Homo sapien
gtataatgggtttgctgcctctggg

SEQ ID NO: 1080142 - DNA, 25 bp, Homo sapien
aagggcctaggttccagtataatgg

SEQ ID NO: 1080143 - DNA, 25 bp, Homo sapien
gaccattcagagaagtcccgctcct

SEQ ID NO: 1080144 - DNA, 25 bp, Homo sapien
gggctgtcctcgggctgagatcagg

SEQ ID NO: 1080145 - DNA, 25 bp, Homo sapien
ctgtcctcgggctgagatcaggccg

SEQ ID NO: 1080146 - DNA, 25 bp, Homo sapien
ggacctcaaggaggggctgtcctcg

SEQ ID NO: 1080147 - DNA, 25 bp, Homo sapien
gagaaagagggcacccaggtgggct

SEQ ID NO: 1080148 - DNA, 25 bp, Homo sapien
ccagggaggcctctgcgacgctgct

SEQ ID NO: 1080149 - DNA, 25 bp, Homo sapien
agggaggcctctgcgacgctgctca

SEQ ID NO: 1080150 - DNA, 25 bp, Homo sapien
gaggcctctgcgacgctgctcagca

SEQ ID NO: 1080151 - DNA, 25 bp, Homo sapien
gccagagcggccagggtgggccaca

SEQ ID NO: 1080152 - DNA, 25 bp, Homo sapien
cgccaggacaggcggggggccttcg

SEQ ID NO: 1080153 - DNA, 25 bp, Homo sapien
gccaggacaggcggggggccttcgc

SEQ ID NO: 1080154 - DNA, 25 bp, Homo sapien
ctggaatgagacccagtcacgcgcg

SEQ ID NO: 1080155 - DNA, 25 bp, Homo sapien
ggaatgagacccagtcacgcgcggt

SEQ ID NO: 1080156 - DNA, 25 bp, Homo sapien
aatgagacccagtcacgcgcggtgt

SEQ ID NO: 1080157 - DNA, 25 bp, Homo sapien
atgagacccagtcacgcgcggtgtc

SEQ ID NO: 1080158 - DNA, 25 bp, Homo sapien
gggcgcgggccgagaaggctgcggc

SEQ ID NO: 1080159 - DNA, 25 bp, Homo sapien
gcggccgccgggctcttccactgca

SEQ ID NO: 1080160 - DNA, 25 bp, Homo sapien
cccgctgcccgagcgcggctgcccg

SEQ ID NO: 1080161 - DNA, 25 bp, Homo sapien
tccactgcaccagcgggccgtgcgt

SEQ ID NO: 1080162 - DNA, 25 bp, Homo sapien
cagaagcggaaacgcaccagctcgt

SEQ ID NO: 1080163 - DNA, 25 bp, Homo sapien
gcggtccacggttctccaggtgctg

SEQ ID NO: 1080164 - DNA, 25 bp, Homo sapien
tgctgttgacgtccatgaaggagac

SEQ ID NO: 1080165 - DNA, 25 bp, Homo sapien
tgaaggagaccgcttcgtagcgcgt

SEQ ID NO: 1080166 - DNA, 25 bp, Homo sapien
caccggtaagggtccagtctgcaaa

SEQ ID NO: 1080167 - DNA, 25 bp, Homo sapien
tccgaagggctccatagctgaggtc

SEQ ID NO: 1080168 - DNA, 25 bp, Homo sapien
aaatgctgtccctacagggcctggg

SEQ ID NO: 1080169 - DNA, 25 bp, Homo sapien
catgagtgagtacaggccagttcca

SEQ ID NO: 1080170 - DNA, 25 bp, Homo sapien
gcctgtcacccctccagttgtattt

SEQ ID NO: 1080171 - DNA, 25 bp, Homo sapien
caggactttgcttaccttaggttca

SEQ ID NO: 1080172 - DNA, 25 bp, Homo sapien
tacatttaagtgctaggagcaggac

SEQ ID NO: 1080173 - DNA, 25 bp, Homo sapien
aaagtgcaaagagctccgtagtttt

SEQ ID NO: 1080174 - DNA, 25 bp, Homo sapien
caaaattggtgctcttaggagaccc

SEQ ID NO: 1080175 - DNA, 25 bp, Homo sapien
gaaaccgagtccctggctcttgagg

SEQ ID NO: 1080176 - DNA, 25 bp, Homo sapien
tgagctctcggctgctatgaacagg

SEQ ID NO: 1080177 - DNA, 25 bp, Homo sapien
gatgcagctccgctagtctagggcg

SEQ ID NO: 1080178 - DNA, 25 bp, Homo sapien
cagtgaagtccaaggctggtgctgc

SEQ ID NO: 1080179 - DNA, 25 bp, Homo sapien
cgttctccacagtgaagtccaaggc

SEQ ID NO: 1080180 - DNA, 25 bp, Homo sapien
tctccacgttctccacagtgaagtc

SEQ ID NO: 1080181 - DNA, 25 bp, Homo sapien
cacagtgaagtccaaggctggtgct

SEQ ID NO: 1080182 - DNA, 25 bp, Homo sapien
aacagaggcgtgacttggtcctgca

SEQ ID NO: 1080183 - DNA, 25 bp, Homo sapien
tgagagcctgaaccttgcccatgct

SEQ ID NO: 1080184 - DNA, 25 bp, Homo sapien
tcagcgctctgcagtgtttcctggg

SEQ ID NO: 1080185 - DNA, 25 bp, Homo sapien
gtcctgctgatatcttgagagcctg

SEQ ID NO: 1080186 - DNA, 25 bp, Homo sapien
ctgagcaggtgctggccactctgga

SEQ ID NO: 1080187 - DNA, 25 bp, Homo sapien
tgagcaggtgctggccactctggat

SEQ ID NO: 1080188 - DNA, 25 bp, Homo sapien
gagcaggtgctggccactctggatc

SEQ ID NO: 1080189 - DNA, 25 bp, Homo sapien
aacacttgagcaccttctgacgcac

SEQ ID NO: 1080190 - DNA, 25 bp, Homo sapien
gatctctggtaccttgtcgggctgc

SEQ ID NO: 1080191 - DNA, 25 bp, Homo sapien
tctgacgcacacagctgggtgagct

SEQ ID NO: 1080192 - DNA, 25 bp, Homo sapien
gagtcgtaccatatctgccacagca

SEQ ID NO: 1080193 - DNA, 25 bp, Homo sapien
tggcattcacaatggcctccacact

SEQ ID NO: 1080194 - DNA, 25 bp, Homo sapien
cattcacaatggcctccacactgct

SEQ ID NO: 1080195 - DNA, 25 bp, Homo sapien
gatggcattcacaatggcctccaca

SEQ ID NO: 1080196 - DNA, 25 bp, Homo sapien
ggcattcacaatggcctccacactg

SEQ ID NO: 1080197 - DNA, 25 bp, Homo sapien
gaagaacaagtctgaggtcccagag

SEQ ID NO: 1080198 - DNA, 25 bp, Homo sapien
tcagttcaagtagccgaggcagggc

SEQ ID NO: 1080199 - DNA, 25 bp, Homo sapien
ttcaagaggcctggctccaatcggt

SEQ ID NO: 1080200 - DNA, 25 bp, Homo sapien
gatgtctttatgaccacagctgagg

SEQ ID NO: 1080201 - DNA, 25 bp, Homo sapien
cagcgatgcgacagatgccatggga

SEQ ID NO: 1080202 - DNA, 25 bp, Homo sapien
gagtggttctcgcccagggccacag

SEQ ID NO: 1080203 - DNA, 25 bp, Homo sapien
catgggaggtctccatgtccccatt

SEQ ID NO: 1080204 - DNA, 25 bp, Homo sapien
agggccacagcgatgcgacagatgc

SEQ ID NO: 1080205 - DNA, 25 bp, Homo sapien
tctcattgacaggatagtggccagg

SEQ ID NO: 1080206 - DNA, 25 bp, Homo sapien
cataatcatgttgacgagtgccagg

SEQ ID NO: 1080207 - DNA, 25 bp, Homo sapien
ccagggatgcctgtgcagaacataa

SEQ ID NO: 1080208 - DNA, 25 bp, Homo sapien
gaaactctgccagtgctctacttgg

SEQ ID NO: 1080209 - DNA, 25 bp, Homo sapien
accagctggaagtagactggccggt

SEQ ID NO: 1080210 - DNA, 25 bp, Homo sapien
tgctggtatacagcctgcttctctg

SEQ ID NO: 1080211 - DNA, 25 bp, Homo sapien
tggaagtagactggccggtacacct

SEQ ID NO: 1080212 - DNA, 25 bp, Homo sapien
ctgtaaattcggaactgctccttct

SEQ ID NO: 1080213 - DNA, 25 bp, Homo sapien
gcagatgaaggccttttatactgcc

SEQ ID NO: 1080214 - DNA, 25 bp, Homo sapien
ccccaacatctcatagacatacatg

SEQ ID NO: 1080215 - DNA, 25 bp, Homo sapien
agcttgtcatagaggttgctgagca

SEQ ID NO: 1080216 - DNA, 25 bp, Homo sapien
gctggtgagcaaacgacccagcttg

SEQ ID NO: 1080217 - DNA, 25 bp, Homo sapien
tagacatacatgagcgtgtctgaga

SEQ ID NO: 1080218 - DNA, 25 bp, Homo sapien
tagttgacgtcaatggtctctgcga

SEQ ID NO: 1080219 - DNA, 25 bp, Homo sapien
atgctgatccgtgggatgaggccaa

SEQ ID NO: 1080220 - DNA, 25 bp, Homo sapien
tctgccagctgcacgttgctgatgc

SEQ ID NO: 1080221 - DNA, 25 bp, Homo sapien
ggcaccacatcagaatagttgacgt

SEQ ID NO: 1080222 - DNA, 25 bp, Homo sapien
gacagacagctcaggattgcctagg

SEQ ID NO: 1080223 - DNA, 25 bp, Homo sapien
tgcactctcggcagatcttcttgag

SEQ ID NO: 1080224 - DNA, 25 bp, Homo sapien
agggaggcaggtcatacttgcactc

SEQ ID NO: 1080225 - DNA, 25 bp, Homo sapien
attgcctagggcatgcagtaccaag

SEQ ID NO: 1080226 - DNA, 25 bp, Homo sapien
ttgtggatctgtttcatcagcacat

SEQ ID NO: 1080227 - DNA, 25 bp, Homo sapien
cttgtggatctgtttcatcagcaca

SEQ ID NO: 1080228 - DNA, 25 bp, Homo sapien
tgtggatctgtttcatcagcacatc

SEQ ID NO: 1080229 - DNA, 25 bp, Homo sapien
ggttcttaaggatctcctccacttg

SEQ ID NO: 1080230 - DNA, 25 bp, Homo sapien
atatagggtgagataagcgagtgca

SEQ ID NO: 1080231 - DNA, 25 bp, Homo sapien
aagcgagtgcaggttcttaaggatc

SEQ ID NO: 1080232 - DNA, 25 bp, Homo sapien
gagataagcgagtgcaggttcttaa

SEQ ID NO: 1080233 - DNA, 25 bp, Homo sapien
gatgtgaacaatggccagcttgttg

SEQ ID NO: 1080234 - DNA, 25 bp, Homo sapien
gtgaacaatggccagcttgttggag

SEQ ID NO: 1080235 - DNA, 25 bp, Homo sapien
aagatgtgaacaatggccagcttgt

SEQ ID NO: 1080236 - DNA, 25 bp, Homo sapien
cccaagatgtgaacaatggccagct

SEQ ID NO: 1080237 - DNA, 25 bp, Homo sapien
cagaactattacatgcggaggaggt

SEQ ID NO: 1080238 - DNA, 25 bp, Homo sapien
tgacaatgacattcccacaggtggg

SEQ ID NO: 1080239 - DNA, 25 bp, Homo sapien
caagcagcttgtaagtggtcacccc

SEQ ID NO: 1080240 - DNA, 25 bp, Homo sapien
gatataacgtcaatgtccctcatgg

SEQ ID NO: 1080241 - DNA, 25 bp, Homo sapien
aacctgggcatcattcaaccatttg

SEQ ID NO: 1080242 - DNA, 25 bp, Homo sapien
ttgctcagcaccttctggataagct

SEQ ID NO: 1080243 - DNA, 25 bp, Homo sapien
tggtgctgtacatccgacccagcat

SEQ ID NO: 1080244 - DNA, 25 bp, Homo sapien
agtcatccagcagcgtcttaacaga

SEQ ID NO: 1080245 - DNA, 25 bp, Homo sapien
ctgtcgagtgaggtcaagagcagag

SEQ ID NO: 1080246 - DNA, 25 bp, Homo sapien
gacttctcaaagatagcgcacaccg

SEQ ID NO: 1080247 - DNA, 25 bp, Homo sapien
tgagtgtgacggaggtgacgagcag

SEQ ID NO: 1080248 - DNA, 25 bp, Homo sapien
acggaggtgacgagcaggaagaggg

SEQ ID NO: 1080249 - DNA, 25 bp, Homo sapien
tgtgacggaggtgacgagcaggaag

SEQ ID NO: 1080250 - DNA, 25 bp, Homo sapien
aagagagtgagtgtgacggaggtga

SEQ ID NO: 1080251 - DNA, 25 bp, Homo sapien
ctcccatcagccagtcattgaagag

SEQ ID NO: 1080252 - DNA, 25 bp, Homo sapien
tcccatcagccagtcattgaagagg

SEQ ID NO: 1080253 - DNA, 25 bp, Homo sapien
ccatcagccagtcattgaagaggaa

SEQ ID NO: 1080254 - DNA, 25 bp, Homo sapien
atcagccagtcattgaagaggaaag

SEQ ID NO: 1080255 - DNA, 25 bp, Homo sapien
tcatatagttatgtgggactgagag

SEQ ID NO: 1080256 - DNA, 25 bp, Homo sapien
catatagttatgtgggactgagagc

SEQ ID NO: 1080257 - DNA, 25 bp, Homo sapien
gtgccaggagttgcataaatgaatc

SEQ ID NO: 1080258 - DNA, 25 bp, Homo sapien
tgtgccaggagttgcataaatgaat

SEQ ID NO: 1080259 - DNA, 25 bp, Homo sapien
tcaacaatatcaggatgatccctgg

SEQ ID NO: 1080260 - DNA, 25 bp, Homo sapien
caggcagttcccggcaggagcacgg

SEQ ID NO: 1080261 - DNA, 25 bp, Homo sapien
aggagcacggggacagtgtacccca

SEQ ID NO: 1080262 - DNA, 25 bp, Homo sapien
caggagcacggggacagtgtacccc

SEQ ID NO: 1080263 - DNA, 25 bp, Homo sapien
ggcagttcccggcaggagcacgggg

SEQ ID NO: 1080264 - DNA, 25 bp, Homo sapien
tcgcaggctctaggttgccagcagt

SEQ ID NO: 1080265 - DNA, 25 bp, Homo sapien
catcagggccagatgtctcgcaggc

SEQ ID NO: 1080266 - DNA, 25 bp, Homo sapien
ggacatgactggcacatcctcaggt

SEQ ID NO: 1080267 - DNA, 25 bp, Homo sapien
tgccccgagtggtaccaggacatga

SEQ ID NO: 1080268 - DNA, 25 bp, Homo sapien
gtggagctggtaagcccagccccag

SEQ ID NO: 1080269 - DNA, 25 bp, Homo sapien
tggagctggtaagcccagccccagc

SEQ ID NO: 1080270 - DNA, 25 bp, Homo sapien
ggaacacagctttgacatccaatcg

SEQ ID NO: 1080271 - DNA, 25 bp, Homo sapien
acaaatctggcttccgcttcagagc

SEQ ID NO: 1080272 - DNA, 25 bp, Homo sapien
cacagctttgacatccaatcgttca

SEQ ID NO: 1080273 - DNA, 25 bp, Homo sapien
aacaaatctggcttccgcttcagag

SEQ ID NO: 1080274 - DNA, 25 bp, Homo sapien
ttgacagtaggtgcctcagggaact

SEQ ID NO: 1080275 - DNA, 25 bp, Homo sapien
gaggccttgacagtaggtgcctcag

SEQ ID NO: 1080276 - DNA, 25 bp, Homo sapien
cagtaggtgcctcagggaacttgag

SEQ ID NO: 1080277 - DNA, 25 bp, Homo sapien
gccttgacagtaggtgcctcaggga

SEQ ID NO: 1080278 - DNA, 25 bp, Homo sapien
ctccagcactgctatgagcagcata

SEQ ID NO: 1080279 - DNA, 25 bp, Homo sapien
ctacttccccacaccgaggcagcag

SEQ ID NO: 1080280 - DNA, 25 bp, Homo sapien
tgctatgagcagcatacgaccgtct

SEQ ID NO: 1080281 - DNA, 25 bp, Homo sapien
agcatacgaccgtcttcctgtacca

SEQ ID NO: 1080282 - DNA, 25 bp, Homo sapien
gccgcttctgcagcaagaatgccta

SEQ ID NO: 1080283 - DNA, 25 bp, Homo sapien
agaggggttctcagcacaccagggt

SEQ ID NO: 1080284 - DNA, 25 bp, Homo sapien
aaactgcacatcacagtgagcgctg

SEQ ID NO: 1080285 - DNA, 25 bp, Homo sapien
agaatgcctaactgccctctggaca

SEQ ID NO: 1080286 - DNA, 25 bp, Homo sapien
tgaagcagtgcttgttcagggcgaa

SEQ ID NO: 1080287 - DNA, 25 bp, Homo sapien
tgttcagggcgaacaggatatcggc

SEQ ID NO: 1080288 - DNA, 25 bp, Homo sapien
gctgaaggtatccttctgttcaggg

SEQ ID NO: 1080289 - DNA, 25 bp, Homo sapien
atatcggcaaagcagtccatgaggc

SEQ ID NO: 1080290 - DNA, 25 bp, Homo sapien
ttcacccgcctcttgttcactcgct

SEQ ID NO: 1080291 - DNA, 25 bp, Homo sapien
tcacccgcctcttgttcactcgctc

SEQ ID NO: 1080292 - DNA, 25 bp, Homo sapien
cttcacccgcctcttgttcactcgc

SEQ ID NO: 1080293 - DNA, 25 bp, Homo sapien
cacccgcctcttgttcactcgctcg

SEQ ID NO: 1080294 - DNA, 25 bp, Homo sapien
tctgtgccatggagaccccggcaca

SEQ ID NO: 1080295 - DNA, 25 bp, Homo sapien
gtgtaatctgtgccatggagacccc

SEQ ID NO: 1080296 - DNA, 25 bp, Homo sapien
aatctgtgccatggagaccccggca

SEQ ID NO: 1080297 - DNA, 25 bp, Homo sapien
gtaatctgtgccatggagaccccgg

SEQ ID NO: 1080298 - DNA, 25 bp, Homo sapien
agctagaggatgttcccaccattcc

SEQ ID NO: 1080299 - DNA, 25 bp, Homo sapien
cctaggtggcttggctacagtagta

SEQ ID NO: 1080300 - DNA, 25 bp, Homo sapien
tacagtagtatctcttccaacctgg

SEQ ID NO: 1080301 - DNA, 25 bp, Homo sapien
tccagcctaggtggcttggctacag

SEQ ID NO: 1080302 - DNA, 25 bp, Homo sapien
cttcagccatcctaactactgtttc

SEQ ID NO: 1080303 - DNA, 25 bp, Homo sapien
tgtttctccgctacacgtgggacta

SEQ ID NO: 1080304 - DNA, 25 bp, Homo sapien
ttcagccggtgagtatccccttcag

SEQ ID NO: 1080305 - DNA, 25 bp, Homo sapien
atcacagtcggccttcagccggtga

SEQ ID NO: 1080306 - DNA, 25 bp, Homo sapien
gcgccgcctcggcagggctgctaaa

SEQ ID NO: 1080307 - DNA, 25 bp, Homo sapien
gcagggctgctaaacatcgactcca

SEQ ID NO: 1080308 - DNA, 25 bp, Homo sapien
gtccggaagaggagtaagcagtcct

SEQ ID NO: 1080309 - DNA, 25 bp, Homo sapien
gtaagcagtcctggcaccccggtct

SEQ ID NO: 1080310 - DNA, 25 bp, Homo sapien
aatccagcgactcgctccagctcgt

SEQ ID NO: 1080311 - DNA, 25 bp, Homo sapien
caaatccagcgactcgctccagctc

SEQ ID NO: 1080312 - DNA, 25 bp, Homo sapien
tcgcggacaaatccagcgactcgct

SEQ ID NO: 1080313 - DNA, 25 bp, Homo sapien
ggtcgcggacaaatccagcgactcg

SEQ ID NO: 1080314 - DNA, 25 bp, Homo sapien
gatccggatcctctgggcgacccat

SEQ ID NO: 1080315 - DNA, 25 bp, Homo sapien
ctctgggcgacccatcccgacagag

SEQ ID NO: 1080316 - DNA, 25 bp, Homo sapien
catcccgacagaggcgagccaccct

SEQ ID NO: 1080317 - DNA, 25 bp, Homo sapien
aaatcccccaagatccggatcctct

SEQ ID NO: 1080318 - DNA, 25 bp, Homo sapien
cccactgagggcttctttaaagcaa

SEQ ID NO: 1080319 - DNA, 25 bp, Homo sapien
atggagtcagggacagcctctctcc

SEQ ID NO: 1080320 - DNA, 25 bp, Homo sapien
atggtcaacgcgctgcggacagact

SEQ ID NO: 1080321 - DNA, 25 bp, Homo sapien
tctgccccacgtagtaggtggaagg

SEQ ID NO: 1080322 - DNA, 25 bp, Homo sapien
cccaatagctggtcagggaactgca

SEQ ID NO: 1080323 - DNA, 25 bp, Homo sapien
gaacatctttgaccctgtcgtctcc

SEQ ID NO: 1080324 - DNA, 25 bp, Homo sapien
atgaacatctttgaccctgtcgtct

SEQ ID NO: 1080325 - DNA, 25 bp, Homo sapien
acagcatctcccaatagctggtcag

SEQ ID NO: 1080326 - DNA, 25 bp, Homo sapien
catagacgtaaaaccccatgagccc

SEQ ID NO: 1080327 - DNA, 25 bp, Homo sapien
accaccattgaaggcaatcactgtc

SEQ ID NO: 1080328 - DNA, 25 bp, Homo sapien
attatcatcaaggagaaacaccacc

SEQ ID NO: 1080329 - DNA, 25 bp, Homo sapien
agaaacaccaccattgaaggcaatc

SEQ ID NO: 1080330 - DNA, 25 bp, Homo sapien
aggagctagcatcagaaggggagtc

SEQ ID NO: 1080331 - DNA, 25 bp, Homo sapien
ctagcatcagaaggggagtcattac

SEQ ID NO: 1080332 - DNA, 25 bp, Homo sapien
agacattgtcaatgaaaggagctag

SEQ ID NO: 1080333 - DNA, 25 bp, Homo sapien
gacattgtcaatgaaaggagctagc

SEQ ID NO: 1080334 - DNA, 25 bp, Homo sapien
tcttctggaggcgagttgctgtcat

SEQ ID NO: 1080335 - DNA, 25 bp, Homo sapien
ttctcttctggaggcgagttgctgt

SEQ ID NO: 1080336 - DNA, 25 bp, Homo sapien
tctcttctggaggcgagttgctgtc

SEQ ID NO: 1080337 - DNA, 25 bp, Homo sapien
ttctggaggcgagttgctgtcatca

SEQ ID NO: 1080338 - DNA, 25 bp, Homo sapien
aagcaggcagggccaaaatgtatga

SEQ ID NO: 1080339 - DNA, 25 bp, Homo sapien
agcaggcagggccaaaatgtatgag

SEQ ID NO: 1080340 - DNA, 25 bp, Homo sapien
cagcacccagcacatccacgcagca

SEQ ID NO: 1080341 - DNA, 25 bp, Homo sapien
agcacccagcacatccacgcagcag

SEQ ID NO: 1080342 - DNA, 25 bp, Homo sapien
acgaagcacgaaggcaacgggcagt

SEQ ID NO: 1080343 - DNA, 25 bp, Homo sapien
gaacgttgacgaagcacgaaggcaa

SEQ ID NO: 1080344 - DNA, 25 bp, Homo sapien
caaggccacagaacgttgacgaagc

SEQ ID NO: 1080345 - DNA, 25 bp, Homo sapien
gggttctgggcctcaaaggccttga

SEQ ID NO: 1080346 - DNA, 25 bp, Homo sapien
agggcatgggcacaggccggctcac

SEQ ID NO: 1080347 - DNA, 25 bp, Homo sapien
ccagggcatgggcacaggccggctc

SEQ ID NO: 1080348 - DNA, 25 bp, Homo sapien
cagggcatgggcacaggccggctca

SEQ ID NO: 1080349 - DNA, 25 bp, Homo sapien
aaggcataaagcagttggctcaccc

SEQ ID NO: 1080350 - DNA, 25 bp, Homo sapien
gggccaagcccatatcaagagttct

SEQ ID NO: 1080351 - DNA, 25 bp, Homo sapien
ggctcaccctttgtgcatacacagg

SEQ ID NO: 1080352 - DNA, 25 bp, Homo sapien
gactaaatatgacccagtaggctgg

SEQ ID NO: 1080353 - DNA, 25 bp, Homo sapien
gaaggcaccatactcttctagacgc

SEQ ID NO: 1080354 - DNA, 25 bp, Homo sapien
aagcggcgcccaaaacgctctaggg

SEQ ID NO: 1080355 - DNA, 25 bp, Homo sapien
cttagagccccctacatagaaggca

SEQ ID NO: 1080356 - DNA, 25 bp, Homo sapien
aagagcagccgactcaggtctgggt

SEQ ID NO: 1080357 - DNA, 25 bp, Homo sapien
agtcaggttccgcaagtgggccagt

SEQ ID NO: 1080358 - DNA, 25 bp, Homo sapien
gatatcgtcttcgtgcccttagccg

SEQ ID NO: 1080359 - DNA, 25 bp, Homo sapien
cagtataggctggaagaagctacca

SEQ ID NO: 1080360 - DNA, 25 bp, Homo sapien
cagggccaacacatagctacgcttg

SEQ ID NO: 1080361 - DNA, 25 bp, Homo sapien
gaaaatccatactcaccccctgact

SEQ ID NO: 1080362 - DNA, 25 bp, Homo sapien
cccaggtttccagcttaggcaatgc

SEQ ID NO: 1080363 - DNA, 25 bp, Homo sapien
caccccctgactccgtgccccaggt

SEQ ID NO: 1080364 - DNA, 25 bp, Homo sapien
aggtttccagcttaggcaatgcccc

SEQ ID NO: 1080365 - DNA, 25 bp, Homo sapien
tgggagagccacgtggaagggagag

SEQ ID NO: 1080366 - DNA, 25 bp, Homo sapien
gagtgacacgtctggggtttcccac

SEQ ID NO: 1080367 - DNA, 25 bp, Homo sapien
cgtggggtcagagccaagcttccat

SEQ ID NO: 1080368 - DNA, 25 bp, Homo sapien
gccaagcttccatgatcatttgatg

SEQ ID NO: 1080369 - DNA, 25 bp, Homo sapien
ccagctccgggaactaaggaatgag

SEQ ID NO: 1080370 - DNA, 25 bp, Homo sapien
agcttctgtcactggcgtctgaccc

SEQ ID NO: 1080371 - DNA, 25 bp, Homo sapien
cagctccgggaactaaggaatgagg

SEQ ID NO: 1080372 - DNA, 25 bp, Homo sapien
cttctgtcactggcgtctgacccag

SEQ ID NO: 1080373 - DNA, 25 bp, Homo sapien
cataggcgatggcaatccctcgtct

SEQ ID NO: 1080374 - DNA, 25 bp, Homo sapien
ggcgatggcaatccctcgtcttcca

SEQ ID NO: 1080375 - DNA, 25 bp, Homo sapien
atcctcataggcgatggcaatccct

SEQ ID NO: 1080376 - DNA, 25 bp, Homo sapien
cctcatcctcataggcgatggcaat

SEQ ID NO: 1080377 - DNA, 25 bp, Homo sapien
ctgagcttgtgccagtgccaggaca

SEQ ID NO: 1080378 - DNA, 25 bp, Homo sapien
caaacaacacgcattactgggcatg

SEQ ID NO: 1080379 - DNA, 25 bp, Homo sapien
gtcctagcagccattcataagtcca

SEQ ID NO: 1080380 - DNA, 25 bp, Homo sapien
gatcctatcctgtgaagggctgcct

SEQ ID NO: 1080381 - DNA, 25 bp, Homo sapien
gccttttgacaaggacagaccctca

SEQ ID NO: 1080382 - DNA, 25 bp, Homo sapien
caagtacgagtttgagaaaccctgg

SEQ ID NO: 1080383 - DNA, 25 bp, Homo sapien
gagtcagtatagaccaacgctgtcc

SEQ ID NO: 1080384 - DNA, 25 bp, Homo sapien
tatttaggttgctgtgatctccctg

SEQ ID NO: 1080385 - DNA, 25 bp, Homo sapien
gcgtatttaactctctttccaggta

SEQ ID NO: 1080386 - DNA, 25 bp, Homo sapien
gaagcctcctcttagtccttgtcag

SEQ ID NO: 1080387 - DNA, 25 bp, Homo sapien
aagatccagcataggtgttatgccc

SEQ ID NO: 1080388 - DNA, 25 bp, Homo sapien
catctacatcccaggaccagtgcag

SEQ ID NO: 1080389 - DNA, 25 bp, Homo sapien
acctgctgtcctccgaaatcgtcct

SEQ ID NO: 1080390 - DNA, 25 bp, Homo sapien
agtgcgcctgttggcgctcgctccg

SEQ ID NO: 1080391 - DNA, 25 bp, Homo sapien
ttgctcacggcgtctctccgcccca

SEQ ID NO: 1080392 - DNA, 25 bp, Homo sapien
gaaatcgtccttccggcaagccttc

SEQ ID NO: 1080393 - DNA, 25 bp, Homo sapien
cgcgagcaggctcgggaataaaaca

SEQ ID NO: 1080394 - DNA, 25 bp, Homo sapien
ccgccgagacgcgtgactacaacta

SEQ ID NO: 1080395 - DNA, 25 bp, Homo sapien
cagatgtcgaagttcctagagagga

SEQ ID NO: 1080396 - DNA, 25 bp, Homo sapien
gtggagagactcgagaaggaccggc

SEQ ID NO: 1080397 - DNA, 25 bp, Homo sapien
gcggttccagcgtcgccttgctcta

SEQ ID NO: 1080398 - DNA, 25 bp, Homo sapien
gaccggccagatgtcgaagttccta

SEQ ID NO: 1080399 - DNA, 25 bp, Homo sapien
taggaacttcgacatctggccggtc

SEQ ID NO: 1080400 - DNA, 25 bp, Homo sapien
ctagagcaaggcgacgctggaaccg

SEQ ID NO: 1080401 - DNA, 25 bp, Homo sapien
tgttttattcccgagcctgctcgcg

SEQ ID NO: 1080402 - DNA, 25 bp, Homo sapien
tagttgtagtcacgcgtctcggcgg

SEQ ID NO: 1080403 - DNA, 25 bp, Homo sapien
tggtagttgtagtcacgcgtctcgg

SEQ ID NO: 1080404 - DNA, 25 bp, Homo sapien
tcctctctaggaacttcgacatctg

SEQ ID NO: 1080405 - DNA, 25 bp, Homo sapien
ggggtcacgtggtaccggcgcatca

SEQ ID NO: 1080406 - DNA, 25 bp, Homo sapien
gcgtggggtcacgtggtaccggcgc

SEQ ID NO: 1080407 - DNA, 25 bp, Homo sapien
cgtggggtcacgtggtaccggcgca

SEQ ID NO: 1080408 - DNA, 25 bp, Homo sapien
gcgctgcgcggggaaccggcgtggg

SEQ ID NO: 1080409 - DNA, 25 bp, Homo sapien
gtggggtcacgtggtaccggcgcat

SEQ ID NO: 1080410 - DNA, 25 bp, Homo sapien
tggggtcacgtggtaccggcgcatc

SEQ ID NO: 1080411 - DNA, 25 bp, Homo sapien
tgaccccacgccggttccccgcgca

SEQ ID NO: 1080412 - DNA, 25 bp, Homo sapien
tgatgcgccggtaccacgtgacccc

SEQ ID NO: 1080413 - DNA, 25 bp, Homo sapien
cccacgccggttccccgcgcagcgc

SEQ ID NO: 1080414 - DNA, 25 bp, Homo sapien
tgcgccggtaccacgtgaccccacg

SEQ ID NO: 1080415 - DNA, 25 bp, Homo sapien
gatgcgccggtaccacgtgacccca

SEQ ID NO: 1080416 - DNA, 25 bp, Homo sapien
atgcgccggtaccacgtgaccccac

SEQ ID NO: 1080417 - DNA, 25 bp, Homo sapien
ggcggcggcgctgcgcggggaaccg

SEQ ID NO: 1080418 - DNA, 25 bp, Homo sapien
tgcgcggggaaccggcgtggggtca

SEQ ID NO: 1080419 - DNA, 25 bp, Homo sapien
gcggcggcgctgcgcggggaaccgg

SEQ ID NO: 1080420 - DNA, 25 bp, Homo sapien
gcgctgcgcggggaaccggcgtggg

SEQ ID NO: 1080421 - DNA, 25 bp, Homo sapien
gggtcacgtggtaccggcgcatcac

SEQ ID NO: 1080422 - DNA, 25 bp, Homo sapien
cgctgcgcggggaaccggcgtgggg

SEQ ID NO: 1080423 - DNA, 25 bp, Homo sapien
cccacgccggttccccgcgcagcgc

SEQ ID NO: 1080424 - DNA, 25 bp, Homo sapien
gtgatgcgccggtaccacgtgaccc

SEQ ID NO: 1080425 - DNA, 25 bp, Homo sapien
gccggttccccgcgcagcgccgccg

SEQ ID NO: 1080426 - DNA, 25 bp, Homo sapien
tgaccccacgccggttccccgcgca

SEQ ID NO: 1080427 - DNA, 25 bp, Homo sapien
cggttccccgcgcagcgccgccgcc

SEQ ID NO: 1080428 - DNA, 25 bp, Homo sapien
ccccacgccggttccccgcgcagcg

SEQ ID NO: 1080429 - DNA, 25 bp, Homo sapien
gggcgagttaggtgacgctgcgggg

SEQ ID NO: 1080430 - DNA, 25 bp, Homo sapien
gtgggcgagttaggtgacgctgcgg

SEQ ID NO: 1080431 - DNA, 25 bp, Homo sapien
tgggcgagttaggtgacgctgcggg

SEQ ID NO: 1080432 - DNA, 25 bp, Homo sapien
cccgcagcgtcacctaactcgccca

SEQ ID NO: 1080433 - DNA, 25 bp, Homo sapien
ccccgcagcgtcacctaactcgccc

SEQ ID NO: 1080434 - DNA, 25 bp, Homo sapien
ccgcagcgtcacctaactcgcccac

SEQ ID NO: 1080435 - DNA, 25 bp, Homo sapien
gggcggacagactgcgggacggacg

SEQ ID NO: 1080436 - DNA, 25 bp, Homo sapien
gggcgggcggacagactgcgggacg

SEQ ID NO: 1080437 - DNA, 25 bp, Homo sapien
gcgggcggacagactgcgggacgga

SEQ ID NO: 1080438 - DNA, 25 bp, Homo sapien
gtgggcgagttaggtgacgctgcgg

SEQ ID NO: 1080439 - DNA, 25 bp, Homo sapien
tgggcgagttaggtgacgctgcggg

SEQ ID NO: 1080440 - DNA, 25 bp, Homo sapien
agttaggtgacgctgcggggcgggc

SEQ ID NO: 1080441 - DNA, 25 bp, Homo sapien
cgtccgtcccgcagtctgtccgccc

SEQ ID NO: 1080442 - DNA, 25 bp, Homo sapien
cccgcagcgtcacctaactcgccca

SEQ ID NO: 1080443 - DNA, 25 bp, Homo sapien
gtccgtcccgcagtctgtccgcccg

SEQ ID NO: 1080444 - DNA, 25 bp, Homo sapien
ccccgcagcgtcacctaactcgccc

SEQ ID NO: 1080445 - DNA, 25 bp, Homo sapien
ccgcagcgtcacctaactcgcccac

SEQ ID NO: 1080446 - DNA, 25 bp, Homo sapien
ccgccccgcagcgtcacctaactcg

SEQ ID NO: 1080447 - DNA, 25 bp, Homo sapien
ggtcttcgtggccttctgggcctgc

SEQ ID NO: 1080448 - DNA, 25 bp, Homo sapien
ttcgtggccttctgggcctgcgcgc

SEQ ID NO: 1080449 - DNA, 25 bp, Homo sapien
tcttcgtggccttctgggcctgcgc

SEQ ID NO: 1080450 - DNA, 25 bp, Homo sapien
tgacggggctagcactgctctactc

SEQ ID NO: 1080451 - DNA, 25 bp, Homo sapien
gctagcactgctctactccggggtc

SEQ ID NO: 1080452 - DNA, 25 bp, Homo sapien
tcgtggccttctgggcctgcgcgct

SEQ ID NO: 1080453 - DNA, 25 bp, Homo sapien
cccggagtagagcagtgctagcccc

SEQ ID NO: 1080454 - DNA, 25 bp, Homo sapien
agtagagcagtgctagccccgtcat

SEQ ID NO: 1080455 - DNA, 25 bp, Homo sapien
gcaggcccagaaggccacgaagacc

SEQ ID NO: 1080456 - DNA, 25 bp, Homo sapien
agcgcgcaggcccagaaggccacga

SEQ ID NO: 1080457 - DNA, 25 bp, Homo sapien
ggagtagagcagtgctagccccgtc

SEQ ID NO: 1080458 - DNA, 25 bp, Homo sapien
gaccccggagtagagcagtgctagc

SEQ ID NO: 1080459 - DNA, 25 bp, Homo sapien
acccggatttccagctgcttgagga

SEQ ID NO: 1080460 - DNA, 25 bp, Homo sapien
tgcgagggcctctgactccgacaaa

SEQ ID NO: 1080461 - DNA, 25 bp, Homo sapien
tcttttcccagtcgctttgccctcc

SEQ ID NO: 1080462 - DNA, 25 bp, Homo sapien
agctggccgggtcggaactcggcgg

SEQ ID NO: 1080463 - DNA, 25 bp, Homo sapien
gctcggtcacaagccggctgctccg

SEQ ID NO: 1080464 - DNA, 25 bp, Homo sapien
cgggagcagcatcgcggccgagctg

SEQ ID NO: 1080465 - DNA, 25 bp, Homo sapien
tcctcaagcagctggaaatccgggt

SEQ ID NO: 1080466 - DNA, 25 bp, Homo sapien
gagcagccggcttgtgaccgagcgg

SEQ ID NO: 1080467 - DNA, 25 bp, Homo sapien
gagggcaaagcgactgggaaaagag

SEQ ID NO: 1080468 - DNA, 25 bp, Homo sapien
tttgtcggagtcagaggccctcgca

SEQ ID NO: 1080469 - DNA, 25 bp, Homo sapien
gggacagcagtgagacgtgggagcg

SEQ ID NO: 1080470 - DNA, 25 bp, Homo sapien
ccgagcgggccggtcaggagcaaga

SEQ ID NO: 1080471 - DNA, 25 bp, Homo sapien
ggctggagcgcttgctccctcggtc

SEQ ID NO: 1080472 - DNA, 25 bp, Homo sapien
gatctggctggagcgcttgctccct

SEQ ID NO: 1080473 - DNA, 25 bp, Homo sapien
tcgggcttgcgggtggcgaccctgc

SEQ ID NO: 1080474 - DNA, 25 bp, Homo sapien
tcccgcctcggattcgggcttgcgg

SEQ ID NO: 1080475 - DNA, 25 bp, Homo sapien
aacagcggaacggactgggccggcg

SEQ ID NO: 1080476 - DNA, 25 bp, Homo sapien
ggtcccgcctcggattcgggcttgc

SEQ ID NO: 1080477 - DNA, 25 bp, Homo sapien
aggcgggaccgagggagcaagcgct

SEQ ID NO: 1080478 - DNA, 25 bp, Homo sapien
gcaagcccgaatccgaggcgggacc

SEQ ID NO: 1080479 - DNA, 25 bp, Homo sapien
cgccggcccagtccgttccgctgtt

SEQ ID NO: 1080480 - DNA, 25 bp, Homo sapien
gaccgagggagcaagcgctccagcc

SEQ ID NO: 1080481 - DNA, 25 bp, Homo sapien
ccgcaagcccgaatccgaggcggga

SEQ ID NO: 1080482 - DNA, 25 bp, Homo sapien
agggagcaagcgctccagccagatc

SEQ ID NO: 1080483 - DNA, 25 bp, Homo sapien
gaaaatggaggcctaagcagaggaa

SEQ ID NO: 1080484 - DNA, 25 bp, Homo sapien
cctgaggacgccccttcagggaggt

SEQ ID NO: 1080485 - DNA, 25 bp, Homo sapien
gaggtggcccttcagctcggcagct

SEQ ID NO: 1080486 - DNA, 25 bp, Homo sapien
agctcggcagctactttaggttgaa

SEQ ID NO: 1080487 - DNA, 25 bp, Homo sapien
ctaagcagaggaatctgtctacaca

SEQ ID NO: 1080488 - DNA, 25 bp, Homo sapien
gctactttaggttgaagaacttctc

SEQ ID NO: 1080489 - DNA, 25 bp, Homo sapien
aagtagctgccgagctgaagggcca

SEQ ID NO: 1080490 - DNA, 25 bp, Homo sapien
tcttcaacctaaagtagctgccgag

SEQ ID NO: 1080491 - DNA, 25 bp, Homo sapien
ggtagagagaagttcttcaacctaa

SEQ ID NO: 1080492 - DNA, 25 bp, Homo sapien
gattcctctgcttaggcctccattt

SEQ ID NO: 1080493 - DNA, 25 bp, Homo sapien
ggttacgggctgctcggtagagaga

SEQ ID NO: 1080494 - DNA, 25 bp, Homo sapien
tgtgtagacagattcctctgcttag

SEQ ID NO: 1080495 - DNA, 25 bp, Homo sapien
agtctgctacaccatttttgatttg

SEQ ID NO: 1080496 - DNA, 25 bp, Homo sapien
tctgctacaccatttttgatttggg

SEQ ID NO: 1080497 - DNA, 25 bp, Homo sapien
gagtctgctacaccatttttgattt

SEQ ID NO: 1080498 - DNA, 25 bp, Homo sapien
ctgctacaccatttttgatttgggc

SEQ ID NO: 1080499 - DNA, 25 bp, Homo sapien
gtctgctacaccatttttgatttgg

SEQ ID NO: 1080500 - DNA, 25 bp, Homo sapien
gcccaaatcaaaaatggtgtagcag

SEQ ID NO: 1080501 - DNA, 25 bp, Homo sapien
aaatcaaaaatggtgtagcagactc

SEQ ID NO: 1080502 - DNA, 25 bp, Homo sapien
ccaaatcaaaaatggtgtagcagac

SEQ ID NO: 1080503 - DNA, 25 bp, Homo sapien
caaatcaaaaatggtgtagcagact

SEQ ID NO: 1080504 - DNA, 25 bp, Homo sapien
cccaaatcaaaaatggtgtagcaga

SEQ ID NO: 1080505 - DNA, 25 bp, Homo sapien
tctgctacaccatttttgatttggg

SEQ ID NO: 1080506 - DNA, 25 bp, Homo sapien
gagtctgctacaccatttttgattt

SEQ ID NO: 1080507 - DNA, 25 bp, Homo sapien
tgggcttccgctttgatgtggcatg

SEQ ID NO: 1080508 - DNA, 25 bp, Homo sapien
tgatttgggcttccgctttgatgtg

SEQ ID NO: 1080509 - DNA, 25 bp, Homo sapien
ctgctacaccatttttgatttgggc

SEQ ID NO: 1080510 - DNA, 25 bp, Homo sapien
tttgggcttccgctttgatgtggca

SEQ ID NO: 1080511 - DNA, 25 bp, Homo sapien
tcttttctctggtctgagtccctcc

SEQ ID NO: 1080512 - DNA, 25 bp, Homo sapien
ggagggactcagaccagagaaaaga

SEQ ID NO: 1080513 - DNA, 25 bp, Homo sapien
ttgaagcttcttccctgcagcctct

SEQ ID NO: 1080514 - DNA, 25 bp, Homo sapien
ggaggattccccttgaagcttcttc

SEQ ID NO: 1080515 - DNA, 25 bp, Homo sapien
accactgcctgcctgggacatggac

SEQ ID NO: 1080516 - DNA, 25 bp, Homo sapien
tgcagcctctcttcttttctctggt

SEQ ID NO: 1080517 - DNA, 25 bp, Homo sapien
tcttttctctggtctgagtccctcc

SEQ ID NO: 1080518 - DNA, 25 bp, Homo sapien
gattccccttgaagcttcttccctg

SEQ ID NO: 1080519 - DNA, 25 bp, Homo sapien
gaagaagcttcaaggggaatcctcc

SEQ ID NO: 1080520 - DNA, 25 bp, Homo sapien
accagagaaaagaagagaggctgca

SEQ ID NO: 1080521 - DNA, 25 bp, Homo sapien
ggagggactcagaccagagaaaaga

SEQ ID NO: 1080522 - DNA, 25 bp, Homo sapien
gtccatgtcccaggcaggcagtggt

SEQ ID NO: 1080523 - DNA, 25 bp, Homo sapien
tcagaccagagaaaagaagagaggc

SEQ ID NO: 1080524 - DNA, 25 bp, Homo sapien
agaggctgcagggaagaagcttcaa

SEQ ID NO: 1080525 - DNA, 25 bp, Homo sapien
ggcattggcctagctatctccctgt

SEQ ID NO: 1080526 - DNA, 25 bp, Homo sapien
tggcctagctatctccctgtctgtg

SEQ ID NO: 1080527 - DNA, 25 bp, Homo sapien
tccaacctgggcattggcctagcta

SEQ ID NO: 1080528 - DNA, 25 bp, Homo sapien
tccctgtctgtggttggggcagcct

SEQ ID NO: 1080529 - DNA, 25 bp, Homo sapien
agacttcgcccttcatgtggtccaa

SEQ ID NO: 1080530 - DNA, 25 bp, Homo sapien
tcgcccttcatgtggtccaacctgg

SEQ ID NO: 1080531 - DNA, 25 bp, Homo sapien
tagctaggccaatgcccaggttgga

SEQ ID NO: 1080532 - DNA, 25 bp, Homo sapien
ccaggttggaccacatgaagggcga

SEQ ID NO: 1080533 - DNA, 25 bp, Homo sapien
acagggagatagctaggccaatgcc

SEQ ID NO: 1080534 - DNA, 25 bp, Homo sapien
cacagacagggagatagctaggcca

SEQ ID NO: 1080535 - DNA, 25 bp, Homo sapien
aggctgccccaaccacagacaggga

SEQ ID NO: 1080536 - DNA, 25 bp, Homo sapien
ttggaccacatgaagggcgaagtct

SEQ ID NO: 1080537 - DNA, 25 bp, Homo sapien
tatattaccggctcctccatcattg

SEQ ID NO: 1080538 - DNA, 25 bp, Homo sapien
gcatctatattaccggctcctccat

SEQ ID NO: 1080539 - DNA, 25 bp, Homo sapien
ggcatctatattaccggctcctcca

SEQ ID NO: 1080540 - DNA, 25 bp, Homo sapien
gagtgaaggcccccaggatcaagac

SEQ ID NO: 1080541 - DNA, 25 bp, Homo sapien
gggcatctatattaccggctcctcc

SEQ ID NO: 1080542 - DNA, 25 bp, Homo sapien
tattaccggctcctccatcattggt

SEQ ID NO: 1080543 - DNA, 25 bp, Homo sapien
ggaggagccggtaatatagatgccc

SEQ ID NO: 1080544 - DNA, 25 bp, Homo sapien
atggaggagccggtaatatagatgc

SEQ ID NO: 1080545 - DNA, 25 bp, Homo sapien
accaatgatggaggagccggtaata

SEQ ID NO: 1080546 - DNA, 25 bp, Homo sapien
tggaggagccggtaatatagatgcc

SEQ ID NO: 1080547 - DNA, 25 bp, Homo sapien
tcttgatcctgggggccttcactcc

SEQ ID NO: 1080548 - DNA, 25 bp, Homo sapien
caatgatggaggagccggtaatata

SEQ ID NO: 1080549 - DNA, 25 bp, Homo sapien
tggcaattgtcattagcaacatggc

SEQ ID NO: 1080550 - DNA, 25 bp, Homo sapien
aggctgtggccatctacggcatcat

SEQ ID NO: 1080551 - DNA, 25 bp, Homo sapien
tgtggccatctacggcatcatcatg

SEQ ID NO: 1080552 - DNA, 25 bp, Homo sapien
aattgtcattagcaacatggctgag

SEQ ID NO: 1080553 - DNA, 25 bp, Homo sapien
tctacggcatcatcatggcaattgt

SEQ ID NO: 1080554 - DNA, 25 bp, Homo sapien
cggcatcatcatggcaattgtcatt

SEQ ID NO: 1080555 - DNA, 25 bp, Homo sapien
catgatgatgccgtagatggccaca

SEQ ID NO: 1080556 - DNA, 25 bp, Homo sapien
gacaattgccatgatgatgccgtag

SEQ ID NO: 1080557 - DNA, 25 bp, Homo sapien
gatgatgccgtagatggccacagcc

SEQ ID NO: 1080558 - DNA, 25 bp, Homo sapien
gccatgttgctaatgacaattgcca

SEQ ID NO: 1080559 - DNA, 25 bp, Homo sapien
ctcagccatgttgctaatgacaatt

SEQ ID NO: 1080560 - DNA, 25 bp, Homo sapien
aatgacaattgccatgatgatgccg

SEQ ID NO: 1080561 - DNA, 25 bp, Homo sapien
catcggccatcggaactaccatgca

SEQ ID NO: 1080562 - DNA, 25 bp, Homo sapien
gccatcggccatcggaactaccatg

SEQ ID NO: 1080563 - DNA, 25 bp, Homo sapien
ccatcggccatcggaactaccatgc

SEQ ID NO: 1080564 - DNA, 25 bp, Homo sapien
atcggccatcggaactaccatgcag

SEQ ID NO: 1080565 - DNA, 25 bp, Homo sapien
cacagaccccaaggccatcggccat

SEQ ID NO: 1080566 - DNA, 25 bp, Homo sapien
cagaccccaaggccatcggccatcg

SEQ ID NO: 1080567 - DNA, 25 bp, Homo sapien
acagaccccaaggccatcggccatc

SEQ ID NO: 1080568 - DNA, 25 bp, Homo sapien
agaccccaaggccatcggccatcgg

SEQ ID NO: 1080569 - DNA, 25 bp, Homo sapien
cgatggccgatggccttggggtctg

SEQ ID NO: 1080570 - DNA, 25 bp, Homo sapien
gatggccgatggccttggggtctgt

SEQ ID NO: 1080571 - DNA, 25 bp, Homo sapien
ccgatggccgatggccttggggtct

SEQ ID NO: 1080572 - DNA, 25 bp, Homo sapien
atggccgatggccttggggtctgtg

SEQ ID NO: 1080573 - DNA, 25 bp, Homo sapien
gcatggtagttccgatggccgatgg

SEQ ID NO: 1080574 - DNA, 25 bp, Homo sapien
ctgcatggtagttccgatggccgat

SEQ ID NO: 1080575 - DNA, 25 bp, Homo sapien
catggtagttccgatggccgatggc

SEQ ID NO: 1080576 - DNA, 25 bp, Homo sapien
tgcatggtagttccgatggccgatg

SEQ ID NO: 1080577 - DNA, 25 bp, Homo sapien
tttcagtgccacagaccccaaggcc

SEQ ID NO: 1080578 - DNA, 25 bp, Homo sapien
catcggccatcggaactaccatgca

SEQ ID NO: 1080579 - DNA, 25 bp, Homo sapien
gccatcggccatcggaactaccatg

SEQ ID NO: 1080580 - DNA, 25 bp, Homo sapien
tgccacagaccccaaggccatcggc

SEQ ID NO: 1080581 - DNA, 25 bp, Homo sapien
atcggccatcggaactaccatgcag

SEQ ID NO: 1080582 - DNA, 25 bp, Homo sapien
cctttcagtgccacagaccccaagg

SEQ ID NO: 1080583 - DNA, 25 bp, Homo sapien
gccgatggccttggggtctgtggca

SEQ ID NO: 1080584 - DNA, 25 bp, Homo sapien
ctgcatggtagttccgatggccgat

SEQ ID NO: 1080585 - DNA, 25 bp, Homo sapien
catggtagttccgatggccgatggc

SEQ ID NO: 1080586 - DNA, 25 bp, Homo sapien
ggccttggggtctgtggcactgaaa

SEQ ID NO: 1080587 - DNA, 25 bp, Homo sapien
ccttggggtctgtggcactgaaagg

SEQ ID NO: 1080588 - DNA, 25 bp, Homo sapien
tgcatggtagttccgatggccgatg

SEQ ID NO: 1080589 - DNA, 25 bp, Homo sapien
tggagtctgcgtgggcatcgtgggc

SEQ ID NO: 1080590 - DNA, 25 bp, Homo sapien
gctggcctcaccgtaggcctgtcta

SEQ ID NO: 1080591 - DNA, 25 bp, Homo sapien
agattctcatcgtggagatctttgg

SEQ ID NO: 1080592 - DNA, 25 bp, Homo sapien
ggcctgtctaacctcttctgtggag

SEQ ID NO: 1080593 - DNA, 25 bp, Homo sapien
tggggtcatcgtcgcaattcttcag

SEQ ID NO: 1080594 - DNA, 25 bp, Homo sapien
tgtaaagattctcatcgtggagatc

SEQ ID NO: 1080595 - DNA, 25 bp, Homo sapien
gatctccacgatgagaatctttaca

SEQ ID NO: 1080596 - DNA, 25 bp, Homo sapien
gaagaattgcgacgatgaccccaaa

SEQ ID NO: 1080597 - DNA, 25 bp, Homo sapien
gttctgagcatcggccagggcagcc

SEQ ID NO: 1080598 - DNA, 25 bp, Homo sapien
tccacagaagaggttagacaggcct

SEQ ID NO: 1080599 - DNA, 25 bp, Homo sapien
ccaaagatctccacgatgagaatct

SEQ ID NO: 1080600 - DNA, 25 bp, Homo sapien
tagacaggcctacggtgaggccagc

SEQ ID NO: 1080601 - DNA, 25 bp, Homo sapien
tgtttgactgtctctcggagctatg

SEQ ID NO: 1080602 - DNA, 25 bp, Homo sapien
gtttgtgactaaggatcagcctgag

SEQ ID NO: 1080603 - DNA, 25 bp, Homo sapien
gaatccccttgggaagcctctgtgt

SEQ ID NO: 1080604 - DNA, 25 bp, Homo sapien
tatctgtatagcacttagtcctccc

SEQ ID NO: 1080605 - DNA, 25 bp, Homo sapien
tccaaccatgtgctagatgtcatct

SEQ ID NO: 1080606 - DNA, 25 bp, Homo sapien
tagtgactagctttatccatatgcc

SEQ ID NO: 1080607 - DNA, 25 bp, Homo sapien
cagaggaataggtaaggcagtgaca

SEQ ID NO: 1080608 - DNA, 25 bp, Homo sapien
gatatatgactaaccaggatggaca

SEQ ID NO: 1080609 - DNA, 25 bp, Homo sapien
tgtcctactgacaggcatgtgagag

SEQ ID NO: 1080610 - DNA, 25 bp, Homo sapien
cacagagttacgctgtgggacagac

SEQ ID NO: 1080611 - DNA, 25 bp, Homo sapien
gagatacacatagctccgagagaca

SEQ ID NO: 1080612 - DNA, 25 bp, Homo sapien
agatgacatctagcacatggttgga

SEQ ID NO: 1080613 - DNA, 25 bp, Homo sapien
tgggtggggccgtgcctcactttta

SEQ ID NO: 1080614 - DNA, 25 bp, Homo sapien
tatttattgctggttttcctgggac

SEQ ID NO: 1080615 - DNA, 25 bp, Homo sapien
ggccgtgcctcacttttatttattg

SEQ ID NO: 1080616 - DNA, 25 bp, Homo sapien
tttattgctggttttcctgggacag

SEQ ID NO: 1080617 - DNA, 25 bp, Homo sapien
tgatatgtgtgggtggggccgtgcc

SEQ ID NO: 1080618 - DNA, 25 bp, Homo sapien
gccgtgcctcacttttatttattgc

SEQ ID NO: 1080619 - DNA, 25 bp, Homo sapien
ctgtcccaggaaaaccagcaataaa

SEQ ID NO: 1080620 - DNA, 25 bp, Homo sapien
caggaaaaccagcaataaataaaag

SEQ ID NO: 1080621 - DNA, 25 bp, Homo sapien
tgtcccaggaaaaccagcaataaat

SEQ ID NO: 1080622 - DNA, 25 bp, Homo sapien
caataaataaaagtgaggcacggcc

SEQ ID NO: 1080623 - DNA, 25 bp, Homo sapien
gaaaaccagcaataaataaaagtga

SEQ ID NO: 1080624 - DNA, 25 bp, Homo sapien
taaataaaagtgaggcacggcccca

SEQ ID NO: 1080625 - DNA, 25 bp, Homo sapien
gctgactctgtgcagctgcgcacct

SEQ ID NO: 1080626 - DNA, 25 bp, Homo sapien
agtccaggccgagtcctcagtgcgg

SEQ ID NO: 1080627 - DNA, 25 bp, Homo sapien
tcttgctgcgtgttgatttggaggc

SEQ ID NO: 1080628 - DNA, 25 bp, Homo sapien
ctgcgtgttgatttggaggcactgc

SEQ ID NO: 1080629 - DNA, 25 bp, Homo sapien
tagcctttcagaggcttggtgttca

SEQ ID NO: 1080630 - DNA, 25 bp, Homo sapien
gcactcccctcttgctgcgtgttga

SEQ ID NO: 1080631 - DNA, 25 bp, Homo sapien
ggtgcgcagctgcacagagtcagca

SEQ ID NO: 1080632 - DNA, 25 bp, Homo sapien
tgaacaccaagcctctgaaaggcta

SEQ ID NO: 1080633 - DNA, 25 bp, Homo sapien
caccaagcctctgaaaggctaaggg

SEQ ID NO: 1080634 - DNA, 25 bp, Homo sapien
tccaaatcaacacgcagcaagaggg

SEQ ID NO: 1080635 - DNA, 25 bp, Homo sapien
gcactgaggactcggcctggactgc

SEQ ID NO: 1080636 - DNA, 25 bp, Homo sapien
gcagtgcctccaaatcaacacgcag

SEQ ID NO: 1080637 - DNA, 25 bp, Homo sapien
tcaacccatcttcctagtgtttgtg

SEQ ID NO: 1080638 - DNA, 25 bp, Homo sapien
aacccatcttcctagtgtttgtgaa

SEQ ID NO: 1080639 - DNA, 25 bp, Homo sapien
ccatcttcctagtgtttgtgaaata

SEQ ID NO: 1080640 - DNA, 25 bp, Homo sapien
caacccatcttcctagtgtttgtga

SEQ ID NO: 1080641 - DNA, 25 bp, Homo sapien
catcttcctagtgtttgtgaaataa

SEQ ID NO: 1080642 - DNA, 25 bp, Homo sapien
acccatcttcctagtgtttgtgaaa

SEQ ID NO: 1080643 - DNA, 25 bp, Homo sapien
ttatttcacaaacactaggaagatg

SEQ ID NO: 1080644 - DNA, 25 bp, Homo sapien
tttcacaaacactaggaagatgggt

SEQ ID NO: 1080645 - DNA, 25 bp, Homo sapien
tcacaaacactaggaagatgggttg

SEQ ID NO: 1080646 - DNA, 25 bp, Homo sapien
cacaaacactaggaagatgggttga

SEQ ID NO: 1080647 - DNA, 25 bp, Homo sapien
ttcacaaacactaggaagatgggtt

SEQ ID NO: 1080648 - DNA, 25 bp, Homo sapien
tatttcacaaacactaggaagatgg

SEQ ID NO: 1080649 - DNA, 25 bp, Homo sapien
tgcagaccgtggagtcccttagcgg

SEQ ID NO: 1080650 - DNA, 25 bp, Homo sapien
aatgggtcaggctcgtccaaagggt

SEQ ID NO: 1080651 - DNA, 25 bp, Homo sapien
tgggagcgcgggaggaaatgggtca

SEQ ID NO: 1080652 - DNA, 25 bp, Homo sapien
tgggcttagaggtcggaccggcgag

SEQ ID NO: 1080653 - DNA, 25 bp, Homo sapien
ggacccacggaccacagcgccgccg

SEQ ID NO: 1080654 - DNA, 25 bp, Homo sapien
cctcccgcgctacggcgcctcggag

SEQ ID NO: 1080655 - DNA, 25 bp, Homo sapien
gcctccagcacgcccgcacccgccg

SEQ ID NO: 1080656 - DNA, 25 bp, Homo sapien
ggcggacccacggaccacagcgccg

SEQ ID NO: 1080657 - DNA, 25 bp, Homo sapien
gccgcccggtcagcggccaccgcgg

SEQ ID NO: 1080658 - DNA, 25 bp, Homo sapien
cgccgcccggtcagcggccaccgcg

SEQ ID NO: 1080659 - DNA, 25 bp, Homo sapien
ctgcggacggttccgtcccccatgg

SEQ ID NO: 1080660 - DNA, 25 bp, Homo sapien
gacgccgctccgacttgggcagggc

SEQ ID NO: 1080661 - DNA, 25 bp, Homo sapien
ggacgccgctccgacttgggcaggg

SEQ ID NO: 1080662 - DNA, 25 bp, Homo sapien
acgccgctccgacttgggcagggct

SEQ ID NO: 1080663 - DNA, 25 bp, Homo sapien
ggggacgccgctccgacttgggcag

SEQ ID NO: 1080664 - DNA, 25 bp, Homo sapien
gctcggggtgcccctcgcggggctg

SEQ ID NO: 1080665 - DNA, 25 bp, Homo sapien
ctcggggtgcccctcgcggggctgg

SEQ ID NO: 1080666 - DNA, 25 bp, Homo sapien
cgctcggggtgcccctcgcggggct

SEQ ID NO: 1080667 - DNA, 25 bp, Homo sapien
cgcacagaccgggtgggtgtggagc

SEQ ID NO: 1080668 - DNA, 25 bp, Homo sapien
acgggcaggccgcacagaccgggtg

SEQ ID NO: 1080669 - DNA, 25 bp, Homo sapien
tccggcgcaggggttctgggtcagg

SEQ ID NO: 1080670 - DNA, 25 bp, Homo sapien
aggctgaacacgtggcacccgcgga

SEQ ID NO: 1080671 - DNA, 25 bp, Homo sapien
ctcctggacttccacagccatacat

SEQ ID NO: 1080672 - DNA, 25 bp, Homo sapien
tgctcctggacttccacagccatac

SEQ ID NO: 1080673 - DNA, 25 bp, Homo sapien
tcctggacttccacagccatacatc

SEQ ID NO: 1080674 - DNA, 25 bp, Homo sapien
gctcctggacttccacagccataca

SEQ ID NO: 1080675 - DNA, 25 bp, Homo sapien
catttagtccttccaggagccatgg

SEQ ID NO: 1080676 - DNA, 25 bp, Homo sapien
gaccaggctgggaagttgccctcag

SEQ ID NO: 1080677 - DNA, 25 bp, Homo sapien
gctggttctgattcccggaacggga

SEQ ID NO: 1080678 - DNA, 25 bp, Homo sapien
cagctgtggttccaagagagcggca

SEQ ID NO: 1080679 - DNA, 25 bp, Homo sapien
gctcataccctttcacactcacaga

SEQ ID NO: 1080680 - DNA, 25 bp, Homo sapien
ctgctcataccctttcacactcaca

SEQ ID NO: 1080681 - DNA, 25 bp, Homo sapien
cataccctttcacactcacagactc

SEQ ID NO: 1080682 - DNA, 25 bp, Homo sapien
tcataccctttcacactcacagact

SEQ ID NO: 1080683 - DNA, 25 bp, Homo sapien
cggccactggcccgcccagtgggcc

SEQ ID NO: 1080684 - DNA, 25 bp, Homo sapien
gccactggcccgcccagtgggcccg

SEQ ID NO: 1080685 - DNA, 25 bp, Homo sapien
ggcggccactggcccgcccagtggg

SEQ ID NO: 1080686 - DNA, 25 bp, Homo sapien
ccactggcccgcccagtgggcccgg

SEQ ID NO: 1080687 - DNA, 25 bp, Homo sapien
tgctgggcgtagacgtcaaagtaga

SEQ ID NO: 1080688 - DNA, 25 bp, Homo sapien
tcaaagtagaggatgacggccacga

SEQ ID NO: 1080689 - DNA, 25 bp, Homo sapien
cagccttgcagacgcgctccagcgt

SEQ ID NO: 1080690 - DNA, 25 bp, Homo sapien
atgacggccacgaggaagtgcagca

SEQ ID NO: 1080691 - DNA, 25 bp, Homo sapien
caagaccaggtggcgagtcaggaca

SEQ ID NO: 1080692 - DNA, 25 bp, Homo sapien
aggcggtggcgttgggccgggagca

SEQ ID NO: 1080693 - DNA, 25 bp, Homo sapien
accaggtggcgagtcaggacagggt

SEQ ID NO: 1080694 - DNA, 25 bp, Homo sapien
agggagcccggagctagaggcggtg

SEQ ID NO: 1080695 - DNA, 25 bp, Homo sapien
gtgaactcgatcagcagtctgccca

SEQ ID NO: 1080696 - DNA, 25 bp, Homo sapien
catgggtgaggtgaactcgatcagc

SEQ ID NO: 1080697 - DNA, 25 bp, Homo sapien
gaggtgaactcgatcagcagtctgc

SEQ ID NO: 1080698 - DNA, 25 bp, Homo sapien
ggtgaggtgaactcgatcagcagtc

SEQ ID NO: 1080699 - DNA, 25 bp, Homo sapien
gtgtatcggccgcccatgagcacgc

SEQ ID NO: 1080700 - DNA, 25 bp, Homo sapien
tgcagtcgggcggtgtgtatcggcc

SEQ ID NO: 1080701 - DNA, 25 bp, Homo sapien
ggcggtgtgtatcggccgcccatga

SEQ ID NO: 1080702 - DNA, 25 bp, Homo sapien
cagtcgggcggtgtgtatcggccgc

SEQ ID NO: 1080703 - DNA, 25 bp, Homo sapien
gtgtagatagtggagccagtagcgc

SEQ ID NO: 1080704 - DNA, 25 bp, Homo sapien
agccagtagcgcaggtggtgttccc

SEQ ID NO: 1080705 - DNA, 25 bp, Homo sapien
gtggagccagtagcgcaggtggtgt

SEQ ID NO: 1080706 - DNA, 25 bp, Homo sapien
tgtagatagtggagccagtagcgca

SEQ ID NO: 1080707 - DNA, 25 bp, Homo sapien
cactgtgcgtacacattcctgtgca

SEQ ID NO: 1080708 - DNA, 25 bp, Homo sapien
gccagtgtgcatgccaacattcaca

SEQ ID NO: 1080709 - DNA, 25 bp, Homo sapien
acatatatacaccaacaggcacatg

SEQ ID NO: 1080710 - DNA, 25 bp, Homo sapien
atccacatatccacacgggcagaca

SEQ ID NO: 1080711 - DNA, 25 bp, Homo sapien
cagggtctaactccctctcctcagg

SEQ ID NO: 1080712 - DNA, 25 bp, Homo sapien
tcctacagcatacccaaggcctgca

SEQ ID NO: 1080713 - DNA, 25 bp, Homo sapien
cctcctacagcatacccaaggcctg

SEQ ID NO: 1080714 - DNA, 25 bp, Homo sapien
ctttcagggtctaactccctctcct

SEQ ID NO: 1080715 - DNA, 25 bp, Homo sapien
tggcccggttgaaggtgtcctcacc

SEQ ID NO: 1080716 - DNA, 25 bp, Homo sapien
ggttggtcgccgcagcggtataggt

SEQ ID NO: 1080717 - DNA, 25 bp, Homo sapien
cttggcccggttgaaggtgtcctca

SEQ ID NO: 1080718 - DNA, 25 bp, Homo sapien
gcggtataggttgcggtcatccatg

SEQ ID NO: 1080719 - DNA, 25 bp, Homo sapien
aactgagccttactcaggcctgaca

SEQ ID NO: 1080720 - DNA, 25 bp, Homo sapien
ttctcagaaactgagccttactcag

SEQ ID NO: 1080721 - DNA, 25 bp, Homo sapien
attggggaagccattgattctcaga

SEQ ID NO: 1080722 - DNA, 25 bp, Homo sapien
cagaaactgagccttactcaggcct

SEQ ID NO: 1080723 - DNA, 25 bp, Homo sapien
ttcgttatgcttgtcgcggtcgtgc

SEQ ID NO: 1080724 - DNA, 25 bp, Homo sapien
gcggtagcggccgattcggatgtct

SEQ ID NO: 1080725 - DNA, 25 bp, Homo sapien
attcggatgtctgggcgtgagatct

SEQ ID NO: 1080726 - DNA, 25 bp, Homo sapien
ctctgagggttaggttcgttatgct

SEQ ID NO: 1080727 - DNA, 25 bp, Homo sapien
tcacatcagggaatcagtggcactg

SEQ ID NO: 1080728 - DNA, 25 bp, Homo sapien
gaaagtttagcacaagtcagagcag

SEQ ID NO: 1080729 - DNA, 25 bp, Homo sapien
tcttcgagggcaccaataggaatgc

SEQ ID NO: 1080730 - DNA, 25 bp, Homo sapien
tcccacaggtgcacaagtgaggtct

SEQ ID NO: 1080731 - DNA, 25 bp, Homo sapien
caggcaggctactcctgaaacagga

SEQ ID NO: 1080732 - DNA, 25 bp, Homo sapien
tgtaattgatggtggcactcaggca

SEQ ID NO: 1080733 - DNA, 25 bp, Homo sapien
gaccaaggctcctggcgtgtactgt

SEQ ID NO: 1080734 - DNA, 25 bp, Homo sapien
catctacaaccaagccagacatgtg

SEQ ID NO: 1080735 - DNA, 25 bp, Homo sapien
gccaagccataaacagggaaaccag

SEQ ID NO: 1080736 - DNA, 25 bp, Homo sapien
gattttaggcaacagcaactaggta

SEQ ID NO: 1080737 - DNA, 25 bp, Homo sapien
tctgtgaatctggtatcaggctggc

SEQ ID NO: 1080738 - DNA, 25 bp, Homo sapien
gggaaaccagttggaggccactgca

SEQ ID NO: 1080739 - DNA, 25 bp, Homo sapien
aaaacatcggagtgctaagagagac

SEQ ID NO: 1080740 - DNA, 25 bp, Homo sapien
gcacagctgagtggctaaacctgaa

SEQ ID NO: 1080741 - DNA, 25 bp, Homo sapien
tcaagtacaccgtgcaagggcaggg

SEQ ID NO: 1080742 - DNA, 25 bp, Homo sapien
gacaagagggcatatgtgacactga

SEQ ID NO: 1080743 - DNA, 25 bp, Homo sapien
ttttgagacgctctcttttttgaga

SEQ ID NO: 1080744 - DNA, 25 bp, Homo sapien
tgagacgctctcttttttgagagtc

SEQ ID NO: 1080745 - DNA, 25 bp, Homo sapien
ttcaagaggttgcctcccaacctcc

SEQ ID NO: 1080746 - DNA, 25 bp, Homo sapien
gttcaagaggttgcctcccaacctc

SEQ ID NO: 1080747 - DNA, 25 bp, Homo sapien
gcttcgtgttttgaatcttggtaaa

SEQ ID NO: 1080748 - DNA, 25 bp, Homo sapien
gacctggtaccgcactgacccaatg

SEQ ID NO: 1080749 - DNA, 25 bp, Homo sapien
tggtaccgcactgacccaatgccgt

SEQ ID NO: 1080750 - DNA, 25 bp, Homo sapien
aatgccgtcccgcttcatggtcagc

SEQ ID NO: 1080751 - DNA, 25 bp, Homo sapien
cggaggccgcccaatgtccactgtg

SEQ ID NO: 1080752 - DNA, 25 bp, Homo sapien
acggaggccgcccaatgtccactgt

SEQ ID NO: 1080753 - DNA, 25 bp, Homo sapien
gacggaggccgcccaatgtccactg

SEQ ID NO: 1080754 - DNA, 25 bp, Homo sapien
caaagtgggttctgaaacttccagg

SEQ ID NO: 1080755 - DNA, 25 bp, Homo sapien
gagggttgactccaaagagggccac

SEQ ID NO: 1080756 - DNA, 25 bp, Homo sapien
tgcaatgtacaaacacaagccggcc

SEQ ID NO: 1080757 - DNA, 25 bp, Homo sapien
gagggccacacttgaagagcctgcc

SEQ ID NO: 1080758 - DNA, 25 bp, Homo sapien
cggaagcagtgcaaggacaaacttc

SEQ ID NO: 1080759 - DNA, 25 bp, Homo sapien
ctgagaaatctgggtccacgggttt

SEQ ID NO: 1080760 - DNA, 25 bp, Homo sapien
gtttattacttcgtcgcctccactg

SEQ ID NO: 1080761 - DNA, 25 bp, Homo sapien
tccactgtcccggaagcagtgcaag

SEQ ID NO: 1080762 - DNA, 25 bp, Homo sapien
tgacccaagcactttgggctcggcc

SEQ ID NO: 1080763 - DNA, 25 bp, Homo sapien
cctgacccaagcactttgggctcgg

SEQ ID NO: 1080764 - DNA, 25 bp, Homo sapien
taggcctcagggaacgtgttaagac

SEQ ID NO: 1080765 - DNA, 25 bp, Homo sapien
gcacctttaggcctcagggaacgtg

SEQ ID NO: 1080766 - DNA, 25 bp, Homo sapien
cggaactgccagtccttggcgctct

SEQ ID NO: 1080767 - DNA, 25 bp, Homo sapien
tcggctgggattgcccgttccggaa

SEQ ID NO: 1080768 - DNA, 25 bp, Homo sapien
cggcttttggccgactcggatgccg

SEQ ID NO: 1080769 - DNA, 25 bp, Homo sapien
ttggcgctctcttctgcccggcttt

SEQ ID NO: 1080770 - DNA, 25 bp, Homo sapien
gcaggtcagagtgcgggaggtaccg

SEQ ID NO: 1080771 - DNA, 25 bp, Homo sapien
ccgcaggtcagagtgcgggaggtac

SEQ ID NO: 1080772 - DNA, 25 bp, Homo sapien
ctacgggccgcaggtcagagtgcgg

SEQ ID NO: 1080773 - DNA, 25 bp, Homo sapien
tcagagtgcgggaggtaccgcgggc

SEQ ID NO: 1080774 - DNA, 25 bp, Homo sapien
caccgacgccgccgtccccggctcg

SEQ ID NO: 1080775 - DNA, 25 bp, Homo sapien
cgtcgctcccggagcggaacgtgct

SEQ ID NO: 1080776 - DNA, 25 bp, Homo sapien
cggagcggaacgtgctcctccacca

SEQ ID NO: 1080777 - DNA, 25 bp, Homo sapien
tcttcacttcgcgtcgctcccggag

SEQ ID NO: 1080778 - DNA, 25 bp, Homo sapien
gaatcctcttcacttcgcgtcgctc

SEQ ID NO: 1080779 - DNA, 25 bp, Homo sapien
atcacccgagtcgtggggcaggcca

SEQ ID NO: 1080780 - DNA, 25 bp, Homo sapien
cgcagaggtgggaaatcacccgagt

SEQ ID NO: 1080781 - DNA, 25 bp, Homo sapien
cagaggtgggaaatcacccgagtcg

SEQ ID NO: 1080782 - DNA, 25 bp, Homo sapien
gccagggacccgcagaggtgggaaa

SEQ ID NO: 1080783 - DNA, 25 bp, Homo sapien
aaaggggagaccaggataggatctc

SEQ ID NO: 1080784 - DNA, 25 bp, Homo sapien
gagtcaaaggggagaccaggatagg

SEQ ID NO: 1080785 - DNA, 25 bp, Homo sapien
ggcggagtcaaaggggagaccagga

SEQ ID NO: 1080786 - DNA, 25 bp, Homo sapien
tcaaaggggagaccaggataggatc

SEQ ID NO: 1080787 - DNA, 25 bp, Homo sapien
ctggggaggggagtgtccggaatgg

SEQ ID NO: 1080788 - DNA, 25 bp, Homo sapien
gcaaggagagctgggataccttgcg

SEQ ID NO: 1080789 - DNA, 25 bp, Homo sapien
caaggagagctgggataccttgcga

SEQ ID NO: 1080790 - DNA, 25 bp, Homo sapien
ggagcagtgcccgtaacatcgccac

SEQ ID NO: 1080791 - DNA, 25 bp, Homo sapien
gcttgagaggatcgagcctcttgga

SEQ ID NO: 1080792 - DNA, 25 bp, Homo sapien
aggatcgagcctcttggagcagtgc

SEQ ID NO: 1080793 - DNA, 25 bp, Homo sapien
gagaggcggtggtgccagaagagaa

SEQ ID NO: 1080794 - DNA, 25 bp, Homo sapien
cctggagcaactgccggagctcctg

SEQ ID NO: 1080795 - DNA, 25 bp, Homo sapien
gccggagctcctggcgcaagaggtc

SEQ ID NO: 1080796 - DNA, 25 bp, Homo sapien
cctcacagatggctttgtggcggag

SEQ ID NO: 1080797 - DNA, 25 bp, Homo sapien
cagatggctttgtggcggagaccct

SEQ ID NO: 1080798 - DNA, 25 bp, Homo sapien
cagaaaaggcaaccctggctccttg

SEQ ID NO: 1080799 - DNA, 25 bp, Homo sapien
gcagcgctagcccacctggtatcta

SEQ ID NO: 1080800 - DNA, 25 bp, Homo sapien
tagcccacctggtatctagggaaag

SEQ ID NO: 1080801 - DNA, 25 bp, Homo sapien
tggctccttgttaggggcagcgcta

SEQ ID NO: 1080802 - DNA, 25 bp, Homo sapien
tggggctatactggacccaagcttg

SEQ ID NO: 1080803 - DNA, 25 bp, Homo sapien
gaccctggggctatactggacccaa

SEQ ID NO: 1080804 - DNA, 25 bp, Homo sapien
cctggggctatactggacccaagct

SEQ ID NO: 1080805 - DNA, 25 bp, Homo sapien
ggaccctggggctatactggaccca

SEQ ID NO: 1080806 - DNA, 25 bp, Homo sapien
gcccaccacctctcatctggaatat

SEQ ID NO: 1080807 - DNA, 25 bp, Homo sapien
ccaccacctctcatctggaatatct

SEQ ID NO: 1080808 - DNA, 25 bp, Homo sapien
cccaccacctctcatctggaatatc

SEQ ID NO: 1080809 - DNA, 25 bp, Homo sapien
cagctgtaaataccatttgtgacca

SEQ ID NO: 1080810 - DNA, 25 bp, Homo sapien
caaaatggagattttgcccacctcc

SEQ ID NO: 1080811 - DNA, 25 bp, Homo sapien
ccagaggaacaaccgcctgctggac

SEQ ID NO: 1080812 - DNA, 25 bp, Homo sapien
gaataagaagttgctgccatccact

SEQ ID NO: 1080813 - DNA, 25 bp, Homo sapien
aagagtttgggagcctaggtttgca

SEQ ID NO: 1080814 - DNA, 25 bp, Homo sapien
agagtaagagtttgggagcctaggt

SEQ ID NO: 1080815 - DNA, 25 bp, Homo sapien
caaagagtaagagtttgggagccta

SEQ ID NO: 1080816 - DNA, 25 bp, Homo sapien
taagagtttgggagcctaggtttgc

SEQ ID NO: 1080817 - DNA, 25 bp, Homo sapien
cttcaggacccaaatatcacttcta

SEQ ID NO: 1080818 - DNA, 25 bp, Homo sapien
cccaaatatcacttctaggcaactg

SEQ ID NO: 1080819 - DNA, 25 bp, Homo sapien
ttcaggacccaaatatcacttctag

SEQ ID NO: 1080820 - DNA, 25 bp, Homo sapien
aaatatcacttctaggcaactgttt

SEQ ID NO: 1080821 - DNA, 25 bp, Homo sapien
aatgaagtcactatcactctccgca

SEQ ID NO: 1080822 - DNA, 25 bp, Homo sapien
tcactatcactctccgcatgttgct

SEQ ID NO: 1080823 - DNA, 25 bp, Homo sapien
gaagtcactatcactctccgcatgt

SEQ ID NO: 1080824 - DNA, 25 bp, Homo sapien
ctggcaatgaagtcactatcactct

SEQ ID NO: 1080825 - DNA, 25 bp, Homo sapien
gttggacacgttcagttggtccttg

SEQ ID NO: 1080826 - DNA, 25 bp, Homo sapien
tcaggtgtctggccacctggtcaat

SEQ ID NO: 1080827 - DNA, 25 bp, Homo sapien
cacctggtcaatgttggacacgttc

SEQ ID NO: 1080828 - DNA, 25 bp, Homo sapien
acgttcagttggtccttgatgatgc

SEQ ID NO: 1080829 - DNA, 25 bp, Homo sapien
gcctatacacatgcaggtgcccctg

SEQ ID NO: 1080830 - DNA, 25 bp, Homo sapien
tgcttcctgaaagcaacctcactag

SEQ ID NO: 1080831 - DNA, 25 bp, Homo sapien
agcatagacgtctggcccctgtgag

SEQ ID NO: 1080832 - DNA, 25 bp, Homo sapien
tcatgctcggccgtggcatctgtac

SEQ ID NO: 1080833 - DNA, 25 bp, Homo sapien
ccaaggtgtgacactcctcctccag

SEQ ID NO: 1080834 - DNA, 25 bp, Homo sapien
ctctccaaggtgtgacactcctcct

SEQ ID NO: 1080835 - DNA, 25 bp, Homo sapien
tccctctccaaggtgtgacactcct

SEQ ID NO: 1080836 - DNA, 25 bp, Homo sapien
aaggtgtgacactcctcctccagaa

SEQ ID NO: 1080837 - DNA, 25 bp, Homo sapien
ggaataccagccttgcggaagagct

SEQ ID NO: 1080838 - DNA, 25 bp, Homo sapien
gagggcagccacgttccccagggaa

SEQ ID NO: 1080839 - DNA, 25 bp, Homo sapien
gcaggatacagaggccaagatcccc

SEQ ID NO: 1080840 - DNA, 25 bp, Homo sapien
agccacgttccccagggaataccag

SEQ ID NO: 1080841 - DNA, 25 bp, Homo sapien
ggggtggcaaggcctcaaatactcc

SEQ ID NO: 1080842 - DNA, 25 bp, Homo sapien
aggcctcaaatactcctcttccagg

SEQ ID NO: 1080843 - DNA, 25 bp, Homo sapien
gaggggtggcaaggcctcaaatact

SEQ ID NO: 1080844 - DNA, 25 bp, Homo sapien
gcaaggcctcaaatactcctcttcc

SEQ ID NO: 1080845 - DNA, 25 bp, Homo sapien
cagctcttctagggtgtgtacaagt

SEQ ID NO: 1080846 - DNA, 25 bp, Homo sapien
cttctagggtgtgtacaagtgtggg

SEQ ID NO: 1080847 - DNA, 25 bp, Homo sapien
gctcttctagggtgtgtacaagtgt

SEQ ID NO: 1080848 - DNA, 25 bp, Homo sapien
tcttctagggtgtgtacaagtgtgg

SEQ ID NO: 1080849 - DNA, 25 bp, Homo sapien
cacaagaaggccccacagatgcctg

SEQ ID NO: 1080850 - DNA, 25 bp, Homo sapien
acacaagaaggccccacagatgcct

SEQ ID NO: 1080851 - DNA, 25 bp, Homo sapien
acaagaaagagtaactgtgaggggt

SEQ ID NO: 1080852 - DNA, 25 bp, Homo sapien
tggtctgatccttcagtccaccctg

SEQ ID NO: 1080853 - DNA, 25 bp, Homo sapien
ccctgtgtctactgttgtggtttac

SEQ ID NO: 1080854 - DNA, 25 bp, Homo sapien
gggtggtggtctgatccttcagtcc

SEQ ID NO: 1080855 - DNA, 25 bp, Homo sapien
ggtgcaaccccgcagaggggaagcg

SEQ ID NO: 1080856 - DNA, 25 bp, Homo sapien
catgggtgtggaagctggcccttcc

SEQ ID NO: 1080857 - DNA, 25 bp, Homo sapien
cctcgaggtcgaaggtagggctcca

SEQ ID NO: 1080858 - DNA, 25 bp, Homo sapien
tgggtagccgactggcctcgaggtc

SEQ ID NO: 1080859 - DNA, 25 bp, Homo sapien
gctgcactgaagctgccgtccccag

SEQ ID NO: 1080860 - DNA, 25 bp, Homo sapien
ggcagcggcagacaggtgcgctgtg

SEQ ID NO: 1080861 - DNA, 25 bp, Homo sapien
cctggcgagagctcgccaagaccag

SEQ ID NO: 1080862 - DNA, 25 bp, Homo sapien
ggtgcgctgtggcagaagccagagc

SEQ ID NO: 1080863 - DNA, 25 bp, Homo sapien
gagagctcgccaagaccagatctga

SEQ ID NO: 1080864 - DNA, 25 bp, Homo sapien
aaggctttgatgcttgggaccgatg

SEQ ID NO: 1080865 - DNA, 25 bp, Homo sapien
ttgatgcttgggaccgatgcccggc

SEQ ID NO: 1080866 - DNA, 25 bp, Homo sapien
tttaaagtccatagattttaatgaa

SEQ ID NO: 1080867 - DNA, 25 bp, Homo sapien
ctctgagcggctgctgtgctttgtc

SEQ ID NO: 1080868 - DNA, 25 bp, Homo sapien
tgccctccctccatgaggctaaagg

SEQ ID NO: 1080869 - DNA, 25 bp, Homo sapien
tctgtagcaataacggtgcgccgcc

SEQ ID NO: 1080870 - DNA, 25 bp, Homo sapien
aaatgtgctgccctcgttcatgtgc

SEQ ID NO: 1080871 - DNA, 25 bp, Homo sapien
catttgtccgtcctctgtgcagtga

SEQ ID NO: 1080872 - DNA, 25 bp, Homo sapien
cctggagcaccggacagggcgctac

SEQ ID NO: 1080873 - DNA, 25 bp, Homo sapien
ccctctcctgaggacggcttcgagg

SEQ ID NO: 1080874 - DNA, 25 bp, Homo sapien
gacaaggcgcagatccccattgtgg

SEQ ID NO: 1080875 - DNA, 25 bp, Homo sapien
cccattgtgggcagtaatggctcca

SEQ ID NO: 1080876 - DNA, 25 bp, Homo sapien
gccatgttccggctctgccgcacag

SEQ ID NO: 1080877 - DNA, 25 bp, Homo sapien
acaaccactaccagtacccaggctg

SEQ ID NO: 1080878 - DNA, 25 bp, Homo sapien
tgatccagtaccagccgatcaccta

SEQ ID NO: 1080879 - DNA, 25 bp, Homo sapien
cactgtgatccagtaccagccgatc

SEQ ID NO: 1080880 - DNA, 25 bp, Homo sapien
tggcgcttcgtctctcccgccatca

SEQ ID NO: 1080881 - DNA, 25 bp, Homo sapien
agatgatgctgggattcccaccacc

SEQ ID NO: 1080882 - DNA, 25 bp, Homo sapien
gggcaccggaactacttccaggaca

SEQ ID NO: 1080883 - DNA, 25 bp, Homo sapien
tcagatctgctggcgcttcgtctct

SEQ ID NO: 1080884 - DNA, 25 bp, Homo sapien
atctcctgcatcatgtgtgtggcca

SEQ ID NO: 1080885 - DNA, 25 bp, Homo sapien
caggagagatgtgagcagcacagag

SEQ ID NO: 1080886 - DNA, 25 bp, Homo sapien
gagatgtgagcagcacagagggcat

SEQ ID NO: 1080887 - DNA, 25 bp, Homo sapien
ggagagatgtgagcagcacagaggg

SEQ ID NO: 1080888 - DNA, 25 bp, Homo sapien
agagatgtgagcagcacagagggca

SEQ ID NO: 1080889 - DNA, 25 bp, Homo sapien
gattctgagccccatgaaacctctg

SEQ ID NO: 1080890 - DNA, 25 bp, Homo sapien
ggagattctgagccccatgaaacct

SEQ ID NO: 1080891 - DNA, 25 bp, Homo sapien
attctgagccccatgaaacctctga

SEQ ID NO: 1080892 - DNA, 25 bp, Homo sapien
gagattctgagccccatgaaacctc

SEQ ID NO: 1080893 - DNA, 25 bp, Homo sapien
gagcatcaggctccaagcccgcaga

SEQ ID NO: 1080894 - DNA, 25 bp, Homo sapien
agtgcccagctgaccccggcctggg

SEQ ID NO: 1080895 - DNA, 25 bp, Homo sapien
caggtagcccctcatctagcaggtc

SEQ ID NO: 1080896 - DNA, 25 bp, Homo sapien
ccggcctgggcaggtagcccctcat

SEQ ID NO: 1080897 - DNA, 25 bp, Homo sapien
tagcccggtgcagtgccgaagattt

SEQ ID NO: 1080898 - DNA, 25 bp, Homo sapien
caggaagcctggagatcaagagatc

SEQ ID NO: 1080899 - DNA, 25 bp, Homo sapien
aaatagacctttgcccattgggaca

SEQ ID NO: 1080900 - DNA, 25 bp, Homo sapien
cagaccatgaaggaattggactcca

SEQ ID NO: 1080901 - DNA, 25 bp, Homo sapien
catagttgacgaacttataagcaaa

SEQ ID NO: 1080902 - DNA, 25 bp, Homo sapien
gccctcggggaactcactgactcat

SEQ ID NO: 1080903 - DNA, 25 bp, Homo sapien
cacagagggtaaaagaaacacagtc

SEQ ID NO: 1080904 - DNA, 25 bp, Homo sapien
catttcagaggtcccgacttcgcta

SEQ ID NO: 1080905 - DNA, 25 bp, Homo sapien
tgtcattattagtccttgactgcag

SEQ ID NO: 1080906 - DNA, 25 bp, Homo sapien
ttgtcattattagtccttgactgca

SEQ ID NO: 1080907 - DNA, 25 bp, Homo sapien
gcagacagatggctttaaggaagtc

SEQ ID NO: 1080908 - DNA, 25 bp, Homo sapien
cattgtcattattagtccttgactg

SEQ ID NO: 1080909 - DNA, 25 bp, Homo sapien
tgtggatcttccacacgtagaagag

SEQ ID NO: 1080910 - DNA, 25 bp, Homo sapien
cacgtagaagagactggacgccacg

SEQ ID NO: 1080911 - DNA, 25 bp, Homo sapien
cgccacgggcaatcagttggtgttt

SEQ ID NO: 1080912 - DNA, 25 bp, Homo sapien
aacagtggcccacaagtgcttcagg

SEQ ID NO: 1080913 - DNA, 25 bp, Homo sapien
gtggcactgtccgtccgaggagcca

SEQ ID NO: 1080914 - DNA, 25 bp, Homo sapien
taggtgcgcgcgtctgggtgtcacc

SEQ ID NO: 1080915 - DNA, 25 bp, Homo sapien
aggctgtgcgggtagcgccggagcc

SEQ ID NO: 1080916 - DNA, 25 bp, Homo sapien
cgggatgtctgtctcgccgcaaaga

SEQ ID NO: 1080917 - DNA, 25 bp, Homo sapien
agtctctagcggctctgctccaaag

SEQ ID NO: 1080918 - DNA, 25 bp, Homo sapien
ctagcggctctgctccaaagggaat

SEQ ID NO: 1080919 - DNA, 25 bp, Homo sapien
gcaatgcccacagtctctagcggct

SEQ ID NO: 1080920 - DNA, 25 bp, Homo sapien
ttacccagcaatgcccacagtctct

SEQ ID NO: 1080921 - DNA, 25 bp, Homo sapien
gggtggtatcccttttgatgagccc

SEQ ID NO: 1080922 - DNA, 25 bp, Homo sapien
tatcccttttgatgagccccagcga

SEQ ID NO: 1080923 - DNA, 25 bp, Homo sapien
tacttgggggcctcttcgacatcct

SEQ ID NO: 1080924 - DNA, 25 bp, Homo sapien
tttgatgagccccagcgaggaggca

SEQ ID NO: 1080925 - DNA, 25 bp, Homo sapien
ctggcagagcccagtgtctttagcc

SEQ ID NO: 1080926 - DNA, 25 bp, Homo sapien
ctcccccacctctggattagccctg

SEQ ID NO: 1080927 - DNA, 25 bp, Homo sapien
cagagcccagtgtctttagcccctc

SEQ ID NO: 1080928 - DNA, 25 bp, Homo sapien
gcagagcccagtgtctttagcccct

SEQ ID NO: 1080929 - DNA, 25 bp, Homo sapien
caaatcttgtggatgaattcttcat

SEQ ID NO: 1080930 - DNA, 25 bp, Homo sapien
cttgtggatgaattcttcatacaca

SEQ ID NO: 1080931 - DNA, 25 bp, Homo sapien
tcttatgttccatgataagctcatc

SEQ ID NO: 1080932 - DNA, 25 bp, Homo sapien
catacacaggctgacatctgtttta

SEQ ID NO: 1080933 - DNA, 25 bp, Homo sapien
gaagtctcacagtcttcggtctgct

SEQ ID NO: 1080934 - DNA, 25 bp, Homo sapien
gggaggaagtctcacagtcttcggt

SEQ ID NO: 1080935 - DNA, 25 bp, Homo sapien
gacaaaagcgtccttttagctcact

SEQ ID NO: 1080936 - DNA, 25 bp, Homo sapien
aagcgtccttttagctcactgtggg

SEQ ID NO: 1080937 - DNA, 25 bp, Homo sapien
ctcttctgccgcatgtttggtgcca

SEQ ID NO: 1080938 - DNA, 25 bp, Homo sapien
ctgccagggaaaacgatgattctaa

SEQ ID NO: 1080939 - DNA, 25 bp, Homo sapien
tagtgttacaactcttgcagcctcc

SEQ ID NO: 1080940 - DNA, 25 bp, Homo sapien
gttgctgcaaggcaggtgaacccca

SEQ ID NO: 1080941 - DNA, 25 bp, Homo sapien
tatggccacttacttgcctgtctgc

SEQ ID NO: 1080942 - DNA, 25 bp, Homo sapien
gtcccacgtgaggactgataaccca

SEQ ID NO: 1080943 - DNA, 25 bp, Homo sapien
ggagtcaaaatggtgctggccaatc

SEQ ID NO: 1080944 - DNA, 25 bp, Homo sapien
tacatgaggcagtagcagtatggcc

SEQ ID NO: 1080945 - DNA, 25 bp, Homo sapien
gatgttattggggtgggggtgggca

SEQ ID NO: 1080946 - DNA, 25 bp, Homo sapien
tgatgttattggggtgggggtgggc

SEQ ID NO: 1080947 - DNA, 25 bp, Homo sapien
agatgacaggtaatgcctaaggctc

SEQ ID NO: 1080948 - DNA, 25 bp, Homo sapien
ctgaggattgaggtctccaagagtg

SEQ ID NO: 1080949 - DNA, 25 bp, Homo sapien
gaggattgaggtctccaagagtgaa

SEQ ID NO: 1080950 - DNA, 25 bp, Homo sapien
atgacaggtaatgcctaaggctcag

SEQ ID NO: 1080951 - DNA, 25 bp, Homo sapien
tcagtaggcgggtcgagttggaagc

SEQ ID NO: 1080952 - DNA, 25 bp, Homo sapien
ctccaggtcagtaggcgggtcgagt

SEQ ID NO: 1080953 - DNA, 25 bp, Homo sapien
ggcgggtcgagttggaagccttgtg

SEQ ID NO: 1080954 - DNA, 25 bp, Homo sapien
tccaggtcagtaggcgggtcgagtt

SEQ ID NO: 1080955 - DNA, 25 bp, Homo sapien
gagcacagcggccacagagacatgc

SEQ ID NO: 1080956 - DNA, 25 bp, Homo sapien
cgagcacagcggccacagagacatg

SEQ ID NO: 1080957 - DNA, 25 bp, Homo sapien
gcacagcggccacagagacatgcat

SEQ ID NO: 1080958 - DNA, 25 bp, Homo sapien
agcacagcggccacagagacatgca

SEQ ID NO: 1080959 - DNA, 25 bp, Homo sapien
atctgaatgtagacaggtgaccagg

SEQ ID NO: 1080960 - DNA, 25 bp, Homo sapien
ggctttcatctaaatctgaatgtag

SEQ ID NO: 1080961 - DNA, 25 bp, Homo sapien
tattcctctgcgaatccagacatct

SEQ ID NO: 1080962 - DNA, 25 bp, Homo sapien
tcatctaaatctgaatgtagacagg

SEQ ID NO: 1080963 - DNA, 25 bp, Homo sapien
caatgttattgtgctgattgctgcc

SEQ ID NO: 1080964 - DNA, 25 bp, Homo sapien
tcccattagtcaaggtttgcatcac

SEQ ID NO: 1080965 - DNA, 25 bp, Homo sapien
tgcagcaagcttccaagagacacag

SEQ ID NO: 1080966 - DNA, 25 bp, Homo sapien
aaatgtggtcatgcttcaagtggga

SEQ ID NO: 1080967 - DNA, 25 bp, Homo sapien
cttctgtttgatggtggtcttcctc

SEQ ID NO: 1080968 - DNA, 25 bp, Homo sapien
aggaacccatctctcaagcagcagc

SEQ ID NO: 1080969 - DNA, 25 bp, Homo sapien
tgtcctgtctgagtccatgggactc

SEQ ID NO: 1080970 - DNA, 25 bp, Homo sapien
tcctgtgccattgtcagctttgtcc

SEQ ID NO: 1080971 - DNA, 25 bp, Homo sapien
gggccatatagtaaataattgaggc

SEQ ID NO: 1080972 - DNA, 25 bp, Homo sapien
agggccatatagtaaataattgagg

SEQ ID NO: 1080973 - DNA, 25 bp, Homo sapien
agaatatacctataatgtacccaca

SEQ ID NO: 1080974 - DNA, 25 bp, Homo sapien
tactagaatatacctataatgtacc

SEQ ID NO: 1080975 - DNA, 25 bp, Homo sapien
gactttcttcaaagatctggaacaa

SEQ ID NO: 1080976 - DNA, 25 bp, Homo sapien
caacctgtcgtctacattagaatca

SEQ ID NO: 1080977 - DNA, 25 bp, Homo sapien
gcacaacgtcatttatctggtattc

SEQ ID NO: 1080978 - DNA, 25 bp, Homo sapien
gggcacaacgtcatttatctggtat

SEQ ID NO: 1080979 - DNA, 25 bp, Homo sapien
attgagaagggcacaacgtcattta

SEQ ID NO: 1080980 - DNA, 25 bp, Homo sapien
gaagggcacaacgtcatttatctgg

SEQ ID NO: 1080981 - DNA, 25 bp, Homo sapien
tagagcttctccctactgggcagca

SEQ ID NO: 1080982 - DNA, 25 bp, Homo sapien
cactgggatgacgtgcagcatacaa

SEQ ID NO: 1080983 - DNA, 25 bp, Homo sapien
gaagatccagacctgcaacgggaag

SEQ ID NO: 1080984 - DNA, 25 bp, Homo sapien
tatgccgctcctatacgagtgggcc

SEQ ID NO: 1080985 - DNA, 25 bp, Homo sapien
ctgggtggggtctagactctctact

SEQ ID NO: 1080986 - DNA, 25 bp, Homo sapien
ggtggggtctagactctctactgaa

SEQ ID NO: 1080987 - DNA, 25 bp, Homo sapien
gactgggtggggtctagactctcta

SEQ ID NO: 1080988 - DNA, 25 bp, Homo sapien
gggtggggtctagactctctactga

SEQ ID NO: 1080989 - DNA, 25 bp, Homo sapien
tccatctcagcctgcggtcggccgt

SEQ ID NO: 1080990 - DNA, 25 bp, Homo sapien
tctcagcctgcggtcggccgtacat

SEQ ID NO: 1080991 - DNA, 25 bp, Homo sapien
tccccagcctcctgttccatctcag

SEQ ID NO: 1080992 - DNA, 25 bp, Homo sapien
tgggcagcctggtgcgccgcctgcc

SEQ ID NO: 1080993 - DNA, 25 bp, Homo sapien
gcattgaagaacagaacacaggtcc

SEQ ID NO: 1080994 - DNA, 25 bp, Homo sapien
gattcagtgtgctatcggacccaaa

SEQ ID NO: 1080995 - DNA, 25 bp, Homo sapien
cactacttgtggatgttgaacctaa

SEQ ID NO: 1080996 - DNA, 25 bp, Homo sapien
gacccaaagggtgatggcaccgcta

SEQ ID NO: 1080997 - DNA, 25 bp, Homo sapien
ctgcgctgtgaggaaagtgctgaat

SEQ ID NO: 1080998 - DNA, 25 bp, Homo sapien
aagtgctgaatgcttggtaggcctt

SEQ ID NO: 1080999 - DNA, 25 bp, Homo sapien
ttccaagaggtgtgcactccagagc

SEQ ID NO: 1081000 - DNA, 25 bp, Homo sapien
caagatgggcgctgagttctcgtta

SEQ ID NO: 1081001 - DNA, 25 bp, Homo sapien
tgacagtaaatcatccgggaaggag

SEQ ID NO: 1081002 - DNA, 25 bp, Homo sapien
cttagattcccaccgaagggcctgg

SEQ ID NO: 1081003 - DNA, 25 bp, Homo sapien
tgggctctcctacgggcattagttg

SEQ ID NO: 1081004 - DNA, 25 bp, Homo sapien
gaaaatcgtcatctcttgctgaggg

SEQ ID NO: 1081005 - DNA, 25 bp, Homo sapien
tagaaatgggccttcttgagagtct

SEQ ID NO: 1081006 - DNA, 25 bp, Homo sapien
gtagaaatgggccttcttgagagtc

SEQ ID NO: 1081007 - DNA, 25 bp, Homo sapien
tggtagaaatgggccttcttgagag

SEQ ID NO: 1081008 - DNA, 25 bp, Homo sapien
ggtagaaatgggccttcttgagagt

SEQ ID NO: 1081009 - DNA, 25 bp, Homo sapien
ctactgtctgtggagcaggtccggg

SEQ ID NO: 1081010 - DNA, 25 bp, Homo sapien
ccttctaccagtcccttcctgaggc

SEQ ID NO: 1081011 - DNA, 25 bp, Homo sapien
tgaggcctggagttcttctctactg

SEQ ID NO: 1081012 - DNA, 25 bp, Homo sapien
tgaggagccccttctaccagtccct

SEQ ID NO: 1081013 - DNA, 25 bp, Homo sapien
ccgcagttctcgtagttgcagcagt

SEQ ID NO: 1081014 - DNA, 25 bp, Homo sapien
taagcttttccgcagttctcgtagt

SEQ ID NO: 1081015 - DNA, 25 bp, Homo sapien
tggtataagcttttccgcagttctc

SEQ ID NO: 1081016 - DNA, 25 bp, Homo sapien
cttttccgcagttctcgtagttgca

SEQ ID NO: 1081017 - DNA, 25 bp, Homo sapien
tgacaagggagagatggaatttaga

SEQ ID NO: 1081018 - DNA, 25 bp, Homo sapien
agggagagatggaatttagaataca

SEQ ID NO: 1081019 - DNA, 25 bp, Homo sapien
atttagaatacagtaggaaggaagg

SEQ ID NO: 1081020 - DNA, 25 bp, Homo sapien
gaatttagaatacagtaggaaggaa

SEQ ID NO: 1081021 - DNA, 25 bp, Homo sapien
atctggtgtgtacccgcatatgtcg

SEQ ID NO: 1081022 - DNA, 25 bp, Homo sapien
cccagttgcaagaatatggcctctc

SEQ ID NO: 1081023 - DNA, 25 bp, Homo sapien
gtgtacccgcatatgtcgtctaagc

SEQ ID NO: 1081024 - DNA, 25 bp, Homo sapien
tcgatatctggtgtgtacccgcata

SEQ ID NO: 1081025 - DNA, 25 bp, Homo sapien
gaacagttgccacgtccagtgctct

SEQ ID NO: 1081026 - DNA, 25 bp, Homo sapien
tagtttccagaagatagacatgtcc

SEQ ID NO: 1081027 - DNA, 25 bp, Homo sapien
tccccagaggcccagataggcttga

SEQ ID NO: 1081028 - DNA, 25 bp, Homo sapien
ttgagcctgcagaggaccggcttct

SEQ ID NO: 1081029 - DNA, 25 bp, Homo sapien
taggattacggtacccgccatatgc

SEQ ID NO: 1081030 - DNA, 25 bp, Homo sapien
caaaatctactagagtccacaggtc

SEQ ID NO: 1081031 - DNA, 25 bp, Homo sapien
tactatcagaagcaagagtgacaag

SEQ ID NO: 1081032 - DNA, 25 bp, Homo sapien
gaaagacactttgagtacccaagac

SEQ ID NO: 1081033 - DNA, 25 bp, Homo sapien
ggtttgcttcatagattccttttcc

SEQ ID NO: 1081034 - DNA, 25 bp, Homo sapien
ttggtgttggtttgcttcatagatt

SEQ ID NO: 1081035 - DNA, 25 bp, Homo sapien
gcttcatagattccttttcccttgg

SEQ ID NO: 1081036 - DNA, 25 bp, Homo sapien
tgttggtttgcttcatagattcctt

SEQ ID NO: 1081037 - DNA, 25 bp, Homo sapien
tctagagcgaaaggccagagtacgc

SEQ ID NO: 1081038 - DNA, 25 bp, Homo sapien
taggggagttgcttatatccctcca

SEQ ID NO: 1081039 - DNA, 25 bp, Homo sapien
ttattctagagcgaaaggccagagt

SEQ ID NO: 1081040 - DNA, 25 bp, Homo sapien
aaaggccagagtacgctggagagaa

SEQ ID NO: 1081041 - DNA, 25 bp, Homo sapien
gacaactttattcccgatttttgca

SEQ ID NO: 1081042 - DNA, 25 bp, Homo sapien
ttttgcaatgctgatctccaacaga

SEQ ID NO: 1081043 - DNA, 25 bp, Homo sapien
agacagtttgcgcaagttagctata

SEQ ID NO: 1081044 - DNA, 25 bp, Homo sapien
cagtttgcgcaagttagctataagt

SEQ ID NO: 1081045 - DNA, 25 bp, Homo sapien
gagcagacagtttgcgcaagttagc

SEQ ID NO: 1081046 - DNA, 25 bp, Homo sapien
tgcgcaagttagctataagtggtgt

SEQ ID NO: 1081047 - DNA, 25 bp, Homo sapien
cagcttagaagtatccctcaaggga

SEQ ID NO: 1081048 - DNA, 25 bp, Homo sapien
tcctggaggccagcttcgtggcact

SEQ ID NO: 1081049 - DNA, 25 bp, Homo sapien
tcgtggcacttcactagtacaggag

SEQ ID NO: 1081050 - DNA, 25 bp, Homo sapien
tacaggagctagctgcactctttgg

SEQ ID NO: 1081051 - DNA, 25 bp, Homo sapien
ccccgtccccgcaaagccgcggcag

SEQ ID NO: 1081052 - DNA, 25 bp, Homo sapien
ccgtccccgcaaagccgcggcagaa

SEQ ID NO: 1081053 - DNA, 25 bp, Homo sapien
cgcaaagccgcggcagaaacttccg

SEQ ID NO: 1081054 - DNA, 25 bp, Homo sapien
ccccgcaaagccgcggcagaaactt

SEQ ID NO: 1081055 - DNA, 25 bp, Homo sapien
tggatgttcctaacggccccttcag

SEQ ID NO: 1081056 - DNA, 25 bp, Homo sapien
tcaggtcggggatctgcctgtgccc

SEQ ID NO: 1081057 - DNA, 25 bp, Homo sapien
gcctgtgccccaccgcttggatgtt

SEQ ID NO: 1081058 - DNA, 25 bp, Homo sapien
caccgcttggatgttcctaacggcc

SEQ ID NO: 1081059 - DNA, 25 bp, Homo sapien
ctcaggtcagggggcggggccaatc

SEQ ID NO: 1081060 - DNA, 25 bp, Homo sapien
tgaagaaggaccaggctcaggtcag

SEQ ID NO: 1081061 - DNA, 25 bp, Homo sapien
ctgaagaaggaccaggctcaggtca

SEQ ID NO: 1081062 - DNA, 25 bp, Homo sapien
gtcagggggcggggccaatccagac

SEQ ID NO: 1081063 - DNA, 25 bp, Homo sapien
gggagccaccggaggtcaagggtca

SEQ ID NO: 1081064 - DNA, 25 bp, Homo sapien
gagagatgggggagccaccggaggt

SEQ ID NO: 1081065 - DNA, 25 bp, Homo sapien
gccaccggaggtcaagggtcagtgc

SEQ ID NO: 1081066 - DNA, 25 bp, Homo sapien
agatgggggagccaccggaggtcaa

SEQ ID NO: 1081067 - DNA, 25 bp, Homo sapien
ccgagttctagaatgtcccgtacat

SEQ ID NO: 1081068 - DNA, 25 bp, Homo sapien
tctggacccccgagttctagaatgt

SEQ ID NO: 1081069 - DNA, 25 bp, Homo sapien
agttctagaatgtcccgtacatccg

SEQ ID NO: 1081070 - DNA, 25 bp, Homo sapien
cccgagttctagaatgtcccgtaca

SEQ ID NO: 1081071 - DNA, 25 bp, Homo sapien
tgaggaaggaaaccacagaaaggaa

SEQ ID NO: 1081072 - DNA, 25 bp, Homo sapien
ctgaggaaggaaaccacagaaagga

SEQ ID NO: 1081073 - DNA, 25 bp, Homo sapien
tagagcaaggcatagacttcccggt

SEQ ID NO: 1081074 - DNA, 25 bp, Homo sapien
gagcaaggcatagacttcccggtgc

SEQ ID NO: 1081075 - DNA, 25 bp, Homo sapien
gcaaggcatagacttcccggtgcat

SEQ ID NO: 1081076 - DNA, 25 bp, Homo sapien
aaggcatagacttcccggtgcatgc

SEQ ID NO: 1081077 - DNA, 25 bp, Homo sapien
agttaggggcatggcaggtgaatca

SEQ ID NO: 1081078 - DNA, 25 bp, Homo sapien
gagttaggggcatggcaggtgaatc

SEQ ID NO: 1081079 - DNA, 25 bp, Homo sapien
caaaagacttcaggtcctcctgcat

SEQ ID NO: 1081080 - DNA, 25 bp, Homo sapien
tgcatcctgctaagcaagcaggagc

SEQ ID NO: 1081081 - DNA, 25 bp, Homo sapien
cctgctaagcaagcaggagcccttg

SEQ ID NO: 1081082 - DNA, 25 bp, Homo sapien
agaaagtcatgtcctggagcaaaag

SEQ ID NO: 1081083 - DNA, 25 bp, Homo sapien
taaagagctttttgtcccagggagc

SEQ ID NO: 1081084 - DNA, 25 bp, Homo sapien
ttagggagatgcgaggttagaatca

SEQ ID NO: 1081085 - DNA, 25 bp, Homo sapien
ctggcagggaggtttagggagatgc

SEQ ID NO: 1081086 - DNA, 25 bp, Homo sapien
ggttagaatcagaaggtgtgttaaa

SEQ ID NO: 1081087 - DNA, 25 bp, Homo sapien
gccagtgtcactgggtagcagtggg

SEQ ID NO: 1081088 - DNA, 25 bp, Homo sapien
ggccagtgtcactgggtagcagtgg

SEQ ID NO: 1081089 - DNA, 25 bp, Homo sapien
ccagtgtcactgggtagcagtgggg

SEQ ID NO: 1081090 - DNA, 25 bp, Homo sapien
gctgcacgtcgccagtggaagaaca

SEQ ID NO: 1081091 - DNA, 25 bp, Homo sapien
aacttggccttcactgtacggtatc

SEQ ID NO: 1081092 - DNA, 25 bp, Homo sapien
ggtgaatggcatccacttccaaggc

SEQ ID NO: 1081093 - DNA, 25 bp, Homo sapien
gaagaacattgctccgtccttgcgg

SEQ ID NO: 1081094 - DNA, 25 bp, Homo sapien
tactctgcatgcatttgccacgagg

SEQ ID NO: 1081095 - DNA, 25 bp, Homo sapien
catgaaaaaccagagcaggtccggg

SEQ ID NO: 1081096 - DNA, 25 bp, Homo sapien
caatcttggcctgtgtccgaatgaa

SEQ ID NO: 1081097 - DNA, 25 bp, Homo sapien
gactggatgcgaaggaagcactgct

SEQ ID NO: 1081098 - DNA, 25 bp, Homo sapien
taaaggatagtctgcaaaccagtgc

SEQ ID NO: 1081099 - DNA, 25 bp, Homo sapien
taagtctaggctattccaggccgca

SEQ ID NO: 1081100 - DNA, 25 bp, Homo sapien
tctacagaagctgggcctgaatcct

SEQ ID NO: 1081101 - DNA, 25 bp, Homo sapien
catatgacaggcagggatcctagcc

SEQ ID NO: 1081102 - DNA, 25 bp, Homo sapien
tactagcacagagggacacagtagg

SEQ ID NO: 1081103 - DNA, 25 bp, Homo sapien
catgtaagtgcttctgtggagtcca

SEQ ID NO: 1081104 - DNA, 25 bp, Homo sapien
gagcctcagtcatgggacacacact

SEQ ID NO: 1081105 - DNA, 25 bp, Homo sapien
aacttgtctgcttgactagaggtcc

SEQ ID NO: 1081106 - DNA, 25 bp, Homo sapien
ctgctccgagtacacaggcacctgc

SEQ ID NO: 1081107 - DNA, 25 bp, Homo sapien
tgctccgagtacacaggcacctgca

SEQ ID NO: 1081108 - DNA, 25 bp, Homo sapien
ccgagtacacaggcacctgcacagt

SEQ ID NO: 1081109 - DNA, 25 bp, Homo sapien
ctccgagtacacaggcacctgcaca

SEQ ID NO: 1081110 - DNA, 25 bp, Homo sapien
cttgaactgctggtggtcataccgg

SEQ ID NO: 1081111 - DNA, 25 bp, Homo sapien
catcgtggagataaagctggtactc

SEQ ID NO: 1081112 - DNA, 25 bp, Homo sapien
tgccttagtccaagcatcatcgtgg

SEQ ID NO: 1081113 - DNA, 25 bp, Homo sapien
catggataacaacaaaacgcaggtc

SEQ ID NO: 1081114 - DNA, 25 bp, Homo sapien
ttcgtgcccagcatcaaatactggt

SEQ ID NO: 1081115 - DNA, 25 bp, Homo sapien
tagcacagatgtggtagtaccgctc

SEQ ID NO: 1081116 - DNA, 25 bp, Homo sapien
ggtatcttaaggtctgtgcctggca

SEQ ID NO: 1081117 - DNA, 25 bp, Homo sapien
tccggttgtagagacgctcaagctg

SEQ ID NO: 1081118 - DNA, 25 bp, Homo sapien
gacaggtatgtggccttgggcttac

SEQ ID NO: 1081119 - DNA, 25 bp, Homo sapien
ggacaggtatgtggccttgggctta

SEQ ID NO: 1081120 - DNA, 25 bp, Homo sapien
tggaggacaggtatgtggccttggg

SEQ ID NO: 1081121 - DNA, 25 bp, Homo sapien
gaggacaggtatgtggccttgggct

SEQ ID NO: 1081122 - DNA, 25 bp, Homo sapien
acctgggagtgggagttgaggggat

SEQ ID NO: 1081123 - DNA, 25 bp, Homo sapien
gaggcagggggacctgggagtggga

SEQ ID NO: 1081124 - DNA, 25 bp, Homo sapien
cagggggacctgggagtgggagttg

SEQ ID NO: 1081125 - DNA, 25 bp, Homo sapien
tgggagttgaggggatggaggatgg

SEQ ID NO: 1081126 - DNA, 25 bp, Homo sapien
aagtaatggatcatgagggaggtga

SEQ ID NO: 1081127 - DNA, 25 bp, Homo sapien
tgtgtgagggcacttctaggagtga

SEQ ID NO: 1081128 - DNA, 25 bp, Homo sapien
aaagtgagggatgcgaagtgtgtga

SEQ ID NO: 1081129 - DNA, 25 bp, Homo sapien
agtgagggtagacacggaggtgaca

SEQ ID NO: 1081130 - DNA, 25 bp, Homo sapien
caggtcctggctgcgtttctcccgc

SEQ ID NO: 1081131 - DNA, 25 bp, Homo sapien
tggtgtctgccgctgtgatcagctt

SEQ ID NO: 1081132 - DNA, 25 bp, Homo sapien
ttccgtgcgccgctgctctgcagtg

SEQ ID NO: 1081133 - DNA, 25 bp, Homo sapien
ttcttccgggcctcaatcttgcgca

SEQ ID NO: 1081134 - DNA, 25 bp, Homo sapien
cttccaccctgagctaggctggcgg

SEQ ID NO: 1081135 - DNA, 25 bp, Homo sapien
gggtactctcagaaccctccactcg

SEQ ID NO: 1081136 - DNA, 25 bp, Homo sapien
gggttagtcctagcaccccatcagc

SEQ ID NO: 1081137 - DNA, 25 bp, Homo sapien
ctgagctaggctggcggaacctccg

SEQ ID NO: 1081138 - DNA, 25 bp, Homo sapien
gacttgaagtctggaaacttgatgc

SEQ ID NO: 1081139 - DNA, 25 bp, Homo sapien
tctggaaacttgatgcctgcagtct

SEQ ID NO: 1081140 - DNA, 25 bp, Homo sapien
ttgaagtctggaaacttgatgcctg

SEQ ID NO: 1081141 - DNA, 25 bp, Homo sapien
aagtctggaaacttgatgcctgcag

SEQ ID NO: 1081142 - DNA, 25 bp, Homo sapien
cagcgtttgggacacatggagccca

SEQ ID NO: 1081143 - DNA, 25 bp, Homo sapien
caggacccaaacttgctaaaggagg

SEQ ID NO: 1081144 - DNA, 25 bp, Homo sapien
ccaggacccaaacttgctaaaggag

SEQ ID NO: 1081145 - DNA, 25 bp, Homo sapien
ctgcctgcagcgtttgggacacatg

SEQ ID NO: 1081146 - DNA, 25 bp, Homo sapien
tggtggaagagagacggtaacacat

SEQ ID NO: 1081147 - DNA, 25 bp, Homo sapien
cacatggaggttaactatgggccag

SEQ ID NO: 1081148 - DNA, 25 bp, Homo sapien
gaaagctgctatgaccttagcctgg

SEQ ID NO: 1081149 - DNA, 25 bp, Homo sapien
tagcctggccacatcactgagatcc

SEQ ID NO: 1081150 - DNA, 25 bp, Homo sapien
tgcaatgaaagctggcaagctaagc

SEQ ID NO: 1081151 - DNA, 25 bp, Homo sapien
ctgcaatgaaagctggcaagctaag

SEQ ID NO: 1081152 - DNA, 25 bp, Homo sapien
cacaccaagctccagcagcatctgt

SEQ ID NO: 1081153 - DNA, 25 bp, Homo sapien
agggccttgatcttcttctgtccca

SEQ ID NO: 1081154 - DNA, 25 bp, Homo sapien
ttgatcttcttctgtcccacagagc

SEQ ID NO: 1081155 - DNA, 25 bp, Homo sapien
agcagcatctgttccagggccttga

SEQ ID NO: 1081156 - DNA, 25 bp, Homo sapien
ttgagctcgtagagcagcaccaggt

SEQ ID NO: 1081157 - DNA, 25 bp, Homo sapien
accaggtcgcttcgcagctcattga

SEQ ID NO: 1081158 - DNA, 25 bp, Homo sapien
tcctccgtaggtgtcgggctcagct

SEQ ID NO: 1081159 - DNA, 25 bp, Homo sapien
agctcatactcgcagttggcacagg

SEQ ID NO: 1081160 - DNA, 25 bp, Homo sapien
tcagtctcagactcgcacagaagtg

SEQ ID NO: 1081161 - DNA, 25 bp, Homo sapien
ggagaggagcccctacacccatgtg

SEQ ID NO: 1081162 - DNA, 25 bp, Homo sapien
agtgatgatcgttcctgctgcaggc

SEQ ID NO: 1081163 - DNA, 25 bp, Homo sapien
gaggagcccctacacccatgtgcat

SEQ ID NO: 1081164 - DNA, 25 bp, Homo sapien
cagggacaaggacgcccactggtca

SEQ ID NO: 1081165 - DNA, 25 bp, Homo sapien
ccccaaggcctgagtcaggcttagt

SEQ ID NO: 1081166 - DNA, 25 bp, Homo sapien
tcaggcttagtgcatgtgcttcaca

SEQ ID NO: 1081167 - DNA, 25 bp, Homo sapien
cttcacacgctcagggacaaggacg

SEQ ID NO: 1081168 - DNA, 25 bp, Homo sapien
tggaggccgactcccgtcgctttct

SEQ ID NO: 1081169 - DNA, 25 bp, Homo sapien
cagcgtcgcccacaccccgtggggc

SEQ ID NO: 1081170 - DNA, 25 bp, Homo sapien
aacagcgtcgcccacaccccgtggg

SEQ ID NO: 1081171 - DNA, 25 bp, Homo sapien
ataacagcgtcgcccacaccccgtg

SEQ ID NO: 1081172 - DNA, 25 bp, Homo sapien
acagcgtcgcccacaccccgtgggg

SEQ ID NO: 1081173 - DNA, 25 bp, Homo sapien
catagtgcatggtgtgtggtgcccc

SEQ ID NO: 1081174 - DNA, 25 bp, Homo sapien
cccttgcaagggcttggccacttgg

SEQ ID NO: 1081175 - DNA, 25 bp, Homo sapien
gagagtggcatagctctgtgtccag

SEQ ID NO: 1081176 - DNA, 25 bp, Homo sapien
tcctccctggtacacaggcttctgt

SEQ ID NO: 1081177 - DNA, 25 bp, Homo sapien
tcagggatttatgcagctgcactcc

SEQ ID NO: 1081178 - DNA, 25 bp, Homo sapien
cagggatttatgcagctgcactcct

SEQ ID NO: 1081179 - DNA, 25 bp, Homo sapien
gctgcactcctcacattatggtctt

SEQ ID NO: 1081180 - DNA, 25 bp, Homo sapien
ctcagggatttatgcagctgcactc

SEQ ID NO: 1081181 - DNA, 25 bp, Homo sapien
gataaacttatttggacactccaca

SEQ ID NO: 1081182 - DNA, 25 bp, Homo sapien
ccagccctaacaaggtgggctagct

SEQ ID NO: 1081183 - DNA, 25 bp, Homo sapien
tcacctccataaatgtgcctgtact

SEQ ID NO: 1081184 - DNA, 25 bp, Homo sapien
tcaggattccctttagtcagtcact

SEQ ID NO: 1081185 - DNA, 25 bp, Homo sapien
taatccccccattaaggactgctcg

SEQ ID NO: 1081186 - DNA, 25 bp, Homo sapien
caatctgctaattgatctgtctgcc

SEQ ID NO: 1081187 - DNA, 25 bp, Homo sapien
ggactgctcgttctatttcctaaaa

SEQ ID NO: 1081188 - DNA, 25 bp, Homo sapien
cacatcatcaatagatcttctcctc

SEQ ID NO: 1081189 - DNA, 25 bp, Homo sapien
gctgtgtcacccttaccatgcatgg

SEQ ID NO: 1081190 - DNA, 25 bp, Homo sapien
gcactggcactttgctctcagggca

SEQ ID NO: 1081191 - DNA, 25 bp, Homo sapien
ttctagaacgtggacacacccaagg

SEQ ID NO: 1081192 - DNA, 25 bp, Homo sapien
tggcaacagttgaggttctagaacg

SEQ ID NO: 1081193 - DNA, 25 bp, Homo sapien
ggccaggccagagctagggcccaag

SEQ ID NO: 1081194 - DNA, 25 bp, Homo sapien
gccaggccagagctagggcccaagc

SEQ ID NO: 1081195 - DNA, 25 bp, Homo sapien
aagaggcagcattagggccaggcca

SEQ ID NO: 1081196 - DNA, 25 bp, Homo sapien
ggaaaaggaagaggcagcattaggg

SEQ ID NO: 1081197 - DNA, 25 bp, Homo sapien
tgattcaaggggaggagtgctaatg

SEQ ID NO: 1081198 - DNA, 25 bp, Homo sapien
tgggagtcgcgtgagtggtccatgg

SEQ ID NO: 1081199 - DNA, 25 bp, Homo sapien
ccaactctggtctttctcaggactg

SEQ ID NO: 1081200 - DNA, 25 bp, Homo sapien
gggaggagtgctaatgggagtcgcg

SEQ ID NO: 1081201 - DNA, 25 bp, Homo sapien
gaaatttggcggtaaggcgatccta

SEQ ID NO: 1081202 - DNA, 25 bp, Homo sapien
ggtcggttaattcagcatatcagca

SEQ ID NO: 1081203 - DNA, 25 bp, Homo sapien
taactcccctcaaggttggaagatg

SEQ ID NO: 1081204 - DNA, 25 bp, Homo sapien
tatcagcagtgttatcagggaccca

SEQ ID NO: 1081205 - DNA, 25 bp, Homo sapien
ccaggtgagaagtgaggacttgaaa

SEQ ID NO: 1081206 - DNA, 25 bp, Homo sapien
gaaaactcaaggtgcaaatgagcct

SEQ ID NO: 1081207 - DNA, 25 bp, Homo sapien
gggaaggcacctagaggaagcacta

SEQ ID NO: 1081208 - DNA, 25 bp, Homo sapien
tacgataggcggagaattggctgct

SEQ ID NO: 1081209 - DNA, 25 bp, Homo sapien
aaggatctgatgctgcagccgatga

SEQ ID NO: 1081210 - DNA, 25 bp, Homo sapien
tacacttgtcgcagctgctaagccc

SEQ ID NO: 1081211 - DNA, 25 bp, Homo sapien
ggaggctgattatacacgattccat

SEQ ID NO: 1081212 - DNA, 25 bp, Homo sapien
cgccgtgtttgtgatgggactgaca

SEQ ID NO: 1081213 - DNA, 25 bp, Homo sapien
cagtacaaagcccttaccgtgtcct

SEQ ID NO: 1081214 - DNA, 25 bp, Homo sapien
ccaagatcacatagcgtggtagtgg

SEQ ID NO: 1081215 - DNA, 25 bp, Homo sapien
ttaccgtgtcctttgaggtcctgca

SEQ ID NO: 1081216 - DNA, 25 bp, Homo sapien
tattggtagagcaccccaagatcac

SEQ ID NO: 1081217 - DNA, 25 bp, Homo sapien
aatatctcccatcacacttggagac

SEQ ID NO: 1081218 - DNA, 25 bp, Homo sapien
tcacacttggagacatcattgcttt

SEQ ID NO: 1081219 - DNA, 25 bp, Homo sapien
cgaggcctgtcgagttctcaaagga

SEQ ID NO: 1081220 - DNA, 25 bp, Homo sapien
ttagcacccttttcaagtcgaggcc

SEQ ID NO: 1081221 - DNA, 25 bp, Homo sapien
gcggcctgcgtgagcttgataaatg

SEQ ID NO: 1081222 - DNA, 25 bp, Homo sapien
tgatagaaagactcgctcggctggc

SEQ ID NO: 1081223 - DNA, 25 bp, Homo sapien
gggcgtgccacgctctcagatctgc

SEQ ID NO: 1081224 - DNA, 25 bp, Homo sapien
gaaggcaggattagtggtatgaatc

SEQ ID NO: 1081225 - DNA, 25 bp, Homo sapien
ttgctgagaaatccgtccaggcgcg

SEQ ID NO: 1081226 - DNA, 25 bp, Homo sapien
gcggcatgattaccttgctgagaaa

SEQ ID NO: 1081227 - DNA, 25 bp, Homo sapien
gcgccgtccagcctggcggcatgat

SEQ ID NO: 1081228 - DNA, 25 bp, Homo sapien
cagcctggcggcatgattaccttgc

SEQ ID NO: 1081229 - DNA, 25 bp, Homo sapien
gaggagaccccacccggagcttcat

SEQ ID NO: 1081230 - DNA, 25 bp, Homo sapien
ctcaggaaggagggaggagacccca

SEQ ID NO: 1081231 - DNA, 25 bp, Homo sapien
tgggatatgggggctcaggaaggag

SEQ ID NO: 1081232 - DNA, 25 bp, Homo sapien
ctgggatatgggggctcaggaagga

SEQ ID NO: 1081233 - DNA, 25 bp, Homo sapien
cgtccttgtcctcgatgctggcagc

SEQ ID NO: 1081234 - DNA, 25 bp, Homo sapien
cagctgatttggaaggctgactggt

SEQ ID NO: 1081235 - DNA, 25 bp, Homo sapien
ttaataggtttgttccataatcagc

SEQ ID NO: 1081236 - DNA, 25 bp, Homo sapien
ccataatcagctgatttggaaggct

SEQ ID NO: 1081237 - DNA, 25 bp, Homo sapien
ggtttgttccataatcagctgattt

SEQ ID NO: 1081238 - DNA, 25 bp, Homo sapien
tgtggactcggtgcataaaatttca

SEQ ID NO: 1081239 - DNA, 25 bp, Homo sapien
caataataagcatgaccagatgatg

SEQ ID NO: 1081240 - DNA, 25 bp, Homo sapien
ctgtggactcggtgcataaaatttc

SEQ ID NO: 1081241 - DNA, 25 bp, Homo sapien
ttgggcaacaataataagcatgacc

SEQ ID NO: 1081242 - DNA, 25 bp, Homo sapien
tgtctcggcccagccagtatggctc

SEQ ID NO: 1081243 - DNA, 25 bp, Homo sapien
tgccatcagggctgtctcggcccag

SEQ ID NO: 1081244 - DNA, 25 bp, Homo sapien
ctgtttgccatcagggctgtctcgg

SEQ ID NO: 1081245 - DNA, 25 bp, Homo sapien
tatggctcagttgcaggtggtaggg

SEQ ID NO: 1081246 - DNA, 25 bp, Homo sapien
gcccttcctgataaccaaattccag

SEQ ID NO: 1081247 - DNA, 25 bp, Homo sapien
ctcgatgccacagtgtaatgatgcc

SEQ ID NO: 1081248 - DNA, 25 bp, Homo sapien
cagtgtaatgatgccctgcgtagtg

SEQ ID NO: 1081249 - DNA, 25 bp, Homo sapien
tgacagcccttcctgataaccaaat

SEQ ID NO: 1081250 - DNA, 25 bp, Homo sapien
caggctccagcaagtgtatcatctt

SEQ ID NO: 1081251 - DNA, 25 bp, Homo sapien
gcaggctccagcaagtgtatcatct

SEQ ID NO: 1081252 - DNA, 25 bp, Homo sapien
tccagcaagtgtatcatctttctga

SEQ ID NO: 1081253 - DNA, 25 bp, Homo sapien
ggctccagcaagtgtatcatctttc

SEQ ID NO: 1081254 - DNA, 25 bp, Homo sapien
cacgcacactgatatttaaagctga

SEQ ID NO: 1081255 - DNA, 25 bp, Homo sapien
gacagaggcgctcgctgtcggcttc

SEQ ID NO: 1081256 - DNA, 25 bp, Homo sapien
gaaattcattagtgttccctgacag

SEQ ID NO: 1081257 - DNA, 25 bp, Homo sapien
gctgatgggctgcttatagacttct

SEQ ID NO: 1081258 - DNA, 25 bp, Homo sapien
gccagaggtgcgtgtgtaccagtag

SEQ ID NO: 1081259 - DNA, 25 bp, Homo sapien
cacagcaggtcgctgccagatcaga

SEQ ID NO: 1081260 - DNA, 25 bp, Homo sapien
agtgttacatggcagccgtgacccg

SEQ ID NO: 1081261 - DNA, 25 bp, Homo sapien
tatgcctgcagccatgtcctgtgag

SEQ ID NO: 1081262 - DNA, 25 bp, Homo sapien
ggtaagtcgacattgtccattccct

SEQ ID NO: 1081263 - DNA, 25 bp, Homo sapien
gagtgattgctctgactgtcaggac

SEQ ID NO: 1081264 - DNA, 25 bp, Homo sapien
catagtcaatttttggtaagtcgac

SEQ ID NO: 1081265 - DNA, 25 bp, Homo sapien
aaataatgttcctggtgtatgtggc

SEQ ID NO: 1081266 - DNA, 25 bp, Homo sapien
cactgtggggtagtgaccgtcctgt

SEQ ID NO: 1081267 - DNA, 25 bp, Homo sapien
cctagtgacgtgcttgctgcgggtc

SEQ ID NO: 1081268 - DNA, 25 bp, Homo sapien
tgaaaggtgccacgatggaaccacg

SEQ ID NO: 1081269 - DNA, 25 bp, Homo sapien
aaccacgcacctgggcgagcactgt

SEQ ID NO: 1081270 - DNA, 25 bp, Homo sapien
ctttggtatggtggtggggttagcg

SEQ ID NO: 1081271 - DNA, 25 bp, Homo sapien
tttggtatggtggtggggttagcgc

SEQ ID NO: 1081272 - DNA, 25 bp, Homo sapien
ttggtatggtggtggggttagcgct

SEQ ID NO: 1081273 - DNA, 25 bp, Homo sapien
ttcttgaagcttcccatagggtttg

SEQ ID NO: 1081274 - DNA, 25 bp, Homo sapien
acccactttttcttcgccttgcttg

SEQ ID NO: 1081275 - DNA, 25 bp, Homo sapien
ggtgttgtttctctgcttacccagg

SEQ ID NO: 1081276 - DNA, 25 bp, Homo sapien
gaaagtgccactttcaaagggctcc

SEQ ID NO: 1081277 - DNA, 25 bp, Homo sapien
tttgttggaaaggggctgataagtg

SEQ ID NO: 1081278 - DNA, 25 bp, Homo sapien
cttttgttggaaaggggctgataag

SEQ ID NO: 1081279 - DNA, 25 bp, Homo sapien
aaatgggaactgaagtggcagcata

SEQ ID NO: 1081280 - DNA, 25 bp, Homo sapien
gataagggcccagttttgctgagtg

SEQ ID NO: 1081281 - DNA, 25 bp, Homo sapien
tagctgctgtgcaagcgaatggccg

SEQ ID NO: 1081282 - DNA, 25 bp, Homo sapien
gactcatggtaaaaggtgctcactg

SEQ ID NO: 1081283 - DNA, 25 bp, Homo sapien
ccactgagtgttgagtgcttcctgt

SEQ ID NO: 1081284 - DNA, 25 bp, Homo sapien
cgcctgccccactgcagcttgccgc

SEQ ID NO: 1081285 - DNA, 25 bp, Homo sapien
actccgcatcgatggcttttgtttg

SEQ ID NO: 1081286 - DNA, 25 bp, Homo sapien
ccagaactccgcatcgatggctttt

SEQ ID NO: 1081287 - DNA, 25 bp, Homo sapien
gaactccgcatcgatggcttttgtt

SEQ ID NO: 1081288 - DNA, 25 bp, Homo sapien
aaaattgtctcgttccctcatagca

SEQ ID NO: 1081289 - DNA, 25 bp, Homo sapien
ccaagtgggactgggcttaaactgt

SEQ ID NO: 1081290 - DNA, 25 bp, Homo sapien
taggcctaagatagaacttcccagt

SEQ ID NO: 1081291 - DNA, 25 bp, Homo sapien
caaacatgtattaacccaagtggga

SEQ ID NO: 1081292 - DNA, 25 bp, Homo sapien
tcttgtccttacgtagacaggcagg

SEQ ID NO: 1081293 - DNA, 25 bp, Homo sapien
gacaggcaggcccaaattttagtaa

SEQ ID NO: 1081294 - DNA, 25 bp, Homo sapien
gagggattgtgagactatgatgaac

SEQ ID NO: 1081295 - DNA, 25 bp, Homo sapien
gaatgtaacagtattctgctggagc

SEQ ID NO: 1081296 - DNA, 25 bp, Homo sapien
ctgggatttacctataccaccaggg

SEQ ID NO: 1081297 - DNA, 25 bp, Homo sapien
atgatgttgggttctggttttcgcc

SEQ ID NO: 1081298 - DNA, 25 bp, Homo sapien
cctagcctcttaagccttttgttat

SEQ ID NO: 1081299 - DNA, 25 bp, Homo sapien
gaaaattcccttgcttatgcgaagg

SEQ ID NO: 1081300 - DNA, 25 bp, Homo sapien
tgaagcgtaggttgagtttgtcgaa

SEQ ID NO: 1081301 - DNA, 25 bp, Homo sapien
cttcttagctttctggcattgttac

SEQ ID NO: 1081302 - DNA, 25 bp, Homo sapien
gtaaagtggtcctgtgtgaagcgta

SEQ ID NO: 1081303 - DNA, 25 bp, Homo sapien
ggcattgttactctgtcctcctgta

SEQ ID NO: 1081304 - DNA, 25 bp, Homo sapien
ggatgagggctgtgttcagtccctg

SEQ ID NO: 1081305 - DNA, 25 bp, Homo sapien
tcaagttagcaagcctctgctagag

SEQ ID NO: 1081306 - DNA, 25 bp, Homo sapien
gaaactggggcagatgataccactg

SEQ ID NO: 1081307 - DNA, 25 bp, Homo sapien
atttccagaaacaatggggatgagg

SEQ ID NO: 1081308 - DNA, 25 bp, Homo sapien
cgttgctgaaagtaaaggagtgttc

SEQ ID NO: 1081309 - DNA, 25 bp, Homo sapien
ttatttggagatgccgacgttgctg

SEQ ID NO: 1081310 - DNA, 25 bp, Homo sapien
gtaaaggagtgttcatactctacaa

SEQ ID NO: 1081311 - DNA, 25 bp, Homo sapien
gatgccgacgttgctgaaagtaaag

SEQ ID NO: 1081312 - DNA, 25 bp, Homo sapien
taaaggagtttctcgtttccagaca

SEQ ID NO: 1081313 - DNA, 25 bp, Homo sapien
gtttccgtgtgacctagagttgcca

SEQ ID NO: 1081314 - DNA, 25 bp, Homo sapien
ggttcctgccgtgactaagtggaca

SEQ ID NO: 1081315 - DNA, 25 bp, Homo sapien
gcttgtcctggttgtagctcctcca

SEQ ID NO: 1081316 - DNA, 25 bp, Homo sapien
tctggatgttcaatgctagcacctt

SEQ ID NO: 1081317 - DNA, 25 bp, Homo sapien
tgctccatatccaccagaaagctgg

SEQ ID NO: 1081318 - DNA, 25 bp, Homo sapien
tagcacctttacagactggagcagc

SEQ ID NO: 1081319 - DNA, 25 bp, Homo sapien
ccctgtggtgttccggagttctgct

SEQ ID NO: 1081320 - DNA, 25 bp, Homo sapien
gaatgtcagagcaaacccctgtgat

SEQ ID NO: 1081321 - DNA, 25 bp, Homo sapien
cattcagggcctcgagtagagaccg

SEQ ID NO: 1081322 - DNA, 25 bp, Homo sapien
taaaaagtcccgcagtcattcaggg

SEQ ID NO: 1081323 - DNA, 25 bp, Homo sapien
gagaccgagtctaaggcagcaaatg

SEQ ID NO: 1081324 - DNA, 25 bp, Homo sapien
ggagccattggtgtctgttgtgtaa

SEQ ID NO: 1081325 - DNA, 25 bp, Homo sapien
tgttgtgtaaatactctgcacagag

SEQ ID NO: 1081326 - DNA, 25 bp, Homo sapien
agacagtaatggctgcagaggagcc

SEQ ID NO: 1081327 - DNA, 25 bp, Homo sapien
ctgatagacagtaatggctgcagag

SEQ ID NO: 1081328 - DNA, 25 bp, Homo sapien
tctgctggtagtttgggattattag

SEQ ID NO: 1081329 - DNA, 25 bp, Homo sapien
ctggtagtttgggattattagcagc

SEQ ID NO: 1081330 - DNA, 25 bp, Homo sapien
tgctggtagtttgggattattagca

SEQ ID NO: 1081331 - DNA, 25 bp, Homo sapien
ggtagtttgggattattagcagctg

SEQ ID NO: 1081332 - DNA, 25 bp, Homo sapien
cgctggccccgaggagggggcgttg

SEQ ID NO: 1081333 - DNA, 25 bp, Homo sapien
ccgcgctggccccgaggagggggcg

SEQ ID NO: 1081334 - DNA, 25 bp, Homo sapien
ctgccgcgctggccccgaggagggg

SEQ ID NO: 1081335 - DNA, 25 bp, Homo sapien
tggccccgaggagggggcgttgcca

SEQ ID NO: 1081336 - DNA, 25 bp, Homo sapien
ccgccgccaactgccctgagcgctt

SEQ ID NO: 1081337 - DNA, 25 bp, Homo sapien
tggccggcgccgcagtcggcgcggg

SEQ ID NO: 1081338 - DNA, 25 bp, Homo sapien
gccaactgccctgagcgcttgctga

SEQ ID NO: 1081339 - DNA, 25 bp, Homo sapien
tgccctgagcgcttgctgaggccga

SEQ ID NO: 1081340 - DNA, 25 bp, Homo sapien
tcagagtgcgcggaggtgagtcggt

SEQ ID NO: 1081341 - DNA, 25 bp, Homo sapien
tgtggactcgtggtgctggctgccg

SEQ ID NO: 1081342 - DNA, 25 bp, Homo sapien
tccgccgcgtcggtcggggtcagag

SEQ ID NO: 1081343 - DNA, 25 bp, Homo sapien
ggaggtgagtcggtgtgttgtggac

SEQ ID NO: 1081344 - DNA, 25 bp, Homo sapien
gagaagaagccccgcctgactgcag

SEQ ID NO: 1081345 - DNA, 25 bp, Homo sapien
cccattggtcaaaggggtcggcagc

SEQ ID NO: 1081346 - DNA, 25 bp, Homo sapien
tgcagcccattggtcaaaggggtcg

SEQ ID NO: 1081347 - DNA, 25 bp, Homo sapien
gtcggcgggagagcgagcgtttggg

SEQ ID NO: 1081348 - DNA, 25 bp, Homo sapien
ctgtacagttgagccctagtgcacc

SEQ ID NO: 1081349 - DNA, 25 bp, Homo sapien
agttgagccctagtgcaccaaggag

SEQ ID NO: 1081350 - DNA, 25 bp, Homo sapien
tacagttgagccctagtgcaccaag

SEQ ID NO: 1081351 - DNA, 25 bp, Homo sapien
ggaagctgtacagttgagccctagt

SEQ ID NO: 1081352 - DNA, 25 bp, Homo sapien
tgttttgataactgaaactttcaat

SEQ ID NO: 1081353 - DNA, 25 bp, Homo sapien
ttcgttcccaagcatggcagcttta

SEQ ID NO: 1081354 - DNA, 25 bp, Homo sapien
ccggagagcgccattcgttcccaag

SEQ ID NO: 1081355 - DNA, 25 bp, Homo sapien
aaagaacaccaatttgctgctgcag

SEQ ID NO: 1081356 - DNA, 25 bp, Homo sapien
aggatttgaggtaaggacactggga

SEQ ID NO: 1081357 - DNA, 25 bp, Homo sapien
ctgggcccgggggcaaatcagggtg

SEQ ID NO: 1081358 - DNA, 25 bp, Homo sapien
caggatttgaggtaaggacactggg

SEQ ID NO: 1081359 - DNA, 25 bp, Homo sapien
cgggggcaaatcagggtggagtcac

SEQ ID NO: 1081360 - DNA, 25 bp, Homo sapien
atatggaacaaatattcaataaacg

SEQ ID NO: 1081361 - DNA, 25 bp, Homo sapien
tggaacaaatattcaataaacggct

SEQ ID NO: 1081362 - DNA, 25 bp, Homo sapien
tgataccttgctggatatggaacaa

SEQ ID NO: 1081363 - DNA, 25 bp, Homo sapien
ctgataccttgctggatatggaaca

SEQ ID NO: 1081364 - DNA, 25 bp, Homo sapien
tgatattcctttccactcaagggaa

SEQ ID NO: 1081365 - DNA, 25 bp, Homo sapien
cattggtggtcttatgtgctgtcag

SEQ ID NO: 1081366 - DNA, 25 bp, Homo sapien
tcaagggaacacctgcagtgctcac

SEQ ID NO: 1081367 - DNA, 25 bp, Homo sapien
gaggcccttggtatcctcatggata

SEQ ID NO: 1081368 - DNA, 25 bp, Homo sapien
aaatgtttgtgtcatcctttgtgca

SEQ ID NO: 1081369 - DNA, 25 bp, Homo sapien
aaatatgaaaggcttcacaaatgtt

SEQ ID NO: 1081370 - DNA, 25 bp, Homo sapien
caaatgtttgtgtcatcctttgtgc

SEQ ID NO: 1081371 - DNA, 25 bp, Homo sapien
tatgaaaggcttcacaaatgtttgt

SEQ ID NO: 1081372 - DNA, 25 bp, Homo sapien
tggaagtcttggggtcgcgagccat

SEQ ID NO: 1081373 - DNA, 25 bp, Homo sapien
caaagagcttggaagtcttggggtc

SEQ ID NO: 1081374 - DNA, 25 bp, Homo sapien
gagcttggaagtcttggggtcgcga

SEQ ID NO: 1081375 - DNA, 25 bp, Homo sapien
cttggaagtcttggggtcgcgagcc

SEQ ID NO: 1081376 - DNA, 25 bp, Homo sapien
ccccgggtttgtgttcgcgagctgc

SEQ ID NO: 1081377 - DNA, 25 bp, Homo sapien
aacggtcgcacttttcaggacacgg

SEQ ID NO: 1081378 - DNA, 25 bp, Homo sapien
tggtgcatgaaaagtcccgggttcg

SEQ ID NO: 1081379 - DNA, 25 bp, Homo sapien
gaaattccttgggagaacggtcgca

SEQ ID NO: 1081380 - DNA, 25 bp, Homo sapien
ttgctcagtagaaccgctgggagag

SEQ ID NO: 1081381 - DNA, 25 bp, Homo sapien
gctaggaaaaagtcagccgagcacc

SEQ ID NO: 1081382 - DNA, 25 bp, Homo sapien
cgaaaatcccgggagatcccacgtg

SEQ ID NO: 1081383 - DNA, 25 bp, Homo sapien
agaacggtccgcctctatgctagca

SEQ ID NO: 1081384 - DNA, 25 bp, Homo sapien
tagaaggaagcggtgctgctgcccc

SEQ ID NO: 1081385 - DNA, 25 bp, Homo sapien
tgcgcccgggatcggcatagaagga

SEQ ID NO: 1081386 - DNA, 25 bp, Homo sapien
tacggctctgctggcaattaaaatg

SEQ ID NO: 1081387 - DNA, 25 bp, Homo sapien
tagctgagagccaaacccctttgca

SEQ ID NO: 1081388 - DNA, 25 bp, Homo sapien
gtgcagggaatgatctgccaaggac

SEQ ID NO: 1081389 - DNA, 25 bp, Homo sapien
ccaaggacagccagttaggctgaca

SEQ ID NO: 1081390 - DNA, 25 bp, Homo sapien
taactttcctgtcaagttatagcag

SEQ ID NO: 1081391 - DNA, 25 bp, Homo sapien
ccagttaggctgacaagtctgggaa

SEQ ID NO: 1081392 - DNA, 25 bp, Homo sapien
cagacatgtcaatgactgttattaa

SEQ ID NO: 1081393 - DNA, 25 bp, Homo sapien
caatgactgttattaattgggaaga

SEQ ID NO: 1081394 - DNA, 25 bp, Homo sapien
ttattaattgggaagatgagtggac

SEQ ID NO: 1081395 - DNA, 25 bp, Homo sapien
tgtcaatgactgttattaattggga

SEQ ID NO: 1081396 - DNA, 25 bp, Homo sapien
cctcctggcttaatgcagtgcaaag

SEQ ID NO: 1081397 - DNA, 25 bp, Homo sapien
agagaaacatcagttaaacggtaga

SEQ ID NO: 1081398 - DNA, 25 bp, Homo sapien
tcagttaaacggtagatgaatcctc

SEQ ID NO: 1081399 - DNA, 25 bp, Homo sapien
ctggagtatctttggtattccctca

SEQ ID NO: 1081400 - DNA, 25 bp, Homo sapien
tgtgatgtacgcgtagctgactttg

SEQ ID NO: 1081401 - DNA, 25 bp, Homo sapien
ttctgggtgaaatgcgcctgagccc

SEQ ID NO: 1081402 - DNA, 25 bp, Homo sapien
aaacctccaaatacgatattctctg

SEQ ID NO: 1081403 - DNA, 25 bp, Homo sapien
tttggtccctacacgttctgggtga

SEQ ID NO: 1081404 - DNA, 25 bp, Homo sapien
ccggcgttacgcaagaagcagtctt

SEQ ID NO: 1081405 - DNA, 25 bp, Homo sapien
ggcagggaatattactggggaatca

SEQ ID NO: 1081406 - DNA, 25 bp, Homo sapien
ctgtggccggcgttacgcaagaagc

SEQ ID NO: 1081407 - DNA, 25 bp, Homo sapien
gcgttacgcaagaagcagtcttccc

SEQ ID NO: 1081408 - DNA, 25 bp, Homo sapien
cttgaaggctgcccggtgtaagtcc

SEQ ID NO: 1081409 - DNA, 25 bp, Homo sapien
ttgaaggctgcccggtgtaagtcca

SEQ ID NO: 1081410 - DNA, 25 bp, Homo sapien
tgaaggctgcccggtgtaagtccat

SEQ ID NO: 1081411 - DNA, 25 bp, Homo sapien
cgttggtgaaaggaatatgcacgtc

SEQ ID NO: 1081412 - DNA, 25 bp, Homo sapien
tcaactgagacaggtacaccaaagg

SEQ ID NO: 1081413 - DNA, 25 bp, Homo sapien
caccaaagggtcgtggctgctgaca

SEQ ID NO: 1081414 - DNA, 25 bp, Homo sapien
ggatggaagcatcacggctggcctc

SEQ ID NO: 1081415 - DNA, 25 bp, Homo sapien
attggcaaaagtgcctggcacccca

SEQ ID NO: 1081416 - DNA, 25 bp, Homo sapien
gattggcaaaagtgcctggcacccc

SEQ ID NO: 1081417 - DNA, 25 bp, Homo sapien
ttggcaaaagtgcctggcaccccac

SEQ ID NO: 1081418 - DNA, 25 bp, Homo sapien
gggagcaaattgagggtggaggtgt

SEQ ID NO: 1081419 - DNA, 25 bp, Homo sapien
tttgggggagcaaattgagggtgga

SEQ ID NO: 1081420 - DNA, 25 bp, Homo sapien
atttgggggagcaaattgagggtgg

SEQ ID NO: 1081421 - DNA, 25 bp, Homo sapien
tgaggcttcccgatcagaaatgagg

SEQ ID NO: 1081422 - DNA, 25 bp, Homo sapien
taaaggctgactgatagctctcccg

SEQ ID NO: 1081423 - DNA, 25 bp, Homo sapien
cagttcttaagtcgcttggccggcg

SEQ ID NO: 1081424 - DNA, 25 bp, Homo sapien
tgtcattccgatcctctgggctaga

SEQ ID NO: 1081425 - DNA, 25 bp, Homo sapien
ttgacgacacctttgtccttctctg

SEQ ID NO: 1081426 - DNA, 25 bp, Homo sapien
ttgcgatcgcaaggaaaacacagct

SEQ ID NO: 1081427 - DNA, 25 bp, Homo sapien
ctagccttgcgatcgcaaggaaaac

SEQ ID NO: 1081428 - DNA, 25 bp, Homo sapien
gaaatgctttatggtgattgacgac

SEQ ID NO: 1081429 - DNA, 25 bp, Homo sapien
gagcagtcacacaggtcaaccgtgt

SEQ ID NO: 1081430 - DNA, 25 bp, Homo sapien
tcacacaggtcaaccgtgtctagtc

SEQ ID NO: 1081431 - DNA, 25 bp, Homo sapien
gcagtcacacaggtcaaccgtgtct

SEQ ID NO: 1081432 - DNA, 25 bp, Homo sapien
gtcacacaggtcaaccgtgtctagt

SEQ ID NO: 1081433 - DNA, 25 bp, Homo sapien
agttatggctttgacactcagaggg

SEQ ID NO: 1081434 - DNA, 25 bp, Homo sapien
ggatatccacgtctatgagttctga

SEQ ID NO: 1081435 - DNA, 25 bp, Homo sapien
tcctgctctggagtcggatacaggt

SEQ ID NO: 1081436 - DNA, 25 bp, Homo sapien
tgtgtgagggatccatctccatggg

SEQ ID NO: 1081437 - DNA, 25 bp, Homo sapien
tatttataaagagcacgtcccaagg

SEQ ID NO: 1081438 - DNA, 25 bp, Homo sapien
catttcaagccgaaaggagaagcct

SEQ ID NO: 1081439 - DNA, 25 bp, Homo sapien
gaaattgcccagactttaacgagcc

SEQ ID NO: 1081440 - DNA, 25 bp, Homo sapien
tcttccctgcctaatgaggaaaggg

SEQ ID NO: 1081441 - DNA, 25 bp, Homo sapien
aaacctctacgcctttgggatagca

SEQ ID NO: 1081442 - DNA, 25 bp, Homo sapien
cccttttagatgattggtaccagac

SEQ ID NO: 1081443 - DNA, 25 bp, Homo sapien
gattataatcgccaccactaaggta

SEQ ID NO: 1081444 - DNA, 25 bp, Homo sapien
gctcaacatgtagtcccaatccagg

SEQ ID NO: 1081445 - DNA, 25 bp, Homo sapien
tctttgattcccttgcaaacagcac

SEQ ID NO: 1081446 - DNA, 25 bp, Homo sapien
aaacagcaccgagcacaacgctcta

SEQ ID NO: 1081447 - DNA, 25 bp, Homo sapien
aagaagaggaagtatcatctcctac

SEQ ID NO: 1081448 - DNA, 25 bp, Homo sapien
aaccataaggctgtcaagaagagga

SEQ ID NO: 1081449 - DNA, 25 bp, Homo sapien
gcatggctattcttgcagcctagga

SEQ ID NO: 1081450 - DNA, 25 bp, Homo sapien
taggaatagagtcactggccctgga

SEQ ID NO: 1081451 - DNA, 25 bp, Homo sapien
gcagaaagccctcttcgacttgatt

SEQ ID NO: 1081452 - DNA, 25 bp, Homo sapien
gggcaggcccttccaaatctgacag

SEQ ID NO: 1081453 - DNA, 25 bp, Homo sapien
ttagggctaagacgcagaggaagtc

SEQ ID NO: 1081454 - DNA, 25 bp, Homo sapien
gaggaagtcaaagaccccacaatct

SEQ ID NO: 1081455 - DNA, 25 bp, Homo sapien
cctcttagaagttagaatgctgcta

SEQ ID NO: 1081456 - DNA, 25 bp, Homo sapien
gaccccaacttcttatccagcaaag

SEQ ID NO: 1081457 - DNA, 25 bp, Homo sapien
ggttataagcctgtcccataataca

SEQ ID NO: 1081458 - DNA, 25 bp, Homo sapien
gttataagcctgtcccataatacag

SEQ ID NO: 1081459 - DNA, 25 bp, Homo sapien
taggttataagcctgtcccataata

SEQ ID NO: 1081460 - DNA, 25 bp, Homo sapien
ttataagcctgtcccataatacagt

SEQ ID NO: 1081461 - DNA, 25 bp, Homo sapien
tctccctggatatcgacagcttgtc

SEQ ID NO: 1081462 - DNA, 25 bp, Homo sapien
tgctcgccaaatacagcccaagtca

SEQ ID NO: 1081463 - DNA, 25 bp, Homo sapien
gagaatccagaggacgatttgtcac

SEQ ID NO: 1081464 - DNA, 25 bp, Homo sapien
tcccaggtctaagaggtgctttttc

SEQ ID NO: 1081465 - DNA, 25 bp, Homo sapien
caaagaaagctctgctctaagctct

SEQ ID NO: 1081466 - DNA, 25 bp, Homo sapien
agctctgctctaagctcttttactt

SEQ ID NO: 1081467 - DNA, 25 bp, Homo sapien
ggcttcacatgggactccgcaggcc

SEQ ID NO: 1081468 - DNA, 25 bp, Homo sapien
tggccatcacaacaggttctaggtg

SEQ ID NO: 1081469 - DNA, 25 bp, Homo sapien
catatattctgatgtccaggggtcc

SEQ ID NO: 1081470 - DNA, 25 bp, Homo sapien
gggtcccccttgacaggcttcacat

SEQ ID NO: 1081471 - DNA, 25 bp, Homo sapien
tgacttaaaatagggctgtagcggg

SEQ ID NO: 1081472 - DNA, 25 bp, Homo sapien
gtagctaagcgacgcgcaaagctgt

SEQ ID NO: 1081473 - DNA, 25 bp, Homo sapien
gagaggcctggacacacatagaatt

SEQ ID NO: 1081474 - DNA, 25 bp, Homo sapien
taccaggagtgtacagtaagcccag

SEQ ID NO: 1081475 - DNA, 25 bp, Homo sapien
gatattgcccttatcaaatttatca

SEQ ID NO: 1081476 - DNA, 25 bp, Homo sapien
tcaaggttaattgcaggcatcagaa

SEQ ID NO: 1081477 - DNA, 25 bp, Homo sapien
cagcaggttggctgcaagaaggctt

SEQ ID NO: 1081478 - DNA, 25 bp, Homo sapien
aggcttgtgccacatgatattgccc

SEQ ID NO: 1081479 - DNA, 25 bp, Homo sapien
ggtaagcagtgatagcaccaccaca

SEQ ID NO: 1081480 - DNA, 25 bp, Homo sapien
tagctagagctgtgactaaaaccaa

SEQ ID NO: 1081481 - DNA, 25 bp, Homo sapien
gagactccatgctcctaactttgag

SEQ ID NO: 1081482 - DNA, 25 bp, Homo sapien
taactctttagctgagatggcgtga

SEQ ID NO: 1081483 - DNA, 25 bp, Homo sapien
taactgcgaatgtggtcaaaatagc

SEQ ID NO: 1081484 - DNA, 25 bp, Homo sapien
gggccaaagtatcaatattaacaag

SEQ ID NO: 1081485 - DNA, 25 bp, Homo sapien
tataaatagtgattcctccgatgga

SEQ ID NO: 1081486 - DNA, 25 bp, Homo sapien
tcaagaccttagtggagaaagtaac

SEQ ID NO: 1081487 - DNA, 25 bp, Homo sapien
aaaagctggaaatgactacgctcag

SEQ ID NO: 1081488 - DNA, 25 bp, Homo sapien
tacgctcagtaaagacggcatgtca

SEQ ID NO: 1081489 - DNA, 25 bp, Homo sapien
cattgtaattgatctggcgtgccat

SEQ ID NO: 1081490 - DNA, 25 bp, Homo sapien
caggcctctagtgctgaacagttag

SEQ ID NO: 1081491 - DNA, 25 bp, Homo sapien
tatttgtcaggccacgatagagagg

SEQ ID NO: 1081492 - DNA, 25 bp, Homo sapien
gaatagtggaacagcaagggtctcg

SEQ ID NO: 1081493 - DNA, 25 bp, Homo sapien
gataaagaagcggagaaggtcacct

SEQ ID NO: 1081494 - DNA, 25 bp, Homo sapien
gacagaagggtccagctagagagca

SEQ ID NO: 1081495 - DNA, 25 bp, Homo sapien
actttgcactcctggagttaatccc

SEQ ID NO: 1081496 - DNA, 25 bp, Homo sapien
cgtcactggctttggttcactagaa

SEQ ID NO: 1081497 - DNA, 25 bp, Homo sapien
ggttcactagaattttgttgcagat

SEQ ID NO: 1081498 - DNA, 25 bp, Homo sapien
ccacgtggtcacagtatataatttt

SEQ ID NO: 1081499 - DNA, 25 bp, Homo sapien
taacctgctccctagagaggaacat

SEQ ID NO: 1081500 - DNA, 25 bp, Homo sapien
taatagattgtctagccccgtaatg

SEQ ID NO: 1081501 - DNA, 25 bp, Homo sapien
tcattttggtggctgcctggtgctc

SEQ ID NO: 1081502 - DNA, 25 bp, Homo sapien
cctggtgctccatgttatgcctgta

SEQ ID NO: 1081503 - DNA, 25 bp, Homo sapien
caattagaatggtctggcaggctct

SEQ ID NO: 1081504 - DNA, 25 bp, Homo sapien
cttgcagcgcttacattccagtggg

SEQ ID NO: 1081505 - DNA, 25 bp, Homo sapien
gattcctgagcactaagaggtccca

SEQ ID NO: 1081506 - DNA, 25 bp, Homo sapien
aaagaaattgtcctgcttggccgca

SEQ ID NO: 1081507 - DNA, 25 bp, Homo sapien
gatcatgcggcagccttagccagga

SEQ ID NO: 1081508 - DNA, 25 bp, Homo sapien
tagagctgagaacacacagtggtgc

SEQ ID NO: 1081509 - DNA, 25 bp, Homo sapien
gccatttagagaactgactgcccca

SEQ ID NO: 1081510 - DNA, 25 bp, Homo sapien
tatggttgtagaacccctagagctg

SEQ ID NO: 1081511 - DNA, 25 bp, Homo sapien
caggcttggaagaatataatgatgt

SEQ ID NO: 1081512 - DNA, 25 bp, Homo sapien
ggtgctctgcaaggattcaaggaga

SEQ ID NO: 1081513 - DNA, 25 bp, Homo sapien
tagatggtgctgatggatcatttaa

SEQ ID NO: 1081514 - DNA, 25 bp, Homo sapien
tgcagccatggtattcatcagtgtt

SEQ ID NO: 1081515 - DNA, 25 bp, Homo sapien
gcgacaagggtgagagctgagaaag

SEQ ID NO: 1081516 - DNA, 25 bp, Homo sapien
agccccagaggaaagcgacaagggt

SEQ ID NO: 1081517 - DNA, 25 bp, Homo sapien
tgaagcaaagagatccgtccttccc

SEQ ID NO: 1081518 - DNA, 25 bp, Homo sapien
tcatgagagtgaagcaaagagatcc

SEQ ID NO: 1081519 - DNA, 25 bp, Homo sapien
tatctgcaggcggatttatcaccac

SEQ ID NO: 1081520 - DNA, 25 bp, Homo sapien
cagttgtttcgaattccccttggtg

SEQ ID NO: 1081521 - DNA, 25 bp, Homo sapien
cttttcgaggggcagaccatgtgtt

SEQ ID NO: 1081522 - DNA, 25 bp, Homo sapien
agaaaggtgttggtggcggcagcag

SEQ ID NO: 1081523 - DNA, 25 bp, Homo sapien
cacgccgaagagtttggagtttatc

SEQ ID NO: 1081524 - DNA, 25 bp, Homo sapien
gctgaagccagtgtggaagaatgcc

SEQ ID NO: 1081525 - DNA, 25 bp, Homo sapien
ggcatagactttgagcttggctgca

SEQ ID NO: 1081526 - DNA, 25 bp, Homo sapien
gggagcattcttcaaagttcagctg

SEQ ID NO: 1081527 - DNA, 25 bp, Homo sapien
gatggatttctcatggcccagtggt

SEQ ID NO: 1081528 - DNA, 25 bp, Homo sapien
ctttgggcagcagccgtcctgttct

SEQ ID NO: 1081529 - DNA, 25 bp, Homo sapien
tcctttgggcagcagccgtcctgtt

SEQ ID NO: 1081530 - DNA, 25 bp, Homo sapien
ttctcctttgggcagcagccgtcct

SEQ ID NO: 1081531 - DNA, 25 bp, Homo sapien
tgggcagcagccgtcctgttctctc

SEQ ID NO: 1081532 - DNA, 25 bp, Homo sapien
tgaagcccattattctgtgctcatg

SEQ ID NO: 1081533 - DNA, 25 bp, Homo sapien
aagtattcatgaagcccattattct

SEQ ID NO: 1081534 - DNA, 25 bp, Homo sapien
ttcatgaagcccattattctgtgct

SEQ ID NO: 1081535 - DNA, 25 bp, Homo sapien
gaagcccattattctgtgctcatgc

SEQ ID NO: 1081536 - DNA, 25 bp, Homo sapien
ctgaccaaacaggagaggctcagat

SEQ ID NO: 1081537 - DNA, 25 bp, Homo sapien
ggacttgtggctgtctagaactgct

SEQ ID NO: 1081538 - DNA, 25 bp, Homo sapien
cttgtggctgtctagaactgctctg

SEQ ID NO: 1081539 - DNA, 25 bp, Homo sapien
tcagatgacggttcagtgtgcaaag

SEQ ID NO: 1081540 - DNA, 25 bp, Homo sapien
cagggctcctctgatgtggtctgct

SEQ ID NO: 1081541 - DNA, 25 bp, Homo sapien
tgaagcaagcactccatctcggggt

SEQ ID NO: 1081542 - DNA, 25 bp, Homo sapien
acatgatcctgtaacgcagggctcc

SEQ ID NO: 1081543 - DNA, 25 bp, Homo sapien
ccagacgtctgtaaacaatggcttc

SEQ ID NO: 1081544 - DNA, 25 bp, Homo sapien
tcatctgggcttcttctcgagcctt

SEQ ID NO: 1081545 - DNA, 25 bp, Homo sapien
tcgagccttcttggcccacttctcc

SEQ ID NO: 1081546 - DNA, 25 bp, Homo sapien
tcaagtctgggtcatctgggcttct

SEQ ID NO: 1081547 - DNA, 25 bp, Homo sapien
tgggtcatctgggcttcttctcgag

SEQ ID NO: 1081548 - DNA, 25 bp, Homo sapien
agcgcagcctgatcctgcggtgccg

SEQ ID NO: 1081549 - DNA, 25 bp, Homo sapien
ctggagcgcagcctgatcctgcggt

SEQ ID NO: 1081550 - DNA, 25 bp, Homo sapien
aacatttcaataagccgagcacagc

SEQ ID NO: 1081551 - DNA, 25 bp, Homo sapien
tctaatgaacatttcaataagccga

SEQ ID NO: 1081552 - DNA, 25 bp, Homo sapien
aatagcctccgaagccttcccatgg

SEQ ID NO: 1081553 - DNA, 25 bp, Homo sapien
ggactacagagaaacgccttccaaa

SEQ ID NO: 1081554 - DNA, 25 bp, Homo sapien
tgtctggacccaaaccatcttttgt

SEQ ID NO: 1081555 - DNA, 25 bp, Homo sapien
gacaagcatcggtgcacagatacct

SEQ ID NO: 1081556 - DNA, 25 bp, Homo sapien
tgttacgtgtaattttcccaggcga

SEQ ID NO: 1081557 - DNA, 25 bp, Homo sapien
tcccaggcgattttctgctgaaata

SEQ ID NO: 1081558 - DNA, 25 bp, Homo sapien
aattatgaatgaggcgattttctcc

SEQ ID NO: 1081559 - DNA, 25 bp, Homo sapien
gattaaactatcatcgtcagcccat

SEQ ID NO: 1081560 - DNA, 25 bp, Homo sapien
gtgcctaagtcagcaggctttgccc

SEQ ID NO: 1081561 - DNA, 25 bp, Homo sapien
ctgagctggtgcctaagtcagcagg

SEQ ID NO: 1081562 - DNA, 25 bp, Homo sapien
ctcagcaggtagtgtagagatcctg

SEQ ID NO: 1081563 - DNA, 25 bp, Homo sapien
gcaggtagtgtagagatcctggctc

SEQ ID NO: 1081564 - DNA, 25 bp, Homo sapien
cagagtcaacctgagtgcccaccaa

SEQ ID NO: 1081565 - DNA, 25 bp, Homo sapien
accgtacttgactcccatgtttatt

SEQ ID NO: 1081566 - DNA, 25 bp, Homo sapien
gcccaccgtacttgactcccatgtt

SEQ ID NO: 1081567 - DNA, 25 bp, Homo sapien
tgtcctttgcccaccgtacttgact

SEQ ID NO: 1081568 - DNA, 25 bp, Homo sapien
gaacagaactctctatcccctgaag

SEQ ID NO: 1081569 - DNA, 25 bp, Homo sapien
cccctgaagtgttctgggatccaaa

SEQ ID NO: 1081570 - DNA, 25 bp, Homo sapien
gatctaccgctacctgacaagtgca

SEQ ID NO: 1081571 - DNA, 25 bp, Homo sapien
aattgaaatacttatcccactggcc

SEQ ID NO: 1081572 - DNA, 25 bp, Homo sapien
tggcttcttggtttccagctctagt

SEQ ID NO: 1081573 - DNA, 25 bp, Homo sapien
tccagctctagttttttcaaagtct

SEQ ID NO: 1081574 - DNA, 25 bp, Homo sapien
tctctcttcctttgactgtcctcat

SEQ ID NO: 1081575 - DNA, 25 bp, Homo sapien
ttggtttccagctctagttttttca

SEQ ID NO: 1081576 - DNA, 25 bp, Homo sapien
gtgcatctctttcccgttcccctca

SEQ ID NO: 1081577 - DNA, 25 bp, Homo sapien
gtttctcaggctttgccttagggtg

SEQ ID NO: 1081578 - DNA, 25 bp, Homo sapien
tttgccttagggtgcatctctttcc

SEQ ID NO: 1081579 - DNA, 25 bp, Homo sapien
caggctttgccttagggtgcatctc

SEQ ID NO: 1081580 - DNA, 25 bp, Homo sapien
gagacacgatgctatgtacctcatg

SEQ ID NO: 1081581 - DNA, 25 bp, Homo sapien
gaggcacataccttaaaacacatta

SEQ ID NO: 1081582 - DNA, 25 bp, Homo sapien
gagaaattagactgcgtgccaggcc

SEQ ID NO: 1081583 - DNA, 25 bp, Homo sapien
gccaggccctgtgtcagatacaatt

SEQ ID NO: 1081584 - DNA, 25 bp, Homo sapien
cagcaggagagatgcggtcaagtag

SEQ ID NO: 1081585 - DNA, 25 bp, Homo sapien
tccctgccagcgagcctccatggga

SEQ ID NO: 1081586 - DNA, 25 bp, Homo sapien
gaagggctccctgccagcgagcctc

SEQ ID NO: 1081587 - DNA, 25 bp, Homo sapien
gcaggtctgccgcttggcagcccca

SEQ ID NO: 1081588 - DNA, 25 bp, Homo sapien
atcaatactgtgctcttaatgggcc

SEQ ID NO: 1081589 - DNA, 25 bp, Homo sapien
aatcaatactgtgctcttaatgggc

SEQ ID NO: 1081590 - DNA, 25 bp, Homo sapien
tcaatactgtgctcttaatgggccc

SEQ ID NO: 1081591 - DNA, 25 bp, Homo sapien
tcaatcaatactgtgctcttaatgg

SEQ ID NO: 1081592 - DNA, 25 bp, Homo sapien
acaggaccacaagcttgggagcagg

SEQ ID NO: 1081593 - DNA, 25 bp, Homo sapien
gccccgtgaaggatggagaatactg

SEQ ID NO: 1081594 - DNA, 25 bp, Homo sapien
gcaggctgggaaagtaccactgaga

SEQ ID NO: 1081595 - DNA, 25 bp, Homo sapien
tggatgagctgggatgtcctaaacc

SEQ ID NO: 1081596 - DNA, 25 bp, Homo sapien
gaatcacccaagtttagttcaatgc

SEQ ID NO: 1081597 - DNA, 25 bp, Homo sapien
cccaagtttagttcaatgcaagacc

SEQ ID NO: 1081598 - DNA, 25 bp, Homo sapien
gtttagttcaatgcaagacctagcc

SEQ ID NO: 1081599 - DNA, 25 bp, Homo sapien
tagttcaatgcaagacctagcctaa

SEQ ID NO: 1081600 - DNA, 25 bp, Homo sapien
catggcctcctgagtaatagcactg

SEQ ID NO: 1081601 - DNA, 25 bp, Homo sapien
cctgagtaatagcactgggcatgga

SEQ ID NO: 1081602 - DNA, 25 bp, Homo sapien
catctctggtatcagcggcatccac

SEQ ID NO: 1081603 - DNA, 25 bp, Homo sapien
tctctggtatcagcggcatccactc

SEQ ID NO: 1081604 - DNA, 25 bp, Homo sapien
caaggttaactcttctaggaggcag

SEQ ID NO: 1081605 - DNA, 25 bp, Homo sapien
catctggctagattgtgtgtcctct

SEQ ID NO: 1081606 - DNA, 25 bp, Homo sapien
tctatttctttaacagggcctggca

SEQ ID NO: 1081607 - DNA, 25 bp, Homo sapien
taggaggcagtactatcagaagcat

SEQ ID NO: 1081608 - DNA, 25 bp, Homo sapien
agatacctaagtcccactgcaagtg

SEQ ID NO: 1081609 - DNA, 25 bp, Homo sapien
cattgcgcatggacgataggtgacc

SEQ ID NO: 1081610 - DNA, 25 bp, Homo sapien
taatggctctgggacttgaaaggac

SEQ ID NO: 1081611 - DNA, 25 bp, Homo sapien
tagattccttagcaaggcctgcaag

SEQ ID NO: 1081612 - DNA, 25 bp, Homo sapien
gggtggcctaggtgtccgtggccag

SEQ ID NO: 1081613 - DNA, 25 bp, Homo sapien
tggcctaggtgtccgtggccagtag

SEQ ID NO: 1081614 - DNA, 25 bp, Homo sapien
agtaggtgtcgctgtggctccagca

SEQ ID NO: 1081615 - DNA, 25 bp, Homo sapien
ctaggtgtccgtggccagtaggtgt

SEQ ID NO: 1081616 - DNA, 25 bp, Homo sapien
cggggagccagattcccagaactca

SEQ ID NO: 1081617 - DNA, 25 bp, Homo sapien
tctgtcccggggagccagattccca

SEQ ID NO: 1081618 - DNA, 25 bp, Homo sapien
tgctcccctagtctgtcccggggag

SEQ ID NO: 1081619 - DNA, 25 bp, Homo sapien
gaatgccagcttcagggtgcaggac

SEQ ID NO: 1081620 - DNA, 25 bp, Homo sapien
ggttggaatggaaagctgtaccctg

SEQ ID NO: 1081621 - DNA, 25 bp, Homo sapien
gaatggaaagctgtaccctgtccat

SEQ ID NO: 1081622 - DNA, 25 bp, Homo sapien
gacaaacacgtgctcagtattgctg

SEQ ID NO: 1081623 - DNA, 25 bp, Homo sapien
aaacacgtgctcagtattgctgagt

SEQ ID NO: 1081624 - DNA, 25 bp, Homo sapien
aaacactggtgggcaatcacattca

SEQ ID NO: 1081625 - DNA, 25 bp, Homo sapien
ttcatttagttcttgggcaaactcc

SEQ ID NO: 1081626 - DNA, 25 bp, Homo sapien
cactggtgggcaatcacattcattt

SEQ ID NO: 1081627 - DNA, 25 bp, Homo sapien
aacactggtgggcaatcacattcat

SEQ ID NO: 1081628 - DNA, 25 bp, Homo sapien
ttagcctcgttagcggaccaggagg

SEQ ID NO: 1081629 - DNA, 25 bp, Homo sapien
cgcattagcctcgttagcggaccag

SEQ ID NO: 1081630 - DNA, 25 bp, Homo sapien
tcttgctcgcttgcagctcctgctg

SEQ ID NO: 1081631 - DNA, 25 bp, Homo sapien
acagccatcttgctcgcttgcagct

SEQ ID NO: 1081632 - DNA, 25 bp, Homo sapien
acttgcctctctccccgaagcccat

SEQ ID NO: 1081633 - DNA, 25 bp, Homo sapien
catagaagctaaacccttgacccca

SEQ ID NO: 1081634 - DNA, 25 bp, Homo sapien
gaagctaaacccttgaccccatgag

SEQ ID NO: 1081635 - DNA, 25 bp, Homo sapien
ttgaccccatgagcctttgctccgg

SEQ ID NO: 1081636 - DNA, 25 bp, Homo sapien
gtcttggtcatagaagctaaaccct

SEQ ID NO: 1081637 - DNA, 25 bp, Homo sapien
tctctacagaccacaaaaggcatgg

SEQ ID NO: 1081638 - DNA, 25 bp, Homo sapien
gcttgtccaagcaacaaattccatc

SEQ ID NO: 1081639 - DNA, 25 bp, Homo sapien
cagttcttttgcatgagagttccat

SEQ ID NO: 1081640 - DNA, 25 bp, Homo sapien
ccaccgtgtgattgcctctctggct

SEQ ID NO: 1081641 - DNA, 25 bp, Homo sapien
ctttcctgctggacaacagtgaggc

SEQ ID NO: 1081642 - DNA, 25 bp, Homo sapien
cagggagtgactgatggtaagctgc

SEQ ID NO: 1081643 - DNA, 25 bp, Homo sapien
ggacaacagtgaggctccaacaggg

SEQ ID NO: 1081644 - DNA, 25 bp, Homo sapien
gactgatggtaagctgcgaaggaca

SEQ ID NO: 1081645 - DNA, 25 bp, Homo sapien
cgccccagtcgcggagtgcctgcca

SEQ ID NO: 1081646 - DNA, 25 bp, Homo sapien
gccccagtcgcggagtgcctgccac

SEQ ID NO: 1081647 - DNA, 25 bp, Homo sapien
tcccctcccatgcaaagatggatcg

SEQ ID NO: 1081648 - DNA, 25 bp, Homo sapien
gctgagagattcttcaccaaaatgc

SEQ ID NO: 1081649 - DNA, 25 bp, Homo sapien
aaagatggatcgctcattccgcctc

SEQ ID NO: 1081650 - DNA, 25 bp, Homo sapien
cagaggtctgacagcgcctgattga

SEQ ID NO: 1081651 - DNA, 25 bp, Homo sapien
ctgctccgcgtttgcataattccca

SEQ ID NO: 1081652 - DNA, 25 bp, Homo sapien
ggcctgctccgcgtttgcataattc

SEQ ID NO: 1081653 - DNA, 25 bp, Homo sapien
tttgacctgggccattacagtggcc

SEQ ID NO: 1081654 - DNA, 25 bp, Homo sapien
cattacagtggccataaaacgggcc

SEQ ID NO: 1081655 - DNA, 25 bp, Homo sapien
atggcctgcccaggtttaatgacaa

SEQ ID NO: 1081656 - DNA, 25 bp, Homo sapien
catggcctgcccaggtttaatgaca

SEQ ID NO: 1081657 - DNA, 25 bp, Homo sapien
gccacagggacattctacttttctg

SEQ ID NO: 1081658 - DNA, 25 bp, Homo sapien
ccacagggacattctacttttctga

SEQ ID NO: 1081659 - DNA, 25 bp, Homo sapien
tgccacagggacattctacttttct

SEQ ID NO: 1081660 - DNA, 25 bp, Homo sapien
gctgccacagggacattctactttt

SEQ ID NO: 1081661 - DNA, 25 bp, Homo sapien
ggcttcagtccgtgtggcaaggtct

SEQ ID NO: 1081662 - DNA, 25 bp, Homo sapien
ccaggaggcttcagtccgtgtggca

SEQ ID NO: 1081663 - DNA, 25 bp, Homo sapien
caggaggcttcagtccgtgtggcaa

SEQ ID NO: 1081664 - DNA, 25 bp, Homo sapien
ggaggcttcagtccgtgtggcaagg

SEQ ID NO: 1081665 - DNA, 25 bp, Homo sapien
tgaggatgattacggctcccttgga

SEQ ID NO: 1081666 - DNA, 25 bp, Homo sapien
cctttgacaccagactgaggatgat

SEQ ID NO: 1081667 - DNA, 25 bp, Homo sapien
gctcccttggatgcccagatagagt

SEQ ID NO: 1081668 - DNA, 25 bp, Homo sapien
gatgcccagatagagtcatctgagg

SEQ ID NO: 1081669 - DNA, 25 bp, Homo sapien
gctgtcgaacaatgccgctgctttc

SEQ ID NO: 1081670 - DNA, 25 bp, Homo sapien
gcagttgggctagctgctccagttc

SEQ ID NO: 1081671 - DNA, 25 bp, Homo sapien
gggcctggctgtcgaacaatgccgc

SEQ ID NO: 1081672 - DNA, 25 bp, Homo sapien
gttcctgctccatatgctcctgcag

SEQ ID NO: 1081673 - DNA, 25 bp, Homo sapien
cttctgggatccggtggccagaacc

SEQ ID NO: 1081674 - DNA, 25 bp, Homo sapien
cctgagtggactcctccagcaggca

SEQ ID NO: 1081675 - DNA, 25 bp, Homo sapien
gtggccagaaccctgagtggactcc

SEQ ID NO: 1081676 - DNA, 25 bp, Homo sapien
gaattctgggtggtctaatactgcc

SEQ ID NO: 1081677 - DNA, 25 bp, Homo sapien
tcatagagaaggtagtgtccacccc

SEQ ID NO: 1081678 - DNA, 25 bp, Homo sapien
tggagcccaaagctgccatgcaaga

SEQ ID NO: 1081679 - DNA, 25 bp, Homo sapien
tggctccattcagcggaaagatctg

SEQ ID NO: 1081680 - DNA, 25 bp, Homo sapien
tctgattcactatgggatcccctgc

SEQ ID NO: 1081681 - DNA, 25 bp, Homo sapien
gctctgtgctgggtttggtgcctcc

SEQ ID NO: 1081682 - DNA, 25 bp, Homo sapien
gttcttcccgtatagcagtctccat

SEQ ID NO: 1081683 - DNA, 25 bp, Homo sapien
catccctctgggtttgtactgcctg

SEQ ID NO: 1081684 - DNA, 25 bp, Homo sapien
catagccgtgagaagcatggagctt

SEQ ID NO: 1081685 - DNA, 25 bp, Homo sapien
gtgcagatcccgctgtccggctgtc

SEQ ID NO: 1081686 - DNA, 25 bp, Homo sapien
ggtacagatgcagggacgcaagaca

SEQ ID NO: 1081687 - DNA, 25 bp, Homo sapien
tccggctgtcagacacccggttgga

SEQ ID NO: 1081688 - DNA, 25 bp, Homo sapien
ctgaggtccgcagctgtaggcagcc

SEQ ID NO: 1081689 - DNA, 25 bp, Homo sapien
tcccagtgtgcttggcccccagagg

SEQ ID NO: 1081690 - DNA, 25 bp, Homo sapien
ctgaagggcctgcctcatagaagac

SEQ ID NO: 1081691 - DNA, 25 bp, Homo sapien
agaagacaggtctgaggtccgcagc

SEQ ID NO: 1081692 - DNA, 25 bp, Homo sapien
ggcatccttcagaagggaattcttg

SEQ ID NO: 1081693 - DNA, 25 bp, Homo sapien
taaatcatgactttttgcctggctc

SEQ ID NO: 1081694 - DNA, 25 bp, Homo sapien
tggctcttcgcctcattaaaagtgg

SEQ ID NO: 1081695 - DNA, 25 bp, Homo sapien
gaaaataattcacggcttcttcacc

SEQ ID NO: 1081696 - DNA, 25 bp, Homo sapien
ctggtgctttttaaacatggaccaa

SEQ ID NO: 1081697 - DNA, 25 bp, Homo sapien
catgctgcacatcctcaggcaaggg

SEQ ID NO: 1081698 - DNA, 25 bp, Homo sapien
ggccatgctgcacatcctcaggcaa

SEQ ID NO: 1081699 - DNA, 25 bp, Homo sapien
gcggtggccatgctgcacatcctca

SEQ ID NO: 1081700 - DNA, 25 bp, Homo sapien
cggtggccatgctgcacatcctcag

SEQ ID NO: 1081701 - DNA, 25 bp, Homo sapien
ccctcttgatggaagcagacaacag

SEQ ID NO: 1081702 - DNA, 25 bp, Homo sapien
ggtggaggtcatcggtggcagatga

SEQ ID NO: 1081703 - DNA, 25 bp, Homo sapien
cttgatggaagcagacaacaggagg

SEQ ID NO: 1081704 - DNA, 25 bp, Homo sapien
gggtgatgccgttggagactctcct

SEQ ID NO: 1081705 - DNA, 25 bp, Homo sapien
ccccaggtgagcttgcttctcatgg

SEQ ID NO: 1081706 - DNA, 25 bp, Homo sapien
aggaggagttagcaccgggcaggct

SEQ ID NO: 1081707 - DNA, 25 bp, Homo sapien
gagaggaggagttagcaccgggcag

SEQ ID NO: 1081708 - DNA, 25 bp, Homo sapien
cctcccccaggtgagcttgcttctc

SEQ ID NO: 1081709 - DNA, 25 bp, Homo sapien
tcagagcccatggagcccatgtgac

SEQ ID NO: 1081710 - DNA, 25 bp, Homo sapien
tatttaaggcctattccctgacacg

SEQ ID NO: 1081711 - DNA, 25 bp, Homo sapien
gatagaatgattcagaggtgctcag

SEQ ID NO: 1081712 - DNA, 25 bp, Homo sapien
cacccggccggtatcatgcttttga

SEQ ID NO: 1081713 - DNA, 25 bp, Homo sapien
tgagtgcagtacagaggacaggcct

SEQ ID NO: 1081714 - DNA, 25 bp, Homo sapien
ccctttcggaggtgtgcttagagtc

SEQ ID NO: 1081715 - DNA, 25 bp, Homo sapien
tagttcagtgagcatagcccatagg

SEQ ID NO: 1081716 - DNA, 25 bp, Homo sapien
gaatctatatcacagaaggcctcgc

SEQ ID NO: 1081717 - DNA, 25 bp, Homo sapien
cttggttgtcgttgtgctccagtca

SEQ ID NO: 1081718 - DNA, 25 bp, Homo sapien
gtcgttgtgctccagtcatacataa

SEQ ID NO: 1081719 - DNA, 25 bp, Homo sapien
tcatacataatcttacgagctctcg

SEQ ID NO: 1081720 - DNA, 25 bp, Homo sapien
agctctcgaaatttgcagctgttcc

SEQ ID NO: 1081721 - DNA, 25 bp, Homo sapien
ggcggcacttcagctccaagcggcg

SEQ ID NO: 1081722 - DNA, 25 bp, Homo sapien
cggcggcggcacttcagctccaagc

SEQ ID NO: 1081723 - DNA, 25 bp, Homo sapien
ggcggcggcacttcagctccaagcg

SEQ ID NO: 1081724 - DNA, 25 bp, Homo sapien
gcggcggcacttcagctccaagcgg

SEQ ID NO: 1081725 - DNA, 25 bp, Homo sapien
gctccgggctctcggcatagccgcc

SEQ ID NO: 1081726 - DNA, 25 bp, Homo sapien
gcgctgctctaacgggaccccgtgg

SEQ ID NO: 1081727 - DNA, 25 bp, Homo sapien
ccagccctggcctccggcgctctgg

SEQ ID NO: 1081728 - DNA, 25 bp, Homo sapien
gcggcgatgcgggcggattccccgt

SEQ ID NO: 1081729 - DNA, 25 bp, Homo sapien
aaaagagagcgtcaggcgcggcctg

SEQ ID NO: 1081730 - DNA, 25 bp, Homo sapien
ctgggagaagatcgcgggcagatgc

SEQ ID NO: 1081731 - DNA, 25 bp, Homo sapien
tcgcgggcagatgcaagaaaagaaa

SEQ ID NO: 1081732 - DNA, 25 bp, Homo sapien
tgctccgccccaaacagcccgtaaa

SEQ ID NO: 1081733 - DNA, 25 bp, Homo sapien
tgccggttggctcgtactcgcagaa

SEQ ID NO: 1081734 - DNA, 25 bp, Homo sapien
ggttggctcgtactcgcagaaaggt

SEQ ID NO: 1081735 - DNA, 25 bp, Homo sapien
tcgggtctgccggttggctcgtact

SEQ ID NO: 1081736 - DNA, 25 bp, Homo sapien
cattcagtcgggtctgccggttggc

SEQ ID NO: 1081737 - DNA, 25 bp, Homo sapien
tggtttgcacatactcaggcgccgt

SEQ ID NO: 1081738 - DNA, 25 bp, Homo sapien
gccatacctccattagacagacggg

SEQ ID NO: 1081739 - DNA, 25 bp, Homo sapien
cctttgtgaaatgtgggccgactga

SEQ ID NO: 1081740 - DNA, 25 bp, Homo sapien
gactgataactcaaagagccctggg

SEQ ID NO: 1081741 - DNA, 25 bp, Homo sapien
gcccttcatcttgcttcctccgttt

SEQ ID NO: 1081742 - DNA, 25 bp, Homo sapien
ctgcccttcatcttgcttcctccgt

SEQ ID NO: 1081743 - DNA, 25 bp, Homo sapien
cttcatcttgcttcctccgtttcat

SEQ ID NO: 1081744 - DNA, 25 bp, Homo sapien
ccttcatcttgcttcctccgtttca

SEQ ID NO: 1081745 - DNA, 25 bp, Homo sapien
cacatgcctactcatctcctgctcc

SEQ ID NO: 1081746 - DNA, 25 bp, Homo sapien
ccagggggcggttgcacaggggaca

SEQ ID NO: 1081747 - DNA, 25 bp, Homo sapien
atctcctgctccgatcctgccaggg

SEQ ID NO: 1081748 - DNA, 25 bp, Homo sapien
cttagaaaggcaatgctccacatgc

SEQ ID NO: 1081749 - DNA, 25 bp, Homo sapien
tcatactcctcaaagcggttgttgt

SEQ ID NO: 1081750 - DNA, 25 bp, Homo sapien
ggtggcccgtatccgcttctgtcca

SEQ ID NO: 1081751 - DNA, 25 bp, Homo sapien
ttctcatgctcgatgtccacagcat

SEQ ID NO: 1081752 - DNA, 25 bp, Homo sapien
caggagagtggtggcccgtatccgc

SEQ ID NO: 1081753 - DNA, 25 bp, Homo sapien
gcaccagagtgccaatgtctacgtg

SEQ ID NO: 1081754 - DNA, 25 bp, Homo sapien
aggcaggcagcacggtcacaaagga

SEQ ID NO: 1081755 - DNA, 25 bp, Homo sapien
tccagcagatggatacccagcagag

SEQ ID NO: 1081756 - DNA, 25 bp, Homo sapien
tccccacgtggtggaacggatggat

SEQ ID NO: 1081757 - DNA, 25 bp, Homo sapien
ttcaatgcatcacccgaagctgaga

SEQ ID NO: 1081758 - DNA, 25 bp, Homo sapien
atattttatgcaggtgctaacgcgg

SEQ ID NO: 1081759 - DNA, 25 bp, Homo sapien
tgtcaccttcaatgcatcacccgaa

SEQ ID NO: 1081760 - DNA, 25 bp, Homo sapien
gctaacgcggcttggctgtcacctt

SEQ ID NO: 1081761 - DNA, 25 bp, Homo sapien
tctaaccggtcttggcaggcaatct

SEQ ID NO: 1081762 - DNA, 25 bp, Homo sapien
tatcactccctctaaccggtcttgg

SEQ ID NO: 1081763 - DNA, 25 bp, Homo sapien
gcttcttcagctggcgttatcactc

SEQ ID NO: 1081764 - DNA, 25 bp, Homo sapien
cagctggcgttatcactccctctaa

SEQ ID NO: 1081765 - DNA, 25 bp, Homo sapien
aacgccatcgattggggagctgaca

SEQ ID NO: 1081766 - DNA, 25 bp, Homo sapien
taaacgccatcgattggggagctga

SEQ ID NO: 1081767 - DNA, 25 bp, Homo sapien
ggtgtcttgtgtaaacgccatcgat

SEQ ID NO: 1081768 - DNA, 25 bp, Homo sapien
gtcttgtgtaaacgccatcgattgg

SEQ ID NO: 1081769 - DNA, 25 bp, Homo sapien
ctgttccgctggccagtgaggcagg

SEQ ID NO: 1081770 - DNA, 25 bp, Homo sapien
gaaatctctcaggatacaactttcc

SEQ ID NO: 1081771 - DNA, 25 bp, Homo sapien
agacagatgttgggaacctctccct

SEQ ID NO: 1081772 - DNA, 25 bp, Homo sapien
gacagcacgacacactttgtttgcc

SEQ ID NO: 1081773 - DNA, 25 bp, Homo sapien
aatgccattctttcaacctttattg

SEQ ID NO: 1081774 - DNA, 25 bp, Homo sapien
gctgctctctaaatccctgctaaag

SEQ ID NO: 1081775 - DNA, 25 bp, Homo sapien
ctcctttggcaagtctgactcagcc

SEQ ID NO: 1081776 - DNA, 25 bp, Homo sapien
tgcctcctaccattaactcacagtg

SEQ ID NO: 1081777 - DNA, 25 bp, Homo sapien
taaaccctctgacagtttgggagac

SEQ ID NO: 1081778 - DNA, 25 bp, Homo sapien
ggctttggacctgataaggcccaga

SEQ ID NO: 1081779 - DNA, 25 bp, Homo sapien
gcctagccctgccttataagtggaa

SEQ ID NO: 1081780 - DNA, 25 bp, Homo sapien
tatagagccagatacttcagtgccc

SEQ ID NO: 1081781 - DNA, 25 bp, Homo sapien
gtgggaagcagggtgtgaggagggc

SEQ ID NO: 1081782 - DNA, 25 bp, Homo sapien
tgtgggaagcagggtgtgaggaggg

SEQ ID NO: 1081783 - DNA, 25 bp, Homo sapien
ctgtgggaagcagggtgtgaggagg

SEQ ID NO: 1081784 - DNA, 25 bp, Homo sapien
ttgccgctgcacatgatgaagccag

SEQ ID NO: 1081785 - DNA, 25 bp, Homo sapien
tcagcatcactgtccgggttctctt

SEQ ID NO: 1081786 - DNA, 25 bp, Homo sapien
atccaagtcagcatcactgtccggg

SEQ ID NO: 1081787 - DNA, 25 bp, Homo sapien
tccgggttctctttgccgctgcaca

SEQ ID NO: 1081788 - DNA, 25 bp, Homo sapien
atgagggttgaatcctcaggagagc

SEQ ID NO: 1081789 - DNA, 25 bp, Homo sapien
caggctatgagggttgaatcctcag

SEQ ID NO: 1081790 - DNA, 25 bp, Homo sapien
cagcaggctatgagggttgaatcct

SEQ ID NO: 1081791 - DNA, 25 bp, Homo sapien
ggctatgagggttgaatcctcagga

SEQ ID NO: 1081792 - DNA, 25 bp, Homo sapien
tggcatggtggtcaaggacaatgga

SEQ ID NO: 1081793 - DNA, 25 bp, Homo sapien
ctggcatggtggtcaaggacaatgg

SEQ ID NO: 1081794 - DNA, 25 bp, Homo sapien
gcatggtggtcaaggacaatggatc

SEQ ID NO: 1081795 - DNA, 25 bp, Homo sapien
ggcatggtggtcaaggacaatggat

SEQ ID NO: 1081796 - DNA, 25 bp, Homo sapien
ttcaccaggctcctcgcctgtgcag

SEQ ID NO: 1081797 - DNA, 25 bp, Homo sapien
caccaggctcctcgcctgtgcaggg

SEQ ID NO: 1081798 - DNA, 25 bp, Homo sapien
tgcgccccgaagtgcctctctctcc

SEQ ID NO: 1081799 - DNA, 25 bp, Homo sapien
ggactgcgccccgaagtgcctctct

SEQ ID NO: 1081800 - DNA, 25 bp, Homo sapien
cgtcatccgcaccagggagggcgcg

SEQ ID NO: 1081801 - DNA, 25 bp, Homo sapien
cgcgccctccctggtgcggatgacg

SEQ ID NO: 1081802 - DNA, 25 bp, Homo sapien
tttagagaactcaggtgtgatgcgc

SEQ ID NO: 1081803 - DNA, 25 bp, Homo sapien
catcactggcccatttagagaactc

SEQ ID NO: 1081804 - DNA, 25 bp, Homo sapien
agaactcaggtgtgatgcgcgtgct

SEQ ID NO: 1081805 - DNA, 25 bp, Homo sapien
tagagaactcaggtgtgatgcgcgt

SEQ ID NO: 1081806 - DNA, 25 bp, Homo sapien
acagaggggcaactcacactccggc

SEQ ID NO: 1081807 - DNA, 25 bp, Homo sapien
tgggacagaggggcaactcacactc

SEQ ID NO: 1081808 - DNA, 25 bp, Homo sapien
aggggcaactcacactccggccaga

SEQ ID NO: 1081809 - DNA, 25 bp, Homo sapien
ctgggacagaggggcaactcacact

SEQ ID NO: 1081810 - DNA, 25 bp, Homo sapien
tctcgatgtcgctgttcttgcaggt

SEQ ID NO: 1081811 - DNA, 25 bp, Homo sapien
ctcgatgtcgctgttcttgcaggtc

SEQ ID NO: 1081812 - DNA, 25 bp, Homo sapien
ttctcgatgtcgctgttcttgcagg

SEQ ID NO: 1081813 - DNA, 25 bp, Homo sapien
aggaggcaaagatggaacactggcc

SEQ ID NO: 1081814 - DNA, 25 bp, Homo sapien
cggcccatacatcatgccagcagca

SEQ ID NO: 1081815 - DNA, 25 bp, Homo sapien
gagataaactgatcaaccacaacgg

SEQ ID NO: 1081816 - DNA, 25 bp, Homo sapien
ggccccggccgagataaactgatca

SEQ ID NO: 1081817 - DNA, 25 bp, Homo sapien
tgatcaaccacaacgggctggaatg

SEQ ID NO: 1081818 - DNA, 25 bp, Homo sapien
tccggcgctgacacggagcagctgc

SEQ ID NO: 1081819 - DNA, 25 bp, Homo sapien
ctggttgcgcagaacccatacggcc

SEQ ID NO: 1081820 - DNA, 25 bp, Homo sapien
gagcagctgcggtgattcatgggca

SEQ ID NO: 1081821 - DNA, 25 bp, Homo sapien
cacaagctggttgcgcagaacccat

SEQ ID NO: 1081822 - DNA, 25 bp, Homo sapien
cccctcgggcgccatccctgattaa

SEQ ID NO: 1081823 - DNA, 25 bp, Homo sapien
ttctgatttatgagcagcccctcca

SEQ ID NO: 1081824 - DNA, 25 bp, Homo sapien
ccatccctgattaatgatcttgtct

SEQ ID NO: 1081825 - DNA, 25 bp, Homo sapien
cagacgagggtgggtgccccttaca

SEQ ID NO: 1081826 - DNA, 25 bp, Homo sapien
tcatgggcaatacaacttcaatctc

SEQ ID NO: 1081827 - DNA, 25 bp, Homo sapien
cataagggacgtggactttgggcaa

SEQ ID NO: 1081828 - DNA, 25 bp, Homo sapien
tcaggaagcttgagagcttacaggt

SEQ ID NO: 1081829 - DNA, 25 bp, Homo sapien
cagggagggtagtggtcccatttca

SEQ ID NO: 1081830 - DNA, 25 bp, Homo sapien
gaagtttatctcgtggacagcagga

SEQ ID NO: 1081831 - DNA, 25 bp, Homo sapien
ctgaaggagctgaagtttatctcgt

SEQ ID NO: 1081832 - DNA, 25 bp, Homo sapien
gagctgaagtttatctcgtggacag

SEQ ID NO: 1081833 - DNA, 25 bp, Homo sapien
aagtttatctcgtggacagcaggaa

SEQ ID NO: 1081834 - DNA, 25 bp, Homo sapien
aagttcctgagtatgggttccctga

SEQ ID NO: 1081835 - DNA, 25 bp, Homo sapien
gaatagctaggactctctcaaggaa

SEQ ID NO: 1081836 - DNA, 25 bp, Homo sapien
taggcgtgtcccacatgatctaggt

SEQ ID NO: 1081837 - DNA, 25 bp, Homo sapien
caaagcaaatctctcgtggtgtgac

SEQ ID NO: 1081838 - DNA, 25 bp, Homo sapien
cccacgagatagctgccgttcaagt

SEQ ID NO: 1081839 - DNA, 25 bp, Homo sapien
tcaagttctctgacccgagccttca

SEQ ID NO: 1081840 - DNA, 25 bp, Homo sapien
gcctcaaacgtggtcacagctgaat

SEQ ID NO: 1081841 - DNA, 25 bp, Homo sapien
cagatgaggcatttgtaacggtccc

SEQ ID NO: 1081842 - DNA, 25 bp, Homo sapien
ccgtcatccgcaccagggagggcgc

SEQ ID NO: 1081843 - DNA, 25 bp, Homo sapien
gcgccctccctggtgcggatgacgg

SEQ ID NO: 1081844 - DNA, 25 bp, Homo sapien
gccagcactcctcgcagtgcacgtg

SEQ ID NO: 1081845 - DNA, 25 bp, Homo sapien
gtgcacgtgccaacactggatggac

SEQ ID NO: 1081846 - DNA, 25 bp, Homo sapien
acgttaggggcatcgagtacgagtc

SEQ ID NO: 1081847 - DNA, 25 bp, Homo sapien
tgccaacactggatggacgttaggg

SEQ ID NO: 1081848 - DNA, 25 bp, Homo sapien
agtgcccggagcggcctcccattcc

SEQ ID NO: 1081849 - DNA, 25 bp, Homo sapien
cagtgcccggagcggcctcccattc

SEQ ID NO: 1081850 - DNA, 25 bp, Homo sapien
tgcccggagcggcctcccattcccc

SEQ ID NO: 1081851 - DNA, 25 bp, Homo sapien
gcagtgcccggagcggcctcccatt

SEQ ID NO: 1081852 - DNA, 25 bp, Homo sapien
gagaagttcctaaacctgcagttgg

SEQ ID NO: 1081853 - DNA, 25 bp, Homo sapien
tacacgcggcctttgatcaggacac

SEQ ID NO: 1081854 - DNA, 25 bp, Homo sapien
tgcgggtaaatatcctggctcctgg

SEQ ID NO: 1081855 - DNA, 25 bp, Homo sapien
gcagccctaacgagattacacgcgg

SEQ ID NO: 1081856 - DNA, 25 bp, Homo sapien
ctgtgatcgtgttgcactgagggca

SEQ ID NO: 1081857 - DNA, 25 bp, Homo sapien
ccgggcgctgtgatcgtgttgcact

SEQ ID NO: 1081858 - DNA, 25 bp, Homo sapien
ggtctccgggcgctgtgatcgtgtt

SEQ ID NO: 1081859 - DNA, 25 bp, Homo sapien
tcacaagtagatcctccgcaggtct

SEQ ID NO: 1081860 - DNA, 25 bp, Homo sapien
ggctggatcttaggagccgtgcccc

SEQ ID NO: 1081861 - DNA, 25 bp, Homo sapien
gagacggtcactgtcacagaggctg

SEQ ID NO: 1081862 - DNA, 25 bp, Homo sapien
caagtatgtacaaagggagacggtc

SEQ ID NO: 1081863 - DNA, 25 bp, Homo sapien
cacggtctatattacatgtgcttca

SEQ ID NO: 1081864 - DNA, 25 bp, Homo sapien
gaaatatacaccactgaacaccgag

SEQ ID NO: 1081865 - DNA, 25 bp, Homo sapien
gagctaagactaaggagaggatcat

SEQ ID NO: 1081866 - DNA, 25 bp, Homo sapien
tataaagagccccatgagctaagac

SEQ ID NO: 1081867 - DNA, 25 bp, Homo sapien
tagagggcgaggagttgtcccattt

SEQ ID NO: 1081868 - DNA, 25 bp, Homo sapien
tggccaggagcactgtcctctagcc

SEQ ID NO: 1081869 - DNA, 25 bp, Homo sapien
aaggcagctctaatcccaggaatgg

SEQ ID NO: 1081870 - DNA, 25 bp, Homo sapien
ccaggaatggttctcagcagaggct

SEQ ID NO: 1081871 - DNA, 25 bp, Homo sapien
gaatatacagacacagcatcacacc

SEQ ID NO: 1081872 - DNA, 25 bp, Homo sapien
cacaacctgcaatctgtcgggcact

SEQ ID NO: 1081873 - DNA, 25 bp, Homo sapien
caagcctctgtgtcgacttcatgcg

SEQ ID NO: 1081874 - DNA, 25 bp, Homo sapien
gtccgctgctgaggccattgctcca

SEQ ID NO: 1081875 - DNA, 25 bp, Homo sapien
gaaaattcctatgggcctgtctcct

SEQ ID NO: 1081876 - DNA, 25 bp, Homo sapien
aaagggcacactcttccgccgcgta

SEQ ID NO: 1081877 - DNA, 25 bp, Homo sapien
taggataggactctgttcggacgag

SEQ ID NO: 1081878 - DNA, 25 bp, Homo sapien
cagaggtaggtagacgatgcaagtc

SEQ ID NO: 1081879 - DNA, 25 bp, Homo sapien
agccctcgcagttgcggctggtaga

SEQ ID NO: 1081880 - DNA, 25 bp, Homo sapien
cctcacatctgtccattttctccat

SEQ ID NO: 1081881 - DNA, 25 bp, Homo sapien
tcctcacatctgtccattttctcca

SEQ ID NO: 1081882 - DNA, 25 bp, Homo sapien
tttcctcacatctgtccattttctc

SEQ ID NO: 1081883 - DNA, 25 bp, Homo sapien
cttttcctcacatctgtccattttc

SEQ ID NO: 1081884 - DNA, 25 bp, Homo sapien
gttccttactacctgaggataaagc

SEQ ID NO: 1081885 - DNA, 25 bp, Homo sapien
tccatgaacttttgtgactgaatgc

SEQ ID NO: 1081886 - DNA, 25 bp, Homo sapien
tgcttcaagccggttagcctccctg

SEQ ID NO: 1081887 - DNA, 25 bp, Homo sapien
ttaagcctcttagaggtcaaactgg

SEQ ID NO: 1081888 - DNA, 25 bp, Homo sapien
gtaagctccccttgttggcagttgc

SEQ ID NO: 1081889 - DNA, 25 bp, Homo sapien
gataaccacgaaatctagctggcct

SEQ ID NO: 1081890 - DNA, 25 bp, Homo sapien
tagctggccttaagaaccaggtgaa

SEQ ID NO: 1081891 - DNA, 25 bp, Homo sapien
gaagggcgtccacgcagcctccagg

SEQ ID NO: 1081892 - DNA, 25 bp, Homo sapien
agaggacatgggatgcgtgcttcca

SEQ ID NO: 1081893 - DNA, 25 bp, Homo sapien
actttacagtctgaaacatcctaaa

SEQ ID NO: 1081894 - DNA, 25 bp, Homo sapien
gatggggcccagctatcagaatttt

SEQ ID NO: 1081895 - DNA, 25 bp, Homo sapien
gaggcatgcggagacagacatacat

SEQ ID NO: 1081896 - DNA, 25 bp, Homo sapien
taacatttcctcacatgtatttgag

SEQ ID NO: 1081897 - DNA, 25 bp, Homo sapien
agtgctccttaaccttgtacctcgg

SEQ ID NO: 1081898 - DNA, 25 bp, Homo sapien
ggcttacttcatacagggtcagagg

SEQ ID NO: 1081899 - DNA, 25 bp, Homo sapien
gatgtgtatttcacgaagactgttc

SEQ ID NO: 1081900 - DNA, 25 bp, Homo sapien
tatgccaatcacctaagttaaagtg

SEQ ID NO: 1081901 - DNA, 25 bp, Homo sapien
ccgggaggcgggttgcagtgagccg

SEQ ID NO: 1081902 - DNA, 25 bp, Homo sapien
aggcaggagaaatcccttgaacccg

SEQ ID NO: 1081903 - DNA, 25 bp, Homo sapien
gagcctgctaattgctgcctgctcc

SEQ ID NO: 1081904 - DNA, 25 bp, Homo sapien
aagagcctgctaattgctgcctgct

SEQ ID NO: 1081905 - DNA, 25 bp, Homo sapien
ttaagagcctgctaattgctgcctg

SEQ ID NO: 1081906 - DNA, 25 bp, Homo sapien
taagagcctgctaattgctgcctgc

SEQ ID NO: 1081907 - DNA, 25 bp, Homo sapien
gcagtcttgccttggttggtttcaa

SEQ ID NO: 1081908 - DNA, 25 bp, Homo sapien
gatgtgactccttgcgactttgcca

SEQ ID NO: 1081909 - DNA, 25 bp, Homo sapien
ggtttcaatgaacttgtcgaggatg

SEQ ID NO: 1081910 - DNA, 25 bp, Homo sapien
cagcgttgtcccactcctgtaaaaa

SEQ ID NO: 1081911 - DNA, 25 bp, Homo sapien
attctaagcgaggtggtcaagcgta

SEQ ID NO: 1081912 - DNA, 25 bp, Homo sapien
ttctaagcgaggtggtcaagcgtac

SEQ ID NO: 1081913 - DNA, 25 bp, Homo sapien
tacttcctgagtaacatgaggtaac

SEQ ID NO: 1081914 - DNA, 25 bp, Homo sapien
gaacacatggtttgagtcctggatc

SEQ ID NO: 1081915 - DNA, 25 bp, Homo sapien
ccctccagtgggtgctattagcatt

SEQ ID NO: 1081916 - DNA, 25 bp, Homo sapien
tcagcagttgctaacaagtaccagc

SEQ ID NO: 1081917 - DNA, 25 bp, Homo sapien
cgcatcagctcagatacaaggtatg

SEQ ID NO: 1081918 - DNA, 25 bp, Homo sapien
ccaggatgccaatagaagtagagac

SEQ ID NO: 1081919 - DNA, 25 bp, Homo sapien
taaagtacccaaagcacgcatcagc

SEQ ID NO: 1081920 - DNA, 25 bp, Homo sapien
tactaggctcataacacatcagagg

SEQ ID NO: 1081921 - DNA, 25 bp, Homo sapien
agctaccagcggaaggggaagtggc

SEQ ID NO: 1081922 - DNA, 25 bp, Homo sapien
ggaagagggtgctggctgttcactg

SEQ ID NO: 1081923 - DNA, 25 bp, Homo sapien
gaagagggtgctggctgttcactgt

SEQ ID NO: 1081924 - DNA, 25 bp, Homo sapien
cctgagaggagctaccagcggaagg

SEQ ID NO: 1081925 - DNA, 25 bp, Homo sapien
ctgcttacagctgataagaagatgc

SEQ ID NO: 1081926 - DNA, 25 bp, Homo sapien
tgcttacagctgataagaagatgcc

SEQ ID NO: 1081927 - DNA, 25 bp, Homo sapien
cctgccagagttcgcaataacctga

SEQ ID NO: 1081928 - DNA, 25 bp, Homo sapien
ttccaagagggttaggacacctcca

SEQ ID NO: 1081929 - DNA, 25 bp, Homo sapien
cttgtatgtcctgccagagttcgca

SEQ ID NO: 1081930 - DNA, 25 bp, Homo sapien
gttaggacacctccaacctcaagaa

SEQ ID NO: 1081931 - DNA, 25 bp, Homo sapien
ttggtacttgggattgccgtggacc

SEQ ID NO: 1081932 - DNA, 25 bp, Homo sapien
cttttggggactcgcagggcagcaa

SEQ ID NO: 1081933 - DNA, 25 bp, Homo sapien
ttgccgtggaccaaagaatccaaca

SEQ ID NO: 1081934 - DNA, 25 bp, Homo sapien
gctattagacctttatacacttgat

SEQ ID NO: 1081935 - DNA, 25 bp, Homo sapien
tttcacttgcatccgagggtactgt

SEQ ID NO: 1081936 - DNA, 25 bp, Homo sapien
ttcggttttcacttgcatccgaggg

SEQ ID NO: 1081937 - DNA, 25 bp, Homo sapien
caaattcggttttcacttgcatccg

SEQ ID NO: 1081938 - DNA, 25 bp, Homo sapien
gccccaaattcggttttcacttgca

SEQ ID NO: 1081939 - DNA, 25 bp, Homo sapien
agcaccttcagcacgcagtccacga

SEQ ID NO: 1081940 - DNA, 25 bp, Homo sapien
tcagcacgcagtccacgatgctggg

SEQ ID NO: 1081941 - DNA, 25 bp, Homo sapien
ggacttccaggtgcatcgtgcccag

SEQ ID NO: 1081942 - DNA, 25 bp, Homo sapien
acttccaggtgcatcgtgcccagca

SEQ ID NO: 1081943 - DNA, 25 bp, Homo sapien
ggcagattctcgtaaccgttcaggc

SEQ ID NO: 1081944 - DNA, 25 bp, Homo sapien
cgtaaccgttcaggcaccctaggca

SEQ ID NO: 1081945 - DNA, 25 bp, Homo sapien
agattctcgtaaccgttcaggcacc

SEQ ID NO: 1081946 - DNA, 25 bp, Homo sapien
ttctcgtaaccgttcaggcacccta

SEQ ID NO: 1081947 - DNA, 25 bp, Homo sapien
ggaggttgaggagggagaatatctt

SEQ ID NO: 1081948 - DNA, 25 bp, Homo sapien
gggaggttgaggagggagaatatct

SEQ ID NO: 1081949 - DNA, 25 bp, Homo sapien
gttgaggagggagaatatcttgagc

SEQ ID NO: 1081950 - DNA, 25 bp, Homo sapien
aggttgaggagggagaatatcttga

SEQ ID NO: 1081951 - DNA, 25 bp, Homo sapien
ctcctgccacatatccagataattt

SEQ ID NO: 1081952 - DNA, 25 bp, Homo sapien
gcatgaacgtgtttagcatgttgca

SEQ ID NO: 1081953 - DNA, 25 bp, Homo sapien
cagcagggcactagcatgaacgtgt

SEQ ID NO: 1081954 - DNA, 25 bp, Homo sapien
ggcactagcatgaacgtgtttagca

SEQ ID NO: 1081955 - DNA, 25 bp, Homo sapien
tttccagcagggcactagcatgaac

SEQ ID NO: 1081956 - DNA, 25 bp, Homo sapien
ccttgaccttgagggtactgtcttc

SEQ ID NO: 1081957 - DNA, 25 bp, Homo sapien
caccgagagcagaatctcagtgcct

SEQ ID NO: 1081958 - DNA, 25 bp, Homo sapien
taatccatacaagaccacctgaggg

SEQ ID NO: 1081959 - DNA, 25 bp, Homo sapien
aacacttgaggttctctggaccacc

SEQ ID NO: 1081960 - DNA, 25 bp, Homo sapien
cctttgccgaaattagacacagaga

SEQ ID NO: 1081961 - DNA, 25 bp, Homo sapien
attcactcagtctttcggcacggct

SEQ ID NO: 1081962 - DNA, 25 bp, Homo sapien
aaaccactttgcctaagttacacag

SEQ ID NO: 1081963 - DNA, 25 bp, Homo sapien
ccagatgaggttcacttccccattt

SEQ ID NO: 1081964 - DNA, 25 bp, Homo sapien
agagaggggggccttcgccttggag

SEQ ID NO: 1081965 - DNA, 25 bp, Homo sapien
cctaggatgtcagcgctggaggctg

SEQ ID NO: 1081966 - DNA, 25 bp, Homo sapien
ggcggcctaggatgtcagcgctgga

SEQ ID NO: 1081967 - DNA, 25 bp, Homo sapien
tgtcgaggcggcctaggatgtcagc

SEQ ID NO: 1081968 - DNA, 25 bp, Homo sapien
aggaagggttggatggtgagcccac

SEQ ID NO: 1081969 - DNA, 25 bp, Homo sapien
tactgatcagcactgtgcagggcgt

SEQ ID NO: 1081970 - DNA, 25 bp, Homo sapien
actgatcagcactgtgcagggcgtg

SEQ ID NO: 1081971 - DNA, 25 bp, Homo sapien
accccgtgaaccaagtcgccactcg

SEQ ID NO: 1081972 - DNA, 25 bp, Homo sapien
aaccaagtcgccactcgtcagtgtc

SEQ ID NO: 1081973 - DNA, 25 bp, Homo sapien
gaccaggtctttgatcaactcgatg

SEQ ID NO: 1081974 - DNA, 25 bp, Homo sapien
gcgcacatcgtaaccgaccaggtct

SEQ ID NO: 1081975 - DNA, 25 bp, Homo sapien
gcctgcagtttggagatctccttga

SEQ ID NO: 1081976 - DNA, 25 bp, Homo sapien
ttgaccgacggtatcagcagcgcca

SEQ ID NO: 1081977 - DNA, 25 bp, Homo sapien
cagccgtgaggcaagagaccgccct

SEQ ID NO: 1081978 - DNA, 25 bp, Homo sapien
ccgtgaggcaagagaccgccctccc

SEQ ID NO: 1081979 - DNA, 25 bp, Homo sapien
tgaggcaagagaccgccctcccgtg

SEQ ID NO: 1081980 - DNA, 25 bp, Homo sapien
agccgtgaggcaagagaccgccctc

SEQ ID NO: 1081981 - DNA, 25 bp, Homo sapien
tgctgcaaaaacatcggcaggctgg

SEQ ID NO: 1081982 - DNA, 25 bp, Homo sapien
ctgcaaaaacatcggcaggctgggg

SEQ ID NO: 1081983 - DNA, 25 bp, Homo sapien
gcaaaaacatcggcaggctgggggt

SEQ ID NO: 1081984 - DNA, 25 bp, Homo sapien
ctgctgcaaaaacatcggcaggctg

SEQ ID NO: 1081985 - DNA, 25 bp, Homo sapien
cacccggcgcacggagcgctcccgg

SEQ ID NO: 1081986 - DNA, 25 bp, Homo sapien
gcagctacccactaacccctgcccg

SEQ ID NO: 1081987 - DNA, 25 bp, Homo sapien
gacgccctggggctcacccggcgca

SEQ ID NO: 1081988 - DNA, 25 bp, Homo sapien
ggcccgccggcagcgccaagccagg

SEQ ID NO: 1081989 - DNA, 25 bp, Homo sapien
atgctcatgtcgttgcgcgccagga

SEQ ID NO: 1081990 - DNA, 25 bp, Homo sapien
ttaggccacgcaccacgcgcaggta

SEQ ID NO: 1081991 - DNA, 25 bp, Homo sapien
tgtggtccgtgttgcccatggcggc

SEQ ID NO: 1081992 - DNA, 25 bp, Homo sapien
atggcggccattaggccacgcacca

SEQ ID NO: 1081993 - DNA, 25 bp, Homo sapien
tgcgccgcgcgggcgaggcggcgtg

SEQ ID NO: 1081994 - DNA, 25 bp, Homo sapien
gcgccgcgcgggcgaggcggcgtga

SEQ ID NO: 1081995 - DNA, 25 bp, Homo sapien
ctgcgccgcgcgggcgaggcggcgt

SEQ ID NO: 1081996 - DNA, 25 bp, Homo sapien
ccccatgcacttgcgcacgtgctcc

SEQ ID NO: 1081997 - DNA, 25 bp, Homo sapien
catgcacttgcgcacgtgctccgcc

SEQ ID NO: 1081998 - DNA, 25 bp, Homo sapien
tgcacttgcgcacgtgctccgccac

SEQ ID NO: 1081999 - DNA, 25 bp, Homo sapien
cttgcgcacgtgctccgccaccaag

SEQ ID NO: 1082000 - DNA, 25 bp, Homo sapien
tggaggagcctacgccagagcagtc

SEQ ID NO: 1082001 - DNA, 25 bp, Homo sapien
gccgccatctgctcattgcggcggg

SEQ ID NO: 1082002 - DNA, 25 bp, Homo sapien
ggcatcacactgtccgagccgccat

SEQ ID NO: 1082003 - DNA, 25 bp, Homo sapien
gggactgtctgaaggggcatcacac

SEQ ID NO: 1082004 - DNA, 25 bp, Homo sapien
ccagggcagtctggacttggagttg

SEQ ID NO: 1082005 - DNA, 25 bp, Homo sapien
cttggagttgggcttggcagaggga

SEQ ID NO: 1082006 - DNA, 25 bp, Homo sapien
caggagcaagggggacccggctggg

SEQ ID NO: 1082007 - DNA, 25 bp, Homo sapien
gatgttgcaggtggggggcgggtcg

SEQ ID NO: 1082008 - DNA, 25 bp, Homo sapien
tcatgtacaagtcctcagcgttgct

SEQ ID NO: 1082009 - DNA, 25 bp, Homo sapien
tgactgtgttggccgccaagatgtc

SEQ ID NO: 1082010 - DNA, 25 bp, Homo sapien
agatgtccgcctgaatgctgtctat

SEQ ID NO: 1082011 - DNA, 25 bp, Homo sapien
ttttcatgtacaagtcctcagcgtt

SEQ ID NO: 1082012 - DNA, 25 bp, Homo sapien
gattctacatcctcctcgaagtgtg

SEQ ID NO: 1082013 - DNA, 25 bp, Homo sapien
gagtgttcatgctgtaggagctgcc

SEQ ID NO: 1082014 - DNA, 25 bp, Homo sapien
cgcgcgagccatagagagtgttcat

SEQ ID NO: 1082015 - DNA, 25 bp, Homo sapien
tgtgaggtaggccatctgagccgaa

SEQ ID NO: 1082016 - DNA, 25 bp, Homo sapien
ttattgactcttcgcagccagcggc

SEQ ID NO: 1082017 - DNA, 25 bp, Homo sapien
gctgtttattgactcttcgcagcca

SEQ ID NO: 1082018 - DNA, 25 bp, Homo sapien
tgtttattgactcttcgcagccagc

SEQ ID NO: 1082019 - DNA, 25 bp, Homo sapien
tttattgactcttcgcagccagcgg

SEQ ID NO: 1082020 - DNA, 25 bp, Homo sapien
gtgcaagccaccgtcctaaacttgg

SEQ ID NO: 1082021 - DNA, 25 bp, Homo sapien
tcatagctctcacttgacctccctt

SEQ ID NO: 1082022 - DNA, 25 bp, Homo sapien
acttggacctgctttttaacttgag

SEQ ID NO: 1082023 - DNA, 25 bp, Homo sapien
caccgtcctaaacttggacctgctt

SEQ ID NO: 1082024 - DNA, 25 bp, Homo sapien
cagggctggcagatcactcgcggtc

SEQ ID NO: 1082025 - DNA, 25 bp, Homo sapien
cctagaccgggtggcggccgagcag

SEQ ID NO: 1082026 - DNA, 25 bp, Homo sapien
agggctggcagatcactcgcggtca

SEQ ID NO: 1082027 - DNA, 25 bp, Homo sapien
cttcctagaccgggtggcggccgag

SEQ ID NO: 1082028 - DNA, 25 bp, Homo sapien
cacctgctaggcatggtaccaggaa

SEQ ID NO: 1082029 - DNA, 25 bp, Homo sapien
agatatttattgagtgaagtctacc

SEQ ID NO: 1082030 - DNA, 25 bp, Homo sapien
tggtaccaggaaatggagataatga

SEQ ID NO: 1082031 - DNA, 25 bp, Homo sapien
taatgaactagacacatagttcctg

SEQ ID NO: 1082032 - DNA, 25 bp, Homo sapien
gagtgatcgctcgagatcagaagtt

SEQ ID NO: 1082033 - DNA, 25 bp, Homo sapien
gagaggtgggagtgatcgctcgaga

SEQ ID NO: 1082034 - DNA, 25 bp, Homo sapien
gtgatcgctcgagatcagaagttcg

SEQ ID NO: 1082035 - DNA, 25 bp, Homo sapien
tgggagtgatcgctcgagatcagaa

SEQ ID NO: 1082036 - DNA, 25 bp, Homo sapien
caatttcgctaaccctacgaagtct

SEQ ID NO: 1082037 - DNA, 25 bp, Homo sapien
aagagaaacgcgcaataccaagaaa

SEQ ID NO: 1082038 - DNA, 25 bp, Homo sapien
aaacgcgcaataccaagaaacctca

SEQ ID NO: 1082039 - DNA, 25 bp, Homo sapien
tcttaacgccgcgtaaaccgccgca

SEQ ID NO: 1082040 - DNA, 25 bp, Homo sapien
tgcgttggatcttgatagcgagacc

SEQ ID NO: 1082041 - DNA, 25 bp, Homo sapien
ttgatagcgagaccgggaaacaggc

SEQ ID NO: 1082042 - DNA, 25 bp, Homo sapien
cattactgcgttggatcttgatagc

SEQ ID NO: 1082043 - DNA, 25 bp, Homo sapien
aaacaggcgggcctgaagcgacgag

SEQ ID NO: 1082044 - DNA, 25 bp, Homo sapien
tcacgagtccccttgacctagggac

SEQ ID NO: 1082045 - DNA, 25 bp, Homo sapien
caacatagcattgaggatctggccc

SEQ ID NO: 1082046 - DNA, 25 bp, Homo sapien
tatgtttgagcacaggattccccac

SEQ ID NO: 1082047 - DNA, 25 bp, Homo sapien
tctaccagccttggagaaggtccgc

SEQ ID NO: 1082048 - DNA, 25 bp, Homo sapien
taatgacacgggtatcagacctgcc

SEQ ID NO: 1082049 - DNA, 25 bp, Homo sapien
acagtccttacattggcactgtgaa

SEQ ID NO: 1082050 - DNA, 25 bp, Homo sapien
agtccttacattggcactgtgaatt

SEQ ID NO: 1082051 - DNA, 25 bp, Homo sapien
tccttacattggcactgtgaattaa

SEQ ID NO: 1082052 - DNA, 25 bp, Homo sapien
cttacattggcactgtgaattaaac

SEQ ID NO: 1082053 - DNA, 25 bp, Homo sapien
taggctctcacagattccacttctg

SEQ ID NO: 1082054 - DNA, 25 bp, Homo sapien
aatgtggtagaggaattctcataga

SEQ ID NO: 1082055 - DNA, 25 bp, Homo sapien
gcacagatcctttatgtaggaagac

SEQ ID NO: 1082056 - DNA, 25 bp, Homo sapien
gcacagcatcagaaactaggctctc

SEQ ID NO: 1082057 - DNA, 25 bp, Homo sapien
tgacagctgctacctaaccctaaga

SEQ ID NO: 1082058 - DNA, 25 bp, Homo sapien
tcgggtactccacagcagatctagg

SEQ ID NO: 1082059 - DNA, 25 bp, Homo sapien
aagcacctcttgatggctgacacgg

SEQ ID NO: 1082060 - DNA, 25 bp, Homo sapien
aagccaatggtagacgtcagtgatg

SEQ ID NO: 1082061 - DNA, 25 bp, Homo sapien
ccttcggatgtaagggaagaagctg

SEQ ID NO: 1082062 - DNA, 25 bp, Homo sapien
cagattgtccttcggatgtaaggga

SEQ ID NO: 1082063 - DNA, 25 bp, Homo sapien
tctgggtttattgcagccacatcat

SEQ ID NO: 1082064 - DNA, 25 bp, Homo sapien
gcaagggcagattgtccttcggatg

SEQ ID NO: 1082065 - DNA, 25 bp, Homo sapien
attttggagttgacggatctccgtt

SEQ ID NO: 1082066 - DNA, 25 bp, Homo sapien
ggaattttggagttgacggatctcc

SEQ ID NO: 1082067 - DNA, 25 bp, Homo sapien
tggagttgacggatctccgtttttg

SEQ ID NO: 1082068 - DNA, 25 bp, Homo sapien
gaattttggagttgacggatctccg

SEQ ID NO: 1082069 - DNA, 25 bp, Homo sapien
tcctagaccacgaggcaatgctgtt

SEQ ID NO: 1082070 - DNA, 25 bp, Homo sapien
tggagagctgtgcaggtcaccagcc

SEQ ID NO: 1082071 - DNA, 25 bp, Homo sapien
tcatttcagggcaatgatgacccct

SEQ ID NO: 1082072 - DNA, 25 bp, Homo sapien
gatgacccctagacctggagagctg

SEQ ID NO: 1082073 - DNA, 25 bp, Homo sapien
accgtgcccagcccatcttttttga

SEQ ID NO: 1082074 - DNA, 25 bp, Homo sapien
tggagaaccgagagcagtagccagt

SEQ ID NO: 1082075 - DNA, 25 bp, Homo sapien
tgctgcacgatctcgagggtggtca

SEQ ID NO: 1082076 - DNA, 25 bp, Homo sapien
aacctccaagtttctgtacaaggtg

SEQ ID NO: 1082077 - DNA, 25 bp, Homo sapien
tttctgtacaaggtgaaataggtcc

SEQ ID NO: 1082078 - DNA, 25 bp, Homo sapien
gaggaactgaaaactgcttgcggga

SEQ ID NO: 1082079 - DNA, 25 bp, Homo sapien
ctcctgagccgtgatgcgaagctct

SEQ ID NO: 1082080 - DNA, 25 bp, Homo sapien
ctctgagacagtggacatgcgagtg

SEQ ID NO: 1082081 - DNA, 25 bp, Homo sapien
ctgcttgcgggagtttgcagctgca

SEQ ID NO: 1082082 - DNA, 25 bp, Homo sapien
gggcaggaaggcctagtgggggcag

SEQ ID NO: 1082083 - DNA, 25 bp, Homo sapien
cagggcaggaaggcctagtgggggc

SEQ ID NO: 1082084 - DNA, 25 bp, Homo sapien
tgcagggcaggaaggcctagtgggg

SEQ ID NO: 1082085 - DNA, 25 bp, Homo sapien
ctgcagggcaggaaggcctagtggg

SEQ ID NO: 1082086 - DNA, 25 bp, Homo sapien
tcctcgctgaccatcctcaatggta

SEQ ID NO: 1082087 - DNA, 25 bp, Homo sapien
gaccatcctcaatggtatttcagcc

SEQ ID NO: 1082088 - DNA, 25 bp, Homo sapien
gcctcggatggaatggacttgctct

SEQ ID NO: 1082089 - DNA, 25 bp, Homo sapien
cggatggaatggacttgctcttcca

SEQ ID NO: 1082090 - DNA, 25 bp, Homo sapien
ttcattctcatttcagagttctggg

SEQ ID NO: 1082091 - DNA, 25 bp, Homo sapien
attctcatttcagagttctgggcct

SEQ ID NO: 1082092 - DNA, 25 bp, Homo sapien
cattctcatttcagagttctgggcc

SEQ ID NO: 1082093 - DNA, 25 bp, Homo sapien
tctttaatcattcgggcaaattccc

SEQ ID NO: 1082094 - DNA, 25 bp, Homo sapien
ggatcagtcatagtaagtggatgac

SEQ ID NO: 1082095 - DNA, 25 bp, Homo sapien
tgacattccaaagtagcccgaaatt

SEQ ID NO: 1082096 - DNA, 25 bp, Homo sapien
cccagtttggaaaactactgtcata

SEQ ID NO: 1082097 - DNA, 25 bp, Homo sapien
aaagcgagcttgtccagaactccca

SEQ ID NO: 1082098 - DNA, 25 bp, Homo sapien
aagatctaacactaggacccctgca

SEQ ID NO: 1082099 - DNA, 25 bp, Homo sapien
gaatctagccaacctatggtatggg

SEQ ID NO: 1082100 - DNA, 25 bp, Homo sapien
gaacccagtttataaagatcagacc

SEQ ID NO: 1082101 - DNA, 25 bp, Homo sapien
tattcagtgggcgtttcctaacaca

SEQ ID NO: 1082102 - DNA, 25 bp, Homo sapien
cttgcttattcagtgggcgtttcct

SEQ ID NO: 1082103 - DNA, 25 bp, Homo sapien
gggcgtttcctaacacagacacata

SEQ ID NO: 1082104 - DNA, 25 bp, Homo sapien
cagacacatattctgtgctcttcga

SEQ ID NO: 1082105 - DNA, 25 bp, Homo sapien
aaggagagtatttcagggggtgctc

SEQ ID NO: 1082106 - DNA, 25 bp, Homo sapien
gaaggagagtatttcagggggtgct

SEQ ID NO: 1082107 - DNA, 25 bp, Homo sapien
aaagcagaatgcttggttctccaga

SEQ ID NO: 1082108 - DNA, 25 bp, Homo sapien
cgaagctgtttcatcaaatgcaaag

SEQ ID NO: 1082109 - DNA, 25 bp, Homo sapien
tccagatactttgttaagtccactt

SEQ ID NO: 1082110 - DNA, 25 bp, Homo sapien
gtccactttcaacttgggttcatgt

SEQ ID NO: 1082111 - DNA, 25 bp, Homo sapien
caccttcaaagattgtctgtaccag

SEQ ID NO: 1082112 - DNA, 25 bp, Homo sapien
caaagattgtctgtaccagtggcct

SEQ ID NO: 1082113 - DNA, 25 bp, Homo sapien
ttcaaagattgtctgtaccagtggc

SEQ ID NO: 1082114 - DNA, 25 bp, Homo sapien
tccaccttcaaagattgtctgtacc

SEQ ID NO: 1082115 - DNA, 25 bp, Homo sapien
cctttggatgcattctgggctttcc

SEQ ID NO: 1082116 - DNA, 25 bp, Homo sapien
aggccatggcatagatccctttgga

SEQ ID NO: 1082117 - DNA, 25 bp, Homo sapien
catggcatagatccctttggatgca

SEQ ID NO: 1082118 - DNA, 25 bp, Homo sapien
tagatccctttggatgcattctggg

SEQ ID NO: 1082119 - DNA, 25 bp, Homo sapien
ctgagggagagaactttgctaagca

SEQ ID NO: 1082120 - DNA, 25 bp, Homo sapien
gggagagaactttgctaagcaaaca

SEQ ID NO: 1082121 - DNA, 25 bp, Homo sapien
gagggagagaactttgctaagcaaa

SEQ ID NO: 1082122 - DNA, 25 bp, Homo sapien
gagaactttgctaagcaaacaacct

SEQ ID NO: 1082123 - DNA, 25 bp, Homo sapien
tcccattgtagatctcgaagaatgt

SEQ ID NO: 1082124 - DNA, 25 bp, Homo sapien
gtcacatagacttccaggcccaact

SEQ ID NO: 1082125 - DNA, 25 bp, Homo sapien
ccggtagcagggttgattcttcagg

SEQ ID NO: 1082126 - DNA, 25 bp, Homo sapien
gattcttcaggaggaagacgtcccg

SEQ ID NO: 1082127 - DNA, 25 bp, Homo sapien
ggtggtgcgggcagggaaagaatga

SEQ ID NO: 1082128 - DNA, 25 bp, Homo sapien
tgaacgtgcacaatcggggaagaag

SEQ ID NO: 1082129 - DNA, 25 bp, Homo sapien
gactgaacgtgcacaatcggggaag

SEQ ID NO: 1082130 - DNA, 25 bp, Homo sapien
agggatgaaggaggtcggccgaggg

SEQ ID NO: 1082131 - DNA, 25 bp, Homo sapien
gatgtcagcctagcagaggtcaata

SEQ ID NO: 1082132 - DNA, 25 bp, Homo sapien
gaatacgaactgatggatgtcagcc

SEQ ID NO: 1082133 - DNA, 25 bp, Homo sapien
caatatacttgggatctgagccgaa

SEQ ID NO: 1082134 - DNA, 25 bp, Homo sapien
gcctgggcaagttaataaccactct

SEQ ID NO: 1082135 - DNA, 25 bp, Homo sapien
gacatcatcagcagagttaaccaga

SEQ ID NO: 1082136 - DNA, 25 bp, Homo sapien
gctgcccatgtcgatcatcttgatg

SEQ ID NO: 1082137 - DNA, 25 bp, Homo sapien
gagttaaccagatgctcctgcagcc

SEQ ID NO: 1082138 - DNA, 25 bp, Homo sapien
acttgcacctgttgcttgccgtcct

SEQ ID NO: 1082139 - DNA, 25 bp, Homo sapien
gtcttattgagaccccgtaaagcag

SEQ ID NO: 1082140 - DNA, 25 bp, Homo sapien
gcagcccttaccaaactgggcaaag

SEQ ID NO: 1082141 - DNA, 25 bp, Homo sapien
tgtgctcagagctagactttactca

SEQ ID NO: 1082142 - DNA, 25 bp, Homo sapien
gcctgacctgacttggttctgataa

SEQ ID NO: 1082143 - DNA, 25 bp, Homo sapien
tctgccggtcagcactggaagtgtc

SEQ ID NO: 1082144 - DNA, 25 bp, Homo sapien
ataatttggaagcacgcgtgggagc

SEQ ID NO: 1082145 - DNA, 25 bp, Homo sapien
attccctgccagatctaccaaagag

SEQ ID NO: 1082146 - DNA, 25 bp, Homo sapien
gagactcttgttgatttctgcgccc

SEQ ID NO: 1082147 - DNA, 25 bp, Homo sapien
catgcaagtcctagagttctcccca

SEQ ID NO: 1082148 - DNA, 25 bp, Homo sapien
tgtgtcagcttgctctcacggaacg

SEQ ID NO: 1082149 - DNA, 25 bp, Homo sapien
tgaaggagtccctcagcacctgtgt

SEQ ID NO: 1082150 - DNA, 25 bp, Homo sapien
ggtgtgagccttgttctgtcccagg

SEQ ID NO: 1082151 - DNA, 25 bp, Homo sapien
caaggagtctcgtgcattaaagcag

SEQ ID NO: 1082152 - DNA, 25 bp, Homo sapien
aatagatcctttcctccacgcttgg

SEQ ID NO: 1082153 - DNA, 25 bp, Homo sapien
ggaatgacctctcccaaaccaagag

SEQ ID NO: 1082154 - DNA, 25 bp, Homo sapien
tgtctctgtggaaagcaactctgtc

SEQ ID NO: 1082155 - DNA, 25 bp, Homo sapien
cttatgcctggtgagatcgtggcaa

SEQ ID NO: 1082156 - DNA, 25 bp, Homo sapien
cacaggagcttatgcctggtgagat

SEQ ID NO: 1082157 - DNA, 25 bp, Homo sapien
taaagtatattcacaggagcttatg

SEQ ID NO: 1082158 - DNA, 25 bp, Homo sapien
ctgtctgcatatctcagggtgttta

SEQ ID NO: 1082159 - DNA, 25 bp, Homo sapien
ggactggaaaagcccctcacccagc

SEQ ID NO: 1082160 - DNA, 25 bp, Homo sapien
tggactggaaaagcccctcacccag

SEQ ID NO: 1082161 - DNA, 25 bp, Homo sapien
aggaatgtggcaccgcccaggcttc

SEQ ID NO: 1082162 - DNA, 25 bp, Homo sapien
caaggggatggaatggcaaccttgc

SEQ ID NO: 1082163 - DNA, 25 bp, Homo sapien
gaggaatgtggcaccgcccaggctt

SEQ ID NO: 1082164 - DNA, 25 bp, Homo sapien
caggcttcgaggcttgaggctccaa

SEQ ID NO: 1082165 - DNA, 25 bp, Homo sapien
agatcccacagcacccccttggtac

SEQ ID NO: 1082166 - DNA, 25 bp, Homo sapien
aggaaacaaggaggtctcagatccc

SEQ ID NO: 1082167 - DNA, 25 bp, Homo sapien
aaacaaggaggtctcagatcccaca

SEQ ID NO: 1082168 - DNA, 25 bp, Homo sapien
gatcccacagcacccccttggtact

SEQ ID NO: 1082169 - DNA, 25 bp, Homo sapien
gcgccccgttagagcaggcttccat

SEQ ID NO: 1082170 - DNA, 25 bp, Homo sapien
ctggaatcagcgccccgttagagca

SEQ ID NO: 1082171 - DNA, 25 bp, Homo sapien
cgttagagcaggcttccatctcttc

SEQ ID NO: 1082172 - DNA, 25 bp, Homo sapien
aatcagcgccccgttagagcaggct

SEQ ID NO: 1082173 - DNA, 25 bp, Homo sapien
ggcttcgttaaagctggacatctgg

SEQ ID NO: 1082174 - DNA, 25 bp, Homo sapien
tgagtcatggcttcgttaaagctgg

SEQ ID NO: 1082175 - DNA, 25 bp, Homo sapien
catggcttcgttaaagctggacatc

SEQ ID NO: 1082176 - DNA, 25 bp, Homo sapien
tctgagtcatggcttcgttaaagct

SEQ ID NO: 1082177 - DNA, 25 bp, Homo sapien
tcacttgctcttccacagtagggat

SEQ ID NO: 1082178 - DNA, 25 bp, Homo sapien
ccaccattgggacgtaaattcctgc

SEQ ID NO: 1082179 - DNA, 25 bp, Homo sapien
ttttttggcccttggattcagcaca

SEQ ID NO: 1082180 - DNA, 25 bp, Homo sapien
cactgggtactgtgctgacacttta

SEQ ID NO: 1082181 - DNA, 25 bp, Homo sapien
tcttgaaccctttccaacaatctcc

SEQ ID NO: 1082182 - DNA, 25 bp, Homo sapien
ttcttgaaccctttccaacaatctc

SEQ ID NO: 1082183 - DNA, 25 bp, Homo sapien
ctccacatggtggccatatgatata

SEQ ID NO: 1082184 - DNA, 25 bp, Homo sapien
caattctgctccctaaatggttttt

SEQ ID NO: 1082185 - DNA, 25 bp, Homo sapien
gcccagcccgagtgactttattctt

SEQ ID NO: 1082186 - DNA, 25 bp, Homo sapien
ctttattctttcaccgtacttgtca

SEQ ID NO: 1082187 - DNA, 25 bp, Homo sapien
ttcaccgtacttgtcaccaaatcct

SEQ ID NO: 1082188 - DNA, 25 bp, Homo sapien
gagagctcaagccagtctggtcctt

SEQ ID NO: 1082189 - DNA, 25 bp, Homo sapien
catagtctggctgctcggtcatctc

SEQ ID NO: 1082190 - DNA, 25 bp, Homo sapien
aaggtctccaggtcatagtctggct

SEQ ID NO: 1082191 - DNA, 25 bp, Homo sapien
gctgggccagagcagattccgcttt

SEQ ID NO: 1082192 - DNA, 25 bp, Homo sapien
atggccaggcgcaaggccttgatga

SEQ ID NO: 1082193 - DNA, 25 bp, Homo sapien
catggccaggcgcaaggccttgatg

SEQ ID NO: 1082194 - DNA, 25 bp, Homo sapien
tggccaggcgcaaggccttgatgac

SEQ ID NO: 1082195 - DNA, 25 bp, Homo sapien
caaaccaaacagatttttatttgca

SEQ ID NO: 1082196 - DNA, 25 bp, Homo sapien
ccaaacagatttttatttgcagtcg

SEQ ID NO: 1082197 - DNA, 25 bp, Homo sapien
accaaacagatttttatttgcagtc

SEQ ID NO: 1082198 - DNA, 25 bp, Homo sapien
aaaccaaacagatttttatttgcag

SEQ ID NO: 1082199 - DNA, 25 bp, Homo sapien
tacttggcatttaccagaacctgtc

SEQ ID NO: 1082200 - DNA, 25 bp, Homo sapien
acttggcatttaccagaacctgtcc

SEQ ID NO: 1082201 - DNA, 25 bp, Homo sapien
cttggcatttaccagaacctgtccc

SEQ ID NO: 1082202 - DNA, 25 bp, Homo sapien
catacttggcatttaccagaacctg

SEQ ID NO: 1082203 - DNA, 25 bp, Homo sapien
gcagatagctgtactaaaggctccg

SEQ ID NO: 1082204 - DNA, 25 bp, Homo sapien
cagggagctctccattagcagccag

SEQ ID NO: 1082205 - DNA, 25 bp, Homo sapien
aagacattcagtgctcggcccaaag

SEQ ID NO: 1082206 - DNA, 25 bp, Homo sapien
tctcgtgagggcgacaactgaggaa

SEQ ID NO: 1082207 - DNA, 25 bp, Homo sapien
cagtagggatcctctaggatctcta

SEQ ID NO: 1082208 - DNA, 25 bp, Homo sapien
gaaaacagtagggatcctctaggat

SEQ ID NO: 1082209 - DNA, 25 bp, Homo sapien
gatcctctaggatctctagggagac

SEQ ID NO: 1082210 - DNA, 25 bp, Homo sapien
tagggatcctctaggatctctaggg

SEQ ID NO: 1082211 - DNA, 25 bp, Homo sapien
gaaacttccctagcaacaaactata

SEQ ID NO: 1082212 - DNA, 25 bp, Homo sapien
aaatgatccctaaagtatagtgttt

SEQ ID NO: 1082213 - DNA, 25 bp, Homo sapien
cttccctagcaacaaactatagaaa

SEQ ID NO: 1082214 - DNA, 25 bp, Homo sapien
tgtgcagtgctgtacatgttcagag

SEQ ID NO: 1082215 - DNA, 25 bp, Homo sapien
cgcgcctagggccacgagcctagga

SEQ ID NO: 1082216 - DNA, 25 bp, Homo sapien
tgtttagactagtttcagaggctgc

SEQ ID NO: 1082217 - DNA, 25 bp, Homo sapien
tgcggcgtcggcagatctgggcgtg

SEQ ID NO: 1082218 - DNA, 25 bp, Homo sapien
ctgctgcggtcgtttaggatgagat

SEQ ID NO: 1082219 - DNA, 25 bp, Homo sapien
ctttactttacgttgtttctgagcg

SEQ ID NO: 1082220 - DNA, 25 bp, Homo sapien
gccgaaacaacgtcgggcgacgaga

SEQ ID NO: 1082221 - DNA, 25 bp, Homo sapien
tttctgagcgccgaaacaacgtcgg

SEQ ID NO: 1082222 - DNA, 25 bp, Homo sapien
gcaaagattcacggttcggtttgta

SEQ ID NO: 1082223 - DNA, 25 bp, Homo sapien
gctcggcgctggctggaaagagaaa

SEQ ID NO: 1082224 - DNA, 25 bp, Homo sapien
ctcggcgctggctggaaagagaaac

SEQ ID NO: 1082225 - DNA, 25 bp, Homo sapien
cgctcggcgctggctggaaagagaa

SEQ ID NO: 1082226 - DNA, 25 bp, Homo sapien
tcggcgctggctggaaagagaaacc

SEQ ID NO: 1082227 - DNA, 25 bp, Homo sapien
ggactcctcagtaggctgtgaagca

SEQ ID NO: 1082228 - DNA, 25 bp, Homo sapien
cttcacccgcctcaatgcagagcga

SEQ ID NO: 1082229 - DNA, 25 bp, Homo sapien
tcgcggcagccatgttggcgccgct

SEQ ID NO: 1082230 - DNA, 25 bp, Homo sapien
gggcctgattgagctcaacctccct

SEQ ID NO: 1082231 - DNA, 25 bp, Homo sapien
gagtatgcagcattaccgagttgtc

SEQ ID NO: 1082232 - DNA, 25 bp, Homo sapien
cattaccgagttgtcatcatacacg

SEQ ID NO: 1082233 - DNA, 25 bp, Homo sapien
ccaccgcgcactcgggagtatgcag

SEQ ID NO: 1082234 - DNA, 25 bp, Homo sapien
ccgcgcactcgggagtatgcagcat

SEQ ID NO: 1082235 - DNA, 25 bp, Homo sapien
tgtgactcggtgctagcgactcgcc

SEQ ID NO: 1082236 - DNA, 25 bp, Homo sapien
actgtgactcggtgctagcgactcg

SEQ ID NO: 1082237 - DNA, 25 bp, Homo sapien
tgactcggtgctagcgactcgccag

SEQ ID NO: 1082238 - DNA, 25 bp, Homo sapien
cactgtgactcggtgctagcgactc

SEQ ID NO: 1082239 - DNA, 25 bp, Homo sapien
ctcttgcccccggttttgcggcgct

SEQ ID NO: 1082240 - DNA, 25 bp, Homo sapien
gagcccaagaaagaacgcacaactg

SEQ ID NO: 1082241 - DNA, 25 bp, Homo sapien
aactgtcacacggaaagacccgagc

SEQ ID NO: 1082242 - DNA, 25 bp, Homo sapien
tactacagagaaatcagagcccaag

SEQ ID NO: 1082243 - DNA, 25 bp, Homo sapien
ttctgactatgacgcgaggcgccac

SEQ ID NO: 1082244 - DNA, 25 bp, Homo sapien
acacaggtgaccaagacggccacaa

SEQ ID NO: 1082245 - DNA, 25 bp, Homo sapien
ggcacacaggtgaccaagacggcca

SEQ ID NO: 1082246 - DNA, 25 bp, Homo sapien
cgcctaaggattctttttcatcacc

SEQ ID NO: 1082247 - DNA, 25 bp, Homo sapien
accacgcctaaggattctttttcat

SEQ ID NO: 1082248 - DNA, 25 bp, Homo sapien
tacaggaactaggttaccaaggaga

SEQ ID NO: 1082249 - DNA, 25 bp, Homo sapien
acaggaactaggttaccaaggagag

SEQ ID NO: 1082250 - DNA, 25 bp, Homo sapien
accaaggagagcaaggcaagtgagg

SEQ ID NO: 1082251 - DNA, 25 bp, Homo sapien
taccaaggagagcaaggcaagtgag

SEQ ID NO: 1082252 - DNA, 25 bp, Homo sapien
cccgcacacggactgtgtggatgcg

SEQ ID NO: 1082253 - DNA, 25 bp, Homo sapien
actgtgtggatgcggcgggggccaa

SEQ ID NO: 1082254 - DNA, 25 bp, Homo sapien
ctccccgcacacggactgtgtggat

SEQ ID NO: 1082255 - DNA, 25 bp, Homo sapien
ctgtgtggatgcggcgggggccaat

SEQ ID NO: 1082256 - DNA, 25 bp, Homo sapien
ctcagggcacggtatttcttgttac

SEQ ID NO: 1082257 - DNA, 25 bp, Homo sapien
tgagccccaggagaaattccccacg

SEQ ID NO: 1082258 - DNA, 25 bp, Homo sapien
ctgagccccaggagaaattccccac

SEQ ID NO: 1082259 - DNA, 25 bp, Homo sapien
tctgagccccaggagaaattcccca

SEQ ID NO: 1082260 - DNA, 25 bp, Homo sapien
ttcaaatgccttggtctaagccaca

SEQ ID NO: 1082261 - DNA, 25 bp, Homo sapien
tatgtttggcaacccgcagtcttta

SEQ ID NO: 1082262 - DNA, 25 bp, Homo sapien
gagaactccccagctaccttaagat

SEQ ID NO: 1082263 - DNA, 25 bp, Homo sapien
gcccacttggtgaatcttaagaccg

SEQ ID NO: 1082264 - DNA, 25 bp, Homo sapien
ctggaggacaaatggccctggcaca

SEQ ID NO: 1082265 - DNA, 25 bp, Homo sapien
ggaggacaaatggccctggcacact

SEQ ID NO: 1082266 - DNA, 25 bp, Homo sapien
aggacaaatggccctggcacactcc

SEQ ID NO: 1082267 - DNA, 25 bp, Homo sapien
tggaggacaaatggccctggcacac

SEQ ID NO: 1082268 - DNA, 25 bp, Homo sapien
tacggtgtgctgtcgatgagcacga

SEQ ID NO: 1082269 - DNA, 25 bp, Homo sapien
tcgatgatccttgttttacgagtac

SEQ ID NO: 1082270 - DNA, 25 bp, Homo sapien
tacgaaccagctcgttattagatgc

SEQ ID NO: 1082271 - DNA, 25 bp, Homo sapien
aacatcgatgatccttgttttacga

SEQ ID NO: 1082272 - DNA, 25 bp, Homo sapien
gggcagcgcatagtgggactcgtac

SEQ ID NO: 1082273 - DNA, 25 bp, Homo sapien
agcttggctcccttcttgcggccca

SEQ ID NO: 1082274 - DNA, 25 bp, Homo sapien
ccaggggcagcgcatagtgggactc

SEQ ID NO: 1082275 - DNA, 25 bp, Homo sapien
gcttggctcccttcttgcggcccag

SEQ ID NO: 1082276 - DNA, 25 bp, Homo sapien
ggctgccctccccacaacccctaca

SEQ ID NO: 1082277 - DNA, 25 bp, Homo sapien
gctggagtcaggctgccctccccac

SEQ ID NO: 1082278 - DNA, 25 bp, Homo sapien
ctgccctccccacaacccctacagg

SEQ ID NO: 1082279 - DNA, 25 bp, Homo sapien
tggagtcaggctgccctccccacaa

SEQ ID NO: 1082280 - DNA, 25 bp, Homo sapien
ctctctcccttcagtagcagaactg

SEQ ID NO: 1082281 - DNA, 25 bp, Homo sapien
tgggagctttctcgaaccctgcaca

SEQ ID NO: 1082282 - DNA, 25 bp, Homo sapien
gggagctttctcgaaccctgcacac

SEQ ID NO: 1082283 - DNA, 25 bp, Homo sapien
gagctttctcgaaccctgcacaccc

SEQ ID NO: 1082284 - DNA, 25 bp, Homo sapien
cctgggagctttctcgaaccctgca

SEQ ID NO: 1082285 - DNA, 25 bp, Homo sapien
tgctcctccaggagactgctgattt

SEQ ID NO: 1082286 - DNA, 25 bp, Homo sapien
ctcctccaggagactgctgattttg

SEQ ID NO: 1082287 - DNA, 25 bp, Homo sapien
aagcttgccctgctggaactgctcc

SEQ ID NO: 1082288 - DNA, 25 bp, Homo sapien
ctccaggagactgctgattttggca

SEQ ID NO: 1082289 - DNA, 25 bp, Homo sapien
cagcttcatacgaatagggtgacca

SEQ ID NO: 1082290 - DNA, 25 bp, Homo sapien
tgaaccctttagactgcatggctgg

SEQ ID NO: 1082291 - DNA, 25 bp, Homo sapien
aatacaaagactccaagcacgggcc

SEQ ID NO: 1082292 - DNA, 25 bp, Homo sapien
gacaagggaaaagtgcctcggcaca

SEQ ID NO: 1082293 - DNA, 25 bp, Homo sapien
tggacaaagttttcatcactgagac

SEQ ID NO: 1082294 - DNA, 25 bp, Homo sapien
ctggacaaagttttcatcactgaga

SEQ ID NO: 1082295 - DNA, 25 bp, Homo sapien
tatcttcacttactgtcagtagcag

SEQ ID NO: 1082296 - DNA, 25 bp, Homo sapien
ttatcttcacttactgtcagtagca

SEQ ID NO: 1082297 - DNA, 25 bp, Homo sapien
atcttcacttactgtcagtagcaga

SEQ ID NO: 1082298 - DNA, 25 bp, Homo sapien
tcttcacttactgtcagtagcagaa

SEQ ID NO: 1082299 - DNA, 25 bp, Homo sapien
gcttaagaatctctgtgggttcagg

SEQ ID NO: 1082300 - DNA, 25 bp, Homo sapien
tagcacaacgacaaggtggccctac

SEQ ID NO: 1082301 - DNA, 25 bp, Homo sapien
tgcaagagagtaggtgatccttagc

SEQ ID NO: 1082302 - DNA, 25 bp, Homo sapien
cctgggggcaagcatgaagccagct

SEQ ID NO: 1082303 - DNA, 25 bp, Homo sapien
atagccatctgctcggccacactgt

SEQ ID NO: 1082304 - DNA, 25 bp, Homo sapien
gatagaactccaactctttgccctc

SEQ ID NO: 1082305 - DNA, 25 bp, Homo sapien
tgtcccggccttgaagcgatgcacg

SEQ ID NO: 1082306 - DNA, 25 bp, Homo sapien
cacactgtcccggccttgaagcgat

SEQ ID NO: 1082307 - DNA, 25 bp, Homo sapien
gactttacagtgtggtgagcctggc

SEQ ID NO: 1082308 - DNA, 25 bp, Homo sapien
gaaaacagtcatatattcaggcaac

SEQ ID NO: 1082309 - DNA, 25 bp, Homo sapien
cacataataaatctggccttcaggg

SEQ ID NO: 1082310 - DNA, 25 bp, Homo sapien
cacccacccagatcagttttgcagg

SEQ ID NO: 1082311 - DNA, 25 bp, Homo sapien
aatggtgcgcatgaatgccctggca

SEQ ID NO: 1082312 - DNA, 25 bp, Homo sapien
tcacaatggtgcgcatgaatgccct

SEQ ID NO: 1082313 - DNA, 25 bp, Homo sapien
acaatggtgcgcatgaatgccctgg

SEQ ID NO: 1082314 - DNA, 25 bp, Homo sapien
caatggtgcgcatgaatgccctggc

SEQ ID NO: 1082315 - DNA, 25 bp, Homo sapien
tccccggccatcagcctccggaact

SEQ ID NO: 1082316 - DNA, 25 bp, Homo sapien
gttgctcggccgcttcctgggcgta

SEQ ID NO: 1082317 - DNA, 25 bp, Homo sapien
gaacttcggccgcgtgcgaggcacc

SEQ ID NO: 1082318 - DNA, 25 bp, Homo sapien
ttgctcggccgcttcctgggcgtag

SEQ ID NO: 1082319 - DNA, 25 bp, Homo sapien
tggcgtccgtgctggtgctgcgctc

SEQ ID NO: 1082320 - DNA, 25 bp, Homo sapien
tcagcacccgcgtgcttaagcgctt

SEQ ID NO: 1082321 - DNA, 25 bp, Homo sapien
gctcggtcagcacccgcgtgcttaa

SEQ ID NO: 1082322 - DNA, 25 bp, Homo sapien
tggtgctgcgctcggtcagcacccg

SEQ ID NO: 1082323 - DNA, 25 bp, Homo sapien
cccttcctagcagcgagtcgaggag

SEQ ID NO: 1082324 - DNA, 25 bp, Homo sapien
tgcctggatttgctacgctgcgctg

SEQ ID NO: 1082325 - DNA, 25 bp, Homo sapien
ggcgtctccccagcaactagataga

SEQ ID NO: 1082326 - DNA, 25 bp, Homo sapien
gggagcccagcgttttatcaatgaa

SEQ ID NO: 1082327 - DNA, 25 bp, Homo sapien
gtccgcgcaaggcactcggaggcgg

SEQ ID NO: 1082328 - DNA, 25 bp, Homo sapien
caggtccgcgcaaggcactcggagg

SEQ ID NO: 1082329 - DNA, 25 bp, Homo sapien
cacgctggaaggggcgcggagacag

SEQ ID NO: 1082330 - DNA, 25 bp, Homo sapien
acaggaaaccggcggcaggctccat

SEQ ID NO: 1082331 - DNA, 25 bp, Homo sapien
gtctgacgtcggtagcccggccagc

SEQ ID NO: 1082332 - DNA, 25 bp, Homo sapien
tttgaggtaggtgcggccgctgcgc

SEQ ID NO: 1082333 - DNA, 25 bp, Homo sapien
cgctgcgcgggtccgtgatgaggcg

SEQ ID NO: 1082334 - DNA, 25 bp, Homo sapien
cttgcccaacaagcggcctttgagg

SEQ ID NO: 1082335 - DNA, 25 bp, Homo sapien
tttgacagcgtaggcgctgccagtc

SEQ ID NO: 1082336 - DNA, 25 bp, Homo sapien
tctgtgtcagtggcctcgtagcagc

SEQ ID NO: 1082337 - DNA, 25 bp, Homo sapien
cgacgcggctctgcgggatgacttt

SEQ ID NO: 1082338 - DNA, 25 bp, Homo sapien
ttctcgcgctgatgcggcttggcga

SEQ ID NO: 1082339 - DNA, 25 bp, Homo sapien
aaacgcacgatgtggcggtgctgca

SEQ ID NO: 1082340 - DNA, 25 bp, Homo sapien
tgtcagcgtcctcaaagtggtgcga

SEQ ID NO: 1082341 - DNA, 25 bp, Homo sapien
tcctcaaagtggtgcgaaaaacgca

SEQ ID NO: 1082342 - DNA, 25 bp, Homo sapien
aaatgtagatgttgtcagcgtcctc

SEQ ID NO: 1082343 - DNA, 25 bp, Homo sapien
ttgaggccagaaaggatctgccgca

SEQ ID NO: 1082344 - DNA, 25 bp, Homo sapien
gatgccgcgctggtgcaagtacttg

SEQ ID NO: 1082345 - DNA, 25 bp, Homo sapien
aggtcccggtgcaagatgccgcgct

SEQ ID NO: 1082346 - DNA, 25 bp, Homo sapien
tgccgcaggtagtagcgcacttctg

SEQ ID NO: 1082347 - DNA, 25 bp, Homo sapien
gggctgccagcccaaaatcccccac

SEQ ID NO: 1082348 - DNA, 25 bp, Homo sapien
gctccggaggctccaaccgggctgc

SEQ ID NO: 1082349 - DNA, 25 bp, Homo sapien
ccggaggctccaaccgggctgccag

SEQ ID NO: 1082350 - DNA, 25 bp, Homo sapien
gttccatgttctcagtgatgaaaaa

SEQ ID NO: 1082351 - DNA, 25 bp, Homo sapien
cagcccagtgaccatacatccgcct

SEQ ID NO: 1082352 - DNA, 25 bp, Homo sapien
agcccagtgaccatacatccgcctc

SEQ ID NO: 1082353 - DNA, 25 bp, Homo sapien
ttcaggtcagccgtctcaaagggag

SEQ ID NO: 1082354 - DNA, 25 bp, Homo sapien
tgatgcagcggtacgtctccttcag

SEQ ID NO: 1082355 - DNA, 25 bp, Homo sapien
ctggcaggcagcgtgtagtgaacct

SEQ ID NO: 1082356 - DNA, 25 bp, Homo sapien
taaagaagtcatggcgcaggatctg

SEQ ID NO: 1082357 - DNA, 25 bp, Homo sapien
tgggaatacacagatggacttagag

SEQ ID NO: 1082358 - DNA, 25 bp, Homo sapien
gacttagaggtctggggagccacag

SEQ ID NO: 1082359 - DNA, 25 bp, Homo sapien
cctttcaatccctgggaatacacag

SEQ ID NO: 1082360 - DNA, 25 bp, Homo sapien
tcaatccctgggaatacacagatgg

SEQ ID NO: 1082361 - DNA, 25 bp, Homo sapien
aggtctgggactgtcacgcagctgc

SEQ ID NO: 1082362 - DNA, 25 bp, Homo sapien
cagctgctgatagggagtcgatcgg

SEQ ID NO: 1082363 - DNA, 25 bp, Homo sapien
tttggcaaacagactcctagctggg

SEQ ID NO: 1082364 - DNA, 25 bp, Homo sapien
gggactgtcacgcagctgctgatag

SEQ ID NO: 1082365 - DNA, 25 bp, Homo sapien
atgtgcgcatgaggccgctcaccaa

SEQ ID NO: 1082366 - DNA, 25 bp, Homo sapien
cctggcatcctgatggccaacggat

SEQ ID NO: 1082367 - DNA, 25 bp, Homo sapien
tcaccaaaccggagacctcatccct

SEQ ID NO: 1082368 - DNA, 25 bp, Homo sapien
tgatggccaacggatgtgcgcatga

SEQ ID NO: 1082369 - DNA, 25 bp, Homo sapien
gggaacagtgtccacctgagcgcct

SEQ ID NO: 1082370 - DNA, 25 bp, Homo sapien
caattaggccaccacgaggctggat

SEQ ID NO: 1082371 - DNA, 25 bp, Homo sapien
ctggtgacacacagccaattaggcc

SEQ ID NO: 1082372 - DNA, 25 bp, Homo sapien
aaacccttgagtccatggcctggcc

SEQ ID NO: 1082373 - DNA, 25 bp, Homo sapien
atctccactgcttgccagtgtccca

SEQ ID NO: 1082374 - DNA, 25 bp, Homo sapien
gtcttcaggtgctgtctctaccagg

SEQ ID NO: 1082375 - DNA, 25 bp, Homo sapien
tcccacggggtgagctgtcttcagg

SEQ ID NO: 1082376 - DNA, 25 bp, Homo sapien
tgctgtctctaccaggctgacaggg

SEQ ID NO: 1082377 - DNA, 25 bp, Homo sapien
gctatacaatttctcagagcacaaa

SEQ ID NO: 1082378 - DNA, 25 bp, Homo sapien
gagcacaaagggctgactccactac

SEQ ID NO: 1082379 - DNA, 25 bp, Homo sapien
tgactccactactgtggccacagtc

SEQ ID NO: 1082380 - DNA, 25 bp, Homo sapien
gggcatgaaggctatacaatttctc

SEQ ID NO: 1082381 - DNA, 25 bp, Homo sapien
ccgacagggccatatgtgtgccatc

SEQ ID NO: 1082382 - DNA, 25 bp, Homo sapien
gccatcgttgaagagcacagccaca

SEQ ID NO: 1082383 - DNA, 25 bp, Homo sapien
caaagccgaacttattggagtagtc

SEQ ID NO: 1082384 - DNA, 25 bp, Homo sapien
gccacacggcggctggacagttgat

SEQ ID NO: 1082385 - DNA, 25 bp, Homo sapien
tacaaggcaccccataacagcactt

SEQ ID NO: 1082386 - DNA, 25 bp, Homo sapien
tggcctgaatacaaggcaccccata

SEQ ID NO: 1082387 - DNA, 25 bp, Homo sapien
gcactcacgagggtgcggccctgct

SEQ ID NO: 1082388 - DNA, 25 bp, Homo sapien
gccctgctggattagtggcctgaat

SEQ ID NO: 1082389 - DNA, 25 bp, Homo sapien
ggcgaagtaccgcaggatacccagc

SEQ ID NO: 1082390 - DNA, 25 bp, Homo sapien
gctccatgtaggaggcgaagtaccg

SEQ ID NO: 1082391 - DNA, 25 bp, Homo sapien
ggcacagcacccacggagaaggaga

SEQ ID NO: 1082392 - DNA, 25 bp, Homo sapien
aagtgctttgtgctggtgggattgt

SEQ ID NO: 1082393 - DNA, 25 bp, Homo sapien
gccttatcctctagctttcagcaac

SEQ ID NO: 1082394 - DNA, 25 bp, Homo sapien
tccccattagtgtatgccttatcct

SEQ ID NO: 1082395 - DNA, 25 bp, Homo sapien
caggatgggttaggtttcaatgtac

SEQ ID NO: 1082396 - DNA, 25 bp, Homo sapien
gtcactgatccagcgtgagacagcc

SEQ ID NO: 1082397 - DNA, 25 bp, Homo sapien
actaaacagcatgaggagagcctga

SEQ ID NO: 1082398 - DNA, 25 bp, Homo sapien
aagggcggagcaggtacctctacct

SEQ ID NO: 1082399 - DNA, 25 bp, Homo sapien
tggacagtgccatcactaaacagca

SEQ ID NO: 1082400 - DNA, 25 bp, Homo sapien
agcctgatccgtcttgacccactgc

SEQ ID NO: 1082401 - DNA, 25 bp, Homo sapien
gaccttcccgcaactcctggatagg

SEQ ID NO: 1082402 - DNA, 25 bp, Homo sapien
gcacacagagcatgacagtggtcag

SEQ ID NO: 1082403 - DNA, 25 bp, Homo sapien
tggtcaggacctaggctccgggccc

SEQ ID NO: 1082404 - DNA, 25 bp, Homo sapien
ccgcaactcctggataggctcttac

SEQ ID NO: 1082405 - DNA, 25 bp, Homo sapien
agagcatagcggagtcgctgccgca

SEQ ID NO: 1082406 - DNA, 25 bp, Homo sapien
tcccagccactgagaatcagcttgg

SEQ ID NO: 1082407 - DNA, 25 bp, Homo sapien
gatttcgggccacaaaagtcacaag

SEQ ID NO: 1082408 - DNA, 25 bp, Homo sapien
tgggaagcgaggtaagtacaagcac

SEQ ID NO: 1082409 - DNA, 25 bp, Homo sapien
gtaggagccagcgaagacaagccgc

SEQ ID NO: 1082410 - DNA, 25 bp, Homo sapien
agtaaagctggtccctgattccctg

SEQ ID NO: 1082411 - DNA, 25 bp, Homo sapien
tgtttattatcctaggaggaggccc

SEQ ID NO: 1082412 - DNA, 25 bp, Homo sapien
gagctaaggctcaggcttatcttgg

SEQ ID NO: 1082413 - DNA, 25 bp, Homo sapien
gctcctgaaggcatcagaggccaga

SEQ ID NO: 1082414 - DNA, 25 bp, Homo sapien
gagaagctgaagtttaggagtggag

SEQ ID NO: 1082415 - DNA, 25 bp, Homo sapien
ggttagcaaggcctgagagggagaa

SEQ ID NO: 1082416 - DNA, 25 bp, Homo sapien
ctgaagtttaggagtggagcaggag

SEQ ID NO: 1082417 - DNA, 25 bp, Homo sapien
gttcagctttcccatgcacgaccag

SEQ ID NO: 1082418 - DNA, 25 bp, Homo sapien
gaaaaaggttcagctttcccatgca

SEQ ID NO: 1082419 - DNA, 25 bp, Homo sapien
ctgtatcgcgggttgttgacaaggc

SEQ ID NO: 1082420 - DNA, 25 bp, Homo sapien
cttcggagtgctgcggaaaaaggtt

SEQ ID NO: 1082421 - DNA, 25 bp, Homo sapien
cagggcctccttagagtcctggggc

SEQ ID NO: 1082422 - DNA, 25 bp, Homo sapien
gggttcacattacccagaccagact

SEQ ID NO: 1082423 - DNA, 25 bp, Homo sapien
gcagtgaggcctcaataccaagctg

SEQ ID NO: 1082424 - DNA, 25 bp, Homo sapien
cagggactatggctcaatctctgga

SEQ ID NO: 1082425 - DNA, 25 bp, Homo sapien
tcagatctgagaccatgaggacaga

SEQ ID NO: 1082426 - DNA, 25 bp, Homo sapien
ttccatcttcatgatcacttccggc

SEQ ID NO: 1082427 - DNA, 25 bp, Homo sapien
gccagaccacagtttccatcttcat

SEQ ID NO: 1082428 - DNA, 25 bp, Homo sapien
cttcatgatcacttccggccccagc

SEQ ID NO: 1082429 - DNA, 25 bp, Homo sapien
atcatgagccagaccacagtttcca

SEQ ID NO: 1082430 - DNA, 25 bp, Homo sapien
gaagaagttgcatctacaggccaac

SEQ ID NO: 1082431 - DNA, 25 bp, Homo sapien
gagtggcggtacagcttgacactgt

SEQ ID NO: 1082432 - DNA, 25 bp, Homo sapien
tatataggaactccagcactgccag

SEQ ID NO: 1082433 - DNA, 25 bp, Homo sapien
caacaagcaccgatgggcaaatacc

SEQ ID NO: 1082434 - DNA, 25 bp, Homo sapien
ccaggcccctggtcagcaggctcac

SEQ ID NO: 1082435 - DNA, 25 bp, Homo sapien
ccagcccatactccacagccgctgt

SEQ ID NO: 1082436 - DNA, 25 bp, Homo sapien
tctcagttcctccagcccatactcc

SEQ ID NO: 1082437 - DNA, 25 bp, Homo sapien
gcccatactccacagccgctgtcag

SEQ ID NO: 1082438 - DNA, 25 bp, Homo sapien
ctctctcagttcctccagcccatac

SEQ ID NO: 1082439 - DNA, 25 bp, Homo sapien
tcacacttcttatgccacccaggta

SEQ ID NO: 1082440 - DNA, 25 bp, Homo sapien
cacagggcaggcatgcatggatcct

SEQ ID NO: 1082441 - DNA, 25 bp, Homo sapien
tgtatctacagcaccagccataatc

SEQ ID NO: 1082442 - DNA, 25 bp, Homo sapien
tctctggagaacacggatcaaggct

SEQ ID NO: 1082443 - DNA, 25 bp, Homo sapien
cattcgccactaatcaaaaccagat

SEQ ID NO: 1082444 - DNA, 25 bp, Homo sapien
tcaggatgcttatcttcctccactt

SEQ ID NO: 1082445 - DNA, 25 bp, Homo sapien
cttctagtacattcgccactaatca

SEQ ID NO: 1082446 - DNA, 25 bp, Homo sapien
ttcaggatgcttatcttcctccact

SEQ ID NO: 1082447 - DNA, 25 bp, Homo sapien
tgcagggcctcacaaaccaagtcca

SEQ ID NO: 1082448 - DNA, 25 bp, Homo sapien
gcctcacaaaccaagtccacatcca

SEQ ID NO: 1082449 - DNA, 25 bp, Homo sapien
accttcaccacaaactgcaggcaca

SEQ ID NO: 1082450 - DNA, 25 bp, Homo sapien
acatccagcaccttcaccacaaact

SEQ ID NO: 1082451 - DNA, 25 bp, Homo sapien
ctatgaaagccacgcagcgctcctg

SEQ ID NO: 1082452 - DNA, 25 bp, Homo sapien
gcctctatgaaagccacgcagcgct

SEQ ID NO: 1082453 - DNA, 25 bp, Homo sapien
tgaaagccacgcagcgctcctgcag

SEQ ID NO: 1082454 - DNA, 25 bp, Homo sapien
ctctatgaaagccacgcagcgctcc

SEQ ID NO: 1082455 - DNA, 25 bp, Homo sapien
aatgcggtgcgtagggtgaggagta

SEQ ID NO: 1082456 - DNA, 25 bp, Homo sapien
gcgtagggtgaggagtatgaaggga

SEQ ID NO: 1082457 - DNA, 25 bp, Homo sapien
gagcagaatgcggtgcgtagggtga

SEQ ID NO: 1082458 - DNA, 25 bp, Homo sapien
ctgcgagccggcaaatgggtcaggg

SEQ ID NO: 1082459 - DNA, 25 bp, Homo sapien
cagcttcgggccgcgcggaccagtt

SEQ ID NO: 1082460 - DNA, 25 bp, Homo sapien
tcgtccacgcagagcttgtcgctgc

SEQ ID NO: 1082461 - DNA, 25 bp, Homo sapien
agttcagcctcgtccacgcagagct

SEQ ID NO: 1082462 - DNA, 25 bp, Homo sapien
gcgcggaccagttcagcctcgtcca

SEQ ID NO: 1082463 - DNA, 25 bp, Homo sapien
ctgcaaacgccagccctgagtcggg

SEQ ID NO: 1082464 - DNA, 25 bp, Homo sapien
tgccgcccgctcaccagtctcgtgg

SEQ ID NO: 1082465 - DNA, 25 bp, Homo sapien
ccgctcaccagtctcgtggccagca

SEQ ID NO: 1082466 - DNA, 25 bp, Homo sapien
tcctgccgcccgctcaccagtctcg

SEQ ID NO: 1082467 - DNA, 25 bp, Homo sapien
agtctcagctctttcaccaccgggg

SEQ ID NO: 1082468 - DNA, 25 bp, Homo sapien
ctccgccggggccagcaaggctagt

SEQ ID NO: 1082469 - DNA, 25 bp, Homo sapien
tgagtggttcctgccggttctgctc

SEQ ID NO: 1082470 - DNA, 25 bp, Homo sapien
gatgagtggttcctgccggttctgc

SEQ ID NO: 1082471 - DNA, 25 bp, Homo sapien
tggagctgggccggttccccgcgtc

SEQ ID NO: 1082472 - DNA, 25 bp, Homo sapien
cccctgctgagtggagctgggccgg

SEQ ID NO: 1082473 - DNA, 25 bp, Homo sapien
tgagtggagctgggccggttccccg

SEQ ID NO: 1082474 - DNA, 25 bp, Homo sapien
cctgctgagtggagctgggccggtt

SEQ ID NO: 1082475 - DNA, 25 bp, Homo sapien
ccagttagtgcgcagtcccgcggtg

SEQ ID NO: 1082476 - DNA, 25 bp, Homo sapien
ttagtgcgcagtcccgcggtggccc

SEQ ID NO: 1082477 - DNA, 25 bp, Homo sapien
agcaaggccagttagtgcgcagtcc

SEQ ID NO: 1082478 - DNA, 25 bp, Homo sapien
aggccagttagtgcgcagtcccgcg

SEQ ID NO: 1082479 - DNA, 25 bp, Homo sapien
tcccctctccgcagggcatggcatt

SEQ ID NO: 1082480 - DNA, 25 bp, Homo sapien
gggcctcatcccctctccgcagggc

SEQ ID NO: 1082481 - DNA, 25 bp, Homo sapien
tctccgcagggcatggcatttccac

SEQ ID NO: 1082482 - DNA, 25 bp, Homo sapien
catttccacgcctccacaatctgct

SEQ ID NO: 1082483 - DNA, 25 bp, Homo sapien
gcagggtgcctctccggcggcgaca

SEQ ID NO: 1082484 - DNA, 25 bp, Homo sapien
caggtccagaaagcggtgatgctcc

SEQ ID NO: 1082485 - DNA, 25 bp, Homo sapien
tccagaaagcggtgatgctcccggg

SEQ ID NO: 1082486 - DNA, 25 bp, Homo sapien
aaggacaggtccagaaagcggtgat

SEQ ID NO: 1082487 - DNA, 25 bp, Homo sapien
tagactagtagacgacaatgcccag

SEQ ID NO: 1082488 - DNA, 25 bp, Homo sapien
cctaaggcaggtgtgaagagcgata

SEQ ID NO: 1082489 - DNA, 25 bp, Homo sapien
tgttccaggacttaagccccatagg

SEQ ID NO: 1082490 - DNA, 25 bp, Homo sapien
gctgagagaactgaaccaactggaa

SEQ ID NO: 1082491 - DNA, 25 bp, Homo sapien
tttcttctaaatagtcaactgtctc

SEQ ID NO: 1082492 - DNA, 25 bp, Homo sapien
gctttgcagctcctttaaaactctt

SEQ ID NO: 1082493 - DNA, 25 bp, Homo sapien
tcttctaaatagtcaactgtctctc

SEQ ID NO: 1082494 - DNA, 25 bp, Homo sapien
atcttgctttgcagctcctttaaaa

SEQ ID NO: 1082495 - DNA, 25 bp, Homo sapien
tgtcctgcacaaaaccctccaatgc

SEQ ID NO: 1082496 - DNA, 25 bp, Homo sapien
tgccctgtacgaaatagtcccactc

SEQ ID NO: 1082497 - DNA, 25 bp, Homo sapien
agaggtctacaatcagtgccctgta

SEQ ID NO: 1082498 - DNA, 25 bp, Homo sapien
caatcagtgccctgtacgaaatagt

SEQ ID NO: 1082499 - DNA, 25 bp, Homo sapien
gcaatcccacctattggagaagctg

SEQ ID NO: 1082500 - DNA, 25 bp, Homo sapien
cagtggaaggcgctttcaagtcgtc

SEQ ID NO: 1082501 - DNA, 25 bp, Homo sapien
caagtcgtccggtcattaattaagc

SEQ ID NO: 1082502 - DNA, 25 bp, Homo sapien
taggcaactacaaccaaggaacttg

SEQ ID NO: 1082503 - DNA, 25 bp, Homo sapien
ccgaggaagaaaccgaacattggct

SEQ ID NO: 1082504 - DNA, 25 bp, Homo sapien
gcctcagtgagacttggaatttgac

SEQ ID NO: 1082505 - DNA, 25 bp, Homo sapien
tttcctggccaactgtaaagtcaag

SEQ ID NO: 1082506 - DNA, 25 bp, Homo sapien
taaagtcaagcgttcagaggcagat

SEQ ID NO: 1082507 - DNA, 25 bp, Homo sapien
tcttgggctttgattgggtcggaaa

SEQ ID NO: 1082508 - DNA, 25 bp, Homo sapien
gaaggctttagctagatcacacagg

SEQ ID NO: 1082509 - DNA, 25 bp, Homo sapien
acaaaggcaggaacgagggaacact

SEQ ID NO: 1082510 - DNA, 25 bp, Homo sapien
caagtgggccttgtgctttggagct

SEQ ID NO: 1082511 - DNA, 25 bp, Homo sapien
tcaagactctcaaggaattctgtcc

SEQ ID NO: 1082512 - DNA, 25 bp, Homo sapien
tgttggattgctaaattcaagactc

SEQ ID NO: 1082513 - DNA, 25 bp, Homo sapien
gagatagcagccctagacattaagt

SEQ ID NO: 1082514 - DNA, 25 bp, Homo sapien
tatgtgaaatgagggtcctgactca

SEQ ID NO: 1082515 - DNA, 25 bp, Homo sapien
agccgagattgtgccattgcactcc

SEQ ID NO: 1082516 - DNA, 25 bp, Homo sapien
cagctacttgggaggctgaggctgc

SEQ ID NO: 1082517 - DNA, 25 bp, Homo sapien
gcatgttgacgcgtgcctgtagtcc

SEQ ID NO: 1082518 - DNA, 25 bp, Homo sapien
agaatcacttgaacccgggaggcgg

SEQ ID NO: 1082519 - DNA, 25 bp, Homo sapien
gagctggtcattaagggatccatcc

SEQ ID NO: 1082520 - DNA, 25 bp, Homo sapien
ggctaatgaagcagacttggatgaa

SEQ ID NO: 1082521 - DNA, 25 bp, Homo sapien
gatccatcctacagaagtaagccct

SEQ ID NO: 1082522 - DNA, 25 bp, Homo sapien
catgagacaggatgaaggcttttct

SEQ ID NO: 1082523 - DNA, 25 bp, Homo sapien
ttcctaagcagacttccatgcaagt

SEQ ID NO: 1082524 - DNA, 25 bp, Homo sapien
gcctgaccctgcatagatcagatga

SEQ ID NO: 1082525 - DNA, 25 bp, Homo sapien
cctaagcagacttccatgcaagtac

SEQ ID NO: 1082526 - DNA, 25 bp, Homo sapien
taggcctgaccctgcatagatcaga

SEQ ID NO: 1082527 - DNA, 25 bp, Homo sapien
gcttactgcagcctgaaacctgggc

SEQ ID NO: 1082528 - DNA, 25 bp, Homo sapien
tagcttactgcagcctgaaacctgg

SEQ ID NO: 1082529 - DNA, 25 bp, Homo sapien
cagcctgaaacctgggctcaaatga

SEQ ID NO: 1082530 - DNA, 25 bp, Homo sapien
catagcttactgcagcctgaaacct

SEQ ID NO: 1082531 - DNA, 25 bp, Homo sapien
tctgtagataggccagttctggact

SEQ ID NO: 1082532 - DNA, 25 bp, Homo sapien
agactccgatctggtttcggtctct

SEQ ID NO: 1082533 - DNA, 25 bp, Homo sapien
tccagaagctaaagacagcccataa

SEQ ID NO: 1082534 - DNA, 25 bp, Homo sapien
ttttattgagaatgtccaaatccaa

SEQ ID NO: 1082535 - DNA, 25 bp, Homo sapien
gctgatcacagaatatgtgagagca

SEQ ID NO: 1082536 - DNA, 25 bp, Homo sapien
tgagagcaggcagtgacccatgcat

SEQ ID NO: 1082537 - DNA, 25 bp, Homo sapien
gatcacagaatatgtgagagcaggc

SEQ ID NO: 1082538 - DNA, 25 bp, Homo sapien
gtgagagcaggcagtgacccatgca

SEQ ID NO: 1082539 - DNA, 25 bp, Homo sapien
ctgctcaggagctaacgtccaacac

SEQ ID NO: 1082540 - DNA, 25 bp, Homo sapien
tgctcaggagctaacgtccaacacg

SEQ ID NO: 1082541 - DNA, 25 bp, Homo sapien
ccctttcatagaggtcaattctaca

SEQ ID NO: 1082542 - DNA, 25 bp, Homo sapien
cctttcatagaggtcaattctacat

SEQ ID NO: 1082543 - DNA, 25 bp, Homo sapien
ctttcatagaggtcaattctacatc

SEQ ID NO: 1082544 - DNA, 25 bp, Homo sapien
tctgtttcagatggccctcagcctt

SEQ ID NO: 1082545 - DNA, 25 bp, Homo sapien
cacggttagcaatagggatgttacg

SEQ ID NO: 1082546 - DNA, 25 bp, Homo sapien
ttaaacaggtgtactatccaaagga

SEQ ID NO: 1082547 - DNA, 25 bp, Homo sapien
ctgaagatggcgttccataagtttc

SEQ ID NO: 1082548 - DNA, 25 bp, Homo sapien
gagcttttgatgctgaagatggcgt

SEQ ID NO: 1082549 - DNA, 25 bp, Homo sapien
ccactcatctgagggaggcgggcat

SEQ ID NO: 1082550 - DNA, 25 bp, Homo sapien
gccaggccgcacacaagctggctga

SEQ ID NO: 1082551 - DNA, 25 bp, Homo sapien
gcatgtcgaactgggccgaggtgga

SEQ ID NO: 1082552 - DNA, 25 bp, Homo sapien
gaagttgtcagctcgactccctgct

SEQ ID NO: 1082553 - DNA, 25 bp, Homo sapien
gtcatccatcgctcggcggtcttct

SEQ ID NO: 1082554 - DNA, 25 bp, Homo sapien
tctgctctgcgcgttccatcgagtt

SEQ ID NO: 1082555 - DNA, 25 bp, Homo sapien
gacagagggacacacgtgtcgaatg

SEQ ID NO: 1082556 - DNA, 25 bp, Homo sapien
tccgctgagtgtgcttcccctccgt

SEQ ID NO: 1082557 - DNA, 25 bp, Homo sapien
gggcctccgtgacactccatgaaaa

SEQ ID NO: 1082558 - DNA, 25 bp, Homo sapien
gcagctggcatggtcaggtaacact

SEQ ID NO: 1082559 - DNA, 25 bp, Homo sapien
tttttgaaatctgtaatagctcccc

SEQ ID NO: 1082560 - DNA, 25 bp, Homo sapien
gaaggaagcagtagctgagcacctg

SEQ ID NO: 1082561 - DNA, 25 bp, Homo sapien
tgcgctttgtcacgggccgcagtcg

SEQ ID NO: 1082562 - DNA, 25 bp, Homo sapien
ggtagaagttgtagaccctccctca

SEQ ID NO: 1082563 - DNA, 25 bp, Homo sapien
tcaccatccatgcaggcactgattt

SEQ ID NO: 1082564 - DNA, 25 bp, Homo sapien
tccagaggaccggagccgcttcctg

SEQ ID NO: 1082565 - DNA, 25 bp, Homo sapien
gagagcaaggagcaggtagtaccca

SEQ ID NO: 1082566 - DNA, 25 bp, Homo sapien
tacccagaggctagtagagcagaga

SEQ ID NO: 1082567 - DNA, 25 bp, Homo sapien
tccaactggtccagaaggcacggct

SEQ ID NO: 1082568 - DNA, 25 bp, Homo sapien
tactgagtgaccaacaggtggtgga

SEQ ID NO: 1082569 - DNA, 25 bp, Homo sapien
tattgagttggcattgcgttcggcg

SEQ ID NO: 1082570 - DNA, 25 bp, Homo sapien
caagctttacaaggacccagcggga

SEQ ID NO: 1082571 - DNA, 25 bp, Homo sapien
cagcagctctttggcgtggattatc

SEQ ID NO: 1082572 - DNA, 25 bp, Homo sapien
gctgacaaaggtgcgctcttccctg

SEQ ID NO: 1082573 - DNA, 25 bp, Homo sapien
gagctcaatccacaatttaacctga

SEQ ID NO: 1082574 - DNA, 25 bp, Homo sapien
cagctgtctgtaactgcgagctcaa

SEQ ID NO: 1082575 - DNA, 25 bp, Homo sapien
cacaatttaacctgaatctgagcct

SEQ ID NO: 1082576 - DNA, 25 bp, Homo sapien
caggctccgcccctttctgtaggga

SEQ ID NO: 1082577 - DNA, 25 bp, Homo sapien
gactcaaattagaagcccggctagc

SEQ ID NO: 1082578 - DNA, 25 bp, Homo sapien
tcataaggccgattcagtccaggac

SEQ ID NO: 1082579 - DNA, 25 bp, Homo sapien
tatcaggtggtgcacaaactccaga

SEQ ID NO: 1082580 - DNA, 25 bp, Homo sapien
tcagaaacgggaatgtcactgggct

SEQ ID NO: 1082581 - DNA, 25 bp, Homo sapien
tgggggtaggtgtcagtatgctacg

SEQ ID NO: 1082582 - DNA, 25 bp, Homo sapien
gggtgggggtaggtgtcagtatgct

SEQ ID NO: 1082583 - DNA, 25 bp, Homo sapien
taggtgtcagtatgctacgctggag

SEQ ID NO: 1082584 - DNA, 25 bp, Homo sapien
gggtaggtgtcagtatgctacgctg

SEQ ID NO: 1082585 - DNA, 25 bp, Homo sapien
gtaagtaacggcctgcctggcgcat

SEQ ID NO: 1082586 - DNA, 25 bp, Homo sapien
tccccaggctgctcgcaggaatgtg

SEQ ID NO: 1082587 - DNA, 25 bp, Homo sapien
ctggcgcatgcaccaaacgggagtg

SEQ ID NO: 1082588 - DNA, 25 bp, Homo sapien
aacgggagtgtagtctgtttcctct

SEQ ID NO: 1082589 - DNA, 25 bp, Homo sapien
tcaggagagcgacacgtgctgaaaa

SEQ ID NO: 1082590 - DNA, 25 bp, Homo sapien
caggagagcgacacgtgctgaaaaa

SEQ ID NO: 1082591 - DNA, 25 bp, Homo sapien
gactgaaggcataaatctttccctc

SEQ ID NO: 1082592 - DNA, 25 bp, Homo sapien
ggtggcagactgaaggcataaatct

SEQ ID NO: 1082593 - DNA, 25 bp, Homo sapien
gcataaatctttccctcttttgtgg

SEQ ID NO: 1082594 - DNA, 25 bp, Homo sapien
ctaggtggcagactgaaggcataaa

SEQ ID NO: 1082595 - DNA, 25 bp, Homo sapien
gggtacaacaaggatgtcggagaaa

SEQ ID NO: 1082596 - DNA, 25 bp, Homo sapien
atggcagcatccagagggaagcgac

SEQ ID NO: 1082597 - DNA, 25 bp, Homo sapien
agcatccagagggaagcgacgcagt

SEQ ID NO: 1082598 - DNA, 25 bp, Homo sapien
aaggatgtcggagaaaatgatggca

SEQ ID NO: 1082599 - DNA, 25 bp, Homo sapien
tgatagaaggattttcaaggcgtcc

SEQ ID NO: 1082600 - DNA, 25 bp, Homo sapien
aaaggttctgttcagctcattccag

SEQ ID NO: 1082601 - DNA, 25 bp, Homo sapien
tttccctcgatccagttaggataag

SEQ ID NO: 1082602 - DNA, 25 bp, Homo sapien
agtgcttattgtaaaccttgactgg

SEQ ID NO: 1082603 - DNA, 25 bp, Homo sapien
ccgtaggcgttctaggtcctgctct

SEQ ID NO: 1082604 - DNA, 25 bp, Homo sapien
tccagccagtcgttgtcgggtaagg

SEQ ID NO: 1082605 - DNA, 25 bp, Homo sapien
acatagcctagctcagaggctacca

SEQ ID NO: 1082606 - DNA, 25 bp, Homo sapien
taccacttctggatcccgtaggcgt

SEQ ID NO: 1082607 - DNA, 25 bp, Homo sapien
cttccagagtgatctccccgcgccc

SEQ ID NO: 1082608 - DNA, 25 bp, Homo sapien
tccagagtgatctccccgcgccccg

SEQ ID NO: 1082609 - DNA, 25 bp, Homo sapien
ccagagtgatctccccgcgccccga

SEQ ID NO: 1082610 - DNA, 25 bp, Homo sapien
ttccagagtgatctccccgcgcccc

SEQ ID NO: 1082611 - DNA, 25 bp, Homo sapien
agaagccagactgacccttcctttt

SEQ ID NO: 1082612 - DNA, 25 bp, Homo sapien
gaaggatagaaagatggtgtcacag

SEQ ID NO: 1082613 - DNA, 25 bp, Homo sapien
ctagagaaggatagaaagatggtgt

SEQ ID NO: 1082614 - DNA, 25 bp, Homo sapien
aagccagactgacccttccttttgt

SEQ ID NO: 1082615 - DNA, 25 bp, Homo sapien
tcctaccagatatgggaccagagca

SEQ ID NO: 1082616 - DNA, 25 bp, Homo sapien
cagctggtgactagcctgaggtctc

SEQ ID NO: 1082617 - DNA, 25 bp, Homo sapien
agagcatcagtgaggatgcgaagca

SEQ ID NO: 1082618 - DNA, 25 bp, Homo sapien
gaggtctctgatagagccagcgctt

SEQ ID NO: 1082619 - DNA, 25 bp, Homo sapien
ttagagcattaagccccactgtcag

SEQ ID NO: 1082620 - DNA, 25 bp, Homo sapien
cactgtcagtgtcaggatgggcttg

SEQ ID NO: 1082621 - DNA, 25 bp, Homo sapien
ttggctgctccgctagatcactgga

SEQ ID NO: 1082622 - DNA, 25 bp, Homo sapien
gatactgcctgaccctaaaaaccca

SEQ ID NO: 1082623 - DNA, 25 bp, Homo sapien
tgccctgcatgggactcaaacagct

SEQ ID NO: 1082624 - DNA, 25 bp, Homo sapien
gccctgcatgggactcaaacagctg

SEQ ID NO: 1082625 - DNA, 25 bp, Homo sapien
gcatgggactcaaacagctgcaatg

SEQ ID NO: 1082626 - DNA, 25 bp, Homo sapien
cctgcatgggactcaaacagctgca

SEQ ID NO: 1082627 - DNA, 25 bp, Homo sapien
catcacggatgtaaggcagtgcaaa

SEQ ID NO: 1082628 - DNA, 25 bp, Homo sapien
gccacatcacggatgtaaggcagtg

SEQ ID NO: 1082629 - DNA, 25 bp, Homo sapien
ctgcctcccgcaacctggccttcac

SEQ ID NO: 1082630 - DNA, 25 bp, Homo sapien
gcttggccacatcacggatgtaagg

SEQ ID NO: 1082631 - DNA, 25 bp, Homo sapien
cagtccatgcaggacttagcctgaa

SEQ ID NO: 1082632 - DNA, 25 bp, Homo sapien
cagtggtcactccagtccatgcagg

SEQ ID NO: 1082633 - DNA, 25 bp, Homo sapien
aaaagcagatctcaggctacagagg

SEQ ID NO: 1082634 - DNA, 25 bp, Homo sapien
ctacagagggccttgctacaaccac

SEQ ID NO: 1082635 - DNA, 25 bp, Homo sapien
tggggccactgtccagtcaagccca

SEQ ID NO: 1082636 - DNA, 25 bp, Homo sapien
actgtccagtcaagcccaaccacct

SEQ ID NO: 1082637 - DNA, 25 bp, Homo sapien
agcccaaccacctcatagccagctt

SEQ ID NO: 1082638 - DNA, 25 bp, Homo sapien
gccactgtccagtcaagcccaacca

SEQ ID NO: 1082639 - DNA, 25 bp, Homo sapien
gccacgttctggtaactgcatacat

SEQ ID NO: 1082640 - DNA, 25 bp, Homo sapien
agccagcgccacgttctggtaactg

SEQ ID NO: 1082641 - DNA, 25 bp, Homo sapien
ggaagcaaagccagcgccacgttct

SEQ ID NO: 1082642 - DNA, 25 bp, Homo sapien
acctcaacctcaaggcctcaccctt

SEQ ID NO: 1082643 - DNA, 25 bp, Homo sapien
acaggggtccaggttgccctgcaat

SEQ ID NO: 1082644 - DNA, 25 bp, Homo sapien
cacaggggtccaggttgccctgcaa

SEQ ID NO: 1082645 - DNA, 25 bp, Homo sapien
ggcacaggggtccaggttgccctgc

SEQ ID NO: 1082646 - DNA, 25 bp, Homo sapien
aaggcacaggggtccaggttgccct

SEQ ID NO: 1082647 - DNA, 25 bp, Homo sapien
gtgcacagtaacagacacacagagg

SEQ ID NO: 1082648 - DNA, 25 bp, Homo sapien
gacccaggcatgaagcataaacaca

SEQ ID NO: 1082649 - DNA, 25 bp, Homo sapien
aagtccggtctttctagggcttatg

SEQ ID NO: 1082650 - DNA, 25 bp, Homo sapien
tgacaaacgcatatgtaggcatgct

SEQ ID NO: 1082651 - DNA, 25 bp, Homo sapien
ggcactggctacaggaggaccagca

SEQ ID NO: 1082652 - DNA, 25 bp, Homo sapien
gggcactggctacaggaggaccagc

SEQ ID NO: 1082653 - DNA, 25 bp, Homo sapien
gcactggctacaggaggaccagcaa

SEQ ID NO: 1082654 - DNA, 25 bp, Homo sapien
caatgtagcgatgtggtccaaagtc

SEQ ID NO: 1082655 - DNA, 25 bp, Homo sapien
cagacgtgagtgtttatgcacagca

SEQ ID NO: 1082656 - DNA, 25 bp, Homo sapien
tcagttctgtcgaagcagacgtgag

SEQ ID NO: 1082657 - DNA, 25 bp, Homo sapien
aaaggcgcccacatgttctgggtcc

SEQ ID NO: 1082658 - DNA, 25 bp, Homo sapien
tggtacttgagggtaaaggtataca

SEQ ID NO: 1082659 - DNA, 25 bp, Homo sapien
aacgatcaatcatctgtgttagtgg

SEQ ID NO: 1082660 - DNA, 25 bp, Homo sapien
cctggaaacgatcaatcatctgtgt

SEQ ID NO: 1082661 - DNA, 25 bp, Homo sapien
catctgtgttagtggtacttgaggg

SEQ ID NO: 1082662 - DNA, 25 bp, Homo sapien
ggatatgggcacaatctttcacaaa

SEQ ID NO: 1082663 - DNA, 25 bp, Homo sapien
gctaagaagaactgaggatatgggc

SEQ ID NO: 1082664 - DNA, 25 bp, Homo sapien
aactgaggatatgggcacaatcttt

SEQ ID NO: 1082665 - DNA, 25 bp, Homo sapien
taagaagaactgaggatatgggcac

SEQ ID NO: 1082666 - DNA, 25 bp, Homo sapien
gagctatcgtgccactgcctggatg

SEQ ID NO: 1082667 - DNA, 25 bp, Homo sapien
cagctatatgtccaaaagaattgca

SEQ ID NO: 1082668 - DNA, 25 bp, Homo sapien
tgcaagcaggaactcaaacagatag

SEQ ID NO: 1082669 - DNA, 25 bp, Homo sapien
aaaaaaaatgaaccagctatatgtc

SEQ ID NO: 1082670 - DNA, 25 bp, Homo sapien
tgagaagaatgtccttattggcagg

SEQ ID NO: 1082671 - DNA, 25 bp, Homo sapien
agaatgtccttattggcagggagga

SEQ ID NO: 1082672 - DNA, 25 bp, Homo sapien
gaagtgggcatagcagggggtggca

SEQ ID NO: 1082673 - DNA, 25 bp, Homo sapien
ggtgcaggttttttgagcttgagca

SEQ ID NO: 1082674 - DNA, 25 bp, Homo sapien
tggtttgaatttcctcctttagctc

SEQ ID NO: 1082675 - DNA, 25 bp, Homo sapien
cattctccctgtccctttcaggtat

SEQ ID NO: 1082676 - DNA, 25 bp, Homo sapien
ctccctgtccctttcaggtatacca

SEQ ID NO: 1082677 - DNA, 25 bp, Homo sapien
ttctccctgtccctttcaggtatac

SEQ ID NO: 1082678 - DNA, 25 bp, Homo sapien
ctaaacgatagaacctcagatttgg

SEQ ID NO: 1082679 - DNA, 25 bp, Homo sapien
tctaaaagtattgccaagagatgag

SEQ ID NO: 1082680 - DNA, 25 bp, Homo sapien
tggtatgaaccacctttaatagaga

SEQ ID NO: 1082681 - DNA, 25 bp, Homo sapien
gacttaatctagagagtaggctttc

SEQ ID NO: 1082682 - DNA, 25 bp, Homo sapien
ggggcgtcgcggctggggcatcccc

SEQ ID NO: 1082683 - DNA, 25 bp, Homo sapien
cgtcgcggctggggcatcccccggg

SEQ ID NO: 1082684 - DNA, 25 bp, Homo sapien
ggcgtcgcggctggggcatcccccg

SEQ ID NO: 1082685 - DNA, 25 bp, Homo sapien
gggggcgtcgcggctggggcatccc

SEQ ID NO: 1082686 - DNA, 25 bp, Homo sapien
atacgaacgggtggaggagcgcttc

SEQ ID NO: 1082687 - DNA, 25 bp, Homo sapien
gacggtggcggaaaagtgggcatac

SEQ ID NO: 1082688 - DNA, 25 bp, Homo sapien
attccttactggactgcgccgccaa

SEQ ID NO: 1082689 - DNA, 25 bp, Homo sapien
ggagcgcttcgagcggatcccggag

SEQ ID NO: 1082690 - DNA, 25 bp, Homo sapien
actctcatggagttgacagtcagac

SEQ ID NO: 1082691 - DNA, 25 bp, Homo sapien
tcttgatcgagcaagaaacagtaac

SEQ ID NO: 1082692 - DNA, 25 bp, Homo sapien
tgaaagacctaattcagattggagg

SEQ ID NO: 1082693 - DNA, 25 bp, Homo sapien
tgtagaagactgagccaagtgagga

SEQ ID NO: 1082694 - DNA, 25 bp, Homo sapien
tgtggtaccagattcaaggtggagt

SEQ ID NO: 1082695 - DNA, 25 bp, Homo sapien
ttttggcaggtggtagaaataggcc

SEQ ID NO: 1082696 - DNA, 25 bp, Homo sapien
gaaaatagtgtgtgttatggaagcc

SEQ ID NO: 1082697 - DNA, 25 bp, Homo sapien
gaaataggcccttacatggaaatgg

SEQ ID NO: 1082698 - DNA, 25 bp, Homo sapien
tatggtccaattaatctagcattct

SEQ ID NO: 1082699 - DNA, 25 bp, Homo sapien
actatttctcaccacaaacttatgg

SEQ ID NO: 1082700 - DNA, 25 bp, Homo sapien
tttcacaatgtctcctgtctctctt

SEQ ID NO: 1082701 - DNA, 25 bp, Homo sapien
tttgctgtgttattaccatctgtat

SEQ ID NO: 1082702 - DNA, 25 bp, Homo sapien
tcctggaagttgctagcaaaccaca

SEQ ID NO: 1082703 - DNA, 25 bp, Homo sapien
tgaaccaatccctacgaccagggaa

SEQ ID NO: 1082704 - DNA, 25 bp, Homo sapien
ccttttctgggtcgaggcactaaga

SEQ ID NO: 1082705 - DNA, 25 bp, Homo sapien
tgacttatctctgcctatccctgaa

SEQ ID NO: 1082706 - DNA, 25 bp, Homo sapien
cctgccggtcgtagaagcattttcc

SEQ ID NO: 1082707 - DNA, 25 bp, Homo sapien
tgcgacgtgcagttgggcattgtca

SEQ ID NO: 1082708 - DNA, 25 bp, Homo sapien
tctcagatgtaatcattttgccggg

SEQ ID NO: 1082709 - DNA, 25 bp, Homo sapien
ttttctgcatcctgccggtcgtaga

SEQ ID NO: 1082710 - DNA, 25 bp, Homo sapien
tttgacgcaaggcacagactgggct

SEQ ID NO: 1082711 - DNA, 25 bp, Homo sapien
tcccaagtgggcaatcctggagcct

SEQ ID NO: 1082712 - DNA, 25 bp, Homo sapien
aactttcgcaagatgggtcctcgga

SEQ ID NO: 1082713 - DNA, 25 bp, Homo sapien
gatcaaagcggatgggatgacgcca

SEQ ID NO: 1082714 - DNA, 25 bp, Homo sapien
aattcaggttgggaactgctcaggc

SEQ ID NO: 1082715 - DNA, 25 bp, Homo sapien
tcaggttgggaactgctcaggccac

SEQ ID NO: 1082716 - DNA, 25 bp, Homo sapien
aggttgggaactgctcaggccacac

SEQ ID NO: 1082717 - DNA, 25 bp, Homo sapien
gaaaatatctcaatcccccgcccca

SEQ ID NO: 1082718 - DNA, 25 bp, Homo sapien
tgccaaggttgaagatgcgtgcccg

SEQ ID NO: 1082719 - DNA, 25 bp, Homo sapien
aaggttgaagatgcgtgcccgtgac

SEQ ID NO: 1082720 - DNA, 25 bp, Homo sapien
ggtatgtgtctatctcagcgagcag

SEQ ID NO: 1082721 - DNA, 25 bp, Homo sapien
gttgaagatgcgtgcccgtgacaca

SEQ ID NO: 1082722 - DNA, 25 bp, Homo sapien
agcgtctggaccaccgggtctcagt

SEQ ID NO: 1082723 - DNA, 25 bp, Homo sapien
tgagagctcgcggttctccctgcag

SEQ ID NO: 1082724 - DNA, 25 bp, Homo sapien
tcagtcctgggctgatcgtccggag

SEQ ID NO: 1082725 - DNA, 25 bp, Homo sapien
tctggacggcgacctagacttgtcc

SEQ ID NO: 1082726 - DNA, 25 bp, Homo sapien
gtcgtggaaccagcgcaaaagtgtg

SEQ ID NO: 1082727 - DNA, 25 bp, Homo sapien
gatcccctgtcgagcaagcagatga

SEQ ID NO: 1082728 - DNA, 25 bp, Homo sapien
tgttaggcgtatacagccccacgtg

SEQ ID NO: 1082729 - DNA, 25 bp, Homo sapien
ctcgttcaccaaaaagaccgcgtcg

SEQ ID NO: 1082730 - DNA, 25 bp, Homo sapien
gcaaagcctttcactagttgggcct

SEQ ID NO: 1082731 - DNA, 25 bp, Homo sapien
ttcctcagttctgtgctggtctccc

SEQ ID NO: 1082732 - DNA, 25 bp, Homo sapien
tttggagcccaatgagagacacagc

SEQ ID NO: 1082733 - DNA, 25 bp, Homo sapien
ctgcagatgttcctcagttctgtgc

SEQ ID NO: 1082734 - DNA, 25 bp, Homo sapien
aatagaatcacagcgggacacaggg

SEQ ID NO: 1082735 - DNA, 25 bp, Homo sapien
catacggagtgaaacaatacagaaa

SEQ ID NO: 1082736 - DNA, 25 bp, Homo sapien
ggttatgttacatacggagtgaaac

SEQ ID NO: 1082737 - DNA, 25 bp, Homo sapien
agcaaagggctaataatgacaggat

SEQ ID NO: 1082738 - DNA, 25 bp, Homo sapien
tgagcttaaagcacgcccaggagtt

SEQ ID NO: 1082739 - DNA, 25 bp, Homo sapien
cgccgatgggtcgaacttccgttca

SEQ ID NO: 1082740 - DNA, 25 bp, Homo sapien
ggcatcggtaaattcccagagagga

SEQ ID NO: 1082741 - DNA, 25 bp, Homo sapien
gagctcgcgggaggtaatctttctc

SEQ ID NO: 1082742 - DNA, 25 bp, Homo sapien
gagctgaaactgcgccatcgtcact

SEQ ID NO: 1082743 - DNA, 25 bp, Homo sapien
ctgaaactgcgccatcgtcactgtc

SEQ ID NO: 1082744 - DNA, 25 bp, Homo sapien
aaactgcgccatcgtcactgtcggc

SEQ ID NO: 1082745 - DNA, 25 bp, Homo sapien
actgcgccatcgtcactgtcggcgg

SEQ ID NO: 1082746 - DNA, 25 bp, Homo sapien
tctagaactatgagcccgaggcctt

SEQ ID NO: 1082747 - DNA, 25 bp, Homo sapien
gccgcggtgtacaacggaacttgta

SEQ ID NO: 1082748 - DNA, 25 bp, Homo sapien
tagtctcctcgtggctagttcaggc

SEQ ID NO: 1082749 - DNA, 25 bp, Homo sapien
tatgagctccagactacatctcccg

SEQ ID NO: 1082750 - DNA, 25 bp, Homo sapien
tcagctcccttaatatcccacaggg

SEQ ID NO: 1082751 - DNA, 25 bp, Homo sapien
aaacattttgtagggcttgaggatc

SEQ ID NO: 1082752 - DNA, 25 bp, Homo sapien
caatacgtcctaccttcctttggat

SEQ ID NO: 1082753 - DNA, 25 bp, Homo sapien
tttggatcacaacgctcaatccact

SEQ ID NO: 1082754 - DNA, 25 bp, Homo sapien
taacccacgtgttctacacacaggc

SEQ ID NO: 1082755 - DNA, 25 bp, Homo sapien
ccttggagtggagaatgccctgaat

SEQ ID NO: 1082756 - DNA, 25 bp, Homo sapien
gacaccaagctaggccacggtgatg

SEQ ID NO: 1082757 - DNA, 25 bp, Homo sapien
gatggatgttcatgcttaaggaaag

SEQ ID NO: 1082758 - DNA, 25 bp, Homo sapien
gttgctttgcacatccactacggga

SEQ ID NO: 1082759 - DNA, 25 bp, Homo sapien
gtgtccacagccacgaaattagctg

SEQ ID NO: 1082760 - DNA, 25 bp, Homo sapien
cacatctccttgaagttgttgcttt

SEQ ID NO: 1082761 - DNA, 25 bp, Homo sapien
tacgggaacctggactactagctcc

SEQ ID NO: 1082762 - DNA, 25 bp, Homo sapien
cagccccttcacaaccacctgccct

SEQ ID NO: 1082763 - DNA, 25 bp, Homo sapien
taaagggagagttgtgacaggcctc

SEQ ID NO: 1082764 - DNA, 25 bp, Homo sapien
gtaggtaaagggagagttgtgacag

SEQ ID NO: 1082765 - DNA, 25 bp, Homo sapien
agagttgtgacaggcctctagcacc

SEQ ID NO: 1082766 - DNA, 25 bp, Homo sapien
ggttcagcaaactcttcctgtcccc

SEQ ID NO: 1082767 - DNA, 25 bp, Homo sapien
cagcaaactcttcctgtccccaagc

SEQ ID NO: 1082768 - DNA, 25 bp, Homo sapien
caaactcttcctgtccccaagccca

SEQ ID NO: 1082769 - DNA, 25 bp, Homo sapien
tggttcagcaaactcttcctgtccc

SEQ ID NO: 1082770 - DNA, 25 bp, Homo sapien
tagccttatgaaggacccaaaccac

SEQ ID NO: 1082771 - DNA, 25 bp, Homo sapien
gttgagggctggcactaaagagaaa

SEQ ID NO: 1082772 - DNA, 25 bp, Homo sapien
ctgtggctaggagttagccttatga

SEQ ID NO: 1082773 - DNA, 25 bp, Homo sapien
cactaaagagaaaagggcttatact

SEQ ID NO: 1082774 - DNA, 25 bp, Homo sapien
cagcatgacacacggccttgtaacg

SEQ ID NO: 1082775 - DNA, 25 bp, Homo sapien
ggccttgtaacgttcctcaatgcac

SEQ ID NO: 1082776 - DNA, 25 bp, Homo sapien
ctggcagcatgacacacggccttgt

SEQ ID NO: 1082777 - DNA, 25 bp, Homo sapien
tgacacacggccttgtaacgttcct

SEQ ID NO: 1082778 - DNA, 25 bp, Homo sapien
gccgcttgaagcaggcgaggcccag

SEQ ID NO: 1082779 - DNA, 25 bp, Homo sapien
tacactgggtgataggtgcaccaaa

SEQ ID NO: 1082780 - DNA, 25 bp, Homo sapien
tatcaagatttcagagagccaagct

SEQ ID NO: 1082781 - DNA, 25 bp, Homo sapien
tcctatctgatgttccctagaatct

SEQ ID NO: 1082782 - DNA, 25 bp, Homo sapien
gaaagagaagtctgctatatcaaga

SEQ ID NO: 1082783 - DNA, 25 bp, Homo sapien
gaagttgaagccatgctgtatcagg

SEQ ID NO: 1082784 - DNA, 25 bp, Homo sapien
cttgagccagataggaatgttcacc

SEQ ID NO: 1082785 - DNA, 25 bp, Homo sapien
gatgccttgggcatactgctggttg

SEQ ID NO: 1082786 - DNA, 25 bp, Homo sapien
cacagactttggttctatgacatac

SEQ ID NO: 1082787 - DNA, 25 bp, Homo sapien
ggcatattctaagtaggaggccacg

SEQ ID NO: 1082788 - DNA, 25 bp, Homo sapien
tagctccaggaatagggtccgtact

SEQ ID NO: 1082789 - DNA, 25 bp, Homo sapien
gctgggaacatctcacacaggtcag

SEQ ID NO: 1082790 - DNA, 25 bp, Homo sapien
cacgaaacgggcatgaaactcagca

SEQ ID NO: 1082791 - DNA, 25 bp, Homo sapien
cgcaagagggtaatggtccactagc

SEQ ID NO: 1082792 - DNA, 25 bp, Homo sapien
gctccataagagcagggttttgtgg

SEQ ID NO: 1082793 - DNA, 25 bp, Homo sapien
tccactagcatataagctccataag

SEQ ID NO: 1082794 - DNA, 25 bp, Homo sapien
caacagcgcaagagggtaatggtcc

SEQ ID NO: 1082795 - DNA, 25 bp, Homo sapien
caatatggtccctcatgctggaagg

SEQ ID NO: 1082796 - DNA, 25 bp, Homo sapien
gctggaaggatagttgcagaactcc

SEQ ID NO: 1082797 - DNA, 25 bp, Homo sapien
caggcagcagcggtaatcaatatgg

SEQ ID NO: 1082798 - DNA, 25 bp, Homo sapien
cagcagcggtaatcaatatggtccc

SEQ ID NO: 1082799 - DNA, 25 bp, Homo sapien
gaggaccatccttagcttccccaga

SEQ ID NO: 1082800 - DNA, 25 bp, Homo sapien
tatcgtgagactgaggacactgtgg

SEQ ID NO: 1082801 - DNA, 25 bp, Homo sapien
gcctcatcagtgtcaatgataaggt

SEQ ID NO: 1082802 - DNA, 25 bp, Homo sapien
cagaggtctgtgtccccggtaggtt

SEQ ID NO: 1082803 - DNA, 25 bp, Homo sapien
tagtttcatcggcagccacctcctg

SEQ ID NO: 1082804 - DNA, 25 bp, Homo sapien
tggagtgaggcaggttcctagtttc

SEQ ID NO: 1082805 - DNA, 25 bp, Homo sapien
ctctatcagctatttcaggccttgc

SEQ ID NO: 1082806 - DNA, 25 bp, Homo sapien
tgctgccttaatccccatctctaag

SEQ ID NO: 1082807 - DNA, 25 bp, Homo sapien
tactgccccaagtgagcttcatctt

SEQ ID NO: 1082808 - DNA, 25 bp, Homo sapien
tcacataacctgtcataaaggcatc

SEQ ID NO: 1082809 - DNA, 25 bp, Homo sapien
ggctgcggtccctggctcacttcca

SEQ ID NO: 1082810 - DNA, 25 bp, Homo sapien
cggtccctggctcacttccacatag

SEQ ID NO: 1082811 - DNA, 25 bp, Homo sapien
tcctgccatggctggagctttggga

SEQ ID NO: 1082812 - DNA, 25 bp, Homo sapien
cagtagcagttgaggatgacatttc

SEQ ID NO: 1082813 - DNA, 25 bp, Homo sapien
acactgggataaaggaggcggtcca

SEQ ID NO: 1082814 - DNA, 25 bp, Homo sapien
tcttacttgtacctcaaacactggg

SEQ ID NO: 1082815 - DNA, 25 bp, Homo sapien
ctcttagcagagtgtccaagatgtt

SEQ ID NO: 1082816 - DNA, 25 bp, Homo sapien
agtggtggtacctggcagctgccca

SEQ ID NO: 1082817 - DNA, 25 bp, Homo sapien
atcgcgctcggctgattctccctag

SEQ ID NO: 1082818 - DNA, 25 bp, Homo sapien
ccaagatgttcctaccaagagcagt

SEQ ID NO: 1082819 - DNA, 25 bp, Homo sapien
gtgttagctactatgatcccacccc

SEQ ID NO: 1082820 - DNA, 25 bp, Homo sapien
cagtggatacctttcaagctcgtct

SEQ ID NO: 1082821 - DNA, 25 bp, Homo sapien
gaaactgctctgtccaaggttgcca

SEQ ID NO: 1082822 - DNA, 25 bp, Homo sapien
gatttcctggttgcaaattcagtgg

SEQ ID NO: 1082823 - DNA, 25 bp, Homo sapien
tcttatcccattaagttccctagtc

SEQ ID NO: 1082824 - DNA, 25 bp, Homo sapien
gctgcatgaggctctcttactcaga

SEQ ID NO: 1082825 - DNA, 25 bp, Homo sapien
gtctctaagtctccagtgcaacgta

SEQ ID NO: 1082826 - DNA, 25 bp, Homo sapien
gatagccttattagttgatttgtcc

SEQ ID NO: 1082827 - DNA, 25 bp, Homo sapien
cttttgactttcagagctaaagaaa

SEQ ID NO: 1082828 - DNA, 25 bp, Homo sapien
cagagctaaagaaatctgcctgcat

SEQ ID NO: 1082829 - DNA, 25 bp, Homo sapien
ctttcagagctaaagaaatctgcct

SEQ ID NO: 1082830 - DNA, 25 bp, Homo sapien
ttcagagctaaagaaatctgcctgc

SEQ ID NO: 1082831 - DNA, 25 bp, Homo sapien
gcttctttggagcacaagcctccca

SEQ ID NO: 1082832 - DNA, 25 bp, Homo sapien
ccttggcagatatacggatgtacgc

SEQ ID NO: 1082833 - DNA, 25 bp, Homo sapien
ggctgtggatcctcgagctgagaac

SEQ ID NO: 1082834 - DNA, 25 bp, Homo sapien
cactcttgggatgtctgttctggaa

SEQ ID NO: 1082835 - DNA, 25 bp, Homo sapien
tactctgagtgataccttccttgtt

SEQ ID NO: 1082836 - DNA, 25 bp, Homo sapien
aacattttcattagagagtgtttca

SEQ ID NO: 1082837 - DNA, 25 bp, Homo sapien
tgtttcattgatttggaaggaggca

SEQ ID NO: 1082838 - DNA, 25 bp, Homo sapien
catttttcaactgctgtattatctc

SEQ ID NO: 1082839 - DNA, 25 bp, Homo sapien
tgttaatggctttaagacgtttatc

SEQ ID NO: 1082840 - DNA, 25 bp, Homo sapien
tccaggagatcctttgtatagaaga

SEQ ID NO: 1082841 - DNA, 25 bp, Homo sapien
gattaatgctaagggcgtccaggag

SEQ ID NO: 1082842 - DNA, 25 bp, Homo sapien
tatgttccagaagcccaagttatct

SEQ ID NO: 1082843 - DNA, 25 bp, Homo sapien
taattagcagtcattcaaagtaggg

SEQ ID NO: 1082844 - DNA, 25 bp, Homo sapien
agaggttaggcagtaaagttgcacg

SEQ ID NO: 1082845 - DNA, 25 bp, Homo sapien
gaagtagagttgtgtgacacgattg

SEQ ID NO: 1082846 - DNA, 25 bp, Homo sapien
tatgcccggccgctctttttccaat

SEQ ID NO: 1082847 - DNA, 25 bp, Homo sapien
agctaatgcatgtctcagcttgcca

SEQ ID NO: 1082848 - DNA, 25 bp, Homo sapien
catccaaccggacacataaaccctg

SEQ ID NO: 1082849 - DNA, 25 bp, Homo sapien
ccatccaaccggacacataaaccct

SEQ ID NO: 1082850 - DNA, 25 bp, Homo sapien
gccatccaaccggacacataaaccc

SEQ ID NO: 1082851 - DNA, 25 bp, Homo sapien
ccattcccagacccaaagtgcccca

SEQ ID NO: 1082852 - DNA, 25 bp, Homo sapien
tcccagacccaaagtgccccatggc

SEQ ID NO: 1082853 - DNA, 25 bp, Homo sapien
cttgccattcccagacccaaagtgc

SEQ ID NO: 1082854 - DNA, 25 bp, Homo sapien
attcccagacccaaagtgccccatg

SEQ ID NO: 1082855 - DNA, 25 bp, Homo sapien
aaagattatgggatattgcgagcaa

SEQ ID NO: 1082856 - DNA, 25 bp, Homo sapien
aagattatgggatattgcgagcaaa

SEQ ID NO: 1082857 - DNA, 25 bp, Homo sapien
ttatgggatattgcgagcaaatggg

SEQ ID NO: 1082858 - DNA, 25 bp, Homo sapien
gattatgggatattgcgagcaaatg

SEQ ID NO: 1082859 - DNA, 25 bp, Homo sapien
tggactgcatataaaatggtggtcc

SEQ ID NO: 1082860 - DNA, 25 bp, Homo sapien
caagtgtgcattagcatgcttggct

SEQ ID NO: 1082861 - DNA, 25 bp, Homo sapien
tgcatataaaatggtggtcctataa

SEQ ID NO: 1082862 - DNA, 25 bp, Homo sapien
tcacagaagccttgaattaccaagc

SEQ ID NO: 1082863 - DNA, 25 bp, Homo sapien
ttcccacttttcatgtacagttgcc

SEQ ID NO: 1082864 - DNA, 25 bp, Homo sapien
acagcacatgagtggacctgtacag

SEQ ID NO: 1082865 - DNA, 25 bp, Homo sapien
gtacagttgcccatggttccccact

SEQ ID NO: 1082866 - DNA, 25 bp, Homo sapien
tcacacttgtgaataactacagcac

SEQ ID NO: 1082867 - DNA, 25 bp, Homo sapien
taaagttgagaagaatagtagaaag

SEQ ID NO: 1082868 - DNA, 25 bp, Homo sapien
ctgaaatagggagcataaaaaagca

SEQ ID NO: 1082869 - DNA, 25 bp, Homo sapien
tagggaacatagtctctggttatac

SEQ ID NO: 1082870 - DNA, 25 bp, Homo sapien
ctgatggtgtgaatcggtagtgtta

SEQ ID NO: 1082871 - DNA, 25 bp, Homo sapien
cattgtgacctagtaaatatgtgtg

SEQ ID NO: 1082872 - DNA, 25 bp, Homo sapien
gcctctaatccagtggctttaagaa

SEQ ID NO: 1082873 - DNA, 25 bp, Homo sapien
ccagcttctactgcttgaggctctc

SEQ ID NO: 1082874 - DNA, 25 bp, Homo sapien
cagcccagactgcatttctgtagca

SEQ ID NO: 1082875 - DNA, 25 bp, Homo sapien
ctggagcccagcatctttcagctcc

SEQ ID NO: 1082876 - DNA, 25 bp, Homo sapien
ggagcccagcatctttcagctccat

SEQ ID NO: 1082877 - DNA, 25 bp, Homo sapien
tggagcccagcatctttcagctcca

SEQ ID NO: 1082878 - DNA, 25 bp, Homo sapien
gccacacgaaatcaggaagactcag

SEQ ID NO: 1082879 - DNA, 25 bp, Homo sapien
tctcaaggacaattgggccgttacg

SEQ ID NO: 1082880 - DNA, 25 bp, Homo sapien
tccagtagcgggaccatattgccta

SEQ ID NO: 1082881 - DNA, 25 bp, Homo sapien
agtttcccggcaagctacacggtgg

SEQ ID NO: 1082882 - DNA, 25 bp, Homo sapien
caaaaggacatagcgtgtcctcgat

SEQ ID NO: 1082883 - DNA, 25 bp, Homo sapien
tcgaagccaaaaggacatagcgtgt

SEQ ID NO: 1082884 - DNA, 25 bp, Homo sapien
ctgcttcagctctgcgactttcggc

SEQ ID NO: 1082885 - DNA, 25 bp, Homo sapien
tcagctctgcgactttcggctccat

SEQ ID NO: 1082886 - DNA, 25 bp, Homo sapien
tgaaccctcaatgccgttcatgcca

SEQ ID NO: 1082887 - DNA, 25 bp, Homo sapien
atgccacagtccaactcatcctcaa

SEQ ID NO: 1082888 - DNA, 25 bp, Homo sapien
tcccaaccagcacttctttatcctt

SEQ ID NO: 1082889 - DNA, 25 bp, Homo sapien
aatgccgttcatgccacagtccaac

SEQ ID NO: 1082890 - DNA, 25 bp, Homo sapien
ctggaggcaagagttcattgtacca

SEQ ID NO: 1082891 - DNA, 25 bp, Homo sapien
ggaggcaagagttcattgtaccatg

SEQ ID NO: 1082892 - DNA, 25 bp, Homo sapien
gaggcaagagttcattgtaccatgc

SEQ ID NO: 1082893 - DNA, 25 bp, Homo sapien
gcaagagttcattgtaccatgccac

SEQ ID NO: 1082894 - DNA, 25 bp, Homo sapien
ggcaggcgtgctgagtaccaggaag

SEQ ID NO: 1082895 - DNA, 25 bp, Homo sapien
ctgagtaccaggaaggccagggtag

SEQ ID NO: 1082896 - DNA, 25 bp, Homo sapien
aggcgtgctgagtaccaggaaggcc

SEQ ID NO: 1082897 - DNA, 25 bp, Homo sapien
tgagtaccaggaaggccagggtagg

SEQ ID NO: 1082898 - DNA, 25 bp, Homo sapien
tctaacacggcccagatggtaggcc

SEQ ID NO: 1082899 - DNA, 25 bp, Homo sapien
tcagtcagcattcggaggtggcagc

SEQ ID NO: 1082900 - DNA, 25 bp, Homo sapien
ggccacacactggtccactgggtca

SEQ ID NO: 1082901 - DNA, 25 bp, Homo sapien
taacacggcccagatggtaggccac

SEQ ID NO: 1082902 - DNA, 25 bp, Homo sapien
ccccagctacatgggctgctgtctg

SEQ ID NO: 1082903 - DNA, 25 bp, Homo sapien
catcttgtcgttggtagtagtaagc

SEQ ID NO: 1082904 - DNA, 25 bp, Homo sapien
cctccacatcttgtcgttggtagta

SEQ ID NO: 1082905 - DNA, 25 bp, Homo sapien
cagcctccacatcttgtcgttggta

SEQ ID NO: 1082906 - DNA, 25 bp, Homo sapien
ggtgtcacagcatcccggtaagtcc

SEQ ID NO: 1082907 - DNA, 25 bp, Homo sapien
tcgagtagggcgatacggtcagctc

SEQ ID NO: 1082908 - DNA, 25 bp, Homo sapien
agatctggcacctctatccctggca

SEQ ID NO: 1082909 - DNA, 25 bp, Homo sapien
cggtaagtccaatcacgccagtgga

SEQ ID NO: 1082910 - DNA, 25 bp, Homo sapien
ctggggctgagccagctccgggctc

SEQ ID NO: 1082911 - DNA, 25 bp, Homo sapien
ctccgggctctgctgggattcccag

SEQ ID NO: 1082912 - DNA, 25 bp, Homo sapien
caggcttcttgggggcgggtgtggt

SEQ ID NO: 1082913 - DNA, 25 bp, Homo sapien
cggggagggagaactaggcttctct

SEQ ID NO: 1082914 - DNA, 25 bp, Homo sapien
ggccaggggatgcaggtggtgagac

SEQ ID NO: 1082915 - DNA, 25 bp, Homo sapien
gggccaggggatgcaggtggtgaga

SEQ ID NO: 1082916 - DNA, 25 bp, Homo sapien
tcaagggccaggggatgcaggtggt

SEQ ID NO: 1082917 - DNA, 25 bp, Homo sapien
aagggccaggggatgcaggtggtga

SEQ ID NO: 1082918 - DNA, 25 bp, Homo sapien
ctagcaagtaccaccataaatcagg

SEQ ID NO: 1082919 - DNA, 25 bp, Homo sapien
ccaccataaatcagggtccacatgg

SEQ ID NO: 1082920 - DNA, 25 bp, Homo sapien
aagtaccaccataaatcagggtcca

SEQ ID NO: 1082921 - DNA, 25 bp, Homo sapien
gcaagtaccaccataaatcagggtc

SEQ ID NO: 1082922 - DNA, 25 bp, Homo sapien
tatcttcatggaagatctctactat

SEQ ID NO: 1082923 - DNA, 25 bp, Homo sapien
tggaagatctctactatattatcaa

SEQ ID NO: 1082924 - DNA, 25 bp, Homo sapien
gtactcaaaaccttttgctttgcca

SEQ ID NO: 1082925 - DNA, 25 bp, Homo sapien
aatagtaatcttgtactcaaaacct

SEQ ID NO: 1082926 - DNA, 25 bp, Homo sapien
tcatttgaaggcagatgggaattct

SEQ ID NO: 1082927 - DNA, 25 bp, Homo sapien
tctggttccctggcctttatcttgg

SEQ ID NO: 1082928 - DNA, 25 bp, Homo sapien
tccctggcctttatcttggccaaac

SEQ ID NO: 1082929 - DNA, 25 bp, Homo sapien
gaattctggttccctggcctttatc

SEQ ID NO: 1082930 - DNA, 25 bp, Homo sapien
tctagaaccgactacacccatgagc

SEQ ID NO: 1082931 - DNA, 25 bp, Homo sapien
gtgtttattcagtccctacctgagg

SEQ ID NO: 1082932 - DNA, 25 bp, Homo sapien
catatgtcattgtcctcagagaggc

SEQ ID NO: 1082933 - DNA, 25 bp, Homo sapien
aaagttattctcctgggcccttgag

SEQ ID NO: 1082934 - DNA, 25 bp, Homo sapien
gagagctgcctccaaatcagggaat

SEQ ID NO: 1082935 - DNA, 25 bp, Homo sapien
tgttggccagagcactgcgactgac

SEQ ID NO: 1082936 - DNA, 25 bp, Homo sapien
taagccctgctatagtgttggccag

SEQ ID NO: 1082937 - DNA, 25 bp, Homo sapien
tcttctgataaatgcctggtacctg

SEQ ID NO: 1082938 - DNA, 25 bp, Homo sapien
gaatatttctccaagcagaagtgag

SEQ ID NO: 1082939 - DNA, 25 bp, Homo sapien
tgtggtgtcttacaaggcaggcctt

SEQ ID NO: 1082940 - DNA, 25 bp, Homo sapien
gggtggagagaccagcctttcttcc

SEQ ID NO: 1082941 - DNA, 25 bp, Homo sapien
tatgatgtattagtagagcaaccca

SEQ ID NO: 1082942 - DNA, 25 bp, Homo sapien
atcccactggaacatgtacagcctc

SEQ ID NO: 1082943 - DNA, 25 bp, Homo sapien
taccatttaagagccaatgaatgcc

SEQ ID NO: 1082944 - DNA, 25 bp, Homo sapien
catcccactggaacatgtacagcct

SEQ ID NO: 1082945 - DNA, 25 bp, Homo sapien
cagcctcttaaataggtaccattta

SEQ ID NO: 1082946 - DNA, 25 bp, Homo sapien
tgacacatggctcagctgacacctg

SEQ ID NO: 1082947 - DNA, 25 bp, Homo sapien
tataggttagtctcctgaacccagg

SEQ ID NO: 1082948 - DNA, 25 bp, Homo sapien
cagtgagcactgataaccaagaggt

SEQ ID NO: 1082949 - DNA, 25 bp, Homo sapien
cacctctagagataaagcatgccat

SEQ ID NO: 1082950 - DNA, 25 bp, Homo sapien
cctccttagcacagggtgtcaggct

SEQ ID NO: 1082951 - DNA, 25 bp, Homo sapien
ttactaatcctccttagcacagggt

SEQ ID NO: 1082952 - DNA, 25 bp, Homo sapien
agtgttcagcatacagaggatcccg

SEQ ID NO: 1082953 - DNA, 25 bp, Homo sapien
tttgttttaacaaagcatatcttgc

SEQ ID NO: 1082954 - DNA, 25 bp, Homo sapien
acaggaggccttttggatgcactgg

SEQ ID NO: 1082955 - DNA, 25 bp, Homo sapien
tataacgggccttgtccacctttgc

SEQ ID NO: 1082956 - DNA, 25 bp, Homo sapien
tggatgcactgggatctttgaactt

SEQ ID NO: 1082957 - DNA, 25 bp, Homo sapien
ctacaggaggccttttggatgcact

SEQ ID NO: 1082958 - DNA, 25 bp, Homo sapien
ccgcagcgcgggtttggagaactcc

SEQ ID NO: 1082959 - DNA, 25 bp, Homo sapien
cgcagcgcgggtttggagaactcct

SEQ ID NO: 1082960 - DNA, 25 bp, Homo sapien
aggtggcgctggccacgtgggcggt

SEQ ID NO: 1082961 - DNA, 25 bp, Homo sapien
agcgcgggtttggagaactcctggg

SEQ ID NO: 1082962 - DNA, 25 bp, Homo sapien
gctgggaggtagtaccgtctccacc

SEQ ID NO: 1082963 - DNA, 25 bp, Homo sapien
ctcgaggtcgaactggccggaactt

SEQ ID NO: 1082964 - DNA, 25 bp, Homo sapien
ctctggatcctcgaggtcgaactgg

SEQ ID NO: 1082965 - DNA, 25 bp, Homo sapien
ggtagtaccgtctccacctctggat

SEQ ID NO: 1082966 - DNA, 25 bp, Homo sapien
gtggcctgggctcagttctgcaccc

SEQ ID NO: 1082967 - DNA, 25 bp, Homo sapien
agcacagagcgtgaatagggtactg

SEQ ID NO: 1082968 - DNA, 25 bp, Homo sapien
gagatccaacgatcctcagcttaag

SEQ ID NO: 1082969 - DNA, 25 bp, Homo sapien
cataaaggatcacgcgcagggtgga

SEQ ID NO: 1082970 - DNA, 25 bp, Homo sapien
tcttgacaggttgagtttggccagc

SEQ ID NO: 1082971 - DNA, 25 bp, Homo sapien
tgaggaagtcgctgcctctgtcacc

SEQ ID NO: 1082972 - DNA, 25 bp, Homo sapien
gcatgggcaaaagaccgagagaccc

SEQ ID NO: 1082973 - DNA, 25 bp, Homo sapien
cacagtggcatgtagtttatagtcc

SEQ ID NO: 1082974 - DNA, 25 bp, Homo sapien
tgctcatccttcagctagcacttca

SEQ ID NO: 1082975 - DNA, 25 bp, Homo sapien
gctcatccttcagctagcacttcac

SEQ ID NO: 1082976 - DNA, 25 bp, Homo sapien
tcatccttcagctagcacttcacat

SEQ ID NO: 1082977 - DNA, 25 bp, Homo sapien
ctgctcatccttcagctagcacttc

SEQ ID NO: 1082978 - DNA, 25 bp, Homo sapien
accaatcagaggcatcttctgccca

SEQ ID NO: 1082979 - DNA, 25 bp, Homo sapien
tggaaacacggcatcagcagcagaa

SEQ ID NO: 1082980 - DNA, 25 bp, Homo sapien
aaagctcttgttgtgggtgcctgac

SEQ ID NO: 1082981 - DNA, 25 bp, Homo sapien
agtattcaagatccccacccgggtg

SEQ ID NO: 1082982 - DNA, 25 bp, Homo sapien
catacagggagttgtgtagacagac

SEQ ID NO: 1082983 - DNA, 25 bp, Homo sapien
gctaagggcatacttaacagctgct

SEQ ID NO: 1082984 - DNA, 25 bp, Homo sapien
cgctaagggcatacttaacagctgc

SEQ ID NO: 1082985 - DNA, 25 bp, Homo sapien
aagggcatacttaacagctgctttt

SEQ ID NO: 1082986 - DNA, 25 bp, Homo sapien
ctacgctaagggcatacttaacagc

SEQ ID NO: 1082987 - DNA, 25 bp, Homo sapien
ctcaggctcattgccgtagatagca

SEQ ID NO: 1082988 - DNA, 25 bp, Homo sapien
cttgcctggtcccacgtcctccttc

SEQ ID NO: 1082989 - DNA, 25 bp, Homo sapien
ctggtcccacgtcctccttcagggc

SEQ ID NO: 1082990 - DNA, 25 bp, Homo sapien
tctcaggctcattgccgtagatagc

SEQ ID NO: 1082991 - DNA, 25 bp, Homo sapien
tgttccacagcttggatgtcacaaa

SEQ ID NO: 1082992 - DNA, 25 bp, Homo sapien
ccacatcctcggggtggtgcttggt

SEQ ID NO: 1082993 - DNA, 25 bp, Homo sapien
ctccacatcctcggggtggtgcttg

SEQ ID NO: 1082994 - DNA, 25 bp, Homo sapien
gttccacagcttggatgtcacaaac

SEQ ID NO: 1082995 - DNA, 25 bp, Homo sapien
ggcataaggccagtgcatcaggtac

SEQ ID NO: 1082996 - DNA, 25 bp, Homo sapien
agtgcatcaggtacaggtccagata

SEQ ID NO: 1082997 - DNA, 25 bp, Homo sapien
caggtacaggtccagatactccagc

SEQ ID NO: 1082998 - DNA, 25 bp, Homo sapien
tcaaaggcataaggccagtgcatca

SEQ ID NO: 1082999 - DNA, 25 bp, Homo sapien
gctcctcagcttggcatgcaaatga

SEQ ID NO: 1083000 - DNA, 25 bp, Homo sapien
tccttccagatcgtaacccaggtgt

SEQ ID NO: 1083001 - DNA, 25 bp, Homo sapien
taagtttacatggaatgcctatgcc

SEQ ID NO: 1083002 - DNA, 25 bp, Homo sapien
gcagaagaggctaagatcccatgtc

SEQ ID NO: 1083003 - DNA, 25 bp, Homo sapien
gagtcgtagcatatagtcccatcag

SEQ ID NO: 1083004 - DNA, 25 bp, Homo sapien
cttgtagtgggtggagtcgtagcat

SEQ ID NO: 1083005 - DNA, 25 bp, Homo sapien
tgggtggagtcgtagcatatagtcc

SEQ ID NO: 1083006 - DNA, 25 bp, Homo sapien
cgtagcatatagtcccatcagcatt

SEQ ID NO: 1083007 - DNA, 25 bp, Homo sapien
cagccccttagccaccagtgcctcc

SEQ ID NO: 1083008 - DNA, 25 bp, Homo sapien
ccttagccaccagtgcctccagagc

SEQ ID NO: 1083009 - DNA, 25 bp, Homo sapien
agccccttagccaccagtgcctcca

SEQ ID NO: 1083010 - DNA, 25 bp, Homo sapien
ccccttagccaccagtgcctccaga

SEQ ID NO: 1083011 - DNA, 25 bp, Homo sapien
ctgttgaagttggacaggcccagcg

SEQ ID NO: 1083012 - DNA, 25 bp, Homo sapien
aagacagctggacgcacggaggcca

SEQ ID NO: 1083013 - DNA, 25 bp, Homo sapien
gaggccacactgagtatgtcatcaa

SEQ ID NO: 1083014 - DNA, 25 bp, Homo sapien
atgtcatcaatctgccgactgttga

SEQ ID NO: 1083015 - DNA, 25 bp, Homo sapien
tctcccttaagcagatccatcgtct

SEQ ID NO: 1083016 - DNA, 25 bp, Homo sapien
tgctcttgagcagacaacccctaaa

SEQ ID NO: 1083017 - DNA, 25 bp, Homo sapien
gaggacttctgcaccaacactctga

SEQ ID NO: 1083018 - DNA, 25 bp, Homo sapien
gacaacttgctagctatctccctta

SEQ ID NO: 1083019 - DNA, 25 bp, Homo sapien
tgagccaaagaataacccatcacca

SEQ ID NO: 1083020 - DNA, 25 bp, Homo sapien
caccatgaagtggtgacacccagct

SEQ ID NO: 1083021 - DNA, 25 bp, Homo sapien
ctgagccaaagaataacccatcacc

SEQ ID NO: 1083022 - DNA, 25 bp, Homo sapien
ccatgaagtggtgacacccagcttg

SEQ ID NO: 1083023 - DNA, 25 bp, Homo sapien
ggatcacgccatgcacgatcagagg

SEQ ID NO: 1083024 - DNA, 25 bp, Homo sapien
gcccaaagggctataagcagttacc

SEQ ID NO: 1083025 - DNA, 25 bp, Homo sapien
tctgagctggagatcggccatactt

SEQ ID NO: 1083026 - DNA, 25 bp, Homo sapien
gactactggttcctccagcaggaca

SEQ ID NO: 1083027 - DNA, 25 bp, Homo sapien
gcctccctccagatcacaaggcaag

SEQ ID NO: 1083028 - DNA, 25 bp, Homo sapien
aaaggggtcagtattcataagcact

SEQ ID NO: 1083029 - DNA, 25 bp, Homo sapien
gtcagtattcataagcactattttg

SEQ ID NO: 1083030 - DNA, 25 bp, Homo sapien
tattcataagcactattttgttccc

SEQ ID NO: 1083031 - DNA, 25 bp, Homo sapien
ttgatgttctgaaggattcgagaag

SEQ ID NO: 1083032 - DNA, 25 bp, Homo sapien
ggatgcagatcactttccgctggac

SEQ ID NO: 1083033 - DNA, 25 bp, Homo sapien
tgttctgaaggattcgagaaggagt

SEQ ID NO: 1083034 - DNA, 25 bp, Homo sapien
gagtgatacttttggggatgcagat

SEQ ID NO: 1083035 - DNA, 25 bp, Homo sapien
gaagctggggttccacaacactgcc

SEQ ID NO: 1083036 - DNA, 25 bp, Homo sapien
aaagccagctttgtgagcagaagct

SEQ ID NO: 1083037 - DNA, 25 bp, Homo sapien
agtggggttcaagaaagccagcttt

SEQ ID NO: 1083038 - DNA, 25 bp, Homo sapien
gctggggttccacaacactgccttt

SEQ ID NO: 1083039 - DNA, 25 bp, Homo sapien
cgtaagcataggcacaatatatctc

SEQ ID NO: 1083040 - DNA, 25 bp, Homo sapien
tgttcagggcatttagctgcttcat

SEQ ID NO: 1083041 - DNA, 25 bp, Homo sapien
aatttttgttcagggcatttagctg

SEQ ID NO: 1083042 - DNA, 25 bp, Homo sapien
caatatatctccaatttttgttcag

SEQ ID NO: 1083043 - DNA, 25 bp, Homo sapien
gagtgaggtcaacaacgccttctgg

SEQ ID NO: 1083044 - DNA, 25 bp, Homo sapien
catcagcaggagttgccattccaaa

SEQ ID NO: 1083045 - DNA, 25 bp, Homo sapien
cagtctgaactgagatcaagaggcc

SEQ ID NO: 1083046 - DNA, 25 bp, Homo sapien
gaactgggctcattttacacatagg

SEQ ID NO: 1083047 - DNA, 25 bp, Homo sapien
ggtcattaaaggggtacagaggatg

SEQ ID NO: 1083048 - DNA, 25 bp, Homo sapien
cattaaaggggtacagaggatgccc

SEQ ID NO: 1083049 - DNA, 25 bp, Homo sapien
gatgccctgcatcccttgggactct

SEQ ID NO: 1083050 - DNA, 25 bp, Homo sapien
attaaaggggtacagaggatgccct

SEQ ID NO: 1083051 - DNA, 25 bp, Homo sapien
ttgtggcaggacctcattagctgca

SEQ ID NO: 1083052 - DNA, 25 bp, Homo sapien
gcaggacctcattagctgcagagct

SEQ ID NO: 1083053 - DNA, 25 bp, Homo sapien
gtggcaggacctcattagctgcaga

SEQ ID NO: 1083054 - DNA, 25 bp, Homo sapien
gttgtggcaggacctcattagctgc

SEQ ID NO: 1083055 - DNA, 25 bp, Homo sapien
aaaaggtcttctctaagagtccttg

SEQ ID NO: 1083056 - DNA, 25 bp, Homo sapien
cactttctaactggcccagagttcc

SEQ ID NO: 1083057 - DNA, 25 bp, Homo sapien
gtccttgtggaaaagagttgcatca

SEQ ID NO: 1083058 - DNA, 25 bp, Homo sapien
ttctaactggcccagagttccaagt

SEQ ID NO: 1083059 - DNA, 25 bp, Homo sapien
gactttctctccgtcctctgagtcg

SEQ ID NO: 1083060 - DNA, 25 bp, Homo sapien
tagactttctctccgtcctctgagt

SEQ ID NO: 1083061 - DNA, 25 bp, Homo sapien
ttagactttctctccgtcctctgag

SEQ ID NO: 1083062 - DNA, 25 bp, Homo sapien
tttctctccgtcctctgagtcgtaa

SEQ ID NO: 1083063 - DNA, 25 bp, Homo sapien
catccacttccggatcctccccctc

SEQ ID NO: 1083064 - DNA, 25 bp, Homo sapien
atccacttccggatcctccccctcg

SEQ ID NO: 1083065 - DNA, 25 bp, Homo sapien
gaggacccttcgccccgcccatcca

SEQ ID NO: 1083066 - DNA, 25 bp, Homo sapien
tatatacgaggacccttcgccccgc

SEQ ID NO: 1083067 - DNA, 25 bp, Homo sapien
aaaaacaggcaatttgggacgccag

SEQ ID NO: 1083068 - DNA, 25 bp, Homo sapien
tttgggacgccagagactcactcag

SEQ ID NO: 1083069 - DNA, 25 bp, Homo sapien
ggcaatttgggacgccagagactca

SEQ ID NO: 1083070 - DNA, 25 bp, Homo sapien
aaacaggcaatttgggacgccagag

SEQ ID NO: 1083071 - DNA, 25 bp, Homo sapien
cgttcccctgaggtggcgaaccagc

SEQ ID NO: 1083072 - DNA, 25 bp, Homo sapien
ggtggcgaaccagcgaacggaatag

SEQ ID NO: 1083073 - DNA, 25 bp, Homo sapien
tggcgaaccagcgaacggaatagag

SEQ ID NO: 1083074 - DNA, 25 bp, Homo sapien
ggcgaaccagcgaacggaatagagc

SEQ ID NO: 1083075 - DNA, 25 bp, Homo sapien
gacggcggcagtggctgtggactcc

SEQ ID NO: 1083076 - DNA, 25 bp, Homo sapien
ttgtcggcagaaaccagctccgcgg

SEQ ID NO: 1083077 - DNA, 25 bp, Homo sapien
gcagaaaccagctccgcggcgacgg

SEQ ID NO: 1083078 - DNA, 25 bp, Homo sapien
tcggcagaaaccagctccgcggcga

SEQ ID NO: 1083079 - DNA, 25 bp, Homo sapien
tggccagtgccttaagctttccaca

SEQ ID NO: 1083080 - DNA, 25 bp, Homo sapien
tcccgaacagcgacagctgctcttg

SEQ ID NO: 1083081 - DNA, 25 bp, Homo sapien
tgctcttgggaaggcaagtactccc

SEQ ID NO: 1083082 - DNA, 25 bp, Homo sapien
gcaggcgaaggatacagccgccgct

SEQ ID NO: 1083083 - DNA, 25 bp, Homo sapien
tatctgcagatgtagaaggagcagg

SEQ ID NO: 1083084 - DNA, 25 bp, Homo sapien
tttatctgcagatgtagaaggagca

SEQ ID NO: 1083085 - DNA, 25 bp, Homo sapien
ctctccactttatctgcagatgtag

SEQ ID NO: 1083086 - DNA, 25 bp, Homo sapien
gcagatgtagaaggagcaggaacat

SEQ ID NO: 1083087 - DNA, 25 bp, Homo sapien
tctaacagtaataattctcaatctt

SEQ ID NO: 1083088 - DNA, 25 bp, Homo sapien
gaaaaatataattcgggtgggcaca

SEQ ID NO: 1083089 - DNA, 25 bp, Homo sapien
aattttatctcaagctcaacaaata

SEQ ID NO: 1083090 - DNA, 25 bp, Homo sapien
gactccgcttcgaaaaatataattc

SEQ ID NO: 1083091 - DNA, 25 bp, Homo sapien
ggttagttgtactgtataatctgaa

SEQ ID NO: 1083092 - DNA, 25 bp, Homo sapien
cagcacttgaccaacaagtggtaat

SEQ ID NO: 1083093 - DNA, 25 bp, Homo sapien
aaaggttagttgtactgtataatct

SEQ ID NO: 1083094 - DNA, 25 bp, Homo sapien
ccacagcacttgaccaacaagtggt

SEQ ID NO: 1083095 - DNA, 25 bp, Homo sapien
ttctacaaaatgcaacccatcttca

SEQ ID NO: 1083096 - DNA, 25 bp, Homo sapien
cttagcttcactatccacatccaga

SEQ ID NO: 1083097 - DNA, 25 bp, Homo sapien
tcttagcttcactatccacatccag

SEQ ID NO: 1083098 - DNA, 25 bp, Homo sapien
tggaatgcattgacagctgctggaa

SEQ ID NO: 1083099 - DNA, 25 bp, Homo sapien
ggaatgcattgacagctgctggaat

SEQ ID NO: 1083100 - DNA, 25 bp, Homo sapien
gaatgcattgacagctgctggaata

SEQ ID NO: 1083101 - DNA, 25 bp, Homo sapien
cctgttgcttgacgatttaacttgc

SEQ ID NO: 1083102 - DNA, 25 bp, Homo sapien
gatataggtctatatggctacctgg

SEQ ID NO: 1083103 - DNA, 25 bp, Homo sapien
ttttctctcagataatggaggtaca

SEQ ID NO: 1083104 - DNA, 25 bp, Homo sapien
gaggaaactcaaacctcgccataga

SEQ ID NO: 1083105 - DNA, 25 bp, Homo sapien
tccagaagtgatttcccatagaaaa

SEQ ID NO: 1083106 - DNA, 25 bp, Homo sapien
tatcattattttctaccagagattc

SEQ ID NO: 1083107 - DNA, 25 bp, Homo sapien
atcattattttctaccagagattca

SEQ ID NO: 1083108 - DNA, 25 bp, Homo sapien
cattattttctaccagagattcatc

SEQ ID NO: 1083109 - DNA, 25 bp, Homo sapien
tcattattttctaccagagattcat

SEQ ID NO: 1083110 - DNA, 25 bp, Homo sapien
caacgtcgcatctcttgaatgtcac

SEQ ID NO: 1083111 - DNA, 25 bp, Homo sapien
tacaagaaatatacaacgtcgcatc

SEQ ID NO: 1083112 - DNA, 25 bp, Homo sapien
tcttgaatgtcacatgcaactccac

SEQ ID NO: 1083113 - DNA, 25 bp, Homo sapien
ttccaccactgtatacaagaaatat

SEQ ID NO: 1083114 - DNA, 25 bp, Homo sapien
tcagcagatggcctaaaaattatct

SEQ ID NO: 1083115 - DNA, 25 bp, Homo sapien
tcccggctagcagagcaacttactg

SEQ ID NO: 1083116 - DNA, 25 bp, Homo sapien
catgaagcataaacatgtcttcgag

SEQ ID NO: 1083117 - DNA, 25 bp, Homo sapien
gcaaaagaaacccaagcttgttaca

SEQ ID NO: 1083118 - DNA, 25 bp, Homo sapien
agttgttcaagaaccgcctttcctg

SEQ ID NO: 1083119 - DNA, 25 bp, Homo sapien
ctaccagttgttcaagaaccgcctt

SEQ ID NO: 1083120 - DNA, 25 bp, Homo sapien
cctaccagttgttcaagaaccgcct

SEQ ID NO: 1083121 - DNA, 25 bp, Homo sapien
cagttgttcaagaaccgcctttcct

SEQ ID NO: 1083122 - DNA, 25 bp, Homo sapien
tgcccaggcttttcagagacttctg

SEQ ID NO: 1083123 - DNA, 25 bp, Homo sapien
gacagcttagtctcctcctgactag

SEQ ID NO: 1083124 - DNA, 25 bp, Homo sapien
tccctgggctaccttggtatcaacc

SEQ ID NO: 1083125 - DNA, 25 bp, Homo sapien
tcagactcttctacagacagcttag

SEQ ID NO: 1083126 - DNA, 25 bp, Homo sapien
tgcagctcttgcatatcccggttac

SEQ ID NO: 1083127 - DNA, 25 bp, Homo sapien
ctgcagctcttgcatatcccggtta

SEQ ID NO: 1083128 - DNA, 25 bp, Homo sapien
ttagtgagtcaaatccagaatgtac

SEQ ID NO: 1083129 - DNA, 25 bp, Homo sapien
tccagaggcatgcaagtgaacatcc

SEQ ID NO: 1083130 - DNA, 25 bp, Homo sapien
gcttcccaacgcacagaaaaggagt

SEQ ID NO: 1083131 - DNA, 25 bp, Homo sapien
aatgatagcaaaagtcagacgtgcc

SEQ ID NO: 1083132 - DNA, 25 bp, Homo sapien
aacaagttactgatagctagccaag

SEQ ID NO: 1083133 - DNA, 25 bp, Homo sapien
taatatattcaaggcagatctgggt

SEQ ID NO: 1083134 - DNA, 25 bp, Homo sapien
cgagttttcgaacaatctgtaaggg

SEQ ID NO: 1083135 - DNA, 25 bp, Homo sapien
cgacaaaatttctaagcagtgggtg

SEQ ID NO: 1083136 - DNA, 25 bp, Homo sapien
taacttgggcaatactacctatcac

SEQ ID NO: 1083137 - DNA, 25 bp, Homo sapien
aagcccggacccacttggaaatgtg

SEQ ID NO: 1083138 - DNA, 25 bp, Homo sapien
gagcaagacccgattcaaagagaaa

SEQ ID NO: 1083139 - DNA, 25 bp, Homo sapien
aatactttaacagggtcaggcgcgg

SEQ ID NO: 1083140 - DNA, 25 bp, Homo sapien
caattaggacttagagcaatcgtca

SEQ ID NO: 1083141 - DNA, 25 bp, Homo sapien
cacctctaaaatctgcagccatata

SEQ ID NO: 1083142 - DNA, 25 bp, Homo sapien
taatgacacctctaaaatctgcagc

SEQ ID NO: 1083143 - DNA, 25 bp, Homo sapien
ctaaaatctgcagccatatatcaac

SEQ ID NO: 1083144 - DNA, 25 bp, Homo sapien
ctttgctaatgacacctctaaaatc

SEQ ID NO: 1083145 - DNA, 25 bp, Homo sapien
tgagtaaggaatactataaccccta

SEQ ID NO: 1083146 - DNA, 25 bp, Homo sapien
catacagaatttgagtaaggaatac

SEQ ID NO: 1083147 - DNA, 25 bp, Homo sapien
gcacatacagaatttgagtaaggaa

SEQ ID NO: 1083148 - DNA, 25 bp, Homo sapien
gaatttgagtaaggaatactataac

SEQ ID NO: 1083149 - DNA, 25 bp, Homo sapien
cgtcagtgggtgcagtctagttcaa

SEQ ID NO: 1083150 - DNA, 25 bp, Homo sapien
gacaggccagatgctaatccaagtg

SEQ ID NO: 1083151 - DNA, 25 bp, Homo sapien
ctaatagcctgggaaagtacgaaag

SEQ ID NO: 1083152 - DNA, 25 bp, Homo sapien
gagactagctttcccacaacagaga

SEQ ID NO: 1083153 - DNA, 25 bp, Homo sapien
aaattcctcagtattgagaatataa

SEQ ID NO: 1083154 - DNA, 25 bp, Homo sapien
ttttcaaggactgaatcatttggca

SEQ ID NO: 1083155 - DNA, 25 bp, Homo sapien
tttcaaggactgaatcatttggcat

SEQ ID NO: 1083156 - DNA, 25 bp, Homo sapien
ccaggcaagctctaggttcccaatc

SEQ ID NO: 1083157 - DNA, 25 bp, Homo sapien
aggcaagctctaggttcccaatctc

SEQ ID NO: 1083158 - DNA, 25 bp, Homo sapien
caggcaagctctaggttcccaatct

SEQ ID NO: 1083159 - DNA, 25 bp, Homo sapien
ggcaagctctaggttcccaatctcc

SEQ ID NO: 1083160 - DNA, 25 bp, Homo sapien
ttctccgagtttaagatgtgcctgg

SEQ ID NO: 1083161 - DNA, 25 bp, Homo sapien
tctccgagtttaagatgtgcctggg

SEQ ID NO: 1083162 - DNA, 25 bp, Homo sapien
gagaatctattagaggaagaacgag

SEQ ID NO: 1083163 - DNA, 25 bp, Homo sapien
ttaaagatcaagttcggttccagag

SEQ ID NO: 1083164 - DNA, 25 bp, Homo sapien
gaagaacgagggagctgaagagagt

SEQ ID NO: 1083165 - DNA, 25 bp, Homo sapien
agagagtaggagagtataaaatgga

SEQ ID NO: 1083166 - DNA, 25 bp, Homo sapien
aactcctccacagcttgcacatagt

SEQ ID NO: 1083167 - DNA, 25 bp, Homo sapien
gaactcctccacagcttgcacatag

SEQ ID NO: 1083168 - DNA, 25 bp, Homo sapien
agctacattcccactacgctgagac

SEQ ID NO: 1083169 - DNA, 25 bp, Homo sapien
ttcccactacgctgagactcctttg

SEQ ID NO: 1083170 - DNA, 25 bp, Homo sapien
acattcccactacgctgagactcct

SEQ ID NO: 1083171 - DNA, 25 bp, Homo sapien
tcagctacattcccactacgctgag

SEQ ID NO: 1083172 - DNA, 25 bp, Homo sapien
ggagtgaaacctgaagtagaactct

SEQ ID NO: 1083173 - DNA, 25 bp, Homo sapien
ctcctccaccaggagtgaaacctga

SEQ ID NO: 1083174 - DNA, 25 bp, Homo sapien
caggagtgaaacctgaagtagaact

SEQ ID NO: 1083175 - DNA, 25 bp, Homo sapien
tccaccaggagtgaaacctgaagta

SEQ ID NO: 1083176 - DNA, 25 bp, Homo sapien
aaatatcagtcacacaatttgatga

SEQ ID NO: 1083177 - DNA, 25 bp, Homo sapien
aatatcagtcacacaatttgatgag

SEQ ID NO: 1083178 - DNA, 25 bp, Homo sapien
gaaatatcagtcacacaatttgatg

SEQ ID NO: 1083179 - DNA, 25 bp, Homo sapien
cagaatgtattaatctgtcccacca

SEQ ID NO: 1083180 - DNA, 25 bp, Homo sapien
cttaacccttgtggtgcaaagatcc

SEQ ID NO: 1083181 - DNA, 25 bp, Homo sapien
gcagatgccaacctgtactctcaga

SEQ ID NO: 1083182 - DNA, 25 bp, Homo sapien
gattcacagctctaagggtctctct

SEQ ID NO: 1083183 - DNA, 25 bp, Homo sapien
cacctccggctcttgtttggctttc

SEQ ID NO: 1083184 - DNA, 25 bp, Homo sapien
tgcatcatctttccggggactctct

SEQ ID NO: 1083185 - DNA, 25 bp, Homo sapien
tgcctccgttcacctccggctcttg

SEQ ID NO: 1083186 - DNA, 25 bp, Homo sapien
cctccatgttttccgaaacttcatt

SEQ ID NO: 1083187 - DNA, 25 bp, Homo sapien
gcatgagtgagcctagtttaagcca

SEQ ID NO: 1083188 - DNA, 25 bp, Homo sapien
tacaggttccatttgtcagtgagtc

SEQ ID NO: 1083189 - DNA, 25 bp, Homo sapien
ctgaggcctcagtcataggaagcat

SEQ ID NO: 1083190 - DNA, 25 bp, Homo sapien
catcacgtggaaggaagtgacctaa

SEQ ID NO: 1083191 - DNA, 25 bp, Homo sapien
gctgcccggctttcagcctgattct

SEQ ID NO: 1083192 - DNA, 25 bp, Homo sapien
ccactgctgcccggctttcagcctg

SEQ ID NO: 1083193 - DNA, 25 bp, Homo sapien
ttaacatgcagtgctttcaactgta

SEQ ID NO: 1083194 - DNA, 25 bp, Homo sapien
actgctgcccggctttcagcctgat

SEQ ID NO: 1083195 - DNA, 25 bp, Homo sapien
tgaagttatacaaaaagaatcctcc

SEQ ID NO: 1083196 - DNA, 25 bp, Homo sapien
cattatatacaaaaacactttccct

SEQ ID NO: 1083197 - DNA, 25 bp, Homo sapien
tacaaaaagaatcctccaaaagtga

SEQ ID NO: 1083198 - DNA, 25 bp, Homo sapien
acactttcccttgggaggagggctg

SEQ ID NO: 1083199 - DNA, 25 bp, Homo sapien
caaatgcagaccgttttccttagga

SEQ ID NO: 1083200 - DNA, 25 bp, Homo sapien
ttaggaatcattcccctgacccagg

SEQ ID NO: 1083201 - DNA, 25 bp, Homo sapien
ccagcagtgctccaaggcagattca

SEQ ID NO: 1083202 - DNA, 25 bp, Homo sapien
cacagatcagtacagaaggccagaa

SEQ ID NO: 1083203 - DNA, 25 bp, Homo sapien
gctgctcgggtaactttagccctta

SEQ ID NO: 1083204 - DNA, 25 bp, Homo sapien
tatcccaaagagagagcaattggct

SEQ ID NO: 1083205 - DNA, 25 bp, Homo sapien
gagacactggtctgcagcaacagct

SEQ ID NO: 1083206 - DNA, 25 bp, Homo sapien
acagcttctactaccagcccttggg

SEQ ID NO: 1083207 - DNA, 25 bp, Homo sapien
ccttggacagtgtggtaactcagta

SEQ ID NO: 1083208 - DNA, 25 bp, Homo sapien
tgcagagttgagtagacgggcctcc

SEQ ID NO: 1083209 - DNA, 25 bp, Homo sapien
agagtgacagaatgggcccagaccc

SEQ ID NO: 1083210 - DNA, 25 bp, Homo sapien
cactttgtgggctatcaggattaca

SEQ ID NO: 1083211 - DNA, 25 bp, Homo sapien
tatcgttgttcatgctagctggcca

SEQ ID NO: 1083212 - DNA, 25 bp, Homo sapien
taatccagattgagctgcagagaga

SEQ ID NO: 1083213 - DNA, 25 bp, Homo sapien
cagataaaagcggtagggagaagat

SEQ ID NO: 1083214 - DNA, 25 bp, Homo sapien
ttccagaacaaagcccgtcactgag

SEQ ID NO: 1083215 - DNA, 25 bp, Homo sapien
ttaccagtatagaccagaattgccc

SEQ ID NO: 1083216 - DNA, 25 bp, Homo sapien
taagataaaaagtacgcaccagaca

SEQ ID NO: 1083217 - DNA, 25 bp, Homo sapien
catgaacaatagtgcaaggctgctg

SEQ ID NO: 1083218 - DNA, 25 bp, Homo sapien
cagaataacttcactacagggacag

SEQ ID NO: 1083219 - DNA, 25 bp, Homo sapien
tgtaatccaggtttgagaactgctg

SEQ ID NO: 1083220 - DNA, 25 bp, Homo sapien
gattctcgtgatttagcctcttgag

SEQ ID NO: 1083221 - DNA, 25 bp, Homo sapien
ttaagatgggttttgctaaggaaca

SEQ ID NO: 1083222 - DNA, 25 bp, Homo sapien
ggaacatgtaaacagtgtaagccat

SEQ ID NO: 1083223 - DNA, 25 bp, Homo sapien
ccagaagtgagagatgcaaagatgc

SEQ ID NO: 1083224 - DNA, 25 bp, Homo sapien
caaggaccgtttggagttcattcca

SEQ ID NO: 1083225 - DNA, 25 bp, Homo sapien
tgctggacccctggcagctagagct

SEQ ID NO: 1083226 - DNA, 25 bp, Homo sapien
gcagtttcctaagcaggctcttcct

SEQ ID NO: 1083227 - DNA, 25 bp, Homo sapien
ggttgccagccattacacggtttag

SEQ ID NO: 1083228 - DNA, 25 bp, Homo sapien
tgaagttctattccagggctcccag

SEQ ID NO: 1083229 - DNA, 25 bp, Homo sapien
taagcgcttttagtcgagctaggcc

SEQ ID NO: 1083230 - DNA, 25 bp, Homo sapien
gacttcaggtaggagaaacggcact

SEQ ID NO: 1083231 - DNA, 25 bp, Homo sapien
ccctattgaaagtcttgttcaggaa

SEQ ID NO: 1083232 - DNA, 25 bp, Homo sapien
gattaacatgttacagctaagcaga

SEQ ID NO: 1083233 - DNA, 25 bp, Homo sapien
gatgaagcgaagcatactggcccct

SEQ ID NO: 1083234 - DNA, 25 bp, Homo sapien
caggtagttctgattaacatgttac

SEQ ID NO: 1083235 - DNA, 25 bp, Homo sapien
cctccatcacctgaatatacaaggg

SEQ ID NO: 1083236 - DNA, 25 bp, Homo sapien
gggctataggcgtgtgaccccatgc

SEQ ID NO: 1083237 - DNA, 25 bp, Homo sapien
gcacccagcctgatataataaacat

SEQ ID NO: 1083238 - DNA, 25 bp, Homo sapien
ctgacctagcccaagcaatatttgg

SEQ ID NO: 1083239 - DNA, 25 bp, Homo sapien
ttttgctggagagacatcttgagag

SEQ ID NO: 1083240 - DNA, 25 bp, Homo sapien
agttttgctggagagacatcttgag

SEQ ID NO: 1083241 - DNA, 25 bp, Homo sapien
tgctggttcttagtcccactgggaa

SEQ ID NO: 1083242 - DNA, 25 bp, Homo sapien
tgaggaaagccaaggccttggacat

SEQ ID NO: 1083243 - DNA, 25 bp, Homo sapien
ctgcagggggatgtatgatagcact

SEQ ID NO: 1083244 - DNA, 25 bp, Homo sapien
tgtgtcttgctcatatacgctggaa

SEQ ID NO: 1083245 - DNA, 25 bp, Homo sapien
actgtgtcttgctcatatacgctgg

SEQ ID NO: 1083246 - DNA, 25 bp, Homo sapien
tcttgctcatatacgctggaaatga

SEQ ID NO: 1083247 - DNA, 25 bp, Homo sapien
tctgatcccacccaagaaagatagg

SEQ ID NO: 1083248 - DNA, 25 bp, Homo sapien
taaagtgactactatcctcagggct

SEQ ID NO: 1083249 - DNA, 25 bp, Homo sapien
ggtttggctggactaccttctggta

SEQ ID NO: 1083250 - DNA, 25 bp, Homo sapien
tcctgccagagttacacataatgct

SEQ ID NO: 1083251 - DNA, 25 bp, Homo sapien
gggaagacagaaaagatcacacaca

SEQ ID NO: 1083252 - DNA, 25 bp, Homo sapien
ttcccagatggtcaggcggccaggc

SEQ ID NO: 1083253 - DNA, 25 bp, Homo sapien
ctcacttcccagacttttatatttt

SEQ ID NO: 1083254 - DNA, 25 bp, Homo sapien
aggcgcttgtcacacttcccagatg

SEQ ID NO: 1083255 - DNA, 25 bp, Homo sapien
gagatgaaaagtacttgtcagggat

SEQ ID NO: 1083256 - DNA, 25 bp, Homo sapien
taatatactatgagatgaaaagtac

SEQ ID NO: 1083257 - DNA, 25 bp, Homo sapien
aatgtttaagtggataactatatta

SEQ ID NO: 1083258 - DNA, 25 bp, Homo sapien
gaagataaattaccattggtgtggg

SEQ ID NO: 1083259 - DNA, 25 bp, Homo sapien
taaaagatgtagaactagaccagcc

SEQ ID NO: 1083260 - DNA, 25 bp, Homo sapien
tgaaaatctaaggtgttgcttttgc

SEQ ID NO: 1083261 - DNA, 25 bp, Homo sapien
tagagactacgttttcaagtgaaaa

SEQ ID NO: 1083262 - DNA, 25 bp, Homo sapien
tttttctccaccttaagtagagtga

SEQ ID NO: 1083263 - DNA, 25 bp, Homo sapien
caaactgtagtaggattgcacaagt

SEQ ID NO: 1083264 - DNA, 25 bp, Homo sapien
tatgcttctaagtatcctgccaatg

SEQ ID NO: 1083265 - DNA, 25 bp, Homo sapien
cagattgagactgagtggaaacatc

SEQ ID NO: 1083266 - DNA, 25 bp, Homo sapien
ggcattctgggttaccaaactgtag

SEQ ID NO: 1083267 - DNA, 25 bp, Homo sapien
gggtacactgccaaacgactggagt

SEQ ID NO: 1083268 - DNA, 25 bp, Homo sapien
tctgatccaattggccatccctttc

SEQ ID NO: 1083269 - DNA, 25 bp, Homo sapien
ctggagtggcacttgcgctctgatc

SEQ ID NO: 1083270 - DNA, 25 bp, Homo sapien
ttttttcagtcagtcggccctatcc

SEQ ID NO: 1083271 - DNA, 25 bp, Homo sapien
tatgccaactcctgatccaatatgt

SEQ ID NO: 1083272 - DNA, 25 bp, Homo sapien
tttggactaaggaacccatcctcag

SEQ ID NO: 1083273 - DNA, 25 bp, Homo sapien
tgggttgaacaaggactggatatgc

SEQ ID NO: 1083274 - DNA, 25 bp, Homo sapien
tctcaagaggagatagattatgctc

SEQ ID NO: 1083275 - DNA, 25 bp, Homo sapien
tttttcaccttgccaccaacatcag

SEQ ID NO: 1083276 - DNA, 25 bp, Homo sapien
ttctctttagcatctggcttctcaa

SEQ ID NO: 1083277 - DNA, 25 bp, Homo sapien
ccctttttcaccttgccaccaacat

SEQ ID NO: 1083278 - DNA, 25 bp, Homo sapien
caacatcagccttcttggctttggg

SEQ ID NO: 1083279 - DNA, 25 bp, Homo sapien
aaggacagggttgcggctgcaatgg

SEQ ID NO: 1083280 - DNA, 25 bp, Homo sapien
ttcctctgacaaggacagggttgcg

SEQ ID NO: 1083281 - DNA, 25 bp, Homo sapien
ttgcggctgcaatggggctttccct

SEQ ID NO: 1083282 - DNA, 25 bp, Homo sapien
gcggctgcaatggggctttcccttc

SEQ ID NO: 1083283 - DNA, 25 bp, Homo sapien
tggaatacatggcagatcggcaata

SEQ ID NO: 1083284 - DNA, 25 bp, Homo sapien
ctggaatacatggcagatcggcaat

SEQ ID NO: 1083285 - DNA, 25 bp, Homo sapien
ggaatacatggcagatcggcaatac

SEQ ID NO: 1083286 - DNA, 25 bp, Homo sapien
cctatggcatccagcgaggatgatg

SEQ ID NO: 1083287 - DNA, 25 bp, Homo sapien
gatgatgagaatggtcccgggagtg

SEQ ID NO: 1083288 - DNA, 25 bp, Homo sapien
gatgagaatggtcccgggagtgatg

SEQ ID NO: 1083289 - DNA, 25 bp, Homo sapien
atggcatccagcgaggatgatgaga

SEQ ID NO: 1083290 - DNA, 25 bp, Homo sapien
ttgccgatatcaattttggttgagg

SEQ ID NO: 1083291 - DNA, 25 bp, Homo sapien
caattttggttgaggtggcaatgac

SEQ ID NO: 1083292 - DNA, 25 bp, Homo sapien
attgccgatatcaattttggttgag

SEQ ID NO: 1083293 - DNA, 25 bp, Homo sapien
tatcaattttggttgaggtggcaat

SEQ ID NO: 1083294 - DNA, 25 bp, Homo sapien
gaggtacatgcctggtatgcttgtt

SEQ ID NO: 1083295 - DNA, 25 bp, Homo sapien
ttcaaagttaggcttgcagaggtac

SEQ ID NO: 1083296 - DNA, 25 bp, Homo sapien
tccagagtgcaggttgggataatct

SEQ ID NO: 1083297 - DNA, 25 bp, Homo sapien
taggggagaccatatgacccagttc

SEQ ID NO: 1083298 - DNA, 25 bp, Homo sapien
ggcgcgccgtcagcggctgcggact

SEQ ID NO: 1083299 - DNA, 25 bp, Homo sapien
ctggcgcgcagtcggaggaccagaa

SEQ ID NO: 1083300 - DNA, 25 bp, Homo sapien
cccaaaaatgagttcgagtcgatcg

SEQ ID NO: 1083301 - DNA, 25 bp, Homo sapien
cgagtcgatcggtgtcctcaaagaa

SEQ ID NO: 1083302 - DNA, 25 bp, Homo sapien
gcgccagcgaacggtcgcaaaggac

SEQ ID NO: 1083303 - DNA, 25 bp, Homo sapien
accatggccggacgggctccctaag

SEQ ID NO: 1083304 - DNA, 25 bp, Homo sapien
tcccacccagcacacgttgggcagg

SEQ ID NO: 1083305 - DNA, 25 bp, Homo sapien
aagagacagcatcgctgacgcctcg

SEQ ID NO: 1083306 - DNA, 25 bp, Homo sapien
tcctctgcgctcctcacggaagaga

SEQ ID NO: 1083307 - DNA, 25 bp, Homo sapien
ctccatcctcccggcggtcgggcgg

SEQ ID NO: 1083308 - DNA, 25 bp, Homo sapien
tccatcctcccggcggtcgggcggc

SEQ ID NO: 1083309 - DNA, 25 bp, Homo sapien
ctgctccttgccctcgggccccgcg

SEQ ID NO: 1083310 - DNA, 25 bp, Homo sapien
ccgcggggcccgtccgctcctccag

SEQ ID NO: 1083311 - DNA, 25 bp, Homo sapien
cggggcccgtccgctcctccagccg

SEQ ID NO: 1083312 - DNA, 25 bp, Homo sapien
tgctccttgccctcgggccccgcgg

SEQ ID NO: 1083313 - DNA, 25 bp, Homo sapien
gagcaggggactaactccagttact

SEQ ID NO: 1083314 - DNA, 25 bp, Homo sapien
cagtggatgaaaatatgtcaggatt

SEQ ID NO: 1083315 - DNA, 25 bp, Homo sapien
tatgtcaggattactgagtttcctg

SEQ ID NO: 1083316 - DNA, 25 bp, Homo sapien
cagttgtcgctgaagtttaactttt

SEQ ID NO: 1083317 - DNA, 25 bp, Homo sapien
gccaggtttcctctccataacttac

SEQ ID NO: 1083318 - DNA, 25 bp, Homo sapien
tagagagctggccaggtttcctctc

SEQ ID NO: 1083319 - DNA, 25 bp, Homo sapien
gatagagagctggccaggtttcctc

SEQ ID NO: 1083320 - DNA, 25 bp, Homo sapien
ccgatagagagctggccaggtttcc

SEQ ID NO: 1083321 - DNA, 25 bp, Homo sapien
caggccagcagtaagagaaggtgca

SEQ ID NO: 1083322 - DNA, 25 bp, Homo sapien
tgcttctcctgacgactgccaagtc

SEQ ID NO: 1083323 - DNA, 25 bp, Homo sapien
ggtttctcattcgaaccaggtttga

SEQ ID NO: 1083324 - DNA, 25 bp, Homo sapien
caggtttgatgcttctcctgacgac

SEQ ID NO: 1083325 - DNA, 25 bp, Homo sapien
ctcagagtgcaggaattagagacgt

SEQ ID NO: 1083326 - DNA, 25 bp, Homo sapien
cggccctcattcttatacatatact

SEQ ID NO: 1083327 - DNA, 25 bp, Homo sapien
ccatgatgtgccaaacaagttccct

SEQ ID NO: 1083328 - DNA, 25 bp, Homo sapien
tatgtataccacagagctgtaaacc

SEQ ID NO: 1083329 - DNA, 25 bp, Homo sapien
tatagccctaaactgctgtacttta

SEQ ID NO: 1083330 - DNA, 25 bp, Homo sapien
tccaagtccacatctatagccctaa

SEQ ID NO: 1083331 - DNA, 25 bp, Homo sapien
ctctggacatctaactcttgaaagg

SEQ ID NO: 1083332 - DNA, 25 bp, Homo sapien
ttaatccacagcttccaagtccaca

SEQ ID NO: 1083333 - DNA, 25 bp, Homo sapien
ctaatccttagcataaccagtgtgg

SEQ ID NO: 1083334 - DNA, 25 bp, Homo sapien
gctttgaataactaacggctggatt

SEQ ID NO: 1083335 - DNA, 25 bp, Homo sapien
tgtggtctttcattgtgagagctaa

SEQ ID NO: 1083336 - DNA, 25 bp, Homo sapien
gctaataaatccacatttccacgga

SEQ ID NO: 1083337 - DNA, 25 bp, Homo sapien
tactagtgcctacttactgctggat

SEQ ID NO: 1083338 - DNA, 25 bp, Homo sapien
tcttggacagtaacgaaagcctctt

SEQ ID NO: 1083339 - DNA, 25 bp, Homo sapien
gactcactggtcttcacttcttgga

SEQ ID NO: 1083340 - DNA, 25 bp, Homo sapien
gcactgccaaatagcggaaagactt

SEQ ID NO: 1083341 - DNA, 25 bp, Homo sapien
cctcttcttggaaggctcaactcct

SEQ ID NO: 1083342 - DNA, 25 bp, Homo sapien
ctgcctcttcttggaaggctcaact

SEQ ID NO: 1083343 - DNA, 25 bp, Homo sapien
gcctcttcttggaaggctcaactcc

SEQ ID NO: 1083344 - DNA, 25 bp, Homo sapien
ctcttcttggaaggctcaactcctt

SEQ ID NO: 1083345 - DNA, 25 bp, Homo sapien
tacatcagtgcttggttcccacagg

SEQ ID NO: 1083346 - DNA, 25 bp, Homo sapien
tgggctgaccaatcccgggtatgta

SEQ ID NO: 1083347 - DNA, 25 bp, Homo sapien
gaagttggctcccagatgaacaaag

SEQ ID NO: 1083348 - DNA, 25 bp, Homo sapien
cagagaagtacacctcacgtggacc

SEQ ID NO: 1083349 - DNA, 25 bp, Homo sapien
aggtgtaagccatcgcgctgggccg

SEQ ID NO: 1083350 - DNA, 25 bp, Homo sapien
atcgcgctgggccgggaaaagaaat

SEQ ID NO: 1083351 - DNA, 25 bp, Homo sapien
aagccatcgcgctgggccgggaaaa

SEQ ID NO: 1083352 - DNA, 25 bp, Homo sapien
taagccatcgcgctgggccgggaaa

SEQ ID NO: 1083353 - DNA, 25 bp, Homo sapien
cctaagagcccacgaggcagcagtg

SEQ ID NO: 1083354 - DNA, 25 bp, Homo sapien
cagcagtgggacagtgacaagttcc

SEQ ID NO: 1083355 - DNA, 25 bp, Homo sapien
acatgatcttcagaacacccctccc

SEQ ID NO: 1083356 - DNA, 25 bp, Homo sapien
caaaagacctaagagcccacgaggc

SEQ ID NO: 1083357 - DNA, 25 bp, Homo sapien
gcacaatcagcactaaatgggactt

SEQ ID NO: 1083358 - DNA, 25 bp, Homo sapien
aggagaagtagccaaagcacaatca

SEQ ID NO: 1083359 - DNA, 25 bp, Homo sapien
cagatgtgggtgaaaacatgtgctg

SEQ ID NO: 1083360 - DNA, 25 bp, Homo sapien
ctggaacaaggagtgccaggactgc

SEQ ID NO: 1083361 - DNA, 25 bp, Homo sapien
gagctagagtgggtatcatttcaag

SEQ ID NO: 1083362 - DNA, 25 bp, Homo sapien
tcagggctgacaaagtctatggcaa

SEQ ID NO: 1083363 - DNA, 25 bp, Homo sapien
gcaacaatttgtaaggtcctaagac

SEQ ID NO: 1083364 - DNA, 25 bp, Homo sapien
ccatctgagacacttaagagctagc

SEQ ID NO: 1083365 - DNA, 25 bp, Homo sapien
tcaagactcttcatggtatagcccc

SEQ ID NO: 1083366 - DNA, 25 bp, Homo sapien
taatttgtcccacccatcatcatgc

SEQ ID NO: 1083367 - DNA, 25 bp, Homo sapien
tccagtagtaaacaaggccatacca

SEQ ID NO: 1083368 - DNA, 25 bp, Homo sapien
tgaccaacagtgtccaaccccttgg

SEQ ID NO: 1083369 - DNA, 25 bp, Homo sapien
ggctcaaatccaagctatagtggca

SEQ ID NO: 1083370 - DNA, 25 bp, Homo sapien
aaaagaggtcttgtctgagacccca

SEQ ID NO: 1083371 - DNA, 25 bp, Homo sapien
gaagactgtcgctagaaaagaggtc

SEQ ID NO: 1083372 - DNA, 25 bp, Homo sapien
taaaatgtgggtggcttacacgtat

SEQ ID NO: 1083373 - DNA, 25 bp, Homo sapien
accattccacgggccgcacagtata

SEQ ID NO: 1083374 - DNA, 25 bp, Homo sapien
gggccgcacagtatacttctttaaa

SEQ ID NO: 1083375 - DNA, 25 bp, Homo sapien
cacgggccgcacagtatacttcttt

SEQ ID NO: 1083376 - DNA, 25 bp, Homo sapien
ttccacgggccgcacagtatacttc

SEQ ID NO: 1083377 - DNA, 25 bp, Homo sapien
gtgatgtgctagaggtcacaatcaa

SEQ ID NO: 1083378 - DNA, 25 bp, Homo sapien
caagctcttgcggttacttgtccga

SEQ ID NO: 1083379 - DNA, 25 bp, Homo sapien
tgagtgtggccgtggtagtgtaggt

SEQ ID NO: 1083380 - DNA, 25 bp, Homo sapien
tgtaggtgatgtgctagaggtcaca

SEQ ID NO: 1083381 - DNA, 25 bp, Homo sapien
tgcacaacatgagaagtaggaaaga

SEQ ID NO: 1083382 - DNA, 25 bp, Homo sapien
gcaggctaactcattctcgtacaga

SEQ ID NO: 1083383 - DNA, 25 bp, Homo sapien
caactaagagtcaaaagcaggctaa

SEQ ID NO: 1083384 - DNA, 25 bp, Homo sapien
gtgacaatgtaatatacggaactgc

SEQ ID NO: 1083385 - DNA, 25 bp, Homo sapien
ttagacgaaaaaccctctctgtgag

SEQ ID NO: 1083386 - DNA, 25 bp, Homo sapien
ttagtggactcctcatcaaatgacc

SEQ ID NO: 1083387 - DNA, 25 bp, Homo sapien
taatccttgggcacggtagtacaaa

SEQ ID NO: 1083388 - DNA, 25 bp, Homo sapien
tcaaatgacccaagacgaatggagc

SEQ ID NO: 1083389 - DNA, 25 bp, Homo sapien
gggcaacagagagagattctgtttc

SEQ ID NO: 1083390 - DNA, 25 bp, Homo sapien
gcaacagagagagattctgtttcaa

SEQ ID NO: 1083391 - DNA, 25 bp, Homo sapien
tgggcaacagagagagattctgttt

SEQ ID NO: 1083392 - DNA, 25 bp, Homo sapien
ggcaacagagagagattctgtttca

SEQ ID NO: 1083393 - DNA, 25 bp, Homo sapien
cagttgaccttgaatcagctgcttc

SEQ ID NO: 1083394 - DNA, 25 bp, Homo sapien
tcaaaggtaagtgatgattcatccc

SEQ ID NO: 1083395 - DNA, 25 bp, Homo sapien
taagaatcgattttagcagctggag

SEQ ID NO: 1083396 - DNA, 25 bp, Homo sapien
gctggaggagacagttcaaaggtaa

SEQ ID NO: 1083397 - DNA, 25 bp, Homo sapien
tggagagaaattccgggggctgtcc

SEQ ID NO: 1083398 - DNA, 25 bp, Homo sapien
gagagaaattccgggggctgtccaa

SEQ ID NO: 1083399 - DNA, 25 bp, Homo sapien
attccgggggctgtccaaaggactg

SEQ ID NO: 1083400 - DNA, 25 bp, Homo sapien
ttggagagaaattccgggggctgtc

SEQ ID NO: 1083401 - DNA, 25 bp, Homo sapien
acaaaagaaaagtgagcaggtgcat

SEQ ID NO: 1083402 - DNA, 25 bp, Homo sapien
aggaacaaaagaaaagtgagcaggt

SEQ ID NO: 1083403 - DNA, 25 bp, Homo sapien
cgggcaggaacaaaagaaaagtgag

SEQ ID NO: 1083404 - DNA, 25 bp, Homo sapien
gaacaaaagaaaagtgagcaggtgc

SEQ ID NO: 1083405 - DNA, 25 bp, Homo sapien
tattgtctggccatgcatagcagtt

SEQ ID NO: 1083406 - DNA, 25 bp, Homo sapien
ccctctccccattatacccgctatt

SEQ ID NO: 1083407 - DNA, 25 bp, Homo sapien
cagagaagaatcatcacaaccagtt

SEQ ID NO: 1083408 - DNA, 25 bp, Homo sapien
caacatcacaaaccatattgtctgg

SEQ ID NO: 1083409 - DNA, 25 bp, Homo sapien
tataggctataactctgctggaacc

SEQ ID NO: 1083410 - DNA, 25 bp, Homo sapien
tgtgaaggctccgtgttaagggctc

SEQ ID NO: 1083411 - DNA, 25 bp, Homo sapien
tgaggttcagacatgtccaggaagg

SEQ ID NO: 1083412 - DNA, 25 bp, Homo sapien
ggttccaggaaatagctcagcaaag

SEQ ID NO: 1083413 - DNA, 25 bp, Homo sapien
gccaaagaccagcgccgcccatcag

SEQ ID NO: 1083414 - DNA, 25 bp, Homo sapien
ccaaagaccagcgccgcccatcagt

SEQ ID NO: 1083415 - DNA, 25 bp, Homo sapien
aggccaaagaccagcgccgcccatc

SEQ ID NO: 1083416 - DNA, 25 bp, Homo sapien
ggccaaagaccagcgccgcccatca

SEQ ID NO: 1083417 - DNA, 25 bp, Homo sapien
gagctaggagtgttagttccatatc

SEQ ID NO: 1083418 - DNA, 25 bp, Homo sapien
tggagctaggagtgttagttccata

SEQ ID NO: 1083419 - DNA, 25 bp, Homo sapien
ggagctaggagtgttagttccatat

SEQ ID NO: 1083420 - DNA, 25 bp, Homo sapien
agtggagctaggagtgttagttcca

SEQ ID NO: 1083421 - DNA, 25 bp, Homo sapien
cagctgtaggctggaaaggcaactg

SEQ ID NO: 1083422 - DNA, 25 bp, Homo sapien
tctctgtgctgaaatgcttcgtcaa

SEQ ID NO: 1083423 - DNA, 25 bp, Homo sapien
ggaaaggcaactgatgcagcttttc

SEQ ID NO: 1083424 - DNA, 25 bp, Homo sapien
gggactgccgtccttcctcatctgg

SEQ ID NO: 1083425 - DNA, 25 bp, Homo sapien
tatcttggccccttatagcatagtg

SEQ ID NO: 1083426 - DNA, 25 bp, Homo sapien
gagatatatggcctataaagcctaa

SEQ ID NO: 1083427 - DNA, 25 bp, Homo sapien
gttatgcaaacaagctgaaatccac

SEQ ID NO: 1083428 - DNA, 25 bp, Homo sapien
cacatgcactggaacagtgggcaga

SEQ ID NO: 1083429 - DNA, 25 bp, Homo sapien
ttattatttcactgtcaaaggatac

SEQ ID NO: 1083430 - DNA, 25 bp, Homo sapien
tgtaaacatgattcatcattattat

SEQ ID NO: 1083431 - DNA, 25 bp, Homo sapien
tttcactgtcaaaggatactgggga

SEQ ID NO: 1083432 - DNA, 25 bp, Homo sapien
tgggaatctttctttgtaaacatga

SEQ ID NO: 1083433 - DNA, 25 bp, Homo sapien
gaggggtattgccactctcctttta

SEQ ID NO: 1083434 - DNA, 25 bp, Homo sapien
ccggaggggtattgccactctcctt

SEQ ID NO: 1083435 - DNA, 25 bp, Homo sapien
cggaggggtattgccactctccttt

SEQ ID NO: 1083436 - DNA, 25 bp, Homo sapien
ggtattgccactctccttttaaatg

SEQ ID NO: 1083437 - DNA, 25 bp, Homo sapien
taaacttagtgtatgggcactgctg

SEQ ID NO: 1083438 - DNA, 25 bp, Homo sapien
tccactggacctcccaactgtgtaa

SEQ ID NO: 1083439 - DNA, 25 bp, Homo sapien
caagctcttttgctgtacggacaca

SEQ ID NO: 1083440 - DNA, 25 bp, Homo sapien
tgtttatgctcttcccagtgtgtgg

SEQ ID NO: 1083441 - DNA, 25 bp, Homo sapien
gatgaataaagctcagggctccatc

SEQ ID NO: 1083442 - DNA, 25 bp, Homo sapien
gaggccactccgagatttatccagg

SEQ ID NO: 1083443 - DNA, 25 bp, Homo sapien
gtctcgggccatctcaatcacctga

SEQ ID NO: 1083444 - DNA, 25 bp, Homo sapien
gctagtcgctcttccatttgtgcgg

SEQ ID NO: 1083445 - DNA, 25 bp, Homo sapien
gactgagaataccactaatgcccta

SEQ ID NO: 1083446 - DNA, 25 bp, Homo sapien
tacctttgagggtgggtaacaagca

SEQ ID NO: 1083447 - DNA, 25 bp, Homo sapien
ggattacaaatccaataccaggtgg

SEQ ID NO: 1083448 - DNA, 25 bp, Homo sapien
gaggttttttcagaaccccagcaca

SEQ ID NO: 1083449 - DNA, 25 bp, Homo sapien
cagttggtactactccagagagaga

SEQ ID NO: 1083450 - DNA, 25 bp, Homo sapien
tgggtctgtaacctcactgatggca

SEQ ID NO: 1083451 - DNA, 25 bp, Homo sapien
cttttgatcattagccctgggccct

SEQ ID NO: 1083452 - DNA, 25 bp, Homo sapien
tccctaagatagagcctgcactgaa

SEQ ID NO: 1083453 - DNA, 25 bp, Homo sapien
aaaatcaatgaaaacgaagatataa

SEQ ID NO: 1083454 - DNA, 25 bp, Homo sapien
tgctgggcgggcaatgataatcatc

SEQ ID NO: 1083455 - DNA, 25 bp, Homo sapien
ggcattccaggagacgtgctgggcg

SEQ ID NO: 1083456 - DNA, 25 bp, Homo sapien
acgtgctgggcgggcaatgataatc

SEQ ID NO: 1083457 - DNA, 25 bp, Homo sapien
ccaggagacgtgctgggcgggcaat

SEQ ID NO: 1083458 - DNA, 25 bp, Homo sapien
ggtagaactcttcagggtcaaactc

SEQ ID NO: 1083459 - DNA, 25 bp, Homo sapien
cccagctggctaacgatgtagcggg

SEQ ID NO: 1083460 - DNA, 25 bp, Homo sapien
aatcccttgtccctctttggcgtgg

SEQ ID NO: 1083461 - DNA, 25 bp, Homo sapien
cagctgcttctaaaaggtggtagaa

SEQ ID NO: 1083462 - DNA, 25 bp, Homo sapien
ctgtctctggagtgtcaggactgtc

SEQ ID NO: 1083463 - DNA, 25 bp, Homo sapien
atctgtctctggagtgtcaggactg

SEQ ID NO: 1083464 - DNA, 25 bp, Homo sapien
gtctctggagtgtcaggactgtcac

SEQ ID NO: 1083465 - DNA, 25 bp, Homo sapien
tgtctctggagtgtcaggactgtca

SEQ ID NO: 1083466 - DNA, 25 bp, Homo sapien
ccataggcgccattgctgatgagct

SEQ ID NO: 1083467 - DNA, 25 bp, Homo sapien
ggcgccattgctgatgagcttaatg

SEQ ID NO: 1083468 - DNA, 25 bp, Homo sapien
cattgctgatgagcttaatggtctc

SEQ ID NO: 1083469 - DNA, 25 bp, Homo sapien
gatgagcttaatggtctcgaagtcc

SEQ ID NO: 1083470 - DNA, 25 bp, Homo sapien
caatgatcggatgtcagaggaatct

SEQ ID NO: 1083471 - DNA, 25 bp, Homo sapien
gatcaaaggctgacccggcttcagt

SEQ ID NO: 1083472 - DNA, 25 bp, Homo sapien
tgtcagaggaatctgaactcctgcc

SEQ ID NO: 1083473 - DNA, 25 bp, Homo sapien
gcagcatacactctcacatggaaga

SEQ ID NO: 1083474 - DNA, 25 bp, Homo sapien
cacaagtggcgcttggtatcaaagg

SEQ ID NO: 1083475 - DNA, 25 bp, Homo sapien
cttgtgccgcaccagaaatacagcc

SEQ ID NO: 1083476 - DNA, 25 bp, Homo sapien
agtatgtcacgctccacgaaggcct

SEQ ID NO: 1083477 - DNA, 25 bp, Homo sapien
gtactccatcaccatgcacaagtgg

SEQ ID NO: 1083478 - DNA, 25 bp, Homo sapien
ggtgtcccctttgcaagccagtcag

SEQ ID NO: 1083479 - DNA, 25 bp, Homo sapien
taccagcagtagagagcgtgcaggc

SEQ ID NO: 1083480 - DNA, 25 bp, Homo sapien
gactaggcacagtatctttggaggc

SEQ ID NO: 1083481 - DNA, 25 bp, Homo sapien
gaactcccagcatgtacccagtaaa

SEQ ID NO: 1083482 - DNA, 25 bp, Homo sapien
aggcagggccccaatattcttcagc

SEQ ID NO: 1083483 - DNA, 25 bp, Homo sapien
gtatagacgcaccatgtccacaggc

SEQ ID NO: 1083484 - DNA, 25 bp, Homo sapien
cagtttccgcaaagtatagacgcac

SEQ ID NO: 1083485 - DNA, 25 bp, Homo sapien
cagggccagcacagtttccgcaaag

SEQ ID NO: 1083486 - DNA, 25 bp, Homo sapien
gaggccaattttggacagtccaaag

SEQ ID NO: 1083487 - DNA, 25 bp, Homo sapien
cccgggcatccttttcaatatgacc

SEQ ID NO: 1083488 - DNA, 25 bp, Homo sapien
tatgaccctcatacaagttcgttgt

SEQ ID NO: 1083489 - DNA, 25 bp, Homo sapien
caagttcgttgtcagactcatgagg

SEQ ID NO: 1083490 - DNA, 25 bp, Homo sapien
ctgactggcatgacagccggagatg

SEQ ID NO: 1083491 - DNA, 25 bp, Homo sapien
cagccggagatgggggatgctccca

SEQ ID NO: 1083492 - DNA, 25 bp, Homo sapien
tgctgactggcatgacagccggaga

SEQ ID NO: 1083493 - DNA, 25 bp, Homo sapien
gactggcatgacagccggagatggg

SEQ ID NO: 1083494 - DNA, 25 bp, Homo sapien
gctcctccggagtatctccaaaaaa

SEQ ID NO: 1083495 - DNA, 25 bp, Homo sapien
gaactcatacaggataatgcccatg

SEQ ID NO: 1083496 - DNA, 25 bp, Homo sapien
tcacctcaggcgcaatgtattctgg

SEQ ID NO: 1083497 - DNA, 25 bp, Homo sapien
tagccctggcgcaggatcacctcag

SEQ ID NO: 1083498 - DNA, 25 bp, Homo sapien
gaagagggtcccagaacagtgaaag

SEQ ID NO: 1083499 - DNA, 25 bp, Homo sapien
ggaggcaaaaaggacccagcctgga

SEQ ID NO: 1083500 - DNA, 25 bp, Homo sapien
cagacgtacccctcacacttatggg

SEQ ID NO: 1083501 - DNA, 25 bp, Homo sapien
tgcaaagctctagctcaccctgctt

SEQ ID NO: 1083502 - DNA, 25 bp, Homo sapien
gagcagtttggaggtgaggtcctgg

SEQ ID NO: 1083503 - DNA, 25 bp, Homo sapien
tgggggcagtgcctcatcaccctca

SEQ ID NO: 1083504 - DNA, 25 bp, Homo sapien
ctgtgccaagtctctccagagggtt

SEQ ID NO: 1083505 - DNA, 25 bp, Homo sapien
tcaccctcaggccacacaatctcat

SEQ ID NO: 1083506 - DNA, 25 bp, Homo sapien
gtcaaaatagctagtatcatcctct

SEQ ID NO: 1083507 - DNA, 25 bp, Homo sapien
tcctctgactccaactgaggaataa

SEQ ID NO: 1083508 - DNA, 25 bp, Homo sapien
agccttctggcggagaagtcctgtc

SEQ ID NO: 1083509 - DNA, 25 bp, Homo sapien
tctggcggagaagtcctgtccagtc

SEQ ID NO: 1083510 - DNA, 25 bp, Homo sapien
atcctccgagtccatgtggtggtat

SEQ ID NO: 1083511 - DNA, 25 bp, Homo sapien
agaactggcggatctcaaggcagcc

SEQ ID NO: 1083512 - DNA, 25 bp, Homo sapien
ccatgtggtggtatcgctctgagcg

SEQ ID NO: 1083513 - DNA, 25 bp, Homo sapien
cttgttgaaccttggagagcaggaa

SEQ ID NO: 1083514 - DNA, 25 bp, Homo sapien
gggaaggagttattccactgatctg

SEQ ID NO: 1083515 - DNA, 25 bp, Homo sapien
ccaggtgtgccctttgacaggccct

SEQ ID NO: 1083516 - DNA, 25 bp, Homo sapien
tatatgtagccccaacccttagctc

SEQ ID NO: 1083517 - DNA, 25 bp, Homo sapien
ggttctagaagcacctatatatagc

SEQ ID NO: 1083518 - DNA, 25 bp, Homo sapien
ctcactcaggctgcgcttggtcggg

SEQ ID NO: 1083519 - DNA, 25 bp, Homo sapien
tccggcgctcctcgagcagtgagag

SEQ ID NO: 1083520 - DNA, 25 bp, Homo sapien
caggccatctgaatggtcctccttc

SEQ ID NO: 1083521 - DNA, 25 bp, Homo sapien
tccggtctcggcctttgagccctgc

SEQ ID NO: 1083522 - DNA, 25 bp, Homo sapien
ctcagacaccgacagccgcttccgt

SEQ ID NO: 1083523 - DNA, 25 bp, Homo sapien
agacaccgacagccgcttccgtaat

SEQ ID NO: 1083524 - DNA, 25 bp, Homo sapien
gactcagacaccgacagccgcttcc

SEQ ID NO: 1083525 - DNA, 25 bp, Homo sapien
tcagacaccgacagccgcttccgta

SEQ ID NO: 1083526 - DNA, 25 bp, Homo sapien
cactgtcattggagggcttgagtca

SEQ ID NO: 1083527 - DNA, 25 bp, Homo sapien
ccatataccctcctgtggttgcctc

SEQ ID NO: 1083528 - DNA, 25 bp, Homo sapien
tgagcagcggcgtcgcactgtcatt

SEQ ID NO: 1083529 - DNA, 25 bp, Homo sapien
accgaggcgcatccaggaggcctga

SEQ ID NO: 1083530 - DNA, 25 bp, Homo sapien
atcactttgttgacagggcgagcag

SEQ ID NO: 1083531 - DNA, 25 bp, Homo sapien
ggctgtggctgaggcggacttgatc

SEQ ID NO: 1083532 - DNA, 25 bp, Homo sapien
tggcgggccctacgcacagccaggt

SEQ ID NO: 1083533 - DNA, 25 bp, Homo sapien
cgagcagtgcgcttctctgttgagt

SEQ ID NO: 1083534 - DNA, 25 bp, Homo sapien
tcccgggatgatgggttggacgact

SEQ ID NO: 1083535 - DNA, 25 bp, Homo sapien
ggggctggccaacggggagcaggtg

SEQ ID NO: 1083536 - DNA, 25 bp, Homo sapien
gaagagtcccgggatgatgggttgg

SEQ ID NO: 1083537 - DNA, 25 bp, Homo sapien
tgggttggacgactgagaatgtggg

SEQ ID NO: 1083538 - DNA, 25 bp, Homo sapien
gccaagggctggcaagaagtccctg

SEQ ID NO: 1083539 - DNA, 25 bp, Homo sapien
tgggaggcctcatgctgccaagggc

SEQ ID NO: 1083540 - DNA, 25 bp, Homo sapien
ccaagggctggcaagaagtccctgc

SEQ ID NO: 1083541 - DNA, 25 bp, Homo sapien
gctgccaagggctggcaagaagtcc

SEQ ID NO: 1083542 - DNA, 25 bp, Homo sapien
gtgtagacatcggagtcacccatgt

SEQ ID NO: 1083543 - DNA, 25 bp, Homo sapien
cacggtgtagacatcggagtcaccc

SEQ ID NO: 1083544 - DNA, 25 bp, Homo sapien
atgtagacgcgaatggcccgcaggg

SEQ ID NO: 1083545 - DNA, 25 bp, Homo sapien
gacatcggagtcacccatgtagacg

SEQ ID NO: 1083546 - DNA, 25 bp, Homo sapien
gcagggacagatgggctccacaaag

SEQ ID NO: 1083547 - DNA, 25 bp, Homo sapien
acccccgagcagggacagatgggct

SEQ ID NO: 1083548 - DNA, 25 bp, Homo sapien
ttgacccccgagcagggacagatgg

SEQ ID NO: 1083549 - DNA, 25 bp, Homo sapien
ctttgacccccgagcagggacagat

SEQ ID NO: 1083550 - DNA, 25 bp, Homo sapien
ccattgacatgggtgatgaggtcac

SEQ ID NO: 1083551 - DNA, 25 bp, Homo sapien
agctctaccacctccgtgtgcacca

SEQ ID NO: 1083552 - DNA, 25 bp, Homo sapien
tgaggtcaccttgacgaagccctgc

SEQ ID NO: 1083553 - DNA, 25 bp, Homo sapien
ccatgcacaggttccccattgacat

SEQ ID NO: 1083554 - DNA, 25 bp, Homo sapien
gggagttgttgaaatggccaccttg

SEQ ID NO: 1083555 - DNA, 25 bp, Homo sapien
ttgtagctgcccttccgagctggcc

SEQ ID NO: 1083556 - DNA, 25 bp, Homo sapien
actttaatggatgtgttctccaggg

SEQ ID NO: 1083557 - DNA, 25 bp, Homo sapien
gctggccccactttaatggatgtgt

SEQ ID NO: 1083558 - DNA, 25 bp, Homo sapien
ccctgatgacaaggagcggttaagg

SEQ ID NO: 1083559 - DNA, 25 bp, Homo sapien
tcttgcggaacagggagctcctttt

SEQ ID NO: 1083560 - DNA, 25 bp, Homo sapien
gaaaggctgcggctggtgtggagca

SEQ ID NO: 1083561 - DNA, 25 bp, Homo sapien
cacccggtagccttgagtgggagat

SEQ ID NO: 1083562 - DNA, 25 bp, Homo sapien
tatttcccaggggttgtcactgatc

SEQ ID NO: 1083563 - DNA, 25 bp, Homo sapien
cacacagggcctaggaactttccta

SEQ ID NO: 1083564 - DNA, 25 bp, Homo sapien
atctttcagggggtgggctaaatga

SEQ ID NO: 1083565 - DNA, 25 bp, Homo sapien
gaagcacacagggcctaggaacttt

SEQ ID NO: 1083566 - DNA, 25 bp, Homo sapien
ggggaactgggcacgctggagctgg

SEQ ID NO: 1083567 - DNA, 25 bp, Homo sapien
ggaactgggcacgctggagctgggg

SEQ ID NO: 1083568 - DNA, 25 bp, Homo sapien
gaactgggcacgctggagctggggg

SEQ ID NO: 1083569 - DNA, 25 bp, Homo sapien
ctgggccgtgtgtgcccagagccgg

SEQ ID NO: 1083570 - DNA, 25 bp, Homo sapien
gcttgggtgccagaccgtggaggga

SEQ ID NO: 1083571 - DNA, 25 bp, Homo sapien
ttgcgccgtggagagcggtactggc

SEQ ID NO: 1083572 - DNA, 25 bp, Homo sapien
tgcctgctgacttgcgccgtggaga

SEQ ID NO: 1083573 - DNA, 25 bp, Homo sapien
tactggcgttggagcttgggtgcca

SEQ ID NO: 1083574 - DNA, 25 bp, Homo sapien
aggtgacaagtgaagctttgtggga

SEQ ID NO: 1083575 - DNA, 25 bp, Homo sapien
cagacaggggcgatggggaccgctg

SEQ ID NO: 1083576 - DNA, 25 bp, Homo sapien
gggcgatggggaccgctgaggtgaa

SEQ ID NO: 1083577 - DNA, 25 bp, Homo sapien
cccaggggaggtgacaagtgaagct

SEQ ID NO: 1083578 - DNA, 25 bp, Homo sapien
ctgtgcttgcgagaagtggctagct

SEQ ID NO: 1083579 - DNA, 25 bp, Homo sapien
cttcttctcagaggcggcaagtgct

SEQ ID NO: 1083580 - DNA, 25 bp, Homo sapien
accctcttgagtagtggtgaacggg

SEQ ID NO: 1083581 - DNA, 25 bp, Homo sapien
tccctgggcggcagttccttcttta

SEQ ID NO: 1083582 - DNA, 25 bp, Homo sapien
ttcttgcttctgcagcgactcccgt

SEQ ID NO: 1083583 - DNA, 25 bp, Homo sapien
cgtcgttcggctcggtcctgccgga

SEQ ID NO: 1083584 - DNA, 25 bp, Homo sapien
ggagtccacctcacgaatggcttct

SEQ ID NO: 1083585 - DNA, 25 bp, Homo sapien
tagggcccgtgagggagcaggctgc

SEQ ID NO: 1083586 - DNA, 25 bp, Homo sapien
tcctgctcctttaggggccacactc

SEQ ID NO: 1083587 - DNA, 25 bp, Homo sapien
ctcctgctcctttaggggccacact

SEQ ID NO: 1083588 - DNA, 25 bp, Homo sapien
gctcctagggtctctggacgggaaa

SEQ ID NO: 1083589 - DNA, 25 bp, Homo sapien
gtgtgatccctgtcaataggcttgg

SEQ ID NO: 1083590 - DNA, 25 bp, Homo sapien
tgggactttccattctgggaggccc

SEQ ID NO: 1083591 - DNA, 25 bp, Homo sapien
attgggcccaggctcctagggtctc

SEQ ID NO: 1083592 - DNA, 25 bp, Homo sapien
ggccttccagcaaccttcaggaggg

SEQ ID NO: 1083593 - DNA, 25 bp, Homo sapien
ccttccagcaaccttcaggagggat

SEQ ID NO: 1083594 - DNA, 25 bp, Homo sapien
ctgggccttccagcaaccttcagga

SEQ ID NO: 1083595 - DNA, 25 bp, Homo sapien
tgggccttccagcaaccttcaggag

SEQ ID NO: 1083596 - DNA, 25 bp, Homo sapien
ctgttagtgcctgggtgtggaggtg

SEQ ID NO: 1083597 - DNA, 25 bp, Homo sapien
ctgggagacaggttcttaggctggg

SEQ ID NO: 1083598 - DNA, 25 bp, Homo sapien
caaatcctggaggttggctagccca

SEQ ID NO: 1083599 - DNA, 25 bp, Homo sapien
taagggatttccaggaccacatgct

SEQ ID NO: 1083600 - DNA, 25 bp, Homo sapien
cctgtctgggccctcaataagggat

SEQ ID NO: 1083601 - DNA, 25 bp, Homo sapien
agccctggctgggatcctcataaga

SEQ ID NO: 1083602 - DNA, 25 bp, Homo sapien
tcagactcccatagccagccctggc

SEQ ID NO: 1083603 - DNA, 25 bp, Homo sapien
cctggctgggatcctcataagatgg

SEQ ID NO: 1083604 - DNA, 25 bp, Homo sapien
ctgggatcctcataagatggatggg

SEQ ID NO: 1083605 - DNA, 25 bp, Homo sapien
cttctgtcacctgaggcatcaggca

SEQ ID NO: 1083606 - DNA, 25 bp, Homo sapien
aaatcccgatgcttttgatggcccc

SEQ ID NO: 1083607 - DNA, 25 bp, Homo sapien
gggcagcctcggcatggaacgtcct

SEQ ID NO: 1083608 - DNA, 25 bp, Homo sapien
aaccaatgccaaatcccgatgcttt

SEQ ID NO: 1083609 - DNA, 25 bp, Homo sapien
tgggttgaccgaaggaaaacaagca

SEQ ID NO: 1083610 - DNA, 25 bp, Homo sapien
tacacaggtctgagtgcaagaaatg

SEQ ID NO: 1083611 - DNA, 25 bp, Homo sapien
gcagcaacacaggacctagttacat

SEQ ID NO: 1083612 - DNA, 25 bp, Homo sapien
ggagcatatattacacaggtctgag

SEQ ID NO: 1083613 - DNA, 25 bp, Homo sapien
taccatgggcatcaaagtcttagtg

SEQ ID NO: 1083614 - DNA, 25 bp, Homo sapien
gagagatgtgagttccggagtccaa

SEQ ID NO: 1083615 - DNA, 25 bp, Homo sapien
tgtgctaaacgttgcctggacagcc

SEQ ID NO: 1083616 - DNA, 25 bp, Homo sapien
tgttactaaatacgactggcagctg

SEQ ID NO: 1083617 - DNA, 25 bp, Homo sapien
caggtcccggtacattagcccaggg

SEQ ID NO: 1083618 - DNA, 25 bp, Homo sapien
acatgcacggggcacttgctacctc

SEQ ID NO: 1083619 - DNA, 25 bp, Homo sapien
tgtctgcccaggtcccggtacatta

SEQ ID NO: 1083620 - DNA, 25 bp, Homo sapien
catgcacggggcacttgctacctca

SEQ ID NO: 1083621 - DNA, 25 bp, Homo sapien
cagcatgtgactttggtgccgttac

SEQ ID NO: 1083622 - DNA, 25 bp, Homo sapien
tctgactcacaagaaagccaactgt

SEQ ID NO: 1083623 - DNA, 25 bp, Homo sapien
tcttaaactgagaattgcacctggg

SEQ ID NO: 1083624 - DNA, 25 bp, Homo sapien
tatttaacaacccagagtaggcctc

SEQ ID NO: 1083625 - DNA, 25 bp, Homo sapien
gcctgtggaaatggcatagggacca

SEQ ID NO: 1083626 - DNA, 25 bp, Homo sapien
tctggaccctgggactgtcttggca

SEQ ID NO: 1083627 - DNA, 25 bp, Homo sapien
tgacttgcttgaccctgagcctgtg

SEQ ID NO: 1083628 - DNA, 25 bp, Homo sapien
ggtgcttctctacgcccatgacttg

SEQ ID NO: 1083629 - DNA, 25 bp, Homo sapien
cagaaacaaatgtcccactgtgagt

SEQ ID NO: 1083630 - DNA, 25 bp, Homo sapien
actcaattcagtaggtcacacagga

SEQ ID NO: 1083631 - DNA, 25 bp, Homo sapien
tgtggtggcacatcctccagaaaag

SEQ ID NO: 1083632 - DNA, 25 bp, Homo sapien
cgcgcccggcttggatactatgatt

SEQ ID NO: 1083633 - DNA, 25 bp, Homo sapien
gaaacctgaatgataggagccttgc

SEQ ID NO: 1083634 - DNA, 25 bp, Homo sapien
agccttgcttggtgggtaatgatga

SEQ ID NO: 1083635 - DNA, 25 bp, Homo sapien
gactgccttagttgggacagttagg

SEQ ID NO: 1083636 - DNA, 25 bp, Homo sapien
gacagttaggatagtcctccctgag

SEQ ID NO: 1083637 - DNA, 25 bp, Homo sapien
gactgtgaaatctgtctaacagaac

SEQ ID NO: 1083638 - DNA, 25 bp, Homo sapien
tgaaatccaagttaactaaagggca

SEQ ID NO: 1083639 - DNA, 25 bp, Homo sapien
aaattaggtgtgatgccaagttatc

SEQ ID NO: 1083640 - DNA, 25 bp, Homo sapien
tactgacaattgaatgtctatgtgc

SEQ ID NO: 1083641 - DNA, 25 bp, Homo sapien
gctcacgaaactcctttttcctcta

SEQ ID NO: 1083642 - DNA, 25 bp, Homo sapien
ggcacacggtgtaagctgtcaatga

SEQ ID NO: 1083643 - DNA, 25 bp, Homo sapien
cagggtggccttgagtgtctgcggc

SEQ ID NO: 1083644 - DNA, 25 bp, Homo sapien
aggaactctgtgtggcggcttcgac

SEQ ID NO: 1083645 - DNA, 25 bp, Homo sapien
ttcagttgtttcaccttggtccctc

SEQ ID NO: 1083646 - DNA, 25 bp, Homo sapien
tcagttgtttcaccttggtccctcc

SEQ ID NO: 1083647 - DNA, 25 bp, Homo sapien
gattcagttgtttcaccttggtccc

SEQ ID NO: 1083648 - DNA, 25 bp, Homo sapien
attcagttgtttcaccttggtccct

SEQ ID NO: 1083649 - DNA, 25 bp, Homo sapien
gctccatgtgagtgggcaggaactt

SEQ ID NO: 1083650 - DNA, 25 bp, Homo sapien
aggtgatgaatacctgccaggtgca

SEQ ID NO: 1083651 - DNA, 25 bp, Homo sapien
ttgttaactggaggccttcactgag

SEQ ID NO: 1083652 - DNA, 25 bp, Homo sapien
cggatttgacactttagtagcctca

SEQ ID NO: 1083653 - DNA, 25 bp, Homo sapien
aacataccctctaaactgcccttca

SEQ ID NO: 1083654 - DNA, 25 bp, Homo sapien
cataccctctaaactgcccttcatc

SEQ ID NO: 1083655 - DNA, 25 bp, Homo sapien
taccctctaaactgcccttcatcct

SEQ ID NO: 1083656 - DNA, 25 bp, Homo sapien
accctctaaactgcccttcatcctc

SEQ ID NO: 1083657 - DNA, 25 bp, Homo sapien
tatggttctgacagagccatataac

SEQ ID NO: 1083658 - DNA, 25 bp, Homo sapien
cagaattttatggttctgacagagc

SEQ ID NO: 1083659 - DNA, 25 bp, Homo sapien
gacagaattttatggttctgacaga

SEQ ID NO: 1083660 - DNA, 25 bp, Homo sapien
tgacagagccatataacagaaccat

SEQ ID NO: 1083661 - DNA, 25 bp, Homo sapien
taatattttacactcaccattttgg

SEQ ID NO: 1083662 - DNA, 25 bp, Homo sapien
ggacagtggagtatcaactagaacc

SEQ ID NO: 1083663 - DNA, 25 bp, Homo sapien
tcaacttctttagtagccatggaaa

SEQ ID NO: 1083664 - DNA, 25 bp, Homo sapien
aattcagcatgagatagataaccca

SEQ ID NO: 1083665 - DNA, 25 bp, Homo sapien
aggtaagaaggcagcggtggggcat

SEQ ID NO: 1083666 - DNA, 25 bp, Homo sapien
ccagaggtaagaaggcagcggtggg

SEQ ID NO: 1083667 - DNA, 25 bp, Homo sapien
gaggtaagaaggcagcggtggggca

SEQ ID NO: 1083668 - DNA, 25 bp, Homo sapien
ccccagaggtaagaaggcagcggtg

SEQ ID NO: 1083669 - DNA, 25 bp, Homo sapien
ctgttcgggtagtttggccggactg

SEQ ID NO: 1083670 - DNA, 25 bp, Homo sapien
gccggactggtactggccgttggaa

SEQ ID NO: 1083671 - DNA, 25 bp, Homo sapien
gtagtttggccggactggtactggc

SEQ ID NO: 1083672 - DNA, 25 bp, Homo sapien
tggccggactggtactggccgttgg

SEQ ID NO: 1083673 - DNA, 25 bp, Homo sapien
cgggagcgcccagacaagccgagct

SEQ ID NO: 1083674 - DNA, 25 bp, Homo sapien
cccagacaagccgagctgactggac

SEQ ID NO: 1083675 - DNA, 25 bp, Homo sapien
gagctgactggacttctccggccgg

SEQ ID NO: 1083676 - DNA, 25 bp, Homo sapien
gacaagccgagctgactggacttct

SEQ ID NO: 1083677 - DNA, 25 bp, Homo sapien
gggagagcgcggatggctgattggg

SEQ ID NO: 1083678 - DNA, 25 bp, Homo sapien
cgcggatggctgattggggagccga

SEQ ID NO: 1083679 - DNA, 25 bp, Homo sapien
tgggggagagcgcggatggctgatt

SEQ ID NO: 1083680 - DNA, 25 bp, Homo sapien
ggatggctgattggggagccgaagc

SEQ ID NO: 1083681 - DNA, 25 bp, Homo sapien
cagcgcccggatcgtaccattctga

SEQ ID NO: 1083682 - DNA, 25 bp, Homo sapien
cactgactcctggagtgcggccagc

SEQ ID NO: 1083683 - DNA, 25 bp, Homo sapien
ccggatcgtaccattctgattgagg

SEQ ID NO: 1083684 - DNA, 25 bp, Homo sapien
tgactcctggagtgcggccagcgcc

SEQ ID NO: 1083685 - DNA, 25 bp, Homo sapien
ctgtctcctgattggcccgcttggg

SEQ ID NO: 1083686 - DNA, 25 bp, Homo sapien
cggctgtctcctgattggcccgctt

SEQ ID NO: 1083687 - DNA, 25 bp, Homo sapien
ttggggcgcgcagccgtctcccgct

SEQ ID NO: 1083688 - DNA, 25 bp, Homo sapien
ggcgccggctgtctcctgattggcc

SEQ ID NO: 1083689 - DNA, 25 bp, Homo sapien
tggctcccagatatgctgaagtaga

SEQ ID NO: 1083690 - DNA, 25 bp, Homo sapien
ggaaggcagccacaaattagagttg

SEQ ID NO: 1083691 - DNA, 25 bp, Homo sapien
gattgttctgtcttttgagttatca

SEQ ID NO: 1083692 - DNA, 25 bp, Homo sapien
cagatatgctgaagtagagactgct

SEQ ID NO: 1083693 - DNA, 25 bp, Homo sapien
ttaggtggaaagactgaatcacagc

SEQ ID NO: 1083694 - DNA, 25 bp, Homo sapien
gattatatactgtgcttggacgtca

SEQ ID NO: 1083695 - DNA, 25 bp, Homo sapien
ctgaaaccccaccactaaatgctga

SEQ ID NO: 1083696 - DNA, 25 bp, Homo sapien
gaaaagcctgggtgattgctctgtg

SEQ ID NO: 1083697 - DNA, 25 bp, Homo sapien
tcagatggcacctttaatcacgaag

SEQ ID NO: 1083698 - DNA, 25 bp, Homo sapien
gaacttctggctgagttccagactg

SEQ ID NO: 1083699 - DNA, 25 bp, Homo sapien
tccagactgattctgctggcacaga

SEQ ID NO: 1083700 - DNA, 25 bp, Homo sapien
agatcataccctatattcagagcac

SEQ ID NO: 1083701 - DNA, 25 bp, Homo sapien
aataaaagggcagcggaactcagcg

SEQ ID NO: 1083702 - DNA, 25 bp, Homo sapien
gcttggaattttgcaaacaattcac

SEQ ID NO: 1083703 - DNA, 25 bp, Homo sapien
aagggcagcggaactcagcgtctgt

SEQ ID NO: 1083704 - DNA, 25 bp, Homo sapien
aaaataaaagggcagcggaactcag

SEQ ID NO: 1083705 - DNA, 25 bp, Homo sapien
tttccaagaagtgtaagatgagcag

SEQ ID NO: 1083706 - DNA, 25 bp, Homo sapien
tggagaatagtagtgatcttcaccg

SEQ ID NO: 1083707 - DNA, 25 bp, Homo sapien
gcttttgaacgtatacacccatgac

SEQ ID NO: 1083708 - DNA, 25 bp, Homo sapien
catcaacagggaaggaatagggtcc

SEQ ID NO: 1083709 - DNA, 25 bp, Homo sapien
cagggatcatagtttaagacagcag

SEQ ID NO: 1083710 - DNA, 25 bp, Homo sapien
atcttggaaggtattgggaggcaca

SEQ ID NO: 1083711 - DNA, 25 bp, Homo sapien
ggaaaggcttcagtgaccgcagcag

SEQ ID NO: 1083712 - DNA, 25 bp, Homo sapien
gatgaaagactgaaccctgagagta

SEQ ID NO: 1083713 - DNA, 25 bp, Homo sapien
ctggttctgtttaggcacgccaaag

SEQ ID NO: 1083714 - DNA, 25 bp, Homo sapien
gctgacagccttaatggaggatgga

SEQ ID NO: 1083715 - DNA, 25 bp, Homo sapien
gaaatagcacccctacatatatggg

SEQ ID NO: 1083716 - DNA, 25 bp, Homo sapien
taggcacgccaaaggatgatctctg

SEQ ID NO: 1083717 - DNA, 25 bp, Homo sapien
cgtggccagttagcctctccttgac

SEQ ID NO: 1083718 - DNA, 25 bp, Homo sapien
cccacccgtggccagttagcctctc

SEQ ID NO: 1083719 - DNA, 25 bp, Homo sapien
gcaggcagggtaggcgctttaaagc

SEQ ID NO: 1083720 - DNA, 25 bp, Homo sapien
cagggtaggcgctttaaagcctcct

SEQ ID NO: 1083721 - DNA, 25 bp, Homo sapien
acgcctggctctcacacaccactgc

SEQ ID NO: 1083722 - DNA, 25 bp, Homo sapien
agctcccgggtgttgccactgagtg

SEQ ID NO: 1083723 - DNA, 25 bp, Homo sapien
cagctcccgggtgttgccactgagt

SEQ ID NO: 1083724 - DNA, 25 bp, Homo sapien
ggacgcctggctctcacacaccact

SEQ ID NO: 1083725 - DNA, 25 bp, Homo sapien
aaagatgagcaaattgaagaggatc

SEQ ID NO: 1083726 - DNA, 25 bp, Homo sapien
gatgagcaaattgaagaggatcatc

SEQ ID NO: 1083727 - DNA, 25 bp, Homo sapien
gaagaggatcatcatggtcttaatg

SEQ ID NO: 1083728 - DNA, 25 bp, Homo sapien
catcatggtcttaatgaagctgaag

SEQ ID NO: 1083729 - DNA, 25 bp, Homo sapien
tgccaccccagcacccatcatggta

SEQ ID NO: 1083730 - DNA, 25 bp, Homo sapien
gccaccccagcacccatcatggtat

SEQ ID NO: 1083731 - DNA, 25 bp, Homo sapien
ctgccaccccagcacccatcatggt

SEQ ID NO: 1083732 - DNA, 25 bp, Homo sapien
cctatctggcttatcggagctgaga

SEQ ID NO: 1083733 - DNA, 25 bp, Homo sapien
gcttcagtggctacctgtgcgcaca

SEQ ID NO: 1083734 - DNA, 25 bp, Homo sapien
tacacatctgctagtgggacacccc

SEQ ID NO: 1083735 - DNA, 25 bp, Homo sapien
cgtcctaagcccaaacacactgtgt

SEQ ID NO: 1083736 - DNA, 25 bp, Homo sapien
ggccctgcgcagttcccacagatct

SEQ ID NO: 1083737 - DNA, 25 bp, Homo sapien
aggcccgcccctcatgtagacaaga

SEQ ID NO: 1083738 - DNA, 25 bp, Homo sapien
gaaagtgaggtaccagtgggaatac

SEQ ID NO: 1083739 - DNA, 25 bp, Homo sapien
gaattctgaggcctagattgaggag

SEQ ID NO: 1083740 - DNA, 25 bp, Homo sapien
tctagaaatatcctcagggtgggca

SEQ ID NO: 1083741 - DNA, 25 bp, Homo sapien
cagaggggcaagactttccctcact

SEQ ID NO: 1083742 - DNA, 25 bp, Homo sapien
gatcaggggttctagaaatatcctc

SEQ ID NO: 1083743 - DNA, 25 bp, Homo sapien
ctgggcagatataaaggagatcagg

SEQ ID NO: 1083744 - DNA, 25 bp, Homo sapien
gatcttcagaaaggatgccccatcg

SEQ ID NO: 1083745 - DNA, 25 bp, Homo sapien
tcgattgacacccagatgcccactg

SEQ ID NO: 1083746 - DNA, 25 bp, Homo sapien
gatgaggaagtagcccacgttgaca

SEQ ID NO: 1083747 - DNA, 25 bp, Homo sapien
aaactgcatggcactggacgacagt

SEQ ID NO: 1083748 - DNA, 25 bp, Homo sapien
gcgaggggactcttggtcatcagcc

SEQ ID NO: 1083749 - DNA, 25 bp, Homo sapien
cagggcctggtgtcaagggcgaggg

SEQ ID NO: 1083750 - DNA, 25 bp, Homo sapien
agaagcctgagcctaggggggtcca

SEQ ID NO: 1083751 - DNA, 25 bp, Homo sapien
gtccctcatgccctccttgccctaa

SEQ ID NO: 1083752 - DNA, 25 bp, Homo sapien
cattgtggtgtacaccaaggcgacc

SEQ ID NO: 1083753 - DNA, 25 bp, Homo sapien
caacctcagcaatgaagatgaggag

SEQ ID NO: 1083754 - DNA, 25 bp, Homo sapien
ctgcaacctcagcaatgaagatgag

SEQ ID NO: 1083755 - DNA, 25 bp, Homo sapien
ggtgtacaccaaggcgaccacagca

SEQ ID NO: 1083756 - DNA, 25 bp, Homo sapien
ccactcccagggttttgcccaatct

SEQ ID NO: 1083757 - DNA, 25 bp, Homo sapien
ctcccagggttttgcccaatcttct

SEQ ID NO: 1083758 - DNA, 25 bp, Homo sapien
tggtacagaaggtggccattcacag

SEQ ID NO: 1083759 - DNA, 25 bp, Homo sapien
cagcccactcccagggttttgccca

SEQ ID NO: 1083760 - DNA, 25 bp, Homo sapien
aggcactaccagcaacgtcaggaag

SEQ ID NO: 1083761 - DNA, 25 bp, Homo sapien
ccagcaacgtcaggaagtgctcagc

SEQ ID NO: 1083762 - DNA, 25 bp, Homo sapien
ttgatggcaggcactaccagcaacg

SEQ ID NO: 1083763 - DNA, 25 bp, Homo sapien
ctttcttgatggcaggcactaccag

SEQ ID NO: 1083764 - DNA, 25 bp, Homo sapien
tcatggtggtgttccacacttgagt

SEQ ID NO: 1083765 - DNA, 25 bp, Homo sapien
tggtggtgttccacacttgagtgaa

SEQ ID NO: 1083766 - DNA, 25 bp, Homo sapien
ccctttcatggtggtgttccacact

SEQ ID NO: 1083767 - DNA, 25 bp, Homo sapien
gtggtgttccacacttgagtgaagt

SEQ ID NO: 1083768 - DNA, 25 bp, Homo sapien
tggaggtggggccttgcttctttct

SEQ ID NO: 1083769 - DNA, 25 bp, Homo sapien
tgcttctttctctccaccctaaaac

SEQ ID NO: 1083770 - DNA, 25 bp, Homo sapien
ctggagacaagatgagggtggaggt

SEQ ID NO: 1083771 - DNA, 25 bp, Homo sapien
gagggtggaggtggggccttgcttc

SEQ ID NO: 1083772 - DNA, 25 bp, Homo sapien
tgcttggtgcaggtttcattggctg

SEQ ID NO: 1083773 - DNA, 25 bp, Homo sapien
tactttttggtcgtgagccttttgc

SEQ ID NO: 1083774 - DNA, 25 bp, Homo sapien
gacgttgtcattgcaacagaatggg

SEQ ID NO: 1083775 - DNA, 25 bp, Homo sapien
aaatccgtatagttggtgaagccac

SEQ ID NO: 1083776 - DNA, 25 bp, Homo sapien
tgcattagttcggatgtcatacaaa

SEQ ID NO: 1083777 - DNA, 25 bp, Homo sapien
tcatacaaaagctgattgaagcaac

SEQ ID NO: 1083778 - DNA, 25 bp, Homo sapien
ttagttcggatgtcatacaaaagct

SEQ ID NO: 1083779 - DNA, 25 bp, Homo sapien
tgtcatacaaaagctgattgaagca

SEQ ID NO: 1083780 - DNA, 25 bp, Homo sapien
aattccagctgccacaccacccacg

SEQ ID NO: 1083781 - DNA, 25 bp, Homo sapien
cccaattccagctgccacaccaccc

SEQ ID NO: 1083782 - DNA, 25 bp, Homo sapien
ctcgaggcccccaattccagctgcc

SEQ ID NO: 1083783 - DNA, 25 bp, Homo sapien
cccccaattccagctgccacaccac

SEQ ID NO: 1083784 - DNA, 25 bp, Homo sapien
ttattgtagattgcagtacagatac

SEQ ID NO: 1083785 - DNA, 25 bp, Homo sapien
gattgcagtacagatacatggacac

SEQ ID NO: 1083786 - DNA, 25 bp, Homo sapien
ttgtagattgcagtacagatacatg

SEQ ID NO: 1083787 - DNA, 25 bp, Homo sapien
tagattgcagtacagatacatggac

SEQ ID NO: 1083788 - DNA, 25 bp, Homo sapien
aaggagtggtccctatctagcccca

SEQ ID NO: 1083789 - DNA, 25 bp, Homo sapien
tcaggcatcgcctaaaaggagtggt

SEQ ID NO: 1083790 - DNA, 25 bp, Homo sapien
tagccccaagtctggagcagaaagg

SEQ ID NO: 1083791 - DNA, 25 bp, Homo sapien
caacagaactggctaccttagaggc

SEQ ID NO: 1083792 - DNA, 25 bp, Homo sapien
aggctctgctgatttcacttatgcc

SEQ ID NO: 1083793 - DNA, 25 bp, Homo sapien
tgatttcacttatgcccaggctata

SEQ ID NO: 1083794 - DNA, 25 bp, Homo sapien
tctcatcccccagtagagcactggg

SEQ ID NO: 1083795 - DNA, 25 bp, Homo sapien
ttatgcccaggctataaaatgcctt

SEQ ID NO: 1083796 - DNA, 25 bp, Homo sapien
gagtacctgggaatcattacgatcc

SEQ ID NO: 1083797 - DNA, 25 bp, Homo sapien
gccttgaaaacaggccgaacctgga

SEQ ID NO: 1083798 - DNA, 25 bp, Homo sapien
agagacccttagacactggaccagg

SEQ ID NO: 1083799 - DNA, 25 bp, Homo sapien
tattgactgtcctgagggccttgaa

SEQ ID NO: 1083800 - DNA, 25 bp, Homo sapien
acacatgggccttcgtgggacgaaa

SEQ ID NO: 1083801 - DNA, 25 bp, Homo sapien
cagtcaggctaactgccttctctgg

SEQ ID NO: 1083802 - DNA, 25 bp, Homo sapien
cactctgtagtatcaagagcctggg

SEQ ID NO: 1083803 - DNA, 25 bp, Homo sapien
catagttcgtgctctgtgaggccag

SEQ ID NO: 1083804 - DNA, 25 bp, Homo sapien
tttaagtacccctaagacagagaca

SEQ ID NO: 1083805 - DNA, 25 bp, Homo sapien
acagagacaccttgaatgccagagt

SEQ ID NO: 1083806 - DNA, 25 bp, Homo sapien
aacagaaacataggcaggaggtgat

SEQ ID NO: 1083807 - DNA, 25 bp, Homo sapien
agagacaccttgaatgccagagtga

SEQ ID NO: 1083808 - DNA, 25 bp, Homo sapien
ggctctaagagccatgaaagtcatg

SEQ ID NO: 1083809 - DNA, 25 bp, Homo sapien
gccttcgagctgagttggaaaagaa

SEQ ID NO: 1083810 - DNA, 25 bp, Homo sapien
tgatgggagtgctatagaggctttc

SEQ ID NO: 1083811 - DNA, 25 bp, Homo sapien
cctgaaagtaatcagacctggccct

SEQ ID NO: 1083812 - DNA, 25 bp, Homo sapien
gggtcctcccttcgccgctgctaaa

SEQ ID NO: 1083813 - DNA, 25 bp, Homo sapien
ccttcgccgctgctaaagcggagca

SEQ ID NO: 1083814 - DNA, 25 bp, Homo sapien
tgctaaagcggagcaaaaccggtgg

SEQ ID NO: 1083815 - DNA, 25 bp, Homo sapien
tgaaaagggctgggcgaccggacgc

SEQ ID NO: 1083816 - DNA, 25 bp, Homo sapien
catcccgcaggtcaggcgtctggga

SEQ ID NO: 1083817 - DNA, 25 bp, Homo sapien
tcaggcgtctgggactccacggtcc

SEQ ID NO: 1083818 - DNA, 25 bp, Homo sapien
aagtcgtggccggtgctagacgccc

SEQ ID NO: 1083819 - DNA, 25 bp, Homo sapien
gcgccagaggttcccagctcacact

SEQ ID NO: 1083820 - DNA, 25 bp, Homo sapien
cctcggctgcccttttggctctgaa

SEQ ID NO: 1083821 - DNA, 25 bp, Homo sapien
acttcaccggaatcagggccctggg

SEQ ID NO: 1083822 - DNA, 25 bp, Homo sapien
aagtagtggcaggtgtaaatcaccc

SEQ ID NO: 1083823 - DNA, 25 bp, Homo sapien
gatggcaattcctcagttccccaga

SEQ ID NO: 1083824 - DNA, 25 bp, Homo sapien
ggccttccccctttgtgcaaggaga

SEQ ID NO: 1083825 - DNA, 25 bp, Homo sapien
taggccttccccctttgtgcaagga

SEQ ID NO: 1083826 - DNA, 25 bp, Homo sapien
aggccttccccctttgtgcaaggag

SEQ ID NO: 1083827 - DNA, 25 bp, Homo sapien
gccttccccctttgtgcaaggagag

SEQ ID NO: 1083828 - DNA, 25 bp, Homo sapien
tgctgcaatgactggtcaacgtccc

SEQ ID NO: 1083829 - DNA, 25 bp, Homo sapien
ccaggaagctgccaatagagacact

SEQ ID NO: 1083830 - DNA, 25 bp, Homo sapien
agacactgtccagccggtcggtggt

SEQ ID NO: 1083831 - DNA, 25 bp, Homo sapien
tcacatcgatggctcgcaggtaagc

SEQ ID NO: 1083832 - DNA, 25 bp, Homo sapien
aaggtcacatcatcctggcactgct

SEQ ID NO: 1083833 - DNA, 25 bp, Homo sapien
gacatcactcagcaggtaggaaggg

SEQ ID NO: 1083834 - DNA, 25 bp, Homo sapien
cctagggactagagaaatgatgagc

SEQ ID NO: 1083835 - DNA, 25 bp, Homo sapien
aacgcttctgggagggccaatccat

SEQ ID NO: 1083836 - DNA, 25 bp, Homo sapien
gcaagctagctctagggacccaata

SEQ ID NO: 1083837 - DNA, 25 bp, Homo sapien
ggcaggcatccttgtgaccaaatgg

SEQ ID NO: 1083838 - DNA, 25 bp, Homo sapien
gagattccttgtgtcccgacctcag

SEQ ID NO: 1083839 - DNA, 25 bp, Homo sapien
taatttgtaattcggcagggctctg

SEQ ID NO: 1083840 - DNA, 25 bp, Homo sapien
gctgcagcctagacaaggagattcc

SEQ ID NO: 1083841 - DNA, 25 bp, Homo sapien
cttctttgagctcccaaacagctgt

SEQ ID NO: 1083842 - DNA, 25 bp, Homo sapien
tccttctttgagctcccaaacagct

SEQ ID NO: 1083843 - DNA, 25 bp, Homo sapien
tctttgagctcccaaacagctgtac

SEQ ID NO: 1083844 - DNA, 25 bp, Homo sapien
ttctccttctttgagctcccaaaca

SEQ ID NO: 1083845 - DNA, 25 bp, Homo sapien
tgaattatcccagtagacccaatgt

SEQ ID NO: 1083846 - DNA, 25 bp, Homo sapien
gagacagtgttgaggaatcctccac

SEQ ID NO: 1083847 - DNA, 25 bp, Homo sapien
gaaaagagccacgaatcaagcactg

SEQ ID NO: 1083848 - DNA, 25 bp, Homo sapien
ccacggaaggagtgtagacctgtca

SEQ ID NO: 1083849 - DNA, 25 bp, Homo sapien
caacggatagtaaaacaacttggtg

SEQ ID NO: 1083850 - DNA, 25 bp, Homo sapien
cacccgtgccatgtagaataagtta

SEQ ID NO: 1083851 - DNA, 25 bp, Homo sapien
cggagtaatcaaatggtcctagagg

SEQ ID NO: 1083852 - DNA, 25 bp, Homo sapien
gaccggaaactttatgatgctggga

SEQ ID NO: 1083853 - DNA, 25 bp, Homo sapien
acaccattagaagttgttaggacat

SEQ ID NO: 1083854 - DNA, 25 bp, Homo sapien
taactttttaggtgcaataatggta

SEQ ID NO: 1083855 - DNA, 25 bp, Homo sapien
taagaactacaggttgtttgagatc

SEQ ID NO: 1083856 - DNA, 25 bp, Homo sapien
gggtccctgggaattcattacacta

SEQ ID NO: 1083857 - DNA, 25 bp, Homo sapien
cgggtcaatcgaacctcccgccgcg

SEQ ID NO: 1083858 - DNA, 25 bp, Homo sapien
tcctgttcccaaagcgcgcgttaac

SEQ ID NO: 1083859 - DNA, 25 bp, Homo sapien
caaagcgcgcgttaacagccgccaa

SEQ ID NO: 1083860 - DNA, 25 bp, Homo sapien
gcgcgcgttaacagccgccaagact

SEQ ID NO: 1083861 - DNA, 25 bp, Homo sapien
cctgttcccaaagcgcgcgttaaca

SEQ ID NO: 1083862 - DNA, 25 bp, Homo sapien
gctacattattgagaggaccggcta

SEQ ID NO: 1083863 - DNA, 25 bp, Homo sapien
ttaaaacgtcaagtacccatgagcc

SEQ ID NO: 1083864 - DNA, 25 bp, Homo sapien
taagccgagacgagagattaggcca

SEQ ID NO: 1083865 - DNA, 25 bp, Homo sapien
tggaaaccaggatcagactcaggga

SEQ ID NO: 1083866 - DNA, 25 bp, Homo sapien
ctaggccaggttgccagtcttcatc

SEQ ID NO: 1083867 - DNA, 25 bp, Homo sapien
ccaggttgccagtcttcatcatcac

SEQ ID NO: 1083868 - DNA, 25 bp, Homo sapien
aggccaggttgccagtcttcatcat

SEQ ID NO: 1083869 - DNA, 25 bp, Homo sapien
cactaggccaggttgccagtcttca

SEQ ID NO: 1083870 - DNA, 25 bp, Homo sapien
agctgactcaaaggtttccgaaaag

SEQ ID NO: 1083871 - DNA, 25 bp, Homo sapien
cctggatctgggtctcactgctgga

SEQ ID NO: 1083872 - DNA, 25 bp, Homo sapien
ccagacaaggtggttgattggttag

SEQ ID NO: 1083873 - DNA, 25 bp, Homo sapien
tgctgactgctgtccagacaaggtg

SEQ ID NO: 1083874 - DNA, 25 bp, Homo sapien
ttgacaaaatgcttcgaataaatgc

SEQ ID NO: 1083875 - DNA, 25 bp, Homo sapien
aggctttgacaaaatgcttcgaata

SEQ ID NO: 1083876 - DNA, 25 bp, Homo sapien
tgataatttggaatggggactttga

SEQ ID NO: 1083877 - DNA, 25 bp, Homo sapien
gctttgacaaaatgcttcgaataaa

SEQ ID NO: 1083878 - DNA, 25 bp, Homo sapien
tgactgatttcaaaaacagaaaaac

SEQ ID NO: 1083879 - DNA, 25 bp, Homo sapien
atatgactgatttcaaaaacagaaa

SEQ ID NO: 1083880 - DNA, 25 bp, Homo sapien
tatgactgatttcaaaaacagaaaa

SEQ ID NO: 1083881 - DNA, 25 bp, Homo sapien
atgactgatttcaaaaacagaaaaa

SEQ ID NO: 1083882 - DNA, 25 bp, Homo sapien
tcagctggtcatgagcgctcagcgg

SEQ ID NO: 1083883 - DNA, 25 bp, Homo sapien
gcccaatgctcgagagcccagagga

SEQ ID NO: 1083884 - DNA, 25 bp, Homo sapien
gggaggctcatacagaaccaaggca

SEQ ID NO: 1083885 - DNA, 25 bp, Homo sapien
catacagaaccaaggcatctttttc

SEQ ID NO: 1083886 - DNA, 25 bp, Homo sapien
caacaaccacatggacagggagttt

SEQ ID NO: 1083887 - DNA, 25 bp, Homo sapien
ctgatgaggccgcaaaaccttactg

SEQ ID NO: 1083888 - DNA, 25 bp, Homo sapien
gccgcaaaaccttactgagaatagg

SEQ ID NO: 1083889 - DNA, 25 bp, Homo sapien
actgagaatagggtcaacaaccaca

SEQ ID NO: 1083890 - DNA, 25 bp, Homo sapien
gggatgcgccgactggtgacacact

SEQ ID NO: 1083891 - DNA, 25 bp, Homo sapien
ggcgtaaaagtgtccacatcaatgt

SEQ ID NO: 1083892 - DNA, 25 bp, Homo sapien
tgcactctggactctggcgtaaaag

SEQ ID NO: 1083893 - DNA, 25 bp, Homo sapien
tgatgcactgcagcgtctttcctag

SEQ ID NO: 1083894 - DNA, 25 bp, Homo sapien
agcaggctgtgcaggagagtgcagc

SEQ ID NO: 1083895 - DNA, 25 bp, Homo sapien
gctgtgcaggagagtgcagccatct

SEQ ID NO: 1083896 - DNA, 25 bp, Homo sapien
ctgtgcaggagagtgcagccatctt

SEQ ID NO: 1083897 - DNA, 25 bp, Homo sapien
caggctgtgcaggagagtgcagcca

SEQ ID NO: 1083898 - DNA, 25 bp, Homo sapien
gaaggcggaaggtctcataggaaat

SEQ ID NO: 1083899 - DNA, 25 bp, Homo sapien
tggaggactccaacatgaaggcgga

SEQ ID NO: 1083900 - DNA, 25 bp, Homo sapien
cctggctccacgctggttcatgaat

SEQ ID NO: 1083901 - DNA, 25 bp, Homo sapien
aatgatgaggatgggagaagacacc

SEQ ID NO: 1083902 - DNA, 25 bp, Homo sapien
taggatgccggaattaacaaaatgt

SEQ ID NO: 1083903 - DNA, 25 bp, Homo sapien
ggagttccggagatgagcacccgcc

SEQ ID NO: 1083904 - DNA, 25 bp, Homo sapien
ccagggcttggtaagtctgattctc

SEQ ID NO: 1083905 - DNA, 25 bp, Homo sapien
cgccggctggtgttcaagctgtcca

SEQ ID NO: 1083906 - DNA, 25 bp, Homo sapien
caaggagacaaacggaccagaggaa

SEQ ID NO: 1083907 - DNA, 25 bp, Homo sapien
taaagcagagaagtactgacacaag

SEQ ID NO: 1083908 - DNA, 25 bp, Homo sapien
ttcacactaatggatatcaagactt

SEQ ID NO: 1083909 - DNA, 25 bp, Homo sapien
tattaggccacagtaaataaagcag

SEQ ID NO: 1083910 - DNA, 25 bp, Homo sapien
gattacaggcaccccttctccgtgc

SEQ ID NO: 1083911 - DNA, 25 bp, Homo sapien
attacaggcaccccttctccgtgcc

SEQ ID NO: 1083912 - DNA, 25 bp, Homo sapien
gaatgattttcccacagctagtgat

SEQ ID NO: 1083913 - DNA, 25 bp, Homo sapien
ggccaaaagtgagatgataggttaa

SEQ ID NO: 1083914 - DNA, 25 bp, Homo sapien
aaccagccttcctaccaagaacaag

SEQ ID NO: 1083915 - DNA, 25 bp, Homo sapien
tagtgatggcagactaccttctcac

SEQ ID NO: 1083916 - DNA, 25 bp, Homo sapien
tcactagcagcagcgtctcgaccct

SEQ ID NO: 1083917 - DNA, 25 bp, Homo sapien
gacccttcaaaattggcaattcaaa

SEQ ID NO: 1083918 - DNA, 25 bp, Homo sapien
gcagccgctcctctcctagctgcct

SEQ ID NO: 1083919 - DNA, 25 bp, Homo sapien
gcagcagcgtctcgacccttcaaaa

SEQ ID NO: 1083920 - DNA, 25 bp, Homo sapien
gcaggaggactctttagaatgtaac

SEQ ID NO: 1083921 - DNA, 25 bp, Homo sapien
cagaatgtgcctaccctctgggtta

SEQ ID NO: 1083922 - DNA, 25 bp, Homo sapien
caagtgtgcataccacctctggaca

SEQ ID NO: 1083923 - DNA, 25 bp, Homo sapien
cctctggacaaaggagtccagaatg

SEQ ID NO: 1083924 - DNA, 25 bp, Homo sapien
tatcagaagtcctccgtatcaggca

SEQ ID NO: 1083925 - DNA, 25 bp, Homo sapien
ggatatcagaagtcctccgtatcag

SEQ ID NO: 1083926 - DNA, 25 bp, Homo sapien
gaaaggatatcagaagtcctccgta

SEQ ID NO: 1083927 - DNA, 25 bp, Homo sapien
aaggatatcagaagtcctccgtatc

SEQ ID NO: 1083928 - DNA, 25 bp, Homo sapien
ctcttgtataactcagtctgaaggg

SEQ ID NO: 1083929 - DNA, 25 bp, Homo sapien
agcaattcttctgccggtttggctt

SEQ ID NO: 1083930 - DNA, 25 bp, Homo sapien
tcagaaacctcttgtataactcagt

SEQ ID NO: 1083931 - DNA, 25 bp, Homo sapien
ttacaaagcttctttagcgaggtga

SEQ ID NO: 1083932 - DNA, 25 bp, Homo sapien
tcctcttccacacacttatcataga

SEQ ID NO: 1083933 - DNA, 25 bp, Homo sapien
ttccacacacttatcatagattaga

SEQ ID NO: 1083934 - DNA, 25 bp, Homo sapien
gggctccagggccttagagctgtaa

SEQ ID NO: 1083935 - DNA, 25 bp, Homo sapien
ccttagagctgtaaccaggagggaa

SEQ ID NO: 1083936 - DNA, 25 bp, Homo sapien
ggcccaggcttcttactcttgatat

SEQ ID NO: 1083937 - DNA, 25 bp, Homo sapien
agcaaccagcagtcccctactggct

SEQ ID NO: 1083938 - DNA, 25 bp, Homo sapien
ctggctgtcccaatggcccaggctt

SEQ ID NO: 1083939 - DNA, 25 bp, Homo sapien
ctgggaagagcagcaaccagcagtc

SEQ ID NO: 1083940 - DNA, 25 bp, Homo sapien
ttctcaaagagatccaaagtctggg

SEQ ID NO: 1083941 - DNA, 25 bp, Homo sapien
ggcttcgggtcaccgccagaatata

SEQ ID NO: 1083942 - DNA, 25 bp, Homo sapien
cttcgggcacggcacagcttctcaa

SEQ ID NO: 1083943 - DNA, 25 bp, Homo sapien
ggtgtaattcgacaccagcactact

SEQ ID NO: 1083944 - DNA, 25 bp, Homo sapien
cgatggactattgaagcgttctaca

SEQ ID NO: 1083945 - DNA, 25 bp, Homo sapien
ctattgaagcgttctacaaccttgg

SEQ ID NO: 1083946 - DNA, 25 bp, Homo sapien
tcgtgccatccaggcggacgtataa

SEQ ID NO: 1083947 - DNA, 25 bp, Homo sapien
ttggctcgcttcttaatggacatcg

SEQ ID NO: 1083948 - DNA, 25 bp, Homo sapien
atgaccagccggttagccccaatga

SEQ ID NO: 1083949 - DNA, 25 bp, Homo sapien
caggcggtagatatagcaagtcttc

SEQ ID NO: 1083950 - DNA, 25 bp, Homo sapien
tgggttccagtcagggtcaaacatg

SEQ ID NO: 1083951 - DNA, 25 bp, Homo sapien
ccagacccgggccatggcttgttca

SEQ ID NO: 1083952 - DNA, 25 bp, Homo sapien
ccatagcttggctactgctagaggc

SEQ ID NO: 1083953 - DNA, 25 bp, Homo sapien
tgaagatctcgttccatgacccacc

SEQ ID NO: 1083954 - DNA, 25 bp, Homo sapien
ccaaagagaggcactaaggaacaag

SEQ ID NO: 1083955 - DNA, 25 bp, Homo sapien
caagatggtcctgaagatctcgttc

SEQ ID NO: 1083956 - DNA, 25 bp, Homo sapien
ttcttgtggctctgacgctggaaga

SEQ ID NO: 1083957 - DNA, 25 bp, Homo sapien
gctccttcaactcgcccagagagaa

SEQ ID NO: 1083958 - DNA, 25 bp, Homo sapien
ccagagagaagtggcgctctacatc

SEQ ID NO: 1083959 - DNA, 25 bp, Homo sapien
ggctctgacgctggaagatcttctc

SEQ ID NO: 1083960 - DNA, 25 bp, Homo sapien
tatcagtgcagtggttccaccctgc

SEQ ID NO: 1083961 - DNA, 25 bp, Homo sapien
ccaccctgccaggtctgaagtgcag

SEQ ID NO: 1083962 - DNA, 25 bp, Homo sapien
aggcagcctggagtacctcatcccg

SEQ ID NO: 1083963 - DNA, 25 bp, Homo sapien
tggccggatctgacggctgttgaca

SEQ ID NO: 1083964 - DNA, 25 bp, Homo sapien
cggaggccccgctgctcctcatgag

SEQ ID NO: 1083965 - DNA, 25 bp, Homo sapien
tcagcggaggccccgctgctcctca

SEQ ID NO: 1083966 - DNA, 25 bp, Homo sapien
agcggaggccccgctgctcctcatg

SEQ ID NO: 1083967 - DNA, 25 bp, Homo sapien
aggccccgctgctcctcatgagaac

SEQ ID NO: 1083968 - DNA, 25 bp, Homo sapien
tttccctatctccttcctctaagag

SEQ ID NO: 1083969 - DNA, 25 bp, Homo sapien
aaattttgggcaaacatcatgcagc

SEQ ID NO: 1083970 - DNA, 25 bp, Homo sapien
aacaaaattcaacagggccctgtgg

SEQ ID NO: 1083971 - DNA, 25 bp, Homo sapien
tatctccttcctctaagagctacac

SEQ ID NO: 1083972 - DNA, 25 bp, Homo sapien
caggccttcgcagattatgttagca

SEQ ID NO: 1083973 - DNA, 25 bp, Homo sapien
tgtggttagcgactcatgggactca

SEQ ID NO: 1083974 - DNA, 25 bp, Homo sapien
tctgccgtctgtttgagaagcgccc

SEQ ID NO: 1083975 - DNA, 25 bp, Homo sapien
caggcacccaggctttagagaagta

SEQ ID NO: 1083976 - DNA, 25 bp, Homo sapien
agtcaagtgtcgctatactcctggc

SEQ ID NO: 1083977 - DNA, 25 bp, Homo sapien
taacatgctgcagggtgcaaccgag

SEQ ID NO: 1083978 - DNA, 25 bp, Homo sapien
caggcgtctttgtgatcagcggttc

SEQ ID NO: 1083979 - DNA, 25 bp, Homo sapien
cagagtgtgacatgttggcgagcca

SEQ ID NO: 1083980 - DNA, 25 bp, Homo sapien
ctgggcaacagagcaggaatgtctt

SEQ ID NO: 1083981 - DNA, 25 bp, Homo sapien
gtggcttacgcctgtaatcccaaca

SEQ ID NO: 1083982 - DNA, 25 bp, Homo sapien
gcaacagagcaggaatgtcttaaaa

SEQ ID NO: 1083983 - DNA, 25 bp, Homo sapien
aaaaactagaaacaggccgggcatg

SEQ ID NO: 1083984 - DNA, 25 bp, Homo sapien
caagagtcgggtacagtgactgaca

SEQ ID NO: 1083985 - DNA, 25 bp, Homo sapien
agtaaaggcacaagagtcgggtaca

SEQ ID NO: 1083986 - DNA, 25 bp, Homo sapien
aagtgagaggaatagcttgagccta

SEQ ID NO: 1083987 - DNA, 25 bp, Homo sapien
cgggtacagtgactgacatctataa

SEQ ID NO: 1083988 - DNA, 25 bp, Homo sapien
cacaaacacaagctgggtactgata

SEQ ID NO: 1083989 - DNA, 25 bp, Homo sapien
gatgaactgatgaagacaaggcctt

SEQ ID NO: 1083990 - DNA, 25 bp, Homo sapien
tgatgtactttactcatggtggcca

SEQ ID NO: 1083991 - DNA, 25 bp, Homo sapien
tggcgccgactctgggatgaactga

SEQ ID NO: 1083992 - DNA, 25 bp, Homo sapien
tctgacctccaaagattacaggaat

SEQ ID NO: 1083993 - DNA, 25 bp, Homo sapien
taaccaccaacatttagcgagctta

SEQ ID NO: 1083994 - DNA, 25 bp, Homo sapien
tttgacttgttcttgattggacaga

SEQ ID NO: 1083995 - DNA, 25 bp, Homo sapien
cagagatgccattgacaggataaaa

SEQ ID NO: 1083996 - DNA, 25 bp, Homo sapien
cccagttcaggatcaagaaggactt

SEQ ID NO: 1083997 - DNA, 25 bp, Homo sapien
aatccggcgatctggccggaagtgc

SEQ ID NO: 1083998 - DNA, 25 bp, Homo sapien
tgtaagggtcactcagcggaaatcc

SEQ ID NO: 1083999 - DNA, 25 bp, Homo sapien
agcggcacctaacccagttcaggat

SEQ ID NO: 1084000 - DNA, 25 bp, Homo sapien
aggatctccggattcggtaagcatc

SEQ ID NO: 1084001 - DNA, 25 bp, Homo sapien
tccggattcggtaagcatcttttgc

SEQ ID NO: 1084002 - DNA, 25 bp, Homo sapien
ttcggtaagcatcttttgctcgtcc

SEQ ID NO: 1084003 - DNA, 25 bp, Homo sapien
ggattcggtaagcatcttttgctcg

SEQ ID NO: 1084004 - DNA, 25 bp, Homo sapien
tagaaacaactagtagctgtgtcgc

SEQ ID NO: 1084005 - DNA, 25 bp, Homo sapien
gtcgcaaaattgataagagtcctgg

SEQ ID NO: 1084006 - DNA, 25 bp, Homo sapien
gcaccaatttggtagctgcatgacc

SEQ ID NO: 1084007 - DNA, 25 bp, Homo sapien
caagtgaccagagaacagacggaca

SEQ ID NO: 1084008 - DNA, 25 bp, Homo sapien
tcaaactcccgagcagttgagacca

SEQ ID NO: 1084009 - DNA, 25 bp, Homo sapien
aactcccgagcagttgagaccacag

SEQ ID NO: 1084010 - DNA, 25 bp, Homo sapien
aaactcccgagcagttgagaccaca

SEQ ID NO: 1084011 - DNA, 25 bp, Homo sapien
ggctcaaactcccgagcagttgaga

SEQ ID NO: 1084012 - DNA, 25 bp, Homo sapien
gtgcatgcagatacccacatttggg

SEQ ID NO: 1084013 - DNA, 25 bp, Homo sapien
tcatgagcttggaaatacagaacag

SEQ ID NO: 1084014 - DNA, 25 bp, Homo sapien
agaactccaatacagggccaggtga

SEQ ID NO: 1084015 - DNA, 25 bp, Homo sapien
ggatagtagtgtaaaaaactgccca

SEQ ID NO: 1084016 - DNA, 25 bp, Homo sapien
tttgagcaagtgtacctacgctgcc

SEQ ID NO: 1084017 - DNA, 25 bp, Homo sapien
agctagagcccaacgaaattattca

SEQ ID NO: 1084018 - DNA, 25 bp, Homo sapien
taggaaccagccctataagctagag

SEQ ID NO: 1084019 - DNA, 25 bp, Homo sapien
ttccttcccatagaaaccaaggtgc

SEQ ID NO: 1084020 - DNA, 25 bp, Homo sapien
tataggaggccttacttgttaacac

SEQ ID NO: 1084021 - DNA, 25 bp, Homo sapien
aatagcagatgattgagtgccaggc

SEQ ID NO: 1084022 - DNA, 25 bp, Homo sapien
cattttggaatatgacacgtctgaa

SEQ ID NO: 1084023 - DNA, 25 bp, Homo sapien
tgctccctggtaccacaactgaaga

SEQ ID NO: 1084024 - DNA, 25 bp, Homo sapien
aatgcggtctcccattcaattctga

SEQ ID NO: 1084025 - DNA, 25 bp, Homo sapien
caattctgatgctaagtagtaggga

SEQ ID NO: 1084026 - DNA, 25 bp, Homo sapien
cacactgccgccagaaatggcagaa

SEQ ID NO: 1084027 - DNA, 25 bp, Homo sapien
ttccaaggttgccagtatgcactga

SEQ ID NO: 1084028 - DNA, 25 bp, Homo sapien
ttttagcagagacccaccaaacaca

SEQ ID NO: 1084029 - DNA, 25 bp, Homo sapien
accaaaccaaggtgctgcctctgaa

SEQ ID NO: 1084030 - DNA, 25 bp, Homo sapien
tttttagcagagacccaccaaacac

SEQ ID NO: 1084031 - DNA, 25 bp, Homo sapien
acatatgctttgattaacacaacca

SEQ ID NO: 1084032 - DNA, 25 bp, Homo sapien
cattgctctctcactgttgttaggg

SEQ ID NO: 1084033 - DNA, 25 bp, Homo sapien
gtcaaagagctcctccgtgcaatcc

SEQ ID NO: 1084034 - DNA, 25 bp, Homo sapien
gcattgctctctcactgttgttagg

SEQ ID NO: 1084035 - DNA, 25 bp, Homo sapien
agctcctccgtgcaatcctcttctg

SEQ ID NO: 1084036 - DNA, 25 bp, Homo sapien
gagccagcttgcctggttatctata

SEQ ID NO: 1084037 - DNA, 25 bp, Homo sapien
cagcttgcctggttatctatatcta

SEQ ID NO: 1084038 - DNA, 25 bp, Homo sapien
gtgagccagcttgcctggttatcta

SEQ ID NO: 1084039 - DNA, 25 bp, Homo sapien
cagtgcccagcctagctgatggaca

SEQ ID NO: 1084040 - DNA, 25 bp, Homo sapien
atcccattgtatatacaaagcacat

SEQ ID NO: 1084041 - DNA, 25 bp, Homo sapien
tcccattgtatatacaaagcacatt

SEQ ID NO: 1084042 - DNA, 25 bp, Homo sapien
ctatggatggaaaattgggttgttt

SEQ ID NO: 1084043 - DNA, 25 bp, Homo sapien
ggtacctcaccaaagtggaacaata

SEQ ID NO: 1084044 - DNA, 25 bp, Homo sapien
gaatgtgactgctattctaggtacc

SEQ ID NO: 1084045 - DNA, 25 bp, Homo sapien
aatctctagaacgtccaatcttggg

SEQ ID NO: 1084046 - DNA, 25 bp, Homo sapien
tgcagcacgtgtcagagtttccctc

SEQ ID NO: 1084047 - DNA, 25 bp, Homo sapien
tcacataggcaagcagcacttgagt

SEQ ID NO: 1084048 - DNA, 25 bp, Homo sapien
cctaaaccagtgcttggctgacaaa

SEQ ID NO: 1084049 - DNA, 25 bp, Homo sapien
gaaaaggaggtaatcaattggcagc

SEQ ID NO: 1084050 - DNA, 25 bp, Homo sapien
ttcagggaacagatcatgacttgcc

SEQ ID NO: 1084051 - DNA, 25 bp, Homo sapien
atttcaagttgttaaagagtttgtg

SEQ ID NO: 1084052 - DNA, 25 bp, Homo sapien
tcaagttgttaaagagtttgtgggc

SEQ ID NO: 1084053 - DNA, 25 bp, Homo sapien
gtgaacttacagttacacaaataag

SEQ ID NO: 1084054 - DNA, 25 bp, Homo sapien
catagaagctaccagcctaagccaa

SEQ ID NO: 1084055 - DNA, 25 bp, Homo sapien
tgcgaattacatagaagctaccagc

SEQ ID NO: 1084056 - DNA, 25 bp, Homo sapien
gaacttacagttacacaaataagaa

SEQ ID NO: 1084057 - DNA, 25 bp, Homo sapien
gaaatacatctgacgctctcccagg

SEQ ID NO: 1084058 - DNA, 25 bp, Homo sapien
tgaagcttaagtttcgggacctggc

SEQ ID NO: 1084059 - DNA, 25 bp, Homo sapien
tgcttagagcagtgcgagggactcc

SEQ ID NO: 1084060 - DNA, 25 bp, Homo sapien
agagcaacctggcacccggaataat

SEQ ID NO: 1084061 - DNA, 25 bp, Homo sapien
agctcccggacacccctcagtgtca

SEQ ID NO: 1084062 - DNA, 25 bp, Homo sapien
tatatcgatgtctccgcgggaccgt

SEQ ID NO: 1084063 - DNA, 25 bp, Homo sapien
atttcttcttatatcgatgtctccg

SEQ ID NO: 1084064 - DNA, 25 bp, Homo sapien
gcgaggtccacacgcttcagcagct

SEQ ID NO: 1084065 - DNA, 25 bp, Homo sapien
aaaggagaagtcatgtgggggaaga

SEQ ID NO: 1084066 - DNA, 25 bp, Homo sapien
caggcaaggtcgctatggtattttc

SEQ ID NO: 1084067 - DNA, 25 bp, Homo sapien
tgcaaggcggcggagacccaggagt

SEQ ID NO: 1084068 - DNA, 25 bp, Homo sapien
agtgcaggcaaggtcgctatggtat

SEQ ID NO: 1084069 - DNA, 25 bp, Homo sapien
aggtcgctatggtattttccgaggg

SEQ ID NO: 1084070 - DNA, 25 bp, Homo sapien
tttgggccggcagtatggacagggt

SEQ ID NO: 1084071 - DNA, 25 bp, Homo sapien
ttgcccggtcgccagaggcagctcg

SEQ ID NO: 1084072 - DNA, 25 bp, Homo sapien
acagggtggtcgctgtaaccttgcc

SEQ ID NO: 1084073 - DNA, 25 bp, Homo sapien
cagaggcagctcgaggttgaggaag

SEQ ID NO: 1084074 - DNA, 25 bp, Homo sapien
gtgaccccggaatgctgaactgctc

SEQ ID NO: 1084075 - DNA, 25 bp, Homo sapien
tctctggagaagcaaggagagtcca

SEQ ID NO: 1084076 - DNA, 25 bp, Homo sapien
ggcgtgccggtcatagaagaaattc

SEQ ID NO: 1084077 - DNA, 25 bp, Homo sapien
tcatccagctgcaataaggtgtccg

SEQ ID NO: 1084078 - DNA, 25 bp, Homo sapien
gaaggccatccgctagagtaacaga

SEQ ID NO: 1084079 - DNA, 25 bp, Homo sapien
catcacaggctgacaacgaggttgg

SEQ ID NO: 1084080 - DNA, 25 bp, Homo sapien
taactattggccgagacaggatcac

SEQ ID NO: 1084081 - DNA, 25 bp, Homo sapien
taaggctgccatggtaaaagctgcc

SEQ ID NO: 1084082 - DNA, 25 bp, Homo sapien
caaagccagtcgaacagcagggaat

SEQ ID NO: 1084083 - DNA, 25 bp, Homo sapien
tgcaaagccagtcgaacagcaggga

SEQ ID NO: 1084084 - DNA, 25 bp, Homo sapien
agccagtcgaacagcagggaatttg

SEQ ID NO: 1084085 - DNA, 25 bp, Homo sapien
ctgcaaagccagtcgaacagcaggg

SEQ ID NO: 1084086 - DNA, 25 bp, Homo sapien
tgcacactgtaagtcatgtcaaaat

SEQ ID NO: 1084087 - DNA, 25 bp, Homo sapien
caaagatctccaaactgcacactgt

SEQ ID NO: 1084088 - DNA, 25 bp, Homo sapien
gatcccaggcagcaaagttattgac

SEQ ID NO: 1084089 - DNA, 25 bp, Homo sapien
gacacggattgatggccaaagatct

SEQ ID NO: 1084090 - DNA, 25 bp, Homo sapien
gatatcccctctgtcaaaagtgaag

SEQ ID NO: 1084091 - DNA, 25 bp, Homo sapien
ttggccaccctcagactgcagttcc

SEQ ID NO: 1084092 - DNA, 25 bp, Homo sapien
aaagtgaagcatcgaaggttcggac

SEQ ID NO: 1084093 - DNA, 25 bp, Homo sapien
caggagggaagcgactgatatcccc

SEQ ID NO: 1084094 - DNA, 25 bp, Homo sapien
catctgagggacctaaagcaagtaa

SEQ ID NO: 1084095 - DNA, 25 bp, Homo sapien
gaagctgggtctcaacatgtctact

SEQ ID NO: 1084096 - DNA, 25 bp, Homo sapien
ataccaagtttgtgcccctagacca

SEQ ID NO: 1084097 - DNA, 25 bp, Homo sapien
cagagtgggttcaaagtgcaggttc

SEQ ID NO: 1084098 - DNA, 25 bp, Homo sapien
catccatcaggtagtactccatgac

SEQ ID NO: 1084099 - DNA, 25 bp, Homo sapien
caggccgagggccagaacaggcagc

SEQ ID NO: 1084100 - DNA, 25 bp, Homo sapien
aggccgagggccagaacaggcagca

SEQ ID NO: 1084101 - DNA, 25 bp, Homo sapien
ccatcaggtagtactccatgacacc

SEQ ID NO: 1084102 - DNA, 25 bp, Homo sapien
gccagtctgaagcaacgctagtgtc

SEQ ID NO: 1084103 - DNA, 25 bp, Homo sapien
tgaagcaacgctagtgtctttcccc

SEQ ID NO: 1084104 - DNA, 25 bp, Homo sapien
cagtctgaagcaacgctagtgtctt

SEQ ID NO: 1084105 - DNA, 25 bp, Homo sapien
acagccagtctgaagcaacgctagt

SEQ ID NO: 1084106 - DNA, 25 bp, Homo sapien
tccagaaggctatgaccgaatgtga

SEQ ID NO: 1084107 - DNA, 25 bp, Homo sapien
tcagtcagataagaattgtccagca

SEQ ID NO: 1084108 - DNA, 25 bp, Homo sapien
aaatgacacttgatacctggcctct

SEQ ID NO: 1084109 - DNA, 25 bp, Homo sapien
taaagaatgcgagatgcaagtgtcc

SEQ ID NO: 1084110 - DNA, 25 bp, Homo sapien
cggggagagatcattggcagcaaga

SEQ ID NO: 1084111 - DNA, 25 bp, Homo sapien
tgtagtctggctattcgggacgggg

SEQ ID NO: 1084112 - DNA, 25 bp, Homo sapien
acggggagagatcattggcagcaag

SEQ ID NO: 1084113 - DNA, 25 bp, Homo sapien
tggctattcgggacggggagagatc

SEQ ID NO: 1084114 - DNA, 25 bp, Homo sapien
tgaggtaactcgaacttgatttcca

SEQ ID NO: 1084115 - DNA, 25 bp, Homo sapien
cctgccatcccatgaggtaactcga

SEQ ID NO: 1084116 - DNA, 25 bp, Homo sapien
tcgaacttgatttccatccctgatc

SEQ ID NO: 1084117 - DNA, 25 bp, Homo sapien
catccctgatctcttcaggcacata

SEQ ID NO: 1084118 - DNA, 25 bp, Homo sapien
gggagaaagagtagacgaagttcca

SEQ ID NO: 1084119 - DNA, 25 bp, Homo sapien
ggcaatatctgtcgctccttcttcc

SEQ ID NO: 1084120 - DNA, 25 bp, Homo sapien
tcatgaagggagtggcggtctgtgg

SEQ ID NO: 1084121 - DNA, 25 bp, Homo sapien
tccttgaccgcttaaagatgttgtt

SEQ ID NO: 1084122 - DNA, 25 bp, Homo sapien
ggtctgtggtacagggcacatccac

SEQ ID NO: 1084123 - DNA, 25 bp, Homo sapien
cacatactcgttctgtaagtgtgag

SEQ ID NO: 1084124 - DNA, 25 bp, Homo sapien
caggagctcaatggcaccttgcacc

SEQ ID NO: 1084125 - DNA, 25 bp, Homo sapien
accttgcaccacatactcgttctgt

SEQ ID NO: 1084126 - DNA, 25 bp, Homo sapien
tggatgctgtattgattggccagga

SEQ ID NO: 1084127 - DNA, 25 bp, Homo sapien
gaaacaaaatgtgtccatgaaaacc

SEQ ID NO: 1084128 - DNA, 25 bp, Homo sapien
gaaaacccttcggaagtgagtcaga

SEQ ID NO: 1084129 - DNA, 25 bp, Homo sapien
ccttcggaagtgagtcagatcttcc

SEQ ID NO: 1084130 - DNA, 25 bp, Homo sapien
tgtccatgaaaacccttcggaagtg

SEQ ID NO: 1084131 - DNA, 25 bp, Homo sapien
ggccatgaggtttggtattaccagc

SEQ ID NO: 1084132 - DNA, 25 bp, Homo sapien
gaggtttggtattaccagctcccca

SEQ ID NO: 1084133 - DNA, 25 bp, Homo sapien
gccaaaattggccatgaggtttggt

SEQ ID NO: 1084134 - DNA, 25 bp, Homo sapien
tacatggggccaaaattggccatga

SEQ ID NO: 1084135 - DNA, 25 bp, Homo sapien
gagacaggaccgagagtgcatctct

SEQ ID NO: 1084136 - DNA, 25 bp, Homo sapien
caggatggagacaggaccgagagtg

SEQ ID NO: 1084137 - DNA, 25 bp, Homo sapien
ttccagtttctggtgcatccaacag

SEQ ID NO: 1084138 - DNA, 25 bp, Homo sapien
tgcatccaacagagtataccctttg

SEQ ID NO: 1084139 - DNA, 25 bp, Homo sapien
gttggaaacctgctgatgctccaca

SEQ ID NO: 1084140 - DNA, 25 bp, Homo sapien
aaacctgctgatgctccacaattgg

SEQ ID NO: 1084141 - DNA, 25 bp, Homo sapien
gacagcaggacagcaaatcttctac

SEQ ID NO: 1084142 - DNA, 25 bp, Homo sapien
tgagtgagttggaaacctgctgatg

SEQ ID NO: 1084143 - DNA, 25 bp, Homo sapien
tggcttctccttctaagcccctaag

SEQ ID NO: 1084144 - DNA, 25 bp, Homo sapien
tcaacaactttattggccaaatgct

SEQ ID NO: 1084145 - DNA, 25 bp, Homo sapien
taagcgggcagcaaactttagtaca

SEQ ID NO: 1084146 - DNA, 25 bp, Homo sapien
ttacaacttagtgtgagcctgctca

SEQ ID NO: 1084147 - DNA, 25 bp, Homo sapien
tgttggctgctcaagactggtcagg

SEQ ID NO: 1084148 - DNA, 25 bp, Homo sapien
catttgcactgacatgaagtcccca

SEQ ID NO: 1084149 - DNA, 25 bp, Homo sapien
ccagaattattcagctcagagggtt

SEQ ID NO: 1084150 - DNA, 25 bp, Homo sapien
ggtcaggtggaactcacttcaaggg

SEQ ID NO: 1084151 - DNA, 25 bp, Homo sapien
tgtcatacacgaggtctgggaatac

SEQ ID NO: 1084152 - DNA, 25 bp, Homo sapien
ctgtcatacacgaggtctgggaata

SEQ ID NO: 1084153 - DNA, 25 bp, Homo sapien
ggttacggtcctactcagagcacta

SEQ ID NO: 1084154 - DNA, 25 bp, Homo sapien
gaacacagtgtgtgcagtgaagccc

SEQ ID NO: 1084155 - DNA, 25 bp, Homo sapien
gatgaggaagcccagtaatctccca

SEQ ID NO: 1084156 - DNA, 25 bp, Homo sapien
gagtgaacagcatgcagggaccata

SEQ ID NO: 1084157 - DNA, 25 bp, Homo sapien
ggtaggtaaacatcaggaatctcag

SEQ ID NO: 1084158 - DNA, 25 bp, Homo sapien
taaaaggagtgaccagtggagcttc

SEQ ID NO: 1084159 - DNA, 25 bp, Homo sapien
cacctggccgagcttcagactttaa

SEQ ID NO: 1084160 - DNA, 25 bp, Homo sapien
tgcagtggcacaaaacggagtctca

SEQ ID NO: 1084161 - DNA, 25 bp, Homo sapien
aacaacatggtggtatgtctgcacc

SEQ ID NO: 1084162 - DNA, 25 bp, Homo sapien
ggattatccaggcttcacagagcat

SEQ ID NO: 1084163 - DNA, 25 bp, Homo sapien
tttgaaaggattatccaggcttcac

SEQ ID NO: 1084164 - DNA, 25 bp, Homo sapien
tgaacagataaacaacatggtggta

SEQ ID NO: 1084165 - DNA, 25 bp, Homo sapien
tgttagtactaagatgtggagcaaa

SEQ ID NO: 1084166 - DNA, 25 bp, Homo sapien
tcaagatacatccactagaatgaag

SEQ ID NO: 1084167 - DNA, 25 bp, Homo sapien
aatgcaaattaggaccacaacgagg

SEQ ID NO: 1084168 - DNA, 25 bp, Homo sapien
ctgcccggcccactacaataaagtt

SEQ ID NO: 1084169 - DNA, 25 bp, Homo sapien
cagtgagaaatgataaggccctacc

SEQ ID NO: 1084170 - DNA, 25 bp, Homo sapien
tacctaaggtaggaatgctaggaag

SEQ ID NO: 1084171 - DNA, 25 bp, Homo sapien
aagaatttagggctgattggagtaa

SEQ ID NO: 1084172 - DNA, 25 bp, Homo sapien
gaggctactgcctttgatcagtgag

SEQ ID NO: 1084173 - DNA, 25 bp, Homo sapien
tgtcagcatccgcagtcagctggtg

SEQ ID NO: 1084174 - DNA, 25 bp, Homo sapien
gaagggagcttctcagattccagag

SEQ ID NO: 1084175 - DNA, 25 bp, Homo sapien
gctgtcaggtcattcatgcaagagt

SEQ ID NO: 1084176 - DNA, 25 bp, Homo sapien
ggctccacctgtgttatccagaagg

SEQ ID NO: 1084177 - DNA, 25 bp, Homo sapien
taccgcgacagttgaagccgccgca

SEQ ID NO: 1084178 - DNA, 25 bp, Homo sapien
agaggctatcagaggcggcccgcct

SEQ ID NO: 1084179 - DNA, 25 bp, Homo sapien
aagcgcgccagagcctagaggctat

SEQ ID NO: 1084180 - DNA, 25 bp, Homo sapien
gcaaaacccggactggatcagccgg

SEQ ID NO: 1084181 - DNA, 25 bp, Homo sapien
gccggaagcgctgcgccgccctgtc

SEQ ID NO: 1084182 - DNA, 25 bp, Homo sapien
ccgccgccacgaagcagcaggccag

SEQ ID NO: 1084183 - DNA, 25 bp, Homo sapien
gcaggccagggcgaccccggaggcg

SEQ ID NO: 1084184 - DNA, 25 bp, Homo sapien
aggcccgctcgctgcctctgtcgcg

SEQ ID NO: 1084185 - DNA, 25 bp, Homo sapien
ggatcagtcccctactcgccgaagt

SEQ ID NO: 1084186 - DNA, 25 bp, Homo sapien
tactcgccgaagtctcatgggcctg

SEQ ID NO: 1084187 - DNA, 25 bp, Homo sapien
gccgaagtctcatgggcctgcagca

SEQ ID NO: 1084188 - DNA, 25 bp, Homo sapien
tgtggggaacaaactcggatcagtc

SEQ ID NO: 1084189 - DNA, 25 bp, Homo sapien
tactgtgtaacttctgcaccagctg

SEQ ID NO: 1084190 - DNA, 25 bp, Homo sapien
ctagcagcgcctctgagtccaggtc

SEQ ID NO: 1084191 - DNA, 25 bp, Homo sapien
gggccagctctctactgtgtaactt

SEQ ID NO: 1084192 - DNA, 25 bp, Homo sapien
cacataggtgaagagcacggcctca

SEQ ID NO: 1084193 - DNA, 25 bp, Homo sapien
ggaggggctggccttggctggcctt

SEQ ID NO: 1084194 - DNA, 25 bp, Homo sapien
aggggctggccttggctggccttac

SEQ ID NO: 1084195 - DNA, 25 bp, Homo sapien
ctttcccagggaggggctggccttg

SEQ ID NO: 1084196 - DNA, 25 bp, Homo sapien
ccagggaggggctggccttggctgg

SEQ ID NO: 1084197 - DNA, 25 bp, Homo sapien
gtcacacagttggtccctttgttca

SEQ ID NO: 1084198 - DNA, 25 bp, Homo sapien
tggtccctttgttcacttcccaggc

SEQ ID NO: 1084199 - DNA, 25 bp, Homo sapien
tcacagtcagccagataggaggtca

SEQ ID NO: 1084200 - DNA, 25 bp, Homo sapien
tcagccagataggaggtcacacagt

SEQ ID NO: 1084201 - DNA, 25 bp, Homo sapien
taggtgaagcactccttgaggctca

SEQ ID NO: 1084202 - DNA, 25 bp, Homo sapien
aggtgaagcactccttgaggctcac

SEQ ID NO: 1084203 - DNA, 25 bp, Homo sapien
cttgtaggtgaagcactccttgagg

SEQ ID NO: 1084204 - DNA, 25 bp, Homo sapien
tgtaggtgaagcactccttgaggct

SEQ ID NO: 1084205 - DNA, 25 bp, Homo sapien
caaaacaggtataccagtgtcccct

SEQ ID NO: 1084206 - DNA, 25 bp, Homo sapien
tgatacctcctctaagggcccaaaa

SEQ ID NO: 1084207 - DNA, 25 bp, Homo sapien
ggaaggcctctggacctgatacctc

SEQ ID NO: 1084208 - DNA, 25 bp, Homo sapien
agggtccactccaacaactgtcaca

SEQ ID NO: 1084209 - DNA, 25 bp, Homo sapien
gaacatggactgtggaacattggtg

SEQ ID NO: 1084210 - DNA, 25 bp, Homo sapien
ggcaccccttcattcaggctcaagc

SEQ ID NO: 1084211 - DNA, 25 bp, Homo sapien
aacattggtgtgcacgaagggcacg

SEQ ID NO: 1084212 - DNA, 25 bp, Homo sapien
aggctcaagcccagcgtggagtcct

SEQ ID NO: 1084213 - DNA, 25 bp, Homo sapien
tggccaaagagggggttactgcagt

SEQ ID NO: 1084214 - DNA, 25 bp, Homo sapien
ccaaagagggggttactgcagtcat

SEQ ID NO: 1084215 - DNA, 25 bp, Homo sapien
aaagagggggttactgcagtcatag

SEQ ID NO: 1084216 - DNA, 25 bp, Homo sapien
gccaaagagggggttactgcagtca

SEQ ID NO: 1084217 - DNA, 25 bp, Homo sapien
ctccagacccgatgagggccccttc

SEQ ID NO: 1084218 - DNA, 25 bp, Homo sapien
tgcctccgatatcagtgcctaagcc

SEQ ID NO: 1084219 - DNA, 25 bp, Homo sapien
ttccctgtgggcttgaggccgcaga

SEQ ID NO: 1084220 - DNA, 25 bp, Homo sapien
gaagcggatgctgcctccgatatca

SEQ ID NO: 1084221 - DNA, 25 bp, Homo sapien
tctgaacactcaccgctttggaaac

SEQ ID NO: 1084222 - DNA, 25 bp, Homo sapien
cggagaccgaatccccgcctggagc

SEQ ID NO: 1084223 - DNA, 25 bp, Homo sapien
acgcccggccagtggtactgtaatg

SEQ ID NO: 1084224 - DNA, 25 bp, Homo sapien
cccagagaggttggaagctaggcca

SEQ ID NO: 1084225 - DNA, 25 bp, Homo sapien
ctgtccatagacacagcccttcagg

SEQ ID NO: 1084226 - DNA, 25 bp, Homo sapien
tcctgtccatagacacagcccttca

SEQ ID NO: 1084227 - DNA, 25 bp, Homo sapien
cctgtccatagacacagcccttcag

SEQ ID NO: 1084228 - DNA, 25 bp, Homo sapien
cctcctgtccatagacacagccctt

SEQ ID NO: 1084229 - DNA, 25 bp, Homo sapien
gccaggctctccacgtcccgggcca

SEQ ID NO: 1084230 - DNA, 25 bp, Homo sapien
ttctctgaagggcaagggaggcaca

SEQ ID NO: 1084231 - DNA, 25 bp, Homo sapien
ggtccaagcggaacatgtcctcaca

SEQ ID NO: 1084232 - DNA, 25 bp, Homo sapien
ggccatggggcccacggagagacgc

SEQ ID NO: 1084233 - DNA, 25 bp, Homo sapien
cagcgtggcgtgctgctcccaaaat

SEQ ID NO: 1084234 - DNA, 25 bp, Homo sapien
cctggctcacgtagcagcaagtctg

SEQ ID NO: 1084235 - DNA, 25 bp, Homo sapien
gcgtggcgtgctgctcccaaaatgt

SEQ ID NO: 1084236 - DNA, 25 bp, Homo sapien
cagaccctggctcacgtagcagcaa

SEQ ID NO: 1084237 - DNA, 25 bp, Homo sapien
agtctcatagtaccccacacgcagg

SEQ ID NO: 1084238 - DNA, 25 bp, Homo sapien
gcagcctcaaggctctgtttggtct

SEQ ID NO: 1084239 - DNA, 25 bp, Homo sapien
tctgtttggtctccagcacggcccg

SEQ ID NO: 1084240 - DNA, 25 bp, Homo sapien
gagggcatggtatagttgtcagtct

SEQ ID NO: 1084241 - DNA, 25 bp, Homo sapien
tgttgcttggcaagaagggaaccag

SEQ ID NO: 1084242 - DNA, 25 bp, Homo sapien
ggtatgttgcttggcaagaagggaa

SEQ ID NO: 1084243 - DNA, 25 bp, Homo sapien
ctccagagcatggggtatgttgctt

SEQ ID NO: 1084244 - DNA, 25 bp, Homo sapien
catggggtatgttgcttggcaagaa

SEQ ID NO: 1084245 - DNA, 25 bp, Homo sapien
aagttctgtaggaaggtgtggccac

SEQ ID NO: 1084246 - DNA, 25 bp, Homo sapien
tctgtaggaaggtgtggccaccatc

SEQ ID NO: 1084247 - DNA, 25 bp, Homo sapien
tgtggccaccatcactgaagagccc

SEQ ID NO: 1084248 - DNA, 25 bp, Homo sapien
tggccaccatcactgaagagcccac

SEQ ID NO: 1084249 - DNA, 25 bp, Homo sapien
ccccaggtctgcctacttgtctgat

SEQ ID NO: 1084250 - DNA, 25 bp, Homo sapien
gaccccaaagcccactatcactcac

SEQ ID NO: 1084251 - DNA, 25 bp, Homo sapien
gcctacttgtctgatcccaccaaga

SEQ ID NO: 1084252 - DNA, 25 bp, Homo sapien
ggtctgcctacttgtctgatcccac

SEQ ID NO: 1084253 - DNA, 25 bp, Homo sapien
ccattctctatgcagggatcctgtc

SEQ ID NO: 1084254 - DNA, 25 bp, Homo sapien
caaggcaggactcagggtatccctc

SEQ ID NO: 1084255 - DNA, 25 bp, Homo sapien
tctaagaactgagggcaacatctcc

SEQ ID NO: 1084256 - DNA, 25 bp, Homo sapien
ggaaacaaaatgctcggtccaggca

SEQ ID NO: 1084257 - DNA, 25 bp, Homo sapien
gcaggggtccacgaaatcacctttg

SEQ ID NO: 1084258 - DNA, 25 bp, Homo sapien
caggcaggggtccacgaaatcacct

SEQ ID NO: 1084259 - DNA, 25 bp, Homo sapien
gccagcagtcctttaagccattggg

SEQ ID NO: 1084260 - DNA, 25 bp, Homo sapien
tcagaattgagaccaggtcccccag

SEQ ID NO: 1084261 - DNA, 25 bp, Homo sapien
gatcatgcgataggaggccctaggt

SEQ ID NO: 1084262 - DNA, 25 bp, Homo sapien
cccaggtcggcacccctttcagcat

SEQ ID NO: 1084263 - DNA, 25 bp, Homo sapien
tcagcatgcgggttggctgaagatc

SEQ ID NO: 1084264 - DNA, 25 bp, Homo sapien
gggatcatgcgataggaggccctag

SEQ ID NO: 1084265 - DNA, 25 bp, Homo sapien
cacggcagacgtcaaccttcttcag

SEQ ID NO: 1084266 - DNA, 25 bp, Homo sapien
gcacaggacagacgcagggtcggtg

SEQ ID NO: 1084267 - DNA, 25 bp, Homo sapien
acgcagggtcggtgactcagctctg

SEQ ID NO: 1084268 - DNA, 25 bp, Homo sapien
tgggccacggcagacgtcaaccttc

SEQ ID NO: 1084269 - DNA, 25 bp, Homo sapien
ttcatgttgctgaggaaagctgaca

SEQ ID NO: 1084270 - DNA, 25 bp, Homo sapien
tcatgttgctgaggaaagctgacag

SEQ ID NO: 1084271 - DNA, 25 bp, Homo sapien
gcagctagacacagaagaaccctta

SEQ ID NO: 1084272 - DNA, 25 bp, Homo sapien
tcacagccacggagatcagcaacat

SEQ ID NO: 1084273 - DNA, 25 bp, Homo sapien
caaacccctactgtctggatgagaa

SEQ ID NO: 1084274 - DNA, 25 bp, Homo sapien
ccatgggacgtcagggcatgaaaca

SEQ ID NO: 1084275 - DNA, 25 bp, Homo sapien
tcgatctcgtgctgcagttcccaga

SEQ ID NO: 1084276 - DNA, 25 bp, Homo sapien
ctcgatctcgtgctgcagttcccag

SEQ ID NO: 1084277 - DNA, 25 bp, Homo sapien
ctgcagttcccagagttttccagcc

SEQ ID NO: 1084278 - DNA, 25 bp, Homo sapien
cagttcccagagttttccagccgaa

SEQ ID NO: 1084279 - DNA, 25 bp, Homo sapien
gggcagtggccacgagacactgcta

SEQ ID NO: 1084280 - DNA, 25 bp, Homo sapien
actgctagcgggtaccctgtccaac

SEQ ID NO: 1084281 - DNA, 25 bp, Homo sapien
agctgggcccaagtggtggtccagg

SEQ ID NO: 1084282 - DNA, 25 bp, Homo sapien
tgggcatctaggcaagtaagggtca

SEQ ID NO: 1084283 - DNA, 25 bp, Homo sapien
gaacagagccacagtgggacacagg

SEQ ID NO: 1084284 - DNA, 25 bp, Homo sapien
cctctcagagggcatcagtcgttct

SEQ ID NO: 1084285 - DNA, 25 bp, Homo sapien
cagtgggacacaggtcctccgggca

SEQ ID NO: 1084286 - DNA, 25 bp, Homo sapien
tctgcctccagaatgaattgtggat

SEQ ID NO: 1084287 - DNA, 25 bp, Homo sapien
ccccaggctctttaactcagggact

SEQ ID NO: 1084288 - DNA, 25 bp, Homo sapien
ccaggctctttaactcagggactgt

SEQ ID NO: 1084289 - DNA, 25 bp, Homo sapien
caccccaggctctttaactcaggga

SEQ ID NO: 1084290 - DNA, 25 bp, Homo sapien
acaacacaccaggtgaaagcactca

SEQ ID NO: 1084291 - DNA, 25 bp, Homo sapien
ccctccactgggcaatcacggtttt

SEQ ID NO: 1084292 - DNA, 25 bp, Homo sapien
gggcaatcacggttttgcggtacac

SEQ ID NO: 1084293 - DNA, 25 bp, Homo sapien
cactgggcaatcacggttttgcggt

SEQ ID NO: 1084294 - DNA, 25 bp, Homo sapien
cctggggcattcaagtccagagcag

SEQ ID NO: 1084295 - DNA, 25 bp, Homo sapien
caggcagttgtacagcatagtgtag

SEQ ID NO: 1084296 - DNA, 25 bp, Homo sapien
tacagcatagtgtagctgacggccc

SEQ ID NO: 1084297 - DNA, 25 bp, Homo sapien
cagttgtacagcatagtgtagctga

SEQ ID NO: 1084298 - DNA, 25 bp, Homo sapien
tgtacagcatagtgtagctgacggc

SEQ ID NO: 1084299 - DNA, 25 bp, Homo sapien
aatgttccatctgggcctcgtcctc

SEQ ID NO: 1084300 - DNA, 25 bp, Homo sapien
tgcagcatcttgtcccagatatccc

SEQ ID NO: 1084301 - DNA, 25 bp, Homo sapien
ggcctcgtcctcagcagtcaccgtg

SEQ ID NO: 1084302 - DNA, 25 bp, Homo sapien
gatatccccaaagtagcccctgtaa

SEQ ID NO: 1084303 - DNA, 25 bp, Homo sapien
gaaccgcagacacaactcttcttgc

SEQ ID NO: 1084304 - DNA, 25 bp, Homo sapien
gccacacactgcacggccaccggca

SEQ ID NO: 1084305 - DNA, 25 bp, Homo sapien
cgcatgaaccgcagacacaactctt

SEQ ID NO: 1084306 - DNA, 25 bp, Homo sapien
ctcccgcatgaaccgcagacacaac

SEQ ID NO: 1084307 - DNA, 25 bp, Homo sapien
tgcttttcaggggtcatcagtcgct

SEQ ID NO: 1084308 - DNA, 25 bp, Homo sapien
atgactgcttttcaggggtcatcag

SEQ ID NO: 1084309 - DNA, 25 bp, Homo sapien
tttcaggggtcatcagtcgctccac

SEQ ID NO: 1084310 - DNA, 25 bp, Homo sapien
tcaggatgactgcttttcaggggtc

SEQ ID NO: 1084311 - DNA, 25 bp, Homo sapien
gactcagggagtcggcgcttcttgc

SEQ ID NO: 1084312 - DNA, 25 bp, Homo sapien
tgtcatacccatgggctgccacatg

SEQ ID NO: 1084313 - DNA, 25 bp, Homo sapien
tgggtatgcacagtcaagccagccc

SEQ ID NO: 1084314 - DNA, 25 bp, Homo sapien
tgcagagagtgtgagtctcaggtcc

SEQ ID NO: 1084315 - DNA, 25 bp, Homo sapien
cagctctcaggaagcttatggttta

SEQ ID NO: 1084316 - DNA, 25 bp, Homo sapien
cagaatttgtggagcaccatcctct

SEQ ID NO: 1084317 - DNA, 25 bp, Homo sapien
tacaaagaacaaagggtggccaggc

SEQ ID NO: 1084318 - DNA, 25 bp, Homo sapien
gagctcagagagtgataatgctaca

SEQ ID NO: 1084319 - DNA, 25 bp, Homo sapien
gaagttgcagaggtccagtgctcag

SEQ ID NO: 1084320 - DNA, 25 bp, Homo sapien
gctgggaagctcaaaactcggttat

SEQ ID NO: 1084321 - DNA, 25 bp, Homo sapien
tctgtctgttaagggtgtaggtcac

SEQ ID NO: 1084322 - DNA, 25 bp, Homo sapien
taggtcacgccctttccttggtctg

SEQ ID NO: 1084323 - DNA, 25 bp, Homo sapien
gttgaatgtagactgggaattattt

SEQ ID NO: 1084324 - DNA, 25 bp, Homo sapien
gaggatctacagaccaggagaaagc

SEQ ID NO: 1084325 - DNA, 25 bp, Homo sapien
gagaagtggatagatgaggatctac

SEQ ID NO: 1084326 - DNA, 25 bp, Homo sapien
ccaggagaaagctataggttgaatg

SEQ ID NO: 1084327 - DNA, 25 bp, Homo sapien
ccttggctcaggtgacaatgcagtt

SEQ ID NO: 1084328 - DNA, 25 bp, Homo sapien
gctggatcagatcccacgtggttta

SEQ ID NO: 1084329 - DNA, 25 bp, Homo sapien
cctgaacatactgtgggaagaattc

SEQ ID NO: 1084330 - DNA, 25 bp, Homo sapien
ttattctcataatacccagggcttc

SEQ ID NO: 1084331 - DNA, 25 bp, Homo sapien
aaatgatggcaggttgagccctcca

SEQ ID NO: 1084332 - DNA, 25 bp, Homo sapien
aatgatggcaggttgagccctccat

SEQ ID NO: 1084333 - DNA, 25 bp, Homo sapien
gaaatgatggcaggttgagccctcc

SEQ ID NO: 1084334 - DNA, 25 bp, Homo sapien
gccctccattcctaccttgacttcc

SEQ ID NO: 1084335 - DNA, 25 bp, Homo sapien
ttttcttgttgatctgtaactcacc

SEQ ID NO: 1084336 - DNA, 25 bp, Homo sapien
tttcttgttgatctgtaactcacct

SEQ ID NO: 1084337 - DNA, 25 bp, Homo sapien
gagcatgccacgaggtgagcaggga

SEQ ID NO: 1084338 - DNA, 25 bp, Homo sapien
agcatgccacgaggtgagcagggaa

SEQ ID NO: 1084339 - DNA, 25 bp, Homo sapien
gcatgccacgaggtgagcagggaag

SEQ ID NO: 1084340 - DNA, 25 bp, Homo sapien
ccactccgagttgccaaagctgcct

SEQ ID NO: 1084341 - DNA, 25 bp, Homo sapien
tatcccagtgaaatacccccactcc

SEQ ID NO: 1084342 - DNA, 25 bp, Homo sapien
tctgcacttatcagggctcagcaag

SEQ ID NO: 1084343 - DNA, 25 bp, Homo sapien
ccatgctctgcacttatcagggctc

SEQ ID NO: 1084344 - DNA, 25 bp, Homo sapien
gagccaagaagcctgaaaccacaat

SEQ ID NO: 1084345 - DNA, 25 bp, Homo sapien
gctggagacaccatgagtgacctca

SEQ ID NO: 1084346 - DNA, 25 bp, Homo sapien
tgagtgacctcaccccaaaacctct

SEQ ID NO: 1084347 - DNA, 25 bp, Homo sapien
cagacctgtatagcttgttggggag

SEQ ID NO: 1084348 - DNA, 25 bp, Homo sapien
taagtagctacagaggatgctctcc

SEQ ID NO: 1084349 - DNA, 25 bp, Homo sapien
tccagactcagctcttcggtccgaa

SEQ ID NO: 1084350 - DNA, 25 bp, Homo sapien
gctcttcggtccgaagctgctgggc

SEQ ID NO: 1084351 - DNA, 25 bp, Homo sapien
ccaggattggcttggggtccagatc

SEQ ID NO: 1084352 - DNA, 25 bp, Homo sapien
gtgtccttgaggctcatggggaccc

SEQ ID NO: 1084353 - DNA, 25 bp, Homo sapien
gggaccccatagagaaggcctctct

SEQ ID NO: 1084354 - DNA, 25 bp, Homo sapien
cccccaggaaatccatcaggcagtt

SEQ ID NO: 1084355 - DNA, 25 bp, Homo sapien
aaatccatcaggcagttcacctcct

SEQ ID NO: 1084356 - DNA, 25 bp, Homo sapien
tagcccgcttcagagacctgagcag

SEQ ID NO: 1084357 - DNA, 25 bp, Homo sapien
tccttggtcgcaggcttctccagga

SEQ ID NO: 1084358 - DNA, 25 bp, Homo sapien
actttcataatgaccccgtccttgg

SEQ ID NO: 1084359 - DNA, 25 bp, Homo sapien
gcgtcagtgggatgttggtcttaac

SEQ ID NO: 1084360 - DNA, 25 bp, Homo sapien
tcttctttaagttcagtgggctcaa

SEQ ID NO: 1084361 - DNA, 25 bp, Homo sapien
ctggccatagatgggagttgccgca

SEQ ID NO: 1084362 - DNA, 25 bp, Homo sapien
tctttaagttcagtgggctcaacat

SEQ ID NO: 1084363 - DNA, 25 bp, Homo sapien
tagatgggagttgccgcattcaaag

SEQ ID NO: 1084364 - DNA, 25 bp, Homo sapien
tcacctgtgtcagtacccatgccta

SEQ ID NO: 1084365 - DNA, 25 bp, Homo sapien
cacctgtgtcagtacccatgcctag

SEQ ID NO: 1084366 - DNA, 25 bp, Homo sapien
acctgtgtcagtacccatgcctagg

SEQ ID NO: 1084367 - DNA, 25 bp, Homo sapien
gtcacctgtgtcagtacccatgcct

SEQ ID NO: 1084368 - DNA, 25 bp, Homo sapien
gaggccataaacaccacagaagctg

SEQ ID NO: 1084369 - DNA, 25 bp, Homo sapien
tggtccagaggccataaacaccaca

SEQ ID NO: 1084370 - DNA, 25 bp, Homo sapien
ctgaggcgggaacctgtggtccaga

SEQ ID NO: 1084371 - DNA, 25 bp, Homo sapien
cacagaagctggctggtatgcagat

SEQ ID NO: 1084372 - DNA, 25 bp, Homo sapien
cttgatggcagaggcaattccagtg

SEQ ID NO: 1084373 - DNA, 25 bp, Homo sapien
cccttgatggcagaggcaattccag

SEQ ID NO: 1084374 - DNA, 25 bp, Homo sapien
tccccttgatggcagaggcaattcc

SEQ ID NO: 1084375 - DNA, 25 bp, Homo sapien
ttttccccttgatggcagaggcaat

SEQ ID NO: 1084376 - DNA, 25 bp, Homo sapien
gggtccagtcggtacatgtcttcac

SEQ ID NO: 1084377 - DNA, 25 bp, Homo sapien
cagtcggtacatgtcttcactcagc

SEQ ID NO: 1084378 - DNA, 25 bp, Homo sapien
tcggtacatgtcttcactcagcagg

SEQ ID NO: 1084379 - DNA, 25 bp, Homo sapien
tccagtcggtacatgtcttcactca

SEQ ID NO: 1084380 - DNA, 25 bp, Homo sapien
gctatggctccagatagccaagaag

SEQ ID NO: 1084381 - DNA, 25 bp, Homo sapien
aagctatggctccagatagccaaga

SEQ ID NO: 1084382 - DNA, 25 bp, Homo sapien
tatggctccagatagccaagaagcc

SEQ ID NO: 1084383 - DNA, 25 bp, Homo sapien
ctggactgagcatgtgggcttctca

SEQ ID NO: 1084384 - DNA, 25 bp, Homo sapien
ttaactggatgccacaccctctcaa

SEQ ID NO: 1084385 - DNA, 25 bp, Homo sapien
tatggcactggaggccctctttggg

SEQ ID NO: 1084386 - DNA, 25 bp, Homo sapien
tattctaactgcatgggttgggtat

SEQ ID NO: 1084387 - DNA, 25 bp, Homo sapien
caccctctcaaccacacttgctgag

SEQ ID NO: 1084388 - DNA, 25 bp, Homo sapien
gggatggctggatgtaaccatctga

SEQ ID NO: 1084389 - DNA, 25 bp, Homo sapien
aggaggtgagctgcacagccctggc

SEQ ID NO: 1084390 - DNA, 25 bp, Homo sapien
catagtagccaattcgaaggggccg

SEQ ID NO: 1084391 - DNA, 25 bp, Homo sapien
taaccatctgattcatagtagccaa

SEQ ID NO: 1084392 - DNA, 25 bp, Homo sapien
gccctttatgctgggatccacaatg

SEQ ID NO: 1084393 - DNA, 25 bp, Homo sapien
tatgctgggatccacaatgtccccc

SEQ ID NO: 1084394 - DNA, 25 bp, Homo sapien
cctttatgctgggatccacaatgtc

SEQ ID NO: 1084395 - DNA, 25 bp, Homo sapien
tttatgctgggatccacaatgtccc

SEQ ID NO: 1084396 - DNA, 25 bp, Homo sapien
ggatccaggccaagaaacatttgaa

SEQ ID NO: 1084397 - DNA, 25 bp, Homo sapien
tgggatccaggccaagaaacatttg

SEQ ID NO: 1084398 - DNA, 25 bp, Homo sapien
tatgtactttgggatccaggccaag

SEQ ID NO: 1084399 - DNA, 25 bp, Homo sapien
tactttgggatccaggccaagaaac

SEQ ID NO: 1084400 - DNA, 25 bp, Homo sapien
tctcttcaagatgctggctagtttg

SEQ ID NO: 1084401 - DNA, 25 bp, Homo sapien
acgaatctcttcaagatgctggcta

SEQ ID NO: 1084402 - DNA, 25 bp, Homo sapien
gaatctcttcaagatgctggctagt

SEQ ID NO: 1084403 - DNA, 25 bp, Homo sapien
tcttcaagatgctggctagtttggg

SEQ ID NO: 1084404 - DNA, 25 bp, Homo sapien
actgctgtgtgctgttcccacagtt

SEQ ID NO: 1084405 - DNA, 25 bp, Homo sapien
tccactgctgtgtgctgttcccaca

SEQ ID NO: 1084406 - DNA, 25 bp, Homo sapien
ccactgctgtgtgctgttcccacag

SEQ ID NO: 1084407 - DNA, 25 bp, Homo sapien
tgctgtgtgctgttcccacagtttc

SEQ ID NO: 1084408 - DNA, 25 bp, Homo sapien
ggaggaagagcctatatagaaggca

SEQ ID NO: 1084409 - DNA, 25 bp, Homo sapien
tccacttggctatgaactcttgctc

SEQ ID NO: 1084410 - DNA, 25 bp, Homo sapien
ggaagagcctatatagaaggcagag

SEQ ID NO: 1084411 - DNA, 25 bp, Homo sapien
ccagggacctccacttggctatgaa

SEQ ID NO: 1084412 - DNA, 25 bp, Homo sapien
tccaggaggttgtacagggtcacat

SEQ ID NO: 1084413 - DNA, 25 bp, Homo sapien
tgtcacgatagtgacaggcaccacg

SEQ ID NO: 1084414 - DNA, 25 bp, Homo sapien
gaaatttttgtcagaactatctccg

SEQ ID NO: 1084415 - DNA, 25 bp, Homo sapien
tatctccgtagcaccccttgtagaa

SEQ ID NO: 1084416 - DNA, 25 bp, Homo sapien
cttgaccaaggtgtccacctccttc

SEQ ID NO: 1084417 - DNA, 25 bp, Homo sapien
tgcacagtcaccagaactccgacgg

SEQ ID NO: 1084418 - DNA, 25 bp, Homo sapien
agaactccgacggatcctcttaccg

SEQ ID NO: 1084419 - DNA, 25 bp, Homo sapien
ttcatgaaccggagacacagctcct

SEQ ID NO: 1084420 - DNA, 25 bp, Homo sapien
catgagctgttactccattccagga

SEQ ID NO: 1084421 - DNA, 25 bp, Homo sapien
acaaccagccccgtgtttcatgagc

SEQ ID NO: 1084422 - DNA, 25 bp, Homo sapien
ccacacagagggaccaacaaagaaa

SEQ ID NO: 1084423 - DNA, 25 bp, Homo sapien
catctgaggaatattgagcacccac

SEQ ID NO: 1084424 - DNA, 25 bp, Homo sapien
ccaggcccacagacgatactccacc

SEQ ID NO: 1084425 - DNA, 25 bp, Homo sapien
acccaggcccacagacgatactcca

SEQ ID NO: 1084426 - DNA, 25 bp, Homo sapien
cacccaggcccacagacgatactcc

SEQ ID NO: 1084427 - DNA, 25 bp, Homo sapien
aggcccacagacgatactccacccc

SEQ ID NO: 1084428 - DNA, 25 bp, Homo sapien
gcccacaatgaggaccctgagtctt

SEQ ID NO: 1084429 - DNA, 25 bp, Homo sapien
tcttggtcctgccaggggctcctga

SEQ ID NO: 1084430 - DNA, 25 bp, Homo sapien
gtggcacacactggggtgggtacac

SEQ ID NO: 1084431 - DNA, 25 bp, Homo sapien
ggctcctgagggtggcacacactgg

SEQ ID NO: 1084432 - DNA, 25 bp, Homo sapien
cagctatctgcccaggcctggcccc

SEQ ID NO: 1084433 - DNA, 25 bp, Homo sapien
gctatctgcccaggcctggcccccc

SEQ ID NO: 1084434 - DNA, 25 bp, Homo sapien
ctcacagctatctgcccaggcctgg

SEQ ID NO: 1084435 - DNA, 25 bp, Homo sapien
tatctgcccaggcctggccccccac

SEQ ID NO: 1084436 - DNA, 25 bp, Homo sapien
tgacaagacgggcaatttgtctgct

SEQ ID NO: 1084437 - DNA, 25 bp, Homo sapien
taaatgcgaatttgacaagacgggc

SEQ ID NO: 1084438 - DNA, 25 bp, Homo sapien
tgctccgtttactctgtcaaatcga

SEQ ID NO: 1084439 - DNA, 25 bp, Homo sapien
cgaggttaatgggtgttagccctgc

SEQ ID NO: 1084440 - DNA, 25 bp, Homo sapien
tcctattagaggtgtccaggcatgg

SEQ ID NO: 1084441 - DNA, 25 bp, Homo sapien
tttcctattagaggtgtccaggcat

SEQ ID NO: 1084442 - DNA, 25 bp, Homo sapien
agttgggagacccatcagccccact

SEQ ID NO: 1084443 - DNA, 25 bp, Homo sapien
ggagacccatcagccccactccagg

SEQ ID NO: 1084444 - DNA, 25 bp, Homo sapien
tgtaggtggtaatgaatgttggtgg

SEQ ID NO: 1084445 - DNA, 25 bp, Homo sapien
tggacatggctagatggggcagttt

SEQ ID NO: 1084446 - DNA, 25 bp, Homo sapien
gaagttttgaggttatgtggagggc

SEQ ID NO: 1084447 - DNA, 25 bp, Homo sapien
tcatggagatgtaggtggtaatgaa

SEQ ID NO: 1084448 - DNA, 25 bp, Homo sapien
agctgaggacacttccccgggaagg

SEQ ID NO: 1084449 - DNA, 25 bp, Homo sapien
ggaactcaaccgtgaggccacagcg

SEQ ID NO: 1084450 - DNA, 25 bp, Homo sapien
cccagcactgcaggaatgtctcggc

SEQ ID NO: 1084451 - DNA, 25 bp, Homo sapien
ctcaagggcaatctgggcagcacca

SEQ ID NO: 1084452 - DNA, 25 bp, Homo sapien
ctggagcatcatgcagtgcccgggt

SEQ ID NO: 1084453 - DNA, 25 bp, Homo sapien
tagaccccttcatatccactggagc

SEQ ID NO: 1084454 - DNA, 25 bp, Homo sapien
tgaaaggatcagctgcacatttgtt

SEQ ID NO: 1084455 - DNA, 25 bp, Homo sapien
ggcttccgattgttaacaccagagg

SEQ ID NO: 1084456 - DNA, 25 bp, Homo sapien
tttttcagcccactccagaggtggg

SEQ ID NO: 1084457 - DNA, 25 bp, Homo sapien
cagataaatgactccccgtgggaca

SEQ ID NO: 1084458 - DNA, 25 bp, Homo sapien
ggagagccagtcgatcagataaatg

SEQ ID NO: 1084459 - DNA, 25 bp, Homo sapien
cagaaaatctgactaaggcctgagt

SEQ ID NO: 1084460 - DNA, 25 bp, Homo sapien
tgacagcaggatttacaggatggga

SEQ ID NO: 1084461 - DNA, 25 bp, Homo sapien
caggctggctgcaacaggagtgcta

SEQ ID NO: 1084462 - DNA, 25 bp, Homo sapien
aggagtaccacccaggcagtgtcca

SEQ ID NO: 1084463 - DNA, 25 bp, Homo sapien
ggtgggcatgcctaggattccagct

SEQ ID NO: 1084464 - DNA, 25 bp, Homo sapien
gactgcagggttatgtgattagccc

SEQ ID NO: 1084465 - DNA, 25 bp, Homo sapien
tgcctccgtggaatttgactctagt

SEQ ID NO: 1084466 - DNA, 25 bp, Homo sapien
taaagcaaggtgatgtggcagtgac

SEQ ID NO: 1084467 - DNA, 25 bp, Homo sapien
ggttcggcagatacccctgtgagcc

SEQ ID NO: 1084468 - DNA, 25 bp, Homo sapien
ctgtctgctccattagtgcagatca

SEQ ID NO: 1084469 - DNA, 25 bp, Homo sapien
tgctgctgtctgctccattagtgca

SEQ ID NO: 1084470 - DNA, 25 bp, Homo sapien
ctgctgctgtctgctccattagtgc

SEQ ID NO: 1084471 - DNA, 25 bp, Homo sapien
ctgctgtctgctccattagtgcaga

SEQ ID NO: 1084472 - DNA, 25 bp, Homo sapien
cggcggcacagaggcggattctcta

SEQ ID NO: 1084473 - DNA, 25 bp, Homo sapien
ctattaaggcttcccctcagcgcag

SEQ ID NO: 1084474 - DNA, 25 bp, Homo sapien
catttgccgccgttgatggtgttga

SEQ ID NO: 1084475 - DNA, 25 bp, Homo sapien
aagcgagaagcagaccagagttggc

SEQ ID NO: 1084476 - DNA, 25 bp, Homo sapien
aggttcgactggggatacagtctct

SEQ ID NO: 1084477 - DNA, 25 bp, Homo sapien
gttcgactggggatacagtctctga

SEQ ID NO: 1084478 - DNA, 25 bp, Homo sapien
caggttcgactggggatacagtctc

SEQ ID NO: 1084479 - DNA, 25 bp, Homo sapien
ggttcgactggggatacagtctctg

SEQ ID NO: 1084480 - DNA, 25 bp, Homo sapien
caaaagtgacatcctgccactttgt

SEQ ID NO: 1084481 - DNA, 25 bp, Homo sapien
gctgtagtcttttataggctaatct

SEQ ID NO: 1084482 - DNA, 25 bp, Homo sapien
gtgacatcctgccactttgtcatat

SEQ ID NO: 1084483 - DNA, 25 bp, Homo sapien
taagctccacctctcaaaggaagaa

SEQ ID NO: 1084484 - DNA, 25 bp, Homo sapien
taggaaagttcactcacatgcccgg

SEQ ID NO: 1084485 - DNA, 25 bp, Homo sapien
gaggctgcagtcaagccgcactgtc

SEQ ID NO: 1084486 - DNA, 25 bp, Homo sapien
tgtggcctctaggagtatagcctgg

SEQ ID NO: 1084487 - DNA, 25 bp, Homo sapien
agctggagggtcgtattctaggaaa

SEQ ID NO: 1084488 - DNA, 25 bp, Homo sapien
acactgtgctaacttccaacactgg

SEQ ID NO: 1084489 - DNA, 25 bp, Homo sapien
cactgtgctaacttccaacactggg

SEQ ID NO: 1084490 - DNA, 25 bp, Homo sapien
tcacactgtgctaacttccaacact

SEQ ID NO: 1084491 - DNA, 25 bp, Homo sapien
cacactgtgctaacttccaacactg

SEQ ID NO: 1084492 - DNA, 25 bp, Homo sapien
cggggttcgcgtggaccaggaagct

SEQ ID NO: 1084493 - DNA, 25 bp, Homo sapien
aagccagacccgggcaatgcccgga

SEQ ID NO: 1084494 - DNA, 25 bp, Homo sapien
gagcactgcggggttcgcgtggacc

SEQ ID NO: 1084495 - DNA, 25 bp, Homo sapien
gacccgggcaatgcccggagcactg

SEQ ID NO: 1084496 - DNA, 25 bp, Homo sapien
ggtggcagctgagtttgaacgggat

SEQ ID NO: 1084497 - DNA, 25 bp, Homo sapien
tggtggcagctgagtttgaacggga

SEQ ID NO: 1084498 - DNA, 25 bp, Homo sapien
ttggtggcagctgagtttgaacggg

SEQ ID NO: 1084499 - DNA, 25 bp, Homo sapien
accaccctcaactggaaaattcgtg

SEQ ID NO: 1084500 - DNA, 25 bp, Homo sapien
ccaaggccgcgtcttcgagggcaga

SEQ ID NO: 1084501 - DNA, 25 bp, Homo sapien
ttcgtgcagaatcgcaatccagaga

SEQ ID NO: 1084502 - DNA, 25 bp, Homo sapien
ctgaaggttcctagaccaaggccgc

SEQ ID NO: 1084503 - DNA, 25 bp, Homo sapien
tgtcgccgtcaacgactgagttacg

SEQ ID NO: 1084504 - DNA, 25 bp, Homo sapien
agttacggccatccagtgtgggaag

SEQ ID NO: 1084505 - DNA, 25 bp, Homo sapien
tggcctgtcgccgtcaacgactgag

SEQ ID NO: 1084506 - DNA, 25 bp, Homo sapien
caacgactgagttacggccatccag

SEQ ID NO: 1084507 - DNA, 25 bp, Homo sapien
ttgtgaccgccagaaagttcagccg

SEQ ID NO: 1084508 - DNA, 25 bp, Homo sapien
gttccgggaatttgtgaccgccaga

SEQ ID NO: 1084509 - DNA, 25 bp, Homo sapien
cgcaggttccgggaatttgtgaccg

SEQ ID NO: 1084510 - DNA, 25 bp, Homo sapien
cgggaatttgtgaccgccagaaagt

SEQ ID NO: 1084511 - DNA, 25 bp, Homo sapien
taagtgaaccaccagtgccaacgaa

SEQ ID NO: 1084512 - DNA, 25 bp, Homo sapien
aaatcacaagcctgaggagcccact

SEQ ID NO: 1084513 - DNA, 25 bp, Homo sapien
ggtgaaaaggcctcggatctcgtcc

SEQ ID NO: 1084514 - DNA, 25 bp, Homo sapien
ccaaaccgagtgtggctggaatcca

SEQ ID NO: 1084515 - DNA, 25 bp, Homo sapien
gcctccgaggacttttctcaaacga

SEQ ID NO: 1084516 - DNA, 25 bp, Homo sapien
ccgagtgcttgtccttcgccatggc

SEQ ID NO: 1084517 - DNA, 25 bp, Homo sapien
ctttctgttctgcattccattcggg

SEQ ID NO: 1084518 - DNA, 25 bp, Homo sapien
tgaagctgacccgtaagcccactat

SEQ ID NO: 1084519 - DNA, 25 bp, Homo sapien
ctggggcgggtttccactcctctgc

SEQ ID NO: 1084520 - DNA, 25 bp, Homo sapien
acacttgggactgttgtcctacggg

SEQ ID NO: 1084521 - DNA, 25 bp, Homo sapien
tgtctgcgtgagtttaacctgtgag

SEQ ID NO: 1084522 - DNA, 25 bp, Homo sapien
catgtgttgagcatgagtgtctgcg

SEQ ID NO: 1084523 - DNA, 25 bp, Homo sapien
tttaacctgtgagtatggaactgtg

SEQ ID NO: 1084524 - DNA, 25 bp, Homo sapien
ctactcgttcggtaatgggctttgg

SEQ ID NO: 1084525 - DNA, 25 bp, Homo sapien
actcgttcggtaatgggctttggcg

SEQ ID NO: 1084526 - DNA, 25 bp, Homo sapien
cgcccggggccttgattagatattt

SEQ ID NO: 1084527 - DNA, 25 bp, Homo sapien
tggcgggcagcagtggcgtcgcccg

SEQ ID NO: 1084528 - DNA, 25 bp, Homo sapien
cacaggcgccatatagatggcttta

SEQ ID NO: 1084529 - DNA, 25 bp, Homo sapien
gcggccgcgtttcacaagctgtcga

SEQ ID NO: 1084530 - DNA, 25 bp, Homo sapien
cattaagcaagcagatcggcggatc

SEQ ID NO: 1084531 - DNA, 25 bp, Homo sapien
tatatttaaaaggtgccgccccgca

SEQ ID NO: 1084532 - DNA, 25 bp, Homo sapien
acagccataggtctgaagcccacct

SEQ ID NO: 1084533 - DNA, 25 bp, Homo sapien
acacagccataggtctgaagcccac

SEQ ID NO: 1084534 - DNA, 25 bp, Homo sapien
agccataggtctgaagcccacctca

SEQ ID NO: 1084535 - DNA, 25 bp, Homo sapien
taccacacagccataggtctgaagc

SEQ ID NO: 1084536 - DNA, 25 bp, Homo sapien
tgctggtgcaggttgtacatggcgc

SEQ ID NO: 1084537 - DNA, 25 bp, Homo sapien
tacatggcgctgagtgagttcatgg

SEQ ID NO: 1084538 - DNA, 25 bp, Homo sapien
cagccaatgtaagcgcatgcactga

SEQ ID NO: 1084539 - DNA, 25 bp, Homo sapien
agtagccgttcaccccgtagtgctg

SEQ ID NO: 1084540 - DNA, 25 bp, Homo sapien
agctgctgagccgtgaacgctgtgc

SEQ ID NO: 1084541 - DNA, 25 bp, Homo sapien
ccacatctgggtagtgagtcttctg

SEQ ID NO: 1084542 - DNA, 25 bp, Homo sapien
cggctgcgacgttgtttgcggtgct

SEQ ID NO: 1084543 - DNA, 25 bp, Homo sapien
cggtgctgggaaccataacgggcct

SEQ ID NO: 1084544 - DNA, 25 bp, Homo sapien
gatcctcgggggctgactcactggc

SEQ ID NO: 1084545 - DNA, 25 bp, Homo sapien
gggtcctcctcacggtccggctgat

SEQ ID NO: 1084546 - DNA, 25 bp, Homo sapien
gctcagacagactcaggtgaagctc

SEQ ID NO: 1084547 - DNA, 25 bp, Homo sapien
tgcttctggagctgttccttctgca

SEQ ID NO: 1084548 - DNA, 25 bp, Homo sapien
cacaggagtgatggtcaggctgcct

SEQ ID NO: 1084549 - DNA, 25 bp, Homo sapien
acaggagtgatggtcaggctgcctg

SEQ ID NO: 1084550 - DNA, 25 bp, Homo sapien
catgtgctggcggaattgctcctgc

SEQ ID NO: 1084551 - DNA, 25 bp, Homo sapien
cccctacttcgaaggacgagtagtg

SEQ ID NO: 1084552 - DNA, 25 bp, Homo sapien
acgagtagtgcaccaggttgttggt

SEQ ID NO: 1084553 - DNA, 25 bp, Homo sapien
gccatgttgacgcccaggtagggca

SEQ ID NO: 1084554 - DNA, 25 bp, Homo sapien
tgggggtgcaggcagcagaggagac

SEQ ID NO: 1084555 - DNA, 25 bp, Homo sapien
ggggtgcaggcagcagaggagaccc

SEQ ID NO: 1084556 - DNA, 25 bp, Homo sapien
ctgggggtgcaggcagcagaggaga

SEQ ID NO: 1084557 - DNA, 25 bp, Homo sapien
gggggtgcaggcagcagaggagacc

SEQ ID NO: 1084558 - DNA, 25 bp, Homo sapien
cagttgggcagcgtatcgagtccca

SEQ ID NO: 1084559 - DNA, 25 bp, Homo sapien
ctcgatgcttgtggttttactgttc

SEQ ID NO: 1084560 - DNA, 25 bp, Homo sapien
cagggaggccgcgtgctgcttggcc

SEQ ID NO: 1084561 - DNA, 25 bp, Homo sapien
ttggcccggagccgcaggttctcga

SEQ ID NO: 1084562 - DNA, 25 bp, Homo sapien
tgctatatgctttgcacgcaccgtg

SEQ ID NO: 1084563 - DNA, 25 bp, Homo sapien
tcaatcttgggaatgaggacctcaa

SEQ ID NO: 1084564 - DNA, 25 bp, Homo sapien
tggagttaactcctcgagagccacc

SEQ ID NO: 1084565 - DNA, 25 bp, Homo sapien
gagagccacctagggataaccacag

SEQ ID NO: 1084566 - DNA, 25 bp, Homo sapien
cagattgcctgaactagaagggacc

SEQ ID NO: 1084567 - DNA, 25 bp, Homo sapien
ggctggcactggaactcaagatcaa

SEQ ID NO: 1084568 - DNA, 25 bp, Homo sapien
tgaggcttgtgtgtacaacacccct

SEQ ID NO: 1084569 - DNA, 25 bp, Homo sapien
ttacaggccatctaacccagacagg

SEQ ID NO: 1084570 - DNA, 25 bp, Homo sapien
cagttgatgggctattggccacaaa

SEQ ID NO: 1084571 - DNA, 25 bp, Homo sapien
aaatgcctgtcttggtgcttgccac

SEQ ID NO: 1084572 - DNA, 25 bp, Homo sapien
gatttggaaaccctcaaatgcctgt

SEQ ID NO: 1084573 - DNA, 25 bp, Homo sapien
tgcaaagcaattcaaccaggacacc

SEQ ID NO: 1084574 - DNA, 25 bp, Homo sapien
aacattgccccttaggagttcaggg

SEQ ID NO: 1084575 - DNA, 25 bp, Homo sapien
caattgaatgggacaagtgttaaca

SEQ ID NO: 1084576 - DNA, 25 bp, Homo sapien
ctagtgacagtcacttgtacccagg

SEQ ID NO: 1084577 - DNA, 25 bp, Homo sapien
aaacatctgagggaagctcggctgc

SEQ ID NO: 1084578 - DNA, 25 bp, Homo sapien
cagctgctttcagtacccaaggctg

SEQ ID NO: 1084579 - DNA, 25 bp, Homo sapien
ccagctgctttcagtacccaaggct

SEQ ID NO: 1084580 - DNA, 25 bp, Homo sapien
gcggtgctgcttacaagcgtgctca

SEQ ID NO: 1084581 - DNA, 25 bp, Homo sapien
tgacagaaggacagatacacagagt

SEQ ID NO: 1084582 - DNA, 25 bp, Homo sapien
tggcacgacctctaagcacaaatgg

SEQ ID NO: 1084583 - DNA, 25 bp, Homo sapien
gcacaaatggtcacaaaacagctgg

SEQ ID NO: 1084584 - DNA, 25 bp, Homo sapien
gtcttccagtcctcgcaactcaaga

SEQ ID NO: 1084585 - DNA, 25 bp, Homo sapien
tcaagagtcagagcaatgtccctcc

SEQ ID NO: 1084586 - DNA, 25 bp, Homo sapien
agtcctcgcaactcaagagtcagag

SEQ ID NO: 1084587 - DNA, 25 bp, Homo sapien
ctcaagagtcagagcaatgtccctc

SEQ ID NO: 1084588 - DNA, 25 bp, Homo sapien
gccttcggagtcttgtgccactggg

SEQ ID NO: 1084589 - DNA, 25 bp, Homo sapien
gaagccttcggagtcttgtgccact

SEQ ID NO: 1084590 - DNA, 25 bp, Homo sapien
aagaagccttcggagtcttgtgcca

SEQ ID NO: 1084591 - DNA, 25 bp, Homo sapien
ctcaaagaagccttcggagtcttgt

SEQ ID NO: 1084592 - DNA, 25 bp, Homo sapien
agtgcccagacaagtggtcaagaac

SEQ ID NO: 1084593 - DNA, 25 bp, Homo sapien
tgcccgtgtgcatgaaggtacagcc

SEQ ID NO: 1084594 - DNA, 25 bp, Homo sapien
cggtctgcagcacggaaaagcacat

SEQ ID NO: 1084595 - DNA, 25 bp, Homo sapien
tgctgtgactgaaatgtatccctcg

SEQ ID NO: 1084596 - DNA, 25 bp, Homo sapien
tcccagagagtggaacggcttgctc

SEQ ID NO: 1084597 - DNA, 25 bp, Homo sapien
ggagaagcaagaagcatcagttgac

SEQ ID NO: 1084598 - DNA, 25 bp, Homo sapien
caagaagcatcagttgacagaggct

SEQ ID NO: 1084599 - DNA, 25 bp, Homo sapien
gaagcaagaagcatcagttgacaga

SEQ ID NO: 1084600 - DNA, 25 bp, Homo sapien
tgcagggagaagcaagaagcatcag

SEQ ID NO: 1084601 - DNA, 25 bp, Homo sapien
aattgcctgcagcaggaacatctct

SEQ ID NO: 1084602 - DNA, 25 bp, Homo sapien
attgcctgcagcaggaacatctctt

SEQ ID NO: 1084603 - DNA, 25 bp, Homo sapien
tttgcataattgcctgcagcaggaa

SEQ ID NO: 1084604 - DNA, 25 bp, Homo sapien
ttgcctgcagcaggaacatctcttc

SEQ ID NO: 1084605 - DNA, 25 bp, Homo sapien
catggtggcaggtgctgtaatgcca

SEQ ID NO: 1084606 - DNA, 25 bp, Homo sapien
gtggcaggtgctgtaatgccagcta

SEQ ID NO: 1084607 - DNA, 25 bp, Homo sapien
tcgcttgaatccagcagacggaggt

SEQ ID NO: 1084608 - DNA, 25 bp, Homo sapien
tacttgggaggctgaggcaggagaa

SEQ ID NO: 1084609 - DNA, 25 bp, Homo sapien
gaactgactcttaaagggtgcatcc

SEQ ID NO: 1084610 - DNA, 25 bp, Homo sapien
gagggacaagaatcacaagtagaag

SEQ ID NO: 1084611 - DNA, 25 bp, Homo sapien
gctttgttctatgggtgatctccac

SEQ ID NO: 1084612 - DNA, 25 bp, Homo sapien
tgcatcctgccctgcggaagaggga

SEQ ID NO: 1084613 - DNA, 25 bp, Homo sapien
catctttcagtcaaattagttttgc

SEQ ID NO: 1084614 - DNA, 25 bp, Homo sapien
aaattagttttgcagggtgtgtgga

SEQ ID NO: 1084615 - DNA, 25 bp, Homo sapien
tttcagtcaaattagttttgcaggg

SEQ ID NO: 1084616 - DNA, 25 bp, Homo sapien
tgtggaggcgggaggtggttgtttc

SEQ ID NO: 1084617 - DNA, 25 bp, Homo sapien
tcgtcctttcttcgctcttgatcat

SEQ ID NO: 1084618 - DNA, 25 bp, Homo sapien
gatcatcagtgtgattgatgtaagc

SEQ ID NO: 1084619 - DNA, 25 bp, Homo sapien
cagtgtgattgatgtaagcctgaga

SEQ ID NO: 1084620 - DNA, 25 bp, Homo sapien
gtttctgcccatcctcgtcctttct

SEQ ID NO: 1084621 - DNA, 25 bp, Homo sapien
tcttggccaggtcagcaggttaacc

SEQ ID NO: 1084622 - DNA, 25 bp, Homo sapien
tctttagtgaagtgcctcccgtggc

SEQ ID NO: 1084623 - DNA, 25 bp, Homo sapien
ttcttaggctaagggacgactgggc

SEQ ID NO: 1084624 - DNA, 25 bp, Homo sapien
ttaaaaacagcaaccctcagtgggc

SEQ ID NO: 1084625 - DNA, 25 bp, Homo sapien
tacaagaatgcactgaagggaacag

SEQ ID NO: 1084626 - DNA, 25 bp, Homo sapien
tttatttacaagaatgcactgaagg

SEQ ID NO: 1084627 - DNA, 25 bp, Homo sapien
aagaatgcactgaagggaacagagg

SEQ ID NO: 1084628 - DNA, 25 bp, Homo sapien
tttacaagaatgcactgaagggaac

SEQ ID NO: 1084629 - DNA, 25 bp, Homo sapien
aatacattgcgaagtctagaaaggc

SEQ ID NO: 1084630 - DNA, 25 bp, Homo sapien
tttgcagagcttagaatgtcacctg

SEQ ID NO: 1084631 - DNA, 25 bp, Homo sapien
gaatcccagagacttccaaaacgag

SEQ ID NO: 1084632 - DNA, 25 bp, Homo sapien
gacccagggtggtgatcatccatca

SEQ ID NO: 1084633 - DNA, 25 bp, Homo sapien
tcctcctaggtcaaaacaaatcaat

SEQ ID NO: 1084634 - DNA, 25 bp, Homo sapien
acaaatcaatagtcttcacagatat

SEQ ID NO: 1084635 - DNA, 25 bp, Homo sapien
aaccatcagtgtaaacctcctgggt

SEQ ID NO: 1084636 - DNA, 25 bp, Homo sapien
gatctcccataatggctttgccttt

SEQ ID NO: 1084637 - DNA, 25 bp, Homo sapien
gacactgtgccatgatctgtaggag

SEQ ID NO: 1084638 - DNA, 25 bp, Homo sapien
taaaaggccagtgtgacatacccca

SEQ ID NO: 1084639 - DNA, 25 bp, Homo sapien
gatgtgcactgggtacctaaaaggc

SEQ ID NO: 1084640 - DNA, 25 bp, Homo sapien
aataaaatcagtgccctcgtggagc

SEQ ID NO: 1084641 - DNA, 25 bp, Homo sapien
gcttctgccttgctcgcctgatgcc

SEQ ID NO: 1084642 - DNA, 25 bp, Homo sapien
cttggttctgttataatatctgaac

SEQ ID NO: 1084643 - DNA, 25 bp, Homo sapien
tgctcgcctgatgccaagcctgtgt

SEQ ID NO: 1084644 - DNA, 25 bp, Homo sapien
ttataatatctgaaccagggcttct

SEQ ID NO: 1084645 - DNA, 25 bp, Homo sapien
aaacgtctgtagaaggtctagttct

SEQ ID NO: 1084646 - DNA, 25 bp, Homo sapien
cagctgcaggccgatggatctgtgt

SEQ ID NO: 1084647 - DNA, 25 bp, Homo sapien
tgagagagaattgggtgcctcgcca

SEQ ID NO: 1084648 - DNA, 25 bp, Homo sapien
ttcccagtacagcaagaaattcatg

SEQ ID NO: 1084649 - DNA, 25 bp, Homo sapien
catgatggattctaggctgtggcaa

SEQ ID NO: 1084650 - DNA, 25 bp, Homo sapien
gagcgagggtagtaggagcttttcc

SEQ ID NO: 1084651 - DNA, 25 bp, Homo sapien
cagagtgctgtgacttgcatgatgg

SEQ ID NO: 1084652 - DNA, 25 bp, Homo sapien
gctttgccagaggctgtggagcgag

SEQ ID NO: 1084653 - DNA, 25 bp, Homo sapien
cttgtgtctctacagagggagatga

SEQ ID NO: 1084654 - DNA, 25 bp, Homo sapien
tacagagggagatgacagagcggat

SEQ ID NO: 1084655 - DNA, 25 bp, Homo sapien
gtgtctctacagagggagatgacag

SEQ ID NO: 1084656 - DNA, 25 bp, Homo sapien
ctacagagggagatgacagagcgga

SEQ ID NO: 1084657 - DNA, 25 bp, Homo sapien
tcgtgaccaacagcaagtctgaggg

SEQ ID NO: 1084658 - DNA, 25 bp, Homo sapien
gatgataaggccttgaccgccagct

SEQ ID NO: 1084659 - DNA, 25 bp, Homo sapien
tggcagggtatcctcaggtccgagc

SEQ ID NO: 1084660 - DNA, 25 bp, Homo sapien
gatgaattgggaagtcagagcccag

SEQ ID NO: 1084661 - DNA, 25 bp, Homo sapien
gactcagctcatgattcccaaggcg

SEQ ID NO: 1084662 - DNA, 25 bp, Homo sapien
tttctgctccagaagaagccgagcg

SEQ ID NO: 1084663 - DNA, 25 bp, Homo sapien
gacgcagacgattctaggagggcaa

SEQ ID NO: 1084664 - DNA, 25 bp, Homo sapien
gagccccatatggactttccgggaa

SEQ ID NO: 1084665 - DNA, 25 bp, Homo sapien
tatagaagagctttgaactaagtgg

SEQ ID NO: 1084666 - DNA, 25 bp, Homo sapien
ctgagggctttctatagaagagctt

SEQ ID NO: 1084667 - DNA, 25 bp, Homo sapien
agaggctgacatggaggcaccccag

SEQ ID NO: 1084668 - DNA, 25 bp, Homo sapien
aaggaggagggtgcatccagactgg

SEQ ID NO: 1084669 - DNA, 25 bp, Homo sapien
gtttgtctcagagccagcagcttgc

SEQ ID NO: 1084670 - DNA, 25 bp, Homo sapien
ttgtctcagagccagcagcttgcac

SEQ ID NO: 1084671 - DNA, 25 bp, Homo sapien
tcagtttgtctcagagccagcagct

SEQ ID NO: 1084672 - DNA, 25 bp, Homo sapien
cagcttgcactgtgtcctctgggca

SEQ ID NO: 1084673 - DNA, 25 bp, Homo sapien
tgtgacaggttgataacaacatctt

SEQ ID NO: 1084674 - DNA, 25 bp, Homo sapien
gacaggttgataacaacatctttat

SEQ ID NO: 1084675 - DNA, 25 bp, Homo sapien
gatgtgacaggttgataacaacatc

SEQ ID NO: 1084676 - DNA, 25 bp, Homo sapien
tgatgtgacaggttgataacaacat

SEQ ID NO: 1084677 - DNA, 25 bp, Homo sapien
tatgaagccgctcagtgtcctgcac

SEQ ID NO: 1084678 - DNA, 25 bp, Homo sapien
tgctgaaggacggactactacatcg

SEQ ID NO: 1084679 - DNA, 25 bp, Homo sapien
catggagatccgctggctttagaga

SEQ ID NO: 1084680 - DNA, 25 bp, Homo sapien
ctttagagaacggacttggcgcgca

SEQ ID NO: 1084681 - DNA, 25 bp, Homo sapien
cccttatggtgaacccacagagcag

SEQ ID NO: 1084682 - DNA, 25 bp, Homo sapien
agagcagaccccagaaaagggccat

SEQ ID NO: 1084683 - DNA, 25 bp, Homo sapien
acagagcagaccccagaaaagggcc

SEQ ID NO: 1084684 - DNA, 25 bp, Homo sapien
tatggtgaacccacagagcagaccc

SEQ ID NO: 1084685 - DNA, 25 bp, Homo sapien
cagctgagctttggtacctggccga

SEQ ID NO: 1084686 - DNA, 25 bp, Homo sapien
ggagagggaactcacccacccatct

SEQ ID NO: 1084687 - DNA, 25 bp, Homo sapien
caggtcctcctgttgggaatccata

SEQ ID NO: 1084688 - DNA, 25 bp, Homo sapien
gctttggtacctggccgatggctct

SEQ ID NO: 1084689 - DNA, 25 bp, Homo sapien
gataatgcaccctccagttatcaca

SEQ ID NO: 1084690 - DNA, 25 bp, Homo sapien
gcagaaagataatgcaccctccagt

SEQ ID NO: 1084691 - DNA, 25 bp, Homo sapien
gaaagataatgcaccctccagttat

SEQ ID NO: 1084692 - DNA, 25 bp, Homo sapien
agataatgcaccctccagttatcac

SEQ ID NO: 1084693 - DNA, 25 bp, Homo sapien
cttgttaatccagtacaacaatggg

SEQ ID NO: 1084694 - DNA, 25 bp, Homo sapien
tgccgtagcgccgtcgcttgttaat

SEQ ID NO: 1084695 - DNA, 25 bp, Homo sapien
cagggcccgtgttgatggctgcatt

SEQ ID NO: 1084696 - DNA, 25 bp, Homo sapien
agaacatctggattctggacctcag

SEQ ID NO: 1084697 - DNA, 25 bp, Homo sapien
ttcaggacaggtggccaaaggatag

SEQ ID NO: 1084698 - DNA, 25 bp, Homo sapien
caaagggcacctcctgaaagatggg

SEQ ID NO: 1084699 - DNA, 25 bp, Homo sapien
attgaagctatggtcttcctgggcc

SEQ ID NO: 1084700 - DNA, 25 bp, Homo sapien
cttggcattgaagctatggtcttcc

SEQ ID NO: 1084701 - DNA, 25 bp, Homo sapien
tcctgaggttagttccatttcctac

SEQ ID NO: 1084702 - DNA, 25 bp, Homo sapien
ctctgtcaataccaccttcctgagg

SEQ ID NO: 1084703 - DNA, 25 bp, Homo sapien
tccatttcctactctgcacctgatt

SEQ ID NO: 1084704 - DNA, 25 bp, Homo sapien
aatgtttcatagcatgacatccagg

SEQ ID NO: 1084705 - DNA, 25 bp, Homo sapien
ccataagaggaggatcatgatatcc

SEQ ID NO: 1084706 - DNA, 25 bp, Homo sapien
gtagatttgagaactggctctgcaa

SEQ ID NO: 1084707 - DNA, 25 bp, Homo sapien
tgccaagcaactgatgatcaataac

SEQ ID NO: 1084708 - DNA, 25 bp, Homo sapien
gaaaggtatggcatatgcccttgga

SEQ ID NO: 1084709 - DNA, 25 bp, Homo sapien
gtttgctgcacacctcattggcttg

SEQ ID NO: 1084710 - DNA, 25 bp, Homo sapien
tgtggtgtcatctaaaaggcagagg

SEQ ID NO: 1084711 - DNA, 25 bp, Homo sapien
gaacacatttgggtattcctgagac

SEQ ID NO: 1084712 - DNA, 25 bp, Homo sapien
caacagagctgaagaatgggttccc

SEQ ID NO: 1084713 - DNA, 25 bp, Homo sapien
tatttagctgtagtcaagcctcacc

SEQ ID NO: 1084714 - DNA, 25 bp, Homo sapien
gtcatcctgcctgagaaagtacatc

SEQ ID NO: 1084715 - DNA, 25 bp, Homo sapien
catctctgagaggaagactggatag

SEQ ID NO: 1084716 - DNA, 25 bp, Homo sapien
ttgtctgactagtatcacccctgag

SEQ ID NO: 1084717 - DNA, 25 bp, Homo sapien
caaaggatgccaaagtatagcaggg

SEQ ID NO: 1084718 - DNA, 25 bp, Homo sapien
catttgaatggcagggctaaattcc

SEQ ID NO: 1084719 - DNA, 25 bp, Homo sapien
gtcttaaagccgtagctggctccca

SEQ ID NO: 1084720 - DNA, 25 bp, Homo sapien
taccagctcagaagtagctagaggc

SEQ ID NO: 1084721 - DNA, 25 bp, Homo sapien
gaaccgatttcagggagtagacact

SEQ ID NO: 1084722 - DNA, 25 bp, Homo sapien
cataaggtatccctcaaaggcccag

SEQ ID NO: 1084723 - DNA, 25 bp, Homo sapien
gatgggaagctgacctaccaggaaa

SEQ ID NO: 1084724 - DNA, 25 bp, Homo sapien
gatttattccgcaagactggccagg

SEQ ID NO: 1084725 - DNA, 25 bp, Homo sapien
tgcccctgtttagcacatgtcactc

SEQ ID NO: 1084726 - DNA, 25 bp, Homo sapien
ttgcccctgtttagcacatgtcact

SEQ ID NO: 1084727 - DNA, 25 bp, Homo sapien
tctgtgcttttgatctactgctact

SEQ ID NO: 1084728 - DNA, 25 bp, Homo sapien
cgtacttttgttctcatgtgctgaa

SEQ ID NO: 1084729 - DNA, 25 bp, Homo sapien
tctctgtgcttttgatctactgcta

SEQ ID NO: 1084730 - DNA, 25 bp, Homo sapien
ttcaaagggcgtacttttgttctca

SEQ ID NO: 1084731 - DNA, 25 bp, Homo sapien
catcttgctgtggaagcactacaga

SEQ ID NO: 1084732 - DNA, 25 bp, Homo sapien
tcttgattgtagtactggtttcaca

SEQ ID NO: 1084733 - DNA, 25 bp, Homo sapien
atactttaaacagcgtccatcttgc

SEQ ID NO: 1084734 - DNA, 25 bp, Homo sapien
cagagtgtagcttccattggcaata

SEQ ID NO: 1084735 - DNA, 25 bp, Homo sapien
gccaggacagggtaaagaataacac

SEQ ID NO: 1084736 - DNA, 25 bp, Homo sapien
gctgacagggttgcagaaacacata

SEQ ID NO: 1084737 - DNA, 25 bp, Homo sapien
tgttgacttctgcagtgaaccacct

SEQ ID NO: 1084738 - DNA, 25 bp, Homo sapien
cactagtgttcaaattgggcaggga

SEQ ID NO: 1084739 - DNA, 25 bp, Homo sapien
gctactactacttactcagggagct

SEQ ID NO: 1084740 - DNA, 25 bp, Homo sapien
ccagtggtgaataatagggtccagt

SEQ ID NO: 1084741 - DNA, 25 bp, Homo sapien
acttgagttcccgagttcccaggct

SEQ ID NO: 1084742 - DNA, 25 bp, Homo sapien
taaattctttgcatagccggacatg

SEQ ID NO: 1084743 - DNA, 25 bp, Homo sapien
gagactatttacgatgctgcaagat

SEQ ID NO: 1084744 - DNA, 25 bp, Homo sapien
gggagactatttacgatgctgcaag

SEQ ID NO: 1084745 - DNA, 25 bp, Homo sapien
gcaggggagactatttacgatgctg

SEQ ID NO: 1084746 - DNA, 25 bp, Homo sapien
actatttacgatgctgcaagatctg

SEQ ID NO: 1084747 - DNA, 25 bp, Homo sapien
agctcaatgcattgattggtttggc

SEQ ID NO: 1084748 - DNA, 25 bp, Homo sapien
tggcccaggattcccaaccctggaa

SEQ ID NO: 1084749 - DNA, 25 bp, Homo sapien
tgaaaaagcgcaaagagctcaatgc

SEQ ID NO: 1084750 - DNA, 25 bp, Homo sapien
ttgggcatcgggtacgaacctggca

SEQ ID NO: 1084751 - DNA, 25 bp, Homo sapien
cttcacgttcaggacggaggccgga

SEQ ID NO: 1084752 - DNA, 25 bp, Homo sapien
gaggccggagaacggtgatcatcac

SEQ ID NO: 1084753 - DNA, 25 bp, Homo sapien
ccaacaacaacgtgtcgggagcagc

SEQ ID NO: 1084754 - DNA, 25 bp, Homo sapien
tatcaggcgcgggactggcttctct

SEQ ID NO: 1084755 - DNA, 25 bp, Homo sapien
ttgccagaagcattcagcagacatg

SEQ ID NO: 1084756 - DNA, 25 bp, Homo sapien
tccccatagagttgccagaagcatt

SEQ ID NO: 1084757 - DNA, 25 bp, Homo sapien
tcagcagacatgtacccactctgca

SEQ ID NO: 1084758 - DNA, 25 bp, Homo sapien
gaagcattcagcagacatgtaccca

SEQ ID NO: 1084759 - DNA, 25 bp, Homo sapien
agcttggtgcttggcgcctttccta

SEQ ID NO: 1084760 - DNA, 25 bp, Homo sapien
agggtacaggatgcagctgccggca

SEQ ID NO: 1084761 - DNA, 25 bp, Homo sapien
gagaagccattgtttagcttggtgc

SEQ ID NO: 1084762 - DNA, 25 bp, Homo sapien
ctcaggcccctcatcagggtacagg

SEQ ID NO: 1084763 - DNA, 25 bp, Homo sapien
atcaatcccttatgcttcacgtcag

SEQ ID NO: 1084764 - DNA, 25 bp, Homo sapien
tttttactcacattcacctcggtgt

SEQ ID NO: 1084765 - DNA, 25 bp, Homo sapien
attcacctcggtgtcatctacttca

SEQ ID NO: 1084766 - DNA, 25 bp, Homo sapien
tcaatcccttatgcttcacgtcaga

SEQ ID NO: 1084767 - DNA, 25 bp, Homo sapien
gagatgaggcccgaacctgcaagat

SEQ ID NO: 1084768 - DNA, 25 bp, Homo sapien
gcaagatattctcgctccattttct

SEQ ID NO: 1084769 - DNA, 25 bp, Homo sapien
gaacctgcaagatattctcgctcca

SEQ ID NO: 1084770 - DNA, 25 bp, Homo sapien
ggcccgaacctgcaagatattctcg

SEQ ID NO: 1084771 - DNA, 25 bp, Homo sapien
tacgtcaaactgtgccctcatggga

SEQ ID NO: 1084772 - DNA, 25 bp, Homo sapien
taggaactcctttacagtcgaattg

SEQ ID NO: 1084773 - DNA, 25 bp, Homo sapien
caccaaatccttcatagtgaagatg

SEQ ID NO: 1084774 - DNA, 25 bp, Homo sapien
gaagatgctgtacaactgttctaca

SEQ ID NO: 1084775 - DNA, 25 bp, Homo sapien
cactcattccaaccagggttcttgt

SEQ ID NO: 1084776 - DNA, 25 bp, Homo sapien
agatcacagccctgcactccaggct

SEQ ID NO: 1084777 - DNA, 25 bp, Homo sapien
caagatcacagccctgcactccagg

SEQ ID NO: 1084778 - DNA, 25 bp, Homo sapien
gctgggcaacaagagctaaactccc

SEQ ID NO: 1084779 - DNA, 25 bp, Homo sapien
tgggcaacaagagctaaactcccat

SEQ ID NO: 1084780 - DNA, 25 bp, Homo sapien
tgcttggtaaacttgcagaagcaca

SEQ ID NO: 1084781 - DNA, 25 bp, Homo sapien
tagccacatacccaattcctataat

SEQ ID NO: 1084782 - DNA, 25 bp, Homo sapien
tgaagggtgttccttgtagctgtgc

SEQ ID NO: 1084783 - DNA, 25 bp, Homo sapien
tcctataattatacccagagaccaa

SEQ ID NO: 1084784 - DNA, 25 bp, Homo sapien
atagtgcgtcttaacaatatcttac

SEQ ID NO: 1084785 - DNA, 25 bp, Homo sapien
tgctaagatagtgcgtcttaacaat

SEQ ID NO: 1084786 - DNA, 25 bp, Homo sapien
ggaagaagtcccgtctcatgctaag

SEQ ID NO: 1084787 - DNA, 25 bp, Homo sapien
gcccatctgttccataggagggttg

SEQ ID NO: 1084788 - DNA, 25 bp, Homo sapien
agccacctagccttcatctgacctg

SEQ ID NO: 1084789 - DNA, 25 bp, Homo sapien
cagccacctagccttcatctgacct

SEQ ID NO: 1084790 - DNA, 25 bp, Homo sapien
tgcagttccagccacctagccttca

SEQ ID NO: 1084791 - DNA, 25 bp, Homo sapien
gttccagccacctagccttcatctg

SEQ ID NO: 1084792 - DNA, 25 bp, Homo sapien
acaggcccaaggaggagaagctcag

SEQ ID NO: 1084793 - DNA, 25 bp, Homo sapien
ctaagaccaagatcagcccagaagc

SEQ ID NO: 1084794 - DNA, 25 bp, Homo sapien
tcagggagaggaagctgggcaccat

SEQ ID NO: 1084795 - DNA, 25 bp, Homo sapien
gaagctcagggagaggaagctgggc

SEQ ID NO: 1084796 - DNA, 25 bp, Homo sapien
tgtccatagccttagccaacgtctg

SEQ ID NO: 1084797 - DNA, 25 bp, Homo sapien
tgggaatttgtccatagccttagcc

SEQ ID NO: 1084798 - DNA, 25 bp, Homo sapien
aatttgtccatagccttagccaacg

SEQ ID NO: 1084799 - DNA, 25 bp, Homo sapien
ggaatttgtccatagccttagccaa

SEQ ID NO: 1084800 - DNA, 25 bp, Homo sapien
cactccttgttgacctcaccagaaa

SEQ ID NO: 1084801 - DNA, 25 bp, Homo sapien
attggcactccttgttgacctcacc

SEQ ID NO: 1084802 - DNA, 25 bp, Homo sapien
ggcactccttgttgacctcaccaga

SEQ ID NO: 1084803 - DNA, 25 bp, Homo sapien
tccttgttgacctcaccagaaataa

SEQ ID NO: 1084804 - DNA, 25 bp, Homo sapien
actcaggaacacattgtcaccagct

SEQ ID NO: 1084805 - DNA, 25 bp, Homo sapien
cattgtcaccagctaggccccaagt

SEQ ID NO: 1084806 - DNA, 25 bp, Homo sapien
ttgtcaccagctaggccccaagtcc

SEQ ID NO: 1084807 - DNA, 25 bp, Homo sapien
attgtcaccagctaggccccaagtc

SEQ ID NO: 1084808 - DNA, 25 bp, Homo sapien
gctgtacacagctttggcatagtca

SEQ ID NO: 1084809 - DNA, 25 bp, Homo sapien
tgggcccaggacaccactttgtcca

SEQ ID NO: 1084810 - DNA, 25 bp, Homo sapien
ggcatagtcaggctcatagatgttc

SEQ ID NO: 1084811 - DNA, 25 bp, Homo sapien
tgaactgtccgaaccagagtgggtg

SEQ ID NO: 1084812 - DNA, 25 bp, Homo sapien
gaggaagaagtcatacacatcaggg

SEQ ID NO: 1084813 - DNA, 25 bp, Homo sapien
gaagtcatacacatcaggggcctta

SEQ ID NO: 1084814 - DNA, 25 bp, Homo sapien
caatccactggaggaagaagtcata

SEQ ID NO: 1084815 - DNA, 25 bp, Homo sapien
aagaagtcatacacatcaggggcct

SEQ ID NO: 1084816 - DNA, 25 bp, Homo sapien
ttcagcacatcataatgaaagccag

SEQ ID NO: 1084817 - DNA, 25 bp, Homo sapien
ttgcggtgctgcaaccacttgggcc

SEQ ID NO: 1084818 - DNA, 25 bp, Homo sapien
cttgcggtgctgcaaccacttgggc

SEQ ID NO: 1084819 - DNA, 25 bp, Homo sapien
ataatgaaagccaggtgtgagcagc

SEQ ID NO: 1084820 - DNA, 25 bp, Homo sapien
tcctcttccaaaggtgcacttcatg

SEQ ID NO: 1084821 - DNA, 25 bp, Homo sapien
gccatgtgacccacatcgcagaaga

SEQ ID NO: 1084822 - DNA, 25 bp, Homo sapien
atgtcaaaggacttaccctcccgag

SEQ ID NO: 1084823 - DNA, 25 bp, Homo sapien
cacttcatgagtgtgttcagcgcca

SEQ ID NO: 1084824 - DNA, 25 bp, Homo sapien
tgagatcgctgactgcaaggtagta

SEQ ID NO: 1084825 - DNA, 25 bp, Homo sapien
gacacaaggcgctgctgcatcaaca

SEQ ID NO: 1084826 - DNA, 25 bp, Homo sapien
ctggaaggacacaaggcgctgctgc

SEQ ID NO: 1084827 - DNA, 25 bp, Homo sapien
acagagtgagatcgctgactgcaag

SEQ ID NO: 1084828 - DNA, 25 bp, Homo sapien
gccagtagatgaagtcattatggta

SEQ ID NO: 1084829 - DNA, 25 bp, Homo sapien
gggtgagccagtagatgaagtcatt

SEQ ID NO: 1084830 - DNA, 25 bp, Homo sapien
acctggcaggcccgcaggaagcggc

SEQ ID NO: 1084831 - DNA, 25 bp, Homo sapien
tgagccagtagatgaagtcattatg

SEQ ID NO: 1084832 - DNA, 25 bp, Homo sapien
ccaaaagcacagagtgtcactgcct

SEQ ID NO: 1084833 - DNA, 25 bp, Homo sapien
aaagcacagagtgtcactgcctggg

SEQ ID NO: 1084834 - DNA, 25 bp, Homo sapien
gaaccaaaagcacagagtgtcactg

SEQ ID NO: 1084835 - DNA, 25 bp, Homo sapien
ctgaaccaaaagcacagagtgtcac

SEQ ID NO: 1084836 - DNA, 25 bp, Homo sapien
gtgcctccggttctggatcttcttc

SEQ ID NO: 1084837 - DNA, 25 bp, Homo sapien
ctgccttccgctccctgatgacctg

SEQ ID NO: 1084838 - DNA, 25 bp, Homo sapien
tcttccgcaccttctcatcctgcag

SEQ ID NO: 1084839 - DNA, 25 bp, Homo sapien
agtccaggtgcctccggttctggat

SEQ ID NO: 1084840 - DNA, 25 bp, Homo sapien
aggacagcttgaggtattggaggtg

SEQ ID NO: 1084841 - DNA, 25 bp, Homo sapien
gaggtgggtaacaagaagaactcat

SEQ ID NO: 1084842 - DNA, 25 bp, Homo sapien
agaactcataatggtggttgtcaaa

SEQ ID NO: 1084843 - DNA, 25 bp, Homo sapien
ctgggttagggaaggcataatagga

SEQ ID NO: 1084844 - DNA, 25 bp, Homo sapien
ttcagcccggaggtctgcatctgac

SEQ ID NO: 1084845 - DNA, 25 bp, Homo sapien
agtcctggtcccctaggatctcgcg

SEQ ID NO: 1084846 - DNA, 25 bp, Homo sapien
caacgatgctggtgctcagggtaca

SEQ ID NO: 1084847 - DNA, 25 bp, Homo sapien
tgaatgtgtccacttcagcccggag

SEQ ID NO: 1084848 - DNA, 25 bp, Homo sapien
ccagaagggtaatcaggttctaccg

SEQ ID NO: 1084849 - DNA, 25 bp, Homo sapien
ttgttgacaactttctctacataac

SEQ ID NO: 1084850 - DNA, 25 bp, Homo sapien
cacaaaatatcagcctcttgttgac

SEQ ID NO: 1084851 - DNA, 25 bp, Homo sapien
taccgtcagaagaagttagcacaca

SEQ ID NO: 1084852 - DNA, 25 bp, Homo sapien
tccttgatgcacatggtcagataag

SEQ ID NO: 1084853 - DNA, 25 bp, Homo sapien
caggcttgctgagctggcggtacac

SEQ ID NO: 1084854 - DNA, 25 bp, Homo sapien
ctgcaggtagagaccggccatccac

SEQ ID NO: 1084855 - DNA, 25 bp, Homo sapien
gccatccacaaaggtgacaggcttg

SEQ ID NO: 1084856 - DNA, 25 bp, Homo sapien
tctctgaacgcaaagcctgagctct

SEQ ID NO: 1084857 - DNA, 25 bp, Homo sapien
gtgcaaagatttgactaaaggcaca

SEQ ID NO: 1084858 - DNA, 25 bp, Homo sapien
acagagggtgccagaggagcatgca

SEQ ID NO: 1084859 - DNA, 25 bp, Homo sapien
ttccccaaaagtgcaaagatttgac

SEQ ID NO: 1084860 - DNA, 25 bp, Homo sapien
tagatatgcatagagatcaggcttc

SEQ ID NO: 1084861 - DNA, 25 bp, Homo sapien
catagatatgcatagagatcaggct

SEQ ID NO: 1084862 - DNA, 25 bp, Homo sapien
ctatggagggcatagatatgcatag

SEQ ID NO: 1084863 - DNA, 25 bp, Homo sapien
gagggcatagatatgcatagagatc

SEQ ID NO: 1084864 - DNA, 25 bp, Homo sapien
ctcagggtcgggccatacagcactg

SEQ ID NO: 1084865 - DNA, 25 bp, Homo sapien
tcagggtcgggccatacagcactgt

SEQ ID NO: 1084866 - DNA, 25 bp, Homo sapien
cagggtcgggccatacagcactgtt

SEQ ID NO: 1084867 - DNA, 25 bp, Homo sapien
agggtcgggccatacagcactgttc

SEQ ID NO: 1084868 - DNA, 25 bp, Homo sapien
gagaagggcataaaggcaaagggat

SEQ ID NO: 1084869 - DNA, 25 bp, Homo sapien
agggatggcgtttggatgcattctc

SEQ ID NO: 1084870 - DNA, 25 bp, Homo sapien
gcataaaggcaaagggatggcgttt

SEQ ID NO: 1084871 - DNA, 25 bp, Homo sapien
tggaaaagcgcagagagtcaaagac

SEQ ID NO: 1084872 - DNA, 25 bp, Homo sapien
gccattcttggagcgcaggacaagc

SEQ ID NO: 1084873 - DNA, 25 bp, Homo sapien
actcaaagcggagcaagcacatggc

SEQ ID NO: 1084874 - DNA, 25 bp, Homo sapien
aaagccattcttggagcgcaggaca

SEQ ID NO: 1084875 - DNA, 25 bp, Homo sapien
ccagagagaactcaaagcggagcaa

SEQ ID NO: 1084876 - DNA, 25 bp, Homo sapien
tttttacatagcactgtcctctagg

SEQ ID NO: 1084877 - DNA, 25 bp, Homo sapien
taaccatgaatctcagggcaaaact

SEQ ID NO: 1084878 - DNA, 25 bp, Homo sapien
tctaggagtcgtctatggtaatgcc

SEQ ID NO: 1084879 - DNA, 25 bp, Homo sapien
ttctcgaacgaaataggtgctcacc

SEQ ID NO: 1084880 - DNA, 25 bp, Homo sapien
gacacatcagtgataccatattcca

SEQ ID NO: 1084881 - DNA, 25 bp, Homo sapien
tcagtgataccatattccatatttc

SEQ ID NO: 1084882 - DNA, 25 bp, Homo sapien
cagaagacacatcagtgataccata

SEQ ID NO: 1084883 - DNA, 25 bp, Homo sapien
cacatcagtgataccatattccata

SEQ ID NO: 1084884 - DNA, 25 bp, Homo sapien
caatttccatctaaggttaatatta

SEQ ID NO: 1084885 - DNA, 25 bp, Homo sapien
caaccatgtgttcaatcttggaata

SEQ ID NO: 1084886 - DNA, 25 bp, Homo sapien
ggagcatttagccaatttccatcta

SEQ ID NO: 1084887 - DNA, 25 bp, Homo sapien
ttagccaatttccatctaaggttaa

SEQ ID NO: 1084888 - DNA, 25 bp, Homo sapien
gctgcgggtaactttctgggcttca

SEQ ID NO: 1084889 - DNA, 25 bp, Homo sapien
tgggcttcagacaattctgttgaga

SEQ ID NO: 1084890 - DNA, 25 bp, Homo sapien
ggcttttgcggctgctgcgggtaac

SEQ ID NO: 1084891 - DNA, 25 bp, Homo sapien
cttgtggcttttgcggctgctgcgg

SEQ ID NO: 1084892 - DNA, 25 bp, Homo sapien
ccttgtactgagtaagaaaaactat

SEQ ID NO: 1084893 - DNA, 25 bp, Homo sapien
ccaatatttgaaactcctgtggata

SEQ ID NO: 1084894 - DNA, 25 bp, Homo sapien
aattctcatgattccaatatttgaa

SEQ ID NO: 1084895 - DNA, 25 bp, Homo sapien
gaaattttatctccttgtactgagt

SEQ ID NO: 1084896 - DNA, 25 bp, Homo sapien
tcaaatcagttgtcttggtatcaca

SEQ ID NO: 1084897 - DNA, 25 bp, Homo sapien
cacggttggtgttggttatcaaatc

SEQ ID NO: 1084898 - DNA, 25 bp, Homo sapien
tatgctacctgccagttggtcacgg

SEQ ID NO: 1084899 - DNA, 25 bp, Homo sapien
ccctctgtcccatcaaggatgtgaa

SEQ ID NO: 1084900 - DNA, 25 bp, Homo sapien
actgctaaaaacctcgtgcctgcct

SEQ ID NO: 1084901 - DNA, 25 bp, Homo sapien
gaggagcttcttttcggtcattttc

SEQ ID NO: 1084902 - DNA, 25 bp, Homo sapien
gaaaaattgcacgttaccagcactg

SEQ ID NO: 1084903 - DNA, 25 bp, Homo sapien
aaacgccatatagttgcaatcctgg

SEQ ID NO: 1084904 - DNA, 25 bp, Homo sapien
gctttcccacttgtttgtgtcctct

SEQ ID NO: 1084905 - DNA, 25 bp, Homo sapien
caaaaaggtccttcacttccattgt

SEQ ID NO: 1084906 - DNA, 25 bp, Homo sapien
tgctttgagcaacatggccattttc

SEQ ID NO: 1084907 - DNA, 25 bp, Homo sapien
tagatattctattcttttgtggcag

SEQ ID NO: 1084908 - DNA, 25 bp, Homo sapien
tgtgcagtcttatttgtgggttccc

SEQ ID NO: 1084909 - DNA, 25 bp, Homo sapien
ggccccggtgtcctatgtcctgaat

SEQ ID NO: 1084910 - DNA, 25 bp, Homo sapien
gacttggctgaagatcagatgattg

SEQ ID NO: 1084911 - DNA, 25 bp, Homo sapien
aataatttgaagaggcctccagctt

SEQ ID NO: 1084912 - DNA, 25 bp, Homo sapien
tgttcccgcaccacgtgtccatgtg

SEQ ID NO: 1084913 - DNA, 25 bp, Homo sapien
tcctgtttccctagtgattagcaca

SEQ ID NO: 1084914 - DNA, 25 bp, Homo sapien
gaaggacttggcaattgacagtcac

SEQ ID NO: 1084915 - DNA, 25 bp, Homo sapien
ggtgactggctcatgaggtgtccat

SEQ ID NO: 1084916 - DNA, 25 bp, Homo sapien
caactattgttgcacaccaggctag

SEQ ID NO: 1084917 - DNA, 25 bp, Homo sapien
agtctgaaaatctttgtgctttggt

SEQ ID NO: 1084918 - DNA, 25 bp, Homo sapien
gtctgaaaatctttgtgctttggtt

SEQ ID NO: 1084919 - DNA, 25 bp, Homo sapien
tagtctgaaaatctttgtgctttgg

SEQ ID NO: 1084920 - DNA, 25 bp, Homo sapien
tacaataacgtcgtctgcaaactgg

SEQ ID NO: 1084921 - DNA, 25 bp, Homo sapien
aataacgtcgtctgcaaactgggac

SEQ ID NO: 1084922 - DNA, 25 bp, Homo sapien
caataacgtcgtctgcaaactggga

SEQ ID NO: 1084923 - DNA, 25 bp, Homo sapien
taacgtcgtctgcaaactgggacag

SEQ ID NO: 1084924 - DNA, 25 bp, Homo sapien
tagcaaaatctccaaccagcgcatg

SEQ ID NO: 1084925 - DNA, 25 bp, Homo sapien
gaaagcagtgttcaaccttagcaaa

SEQ ID NO: 1084926 - DNA, 25 bp, Homo sapien
ggaggaacacattgcccaaaactca

SEQ ID NO: 1084927 - DNA, 25 bp, Homo sapien
taccctggactcatacctgaaagca

SEQ ID NO: 1084928 - DNA, 25 bp, Homo sapien
tcccaggcatggagtaaagcaattc

SEQ ID NO: 1084929 - DNA, 25 bp, Homo sapien
tcagcttggattcatactggcccca

SEQ ID NO: 1084930 - DNA, 25 bp, Homo sapien
cctgaatgaggtgattgcgacaact

SEQ ID NO: 1084931 - DNA, 25 bp, Homo sapien
gagacatgggttcccctgaacacgt

SEQ ID NO: 1084932 - DNA, 25 bp, Homo sapien
aagggatggccctggacagttccta

SEQ ID NO: 1084933 - DNA, 25 bp, Homo sapien
tcaagattgccatggtactggagag

SEQ ID NO: 1084934 - DNA, 25 bp, Homo sapien
taggatccaggaatcagaacccact

SEQ ID NO: 1084935 - DNA, 25 bp, Homo sapien
gaaaggctcacgcttattaggctta

SEQ ID NO: 1084936 - DNA, 25 bp, Homo sapien
cattactgcctactttggtgtttaa

SEQ ID NO: 1084937 - DNA, 25 bp, Homo sapien
tattttcatagtgattaacatggga

SEQ ID NO: 1084938 - DNA, 25 bp, Homo sapien
aactcctggcttcgaacaatgcttc

SEQ ID NO: 1084939 - DNA, 25 bp, Homo sapien
ctgcctactttggtgtttaattgat

SEQ ID NO: 1084940 - DNA, 25 bp, Homo sapien
agccaatgggatgccaatccacaaa

SEQ ID NO: 1084941 - DNA, 25 bp, Homo sapien
ccttaaagccaatgggatgccaatc

SEQ ID NO: 1084942 - DNA, 25 bp, Homo sapien
cctcactggggggctggtaattaat

SEQ ID NO: 1084943 - DNA, 25 bp, Homo sapien
ccaccaggtacctcactggggggct

SEQ ID NO: 1084944 - DNA, 25 bp, Homo sapien
atattgtttcaacaccctcaggcag

SEQ ID NO: 1084945 - DNA, 25 bp, Homo sapien
tgtcccatggtagtcatgaggatga

SEQ ID NO: 1084946 - DNA, 25 bp, Homo sapien
caggcttggcaataaggacgttgtc

SEQ ID NO: 1084947 - DNA, 25 bp, Homo sapien
tagctcactgaaggactggcacaga

SEQ ID NO: 1084948 - DNA, 25 bp, Homo sapien
agtacggccatttttactatattgt

SEQ ID NO: 1084949 - DNA, 25 bp, Homo sapien
ccagagtgggtgagtgtagaaaaac

SEQ ID NO: 1084950 - DNA, 25 bp, Homo sapien
ccttgataagcagggtgggaacttc

SEQ ID NO: 1084951 - DNA, 25 bp, Homo sapien
gggaacttcagctgcccaggcatag

SEQ ID NO: 1084952 - DNA, 25 bp, Homo sapien
tacatattagggcttgaggttctgc

SEQ ID NO: 1084953 - DNA, 25 bp, Homo sapien
cattaacttatccttgtttaaagct

SEQ ID NO: 1084954 - DNA, 25 bp, Homo sapien
ttatccttgtttaaagctgcatagt

SEQ ID NO: 1084955 - DNA, 25 bp, Homo sapien
taacttatccttgtttaaagctgca

SEQ ID NO: 1084956 - DNA, 25 bp, Homo sapien
ccccatctccccatctatgacaggc

SEQ ID NO: 1084957 - DNA, 25 bp, Homo sapien
tggctggctcactagaatatgttac

SEQ ID NO: 1084958 - DNA, 25 bp, Homo sapien
tcctggctggctcactagaatatgt

SEQ ID NO: 1084959 - DNA, 25 bp, Homo sapien
ctggctcactagaatatgttactgg

SEQ ID NO: 1084960 - DNA, 25 bp, Homo sapien
cactagaatatgttactggtggagg

SEQ ID NO: 1084961 - DNA, 25 bp, Homo sapien
taccaaagcgcgcacgcttcgttcg

SEQ ID NO: 1084962 - DNA, 25 bp, Homo sapien
cgcgtgcgggatttctagccggtta

SEQ ID NO: 1084963 - DNA, 25 bp, Homo sapien
gcttcgttcggcccaactgcttttg

SEQ ID NO: 1084964 - DNA, 25 bp, Homo sapien
cgaagcttctgactcgcgggaagaa

SEQ ID NO: 1084965 - DNA, 25 bp, Homo sapien
ccaggtaaaagggccgcgcccagcg

SEQ ID NO: 1084966 - DNA, 25 bp, Homo sapien
caggtacagcttaatggcctgcagc

SEQ ID NO: 1084967 - DNA, 25 bp, Homo sapien
cgcaggtacagcttaatggcctgca

SEQ ID NO: 1084968 - DNA, 25 bp, Homo sapien
gtacagcttaatggcctgcagcagc

SEQ ID NO: 1084969 - DNA, 25 bp, Homo sapien
tccgcaggtacagcttaatggcctg

SEQ ID NO: 1084970 - DNA, 25 bp, Homo sapien
ctgctgcaggattgtttgctctcat

SEQ ID NO: 1084971 - DNA, 25 bp, Homo sapien
tctgctgcaggattgtttgctctca

SEQ ID NO: 1084972 - DNA, 25 bp, Homo sapien
tatctgctgcaggattgtttgctct

SEQ ID NO: 1084973 - DNA, 25 bp, Homo sapien
tgctgcaggattgtttgctctcatc

SEQ ID NO: 1084974 - DNA, 25 bp, Homo sapien
gaaggcacgagggtatttttcaata

SEQ ID NO: 1084975 - DNA, 25 bp, Homo sapien
ttctgctcagaagtgtctttgcata

SEQ ID NO: 1084976 - DNA, 25 bp, Homo sapien
cagaaagggaaggcacgagggtatt

SEQ ID NO: 1084977 - DNA, 25 bp, Homo sapien
gctcagaagtgtctttgcatagtct

SEQ ID NO: 1084978 - DNA, 25 bp, Homo sapien
gaatttctgcaggtactgggacttg

SEQ ID NO: 1084979 - DNA, 25 bp, Homo sapien
aatttctgcaggtactgggacttgg

SEQ ID NO: 1084980 - DNA, 25 bp, Homo sapien
tttctgcaggtactgggacttggga

SEQ ID NO: 1084981 - DNA, 25 bp, Homo sapien
atttctgcaggtactgggacttggg

SEQ ID NO: 1084982 - DNA, 25 bp, Homo sapien
tggaatccaggagttagtaggcgac

SEQ ID NO: 1084983 - DNA, 25 bp, Homo sapien
aatgtatgctttcaggatgttaaaa

SEQ ID NO: 1084984 - DNA, 25 bp, Homo sapien
cagaatgagccatcacctcaatgta

SEQ ID NO: 1084985 - DNA, 25 bp, Homo sapien
cgatgctggaaccacttgggtccgt

SEQ ID NO: 1084986 - DNA, 25 bp, Homo sapien
ggtctccttgctgaaagcgcatttc

SEQ ID NO: 1084987 - DNA, 25 bp, Homo sapien
agcgcatttcatgattatatccaga

SEQ ID NO: 1084988 - DNA, 25 bp, Homo sapien
tagacctccacgcttgtgtcctgag

SEQ ID NO: 1084989 - DNA, 25 bp, Homo sapien
catcgagttgatgtgctcatagacc

SEQ ID NO: 1084990 - DNA, 25 bp, Homo sapien
ggcttaacttctggaagcggtagcc

SEQ ID NO: 1084991 - DNA, 25 bp, Homo sapien
gatacaacaaactgtacaagcggtg

SEQ ID NO: 1084992 - DNA, 25 bp, Homo sapien
cctgagggctgagtttgaaaattat

SEQ ID NO: 1084993 - DNA, 25 bp, Homo sapien
tgtgtactgattcaacactcggctt

SEQ ID NO: 1084994 - DNA, 25 bp, Homo sapien
tcctggtacttcctcttcggagtgt

SEQ ID NO: 1084995 - DNA, 25 bp, Homo sapien
tcctcttcggagtgttatcctgctt

SEQ ID NO: 1084996 - DNA, 25 bp, Homo sapien
tgttatcctgctttaccccagcctg

SEQ ID NO: 1084997 - DNA, 25 bp, Homo sapien
ttcggagtgttatcctgctttaccc

SEQ ID NO: 1084998 - DNA, 25 bp, Homo sapien
ctgagaagctgctaccactttcatc

SEQ ID NO: 1084999 - DNA, 25 bp, Homo sapien
tgccaaggtgtcatgtcctgccaac

SEQ ID NO: 1085000 - DNA, 25 bp, Homo sapien
gaatgtgctcacttcagagtgtaca

SEQ ID NO: 1085001 - DNA, 25 bp, Homo sapien
caaggtgtcatgtcctgccaacagg

SEQ ID NO: 1085002 - DNA, 25 bp, Homo sapien
cctgccaacaggaatgtgctcactt

SEQ ID NO: 1085003 - DNA, 25 bp, Homo sapien
aggcactagggtcactaaggtacca

SEQ ID NO: 1085004 - DNA, 25 bp, Homo sapien
gaaaatttaggggtgcagatcttac

SEQ ID NO: 1085005 - DNA, 25 bp, Homo sapien
cactaaggtaccagcgcaaaaaata

SEQ ID NO: 1085006 - DNA, 25 bp, Homo sapien
gaataatttggagctctctttagaa

SEQ ID NO: 1085007 - DNA, 25 bp, Homo sapien
tggtgtacgacatctcacccagctg

SEQ ID NO: 1085008 - DNA, 25 bp, Homo sapien
ggactgcaggaatcaatcggcacgt

SEQ ID NO: 1085009 - DNA, 25 bp, Homo sapien
tctctggaaatggacgggactgcag

SEQ ID NO: 1085010 - DNA, 25 bp, Homo sapien
aatcggcacgtctccttgatgcaca

SEQ ID NO: 1085011 - DNA, 25 bp, Homo sapien
tctccaggatcccatagcctctaag

SEQ ID NO: 1085012 - DNA, 25 bp, Homo sapien
ctccaggatcccatagcctctaaga

SEQ ID NO: 1085013 - DNA, 25 bp, Homo sapien
tcagggtctggcctgtcaatcaggc

SEQ ID NO: 1085014 - DNA, 25 bp, Homo sapien
aatggactattaagcactcctggag

SEQ ID NO: 1085015 - DNA, 25 bp, Homo sapien
tgcctgctgtagctgatgacaccag

SEQ ID NO: 1085016 - DNA, 25 bp, Homo sapien
tgaggagcacctaagaagatgcggc

SEQ ID NO: 1085017 - DNA, 25 bp, Homo sapien
tgaagaccccaaatactaagaacca

SEQ ID NO: 1085018 - DNA, 25 bp, Homo sapien
cccaaatactaagaaccacggtgat

SEQ ID NO: 1085019 - DNA, 25 bp, Homo sapien
cacagctgatttgtctgatacccag

SEQ ID NO: 1085020 - DNA, 25 bp, Homo sapien
actgggcagtgtaccttcagacctg

SEQ ID NO: 1085021 - DNA, 25 bp, Homo sapien
catgtgctcagtagccgtatgtggc

SEQ ID NO: 1085022 - DNA, 25 bp, Homo sapien
tatgtggcccgtggctactacactg

SEQ ID NO: 1085023 - DNA, 25 bp, Homo sapien
gagagaacctcaaggggtcaaagac

SEQ ID NO: 1085024 - DNA, 25 bp, Homo sapien
tctcctgagagaacctcaaggggtc

SEQ ID NO: 1085025 - DNA, 25 bp, Homo sapien
gcataggggtgtctctgatcagaat

SEQ ID NO: 1085026 - DNA, 25 bp, Homo sapien
taagtaggcataggggtgtctctga

SEQ ID NO: 1085027 - DNA, 25 bp, Homo sapien
aatcatggcaaactcctgcccaatg

SEQ ID NO: 1085028 - DNA, 25 bp, Homo sapien
ctttaactcaatcatggcaaactcc

SEQ ID NO: 1085029 - DNA, 25 bp, Homo sapien
taactcaatcatggcaaactcctgc

SEQ ID NO: 1085030 - DNA, 25 bp, Homo sapien
tggcaaactcctgcccaatgcagtt

SEQ ID NO: 1085031 - DNA, 25 bp, Homo sapien
gaagtggagcagaatcaaggcaatg

SEQ ID NO: 1085032 - DNA, 25 bp, Homo sapien
cttgggcttgaggataaaatggttg

SEQ ID NO: 1085033 - DNA, 25 bp, Homo sapien
attcttgggcttgaggataaaatgg

SEQ ID NO: 1085034 - DNA, 25 bp, Homo sapien
agtcactctgaagtggagcagaatc

SEQ ID NO: 1085035 - DNA, 25 bp, Homo sapien
gggaatttttgacagtgagcataca

SEQ ID NO: 1085036 - DNA, 25 bp, Homo sapien
tgaaagtctattggtgtatacagca

SEQ ID NO: 1085037 - DNA, 25 bp, Homo sapien
cagatctagctgacacactgtgtac

SEQ ID NO: 1085038 - DNA, 25 bp, Homo sapien
tcagggcatggaatgtcggctaagt

SEQ ID NO: 1085039 - DNA, 25 bp, Homo sapien
gaatatatgcttcccctacttccta

SEQ ID NO: 1085040 - DNA, 25 bp, Homo sapien
gtctgtggcacatatttcgaaaaaa

SEQ ID NO: 1085041 - DNA, 25 bp, Homo sapien
caaagaagatttctagggcaaacac

SEQ ID NO: 1085042 - DNA, 25 bp, Homo sapien
taagcttgaagagtaccatggtgaa

SEQ ID NO: 1085043 - DNA, 25 bp, Homo sapien
gagatgccccctgggcaacactggg

SEQ ID NO: 1085044 - DNA, 25 bp, Homo sapien
tctggagagcctgagagaactgagc

SEQ ID NO: 1085045 - DNA, 25 bp, Homo sapien
gggagaatgcaggtctctcataaac

SEQ ID NO: 1085046 - DNA, 25 bp, Homo sapien
cctgggcaacactgggctttcaaaa

SEQ ID NO: 1085047 - DNA, 25 bp, Homo sapien
acagcagcagagacatgcagaggag

SEQ ID NO: 1085048 - DNA, 25 bp, Homo sapien
caagaaggggtgagccatgagttcc

SEQ ID NO: 1085049 - DNA, 25 bp, Homo sapien
cagcagagacatgcagaggaggatc

SEQ ID NO: 1085050 - DNA, 25 bp, Homo sapien
gagccatgagttcctgaagccagga

SEQ ID NO: 1085051 - DNA, 25 bp, Homo sapien
tcctcctctggtacaacctgattac

SEQ ID NO: 1085052 - DNA, 25 bp, Homo sapien
ctccttgtggccatagaaccagtgg

SEQ ID NO: 1085053 - DNA, 25 bp, Homo sapien
caggaaacaggtgcagggctctgat

SEQ ID NO: 1085054 - DNA, 25 bp, Homo sapien
tgcagggctctgatcatccatctcc

SEQ ID NO: 1085055 - DNA, 25 bp, Homo sapien
tgaagaacatcgtaaagggtccaac

SEQ ID NO: 1085056 - DNA, 25 bp, Homo sapien
catcgtaaagggtccaacccacaag

SEQ ID NO: 1085057 - DNA, 25 bp, Homo sapien
tgatggtaagtggtagtcctggggg

SEQ ID NO: 1085058 - DNA, 25 bp, Homo sapien
cacagtgatggtaagtggtagtcct

SEQ ID NO: 1085059 - DNA, 25 bp, Homo sapien
acagtgatggtaagtggtagtcctg

SEQ ID NO: 1085060 - DNA, 25 bp, Homo sapien
agtgatggtaagtggtagtcctggg

SEQ ID NO: 1085061 - DNA, 25 bp, Homo sapien
ggaagaaagctgagatggtgattct

SEQ ID NO: 1085062 - DNA, 25 bp, Homo sapien
caggaagaaagctgagatggtgatt

SEQ ID NO: 1085063 - DNA, 25 bp, Homo sapien
aagaaagctgagatggtgattctgg

SEQ ID NO: 1085064 - DNA, 25 bp, Homo sapien
gaagaaagctgagatggtgattctg

SEQ ID NO: 1085065 - DNA, 25 bp, Homo sapien
aaggtccaaaggtgagagcagagca

SEQ ID NO: 1085066 - DNA, 25 bp, Homo sapien
ggagcagagtaaagtttgaaactgg

SEQ ID NO: 1085067 - DNA, 25 bp, Homo sapien
tttgggcaaaggtccaaaggtgaga

SEQ ID NO: 1085068 - DNA, 25 bp, Homo sapien
tgaaactggatagccagacatttct

SEQ ID NO: 1085069 - DNA, 25 bp, Homo sapien
ctggtcaaggtatagagacctgtgt

SEQ ID NO: 1085070 - DNA, 25 bp, Homo sapien
aagcctatcacgaacagcttgttgt

SEQ ID NO: 1085071 - DNA, 25 bp, Homo sapien
gccccccagtgaggtacctggtgga

SEQ ID NO: 1085072 - DNA, 25 bp, Homo sapien
tagtgaaatgtgactcttgccatgg

SEQ ID NO: 1085073 - DNA, 25 bp, Homo sapien
gattggcatcccattggctttaagg

SEQ ID NO: 1085074 - DNA, 25 bp, Homo sapien
tggagaaacctcaatattgaatgcc

SEQ ID NO: 1085075 - DNA, 25 bp, Homo sapien
ttgaatgcccaacctatactagcct

SEQ ID NO: 1085076 - DNA, 25 bp, Homo sapien
aaaatggtgccctgtctctgcatcc

SEQ ID NO: 1085077 - DNA, 25 bp, Homo sapien
tggagccctgaaagttaatctgaca

SEQ ID NO: 1085078 - DNA, 25 bp, Homo sapien
agttcctgctaggatctctactgcc

SEQ ID NO: 1085079 - DNA, 25 bp, Homo sapien
gcagttcctgctaggatctctactg

SEQ ID NO: 1085080 - DNA, 25 bp, Homo sapien
ttcctgctaggatctctactgcctg

SEQ ID NO: 1085081 - DNA, 25 bp, Homo sapien
tcctgctaggatctctactgcctgg

SEQ ID NO: 1085082 - DNA, 25 bp, Homo sapien
cctgtcataggtgagtgcatctcca

SEQ ID NO: 1085083 - DNA, 25 bp, Homo sapien
tccctgtcataggtgagtgcatctc

SEQ ID NO: 1085084 - DNA, 25 bp, Homo sapien
ggtccctgtcataggtgagtgcatc

SEQ ID NO: 1085085 - DNA, 25 bp, Homo sapien
aggtccctgtcataggtgagtgcat

SEQ ID NO: 1085086 - DNA, 25 bp, Homo sapien
caacccaggattcaaggattttgtg

SEQ ID NO: 1085087 - DNA, 25 bp, Homo sapien
tcaaggattttgtggctaacagcac

SEQ ID NO: 1085088 - DNA, 25 bp, Homo sapien
cccaggattcaaggattttgtggct

SEQ ID NO: 1085089 - DNA, 25 bp, Homo sapien
ttgtggctaacagcacttttgggat

SEQ ID NO: 1085090 - DNA, 25 bp, Homo sapien
tcagaatgctgatgttgaagccagg

SEQ ID NO: 1085091 - DNA, 25 bp, Homo sapien
aaccatccagggtcacaagtcctcg

SEQ ID NO: 1085092 - DNA, 25 bp, Homo sapien
caggtttcacaatctggcggtgctt

SEQ ID NO: 1085093 - DNA, 25 bp, Homo sapien
catcatggtgatgaatattttcaga

SEQ ID NO: 1085094 - DNA, 25 bp, Homo sapien
atacacatgcccatctttcccaatt

SEQ ID NO: 1085095 - DNA, 25 bp, Homo sapien
aatgaaacaccttgtcagtactgaa

SEQ ID NO: 1085096 - DNA, 25 bp, Homo sapien
tgatcatacacatgcccatctttcc

SEQ ID NO: 1085097 - DNA, 25 bp, Homo sapien
tatgacaaccatataaaatgaaaca

SEQ ID NO: 1085098 - DNA, 25 bp, Homo sapien
tcatcagggagacatgttgaaagag

SEQ ID NO: 1085099 - DNA, 25 bp, Homo sapien
gtcatcagggagacatgttgaaaga

SEQ ID NO: 1085100 - DNA, 25 bp, Homo sapien
agacgtgagttttgggcaatgtgtt

SEQ ID NO: 1085101 - DNA, 25 bp, Homo sapien
agttttgggcaatgtgttcctccca

SEQ ID NO: 1085102 - DNA, 25 bp, Homo sapien
tagaaaagatttggccttgagagct

SEQ ID NO: 1085103 - DNA, 25 bp, Homo sapien
gaaaaccaggtcgttgtgatgtaga

SEQ ID NO: 1085104 - DNA, 25 bp, Homo sapien
actgctttcaggtatgagtccaggg

SEQ ID NO: 1085105 - DNA, 25 bp, Homo sapien
tggagattttgctaaggttgaacac

SEQ ID NO: 1085106 - DNA, 25 bp, Homo sapien
cttaagagactccttccggtcctgg

SEQ ID NO: 1085107 - DNA, 25 bp, Homo sapien
gagtagtatcttgttttagcttatc

SEQ ID NO: 1085108 - DNA, 25 bp, Homo sapien
ttttagcttatccttaagagactcc

SEQ ID NO: 1085109 - DNA, 25 bp, Homo sapien
agactccttccggtcctggattact

SEQ ID NO: 1085110 - DNA, 25 bp, Homo sapien
gatagcactggatgtggtgtcatgt

SEQ ID NO: 1085111 - DNA, 25 bp, Homo sapien
gagatagcactggatgtggtgtcat

SEQ ID NO: 1085112 - DNA, 25 bp, Homo sapien
tccaggagatagcactggatgtggt

SEQ ID NO: 1085113 - DNA, 25 bp, Homo sapien
tagcactggatgtggtgtcatgtcc

SEQ ID NO: 1085114 - DNA, 25 bp, Homo sapien
aggcggaggcattccttgatgcaca

SEQ ID NO: 1085115 - DNA, 25 bp, Homo sapien
ggcggaggcattccttgatgcacat

SEQ ID NO: 1085116 - DNA, 25 bp, Homo sapien
tagaggcggaggcattccttgatgc

SEQ ID NO: 1085117 - DNA, 25 bp, Homo sapien
cgtagaggcggaggcattccttgat

SEQ ID NO: 1085118 - DNA, 25 bp, Homo sapien
tgtcgagtaaccgggatatgtttac

SEQ ID NO: 1085119 - DNA, 25 bp, Homo sapien
ttgtcgagtaaccgggatatgttta

SEQ ID NO: 1085120 - DNA, 25 bp, Homo sapien
tcgagtaaccgggatatgtttacta

SEQ ID NO: 1085121 - DNA, 25 bp, Homo sapien
aataagaatggccctaggttccaca

SEQ ID NO: 1085122 - DNA, 25 bp, Homo sapien
gaaataagaatggccctaggttcca

SEQ ID NO: 1085123 - DNA, 25 bp, Homo sapien
taagaatggccctaggttccacaga

SEQ ID NO: 1085124 - DNA, 25 bp, Homo sapien
agaatggccctaggttccacagagt

SEQ ID NO: 1085125 - DNA, 25 bp, Homo sapien
caaccctcagtccatatggcaggat

SEQ ID NO: 1085126 - DNA, 25 bp, Homo sapien
ccaaccctcagtccatatggcagga

SEQ ID NO: 1085127 - DNA, 25 bp, Homo sapien
ccctcagtccatatggcaggattct

SEQ ID NO: 1085128 - DNA, 25 bp, Homo sapien
cagtccatatggcaggattctgtac

SEQ ID NO: 1085129 - DNA, 25 bp, Homo sapien
agtcagccgggtggagccagctctt

SEQ ID NO: 1085130 - DNA, 25 bp, Homo sapien
gcggatctcaacagcattgtctgaa

SEQ ID NO: 1085131 - DNA, 25 bp, Homo sapien
gctcttccaccaacatccatgcgga

SEQ ID NO: 1085132 - DNA, 25 bp, Homo sapien
tgaagcccagaaagttacccgcagc

SEQ ID NO: 1085133 - DNA, 25 bp, Homo sapien
cacatactaggccattgataggtct

SEQ ID NO: 1085134 - DNA, 25 bp, Homo sapien
tggaccatcagattcatggcacata

SEQ ID NO: 1085135 - DNA, 25 bp, Homo sapien
taggtctgttattggctattgaggg

SEQ ID NO: 1085136 - DNA, 25 bp, Homo sapien
ggctattgagggaatctgttgtttt

SEQ ID NO: 1085137 - DNA, 25 bp, Homo sapien
gcagatgtgtaacttgatacatagg

SEQ ID NO: 1085138 - DNA, 25 bp, Homo sapien
cataggtaggtatcaatagctgtct

SEQ ID NO: 1085139 - DNA, 25 bp, Homo sapien
cctgacatggccagctagcttactg

SEQ ID NO: 1085140 - DNA, 25 bp, Homo sapien
ttgaacttcaccaatcctgacatgg

SEQ ID NO: 1085141 - DNA, 25 bp, Homo sapien
tgcatgagcgaagattctgtctttt

SEQ ID NO: 1085142 - DNA, 25 bp, Homo sapien
agaaaaagcaggtaagtgcatgagc

SEQ ID NO: 1085143 - DNA, 25 bp, Homo sapien
caggtaagtgcatgagcgaagattc

SEQ ID NO: 1085144 - DNA, 25 bp, Homo sapien
aagtgcatgagcgaagattctgtct

SEQ ID NO: 1085145 - DNA, 25 bp, Homo sapien
agagcccaaatattgataaacacag

SEQ ID NO: 1085146 - DNA, 25 bp, Homo sapien
tacttcccaggggatgatatgcttc

SEQ ID NO: 1085147 - DNA, 25 bp, Homo sapien
gggatgatatgcttctgttgataag

SEQ ID NO: 1085148 - DNA, 25 bp, Homo sapien
tatgcttctgttgataaggcatcat

SEQ ID NO: 1085149 - DNA, 25 bp, Homo sapien
tcccaggggatgatatgcttctgtt

SEQ ID NO: 1085150 - DNA, 25 bp, Homo sapien
ggcatagggatgtattttttcagaa

SEQ ID NO: 1085151 - DNA, 25 bp, Homo sapien
aattttccctggagaatctcaaggg

SEQ ID NO: 1085152 - DNA, 25 bp, Homo sapien
tggtatgaaggcatagggatgtatt

SEQ ID NO: 1085153 - DNA, 25 bp, Homo sapien
taatccagctgagaatggtatgaag

SEQ ID NO: 1085154 - DNA, 25 bp, Homo sapien
gataccaagaaagaaaacatggcat

SEQ ID NO: 1085155 - DNA, 25 bp, Homo sapien
tggggataccaagaaagaaaacatg

SEQ ID NO: 1085156 - DNA, 25 bp, Homo sapien
gggataccaagaaagaaaacatggc

SEQ ID NO: 1085157 - DNA, 25 bp, Homo sapien
ctggggataccaagaaagaaaacat

SEQ ID NO: 1085158 - DNA, 25 bp, Homo sapien
ttgaggacaacttgacgaacaggct

SEQ ID NO: 1085159 - DNA, 25 bp, Homo sapien
ggtctggagccagcttgaagcggag

SEQ ID NO: 1085160 - DNA, 25 bp, Homo sapien
tggtctggagccagcttgaagcgga

SEQ ID NO: 1085161 - DNA, 25 bp, Homo sapien
tgaggacaacttgacgaacaggctg

SEQ ID NO: 1085162 - DNA, 25 bp, Homo sapien
tgtcaaaaccagtcagaagtatcct

SEQ ID NO: 1085163 - DNA, 25 bp, Homo sapien
taaaagtaatgcagatactgagtgg

SEQ ID NO: 1085164 - DNA, 25 bp, Homo sapien
aatttcccttcgcagtggaagtcag

SEQ ID NO: 1085165 - DNA, 25 bp, Homo sapien
tgcttgaaagccactctaccactag

SEQ ID NO: 1085166 - DNA, 25 bp, Homo sapien
tggggctcaggacagagacactcat

SEQ ID NO: 1085167 - DNA, 25 bp, Homo sapien
ctggggctcaggacagagacactca

SEQ ID NO: 1085168 - DNA, 25 bp, Homo sapien
gggaggtcacttggaggatcccgga

SEQ ID NO: 1085169 - DNA, 25 bp, Homo sapien
agggaggtcacttggaggatcccgg

SEQ ID NO: 1085170 - DNA, 25 bp, Homo sapien
atgtcttcacccgttcctgaatccg

SEQ ID NO: 1085171 - DNA, 25 bp, Homo sapien
tcttcacccgttcctgaatccgttg

SEQ ID NO: 1085172 - DNA, 25 bp, Homo sapien
tgtcttcacccgttcctgaatccgt

SEQ ID NO: 1085173 - DNA, 25 bp, Homo sapien
tcacccgttcctgaatccgttgtag

SEQ ID NO: 1085174 - DNA, 25 bp, Homo sapien
ctgatctccccagaatcaccttcat

SEQ ID NO: 1085175 - DNA, 25 bp, Homo sapien
caatccgtggagccaggaatttgta

SEQ ID NO: 1085176 - DNA, 25 bp, Homo sapien
ttgtaggatccatgggatttcgggt

SEQ ID NO: 1085177 - DNA, 25 bp, Homo sapien
caggaatttgtaggatccatgggat

SEQ ID NO: 1085178 - DNA, 25 bp, Homo sapien
aatccgtggagccaggaatttgtag

SEQ ID NO: 1085179 - DNA, 25 bp, Homo sapien
tcgtacagagtctgccatgagcccc

SEQ ID NO: 1085180 - DNA, 25 bp, Homo sapien
cagcatcactcgtacagagtctgcc

SEQ ID NO: 1085181 - DNA, 25 bp, Homo sapien
agcatccgtcgatgctggaaccatg

SEQ ID NO: 1085182 - DNA, 25 bp, Homo sapien
catgtctgcccattcaacaggagca

SEQ ID NO: 1085183 - DNA, 25 bp, Homo sapien
ctgtgggacacagggttgagagtgg

SEQ ID NO: 1085184 - DNA, 25 bp, Homo sapien
agcaatgacctgagagtgttgttcc

SEQ ID NO: 1085185 - DNA, 25 bp, Homo sapien
aactctggggaaccctctactctca

SEQ ID NO: 1085186 - DNA, 25 bp, Homo sapien
cttatacaactctggggaaccctct

SEQ ID NO: 1085187 - DNA, 25 bp, Homo sapien
caaggagacgtgctgaaagacctcc

SEQ ID NO: 1085188 - DNA, 25 bp, Homo sapien
acctccagaggggaatcctggccaa

SEQ ID NO: 1085189 - DNA, 25 bp, Homo sapien
tcaaggagacgtgctgaaagacctc

SEQ ID NO: 1085190 - DNA, 25 bp, Homo sapien
ccacttgataagaacaagggccctg

SEQ ID NO: 1085191 - DNA, 25 bp, Homo sapien
ggtatgtgcactccacttgataaga

SEQ ID NO: 1085192 - DNA, 25 bp, Homo sapien
ctgcccctcaggtatgtgcactcca

SEQ ID NO: 1085193 - DNA, 25 bp, Homo sapien
cttgataagaacaagggccctgcag

SEQ ID NO: 1085194 - DNA, 25 bp, Homo sapien
aatggcctggatgtaggactgagaa

SEQ ID NO: 1085195 - DNA, 25 bp, Homo sapien
ctgttcaggtcactaatggcctgga

SEQ ID NO: 1085196 - DNA, 25 bp, Homo sapien
actaatggcctggatgtaggactga

SEQ ID NO: 1085197 - DNA, 25 bp, Homo sapien
agcaaaaaaccaggctgttcaggtc

SEQ ID NO: 1085198 - DNA, 25 bp, Homo sapien
ggccagctggcaggcgcggtgtgtc

SEQ ID NO: 1085199 - DNA, 25 bp, Homo sapien
gtagatggtgtcattctcatgaaag

SEQ ID NO: 1085200 - DNA, 25 bp, Homo sapien
ctgtgtgctgatgggccagctggca

SEQ ID NO: 1085201 - DNA, 25 bp, Homo sapien
tgtcattctcatgaaaggcattcct

SEQ ID NO: 1085202 - DNA, 25 bp, Homo sapien
gggaaaggctgggagacaagaggaa

SEQ ID NO: 1085203 - DNA, 25 bp, Homo sapien
ctgggaaaggctgggagacaagagg

SEQ ID NO: 1085204 - DNA, 25 bp, Homo sapien
gcctgggaaaggctgggagacaaga

SEQ ID NO: 1085205 - DNA, 25 bp, Homo sapien
tttcactgtgcctgggaaaggctgg

SEQ ID NO: 1085206 - DNA, 25 bp, Homo sapien
gccttcctcagttggatcacttggt

SEQ ID NO: 1085207 - DNA, 25 bp, Homo sapien
tccttgtctgacaagatgctcccat

SEQ ID NO: 1085208 - DNA, 25 bp, Homo sapien
cacggaggtccttgtctgacaagat

SEQ ID NO: 1085209 - DNA, 25 bp, Homo sapien
ctcaaacatgaacgtgtccacctca

SEQ ID NO: 1085210 - DNA, 25 bp, Homo sapien
cacctcagcacggaggtccttgtct

SEQ ID NO: 1085211 - DNA, 25 bp, Homo sapien
ggtgtgtggccagagcatagaggat

SEQ ID NO: 1085212 - DNA, 25 bp, Homo sapien
ctcctgatgcttggggtgtgtggcc

SEQ ID NO: 1085213 - DNA, 25 bp, Homo sapien
gggtgtgtggccagagcatagagga

SEQ ID NO: 1085214 - DNA, 25 bp, Homo sapien
ctctcctgatgcttggggtgtgtgg

SEQ ID NO: 1085215 - DNA, 25 bp, Homo sapien
attccatcctgaacaccagcaaggc

SEQ ID NO: 1085216 - DNA, 25 bp, Homo sapien
aaacaattccatcctgaacaccagc

SEQ ID NO: 1085217 - DNA, 25 bp, Homo sapien
aattccatcctgaacaccagcaagg

SEQ ID NO: 1085218 - DNA, 25 bp, Homo sapien
ctgaaacaattccatcctgaacacc

SEQ ID NO: 1085219 - DNA, 25 bp, Homo sapien
aaggtgacgggagtgctgagctctc

SEQ ID NO: 1085220 - DNA, 25 bp, Homo sapien
gcctcagtgcctccttaatgcacat

SEQ ID NO: 1085221 - DNA, 25 bp, Homo sapien
tcagggaaggtgacgggagtgctga

SEQ ID NO: 1085222 - DNA, 25 bp, Homo sapien
cctggcaccggtgggtagagcctca

SEQ ID NO: 1085223 - DNA, 25 bp, Homo sapien
cacgtccccgtggagactttgggtg

SEQ ID NO: 1085224 - DNA, 25 bp, Homo sapien
tccccgtggagactttgggtgagag

SEQ ID NO: 1085225 - DNA, 25 bp, Homo sapien
cccgtggagactttgggtgagaggg

SEQ ID NO: 1085226 - DNA, 25 bp, Homo sapien
ccacacgtccccgtggagactttgg

SEQ ID NO: 1085227 - DNA, 25 bp, Homo sapien
cataaatggagaggaggaccatgat

SEQ ID NO: 1085228 - DNA, 25 bp, Homo sapien
ccataaatggagaggaggaccatga

SEQ ID NO: 1085229 - DNA, 25 bp, Homo sapien
gccataaatggagaggaggaccatg

SEQ ID NO: 1085230 - DNA, 25 bp, Homo sapien
taaatggagaggaggaccatgatac

SEQ ID NO: 1085231 - DNA, 25 bp, Homo sapien
tgttgagcagaacccggtgcaaaac

SEQ ID NO: 1085232 - DNA, 25 bp, Homo sapien
gctgtgttgagcagaacccggtgca

SEQ ID NO: 1085233 - DNA, 25 bp, Homo sapien
aggaaagcgtggctgtgttgagcag

SEQ ID NO: 1085234 - DNA, 25 bp, Homo sapien
agcgtggctgtgttgagcagaaccc

SEQ ID NO: 1085235 - DNA, 25 bp, Homo sapien
ctcacaaagatcagagggttgacca

SEQ ID NO: 1085236 - DNA, 25 bp, Homo sapien
gaagtttggaacatgcactgacagt

SEQ ID NO: 1085237 - DNA, 25 bp, Homo sapien
gaaaggtaggacttgcaggtcatct

SEQ ID NO: 1085238 - DNA, 25 bp, Homo sapien
gattcatctctacgacagactagtg

SEQ ID NO: 1085239 - DNA, 25 bp, Homo sapien
gtaagtggactcaccatttgaagaa

SEQ ID NO: 1085240 - DNA, 25 bp, Homo sapien
gactcaccatttgaagaagtcacat

SEQ ID NO: 1085241 - DNA, 25 bp, Homo sapien
ggcaatgtttacaaggacttcctca

SEQ ID NO: 1085242 - DNA, 25 bp, Homo sapien
gatgccacgatgatttccaccgcag

SEQ ID NO: 1085243 - DNA, 25 bp, Homo sapien
gaattgagacgtgtcctcaggcccc

SEQ ID NO: 1085244 - DNA, 25 bp, Homo sapien
aggcggagacaatgaattgagacgt

SEQ ID NO: 1085245 - DNA, 25 bp, Homo sapien
cggagacaatgaattgagacgtgtc

SEQ ID NO: 1085246 - DNA, 25 bp, Homo sapien
gacaatgaattgagacgtgtcctca

SEQ ID NO: 1085247 - DNA, 25 bp, Homo sapien
cagctcaaagcggagcagggtcagg

SEQ ID NO: 1085248 - DNA, 25 bp, Homo sapien
ggcaaattgtttcccgatgcagttc

SEQ ID NO: 1085249 - DNA, 25 bp, Homo sapien
agcagctcaaagcggagcagggtca

SEQ ID NO: 1085250 - DNA, 25 bp, Homo sapien
gttcatggcaaattgtttcccgatg

SEQ ID NO: 1085251 - DNA, 25 bp, Homo sapien
gtcttcacaagggttagggagcctc

SEQ ID NO: 1085252 - DNA, 25 bp, Homo sapien
cctcctgagacgcaggtggattcca

SEQ ID NO: 1085253 - DNA, 25 bp, Homo sapien
ttagggagcctcctgagacgcaggt

SEQ ID NO: 1085254 - DNA, 25 bp, Homo sapien
gacgcaggtggattccatttttgga

SEQ ID NO: 1085255 - DNA, 25 bp, Homo sapien
cctcttctaaccctatcaccttcca

SEQ ID NO: 1085256 - DNA, 25 bp, Homo sapien
gacaaagcatgcaagcttgtgaacc

SEQ ID NO: 1085257 - DNA, 25 bp, Homo sapien
agggatttatctccctgccttagtg

SEQ ID NO: 1085258 - DNA, 25 bp, Homo sapien
tcagtagggatttatctccctgcct

SEQ ID NO: 1085259 - DNA, 25 bp, Homo sapien
cattgatcactctgaggtctccacc

SEQ ID NO: 1085260 - DNA, 25 bp, Homo sapien
ctgtggtctttgagcatggccaaca

SEQ ID NO: 1085261 - DNA, 25 bp, Homo sapien
cagagcaggactgaattaatccaat

SEQ ID NO: 1085262 - DNA, 25 bp, Homo sapien
aacatgagcccttgtaaatcccctg

SEQ ID NO: 1085263 - DNA, 25 bp, Homo sapien
ttcagaagatttcagatgtgcatca

SEQ ID NO: 1085264 - DNA, 25 bp, Homo sapien
tcagaagatttcagatgtgcatcag

SEQ ID NO: 1085265 - DNA, 25 bp, Homo sapien
cagcaatggtcttcttccatttgtc

SEQ ID NO: 1085266 - DNA, 25 bp, Homo sapien
gtgcatcagcaatggtcttcttcca

SEQ ID NO: 1085267 - DNA, 25 bp, Homo sapien
tcttgaggcatcagcacaatggacc

SEQ ID NO: 1085268 - DNA, 25 bp, Homo sapien
tggagagtacccgacgagcgttatg

SEQ ID NO: 1085269 - DNA, 25 bp, Homo sapien
gtttattccacaccgctgaggctgg

SEQ ID NO: 1085270 - DNA, 25 bp, Homo sapien
gcaggtacagaatgtgccagaccca

SEQ ID NO: 1085271 - DNA, 25 bp, Homo sapien
gcctggcagtccttcagtttcggga

SEQ ID NO: 1085272 - DNA, 25 bp, Homo sapien
ctggtggctgcacgctccaaaggaa

SEQ ID NO: 1085273 - DNA, 25 bp, Homo sapien
ggagcttttctgtctgcccgtggcc

SEQ ID NO: 1085274 - DNA, 25 bp, Homo sapien
gaagttgagcttcaggcgcggctct

SEQ ID NO: 1085275 - DNA, 25 bp, Homo sapien
gaaggaagggactaaactccagcca

SEQ ID NO: 1085276 - DNA, 25 bp, Homo sapien
agcccaaggagtggtgaagagcccc

SEQ ID NO: 1085277 - DNA, 25 bp, Homo sapien
tgtcccgcggtgtctgttcatactc

SEQ ID NO: 1085278 - DNA, 25 bp, Homo sapien
tgctcctgagacttgccagaaagcc

SEQ ID NO: 1085279 - DNA, 25 bp, Homo sapien
gctctatagtacattccttgcaggg

SEQ ID NO: 1085280 - DNA, 25 bp, Homo sapien
gatcaggactattgctgggcaaagc

SEQ ID NO: 1085281 - DNA, 25 bp, Homo sapien
ttgtgggatcgcctagcctttcaga

SEQ ID NO: 1085282 - DNA, 25 bp, Homo sapien
agcctgctcctcgatgcttgtggga

SEQ ID NO: 1085283 - DNA, 25 bp, Homo sapien
gattctccttgcacgaggccacatt

SEQ ID NO: 1085284 - DNA, 25 bp, Homo sapien
ttctgactgccggatccgattctcc

SEQ ID NO: 1085285 - DNA, 25 bp, Homo sapien
gatccgattctccttgcacgaggcc

SEQ ID NO: 1085286 - DNA, 25 bp, Homo sapien
gccggatccgattctccttgcacga

SEQ ID NO: 1085287 - DNA, 25 bp, Homo sapien
tccttgattagaccagagggcaaag

SEQ ID NO: 1085288 - DNA, 25 bp, Homo sapien
aagtcttccttgattagaccagagg

SEQ ID NO: 1085289 - DNA, 25 bp, Homo sapien
tcttccttgattagaccagagggca

SEQ ID NO: 1085290 - DNA, 25 bp, Homo sapien
aaactctgcgcattgttttttcttg

SEQ ID NO: 1085291 - DNA, 25 bp, Homo sapien
agactttcccacatcgcatctttgc

SEQ ID NO: 1085292 - DNA, 25 bp, Homo sapien
gatgatgaccgcatctcttaggtcc

SEQ ID NO: 1085293 - DNA, 25 bp, Homo sapien
aaacctgtattatctgtattatctc

SEQ ID NO: 1085294 - DNA, 25 bp, Homo sapien
ttccctgttcggaccattcttccag

SEQ ID NO: 1085295 - DNA, 25 bp, Homo sapien
gagggttgaagtctgacctttcaaa

SEQ ID NO: 1085296 - DNA, 25 bp, Homo sapien
gaagctcaaggtttctattcacata

SEQ ID NO: 1085297 - DNA, 25 bp, Homo sapien
ggcaaaacatgcctgcaacacctct

SEQ ID NO: 1085298 - DNA, 25 bp, Homo sapien
agctccaagtgtgaaagggtccgag

SEQ ID NO: 1085299 - DNA, 25 bp, Homo sapien
attctctggcaaagtgggcctctgg

SEQ ID NO: 1085300 - DNA, 25 bp, Homo sapien
gcaaagtgggcctctggttcaactt

SEQ ID NO: 1085301 - DNA, 25 bp, Homo sapien
cctctggttcaacttttgggctatt

SEQ ID NO: 1085302 - DNA, 25 bp, Homo sapien
gcattagtaaaaatccgaaaaatga

SEQ ID NO: 1085303 - DNA, 25 bp, Homo sapien
ttgaacctccgtgttcttatcagta

SEQ ID NO: 1085304 - DNA, 25 bp, Homo sapien
cctctcccaaaagaacttaatgact

SEQ ID NO: 1085305 - DNA, 25 bp, Homo sapien
tcctttcctggcattcagattatat

SEQ ID NO: 1085306 - DNA, 25 bp, Homo sapien
cacagcgctcactgtttaatagcaa

SEQ ID NO: 1085307 - DNA, 25 bp, Homo sapien
gagcccggctggctggtccagttgc

SEQ ID NO: 1085308 - DNA, 25 bp, Homo sapien
gcttttttggggtgagccttgttca

SEQ ID NO: 1085309 - DNA, 25 bp, Homo sapien
ggtgagccttgttcatcttgctagg

SEQ ID NO: 1085310 - DNA, 25 bp, Homo sapien
ctgacttggctgctcttgtcctcag

SEQ ID NO: 1085311 - DNA, 25 bp, Homo sapien
gacttggctgctcttgtcctcaggg

SEQ ID NO: 1085312 - DNA, 25 bp, Homo sapien
taccttgacctttgtacagcccaga

SEQ ID NO: 1085313 - DNA, 25 bp, Homo sapien
tccgtcaacgttgtactgtatgtga

SEQ ID NO: 1085314 - DNA, 25 bp, Homo sapien
tctgcagaagaggagtaaccgctcc

SEQ ID NO: 1085315 - DNA, 25 bp, Homo sapien
cactgtgggtgtgtgactctttagc

SEQ ID NO: 1085316 - DNA, 25 bp, Homo sapien
tgcccgtgtacatagtgcattgttt

SEQ ID NO: 1085317 - DNA, 25 bp, Homo sapien
tgggtctggccgtacttgtgatttc

SEQ ID NO: 1085318 - DNA, 25 bp, Homo sapien
ttcgatggtacgtgaccctctgctg

SEQ ID NO: 1085319 - DNA, 25 bp, Homo sapien
cccctgcccgtgtacatagtgcatt

SEQ ID NO: 1085320 - DNA, 25 bp, Homo sapien
aataaaacaaagggcacagcatctg

SEQ ID NO: 1085321 - DNA, 25 bp, Homo sapien
aaataaaacaaagggcacagcatct

SEQ ID NO: 1085322 - DNA, 25 bp, Homo sapien
cttgttacccatgaaaaactggcaa

SEQ ID NO: 1085323 - DNA, 25 bp, Homo sapien
tgtgtaaaatgtaatgcaactaccc

SEQ ID NO: 1085324 - DNA, 25 bp, Homo sapien
gagatatgggaacactggcagactg

SEQ ID NO: 1085325 - DNA, 25 bp, Homo sapien
caagcctggtaggaaagggcaagtc

SEQ ID NO: 1085326 - DNA, 25 bp, Homo sapien
gcagctgagtcctcccgcgctggct

SEQ ID NO: 1085327 - DNA, 25 bp, Homo sapien
gccgaagcgcgccatcgggtgccca

SEQ ID NO: 1085328 - DNA, 25 bp, Homo sapien
cgacggccgcatggtgcagctgagt

SEQ ID NO: 1085329 - DNA, 25 bp, Homo sapien
ccgcctcggttacagcggagctgcc

SEQ ID NO: 1085330 - DNA, 25 bp, Homo sapien
tgctgaacggcgtcgccaaggagac

SEQ ID NO: 1085331 - DNA, 25 bp, Homo sapien
aacggcgtcgccaaggagacgagcc

SEQ ID NO: 1085332 - DNA, 25 bp, Homo sapien
gtcctgctgaacggcgtcgccaagg

SEQ ID NO: 1085333 - DNA, 25 bp, Homo sapien
ctgctgaacggcgtcgccaaggaga

SEQ ID NO: 1085334 - DNA, 25 bp, Homo sapien
atgaccgagcggccgccgagcgagg

SEQ ID NO: 1085335 - DNA, 25 bp, Homo sapien
cgagcgaggcggctcgcagtgaccc

SEQ ID NO: 1085336 - DNA, 25 bp, Homo sapien
cagctagagggacgggacgcggccg

SEQ ID NO: 1085337 - DNA, 25 bp, Homo sapien
tgacccccagctagagggacgggac

SEQ ID NO: 1085338 - DNA, 25 bp, Homo sapien
tgtttctgtcgctggctgtattcct

SEQ ID NO: 1085339 - DNA, 25 bp, Homo sapien
cccacgtggcgctaactttgtctgc

SEQ ID NO: 1085340 - DNA, 25 bp, Homo sapien
tcagagcgggcatccgcttgtctgt

SEQ ID NO: 1085341 - DNA, 25 bp, Homo sapien
tgcctcttctcacgtctcggtgcgt

SEQ ID NO: 1085342 - DNA, 25 bp, Homo sapien
cagattccccgctaaaaccaaagag

SEQ ID NO: 1085343 - DNA, 25 bp, Homo sapien
gctgggaatattgctgagaggccaa

SEQ ID NO: 1085344 - DNA, 25 bp, Homo sapien
aaagagcacgatccggaatttgttc

SEQ ID NO: 1085345 - DNA, 25 bp, Homo sapien
gaggccaagggaggttcctaaagca

SEQ ID NO: 1085346 - DNA, 25 bp, Homo sapien
aacgaggtggactgtgcagggaggt

SEQ ID NO: 1085347 - DNA, 25 bp, Homo sapien
ggtggactgtgcagggaggttgggc

SEQ ID NO: 1085348 - DNA, 25 bp, Homo sapien
gaggtggactgtgcagggaggttgg

SEQ ID NO: 1085349 - DNA, 25 bp, Homo sapien
acgaggtggactgtgcagggaggtt

SEQ ID NO: 1085350 - DNA, 25 bp, Homo sapien
ggtgcccagctctatctggatgaag

SEQ ID NO: 1085351 - DNA, 25 bp, Homo sapien
tgcccagctctatctggatgaagcc

SEQ ID NO: 1085352 - DNA, 25 bp, Homo sapien
tggtgcccagctctatctggatgaa

SEQ ID NO: 1085353 - DNA, 25 bp, Homo sapien
cccagctctatctggatgaagccag

SEQ ID NO: 1085354 - DNA, 25 bp, Homo sapien
ttcccaaagaaggtgtacagcagtc

SEQ ID NO: 1085355 - DNA, 25 bp, Homo sapien
gatcactgggctcacaccggtgtgt

SEQ ID NO: 1085356 - DNA, 25 bp, Homo sapien
tctagtggcaattgagccaagctcc

SEQ ID NO: 1085357 - DNA, 25 bp, Homo sapien
aatccaccgctagagcaggagccta

SEQ ID NO: 1085358 - DNA, 25 bp, Homo sapien
aggaaccttggcgatgggatattta

SEQ ID NO: 1085359 - DNA, 25 bp, Homo sapien
aaccttggcgatgggatatttatag

SEQ ID NO: 1085360 - DNA, 25 bp, Homo sapien
gaaccttggcgatgggatatttata

SEQ ID NO: 1085361 - DNA, 25 bp, Homo sapien
cttggcgatgggatatttataggtg

SEQ ID NO: 1085362 - DNA, 25 bp, Homo sapien
gcttagtcgccaacaaccatcagtg

SEQ ID NO: 1085363 - DNA, 25 bp, Homo sapien
tatccgggtggtacagactgtgcct

SEQ ID NO: 1085364 - DNA, 25 bp, Homo sapien
gaaactcgctttgggcgcggcagat

SEQ ID NO: 1085365 - DNA, 25 bp, Homo sapien
tgaaccagaccgatcccagttggag

SEQ ID NO: 1085366 - DNA, 25 bp, Homo sapien
ccgggactatcccttcgcggtgtag

SEQ ID NO: 1085367 - DNA, 25 bp, Homo sapien
gctgaggaggcaaccgcgtagacac

SEQ ID NO: 1085368 - DNA, 25 bp, Homo sapien
agactattcgcctttcccaacacgg

SEQ ID NO: 1085369 - DNA, 25 bp, Homo sapien
gaccagagtctgaagactattcgcc

SEQ ID NO: 1085370 - DNA, 25 bp, Homo sapien
gaggccttcgcagttaatccaagac

SEQ ID NO: 1085371 - DNA, 25 bp, Homo sapien
aaataatcatcccagagcgcagcag

SEQ ID NO: 1085372 - DNA, 25 bp, Homo sapien
tcagtagggagacgagaaaggacct

SEQ ID NO: 1085373 - DNA, 25 bp, Homo sapien
taggaaagtacagcccctggaattg

SEQ ID NO: 1085374 - DNA, 25 bp, Homo sapien
cccacgtccgcaaaagaggtcttcg

SEQ ID NO: 1085375 - DNA, 25 bp, Homo sapien
tagatgtggacccttcgaggccctt

SEQ ID NO: 1085376 - DNA, 25 bp, Homo sapien
tgtgtggcccctgcgactgtgtttg

SEQ ID NO: 1085377 - DNA, 25 bp, Homo sapien
caatatacagaaatgcgcgaggctg

SEQ ID NO: 1085378 - DNA, 25 bp, Homo sapien
ccccgtagcggaaaaacgtgagcat

SEQ ID NO: 1085379 - DNA, 25 bp, Homo sapien
gggcctcaaaatggccacacgcgta

SEQ ID NO: 1085380 - DNA, 25 bp, Homo sapien
tcaggaccgggcctcaaaatggcca

SEQ ID NO: 1085381 - DNA, 25 bp, Homo sapien
gaaaaacgtgagcattctggccttt

SEQ ID NO: 1085382 - DNA, 25 bp, Homo sapien
gggtatagacaaaccacggatgtgg

SEQ ID NO: 1085383 - DNA, 25 bp, Homo sapien
caagataagtgtggttggcaccatg

SEQ ID NO: 1085384 - DNA, 25 bp, Homo sapien
tatgctggggtatagacaaaccacg

SEQ ID NO: 1085385 - DNA, 25 bp, Homo sapien
acagacaccaagataagtgtggttg

SEQ ID NO: 1085386 - DNA, 25 bp, Homo sapien
gcatttatcctatatcattaaaaga

SEQ ID NO: 1085387 - DNA, 25 bp, Homo sapien
ttccagcatgttgcatctctgcatt

SEQ ID NO: 1085388 - DNA, 25 bp, Homo sapien
tgcatttatcctatatcattaaaag

SEQ ID NO: 1085389 - DNA, 25 bp, Homo sapien
atattttaagaagttccagcatgtt

SEQ ID NO: 1085390 - DNA, 25 bp, Homo sapien
taaggcagtcatggattatctcagc

SEQ ID NO: 1085391 - DNA, 25 bp, Homo sapien
tattggctttcatgagggtgctaga

SEQ ID NO: 1085392 - DNA, 25 bp, Homo sapien
tattcaatgtatagaccgcggtaag

SEQ ID NO: 1085393 - DNA, 25 bp, Homo sapien
tgtgtccaggcatcgaggatactgc

SEQ ID NO: 1085394 - DNA, 25 bp, Homo sapien
tcatagatgacacgcaactccaggg

SEQ ID NO: 1085395 - DNA, 25 bp, Homo sapien
tgtcgatcccaacacataactagat

SEQ ID NO: 1085396 - DNA, 25 bp, Homo sapien
gatccttctcgcacttttggtctga

SEQ ID NO: 1085397 - DNA, 25 bp, Homo sapien
tggtctgattcgtgctctggttccc

SEQ ID NO: 1085398 - DNA, 25 bp, Homo sapien
ttcgggtgtccgcttccagtcgccg

SEQ ID NO: 1085399 - DNA, 25 bp, Homo sapien
cagtcgccgaccaatgatcatctta

SEQ ID NO: 1085400 - DNA, 25 bp, Homo sapien
tcttatagagcacttccggcttcat

SEQ ID NO: 1085401 - DNA, 25 bp, Homo sapien
tgatcatcttatagagcacttccgg

SEQ ID NO: 1085402 - DNA, 25 bp, Homo sapien
ggagaaaggggcgggctgagccggc

SEQ ID NO: 1085403 - DNA, 25 bp, Homo sapien
gaaaggggcgggctgagccggcgcc

SEQ ID NO: 1085404 - DNA, 25 bp, Homo sapien
cgggagaaaggggcgggctgagccg

SEQ ID NO: 1085405 - DNA, 25 bp, Homo sapien
aggggcgggctgagccggcgcccgc

SEQ ID NO: 1085406 - DNA, 25 bp, Homo sapien
ggacgtggagcagcccgctgcggca

SEQ ID NO: 1085407 - DNA, 25 bp, Homo sapien
gacgtggagcagcccgctgcggcag

SEQ ID NO: 1085408 - DNA, 25 bp, Homo sapien
acgtggagcagcccgctgcggcagc

SEQ ID NO: 1085409 - DNA, 25 bp, Homo sapien
aggacgtggagcagcccgctgcggc

SEQ ID NO: 1085410 - DNA, 25 bp, Homo sapien
ggccgccgaggacgaacacgaccag

SEQ ID NO: 1085411 - DNA, 25 bp, Homo sapien
gggccgccgaggacgaacacgacca

SEQ ID NO: 1085412 - DNA, 25 bp, Homo sapien
ctcgacgatgcgggcgcactgggtc

SEQ ID NO: 1085413 - DNA, 25 bp, Homo sapien
atgcgggcgcactgggtccccttgc

SEQ ID NO: 1085414 - DNA, 25 bp, Homo sapien
taaactctatgaatccaacgtattc

SEQ ID NO: 1085415 - DNA, 25 bp, Homo sapien
aactgccactggagcgccctctggg

SEQ ID NO: 1085416 - DNA, 25 bp, Homo sapien
gcgccctctggggatcgaattttta

SEQ ID NO: 1085417 - DNA, 25 bp, Homo sapien
cttctggtccttaaaatgggagagc

SEQ ID NO: 1085418 - DNA, 25 bp, Homo sapien
acagagggagagctcatctcaaata

SEQ ID NO: 1085419 - DNA, 25 bp, Homo sapien
agagggagagctcatctcaaataaa

SEQ ID NO: 1085420 - DNA, 25 bp, Homo sapien
gcagtgagaatgagccacgattgtg

SEQ ID NO: 1085421 - DNA, 25 bp, Homo sapien
ctgcagtgagaatgagccacgattg

SEQ ID NO: 1085422 - DNA, 25 bp, Homo sapien
gcaaattcacaatagtgccctgggt

SEQ ID NO: 1085423 - DNA, 25 bp, Homo sapien
tgaagtcagatgctcgagaccaccc

SEQ ID NO: 1085424 - DNA, 25 bp, Homo sapien
caacttaagatcatggaccgggcac

SEQ ID NO: 1085425 - DNA, 25 bp, Homo sapien
gaatcagtgtgactaggccaacatg

SEQ ID NO: 1085426 - DNA, 25 bp, Homo sapien
gcaaagatcacaagaacctgaacct

SEQ ID NO: 1085427 - DNA, 25 bp, Homo sapien
tatactatactaacagccacagcaa

SEQ ID NO: 1085428 - DNA, 25 bp, Homo sapien
taaaaacagggactacgcactgtgg

SEQ ID NO: 1085429 - DNA, 25 bp, Homo sapien
tataactctgtcacaacccagtgtg

SEQ ID NO: 1085430 - DNA, 25 bp, Homo sapien
actgatggttatctcaactggtaca

SEQ ID NO: 1085431 - DNA, 25 bp, Homo sapien
ggttatctcaactggtacaatcttt

SEQ ID NO: 1085432 - DNA, 25 bp, Homo sapien
cttttcaataagttcaccatactgt

SEQ ID NO: 1085433 - DNA, 25 bp, Homo sapien
atcacgaagcagctctcctgcagaa

SEQ ID NO: 1085434 - DNA, 25 bp, Homo sapien
gagcaactgcctggccaaaaggtga

SEQ ID NO: 1085435 - DNA, 25 bp, Homo sapien
ttctgcctctgtctcacaagcagct

SEQ ID NO: 1085436 - DNA, 25 bp, Homo sapien
atcacaagcatgagcaactgcctgg

SEQ ID NO: 1085437 - DNA, 25 bp, Homo sapien
tgcctggccaaaaggtgaatttaat

SEQ ID NO: 1085438 - DNA, 25 bp, Homo sapien
caaaaaagagaacgaaagatacatc

SEQ ID NO: 1085439 - DNA, 25 bp, Homo sapien
tcaatcaagaatttattcttctgag

SEQ ID NO: 1085440 - DNA, 25 bp, Homo sapien
aacgaaagatacatctgccttccca

SEQ ID NO: 1085441 - DNA, 25 bp, Homo sapien
agagaacgaaagatacatctgcctt

SEQ ID NO: 1085442 - DNA, 25 bp, Homo sapien
cctatgtgggcagatgaagattttc

SEQ ID NO: 1085443 - DNA, 25 bp, Homo sapien
gacagtgctgttccgtccatccaat

SEQ ID NO: 1085444 - DNA, 25 bp, Homo sapien
ttttaatactccaacagcaagacag

SEQ ID NO: 1085445 - DNA, 25 bp, Homo sapien
gctccacaaggctgctaatgccaaa

SEQ ID NO: 1085446 - DNA, 25 bp, Homo sapien
tgagtcaacatatttgcatttgaat

SEQ ID NO: 1085447 - DNA, 25 bp, Homo sapien
gagagttacgttttaaaacaatgca

SEQ ID NO: 1085448 - DNA, 25 bp, Homo sapien
catatttgcatttgaataaagcatc

SEQ ID NO: 1085449 - DNA, 25 bp, Homo sapien
agatctgtatgtgtatgattccatc

SEQ ID NO: 1085450 - DNA, 25 bp, Homo sapien
ccctctcaagacatcgttcaataca

SEQ ID NO: 1085451 - DNA, 25 bp, Homo sapien
tctcaagacatcgttcaatacaaat

SEQ ID NO: 1085452 - DNA, 25 bp, Homo sapien
cctctcaagacatcgttcaatacaa

SEQ ID NO: 1085453 - DNA, 25 bp, Homo sapien
tcccctctcaagacatcgttcaata

SEQ ID NO: 1085454 - DNA, 25 bp, Homo sapien
gattgaagtggttgtatgtaaaaac

SEQ ID NO: 1085455 - DNA, 25 bp, Homo sapien
ttttattcctgtaccaaataaggca

SEQ ID NO: 1085456 - DNA, 25 bp, Homo sapien
taccaaataaggcaggtctgggatt

SEQ ID NO: 1085457 - DNA, 25 bp, Homo sapien
aagtggttgtatgtaaaaactgcca

SEQ ID NO: 1085458 - DNA, 25 bp, Homo sapien
tttgttgactgaaggtaggtctgaa

SEQ ID NO: 1085459 - DNA, 25 bp, Homo sapien
ttgttgactgaaggtaggtctgaat

SEQ ID NO: 1085460 - DNA, 25 bp, Homo sapien
tgttgactgaaggtaggtctgaatt

SEQ ID NO: 1085461 - DNA, 25 bp, Homo sapien
ttagaagcatctattttcttgactt

SEQ ID NO: 1085462 - DNA, 25 bp, Homo sapien
ttagccttccttgtcaaaaatctgc

SEQ ID NO: 1085463 - DNA, 25 bp, Homo sapien
agccttccttgtcaaaaatctgcac

SEQ ID NO: 1085464 - DNA, 25 bp, Homo sapien
caaaaatctgcacaacttcatcaaa

SEQ ID NO: 1085465 - DNA, 25 bp, Homo sapien
gtcaaaaatctgcacaacttcatca

SEQ ID NO: 1085466 - DNA, 25 bp, Homo sapien
cattagatgtgatccttgccccata

SEQ ID NO: 1085467 - DNA, 25 bp, Homo sapien
gatacccttcgtttggtgagcacca

SEQ ID NO: 1085468 - DNA, 25 bp, Homo sapien
gactaaagctgacaattctgccagg

SEQ ID NO: 1085469 - DNA, 25 bp, Homo sapien
gcatttcaaggttccactgctacga

SEQ ID NO: 1085470 - DNA, 25 bp, Homo sapien
aagatatatttattatttttctgac

SEQ ID NO: 1085471 - DNA, 25 bp, Homo sapien
gaagcaaagcacctagtctcatcag

SEQ ID NO: 1085472 - DNA, 25 bp, Homo sapien
cacttatgtgagtaggaatgctctc

SEQ ID NO: 1085473 - DNA, 25 bp, Homo sapien
tggcctgcaacactagataagaact

SEQ ID NO: 1085474 - DNA, 25 bp, Homo sapien
taagaacctcggataccacttagca

SEQ ID NO: 1085475 - DNA, 25 bp, Homo sapien
taatagactagtgatgggaagcacg

SEQ ID NO: 1085476 - DNA, 25 bp, Homo sapien
taaacaaggtaagtgctcttctggc

SEQ ID NO: 1085477 - DNA, 25 bp, Homo sapien
gcactggtctaggtattggaaaaca

SEQ ID NO: 1085478 - DNA, 25 bp, Homo sapien
caagcagactctactgggatccaaa

SEQ ID NO: 1085479 - DNA, 25 bp, Homo sapien
ctgcgatgaacttatgagtgaatgc

SEQ ID NO: 1085480 - DNA, 25 bp, Homo sapien
gaagggcacctgacttgattccatg

SEQ ID NO: 1085481 - DNA, 25 bp, Homo sapien
cgaatgcatcaaaaagaccaagact

SEQ ID NO: 1085482 - DNA, 25 bp, Homo sapien
tgaatgcatcaaaaagaccaagttg

SEQ ID NO: 1085483 - DNA, 25 bp, Homo sapien
gactatgagaaatgacccccagagg

SEQ ID NO: 1085484 - DNA, 25 bp, Homo sapien
agaaatgacccccagaggtgtagcc

SEQ ID NO: 1085485 - DNA, 25 bp, Homo sapien
acatgactatgagaaatgaccccca

SEQ ID NO: 1085486 - DNA, 25 bp, Homo sapien
tatgagaaatgacccccagaggtgt

SEQ ID NO: 1085487 - DNA, 25 bp, Homo sapien
tgagccaggctcaggaaaggtagca

SEQ ID NO: 1085488 - DNA, 25 bp, Homo sapien
aggaaaggtagcaagtacagtcctg

SEQ ID NO: 1085489 - DNA, 25 bp, Homo sapien
gagccaggctcaggaaaggtagcaa

SEQ ID NO: 1085490 - DNA, 25 bp, Homo sapien
cataagatggccagtgaaggcggcc

SEQ ID NO: 1085491 - DNA, 25 bp, Homo sapien
tgcggctgagcatccgggcataaga

SEQ ID NO: 1085492 - DNA, 25 bp, Homo sapien
ccacactgggtggatattcgggctg

SEQ ID NO: 1085493 - DNA, 25 bp, Homo sapien
cccagcgtctgagtggagcccctgg

SEQ ID NO: 1085494 - DNA, 25 bp, Homo sapien
tgcctttggatcagtttttcccaga

SEQ ID NO: 1085495 - DNA, 25 bp, Homo sapien
ctgcccgcgcggctccgggaccgca

SEQ ID NO: 1085496 - DNA, 25 bp, Homo sapien
tggccagcgcctcccctctaatttc

SEQ ID NO: 1085497 - DNA, 25 bp, Homo sapien
gacccgctttatatggacacggccc

SEQ ID NO: 1085498 - DNA, 25 bp, Homo sapien
aggggccgccgacccgctttatatg

SEQ ID NO: 1085499 - DNA, 25 bp, Homo sapien
ctcggctcctgcgagcggcgacggc

SEQ ID NO: 1085500 - DNA, 25 bp, Homo sapien
cccgacggcgcgaccgctggcaggg

SEQ ID NO: 1085501 - DNA, 25 bp, Homo sapien
cggcggccccgacggcgcgaccgct

SEQ ID NO: 1085502 - DNA, 25 bp, Homo sapien
acggcgcgaccgctggcagggcagg

SEQ ID NO: 1085503 - DNA, 25 bp, Homo sapien
aaggcaaagcgttcggtgatgaagc

SEQ ID NO: 1085504 - DNA, 25 bp, Homo sapien
tgttctgccacttgcgcgggctgtc

SEQ ID NO: 1085505 - DNA, 25 bp, Homo sapien
gtgatgaagcggtagatggcggcca

SEQ ID NO: 1085506 - DNA, 25 bp, Homo sapien
cgggctgtcgcggtagaaggcaaag

SEQ ID NO: 1085507 - DNA, 25 bp, Homo sapien
ccttgcccgggttgcccggctcgcg

SEQ ID NO: 1085508 - DNA, 25 bp, Homo sapien
atgtctgcggccgcggggtccagcg

SEQ ID NO: 1085509 - DNA, 25 bp, Homo sapien
gtctgcggccgcggggtccagcgtc

SEQ ID NO: 1085510 - DNA, 25 bp, Homo sapien
tgcggccgcggggtccagcgtccag

SEQ ID NO: 1085511 - DNA, 25 bp, Homo sapien
gccgcggccgcgtgcgcgggcagct

SEQ ID NO: 1085512 - DNA, 25 bp, Homo sapien
cgcgggcagctcggcgcgcttgaag

SEQ ID NO: 1085513 - DNA, 25 bp, Homo sapien
ctgtcgacgctgaacagacgcgcgg

SEQ ID NO: 1085514 - DNA, 25 bp, Homo sapien
gcagctcggcgcgcttgaagcgctt

SEQ ID NO: 1085515 - DNA, 25 bp, Homo sapien
agccccgctagctccggctgcaggt

SEQ ID NO: 1085516 - DNA, 25 bp, Homo sapien
ggggacctgcgagtagagtggcggg

SEQ ID NO: 1085517 - DNA, 25 bp, Homo sapien
gctgagcgggccgagagcggctgcc

SEQ ID NO: 1085518 - DNA, 25 bp, Homo sapien
cagccccgacgcgaagcccggctgc

SEQ ID NO: 1085519 - DNA, 25 bp, Homo sapien
gaaaatgaagggacgctagcaagta

SEQ ID NO: 1085520 - DNA, 25 bp, Homo sapien
gcttgggatcacagatctggcttcc

SEQ ID NO: 1085521 - DNA, 25 bp, Homo sapien
tagcaagtaagtcatgaacccagga

SEQ ID NO: 1085522 - DNA, 25 bp, Homo sapien
tctgacccaggagtgtcggaaaaac

SEQ ID NO: 1085523 - DNA, 25 bp, Homo sapien
ctgtcctcgaagtgttccaagatcc

SEQ ID NO: 1085524 - DNA, 25 bp, Homo sapien
gaagtgttccaagatcctgggaccg

SEQ ID NO: 1085525 - DNA, 25 bp, Homo sapien
tgttccaagatcctgggaccgagac

SEQ ID NO: 1085526 - DNA, 25 bp, Homo sapien
tcctcgaagtgttccaagatcctgg

SEQ ID NO: 1085527 - DNA, 25 bp, Homo sapien
atgggaaatctgaaacagtagtgga

SEQ ID NO: 1085528 - DNA, 25 bp, Homo sapien
gactagaggcaatgaaatgggaaat

SEQ ID NO: 1085529 - DNA, 25 bp, Homo sapien
tccttcaaagttggggccactcata

SEQ ID NO: 1085530 - DNA, 25 bp, Homo sapien
gccactcatatctgggggactagag

SEQ ID NO: 1085531 - DNA, 25 bp, Homo sapien
gggagctctggcctcgcggtgcgga

SEQ ID NO: 1085532 - DNA, 25 bp, Homo sapien
cggtgcggacgctagtaatggattc

SEQ ID NO: 1085533 - DNA, 25 bp, Homo sapien
ctcatagaagcaaagccaggggaac

SEQ ID NO: 1085534 - DNA, 25 bp, Homo sapien
tagaagcaaagccaggggaacagtg

SEQ ID NO: 1085535 - DNA, 25 bp, Homo sapien
tcacgtgtaacccttctgagtccca

SEQ ID NO: 1085536 - DNA, 25 bp, Homo sapien
tcccagacagggtaactggcgaggc

SEQ ID NO: 1085537 - DNA, 25 bp, Homo sapien
aaatattgccgcgtccctgagtcct

SEQ ID NO: 1085538 - DNA, 25 bp, Homo sapien
tggcgaggccgtaagtaccctcgtg

SEQ ID NO: 1085539 - DNA, 25 bp, Homo sapien
tgttcggcgtcttgcagcagtgcct

SEQ ID NO: 1085540 - DNA, 25 bp, Homo sapien
ctccctccgcgaaaacctggactct

SEQ ID NO: 1085541 - DNA, 25 bp, Homo sapien
agcagtgcctgcgatcccgcgtgag

SEQ ID NO: 1085542 - DNA, 25 bp, Homo sapien
tgcgatcccgcgtgagtccgtcgct

SEQ ID NO: 1085543 - DNA, 25 bp, Homo sapien
taagagcagcgaccttaagtcaggc

SEQ ID NO: 1085544 - DNA, 25 bp, Homo sapien
tcattaggtgacttccccgcttcgg

SEQ ID NO: 1085545 - DNA, 25 bp, Homo sapien
gcagcttcaacacagattgggccca

SEQ ID NO: 1085546 - DNA, 25 bp, Homo sapien
tccaatctacgggatagcctggtgt

SEQ ID NO: 1085547 - DNA, 25 bp, Homo sapien
ggatctcggcatccgtttgtctcag

SEQ ID NO: 1085548 - DNA, 25 bp, Homo sapien
tactgctccgagtttgcctgttctc

SEQ ID NO: 1085549 - DNA, 25 bp, Homo sapien
ggagacgcattcgagtgatcaccag

SEQ ID NO: 1085550 - DNA, 25 bp, Homo sapien
tgatcaccaggagcgaacttggcgc

SEQ ID NO: 1085551 - DNA, 25 bp, Homo sapien
aagagctgcgggctagggcggagct

SEQ ID NO: 1085552 - DNA, 25 bp, Homo sapien
cctagcggctgcctaaggcggaaga

SEQ ID NO: 1085553 - DNA, 25 bp, Homo sapien
ctgaggctttcccttacctgggcgg

SEQ ID NO: 1085554 - DNA, 25 bp, Homo sapien
gatgttaaggctcactcgggcgcca

SEQ ID NO: 1085555 - DNA, 25 bp, Homo sapien
cgggaatccgagctgggacccgccg

SEQ ID NO: 1085556 - DNA, 25 bp, Homo sapien
cttccagggcacgacccgccggcgg

SEQ ID NO: 1085557 - DNA, 25 bp, Homo sapien
gaggggtgtcccccggctccgcagc

SEQ ID NO: 1085558 - DNA, 25 bp, Homo sapien
aggggtgtcccccggctccgcagcg

SEQ ID NO: 1085559 - DNA, 25 bp, Homo sapien
cgagtgcgttttgcgcgcgggcggg

SEQ ID NO: 1085560 - DNA, 25 bp, Homo sapien
gggcgagtgcgttttgcgcgcgggc

SEQ ID NO: 1085561 - DNA, 25 bp, Homo sapien
ctggggcgagtgcgttttgcgcgcg

SEQ ID NO: 1085562 - DNA, 25 bp, Homo sapien
gcgagtgcgttttgcgcgcgggcgg

SEQ ID NO: 1085563 - DNA, 25 bp, Homo sapien
cgccgccactctccggctccgctcc

SEQ ID NO: 1085564 - DNA, 25 bp, Homo sapien
tctcggaggacatgatctcgcagca

SEQ ID NO: 1085565 - DNA, 25 bp, Homo sapien
gggagctctcggaggacatgatctc

SEQ ID NO: 1085566 - DNA, 25 bp, Homo sapien
cacgtctatgtctgcgtcggcctcg

SEQ ID NO: 1085567 - DNA, 25 bp, Homo sapien
ctatgtctgcgtcggcctcggacag

SEQ ID NO: 1085568 - DNA, 25 bp, Homo sapien
tccgcgggaggctcgtggccgtggg

SEQ ID NO: 1085569 - DNA, 25 bp, Homo sapien
tcgtcctcggctaagtctgcctcgg

SEQ ID NO: 1085570 - DNA, 25 bp, Homo sapien
tcctcggctaagtctgcctcggctt

SEQ ID NO: 1085571 - DNA, 25 bp, Homo sapien
tcggcttcctccgcgggaggctcgt

SEQ ID NO: 1085572 - DNA, 25 bp, Homo sapien
ggtgatgagcgcgatgtacgagtag

SEQ ID NO: 1085573 - DNA, 25 bp, Homo sapien
gatgagcgcgatgtacgagtagggc

SEQ ID NO: 1085574 - DNA, 25 bp, Homo sapien
ccatggtgatgagcgcgatgtacga

SEQ ID NO: 1085575 - DNA, 25 bp, Homo sapien
ctgcaggatggccatggtgatgagc

SEQ ID NO: 1085576 - DNA, 25 bp, Homo sapien
ttgtcgaacatgtcggccgactccg

SEQ ID NO: 1085577 - DNA, 25 bp, Homo sapien
cgctcaacgtcagccgcttcttggg

SEQ ID NO: 1085578 - DNA, 25 bp, Homo sapien
cgcttgaagcgcttgcgacgccgca

SEQ ID NO: 1085579 - DNA, 25 bp, Homo sapien
aagcggccgctgatgaactcgcaga

SEQ ID NO: 1085580 - DNA, 25 bp, Homo sapien
ctgccgcggcgaaagcgaaggcgtg

SEQ ID NO: 1085581 - DNA, 25 bp, Homo sapien
cctgcgaacaccgaggccgtcggag

SEQ ID NO: 1085582 - DNA, 25 bp, Homo sapien
gtaccgacagctggcaaggagcggc

SEQ ID NO: 1085583 - DNA, 25 bp, Homo sapien
agagccagcccgtagccgtagccgt

SEQ ID NO: 1085584 - DNA, 25 bp, Homo sapien
tggcgcagaagtgcggtgggcagac

SEQ ID NO: 1085585 - DNA, 25 bp, Homo sapien
ccgcgtagaaggctttggcgcagcc

SEQ ID NO: 1085586 - DNA, 25 bp, Homo sapien
aggactcagggacgccgcgtagaag

SEQ ID NO: 1085587 - DNA, 25 bp, Homo sapien
tgccggctgcgggaggactcaggga

SEQ ID NO: 1085588 - DNA, 25 bp, Homo sapien
actaaggccggcgactttgctggca

SEQ ID NO: 1085589 - DNA, 25 bp, Homo sapien
tcagcatggccaagacctgggcttg

SEQ ID NO: 1085590 - DNA, 25 bp, Homo sapien
tttgctggcaaaccgggaccctgag

SEQ ID NO: 1085591 - DNA, 25 bp, Homo sapien
ggcccatgatgtggtctatagagaa

SEQ ID NO: 1085592 - DNA, 25 bp, Homo sapien
cgacaccaatgggaaataggcggca

SEQ ID NO: 1085593 - DNA, 25 bp, Homo sapien
gtttaaatcaatgcacacccagtgg

SEQ ID NO: 1085594 - DNA, 25 bp, Homo sapien
tccgcctgcgtagacactggtttag

SEQ ID NO: 1085595 - DNA, 25 bp, Homo sapien
aatagactccctgagttccgctggg

SEQ ID NO: 1085596 - DNA, 25 bp, Homo sapien
cagagattcggcctcattaacagct

SEQ ID NO: 1085597 - DNA, 25 bp, Homo sapien
tagagtgttcatgaacccttagcac

SEQ ID NO: 1085598 - DNA, 25 bp, Homo sapien
gacatgagaatcctcaggtgcagtg

SEQ ID NO: 1085599 - DNA, 25 bp, Homo sapien
tgaaggccaagaccaaagtgcccct

SEQ ID NO: 1085600 - DNA, 25 bp, Homo sapien
gatacatatcctcataccgttcggg

SEQ ID NO: 1085601 - DNA, 25 bp, Homo sapien
caagctcctgcagtctgggtcgaag

SEQ ID NO: 1085602 - DNA, 25 bp, Homo sapien
gccaggtaggttccactccaaagtg

SEQ ID NO: 1085603 - DNA, 25 bp, Homo sapien
tcgtgtggctcatcggaatccggaa

SEQ ID NO: 1085604 - DNA, 25 bp, Homo sapien
ttggggccagcggcgcccccaagtg

SEQ ID NO: 1085605 - DNA, 25 bp, Homo sapien
tggggccagcggcgcccccaagtgg

SEQ ID NO: 1085606 - DNA, 25 bp, Homo sapien
acagcatgctggatagagatctcag

SEQ ID NO: 1085607 - DNA, 25 bp, Homo sapien
tcagtgtgactgtggccttcagtga

SEQ ID NO: 1085608 - DNA, 25 bp, Homo sapien
ctatttattgcaccagacagcatgc

SEQ ID NO: 1085609 - DNA, 25 bp, Homo sapien
gacttccacatcgtgttcttgaggg

SEQ ID NO: 1085610 - DNA, 25 bp, Homo sapien
gctccacacagctggattcctgtac

SEQ ID NO: 1085611 - DNA, 25 bp, Homo sapien
ctgctccacacagctggattcctgt

SEQ ID NO: 1085612 - DNA, 25 bp, Homo sapien
tgctccacacagctggattcctgta

SEQ ID NO: 1085613 - DNA, 25 bp, Homo sapien
tatgcgactcgagagacatgtccca

SEQ ID NO: 1085614 - DNA, 25 bp, Homo sapien
tgagccttcagacccacggcttagg

SEQ ID NO: 1085615 - DNA, 25 bp, Homo sapien
gctcgtgctgacaaatcccttctaa

SEQ ID NO: 1085616 - DNA, 25 bp, Homo sapien
ttaggctgctaagccccagctcgtg

SEQ ID NO: 1085617 - DNA, 25 bp, Homo sapien
ctagaccccaggaagaatagtggga

SEQ ID NO: 1085618 - DNA, 25 bp, Homo sapien
tgacccctggcggtcttagctggtg

SEQ ID NO: 1085619 - DNA, 25 bp, Homo sapien
ggctttgcccggctttgcatgccag

SEQ ID NO: 1085620 - DNA, 25 bp, Homo sapien
ggacatcgagcaattcatcctgact

SEQ ID NO: 1085621 - DNA, 25 bp, Homo sapien
ttttaaacgcttcgctgattcccat

SEQ ID NO: 1085622 - DNA, 25 bp, Homo sapien
ctgccccactggaatcttgtttatc

SEQ ID NO: 1085623 - DNA, 25 bp, Homo sapien
tctgaatgcgccctcctactgactg

SEQ ID NO: 1085624 - DNA, 25 bp, Homo sapien
cttgcagcagtttttaaacgcttcg

SEQ ID NO: 1085625 - DNA, 25 bp, Homo sapien
ctgaatgtttagacacagcctctcc

SEQ ID NO: 1085626 - DNA, 25 bp, Homo sapien
cctgcttgagtggttgtttgacaga

SEQ ID NO: 1085627 - DNA, 25 bp, Homo sapien
tcatagtatcgaggcaactggctct

SEQ ID NO: 1085628 - DNA, 25 bp, Homo sapien
tggtgaccagtttgacctgttgctt

SEQ ID NO: 1085629 - DNA, 25 bp, Homo sapien
cttctcctctgatcccgtttgtttt

SEQ ID NO: 1085630 - DNA, 25 bp, Homo sapien
gctcctgtgaacatggactggccat

SEQ ID NO: 1085631 - DNA, 25 bp, Homo sapien
tcagaggacctttcacaaaggacat

SEQ ID NO: 1085632 - DNA, 25 bp, Homo sapien
agggtcagaggacctttcacaaagg

SEQ ID NO: 1085633 - DNA, 25 bp, Homo sapien
ggtcagaggacctttcacaaaggac

SEQ ID NO: 1085634 - DNA, 25 bp, Homo sapien
cagaggacctttcacaaaggacatc

SEQ ID NO: 1085635 - DNA, 25 bp, Homo sapien
ccttggatagccacagatggcataa

SEQ ID NO: 1085636 - DNA, 25 bp, Homo sapien
cttggatagccacagatggcataag

SEQ ID NO: 1085637 - DNA, 25 bp, Homo sapien
gctccttgacgggtccaaaggaatc

SEQ ID NO: 1085638 - DNA, 25 bp, Homo sapien
ctgaaggttgagaggcaagttccca

SEQ ID NO: 1085639 - DNA, 25 bp, Homo sapien
cagtgctccttgacgggtccaaagg

SEQ ID NO: 1085640 - DNA, 25 bp, Homo sapien
ggttgagaggcaagttcccagctgc

SEQ ID NO: 1085641 - DNA, 25 bp, Homo sapien
agaaatgaatccgagggcccagggc

SEQ ID NO: 1085642 - DNA, 25 bp, Homo sapien
caactgagtgatgccccttggcttc

SEQ ID NO: 1085643 - DNA, 25 bp, Homo sapien
gggagagggtgtgggaacgacaagc

SEQ ID NO: 1085644 - DNA, 25 bp, Homo sapien
tcaggagaacaaccccactgactct

SEQ ID NO: 1085645 - DNA, 25 bp, Homo sapien
tcctgtgtgaggatgctgtccacca

SEQ ID NO: 1085646 - DNA, 25 bp, Homo sapien
gctgtccaccaggttgtcaggggag

SEQ ID NO: 1085647 - DNA, 25 bp, Homo sapien
tgtgtgaggatgctgtccaccaggt

SEQ ID NO: 1085648 - DNA, 25 bp, Homo sapien
gaggatgctgtccaccaggttgtca

SEQ ID NO: 1085649 - DNA, 25 bp, Homo sapien
gcttgcccacggacaatcccgggag

SEQ ID NO: 1085650 - DNA, 25 bp, Homo sapien
ctccttggaaggttgccgcttgccc

SEQ ID NO: 1085651 - DNA, 25 bp, Homo sapien
tgccgcttgcccacggacaatcccg

SEQ ID NO: 1085652 - DNA, 25 bp, Homo sapien
tccttggaaggttgccgcttgccca

SEQ ID NO: 1085653 - DNA, 25 bp, Homo sapien
taaatattagatcattatcggcgta

SEQ ID NO: 1085654 - DNA, 25 bp, Homo sapien
gcagggacagcttgtaaactttgtt

SEQ ID NO: 1085655 - DNA, 25 bp, Homo sapien
tatcggcgtattgtgtttccctctc

SEQ ID NO: 1085656 - DNA, 25 bp, Homo sapien
actttgttgggatgcatctggtaga

SEQ ID NO: 1085657 - DNA, 25 bp, Homo sapien
tataagacgcccaagagcatcctgg

SEQ ID NO: 1085658 - DNA, 25 bp, Homo sapien
ctcctcacttggctgcttgtcctga

SEQ ID NO: 1085659 - DNA, 25 bp, Homo sapien
gacctaaatgtatccagttgttccc

SEQ ID NO: 1085660 - DNA, 25 bp, Homo sapien
caggcacggtggtcgtgaataaaag

SEQ ID NO: 1085661 - DNA, 25 bp, Homo sapien
cactgcatgtgttattatcactgtc

SEQ ID NO: 1085662 - DNA, 25 bp, Homo sapien
tcaagggttgatccattcactgcat

SEQ ID NO: 1085663 - DNA, 25 bp, Homo sapien
caagggttgatccattcactgcatg

SEQ ID NO: 1085664 - DNA, 25 bp, Homo sapien
actgcatgtgttattatcactgtca

SEQ ID NO: 1085665 - DNA, 25 bp, Homo sapien
gagtctctcctgttgtctatctcct

SEQ ID NO: 1085666 - DNA, 25 bp, Homo sapien
ggctgtagccttggaattccacagt

SEQ ID NO: 1085667 - DNA, 25 bp, Homo sapien
gagtgatgcccgctcctcacagttt

SEQ ID NO: 1085668 - DNA, 25 bp, Homo sapien
acctttcccggaaatgcctgcctga

SEQ ID NO: 1085669 - DNA, 25 bp, Homo sapien
tggcctcaaaaccaggacccctcca

SEQ ID NO: 1085670 - DNA, 25 bp, Homo sapien
tttcaatggcctcaaaaccaggacc

SEQ ID NO: 1085671 - DNA, 25 bp, Homo sapien
tttttcaatggcctcaaaaccagga

SEQ ID NO: 1085672 - DNA, 25 bp, Homo sapien
ccatttttcaatggcctcaaaacca

SEQ ID NO: 1085673 - DNA, 25 bp, Homo sapien
aggtggtctggtgtggccccccatc

SEQ ID NO: 1085674 - DNA, 25 bp, Homo sapien
gcctccacctcaattgcgatcaggt

SEQ ID NO: 1085675 - DNA, 25 bp, Homo sapien
tctcgagcacccattgtgcccagcc

SEQ ID NO: 1085676 - DNA, 25 bp, Homo sapien
caattgcgatcaggtggtctggtgt

SEQ ID NO: 1085677 - DNA, 25 bp, Homo sapien
gggccacattaacacacggcatagc

SEQ ID NO: 1085678 - DNA, 25 bp, Homo sapien
gcatagccagcacgggcaaggccaa

SEQ ID NO: 1085679 - DNA, 25 bp, Homo sapien
ggggactctatctgttccaccacca

SEQ ID NO: 1085680 - DNA, 25 bp, Homo sapien
acacggcatagccagcacgggcaag

SEQ ID NO: 1085681 - DNA, 25 bp, Homo sapien
tcagggaacctgctgagatgaactc

SEQ ID NO: 1085682 - DNA, 25 bp, Homo sapien
agggaacctgctgagatgaactcac

SEQ ID NO: 1085683 - DNA, 25 bp, Homo sapien
cagggaacctgctgagatgaactca

SEQ ID NO: 1085684 - DNA, 25 bp, Homo sapien
tccctggcgtcagatagcccgatgt

SEQ ID NO: 1085685 - DNA, 25 bp, Homo sapien
gatagcccgatgttgtgtcagccat

SEQ ID NO: 1085686 - DNA, 25 bp, Homo sapien
agcactcgagctccctggcgtcaga

SEQ ID NO: 1085687 - DNA, 25 bp, Homo sapien
tggcgtcagatagcccgatgttgtg

SEQ ID NO: 1085688 - DNA, 25 bp, Homo sapien
gctccaagtgagggatactgaggca

SEQ ID NO: 1085689 - DNA, 25 bp, Homo sapien
ctccaagtgagggatactgaggcag

SEQ ID NO: 1085690 - DNA, 25 bp, Homo sapien
gatccgctccgcttgggcctgctgt

SEQ ID NO: 1085691 - DNA, 25 bp, Homo sapien
atcagcagacttcttccatatagag

SEQ ID NO: 1085692 - DNA, 25 bp, Homo sapien
tttcccaatcagcagacttcttcca

SEQ ID NO: 1085693 - DNA, 25 bp, Homo sapien
tccgctccgcttgggcctgctgttt

SEQ ID NO: 1085694 - DNA, 25 bp, Homo sapien
agcctgaagtcacaccgttctggca

SEQ ID NO: 1085695 - DNA, 25 bp, Homo sapien
gcatgattgacaaagccacacttac

SEQ ID NO: 1085696 - DNA, 25 bp, Homo sapien
tctggcacttcctttggcatgattg

SEQ ID NO: 1085697 - DNA, 25 bp, Homo sapien
ttggcatgattgacaaagccacact

SEQ ID NO: 1085698 - DNA, 25 bp, Homo sapien
gaggcccatcctccctgcttcttct

SEQ ID NO: 1085699 - DNA, 25 bp, Homo sapien
ggtcctgagaggcccatcctccctg

SEQ ID NO: 1085700 - DNA, 25 bp, Homo sapien
cagggcctttgtcctcagggtcctg

SEQ ID NO: 1085701 - DNA, 25 bp, Homo sapien
agggcctttgtcctcagggtcctga

SEQ ID NO: 1085702 - DNA, 25 bp, Homo sapien
cctcctgcaggagaatgtccttttt

SEQ ID NO: 1085703 - DNA, 25 bp, Homo sapien
ttatttccagaagtgttgactgcat

SEQ ID NO: 1085704 - DNA, 25 bp, Homo sapien
tttccagaagtgttgactgcattga

SEQ ID NO: 1085705 - DNA, 25 bp, Homo sapien
tgctgcctcctgcaggagaatgtcc

SEQ ID NO: 1085706 - DNA, 25 bp, Homo sapien
agcgggagctatcaggaatcctggc

SEQ ID NO: 1085707 - DNA, 25 bp, Homo sapien
agggctggtgaagcgggagctatca

SEQ ID NO: 1085708 - DNA, 25 bp, Homo sapien
gtgaagcgggagctatcaggaatcc

SEQ ID NO: 1085709 - DNA, 25 bp, Homo sapien
gaagcgggagctatcaggaatcctg

SEQ ID NO: 1085710 - DNA, 25 bp, Homo sapien
gggatgagagcacaggtccgttggg

SEQ ID NO: 1085711 - DNA, 25 bp, Homo sapien
tgagagcacaggtccgttgggtccc

SEQ ID NO: 1085712 - DNA, 25 bp, Homo sapien
caagtcctcagaagtacaggtaggg

SEQ ID NO: 1085713 - DNA, 25 bp, Homo sapien
ggactgtgtcgaaggcctggtgtgg

SEQ ID NO: 1085714 - DNA, 25 bp, Homo sapien
aggagaacctcagctcgggaaccgc

SEQ ID NO: 1085715 - DNA, 25 bp, Homo sapien
agtccggcggtgctgacccagcctg

SEQ ID NO: 1085716 - DNA, 25 bp, Homo sapien
ctctctgtgcgtcgagtccggcggt

SEQ ID NO: 1085717 - DNA, 25 bp, Homo sapien
tgggcgtcctcgagctccacttgca

SEQ ID NO: 1085718 - DNA, 25 bp, Homo sapien
tgagttcttggaaggcgtcagagct

SEQ ID NO: 1085719 - DNA, 25 bp, Homo sapien
gaaagcgctttctgaagtgaggttg

SEQ ID NO: 1085720 - DNA, 25 bp, Homo sapien
aggttgggcccagctagcataggcc

SEQ ID NO: 1085721 - DNA, 25 bp, Homo sapien
aggtggactcacagaaagcgctttc

SEQ ID NO: 1085722 - DNA, 25 bp, Homo sapien
tgtgcttatctctggctgtataatg

SEQ ID NO: 1085723 - DNA, 25 bp, Homo sapien
tgttatttttactccgcagtcaaaa

SEQ ID NO: 1085724 - DNA, 25 bp, Homo sapien
ccgcagtcaaaagcttttattagat

SEQ ID NO: 1085725 - DNA, 25 bp, Homo sapien
gcagagctctccgaattgttttata

SEQ ID NO: 1085726 - DNA, 25 bp, Homo sapien
ggcctcttggaccaaacagctgaag

SEQ ID NO: 1085727 - DNA, 25 bp, Homo sapien
caggcctcttggaccaaacagctga

SEQ ID NO: 1085728 - DNA, 25 bp, Homo sapien
gcctcttggaccaaacagctgaagc

SEQ ID NO: 1085729 - DNA, 25 bp, Homo sapien
aggcctcttggaccaaacagctgaa

SEQ ID NO: 1085730 - DNA, 25 bp, Homo sapien
ggaaaattatatcggtgacacgggc

SEQ ID NO: 1085731 - DNA, 25 bp, Homo sapien
atatcggtgacacgggctgattggc

SEQ ID NO: 1085732 - DNA, 25 bp, Homo sapien
aattatatcggtgacacgggctgat

SEQ ID NO: 1085733 - DNA, 25 bp, Homo sapien
gtggaaaattatatcggtgacacgg

SEQ ID NO: 1085734 - DNA, 25 bp, Homo sapien
cgaaatcgtccttgttgaaattaca

SEQ ID NO: 1085735 - DNA, 25 bp, Homo sapien
ttacatcgtctgtgattctctcccc

SEQ ID NO: 1085736 - DNA, 25 bp, Homo sapien
tctttgcaaaagaccgaaatcgtcc

SEQ ID NO: 1085737 - DNA, 25 bp, Homo sapien
ctgctaatagaagggtctttgcaaa

SEQ ID NO: 1085738 - DNA, 25 bp, Homo sapien
agacagctgctttacccagccagtg

SEQ ID NO: 1085739 - DNA, 25 bp, Homo sapien
acagctgctttacccagccagtgct

SEQ ID NO: 1085740 - DNA, 25 bp, Homo sapien
cagctgctttacccagccagtgctc

SEQ ID NO: 1085741 - DNA, 25 bp, Homo sapien
gacagctgctttacccagccagtgc

SEQ ID NO: 1085742 - DNA, 25 bp, Homo sapien
tctggagactggccatgaggaggag

SEQ ID NO: 1085743 - DNA, 25 bp, Homo sapien
ctctggagactggccatgaggagga

SEQ ID NO: 1085744 - DNA, 25 bp, Homo sapien
gactggccatgaggaggagcatcca

SEQ ID NO: 1085745 - DNA, 25 bp, Homo sapien
ccatgaggaggagcatccaagctgc

SEQ ID NO: 1085746 - DNA, 25 bp, Homo sapien
accctcctcattgcaccgtccgtcc

SEQ ID NO: 1085747 - DNA, 25 bp, Homo sapien
ctcctcattgcaccgtccgtccaga

SEQ ID NO: 1085748 - DNA, 25 bp, Homo sapien
tcattgcaccgtccgtccagaggcc

SEQ ID NO: 1085749 - DNA, 25 bp, Homo sapien
tgcaccgtccgtccagaggccctgt

SEQ ID NO: 1085750 - DNA, 25 bp, Homo sapien
aagttcagaaaaggctgcgtgaagt

SEQ ID NO: 1085751 - DNA, 25 bp, Homo sapien
tcttggagttatggagcctgcttgg

SEQ ID NO: 1085752 - DNA, 25 bp, Homo sapien
gggtagatatcaccagcctccaggc

SEQ ID NO: 1085753 - DNA, 25 bp, Homo sapien
tccacacatctggtgagcagtaggc

SEQ ID NO: 1085754 - DNA, 25 bp, Homo sapien
gggcacctcgcatcacccctcatca

SEQ ID NO: 1085755 - DNA, 25 bp, Homo sapien
gaaaacagggcacctcgcatcaccc

SEQ ID NO: 1085756 - DNA, 25 bp, Homo sapien
aaacagggcacctcgcatcacccct

SEQ ID NO: 1085757 - DNA, 25 bp, Homo sapien
ctggaaataggtgttaggatggaaa

SEQ ID NO: 1085758 - DNA, 25 bp, Homo sapien
gctttgcagcatgtggcctggaaat

SEQ ID NO: 1085759 - DNA, 25 bp, Homo sapien
tgctcagacgagaaagggcaacagc

SEQ ID NO: 1085760 - DNA, 25 bp, Homo sapien
ggcaacagcacgtaatgggaaatcg

SEQ ID NO: 1085761 - DNA, 25 bp, Homo sapien
tatttaagcctcacatcaggcagtg

SEQ ID NO: 1085762 - DNA, 25 bp, Homo sapien
gctcttggcaagcccatctatcagg

SEQ ID NO: 1085763 - DNA, 25 bp, Homo sapien
agcccatctatcaggagtgtggcca

SEQ ID NO: 1085764 - DNA, 25 bp, Homo sapien
gcaagcccatctatcaggagtgtgg

SEQ ID NO: 1085765 - DNA, 25 bp, Homo sapien
ctcttggcaagcccatctatcagga

SEQ ID NO: 1085766 - DNA, 25 bp, Homo sapien
cccgtcagatgacaagactttgctg

SEQ ID NO: 1085767 - DNA, 25 bp, Homo sapien
gaagcatttgcaaaacaccagtttc

SEQ ID NO: 1085768 - DNA, 25 bp, Homo sapien
tgacaagactttgctggcctgctcc

SEQ ID NO: 1085769 - DNA, 25 bp, Homo sapien
ggaagcatttgcaaaacaccagttt

SEQ ID NO: 1085770 - DNA, 25 bp, Homo sapien
tctggcaaagagcgcatcatccatc

SEQ ID NO: 1085771 - DNA, 25 bp, Homo sapien
tctctggcaaagagcgcatcatcca

SEQ ID NO: 1085772 - DNA, 25 bp, Homo sapien
ggcaaagagcgcatcatccatctct

SEQ ID NO: 1085773 - DNA, 25 bp, Homo sapien
tggcaaagagcgcatcatccatctc

SEQ ID NO: 1085774 - DNA, 25 bp, Homo sapien
agttgagcaatctcttggctccaga

SEQ ID NO: 1085775 - DNA, 25 bp, Homo sapien
cagttgagcaatctcttggctccag

SEQ ID NO: 1085776 - DNA, 25 bp, Homo sapien
ccagttgagcaatctcttggctcca

SEQ ID NO: 1085777 - DNA, 25 bp, Homo sapien
atcaggcccctgaaatgccagttga

SEQ ID NO: 1085778 - DNA, 25 bp, Homo sapien
tgaatgcacggcctgtgtaaccttg

SEQ ID NO: 1085779 - DNA, 25 bp, Homo sapien
tccagggccactcgtttgaatgcac

SEQ ID NO: 1085780 - DNA, 25 bp, Homo sapien
taatgtggctgtgccttagcttttg

SEQ ID NO: 1085781 - DNA, 25 bp, Homo sapien
gtgtgcctgggcgtgcaccctcgca

SEQ ID NO: 1085782 - DNA, 25 bp, Homo sapien
gaaggttaagtttgctctgcgcccc

SEQ ID NO: 1085783 - DNA, 25 bp, Homo sapien
tgggcgctcccaaatgaaggttaag

SEQ ID NO: 1085784 - DNA, 25 bp, Homo sapien
ggaggcagcggctccgcatttagac

SEQ ID NO: 1085785 - DNA, 25 bp, Homo sapien
gacgaggccattagccgcgatcgat

SEQ ID NO: 1085786 - DNA, 25 bp, Homo sapien
aaagaattttccacggccggtgctg

SEQ ID NO: 1085787 - DNA, 25 bp, Homo sapien
tcattgctgccctcacagacgagag

SEQ ID NO: 1085788 - DNA, 25 bp, Homo sapien
caggctcttcagtagtgaggtagga

SEQ ID NO: 1085789 - DNA, 25 bp, Homo sapien
tgtgtctccgttaggctgatgctgg

SEQ ID NO: 1085790 - DNA, 25 bp, Homo sapien
cagtgcccccagttcagacacccac

SEQ ID NO: 1085791 - DNA, 25 bp, Homo sapien
tcagtgcccccagttcagacaccca

SEQ ID NO: 1085792 - DNA, 25 bp, Homo sapien
caagacctactgattcttcccgatc

SEQ ID NO: 1085793 - DNA, 25 bp, Homo sapien
agctcttcctacacactccctcatc

SEQ ID NO: 1085794 - DNA, 25 bp, Homo sapien
gattcttcccgatcagctcttccta

SEQ ID NO: 1085795 - DNA, 25 bp, Homo sapien
gacctactgattcttcccgatcagc

SEQ ID NO: 1085796 - DNA, 25 bp, Homo sapien
cagggaacgttcaggaaaattgcct

SEQ ID NO: 1085797 - DNA, 25 bp, Homo sapien
tatgaattcaatggcttagtgtttc

SEQ ID NO: 1085798 - DNA, 25 bp, Homo sapien
caatggcttagtgtttctgtgtgac

SEQ ID NO: 1085799 - DNA, 25 bp, Homo sapien
ttcctgccagggaacgttcaggaaa

SEQ ID NO: 1085800 - DNA, 25 bp, Homo sapien
tcccatggactggaggtgaaactag

SEQ ID NO: 1085801 - DNA, 25 bp, Homo sapien
caaacagggcgccatttgtcccatg

SEQ ID NO: 1085802 - DNA, 25 bp, Homo sapien
tccctgtgcctagaagctgtgagta

SEQ ID NO: 1085803 - DNA, 25 bp, Homo sapien
ctaggagaaaatggaacaagctggc

SEQ ID NO: 1085804 - DNA, 25 bp, Homo sapien
cattataattacccgtgccttccgt

SEQ ID NO: 1085805 - DNA, 25 bp, Homo sapien
cacattataattacccgtgccttcc

SEQ ID NO: 1085806 - DNA, 25 bp, Homo sapien
ttataattacccgtgccttccgtca

SEQ ID NO: 1085807 - DNA, 25 bp, Homo sapien
ataattacccgtgccttccgtcatc

SEQ ID NO: 1085808 - DNA, 25 bp, Homo sapien
tcataaacggctaatttgttacata

SEQ ID NO: 1085809 - DNA, 25 bp, Homo sapien
ctcataaacggctaatttgttacat

SEQ ID NO: 1085810 - DNA, 25 bp, Homo sapien
gggcagagccggtcccccgcaacgc

SEQ ID NO: 1085811 - DNA, 25 bp, Homo sapien
ccgccccctgaagccggctgaaagg

SEQ ID NO: 1085812 - DNA, 25 bp, Homo sapien
tcccatgggtgccaggccatactgg

SEQ ID NO: 1085813 - DNA, 25 bp, Homo sapien
agagtccaagccagaggtcaaccag

SEQ ID NO: 1085814 - DNA, 25 bp, Homo sapien
gagaaatcaaaggtgtttgagagga

SEQ ID NO: 1085815 - DNA, 25 bp, Homo sapien
cttggaagagaaatcaaaggtgttt

SEQ ID NO: 1085816 - DNA, 25 bp, Homo sapien
aagagaaatcaaaggtgtttgagag

SEQ ID NO: 1085817 - DNA, 25 bp, Homo sapien
ggaagagaaatcaaaggtgtttgag

SEQ ID NO: 1085818 - DNA, 25 bp, Homo sapien
cacccagtgaagcaagttaaaggcc

SEQ ID NO: 1085819 - DNA, 25 bp, Homo sapien
tgagatgccttatcacgctgagtcc

SEQ ID NO: 1085820 - DNA, 25 bp, Homo sapien
tcttcagagggagtatcagcccatc

SEQ ID NO: 1085821 - DNA, 25 bp, Homo sapien
tgttcacgtcaaaggcatcggagcc

SEQ ID NO: 1085822 - DNA, 25 bp, Homo sapien
tttcattaaagacgctggaaacatt

SEQ ID NO: 1085823 - DNA, 25 bp, Homo sapien
tcattaaagacgctggaaacattct

SEQ ID NO: 1085824 - DNA, 25 bp, Homo sapien
ttaaagacgctggaaacattcttcg

SEQ ID NO: 1085825 - DNA, 25 bp, Homo sapien
agtttcattaaagacgctggaaaca

SEQ ID NO: 1085826 - DNA, 25 bp, Homo sapien
agagaggctccacagccctggccat

SEQ ID NO: 1085827 - DNA, 25 bp, Homo sapien
cgagagaggctccacagccctggcc

SEQ ID NO: 1085828 - DNA, 25 bp, Homo sapien
gagagaggctccacagccctggcca

SEQ ID NO: 1085829 - DNA, 25 bp, Homo sapien
ttacgggcctggggctgggtgccca

SEQ ID NO: 1085830 - DNA, 25 bp, Homo sapien
tacgggcctggggctgggtgcccat

SEQ ID NO: 1085831 - DNA, 25 bp, Homo sapien
gacattccaggagttagggctaaag

SEQ ID NO: 1085832 - DNA, 25 bp, Homo sapien
ccttgtggggttcaaagacattcca

SEQ ID NO: 1085833 - DNA, 25 bp, Homo sapien
ggagttagggctaaagtcagcttct

SEQ ID NO: 1085834 - DNA, 25 bp, Homo sapien
tcagcttctattggggctttcttcc

SEQ ID NO: 1085835 - DNA, 25 bp, Homo sapien
ttaaagtgtggtcagcacggtgtta

SEQ ID NO: 1085836 - DNA, 25 bp, Homo sapien
gtcagcacggtgttattgcactggg

SEQ ID NO: 1085837 - DNA, 25 bp, Homo sapien
agtgtggtcagcacggtgttattgc

SEQ ID NO: 1085838 - DNA, 25 bp, Homo sapien
gtggtcagcacggtgttattgcact

SEQ ID NO: 1085839 - DNA, 25 bp, Homo sapien
aatcttatcctcgtaggcccaacag

SEQ ID NO: 1085840 - DNA, 25 bp, Homo sapien
tgttgaaatcttatcctcgtaggcc

SEQ ID NO: 1085841 - DNA, 25 bp, Homo sapien
tgaaatcttatcctcgtaggcccaa

SEQ ID NO: 1085842 - DNA, 25 bp, Homo sapien
cttatcctcgtaggcccaacagatg

SEQ ID NO: 1085843 - DNA, 25 bp, Homo sapien
cagctcggccgatttataaggtaat

SEQ ID NO: 1085844 - DNA, 25 bp, Homo sapien
aagttctgaacagctcggccgattt

SEQ ID NO: 1085845 - DNA, 25 bp, Homo sapien
taatttctttcgtatgattttggta

SEQ ID NO: 1085846 - DNA, 25 bp, Homo sapien
ttctgaacagctcggccgatttata

SEQ ID NO: 1085847 - DNA, 25 bp, Homo sapien
ccttggtccaggccaaatcccaagt

SEQ ID NO: 1085848 - DNA, 25 bp, Homo sapien
caagtcaggcactggggcaccaaga

SEQ ID NO: 1085849 - DNA, 25 bp, Homo sapien
gggcaccaagatggggaggtggctt

SEQ ID NO: 1085850 - DNA, 25 bp, Homo sapien
gccaaatcccaagtcaggcactggg

SEQ ID NO: 1085851 - DNA, 25 bp, Homo sapien
actctagcagggcaaaggcctcttc

SEQ ID NO: 1085852 - DNA, 25 bp, Homo sapien
gccactctagcagggcaaaggcctc

SEQ ID NO: 1085853 - DNA, 25 bp, Homo sapien
ttagccactctagcagggcaaaggc

SEQ ID NO: 1085854 - DNA, 25 bp, Homo sapien
caggcttagccactctagcagggca

SEQ ID NO: 1085855 - DNA, 25 bp, Homo sapien
tggcagtgcaaatgcgctctttggc

SEQ ID NO: 1085856 - DNA, 25 bp, Homo sapien
ttcctgcttgcgcacagagcagaat

SEQ ID NO: 1085857 - DNA, 25 bp, Homo sapien
agcagaatacagtggcagtgcaaat

SEQ ID NO: 1085858 - DNA, 25 bp, Homo sapien
cctgcttgcgcacagagcagaatac

SEQ ID NO: 1085859 - DNA, 25 bp, Homo sapien
cagtgtaagcaagggcgccaagtac

SEQ ID NO: 1085860 - DNA, 25 bp, Homo sapien
gaccaaggacattcggcttctgcat

SEQ ID NO: 1085861 - DNA, 25 bp, Homo sapien
cctgacctagggtgggtgatgctaa

SEQ ID NO: 1085862 - DNA, 25 bp, Homo sapien
cattgggttctttctgtgcactggg

SEQ ID NO: 1085863 - DNA, 25 bp, Homo sapien
ccatgaccacgctggtcatggccat

SEQ ID NO: 1085864 - DNA, 25 bp, Homo sapien
tccatgaccacgctggtcatggcca

SEQ ID NO: 1085865 - DNA, 25 bp, Homo sapien
aagttgcagcatctccccaagcagc

SEQ ID NO: 1085866 - DNA, 25 bp, Homo sapien
ccaggaagttgcagcatctccccaa

SEQ ID NO: 1085867 - DNA, 25 bp, Homo sapien
tcaccctgtagaacactgatgccca

SEQ ID NO: 1085868 - DNA, 25 bp, Homo sapien
caccctgtagaacactgatgcccag

SEQ ID NO: 1085869 - DNA, 25 bp, Homo sapien
tgtctgtggccacgtctggccactc

SEQ ID NO: 1085870 - DNA, 25 bp, Homo sapien
gtctgtggccacgtctggccactcc

SEQ ID NO: 1085871 - DNA, 25 bp, Homo sapien
acttccctaggaagggagactctgc

SEQ ID NO: 1085872 - DNA, 25 bp, Homo sapien
tgcaaattgttcctgacagccctgc

SEQ ID NO: 1085873 - DNA, 25 bp, Homo sapien
gaacttgttccaagtgccacttggt

SEQ ID NO: 1085874 - DNA, 25 bp, Homo sapien
cctttatttcttgggctggcctcca

SEQ ID NO: 1085875 - DNA, 25 bp, Homo sapien
caaggcataggggatggttggaagc

SEQ ID NO: 1085876 - DNA, 25 bp, Homo sapien
ggcacagctgggtctctgtgaatgg

SEQ ID NO: 1085877 - DNA, 25 bp, Homo sapien
cagctgggtctctgtgaatggcaag

SEQ ID NO: 1085878 - DNA, 25 bp, Homo sapien
cacagctgggtctctgtgaatggca

SEQ ID NO: 1085879 - DNA, 25 bp, Homo sapien
gaccgacagcacaagggattggtgt

SEQ ID NO: 1085880 - DNA, 25 bp, Homo sapien
caggctgctaccaagcagggttgca

SEQ ID NO: 1085881 - DNA, 25 bp, Homo sapien
taatacaggccatcctagccaagat

SEQ ID NO: 1085882 - DNA, 25 bp, Homo sapien
gcttttaaggttcctagacctgtca

SEQ ID NO: 1085883 - DNA, 25 bp, Homo sapien
tattcagtggcttgaggagagctag

SEQ ID NO: 1085884 - DNA, 25 bp, Homo sapien
cagtggcttgaggagagctagaaaa

SEQ ID NO: 1085885 - DNA, 25 bp, Homo sapien
cttgaggagagctagaaaaccaaat

SEQ ID NO: 1085886 - DNA, 25 bp, Homo sapien
tctccattattcagtggcttgagga

SEQ ID NO: 1085887 - DNA, 25 bp, Homo sapien
cgtcctagattcatgcgctgaagct

SEQ ID NO: 1085888 - DNA, 25 bp, Homo sapien
tgatgtccagcccttgtcagccgtc

SEQ ID NO: 1085889 - DNA, 25 bp, Homo sapien
tgtcagccgtcctagattcatgcgc

SEQ ID NO: 1085890 - DNA, 25 bp, Homo sapien
cagcccttgtcagccgtcctagatt

SEQ ID NO: 1085891 - DNA, 25 bp, Homo sapien
tcagttggtgaccaaccgcacaggc

SEQ ID NO: 1085892 - DNA, 25 bp, Homo sapien
gttggtgaccaaccgcacaggccac

SEQ ID NO: 1085893 - DNA, 25 bp, Homo sapien
tggtgaccaaccgcacaggccactc

SEQ ID NO: 1085894 - DNA, 25 bp, Homo sapien
agttggtgaccaaccgcacaggcca

SEQ ID NO: 1085895 - DNA, 25 bp, Homo sapien
tccagcacttgcctaccatagtgcc

SEQ ID NO: 1085896 - DNA, 25 bp, Homo sapien
cttggcctgcgtcatacaatccagc

SEQ ID NO: 1085897 - DNA, 25 bp, Homo sapien
gcctgtgtatagatgtatgctgcat

SEQ ID NO: 1085898 - DNA, 25 bp, Homo sapien
aacttggcctgcgtcatacaatcca

SEQ ID NO: 1085899 - DNA, 25 bp, Homo sapien
tccgtagtgcttggcactggcaggc

SEQ ID NO: 1085900 - DNA, 25 bp, Homo sapien
gcccagaagcctgtccacgtgcctg

SEQ ID NO: 1085901 - DNA, 25 bp, Homo sapien
cagccagctccgtagtgcttggcac

SEQ ID NO: 1085902 - DNA, 25 bp, Homo sapien
caggctcacgttccatgggatggct

SEQ ID NO: 1085903 - DNA, 25 bp, Homo sapien
gcttttttgagtcctcttaaatatc

SEQ ID NO: 1085904 - DNA, 25 bp, Homo sapien
tgcttttttgagtcctcttaaatat

SEQ ID NO: 1085905 - DNA, 25 bp, Homo sapien
tcaccccacaggtctcaaatgttgt

SEQ ID NO: 1085906 - DNA, 25 bp, Homo sapien
tcctgctggagttgaactgaatcca

SEQ ID NO: 1085907 - DNA, 25 bp, Homo sapien
gattcagaacccattaaagtcaacc

SEQ ID NO: 1085908 - DNA, 25 bp, Homo sapien
ggctgtgtgcactgtcttcacccca

SEQ ID NO: 1085909 - DNA, 25 bp, Homo sapien
ttcactgctggaaaatacgccatta

SEQ ID NO: 1085910 - DNA, 25 bp, Homo sapien
tgctggaaaatacgccattatgggc

SEQ ID NO: 1085911 - DNA, 25 bp, Homo sapien
tggaaaatacgccattatgggcatt

SEQ ID NO: 1085912 - DNA, 25 bp, Homo sapien
cactgctggaaaatacgccattatg

SEQ ID NO: 1085913 - DNA, 25 bp, Homo sapien
cataggtagagaacgtgacatcctg

SEQ ID NO: 1085914 - DNA, 25 bp, Homo sapien
tcacccataggtagagaacgtgaca

SEQ ID NO: 1085915 - DNA, 25 bp, Homo sapien
tggtgtccctggtgaaccagggagt

SEQ ID NO: 1085916 - DNA, 25 bp, Homo sapien
cgtgacatcctgaatggggtactgg

SEQ ID NO: 1085917 - DNA, 25 bp, Homo sapien
cctgcaggacttttgggaccaccat

SEQ ID NO: 1085918 - DNA, 25 bp, Homo sapien
tgccctgcaggacttttgggaccac

SEQ ID NO: 1085919 - DNA, 25 bp, Homo sapien
catgccctgcaggacttttgggacc

SEQ ID NO: 1085920 - DNA, 25 bp, Homo sapien
ccctgcaggacttttgggaccacca

SEQ ID NO: 1085921 - DNA, 25 bp, Homo sapien
tctgggttaattgaagttactctca

SEQ ID NO: 1085922 - DNA, 25 bp, Homo sapien
cattctgggttaattgaagttactc

SEQ ID NO: 1085923 - DNA, 25 bp, Homo sapien
cccacattctgggttaattgaagtt

SEQ ID NO: 1085924 - DNA, 25 bp, Homo sapien
cacattctgggttaattgaagttac

SEQ ID NO: 1085925 - DNA, 25 bp, Homo sapien
atacattccagaaactcggtccaac

SEQ ID NO: 1085926 - DNA, 25 bp, Homo sapien
tttccaaattggctcgttaaatcta

SEQ ID NO: 1085927 - DNA, 25 bp, Homo sapien
ctcggtccaacattccagggaaact

SEQ ID NO: 1085928 - DNA, 25 bp, Homo sapien
tggctcgttaaatctatacattcca

SEQ ID NO: 1085929 - DNA, 25 bp, Homo sapien
tattctttgaagatcgagtcagatg

SEQ ID NO: 1085930 - DNA, 25 bp, Homo sapien
ttattctttgaagatcgagtcagat

SEQ ID NO: 1085931 - DNA, 25 bp, Homo sapien
tctttgaagatcgagtcagatggct

SEQ ID NO: 1085932 - DNA, 25 bp, Homo sapien
ttctttgaagatcgagtcagatggc

SEQ ID NO: 1085933 - DNA, 25 bp, Homo sapien
cttctcggactctaggaaaaggatt

SEQ ID NO: 1085934 - DNA, 25 bp, Homo sapien
gagtaaaaccatagtggttgtcgta

SEQ ID NO: 1085935 - DNA, 25 bp, Homo sapien
gcagtttaccttctcggactctagg

SEQ ID NO: 1085936 - DNA, 25 bp, Homo sapien
cgtaggagcagcctgcagtttacct

SEQ ID NO: 1085937 - DNA, 25 bp, Homo sapien
tgagtgaatcactgcttaactgagc

SEQ ID NO: 1085938 - DNA, 25 bp, Homo sapien
cccttgtgagtggtggtctcatctc

SEQ ID NO: 1085939 - DNA, 25 bp, Homo sapien
cacggcatgaagatcttggaggatg

SEQ ID NO: 1085940 - DNA, 25 bp, Homo sapien
ccctctgcacggcatgaagatcttg

SEQ ID NO: 1085941 - DNA, 25 bp, Homo sapien
gcctttctccacttataactatacc

SEQ ID NO: 1085942 - DNA, 25 bp, Homo sapien
tataactatacccaaggctggcttt

SEQ ID NO: 1085943 - DNA, 25 bp, Homo sapien
tcagattggcgagagagatcatttc

SEQ ID NO: 1085944 - DNA, 25 bp, Homo sapien
cattgattggttgggcctttacctg

SEQ ID NO: 1085945 - DNA, 25 bp, Homo sapien
tgtggacttatcttgaggttttgct

SEQ ID NO: 1085946 - DNA, 25 bp, Homo sapien
gttagttgcatgcttggccctgtct

SEQ ID NO: 1085947 - DNA, 25 bp, Homo sapien
tttttgccagaaagtctcagttagt

SEQ ID NO: 1085948 - DNA, 25 bp, Homo sapien
ctttgtgtgattagaggttgtggac

SEQ ID NO: 1085949 - DNA, 25 bp, Homo sapien
aattcagtggctcccatgggtagtg

SEQ ID NO: 1085950 - DNA, 25 bp, Homo sapien
gtgggggaccactgctggatataac

SEQ ID NO: 1085951 - DNA, 25 bp, Homo sapien
gaatgaggaattcagtggctcccat

SEQ ID NO: 1085952 - DNA, 25 bp, Homo sapien
tcaggccagaatgaggaattcagtg

SEQ ID NO: 1085953 - DNA, 25 bp, Homo sapien
gctctgacggcacccaagctgattt

SEQ ID NO: 1085954 - DNA, 25 bp, Homo sapien
cccaagctgatttgtttatgagaaa

SEQ ID NO: 1085955 - DNA, 25 bp, Homo sapien
gaggacgtcagagggccgcagtgtg

SEQ ID NO: 1085956 - DNA, 25 bp, Homo sapien
cgcagtgtgaagtggcgtcagctct

SEQ ID NO: 1085957 - DNA, 25 bp, Homo sapien
ggccctaagggctttgactggacca

SEQ ID NO: 1085958 - DNA, 25 bp, Homo sapien
ttgggaggccgtgaccactgagagc

SEQ ID NO: 1085959 - DNA, 25 bp, Homo sapien
ctcgtgctctgaccgactcctggtg

SEQ ID NO: 1085960 - DNA, 25 bp, Homo sapien
gtgcggctgtagcatccccctgatc

SEQ ID NO: 1085961 - DNA, 25 bp, Homo sapien
accgactcctggtgcggctgtagca

SEQ ID NO: 1085962 - DNA, 25 bp, Homo sapien
ttggctttagtgtgataccacttga

SEQ ID NO: 1085963 - DNA, 25 bp, Homo sapien
gctgtattgaaggacaagtgggcat

SEQ ID NO: 1085964 - DNA, 25 bp, Homo sapien
ccacttgagctgtattgaaggacaa

SEQ ID NO: 1085965 - DNA, 25 bp, Homo sapien
tagtgtgataccacttgagctgtat

SEQ ID NO: 1085966 - DNA, 25 bp, Homo sapien
ctacagaacccgcatggtgaggcct

SEQ ID NO: 1085967 - DNA, 25 bp, Homo sapien
aacccgcatggtgaggcctgctggt

SEQ ID NO: 1085968 - DNA, 25 bp, Homo sapien
ggctttgagagacaccttgcaggtg

SEQ ID NO: 1085969 - DNA, 25 bp, Homo sapien
caccttgcaggtgggataggatttg

SEQ ID NO: 1085970 - DNA, 25 bp, Homo sapien
ttcctaaaagagcagcggttgggcg

SEQ ID NO: 1085971 - DNA, 25 bp, Homo sapien
tgtgcatgacgcgtttggcccgagc

SEQ ID NO: 1085972 - DNA, 25 bp, Homo sapien
gcagtgtgtatgtcctcgcccgtca

SEQ ID NO: 1085973 - DNA, 25 bp, Homo sapien
gcgagcgcaagtgcacgtttcctaa

SEQ ID NO: 1085974 - DNA, 25 bp, Homo sapien
tcagttctgttcagcggctgccaag

SEQ ID NO: 1085975 - DNA, 25 bp, Homo sapien
tctgtccgcccacttaatccacagg

SEQ ID NO: 1085976 - DNA, 25 bp, Homo sapien
tgccaagccgtctcgccgagcagct

SEQ ID NO: 1085977 - DNA, 25 bp, Homo sapien
agccggtggccgagccttcagttct

SEQ ID NO: 1085978 - DNA, 25 bp, Homo sapien
ggcaaagcactttctgacggagata

SEQ ID NO: 1085979 - DNA, 25 bp, Homo sapien
cggagataaaaatgggagcgtgcct

SEQ ID NO: 1085980 - DNA, 25 bp, Homo sapien
gaggtcgcctggtaatgcagctttc

SEQ ID NO: 1085981 - DNA, 25 bp, Homo sapien
gagcgtgcctttgttaatagttccc

SEQ ID NO: 1085982 - DNA, 25 bp, Homo sapien
aacatagccgctttctccctctgaa

SEQ ID NO: 1085983 - DNA, 25 bp, Homo sapien
gggttctgactacgcctgactcctt

SEQ ID NO: 1085984 - DNA, 25 bp, Homo sapien
aatcctgtgtattctatggcccagt

SEQ ID NO: 1085985 - DNA, 25 bp, Homo sapien
ttctatggcccagtgctgattcctc

SEQ ID NO: 1085986 - DNA, 25 bp, Homo sapien
tcataaattggctggaccagaaact

SEQ ID NO: 1085987 - DNA, 25 bp, Homo sapien
cggagatgttgcaagctcttcacca

SEQ ID NO: 1085988 - DNA, 25 bp, Homo sapien
tcaccagggaaacagcggcagaaac

SEQ ID NO: 1085989 - DNA, 25 bp, Homo sapien
gacctgcttgctcctccggagatgt

SEQ ID NO: 1085990 - DNA, 25 bp, Homo sapien
gaaaagcccaacttccaggagaaca

SEQ ID NO: 1085991 - DNA, 25 bp, Homo sapien
ctgaaaagcccaacttccaggagaa

SEQ ID NO: 1085992 - DNA, 25 bp, Homo sapien
taacacttctgaaaagcccaacttc

SEQ ID NO: 1085993 - DNA, 25 bp, Homo sapien
aaagcccaacttccaggagaacaga

SEQ ID NO: 1085994 - DNA, 25 bp, Homo sapien
gagcctagacataccaaaacagccc

SEQ ID NO: 1085995 - DNA, 25 bp, Homo sapien
gagagcctagacataccaaaacagc

SEQ ID NO: 1085996 - DNA, 25 bp, Homo sapien
ctggagagcctagacataccaaaac

SEQ ID NO: 1085997 - DNA, 25 bp, Homo sapien
ggcctggagagcctagacataccaa

SEQ ID NO: 1085998 - DNA, 25 bp, Homo sapien
gaggtcctccaactactaccattaa

SEQ ID NO: 1085999 - DNA, 25 bp, Homo sapien
ttcactaaatgccagatacagggca

SEQ ID NO: 1086000 - DNA, 25 bp, Homo sapien
tcaaaagtcatatccattgcagact

SEQ ID NO: 1086001 - DNA, 25 bp, Homo sapien
tcagtcacctttcctcgagtcttca

SEQ ID NO: 1086002 - DNA, 25 bp, Homo sapien
tctgagtcatgctatcaggtgttgc

SEQ ID NO: 1086003 - DNA, 25 bp, Homo sapien
aaataaatatgagtacgtgtcccta

SEQ ID NO: 1086004 - DNA, 25 bp, Homo sapien
ctttgaccacaaaagcctgtcttta

SEQ ID NO: 1086005 - DNA, 25 bp, Homo sapien
aagccagaagctcagtgtgactctg

SEQ ID NO: 1086006 - DNA, 25 bp, Homo sapien
gccagctattccaattattcacaga

SEQ ID NO: 1086007 - DNA, 25 bp, Homo sapien
ggtggcagcaatactgggtcactag

SEQ ID NO: 1086008 - DNA, 25 bp, Homo sapien
gctcagataaaacttgtgttgccag

SEQ ID NO: 1086009 - DNA, 25 bp, Homo sapien
ttgccagccgacagtaatggatggg

SEQ ID NO: 1086010 - DNA, 25 bp, Homo sapien
gcttggccaagccaaggtagcccag

SEQ ID NO: 1086011 - DNA, 25 bp, Homo sapien
tccccagtttctcgtgggaggagga

SEQ ID NO: 1086012 - DNA, 25 bp, Homo sapien
gcaatggcacgatggaaagcccagt

SEQ ID NO: 1086013 - DNA, 25 bp, Homo sapien
tcacactgcgacaataggagatggg

SEQ ID NO: 1086014 - DNA, 25 bp, Homo sapien
gggtgaataagtgtcccatctgcag

SEQ ID NO: 1086015 - DNA, 25 bp, Homo sapien
ctgctcagagccatggtagcacatg

SEQ ID NO: 1086016 - DNA, 25 bp, Homo sapien
tacaacggatctcatcagtcattca

SEQ ID NO: 1086017 - DNA, 25 bp, Homo sapien
aatgattgttacaacggatctcatc

SEQ ID NO: 1086018 - DNA, 25 bp, Homo sapien
tggtagcacatgtggctgaggccac

SEQ ID NO: 1086019 - DNA, 25 bp, Homo sapien
ttattggacttgattgtactctgaa

SEQ ID NO: 1086020 - DNA, 25 bp, Homo sapien
ttctctcataattggccattctcat

SEQ ID NO: 1086021 - DNA, 25 bp, Homo sapien
ttggacttgattgtactctgaattc

SEQ ID NO: 1086022 - DNA, 25 bp, Homo sapien
gtactctgaattctctcataattgg

SEQ ID NO: 1086023 - DNA, 25 bp, Homo sapien
tggccacttggcagatgaccacatc

SEQ ID NO: 1086024 - DNA, 25 bp, Homo sapien
tgggctgggccctaataattaacat

SEQ ID NO: 1086025 - DNA, 25 bp, Homo sapien
cacccaacggcagagagatccggat

SEQ ID NO: 1086026 - DNA, 25 bp, Homo sapien
tgtgcccagtgttccaagtcggagt

SEQ ID NO: 1086027 - DNA, 25 bp, Homo sapien
aagtaggtgaaccgtggcttgggtg

SEQ ID NO: 1086028 - DNA, 25 bp, Homo sapien
ctgaccgatgcaggagtggtggccc

SEQ ID NO: 1086029 - DNA, 25 bp, Homo sapien
tgctgaccgatgcaggagtggtggc

SEQ ID NO: 1086030 - DNA, 25 bp, Homo sapien
gagtggtggcccagggagaagggga

SEQ ID NO: 1086031 - DNA, 25 bp, Homo sapien
cgcggcccgggcaccagctggaact

SEQ ID NO: 1086032 - DNA, 25 bp, Homo sapien
tgcagcagctttgccatgaccacct

SEQ ID NO: 1086033 - DNA, 25 bp, Homo sapien
caccttcacctccatctgagcaaac

SEQ ID NO: 1086034 - DNA, 25 bp, Homo sapien
tactgcagcccgaagcgcggcccgg

SEQ ID NO: 1086035 - DNA, 25 bp, Homo sapien
attgaggccgtcacagcctggcagg

SEQ ID NO: 1086036 - DNA, 25 bp, Homo sapien
acgagaggttgtctcgtctgaggaa

SEQ ID NO: 1086037 - DNA, 25 bp, Homo sapien
cagaggaaggtcctctgacccggct

SEQ ID NO: 1086038 - DNA, 25 bp, Homo sapien
ctcagagacgaatcacatgcagccc

SEQ ID NO: 1086039 - DNA, 25 bp, Homo sapien
ggagttatatggttttggacgcaga

SEQ ID NO: 1086040 - DNA, 25 bp, Homo sapien
tatatggttttggacgcagatgttc

SEQ ID NO: 1086041 - DNA, 25 bp, Homo sapien
cctctgacaatatgttggtctccta

SEQ ID NO: 1086042 - DNA, 25 bp, Homo sapien
agatgatgtggtgtatggagttata

SEQ ID NO: 1086043 - DNA, 25 bp, Homo sapien
atagaaggtactgcagggatcctgc

SEQ ID NO: 1086044 - DNA, 25 bp, Homo sapien
cctggtgcacatagaaggtactgca

SEQ ID NO: 1086045 - DNA, 25 bp, Homo sapien
acctgccacctggtgcacatagaag

SEQ ID NO: 1086046 - DNA, 25 bp, Homo sapien
ctgcgtttccgatgcagcacctgcc

SEQ ID NO: 1086047 - DNA, 25 bp, Homo sapien
tgtgttgcacagttaaacgcttcat

SEQ ID NO: 1086048 - DNA, 25 bp, Homo sapien
tgatttgtgttgcacagttaaacgc

SEQ ID NO: 1086049 - DNA, 25 bp, Homo sapien
agcccaggttgttgatttgtgttgc

SEQ ID NO: 1086050 - DNA, 25 bp, Homo sapien
ccaggttgttgatttgtgttgcaca

SEQ ID NO: 1086051 - DNA, 25 bp, Homo sapien
cagtattataaccacggaaagccgt

SEQ ID NO: 1086052 - DNA, 25 bp, Homo sapien
ccacggaaagccgtggtcagcagtg

SEQ ID NO: 1086053 - DNA, 25 bp, Homo sapien
tataaccacggaaagccgtggtcag

SEQ ID NO: 1086054 - DNA, 25 bp, Homo sapien
tgacagtattataaccacggaaagc

SEQ ID NO: 1086055 - DNA, 25 bp, Homo sapien
ggcattggcctcaaagaaacgagca

SEQ ID NO: 1086056 - DNA, 25 bp, Homo sapien
aacgagcaaaatctttttgtccacg

SEQ ID NO: 1086057 - DNA, 25 bp, Homo sapien
ttcaagcccactcgagagccttggc

SEQ ID NO: 1086058 - DNA, 25 bp, Homo sapien
ttggcaacagcatgagggagaagaa

SEQ ID NO: 1086059 - DNA, 25 bp, Homo sapien
acagcaccagaaactgactcttcct

SEQ ID NO: 1086060 - DNA, 25 bp, Homo sapien
accagaaactgactcttcctggctc

SEQ ID NO: 1086061 - DNA, 25 bp, Homo sapien
ttccctggagtccttcacagcacca

SEQ ID NO: 1086062 - DNA, 25 bp, Homo sapien
agcaccagaaactgactcttcctgg

SEQ ID NO: 1086063 - DNA, 25 bp, Homo sapien
taagatgaaaacagcgcttccagcc

SEQ ID NO: 1086064 - DNA, 25 bp, Homo sapien
caagatcacattaacctgggagcag

SEQ ID NO: 1086065 - DNA, 25 bp, Homo sapien
tatacagagacacgcagaggtagac

SEQ ID NO: 1086066 - DNA, 25 bp, Homo sapien
caaaagactgagctccctaaggtga

SEQ ID NO: 1086067 - DNA, 25 bp, Homo sapien
cattggtgagtagtcgttgggcctc

SEQ ID NO: 1086068 - DNA, 25 bp, Homo sapien
ccattggtgagtagtcgttgggcct

SEQ ID NO: 1086069 - DNA, 25 bp, Homo sapien
tgggcctctgttgactgttgactga

SEQ ID NO: 1086070 - DNA, 25 bp, Homo sapien
cgttgggcctctgttgactgttgac

SEQ ID NO: 1086071 - DNA, 25 bp, Homo sapien
tcccaagtcagaactggtttatgga

SEQ ID NO: 1086072 - DNA, 25 bp, Homo sapien
tctgcttgctgtctttgtatctttc

SEQ ID NO: 1086073 - DNA, 25 bp, Homo sapien
cgattgtcccaagtcagaactggtt

SEQ ID NO: 1086074 - DNA, 25 bp, Homo sapien
tcagaactggtttatggagtctgtc

SEQ ID NO: 1086075 - DNA, 25 bp, Homo sapien
tcagaaacaccaccttggtaaccag

SEQ ID NO: 1086076 - DNA, 25 bp, Homo sapien
atttctcagaaacaccaccttggta

SEQ ID NO: 1086077 - DNA, 25 bp, Homo sapien
taacatttccttgctccctccaatt

SEQ ID NO: 1086078 - DNA, 25 bp, Homo sapien
gaaacaccaccttggtaaccagtgc

SEQ ID NO: 1086079 - DNA, 25 bp, Homo sapien
aacatcatatgctcacctaaataaa

SEQ ID NO: 1086080 - DNA, 25 bp, Homo sapien
tgaaaaccgagatattagacaccat

SEQ ID NO: 1086081 - DNA, 25 bp, Homo sapien
tatgctcacctaaataaaagcctca

SEQ ID NO: 1086082 - DNA, 25 bp, Homo sapien
gagatattagacaccatcatttaag

SEQ ID NO: 1086083 - DNA, 25 bp, Homo sapien
cactgcatagtagacctttgttaga

SEQ ID NO: 1086084 - DNA, 25 bp, Homo sapien
catttctctaaaaacttagtgatat

SEQ ID NO: 1086085 - DNA, 25 bp, Homo sapien
gttctttatagacactgcatagtag

SEQ ID NO: 1086086 - DNA, 25 bp, Homo sapien
tctaaaaacttagtgatattgagct

SEQ ID NO: 1086087 - DNA, 25 bp, Homo sapien
tgctgtcagcgaaggatttgggtct

SEQ ID NO: 1086088 - DNA, 25 bp, Homo sapien
tctggcctgaactctgtatgtgacc

SEQ ID NO: 1086089 - DNA, 25 bp, Homo sapien
tagggagagttacactagctgcaac

SEQ ID NO: 1086090 - DNA, 25 bp, Homo sapien
ccaccacgtgtagttctgctgtcag

SEQ ID NO: 1086091 - DNA, 25 bp, Homo sapien
tggtgcagagaagggcatccaccat

SEQ ID NO: 1086092 - DNA, 25 bp, Homo sapien
cacagtataaagaaagcggcctgaa

SEQ ID NO: 1086093 - DNA, 25 bp, Homo sapien
cttggtgcagagaagggcatccacc

SEQ ID NO: 1086094 - DNA, 25 bp, Homo sapien
gcagtcggaagtcatcctgggatgc

SEQ ID NO: 1086095 - DNA, 25 bp, Homo sapien
ggcaaattgcatccatacattagct

SEQ ID NO: 1086096 - DNA, 25 bp, Homo sapien
tgcatccatacattagctgtgccct

SEQ ID NO: 1086097 - DNA, 25 bp, Homo sapien
tctgggagacactttaagtaccagt

SEQ ID NO: 1086098 - DNA, 25 bp, Homo sapien
gctgtgccctcctcgaatacataag

SEQ ID NO: 1086099 - DNA, 25 bp, Homo sapien
agcctgggtgacagagtgagacctg

SEQ ID NO: 1086100 - DNA, 25 bp, Homo sapien
gaggttgagttgggaggattacttg

SEQ ID NO: 1086101 - DNA, 25 bp, Homo sapien
agccatgactgcgccactgcactcc

SEQ ID NO: 1086102 - DNA, 25 bp, Homo sapien
agcctgggaggtcaagtctgcagtg

SEQ ID NO: 1086103 - DNA, 25 bp, Homo sapien
ctggggagctcttcaaccagcatct

SEQ ID NO: 1086104 - DNA, 25 bp, Homo sapien
gactctggggagctcttcaaccagc

SEQ ID NO: 1086105 - DNA, 25 bp, Homo sapien
gactgcagttatcccaacaagactc

SEQ ID NO: 1086106 - DNA, 25 bp, Homo sapien
gcagttatcccaacaagactctggg

SEQ ID NO: 1086107 - DNA, 25 bp, Homo sapien
tgctcagtcagtaggagttggtgct

SEQ ID NO: 1086108 - DNA, 25 bp, Homo sapien
ggtgctggccctgttatcattcaca

SEQ ID NO: 1086109 - DNA, 25 bp, Homo sapien
gtgtaaagcacagaccccttggtct

SEQ ID NO: 1086110 - DNA, 25 bp, Homo sapien
cattcacaggtgaacggcttctcct

SEQ ID NO: 1086111 - DNA, 25 bp, Homo sapien
ttatttgttcattatgcctcaataa

SEQ ID NO: 1086112 - DNA, 25 bp, Homo sapien
taccttaagcagatataatttttat

SEQ ID NO: 1086113 - DNA, 25 bp, Homo sapien
ccttaagcagatataatttttattt

SEQ ID NO: 1086114 - DNA, 25 bp, Homo sapien
ttttatttgttcattatgcctcaat

SEQ ID NO: 1086115 - DNA, 25 bp, Homo sapien
caagctttccatcggctgactgtcc

SEQ ID NO: 1086116 - DNA, 25 bp, Homo sapien
tctcaagctttccatcggctgactg

SEQ ID NO: 1086117 - DNA, 25 bp, Homo sapien
tgttctcaagctttccatcggctga

SEQ ID NO: 1086118 - DNA, 25 bp, Homo sapien
tctgttctcaagctttccatcggct

SEQ ID NO: 1086119 - DNA, 25 bp, Homo sapien
cattcccttttcccaaggtaggcag

SEQ ID NO: 1086120 - DNA, 25 bp, Homo sapien
tcccaggggtcagacttagcagttc

SEQ ID NO: 1086121 - DNA, 25 bp, Homo sapien
gctggatacattcccttttcccaag

SEQ ID NO: 1086122 - DNA, 25 bp, Homo sapien
aaacatgacaagctggatacattcc

SEQ ID NO: 1086123 - DNA, 25 bp, Homo sapien
gtggagtatgcaggtgggggtagtt

SEQ ID NO: 1086124 - DNA, 25 bp, Homo sapien
ggagtatgcaggtgggggtagttgg

SEQ ID NO: 1086125 - DNA, 25 bp, Homo sapien
tggtggagtatgcaggtgggggtag

SEQ ID NO: 1086126 - DNA, 25 bp, Homo sapien
ctggtggagtatgcaggtgggggta

SEQ ID NO: 1086127 - DNA, 25 bp, Homo sapien
gctcttgggcctgaacagcagaagg

SEQ ID NO: 1086128 - DNA, 25 bp, Homo sapien
ggctcttgggcctgaacagcagaag

SEQ ID NO: 1086129 - DNA, 25 bp, Homo sapien
tggctcttgggcctgaacagcagaa

SEQ ID NO: 1086130 - DNA, 25 bp, Homo sapien
tctggctcttgggcctgaacagcag

SEQ ID NO: 1086131 - DNA, 25 bp, Homo sapien
ccacttgagaactgttaagtctggc

SEQ ID NO: 1086132 - DNA, 25 bp, Homo sapien
caggagctgtggttcgaggagggag

SEQ ID NO: 1086133 - DNA, 25 bp, Homo sapien
gaatgttttgacttgagtaggatgc

SEQ ID NO: 1086134 - DNA, 25 bp, Homo sapien
ttaagtctggcgtccaggagctgtg

SEQ ID NO: 1086135 - DNA, 25 bp, Homo sapien
gcagctgatgggttgatggtgcatg

SEQ ID NO: 1086136 - DNA, 25 bp, Homo sapien
gctgatgggttgatggtgcatgaga

SEQ ID NO: 1086137 - DNA, 25 bp, Homo sapien
cagctgatgggttgatggtgcatga

SEQ ID NO: 1086138 - DNA, 25 bp, Homo sapien
ctgatgggttgatggtgcatgagag

SEQ ID NO: 1086139 - DNA, 25 bp, Homo sapien
ctgttagtgttggtcaacagcaggc

SEQ ID NO: 1086140 - DNA, 25 bp, Homo sapien
cagatccccacagcaatgacgaaga

SEQ ID NO: 1086141 - DNA, 25 bp, Homo sapien
tgtcgtaggcgtgcagaccaactct

SEQ ID NO: 1086142 - DNA, 25 bp, Homo sapien
cagtgctatgtgtggagctgtctca

SEQ ID NO: 1086143 - DNA, 25 bp, Homo sapien
gacaaagtagatgaccaccacgctg

SEQ ID NO: 1086144 - DNA, 25 bp, Homo sapien
gatttccttcccctcggtgcaggca

SEQ ID NO: 1086145 - DNA, 25 bp, Homo sapien
tgccccctccccgcagatttccttc

SEQ ID NO: 1086146 - DNA, 25 bp, Homo sapien
gatgaggatttctcaagactctctg

SEQ ID NO: 1086147 - DNA, 25 bp, Homo sapien
gagatgaggatttctcaagactctc

SEQ ID NO: 1086148 - DNA, 25 bp, Homo sapien
gatgagatgaggatttctcaagact

SEQ ID NO: 1086149 - DNA, 25 bp, Homo sapien
tgaggatttctcaagactctctgaa

SEQ ID NO: 1086150 - DNA, 25 bp, Homo sapien
gaaatagccgccaatggtccctcga

SEQ ID NO: 1086151 - DNA, 25 bp, Homo sapien
ccggccaggaaatagccgccaatgg

SEQ ID NO: 1086152 - DNA, 25 bp, Homo sapien
tccctcgacttgcacggatggacga

SEQ ID NO: 1086153 - DNA, 25 bp, Homo sapien
caatggtccctcgacttgcacggat

SEQ ID NO: 1086154 - DNA, 25 bp, Homo sapien
agccaggccgatgaacaagccactg

SEQ ID NO: 1086155 - DNA, 25 bp, Homo sapien
cacattgctggacatcagagatgct

SEQ ID NO: 1086156 - DNA, 25 bp, Homo sapien
tcgaagccacctacggcaaggcctc

SEQ ID NO: 1086157 - DNA, 25 bp, Homo sapien
gttccactcgaagccacctacggca

SEQ ID NO: 1086158 - DNA, 25 bp, Homo sapien
cagcactaatgccagagacagaggt

SEQ ID NO: 1086159 - DNA, 25 bp, Homo sapien
taaggatcctcccagcactaatgcc

SEQ ID NO: 1086160 - DNA, 25 bp, Homo sapien
ggttagaccctcagtattctggaga

SEQ ID NO: 1086161 - DNA, 25 bp, Homo sapien
gattctcgattcaccatgtagcctc

SEQ ID NO: 1086162 - DNA, 25 bp, Homo sapien
cgtgtgaccttggatggatccctct

SEQ ID NO: 1086163 - DNA, 25 bp, Homo sapien
tgaccttggatggatccctctgtct

SEQ ID NO: 1086164 - DNA, 25 bp, Homo sapien
tgctgtgggaggcccccgaacagag

SEQ ID NO: 1086165 - DNA, 25 bp, Homo sapien
tgtgggaggcccccgaacagagaaa

SEQ ID NO: 1086166 - DNA, 25 bp, Homo sapien
tgggaggcccccgaacagagaaata

SEQ ID NO: 1086167 - DNA, 25 bp, Homo sapien
ctgtgggaggcccccgaacagagaa

SEQ ID NO: 1086168 - DNA, 25 bp, Homo sapien
gggagaagaagaaggtatccaggtc

SEQ ID NO: 1086169 - DNA, 25 bp, Homo sapien
agagtggggagaagaagaaggtatc

SEQ ID NO: 1086170 - DNA, 25 bp, Homo sapien
tggggagaagaagaaggtatccagg

SEQ ID NO: 1086171 - DNA, 25 bp, Homo sapien
agtggggagaagaagaaggtatcca

SEQ ID NO: 1086172 - DNA, 25 bp, Homo sapien
gcggcattgtgaccacacctgctgc

SEQ ID NO: 1086173 - DNA, 25 bp, Homo sapien
cttcttcagatactgcggcattgtg

SEQ ID NO: 1086174 - DNA, 25 bp, Homo sapien
gggacgaagacccagccaagggcca

SEQ ID NO: 1086175 - DNA, 25 bp, Homo sapien
tgctgcgatgtacacagggacgaag

SEQ ID NO: 1086176 - DNA, 25 bp, Homo sapien
atgaagagggctccagagaagatgt

SEQ ID NO: 1086177 - DNA, 25 bp, Homo sapien
gcccaatgccatctggatgaagagg

SEQ ID NO: 1086178 - DNA, 25 bp, Homo sapien
gcaatggtgtagacggcagtcacca

SEQ ID NO: 1086179 - DNA, 25 bp, Homo sapien
ctgcaatggtgtagacggcagtcac

SEQ ID NO: 1086180 - DNA, 25 bp, Homo sapien
caatggtgtagacggcagtcaccac

SEQ ID NO: 1086181 - DNA, 25 bp, Homo sapien
tgcaatggtgtagacggcagtcacc

SEQ ID NO: 1086182 - DNA, 25 bp, Homo sapien
tggggacccaaggagagggctcatc

SEQ ID NO: 1086183 - DNA, 25 bp, Homo sapien
atcagtcagcaccagtttggggtcc

SEQ ID NO: 1086184 - DNA, 25 bp, Homo sapien
cagtcagcaccagtttggggtcctc

SEQ ID NO: 1086185 - DNA, 25 bp, Homo sapien
tcagcaccagtttggggtcctctct

SEQ ID NO: 1086186 - DNA, 25 bp, Homo sapien
tctgtgtagatcacggccatgaggc

SEQ ID NO: 1086187 - DNA, 25 bp, Homo sapien
tgcagagcatctgtgtagatcacgg

SEQ ID NO: 1086188 - DNA, 25 bp, Homo sapien
gagcatctgtgtagatcacggccat

SEQ ID NO: 1086189 - DNA, 25 bp, Homo sapien
catctgtgtagatcacggccatgag

SEQ ID NO: 1086190 - DNA, 25 bp, Homo sapien
ccagaaacatgaggaccagggctcc

SEQ ID NO: 1086191 - DNA, 25 bp, Homo sapien
acatgaggaccagggctccccctac

SEQ ID NO: 1086192 - DNA, 25 bp, Homo sapien
aaacatgaggaccagggctccccct

SEQ ID NO: 1086193 - DNA, 25 bp, Homo sapien
agaaacatgaggaccagggctcccc

SEQ ID NO: 1086194 - DNA, 25 bp, Homo sapien
agtttcaatcgaactgtggaggtgg

SEQ ID NO: 1086195 - DNA, 25 bp, Homo sapien
gacccttggtttgaagtagcgagaa

SEQ ID NO: 1086196 - DNA, 25 bp, Homo sapien
gagacagtgagtgaagcagccctga

SEQ ID NO: 1086197 - DNA, 25 bp, Homo sapien
tagcgagaaccctgctctttgggag

SEQ ID NO: 1086198 - DNA, 25 bp, Homo sapien
gccaagggatgtccccgctcacagg

SEQ ID NO: 1086199 - DNA, 25 bp, Homo sapien
tcacagggtcccgaagaatgtggaa

SEQ ID NO: 1086200 - DNA, 25 bp, Homo sapien
ctgtgagcccgaaaatgagacctgg

SEQ ID NO: 1086201 - DNA, 25 bp, Homo sapien
gacattagggatggcctgcctgtac

SEQ ID NO: 1086202 - DNA, 25 bp, Homo sapien
catgccaggcatgacgatgaagaac

SEQ ID NO: 1086203 - DNA, 25 bp, Homo sapien
ccttggcatgagacagactcttggc

SEQ ID NO: 1086204 - DNA, 25 bp, Homo sapien
aacagggcccggctgatcatgccag

SEQ ID NO: 1086205 - DNA, 25 bp, Homo sapien
ggccgagagagaccgctgcacaatg

SEQ ID NO: 1086206 - DNA, 25 bp, Homo sapien
catgaccaacttagggtaggcaatg

SEQ ID NO: 1086207 - DNA, 25 bp, Homo sapien
caatgttggaacatcccactcgggc

SEQ ID NO: 1086208 - DNA, 25 bp, Homo sapien
aatgttggaacatcccactcgggcc

SEQ ID NO: 1086209 - DNA, 25 bp, Homo sapien
caacaggcatgagggccatgaccaa

SEQ ID NO: 1086210 - DNA, 25 bp, Homo sapien
cggccatgatcacggcaatcatcag

SEQ ID NO: 1086211 - DNA, 25 bp, Homo sapien
gaagcgctgccacacatcaatggtg

SEQ ID NO: 1086212 - DNA, 25 bp, Homo sapien
tgagtgagctcatgagagcggccat

SEQ ID NO: 1086213 - DNA, 25 bp, Homo sapien
cgctgccacacatcaatggtgaaca

SEQ ID NO: 1086214 - DNA, 25 bp, Homo sapien
tagtcgaagagctgcccactgttgg

SEQ ID NO: 1086215 - DNA, 25 bp, Homo sapien
cactgttggagctttggatgatggg

SEQ ID NO: 1086216 - DNA, 25 bp, Homo sapien
gtgacagcctggatgtagtcgaaga

SEQ ID NO: 1086217 - DNA, 25 bp, Homo sapien
caggaagagagcggtgatgggtggg

SEQ ID NO: 1086218 - DNA, 25 bp, Homo sapien
cagacaagagctgaggtgagatcca

SEQ ID NO: 1086219 - DNA, 25 bp, Homo sapien
tgaggtgagatccaggtgggagacc

SEQ ID NO: 1086220 - DNA, 25 bp, Homo sapien
agagctgaggtgagatccaggtggg

SEQ ID NO: 1086221 - DNA, 25 bp, Homo sapien
agagagggcagacaagagctgaggt

SEQ ID NO: 1086222 - DNA, 25 bp, Homo sapien
gcccgcagaggaggattgcaaagta

SEQ ID NO: 1086223 - DNA, 25 bp, Homo sapien
aggccaaacacgaggccccagaaag

SEQ ID NO: 1086224 - DNA, 25 bp, Homo sapien
gaactccaggatcatacgcagaagc

SEQ ID NO: 1086225 - DNA, 25 bp, Homo sapien
gctggcgctgggtatgagaactcca

SEQ ID NO: 1086226 - DNA, 25 bp, Homo sapien
gggatgggagttgtacagaggctga

SEQ ID NO: 1086227 - DNA, 25 bp, Homo sapien
ttcctcagggatgggagttgtacag

SEQ ID NO: 1086228 - DNA, 25 bp, Homo sapien
ggatgggagttgtacagaggctgac

SEQ ID NO: 1086229 - DNA, 25 bp, Homo sapien
ctgttcctcagggatgggagttgta

SEQ ID NO: 1086230 - DNA, 25 bp, Homo sapien
tggagggcctcagtatgagcacaac

SEQ ID NO: 1086231 - DNA, 25 bp, Homo sapien
gagggcctcagtatgagcacaacac

SEQ ID NO: 1086232 - DNA, 25 bp, Homo sapien
tctggagggcctcagtatgagcaca

SEQ ID NO: 1086233 - DNA, 25 bp, Homo sapien
tttctggagggcctcagtatgagca

SEQ ID NO: 1086234 - DNA, 25 bp, Homo sapien
catccatcaaaagagtattatccat

SEQ ID NO: 1086235 - DNA, 25 bp, Homo sapien
cagcatgggctctgttatgggctga

SEQ ID NO: 1086236 - DNA, 25 bp, Homo sapien
tattatccatgatgtccactcagtg

SEQ ID NO: 1086237 - DNA, 25 bp, Homo sapien
ttctgtgtcgaagtcctaaccgcca

SEQ ID NO: 1086238 - DNA, 25 bp, Homo sapien
tgggttcctaaggaacactgatatt

SEQ ID NO: 1086239 - DNA, 25 bp, Homo sapien
tataggccacagatgggttcctaag

SEQ ID NO: 1086240 - DNA, 25 bp, Homo sapien
tagggtgagacaggttataggccac

SEQ ID NO: 1086241 - DNA, 25 bp, Homo sapien
cactgatatttcaggagcagataga

SEQ ID NO: 1086242 - DNA, 25 bp, Homo sapien
tctggtgcatgttgagctgggtatc

SEQ ID NO: 1086243 - DNA, 25 bp, Homo sapien
ggtatcccttatcctgctcccaact

SEQ ID NO: 1086244 - DNA, 25 bp, Homo sapien
tatcctgctcccaacttcttacttt

SEQ ID NO: 1086245 - DNA, 25 bp, Homo sapien
cactgcctgagctctaaggcagctt

SEQ ID NO: 1086246 - DNA, 25 bp, Homo sapien
ccctgtaggcaatggagagtcactg

SEQ ID NO: 1086247 - DNA, 25 bp, Homo sapien
caggcacttgagaacaagtcttcaa

SEQ ID NO: 1086248 - DNA, 25 bp, Homo sapien
gactttaagcagcagatagactgta

SEQ ID NO: 1086249 - DNA, 25 bp, Homo sapien
ctgaggagtcgtagcttaaagaaca

SEQ ID NO: 1086250 - DNA, 25 bp, Homo sapien
gctggcctctcggatatctccggtg

SEQ ID NO: 1086251 - DNA, 25 bp, Homo sapien
cgagtccaccatgtgaggcgtgtga

SEQ ID NO: 1086252 - DNA, 25 bp, Homo sapien
caggctcgagttctctgccgctcca

SEQ ID NO: 1086253 - DNA, 25 bp, Homo sapien
gatatctccggtgtgctctcgtggg

SEQ ID NO: 1086254 - DNA, 25 bp, Homo sapien
ctgcaggcctttggagagggggtgc

SEQ ID NO: 1086255 - DNA, 25 bp, Homo sapien
aggcctttggagagggggtgcctct

SEQ ID NO: 1086256 - DNA, 25 bp, Homo sapien
tttggagagggggtgcctcttccat

SEQ ID NO: 1086257 - DNA, 25 bp, Homo sapien
ctttggagagggggtgcctcttcca

SEQ ID NO: 1086258 - DNA, 25 bp, Homo sapien
tcacagtgtattccaaggtatgcgg

SEQ ID NO: 1086259 - DNA, 25 bp, Homo sapien
aagccaggtctgtggaatcacgcaa

SEQ ID NO: 1086260 - DNA, 25 bp, Homo sapien
tagacagcaaagtaagaggagagcc

SEQ ID NO: 1086261 - DNA, 25 bp, Homo sapien
tcctggcgaagggacacttaactgg

SEQ ID NO: 1086262 - DNA, 25 bp, Homo sapien
aaatggatgagagtagaggcagcct

SEQ ID NO: 1086263 - DNA, 25 bp, Homo sapien
ggctgtgatcccactctaggtgtct

SEQ ID NO: 1086264 - DNA, 25 bp, Homo sapien
ctgggagatagaagaaaggcacgcc

SEQ ID NO: 1086265 - DNA, 25 bp, Homo sapien
gaaggagactcacccctaacagcta

SEQ ID NO: 1086266 - DNA, 25 bp, Homo sapien
caggtgcacttgctgctatatccag

SEQ ID NO: 1086267 - DNA, 25 bp, Homo sapien
tcggcattatctatgcaggtgcact

SEQ ID NO: 1086268 - DNA, 25 bp, Homo sapien
tggcaccactaaggaccccagcagc

SEQ ID NO: 1086269 - DNA, 25 bp, Homo sapien
agtcttgactgccaacttcggcatt

SEQ ID NO: 1086270 - DNA, 25 bp, Homo sapien
ctcttgccaccacataaacacctgc

SEQ ID NO: 1086271 - DNA, 25 bp, Homo sapien
ggtcttggttgttagtgccacaggc

SEQ ID NO: 1086272 - DNA, 25 bp, Homo sapien
cttgccaccacataaacacctgctg

SEQ ID NO: 1086273 - DNA, 25 bp, Homo sapien
gctggtcttggttgttagtgccaca

SEQ ID NO: 1086274 - DNA, 25 bp, Homo sapien
gtgcagtcactgcatgcatgcctgc

SEQ ID NO: 1086275 - DNA, 25 bp, Homo sapien
cacattcatctgtgaccaattctca

SEQ ID NO: 1086276 - DNA, 25 bp, Homo sapien
ctagccccagttttaaccaccacat

SEQ ID NO: 1086277 - DNA, 25 bp, Homo sapien
ccagtgcagtcactgcatgcatgcc

SEQ ID NO: 1086278 - DNA, 25 bp, Homo sapien
tcagataatcagtacttgtgactgt

SEQ ID NO: 1086279 - DNA, 25 bp, Homo sapien
taatcagtacttgtgactgttcacc

SEQ ID NO: 1086280 - DNA, 25 bp, Homo sapien
tacttgtgactgttcacccattcgc

SEQ ID NO: 1086281 - DNA, 25 bp, Homo sapien
gactgttcacccattcgcaaaatat

SEQ ID NO: 1086282 - DNA, 25 bp, Homo sapien
tcccagatactaatagcatctttgc

SEQ ID NO: 1086283 - DNA, 25 bp, Homo sapien
taatagcatctttgctaagtgtctg

SEQ ID NO: 1086284 - DNA, 25 bp, Homo sapien
taagtgtctgattatcttctatccc

SEQ ID NO: 1086285 - DNA, 25 bp, Homo sapien
gggcaaattcccagatactaatagc

SEQ ID NO: 1086286 - DNA, 25 bp, Homo sapien
taatcttctatgtatccttccaatg

SEQ ID NO: 1086287 - DNA, 25 bp, Homo sapien
tctatgtatccttccaatgttagta

SEQ ID NO: 1086288 - DNA, 25 bp, Homo sapien
atatagaatgcttcgtaaatttgtg

SEQ ID NO: 1086289 - DNA, 25 bp, Homo sapien
aatatagaatgcttcgtaaatttgt

SEQ ID NO: 1086290 - DNA, 25 bp, Homo sapien
gaagttgacctcgtgtaaaatgtat

SEQ ID NO: 1086291 - DNA, 25 bp, Homo sapien
acaagtatcaggcaccgtgtccgga

SEQ ID NO: 1086292 - DNA, 25 bp, Homo sapien
gatttctggtatggttcagggtacc

SEQ ID NO: 1086293 - DNA, 25 bp, Homo sapien
tcagggtacctagaaaatatcttgt

SEQ ID NO: 1086294 - DNA, 25 bp, Homo sapien
ggcaagtaacagattcagtgagtca

SEQ ID NO: 1086295 - DNA, 25 bp, Homo sapien
ttttactaggcatgaacaggatcca

SEQ ID NO: 1086296 - DNA, 25 bp, Homo sapien
taagtagggttagacagcatgcatt

SEQ ID NO: 1086297 - DNA, 25 bp, Homo sapien
gaaactcatgattccaaggtcttag

SEQ ID NO: 1086298 - DNA, 25 bp, Homo sapien
cttcaggctgccagcggtgcggaca

SEQ ID NO: 1086299 - DNA, 25 bp, Homo sapien
tcttcaggctgccagcggtgcggac

SEQ ID NO: 1086300 - DNA, 25 bp, Homo sapien
ccctgctcgcggaggggcgaggcga

SEQ ID NO: 1086301 - DNA, 25 bp, Homo sapien
ggtgcggacaggggcgggcgccaga

SEQ ID NO: 1086302 - DNA, 25 bp, Homo sapien
ctttagttcacacagaaagtgacaa

SEQ ID NO: 1086303 - DNA, 25 bp, Homo sapien
tcctttcaagatgcagatatatcct

SEQ ID NO: 1086304 - DNA, 25 bp, Homo sapien
ccatctattccaaagaaggcttttg

SEQ ID NO: 1086305 - DNA, 25 bp, Homo sapien
gaaagtgacaaaaatccatctattc

SEQ ID NO: 1086306 - DNA, 25 bp, Homo sapien
gtgcagaagcaatccaaaagagaca

SEQ ID NO: 1086307 - DNA, 25 bp, Homo sapien
gaagtgcagaagcaatccaaaagag

SEQ ID NO: 1086308 - DNA, 25 bp, Homo sapien
cttgaagtgcagaagcaatccaaaa

SEQ ID NO: 1086309 - DNA, 25 bp, Homo sapien
tgcagaagcaatccaaaagagacat

SEQ ID NO: 1086310 - DNA, 25 bp, Homo sapien
taagttgtaatattgggatgccgga

SEQ ID NO: 1086311 - DNA, 25 bp, Homo sapien
tgggaaatcatacacagccctatgc

SEQ ID NO: 1086312 - DNA, 25 bp, Homo sapien
tgcttaaccaaactatgcagatggg

SEQ ID NO: 1086313 - DNA, 25 bp, Homo sapien
agagagggtcactaggccatcacca

SEQ ID NO: 1086314 - DNA, 25 bp, Homo sapien
tatctgacttcacattatacccatg

SEQ ID NO: 1086315 - DNA, 25 bp, Homo sapien
gacttcacattatacccatgtaaat

SEQ ID NO: 1086316 - DNA, 25 bp, Homo sapien
ctgacttcacattatacccatgtaa

SEQ ID NO: 1086317 - DNA, 25 bp, Homo sapien
tctgacttcacattatacccatgta

SEQ ID NO: 1086318 - DNA, 25 bp, Homo sapien
agttctatgcatgtcctggaaaggc

SEQ ID NO: 1086319 - DNA, 25 bp, Homo sapien
cagcatctgagttctatgcatgtcc

SEQ ID NO: 1086320 - DNA, 25 bp, Homo sapien
ctgagttctatgcatgtcctggaaa

SEQ ID NO: 1086321 - DNA, 25 bp, Homo sapien
taacagcatctgagttctatgcatg

SEQ ID NO: 1086322 - DNA, 25 bp, Homo sapien
ggatggtgtgtgtaatcggtcacta

SEQ ID NO: 1086323 - DNA, 25 bp, Homo sapien
catgggacaataaactgcttgctga

SEQ ID NO: 1086324 - DNA, 25 bp, Homo sapien
tggcttgttataagcaggaggcaac

SEQ ID NO: 1086325 - DNA, 25 bp, Homo sapien
tactgtgtgagttccactggagaca

SEQ ID NO: 1086326 - DNA, 25 bp, Homo sapien
catcaggaaaatcacattctggctc

SEQ ID NO: 1086327 - DNA, 25 bp, Homo sapien
tgagtctttttcatcaggaaaatca

SEQ ID NO: 1086328 - DNA, 25 bp, Homo sapien
caggaaaatcacattctggctcagt

SEQ ID NO: 1086329 - DNA, 25 bp, Homo sapien
ctagaattccaagtatgagtctttt

SEQ ID NO: 1086330 - DNA, 25 bp, Homo sapien
tggtgcccctttgaacagagtggtt

SEQ ID NO: 1086331 - DNA, 25 bp, Homo sapien
gatgtaagataaactagcctgttgg

SEQ ID NO: 1086332 - DNA, 25 bp, Homo sapien
gagtgaggctcagttaggtgttacc

SEQ ID NO: 1086333 - DNA, 25 bp, Homo sapien
gatgtacttggaagcactgtcctct

SEQ ID NO: 1086334 - DNA, 25 bp, Homo sapien
tctcattggctgcgatactgccaat

SEQ ID NO: 1086335 - DNA, 25 bp, Homo sapien
aacgagtctgcgccccgcgctcagc

SEQ ID NO: 1086336 - DNA, 25 bp, Homo sapien
gcgctcagctgcttctccggcggaa

SEQ ID NO: 1086337 - DNA, 25 bp, Homo sapien
cttctccggcggaacccaggctgga

SEQ ID NO: 1086338 - DNA, 25 bp, Homo sapien
agtctgcgccccgcgctcagctgct

SEQ ID NO: 1086339 - DNA, 25 bp, Homo sapien
gaatatagccctttgtgtagctaga

SEQ ID NO: 1086340 - DNA, 25 bp, Homo sapien
ccatggtgatgagaatatagccctt

SEQ ID NO: 1086341 - DNA, 25 bp, Homo sapien
ggcttggtgactggcaaacttcctg

SEQ ID NO: 1086342 - DNA, 25 bp, Homo sapien
aagcctgcctctgaatgcgtctctt

SEQ ID NO: 1086343 - DNA, 25 bp, Homo sapien
tgacagtctccaggtctgcattctc

SEQ ID NO: 1086344 - DNA, 25 bp, Homo sapien
aattcaagggctcctcaatgctaag

SEQ ID NO: 1086345 - DNA, 25 bp, Homo sapien
ctagtatgcaaggtacacatggttc

SEQ ID NO: 1086346 - DNA, 25 bp, Homo sapien
caattgctcatctctatgcactgac

SEQ ID NO: 1086347 - DNA, 25 bp, Homo sapien
tgctatctgccgtatttgactcaaa

SEQ ID NO: 1086348 - DNA, 25 bp, Homo sapien
tgtgactgtagatgtgcccaactcc

SEQ ID NO: 1086349 - DNA, 25 bp, Homo sapien
caacagggcgtgtcagcacttgaat

SEQ ID NO: 1086350 - DNA, 25 bp, Homo sapien
agagcccatgcccttagtgatccgg

SEQ ID NO: 1086351 - DNA, 25 bp, Homo sapien
tgtctgcagtctgggtccccttcaa

SEQ ID NO: 1086352 - DNA, 25 bp, Homo sapien
tgcagtctgggtccccttcaaatcc

SEQ ID NO: 1086353 - DNA, 25 bp, Homo sapien
ggaccaggaccattcttcctgtctg

SEQ ID NO: 1086354 - DNA, 25 bp, Homo sapien
ctggaccaggaccattcttcctgtc

SEQ ID NO: 1086355 - DNA, 25 bp, Homo sapien
ttaatctctaggaaatgacctccat

SEQ ID NO: 1086356 - DNA, 25 bp, Homo sapien
taatctctaggaaatgacctccatt

SEQ ID NO: 1086357 - DNA, 25 bp, Homo sapien
tacaaaatcgttctttcccatatct

SEQ ID NO: 1086358 - DNA, 25 bp, Homo sapien
tgttagctccatgtagcaggattct

SEQ ID NO: 1086359 - DNA, 25 bp, Homo sapien
ctccatgtagcaggattctacaaaa

SEQ ID NO: 1086360 - DNA, 25 bp, Homo sapien
tagcaggattctacaaaatcgttct

SEQ ID NO: 1086361 - DNA, 25 bp, Homo sapien
cctccctgctcagccaaagacgtgc

SEQ ID NO: 1086362 - DNA, 25 bp, Homo sapien
gacatgaaaggtcgggaagcactgg

SEQ ID NO: 1086363 - DNA, 25 bp, Homo sapien
acatgaaaggtcgggaagcactggc

SEQ ID NO: 1086364 - DNA, 25 bp, Homo sapien
ccctgctcagccaaagacgtgccat

SEQ ID NO: 1086365 - DNA, 25 bp, Homo sapien
ccttcagtctgcaaatagtatcaaa

SEQ ID NO: 1086366 - DNA, 25 bp, Homo sapien
tatcaaaaatttctcggagagtcat

SEQ ID NO: 1086367 - DNA, 25 bp, Homo sapien
tagtatcaaaaatttctcggagagt

SEQ ID NO: 1086368 - DNA, 25 bp, Homo sapien
cttttccttcagtctgcaaatagta

SEQ ID NO: 1086369 - DNA, 25 bp, Homo sapien
gagtcccagcctcggtgcttgaatg

SEQ ID NO: 1086370 - DNA, 25 bp, Homo sapien
gcttgaatgggttgctgctgtacca

SEQ ID NO: 1086371 - DNA, 25 bp, Homo sapien
agcatatcaaatagagtcccagcct

SEQ ID NO: 1086372 - DNA, 25 bp, Homo sapien
tgtaccaacgtacaggtccctcatc

SEQ ID NO: 1086373 - DNA, 25 bp, Homo sapien
gtcaaactttatggtcagtggctgt

SEQ ID NO: 1086374 - DNA, 25 bp, Homo sapien
tgtcaaactttatggtcagtggctg

SEQ ID NO: 1086375 - DNA, 25 bp, Homo sapien
agtgcaagcacgcagctgtctgaag

SEQ ID NO: 1086376 - DNA, 25 bp, Homo sapien
ttcagcagatgccaacatgagtgtc

SEQ ID NO: 1086377 - DNA, 25 bp, Homo sapien
ggcttcaagagcattccttcagcag

SEQ ID NO: 1086378 - DNA, 25 bp, Homo sapien
tagtgtcccctgatgaatgccaagg

SEQ ID NO: 1086379 - DNA, 25 bp, Homo sapien
tggtaacccactgaactgagcaaca

SEQ ID NO: 1086380 - DNA, 25 bp, Homo sapien
cacatcgaggattggaaggcagcct

SEQ ID NO: 1086381 - DNA, 25 bp, Homo sapien
cagttgcctgaggttgaagtgccct

SEQ ID NO: 1086382 - DNA, 25 bp, Homo sapien
cctagctccatcagaaggatactgg

SEQ ID NO: 1086383 - DNA, 25 bp, Homo sapien
gctctgaaagcctgtgggaagttgc

SEQ ID NO: 1086384 - DNA, 25 bp, Homo sapien
tgcaatgcggggttttacgtaacac

SEQ ID NO: 1086385 - DNA, 25 bp, Homo sapien
cctgtgggaagttgctgtgtgattt

SEQ ID NO: 1086386 - DNA, 25 bp, Homo sapien
tgagttctttacatcagcagcaaaa

SEQ ID NO: 1086387 - DNA, 25 bp, Homo sapien
tcagaaacaataccagccttctaga

SEQ ID NO: 1086388 - DNA, 25 bp, Homo sapien
gatcagagtgtagcagaagtacaca

SEQ ID NO: 1086389 - DNA, 25 bp, Homo sapien
tgaaagagggagtttataataaatc

SEQ ID NO: 1086390 - DNA, 25 bp, Homo sapien
tacacaaaaagctagaatagaagcc

SEQ ID NO: 1086391 - DNA, 25 bp, Homo sapien
gatcaaaatgccgtctctctagagg

SEQ ID NO: 1086392 - DNA, 25 bp, Homo sapien
tctagagggtagttgtttggattcc

SEQ ID NO: 1086393 - DNA, 25 bp, Homo sapien
cctccagtgcaaaggatctaccttc

SEQ ID NO: 1086394 - DNA, 25 bp, Homo sapien
gcttattggtagctcagtgagaacc

SEQ ID NO: 1086395 - DNA, 25 bp, Homo sapien
tcaaaatcctccgtactctttagaa

SEQ ID NO: 1086396 - DNA, 25 bp, Homo sapien
acaccagcaccatgggttgcactct

SEQ ID NO: 1086397 - DNA, 25 bp, Homo sapien
gggatagattaaagcacccacacca

SEQ ID NO: 1086398 - DNA, 25 bp, Homo sapien
ccagcaccatgggttgcactcttag

SEQ ID NO: 1086399 - DNA, 25 bp, Homo sapien
gatagattaaagcacccacaccagc

SEQ ID NO: 1086400 - DNA, 25 bp, Homo sapien
cagtgctttggaaacgtggggctga

SEQ ID NO: 1086401 - DNA, 25 bp, Homo sapien
ttggtaatacttcatcaggtggctg

SEQ ID NO: 1086402 - DNA, 25 bp, Homo sapien
gtcctttggagattggtaatacttc

SEQ ID NO: 1086403 - DNA, 25 bp, Homo sapien
tggagattggtaatacttcatcagg

SEQ ID NO: 1086404 - DNA, 25 bp, Homo sapien
caggggctgttgatgacagattatc

SEQ ID NO: 1086405 - DNA, 25 bp, Homo sapien
aggccaagggcaattgaatcccaac

SEQ ID NO: 1086406 - DNA, 25 bp, Homo sapien
gaactggaaggtgcctcaggccaag

SEQ ID NO: 1086407 - DNA, 25 bp, Homo sapien
tgacatggcccaatcaatagaactg

SEQ ID NO: 1086408 - DNA, 25 bp, Homo sapien
gaggagacagtaacccagaattagc

SEQ ID NO: 1086409 - DNA, 25 bp, Homo sapien
tgcaagcagctgaatagcatttcaa

SEQ ID NO: 1086410 - DNA, 25 bp, Homo sapien
gtgcacaccgccaaaaccaattatt

SEQ ID NO: 1086411 - DNA, 25 bp, Homo sapien
gattctacagtgaagacaggcctct

SEQ ID NO: 1086412 - DNA, 25 bp, Homo sapien
cctgagagtgatgcttttccacctt

SEQ ID NO: 1086413 - DNA, 25 bp, Homo sapien
tttccaccttccatggacagagtgt

SEQ ID NO: 1086414 - DNA, 25 bp, Homo sapien
gaagtgatggttcattagcattcgc

SEQ ID NO: 1086415 - DNA, 25 bp, Homo sapien
tatggcttgttgcaggcctgagagt

SEQ ID NO: 1086416 - DNA, 25 bp, Homo sapien
tagcattttcggtgcttatataaaa

SEQ ID NO: 1086417 - DNA, 25 bp, Homo sapien
gggatttgagattgaaagtggtatt

SEQ ID NO: 1086418 - DNA, 25 bp, Homo sapien
ggtatttttatacaactcaatgaag

SEQ ID NO: 1086419 - DNA, 25 bp, Homo sapien
taaaaatgccagtggggatttgaga

SEQ ID NO: 1086420 - DNA, 25 bp, Homo sapien
tgcctgatagatgccaagctgggcc

SEQ ID NO: 1086421 - DNA, 25 bp, Homo sapien
gggtttcaccacaatggatcttctt

SEQ ID NO: 1086422 - DNA, 25 bp, Homo sapien
gatactagtgggttctagatgtcca

SEQ ID NO: 1086423 - DNA, 25 bp, Homo sapien
cctaaatgtcctagatactagtggg

SEQ ID NO: 1086424 - DNA, 25 bp, Homo sapien
tgattatactgaaattagggctaaa

SEQ ID NO: 1086425 - DNA, 25 bp, Homo sapien
tagggctaaagcgtgaagtcaaatt

SEQ ID NO: 1086426 - DNA, 25 bp, Homo sapien
aatttctggaagcaatcctgattaa

SEQ ID NO: 1086427 - DNA, 25 bp, Homo sapien
gaataatggcagtgtaaataatgca

SEQ ID NO: 1086428 - DNA, 25 bp, Homo sapien
cagctgaagtgtgtcactgccagag

SEQ ID NO: 1086429 - DNA, 25 bp, Homo sapien
gacctgagacctcacattggcagtt

SEQ ID NO: 1086430 - DNA, 25 bp, Homo sapien
gctgtagagaaacacccaattccca

SEQ ID NO: 1086431 - DNA, 25 bp, Homo sapien
cagttcccatcagccgctgtagaga

SEQ ID NO: 1086432 - DNA, 25 bp, Homo sapien
gtcagtagactctgtggatgctgac

SEQ ID NO: 1086433 - DNA, 25 bp, Homo sapien
ccagtcagtagactctgtggatgct

SEQ ID NO: 1086434 - DNA, 25 bp, Homo sapien
ctccagtcagtagactctgtggatg

SEQ ID NO: 1086435 - DNA, 25 bp, Homo sapien
cagtcagtagactctgtggatgctg

SEQ ID NO: 1086436 - DNA, 25 bp, Homo sapien
gagtgacaagcagttcttagacagg

SEQ ID NO: 1086437 - DNA, 25 bp, Homo sapien
catgtgcactcctgttttaacccca

SEQ ID NO: 1086438 - DNA, 25 bp, Homo sapien
gtggccgccatctccctcatagctg

SEQ ID NO: 1086439 - DNA, 25 bp, Homo sapien
tctctccaaagtaacaggatgctgc

SEQ ID NO: 1086440 - DNA, 25 bp, Homo sapien
tctgttgtgcctggtgatggttgct

SEQ ID NO: 1086441 - DNA, 25 bp, Homo sapien
ggttgctgctttctggagacttact

SEQ ID NO: 1086442 - DNA, 25 bp, Homo sapien
acttgtttctgttgtgcctggtgat

SEQ ID NO: 1086443 - DNA, 25 bp, Homo sapien
tcaaagaacccattcaagccctgag

SEQ ID NO: 1086444 - DNA, 25 bp, Homo sapien
tcatgactactccagaatcgattct

SEQ ID NO: 1086445 - DNA, 25 bp, Homo sapien
ctgtggatctatgaaacatgtgttt

SEQ ID NO: 1086446 - DNA, 25 bp, Homo sapien
tatctctttaagcatcccgtgccag

SEQ ID NO: 1086447 - DNA, 25 bp, Homo sapien
tctggtgccgtccaagggtatctct

SEQ ID NO: 1086448 - DNA, 25 bp, Homo sapien
ggcacatagtaggttttccattaag

SEQ ID NO: 1086449 - DNA, 25 bp, Homo sapien
gactgaatgtgtgagtcacacagga

SEQ ID NO: 1086450 - DNA, 25 bp, Homo sapien
gaagaggcgccctatggcacatagt

SEQ ID NO: 1086451 - DNA, 25 bp, Homo sapien
taagctgtatccatagactgaatgt

SEQ ID NO: 1086452 - DNA, 25 bp, Homo sapien
ggacagtcagcgtcttcgcaggcct

SEQ ID NO: 1086453 - DNA, 25 bp, Homo sapien
caaaggagcctgacattaacccaag

SEQ ID NO: 1086454 - DNA, 25 bp, Homo sapien
cagttgcaaagctgccccagatgtg

SEQ ID NO: 1086455 - DNA, 25 bp, Homo sapien
tatgaaacataagtcccactgctgc

SEQ ID NO: 1086456 - DNA, 25 bp, Homo sapien
tgtatatgaccctttgaggatgaat

SEQ ID NO: 1086457 - DNA, 25 bp, Homo sapien
acttgtatatgaccctttgaggatg

SEQ ID NO: 1086458 - DNA, 25 bp, Homo sapien
ggagaacttgtatatgaccctttga

SEQ ID NO: 1086459 - DNA, 25 bp, Homo sapien
gaacttgtatatgaccctttgagga

SEQ ID NO: 1086460 - DNA, 25 bp, Homo sapien
tccaggaacccatccttgtcattac

SEQ ID NO: 1086461 - DNA, 25 bp, Homo sapien
catccttgtcattaccctgtgacct

SEQ ID NO: 1086462 - DNA, 25 bp, Homo sapien
aggaacccatccttgtcattaccct

SEQ ID NO: 1086463 - DNA, 25 bp, Homo sapien
aacccatccttgtcattaccctgtg

SEQ ID NO: 1086464 - DNA, 25 bp, Homo sapien
tgtgcaggccctaagtgaatgtttt

SEQ ID NO: 1086465 - DNA, 25 bp, Homo sapien
aaaatatacctcgttgtttatgcag

SEQ ID NO: 1086466 - DNA, 25 bp, Homo sapien
gcagttttgcagtcctcttgccaaa

SEQ ID NO: 1086467 - DNA, 25 bp, Homo sapien
tggataggcactgaacatcttaagt

SEQ ID NO: 1086468 - DNA, 25 bp, Homo sapien
ggacccaatctgtaaccaagattgc

SEQ ID NO: 1086469 - DNA, 25 bp, Homo sapien
gacccaatctgtaaccaagattgct

SEQ ID NO: 1086470 - DNA, 25 bp, Homo sapien
acatggttggatggtgttaagatct

SEQ ID NO: 1086471 - DNA, 25 bp, Homo sapien
tttatcacatggttggatggtgtta

SEQ ID NO: 1086472 - DNA, 25 bp, Homo sapien
tcagatactcaaggacctatagtcc

SEQ ID NO: 1086473 - DNA, 25 bp, Homo sapien
gtggatcaggttaggcatgcagact

SEQ ID NO: 1086474 - DNA, 25 bp, Homo sapien
tcaggttaggcatgcagactgcaga

SEQ ID NO: 1086475 - DNA, 25 bp, Homo sapien
tagtcccgggttggtactgagagtc

SEQ ID NO: 1086476 - DNA, 25 bp, Homo sapien
gaatttctggtattcaactcactgt

SEQ ID NO: 1086477 - DNA, 25 bp, Homo sapien
gctttttgcctactgactacacagc

SEQ ID NO: 1086478 - DNA, 25 bp, Homo sapien
ttttgcctactgactacacagcctc

SEQ ID NO: 1086479 - DNA, 25 bp, Homo sapien
gaacgtattagctttttgcctactg

SEQ ID NO: 1086480 - DNA, 25 bp, Homo sapien
tggacaaacaggaacgtattagctt

SEQ ID NO: 1086481 - DNA, 25 bp, Homo sapien
tggactgggattgtagctcacatac

SEQ ID NO: 1086482 - DNA, 25 bp, Homo sapien
gactgggattgtagctcacatacat

SEQ ID NO: 1086483 - DNA, 25 bp, Homo sapien
gtggactgggattgtagctcacata

SEQ ID NO: 1086484 - DNA, 25 bp, Homo sapien
ggactgggattgtagctcacataca

SEQ ID NO: 1086485 - DNA, 25 bp, Homo sapien
ggacatggagccagacaatctgaga

SEQ ID NO: 1086486 - DNA, 25 bp, Homo sapien
gcagttatccagagcaaggacatgg

SEQ ID NO: 1086487 - DNA, 25 bp, Homo sapien
ccagagctttcaccccagtaggctt

SEQ ID NO: 1086488 - DNA, 25 bp, Homo sapien
gagccaagaaaacgatagcagtgtg

SEQ ID NO: 1086489 - DNA, 25 bp, Homo sapien
atgtgcttgcctcttcggtgggaat

SEQ ID NO: 1086490 - DNA, 25 bp, Homo sapien
cttgcctcttcggtgggaataaact

SEQ ID NO: 1086491 - DNA, 25 bp, Homo sapien
tgcctcttcggtgggaataaactgc

SEQ ID NO: 1086492 - DNA, 25 bp, Homo sapien
tgcttgcctcttcggtgggaataaa

SEQ ID NO: 1086493 - DNA, 25 bp, Homo sapien
tgtgaagcccacaaaaaagcggata

SEQ ID NO: 1086494 - DNA, 25 bp, Homo sapien
gataatgtcacaggcgtgcgtccga

SEQ ID NO: 1086495 - DNA, 25 bp, Homo sapien
gcaataattataagttgtgaagccc

SEQ ID NO: 1086496 - DNA, 25 bp, Homo sapien
cgtccgaaacctgccatctggctaa

SEQ ID NO: 1086497 - DNA, 25 bp, Homo sapien
ataggtattctgggtatggagaggg

SEQ ID NO: 1086498 - DNA, 25 bp, Homo sapien
ggacctccttggtagtcttgaggta

SEQ ID NO: 1086499 - DNA, 25 bp, Homo sapien
cataggtattctgggtatggagagg

SEQ ID NO: 1086500 - DNA, 25 bp, Homo sapien
cctccttggtagtcttgaggtatgg

SEQ ID NO: 1086501 - DNA, 25 bp, Homo sapien
ccacagtctcttcagtggacattgg

SEQ ID NO: 1086502 - DNA, 25 bp, Homo sapien
tcaaggacatccacaatccacagtc

SEQ ID NO: 1086503 - DNA, 25 bp, Homo sapien
tcagtggacattggacatcacaaaa

SEQ ID NO: 1086504 - DNA, 25 bp, Homo sapien
aaggagcttctgactgcctctcctt

SEQ ID NO: 1086505 - DNA, 25 bp, Homo sapien
tggaggagagtgcttatataatggc

SEQ ID NO: 1086506 - DNA, 25 bp, Homo sapien
tattaacctacaacatgacatgtga

SEQ ID NO: 1086507 - DNA, 25 bp, Homo sapien
tctgactttatacagaaggtatggt

SEQ ID NO: 1086508 - DNA, 25 bp, Homo sapien
cactctaaccagtaaatgtatctac

SEQ ID NO: 1086509 - DNA, 25 bp, Homo sapien
gaagatcatggccatgttgaccact

SEQ ID NO: 1086510 - DNA, 25 bp, Homo sapien
ccagttggccaataaaggaagctag

SEQ ID NO: 1086511 - DNA, 25 bp, Homo sapien
tacatgctaagcaccttgctgtcag

SEQ ID NO: 1086512 - DNA, 25 bp, Homo sapien
catcgtcatcgctcattagggaaag

SEQ ID NO: 1086513 - DNA, 25 bp, Homo sapien
cttcctgatatgctcgagtctcttt

SEQ ID NO: 1086514 - DNA, 25 bp, Homo sapien
tctccagtgggacctaccatctgag

SEQ ID NO: 1086515 - DNA, 25 bp, Homo sapien
cccagcgacgtggctgacccagccc

SEQ ID NO: 1086516 - DNA, 25 bp, Homo sapien
gctgagccgagcgcctcaggcccag

SEQ ID NO: 1086517 - DNA, 25 bp, Homo sapien
caggcccagcgacgtggctgaccca

SEQ ID NO: 1086518 - DNA, 25 bp, Homo sapien
ggcccagcgacgtggctgacccagc

SEQ ID NO: 1086519 - DNA, 25 bp, Homo sapien
cgggggcttcacgacggtgcggaag

SEQ ID NO: 1086520 - DNA, 25 bp, Homo sapien
gggcttcacgacggtgcggaaggcc

SEQ ID NO: 1086521 - DNA, 25 bp, Homo sapien
gtcgggggcttcacgacggtgcgga

SEQ ID NO: 1086522 - DNA, 25 bp, Homo sapien
ggggcttcacgacggtgcggaaggc

SEQ ID NO: 1086523 - DNA, 25 bp, Homo sapien
tgttgtaagtgtctttcatagaggg

SEQ ID NO: 1086524 - DNA, 25 bp, Homo sapien
caaataaacttcttggaaactgtgc

SEQ ID NO: 1086525 - DNA, 25 bp, Homo sapien
aaattagaaggcctgcaagcataca

SEQ ID NO: 1086526 - DNA, 25 bp, Homo sapien
ggctggtaggactgaaagattctga

SEQ ID NO: 1086527 - DNA, 25 bp, Homo sapien
aagagtttgccatgaatcaggatga

SEQ ID NO: 1086528 - DNA, 25 bp, Homo sapien
taaagagtttgccatgaatcaggat

SEQ ID NO: 1086529 - DNA, 25 bp, Homo sapien
gaccctttgtgaagtgactgggatt

SEQ ID NO: 1086530 - DNA, 25 bp, Homo sapien
tgagttgaccctttgtgaagtgact

SEQ ID NO: 1086531 - DNA, 25 bp, Homo sapien
gtcaggggcacccacgggcagttta

SEQ ID NO: 1086532 - DNA, 25 bp, Homo sapien
ttccctcggggatgcctcaacactg

SEQ ID NO: 1086533 - DNA, 25 bp, Homo sapien
gggatgcctcaacactgaaaccagt

SEQ ID NO: 1086534 - DNA, 25 bp, Homo sapien
tcaacactgaaaccagtggtcaggg

SEQ ID NO: 1086535 - DNA, 25 bp, Homo sapien
aaagcagaaaggtcactgacatcat

SEQ ID NO: 1086536 - DNA, 25 bp, Homo sapien
catctgtgacacttggtccacaaag

SEQ ID NO: 1086537 - DNA, 25 bp, Homo sapien
acaaagcagaaaggtcactgacatc

SEQ ID NO: 1086538 - DNA, 25 bp, Homo sapien
atctgtgacacttggtccacaaagc

SEQ ID NO: 1086539 - DNA, 25 bp, Homo sapien
ggcctgctgatgcactgagccacat

SEQ ID NO: 1086540 - DNA, 25 bp, Homo sapien
taatacatcagctaaatggatgccg

SEQ ID NO: 1086541 - DNA, 25 bp, Homo sapien
tgtaaattgatgactcgggcctgct

SEQ ID NO: 1086542 - DNA, 25 bp, Homo sapien
gaattaagccttaagcagagctcca

SEQ ID NO: 1086543 - DNA, 25 bp, Homo sapien
tacatctgggtagtctcttgggaca

SEQ ID NO: 1086544 - DNA, 25 bp, Homo sapien
gacaataggtccttcataaaacagg

SEQ ID NO: 1086545 - DNA, 25 bp, Homo sapien
caaatgtacattggtcctgggctat

SEQ ID NO: 1086546 - DNA, 25 bp, Homo sapien
tcttaggagacttacatgcccacgg

SEQ ID NO: 1086547 - DNA, 25 bp, Homo sapien
ctgtttctctagactacagtcaaac

SEQ ID NO: 1086548 - DNA, 25 bp, Homo sapien
tgtttctctagactacagtcaaaca

SEQ ID NO: 1086549 - DNA, 25 bp, Homo sapien
caaaataggctacctcgtcaaaaca

SEQ ID NO: 1086550 - DNA, 25 bp, Homo sapien
taggctacctcgtcaaaacagcatt

SEQ ID NO: 1086551 - DNA, 25 bp, Homo sapien
caaaacagcatttaactaaatgggt

SEQ ID NO: 1086552 - DNA, 25 bp, Homo sapien
taaatgggtgagcaacgtcaacgag

SEQ ID NO: 1086553 - DNA, 25 bp, Homo sapien
gctcattgagttaggtaagtacacc

SEQ ID NO: 1086554 - DNA, 25 bp, Homo sapien
ccagggactgaatagaacaacacca

SEQ ID NO: 1086555 - DNA, 25 bp, Homo sapien
tgagactcagaactaaggcagcagc

SEQ ID NO: 1086556 - DNA, 25 bp, Homo sapien
tctagagacaaggtacagggctcat

SEQ ID NO: 1086557 - DNA, 25 bp, Homo sapien
gcctggcctgtggattgtcatcata

SEQ ID NO: 1086558 - DNA, 25 bp, Homo sapien
tatctccgtgaaggtttgcctggcc

SEQ ID NO: 1086559 - DNA, 25 bp, Homo sapien
gggcccattgcagttgccaatcaaa

SEQ ID NO: 1086560 - DNA, 25 bp, Homo sapien
gttacaatcaaccatcagagtgcag

SEQ ID NO: 1086561 - DNA, 25 bp, Homo sapien
atgaattgtaccataggcattagag

SEQ ID NO: 1086562 - DNA, 25 bp, Homo sapien
gccataaaattccccatgatgaatt

SEQ ID NO: 1086563 - DNA, 25 bp, Homo sapien
gatgaattgtaccataggcattaga

SEQ ID NO: 1086564 - DNA, 25 bp, Homo sapien
aaaattccccatgatgaattgtacc

SEQ ID NO: 1086565 - DNA, 25 bp, Homo sapien
catgctgttgtgtaagatgccttta

SEQ ID NO: 1086566 - DNA, 25 bp, Homo sapien
catccagggatgagtaatgattaca

SEQ ID NO: 1086567 - DNA, 25 bp, Homo sapien
agatgcctttaaacattcagcatcc

SEQ ID NO: 1086568 - DNA, 25 bp, Homo sapien
ctgcctggtgtatagcaggataata

SEQ ID NO: 1086569 - DNA, 25 bp, Homo sapien
agttgagtgtctccgccagaaactc

SEQ ID NO: 1086570 - DNA, 25 bp, Homo sapien
gagtgtctccgccagaaactccttg

SEQ ID NO: 1086571 - DNA, 25 bp, Homo sapien
acaagttgagtgtctccgccagaaa

SEQ ID NO: 1086572 - DNA, 25 bp, Homo sapien
gtgtctccgccagaaactccttgtc

SEQ ID NO: 1086573 - DNA, 25 bp, Homo sapien
tgtcctccagagaagcttttgcttc

SEQ ID NO: 1086574 - DNA, 25 bp, Homo sapien
agcttcccattagaattcctggaca

SEQ ID NO: 1086575 - DNA, 25 bp, Homo sapien
gcttcccattagaattcctggacat

SEQ ID NO: 1086576 - DNA, 25 bp, Homo sapien
cctggttttggtgtaactgcagctc

SEQ ID NO: 1086577 - DNA, 25 bp, Homo sapien
ttgacctggttttggtgtaactgca

SEQ ID NO: 1086578 - DNA, 25 bp, Homo sapien
ctaggttttaggcttacttgacctg

SEQ ID NO: 1086579 - DNA, 25 bp, Homo sapien
tggttttggtgtaactgcagctcct

SEQ ID NO: 1086580 - DNA, 25 bp, Homo sapien
agctcgacagctgcaggcagtagat

SEQ ID NO: 1086581 - DNA, 25 bp, Homo sapien
ggagctcgacagctgcaggcagtag

SEQ ID NO: 1086582 - DNA, 25 bp, Homo sapien
gagctcgacagctgcaggcagtaga

SEQ ID NO: 1086583 - DNA, 25 bp, Homo sapien
gctcgacagctgcaggcagtagatg

SEQ ID NO: 1086584 - DNA, 25 bp, Homo sapien
gtctggagactgatattcaaggggt

SEQ ID NO: 1086585 - DNA, 25 bp, Homo sapien
gctgtctggagactgatattcaagg

SEQ ID NO: 1086586 - DNA, 25 bp, Homo sapien
tctcctcaagatcctcgtctgcttc

SEQ ID NO: 1086587 - DNA, 25 bp, Homo sapien
ctggagactgatattcaaggggtat

SEQ ID NO: 1086588 - DNA, 25 bp, Homo sapien
cacggaatccatgggaagtagagac

SEQ ID NO: 1086589 - DNA, 25 bp, Homo sapien
tcacggaatccatgggaagtagaga

SEQ ID NO: 1086590 - DNA, 25 bp, Homo sapien
cttgactgacagaccctggactgtt

SEQ ID NO: 1086591 - DNA, 25 bp, Homo sapien
cagaccctggactgttcctgcccac

SEQ ID NO: 1086592 - DNA, 25 bp, Homo sapien
actgacagaccctggactgttcctg

SEQ ID NO: 1086593 - DNA, 25 bp, Homo sapien
agaccctggactgttcctgcccaca

SEQ ID NO: 1086594 - DNA, 25 bp, Homo sapien
agtctaacctttgaccctctgacct

SEQ ID NO: 1086595 - DNA, 25 bp, Homo sapien
tcttgagagtcctgggttaagggac

SEQ ID NO: 1086596 - DNA, 25 bp, Homo sapien
ctgacctctctggaaatgttcgcag

SEQ ID NO: 1086597 - DNA, 25 bp, Homo sapien
gcttgcatcatcttgagagtcctgg

SEQ ID NO: 1086598 - DNA, 25 bp, Homo sapien
tcctcagttaatgggcatggtgact

SEQ ID NO: 1086599 - DNA, 25 bp, Homo sapien
gaggtcagaatagatggcagtgttt

SEQ ID NO: 1086600 - DNA, 25 bp, Homo sapien
ttcttcatcctcagttaatgggcat

SEQ ID NO: 1086601 - DNA, 25 bp, Homo sapien
ttttccctgccatttgagtttagga

SEQ ID NO: 1086602 - DNA, 25 bp, Homo sapien
tttggatgacttcaaacctcaggtg

SEQ ID NO: 1086603 - DNA, 25 bp, Homo sapien
tggatgacttcaaacctcaggtgag

SEQ ID NO: 1086604 - DNA, 25 bp, Homo sapien
ttggatgacttcaaacctcaggtga

SEQ ID NO: 1086605 - DNA, 25 bp, Homo sapien
aactcattagtatcctagtgcagtg

SEQ ID NO: 1086606 - DNA, 25 bp, Homo sapien
gatggttgtgtgtctccgcatatgt

SEQ ID NO: 1086607 - DNA, 25 bp, Homo sapien
tgtcagtgtggagccaatagatggt

SEQ ID NO: 1086608 - DNA, 25 bp, Homo sapien
tttaacaccaactcagcaagagatc

SEQ ID NO: 1086609 - DNA, 25 bp, Homo sapien
ggtatgacctaaggcttcatcaaag

SEQ ID NO: 1086610 - DNA, 25 bp, Homo sapien
aaggcagaccaagcaggcaaggtca

SEQ ID NO: 1086611 - DNA, 25 bp, Homo sapien
ggagtactgctgatagggtatgacc

SEQ ID NO: 1086612 - DNA, 25 bp, Homo sapien
caaaggcagaccaagcaggcaaggt

SEQ ID NO: 1086613 - DNA, 25 bp, Homo sapien
tcagtgcctgttgtctgagagctgc

SEQ ID NO: 1086614 - DNA, 25 bp, Homo sapien
ccaagaatgcatcttctctgagaca

SEQ ID NO: 1086615 - DNA, 25 bp, Homo sapien
aaactccttgttctagaaaatacat

SEQ ID NO: 1086616 - DNA, 25 bp, Homo sapien
ggcagctgtggtaaactccttgttc

SEQ ID NO: 1086617 - DNA, 25 bp, Homo sapien
gagacaggcatcatgtgtccacaga

SEQ ID NO: 1086618 - DNA, 25 bp, Homo sapien
tctggtggaactctgtgattaatct

SEQ ID NO: 1086619 - DNA, 25 bp, Homo sapien
ggtctggtggaactctgtgattaat

SEQ ID NO: 1086620 - DNA, 25 bp, Homo sapien
tggaactctgtgattaatctgcctg

SEQ ID NO: 1086621 - DNA, 25 bp, Homo sapien
ggtggaactctgtgattaatctgcc

SEQ ID NO: 1086622 - DNA, 25 bp, Homo sapien
ctaatctaagacgataaatgccaca

SEQ ID NO: 1086623 - DNA, 25 bp, Homo sapien
tatggatatcacagtatagagatct

SEQ ID NO: 1086624 - DNA, 25 bp, Homo sapien
gagaagatgctatggatatcacagt

SEQ ID NO: 1086625 - DNA, 25 bp, Homo sapien
atctaagacgataaatgccacatga

SEQ ID NO: 1086626 - DNA, 25 bp, Homo sapien
taagtggttggaccaggaacagaaa

SEQ ID NO: 1086627 - DNA, 25 bp, Homo sapien
taattaagtggttggaccaggaaca

SEQ ID NO: 1086628 - DNA, 25 bp, Homo sapien
ttaagtggttggaccaggaacagaa

SEQ ID NO: 1086629 - DNA, 25 bp, Homo sapien
aattaagtggttggaccaggaacag

SEQ ID NO: 1086630 - DNA, 25 bp, Homo sapien
aagaatgaggatgagtttctgtatg

SEQ ID NO: 1086631 - DNA, 25 bp, Homo sapien
gaagaatgaggatgagtttctgtat

SEQ ID NO: 1086632 - DNA, 25 bp, Homo sapien
atgaggatgagtttctgtatggcca

SEQ ID NO: 1086633 - DNA, 25 bp, Homo sapien
gaatgaggatgagtttctgtatggc

SEQ ID NO: 1086634 - DNA, 25 bp, Homo sapien
ctggctaggagagtcctatgctcac

SEQ ID NO: 1086635 - DNA, 25 bp, Homo sapien
taggagagtcctatgctcacggagt

SEQ ID NO: 1086636 - DNA, 25 bp, Homo sapien
gctaggagagtcctatgctcacgga

SEQ ID NO: 1086637 - DNA, 25 bp, Homo sapien
aggagagtcctatgctcacggagtc

SEQ ID NO: 1086638 - DNA, 25 bp, Homo sapien
gagggagaggaatcttctaatgtgc

SEQ ID NO: 1086639 - DNA, 25 bp, Homo sapien
cacaagttttcagtgagggagagga

SEQ ID NO: 1086640 - DNA, 25 bp, Homo sapien
gccttctcacaagttttcagtgagg

SEQ ID NO: 1086641 - DNA, 25 bp, Homo sapien
tctaatgtgcaatctgcaagccatt

SEQ ID NO: 1086642 - DNA, 25 bp, Homo sapien
gggtgcattataggttggcctagta

SEQ ID NO: 1086643 - DNA, 25 bp, Homo sapien
gactttcccatcacgcaggaaggag

SEQ ID NO: 1086644 - DNA, 25 bp, Homo sapien
tattaactccgtagcacttctgtgc

SEQ ID NO: 1086645 - DNA, 25 bp, Homo sapien
tgaagccatccactcggctggtttt

SEQ ID NO: 1086646 - DNA, 25 bp, Homo sapien
taatgctcgttaagtccatgggcca

SEQ ID NO: 1086647 - DNA, 25 bp, Homo sapien
caaccgtctatatgttggtctaaga

SEQ ID NO: 1086648 - DNA, 25 bp, Homo sapien
tcatatatttggaagtcaaccgtct

SEQ ID NO: 1086649 - DNA, 25 bp, Homo sapien
tcaccctaccctagatttgatcaaa

SEQ ID NO: 1086650 - DNA, 25 bp, Homo sapien
gatcagtcgtcctgtaattcccagg

SEQ ID NO: 1086651 - DNA, 25 bp, Homo sapien
tctcttagatttactgccctgtttg

SEQ ID NO: 1086652 - DNA, 25 bp, Homo sapien
ccctgtttgttatccaccaaagctt

SEQ ID NO: 1086653 - DNA, 25 bp, Homo sapien
catacagctgtaaagtagatcagtc

SEQ ID NO: 1086654 - DNA, 25 bp, Homo sapien
tgatgacttgatctctgccctaaaa

SEQ ID NO: 1086655 - DNA, 25 bp, Homo sapien
tctggtctgacagtacctgatgact

SEQ ID NO: 1086656 - DNA, 25 bp, Homo sapien
ggcagatagcttcaagcatctggtc

SEQ ID NO: 1086657 - DNA, 25 bp, Homo sapien
gcttcaagcatctggtctgacagta

SEQ ID NO: 1086658 - DNA, 25 bp, Homo sapien
tgccatgtgtgtttgcattggaggt

SEQ ID NO: 1086659 - DNA, 25 bp, Homo sapien
gggcggatccagatgggaatcatat

SEQ ID NO: 1086660 - DNA, 25 bp, Homo sapien
catgtgtgtttgcattggaggtgaa

SEQ ID NO: 1086661 - DNA, 25 bp, Homo sapien
cagatgggaatcatatgcctgtgcc

SEQ ID NO: 1086662 - DNA, 25 bp, Homo sapien
acggtaataactctgcagtagctgg

SEQ ID NO: 1086663 - DNA, 25 bp, Homo sapien
tgcaatctgtttgcaaatagaagga

SEQ ID NO: 1086664 - DNA, 25 bp, Homo sapien
ttgactggggcgtagaatccagcag

SEQ ID NO: 1086665 - DNA, 25 bp, Homo sapien
agcagagatgatgacggtaataact

SEQ ID NO: 1086666 - DNA, 25 bp, Homo sapien
gcctggccagcttgtatccttcctg

SEQ ID NO: 1086667 - DNA, 25 bp, Homo sapien
ctgatttagcatgattgctgctgaa

SEQ ID NO: 1086668 - DNA, 25 bp, Homo sapien
ctggccagcttgtatccttcctggg

SEQ ID NO: 1086669 - DNA, 25 bp, Homo sapien
tcagggagtaagatgcagccctgat

SEQ ID NO: 1086670 - DNA, 25 bp, Homo sapien
ccagcagtaacaatgcactcttcct

SEQ ID NO: 1086671 - DNA, 25 bp, Homo sapien
cactcttccttaagtggattggagg

SEQ ID NO: 1086672 - DNA, 25 bp, Homo sapien
tagagttagcctgggagctcgcctt

SEQ ID NO: 1086673 - DNA, 25 bp, Homo sapien
gattatccagataaaggccagcagt

SEQ ID NO: 1086674 - DNA, 25 bp, Homo sapien
aaatgatgaattgtgctttgtccat

SEQ ID NO: 1086675 - DNA, 25 bp, Homo sapien
gaaatgatgaattgtgctttgtcca

SEQ ID NO: 1086676 - DNA, 25 bp, Homo sapien
gataatcactttcctgtgaagaaat

SEQ ID NO: 1086677 - DNA, 25 bp, Homo sapien
cttctgataatcactttcctgtgaa

SEQ ID NO: 1086678 - DNA, 25 bp, Homo sapien
tagttcattacttaaaatctcaatg

SEQ ID NO: 1086679 - DNA, 25 bp, Homo sapien
tcagtttgggtatctattagttcat

SEQ ID NO: 1086680 - DNA, 25 bp, Homo sapien
tttcagtttgggtatctattagttc

SEQ ID NO: 1086681 - DNA, 25 bp, Homo sapien
cattacttaaaatctcaatggaatc

SEQ ID NO: 1086682 - DNA, 25 bp, Homo sapien
cttcattcttaacatattgtctcca

SEQ ID NO: 1086683 - DNA, 25 bp, Homo sapien
taacatattgtctccactcaaactg

SEQ ID NO: 1086684 - DNA, 25 bp, Homo sapien
tcttaacatattgtctccactcaaa

SEQ ID NO: 1086685 - DNA, 25 bp, Homo sapien
tcattcttaacatattgtctccact

SEQ ID NO: 1086686 - DNA, 25 bp, Homo sapien
ttgtgtatcaatagtcctctcttac

SEQ ID NO: 1086687 - DNA, 25 bp, Homo sapien
tttcagtattgctatctgggagtta

SEQ ID NO: 1086688 - DNA, 25 bp, Homo sapien
tatcaatagtcctctcttaccttct

SEQ ID NO: 1086689 - DNA, 25 bp, Homo sapien
ttcagtattgctatctgggagttaa

SEQ ID NO: 1086690 - DNA, 25 bp, Homo sapien
cactgacccgttttagggaatacat

SEQ ID NO: 1086691 - DNA, 25 bp, Homo sapien
tgcactgacccgttttagggaatac

SEQ ID NO: 1086692 - DNA, 25 bp, Homo sapien
gcactgacccgttttagggaataca

SEQ ID NO: 1086693 - DNA, 25 bp, Homo sapien
ttgcactgacccgttttagggaata

SEQ ID NO: 1086694 - DNA, 25 bp, Homo sapien
ctggagcacagagtagagagccaga

SEQ ID NO: 1086695 - DNA, 25 bp, Homo sapien
ggagcacagagtagagagccagagt

SEQ ID NO: 1086696 - DNA, 25 bp, Homo sapien
tggagcacagagtagagagccagag

SEQ ID NO: 1086697 - DNA, 25 bp, Homo sapien
ggctgctgtaaccctgaattcaggc

SEQ ID NO: 1086698 - DNA, 25 bp, Homo sapien
ctaggacaggagttacaggaagcaa

SEQ ID NO: 1086699 - DNA, 25 bp, Homo sapien
ggacaggagttacaggaagcaatct

SEQ ID NO: 1086700 - DNA, 25 bp, Homo sapien
acaggagttacaggaagcaatctct

SEQ ID NO: 1086701 - DNA, 25 bp, Homo sapien
taggacaggagttacaggaagcaat

SEQ ID NO: 1086702 - DNA, 25 bp, Homo sapien
tcagtattttggttcatgaattgtt

SEQ ID NO: 1086703 - DNA, 25 bp, Homo sapien
ttactctgttgtccacaatattcct

SEQ ID NO: 1086704 - DNA, 25 bp, Homo sapien
tactctgttgtccacaatattcctt

SEQ ID NO: 1086705 - DNA, 25 bp, Homo sapien
agtattttggttcatgaattgttac

SEQ ID NO: 1086706 - DNA, 25 bp, Homo sapien
cgacttctagatgaccactctcttt

SEQ ID NO: 1086707 - DNA, 25 bp, Homo sapien
gatgaccactctctttcaaactcat

SEQ ID NO: 1086708 - DNA, 25 bp, Homo sapien
gaccactctctttcaaactcatgca

SEQ ID NO: 1086709 - DNA, 25 bp, Homo sapien
tctagatgaccactctctttcaaac

SEQ ID NO: 1086710 - DNA, 25 bp, Homo sapien
tgatgctccccaccaccgtggaatt

SEQ ID NO: 1086711 - DNA, 25 bp, Homo sapien
aaagcagggtagatacttctctgac

SEQ ID NO: 1086712 - DNA, 25 bp, Homo sapien
tcagactctgatacccaaccctggg

SEQ ID NO: 1086713 - DNA, 25 bp, Homo sapien
gaattctataccttgtactgctcca

SEQ ID NO: 1086714 - DNA, 25 bp, Homo sapien
catttgaaaccttcgacagtagact

SEQ ID NO: 1086715 - DNA, 25 bp, Homo sapien
atctcagaacttgaacataggtctt

SEQ ID NO: 1086716 - DNA, 25 bp, Homo sapien
ggtaagtgagatacaaaagaattct

SEQ ID NO: 1086717 - DNA, 25 bp, Homo sapien
tattcaagacaatacaaaacacatt

SEQ ID NO: 1086718 - DNA, 25 bp, Homo sapien
tcattcttctgtcactgaactcttg

SEQ ID NO: 1086719 - DNA, 25 bp, Homo sapien
cattcttctgtcactgaactcttga

SEQ ID NO: 1086720 - DNA, 25 bp, Homo sapien
tcactgaactcttgattctttcagc

SEQ ID NO: 1086721 - DNA, 25 bp, Homo sapien
tgaactcttgattctttcagcaaaa

SEQ ID NO: 1086722 - DNA, 25 bp, Homo sapien
tcttttgtttatctgacttggccat

SEQ ID NO: 1086723 - DNA, 25 bp, Homo sapien
tgccacttggtaaggtcagggacct

SEQ ID NO: 1086724 - DNA, 25 bp, Homo sapien
taagatataaggtgcaggtctccgg

SEQ ID NO: 1086725 - DNA, 25 bp, Homo sapien
accttgaggaatggtcgtggagaaa

SEQ ID NO: 1086726 - DNA, 25 bp, Homo sapien
gcttgatgactggatgggactaaga

SEQ ID NO: 1086727 - DNA, 25 bp, Homo sapien
ctgcttttcacacctgaacatttaa

SEQ ID NO: 1086728 - DNA, 25 bp, Homo sapien
gctgcttttcacacctgaacattta

SEQ ID NO: 1086729 - DNA, 25 bp, Homo sapien
cacacctgaacatttaaaaaatcct

SEQ ID NO: 1086730 - DNA, 25 bp, Homo sapien
ctttttcctctcctagaatgtagtt

SEQ ID NO: 1086731 - DNA, 25 bp, Homo sapien
ccctttttcctctcctagaatgtag

SEQ ID NO: 1086732 - DNA, 25 bp, Homo sapien
tacatgtcccctttttcctctccta

SEQ ID NO: 1086733 - DNA, 25 bp, Homo sapien
tttcctctcctagaatgtagtttcc

SEQ ID NO: 1086734 - DNA, 25 bp, Homo sapien
ccaccatttagtcttaattgatcta

SEQ ID NO: 1086735 - DNA, 25 bp, Homo sapien
tataccaccatttagtcttaattga

SEQ ID NO: 1086736 - DNA, 25 bp, Homo sapien
agtcttaattgatctaatgttttcc

SEQ ID NO: 1086737 - DNA, 25 bp, Homo sapien
taatattttataccaccatttagtc

SEQ ID NO: 1086738 - DNA, 25 bp, Homo sapien
ccacctctgctatgaatttttcatg

SEQ ID NO: 1086739 - DNA, 25 bp, Homo sapien
tttttcatgattcccctgacccagc

SEQ ID NO: 1086740 - DNA, 25 bp, Homo sapien
cttatggatgacttgaccacctctg

SEQ ID NO: 1086741 - DNA, 25 bp, Homo sapien
gaatttttcatgattcccctgaccc

SEQ ID NO: 1086742 - DNA, 25 bp, Homo sapien
tctgacacaccattacagactgctt

SEQ ID NO: 1086743 - DNA, 25 bp, Homo sapien
gttactggtagatttctgacacacc

SEQ ID NO: 1086744 - DNA, 25 bp, Homo sapien
taagggaaacattaggcagttactg

SEQ ID NO: 1086745 - DNA, 25 bp, Homo sapien
gcagttactggtagatttctgacac

SEQ ID NO: 1086746 - DNA, 25 bp, Homo sapien
gtaaacttgacaattgctgatgcaa

SEQ ID NO: 1086747 - DNA, 25 bp, Homo sapien
tggtgctctttccttcgttacagta

SEQ ID NO: 1086748 - DNA, 25 bp, Homo sapien
tttcatagcagagccattttggtgc

SEQ ID NO: 1086749 - DNA, 25 bp, Homo sapien
gctgatgcaattgtagacagtcgct

SEQ ID NO: 1086750 - DNA, 25 bp, Homo sapien
tggagaatggaagtctaagatcagg

SEQ ID NO: 1086751 - DNA, 25 bp, Homo sapien
gatcagggtgccagcatagttaagt

SEQ ID NO: 1086752 - DNA, 25 bp, Homo sapien
acttctggagaatggaagtctaaga

SEQ ID NO: 1086753 - DNA, 25 bp, Homo sapien
agatcagggtgccagcatagttaag

SEQ ID NO: 1086754 - DNA, 25 bp, Homo sapien
ttgtggccggtagctaaaccagtac

SEQ ID NO: 1086755 - DNA, 25 bp, Homo sapien
gtatagttctaaatacttacattag

SEQ ID NO: 1086756 - DNA, 25 bp, Homo sapien
tgtggccggtagctaaaccagtact

SEQ ID NO: 1086757 - DNA, 25 bp, Homo sapien
actgagagggcaatgtatagttcta

SEQ ID NO: 1086758 - DNA, 25 bp, Homo sapien
tttgtatatgaaatcccagccacat

SEQ ID NO: 1086759 - DNA, 25 bp, Homo sapien
tatgaaatcccagccacatgcaatt

SEQ ID NO: 1086760 - DNA, 25 bp, Homo sapien
gaaataatttgtatatgaaatccca

SEQ ID NO: 1086761 - DNA, 25 bp, Homo sapien
aatcccagccacatgcaatttaccc

SEQ ID NO: 1086762 - DNA, 25 bp, Homo sapien
tcttgtagttccctacagcgaccat

SEQ ID NO: 1086763 - DNA, 25 bp, Homo sapien
gtcttaatctttttggctggtgaag

SEQ ID NO: 1086764 - DNA, 25 bp, Homo sapien
tcttaatctttttggctggtgaagg

SEQ ID NO: 1086765 - DNA, 25 bp, Homo sapien
aagatagtgcacttcaacatgctca

SEQ ID NO: 1086766 - DNA, 25 bp, Homo sapien
ggacaagtgctagcccttgaggaag

SEQ ID NO: 1086767 - DNA, 25 bp, Homo sapien
gcccttgaggaagatagtgcacttc

SEQ ID NO: 1086768 - DNA, 25 bp, Homo sapien
gtggacaagtgctagcccttgagga

SEQ ID NO: 1086769 - DNA, 25 bp, Homo sapien
aggacatccaggtcagcaacatcat

SEQ ID NO: 1086770 - DNA, 25 bp, Homo sapien
ggacatccaggtcagcaacatcatc

SEQ ID NO: 1086771 - DNA, 25 bp, Homo sapien
gacatccaggtcagcaacatcatca

SEQ ID NO: 1086772 - DNA, 25 bp, Homo sapien
aaggacatccaggtcagcaacatca

SEQ ID NO: 1086773 - DNA, 25 bp, Homo sapien
ttgtcatccaccaggactatctcca

SEQ ID NO: 1086774 - DNA, 25 bp, Homo sapien
catgagaatgcagagcaccattgtc

SEQ ID NO: 1086775 - DNA, 25 bp, Homo sapien
caacagtatcctgtctgtcatggtg

SEQ ID NO: 1086776 - DNA, 25 bp, Homo sapien
ggactatctccactacatccacaag

SEQ ID NO: 1086777 - DNA, 25 bp, Homo sapien
ctctccagcaacttgtcctaatatc

SEQ ID NO: 1086778 - DNA, 25 bp, Homo sapien
cagcaacttgtcctaatatcccttg

SEQ ID NO: 1086779 - DNA, 25 bp, Homo sapien
agcaacttgtcctaatatcccttgc

SEQ ID NO: 1086780 - DNA, 25 bp, Homo sapien
tccagcaacttgtcctaatatccct

SEQ ID NO: 1086781 - DNA, 25 bp, Homo sapien
tctgttaatgagcagccctctactt

SEQ ID NO: 1086782 - DNA, 25 bp, Homo sapien
tttccagaagatagggactattggc

SEQ ID NO: 1086783 - DNA, 25 bp, Homo sapien
tggcttctaagatggactcaaccaa

SEQ ID NO: 1086784 - DNA, 25 bp, Homo sapien
gactcaaccaaattttctgttaatg

SEQ ID NO: 1086785 - DNA, 25 bp, Homo sapien
gctctctattgctaggctccttttc

SEQ ID NO: 1086786 - DNA, 25 bp, Homo sapien
tctctattgctaggctccttttctc

SEQ ID NO: 1086787 - DNA, 25 bp, Homo sapien
gatggctctctattgctaggctcct

SEQ ID NO: 1086788 - DNA, 25 bp, Homo sapien
ggaagatggctctctattgctaggc

SEQ ID NO: 1086789 - DNA, 25 bp, Homo sapien
ggttggatgggtatgtgtgattgag

SEQ ID NO: 1086790 - DNA, 25 bp, Homo sapien
aggttggatgggtatgtgtgattga

SEQ ID NO: 1086791 - DNA, 25 bp, Homo sapien
tagagatgctgccaattagtcttgt

SEQ ID NO: 1086792 - DNA, 25 bp, Homo sapien
tattagagatgctgccaattagtct

SEQ ID NO: 1086793 - DNA, 25 bp, Homo sapien
agatgctgccaattagtcttgttat

SEQ ID NO: 1086794 - DNA, 25 bp, Homo sapien
ctatgagcagtattagagatgctgc

SEQ ID NO: 1086795 - DNA, 25 bp, Homo sapien
tttgacttctatcccagtctgcctc

SEQ ID NO: 1086796 - DNA, 25 bp, Homo sapien
taaatctgctactgatgggttttga

SEQ ID NO: 1086797 - DNA, 25 bp, Homo sapien
gggttttgacttctatcccagtctg

SEQ ID NO: 1086798 - DNA, 25 bp, Homo sapien
ccagcagttaaatctgctactgatg

SEQ ID NO: 1086799 - DNA, 25 bp, Homo sapien
cttgaggtaagagatctcaaagagc

SEQ ID NO: 1086800 - DNA, 25 bp, Homo sapien
ccttgaggtaagagatctcaaagag

SEQ ID NO: 1086801 - DNA, 25 bp, Homo sapien
ggtagagggcaggcatgagtagagg

SEQ ID NO: 1086802 - DNA, 25 bp, Homo sapien
aggtagagggcaggcatgagtagag

SEQ ID NO: 1086803 - DNA, 25 bp, Homo sapien
gcaggtagagggcaggcatgagtag

SEQ ID NO: 1086804 - DNA, 25 bp, Homo sapien
caggtagagggcaggcatgagtaga

SEQ ID NO: 1086805 - DNA, 25 bp, Homo sapien
tcctccaatgcagtgtgggtggtcc

SEQ ID NO: 1086806 - DNA, 25 bp, Homo sapien
tggcgcggacttcaggaggtcgggc

SEQ ID NO: 1086807 - DNA, 25 bp, Homo sapien
tttggtaaccaatgtcctacagaga

SEQ ID NO: 1086808 - DNA, 25 bp, Homo sapien
ttacatcatagtacagggccctctg

SEQ ID NO: 1086809 - DNA, 25 bp, Homo sapien
ctgagtagtaaatttgctgtgaaga

SEQ ID NO: 1086810 - DNA, 25 bp, Homo sapien
taagactgagtagtaaatttgctgt

SEQ ID NO: 1086811 - DNA, 25 bp, Homo sapien
tgctgtgaagaattaagactgagta

SEQ ID NO: 1086812 - DNA, 25 bp, Homo sapien
tgtgaagaattaagactgagtagta

SEQ ID NO: 1086813 - DNA, 25 bp, Homo sapien
gaactgacagtttgactttgggtct

SEQ ID NO: 1086814 - DNA, 25 bp, Homo sapien
tgacagtttgactttgggtctagtt

SEQ ID NO: 1086815 - DNA, 25 bp, Homo sapien
tttagaactgacagtttgactttgg

SEQ ID NO: 1086816 - DNA, 25 bp, Homo sapien
ttgctttagaactgacagtttgact

SEQ ID NO: 1086817 - DNA, 25 bp, Homo sapien
tgctcctgaacaggcatcttcaaag

SEQ ID NO: 1086818 - DNA, 25 bp, Homo sapien
tctaggctctcacaactccattccc

SEQ ID NO: 1086819 - DNA, 25 bp, Homo sapien
agcactgccaggctctctaggctct

SEQ ID NO: 1086820 - DNA, 25 bp, Homo sapien
atcttcaaaggcatcaaggctgcca

SEQ ID NO: 1086821 - DNA, 25 bp, Homo sapien
ggtgatgttgggtaagtgctgagct

SEQ ID NO: 1086822 - DNA, 25 bp, Homo sapien
tagagcatttaggtctggcttctcc

SEQ ID NO: 1086823 - DNA, 25 bp, Homo sapien
tctcttttacataggttttctgtag

SEQ ID NO: 1086824 - DNA, 25 bp, Homo sapien
ttgggtaagtgctgagctgtgacta

SEQ ID NO: 1086825 - DNA, 25 bp, Homo sapien
cataaggtctctgtcctgtatgcgt

SEQ ID NO: 1086826 - DNA, 25 bp, Homo sapien
attcataaggtctctgtcctgtatg

SEQ ID NO: 1086827 - DNA, 25 bp, Homo sapien
tcataaggtctctgtcctgtatgcg

SEQ ID NO: 1086828 - DNA, 25 bp, Homo sapien
taaggtctctgtcctgtatgcgtac

SEQ ID NO: 1086829 - DNA, 25 bp, Homo sapien
tgctggatcagtggggcaatttggt

SEQ ID NO: 1086830 - DNA, 25 bp, Homo sapien
caatttggttgaaggtcccctcaca

SEQ ID NO: 1086831 - DNA, 25 bp, Homo sapien
gattctctggtgtttggtaagtgcc

SEQ ID NO: 1086832 - DNA, 25 bp, Homo sapien
cctcacactgagtgcatttataggg

SEQ ID NO: 1086833 - DNA, 25 bp, Homo sapien
gtttgtgtgagttcacttgtgttgg

SEQ ID NO: 1086834 - DNA, 25 bp, Homo sapien
tgtttgtgtgagttcacttgtgttg

SEQ ID NO: 1086835 - DNA, 25 bp, Homo sapien
ttgtttgtgtgagttcacttgtgtt

SEQ ID NO: 1086836 - DNA, 25 bp, Homo sapien
cttgtttgtgtgagttcacttgtgt

SEQ ID NO: 1086837 - DNA, 25 bp, Homo sapien
aggctttcccacacttgttgcactc

SEQ ID NO: 1086838 - DNA, 25 bp, Homo sapien
tcccacacttgttgcactcataggg

SEQ ID NO: 1086839 - DNA, 25 bp, Homo sapien
ccacacttgttgcactcatagggct

SEQ ID NO: 1086840 - DNA, 25 bp, Homo sapien
tttcccacacttgttgcactcatag

SEQ ID NO: 1086841 - DNA, 25 bp, Homo sapien
gtggattcgcaggtgctgggtgagg

SEQ ID NO: 1086842 - DNA, 25 bp, Homo sapien
agtgtggattcgcaggtgctgggtg

SEQ ID NO: 1086843 - DNA, 25 bp, Homo sapien
tggattcgcaggtgctgggtgaggt

SEQ ID NO: 1086844 - DNA, 25 bp, Homo sapien
cccagtgtggattcgcaggtgctgg

SEQ ID NO: 1086845 - DNA, 25 bp, Homo sapien
cccgtgtaaatcctctgatgctcag

SEQ ID NO: 1086846 - DNA, 25 bp, Homo sapien
gactcactgcactcacagggctttt

SEQ ID NO: 1086847 - DNA, 25 bp, Homo sapien
tgatgctcagtcaggaatgtgctct

SEQ ID NO: 1086848 - DNA, 25 bp, Homo sapien
tttcccagactcactgcactcacag

SEQ ID NO: 1086849 - DNA, 25 bp, Homo sapien
gctggctaagtgaggagccgtggct

SEQ ID NO: 1086850 - DNA, 25 bp, Homo sapien
ctgctggctaagtgaggagccgtgg

SEQ ID NO: 1086851 - DNA, 25 bp, Homo sapien
ggctaagtgaggagccgtggctgaa

SEQ ID NO: 1086852 - DNA, 25 bp, Homo sapien
gtgaggagccgtggctgaaggtttt

SEQ ID NO: 1086853 - DNA, 25 bp, Homo sapien
gcttctctcctgtgtgcatccgctc

SEQ ID NO: 1086854 - DNA, 25 bp, Homo sapien
ggcttctctcctgtgtgcatccgct

SEQ ID NO: 1086855 - DNA, 25 bp, Homo sapien
tgcagtcgaacggcttctctcctgt

SEQ ID NO: 1086856 - DNA, 25 bp, Homo sapien
aacggcttctctcctgtgtgcatcc

SEQ ID NO: 1086857 - DNA, 25 bp, Homo sapien
atttgctggtgtgtgaggtttgtgc

SEQ ID NO: 1086858 - DNA, 25 bp, Homo sapien
tgtgtgaggtttgtgctctgccaga

SEQ ID NO: 1086859 - DNA, 25 bp, Homo sapien
gaggtttgtgctctgccagaaggaa

SEQ ID NO: 1086860 - DNA, 25 bp, Homo sapien
gatttgctggtgtgtgaggtttgtg

SEQ ID NO: 1086861 - DNA, 25 bp, Homo sapien
ggtgctgtgtgtaaaggtctttcca

SEQ ID NO: 1086862 - DNA, 25 bp, Homo sapien
cacacttattgaacccatagggctt

SEQ ID NO: 1086863 - DNA, 25 bp, Homo sapien
tgtgtccttttgtgctggctgagtg

SEQ ID NO: 1086864 - DNA, 25 bp, Homo sapien
agctctggctacactggttacattc

SEQ ID NO: 1086865 - DNA, 25 bp, Homo sapien
gatgaaaatagagaagtccaagatc

SEQ ID NO: 1086866 - DNA, 25 bp, Homo sapien
gtgcgatgaaaatagagaagtccaa

SEQ ID NO: 1086867 - DNA, 25 bp, Homo sapien
tccccacaactgtgcgatgaaaata

SEQ ID NO: 1086868 - DNA, 25 bp, Homo sapien
tggaaaattgtatgcaaactcccct

SEQ ID NO: 1086869 - DNA, 25 bp, Homo sapien
ttcctttcatagtctgaactaccct

SEQ ID NO: 1086870 - DNA, 25 bp, Homo sapien
tagtctgaactaccctggaccataa

SEQ ID NO: 1086871 - DNA, 25 bp, Homo sapien
taccctggaccataatctgaaccat

SEQ ID NO: 1086872 - DNA, 25 bp, Homo sapien
gaactaccctggaccataatctgaa

SEQ ID NO: 1086873 - DNA, 25 bp, Homo sapien
tccttgccaggtgctgatcaaaact

SEQ ID NO: 1086874 - DNA, 25 bp, Homo sapien
ctgcgaaatccttgccaggtgctga

SEQ ID NO: 1086875 - DNA, 25 bp, Homo sapien
aaatccttgccaggtgctgatcaaa

SEQ ID NO: 1086876 - DNA, 25 bp, Homo sapien
tgatcaaaacttttcaaaaggctca

SEQ ID NO: 1086877 - DNA, 25 bp, Homo sapien
gaggtttagaagctttcacacaaaa

SEQ ID NO: 1086878 - DNA, 25 bp, Homo sapien
aaaatataattggtacttgatctcc

SEQ ID NO: 1086879 - DNA, 25 bp, Homo sapien
taaagaagaggtttagaagctttca

SEQ ID NO: 1086880 - DNA, 25 bp, Homo sapien
tcacacaaaatataattggtacttg

SEQ ID NO: 1086881 - DNA, 25 bp, Homo sapien
gctgctttgcaatgtgcagtctttc

SEQ ID NO: 1086882 - DNA, 25 bp, Homo sapien
tcaaagctgctttgcaatgtgcagt

SEQ ID NO: 1086883 - DNA, 25 bp, Homo sapien
caaagctgctttgcaatgtgcagtc

SEQ ID NO: 1086884 - DNA, 25 bp, Homo sapien
aagctgctttgcaatgtgcagtctt

SEQ ID NO: 1086885 - DNA, 25 bp, Homo sapien
ttagctcagactcttcttgggcagg

SEQ ID NO: 1086886 - DNA, 25 bp, Homo sapien
ccacctagtggagatactgggctct

SEQ ID NO: 1086887 - DNA, 25 bp, Homo sapien
tggaccttcaggtaccccagtgagg

SEQ ID NO: 1086888 - DNA, 25 bp, Homo sapien
tgaaaacttgtctcaggctccaagc

SEQ ID NO: 1086889 - DNA, 25 bp, Homo sapien
caaccgtaggtatcagagagctcat

SEQ ID NO: 1086890 - DNA, 25 bp, Homo sapien
tcagttgaagacgagtaacccaggc

SEQ ID NO: 1086891 - DNA, 25 bp, Homo sapien
gataacggcgtgtcactactgaaag

SEQ ID NO: 1086892 - DNA, 25 bp, Homo sapien
gcaccacgctgcactatggagtata

SEQ ID NO: 1086893 - DNA, 25 bp, Homo sapien
tgtggctatagatgcccatcaaggg

SEQ ID NO: 1086894 - DNA, 25 bp, Homo sapien
gaagtttatgccatgaagggtcaca

SEQ ID NO: 1086895 - DNA, 25 bp, Homo sapien
tgagaatcgcaaggtagagcagagt

SEQ ID NO: 1086896 - DNA, 25 bp, Homo sapien
tgtggccacaggagtaaatgagaac

SEQ ID NO: 1086897 - DNA, 25 bp, Homo sapien
tggctggcttttgttgaagacctct

SEQ ID NO: 1086898 - DNA, 25 bp, Homo sapien
aactggtggcttatatacaacggaa

SEQ ID NO: 1086899 - DNA, 25 bp, Homo sapien
tactattcttcttgagggctccacc

SEQ ID NO: 1086900 - DNA, 25 bp, Homo sapien
ctatatgaagtgttttcgctcaggc

SEQ ID NO: 1086901 - DNA, 25 bp, Homo sapien
tccctcctttaggaactgtgctctt

SEQ ID NO: 1086902 - DNA, 25 bp, Homo sapien
ttctcattccctcctttaggaactg

SEQ ID NO: 1086903 - DNA, 25 bp, Homo sapien
cattccctcctttaggaactgtgct

SEQ ID NO: 1086904 - DNA, 25 bp, Homo sapien
tcattccctcctttaggaactgtgc

SEQ ID NO: 1086905 - DNA, 25 bp, Homo sapien
tttaactccatctccttccagatcc

SEQ ID NO: 1086906 - DNA, 25 bp, Homo sapien
taactccatctccttccagatccct

SEQ ID NO: 1086907 - DNA, 25 bp, Homo sapien
ttctttaactccatctccttccaga

SEQ ID NO: 1086908 - DNA, 25 bp, Homo sapien
actccatctccttccagatccctga

SEQ ID NO: 1086909 - DNA, 25 bp, Homo sapien
gagcgtgtatgagagggaggtgaac

SEQ ID NO: 1086910 - DNA, 25 bp, Homo sapien
gggaggtgaacagggcacatgcaga

SEQ ID NO: 1086911 - DNA, 25 bp, Homo sapien
gagggaggtgaacagggcacatgca

SEQ ID NO: 1086912 - DNA, 25 bp, Homo sapien
cttagttggagagcgtgtatgagag

SEQ ID NO: 1086913 - DNA, 25 bp, Homo sapien
gcttataattatggatcttgttgga

SEQ ID NO: 1086914 - DNA, 25 bp, Homo sapien
tgtcttaaagggtaactggcctgag

SEQ ID NO: 1086915 - DNA, 25 bp, Homo sapien
taactggcctgagtttctgccagat

SEQ ID NO: 1086916 - DNA, 25 bp, Homo sapien
ccatcagagaagctggcttataatt

SEQ ID NO: 1086917 - DNA, 25 bp, Homo sapien
cactcctcccctgtcccgccctgtt

SEQ ID NO: 1086918 - DNA, 25 bp, Homo sapien
ttgatttgccacactcctcccctgt

SEQ ID NO: 1086919 - DNA, 25 bp, Homo sapien
ctcccctgtcccgccctgtttctct

SEQ ID NO: 1086920 - DNA, 25 bp, Homo sapien
ctgaggatttgatttgccacactcc

SEQ ID NO: 1086921 - DNA, 25 bp, Homo sapien
ttcacacaaaggcattacaagctca

SEQ ID NO: 1086922 - DNA, 25 bp, Homo sapien
gggcacctgtgtttctttgttcatc

SEQ ID NO: 1086923 - DNA, 25 bp, Homo sapien
cattgtgcacctcagttataagggc

SEQ ID NO: 1086924 - DNA, 25 bp, Homo sapien
tcttccttggaaaggcaattcctgt

SEQ ID NO: 1086925 - DNA, 25 bp, Homo sapien
gcggcgggcgggaagacgtccgcag

SEQ ID NO: 1086926 - DNA, 25 bp, Homo sapien
aagacgtccgcagagtctcaccgct

SEQ ID NO: 1086927 - DNA, 25 bp, Homo sapien
tggttcttgaggcgcatcttccccg

SEQ ID NO: 1086928 - DNA, 25 bp, Homo sapien
ttgaggcgcatcttccccgccgggc

SEQ ID NO: 1086929 - DNA, 25 bp, Homo sapien
tcgggaccctgatcgcccgaagctg

SEQ ID NO: 1086930 - DNA, 25 bp, Homo sapien
gttcaacaaagccacctcgaggaca

SEQ ID NO: 1086931 - DNA, 25 bp, Homo sapien
tttttggcgccaccaggacgttcaa

SEQ ID NO: 1086932 - DNA, 25 bp, Homo sapien
tgaggatccaagtccgcgcgcccag

SEQ ID NO: 1086933 - DNA, 25 bp, Homo sapien
aaaatctcacctgtttcatattctg

SEQ ID NO: 1086934 - DNA, 25 bp, Homo sapien
taaaatctcacctgtttcatattct

SEQ ID NO: 1086935 - DNA, 25 bp, Homo sapien
ttaaaatctcacctgtttcatattc

SEQ ID NO: 1086936 - DNA, 25 bp, Homo sapien
attaaaatctcacctgtttcatatt

SEQ ID NO: 1086937 - DNA, 25 bp, Homo sapien
tctgaatggtctccaggttctccat

SEQ ID NO: 1086938 - DNA, 25 bp, Homo sapien
ttctgaatggtctccaggttctcca

SEQ ID NO: 1086939 - DNA, 25 bp, Homo sapien
gttgcctggccactcttctgaatgg

SEQ ID NO: 1086940 - DNA, 25 bp, Homo sapien
ctcttctgaatggtctccaggttct

SEQ ID NO: 1086941 - DNA, 25 bp, Homo sapien
gggtgagcagactggttgggctgta

SEQ ID NO: 1086942 - DNA, 25 bp, Homo sapien
tgtaactccaagtctagtaactcca

SEQ ID NO: 1086943 - DNA, 25 bp, Homo sapien
ctggttgggctgtaactccaagtct

SEQ ID NO: 1086944 - DNA, 25 bp, Homo sapien
agtctagtaactccacagccaacac

SEQ ID NO: 1086945 - DNA, 25 bp, Homo sapien
cccttgtgagttggtaagcacaaga

SEQ ID NO: 1086946 - DNA, 25 bp, Homo sapien
gaacccttgtgagttggtaagcaca

SEQ ID NO: 1086947 - DNA, 25 bp, Homo sapien
ttgtgagttggtaagcacaagaagg

SEQ ID NO: 1086948 - DNA, 25 bp, Homo sapien
ctgaacccttgtgagttggtaagca

SEQ ID NO: 1086949 - DNA, 25 bp, Homo sapien
gctgtgtggacaaagcatgctcatg

SEQ ID NO: 1086950 - DNA, 25 bp, Homo sapien
agggagagagttatttgtccatagc

SEQ ID NO: 1086951 - DNA, 25 bp, Homo sapien
tgaggggctgccactctgatgtgtc

SEQ ID NO: 1086952 - DNA, 25 bp, Homo sapien
tcataaaacagtgagaaggcccagc

SEQ ID NO: 1086953 - DNA, 25 bp, Homo sapien
gaggctagagggagactgtgtgtct

SEQ ID NO: 1086954 - DNA, 25 bp, Homo sapien
aggctagagggagactgtgtgtctg

SEQ ID NO: 1086955 - DNA, 25 bp, Homo sapien
gctagagggagactgtgtgtctgtg

SEQ ID NO: 1086956 - DNA, 25 bp, Homo sapien
ggctagagggagactgtgtgtctgt

SEQ ID NO: 1086957 - DNA, 25 bp, Homo sapien
tctgtagagatgtaccctccactcc

SEQ ID NO: 1086958 - DNA, 25 bp, Homo sapien
ttcctctgtagagatgtaccctcca

SEQ ID NO: 1086959 - DNA, 25 bp, Homo sapien
tttcttcctctgtagagatgtaccc

SEQ ID NO: 1086960 - DNA, 25 bp, Homo sapien
tgtagagatgtaccctccactccct

SEQ ID NO: 1086961 - DNA, 25 bp, Homo sapien
tgagactagggctagagctcccact

SEQ ID NO: 1086962 - DNA, 25 bp, Homo sapien
gagactagggctagagctcccactt

SEQ ID NO: 1086963 - DNA, 25 bp, Homo sapien
gatgagactagggctagagctccca

SEQ ID NO: 1086964 - DNA, 25 bp, Homo sapien
aatgatgagactagggctagagctc

SEQ ID NO: 1086965 - DNA, 25 bp, Homo sapien
tcattacagtttggcagacggcaac

SEQ ID NO: 1086966 - DNA, 25 bp, Homo sapien
gactaccttgtaagtgagcttcgaa

SEQ ID NO: 1086967 - DNA, 25 bp, Homo sapien
gcacaattgttaagggaagtacttg

SEQ ID NO: 1086968 - DNA, 25 bp, Homo sapien
tgggccactctgctagcacaattgt

SEQ ID NO: 1086969 - DNA, 25 bp, Homo sapien
cttgagaccatccaaatagccctac

SEQ ID NO: 1086970 - DNA, 25 bp, Homo sapien
ctaggaaccttgagaccatccaaat

SEQ ID NO: 1086971 - DNA, 25 bp, Homo sapien
gaaccttgagaccatccaaatagcc

SEQ ID NO: 1086972 - DNA, 25 bp, Homo sapien
ggaaccttgagaccatccaaatagc

SEQ ID NO: 1086973 - DNA, 25 bp, Homo sapien
agcattttagtaagacgctgccagc

SEQ ID NO: 1086974 - DNA, 25 bp, Homo sapien
cacttacggtttcctgtaagcgtat

SEQ ID NO: 1086975 - DNA, 25 bp, Homo sapien
gcagatccacttacggtttcctgta

SEQ ID NO: 1086976 - DNA, 25 bp, Homo sapien
aaagcagatccacttacggtttcct

SEQ ID NO: 1086977 - DNA, 25 bp, Homo sapien
tctgatggccttgaactaattttgg

SEQ ID NO: 1086978 - DNA, 25 bp, Homo sapien
tccaaactgacacatggctgtgcct

SEQ ID NO: 1086979 - DNA, 25 bp, Homo sapien
tgaggtctaaacacttctgatggcc

SEQ ID NO: 1086980 - DNA, 25 bp, Homo sapien
cttcttctcttgctagacgtgagga

SEQ ID NO: 1086981 - DNA, 25 bp, Homo sapien
gaactcagcaatcagtaaagggact

SEQ ID NO: 1086982 - DNA, 25 bp, Homo sapien
tgctgccgtaaactagctatgtgac

SEQ ID NO: 1086983 - DNA, 25 bp, Homo sapien
tcccaagcatacaggataacagtgc

SEQ ID NO: 1086984 - DNA, 25 bp, Homo sapien
caaaagacgggtttgagcaccaatg

SEQ ID NO: 1086985 - DNA, 25 bp, Homo sapien
ggcagttccagagcattcacgtgca

SEQ ID NO: 1086986 - DNA, 25 bp, Homo sapien
tgtagccggctcattttcagtcgat

SEQ ID NO: 1086987 - DNA, 25 bp, Homo sapien
tccagagcattcacgtgcaacagca

SEQ ID NO: 1086988 - DNA, 25 bp, Homo sapien
ttcagtcgattagggcagttccaga

SEQ ID NO: 1086989 - DNA, 25 bp, Homo sapien
tgggctaggaaacagcagccggctg

SEQ ID NO: 1086990 - DNA, 25 bp, Homo sapien
atgggctaggaaacagcagccggct

SEQ ID NO: 1086991 - DNA, 25 bp, Homo sapien
gctaggaaacagcagccggctgaaa

SEQ ID NO: 1086992 - DNA, 25 bp, Homo sapien
ggctaggaaacagcagccggctgaa

SEQ ID NO: 1086993 - DNA, 25 bp, Homo sapien
cacacatcccaaaggttgcagatat

SEQ ID NO: 1086994 - DNA, 25 bp, Homo sapien
ccaaaggttgcagatatctcagcat

SEQ ID NO: 1086995 - DNA, 25 bp, Homo sapien
atcagtcagccccttgccaccatgc

SEQ ID NO: 1086996 - DNA, 25 bp, Homo sapien
catcccaaaggttgcagatatctca

SEQ ID NO: 1086997 - DNA, 25 bp, Homo sapien
cagtttcttgactcattaatgacaa

SEQ ID NO: 1086998 - DNA, 25 bp, Homo sapien
tgagcagtttcttgactcattaatg

SEQ ID NO: 1086999 - DNA, 25 bp, Homo sapien
cataaatgagcagtttcttgactca

SEQ ID NO: 1087000 - DNA, 25 bp, Homo sapien
gactcattaatgacaatttccctta

SEQ ID NO: 1087001 - DNA, 25 bp, Homo sapien
taagcttgctccgtgaactaggttc

SEQ ID NO: 1087002 - DNA, 25 bp, Homo sapien
tattatctcaagaatcaggcaggcg

SEQ ID NO: 1087003 - DNA, 25 bp, Homo sapien
ggcgagtctcccagtcatgcatgat

SEQ ID NO: 1087004 - DNA, 25 bp, Homo sapien
aatgcacaaatgtcctcagaggcct

SEQ ID NO: 1087005 - DNA, 25 bp, Homo sapien
tgaaattggctcgaagcttcccctt

SEQ ID NO: 1087006 - DNA, 25 bp, Homo sapien
ccccgattctaggatgtagataaga

SEQ ID NO: 1087007 - DNA, 25 bp, Homo sapien
catttatgggaccatctgtcagccg

SEQ ID NO: 1087008 - DNA, 25 bp, Homo sapien
tagataagaacaactgaacagagcc

SEQ ID NO: 1087009 - DNA, 25 bp, Homo sapien
agtgtggatgattgtaaagcaaatc

SEQ ID NO: 1087010 - DNA, 25 bp, Homo sapien
tattgggtctcgcagagcttcgact

SEQ ID NO: 1087011 - DNA, 25 bp, Homo sapien
caaatattgggtctcgcagagcttc

SEQ ID NO: 1087012 - DNA, 25 bp, Homo sapien
gggtctcgcagagcttcgactcttc

SEQ ID NO: 1087013 - DNA, 25 bp, Homo sapien
ttggcaaatattgggtctcgcagag

SEQ ID NO: 1087014 - DNA, 25 bp, Homo sapien
cagtgtgtcaaaagcggaaaggaac

SEQ ID NO: 1087015 - DNA, 25 bp, Homo sapien
tttgccgttttgactgcgcagtccc

SEQ ID NO: 1087016 - DNA, 25 bp, Homo sapien
gaaggaagcaacaactcaacacgcc

SEQ ID NO: 1087017 - DNA, 25 bp, Homo sapien
gaagaagatggaccctcacacagtg

SEQ ID NO: 1087018 - DNA, 25 bp, Homo sapien
cagctatcgctttcagttgggctgc

SEQ ID NO: 1087019 - DNA, 25 bp, Homo sapien
gggctgctcggtctaatcttatttg

SEQ ID NO: 1087020 - DNA, 25 bp, Homo sapien
tgttataacatctatgcagagcaaa

SEQ ID NO: 1087021 - DNA, 25 bp, Homo sapien
acaagcagccagacaaaggcaatcc

SEQ ID NO: 1087022 - DNA, 25 bp, Homo sapien
tcgtgtgtttagcatcctctggcca

SEQ ID NO: 1087023 - DNA, 25 bp, Homo sapien
tataaattaactgcctggtggccac

SEQ ID NO: 1087024 - DNA, 25 bp, Homo sapien
tggcccatcgactggacaatagtaa

SEQ ID NO: 1087025 - DNA, 25 bp, Homo sapien
tactgcattgcagcatttgccagcg

SEQ ID NO: 1087026 - DNA, 25 bp, Homo sapien
taaggaaagcctaagacaggtgcag

SEQ ID NO: 1087027 - DNA, 25 bp, Homo sapien
tatactgatacacacagagtctctc

SEQ ID NO: 1087028 - DNA, 25 bp, Homo sapien
tttggttactaacagactgcagggt

SEQ ID NO: 1087029 - DNA, 25 bp, Homo sapien
gaagggatggcttttagctcacaaa

SEQ ID NO: 1087030 - DNA, 25 bp, Homo sapien
taagagccctgacactgcgtaagtt

SEQ ID NO: 1087031 - DNA, 25 bp, Homo sapien
gaaagccagtgacctataaaagccc

SEQ ID NO: 1087032 - DNA, 25 bp, Homo sapien
cctataccggaaagatgcagaccca

SEQ ID NO: 1087033 - DNA, 25 bp, Homo sapien
tgtgaacatccaaagcaagctagct

SEQ ID NO: 1087034 - DNA, 25 bp, Homo sapien
agcacaaaaattacactgaccttat

SEQ ID NO: 1087035 - DNA, 25 bp, Homo sapien
ttaaggattcctttagggctctcag

SEQ ID NO: 1087036 - DNA, 25 bp, Homo sapien
tatttcctcaacacttctactgctt

SEQ ID NO: 1087037 - DNA, 25 bp, Homo sapien
aatacctttggtattagatacaaca

SEQ ID NO: 1087038 - DNA, 25 bp, Homo sapien
tcttcacccaacaaggaatgacagt

SEQ ID NO: 1087039 - DNA, 25 bp, Homo sapien
cgaagtgcaaacagaggaaacctcc

SEQ ID NO: 1087040 - DNA, 25 bp, Homo sapien
gaagattcaatgctacgaagtgcaa

SEQ ID NO: 1087041 - DNA, 25 bp, Homo sapien
catcttcgctgggtcatttctctgc

SEQ ID NO: 1087042 - DNA, 25 bp, Homo sapien
gaatctggacttgtgggaactgtac

SEQ ID NO: 1087043 - DNA, 25 bp, Homo sapien
ggaactgtactatctgtacccagtg

SEQ ID NO: 1087044 - DNA, 25 bp, Homo sapien
tggttactatgaggacaactttccc

SEQ ID NO: 1087045 - DNA, 25 bp, Homo sapien
cccagtgcatcaacagagataatta

SEQ ID NO: 1087046 - DNA, 25 bp, Homo sapien
taccaaatagtaagtctcagtaagt

SEQ ID NO: 1087047 - DNA, 25 bp, Homo sapien
cttctcacagcacattcaccagata

SEQ ID NO: 1087048 - DNA, 25 bp, Homo sapien
ccatgtctcctttactactacatat

SEQ ID NO: 1087049 - DNA, 25 bp, Homo sapien
tcaccagatattcagctctttgagg

SEQ ID NO: 1087050 - DNA, 25 bp, Homo sapien
caacagtagggaacaccgtggtgca

SEQ ID NO: 1087051 - DNA, 25 bp, Homo sapien
gaccgagggatctgtgtgagcaaca

SEQ ID NO: 1087052 - DNA, 25 bp, Homo sapien
ccgtggtgcagttctacagtggagc

SEQ ID NO: 1087053 - DNA, 25 bp, Homo sapien
gagatggctacaacccacagtgagt

SEQ ID NO: 1087054 - DNA, 25 bp, Homo sapien
ggcatagggagtggaaatgatttcc

SEQ ID NO: 1087055 - DNA, 25 bp, Homo sapien
ggtcacaactgataaagccaggatt

SEQ ID NO: 1087056 - DNA, 25 bp, Homo sapien
ccaggtagtcttgatcaaaagtctc

SEQ ID NO: 1087057 - DNA, 25 bp, Homo sapien
gctatcaccattacctagaacagtg

SEQ ID NO: 1087058 - DNA, 25 bp, Homo sapien
ttataaaacacgacataatatataa

SEQ ID NO: 1087059 - DNA, 25 bp, Homo sapien
tgaaattataaaacacgacataata

SEQ ID NO: 1087060 - DNA, 25 bp, Homo sapien
aattataaaacacgacataatatat

SEQ ID NO: 1087061 - DNA, 25 bp, Homo sapien
gaaattataaaacacgacataatat

SEQ ID NO: 1087062 - DNA, 25 bp, Homo sapien
tgacggttccagctcatcaagcaga

SEQ ID NO: 1087063 - DNA, 25 bp, Homo sapien
tgtgtgccacaaacaaggactcgtt

SEQ ID NO: 1087064 - DNA, 25 bp, Homo sapien
ttcagagtagggcattgacggttcc

SEQ ID NO: 1087065 - DNA, 25 bp, Homo sapien
tacaccacatgcaggtcaggcaagc

SEQ ID NO: 1087066 - DNA, 25 bp, Homo sapien
cagcagaacactcatggaaaggtag

SEQ ID NO: 1087067 - DNA, 25 bp, Homo sapien
ttccagttagcacaggagtccttcc

SEQ ID NO: 1087068 - DNA, 25 bp, Homo sapien
tattagatgcctactaggtgccggg

SEQ ID NO: 1087069 - DNA, 25 bp, Homo sapien
tctaaaagcctgtgacaccaagagg

SEQ ID NO: 1087070 - DNA, 25 bp, Homo sapien
aacaaaggaggtttgggatgagaat

SEQ ID NO: 1087071 - DNA, 25 bp, Homo sapien
tcaggatctgcccaatcacacaaca

SEQ ID NO: 1087072 - DNA, 25 bp, Homo sapien
gcccagtgcagggttcttgtacacc

SEQ ID NO: 1087073 - DNA, 25 bp, Homo sapien
gttttctggcggagatatagcctca

SEQ ID NO: 1087074 - DNA, 25 bp, Homo sapien
tgcagggttcttgtacacctgtcac

SEQ ID NO: 1087075 - DNA, 25 bp, Homo sapien
tacttttggcagtccttaactcctg

SEQ ID NO: 1087076 - DNA, 25 bp, Homo sapien
cggatcatcaccagggtcgtttata

SEQ ID NO: 1087077 - DNA, 25 bp, Homo sapien
caagagggaaggcttcagacgtgca

SEQ ID NO: 1087078 - DNA, 25 bp, Homo sapien
tgcagctgccggatcatcaccaggg

SEQ ID NO: 1087079 - DNA, 25 bp, Homo sapien
ggaaggcttcagacgtgcagctgcc

SEQ ID NO: 1087080 - DNA, 25 bp, Homo sapien
cagcatccaggatagatcattgagg

SEQ ID NO: 1087081 - DNA, 25 bp, Homo sapien
tgaggaggttcagttgacttcgaac

SEQ ID NO: 1087082 - DNA, 25 bp, Homo sapien
gacttcgaactctaatggatgtaca

SEQ ID NO: 1087083 - DNA, 25 bp, Homo sapien
cctcatttgaatagcaattaagaac

SEQ ID NO: 1087084 - DNA, 25 bp, Homo sapien
cacaggtccacctcctccaggaagg

SEQ ID NO: 1087085 - DNA, 25 bp, Homo sapien
tcacaggtccacctcctccaggaag

SEQ ID NO: 1087086 - DNA, 25 bp, Homo sapien
acaggtccacctcctccaggaaggc

SEQ ID NO: 1087087 - DNA, 25 bp, Homo sapien
caggttcatctttcgttttcagaca

SEQ ID NO: 1087088 - DNA, 25 bp, Homo sapien
gccagcacttgtccatgtgaacatc

SEQ ID NO: 1087089 - DNA, 25 bp, Homo sapien
ggttcatctttcgttttcagacacg

SEQ ID NO: 1087090 - DNA, 25 bp, Homo sapien
gtcaggttcatctttcgttttcaga

SEQ ID NO: 1087091 - DNA, 25 bp, Homo sapien
ttcttggcttcaggtcaactttagg

SEQ ID NO: 1087092 - DNA, 25 bp, Homo sapien
tcttggcttcaggtcaactttagga

SEQ ID NO: 1087093 - DNA, 25 bp, Homo sapien
tcccgaagagactcctgaattcttc

SEQ ID NO: 1087094 - DNA, 25 bp, Homo sapien
tcacaagtttgcaggattctatttc

SEQ ID NO: 1087095 - DNA, 25 bp, Homo sapien
tggttgcccctgtttgcatgggaga

SEQ ID NO: 1087096 - DNA, 25 bp, Homo sapien
cattgcttgtattggatgtcggacc

SEQ ID NO: 1087097 - DNA, 25 bp, Homo sapien
gcagagtagttgtattccagaataa

SEQ ID NO: 1087098 - DNA, 25 bp, Homo sapien
tgcagagtagttgtattccagaata

SEQ ID NO: 1087099 - DNA, 25 bp, Homo sapien
aataatctgctatccttagggcctg

SEQ ID NO: 1087100 - DNA, 25 bp, Homo sapien
tccagaataatctgctatccttagg

SEQ ID NO: 1087101 - DNA, 25 bp, Homo sapien
caaatgcagatcttcattaagcatt

SEQ ID NO: 1087102 - DNA, 25 bp, Homo sapien
tcaaatgcagatcttcattaagcat

SEQ ID NO: 1087103 - DNA, 25 bp, Homo sapien
ctcaaatgcagatcttcattaagca

SEQ ID NO: 1087104 - DNA, 25 bp, Homo sapien
aagagtatcttcaaaacgaacagac

SEQ ID NO: 1087105 - DNA, 25 bp, Homo sapien
tcaaagagtatcttcaaaacgaaca

SEQ ID NO: 1087106 - DNA, 25 bp, Homo sapien
agtatcttcaaaacgaacagacaga

SEQ ID NO: 1087107 - DNA, 25 bp, Homo sapien
gagtatcttcaaaacgaacagacag

SEQ ID NO: 1087108 - DNA, 25 bp, Homo sapien
ctaggacagttgctgattaattaaa

SEQ ID NO: 1087109 - DNA, 25 bp, Homo sapien
gacagttgctgattaattaaactgt

SEQ ID NO: 1087110 - DNA, 25 bp, Homo sapien
taggacagttgctgattaattaaac

SEQ ID NO: 1087111 - DNA, 25 bp, Homo sapien
aggacagttgctgattaattaaact

SEQ ID NO: 1087112 - DNA, 25 bp, Homo sapien
atcgagatgcattgagatctgtagg

SEQ ID NO: 1087113 - DNA, 25 bp, Homo sapien
aggatcgagatgcattgagatctgt

SEQ ID NO: 1087114 - DNA, 25 bp, Homo sapien
ggactaggatgttaaaaatcagggc

SEQ ID NO: 1087115 - DNA, 25 bp, Homo sapien
gactaggatgttaaaaatcagggca

SEQ ID NO: 1087116 - DNA, 25 bp, Homo sapien
tgcagaaaccctcacgagaaagacg

SEQ ID NO: 1087117 - DNA, 25 bp, Homo sapien
gacggaagctgaaaactgaagttcc

SEQ ID NO: 1087118 - DNA, 25 bp, Homo sapien
gaagctgaaaactgaagttcctgca

SEQ ID NO: 1087119 - DNA, 25 bp, Homo sapien
ccctcacgagaaagacggaagctga

SEQ ID NO: 1087120 - DNA, 25 bp, Homo sapien
cagtttccacagttaggaccaggat

SEQ ID NO: 1087121 - DNA, 25 bp, Homo sapien
tagagggtgatctgtgtccattgac

SEQ ID NO: 1087122 - DNA, 25 bp, Homo sapien
tggttgaggactagttccagtttcc

SEQ ID NO: 1087123 - DNA, 25 bp, Homo sapien
gagagtgacatttgagtttcctgtt

SEQ ID NO: 1087124 - DNA, 25 bp, Homo sapien
tgtacgcagataactgagcaaaact

SEQ ID NO: 1087125 - DNA, 25 bp, Homo sapien
aaccaattttcccaatgcatggagg

SEQ ID NO: 1087126 - DNA, 25 bp, Homo sapien
caagtaggatctgtggcattgtaat

SEQ ID NO: 1087127 - DNA, 25 bp, Homo sapien
cattcattatagaccggaatccaaa

SEQ ID NO: 1087128 - DNA, 25 bp, Homo sapien
ggtacaagttgtacaagtctggttc

SEQ ID NO: 1087129 - DNA, 25 bp, Homo sapien
tgtacaagtctggttctagctcact

SEQ ID NO: 1087130 - DNA, 25 bp, Homo sapien
gttctagctcactgtgtgagtagtc

SEQ ID NO: 1087131 - DNA, 25 bp, Homo sapien
gacacattttcatgttggtacaagt

SEQ ID NO: 1087132 - DNA, 25 bp, Homo sapien
catactaggttaattgcagccaact

SEQ ID NO: 1087133 - DNA, 25 bp, Homo sapien
tccatatcctgggactccttcactg

SEQ ID NO: 1087134 - DNA, 25 bp, Homo sapien
ctgagaggtctttcttgctttcagc

SEQ ID NO: 1087135 - DNA, 25 bp, Homo sapien
ggcagtaatccacatactaggttaa

SEQ ID NO: 1087136 - DNA, 25 bp, Homo sapien
gatcaatatagttaacaaatccata

SEQ ID NO: 1087137 - DNA, 25 bp, Homo sapien
ttggtctggagtctgagtccattta

SEQ ID NO: 1087138 - DNA, 25 bp, Homo sapien
ttggatcaatatagttaacaaatcc

SEQ ID NO: 1087139 - DNA, 25 bp, Homo sapien
tggttttggtctggagtctgagtcc

SEQ ID NO: 1087140 - DNA, 25 bp, Homo sapien
gatgctcagcctgtagtggacctgt

SEQ ID NO: 1087141 - DNA, 25 bp, Homo sapien
tcctgagacctctgtaatgtacgct

SEQ ID NO: 1087142 - DNA, 25 bp, Homo sapien
gaggcccttttgaagctaacttgag

SEQ ID NO: 1087143 - DNA, 25 bp, Homo sapien
ggacaactggtagatctggcaacaa

SEQ ID NO: 1087144 - DNA, 25 bp, Homo sapien
ggtaatagtacctcctgacagggct

SEQ ID NO: 1087145 - DNA, 25 bp, Homo sapien
tgtaaagcacctagctccagggata

SEQ ID NO: 1087146 - DNA, 25 bp, Homo sapien
gaatgcacgtgttgctgagcaagca

SEQ ID NO: 1087147 - DNA, 25 bp, Homo sapien
caagcaggcagtgtgacattccaac

SEQ ID NO: 1087148 - DNA, 25 bp, Homo sapien
tccccaaccccaatatcaaacagaa

SEQ ID NO: 1087149 - DNA, 25 bp, Homo sapien
ctccccaaccccaatatcaaacaga

SEQ ID NO: 1087150 - DNA, 25 bp, Homo sapien
gagaggacatggaaaacacgataaa

SEQ ID NO: 1087151 - DNA, 25 bp, Homo sapien
ggacatggaaaacacgataaaggca

SEQ ID NO: 1087152 - DNA, 25 bp, Homo sapien
gacatggaaaacacgataaaggcat

SEQ ID NO: 1087153 - DNA, 25 bp, Homo sapien
gaggacatggaaaacacgataaagg

SEQ ID NO: 1087154 - DNA, 25 bp, Homo sapien
ggtgggtaaagcaggcgttgtcatt

SEQ ID NO: 1087155 - DNA, 25 bp, Homo sapien
tcatcacagatggggcatcaggacg

SEQ ID NO: 1087156 - DNA, 25 bp, Homo sapien
caaggtgggtaaagcaggcgttgtc

SEQ ID NO: 1087157 - DNA, 25 bp, Homo sapien
gcatcaggacgagggctgagggctg

SEQ ID NO: 1087158 - DNA, 25 bp, Homo sapien
gaattactgcaacacatctccagag

SEQ ID NO: 1087159 - DNA, 25 bp, Homo sapien
tgaatgactacagtggtcaggccct

SEQ ID NO: 1087160 - DNA, 25 bp, Homo sapien
catgaaacctgtggcgtatggataa

SEQ ID NO: 1087161 - DNA, 25 bp, Homo sapien
gaatctctgaagacaagactggcat

SEQ ID NO: 1087162 - DNA, 25 bp, Homo sapien
ttaactcccattagttctgcacagc

SEQ ID NO: 1087163 - DNA, 25 bp, Homo sapien
tgcacagccagagctagggtacaga

SEQ ID NO: 1087164 - DNA, 25 bp, Homo sapien
ccagagctagggtacagagggaaca

SEQ ID NO: 1087165 - DNA, 25 bp, Homo sapien
agagctagggtacagagggaacagg

SEQ ID NO: 1087166 - DNA, 25 bp, Homo sapien
tgatgaagatcaagggcttagcaca

SEQ ID NO: 1087167 - DNA, 25 bp, Homo sapien
taaatgcataatggatagtcatgac

SEQ ID NO: 1087168 - DNA, 25 bp, Homo sapien
gagtcaggtaatggtggcctgataa

SEQ ID NO: 1087169 - DNA, 25 bp, Homo sapien
tcctctgtcacgaggacaaatgagg

SEQ ID NO: 1087170 - DNA, 25 bp, Homo sapien
caagatgtgtgtgttatgccaggga

SEQ ID NO: 1087171 - DNA, 25 bp, Homo sapien
cagacaacacataagaggcactcaa

SEQ ID NO: 1087172 - DNA, 25 bp, Homo sapien
gttgaacaaaagaatggatgagtaa

SEQ ID NO: 1087173 - DNA, 25 bp, Homo sapien
cagaccaattatcacagtgccacaa

SEQ ID NO: 1087174 - DNA, 25 bp, Homo sapien
gctaagagctaagggacatatttcc

SEQ ID NO: 1087175 - DNA, 25 bp, Homo sapien
tcaaatgacatcttctctaggcagc

SEQ ID NO: 1087176 - DNA, 25 bp, Homo sapien
taggactagacctcacatagaggcc

SEQ ID NO: 1087177 - DNA, 25 bp, Homo sapien
ggatctactatgagccaggtacagt

SEQ ID NO: 1087178 - DNA, 25 bp, Homo sapien
tgagtgactaatctgcctccctggc

SEQ ID NO: 1087179 - DNA, 25 bp, Homo sapien
tcttctagaaactcacgggtgggct

SEQ ID NO: 1087180 - DNA, 25 bp, Homo sapien
tggacagggcttcactccacagaag

SEQ ID NO: 1087181 - DNA, 25 bp, Homo sapien
taagaaccccatgtgactgtctgga

SEQ ID NO: 1087182 - DNA, 25 bp, Homo sapien
cataagacctattaagactgtaggg

SEQ ID NO: 1087183 - DNA, 25 bp, Homo sapien
gacaggaagagacctatatgcctta

SEQ ID NO: 1087184 - DNA, 25 bp, Homo sapien
agagcacatctgacaacgttggaca

SEQ ID NO: 1087185 - DNA, 25 bp, Homo sapien
tatgccttagcgtttttcagttgga

SEQ ID NO: 1087186 - DNA, 25 bp, Homo sapien
aagcaaagcaaaccccagcagtcat

SEQ ID NO: 1087187 - DNA, 25 bp, Homo sapien
tgtagcagtacacataagcaaagca

SEQ ID NO: 1087188 - DNA, 25 bp, Homo sapien
gcaagaagccaaatctgtagcagta

SEQ ID NO: 1087189 - DNA, 25 bp, Homo sapien
ccccaaaagctaacacagaagtgta

SEQ ID NO: 1087190 - DNA, 25 bp, Homo sapien
cagtcgcctctaactttgaagcagg

SEQ ID NO: 1087191 - DNA, 25 bp, Homo sapien
ctgcaaggaccagtcgcctctaact

SEQ ID NO: 1087192 - DNA, 25 bp, Homo sapien
ggaccagtcgcctctaactttgaag

SEQ ID NO: 1087193 - DNA, 25 bp, Homo sapien
gtcgcctctaactttgaagcagggc

SEQ ID NO: 1087194 - DNA, 25 bp, Homo sapien
acatctgcttgcgaaactggatatg

SEQ ID NO: 1087195 - DNA, 25 bp, Homo sapien
caggttctctgcaagatttttttat

SEQ ID NO: 1087196 - DNA, 25 bp, Homo sapien
tctgctctcaccaaatgacaaagtg

SEQ ID NO: 1087197 - DNA, 25 bp, Homo sapien
ctgcttgcgaaactggatatgtgac

SEQ ID NO: 1087198 - DNA, 25 bp, Homo sapien
ttgggaaggccgctaacatagaggt

SEQ ID NO: 1087199 - DNA, 25 bp, Homo sapien
tgtgacttgatcaaccaggattcgt

SEQ ID NO: 1087200 - DNA, 25 bp, Homo sapien
ggttagcatccctgattgaggcaga

SEQ ID NO: 1087201 - DNA, 25 bp, Homo sapien
gatacggccgtattgcgagaaaagt

SEQ ID NO: 1087202 - DNA, 25 bp, Homo sapien
tggtgaagtggacctgggtagcgcc

SEQ ID NO: 1087203 - DNA, 25 bp, Homo sapien
ttggcaaacttcacagtaatcggtt

SEQ ID NO: 1087204 - DNA, 25 bp, Homo sapien
tcggttccgtagcaccgctgggctt

SEQ ID NO: 1087205 - DNA, 25 bp, Homo sapien
cggatgaatcccacccctctggaca

SEQ ID NO: 1087206 - DNA, 25 bp, Homo sapien
ttacgccataggccatattaagcaa

SEQ ID NO: 1087207 - DNA, 25 bp, Homo sapien
ctttacgccataggccatattaagc

SEQ ID NO: 1087208 - DNA, 25 bp, Homo sapien
ctctttacgccataggccatattaa

SEQ ID NO: 1087209 - DNA, 25 bp, Homo sapien
acgccataggccatattaagcaaat

SEQ ID NO: 1087210 - DNA, 25 bp, Homo sapien
gtgccaacatggacatctggcaatc

SEQ ID NO: 1087211 - DNA, 25 bp, Homo sapien
tggcaatctgtggagttttaattac

SEQ ID NO: 1087212 - DNA, 25 bp, Homo sapien
aaaaaaattctagccccagtctgtg

SEQ ID NO: 1087213 - DNA, 25 bp, Homo sapien
tagccccagtctgtgccaacatgga

SEQ ID NO: 1087214 - DNA, 25 bp, Homo sapien
tggagatacgtgacaatgaacaggc

SEQ ID NO: 1087215 - DNA, 25 bp, Homo sapien
tatcactgaagcaagactgcaagtg

SEQ ID NO: 1087216 - DNA, 25 bp, Homo sapien
caggcctttcttgctattaaacaga

SEQ ID NO: 1087217 - DNA, 25 bp, Homo sapien
tttgcactcccttgacctacggttg

SEQ ID NO: 1087218 - DNA, 25 bp, Homo sapien
ggacaagcagaaggggggactggtc

SEQ ID NO: 1087219 - DNA, 25 bp, Homo sapien
cagaaggggggactggtccagacat

SEQ ID NO: 1087220 - DNA, 25 bp, Homo sapien
gaaggggggactggtccagacatca

SEQ ID NO: 1087221 - DNA, 25 bp, Homo sapien
aggggggactggtccagacatcagt

SEQ ID NO: 1087222 - DNA, 25 bp, Homo sapien
cacaaggcttgtcattccatcaatg

SEQ ID NO: 1087223 - DNA, 25 bp, Homo sapien
gaatcacctttacgttgttcactgc

SEQ ID NO: 1087224 - DNA, 25 bp, Homo sapien
ctcccaggcggtacccgttgaggct

SEQ ID NO: 1087225 - DNA, 25 bp, Homo sapien
gtcatggtgacaaagccgaatccct

SEQ ID NO: 1087226 - DNA, 25 bp, Homo sapien
taccagtgcagtatgaacgcgacaa

SEQ ID NO: 1087227 - DNA, 25 bp, Homo sapien
ggtaaaaatccctgcacatcgctat

SEQ ID NO: 1087228 - DNA, 25 bp, Homo sapien
tatatttgatctcggccataggcat

SEQ ID NO: 1087229 - DNA, 25 bp, Homo sapien
cataggcatcatcacatcggcgatt

SEQ ID NO: 1087230 - DNA, 25 bp, Homo sapien
taaaggaggagtctatgatgcagcc

SEQ ID NO: 1087231 - DNA, 25 bp, Homo sapien
gcaaactacgttcattcatagcagg

SEQ ID NO: 1087232 - DNA, 25 bp, Homo sapien
tagcaggtgacgtaaaaagctttcc

SEQ ID NO: 1087233 - DNA, 25 bp, Homo sapien
tcctgtctacatgcacttagtgggt

SEQ ID NO: 1087234 - DNA, 25 bp, Homo sapien
catttcatgaagtgtcagtttatgg

SEQ ID NO: 1087235 - DNA, 25 bp, Homo sapien
tcaactatatgaggtttagcctgac

SEQ ID NO: 1087236 - DNA, 25 bp, Homo sapien
gaatctgactatttgttcatctggc

SEQ ID NO: 1087237 - DNA, 25 bp, Homo sapien
ctccctaggttgagcttaaatcatg

SEQ ID NO: 1087238 - DNA, 25 bp, Homo sapien
tccaaagtatttgtgaactccctca

SEQ ID NO: 1087239 - DNA, 25 bp, Homo sapien
tgcctcctccaaagtatttgtgaac

SEQ ID NO: 1087240 - DNA, 25 bp, Homo sapien
tcctccaaagtatttgtgaactccc

SEQ ID NO: 1087241 - DNA, 25 bp, Homo sapien
ttgcctcctccaaagtatttgtgaa

SEQ ID NO: 1087242 - DNA, 25 bp, Homo sapien
aaatatttcagttgtgagtctctct

SEQ ID NO: 1087243 - DNA, 25 bp, Homo sapien
aatatttcagttgtgagtctctctg

SEQ ID NO: 1087244 - DNA, 25 bp, Homo sapien
tcacatcttcaatctccgggaacgt

SEQ ID NO: 1087245 - DNA, 25 bp, Homo sapien
acttgtcacatcttcaatctccggg

SEQ ID NO: 1087246 - DNA, 25 bp, Homo sapien
tgggaacttgtcacatcttcaatct

SEQ ID NO: 1087247 - DNA, 25 bp, Homo sapien
acgatgtgggaacttgtcacatctt

SEQ ID NO: 1087248 - DNA, 25 bp, Homo sapien
gatccatatcctcctttcttggtgg

SEQ ID NO: 1087249 - DNA, 25 bp, Homo sapien
ggcccagtagatgcttgctgcagtt

SEQ ID NO: 1087250 - DNA, 25 bp, Homo sapien
gctgcagtttccgtgatagatctcc

SEQ ID NO: 1087251 - DNA, 25 bp, Homo sapien
tggtggtggcccagtagatgcttgc

SEQ ID NO: 1087252 - DNA, 25 bp, Homo sapien
cttagcctcaatagtgggtgggttc

SEQ ID NO: 1087253 - DNA, 25 bp, Homo sapien
ttgggcttagcctcaatagtgggtg

SEQ ID NO: 1087254 - DNA, 25 bp, Homo sapien
ggtgggttctggaattaggctcaca

SEQ ID NO: 1087255 - DNA, 25 bp, Homo sapien
tctggaattaggctcacagcctgag

SEQ ID NO: 1087256 - DNA, 25 bp, Homo sapien
agtcagggatggtttcttcttgtgt

SEQ ID NO: 1087257 - DNA, 25 bp, Homo sapien
tcaggaacttgttcagtttgaaaag

SEQ ID NO: 1087258 - DNA, 25 bp, Homo sapien
tcttcttgtgtcgtggtgtctcaaa

SEQ ID NO: 1087259 - DNA, 25 bp, Homo sapien
caggaacttgttcagtttgaaaagg

SEQ ID NO: 1087260 - DNA, 25 bp, Homo sapien
atttgtatttgcactacacattcct

SEQ ID NO: 1087261 - DNA, 25 bp, Homo sapien
ggcgaggtcttcctaacggcatttg

SEQ ID NO: 1087262 - DNA, 25 bp, Homo sapien
gacagcaatttcctagcagtttcct

SEQ ID NO: 1087263 - DNA, 25 bp, Homo sapien
gaaacagcttcaagccagtgtgcag

SEQ ID NO: 1087264 - DNA, 25 bp, Homo sapien
tccaaatcaagccaagttccatagt

SEQ ID NO: 1087265 - DNA, 25 bp, Homo sapien
ccaagttccatagtaacggaccagc

SEQ ID NO: 1087266 - DNA, 25 bp, Homo sapien
caagccaagttccatagtaacggac

SEQ ID NO: 1087267 - DNA, 25 bp, Homo sapien
attaatttccaaatcaagccaagtt

SEQ ID NO: 1087268 - DNA, 25 bp, Homo sapien
tcgcagcaggaatatgaactgggca

SEQ ID NO: 1087269 - DNA, 25 bp, Homo sapien
ggttgcatagcaaccggccgagcag

SEQ ID NO: 1087270 - DNA, 25 bp, Homo sapien
cccgcggcgctgtcgttggttgcat

SEQ ID NO: 1087271 - DNA, 25 bp, Homo sapien
ggtgacgatttgcaaatttagatac

SEQ ID NO: 1087272 - DNA, 25 bp, Homo sapien
tcagattaggggaaggggtagcaaa

SEQ ID NO: 1087273 - DNA, 25 bp, Homo sapien
gggtctgaatttggatggagccctt

SEQ ID NO: 1087274 - DNA, 25 bp, Homo sapien
tactcttagaaagttgggggtctga

SEQ ID NO: 1087275 - DNA, 25 bp, Homo sapien
ggagcccttagatgcagaaggaaag

SEQ ID NO: 1087276 - DNA, 25 bp, Homo sapien
tattgtgaagtggttctgcagagac

SEQ ID NO: 1087277 - DNA, 25 bp, Homo sapien
gttttgagctcagtgaaagcaggat

SEQ ID NO: 1087278 - DNA, 25 bp, Homo sapien
ttgtgaagtggttctgcagagacag

SEQ ID NO: 1087279 - DNA, 25 bp, Homo sapien
cctgggacttggttttgagctcagt

SEQ ID NO: 1087280 - DNA, 25 bp, Homo sapien
tttctccatgggtgcttgaaatctg

SEQ ID NO: 1087281 - DNA, 25 bp, Homo sapien
tggcctacagttgattagcatcctc

SEQ ID NO: 1087282 - DNA, 25 bp, Homo sapien
tctccatgggtgcttgaaatctgca

SEQ ID NO: 1087283 - DNA, 25 bp, Homo sapien
tgcaggcttggcctacagttgatta

SEQ ID NO: 1087284 - DNA, 25 bp, Homo sapien
gcctcccacaggttaggccccactg

SEQ ID NO: 1087285 - DNA, 25 bp, Homo sapien
acaggttaggccccactgtaggtgg

SEQ ID NO: 1087286 - DNA, 25 bp, Homo sapien
gtgcctcccacaggttaggccccac

SEQ ID NO: 1087287 - DNA, 25 bp, Homo sapien
cacaggttaggccccactgtaggtg

SEQ ID NO: 1087288 - DNA, 25 bp, Homo sapien
ggagactgcgtcattctctctgggc

SEQ ID NO: 1087289 - DNA, 25 bp, Homo sapien
gaagctttatggagatggtcacact

SEQ ID NO: 1087290 - DNA, 25 bp, Homo sapien
agcccacttgttggaactttccaga

SEQ ID NO: 1087291 - DNA, 25 bp, Homo sapien
cttttgtggcggctatgacagcgtc

SEQ ID NO: 1087292 - DNA, 25 bp, Homo sapien
ctgtaagggcaaatcataaactcta

SEQ ID NO: 1087293 - DNA, 25 bp, Homo sapien
tgtaagggcaaatcataaactctaa

SEQ ID NO: 1087294 - DNA, 25 bp, Homo sapien
aagctgcaaggtccattgcccaaac

SEQ ID NO: 1087295 - DNA, 25 bp, Homo sapien
gaagccagtggtaagttcaccaccc

SEQ ID NO: 1087296 - DNA, 25 bp, Homo sapien
tgcaaggtccattgcccaaacctgt

SEQ ID NO: 1087297 - DNA, 25 bp, Homo sapien
cagtggtaagttcaccacccacggg

SEQ ID NO: 1087298 - DNA, 25 bp, Homo sapien
tagccagagcgagcagtaatccatc

SEQ ID NO: 1087299 - DNA, 25 bp, Homo sapien
tggattgtgcagtgaacagtagcca

SEQ ID NO: 1087300 - DNA, 25 bp, Homo sapien
gaaatatgtgtgtctcctagattgg

SEQ ID NO: 1087301 - DNA, 25 bp, Homo sapien
tgtgtctcctagattggattgtgca

SEQ ID NO: 1087302 - DNA, 25 bp, Homo sapien
ttcagaagactgacgtggaccggcc

SEQ ID NO: 1087303 - DNA, 25 bp, Homo sapien
gactgacgtggaccggccttgtctg

SEQ ID NO: 1087304 - DNA, 25 bp, Homo sapien
agaagactgacgtggaccggccttg

SEQ ID NO: 1087305 - DNA, 25 bp, Homo sapien
cttcagaagactgacgtggaccggc

SEQ ID NO: 1087306 - DNA, 25 bp, Homo sapien
agttggaaggtttactgcagtactc

SEQ ID NO: 1087307 - DNA, 25 bp, Homo sapien
tgcagtactcttccacagtgtagtc

SEQ ID NO: 1087308 - DNA, 25 bp, Homo sapien
cactaggagcaggatctggttgtga

SEQ ID NO: 1087309 - DNA, 25 bp, Homo sapien
taagctggagcctccaatgggacct

SEQ ID NO: 1087310 - DNA, 25 bp, Homo sapien
cacattaagtcttgcagcataacaa

SEQ ID NO: 1087311 - DNA, 25 bp, Homo sapien
ctggttggtggtggaaaggcctgtt

SEQ ID NO: 1087312 - DNA, 25 bp, Homo sapien
gaggacacattaagtcttgcagcat

SEQ ID NO: 1087313 - DNA, 25 bp, Homo sapien
aactgaattaccatgaaataaactt

SEQ ID NO: 1087314 - DNA, 25 bp, Homo sapien
atattcttcagacacattttcaaac

SEQ ID NO: 1087315 - DNA, 25 bp, Homo sapien
tcaatattcttcagacacattttca

SEQ ID NO: 1087316 - DNA, 25 bp, Homo sapien
caatattcttcagacacattttcaa

SEQ ID NO: 1087317 - DNA, 25 bp, Homo sapien
tattcttcagacacattttcaaact

SEQ ID NO: 1087318 - DNA, 25 bp, Homo sapien
gcaggtggtgattcaccagggttgg

SEQ ID NO: 1087319 - DNA, 25 bp, Homo sapien
ccagggttggcagtttgaggacagc

SEQ ID NO: 1087320 - DNA, 25 bp, Homo sapien
gtggtgattcaccagggttggcagt

SEQ ID NO: 1087321 - DNA, 25 bp, Homo sapien
ggtggtgattcaccagggttggcag

SEQ ID NO: 1087322 - DNA, 25 bp, Homo sapien
attgtggtctctggttctgaggctc

SEQ ID NO: 1087323 - DNA, 25 bp, Homo sapien
tggtctctggttctgaggctcctcc

SEQ ID NO: 1087324 - DNA, 25 bp, Homo sapien
gtctctggttctgaggctcctccat

SEQ ID NO: 1087325 - DNA, 25 bp, Homo sapien
tgtggtctctggttctgaggctcct

SEQ ID NO: 1087326 - DNA, 25 bp, Homo sapien
gaggaataatacagactttggcctg

SEQ ID NO: 1087327 - DNA, 25 bp, Homo sapien
tgtcaactccagagattcttgattt

SEQ ID NO: 1087328 - DNA, 25 bp, Homo sapien
ggatgtcaactccagagattcttga

SEQ ID NO: 1087329 - DNA, 25 bp, Homo sapien
aggaataatacagactttggcctgg

SEQ ID NO: 1087330 - DNA, 25 bp, Homo sapien
gcctcggaggcctctacagttctgg

SEQ ID NO: 1087331 - DNA, 25 bp, Homo sapien
cagcctctttgtcggtcttgccgga

SEQ ID NO: 1087332 - DNA, 25 bp, Homo sapien
ccaaagggttgaagtggatagtcct

SEQ ID NO: 1087333 - DNA, 25 bp, Homo sapien
tccatcttcatagtcacggtgaggc

SEQ ID NO: 1087334 - DNA, 25 bp, Homo sapien
cgcggaacccaatgcagttccccat

SEQ ID NO: 1087335 - DNA, 25 bp, Homo sapien
aacctccgcggaacccaatgcagtt

SEQ ID NO: 1087336 - DNA, 25 bp, Homo sapien
ggaacccaatgcagttccccatccc

SEQ ID NO: 1087337 - DNA, 25 bp, Homo sapien
gaaacctccgcggaacccaatgcag

SEQ ID NO: 1087338 - DNA, 25 bp, Homo sapien
agccttgcctccatgagctccgcgg

SEQ ID NO: 1087339 - DNA, 25 bp, Homo sapien
gccttgcctccatgagctccgcggt

SEQ ID NO: 1087340 - DNA, 25 bp, Homo sapien
ttatcctcagccttgcctccatgag

SEQ ID NO: 1087341 - DNA, 25 bp, Homo sapien
ctcagccttgcctccatgagctccg

SEQ ID NO: 1087342 - DNA, 25 bp, Homo sapien
gatctcggattccttaatgggcaga

SEQ ID NO: 1087343 - DNA, 25 bp, Homo sapien
ggattccttaatgggcagagagaag

SEQ ID NO: 1087344 - DNA, 25 bp, Homo sapien
tctcggattccttaatgggcagaga

SEQ ID NO: 1087345 - DNA, 25 bp, Homo sapien
tcggattccttaatgggcagagaga

SEQ ID NO: 1087346 - DNA, 25 bp, Homo sapien
aacctgatgcgctggccagcacggg

SEQ ID NO: 1087347 - DNA, 25 bp, Homo sapien
cttgaacctgatgcgctggccagca

SEQ ID NO: 1087348 - DNA, 25 bp, Homo sapien
agcacgggtctgcttctgcgccggc

SEQ ID NO: 1087349 - DNA, 25 bp, Homo sapien
ttgtagtccccaatagcaacaaatg

SEQ ID NO: 1087350 - DNA, 25 bp, Homo sapien
cttggagcacttaacacccagaccg

SEQ ID NO: 1087351 - DNA, 25 bp, Homo sapien
ttggagcacttaacacccagaccga

SEQ ID NO: 1087352 - DNA, 25 bp, Homo sapien
tggagcacttaacacccagaccgac

SEQ ID NO: 1087353 - DNA, 25 bp, Homo sapien
cctgggtggagggatgaggcacgcc

SEQ ID NO: 1087354 - DNA, 25 bp, Homo sapien
tcattgaattcctgatcgggggact

SEQ ID NO: 1087355 - DNA, 25 bp, Homo sapien
ggtccgcggcatggagactctggcg

SEQ ID NO: 1087356 - DNA, 25 bp, Homo sapien
ggagggatgaggcacgccagcacag

SEQ ID NO: 1087357 - DNA, 25 bp, Homo sapien
tatataaaaacctttgttgtagcca

SEQ ID NO: 1087358 - DNA, 25 bp, Homo sapien
ctggagccttctgcatagcagggaa

SEQ ID NO: 1087359 - DNA, 25 bp, Homo sapien
gtggaccaggtgtgctggagccttc

SEQ ID NO: 1087360 - DNA, 25 bp, Homo sapien
actgggccgcggactaagagggcag

SEQ ID NO: 1087361 - DNA, 25 bp, Homo sapien
gcatagcagggaagcctacttcagc

SEQ ID NO: 1087362 - DNA, 25 bp, Homo sapien
ctggaaaccaagggtcctcctccat

SEQ ID NO: 1087363 - DNA, 25 bp, Homo sapien
ttgtacatgagatagcattcggctg

SEQ ID NO: 1087364 - DNA, 25 bp, Homo sapien
tgttcaccaaggatattattggcct

SEQ ID NO: 1087365 - DNA, 25 bp, Homo sapien
ttctatagggtcagtgttaatcccc

SEQ ID NO: 1087366 - DNA, 25 bp, Homo sapien
gagatatttgtactatcctgacagt

SEQ ID NO: 1087367 - DNA, 25 bp, Homo sapien
tcttggtgccaagaggactggcctc

SEQ ID NO: 1087368 - DNA, 25 bp, Homo sapien
agaggactggcctcttaacataaca

SEQ ID NO: 1087369 - DNA, 25 bp, Homo sapien
gccaagaggactggcctcttaacat

SEQ ID NO: 1087370 - DNA, 25 bp, Homo sapien
ggtgccaagaggactggcctcttaa

SEQ ID NO: 1087371 - DNA, 25 bp, Homo sapien
agcagcagcgacacactagcacctt

SEQ ID NO: 1087372 - DNA, 25 bp, Homo sapien
gtatgccaagtcctgtaccaaccat

SEQ ID NO: 1087373 - DNA, 25 bp, Homo sapien
tctgtatgccaagtcctgtaccaac

SEQ ID NO: 1087374 - DNA, 25 bp, Homo sapien
gcaccttctgtatgccaagtcctgt

SEQ ID NO: 1087375 - DNA, 25 bp, Homo sapien
ctgagctccgctgggatcagcgcta

SEQ ID NO: 1087376 - DNA, 25 bp, Homo sapien
ccccagggagccagtatctgtactc

SEQ ID NO: 1087377 - DNA, 25 bp, Homo sapien
ggaggcgcagagacctgcaatgacc

SEQ ID NO: 1087378 - DNA, 25 bp, Homo sapien
ggcgattgagtctccgcttctggga

SEQ ID NO: 1087379 - DNA, 25 bp, Homo sapien
ggcgcctgggaacgtactgcgccca

SEQ ID NO: 1087380 - DNA, 25 bp, Homo sapien
tcagtcacagcccttggcgcctggg

SEQ ID NO: 1087381 - DNA, 25 bp, Homo sapien
agcccttggcgcctgggaacgtact

SEQ ID NO: 1087382 - DNA, 25 bp, Homo sapien
tgggaacgtactgcgcccacggtgc

SEQ ID NO: 1087383 - DNA, 25 bp, Homo sapien
agcctctcctcgtagggcggttccg

SEQ ID NO: 1087384 - DNA, 25 bp, Homo sapien
tcctcggttcctgccgatgctctgg

SEQ ID NO: 1087385 - DNA, 25 bp, Homo sapien
ccaggttttcggagcctcccagcct

SEQ ID NO: 1087386 - DNA, 25 bp, Homo sapien
cgtagggcggttccggccgcctcat

SEQ ID NO: 1087387 - DNA, 25 bp, Homo sapien
gatctccgaccctcggggctactgg

SEQ ID NO: 1087388 - DNA, 25 bp, Homo sapien
ccgcggcgctaaggagacgcttgtc

SEQ ID NO: 1087389 - DNA, 25 bp, Homo sapien
tccgaggtcccgtgggatctccgac

SEQ ID NO: 1087390 - DNA, 25 bp, Homo sapien
gagacttcctgtggtactcggaaga

SEQ ID NO: 1087391 - DNA, 25 bp, Homo sapien
taattgtaatctgtaggtgacctcg

SEQ ID NO: 1087392 - DNA, 25 bp, Homo sapien
tctgtccctaaggagccgtcaaggt

SEQ ID NO: 1087393 - DNA, 25 bp, Homo sapien
aacagagcgacgtgtgactgagcca

SEQ ID NO: 1087394 - DNA, 25 bp, Homo sapien
ggaaactcgggatgaatcctgccca

SEQ ID NO: 1087395 - DNA, 25 bp, Homo sapien
gtaactgagctttaaggagacagga

SEQ ID NO: 1087396 - DNA, 25 bp, Homo sapien
caaactcgtcggatttgggagcgcg

SEQ ID NO: 1087397 - DNA, 25 bp, Homo sapien
caggatgactatcgtatcaggactt

SEQ ID NO: 1087398 - DNA, 25 bp, Homo sapien
tcggatttgggagcgcgccgaaaca

SEQ ID NO: 1087399 - DNA, 25 bp, Homo sapien
agagctacagaaaccgagggcgact

SEQ ID NO: 1087400 - DNA, 25 bp, Homo sapien
tcagggccgtgacatcaagacaaga

SEQ ID NO: 1087401 - DNA, 25 bp, Homo sapien
accgatgcgcgtcctgagtttaaga

SEQ ID NO: 1087402 - DNA, 25 bp, Homo sapien
cgagggccgcggcattaattccaga

SEQ ID NO: 1087403 - DNA, 25 bp, Homo sapien
agaacaaaaacgagagtgacagaac

SEQ ID NO: 1087404 - DNA, 25 bp, Homo sapien
tagagaacaaaaacgagagtgacag

SEQ ID NO: 1087405 - DNA, 25 bp, Homo sapien
aaagtagagaacaaaaacgagagtg

SEQ ID NO: 1087406 - DNA, 25 bp, Homo sapien
caaaaacgagagtgacagaacatta

SEQ ID NO: 1087407 - DNA, 25 bp, Homo sapien
tatcagccaaactaacggaatccgg

SEQ ID NO: 1087408 - DNA, 25 bp, Homo sapien
gtaattaaacgggacgcgtcgcagc

SEQ ID NO: 1087409 - DNA, 25 bp, Homo sapien
gcgcaaaagtcaatgcctcccgggt

SEQ ID NO: 1087410 - DNA, 25 bp, Homo sapien
tatcatctctattaggctgccggga

SEQ ID NO: 1087411 - DNA, 25 bp, Homo sapien
tctcggatccgtagagcttggcaca

SEQ ID NO: 1087412 - DNA, 25 bp, Homo sapien
gctaacaagttctgtaagggcccat

SEQ ID NO: 1087413 - DNA, 25 bp, Homo sapien
caagattagacttctcactgtgagg

SEQ ID NO: 1087414 - DNA, 25 bp, Homo sapien
gtcattgataggtgactgtgtcccc

SEQ ID NO: 1087415 - DNA, 25 bp, Homo sapien
ggcccagtaagtgagtcagtctgaa

SEQ ID NO: 1087416 - DNA, 25 bp, Homo sapien
caactgttgacagtgaagctccagg

SEQ ID NO: 1087417 - DNA, 25 bp, Homo sapien
gatttcggatgttgccattctctgg

SEQ ID NO: 1087418 - DNA, 25 bp, Homo sapien
tcccatcaccacagaaatagcagtg

SEQ ID NO: 1087419 - DNA, 25 bp, Homo sapien
aggggagatcttcatcgttgggcat

SEQ ID NO: 1087420 - DNA, 25 bp, Homo sapien
caggggagatcttcatcgttgggca

SEQ ID NO: 1087421 - DNA, 25 bp, Homo sapien
aactcaaaccacatagacaccatct

SEQ ID NO: 1087422 - DNA, 25 bp, Homo sapien
cactggggaactcaaaccacataga

SEQ ID NO: 1087423 - DNA, 25 bp, Homo sapien
ccatctacttacacataaagaaggc

SEQ ID NO: 1087424 - DNA, 25 bp, Homo sapien
catagacaccatctacttacacata

SEQ ID NO: 1087425 - DNA, 25 bp, Homo sapien
gtgggagatagggaacacatccaga

SEQ ID NO: 1087426 - DNA, 25 bp, Homo sapien
tagggaacacatccagaagtcactc

SEQ ID NO: 1087427 - DNA, 25 bp, Homo sapien
gttttatattattgaccctcacaac

SEQ ID NO: 1087428 - DNA, 25 bp, Homo sapien
ccagaagtcactccatgtggataca

SEQ ID NO: 1087429 - DNA, 25 bp, Homo sapien
caggcaaataagtttgttctcaccc

SEQ ID NO: 1087430 - DNA, 25 bp, Homo sapien
tgtaacatgagagcaggttggttcc

SEQ ID NO: 1087431 - DNA, 25 bp, Homo sapien
aaattcaccaggcaaataagtttgt

SEQ ID NO: 1087432 - DNA, 25 bp, Homo sapien
gtaacatgagagcaggttggttcca

SEQ ID NO: 1087433 - DNA, 25 bp, Homo sapien
gaagctgagataaaccatagagtag

SEQ ID NO: 1087434 - DNA, 25 bp, Homo sapien
catagagtagtctcatagtgggacc

SEQ ID NO: 1087435 - DNA, 25 bp, Homo sapien
tggcctagcaattgcataggaagct

SEQ ID NO: 1087436 - DNA, 25 bp, Homo sapien
tttcttgtggtccagtgagacagac

SEQ ID NO: 1087437 - DNA, 25 bp, Homo sapien
tgtcagcccctgtatctgtgtagca

SEQ ID NO: 1087438 - DNA, 25 bp, Homo sapien
caccaacggagtctgcctgctgtag

SEQ ID NO: 1087439 - DNA, 25 bp, Homo sapien
gaactgacagaagctagagccagag

SEQ ID NO: 1087440 - DNA, 25 bp, Homo sapien
gtatcaccaacggagtctgcctgct

SEQ ID NO: 1087441 - DNA, 25 bp, Homo sapien
tgtatgtgcgcagattaaccttttc

SEQ ID NO: 1087442 - DNA, 25 bp, Homo sapien
gcagacacgctttgctcacttaaag

SEQ ID NO: 1087443 - DNA, 25 bp, Homo sapien
aaaattgttagttctgtgctccgta

SEQ ID NO: 1087444 - DNA, 25 bp, Homo sapien
gctccgtattctagttgctttcgca

SEQ ID NO: 1087445 - DNA, 25 bp, Homo sapien
ataagcttttgaaggctgtacatac

SEQ ID NO: 1087446 - DNA, 25 bp, Homo sapien
ccaagtgtggcagggcagatacgac

SEQ ID NO: 1087447 - DNA, 25 bp, Homo sapien
cagtcttgtctataagggccaacca

SEQ ID NO: 1087448 - DNA, 25 bp, Homo sapien
gagaagatcatcctggcagacttga

SEQ ID NO: 1087449 - DNA, 25 bp, Homo sapien
cagacttgaggcacatactgccaag

SEQ ID NO: 1087450 - DNA, 25 bp, Homo sapien
tcgtaggactcagcatataattatg

SEQ ID NO: 1087451 - DNA, 25 bp, Homo sapien
cctaggaagattcgtaggactcagc

SEQ ID NO: 1087452 - DNA, 25 bp, Homo sapien
ctgcttcagaggcatgtagtgagca

SEQ ID NO: 1087453 - DNA, 25 bp, Homo sapien
taattatgctcagggctatgagttc

SEQ ID NO: 1087454 - DNA, 25 bp, Homo sapien
tcctcagtcacatttcataggcatt

SEQ ID NO: 1087455 - DNA, 25 bp, Homo sapien
gagtgatcttaggttacttaatttc

SEQ ID NO: 1087456 - DNA, 25 bp, Homo sapien
ggagtcaaatggatcaactcttcac

SEQ ID NO: 1087457 - DNA, 25 bp, Homo sapien
aggttgtggagtcaaatggatcaac

SEQ ID NO: 1087458 - DNA, 25 bp, Homo sapien
cctcagcacatgcatctcatcatta

SEQ ID NO: 1087459 - DNA, 25 bp, Homo sapien
aaatggttcagtggtagttagtctt

SEQ ID NO: 1087460 - DNA, 25 bp, Homo sapien
tacttgaccctgctgaacttttatt

SEQ ID NO: 1087461 - DNA, 25 bp, Homo sapien
atcatactgaacattggacaactta

SEQ ID NO: 1087462 - DNA, 25 bp, Homo sapien
agttagtcttgcatgtgaatcccac

SEQ ID NO: 1087463 - DNA, 25 bp, Homo sapien
tatagcaaaacatttgctgtgcaac

SEQ ID NO: 1087464 - DNA, 25 bp, Homo sapien
ctgtgcaaccgctcttgtttcagcc

SEQ ID NO: 1087465 - DNA, 25 bp, Homo sapien
cttgtttcagccttcataccaggtg

SEQ ID NO: 1087466 - DNA, 25 bp, Homo sapien
atttgctgtgcaaccgctcttgttt

SEQ ID NO: 1087467 - DNA, 25 bp, Homo sapien
tggactcggttggaataaaatgaca

SEQ ID NO: 1087468 - DNA, 25 bp, Homo sapien
aaagaggacaggcttcgagtcagcc

SEQ ID NO: 1087469 - DNA, 25 bp, Homo sapien
gtgttcaggaaatggcacatatgtg

SEQ ID NO: 1087470 - DNA, 25 bp, Homo sapien
taaccagcttgaccttagtcagaga

SEQ ID NO: 1087471 - DNA, 25 bp, Homo sapien
atatttataagcacctgagttgaag

SEQ ID NO: 1087472 - DNA, 25 bp, Homo sapien
cctgagttgaagtttagctgtagaa

SEQ ID NO: 1087473 - DNA, 25 bp, Homo sapien
gcatttacagtttgcctcctttaaa

SEQ ID NO: 1087474 - DNA, 25 bp, Homo sapien
gctatacgtaatctcataatctctg

SEQ ID NO: 1087475 - DNA, 25 bp, Homo sapien
actgtgtaccatatactgtgcttga

SEQ ID NO: 1087476 - DNA, 25 bp, Homo sapien
gacacagattcctcatgatagttac

SEQ ID NO: 1087477 - DNA, 25 bp, Homo sapien
tgtgagcaagtttactggtctgtac

SEQ ID NO: 1087478 - DNA, 25 bp, Homo sapien
taagctgtgtaccatatgtgtacca

SEQ ID NO: 1087479 - DNA, 25 bp, Homo sapien
ccttaattccaaactactcagtggt

SEQ ID NO: 1087480 - DNA, 25 bp, Homo sapien
tatgtcatcattgtgcatgggccat

SEQ ID NO: 1087481 - DNA, 25 bp, Homo sapien
aatttgtatgtcatcattgtgcatg

SEQ ID NO: 1087482 - DNA, 25 bp, Homo sapien
gtataagtccaattttagtattatg

SEQ ID NO: 1087483 - DNA, 25 bp, Homo sapien
ataagtccaattttagtattatgtg

SEQ ID NO: 1087484 - DNA, 25 bp, Homo sapien
tagactttatggattgtagttatat

SEQ ID NO: 1087485 - DNA, 25 bp, Homo sapien
ctttatggattgtagttatatttcc

SEQ ID NO: 1087486 - DNA, 25 bp, Homo sapien
ttcaagttttagactttatggattg

SEQ ID NO: 1087487 - DNA, 25 bp, Homo sapien
aagttttagactttatggattgtag

SEQ ID NO: 1087488 - DNA, 25 bp, Homo sapien
aattatctcagcgacactttgtggg

SEQ ID NO: 1087489 - DNA, 25 bp, Homo sapien
aaagctgtcagcagtaattatctca

SEQ ID NO: 1087490 - DNA, 25 bp, Homo sapien
catgaagaagcctaacaggtgtgag

SEQ ID NO: 1087491 - DNA, 25 bp, Homo sapien
ccatactggccctctgtaacatgaa

SEQ ID NO: 1087492 - DNA, 25 bp, Homo sapien
tgaatataggcgcaagagcaacagt

SEQ ID NO: 1087493 - DNA, 25 bp, Homo sapien
caacagttgactgagtttactgtgg

SEQ ID NO: 1087494 - DNA, 25 bp, Homo sapien
gtgtccgaggatgaatcaaattcat

SEQ ID NO: 1087495 - DNA, 25 bp, Homo sapien
tactgtggtgaagctttgtgtccga

SEQ ID NO: 1087496 - DNA, 25 bp, Homo sapien
gaaaagaacctctgtgctcaatgga

SEQ ID NO: 1087497 - DNA, 25 bp, Homo sapien
cagatggtcctcatgaacacctact

SEQ ID NO: 1087498 - DNA, 25 bp, Homo sapien
tctagtggacccattacacacagcc

SEQ ID NO: 1087499 - DNA, 25 bp, Homo sapien
gggctgcgttcgactccaaatgatt

SEQ ID NO: 1087500 - DNA, 25 bp, Homo sapien
tgtattgttccaaatttagtatata

SEQ ID NO: 1087501 - DNA, 25 bp, Homo sapien
agtatatatgctgccaaagcaagca

SEQ ID NO: 1087502 - DNA, 25 bp, Homo sapien
tatatatgctgccaaagcaagcact

SEQ ID NO: 1087503 - DNA, 25 bp, Homo sapien
tattgttccaaatttagtatatatg

SEQ ID NO: 1087504 - DNA, 25 bp, Homo sapien
ctccacatgaattccccagctatac

SEQ ID NO: 1087505 - DNA, 25 bp, Homo sapien
gacctccacatgaattccccagcta

SEQ ID NO: 1087506 - DNA, 25 bp, Homo sapien
tctgacctccacatgaattccccag

SEQ ID NO: 1087507 - DNA, 25 bp, Homo sapien
tccacatgaattccccagctataca

SEQ ID NO: 1087508 - DNA, 25 bp, Homo sapien
cttgaggatttctgtgatgataggt

SEQ ID NO: 1087509 - DNA, 25 bp, Homo sapien
taggtggcagcacatgctcatcata

SEQ ID NO: 1087510 - DNA, 25 bp, Homo sapien
cagagcaagtcaccactgacttgag

SEQ ID NO: 1087511 - DNA, 25 bp, Homo sapien
tgataggtggcagcacatgctcatc

SEQ ID NO: 1087512 - DNA, 25 bp, Homo sapien
ctaagctgccttggagtcacccttg

SEQ ID NO: 1087513 - DNA, 25 bp, Homo sapien
cagagatgatgacctcctgttcctg

SEQ ID NO: 1087514 - DNA, 25 bp, Homo sapien
tgagccatgtgtttggcttccacca

SEQ ID NO: 1087515 - DNA, 25 bp, Homo sapien
gcttccaccacttctgtgactcctc

SEQ ID NO: 1087516 - DNA, 25 bp, Homo sapien
agagctggtactcaatgtcctctgt

SEQ ID NO: 1087517 - DNA, 25 bp, Homo sapien
ggcacccggaggagtattgactgcc

SEQ ID NO: 1087518 - DNA, 25 bp, Homo sapien
cggaggagtattgactgccctggca

SEQ ID NO: 1087519 - DNA, 25 bp, Homo sapien
gagctggtactcaatgtcctctgtg

SEQ ID NO: 1087520 - DNA, 25 bp, Homo sapien
gttgggctattttgatagtgatatc

SEQ ID NO: 1087521 - DNA, 25 bp, Homo sapien
cgtctggaccagtcttgattctgcc

SEQ ID NO: 1087522 - DNA, 25 bp, Homo sapien
tcccttgtgtttaatttcgtctgga

SEQ ID NO: 1087523 - DNA, 25 bp, Homo sapien
tagttttaggatctgcctcatattc

SEQ ID NO: 1087524 - DNA, 25 bp, Homo sapien
actgtgagatttttgacctggccag

SEQ ID NO: 1087525 - DNA, 25 bp, Homo sapien
tttaatgaggtatagacacttgctg

SEQ ID NO: 1087526 - DNA, 25 bp, Homo sapien
taagtagaacaactcattggtaagg

SEQ ID NO: 1087527 - DNA, 25 bp, Homo sapien
cccagcacagttctttgtaccgagt

SEQ ID NO: 1087528 - DNA, 25 bp, Homo sapien
tttttcttgactatggccaagggtg

SEQ ID NO: 1087529 - DNA, 25 bp, Homo sapien
tgtgggatttgtacagactttcctc

SEQ ID NO: 1087530 - DNA, 25 bp, Homo sapien
gactatggccaagggtgtattaatt

SEQ ID NO: 1087531 - DNA, 25 bp, Homo sapien
tactgaacatgtggatccactgcct

SEQ ID NO: 1087532 - DNA, 25 bp, Homo sapien
taatgtcagctgtccagatttagaa

SEQ ID NO: 1087533 - DNA, 25 bp, Homo sapien
ggcaactcagttacaggatataatg

SEQ ID NO: 1087534 - DNA, 25 bp, Homo sapien
tataatgtcagctgtccagatttag

SEQ ID NO: 1087535 - DNA, 25 bp, Homo sapien
caataattggcaactcagttacagg

SEQ ID NO: 1087536 - DNA, 25 bp, Homo sapien
tgtctctgatgtagatgcagttctc

SEQ ID NO: 1087537 - DNA, 25 bp, Homo sapien
tctctgatgtagatgcagttctctt

SEQ ID NO: 1087538 - DNA, 25 bp, Homo sapien
gtctctgatgtagatgcagttctct

SEQ ID NO: 1087539 - DNA, 25 bp, Homo sapien
ttttctcttgtcaggctattattag

SEQ ID NO: 1087540 - DNA, 25 bp, Homo sapien
gacatctttttctcttgtcaggcta

SEQ ID NO: 1087541 - DNA, 25 bp, Homo sapien
ctttttctcttgtcaggctattatt

SEQ ID NO: 1087542 - DNA, 25 bp, Homo sapien
atctttttctcttgtcaggctatta

SEQ ID NO: 1087543 - DNA, 25 bp, Homo sapien
tacaagtattataaggacctgacag

SEQ ID NO: 1087544 - DNA, 25 bp, Homo sapien
gaagattaaacaggttcgttagcca

SEQ ID NO: 1087545 - DNA, 25 bp, Homo sapien
caagtatcttgggatggctgtagta

SEQ ID NO: 1087546 - DNA, 25 bp, Homo sapien
taagtctccttgtgtagaacacctc

SEQ ID NO: 1087547 - DNA, 25 bp, Homo sapien
ctggttcccaagttgcagccagaaa

SEQ ID NO: 1087548 - DNA, 25 bp, Homo sapien
ccaagttgcagccagaaactgcagg

SEQ ID NO: 1087549 - DNA, 25 bp, Homo sapien
gttgcagccagaaactgcaggcgta

SEQ ID NO: 1087550 - DNA, 25 bp, Homo sapien
ttcccaagttgcagccagaaactgc

SEQ ID NO: 1087551 - DNA, 25 bp, Homo sapien
tggtttggctacaccaggctagggc

SEQ ID NO: 1087552 - DNA, 25 bp, Homo sapien
gctggttcgtagtcactggacaagc

SEQ ID NO: 1087553 - DNA, 25 bp, Homo sapien
tacaccaggctagggctggttcgta

SEQ ID NO: 1087554 - DNA, 25 bp, Homo sapien
caggctagggctggttcgtagtcac

SEQ ID NO: 1087555 - DNA, 25 bp, Homo sapien
ctcctgggcggcaaaagcatgcttc

SEQ ID NO: 1087556 - DNA, 25 bp, Homo sapien
tgggcggcaaaagcatgcttcagct

SEQ ID NO: 1087557 - DNA, 25 bp, Homo sapien
cggcaaaagcatgcttcagctgcat

SEQ ID NO: 1087558 - DNA, 25 bp, Homo sapien
ggccgggcctgacgtctcctgggcg

SEQ ID NO: 1087559 - DNA, 25 bp, Homo sapien
tctggccgcggcatggctttcagga

SEQ ID NO: 1087560 - DNA, 25 bp, Homo sapien
ggctcgatgcgtgcggctcggaagc

SEQ ID NO: 1087561 - DNA, 25 bp, Homo sapien
cagaacctctatcgtatgtttcaaa

SEQ ID NO: 1087562 - DNA, 25 bp, Homo sapien
catgcctggaggctcgatgcgtgcg

SEQ ID NO: 1087563 - DNA, 25 bp, Homo sapien
tcccaggtggtattacaagttttgc

SEQ ID NO: 1087564 - DNA, 25 bp, Homo sapien
tggtattacaagttttgctcttcag

SEQ ID NO: 1087565 - DNA, 25 bp, Homo sapien
gctcttcagaatggtgttactgttg

SEQ ID NO: 1087566 - DNA, 25 bp, Homo sapien
gttttgctcttcagaatggtgttac

SEQ ID NO: 1087567 - DNA, 25 bp, Homo sapien
taaaatttcatgtagcagttccact

SEQ ID NO: 1087568 - DNA, 25 bp, Homo sapien
tagaggtcctcaaatgtgcactgct

SEQ ID NO: 1087569 - DNA, 25 bp, Homo sapien
cagccaagcattgagcactgccctt

SEQ ID NO: 1087570 - DNA, 25 bp, Homo sapien
gagtctctgtcctcatccgaaagca

SEQ ID NO: 1087571 - DNA, 25 bp, Homo sapien
cagattcatccatgtaagggcacta

SEQ ID NO: 1087572 - DNA, 25 bp, Homo sapien
caccataggaggatacagatattca

SEQ ID NO: 1087573 - DNA, 25 bp, Homo sapien
ccctgccacattttggagtctccag

SEQ ID NO: 1087574 - DNA, 25 bp, Homo sapien
taactctcacaagtaagaacatacg

SEQ ID NO: 1087575 - DNA, 25 bp, Homo sapien
tgagctcagtcagtcagtccgcctt

SEQ ID NO: 1087576 - DNA, 25 bp, Homo sapien
ggttctgatggacttgctcgatgca

SEQ ID NO: 1087577 - DNA, 25 bp, Homo sapien
ggcatggtttgtggcgcctcaaaac

SEQ ID NO: 1087578 - DNA, 25 bp, Homo sapien
cacagaaacatgcaattagcgtgta

SEQ ID NO: 1087579 - DNA, 25 bp, Homo sapien
cagacgtggtgtcaggtgcttgtaa

SEQ ID NO: 1087580 - DNA, 25 bp, Homo sapien
gccagacgtggtgtcaggtgcttgt

SEQ ID NO: 1087581 - DNA, 25 bp, Homo sapien
tagccagacgtggtgtcaggtgctt

SEQ ID NO: 1087582 - DNA, 25 bp, Homo sapien
tcccagctactcgggaggctgaggc

SEQ ID NO: 1087583 - DNA, 25 bp, Homo sapien
tgtctaccatggcagtctggttact

SEQ ID NO: 1087584 - DNA, 25 bp, Homo sapien
tcccatgtctaccatggcagtctgg

SEQ ID NO: 1087585 - DNA, 25 bp, Homo sapien
cttcctcgtctctcccatgtctacc

SEQ ID NO: 1087586 - DNA, 25 bp, Homo sapien
tcagcttcctcgtctctcccatgtc

SEQ ID NO: 1087587 - DNA, 25 bp, Homo sapien
tgtaaactcggcgtccttcgctgag

SEQ ID NO: 1087588 - DNA, 25 bp, Homo sapien
aaagggagtcgttcctcagcgctag

SEQ ID NO: 1087589 - DNA, 25 bp, Homo sapien
acagcgagctggcataaagggagtc

SEQ ID NO: 1087590 - DNA, 25 bp, Homo sapien
ggaaaaatccggactgccactaagc

SEQ ID NO: 1087591 - DNA, 25 bp, Homo sapien
cagagttttaaggaggctcggcaga

SEQ ID NO: 1087592 - DNA, 25 bp, Homo sapien
tgagcgctttttgagttgaaaaacc

SEQ ID NO: 1087593 - DNA, 25 bp, Homo sapien
taacggcagagttttaaggaggctc

SEQ ID NO: 1087594 - DNA, 25 bp, Homo sapien
agcgccgcgggagcgggaaggccgg

SEQ ID NO: 1087595 - DNA, 25 bp, Homo sapien
ttttgtagctgatccccccctagat

SEQ ID NO: 1087596 - DNA, 25 bp, Homo sapien
tttcacccctacaggcacttgcgtg

SEQ ID NO: 1087597 - DNA, 25 bp, Homo sapien
tctcagagagggtgccggtttcttc

SEQ ID NO: 1087598 - DNA, 25 bp, Homo sapien
ttcgctgaaacaattgctgcttctg

SEQ ID NO: 1087599 - DNA, 25 bp, Homo sapien
tgtgcccctttgctgcggacagggc

SEQ ID NO: 1087600 - DNA, 25 bp, Homo sapien
gcctgtgcccctttgctgcggacag

SEQ ID NO: 1087601 - DNA, 25 bp, Homo sapien
ccactttgccacctctcgcggtccc

SEQ ID NO: 1087602 - DNA, 25 bp, Homo sapien
tttgccacctctcgcggtccccggc

SEQ ID NO: 1087603 - DNA, 25 bp, Homo sapien
tccggtcgccgtctcggcgagcgct

SEQ ID NO: 1087604 - DNA, 25 bp, Homo sapien
tgagtagggagagtcgccgcagttc

SEQ ID NO: 1087605 - DNA, 25 bp, Homo sapien
cctgggaaacgtaggccaagttctg

SEQ ID NO: 1087606 - DNA, 25 bp, Homo sapien
gaccgagctcgttcaggctttctgc

SEQ ID NO: 1087607 - DNA, 25 bp, Homo sapien
ccagaagagcctttggtcgcgtccg

SEQ ID NO: 1087608 - DNA, 25 bp, Homo sapien
tcgccaaaggcgaacgggagtagca

SEQ ID NO: 1087609 - DNA, 25 bp, Homo sapien
tccgtctcgccgaagggatagtcct

SEQ ID NO: 1087610 - DNA, 25 bp, Homo sapien
ggagtagcagttcggtggccctcaa

SEQ ID NO: 1087611 - DNA, 25 bp, Homo sapien
actccggacgtcagatgtaggcaga

SEQ ID NO: 1087612 - DNA, 25 bp, Homo sapien
tactagtaagatctgcctgccaaaa

SEQ ID NO: 1087613 - DNA, 25 bp, Homo sapien
gaattctgacgactccacagagaga

SEQ ID NO: 1087614 - DNA, 25 bp, Homo sapien
taggcagagctgtcacgtacctacg

SEQ ID NO: 1087615 - DNA, 25 bp, Homo sapien
agctgcggacgccaactcgttcccc

SEQ ID NO: 1087616 - DNA, 25 bp, Homo sapien
caaactagtaagttgctctaggtcc

SEQ ID NO: 1087617 - DNA, 25 bp, Homo sapien
ttttgcaacaaactagtaagttgct

SEQ ID NO: 1087618 - DNA, 25 bp, Homo sapien
ccattttgtgcattgacgtttacat

SEQ ID NO: 1087619 - DNA, 25 bp, Homo sapien
gctgtaaatctagaaacccgggtca

SEQ ID NO: 1087620 - DNA, 25 bp, Homo sapien
gaccgtagagacaaagacactgcag

SEQ ID NO: 1087621 - DNA, 25 bp, Homo sapien
gaaaattagagcacaccacggcatg

SEQ ID NO: 1087622 - DNA, 25 bp, Homo sapien
taaaatgtacatcctgtcccggtgc

SEQ ID NO: 1087623 - DNA, 25 bp, Homo sapien
tacgattaaggcctttgatattaac

SEQ ID NO: 1087624 - DNA, 25 bp, Homo sapien
taaagcaaacatacgattaaggcct

SEQ ID NO: 1087625 - DNA, 25 bp, Homo sapien
tggatcttcgtaaagcaaacatacg

SEQ ID NO: 1087626 - DNA, 25 bp, Homo sapien
agataccttggatcttcgtaaagca

SEQ ID NO: 1087627 - DNA, 25 bp, Homo sapien
gatacgaccacaactgtccctaaag

SEQ ID NO: 1087628 - DNA, 25 bp, Homo sapien
cacaactgtccctaaagatttagtc

SEQ ID NO: 1087629 - DNA, 25 bp, Homo sapien
tattaaaaattgatacgaccacaac

SEQ ID NO: 1087630 - DNA, 25 bp, Homo sapien
aattgatacgaccacaactgtccct

SEQ ID NO: 1087631 - DNA, 25 bp, Homo sapien
tagatggacaagatattaagctccc

SEQ ID NO: 1087632 - DNA, 25 bp, Homo sapien
agctcccctgttgataaaactgttg

SEQ ID NO: 1087633 - DNA, 25 bp, Homo sapien
tcttcctttggagcagtggtaaaca

SEQ ID NO: 1087634 - DNA, 25 bp, Homo sapien
taaatgcaaactacatagatggaca

SEQ ID NO: 1087635 - DNA, 25 bp, Homo sapien
tagctactgcaaacaaataaggatg

SEQ ID NO: 1087636 - DNA, 25 bp, Homo sapien
tctaaaccaactccatgagtgagtg

SEQ ID NO: 1087637 - DNA, 25 bp, Homo sapien
taaggatgttgagtttctctaaacc

SEQ ID NO: 1087638 - DNA, 25 bp, Homo sapien
tccctccaaatagatatagctccaa

SEQ ID NO: 1087639 - DNA, 25 bp, Homo sapien
atgggcccaaaagtaggataaattg

SEQ ID NO: 1087640 - DNA, 25 bp, Homo sapien
aattgagcttctatgatggaacgtc

SEQ ID NO: 1087641 - DNA, 25 bp, Homo sapien
ttcttgcggaagacccataggatgg

SEQ ID NO: 1087642 - DNA, 25 bp, Homo sapien
ctagtaggtgaaagtagaagacaac

SEQ ID NO: 1087643 - DNA, 25 bp, Homo sapien
ccagttcggtctttcaaatcgggat

SEQ ID NO: 1087644 - DNA, 25 bp, Homo sapien
tgaatgacagcgaaaccagttcggt

SEQ ID NO: 1087645 - DNA, 25 bp, Homo sapien
tagagcctggccaaatcacaggcgg

SEQ ID NO: 1087646 - DNA, 25 bp, Homo sapien
acattgctggccgtgtgcttcacca

SEQ ID NO: 1087647 - DNA, 25 bp, Homo sapien
gctgcttaacatatgacagaactgt

SEQ ID NO: 1087648 - DNA, 25 bp, Homo sapien
cataagcctgttgtaagattttcac

SEQ ID NO: 1087649 - DNA, 25 bp, Homo sapien
taattgataaagtagaggcaacgtg

SEQ ID NO: 1087650 - DNA, 25 bp, Homo sapien
ttaaaagtcaggagagctactcagt

SEQ ID NO: 1087651 - DNA, 25 bp, Homo sapien
agagtatgtctagttttccagttgg

SEQ ID NO: 1087652 - DNA, 25 bp, Homo sapien
cagttctccttagcaagtgataagt

SEQ ID NO: 1087653 - DNA, 25 bp, Homo sapien
gacatgggtaaaggatgaaaacaac

SEQ ID NO: 1087654 - DNA, 25 bp, Homo sapien
tactaggcaccaaggtggacgggac

SEQ ID NO: 1087655 - DNA, 25 bp, Homo sapien
taagtaccatttgtgggagttgctc

SEQ ID NO: 1087656 - DNA, 25 bp, Homo sapien
tatgaagtaggagggaacgttcaca

SEQ ID NO: 1087657 - DNA, 25 bp, Homo sapien
gatgaggtctttttgcacttaggga

SEQ ID NO: 1087658 - DNA, 25 bp, Homo sapien
tttacatttcttacactcagggaga

SEQ ID NO: 1087659 - DNA, 25 bp, Homo sapien
gatttcgaaaccagtcctgggccac

SEQ ID NO: 1087660 - DNA, 25 bp, Homo sapien
ccatccacaacgttcttttgatcaa

SEQ ID NO: 1087661 - DNA, 25 bp, Homo sapien
gggaactgagatttcgaaaccagtc

SEQ ID NO: 1087662 - DNA, 25 bp, Homo sapien
tcaatacgataagggaaatacatca

SEQ ID NO: 1087663 - DNA, 25 bp, Homo sapien
ggacagccgggtcaggcgaggtcgc

SEQ ID NO: 1087664 - DNA, 25 bp, Homo sapien
ctccgtacagcgcaagctgggctgg

SEQ ID NO: 1087665 - DNA, 25 bp, Homo sapien
gcggccttagttgcctccgggtgcc

SEQ ID NO: 1087666 - DNA, 25 bp, Homo sapien
gctgccaaacctgccgaggaaacta

SEQ ID NO: 1087667 - DNA, 25 bp, Homo sapien
actccggccactggcctccttcgct

SEQ ID NO: 1087668 - DNA, 25 bp, Homo sapien
ctgctttcctatcgccgcggccctt

SEQ ID NO: 1087669 - DNA, 25 bp, Homo sapien
gcagactccggccactggcctcctt

SEQ ID NO: 1087670 - DNA, 25 bp, Homo sapien
cttcgctgctttcctatcgccgcgg

SEQ ID NO: 1087671 - DNA, 25 bp, Homo sapien
gccaggaccggggtcgcctggccgc

SEQ ID NO: 1087672 - DNA, 25 bp, Homo sapien
ctcccggggcgctgcgccggcggcc

SEQ ID NO: 1087673 - DNA, 25 bp, Homo sapien
aggtcgccagaaccgtccagtggga

SEQ ID NO: 1087674 - DNA, 25 bp, Homo sapien
tcaggcacaggtcgccagaaccgtc

SEQ ID NO: 1087675 - DNA, 25 bp, Homo sapien
gccagaaccgtccagtgggatggct

SEQ ID NO: 1087676 - DNA, 25 bp, Homo sapien
gcacaggtcgccagaaccgtccagt

SEQ ID NO: 1087677 - DNA, 25 bp, Homo sapien
ggtcgggcgccgtttgctcagcctc

SEQ ID NO: 1087678 - DNA, 25 bp, Homo sapien
gggagtgctggcatcgaggtcgggc

SEQ ID NO: 1087679 - DNA, 25 bp, Homo sapien
atcgaggtcgggcgccgtttgctca

SEQ ID NO: 1087680 - DNA, 25 bp, Homo sapien
ctggcatcgaggtcgggcgccgttt

SEQ ID NO: 1087681 - DNA, 25 bp, Homo sapien
aactggacgcgaggctcagagcccg

SEQ ID NO: 1087682 - DNA, 25 bp, Homo sapien
aggcatttgcctcctcgcaactgga

SEQ ID NO: 1087683 - DNA, 25 bp, Homo sapien
tttgcctcctcgcaactggacgcga

SEQ ID NO: 1087684 - DNA, 25 bp, Homo sapien
tcctcgcaactggacgcgaggctca

SEQ ID NO: 1087685 - DNA, 25 bp, Homo sapien
gacccctttctaggtgttttgcgca

SEQ ID NO: 1087686 - DNA, 25 bp, Homo sapien
gaacgtgcattgtcagtcctgggcg

SEQ ID NO: 1087687 - DNA, 25 bp, Homo sapien
gagccctgcagttcacggtgtttcg

SEQ ID NO: 1087688 - DNA, 25 bp, Homo sapien
agggtctttcggaattgaacgtgca

SEQ ID NO: 1087689 - DNA, 25 bp, Homo sapien
ggataacctttgctcgcttgccggg

SEQ ID NO: 1087690 - DNA, 25 bp, Homo sapien
gaagcaaaatatgtgagttccactg

SEQ ID NO: 1087691 - DNA, 25 bp, Homo sapien
tgctcctatgtgctggtacctctgg

SEQ ID NO: 1087692 - DNA, 25 bp, Homo sapien
cagaagccattttagaactcaggaa

SEQ ID NO: 1087693 - DNA, 25 bp, Homo sapien
tcttccttgtccgatgaggatgagg

SEQ ID NO: 1087694 - DNA, 25 bp, Homo sapien
ttcccaggatcattaattaaaatga

SEQ ID NO: 1087695 - DNA, 25 bp, Homo sapien
ctttcccaggatcattaattaaaat

SEQ ID NO: 1087696 - DNA, 25 bp, Homo sapien
aggtagaatgaggagctgcattggt

SEQ ID NO: 1087697 - DNA, 25 bp, Homo sapien
tagaatgaggagctgcattggtgtt

SEQ ID NO: 1087698 - DNA, 25 bp, Homo sapien
tctacttgctgatcttagggcatgg

SEQ ID NO: 1087699 - DNA, 25 bp, Homo sapien
tctgttgctgagtagagaaacctca

SEQ ID NO: 1087700 - DNA, 25 bp, Homo sapien
tagggcatggtgcaagatctttcaa

SEQ ID NO: 1087701 - DNA, 25 bp, Homo sapien
cctcacaatggccatagactgttct

SEQ ID NO: 1087702 - DNA, 25 bp, Homo sapien
ggcattatctcacccaagaaattta

SEQ ID NO: 1087703 - DNA, 25 bp, Homo sapien
taatcataatggcattatctcaccc

SEQ ID NO: 1087704 - DNA, 25 bp, Homo sapien
tccctaattgtccacaaatgtcctt

SEQ ID NO: 1087705 - DNA, 25 bp, Homo sapien
actgatatgataatcttgtccaatc

SEQ ID NO: 1087706 - DNA, 25 bp, Homo sapien
gagttcccttatatccctgacccga

SEQ ID NO: 1087707 - DNA, 25 bp, Homo sapien
tatataccaccaacacggtttagga

SEQ ID NO: 1087708 - DNA, 25 bp, Homo sapien
tagttctattgtctccgtaggcccc

SEQ ID NO: 1087709 - DNA, 25 bp, Homo sapien
ccttctttagggtggagtatctgca

SEQ ID NO: 1087710 - DNA, 25 bp, Homo sapien
ttttgctttatcctaagatttgcta

SEQ ID NO: 1087711 - DNA, 25 bp, Homo sapien
agaccaatgtcttggagagttcccc

SEQ ID NO: 1087712 - DNA, 25 bp, Homo sapien
ttcaccaatgtatgttcttagcacc

SEQ ID NO: 1087713 - DNA, 25 bp, Homo sapien
ctgtttttctgcccgtaccgtgttg

SEQ ID NO: 1087714 - DNA, 25 bp, Homo sapien
gatgctagctggtattttggccatt

SEQ ID NO: 1087715 - DNA, 25 bp, Homo sapien
agctggtattttggccattagttga

SEQ ID NO: 1087716 - DNA, 25 bp, Homo sapien
tgctagctggtattttggccattag

SEQ ID NO: 1087717 - DNA, 25 bp, Homo sapien
tgcagtggttggtacccatttttcc

SEQ ID NO: 1087718 - DNA, 25 bp, Homo sapien
caatctggaattgagctaggttgga

SEQ ID NO: 1087719 - DNA, 25 bp, Homo sapien
gaaagcctgaaataccaatggagag

SEQ ID NO: 1087720 - DNA, 25 bp, Homo sapien
gactggtaggtccaaagtacttgcc

SEQ ID NO: 1087721 - DNA, 25 bp, Homo sapien
cctgttccttagaggtgacccttct

SEQ ID NO: 1087722 - DNA, 25 bp, Homo sapien
tatgtccttaaacccatttgattag

SEQ ID NO: 1087723 - DNA, 25 bp, Homo sapien
tgtctgctaattccaccatatagat

SEQ ID NO: 1087724 - DNA, 25 bp, Homo sapien
tcatgggtggatttggctctgtttg

SEQ ID NO: 1087725 - DNA, 25 bp, Homo sapien
gttcactagtctttctaatatgtcc

SEQ ID NO: 1087726 - DNA, 25 bp, Homo sapien
ggaccattgcaagttgggaaccatc

SEQ ID NO: 1087727 - DNA, 25 bp, Homo sapien
ggacacttaccttagcctacatggg

SEQ ID NO: 1087728 - DNA, 25 bp, Homo sapien
taccttcagtatgctcgggacactt

SEQ ID NO: 1087729 - DNA, 25 bp, Homo sapien
gaaaactcttaagtcggaccattgc

SEQ ID NO: 1087730 - DNA, 25 bp, Homo sapien
cagattacacaatactctcgagacc

SEQ ID NO: 1087731 - DNA, 25 bp, Homo sapien
aatttgagctagtcacatcaggtgc

SEQ ID NO: 1087732 - DNA, 25 bp, Homo sapien
tcacaagacaccatagatgctcctc

SEQ ID NO: 1087733 - DNA, 25 bp, Homo sapien
tcaggtgctccatagtgacatgtgg

SEQ ID NO: 1087734 - DNA, 25 bp, Homo sapien
ctgagaaggggcactggagctccat

SEQ ID NO: 1087735 - DNA, 25 bp, Homo sapien
gagagaagagatgtataccccaaag

SEQ ID NO: 1087736 - DNA, 25 bp, Homo sapien
tgatgttataataccaatcagtggg

SEQ ID NO: 1087737 - DNA, 25 bp, Homo sapien
agaagagatgtataccccaaagcca

SEQ ID NO: 1087738 - DNA, 25 bp, Homo sapien
caggcctggagcagtttgatgttat

SEQ ID NO: 1087739 - DNA, 25 bp, Homo sapien
ccaaacccggtggtgtgtcaagtct

SEQ ID NO: 1087740 - DNA, 25 bp, Homo sapien
tacgttcgaagcttgctaggtggca

SEQ ID NO: 1087741 - DNA, 25 bp, Homo sapien
tgaggtaacctgtttccgcagctcg

SEQ ID NO: 1087742 - DNA, 25 bp, Homo sapien
ccagagtctctggaaagccgggact

SEQ ID NO: 1087743 - DNA, 25 bp, Homo sapien
tttgaacattctttttccaattcat

SEQ ID NO: 1087744 - DNA, 25 bp, Homo sapien
ttttgaacattctttttccaattca

SEQ ID NO: 1087745 - DNA, 25 bp, Homo sapien
aacattctttttccaattcattagg

SEQ ID NO: 1087746 - DNA, 25 bp, Homo sapien
attctttttccaattcattaggcat

SEQ ID NO: 1087747 - DNA, 25 bp, Homo sapien
tcattctcttcatggtctagtgagg

SEQ ID NO: 1087748 - DNA, 25 bp, Homo sapien
ctcttcatggtctagtgaggatgca

SEQ ID NO: 1087749 - DNA, 25 bp, Homo sapien
ttctcttcatggtctagtgaggatg

SEQ ID NO: 1087750 - DNA, 25 bp, Homo sapien
ttccttggtttgttgaagtgtttca

SEQ ID NO: 1087751 - DNA, 25 bp, Homo sapien
tcacccagactgtagtgtggtggta

SEQ ID NO: 1087752 - DNA, 25 bp, Homo sapien
agctggactacaggcacgtcccatc

SEQ ID NO: 1087753 - DNA, 25 bp, Homo sapien
acccagactgtagtgtggtggtatg

SEQ ID NO: 1087754 - DNA, 25 bp, Homo sapien
ctggactacaggcacgtcccatcac

SEQ ID NO: 1087755 - DNA, 25 bp, Homo sapien
ttaggtgaagccatatgactgagtt

SEQ ID NO: 1087756 - DNA, 25 bp, Homo sapien
gaagccatatgactgagttctaacc

SEQ ID NO: 1087757 - DNA, 25 bp, Homo sapien
gccatatgactgagttctaaccaat

SEQ ID NO: 1087758 - DNA, 25 bp, Homo sapien
ggtgaagccatatgactgagttcta

SEQ ID NO: 1087759 - DNA, 25 bp, Homo sapien
tcttatcttatacaagctcttccag

SEQ ID NO: 1087760 - DNA, 25 bp, Homo sapien
tctggttgttcgtctaaatatattt

SEQ ID NO: 1087761 - DNA, 25 bp, Homo sapien
atacaagctcttccagagaatagaa

SEQ ID NO: 1087762 - DNA, 25 bp, Homo sapien
cagagaatagaaatagatttctggt

SEQ ID NO: 1087763 - DNA, 25 bp, Homo sapien
atcaattaagactcactgccttcgg

SEQ ID NO: 1087764 - DNA, 25 bp, Homo sapien
aaagaactgaataaggagttcgatc

SEQ ID NO: 1087765 - DNA, 25 bp, Homo sapien
aagactcactgccttcggagcagcc

SEQ ID NO: 1087766 - DNA, 25 bp, Homo sapien
gactgtgcacaatcaattaagactc

SEQ ID NO: 1087767 - DNA, 25 bp, Homo sapien
aaccacaaagctgatgccaaagcaa

SEQ ID NO: 1087768 - DNA, 25 bp, Homo sapien
aagaaaccaattcccaaagtgacag

SEQ ID NO: 1087769 - DNA, 25 bp, Homo sapien
ctgtaattggaatctcccagtatga

SEQ ID NO: 1087770 - DNA, 25 bp, Homo sapien
tcccagtatgaaaatttcgagaaat

SEQ ID NO: 1087771 - DNA, 25 bp, Homo sapien
cattgatggtctttgcctgcatctc

SEQ ID NO: 1087772 - DNA, 25 bp, Homo sapien
tctctcatcaattgctttaaatttg

SEQ ID NO: 1087773 - DNA, 25 bp, Homo sapien
gaaccggatctttcagcatcttgat

SEQ ID NO: 1087774 - DNA, 25 bp, Homo sapien
gaaaaaggccatctccaaatcagga

SEQ ID NO: 1087775 - DNA, 25 bp, Homo sapien
agggccttcaccagaaccggatctt

SEQ ID NO: 1087776 - DNA, 25 bp, Homo sapien
gagatgtgaaagtgcgctcttgctc

SEQ ID NO: 1087777 - DNA, 25 bp, Homo sapien
tgctgcttccttttttctttgctcc

SEQ ID NO: 1087778 - DNA, 25 bp, Homo sapien
tgtgctgcttccttttttctttgct

SEQ ID NO: 1087779 - DNA, 25 bp, Homo sapien
cttttatatgtgctgcttccttttt

SEQ ID NO: 1087780 - DNA, 25 bp, Homo sapien
ctgcttccttttttctttgctcctc

SEQ ID NO: 1087781 - DNA, 25 bp, Homo sapien
gggttcatctttagaatgatcttta

SEQ ID NO: 1087782 - DNA, 25 bp, Homo sapien
aatgtaacactgctgcgatttgttg

SEQ ID NO: 1087783 - DNA, 25 bp, Homo sapien
gcgatttgttgtggagctggtctct

SEQ ID NO: 1087784 - DNA, 25 bp, Homo sapien
tggtaatgttgataagcttaatgta

SEQ ID NO: 1087785 - DNA, 25 bp, Homo sapien
tagagccgctctatggtaaagaaca

SEQ ID NO: 1087786 - DNA, 25 bp, Homo sapien
tccattagaggttccccgagagaag

SEQ ID NO: 1087787 - DNA, 25 bp, Homo sapien
gcatggacatgttaagagactcaga

SEQ ID NO: 1087788 - DNA, 25 bp, Homo sapien
cattggagagttccttttcactaga

SEQ ID NO: 1087789 - DNA, 25 bp, Homo sapien
cacattgtttaatttacacagttgt

SEQ ID NO: 1087790 - DNA, 25 bp, Homo sapien
ctagcagcggtgtcttctgaggctc

SEQ ID NO: 1087791 - DNA, 25 bp, Homo sapien
tctatttagctcatttcaagatatg

SEQ ID NO: 1087792 - DNA, 25 bp, Homo sapien
gatgcataagtcttcaatgccagag

SEQ ID NO: 1087793 - DNA, 25 bp, Homo sapien
gattcttcgtattatgcattcacac

SEQ ID NO: 1087794 - DNA, 25 bp, Homo sapien
gtagccagattcttcgtattatgca

SEQ ID NO: 1087795 - DNA, 25 bp, Homo sapien
agaaactgtagccagattcttcgta

SEQ ID NO: 1087796 - DNA, 25 bp, Homo sapien
aatttgttgaatatgtccattcaaa

SEQ ID NO: 1087797 - DNA, 25 bp, Homo sapien
tccgccaagcggtctatttatataa

SEQ ID NO: 1087798 - DNA, 25 bp, Homo sapien
tatataaacccatatcggaatggat

SEQ ID NO: 1087799 - DNA, 25 bp, Homo sapien
catatcggaatggatcagtcccatg

SEQ ID NO: 1087800 - DNA, 25 bp, Homo sapien
accctccgccaagcggtctatttat

SEQ ID NO: 1087801 - DNA, 25 bp, Homo sapien
ttcgcctcctgcgaggcagcgatgg

SEQ ID NO: 1087802 - DNA, 25 bp, Homo sapien
tccgcggtccgcctcggttggcgag

SEQ ID NO: 1087803 - DNA, 25 bp, Homo sapien
tggggtcgttcgcacactccgcggt

SEQ ID NO: 1087804 - DNA, 25 bp, Homo sapien
tgctgggcctaatccaggtcagcgg

SEQ ID NO: 1087805 - DNA, 25 bp, Homo sapien
agactcgtgaagcagggagatgtca

SEQ ID NO: 1087806 - DNA, 25 bp, Homo sapien
gcccggtcggactgagactcgtgaa

SEQ ID NO: 1087807 - DNA, 25 bp, Homo sapien
ggctccgtcccctcgccaaagctag

SEQ ID NO: 1087808 - DNA, 25 bp, Homo sapien
cccctcgccaaagctagcccggtcg

SEQ ID NO: 1087809 - DNA, 25 bp, Homo sapien
ctaaggggtcaatgccgcccaggcc

SEQ ID NO: 1087810 - DNA, 25 bp, Homo sapien
atgccctcagatccagccctaaggg

SEQ ID NO: 1087811 - DNA, 25 bp, Homo sapien
tccgccagagctgcctctactcgct

SEQ ID NO: 1087812 - DNA, 25 bp, Homo sapien
agcaaatgccctcagatccagccct

SEQ ID NO: 1087813 - DNA, 25 bp, Homo sapien
ctgcaacaaaggtttctactattac

SEQ ID NO: 1087814 - DNA, 25 bp, Homo sapien
agtgcaacagcgcaacctagcctca

SEQ ID NO: 1087815 - DNA, 25 bp, Homo sapien
aacagcgcaacctagcctcaacaca

SEQ ID NO: 1087816 - DNA, 25 bp, Homo sapien
gtgcaacagcgcaacctagcctcaa

SEQ ID NO: 1087817 - DNA, 25 bp, Homo sapien
gcgcaacctagcctcaacacaacct

SEQ ID NO: 1087818 - DNA, 25 bp, Homo sapien
taccagatactggtgaagacgtggc

SEQ ID NO: 1087819 - DNA, 25 bp, Homo sapien
gcagaaaattagtgcaaccacttgg

SEQ ID NO: 1087820 - DNA, 25 bp, Homo sapien
caaaacgtttactgcagaatctagg

SEQ ID NO: 1087821 - DNA, 25 bp, Homo sapien
aagacgtggcacaaatgaaactctc

SEQ ID NO: 1087822 - DNA, 25 bp, Homo sapien
tgccattccgattatcactgatcac

SEQ ID NO: 1087823 - DNA, 25 bp, Homo sapien
cacttattgcaaggtttcagttaac

SEQ ID NO: 1087824 - DNA, 25 bp, Homo sapien
caactaatgttgtaaattgcgtgcc

SEQ ID NO: 1087825 - DNA, 25 bp, Homo sapien
cagtccccacttattgcaaggtttc

SEQ ID NO: 1087826 - DNA, 25 bp, Homo sapien
cacagggtgtttggcagttctctcc

SEQ ID NO: 1087827 - DNA, 25 bp, Homo sapien
tagtgaagggcttctcaacctgggc

SEQ ID NO: 1087828 - DNA, 25 bp, Homo sapien
gtacatcacagggtgtttggcagtt

SEQ ID NO: 1087829 - DNA, 25 bp, Homo sapien
tgggcaatactgacattttagtaag

SEQ ID NO: 1087830 - DNA, 25 bp, Homo sapien
gaagaggtagtttaagggcagacac

SEQ ID NO: 1087831 - DNA, 25 bp, Homo sapien
gggcagacacactaacagcagatga

SEQ ID NO: 1087832 - DNA, 25 bp, Homo sapien
caataaaaagtaggtgcaagaatcc

SEQ ID NO: 1087833 - DNA, 25 bp, Homo sapien
gatgcactattctgttacctccagg

SEQ ID NO: 1087834 - DNA, 25 bp, Homo sapien
cagtatcacgataaggtgaaaggct

SEQ ID NO: 1087835 - DNA, 25 bp, Homo sapien
ctgggatcccaggagtgagcagcca

SEQ ID NO: 1087836 - DNA, 25 bp, Homo sapien
taaaaagcacatctcagcactgagg

SEQ ID NO: 1087837 - DNA, 25 bp, Homo sapien
ccagtgtgttcagagctatgcaacc

SEQ ID NO: 1087838 - DNA, 25 bp, Homo sapien
ttcctcgttgttgattaggagacac

SEQ ID NO: 1087839 - DNA, 25 bp, Homo sapien
tcctcgttgttgattaggagacaca

SEQ ID NO: 1087840 - DNA, 25 bp, Homo sapien
cctcgttgttgattaggagacacat

SEQ ID NO: 1087841 - DNA, 25 bp, Homo sapien
tcctagttgaccagttttgatgagc

SEQ ID NO: 1087842 - DNA, 25 bp, Homo sapien
ccaactatgggtttttcagaggcta

SEQ ID NO: 1087843 - DNA, 25 bp, Homo sapien
ttaaagatgaatgtggcctcaccct

SEQ ID NO: 1087844 - DNA, 25 bp, Homo sapien
tgagctgtcatccacacgcaaactg

SEQ ID NO: 1087845 - DNA, 25 bp, Homo sapien
ccttgaattaccatttccagtctaa

SEQ ID NO: 1087846 - DNA, 25 bp, Homo sapien
gaatcctcagaatcaacagagcagt

SEQ ID NO: 1087847 - DNA, 25 bp, Homo sapien
cctttgcagaatcctcagaatcaac

SEQ ID NO: 1087848 - DNA, 25 bp, Homo sapien
ttacctttgcagaatcctcagaatc

SEQ ID NO: 1087849 - DNA, 25 bp, Homo sapien
ttgcagaatcctcagaatcaacaga

SEQ ID NO: 1087850 - DNA, 25 bp, Homo sapien
ctcttcagtcagctgagttgctagc

SEQ ID NO: 1087851 - DNA, 25 bp, Homo sapien
tctttgagctatcctaatttgttcc

SEQ ID NO: 1087852 - DNA, 25 bp, Homo sapien
gctgagttgctagccgagtctggct

SEQ ID NO: 1087853 - DNA, 25 bp, Homo sapien
gggtcataaactcctttaggcagat

SEQ ID NO: 1087854 - DNA, 25 bp, Homo sapien
actaacttcagcctacttactgggt

SEQ ID NO: 1087855 - DNA, 25 bp, Homo sapien
tctcttgcattaagcgaagtgtttc

SEQ ID NO: 1087856 - DNA, 25 bp, Homo sapien
cataacattctcttgctagtagcca

SEQ ID NO: 1087857 - DNA, 25 bp, Homo sapien
ctgactttctaaagtgcaggagaaa

SEQ ID NO: 1087858 - DNA, 25 bp, Homo sapien
tgcctgtcatcttattgccaaagca

SEQ ID NO: 1087859 - DNA, 25 bp, Homo sapien
catcttattgccaaagcatgcaaac

SEQ ID NO: 1087860 - DNA, 25 bp, Homo sapien
ttaatctgagtaacacatcagaatg

SEQ ID NO: 1087861 - DNA, 25 bp, Homo sapien
taaatcccattaaagacagtgttaa

SEQ ID NO: 1087862 - DNA, 25 bp, Homo sapien
caattagtctcataggatgaaagca

SEQ ID NO: 1087863 - DNA, 25 bp, Homo sapien
gcatgcacggcagaaatcgaattgg

SEQ ID NO: 1087864 - DNA, 25 bp, Homo sapien
caaccagtcatctatacagtccagg

SEQ ID NO: 1087865 - DNA, 25 bp, Homo sapien
agtccaggtgatagatgtgcatgca

SEQ ID NO: 1087866 - DNA, 25 bp, Homo sapien
aataaaaccttgacccaaatgccag

SEQ ID NO: 1087867 - DNA, 25 bp, Homo sapien
ggaaacttttgtgcacgatcttaat

SEQ ID NO: 1087868 - DNA, 25 bp, Homo sapien
tacacaattcctatgtactggagca

SEQ ID NO: 1087869 - DNA, 25 bp, Homo sapien
caaaatggtggttcacttgaagtca

SEQ ID NO: 1087870 - DNA, 25 bp, Homo sapien
gcttacaagctaggagatcactttg

SEQ ID NO: 1087871 - DNA, 25 bp, Homo sapien
taaactggttttcaagcatagagcc

SEQ ID NO: 1087872 - DNA, 25 bp, Homo sapien
gagccagccccaacgataataatac

SEQ ID NO: 1087873 - DNA, 25 bp, Homo sapien
agaaaagggatagtgcatctcagtt

SEQ ID NO: 1087874 - DNA, 25 bp, Homo sapien
cacttctgatgttaggttgagacca

SEQ ID NO: 1087875 - DNA, 25 bp, Homo sapien
gaaagactaactgcaacatggaaga

SEQ ID NO: 1087876 - DNA, 25 bp, Homo sapien
cagctagcaggatgtaatagatacc

SEQ ID NO: 1087877 - DNA, 25 bp, Homo sapien
tacagtaatgagagatgcagtatcc

SEQ ID NO: 1087878 - DNA, 25 bp, Homo sapien
tacttatgtaatcaactctaacttt

SEQ ID NO: 1087879 - DNA, 25 bp, Homo sapien
tacttacttatgtaatcaactctaa

SEQ ID NO: 1087880 - DNA, 25 bp, Homo sapien
tatggggaatacttacttatgtaat

SEQ ID NO: 1087881 - DNA, 25 bp, Homo sapien
gggaatacttacttatgtaatcaac

SEQ ID NO: 1087882 - DNA, 25 bp, Homo sapien
gcttttgtaagcacagatagccacc

SEQ ID NO: 1087883 - DNA, 25 bp, Homo sapien
ccagtctcaagaccttaggtagttc

SEQ ID NO: 1087884 - DNA, 25 bp, Homo sapien
ccatgactgctacccactgcttttg

SEQ ID NO: 1087885 - DNA, 25 bp, Homo sapien
gcatttacacgcaagtttcatcagt

SEQ ID NO: 1087886 - DNA, 25 bp, Homo sapien
actgtcctaaggcagtgccaggctg

SEQ ID NO: 1087887 - DNA, 25 bp, Homo sapien
ttagctggacgtggttgagcgcacc

SEQ ID NO: 1087888 - DNA, 25 bp, Homo sapien
gaagaaacaataaatggctttagtc

SEQ ID NO: 1087889 - DNA, 25 bp, Homo sapien
ataacattaatcagatgcatccagc

SEQ ID NO: 1087890 - DNA, 25 bp, Homo sapien
gagctgagatcgtgtcattgtactc

SEQ ID NO: 1087891 - DNA, 25 bp, Homo sapien
agtgagctgagatcgtgtcattgta

SEQ ID NO: 1087892 - DNA, 25 bp, Homo sapien
cttgaacccagtaggcagaggttgc

SEQ ID NO: 1087893 - DNA, 25 bp, Homo sapien
tcccagctacttgggcaggagaatc

SEQ ID NO: 1087894 - DNA, 25 bp, Homo sapien
gcagatccatggtctcatcagtgtc

SEQ ID NO: 1087895 - DNA, 25 bp, Homo sapien
tactccatggagtcaaggacacact

SEQ ID NO: 1087896 - DNA, 25 bp, Homo sapien
aggacacactttcgaatccaggcag

SEQ ID NO: 1087897 - DNA, 25 bp, Homo sapien
tgtagctttgtgcagcagttccggg

SEQ ID NO: 1087898 - DNA, 25 bp, Homo sapien
gacatgacaggagccataggttgtc

SEQ ID NO: 1087899 - DNA, 25 bp, Homo sapien
tcgggacttaggtggcggtggacta

SEQ ID NO: 1087900 - DNA, 25 bp, Homo sapien
ggagctggagcccaaggtacaggat

SEQ ID NO: 1087901 - DNA, 25 bp, Homo sapien
aaccattcaacctggagaaagggag

SEQ ID NO: 1087902 - DNA, 25 bp, Homo sapien
gaacgagtactcagtggatgacgag

SEQ ID NO: 1087903 - DNA, 25 bp, Homo sapien
aaattgttgaaaggcctgtgtctga

SEQ ID NO: 1087904 - DNA, 25 bp, Homo sapien
ggccgaggagaattttaggagcatc

SEQ ID NO: 1087905 - DNA, 25 bp, Homo sapien
tgtctgaaatacctgggccgtgtcc

SEQ ID NO: 1087906 - DNA, 25 bp, Homo sapien
acagccgctactgccgggagacctt

SEQ ID NO: 1087907 - DNA, 25 bp, Homo sapien
agatcaccccccgtagcagtgacag

SEQ ID NO: 1087908 - DNA, 25 bp, Homo sapien
agtgacagccgctactgccgggaga

SEQ ID NO: 1087909 - DNA, 25 bp, Homo sapien
gctactgccgggagaccttcagcaa

SEQ ID NO: 1087910 - DNA, 25 bp, Homo sapien
ttccccacctgcctcgtggcgttca

SEQ ID NO: 1087911 - DNA, 25 bp, Homo sapien
tcacagacacgttcagagcagcctt

SEQ ID NO: 1087912 - DNA, 25 bp, Homo sapien
ccaactttctcacggagctgtagtc

SEQ ID NO: 1087913 - DNA, 25 bp, Homo sapien
tctgggtcccaactttctcacggag

SEQ ID NO: 1087914 - DNA, 25 bp, Homo sapien
cggtgcgggagcgcgggtcgccgcg

SEQ ID NO: 1087915 - DNA, 25 bp, Homo sapien
cagaacccccggcggtgcgggagcg

SEQ ID NO: 1087916 - DNA, 25 bp, Homo sapien
ccggcggtgcgggagcgcgggtcgc

SEQ ID NO: 1087917 - DNA, 25 bp, Homo sapien
gggagcgcgggtcgccgcgggcggc

SEQ ID NO: 1087918 - DNA, 25 bp, Homo sapien
tggtctcctgcagtcactcagtggg

SEQ ID NO: 1087919 - DNA, 25 bp, Homo sapien
tgcgtgaatcaaatgaaccccatgc

SEQ ID NO: 1087920 - DNA, 25 bp, Homo sapien
gatggattccagtcctagcttgcca

SEQ ID NO: 1087921 - DNA, 25 bp, Homo sapien
gcagtgagtgctaaaccgtgttttc

SEQ ID NO: 1087922 - DNA, 25 bp, Homo sapien
gatggtgactggttaactcttcatg

SEQ ID NO: 1087923 - DNA, 25 bp, Homo sapien
ctctgatgagtcatggttaagagca

SEQ ID NO: 1087924 - DNA, 25 bp, Homo sapien
tctgtgccagaagatcaggtcaggt

SEQ ID NO: 1087925 - DNA, 25 bp, Homo sapien
gagacaccgcctcagggctcggtgc

SEQ ID NO: 1087926 - DNA, 25 bp, Homo sapien
agtgcatgacatgtgataggggccc

SEQ ID NO: 1087927 - DNA, 25 bp, Homo sapien
acatgtattgcttgtggtctcacca

SEQ ID NO: 1087928 - DNA, 25 bp, Homo sapien
tgacatgtgataggggccccagcct

SEQ ID NO: 1087929 - DNA, 25 bp, Homo sapien
ttaaatgcctagagatttgaaagtg

SEQ ID NO: 1087930 - DNA, 25 bp, Homo sapien
gcttcccttactgagctcatttttc

SEQ ID NO: 1087931 - DNA, 25 bp, Homo sapien
ttcccttactgagctcatttttcat

SEQ ID NO: 1087932 - DNA, 25 bp, Homo sapien
cttcccttactgagctcatttttca

SEQ ID NO: 1087933 - DNA, 25 bp, Homo sapien
ctgcttcccttactgagctcatttt

SEQ ID NO: 1087934 - DNA, 25 bp, Homo sapien
caggtgactggctctagcatcactg

SEQ ID NO: 1087935 - DNA, 25 bp, Homo sapien
ggtgtggggagagttccagctctaa

SEQ ID NO: 1087936 - DNA, 25 bp, Homo sapien
gactggctctagcatcactgttcgc

SEQ ID NO: 1087937 - DNA, 25 bp, Homo sapien
tggctctagcatcactgttcgctgt

SEQ ID NO: 1087938 - DNA, 25 bp, Homo sapien
tgtaacgcaccaggaaacaggtctc

SEQ ID NO: 1087939 - DNA, 25 bp, Homo sapien
aacaggtctcctgacaggaggaagg

SEQ ID NO: 1087940 - DNA, 25 bp, Homo sapien
cacaggtgatccaagtaaggtcact

SEQ ID NO: 1087941 - DNA, 25 bp, Homo sapien
ggtgggccactctgatgcgctgact

SEQ ID NO: 1087942 - DNA, 25 bp, Homo sapien
caaggcagattgagtatctgatgag

SEQ ID NO: 1087943 - DNA, 25 bp, Homo sapien
atgttgggggatgcaaactgtcact

SEQ ID NO: 1087944 - DNA, 25 bp, Homo sapien
aaggggcgaggagtctctcttgaac

SEQ ID NO: 1087945 - DNA, 25 bp, Homo sapien
ccttagacataaggatttccacata

SEQ ID NO: 1087946 - DNA, 25 bp, Homo sapien
agcgaccgcaggtaccgggcagggg

SEQ ID NO: 1087947 - DNA, 25 bp, Homo sapien
gaaaagcgaccgcaggtaccgggca

SEQ ID NO: 1087948 - DNA, 25 bp, Homo sapien
cgaccgcaggtaccgggcaggggtg

SEQ ID NO: 1087949 - DNA, 25 bp, Homo sapien
aaagcgaccgcaggtaccgggcagg

SEQ ID NO: 1087950 - DNA, 25 bp, Homo sapien
taaggccatcgtgtggcccgtcagt

SEQ ID NO: 1087951 - DNA, 25 bp, Homo sapien
gcctggagctccgtttctcccggtg

SEQ ID NO: 1087952 - DNA, 25 bp, Homo sapien
tggtgctgctatgtcccgcagggac

SEQ ID NO: 1087953 - DNA, 25 bp, Homo sapien
gcccagcatttgactcggtcccgag

SEQ ID NO: 1087954 - DNA, 25 bp, Homo sapien
gacagataagtattgcccagagcta

SEQ ID NO: 1087955 - DNA, 25 bp, Homo sapien
tgtgtataccccgtggaccaacata

SEQ ID NO: 1087956 - DNA, 25 bp, Homo sapien
caaacctctaagttgtagcctgtaa

SEQ ID NO: 1087957 - DNA, 25 bp, Homo sapien
ttatgttgttgactctggctccagg

SEQ ID NO: 1087958 - DNA, 25 bp, Homo sapien
taaaactgacctagtggacaagctg

SEQ ID NO: 1087959 - DNA, 25 bp, Homo sapien
ttttgataaacgaatccagtgacct

SEQ ID NO: 1087960 - DNA, 25 bp, Homo sapien
tacatatgaagcaagggctgaatca

SEQ ID NO: 1087961 - DNA, 25 bp, Homo sapien
ctgggtcaacaagtcaaggtggtat

SEQ ID NO: 1087962 - DNA, 25 bp, Homo sapien
caaaactacctgtgagcatgggaat

SEQ ID NO: 1087963 - DNA, 25 bp, Homo sapien
tataaaagccgtaacccagtcagac

SEQ ID NO: 1087964 - DNA, 25 bp, Homo sapien
ccactatggaaaagggatgctgtag

SEQ ID NO: 1087965 - DNA, 25 bp, Homo sapien
acttaggcccctgttctggtataca

SEQ ID NO: 1087966 - DNA, 25 bp, Homo sapien
gttgaactcattgagtcctgctttc

SEQ ID NO: 1087967 - DNA, 25 bp, Homo sapien
ccccagcaggtatcttacgcgtgat

SEQ ID NO: 1087968 - DNA, 25 bp, Homo sapien
tggtttctctaaaagtgtttctgga

SEQ ID NO: 1087969 - DNA, 25 bp, Homo sapien
tacgcgtgatctgaacaagttgaac

SEQ ID NO: 1087970 - DNA, 25 bp, Homo sapien
agcagcaccggaaggtggaccactg

SEQ ID NO: 1087971 - DNA, 25 bp, Homo sapien
cagcaccggaaggtggaccactgcc

SEQ ID NO: 1087972 - DNA, 25 bp, Homo sapien
gcagcaccggaaggtggaccactgc

SEQ ID NO: 1087973 - DNA, 25 bp, Homo sapien
atcaaaagggactccagaactgttg

SEQ ID NO: 1087974 - DNA, 25 bp, Homo sapien
tccagaactgttggatacatcaagt

SEQ ID NO: 1087975 - DNA, 25 bp, Homo sapien
caagtacttttgtctgccatgaccc

SEQ ID NO: 1087976 - DNA, 25 bp, Homo sapien
tggtctaaaaaccagacagaatgat

SEQ ID NO: 1087977 - DNA, 25 bp, Homo sapien
ctattctttggcattaattttctta

SEQ ID NO: 1087978 - DNA, 25 bp, Homo sapien
tattctttggcattaattttcttaa

SEQ ID NO: 1087979 - DNA, 25 bp, Homo sapien
cattaattttcttaaacattccata

SEQ ID NO: 1087980 - DNA, 25 bp, Homo sapien
tctttggcattaattttcttaaaca

SEQ ID NO: 1087981 - DNA, 25 bp, Homo sapien
tgctccagtttcattagccacatgc

SEQ ID NO: 1087982 - DNA, 25 bp, Homo sapien
gactgtccactgtagcatctttgat

SEQ ID NO: 1087983 - DNA, 25 bp, Homo sapien
ctgctccagtttcattagccacatg

SEQ ID NO: 1087984 - DNA, 25 bp, Homo sapien
ctttgtgatcagctggtaaagactg

SEQ ID NO: 1087985 - DNA, 25 bp, Homo sapien
tactaatttgtaccacgtctgcagt

SEQ ID NO: 1087986 - DNA, 25 bp, Homo sapien
tggtatccgtccttttagatcctgc

SEQ ID NO: 1087987 - DNA, 25 bp, Homo sapien
gacactgttcgatagccttttaccc

SEQ ID NO: 1087988 - DNA, 25 bp, Homo sapien
tatctgtagaggcaactcctctttg

SEQ ID NO: 1087989 - DNA, 25 bp, Homo sapien
atgctaaccttccctgtatctttct

SEQ ID NO: 1087990 - DNA, 25 bp, Homo sapien
tatggaatgccacaagaatttgcat

SEQ ID NO: 1087991 - DNA, 25 bp, Homo sapien
gctaaccttccctgtatctttctag

SEQ ID NO: 1087992 - DNA, 25 bp, Homo sapien
aaatatggaatgccacaagaatttg

SEQ ID NO: 1087993 - DNA, 25 bp, Homo sapien
gctgaattaactagtcaggaatcgc

SEQ ID NO: 1087994 - DNA, 25 bp, Homo sapien
agcaagaaacagcagaattggagga

SEQ ID NO: 1087995 - DNA, 25 bp, Homo sapien
tcgcagatctccacttacgaagaag

SEQ ID NO: 1087996 - DNA, 25 bp, Homo sapien
gagctgagccgtctacagcaagaaa

SEQ ID NO: 1087997 - DNA, 25 bp, Homo sapien
caggattaggaggatggataaccat

SEQ ID NO: 1087998 - DNA, 25 bp, Homo sapien
cattgtttgctggtcttctagggaa

SEQ ID NO: 1087999 - DNA, 25 bp, Homo sapien
cagctgtagctgatgttctaaaata

SEQ ID NO: 1088000 - DNA, 25 bp, Homo sapien
tatttaaaaagcgattcaggattag

SEQ ID NO: 1088001 - DNA, 25 bp, Homo sapien
ggatatgcaaatcagccagtttggc

SEQ ID NO: 1088002 - DNA, 25 bp, Homo sapien
taacactgctgggtcaaactataaa

SEQ ID NO: 1088003 - DNA, 25 bp, Homo sapien
ccagtttggctatggttaacactgc

SEQ ID NO: 1088004 - DNA, 25 bp, Homo sapien
ccacagcattttgattgagatgtca

SEQ ID NO: 1088005 - DNA, 25 bp, Homo sapien
tgttgccagtttgcccttcataggg

SEQ ID NO: 1088006 - DNA, 25 bp, Homo sapien
tgggtgctgatacaaacggtgctgc

SEQ ID NO: 1088007 - DNA, 25 bp, Homo sapien
cccagatgtgggattgcagagccga

SEQ ID NO: 1088008 - DNA, 25 bp, Homo sapien
tcttggctgagaaccctgtaacaaa

SEQ ID NO: 1088009 - DNA, 25 bp, Homo sapien
gcagagagcacagttttccattccc

SEQ ID NO: 1088010 - DNA, 25 bp, Homo sapien
cagagagcacagttttccattcccc

SEQ ID NO: 1088011 - DNA, 25 bp, Homo sapien
tgcagagagcacagttttccattcc

SEQ ID NO: 1088012 - DNA, 25 bp, Homo sapien
gagagcacagttttccattcccctt

SEQ ID NO: 1088013 - DNA, 25 bp, Homo sapien
caagcattttgggtaggggattcgc

SEQ ID NO: 1088014 - DNA, 25 bp, Homo sapien
ccccaagataggataatattccaga

SEQ ID NO: 1088015 - DNA, 25 bp, Homo sapien
caagataggataatattccagaatc

SEQ ID NO: 1088016 - DNA, 25 bp, Homo sapien
agcattttgggtaggggattcgcac

SEQ ID NO: 1088017 - DNA, 25 bp, Homo sapien
tagtacctgcttctaatatggaata

SEQ ID NO: 1088018 - DNA, 25 bp, Homo sapien
ttttgtatcacaacctgaccaggta

SEQ ID NO: 1088019 - DNA, 25 bp, Homo sapien
tggctttaaggtacataggaacgta

SEQ ID NO: 1088020 - DNA, 25 bp, Homo sapien
gcccggctggttgaacattcttata

SEQ ID NO: 1088021 - DNA, 25 bp, Homo sapien
cctcgagtagaacatgaactgaaag

SEQ ID NO: 1088022 - DNA, 25 bp, Homo sapien
caccattcctagctcataaactttc

SEQ ID NO: 1088023 - DNA, 25 bp, Homo sapien
cttttcttgccctcgagtagaacat

SEQ ID NO: 1088024 - DNA, 25 bp, Homo sapien
ctgggaggccatatgggcatgagcc

SEQ ID NO: 1088025 - DNA, 25 bp, Homo sapien
tctaggatgtgagtacagattttat

SEQ ID NO: 1088026 - DNA, 25 bp, Homo sapien
taagttagtattgatctaggatgtg

SEQ ID NO: 1088027 - DNA, 25 bp, Homo sapien
ggacaattggcatgtactactgagc

SEQ ID NO: 1088028 - DNA, 25 bp, Homo sapien
ttgtgtaaataaattgtcaggttaa

SEQ ID NO: 1088029 - DNA, 25 bp, Homo sapien
ggatccaaacacatacttgtacagt

SEQ ID NO: 1088030 - DNA, 25 bp, Homo sapien
cctaaattgcattcacaagggagga

SEQ ID NO: 1088031 - DNA, 25 bp, Homo sapien
cctcatatggtagaagggcgtaaaa

SEQ ID NO: 1088032 - DNA, 25 bp, Homo sapien
ctgggaggactctttgatacgtacc

SEQ ID NO: 1088033 - DNA, 25 bp, Homo sapien
tgggcaacatgctcgctttcgcctc

SEQ ID NO: 1088034 - DNA, 25 bp, Homo sapien
ttggtgacatagctgagtcttttgg

SEQ ID NO: 1088035 - DNA, 25 bp, Homo sapien
tcttttggcaaatctaaggtcatga

SEQ ID NO: 1088036 - DNA, 25 bp, Homo sapien
gttttagctattatatctaggtcct

SEQ ID NO: 1088037 - DNA, 25 bp, Homo sapien
gactgccttctatcactttttgtgg

SEQ ID NO: 1088038 - DNA, 25 bp, Homo sapien
agctatcaccctcccatattgcatg

SEQ ID NO: 1088039 - DNA, 25 bp, Homo sapien
tgtggtttatctatgttgcagcaag

SEQ ID NO: 1088040 - DNA, 25 bp, Homo sapien
tctatagagtttgttattctggact

SEQ ID NO: 1088041 - DNA, 25 bp, Homo sapien
cttgcctgcattgtggtatctcact

SEQ ID NO: 1088042 - DNA, 25 bp, Homo sapien
tccttgcctgcattgtggtatctca

SEQ ID NO: 1088043 - DNA, 25 bp, Homo sapien
ccttgcctgcattgtggtatctcac

SEQ ID NO: 1088044 - DNA, 25 bp, Homo sapien
gcgtctcctcagacggttctctcca

SEQ ID NO: 1088045 - DNA, 25 bp, Homo sapien
ctgctcctgtgacccaaactctccc

SEQ ID NO: 1088046 - DNA, 25 bp, Homo sapien
tccagagctggtggcgcgtgcttcc

SEQ ID NO: 1088047 - DNA, 25 bp, Homo sapien
cgcgtgcttcccgattggggcccat

SEQ ID NO: 1088048 - DNA, 25 bp, Homo sapien
caatgtaaacatggtgtccgggatg

SEQ ID NO: 1088049 - DNA, 25 bp, Homo sapien
taaacatggtgtccgggatgataag

SEQ ID NO: 1088050 - DNA, 25 bp, Homo sapien
gccaattacaatgtaaacatggtgt

SEQ ID NO: 1088051 - DNA, 25 bp, Homo sapien
tccgggatgataaggtgacagacac

SEQ ID NO: 1088052 - DNA, 25 bp, Homo sapien
gcaaaacctgttctcgagcttccct

SEQ ID NO: 1088053 - DNA, 25 bp, Homo sapien
gagcttccctcttgcctcgttgctt

SEQ ID NO: 1088054 - DNA, 25 bp, Homo sapien
ggtgtggtggctccgccagtcttgg

SEQ ID NO: 1088055 - DNA, 25 bp, Homo sapien
caggtggatccctttaacgggtgtg

SEQ ID NO: 1088056 - DNA, 25 bp, Homo sapien
gtctgcttccacttcaacttcccct

SEQ ID NO: 1088057 - DNA, 25 bp, Homo sapien
tctgcttccacttcaacttcccctc

SEQ ID NO: 1088058 - DNA, 25 bp, Homo sapien
tgcttccacttcaacttcccctcgg

SEQ ID NO: 1088059 - DNA, 25 bp, Homo sapien
ctgcttccacttcaacttcccctcg

SEQ ID NO: 1088060 - DNA, 25 bp, Homo sapien
gggccgcacgcatcccaggtgagct

SEQ ID NO: 1088061 - DNA, 25 bp, Homo sapien
aatgtagttagcctcgcctccaaag

SEQ ID NO: 1088062 - DNA, 25 bp, Homo sapien
gggcagctttcacctacccaggaag

SEQ ID NO: 1088063 - DNA, 25 bp, Homo sapien
caggtgagctcctgttgagctcgcg

SEQ ID NO: 1088064 - DNA, 25 bp, Homo sapien
gccgggcggccggtgtgtgtgaggg

SEQ ID NO: 1088065 - DNA, 25 bp, Homo sapien
cagcttcgccgacttcttggcttgt

SEQ ID NO: 1088066 - DNA, 25 bp, Homo sapien
gggaaagcgggtgcgactgcgggag

SEQ ID NO: 1088067 - DNA, 25 bp, Homo sapien
tgcggccgccgcgacctcgcccagg

SEQ ID NO: 1088068 - DNA, 25 bp, Homo sapien
acacaggtaacgccacacgcccgtc

SEQ ID NO: 1088069 - DNA, 25 bp, Homo sapien
acaggtaacgccacacgcccgtccg

SEQ ID NO: 1088070 - DNA, 25 bp, Homo sapien
gcccagctctctctgacacaggtaa

SEQ ID NO: 1088071 - DNA, 25 bp, Homo sapien
tctctctgacacaggtaacgccaca

SEQ ID NO: 1088072 - DNA, 25 bp, Homo sapien
agccccagtcagcccgtcttccttc

SEQ ID NO: 1088073 - DNA, 25 bp, Homo sapien
gccccagtcagcccgtcttccttcc

SEQ ID NO: 1088074 - DNA, 25 bp, Homo sapien
tatggcttgctcttgttagctggcc

SEQ ID NO: 1088075 - DNA, 25 bp, Homo sapien
agtctgagtagaattaggagttcct

SEQ ID NO: 1088076 - DNA, 25 bp, Homo sapien
ttgctcttgttagctggcctttgcc

SEQ ID NO: 1088077 - DNA, 25 bp, Homo sapien
gagtagaattaggagttccttggga

SEQ ID NO: 1088078 - DNA, 25 bp, Homo sapien
ttgatatgacaactgcctctaaaag

SEQ ID NO: 1088079 - DNA, 25 bp, Homo sapien
cgcagtgttcatgaagcgttgatat

SEQ ID NO: 1088080 - DNA, 25 bp, Homo sapien
ctgacttcacagacacgcagtgttc

SEQ ID NO: 1088081 - DNA, 25 bp, Homo sapien
catgaagcgttgatatgacaactgc

SEQ ID NO: 1088082 - DNA, 25 bp, Homo sapien
atacctggctatcattttcagatta

SEQ ID NO: 1088083 - DNA, 25 bp, Homo sapien
cctggctatcattttcagattattc

SEQ ID NO: 1088084 - DNA, 25 bp, Homo sapien
gaaactccagtataatgctgaatag

SEQ ID NO: 1088085 - DNA, 25 bp, Homo sapien
taatgctgaatagagttacctttct

SEQ ID NO: 1088086 - DNA, 25 bp, Homo sapien
caaaagcctacacgaaagttccaag

SEQ ID NO: 1088087 - DNA, 25 bp, Homo sapien
caagtgttatgtgttcacgctgatc

SEQ ID NO: 1088088 - DNA, 25 bp, Homo sapien
ttaacttcagactcacacccatggg

SEQ ID NO: 1088089 - DNA, 25 bp, Homo sapien
cacccatgggcttaagagagcttct

SEQ ID NO: 1088090 - DNA, 25 bp, Homo sapien
atgcggaaactgctcagagtgggta

SEQ ID NO: 1088091 - DNA, 25 bp, Homo sapien
taaacagctagtaagggacaggacc

SEQ ID NO: 1088092 - DNA, 25 bp, Homo sapien
tttatagattagaaagcactttgcc

SEQ ID NO: 1088093 - DNA, 25 bp, Homo sapien
tgaatacataaagtaggcaaccgac

SEQ ID NO: 1088094 - DNA, 25 bp, Homo sapien
gagtatagtctagccacaatgagta

SEQ ID NO: 1088095 - DNA, 25 bp, Homo sapien
cactaagcggaaggataggaattta

SEQ ID NO: 1088096 - DNA, 25 bp, Homo sapien
taataaatgcagagctcactaagcg

SEQ ID NO: 1088097 - DNA, 25 bp, Homo sapien
cataatgtcatcacccaatgggttc

SEQ ID NO: 1088098 - DNA, 25 bp, Homo sapien
gattcaaacataggtctgtcagcct

SEQ ID NO: 1088099 - DNA, 25 bp, Homo sapien
caccgaaggtttctgggacagacgc

SEQ ID NO: 1088100 - DNA, 25 bp, Homo sapien
tctacagttcagagccaccgaaggt

SEQ ID NO: 1088101 - DNA, 25 bp, Homo sapien
tgagactcagaaacaccaagcgaca

SEQ ID NO: 1088102 - DNA, 25 bp, Homo sapien
gttccaatactttacgctgcttctg

SEQ ID NO: 1088103 - DNA, 25 bp, Homo sapien
gatgtcagattcaaagttccaatac

SEQ ID NO: 1088104 - DNA, 25 bp, Homo sapien
tggtcctacgtgatccttggaggtg

SEQ ID NO: 1088105 - DNA, 25 bp, Homo sapien
gcttctgctggtcctacgtgatcct

SEQ ID NO: 1088106 - DNA, 25 bp, Homo sapien
caattgtacttcagcataattgcat

SEQ ID NO: 1088107 - DNA, 25 bp, Homo sapien
aattgtacttcagcataattgcatt

SEQ ID NO: 1088108 - DNA, 25 bp, Homo sapien
tagagacgcggtttcactctattgg

SEQ ID NO: 1088109 - DNA, 25 bp, Homo sapien
gagacgcggtttcactctattggcc

SEQ ID NO: 1088110 - DNA, 25 bp, Homo sapien
agacgcggtttcactctattggcca

SEQ ID NO: 1088111 - DNA, 25 bp, Homo sapien
agtagagacgcggtttcactctatt

SEQ ID NO: 1088112 - DNA, 25 bp, Homo sapien
ttacaggaagcatggttctgccatc

SEQ ID NO: 1088113 - DNA, 25 bp, Homo sapien
gattctgcaggatttacaggaagca

SEQ ID NO: 1088114 - DNA, 25 bp, Homo sapien
gcaggatttacaggaagcatggttc

SEQ ID NO: 1088115 - DNA, 25 bp, Homo sapien
gatttacaggaagcatggttctgcc

SEQ ID NO: 1088116 - DNA, 25 bp, Homo sapien
gatgataatatcagcggcctcaagg

SEQ ID NO: 1088117 - DNA, 25 bp, Homo sapien
catgcaaggcctttagaatccaacc

SEQ ID NO: 1088118 - DNA, 25 bp, Homo sapien
tagccactgctacaagctgccaagt

SEQ ID NO: 1088119 - DNA, 25 bp, Homo sapien
aaatatgcagaaaccgggcacagtg

SEQ ID NO: 1088120 - DNA, 25 bp, Homo sapien
tgtgcaccacctcacttaatttggt

SEQ ID NO: 1088121 - DNA, 25 bp, Homo sapien
tgcaccacctcacttaatttggtag

SEQ ID NO: 1088122 - DNA, 25 bp, Homo sapien
ccacctcacttaatttggtagagat

SEQ ID NO: 1088123 - DNA, 25 bp, Homo sapien
acctcacttaatttggtagagatgg

SEQ ID NO: 1088124 - DNA, 25 bp, Homo sapien
ctgtgtatcttgactttactacttg

SEQ ID NO: 1088125 - DNA, 25 bp, Homo sapien
gtgtatcttgactttactacttgtc

SEQ ID NO: 1088126 - DNA, 25 bp, Homo sapien
tgtgtatcttgactttactacttgt

SEQ ID NO: 1088127 - DNA, 25 bp, Homo sapien
gaattaacgagtatctgagtccata

SEQ ID NO: 1088128 - DNA, 25 bp, Homo sapien
tccagactaatcagcagaatagctc

SEQ ID NO: 1088129 - DNA, 25 bp, Homo sapien
gaatagctcatgttgcggatgtctt

SEQ ID NO: 1088130 - DNA, 25 bp, Homo sapien
caaacttacccaggtacctgagagt

SEQ ID NO: 1088131 - DNA, 25 bp, Homo sapien
cagcctgagttggatgccagactga

SEQ ID NO: 1088132 - DNA, 25 bp, Homo sapien
ccagcctgagttggatgccagactg

SEQ ID NO: 1088133 - DNA, 25 bp, Homo sapien
gcctgagttggatgccagactgaga

SEQ ID NO: 1088134 - DNA, 25 bp, Homo sapien
ctgagttggatgccagactgagaca

SEQ ID NO: 1088135 - DNA, 25 bp, Homo sapien
tgtaggactccatgccacggatgcg

SEQ ID NO: 1088136 - DNA, 25 bp, Homo sapien
caaacacgctttcttagggcgccta

SEQ ID NO: 1088137 - DNA, 25 bp, Homo sapien
agggcgcctattgtgtgtaggactc

SEQ ID NO: 1088138 - DNA, 25 bp, Homo sapien
gcctatatggcattcagcatgcggg

SEQ ID NO: 1088139 - DNA, 25 bp, Homo sapien
ggagccgccaatgacaacaaacggc

SEQ ID NO: 1088140 - DNA, 25 bp, Homo sapien
gggagccgccaatgacaacaaacgg

SEQ ID NO: 1088141 - DNA, 25 bp, Homo sapien
agcacgaaccaacggtactgccagc

SEQ ID NO: 1088142 - DNA, 25 bp, Homo sapien
ctgcattgtagtccagcacgaacca

SEQ ID NO: 1088143 - DNA, 25 bp, Homo sapien
tcagcggcccttccatgatggacgc

SEQ ID NO: 1088144 - DNA, 25 bp, Homo sapien
cacgttagtccatttgctcagcggc

SEQ ID NO: 1088145 - DNA, 25 bp, Homo sapien
tttggacctgtcccggctcctctgg

SEQ ID NO: 1088146 - DNA, 25 bp, Homo sapien
tggccactcctccgaggaagcagag

SEQ ID NO: 1088147 - DNA, 25 bp, Homo sapien
ggccactcctccgaggaagcagagc

SEQ ID NO: 1088148 - DNA, 25 bp, Homo sapien
cacttttggacctgtcccggctcct

SEQ ID NO: 1088149 - DNA, 25 bp, Homo sapien
aatccttcagaatccgaatggactg

SEQ ID NO: 1088150 - DNA, 25 bp, Homo sapien
caatatccaatgtgtctcctacctt

SEQ ID NO: 1088151 - DNA, 25 bp, Homo sapien
ttgccaatatccaatgtgtctccta

SEQ ID NO: 1088152 - DNA, 25 bp, Homo sapien
tcagaatccgaatggactgaaataa

SEQ ID NO: 1088153 - DNA, 25 bp, Homo sapien
aagcaagaattgactgcttgtctgc

SEQ ID NO: 1088154 - DNA, 25 bp, Homo sapien
tgttgttaatataaacccaatcagg

SEQ ID NO: 1088155 - DNA, 25 bp, Homo sapien
tctgctacaacacaggaagcaaaga

SEQ ID NO: 1088156 - DNA, 25 bp, Homo sapien
tcaagaaaactgcttgcaacagaag

SEQ ID NO: 1088157 - DNA, 25 bp, Homo sapien
gtggcctcacctagaagcaactcag

SEQ ID NO: 1088158 - DNA, 25 bp, Homo sapien
gccagcctcgtgtcaaactttcttt

SEQ ID NO: 1088159 - DNA, 25 bp, Homo sapien
ggctcccacatggacatgccagctg

SEQ ID NO: 1088160 - DNA, 25 bp, Homo sapien
gaaaaatccctaacctcagagtgag

SEQ ID NO: 1088161 - DNA, 25 bp, Homo sapien
caaaaactcttgagtagtcacagac

SEQ ID NO: 1088162 - DNA, 25 bp, Homo sapien
taagagatggaacagcctggagatc

SEQ ID NO: 1088163 - DNA, 25 bp, Homo sapien
gaaggccagaactaatatcagaagg

SEQ ID NO: 1088164 - DNA, 25 bp, Homo sapien
tactgccttgggacactcaatagcc

SEQ ID NO: 1088165 - DNA, 25 bp, Homo sapien
atgtagtctcctttctatttaagag

SEQ ID NO: 1088166 - DNA, 25 bp, Homo sapien
accacacccagaatgtagtctcctt

SEQ ID NO: 1088167 - DNA, 25 bp, Homo sapien
aatgtagtctcctttctatttaaga

SEQ ID NO: 1088168 - DNA, 25 bp, Homo sapien
gttagaggttacaatgcactgcact

SEQ ID NO: 1088169 - DNA, 25 bp, Homo sapien
taattaatgcctgggacctggaagg

SEQ ID NO: 1088170 - DNA, 25 bp, Homo sapien
tgcggtggaaggatcctgttagccc

SEQ ID NO: 1088171 - DNA, 25 bp, Homo sapien
ttaatatggcaacgcacagtggctc

SEQ ID NO: 1088172 - DNA, 25 bp, Homo sapien
cagccctctacaatacatcccaata

SEQ ID NO: 1088173 - DNA, 25 bp, Homo sapien
tgtataaaactaactcgtgatcctg

SEQ ID NO: 1088174 - DNA, 25 bp, Homo sapien
tcatgaggtcataagggaaaaagaa

SEQ ID NO: 1088175 - DNA, 25 bp, Homo sapien
caatcaatcaaagtcccctcatttc

SEQ ID NO: 1088176 - DNA, 25 bp, Homo sapien
tgaagaagacataaccttccatata

SEQ ID NO: 1088177 - DNA, 25 bp, Homo sapien
tatgtaatgatgaaagattaaaagc

SEQ ID NO: 1088178 - DNA, 25 bp, Homo sapien
agcccaaggtaaccgcatatgtaat

SEQ ID NO: 1088179 - DNA, 25 bp, Homo sapien
gctttatacctaagaacaagacaaa

SEQ ID NO: 1088180 - DNA, 25 bp, Homo sapien
gctgtgaggtacagaggccactggt

SEQ ID NO: 1088181 - DNA, 25 bp, Homo sapien
agctgtgaggtacagaggccactgg

SEQ ID NO: 1088182 - DNA, 25 bp, Homo sapien
ctgtgaggtacagaggccactggtc

SEQ ID NO: 1088183 - DNA, 25 bp, Homo sapien
ctatagggaagctggtgtgactgct

SEQ ID NO: 1088184 - DNA, 25 bp, Homo sapien
gaagctggtgtgactgctttcacca

SEQ ID NO: 1088185 - DNA, 25 bp, Homo sapien
aaggaagctgaccaatcacaggacc

SEQ ID NO: 1088186 - DNA, 25 bp, Homo sapien
catctcccaggaagtttttcaaccg

SEQ ID NO: 1088187 - DNA, 25 bp, Homo sapien
cgagagcctctcatcattttgtcct

SEQ ID NO: 1088188 - DNA, 25 bp, Homo sapien
taacacatcctctgcgagagcctct

SEQ ID NO: 1088189 - DNA, 25 bp, Homo sapien
ctgagtctaacacatcctctgcgag

SEQ ID NO: 1088190 - DNA, 25 bp, Homo sapien
tgcgagagcctctcatcattttgtc

SEQ ID NO: 1088191 - DNA, 25 bp, Homo sapien
gaaaatacatcataccactggctca

SEQ ID NO: 1088192 - DNA, 25 bp, Homo sapien
cagcacagcacctgatctgggtttc

SEQ ID NO: 1088193 - DNA, 25 bp, Homo sapien
ttctagtccagaggaatgggagcct

SEQ ID NO: 1088194 - DNA, 25 bp, Homo sapien
aatatgagcatttacctgacagggt

SEQ ID NO: 1088195 - DNA, 25 bp, Homo sapien
gagcaaaatcccaataaggcaaaca

SEQ ID NO: 1088196 - DNA, 25 bp, Homo sapien
tggaatactcaatgcaccaacgaca

SEQ ID NO: 1088197 - DNA, 25 bp, Homo sapien
ggcaaacaatgacatcagcaatatt

SEQ ID NO: 1088198 - DNA, 25 bp, Homo sapien
actactgctatagccctggaatact

SEQ ID NO: 1088199 - DNA, 25 bp, Homo sapien
tcatcgtctataccaatcacagctc

SEQ ID NO: 1088200 - DNA, 25 bp, Homo sapien
tattgtgaaggtgctgtcgtcctca

SEQ ID NO: 1088201 - DNA, 25 bp, Homo sapien
cagttattgtgaaggtgctgtcgtc

SEQ ID NO: 1088202 - DNA, 25 bp, Homo sapien
ggtgctgtcgtcctcatcgtctata

SEQ ID NO: 1088203 - DNA, 25 bp, Homo sapien
agcagatgggactatgaagagaaag

SEQ ID NO: 1088204 - DNA, 25 bp, Homo sapien
catgcaggatcagttgcaaaaccat

SEQ ID NO: 1088205 - DNA, 25 bp, Homo sapien
aaaagaagcagatgggactatgaag

SEQ ID NO: 1088206 - DNA, 25 bp, Homo sapien
tcatgcaggatcagttgcaaaacca

SEQ ID NO: 1088207 - DNA, 25 bp, Homo sapien
agccagatccacagtcgtttcaaat

SEQ ID NO: 1088208 - DNA, 25 bp, Homo sapien
catccattgcagatacaaatccctg

SEQ ID NO: 1088209 - DNA, 25 bp, Homo sapien
tcaaatcgatctacatccattgcag

SEQ ID NO: 1088210 - DNA, 25 bp, Homo sapien
tgcctaacctgcagtaccacttcat

SEQ ID NO: 1088211 - DNA, 25 bp, Homo sapien
gcatgcaatgccgaaacatagcagt

SEQ ID NO: 1088212 - DNA, 25 bp, Homo sapien
cctttctaccggtgaaccatagcat

SEQ ID NO: 1088213 - DNA, 25 bp, Homo sapien
ggtgaaccatagcatgcaatgccga

SEQ ID NO: 1088214 - DNA, 25 bp, Homo sapien
gccgaaacatagcagtggcagatgg

SEQ ID NO: 1088215 - DNA, 25 bp, Homo sapien
tcccatttctgagcaattaccagtt

SEQ ID NO: 1088216 - DNA, 25 bp, Homo sapien
cccatttctgagcaattaccagttc

SEQ ID NO: 1088217 - DNA, 25 bp, Homo sapien
ctcccatttctgagcaattaccagt

SEQ ID NO: 1088218 - DNA, 25 bp, Homo sapien
ctcccggctaattagcgtcaaattt

SEQ ID NO: 1088219 - DNA, 25 bp, Homo sapien
cactcccggctaattagcgtcaaat

SEQ ID NO: 1088220 - DNA, 25 bp, Homo sapien
actcccggctaattagcgtcaaatt

SEQ ID NO: 1088221 - DNA, 25 bp, Homo sapien
ggataacctatttatacagaatgac

SEQ ID NO: 1088222 - DNA, 25 bp, Homo sapien
gcgtgagctatcacccctagccaaa

SEQ ID NO: 1088223 - DNA, 25 bp, Homo sapien
gttttcttagaacattcagtgtcat

SEQ ID NO: 1088224 - DNA, 25 bp, Homo sapien
tagaactgaaaatctggataaccta

SEQ ID NO: 1088225 - DNA, 25 bp, Homo sapien
gacttgatcatcttatgcctcatgc

SEQ ID NO: 1088226 - DNA, 25 bp, Homo sapien
tcatcttatgcctcatgccatgact

SEQ ID NO: 1088227 - DNA, 25 bp, Homo sapien
tgatcatcttatgcctcatgccatg

SEQ ID NO: 1088228 - DNA, 25 bp, Homo sapien
taacagacttgatcatcttatgcct

SEQ ID NO: 1088229 - DNA, 25 bp, Homo sapien
tatcaaactgagaccccctgaatag

SEQ ID NO: 1088230 - DNA, 25 bp, Homo sapien
attcctcctatcaaactgagacccc

SEQ ID NO: 1088231 - DNA, 25 bp, Homo sapien
tccatcagttctgtatcccttgtgc

SEQ ID NO: 1088232 - DNA, 25 bp, Homo sapien
tcaattttgggttatcactaagcca

SEQ ID NO: 1088233 - DNA, 25 bp, Homo sapien
tcaatttttatacttcgaatagtca

SEQ ID NO: 1088234 - DNA, 25 bp, Homo sapien
tcatgttccattcatagtccatcca

SEQ ID NO: 1088235 - DNA, 25 bp, Homo sapien
tatacttcgaatagtcatgttccat

SEQ ID NO: 1088236 - DNA, 25 bp, Homo sapien
catccattgacaatcaggatgtacc

SEQ ID NO: 1088237 - DNA, 25 bp, Homo sapien
ttgacctctgcaagaatcttattaa

SEQ ID NO: 1088238 - DNA, 25 bp, Homo sapien
ttgaatattaaccttccttctccag

SEQ ID NO: 1088239 - DNA, 25 bp, Homo sapien
tattgaatattaaccttccttctcc

SEQ ID NO: 1088240 - DNA, 25 bp, Homo sapien
ctgaaatttggtaaacttgacctct

SEQ ID NO: 1088241 - DNA, 25 bp, Homo sapien
caatgaactcttctaaacagcatag

SEQ ID NO: 1088242 - DNA, 25 bp, Homo sapien
tgagaccacagctaagtgccatgcc

SEQ ID NO: 1088243 - DNA, 25 bp, Homo sapien
cagtgatactaacatggctcgcagc

SEQ ID NO: 1088244 - DNA, 25 bp, Homo sapien
aacagcatagactaaaacctggccc

SEQ ID NO: 1088245 - DNA, 25 bp, Homo sapien
ctatcagcctctgtcaactaagcaa

SEQ ID NO: 1088246 - DNA, 25 bp, Homo sapien
aggcatgagcctatatcccaactat

SEQ ID NO: 1088247 - DNA, 25 bp, Homo sapien
tatatcccaactatcttcacccatt

SEQ ID NO: 1088248 - DNA, 25 bp, Homo sapien
gagcctatatcccaactatcttcac

SEQ ID NO: 1088249 - DNA, 25 bp, Homo sapien
caaattttgtttgactgcgacccac

SEQ ID NO: 1088250 - DNA, 25 bp, Homo sapien
tagtatctcttaagctgcacagtgt

SEQ ID NO: 1088251 - DNA, 25 bp, Homo sapien
tgtaaaggccaagagggctgactct

SEQ ID NO: 1088252 - DNA, 25 bp, Homo sapien
ttgggtccaaatcctcgtctgatac

SEQ ID NO: 1088253 - DNA, 25 bp, Homo sapien
cactttgtcaggctcaattcctggt

SEQ ID NO: 1088254 - DNA, 25 bp, Homo sapien
accactgccctcaatgaccactttg

SEQ ID NO: 1088255 - DNA, 25 bp, Homo sapien
aaatgaatctggctacaccaacagg

SEQ ID NO: 1088256 - DNA, 25 bp, Homo sapien
ccaaggagtaagtgcccaggaccac

SEQ ID NO: 1088257 - DNA, 25 bp, Homo sapien
gaagatcactggcatggtcttccaa

SEQ ID NO: 1088258 - DNA, 25 bp, Homo sapien
gatcactggcatggtcttccaagtc

SEQ ID NO: 1088259 - DNA, 25 bp, Homo sapien
tcactggcatggtcttccaagtccc

SEQ ID NO: 1088260 - DNA, 25 bp, Homo sapien
actggcatggtcttccaagtcccca

SEQ ID NO: 1088261 - DNA, 25 bp, Homo sapien
ctggcattgtggagggactcataac

SEQ ID NO: 1088262 - DNA, 25 bp, Homo sapien
gaaactgtggcatgacgaccatgag

SEQ ID NO: 1088263 - DNA, 25 bp, Homo sapien
ctggtgctgccaaggttgtaggcaa

SEQ ID NO: 1088264 - DNA, 25 bp, Homo sapien
gcatgacgaccatgaggctctcaag

SEQ ID NO: 1088265 - DNA, 25 bp, Homo sapien
gagaagtaagaaaatagcctcgaga

SEQ ID NO: 1088266 - DNA, 25 bp, Homo sapien
taagaaaatagcctcgagatcctca

SEQ ID NO: 1088267 - DNA, 25 bp, Homo sapien
tagcctcgagatcctcagtaatgcc

SEQ ID NO: 1088268 - DNA, 25 bp, Homo sapien
gagatcctcagtaatgcctcctgca

SEQ ID NO: 1088269 - DNA, 25 bp, Homo sapien
caaatgggggtgacactggtgctga

SEQ ID NO: 1088270 - DNA, 25 bp, Homo sapien
aaatcaaatgggggtgacactggtg

SEQ ID NO: 1088271 - DNA, 25 bp, Homo sapien
aatcaaatgggggtgacactggtgc

SEQ ID NO: 1088272 - DNA, 25 bp, Homo sapien
atcaaatgggggtgacactggtgct

SEQ ID NO: 1088273 - DNA, 25 bp, Homo sapien
gatttggctgtattaggcacctggt

SEQ ID NO: 1088274 - DNA, 25 bp, Homo sapien
ttaactctggcaaagcaggtattgt

SEQ ID NO: 1088275 - DNA, 25 bp, Homo sapien
aatgaaggctggaataaacggattt

SEQ ID NO: 1088276 - DNA, 25 bp, Homo sapien
ggtattgttgtcatcagtgacccct

SEQ ID NO: 1088277 - DNA, 25 bp, Homo sapien
acagccgccccttctcatgcaccac

SEQ ID NO: 1088278 - DNA, 25 bp, Homo sapien
atttgacagacagccgccccttctc

SEQ ID NO: 1088279 - DNA, 25 bp, Homo sapien
tcatttgacagacagccgccccttc

SEQ ID NO: 1088280 - DNA, 25 bp, Homo sapien
agacagccgccccttctcatgcacc

SEQ ID NO: 1088281 - DNA, 25 bp, Homo sapien
cttgacaaaggagtgtggcctgttc

SEQ ID NO: 1088282 - DNA, 25 bp, Homo sapien
tgacaaaggagtgtggcctgttcca

SEQ ID NO: 1088283 - DNA, 25 bp, Homo sapien
acaaaggagtgtggcctgttccatc

SEQ ID NO: 1088284 - DNA, 25 bp, Homo sapien
gacaaaggagtgtggcctgttccat

SEQ ID NO: 1088285 - DNA, 25 bp, Homo sapien
cagtgccttgactggctcaactcgg

SEQ ID NO: 1088286 - DNA, 25 bp, Homo sapien
tgccctcttggaaatagcgagggca

SEQ ID NO: 1088287 - DNA, 25 bp, Homo sapien
ctcttggaaatagcgagggcaatgc

SEQ ID NO: 1088288 - DNA, 25 bp, Homo sapien
ttgactggctcaactcgggtcgctg

SEQ ID NO: 1088289 - DNA, 25 bp, Homo sapien
tacttatccctaaaggcaaagttga

SEQ ID NO: 1088290 - DNA, 25 bp, Homo sapien
tgcccagtacatatggatgccctgc

SEQ ID NO: 1088291 - DNA, 25 bp, Homo sapien
atatggatgccctgcaccgagatgc

SEQ ID NO: 1088292 - DNA, 25 bp, Homo sapien
cacgctgaggtaggttgcccagtac

SEQ ID NO: 1088293 - DNA, 25 bp, Homo sapien
cttggctgtatcatacacgctgagg

SEQ ID NO: 1088294 - DNA, 25 bp, Homo sapien
cctggactgcatcaccatccgcccg

SEQ ID NO: 1088295 - DNA, 25 bp, Homo sapien
acctggactgcatcaccatccgccc

SEQ ID NO: 1088296 - DNA, 25 bp, Homo sapien
ctggactgcatcaccatccgcccgc

SEQ ID NO: 1088297 - DNA, 25 bp, Homo sapien
cacctggactgcatcaccatccgcc

SEQ ID NO: 1088298 - DNA, 25 bp, Homo sapien
tgaagctggagagtatgtcgaagaa

SEQ ID NO: 1088299 - DNA, 25 bp, Homo sapien
gagagtatgtcgaagaattgtttct

SEQ ID NO: 1088300 - DNA, 25 bp, Homo sapien
tttcttctaaggcatggatccactt

SEQ ID NO: 1088301 - DNA, 25 bp, Homo sapien
ttctctcgctcatcagcatcacggg

SEQ ID NO: 1088302 - DNA, 25 bp, Homo sapien
tatcggtaaacaaaagcgtgagcgc

SEQ ID NO: 1088303 - DNA, 25 bp, Homo sapien
taggtggcttgtaaagatgcttcag

SEQ ID NO: 1088304 - DNA, 25 bp, Homo sapien
cttacttccggaaagttgtgtcgcg

SEQ ID NO: 1088305 - DNA, 25 bp, Homo sapien
attaatccggtgagacatcgtgggc

SEQ ID NO: 1088306 - DNA, 25 bp, Homo sapien
cctcgacccgatccccggactgcgg

SEQ ID NO: 1088307 - DNA, 25 bp, Homo sapien
aggcggtcctgactgaggttcagcc

SEQ ID NO: 1088308 - DNA, 25 bp, Homo sapien
gcggtgcaggcggtcctgactgagg

SEQ ID NO: 1088309 - DNA, 25 bp, Homo sapien
cccgatccccggactgcggtgcagg

SEQ ID NO: 1088310 - DNA, 25 bp, Homo sapien
tccgcaagtggccagcaagaaagcc

SEQ ID NO: 1088311 - DNA, 25 bp, Homo sapien
cgcaagtggccagcaagaaagccat

SEQ ID NO: 1088312 - DNA, 25 bp, Homo sapien
ccgcaagtggccagcaagaaagcca

SEQ ID NO: 1088313 - DNA, 25 bp, Homo sapien
ctcccagaccctcggggtctactca

SEQ ID NO: 1088314 - DNA, 25 bp, Homo sapien
tcccagaccctcggggtctactcac

SEQ ID NO: 1088315 - DNA, 25 bp, Homo sapien
gggtgagcacgacattcgcgctccg

SEQ ID NO: 1088316 - DNA, 25 bp, Homo sapien
cagggtgagcacgacattcgcgctc

SEQ ID NO: 1088317 - DNA, 25 bp, Homo sapien
agggtgagcacgacattcgcgctcc

SEQ ID NO: 1088318 - DNA, 25 bp, Homo sapien
gtgagcacgacattcgcgctccggc

SEQ ID NO: 1088319 - DNA, 25 bp, Homo sapien
tccccctccagggtttatgcgattc

SEQ ID NO: 1088320 - DNA, 25 bp, Homo sapien
gattataggcagcactgtaattaca

SEQ ID NO: 1088321 - DNA, 25 bp, Homo sapien
tataggcagcactgtaattacaggc

SEQ ID NO: 1088322 - DNA, 25 bp, Homo sapien
gagctactgcgcccgcctttttgtt

SEQ ID NO: 1088323 - DNA, 25 bp, Homo sapien
attcaagaactggagagataccaga

SEQ ID NO: 1088324 - DNA, 25 bp, Homo sapien
ttttgaaaattcaagaactggagag

SEQ ID NO: 1088325 - DNA, 25 bp, Homo sapien
ggaaaaaagcaagtgtggtactgat

SEQ ID NO: 1088326 - DNA, 25 bp, Homo sapien
gagataccagaagactggaaaaaag

SEQ ID NO: 1088327 - DNA, 25 bp, Homo sapien
cctattctctactccctcaagcctt

SEQ ID NO: 1088328 - DNA, 25 bp, Homo sapien
tcctattctctactccctcaagcct

SEQ ID NO: 1088329 - DNA, 25 bp, Homo sapien
ctcctattctctactccctcaagcc

SEQ ID NO: 1088330 - DNA, 25 bp, Homo sapien
ttctcctattctctactccctcaag

SEQ ID NO: 1088331 - DNA, 25 bp, Homo sapien
aatagggcaaattctttcagacagt

SEQ ID NO: 1088332 - DNA, 25 bp, Homo sapien
catattgagggtggtctgtctttga

SEQ ID NO: 1088333 - DNA, 25 bp, Homo sapien
agggcaaattctttcagacagtgtg

SEQ ID NO: 1088334 - DNA, 25 bp, Homo sapien
gaaaagaactgagaatagggcaaat

SEQ ID NO: 1088335 - DNA, 25 bp, Homo sapien
gttactgtgccacagaaaaatcagg

SEQ ID NO: 1088336 - DNA, 25 bp, Homo sapien
tatcaagacccagttaaaatcagct

SEQ ID NO: 1088337 - DNA, 25 bp, Homo sapien
aatatacagtttggtgacaaaagac

SEQ ID NO: 1088338 - DNA, 25 bp, Homo sapien
gagtactgtactatgaaagaaatga

SEQ ID NO: 1088339 - DNA, 25 bp, Homo sapien
aaaccctgtaattggctcccagtca

SEQ ID NO: 1088340 - DNA, 25 bp, Homo sapien
taaatctaccagaacccaagcaaag

SEQ ID NO: 1088341 - DNA, 25 bp, Homo sapien
ttaaacagtggtacatcaatcttcc

SEQ ID NO: 1088342 - DNA, 25 bp, Homo sapien
gctgctcaaattggatttactcttc

SEQ ID NO: 1088343 - DNA, 25 bp, Homo sapien
tcttatcaaaatcttggacactagg

SEQ ID NO: 1088344 - DNA, 25 bp, Homo sapien
gttcaatcaagatttgtaggtaagc

SEQ ID NO: 1088345 - DNA, 25 bp, Homo sapien
tcaaaatcttggacactaggaacaa

SEQ ID NO: 1088346 - DNA, 25 bp, Homo sapien
tttgtaggtaagcatcagcttctgt

SEQ ID NO: 1088347 - DNA, 25 bp, Homo sapien
ctttctctgttcatcttctttgcag

SEQ ID NO: 1088348 - DNA, 25 bp, Homo sapien
atttgttgtctctttgagagtttca

SEQ ID NO: 1088349 - DNA, 25 bp, Homo sapien
tttgttgtctctttgagagtttcaa

SEQ ID NO: 1088350 - DNA, 25 bp, Homo sapien
ttgttgtctctttgagagtttcaat

SEQ ID NO: 1088351 - DNA, 25 bp, Homo sapien
tgttgtctctttgagagtttcaatt

SEQ ID NO: 1088352 - DNA, 25 bp, Homo sapien
actgctttggtaggccaaggaagga

SEQ ID NO: 1088353 - DNA, 25 bp, Homo sapien
cttgaggctaggagaccagcctagg

SEQ ID NO: 1088354 - DNA, 25 bp, Homo sapien
tcccactgctttggtaggccaagga

SEQ ID NO: 1088355 - DNA, 25 bp, Homo sapien
atcgcttgaggctaggagaccagcc

SEQ ID NO: 1088356 - DNA, 25 bp, Homo sapien
acaatgcagtgtttaattgattcta

SEQ ID NO: 1088357 - DNA, 25 bp, Homo sapien
aatgcagtgtttaattgattctacc

SEQ ID NO: 1088358 - DNA, 25 bp, Homo sapien
caatgcagtgtttaattgattctac

SEQ ID NO: 1088359 - DNA, 25 bp, Homo sapien
tgcagtgtttaattgattctaccat

SEQ ID NO: 1088360 - DNA, 25 bp, Homo sapien
attccatctgcgtgcttctccgcat

SEQ ID NO: 1088361 - DNA, 25 bp, Homo sapien
catctgcgtgcttctccgcattact

SEQ ID NO: 1088362 - DNA, 25 bp, Homo sapien
tatcattccatctgcgtgcttctcc

SEQ ID NO: 1088363 - DNA, 25 bp, Homo sapien
cgtgcttctccgcattactctggtc

SEQ ID NO: 1088364 - DNA, 25 bp, Homo sapien
catttcccctgcaaatgattgctga

SEQ ID NO: 1088365 - DNA, 25 bp, Homo sapien
aggcttctcctgatatgactggtta

SEQ ID NO: 1088366 - DNA, 25 bp, Homo sapien
gattcaatctgaacccacacttaga

SEQ ID NO: 1088367 - DNA, 25 bp, Homo sapien
gactggttataatgctctgcagaag

SEQ ID NO: 1088368 - DNA, 25 bp, Homo sapien
ggctgatccgattcatgcatcttga

SEQ ID NO: 1088369 - DNA, 25 bp, Homo sapien
tatccacagtccttggtcagccaac

SEQ ID NO: 1088370 - DNA, 25 bp, Homo sapien
gaaaatatgctctagtccctgggca

SEQ ID NO: 1088371 - DNA, 25 bp, Homo sapien
tcaggaatacagactaaggtcactc

SEQ ID NO: 1088372 - DNA, 25 bp, Homo sapien
ttttctcgaaaataactccaaatgc

SEQ ID NO: 1088373 - DNA, 25 bp, Homo sapien
cttgtttacacagcgcttttctcga

SEQ ID NO: 1088374 - DNA, 25 bp, Homo sapien
aataaggtcttttcgatcaagtgac

SEQ ID NO: 1088375 - DNA, 25 bp, Homo sapien
ttcagatactagaccaagccataat

SEQ ID NO: 1088376 - DNA, 25 bp, Homo sapien
gcgagtgtgtacatgttaaaccaaa

SEQ ID NO: 1088377 - DNA, 25 bp, Homo sapien
gaaattattctgacagcatgaaggc

SEQ ID NO: 1088378 - DNA, 25 bp, Homo sapien
tatgacttcaaaatcctgagggtag

SEQ ID NO: 1088379 - DNA, 25 bp, Homo sapien
caaatgtccaactgatgtacctgca

SEQ ID NO: 1088380 - DNA, 25 bp, Homo sapien
ggactaggttgatatattgcatcta

SEQ ID NO: 1088381 - DNA, 25 bp, Homo sapien
tgctgatcacaggttccaaaggact

SEQ ID NO: 1088382 - DNA, 25 bp, Homo sapien
ttgcatctacgggattaatagtact

SEQ ID NO: 1088383 - DNA, 25 bp, Homo sapien
gctgatcacaggttccaaaggacta

SEQ ID NO: 1088384 - DNA, 25 bp, Homo sapien
ccaactggtagggaagatggacgct

SEQ ID NO: 1088385 - DNA, 25 bp, Homo sapien
tgtcccaaggtagccaacacaggtc

SEQ ID NO: 1088386 - DNA, 25 bp, Homo sapien
agtctgatgatgtcccaaggtagcc

SEQ ID NO: 1088387 - DNA, 25 bp, Homo sapien
gacgctgctctgacttacacaactg

SEQ ID NO: 1088388 - DNA, 25 bp, Homo sapien
tgttgctagttttacgtatttccaa

SEQ ID NO: 1088389 - DNA, 25 bp, Homo sapien
tctgttgctagttttacgtatttcc

SEQ ID NO: 1088390 - DNA, 25 bp, Homo sapien
agtctgttgctagttttacgtattt

SEQ ID NO: 1088391 - DNA, 25 bp, Homo sapien
tgctagttttacgtatttccaaaca

SEQ ID NO: 1088392 - DNA, 25 bp, Homo sapien
tgctactcggtggtgaatggccact

SEQ ID NO: 1088393 - DNA, 25 bp, Homo sapien
tgagactgctactcggtggtgaatg

SEQ ID NO: 1088394 - DNA, 25 bp, Homo sapien
agaagtgagactgctactcggtggt

SEQ ID NO: 1088395 - DNA, 25 bp, Homo sapien
tgatggaattcatcagcatcataaa

SEQ ID NO: 1088396 - DNA, 25 bp, Homo sapien
tacagttagctggttacatgcatgc

SEQ ID NO: 1088397 - DNA, 25 bp, Homo sapien
gccatgttgatagtcaagacctaga

SEQ ID NO: 1088398 - DNA, 25 bp, Homo sapien
aattagtgagatctttgcctctgca

SEQ ID NO: 1088399 - DNA, 25 bp, Homo sapien
ggatgtgctcaacaaagccatgttg

SEQ ID NO: 1088400 - DNA, 25 bp, Homo sapien
attctgtggtatctgggcgttttag

SEQ ID NO: 1088401 - DNA, 25 bp, Homo sapien
gattctgtggtatctgggcgtttta

SEQ ID NO: 1088402 - DNA, 25 bp, Homo sapien
gtgattctgtggtatctgggcgttt

SEQ ID NO: 1088403 - DNA, 25 bp, Homo sapien
tctgtggtatctgggcgttttagac

SEQ ID NO: 1088404 - DNA, 25 bp, Homo sapien
acatctggccacaaatatttttaaa

SEQ ID NO: 1088405 - DNA, 25 bp, Homo sapien
caccacatctggccacaaatatttt

SEQ ID NO: 1088406 - DNA, 25 bp, Homo sapien
ctgaatcagcctccttggcagctgg

SEQ ID NO: 1088407 - DNA, 25 bp, Homo sapien
ccacatctggccacaaatattttta

SEQ ID NO: 1088408 - DNA, 25 bp, Homo sapien
taacgctcttgtgctcctccacaga

SEQ ID NO: 1088409 - DNA, 25 bp, Homo sapien
catgataacgctcttgtgctcctcc

SEQ ID NO: 1088410 - DNA, 25 bp, Homo sapien
agagatgcatgataacgctcttgtg

SEQ ID NO: 1088411 - DNA, 25 bp, Homo sapien
gatgcatgataacgctcttgtgctc

SEQ ID NO: 1088412 - DNA, 25 bp, Homo sapien
ttagtaagatccattccaagtctaa

SEQ ID NO: 1088413 - DNA, 25 bp, Homo sapien
tagtaagatccattccaagtctaac

SEQ ID NO: 1088414 - DNA, 25 bp, Homo sapien
cttagtaagatccattccaagtcta

SEQ ID NO: 1088415 - DNA, 25 bp, Homo sapien
tacatgccctgcttatatgttaggg

SEQ ID NO: 1088416 - DNA, 25 bp, Homo sapien
tttagctgtcttcaacctgggttca

SEQ ID NO: 1088417 - DNA, 25 bp, Homo sapien
tacatgctattaagtcaaactgctg

SEQ ID NO: 1088418 - DNA, 25 bp, Homo sapien
tttcagaatctgttggcaatcacag

SEQ ID NO: 1088419 - DNA, 25 bp, Homo sapien
tcaagaataaacgttggaagaacta

SEQ ID NO: 1088420 - DNA, 25 bp, Homo sapien
tctttcaagaataaacgttggaaga

SEQ ID NO: 1088421 - DNA, 25 bp, Homo sapien
tccggatgtgcaaaaaagtctgcat

SEQ ID NO: 1088422 - DNA, 25 bp, Homo sapien
aggtccggatgtgcaaaaaagtctg

SEQ ID NO: 1088423 - DNA, 25 bp, Homo sapien
aagtctcctttgatacttatacaga

SEQ ID NO: 1088424 - DNA, 25 bp, Homo sapien
gatatagttgggattaactctacca

SEQ ID NO: 1088425 - DNA, 25 bp, Homo sapien
tagataaatcctgcttttttaatcc

SEQ ID NO: 1088426 - DNA, 25 bp, Homo sapien
tacagatacaccagtttttgctatg

SEQ ID NO: 1088427 - DNA, 25 bp, Homo sapien
catgtaagtgcattgcttaattgcc

SEQ ID NO: 1088428 - DNA, 25 bp, Homo sapien
tttccaaacaatcgccacatcttac

SEQ ID NO: 1088429 - DNA, 25 bp, Homo sapien
cacatcttacttactctgaggcaaa

SEQ ID NO: 1088430 - DNA, 25 bp, Homo sapien
aattcatgggtgtagaatatacacc

SEQ ID NO: 1088431 - DNA, 25 bp, Homo sapien
gcattcacttttggattattggtca

SEQ ID NO: 1088432 - DNA, 25 bp, Homo sapien
tggtctatgtgcctgggtcttagtg

SEQ ID NO: 1088433 - DNA, 25 bp, Homo sapien
gtgagtgatgtggatccaatttcat

SEQ ID NO: 1088434 - DNA, 25 bp, Homo sapien
taatttgactaagttccatctattt

SEQ ID NO: 1088435 - DNA, 25 bp, Homo sapien
tttagcataatggtttccaactcca

SEQ ID NO: 1088436 - DNA, 25 bp, Homo sapien
tccacagtatatatatgccacgttt

SEQ ID NO: 1088437 - DNA, 25 bp, Homo sapien
ttcattcctgagtctcttcatttag

SEQ ID NO: 1088438 - DNA, 25 bp, Homo sapien
tatggctgagtagcattccacagta

SEQ ID NO: 1088439 - DNA, 25 bp, Homo sapien
aatgtcctgctttctggtacaagac

SEQ ID NO: 1088440 - DNA, 25 bp, Homo sapien
tttctggtacaagacaagatgatgc

SEQ ID NO: 1088441 - DNA, 25 bp, Homo sapien
ttaatgtcctgctttctggtacaag

SEQ ID NO: 1088442 - DNA, 25 bp, Homo sapien
ttctggtacaagacaagatgatgca

SEQ ID NO: 1088443 - DNA, 25 bp, Homo sapien
tgatcctttccttcccgcatgaaag

SEQ ID NO: 1088444 - DNA, 25 bp, Homo sapien
caacctgaaccattcgatccttggg

SEQ ID NO: 1088445 - DNA, 25 bp, Homo sapien
catttcacaacctgaaccattcgat

SEQ ID NO: 1088446 - DNA, 25 bp, Homo sapien
gaaccattcgatccttgggatcctt

SEQ ID NO: 1088447 - DNA, 25 bp, Homo sapien
aaatcttgaatcagtatacaattaa

SEQ ID NO: 1088448 - DNA, 25 bp, Homo sapien
aaaatcttgaatcagtatacaatta

SEQ ID NO: 1088449 - DNA, 25 bp, Homo sapien
tacgtagtgcatcacttggagaggg

SEQ ID NO: 1088450 - DNA, 25 bp, Homo sapien
tgccaaatgaataagaacagacaca

SEQ ID NO: 1088451 - DNA, 25 bp, Homo sapien
gattgtgtgcctcattcagggctga

SEQ ID NO: 1088452 - DNA, 25 bp, Homo sapien
caagagtaggcacttatcaatgtct

SEQ ID NO: 1088453 - DNA, 25 bp, Homo sapien
agggaactggtccttctgaaactag

SEQ ID NO: 1088454 - DNA, 25 bp, Homo sapien
tgggaaacctgctcagccacaaatg

SEQ ID NO: 1088455 - DNA, 25 bp, Homo sapien
tgctcagccacaaatgttacactgt

SEQ ID NO: 1088456 - DNA, 25 bp, Homo sapien
cacaaatgttacactgtttttggaa

SEQ ID NO: 1088457 - DNA, 25 bp, Homo sapien
atgcaagcattcattcagagccacg

SEQ ID NO: 1088458 - DNA, 25 bp, Homo sapien
ccaatgcaagcattcattcagagcc

SEQ ID NO: 1088459 - DNA, 25 bp, Homo sapien
aatgcaagcattcattcagagccac

SEQ ID NO: 1088460 - DNA, 25 bp, Homo sapien
caatgcaagcattcattcagagcca

SEQ ID NO: 1088461 - DNA, 25 bp, Homo sapien
tttgatttggtccagatatgagcat

SEQ ID NO: 1088462 - DNA, 25 bp, Homo sapien
tggtccagatatgagcattgaattg

SEQ ID NO: 1088463 - DNA, 25 bp, Homo sapien
gatttggtccagatatgagcattga

SEQ ID NO: 1088464 - DNA, 25 bp, Homo sapien
tccagatatgagcattgaattgtat

SEQ ID NO: 1088465 - DNA, 25 bp, Homo sapien
gagagaagggacagaatctctgatg

SEQ ID NO: 1088466 - DNA, 25 bp, Homo sapien
ctgtggagagaagggacagaatctc

SEQ ID NO: 1088467 - DNA, 25 bp, Homo sapien
agagaagggacagaatctctgatga

SEQ ID NO: 1088468 - DNA, 25 bp, Homo sapien
tggagagaagggacagaatctctga

SEQ ID NO: 1088469 - DNA, 25 bp, Homo sapien
tgagaatgtaatgttcatcatagtc

SEQ ID NO: 1088470 - DNA, 25 bp, Homo sapien
gccattggggaatgtgagaatgtaa

SEQ ID NO: 1088471 - DNA, 25 bp, Homo sapien
tcatagtctagacatgagacacagc

SEQ ID NO: 1088472 - DNA, 25 bp, Homo sapien
ttccatagccattggggaatgtgag

SEQ ID NO: 1088473 - DNA, 25 bp, Homo sapien
ttgcactatagcctgttttggaaca

SEQ ID NO: 1088474 - DNA, 25 bp, Homo sapien
gcactatagcctgttttggaacaat

SEQ ID NO: 1088475 - DNA, 25 bp, Homo sapien
atatttgcactatagcctgttttgg

SEQ ID NO: 1088476 - DNA, 25 bp, Homo sapien
atttgcactatagcctgttttggaa

SEQ ID NO: 1088477 - DNA, 25 bp, Homo sapien
caagagtgtcaagtggaagcaagcc

SEQ ID NO: 1088478 - DNA, 25 bp, Homo sapien
tgcacgtgacccaagagtgtcaagt

SEQ ID NO: 1088479 - DNA, 25 bp, Homo sapien
cagatgcgtgcaaaatgtgatggtt

SEQ ID NO: 1088480 - DNA, 25 bp, Homo sapien
tcaagtggaagcaagccagatgcgt

SEQ ID NO: 1088481 - DNA, 25 bp, Homo sapien
gacgcttatgaacttgagatcccaa

SEQ ID NO: 1088482 - DNA, 25 bp, Homo sapien
cctattctgggtgcaaggaccataa

SEQ ID NO: 1088483 - DNA, 25 bp, Homo sapien
gagggccttcaacaggacgcttatg

SEQ ID NO: 1088484 - DNA, 25 bp, Homo sapien
tcttaacagaactggactccccagg

SEQ ID NO: 1088485 - DNA, 25 bp, Homo sapien
attccattccccttcaattgagcaa

SEQ ID NO: 1088486 - DNA, 25 bp, Homo sapien
tattttgcatacatcacaccattcc

SEQ ID NO: 1088487 - DNA, 25 bp, Homo sapien
tttgcatacatcacaccattccatt

SEQ ID NO: 1088488 - DNA, 25 bp, Homo sapien
cccttcaattgagcaaaaagacttc

SEQ ID NO: 1088489 - DNA, 25 bp, Homo sapien
ggattcatactcgttctgatcttcc

SEQ ID NO: 1088490 - DNA, 25 bp, Homo sapien
attcatactcgttctgatcttccaa

SEQ ID NO: 1088491 - DNA, 25 bp, Homo sapien
gattcatactcgttctgatcttcca

SEQ ID NO: 1088492 - DNA, 25 bp, Homo sapien
ctttctcgggcttctgctctttgtc

SEQ ID NO: 1088493 - DNA, 25 bp, Homo sapien
ctcgggcttctgctctttgtctttc

SEQ ID NO: 1088494 - DNA, 25 bp, Homo sapien
tctccttcctttctcgggcttctgc

SEQ ID NO: 1088495 - DNA, 25 bp, Homo sapien
tcctttctcgggcttctgctctttg

SEQ ID NO: 1088496 - DNA, 25 bp, Homo sapien
gtttggcacatcacttcttcaacat

SEQ ID NO: 1088497 - DNA, 25 bp, Homo sapien
tacttactatttcatatctgctccc

SEQ ID NO: 1088498 - DNA, 25 bp, Homo sapien
gagtttcaagtagggaccagcgatc

SEQ ID NO: 1088499 - DNA, 25 bp, Homo sapien
caccccgccattagactgaaatgag

SEQ ID NO: 1088500 - DNA, 25 bp, Homo sapien
tgcttggcagcaccaagacgtttca

SEQ ID NO: 1088501 - DNA, 25 bp, Homo sapien
ttggcagcaccaagacgtttcagta

SEQ ID NO: 1088502 - DNA, 25 bp, Homo sapien
ctaatgcttggcagcaccaagacgt

SEQ ID NO: 1088503 - DNA, 25 bp, Homo sapien
caccaagacgtttcagtaatggttc

SEQ ID NO: 1088504 - DNA, 25 bp, Homo sapien
tagagcgcagagtttcagacttgga

SEQ ID NO: 1088505 - DNA, 25 bp, Homo sapien
tcttaacagcagtactagagcgcag

SEQ ID NO: 1088506 - DNA, 25 bp, Homo sapien
tgttcatctgcgtcagaaagtccag

SEQ ID NO: 1088507 - DNA, 25 bp, Homo sapien
gctgaattatgcctactgccctgat

SEQ ID NO: 1088508 - DNA, 25 bp, Homo sapien
gaagttttgcactggcatcatagca

SEQ ID NO: 1088509 - DNA, 25 bp, Homo sapien
aaacccagggttactgtaggagctg

SEQ ID NO: 1088510 - DNA, 25 bp, Homo sapien
gataaaatgttggtaggcagcccta

SEQ ID NO: 1088511 - DNA, 25 bp, Homo sapien
tgggccaagcgagaccagaaagcct

SEQ ID NO: 1088512 - DNA, 25 bp, Homo sapien
aattcttcttgtgaagtgatgcagc

SEQ ID NO: 1088513 - DNA, 25 bp, Homo sapien
ggcagattgtatcatccccattact

SEQ ID NO: 1088514 - DNA, 25 bp, Homo sapien
gggctttcacaacaacactcaacct

SEQ ID NO: 1088515 - DNA, 25 bp, Homo sapien
tgatgcagctgacctacctgccaac

SEQ ID NO: 1088516 - DNA, 25 bp, Homo sapien
agatttcctcaagccgtggtatgca

SEQ ID NO: 1088517 - DNA, 25 bp, Homo sapien
tggttaatacatagcccctacatgg

SEQ ID NO: 1088518 - DNA, 25 bp, Homo sapien
tagcaccttaggtggccacgtgagc

SEQ ID NO: 1088519 - DNA, 25 bp, Homo sapien
gagaaactcgaaacactagtcctgg

SEQ ID NO: 1088520 - DNA, 25 bp, Homo sapien
tagaagggaacctgacccctctgat

SEQ ID NO: 1088521 - DNA, 25 bp, Homo sapien
gggcctggtacaagggaatgtcaca

SEQ ID NO: 1088522 - DNA, 25 bp, Homo sapien
aagtaccaggctttgatggacggcc

SEQ ID NO: 1088523 - DNA, 25 bp, Homo sapien
aatcttggaatatgcccgttggtct

SEQ ID NO: 1088524 - DNA, 25 bp, Homo sapien
tattgagaacacccatgaaatgata

SEQ ID NO: 1088525 - DNA, 25 bp, Homo sapien
ccttaagattctttgaggctaggag

SEQ ID NO: 1088526 - DNA, 25 bp, Homo sapien
aatatccttacgcataaccttgcgg

SEQ ID NO: 1088527 - DNA, 25 bp, Homo sapien
gaaccagcttatgaagcagatgtgg

SEQ ID NO: 1088528 - DNA, 25 bp, Homo sapien
cagatgtggcacagctggagtataa

SEQ ID NO: 1088529 - DNA, 25 bp, Homo sapien
cattttgtacttcttagtgtggtcc

SEQ ID NO: 1088530 - DNA, 25 bp, Homo sapien
cttgggaaatgtgtctgaacgtagc

SEQ ID NO: 1088531 - DNA, 25 bp, Homo sapien
tgggaaatgtgtctgaacctaggag

SEQ ID NO: 1088532 - DNA, 25 bp, Homo sapien
cttgggaaatgtgtctgaacctagg

SEQ ID NO: 1088533 - DNA, 25 bp, Homo sapien
gggaaatgtgtctgaacctaggaga

SEQ ID NO: 1088534 - DNA, 25 bp, Homo sapien
acaaggttgtatgggctttaaggat

SEQ ID NO: 1088535 - DNA, 25 bp, Homo sapien
caaggtcatgatttacttaaaggaa

SEQ ID NO: 1088536 - DNA, 25 bp, Homo sapien
taaggattgcctaacatagttgaaa

SEQ ID NO: 1088537 - DNA, 25 bp, Homo sapien
taagtagttgggcaagtgaagagaa

SEQ ID NO: 1088538 - DNA, 25 bp, Homo sapien
gatagtctgtatgctaaggtctcta

SEQ ID NO: 1088539 - DNA, 25 bp, Homo sapien
tatatatatgtcacttgatagtctg

SEQ ID NO: 1088540 - DNA, 25 bp, Homo sapien
tactcagattattagtgatcctgtt

SEQ ID NO: 1088541 - DNA, 25 bp, Homo sapien
tgggtagcatgatagaccaagtatt

SEQ ID NO: 1088542 - DNA, 25 bp, Homo sapien
caaatactggtagatgaggagctgc

SEQ ID NO: 1088543 - DNA, 25 bp, Homo sapien
cacccatagctatatctctcagagg

SEQ ID NO: 1088544 - DNA, 25 bp, Homo sapien
gagctgcagaattcttagcctggat

SEQ ID NO: 1088545 - DNA, 25 bp, Homo sapien
aggtctattctgtatcaggattaca

SEQ ID NO: 1088546 - DNA, 25 bp, Homo sapien
tctgatttcagacctaagtaatatg

SEQ ID NO: 1088547 - DNA, 25 bp, Homo sapien
ctgatttcagacctaagtaatatgg

SEQ ID NO: 1088548 - DNA, 25 bp, Homo sapien
ttctgatttcagacctaagtaatat

SEQ ID NO: 1088549 - DNA, 25 bp, Homo sapien
gtggctcacggcaacttccatgtcc

SEQ ID NO: 1088550 - DNA, 25 bp, Homo sapien
catgaacgtggctcacggcaacttc

SEQ ID NO: 1088551 - DNA, 25 bp, Homo sapien
ggcatgaacgtggctcacggcaact

SEQ ID NO: 1088552 - DNA, 25 bp, Homo sapien
caacttccatgtcccgggcttaagc

SEQ ID NO: 1088553 - DNA, 25 bp, Homo sapien
tgcacatcaataggcatccttgaag

SEQ ID NO: 1088554 - DNA, 25 bp, Homo sapien
gaagactaattcaggacccctcatt

SEQ ID NO: 1088555 - DNA, 25 bp, Homo sapien
tacggtgttcttcagatactaagga

SEQ ID NO: 1088556 - DNA, 25 bp, Homo sapien
tgcagcctcttaactgaatccaagt

SEQ ID NO: 1088557 - DNA, 25 bp, Homo sapien
aatgttcgctggctgttccgagaat

SEQ ID NO: 1088558 - DNA, 25 bp, Homo sapien
tcagtccgggtcacgttggtgcctc

SEQ ID NO: 1088559 - DNA, 25 bp, Homo sapien
cactttgggtttcgaaatgttcgct

SEQ ID NO: 1088560 - DNA, 25 bp, Homo sapien
tacgtgagcgtgactactttcttgc

SEQ ID NO: 1088561 - DNA, 25 bp, Homo sapien
cgactgtagggtagagaagagccaa

SEQ ID NO: 1088562 - DNA, 25 bp, Homo sapien
tatttttctttgacacgcggagcac

SEQ ID NO: 1088563 - DNA, 25 bp, Homo sapien
ccaattagtatttgcggcgctcggg

SEQ ID NO: 1088564 - DNA, 25 bp, Homo sapien
catccggcgggtgtaggaaaatact

SEQ ID NO: 1088565 - DNA, 25 bp, Homo sapien
ttagggcttgaggatgaaaccccac

SEQ ID NO: 1088566 - DNA, 25 bp, Homo sapien
ttcctttgccatagaacttcctgtg

SEQ ID NO: 1088567 - DNA, 25 bp, Homo sapien
cctttgccatagaacttcctgtgcc

SEQ ID NO: 1088568 - DNA, 25 bp, Homo sapien
tttgccatagaacttcctgtgccat

SEQ ID NO: 1088569 - DNA, 25 bp, Homo sapien
cctttcctttgccatagaacttcct

SEQ ID NO: 1088570 - DNA, 25 bp, Homo sapien
tttcagattcaaatgcatctgtttc

SEQ ID NO: 1088571 - DNA, 25 bp, Homo sapien
tctgggcttcaggagcttagaccag

SEQ ID NO: 1088572 - DNA, 25 bp, Homo sapien
gatagtttctacaggctctcttggt

SEQ ID NO: 1088573 - DNA, 25 bp, Homo sapien
cagtggactgttaagaggctgtgca

SEQ ID NO: 1088574 - DNA, 25 bp, Homo sapien
ttaactgggcaaagtagcctgcacc

SEQ ID NO: 1088575 - DNA, 25 bp, Homo sapien
gagccatagccatgattgtacactg

SEQ ID NO: 1088576 - DNA, 25 bp, Homo sapien
gagtccgctcctaacttgctatagg

SEQ ID NO: 1088577 - DNA, 25 bp, Homo sapien
taaatgaacggctcagtaacactga

SEQ ID NO: 1088578 - DNA, 25 bp, Homo sapien
gaatcatgactcctgggacttgcct

SEQ ID NO: 1088579 - DNA, 25 bp, Homo sapien
cagaggttcctgctatatgaaagag

SEQ ID NO: 1088580 - DNA, 25 bp, Homo sapien
gggatgcccaaatttacctagtctg

SEQ ID NO: 1088581 - DNA, 25 bp, Homo sapien
gattttagatttgacgggatgccca

SEQ ID NO: 1088582 - DNA, 25 bp, Homo sapien
gatgcccagcagacagttggaaatt

SEQ ID NO: 1088583 - DNA, 25 bp, Homo sapien
aggagacacagcaggaaccggcaga

SEQ ID NO: 1088584 - DNA, 25 bp, Homo sapien
tcaggctaagtggagatgcccagca

SEQ ID NO: 1088585 - DNA, 25 bp, Homo sapien
gggaggataaggagccagtgtagga

SEQ ID NO: 1088586 - DNA, 25 bp, Homo sapien
tggactgcagctgcccggtggcact

SEQ ID NO: 1088587 - DNA, 25 bp, Homo sapien
cttagattcctgttctcccccttgg

SEQ ID NO: 1088588 - DNA, 25 bp, Homo sapien
cccttggactgcagctgcccggtgg

SEQ ID NO: 1088589 - DNA, 25 bp, Homo sapien
gcccggtggcactccctgccctcag

SEQ ID NO: 1088590 - DNA, 25 bp, Homo sapien
tccagttgccatctaaggctggaga

SEQ ID NO: 1088591 - DNA, 25 bp, Homo sapien
catctaaggctggagattctcctag

SEQ ID NO: 1088592 - DNA, 25 bp, Homo sapien
gctggagattctcctagcctgcttg

SEQ ID NO: 1088593 - DNA, 25 bp, Homo sapien
tgcccctgaagacgtccagttgcca

SEQ ID NO: 1088594 - DNA, 25 bp, Homo sapien
caatctcgtcttgagtgtaagctgg

SEQ ID NO: 1088595 - DNA, 25 bp, Homo sapien
gaaggtgcaatctcgtcttgagtgt

SEQ ID NO: 1088596 - DNA, 25 bp, Homo sapien
tcaggaaggtgcaatctcgtcttga

SEQ ID NO: 1088597 - DNA, 25 bp, Homo sapien
ctcgtcttgagtgtaagctggagac

SEQ ID NO: 1088598 - DNA, 25 bp, Homo sapien
cagatgagatcgggcgcgttcaggg

SEQ ID NO: 1088599 - DNA, 25 bp, Homo sapien
cccaacccctcttagcttccgagat

SEQ ID NO: 1088600 - DNA, 25 bp, Homo sapien
gcgttcagggtggtatagccataga

SEQ ID NO: 1088601 - DNA, 25 bp, Homo sapien
caggcccaacccctcttagcttccg

SEQ ID NO: 1088602 - DNA, 25 bp, Homo sapien
catccagtgaataggctgcaagtgg

SEQ ID NO: 1088603 - DNA, 25 bp, Homo sapien
tccagtgaataggctgcaagtggct

SEQ ID NO: 1088604 - DNA, 25 bp, Homo sapien
atccagtgaataggctgcaagtggc

SEQ ID NO: 1088605 - DNA, 25 bp, Homo sapien
cataggcatcgaagatgctcacttc

SEQ ID NO: 1088606 - DNA, 25 bp, Homo sapien
tgcacaactcgcatagtaatgtagc

SEQ ID NO: 1088607 - DNA, 25 bp, Homo sapien
aattgcacaactcgcatagtaatgt

SEQ ID NO: 1088608 - DNA, 25 bp, Homo sapien
tgaattgcacaactcgcatagtaat

SEQ ID NO: 1088609 - DNA, 25 bp, Homo sapien
agaacacctgttctgcataacacac

SEQ ID NO: 1088610 - DNA, 25 bp, Homo sapien
tctgcataacacacataacagccca

SEQ ID NO: 1088611 - DNA, 25 bp, Homo sapien
cagcacagaagttctggcctgctgt

SEQ ID NO: 1088612 - DNA, 25 bp, Homo sapien
tgttctgcataacacacataacagc

SEQ ID NO: 1088613 - DNA, 25 bp, Homo sapien
cctgggatcaggcagttctcttgcc

SEQ ID NO: 1088614 - DNA, 25 bp, Homo sapien
gtgccactacacctggataattttt

SEQ ID NO: 1088615 - DNA, 25 bp, Homo sapien
ctcctgggatcaggcagttctcttg

SEQ ID NO: 1088616 - DNA, 25 bp, Homo sapien
gcctcctgggatcaggcagttctct

SEQ ID NO: 1088617 - DNA, 25 bp, Homo sapien
tcctgtgggataggtattagtaacg

SEQ ID NO: 1088618 - DNA, 25 bp, Homo sapien
ggctcaccgcaacattgaatgcctc

SEQ ID NO: 1088619 - DNA, 25 bp, Homo sapien
gcaacattgaatgcctcccggattc

SEQ ID NO: 1088620 - DNA, 25 bp, Homo sapien
gaaggcaaagactagccaggttctt

SEQ ID NO: 1088621 - DNA, 25 bp, Homo sapien
gaaggagcgctctcactgtggaaga

SEQ ID NO: 1088622 - DNA, 25 bp, Homo sapien
gatccagcggagagtggcagacttt

SEQ ID NO: 1088623 - DNA, 25 bp, Homo sapien
caattaagccgaccaggaaacctca

SEQ ID NO: 1088624 - DNA, 25 bp, Homo sapien
ggctccaggtggaagcatgctttcc

SEQ ID NO: 1088625 - DNA, 25 bp, Homo sapien
gagggtaagccaaaataactgctaa

SEQ ID NO: 1088626 - DNA, 25 bp, Homo sapien
gatcagctctaatcctagagggtaa

SEQ ID NO: 1088627 - DNA, 25 bp, Homo sapien
gtaatctgtaacctccacaggaagt

SEQ ID NO: 1088628 - DNA, 25 bp, Homo sapien
gtgaagtgaacatctacagtctagg

SEQ ID NO: 1088629 - DNA, 25 bp, Homo sapien
tacctagattggatcctacttgggc

SEQ ID NO: 1088630 - DNA, 25 bp, Homo sapien
gctgcaggtctccagagcatatcga

SEQ ID NO: 1088631 - DNA, 25 bp, Homo sapien
gaactattgtggtgcaacctggcaa

SEQ ID NO: 1088632 - DNA, 25 bp, Homo sapien
tacttgggctatcacagagcattga

SEQ ID NO: 1088633 - DNA, 25 bp, Homo sapien
aacgtcagtgtgagttggcggccac

SEQ ID NO: 1088634 - DNA, 25 bp, Homo sapien
tcagggaactgcatactgcggactc

SEQ ID NO: 1088635 - DNA, 25 bp, Homo sapien
tctgcaaagcatgggtccggtgcct

SEQ ID NO: 1088636 - DNA, 25 bp, Homo sapien
tagtaaatggaagtgcccaggccga

SEQ ID NO: 1088637 - DNA, 25 bp, Homo sapien
tggcacgggcggcgcgcaccccgct

SEQ ID NO: 1088638 - DNA, 25 bp, Homo sapien
acgggcggcgcgcaccccgctctgc

SEQ ID NO: 1088639 - DNA, 25 bp, Homo sapien
ctggcacgggcggcgcgcaccccgc

SEQ ID NO: 1088640 - DNA, 25 bp, Homo sapien
gcacgggcggcgcgcaccccgctct

SEQ ID NO: 1088641 - DNA, 25 bp, Homo sapien
cgtacaacccggaagttggcgcagc

SEQ ID NO: 1088642 - DNA, 25 bp, Homo sapien
tccctgagaggatgccgctcgtggt

SEQ ID NO: 1088643 - DNA, 25 bp, Homo sapien
gacccagcggtgtacggcgattctg

SEQ ID NO: 1088644 - DNA, 25 bp, Homo sapien
catcaaaggtttccgttacgagctc

SEQ ID NO: 1088645 - DNA, 25 bp, Homo sapien
tattaataaaatggacgggcagtct

SEQ ID NO: 1088646 - DNA, 25 bp, Homo sapien
gaacctgggcctagctggcgtagaa

SEQ ID NO: 1088647 - DNA, 25 bp, Homo sapien
ttctcctgaggcctataacatttgg

SEQ ID NO: 1088648 - DNA, 25 bp, Homo sapien
tttccatagaaacaagagggtctgt

SEQ ID NO: 1088649 - DNA, 25 bp, Homo sapien
tatggagggttctgtcattactgag

SEQ ID NO: 1088650 - DNA, 25 bp, Homo sapien
gactgtctggttgggcatcttgcca

SEQ ID NO: 1088651 - DNA, 25 bp, Homo sapien
gagtcaaatcttgagccttaggcaa

SEQ ID NO: 1088652 - DNA, 25 bp, Homo sapien
tcttgccaaagcaggattcagttgc

SEQ ID NO: 1088653 - DNA, 25 bp, Homo sapien
tccagtctctcagtgcagaaactcc

SEQ ID NO: 1088654 - DNA, 25 bp, Homo sapien
cattccagtctctcagtgcagaaac

SEQ ID NO: 1088655 - DNA, 25 bp, Homo sapien
attccagtctctcagtgcagaaact

SEQ ID NO: 1088656 - DNA, 25 bp, Homo sapien
ttccagtctctcagtgcagaaactc

SEQ ID NO: 1088657 - DNA, 25 bp, Homo sapien
ctgaggcaatggttgctgaaagtct

SEQ ID NO: 1088658 - DNA, 25 bp, Homo sapien
ttcccagatgtttccggacgatggc

SEQ ID NO: 1088659 - DNA, 25 bp, Homo sapien
gttgctgaaagtcttaatgagatgg

SEQ ID NO: 1088660 - DNA, 25 bp, Homo sapien
tcttcccagatgtttccggacgatg

SEQ ID NO: 1088661 - DNA, 25 bp, Homo sapien
catgtgatctttccgcatgggctcc

SEQ ID NO: 1088662 - DNA, 25 bp, Homo sapien
catgggctcctatgggtttcctcac

SEQ ID NO: 1088663 - DNA, 25 bp, Homo sapien
gctggattccaagagtgcgtgccat

SEQ ID NO: 1088664 - DNA, 25 bp, Homo sapien
tgcgtgccataagagaacaaggtgg

SEQ ID NO: 1088665 - DNA, 25 bp, Homo sapien
agacgcggcctcgtctcggggccac

SEQ ID NO: 1088666 - DNA, 25 bp, Homo sapien
gagacgcggcctcgtctcggggcca

SEQ ID NO: 1088667 - DNA, 25 bp, Homo sapien
cgcggcctcgtctcggggccacctg

SEQ ID NO: 1088668 - DNA, 25 bp, Homo sapien
ggagacgcggcctcgtctcggggcc

SEQ ID NO: 1088669 - DNA, 25 bp, Homo sapien
tgtgtggaccgtctgctgggactcc

SEQ ID NO: 1088670 - DNA, 25 bp, Homo sapien
gaatccacgaaaagcaactcgcgct

SEQ ID NO: 1088671 - DNA, 25 bp, Homo sapien
tacgtgatctgcacctttaagctca

SEQ ID NO: 1088672 - DNA, 25 bp, Homo sapien
aactcgcgctcgagaacagctctcg

SEQ ID NO: 1088673 - DNA, 25 bp, Homo sapien
tcatccctgagtagaagatttgcgg

SEQ ID NO: 1088674 - DNA, 25 bp, Homo sapien
tccagcgggaaagtgcatgtctgca

SEQ ID NO: 1088675 - DNA, 25 bp, Homo sapien
taaggtacagagcttctccagcggg

SEQ ID NO: 1088676 - DNA, 25 bp, Homo sapien
gcccactgttgggagcgactgacct

SEQ ID NO: 1088677 - DNA, 25 bp, Homo sapien
ccctcttagtgctagtggcggcagg

SEQ ID NO: 1088678 - DNA, 25 bp, Homo sapien
tatcccgggagcgaacatctgaact

SEQ ID NO: 1088679 - DNA, 25 bp, Homo sapien
gagcagatccacgtgatacagccga

SEQ ID NO: 1088680 - DNA, 25 bp, Homo sapien
tctcccgagcgttctgttgtgtccc

SEQ ID NO: 1088681 - DNA, 25 bp, Homo sapien
ccagcacgcggcaagagaaagatgg

SEQ ID NO: 1088682 - DNA, 25 bp, Homo sapien
ctgaagcagggagggtcctccaaca

SEQ ID NO: 1088683 - DNA, 25 bp, Homo sapien
cctccaacaccagcacgcggcaaga

SEQ ID NO: 1088684 - DNA, 25 bp, Homo sapien
tccaacaccagcacgcggcaagaga

SEQ ID NO: 1088685 - DNA, 25 bp, Homo sapien
cagcctgagcggttggcgggtgtcg

SEQ ID NO: 1088686 - DNA, 25 bp, Homo sapien
agaccgtgcgcagcggcctatggcc

SEQ ID NO: 1088687 - DNA, 25 bp, Homo sapien
gccggtaaccgacaggccaagccag

SEQ ID NO: 1088688 - DNA, 25 bp, Homo sapien
cgcaccacggcggaagtggcagcct

SEQ ID NO: 1088689 - DNA, 25 bp, Homo sapien
cctatctgtagactgggagcatcaa

SEQ ID NO: 1088690 - DNA, 25 bp, Homo sapien
taaagctcaaagcacacaacactgc

SEQ ID NO: 1088691 - DNA, 25 bp, Homo sapien
caacagagagcctgtataaagctca

SEQ ID NO: 1088692 - DNA, 25 bp, Homo sapien
caacactgctgttgtgagcaaggag

SEQ ID NO: 1088693 - DNA, 25 bp, Homo sapien
cggacctgagcctgaagtttggcta

SEQ ID NO: 1088694 - DNA, 25 bp, Homo sapien
cttgccccctatccggacctgagcc

SEQ ID NO: 1088695 - DNA, 25 bp, Homo sapien
cctgaagtttggctaacttttcttg

SEQ ID NO: 1088696 - DNA, 25 bp, Homo sapien
cctatccggacctgagcctgaagtt

SEQ ID NO: 1088697 - DNA, 25 bp, Homo sapien
ttgggcagagatatgggtagaatat

SEQ ID NO: 1088698 - DNA, 25 bp, Homo sapien
tgctcacaactagttcttccttagg

SEQ ID NO: 1088699 - DNA, 25 bp, Homo sapien
gattgtgttgggcagagatatgggt

SEQ ID NO: 1088700 - DNA, 25 bp, Homo sapien
cacagctgaagagaatcaaagactt

SEQ ID NO: 1088701 - DNA, 25 bp, Homo sapien
ccttcttctttctgcgagctgtacc

SEQ ID NO: 1088702 - DNA, 25 bp, Homo sapien
gccagtttttttagagaactctgaa

SEQ ID NO: 1088703 - DNA, 25 bp, Homo sapien
accagctatattattcacagccagt

SEQ ID NO: 1088704 - DNA, 25 bp, Homo sapien
caataccagctatattattcacagc

SEQ ID NO: 1088705 - DNA, 25 bp, Homo sapien
gatcgtaagctacaaaagacagagg

SEQ ID NO: 1088706 - DNA, 25 bp, Homo sapien
gaggccatgcagaatatcttgtacc

SEQ ID NO: 1088707 - DNA, 25 bp, Homo sapien
gacacaccttagttcaaacctggaa

SEQ ID NO: 1088708 - DNA, 25 bp, Homo sapien
catgacctcggcacagtattatagg

SEQ ID NO: 1088709 - DNA, 25 bp, Homo sapien
gctgtctatctatgggcacctgagg

SEQ ID NO: 1088710 - DNA, 25 bp, Homo sapien
tcagagctgtctatctatgggcacc

SEQ ID NO: 1088711 - DNA, 25 bp, Homo sapien
ctgtctatctatgggcacctgaggc

SEQ ID NO: 1088712 - DNA, 25 bp, Homo sapien
gagctgtctatctatgggcacctga

SEQ ID NO: 1088713 - DNA, 25 bp, Homo sapien
gcgcccggcccagagagatatattt

SEQ ID NO: 1088714 - DNA, 25 bp, Homo sapien
tactggaatgtatgtagatacctac

SEQ ID NO: 1088715 - DNA, 25 bp, Homo sapien
tatatagaaaagttcatcacatgat

SEQ ID NO: 1088716 - DNA, 25 bp, Homo sapien
tagatacctacacatgattaaaagg

SEQ ID NO: 1088717 - DNA, 25 bp, Homo sapien
gagaaagaggcattttgagacccca

SEQ ID NO: 1088718 - DNA, 25 bp, Homo sapien
ttagcaactataccagcactgaggt

SEQ ID NO: 1088719 - DNA, 25 bp, Homo sapien
ttttccctaaagatagctgaaggta

SEQ ID NO: 1088720 - DNA, 25 bp, Homo sapien
tcaaccaaacatcccctttaggtca

SEQ ID NO: 1088721 - DNA, 25 bp, Homo sapien
ttcaccaatatgaactatttcagat

SEQ ID NO: 1088722 - DNA, 25 bp, Homo sapien
tttcaccaatatgaactatttcaga

SEQ ID NO: 1088723 - DNA, 25 bp, Homo sapien
agcaccaagctgacttaatattcca

SEQ ID NO: 1088724 - DNA, 25 bp, Homo sapien
ctgtgattggtttggcttctgcatg

SEQ ID NO: 1088725 - DNA, 25 bp, Homo sapien
catttctgtgattggtttggcttct

SEQ ID NO: 1088726 - DNA, 25 bp, Homo sapien
tgtcagcaccaagctgacttaatat

SEQ ID NO: 1088727 - DNA, 25 bp, Homo sapien
atgattaggttctttaagtaaggtg

SEQ ID NO: 1088728 - DNA, 25 bp, Homo sapien
gaatattctatatgtcacactacat

SEQ ID NO: 1088729 - DNA, 25 bp, Homo sapien
ttctatatgtcacactacataatca

SEQ ID NO: 1088730 - DNA, 25 bp, Homo sapien
tgaatattctatatgtcacactaca

SEQ ID NO: 1088731 - DNA, 25 bp, Homo sapien
atattctatatgtcacactacataa

SEQ ID NO: 1088732 - DNA, 25 bp, Homo sapien
cccagccatataacagtattttctg

SEQ ID NO: 1088733 - DNA, 25 bp, Homo sapien
atttaaaatgatgggccaagcatgg

SEQ ID NO: 1088734 - DNA, 25 bp, Homo sapien
ccagccatataacagtattttctga

SEQ ID NO: 1088735 - DNA, 25 bp, Homo sapien
cagccatataacagtattttctgat

SEQ ID NO: 1088736 - DNA, 25 bp, Homo sapien
ggttgaagtacagtggctttccata

SEQ ID NO: 1088737 - DNA, 25 bp, Homo sapien
caggttgaagtacagtggctttcca

SEQ ID NO: 1088738 - DNA, 25 bp, Homo sapien
ttgaagtacagtggctttccatagc

SEQ ID NO: 1088739 - DNA, 25 bp, Homo sapien
ccaggttgaagtacagtggctttcc

SEQ ID NO: 1088740 - DNA, 25 bp, Homo sapien
ttcctcatcaatgtcttctggtttt

SEQ ID NO: 1088741 - DNA, 25 bp, Homo sapien
gtcttctggttttggtgctttactg

SEQ ID NO: 1088742 - DNA, 25 bp, Homo sapien
atgtcttctggttttggtgctttac

SEQ ID NO: 1088743 - DNA, 25 bp, Homo sapien
ttctggttttggtgctttactgtcc

SEQ ID NO: 1088744 - DNA, 25 bp, Homo sapien
tcaatttaataaatccaggcagcag

SEQ ID NO: 1088745 - DNA, 25 bp, Homo sapien
actgaaaggagataaacaggatgct

SEQ ID NO: 1088746 - DNA, 25 bp, Homo sapien
gagcttacaatcaacacaaacctaa

SEQ ID NO: 1088747 - DNA, 25 bp, Homo sapien
aactggtggcattttactaacaatg

SEQ ID NO: 1088748 - DNA, 25 bp, Homo sapien
gttagcttcattctttgatgcctca

SEQ ID NO: 1088749 - DNA, 25 bp, Homo sapien
tgcctcatcaaaattttctacaaga

SEQ ID NO: 1088750 - DNA, 25 bp, Homo sapien
ttagttagcttcattctttgatgcc

SEQ ID NO: 1088751 - DNA, 25 bp, Homo sapien
tagcttcattctttgatgcctcatc

SEQ ID NO: 1088752 - DNA, 25 bp, Homo sapien
ctgggaggaagtgcaaaatgcaaaa

SEQ ID NO: 1088753 - DNA, 25 bp, Homo sapien
tcctgggaggaagtgcaaaatgcaa

SEQ ID NO: 1088754 - DNA, 25 bp, Homo sapien
gggaggaagtgcaaaatgcaaaatc

SEQ ID NO: 1088755 - DNA, 25 bp, Homo sapien
atcctgggaggaagtgcaaaatgca

SEQ ID NO: 1088756 - DNA, 25 bp, Homo sapien
gatgaagttgttcctcaagctgagg

SEQ ID NO: 1088757 - DNA, 25 bp, Homo sapien
cccagaggtaggttcaaggccaaga

SEQ ID NO: 1088758 - DNA, 25 bp, Homo sapien
gaacatccttctcaagctaggtgga

SEQ ID NO: 1088759 - DNA, 25 bp, Homo sapien
tacaaaaggagggattaggcactcg

SEQ ID NO: 1088760 - DNA, 25 bp, Homo sapien
gagctactgacctaacactggatga

SEQ ID NO: 1088761 - DNA, 25 bp, Homo sapien
gccagagttttgactaggacacaag

SEQ ID NO: 1088762 - DNA, 25 bp, Homo sapien
tcagagtagttagatgacctgtcca

SEQ ID NO: 1088763 - DNA, 25 bp, Homo sapien
cattcatttacaggtggagggtaga

SEQ ID NO: 1088764 - DNA, 25 bp, Homo sapien
gacttgtccaaaacagataaggcgc

SEQ ID NO: 1088765 - DNA, 25 bp, Homo sapien
ttggctcattgtacacaagagaggc

SEQ ID NO: 1088766 - DNA, 25 bp, Homo sapien
gagaggccagccattaagaattgtt

SEQ ID NO: 1088767 - DNA, 25 bp, Homo sapien
ggtaaaacagatataagagcccaac

SEQ ID NO: 1088768 - DNA, 25 bp, Homo sapien
taaactacacattgggcactacgag

SEQ ID NO: 1088769 - DNA, 25 bp, Homo sapien
gccatagcttaggagataacacgct

SEQ ID NO: 1088770 - DNA, 25 bp, Homo sapien
tctgtgcctagaaccatgagcttcg

SEQ ID NO: 1088771 - DNA, 25 bp, Homo sapien
taagtgatggctcccgaagttgtgc

SEQ ID NO: 1088772 - DNA, 25 bp, Homo sapien
tcaagatcaacatacataacccaag

SEQ ID NO: 1088773 - DNA, 25 bp, Homo sapien
gaccctgaacaatccttatgacatg

SEQ ID NO: 1088774 - DNA, 25 bp, Homo sapien
aatgctgctatgaaacatcctgaag

SEQ ID NO: 1088775 - DNA, 25 bp, Homo sapien
aacaaggtatgcctaaaaggtggca

SEQ ID NO: 1088776 - DNA, 25 bp, Homo sapien
gttgatggaaacaggtttcttccaa

SEQ ID NO: 1088777 - DNA, 25 bp, Homo sapien
tgactgcagccactttattgtgcta

SEQ ID NO: 1088778 - DNA, 25 bp, Homo sapien
gctgaatagtggtccattgagtgta

SEQ ID NO: 1088779 - DNA, 25 bp, Homo sapien
tgtcattgcaaaacaggacctcatt

SEQ ID NO: 1088780 - DNA, 25 bp, Homo sapien
tctgacagggaccttacagccaagc

SEQ ID NO: 1088781 - DNA, 25 bp, Homo sapien
aacatgtctgacagggaccttacag

SEQ ID NO: 1088782 - DNA, 25 bp, Homo sapien
ataagtaataggagtttcttgtaag

SEQ ID NO: 1088783 - DNA, 25 bp, Homo sapien
acagggaccttacagccaagcccat

SEQ ID NO: 1088784 - DNA, 25 bp, Homo sapien
tacatgcactatcctttgtgagccc

SEQ ID NO: 1088785 - DNA, 25 bp, Homo sapien
ccttgggaggtgagccaggaattaa

SEQ ID NO: 1088786 - DNA, 25 bp, Homo sapien
tcaccttggccttaatcacttggaa

SEQ ID NO: 1088787 - DNA, 25 bp, Homo sapien
ccccgtgagagagagtcaggcttga

SEQ ID NO: 1088788 - DNA, 25 bp, Homo sapien
tcccaaaacagacgaaggaattgtc

SEQ ID NO: 1088789 - DNA, 25 bp, Homo sapien
tctcccgaagatacgtgaacgttct

SEQ ID NO: 1088790 - DNA, 25 bp, Homo sapien
gcgtctggatgaaagaagagtgacc

SEQ ID NO: 1088791 - DNA, 25 bp, Homo sapien
tgaacgttcttgtcactcggacccg

SEQ ID NO: 1088792 - DNA, 25 bp, Homo sapien
gcacgagccgcagggaacgctaagg

SEQ ID NO: 1088793 - DNA, 25 bp, Homo sapien
agccgcagggaacgctaaggagcgc

SEQ ID NO: 1088794 - DNA, 25 bp, Homo sapien
ctgggcacgagccgcagggaacgct

SEQ ID NO: 1088795 - DNA, 25 bp, Homo sapien
acgagccgcagggaacgctaaggag

SEQ ID NO: 1088796 - DNA, 25 bp, Homo sapien
cacgtccggctacggcgtcgggact

SEQ ID NO: 1088797 - DNA, 25 bp, Homo sapien
cggctacggcgtcgggactgcggcg

SEQ ID NO: 1088798 - DNA, 25 bp, Homo sapien
cgtccggctacggcgtcgggactgc

SEQ ID NO: 1088799 - DNA, 25 bp, Homo sapien
tccggctacggcgtcgggactgcgg

SEQ ID NO: 1088800 - DNA, 25 bp, Homo sapien
cttcagcatggccacgggggtcgtc

SEQ ID NO: 1088801 - DNA, 25 bp, Homo sapien
ctgctactgctgctaaggcccggca

SEQ ID NO: 1088802 - DNA, 25 bp, Homo sapien
gcgaaacctcccactcctgtaggag

SEQ ID NO: 1088803 - DNA, 25 bp, Homo sapien
gggtcgtccctgagccgaaagcctc

SEQ ID NO: 1088804 - DNA, 25 bp, Homo sapien
gaccgcagtggcaggacgccccgtc

SEQ ID NO: 1088805 - DNA, 25 bp, Homo sapien
cccacaggcggcgggaggccggcga

SEQ ID NO: 1088806 - DNA, 25 bp, Homo sapien
gggaggcgaccgcagtggcaggacg

SEQ ID NO: 1088807 - DNA, 25 bp, Homo sapien
gcagtggcaggacgccccgtccgcc

SEQ ID NO: 1088808 - DNA, 25 bp, Homo sapien
gccggagcgagggcttcccaacggc

SEQ ID NO: 1088809 - DNA, 25 bp, Homo sapien
gagcgagggcttcccaacggcgcgg

SEQ ID NO: 1088810 - DNA, 25 bp, Homo sapien
ggagcgagggcttcccaacggcgcg

SEQ ID NO: 1088811 - DNA, 25 bp, Homo sapien
cgcgccggaaccgaggccggagcga

SEQ ID NO: 1088812 - DNA, 25 bp, Homo sapien
caaaaggttgttctcgagcaagcca

SEQ ID NO: 1088813 - DNA, 25 bp, Homo sapien
tgtttgcaaacaggcgtcatctgcc

SEQ ID NO: 1088814 - DNA, 25 bp, Homo sapien
cgccacaaccgggattctgagggac

SEQ ID NO: 1088815 - DNA, 25 bp, Homo sapien
gagcaagccagatccatgaatgaca

SEQ ID NO: 1088816 - DNA, 25 bp, Homo sapien
tctttctaagattatttactacgaa

SEQ ID NO: 1088817 - DNA, 25 bp, Homo sapien
atttactacgaaaaatgacatcctt

SEQ ID NO: 1088818 - DNA, 25 bp, Homo sapien
aaaaatgacatcctttgagctggag

SEQ ID NO: 1088819 - DNA, 25 bp, Homo sapien
tacgaaaaatgacatcctttgagct

SEQ ID NO: 1088820 - DNA, 25 bp, Homo sapien
ggggtggctattctcagacatgatc

SEQ ID NO: 1088821 - DNA, 25 bp, Homo sapien
gtggggtggctattctcagacatga

SEQ ID NO: 1088822 - DNA, 25 bp, Homo sapien
tggggtggctattctcagacatgat

SEQ ID NO: 1088823 - DNA, 25 bp, Homo sapien
ttttagggactgtttctcctgctca

SEQ ID NO: 1088824 - DNA, 25 bp, Homo sapien
cttttagggactgtttctcctgctc

SEQ ID NO: 1088825 - DNA, 25 bp, Homo sapien
ccttttagggactgtttctcctgct

SEQ ID NO: 1088826 - DNA, 25 bp, Homo sapien
tttagggactgtttctcctgctcaa

SEQ ID NO: 1088827 - DNA, 25 bp, Homo sapien
tcaagtagttaggtgcagaaagttt

SEQ ID NO: 1088828 - DNA, 25 bp, Homo sapien
agcttgcagactcctatgaaagatg

SEQ ID NO: 1088829 - DNA, 25 bp, Homo sapien
tgcagactcctatgaaagatgtatt

SEQ ID NO: 1088830 - DNA, 25 bp, Homo sapien
cttgcagactcctatgaaagatgta

SEQ ID NO: 1088831 - DNA, 25 bp, Homo sapien
aacttgtcttcacgatcctccagct

SEQ ID NO: 1088832 - DNA, 25 bp, Homo sapien
cattaaacttgtcttcacgatcctc

SEQ ID NO: 1088833 - DNA, 25 bp, Homo sapien
cctcctcattaaacttgtcttcacg

SEQ ID NO: 1088834 - DNA, 25 bp, Homo sapien
aatttagttgctttccactcagcca

SEQ ID NO: 1088835 - DNA, 25 bp, Homo sapien
cacgtaaacaaatatcatgggcaga

SEQ ID NO: 1088836 - DNA, 25 bp, Homo sapien
caaaccctcactggctttggtaact

SEQ ID NO: 1088837 - DNA, 25 bp, Homo sapien
aagacgacccacaaaccctcactgg

SEQ ID NO: 1088838 - DNA, 25 bp, Homo sapien
ccttccacgtaaacaaatatcatgg

SEQ ID NO: 1088839 - DNA, 25 bp, Homo sapien
ttgtcaggttaatgccgccaaacac

SEQ ID NO: 1088840 - DNA, 25 bp, Homo sapien
tcttgtcaggttaatgccgccaaac

SEQ ID NO: 1088841 - DNA, 25 bp, Homo sapien
tctcttgtcaggttaatgccgccaa

SEQ ID NO: 1088842 - DNA, 25 bp, Homo sapien
tcactgcaactcatctcttgtcagg

SEQ ID NO: 1088843 - DNA, 25 bp, Homo sapien
taatagactccggatgaacaagcat

SEQ ID NO: 1088844 - DNA, 25 bp, Homo sapien
ctggtacacggtcttatacataata

SEQ ID NO: 1088845 - DNA, 25 bp, Homo sapien
tatacataatagactccggatgaac

SEQ ID NO: 1088846 - DNA, 25 bp, Homo sapien
tcttatacataatagactccggatg

SEQ ID NO: 1088847 - DNA, 25 bp, Homo sapien
ggattgctgtggattgttctgccta

SEQ ID NO: 1088848 - DNA, 25 bp, Homo sapien
taggattgctgtggattgttctgcc

SEQ ID NO: 1088849 - DNA, 25 bp, Homo sapien
gattgttctgcctacagtttagaaa

SEQ ID NO: 1088850 - DNA, 25 bp, Homo sapien
cctacagtttagaaagtactcaaag

SEQ ID NO: 1088851 - DNA, 25 bp, Homo sapien
cacgtgataaggaacagacttctcg

SEQ ID NO: 1088852 - DNA, 25 bp, Homo sapien
ttacacacgtgataaggaacagact

SEQ ID NO: 1088853 - DNA, 25 bp, Homo sapien
tgataaggaacagacttctcggtgc

SEQ ID NO: 1088854 - DNA, 25 bp, Homo sapien
cctgctgattcagtatgctctgttt

SEQ ID NO: 1088855 - DNA, 25 bp, Homo sapien
gtgaggaaacaccacttaagagact

SEQ ID NO: 1088856 - DNA, 25 bp, Homo sapien
aggaaacaccacttaagagacttgt

SEQ ID NO: 1088857 - DNA, 25 bp, Homo sapien
tgaggaaacaccacttaagagactt

SEQ ID NO: 1088858 - DNA, 25 bp, Homo sapien
gaggaaacaccacttaagagacttg

SEQ ID NO: 1088859 - DNA, 25 bp, Homo sapien
cttcgttttgttcaaattcatctaa

SEQ ID NO: 1088860 - DNA, 25 bp, Homo sapien
cttctgcttggaagtaattctccat

SEQ ID NO: 1088861 - DNA, 25 bp, Homo sapien
aagcttctgcttggaagtaattctc

SEQ ID NO: 1088862 - DNA, 25 bp, Homo sapien
gcttctgcttggaagtaattctcca

SEQ ID NO: 1088863 - DNA, 25 bp, Homo sapien
ctggccaaagtagggttaaatgaca

SEQ ID NO: 1088864 - DNA, 25 bp, Homo sapien
agggagaagactttcagttgtggtt

SEQ ID NO: 1088865 - DNA, 25 bp, Homo sapien
acagtcctgtccattagcacagtga

SEQ ID NO: 1088866 - DNA, 25 bp, Homo sapien
ggatctagaatcttattccactttg

SEQ ID NO: 1088867 - DNA, 25 bp, Homo sapien
taaacttgtaatcgcagacatggag

SEQ ID NO: 1088868 - DNA, 25 bp, Homo sapien
tgacggctacaacaagaacattctt

SEQ ID NO: 1088869 - DNA, 25 bp, Homo sapien
tatcacagttatgcatgacggctac

SEQ ID NO: 1088870 - DNA, 25 bp, Homo sapien
taaaccagaccggagggattcttca

SEQ ID NO: 1088871 - DNA, 25 bp, Homo sapien
gagaaatgctctgtcatattaagga

SEQ ID NO: 1088872 - DNA, 25 bp, Homo sapien
ccaattagtcatgtcctgagattca

SEQ ID NO: 1088873 - DNA, 25 bp, Homo sapien
tattaaggaattctgtagtgccaag

SEQ ID NO: 1088874 - DNA, 25 bp, Homo sapien
cttttcttcgtttacttggctatca

SEQ ID NO: 1088875 - DNA, 25 bp, Homo sapien
aatttgctgctggtgtgtctataac

SEQ ID NO: 1088876 - DNA, 25 bp, Homo sapien
tatcaccattagtgtcctcaggctg

SEQ ID NO: 1088877 - DNA, 25 bp, Homo sapien
gaaacacctgggtcttgcattccat

SEQ ID NO: 1088878 - DNA, 25 bp, Homo sapien
tactgaatcttctttggagggtaaa

SEQ ID NO: 1088879 - DNA, 25 bp, Homo sapien
gatggcaggcttgctactaccttgg

SEQ ID NO: 1088880 - DNA, 25 bp, Homo sapien
tgagaatccggtacccatactggag

SEQ ID NO: 1088881 - DNA, 25 bp, Homo sapien
tagaaggttgcttgggtcttgcacc

SEQ ID NO: 1088882 - DNA, 25 bp, Homo sapien
tatctggagctaatgcaaggcatgg

SEQ ID NO: 1088883 - DNA, 25 bp, Homo sapien
tcaaacactctgttccttgaagttg

SEQ ID NO: 1088884 - DNA, 25 bp, Homo sapien
gatgtgctggcctataccaaaaatg

SEQ ID NO: 1088885 - DNA, 25 bp, Homo sapien
taacatctctaaggtaaacgaggga

SEQ ID NO: 1088886 - DNA, 25 bp, Homo sapien
tttctgaatccatctaaggtaccta

SEQ ID NO: 1088887 - DNA, 25 bp, Homo sapien
gagaagctcaaggatttttacagat

SEQ ID NO: 1088888 - DNA, 25 bp, Homo sapien
cagcagcaatcaaggcagaaaaaat

SEQ ID NO: 1088889 - DNA, 25 bp, Homo sapien
cacccgtatgttctagggctgagga

SEQ ID NO: 1088890 - DNA, 25 bp, Homo sapien
ttaccctcatcaagcttggaactga

SEQ ID NO: 1088891 - DNA, 25 bp, Homo sapien
gaaagtcagtagattggccaggcgc

SEQ ID NO: 1088892 - DNA, 25 bp, Homo sapien
tgtgactcttccctcgttcactata

SEQ ID NO: 1088893 - DNA, 25 bp, Homo sapien
gatcataacatgctcagcctatgga

SEQ ID NO: 1088894 - DNA, 25 bp, Homo sapien
tcatagacatgatcataacatgctc

SEQ ID NO: 1088895 - DNA, 25 bp, Homo sapien
cgttcactatactggagttccttca

SEQ ID NO: 1088896 - DNA, 25 bp, Homo sapien
tcagggtcagtaccaggaggtgcct

SEQ ID NO: 1088897 - DNA, 25 bp, Homo sapien
cagggtcagtaccaggaggtgcctt

SEQ ID NO: 1088898 - DNA, 25 bp, Homo sapien
ccaatggcgctctcttctaccagtg

SEQ ID NO: 1088899 - DNA, 25 bp, Homo sapien
tccattttgatgactggctagaaca

SEQ ID NO: 1088900 - DNA, 25 bp, Homo sapien
tgtctcatatgggtgggtgtctttt

SEQ ID NO: 1088901 - DNA, 25 bp, Homo sapien
tatcattaacgtccaagttggcttc

SEQ ID NO: 1088902 - DNA, 25 bp, Homo sapien
gcactgaatggcagattacacacac

SEQ ID NO: 1088903 - DNA, 25 bp, Homo sapien
tggcagattacacacactctagctt

SEQ ID NO: 1088904 - DNA, 25 bp, Homo sapien
tctgtccatgtataacagtttacat

SEQ ID NO: 1088905 - DNA, 25 bp, Homo sapien
tcctttctgtccatgtataacagtt

SEQ ID NO: 1088906 - DNA, 25 bp, Homo sapien
gatactttcaaaacatggaaattta

SEQ ID NO: 1088907 - DNA, 25 bp, Homo sapien
ccttgttttgtctcaataactatga

SEQ ID NO: 1088908 - DNA, 25 bp, Homo sapien
gaaggtgagcaacttgtaaagaaag

SEQ ID NO: 1088909 - DNA, 25 bp, Homo sapien
aaaagtcttctcatcgtaattccct

SEQ ID NO: 1088910 - DNA, 25 bp, Homo sapien
caatctgagttaaaggttggagcct

SEQ ID NO: 1088911 - DNA, 25 bp, Homo sapien
gaaacttggatagcatttagacatt

SEQ ID NO: 1088912 - DNA, 25 bp, Homo sapien
gcctggtttctttataggagaccaa

SEQ ID NO: 1088913 - DNA, 25 bp, Homo sapien
ccttaagagggagtcaaacaacatc

SEQ ID NO: 1088914 - DNA, 25 bp, Homo sapien
aatgtgaatggattgcaaaatatgg

SEQ ID NO: 1088915 - DNA, 25 bp, Homo sapien
caatgtgaatggattgcaaaatatg

SEQ ID NO: 1088916 - DNA, 25 bp, Homo sapien
tcaatgtgaatggattgcaaaatat

SEQ ID NO: 1088917 - DNA, 25 bp, Homo sapien
tattcagcaggattgttagggttag

SEQ ID NO: 1088918 - DNA, 25 bp, Homo sapien
caagggagggatagtagaacagtat

SEQ ID NO: 1088919 - DNA, 25 bp, Homo sapien
ctgctccagggtgctttaaaactcc

SEQ ID NO: 1088920 - DNA, 25 bp, Homo sapien
aactcccacaggtaccatcacagtg

SEQ ID NO: 1088921 - DNA, 25 bp, Homo sapien
catcaatgtggcattggaaggtttt

SEQ ID NO: 1088922 - DNA, 25 bp, Homo sapien
caggcatcaatgtggcattggaagg

SEQ ID NO: 1088923 - DNA, 25 bp, Homo sapien
aaataaaacaggcatcaatgtggca

SEQ ID NO: 1088924 - DNA, 25 bp, Homo sapien
taaaacaggcatcaatgtggcattg

SEQ ID NO: 1088925 - DNA, 25 bp, Homo sapien
tgcatcagcaacttctccattgggc

SEQ ID NO: 1088926 - DNA, 25 bp, Homo sapien
cattcattgttaatttggctgcatc

SEQ ID NO: 1088927 - DNA, 25 bp, Homo sapien
tcattgttaatttggctgcatcagc

SEQ ID NO: 1088928 - DNA, 25 bp, Homo sapien
agatcccatcagcaaaccaaactcg

SEQ ID NO: 1088929 - DNA, 25 bp, Homo sapien
ccaacctgagttatactcccagaga

SEQ ID NO: 1088930 - DNA, 25 bp, Homo sapien
ttatactcccagagaatagacaaat

SEQ ID NO: 1088931 - DNA, 25 bp, Homo sapien
tcccagagaatagacaaatatccgt

SEQ ID NO: 1088932 - DNA, 25 bp, Homo sapien
ggacttccaacctgagttatactcc

SEQ ID NO: 1088933 - DNA, 25 bp, Homo sapien
acaaatacaagtgggtcagggccac

SEQ ID NO: 1088934 - DNA, 25 bp, Homo sapien
aacaaatacaagtgggtcagggcca

SEQ ID NO: 1088935 - DNA, 25 bp, Homo sapien
tttaaccattgacaacaaatttgca

SEQ ID NO: 1088936 - DNA, 25 bp, Homo sapien
acaattttaaccattgacaacaaat

SEQ ID NO: 1088937 - DNA, 25 bp, Homo sapien
tcccgataaagctgcacaaagtgat

SEQ ID NO: 1088938 - DNA, 25 bp, Homo sapien
agagcatcccgataaagctgcacaa

SEQ ID NO: 1088939 - DNA, 25 bp, Homo sapien
ccagagcatcccgataaagctgcac

SEQ ID NO: 1088940 - DNA, 25 bp, Homo sapien
cgataaagctgcacaaagtgattaa

SEQ ID NO: 1088941 - DNA, 25 bp, Homo sapien
taatatgactaaaactcaagccatc

SEQ ID NO: 1088942 - DNA, 25 bp, Homo sapien
atttctaagtggtaatatgactaaa

SEQ ID NO: 1088943 - DNA, 25 bp, Homo sapien
tctaagtggtaatatgactaaaact

SEQ ID NO: 1088944 - DNA, 25 bp, Homo sapien
agtggtaatatgactaaaactcaag

SEQ ID NO: 1088945 - DNA, 25 bp, Homo sapien
ttcacctaaacattatcatctatat

SEQ ID NO: 1088946 - DNA, 25 bp, Homo sapien
taaacattatcatctatattttgca

SEQ ID NO: 1088947 - DNA, 25 bp, Homo sapien
gggtagtactcttgctccaggatta

SEQ ID NO: 1088948 - DNA, 25 bp, Homo sapien
tggctgcacaattaagctgctaggc

SEQ ID NO: 1088949 - DNA, 25 bp, Homo sapien
actgccaaggaaactttgactgaag

SEQ ID NO: 1088950 - DNA, 25 bp, Homo sapien
ctttactgccaaggaaactttgact

SEQ ID NO: 1088951 - DNA, 25 bp, Homo sapien
ttactgccaaggaaactttgactga

SEQ ID NO: 1088952 - DNA, 25 bp, Homo sapien
ttctttactgccaaggaaactttga

SEQ ID NO: 1088953 - DNA, 25 bp, Homo sapien
caaagaatatgctcatcatatacag

SEQ ID NO: 1088954 - DNA, 25 bp, Homo sapien
gtaaaatataattgatcgtaactgt

SEQ ID NO: 1088955 - DNA, 25 bp, Homo sapien
aagtgacaaagaatatgctcatcat

SEQ ID NO: 1088956 - DNA, 25 bp, Homo sapien
tcgtaactgttttccaaccaagtga

SEQ ID NO: 1088957 - DNA, 25 bp, Homo sapien
tagttacgctgctaaagccatgagc

SEQ ID NO: 1088958 - DNA, 25 bp, Homo sapien
agccatgagcaaggaagctccttct

SEQ ID NO: 1088959 - DNA, 25 bp, Homo sapien
gtggcagagttgagaatcttactca

SEQ ID NO: 1088960 - DNA, 25 bp, Homo sapien
tactcaagtggtcggattcctagca

SEQ ID NO: 1088961 - DNA, 25 bp, Homo sapien
atgatggtatgccccgtctctccaa

SEQ ID NO: 1088962 - DNA, 25 bp, Homo sapien
tgatggtatgccccgtctctccaaa

SEQ ID NO: 1088963 - DNA, 25 bp, Homo sapien
caagaagattcatgatggtatgccc

SEQ ID NO: 1088964 - DNA, 25 bp, Homo sapien
atctgggtacaatctctgaccaatc

SEQ ID NO: 1088965 - DNA, 25 bp, Homo sapien
gaccaatctttgcttggataataac

SEQ ID NO: 1088966 - DNA, 25 bp, Homo sapien
tggcttggggtatctgggtacaatc

SEQ ID NO: 1088967 - DNA, 25 bp, Homo sapien
tctgaccaatctttgcttggataat

SEQ ID NO: 1088968 - DNA, 25 bp, Homo sapien
gatttcaccaaacctgtttggggca

SEQ ID NO: 1088969 - DNA, 25 bp, Homo sapien
cttgatttcaccaaacctgtttggg

SEQ ID NO: 1088970 - DNA, 25 bp, Homo sapien
tgatttcaccaaacctgtttggggc

SEQ ID NO: 1088971 - DNA, 25 bp, Homo sapien
gattacatatgtgcgtcaccatgct

SEQ ID NO: 1088972 - DNA, 25 bp, Homo sapien
tacatatgtgcgtcaccatgctcgg

SEQ ID NO: 1088973 - DNA, 25 bp, Homo sapien
catatgtgcgtcaccatgctcggct

SEQ ID NO: 1088974 - DNA, 25 bp, Homo sapien
ttacatatgtgcgtcaccatgctcg

SEQ ID NO: 1088975 - DNA, 25 bp, Homo sapien
tctgttgctgggaattttgatgcta

SEQ ID NO: 1088976 - DNA, 25 bp, Homo sapien
ttgtatctgttgctgggaattttga

SEQ ID NO: 1088977 - DNA, 25 bp, Homo sapien
ttttgatgctagttttccgaacttc

SEQ ID NO: 1088978 - DNA, 25 bp, Homo sapien
gctgggaattttgatgctagttttc

SEQ ID NO: 1088979 - DNA, 25 bp, Homo sapien
tgtcccatatttaagtacatctgct

SEQ ID NO: 1088980 - DNA, 25 bp, Homo sapien
aattgtagtttctcctatatactgg

SEQ ID NO: 1088981 - DNA, 25 bp, Homo sapien
tattgctgattgaactcaagtagct

SEQ ID NO: 1088982 - DNA, 25 bp, Homo sapien
gattctctgaggatatataatctga

SEQ ID NO: 1088983 - DNA, 25 bp, Homo sapien
tctgggctgattgtgaatactgata

SEQ ID NO: 1088984 - DNA, 25 bp, Homo sapien
tgctcattggacttgttcatggctt

SEQ ID NO: 1088985 - DNA, 25 bp, Homo sapien
catcatcattctgtacacacacaag

SEQ ID NO: 1088986 - DNA, 25 bp, Homo sapien
ctcctgccaggacatgctcattgga

SEQ ID NO: 1088987 - DNA, 25 bp, Homo sapien
aacacaaagaaactggcaccagtca

SEQ ID NO: 1088988 - DNA, 25 bp, Homo sapien
gaactcagactacatgccctcaggt

SEQ ID NO: 1088989 - DNA, 25 bp, Homo sapien
taattatagcacactagcagcaagc

SEQ ID NO: 1088990 - DNA, 25 bp, Homo sapien
tacagcagaagtgtaaaggattccc

SEQ ID NO: 1088991 - DNA, 25 bp, Homo sapien
taggagtcagacatctacagcagaa

SEQ ID NO: 1088992 - DNA, 25 bp, Homo sapien
catgaagcagtgttaagccatccct

SEQ ID NO: 1088993 - DNA, 25 bp, Homo sapien
agtctttaaatcatcccaggccagg

SEQ ID NO: 1088994 - DNA, 25 bp, Homo sapien
caagccatgttaaggagtccccacg

SEQ ID NO: 1088995 - DNA, 25 bp, Homo sapien
caggcctcagacgtgtgtgtgaaca

SEQ ID NO: 1088996 - DNA, 25 bp, Homo sapien
ccttgctaacgttcttgtcatcatc

SEQ ID NO: 1088997 - DNA, 25 bp, Homo sapien
cccttgctaacgttcttgtcatcat

SEQ ID NO: 1088998 - DNA, 25 bp, Homo sapien
cttgctaacgttcttgtcatcatcc

SEQ ID NO: 1088999 - DNA, 25 bp, Homo sapien
tttgctttatattctgatccatgga

SEQ ID NO: 1089000 - DNA, 25 bp, Homo sapien
tggacttcccatctataggacttac

SEQ ID NO: 1089001 - DNA, 25 bp, Homo sapien
cttcccatctataggacttacgaca

SEQ ID NO: 1089002 - DNA, 25 bp, Homo sapien
gtccatctgattacttttccatttg

SEQ ID NO: 1089003 - DNA, 25 bp, Homo sapien
tggcctagttttcttattagtgaaa

SEQ ID NO: 1089004 - DNA, 25 bp, Homo sapien
gtgcctggcctagttttcttattag

SEQ ID NO: 1089005 - DNA, 25 bp, Homo sapien
gcctggcctagttttcttattagtg

SEQ ID NO: 1089006 - DNA, 25 bp, Homo sapien
cctggcctagttttcttattagtga

SEQ ID NO: 1089007 - DNA, 25 bp, Homo sapien
tgtgctggtcatcgttttctaggaa

SEQ ID NO: 1089008 - DNA, 25 bp, Homo sapien
attgtgctggtcatcgttttctagg

SEQ ID NO: 1089009 - DNA, 25 bp, Homo sapien
gctggtcatcgttttctaggaaaaa

SEQ ID NO: 1089010 - DNA, 25 bp, Homo sapien
caattgtgctggtcatcgttttcta

SEQ ID NO: 1089011 - DNA, 25 bp, Homo sapien
catgacaacggggccctcactaagc

SEQ ID NO: 1089012 - DNA, 25 bp, Homo sapien
ttccatgacaacggggccctcacta

SEQ ID NO: 1089013 - DNA, 25 bp, Homo sapien
aacggggccctcactaagctggcag

SEQ ID NO: 1089014 - DNA, 25 bp, Homo sapien
gacaacggggccctcactaagctgg

SEQ ID NO: 1089015 - DNA, 25 bp, Homo sapien
caaatgatttgggtatgactgctgt

SEQ ID NO: 1089016 - DNA, 25 bp, Homo sapien
gaggagcggaattcttgtctaaaca

SEQ ID NO: 1089017 - DNA, 25 bp, Homo sapien
ttagaattatggaacatcggtcccc

SEQ ID NO: 1089018 - DNA, 25 bp, Homo sapien
tggtggacaatgcatagaagactta

SEQ ID NO: 1089019 - DNA, 25 bp, Homo sapien
atcctttttataccaattctgtaca

SEQ ID NO: 1089020 - DNA, 25 bp, Homo sapien
tgtggaattatcctttttataccaa

SEQ ID NO: 1089021 - DNA, 25 bp, Homo sapien
ttttataccaattctgtacaaagag

SEQ ID NO: 1089022 - DNA, 25 bp, Homo sapien
cagtgtggaattatcctttttatac

SEQ ID NO: 1089023 - DNA, 25 bp, Homo sapien
catgctaatttaacgggacactttc

SEQ ID NO: 1089024 - DNA, 25 bp, Homo sapien
gaagttggacaccttgaccaagtga

SEQ ID NO: 1089025 - DNA, 25 bp, Homo sapien
cataggcaagagatttgcatggtct

SEQ ID NO: 1089026 - DNA, 25 bp, Homo sapien
catatactggttataagttccaggt

SEQ ID NO: 1089027 - DNA, 25 bp, Homo sapien
ccaaagtcctaatctaaagtcctgc

SEQ ID NO: 1089028 - DNA, 25 bp, Homo sapien
ccagggtagcagtaacatgacaaac

SEQ ID NO: 1089029 - DNA, 25 bp, Homo sapien
tatacagagtatccaccaaagtcct

SEQ ID NO: 1089030 - DNA, 25 bp, Homo sapien
gcataagcacagctcaagaactgag

SEQ ID NO: 1089031 - DNA, 25 bp, Homo sapien
tgttcatgccacaggacatcttagc

SEQ ID NO: 1089032 - DNA, 25 bp, Homo sapien
ctttcctgggaatgtagggacctgc

SEQ ID NO: 1089033 - DNA, 25 bp, Homo sapien
gctttgcacccctgtgtagccgatg

SEQ ID NO: 1089034 - DNA, 25 bp, Homo sapien
tatgagaaagacctaccatgctggg

SEQ ID NO: 1089035 - DNA, 25 bp, Homo sapien
ttcttccagaagttgccgtggggat

SEQ ID NO: 1089036 - DNA, 25 bp, Homo sapien
aaaagagggagtagcgtggtgaatg

SEQ ID NO: 1089037 - DNA, 25 bp, Homo sapien
tcaagccaatgtttcttccagaagt

SEQ ID NO: 1089038 - DNA, 25 bp, Homo sapien
cttcttcaagccaatgtttcttcca

SEQ ID NO: 1089039 - DNA, 25 bp, Homo sapien
gaatgagtgtgagatcagagaaatt

SEQ ID NO: 1089040 - DNA, 25 bp, Homo sapien
gctggagaatgagtgtgagatcaga

SEQ ID NO: 1089041 - DNA, 25 bp, Homo sapien
gagaatgagtgtgagatcagagaaa

SEQ ID NO: 1089042 - DNA, 25 bp, Homo sapien
tggagaatgagtgtgagatcagaga

SEQ ID NO: 1089043 - DNA, 25 bp, Homo sapien
cccccgcccgcgtagccgtgcacat

SEQ ID NO: 1089044 - DNA, 25 bp, Homo sapien
ctgttggagccccccgcccgcgtag

SEQ ID NO: 1089045 - DNA, 25 bp, Homo sapien
ccccccgcccgcgtagccgtgcaca

SEQ ID NO: 1089046 - DNA, 25 bp, Homo sapien
gagccccccgcccgcgtagccgtgc

SEQ ID NO: 1089047 - DNA, 25 bp, Homo sapien
accacgcctccttcccggctggcag

SEQ ID NO: 1089048 - DNA, 25 bp, Homo sapien
ccacgcctccttcccggctggcagg

SEQ ID NO: 1089049 - DNA, 25 bp, Homo sapien
acgcctccttcccggctggcaggca

SEQ ID NO: 1089050 - DNA, 25 bp, Homo sapien
aaccacgcctccttcccggctggca

SEQ ID NO: 1089051 - DNA, 25 bp, Homo sapien
agcccccgggaagcgctaggcagcg

SEQ ID NO: 1089052 - DNA, 25 bp, Homo sapien
ccaaagagcccccgggaagcgctag

SEQ ID NO: 1089053 - DNA, 25 bp, Homo sapien
gccccggggttgcagccgccagctc

SEQ ID NO: 1089054 - DNA, 25 bp, Homo sapien
cgggagaagggccaaccgcgcagcg

SEQ ID NO: 1089055 - DNA, 25 bp, Homo sapien
tgtctatcttatgaacgccgttccg

SEQ ID NO: 1089056 - DNA, 25 bp, Homo sapien
cactttgtcagggaagggataccaa

SEQ ID NO: 1089057 - DNA, 25 bp, Homo sapien
ccataacgtgggaaaggcttagatc

SEQ ID NO: 1089058 - DNA, 25 bp, Homo sapien
cgccgttccggatggtcttcagggt

SEQ ID NO: 1089059 - DNA, 25 bp, Homo sapien
tggttaatagagcatgcagacagcc

SEQ ID NO: 1089060 - DNA, 25 bp, Homo sapien
gaaattcacatacgtacaccaagag

SEQ ID NO: 1089061 - DNA, 25 bp, Homo sapien
ttgagtgaagcttacaaacagggtt

SEQ ID NO: 1089062 - DNA, 25 bp, Homo sapien
gatgtacaggtagctccaactatgt

SEQ ID NO: 1089063 - DNA, 25 bp, Homo sapien
gctcaagcctagaacgccacgttgt

SEQ ID NO: 1089064 - DNA, 25 bp, Homo sapien
tcaggcagcatctgggttagccagt

SEQ ID NO: 1089065 - DNA, 25 bp, Homo sapien
agatccgtagtcgaagcctggctgc

SEQ ID NO: 1089066 - DNA, 25 bp, Homo sapien
gaagcccgactgaggtactgctgct

SEQ ID NO: 1089067 - DNA, 25 bp, Homo sapien
tcttgaagccggaaacaccgtagtg

SEQ ID NO: 1089068 - DNA, 25 bp, Homo sapien
tttccgtcggatcctttaatgcctc

SEQ ID NO: 1089069 - DNA, 25 bp, Homo sapien
cactaaacagcttaggcgaccatct

SEQ ID NO: 1089070 - DNA, 25 bp, Homo sapien
gtggaagaagtttcactaaacagct

SEQ ID NO: 1089071 - DNA, 25 bp, Homo sapien
aagtccaaagcactcctctttccag

SEQ ID NO: 1089072 - DNA, 25 bp, Homo sapien
aggcgctccgcgcgcttccacttac

SEQ ID NO: 1089073 - DNA, 25 bp, Homo sapien
actccatggctttatcgactacaag

SEQ ID NO: 1089074 - DNA, 25 bp, Homo sapien
tccatggctttatcgactacaagtt

SEQ ID NO: 1089075 - DNA, 25 bp, Homo sapien
atggctttatcgactacaagttcag

SEQ ID NO: 1089076 - DNA, 25 bp, Homo sapien
catggctttatcgactacaagttca

SEQ ID NO: 1089077 - DNA, 25 bp, Homo sapien
aatgatatccttctcgggttgaatt

SEQ ID NO: 1089078 - DNA, 25 bp, Homo sapien
acaatgatatccttctcgggttgaa

SEQ ID NO: 1089079 - DNA, 25 bp, Homo sapien
tgatatccttctcgggttgaatttg

SEQ ID NO: 1089080 - DNA, 25 bp, Homo sapien
ctacaatgatatccttctcgggttg

SEQ ID NO: 1089081 - DNA, 25 bp, Homo sapien
gcaatcaattgcagtgcctgtcagc

SEQ ID NO: 1089082 - DNA, 25 bp, Homo sapien
ctcatgtaaagtgcccccagcatgc

SEQ ID NO: 1089083 - DNA, 25 bp, Homo sapien
ttgtagcaatcaattgcagtgcctg

SEQ ID NO: 1089084 - DNA, 25 bp, Homo sapien
cagtgcctgtcagcctcatgtaaag

SEQ ID NO: 1089085 - DNA, 25 bp, Homo sapien
gttctggctcttgatttttcgatag

SEQ ID NO: 1089086 - DNA, 25 bp, Homo sapien
ggctcttgatttttcgatagtcatt

SEQ ID NO: 1089087 - DNA, 25 bp, Homo sapien
cttgatttttcgatagtcattgtac

SEQ ID NO: 1089088 - DNA, 25 bp, Homo sapien
gatttttcgatagtcattgtacaaa

SEQ ID NO: 1089089 - DNA, 25 bp, Homo sapien
tagaacatgtatcttatatggcaca

SEQ ID NO: 1089090 - DNA, 25 bp, Homo sapien
tatgtgctaggcctctttagaagag

SEQ ID NO: 1089091 - DNA, 25 bp, Homo sapien
gatagcttttgagaactggctagga

SEQ ID NO: 1089092 - DNA, 25 bp, Homo sapien
gaatgaagatgtcccaattagcagg

SEQ ID NO: 1089093 - DNA, 25 bp, Homo sapien
gggcagaatgatatcacagactctc

SEQ ID NO: 1089094 - DNA, 25 bp, Homo sapien
gtagtcggggcagaatgatatcaca

SEQ ID NO: 1089095 - DNA, 25 bp, Homo sapien
tatcacagactctctcactgtgcaa

SEQ ID NO: 1089096 - DNA, 25 bp, Homo sapien
gaatgatatcacagactctctcact

SEQ ID NO: 1089097 - DNA, 25 bp, Homo sapien
gggtgactctggtaacagactttta

SEQ ID NO: 1089098 - DNA, 25 bp, Homo sapien
cccgtctaggaagagaagggtgact

SEQ ID NO: 1089099 - DNA, 25 bp, Homo sapien
gatccacaggcttcagtgtttaagc

SEQ ID NO: 1089100 - DNA, 25 bp, Homo sapien
gtctgtctgcccgtctaggaagaga

SEQ ID NO: 1089101 - DNA, 25 bp, Homo sapien
gaatatcaatcagtataggtacagc

SEQ ID NO: 1089102 - DNA, 25 bp, Homo sapien
tactctaaagtcatgggaatatcaa

SEQ ID NO: 1089103 - DNA, 25 bp, Homo sapien
ggaatatcaatcagtataggtacag

SEQ ID NO: 1089104 - DNA, 25 bp, Homo sapien
ttatactctaaagtcatgggaatat

SEQ ID NO: 1089105 - DNA, 25 bp, Homo sapien
cagagcactaactcgaggctccagt

SEQ ID NO: 1089106 - DNA, 25 bp, Homo sapien
gcactaactcgaggctccagttgct

SEQ ID NO: 1089107 - DNA, 25 bp, Homo sapien
ctcttccagagcactaactcgaggc

SEQ ID NO: 1089108 - DNA, 25 bp, Homo sapien
cagcttcctctaatacatagcgttt

SEQ ID NO: 1089109 - DNA, 25 bp, Homo sapien
cttcactggactccacatcatccat

SEQ ID NO: 1089110 - DNA, 25 bp, Homo sapien
accataaaagtctcaggtgccagac

SEQ ID NO: 1089111 - DNA, 25 bp, Homo sapien
caaccataaaagtctcaggtgccag

SEQ ID NO: 1089112 - DNA, 25 bp, Homo sapien
tacaaccataaaagtctcaggtgcc

SEQ ID NO: 1089113 - DNA, 25 bp, Homo sapien
ctacaaccataaaagtctcaggtgc

SEQ ID NO: 1089114 - DNA, 25 bp, Homo sapien
agcgacggggcttgtccaagtctcg

SEQ ID NO: 1089115 - DNA, 25 bp, Homo sapien
ggcttgtccaagtctcggtagcttc

SEQ ID NO: 1089116 - DNA, 25 bp, Homo sapien
cttctccggcggtgatcaggtgatg

SEQ ID NO: 1089117 - DNA, 25 bp, Homo sapien
caagtctcggtagcttctccggcgg

SEQ ID NO: 1089118 - DNA, 25 bp, Homo sapien
ttctccttttgggagatcgactccg

SEQ ID NO: 1089119 - DNA, 25 bp, Homo sapien
cttctccttttgggagatcgactcc

SEQ ID NO: 1089120 - DNA, 25 bp, Homo sapien
tctccttttgggagatcgactccgc

SEQ ID NO: 1089121 - DNA, 25 bp, Homo sapien
gaaaagactggtcagactaccagat

SEQ ID NO: 1089122 - DNA, 25 bp, Homo sapien
tgtagaaaagactggtcagactacc

SEQ ID NO: 1089123 - DNA, 25 bp, Homo sapien
tagaaaagactggtcagactaccag

SEQ ID NO: 1089124 - DNA, 25 bp, Homo sapien
ctgtagaaaagactggtcagactac

SEQ ID NO: 1089125 - DNA, 25 bp, Homo sapien
tcgggacctgctgcggtgacgtctt

SEQ ID NO: 1089126 - DNA, 25 bp, Homo sapien
gctccgatgcctttctcggcgaggg

SEQ ID NO: 1089127 - DNA, 25 bp, Homo sapien
gtgacgtcttggactcttgctccga

SEQ ID NO: 1089128 - DNA, 25 bp, Homo sapien
tggaacgggatctgtgccgccgatc

SEQ ID NO: 1089129 - DNA, 25 bp, Homo sapien
tcgggagactttgagtggctcctgt

SEQ ID NO: 1089130 - DNA, 25 bp, Homo sapien
ctcctgtgtctgtgactacggtgat

SEQ ID NO: 1089131 - DNA, 25 bp, Homo sapien
ggctcctgtgtctgtgactacggtg

SEQ ID NO: 1089132 - DNA, 25 bp, Homo sapien
ctttcgggagactttgagtggctcc

SEQ ID NO: 1089133 - DNA, 25 bp, Homo sapien
ctctccggctcttcttgtggctctt

SEQ ID NO: 1089134 - DNA, 25 bp, Homo sapien
tccggctcttcttgtggctcttctt

SEQ ID NO: 1089135 - DNA, 25 bp, Homo sapien
ttactcattccctctccggctcttc

SEQ ID NO: 1089136 - DNA, 25 bp, Homo sapien
ttccctctccggctcttcttgtggc

SEQ ID NO: 1089137 - DNA, 25 bp, Homo sapien
tagttgggtcaaaaactgatgttga

SEQ ID NO: 1089138 - DNA, 25 bp, Homo sapien
tccttgtcagtcatatccccaacct

SEQ ID NO: 1089139 - DNA, 25 bp, Homo sapien
gtcatatccccaacctccagatcct

SEQ ID NO: 1089140 - DNA, 25 bp, Homo sapien
tccagatcctttatactctcataag

SEQ ID NO: 1089141 - DNA, 25 bp, Homo sapien
tactgctactgactaggcctggata

SEQ ID NO: 1089142 - DNA, 25 bp, Homo sapien
ggcacgactgtctagcaatttaggt

SEQ ID NO: 1089143 - DNA, 25 bp, Homo sapien
cttgattatcgatgtccgtggaggc

SEQ ID NO: 1089144 - DNA, 25 bp, Homo sapien
tctgactttgtgaatggcacgactg

SEQ ID NO: 1089145 - DNA, 25 bp, Homo sapien
aggaaccattgaagaatatgaaagc

SEQ ID NO: 1089146 - DNA, 25 bp, Homo sapien
gaaaggaaccattgaagaatatgaa

SEQ ID NO: 1089147 - DNA, 25 bp, Homo sapien
gaaccattgaagaatatgaaagctc

SEQ ID NO: 1089148 - DNA, 25 bp, Homo sapien
ccattgaagaatatgaaagctcaaa

SEQ ID NO: 1089149 - DNA, 25 bp, Homo sapien
taaaaggtagtcctatatagttcta

SEQ ID NO: 1089150 - DNA, 25 bp, Homo sapien
tactggatgacagcttggttggtcc

SEQ ID NO: 1089151 - DNA, 25 bp, Homo sapien
taaaaggcgattgtgccctatggca

SEQ ID NO: 1089152 - DNA, 25 bp, Homo sapien
gacagaaagagccttacagcaaggt

SEQ ID NO: 1089153 - DNA, 25 bp, Homo sapien
cagcaaggtttgtcctcaagctcca

SEQ ID NO: 1089154 - DNA, 25 bp, Homo sapien
caaccatctctcttaatcatacagg

SEQ ID NO: 1089155 - DNA, 25 bp, Homo sapien
gagactgtacgtgattcctgctatg

SEQ ID NO: 1089156 - DNA, 25 bp, Homo sapien
gatgaaaccagcacactctacttgt

SEQ ID NO: 1089157 - DNA, 25 bp, Homo sapien
tacaaaagtgggctcatatgctata

SEQ ID NO: 1089158 - DNA, 25 bp, Homo sapien
tattcatactttggttgcttcagac

SEQ ID NO: 1089159 - DNA, 25 bp, Homo sapien
tgtcagttacattcagcagaaaaag

SEQ ID NO: 1089160 - DNA, 25 bp, Homo sapien
ctgctgtctcaagggtatccgtacc

SEQ ID NO: 1089161 - DNA, 25 bp, Homo sapien
tttcagctggtctaccgatgcacag

SEQ ID NO: 1089162 - DNA, 25 bp, Homo sapien
tgaactgcaggcaatactatcacgc

SEQ ID NO: 1089163 - DNA, 25 bp, Homo sapien
cacccctgggatcatgcaattctgt

SEQ ID NO: 1089164 - DNA, 25 bp, Homo sapien
gcccagcccagactcataagtttaa

SEQ ID NO: 1089165 - DNA, 25 bp, Homo sapien
gcaaatttaatccttggagtggcca

SEQ ID NO: 1089166 - DNA, 25 bp, Homo sapien
gagacctccacgatactcgagactt

SEQ ID NO: 1089167 - DNA, 25 bp, Homo sapien
taatttacaagtccctagccccaca

SEQ ID NO: 1089168 - DNA, 25 bp, Homo sapien
cacattattggtatcagcagtttac

SEQ ID NO: 1089169 - DNA, 25 bp, Homo sapien
tagagacccgagagacctcagatgt

SEQ ID NO: 1089170 - DNA, 25 bp, Homo sapien
tatcaacctctaaggattgttaaag

SEQ ID NO: 1089171 - DNA, 25 bp, Homo sapien
tatctacgaattatagtctcccagg

SEQ ID NO: 1089172 - DNA, 25 bp, Homo sapien
tctgtatactgtagtaggtcaggaa

SEQ ID NO: 1089173 - DNA, 25 bp, Homo sapien
cttttgagacagaacgaacttccag

SEQ ID NO: 1089174 - DNA, 25 bp, Homo sapien
tctgtctactttgagtcttcaacct

SEQ ID NO: 1089175 - DNA, 25 bp, Homo sapien
tataaatctacctgcatctataggt

SEQ ID NO: 1089176 - DNA, 25 bp, Homo sapien
tcctctgagacagtacgtagtatca

SEQ ID NO: 1089177 - DNA, 25 bp, Homo sapien
tcactccagtggatgcttttcctct

SEQ ID NO: 1089178 - DNA, 25 bp, Homo sapien
ggagactgcaggaggttttagcttc

SEQ ID NO: 1089179 - DNA, 25 bp, Homo sapien
tagaagaaatctcaagaaagagaac

SEQ ID NO: 1089180 - DNA, 25 bp, Homo sapien
gaagaaatctcaagaaagagaacaa

SEQ ID NO: 1089181 - DNA, 25 bp, Homo sapien
actgcaggaggttttagcttcagag

SEQ ID NO: 1089182 - DNA, 25 bp, Homo sapien
gagaacatccttgtattattcctga

SEQ ID NO: 1089183 - DNA, 25 bp, Homo sapien
tgatgggttactaaggagaaaacac

SEQ ID NO: 1089184 - DNA, 25 bp, Homo sapien
taagacttcccagatgttgaaaagg

SEQ ID NO: 1089185 - DNA, 25 bp, Homo sapien
gaacttccagtgtcagcattaccta

SEQ ID NO: 1089186 - DNA, 25 bp, Homo sapien
ggacaggagtttatgattatcttga

SEQ ID NO: 1089187 - DNA, 25 bp, Homo sapien
ctctgcaggacaggagtttatgatt

SEQ ID NO: 1089188 - DNA, 25 bp, Homo sapien
gtaatcctcccaacagctctgcagg

SEQ ID NO: 1089189 - DNA, 25 bp, Homo sapien
tgctttacatacatgtctcatgtaa

SEQ ID NO: 1089190 - DNA, 25 bp, Homo sapien
gaccttgaactgacgcctttgttag

SEQ ID NO: 1089191 - DNA, 25 bp, Homo sapien
ttagtgaactcttgaagataagcag

SEQ ID NO: 1089192 - DNA, 25 bp, Homo sapien
gaaacgaaaactacgacatctaaga

SEQ ID NO: 1089193 - DNA, 25 bp, Homo sapien
gaacaaagcttaggaatattacaga

SEQ ID NO: 1089194 - DNA, 25 bp, Homo sapien
gatagatgatagattgtgttttcca

SEQ ID NO: 1089195 - DNA, 25 bp, Homo sapien
ggtaataatttagccccagctctct

SEQ ID NO: 1089196 - DNA, 25 bp, Homo sapien
tataactgttatatgtccttgctgg

SEQ ID NO: 1089197 - DNA, 25 bp, Homo sapien
ttttaggtcactgttgttaggtgca

SEQ ID NO: 1089198 - DNA, 25 bp, Homo sapien
caagcggtcctcccagcttgtcctc

SEQ ID NO: 1089199 - DNA, 25 bp, Homo sapien
gatggagtctcctgtgttgcctagg

SEQ ID NO: 1089200 - DNA, 25 bp, Homo sapien
actgtagccttcacctcccaagtgc

SEQ ID NO: 1089201 - DNA, 25 bp, Homo sapien
tagccttcacctcccaagtgcaagt

SEQ ID NO: 1089202 - DNA, 25 bp, Homo sapien
gaaattatatccatagtttactacc

SEQ ID NO: 1089203 - DNA, 25 bp, Homo sapien
gacctctgaggtcatgagcatttca

SEQ ID NO: 1089204 - DNA, 25 bp, Homo sapien
tctattcttcgttctcttgtgagac

SEQ ID NO: 1089205 - DNA, 25 bp, Homo sapien
tttgtaggaacttgtggcattgtta

SEQ ID NO: 1089206 - DNA, 25 bp, Homo sapien
ttggggacgaactccacactgtggc

SEQ ID NO: 1089207 - DNA, 25 bp, Homo sapien
tttggggacgaactccacactgtgg

SEQ ID NO: 1089208 - DNA, 25 bp, Homo sapien
gctttggggacgaactccacactgt

SEQ ID NO: 1089209 - DNA, 25 bp, Homo sapien
ggcgctttggggacgaactccacac

SEQ ID NO: 1089210 - DNA, 25 bp, Homo sapien
ccaggtgccgcgcttcgcaggtgtc

SEQ ID NO: 1089211 - DNA, 25 bp, Homo sapien
tggcctgagagcgtctcagccgccc

SEQ ID NO: 1089212 - DNA, 25 bp, Homo sapien
ccgcggggcagcgtcgggtaccgag

SEQ ID NO: 1089213 - DNA, 25 bp, Homo sapien
ctggaacgggcttcgggtgtcccag

SEQ ID NO: 1089214 - DNA, 25 bp, Homo sapien
gcttccgagggtccgccgaggctcg

SEQ ID NO: 1089215 - DNA, 25 bp, Homo sapien
agtccgagtgccaggccagagggta

SEQ ID NO: 1089216 - DNA, 25 bp, Homo sapien
taccgttgctccgaagcccgcttgg

SEQ ID NO: 1089217 - DNA, 25 bp, Homo sapien
gggagcagccttgggagcgaggcgc

SEQ ID NO: 1089218 - DNA, 25 bp, Homo sapien
caagagggtacatttgctcaaaggc

SEQ ID NO: 1089219 - DNA, 25 bp, Homo sapien
cactgaattgaagggcatgtcggta

SEQ ID NO: 1089220 - DNA, 25 bp, Homo sapien
tacctgggccttgtagcatcagcca

SEQ ID NO: 1089221 - DNA, 25 bp, Homo sapien
tgaagtggagcgtccctctgtgacc

SEQ ID NO: 1089222 - DNA, 25 bp, Homo sapien
ggtcttggctatccgatgctcagca

SEQ ID NO: 1089223 - DNA, 25 bp, Homo sapien
gaaaatacggcagcaccacattgtg

SEQ ID NO: 1089224 - DNA, 25 bp, Homo sapien
ccatcacaaaggtactcgggcaagt

SEQ ID NO: 1089225 - DNA, 25 bp, Homo sapien
tatcagagtgctcccgaaaatacgg

SEQ ID NO: 1089226 - DNA, 25 bp, Homo sapien
gatattgttgcttccaaagaggatg

SEQ ID NO: 1089227 - DNA, 25 bp, Homo sapien
tcagtttgttcaactgctggaacat

SEQ ID NO: 1089228 - DNA, 25 bp, Homo sapien
tggcactggcaaaggcattctttct

SEQ ID NO: 1089229 - DNA, 25 bp, Homo sapien
ctgtgaagacccaggctccagaaat

SEQ ID NO: 1089230 - DNA, 25 bp, Homo sapien
agtttctgccacgtgtatgactcga

SEQ ID NO: 1089231 - DNA, 25 bp, Homo sapien
acgtgtatgactcgaagaccacctg

SEQ ID NO: 1089232 - DNA, 25 bp, Homo sapien
tttccaggaacagtactcacaaacc

SEQ ID NO: 1089233 - DNA, 25 bp, Homo sapien
ggcccttttccaggaacagtactca

SEQ ID NO: 1089234 - DNA, 25 bp, Homo sapien
ggtggcggcgtcgcgagggcaaaga

SEQ ID NO: 1089235 - DNA, 25 bp, Homo sapien
ggaggtggcggcgtcgcgagggcaa

SEQ ID NO: 1089236 - DNA, 25 bp, Homo sapien
gaggtggcggcgtcgcgagggcaaa

SEQ ID NO: 1089237 - DNA, 25 bp, Homo sapien
aggtggcggcgtcgcgagggcaaag

SEQ ID NO: 1089238 - DNA, 25 bp, Homo sapien
gatccgcggtacttctccagcgaca

SEQ ID NO: 1089239 - DNA, 25 bp, Homo sapien
agcgacaccagtttgccccggatgt

SEQ ID NO: 1089240 - DNA, 25 bp, Homo sapien
gccccggatgttgaccgccttgaag

SEQ ID NO: 1089241 - DNA, 25 bp, Homo sapien
tgaccgccttgaagtcgtagaagtc

SEQ ID NO: 1089242 - DNA, 25 bp, Homo sapien
tgcctcacacatacaagaacactgt

SEQ ID NO: 1089243 - DNA, 25 bp, Homo sapien
cacagacaggcacatatgaaatcaa

SEQ ID NO: 1089244 - DNA, 25 bp, Homo sapien
taggtatgcacatgcaccacgatac

SEQ ID NO: 1089245 - DNA, 25 bp, Homo sapien
caagccagtgaagaggcatgaacct

SEQ ID NO: 1089246 - DNA, 25 bp, Homo sapien
gatgggcaccagtaccggtgactgc

SEQ ID NO: 1089247 - DNA, 25 bp, Homo sapien
gaatgagacactgtaggtgcggcgg

SEQ ID NO: 1089248 - DNA, 25 bp, Homo sapien
ctcggtagtgctggtctgtgaagcc

SEQ ID NO: 1089249 - DNA, 25 bp, Homo sapien
aagctctcaatctccttgttgctgt

SEQ ID NO: 1089250 - DNA, 25 bp, Homo sapien
ttccatctggggctactaggtactt

SEQ ID NO: 1089251 - DNA, 25 bp, Homo sapien
gctactaggtacttccagaagttcc

SEQ ID NO: 1089252 - DNA, 25 bp, Homo sapien
aagcccctaccacctttccatctgg

SEQ ID NO: 1089253 - DNA, 25 bp, Homo sapien
tgatctggggtctgacctcctccac

SEQ ID NO: 1089254 - DNA, 25 bp, Homo sapien
tcttctcgcttcagtaggatgagct

SEQ ID NO: 1089255 - DNA, 25 bp, Homo sapien
tcgcttcagtaggatgagcttcctc

SEQ ID NO: 1089256 - DNA, 25 bp, Homo sapien
gcttcagtaggatgagcttcctcac

SEQ ID NO: 1089257 - DNA, 25 bp, Homo sapien
tctcgcttcagtaggatgagcttcc

SEQ ID NO: 1089258 - DNA, 25 bp, Homo sapien
ggtgattcactggtcaagagctctc

SEQ ID NO: 1089259 - DNA, 25 bp, Homo sapien
cactgcctaggcactttcacaggta

SEQ ID NO: 1089260 - DNA, 25 bp, Homo sapien
caagacgttcgtatcggctggtgat

SEQ ID NO: 1089261 - DNA, 25 bp, Homo sapien
tgagtttgcattggtcagccccaca

SEQ ID NO: 1089262 - DNA, 25 bp, Homo sapien
ggcctggattatcatcggctggaaa

SEQ ID NO: 1089263 - DNA, 25 bp, Homo sapien
caacaactaaacctttggcctggat

SEQ ID NO: 1089264 - DNA, 25 bp, Homo sapien
tttggcctggattatcatcggctgg

SEQ ID NO: 1089265 - DNA, 25 bp, Homo sapien
tgaggtattgtttggattgttacaa

SEQ ID NO: 1089266 - DNA, 25 bp, Homo sapien
gatctgcccacctcagcctcccaaa

SEQ ID NO: 1089267 - DNA, 25 bp, Homo sapien
agcctttttttaagtgtagagacag

SEQ ID NO: 1089268 - DNA, 25 bp, Homo sapien
tgcccagcctttttttaagtgtaga

SEQ ID NO: 1089269 - DNA, 25 bp, Homo sapien
tggtctctgtctcctggcctgaagt

SEQ ID NO: 1089270 - DNA, 25 bp, Homo sapien
tgtgcccgtttgcaaccagctctct

SEQ ID NO: 1089271 - DNA, 25 bp, Homo sapien
gcagttttccatcacgtatctccgc

SEQ ID NO: 1089272 - DNA, 25 bp, Homo sapien
ccatagaatatgcttaagtgtacag

SEQ ID NO: 1089273 - DNA, 25 bp, Homo sapien
ccttgccttaggtaccactgctctg

SEQ ID NO: 1089274 - DNA, 25 bp, Homo sapien
tgcacggacaatgtccacactcttc

SEQ ID NO: 1089275 - DNA, 25 bp, Homo sapien
ggcagtgttctcactagcatcagag

SEQ ID NO: 1089276 - DNA, 25 bp, Homo sapien
tgtggatgggcccagacggtaacct

SEQ ID NO: 1089277 - DNA, 25 bp, Homo sapien
tagtctcgctgagagctagctcgtg

SEQ ID NO: 1089278 - DNA, 25 bp, Homo sapien
gccggcgccgggagtctcggggcat

SEQ ID NO: 1089279 - DNA, 25 bp, Homo sapien
agccggcgccgggagtctcggggca

SEQ ID NO: 1089280 - DNA, 25 bp, Homo sapien
ctgcaccgagccggcgccgggagtc

SEQ ID NO: 1089281 - DNA, 25 bp, Homo sapien
accgagccggcgccgggagtctcgg

SEQ ID NO: 1089282 - DNA, 25 bp, Homo sapien
cctgagaacggcagagacgaagaga

SEQ ID NO: 1089283 - DNA, 25 bp, Homo sapien
cgagcgagacggagctgagcctgag

SEQ ID NO: 1089284 - DNA, 25 bp, Homo sapien
cggcgggagtgacggctgctggaac

SEQ ID NO: 1089285 - DNA, 25 bp, Homo sapien
tcgggccaccagacggccggctaga

SEQ ID NO: 1089286 - DNA, 25 bp, Homo sapien
gctcacgtagctcgtgcaggcgccg

SEQ ID NO: 1089287 - DNA, 25 bp, Homo sapien
tcacgtagctcgtgcaggcgccgct

SEQ ID NO: 1089288 - DNA, 25 bp, Homo sapien
ctgcgctcacgtagctcgtgcaggc

SEQ ID NO: 1089289 - DNA, 25 bp, Homo sapien
cgtagctcgtgcaggcgccgctcat

SEQ ID NO: 1089290 - DNA, 25 bp, Homo sapien
gcagaagacagcggccgcctcgccc

SEQ ID NO: 1089291 - DNA, 25 bp, Homo sapien
agcagaagacagcggccgcctcgcc

SEQ ID NO: 1089292 - DNA, 25 bp, Homo sapien
gtggtcgcggaagccgcagcagaag

SEQ ID NO: 1089293 - DNA, 25 bp, Homo sapien
cttgtggtcgcggaagccgcagcag

SEQ ID NO: 1089294 - DNA, 25 bp, Homo sapien
gtagctgtgctcgtaggggaagaag

SEQ ID NO: 1089295 - DNA, 25 bp, Homo sapien
ctggagtggggttcaaggtagggtg

SEQ ID NO: 1089296 - DNA, 25 bp, Homo sapien
tggagtggggttcaaggtagggtga

SEQ ID NO: 1089297 - DNA, 25 bp, Homo sapien
atgttcaggtggacactcgggtggg

SEQ ID NO: 1089298 - DNA, 25 bp, Homo sapien
gggtggttgatgctgtgggcatgag

SEQ ID NO: 1089299 - DNA, 25 bp, Homo sapien
tgatgttcaggtggacactcgggtg

SEQ ID NO: 1089300 - DNA, 25 bp, Homo sapien
gtgggcatgaggacggtaaggacta

SEQ ID NO: 1089301 - DNA, 25 bp, Homo sapien
agcatgccacgtcagagtttccagg

SEQ ID NO: 1089302 - DNA, 25 bp, Homo sapien
aagcattgtctgagccactaaagca

SEQ ID NO: 1089303 - DNA, 25 bp, Homo sapien
gatgttaccccagagatcagcccat

SEQ ID NO: 1089304 - DNA, 25 bp, Homo sapien
tccagggcaacggaagggaccacaa

SEQ ID NO: 1089305 - DNA, 25 bp, Homo sapien
actttgggatgacaaggtgggccga

SEQ ID NO: 1089306 - DNA, 25 bp, Homo sapien
ggatgacaaggtgggccgatcactt

SEQ ID NO: 1089307 - DNA, 25 bp, Homo sapien
agcactttgggatgacaaggtgggc

SEQ ID NO: 1089308 - DNA, 25 bp, Homo sapien
gggatgacaaggtgggccgatcact

SEQ ID NO: 1089309 - DNA, 25 bp, Homo sapien
tggttctgctgacaacgtcagtgtc

SEQ ID NO: 1089310 - DNA, 25 bp, Homo sapien
gctgacaacgtcagtgtcaactcca

SEQ ID NO: 1089311 - DNA, 25 bp, Homo sapien
tctgctgacaacgtcagtgtcaact

SEQ ID NO: 1089312 - DNA, 25 bp, Homo sapien
ctccatggttctgctgacaacgtca

SEQ ID NO: 1089313 - DNA, 25 bp, Homo sapien
tgctgtctgtaagctcaagcccagg

SEQ ID NO: 1089314 - DNA, 25 bp, Homo sapien
caagcccaggtccaactttgtgtgg

SEQ ID NO: 1089315 - DNA, 25 bp, Homo sapien
caatgaaggcgagaagaaccactgc

SEQ ID NO: 1089316 - DNA, 25 bp, Homo sapien
gcagagcacacaggcggtaacaatg

SEQ ID NO: 1089317 - DNA, 25 bp, Homo sapien
ttgaccttcaccataaccctatgag

SEQ ID NO: 1089318 - DNA, 25 bp, Homo sapien
aacatagattgttctcgctttgaga

SEQ ID NO: 1089319 - DNA, 25 bp, Homo sapien
cagctgcaacttactttgttctgcc

SEQ ID NO: 1089320 - DNA, 25 bp, Homo sapien
gaacacaggattaccatacagctag

SEQ ID NO: 1089321 - DNA, 25 bp, Homo sapien
actgtggtcagagccttagaagcat

SEQ ID NO: 1089322 - DNA, 25 bp, Homo sapien
ggtgcttaccttgggcagtgcactg

SEQ ID NO: 1089323 - DNA, 25 bp, Homo sapien
ccttgggcagtgcactgtggtcaga

SEQ ID NO: 1089324 - DNA, 25 bp, Homo sapien
gctgacttctctggtgcttaccttg

SEQ ID NO: 1089325 - DNA, 25 bp, Homo sapien
ccacataggtcagggttgggtacag

SEQ ID NO: 1089326 - DNA, 25 bp, Homo sapien
tgcgggttcaagcaggagtaactct

SEQ ID NO: 1089327 - DNA, 25 bp, Homo sapien
ccttggcagtcaggagaaacctcct

SEQ ID NO: 1089328 - DNA, 25 bp, Homo sapien
tgctggagagggctcacttttggca

SEQ ID NO: 1089329 - DNA, 25 bp, Homo sapien
tggtatggagacatttattgaatgt

SEQ ID NO: 1089330 - DNA, 25 bp, Homo sapien
tccgaaggcgaagcctaaaagccat

SEQ ID NO: 1089331 - DNA, 25 bp, Homo sapien
tcactgttgccaaatccagcagcag

SEQ ID NO: 1089332 - DNA, 25 bp, Homo sapien
cagcaggtcatgtcactgtctgaaa

SEQ ID NO: 1089333 - DNA, 25 bp, Homo sapien
tcatgtaccctttggctggcctcag

SEQ ID NO: 1089334 - DNA, 25 bp, Homo sapien
ttgagtcatctttgatgattcagct

SEQ ID NO: 1089335 - DNA, 25 bp, Homo sapien
gccccttgagggtgagaactgtctg

SEQ ID NO: 1089336 - DNA, 25 bp, Homo sapien
catctttgatgattcagctcagaca

SEQ ID NO: 1089337 - DNA, 25 bp, Homo sapien
tcctcttgtttgtggcaacctgcac

SEQ ID NO: 1089338 - DNA, 25 bp, Homo sapien
tatgactatcattgttgcatcagca

SEQ ID NO: 1089339 - DNA, 25 bp, Homo sapien
taatcagggttggtacattctgcga

SEQ ID NO: 1089340 - DNA, 25 bp, Homo sapien
cattttggcatattgcaatgctcaa

SEQ ID NO: 1089341 - DNA, 25 bp, Homo sapien
cattctgcgatagctttttggcagg

SEQ ID NO: 1089342 - DNA, 25 bp, Homo sapien
tcacagggttctgtgaggctccagt

SEQ ID NO: 1089343 - DNA, 25 bp, Homo sapien
tctttgaacgaattacaattgtggt

SEQ ID NO: 1089344 - DNA, 25 bp, Homo sapien
gtcaatctctttgaacgaattacaa

SEQ ID NO: 1089345 - DNA, 25 bp, Homo sapien
ggctccagtgagctaaaagcaacat

SEQ ID NO: 1089346 - DNA, 25 bp, Homo sapien
catgaaaccccctccgagccccagt

SEQ ID NO: 1089347 - DNA, 25 bp, Homo sapien
gacagccatgaaaccccctccgagc

SEQ ID NO: 1089348 - DNA, 25 bp, Homo sapien
ttctcatttggtaaactgaggtaat

SEQ ID NO: 1089349 - DNA, 25 bp, Homo sapien
ctcatttggtaaactgaggtaatac

SEQ ID NO: 1089350 - DNA, 25 bp, Homo sapien
aaaatgacaatccagtgtggtcggg

SEQ ID NO: 1089351 - DNA, 25 bp, Homo sapien
ggaattaacagtccataatggcgag

SEQ ID NO: 1089352 - DNA, 25 bp, Homo sapien
tggcgagatggacacatagaaaatg

SEQ ID NO: 1089353 - DNA, 25 bp, Homo sapien
tccataatggcgagatggacacata

SEQ ID NO: 1089354 - DNA, 25 bp, Homo sapien
aaagatccaattggtggttcacgcc

SEQ ID NO: 1089355 - DNA, 25 bp, Homo sapien
cagggtaggccagatcagagttagt

SEQ ID NO: 1089356 - DNA, 25 bp, Homo sapien
tagcctgactaagctcttggccaga

SEQ ID NO: 1089357 - DNA, 25 bp, Homo sapien
tagctcagttgtatctcagggttgg

SEQ ID NO: 1089358 - DNA, 25 bp, Homo sapien
tactctccccaagatgacggtgtcc

SEQ ID NO: 1089359 - DNA, 25 bp, Homo sapien
ttgcagccgggattagaacttagtc

SEQ ID NO: 1089360 - DNA, 25 bp, Homo sapien
gaggacatggactccctgtagcacg

SEQ ID NO: 1089361 - DNA, 25 bp, Homo sapien
gatgggagccagataaggcatttcc

SEQ ID NO: 1089362 - DNA, 25 bp, Homo sapien
caagacctacggaatgaaaatctgg

SEQ ID NO: 1089363 - DNA, 25 bp, Homo sapien
tgcagtctggtctccacaccttcag

SEQ ID NO: 1089364 - DNA, 25 bp, Homo sapien
tcaagtggtgtaaagccgcagctcc

SEQ ID NO: 1089365 - DNA, 25 bp, Homo sapien
aaatgggcagcccactcaagtggtg

SEQ ID NO: 1089366 - DNA, 25 bp, Homo sapien
cccagtgcagaaaatgaatcacggg

SEQ ID NO: 1089367 - DNA, 25 bp, Homo sapien
gaagaccaatgaggagatggctgca

SEQ ID NO: 1089368 - DNA, 25 bp, Homo sapien
tagaaagatcatccccagtgcagaa

SEQ ID NO: 1089369 - DNA, 25 bp, Homo sapien
agaccaatgaggagatggctgcaga

SEQ ID NO: 1089370 - DNA, 25 bp, Homo sapien
gacttctggtacttgccttcctgag

SEQ ID NO: 1089371 - DNA, 25 bp, Homo sapien
gagccagcatggataagtttctcac

SEQ ID NO: 1089372 - DNA, 25 bp, Homo sapien
gcctgatggtctgtctaatgggaaa

SEQ ID NO: 1089373 - DNA, 25 bp, Homo sapien
tactgtgtcttctagccagcaggca

SEQ ID NO: 1089374 - DNA, 25 bp, Homo sapien
taaaatgcaatttgaaacagaagaa

SEQ ID NO: 1089375 - DNA, 25 bp, Homo sapien
tcactattcttttatcacctatggg

SEQ ID NO: 1089376 - DNA, 25 bp, Homo sapien
tctttggcacaatagcgttctcact

SEQ ID NO: 1089377 - DNA, 25 bp, Homo sapien
tagcgttctcactatttaaccattt

SEQ ID NO: 1089378 - DNA, 25 bp, Homo sapien
cacagggggagtcagtgtatcacat

SEQ ID NO: 1089379 - DNA, 25 bp, Homo sapien
cagggtctccaagaggtatctatac

SEQ ID NO: 1089380 - DNA, 25 bp, Homo sapien
ggtatctatacccatattcttagca

SEQ ID NO: 1089381 - DNA, 25 bp, Homo sapien
tctatacccatattcttagcagcac

SEQ ID NO: 1089382 - DNA, 25 bp, Homo sapien
ccatggccggcatggtggacttcca

SEQ ID NO: 1089383 - DNA, 25 bp, Homo sapien
ggtggagtgcaactaccactgctac

SEQ ID NO: 1089384 - DNA, 25 bp, Homo sapien
actgctaccacgagaaggacccgga

SEQ ID NO: 1089385 - DNA, 25 bp, Homo sapien
ggtcaagtcctttttggagaacatg

SEQ ID NO: 1089386 - DNA, 25 bp, Homo sapien
ggcacctaatattgctgggcacaat

SEQ ID NO: 1089387 - DNA, 25 bp, Homo sapien
caacagttagttcaaacggatcacg

SEQ ID NO: 1089388 - DNA, 25 bp, Homo sapien
tgagctaagaccacatggacgatgt

SEQ ID NO: 1089389 - DNA, 25 bp, Homo sapien
gcagagaacttaagaaggcaagcca

SEQ ID NO: 1089390 - DNA, 25 bp, Homo sapien
tgttactttaaagttatgtgcagtt

SEQ ID NO: 1089391 - DNA, 25 bp, Homo sapien
tgataatggtttacaggtgtataca

SEQ ID NO: 1089392 - DNA, 25 bp, Homo sapien
catatgtagaaactcataattgtta

SEQ ID NO: 1089393 - DNA, 25 bp, Homo sapien
tgtagaaactcataattgttacttt

SEQ ID NO: 1089394 - DNA, 25 bp, Homo sapien
ttctctgcctggatactaacgattc

SEQ ID NO: 1089395 - DNA, 25 bp, Homo sapien
tgcctggatactaacgattccatgt

SEQ ID NO: 1089396 - DNA, 25 bp, Homo sapien
tctgcctggatactaacgattccat

SEQ ID NO: 1089397 - DNA, 25 bp, Homo sapien
tggatactaacgattccatgtgcac

SEQ ID NO: 1089398 - DNA, 25 bp, Homo sapien
tttctgctaaagtatacactctaca

SEQ ID NO: 1089399 - DNA, 25 bp, Homo sapien
gctaaagtatacactctacaaaatc

SEQ ID NO: 1089400 - DNA, 25 bp, Homo sapien
gtatacactctacaaaatcatcata

SEQ ID NO: 1089401 - DNA, 25 bp, Homo sapien
taaagtatacactctacaaaatcat

SEQ ID NO: 1089402 - DNA, 25 bp, Homo sapien
tcccgctgcttcctaatggtactca

SEQ ID NO: 1089403 - DNA, 25 bp, Homo sapien
cccgctgcttcctaatggtactcag

SEQ ID NO: 1089404 - DNA, 25 bp, Homo sapien
atcccgctgcttcctaatggtactc

SEQ ID NO: 1089405 - DNA, 25 bp, Homo sapien
tgcattgtccacatggtgaggtgga

SEQ ID NO: 1089406 - DNA, 25 bp, Homo sapien
attgtccacatggtgaggtggaggg

SEQ ID NO: 1089407 - DNA, 25 bp, Homo sapien
ctctgcattgtccacatggtgaggt

SEQ ID NO: 1089408 - DNA, 25 bp, Homo sapien
tctgcattgtccacatggtgaggtg

SEQ ID NO: 1089409 - DNA, 25 bp, Homo sapien
tcttttatttccaacctggcagttc

SEQ ID NO: 1089410 - DNA, 25 bp, Homo sapien
ggcatagcacactagagcccaggat

SEQ ID NO: 1089411 - DNA, 25 bp, Homo sapien
gctgtccagcccaggagttttggcc

SEQ ID NO: 1089412 - DNA, 25 bp, Homo sapien
caggattcctgtgctcaaacgattc

SEQ ID NO: 1089413 - DNA, 25 bp, Homo sapien
ctaggagcgtagcagtagcagccgc

SEQ ID NO: 1089414 - DNA, 25 bp, Homo sapien
tcaagctaggagcgtagcagtagca

SEQ ID NO: 1089415 - DNA, 25 bp, Homo sapien
caagctaggagcgtagcagtagcag

SEQ ID NO: 1089416 - DNA, 25 bp, Homo sapien
agctaggagcgtagcagtagcagcc

SEQ ID NO: 1089417 - DNA, 25 bp, Homo sapien
ctggtcctcgggcatgcagcctccg

SEQ ID NO: 1089418 - DNA, 25 bp, Homo sapien
tcgggcatgcagcctccgtcctggg

SEQ ID NO: 1089419 - DNA, 25 bp, Homo sapien
tccgtcctgggtgcggcggcgggcc

SEQ ID NO: 1089420 - DNA, 25 bp, Homo sapien
ctccgtcctgggtgcggcggcgggc

SEQ ID NO: 1089421 - DNA, 25 bp, Homo sapien
agtggtgatgactccctaatctcag

SEQ ID NO: 1089422 - DNA, 25 bp, Homo sapien
gactccctaatctcagaaccaaatg

SEQ ID NO: 1089423 - DNA, 25 bp, Homo sapien
ggtgatgactccctaatctcagaac

SEQ ID NO: 1089424 - DNA, 25 bp, Homo sapien
gatgactccctaatctcagaaccaa

SEQ ID NO: 1089425 - DNA, 25 bp, Homo sapien
tgatcttagccaaaaggccgagaaa

SEQ ID NO: 1089426 - DNA, 25 bp, Homo sapien
acttgatcttagccaaaaggccgag

SEQ ID NO: 1089427 - DNA, 25 bp, Homo sapien
tacacttgatcttagccaaaaggcc

SEQ ID NO: 1089428 - DNA, 25 bp, Homo sapien
aaaataaactgataagaacagatac

SEQ ID NO: 1089429 - DNA, 25 bp, Homo sapien
gtaaggaatagggagacgcctcctc

SEQ ID NO: 1089430 - DNA, 25 bp, Homo sapien
tatcaagtaaggaatagggagacgc

SEQ ID NO: 1089431 - DNA, 25 bp, Homo sapien
tcaaggtgagtagtcaagaaattca

SEQ ID NO: 1089432 - DNA, 25 bp, Homo sapien
aattcaagcagatatcaagtaagga

SEQ ID NO: 1089433 - DNA, 25 bp, Homo sapien
ggtccgaagcagtcgatcagccacc

SEQ ID NO: 1089434 - DNA, 25 bp, Homo sapien
gaagcagtcgatcagccacctcctg

SEQ ID NO: 1089435 - DNA, 25 bp, Homo sapien
gtccgaagcagtcgatcagccacct

SEQ ID NO: 1089436 - DNA, 25 bp, Homo sapien
agtcgatcagccacctcctgtggga

SEQ ID NO: 1089437 - DNA, 25 bp, Homo sapien
tctgatttctagctcttatgcccat

SEQ ID NO: 1089438 - DNA, 25 bp, Homo sapien
tacccacagttccatcattcaatag

SEQ ID NO: 1089439 - DNA, 25 bp, Homo sapien
aatacccacagttccatcattcaat

SEQ ID NO: 1089440 - DNA, 25 bp, Homo sapien
cccacagttccatcattcaatagac

SEQ ID NO: 1089441 - DNA, 25 bp, Homo sapien
acccacagttccatcattcaataga

SEQ ID NO: 1089442 - DNA, 25 bp, Homo sapien
tgaagcagcgctcgtaaggatcctc

SEQ ID NO: 1089443 - DNA, 25 bp, Homo sapien
gacttgagtcggtctttgcaggcca

SEQ ID NO: 1089444 - DNA, 25 bp, Homo sapien
cgaatgcaggctcgctttaagcgca

SEQ ID NO: 1089445 - DNA, 25 bp, Homo sapien
gatgcttaaagctcgaaggccagaa

SEQ ID NO: 1089446 - DNA, 25 bp, Homo sapien
gcctttcaactatatgcagccctgt

SEQ ID NO: 1089447 - DNA, 25 bp, Homo sapien
taatagagtcttatgcaactaagat

SEQ ID NO: 1089448 - DNA, 25 bp, Homo sapien
tccatatattacagacattcatctt

SEQ ID NO: 1089449 - DNA, 25 bp, Homo sapien
taattaggactctaagcctttcaac

SEQ ID NO: 1089450 - DNA, 25 bp, Homo sapien
gatagagagccagattcaccgtttg

SEQ ID NO: 1089451 - DNA, 25 bp, Homo sapien
gcctctgccctggtcgcataaattt

SEQ ID NO: 1089452 - DNA, 25 bp, Homo sapien
gctgttcaaagcatcttgagaggaa

SEQ ID NO: 1089453 - DNA, 25 bp, Homo sapien
tattataagaccaagcgagtcctcc

SEQ ID NO: 1089454 - DNA, 25 bp, Homo sapien
cttcacagatcggtgtaatcgtgag

SEQ ID NO: 1089455 - DNA, 25 bp, Homo sapien
tcacagatcggtgtaatcgtgagag

SEQ ID NO: 1089456 - DNA, 25 bp, Homo sapien
cacagatcggtgtaatcgtgagaga

SEQ ID NO: 1089457 - DNA, 25 bp, Homo sapien
tccttcacagatcggtgtaatcgtg

SEQ ID NO: 1089458 - DNA, 25 bp, Homo sapien
gaagttgacatctgacgacgtgaag

SEQ ID NO: 1089459 - DNA, 25 bp, Homo sapien
tgagaagggcctgtcccagtcggct

SEQ ID NO: 1089460 - DNA, 25 bp, Homo sapien
tcggctttaccctatcgacgcagct

SEQ ID NO: 1089461 - DNA, 25 bp, Homo sapien
gatttacaaactggccaagaagggc

SEQ ID NO: 1089462 - DNA, 25 bp, Homo sapien
caggcaggaaatcaatggcgccatc

SEQ ID NO: 1089463 - DNA, 25 bp, Homo sapien
atccagacattgcctctatgtttta

SEQ ID NO: 1089464 - DNA, 25 bp, Homo sapien
ggcaggaaatcaatggcgccatctt

SEQ ID NO: 1089465 - DNA, 25 bp, Homo sapien
aggcaggaaatcaatggcgccatct

SEQ ID NO: 1089466 - DNA, 25 bp, Homo sapien
gagcttcccgaacaaagaatgcccg

SEQ ID NO: 1089467 - DNA, 25 bp, Homo sapien
catgagtcagactaaaaagatgaaa

SEQ ID NO: 1089468 - DNA, 25 bp, Homo sapien
gaatgcccgttcactgtaacgcttc

SEQ ID NO: 1089469 - DNA, 25 bp, Homo sapien
aacgcttcagtgcttctgcaatctg

SEQ ID NO: 1089470 - DNA, 25 bp, Homo sapien
gttgcactggcaaattcatagggtg

SEQ ID NO: 1089471 - DNA, 25 bp, Homo sapien
caggcgcttgcagccagttgcactg

SEQ ID NO: 1089472 - DNA, 25 bp, Homo sapien
ggtttctcatcccagtaaccacaag

SEQ ID NO: 1089473 - DNA, 25 bp, Homo sapien
aagttaaatacacaggcgcttgcag

SEQ ID NO: 1089474 - DNA, 25 bp, Homo sapien
ctgctggtgattgggaaaatgttcc

SEQ ID NO: 1089475 - DNA, 25 bp, Homo sapien
aatgttccatggctttgagcagcaa

SEQ ID NO: 1089476 - DNA, 25 bp, Homo sapien
catcagccaggagtcggacaggcat

SEQ ID NO: 1089477 - DNA, 25 bp, Homo sapien
gagcagcaaatgggtcacatcagcc

SEQ ID NO: 1089478 - DNA, 25 bp, Homo sapien
taggcatgtactctttaggctcctg

SEQ ID NO: 1089479 - DNA, 25 bp, Homo sapien
caacgcccggctcgaacattctttt

SEQ ID NO: 1089480 - DNA, 25 bp, Homo sapien
gctctaacaattcctcaacatatgg

SEQ ID NO: 1089481 - DNA, 25 bp, Homo sapien
ggcagccttgagtgcctggctctaa

SEQ ID NO: 1089482 - DNA, 25 bp, Homo sapien
taaatggaacatcttgaaggatccg

SEQ ID NO: 1089483 - DNA, 25 bp, Homo sapien
catcttgaaggatccggtcactgca

SEQ ID NO: 1089484 - DNA, 25 bp, Homo sapien
tggaacatcttgaaggatccggtca

SEQ ID NO: 1089485 - DNA, 25 bp, Homo sapien
ctgttaaatggaacatcttgaagga

SEQ ID NO: 1089486 - DNA, 25 bp, Homo sapien
cccactttaagttctagagctatca

SEQ ID NO: 1089487 - DNA, 25 bp, Homo sapien
ccactttaagttctagagctatcac

SEQ ID NO: 1089488 - DNA, 25 bp, Homo sapien
gccccactttaagttctagagctat

SEQ ID NO: 1089489 - DNA, 25 bp, Homo sapien
tttgccccactttaagttctagagc

SEQ ID NO: 1089490 - DNA, 25 bp, Homo sapien
aaagccactgcatgacaagcttggc

SEQ ID NO: 1089491 - DNA, 25 bp, Homo sapien
gcaaagccactgcatgacaagcttg

SEQ ID NO: 1089492 - DNA, 25 bp, Homo sapien
cttggcagccaggatagaaatgata

SEQ ID NO: 1089493 - DNA, 25 bp, Homo sapien
aggatagaaatgatagcaactgcca

SEQ ID NO: 1089494 - DNA, 25 bp, Homo sapien
agctcagtaccaagctgtgcagttt

SEQ ID NO: 1089495 - DNA, 25 bp, Homo sapien
gctcagtaccaagctgtgcagtttg

SEQ ID NO: 1089496 - DNA, 25 bp, Homo sapien
gagctcagtaccaagctgtgcagtt

SEQ ID NO: 1089497 - DNA, 25 bp, Homo sapien
ctcagtaccaagctgtgcagtttgt

SEQ ID NO: 1089498 - DNA, 25 bp, Homo sapien
caataaagtgtctacaagtggttgg

SEQ ID NO: 1089499 - DNA, 25 bp, Homo sapien
caaagtaaatttcaatgtagtgtcc

SEQ ID NO: 1089500 - DNA, 25 bp, Homo sapien
cctcatgaagagttctaacccttgg

SEQ ID NO: 1089501 - DNA, 25 bp, Homo sapien
tctgtgaggttccaaagtgcactca

SEQ ID NO: 1089502 - DNA, 25 bp, Homo sapien
gaatggatgactcagttgggaaaga

SEQ ID NO: 1089503 - DNA, 25 bp, Homo sapien
gctgaatggatgactcagttgggaa

SEQ ID NO: 1089504 - DNA, 25 bp, Homo sapien
tttctgctgaatggatgactcagtt

SEQ ID NO: 1089505 - DNA, 25 bp, Homo sapien
tctgctgaatggatgactcagttgg

SEQ ID NO: 1089506 - DNA, 25 bp, Homo sapien
agcaatgaccgtgccttagataagg

SEQ ID NO: 1089507 - DNA, 25 bp, Homo sapien
gaaagaaattgctattgcagaccat

SEQ ID NO: 1089508 - DNA, 25 bp, Homo sapien
tgctattgcagaccatatttcaagt

SEQ ID NO: 1089509 - DNA, 25 bp, Homo sapien
tgggaatagttctcaattagcaatg

SEQ ID NO: 1089510 - DNA, 25 bp, Homo sapien
actatactcggccttcgtaagcagt

SEQ ID NO: 1089511 - DNA, 25 bp, Homo sapien
cgtaagcagtctttaagtagtaatc

SEQ ID NO: 1089512 - DNA, 25 bp, Homo sapien
agtaatcattaactatcaaacacag

SEQ ID NO: 1089513 - DNA, 25 bp, Homo sapien
cacagactctaagaacacttgtagg

SEQ ID NO: 1089514 - DNA, 25 bp, Homo sapien
tataatgaaggctacaacaacagat

SEQ ID NO: 1089515 - DNA, 25 bp, Homo sapien
ttttctaccttatataatgaaggct

SEQ ID NO: 1089516 - DNA, 25 bp, Homo sapien
aatgaaggctacaacaacagatagg

SEQ ID NO: 1089517 - DNA, 25 bp, Homo sapien
taccttatataatgaaggctacaac

SEQ ID NO: 1089518 - DNA, 25 bp, Homo sapien
taaattcagaaggactcaaaccaaa

SEQ ID NO: 1089519 - DNA, 25 bp, Homo sapien
tagaccatatccttggccattcaca

SEQ ID NO: 1089520 - DNA, 25 bp, Homo sapien
ggatgttaaatacagttttgcactg

SEQ ID NO: 1089521 - DNA, 25 bp, Homo sapien
atgacgaaaggttggagacagagcc

SEQ ID NO: 1089522 - DNA, 25 bp, Homo sapien
agtaaagatgttttcagtcagacaa

SEQ ID NO: 1089523 - DNA, 25 bp, Homo sapien
ggttaagtaaagatgttttcagtca

SEQ ID NO: 1089524 - DNA, 25 bp, Homo sapien
tttcagtcagacaaaagctgaagaa

SEQ ID NO: 1089525 - DNA, 25 bp, Homo sapien
agctgaagaattcatcatcagcaga

SEQ ID NO: 1089526 - DNA, 25 bp, Homo sapien
gaatgatgagcactcctgcttctgg

SEQ ID NO: 1089527 - DNA, 25 bp, Homo sapien
ttacacatctgcctgaaacaactaa

SEQ ID NO: 1089528 - DNA, 25 bp, Homo sapien
ttgaggaatgatgagcactcctgct

SEQ ID NO: 1089529 - DNA, 25 bp, Homo sapien
aaaaacagatttacacatctgcctg

SEQ ID NO: 1089530 - DNA, 25 bp, Homo sapien
aaacccaaaacagccaagcatggtg

SEQ ID NO: 1089531 - DNA, 25 bp, Homo sapien
gaattcctctggctacgactcaatg

SEQ ID NO: 1089532 - DNA, 25 bp, Homo sapien
taaatgggcaataattccagctgca

SEQ ID NO: 1089533 - DNA, 25 bp, Homo sapien
tccacactgtgtaggagactactga

SEQ ID NO: 1089534 - DNA, 25 bp, Homo sapien
caagcttgttcacctctggatatta

SEQ ID NO: 1089535 - DNA, 25 bp, Homo sapien
gatagtttaaccactatgaatgtct

SEQ ID NO: 1089536 - DNA, 25 bp, Homo sapien
ttactacattatgaggctttgatag

SEQ ID NO: 1089537 - DNA, 25 bp, Homo sapien
atttagcactgcattatttactaca

SEQ ID NO: 1089538 - DNA, 25 bp, Homo sapien
gacacacaagaaaggattacaatat

SEQ ID NO: 1089539 - DNA, 25 bp, Homo sapien
ccatctcacactctggagttggcca

SEQ ID NO: 1089540 - DNA, 25 bp, Homo sapien
catctcacactctggagttggccat

SEQ ID NO: 1089541 - DNA, 25 bp, Homo sapien
ctgtatgctaccatctcacactctg

SEQ ID NO: 1089542 - DNA, 25 bp, Homo sapien
atctcacactctggagttggccatt

SEQ ID NO: 1089543 - DNA, 25 bp, Homo sapien
tctctagactaggttgctggtttac

SEQ ID NO: 1089544 - DNA, 25 bp, Homo sapien
tgcatctagtaggaatgactcttag

SEQ ID NO: 1089545 - DNA, 25 bp, Homo sapien
aggtgcctgagggaaaaattatgca

SEQ ID NO: 1089546 - DNA, 25 bp, Homo sapien
taaataaccaatattgaggtgcctg

SEQ ID NO: 1089547 - DNA, 25 bp, Homo sapien
gctgaactcctggtgttgtgaaaca

SEQ ID NO: 1089548 - DNA, 25 bp, Homo sapien
catagctgaactcctggtgttgtga

SEQ ID NO: 1089549 - DNA, 25 bp, Homo sapien
tgcccatagctgaactcctggtgtt

SEQ ID NO: 1089550 - DNA, 25 bp, Homo sapien
gcccatagctgaactcctggtgttg

SEQ ID NO: 1089551 - DNA, 25 bp, Homo sapien
tgttgtataaatgctgcaatcctcc

SEQ ID NO: 1089552 - DNA, 25 bp, Homo sapien
taagctatccagaatggccacagca

SEQ ID NO: 1089553 - DNA, 25 bp, Homo sapien
gtggcctcccatggcgcacaatgtg

SEQ ID NO: 1089554 - DNA, 25 bp, Homo sapien
cagtatgttcatgatctttgatgtt

SEQ ID NO: 1089555 - DNA, 25 bp, Homo sapien
gaaacagcacctctagccactgaga

SEQ ID NO: 1089556 - DNA, 25 bp, Homo sapien
gtaagatcacataagcccaagaggc

SEQ ID NO: 1089557 - DNA, 25 bp, Homo sapien
taaccggcagtctgtgcaggaacca

SEQ ID NO: 1089558 - DNA, 25 bp, Homo sapien
tatcagtagccatggagtcatcggc

SEQ ID NO: 1089559 - DNA, 25 bp, Homo sapien
cggcaccccaggaatctctgtgaat

SEQ ID NO: 1089560 - DNA, 25 bp, Homo sapien
tgaaatggagcttctagcgacccca

SEQ ID NO: 1089561 - DNA, 25 bp, Homo sapien
tttggagttgcgacagaaactggac

SEQ ID NO: 1089562 - DNA, 25 bp, Homo sapien
ggatcatcgtaagctccctctcaga

SEQ ID NO: 1089563 - DNA, 25 bp, Homo sapien
ccgcgagaaccaagcgggcggctgc

SEQ ID NO: 1089564 - DNA, 25 bp, Homo sapien
gagcttttgaaatgcccggcgaggc

SEQ ID NO: 1089565 - DNA, 25 bp, Homo sapien
gcgtcaaaaagagagccggcgtcga

SEQ ID NO: 1089566 - DNA, 25 bp, Homo sapien
acgcctgcgaggcacacggagctag

SEQ ID NO: 1089567 - DNA, 25 bp, Homo sapien
agcgtcaggagggacgatgttccgg

SEQ ID NO: 1089568 - DNA, 25 bp, Homo sapien
tggcccgggtgcaagaaatgaacca

SEQ ID NO: 1089569 - DNA, 25 bp, Homo sapien
cgtgtggcccgggtgcaagaaatga

SEQ ID NO: 1089570 - DNA, 25 bp, Homo sapien
gcgtcaggagggacgatgttccggg

SEQ ID NO: 1089571 - DNA, 25 bp, Homo sapien
caagtgcctcggcagcgtcccagga

SEQ ID NO: 1089572 - DNA, 25 bp, Homo sapien
ggacgtggcgccgaggtccgcgtcg

SEQ ID NO: 1089573 - DNA, 25 bp, Homo sapien
agcgtcccaggagactcgccgcgct

SEQ ID NO: 1089574 - DNA, 25 bp, Homo sapien
cggagctggacgtggcgccgaggtc

SEQ ID NO: 1089575 - DNA, 25 bp, Homo sapien
tgggactgggctctcgccgcgctgc

SEQ ID NO: 1089576 - DNA, 25 bp, Homo sapien
gcgcttcgccgggcgcagaaaagca

SEQ ID NO: 1089577 - DNA, 25 bp, Homo sapien
aggaatcctgaggaggctcgccccg

SEQ ID NO: 1089578 - DNA, 25 bp, Homo sapien
tgcctcagggcgcaagttccacgcg

SEQ ID NO: 1089579 - DNA, 25 bp, Homo sapien
atttctccaggttagcaatcaggac

SEQ ID NO: 1089580 - DNA, 25 bp, Homo sapien
gagggaaactccaatgctccggaag

SEQ ID NO: 1089581 - DNA, 25 bp, Homo sapien
tgaccaaagtgtagggagatgcctc

SEQ ID NO: 1089582 - DNA, 25 bp, Homo sapien
gaaatcgctcggctacttcctgagg

SEQ ID NO: 1089583 - DNA, 25 bp, Homo sapien
ttggttgcctcggaaaatgctggct

SEQ ID NO: 1089584 - DNA, 25 bp, Homo sapien
caatgagcttatgacggcagaaggc

SEQ ID NO: 1089585 - DNA, 25 bp, Homo sapien
ggcagaaggcttttatgaatgcagc

SEQ ID NO: 1089586 - DNA, 25 bp, Homo sapien
gaggtcagcgtgcactgcagtagca

SEQ ID NO: 1089587 - DNA, 25 bp, Homo sapien
gagagacttcaatcgatccttacag

SEQ ID NO: 1089588 - DNA, 25 bp, Homo sapien
taaaatgcgaagaccagtgagctga

SEQ ID NO: 1089589 - DNA, 25 bp, Homo sapien
tgtcgagtctaacaggagacactgg

SEQ ID NO: 1089590 - DNA, 25 bp, Homo sapien
taagcagtgcagaaatatcagtgac

SEQ ID NO: 1089591 - DNA, 25 bp, Homo sapien
ggccaatagtcccacaaattgcatg

SEQ ID NO: 1089592 - DNA, 25 bp, Homo sapien
ggcaggccgcagtcgtataaacagt

SEQ ID NO: 1089593 - DNA, 25 bp, Homo sapien
cacaacattgggcaggatatccttc

SEQ ID NO: 1089594 - DNA, 25 bp, Homo sapien
taaagaagtcagaagagccagcatc

SEQ ID NO: 1089595 - DNA, 25 bp, Homo sapien
ttcctgtatcggctcagtgcttctg

SEQ ID NO: 1089596 - DNA, 25 bp, Homo sapien
gttcctgtatcggctcagtgcttct

SEQ ID NO: 1089597 - DNA, 25 bp, Homo sapien
caggtgacctctgacaacaggcgaa

SEQ ID NO: 1089598 - DNA, 25 bp, Homo sapien
aacaggcgaacaggcatccccttgg

SEQ ID NO: 1089599 - DNA, 25 bp, Homo sapien
tgttaggttgagagcgcaagcactg

SEQ ID NO: 1089600 - DNA, 25 bp, Homo sapien
gaactgcactcgcaaatccaatggg

SEQ ID NO: 1089601 - DNA, 25 bp, Homo sapien
cctggaattggttaaggagagaaga

SEQ ID NO: 1089602 - DNA, 25 bp, Homo sapien
ggaacatccacaagaatcctggaat

SEQ ID NO: 1089603 - DNA, 25 bp, Homo sapien
gaatcctggaattggttaaggagag

SEQ ID NO: 1089604 - DNA, 25 bp, Homo sapien
ccacaagaatcctggaattggttaa

SEQ ID NO: 1089605 - DNA, 25 bp, Homo sapien
ggggttttcatgcttacagagccat

SEQ ID NO: 1089606 - DNA, 25 bp, Homo sapien
tggggttttcatgcttacagagcca

SEQ ID NO: 1089607 - DNA, 25 bp, Homo sapien
tgaaaagctcttcaagctgtgccgt

SEQ ID NO: 1089608 - DNA, 25 bp, Homo sapien
aagctcttcaagctgtgccgtttgc

SEQ ID NO: 1089609 - DNA, 25 bp, Homo sapien
cttaactgccatgaaaagctcttca

SEQ ID NO: 1089610 - DNA, 25 bp, Homo sapien
tgccatgaaaagctcttcaagctgt

SEQ ID NO: 1089611 - DNA, 25 bp, Homo sapien
ccagttcttggtatatggtcatcaa

SEQ ID NO: 1089612 - DNA, 25 bp, Homo sapien
tgttaagacgcatcaaacctcggtt

SEQ ID NO: 1089613 - DNA, 25 bp, Homo sapien
taagtttagtgagcacttagtccag

SEQ ID NO: 1089614 - DNA, 25 bp, Homo sapien
taatcaattgcggtataaggaaagc

SEQ ID NO: 1089615 - DNA, 25 bp, Homo sapien
cagctggagacccatctgtaagatt

SEQ ID NO: 1089616 - DNA, 25 bp, Homo sapien
tccaagacttggatgaagatttgca

SEQ ID NO: 1089617 - DNA, 25 bp, Homo sapien
catctgtaagattccaaagtgcttt

SEQ ID NO: 1089618 - DNA, 25 bp, Homo sapien
gctttcaaagtaaacaagaaggtga

SEQ ID NO: 1089619 - DNA, 25 bp, Homo sapien
tatacatacaggttactttatcatg

SEQ ID NO: 1089620 - DNA, 25 bp, Homo sapien
acatataaactcaatcctgtcttcc

SEQ ID NO: 1089621 - DNA, 25 bp, Homo sapien
atataaactcaatcctgtcttccca

SEQ ID NO: 1089622 - DNA, 25 bp, Homo sapien
catataaactcaatcctgtcttccc

SEQ ID NO: 1089623 - DNA, 25 bp, Homo sapien
ctttgctttgtattgctgactctga

SEQ ID NO: 1089624 - DNA, 25 bp, Homo sapien
tttgtattgctgactctgaaaaggt

SEQ ID NO: 1089625 - DNA, 25 bp, Homo sapien
gctttgtattgctgactctgaaaag

SEQ ID NO: 1089626 - DNA, 25 bp, Homo sapien
agtactttgctttgtattgctgact

SEQ ID NO: 1089627 - DNA, 25 bp, Homo sapien
tttccctgctacagagtaaactgtt

SEQ ID NO: 1089628 - DNA, 25 bp, Homo sapien
atcttcggtcaccagcttggaagag

SEQ ID NO: 1089629 - DNA, 25 bp, Homo sapien
gcttcagcacatcttcggtcaccag

SEQ ID NO: 1089630 - DNA, 25 bp, Homo sapien
gcacatcttcggtcaccagcttgga

SEQ ID NO: 1089631 - DNA, 25 bp, Homo sapien
gtcacgggatatccaaagctgtctg

SEQ ID NO: 1089632 - DNA, 25 bp, Homo sapien
cagatcttggagaagagtacgcctc

SEQ ID NO: 1089633 - DNA, 25 bp, Homo sapien
tacgcctctggaagtcacgggatat

SEQ ID NO: 1089634 - DNA, 25 bp, Homo sapien
gaagagtacgcctctggaagtcacg

SEQ ID NO: 1089635 - DNA, 25 bp, Homo sapien
tataaataagaatgtggttcctgta

SEQ ID NO: 1089636 - DNA, 25 bp, Homo sapien
ataaataagaatgtggttcctgtac

SEQ ID NO: 1089637 - DNA, 25 bp, Homo sapien
ttataaataagaatgtggttcctgt

SEQ ID NO: 1089638 - DNA, 25 bp, Homo sapien
gctgtcatcttacaacttgaacttg

SEQ ID NO: 1089639 - DNA, 25 bp, Homo sapien
accaatgctgtcatcttacaacttg

SEQ ID NO: 1089640 - DNA, 25 bp, Homo sapien
tgtcatcttacaacttgaacttggc

SEQ ID NO: 1089641 - DNA, 25 bp, Homo sapien
aatgctgtcatcttacaacttgaac

SEQ ID NO: 1089642 - DNA, 25 bp, Homo sapien
tctggttgagagaagttgccaagga

SEQ ID NO: 1089643 - DNA, 25 bp, Homo sapien
agctgaacctctggttgagagaagt

SEQ ID NO: 1089644 - DNA, 25 bp, Homo sapien
catagcccatagtgcccagagctga

SEQ ID NO: 1089645 - DNA, 25 bp, Homo sapien
gcagacatgatacatagcccatagt

SEQ ID NO: 1089646 - DNA, 25 bp, Homo sapien
gctctttggcctaggaattaacaga

SEQ ID NO: 1089647 - DNA, 25 bp, Homo sapien
tagtatgtttacttccagacaactc

SEQ ID NO: 1089648 - DNA, 25 bp, Homo sapien
acttgcttggcttgtatgaggtaac

SEQ ID NO: 1089649 - DNA, 25 bp, Homo sapien
cagacaactctatgcttcaaacatc

SEQ ID NO: 1089650 - DNA, 25 bp, Homo sapien
gcagagacactccatggacaactgg

SEQ ID NO: 1089651 - DNA, 25 bp, Homo sapien
ccatggacaactggcattttaaata

SEQ ID NO: 1089652 - DNA, 25 bp, Homo sapien
agaaaatcaagcagagacactccat

SEQ ID NO: 1089653 - DNA, 25 bp, Homo sapien
cactccatggacaactggcatttta

SEQ ID NO: 1089654 - DNA, 25 bp, Homo sapien
tcttcttcaactaacattttgcagt

SEQ ID NO: 1089655 - DNA, 25 bp, Homo sapien
tgaagtcatccagaatggaggctgc

SEQ ID NO: 1089656 - DNA, 25 bp, Homo sapien
cacaaaagctgcaatccttcttctt

SEQ ID NO: 1089657 - DNA, 25 bp, Homo sapien
tttgggggttgcctcactgtgctcc

SEQ ID NO: 1089658 - DNA, 25 bp, Homo sapien
tttctcttctagtgaacaggtccca

SEQ ID NO: 1089659 - DNA, 25 bp, Homo sapien
tgtccaaggctagagaaaagtaact

SEQ ID NO: 1089660 - DNA, 25 bp, Homo sapien
taaatatcaaagtctccctgtaggt

SEQ ID NO: 1089661 - DNA, 25 bp, Homo sapien
gatgtgcaattactgccagggcaga

SEQ ID NO: 1089662 - DNA, 25 bp, Homo sapien
aaacatgccaaagatagacacccaa

SEQ ID NO: 1089663 - DNA, 25 bp, Homo sapien
agctccgcaaggcttatcaagtaag

SEQ ID NO: 1089664 - DNA, 25 bp, Homo sapien
gaaaactccgtgaactctctggcaa

SEQ ID NO: 1089665 - DNA, 25 bp, Homo sapien
actgtctgcaaatgcctaagtccca

SEQ ID NO: 1089666 - DNA, 25 bp, Homo sapien
acaaattctgcttatctggttggac

SEQ ID NO: 1089667 - DNA, 25 bp, Homo sapien
aagaatctgaaccaagccagccaaa

SEQ ID NO: 1089668 - DNA, 25 bp, Homo sapien
gaattggacttaacacactagttcc

SEQ ID NO: 1089669 - DNA, 25 bp, Homo sapien
cccaggtcaggaagatatccttttg

SEQ ID NO: 1089670 - DNA, 25 bp, Homo sapien
aaaaccttaccgcagaggctggcat

SEQ ID NO: 1089671 - DNA, 25 bp, Homo sapien
cagcctagaagtgtgggtagcacca

SEQ ID NO: 1089672 - DNA, 25 bp, Homo sapien
gaaccaaggccagtgacaaagcaga

SEQ ID NO: 1089673 - DNA, 25 bp, Homo sapien
cagccctgtcgacttgaaagcccaa

SEQ ID NO: 1089674 - DNA, 25 bp, Homo sapien
aacaagtactggcatgagtaatccc

SEQ ID NO: 1089675 - DNA, 25 bp, Homo sapien
gagtaatcccagagttgagaccttc

SEQ ID NO: 1089676 - DNA, 25 bp, Homo sapien
ttcaacttccacctatgttactggg

SEQ ID NO: 1089677 - DNA, 25 bp, Homo sapien
tatacttggttagaaagtctccgaa

SEQ ID NO: 1089678 - DNA, 25 bp, Homo sapien
ttcacgggccgacgactgagtggaa

SEQ ID NO: 1089679 - DNA, 25 bp, Homo sapien
ggctggtgaatcacgctgtggccca

SEQ ID NO: 1089680 - DNA, 25 bp, Homo sapien
ggcaggtaatcgcaactacagcacc

SEQ ID NO: 1089681 - DNA, 25 bp, Homo sapien
gagaagtcttggctgagtcccaggc

SEQ ID NO: 1089682 - DNA, 25 bp, Homo sapien
catgtttcggaaaaaggtgagcctc

SEQ ID NO: 1089683 - DNA, 25 bp, Homo sapien
gaatatttgaccaacctcagagcaa

SEQ ID NO: 1089684 - DNA, 25 bp, Homo sapien
gaggtcaaagagcaatgtccagtct

SEQ ID NO: 1089685 - DNA, 25 bp, Homo sapien
caattgctgttacgagccaaggagg

SEQ ID NO: 1089686 - DNA, 25 bp, Homo sapien
gccagctgctttcccgtggctgccc

SEQ ID NO: 1089687 - DNA, 25 bp, Homo sapien
ccttacagggatcactgagattctg

SEQ ID NO: 1089688 - DNA, 25 bp, Homo sapien
gattctgatgaacagaccttctgcc

SEQ ID NO: 1089689 - DNA, 25 bp, Homo sapien
ctgccctgactccttacagggatca

SEQ ID NO: 1089690 - DNA, 25 bp, Homo sapien
aaattaaagaaggtacatgggtgca

SEQ ID NO: 1089691 - DNA, 25 bp, Homo sapien
ctactgtggtagtcactgttgttcc

SEQ ID NO: 1089692 - DNA, 25 bp, Homo sapien
gtgtaatggcgcatgcttatagtcc

SEQ ID NO: 1089693 - DNA, 25 bp, Homo sapien
cctgcctgagtgtgtgacttgtggc

SEQ ID NO: 1089694 - DNA, 25 bp, Homo sapien
tacacagaggtgattactataagtc

SEQ ID NO: 1089695 - DNA, 25 bp, Homo sapien
aggagggagctacgattgagtcagg

SEQ ID NO: 1089696 - DNA, 25 bp, Homo sapien
ctacgattgagtcagggcatgtggt

SEQ ID NO: 1089697 - DNA, 25 bp, Homo sapien
tactataagtcaaagagttacttgt

SEQ ID NO: 1089698 - DNA, 25 bp, Homo sapien
tgaccttctatactagggctcccct

SEQ ID NO: 1089699 - DNA, 25 bp, Homo sapien
tgcaccttgccaacatgcatgcaca

SEQ ID NO: 1089700 - DNA, 25 bp, Homo sapien
actaggctgtaggttccatgaggac

SEQ ID NO: 1089701 - DNA, 25 bp, Homo sapien
cactggaggccccttacttgtttgt

SEQ ID NO: 1089702 - DNA, 25 bp, Homo sapien
gcaagtgagcccaaaggtgtttaac

SEQ ID NO: 1089703 - DNA, 25 bp, Homo sapien
tatcaaggattcctgatatttgcaa

SEQ ID NO: 1089704 - DNA, 25 bp, Homo sapien
tgcaagtgagcccaaaggtgtttaa

SEQ ID NO: 1089705 - DNA, 25 bp, Homo sapien
aaggattcctgatatttgcaagtga

SEQ ID NO: 1089706 - DNA, 25 bp, Homo sapien
tggccttccattttagctcctcgag

SEQ ID NO: 1089707 - DNA, 25 bp, Homo sapien
cttaattccacttgtggccaagggc

SEQ ID NO: 1089708 - DNA, 25 bp, Homo sapien
tccccgtggccttccattttagctc

SEQ ID NO: 1089709 - DNA, 25 bp, Homo sapien
taattccacttgtggccaagggccc

SEQ ID NO: 1089710 - DNA, 25 bp, Homo sapien
tggtaaccatcagggctaggcgctt

SEQ ID NO: 1089711 - DNA, 25 bp, Homo sapien
cagtggtgctgataacgctcctcag

SEQ ID NO: 1089712 - DNA, 25 bp, Homo sapien
caaagttcgcgggtcactggcagaa

SEQ ID NO: 1089713 - DNA, 25 bp, Homo sapien
gaacctttgcgtccttctggctcca

SEQ ID NO: 1089714 - DNA, 25 bp, Homo sapien
ggtccggaccaaggtaaatgtgcag

SEQ ID NO: 1089715 - DNA, 25 bp, Homo sapien
gattaaaacactgacgctgggaggt

SEQ ID NO: 1089716 - DNA, 25 bp, Homo sapien
tcagtgcgttgaaggattcgatccc

SEQ ID NO: 1089717 - DNA, 25 bp, Homo sapien
ggcaacagacgcttggcccataggt

SEQ ID NO: 1089718 - DNA, 25 bp, Homo sapien
acgactgccggcactgacaggcgga

SEQ ID NO: 1089719 - DNA, 25 bp, Homo sapien
actgacaggcggagactgcaccaga

SEQ ID NO: 1089720 - DNA, 25 bp, Homo sapien
ggctgcaccagtgcgggaccggggc

SEQ ID NO: 1089721 - DNA, 25 bp, Homo sapien
cgccgcggacgactgccggcactga

SEQ ID NO: 1089722 - DNA, 25 bp, Homo sapien
gcgcagggtcgcaggctcccacggg

SEQ ID NO: 1089723 - DNA, 25 bp, Homo sapien
ttggtcatgccaacccccaccacga

SEQ ID NO: 1089724 - DNA, 25 bp, Homo sapien
aacacccggcgcagggtcgcaggct

SEQ ID NO: 1089725 - DNA, 25 bp, Homo sapien
accacgaacacccggcgcagggtcg

SEQ ID NO: 1089726 - DNA, 25 bp, Homo sapien
tcaggatgcacaaaagttaacaggt

SEQ ID NO: 1089727 - DNA, 25 bp, Homo sapien
caggtgaagatacacggtacaaaca

SEQ ID NO: 1089728 - DNA, 25 bp, Homo sapien
tgggcatcaggagcgtttctcctcg

SEQ ID NO: 1089729 - DNA, 25 bp, Homo sapien
cagtttggcattaaggagcatgcgg

SEQ ID NO: 1089730 - DNA, 25 bp, Homo sapien
gggaccctttatgccctgcaatgct

SEQ ID NO: 1089731 - DNA, 25 bp, Homo sapien
catcctaaaaggtaggttccgtgca

SEQ ID NO: 1089732 - DNA, 25 bp, Homo sapien
tgcaatgctggtctgggctttatcc

SEQ ID NO: 1089733 - DNA, 25 bp, Homo sapien
taggtctggagccaactcacaaggg

SEQ ID NO: 1089734 - DNA, 25 bp, Homo sapien
gggtagtctcttgaattctcagctc

SEQ ID NO: 1089735 - DNA, 25 bp, Homo sapien
ggtagtctcttgaattctcagctcc

SEQ ID NO: 1089736 - DNA, 25 bp, Homo sapien
cagggtagtctcttgaattctcagc

SEQ ID NO: 1089737 - DNA, 25 bp, Homo sapien
gtcagggtagtctcttgaattctca

SEQ ID NO: 1089738 - DNA, 25 bp, Homo sapien
tcaaagatctaaatgttctatgtta

SEQ ID NO: 1089739 - DNA, 25 bp, Homo sapien
caaagatctaaatgttctatgttac

SEQ ID NO: 1089740 - DNA, 25 bp, Homo sapien
aacatagccaacacatgcctggtcc

SEQ ID NO: 1089741 - DNA, 25 bp, Homo sapien
cctggtccactgctgaataagggat

SEQ ID NO: 1089742 - DNA, 25 bp, Homo sapien
caaaaacatagccaacacatgcctg

SEQ ID NO: 1089743 - DNA, 25 bp, Homo sapien
tgtgcatcagctaaagccttcttgc

SEQ ID NO: 1089744 - DNA, 25 bp, Homo sapien
tcccaaactgtgatagatagccctc

SEQ ID NO: 1089745 - DNA, 25 bp, Homo sapien
ccaaactgtgatagatagccctctg

SEQ ID NO: 1089746 - DNA, 25 bp, Homo sapien
ctgtgatagatagccctctgcccac

SEQ ID NO: 1089747 - DNA, 25 bp, Homo sapien
aaactgtgatagatagccctctgcc

SEQ ID NO: 1089748 - DNA, 25 bp, Homo sapien
gtagcacagttattgttgacattga

SEQ ID NO: 1089749 - DNA, 25 bp, Homo sapien
gacattgattataggaattccagtc

SEQ ID NO: 1089750 - DNA, 25 bp, Homo sapien
cctgaatcagctggcgggccataaa

SEQ ID NO: 1089751 - DNA, 25 bp, Homo sapien
acaaagcagtagaaccagtagcaca

SEQ ID NO: 1089752 - DNA, 25 bp, Homo sapien
tcaaacccaagagccaagacacatt

SEQ ID NO: 1089753 - DNA, 25 bp, Homo sapien
caaacccaagagccaagacacattc

SEQ ID NO: 1089754 - DNA, 25 bp, Homo sapien
attccaaggcttcccttactcatct

SEQ ID NO: 1089755 - DNA, 25 bp, Homo sapien
ttctcaaacccaagagccaagacac

SEQ ID NO: 1089756 - DNA, 25 bp, Homo sapien
ccatacttattgatcaggaggtcaa

SEQ ID NO: 1089757 - DNA, 25 bp, Homo sapien
catgcttatcagtgggaatggttct

SEQ ID NO: 1089758 - DNA, 25 bp, Homo sapien
acccaaacatctgaggagcaactgg

SEQ ID NO: 1089759 - DNA, 25 bp, Homo sapien
ctgggtgagcagacaatccatactt

SEQ ID NO: 1089760 - DNA, 25 bp, Homo sapien
atatctaagatgtgtgaggcacgca

SEQ ID NO: 1089761 - DNA, 25 bp, Homo sapien
atatttggtgtgtaaaatatctaag

SEQ ID NO: 1089762 - DNA, 25 bp, Homo sapien
atctaagatgtgtgaggcacgcaac

SEQ ID NO: 1089763 - DNA, 25 bp, Homo sapien
tatttggtgtgtaaaatatctaaga

SEQ ID NO: 1089764 - DNA, 25 bp, Homo sapien
tttgcaaagtgttcaatttttgttc

SEQ ID NO: 1089765 - DNA, 25 bp, Homo sapien
gggttattaactgaatgtttatgat

SEQ ID NO: 1089766 - DNA, 25 bp, Homo sapien
ttccatccaatttttgcaaagtgtt

SEQ ID NO: 1089767 - DNA, 25 bp, Homo sapien
ttaactgaatgtttatgatttttcc

SEQ ID NO: 1089768 - DNA, 25 bp, Homo sapien
ctgtattcatcttggaactgggaat

SEQ ID NO: 1089769 - DNA, 25 bp, Homo sapien
gtattcatcttggaactgggaatac

SEQ ID NO: 1089770 - DNA, 25 bp, Homo sapien
aactgtattcatcttggaactggga

SEQ ID NO: 1089771 - DNA, 25 bp, Homo sapien
actgtattcatcttggaactgggaa

SEQ ID NO: 1089772 - DNA, 25 bp, Homo sapien
agctttggattgcaggccatacttc

SEQ ID NO: 1089773 - DNA, 25 bp, Homo sapien
actggccaaaattgctgctgcagca

SEQ ID NO: 1089774 - DNA, 25 bp, Homo sapien
gcaggccatacttctgtacaaatgc

SEQ ID NO: 1089775 - DNA, 25 bp, Homo sapien
tgtacaaatgcttcactggccaaaa

SEQ ID NO: 1089776 - DNA, 25 bp, Homo sapien
tttcttcaaacgagcttggcaaatc

SEQ ID NO: 1089777 - DNA, 25 bp, Homo sapien
tcttcaaacgagcttggcaaatcag

SEQ ID NO: 1089778 - DNA, 25 bp, Homo sapien
cgttggtagaaaagcaatcgtgaag

SEQ ID NO: 1089779 - DNA, 25 bp, Homo sapien
ggtgtcaggccagatttctcatagc

SEQ ID NO: 1089780 - DNA, 25 bp, Homo sapien
tgcttcataagtaaggagttcgttg

SEQ ID NO: 1089781 - DNA, 25 bp, Homo sapien
gttctattacgtcaatatcatttgg

SEQ ID NO: 1089782 - DNA, 25 bp, Homo sapien
gtattatctcctctatcaaccagcg

SEQ ID NO: 1089783 - DNA, 25 bp, Homo sapien
tatctcctctatcaaccagcgttgc

SEQ ID NO: 1089784 - DNA, 25 bp, Homo sapien
tcctccatatgtattatctcctcta

SEQ ID NO: 1089785 - DNA, 25 bp, Homo sapien
ccatatgtattatctcctctatcaa

SEQ ID NO: 1089786 - DNA, 25 bp, Homo sapien
ctgtagcgcctagtgggtgtccctt

SEQ ID NO: 1089787 - DNA, 25 bp, Homo sapien
tgaaatcagtccaccactaggattt

SEQ ID NO: 1089788 - DNA, 25 bp, Homo sapien
gtgtccctttgaaatcagtccacca

SEQ ID NO: 1089789 - DNA, 25 bp, Homo sapien
tccaccactaggatttatgacccac

SEQ ID NO: 1089790 - DNA, 25 bp, Homo sapien
aatgtatgaaatctgtatgtagcat

SEQ ID NO: 1089791 - DNA, 25 bp, Homo sapien
gtatgaaatctgtatgtagcattac

SEQ ID NO: 1089792 - DNA, 25 bp, Homo sapien
aaaatgtatgaaatctgtatgtagc

SEQ ID NO: 1089793 - DNA, 25 bp, Homo sapien
tgtatgaaatctgtatgtagcatta

SEQ ID NO: 1089794 - DNA, 25 bp, Homo sapien
acataggtcaccctttattgtttat

SEQ ID NO: 1089795 - DNA, 25 bp, Homo sapien
tattctctacctggagaaacattgt

SEQ ID NO: 1089796 - DNA, 25 bp, Homo sapien
tctacctggagaaacattgttctca

SEQ ID NO: 1089797 - DNA, 25 bp, Homo sapien
tcctaggtacataggtcacccttta

SEQ ID NO: 1089798 - DNA, 25 bp, Homo sapien
tgtgatagatgacagagcagcccgg

SEQ ID NO: 1089799 - DNA, 25 bp, Homo sapien
agaaggacggcagttagcacggcaa

SEQ ID NO: 1089800 - DNA, 25 bp, Homo sapien
cagatacggtaccttgagggtgtca

SEQ ID NO: 1089801 - DNA, 25 bp, Homo sapien
gcagcccggctagatattttggata

SEQ ID NO: 1089802 - DNA, 25 bp, Homo sapien
ggcacccatccggttgccacactga

SEQ ID NO: 1089803 - DNA, 25 bp, Homo sapien
cggttgccacactgacaggcctgga

SEQ ID NO: 1089804 - DNA, 25 bp, Homo sapien
ttggcacccatccggttgccacact

SEQ ID NO: 1089805 - DNA, 25 bp, Homo sapien
ccatccggttgccacactgacaggc

SEQ ID NO: 1089806 - DNA, 25 bp, Homo sapien
ggagacacagtccagctgcaggtcg

SEQ ID NO: 1089807 - DNA, 25 bp, Homo sapien
aaaagggcctgagctagcagagtcc

SEQ ID NO: 1089808 - DNA, 25 bp, Homo sapien
tctggtttaagcacctggccaaaag

SEQ ID NO: 1089809 - DNA, 25 bp, Homo sapien
tctagatccaccaggttagcacaag

SEQ ID NO: 1089810 - DNA, 25 bp, Homo sapien
ccaggttagcacaaggaacatattt

SEQ ID NO: 1089811 - DNA, 25 bp, Homo sapien
acatctacaactgaatcaaccagct

SEQ ID NO: 1089812 - DNA, 25 bp, Homo sapien
cacatctacaactgaatcaaccagc

SEQ ID NO: 1089813 - DNA, 25 bp, Homo sapien
tggccccctctatgtagtggccttt

SEQ ID NO: 1089814 - DNA, 25 bp, Homo sapien
aaccagcttggccccctctatgtag

SEQ ID NO: 1089815 - DNA, 25 bp, Homo sapien
aaagagagtacccattccagagccc

SEQ ID NO: 1089816 - DNA, 25 bp, Homo sapien
aggtggttcaagtccccatagtttg

SEQ ID NO: 1089817 - DNA, 25 bp, Homo sapien
tgttcatgatgcaatcagggcactc

SEQ ID NO: 1089818 - DNA, 25 bp, Homo sapien
agtggagacaggtggtaacactgct

SEQ ID NO: 1089819 - DNA, 25 bp, Homo sapien
caagtccccatagtttggtgtggtc

SEQ ID NO: 1089820 - DNA, 25 bp, Homo sapien
gcactgtgaaagctcgatgctgcta

SEQ ID NO: 1089821 - DNA, 25 bp, Homo sapien
ccagccatgaagtagtggagatgtg

SEQ ID NO: 1089822 - DNA, 25 bp, Homo sapien
gccagccatgaagtagtggagatgt

SEQ ID NO: 1089823 - DNA, 25 bp, Homo sapien
aagctcgatgctgctagcttccaca

SEQ ID NO: 1089824 - DNA, 25 bp, Homo sapien
ttgagcaactgctcatggacatcca

SEQ ID NO: 1089825 - DNA, 25 bp, Homo sapien
ctgcacgttgagcaactgctcatgg

SEQ ID NO: 1089826 - DNA, 25 bp, Homo sapien
cacgttgagcaactgctcatggaca

SEQ ID NO: 1089827 - DNA, 25 bp, Homo sapien
cgttgagcaactgctcatggacatc

SEQ ID NO: 1089828 - DNA, 25 bp, Homo sapien
gctgctgccgattaaggtgaccgcc

SEQ ID NO: 1089829 - DNA, 25 bp, Homo sapien
tgctgccgattaaggtgaccgccat

SEQ ID NO: 1089830 - DNA, 25 bp, Homo sapien
gctgccgattaaggtgaccgccatc

SEQ ID NO: 1089831 - DNA, 25 bp, Homo sapien
tgctgctgccgattaaggtgaccgc

SEQ ID NO: 1089832 - DNA, 25 bp, Homo sapien
cttccaggggaacatggcagtgaac

SEQ ID NO: 1089833 - DNA, 25 bp, Homo sapien
ggcagtgaactgctccaagatgcac

SEQ ID NO: 1089834 - DNA, 25 bp, Homo sapien
catggcagtgaactgctccaagatg

SEQ ID NO: 1089835 - DNA, 25 bp, Homo sapien
ggaacatggcagtgaactgctccaa

SEQ ID NO: 1089836 - DNA, 25 bp, Homo sapien
cgtctcatccatgccctcagctgtg

SEQ ID NO: 1089837 - DNA, 25 bp, Homo sapien
tctcgtctcatccatgccctcagct

SEQ ID NO: 1089838 - DNA, 25 bp, Homo sapien
ctcatccatgccctcagctgtgtac

SEQ ID NO: 1089839 - DNA, 25 bp, Homo sapien
ctctcgtctcatccatgccctcagc

SEQ ID NO: 1089840 - DNA, 25 bp, Homo sapien
tgatactcagagacgaggtcgttca

SEQ ID NO: 1089841 - DNA, 25 bp, Homo sapien
ttaggcctcctcttcagcctcctca

SEQ ID NO: 1089842 - DNA, 25 bp, Homo sapien
taggcctcctcttcagcctcctcac

SEQ ID NO: 1089843 - DNA, 25 bp, Homo sapien
tgagaagcctgaggcgatgggggct

SEQ ID NO: 1089844 - DNA, 25 bp, Homo sapien
gggaactgagaagcctgaggcgatg

SEQ ID NO: 1089845 - DNA, 25 bp, Homo sapien
gaactgagaagcctgaggcgatggg

SEQ ID NO: 1089846 - DNA, 25 bp, Homo sapien
aactgagaagcctgaggcgatgggg

SEQ ID NO: 1089847 - DNA, 25 bp, Homo sapien
ggccattatccacatgggctttcaa

SEQ ID NO: 1089848 - DNA, 25 bp, Homo sapien
tcaatatatgagagaggtagagcca

SEQ ID NO: 1089849 - DNA, 25 bp, Homo sapien
ccatctttcgctttgggcttaggat

SEQ ID NO: 1089850 - DNA, 25 bp, Homo sapien
tatactatcccacataaagtcaggg

SEQ ID NO: 1089851 - DNA, 25 bp, Homo sapien
gattgactggaaatagacaggctag

SEQ ID NO: 1089852 - DNA, 25 bp, Homo sapien
gaagtcaaacatctcagcctggtgg

SEQ ID NO: 1089853 - DNA, 25 bp, Homo sapien
tcctgtgttccctagtcctaagcaa

SEQ ID NO: 1089854 - DNA, 25 bp, Homo sapien
atataccacattttggccggacaca

SEQ ID NO: 1089855 - DNA, 25 bp, Homo sapien
gaagatcaggacctaacactaggtt

SEQ ID NO: 1089856 - DNA, 25 bp, Homo sapien
aaaaggccaggctgaactacgacaa

SEQ ID NO: 1089857 - DNA, 25 bp, Homo sapien
catttaaaacaagtgaccaggccgg

SEQ ID NO: 1089858 - DNA, 25 bp, Homo sapien
tggtagaaactagggtctcgctttg

SEQ ID NO: 1089859 - DNA, 25 bp, Homo sapien
actttctctctcgttgatctaatgt

SEQ ID NO: 1089860 - DNA, 25 bp, Homo sapien
ctttctctctcgttgatctaatgtt

SEQ ID NO: 1089861 - DNA, 25 bp, Homo sapien
cttgcctctttccggcttcccctct

SEQ ID NO: 1089862 - DNA, 25 bp, Homo sapien
caatgcctaaattatgctgcagagc

SEQ ID NO: 1089863 - DNA, 25 bp, Homo sapien
ccacctttgcaccaggaacttgcct

SEQ ID NO: 1089864 - DNA, 25 bp, Homo sapien
aatgcctaaattatgctgcagagcc

SEQ ID NO: 1089865 - DNA, 25 bp, Homo sapien
aagatttgccttaaatccatcactt

SEQ ID NO: 1089866 - DNA, 25 bp, Homo sapien
aaaacaagatttgccttaaatccat

SEQ ID NO: 1089867 - DNA, 25 bp, Homo sapien
aacaagatttgccttaaatccatca

SEQ ID NO: 1089868 - DNA, 25 bp, Homo sapien
atcacttgcagagctggttggaaca

SEQ ID NO: 1089869 - DNA, 25 bp, Homo sapien
gactacagctatctgggactgcgcc

SEQ ID NO: 1089870 - DNA, 25 bp, Homo sapien
tgggactacagctatctgggactgc

SEQ ID NO: 1089871 - DNA, 25 bp, Homo sapien
ctacagctatctgggactgcgccat

SEQ ID NO: 1089872 - DNA, 25 bp, Homo sapien
catagtatcagaggtgtgaagtaaa

SEQ ID NO: 1089873 - DNA, 25 bp, Homo sapien
cacttaggaaactgacaatcgtggg

SEQ ID NO: 1089874 - DNA, 25 bp, Homo sapien
caagaggcatacatttgcaaagcta

SEQ ID NO: 1089875 - DNA, 25 bp, Homo sapien
tgaagcaacttgtcagacgccacta

SEQ ID NO: 1089876 - DNA, 25 bp, Homo sapien
aagccgagactttatagagtgcaac

SEQ ID NO: 1089877 - DNA, 25 bp, Homo sapien
aaattttatggccaggttattgcaa

SEQ ID NO: 1089878 - DNA, 25 bp, Homo sapien
tattttggaactggcaacctgttga

SEQ ID NO: 1089879 - DNA, 25 bp, Homo sapien
tcccatccacgaatatagtaaatct

SEQ ID NO: 1089880 - DNA, 25 bp, Homo sapien
taggagagaggtagtatcttcacaa

SEQ ID NO: 1089881 - DNA, 25 bp, Homo sapien
cttgaaggcaaaaataccaccgatt

SEQ ID NO: 1089882 - DNA, 25 bp, Homo sapien
ccttgaaggcaaaaataccaccgat

SEQ ID NO: 1089883 - DNA, 25 bp, Homo sapien
gcaaaaataccaccgattttcttca

SEQ ID NO: 1089884 - DNA, 25 bp, Homo sapien
gccattgtgattgtgcagtcagcct

SEQ ID NO: 1089885 - DNA, 25 bp, Homo sapien
aagtctgagtcagccattgtgattg

SEQ ID NO: 1089886 - DNA, 25 bp, Homo sapien
gccaggaagtctgagtcagccattg

SEQ ID NO: 1089887 - DNA, 25 bp, Homo sapien
ccattgtgattgtgcagtcagcctt

SEQ ID NO: 1089888 - DNA, 25 bp, Homo sapien
ccagtagtacaggagaaactcgcca

SEQ ID NO: 1089889 - DNA, 25 bp, Homo sapien
tacacatctgtggatgccctgagcg

SEQ ID NO: 1089890 - DNA, 25 bp, Homo sapien
taaaggacttatccctacagagggc

SEQ ID NO: 1089891 - DNA, 25 bp, Homo sapien
gagacactcacagcctaacagggaa

SEQ ID NO: 1089892 - DNA, 25 bp, Homo sapien
cttcatagcgagacccatgttgcca

SEQ ID NO: 1089893 - DNA, 25 bp, Homo sapien
agagcttagcgttgcctggctgaag

SEQ ID NO: 1089894 - DNA, 25 bp, Homo sapien
tcagagcttagcgttgcctggctga

SEQ ID NO: 1089895 - DNA, 25 bp, Homo sapien
gaagattttgtaacttcatagcgag

SEQ ID NO: 1089896 - DNA, 25 bp, Homo sapien
caaagcagtagtataccatcaggct

SEQ ID NO: 1089897 - DNA, 25 bp, Homo sapien
ggaaaaacaggattggtcacaccca

SEQ ID NO: 1089898 - DNA, 25 bp, Homo sapien
cacaacactaattactggccagctg

SEQ ID NO: 1089899 - DNA, 25 bp, Homo sapien
cagttgtatgcaattccgcaaagca

SEQ ID NO: 1089900 - DNA, 25 bp, Homo sapien
aattattcttaatgatggtgtttta

SEQ ID NO: 1089901 - DNA, 25 bp, Homo sapien
caaactttattgttcaattattctt

SEQ ID NO: 1089902 - DNA, 25 bp, Homo sapien
gcaaactttattgttcaattattct

SEQ ID NO: 1089903 - DNA, 25 bp, Homo sapien
ttcaattattcttaatgatggtgtt

SEQ ID NO: 1089904 - DNA, 25 bp, Homo sapien
tctcaaagcattattttatcctata

SEQ ID NO: 1089905 - DNA, 25 bp, Homo sapien
caaaggactgagaacgttataaatt

SEQ ID NO: 1089906 - DNA, 25 bp, Homo sapien
actgagaacgttataaattgaaatg

SEQ ID NO: 1089907 - DNA, 25 bp, Homo sapien
ttataacaaaggactgagaacgtta

SEQ ID NO: 1089908 - DNA, 25 bp, Homo sapien
gagccctgagcaagaacatacacag

SEQ ID NO: 1089909 - DNA, 25 bp, Homo sapien
gagagccctgagcaagaacatacac

SEQ ID NO: 1089910 - DNA, 25 bp, Homo sapien
tagagagccctgagcaagaacatac

SEQ ID NO: 1089911 - DNA, 25 bp, Homo sapien
agagagccctgagcaagaacataca

SEQ ID NO: 1089912 - DNA, 25 bp, Homo sapien
tcaagtcaagctgggcgctctccgc

SEQ ID NO: 1089913 - DNA, 25 bp, Homo sapien
cggcctccttcggacacaggcgtag

SEQ ID NO: 1089914 - DNA, 25 bp, Homo sapien
cgctctccgcgacgcaagttttgtt

SEQ ID NO: 1089915 - DNA, 25 bp, Homo sapien
tccttcggacacaggcgtagggtcc

SEQ ID NO: 1089916 - DNA, 25 bp, Homo sapien
tctcagctgcgctccgcgggctcgg

SEQ ID NO: 1089917 - DNA, 25 bp, Homo sapien
ccccagtctcagctgcgctccgcgg

SEQ ID NO: 1089918 - DNA, 25 bp, Homo sapien
ggcgccccacaggccgaacgcgctc

SEQ ID NO: 1089919 - DNA, 25 bp, Homo sapien
aggccgaacgcgctcccccagtctc

SEQ ID NO: 1089920 - DNA, 25 bp, Homo sapien
tggaacctggggcttctgcctcatt

SEQ ID NO: 1089921 - DNA, 25 bp, Homo sapien
gtattccaacgccaagatctcgtcc

SEQ ID NO: 1089922 - DNA, 25 bp, Homo sapien
tcttccacctgacggagcgtcaggt

SEQ ID NO: 1089923 - DNA, 25 bp, Homo sapien
tgacggagcgtcaggtattccaacg

SEQ ID NO: 1089924 - DNA, 25 bp, Homo sapien
aggtttctatataaaggagggatag

SEQ ID NO: 1089925 - DNA, 25 bp, Homo sapien
cggttcacaccagtggcgcctcgtg

SEQ ID NO: 1089926 - DNA, 25 bp, Homo sapien
tgccttcccagtgtggaaggtttct

SEQ ID NO: 1089927 - DNA, 25 bp, Homo sapien
gttcacaccagtggcgcctcgtgga

SEQ ID NO: 1089928 - DNA, 25 bp, Homo sapien
gaatgctgtgcgcctgcagatcagc

SEQ ID NO: 1089929 - DNA, 25 bp, Homo sapien
ggaatgctgtgcgcctgcagatcag

SEQ ID NO: 1089930 - DNA, 25 bp, Homo sapien
ctcggaatgctgtgcgcctgcagat

SEQ ID NO: 1089931 - DNA, 25 bp, Homo sapien
tcggaatgctgtgcgcctgcagatc

SEQ ID NO: 1089932 - DNA, 25 bp, Homo sapien
gcaggctgttctgcctcctcgcctt

SEQ ID NO: 1089933 - DNA, 25 bp, Homo sapien
aggctgttctgcctcctcgccttcc

SEQ ID NO: 1089934 - DNA, 25 bp, Homo sapien
gctgttctgcctcctcgccttccat

SEQ ID NO: 1089935 - DNA, 25 bp, Homo sapien
caggcaggctgttctgcctcctcgc

SEQ ID NO: 1089936 - DNA, 25 bp, Homo sapien
cagggggtgccgagtcagatgcgcc

SEQ ID NO: 1089937 - DNA, 25 bp, Homo sapien
ccgagtcagatgcgcctgggcgcca

SEQ ID NO: 1089938 - DNA, 25 bp, Homo sapien
gtgccgagtcagatgcgcctgggcg

SEQ ID NO: 1089939 - DNA, 25 bp, Homo sapien
gggtgccgagtcagatgcgcctggg

SEQ ID NO: 1089940 - DNA, 25 bp, Homo sapien
tggccgccacttcggccaaatcctg

SEQ ID NO: 1089941 - DNA, 25 bp, Homo sapien
cctccgcaaattcgttctcttcggg

SEQ ID NO: 1089942 - DNA, 25 bp, Homo sapien
tcagggctcagtaccagcaccggct

SEQ ID NO: 1089943 - DNA, 25 bp, Homo sapien
aacaggcacagtctcgggggcagct

SEQ ID NO: 1089944 - DNA, 25 bp, Homo sapien
ctgcagagataggtggttggtgtgc

SEQ ID NO: 1089945 - DNA, 25 bp, Homo sapien
tcacgcaggtcaataccgccacagt

SEQ ID NO: 1089946 - DNA, 25 bp, Homo sapien
tggttggtgtgctcaggcaggtccc

SEQ ID NO: 1089947 - DNA, 25 bp, Homo sapien
ccccgggaactcacgcaggtcaata

SEQ ID NO: 1089948 - DNA, 25 bp, Homo sapien
tattggaggttctgggtgaacagtt

SEQ ID NO: 1089949 - DNA, 25 bp, Homo sapien
gagccgcacatattggaggttctgg

SEQ ID NO: 1089950 - DNA, 25 bp, Homo sapien
tggagagccgcacatattggaggtt

SEQ ID NO: 1089951 - DNA, 25 bp, Homo sapien
ttgggagtggagagccgcacatatt

SEQ ID NO: 1089952 - DNA, 25 bp, Homo sapien
aaggaagcagcatcagcctagtggg

SEQ ID NO: 1089953 - DNA, 25 bp, Homo sapien
ttaggaggttactctgggccccaca

SEQ ID NO: 1089954 - DNA, 25 bp, Homo sapien
gacatctacgggcagttcaaactcg

SEQ ID NO: 1089955 - DNA, 25 bp, Homo sapien
tcacaacaggagtgtgggtcctgcc

SEQ ID NO: 1089956 - DNA, 25 bp, Homo sapien
tcagggtagatcttttccagctggt

SEQ ID NO: 1089957 - DNA, 25 bp, Homo sapien
cggtgcagccgggagagctcctcag

SEQ ID NO: 1089958 - DNA, 25 bp, Homo sapien
aagtcaggcggttgttttgcaggtt

SEQ ID NO: 1089959 - DNA, 25 bp, Homo sapien
gcgtctccagccggtgcagccggga

SEQ ID NO: 1089960 - DNA, 25 bp, Homo sapien
ccctgggctctgggtggcccctcac

SEQ ID NO: 1089961 - DNA, 25 bp, Homo sapien
ttggtgtccctgaccctgggctctg

SEQ ID NO: 1089962 - DNA, 25 bp, Homo sapien
ctgaccctgggctctgggtggcccc

SEQ ID NO: 1089963 - DNA, 25 bp, Homo sapien
tgaccctgggctctgggtggcccct

SEQ ID NO: 1089964 - DNA, 25 bp, Homo sapien
gaaatatccgtgtagtgttcaggca

SEQ ID NO: 1089965 - DNA, 25 bp, Homo sapien
tgtgaaattctcttgtctaacctga

SEQ ID NO: 1089966 - DNA, 25 bp, Homo sapien
tgttcaggcaacaatagggagcccc

SEQ ID NO: 1089967 - DNA, 25 bp, Homo sapien
gagcatatgctggtttggccagaca

SEQ ID NO: 1089968 - DNA, 25 bp, Homo sapien
tgaagagcatgggaaacacgacaat

SEQ ID NO: 1089969 - DNA, 25 bp, Homo sapien
tcggaaccgaagatcctgtgacaag

SEQ ID NO: 1089970 - DNA, 25 bp, Homo sapien
caatagtagttaattccgagtggca

SEQ ID NO: 1089971 - DNA, 25 bp, Homo sapien
tgtgaggactctacaactcttgggt

SEQ ID NO: 1089972 - DNA, 25 bp, Homo sapien
ctctcgtttctgggctccaagaccc

SEQ ID NO: 1089973 - DNA, 25 bp, Homo sapien
gactcggctgctaccgggagccctg

SEQ ID NO: 1089974 - DNA, 25 bp, Homo sapien
tcaggactcggctgctaccgggagc

SEQ ID NO: 1089975 - DNA, 25 bp, Homo sapien
atctggcagatgtgtcaggactcgg

SEQ ID NO: 1089976 - DNA, 25 bp, Homo sapien
tcaaaggacaggcatcggtcagagc

SEQ ID NO: 1089977 - DNA, 25 bp, Homo sapien
cttcaaaggacaggcatcggtcaga

SEQ ID NO: 1089978 - DNA, 25 bp, Homo sapien
caaaggacaggcatcggtcagagcc

SEQ ID NO: 1089979 - DNA, 25 bp, Homo sapien
ttcaaaggacaggcatcggtcagag

SEQ ID NO: 1089980 - DNA, 25 bp, Homo sapien
caggtaattgaggttggtcagatgc

SEQ ID NO: 1089981 - DNA, 25 bp, Homo sapien
ttggtcagatgctcaaacgccttct

SEQ ID NO: 1089982 - DNA, 25 bp, Homo sapien
tgctcaaacgccttctctgggagcc

SEQ ID NO: 1089983 - DNA, 25 bp, Homo sapien
cttgttattggccaagtacaggtaa

SEQ ID NO: 1089984 - DNA, 25 bp, Homo sapien
atgggactggacatggtgaggaagc

SEQ ID NO: 1089985 - DNA, 25 bp, Homo sapien
caatgggactggacatggtgaggaa

SEQ ID NO: 1089986 - DNA, 25 bp, Homo sapien
ctcaatgggactggacatggtgagg

SEQ ID NO: 1089987 - DNA, 25 bp, Homo sapien
ccagtggggctgtaggtggctggag

SEQ ID NO: 1089988 - DNA, 25 bp, Homo sapien
gatcttggtgagatagttggcagca

SEQ ID NO: 1089989 - DNA, 25 bp, Homo sapien
tgagatagttggcagcaaagtccac

SEQ ID NO: 1089990 - DNA, 25 bp, Homo sapien
tggccaaaggtgagcccatagatct

SEQ ID NO: 1089991 - DNA, 25 bp, Homo sapien
gagcccatagatcttggtgagatag

SEQ ID NO: 1089992 - DNA, 25 bp, Homo sapien
cagcccggcgtctgccagcttgttg

SEQ ID NO: 1089993 - DNA, 25 bp, Homo sapien
agcccggcgtctgccagcttgttgt

SEQ ID NO: 1089994 - DNA, 25 bp, Homo sapien
atgaggacctcgacgttgctggagc

SEQ ID NO: 1089995 - DNA, 25 bp, Homo sapien
caggatgaggacctcgacgttgctg

SEQ ID NO: 1089996 - DNA, 25 bp, Homo sapien
caggtgcttgggcacgtggcgcagg

SEQ ID NO: 1089997 - DNA, 25 bp, Homo sapien
ggacctcgacgttgctggagccgtt

SEQ ID NO: 1089998 - DNA, 25 bp, Homo sapien
cagtcaggtagttgttctgcaggta

SEQ ID NO: 1089999 - DNA, 25 bp, Homo sapien
gttgtccaggccctcgtcagtcagg

SEQ ID NO: 1090000 - DNA, 25 bp, Homo sapien
tccaggccctcgtcagtcaggtagt

SEQ ID NO: 1090001 - DNA, 25 bp, Homo sapien
tctgcaggtatagctcgcgcaggct

SEQ ID NO: 1090002 - DNA, 25 bp, Homo sapien
cagctgggacccgagacaggttgtt

SEQ ID NO: 1090003 - DNA, 25 bp, Homo sapien
tgcaccgtgtgcaaccgcttgaggc

SEQ ID NO: 1090004 - DNA, 25 bp, Homo sapien
cacatggacatttcgaggcagccca

SEQ ID NO: 1090005 - DNA, 25 bp, Homo sapien
aaggcagccagctcattgcgcttga

SEQ ID NO: 1090006 - DNA, 25 bp, Homo sapien
gattgagtgctgtagcgtgatcata

SEQ ID NO: 1090007 - DNA, 25 bp, Homo sapien
ctgtcgtccaggattgagtgctgta

SEQ ID NO: 1090008 - DNA, 25 bp, Homo sapien
cactgccagctctatcttccttagg

SEQ ID NO: 1090009 - DNA, 25 bp, Homo sapien
gcatgagccagcgtatagagtggat

SEQ ID NO: 1090010 - DNA, 25 bp, Homo sapien
gggtgaccaagggagtcagggactc

SEQ ID NO: 1090011 - DNA, 25 bp, Homo sapien
caggggtgaccaagggagtcaggga

SEQ ID NO: 1090012 - DNA, 25 bp, Homo sapien
tgcaggggtgaccaagggagtcagg

SEQ ID NO: 1090013 - DNA, 25 bp, Homo sapien
gaccaagggagtcagggactcccac

SEQ ID NO: 1090014 - DNA, 25 bp, Homo sapien
tctctgtgagctgattcccggcgat

SEQ ID NO: 1090015 - DNA, 25 bp, Homo sapien
ggcgggcaccgcactaatcttgttg

SEQ ID NO: 1090016 - DNA, 25 bp, Homo sapien
ggtacaggtactcaagtgactcggg

SEQ ID NO: 1090017 - DNA, 25 bp, Homo sapien
gagaaagatccccttgaggttgggc

SEQ ID NO: 1090018 - DNA, 25 bp, Homo sapien
ttcagcctccggaaggcactgtcca

SEQ ID NO: 1090019 - DNA, 25 bp, Homo sapien
cttcagcctccggaaggcactgtcc

SEQ ID NO: 1090020 - DNA, 25 bp, Homo sapien
actctaagttgccttcaatgtccaa

SEQ ID NO: 1090021 - DNA, 25 bp, Homo sapien
tctaagttgccttcaatgtccaaga

SEQ ID NO: 1090022 - DNA, 25 bp, Homo sapien
ctaagttgccttcaatgtccaagac

SEQ ID NO: 1090023 - DNA, 25 bp, Homo sapien
caaactctaagttgccttcaatgtc

SEQ ID NO: 1090024 - DNA, 25 bp, Homo sapien
taggtcacatctgcatcaccttgtc

SEQ ID NO: 1090025 - DNA, 25 bp, Homo sapien
aggtcacatctgcatcaccttgtca

SEQ ID NO: 1090026 - DNA, 25 bp, Homo sapien
ctaggtcacatctgcatcaccttgt

SEQ ID NO: 1090027 - DNA, 25 bp, Homo sapien
tatgtgtgttggtgcatccgtgtgc

SEQ ID NO: 1090028 - DNA, 25 bp, Homo sapien
gtccccacttctagacaggcctgtg

SEQ ID NO: 1090029 - DNA, 25 bp, Homo sapien
ccctgcagcttgagtgattgtttca

SEQ ID NO: 1090030 - DNA, 25 bp, Homo sapien
caggtgtgcatgtaagggcccgtat

SEQ ID NO: 1090031 - DNA, 25 bp, Homo sapien
tgctgcacagagaaaacggaagact

SEQ ID NO: 1090032 - DNA, 25 bp, Homo sapien
tttggtctgcggagaacctccctgc

SEQ ID NO: 1090033 - DNA, 25 bp, Homo sapien
gagggatccggctgacatggcttca

SEQ ID NO: 1090034 - DNA, 25 bp, Homo sapien
aagccagctctttcctacatcggtg

SEQ ID NO: 1090035 - DNA, 25 bp, Homo sapien
ccagcccaagcagcctgaggggacc

SEQ ID NO: 1090036 - DNA, 25 bp, Homo sapien
cagcccaagcagcctgaggggacct

SEQ ID NO: 1090037 - DNA, 25 bp, Homo sapien
aacaaaggtgtctcctaggtgcagc

SEQ ID NO: 1090038 - DNA, 25 bp, Homo sapien
cctgcatgattcagagggcgtggca

SEQ ID NO: 1090039 - DNA, 25 bp, Homo sapien
tatgagactgtgtcagcccgtgtca

SEQ ID NO: 1090040 - DNA, 25 bp, Homo sapien
ttctccagggaacggacggacagat

SEQ ID NO: 1090041 - DNA, 25 bp, Homo sapien
gaagcaagcacagacatagccacag

SEQ ID NO: 1090042 - DNA, 25 bp, Homo sapien
tgatgtctgctgttctggccagggc

SEQ ID NO: 1090043 - DNA, 25 bp, Homo sapien
tgcgggccccgagaactggactttc

SEQ ID NO: 1090044 - DNA, 25 bp, Homo sapien
aggggcttgtatcctgccccctcca

SEQ ID NO: 1090045 - DNA, 25 bp, Homo sapien
ggactttccactgatgtctgctgtt

SEQ ID NO: 1090046 - DNA, 25 bp, Homo sapien
tctaatgataagaggagcgtggctg

SEQ ID NO: 1090047 - DNA, 25 bp, Homo sapien
gggcccaggcacaaacccaagatgt

SEQ ID NO: 1090048 - DNA, 25 bp, Homo sapien
tgcactggtaggcagaaagcccagg

SEQ ID NO: 1090049 - DNA, 25 bp, Homo sapien
caagaagcgttgctctagggctcca

SEQ ID NO: 1090050 - DNA, 25 bp, Homo sapien
gaacgacttgggtcccaggattctc

SEQ ID NO: 1090051 - DNA, 25 bp, Homo sapien
gctccagcacagaacgacttgggtc

SEQ ID NO: 1090052 - DNA, 25 bp, Homo sapien
agcacagaacgacttgggtcccagg

SEQ ID NO: 1090053 - DNA, 25 bp, Homo sapien
cgacttgggtcccaggattctctcc

SEQ ID NO: 1090054 - DNA, 25 bp, Homo sapien
tggcactccgggggaggctggcctg

SEQ ID NO: 1090055 - DNA, 25 bp, Homo sapien
ccctggcactccgggggaggctggc

SEQ ID NO: 1090056 - DNA, 25 bp, Homo sapien
ggccctggcactccgggggaggctg

SEQ ID NO: 1090057 - DNA, 25 bp, Homo sapien
ctggcactccgggggaggctggcct

SEQ ID NO: 1090058 - DNA, 25 bp, Homo sapien
catcacacaagaagacgggctcaat

SEQ ID NO: 1090059 - DNA, 25 bp, Homo sapien
ttaatgtgaccactagaaaattcta

SEQ ID NO: 1090060 - DNA, 25 bp, Homo sapien
ttacaaatgtggctcgcagtggaac

SEQ ID NO: 1090061 - DNA, 25 bp, Homo sapien
tccacagtgcttcactcagaaggtt

SEQ ID NO: 1090062 - DNA, 25 bp, Homo sapien
gattcgggttgagcccactagcagg

SEQ ID NO: 1090063 - DNA, 25 bp, Homo sapien
agcttcctcgccttgcctagggcca

SEQ ID NO: 1090064 - DNA, 25 bp, Homo sapien
agggcagccttcagagggcggtggt

SEQ ID NO: 1090065 - DNA, 25 bp, Homo sapien
cactagcagggtgctccgtaacaaa

SEQ ID NO: 1090066 - DNA, 25 bp, Homo sapien
agttcaagcttatcattctcacagg

SEQ ID NO: 1090067 - DNA, 25 bp, Homo sapien
aggtcccagtggagcgccctcttgg

SEQ ID NO: 1090068 - DNA, 25 bp, Homo sapien
agaatggccggcagtctgacagtga

SEQ ID NO: 1090069 - DNA, 25 bp, Homo sapien
gaatgcagccttcttggtggagaat

SEQ ID NO: 1090070 - DNA, 25 bp, Homo sapien
gttgaaatctgcaaaggctacaggg

SEQ ID NO: 1090071 - DNA, 25 bp, Homo sapien
tggagtcaccctctagatgtgcaaa

SEQ ID NO: 1090072 - DNA, 25 bp, Homo sapien
gatgtgcaaatgtaaacaagccttt

SEQ ID NO: 1090073 - DNA, 25 bp, Homo sapien
tgtgcttcagtccaactgagtgcag

SEQ ID NO: 1090074 - DNA, 25 bp, Homo sapien
gggagggacgtgtgcaggcggaatg

SEQ ID NO: 1090075 - DNA, 25 bp, Homo sapien
gggacgtgtgcaggcggaatggact

SEQ ID NO: 1090076 - DNA, 25 bp, Homo sapien
acgtgtgcaggcggaatggactcct

SEQ ID NO: 1090077 - DNA, 25 bp, Homo sapien
tgtgcaggcggaatggactcctcat

SEQ ID NO: 1090078 - DNA, 25 bp, Homo sapien
tggcgttcattttcgccaacaccat

SEQ ID NO: 1090079 - DNA, 25 bp, Homo sapien
gacttggcgttcattttcgccaaca

SEQ ID NO: 1090080 - DNA, 25 bp, Homo sapien
tgtgacttggcgttcattttcgcca

SEQ ID NO: 1090081 - DNA, 25 bp, Homo sapien
tgcacctgtgacttggcgttcattt

SEQ ID NO: 1090082 - DNA, 25 bp, Homo sapien
catttgttgcccacagaaaaccttc

SEQ ID NO: 1090083 - DNA, 25 bp, Homo sapien
cccaggcctcatttccattaagtga

SEQ ID NO: 1090084 - DNA, 25 bp, Homo sapien
ccaggcctcatttccattaagtgac

SEQ ID NO: 1090085 - DNA, 25 bp, Homo sapien
gcaaggcttccagatctgtaggcaa

SEQ ID NO: 1090086 - DNA, 25 bp, Homo sapien
agcaaggcttccagatctgtaggca

SEQ ID NO: 1090087 - DNA, 25 bp, Homo sapien
tcaacatctgaattgctccttgcct

SEQ ID NO: 1090088 - DNA, 25 bp, Homo sapien
aacatctgaattgctccttgcctaa

SEQ ID NO: 1090089 - DNA, 25 bp, Homo sapien
tgaattgctccttgcctaaaagagc

SEQ ID NO: 1090090 - DNA, 25 bp, Homo sapien
catctgaattgctccttgcctaaaa

SEQ ID NO: 1090091 - DNA, 25 bp, Homo sapien
cctacgagcttggagctgcagcaac

SEQ ID NO: 1090092 - DNA, 25 bp, Homo sapien
gagctgcagcaacattcttcacttc

SEQ ID NO: 1090093 - DNA, 25 bp, Homo sapien
tcttcacttccaggaggcgcaggga

SEQ ID NO: 1090094 - DNA, 25 bp, Homo sapien
attcttcacttccaggaggcgcagg

SEQ ID NO: 1090095 - DNA, 25 bp, Homo sapien
cagcaactaccaaaagcccttttat

SEQ ID NO: 1090096 - DNA, 25 bp, Homo sapien
acaggctaccggcagaccgccagat

SEQ ID NO: 1090097 - DNA, 25 bp, Homo sapien
tacaagttcctgatacctagtacca

SEQ ID NO: 1090098 - DNA, 25 bp, Homo sapien
cgccagatggctacaagttcctgat

SEQ ID NO: 1090099 - DNA, 25 bp, Homo sapien
ggcagaccgccagatggctacaagt

SEQ ID NO: 1090100 - DNA, 25 bp, Homo sapien
tgtactgagtatgcaagcccaaagc

SEQ ID NO: 1090101 - DNA, 25 bp, Homo sapien
cagcagtctgtggtgccttggttga

SEQ ID NO: 1090102 - DNA, 25 bp, Homo sapien
gcattagagttaggtgtcaacctgt

SEQ ID NO: 1090103 - DNA, 25 bp, Homo sapien
cccaaagcaataggcaccaatggca

SEQ ID NO: 1090104 - DNA, 25 bp, Homo sapien
aggggatgaaaaagtctggcctcca

SEQ ID NO: 1090105 - DNA, 25 bp, Homo sapien
ggggatgaaaaagtctggcctccag

SEQ ID NO: 1090106 - DNA, 25 bp, Homo sapien
ttagcgcccaagacactgcgtcagg

SEQ ID NO: 1090107 - DNA, 25 bp, Homo sapien
catccttgcgagactgtggactaaa

SEQ ID NO: 1090108 - DNA, 25 bp, Homo sapien
ttccccttttttggagcaagacaga

SEQ ID NO: 1090109 - DNA, 25 bp, Homo sapien
ttctggagtctaaacacaaggccgc

SEQ ID NO: 1090110 - DNA, 25 bp, Homo sapien
caggctgtcctggtagtgcatggtg

SEQ ID NO: 1090111 - DNA, 25 bp, Homo sapien
gctgaggggccgactgggggctccc

SEQ ID NO: 1090112 - DNA, 25 bp, Homo sapien
cacgatgctgcgctgcaggtactgg

SEQ ID NO: 1090113 - DNA, 25 bp, Homo sapien
gcatggtgggcacgatgctgcgctg

SEQ ID NO: 1090114 - DNA, 25 bp, Homo sapien
gtcttcaagtttgggaataggcagc

SEQ ID NO: 1090115 - DNA, 25 bp, Homo sapien
ggtatctcctaatggtgtcttcaag

SEQ ID NO: 1090116 - DNA, 25 bp, Homo sapien
gaactggccatcattcaagagaggc

SEQ ID NO: 1090117 - DNA, 25 bp, Homo sapien
ttctgtgcactgaggtatctcctaa

SEQ ID NO: 1090118 - DNA, 25 bp, Homo sapien
tgtccagagcaaccagctgctcatg

SEQ ID NO: 1090119 - DNA, 25 bp, Homo sapien
ttctgtttgtccagagcaaccagct

SEQ ID NO: 1090120 - DNA, 25 bp, Homo sapien
tgtagcttgtatgtttattctgttt

SEQ ID NO: 1090121 - DNA, 25 bp, Homo sapien
tgtttgtccagagcaaccagctgct

SEQ ID NO: 1090122 - DNA, 25 bp, Homo sapien
cagccttaatttacctcaggaaggg

SEQ ID NO: 1090123 - DNA, 25 bp, Homo sapien
gctcaagtcaacacctcagtagagg

SEQ ID NO: 1090124 - DNA, 25 bp, Homo sapien
tacttttcattatggagggctctgg

SEQ ID NO: 1090125 - DNA, 25 bp, Homo sapien
gttacttcatttgctggtctcacca

SEQ ID NO: 1090126 - DNA, 25 bp, Homo sapien
gaagttgagtttctgcaccgtgaca

SEQ ID NO: 1090127 - DNA, 25 bp, Homo sapien
ctctttgtatagacggaggccgggc

SEQ ID NO: 1090128 - DNA, 25 bp, Homo sapien
gatacgcattgaccaggtaggcccc

SEQ ID NO: 1090129 - DNA, 25 bp, Homo sapien
gaaacagtcatgttggttgcccggg

SEQ ID NO: 1090130 - DNA, 25 bp, Homo sapien
gtcagctggccatggtacttggagc

SEQ ID NO: 1090131 - DNA, 25 bp, Homo sapien
cagctggccatggtacttggagcac

SEQ ID NO: 1090132 - DNA, 25 bp, Homo sapien
gccatggtacttggagcactcaacc

SEQ ID NO: 1090133 - DNA, 25 bp, Homo sapien
acttggagcactcaaccatcatctg

SEQ ID NO: 1090134 - DNA, 25 bp, Homo sapien
tttgaccagggttcgaatctcagtc

SEQ ID NO: 1090135 - DNA, 25 bp, Homo sapien
tacaggaagacagctatggactcaa

SEQ ID NO: 1090136 - DNA, 25 bp, Homo sapien
gattagaatgtcttggaggtccctt

SEQ ID NO: 1090137 - DNA, 25 bp, Homo sapien
gaaaggacaactatgaccctccagg

SEQ ID NO: 1090138 - DNA, 25 bp, Homo sapien
ccaggtagagctcaggcaagatgat

SEQ ID NO: 1090139 - DNA, 25 bp, Homo sapien
tatctgcccgtatgcagggtccagg

SEQ ID NO: 1090140 - DNA, 25 bp, Homo sapien
gaagagacattgcagcctatccagt

SEQ ID NO: 1090141 - DNA, 25 bp, Homo sapien
aacaagtgtcggtcaaagccctggc

SEQ ID NO: 1090142 - DNA, 25 bp, Homo sapien
gcctcccagttttcatgatgaggaa

SEQ ID NO: 1090143 - DNA, 25 bp, Homo sapien
tcttcagttgtgatctagtcccaag

SEQ ID NO: 1090144 - DNA, 25 bp, Homo sapien
tcaagcctgtagctggctgcctagg

SEQ ID NO: 1090145 - DNA, 25 bp, Homo sapien
gaatagcacccactggctacacagg

SEQ ID NO: 1090146 - DNA, 25 bp, Homo sapien
ttacagagatgaaaccgcgatccca

SEQ ID NO: 1090147 - DNA, 25 bp, Homo sapien
ccagtcaagggcaagtttacagaga

SEQ ID NO: 1090148 - DNA, 25 bp, Homo sapien
acaaataagaattcgtgcagcagca

SEQ ID NO: 1090149 - DNA, 25 bp, Homo sapien
aatgagccagaagccaatggtgacg

SEQ ID NO: 1090150 - DNA, 25 bp, Homo sapien
tagtgatgttccgataaatgtaatg

SEQ ID NO: 1090151 - DNA, 25 bp, Homo sapien
ctcacctccgctgaaaccatttctg

SEQ ID NO: 1090152 - DNA, 25 bp, Homo sapien
tctgcaccacaggtgccttgaatcc

SEQ ID NO: 1090153 - DNA, 25 bp, Homo sapien
gttgggagcatttaatatcctagct

SEQ ID NO: 1090154 - DNA, 25 bp, Homo sapien
ccagcgatgctgtgactcttgtaga

SEQ ID NO: 1090155 - DNA, 25 bp, Homo sapien
catggtctcagatgtagcctggaca

SEQ ID NO: 1090156 - DNA, 25 bp, Homo sapien
tgctggaactgtgctgtgtcaaacc

SEQ ID NO: 1090157 - DNA, 25 bp, Homo sapien
cagatgcgaaaagcccagtgggcca

SEQ ID NO: 1090158 - DNA, 25 bp, Homo sapien
ggcccgaggtctttaagcgaagtca

SEQ ID NO: 1090159 - DNA, 25 bp, Homo sapien
ttttactgccgagatgacctaggtc

SEQ ID NO: 1090160 - DNA, 25 bp, Homo sapien
caacttgaggcacacatcgtgcgcg

SEQ ID NO: 1090161 - DNA, 25 bp, Homo sapien
taaagagcggtgtacgactcacaca

SEQ ID NO: 1090162 - DNA, 25 bp, Homo sapien
cattcccatgccattggggttgctt

SEQ ID NO: 1090163 - DNA, 25 bp, Homo sapien
ggggttgcttttgccaaggtcatcc

SEQ ID NO: 1090164 - DNA, 25 bp, Homo sapien
tcctcgattataaatctggtaaaca

SEQ ID NO: 1090165 - DNA, 25 bp, Homo sapien
ccaggacctcctcgattataaatct

SEQ ID NO: 1090166 - DNA, 25 bp, Homo sapien
catctcactagctatactggcatca

SEQ ID NO: 1090167 - DNA, 25 bp, Homo sapien
caagttccgttagcttctgtacgcg

SEQ ID NO: 1090168 - DNA, 25 bp, Homo sapien
gttgtgtcacactaactgattctgc

SEQ ID NO: 1090169 - DNA, 25 bp, Homo sapien
accatgtgcacagtcaagaattagc

SEQ ID NO: 1090170 - DNA, 25 bp, Homo sapien
gatgcatgccatgttgtcgagagcc

SEQ ID NO: 1090171 - DNA, 25 bp, Homo sapien
taatcactgtccagttgggcactgg

SEQ ID NO: 1090172 - DNA, 25 bp, Homo sapien
ggatgcattgccagcactttgcaga

SEQ ID NO: 1090173 - DNA, 25 bp, Homo sapien
aatggcacaggaatgcaagcctctc

SEQ ID NO: 1090174 - DNA, 25 bp, Homo sapien
tatggcagtaagtcctattgatccc

SEQ ID NO: 1090175 - DNA, 25 bp, Homo sapien
tgcagatgtaaaggtcagtcacaca

SEQ ID NO: 1090176 - DNA, 25 bp, Homo sapien
ggcattgattctattcagagcactg

SEQ ID NO: 1090177 - DNA, 25 bp, Homo sapien
tatggtctacctttcctccagtgga

SEQ ID NO: 1090178 - DNA, 25 bp, Homo sapien
cattccatggtaccagagtgctcag

SEQ ID NO: 1090179 - DNA, 25 bp, Homo sapien
gagacgtttccagatcagcccaagt

SEQ ID NO: 1090180 - DNA, 25 bp, Homo sapien
tttattttcacacagtccacaaggg

SEQ ID NO: 1090181 - DNA, 25 bp, Homo sapien
ggaaaagcctttcagctcacccatg

SEQ ID NO: 1090182 - DNA, 25 bp, Homo sapien
taaaaatcagatgagttctataaat

SEQ ID NO: 1090183 - DNA, 25 bp, Homo sapien
gtggctatccatcaacataagtaaa

SEQ ID NO: 1090184 - DNA, 25 bp, Homo sapien
tgtagagaagaggcacatctatggc

SEQ ID NO: 1090185 - DNA, 25 bp, Homo sapien
tttggcatgtttggcccaccacaca

SEQ ID NO: 1090186 - DNA, 25 bp, Homo sapien
gttttgctgacataactcactctga

SEQ ID NO: 1090187 - DNA, 25 bp, Homo sapien
tatattttcgtaagcttatcagccc

SEQ ID NO: 1090188 - DNA, 25 bp, Homo sapien
tccctgacatttccctgtgaggtag

SEQ ID NO: 1090189 - DNA, 25 bp, Homo sapien
tatctgttatgaatcgcccactcac

SEQ ID NO: 1090190 - DNA, 25 bp, Homo sapien
ctccagggagcacattagcttggca

SEQ ID NO: 1090191 - DNA, 25 bp, Homo sapien
cattagcttggcaaagatgcacagt

SEQ ID NO: 1090192 - DNA, 25 bp, Homo sapien
cctccagggagcacattagcttggc

SEQ ID NO: 1090193 - DNA, 25 bp, Homo sapien
acattagcttggcaaagatgcacag

SEQ ID NO: 1090194 - DNA, 25 bp, Homo sapien
tacagcagccataatactgacatgt

SEQ ID NO: 1090195 - DNA, 25 bp, Homo sapien
taagatcactccaacatgccccttt

SEQ ID NO: 1090196 - DNA, 25 bp, Homo sapien
tgcactggagacaacatgcaactac

SEQ ID NO: 1090197 - DNA, 25 bp, Homo sapien
agaacacatgtaatacatgacacag

SEQ ID NO: 1090198 - DNA, 25 bp, Homo sapien
cagtgcactctgaaaggtgacgcag

SEQ ID NO: 1090199 - DNA, 25 bp, Homo sapien
cagcggcagccctaagagttctgca

SEQ ID NO: 1090200 - DNA, 25 bp, Homo sapien
taagagtacaatctaagacaggagc

SEQ ID NO: 1090201 - DNA, 25 bp, Homo sapien
ccctaggaaggttgtatagcagtca

SEQ ID NO: 1090202 - DNA, 25 bp, Homo sapien
gcaacctaaggaaggaggaggatcc

SEQ ID NO: 1090203 - DNA, 25 bp, Homo sapien
taacaagaggcagagtcgtgtgcag

SEQ ID NO: 1090204 - DNA, 25 bp, Homo sapien
cactccagcagatactccgacaatg

SEQ ID NO: 1090205 - DNA, 25 bp, Homo sapien
gagaggagcctcatcgtggttatca

SEQ ID NO: 1090206 - DNA, 25 bp, Homo sapien
aacattctgtgccacgcactcaggg

SEQ ID NO: 1090207 - DNA, 25 bp, Homo sapien
tcacctgtgacaacggccactgcat

SEQ ID NO: 1090208 - DNA, 25 bp, Homo sapien
tgtcctgatggctccgatgagtccg

SEQ ID NO: 1090209 - DNA, 25 bp, Homo sapien
gccactgcatccacgaacggtggaa

SEQ ID NO: 1090210 - DNA, 25 bp, Homo sapien
tcagaaggtttgacggatgggccca

SEQ ID NO: 1090211 - DNA, 25 bp, Homo sapien
aagaaagtgcggctcacaggagtcc

SEQ ID NO: 1090212 - DNA, 25 bp, Homo sapien
catagcctacaagtggcagggcgca

SEQ ID NO: 1090213 - DNA, 25 bp, Homo sapien
gaccctgtgtgtcccgtgaagcaga

SEQ ID NO: 1090214 - DNA, 25 bp, Homo sapien
ggctggagcccttcgtgtgtctccc

SEQ ID NO: 1090215 - DNA, 25 bp, Homo sapien
gctggagcccttcgtgtgtctccct

SEQ ID NO: 1090216 - DNA, 25 bp, Homo sapien
ggagcccttcgtgtgtctccctcct

SEQ ID NO: 1090217 - DNA, 25 bp, Homo sapien
tggagcccttcgtgtgtctccctcc

SEQ ID NO: 1090218 - DNA, 25 bp, Homo sapien
ggaaactcttcccgatttgaaagca

SEQ ID NO: 1090219 - DNA, 25 bp, Homo sapien
tcacgcacagttggcctgctgcttg

SEQ ID NO: 1090220 - DNA, 25 bp, Homo sapien
gcagggtccctcacgcacagttggc

SEQ ID NO: 1090221 - DNA, 25 bp, Homo sapien
agttggcctgctgcttgattatttt

SEQ ID NO: 1090222 - DNA, 25 bp, Homo sapien
gccagcatctagcagggtccctcac

SEQ ID NO: 1090223 - DNA, 25 bp, Homo sapien
gagtggaatcatcttcaggcagcca

SEQ ID NO: 1090224 - DNA, 25 bp, Homo sapien
caggcagcagactgggatcttccaa

SEQ ID NO: 1090225 - DNA, 25 bp, Homo sapien
gaaaaaccaaggtgagtggaatcat

SEQ ID NO: 1090226 - DNA, 25 bp, Homo sapien
ctgggcaggctgtttaaaagtggct

SEQ ID NO: 1090227 - DNA, 25 bp, Homo sapien
gaggaggaacttcggtcactgaata

SEQ ID NO: 1090228 - DNA, 25 bp, Homo sapien
tatgtcgggcactgatagacgtgat

SEQ ID NO: 1090229 - DNA, 25 bp, Homo sapien
aaccaactgccctccgagtcaggat

SEQ ID NO: 1090230 - DNA, 25 bp, Homo sapien
tagacgtgatctagcaaccaactgc

SEQ ID NO: 1090231 - DNA, 25 bp, Homo sapien
ggccattctagaggcccctggctcc

SEQ ID NO: 1090232 - DNA, 25 bp, Homo sapien
aggccattctagaggcccctggctc

SEQ ID NO: 1090233 - DNA, 25 bp, Homo sapien
gaggccattctagaggcccctggct

SEQ ID NO: 1090234 - DNA, 25 bp, Homo sapien
ccgagctgctagtctggtagagaaa

SEQ ID NO: 1090235 - DNA, 25 bp, Homo sapien
catgcgatgccttcagcacacgctt

SEQ ID NO: 1090236 - DNA, 25 bp, Homo sapien
tgcctccaccgagctgctagtctgg

SEQ ID NO: 1090237 - DNA, 25 bp, Homo sapien
ttgagtgccaccaacacaggatgat

SEQ ID NO: 1090238 - DNA, 25 bp, Homo sapien
tagggaaggggctcgtgactcctcc

SEQ ID NO: 1090239 - DNA, 25 bp, Homo sapien
ggggctcgtgactcctcctggctga

SEQ ID NO: 1090240 - DNA, 25 bp, Homo sapien
gcctttttggtgcagtgagccaggc

SEQ ID NO: 1090241 - DNA, 25 bp, Homo sapien
ggcctgcctttttggtgcagtgagc

SEQ ID NO: 1090242 - DNA, 25 bp, Homo sapien
gatgcgacgaggacgatgactgctt

SEQ ID NO: 1090243 - DNA, 25 bp, Homo sapien
cggccaaggattgcgaaaaggacca

SEQ ID NO: 1090244 - DNA, 25 bp, Homo sapien
cgagcgctgcatcccctctgtgtgg

SEQ ID NO: 1090245 - DNA, 25 bp, Homo sapien
aaggaccaattccagtgccggaacg

SEQ ID NO: 1090246 - DNA, 25 bp, Homo sapien
ccgcggcaaggactcggagggctga

SEQ ID NO: 1090247 - DNA, 25 bp, Homo sapien
tgcttgaaatgcagccgaggagccg

SEQ ID NO: 1090248 - DNA, 25 bp, Homo sapien
ccgagcgtcaccgaacctgcttgaa

SEQ ID NO: 1090249 - DNA, 25 bp, Homo sapien
tcaccgaacctgcttgaaatgcagc

SEQ ID NO: 1090250 - DNA, 25 bp, Homo sapien
agcccagcactcaggcgagcccaga

SEQ ID NO: 1090251 - DNA, 25 bp, Homo sapien
agagcagggccgtggagcgcccgct

SEQ ID NO: 1090252 - DNA, 25 bp, Homo sapien
ctggcccatccctgcgtctgcagag

SEQ ID NO: 1090253 - DNA, 25 bp, Homo sapien
ctggacctgctacctccgtggtgag

SEQ ID NO: 1090254 - DNA, 25 bp, Homo sapien
catagtcctcctaggggtacaaatc

SEQ ID NO: 1090255 - DNA, 25 bp, Homo sapien
ctcatgcttgttatgtgtcaggcct

SEQ ID NO: 1090256 - DNA, 25 bp, Homo sapien
tgtcaggccttgtatttatcctctg

SEQ ID NO: 1090257 - DNA, 25 bp, Homo sapien
tgaggaagacatagtcctcctaggg

SEQ ID NO: 1090258 - DNA, 25 bp, Homo sapien
taatcatggcacactacaaatagca

SEQ ID NO: 1090259 - DNA, 25 bp, Homo sapien
taagtatgttcagaatatgacacca

SEQ ID NO: 1090260 - DNA, 25 bp, Homo sapien
tgtattacgatcacatataagtatg

SEQ ID NO: 1090261 - DNA, 25 bp, Homo sapien
tagtaagaggagatttacacaaatg

SEQ ID NO: 1090262 - DNA, 25 bp, Homo sapien
gacgaagccggacagcacgagattt

SEQ ID NO: 1090263 - DNA, 25 bp, Homo sapien
gaacgtttctgtccgtgtcttgcac

SEQ ID NO: 1090264 - DNA, 25 bp, Homo sapien
tctatagcgcggatccactggacaa

SEQ ID NO: 1090265 - DNA, 25 bp, Homo sapien
tgaacagaagcactgcgatcctgcg

SEQ ID NO: 1090266 - DNA, 25 bp, Homo sapien
gaatatccttgcacctgtctctggg

SEQ ID NO: 1090267 - DNA, 25 bp, Homo sapien
gcaacaggcttttctcactccgcat

SEQ ID NO: 1090268 - DNA, 25 bp, Homo sapien
tgcattaggagcatataaggatccc

SEQ ID NO: 1090269 - DNA, 25 bp, Homo sapien
tgcatgcaagtgtatctccagggtt

SEQ ID NO: 1090270 - DNA, 25 bp, Homo sapien
gaaaggcttgcactgaataattatg

SEQ ID NO: 1090271 - DNA, 25 bp, Homo sapien
aaccaagattgtcctagaaatacca

SEQ ID NO: 1090272 - DNA, 25 bp, Homo sapien
gagccttacaagtgtcaaatcctgt

SEQ ID NO: 1090273 - DNA, 25 bp, Homo sapien
ctacattaggacctttctgagaaag

SEQ ID NO: 1090274 - DNA, 25 bp, Homo sapien
gtccgcctgaaggctctctcactct

SEQ ID NO: 1090275 - DNA, 25 bp, Homo sapien
tgttccacggttccgtccgcctgaa

SEQ ID NO: 1090276 - DNA, 25 bp, Homo sapien
ccgtccgcctgaaggctctctcact

SEQ ID NO: 1090277 - DNA, 25 bp, Homo sapien
ctgttccacggttccgtccgcctga

SEQ ID NO: 1090278 - DNA, 25 bp, Homo sapien
gcaggacacagggattcctgtccca

SEQ ID NO: 1090279 - DNA, 25 bp, Homo sapien
cagccccaccacaggatctggttgg

SEQ ID NO: 1090280 - DNA, 25 bp, Homo sapien
cagcagagccagcaatgaggatgca

SEQ ID NO: 1090281 - DNA, 25 bp, Homo sapien
ctccagcattatgatgtcagcagca

SEQ ID NO: 1090282 - DNA, 25 bp, Homo sapien
gttcctgatgtaggagaacggggtc

SEQ ID NO: 1090283 - DNA, 25 bp, Homo sapien
ttcctgatgtaggagaacggggtct

SEQ ID NO: 1090284 - DNA, 25 bp, Homo sapien
cggtagttcctgatgtaggagaacg

SEQ ID NO: 1090285 - DNA, 25 bp, Homo sapien
ccccggtagttcctgatgtaggaga

SEQ ID NO: 1090286 - DNA, 25 bp, Homo sapien
ctggcccaacttggtccaaggatct

SEQ ID NO: 1090287 - DNA, 25 bp, Homo sapien
taatttgtcctgctgactaattcct

SEQ ID NO: 1090288 - DNA, 25 bp, Homo sapien
gcagaaatctccgttccagcaggca

SEQ ID NO: 1090289 - DNA, 25 bp, Homo sapien
atctgcagaaatctccgttccagca

SEQ ID NO: 1090290 - DNA, 25 bp, Homo sapien
ctgccttctgcaagaagtgtcctgt

SEQ ID NO: 1090291 - DNA, 25 bp, Homo sapien
ggcaaagatttagtctcagtggcat

SEQ ID NO: 1090292 - DNA, 25 bp, Homo sapien
tatcagcacttctagcagtatattc

SEQ ID NO: 1090293 - DNA, 25 bp, Homo sapien
ctaagggctgtctcatgtcccacaa

SEQ ID NO: 1090294 - DNA, 25 bp, Homo sapien
gaggaggccccacttcgagctggca

SEQ ID NO: 1090295 - DNA, 25 bp, Homo sapien
ggaggccccacttcgagctggcatc

SEQ ID NO: 1090296 - DNA, 25 bp, Homo sapien
tggaggaggccccacttcgagctgg

SEQ ID NO: 1090297 - DNA, 25 bp, Homo sapien
atggaggaggccccacttcgagctg

SEQ ID NO: 1090298 - DNA, 25 bp, Homo sapien
cagcaaagctgtagtgggaagtcct

SEQ ID NO: 1090299 - DNA, 25 bp, Homo sapien
ggagtggcccaacgcagaactgttt

SEQ ID NO: 1090300 - DNA, 25 bp, Homo sapien
aatctgtattagcaggctccgagcc

SEQ ID NO: 1090301 - DNA, 25 bp, Homo sapien
tccgagcctctggaatagtcacagc

SEQ ID NO: 1090302 - DNA, 25 bp, Homo sapien
ctccgcctggattgctccctctcgc

SEQ ID NO: 1090303 - DNA, 25 bp, Homo sapien
ccttcccatccttgcttgaaggcag

SEQ ID NO: 1090304 - DNA, 25 bp, Homo sapien
tccttgcttgaaggcaggtttagtg

SEQ ID NO: 1090305 - DNA, 25 bp, Homo sapien
agtgctttgtgccccaaggggaggc

SEQ ID NO: 1090306 - DNA, 25 bp, Homo sapien
ctgaatgaggccaggtggggcttca

SEQ ID NO: 1090307 - DNA, 25 bp, Homo sapien
acttggcctgtctggcgtagggaac

SEQ ID NO: 1090308 - DNA, 25 bp, Homo sapien
aaggttcgatcttcattctgcacag

SEQ ID NO: 1090309 - DNA, 25 bp, Homo sapien
tgacattcgtaaggttcgatcttca

SEQ ID NO: 1090310 - DNA, 25 bp, Homo sapien
tggtactgggcagggcgccgagctc

SEQ ID NO: 1090311 - DNA, 25 bp, Homo sapien
tcattttgcggtgggccaaggctcc

SEQ ID NO: 1090312 - DNA, 25 bp, Homo sapien
taaagaggcaggtctgcgcaggctc

SEQ ID NO: 1090313 - DNA, 25 bp, Homo sapien
gctacctgcgaagtcagcaagcact

SEQ ID NO: 1090314 - DNA, 25 bp, Homo sapien
gaagtgaagggatttgcccagacag

SEQ ID NO: 1090315 - DNA, 25 bp, Homo sapien
gagccacagccaacacgtttaagac

SEQ ID NO: 1090316 - DNA, 25 bp, Homo sapien
cagccaacacgtttaagacatgcat

SEQ ID NO: 1090317 - DNA, 25 bp, Homo sapien
ctgagccacagccaacacgtttaag

SEQ ID NO: 1090318 - DNA, 25 bp, Homo sapien
gccacagccaacacgtttaagacat

SEQ ID NO: 1090319 - DNA, 25 bp, Homo sapien
agtcgtggtctagcgggatgcagca

SEQ ID NO: 1090320 - DNA, 25 bp, Homo sapien
gtggtctagcgggatgcagcagtgg

SEQ ID NO: 1090321 - DNA, 25 bp, Homo sapien
ctagtcgtggtctagcgggatgcag

SEQ ID NO: 1090322 - DNA, 25 bp, Homo sapien
tcgtggtctagcgggatgcagcagt

SEQ ID NO: 1090323 - DNA, 25 bp, Homo sapien
gcctacccaggctactgagtgccac

SEQ ID NO: 1090324 - DNA, 25 bp, Homo sapien
tacccaggctactgagtgccactgg

SEQ ID NO: 1090325 - DNA, 25 bp, Homo sapien
aggctactgagtgccactgggttct

SEQ ID NO: 1090326 - DNA, 25 bp, Homo sapien
ccaggctactgagtgccactgggtt

SEQ ID NO: 1090327 - DNA, 25 bp, Homo sapien
gcagccagggagtgcgtccagtcac

SEQ ID NO: 1090328 - DNA, 25 bp, Homo sapien
caccagcttgatcctttcctgaagg

SEQ ID NO: 1090329 - DNA, 25 bp, Homo sapien
gggagtgcgtccagtcaccctcaaa

SEQ ID NO: 1090330 - DNA, 25 bp, Homo sapien
agtgcgtccagtcaccctcaaacat

SEQ ID NO: 1090331 - DNA, 25 bp, Homo sapien
gagttccagaagaacagccctgtac

SEQ ID NO: 1090332 - DNA, 25 bp, Homo sapien
ttccagaagaacagccctgtacttg

SEQ ID NO: 1090333 - DNA, 25 bp, Homo sapien
tgagttccagaagaacagccctgta

SEQ ID NO: 1090334 - DNA, 25 bp, Homo sapien
gttccagaagaacagccctgtactt

SEQ ID NO: 1090335 - DNA, 25 bp, Homo sapien
tctttttcatggagcaaagaacagg

SEQ ID NO: 1090336 - DNA, 25 bp, Homo sapien
ggatctttttcatggagcaaagaac

SEQ ID NO: 1090337 - DNA, 25 bp, Homo sapien
gatctttttcatggagcaaagaaca

SEQ ID NO: 1090338 - DNA, 25 bp, Homo sapien
tggatctttttcatggagcaaagaa

SEQ ID NO: 1090339 - DNA, 25 bp, Homo sapien
gataggtggtgaagttaagagcaat

SEQ ID NO: 1090340 - DNA, 25 bp, Homo sapien
gagagtcagcaaagtgtggtggatt

SEQ ID NO: 1090341 - DNA, 25 bp, Homo sapien
tcagcaaagtgtggtggattatcat

SEQ ID NO: 1090342 - DNA, 25 bp, Homo sapien
tgggataggtggtgaagttaagagc

SEQ ID NO: 1090343 - DNA, 25 bp, Homo sapien
tcccaggcaatcaatcgggcagcgt

SEQ ID NO: 1090344 - DNA, 25 bp, Homo sapien
cccaggcaatcaatcgggcagcgtc

SEQ ID NO: 1090345 - DNA, 25 bp, Homo sapien
ttcccaggcaatcaatcgggcagcg

SEQ ID NO: 1090346 - DNA, 25 bp, Homo sapien
caggcaatcaatcgggcagcgtcag

SEQ ID NO: 1090347 - DNA, 25 bp, Homo sapien
ctctccaggaagtgctacaattgga

SEQ ID NO: 1090348 - DNA, 25 bp, Homo sapien
tccaggaagtgctacaattggatca

SEQ ID NO: 1090349 - DNA, 25 bp, Homo sapien
agtgctacaattggatcaatgtgga

SEQ ID NO: 1090350 - DNA, 25 bp, Homo sapien
caggaagtgctacaattggatcaat

SEQ ID NO: 1090351 - DNA, 25 bp, Homo sapien
tcctcagtaggaaatgcacttaggt

SEQ ID NO: 1090352 - DNA, 25 bp, Homo sapien
gatgcaggtggtctgcggatcacac

SEQ ID NO: 1090353 - DNA, 25 bp, Homo sapien
aagtcctgaacaagacattaaggcc

SEQ ID NO: 1090354 - DNA, 25 bp, Homo sapien
cacttgtgagaatgataggcctgcc

SEQ ID NO: 1090355 - DNA, 25 bp, Homo sapien
ctcgcagtgtgtcccgggaactgca

SEQ ID NO: 1090356 - DNA, 25 bp, Homo sapien
gggaactgcagcaggaaccttgcat

SEQ ID NO: 1090357 - DNA, 25 bp, Homo sapien
atacacttgtaacaaagcggctcgc

SEQ ID NO: 1090358 - DNA, 25 bp, Homo sapien
taacaaagcggctcgcagtgtgtcc

SEQ ID NO: 1090359 - DNA, 25 bp, Homo sapien
ggcagggtcagccttcgtaacacaa

SEQ ID NO: 1090360 - DNA, 25 bp, Homo sapien
tgggatgagccgcgccccacaagtc

SEQ ID NO: 1090361 - DNA, 25 bp, Homo sapien
gggagctgcagagcaagtggcgctg

SEQ ID NO: 1090362 - DNA, 25 bp, Homo sapien
gggtcagccttcgtaacacaaccac

SEQ ID NO: 1090363 - DNA, 25 bp, Homo sapien
atttgcccgcgtgtcccttgacggg

SEQ ID NO: 1090364 - DNA, 25 bp, Homo sapien
ggagatcaggtagcacttctcgcag

SEQ ID NO: 1090365 - DNA, 25 bp, Homo sapien
gaagccatggttcctgcatctcgag

SEQ ID NO: 1090366 - DNA, 25 bp, Homo sapien
tcttctggcgctcggagatcaggta

SEQ ID NO: 1090367 - DNA, 25 bp, Homo sapien
tcctcggcggcctgcgtcttgagca

SEQ ID NO: 1090368 - DNA, 25 bp, Homo sapien
cctcggcggcctgcgtcttgagcac

SEQ ID NO: 1090369 - DNA, 25 bp, Homo sapien
cctcctcggcggcctgcgtcttgag

SEQ ID NO: 1090370 - DNA, 25 bp, Homo sapien
ctcctcggcggcctgcgtcttgagc

SEQ ID NO: 1090371 - DNA, 25 bp, Homo sapien
ccccggaggcctgcttgggcccctg

SEQ ID NO: 1090372 - DNA, 25 bp, Homo sapien
cgcagccccggaggcctgcttgggc

SEQ ID NO: 1090373 - DNA, 25 bp, Homo sapien
cccggaggcctgcttgggcccctgc

SEQ ID NO: 1090374 - DNA, 25 bp, Homo sapien
ggaggcctgcttgggcccctgcgca

SEQ ID NO: 1090375 - DNA, 25 bp, Homo sapien
ggccgcccagaaccggctggagggc

SEQ ID NO: 1090376 - DNA, 25 bp, Homo sapien
ctgcggccgcccagaaccggctgga

SEQ ID NO: 1090377 - DNA, 25 bp, Homo sapien
cgccacggcggctcgctcgctcggc

SEQ ID NO: 1090378 - DNA, 25 bp, Homo sapien
gctgctcgaagaagcaagcggccgc

SEQ ID NO: 1090379 - DNA, 25 bp, Homo sapien
cggcctgcgcaggtctagggggcca

SEQ ID NO: 1090380 - DNA, 25 bp, Homo sapien
tctagggggccagggtagccactgc

SEQ ID NO: 1090381 - DNA, 25 bp, Homo sapien
tagggggccagggtagccactgcct

SEQ ID NO: 1090382 - DNA, 25 bp, Homo sapien
tgcgcaggtctagggggccagggta

SEQ ID NO: 1090383 - DNA, 25 bp, Homo sapien
ccggaatggcacaaactacagctaa

SEQ ID NO: 1090384 - DNA, 25 bp, Homo sapien
gaagcactgctaagtcgactggacg

SEQ ID NO: 1090385 - DNA, 25 bp, Homo sapien
aattctgttattctggaggaggagc

SEQ ID NO: 1090386 - DNA, 25 bp, Homo sapien
ttgcgctaacgtgccggcaggaaaa

SEQ ID NO: 1090387 - DNA, 25 bp, Homo sapien
ttggtactggctgcgggacacatgc

SEQ ID NO: 1090388 - DNA, 25 bp, Homo sapien
tgcacggtccgggttgatgttcaga

SEQ ID NO: 1090389 - DNA, 25 bp, Homo sapien
acacatgccggaagccctgctgcag

SEQ ID NO: 1090390 - DNA, 25 bp, Homo sapien
ctggagccaccagggtactcagggc

SEQ ID NO: 1090391 - DNA, 25 bp, Homo sapien
gcggcaggtagtagcttggctggaa

SEQ ID NO: 1090392 - DNA, 25 bp, Homo sapien
tagtagcttggctggaagtctcctc

SEQ ID NO: 1090393 - DNA, 25 bp, Homo sapien
cggcggcggcaggtagtagcttggc

SEQ ID NO: 1090394 - DNA, 25 bp, Homo sapien
gaagcggtggaaggggcggcagtgg

SEQ ID NO: 1090395 - DNA, 25 bp, Homo sapien
agtatcaaacaggacggtcagtgag

SEQ ID NO: 1090396 - DNA, 25 bp, Homo sapien
aagtggagcgcagagaggtagcctg

SEQ ID NO: 1090397 - DNA, 25 bp, Homo sapien
gagaggtagcctggcgggaggaact

SEQ ID NO: 1090398 - DNA, 25 bp, Homo sapien
gtcagtgagaaagatgatggaggtg

SEQ ID NO: 1090399 - DNA, 25 bp, Homo sapien
cgacagtacctctgcatcctggtca

SEQ ID NO: 1090400 - DNA, 25 bp, Homo sapien
gacagtacctctgcatcctggtcat

SEQ ID NO: 1090401 - DNA, 25 bp, Homo sapien
ccgacagtacctctgcatcctggtc

SEQ ID NO: 1090402 - DNA, 25 bp, Homo sapien
tcggactgctcctgagacgatggct

SEQ ID NO: 1090403 - DNA, 25 bp, Homo sapien
ctagtcggactgctcctgagacgat

SEQ ID NO: 1090404 - DNA, 25 bp, Homo sapien
gactgctcctgagacgatggctggc

SEQ ID NO: 1090405 - DNA, 25 bp, Homo sapien
ctgctcctgagacgatggctggctg

SEQ ID NO: 1090406 - DNA, 25 bp, Homo sapien
tcttcaactgtacagcgcaggattg

SEQ ID NO: 1090407 - DNA, 25 bp, Homo sapien
gatgcttgctagtaaaaccccttag

SEQ ID NO: 1090408 - DNA, 25 bp, Homo sapien
gaagcaccattctattccctaggga

SEQ ID NO: 1090409 - DNA, 25 bp, Homo sapien
taaatggtagtgtaacccaaggaca

SEQ ID NO: 1090410 - DNA, 25 bp, Homo sapien
ttaggcttctggtgggagcatgact

SEQ ID NO: 1090411 - DNA, 25 bp, Homo sapien
tctgcccccattttggaaactagag

SEQ ID NO: 1090412 - DNA, 25 bp, Homo sapien
aaatgccattgctgcacgctgactc

SEQ ID NO: 1090413 - DNA, 25 bp, Homo sapien
ctcggtggctgacgggctctgtgtc

SEQ ID NO: 1090414 - DNA, 25 bp, Homo sapien
tactacagcacttccaaagcatgcc

SEQ ID NO: 1090415 - DNA, 25 bp, Homo sapien
ggcgtgactgttgctgcttattaca

SEQ ID NO: 1090416 - DNA, 25 bp, Homo sapien
ccttagccaagggacctcaagtcta

SEQ ID NO: 1090417 - DNA, 25 bp, Homo sapien
cagccaagggttgttggccaaagat

SEQ ID NO: 1090418 - DNA, 25 bp, Homo sapien
ggcgtccatgcgtgatatgtggccc

SEQ ID NO: 1090419 - DNA, 25 bp, Homo sapien
gcagcgttgtcacgggatgagtcga

SEQ ID NO: 1090420 - DNA, 25 bp, Homo sapien
tagaaatgcgagcagggataaccct

SEQ ID NO: 1090421 - DNA, 25 bp, Homo sapien
tcgaggttgtgggtattagcatagc

SEQ ID NO: 1090422 - DNA, 25 bp, Homo sapien
actgctccatcttagggagccctgt

SEQ ID NO: 1090423 - DNA, 25 bp, Homo sapien
ggcctggagccagagtttagggagg

SEQ ID NO: 1090424 - DNA, 25 bp, Homo sapien
cctggagccagagtttagggaggcc

SEQ ID NO: 1090425 - DNA, 25 bp, Homo sapien
tggcattctctgcactgagaggtgg

SEQ ID NO: 1090426 - DNA, 25 bp, Homo sapien
attctctgcactgagaggtggccct

SEQ ID NO: 1090427 - DNA, 25 bp, Homo sapien
tggataccctgaaggaaggacttgg

SEQ ID NO: 1090428 - DNA, 25 bp, Homo sapien
gactagtcctgtagtgccctacttg

SEQ ID NO: 1090429 - DNA, 25 bp, Homo sapien
taacctatgtgaatagccgggcact

SEQ ID NO: 1090430 - DNA, 25 bp, Homo sapien
ggattcaggctgtctctactcgtga

SEQ ID NO: 1090431 - DNA, 25 bp, Homo sapien
cagagggcattacagaatcctcctg

SEQ ID NO: 1090432 - DNA, 25 bp, Homo sapien
cagggcggcataatcagagggcatt

SEQ ID NO: 1090433 - DNA, 25 bp, Homo sapien
ggacccgcagggcggcataatcaga

SEQ ID NO: 1090434 - DNA, 25 bp, Homo sapien
ggcataatcagagggcattacagaa

SEQ ID NO: 1090435 - DNA, 25 bp, Homo sapien
gtgtttgtcagctccagaaatggct

SEQ ID NO: 1090436 - DNA, 25 bp, Homo sapien
tgtttgtcagctccagaaatggctt

SEQ ID NO: 1090437 - DNA, 25 bp, Homo sapien
ttgtcagctccagaaatggcttgat

SEQ ID NO: 1090438 - DNA, 25 bp, Homo sapien
gtttgtcagctccagaaatggcttg

SEQ ID NO: 1090439 - DNA, 25 bp, Homo sapien
ctgctttaaggaggtgctcagggga

SEQ ID NO: 1090440 - DNA, 25 bp, Homo sapien
ctttaaggaggtgctcaggggatga

SEQ ID NO: 1090441 - DNA, 25 bp, Homo sapien
taaggaggtgctcaggggatgatgg

SEQ ID NO: 1090442 - DNA, 25 bp, Homo sapien
tgctttaaggaggtgctcaggggat

SEQ ID NO: 1090443 - DNA, 25 bp, Homo sapien
ggagggcttggggcagcggcctggg

SEQ ID NO: 1090444 - DNA, 25 bp, Homo sapien
aggtagggaggcctgtagggctcgg

SEQ ID NO: 1090445 - DNA, 25 bp, Homo sapien
tagggaggcctgtagggctcgggaa

SEQ ID NO: 1090446 - DNA, 25 bp, Homo sapien
tcacaggtagggaggcctgtagggc

SEQ ID NO: 1090447 - DNA, 25 bp, Homo sapien
tggtgaatggcgataagagctcccc

SEQ ID NO: 1090448 - DNA, 25 bp, Homo sapien
tacctcatgactggagctcgggctg

SEQ ID NO: 1090449 - DNA, 25 bp, Homo sapien
gctctggtgacaggtaggcccttcc

SEQ ID NO: 1090450 - DNA, 25 bp, Homo sapien
tgagccctcagagacatgcgatctg

SEQ ID NO: 1090451 - DNA, 25 bp, Homo sapien
ttatcgttgcgtggcaacctgaaac

SEQ ID NO: 1090452 - DNA, 25 bp, Homo sapien
cagcagcgtattgtggcagggcccc

SEQ ID NO: 1090453 - DNA, 25 bp, Homo sapien
ccgaggtggaaggccttatcgttgc

SEQ ID NO: 1090454 - DNA, 25 bp, Homo sapien
gaaggccttatcgttgcgtggcaac

SEQ ID NO: 1090455 - DNA, 25 bp, Homo sapien
aaagtcttgagaatactgactggca

SEQ ID NO: 1090456 - DNA, 25 bp, Homo sapien
tgtaaagtcttgagaatactgactg

SEQ ID NO: 1090457 - DNA, 25 bp, Homo sapien
cttctgtaaagtcttgagaatactg

SEQ ID NO: 1090458 - DNA, 25 bp, Homo sapien
tctgtaaagtcttgagaatactgac

SEQ ID NO: 1090459 - DNA, 25 bp, Homo sapien
tgtacctcctactctagcaagctgg

SEQ ID NO: 1090460 - DNA, 25 bp, Homo sapien
cctactctagcaagctggttttcca

SEQ ID NO: 1090461 - DNA, 25 bp, Homo sapien
gctcccatagaaggctgtacctcct

SEQ ID NO: 1090462 - DNA, 25 bp, Homo sapien
gaaggctgtacctcctactctagca

SEQ ID NO: 1090463 - DNA, 25 bp, Homo sapien
cagtccgacctccagcctgggtttg

SEQ ID NO: 1090464 - DNA, 25 bp, Homo sapien
gtttgtctctttgggcccacagggc

SEQ ID NO: 1090465 - DNA, 25 bp, Homo sapien
gcctgggtttgtctctttgggccca

SEQ ID NO: 1090466 - DNA, 25 bp, Homo sapien
tccagcctgggtttgtctctttggg

SEQ ID NO: 1090467 - DNA, 25 bp, Homo sapien
ctgccggtcctgtggcaccctgttc

SEQ ID NO: 1090468 - DNA, 25 bp, Homo sapien
ccaggtggatacttctccttcggga

SEQ ID NO: 1090469 - DNA, 25 bp, Homo sapien
ggtctggtccaggtggatacttctc

SEQ ID NO: 1090470 - DNA, 25 bp, Homo sapien
ggtccaggtggatacttctccttcg

SEQ ID NO: 1090471 - DNA, 25 bp, Homo sapien
tcacacggcacatcaaccagggaag

SEQ ID NO: 1090472 - DNA, 25 bp, Homo sapien
gaaagcctgtttcgaatgatgatga

SEQ ID NO: 1090473 - DNA, 25 bp, Homo sapien
ttatagtgctttgccgagtgtcctc

SEQ ID NO: 1090474 - DNA, 25 bp, Homo sapien
caatagacggcaagggatgcatttc

SEQ ID NO: 1090475 - DNA, 25 bp, Homo sapien
agggggtgtgtgggaggcaggatgc

SEQ ID NO: 1090476 - DNA, 25 bp, Homo sapien
ggtgtgtgggaggcaggatgctcta

SEQ ID NO: 1090477 - DNA, 25 bp, Homo sapien
gggtgtgtgggaggcaggatgctct

SEQ ID NO: 1090478 - DNA, 25 bp, Homo sapien
tgtgtgggaggcaggatgctctagg

SEQ ID NO: 1090479 - DNA, 25 bp, Homo sapien
gcaggtgctggacaataatcagcag

SEQ ID NO: 1090480 - DNA, 25 bp, Homo sapien
aatgagcattgccatatagcaggtg

SEQ ID NO: 1090481 - DNA, 25 bp, Homo sapien
gactctgcctctggtgtaggaagca

SEQ ID NO: 1090482 - DNA, 25 bp, Homo sapien
agcagtacatcgtactctgactctg

SEQ ID NO: 1090483 - DNA, 25 bp, Homo sapien
gggggcagatgccgggggaggcttc

SEQ ID NO: 1090484 - DNA, 25 bp, Homo sapien
cgtgtttgccgttgtgttaaaggag

SEQ ID NO: 1090485 - DNA, 25 bp, Homo sapien
ttaaaggagagtccgtgttgtagcc

SEQ ID NO: 1090486 - DNA, 25 bp, Homo sapien
tatttctggcagtgccgtgtttgcc

SEQ ID NO: 1090487 - DNA, 25 bp, Homo sapien
tagcccaccgccgatgatggctctt

SEQ ID NO: 1090488 - DNA, 25 bp, Homo sapien
ctgggtccgtattcacatttgggct

SEQ ID NO: 1090489 - DNA, 25 bp, Homo sapien
ccttcctgggtccgtattcacattt

SEQ ID NO: 1090490 - DNA, 25 bp, Homo sapien
ttcctgggtccgtattcacatttgg

SEQ ID NO: 1090491 - DNA, 25 bp, Homo sapien
cctgggtccgtattcacatttgggc

SEQ ID NO: 1090492 - DNA, 25 bp, Homo sapien
cccgcttgccgccatactccatcag

SEQ ID NO: 1090493 - DNA, 25 bp, Homo sapien
gtccaaatgcatcaggttccctcag

SEQ ID NO: 1090494 - DNA, 25 bp, Homo sapien
catactccatcagtctgtcaaattc

SEQ ID NO: 1090495 - DNA, 25 bp, Homo sapien
agttccgtctctccagcactgcaga

SEQ ID NO: 1090496 - DNA, 25 bp, Homo sapien
ctaagcatccaagtccaaagagctc

SEQ ID NO: 1090497 - DNA, 25 bp, Homo sapien
caagtccaaagagctccagtggaca

SEQ ID NO: 1090498 - DNA, 25 bp, Homo sapien
acagagtcaggggtctgagacactg

SEQ ID NO: 1090499 - DNA, 25 bp, Homo sapien
caaagagctccagtggacagagtca

SEQ ID NO: 1090500 - DNA, 25 bp, Homo sapien
cctggacgccgagcagtgagtgcat

SEQ ID NO: 1090501 - DNA, 25 bp, Homo sapien
ccctggacgccgagcagtgagtgca

SEQ ID NO: 1090502 - DNA, 25 bp, Homo sapien
cttataatctgtgggcttcttttta

SEQ ID NO: 1090503 - DNA, 25 bp, Homo sapien
taatctgtgggcttctttttattca

SEQ ID NO: 1090504 - DNA, 25 bp, Homo sapien
tcttttcttataatctgtgggcttc

SEQ ID NO: 1090505 - DNA, 25 bp, Homo sapien
tggccttcttttcttataatctgtg

SEQ ID NO: 1090506 - DNA, 25 bp, Homo sapien
ggtggatgcggagcaaaaatcccag

SEQ ID NO: 1090507 - DNA, 25 bp, Homo sapien
tagggcttctcgttgaggcaggctc

SEQ ID NO: 1090508 - DNA, 25 bp, Homo sapien
tgggccttcaaacggatgatttcaa

SEQ ID NO: 1090509 - DNA, 25 bp, Homo sapien
tgatttcaaacagatcgagcggctt

SEQ ID NO: 1090510 - DNA, 25 bp, Homo sapien
gataatctacacaccatctgttgga

SEQ ID NO: 1090511 - DNA, 25 bp, Homo sapien
cgtagtcatttcttacagatggcca

SEQ ID NO: 1090512 - DNA, 25 bp, Homo sapien
catgtttgcttgacccttatggaag

SEQ ID NO: 1090513 - DNA, 25 bp, Homo sapien
taaaccttgtacagttgagtggaca

SEQ ID NO: 1090514 - DNA, 25 bp, Homo sapien
gtgagataattaatggctcctggag

SEQ ID NO: 1090515 - DNA, 25 bp, Homo sapien
tcagagaacatatgacaggtgaatc

SEQ ID NO: 1090516 - DNA, 25 bp, Homo sapien
aaggaatattcttgagggccagagc

SEQ ID NO: 1090517 - DNA, 25 bp, Homo sapien
caggtgaatctgagctagtcttgca

SEQ ID NO: 1090518 - DNA, 25 bp, Homo sapien
tagtgtgtggttctatgacattaaa

SEQ ID NO: 1090519 - DNA, 25 bp, Homo sapien
aaggccaatgtcatcctaatgaagt

SEQ ID NO: 1090520 - DNA, 25 bp, Homo sapien
gaagttgatcaaccctatctattat

SEQ ID NO: 1090521 - DNA, 25 bp, Homo sapien
tacattctttagatagccttggttt

SEQ ID NO: 1090522 - DNA, 25 bp, Homo sapien
cgagaaataatgtggccttgaaaaa

SEQ ID NO: 1090523 - DNA, 25 bp, Homo sapien
aaaatatctccagtctgtaatccta

SEQ ID NO: 1090524 - DNA, 25 bp, Homo sapien
ccagaaatttgaggtggcagtaagc

SEQ ID NO: 1090525 - DNA, 25 bp, Homo sapien
aagggcaggacagttatagagaatc

SEQ ID NO: 1090526 - DNA, 25 bp, Homo sapien
aggggtcatgcgcaattcccctttt

SEQ ID NO: 1090527 - DNA, 25 bp, Homo sapien
tagtatgcgcaattccaattttagt

SEQ ID NO: 1090528 - DNA, 25 bp, Homo sapien
tgcgcaattccccttttagtatgcg

SEQ ID NO: 1090529 - DNA, 25 bp, Homo sapien
ttagtatgcgcaattccaattttag

SEQ ID NO: 1090530 - DNA, 25 bp, Homo sapien
tacaatgtagctctttcctgtcggg

SEQ ID NO: 1090531 - DNA, 25 bp, Homo sapien
gatgatcattgcgagcatgcgctga

SEQ ID NO: 1090532 - DNA, 25 bp, Homo sapien
catgcgctgattggactgaaatgcc

SEQ ID NO: 1090533 - DNA, 25 bp, Homo sapien
ggttctttgggaagtggcatccact

SEQ ID NO: 1090534 - DNA, 25 bp, Homo sapien
gctgatcagggctttaggttctttc

SEQ ID NO: 1090535 - DNA, 25 bp, Homo sapien
cagaacccaagttgatggttactaa

SEQ ID NO: 1090536 - DNA, 25 bp, Homo sapien
gatggttactaaaaggctgatcagg

SEQ ID NO: 1090537 - DNA, 25 bp, Homo sapien
atttagcgtttcagaacccaagttg

SEQ ID NO: 1090538 - DNA, 25 bp, Homo sapien
ttcatattcttccctagtcttgaca

SEQ ID NO: 1090539 - DNA, 25 bp, Homo sapien
tattcttccctagtcttgacattga

SEQ ID NO: 1090540 - DNA, 25 bp, Homo sapien
tcatattcttccctagtcttgacat

SEQ ID NO: 1090541 - DNA, 25 bp, Homo sapien
ttcttccctagtcttgacattgatt

SEQ ID NO: 1090542 - DNA, 25 bp, Homo sapien
cagcagataatcatatcgcagtgtg

SEQ ID NO: 1090543 - DNA, 25 bp, Homo sapien
gagggcttgagaccgcatccagatt

SEQ ID NO: 1090544 - DNA, 25 bp, Homo sapien
ctgggaagccctgctttggcttgag

SEQ ID NO: 1090545 - DNA, 25 bp, Homo sapien
ggctgtccggaggagggccatcagc

SEQ ID NO: 1090546 - DNA, 25 bp, Homo sapien
tgagaacgagacaattcgagcccag

SEQ ID NO: 1090547 - DNA, 25 bp, Homo sapien
ctgagaacgagacaattcgagccca

SEQ ID NO: 1090548 - DNA, 25 bp, Homo sapien
tcctcttaatgttcctgtgccacag

SEQ ID NO: 1090549 - DNA, 25 bp, Homo sapien
cattgtcctcttaatgttcctgtgc

SEQ ID NO: 1090550 - DNA, 25 bp, Homo sapien
ttgtcctcttaatgttcctgtgcca

SEQ ID NO: 1090551 - DNA, 25 bp, Homo sapien
ctcttaatgttcctgtgccacagcc

SEQ ID NO: 1090552 - DNA, 25 bp, Homo sapien
ggaactgtaactggaatggaagtgt

SEQ ID NO: 1090553 - DNA, 25 bp, Homo sapien
ctggtgcagtggtatgagaagccaa

SEQ ID NO: 1090554 - DNA, 25 bp, Homo sapien
ctgtaactggaatggaagtgttctc

SEQ ID NO: 1090555 - DNA, 25 bp, Homo sapien
gaagccaaaaatgcctaagtggtag

SEQ ID NO: 1090556 - DNA, 25 bp, Homo sapien
gccagagtaagctctgagttctatg

SEQ ID NO: 1090557 - DNA, 25 bp, Homo sapien
agagtaagctctgagttctatgggc

SEQ ID NO: 1090558 - DNA, 25 bp, Homo sapien
caaagccagagtaagctctgagttc

SEQ ID NO: 1090559 - DNA, 25 bp, Homo sapien
ctcggcaaagccagagtaagctctg

SEQ ID NO: 1090560 - DNA, 25 bp, Homo sapien
agcctcttcagccacagccctggct

SEQ ID NO: 1090561 - DNA, 25 bp, Homo sapien
ctccaagagcacccagagcctcttc

SEQ ID NO: 1090562 - DNA, 25 bp, Homo sapien
acagccctggctggggcagccccat

SEQ ID NO: 1090563 - DNA, 25 bp, Homo sapien
tccaagagcacccagagcctcttca

SEQ ID NO: 1090564 - DNA, 25 bp, Homo sapien
ctggaaacaatatcagaagcacttt

SEQ ID NO: 1090565 - DNA, 25 bp, Homo sapien
tggaaacaatatcagaagcacttta

SEQ ID NO: 1090566 - DNA, 25 bp, Homo sapien
ggaaacaatatcagaagcactttac

SEQ ID NO: 1090567 - DNA, 25 bp, Homo sapien
tggccaggatgttccgcttgactct

SEQ ID NO: 1090568 - DNA, 25 bp, Homo sapien
ggccaggatgttccgcttgactctg

SEQ ID NO: 1090569 - DNA, 25 bp, Homo sapien
catggccaggatgttccgcttgact

SEQ ID NO: 1090570 - DNA, 25 bp, Homo sapien
cccatggccaggatgttccgcttga

SEQ ID NO: 1090571 - DNA, 25 bp, Homo sapien
ctgaaaaaggttggtatccagttgt

SEQ ID NO: 1090572 - DNA, 25 bp, Homo sapien
aaaaggttggtatccagttgtcgtg

SEQ ID NO: 1090573 - DNA, 25 bp, Homo sapien
tgaaaaaggttggtatccagttgtc

SEQ ID NO: 1090574 - DNA, 25 bp, Homo sapien
aaggttggtatccagttgtcgtggc

SEQ ID NO: 1090575 - DNA, 25 bp, Homo sapien
caagacgaaccagaaatactgggtg

SEQ ID NO: 1090576 - DNA, 25 bp, Homo sapien
tcaagacgaaccagaaatactgggt

SEQ ID NO: 1090577 - DNA, 25 bp, Homo sapien
agaggcggaccaccgggcagtttgg

SEQ ID NO: 1090578 - DNA, 25 bp, Homo sapien
taaactcccaaatgttgcacctctg

SEQ ID NO: 1090579 - DNA, 25 bp, Homo sapien
gccagaccccctagctcagtcgtgt

SEQ ID NO: 1090580 - DNA, 25 bp, Homo sapien
tcctgagaggcggaccaccgggcag

SEQ ID NO: 1090581 - DNA, 25 bp, Homo sapien
ccatgcaacactgggggacgtgaca

SEQ ID NO: 1090582 - DNA, 25 bp, Homo sapien
cactatggcactgcgagcccgggat

SEQ ID NO: 1090583 - DNA, 25 bp, Homo sapien
tcatgtctgtatccaggcccactct

SEQ ID NO: 1090584 - DNA, 25 bp, Homo sapien
ggcgaattgcactatggcactgcga

SEQ ID NO: 1090585 - DNA, 25 bp, Homo sapien
cttccaaaattcagcaccagtggcc

SEQ ID NO: 1090586 - DNA, 25 bp, Homo sapien
tcaggtacaacttccaaaattcagc

SEQ ID NO: 1090587 - DNA, 25 bp, Homo sapien
tacaacttccaaaattcagcaccag

SEQ ID NO: 1090588 - DNA, 25 bp, Homo sapien
aacttccaaaattcagcaccagtgg

SEQ ID NO: 1090589 - DNA, 25 bp, Homo sapien
taaagtcttcaataagcctcttgaa

SEQ ID NO: 1090590 - DNA, 25 bp, Homo sapien
catgtgcttcttcaatgtaaatgac

SEQ ID NO: 1090591 - DNA, 25 bp, Homo sapien
ctgatgcatgtgcttcttcaatgta

SEQ ID NO: 1090592 - DNA, 25 bp, Homo sapien
tcaatgtaaatgacaagaaaatctg

SEQ ID NO: 1090593 - DNA, 25 bp, Homo sapien
gatgcatgtgcttcttcaatgtaaa

SEQ ID NO: 1090594 - DNA, 25 bp, Homo sapien
tctcaggcagtgctgcgtagagctg

SEQ ID NO: 1090595 - DNA, 25 bp, Homo sapien
ggattatgtagagcctctcaggcag

SEQ ID NO: 1090596 - DNA, 25 bp, Homo sapien
cctggccagcagtagatgggctgcc

SEQ ID NO: 1090597 - DNA, 25 bp, Homo sapien
cctgccctcctggattatgtagagc

SEQ ID NO: 1090598 - DNA, 25 bp, Homo sapien
gaataggtagggtcagcttgatctt

SEQ ID NO: 1090599 - DNA, 25 bp, Homo sapien
tatctgaataggtagggtcagcttg

SEQ ID NO: 1090600 - DNA, 25 bp, Homo sapien
gttttatctgaataggtagggtcag

SEQ ID NO: 1090601 - DNA, 25 bp, Homo sapien
gaatttgcctgcaagtttttgcttg

SEQ ID NO: 1090602 - DNA, 25 bp, Homo sapien
ttgtaaggaacatgtaggtctggag

SEQ ID NO: 1090603 - DNA, 25 bp, Homo sapien
gaggttagttgcaagaggtggtcaa

SEQ ID NO: 1090604 - DNA, 25 bp, Homo sapien
aaacgaatcaggcattcccaacttg

SEQ ID NO: 1090605 - DNA, 25 bp, Homo sapien
ccaacttgtaaggatttccaagttg

SEQ ID NO: 1090606 - DNA, 25 bp, Homo sapien
acagcacgaacttcctctgggttgt

SEQ ID NO: 1090607 - DNA, 25 bp, Homo sapien
gaacagcacgaacttcctctgggtt

SEQ ID NO: 1090608 - DNA, 25 bp, Homo sapien
tgggttgtagttccaagggccagat

SEQ ID NO: 1090609 - DNA, 25 bp, Homo sapien
tcctctgggttgtagttccaagggc

SEQ ID NO: 1090610 - DNA, 25 bp, Homo sapien
tcccgttggtcacctagaattgagg

SEQ ID NO: 1090611 - DNA, 25 bp, Homo sapien
cgtacctcagaagtgtgcctgtaga

SEQ ID NO: 1090612 - DNA, 25 bp, Homo sapien
ccgtgtgtactttaggctgtggcca

SEQ ID NO: 1090613 - DNA, 25 bp, Homo sapien
ggaactggcctgaacagctcaagtg

SEQ ID NO: 1090614 - DNA, 25 bp, Homo sapien
tctcatgctagcaaaaggtctcctg

SEQ ID NO: 1090615 - DNA, 25 bp, Homo sapien
aaatgaggccctttcagcgtatggt

SEQ ID NO: 1090616 - DNA, 25 bp, Homo sapien
tgtaaagatcacacggaagccatcc

SEQ ID NO: 1090617 - DNA, 25 bp, Homo sapien
taacatgtaacatagggcctgaatg

SEQ ID NO: 1090618 - DNA, 25 bp, Homo sapien
cagtgacatccaagtatcagtgagc

SEQ ID NO: 1090619 - DNA, 25 bp, Homo sapien
tctgtggtcagctggcaactcctat

SEQ ID NO: 1090620 - DNA, 25 bp, Homo sapien
aatcagcagtactggccaccatggg

SEQ ID NO: 1090621 - DNA, 25 bp, Homo sapien
tagggatctaggtgcctcagcaagg

SEQ ID NO: 1090622 - DNA, 25 bp, Homo sapien
gtttcgcatcttggcccgcgaagta

SEQ ID NO: 1090623 - DNA, 25 bp, Homo sapien
atcttggcccgcgaagtaatgggag

SEQ ID NO: 1090624 - DNA, 25 bp, Homo sapien
ggagtggtttcgcatcttggcccgc

SEQ ID NO: 1090625 - DNA, 25 bp, Homo sapien
agtggtttcgcatcttggcccgcga

SEQ ID NO: 1090626 - DNA, 25 bp, Homo sapien
gagggccgagggtttggaactcgca

SEQ ID NO: 1090627 - DNA, 25 bp, Homo sapien
cagaggtgggccctgcgcgtgcgtg

SEQ ID NO: 1090628 - DNA, 25 bp, Homo sapien
gcgtgctcgcgggagggtgggtccc

SEQ ID NO: 1090629 - DNA, 25 bp, Homo sapien
gggagggtaggcagcgcgcgccccg

SEQ ID NO: 1090630 - DNA, 25 bp, Homo sapien
ccggctgacggggaagggctcagca

SEQ ID NO: 1090631 - DNA, 25 bp, Homo sapien
ggcccggctgacggggaagggctca

SEQ ID NO: 1090632 - DNA, 25 bp, Homo sapien
gcccggctgacggggaagggctcag

SEQ ID NO: 1090633 - DNA, 25 bp, Homo sapien
cccggctgacggggaagggctcagc

SEQ ID NO: 1090634 - DNA, 25 bp, Homo sapien
gcagcgagcggcagctcctcggtga

SEQ ID NO: 1090635 - DNA, 25 bp, Homo sapien
ggcagcgagcggcagctcctcggtg

SEQ ID NO: 1090636 - DNA, 25 bp, Homo sapien
cgcccccgctcccacacgcaacccg

SEQ ID NO: 1090637 - DNA, 25 bp, Homo sapien
ctgttcgatccctctagtattcact

SEQ ID NO: 1090638 - DNA, 25 bp, Homo sapien
gatccctctagtattcactggatga

SEQ ID NO: 1090639 - DNA, 25 bp, Homo sapien
gttcgatccctctagtattcactgg

SEQ ID NO: 1090640 - DNA, 25 bp, Homo sapien
ccctctagtattcactggatgaagc

SEQ ID NO: 1090641 - DNA, 25 bp, Homo sapien
agaattcaatctcagggccgcatta

SEQ ID NO: 1090642 - DNA, 25 bp, Homo sapien
tctagaacagagctaataagtggca

SEQ ID NO: 1090643 - DNA, 25 bp, Homo sapien
gatgctgtttctcaagactaaaaat

SEQ ID NO: 1090644 - DNA, 25 bp, Homo sapien
gggccgcattactccaaagctcaag

SEQ ID NO: 1090645 - DNA, 25 bp, Homo sapien
aatgccatttgtaacatgtaacttc

SEQ ID NO: 1090646 - DNA, 25 bp, Homo sapien
gcaaggcacagggaagcaaatccaa

SEQ ID NO: 1090647 - DNA, 25 bp, Homo sapien
gtaaaagcaaggcacagggaagcaa

SEQ ID NO: 1090648 - DNA, 25 bp, Homo sapien
cacagggaagcaaatccaattaaaa

SEQ ID NO: 1090649 - DNA, 25 bp, Homo sapien
tcccctctcgggtgtatgtgaagat

SEQ ID NO: 1090650 - DNA, 25 bp, Homo sapien
tggcggagtaccgaagattcccctc

SEQ ID NO: 1090651 - DNA, 25 bp, Homo sapien
gctcaggaaagccaataagggaatc

SEQ ID NO: 1090652 - DNA, 25 bp, Homo sapien
cattttctcgcatgtagatgggccc

SEQ ID NO: 1090653 - DNA, 25 bp, Homo sapien
cagggagcaaagcaccaaacttcca

SEQ ID NO: 1090654 - DNA, 25 bp, Homo sapien
ctgtttcgcaaacacagggagcaaa

SEQ ID NO: 1090655 - DNA, 25 bp, Homo sapien
aaagcaccaaacttccataggcctc

SEQ ID NO: 1090656 - DNA, 25 bp, Homo sapien
taggcctcagtgaatttctgtaaag

SEQ ID NO: 1090657 - DNA, 25 bp, Homo sapien
ctctcttccatcagcaggatcacaa

SEQ ID NO: 1090658 - DNA, 25 bp, Homo sapien
gctcatctccaagcttgcaacagga

SEQ ID NO: 1090659 - DNA, 25 bp, Homo sapien
cggaaagacttaatctcctcaagct

SEQ ID NO: 1090660 - DNA, 25 bp, Homo sapien
caagcttgcaacaggaaagatccag

SEQ ID NO: 1090661 - DNA, 25 bp, Homo sapien
ggtcagctcccggaaagacttaatc

SEQ ID NO: 1090662 - DNA, 25 bp, Homo sapien
tcttttcatcactcgaactggtgct

SEQ ID NO: 1090663 - DNA, 25 bp, Homo sapien
tcactcgaactggtgctgtcatctt

SEQ ID NO: 1090664 - DNA, 25 bp, Homo sapien
tgtcatcttccgcaccccagcatca

SEQ ID NO: 1090665 - DNA, 25 bp, Homo sapien
ttcatcactcgaactggtgctgtca

SEQ ID NO: 1090666 - DNA, 25 bp, Homo sapien
caacgtagcattctgtcacaatata

SEQ ID NO: 1090667 - DNA, 25 bp, Homo sapien
ctagatgtcaaaaacaacgtagcat

SEQ ID NO: 1090668 - DNA, 25 bp, Homo sapien
caaaaacaacgtagcattctgtcac

SEQ ID NO: 1090669 - DNA, 25 bp, Homo sapien
tctgtcacaatataaatgctgttaa

SEQ ID NO: 1090670 - DNA, 25 bp, Homo sapien
tgagccctgtcccagagatatctaa

SEQ ID NO: 1090671 - DNA, 25 bp, Homo sapien
gccctgtcccagagatatctaagca

SEQ ID NO: 1090672 - DNA, 25 bp, Homo sapien
cctgtcccagagatatctaagcagt

SEQ ID NO: 1090673 - DNA, 25 bp, Homo sapien
tgtcccagagatatctaagcagttt

SEQ ID NO: 1090674 - DNA, 25 bp, Homo sapien
caaattgttgagtctagaaaaatga

SEQ ID NO: 1090675 - DNA, 25 bp, Homo sapien
taaagaccatcataaataccagccc

SEQ ID NO: 1090676 - DNA, 25 bp, Homo sapien
ccagccctttctaaataccaattag

SEQ ID NO: 1090677 - DNA, 25 bp, Homo sapien
tgagagaaggaaccaaaagtcttac

SEQ ID NO: 1090678 - DNA, 25 bp, Homo sapien
aacaaggcctatgtgggtctggagc

SEQ ID NO: 1090679 - DNA, 25 bp, Homo sapien
agcccagccctctgtcttgcagtta

SEQ ID NO: 1090680 - DNA, 25 bp, Homo sapien
cttgcagttactatgatcaaattcc

SEQ ID NO: 1090681 - DNA, 25 bp, Homo sapien
gagcttgtgcttgacggttttgatg

SEQ ID NO: 1090682 - DNA, 25 bp, Homo sapien
cagcaggtggatagttctaccatcc

SEQ ID NO: 1090683 - DNA, 25 bp, Homo sapien
aggtgacgctacaatccagcaggtg

SEQ ID NO: 1090684 - DNA, 25 bp, Homo sapien
ctgtggagaggtgacgctacaatcc

SEQ ID NO: 1090685 - DNA, 25 bp, Homo sapien
taccatcctgcattatggcttggag

SEQ ID NO: 1090686 - DNA, 25 bp, Homo sapien
tgagtcagaatgcaaacacgttgga

SEQ ID NO: 1090687 - DNA, 25 bp, Homo sapien
gaataagaaccaagtcaagtctgca

SEQ ID NO: 1090688 - DNA, 25 bp, Homo sapien
tgtatctgcatgactaagagaaatc

SEQ ID NO: 1090689 - DNA, 25 bp, Homo sapien
tgcattttctgttctaatgcaggag

SEQ ID NO: 1090690 - DNA, 25 bp, Homo sapien
gagctgctgctctaggctccgaggt

SEQ ID NO: 1090691 - DNA, 25 bp, Homo sapien
taggctccgaggtctcccgtggctt

SEQ ID NO: 1090692 - DNA, 25 bp, Homo sapien
ccgaggtctcccgtggcttcacagc

SEQ ID NO: 1090693 - DNA, 25 bp, Homo sapien
gaagcgctgagctgctgctctaggc

SEQ ID NO: 1090694 - DNA, 25 bp, Homo sapien
tggtgctcaaagctaagtgtgaact

SEQ ID NO: 1090695 - DNA, 25 bp, Homo sapien
taagctatgctaagggaatacaagt

SEQ ID NO: 1090696 - DNA, 25 bp, Homo sapien
tgtgaacttatactgtaagctatgc

SEQ ID NO: 1090697 - DNA, 25 bp, Homo sapien
aacaagcgaactgctttaaggatgc

SEQ ID NO: 1090698 - DNA, 25 bp, Homo sapien
tctttgactcctggcttgagatagc

SEQ ID NO: 1090699 - DNA, 25 bp, Homo sapien
gaagagttcatgtgggtgtctgcca

SEQ ID NO: 1090700 - DNA, 25 bp, Homo sapien
tcgtgtttcaacactggcccatggc

SEQ ID NO: 1090701 - DNA, 25 bp, Homo sapien
tagaactggagtttctcggaagagt

SEQ ID NO: 1090702 - DNA, 25 bp, Homo sapien
ataggaatttaacaagtcccagtct

SEQ ID NO: 1090703 - DNA, 25 bp, Homo sapien
tttaacaagtcccagtcttccacag

SEQ ID NO: 1090704 - DNA, 25 bp, Homo sapien
tcccagtcttccacagcaagacata

SEQ ID NO: 1090705 - DNA, 25 bp, Homo sapien
tcaataggaatttaacaagtcccag

SEQ ID NO: 1090706 - DNA, 25 bp, Homo sapien
ctcagtctcctttactcaaacacta

SEQ ID NO: 1090707 - DNA, 25 bp, Homo sapien
ttactatgctaatgccataggtaaa

SEQ ID NO: 1090708 - DNA, 25 bp, Homo sapien
gtctcctttactcaaacactagagc

SEQ ID NO: 1090709 - DNA, 25 bp, Homo sapien
ctatgctaatgccataggtaaattc

SEQ ID NO: 1090710 - DNA, 25 bp, Homo sapien
tagaaattattacatacttccatag

SEQ ID NO: 1090711 - DNA, 25 bp, Homo sapien
tacagagaaaaccaatcagcactgt

SEQ ID NO: 1090712 - DNA, 25 bp, Homo sapien
gcttttgatatgatcctgggtaaca

SEQ ID NO: 1090713 - DNA, 25 bp, Homo sapien
aatcagcactgtattcgctttttca

SEQ ID NO: 1090714 - DNA, 25 bp, Homo sapien
cagaaatcaagcttttgatatgatc

SEQ ID NO: 1090715 - DNA, 25 bp, Homo sapien
cggcggtcctggttatagtagtaga

SEQ ID NO: 1090716 - DNA, 25 bp, Homo sapien
tgatggtggatataatggatttgga

SEQ ID NO: 1090717 - DNA, 25 bp, Homo sapien
aatgaaggaggaaattttggccgtg

SEQ ID NO: 1090718 - DNA, 25 bp, Homo sapien
tggtggaccaggatgtggaaaccaa

SEQ ID NO: 1090719 - DNA, 25 bp, Homo sapien
ggaagaggcaagtctggtctcaaga

SEQ ID NO: 1090720 - DNA, 25 bp, Homo sapien
ggctccggccatcgccgttgctgcc

SEQ ID NO: 1090721 - DNA, 25 bp, Homo sapien
aacttgagttggaagaggcaagtct

SEQ ID NO: 1090722 - DNA, 25 bp, Homo sapien
ctcaagatggaggtaaaactgctgc

SEQ ID NO: 1090723 - DNA, 25 bp, Homo sapien
gcgtgggcctagcaagtctgaaatc

SEQ ID NO: 1090724 - DNA, 25 bp, Homo sapien
tatttgagggaattgacccatgcag

SEQ ID NO: 1090725 - DNA, 25 bp, Homo sapien
tgctttacctaacagagcccacagt

SEQ ID NO: 1090726 - DNA, 25 bp, Homo sapien
cacttgtctattccctgcctgaggg

SEQ ID NO: 1090727 - DNA, 25 bp, Homo sapien
catgactgaggcaagactctcccga

SEQ ID NO: 1090728 - DNA, 25 bp, Homo sapien
gagtgccctatccaataccccatgg

SEQ ID NO: 1090729 - DNA, 25 bp, Homo sapien
cggaattctgagatcggtgccaaca

SEQ ID NO: 1090730 - DNA, 25 bp, Homo sapien
tcatgtgttttagttcgggctgcca

SEQ ID NO: 1090731 - DNA, 25 bp, Homo sapien
ttattagacatgtgatgtaatgttt

SEQ ID NO: 1090732 - DNA, 25 bp, Homo sapien
attagacatgtgatgtaatgttttc

SEQ ID NO: 1090733 - DNA, 25 bp, Homo sapien
tttcctgatggtgtccatcaaagga

SEQ ID NO: 1090734 - DNA, 25 bp, Homo sapien
ccctttcctgatggtgtccatcaaa

SEQ ID NO: 1090735 - DNA, 25 bp, Homo sapien
tcttctgctatgtttaatgtgccct

SEQ ID NO: 1090736 - DNA, 25 bp, Homo sapien
gcttgaagcgtaccacagttcagtg

SEQ ID NO: 1090737 - DNA, 25 bp, Homo sapien
ttctattgctgtgcctgcaaattca

SEQ ID NO: 1090738 - DNA, 25 bp, Homo sapien
tcagttacatacatgttaggctgct

SEQ ID NO: 1090739 - DNA, 25 bp, Homo sapien
gcaggatgccagtctcaagggaaaa

SEQ ID NO: 1090740 - DNA, 25 bp, Homo sapien
tatttactggtagaactcatgggtc

SEQ ID NO: 1090741 - DNA, 25 bp, Homo sapien
tccttgagggataagaaaggtccag

SEQ ID NO: 1090742 - DNA, 25 bp, Homo sapien
aaaggtccagaggtattagccaggc

SEQ ID NO: 1090743 - DNA, 25 bp, Homo sapien
caaacaaagacgaagggaatctgct

SEQ ID NO: 1090744 - DNA, 25 bp, Homo sapien
tcatggatggcacatacgtgaaaca

SEQ ID NO: 1090745 - DNA, 25 bp, Homo sapien
gacaagccgagtttagccttcatgg

SEQ ID NO: 1090746 - DNA, 25 bp, Homo sapien
ggcatacttgtggatcctaatctcg

SEQ ID NO: 1090747 - DNA, 25 bp, Homo sapien
cggccctcatcgccttggtcaccat

SEQ ID NO: 1090748 - DNA, 25 bp, Homo sapien
tggcaactgtggcggccctcatcgc

SEQ ID NO: 1090749 - DNA, 25 bp, Homo sapien
ggcaactgtggcggccctcatcgcc

SEQ ID NO: 1090750 - DNA, 25 bp, Homo sapien
caggtgtaccatcatgccaccatta

SEQ ID NO: 1090751 - DNA, 25 bp, Homo sapien
aaatcagcacctgattgaaaatgaa

SEQ ID NO: 1090752 - DNA, 25 bp, Homo sapien
taccatcatgccaccattattggtg

SEQ ID NO: 1090753 - DNA, 25 bp, Homo sapien
tattggtgctacaaatctgttaatt

SEQ ID NO: 1090754 - DNA, 25 bp, Homo sapien
ggaaatgacctttaatgacactaca

SEQ ID NO: 1090755 - DNA, 25 bp, Homo sapien
tagaaatgatgcttctgctcaggaa

SEQ ID NO: 1090756 - DNA, 25 bp, Homo sapien
tcaggaatggcccacaaatctgtaa

SEQ ID NO: 1090757 - DNA, 25 bp, Homo sapien
tggatataggccttaagaaatcact

SEQ ID NO: 1090758 - DNA, 25 bp, Homo sapien
gttctcgcagccttttcaaatagca

SEQ ID NO: 1090759 - DNA, 25 bp, Homo sapien
tgaagacccttctatcagtgtgaga

SEQ ID NO: 1090760 - DNA, 25 bp, Homo sapien
taccacttggtaggagagctaagat

SEQ ID NO: 1090761 - DNA, 25 bp, Homo sapien
ctaagatgttgaaggacttgatcac

SEQ ID NO: 1090762 - DNA, 25 bp, Homo sapien
tgtgttgaaactaaacagacgcttc

SEQ ID NO: 1090763 - DNA, 25 bp, Homo sapien
gttcctctgaagaaactccgccggc

SEQ ID NO: 1090764 - DNA, 25 bp, Homo sapien
ggctcccaagcccagtcgtctgtgt

SEQ ID NO: 1090765 - DNA, 25 bp, Homo sapien
agactgcaacctcgtaggctcccaa

SEQ ID NO: 1090766 - DNA, 25 bp, Homo sapien
gcagattctaaaaccccactaaaga

SEQ ID NO: 1090767 - DNA, 25 bp, Homo sapien
gactccgactaccttgacgtgcttg

SEQ ID NO: 1090768 - DNA, 25 bp, Homo sapien
aggggactccgactaccttgacgtg

SEQ ID NO: 1090769 - DNA, 25 bp, Homo sapien
gggactccgactaccttgacgtgct

SEQ ID NO: 1090770 - DNA, 25 bp, Homo sapien
tgttaggggactccgactaccttga

SEQ ID NO: 1090771 - DNA, 25 bp, Homo sapien
attctggattctaggcgttcgaatg

SEQ ID NO: 1090772 - DNA, 25 bp, Homo sapien
tcgtggcctgcttgtaaacctttcc

SEQ ID NO: 1090773 - DNA, 25 bp, Homo sapien
ggattctaggcgttcgaatgacgaa

SEQ ID NO: 1090774 - DNA, 25 bp, Homo sapien
cttcagagattcaatcgtggcctgc

SEQ ID NO: 1090775 - DNA, 25 bp, Homo sapien
gaatattctgacaaggtagagacag

SEQ ID NO: 1090776 - DNA, 25 bp, Homo sapien
gagtctgacatgatccctcattgag

SEQ ID NO: 1090777 - DNA, 25 bp, Homo sapien
gaatatgggtgtttgtaggtgtagg

SEQ ID NO: 1090778 - DNA, 25 bp, Homo sapien
tcattgctatgtacaattatccatg

SEQ ID NO: 1090779 - DNA, 25 bp, Homo sapien
tcaagtgagtatgggcaagaaggat

SEQ ID NO: 1090780 - DNA, 25 bp, Homo sapien
taaagtggaagacaatcaagtgagt

SEQ ID NO: 1090781 - DNA, 25 bp, Homo sapien
gaacttaaagtggaagacaatcaag

SEQ ID NO: 1090782 - DNA, 25 bp, Homo sapien
gaagacaatcaagtgagtatgggca

SEQ ID NO: 1090783 - DNA, 25 bp, Homo sapien
ggtcctgtactcatggagtttataa

SEQ ID NO: 1090784 - DNA, 25 bp, Homo sapien
tgagtgggttgacaaatgggtagaa

SEQ ID NO: 1090785 - DNA, 25 bp, Homo sapien
atttataggcaaagtagttcttgag

SEQ ID NO: 1090786 - DNA, 25 bp, Homo sapien
taggcaaagtagttcttgagtgggt

SEQ ID NO: 1090787 - DNA, 25 bp, Homo sapien
tttgcagttccttggaaagctccca

SEQ ID NO: 1090788 - DNA, 25 bp, Homo sapien
ttttctcgtataggttacttttgca

SEQ ID NO: 1090789 - DNA, 25 bp, Homo sapien
tcgtataggttacttttgcagttcc

SEQ ID NO: 1090790 - DNA, 25 bp, Homo sapien
aagctcccactgttgagttcccata

SEQ ID NO: 1090791 - DNA, 25 bp, Homo sapien
ggcttcaacaagattctctttggtt

SEQ ID NO: 1090792 - DNA, 25 bp, Homo sapien
gaagctccagcatagttttccatct

SEQ ID NO: 1090793 - DNA, 25 bp, Homo sapien
ctttaattcttgtaaggcttcaaca

SEQ ID NO: 1090794 - DNA, 25 bp, Homo sapien
ttatgtcttctacaaccacaactct

SEQ ID NO: 1090795 - DNA, 25 bp, Homo sapien
ttccactcagtgtaaacttctctgg

SEQ ID NO: 1090796 - DNA, 25 bp, Homo sapien
ggcttctgagagtaatttctgagca

SEQ ID NO: 1090797 - DNA, 25 bp, Homo sapien
gagtgtttacgcatcttgttcacag

SEQ ID NO: 1090798 - DNA, 25 bp, Homo sapien
cgactcggttttgggatcacttcta

SEQ ID NO: 1090799 - DNA, 25 bp, Homo sapien
gggtttcaacccagatcttgctagt

SEQ ID NO: 1090800 - DNA, 25 bp, Homo sapien
taagctatctgcctaaggtgtcaca

SEQ ID NO: 1090801 - DNA, 25 bp, Homo sapien
tatgaggcgtttaaccaagagcacc

SEQ ID NO: 1090802 - DNA, 25 bp, Homo sapien
taaataacttctaatcagcaggcac

SEQ ID NO: 1090803 - DNA, 25 bp, Homo sapien
tgaacgcactcaacattggttactg

SEQ ID NO: 1090804 - DNA, 25 bp, Homo sapien
gatctgatgtctgatttgaacgcac

SEQ ID NO: 1090805 - DNA, 25 bp, Homo sapien
gcaataacacatgctaggatcaaat

SEQ ID NO: 1090806 - DNA, 25 bp, Homo sapien
gctgcctgattaagtacatttacga

SEQ ID NO: 1090807 - DNA, 25 bp, Homo sapien
ttgtaaaacaagtcatggccactcc

SEQ ID NO: 1090808 - DNA, 25 bp, Homo sapien
tgggtctagcctgctcttagagaga

SEQ ID NO: 1090809 - DNA, 25 bp, Homo sapien
caaactcacatcctagaagtgggta

SEQ ID NO: 1090810 - DNA, 25 bp, Homo sapien
taactgaattgctactctgggtcta

SEQ ID NO: 1090811 - DNA, 25 bp, Homo sapien
tacggcccattaatgaggcgggagc

SEQ ID NO: 1090812 - DNA, 25 bp, Homo sapien
ggagcagagatgaaacgtttcccgt

SEQ ID NO: 1090813 - DNA, 25 bp, Homo sapien
ctgagcccggatttcagctcggtgc

SEQ ID NO: 1090814 - DNA, 25 bp, Homo sapien
gctttaatgtgaagaccagggctct

SEQ ID NO: 1090815 - DNA, 25 bp, Homo sapien
ttttgtgggtctgtacaaacgtgcc

SEQ ID NO: 1090816 - DNA, 25 bp, Homo sapien
tgccgactggcagcgagccgctctt

SEQ ID NO: 1090817 - DNA, 25 bp, Homo sapien
tacaaacgtgccgactggcagcgag

SEQ ID NO: 1090818 - DNA, 25 bp, Homo sapien
tctgtacaaacgtgccgactggcag

SEQ ID NO: 1090819 - DNA, 25 bp, Homo sapien
tctttgaacggcagagacaggccca

SEQ ID NO: 1090820 - DNA, 25 bp, Homo sapien
ggcaccatgggaaaatctagcacag

SEQ ID NO: 1090821 - DNA, 25 bp, Homo sapien
tgtctgcaaaggaacggcaccatgg

SEQ ID NO: 1090822 - DNA, 25 bp, Homo sapien
tagggctctccgaatcctctgtctg

SEQ ID NO: 1090823 - DNA, 25 bp, Homo sapien
tgggtgatagcaaccgtatggcgct

SEQ ID NO: 1090824 - DNA, 25 bp, Homo sapien
tagtaacttcatctgactgacatgg

SEQ ID NO: 1090825 - DNA, 25 bp, Homo sapien
tattcacagtgaaatccatcaccct

SEQ ID NO: 1090826 - DNA, 25 bp, Homo sapien
gaagtttagaggtgtccttggcata

SEQ ID NO: 1090827 - DNA, 25 bp, Homo sapien
caaactcgttgataaggcctccaag

SEQ ID NO: 1090828 - DNA, 25 bp, Homo sapien
tatggagacctagcttgtcccaggc

SEQ ID NO: 1090829 - DNA, 25 bp, Homo sapien
tgggcccagggtaaacgctcgatta

SEQ ID NO: 1090830 - DNA, 25 bp, Homo sapien
tctgggctgacgatacaaactggaa

SEQ ID NO: 1090831 - DNA, 25 bp, Homo sapien
catgtatagtctaagctcaggctcc

SEQ ID NO: 1090832 - DNA, 25 bp, Homo sapien
gatattataaagagctccccaggca

SEQ ID NO: 1090833 - DNA, 25 bp, Homo sapien
tacctcgggtactttgggctctgcc

SEQ ID NO: 1090834 - DNA, 25 bp, Homo sapien
cacactgagctgacctatctaagga

SEQ ID NO: 1090835 - DNA, 25 bp, Homo sapien
ggttgctgtttatacacccattgtg

SEQ ID NO: 1090836 - DNA, 25 bp, Homo sapien
tactacaccaccatggttgctgttt

SEQ ID NO: 1090837 - DNA, 25 bp, Homo sapien
tgtagaaatttgagtcaatgaaacc

SEQ ID NO: 1090838 - DNA, 25 bp, Homo sapien
ggactactacaccaccatggttgct

SEQ ID NO: 1090839 - DNA, 25 bp, Homo sapien
cacggtctgggcacttgtataatta

SEQ ID NO: 1090840 - DNA, 25 bp, Homo sapien
tgatatgaggagctcaagtgcccgg

SEQ ID NO: 1090841 - DNA, 25 bp, Homo sapien
cactgactggtcttgaggccacaac

SEQ ID NO: 1090842 - DNA, 25 bp, Homo sapien
ttccacggaggcatgatttagaccc

SEQ ID NO: 1090843 - DNA, 25 bp, Homo sapien
caagaatcaggccaaagaagtcagc

SEQ ID NO: 1090844 - DNA, 25 bp, Homo sapien
taggcctcaggttagccttcagccg

SEQ ID NO: 1090845 - DNA, 25 bp, Homo sapien
ggacatccgtgtggctatgcatagc

SEQ ID NO: 1090846 - DNA, 25 bp, Homo sapien
tgatgcagggtgataaggacatccg

SEQ ID NO: 1090847 - DNA, 25 bp, Homo sapien
atcaagtgtttaggcctcacccggg

SEQ ID NO: 1090848 - DNA, 25 bp, Homo sapien
gttggacaggccactctagaggtca

SEQ ID NO: 1090849 - DNA, 25 bp, Homo sapien
catctgtcggtccacacgcttggga

SEQ ID NO: 1090850 - DNA, 25 bp, Homo sapien
taggcatgaattggactgacccagc

SEQ ID NO: 1090851 - DNA, 25 bp, Homo sapien
caagcaaagctcctcgttgtgcagg

SEQ ID NO: 1090852 - DNA, 25 bp, Homo sapien
caaggtctgcctgggtgaactcaaa

SEQ ID NO: 1090853 - DNA, 25 bp, Homo sapien
caagggtcaagtgcacaggatccat

SEQ ID NO: 1090854 - DNA, 25 bp, Homo sapien
gattataaggaaacagacagcgcaa

SEQ ID NO: 1090855 - DNA, 25 bp, Homo sapien
cagagccagccatagacagaagcgg

SEQ ID NO: 1090856 - DNA, 25 bp, Homo sapien
gccatagacagaagcggtcatcata

SEQ ID NO: 1090857 - DNA, 25 bp, Homo sapien
gacagaagcggtcatcatatgccaa

SEQ ID NO: 1090858 - DNA, 25 bp, Homo sapien
gaagcggtcatcatatgccaagaga

SEQ ID NO: 1090859 - DNA, 25 bp, Homo sapien
tctcctgtattcctgccctgtttct

SEQ ID NO: 1090860 - DNA, 25 bp, Homo sapien
tgtcagctttccacctttctgtgtg

SEQ ID NO: 1090861 - DNA, 25 bp, Homo sapien
ctctctcctgtattcctgccctgtt

SEQ ID NO: 1090862 - DNA, 25 bp, Homo sapien
tttctgtgtgatccttcacccctct

SEQ ID NO: 1090863 - DNA, 25 bp, Homo sapien
tgtctgagggctcttgggaaatctt

SEQ ID NO: 1090864 - DNA, 25 bp, Homo sapien
ctggaggctatgaaggtcatgccct

SEQ ID NO: 1090865 - DNA, 25 bp, Homo sapien
ggaaatcttgtctttggcccatctg

SEQ ID NO: 1090866 - DNA, 25 bp, Homo sapien
ctttgggaacgggaactgagcagag

SEQ ID NO: 1090867 - DNA, 25 bp, Homo sapien
caagtggacaggttggaggcgggag

SEQ ID NO: 1090868 - DNA, 25 bp, Homo sapien
aacacaagtggacaggttggaggcg

SEQ ID NO: 1090869 - DNA, 25 bp, Homo sapien
tggacaggttggaggcgggagaaac

SEQ ID NO: 1090870 - DNA, 25 bp, Homo sapien
cacaagtggacaggttggaggcggg

SEQ ID NO: 1090871 - DNA, 25 bp, Homo sapien
tggctggccctctttcctgatggag

SEQ ID NO: 1090872 - DNA, 25 bp, Homo sapien
atggaggacctgttgagggagcact

SEQ ID NO: 1090873 - DNA, 25 bp, Homo sapien
tctttcctgatggaggacctgttga

SEQ ID NO: 1090874 - DNA, 25 bp, Homo sapien
agcactgctcccctgaccggaatga

SEQ ID NO: 1090875 - DNA, 25 bp, Homo sapien
ttgctagtccaaagcttaggcacac

SEQ ID NO: 1090876 - DNA, 25 bp, Homo sapien
agatgcaggggaacttcacctccag

SEQ ID NO: 1090877 - DNA, 25 bp, Homo sapien
ggcaggtgagccatatcagctcctc

SEQ ID NO: 1090878 - DNA, 25 bp, Homo sapien
tgcccagatgcaggggaacttcacc

SEQ ID NO: 1090879 - DNA, 25 bp, Homo sapien
cccagatgcaggggaacttcacctc

SEQ ID NO: 1090880 - DNA, 25 bp, Homo sapien
gagttgatggaactgggacctcctg

SEQ ID NO: 1090881 - DNA, 25 bp, Homo sapien
tcacccctctttaagaggcctagag

SEQ ID NO: 1090882 - DNA, 25 bp, Homo sapien
aggagttgatggaactgggacctcc

SEQ ID NO: 1090883 - DNA, 25 bp, Homo sapien
gcctggaaatagattcagtgaggag

SEQ ID NO: 1090884 - DNA, 25 bp, Homo sapien
tgtttcggcccatagcatctcactg

SEQ ID NO: 1090885 - DNA, 25 bp, Homo sapien
agacacagctttctggcgaggacct

SEQ ID NO: 1090886 - DNA, 25 bp, Homo sapien
gatgtcccggtatgttgagtcctgg

SEQ ID NO: 1090887 - DNA, 25 bp, Homo sapien
taaaccaaaccaggtcagtgccagc

SEQ ID NO: 1090888 - DNA, 25 bp, Homo sapien
atgttgccgcgcgcagggcctgctg

SEQ ID NO: 1090889 - DNA, 25 bp, Homo sapien
atctgatagcctcaagacctccacc

SEQ ID NO: 1090890 - DNA, 25 bp, Homo sapien
ctccacctggaccccgccatgttgc

SEQ ID NO: 1090891 - DNA, 25 bp, Homo sapien
tagcctcaagacctccacctggacc

SEQ ID NO: 1090892 - DNA, 25 bp, Homo sapien
cgccttgcgggcccggacgccaatg

SEQ ID NO: 1090893 - DNA, 25 bp, Homo sapien
cccaaggccgagctgcccggagcca

SEQ ID NO: 1090894 - DNA, 25 bp, Homo sapien
cggagccagctagcgcccgccttgc

SEQ ID NO: 1090895 - DNA, 25 bp, Homo sapien
ttgcgggcccggacgccaatgccat

SEQ ID NO: 1090896 - DNA, 25 bp, Homo sapien
gccagccagggcacgaagtgcatct

SEQ ID NO: 1090897 - DNA, 25 bp, Homo sapien
agaaccttgggtccttgtagccgcg

SEQ ID NO: 1090898 - DNA, 25 bp, Homo sapien
aggctccgacttccgcgtggagcgc

SEQ ID NO: 1090899 - DNA, 25 bp, Homo sapien
cctggtctttgtacagcggatgctc

SEQ ID NO: 1090900 - DNA, 25 bp, Homo sapien
tcggggtcggtgctggttagaggaa

SEQ ID NO: 1090901 - DNA, 25 bp, Homo sapien
tagaggaacacggtcccttgccgcc

SEQ ID NO: 1090902 - DNA, 25 bp, Homo sapien
ctggttagaggaacacggtcccttg

SEQ ID NO: 1090903 - DNA, 25 bp, Homo sapien
ccaaagccacagagggtcggggtcg

SEQ ID NO: 1090904 - DNA, 25 bp, Homo sapien
tgatctgtccctagtgagagtgaca

SEQ ID NO: 1090905 - DNA, 25 bp, Homo sapien
aaagggataaacaagcttctccatg

SEQ ID NO: 1090906 - DNA, 25 bp, Homo sapien
gccccatccctatcctgatttgagg

SEQ ID NO: 1090907 - DNA, 25 bp, Homo sapien
tactgttctagatagacaggctggt

SEQ ID NO: 1090908 - DNA, 25 bp, Homo sapien
tcacacagtggctaagacctctgag

SEQ ID NO: 1090909 - DNA, 25 bp, Homo sapien
ggatttgttctgtgacacctgaggg

SEQ ID NO: 1090910 - DNA, 25 bp, Homo sapien
ggaatgaccacctacttcaggatgg

SEQ ID NO: 1090911 - DNA, 25 bp, Homo sapien
taggtgtgggtctaggcataagccc

SEQ ID NO: 1090912 - DNA, 25 bp, Homo sapien
agagatcacattcagaacgcactcg

SEQ ID NO: 1090913 - DNA, 25 bp, Homo sapien
aaggctaagcactttctcgggaagg

SEQ ID NO: 1090914 - DNA, 25 bp, Homo sapien
ctcgggaaggccttctattaacttg

SEQ ID NO: 1090915 - DNA, 25 bp, Homo sapien
aacgcactcgtcttggttctctatg

SEQ ID NO: 1090916 - DNA, 25 bp, Homo sapien
ctgtattaggttgtccacgatgacc

SEQ ID NO: 1090917 - DNA, 25 bp, Homo sapien
ctcggttccaggtagcagaaaacgt

SEQ ID NO: 1090918 - DNA, 25 bp, Homo sapien
ccaggtagcagaaaacgtggagttt

SEQ ID NO: 1090919 - DNA, 25 bp, Homo sapien
gagaatctgagatttacacagctgt

SEQ ID NO: 1090920 - DNA, 25 bp, Homo sapien
gcagatgtcctgaaatcccagatca

SEQ ID NO: 1090921 - DNA, 25 bp, Homo sapien
gccaggaagtctatacacaaatcct

SEQ ID NO: 1090922 - DNA, 25 bp, Homo sapien
aaatcctgaccaagcagatgtcctg

SEQ ID NO: 1090923 - DNA, 25 bp, Homo sapien
ccagatcattccgtagctggttttc

SEQ ID NO: 1090924 - DNA, 25 bp, Homo sapien
gatccttagtgctcagtcgggctcc

SEQ ID NO: 1090925 - DNA, 25 bp, Homo sapien
gtgggcagaggatccttagtgctca

SEQ ID NO: 1090926 - DNA, 25 bp, Homo sapien
catgaagatcgatgatgggtgatat

SEQ ID NO: 1090927 - DNA, 25 bp, Homo sapien
cttagtagcttcaatctcctctctg

SEQ ID NO: 1090928 - DNA, 25 bp, Homo sapien
ttggctttgtccagtaagtacaggg

SEQ ID NO: 1090929 - DNA, 25 bp, Homo sapien
ttgtccagtaagtacagggtatggg

SEQ ID NO: 1090930 - DNA, 25 bp, Homo sapien
gaaggcggtgtggtcgtaaattggc

SEQ ID NO: 1090931 - DNA, 25 bp, Homo sapien
gatctggttgaaggcggtgtggtcg

SEQ ID NO: 1090932 - DNA, 25 bp, Homo sapien
gtccacccaggccaaattcttgaca

SEQ ID NO: 1090933 - DNA, 25 bp, Homo sapien
gaaacactaggaaatggaagacacg

SEQ ID NO: 1090934 - DNA, 25 bp, Homo sapien
ttgacaccctcgttacagtccaggt

SEQ ID NO: 1090935 - DNA, 25 bp, Homo sapien
tctctttttgatcactgggagacac

SEQ ID NO: 1090936 - DNA, 25 bp, Homo sapien
tctctccagggtgcatattactgcc

SEQ ID NO: 1090937 - DNA, 25 bp, Homo sapien
aaggagcagcacctacaaaggccag

SEQ ID NO: 1090938 - DNA, 25 bp, Homo sapien
cacttatgctaaacctggaaggaca

SEQ ID NO: 1090939 - DNA, 25 bp, Homo sapien
gaagaggttctacgcacagcaatgt

SEQ ID NO: 1090940 - DNA, 25 bp, Homo sapien
aagaacacggttcattaggatcctg

SEQ ID NO: 1090941 - DNA, 25 bp, Homo sapien
gatcctgctactaggtttaacggca

SEQ ID NO: 1090942 - DNA, 25 bp, Homo sapien
aacaaagattggattgaagtaaatc

SEQ ID NO: 1090943 - DNA, 25 bp, Homo sapien
tcagtgcctggacagtaactttctt

SEQ ID NO: 1090944 - DNA, 25 bp, Homo sapien
ctggcttgaaaccaactgggccaac

SEQ ID NO: 1090945 - DNA, 25 bp, Homo sapien
tgcaaatatagagctaaaaactttc

SEQ ID NO: 1090946 - DNA, 25 bp, Homo sapien
cttgaaaccaactgggccaacaggt

SEQ ID NO: 1090947 - DNA, 25 bp, Homo sapien
ctctggcttgaaaccaactgggcca

SEQ ID NO: 1090948 - DNA, 25 bp, Homo sapien
tttcaggattcagaggggtcctccg

SEQ ID NO: 1090949 - DNA, 25 bp, Homo sapien
ttcaggattcagaggggtcctccgc

SEQ ID NO: 1090950 - DNA, 25 bp, Homo sapien
gtcagcgagagcagcaggccaaacg

SEQ ID NO: 1090951 - DNA, 25 bp, Homo sapien
tctttattgtcagcgagagcagcag

SEQ ID NO: 1090952 - DNA, 25 bp, Homo sapien
attgtcagcgagagcagcaggccaa

SEQ ID NO: 1090953 - DNA, 25 bp, Homo sapien
ttattgtcagcgagagcagcaggcc

SEQ ID NO: 1090954 - DNA, 25 bp, Homo sapien
agccccaggtcagctgccctaggag

SEQ ID NO: 1090955 - DNA, 25 bp, Homo sapien
caccaacagcatggaagaaacttga

SEQ ID NO: 1090956 - DNA, 25 bp, Homo sapien
gcagggctcagagtacccggagccc

SEQ ID NO: 1090957 - DNA, 25 bp, Homo sapien
tagagaaaaggactagctagggatc

SEQ ID NO: 1090958 - DNA, 25 bp, Homo sapien
tgtactttgcagctcccttgacaca

SEQ ID NO: 1090959 - DNA, 25 bp, Homo sapien
gctgtcatgacacacgagcttccca

SEQ ID NO: 1090960 - DNA, 25 bp, Homo sapien
gacacaaaagtgtagttgggttcca

SEQ ID NO: 1090961 - DNA, 25 bp, Homo sapien
gggttccaggctccacaacttagca

SEQ ID NO: 1090962 - DNA, 25 bp, Homo sapien
agctggtagacatttgggatttgga

SEQ ID NO: 1090963 - DNA, 25 bp, Homo sapien
ttcctctcctgcgttgaatgaggga

SEQ ID NO: 1090964 - DNA, 25 bp, Homo sapien
gggagtgaggacgaagctggtagac

SEQ ID NO: 1090965 - DNA, 25 bp, Homo sapien
tctcctgcgttgaatgagggagtga

SEQ ID NO: 1090966 - DNA, 25 bp, Homo sapien
tctcgtggggtttcgctatccagca

SEQ ID NO: 1090967 - DNA, 25 bp, Homo sapien
tgctggaagttcctctcgtggggtt

SEQ ID NO: 1090968 - DNA, 25 bp, Homo sapien
tacgttcacaatgggaatgtcacca

SEQ ID NO: 1090969 - DNA, 25 bp, Homo sapien
ttcatttccaaaagtctgctgctgg

SEQ ID NO: 1090970 - DNA, 25 bp, Homo sapien
aggaaggcaggtcacggggcccagc

SEQ ID NO: 1090971 - DNA, 25 bp, Homo sapien
ccagcctgggaagagcgcctgctgt

SEQ ID NO: 1090972 - DNA, 25 bp, Homo sapien
gctgtgtgctgtgctacccctcagc

SEQ ID NO: 1090973 - DNA, 25 bp, Homo sapien
gggcccagcctgggaagagcgcctg

SEQ ID NO: 1090974 - DNA, 25 bp, Homo sapien
ttgggtggatgggatatccatccga

SEQ ID NO: 1090975 - DNA, 25 bp, Homo sapien
tgggatatccatccgatacctgtgc

SEQ ID NO: 1090976 - DNA, 25 bp, Homo sapien
agagccatgggatcagggtgcctag

SEQ ID NO: 1090977 - DNA, 25 bp, Homo sapien
gagtcaggcacagacgagagccatg

SEQ ID NO: 1090978 - DNA, 25 bp, Homo sapien
gaggcattcccagacgacatttagg

SEQ ID NO: 1090979 - DNA, 25 bp, Homo sapien
tgccgtgcacggactaagagcagca

SEQ ID NO: 1090980 - DNA, 25 bp, Homo sapien
tgctatggatgctgacttgcacgac

SEQ ID NO: 1090981 - DNA, 25 bp, Homo sapien
cataggctgtgaggaggttagcacc

SEQ ID NO: 1090982 - DNA, 25 bp, Homo sapien
gggagtcgctatcggccaggagggc

SEQ ID NO: 1090983 - DNA, 25 bp, Homo sapien
tctatggggagtcgctatcggccag

SEQ ID NO: 1090984 - DNA, 25 bp, Homo sapien
ttttctatggggagtcgctatcggc

SEQ ID NO: 1090985 - DNA, 25 bp, Homo sapien
ctctgttttctatggggagtcgcta

SEQ ID NO: 1090986 - DNA, 25 bp, Homo sapien
tgttcttgtggagtcgcgatggcct

SEQ ID NO: 1090987 - DNA, 25 bp, Homo sapien
gagggaaggtatccatctcacttta

SEQ ID NO: 1090988 - DNA, 25 bp, Homo sapien
gcaaacacattttggtccgctggaa

SEQ ID NO: 1090989 - DNA, 25 bp, Homo sapien
gattacaaaatgcaaggtgacttct

SEQ ID NO: 1090990 - DNA, 25 bp, Homo sapien
ggacaccgacaaccaaacagacgtg

SEQ ID NO: 1090991 - DNA, 25 bp, Homo sapien
catctgcctgaaaaaagactttgtg

SEQ ID NO: 1090992 - DNA, 25 bp, Homo sapien
tcttgccctggaagacacccgaatt

SEQ ID NO: 1090993 - DNA, 25 bp, Homo sapien
caacaagcccgacagtggagcctgt

SEQ ID NO: 1090994 - DNA, 25 bp, Homo sapien
gcatcagcgtcatcgtgtgcaccgg

SEQ ID NO: 1090995 - DNA, 25 bp, Homo sapien
taaatggaagcttctagcaagcccc

SEQ ID NO: 1090996 - DNA, 25 bp, Homo sapien
gctagtctaggtgtgagagcccaca

SEQ ID NO: 1090997 - DNA, 25 bp, Homo sapien
ggtggcatgcactgttcccaggaca

SEQ ID NO: 1090998 - DNA, 25 bp, Homo sapien
caggcagccggttctgatttctctg

SEQ ID NO: 1090999 - DNA, 25 bp, Homo sapien
gctctgaagccgcagctgtactttg

SEQ ID NO: 1091000 - DNA, 25 bp, Homo sapien
tctgaagccgcagctgtactttgca

SEQ ID NO: 1091001 - DNA, 25 bp, Homo sapien
cctccaggcagccggttctgatttc

SEQ ID NO: 1091002 - DNA, 25 bp, Homo sapien
aaatgatggacatctggccgggcac

SEQ ID NO: 1091003 - DNA, 25 bp, Homo sapien
taaaaaatgatggacatctggccgg

SEQ ID NO: 1091004 - DNA, 25 bp, Homo sapien
tgtgctttggagtgttaaaaaatga

SEQ ID NO: 1091005 - DNA, 25 bp, Homo sapien
tgttaaaaaatgatggacatctggc

SEQ ID NO: 1091006 - DNA, 25 bp, Homo sapien
cagtggtcgcagaattagcttgggc

SEQ ID NO: 1091007 - DNA, 25 bp, Homo sapien
aacagaatgtactgcgcggtgtgca

SEQ ID NO: 1091008 - DNA, 25 bp, Homo sapien
tagcttgggcgcactccttgaatgg

SEQ ID NO: 1091009 - DNA, 25 bp, Homo sapien
gattgcaccgcaaaccaagaaggtt

SEQ ID NO: 1091010 - DNA, 25 bp, Homo sapien
tgttggctccgttcctgaggtgaca

SEQ ID NO: 1091011 - DNA, 25 bp, Homo sapien
tctcagagttgcagcccttgggtga

SEQ ID NO: 1091012 - DNA, 25 bp, Homo sapien
gacttggttagtcagctgcagcctg

SEQ ID NO: 1091013 - DNA, 25 bp, Homo sapien
gatattgcctacatccagcagccct

SEQ ID NO: 1091014 - DNA, 25 bp, Homo sapien
cagccggtccaacgtaagtctgctt

SEQ ID NO: 1091015 - DNA, 25 bp, Homo sapien
gacttgtgggtttccactgttctac

SEQ ID NO: 1091016 - DNA, 25 bp, Homo sapien
aacgaattaatcaccccgacttgtg

SEQ ID NO: 1091017 - DNA, 25 bp, Homo sapien
caatgattaatccagtgccgcctgg

SEQ ID NO: 1091018 - DNA, 25 bp, Homo sapien
tgggttccaagaccaagtccatccc

SEQ ID NO: 1091019 - DNA, 25 bp, Homo sapien
tagtgatgatccctgagtgcagaaa

SEQ ID NO: 1091020 - DNA, 25 bp, Homo sapien
aatggagttttctccggcttcccag

SEQ ID NO: 1091021 - DNA, 25 bp, Homo sapien
gcttctcaggagtgcctgctcccat

SEQ ID NO: 1091022 - DNA, 25 bp, Homo sapien
aaatatcagcccgacatggtcgtgg

SEQ ID NO: 1091023 - DNA, 25 bp, Homo sapien
atcagcccgacatggtcgtgggcgc

SEQ ID NO: 1091024 - DNA, 25 bp, Homo sapien
atacaaatatcagcccgacatggtc

SEQ ID NO: 1091025 - DNA, 25 bp, Homo sapien
aatatcagcccgacatggtcgtggg

SEQ ID NO: 1091026 - DNA, 25 bp, Homo sapien
cacagtctgtggtacatgtgggcat

SEQ ID NO: 1091027 - DNA, 25 bp, Homo sapien
tgacctcaggtctcgagttctgctc

SEQ ID NO: 1091028 - DNA, 25 bp, Homo sapien
tcttcaccctgtggtagagtgggct

SEQ ID NO: 1091029 - DNA, 25 bp, Homo sapien
tcattgtgacgatttattgtaggca

SEQ ID NO: 1091030 - DNA, 25 bp, Homo sapien
gtaaccgacccttgtacagcttcac

SEQ ID NO: 1091031 - DNA, 25 bp, Homo sapien
tggtaaccgacccttgtacagcttc

SEQ ID NO: 1091032 - DNA, 25 bp, Homo sapien
ggtaaccgacccttgtacagcttca

SEQ ID NO: 1091033 - DNA, 25 bp, Homo sapien
gaggccattccagcatctagctcag

SEQ ID NO: 1091034 - DNA, 25 bp, Homo sapien
cggcatgacatggatcaggatagac

SEQ ID NO: 1091035 - DNA, 25 bp, Homo sapien
tcaaattccttagcccttgtagcag

SEQ ID NO: 1091036 - DNA, 25 bp, Homo sapien
agaatcctgtaataacacgcctcgg

SEQ ID NO: 1091037 - DNA, 25 bp, Homo sapien
agatgtctctggtagcaagttaagg

SEQ ID NO: 1091038 - DNA, 25 bp, Homo sapien
gatgtctctggtagcaagttaaggg

SEQ ID NO: 1091039 - DNA, 25 bp, Homo sapien
gagatgtctctggtagcaagttaag

SEQ ID NO: 1091040 - DNA, 25 bp, Homo sapien
cttccacgtccaggtttccaaggcg

SEQ ID NO: 1091041 - DNA, 25 bp, Homo sapien
gtccaggtttccaaggcgggcagta

SEQ ID NO: 1091042 - DNA, 25 bp, Homo sapien
caaggcgggcagtacctgtctggtc

SEQ ID NO: 1091043 - DNA, 25 bp, Homo sapien
cagtacctgtctggtcccgtggcat

SEQ ID NO: 1091044 - DNA, 25 bp, Homo sapien
tgcccttcactagtattgcagccgg

SEQ ID NO: 1091045 - DNA, 25 bp, Homo sapien
agtaggcctgcttacaacaggaata

SEQ ID NO: 1091046 - DNA, 25 bp, Homo sapien
ttcactagtattgcagccggccact

SEQ ID NO: 1091047 - DNA, 25 bp, Homo sapien
aatattagctattgattgctggccc

SEQ ID NO: 1091048 - DNA, 25 bp, Homo sapien
tggcctgatccttcctggccatgat

SEQ ID NO: 1091049 - DNA, 25 bp, Homo sapien
ccatgatgctgaaccgctcaggctg

SEQ ID NO: 1091050 - DNA, 25 bp, Homo sapien
gccaaggggaaagggtatctctctg

SEQ ID NO: 1091051 - DNA, 25 bp, Homo sapien
gccatgatgctgaaccgctcaggct

SEQ ID NO: 1091052 - DNA, 25 bp, Homo sapien
cgtgtctggtggacccaccgaggta

SEQ ID NO: 1091053 - DNA, 25 bp, Homo sapien
tgggtgtccggtgcagattagacca

SEQ ID NO: 1091054 - DNA, 25 bp, Homo sapien
cgaggtaccatgcttcatctgtgtg

SEQ ID NO: 1091055 - DNA, 25 bp, Homo sapien
tcctgattgaggctgcttgccggca

SEQ ID NO: 1091056 - DNA, 25 bp, Homo sapien
ttcccactggcgttctgtccagttg

SEQ ID NO: 1091057 - DNA, 25 bp, Homo sapien
atcagcgggcctttcccactggcgt

SEQ ID NO: 1091058 - DNA, 25 bp, Homo sapien
ttctgtccagttgggaattctttct

SEQ ID NO: 1091059 - DNA, 25 bp, Homo sapien
gccctgcacccatcagcgggccttt

SEQ ID NO: 1091060 - DNA, 25 bp, Homo sapien
gggtcttgtgctccaccttgtattc

SEQ ID NO: 1091061 - DNA, 25 bp, Homo sapien
atgggatgccgggaggccccatccc

SEQ ID NO: 1091062 - DNA, 25 bp, Homo sapien
tggccactaactctctgccttgttg

SEQ ID NO: 1091063 - DNA, 25 bp, Homo sapien
caacattccccccaacgatgggatg

SEQ ID NO: 1091064 - DNA, 25 bp, Homo sapien
tatgcctcacgttgtgctgggtctc

SEQ ID NO: 1091065 - DNA, 25 bp, Homo sapien
ccgtattctagatcctgctaataca

SEQ ID NO: 1091066 - DNA, 25 bp, Homo sapien
tagatcctgctaatacacctgctgt

SEQ ID NO: 1091067 - DNA, 25 bp, Homo sapien
tacacctgctgtatgcctcacgttg

SEQ ID NO: 1091068 - DNA, 25 bp, Homo sapien
gatagtatcttgcagggaatgcccc

SEQ ID NO: 1091069 - DNA, 25 bp, Homo sapien
tgttgagtgagcatgaaaggtccct

SEQ ID NO: 1091070 - DNA, 25 bp, Homo sapien
tatccatctcctagggtgggactgg

SEQ ID NO: 1091071 - DNA, 25 bp, Homo sapien
tctcttggaagcaccgctctgaggc

SEQ ID NO: 1091072 - DNA, 25 bp, Homo sapien
tcagcacgtggtcctttacctggag

SEQ ID NO: 1091073 - DNA, 25 bp, Homo sapien
tctggctgggcaccttacctaaggg

SEQ ID NO: 1091074 - DNA, 25 bp, Homo sapien
tgaacccgtaccttggctgagtctg

SEQ ID NO: 1091075 - DNA, 25 bp, Homo sapien
gggaatcttaggacgtcagcacgtg

SEQ ID NO: 1091076 - DNA, 25 bp, Homo sapien
ctgctgcgtgcagctagccctgtgc

SEQ ID NO: 1091077 - DNA, 25 bp, Homo sapien
tcctgctgcgtgcagctagccctgt

SEQ ID NO: 1091078 - DNA, 25 bp, Homo sapien
gggttgtctcgattttgacatcttg

SEQ ID NO: 1091079 - DNA, 25 bp, Homo sapien
taggcagggttgtctcgattttgac

SEQ ID NO: 1091080 - DNA, 25 bp, Homo sapien
tgtctcgattttgacatcttgtggg

SEQ ID NO: 1091081 - DNA, 25 bp, Homo sapien
ctcgattttgacatcttgtgggtag

SEQ ID NO: 1091082 - DNA, 25 bp, Homo sapien
tatctgttatcttgtgcatcttctg

SEQ ID NO: 1091083 - DNA, 25 bp, Homo sapien
tggcctttacaacactgattaagcc

SEQ ID NO: 1091084 - DNA, 25 bp, Homo sapien
tctccccacttatggtaaaagtatc

SEQ ID NO: 1091085 - DNA, 25 bp, Homo sapien
ccacttatggtaaaagtatctgtta

SEQ ID NO: 1091086 - DNA, 25 bp, Homo sapien
gctccttctgggtcagtcctttcca

SEQ ID NO: 1091087 - DNA, 25 bp, Homo sapien
attcagctgtcattggaatccaggc

SEQ ID NO: 1091088 - DNA, 25 bp, Homo sapien
gaatccaggcttttgcaatccaagg

SEQ ID NO: 1091089 - DNA, 25 bp, Homo sapien
gcaatccaaggctgagctttgcccc

SEQ ID NO: 1091090 - DNA, 25 bp, Homo sapien
tgtcagtcttaaggggctgctgtac

SEQ ID NO: 1091091 - DNA, 25 bp, Homo sapien
ctgtactttatcctgctctggccta

SEQ ID NO: 1091092 - DNA, 25 bp, Homo sapien
ccaggctttcgagggagtgtcccca

SEQ ID NO: 1091093 - DNA, 25 bp, Homo sapien
gggttgctgcgtgggagggtagatc

SEQ ID NO: 1091094 - DNA, 25 bp, Homo sapien
cgtgaagggcgagctttttcttcct

SEQ ID NO: 1091095 - DNA, 25 bp, Homo sapien
ggatatccgagactgtagcatctgg

SEQ ID NO: 1091096 - DNA, 25 bp, Homo sapien
ccttaaccaaggatatccgagactg

SEQ ID NO: 1091097 - DNA, 25 bp, Homo sapien
ccaagtatctggacgtgaagggcga

SEQ ID NO: 1091098 - DNA, 25 bp, Homo sapien
tgtgtcacgtaagaggaactccagc

SEQ ID NO: 1091099 - DNA, 25 bp, Homo sapien
gtgatagcccggcacaggcaaatgc

SEQ ID NO: 1091100 - DNA, 25 bp, Homo sapien
cagctgaccagcgtgttgcagggca

SEQ ID NO: 1091101 - DNA, 25 bp, Homo sapien
ccagctctgttattgggcctgtgag

SEQ ID NO: 1091102 - DNA, 25 bp, Homo sapien
caggcatgcatttccagctctgcct

SEQ ID NO: 1091103 - DNA, 25 bp, Homo sapien
ggcatgcatttccagctctgccttc

SEQ ID NO: 1091104 - DNA, 25 bp, Homo sapien
catgcatttccagctctgccttcac

SEQ ID NO: 1091105 - DNA, 25 bp, Homo sapien
gcatgcatttccagctctgccttca

SEQ ID NO: 1091106 - DNA, 25 bp, Homo sapien
tgcagttagtattccaaatgtcaag

SEQ ID NO: 1091107 - DNA, 25 bp, Homo sapien
ggatttgaaaaccttactctgttga

SEQ ID NO: 1091108 - DNA, 25 bp, Homo sapien
tgctgatgctgcagcacgccaaagc

SEQ ID NO: 1091109 - DNA, 25 bp, Homo sapien
agttccccttgacttgcgctgagca

SEQ ID NO: 1091110 - DNA, 25 bp, Homo sapien
ggcagcgcactttgcttggttggct

SEQ ID NO: 1091111 - DNA, 25 bp, Homo sapien
ctgcggcagcgcactttgcttggtt

SEQ ID NO: 1091112 - DNA, 25 bp, Homo sapien
agagctgtcaagataccagttgcac

SEQ ID NO: 1091113 - DNA, 25 bp, Homo sapien
cagaggctgacgttgagagctgtca

SEQ ID NO: 1091114 - DNA, 25 bp, Homo sapien
caaatgccttccttgaaggcgctta

SEQ ID NO: 1091115 - DNA, 25 bp, Homo sapien
aaaagcaaatgccttccttgaaggc

SEQ ID NO: 1091116 - DNA, 25 bp, Homo sapien
aagcaaatgccttccttgaaggcgc

SEQ ID NO: 1091117 - DNA, 25 bp, Homo sapien
tgccttccttgaaggcgcttatcct

SEQ ID NO: 1091118 - DNA, 25 bp, Homo sapien
cacggtaggtggtgaaggacagggt

SEQ ID NO: 1091119 - DNA, 25 bp, Homo sapien
acggtaggtggtgaaggacagggtg

SEQ ID NO: 1091120 - DNA, 25 bp, Homo sapien
gtgaaggacagggtgtgggaggcct

SEQ ID NO: 1091121 - DNA, 25 bp, Homo sapien
aaggacagggtgtgggaggccttgc

SEQ ID NO: 1091122 - DNA, 25 bp, Homo sapien
ccaggtgctacctcagttgccaggt

SEQ ID NO: 1091123 - DNA, 25 bp, Homo sapien
tggatcccatggaagtacagactac

SEQ ID NO: 1091124 - DNA, 25 bp, Homo sapien
cttggatcccatggaagtacagact

SEQ ID NO: 1091125 - DNA, 25 bp, Homo sapien
gctacctcagttgccaggtactgag

SEQ ID NO: 1091126 - DNA, 25 bp, Homo sapien
tgtttgcagaaggtcgtggttggtt

SEQ ID NO: 1091127 - DNA, 25 bp, Homo sapien
cagaaggtcgtggttggttgcacgg

SEQ ID NO: 1091128 - DNA, 25 bp, Homo sapien
tcgtggttggttgcacggagtcata

SEQ ID NO: 1091129 - DNA, 25 bp, Homo sapien
gttggttgcacggagtcatataatc

SEQ ID NO: 1091130 - DNA, 25 bp, Homo sapien
ctttccttggcggttctcagttggc

SEQ ID NO: 1091131 - DNA, 25 bp, Homo sapien
ggcagagtccgccacccgataaaga

SEQ ID NO: 1091132 - DNA, 25 bp, Homo sapien
ccttggcggttctcagttggcggac

SEQ ID NO: 1091133 - DNA, 25 bp, Homo sapien
cgataaagatgactttgtgtctctg

SEQ ID NO: 1091134 - DNA, 25 bp, Homo sapien
ttgttcccaggatatgggccaaggc

SEQ ID NO: 1091135 - DNA, 25 bp, Homo sapien
gccaacatgccttttcaaggctgaa

SEQ ID NO: 1091136 - DNA, 25 bp, Homo sapien
ttcccaggatatgggccaaggctgc

SEQ ID NO: 1091137 - DNA, 25 bp, Homo sapien
gtaaaagccaacatgccttttcaag

SEQ ID NO: 1091138 - DNA, 25 bp, Homo sapien
ccagattgccagcaatttgtgttat

SEQ ID NO: 1091139 - DNA, 25 bp, Homo sapien
ggacactcgccaggtaaggttgaac

SEQ ID NO: 1091140 - DNA, 25 bp, Homo sapien
caggacactcgccaggtaaggttga

SEQ ID NO: 1091141 - DNA, 25 bp, Homo sapien
gattgccagcaatttgtgttatgta

SEQ ID NO: 1091142 - DNA, 25 bp, Homo sapien
tgttgtctgcacgtttctgttagca

SEQ ID NO: 1091143 - DNA, 25 bp, Homo sapien
gaagtttccgagcagttgattgaga

SEQ ID NO: 1091144 - DNA, 25 bp, Homo sapien
gtgctgatcacgctagatgctcgca

SEQ ID NO: 1091145 - DNA, 25 bp, Homo sapien
tgatggcagtgagcacagtgctgat

SEQ ID NO: 1091146 - DNA, 25 bp, Homo sapien
aggccttctaatctggtaggtgacc

SEQ ID NO: 1091147 - DNA, 25 bp, Homo sapien
cttgcaagatatggttgccgtagca

SEQ ID NO: 1091148 - DNA, 25 bp, Homo sapien
tctaatctggtaggtgacctgagag

SEQ ID NO: 1091149 - DNA, 25 bp, Homo sapien
aattatggggaagttcagccggcac

SEQ ID NO: 1091150 - DNA, 25 bp, Homo sapien
tatcccacactcagcgggagtgcgt

SEQ ID NO: 1091151 - DNA, 25 bp, Homo sapien
tccaagaggctctgtgaattccgtt

SEQ ID NO: 1091152 - DNA, 25 bp, Homo sapien
cagtgtttctctgcttatcccacac

SEQ ID NO: 1091153 - DNA, 25 bp, Homo sapien
gcagcttcggaagggctcttttctt

SEQ ID NO: 1091154 - DNA, 25 bp, Homo sapien
ggttactgagctcgctcttgggagc

SEQ ID NO: 1091155 - DNA, 25 bp, Homo sapien
tactgagctcgctcttgggagctct

SEQ ID NO: 1091156 - DNA, 25 bp, Homo sapien
agggttactgagctcgctcttggga

SEQ ID NO: 1091157 - DNA, 25 bp, Homo sapien
cagggttactgagctcgctcttggg

SEQ ID NO: 1091158 - DNA, 25 bp, Homo sapien
gatttgacctgggtacctctgatcc

SEQ ID NO: 1091159 - DNA, 25 bp, Homo sapien
caagtagactatctgtggccataaa

SEQ ID NO: 1091160 - DNA, 25 bp, Homo sapien
gatcccatttgctcactaagtcagt

SEQ ID NO: 1091161 - DNA, 25 bp, Homo sapien
gctcactaagtcagtctttccacaa

SEQ ID NO: 1091162 - DNA, 25 bp, Homo sapien
tataaatgcctgtcctcgccgttat

SEQ ID NO: 1091163 - DNA, 25 bp, Homo sapien
ttataaatgcctgtcctcgccgtta

SEQ ID NO: 1091164 - DNA, 25 bp, Homo sapien
catcattgctgagaggaggagtggc

SEQ ID NO: 1091165 - DNA, 25 bp, Homo sapien
atcattgctgagaggaggagtggcc

SEQ ID NO: 1091166 - DNA, 25 bp, Homo sapien
cattgctgagaggaggagtggccat

SEQ ID NO: 1091167 - DNA, 25 bp, Homo sapien
tgctgagaggaggagtggccatagt

SEQ ID NO: 1091168 - DNA, 25 bp, Homo sapien
taactccgtgaggtcagaactgcga

SEQ ID NO: 1091169 - DNA, 25 bp, Homo sapien
tcttaacagttaggttgtgcagccc

SEQ ID NO: 1091170 - DNA, 25 bp, Homo sapien
ctgagacaggatttgagcataggca

SEQ ID NO: 1091171 - DNA, 25 bp, Homo sapien
tttagcccatatcagtaactccgtg

SEQ ID NO: 1091172 - DNA, 25 bp, Homo sapien
gaattgccagcacattgcttaagag

SEQ ID NO: 1091173 - DNA, 25 bp, Homo sapien
tgttggtccagtggtacacagagca

SEQ ID NO: 1091174 - DNA, 25 bp, Homo sapien
tacttcctagtgttgctcctagcaa

SEQ ID NO: 1091175 - DNA, 25 bp, Homo sapien
tgatgaacatccttatggctaaatg

SEQ ID NO: 1091176 - DNA, 25 bp, Homo sapien
gaaggtttgcttgcattggagtgcc

SEQ ID NO: 1091177 - DNA, 25 bp, Homo sapien
gaagaaggtttgcttgcattggagt

SEQ ID NO: 1091178 - DNA, 25 bp, Homo sapien
gactgaagaaggtttgcttgcattg

SEQ ID NO: 1091179 - DNA, 25 bp, Homo sapien
gattgactgaagaaggtttgcttgc

SEQ ID NO: 1091180 - DNA, 25 bp, Homo sapien
ggccctggaggatcttagggaggtg

SEQ ID NO: 1091181 - DNA, 25 bp, Homo sapien
cctggaggatcttagggaggtgcat

SEQ ID NO: 1091182 - DNA, 25 bp, Homo sapien
gccctggaggatcttagggaggtgc

SEQ ID NO: 1091183 - DNA, 25 bp, Homo sapien
ccctggaggatcttagggaggtgca

SEQ ID NO: 1091184 - DNA, 25 bp, Homo sapien
cttgctcccaagactgttgccatta

SEQ ID NO: 1091185 - DNA, 25 bp, Homo sapien
aagactgttgccattagcaaccaac

SEQ ID NO: 1091186 - DNA, 25 bp, Homo sapien
tgttgccattagcaaccaacttccc

SEQ ID NO: 1091187 - DNA, 25 bp, Homo sapien
gctcccaagactgttgccattagca

SEQ ID NO: 1091188 - DNA, 25 bp, Homo sapien
aggctctgaccacggggtcctgccc

SEQ ID NO: 1091189 - DNA, 25 bp, Homo sapien
gtcccatggtggtgacttttcagca

SEQ ID NO: 1091190 - DNA, 25 bp, Homo sapien
ggctgttgtgctgcggagccctcca

SEQ ID NO: 1091191 - DNA, 25 bp, Homo sapien
gctgcggagccctccaggctctgac

SEQ ID NO: 1091192 - DNA, 25 bp, Homo sapien
caagcaggcctcagaatgtggatga

SEQ ID NO: 1091193 - DNA, 25 bp, Homo sapien
gcagcaggagtatactgtagcagct

SEQ ID NO: 1091194 - DNA, 25 bp, Homo sapien
agcaggagtatactgtagcagcttc

SEQ ID NO: 1091195 - DNA, 25 bp, Homo sapien
tggctggcagcaggagtatactgta

SEQ ID NO: 1091196 - DNA, 25 bp, Homo sapien
ttctgatccaaagccgattgtggcc

SEQ ID NO: 1091197 - DNA, 25 bp, Homo sapien
tcggcacggcgttctttccacgagg

SEQ ID NO: 1091198 - DNA, 25 bp, Homo sapien
acgatgggccgtagcttctcaggaa

SEQ ID NO: 1091199 - DNA, 25 bp, Homo sapien
aatacccctccgtaggtgagagccg

SEQ ID NO: 1091200 - DNA, 25 bp, Homo sapien
tcagcgagctaatgcgtggaatagg

SEQ ID NO: 1091201 - DNA, 25 bp, Homo sapien
gagtgcttcagtcgattctgacccc

SEQ ID NO: 1091202 - DNA, 25 bp, Homo sapien
acttaaatctagttgactgtcgcca

SEQ ID NO: 1091203 - DNA, 25 bp, Homo sapien
gcagaaaacttgatcatcagagtgc

SEQ ID NO: 1091204 - DNA, 25 bp, Homo sapien
cttttgtccgcccgcggcgtgagga

SEQ ID NO: 1091205 - DNA, 25 bp, Homo sapien
tccaaagctggcgagagcgtagcga

SEQ ID NO: 1091206 - DNA, 25 bp, Homo sapien
ttgttcggccgggagcgctctccct

SEQ ID NO: 1091207 - DNA, 25 bp, Homo sapien
acgagggtggcgctttgctgccctc

SEQ ID NO: 1091208 - DNA, 25 bp, Homo sapien
catctcttttagctccaacaaggga

SEQ ID NO: 1091209 - DNA, 25 bp, Homo sapien
gctccaacaagggatctaccaacca

SEQ ID NO: 1091210 - DNA, 25 bp, Homo sapien
tctcttttagctccaacaagggatc

SEQ ID NO: 1091211 - DNA, 25 bp, Homo sapien
tttagctccaacaagggatctacca

SEQ ID NO: 1091212 - DNA, 25 bp, Homo sapien
tctgatgctcagacaggggtgtgct

SEQ ID NO: 1091213 - DNA, 25 bp, Homo sapien
caggggtgtgctgcgccattctgca

SEQ ID NO: 1091214 - DNA, 25 bp, Homo sapien
ctcagacaggggtgtgctgcgccat

SEQ ID NO: 1091215 - DNA, 25 bp, Homo sapien
ctctgatgctcagacaggggtgtgc

SEQ ID NO: 1091216 - DNA, 25 bp, Homo sapien
ggtgccccagattgctagggtgaga

SEQ ID NO: 1091217 - DNA, 25 bp, Homo sapien
atcagaatcacagaacaagcctgcg

SEQ ID NO: 1091218 - DNA, 25 bp, Homo sapien
acaagcctgcgagctctgctccggg

SEQ ID NO: 1091219 - DNA, 25 bp, Homo sapien
tttgccgatgtctgtttccgtggaa

SEQ ID NO: 1091220 - DNA, 25 bp, Homo sapien
aacaagcacatgagcgtgttcacgg

SEQ ID NO: 1091221 - DNA, 25 bp, Homo sapien
catcaccagttgtggttccatggca

SEQ ID NO: 1091222 - DNA, 25 bp, Homo sapien
gagatgtccagtgttgagtttccca

SEQ ID NO: 1091223 - DNA, 25 bp, Homo sapien
gtgttcacggaacccttatgggctg

SEQ ID NO: 1091224 - DNA, 25 bp, Homo sapien
caagcatgcttgctgaggggtttca

SEQ ID NO: 1091225 - DNA, 25 bp, Homo sapien
gcatgcttgctgaggggtttcaaat

SEQ ID NO: 1091226 - DNA, 25 bp, Homo sapien
agcatgcttgctgaggggtttcaaa

SEQ ID NO: 1091227 - DNA, 25 bp, Homo sapien
atgcttgctgaggggtttcaaatgt

SEQ ID NO: 1091228 - DNA, 25 bp, Homo sapien
caacccccgcctcccaaattcatgc

SEQ ID NO: 1091229 - DNA, 25 bp, Homo sapien
gcaacccccgcctcccaaattcatg

SEQ ID NO: 1091230 - DNA, 25 bp, Homo sapien
acccccgcctcccaaattcatgcaa

SEQ ID NO: 1091231 - DNA, 25 bp, Homo sapien
ccccgcctcccaaattcatgcaatt

SEQ ID NO: 1091232 - DNA, 25 bp, Homo sapien
gtcttctctgcacgggtttgtccca

SEQ ID NO: 1091233 - DNA, 25 bp, Homo sapien
tcaaacatctcttgtgctcacgtcc

SEQ ID NO: 1091234 - DNA, 25 bp, Homo sapien
tcatcttgaaatgcggtgttctgca

SEQ ID NO: 1091235 - DNA, 25 bp, Homo sapien
tttgtcccatatgcatggacagtgc

SEQ ID NO: 1091236 - DNA, 25 bp, Homo sapien
gctttgatcaatacagggcaagcag

SEQ ID NO: 1091237 - DNA, 25 bp, Homo sapien
tgatcaatacagggcaagcagccaa

SEQ ID NO: 1091238 - DNA, 25 bp, Homo sapien
tttgatcaatacagggcaagcagcc

SEQ ID NO: 1091239 - DNA, 25 bp, Homo sapien
ttgatcaatacagggcaagcagcca

SEQ ID NO: 1091240 - DNA, 25 bp, Homo sapien
tccataagggtaccttctgacaaag

SEQ ID NO: 1091241 - DNA, 25 bp, Homo sapien
gggacagctgtccataagggtacct

SEQ ID NO: 1091242 - DNA, 25 bp, Homo sapien
agctgtccataagggtaccttctga

SEQ ID NO: 1091243 - DNA, 25 bp, Homo sapien
tatgccaggagtgtttgtagtaaag

SEQ ID NO: 1091244 - DNA, 25 bp, Homo sapien
cggagacccggacggggagcgccag

SEQ ID NO: 1091245 - DNA, 25 bp, Homo sapien
gacggggagcgccaggcgtcgggcg

SEQ ID NO: 1091246 - DNA, 25 bp, Homo sapien
agcgccaggcgtcgggcgcctctcc

SEQ ID NO: 1091247 - DNA, 25 bp, Homo sapien
ggcgtcgggcgcctctcctagccat

SEQ ID NO: 1091248 - DNA, 25 bp, Homo sapien
ccctgcgcccgggcggggctgccgc

SEQ ID NO: 1091249 - DNA, 25 bp, Homo sapien
gacccgccacctgctccccctgcgc

SEQ ID NO: 1091250 - DNA, 25 bp, Homo sapien
cctgctccccctgcgcccgggcggg

SEQ ID NO: 1091251 - DNA, 25 bp, Homo sapien
cgacccgccacctgctccccctgcg

SEQ ID NO: 1091252 - DNA, 25 bp, Homo sapien
agggcctcctcgcagacaggaagcc

SEQ ID NO: 1091253 - DNA, 25 bp, Homo sapien
aagcccctgcctcgggtctgcactc

SEQ ID NO: 1091254 - DNA, 25 bp, Homo sapien
cagtcactgatggagaccagaaggg

SEQ ID NO: 1091255 - DNA, 25 bp, Homo sapien
ctgcctcgggtctgcactcaggcag

SEQ ID NO: 1091256 - DNA, 25 bp, Homo sapien
acccagggcagtgaaaccaaatgga

SEQ ID NO: 1091257 - DNA, 25 bp, Homo sapien
tgacccagggcagtgaaaccaaatg

SEQ ID NO: 1091258 - DNA, 25 bp, Homo sapien
gacccagggcagtgaaaccaaatgg

SEQ ID NO: 1091259 - DNA, 25 bp, Homo sapien
gtgtttggtttcaattaggaggaca

SEQ ID NO: 1091260 - DNA, 25 bp, Homo sapien
tgtttggtttcaattaggaggacaa

SEQ ID NO: 1091261 - DNA, 25 bp, Homo sapien
gggtactgcagtgcgtgatgtttcc

SEQ ID NO: 1091262 - DNA, 25 bp, Homo sapien
tgcagtgcgtgatgtttccacccca

SEQ ID NO: 1091263 - DNA, 25 bp, Homo sapien
tactgcagtgcgtgatgtttccacc

SEQ ID NO: 1091264 - DNA, 25 bp, Homo sapien
agtgcgtgatgtttccaccccacca

SEQ ID NO: 1091265 - DNA, 25 bp, Homo sapien
gaaggcaagaaccagatctgattct

SEQ ID NO: 1091266 - DNA, 25 bp, Homo sapien
tctttggtgcccttgtagctccttt

SEQ ID NO: 1091267 - DNA, 25 bp, Homo sapien
attcttctttggtgcccttgtagct

SEQ ID NO: 1091268 - DNA, 25 bp, Homo sapien
ccccgtctgcgagctccttgaaggc

SEQ ID NO: 1091269 - DNA, 25 bp, Homo sapien
tactctgagcccaggcatgtatgat

SEQ ID NO: 1091270 - DNA, 25 bp, Homo sapien
ctactctgagcccaggcatgtatga

SEQ ID NO: 1091271 - DNA, 25 bp, Homo sapien
taaagcttccaagatgtggaatgtg

SEQ ID NO: 1091272 - DNA, 25 bp, Homo sapien
aatgctgtaggggagattatggtcc

SEQ ID NO: 1091273 - DNA, 25 bp, Homo sapien
gggagattatggtcccctcggagcc

SEQ ID NO: 1091274 - DNA, 25 bp, Homo sapien
cctcggagcccagaaaatacagagg

SEQ ID NO: 1091275 - DNA, 25 bp, Homo sapien
cttcgtcaggctttgctttctgcag

SEQ ID NO: 1091276 - DNA, 25 bp, Homo sapien
accaccttcgtcaggctttgctttc

SEQ ID NO: 1091277 - DNA, 25 bp, Homo sapien
gacacaccaccttcgtcaggctttg

SEQ ID NO: 1091278 - DNA, 25 bp, Homo sapien
tggacacaccaccttcgtcaggctt

SEQ ID NO: 1091279 - DNA, 25 bp, Homo sapien
gggaaggcccacatctggtgggtct

SEQ ID NO: 1091280 - DNA, 25 bp, Homo sapien
ggaaggcccacatctggtgggtctg

SEQ ID NO: 1091281 - DNA, 25 bp, Homo sapien
catggccacgttggggaaggcccac

SEQ ID NO: 1091282 - DNA, 25 bp, Homo sapien
agaatcagacatggccacgttgggg

SEQ ID NO: 1091283 - DNA, 25 bp, Homo sapien
tgcgtcagcagcagacttgcggatc

SEQ ID NO: 1091284 - DNA, 25 bp, Homo sapien
agcagcagacttgcggatcccatca

SEQ ID NO: 1091285 - DNA, 25 bp, Homo sapien
agcagacttgcggatcccatcagag

SEQ ID NO: 1091286 - DNA, 25 bp, Homo sapien
tcagcagcagacttgcggatcccat

SEQ ID NO: 1091287 - DNA, 25 bp, Homo sapien
ttcgggctctttaagagattctgac

SEQ ID NO: 1091288 - DNA, 25 bp, Homo sapien
tgttcgggctctttaagagattctg

SEQ ID NO: 1091289 - DNA, 25 bp, Homo sapien
ctgttcgggctctttaagagattct

SEQ ID NO: 1091290 - DNA, 25 bp, Homo sapien
cgggctctttaagagattctgactt

SEQ ID NO: 1091291 - DNA, 25 bp, Homo sapien
gttgcttcaatgctcaaccctccag

SEQ ID NO: 1091292 - DNA, 25 bp, Homo sapien
cttcagtgtcttctttaataccacc

SEQ ID NO: 1091293 - DNA, 25 bp, Homo sapien
tcagtgtcttctttaataccaccaa

SEQ ID NO: 1091294 - DNA, 25 bp, Homo sapien
tattgaaaataatctcttaggtgat

SEQ ID NO: 1091295 - DNA, 25 bp, Homo sapien
agtgtcttctttaataccaccaaca

SEQ ID NO: 1091296 - DNA, 25 bp, Homo sapien
ttgccactgccatggtcagtcatga

SEQ ID NO: 1091297 - DNA, 25 bp, Homo sapien
cacggagtcatggtcatcaaaggtt

SEQ ID NO: 1091298 - DNA, 25 bp, Homo sapien
aaagtcccttttcttgccactgcca

SEQ ID NO: 1091299 - DNA, 25 bp, Homo sapien
gtcttatccacggagtcatggtcat

SEQ ID NO: 1091300 - DNA, 25 bp, Homo sapien
ctatgaccactaaagtctcctccat

SEQ ID NO: 1091301 - DNA, 25 bp, Homo sapien
tatgaccactaaagtctcctccatg

SEQ ID NO: 1091302 - DNA, 25 bp, Homo sapien
tctcccttcttgggtccaaaatctg

SEQ ID NO: 1091303 - DNA, 25 bp, Homo sapien
aaatctgaagactgattgctgtaat

SEQ ID NO: 1091304 - DNA, 25 bp, Homo sapien
cccttcttgggtccaaaatctgaag

SEQ ID NO: 1091305 - DNA, 25 bp, Homo sapien
ctgcctccaaagttttctcccttct

SEQ ID NO: 1091306 - DNA, 25 bp, Homo sapien
gccactggcatagctactgttgcta

SEQ ID NO: 1091307 - DNA, 25 bp, Homo sapien
tgttgctactggaactgtcatagcc

SEQ ID NO: 1091308 - DNA, 25 bp, Homo sapien
actgttgctactggaactgtcatag

SEQ ID NO: 1091309 - DNA, 25 bp, Homo sapien
gctactgttgctactggaactgtca

SEQ ID NO: 1091310 - DNA, 25 bp, Homo sapien
gcgcggaggcggcggcgctgtagag

SEQ ID NO: 1091311 - DNA, 25 bp, Homo sapien
aggcgcggaggcggcggcgctgtag

SEQ ID NO: 1091312 - DNA, 25 bp, Homo sapien
ctgaagggaggcgcggaggcggcgg

SEQ ID NO: 1091313 - DNA, 25 bp, Homo sapien
ggaggcgcggaggcggcggcgctgt

SEQ ID NO: 1091314 - DNA, 25 bp, Homo sapien
atgggaggctccgccccggcggcgt

SEQ ID NO: 1091315 - DNA, 25 bp, Homo sapien
gccagaggagcccgctgggggcgtc

SEQ ID NO: 1091316 - DNA, 25 bp, Homo sapien
tcagaaacaggcctccgaggtcccc

SEQ ID NO: 1091317 - DNA, 25 bp, Homo sapien
ccagaggcgggaagctgcgggcagg

SEQ ID NO: 1091318 - DNA, 25 bp, Homo sapien
tccccaggcagcgtgctggagcaca

SEQ ID NO: 1091319 - DNA, 25 bp, Homo sapien
ctggagcacaggaggagcccaggaa

SEQ ID NO: 1091320 - DNA, 25 bp, Homo sapien
agcacaggaggagcccaggaaacgg

SEQ ID NO: 1091321 - DNA, 25 bp, Homo sapien
ctccccaggcagcgtgctggagcac

SEQ ID NO: 1091322 - DNA, 25 bp, Homo sapien
cattgggctttaggcatcaaggagc

SEQ ID NO: 1091323 - DNA, 25 bp, Homo sapien
gctcgacatgaggaaagccacgtga

SEQ ID NO: 1091324 - DNA, 25 bp, Homo sapien
tgtcatggagggctcgaatgccaga

SEQ ID NO: 1091325 - DNA, 25 bp, Homo sapien
aatgacagaatgacgagcacgctcg

SEQ ID NO: 1091326 - DNA, 25 bp, Homo sapien
ctccaggccgcaggcatccagcagt

SEQ ID NO: 1091327 - DNA, 25 bp, Homo sapien
tccaggccgcaggcatccagcagtt

SEQ ID NO: 1091328 - DNA, 25 bp, Homo sapien
ccaggccgcaggcatccagcagttg

SEQ ID NO: 1091329 - DNA, 25 bp, Homo sapien
agctggtcacctgagcaacagccag

SEQ ID NO: 1091330 - DNA, 25 bp, Homo sapien
agagacacaagctggtcacctgagc

SEQ ID NO: 1091331 - DNA, 25 bp, Homo sapien
gggaaagcagcgccctcccagagac

SEQ ID NO: 1091332 - DNA, 25 bp, Homo sapien
aaagcagcgccctcccagagacaca

SEQ ID NO: 1091333 - DNA, 25 bp, Homo sapien
ggtgatttccgacattctggatcat

SEQ ID NO: 1091334 - DNA, 25 bp, Homo sapien
ccgtcgcaggtgatttccgacattc

SEQ ID NO: 1091335 - DNA, 25 bp, Homo sapien
tcgcaggtgatttccgacattctgg

SEQ ID NO: 1091336 - DNA, 25 bp, Homo sapien
caggtgatttccgacattctggatc

SEQ ID NO: 1091337 - DNA, 25 bp, Homo sapien
tagaattccagaggccgacacttgc

SEQ ID NO: 1091338 - DNA, 25 bp, Homo sapien
ggtgattccactctacacagccagc

SEQ ID NO: 1091339 - DNA, 25 bp, Homo sapien
ggggttctgcgatttctccttccaa

SEQ ID NO: 1091340 - DNA, 25 bp, Homo sapien
cgacacttgctgaaggtgattccac

SEQ ID NO: 1091341 - DNA, 25 bp, Homo sapien
atccaggctagagtacagtagcatg

SEQ ID NO: 1091342 - DNA, 25 bp, Homo sapien
tcaccacacccagcttggtggggtt

SEQ ID NO: 1091343 - DNA, 25 bp, Homo sapien
gtcatccaggctagagtacagtagc

SEQ ID NO: 1091344 - DNA, 25 bp, Homo sapien
caccacacccagcttggtggggttt

SEQ ID NO: 1091345 - DNA, 25 bp, Homo sapien
ttcacatctcttacatacaggtgcc

SEQ ID NO: 1091346 - DNA, 25 bp, Homo sapien
aggagggtgcccttaactccctcat

SEQ ID NO: 1091347 - DNA, 25 bp, Homo sapien
ggacaaattattactactgaagaag

SEQ ID NO: 1091348 - DNA, 25 bp, Homo sapien
gaagaagccctaggcaggatataca

SEQ ID NO: 1091349 - DNA, 25 bp, Homo sapien
cgagtccacgtctggcacagggcca

SEQ ID NO: 1091350 - DNA, 25 bp, Homo sapien
agccagagtcttccgacttcggacc

SEQ ID NO: 1091351 - DNA, 25 bp, Homo sapien
tcccacttgtccctcccaccactca

SEQ ID NO: 1091352 - DNA, 25 bp, Homo sapien
tccgacttcggacctcccacttgtc

SEQ ID NO: 1091353 - DNA, 25 bp, Homo sapien
tcccaccactcacggggctgtatcc

SEQ ID NO: 1091354 - DNA, 25 bp, Homo sapien
tgcaaagtagccctatcagacctgt

SEQ ID NO: 1091355 - DNA, 25 bp, Homo sapien
cagactgtctggctagataacccga

SEQ ID NO: 1091356 - DNA, 25 bp, Homo sapien
ctcaagctctctggctgcaaagtag

SEQ ID NO: 1091357 - DNA, 25 bp, Homo sapien
aaggcccaagggcttcagactgtct

SEQ ID NO: 1091358 - DNA, 25 bp, Homo sapien
tctgtggcagacaggagttaaccta

SEQ ID NO: 1091359 - DNA, 25 bp, Homo sapien
tcctaaatctgaagccctggtaagc

SEQ ID NO: 1091360 - DNA, 25 bp, Homo sapien
ctaagaggttattcaggtcatggac

SEQ ID NO: 1091361 - DNA, 25 bp, Homo sapien
catagtgctggcgtggtcagtcagt

SEQ ID NO: 1091362 - DNA, 25 bp, Homo sapien
tccgggatgtgcggttggagaacac

SEQ ID NO: 1091363 - DNA, 25 bp, Homo sapien
ccgggatgtgcggttggagaacaca

SEQ ID NO: 1091364 - DNA, 25 bp, Homo sapien
cttccgggatgtgcggttggagaac

SEQ ID NO: 1091365 - DNA, 25 bp, Homo sapien
gggatgtgcggttggagaacacaga

SEQ ID NO: 1091366 - DNA, 25 bp, Homo sapien
ggcactgtcgttccccgcacgtaag

SEQ ID NO: 1091367 - DNA, 25 bp, Homo sapien
tgtcgttccccgcacgtaaggctga

SEQ ID NO: 1091368 - DNA, 25 bp, Homo sapien
gcactgtcgttccccgcacgtaagg

SEQ ID NO: 1091369 - DNA, 25 bp, Homo sapien
actgtcgttccccgcacgtaaggct

SEQ ID NO: 1091370 - DNA, 25 bp, Homo sapien
tggctcatctgcacctccgtggggt

SEQ ID NO: 1091371 - DNA, 25 bp, Homo sapien
aggcaagccgtggtgtcaatccact

SEQ ID NO: 1091372 - DNA, 25 bp, Homo sapien
gttccggtatccctcgccgtctgcc

SEQ ID NO: 1091373 - DNA, 25 bp, Homo sapien
cgacgctcagctcaccacgttggtt

SEQ ID NO: 1091374 - DNA, 25 bp, Homo sapien
ctgtgacacaggggcagccagcgtg

SEQ ID NO: 1091375 - DNA, 25 bp, Homo sapien
tgacacaggggcagccagcgtgcct

SEQ ID NO: 1091376 - DNA, 25 bp, Homo sapien
gacacaggggcagccagcgtgcctc

SEQ ID NO: 1091377 - DNA, 25 bp, Homo sapien
caggggcagccagcgtgcctctccg

SEQ ID NO: 1091378 - DNA, 25 bp, Homo sapien
taatggtgtgctcaaaatagatgtc

SEQ ID NO: 1091379 - DNA, 25 bp, Homo sapien
ctaatggtgtgctcaaaatagatgt

SEQ ID NO: 1091380 - DNA, 25 bp, Homo sapien
tcaaaatagatgtcatccatggaag

SEQ ID NO: 1091381 - DNA, 25 bp, Homo sapien
tgctcaaaatagatgtcatccatgg

SEQ ID NO: 1091382 - DNA, 25 bp, Homo sapien
tcaccttggccttgatattcaccac

SEQ ID NO: 1091383 - DNA, 25 bp, Homo sapien
gccttgatattcaccacttgtccaa

SEQ ID NO: 1091384 - DNA, 25 bp, Homo sapien
ccttggccttgatattcaccacttg

SEQ ID NO: 1091385 - DNA, 25 bp, Homo sapien
ttggccttgatattcaccacttgtc

SEQ ID NO: 1091386 - DNA, 25 bp, Homo sapien
cccaagcagtgcccaccccacacac

SEQ ID NO: 1091387 - DNA, 25 bp, Homo sapien
ctcccaagcagtgcccaccccacac

SEQ ID NO: 1091388 - DNA, 25 bp, Homo sapien
actcccaagcagtgcccaccccaca

SEQ ID NO: 1091389 - DNA, 25 bp, Homo sapien
ccactcccaagcagtgcccacccca

SEQ ID NO: 1091390 - DNA, 25 bp, Homo sapien
tcggcgggccacgaaggtggccaag

SEQ ID NO: 1091391 - DNA, 25 bp, Homo sapien
cggcgggccacgaaggtggccaagg

SEQ ID NO: 1091392 - DNA, 25 bp, Homo sapien
ctcggcgggccacgaaggtggccaa

SEQ ID NO: 1091393 - DNA, 25 bp, Homo sapien
cttggtgatctctcggcgggccacg

SEQ ID NO: 1091394 - DNA, 25 bp, Homo sapien
cgcagttggccaggaggtccttgat

SEQ ID NO: 1091395 - DNA, 25 bp, Homo sapien
tctcctcttctgtccgcggcgtgat

SEQ ID NO: 1091396 - DNA, 25 bp, Homo sapien
tcagccgccacactgtgctccatct

SEQ ID NO: 1091397 - DNA, 25 bp, Homo sapien
tctgcatagacaaggcgcatgcgcc

SEQ ID NO: 1091398 - DNA, 25 bp, Homo sapien
cccatgcacagctggcagctgctca

SEQ ID NO: 1091399 - DNA, 25 bp, Homo sapien
cctccccatgcacagctggcagctg

SEQ ID NO: 1091400 - DNA, 25 bp, Homo sapien
tccccatgcacagctggcagctgct

SEQ ID NO: 1091401 - DNA, 25 bp, Homo sapien
ccatgcacagctggcagctgctcac

SEQ ID NO: 1091402 - DNA, 25 bp, Homo sapien
acactctccacacgggtcttctcag

SEQ ID NO: 1091403 - DNA, 25 bp, Homo sapien
cttctcagccggcaccatgcggcta

SEQ ID NO: 1091404 - DNA, 25 bp, Homo sapien
tcagccggcaccatgcggctacagt

SEQ ID NO: 1091405 - DNA, 25 bp, Homo sapien
gcaccatgcggctacagtctctgct

SEQ ID NO: 1091406 - DNA, 25 bp, Homo sapien
gaagtgggcaggatattagcagaca

SEQ ID NO: 1091407 - DNA, 25 bp, Homo sapien
caagccccggacagaaacagatgtt

SEQ ID NO: 1091408 - DNA, 25 bp, Homo sapien
ggcaggaggctacatcaggagcaaa

SEQ ID NO: 1091409 - DNA, 25 bp, Homo sapien
gaataaggaggaatccacctggctg

SEQ ID NO: 1091410 - DNA, 25 bp, Homo sapien
ttgagcaccagacggtcgccgacct

SEQ ID NO: 1091411 - DNA, 25 bp, Homo sapien
tgggacgggcctcggaagtggaaca

SEQ ID NO: 1091412 - DNA, 25 bp, Homo sapien
ggcattgttcacgatggctttgagc

SEQ ID NO: 1091413 - DNA, 25 bp, Homo sapien
catttcaatggccttcagcgtaggg

SEQ ID NO: 1091414 - DNA, 25 bp, Homo sapien
tcctggacagtttgaagtagggtcc

SEQ ID NO: 1091415 - DNA, 25 bp, Homo sapien
ctcagccctgaatggacgtggccgc

SEQ ID NO: 1091416 - DNA, 25 bp, Homo sapien
tcagagctgaatttcagaggaaccc

SEQ ID NO: 1091417 - DNA, 25 bp, Homo sapien
tctagggtcaggaagagccctcagc

SEQ ID NO: 1091418 - DNA, 25 bp, Homo sapien
tggactaaaatccaggcttcacagc

SEQ ID NO: 1091419 - DNA, 25 bp, Homo sapien
cactttggaagttctatgattgcag

SEQ ID NO: 1091420 - DNA, 25 bp, Homo sapien
cctagaactgggcaatgatttttcc

SEQ ID NO: 1091421 - DNA, 25 bp, Homo sapien
atagtcttgaactccgagccgtaag

SEQ ID NO: 1091422 - DNA, 25 bp, Homo sapien
taaaggcactgttgatgtggcgccg

SEQ ID NO: 1091423 - DNA, 25 bp, Homo sapien
ccaggaccacaaaggtcataaaggc

SEQ ID NO: 1091424 - DNA, 25 bp, Homo sapien
tggcgccggtgggtctcagcctcct

SEQ ID NO: 1091425 - DNA, 25 bp, Homo sapien
gggctggtcatctgcgtccaggacc

SEQ ID NO: 1091426 - DNA, 25 bp, Homo sapien
catcctggccagcaaagtgggaaac

SEQ ID NO: 1091427 - DNA, 25 bp, Homo sapien
tctctgagtgacctgggaacaccac

SEQ ID NO: 1091428 - DNA, 25 bp, Homo sapien
gaagtcgggataggcaaccagctac

SEQ ID NO: 1091429 - DNA, 25 bp, Homo sapien
aggagttcctgcagccctaacgtgg

SEQ ID NO: 1091430 - DNA, 25 bp, Homo sapien
gcggatcttctttctggcactggcc

SEQ ID NO: 1091431 - DNA, 25 bp, Homo sapien
ctttctggcactggcctctcggtac

SEQ ID NO: 1091432 - DNA, 25 bp, Homo sapien
ccaggcggatcttctttctggcact

SEQ ID NO: 1091433 - DNA, 25 bp, Homo sapien
tcttctttctggcactggcctctcg

SEQ ID NO: 1091434 - DNA, 25 bp, Homo sapien
ctgcttacaggacacgatgtacttc

SEQ ID NO: 1091435 - DNA, 25 bp, Homo sapien
acctctgtctgcttacaggacacga

SEQ ID NO: 1091436 - DNA, 25 bp, Homo sapien
tctgtctgcttacaggacacgatgt

SEQ ID NO: 1091437 - DNA, 25 bp, Homo sapien
tgtctgcttacaggacacgatgtac

SEQ ID NO: 1091438 - DNA, 25 bp, Homo sapien
gtccttggccacaagcatcttcaag

SEQ ID NO: 1091439 - DNA, 25 bp, Homo sapien
cacaagcatcttcaaggaggagacg

SEQ ID NO: 1091440 - DNA, 25 bp, Homo sapien
gaggagacgttattgtagctcaggt

SEQ ID NO: 1091441 - DNA, 25 bp, Homo sapien
tgactgatctccgaggacagcaccc

SEQ ID NO: 1091442 - DNA, 25 bp, Homo sapien
gaaggagaggaacttgtcatcctcc

SEQ ID NO: 1091443 - DNA, 25 bp, Homo sapien
gcctctgacgcaggtccgagagcag

SEQ ID NO: 1091444 - DNA, 25 bp, Homo sapien
catcctccagagtgtacaggcggac

SEQ ID NO: 1091445 - DNA, 25 bp, Homo sapien
cggtagtgcttgtcccactctggcc

SEQ ID NO: 1091446 - DNA, 25 bp, Homo sapien
ctacctgctgcactagctccacgct

SEQ ID NO: 1091447 - DNA, 25 bp, Homo sapien
aaggcttccgcctcgaggccaggat

SEQ ID NO: 1091448 - DNA, 25 bp, Homo sapien
ggtgacgtggtagatggcgtcgtcc

SEQ ID NO: 1091449 - DNA, 25 bp, Homo sapien
gggctttgtgtgacctccgagggca

SEQ ID NO: 1091450 - DNA, 25 bp, Homo sapien
ctgagcagagggtctctccgcgtct

SEQ ID NO: 1091451 - DNA, 25 bp, Homo sapien
ccgacctcagcgcgatgacataggg

SEQ ID NO: 1091452 - DNA, 25 bp, Homo sapien
tactctggcgtctctcggtgtgtgg

SEQ ID NO: 1091453 - DNA, 25 bp, Homo sapien
tgtgggcagcgtgaccgacctcagc

SEQ ID NO: 1091454 - DNA, 25 bp, Homo sapien
tgagctcaatacacgtgtggtgttg

SEQ ID NO: 1091455 - DNA, 25 bp, Homo sapien
gtgctgagctcaatacacgtgtggt

SEQ ID NO: 1091456 - DNA, 25 bp, Homo sapien
gcagtgctgagctcaatacacgtgt

SEQ ID NO: 1091457 - DNA, 25 bp, Homo sapien
gctgagctcaatacacgtgtggtgt

SEQ ID NO: 1091458 - DNA, 25 bp, Homo sapien
ggggtggcctggttgtagtaggata

SEQ ID NO: 1091459 - DNA, 25 bp, Homo sapien
ctggggtggcctggttgtagtagga

SEQ ID NO: 1091460 - DNA, 25 bp, Homo sapien
tggggtggcctggttgtagtaggat

SEQ ID NO: 1091461 - DNA, 25 bp, Homo sapien
gggtggcctggttgtagtaggatac

SEQ ID NO: 1091462 - DNA, 25 bp, Homo sapien
tgctcacaagccttgaaggtggtgt

SEQ ID NO: 1091463 - DNA, 25 bp, Homo sapien
ggccggccacgttggtggtcacata

SEQ ID NO: 1091464 - DNA, 25 bp, Homo sapien
actcagaggagaggccggccacgtt

SEQ ID NO: 1091465 - DNA, 25 bp, Homo sapien
ctcacaagccttgaaggtggtgtag

SEQ ID NO: 1091466 - DNA, 25 bp, Homo sapien
gatcattccggttgtccaagagaaa

SEQ ID NO: 1091467 - DNA, 25 bp, Homo sapien
agatcattccggttgtccaagagaa

SEQ ID NO: 1091468 - DNA, 25 bp, Homo sapien
cagatcattccggttgtccaagaga

SEQ ID NO: 1091469 - DNA, 25 bp, Homo sapien
catttgcaaatagcggagcccgcag

SEQ ID NO: 1091470 - DNA, 25 bp, Homo sapien
caagtggcaacatcctgacgctgga

SEQ ID NO: 1091471 - DNA, 25 bp, Homo sapien
tcatgttggtagaaactgagcaccc

SEQ ID NO: 1091472 - DNA, 25 bp, Homo sapien
tgaacactggcctcgagggaactgt

SEQ ID NO: 1091473 - DNA, 25 bp, Homo sapien
tatgggaccctagcaaccaggtaag

SEQ ID NO: 1091474 - DNA, 25 bp, Homo sapien
ccagaagagccgcagttaagccatc

SEQ ID NO: 1091475 - DNA, 25 bp, Homo sapien
cagggcagcggtaaaacagcaacaa

SEQ ID NO: 1091476 - DNA, 25 bp, Homo sapien
aaacagcggctcaaaacagttcagg

SEQ ID NO: 1091477 - DNA, 25 bp, Homo sapien
gaccccatgtcggtggaagatctgc

SEQ ID NO: 1091478 - DNA, 25 bp, Homo sapien
gtctactatgacatctttgagcctc

SEQ ID NO: 1091479 - DNA, 25 bp, Homo sapien
actgctgtccaccaagtctactatg

SEQ ID NO: 1091480 - DNA, 25 bp, Homo sapien
gaagatctgctctacgtccgggata

SEQ ID NO: 1091481 - DNA, 25 bp, Homo sapien
cagaaatagacactgcaagtgagga

SEQ ID NO: 1091482 - DNA, 25 bp, Homo sapien
tcagaaatagacactgcaagtgagg

SEQ ID NO: 1091483 - DNA, 25 bp, Homo sapien
ctcagaaatagacactgcaagtgag

SEQ ID NO: 1091484 - DNA, 25 bp, Homo sapien
tgcttgcatacctctggtgacgggc

SEQ ID NO: 1091485 - DNA, 25 bp, Homo sapien
caagagagccctttcattggtgggt

SEQ ID NO: 1091486 - DNA, 25 bp, Homo sapien
tgtacggtcttccatggtgcgggct

SEQ ID NO: 1091487 - DNA, 25 bp, Homo sapien
caggagaagtatcccaaggctaccc

SEQ ID NO: 1091488 - DNA, 25 bp, Homo sapien
catagatccaataggctctgccact

SEQ ID NO: 1091489 - DNA, 25 bp, Homo sapien
ggactctgcttctgaccttatcata

SEQ ID NO: 1091490 - DNA, 25 bp, Homo sapien
ctagcactgtgatgagaccccagag

SEQ ID NO: 1091491 - DNA, 25 bp, Homo sapien
ccctagcactgtgatgagaccccag

SEQ ID NO: 1091492 - DNA, 25 bp, Homo sapien
gagtcagtttcctgtctatatgagg

SEQ ID NO: 1091493 - DNA, 25 bp, Homo sapien
tgcccaagatcagaatcaggatctg

SEQ ID NO: 1091494 - DNA, 25 bp, Homo sapien
agagctcagattcccacacgctggg

SEQ ID NO: 1091495 - DNA, 25 bp, Homo sapien
tgtttaagaagcctgccctgctgga

SEQ ID NO: 1091496 - DNA, 25 bp, Homo sapien
gacctgcctaagtctggtaagtggc

SEQ ID NO: 1091497 - DNA, 25 bp, Homo sapien
acttgacttgcagaacaccgtttaa

SEQ ID NO: 1091498 - DNA, 25 bp, Homo sapien
tttctgattctaagctccaggctct

SEQ ID NO: 1091499 - DNA, 25 bp, Homo sapien
tcaatggcccaagataaatatgacc

SEQ ID NO: 1091500 - DNA, 25 bp, Homo sapien
tatttaggacactcactttgccggc

SEQ ID NO: 1091501 - DNA, 25 bp, Homo sapien
gaaacttaccaaagcatctcaggga

SEQ ID NO: 1091502 - DNA, 25 bp, Homo sapien
tgtgatgctgcaagggccaaaagcg

SEQ ID NO: 1091503 - DNA, 25 bp, Homo sapien
gatgggcaaccttgtgcaggaacaa

SEQ ID NO: 1091504 - DNA, 25 bp, Homo sapien
aaacctgggcacgtttcagaagaca

SEQ ID NO: 1091505 - DNA, 25 bp, Homo sapien
ccgcgagctcctgcagatgggtaaa

SEQ ID NO: 1091506 - DNA, 25 bp, Homo sapien
tgaccaaatcaaccaaagcagggct

SEQ ID NO: 1091507 - DNA, 25 bp, Homo sapien
gaagctagcagtgtcaattcacggt

SEQ ID NO: 1091508 - DNA, 25 bp, Homo sapien
tgccaccacgtccatcccgctaatt

SEQ ID NO: 1091509 - DNA, 25 bp, Homo sapien
aagttcgaggccattcacaacctga

SEQ ID NO: 1091510 - DNA, 25 bp, Homo sapien
ccaacgttcttccaatcttttatct

SEQ ID NO: 1091511 - DNA, 25 bp, Homo sapien
acagcaactcctttgctaaagttcg

SEQ ID NO: 1091512 - DNA, 25 bp, Homo sapien
agcccagatctttccaagcaaccct

SEQ ID NO: 1091513 - DNA, 25 bp, Homo sapien
tctgaaatgttggagcctctgaacc

SEQ ID NO: 1091514 - DNA, 25 bp, Homo sapien
ggagagtatcagagtaacccacata

SEQ ID NO: 1091515 - DNA, 25 bp, Homo sapien
gtaacccacataacacagcctgagg

SEQ ID NO: 1091516 - DNA, 25 bp, Homo sapien
tgtaacatgcaatggtatgggagtg

SEQ ID NO: 1091517 - DNA, 25 bp, Homo sapien
tagttttccattccaaccgtcgctc

SEQ ID NO: 1091518 - DNA, 25 bp, Homo sapien
tcggtcactaactcagcagcgctag

SEQ ID NO: 1091519 - DNA, 25 bp, Homo sapien
tctgtcgagaagttagtctgccacc

SEQ ID NO: 1091520 - DNA, 25 bp, Homo sapien
gacgcaaaatactgcaaaggccgca

SEQ ID NO: 1091521 - DNA, 25 bp, Homo sapien
ttcgatttgcaaagagactctcgca

SEQ ID NO: 1091522 - DNA, 25 bp, Homo sapien
ctttcatttgtttggaagttacata

SEQ ID NO: 1091523 - DNA, 25 bp, Homo sapien
cctgccaggatcaagggatcatcct

SEQ ID NO: 1091524 - DNA, 25 bp, Homo sapien
ggttggaatgcggcctcaactccac

SEQ ID NO: 1091525 - DNA, 25 bp, Homo sapien
ttgcctttcttctcgtactccttta

SEQ ID NO: 1091526 - DNA, 25 bp, Homo sapien
tctggcctcctgcatgtaaactccc

SEQ ID NO: 1091527 - DNA, 25 bp, Homo sapien
tgcatgtaaactcccaagtccttcc

SEQ ID NO: 1091528 - DNA, 25 bp, Homo sapien
caatgatcgtttttgactcctccct

SEQ ID NO: 1091529 - DNA, 25 bp, Homo sapien
gcgtcccctccctcactctttatct

SEQ ID NO: 1091530 - DNA, 25 bp, Homo sapien
agccagagcaggagacttgtaccca

SEQ ID NO: 1091531 - DNA, 25 bp, Homo sapien
cacctggagcatccacatggtaaca

SEQ ID NO: 1091532 - DNA, 25 bp, Homo sapien
ttctaactgtggaatacagccagag

SEQ ID NO: 1091533 - DNA, 25 bp, Homo sapien
aatccagctctaagccaaagatatg

SEQ ID NO: 1091534 - DNA, 25 bp, Homo sapien
tatggcattccctccctgcatcttt

SEQ ID NO: 1091535 - DNA, 25 bp, Homo sapien
ctttccccagatttatggcattccc

SEQ ID NO: 1091536 - DNA, 25 bp, Homo sapien
gatttatggcattccctccctgcat

SEQ ID NO: 1091537 - DNA, 25 bp, Homo sapien
ccagatttatggcattccctccctg

SEQ ID NO: 1091538 - DNA, 25 bp, Homo sapien
gccttgggacctttgcaaatactct

SEQ ID NO: 1091539 - DNA, 25 bp, Homo sapien
gagtgtctggctatcttgttacccc

SEQ ID NO: 1091540 - DNA, 25 bp, Homo sapien
aacttcaattgctccctctggctaa

SEQ ID NO: 1091541 - DNA, 25 bp, Homo sapien
ggccttgcaccacgtttgaaccact

SEQ ID NO: 1091542 - DNA, 25 bp, Homo sapien
catgaggctgaagccagagaattgc

SEQ ID NO: 1091543 - DNA, 25 bp, Homo sapien
ctcatgaggctgaagccagagaatt

SEQ ID NO: 1091544 - DNA, 25 bp, Homo sapien
tgacagagcaagacaggaaagaaag

SEQ ID NO: 1091545 - DNA, 25 bp, Homo sapien
acagaagaaagaaaaatcggccagg

SEQ ID NO: 1091546 - DNA, 25 bp, Homo sapien
taaagacctacatgtaagagcaaaa

SEQ ID NO: 1091547 - DNA, 25 bp, Homo sapien
cagcctttcaagtagctagggctac

SEQ ID NO: 1091548 - DNA, 25 bp, Homo sapien
gcttcagcctttcaagtagctaggg

SEQ ID NO: 1091549 - DNA, 25 bp, Homo sapien
cttcagcctttcaagtagctagggc

SEQ ID NO: 1091550 - DNA, 25 bp, Homo sapien
gcctttcaagtagctagggctacag

SEQ ID NO: 1091551 - DNA, 25 bp, Homo sapien
caaatgctaagagccttccaggtcc

SEQ ID NO: 1091552 - DNA, 25 bp, Homo sapien
gatagagtcctccagttgttagcag

SEQ ID NO: 1091553 - DNA, 25 bp, Homo sapien
tgttagcagacccaaaaggccctct

SEQ ID NO: 1091554 - DNA, 25 bp, Homo sapien
tcttggctcacggtatctggcttcc

SEQ ID NO: 1091555 - DNA, 25 bp, Homo sapien
agaaatcaagtcagggaagagtgcc

SEQ ID NO: 1091556 - DNA, 25 bp, Homo sapien
tgcacgtctgttaacaagctccgca

SEQ ID NO: 1091557 - DNA, 25 bp, Homo sapien
gagtgcctttttcaacacttactgc

SEQ ID NO: 1091558 - DNA, 25 bp, Homo sapien
caggccaggcatgcacgtctgttaa

SEQ ID NO: 1091559 - DNA, 25 bp, Homo sapien
ctgcatgcatggtgtttttaagcag

SEQ ID NO: 1091560 - DNA, 25 bp, Homo sapien
tgcatgcatggtgtttttaagcagg

SEQ ID NO: 1091561 - DNA, 25 bp, Homo sapien
gcatgcatggtgtttttaagcagga

SEQ ID NO: 1091562 - DNA, 25 bp, Homo sapien
gtccagtctggaggtctctcaatgc

SEQ ID NO: 1091563 - DNA, 25 bp, Homo sapien
gtctggaggtctctcaatgccagtg

SEQ ID NO: 1091564 - DNA, 25 bp, Homo sapien
tgccagtgcccgcttctctccaaca

SEQ ID NO: 1091565 - DNA, 25 bp, Homo sapien
ctctccaacagccaactgtcacatt

SEQ ID NO: 1091566 - DNA, 25 bp, Homo sapien
tacgaggcttgagtgatggtcacgc

SEQ ID NO: 1091567 - DNA, 25 bp, Homo sapien
tcaaatcagatctggagtggccgct

SEQ ID NO: 1091568 - DNA, 25 bp, Homo sapien
taagatctggaacgagagccaagcc

SEQ ID NO: 1091569 - DNA, 25 bp, Homo sapien
caggaatcagggtcacatacgaggc

SEQ ID NO: 1091570 - DNA, 25 bp, Homo sapien
tgccttgcaaggtcacggcgtcctt

SEQ ID NO: 1091571 - DNA, 25 bp, Homo sapien
aaggtcacggcgtccttgcctgcgg

SEQ ID NO: 1091572 - DNA, 25 bp, Homo sapien
ggatgccttgcaaggtcacggcgtc

SEQ ID NO: 1091573 - DNA, 25 bp, Homo sapien
caaggtcacggcgtccttgcctgcg

SEQ ID NO: 1091574 - DNA, 25 bp, Homo sapien
cacaaaagaggatacgcaaattgac

SEQ ID NO: 1091575 - DNA, 25 bp, Homo sapien
caaaatgtacatgccgttcccttct

SEQ ID NO: 1091576 - DNA, 25 bp, Homo sapien
aacatcagtagttatcaagatatgc

SEQ ID NO: 1091577 - DNA, 25 bp, Homo sapien
agcacaaaacgtttgaactggtact

SEQ ID NO: 1091578 - DNA, 25 bp, Homo sapien
acagattataaaagtgaacagggcc

SEQ ID NO: 1091579 - DNA, 25 bp, Homo sapien
gtacctactatatgaccagtactgt

SEQ ID NO: 1091580 - DNA, 25 bp, Homo sapien
tgaccagtactgttctaagcacaga

SEQ ID NO: 1091581 - DNA, 25 bp, Homo sapien
aacagggcctgacgtggtggttcat

SEQ ID NO: 1091582 - DNA, 25 bp, Homo sapien
ggcctatgaaaacctggaacttcag

SEQ ID NO: 1091583 - DNA, 25 bp, Homo sapien
gaaaaggtcgattccaggactcaag

SEQ ID NO: 1091584 - DNA, 25 bp, Homo sapien
gatacaccaattgtagtgaacacag

SEQ ID NO: 1091585 - DNA, 25 bp, Homo sapien
gattctcgatcaccagaggacgctg

SEQ ID NO: 1091586 - DNA, 25 bp, Homo sapien
ttctctggcaccttcaccaggcatg

SEQ ID NO: 1091587 - DNA, 25 bp, Homo sapien
tctctggcaccttcaccaggcatga

SEQ ID NO: 1091588 - DNA, 25 bp, Homo sapien
tctggcaccttcaccaggcatgagg

SEQ ID NO: 1091589 - DNA, 25 bp, Homo sapien
ctggcaccttcaccaggcatgaggt

SEQ ID NO: 1091590 - DNA, 25 bp, Homo sapien
tggccatctccaagtcctgcagatg

SEQ ID NO: 1091591 - DNA, 25 bp, Homo sapien
cacgtccaccggtttgtctagtctt

SEQ ID NO: 1091592 - DNA, 25 bp, Homo sapien
tccacattgtgtccatcaagcagcc

SEQ ID NO: 1091593 - DNA, 25 bp, Homo sapien
tgcagatgcaagtgtgcctcacctg

SEQ ID NO: 1091594 - DNA, 25 bp, Homo sapien
cataatcttctttatcatggtcttc

SEQ ID NO: 1091595 - DNA, 25 bp, Homo sapien
tacaagcctttactgtagactaagc

SEQ ID NO: 1091596 - DNA, 25 bp, Homo sapien
tcagtggttattcctgcccagtcca

SEQ ID NO: 1091597 - DNA, 25 bp, Homo sapien
ggtcccaaatctcgagaggctaagg

SEQ ID NO: 1091598 - DNA, 25 bp, Homo sapien
tgaggaaactgcctaaagttgccca

SEQ ID NO: 1091599 - DNA, 25 bp, Homo sapien
gggccacagaagggccgatgaggac

SEQ ID NO: 1091600 - DNA, 25 bp, Homo sapien
ggccacagaagggccgatgaggaca

SEQ ID NO: 1091601 - DNA, 25 bp, Homo sapien
tccatggcctgcttgcggacggagc

SEQ ID NO: 1091602 - DNA, 25 bp, Homo sapien
catggcctgcttgcggacggagctt

SEQ ID NO: 1091603 - DNA, 25 bp, Homo sapien
tgcggacggagcttgagagagaatc

SEQ ID NO: 1091604 - DNA, 25 bp, Homo sapien
gacggagcttgagagagaatccagt

SEQ ID NO: 1091605 - DNA, 25 bp, Homo sapien
cacacgttcaccagctccgacctct

SEQ ID NO: 1091606 - DNA, 25 bp, Homo sapien
cgacctctcccgcatgcccagggtg

SEQ ID NO: 1091607 - DNA, 25 bp, Homo sapien
acacacacgttcaccagctccgacc

SEQ ID NO: 1091608 - DNA, 25 bp, Homo sapien
agctccgacctctcccgcatgccca

SEQ ID NO: 1091609 - DNA, 25 bp, Homo sapien
agccttggcctcgtccttctcctgc

SEQ ID NO: 1091610 - DNA, 25 bp, Homo sapien
ctggatggtctcagccttggcctcg

SEQ ID NO: 1091611 - DNA, 25 bp, Homo sapien
tggcctcgtccttctcctgcatcgc

SEQ ID NO: 1091612 - DNA, 25 bp, Homo sapien
ccttggcctcgtccttctcctgcat

SEQ ID NO: 1091613 - DNA, 25 bp, Homo sapien
gccacagaccaatgagccggaggat

SEQ ID NO: 1091614 - DNA, 25 bp, Homo sapien
caagtacctactcagaccaacagaa

SEQ ID NO: 1091615 - DNA, 25 bp, Homo sapien
aagtcagttgaattgcccaaggcca

SEQ ID NO: 1091616 - DNA, 25 bp, Homo sapien
tccatatctcctcccagaacatggg

SEQ ID NO: 1091617 - DNA, 25 bp, Homo sapien
gtcctcgataaagagggctttgagc

SEQ ID NO: 1091618 - DNA, 25 bp, Homo sapien
ctccaagatgctcttcagcccagca

SEQ ID NO: 1091619 - DNA, 25 bp, Homo sapien
aggagtggggtcctcgataaagagg

SEQ ID NO: 1091620 - DNA, 25 bp, Homo sapien
gggtcctcgataaagagggctttga

SEQ ID NO: 1091621 - DNA, 25 bp, Homo sapien
aaaggcagagttagaagcatgtggt

SEQ ID NO: 1091622 - DNA, 25 bp, Homo sapien
gcatgtggttcaacacagagacatt

SEQ ID NO: 1091623 - DNA, 25 bp, Homo sapien
gttcacagcccgtgctcgctcatgg

SEQ ID NO: 1091624 - DNA, 25 bp, Homo sapien
gctcatgggccttcccagagttcat

SEQ ID NO: 1091625 - DNA, 25 bp, Homo sapien
tttggagctccagaatagtgtagag

SEQ ID NO: 1091626 - DNA, 25 bp, Homo sapien
aatgtgaaggatgagtctccccagc

SEQ ID NO: 1091627 - DNA, 25 bp, Homo sapien
atgatgatgccgtccagagcctcac

SEQ ID NO: 1091628 - DNA, 25 bp, Homo sapien
tcacagccaatctcctcatcaggat

SEQ ID NO: 1091629 - DNA, 25 bp, Homo sapien
gaaatgcttgttgctctcatatagc

SEQ ID NO: 1091630 - DNA, 25 bp, Homo sapien
catatagctcctttttgttggtctc

SEQ ID NO: 1091631 - DNA, 25 bp, Homo sapien
tcgatcacccgcagaatgttctggc

SEQ ID NO: 1091632 - DNA, 25 bp, Homo sapien
tctggcacgggctcacagggttgta

SEQ ID NO: 1091633 - DNA, 25 bp, Homo sapien
cccaccctccgctcctggatgggca

SEQ ID NO: 1091634 - DNA, 25 bp, Homo sapien
tccgctcctggatgggcaccaggca

SEQ ID NO: 1091635 - DNA, 25 bp, Homo sapien
tcctggatgggcaccaggcagtcac

SEQ ID NO: 1091636 - DNA, 25 bp, Homo sapien
accctccgctcctggatgggcacca

SEQ ID NO: 1091637 - DNA, 25 bp, Homo sapien
agctgagcatgacctccgaggccag

SEQ ID NO: 1091638 - DNA, 25 bp, Homo sapien
cactccagcaccgagctgagcatga

SEQ ID NO: 1091639 - DNA, 25 bp, Homo sapien
tgtggcggtaccactccagcaccga

SEQ ID NO: 1091640 - DNA, 25 bp, Homo sapien
tccagcgccctgtggcggtaccact

SEQ ID NO: 1091641 - DNA, 25 bp, Homo sapien
tagatgccttgcatgatttctggga

SEQ ID NO: 1091642 - DNA, 25 bp, Homo sapien
ccaccacaacctcggtcatgaagga

SEQ ID NO: 1091643 - DNA, 25 bp, Homo sapien
tggcgggcccgaggctcctggatgt

SEQ ID NO: 1091644 - DNA, 25 bp, Homo sapien
agctgcatgtagatgccttgcatga

SEQ ID NO: 1091645 - DNA, 25 bp, Homo sapien
gctgggcttacacagtatcagctgc

SEQ ID NO: 1091646 - DNA, 25 bp, Homo sapien
catcacagctgggcttacacagtat

SEQ ID NO: 1091647 - DNA, 25 bp, Homo sapien
caggaggtctcggacatcacagctg

SEQ ID NO: 1091648 - DNA, 25 bp, Homo sapien
aggggcacgatggaagcccggccct

SEQ ID NO: 1091649 - DNA, 25 bp, Homo sapien
cagctgagggtagatgcgcctcaca

SEQ ID NO: 1091650 - DNA, 25 bp, Homo sapien
gtaatggacctgaatgagcagggcc

SEQ ID NO: 1091651 - DNA, 25 bp, Homo sapien
catgcagctgttgacggacaggagc

SEQ ID NO: 1091652 - DNA, 25 bp, Homo sapien
gagagggctgtgcacccttcttggt

SEQ ID NO: 1091653 - DNA, 25 bp, Homo sapien
tattgattgattgcccctgagactt

SEQ ID NO: 1091654 - DNA, 25 bp, Homo sapien
ctattgattgattgcccctgagact

SEQ ID NO: 1091655 - DNA, 25 bp, Homo sapien
gattgattgcccctgagacttttgg

SEQ ID NO: 1091656 - DNA, 25 bp, Homo sapien
ttgattgattgcccctgagactttt

SEQ ID NO: 1091657 - DNA, 25 bp, Homo sapien
tcagtagcagggttttcaccacttt

SEQ ID NO: 1091658 - DNA, 25 bp, Homo sapien
agtagcagggttttcaccactttca

SEQ ID NO: 1091659 - DNA, 25 bp, Homo sapien
gcagggttttcaccactttcaccac

SEQ ID NO: 1091660 - DNA, 25 bp, Homo sapien
tagcagggttttcaccactttcacc

SEQ ID NO: 1091661 - DNA, 25 bp, Homo sapien
gccaccctggtcctccagaaacgtg

SEQ ID NO: 1091662 - DNA, 25 bp, Homo sapien
cctccagaaacgtggtctcataaga

SEQ ID NO: 1091663 - DNA, 25 bp, Homo sapien
ccgcggtggtggctctccacctgct

SEQ ID NO: 1091664 - DNA, 25 bp, Homo sapien
aaacgtggtctcataagagcagccc

SEQ ID NO: 1091665 - DNA, 25 bp, Homo sapien
tagtcccctcaggtatccagcccca

SEQ ID NO: 1091666 - DNA, 25 bp, Homo sapien
agtcccctcaggtatccagccccag

SEQ ID NO: 1091667 - DNA, 25 bp, Homo sapien
caggtagaggatgcggcacagctcc

SEQ ID NO: 1091668 - DNA, 25 bp, Homo sapien
tgatcctgtgcttctcgtcgcctcg

SEQ ID NO: 1091669 - DNA, 25 bp, Homo sapien
ccaggagcgggatgagcaggtagag

SEQ ID NO: 1091670 - DNA, 25 bp, Homo sapien
aaggcggtggccgtgatcctgtgct

SEQ ID NO: 1091671 - DNA, 25 bp, Homo sapien
gaaatgaccagtgacgtgaaccgag

SEQ ID NO: 1091672 - DNA, 25 bp, Homo sapien
tgcccagcaaaggttggtggttccc

SEQ ID NO: 1091673 - DNA, 25 bp, Homo sapien
tatatgtctcgtgcctgacacacag

SEQ ID NO: 1091674 - DNA, 25 bp, Homo sapien
tagtcaagagaagtcatgcccatgg

SEQ ID NO: 1091675 - DNA, 25 bp, Homo sapien
ctgttataactggggtgtcctctgt

SEQ ID NO: 1091676 - DNA, 25 bp, Homo sapien
atcaccccctgttataactggggtg

SEQ ID NO: 1091677 - DNA, 25 bp, Homo sapien
ccctgttataactggggtgtcctct

SEQ ID NO: 1091678 - DNA, 25 bp, Homo sapien
tggtatcaccccctgttataactgg

SEQ ID NO: 1091679 - DNA, 25 bp, Homo sapien
cagtatttgttcaggcactccttca

SEQ ID NO: 1091680 - DNA, 25 bp, Homo sapien
tccctggaggtgacacattctgctg

SEQ ID NO: 1091681 - DNA, 25 bp, Homo sapien
ggtgcaataccaatgtgacatggtc

SEQ ID NO: 1091682 - DNA, 25 bp, Homo sapien
caaaagtacctaggatgcccatgct

SEQ ID NO: 1091683 - DNA, 25 bp, Homo sapien
catgagtatcacaattccttcttcg

SEQ ID NO: 1091684 - DNA, 25 bp, Homo sapien
gtatcacaattccttcttcgcaggg

SEQ ID NO: 1091685 - DNA, 25 bp, Homo sapien
tcacaattccttcttcgcagggttg

SEQ ID NO: 1091686 - DNA, 25 bp, Homo sapien
gagtatcacaattccttcttcgcag

SEQ ID NO: 1091687 - DNA, 25 bp, Homo sapien
tctaggaggtggtcaagtcatcatc

SEQ ID NO: 1091688 - DNA, 25 bp, Homo sapien
cagacttagaagtgcctctccaaga

SEQ ID NO: 1091689 - DNA, 25 bp, Homo sapien
gctgaccaaagtagaggaccgtgtc

SEQ ID NO: 1091690 - DNA, 25 bp, Homo sapien
tcctctcctgcaagaacccatgtgg

SEQ ID NO: 1091691 - DNA, 25 bp, Homo sapien
caccaccaatattcaggcctgctgt

SEQ ID NO: 1091692 - DNA, 25 bp, Homo sapien
tcacaccaccaatattcaggcctgc

SEQ ID NO: 1091693 - DNA, 25 bp, Homo sapien
ccaccaatattcaggcctgctgtgc

SEQ ID NO: 1091694 - DNA, 25 bp, Homo sapien
acaccaccaatattcaggcctgctg

SEQ ID NO: 1091695 - DNA, 25 bp, Homo sapien
caggacaggtcaccgggggaggagg

SEQ ID NO: 1091696 - DNA, 25 bp, Homo sapien
ttcgatgcctgctgcatgactctca

SEQ ID NO: 1091697 - DNA, 25 bp, Homo sapien
tgactctcacaaacgcttctcccct

SEQ ID NO: 1091698 - DNA, 25 bp, Homo sapien
tcctgtgactgttgagcccgtgtgt

SEQ ID NO: 1091699 - DNA, 25 bp, Homo sapien
tgacatctcctgtgactgttgagcc

SEQ ID NO: 1091700 - DNA, 25 bp, Homo sapien
caacatgaatcttggcttgggccgg

SEQ ID NO: 1091701 - DNA, 25 bp, Homo sapien
tagctaacatcaactctggtgcgga

SEQ ID NO: 1091702 - DNA, 25 bp, Homo sapien
taaagctaggcttgacactgcccct

SEQ ID NO: 1091703 - DNA, 25 bp, Homo sapien
tgtggcagggttagcactaccagcc

SEQ ID NO: 1091704 - DNA, 25 bp, Homo sapien
ctgtgactgcttgttgttgcctttc

SEQ ID NO: 1091705 - DNA, 25 bp, Homo sapien
cctgtgactgcttgttgttgccttt

SEQ ID NO: 1091706 - DNA, 25 bp, Homo sapien
ccctgtgactgcttgttgttgcctt

SEQ ID NO: 1091707 - DNA, 25 bp, Homo sapien
cccctgtgactgcttgttgttgcct

SEQ ID NO: 1091708 - DNA, 25 bp, Homo sapien
tgcaaaaccaacagattgctggaag

SEQ ID NO: 1091709 - DNA, 25 bp, Homo sapien
accaacagattgctggaagtctccg

SEQ ID NO: 1091710 - DNA, 25 bp, Homo sapien
gattgctggaagtctccgtctgatg

SEQ ID NO: 1091711 - DNA, 25 bp, Homo sapien
tgctggaagtctccgtctgatgtcc

SEQ ID NO: 1091712 - DNA, 25 bp, Homo sapien
gggagcaaagggtcattacttccca

SEQ ID NO: 1091713 - DNA, 25 bp, Homo sapien
atgcactgggattgcacattggata

SEQ ID NO: 1091714 - DNA, 25 bp, Homo sapien
agcaccttcatgatggggtcgtggt

SEQ ID NO: 1091715 - DNA, 25 bp, Homo sapien
tccgccccagagagtattcctcggg

SEQ ID NO: 1091716 - DNA, 25 bp, Homo sapien
attcctcggggatccggcgcacctg

SEQ ID NO: 1091717 - DNA, 25 bp, Homo sapien
gatgaccaggcctcgaatggacagc

SEQ ID NO: 1091718 - DNA, 25 bp, Homo sapien
ggttgtggaccgcttccaccaccag

SEQ ID NO: 1091719 - DNA, 25 bp, Homo sapien
ttcaggcccttcaccatggagggca

SEQ ID NO: 1091720 - DNA, 25 bp, Homo sapien
tcgctgaagtgcggcagcaggatct

SEQ ID NO: 1091721 - DNA, 25 bp, Homo sapien
catagaccgcactgtccatcagctt

SEQ ID NO: 1091722 - DNA, 25 bp, Homo sapien
gaccaccttcccatacaggttgatg

SEQ ID NO: 1091723 - DNA, 25 bp, Homo sapien
ttgatgcaggaggagcgcacgacct

SEQ ID NO: 1091724 - DNA, 25 bp, Homo sapien
gcgtggtgcccgaagcttctggacc

SEQ ID NO: 1091725 - DNA, 25 bp, Homo sapien
ggcaccaaggtgctgaccagctgct

SEQ ID NO: 1091726 - DNA, 25 bp, Homo sapien
cagggcttccggctataagctcttt

SEQ ID NO: 1091727 - DNA, 25 bp, Homo sapien
tgctgttggttgtcccagggcttcc

SEQ ID NO: 1091728 - DNA, 25 bp, Homo sapien
taagctctttttggcaactcccaag

SEQ ID NO: 1091729 - DNA, 25 bp, Homo sapien
aacagcgtaacagggtcttcacaca

SEQ ID NO: 1091730 - DNA, 25 bp, Homo sapien
ttaaatgagcaaagctcttgatggc

SEQ ID NO: 1091731 - DNA, 25 bp, Homo sapien
tttaaatgagcaaagctcttgatgg

SEQ ID NO: 1091732 - DNA, 25 bp, Homo sapien
ctttaaatgagcaaagctcttgatg

SEQ ID NO: 1091733 - DNA, 25 bp, Homo sapien
ggcccgtgagttcttggcatactcc

SEQ ID NO: 1091734 - DNA, 25 bp, Homo sapien
ctctggctgaggaatatgaaggcgc

SEQ ID NO: 1091735 - DNA, 25 bp, Homo sapien
ggaggcccgtgagttcttggcatac

SEQ ID NO: 1091736 - DNA, 25 bp, Homo sapien
aaggcgctgtctcggtgggtgttca

SEQ ID NO: 1091737 - DNA, 25 bp, Homo sapien
agctttcacttcattcagacgatct

SEQ ID NO: 1091738 - DNA, 25 bp, Homo sapien
tcttctgtcattatgctctccatgc

SEQ ID NO: 1091739 - DNA, 25 bp, Homo sapien
tcattcagacgatcttctgtcatta

SEQ ID NO: 1091740 - DNA, 25 bp, Homo sapien
ctgtcattatgctctccatgcaggg

SEQ ID NO: 1091741 - DNA, 25 bp, Homo sapien
gcgtcatggggaagggagaagcctc

SEQ ID NO: 1091742 - DNA, 25 bp, Homo sapien
ctgcgtcatggggaagggagaagcc

SEQ ID NO: 1091743 - DNA, 25 bp, Homo sapien
tgcgtcatggggaagggagaagcct

SEQ ID NO: 1091744 - DNA, 25 bp, Homo sapien
atgagttcccgtgcggcagccagga

SEQ ID NO: 1091745 - DNA, 25 bp, Homo sapien
tctgggtcatgtctcaagttatcca

SEQ ID NO: 1091746 - DNA, 25 bp, Homo sapien
tgcacactgatgcttctgggtcatg

SEQ ID NO: 1091747 - DNA, 25 bp, Homo sapien
tggacctgggctgcgtagatgcaca

SEQ ID NO: 1091748 - DNA, 25 bp, Homo sapien
gtgcctgcatgatccaggagcgccg

SEQ ID NO: 1091749 - DNA, 25 bp, Homo sapien
gcctgcatgatccaggagcgccgct

SEQ ID NO: 1091750 - DNA, 25 bp, Homo sapien
tgcatgatccaggagcgccgctggt

SEQ ID NO: 1091751 - DNA, 25 bp, Homo sapien
cagtgcctgcatgatccaggagcgc

SEQ ID NO: 1091752 - DNA, 25 bp, Homo sapien
atgacatttatagggagcatggctg

SEQ ID NO: 1091753 - DNA, 25 bp, Homo sapien
tgacatttatagggagcatggctgg

SEQ ID NO: 1091754 - DNA, 25 bp, Homo sapien
gcatggctggaactcaaccaccctg

SEQ ID NO: 1091755 - DNA, 25 bp, Homo sapien
catggctggaactcaaccaccctga

SEQ ID NO: 1091756 - DNA, 25 bp, Homo sapien
catctggcagccccgaactgctgtg

SEQ ID NO: 1091757 - DNA, 25 bp, Homo sapien
tggcagccccgaactgctgtgcagg

SEQ ID NO: 1091758 - DNA, 25 bp, Homo sapien
tcagcactgggttttaggtcccatc

SEQ ID NO: 1091759 - DNA, 25 bp, Homo sapien
tcccctcagcactgggttttaggtc

SEQ ID NO: 1091760 - DNA, 25 bp, Homo sapien
tgcacagtccctcaagcttaccatg

SEQ ID NO: 1091761 - DNA, 25 bp, Homo sapien
cattctgtcaaccactaggctctga

SEQ ID NO: 1091762 - DNA, 25 bp, Homo sapien
tatctccactagcttgctgcacagt

SEQ ID NO: 1091763 - DNA, 25 bp, Homo sapien
cattggcttagtcatccacccagaa

SEQ ID NO: 1091764 - DNA, 25 bp, Homo sapien
ttagctctttctgcgcttccggcct

SEQ ID NO: 1091765 - DNA, 25 bp, Homo sapien
gatgaaatctctgccctctaggagt

SEQ ID NO: 1091766 - DNA, 25 bp, Homo sapien
gctatatagcggtgggcagagcaga

SEQ ID NO: 1091767 - DNA, 25 bp, Homo sapien
tgttctagtggctggctatatagcg

SEQ ID NO: 1091768 - DNA, 25 bp, Homo sapien
atcctcccggcagcgcaggtccccg

SEQ ID NO: 1091769 - DNA, 25 bp, Homo sapien
gccgtgaagcgagcggctccttccg

SEQ ID NO: 1091770 - DNA, 25 bp, Homo sapien
tcccagcgccgtgaagcgagcggct

SEQ ID NO: 1091771 - DNA, 25 bp, Homo sapien
ttccctcaatcctcccggcagcgca

SEQ ID NO: 1091772 - DNA, 25 bp, Homo sapien
ggtgggatcctgcccaggttgttcc

SEQ ID NO: 1091773 - DNA, 25 bp, Homo sapien
gacgtcgtctgaggtgggatcctgc

SEQ ID NO: 1091774 - DNA, 25 bp, Homo sapien
cgtcgtctgaggtgggatcctgccc

SEQ ID NO: 1091775 - DNA, 25 bp, Homo sapien
tgggatcctgcccaggttgttccat

SEQ ID NO: 1091776 - DNA, 25 bp, Homo sapien
ccactggtcctcatgaaagccgcca

SEQ ID NO: 1091777 - DNA, 25 bp, Homo sapien
gtcctcatgaaagccgccacggtaa

SEQ ID NO: 1091778 - DNA, 25 bp, Homo sapien
catgaaagccgccacggtaaggctg

SEQ ID NO: 1091779 - DNA, 25 bp, Homo sapien
tggtcctcatgaaagccgccacggt

SEQ ID NO: 1091780 - DNA, 25 bp, Homo sapien
gggatctgggattgaaggaggtgcc

SEQ ID NO: 1091781 - DNA, 25 bp, Homo sapien
ggtgccccacgagtccggacgacgc

SEQ ID NO: 1091782 - DNA, 25 bp, Homo sapien
gagtccggacgacgcccctacacac

SEQ ID NO: 1091783 - DNA, 25 bp, Homo sapien
gaaaccagcgatcggctggcagcgc

SEQ ID NO: 1091784 - DNA, 25 bp, Homo sapien
tatagttcgcgcagttttacagatg

SEQ ID NO: 1091785 - DNA, 25 bp, Homo sapien
cagagccagttaagtggtggagtca

SEQ ID NO: 1091786 - DNA, 25 bp, Homo sapien
ctaggttctcagcttaagaagcgac

SEQ ID NO: 1091787 - DNA, 25 bp, Homo sapien
taattgagcgcccttatgttcttgg

SEQ ID NO: 1091788 - DNA, 25 bp, Homo sapien
gatggcgctctcgacataaataggg

SEQ ID NO: 1091789 - DNA, 25 bp, Homo sapien
cttctggagaacgctcctcatcaaa

SEQ ID NO: 1091790 - DNA, 25 bp, Homo sapien
tttctgatggcgctctcgacataaa

SEQ ID NO: 1091791 - DNA, 25 bp, Homo sapien
tctgatggcgctctcgacataaata

SEQ ID NO: 1091792 - DNA, 25 bp, Homo sapien
tgctgctgcccggttggtataaagg

SEQ ID NO: 1091793 - DNA, 25 bp, Homo sapien
tcatctttataggtcttggcctgtt

SEQ ID NO: 1091794 - DNA, 25 bp, Homo sapien
tgccctcatctttataggtcttggc

SEQ ID NO: 1091795 - DNA, 25 bp, Homo sapien
tgcccggttggtataaaggacagca

SEQ ID NO: 1091796 - DNA, 25 bp, Homo sapien
cataagtttattcttcagaaagcac

SEQ ID NO: 1091797 - DNA, 25 bp, Homo sapien
gatgttctcaaacctccactaacca

SEQ ID NO: 1091798 - DNA, 25 bp, Homo sapien
aaacctccactaaccatcataatgg

SEQ ID NO: 1091799 - DNA, 25 bp, Homo sapien
ccatcataatggcttgtatcataag

SEQ ID NO: 1091800 - DNA, 25 bp, Homo sapien
tactcaggactcaggaactgatggc

SEQ ID NO: 1091801 - DNA, 25 bp, Homo sapien
aaatgcacatgaaagggatccaagg

SEQ ID NO: 1091802 - DNA, 25 bp, Homo sapien
gactggaggtttaccctagcagaca

SEQ ID NO: 1091803 - DNA, 25 bp, Homo sapien
cactgagtacacagcacattgggag

SEQ ID NO: 1091804 - DNA, 25 bp, Homo sapien
gaaacacggtaggatgtctgttcta

SEQ ID NO: 1091805 - DNA, 25 bp, Homo sapien
ttatccaaactagcaagccatgagg

SEQ ID NO: 1091806 - DNA, 25 bp, Homo sapien
tagatcctcatgtaagaaacacggt

SEQ ID NO: 1091807 - DNA, 25 bp, Homo sapien
tttaggtgttgcaggccacatgtgg

SEQ ID NO: 1091808 - DNA, 25 bp, Homo sapien
ttgctttgaggtggcagggttttag

SEQ ID NO: 1091809 - DNA, 25 bp, Homo sapien
tgaggtggcagggttttagctttct

SEQ ID NO: 1091810 - DNA, 25 bp, Homo sapien
gtcacatcattgagagcagaacgaa

SEQ ID NO: 1091811 - DNA, 25 bp, Homo sapien
ctgtcacatcattgagagcagaacg

SEQ ID NO: 1091812 - DNA, 25 bp, Homo sapien
ctcatcacaccagttcacggcctcg

SEQ ID NO: 1091813 - DNA, 25 bp, Homo sapien
atcacaccagttcacggcctcggca

SEQ ID NO: 1091814 - DNA, 25 bp, Homo sapien
ccagttcacggcctcggcaaagtgt

SEQ ID NO: 1091815 - DNA, 25 bp, Homo sapien
acaccagttcacggcctcggcaaag

SEQ ID NO: 1091816 - DNA, 25 bp, Homo sapien
atttccagagtcctagaaaagtgaa

SEQ ID NO: 1091817 - DNA, 25 bp, Homo sapien
ggtctttagtccaccactgtgattg

SEQ ID NO: 1091818 - DNA, 25 bp, Homo sapien
tgtgattgacactacccctctctat

SEQ ID NO: 1091819 - DNA, 25 bp, Homo sapien
tttccagagtcctagaaaagtgaat

SEQ ID NO: 1091820 - DNA, 25 bp, Homo sapien
gattgttggtcattcagagtccctt

SEQ ID NO: 1091821 - DNA, 25 bp, Homo sapien
gatggcatcatacaagtctctcttc

SEQ ID NO: 1091822 - DNA, 25 bp, Homo sapien
gaagtttatggccaatatttcccca

SEQ ID NO: 1091823 - DNA, 25 bp, Homo sapien
tatatacacggtcaagttgtctgca

SEQ ID NO: 1091824 - DNA, 25 bp, Homo sapien
catatccaagttcatgaagattcat

SEQ ID NO: 1091825 - DNA, 25 bp, Homo sapien
tgatgaagtgcaatcaatctacttt

SEQ ID NO: 1091826 - DNA, 25 bp, Homo sapien
ggtaaagttctagcttcattctccc

SEQ ID NO: 1091827 - DNA, 25 bp, Homo sapien
tgggtatttgatctactttgggtaa

SEQ ID NO: 1091828 - DNA, 25 bp, Homo sapien
gatggcctggagtaaagcctcattc

SEQ ID NO: 1091829 - DNA, 25 bp, Homo sapien
tggcctggagtaaagcctcattctg

SEQ ID NO: 1091830 - DNA, 25 bp, Homo sapien
gcctggagtaaagcctcattctgat

SEQ ID NO: 1091831 - DNA, 25 bp, Homo sapien
tgatggcctggagtaaagcctcatt

SEQ ID NO: 1091832 - DNA, 25 bp, Homo sapien
tagaccttctgaggctgaatcttca

SEQ ID NO: 1091833 - DNA, 25 bp, Homo sapien
cacaggcagcttctgagagcctgat

SEQ ID NO: 1091834 - DNA, 25 bp, Homo sapien
ctagaccttctgaggctgaatcttc

SEQ ID NO: 1091835 - DNA, 25 bp, Homo sapien
cttctgagagcctgatattcctagc

SEQ ID NO: 1091836 - DNA, 25 bp, Homo sapien
ctggctccatgggggttctcagtgc

SEQ ID NO: 1091837 - DNA, 25 bp, Homo sapien
gctgagtccatccaggaaaagctca

SEQ ID NO: 1091838 - DNA, 25 bp, Homo sapien
ggggttctcagtgctgagtccatcc

SEQ ID NO: 1091839 - DNA, 25 bp, Homo sapien
gcctggctccatgggggttctcagt

SEQ ID NO: 1091840 - DNA, 25 bp, Homo sapien
tgggtacagaaagagcacaggccag

SEQ ID NO: 1091841 - DNA, 25 bp, Homo sapien
ggtacagaaagagcacaggccagct

SEQ ID NO: 1091842 - DNA, 25 bp, Homo sapien
ctgggtacagaaagagcacaggcca

SEQ ID NO: 1091843 - DNA, 25 bp, Homo sapien
tacagaaagagcacaggccagctca

SEQ ID NO: 1091844 - DNA, 25 bp, Homo sapien
gagatgaagtccgactgggcatact

SEQ ID NO: 1091845 - DNA, 25 bp, Homo sapien
tggagtcctcatgaaaagcagagat

SEQ ID NO: 1091846 - DNA, 25 bp, Homo sapien
cagagatgaagtccgactgggcata

SEQ ID NO: 1091847 - DNA, 25 bp, Homo sapien
aagcagagatgaagtccgactgggc

SEQ ID NO: 1091848 - DNA, 25 bp, Homo sapien
tcaccaaacatcaccattagatgat

SEQ ID NO: 1091849 - DNA, 25 bp, Homo sapien
caatatttttgctctaggtcccaag

SEQ ID NO: 1091850 - DNA, 25 bp, Homo sapien
caaacatcaccattagatgatcaat

SEQ ID NO: 1091851 - DNA, 25 bp, Homo sapien
ccaaattatcagggcaatatttttg

SEQ ID NO: 1091852 - DNA, 25 bp, Homo sapien
tatggagtttacaggcccaactagg

SEQ ID NO: 1091853 - DNA, 25 bp, Homo sapien
gatgtccatgtagggtcgttgagca

SEQ ID NO: 1091854 - DNA, 25 bp, Homo sapien
gcagcagcgtaacatgtggagtcaa

SEQ ID NO: 1091855 - DNA, 25 bp, Homo sapien
tgaggaagacgcctgcacaggaagc

SEQ ID NO: 1091856 - DNA, 25 bp, Homo sapien
gcacccggtatagttctgccctgtc

SEQ ID NO: 1091857 - DNA, 25 bp, Homo sapien
tcttggcaggcacccggtatagttc

SEQ ID NO: 1091858 - DNA, 25 bp, Homo sapien
ctggtgctgtagaacctgtagcaag

SEQ ID NO: 1091859 - DNA, 25 bp, Homo sapien
tagcaaggtgctcttggcaggcacc

SEQ ID NO: 1091860 - DNA, 25 bp, Homo sapien
cacagaccaaaaatgctggtgtcag

SEQ ID NO: 1091861 - DNA, 25 bp, Homo sapien
ctacacagaccaaaaatgctggtgt

SEQ ID NO: 1091862 - DNA, 25 bp, Homo sapien
tacacagaccaaaaatgctggtgtc

SEQ ID NO: 1091863 - DNA, 25 bp, Homo sapien
acagaccaaaaatgctggtgtcagg

SEQ ID NO: 1091864 - DNA, 25 bp, Homo sapien
tcatcgtatctggtacacctttctc

SEQ ID NO: 1091865 - DNA, 25 bp, Homo sapien
tcgtatctggtacacctttctcccc

SEQ ID NO: 1091866 - DNA, 25 bp, Homo sapien
catcgtatctggtacacctttctcc

SEQ ID NO: 1091867 - DNA, 25 bp, Homo sapien
atcgtatctggtacacctttctccc

SEQ ID NO: 1091868 - DNA, 25 bp, Homo sapien
tgccaggaaggactatccccagggt

SEQ ID NO: 1091869 - DNA, 25 bp, Homo sapien
cccagggtgacggaaagaaagcact

SEQ ID NO: 1091870 - DNA, 25 bp, Homo sapien
ccctctgtgcgcatgaaataacttg

SEQ ID NO: 1091871 - DNA, 25 bp, Homo sapien
tgtagctcggctccatggaacggct

SEQ ID NO: 1091872 - DNA, 25 bp, Homo sapien
agtagacacggggtttgctatgttg

SEQ ID NO: 1091873 - DNA, 25 bp, Homo sapien
gtagacacggggtttgctatgttgg

SEQ ID NO: 1091874 - DNA, 25 bp, Homo sapien
cacctccgcctcccaaagtgtcggg

SEQ ID NO: 1091875 - DNA, 25 bp, Homo sapien
ccacctccgcctcccaaagtgtcgg

SEQ ID NO: 1091876 - DNA, 25 bp, Homo sapien
tgcccactaggttttggccataagg

SEQ ID NO: 1091877 - DNA, 25 bp, Homo sapien
ggcttgtctgcaaggactgcccact

SEQ ID NO: 1091878 - DNA, 25 bp, Homo sapien
cacaacacagtggtgttccgggccc

SEQ ID NO: 1091879 - DNA, 25 bp, Homo sapien
caggctctgtttcccgtgtcaggga

SEQ ID NO: 1091880 - DNA, 25 bp, Homo sapien
ttctacaacctggtgttttgtcatg

SEQ ID NO: 1091881 - DNA, 25 bp, Homo sapien
ctgcctacaccttctacaacctggt

SEQ ID NO: 1091882 - DNA, 25 bp, Homo sapien
agatcctgaacggccttgaatgcca

SEQ ID NO: 1091883 - DNA, 25 bp, Homo sapien
ccagatcctgaacggccttgaatgc

SEQ ID NO: 1091884 - DNA, 25 bp, Homo sapien
gggcccagatcctgaacggccttga

SEQ ID NO: 1091885 - DNA, 25 bp, Homo sapien
gcccagatcctgaacggccttgaat

SEQ ID NO: 1091886 - DNA, 25 bp, Homo sapien
tgcatctcacatatccactgatgga

SEQ ID NO: 1091887 - DNA, 25 bp, Homo sapien
tcttggaatcatagtcgtagaatcc

SEQ ID NO: 1091888 - DNA, 25 bp, Homo sapien
tatcctcgctcattaccagggacag

SEQ ID NO: 1091889 - DNA, 25 bp, Homo sapien
aaaactgagagccatagaagggaag

SEQ ID NO: 1091890 - DNA, 25 bp, Homo sapien
ccgggctgtctcattctagggctca

SEQ ID NO: 1091891 - DNA, 25 bp, Homo sapien
tgcggctgctcttcgagaccatgga

SEQ ID NO: 1091892 - DNA, 25 bp, Homo sapien
agccagttcgattcttggtcgggaa

SEQ ID NO: 1091893 - DNA, 25 bp, Homo sapien
ggatggactccctgccttaggctga

SEQ ID NO: 1091894 - DNA, 25 bp, Homo sapien
cttgcctctgggagtcataaactct

SEQ ID NO: 1091895 - DNA, 25 bp, Homo sapien
ccaggctgcctccaaacatcttgcc

SEQ ID NO: 1091896 - DNA, 25 bp, Homo sapien
tccttgcagccataagaggtttcac

SEQ ID NO: 1091897 - DNA, 25 bp, Homo sapien
gccataagaggtttcacagcaactt

SEQ ID NO: 1091898 - DNA, 25 bp, Homo sapien
tgaagtaccaggttaagtaggcaac

SEQ ID NO: 1091899 - DNA, 25 bp, Homo sapien
gagactgttacactggacatgtgac

SEQ ID NO: 1091900 - DNA, 25 bp, Homo sapien
tggtaaacactgtacaaacactagc

SEQ ID NO: 1091901 - DNA, 25 bp, Homo sapien
gacatgtgactgtgaagatagcatc

SEQ ID NO: 1091902 - DNA, 25 bp, Homo sapien
ccttcacagagtcagcatgatgagg

SEQ ID NO: 1091903 - DNA, 25 bp, Homo sapien
tggcacttctgccctgggctatggg

SEQ ID NO: 1091904 - DNA, 25 bp, Homo sapien
gcacttctgccctgggctatggggc

SEQ ID NO: 1091905 - DNA, 25 bp, Homo sapien
tcacagagtcagcatgatgaggtgg

SEQ ID NO: 1091906 - DNA, 25 bp, Homo sapien
tttaatatggatgccattgggtggg

SEQ ID NO: 1091907 - DNA, 25 bp, Homo sapien
gcgtgcgcacgtagcccgctgattt

SEQ ID NO: 1091908 - DNA, 25 bp, Homo sapien
ggtcttacagtcatttgttgaggaa

SEQ ID NO: 1091909 - DNA, 25 bp, Homo sapien
tggcccctgcagatgtaatggccct

SEQ ID NO: 1091910 - DNA, 25 bp, Homo sapien
gccgacgcggttccagccatgagct

SEQ ID NO: 1091911 - DNA, 25 bp, Homo sapien
ttggtggccgtggagccgacgcggt

SEQ ID NO: 1091912 - DNA, 25 bp, Homo sapien
catgagctccggcggcatcctggct

SEQ ID NO: 1091913 - DNA, 25 bp, Homo sapien
gagctccggcggcatcctggctttc

SEQ ID NO: 1091914 - DNA, 25 bp, Homo sapien
tgcaccccgaagggcgccccggtga

SEQ ID NO: 1091915 - DNA, 25 bp, Homo sapien
tggctctgcaccccgaagggcgccc

SEQ ID NO: 1091916 - DNA, 25 bp, Homo sapien
ctctgcaccccgaagggcgccccgg

SEQ ID NO: 1091917 - DNA, 25 bp, Homo sapien
ataacgcgtggagtatggggcctca

SEQ ID NO: 1091918 - DNA, 25 bp, Homo sapien
ggtagaataacgcgtggagtatggg

SEQ ID NO: 1091919 - DNA, 25 bp, Homo sapien
acttcttccagttgggataaacagc

SEQ ID NO: 1091920 - DNA, 25 bp, Homo sapien
cttcttccagttgggataaacagca

SEQ ID NO: 1091921 - DNA, 25 bp, Homo sapien
cacgcccgcccagtctacccacaga

SEQ ID NO: 1091922 - DNA, 25 bp, Homo sapien
agctgtgacagccacgcccgcccag

SEQ ID NO: 1091923 - DNA, 25 bp, Homo sapien
gctgtgacagccacgcccgcccagt

SEQ ID NO: 1091924 - DNA, 25 bp, Homo sapien
cccgcccagtctacccacagagcag

SEQ ID NO: 1091925 - DNA, 25 bp, Homo sapien
tgggtcagccgcgtggcttcctggg

SEQ ID NO: 1091926 - DNA, 25 bp, Homo sapien
tctctttcatgatggcctggtactg

SEQ ID NO: 1091927 - DNA, 25 bp, Homo sapien
ttcagccgcttctctttcatgatgg

SEQ ID NO: 1091928 - DNA, 25 bp, Homo sapien
gccgcttctctttcatgatggcctg

SEQ ID NO: 1091929 - DNA, 25 bp, Homo sapien
cttaaacttgggaaaatccacgcag

SEQ ID NO: 1091930 - DNA, 25 bp, Homo sapien
gcacgatggtgttccttaaaggata

SEQ ID NO: 1091931 - DNA, 25 bp, Homo sapien
gaagcccaaggcacgatggtgttcc

SEQ ID NO: 1091932 - DNA, 25 bp, Homo sapien
ccatctggccttgggaggacactga

SEQ ID NO: 1091933 - DNA, 25 bp, Homo sapien
gcagcccccgggtgctacatggttt

SEQ ID NO: 1091934 - DNA, 25 bp, Homo sapien
ccagtgagtcctcggaagcgaacct

SEQ ID NO: 1091935 - DNA, 25 bp, Homo sapien
agaagtctttgaggttgtaggagcc

SEQ ID NO: 1091936 - DNA, 25 bp, Homo sapien
ctcccgcagctgttctaagaagtct

SEQ ID NO: 1091937 - DNA, 25 bp, Homo sapien
cagcttggtgtatgggttacccttc

SEQ ID NO: 1091938 - DNA, 25 bp, Homo sapien
atgaggccctcggaatgagaccggt

SEQ ID NO: 1091939 - DNA, 25 bp, Homo sapien
tgagaccggttccaggcattctcct

SEQ ID NO: 1091940 - DNA, 25 bp, Homo sapien
ctcctccagcttggtgtatgggtta

SEQ ID NO: 1091941 - DNA, 25 bp, Homo sapien
ctgataaggccgggggtgtggcttg

SEQ ID NO: 1091942 - DNA, 25 bp, Homo sapien
ataaggccgggggtgtggcttgttg

SEQ ID NO: 1091943 - DNA, 25 bp, Homo sapien
gggtgtggcttgttgctcatcctgc

SEQ ID NO: 1091944 - DNA, 25 bp, Homo sapien
aggccgggggtgtggcttgttgctc

SEQ ID NO: 1091945 - DNA, 25 bp, Homo sapien
tgccacatatgtctcaaggtcgctt

SEQ ID NO: 1091946 - DNA, 25 bp, Homo sapien
gagtagtgcccataaggcagtggct

SEQ ID NO: 1091947 - DNA, 25 bp, Homo sapien
ggtgccgacggatcgtgccacatat

SEQ ID NO: 1091948 - DNA, 25 bp, Homo sapien
gcttgctccgatcaccagagaaagt

SEQ ID NO: 1091949 - DNA, 25 bp, Homo sapien
gttggcccagtaaatcctctctgta

SEQ ID NO: 1091950 - DNA, 25 bp, Homo sapien
ggcccagtaaatcctctctgtaggg

SEQ ID NO: 1091951 - DNA, 25 bp, Homo sapien
taagttcttctacaaagctcttgaa

SEQ ID NO: 1091952 - DNA, 25 bp, Homo sapien
tcttattgtgatgtgagttaagttc

SEQ ID NO: 1091953 - DNA, 25 bp, Homo sapien
ttcttctcttgtggaagccagaaac

SEQ ID NO: 1091954 - DNA, 25 bp, Homo sapien
cacctgaccccttggaggtcaacag

SEQ ID NO: 1091955 - DNA, 25 bp, Homo sapien
tgcatttcttctcttgtggaagcca

SEQ ID NO: 1091956 - DNA, 25 bp, Homo sapien
ggctggttgacgggtttgcatttct

SEQ ID NO: 1091957 - DNA, 25 bp, Homo sapien
aggtagcggcccacacctactgggt

SEQ ID NO: 1091958 - DNA, 25 bp, Homo sapien
ccactcaggaatagggatcgatatc

SEQ ID NO: 1091959 - DNA, 25 bp, Homo sapien
tatcgctgccgcctgtcctttgtct

SEQ ID NO: 1091960 - DNA, 25 bp, Homo sapien
gtctgagaggtagcgtttggatcca

SEQ ID NO: 1091961 - DNA, 25 bp, Homo sapien
ttcgttgttggttacatttatctga

SEQ ID NO: 1091962 - DNA, 25 bp, Homo sapien
tgcttagtgtttgtattactactct

SEQ ID NO: 1091963 - DNA, 25 bp, Homo sapien
tttcgttgttggttacatttatctg

SEQ ID NO: 1091964 - DNA, 25 bp, Homo sapien
ttagtgtttgtattactactcttcc

SEQ ID NO: 1091965 - DNA, 25 bp, Homo sapien
ctggtaattcagatatgagaaggca

SEQ ID NO: 1091966 - DNA, 25 bp, Homo sapien
gcatggctgaatctcaagaccaccg

SEQ ID NO: 1091967 - DNA, 25 bp, Homo sapien
cttgcctgaggttatatgtatgaca

SEQ ID NO: 1091968 - DNA, 25 bp, Homo sapien
aactccagggatggtagaattgcca

SEQ ID NO: 1091969 - DNA, 25 bp, Homo sapien
aggagtagactgactacagatagca

SEQ ID NO: 1091970 - DNA, 25 bp, Homo sapien
gccaaaattgatgacttctaggcct

SEQ ID NO: 1091971 - DNA, 25 bp, Homo sapien
gcctttccaacaaaacagcctgatt

SEQ ID NO: 1091972 - DNA, 25 bp, Homo sapien
ctacattggtgagaggccaaaattg

SEQ ID NO: 1091973 - DNA, 25 bp, Homo sapien
tctaggcctttccaacaaaacagcc

SEQ ID NO: 1091974 - DNA, 25 bp, Homo sapien
tgttggttctgcttcacaggagatc

SEQ ID NO: 1091975 - DNA, 25 bp, Homo sapien
ctgttggttctgcttcacaggagat

SEQ ID NO: 1091976 - DNA, 25 bp, Homo sapien
tggcaaaggtgatccccatacatct

SEQ ID NO: 1091977 - DNA, 25 bp, Homo sapien
ggctgtccttcgcatgtggctttaa

SEQ ID NO: 1091978 - DNA, 25 bp, Homo sapien
gctttagaatagaaagggtcccaca

SEQ ID NO: 1091979 - DNA, 25 bp, Homo sapien
taaacaaggagccaagcactctggc

SEQ ID NO: 1091980 - DNA, 25 bp, Homo sapien
gcagagtcctagaattgccgtgtaa

SEQ ID NO: 1091981 - DNA, 25 bp, Homo sapien
caatgaggtgttcctgcagagtcct

SEQ ID NO: 1091982 - DNA, 25 bp, Homo sapien
tgtggacgaaactgtggtatcccag

SEQ ID NO: 1091983 - DNA, 25 bp, Homo sapien
ggtgaaaccgatgttccccatggct

SEQ ID NO: 1091984 - DNA, 25 bp, Homo sapien
ctgtcaggctcttacagccacaggc

SEQ ID NO: 1091985 - DNA, 25 bp, Homo sapien
aggctcttacagccacaggcactgt

SEQ ID NO: 1091986 - DNA, 25 bp, Homo sapien
cttctttggtcatgggggccaagga

SEQ ID NO: 1091987 - DNA, 25 bp, Homo sapien
tggcagtgtatggtgtgtgattttt

SEQ ID NO: 1091988 - DNA, 25 bp, Homo sapien
gccaaggagaaaggcatgaatcttc

SEQ ID NO: 1091989 - DNA, 25 bp, Homo sapien
tggagatgggtgtggcagtgtatgg

SEQ ID NO: 1091990 - DNA, 25 bp, Homo sapien
gagttaaacttgatgccagtgggca

SEQ ID NO: 1091991 - DNA, 25 bp, Homo sapien
tcagcgagctgtgcaacgtgggcaa

SEQ ID NO: 1091992 - DNA, 25 bp, Homo sapien
gaaaggctcatacctggcttgcagg

SEQ ID NO: 1091993 - DNA, 25 bp, Homo sapien
gaattctggcattagctctcatagg

SEQ ID NO: 1091994 - DNA, 25 bp, Homo sapien
ttgggtttctctcacgcctcgcgtt

SEQ ID NO: 1091995 - DNA, 25 bp, Homo sapien
ttgtaccacaagctgcgagagaagc

SEQ ID NO: 1091996 - DNA, 25 bp, Homo sapien
cgactgctacatgaaccgggaggag

SEQ ID NO: 1091997 - DNA, 25 bp, Homo sapien
cactgctccattagggaaggcagct

SEQ ID NO: 1091998 - DNA, 25 bp, Homo sapien
taaatgggccatccctagagctcac

SEQ ID NO: 1091999 - DNA, 25 bp, Homo sapien
caggcagttaaatgggccatcccta

SEQ ID NO: 1092000 - DNA, 25 bp, Homo sapien
agttaaatgggccatccctagagct

SEQ ID NO: 1092001 - DNA, 25 bp, Homo sapien
ctccaggcagttaaatgggccatcc

SEQ ID NO: 1092002 - DNA, 25 bp, Homo sapien
caaatgaattcgtggaaagtgcccc

SEQ ID NO: 1092003 - DNA, 25 bp, Homo sapien
ccgagtggcacgacctgcagaggtt

SEQ ID NO: 1092004 - DNA, 25 bp, Homo sapien
tgcagaggttaccgccaggtttcca

SEQ ID NO: 1092005 - DNA, 25 bp, Homo sapien
tctgggctgcttccaagtgtacaca

SEQ ID NO: 1092006 - DNA, 25 bp, Homo sapien
gggagtttactcgggctgaaatgcc

SEQ ID NO: 1092007 - DNA, 25 bp, Homo sapien
catctgcctcagtgaactggaaaaa

SEQ ID NO: 1092008 - DNA, 25 bp, Homo sapien
tccatgcttccaatggcctctggag

SEQ ID NO: 1092009 - DNA, 25 bp, Homo sapien
ccgaggcttgcaacactgcctggca

SEQ ID NO: 1092010 - DNA, 25 bp, Homo sapien
cagaggtactagcttgaccagaggc

SEQ ID NO: 1092011 - DNA, 25 bp, Homo sapien
ccagaggcgcgcaaatgaggaatgc

SEQ ID NO: 1092012 - DNA, 25 bp, Homo sapien
gataggtatgcaaggccagacagag

SEQ ID NO: 1092013 - DNA, 25 bp, Homo sapien
ttttgctggtaaccgtggcagctcc

SEQ ID NO: 1092014 - DNA, 25 bp, Homo sapien
cattcattggtcaacagccgctgga

SEQ ID NO: 1092015 - DNA, 25 bp, Homo sapien
gataacttgaatatttgagcctaca

SEQ ID NO: 1092016 - DNA, 25 bp, Homo sapien
tacaggtccaggctatttatttttg

SEQ ID NO: 1092017 - DNA, 25 bp, Homo sapien
actgtgcacaaagcaccgtgctaga

SEQ ID NO: 1092018 - DNA, 25 bp, Homo sapien
aaattactaatgagctattttgcat

SEQ ID NO: 1092019 - DNA, 25 bp, Homo sapien
ttggactagccacataccagtagct

SEQ ID NO: 1092020 - DNA, 25 bp, Homo sapien
aaagggcatttcagtttggactagc

SEQ ID NO: 1092021 - DNA, 25 bp, Homo sapien
gccacataccagtagctcatagctg

SEQ ID NO: 1092022 - DNA, 25 bp, Homo sapien
tggccgtcatgacctcagggctggt

SEQ ID NO: 1092023 - DNA, 25 bp, Homo sapien
tcctctctggtcaggcatggccgtc

SEQ ID NO: 1092024 - DNA, 25 bp, Homo sapien
gccgtcatgacctcagggctggtca

SEQ ID NO: 1092025 - DNA, 25 bp, Homo sapien
tctggtcaggcatggccgtcatgac

SEQ ID NO: 1092026 - DNA, 25 bp, Homo sapien
gatgatgtctatcgcgaaggactcc

SEQ ID NO: 1092027 - DNA, 25 bp, Homo sapien
gattgatgatgtctatcgcgaagga

SEQ ID NO: 1092028 - DNA, 25 bp, Homo sapien
ccatctagattgatgatgtctatcg

SEQ ID NO: 1092029 - DNA, 25 bp, Homo sapien
tgtctatcgcgaaggactcctcact

SEQ ID NO: 1092030 - DNA, 25 bp, Homo sapien
tacagttgtacagctctgggaccat

SEQ ID NO: 1092031 - DNA, 25 bp, Homo sapien
gcttacagttgtacagctctgggac

SEQ ID NO: 1092032 - DNA, 25 bp, Homo sapien
ctttgcttacagttgtacagctctg

SEQ ID NO: 1092033 - DNA, 25 bp, Homo sapien
ttgcttacagttgtacagctctggg

SEQ ID NO: 1092034 - DNA, 25 bp, Homo sapien
ttggcgcggatcggaaccttgggtc

SEQ ID NO: 1092035 - DNA, 25 bp, Homo sapien
cttggcgcggatcggaaccttgggt

SEQ ID NO: 1092036 - DNA, 25 bp, Homo sapien
ccgtccttaaagcgccagcacgatt

SEQ ID NO: 1092037 - DNA, 25 bp, Homo sapien
taaagcgccagcacgattgggctgg

SEQ ID NO: 1092038 - DNA, 25 bp, Homo sapien
ggactggggcttgccagcgcggcgg

SEQ ID NO: 1092039 - DNA, 25 bp, Homo sapien
tccaggtgtccagcgctgtcgccca

SEQ ID NO: 1092040 - DNA, 25 bp, Homo sapien
ctccactccggtggtgacgcccgcc

SEQ ID NO: 1092041 - DNA, 25 bp, Homo sapien
ccctccactccggtggtgacgcccg

SEQ ID NO: 1092042 - DNA, 25 bp, Homo sapien
cacccggtgcgcagggaccgagcca

SEQ ID NO: 1092043 - DNA, 25 bp, Homo sapien
ccgccgcccgcacccggtgcgcagg

SEQ ID NO: 1092044 - DNA, 25 bp, Homo sapien
caggaggcgcgggtgttaggggcgg

SEQ ID NO: 1092045 - DNA, 25 bp, Homo sapien
cgcaaaaccgaggtctggctcctgg

SEQ ID NO: 1092046 - DNA, 25 bp, Homo sapien
ccccagcccgcaaaaccgaggtctg

SEQ ID NO: 1092047 - DNA, 25 bp, Homo sapien
cagcccgcaaaaccgaggtctggct

SEQ ID NO: 1092048 - DNA, 25 bp, Homo sapien
ctgtccaggcgcgcagggagccggg

SEQ ID NO: 1092049 - DNA, 25 bp, Homo sapien
ggagccgggcgcaggtgaaggtgtg

SEQ ID NO: 1092050 - DNA, 25 bp, Homo sapien
tggaggacgccagggctgagcgacc

SEQ ID NO: 1092051 - DNA, 25 bp, Homo sapien
gtggtggtggaggacgccagggctg

SEQ ID NO: 1092052 - DNA, 25 bp, Homo sapien
cggctgctcaaaggcatgatcccat

SEQ ID NO: 1092053 - DNA, 25 bp, Homo sapien
ggctgctcaaaggcatgatcccatg

SEQ ID NO: 1092054 - DNA, 25 bp, Homo sapien
ctggtcataatcttgtgagatggac

SEQ ID NO: 1092055 - DNA, 25 bp, Homo sapien
tggtcataatcttgtgagatggaca

SEQ ID NO: 1092056 - DNA, 25 bp, Homo sapien
accactgtgccgctgactgtcatgc

SEQ ID NO: 1092057 - DNA, 25 bp, Homo sapien
ggccaccagaaccactgtgccgctg

SEQ ID NO: 1092058 - DNA, 25 bp, Homo sapien
atgcaatagcggagggtggaggcca

SEQ ID NO: 1092059 - DNA, 25 bp, Homo sapien
caccaagcgaagcagagcgtcccgg

SEQ ID NO: 1092060 - DNA, 25 bp, Homo sapien
agacgaagctgacggacctgagcag

SEQ ID NO: 1092061 - DNA, 25 bp, Homo sapien
tgaggactccacagtgaggtagtac

SEQ ID NO: 1092062 - DNA, 25 bp, Homo sapien
tgggatgctggccttgacggaccac

SEQ ID NO: 1092063 - DNA, 25 bp, Homo sapien
tcaggcaccggatactccgtgggtg

SEQ ID NO: 1092064 - DNA, 25 bp, Homo sapien
aatgctcctacattcttcgactcgg

SEQ ID NO: 1092065 - DNA, 25 bp, Homo sapien
cattcttcgactcggaaaacatttt

SEQ ID NO: 1092066 - DNA, 25 bp, Homo sapien
agcaggaatgctcctacattcttcg

SEQ ID NO: 1092067 - DNA, 25 bp, Homo sapien
cctacattcttcgactcggaaaaca

SEQ ID NO: 1092068 - DNA, 25 bp, Homo sapien
agccgaggaagctgagatagtgcct

SEQ ID NO: 1092069 - DNA, 25 bp, Homo sapien
acagccgaggaagctgagatagtgc

SEQ ID NO: 1092070 - DNA, 25 bp, Homo sapien
gacagccgaggaagctgagatagtg

SEQ ID NO: 1092071 - DNA, 25 bp, Homo sapien
cagccgaggaagctgagatagtgcc

SEQ ID NO: 1092072 - DNA, 25 bp, Homo sapien
tacaagatcagaattgggatgccca

SEQ ID NO: 1092073 - DNA, 25 bp, Homo sapien
cagggtcacatatacgcagttgaaa

SEQ ID NO: 1092074 - DNA, 25 bp, Homo sapien
taagtcctaccctagggcagtgact

SEQ ID NO: 1092075 - DNA, 25 bp, Homo sapien
tagacagaagactcccgcctattga

SEQ ID NO: 1092076 - DNA, 25 bp, Homo sapien
tcgtctccgcagaaacggcatcaag

SEQ ID NO: 1092077 - DNA, 25 bp, Homo sapien
agctcacggcttcctcgtaagtggg

SEQ ID NO: 1092078 - DNA, 25 bp, Homo sapien
tccagggcttcctccgtagggtatg

SEQ ID NO: 1092079 - DNA, 25 bp, Homo sapien
agggcatccctcgatccacttggct

SEQ ID NO: 1092080 - DNA, 25 bp, Homo sapien
ttaacttcctccccgtgcagtctga

SEQ ID NO: 1092081 - DNA, 25 bp, Homo sapien
taacttcctccccgtgcagtctgaa

SEQ ID NO: 1092082 - DNA, 25 bp, Homo sapien
aacttcctccccgtgcagtctgaac

SEQ ID NO: 1092083 - DNA, 25 bp, Homo sapien
tgtcccaggcactgcataagactct

SEQ ID NO: 1092084 - DNA, 25 bp, Homo sapien
ctctggagaaggcacggcatttttg

SEQ ID NO: 1092085 - DNA, 25 bp, Homo sapien
aaatagaacagccttcaacaacgaa

SEQ ID NO: 1092086 - DNA, 25 bp, Homo sapien
aacaacgaacgtttgctgagtgcct

SEQ ID NO: 1092087 - DNA, 25 bp, Homo sapien
taagacgcctgcctttattatctgg

SEQ ID NO: 1092088 - DNA, 25 bp, Homo sapien
tgatacaatagcagaggaccgggcc

SEQ ID NO: 1092089 - DNA, 25 bp, Homo sapien
cattgatggcggtgtcagtgtgaac

SEQ ID NO: 1092090 - DNA, 25 bp, Homo sapien
gagcttcccgtcaaaggaggtatgg

SEQ ID NO: 1092091 - DNA, 25 bp, Homo sapien
cagaggtaagcatcgaggtccacgc

SEQ ID NO: 1092092 - DNA, 25 bp, Homo sapien
ggagggaaagagcacgcccatttga

SEQ ID NO: 1092093 - DNA, 25 bp, Homo sapien
gtccacgcaggcaaggcgagcgacc

SEQ ID NO: 1092094 - DNA, 25 bp, Homo sapien
agggaaagagcacgcccatttgaca

SEQ ID NO: 1092095 - DNA, 25 bp, Homo sapien
gcgcgcggagtctttcatcgtccag

SEQ ID NO: 1092096 - DNA, 25 bp, Homo sapien
cagagggcgcgctaaccccagcttt

SEQ ID NO: 1092097 - DNA, 25 bp, Homo sapien
gcagagcgcgcggagtctttcatcg

SEQ ID NO: 1092098 - DNA, 25 bp, Homo sapien
tttcgggatccttgcgagcgggctc

SEQ ID NO: 1092099 - DNA, 25 bp, Homo sapien
tagacgtccttctcataggcccttt

SEQ ID NO: 1092100 - DNA, 25 bp, Homo sapien
ggtgcacttgacagttcgcagagga

SEQ ID NO: 1092101 - DNA, 25 bp, Homo sapien
ccatcgccagccctcagagtccagg

SEQ ID NO: 1092102 - DNA, 25 bp, Homo sapien
gtccttctcataggccctttttcca

SEQ ID NO: 1092103 - DNA, 25 bp, Homo sapien
tagttcagcctaaacaccgagacag

SEQ ID NO: 1092104 - DNA, 25 bp, Homo sapien
gagcaagatccctttcaatcccgct

SEQ ID NO: 1092105 - DNA, 25 bp, Homo sapien
tgcaactcaaggcttcaagggagag

SEQ ID NO: 1092106 - DNA, 25 bp, Homo sapien
gagaagacactgaaatcgctgcaac

SEQ ID NO: 1092107 - DNA, 25 bp, Homo sapien
cagcacaatgaagccgatccggaag

SEQ ID NO: 1092108 - DNA, 25 bp, Homo sapien
ctcatgaggaacgtaccgagggcca

SEQ ID NO: 1092109 - DNA, 25 bp, Homo sapien
catggcatagaaggtgccgtagacc

SEQ ID NO: 1092110 - DNA, 25 bp, Homo sapien
tcaccatgacgctgcccatggcata

SEQ ID NO: 1092111 - DNA, 25 bp, Homo sapien
ggagaggatgccttgaaagtcagag

SEQ ID NO: 1092112 - DNA, 25 bp, Homo sapien
ggggagaggatgccttgaaagtcag

SEQ ID NO: 1092113 - DNA, 25 bp, Homo sapien
gggagaggatgccttgaaagtcaga

SEQ ID NO: 1092114 - DNA, 25 bp, Homo sapien
ttcatctggatgtggctgaagtcag

SEQ ID NO: 1092115 - DNA, 25 bp, Homo sapien
gcaggctctggtcataggcggcttc

SEQ ID NO: 1092116 - DNA, 25 bp, Homo sapien
atccaggcctgaacgtcgccagggc

SEQ ID NO: 1092117 - DNA, 25 bp, Homo sapien
gcaaggagcggtggtcctcactgta

SEQ ID NO: 1092118 - DNA, 25 bp, Homo sapien
cttcactctcgtctgagcccttgtg

SEQ ID NO: 1092119 - DNA, 25 bp, Homo sapien
tgagttaggcgtctttccccttcac

SEQ ID NO: 1092120 - DNA, 25 bp, Homo sapien
actctcgtctgagcccttgtggatg

SEQ ID NO: 1092121 - DNA, 25 bp, Homo sapien
agctctgagttaggcgtctttcccc

SEQ ID NO: 1092122 - DNA, 25 bp, Homo sapien
ttcactggagtccatgtccaggtca

SEQ ID NO: 1092123 - DNA, 25 bp, Homo sapien
ccaggtcatcttggaaggaagccaa

SEQ ID NO: 1092124 - DNA, 25 bp, Homo sapien
ttgtccttgggtaccgctgccagtt

SEQ ID NO: 1092125 - DNA, 25 bp, Homo sapien
ccctgtcatgtggagatgcattggg

SEQ ID NO: 1092126 - DNA, 25 bp, Homo sapien
catctggcagcccatagtacaggtc

SEQ ID NO: 1092127 - DNA, 25 bp, Homo sapien
gtcaggctcaaaacccagctccttg

SEQ ID NO: 1092128 - DNA, 25 bp, Homo sapien
ccttgggtgtcaggctcaaaaccca

SEQ ID NO: 1092129 - DNA, 25 bp, Homo sapien
cagcccatagtacaggtcttcctct

SEQ ID NO: 1092130 - DNA, 25 bp, Homo sapien
ggcacaggcgatctcaaggtgagta

SEQ ID NO: 1092131 - DNA, 25 bp, Homo sapien
taggaatgggaaacctgactggcct

SEQ ID NO: 1092132 - DNA, 25 bp, Homo sapien
tcagcagcagttccagactagaagc

SEQ ID NO: 1092133 - DNA, 25 bp, Homo sapien
cctctgtgtaaagacggatcacgcc

SEQ ID NO: 1092134 - DNA, 25 bp, Homo sapien
aagtaggccaggaagatgaatttca

SEQ ID NO: 1092135 - DNA, 25 bp, Homo sapien
tacatacaggccatttagaagtttg

SEQ ID NO: 1092136 - DNA, 25 bp, Homo sapien
caaagcaaatgtattccagaggcag

SEQ ID NO: 1092137 - DNA, 25 bp, Homo sapien
tgtgagtctaaaagttgggaacgtg

SEQ ID NO: 1092138 - DNA, 25 bp, Homo sapien
tgttcccagggccatgaccttgtaa

SEQ ID NO: 1092139 - DNA, 25 bp, Homo sapien
gcgtaacaatagcatcaccctgaga

SEQ ID NO: 1092140 - DNA, 25 bp, Homo sapien
ccctctgaaggcaagcacggtgtca

SEQ ID NO: 1092141 - DNA, 25 bp, Homo sapien
gcaagcgttgcagggatcagcgtaa

SEQ ID NO: 1092142 - DNA, 25 bp, Homo sapien
tcatccgaagactcagctgtgacca

SEQ ID NO: 1092143 - DNA, 25 bp, Homo sapien
ctcatccgaagactcagctgtgacc

SEQ ID NO: 1092144 - DNA, 25 bp, Homo sapien
catccgaagactcagctgtgaccag

SEQ ID NO: 1092145 - DNA, 25 bp, Homo sapien
tttctaacgtgggttgtaggctgcc

SEQ ID NO: 1092146 - DNA, 25 bp, Homo sapien
gctgacgctgtttctaacgtgggtt

SEQ ID NO: 1092147 - DNA, 25 bp, Homo sapien
gtgggttgtaggctgccctgcctta

SEQ ID NO: 1092148 - DNA, 25 bp, Homo sapien
ttattttagcccttagtgctgacgc

SEQ ID NO: 1092149 - DNA, 25 bp, Homo sapien
ccactgcagtgagggcttacttccg

SEQ ID NO: 1092150 - DNA, 25 bp, Homo sapien
tgtttaagtctaaagccactgcggt

SEQ ID NO: 1092151 - DNA, 25 bp, Homo sapien
ggcgtaaggcctcacgtatcctgcc

SEQ ID NO: 1092152 - DNA, 25 bp, Homo sapien
cttacttccggaagagggcctctgg

SEQ ID NO: 1092153 - DNA, 25 bp, Homo sapien
gcagatgctaactctagaacagggt

SEQ ID NO: 1092154 - DNA, 25 bp, Homo sapien
gctacggaggcaaccagacttgtca

SEQ ID NO: 1092155 - DNA, 25 bp, Homo sapien
caaatgaggtatcttcgagcgtgaa

SEQ ID NO: 1092156 - DNA, 25 bp, Homo sapien
cagccggttcagagcaaaggcctgc

SEQ ID NO: 1092157 - DNA, 25 bp, Homo sapien
ccgggatgtgcagggactatctgca

SEQ ID NO: 1092158 - DNA, 25 bp, Homo sapien
gctcttctccgggatgtgcagggac

SEQ ID NO: 1092159 - DNA, 25 bp, Homo sapien
tctccgggatgtgcagggactatct

SEQ ID NO: 1092160 - DNA, 25 bp, Homo sapien
ccaccacaccgtgtctgctcttctc

SEQ ID NO: 1092161 - DNA, 25 bp, Homo sapien
tatctgtcccttgcatagctgtggc

SEQ ID NO: 1092162 - DNA, 25 bp, Homo sapien
cagagcttagcgtccaatgaaggag

SEQ ID NO: 1092163 - DNA, 25 bp, Homo sapien
gaacttaactaagcactgagggcac

SEQ ID NO: 1092164 - DNA, 25 bp, Homo sapien
taatgaacgtaatagagtccttgcc

SEQ ID NO: 1092165 - DNA, 25 bp, Homo sapien
gacagatgtgtccttgtgggaactg

SEQ ID NO: 1092166 - DNA, 25 bp, Homo sapien
gaactgagggacataacctctcctc

SEQ ID NO: 1092167 - DNA, 25 bp, Homo sapien
taatcccacgtgaggacagatgtgt

SEQ ID NO: 1092168 - DNA, 25 bp, Homo sapien
ggcctgggggcctaatcccacgtga

SEQ ID NO: 1092169 - DNA, 25 bp, Homo sapien
ctgcaggaccaggcttcccccttcc

SEQ ID NO: 1092170 - DNA, 25 bp, Homo sapien
tgcaggaccaggcttcccccttcct

SEQ ID NO: 1092171 - DNA, 25 bp, Homo sapien
gccgctgccccggcttcccacagct

SEQ ID NO: 1092172 - DNA, 25 bp, Homo sapien
catagccgctgccccggcttcccac

SEQ ID NO: 1092173 - DNA, 25 bp, Homo sapien
aatatgtatttatagccaatacagg

SEQ ID NO: 1092174 - DNA, 25 bp, Homo sapien
tatagccaatacaggtgccacggga

SEQ ID NO: 1092175 - DNA, 25 bp, Homo sapien
tttatagccaatacaggtgccacgg

SEQ ID NO: 1092176 - DNA, 25 bp, Homo sapien
tgtatttatagccaatacaggtgcc

SEQ ID NO: 1092177 - DNA, 25 bp, Homo sapien
tcccacacagatgggacgcggctta

SEQ ID NO: 1092178 - DNA, 25 bp, Homo sapien
ggtcccacacagatgggacgcggct

SEQ ID NO: 1092179 - DNA, 25 bp, Homo sapien
ccacacagatgggacgcggcttaag

SEQ ID NO: 1092180 - DNA, 25 bp, Homo sapien
acacagatgggacgcggcttaagag

SEQ ID NO: 1092181 - DNA, 25 bp, Homo sapien
gacacaattcaagctgcgagttgaa

SEQ ID NO: 1092182 - DNA, 25 bp, Homo sapien
tcagaaacttggagtctgcagccac

SEQ ID NO: 1092183 - DNA, 25 bp, Homo sapien
aacctcagaaacttggagtctgcag

SEQ ID NO: 1092184 - DNA, 25 bp, Homo sapien
ttttatgctccctggctaccttctc

SEQ ID NO: 1092185 - DNA, 25 bp, Homo sapien
gaaacttggagtctgcagccaccat

SEQ ID NO: 1092186 - DNA, 25 bp, Homo sapien
agagggacatggatgtccccaggcc

SEQ ID NO: 1092187 - DNA, 25 bp, Homo sapien
agagaatgatgaagcctgtgcacag

SEQ ID NO: 1092188 - DNA, 25 bp, Homo sapien
gggtcgttaccgtgcacccagagaa

SEQ ID NO: 1092189 - DNA, 25 bp, Homo sapien
cgttaccgtgcacccagagaatgat

SEQ ID NO: 1092190 - DNA, 25 bp, Homo sapien
tgaagagattgcttgcttttgatgt

SEQ ID NO: 1092191 - DNA, 25 bp, Homo sapien
agctgctccttgaagagattgcttg

SEQ ID NO: 1092192 - DNA, 25 bp, Homo sapien
ccttgaagagattgcttgcttttga

SEQ ID NO: 1092193 - DNA, 25 bp, Homo sapien
ctccttgaagagattgcttgctttt

SEQ ID NO: 1092194 - DNA, 25 bp, Homo sapien
tcagtgtttcctgggtccaccttgt

SEQ ID NO: 1092195 - DNA, 25 bp, Homo sapien
agtgtttcctgggtccaccttgtct

SEQ ID NO: 1092196 - DNA, 25 bp, Homo sapien
ttcagtgtttcctgggtccaccttg

SEQ ID NO: 1092197 - DNA, 25 bp, Homo sapien
gtgtttcctgggtccaccttgtctc

SEQ ID NO: 1092198 - DNA, 25 bp, Homo sapien
gagccccatcggacgatcctatctg

SEQ ID NO: 1092199 - DNA, 25 bp, Homo sapien
tcagaccctgaactgaacggcggcg

SEQ ID NO: 1092200 - DNA, 25 bp, Homo sapien
caaatcctaactgggctggaaggca

SEQ ID NO: 1092201 - DNA, 25 bp, Homo sapien
cagattacgcgcagagggaagaaaa

SEQ ID NO: 1092202 - DNA, 25 bp, Homo sapien
aggagacctagaggccgtgcgcggt

SEQ ID NO: 1092203 - DNA, 25 bp, Homo sapien
tgtcctggcgaggagacctagaggc

SEQ ID NO: 1092204 - DNA, 25 bp, Homo sapien
acctagaggccgtgcgcggtccacg

SEQ ID NO: 1092205 - DNA, 25 bp, Homo sapien
gagacctagaggccgtgcgcggtcc

SEQ ID NO: 1092206 - DNA, 25 bp, Homo sapien
aggaccgcctggagctgacggtgcc

SEQ ID NO: 1092207 - DNA, 25 bp, Homo sapien
gaccgcctggagctgacggtgccca

SEQ ID NO: 1092208 - DNA, 25 bp, Homo sapien
accgcctggagctgacggtgcccat

SEQ ID NO: 1092209 - DNA, 25 bp, Homo sapien
caggaccgcctggagctgacggtgc

SEQ ID NO: 1092210 - DNA, 25 bp, Homo sapien
cacgggcgcccgcgggacccaggag

SEQ ID NO: 1092211 - DNA, 25 bp, Homo sapien
ggcgcccgcgggacccaggagcagc

SEQ ID NO: 1092212 - DNA, 25 bp, Homo sapien
gcacgggcgcccgcgggacccagga

SEQ ID NO: 1092213 - DNA, 25 bp, Homo sapien
tgcgcacgggcgcccgcgggaccca

SEQ ID NO: 1092214 - DNA, 25 bp, Homo sapien
ggaacgcaaggctagcaccagctcc

SEQ ID NO: 1092215 - DNA, 25 bp, Homo sapien
tcggaacgcaaggctagcaccagct

SEQ ID NO: 1092216 - DNA, 25 bp, Homo sapien
cggaacgcaaggctagcaccagctc

SEQ ID NO: 1092217 - DNA, 25 bp, Homo sapien
ctcggaacgcaaggctagcaccagc

SEQ ID NO: 1092218 - DNA, 25 bp, Homo sapien
gctgtggttccgtgctcgggtgctt

SEQ ID NO: 1092219 - DNA, 25 bp, Homo sapien
tcgggtgcttcggccaggccgtcct

SEQ ID NO: 1092220 - DNA, 25 bp, Homo sapien
tggcgcagcggtggaaggtggctgt

SEQ ID NO: 1092221 - DNA, 25 bp, Homo sapien
cttggcgcagcggtggaaggtggct

SEQ ID NO: 1092222 - DNA, 25 bp, Homo sapien
tctgactgcgagaggtgggtctcct

SEQ ID NO: 1092223 - DNA, 25 bp, Homo sapien
gcaggcggcgggcagtgcgctctga

SEQ ID NO: 1092224 - DNA, 25 bp, Homo sapien
aggatcttggtgaggtatccccggc

SEQ ID NO: 1092225 - DNA, 25 bp, Homo sapien
ttcagcaccaccacgtaggtgccag

SEQ ID NO: 1092226 - DNA, 25 bp, Homo sapien
taccgtggaggggtaatccgctcca

SEQ ID NO: 1092227 - DNA, 25 bp, Homo sapien
tcctcctcgatgtagtcgacatggg

SEQ ID NO: 1092228 - DNA, 25 bp, Homo sapien
ggctggtattcatccgcccggtacc

SEQ ID NO: 1092229 - DNA, 25 bp, Homo sapien
gctccaggttccacgggatgctctg

SEQ ID NO: 1092230 - DNA, 25 bp, Homo sapien
ccacaccttctaagtgcaggcggtt

SEQ ID NO: 1092231 - DNA, 25 bp, Homo sapien
gtgcttgggaccaccatctgctcca

SEQ ID NO: 1092232 - DNA, 25 bp, Homo sapien
tttctggtcccacccgtgcttggga

SEQ ID NO: 1092233 - DNA, 25 bp, Homo sapien
tgctgcaagatgatgtgaccactgt

SEQ ID NO: 1092234 - DNA, 25 bp, Homo sapien
taacagtgatgtctggccacctgcg

SEQ ID NO: 1092235 - DNA, 25 bp, Homo sapien
cagcgaaggctctgggaagaaccct

SEQ ID NO: 1092236 - DNA, 25 bp, Homo sapien
gtaactgtccaaggccatcagctgg

SEQ ID NO: 1092237 - DNA, 25 bp, Homo sapien
tatggcttcggtcacaaattcccag

SEQ ID NO: 1092238 - DNA, 25 bp, Homo sapien
gtctaggagatacacctccaccagg

SEQ ID NO: 1092239 - DNA, 25 bp, Homo sapien
gtgaccatgaccctgccctcgattt

SEQ ID NO: 1092240 - DNA, 25 bp, Homo sapien
tcgggcacattctcgaagtcggtga

SEQ ID NO: 1092241 - DNA, 25 bp, Homo sapien
cccggtggtcactctgtatgctggt

SEQ ID NO: 1092242 - DNA, 25 bp, Homo sapien
tggccacgccggcatcccggccgct

SEQ ID NO: 1092243 - DNA, 25 bp, Homo sapien
ccttggcagttgagcacgcgcaggc

SEQ ID NO: 1092244 - DNA, 25 bp, Homo sapien
atgagggtgccgctaaccgtgccct

SEQ ID NO: 1092245 - DNA, 25 bp, Homo sapien
aggctgcgcatgctggcacccttgg

SEQ ID NO: 1092246 - DNA, 25 bp, Homo sapien
ttgccggcagcggtgaccagcacga

SEQ ID NO: 1092247 - DNA, 25 bp, Homo sapien
gggagtagaggcaggcatcgtcccg

SEQ ID NO: 1092248 - DNA, 25 bp, Homo sapien
tggcaggcggcgttgaggacgcggc

SEQ ID NO: 1092249 - DNA, 25 bp, Homo sapien
gcgttgaggacgcggctgtacccac

SEQ ID NO: 1092250 - DNA, 25 bp, Homo sapien
gggcaaagaggtccacacagcggcc

SEQ ID NO: 1092251 - DNA, 25 bp, Homo sapien
ttgggcattggtggccccaactgtg

SEQ ID NO: 1092252 - DNA, 25 bp, Homo sapien
tccccagggtcaccggctggtcttg

SEQ ID NO: 1092253 - DNA, 25 bp, Homo sapien
cagcggccaaagttggtccccaaag

SEQ ID NO: 1092254 - DNA, 25 bp, Homo sapien
tctgtgacacaaagcaggtgctgca

SEQ ID NO: 1092255 - DNA, 25 bp, Homo sapien
ctctgtgacacaaagcaggtgctgc

SEQ ID NO: 1092256 - DNA, 25 bp, Homo sapien
aactcggccagggtgagctccggct

SEQ ID NO: 1092257 - DNA, 25 bp, Homo sapien
gtcagtacccgctggtcctcaggga

SEQ ID NO: 1092258 - DNA, 25 bp, Homo sapien
ctcagggaaccaggcctcattgatg

SEQ ID NO: 1092259 - DNA, 25 bp, Homo sapien
gaagtggatcagtctctgcctcaac

SEQ ID NO: 1092260 - DNA, 25 bp, Homo sapien
cgcagcgggcgacggctgtggccat

SEQ ID NO: 1092261 - DNA, 25 bp, Homo sapien
tgtaggccccgagtgtgctgaccat

SEQ ID NO: 1092262 - DNA, 25 bp, Homo sapien
gagtgtgctgaccatacagtcctgc

SEQ ID NO: 1092263 - DNA, 25 bp, Homo sapien
gtggccatccgtgtaggccccgagt

SEQ ID NO: 1092264 - DNA, 25 bp, Homo sapien
tcccactcctggagaaactggagca

SEQ ID NO: 1092265 - DNA, 25 bp, Homo sapien
gccccgccgcttcccactcctggag

SEQ ID NO: 1092266 - DNA, 25 bp, Homo sapien
gccgcttcccactcctggagaaact

SEQ ID NO: 1092267 - DNA, 25 bp, Homo sapien
ctcctggagaaactggagcagctca

SEQ ID NO: 1092268 - DNA, 25 bp, Homo sapien
agtcaaagacggaaatgggaatctg

SEQ ID NO: 1092269 - DNA, 25 bp, Homo sapien
cttagagtcaaagacggaaatggga

SEQ ID NO: 1092270 - DNA, 25 bp, Homo sapien
gagtcaaagacggaaatgggaatct

SEQ ID NO: 1092271 - DNA, 25 bp, Homo sapien
tagagtcaaagacggaaatgggaat

SEQ ID NO: 1092272 - DNA, 25 bp, Homo sapien
cagtggacacgggtccccatgctgg

SEQ ID NO: 1092273 - DNA, 25 bp, Homo sapien
cccaaaagcgttgtgggcccggcag

SEQ ID NO: 1092274 - DNA, 25 bp, Homo sapien
cctggcaatggcgtagacaccctca

SEQ ID NO: 1092275 - DNA, 25 bp, Homo sapien
gaggacgtggccctgttggtggcag

SEQ ID NO: 1092276 - DNA, 25 bp, Homo sapien
tggttgggctgacctcgtggcctca

SEQ ID NO: 1092277 - DNA, 25 bp, Homo sapien
tgaggggccgggattccatgctcct

SEQ ID NO: 1092278 - DNA, 25 bp, Homo sapien
cacaggcggcttgtgggtgccaagg

SEQ ID NO: 1092279 - DNA, 25 bp, Homo sapien
tgactttgcattccagacctggggc

SEQ ID NO: 1092280 - DNA, 25 bp, Homo sapien
tgtcacggccccttcgctggtgctg

SEQ ID NO: 1092281 - DNA, 25 bp, Homo sapien
acacgtgttgtctacggcgtaggcc

SEQ ID NO: 1092282 - DNA, 25 bp, Homo sapien
agcagatggcaacggctgtcacggc

SEQ ID NO: 1092283 - DNA, 25 bp, Homo sapien
ccggctcctgactacacacgtgttg

SEQ ID NO: 1092284 - DNA, 25 bp, Homo sapien
ggaaaaagttccatgcctgcaggca

SEQ ID NO: 1092285 - DNA, 25 bp, Homo sapien
gaatgcctggcacggaacaagagct

SEQ ID NO: 1092286 - DNA, 25 bp, Homo sapien
tatccatgggaagaatcctgcctcc

SEQ ID NO: 1092287 - DNA, 25 bp, Homo sapien
tcaggcctgggtgataacggaaaaa

SEQ ID NO: 1092288 - DNA, 25 bp, Homo sapien
gagagagagtctagggttgcaccac

SEQ ID NO: 1092289 - DNA, 25 bp, Homo sapien
cacactgggatatcatcgctggcga

SEQ ID NO: 1092290 - DNA, 25 bp, Homo sapien
aagtggtccccagcatagatcgtgt

SEQ ID NO: 1092291 - DNA, 25 bp, Homo sapien
tatcagaacacagccgtagtgggcg

SEQ ID NO: 1092292 - DNA, 25 bp, Homo sapien
ggtactcataggcacgtgggtctta

SEQ ID NO: 1092293 - DNA, 25 bp, Homo sapien
tctcaggcaagtattcagtgaccac

SEQ ID NO: 1092294 - DNA, 25 bp, Homo sapien
ctcagggactcggaatctggtggaa

SEQ ID NO: 1092295 - DNA, 25 bp, Homo sapien
gagacgcaagtctcttccctcaggg

SEQ ID NO: 1092296 - DNA, 25 bp, Homo sapien
ggaagcccttgatcaacttgattct

SEQ ID NO: 1092297 - DNA, 25 bp, Homo sapien
aggaagcccttgatcaacttgattc

SEQ ID NO: 1092298 - DNA, 25 bp, Homo sapien
tgaaatcacatcaaggtcatatgat

SEQ ID NO: 1092299 - DNA, 25 bp, Homo sapien
taagctcttttgcagtttagctgct

SEQ ID NO: 1092300 - DNA, 25 bp, Homo sapien
tacctatctggtcttatctcctgcc

SEQ ID NO: 1092301 - DNA, 25 bp, Homo sapien
caaggtctccagacttacctatctg

SEQ ID NO: 1092302 - DNA, 25 bp, Homo sapien
tcactggcacaagaaatgatttctc

SEQ ID NO: 1092303 - DNA, 25 bp, Homo sapien
tgcaatgcagcgaggcgattttggc

SEQ ID NO: 1092304 - DNA, 25 bp, Homo sapien
taactcctgtatcagtaggtttcca

SEQ ID NO: 1092305 - DNA, 25 bp, Homo sapien
gagagccagctgtacttaactcctg

SEQ ID NO: 1092306 - DNA, 25 bp, Homo sapien
tctgcttcatgtgctgttaaaaccc

SEQ ID NO: 1092307 - DNA, 25 bp, Homo sapien
ccccgccaccatccgcaaggccctg

SEQ ID NO: 1092308 - DNA, 25 bp, Homo sapien
gggcttctcagaccccgccaccatc

SEQ ID NO: 1092309 - DNA, 25 bp, Homo sapien
ctcagaccccgccaccatccgcaag

SEQ ID NO: 1092310 - DNA, 25 bp, Homo sapien
agaccccgccaccatccgcaaggcc

SEQ ID NO: 1092311 - DNA, 25 bp, Homo sapien
tgagcgcctcaccgcactagctcgg

SEQ ID NO: 1092312 - DNA, 25 bp, Homo sapien
cctgagcgcctcaccgcactagctc

SEQ ID NO: 1092313 - DNA, 25 bp, Homo sapien
ctgagcgcctcaccgcactagctcg

SEQ ID NO: 1092314 - DNA, 25 bp, Homo sapien
cctagcctgccaacggcgagcacgg

SEQ ID NO: 1092315 - DNA, 25 bp, Homo sapien
acggcgagcacggtcgcctcccgtg

SEQ ID NO: 1092316 - DNA, 25 bp, Homo sapien
agcacggtcgcctcccgtgccgctt

SEQ ID NO: 1092317 - DNA, 25 bp, Homo sapien
ctagcctgccaacggcgagcacggt

SEQ ID NO: 1092318 - DNA, 25 bp, Homo sapien
tttcaccttaggcacgctccgcggc

SEQ ID NO: 1092319 - DNA, 25 bp, Homo sapien
ctgttgccggcgaaacaggcgggcg

SEQ ID NO: 1092320 - DNA, 25 bp, Homo sapien
aacaaacagaatacgccgccgccaa

SEQ ID NO: 1092321 - DNA, 25 bp, Homo sapien
tggcgacgatggagaagccttcctc

SEQ ID NO: 1092322 - DNA, 25 bp, Homo sapien
ggccaagggatttccgcgacgttca

SEQ ID NO: 1092323 - DNA, 25 bp, Homo sapien
ctcggccggccaagggatttccgcg

SEQ ID NO: 1092324 - DNA, 25 bp, Homo sapien
ccgcgacgttcagcgctgcgagctg

SEQ ID NO: 1092325 - DNA, 25 bp, Homo sapien
actcggacggagagaagccgggtcg

SEQ ID NO: 1092326 - DNA, 25 bp, Homo sapien
gatgggggagcgggtcgggcggcgc

SEQ ID NO: 1092327 - DNA, 25 bp, Homo sapien
ctaggatgggggagcgggtcgggcg

SEQ ID NO: 1092328 - DNA, 25 bp, Homo sapien
agcgggtcgggcggcgccggccagg

SEQ ID NO: 1092329 - DNA, 25 bp, Homo sapien
gcgccggccagggaggggaagtcca

SEQ ID NO: 1092330 - DNA, 25 bp, Homo sapien
ctagggtcgagtgtgaatttcgtct

SEQ ID NO: 1092331 - DNA, 25 bp, Homo sapien
cagcgaggcgtattcaggcagcgtt

SEQ ID NO: 1092332 - DNA, 25 bp, Homo sapien
tcttgggtggtccacgcgtctggtt

SEQ ID NO: 1092333 - DNA, 25 bp, Homo sapien
caggaatttctgtgggcagcgaggc

SEQ ID NO: 1092334 - DNA, 25 bp, Homo sapien
ggtgatttcggcaagggctggcggg

SEQ ID NO: 1092335 - DNA, 25 bp, Homo sapien
tttagggtgatttcggcaagggctg

SEQ ID NO: 1092336 - DNA, 25 bp, Homo sapien
gggtgatttcggcaagggctggcgg

SEQ ID NO: 1092337 - DNA, 25 bp, Homo sapien
tagggtgatttcggcaagggctggc

SEQ ID NO: 1092338 - DNA, 25 bp, Homo sapien
tagagttcagtcagcttggcggaga

SEQ ID NO: 1092339 - DNA, 25 bp, Homo sapien
gacaatgtctaggtaccggccctaa

SEQ ID NO: 1092340 - DNA, 25 bp, Homo sapien
gaatcggagccaaagactgcggtaa

SEQ ID NO: 1092341 - DNA, 25 bp, Homo sapien
gatgttcgaacgagtccgtggccga

SEQ ID NO: 1092342 - DNA, 25 bp, Homo sapien
gattatactactcgcatcctcaaat

SEQ ID NO: 1092343 - DNA, 25 bp, Homo sapien
aaaaagtatgattatactactcgca

SEQ ID NO: 1092344 - DNA, 25 bp, Homo sapien
tatgattatactactcgcatcctca

SEQ ID NO: 1092345 - DNA, 25 bp, Homo sapien
aagtatgattatactactcgcatcc

SEQ ID NO: 1092346 - DNA, 25 bp, Homo sapien
tgctgccagaggcgcaggtgggcca

SEQ ID NO: 1092347 - DNA, 25 bp, Homo sapien
gcgcaggtgggccagggcagccgca

SEQ ID NO: 1092348 - DNA, 25 bp, Homo sapien
aggcgcaggtgggccagggcagccg

SEQ ID NO: 1092349 - DNA, 25 bp, Homo sapien
ggtgctgccagaggcgcaggtgggc

SEQ ID NO: 1092350 - DNA, 25 bp, Homo sapien
cgagcatgactagtcttctggtggt

SEQ ID NO: 1092351 - DNA, 25 bp, Homo sapien
gggtggcgagcatgactagtcttct

SEQ ID NO: 1092352 - DNA, 25 bp, Homo sapien
catgactagtcttctggtggtcctg

SEQ ID NO: 1092353 - DNA, 25 bp, Homo sapien
tggcgagcatgactagtcttctggt

SEQ ID NO: 1092354 - DNA, 25 bp, Homo sapien
ctatgtaagtgaccagcagtggagc

SEQ ID NO: 1092355 - DNA, 25 bp, Homo sapien
aagtgaccagcagtggagctttgtc

SEQ ID NO: 1092356 - DNA, 25 bp, Homo sapien
cattaaggttagatgagcagaatca

SEQ ID NO: 1092357 - DNA, 25 bp, Homo sapien
agcctgacacccaactctggcctct

SEQ ID NO: 1092358 - DNA, 25 bp, Homo sapien
atgtgttccgtatgccttgttctcc

SEQ ID NO: 1092359 - DNA, 25 bp, Homo sapien
tgttccgtatgccttgttctccacc

SEQ ID NO: 1092360 - DNA, 25 bp, Homo sapien
gtgttccgtatgccttgttctccac

SEQ ID NO: 1092361 - DNA, 25 bp, Homo sapien
tgtgttccgtatgccttgttctcca

SEQ ID NO: 1092362 - DNA, 25 bp, Homo sapien
tggatgagtcacgttgggatggtgg

SEQ ID NO: 1092363 - DNA, 25 bp, Homo sapien
tgggatggtgggactcatttttgac

SEQ ID NO: 1092364 - DNA, 25 bp, Homo sapien
gatgagtcacgttgggatggtggga

SEQ ID NO: 1092365 - DNA, 25 bp, Homo sapien
gatggtgggactcatttttgacact

SEQ ID NO: 1092366 - DNA, 25 bp, Homo sapien
ggatacacagactgtgccatagctg

SEQ ID NO: 1092367 - DNA, 25 bp, Homo sapien
ccactggtacatggtgggtacttcc

SEQ ID NO: 1092368 - DNA, 25 bp, Homo sapien
tggtacatggtgggtacttcctgat

SEQ ID NO: 1092369 - DNA, 25 bp, Homo sapien
ctggtacatggtgggtacttcctga

SEQ ID NO: 1092370 - DNA, 25 bp, Homo sapien
cactggtacatggtgggtacttcct

SEQ ID NO: 1092371 - DNA, 25 bp, Homo sapien
tctcccagcgagagtcaggagggaa

SEQ ID NO: 1092372 - DNA, 25 bp, Homo sapien
ggtcctctcttaggcaggccataga

SEQ ID NO: 1092373 - DNA, 25 bp, Homo sapien
cacaggaggcttccctggtatgagt

SEQ ID NO: 1092374 - DNA, 25 bp, Homo sapien
tagacaagaactgcatactgccaag

SEQ ID NO: 1092375 - DNA, 25 bp, Homo sapien
ctaccccatacacacaggaatttta

SEQ ID NO: 1092376 - DNA, 25 bp, Homo sapien
cacaggaattttacgtcttgtagct

SEQ ID NO: 1092377 - DNA, 25 bp, Homo sapien
ggaattttacgtcttgtagcttcta

SEQ ID NO: 1092378 - DNA, 25 bp, Homo sapien
catacacacaggaattttacgtctt

SEQ ID NO: 1092379 - DNA, 25 bp, Homo sapien
tatccatagggaatctgctaagtcc

SEQ ID NO: 1092380 - DNA, 25 bp, Homo sapien
gtggttctatccatagggaatctgc

SEQ ID NO: 1092381 - DNA, 25 bp, Homo sapien
ctcctgagtggttctatccataggg

SEQ ID NO: 1092382 - DNA, 25 bp, Homo sapien
tagggaatctgctaagtccagtttt

SEQ ID NO: 1092383 - DNA, 25 bp, Homo sapien
ggcagaatatcccacttatccttca

SEQ ID NO: 1092384 - DNA, 25 bp, Homo sapien
cagaatatcccacttatccttcagt

SEQ ID NO: 1092385 - DNA, 25 bp, Homo sapien
gaatatcccacttatccttcagttt

SEQ ID NO: 1092386 - DNA, 25 bp, Homo sapien
tctggcagaatatcccacttatcct

SEQ ID NO: 1092387 - DNA, 25 bp, Homo sapien
cccgtacccattcccactaacagag

SEQ ID NO: 1092388 - DNA, 25 bp, Homo sapien
tggtgggccaggtgacgttgtaaaa

SEQ ID NO: 1092389 - DNA, 25 bp, Homo sapien
gtctaccatggccacagtgtgctgt

SEQ ID NO: 1092390 - DNA, 25 bp, Homo sapien
tcacaagcttgatggggtctaccat

SEQ ID NO: 1092391 - DNA, 25 bp, Homo sapien
gtgctgtgcccataggctccttctg

SEQ ID NO: 1092392 - DNA, 25 bp, Homo sapien
ggatattcttgtctacttccctctc

SEQ ID NO: 1092393 - DNA, 25 bp, Homo sapien
gaagacatctagtggaaacagatta

SEQ ID NO: 1092394 - DNA, 25 bp, Homo sapien
gggaacttcacaatgcttgaactgt

SEQ ID NO: 1092395 - DNA, 25 bp, Homo sapien
taggggaagacatctagtggaaaca

SEQ ID NO: 1092396 - DNA, 25 bp, Homo sapien
aactgtccagtctccttgagatagg

SEQ ID NO: 1092397 - DNA, 25 bp, Homo sapien
ttagaggctgctgaagcccatggaa

SEQ ID NO: 1092398 - DNA, 25 bp, Homo sapien
tagaggctgctgaagcccatggaag

SEQ ID NO: 1092399 - DNA, 25 bp, Homo sapien
gaggctgctgaagcccatggaagca

SEQ ID NO: 1092400 - DNA, 25 bp, Homo sapien
ggctgctgaagcccatggaagcagt

SEQ ID NO: 1092401 - DNA, 25 bp, Homo sapien
ttgggtttggcaccttctctgagtt

SEQ ID NO: 1092402 - DNA, 25 bp, Homo sapien
tgaactgttctgagtgtcagtgcct

SEQ ID NO: 1092403 - DNA, 25 bp, Homo sapien
cgcctcatcctctgaactgttctga

SEQ ID NO: 1092404 - DNA, 25 bp, Homo sapien
tgggtttggcaccttctctgagttc

SEQ ID NO: 1092405 - DNA, 25 bp, Homo sapien
ggcaggctccgaaaggaggcgtgtg

SEQ ID NO: 1092406 - DNA, 25 bp, Homo sapien
gctccgaaaggaggcgtgtgtgggc

SEQ ID NO: 1092407 - DNA, 25 bp, Homo sapien
gaagttggggctgaggaaaccatgc

SEQ ID NO: 1092408 - DNA, 25 bp, Homo sapien
aaaggaggcgtgtgtgggccttggc

SEQ ID NO: 1092409 - DNA, 25 bp, Homo sapien
gaagaggaacaggccccggccattc

SEQ ID NO: 1092410 - DNA, 25 bp, Homo sapien
acaggccccggccattcaacaccat

SEQ ID NO: 1092411 - DNA, 25 bp, Homo sapien
gattacgtgtggcaggaagaggaac

SEQ ID NO: 1092412 - DNA, 25 bp, Homo sapien
ctggattacgtgtggcaggaagagg

SEQ ID NO: 1092413 - DNA, 25 bp, Homo sapien
gatgactgatttactggagaggctc

SEQ ID NO: 1092414 - DNA, 25 bp, Homo sapien
gcacaccaggcggtctaagccagtt

SEQ ID NO: 1092415 - DNA, 25 bp, Homo sapien
caggtgttcctgctgcctgttgaca

SEQ ID NO: 1092416 - DNA, 25 bp, Homo sapien
cctgagtgaatttgtgaccccacaa

SEQ ID NO: 1092417 - DNA, 25 bp, Homo sapien
gagtcagagttgcaactcgcctgtg

SEQ ID NO: 1092418 - DNA, 25 bp, Homo sapien
gcagcccatgttgcaggcgcccctc

SEQ ID NO: 1092419 - DNA, 25 bp, Homo sapien
ctgtgcagcccatgttgcaggcgcc

SEQ ID NO: 1092420 - DNA, 25 bp, Homo sapien
agtcagagttgcaactcgcctgtgc

SEQ ID NO: 1092421 - DNA, 25 bp, Homo sapien
aggatgaacagccatccaggcagag

SEQ ID NO: 1092422 - DNA, 25 bp, Homo sapien
ggatgaacagccatccaggcagagg

SEQ ID NO: 1092423 - DNA, 25 bp, Homo sapien
gatgaacagccatccaggcagaggc

SEQ ID NO: 1092424 - DNA, 25 bp, Homo sapien
ctccaccacccatacatcctccaca

SEQ ID NO: 1092425 - DNA, 25 bp, Homo sapien
tcccacaagtggcctgcttgagggg

SEQ ID NO: 1092426 - DNA, 25 bp, Homo sapien
atacatcctccacattggtggtggg

SEQ ID NO: 1092427 - DNA, 25 bp, Homo sapien
tcctcccacaagtggcctgcttgag

SEQ ID NO: 1092428 - DNA, 25 bp, Homo sapien
ccagttggaaggcagcggtgatcca

SEQ ID NO: 1092429 - DNA, 25 bp, Homo sapien
ctgccatggcaaggcccagttggaa

SEQ ID NO: 1092430 - DNA, 25 bp, Homo sapien
ggcccgccagaagctagtcctgttg

SEQ ID NO: 1092431 - DNA, 25 bp, Homo sapien
gccttgcagatgttagacagcagat

SEQ ID NO: 1092432 - DNA, 25 bp, Homo sapien
agtcgcttttcaacacttcgctgtt

SEQ ID NO: 1092433 - DNA, 25 bp, Homo sapien
cagtcgcttttcaacacttcgctgt

SEQ ID NO: 1092434 - DNA, 25 bp, Homo sapien
ccccagttcgagaaatagcctgcac

SEQ ID NO: 1092435 - DNA, 25 bp, Homo sapien
cttaaggccccagttcgagaaatag

SEQ ID NO: 1092436 - DNA, 25 bp, Homo sapien
tctgatccttaaggccccagttcga

SEQ ID NO: 1092437 - DNA, 25 bp, Homo sapien
gttctgatccttaaggccccagttc

SEQ ID NO: 1092438 - DNA, 25 bp, Homo sapien
gcatgcaggagaagaacactttgcg

SEQ ID NO: 1092439 - DNA, 25 bp, Homo sapien
catagtgcctgtgaagtcagaacca

SEQ ID NO: 1092440 - DNA, 25 bp, Homo sapien
ttccactgctctggacaagggtcct

SEQ ID NO: 1092441 - DNA, 25 bp, Homo sapien
gataagcttgtagctgtgtgccagc

SEQ ID NO: 1092442 - DNA, 25 bp, Homo sapien
gagtcacaatacgtgggatggatca

SEQ ID NO: 1092443 - DNA, 25 bp, Homo sapien
atgaagtggtacacagccccggcat

SEQ ID NO: 1092444 - DNA, 25 bp, Homo sapien
gattatagtaaagtctcccacacgc

SEQ ID NO: 1092445 - DNA, 25 bp, Homo sapien
cagaatggtagaggcaatccaggcc

SEQ ID NO: 1092446 - DNA, 25 bp, Homo sapien
tggtcagccagtccatctgttcagg

SEQ ID NO: 1092447 - DNA, 25 bp, Homo sapien
ccttggtcagccagtccatctgttc

SEQ ID NO: 1092448 - DNA, 25 bp, Homo sapien
gccagtccatctgttcaggctttag

SEQ ID NO: 1092449 - DNA, 25 bp, Homo sapien
ctagatggagaactccttggtcagc

SEQ ID NO: 1092450 - DNA, 25 bp, Homo sapien
gtaaatagcataggcaaggtagccc

SEQ ID NO: 1092451 - DNA, 25 bp, Homo sapien
catctgccttggaggcatagctacg

SEQ ID NO: 1092452 - DNA, 25 bp, Homo sapien
ccatcatcactggctggagtgtcat

SEQ ID NO: 1092453 - DNA, 25 bp, Homo sapien
gccttggaggcatagctacggaagt

SEQ ID NO: 1092454 - DNA, 25 bp, Homo sapien
tggctggagtgtcatctgccttgga

SEQ ID NO: 1092455 - DNA, 25 bp, Homo sapien
caacttcgtaactacgatgactttc

SEQ ID NO: 1092456 - DNA, 25 bp, Homo sapien
gccaacttcgtaactacgatgactt

SEQ ID NO: 1092457 - DNA, 25 bp, Homo sapien
ttaagccaacttcgtaactacgatg

SEQ ID NO: 1092458 - DNA, 25 bp, Homo sapien
cttcgtaactacgatgactttctcg

SEQ ID NO: 1092459 - DNA, 25 bp, Homo sapien
catgaaatgtttgcacaagggccat

SEQ ID NO: 1092460 - DNA, 25 bp, Homo sapien
atttgcatgaaatgtttgcacaagg

SEQ ID NO: 1092461 - DNA, 25 bp, Homo sapien
ttgcatgaaatgtttgcacaagggc

SEQ ID NO: 1092462 - DNA, 25 bp, Homo sapien
catgaatttgcatgaaatgtttgca

SEQ ID NO: 1092463 - DNA, 25 bp, Homo sapien
tggctgaagcattcccaggtctgct

SEQ ID NO: 1092464 - DNA, 25 bp, Homo sapien
tccatcccgtcctggctgaagcatt

SEQ ID NO: 1092465 - DNA, 25 bp, Homo sapien
gggtgctgtccagctcgataatcat

SEQ ID NO: 1092466 - DNA, 25 bp, Homo sapien
gcattcccaggtctgctgagcagga

SEQ ID NO: 1092467 - DNA, 25 bp, Homo sapien
gccttgacaactgtggccgtcctgg

SEQ ID NO: 1092468 - DNA, 25 bp, Homo sapien
gccgggcacgctgccttgacaactg

SEQ ID NO: 1092469 - DNA, 25 bp, Homo sapien
ggcacgctgccttgacaactgtggc

SEQ ID NO: 1092470 - DNA, 25 bp, Homo sapien
gctgccttgacaactgtggccgtcc

SEQ ID NO: 1092471 - DNA, 25 bp, Homo sapien
gacacctaaacggaacactctggcc

SEQ ID NO: 1092472 - DNA, 25 bp, Homo sapien
acctaaacggaacactctggccatg

SEQ ID NO: 1092473 - DNA, 25 bp, Homo sapien
aaagacacctaaacggaacactctg

SEQ ID NO: 1092474 - DNA, 25 bp, Homo sapien
aaacggaacactctggccatggcca

SEQ ID NO: 1092475 - DNA, 25 bp, Homo sapien
cagcaagcaccaagggaagacattg

SEQ ID NO: 1092476 - DNA, 25 bp, Homo sapien
caccaagggaagacattgctgctat

SEQ ID NO: 1092477 - DNA, 25 bp, Homo sapien
tcgttcccatttggtggttggcctc

SEQ ID NO: 1092478 - DNA, 25 bp, Homo sapien
tggcctcactcccagtatggcagcc

SEQ ID NO: 1092479 - DNA, 25 bp, Homo sapien
ggagccagcttaggggagtattgag

SEQ ID NO: 1092480 - DNA, 25 bp, Homo sapien
gagccagcttaggggagtattgaga

SEQ ID NO: 1092481 - DNA, 25 bp, Homo sapien
aggagccagcttaggggagtattga

SEQ ID NO: 1092482 - DNA, 25 bp, Homo sapien
agccagcttaggggagtattgagaa

SEQ ID NO: 1092483 - DNA, 25 bp, Homo sapien
cttagttgaactatctatcttgggc

SEQ ID NO: 1092484 - DNA, 25 bp, Homo sapien
tagcctgatggctgtttgacacctt

SEQ ID NO: 1092485 - DNA, 25 bp, Homo sapien
gacttctctgacattgtggtgtcca

SEQ ID NO: 1092486 - DNA, 25 bp, Homo sapien
aatggcctgtgggtttagcctgatg

SEQ ID NO: 1092487 - DNA, 25 bp, Homo sapien
agggacttagagttgtacagtaagg

SEQ ID NO: 1092488 - DNA, 25 bp, Homo sapien
cagggacttagagttgtacagtaag

SEQ ID NO: 1092489 - DNA, 25 bp, Homo sapien
gtggtgttttaagccttgtgttgga

SEQ ID NO: 1092490 - DNA, 25 bp, Homo sapien
ttcaggatggggctacagtcacgga

SEQ ID NO: 1092491 - DNA, 25 bp, Homo sapien
tcacggagcaaaggtttacaagcaa

SEQ ID NO: 1092492 - DNA, 25 bp, Homo sapien
ggtttacaagcaacaattccctcat

SEQ ID NO: 1092493 - DNA, 25 bp, Homo sapien
gggctacagtcacggagcaaaggtt

SEQ ID NO: 1092494 - DNA, 25 bp, Homo sapien
tcctcatagggctgatagagtaggc

SEQ ID NO: 1092495 - DNA, 25 bp, Homo sapien
ctcatagggctgatagagtaggcac

SEQ ID NO: 1092496 - DNA, 25 bp, Homo sapien
cctcatagggctgatagagtaggca

SEQ ID NO: 1092497 - DNA, 25 bp, Homo sapien
gcactcaatgtctgttttatccatc

SEQ ID NO: 1092498 - DNA, 25 bp, Homo sapien
cagataccctgatctacggtaggca

SEQ ID NO: 1092499 - DNA, 25 bp, Homo sapien
ggtaggcactcaatgtctgttttat

SEQ ID NO: 1092500 - DNA, 25 bp, Homo sapien
taccctgatctacggtaggcactca

SEQ ID NO: 1092501 - DNA, 25 bp, Homo sapien
attcctcttctttcgtagcatcttc

SEQ ID NO: 1092502 - DNA, 25 bp, Homo sapien
ttcctcttctttcgtagcatcttca

SEQ ID NO: 1092503 - DNA, 25 bp, Homo sapien
cttctttcgtagcatcttcatctgc

SEQ ID NO: 1092504 - DNA, 25 bp, Homo sapien
gattcctcttctttcgtagcatctt

SEQ ID NO: 1092505 - DNA, 25 bp, Homo sapien
ctgacgttggctttgcaacttgggt

SEQ ID NO: 1092506 - DNA, 25 bp, Homo sapien
actgacgttggctttgcaacttggg

SEQ ID NO: 1092507 - DNA, 25 bp, Homo sapien
tccatagaggccgtggttagcctta

SEQ ID NO: 1092508 - DNA, 25 bp, Homo sapien
catagaggccgtggttagccttacc

SEQ ID NO: 1092509 - DNA, 25 bp, Homo sapien
tagaggccgtggttagccttaccca

SEQ ID NO: 1092510 - DNA, 25 bp, Homo sapien
agaggccgtggttagccttacccat

SEQ ID NO: 1092511 - DNA, 25 bp, Homo sapien
ctagcctcttgcagctatggagttg

SEQ ID NO: 1092512 - DNA, 25 bp, Homo sapien
tgcagctatggagttgacgttcttg

SEQ ID NO: 1092513 - DNA, 25 bp, Homo sapien
tcttgcagctatggagttgacgttc

SEQ ID NO: 1092514 - DNA, 25 bp, Homo sapien
gctatggagttgacgttcttgcctt

SEQ ID NO: 1092515 - DNA, 25 bp, Homo sapien
tcggcatcacctggtatccaattag

SEQ ID NO: 1092516 - DNA, 25 bp, Homo sapien
ttcggcatcacctggtatccaatta

SEQ ID NO: 1092517 - DNA, 25 bp, Homo sapien
ggcatcacctggtatccaattagtt

SEQ ID NO: 1092518 - DNA, 25 bp, Homo sapien
tccttcggcatcacctggtatccaa

SEQ ID NO: 1092519 - DNA, 25 bp, Homo sapien
tatgcattaacgaatctgcatgtaa

SEQ ID NO: 1092520 - DNA, 25 bp, Homo sapien
tgcattaacgaatctgcatgtaaga

SEQ ID NO: 1092521 - DNA, 25 bp, Homo sapien
cattaacgaatctgcatgtaagaaa

SEQ ID NO: 1092522 - DNA, 25 bp, Homo sapien
ctatgcattaacgaatctgcatgta

SEQ ID NO: 1092523 - DNA, 25 bp, Homo sapien
tcattgcaaggtggtccatggtcca

SEQ ID NO: 1092524 - DNA, 25 bp, Homo sapien
caaggtggtccatggtccaagtcag

SEQ ID NO: 1092525 - DNA, 25 bp, Homo sapien
tccatggtccaagtcagggatgttg

SEQ ID NO: 1092526 - DNA, 25 bp, Homo sapien
tgcaattcattgcaaggtggtccat

SEQ ID NO: 1092527 - DNA, 25 bp, Homo sapien
tttgttaggaaagtgggtgatgatc

SEQ ID NO: 1092528 - DNA, 25 bp, Homo sapien
gaaaagcagttgacttagctgtgaa

SEQ ID NO: 1092529 - DNA, 25 bp, Homo sapien
gtgggtgatgatcttaactggatga

SEQ ID NO: 1092530 - DNA, 25 bp, Homo sapien
cagttgacttagctgtgaaatatgt

SEQ ID NO: 1092531 - DNA, 25 bp, Homo sapien
gagaaacgtggagccttgctctctg

SEQ ID NO: 1092532 - DNA, 25 bp, Homo sapien
gatcctgatggccattgttggaggc

SEQ ID NO: 1092533 - DNA, 25 bp, Homo sapien
taaaagatttgattgagcacatgct

SEQ ID NO: 1092534 - DNA, 25 bp, Homo sapien
catgcttgttttccttgggtgggtc

SEQ ID NO: 1092535 - DNA, 25 bp, Homo sapien
caaggtgtaaagagcatctccgttc

SEQ ID NO: 1092536 - DNA, 25 bp, Homo sapien
tccacactggcctctagaagcaagg

SEQ ID NO: 1092537 - DNA, 25 bp, Homo sapien
ccgttcatttgattaatcttaagca

SEQ ID NO: 1092538 - DNA, 25 bp, Homo sapien
tggcctctagaagcaaggtgtaaag

SEQ ID NO: 1092539 - DNA, 25 bp, Homo sapien
gatttaggtttggtgccgcctgaca

SEQ ID NO: 1092540 - DNA, 25 bp, Homo sapien
ttggtgccgcctgacatggatatga

SEQ ID NO: 1092541 - DNA, 25 bp, Homo sapien
gtttggtgccgcctgacatggatat

SEQ ID NO: 1092542 - DNA, 25 bp, Homo sapien
agaagcagatttaggtttggtgccg

SEQ ID NO: 1092543 - DNA, 25 bp, Homo sapien
gataatctgagttataggcagctgc

SEQ ID NO: 1092544 - DNA, 25 bp, Homo sapien
cagctgagatcacacagggcttgcg

SEQ ID NO: 1092545 - DNA, 25 bp, Homo sapien
tcaacagtcccaacatgggccaggg

SEQ ID NO: 1092546 - DNA, 25 bp, Homo sapien
agggcttgcgtccatgagaaactgc

SEQ ID NO: 1092547 - DNA, 25 bp, Homo sapien
gcccatccatacttcaatagatggc

SEQ ID NO: 1092548 - DNA, 25 bp, Homo sapien
tccatacttcaatagatggccagaa

SEQ ID NO: 1092549 - DNA, 25 bp, Homo sapien
tgcataatctgcctttgaggcaggt

SEQ ID NO: 1092550 - DNA, 25 bp, Homo sapien
taagtctcctcctatgcataatctg

SEQ ID NO: 1092551 - DNA, 25 bp, Homo sapien
ctgaaggtgagggtgggtaatagac

SEQ ID NO: 1092552 - DNA, 25 bp, Homo sapien
tcactgaagatgaggctggagatga

SEQ ID NO: 1092553 - DNA, 25 bp, Homo sapien
gaaggtgagggtgggtaatagacaa

SEQ ID NO: 1092554 - DNA, 25 bp, Homo sapien
aggctgaaggtgagggtgggtaata

SEQ ID NO: 1092555 - DNA, 25 bp, Homo sapien
ccctccagtatcctgcagcactcac

SEQ ID NO: 1092556 - DNA, 25 bp, Homo sapien
cctccagtatcctgcagcactcact

SEQ ID NO: 1092557 - DNA, 25 bp, Homo sapien
tatgacaaaggccttggtgtaccca

SEQ ID NO: 1092558 - DNA, 25 bp, Homo sapien
tggcacatcctctgttatgacaaag

SEQ ID NO: 1092559 - DNA, 25 bp, Homo sapien
caggatggcctcaccactgagctca

SEQ ID NO: 1092560 - DNA, 25 bp, Homo sapien
gaatctcgatccactgtggacacac

SEQ ID NO: 1092561 - DNA, 25 bp, Homo sapien
gagtccttccaagaccaatggatta

SEQ ID NO: 1092562 - DNA, 25 bp, Homo sapien
tattcaaggccatgctcatactctg

SEQ ID NO: 1092563 - DNA, 25 bp, Homo sapien
tcccacccctgttgcttgcagaatt

SEQ ID NO: 1092564 - DNA, 25 bp, Homo sapien
gcctgaaacagatctctataagagt

SEQ ID NO: 1092565 - DNA, 25 bp, Homo sapien
taagcttatgataattcactgtcgt

SEQ ID NO: 1092566 - DNA, 25 bp, Homo sapien
gggttgggaatcatcacccctgcat

SEQ ID NO: 1092567 - DNA, 25 bp, Homo sapien
tgataattcactgtcgttctccaag

SEQ ID NO: 1092568 - DNA, 25 bp, Homo sapien
ttgaacaggaatgggttgggaatca

SEQ ID NO: 1092569 - DNA, 25 bp, Homo sapien
cagccttagaggtcacttgataaat

SEQ ID NO: 1092570 - DNA, 25 bp, Homo sapien
ggccacagtaatgcacccaaataag

SEQ ID NO: 1092571 - DNA, 25 bp, Homo sapien
aataaggaccatgttgcctccaaaa

SEQ ID NO: 1092572 - DNA, 25 bp, Homo sapien
tcctagcggcctctgccatgattca

SEQ ID NO: 1092573 - DNA, 25 bp, Homo sapien
tcaagggttcggtgttagtctctgc

SEQ ID NO: 1092574 - DNA, 25 bp, Homo sapien
aaatctcctgtgctgaggtcatccg

SEQ ID NO: 1092575 - DNA, 25 bp, Homo sapien
gagccaatccaagtcctgaaagcga

SEQ ID NO: 1092576 - DNA, 25 bp, Homo sapien
gagtggtgtccacataacaggccat

SEQ ID NO: 1092577 - DNA, 25 bp, Homo sapien
ggaaccttccgtctcggatcaaaca

SEQ ID NO: 1092578 - DNA, 25 bp, Homo sapien
tgtcacttactctggaaccttccgt

SEQ ID NO: 1092579 - DNA, 25 bp, Homo sapien
ccgtctcggatcaaacatgtctatg

SEQ ID NO: 1092580 - DNA, 25 bp, Homo sapien
taagatctctgcttagttgtcactt

SEQ ID NO: 1092581 - DNA, 25 bp, Homo sapien
cagcttctgaacatagacatgtagg

SEQ ID NO: 1092582 - DNA, 25 bp, Homo sapien
cagcctcccgcatgtggcatcaagg

SEQ ID NO: 1092583 - DNA, 25 bp, Homo sapien
gattatccaaactgagaggcaaggg

SEQ ID NO: 1092584 - DNA, 25 bp, Homo sapien
tgagcagtggtcatccttcagcgtt

SEQ ID NO: 1092585 - DNA, 25 bp, Homo sapien
tagctaccactatgggtaactaggg

SEQ ID NO: 1092586 - DNA, 25 bp, Homo sapien
ggtaactagggcttaatctcagaaa

SEQ ID NO: 1092587 - DNA, 25 bp, Homo sapien
gaatacagccaactactatatttag

SEQ ID NO: 1092588 - DNA, 25 bp, Homo sapien
atctcagaaatagcatagtacacac

SEQ ID NO: 1092589 - DNA, 25 bp, Homo sapien
aagtggtttattaaggaggtgcaga

SEQ ID NO: 1092590 - DNA, 25 bp, Homo sapien
ttcaagtggtttattaaggaggtgc

SEQ ID NO: 1092591 - DNA, 25 bp, Homo sapien
tcaagtggtttattaaggaggtgca

SEQ ID NO: 1092592 - DNA, 25 bp, Homo sapien
caagtggtttattaaggaggtgcag

SEQ ID NO: 1092593 - DNA, 25 bp, Homo sapien
ctcagatgcacacaattgtaagtga

SEQ ID NO: 1092594 - DNA, 25 bp, Homo sapien
tttctccacctcagctctaagagtg

SEQ ID NO: 1092595 - DNA, 25 bp, Homo sapien
tatgaagttgtgacccattgtgggt

SEQ ID NO: 1092596 - DNA, 25 bp, Homo sapien
ctaagagtgactgcatatgaagttg

SEQ ID NO: 1092597 - DNA, 25 bp, Homo sapien
taagcacatcagtgtgactgctgga

SEQ ID NO: 1092598 - DNA, 25 bp, Homo sapien
tttggcagaatatagggttgtcact

SEQ ID NO: 1092599 - DNA, 25 bp, Homo sapien
gactgaatggcacttaatacctata

SEQ ID NO: 1092600 - DNA, 25 bp, Homo sapien
gataatatccacactgataaggcca

SEQ ID NO: 1092601 - DNA, 25 bp, Homo sapien
tcctggaggccatctctcctgtctt

SEQ ID NO: 1092602 - DNA, 25 bp, Homo sapien
aagattgtactctaggaatcaccag

SEQ ID NO: 1092603 - DNA, 25 bp, Homo sapien
gattgtactctaggaatcaccagca

SEQ ID NO: 1092604 - DNA, 25 bp, Homo sapien
agaagattgtactctaggaatcacc

SEQ ID NO: 1092605 - DNA, 25 bp, Homo sapien
tatgtatatcttcactcaaatccag

SEQ ID NO: 1092606 - DNA, 25 bp, Homo sapien
aaatccagatagagcatgagatcag

SEQ ID NO: 1092607 - DNA, 25 bp, Homo sapien
tagagcatgagatcagctaggtgat

SEQ ID NO: 1092608 - DNA, 25 bp, Homo sapien
gagatcagctaggtgatcttggaat

SEQ ID NO: 1092609 - DNA, 25 bp, Homo sapien
tggcatagaggtgatggctactaga

SEQ ID NO: 1092610 - DNA, 25 bp, Homo sapien
catagaggtgatggctactagagga

SEQ ID NO: 1092611 - DNA, 25 bp, Homo sapien
cttggcatagaggtgatggctacta

SEQ ID NO: 1092612 - DNA, 25 bp, Homo sapien
gcttggcatagaggtgatggctact

SEQ ID NO: 1092613 - DNA, 25 bp, Homo sapien
caagtagggtaggagttacttgctg

SEQ ID NO: 1092614 - DNA, 25 bp, Homo sapien
ctcgttatagggcaagtttcctatt

SEQ ID NO: 1092615 - DNA, 25 bp, Homo sapien
gaccggaagccctcgttatagggca

SEQ ID NO: 1092616 - DNA, 25 bp, Homo sapien
gagttacttgctgtgaccggaagcc

SEQ ID NO: 1092617 - DNA, 25 bp, Homo sapien
gcagggctgcaacacaaacaggata

SEQ ID NO: 1092618 - DNA, 25 bp, Homo sapien
tatctttcagatggaagtagtaaga

SEQ ID NO: 1092619 - DNA, 25 bp, Homo sapien
ctttgaggatcccaccaaggaagca

SEQ ID NO: 1092620 - DNA, 25 bp, Homo sapien
gaagttggaccagactggctagcgt

SEQ ID NO: 1092621 - DNA, 25 bp, Homo sapien
cctggaattactttcaagcttggtg

SEQ ID NO: 1092622 - DNA, 25 bp, Homo sapien
tcagggctccgctgatttttcctgg

SEQ ID NO: 1092623 - DNA, 25 bp, Homo sapien
ctcagggctccgctgatttttcctg

SEQ ID NO: 1092624 - DNA, 25 bp, Homo sapien
tactttcaagcttggtggtggtctc

SEQ ID NO: 1092625 - DNA, 25 bp, Homo sapien
gctatgcaacttgtcacagctgcaa

SEQ ID NO: 1092626 - DNA, 25 bp, Homo sapien
catgtagaattggtacatgagcggg

SEQ ID NO: 1092627 - DNA, 25 bp, Homo sapien
gaaggtgatgctatgcaacttgtca

SEQ ID NO: 1092628 - DNA, 25 bp, Homo sapien
ggagagatactaacatcagagtttc

SEQ ID NO: 1092629 - DNA, 25 bp, Homo sapien
gattcaagatatgcttctccagatc

SEQ ID NO: 1092630 - DNA, 25 bp, Homo sapien
tccagatcatacctgcatttgcttc

SEQ ID NO: 1092631 - DNA, 25 bp, Homo sapien
ctgctgtttcttatggtgttgtctg

SEQ ID NO: 1092632 - DNA, 25 bp, Homo sapien
tgttgtctgtcctgactttttgaga

SEQ ID NO: 1092633 - DNA, 25 bp, Homo sapien
tactggacctgtgctctggcaagtc

SEQ ID NO: 1092634 - DNA, 25 bp, Homo sapien
catctcttcagatctccctcaataa

SEQ ID NO: 1092635 - DNA, 25 bp, Homo sapien
cttcagatctccctcaataaaatgg

SEQ ID NO: 1092636 - DNA, 25 bp, Homo sapien
gaacttgaaacctgacacttactgg

SEQ ID NO: 1092637 - DNA, 25 bp, Homo sapien
tttcctgtggcgcatgaaccaatga

SEQ ID NO: 1092638 - DNA, 25 bp, Homo sapien
cgttttactagtctgtaggctggca

SEQ ID NO: 1092639 - DNA, 25 bp, Homo sapien
gaaccaatgatgctcgcctttaaaa

SEQ ID NO: 1092640 - DNA, 25 bp, Homo sapien
ccctgatgaggtgcgtgcctttgaa

SEQ ID NO: 1092641 - DNA, 25 bp, Homo sapien
tatatccctagtggaacagtagagg

SEQ ID NO: 1092642 - DNA, 25 bp, Homo sapien
cccatgagtgggatgcctggttaaa

SEQ ID NO: 1092643 - DNA, 25 bp, Homo sapien
aaactcaaccagcatttggctaggg

SEQ ID NO: 1092644 - DNA, 25 bp, Homo sapien
tataaacaacaggtaagtgcgcaat

SEQ ID NO: 1092645 - DNA, 25 bp, Homo sapien
ttatggccccaaccaagctttccaa

SEQ ID NO: 1092646 - DNA, 25 bp, Homo sapien
ctccagatgtcatttatggccccaa

SEQ ID NO: 1092647 - DNA, 25 bp, Homo sapien
gatgtcatttatggccccaaccaag

SEQ ID NO: 1092648 - DNA, 25 bp, Homo sapien
catttatggccccaaccaagctttc

SEQ ID NO: 1092649 - DNA, 25 bp, Homo sapien
agttagaatgtctttattctgcagg

SEQ ID NO: 1092650 - DNA, 25 bp, Homo sapien
tgcagaagttagaatgtctttattc

SEQ ID NO: 1092651 - DNA, 25 bp, Homo sapien
cagtaatgtaggcaattccaaacca

SEQ ID NO: 1092652 - DNA, 25 bp, Homo sapien
ttggcttatatttgtctgtcagtaa

SEQ ID NO: 1092653 - DNA, 25 bp, Homo sapien
cacgtcttttggaaagccgttctgc

SEQ ID NO: 1092654 - DNA, 25 bp, Homo sapien
gaaagccgttctgctaagaacttgg

SEQ ID NO: 1092655 - DNA, 25 bp, Homo sapien
agaacttggcatcactacccctttt

SEQ ID NO: 1092656 - DNA, 25 bp, Homo sapien
ctctgcatagcacgtcttttggaaa

SEQ ID NO: 1092657 - DNA, 25 bp, Homo sapien
tggagtggataatgggcacccctgc

SEQ ID NO: 1092658 - DNA, 25 bp, Homo sapien
ccgggctcaggtggaacgcagcact

SEQ ID NO: 1092659 - DNA, 25 bp, Homo sapien
caaatctgctggagtggataatggg

SEQ ID NO: 1092660 - DNA, 25 bp, Homo sapien
cactgaaacaggtgctgcgagccat

SEQ ID NO: 1092661 - DNA, 25 bp, Homo sapien
caaaaggcactctcagttaaggtac

SEQ ID NO: 1092662 - DNA, 25 bp, Homo sapien
tcagttaaggtacccacggcagaat

SEQ ID NO: 1092663 - DNA, 25 bp, Homo sapien
gacagtagtgtcaattagcagaagc

SEQ ID NO: 1092664 - DNA, 25 bp, Homo sapien
gcagaattatagacagtagtgtcaa

SEQ ID NO: 1092665 - DNA, 25 bp, Homo sapien
tctggaaaacataaccaggtctttc

SEQ ID NO: 1092666 - DNA, 25 bp, Homo sapien
aatatccaagtgttcagtcaatttc

SEQ ID NO: 1092667 - DNA, 25 bp, Homo sapien
tatccaagtgttcagtcaatttcaa

SEQ ID NO: 1092668 - DNA, 25 bp, Homo sapien
ggtctttcaactatactgattgctc

SEQ ID NO: 1092669 - DNA, 25 bp, Homo sapien
gatttaagaatcacacttcgagagt

SEQ ID NO: 1092670 - DNA, 25 bp, Homo sapien
tatgcttgaagtcctgtttaatgcc

SEQ ID NO: 1092671 - DNA, 25 bp, Homo sapien
ttcgagagtggtagctgaagctcat

SEQ ID NO: 1092672 - DNA, 25 bp, Homo sapien
aatgccagatggcaatggtcaacaa

SEQ ID NO: 1092673 - DNA, 25 bp, Homo sapien
tctgcccagtagagtctctgacttc

SEQ ID NO: 1092674 - DNA, 25 bp, Homo sapien
tttctgcccagtagagtctctgact

SEQ ID NO: 1092675 - DNA, 25 bp, Homo sapien
ttctgcccagtagagtctctgactt

SEQ ID NO: 1092676 - DNA, 25 bp, Homo sapien
ctgcccagtagagtctctgacttcc

SEQ ID NO: 1092677 - DNA, 25 bp, Homo sapien
tggattttgttgaacacagaggaac

SEQ ID NO: 1092678 - DNA, 25 bp, Homo sapien
ttttggcgttgaaaggatctgaggt

SEQ ID NO: 1092679 - DNA, 25 bp, Homo sapien
tgaggtgtcaggtttaaatgcctta

SEQ ID NO: 1092680 - DNA, 25 bp, Homo sapien
tcaggtttaaatgccttatctgacc

SEQ ID NO: 1092681 - DNA, 25 bp, Homo sapien
cagcttgaaggtcagtacaggacca

SEQ ID NO: 1092682 - DNA, 25 bp, Homo sapien
cagagggtccagatgatctattcca

SEQ ID NO: 1092683 - DNA, 25 bp, Homo sapien
tactacctgcacgtgtagtcctggc

SEQ ID NO: 1092684 - DNA, 25 bp, Homo sapien
tggtaacccaacaatagctcctgcg

SEQ ID NO: 1092685 - DNA, 25 bp, Homo sapien
ctatggagtactgcaagtaagggag

SEQ ID NO: 1092686 - DNA, 25 bp, Homo sapien
acatgtgcattttcagacgccaggg

SEQ ID NO: 1092687 - DNA, 25 bp, Homo sapien
ttttcagacgccagggtggactgag

SEQ ID NO: 1092688 - DNA, 25 bp, Homo sapien
gagtagactcctgctctgctatgga

SEQ ID NO: 1092689 - DNA, 25 bp, Homo sapien
tagataatgttttctcgatctcctt

SEQ ID NO: 1092690 - DNA, 25 bp, Homo sapien
ttcagtgttccttacagactgatgg

SEQ ID NO: 1092691 - DNA, 25 bp, Homo sapien
gtgttccttacagactgatggtcca

SEQ ID NO: 1092692 - DNA, 25 bp, Homo sapien
ttgatgtttcagtgttccttacaga

SEQ ID NO: 1092693 - DNA, 25 bp, Homo sapien
atatattaaaattgtgcctctgtct

SEQ ID NO: 1092694 - DNA, 25 bp, Homo sapien
tgttcccagggcagcctgaactttc

SEQ ID NO: 1092695 - DNA, 25 bp, Homo sapien
tcccagggcagcctgaactttccat

SEQ ID NO: 1092696 - DNA, 25 bp, Homo sapien
gtgttcccagggcagcctgaacttt

SEQ ID NO: 1092697 - DNA, 25 bp, Homo sapien
ctgtgttcccagggcagcctgaact

SEQ ID NO: 1092698 - DNA, 25 bp, Homo sapien
cttctttccaatttcatagtagaag

SEQ ID NO: 1092699 - DNA, 25 bp, Homo sapien
tttccaatttcatagtagaagagga

SEQ ID NO: 1092700 - DNA, 25 bp, Homo sapien
tgggtccactatcaccttctttcca

SEQ ID NO: 1092701 - DNA, 25 bp, Homo sapien
tctttccaatttcatagtagaagag

SEQ ID NO: 1092702 - DNA, 25 bp, Homo sapien
cttaaaaccgacagattcatgaaat

SEQ ID NO: 1092703 - DNA, 25 bp, Homo sapien
ttaaaaccgacagattcatgaaatg

SEQ ID NO: 1092704 - DNA, 25 bp, Homo sapien
ggagaattatctcgtgggcacagga

SEQ ID NO: 1092705 - DNA, 25 bp, Homo sapien
ggccaattgccctgatgtacgcaca

SEQ ID NO: 1092706 - DNA, 25 bp, Homo sapien
catttcagcttcagtcaggatgaca

SEQ ID NO: 1092707 - DNA, 25 bp, Homo sapien
gctttcctttattgacggcagtgac

SEQ ID NO: 1092708 - DNA, 25 bp, Homo sapien
tccaatgctcttgcagggtgtctcc

SEQ ID NO: 1092709 - DNA, 25 bp, Homo sapien
ggcccatccatagatagtcaataag

SEQ ID NO: 1092710 - DNA, 25 bp, Homo sapien
tttctcctggcttccaatggtcagg

SEQ ID NO: 1092711 - DNA, 25 bp, Homo sapien
aatggtcaggcagcttccaatgctc

SEQ ID NO: 1092712 - DNA, 25 bp, Homo sapien
gctctggtaactctggtaaacttac

SEQ ID NO: 1092713 - DNA, 25 bp, Homo sapien
ggtttatctgaaatcctccacgcca

SEQ ID NO: 1092714 - DNA, 25 bp, Homo sapien
tgaagcctttcaagaacattgccag

SEQ ID NO: 1092715 - DNA, 25 bp, Homo sapien
gccatactagtggagagttccagca

SEQ ID NO: 1092716 - DNA, 25 bp, Homo sapien
agagggagccacatggagagaaggg

SEQ ID NO: 1092717 - DNA, 25 bp, Homo sapien
tgtgggagagagggagccacatgga

SEQ ID NO: 1092718 - DNA, 25 bp, Homo sapien
gtgggagagagggagccacatggag

SEQ ID NO: 1092719 - DNA, 25 bp, Homo sapien
gagagagggagccacatggagagaa

SEQ ID NO: 1092720 - DNA, 25 bp, Homo sapien
ctcctctaagcctcattgttattac

SEQ ID NO: 1092721 - DNA, 25 bp, Homo sapien
catcaggaaattggaaaagatcttg

SEQ ID NO: 1092722 - DNA, 25 bp, Homo sapien
taaagccagatagagccgctgatgg

SEQ ID NO: 1092723 - DNA, 25 bp, Homo sapien
caggagacttttcaccataatctcc

SEQ ID NO: 1092724 - DNA, 25 bp, Homo sapien
aatgagccctgaggcttctatggcc

SEQ ID NO: 1092725 - DNA, 25 bp, Homo sapien
ctgttcagaatgagccctgaggctt

SEQ ID NO: 1092726 - DNA, 25 bp, Homo sapien
gccctgaggcttctatggcctgtcc

SEQ ID NO: 1092727 - DNA, 25 bp, Homo sapien
cagaatgagccctgaggcttctatg

SEQ ID NO: 1092728 - DNA, 25 bp, Homo sapien
taggagttagcccttcaagaagagg

SEQ ID NO: 1092729 - DNA, 25 bp, Homo sapien
tgatccctatgctgagacttgaagg

SEQ ID NO: 1092730 - DNA, 25 bp, Homo sapien
taaacattggtggagcagctacgag

SEQ ID NO: 1092731 - DNA, 25 bp, Homo sapien
cagtgaaccctacagtctagttgga

SEQ ID NO: 1092732 - DNA, 25 bp, Homo sapien
tcaataacaattgtggagcccacag

SEQ ID NO: 1092733 - DNA, 25 bp, Homo sapien
gagcccacagggcaatccttcaaag

SEQ ID NO: 1092734 - DNA, 25 bp, Homo sapien
tcaaagcctgatgagagcaccatgg

SEQ ID NO: 1092735 - DNA, 25 bp, Homo sapien
cagctgaagtgctaggtggaagccc

SEQ ID NO: 1092736 - DNA, 25 bp, Homo sapien
tttggctaaaatggttacttcgcta

SEQ ID NO: 1092737 - DNA, 25 bp, Homo sapien
ggttagtgggagtactgtttctgaa

SEQ ID NO: 1092738 - DNA, 25 bp, Homo sapien
gtgggagtactgtttctgaatttat

SEQ ID NO: 1092739 - DNA, 25 bp, Homo sapien
aaatggttacttcgctatggctgaa

SEQ ID NO: 1092740 - DNA, 25 bp, Homo sapien
actcaggaatagtgggaccatctgc

SEQ ID NO: 1092741 - DNA, 25 bp, Homo sapien
tgaagtgtttgttgtacatttcctc

SEQ ID NO: 1092742 - DNA, 25 bp, Homo sapien
gcacactgggactcaggaatagtgg

SEQ ID NO: 1092743 - DNA, 25 bp, Homo sapien
tttgttgtacatttcctctggagca

SEQ ID NO: 1092744 - DNA, 25 bp, Homo sapien
gaatggagtgtcaatatgaagaaag

SEQ ID NO: 1092745 - DNA, 25 bp, Homo sapien
tcatagaagtaagaagagaattaat

SEQ ID NO: 1092746 - DNA, 25 bp, Homo sapien
acagaatgtttggtaataatcgtca

SEQ ID NO: 1092747 - DNA, 25 bp, Homo sapien
tatctctatggcaactttagtgggc

SEQ ID NO: 1092748 - DNA, 25 bp, Homo sapien
gaaacagggctgttacatcccctgg

SEQ ID NO: 1092749 - DNA, 25 bp, Homo sapien
ggaaacagggctgttacatcccctg

SEQ ID NO: 1092750 - DNA, 25 bp, Homo sapien
cagggctgttacatcccctgggcta

SEQ ID NO: 1092751 - DNA, 25 bp, Homo sapien
aacagggctgttacatcccctgggc

SEQ ID NO: 1092752 - DNA, 25 bp, Homo sapien
ccccattgccaagcctggcctccta

SEQ ID NO: 1092753 - DNA, 25 bp, Homo sapien
tagaagccccccttgtgtcaaacac

SEQ ID NO: 1092754 - DNA, 25 bp, Homo sapien
ggcttctacagccatattcttcccc

SEQ ID NO: 1092755 - DNA, 25 bp, Homo sapien
aagttgtttcttgaaggatggtcca

SEQ ID NO: 1092756 - DNA, 25 bp, Homo sapien
ttttgggatgtggtcttctgttccc

SEQ ID NO: 1092757 - DNA, 25 bp, Homo sapien
tttgggatgtggtcttctgttccct

SEQ ID NO: 1092758 - DNA, 25 bp, Homo sapien
ttgggatgtggtcttctgttccctt

SEQ ID NO: 1092759 - DNA, 25 bp, Homo sapien
ggcacttccacgtttgtaaatcctg

SEQ ID NO: 1092760 - DNA, 25 bp, Homo sapien
caatggacagagcataggcagtttc

SEQ ID NO: 1092761 - DNA, 25 bp, Homo sapien
tattgtgcaatgcaacagccagtgt

SEQ ID NO: 1092762 - DNA, 25 bp, Homo sapien
ttatctgccccgaaaaagctggcac

SEQ ID NO: 1092763 - DNA, 25 bp, Homo sapien
tatatcatgaatccagaggtgcttc

SEQ ID NO: 1092764 - DNA, 25 bp, Homo sapien
aatgaaggtatgctcgccctgtacc

SEQ ID NO: 1092765 - DNA, 25 bp, Homo sapien
tctgtgatttatgctgaagtgctcc

SEQ ID NO: 1092766 - DNA, 25 bp, Homo sapien
taataaacataaccagccagaggac

SEQ ID NO: 1092767 - DNA, 25 bp, Homo sapien
aacagggctcttggtgtgtgcctgg

SEQ ID NO: 1092768 - DNA, 25 bp, Homo sapien
tgtaacatcaaagttgagacctgct

SEQ ID NO: 1092769 - DNA, 25 bp, Homo sapien
cttggtgtgtgcctggattgtaaca

SEQ ID NO: 1092770 - DNA, 25 bp, Homo sapien
cctggattgtaacatcaaagttgag

SEQ ID NO: 1092771 - DNA, 25 bp, Homo sapien
tgaccaaaatgaacaaaagttgtat

SEQ ID NO: 1092772 - DNA, 25 bp, Homo sapien
caaaatgaacaaaagttgtatatca

SEQ ID NO: 1092773 - DNA, 25 bp, Homo sapien
tatgaccaaaatgaacaaaagttgt

SEQ ID NO: 1092774 - DNA, 25 bp, Homo sapien
accaaaatgaacaaaagttgtatat

SEQ ID NO: 1092775 - DNA, 25 bp, Homo sapien
cctgcttctcattactactgtggac

SEQ ID NO: 1092776 - DNA, 25 bp, Homo sapien
ctactgtggactggagcctccccag

SEQ ID NO: 1092777 - DNA, 25 bp, Homo sapien
gatcgtgttccctgactctcatcgg

SEQ ID NO: 1092778 - DNA, 25 bp, Homo sapien
ctggtaatttcacaacgattaggtg

SEQ ID NO: 1092779 - DNA, 25 bp, Homo sapien
ggaatatgggtatagcatcacacca

SEQ ID NO: 1092780 - DNA, 25 bp, Homo sapien
ggcattggcccgtagactgtgctct

SEQ ID NO: 1092781 - DNA, 25 bp, Homo sapien
gctggctcttggcagtcaggtaacc

SEQ ID NO: 1092782 - DNA, 25 bp, Homo sapien
gaagatgttttcagggatgaggctc

SEQ ID NO: 1092783 - DNA, 25 bp, Homo sapien
tagtaagtggttactgagttgcttg

SEQ ID NO: 1092784 - DNA, 25 bp, Homo sapien
tgcttggttgtctaggcagtttggt

SEQ ID NO: 1092785 - DNA, 25 bp, Homo sapien
ggttactgagttgcttggttgtcta

SEQ ID NO: 1092786 - DNA, 25 bp, Homo sapien
gagttgcttggttgtctaggcagtt

SEQ ID NO: 1092787 - DNA, 25 bp, Homo sapien
tttgcttaaagtgagtcaatcccca

SEQ ID NO: 1092788 - DNA, 25 bp, Homo sapien
gacaactgtctactaacaaatgatg

SEQ ID NO: 1092789 - DNA, 25 bp, Homo sapien
agtctggctcttgtcgacagtgtgg

SEQ ID NO: 1092790 - DNA, 25 bp, Homo sapien
tgagtcaatccccactccatgacaa

SEQ ID NO: 1092791 - DNA, 25 bp, Homo sapien
tgagcttcctgccatgatacccagg

SEQ ID NO: 1092792 - DNA, 25 bp, Homo sapien
ttgtgaccaactccctctgcttctt

SEQ ID NO: 1092793 - DNA, 25 bp, Homo sapien
ttctttctctttgtgaccaactccc

SEQ ID NO: 1092794 - DNA, 25 bp, Homo sapien
ttctctttgtgaccaactccctctg

SEQ ID NO: 1092795 - DNA, 25 bp, Homo sapien
tgtcttcatccaagagacgccttga

SEQ ID NO: 1092796 - DNA, 25 bp, Homo sapien
tggaaacgtgacttgcaggcgattg

SEQ ID NO: 1092797 - DNA, 25 bp, Homo sapien
caggcgattgaactgaacccaaagg

SEQ ID NO: 1092798 - DNA, 25 bp, Homo sapien
tgctccctaatgaagaactggaggg

SEQ ID NO: 1092799 - DNA, 25 bp, Homo sapien
ttgtggttccaatctccaaaactcc

SEQ ID NO: 1092800 - DNA, 25 bp, Homo sapien
gtgcccacgggatttgattcttttg

SEQ ID NO: 1092801 - DNA, 25 bp, Homo sapien
cacgggatttgattcttttgtggtt

SEQ ID NO: 1092802 - DNA, 25 bp, Homo sapien
tttgtggttccaatctccaaaactc

SEQ ID NO: 1092803 - DNA, 25 bp, Homo sapien
gcagggtatatcctgtttgttcctc

SEQ ID NO: 1092804 - DNA, 25 bp, Homo sapien
gaaactgacttcaacagacagcatc

SEQ ID NO: 1092805 - DNA, 25 bp, Homo sapien
tcagccaatggaagacactagtaga

SEQ ID NO: 1092806 - DNA, 25 bp, Homo sapien
taccctgtagtgttcagctgagttc

SEQ ID NO: 1092807 - DNA, 25 bp, Homo sapien
tccaggggtgccccttgtatgatgc

SEQ ID NO: 1092808 - DNA, 25 bp, Homo sapien
ctgttaaacactctctgtctttcag

SEQ ID NO: 1092809 - DNA, 25 bp, Homo sapien
catctgttaaacactctctgtcttt

SEQ ID NO: 1092810 - DNA, 25 bp, Homo sapien
ccatctgttaaacactctctgtctt

SEQ ID NO: 1092811 - DNA, 25 bp, Homo sapien
tcactccgcatcgttgatcaaatgt

SEQ ID NO: 1092812 - DNA, 25 bp, Homo sapien
ccgcatcgttgatcaaatgtaaaag

SEQ ID NO: 1092813 - DNA, 25 bp, Homo sapien
gcatcgttgatcaaatgtaaaagtt

SEQ ID NO: 1092814 - DNA, 25 bp, Homo sapien
ctccgcatcgttgatcaaatgtaaa

SEQ ID NO: 1092815 - DNA, 25 bp, Homo sapien
tgatcttgagtgctgggtatttttc

SEQ ID NO: 1092816 - DNA, 25 bp, Homo sapien
tattgatcttgagtgctgggtattt

SEQ ID NO: 1092817 - DNA, 25 bp, Homo sapien
acatattgatcttgagtgctgggta

SEQ ID NO: 1092818 - DNA, 25 bp, Homo sapien
catattgatcttgagtgctgggtat

SEQ ID NO: 1092819 - DNA, 25 bp, Homo sapien
cagtgaggttaaggtgcctaagtgc

SEQ ID NO: 1092820 - DNA, 25 bp, Homo sapien
aaaccactgtgtgggctaaacaagc

SEQ ID NO: 1092821 - DNA, 25 bp, Homo sapien
ctaagtgcctgaaaaacttatgtgt

SEQ ID NO: 1092822 - DNA, 25 bp, Homo sapien
caagcctgctgattagatttggcac

SEQ ID NO: 1092823 - DNA, 25 bp, Homo sapien
tgatatcagtaagtcgggcagttgt

SEQ ID NO: 1092824 - DNA, 25 bp, Homo sapien
cagtagatctggctgcagtagatct

SEQ ID NO: 1092825 - DNA, 25 bp, Homo sapien
gaggtcatgggcttcagtgatatca

SEQ ID NO: 1092826 - DNA, 25 bp, Homo sapien
gattgctagtgatggccagaggtca

SEQ ID NO: 1092827 - DNA, 25 bp, Homo sapien
tctcaaagtaaccacgactatttgt

SEQ ID NO: 1092828 - DNA, 25 bp, Homo sapien
caaagtaaccacgactatttgtatt

SEQ ID NO: 1092829 - DNA, 25 bp, Homo sapien
tcttctcaaagtaaccacgactatt

SEQ ID NO: 1092830 - DNA, 25 bp, Homo sapien
ttctcaaagtaaccacgactatttg

SEQ ID NO: 1092831 - DNA, 25 bp, Homo sapien
gttggcaatcgaggtggaacccacc

SEQ ID NO: 1092832 - DNA, 25 bp, Homo sapien
agttggcaatcgaggtggaacccac

SEQ ID NO: 1092833 - DNA, 25 bp, Homo sapien
aagttggcaatcgaggtggaaccca

SEQ ID NO: 1092834 - DNA, 25 bp, Homo sapien
agaggcagcatactggggaaagaac

SEQ ID NO: 1092835 - DNA, 25 bp, Homo sapien
gaggcagcatactggggaaagaaca

SEQ ID NO: 1092836 - DNA, 25 bp, Homo sapien
taagaggcagcatactggggaaaga

SEQ ID NO: 1092837 - DNA, 25 bp, Homo sapien
ctaagaggcagcatactggggaaag

SEQ ID NO: 1092838 - DNA, 25 bp, Homo sapien
ttagagttgtggcttcgtaaactgt

SEQ ID NO: 1092839 - DNA, 25 bp, Homo sapien
tagagttgtggcttcgtaaactgtt

SEQ ID NO: 1092840 - DNA, 25 bp, Homo sapien
gagttgtggcttcgtaaactgtttc

SEQ ID NO: 1092841 - DNA, 25 bp, Homo sapien
agttgtggcttcgtaaactgtttct

SEQ ID NO: 1092842 - DNA, 25 bp, Homo sapien
ttcagagagctgtaaagattttaca

SEQ ID NO: 1092843 - DNA, 25 bp, Homo sapien
tccagacccaagtgaccacctggta

SEQ ID NO: 1092844 - DNA, 25 bp, Homo sapien
cagagcaattttcattagtctttgc

SEQ ID NO: 1092845 - DNA, 25 bp, Homo sapien
cctggtaattacttcaacagcagag

SEQ ID NO: 1092846 - DNA, 25 bp, Homo sapien
tgctcctctttcacgtccaggctta

SEQ ID NO: 1092847 - DNA, 25 bp, Homo sapien
tgggtgtgaatacgctgctcctctt

SEQ ID NO: 1092848 - DNA, 25 bp, Homo sapien
tcttgccctgggtgtgaatacgctg

SEQ ID NO: 1092849 - DNA, 25 bp, Homo sapien
ggcttagccttgtaacccagtccat

SEQ ID NO: 1092850 - DNA, 25 bp, Homo sapien
gaatattgttgactatatcacacag

SEQ ID NO: 1092851 - DNA, 25 bp, Homo sapien
tgttgactatatcacacagtgcctc

SEQ ID NO: 1092852 - DNA, 25 bp, Homo sapien
ttgtgaatattgttgactatatcac

SEQ ID NO: 1092853 - DNA, 25 bp, Homo sapien
tattgttgactatatcacacagtgc

SEQ ID NO: 1092854 - DNA, 25 bp, Homo sapien
tactggctgagggatgtggtctttc

SEQ ID NO: 1092855 - DNA, 25 bp, Homo sapien
gagccatccgaagatcagtgaactg

SEQ ID NO: 1092856 - DNA, 25 bp, Homo sapien
cattcgcccctctggatgcttgagg

SEQ ID NO: 1092857 - DNA, 25 bp, Homo sapien
ttttggaatcaaacggagccatccg

SEQ ID NO: 1092858 - DNA, 25 bp, Homo sapien
tccagaggctctaacgcagtctcct

SEQ ID NO: 1092859 - DNA, 25 bp, Homo sapien
aggtgctggctgtcttaattccaga

SEQ ID NO: 1092860 - DNA, 25 bp, Homo sapien
tcttctctgagcccgttcattcact

SEQ ID NO: 1092861 - DNA, 25 bp, Homo sapien
agtctcctgctgactgaatcctctt

SEQ ID NO: 1092862 - DNA, 25 bp, Homo sapien
tgtgtgttcctcaggacggccactc

SEQ ID NO: 1092863 - DNA, 25 bp, Homo sapien
tccatctctaaatacgggtttggaa

SEQ ID NO: 1092864 - DNA, 25 bp, Homo sapien
gtttggaaacaggtgacgctaaagc

SEQ ID NO: 1092865 - DNA, 25 bp, Homo sapien
ggacggccactctcttgatttccat

SEQ ID NO: 1092866 - DNA, 25 bp, Homo sapien
aggttgactctttccgacaccctga

SEQ ID NO: 1092867 - DNA, 25 bp, Homo sapien
gcatttctaaatggccaggttgact

SEQ ID NO: 1092868 - DNA, 25 bp, Homo sapien
gacaccctgagtccatctgtggttt

SEQ ID NO: 1092869 - DNA, 25 bp, Homo sapien
cctacgtcctgtcttgcggttgaag

SEQ ID NO: 1092870 - DNA, 25 bp, Homo sapien
gcctttcccgaagtgttcctgccca

SEQ ID NO: 1092871 - DNA, 25 bp, Homo sapien
tgcctttcccgaagtgttcctgccc

SEQ ID NO: 1092872 - DNA, 25 bp, Homo sapien
agccttcttggctatcctgtttttt

SEQ ID NO: 1092873 - DNA, 25 bp, Homo sapien
ccttcttggctatcctgttttttct

SEQ ID NO: 1092874 - DNA, 25 bp, Homo sapien
ccatagccttcttggctatcctgtt

SEQ ID NO: 1092875 - DNA, 25 bp, Homo sapien
catggcccattccatagccttcttg

SEQ ID NO: 1092876 - DNA, 25 bp, Homo sapien
agtaaatactggctgcttgacgatg

SEQ ID NO: 1092877 - DNA, 25 bp, Homo sapien
tggctgcttgacgatgtcttggatg

SEQ ID NO: 1092878 - DNA, 25 bp, Homo sapien
ccagttggatgagggatgtgtgcga

SEQ ID NO: 1092879 - DNA, 25 bp, Homo sapien
gatgggaagccagttggatgaggga

SEQ ID NO: 1092880 - DNA, 25 bp, Homo sapien
cttagaattaaagccttgaaaatag

SEQ ID NO: 1092881 - DNA, 25 bp, Homo sapien
gaaaaaatgcttcagacagctccat

SEQ ID NO: 1092882 - DNA, 25 bp, Homo sapien
ctgatgttcatgtagatggagctta

SEQ ID NO: 1092883 - DNA, 25 bp, Homo sapien
ttcatgtagatggagcttagaatta

SEQ ID NO: 1092884 - DNA, 25 bp, Homo sapien
cattgtgctaattaggacagcccca

SEQ ID NO: 1092885 - DNA, 25 bp, Homo sapien
tgtgctaattaggacagccccagca

SEQ ID NO: 1092886 - DNA, 25 bp, Homo sapien
attgtgctaattaggacagccccag

SEQ ID NO: 1092887 - DNA, 25 bp, Homo sapien
ttgtgctaattaggacagccccagc

SEQ ID NO: 1092888 - DNA, 25 bp, Homo sapien
tcagcagcttgggtgcaaatgagca

SEQ ID NO: 1092889 - DNA, 25 bp, Homo sapien
cacatctggcttaggtcatcaggca

SEQ ID NO: 1092890 - DNA, 25 bp, Homo sapien
tgtttctgtcagtgcaagccctcag

SEQ ID NO: 1092891 - DNA, 25 bp, Homo sapien
aatgagcacaagtgtcggccctttc

SEQ ID NO: 1092892 - DNA, 25 bp, Homo sapien
gagtttcagtgcgtgtctctcctga

SEQ ID NO: 1092893 - DNA, 25 bp, Homo sapien
tctcctgacacctgcttttgttttg

SEQ ID NO: 1092894 - DNA, 25 bp, Homo sapien
caatgaaagagaagacgttaaactc

SEQ ID NO: 1092895 - DNA, 25 bp, Homo sapien
ttttgtcctcattaaggccttggaa

SEQ ID NO: 1092896 - DNA, 25 bp, Homo sapien
agctgcttcgggctcacagtatttt

SEQ ID NO: 1092897 - DNA, 25 bp, Homo sapien
cagctgcttcgggctcacagtattt

SEQ ID NO: 1092898 - DNA, 25 bp, Homo sapien
gcacgaagatacgaatcacagatgg

SEQ ID NO: 1092899 - DNA, 25 bp, Homo sapien
gatgtggccctgtagaactgcagtg

SEQ ID NO: 1092900 - DNA, 25 bp, Homo sapien
tcctcggcagatgtggccctgtaga

SEQ ID NO: 1092901 - DNA, 25 bp, Homo sapien
ctggcgttttgttggagcacgaaga

SEQ ID NO: 1092902 - DNA, 25 bp, Homo sapien
tgccttctctccacaagtcggcctc

SEQ ID NO: 1092903 - DNA, 25 bp, Homo sapien
cctgggcgctggaggacatcctgtt

SEQ ID NO: 1092904 - DNA, 25 bp, Homo sapien
tctggctccatctgacaggtttcag

SEQ ID NO: 1092905 - DNA, 25 bp, Homo sapien
gaaagccatcccactttatttgcct

SEQ ID NO: 1092906 - DNA, 25 bp, Homo sapien
ccagaattcgggctgctggtatgca

SEQ ID NO: 1092907 - DNA, 25 bp, Homo sapien
gaatatggcaactgtggagcgtcct

SEQ ID NO: 1092908 - DNA, 25 bp, Homo sapien
tgcctatttcagtgcctgccagaag

SEQ ID NO: 1092909 - DNA, 25 bp, Homo sapien
ggagcgtcctcatgctttgagccag

SEQ ID NO: 1092910 - DNA, 25 bp, Homo sapien
ccttagctgtgtccaatttttcaga

SEQ ID NO: 1092911 - DNA, 25 bp, Homo sapien
cttagctgtgtccaatttttcagaa

SEQ ID NO: 1092912 - DNA, 25 bp, Homo sapien
ctggcacaatgtgtcttctggccag

SEQ ID NO: 1092913 - DNA, 25 bp, Homo sapien
ctggccagtgcacagcttccttagc

SEQ ID NO: 1092914 - DNA, 25 bp, Homo sapien
ggccccaaaccgtctgctgatggtc

SEQ ID NO: 1092915 - DNA, 25 bp, Homo sapien
ccaggccccaaaccgtctgctgatg

SEQ ID NO: 1092916 - DNA, 25 bp, Homo sapien
cccaaaccgtctgctgatggtcaca

SEQ ID NO: 1092917 - DNA, 25 bp, Homo sapien
cccaggccccaaaccgtctgctgat

SEQ ID NO: 1092918 - DNA, 25 bp, Homo sapien
ttccctgcggccgtcagataatgaa

SEQ ID NO: 1092919 - DNA, 25 bp, Homo sapien
gcggccgtcagataatgaagatgca

SEQ ID NO: 1092920 - DNA, 25 bp, Homo sapien
cagataatgaagatgcaaggcttga

SEQ ID NO: 1092921 - DNA, 25 bp, Homo sapien
agaacaccttccctgcggccgtcag

SEQ ID NO: 1092922 - DNA, 25 bp, Homo sapien
aagtgaactttacttggatggctga

SEQ ID NO: 1092923 - DNA, 25 bp, Homo sapien
gagagtatgatagcacttcatgaac

SEQ ID NO: 1092924 - DNA, 25 bp, Homo sapien
gaaactcctgcggttctgcttcaag

SEQ ID NO: 1092925 - DNA, 25 bp, Homo sapien
ctggagtcctctgcggagtggaaac

SEQ ID NO: 1092926 - DNA, 25 bp, Homo sapien
gggattctgttgggcagtccagaca

SEQ ID NO: 1092927 - DNA, 25 bp, Homo sapien
agggctagcaaggtcaatcacggga

SEQ ID NO: 1092928 - DNA, 25 bp, Homo sapien
cagagagctggtgctaagaaatcca

SEQ ID NO: 1092929 - DNA, 25 bp, Homo sapien
ggaaagaggtgtactggcatcccag

SEQ ID NO: 1092930 - DNA, 25 bp, Homo sapien
tgatggggctgggtaacacagcctg

SEQ ID NO: 1092931 - DNA, 25 bp, Homo sapien
gttaataacgggaatctctgcatct

SEQ ID NO: 1092932 - DNA, 25 bp, Homo sapien
ctccgaaccttcaagacaccttggt

SEQ ID NO: 1092933 - DNA, 25 bp, Homo sapien
tggatggcctccgaaccttcaagac

SEQ ID NO: 1092934 - DNA, 25 bp, Homo sapien
catgacgttggagtcccttcgcatc

SEQ ID NO: 1092935 - DNA, 25 bp, Homo sapien
caaggtggaagcttccaaaaggcaa

SEQ ID NO: 1092936 - DNA, 25 bp, Homo sapien
agtgctcttcccgtcacaaggtgga

SEQ ID NO: 1092937 - DNA, 25 bp, Homo sapien
cacgtgactccaggcggcagagttt

SEQ ID NO: 1092938 - DNA, 25 bp, Homo sapien
gtaatatggctgtacaaattcttag

SEQ ID NO: 1092939 - DNA, 25 bp, Homo sapien
aaatcccttagcttctcttcacatc

SEQ ID NO: 1092940 - DNA, 25 bp, Homo sapien
tgtaatatggctgtacaaattctta

SEQ ID NO: 1092941 - DNA, 25 bp, Homo sapien
atcccttagcttctcttcacatcat

SEQ ID NO: 1092942 - DNA, 25 bp, Homo sapien
gaatcactggacaatggttggagga

SEQ ID NO: 1092943 - DNA, 25 bp, Homo sapien
agggaattctgcctgaatcactgga

SEQ ID NO: 1092944 - DNA, 25 bp, Homo sapien
ttggaggatggacgttgagaagtag

SEQ ID NO: 1092945 - DNA, 25 bp, Homo sapien
tctgcctgaatcactggacaatggt

SEQ ID NO: 1092946 - DNA, 25 bp, Homo sapien
gtgcagtcagggcttcaactccggg

SEQ ID NO: 1092947 - DNA, 25 bp, Homo sapien
catgtccttcttctgtaggttagca

SEQ ID NO: 1092948 - DNA, 25 bp, Homo sapien
tctatgtgattaccctggccatgtc

SEQ ID NO: 1092949 - DNA, 25 bp, Homo sapien
tcaccatcaccgagaggttgaaagg

SEQ ID NO: 1092950 - DNA, 25 bp, Homo sapien
gacagcaaggccgattctagcaaaa

SEQ ID NO: 1092951 - DNA, 25 bp, Homo sapien
atagcctcaagttcagacccgctgg

SEQ ID NO: 1092952 - DNA, 25 bp, Homo sapien
tggtggtctccatgaggacgctgat

SEQ ID NO: 1092953 - DNA, 25 bp, Homo sapien
tggagctcagacacactgctagaca

SEQ ID NO: 1092954 - DNA, 25 bp, Homo sapien
tgcagtaagcttcaaagactcgtct

SEQ ID NO: 1092955 - DNA, 25 bp, Homo sapien
gaggaaacattcaccgccaaaggac

SEQ ID NO: 1092956 - DNA, 25 bp, Homo sapien
gactcgtcttgatgatatagtcact

SEQ ID NO: 1092957 - DNA, 25 bp, Homo sapien
gccaaaggacatgaagattttgcag

SEQ ID NO: 1092958 - DNA, 25 bp, Homo sapien
tgtctcgtctctctggttccctgaa

SEQ ID NO: 1092959 - DNA, 25 bp, Homo sapien
tcgtctctctggttccctgaaagga

SEQ ID NO: 1092960 - DNA, 25 bp, Homo sapien
gtgctgtctcgtctctctggttccc

SEQ ID NO: 1092961 - DNA, 25 bp, Homo sapien
tctggttccctgaaaggaattaggc

SEQ ID NO: 1092962 - DNA, 25 bp, Homo sapien
tctgtgtgccttaatgagaagtgct

SEQ ID NO: 1092963 - DNA, 25 bp, Homo sapien
gtactacccggagctgaactcttgg

SEQ ID NO: 1092964 - DNA, 25 bp, Homo sapien
acctgctgggtgtgaatgggcttaa

SEQ ID NO: 1092965 - DNA, 25 bp, Homo sapien
tcccctctagggaacttagctgaaa

SEQ ID NO: 1092966 - DNA, 25 bp, Homo sapien
aatggcaggacctttgcctccttcc

SEQ ID NO: 1092967 - DNA, 25 bp, Homo sapien
ctgctcttagagtggcaagctttgg

SEQ ID NO: 1092968 - DNA, 25 bp, Homo sapien
gaaaatggcaggacctttgcctcct

SEQ ID NO: 1092969 - DNA, 25 bp, Homo sapien
tactgaaaatggcaggacctttgcc

SEQ ID NO: 1092970 - DNA, 25 bp, Homo sapien
cagtcggggaaaggcaaggtaagag

SEQ ID NO: 1092971 - DNA, 25 bp, Homo sapien
tgggaaaggcagtcggggaaaggca

SEQ ID NO: 1092972 - DNA, 25 bp, Homo sapien
gcagtcggggaaaggcaaggtaaga

SEQ ID NO: 1092973 - DNA, 25 bp, Homo sapien
tcatggacacggctcatcgcctgca

SEQ ID NO: 1092974 - DNA, 25 bp, Homo sapien
ggctcatcgcctgcatcctcagtgt

SEQ ID NO: 1092975 - DNA, 25 bp, Homo sapien
acggctcatcgcctgcatcctcagt

SEQ ID NO: 1092976 - DNA, 25 bp, Homo sapien
atggacacggctcatcgcctgcatc

SEQ ID NO: 1092977 - DNA, 25 bp, Homo sapien
aaagtccaatgtgtcgcaagttgac

SEQ ID NO: 1092978 - DNA, 25 bp, Homo sapien
gcaagttgacccaggcgtccatctg

SEQ ID NO: 1092979 - DNA, 25 bp, Homo sapien
tgtgtcgcaagttgacccaggcgtc

SEQ ID NO: 1092980 - DNA, 25 bp, Homo sapien
cccaggcgtccatctgggaaactag

SEQ ID NO: 1092981 - DNA, 25 bp, Homo sapien
tgcagagtatagaatccagtgccct

SEQ ID NO: 1092982 - DNA, 25 bp, Homo sapien
agtatagaatccagtgcccttaggg

SEQ ID NO: 1092983 - DNA, 25 bp, Homo sapien
cagcccgttctcctgctctgggata

SEQ ID NO: 1092984 - DNA, 25 bp, Homo sapien
cccgttctcctgctctgggataggg

SEQ ID NO: 1092985 - DNA, 25 bp, Homo sapien
caaagtctaagacacactgtctcat

SEQ ID NO: 1092986 - DNA, 25 bp, Homo sapien
ctctgtggggtcaaagtctaagaca

SEQ ID NO: 1092987 - DNA, 25 bp, Homo sapien
cgtcttgctaaggaaaactctgtgg

SEQ ID NO: 1092988 - DNA, 25 bp, Homo sapien
gtacagggaggaggcgtcttgctaa

SEQ ID NO: 1092989 - DNA, 25 bp, Homo sapien
gaagaggactgtacccaaccaactc

SEQ ID NO: 1092990 - DNA, 25 bp, Homo sapien
tgcgaggcttcagccatgcaccagg

SEQ ID NO: 1092991 - DNA, 25 bp, Homo sapien
cctgcgaggcttcagccatgcacca

SEQ ID NO: 1092992 - DNA, 25 bp, Homo sapien
aagaggactgtacccaaccaactct

SEQ ID NO: 1092993 - DNA, 25 bp, Homo sapien
ttaagcaacgtggacagccaggatc

SEQ ID NO: 1092994 - DNA, 25 bp, Homo sapien
tctcattaaacgactgatagaaggg

SEQ ID NO: 1092995 - DNA, 25 bp, Homo sapien
tttggtaactttgcaggccggctgt

SEQ ID NO: 1092996 - DNA, 25 bp, Homo sapien
cctcttcccgctaggaatgctggga

SEQ ID NO: 1092997 - DNA, 25 bp, Homo sapien
tcaagaagccttgtcgggttgtttc

SEQ ID NO: 1092998 - DNA, 25 bp, Homo sapien
gagaagctctctctatggggtaaaa

SEQ ID NO: 1092999 - DNA, 25 bp, Homo sapien
agggacttcaagaagccttgtcggg

SEQ ID NO: 1093000 - DNA, 25 bp, Homo sapien
ctctctatggggtaaaagtgggttg

SEQ ID NO: 1093001 - DNA, 25 bp, Homo sapien
aatagctgggcagggatcagaaccc

SEQ ID NO: 1093002 - DNA, 25 bp, Homo sapien
ccttgttcagcatggcgtaagggaa

SEQ ID NO: 1093003 - DNA, 25 bp, Homo sapien
caaaatgtgagtcgcttttggctct

SEQ ID NO: 1093004 - DNA, 25 bp, Homo sapien
cgtctccctgctgccaatgtagtga

SEQ ID NO: 1093005 - DNA, 25 bp, Homo sapien
gggggtttccaagctgctcacccca

SEQ ID NO: 1093006 - DNA, 25 bp, Homo sapien
tgtatttcgtgcttcctttgtgcca

SEQ ID NO: 1093007 - DNA, 25 bp, Homo sapien
accccagaacatgcagtccactaat

SEQ ID NO: 1093008 - DNA, 25 bp, Homo sapien
ctaatactgtatttcgtgcttcctt

SEQ ID NO: 1093009 - DNA, 25 bp, Homo sapien
attgcatgcataaagatctgtatca

SEQ ID NO: 1093010 - DNA, 25 bp, Homo sapien
tatcaagactgtcagattctcaggg

SEQ ID NO: 1093011 - DNA, 25 bp, Homo sapien
ttgcatgcataaagatctgtatcaa

SEQ ID NO: 1093012 - DNA, 25 bp, Homo sapien
ctgtatcaagactgtcagattctca

SEQ ID NO: 1093013 - DNA, 25 bp, Homo sapien
tcctgtacacagcccacatcaaagg

SEQ ID NO: 1093014 - DNA, 25 bp, Homo sapien
atcctgtacacagcccacatcaaag

SEQ ID NO: 1093015 - DNA, 25 bp, Homo sapien
ctgtacacagcccacatcaaaggaa

SEQ ID NO: 1093016 - DNA, 25 bp, Homo sapien
gtacacagcccacatcaaaggaagg

SEQ ID NO: 1093017 - DNA, 25 bp, Homo sapien
taaatctcggtagagagtttccctc

SEQ ID NO: 1093018 - DNA, 25 bp, Homo sapien
tgcaaggtcccactctaggtgatag

SEQ ID NO: 1093019 - DNA, 25 bp, Homo sapien
ctgctgggcagaacatatgggttaa

SEQ ID NO: 1093020 - DNA, 25 bp, Homo sapien
tgattataaactgtgtctcgacctg

SEQ ID NO: 1093021 - DNA, 25 bp, Homo sapien
gctgtgtaaagcactattgtcttgg

SEQ ID NO: 1093022 - DNA, 25 bp, Homo sapien
ggttacccttcaggatgacagagct

SEQ ID NO: 1093023 - DNA, 25 bp, Homo sapien
gagggtctttgtaggagttgctctt

SEQ ID NO: 1093024 - DNA, 25 bp, Homo sapien
tgagccctagggcagttcttggtag

SEQ ID NO: 1093025 - DNA, 25 bp, Homo sapien
agctgttgcaaatcagaaggagcca

SEQ ID NO: 1093026 - DNA, 25 bp, Homo sapien
tttagctgttgcaaatcagaaggag

SEQ ID NO: 1093027 - DNA, 25 bp, Homo sapien
cttttagctgttgcaaatcagaagg

SEQ ID NO: 1093028 - DNA, 25 bp, Homo sapien
tgttgcaaatcagaaggagccagag

SEQ ID NO: 1093029 - DNA, 25 bp, Homo sapien
ctgtacaacagatgggagggtgaag

SEQ ID NO: 1093030 - DNA, 25 bp, Homo sapien
ggggcagaatgaaaatcgaaccaac

SEQ ID NO: 1093031 - DNA, 25 bp, Homo sapien
tgaagggggcagaatgaaaatcgaa

SEQ ID NO: 1093032 - DNA, 25 bp, Homo sapien
tgtacaacagatgggagggtgaagg

SEQ ID NO: 1093033 - DNA, 25 bp, Homo sapien
agcaaggcatggtctgccaccagct

SEQ ID NO: 1093034 - DNA, 25 bp, Homo sapien
gcccaggaatgagcaaggcatggtc

SEQ ID NO: 1093035 - DNA, 25 bp, Homo sapien
gaatgagcaaggcatggtctgccac

SEQ ID NO: 1093036 - DNA, 25 bp, Homo sapien
tgccaccagctgacggaaagcagcc

SEQ ID NO: 1093037 - DNA, 25 bp, Homo sapien
ctcttagaaacagttcgacttcggt

SEQ ID NO: 1093038 - DNA, 25 bp, Homo sapien
aggatgctgatgttgtgcacgtcaa

SEQ ID NO: 1093039 - DNA, 25 bp, Homo sapien
tgaaatgtcaattgcaggatgctga

SEQ ID NO: 1093040 - DNA, 25 bp, Homo sapien
tcggttactgccttctcccttgaaa

SEQ ID NO: 1093041 - DNA, 25 bp, Homo sapien
ttcagaagaaatcgagggcacaggc

SEQ ID NO: 1093042 - DNA, 25 bp, Homo sapien
tgctcagtcaagtgatcagatcccg

SEQ ID NO: 1093043 - DNA, 25 bp, Homo sapien
acaacatgatgtaggtgccacccac

SEQ ID NO: 1093044 - DNA, 25 bp, Homo sapien
gaaaatagccattgcggagctgccc

SEQ ID NO: 1093045 - DNA, 25 bp, Homo sapien
cattttcttgcctataatgtggcca

SEQ ID NO: 1093046 - DNA, 25 bp, Homo sapien
tggatcgccagagccttagttttgg

SEQ ID NO: 1093047 - DNA, 25 bp, Homo sapien
ccagagtgaaaccacagtgctgtca

SEQ ID NO: 1093048 - DNA, 25 bp, Homo sapien
caggccctggatcgccagagcctta

SEQ ID NO: 1093049 - DNA, 25 bp, Homo sapien
gacatttccggagtgtgaatgctgg

SEQ ID NO: 1093050 - DNA, 25 bp, Homo sapien
gtaagacatcggaagcatcttcctc

SEQ ID NO: 1093051 - DNA, 25 bp, Homo sapien
tgtgaatgctggcagtaagacatcg

SEQ ID NO: 1093052 - DNA, 25 bp, Homo sapien
ctggcagtaagacatcggaagcatc

SEQ ID NO: 1093053 - DNA, 25 bp, Homo sapien
tgtcacgtgccaagcaggagtctgt

SEQ ID NO: 1093054 - DNA, 25 bp, Homo sapien
tgaaacacagagacatcacctgagg

SEQ ID NO: 1093055 - DNA, 25 bp, Homo sapien
gaaggtagtgtcttttccagccgta

SEQ ID NO: 1093056 - DNA, 25 bp, Homo sapien
gacatttgctgagagcccaagcact

SEQ ID NO: 1093057 - DNA, 25 bp, Homo sapien
gaagccatgagtgggttacatagct

SEQ ID NO: 1093058 - DNA, 25 bp, Homo sapien
ggcctacattaccatcgagttcaga

SEQ ID NO: 1093059 - DNA, 25 bp, Homo sapien
tagagcctcagcatactcatctgga

SEQ ID NO: 1093060 - DNA, 25 bp, Homo sapien
tgtatccatgaccagctctgaagcc

SEQ ID NO: 1093061 - DNA, 25 bp, Homo sapien
ccgtgctaggccgatttgcaaaagt

SEQ ID NO: 1093062 - DNA, 25 bp, Homo sapien
gtgctaggccgatttgcaaaagttt

SEQ ID NO: 1093063 - DNA, 25 bp, Homo sapien
gcctccgtgctaggccgatttgcaa

SEQ ID NO: 1093064 - DNA, 25 bp, Homo sapien
gtgagcctccgtgctaggccgattt

SEQ ID NO: 1093065 - DNA, 25 bp, Homo sapien
gtgtgtccagctcttcttacagaaa

SEQ ID NO: 1093066 - DNA, 25 bp, Homo sapien
tagctaccctttaccttgtcgttga

SEQ ID NO: 1093067 - DNA, 25 bp, Homo sapien
tgaggcccttactagagtcaggtca

SEQ ID NO: 1093068 - DNA, 25 bp, Homo sapien
aattccccaggacttaaccatggtg

SEQ ID NO: 1093069 - DNA, 25 bp, Homo sapien
aaatcgtgttgactgatcctcaggc

SEQ ID NO: 1093070 - DNA, 25 bp, Homo sapien
tcagggaaccagagagcaatctgag

SEQ ID NO: 1093071 - DNA, 25 bp, Homo sapien
tgtagcagtgtctggttcagggaac

SEQ ID NO: 1093072 - DNA, 25 bp, Homo sapien
gaaacagttccttaatctgtagcag

SEQ ID NO: 1093073 - DNA, 25 bp, Homo sapien
ccagaacactagttggcacttgagc

SEQ ID NO: 1093074 - DNA, 25 bp, Homo sapien
cctaggcagaaggagtggcttcagc

SEQ ID NO: 1093075 - DNA, 25 bp, Homo sapien
taagtaggattttcgtcagagaacc

SEQ ID NO: 1093076 - DNA, 25 bp, Homo sapien
caagatcgtgaagacccttgaatgc

SEQ ID NO: 1093077 - DNA, 25 bp, Homo sapien
caaaagacagacagatgtgggttca

SEQ ID NO: 1093078 - DNA, 25 bp, Homo sapien
caacgtttcatagctatcgtggaga

SEQ ID NO: 1093079 - DNA, 25 bp, Homo sapien
aaattgggaccattgctagctctgc

SEQ ID NO: 1093080 - DNA, 25 bp, Homo sapien
caaggtccagggtcttcagtctata

SEQ ID NO: 1093081 - DNA, 25 bp, Homo sapien
gattttgttcttgcagggcctccca

SEQ ID NO: 1093082 - DNA, 25 bp, Homo sapien
gtcctgccagtccacgtgttgttta

SEQ ID NO: 1093083 - DNA, 25 bp, Homo sapien
tgtacacctgggtagcatggcttgg

SEQ ID NO: 1093084 - DNA, 25 bp, Homo sapien
taatgctcacctcttcgcttttggc

SEQ ID NO: 1093085 - DNA, 25 bp, Homo sapien
tccttccaattagattccagttggg

SEQ ID NO: 1093086 - DNA, 25 bp, Homo sapien
taccaggcagctgtcatggcaatac

SEQ ID NO: 1093087 - DNA, 25 bp, Homo sapien
tttctcaggcaaacataccaggcag

SEQ ID NO: 1093088 - DNA, 25 bp, Homo sapien
agctgtcgtggaagctgatatttcc

SEQ ID NO: 1093089 - DNA, 25 bp, Homo sapien
cccttcacacccttctcccagacat

SEQ ID NO: 1093090 - DNA, 25 bp, Homo sapien
acccttctcccagacatctccactc

SEQ ID NO: 1093091 - DNA, 25 bp, Homo sapien
ttcacacccttctcccagacatctc

SEQ ID NO: 1093092 - DNA, 25 bp, Homo sapien
acacccttctcccagacatctccac

SEQ ID NO: 1093093 - DNA, 25 bp, Homo sapien
ctttgtaaatccgtagaggatagac

SEQ ID NO: 1093094 - DNA, 25 bp, Homo sapien
cctgtttctttgtaaatccgtagag

SEQ ID NO: 1093095 - DNA, 25 bp, Homo sapien
taaagtgttcagatttgacttgaag

SEQ ID NO: 1093096 - DNA, 25 bp, Homo sapien
gaggatagacgtgaactccaaacct

SEQ ID NO: 1093097 - DNA, 25 bp, Homo sapien
ctttgaaaggtcagctctatagatg

SEQ ID NO: 1093098 - DNA, 25 bp, Homo sapien
ctctatagatgttatatgaaagcag

SEQ ID NO: 1093099 - DNA, 25 bp, Homo sapien
actgattgctttgaaaggtcagctc

SEQ ID NO: 1093100 - DNA, 25 bp, Homo sapien
agatgttatatgaaagcagaattcc

SEQ ID NO: 1093101 - DNA, 25 bp, Homo sapien
ttcattagacactctcccaaagtag

SEQ ID NO: 1093102 - DNA, 25 bp, Homo sapien
ggcagaatgcgtctcagccacacag

SEQ ID NO: 1093103 - DNA, 25 bp, Homo sapien
ggaagtggcagaatgcgtctcagcc

SEQ ID NO: 1093104 - DNA, 25 bp, Homo sapien
agcagatttcattagacactctccc

SEQ ID NO: 1093105 - DNA, 25 bp, Homo sapien
cacattgttgtaaagttagcaacca

SEQ ID NO: 1093106 - DNA, 25 bp, Homo sapien
ttagtggctgcggatgcagctcctt

SEQ ID NO: 1093107 - DNA, 25 bp, Homo sapien
aatgcagtacatggaacttctacca

SEQ ID NO: 1093108 - DNA, 25 bp, Homo sapien
caaatgacccacattgttgtaaagt

SEQ ID NO: 1093109 - DNA, 25 bp, Homo sapien
agccgggtgcggttgcgggtgcctg

SEQ ID NO: 1093110 - DNA, 25 bp, Homo sapien
aattagccgggtgcggttgcgggtg

SEQ ID NO: 1093111 - DNA, 25 bp, Homo sapien
tcccagctactcgggaggctgaggc

SEQ ID NO: 1093112 - DNA, 25 bp, Homo sapien
cgggtgcggttgcgggtgcctgtaa

SEQ ID NO: 1093113 - DNA, 25 bp, Homo sapien
tagactcatgtgctggatgccaaga

SEQ ID NO: 1093114 - DNA, 25 bp, Homo sapien
tatgtgtagttgtcatcttaggaac

SEQ ID NO: 1093115 - DNA, 25 bp, Homo sapien
tagaaacccatctattttcagttcc

SEQ ID NO: 1093116 - DNA, 25 bp, Homo sapien
tcttaggaactaaaattaccatgta

SEQ ID NO: 1093117 - DNA, 25 bp, Homo sapien
caaggtcacgcattgtcagtgccaa

SEQ ID NO: 1093118 - DNA, 25 bp, Homo sapien
tagaaatatctaaaggcggctgggt

SEQ ID NO: 1093119 - DNA, 25 bp, Homo sapien
ccttaaggaattcccaggctggtga

SEQ ID NO: 1093120 - DNA, 25 bp, Homo sapien
ggagggcctactctagcagcacagt

SEQ ID NO: 1093121 - DNA, 25 bp, Homo sapien
tcccagttttcttactcctcaatgg

SEQ ID NO: 1093122 - DNA, 25 bp, Homo sapien
tgtttgttgtgaaacccaggtgaga

SEQ ID NO: 1093123 - DNA, 25 bp, Homo sapien
tcaaaatcacgttatcattatcagg

SEQ ID NO: 1093124 - DNA, 25 bp, Homo sapien
cattatcaggtaggaatgaagttgc

SEQ ID NO: 1093125 - DNA, 25 bp, Homo sapien
ggaatcccatccgagccaagtaagg

SEQ ID NO: 1093126 - DNA, 25 bp, Homo sapien
aggacctcgtgaaataaaagtgcag

SEQ ID NO: 1093127 - DNA, 25 bp, Homo sapien
tcattaaggaaccagctgcggagga

SEQ ID NO: 1093128 - DNA, 25 bp, Homo sapien
caaaagtttctgctcgggatctggc

SEQ ID NO: 1093129 - DNA, 25 bp, Homo sapien
tcccggtttctctggtttgagagta

SEQ ID NO: 1093130 - DNA, 25 bp, Homo sapien
acttttacttgacccaaggccagca

SEQ ID NO: 1093131 - DNA, 25 bp, Homo sapien
caatttggtgtttctgaacgctagg

SEQ ID NO: 1093132 - DNA, 25 bp, Homo sapien
ctgaaagcctcaggtttgtaggtga

SEQ ID NO: 1093133 - DNA, 25 bp, Homo sapien
cctggaattccccatagtagtagaa

SEQ ID NO: 1093134 - DNA, 25 bp, Homo sapien
tatagaagatacaagggaaggccct

SEQ ID NO: 1093135 - DNA, 25 bp, Homo sapien
aataagatgccagcctctaaggaaa

SEQ ID NO: 1093136 - DNA, 25 bp, Homo sapien
aggtccatgctaggcactatagaag

SEQ ID NO: 1093137 - DNA, 25 bp, Homo sapien
cttgtgcttgtaactttcctctagt

SEQ ID NO: 1093138 - DNA, 25 bp, Homo sapien
ttgtgcttgtaactttcctctagtc

SEQ ID NO: 1093139 - DNA, 25 bp, Homo sapien
gtgcttgtaactttcctctagtcat

SEQ ID NO: 1093140 - DNA, 25 bp, Homo sapien
tgtgcttgtaactttcctctagtca

SEQ ID NO: 1093141 - DNA, 25 bp, Homo sapien
tcaataaaggcgtttcagttcttct

SEQ ID NO: 1093142 - DNA, 25 bp, Homo sapien
tcttctttgtccatgttatggactt

SEQ ID NO: 1093143 - DNA, 25 bp, Homo sapien
tatggactttctcacgttcctcatc

SEQ ID NO: 1093144 - DNA, 25 bp, Homo sapien
caataaaggcgtttcagttcttctt

SEQ ID NO: 1093145 - DNA, 25 bp, Homo sapien
gactggcaaaaatgagtcagagaca

SEQ ID NO: 1093146 - DNA, 25 bp, Homo sapien
ttgatgccatttctacagctacctg

SEQ ID NO: 1093147 - DNA, 25 bp, Homo sapien
agaaaatttctcctgataaactagt

SEQ ID NO: 1093148 - DNA, 25 bp, Homo sapien
aaatttctcctgataaactagtgag

SEQ ID NO: 1093149 - DNA, 25 bp, Homo sapien
atttctcctgataaactagtgagca

SEQ ID NO: 1093150 - DNA, 25 bp, Homo sapien
atctagtctctgtactgttattcca

SEQ ID NO: 1093151 - DNA, 25 bp, Homo sapien
tctagtctctgtactgttattccat

SEQ ID NO: 1093152 - DNA, 25 bp, Homo sapien
catctagtctctgtactgttattcc

SEQ ID NO: 1093153 - DNA, 25 bp, Homo sapien
gccagttatttttgtgctgaacttt

SEQ ID NO: 1093154 - DNA, 25 bp, Homo sapien
aattttgagaaaatagccagttatt

SEQ ID NO: 1093155 - DNA, 25 bp, Homo sapien
gaactttcatctggttaagggtcat

SEQ ID NO: 1093156 - DNA, 25 bp, Homo sapien
tttttgtgctgaactttcatctggt

SEQ ID NO: 1093157 - DNA, 25 bp, Homo sapien
gccgccgccgcctacccacagtgca

SEQ ID NO: 1093158 - DNA, 25 bp, Homo sapien
gcgcggcctcgctccaccgcctgcc

SEQ ID NO: 1093159 - DNA, 25 bp, Homo sapien
ccgtcgtgcttctgcttctcagcca

SEQ ID NO: 1093160 - DNA, 25 bp, Homo sapien
cgtcgtgcttctgcttctcagccat

SEQ ID NO: 1093161 - DNA, 25 bp, Homo sapien
ccgcccgtcgtgcttctgcttctca

SEQ ID NO: 1093162 - DNA, 25 bp, Homo sapien
gcccgtcgtgcttctgcttctcagc

SEQ ID NO: 1093163 - DNA, 25 bp, Homo sapien
cagcgtgtcgcccagcacgtagtgt

SEQ ID NO: 1093164 - DNA, 25 bp, Homo sapien
tgtcgcccagcacgtagtgtccgat

SEQ ID NO: 1093165 - DNA, 25 bp, Homo sapien
tcgcccagcacgtagtgtccgatct

SEQ ID NO: 1093166 - DNA, 25 bp, Homo sapien
cgtgtcgcccagcacgtagtgtccg

SEQ ID NO: 1093167 - DNA, 25 bp, Homo sapien
cgagagtcctggaacgtgaaggaat

SEQ ID NO: 1093168 - DNA, 25 bp, Homo sapien
caaccgagagtcctggaacgtgaag

SEQ ID NO: 1093169 - DNA, 25 bp, Homo sapien
cccaacaaccgagagtcctggaacg

SEQ ID NO: 1093170 - DNA, 25 bp, Homo sapien
caacaaccgagagtcctggaacgtg

SEQ ID NO: 1093171 - DNA, 25 bp, Homo sapien
tgcatgcttaagaggataagcatta

SEQ ID NO: 1093172 - DNA, 25 bp, Homo sapien
gataagcattatctctagcattaga

SEQ ID NO: 1093173 - DNA, 25 bp, Homo sapien
aggtcacagtgaagggatagagtct

SEQ ID NO: 1093174 - DNA, 25 bp, Homo sapien
gaagggatagagtctagtagtgata

SEQ ID NO: 1093175 - DNA, 25 bp, Homo sapien
acattgtttggacaggagagaactc

SEQ ID NO: 1093176 - DNA, 25 bp, Homo sapien
cattgtttggacaggagagaactca

SEQ ID NO: 1093177 - DNA, 25 bp, Homo sapien
tgtttggacaggagagaactcactg

SEQ ID NO: 1093178 - DNA, 25 bp, Homo sapien
agaacattgtttggacaggagagaa

SEQ ID NO: 1093179 - DNA, 25 bp, Homo sapien
tctaaactgcgaatcttctgtctat

SEQ ID NO: 1093180 - DNA, 25 bp, Homo sapien
tttccaacaacatctaaactgcgaa

SEQ ID NO: 1093181 - DNA, 25 bp, Homo sapien
ccactttatggcctgttaattgatg

SEQ ID NO: 1093182 - DNA, 25 bp, Homo sapien
tatgaggatgacgaaagagttttag

SEQ ID NO: 1093183 - DNA, 25 bp, Homo sapien
tccacagggttatcaagttgttccc

SEQ ID NO: 1093184 - DNA, 25 bp, Homo sapien
catttcccagcttgtagagactgcc

SEQ ID NO: 1093185 - DNA, 25 bp, Homo sapien
tgctgccatacttcaaactcagtgg

SEQ ID NO: 1093186 - DNA, 25 bp, Homo sapien
tcttcaaacgcagaaacggccagtt

SEQ ID NO: 1093187 - DNA, 25 bp, Homo sapien
tgaaggtttcctagcagtgatgtga

SEQ ID NO: 1093188 - DNA, 25 bp, Homo sapien
tcagtggcatactcttgctgccggt

SEQ ID NO: 1093189 - DNA, 25 bp, Homo sapien
tgagaactgagtcatcaccggtcat

SEQ ID NO: 1093190 - DNA, 25 bp, Homo sapien
ctcttgctgccggtaagatgcacca

SEQ ID NO: 1093191 - DNA, 25 bp, Homo sapien
aatctgttggagtgctgatcacctg

SEQ ID NO: 1093192 - DNA, 25 bp, Homo sapien
aaaaaatctgttggagtgctgatca

SEQ ID NO: 1093193 - DNA, 25 bp, Homo sapien
aaaatctgttggagtgctgatcacc

SEQ ID NO: 1093194 - DNA, 25 bp, Homo sapien
tgttggagtgctgatcacctggtat

SEQ ID NO: 1093195 - DNA, 25 bp, Homo sapien
ccgtccatgcttacagatgtagtca

SEQ ID NO: 1093196 - DNA, 25 bp, Homo sapien
tcaaataattcacctccagacacat

SEQ ID NO: 1093197 - DNA, 25 bp, Homo sapien
gatgtagtcaaataattcacctcca

SEQ ID NO: 1093198 - DNA, 25 bp, Homo sapien
gcttacagatgtagtcaaataattc

SEQ ID NO: 1093199 - DNA, 25 bp, Homo sapien
ctatgacagtaatccacagcagaca

SEQ ID NO: 1093200 - DNA, 25 bp, Homo sapien
tctcgatgaacaaccatatgcctat

SEQ ID NO: 1093201 - DNA, 25 bp, Homo sapien
gtgcatccaacaggacattctctgg

SEQ ID NO: 1093202 - DNA, 25 bp, Homo sapien
gaaatcggctatcttggcattcatg

SEQ ID NO: 1093203 - DNA, 25 bp, Homo sapien
atcagggaaagtgcccatactttca

SEQ ID NO: 1093204 - DNA, 25 bp, Homo sapien
catcagggaaagtgcccatactttc

SEQ ID NO: 1093205 - DNA, 25 bp, Homo sapien
tcatcagggaaagtgcccatacttt

SEQ ID NO: 1093206 - DNA, 25 bp, Homo sapien
ttcatcagggaaagtgcccatactt

SEQ ID NO: 1093207 - DNA, 25 bp, Homo sapien
ccatctgacatcatattagataatc

SEQ ID NO: 1093208 - DNA, 25 bp, Homo sapien
taatttggagatccgcaactagttc

SEQ ID NO: 1093209 - DNA, 25 bp, Homo sapien
gagatccgcaactagttctcagaaa

SEQ ID NO: 1093210 - DNA, 25 bp, Homo sapien
ggtgctgcataatttggagatccgc

SEQ ID NO: 1093211 - DNA, 25 bp, Homo sapien
tccagatatcaacttcaggacctgc

SEQ ID NO: 1093212 - DNA, 25 bp, Homo sapien
tatcaacttcaggacctgcatacaa

SEQ ID NO: 1093213 - DNA, 25 bp, Homo sapien
ctccagatatcaacttcaggacctg

SEQ ID NO: 1093214 - DNA, 25 bp, Homo sapien
agatatcaacttcaggacctgcata

SEQ ID NO: 1093215 - DNA, 25 bp, Homo sapien
cagtgggtcaacctgcagcatatgc

SEQ ID NO: 1093216 - DNA, 25 bp, Homo sapien
gatagttgctcgtttcagtgggtca

SEQ ID NO: 1093217 - DNA, 25 bp, Homo sapien
taacgtaggtacatgctcatcatca

SEQ ID NO: 1093218 - DNA, 25 bp, Homo sapien
tattctgggatataaaagacacccc

SEQ ID NO: 1093219 - DNA, 25 bp, Homo sapien
tgagggtcaccactatataaactgt

SEQ ID NO: 1093220 - DNA, 25 bp, Homo sapien
tgggcttagtcgtattcagtgcatc

SEQ ID NO: 1093221 - DNA, 25 bp, Homo sapien
tgtctgctataagaggtggcatcct

SEQ ID NO: 1093222 - DNA, 25 bp, Homo sapien
gatgataagccactgcaagctggtc

SEQ ID NO: 1093223 - DNA, 25 bp, Homo sapien
tttcacgtaattgccagtcactgga

SEQ ID NO: 1093224 - DNA, 25 bp, Homo sapien
aagatagctcctgttatcaaccagg

SEQ ID NO: 1093225 - DNA, 25 bp, Homo sapien
tttaaagtccaaaagatagctcctg

SEQ ID NO: 1093226 - DNA, 25 bp, Homo sapien
cacgaagatggtatgcattcactac

SEQ ID NO: 1093227 - DNA, 25 bp, Homo sapien
aatgtgcttccggtcaaagagccag

SEQ ID NO: 1093228 - DNA, 25 bp, Homo sapien
gatcttggtctgtgtaagccagcag

SEQ ID NO: 1093229 - DNA, 25 bp, Homo sapien
gactgcccaggcgaggtgaaactga

SEQ ID NO: 1093230 - DNA, 25 bp, Homo sapien
gctaaagtagtaatcagactggcac

SEQ ID NO: 1093231 - DNA, 25 bp, Homo sapien
caatagcattgtgtgcccctggaaa

SEQ ID NO: 1093232 - DNA, 25 bp, Homo sapien
ccttagggccagaacagtgttttca

SEQ ID NO: 1093233 - DNA, 25 bp, Homo sapien
tcaacagtaaaggtcatagccagcc

SEQ ID NO: 1093234 - DNA, 25 bp, Homo sapien
gaattagcattatgagctgcaccag

SEQ ID NO: 1093235 - DNA, 25 bp, Homo sapien
cagttctagaactacatggagtcca

SEQ ID NO: 1093236 - DNA, 25 bp, Homo sapien
gatgtgacacaacgcaaactcctga

SEQ ID NO: 1093237 - DNA, 25 bp, Homo sapien
ggtatggacccatttagagaaccca

SEQ ID NO: 1093238 - DNA, 25 bp, Homo sapien
taatggaccaggctaacacagcagg

SEQ ID NO: 1093239 - DNA, 25 bp, Homo sapien
ggtttttcagtcacccatgcataag

SEQ ID NO: 1093240 - DNA, 25 bp, Homo sapien
ttcagtcacccatgcataagaataa

SEQ ID NO: 1093241 - DNA, 25 bp, Homo sapien
caaggtgtcatgaaacaagttgcag

SEQ ID NO: 1093242 - DNA, 25 bp, Homo sapien
taagaaaaccaaggtgtcatgaaac

SEQ ID NO: 1093243 - DNA, 25 bp, Homo sapien
catatagccaataccctgacataga

SEQ ID NO: 1093244 - DNA, 25 bp, Homo sapien
gtacaaactgtctagggaataagaa

SEQ ID NO: 1093245 - DNA, 25 bp, Homo sapien
gaattgttcatgctacatatagcca

SEQ ID NO: 1093246 - DNA, 25 bp, Homo sapien
tagatagctagtataaaggaatgta

SEQ ID NO: 1093247 - DNA, 25 bp, Homo sapien
tagtacccggtgaatagacaaagtg

SEQ ID NO: 1093248 - DNA, 25 bp, Homo sapien
tataacaatttagacagggactggg

SEQ ID NO: 1093249 - DNA, 25 bp, Homo sapien
gattgcacatatccctcgtccagag

SEQ ID NO: 1093250 - DNA, 25 bp, Homo sapien
tgataactcttctagacccagcctg

SEQ ID NO: 1093251 - DNA, 25 bp, Homo sapien
acttcaatgggtcaatgtatcaacc

SEQ ID NO: 1093252 - DNA, 25 bp, Homo sapien
gaaatgctatgtaattcaggaagac

SEQ ID NO: 1093253 - DNA, 25 bp, Homo sapien
gcttataagcaatcagacaggctgc

SEQ ID NO: 1093254 - DNA, 25 bp, Homo sapien
tttgaacagaaaagcactggaagtc

SEQ ID NO: 1093255 - DNA, 25 bp, Homo sapien
tagatgttgtgcactcaaacttggt

SEQ ID NO: 1093256 - DNA, 25 bp, Homo sapien
tttaatgagccatatccaaagttag

SEQ ID NO: 1093257 - DNA, 25 bp, Homo sapien
gttagaaatcatgccttatggcacc

SEQ ID NO: 1093258 - DNA, 25 bp, Homo sapien
tatggcacctagtcagttgtgcaga

SEQ ID NO: 1093259 - DNA, 25 bp, Homo sapien
cattgaactgctaaaaagaagaacc

SEQ ID NO: 1093260 - DNA, 25 bp, Homo sapien
cagcaaactggagagctcttcgatt

SEQ ID NO: 1093261 - DNA, 25 bp, Homo sapien
taagactaacaggacttggttgact

SEQ ID NO: 1093262 - DNA, 25 bp, Homo sapien
tgtagacttgtgatccccaattagg

SEQ ID NO: 1093263 - DNA, 25 bp, Homo sapien
cacatggctataaaggaagagagac

SEQ ID NO: 1093264 - DNA, 25 bp, Homo sapien
gacattggcatctgcttcggtgaag

SEQ ID NO: 1093265 - DNA, 25 bp, Homo sapien
aactgtgagagtggtaactcactca

SEQ ID NO: 1093266 - DNA, 25 bp, Homo sapien
gctctaggaaactgtgagagtggta

SEQ ID NO: 1093267 - DNA, 25 bp, Homo sapien
ctgttgttaccactaagcattactt

SEQ ID NO: 1093268 - DNA, 25 bp, Homo sapien
tatgcttttggggccctacaagccc

SEQ ID NO: 1093269 - DNA, 25 bp, Homo sapien
gcagcaatatgtggaagggggagat

SEQ ID NO: 1093270 - DNA, 25 bp, Homo sapien
gagagcagcaatatgtggaaggggg

SEQ ID NO: 1093271 - DNA, 25 bp, Homo sapien
tttttgattgaactacatgcacaga

SEQ ID NO: 1093272 - DNA, 25 bp, Homo sapien
tgaaggggatatcagaaactaaaac

SEQ ID NO: 1093273 - DNA, 25 bp, Homo sapien
catcatctgcccctttcttgtgaat

SEQ ID NO: 1093274 - DNA, 25 bp, Homo sapien
taatgagaaagtggcatgctccttt

SEQ ID NO: 1093275 - DNA, 25 bp, Homo sapien
ctaaagttctcaagcaggataaaaa

SEQ ID NO: 1093276 - DNA, 25 bp, Homo sapien
tccaaaattcattctatagggaaaa

SEQ ID NO: 1093277 - DNA, 25 bp, Homo sapien
tatgcctagccatgcaaaatgaaga

SEQ ID NO: 1093278 - DNA, 25 bp, Homo sapien
tcagaattccataaaaggatactgg

SEQ ID NO: 1093279 - DNA, 25 bp, Homo sapien
tcaatagcaacagaacggccacagt

SEQ ID NO: 1093280 - DNA, 25 bp, Homo sapien
tttcatgtgcaaatggtgatactac

SEQ ID NO: 1093281 - DNA, 25 bp, Homo sapien
aaagcatttctatactaaccccgtg

SEQ ID NO: 1093282 - DNA, 25 bp, Homo sapien
ttcctaaggctatttgtcaatgcat

SEQ ID NO: 1093283 - DNA, 25 bp, Homo sapien
gagctatgatacctggattttgtga

SEQ ID NO: 1093284 - DNA, 25 bp, Homo sapien
taatgagctatgatacctggatttt

SEQ ID NO: 1093285 - DNA, 25 bp, Homo sapien
tgatacctggattttgtgatggcat

SEQ ID NO: 1093286 - DNA, 25 bp, Homo sapien
ttgtgatggcattttagatgcttag

SEQ ID NO: 1093287 - DNA, 25 bp, Homo sapien
cctctggtgtgatagcacttgtgca

SEQ ID NO: 1093288 - DNA, 25 bp, Homo sapien
gatatcactgctcccatattacaga

SEQ ID NO: 1093289 - DNA, 25 bp, Homo sapien
tgacttgtcattctaccagtgctgc

SEQ ID NO: 1093290 - DNA, 25 bp, Homo sapien
catagacagtagtgcttaaccctta

SEQ ID NO: 1093291 - DNA, 25 bp, Homo sapien
gaatgttcagacttgtgataaacca

SEQ ID NO: 1093292 - DNA, 25 bp, Homo sapien
tcagacttgtgataaaccattgctg

SEQ ID NO: 1093293 - DNA, 25 bp, Homo sapien
ttgtgataaaccattgctgttgacg

SEQ ID NO: 1093294 - DNA, 25 bp, Homo sapien
cacagaggaatgttcagacttgtga

SEQ ID NO: 1093295 - DNA, 25 bp, Homo sapien
aaatcctaactccttcacttggact

SEQ ID NO: 1093296 - DNA, 25 bp, Homo sapien
attgcctatggaataaaatcctaac

SEQ ID NO: 1093297 - DNA, 25 bp, Homo sapien
tgttctcctgcttgcaacttttaga

SEQ ID NO: 1093298 - DNA, 25 bp, Homo sapien
gacttgaatgagtaggagttgccca

SEQ ID NO: 1093299 - DNA, 25 bp, Homo sapien
caggcaatgacgcaatccagcttac

SEQ ID NO: 1093300 - DNA, 25 bp, Homo sapien
gatgcagcagtgaaccaaacggttg

SEQ ID NO: 1093301 - DNA, 25 bp, Homo sapien
caaacggttgaagatacctgccttc

SEQ ID NO: 1093302 - DNA, 25 bp, Homo sapien
tcctctgagcgaaatggagagccac

SEQ ID NO: 1093303 - DNA, 25 bp, Homo sapien
cttgcaatatgaacaaaggccaaat

SEQ ID NO: 1093304 - DNA, 25 bp, Homo sapien
ttgcaatatgaacaaaggccaaatg

SEQ ID NO: 1093305 - DNA, 25 bp, Homo sapien
gttgagtgaggcgtagtccactgca

SEQ ID NO: 1093306 - DNA, 25 bp, Homo sapien
cacccactgtgggaatgcgtgccta

SEQ ID NO: 1093307 - DNA, 25 bp, Homo sapien
cccttgatgcaaagattatgcctac

SEQ ID NO: 1093308 - DNA, 25 bp, Homo sapien
gcaggcatgctcactgaacgctgtt

SEQ ID NO: 1093309 - DNA, 25 bp, Homo sapien
tcatagtgcaggattgcggcttccg

SEQ ID NO: 1093310 - DNA, 25 bp, Homo sapien
ctttctcccctaagtacacagagaa

SEQ ID NO: 1093311 - DNA, 25 bp, Homo sapien
cccctggtggtcatagtgcaggatt

SEQ ID NO: 1093312 - DNA, 25 bp, Homo sapien
gtaaatggacctgaagcggcagacc

SEQ ID NO: 1093313 - DNA, 25 bp, Homo sapien
ttctgcccggagagaaatatggcca

SEQ ID NO: 1093314 - DNA, 25 bp, Homo sapien
aatatggccaatcgtattttcactc

SEQ ID NO: 1093315 - DNA, 25 bp, Homo sapien
aatatggaaagttctgcccggagag

SEQ ID NO: 1093316 - DNA, 25 bp, Homo sapien
tatgatgtgaccgaatatggaaagt

SEQ ID NO: 1093317 - DNA, 25 bp, Homo sapien
gaatgcactaggctggacacctgac

SEQ ID NO: 1093318 - DNA, 25 bp, Homo sapien
agaatgcactaggctggacacctga

SEQ ID NO: 1093319 - DNA, 25 bp, Homo sapien
ccagaatgcactaggctggacacct

SEQ ID NO: 1093320 - DNA, 25 bp, Homo sapien
cagaatgcactaggctggacacctg

SEQ ID NO: 1093321 - DNA, 25 bp, Homo sapien
ctggcagcaagactgagcagggctc

SEQ ID NO: 1093322 - DNA, 25 bp, Homo sapien
ttctgactgcagaaatggccccttt

SEQ ID NO: 1093323 - DNA, 25 bp, Homo sapien
tggcccctttggctgaaggggaaca

SEQ ID NO: 1093324 - DNA, 25 bp, Homo sapien
gggctccttcccttctgactgcaga

SEQ ID NO: 1093325 - DNA, 25 bp, Homo sapien
gtccactgagctgcagaatgtgagg

SEQ ID NO: 1093326 - DNA, 25 bp, Homo sapien
tacgtctctgttgtcatcatagaaa

SEQ ID NO: 1093327 - DNA, 25 bp, Homo sapien
tcatcatagaaagaacatgcctcag

SEQ ID NO: 1093328 - DNA, 25 bp, Homo sapien
cccttttacgtctctgttgtcatca

SEQ ID NO: 1093329 - DNA, 25 bp, Homo sapien
ttagaggtgcccttttacgtctctg

SEQ ID NO: 1093330 - DNA, 25 bp, Homo sapien
ggtagagagcattaggagagcttgg

SEQ ID NO: 1093331 - DNA, 25 bp, Homo sapien
gccgcccactgcataggatcaggga

SEQ ID NO: 1093332 - DNA, 25 bp, Homo sapien
gcttggtgcaaaattcttgtcagca

SEQ ID NO: 1093333 - DNA, 25 bp, Homo sapien
tcagccgcccactgcataggatcag

SEQ ID NO: 1093334 - DNA, 25 bp, Homo sapien
cagtgcaaagagactagaaaaacct

SEQ ID NO: 1093335 - DNA, 25 bp, Homo sapien
gaggcagtgcaaagagactagaaaa

SEQ ID NO: 1093336 - DNA, 25 bp, Homo sapien
tgtctttgtaaccttgcaaaagtca

SEQ ID NO: 1093337 - DNA, 25 bp, Homo sapien
gcacctgggtttcaaggcaagctca

SEQ ID NO: 1093338 - DNA, 25 bp, Homo sapien
catttcttgagaacgctctgggttt

SEQ ID NO: 1093339 - DNA, 25 bp, Homo sapien
cagctcctgggtgaatgttaatgcc

SEQ ID NO: 1093340 - DNA, 25 bp, Homo sapien
tctggttgagcggatttcagcagct

SEQ ID NO: 1093341 - DNA, 25 bp, Homo sapien
cccacgtacacagttgcaagaaaaa

SEQ ID NO: 1093342 - DNA, 25 bp, Homo sapien
taaacaaatttggtcagttctctcc

SEQ ID NO: 1093343 - DNA, 25 bp, Homo sapien
tattcaagattcgtcttcccatgag

SEQ ID NO: 1093344 - DNA, 25 bp, Homo sapien
gacagagccagattagccccctgta

SEQ ID NO: 1093345 - DNA, 25 bp, Homo sapien
tgggctgtcaggctgtaattagact

SEQ ID NO: 1093346 - DNA, 25 bp, Homo sapien
aagaggcattcagcattgttagcag

SEQ ID NO: 1093347 - DNA, 25 bp, Homo sapien
ccggccaaatctgggtggtccttca

SEQ ID NO: 1093348 - DNA, 25 bp, Homo sapien
gtcactgtctggctcattaaaatag

SEQ ID NO: 1093349 - DNA, 25 bp, Homo sapien
tcaaaaaatctgtgtcggaatttgg

SEQ ID NO: 1093350 - DNA, 25 bp, Homo sapien
tttgctcacactgggccttccatct

SEQ ID NO: 1093351 - DNA, 25 bp, Homo sapien
ccatctgaactatcttcatccgtca

SEQ ID NO: 1093352 - DNA, 25 bp, Homo sapien
gctttgctcacactgggccttccat

SEQ ID NO: 1093353 - DNA, 25 bp, Homo sapien
catctgaactatcttcatccgtcat

SEQ ID NO: 1093354 - DNA, 25 bp, Homo sapien
aattcctccataaatgagtcccagc

SEQ ID NO: 1093355 - DNA, 25 bp, Homo sapien
tgatcccccacagcatagtctaggt

SEQ ID NO: 1093356 - DNA, 25 bp, Homo sapien
gccttatcaaccacaactctgcaat

SEQ ID NO: 1093357 - DNA, 25 bp, Homo sapien
agctgcagtggctcccccattatct

SEQ ID NO: 1093358 - DNA, 25 bp, Homo sapien
aaaagatgtctacaggctgggacct

SEQ ID NO: 1093359 - DNA, 25 bp, Homo sapien
ctgggacctgtaagatctatctgat

SEQ ID NO: 1093360 - DNA, 25 bp, Homo sapien
gctatctattcaggaaattggagta

SEQ ID NO: 1093361 - DNA, 25 bp, Homo sapien
ggaataaagctatctattcaggaaa

SEQ ID NO: 1093362 - DNA, 25 bp, Homo sapien
cagccagaagccaccgcactatatt

SEQ ID NO: 1093363 - DNA, 25 bp, Homo sapien
tcagccagaagccaccgcactatat

SEQ ID NO: 1093364 - DNA, 25 bp, Homo sapien
gccagaagccaccgcactatattac

SEQ ID NO: 1093365 - DNA, 25 bp, Homo sapien
agccagaagccaccgcactatatta

SEQ ID NO: 1093366 - DNA, 25 bp, Homo sapien
ggctgacaagtcatcaaagacaaga

SEQ ID NO: 1093367 - DNA, 25 bp, Homo sapien
caggctgacaagtcatcaaagacaa

SEQ ID NO: 1093368 - DNA, 25 bp, Homo sapien
cccaggctgacaagtcatcaaagac

SEQ ID NO: 1093369 - DNA, 25 bp, Homo sapien
ccaggctgacaagtcatcaaagaca

SEQ ID NO: 1093370 - DNA, 25 bp, Homo sapien
gtcctggcacggaaagcaatctgtc

SEQ ID NO: 1093371 - DNA, 25 bp, Homo sapien
ctcagctggcaggtaactgctgcgg

SEQ ID NO: 1093372 - DNA, 25 bp, Homo sapien
ctgctgcgggtgtagctgcccgtct

SEQ ID NO: 1093373 - DNA, 25 bp, Homo sapien
tgtcctggcacggaaagcaatctgt

SEQ ID NO: 1093374 - DNA, 25 bp, Homo sapien
agggatctggtacatgccactgttc

SEQ ID NO: 1093375 - DNA, 25 bp, Homo sapien
ggatctggtacatgccactgttctg

SEQ ID NO: 1093376 - DNA, 25 bp, Homo sapien
catgttatggggtgatgagttcaca

SEQ ID NO: 1093377 - DNA, 25 bp, Homo sapien
tctggtacatgccactgttctgcag

SEQ ID NO: 1093378 - DNA, 25 bp, Homo sapien
gagcagctggcttgatcccagatgt

SEQ ID NO: 1093379 - DNA, 25 bp, Homo sapien
cacactgtgcttgccttacacaagt

SEQ ID NO: 1093380 - DNA, 25 bp, Homo sapien
aagttgtagaactggagcagctggc

SEQ ID NO: 1093381 - DNA, 25 bp, Homo sapien
gccttacacaagttgtagaactgga

SEQ ID NO: 1093382 - DNA, 25 bp, Homo sapien
tacacacaaggtggcgtttcaggca

SEQ ID NO: 1093383 - DNA, 25 bp, Homo sapien
gtcaatggccctgacatcttcacag

SEQ ID NO: 1093384 - DNA, 25 bp, Homo sapien
gctgcagtcttcgtcaatggccctg

SEQ ID NO: 1093385 - DNA, 25 bp, Homo sapien
gaattggttcatactggctgcagtc

SEQ ID NO: 1093386 - DNA, 25 bp, Homo sapien
gggtttccgaaagtatttctcatca

SEQ ID NO: 1093387 - DNA, 25 bp, Homo sapien
caaagtggtacttcagaaagttgta

SEQ ID NO: 1093388 - DNA, 25 bp, Homo sapien
taactggcatcgtacacactctgag

SEQ ID NO: 1093389 - DNA, 25 bp, Homo sapien
gagtcatatcgaagctccctccatt

SEQ ID NO: 1093390 - DNA, 25 bp, Homo sapien
gcctcagagcccctctgttcagact

SEQ ID NO: 1093391 - DNA, 25 bp, Homo sapien
tcagagcccctctgttcagacttac

SEQ ID NO: 1093392 - DNA, 25 bp, Homo sapien
acagtggcctcagagcccctctgtt

SEQ ID NO: 1093393 - DNA, 25 bp, Homo sapien
ctacaccacagtggcctcagagccc

SEQ ID NO: 1093394 - DNA, 25 bp, Homo sapien
ccggctgggcctatgccgatggtca

SEQ ID NO: 1093395 - DNA, 25 bp, Homo sapien
aggagattccagtatctgccagggc

SEQ ID NO: 1093396 - DNA, 25 bp, Homo sapien
tgaggagattccagtatctgccagg

SEQ ID NO: 1093397 - DNA, 25 bp, Homo sapien
ctatgccgatggtcactccaaatga

SEQ ID NO: 1093398 - DNA, 25 bp, Homo sapien
tgtcttgtgagtgggatacacctac

SEQ ID NO: 1093399 - DNA, 25 bp, Homo sapien
ttgtgagtgggatacacctacaccc

SEQ ID NO: 1093400 - DNA, 25 bp, Homo sapien
tatacttgtttaattcgttcaagaa

SEQ ID NO: 1093401 - DNA, 25 bp, Homo sapien
atgaagtgtcttgtgagtgggatac

SEQ ID NO: 1093402 - DNA, 25 bp, Homo sapien
gccagcaaccgccattgaataaagc

SEQ ID NO: 1093403 - DNA, 25 bp, Homo sapien
gcaaccgccattgaataaagcaaaa

SEQ ID NO: 1093404 - DNA, 25 bp, Homo sapien
caaagagagcatatattttaccatt

SEQ ID NO: 1093405 - DNA, 25 bp, Homo sapien
accgccattgaataaagcaaaagaa

SEQ ID NO: 1093406 - DNA, 25 bp, Homo sapien
tgtgaagattcttgtgaaaatgaat

SEQ ID NO: 1093407 - DNA, 25 bp, Homo sapien
ctttgtgaagattcttgtgaaaatg

SEQ ID NO: 1093408 - DNA, 25 bp, Homo sapien
tgaagattcttgtgaaaatgaattt

SEQ ID NO: 1093409 - DNA, 25 bp, Homo sapien
ttgtgaagattcttgtgaaaatgaa

SEQ ID NO: 1093410 - DNA, 25 bp, Homo sapien
tgggtgccatagtcattgatgaact

SEQ ID NO: 1093411 - DNA, 25 bp, Homo sapien
tccagatgtgatgtaatgggtgcca

SEQ ID NO: 1093412 - DNA, 25 bp, Homo sapien
ttcataaatgccacccatggatcca

SEQ ID NO: 1093413 - DNA, 25 bp, Homo sapien
taattgtactgatctggaagctcca

SEQ ID NO: 1093414 - DNA, 25 bp, Homo sapien
gcaacactaactttccggatttata

SEQ ID NO: 1093415 - DNA, 25 bp, Homo sapien
tgtgctattatcgacatatggtttt

SEQ ID NO: 1093416 - DNA, 25 bp, Homo sapien
tccggatttatagaaaatcagctct

SEQ ID NO: 1093417 - DNA, 25 bp, Homo sapien
aatcagctcttcacaaatagcaaat

SEQ ID NO: 1093418 - DNA, 25 bp, Homo sapien
gcatgtctgcttggctggagggaac

SEQ ID NO: 1093419 - DNA, 25 bp, Homo sapien
attctgcatgtctgcttggctggag

SEQ ID NO: 1093420 - DNA, 25 bp, Homo sapien
tcattctgcatgtctgcttggctgg

SEQ ID NO: 1093421 - DNA, 25 bp, Homo sapien
ctgcatgtctgcttggctggaggga

SEQ ID NO: 1093422 - DNA, 25 bp, Homo sapien
caaagtgaccttgataaatgggaag

SEQ ID NO: 1093423 - DNA, 25 bp, Homo sapien
gagtggtccctccaaaactggatga

SEQ ID NO: 1093424 - DNA, 25 bp, Homo sapien
ttgatcaaagaaatgggcaggtgga

SEQ ID NO: 1093425 - DNA, 25 bp, Homo sapien
aatgaccttgatcaaagaaatgggc

SEQ ID NO: 1093426 - DNA, 25 bp, Homo sapien
taaagactgtcaggcccacgttagc

SEQ ID NO: 1093427 - DNA, 25 bp, Homo sapien
cgtaaagactgtcaggcccacgtta

SEQ ID NO: 1093428 - DNA, 25 bp, Homo sapien
tgcccttcagactccgtaaagactg

SEQ ID NO: 1093429 - DNA, 25 bp, Homo sapien
ccttcagactccgtaaagactgtca

SEQ ID NO: 1093430 - DNA, 25 bp, Homo sapien
cttcatattgaatgcccaaggagcc

SEQ ID NO: 1093431 - DNA, 25 bp, Homo sapien
aatggtctcctgataaacctccacc

SEQ ID NO: 1093432 - DNA, 25 bp, Homo sapien
gtcgtgatatctctgctggtaatac

SEQ ID NO: 1093433 - DNA, 25 bp, Homo sapien
ggagcctccaaaacatgtcgtgata

SEQ ID NO: 1093434 - DNA, 25 bp, Homo sapien
caagaggataaactgcattaactca

SEQ ID NO: 1093435 - DNA, 25 bp, Homo sapien
tgcattaactcatttcccaaaaagc

SEQ ID NO: 1093436 - DNA, 25 bp, Homo sapien
gcattaactcatttcccaaaaagcc

SEQ ID NO: 1093437 - DNA, 25 bp, Homo sapien
ctgccatcaagaggataaactgcat

SEQ ID NO: 1093438 - DNA, 25 bp, Homo sapien
tatactttaatgacctcccccagga

SEQ ID NO: 1093439 - DNA, 25 bp, Homo sapien
ccccaggaacggtatgtaatggtgc

SEQ ID NO: 1093440 - DNA, 25 bp, Homo sapien
ctcgcacccgagaaataatgtcttc

SEQ ID NO: 1093441 - DNA, 25 bp, Homo sapien
ctcaaaatcgataacaacaggatta

SEQ ID NO: 1093442 - DNA, 25 bp, Homo sapien
gaagtgagaactggatacgaagtcc

SEQ ID NO: 1093443 - DNA, 25 bp, Homo sapien
actgtggaggatggtagcaaattgc

SEQ ID NO: 1093444 - DNA, 25 bp, Homo sapien
tagtatctatgacagaggttcctct

SEQ ID NO: 1093445 - DNA, 25 bp, Homo sapien
gcctttgagccaggaatgactttta

SEQ ID NO: 1093446 - DNA, 25 bp, Homo sapien
taggctgtttagcagagtctctggc

SEQ ID NO: 1093447 - DNA, 25 bp, Homo sapien
gatctttggcacatgacacacggag

SEQ ID NO: 1093448 - DNA, 25 bp, Homo sapien
gattgaatctggagccggaaaacct

SEQ ID NO: 1093449 - DNA, 25 bp, Homo sapien
agctaccctgcttccgactgtgtga

SEQ ID NO: 1093450 - DNA, 25 bp, Homo sapien
tgtgcactcccaatcccaagtgggc

SEQ ID NO: 1093451 - DNA, 25 bp, Homo sapien
acagtgatcctggagcaatgtgtgc

SEQ ID NO: 1093452 - DNA, 25 bp, Homo sapien
gtgcattcctcacaagaatcaccta

SEQ ID NO: 1093453 - DNA, 25 bp, Homo sapien
gaatcacctacttaactctgaaacc

SEQ ID NO: 1093454 - DNA, 25 bp, Homo sapien
ctgtgacataggtattaaactcctc

SEQ ID NO: 1093455 - DNA, 25 bp, Homo sapien
ttctggaaggcctgatacatgccag

SEQ ID NO: 1093456 - DNA, 25 bp, Homo sapien
cacacagctaggacgtgaggcacat

SEQ ID NO: 1093457 - DNA, 25 bp, Homo sapien
aagaaccggccaccaagcttctgga

SEQ ID NO: 1093458 - DNA, 25 bp, Homo sapien
tgaattccatcagatactggtccaa

SEQ ID NO: 1093459 - DNA, 25 bp, Homo sapien
cacatcggcaggcattgaattccat

SEQ ID NO: 1093460 - DNA, 25 bp, Homo sapien
attgttgaagcaaggcccacatcgg

SEQ ID NO: 1093461 - DNA, 25 bp, Homo sapien
cttgtgtgccgcagcacctcgtgga

SEQ ID NO: 1093462 - DNA, 25 bp, Homo sapien
cagcaactccagctcccatctgctt

SEQ ID NO: 1093463 - DNA, 25 bp, Homo sapien
tacagaccaggagctccagcaactc

SEQ ID NO: 1093464 - DNA, 25 bp, Homo sapien
actccagctcccatctgctttggct

SEQ ID NO: 1093465 - DNA, 25 bp, Homo sapien
ctgcatacagaccaggagctccagc

SEQ ID NO: 1093466 - DNA, 25 bp, Homo sapien
gctggattgtcacactctcttctcc

SEQ ID NO: 1093467 - DNA, 25 bp, Homo sapien
tgaggtgctggattgtcacactctc

SEQ ID NO: 1093468 - DNA, 25 bp, Homo sapien
ttccgccctggacacgaggcccctc

SEQ ID NO: 1093469 - DNA, 25 bp, Homo sapien
gccctggacacgaggcccctccatt

SEQ ID NO: 1093470 - DNA, 25 bp, Homo sapien
agtctttatccaatagtcagtgcag

SEQ ID NO: 1093471 - DNA, 25 bp, Homo sapien
gtctttatccaatagtcagtgcagg

SEQ ID NO: 1093472 - DNA, 25 bp, Homo sapien
aagtctttatccaatagtcagtgca

SEQ ID NO: 1093473 - DNA, 25 bp, Homo sapien
cagagcttctagttaacagtcaaca

SEQ ID NO: 1093474 - DNA, 25 bp, Homo sapien
aaacctagtcttaggcctggaagct

SEQ ID NO: 1093475 - DNA, 25 bp, Homo sapien
aatagaatagttggctgtagacagc

SEQ ID NO: 1093476 - DNA, 25 bp, Homo sapien
aaagtgtgctgatttgcatcttctc

SEQ ID NO: 1093477 - DNA, 25 bp, Homo sapien
tttattgggcgttgattgtttcagg

SEQ ID NO: 1093478 - DNA, 25 bp, Homo sapien
tcatcctactttgttttattgggcg

SEQ ID NO: 1093479 - DNA, 25 bp, Homo sapien
tttgtctctaacatcctgtaagttc

SEQ ID NO: 1093480 - DNA, 25 bp, Homo sapien
ctccctggtcatggattgagttttc

SEQ ID NO: 1093481 - DNA, 25 bp, Homo sapien
tcagagtgtctgcttaccctaccaa

SEQ ID NO: 1093482 - DNA, 25 bp, Homo sapien
tgcttaccctaccaattaataatgt

SEQ ID NO: 1093483 - DNA, 25 bp, Homo sapien
ttctcattgtttcagagtgtctgct

SEQ ID NO: 1093484 - DNA, 25 bp, Homo sapien
cattgtttcagagtgtctgcttacc

SEQ ID NO: 1093485 - DNA, 25 bp, Homo sapien
gagataggtcttacatagtcacagg

SEQ ID NO: 1093486 - DNA, 25 bp, Homo sapien
tgactaggtcacgagaatggagccc

SEQ ID NO: 1093487 - DNA, 25 bp, Homo sapien
gatcgtcactagttggcctcttcaa

SEQ ID NO: 1093488 - DNA, 25 bp, Homo sapien
tttaaggcacaagcctgacctccgg

SEQ ID NO: 1093489 - DNA, 25 bp, Homo sapien
ccgaatttctgtctgagagatctcc

SEQ ID NO: 1093490 - DNA, 25 bp, Homo sapien
tcccagtttgcctagttgaaaagtc

SEQ ID NO: 1093491 - DNA, 25 bp, Homo sapien
ttcctgacacatacgcacctgcatg

SEQ ID NO: 1093492 - DNA, 25 bp, Homo sapien
taagcatgagggtaataatgtcctg

SEQ ID NO: 1093493 - DNA, 25 bp, Homo sapien
tggcttttgaagcctaccctttctc

SEQ ID NO: 1093494 - DNA, 25 bp, Homo sapien
gcttttgaagcctaccctttctctc

SEQ ID NO: 1093495 - DNA, 25 bp, Homo sapien
gatgagctcatttagatggtgaaca

SEQ ID NO: 1093496 - DNA, 25 bp, Homo sapien
tacatagggtgcacagagaatgtct

SEQ ID NO: 1093497 - DNA, 25 bp, Homo sapien
catgaggaatggcaaaagggcctgc

SEQ ID NO: 1093498 - DNA, 25 bp, Homo sapien
gcagaggtgacgcttgagcaaagac

SEQ ID NO: 1093499 - DNA, 25 bp, Homo sapien
tcatgacctaagcactcccagaggc

SEQ ID NO: 1093500 - DNA, 25 bp, Homo sapien
aaacatgcagtccataacatatgag

SEQ ID NO: 1093501 - DNA, 25 bp, Homo sapien
atcttcatgacctaagcactcccag

SEQ ID NO: 1093502 - DNA, 25 bp, Homo sapien
caaacatgcagtccataacatatga

SEQ ID NO: 1093503 - DNA, 25 bp, Homo sapien
gcccaggcatcgctaaactgtgtaa

SEQ ID NO: 1093504 - DNA, 25 bp, Homo sapien
gaattttggagcaccggtgaatacc

SEQ ID NO: 1093505 - DNA, 25 bp, Homo sapien
tacggtcttgaaggagagacaattg

SEQ ID NO: 1093506 - DNA, 25 bp, Homo sapien
gtgaatacccgggtgacgcccaggc

SEQ ID NO: 1093507 - DNA, 25 bp, Homo sapien
tatggctgggtgagtttccctttgc

SEQ ID NO: 1093508 - DNA, 25 bp, Homo sapien
cacatctctcagacaagttcagtga

SEQ ID NO: 1093509 - DNA, 25 bp, Homo sapien
ttacagctgctcaagataaatgtct

SEQ ID NO: 1093510 - DNA, 25 bp, Homo sapien
ccctcaatttgtatagcctatggct

SEQ ID NO: 1093511 - DNA, 25 bp, Homo sapien
cagggccgtctggtaagtaccttca

SEQ ID NO: 1093512 - DNA, 25 bp, Homo sapien
gagacaatttaaggcctggacaggg

SEQ ID NO: 1093513 - DNA, 25 bp, Homo sapien
tctgcacagtgaggattatatagct

SEQ ID NO: 1093514 - DNA, 25 bp, Homo sapien
gatcaaatgcattcatacatgtaca

SEQ ID NO: 1093515 - DNA, 25 bp, Homo sapien
agttcttttggcactggggacatag

SEQ ID NO: 1093516 - DNA, 25 bp, Homo sapien
ggctttctgggcaactccgtaagtc

SEQ ID NO: 1093517 - DNA, 25 bp, Homo sapien
ctcactgatatgattgagggctttc

SEQ ID NO: 1093518 - DNA, 25 bp, Homo sapien
ggcactggggacatagacacattag

SEQ ID NO: 1093519 - DNA, 25 bp, Homo sapien
tacgataactaaccctctcctgaaa

SEQ ID NO: 1093520 - DNA, 25 bp, Homo sapien
caaggtgccacatatagtgagggcc

SEQ ID NO: 1093521 - DNA, 25 bp, Homo sapien
taataacctcataaaggtgcctcct

SEQ ID NO: 1093522 - DNA, 25 bp, Homo sapien
tggaaatgacatgccccaaatgtgt

SEQ ID NO: 1093523 - DNA, 25 bp, Homo sapien
gactcccgatgagtgtgcaaagcac

SEQ ID NO: 1093524 - DNA, 25 bp, Homo sapien
tctggaacacgggaaaccttctcta

SEQ ID NO: 1093525 - DNA, 25 bp, Homo sapien
tgaggtgtcacttagttcttccaaa

SEQ ID NO: 1093526 - DNA, 25 bp, Homo sapien
taagtttgcatgagggactcccgat

SEQ ID NO: 1093527 - DNA, 25 bp, Homo sapien
gatttccaaggccaaagtatagatg

SEQ ID NO: 1093528 - DNA, 25 bp, Homo sapien
cagcagtttctcattgccgcaggat

SEQ ID NO: 1093529 - DNA, 25 bp, Homo sapien
tactaaaatcttgactgcaactaac

SEQ ID NO: 1093530 - DNA, 25 bp, Homo sapien
caaagtatagatgccataaaggtaa

SEQ ID NO: 1093531 - DNA, 25 bp, Homo sapien
tttcaccgtagttaatattatcctc

SEQ ID NO: 1093532 - DNA, 25 bp, Homo sapien
acagatttcaccgtagttaatatta

SEQ ID NO: 1093533 - DNA, 25 bp, Homo sapien
ggacacagatttcaccgtagttaat

SEQ ID NO: 1093534 - DNA, 25 bp, Homo sapien
gatttcaccgtagttaatattatcc

SEQ ID NO: 1093535 - DNA, 25 bp, Homo sapien
cattaaagatccagctttactaggc

SEQ ID NO: 1093536 - DNA, 25 bp, Homo sapien
gctttactaggcaattgatttttgc

SEQ ID NO: 1093537 - DNA, 25 bp, Homo sapien
tactaggcaattgatttttgctggt

SEQ ID NO: 1093538 - DNA, 25 bp, Homo sapien
attaaagatccagctttactaggca

SEQ ID NO: 1093539 - DNA, 25 bp, Homo sapien
atctatataagctgatggcttgcaa

SEQ ID NO: 1093540 - DNA, 25 bp, Homo sapien
ctgtactggatggatccatctttat

SEQ ID NO: 1093541 - DNA, 25 bp, Homo sapien
ggcttgcaatttactgctgacccaa

SEQ ID NO: 1093542 - DNA, 25 bp, Homo sapien
tactgctgacccaatcctgctgtac

SEQ ID NO: 1093543 - DNA, 25 bp, Homo sapien
cagaaaatgctgagaccaccttcgt

SEQ ID NO: 1093544 - DNA, 25 bp, Homo sapien
aatgctgagaccaccttcgtattgg

SEQ ID NO: 1093545 - DNA, 25 bp, Homo sapien
gaccaccttcgtattggccaaaaga

SEQ ID NO: 1093546 - DNA, 25 bp, Homo sapien
gctgagaccaccttcgtattggcca

SEQ ID NO: 1093547 - DNA, 25 bp, Homo sapien
tgcgagtagaagaatagtctttggt

SEQ ID NO: 1093548 - DNA, 25 bp, Homo sapien
gcgagtagaagaatagtctttggtt

SEQ ID NO: 1093549 - DNA, 25 bp, Homo sapien
ctgcgagtagaagaatagtctttgg

SEQ ID NO: 1093550 - DNA, 25 bp, Homo sapien
tcttgaacacgacaggtatttgaat

SEQ ID NO: 1093551 - DNA, 25 bp, Homo sapien
tgaacacgacaggtatttgaattcc

SEQ ID NO: 1093552 - DNA, 25 bp, Homo sapien
gctgtcttgaacacgacaggtattt

SEQ ID NO: 1093553 - DNA, 25 bp, Homo sapien
aacacgacaggtatttgaattccat

SEQ ID NO: 1093554 - DNA, 25 bp, Homo sapien
agttctgacatccacctataatccc

SEQ ID NO: 1093555 - DNA, 25 bp, Homo sapien
ctgaatctgggtatagttctgacat

SEQ ID NO: 1093556 - DNA, 25 bp, Homo sapien
tctgggtatagttctgacatccacc

SEQ ID NO: 1093557 - DNA, 25 bp, Homo sapien
gggtatagttctgacatccacctat

SEQ ID NO: 1093558 - DNA, 25 bp, Homo sapien
ggttttgtaaatgccaggttggtgc

SEQ ID NO: 1093559 - DNA, 25 bp, Homo sapien
gactcagccctttatgcgttgcagg

SEQ ID NO: 1093560 - DNA, 25 bp, Homo sapien
ggacgccatccaacacgtggactca

SEQ ID NO: 1093561 - DNA, 25 bp, Homo sapien
acatctgcaatagcaaaagcaacag

SEQ ID NO: 1093562 - DNA, 25 bp, Homo sapien
taggcatacccctttgcaatgtgac

SEQ ID NO: 1093563 - DNA, 25 bp, Homo sapien
taagaaattgccgaatgtccacgaa

SEQ ID NO: 1093564 - DNA, 25 bp, Homo sapien
tagctcttgaatgtgggcttggcca

SEQ ID NO: 1093565 - DNA, 25 bp, Homo sapien
cattgcttcagccaaggagacatta

SEQ ID NO: 1093566 - DNA, 25 bp, Homo sapien
ttatgggtcaacatgggctctcctc

SEQ ID NO: 1093567 - DNA, 25 bp, Homo sapien
tccttcaccataagacattgttctg

SEQ ID NO: 1093568 - DNA, 25 bp, Homo sapien
cattgttctgtcaacacatgcttcc

SEQ ID NO: 1093569 - DNA, 25 bp, Homo sapien
gcttcagcccgaaagtgtcacatgt

SEQ ID NO: 1093570 - DNA, 25 bp, Homo sapien
gacactgattaaggctctagaacaa

SEQ ID NO: 1093571 - DNA, 25 bp, Homo sapien
aacaacaggagggagatagattctg

SEQ ID NO: 1093572 - DNA, 25 bp, Homo sapien
gatgtagttatcacagcagtcagct

SEQ ID NO: 1093573 - DNA, 25 bp, Homo sapien
gacgtcggcatttcccagacactga

SEQ ID NO: 1093574 - DNA, 25 bp, Homo sapien
ccatgcaatggataaggcattccaa

SEQ ID NO: 1093575 - DNA, 25 bp, Homo sapien
taaggcattccaatatgcataacca

SEQ ID NO: 1093576 - DNA, 25 bp, Homo sapien
aaggcattccaatatgcataaccac

SEQ ID NO: 1093577 - DNA, 25 bp, Homo sapien
ggataaggcattccaatatgcataa

SEQ ID NO: 1093578 - DNA, 25 bp, Homo sapien
tctgggaaaattttgaaccacagtg

SEQ ID NO: 1093579 - DNA, 25 bp, Homo sapien
cttctgggaaaattttgaaccacag

SEQ ID NO: 1093580 - DNA, 25 bp, Homo sapien
aacaacatctgcgaggtcagctctc

SEQ ID NO: 1093581 - DNA, 25 bp, Homo sapien
tcagtccgccctcttgcatttggcg

SEQ ID NO: 1093582 - DNA, 25 bp, Homo sapien
tttggcgagcacatcccaaatgatg

SEQ ID NO: 1093583 - DNA, 25 bp, Homo sapien
gccctcttgcatttggcgagcacat

SEQ ID NO: 1093584 - DNA, 25 bp, Homo sapien
ctgaggtatgaggatctcttgaact

SEQ ID NO: 1093585 - DNA, 25 bp, Homo sapien
aggtatgaggatctcttgaactcgg

SEQ ID NO: 1093586 - DNA, 25 bp, Homo sapien
gtgagccaagatagcacgcctgcac

SEQ ID NO: 1093587 - DNA, 25 bp, Homo sapien
tgagccaagatagcacgcctgcact

SEQ ID NO: 1093588 - DNA, 25 bp, Homo sapien
tcctggtgggcgctaaacttaagca

SEQ ID NO: 1093589 - DNA, 25 bp, Homo sapien
taaggaaaccctaactcagtgatta

SEQ ID NO: 1093590 - DNA, 25 bp, Homo sapien
tcaccctgggcttattgttcgttgc

SEQ ID NO: 1093591 - DNA, 25 bp, Homo sapien
gattagtcccactttcatcagaaga

SEQ ID NO: 1093592 - DNA, 25 bp, Homo sapien
tttatccttttaggataaagcaaca

SEQ ID NO: 1093593 - DNA, 25 bp, Homo sapien
ttatccttttaggataaagcaacat

SEQ ID NO: 1093594 - DNA, 25 bp, Homo sapien
gaagaaaggtggtcaaccatcacac

SEQ ID NO: 1093595 - DNA, 25 bp, Homo sapien
aaggtggtcaaccatcacacagccc

SEQ ID NO: 1093596 - DNA, 25 bp, Homo sapien
tgccctttcagaccttcatagaagg

SEQ ID NO: 1093597 - DNA, 25 bp, Homo sapien
ctgtcttgtgccctttcagaccttc

SEQ ID NO: 1093598 - DNA, 25 bp, Homo sapien
gggccatgagatcaaaaatctagca

SEQ ID NO: 1093599 - DNA, 25 bp, Homo sapien
aactctaccttatctcacctttgga

SEQ ID NO: 1093600 - DNA, 25 bp, Homo sapien
gtcattcacgtgtagctcagggcca

SEQ ID NO: 1093601 - DNA, 25 bp, Homo sapien
ttagagctggcatactgtcaacact

SEQ ID NO: 1093602 - DNA, 25 bp, Homo sapien
gtgagcctggaagcaccgtatcctg

SEQ ID NO: 1093603 - DNA, 25 bp, Homo sapien
cccaggagtacagtgaaatttccaa

SEQ ID NO: 1093604 - DNA, 25 bp, Homo sapien
ttttccaagcactgtttggtgagcc

SEQ ID NO: 1093605 - DNA, 25 bp, Homo sapien
catattctcattggcagaattctga

SEQ ID NO: 1093606 - DNA, 25 bp, Homo sapien
ttcagttagataaactgaccaaacg

SEQ ID NO: 1093607 - DNA, 25 bp, Homo sapien
tatgtcaatatcatcctaatgtgga

SEQ ID NO: 1093608 - DNA, 25 bp, Homo sapien
gaccaaacgtctattcaagaatata

SEQ ID NO: 1093609 - DNA, 25 bp, Homo sapien
aatatcatcctaatgtggaaggtcc

SEQ ID NO: 1093610 - DNA, 25 bp, Homo sapien
cactggactgtttgtacgtgaaaca

SEQ ID NO: 1093611 - DNA, 25 bp, Homo sapien
gatgttcctatgcagttacagtatg

SEQ ID NO: 1093612 - DNA, 25 bp, Homo sapien
gacaattgatttgaataggcctgca

SEQ ID NO: 1093613 - DNA, 25 bp, Homo sapien
cacttatgagacaaaaagtgcagtg

SEQ ID NO: 1093614 - DNA, 25 bp, Homo sapien
tcatctagcctttccacgagagtcc

SEQ ID NO: 1093615 - DNA, 25 bp, Homo sapien
gtgactccatcatctagcctttcca

SEQ ID NO: 1093616 - DNA, 25 bp, Homo sapien
aacgggaagggagcacgtgactcca

SEQ ID NO: 1093617 - DNA, 25 bp, Homo sapien
aatcagcagctagtgaacgggaagg

SEQ ID NO: 1093618 - DNA, 25 bp, Homo sapien
tgctgctgtgttgctatgcagacaa

SEQ ID NO: 1093619 - DNA, 25 bp, Homo sapien
tctggtacaattctggtaatgtggt

SEQ ID NO: 1093620 - DNA, 25 bp, Homo sapien
gacaagtgtcttctccacgtgccat

SEQ ID NO: 1093621 - DNA, 25 bp, Homo sapien
ttatttttccgatatcttgctgctg

SEQ ID NO: 1093622 - DNA, 25 bp, Homo sapien
agccagagcctctgtacgcgcagat

SEQ ID NO: 1093623 - DNA, 25 bp, Homo sapien
cgagctcgtggtgggtgctcaagac

SEQ ID NO: 1093624 - DNA, 25 bp, Homo sapien
gaaatagcatcgatgcgagctcgtg

SEQ ID NO: 1093625 - DNA, 25 bp, Homo sapien
tacgcgcagatcaacagacctaaga

SEQ ID NO: 1093626 - DNA, 25 bp, Homo sapien
agttgactgcagtcgttactgctgt

SEQ ID NO: 1093627 - DNA, 25 bp, Homo sapien
cgttactgctgttgtgatgggtatt

SEQ ID NO: 1093628 - DNA, 25 bp, Homo sapien
tcagactttgggattatctgctgct

SEQ ID NO: 1093629 - DNA, 25 bp, Homo sapien
tggggataattgagagttgactgca

SEQ ID NO: 1093630 - DNA, 25 bp, Homo sapien
gaagcagggcagagacgtggacaaa

SEQ ID NO: 1093631 - DNA, 25 bp, Homo sapien
aagcagggcagagacgtggacaaat

SEQ ID NO: 1093632 - DNA, 25 bp, Homo sapien
gctggttgggaaggtgggcattatg

SEQ ID NO: 1093633 - DNA, 25 bp, Homo sapien
tatgtgcagtcttgaggagtttgcc

SEQ ID NO: 1093634 - DNA, 25 bp, Homo sapien
gaaggtgggcattatgtgcagtctt

SEQ ID NO: 1093635 - DNA, 25 bp, Homo sapien
tcagctaggtcttaaagtatgaact

SEQ ID NO: 1093636 - DNA, 25 bp, Homo sapien
agtggctcgtgtcacctgcagagtc

SEQ ID NO: 1093637 - DNA, 25 bp, Homo sapien
agatgccatagtaggagtgaagaca

SEQ ID NO: 1093638 - DNA, 25 bp, Homo sapien
acagtggctcgtgtcacctgcagag

SEQ ID NO: 1093639 - DNA, 25 bp, Homo sapien
ctaggagatgccatagtaggagtga

SEQ ID NO: 1093640 - DNA, 25 bp, Homo sapien
cccatgttccaagcttcattcagaa

SEQ ID NO: 1093641 - DNA, 25 bp, Homo sapien
ttagtggatgcacctcccatgttcc

SEQ ID NO: 1093642 - DNA, 25 bp, Homo sapien
gcccagtggagctcagtgtagaaca

SEQ ID NO: 1093643 - DNA, 25 bp, Homo sapien
gaattcgggatactgacatgcaagg

SEQ ID NO: 1093644 - DNA, 25 bp, Homo sapien
tactccagttctgtgagtccacttg

SEQ ID NO: 1093645 - DNA, 25 bp, Homo sapien
gatagttaaaggacatgtggagtag

SEQ ID NO: 1093646 - DNA, 25 bp, Homo sapien
gtcgagcacataattcatagatagt

SEQ ID NO: 1093647 - DNA, 25 bp, Homo sapien
tggctgctgtagtcgagcacataat

SEQ ID NO: 1093648 - DNA, 25 bp, Homo sapien
gcttggcacttttcttaccctaggc

SEQ ID NO: 1093649 - DNA, 25 bp, Homo sapien
gagatcacctttgtcagcatgcagt

SEQ ID NO: 1093650 - DNA, 25 bp, Homo sapien
gcagtgtcttcgctccactagtaag

SEQ ID NO: 1093651 - DNA, 25 bp, Homo sapien
gcaagctgattgcatggcgcaccat

SEQ ID NO: 1093652 - DNA, 25 bp, Homo sapien
catcgacagcagcacaagacacatt

SEQ ID NO: 1093653 - DNA, 25 bp, Homo sapien
ctccatcgacagcagcacaagacac

SEQ ID NO: 1093654 - DNA, 25 bp, Homo sapien
tcgacagcagcacaagacacattta

SEQ ID NO: 1093655 - DNA, 25 bp, Homo sapien
ccatcgacagcagcacaagacacat

SEQ ID NO: 1093656 - DNA, 25 bp, Homo sapien
tggactgtaatcttcggtgaagtaa

SEQ ID NO: 1093657 - DNA, 25 bp, Homo sapien
cacttcacagttatcaagattcaag

SEQ ID NO: 1093658 - DNA, 25 bp, Homo sapien
tgtaatcttcggtgaagtaattttc

SEQ ID NO: 1093659 - DNA, 25 bp, Homo sapien
aagcttagcctggccacttcacagt

SEQ ID NO: 1093660 - DNA, 25 bp, Homo sapien
tttgatcgaaagaaagaggagctga

SEQ ID NO: 1093661 - DNA, 25 bp, Homo sapien
aagaggagctgatgaagcaaacctt

SEQ ID NO: 1093662 - DNA, 25 bp, Homo sapien
gaaagaggagctgatgaagcaaacc

SEQ ID NO: 1093663 - DNA, 25 bp, Homo sapien
ctgatttgatcgaaagaaagaggag

SEQ ID NO: 1093664 - DNA, 25 bp, Homo sapien
ctagaagtggcttttggcacttgaa

SEQ ID NO: 1093665 - DNA, 25 bp, Homo sapien
tactagaagtggcttttggcacttg

SEQ ID NO: 1093666 - DNA, 25 bp, Homo sapien
ttttggcacttgaatttcaatacat

SEQ ID NO: 1093667 - DNA, 25 bp, Homo sapien
atttactagaagtggcttttggcac

SEQ ID NO: 1093668 - DNA, 25 bp, Homo sapien
gctatatcaccagtgtctgcaccat

SEQ ID NO: 1093669 - DNA, 25 bp, Homo sapien
cctggtgtctacgttctactttgcc

SEQ ID NO: 1093670 - DNA, 25 bp, Homo sapien
cttgcctgagctgtattgctgatgt

SEQ ID NO: 1093671 - DNA, 25 bp, Homo sapien
tgctgatgtttgcaccatcgctcct

SEQ ID NO: 1093672 - DNA, 25 bp, Homo sapien
tatgacacacagattttggcgtggc

SEQ ID NO: 1093673 - DNA, 25 bp, Homo sapien
aaaacttagggcagagatacgcagc

SEQ ID NO: 1093674 - DNA, 25 bp, Homo sapien
gcagtgtgcatccttctagttccag

SEQ ID NO: 1093675 - DNA, 25 bp, Homo sapien
gggcaagcgtatgacttctctgaga

SEQ ID NO: 1093676 - DNA, 25 bp, Homo sapien
tgtaagatgcctcctagaaccagtc

SEQ ID NO: 1093677 - DNA, 25 bp, Homo sapien
gtaggaaaacaagcccgaggccaga

SEQ ID NO: 1093678 - DNA, 25 bp, Homo sapien
gtgtccagcaccagaacaagtagga

SEQ ID NO: 1093679 - DNA, 25 bp, Homo sapien
gagctaggcacaggtacaagtcaaa

SEQ ID NO: 1093680 - DNA, 25 bp, Homo sapien
gggacacaatctgatagaattaaga

SEQ ID NO: 1093681 - DNA, 25 bp, Homo sapien
atagaattaagaatcagtaggccgg

SEQ ID NO: 1093682 - DNA, 25 bp, Homo sapien
aacttacagaatattagggacacaa

SEQ ID NO: 1093683 - DNA, 25 bp, Homo sapien
tgaagaggggcctgtaacttacaga

SEQ ID NO: 1093684 - DNA, 25 bp, Homo sapien
gacagccaattcctgagagtaaact

SEQ ID NO: 1093685 - DNA, 25 bp, Homo sapien
agacagccaattcctgagagtaaac

SEQ ID NO: 1093686 - DNA, 25 bp, Homo sapien
gagacagccaattcctgagagtaaa

SEQ ID NO: 1093687 - DNA, 25 bp, Homo sapien
tgagaagaaccagacatggatcttt

SEQ ID NO: 1093688 - DNA, 25 bp, Homo sapien
ttgagaagaaccagacatggatctt

SEQ ID NO: 1093689 - DNA, 25 bp, Homo sapien
gggtaagattgagaagaaccagaca

SEQ ID NO: 1093690 - DNA, 25 bp, Homo sapien
gaccaacggttgactgaagtggaag

SEQ ID NO: 1093691 - DNA, 25 bp, Homo sapien
cattgaagtgctcagtaccttgact

SEQ ID NO: 1093692 - DNA, 25 bp, Homo sapien
taatatgtattgatgcaggccgtgg

SEQ ID NO: 1093693 - DNA, 25 bp, Homo sapien
ggaaactggcaactctaacatgaag

SEQ ID NO: 1093694 - DNA, 25 bp, Homo sapien
gaaggtttcttctggccacatcccc

SEQ ID NO: 1093695 - DNA, 25 bp, Homo sapien
ccagagctgtgaaggtttcttctgg

SEQ ID NO: 1093696 - DNA, 25 bp, Homo sapien
ttgagcccagagctgtgaaggtttc

SEQ ID NO: 1093697 - DNA, 25 bp, Homo sapien
aaggtttcttctggccacatcccct

SEQ ID NO: 1093698 - DNA, 25 bp, Homo sapien
tcacccttataactgtcagagactt

SEQ ID NO: 1093699 - DNA, 25 bp, Homo sapien
acccttataactgtcagagacttct

SEQ ID NO: 1093700 - DNA, 25 bp, Homo sapien
cctcacccttataactgtcagagac

SEQ ID NO: 1093701 - DNA, 25 bp, Homo sapien
ccttataactgtcagagacttctcc

SEQ ID NO: 1093702 - DNA, 25 bp, Homo sapien
cagatttttaaccttggacatacct

SEQ ID NO: 1093703 - DNA, 25 bp, Homo sapien
attgccttatatggtgatgtgttat

SEQ ID NO: 1093704 - DNA, 25 bp, Homo sapien
tatggtgatgtgttatttctggtgc

SEQ ID NO: 1093705 - DNA, 25 bp, Homo sapien
gccttatatggtgatgtgttatttc

SEQ ID NO: 1093706 - DNA, 25 bp, Homo sapien
gtgatgtgttatttctggtgctgag

SEQ ID NO: 1093707 - DNA, 25 bp, Homo sapien
aatgtagaagcatccatcagctcgg

SEQ ID NO: 1093708 - DNA, 25 bp, Homo sapien
actctgtgcatgagtggccctgcca

SEQ ID NO: 1093709 - DNA, 25 bp, Homo sapien
tcagctcgggctcagtatgactctg

SEQ ID NO: 1093710 - DNA, 25 bp, Homo sapien
ctataaggctttgggtggtaatgta

SEQ ID NO: 1093711 - DNA, 25 bp, Homo sapien
gagaggcccaggaccctccagggcc

SEQ ID NO: 1093712 - DNA, 25 bp, Homo sapien
tgtagagggagaggcccaggaccct

SEQ ID NO: 1093713 - DNA, 25 bp, Homo sapien
atgtagagggagaggcccaggaccc

SEQ ID NO: 1093714 - DNA, 25 bp, Homo sapien
gagggagaggcccaggaccctccag

SEQ ID NO: 1093715 - DNA, 25 bp, Homo sapien
tgataggatccaggtccactttcct

SEQ ID NO: 1093716 - DNA, 25 bp, Homo sapien
gtgataggatccaggtccactttcc

SEQ ID NO: 1093717 - DNA, 25 bp, Homo sapien
gataggatccaggtccactttcctc

SEQ ID NO: 1093718 - DNA, 25 bp, Homo sapien
ataggatccaggtccactttcctcc

SEQ ID NO: 1093719 - DNA, 25 bp, Homo sapien
atgggtgtgtcaacctttccttcct

SEQ ID NO: 1093720 - DNA, 25 bp, Homo sapien
tgggtgtgtcaacctttccttcctc

SEQ ID NO: 1093721 - DNA, 25 bp, Homo sapien
cagggtatgggtgtgtcaacctttc

SEQ ID NO: 1093722 - DNA, 25 bp, Homo sapien
ctcagggtatgggtgtgtcaacctt

SEQ ID NO: 1093723 - DNA, 25 bp, Homo sapien
ccatcttggtgatgattcacctgct

SEQ ID NO: 1093724 - DNA, 25 bp, Homo sapien
taagggcccgctaggtcaggaattg

SEQ ID NO: 1093725 - DNA, 25 bp, Homo sapien
aatccagatgaatttctcacgtaga

SEQ ID NO: 1093726 - DNA, 25 bp, Homo sapien
caggaattggactgccccatcttgg

SEQ ID NO: 1093727 - DNA, 25 bp, Homo sapien
ggctcatttcaagcgccacatgtag

SEQ ID NO: 1093728 - DNA, 25 bp, Homo sapien
gctaagtactttataatccccagaa

SEQ ID NO: 1093729 - DNA, 25 bp, Homo sapien
gaagcctaccctcttagccacaatg

SEQ ID NO: 1093730 - DNA, 25 bp, Homo sapien
ttaatatatgagaaaccctgaggct

SEQ ID NO: 1093731 - DNA, 25 bp, Homo sapien
agagaagaccccagctcatgttgcc

SEQ ID NO: 1093732 - DNA, 25 bp, Homo sapien
cagccagggcttccacaagttggag

SEQ ID NO: 1093733 - DNA, 25 bp, Homo sapien
ttccacaagttggagtgttttcacc

SEQ ID NO: 1093734 - DNA, 25 bp, Homo sapien
catttccttattacccaaagcacag

SEQ ID NO: 1093735 - DNA, 25 bp, Homo sapien
tgactgtagatccagctttcctgct

SEQ ID NO: 1093736 - DNA, 25 bp, Homo sapien
gactgtagatccagctttcctgctg

SEQ ID NO: 1093737 - DNA, 25 bp, Homo sapien
ttgactgtagatccagctttcctgc

SEQ ID NO: 1093738 - DNA, 25 bp, Homo sapien
gatctaaggacctgggatctccact

SEQ ID NO: 1093739 - DNA, 25 bp, Homo sapien
agccgtatcgaactctttgccttga

SEQ ID NO: 1093740 - DNA, 25 bp, Homo sapien
gaactggcagcactgcatccattga

SEQ ID NO: 1093741 - DNA, 25 bp, Homo sapien
aaattccaactctgggaactggcag

SEQ ID NO: 1093742 - DNA, 25 bp, Homo sapien
tatctttctgagaaagtctccaagt

SEQ ID NO: 1093743 - DNA, 25 bp, Homo sapien
cagaggactgttatctttctgagaa

SEQ ID NO: 1093744 - DNA, 25 bp, Homo sapien
aatttgtaccagaggactgttatct

SEQ ID NO: 1093745 - DNA, 25 bp, Homo sapien
tgagaaagtctccaagtttagccat

SEQ ID NO: 1093746 - DNA, 25 bp, Homo sapien
acctggtacgctctgcattgtccaa

SEQ ID NO: 1093747 - DNA, 25 bp, Homo sapien
cccagtacctggtacgctctgcatt

SEQ ID NO: 1093748 - DNA, 25 bp, Homo sapien
tgatgggtttttagcaaagcgccca

SEQ ID NO: 1093749 - DNA, 25 bp, Homo sapien
tgggtttttagcaaagcgcccagta

SEQ ID NO: 1093750 - DNA, 25 bp, Homo sapien
cagaatgtgacatgggacaaggatc

SEQ ID NO: 1093751 - DNA, 25 bp, Homo sapien
gatcaacatgcccaggaatggactc

SEQ ID NO: 1093752 - DNA, 25 bp, Homo sapien
tctctgtttcatagcccaggacatg

SEQ ID NO: 1093753 - DNA, 25 bp, Homo sapien
gcattttctcaacccataatcgtgg

SEQ ID NO: 1093754 - DNA, 25 bp, Homo sapien
tatacaggcaagactgaggatccct

SEQ ID NO: 1093755 - DNA, 25 bp, Homo sapien
gaggatccctaatctctgctctcag

SEQ ID NO: 1093756 - DNA, 25 bp, Homo sapien
gattcacctggtctgagtggtccca

SEQ ID NO: 1093757 - DNA, 25 bp, Homo sapien
agtttgttccggcattgtggcacac

SEQ ID NO: 1093758 - DNA, 25 bp, Homo sapien
ctctctccagatggttggtccatag

SEQ ID NO: 1093759 - DNA, 25 bp, Homo sapien
ctccttggaaggcctgtgaccatcc

SEQ ID NO: 1093760 - DNA, 25 bp, Homo sapien
gatggttggtccataggcctaacca

SEQ ID NO: 1093761 - DNA, 25 bp, Homo sapien
tctccagatggttggtccataggcc

SEQ ID NO: 1093762 - DNA, 25 bp, Homo sapien
gcccacctgcatgtcatcgatgttg

SEQ ID NO: 1093763 - DNA, 25 bp, Homo sapien
gtcatcgatgttgctgtgcctcttg

SEQ ID NO: 1093764 - DNA, 25 bp, Homo sapien
tgtcatcgatgttgctgtgcctctt

SEQ ID NO: 1093765 - DNA, 25 bp, Homo sapien
cctgcatgtcatcgatgttgctgtg

SEQ ID NO: 1093766 - DNA, 25 bp, Homo sapien
tgcattctcgtgtctgattgctgtg

SEQ ID NO: 1093767 - DNA, 25 bp, Homo sapien
cctgagtactgattggagatgcgct

SEQ ID NO: 1093768 - DNA, 25 bp, Homo sapien
tgaggactggctggaaatgtgcttc

SEQ ID NO: 1093769 - DNA, 25 bp, Homo sapien
tcaggatgctgtgttggttgcattc

SEQ ID NO: 1093770 - DNA, 25 bp, Homo sapien
tcaaatttaatgaatccttcagcaa

SEQ ID NO: 1093771 - DNA, 25 bp, Homo sapien
aatttaatgaatccttcagcaattt

SEQ ID NO: 1093772 - DNA, 25 bp, Homo sapien
ctcaaatttaatgaatccttcagca

SEQ ID NO: 1093773 - DNA, 25 bp, Homo sapien
caaatttaatgaatccttcagcaat

SEQ ID NO: 1093774 - DNA, 25 bp, Homo sapien
acaaatgaccacattgatcatacat

SEQ ID NO: 1093775 - DNA, 25 bp, Homo sapien
cctgaatgatgttaattcccctcag

SEQ ID NO: 1093776 - DNA, 25 bp, Homo sapien
tgaccacattgatcatacatctgaa

SEQ ID NO: 1093777 - DNA, 25 bp, Homo sapien
aaagctccactttcctgaatgatgt

SEQ ID NO: 1093778 - DNA, 25 bp, Homo sapien
ggaccaaagttgtggaccaaagcat

SEQ ID NO: 1093779 - DNA, 25 bp, Homo sapien
tgtggaccaaagcattcccattgcc

SEQ ID NO: 1093780 - DNA, 25 bp, Homo sapien
cctggaccaaagttgtggaccaaag

SEQ ID NO: 1093781 - DNA, 25 bp, Homo sapien
ggaccaaagcattcccattgccaca

SEQ ID NO: 1093782 - DNA, 25 bp, Homo sapien
tccactcagttaaaaagaactgctg

SEQ ID NO: 1093783 - DNA, 25 bp, Homo sapien
gatcatatccttgtttgggcgtggc

SEQ ID NO: 1093784 - DNA, 25 bp, Homo sapien
ctttctacttaatgatgtacgtagc

SEQ ID NO: 1093785 - DNA, 25 bp, Homo sapien
ctgcccagggatcatatccttgttt

SEQ ID NO: 1093786 - DNA, 25 bp, Homo sapien
tggttctgccatactgcaaggtgtt

SEQ ID NO: 1093787 - DNA, 25 bp, Homo sapien
aagatgtttcgggttggttctgcca

SEQ ID NO: 1093788 - DNA, 25 bp, Homo sapien
aaggtgttcgtacagcatcttcctg

SEQ ID NO: 1093789 - DNA, 25 bp, Homo sapien
gggctgctgtctgcgaatccactaa

SEQ ID NO: 1093790 - DNA, 25 bp, Homo sapien
ggcatattgaccacctgagtttggg

SEQ ID NO: 1093791 - DNA, 25 bp, Homo sapien
gattggcatattgaccacctgagtt

SEQ ID NO: 1093792 - DNA, 25 bp, Homo sapien
tggcatattgaccacctgagtttgg

SEQ ID NO: 1093793 - DNA, 25 bp, Homo sapien
ttggcatattgaccacctgagtttg

SEQ ID NO: 1093794 - DNA, 25 bp, Homo sapien
gctggcaatgtaagccctacattca

SEQ ID NO: 1093795 - DNA, 25 bp, Homo sapien
ttggcagctggcaatgtaagcccta

SEQ ID NO: 1093796 - DNA, 25 bp, Homo sapien
taaattgacccgttttggcagctgg

SEQ ID NO: 1093797 - DNA, 25 bp, Homo sapien
tcttctaaattgacccgttttggca

SEQ ID NO: 1093798 - DNA, 25 bp, Homo sapien
tggacagtgcctgcttcatcccaac

SEQ ID NO: 1093799 - DNA, 25 bp, Homo sapien
caaatgtacctcatgttaggtccca

SEQ ID NO: 1093800 - DNA, 25 bp, Homo sapien
tgtgtttaattgtaaagcttcccta

SEQ ID NO: 1093801 - DNA, 25 bp, Homo sapien
gaaaagatgaattgtctccccatgg

SEQ ID NO: 1093802 - DNA, 25 bp, Homo sapien
tcgttctttgcctgaactaccttcc

SEQ ID NO: 1093803 - DNA, 25 bp, Homo sapien
caatgcactcttcaagatctatgtg

SEQ ID NO: 1093804 - DNA, 25 bp, Homo sapien
tatgtgtaattcatcatccctttgc

SEQ ID NO: 1093805 - DNA, 25 bp, Homo sapien
ttttctcgttctttgcctgaactac

SEQ ID NO: 1093806 - DNA, 25 bp, Homo sapien
caattgtgggcataggagaccttcc

SEQ ID NO: 1093807 - DNA, 25 bp, Homo sapien
gggaattgcaaagatttgagcttca

SEQ ID NO: 1093808 - DNA, 25 bp, Homo sapien
caatatgtgctgagaattacacggc

SEQ ID NO: 1093809 - DNA, 25 bp, Homo sapien
ggaatagcattatcagggaattgca

SEQ ID NO: 1093810 - DNA, 25 bp, Homo sapien
tctctaaattaattccaggctgaaa

SEQ ID NO: 1093811 - DNA, 25 bp, Homo sapien
aaatccctgggcactcaaaagaagg

SEQ ID NO: 1093812 - DNA, 25 bp, Homo sapien
cacttgaaataatcctgggactgct

SEQ ID NO: 1093813 - DNA, 25 bp, Homo sapien
tgtaatattctgtgcataaattggc

SEQ ID NO: 1093814 - DNA, 25 bp, Homo sapien
agaggccagctagtccaggaagtct

SEQ ID NO: 1093815 - DNA, 25 bp, Homo sapien
gaggccagctagtccaggaagtctg

SEQ ID NO: 1093816 - DNA, 25 bp, Homo sapien
aggccagctagtccaggaagtctga

SEQ ID NO: 1093817 - DNA, 25 bp, Homo sapien
tttattaagctatgtggcctggagc

SEQ ID NO: 1093818 - DNA, 25 bp, Homo sapien
tctcttaacacaacaaccagtgagg

SEQ ID NO: 1093819 - DNA, 25 bp, Homo sapien
tacaagttgatcagtcagtctgcca

SEQ ID NO: 1093820 - DNA, 25 bp, Homo sapien
caacccactgtgctaggaaggctga

SEQ ID NO: 1093821 - DNA, 25 bp, Homo sapien
ttctttctgttcagtctcgactcac

SEQ ID NO: 1093822 - DNA, 25 bp, Homo sapien
ctctgggatcagagcagattggcaa

SEQ ID NO: 1093823 - DNA, 25 bp, Homo sapien
ttttctctgggatcagagcagattg

SEQ ID NO: 1093824 - DNA, 25 bp, Homo sapien
gggatcagagcagattggcaaagca

SEQ ID NO: 1093825 - DNA, 25 bp, Homo sapien
attggcaaagcattatgatcttcca

SEQ ID NO: 1093826 - DNA, 25 bp, Homo sapien
cctggaatatgccagataatgttat

SEQ ID NO: 1093827 - DNA, 25 bp, Homo sapien
aacaatatggtactattgtgatggc

SEQ ID NO: 1093828 - DNA, 25 bp, Homo sapien
agcgcttactatgcatcagacactc

SEQ ID NO: 1093829 - DNA, 25 bp, Homo sapien
taacttatataagacactcgtctgg

SEQ ID NO: 1093830 - DNA, 25 bp, Homo sapien
tgtacgggactgttggaaactgcct

SEQ ID NO: 1093831 - DNA, 25 bp, Homo sapien
tgtatttcaggatgatgtacgggac

SEQ ID NO: 1093832 - DNA, 25 bp, Homo sapien
gaagaagcccagtagatgatgaatg

SEQ ID NO: 1093833 - DNA, 25 bp, Homo sapien
tgcctttgacaaatgtgcacgggaa

SEQ ID NO: 1093834 - DNA, 25 bp, Homo sapien
aaatttgggactatcatcacttgag

SEQ ID NO: 1093835 - DNA, 25 bp, Homo sapien
cattccttaaatttgggactatcat

SEQ ID NO: 1093836 - DNA, 25 bp, Homo sapien
taaaggatttatatgtcatcattgc

SEQ ID NO: 1093837 - DNA, 25 bp, Homo sapien
tatcatcacttgagtctttcagctt

SEQ ID NO: 1093838 - DNA, 25 bp, Homo sapien
gctgagtcttattgacaaggactgt

SEQ ID NO: 1093839 - DNA, 25 bp, Homo sapien
ctgagtcttattgacaaggactgtg

SEQ ID NO: 1093840 - DNA, 25 bp, Homo sapien
cagctgagtcttattgacaaggact

SEQ ID NO: 1093841 - DNA, 25 bp, Homo sapien
tcagctgagtcttattgacaaggac

SEQ ID NO: 1093842 - DNA, 25 bp, Homo sapien
gatagtcagtaaatgactcagagga

SEQ ID NO: 1093843 - DNA, 25 bp, Homo sapien
ttcacggagctggagagtctttgtc

SEQ ID NO: 1093844 - DNA, 25 bp, Homo sapien
ggttacgtatatgctctttcacgga

SEQ ID NO: 1093845 - DNA, 25 bp, Homo sapien
cctctgagtccttgatatgctgtga

SEQ ID NO: 1093846 - DNA, 25 bp, Homo sapien
cgtgtcccatgatgaacagatagat

SEQ ID NO: 1093847 - DNA, 25 bp, Homo sapien
tcatggtagaggaacgtgtcccatg

SEQ ID NO: 1093848 - DNA, 25 bp, Homo sapien
ccgtattagggcactcagtggaaga

SEQ ID NO: 1093849 - DNA, 25 bp, Homo sapien
caaaggaggacaatcagttgacact

SEQ ID NO: 1093850 - DNA, 25 bp, Homo sapien
ggacagaccacaggttacttccata

SEQ ID NO: 1093851 - DNA, 25 bp, Homo sapien
tggatgggtgctctcttattggaaa

SEQ ID NO: 1093852 - DNA, 25 bp, Homo sapien
tcttatagctggaggaaaatctgac

SEQ ID NO: 1093853 - DNA, 25 bp, Homo sapien
caaggtgctgatcaagcttggctga

SEQ ID NO: 1093854 - DNA, 25 bp, Homo sapien
acaccgagaggtcagtgtgaatagg

SEQ ID NO: 1093855 - DNA, 25 bp, Homo sapien
cggccactgctgcaaatgagaacct

SEQ ID NO: 1093856 - DNA, 25 bp, Homo sapien
ctcatttccctgcacaccgagaggt

SEQ ID NO: 1093857 - DNA, 25 bp, Homo sapien
gctgcaaatgagaacctttgggaag

SEQ ID NO: 1093858 - DNA, 25 bp, Homo sapien
gctgccaataaaattgcctgaggaa

SEQ ID NO: 1093859 - DNA, 25 bp, Homo sapien
tgcctgaggaacctgccaaggagac

SEQ ID NO: 1093860 - DNA, 25 bp, Homo sapien
aacaccttctgtagcctggcatttg

SEQ ID NO: 1093861 - DNA, 25 bp, Homo sapien
cctggccattttagcgctgccaata

SEQ ID NO: 1093862 - DNA, 25 bp, Homo sapien
ctgaacaactttactttggccaatc

SEQ ID NO: 1093863 - DNA, 25 bp, Homo sapien
tttttgagacatccgagcagaggct

SEQ ID NO: 1093864 - DNA, 25 bp, Homo sapien
cttcaacttttgaggtagatccaag

SEQ ID NO: 1093865 - DNA, 25 bp, Homo sapien
tctttttgagacatccgagcagagg

SEQ ID NO: 1093866 - DNA, 25 bp, Homo sapien
aacaggataaagcatccaccctggc

SEQ ID NO: 1093867 - DNA, 25 bp, Homo sapien
catgaaggaggggagtcaactcttt

SEQ ID NO: 1093868 - DNA, 25 bp, Homo sapien
tcctttgcaggcattgagggtagtg

SEQ ID NO: 1093869 - DNA, 25 bp, Homo sapien
gaaaccttaacggagctacacacag

SEQ ID NO: 1093870 - DNA, 25 bp, Homo sapien
agcagttctgaagaggccccatctg

SEQ ID NO: 1093871 - DNA, 25 bp, Homo sapien
agaggaattcacacactcgggaaaa

SEQ ID NO: 1093872 - DNA, 25 bp, Homo sapien
ccgtccggaggattggcagattgtt

SEQ ID NO: 1093873 - DNA, 25 bp, Homo sapien
tgattggttgccaggtttggcagca

SEQ ID NO: 1093874 - DNA, 25 bp, Homo sapien
cctaatacaatgtgcattgccaaca

SEQ ID NO: 1093875 - DNA, 25 bp, Homo sapien
aaggtgttagggtaatgatgatgac

SEQ ID NO: 1093876 - DNA, 25 bp, Homo sapien
attgccaacataaggtgttagggta

SEQ ID NO: 1093877 - DNA, 25 bp, Homo sapien
tgtctctgtcccgttattcctaata

SEQ ID NO: 1093878 - DNA, 25 bp, Homo sapien
actgcttgtacttggcctggtttcc

SEQ ID NO: 1093879 - DNA, 25 bp, Homo sapien
ccacttatacgcattgagactgctt

SEQ ID NO: 1093880 - DNA, 25 bp, Homo sapien
gactgcttgtacttggcctggtttc

SEQ ID NO: 1093881 - DNA, 25 bp, Homo sapien
cttacttccccacttatacgcattg

SEQ ID NO: 1093882 - DNA, 25 bp, Homo sapien
actgcttctgcttgtttttgccgaa

SEQ ID NO: 1093883 - DNA, 25 bp, Homo sapien
atcagtgtacagtgccatcatgaac

SEQ ID NO: 1093884 - DNA, 25 bp, Homo sapien
acagatgtatcagtgtacagtgcca

SEQ ID NO: 1093885 - DNA, 25 bp, Homo sapien
tctgcttgtttttgccgaaacctct

SEQ ID NO: 1093886 - DNA, 25 bp, Homo sapien
atacagccctgtgaaggtcgaagac

SEQ ID NO: 1093887 - DNA, 25 bp, Homo sapien
gccctgtgaaggtcgaagacatgcc

SEQ ID NO: 1093888 - DNA, 25 bp, Homo sapien
tgaaggtcgaagacatgcctttcct

SEQ ID NO: 1093889 - DNA, 25 bp, Homo sapien
aggtcgaagacatgcctttccttca

SEQ ID NO: 1093890 - DNA, 25 bp, Homo sapien
ttgcaactgattggccccatgaaag

SEQ ID NO: 1093891 - DNA, 25 bp, Homo sapien
ggagactgggatgtttgcaactgat

SEQ ID NO: 1093892 - DNA, 25 bp, Homo sapien
ccaaattcattgtcaggagactggg

SEQ ID NO: 1093893 - DNA, 25 bp, Homo sapien
gaaagtcaatgatggccttagctga

SEQ ID NO: 1093894 - DNA, 25 bp, Homo sapien
ctatgaccaaaattagggcgatggc

SEQ ID NO: 1093895 - DNA, 25 bp, Homo sapien
gccctgccagagctatgaccaaaat

SEQ ID NO: 1093896 - DNA, 25 bp, Homo sapien
agggcgatggctctattttgaaggc

SEQ ID NO: 1093897 - DNA, 25 bp, Homo sapien
ctgccctgccagagctatgaccaaa

SEQ ID NO: 1093898 - DNA, 25 bp, Homo sapien
ttactttgcctcgtttgaaattcag

SEQ ID NO: 1093899 - DNA, 25 bp, Homo sapien
aattcagtctccatgcctcggttgt

SEQ ID NO: 1093900 - DNA, 25 bp, Homo sapien
ccaggtcccccgtctggtctttctg

SEQ ID NO: 1093901 - DNA, 25 bp, Homo sapien
gaaattcagtctccatgcctcggtt

SEQ ID NO: 1093902 - DNA, 25 bp, Homo sapien
ttttatctgggcaatgggagtatat

SEQ ID NO: 1093903 - DNA, 25 bp, Homo sapien
taatccctaagtttttatctgggca

SEQ ID NO: 1093904 - DNA, 25 bp, Homo sapien
tctgggcaatgggagtatatggtct

SEQ ID NO: 1093905 - DNA, 25 bp, Homo sapien
ggcaatgggagtatatggtctgccc

SEQ ID NO: 1093906 - DNA, 25 bp, Homo sapien
tcaggagcaaggactcagtgtaatg

SEQ ID NO: 1093907 - DNA, 25 bp, Homo sapien
ccatttcaggagcaaggactcagtg

SEQ ID NO: 1093908 - DNA, 25 bp, Homo sapien
gactcagtgtaatggagtgaactta

SEQ ID NO: 1093909 - DNA, 25 bp, Homo sapien
gagtgaacttaggtgaatcttttga

SEQ ID NO: 1093910 - DNA, 25 bp, Homo sapien
tatagaggtaggcagtattgtaccc

SEQ ID NO: 1093911 - DNA, 25 bp, Homo sapien
cactgctgagagtcctgtaagggag

SEQ ID NO: 1093912 - DNA, 25 bp, Homo sapien
cttcctggaacaaagagccgatggc

SEQ ID NO: 1093913 - DNA, 25 bp, Homo sapien
ccaccatgggaattagatggcttcc

SEQ ID NO: 1093914 - DNA, 25 bp, Homo sapien
gccatactggagagtttcaacttca

SEQ ID NO: 1093915 - DNA, 25 bp, Homo sapien
tcagctgggaatctaattgatcaaa

SEQ ID NO: 1093916 - DNA, 25 bp, Homo sapien
gccattgaaaccttgtcagctggga

SEQ ID NO: 1093917 - DNA, 25 bp, Homo sapien
tcatgctgaaagtaatggggagcca

SEQ ID NO: 1093918 - DNA, 25 bp, Homo sapien
tagaggctaaggtaactgtgttgct

SEQ ID NO: 1093919 - DNA, 25 bp, Homo sapien
ggagactagaggctaaggtaactgt

SEQ ID NO: 1093920 - DNA, 25 bp, Homo sapien
tgccttcagcagtttgtctttgcaa

SEQ ID NO: 1093921 - DNA, 25 bp, Homo sapien
aacgcccgttgggtctgatgttggt

SEQ ID NO: 1093922 - DNA, 25 bp, Homo sapien
ctctcgagtatttgggagtacaggc

SEQ ID NO: 1093923 - DNA, 25 bp, Homo sapien
ctcgagtatttgggagtacaggcac

SEQ ID NO: 1093924 - DNA, 25 bp, Homo sapien
cagcctctcgagtatttgggagtac

SEQ ID NO: 1093925 - DNA, 25 bp, Homo sapien
gcctctcgagtatttgggagtacag

SEQ ID NO: 1093926 - DNA, 25 bp, Homo sapien
agagcgcgcctgagtgccgccgccc

SEQ ID NO: 1093927 - DNA, 25 bp, Homo sapien
cagctcggcgctcgcccgggcttcc

SEQ ID NO: 1093928 - DNA, 25 bp, Homo sapien
acccagctcggcgctcgcccgggct

SEQ ID NO: 1093929 - DNA, 25 bp, Homo sapien
tggacccagctcggcgctcgcccgg

SEQ ID NO: 1093930 - DNA, 25 bp, Homo sapien
aagccctggctggattactgtctgg

SEQ ID NO: 1093931 - DNA, 25 bp, Homo sapien
cacaagccctggctggattactgtc

SEQ ID NO: 1093932 - DNA, 25 bp, Homo sapien
gctggattactgtctgggtatccct

SEQ ID NO: 1093933 - DNA, 25 bp, Homo sapien
ccctggctggattactgtctgggta

SEQ ID NO: 1093934 - DNA, 25 bp, Homo sapien
ttgaagacttgcagatcactctccc

SEQ ID NO: 1093935 - DNA, 25 bp, Homo sapien
tgtctctttgaggagcgggtatgta

SEQ ID NO: 1093936 - DNA, 25 bp, Homo sapien
tgaggagcgggtatgtaaagcactc

SEQ ID NO: 1093937 - DNA, 25 bp, Homo sapien
tttgaggagcgggtatgtaaagcac

SEQ ID NO: 1093938 - DNA, 25 bp, Homo sapien
tcttatttaaaagcacttcagcagg

SEQ ID NO: 1093939 - DNA, 25 bp, Homo sapien
tcttcagatcggcaaacctacagaa

SEQ ID NO: 1093940 - DNA, 25 bp, Homo sapien
ccgtgcttgtaattcgagtggtgga

SEQ ID NO: 1093941 - DNA, 25 bp, Homo sapien
ttaaatggcttattggccagaagca

SEQ ID NO: 1093942 - DNA, 25 bp, Homo sapien
gttccgcaagaaatccctgactaga

SEQ ID NO: 1093943 - DNA, 25 bp, Homo sapien
caacaggattatgaatgatgcagct

SEQ ID NO: 1093944 - DNA, 25 bp, Homo sapien
atttagctggctacggcaccttggg

SEQ ID NO: 1093945 - DNA, 25 bp, Homo sapien
gatgtggagtctagggccctgcctt

SEQ ID NO: 1093946 - DNA, 25 bp, Homo sapien
taactcttgcttgccaggaagtgct

SEQ ID NO: 1093947 - DNA, 25 bp, Homo sapien
cagtcttctgtttaactcttgcttg

SEQ ID NO: 1093948 - DNA, 25 bp, Homo sapien
cttgatggtcttcacagcaagagga

SEQ ID NO: 1093949 - DNA, 25 bp, Homo sapien
ttctgtttaactcttgcttgccagg

SEQ ID NO: 1093950 - DNA, 25 bp, Homo sapien
tgcaggaccttccttattgtggccg

SEQ ID NO: 1093951 - DNA, 25 bp, Homo sapien
ttaattctggccacatgtgggaact

SEQ ID NO: 1093952 - DNA, 25 bp, Homo sapien
tggcagtttgaggtaccctggtcct

SEQ ID NO: 1093953 - DNA, 25 bp, Homo sapien
ccttccttattgtggccgagggctg

SEQ ID NO: 1093954 - DNA, 25 bp, Homo sapien
tgtgcaagggtggatgaaagattct

SEQ ID NO: 1093955 - DNA, 25 bp, Homo sapien
gcagggcagtaaaaagcacactcat

SEQ ID NO: 1093956 - DNA, 25 bp, Homo sapien
taattctgtcacgaagaaactgtgc

SEQ ID NO: 1093957 - DNA, 25 bp, Homo sapien
caggctgccaaaagcttggaacagc

SEQ ID NO: 1093958 - DNA, 25 bp, Homo sapien
cgttgccagactgaaaactgagctt

SEQ ID NO: 1093959 - DNA, 25 bp, Homo sapien
ggtattgcatagtgccttctggatt

SEQ ID NO: 1093960 - DNA, 25 bp, Homo sapien
ttttcttgagctttgtaacgttgcc

SEQ ID NO: 1093961 - DNA, 25 bp, Homo sapien
gagctttgtaacgttgccagactga

SEQ ID NO: 1093962 - DNA, 25 bp, Homo sapien
tagatttagtgtgcagagtactctg

SEQ ID NO: 1093963 - DNA, 25 bp, Homo sapien
ccagaggaactgtgcaagtagcttt

SEQ ID NO: 1093964 - DNA, 25 bp, Homo sapien
gaagtgtaacccataaaccagagga

SEQ ID NO: 1093965 - DNA, 25 bp, Homo sapien
gcttgtaaaaccctcactctccatt

SEQ ID NO: 1093966 - DNA, 25 bp, Homo sapien
aagaaacttaggaaatgatttagat

SEQ ID NO: 1093967 - DNA, 25 bp, Homo sapien
ctgtgtttaatacctgaaaccagat

SEQ ID NO: 1093968 - DNA, 25 bp, Homo sapien
ctgaaaccagattcatagtggttta

SEQ ID NO: 1093969 - DNA, 25 bp, Homo sapien
ttaatctgtgtttaatacctgaaac

SEQ ID NO: 1093970 - DNA, 25 bp, Homo sapien
gaacttagatttcgtgtggctcacc

SEQ ID NO: 1093971 - DNA, 25 bp, Homo sapien
cctgtctcattagaaaagtacttcg

SEQ ID NO: 1093972 - DNA, 25 bp, Homo sapien
gcctttgggagatctgttttatacc

SEQ ID NO: 1093973 - DNA, 25 bp, Homo sapien
tacttcgaggtaatgacttgggcat

SEQ ID NO: 1093974 - DNA, 25 bp, Homo sapien
tcatccctaaaagctgaatgtctag

SEQ ID NO: 1093975 - DNA, 25 bp, Homo sapien
ggttccatcgcatcatccctaaaag

SEQ ID NO: 1093976 - DNA, 25 bp, Homo sapien
tgaatgtctagacttgacctgggcc

SEQ ID NO: 1093977 - DNA, 25 bp, Homo sapien
aaagtctggttccatcgcatcatcc

SEQ ID NO: 1093978 - DNA, 25 bp, Homo sapien
cagcgggcatctgggagtaagccaa

SEQ ID NO: 1093979 - DNA, 25 bp, Homo sapien
ggcatctgggagtaagccaagctgt

SEQ ID NO: 1093980 - DNA, 25 bp, Homo sapien
tgggagtaagccaagctgtcttgat

SEQ ID NO: 1093981 - DNA, 25 bp, Homo sapien
ctgggagtaagccaagctgtcttga

SEQ ID NO: 1093982 - DNA, 25 bp, Homo sapien
cattttaagtcagcctaattatacc

SEQ ID NO: 1093983 - DNA, 25 bp, Homo sapien
cccatgacccatagaatcattgaga

SEQ ID NO: 1093984 - DNA, 25 bp, Homo sapien
gataactagatatactcaatagcaa

SEQ ID NO: 1093985 - DNA, 25 bp, Homo sapien
gcaatataagatttagcttgtgagt

SEQ ID NO: 1093986 - DNA, 25 bp, Homo sapien
tttctgatatgttgaccttcttcat

SEQ ID NO: 1093987 - DNA, 25 bp, Homo sapien
cattgagaagaactcttgggatgaa

SEQ ID NO: 1093988 - DNA, 25 bp, Homo sapien
gaatttctttgaaatctctgctact

SEQ ID NO: 1093989 - DNA, 25 bp, Homo sapien
tgaaatctctgctactgattttatt

SEQ ID NO: 1093990 - DNA, 25 bp, Homo sapien
tttaagacctgagtcctctccggta

SEQ ID NO: 1093991 - DNA, 25 bp, Homo sapien
cattttaagacctgagtcctctccg

SEQ ID NO: 1093992 - DNA, 25 bp, Homo sapien
attttaagacctgagtcctctccgg

SEQ ID NO: 1093993 - DNA, 25 bp, Homo sapien
tcattttaagacctgagtcctctcc

SEQ ID NO: 1093994 - DNA, 25 bp, Homo sapien
tcctcggaattatgcagggagctgg

SEQ ID NO: 1093995 - DNA, 25 bp, Homo sapien
tgaagcagatctggagccaaggcac

SEQ ID NO: 1093996 - DNA, 25 bp, Homo sapien
ggttaaaaacacatagtcatgggcc

SEQ ID NO: 1093997 - DNA, 25 bp, Homo sapien
tattctaggtgttcgagttcaacag

SEQ ID NO: 1093998 - DNA, 25 bp, Homo sapien
gctggtactgtgttccctaattaca

SEQ ID NO: 1093999 - DNA, 25 bp, Homo sapien
tgagattgtgccagtagctgccaaa

SEQ ID NO: 1094000 - DNA, 25 bp, Homo sapien
tgagcagggacatgagcaaacaccg

SEQ ID NO: 1094001 - DNA, 25 bp, Homo sapien
cagtttccaagatgtaggccttttg

SEQ ID NO: 1094002 - DNA, 25 bp, Homo sapien
caatcaaagtgggtttttctcttgc

SEQ ID NO: 1094003 - DNA, 25 bp, Homo sapien
gagcagttccttctatggtgattaa

SEQ ID NO: 1094004 - DNA, 25 bp, Homo sapien
aatatcctataagctcacagtctgg

SEQ ID NO: 1094005 - DNA, 25 bp, Homo sapien
taataatacctgttgcagagtgtgg

SEQ ID NO: 1094006 - DNA, 25 bp, Homo sapien
aacagataccaagctaatgttgggc

SEQ ID NO: 1094007 - DNA, 25 bp, Homo sapien
tactgctagtgccactcgcagctgg

SEQ ID NO: 1094008 - DNA, 25 bp, Homo sapien
ctggccaggacggtcacctccagga

SEQ ID NO: 1094009 - DNA, 25 bp, Homo sapien
gtgccactcgcagctggccaggacg

SEQ ID NO: 1094010 - DNA, 25 bp, Homo sapien
gacggtcacctccaggatttgtcat

SEQ ID NO: 1094011 - DNA, 25 bp, Homo sapien
ttcaacttttcgatgtgggaccaag

SEQ ID NO: 1094012 - DNA, 25 bp, Homo sapien
gggaccaagtgtattctctcagaga

SEQ ID NO: 1094013 - DNA, 25 bp, Homo sapien
ggttgagaattgcaccttctagccc

SEQ ID NO: 1094014 - DNA, 25 bp, Homo sapien
tggttttccagtctatgaggttgag

SEQ ID NO: 1094015 - DNA, 25 bp, Homo sapien
gacaattattgtgcagtaggccttc

SEQ ID NO: 1094016 - DNA, 25 bp, Homo sapien
cacggaaggtgctagctgcaatctt

SEQ ID NO: 1094017 - DNA, 25 bp, Homo sapien
gctttcccgagcattacagactcat

SEQ ID NO: 1094018 - DNA, 25 bp, Homo sapien
ctttcaagtcaggttcacgtagagg

SEQ ID NO: 1094019 - DNA, 25 bp, Homo sapien
tggatagcaaaatatgtctcattat

SEQ ID NO: 1094020 - DNA, 25 bp, Homo sapien
ggatagcaaaatatgtctcattatt

SEQ ID NO: 1094021 - DNA, 25 bp, Homo sapien
gatagcaaaatatgtctcattatta

SEQ ID NO: 1094022 - DNA, 25 bp, Homo sapien
catggatagcaaaatatgtctcatt

SEQ ID NO: 1094023 - DNA, 25 bp, Homo sapien
aggatgacctccttaggaagctcaa

SEQ ID NO: 1094024 - DNA, 25 bp, Homo sapien
ggttaggatgacctccttaggaagc

SEQ ID NO: 1094025 - DNA, 25 bp, Homo sapien
gttaggatgacctccttaggaagct

SEQ ID NO: 1094026 - DNA, 25 bp, Homo sapien
atgacctccttaggaagctcaacac

SEQ ID NO: 1094027 - DNA, 25 bp, Homo sapien
ttaaggagctgcagtgtaaaatccc

SEQ ID NO: 1094028 - DNA, 25 bp, Homo sapien
tatcaaagggaaaggaccagtttga

SEQ ID NO: 1094029 - DNA, 25 bp, Homo sapien
tgaatacctaccaagattctgagaa

SEQ ID NO: 1094030 - DNA, 25 bp, Homo sapien
cccaggagatggtatgtgctgactt

SEQ ID NO: 1094031 - DNA, 25 bp, Homo sapien
tgcttagttaccaatcctctgccac

SEQ ID NO: 1094032 - DNA, 25 bp, Homo sapien
tagtcctgttgatgccttgttcccc

SEQ ID NO: 1094033 - DNA, 25 bp, Homo sapien
tctatgcttagttaccaatcctctg

SEQ ID NO: 1094034 - DNA, 25 bp, Homo sapien
acctgctagtcctgttgatgccttg

SEQ ID NO: 1094035 - DNA, 25 bp, Homo sapien
tctgtgttctctcccctactcctgc

SEQ ID NO: 1094036 - DNA, 25 bp, Homo sapien
tgcatctgtgttctctcccctactc

SEQ ID NO: 1094037 - DNA, 25 bp, Homo sapien
tagctctccctctctgcatctgtgt

SEQ ID NO: 1094038 - DNA, 25 bp, Homo sapien
tctgcatctgtgttctctcccctac

SEQ ID NO: 1094039 - DNA, 25 bp, Homo sapien
gacactgcagctgttacgtcctcct

SEQ ID NO: 1094040 - DNA, 25 bp, Homo sapien
ttccagacccagagcctgtgacact

SEQ ID NO: 1094041 - DNA, 25 bp, Homo sapien
cagtaggtgtgtctgccgcgctgcc

SEQ ID NO: 1094042 - DNA, 25 bp, Homo sapien
ttagggcagtaggtgtgtctgccgc

SEQ ID NO: 1094043 - DNA, 25 bp, Homo sapien
cctgtgcttgtctaaggagttcaac

SEQ ID NO: 1094044 - DNA, 25 bp, Homo sapien
tcaacaaattcgacagagaccttcc

SEQ ID NO: 1094045 - DNA, 25 bp, Homo sapien
catcctggcatgtgtatttaacctg

SEQ ID NO: 1094046 - DNA, 25 bp, Homo sapien
tgaagtgctagaccaccatcctggc

SEQ ID NO: 1094047 - DNA, 25 bp, Homo sapien
ttagatctctagacatctcagtgcc

SEQ ID NO: 1094048 - DNA, 25 bp, Homo sapien
tcctctgacgctaatgatctctgca

SEQ ID NO: 1094049 - DNA, 25 bp, Homo sapien
tcaagatgagatcgtcctctgacgc

SEQ ID NO: 1094050 - DNA, 25 bp, Homo sapien
ggtccagtttcgctagctgccagca

SEQ ID NO: 1094051 - DNA, 25 bp, Homo sapien
tcaaactaatttgatgaaagtgcca

SEQ ID NO: 1094052 - DNA, 25 bp, Homo sapien
tgccagatgaaataaccaataagct

SEQ ID NO: 1094053 - DNA, 25 bp, Homo sapien
aaactaatttgatgaaagtgccaga

SEQ ID NO: 1094054 - DNA, 25 bp, Homo sapien
aagtgccagatgaaataaccaataa

SEQ ID NO: 1094055 - DNA, 25 bp, Homo sapien
gcatttcatttgaactgagaggagc

SEQ ID NO: 1094056 - DNA, 25 bp, Homo sapien
taagctctgagtattatcatgggaa

SEQ ID NO: 1094057 - DNA, 25 bp, Homo sapien
gcatccaggtggaagggatatctca

SEQ ID NO: 1094058 - DNA, 25 bp, Homo sapien
gaagggatatctcaagaaattggaa

SEQ ID NO: 1094059 - DNA, 25 bp, Homo sapien
ttctagatgcctccacttgtctact

SEQ ID NO: 1094060 - DNA, 25 bp, Homo sapien
acttgtctactagctgccttgcaga

SEQ ID NO: 1094061 - DNA, 25 bp, Homo sapien
gccttgcagatatgaatgctgtcac

SEQ ID NO: 1094062 - DNA, 25 bp, Homo sapien
tagatgcaacatgactgttcttgtc

SEQ ID NO: 1094063 - DNA, 25 bp, Homo sapien
ctgtggtggggacttgtgcctccag

SEQ ID NO: 1094064 - DNA, 25 bp, Homo sapien
gtggtggggacttgtgcctccagga

SEQ ID NO: 1094065 - DNA, 25 bp, Homo sapien
tgtggtggggacttgtgcctccagg

SEQ ID NO: 1094066 - DNA, 25 bp, Homo sapien
tggtggggacttgtgcctccaggag

SEQ ID NO: 1094067 - DNA, 25 bp, Homo sapien
gtgttttacagccttggtgcaagct

SEQ ID NO: 1094068 - DNA, 25 bp, Homo sapien
agcagatccgctttctgccctgctg

SEQ ID NO: 1094069 - DNA, 25 bp, Homo sapien
ttgtctaactgtggtgtcagcagat

SEQ ID NO: 1094070 - DNA, 25 bp, Homo sapien
tgtgctctgccaagggtgttttaca

SEQ ID NO: 1094071 - DNA, 25 bp, Homo sapien
ttagacagttaaatgggcaaatatt

SEQ ID NO: 1094072 - DNA, 25 bp, Homo sapien
ggcaaatattcctttagctatctct

SEQ ID NO: 1094073 - DNA, 25 bp, Homo sapien
taaatgctagctcctctagactttc

SEQ ID NO: 1094074 - DNA, 25 bp, Homo sapien
tctctatgttaaatgctagctcctc

SEQ ID NO: 1094075 - DNA, 25 bp, Homo sapien
gcctgaggactgtgaacgatgctct

SEQ ID NO: 1094076 - DNA, 25 bp, Homo sapien
gaagagcgtgtgcttctacctacaa

SEQ ID NO: 1094077 - DNA, 25 bp, Homo sapien
tcagagtggctaaagatgatgaaga

SEQ ID NO: 1094078 - DNA, 25 bp, Homo sapien
cacattccctgttctggagtcttca

SEQ ID NO: 1094079 - DNA, 25 bp, Homo sapien
caaataccaactgagctctgcccag

SEQ ID NO: 1094080 - DNA, 25 bp, Homo sapien
cagctgtaggttgtagctgagttcc

SEQ ID NO: 1094081 - DNA, 25 bp, Homo sapien
ccagagcccccgtttgaggtattca

SEQ ID NO: 1094082 - DNA, 25 bp, Homo sapien
gagttcctctctaggcactgtcact

SEQ ID NO: 1094083 - DNA, 25 bp, Homo sapien
aaatgaccggtagcacatgaggatg

SEQ ID NO: 1094084 - DNA, 25 bp, Homo sapien
aatgaccggtagcacatgaggatga

SEQ ID NO: 1094085 - DNA, 25 bp, Homo sapien
cttacagtagtggatagcttgcttg

SEQ ID NO: 1094086 - DNA, 25 bp, Homo sapien
tggctaacttgtacttgggtagtct

SEQ ID NO: 1094087 - DNA, 25 bp, Homo sapien
taacttgtacttgggtagtcttaca

SEQ ID NO: 1094088 - DNA, 25 bp, Homo sapien
acttgggtagtcttacagtagtgga

SEQ ID NO: 1094089 - DNA, 25 bp, Homo sapien
attactgcaacttaacagttcccca

SEQ ID NO: 1094090 - DNA, 25 bp, Homo sapien
ttggaattactgcaacttaacagtt

SEQ ID NO: 1094091 - DNA, 25 bp, Homo sapien
ctggttttccccattggaattactg

SEQ ID NO: 1094092 - DNA, 25 bp, Homo sapien
ttttccccattggaattactgcaac

SEQ ID NO: 1094093 - DNA, 25 bp, Homo sapien
acaccagggcaggaccaaacttcct

SEQ ID NO: 1094094 - DNA, 25 bp, Homo sapien
tttcatacaggaaccgttgccccac

SEQ ID NO: 1094095 - DNA, 25 bp, Homo sapien
caaataacatttcatacaggaaccg

SEQ ID NO: 1094096 - DNA, 25 bp, Homo sapien
caccagggcaggaccaaacttcctt

SEQ ID NO: 1094097 - DNA, 25 bp, Homo sapien
cagtagtagccagcatggacggcag

SEQ ID NO: 1094098 - DNA, 25 bp, Homo sapien
tgggctcatatgtgacaccctgtga

SEQ ID NO: 1094099 - DNA, 25 bp, Homo sapien
tgcctccagtagtagccagcatgga

SEQ ID NO: 1094100 - DNA, 25 bp, Homo sapien
actggctgcctccagtagtagccag

SEQ ID NO: 1094101 - DNA, 25 bp, Homo sapien
ggcttccctgaacaccaatcttaac

SEQ ID NO: 1094102 - DNA, 25 bp, Homo sapien
ctttggggtcctagcatcctcactg

SEQ ID NO: 1094103 - DNA, 25 bp, Homo sapien
caaccataatgggagtttgctttgg

SEQ ID NO: 1094104 - DNA, 25 bp, Homo sapien
tctgcctctttgtgtttccccaccg

SEQ ID NO: 1094105 - DNA, 25 bp, Homo sapien
aatggataatcattgtccttgtctg

SEQ ID NO: 1094106 - DNA, 25 bp, Homo sapien
tgtcagcctttgcatcattcctcat

SEQ ID NO: 1094107 - DNA, 25 bp, Homo sapien
tcaaatggataatcattgtccttgt

SEQ ID NO: 1094108 - DNA, 25 bp, Homo sapien
gatgtcagcctttgcatcattcctc

SEQ ID NO: 1094109 - DNA, 25 bp, Homo sapien
ctgtaggccctgctcaaacacgttc

SEQ ID NO: 1094110 - DNA, 25 bp, Homo sapien
gtaggccctgctcaaacacgttctc

SEQ ID NO: 1094111 - DNA, 25 bp, Homo sapien
ggccctgctcaaacacgttctccat

SEQ ID NO: 1094112 - DNA, 25 bp, Homo sapien
aggccctgctcaaacacgttctcca

SEQ ID NO: 1094113 - DNA, 25 bp, Homo sapien
cacatttcctatgggtatttcctgg

SEQ ID NO: 1094114 - DNA, 25 bp, Homo sapien
ggacacatttcctatgggtatttcc

SEQ ID NO: 1094115 - DNA, 25 bp, Homo sapien
gcctgtcccttaggcttgggcctgc

SEQ ID NO: 1094116 - DNA, 25 bp, Homo sapien
ctgggcctgtcccttaggcttgggc

SEQ ID NO: 1094117 - DNA, 25 bp, Homo sapien
aaagcacccaagatagtaccttttg

SEQ ID NO: 1094118 - DNA, 25 bp, Homo sapien
ctcttctcgcgtgggcccaagaagc

SEQ ID NO: 1094119 - DNA, 25 bp, Homo sapien
caagaagccagttgagtggtctgct

SEQ ID NO: 1094120 - DNA, 25 bp, Homo sapien
gctgcataaatagatatctcagaga

SEQ ID NO: 1094121 - DNA, 25 bp, Homo sapien
tacctggcattctcccttgcaggca

SEQ ID NO: 1094122 - DNA, 25 bp, Homo sapien
cggagattgagagggtggtcaagcc

SEQ ID NO: 1094123 - DNA, 25 bp, Homo sapien
tccaaattgcataacatctcagcat

SEQ ID NO: 1094124 - DNA, 25 bp, Homo sapien
ggtgaatccagacaagaagaagttg

SEQ ID NO: 1094125 - DNA, 25 bp, Homo sapien
tgattaagaagtaagtgtgctcgga

SEQ ID NO: 1094126 - DNA, 25 bp, Homo sapien
gatagaagcaaccagcaacccaaat

SEQ ID NO: 1094127 - DNA, 25 bp, Homo sapien
aaagttggattgtgatagaagcaac

SEQ ID NO: 1094128 - DNA, 25 bp, Homo sapien
tactattttcctaggctgttctgac

SEQ ID NO: 1094129 - DNA, 25 bp, Homo sapien
ccttctccactgatgttgacaaaaa

SEQ ID NO: 1094130 - DNA, 25 bp, Homo sapien
tcctttgtctggaaatctactcctg

SEQ ID NO: 1094131 - DNA, 25 bp, Homo sapien
tggaaatctactcctgtcaaagatg

SEQ ID NO: 1094132 - DNA, 25 bp, Homo sapien
actcctgtcaaagatgcttccctgg

SEQ ID NO: 1094133 - DNA, 25 bp, Homo sapien
ccatttctatgttcctttgtctgga

SEQ ID NO: 1094134 - DNA, 25 bp, Homo sapien
ggaaggtgtatgacaaatttccaga

SEQ ID NO: 1094135 - DNA, 25 bp, Homo sapien
ggtgacaaattaactcactgagtaa

SEQ ID NO: 1094136 - DNA, 25 bp, Homo sapien
accttctgtgttaccatcgcatggg

SEQ ID NO: 1094137 - DNA, 25 bp, Homo sapien
taattcattttgactgttggagctc

SEQ ID NO: 1094138 - DNA, 25 bp, Homo sapien
gagcagcttggattgattctgttcc

SEQ ID NO: 1094139 - DNA, 25 bp, Homo sapien
agcagcttggattgattctgttccc

SEQ ID NO: 1094140 - DNA, 25 bp, Homo sapien
gcagcttggattgattctgttcccc

SEQ ID NO: 1094141 - DNA, 25 bp, Homo sapien
agcttggattgattctgttcccctc

SEQ ID NO: 1094142 - DNA, 25 bp, Homo sapien
attcagacgtttcgggggtcaagca

SEQ ID NO: 1094143 - DNA, 25 bp, Homo sapien
gggtcaagcaggtagcatgctgaca

SEQ ID NO: 1094144 - DNA, 25 bp, Homo sapien
gatatcacaaattcagacgtttcgg

SEQ ID NO: 1094145 - DNA, 25 bp, Homo sapien
caggtagcatgctgacaataagcca

SEQ ID NO: 1094146 - DNA, 25 bp, Homo sapien
aaaggccagaacagaaaatatcttc

SEQ ID NO: 1094147 - DNA, 25 bp, Homo sapien
gccagtgttgcctgacattgagtgt

SEQ ID NO: 1094148 - DNA, 25 bp, Homo sapien
tcgttcaacgttggcagcctgagct

SEQ ID NO: 1094149 - DNA, 25 bp, Homo sapien
ctgccaagaagtgtgacctgctcgt

SEQ ID NO: 1094150 - DNA, 25 bp, Homo sapien
acattgagtgttgcctgaggagccc

SEQ ID NO: 1094151 - DNA, 25 bp, Homo sapien
gaaacttcacatcttaattctgtgt

SEQ ID NO: 1094152 - DNA, 25 bp, Homo sapien
ctggctgcatcattaggtgctgaaa

SEQ ID NO: 1094153 - DNA, 25 bp, Homo sapien
gtgctggctgcatcattaggtgctg

SEQ ID NO: 1094154 - DNA, 25 bp, Homo sapien
gaggttttctctgggggcgatggtg

SEQ ID NO: 1094155 - DNA, 25 bp, Homo sapien
ttctggcaggaattcactgtccatg

SEQ ID NO: 1094156 - DNA, 25 bp, Homo sapien
tgtctgcagcagatgttccatccat

SEQ ID NO: 1094157 - DNA, 25 bp, Homo sapien
attcactgtccatgttggagccctg

SEQ ID NO: 1094158 - DNA, 25 bp, Homo sapien
caggaattcactgtccatgttggag

SEQ ID NO: 1094159 - DNA, 25 bp, Homo sapien
atgcctgtttgctgtatcgcttcac

SEQ ID NO: 1094160 - DNA, 25 bp, Homo sapien
tcacatctgctccgatgcctgtttg

SEQ ID NO: 1094161 - DNA, 25 bp, Homo sapien
tccgatgcctgtttgctgtatcgct

SEQ ID NO: 1094162 - DNA, 25 bp, Homo sapien
ctgctccgatgcctgtttgctgtat

SEQ ID NO: 1094163 - DNA, 25 bp, Homo sapien
gatccctttaacaatggctgaactg

SEQ ID NO: 1094164 - DNA, 25 bp, Homo sapien
tttctatagtacaggatccctttaa

SEQ ID NO: 1094165 - DNA, 25 bp, Homo sapien
tacaggatccctttaacaatggctg

SEQ ID NO: 1094166 - DNA, 25 bp, Homo sapien
atagtacaggatccctttaacaatg

SEQ ID NO: 1094167 - DNA, 25 bp, Homo sapien
gtgttattaacttctttcttcctga

SEQ ID NO: 1094168 - DNA, 25 bp, Homo sapien
atgtgttattaacttctttcttcct

SEQ ID NO: 1094169 - DNA, 25 bp, Homo sapien
tgttattaacttctttcttcctgac

SEQ ID NO: 1094170 - DNA, 25 bp, Homo sapien
tgtgttattaacttctttcttcctg

SEQ ID NO: 1094171 - DNA, 25 bp, Homo sapien
gcattggtgacctaagcagttctcc

SEQ ID NO: 1094172 - DNA, 25 bp, Homo sapien
attcaggtgtctttcggaaacagca

SEQ ID NO: 1094173 - DNA, 25 bp, Homo sapien
catctggtggctgcttaagtagtaa

SEQ ID NO: 1094174 - DNA, 25 bp, Homo sapien
tcaaggcagctgttaatgaacgtca

SEQ ID NO: 1094175 - DNA, 25 bp, Homo sapien
gaagaggttgctaatagctgccata

SEQ ID NO: 1094176 - DNA, 25 bp, Homo sapien
ctgactgaagaggttgctaatagct

SEQ ID NO: 1094177 - DNA, 25 bp, Homo sapien
tgactgaagaggttgctaatagctg

SEQ ID NO: 1094178 - DNA, 25 bp, Homo sapien
gttgctaatagctgccatatttgtg

SEQ ID NO: 1094179 - DNA, 25 bp, Homo sapien
tttccaaagaggtcaagtattgctg

SEQ ID NO: 1094180 - DNA, 25 bp, Homo sapien
gcttctttctatataccacatcctg

SEQ ID NO: 1094181 - DNA, 25 bp, Homo sapien
ctttctatataccacatcctgagca

SEQ ID NO: 1094182 - DNA, 25 bp, Homo sapien
aagaggtcaagtattgctgttcctg

SEQ ID NO: 1094183 - DNA, 25 bp, Homo sapien
caaatatcgtaagacatgaccttca

SEQ ID NO: 1094184 - DNA, 25 bp, Homo sapien
tccacaaatatcgtaagacatgacc

SEQ ID NO: 1094185 - DNA, 25 bp, Homo sapien
ctttccacaaatatcgtaagacatg

SEQ ID NO: 1094186 - DNA, 25 bp, Homo sapien
cacaaatatcgtaagacatgacctt

SEQ ID NO: 1094187 - DNA, 25 bp, Homo sapien
gaacaccttggagaaatgtaatttc

SEQ ID NO: 1094188 - DNA, 25 bp, Homo sapien
ctgactcagtgctactctggccctt

SEQ ID NO: 1094189 - DNA, 25 bp, Homo sapien
cagtgctactctggcccttctggtg

SEQ ID NO: 1094190 - DNA, 25 bp, Homo sapien
aatttcccctgtctcaagcatcctg

SEQ ID NO: 1094191 - DNA, 25 bp, Homo sapien
tcttcattgtcctattgtcctctag

SEQ ID NO: 1094192 - DNA, 25 bp, Homo sapien
tcaaagtgaacaggtgttgctaatg

SEQ ID NO: 1094193 - DNA, 25 bp, Homo sapien
caacgtcaaagtgaacaggtgttgc

SEQ ID NO: 1094194 - DNA, 25 bp, Homo sapien
ctctaggcagaaatcaacgtcaaag

SEQ ID NO: 1094195 - DNA, 25 bp, Homo sapien
gttttagcaaggctgtagtatttat

SEQ ID NO: 1094196 - DNA, 25 bp, Homo sapien
cataggcccagtaatgagaccttga

SEQ ID NO: 1094197 - DNA, 25 bp, Homo sapien
cccttcccatgttgggctcttcctc

SEQ ID NO: 1094198 - DNA, 25 bp, Homo sapien
gcccagtaatgagaccttgaagaca

SEQ ID NO: 1094199 - DNA, 25 bp, Homo sapien
taatgagaccttgaagacatcccat

SEQ ID NO: 1094200 - DNA, 25 bp, Homo sapien
ctcagggagcccaatttgaaggagt

SEQ ID NO: 1094201 - DNA, 25 bp, Homo sapien
tcagggagcccaatttgaaggagtt

SEQ ID NO: 1094202 - DNA, 25 bp, Homo sapien
cagggagcccaatttgaaggagttg

SEQ ID NO: 1094203 - DNA, 25 bp, Homo sapien
agcaaccagcgggagccatcaggat

SEQ ID NO: 1094204 - DNA, 25 bp, Homo sapien
accagcgggagccatcaggattcat

SEQ ID NO: 1094205 - DNA, 25 bp, Homo sapien
ctagcaaccagcgggagccatcagg

SEQ ID NO: 1094206 - DNA, 25 bp, Homo sapien
caaccagcgggagccatcaggattc

SEQ ID NO: 1094207 - DNA, 25 bp, Homo sapien
tgccatcctgattaccagctcctgt

SEQ ID NO: 1094208 - DNA, 25 bp, Homo sapien
acacagcaggatggaatgtccccat

SEQ ID NO: 1094209 - DNA, 25 bp, Homo sapien
tattgcaaagctgttggccccttag

SEQ ID NO: 1094210 - DNA, 25 bp, Homo sapien
tttggaaggcctcaaaagtggcagc

SEQ ID NO: 1094211 - DNA, 25 bp, Homo sapien
caggtcaccccatgaagtggccaaa

SEQ ID NO: 1094212 - DNA, 25 bp, Homo sapien
accaaggctgccatgcccgaggtca

SEQ ID NO: 1094213 - DNA, 25 bp, Homo sapien
cgaggtcagctacccaactcactct

SEQ ID NO: 1094214 - DNA, 25 bp, Homo sapien
tctccacctggcagtaccagctgga

SEQ ID NO: 1094215 - DNA, 25 bp, Homo sapien
aaagctgctacggtcatttgtgcac

SEQ ID NO: 1094216 - DNA, 25 bp, Homo sapien
tccaagttccctaagcggagcagtt

SEQ ID NO: 1094217 - DNA, 25 bp, Homo sapien
cagcagtgtgagagtctcagtgtcc

SEQ ID NO: 1094218 - DNA, 25 bp, Homo sapien
tgagtttgtccactcacctgttgga

SEQ ID NO: 1094219 - DNA, 25 bp, Homo sapien
ctggtatatctcgttcacaaggaaa

SEQ ID NO: 1094220 - DNA, 25 bp, Homo sapien
gaggaggagggtgatattgctgctg

SEQ ID NO: 1094221 - DNA, 25 bp, Homo sapien
atcctggtatatctcgttcacaagg

SEQ ID NO: 1094222 - DNA, 25 bp, Homo sapien
tatctcgttcacaaggaaagcccat

SEQ ID NO: 1094223 - DNA, 25 bp, Homo sapien
gtactgttcacagtctctcttggaa

SEQ ID NO: 1094224 - DNA, 25 bp, Homo sapien
tggtgttccccaggtactgttcaca

SEQ ID NO: 1094225 - DNA, 25 bp, Homo sapien
gcaaagaaacttaacaagacacact

SEQ ID NO: 1094226 - DNA, 25 bp, Homo sapien
cttctgggtaacctgtaatggttgg

SEQ ID NO: 1094227 - DNA, 25 bp, Homo sapien
tgggtaacctgtaatggttggagcc

SEQ ID NO: 1094228 - DNA, 25 bp, Homo sapien
tgtaatggttggagccctgcctcac

SEQ ID NO: 1094229 - DNA, 25 bp, Homo sapien
taacctgtaatggttggagccctgc

SEQ ID NO: 1094230 - DNA, 25 bp, Homo sapien
agaattcccttcagaatacggcaac

SEQ ID NO: 1094231 - DNA, 25 bp, Homo sapien
tttgtctatatgtttggaggagaaa

SEQ ID NO: 1094232 - DNA, 25 bp, Homo sapien
tcagtccagaattcctcttatggta

SEQ ID NO: 1094233 - DNA, 25 bp, Homo sapien
gaagtgtctgaaatgacttcataac

SEQ ID NO: 1094234 - DNA, 25 bp, Homo sapien
gagcctttccaggaaaaatgctctt

SEQ ID NO: 1094235 - DNA, 25 bp, Homo sapien
tgtagaatggaactcaaccagtgag

SEQ ID NO: 1094236 - DNA, 25 bp, Homo sapien
gttccctgcgtttgggcttttgtga

SEQ ID NO: 1094237 - DNA, 25 bp, Homo sapien
gaagcagtgtacagctgccttatat

SEQ ID NO: 1094238 - DNA, 25 bp, Homo sapien
gctgccttatatagttgcaatgggc

SEQ ID NO: 1094239 - DNA, 25 bp, Homo sapien
aagggctgttccctgcgtttgggct

SEQ ID NO: 1094240 - DNA, 25 bp, Homo sapien
agcatacctctctgtgtttgccaaa

SEQ ID NO: 1094241 - DNA, 25 bp, Homo sapien
tacctctctgtgtttgccaaaggta

SEQ ID NO: 1094242 - DNA, 25 bp, Homo sapien
ctcttctatgagcatacctctctgt

SEQ ID NO: 1094243 - DNA, 25 bp, Homo sapien
catacctctctgtgtttgccaaagg

SEQ ID NO: 1094244 - DNA, 25 bp, Homo sapien
ctgggataacggagaacaaggatac

SEQ ID NO: 1094245 - DNA, 25 bp, Homo sapien
tgcaaggaccttagagactgatgac

SEQ ID NO: 1094246 - DNA, 25 bp, Homo sapien
cattgaaagtagtgtgacagaagcc

SEQ ID NO: 1094247 - DNA, 25 bp, Homo sapien
gatacattcattccgatagggatgg

SEQ ID NO: 1094248 - DNA, 25 bp, Homo sapien
aaacatctgccctctaccctaaagg

SEQ ID NO: 1094249 - DNA, 25 bp, Homo sapien
cctctgtatcacgtaaaataggcat

SEQ ID NO: 1094250 - DNA, 25 bp, Homo sapien
actctcttcgatgatgtcttgtaag

SEQ ID NO: 1094251 - DNA, 25 bp, Homo sapien
tgtcttgtaagtttggaaatgcctc

SEQ ID NO: 1094252 - DNA, 25 bp, Homo sapien
tctgtatgactgaagctgaggtccg

SEQ ID NO: 1094253 - DNA, 25 bp, Homo sapien
gagccatgacgtctgaggagtactg

SEQ ID NO: 1094254 - DNA, 25 bp, Homo sapien
gatgttggagtcagagaacaggcac

SEQ ID NO: 1094255 - DNA, 25 bp, Homo sapien
gctggaatcagcgagaagggactat

SEQ ID NO: 1094256 - DNA, 25 bp, Homo sapien
tccatactgtgatcgtccctctttc

SEQ ID NO: 1094257 - DNA, 25 bp, Homo sapien
ccatactgtgatcgtccctctttct

SEQ ID NO: 1094258 - DNA, 25 bp, Homo sapien
catactgtgatcgtccctctttctc

SEQ ID NO: 1094259 - DNA, 25 bp, Homo sapien
tttccatactgtgatcgtccctctt

SEQ ID NO: 1094260 - DNA, 25 bp, Homo sapien
cttctccttggagatgacctaacag

SEQ ID NO: 1094261 - DNA, 25 bp, Homo sapien
tccttggagatgacctaacagagta

SEQ ID NO: 1094262 - DNA, 25 bp, Homo sapien
ccttggagatgacctaacagagtac

SEQ ID NO: 1094263 - DNA, 25 bp, Homo sapien
tctccttggagatgacctaacagag

SEQ ID NO: 1094264 - DNA, 25 bp, Homo sapien
agggcctgctccaggacatcagctc

SEQ ID NO: 1094265 - DNA, 25 bp, Homo sapien
tgaaacagaagggaacagaggaacc

SEQ ID NO: 1094266 - DNA, 25 bp, Homo sapien
gggaacagaggaaccacatcagaca

SEQ ID NO: 1094267 - DNA, 25 bp, Homo sapien
gaagggaacagaggaaccacatcag

SEQ ID NO: 1094268 - DNA, 25 bp, Homo sapien
tggccaagaggcatgccggcagcta

SEQ ID NO: 1094269 - DNA, 25 bp, Homo sapien
tataggtaacatcatgcacagggcc

SEQ ID NO: 1094270 - DNA, 25 bp, Homo sapien
caaggatactgaacaagctggccaa

SEQ ID NO: 1094271 - DNA, 25 bp, Homo sapien
acagggcccaaggatactgaacaag

SEQ ID NO: 1094272 - DNA, 25 bp, Homo sapien
gccagactctccacatattgagctt

SEQ ID NO: 1094273 - DNA, 25 bp, Homo sapien
ccagactctccacatattgagcttt

SEQ ID NO: 1094274 - DNA, 25 bp, Homo sapien
agccagactctccacatattgagct

SEQ ID NO: 1094275 - DNA, 25 bp, Homo sapien
tttgggcactggactgtctttgggt

SEQ ID NO: 1094276 - DNA, 25 bp, Homo sapien
tgggcactggactgtctttgggtct

SEQ ID NO: 1094277 - DNA, 25 bp, Homo sapien
attttgggcactggactgtctttgg

SEQ ID NO: 1094278 - DNA, 25 bp, Homo sapien
gcactggactgtctttgggtctcag

SEQ ID NO: 1094279 - DNA, 25 bp, Homo sapien
ttttatttacatggcctatgagcaa

SEQ ID NO: 1094280 - DNA, 25 bp, Homo sapien
ctatgagcaagtttgcaaagaaaca

SEQ ID NO: 1094281 - DNA, 25 bp, Homo sapien
caagctctggtagatccaaggtttt

SEQ ID NO: 1094282 - DNA, 25 bp, Homo sapien
acaagctctggtagatccaaggttt

SEQ ID NO: 1094283 - DNA, 25 bp, Homo sapien
caagaggaagaacagttggtgaaca

SEQ ID NO: 1094284 - DNA, 25 bp, Homo sapien
gtggatatttttatgcaagggttgc

SEQ ID NO: 1094285 - DNA, 25 bp, Homo sapien
gaaacgcgctctggcatctgaggat

SEQ ID NO: 1094286 - DNA, 25 bp, Homo sapien
ctgaggatgctgcataaggtatgcc

SEQ ID NO: 1094287 - DNA, 25 bp, Homo sapien
tgccacacggcctgggcttcccgtg

SEQ ID NO: 1094288 - DNA, 25 bp, Homo sapien
cttcccgtgccagacaacaccatct

SEQ ID NO: 1094289 - DNA, 25 bp, Homo sapien
ctgggcttcccgtgccagacaacac

SEQ ID NO: 1094290 - DNA, 25 bp, Homo sapien
acacggcctgggcttcccgtgccag

SEQ ID NO: 1094291 - DNA, 25 bp, Homo sapien
gtccaacgatagtttcactcacatg

SEQ ID NO: 1094292 - DNA, 25 bp, Homo sapien
tattgctaggtaacgaattacccca

SEQ ID NO: 1094293 - DNA, 25 bp, Homo sapien
tacattctgctagcaggtgagctga

SEQ ID NO: 1094294 - DNA, 25 bp, Homo sapien
tgagctgaggtgaaaagtccaacga

SEQ ID NO: 1094295 - DNA, 25 bp, Homo sapien
tggaaaggtgacctacaatctgcat

SEQ ID NO: 1094296 - DNA, 25 bp, Homo sapien
tcccatggaaaggtgacctacaatc

SEQ ID NO: 1094297 - DNA, 25 bp, Homo sapien
ggctcccatggaaaggtgacctaca

SEQ ID NO: 1094298 - DNA, 25 bp, Homo sapien
catggaaaggtgacctacaatctgc

SEQ ID NO: 1094299 - DNA, 25 bp, Homo sapien
cagacaatatttcggcatctgctga

SEQ ID NO: 1094300 - DNA, 25 bp, Homo sapien
agacaatatttcggcatctgctgag

SEQ ID NO: 1094301 - DNA, 25 bp, Homo sapien
tcagacaatatttcggcatctgctg

SEQ ID NO: 1094302 - DNA, 25 bp, Homo sapien
atgctccaggcatgcgatcgcatcc

SEQ ID NO: 1094303 - DNA, 25 bp, Homo sapien
tcccaagtatactcgttgtctttgc

SEQ ID NO: 1094304 - DNA, 25 bp, Homo sapien
tcttctccattagtaaccgaccagt

SEQ ID NO: 1094305 - DNA, 25 bp, Homo sapien
tctccattagtaaccgaccagtgtt

SEQ ID NO: 1094306 - DNA, 25 bp, Homo sapien
gctcatacaatggtgttcctgtcct

SEQ ID NO: 1094307 - DNA, 25 bp, Homo sapien
catctttcattctttatccccagaa

SEQ ID NO: 1094308 - DNA, 25 bp, Homo sapien
agtcacagtactgctcatacaatgg

SEQ ID NO: 1094309 - DNA, 25 bp, Homo sapien
cagtactgctcatacaatggtgttc

SEQ ID NO: 1094310 - DNA, 25 bp, Homo sapien
acaatgtacttctttgagtttttca

SEQ ID NO: 1094311 - DNA, 25 bp, Homo sapien
ctgacaatgcaagctgccctcttgt

SEQ ID NO: 1094312 - DNA, 25 bp, Homo sapien
tctgtttcctaggataaccagacat

SEQ ID NO: 1094313 - DNA, 25 bp, Homo sapien
catctttctgtgaggtagccgttca

SEQ ID NO: 1094314 - DNA, 25 bp, Homo sapien
gttcataccacttctgtttcctagg

SEQ ID NO: 1094315 - DNA, 25 bp, Homo sapien
gaggtagccgttcataccacttctg

SEQ ID NO: 1094316 - DNA, 25 bp, Homo sapien
ggagcttattaaacccaggtgagag

SEQ ID NO: 1094317 - DNA, 25 bp, Homo sapien
ttaagtgccagttgcatgctttgga

SEQ ID NO: 1094318 - DNA, 25 bp, Homo sapien
gaagccctggtgaagaaccacggtc

SEQ ID NO: 1094319 - DNA, 25 bp, Homo sapien
atggctgagtgctcagttggtaacc

SEQ ID NO: 1094320 - DNA, 25 bp, Homo sapien
cacagtgtagtaaatggacggctca

SEQ ID NO: 1094321 - DNA, 25 bp, Homo sapien
aatccatcaccccacagtgtagtaa

SEQ ID NO: 1094322 - DNA, 25 bp, Homo sapien
caccccacagtgtagtaaatggacg

SEQ ID NO: 1094323 - DNA, 25 bp, Homo sapien
ccatcaccccacagtgtagtaaatg

SEQ ID NO: 1094324 - DNA, 25 bp, Homo sapien
aggatagggtttgtcaggattcagg

SEQ ID NO: 1094325 - DNA, 25 bp, Homo sapien
gatagggtttgtcaggattcaggat

SEQ ID NO: 1094326 - DNA, 25 bp, Homo sapien
ggatagggtttgtcaggattcagga

SEQ ID NO: 1094327 - DNA, 25 bp, Homo sapien
atagggtttgtcaggattcaggatc

SEQ ID NO: 1094328 - DNA, 25 bp, Homo sapien
ccagtggcaagtgcttcccgctgcc

SEQ ID NO: 1094329 - DNA, 25 bp, Homo sapien
cagtggcaagtgcttcccgctgcca

SEQ ID NO: 1094330 - DNA, 25 bp, Homo sapien
agccctgaccaacctgctgtccttg

SEQ ID NO: 1094331 - DNA, 25 bp, Homo sapien
cagacccgtcggagtggggttgtgg

SEQ ID NO: 1094332 - DNA, 25 bp, Homo sapien
ccctcggtatggcagtaatgagtag

SEQ ID NO: 1094333 - DNA, 25 bp, Homo sapien
cggtatggcagtaatgagtaggtga

SEQ ID NO: 1094334 - DNA, 25 bp, Homo sapien
cccctcggtatggcagtaatgagta

SEQ ID NO: 1094335 - DNA, 25 bp, Homo sapien
ctcggtatggcagtaatgagtaggt

SEQ ID NO: 1094336 - DNA, 25 bp, Homo sapien
gtaacagccccgctcgcggagttgg

SEQ ID NO: 1094337 - DNA, 25 bp, Homo sapien
cattatcgccgggaacaatctgcat

SEQ ID NO: 1094338 - DNA, 25 bp, Homo sapien
ccagtaatgagaggatcttaatgcc

SEQ ID NO: 1094339 - DNA, 25 bp, Homo sapien
ttaatgccggcagtctcaagagtgg

SEQ ID NO: 1094340 - DNA, 25 bp, Homo sapien
tgtcgaaggcttggctctcagaagt

SEQ ID NO: 1094341 - DNA, 25 bp, Homo sapien
gctctcagaagttcccccaggatgg

SEQ ID NO: 1094342 - DNA, 25 bp, Homo sapien
gaaggcttggctctcagaagttccc

SEQ ID NO: 1094343 - DNA, 25 bp, Homo sapien
ccccaggatggtttcttctcttgcc

SEQ ID NO: 1094344 - DNA, 25 bp, Homo sapien
aaagagaagggtcaaagcttccctg

SEQ ID NO: 1094345 - DNA, 25 bp, Homo sapien
atattcctagcaatttggagagaca

SEQ ID NO: 1094346 - DNA, 25 bp, Homo sapien
tctgatcgtgatgctgaataaatgc

SEQ ID NO: 1094347 - DNA, 25 bp, Homo sapien
ttgaggactatatttgtgactaatt

SEQ ID NO: 1094348 - DNA, 25 bp, Homo sapien
tgtaatagtctgatcgtgatgctga

SEQ ID NO: 1094349 - DNA, 25 bp, Homo sapien
aatagtctgatcgtgatgctgaata

SEQ ID NO: 1094350 - DNA, 25 bp, Homo sapien
acaaccatgattccgtggataagac

SEQ ID NO: 1094351 - DNA, 25 bp, Homo sapien
ctttgacaaccatgattccgtggat

SEQ ID NO: 1094352 - DNA, 25 bp, Homo sapien
aaatactatactgtgaatggccaca

SEQ ID NO: 1094353 - DNA, 25 bp, Homo sapien
gaaatactatactgtgaatggccac

SEQ ID NO: 1094354 - DNA, 25 bp, Homo sapien
ctgtgaaaaaggtatttgttggtgg

SEQ ID NO: 1094355 - DNA, 25 bp, Homo sapien
ggtggaagagttgtggaaacagaga

SEQ ID NO: 1094356 - DNA, 25 bp, Homo sapien
gaaacagagagctgtctcaagagaa

SEQ ID NO: 1094357 - DNA, 25 bp, Homo sapien
caagagaagattcccaaagaccagg

SEQ ID NO: 1094358 - DNA, 25 bp, Homo sapien
tggatgcagccacaaatgcaaggcc

SEQ ID NO: 1094359 - DNA, 25 bp, Homo sapien
ttgctcctttctgcccgtggatgcc

SEQ ID NO: 1094360 - DNA, 25 bp, Homo sapien
ccactgatgagaacctgagaagcca

SEQ ID NO: 1094361 - DNA, 25 bp, Homo sapien
cactggagggctgagctttgacacc

SEQ ID NO: 1094362 - DNA, 25 bp, Homo sapien
ttaagatacattcgtcagcttgctc

SEQ ID NO: 1094363 - DNA, 25 bp, Homo sapien
gctgagttcttaaagactgaagaca

SEQ ID NO: 1094364 - DNA, 25 bp, Homo sapien
ctgaagacaggctattctctggaga

SEQ ID NO: 1094365 - DNA, 25 bp, Homo sapien
acccccatcccgatttagacctgcg

SEQ ID NO: 1094366 - DNA, 25 bp, Homo sapien
cgatctcgtgaagcccgcaaggacc

SEQ ID NO: 1094367 - DNA, 25 bp, Homo sapien
ccctactgcctatgagagatgtgcg

SEQ ID NO: 1094368 - DNA, 25 bp, Homo sapien
tcattcggtgggtgagcccctactg

SEQ ID NO: 1094369 - DNA, 25 bp, Homo sapien
ttggcctggactcgcctgatctttg

SEQ ID NO: 1094370 - DNA, 25 bp, Homo sapien
tcttcttaaactgcagatccaacca

SEQ ID NO: 1094371 - DNA, 25 bp, Homo sapien
tggaactcctggcaccgtagtgagt

SEQ ID NO: 1094372 - DNA, 25 bp, Homo sapien
cgtagtgagtgtcctcactctgcac

SEQ ID NO: 1094373 - DNA, 25 bp, Homo sapien
gaacctggggagcttgccatgtctc

SEQ ID NO: 1094374 - DNA, 25 bp, Homo sapien
cctggcaccgtagtgagtgtcctca

SEQ ID NO: 1094375 - DNA, 25 bp, Homo sapien
ttcagacgcatctgtgtgagggcga

SEQ ID NO: 1094376 - DNA, 25 bp, Homo sapien
tgttccttcagacgcatctgtgtga

SEQ ID NO: 1094377 - DNA, 25 bp, Homo sapien
tgcatgttccttcagacgcatctgt

SEQ ID NO: 1094378 - DNA, 25 bp, Homo sapien
atcctggtgcatgttccttcagacg

SEQ ID NO: 1094379 - DNA, 25 bp, Homo sapien
actgtgaccccagagcagccaaaag

SEQ ID NO: 1094380 - DNA, 25 bp, Homo sapien
cattctgttatttacagcactgtga

SEQ ID NO: 1094381 - DNA, 25 bp, Homo sapien
accccaaggccattttaacattctg

SEQ ID NO: 1094382 - DNA, 25 bp, Homo sapien
aatggaatgggcctcttcggacatt

SEQ ID NO: 1094383 - DNA, 25 bp, Homo sapien
gtgaaccaaacatcagtgccatgtc

SEQ ID NO: 1094384 - DNA, 25 bp, Homo sapien
gaaccaaacatcagtgccatgtcaa

SEQ ID NO: 1094385 - DNA, 25 bp, Homo sapien
ggtgaaccaaacatcagtgccatgt

SEQ ID NO: 1094386 - DNA, 25 bp, Homo sapien
tgaaccaaacatcagtgccatgtca

SEQ ID NO: 1094387 - DNA, 25 bp, Homo sapien
gctttaaggcaacctccatgtttgg

SEQ ID NO: 1094388 - DNA, 25 bp, Homo sapien
aacctccatgtttggttggcatcac

SEQ ID NO: 1094389 - DNA, 25 bp, Homo sapien
tcagactcaggttaatgctttaagg

SEQ ID NO: 1094390 - DNA, 25 bp, Homo sapien
gttcattcttcagactcaggttaat

SEQ ID NO: 1094391 - DNA, 25 bp, Homo sapien
ttattctttttgtgtgattattaac

SEQ ID NO: 1094392 - DNA, 25 bp, Homo sapien
ggtactttgtcagttagctgctggg

SEQ ID NO: 1094393 - DNA, 25 bp, Homo sapien
tcccaggtacagatgcagcatgagg

SEQ ID NO: 1094394 - DNA, 25 bp, Homo sapien
cactgaaagaccaagtgtggattcc

SEQ ID NO: 1094395 - DNA, 25 bp, Homo sapien
ctctgagacttgaggtggtccttgg

SEQ ID NO: 1094396 - DNA, 25 bp, Homo sapien
ccaaaggtagttgtaaattgctaat

SEQ ID NO: 1094397 - DNA, 25 bp, Homo sapien
aaggtagttgtaaattgctaatctc

SEQ ID NO: 1094398 - DNA, 25 bp, Homo sapien
caaaggtagttgtaaattgctaatc

SEQ ID NO: 1094399 - DNA, 25 bp, Homo sapien
gcccaaaggtagttgtaaattgcta

SEQ ID NO: 1094400 - DNA, 25 bp, Homo sapien
ctctccttccctggggccagcaggc

SEQ ID NO: 1094401 - DNA, 25 bp, Homo sapien
cttcttggattctcctctctccttc

SEQ ID NO: 1094402 - DNA, 25 bp, Homo sapien
ctccttccctggggccagcaggcat

SEQ ID NO: 1094403 - DNA, 25 bp, Homo sapien
ctctctccttccctggggccagcag

SEQ ID NO: 1094404 - DNA, 25 bp, Homo sapien
taagccacatttacatgcaactgcc

SEQ ID NO: 1094405 - DNA, 25 bp, Homo sapien
catcctttctggtaactttccagga

SEQ ID NO: 1094406 - DNA, 25 bp, Homo sapien
tgtaccaggacacatatcccttcct

SEQ ID NO: 1094407 - DNA, 25 bp, Homo sapien
tgcaactgcctcgaaactcatcctt

SEQ ID NO: 1094408 - DNA, 25 bp, Homo sapien
tcagctcgaagatgtcaaagtcact

SEQ ID NO: 1094409 - DNA, 25 bp, Homo sapien
gggtctctactgattaagtcactga

SEQ ID NO: 1094410 - DNA, 25 bp, Homo sapien
gggttgagcacaccttaacagatgg

SEQ ID NO: 1094411 - DNA, 25 bp, Homo sapien
acagatggactgtacatttctcaaa

SEQ ID NO: 1094412 - DNA, 25 bp, Homo sapien
ggctgaaccatattccataccacat

SEQ ID NO: 1094413 - DNA, 25 bp, Homo sapien
tctctttgatgtcagtgccaaggag

SEQ ID NO: 1094414 - DNA, 25 bp, Homo sapien
agagagttgtgatggctgaaccata

SEQ ID NO: 1094415 - DNA, 25 bp, Homo sapien
tgattatagcactgcctcttgcaag

SEQ ID NO: 1094416 - DNA, 25 bp, Homo sapien
tatgagcaaagggaagcaatttcac

SEQ ID NO: 1094417 - DNA, 25 bp, Homo sapien
gaaaatgccagcacttgccaagcag

SEQ ID NO: 1094418 - DNA, 25 bp, Homo sapien
tctggtcagagggaagattatgagc

SEQ ID NO: 1094419 - DNA, 25 bp, Homo sapien
tgttcaacatgatggagggagacaa

SEQ ID NO: 1094420 - DNA, 25 bp, Homo sapien
ttgatgactcctcaatactttccct

SEQ ID NO: 1094421 - DNA, 25 bp, Homo sapien
catgttggcgagaacattttgttga

SEQ ID NO: 1094422 - DNA, 25 bp, Homo sapien
gatgactcctcaatactttccctgg

SEQ ID NO: 1094423 - DNA, 25 bp, Homo sapien
tgttggcgagaacattttgttgatt

SEQ ID NO: 1094424 - DNA, 25 bp, Homo sapien
gaatgattggttgagaataatagaa

SEQ ID NO: 1094425 - DNA, 25 bp, Homo sapien
tatgttgtgaatgattggttgagaa

SEQ ID NO: 1094426 - DNA, 25 bp, Homo sapien
tgtgaatgattggttgagaataata

SEQ ID NO: 1094427 - DNA, 25 bp, Homo sapien
tactcgtatgttgtgaatgattggt

SEQ ID NO: 1094428 - DNA, 25 bp, Homo sapien
ggtgtgagattggagatagagcagc

SEQ ID NO: 1094429 - DNA, 25 bp, Homo sapien
cttcttcccctggtgatggatgacc

SEQ ID NO: 1094430 - DNA, 25 bp, Homo sapien
agattggagatagagcagcctttgg

SEQ ID NO: 1094431 - DNA, 25 bp, Homo sapien
gatgaccccttgtctggggtgtgag

SEQ ID NO: 1094432 - DNA, 25 bp, Homo sapien
gccttgcctgaaagattaagctgct

SEQ ID NO: 1094433 - DNA, 25 bp, Homo sapien
tgctttgggatccagacctgcatct

SEQ ID NO: 1094434 - DNA, 25 bp, Homo sapien
tgtatgtgtgtagattcgactctcc

SEQ ID NO: 1094435 - DNA, 25 bp, Homo sapien
taagctgcttaacgatgtcttcctc

SEQ ID NO: 1094436 - DNA, 25 bp, Homo sapien
acctgctgtgaacatctagtgattt

SEQ ID NO: 1094437 - DNA, 25 bp, Homo sapien
cacctgctgtgaacatctagtgatt

SEQ ID NO: 1094438 - DNA, 25 bp, Homo sapien
cctgctgtgaacatctagtgatttc

SEQ ID NO: 1094439 - DNA, 25 bp, Homo sapien
ctgctgtgaacatctagtgatttct

SEQ ID NO: 1094440 - DNA, 25 bp, Homo sapien
tttttgggctcaacaaatacagcag

SEQ ID NO: 1094441 - DNA, 25 bp, Homo sapien
cgaagtatctctcgttgcattcatt

SEQ ID NO: 1094442 - DNA, 25 bp, Homo sapien
acagcagccatcttacttggaacac

SEQ ID NO: 1094443 - DNA, 25 bp, Homo sapien
tgcccttcttcctcgaagtatctct

SEQ ID NO: 1094444 - DNA, 25 bp, Homo sapien
aggtcctgcttgggcccttgcgtac

SEQ ID NO: 1094445 - DNA, 25 bp, Homo sapien
tactttcggggttctggtctgcctc

SEQ ID NO: 1094446 - DNA, 25 bp, Homo sapien
gggcccttgcgtactcacctgtagt

SEQ ID NO: 1094447 - DNA, 25 bp, Homo sapien
cctgtcactctactctgcagacacc

SEQ ID NO: 1094448 - DNA, 25 bp, Homo sapien
tcttcagattcgttgggctgaaaac

SEQ ID NO: 1094449 - DNA, 25 bp, Homo sapien
tttatcagatctagttctgcctccc

SEQ ID NO: 1094450 - DNA, 25 bp, Homo sapien
cctcctcttgcagagcaataaagaa

SEQ ID NO: 1094451 - DNA, 25 bp, Homo sapien
ctttgctgtcagatgtgtaaggcca

SEQ ID NO: 1094452 - DNA, 25 bp, Homo sapien
caagctctgagctatcactgactcc

SEQ ID NO: 1094453 - DNA, 25 bp, Homo sapien
gctatcactgactcccagataatgg

SEQ ID NO: 1094454 - DNA, 25 bp, Homo sapien
gctctgagctatcactgactcccag

SEQ ID NO: 1094455 - DNA, 25 bp, Homo sapien
gactcccagataatggaccaagtct

SEQ ID NO: 1094456 - DNA, 25 bp, Homo sapien
tgcactcttgccttgaaccgactat

SEQ ID NO: 1094457 - DNA, 25 bp, Homo sapien
gactatactgcacagggctactgct

SEQ ID NO: 1094458 - DNA, 25 bp, Homo sapien
tgaaccgactatactgcacagggct

SEQ ID NO: 1094459 - DNA, 25 bp, Homo sapien
tgcacagggctactgctccatctct

SEQ ID NO: 1094460 - DNA, 25 bp, Homo sapien
agttctttgttagtggtcaagccag

SEQ ID NO: 1094461 - DNA, 25 bp, Homo sapien
gttagtggtcaagccagctgactgt

SEQ ID NO: 1094462 - DNA, 25 bp, Homo sapien
tgtcgttcaataaggacttgggctt

SEQ ID NO: 1094463 - DNA, 25 bp, Homo sapien
agctgactgtcgttcaataaggact

SEQ ID NO: 1094464 - DNA, 25 bp, Homo sapien
agctcctcgcactgcaggcagtttc

SEQ ID NO: 1094465 - DNA, 25 bp, Homo sapien
ctcctcgcactgcaggcagtttcct

SEQ ID NO: 1094466 - DNA, 25 bp, Homo sapien
tcctcgcactgcaggcagtttcctc

SEQ ID NO: 1094467 - DNA, 25 bp, Homo sapien
gctcctcgcactgcaggcagtttcc

SEQ ID NO: 1094468 - DNA, 25 bp, Homo sapien
ggtgagtgacttagagcccttccag

SEQ ID NO: 1094469 - DNA, 25 bp, Homo sapien
tatgtgtgccctgctctcgttcact

SEQ ID NO: 1094470 - DNA, 25 bp, Homo sapien
ttctgagcctttgatatcctgggac

SEQ ID NO: 1094471 - DNA, 25 bp, Homo sapien
aagtctgatcctagggaaccactgg

SEQ ID NO: 1094472 - DNA, 25 bp, Homo sapien
gatcgacactcgtcttgggtcccag

SEQ ID NO: 1094473 - DNA, 25 bp, Homo sapien
ggagaccatttgttccctgctaaat

SEQ ID NO: 1094474 - DNA, 25 bp, Homo sapien
cagagcctgactgagtgcataatgt

SEQ ID NO: 1094475 - DNA, 25 bp, Homo sapien
ttaagtaagcgggtgctgtgtcccc

SEQ ID NO: 1094476 - DNA, 25 bp, Homo sapien
ccaggtcggtcaggccgcgccacct

SEQ ID NO: 1094477 - DNA, 25 bp, Homo sapien
gtcggtcaggccgcgccacctcttc

SEQ ID NO: 1094478 - DNA, 25 bp, Homo sapien
aggtcggtcaggccgcgccacctct

SEQ ID NO: 1094479 - DNA, 25 bp, Homo sapien
ggtcggtcaggccgcgccacctctt

SEQ ID NO: 1094480 - DNA, 25 bp, Homo sapien
cctcatttcatagacgccacagctg

SEQ ID NO: 1094481 - DNA, 25 bp, Homo sapien
atttcatagacgccacagctgaact

SEQ ID NO: 1094482 - DNA, 25 bp, Homo sapien
tcatttcatagacgccacagctgaa

SEQ ID NO: 1094483 - DNA, 25 bp, Homo sapien
ctcatttcatagacgccacagctga

SEQ ID NO: 1094484 - DNA, 25 bp, Homo sapien
tggcaaccgtgcacccatagactct

SEQ ID NO: 1094485 - DNA, 25 bp, Homo sapien
tgccatggcgccttttctgaaggat

SEQ ID NO: 1094486 - DNA, 25 bp, Homo sapien
caatgccaatgatagtgaagagcgt

SEQ ID NO: 1094487 - DNA, 25 bp, Homo sapien
gcaatcactctaatcaccgtggcaa

SEQ ID NO: 1094488 - DNA, 25 bp, Homo sapien
ggaaaatgggtagatggcacacaag

SEQ ID NO: 1094489 - DNA, 25 bp, Homo sapien
tcgtagttgcaagggtaggcacaca

SEQ ID NO: 1094490 - DNA, 25 bp, Homo sapien
tataaaggcattgcgctggctggct

SEQ ID NO: 1094491 - DNA, 25 bp, Homo sapien
tggagaaagaagctcgtagttgcaa

SEQ ID NO: 1094492 - DNA, 25 bp, Homo sapien
gacgttgtgtaaagggctttgcgaa

SEQ ID NO: 1094493 - DNA, 25 bp, Homo sapien
agaagggcggctctgaaaccacctt

SEQ ID NO: 1094494 - DNA, 25 bp, Homo sapien
taagctgatgtatgacgttgtgtaa

SEQ ID NO: 1094495 - DNA, 25 bp, Homo sapien
tgagaagggcggctctgaaaccacc

SEQ ID NO: 1094496 - DNA, 25 bp, Homo sapien
ttcaggaatgccttggactggtggg

SEQ ID NO: 1094497 - DNA, 25 bp, Homo sapien
atgccttggactggtgggcttgtct

SEQ ID NO: 1094498 - DNA, 25 bp, Homo sapien
aggtatcaggtaaggcaattcagga

SEQ ID NO: 1094499 - DNA, 25 bp, Homo sapien
caggtatcaggtaaggcaattcagg

SEQ ID NO: 1094500 - DNA, 25 bp, Homo sapien
aaagggtcacactcttctagccctg

SEQ ID NO: 1094501 - DNA, 25 bp, Homo sapien
ctggtgcaccgcctgattctgtatc

SEQ ID NO: 1094502 - DNA, 25 bp, Homo sapien
gattctgtatcccaaataaagggtc

SEQ ID NO: 1094503 - DNA, 25 bp, Homo sapien
cttaactggtgcaccgcctgattct

SEQ ID NO: 1094504 - DNA, 25 bp, Homo sapien
tttgttacccttggtagagatggcc

SEQ ID NO: 1094505 - DNA, 25 bp, Homo sapien
tgttacccttggtagagatggccag

SEQ ID NO: 1094506 - DNA, 25 bp, Homo sapien
ttacccttggtagagatggccagct

SEQ ID NO: 1094507 - DNA, 25 bp, Homo sapien
ttttgttacccttggtagagatggc

SEQ ID NO: 1094508 - DNA, 25 bp, Homo sapien
tgggttacttcagggacaacatctt

SEQ ID NO: 1094509 - DNA, 25 bp, Homo sapien
atatctacctttgggcagataagca

SEQ ID NO: 1094510 - DNA, 25 bp, Homo sapien
gataagcatggcagctgcatattta

SEQ ID NO: 1094511 - DNA, 25 bp, Homo sapien
tcagggacaacatctttggtgacaa

SEQ ID NO: 1094512 - DNA, 25 bp, Homo sapien
tatgcattgccttccttccagatct

SEQ ID NO: 1094513 - DNA, 25 bp, Homo sapien
caaaatgaacataagccctgtggtc

SEQ ID NO: 1094514 - DNA, 25 bp, Homo sapien
gccaggtaactgtgccatgggcaca

SEQ ID NO: 1094515 - DNA, 25 bp, Homo sapien
cactgaaacgactttgagaagactt

SEQ ID NO: 1094516 - DNA, 25 bp, Homo sapien
catagcctttgccagcggatcatat

SEQ ID NO: 1094517 - DNA, 25 bp, Homo sapien
tgatgtttgatgtttctgcgcatag

SEQ ID NO: 1094518 - DNA, 25 bp, Homo sapien
gatgtttctgcgcatagcctttgcc

SEQ ID NO: 1094519 - DNA, 25 bp, Homo sapien
tgccagcggatcatattactgggtc

SEQ ID NO: 1094520 - DNA, 25 bp, Homo sapien
tgggtttagtgctttccgcagaact

SEQ ID NO: 1094521 - DNA, 25 bp, Homo sapien
gttgccagcatgctatacttgtaga

SEQ ID NO: 1094522 - DNA, 25 bp, Homo sapien
tagtcttgaacctagcatatgccaa

SEQ ID NO: 1094523 - DNA, 25 bp, Homo sapien
acaggtgatctagtggttgccagca

SEQ ID NO: 1094524 - DNA, 25 bp, Homo sapien
tacagtcattagtactcctgggcca

SEQ ID NO: 1094525 - DNA, 25 bp, Homo sapien
tattaatacagtcattagtactcct

SEQ ID NO: 1094526 - DNA, 25 bp, Homo sapien
gtcattagtactcctgggccaattt

SEQ ID NO: 1094527 - DNA, 25 bp, Homo sapien
aatgcttagagcatttattaataca

SEQ ID NO: 1094528 - DNA, 25 bp, Homo sapien
atgaggcaatgggggcgtcacttgc

SEQ ID NO: 1094529 - DNA, 25 bp, Homo sapien
gcaatgggggcgtcacttgctggga

SEQ ID NO: 1094530 - DNA, 25 bp, Homo sapien
tgggggcgtcacttgctgggagagt

SEQ ID NO: 1094531 - DNA, 25 bp, Homo sapien
aatgggggcgtcacttgctgggaga

SEQ ID NO: 1094532 - DNA, 25 bp, Homo sapien
caagctagttcagatcactggcaga

SEQ ID NO: 1094533 - DNA, 25 bp, Homo sapien
caccaatgttcttagaggttgccca

SEQ ID NO: 1094534 - DNA, 25 bp, Homo sapien
gaatccagttccttcgggttgcatc

SEQ ID NO: 1094535 - DNA, 25 bp, Homo sapien
gctcagggactcaccaggcaaaatc

SEQ ID NO: 1094536 - DNA, 25 bp, Homo sapien
tcacaagctgttggcagccatactt

SEQ ID NO: 1094537 - DNA, 25 bp, Homo sapien
ttggcagccatactttttctcaagg

SEQ ID NO: 1094538 - DNA, 25 bp, Homo sapien
gatgtaatatataatactcacaagc

SEQ ID NO: 1094539 - DNA, 25 bp, Homo sapien
caacaactgaagatgtaatatataa

SEQ ID NO: 1094540 - DNA, 25 bp, Homo sapien
ttaaaaatcgcaatctgaaagagag

SEQ ID NO: 1094541 - DNA, 25 bp, Homo sapien
aaaaatcgcaatctgaaagagagca

SEQ ID NO: 1094542 - DNA, 25 bp, Homo sapien
taaaaatcgcaatctgaaagagagc

SEQ ID NO: 1094543 - DNA, 25 bp, Homo sapien
aaaatcgcaatctgaaagagagcat

SEQ ID NO: 1094544 - DNA, 25 bp, Homo sapien
gagcagccagtctgatttcttgaca

SEQ ID NO: 1094545 - DNA, 25 bp, Homo sapien
agagcagccagtctgatttcttgac

SEQ ID NO: 1094546 - DNA, 25 bp, Homo sapien
agccagtctgatttcttgacataaa

SEQ ID NO: 1094547 - DNA, 25 bp, Homo sapien
gcagccagtctgatttcttgacata

SEQ ID NO: 1094548 - DNA, 25 bp, Homo sapien
gctttgagctctggccgagaggata

SEQ ID NO: 1094549 - DNA, 25 bp, Homo sapien
cctcctgcacgatgggggtttctgc

SEQ ID NO: 1094550 - DNA, 25 bp, Homo sapien
cgagaggataattcctctcctgcac

SEQ ID NO: 1094551 - DNA, 25 bp, Homo sapien
tcaagtcctcctgcacgatgggggt

SEQ ID NO: 1094552 - DNA, 25 bp, Homo sapien
cacagggttcatagcatgttcacca

SEQ ID NO: 1094553 - DNA, 25 bp, Homo sapien
tactactctaagtgctttgttgtca

SEQ ID NO: 1094554 - DNA, 25 bp, Homo sapien
gctgcatcagtggactctttctatc

SEQ ID NO: 1094555 - DNA, 25 bp, Homo sapien
catccttagggtccacttctaattc

SEQ ID NO: 1094556 - DNA, 25 bp, Homo sapien
gtgagtcttgaatgcccctgaaaac

SEQ ID NO: 1094557 - DNA, 25 bp, Homo sapien
agatctgtgactcctcgtgtggctt

SEQ ID NO: 1094558 - DNA, 25 bp, Homo sapien
cacactctaacccagggctgtctat

SEQ ID NO: 1094559 - DNA, 25 bp, Homo sapien
gggctgtctatgttcacactcttca

SEQ ID NO: 1094560 - DNA, 25 bp, Homo sapien
gcaggcaatctctcctgtccctgga

SEQ ID NO: 1094561 - DNA, 25 bp, Homo sapien
ggcaggcaatctctcctgtccctgg

SEQ ID NO: 1094562 - DNA, 25 bp, Homo sapien
actgaactgcagttgttaaaaggcc

SEQ ID NO: 1094563 - DNA, 25 bp, Homo sapien
caggcaatctctcctgtccctggaa

SEQ ID NO: 1094564 - DNA, 25 bp, Homo sapien
gggcttggaggagggtctgagtgat

SEQ ID NO: 1094565 - DNA, 25 bp, Homo sapien
tctgagtgatggtgatggagtccca

SEQ ID NO: 1094566 - DNA, 25 bp, Homo sapien
ggagggtctgagtgatggtgatgga

SEQ ID NO: 1094567 - DNA, 25 bp, Homo sapien
ctagtaagtgcaaagggcttggagg

SEQ ID NO: 1094568 - DNA, 25 bp, Homo sapien
tatgaggaccctaggcagaggacag

SEQ ID NO: 1094569 - DNA, 25 bp, Homo sapien
caggatcctctcatagaagctgaat

SEQ ID NO: 1094570 - DNA, 25 bp, Homo sapien
tagtgtctgtatgggccggactgcc

SEQ ID NO: 1094571 - DNA, 25 bp, Homo sapien
tcatttccgcttctagccaaagaaa

SEQ ID NO: 1094572 - DNA, 25 bp, Homo sapien
ctaaagcagaatattgtagactaat

SEQ ID NO: 1094573 - DNA, 25 bp, Homo sapien
aagcattaatgtcctggtagcagtc

SEQ ID NO: 1094574 - DNA, 25 bp, Homo sapien
taaagcattaatgtcctggtagcag

SEQ ID NO: 1094575 - DNA, 25 bp, Homo sapien
tagactaatacaatctgtaaagcat

SEQ ID NO: 1094576 - DNA, 25 bp, Homo sapien
tcagacacataagagacacgtgtga

SEQ ID NO: 1094577 - DNA, 25 bp, Homo sapien
tatgtaaggtcaatactgtcactgt

SEQ ID NO: 1094578 - DNA, 25 bp, Homo sapien
actactcactgttcgacttgtttca

SEQ ID NO: 1094579 - DNA, 25 bp, Homo sapien
tgagtaggccgaaagacctttaaga

SEQ ID NO: 1094580 - DNA, 25 bp, Homo sapien
gcttcagagacatcacttgtttaat

SEQ ID NO: 1094581 - DNA, 25 bp, Homo sapien
gcaagatgcaatttagtagctgggc

SEQ ID NO: 1094582 - DNA, 25 bp, Homo sapien
cgagctgaggagtaagcaagatgca

SEQ ID NO: 1094583 - DNA, 25 bp, Homo sapien
tcttttctgtcttcgagctgaggag

SEQ ID NO: 1094584 - DNA, 25 bp, Homo sapien
attaaattgaggtaataatctctct

SEQ ID NO: 1094585 - DNA, 25 bp, Homo sapien
cttctgggagtattaaattgaggta

SEQ ID NO: 1094586 - DNA, 25 bp, Homo sapien
aatgcattgccccttctgggagtat

SEQ ID NO: 1094587 - DNA, 25 bp, Homo sapien
ctgatggaatgcattgccccttctg

SEQ ID NO: 1094588 - DNA, 25 bp, Homo sapien
ggagcggacaaataattggtgattg

SEQ ID NO: 1094589 - DNA, 25 bp, Homo sapien
tatgcatggacacagttgatttgca

SEQ ID NO: 1094590 - DNA, 25 bp, Homo sapien
ttgcatatccaaatactcagggctg

SEQ ID NO: 1094591 - DNA, 25 bp, Homo sapien
gctgtggagcggacaaataattggt

SEQ ID NO: 1094592 - DNA, 25 bp, Homo sapien
aggcagaaaatatgttgcaccaacc

SEQ ID NO: 1094593 - DNA, 25 bp, Homo sapien
aatccatgcactgttctatggaaag

SEQ ID NO: 1094594 - DNA, 25 bp, Homo sapien
gcagaaaatatgttgcaccaaccta

SEQ ID NO: 1094595 - DNA, 25 bp, Homo sapien
caacctaatacccaatccatgcact

SEQ ID NO: 1094596 - DNA, 25 bp, Homo sapien
gttatgggcgagagatggtagtgac

SEQ ID NO: 1094597 - DNA, 25 bp, Homo sapien
ctggcagctgtgaagatagatcgga

SEQ ID NO: 1094598 - DNA, 25 bp, Homo sapien
cagagttggcctgttgagagatcat

SEQ ID NO: 1094599 - DNA, 25 bp, Homo sapien
tcggaatccatgtgcgcagtgccag

SEQ ID NO: 1094600 - DNA, 25 bp, Homo sapien
gactgactgggaagtatggaaagct

SEQ ID NO: 1094601 - DNA, 25 bp, Homo sapien
ttctggaactgagaggtggccccag

SEQ ID NO: 1094602 - DNA, 25 bp, Homo sapien
taaactcaggagtattactatggcc

SEQ ID NO: 1094603 - DNA, 25 bp, Homo sapien
tctgcttgccatatagactgactgg

SEQ ID NO: 1094604 - DNA, 25 bp, Homo sapien
acctcattatccacacatgggagca

SEQ ID NO: 1094605 - DNA, 25 bp, Homo sapien
tgagagaagccctacagtctggctg

SEQ ID NO: 1094606 - DNA, 25 bp, Homo sapien
gagtcggcttgcaaagaggaatgcc

SEQ ID NO: 1094607 - DNA, 25 bp, Homo sapien
cctccgggtactgtatgagtcggct

SEQ ID NO: 1094608 - DNA, 25 bp, Homo sapien
cacctaggacgtggagatgggctac

SEQ ID NO: 1094609 - DNA, 25 bp, Homo sapien
actgccactgagagggccctcagtg

SEQ ID NO: 1094610 - DNA, 25 bp, Homo sapien
gtggtcatgtgctcaccctgctcag

SEQ ID NO: 1094611 - DNA, 25 bp, Homo sapien
gagtcaaatacccacccacagaact

SEQ ID NO: 1094612 - DNA, 25 bp, Homo sapien
tactctataaacgtggatggaccac

SEQ ID NO: 1094613 - DNA, 25 bp, Homo sapien
agagcctcaattccagtagctggga

SEQ ID NO: 1094614 - DNA, 25 bp, Homo sapien
tcatgcacgcgtggatgtatccaag

SEQ ID NO: 1094615 - DNA, 25 bp, Homo sapien
gaagggatgcaagcgttttactcag

SEQ ID NO: 1094616 - DNA, 25 bp, Homo sapien
tatttgcagtagtgtaggctttgtt

SEQ ID NO: 1094617 - DNA, 25 bp, Homo sapien
tgcagtagtgtaggctttgtttcaa

SEQ ID NO: 1094618 - DNA, 25 bp, Homo sapien
ctattatttgcagtagtgtaggctt

SEQ ID NO: 1094619 - DNA, 25 bp, Homo sapien
tctattatttgcagtagtgtaggct

SEQ ID NO: 1094620 - DNA, 25 bp, Homo sapien
gttgggacagtgtgagcaaagactc

SEQ ID NO: 1094621 - DNA, 25 bp, Homo sapien
agactcgcgagtaggaatatagcca

SEQ ID NO: 1094622 - DNA, 25 bp, Homo sapien
gattgctacagataggctgacagga

SEQ ID NO: 1094623 - DNA, 25 bp, Homo sapien
aatttcgagaggcaggattccagta

SEQ ID NO: 1094624 - DNA, 25 bp, Homo sapien
tggtggaaacagaacccgaggtagc

SEQ ID NO: 1094625 - DNA, 25 bp, Homo sapien
aaacagaacccgaggtagctgcagc

SEQ ID NO: 1094626 - DNA, 25 bp, Homo sapien
aacccgaggtagctgcagcccttgg

SEQ ID NO: 1094627 - DNA, 25 bp, Homo sapien
gccaagaatcttggtggaaacagaa

SEQ ID NO: 1094628 - DNA, 25 bp, Homo sapien
tgtgaagtcctacaatcaataaatg

SEQ ID NO: 1094629 - DNA, 25 bp, Homo sapien
gtcctacaatcaataaatgccttct

SEQ ID NO: 1094630 - DNA, 25 bp, Homo sapien
agatctttgtgaagtcctacaatca

SEQ ID NO: 1094631 - DNA, 25 bp, Homo sapien
taaatgccttctactaaagctagtg

SEQ ID NO: 1094632 - DNA, 25 bp, Homo sapien
agcccctcgatggagcagctcatag

SEQ ID NO: 1094633 - DNA, 25 bp, Homo sapien
cagctcataggccatttgatcccgt

SEQ ID NO: 1094634 - DNA, 25 bp, Homo sapien
gtgtttgtagcctgccatttctgtg

SEQ ID NO: 1094635 - DNA, 25 bp, Homo sapien
tgtagtcttgactttgcatcccagg

SEQ ID NO: 1094636 - DNA, 25 bp, Homo sapien
agggccttctcttgctctggcccac

SEQ ID NO: 1094637 - DNA, 25 bp, Homo sapien
ccagggccttctcttgctctggccc

SEQ ID NO: 1094638 - DNA, 25 bp, Homo sapien
cagggccttctcttgctctggccca

SEQ ID NO: 1094639 - DNA, 25 bp, Homo sapien
ccttgggattgagggtatccagact

SEQ ID NO: 1094640 - DNA, 25 bp, Homo sapien
gtgccattttaatgagacttgaagt

SEQ ID NO: 1094641 - DNA, 25 bp, Homo sapien
taccctgaaccgctaaaaattgcta

SEQ ID NO: 1094642 - DNA, 25 bp, Homo sapien
aattgctactggttgagatgccttg

SEQ ID NO: 1094643 - DNA, 25 bp, Homo sapien
cacagatggtcccagtggacaaccc

SEQ ID NO: 1094644 - DNA, 25 bp, Homo sapien
gggcattcacccacaatcttggaga

SEQ ID NO: 1094645 - DNA, 25 bp, Homo sapien
catttctgcagtgtgccgttccctg

SEQ ID NO: 1094646 - DNA, 25 bp, Homo sapien
tgcaagatccatttgcttggagctg

SEQ ID NO: 1094647 - DNA, 25 bp, Homo sapien
ttacagtgattggttgcacattttg

SEQ ID NO: 1094648 - DNA, 25 bp, Homo sapien
tggttgcacattttgtcgtcgttgt

SEQ ID NO: 1094649 - DNA, 25 bp, Homo sapien
gattggttgcacattttgtcgtcgt

SEQ ID NO: 1094650 - DNA, 25 bp, Homo sapien
cagtgattggttgcacattttgtcg

SEQ ID NO: 1094651 - DNA, 25 bp, Homo sapien
ggaaacgcaggctaggaagacacac

SEQ ID NO: 1094652 - DNA, 25 bp, Homo sapien
tttacgtgcatgtgacagcttgtcc

SEQ ID NO: 1094653 - DNA, 25 bp, Homo sapien
gattgcagagttaacgctcaacagc

SEQ ID NO: 1094654 - DNA, 25 bp, Homo sapien
tgcttggcggtgctcagactttctc

SEQ ID NO: 1094655 - DNA, 25 bp, Homo sapien
tccatatataagtgagactgtatag

SEQ ID NO: 1094656 - DNA, 25 bp, Homo sapien
gtggtaatcattattctactcacaa

SEQ ID NO: 1094657 - DNA, 25 bp, Homo sapien
gatttatccatactgttacaaatgg

SEQ ID NO: 1094658 - DNA, 25 bp, Homo sapien
tttgaccaacacctcctgattccta

SEQ ID NO: 1094659 - DNA, 25 bp, Homo sapien
gattccatcagtgctacaaggctgg

SEQ ID NO: 1094660 - DNA, 25 bp, Homo sapien
tgtcacattatcactggcccctaga

SEQ ID NO: 1094661 - DNA, 25 bp, Homo sapien
tcagggagtggtcatggcaactgct

SEQ ID NO: 1094662 - DNA, 25 bp, Homo sapien
gaatgttggacacgtgatctacctc

SEQ ID NO: 1094663 - DNA, 25 bp, Homo sapien
tacagttacctggtttttagcagcg

SEQ ID NO: 1094664 - DNA, 25 bp, Homo sapien
ctgacaaagtaaccgaactgggact

SEQ ID NO: 1094665 - DNA, 25 bp, Homo sapien
tgttcatcttgatataagtccagga

SEQ ID NO: 1094666 - DNA, 25 bp, Homo sapien
cgcaaaggtacatagtgaagtgact

SEQ ID NO: 1094667 - DNA, 25 bp, Homo sapien
gttgttcctaggcaagcagcccagc

SEQ ID NO: 1094668 - DNA, 25 bp, Homo sapien
gaaagttgttcctaggcaagcagcc

SEQ ID NO: 1094669 - DNA, 25 bp, Homo sapien
aagttgttcctaggcaagcagccca

SEQ ID NO: 1094670 - DNA, 25 bp, Homo sapien
gagaaagttgttcctaggcaagcag

SEQ ID NO: 1094671 - DNA, 25 bp, Homo sapien
tttggcagtcttcgagtctcttccc

SEQ ID NO: 1094672 - DNA, 25 bp, Homo sapien
ccttttggccggtactgccgtagag

SEQ ID NO: 1094673 - DNA, 25 bp, Homo sapien
tctttcttaaaatgcgtccctccaa

SEQ ID NO: 1094674 - DNA, 25 bp, Homo sapien
tgcagattcagaaccaggaagcctt

SEQ ID NO: 1094675 - DNA, 25 bp, Homo sapien
tacatattgggcagctggagcaatc

SEQ ID NO: 1094676 - DNA, 25 bp, Homo sapien
taatgtccagcttacagtgggtcca

SEQ ID NO: 1094677 - DNA, 25 bp, Homo sapien
tactctttggtctgtgtcccacggc

SEQ ID NO: 1094678 - DNA, 25 bp, Homo sapien
cacattggtaagaagctcagggtcc

SEQ ID NO: 1094679 - DNA, 25 bp, Homo sapien
attactgtaacatctgccaagggca

SEQ ID NO: 1094680 - DNA, 25 bp, Homo sapien
gctatttatcctatgcagggagtag

SEQ ID NO: 1094681 - DNA, 25 bp, Homo sapien
taacatctacaactggaggaagaca

SEQ ID NO: 1094682 - DNA, 25 bp, Homo sapien
cagacgggcagccaacaagagtgtt

SEQ ID NO: 1094683 - DNA, 25 bp, Homo sapien
acgtgtcttaatggcttgagtttat

SEQ ID NO: 1094684 - DNA, 25 bp, Homo sapien
attttatggggttgggggagatctg

SEQ ID NO: 1094685 - DNA, 25 bp, Homo sapien
gaaaaacgtgtcttaatggcttgag

SEQ ID NO: 1094686 - DNA, 25 bp, Homo sapien
aaaacgtgtcttaatggcttgagtt

SEQ ID NO: 1094687 - DNA, 25 bp, Homo sapien
caagggcgagtctctattccagggc

SEQ ID NO: 1094688 - DNA, 25 bp, Homo sapien
caagtatctgtatgacaacccggga

SEQ ID NO: 1094689 - DNA, 25 bp, Homo sapien
ggtttaatagatcctggcctcaggg

SEQ ID NO: 1094690 - DNA, 25 bp, Homo sapien
ttgtatcatggcctacccgaggaga

SEQ ID NO: 1094691 - DNA, 25 bp, Homo sapien
tatccataccatctaaaggtagtaa

SEQ ID NO: 1094692 - DNA, 25 bp, Homo sapien
caaagccttatccttacttggattc

SEQ ID NO: 1094693 - DNA, 25 bp, Homo sapien
agttgtcggataaaatcaaagcctt

SEQ ID NO: 1094694 - DNA, 25 bp, Homo sapien
catctaaaggtagtaagttgtcgga

SEQ ID NO: 1094695 - DNA, 25 bp, Homo sapien
cctggaccgatgtgactggagatgt

SEQ ID NO: 1094696 - DNA, 25 bp, Homo sapien
cagccctggaccgatgtgactggag

SEQ ID NO: 1094697 - DNA, 25 bp, Homo sapien
cactcagccctggaccgatgtgact

SEQ ID NO: 1094698 - DNA, 25 bp, Homo sapien
gccctggaccgatgtgactggagat

SEQ ID NO: 1094699 - DNA, 25 bp, Homo sapien
cagaattagagaacaatgaagtctc

SEQ ID NO: 1094700 - DNA, 25 bp, Homo sapien
tcccactaaggtcagaggaacaaca

SEQ ID NO: 1094701 - DNA, 25 bp, Homo sapien
gaggaacaacaaggactttcttgcc

SEQ ID NO: 1094702 - DNA, 25 bp, Homo sapien
ccatccctggtgtgagtcttgtgac

SEQ ID NO: 1094703 - DNA, 25 bp, Homo sapien
actaggaggtagttgctgtgtgcac

SEQ ID NO: 1094704 - DNA, 25 bp, Homo sapien
gaagatcagctgacagagccaggac

SEQ ID NO: 1094705 - DNA, 25 bp, Homo sapien
ggtttctggtaccttccaattggca

SEQ ID NO: 1094706 - DNA, 25 bp, Homo sapien
ggattgtatttgctcccacctccaa

SEQ ID NO: 1094707 - DNA, 25 bp, Homo sapien
tccctgagaacagttagagcattgg

SEQ ID NO: 1094708 - DNA, 25 bp, Homo sapien
ccgcctgtcttcatatggcacctga

SEQ ID NO: 1094709 - DNA, 25 bp, Homo sapien
cagttagagcattggctgctttacc

SEQ ID NO: 1094710 - DNA, 25 bp, Homo sapien
tactggagcaggacacgaataggaa

SEQ ID NO: 1094711 - DNA, 25 bp, Homo sapien
cagagctgtgggatgggcccctctc

SEQ ID NO: 1094712 - DNA, 25 bp, Homo sapien
ccctctcttcttctccggtctctac

SEQ ID NO: 1094713 - DNA, 25 bp, Homo sapien
tcagagctgtgggatgggcccctct

SEQ ID NO: 1094714 - DNA, 25 bp, Homo sapien
ggcccctctcttcttctccggtctc

SEQ ID NO: 1094715 - DNA, 25 bp, Homo sapien
ttgactggccatatgctcccaatcc

SEQ ID NO: 1094716 - DNA, 25 bp, Homo sapien
tgcccacactccaacccttctggtt

SEQ ID NO: 1094717 - DNA, 25 bp, Homo sapien
cgccatattactctgttccaacctt

SEQ ID NO: 1094718 - DNA, 25 bp, Homo sapien
tgcaggtttgactggccatatgctc

SEQ ID NO: 1094719 - DNA, 25 bp, Homo sapien
atcccgcaggaatgcactgactgat

SEQ ID NO: 1094720 - DNA, 25 bp, Homo sapien
ccatcttccaaatcccgcaggaatg

SEQ ID NO: 1094721 - DNA, 25 bp, Homo sapien
atgcactgactgatggagctaattc

SEQ ID NO: 1094722 - DNA, 25 bp, Homo sapien
cccatcttccaaatcccgcaggaat

SEQ ID NO: 1094723 - DNA, 25 bp, Homo sapien
atctggccacctcgggtgcttttgt

SEQ ID NO: 1094724 - DNA, 25 bp, Homo sapien
gagctggcagccaaattgggaagct

SEQ ID NO: 1094725 - DNA, 25 bp, Homo sapien
ggcagccaaattgggaagctgcccc

SEQ ID NO: 1094726 - DNA, 25 bp, Homo sapien
gccacctcgggtgcttttgtctctt

SEQ ID NO: 1094727 - DNA, 25 bp, Homo sapien
tctgtccgcacaggagagaagtgga

SEQ ID NO: 1094728 - DNA, 25 bp, Homo sapien
tataaggtaaaaggcccgaggctgc

SEQ ID NO: 1094729 - DNA, 25 bp, Homo sapien
ctggcggttctggtgtaaagttgct

SEQ ID NO: 1094730 - DNA, 25 bp, Homo sapien
agtggattctgaaagctggcggttc

SEQ ID NO: 1094731 - DNA, 25 bp, Homo sapien
agctgcctcctcaacgatttgtgct

SEQ ID NO: 1094732 - DNA, 25 bp, Homo sapien
gctgcctcctcaacgatttgtgctc

SEQ ID NO: 1094733 - DNA, 25 bp, Homo sapien
tcataccatacccacagcctcacta

SEQ ID NO: 1094734 - DNA, 25 bp, Homo sapien
aaagttccgggccatcattacttag

SEQ ID NO: 1094735 - DNA, 25 bp, Homo sapien
tccgggccatcattacttagatctg

SEQ ID NO: 1094736 - DNA, 25 bp, Homo sapien
gggccatcattacttagatctgcat

SEQ ID NO: 1094737 - DNA, 25 bp, Homo sapien
cagggaggctttgattactgacccc

SEQ ID NO: 1094738 - DNA, 25 bp, Homo sapien
gcaagtgtcctaagctatgtcatcc

SEQ ID NO: 1094739 - DNA, 25 bp, Homo sapien
taggctacgtaatctcatgagtaac

SEQ ID NO: 1094740 - DNA, 25 bp, Homo sapien
caatgaggtgcctttcttaactgac

SEQ ID NO: 1094741 - DNA, 25 bp, Homo sapien
gctgatcaccccaagagtggccgtt

SEQ ID NO: 1094742 - DNA, 25 bp, Homo sapien
tctggatggcttccctcggactgtg

SEQ ID NO: 1094743 - DNA, 25 bp, Homo sapien
gagttcaaccctccaaaagagccca

SEQ ID NO: 1094744 - DNA, 25 bp, Homo sapien
gaaatgctcgatgacctcatggaga

SEQ ID NO: 1094745 - DNA, 25 bp, Homo sapien
gactggtgtgttgtacgtgctctat

SEQ ID NO: 1094746 - DNA, 25 bp, Homo sapien
ggtgtgttgtacgtgctctatcttc

SEQ ID NO: 1094747 - DNA, 25 bp, Homo sapien
tccatagactggtgtgttgtacgtg

SEQ ID NO: 1094748 - DNA, 25 bp, Homo sapien
gtacgtgctctatcttctgtcaaga

SEQ ID NO: 1094749 - DNA, 25 bp, Homo sapien
tcatgatcaacaaaggcagttagaa

SEQ ID NO: 1094750 - DNA, 25 bp, Homo sapien
ccttgtcaagtttctccagagccct

SEQ ID NO: 1094751 - DNA, 25 bp, Homo sapien
tgttgccaatcctctctaacaggcc

SEQ ID NO: 1094752 - DNA, 25 bp, Homo sapien
cattcatgatcaacaaaggcagtta

SEQ ID NO: 1094753 - DNA, 25 bp, Homo sapien
ctaaaaagcagacatttggagggct

SEQ ID NO: 1094754 - DNA, 25 bp, Homo sapien
catgtccctggggtttacgcgttca

SEQ ID NO: 1094755 - DNA, 25 bp, Homo sapien
gagacagggctgtacaataggagcc

SEQ ID NO: 1094756 - DNA, 25 bp, Homo sapien
gctctatgtggcatgaagttccttc

SEQ ID NO: 1094757 - DNA, 25 bp, Homo sapien
acatatggcatggttattgataaac

SEQ ID NO: 1094758 - DNA, 25 bp, Homo sapien
ctagcgtgagttaaatagattagtc

SEQ ID NO: 1094759 - DNA, 25 bp, Homo sapien
ccaaatgctatcagtgtttgtggac

SEQ ID NO: 1094760 - DNA, 25 bp, Homo sapien
tgacatttcctcgtctcttaagaag

SEQ ID NO: 1094761 - DNA, 25 bp, Homo sapien
gatcagcatctctagtttaccagta

SEQ ID NO: 1094762 - DNA, 25 bp, Homo sapien
aatagttgcctccactaaatcagga

SEQ ID NO: 1094763 - DNA, 25 bp, Homo sapien
tatgccaagagctctaaacagaagt

SEQ ID NO: 1094764 - DNA, 25 bp, Homo sapien
taaatggcttcatgtgctattcccc

SEQ ID NO: 1094765 - DNA, 25 bp, Homo sapien
tccctgcccctaggagtggggttga

SEQ ID NO: 1094766 - DNA, 25 bp, Homo sapien
ccctgcccctaggagtggggttgag

SEQ ID NO: 1094767 - DNA, 25 bp, Homo sapien
gtagttttgaaactcgtgccacact

SEQ ID NO: 1094768 - DNA, 25 bp, Homo sapien
gcactgcagtttccacggttataga

SEQ ID NO: 1094769 - DNA, 25 bp, Homo sapien
aactcacaaggattacttgggacca

SEQ ID NO: 1094770 - DNA, 25 bp, Homo sapien
ggtcagtccctaatctgtagttttg

SEQ ID NO: 1094771 - DNA, 25 bp, Homo sapien
gcattatgattcttgtgggccctag

SEQ ID NO: 1094772 - DNA, 25 bp, Homo sapien
tagcgcttccccagtattagactta

SEQ ID NO: 1094773 - DNA, 25 bp, Homo sapien
tctggcttggctaatggaaatcgac

SEQ ID NO: 1094774 - DNA, 25 bp, Homo sapien
cagtggaacaggatcagtaagctca

SEQ ID NO: 1094775 - DNA, 25 bp, Homo sapien
tgtgccgggccagatgtgaactttt

SEQ ID NO: 1094776 - DNA, 25 bp, Homo sapien
gatcaggctgacctgacctcaagca

SEQ ID NO: 1094777 - DNA, 25 bp, Homo sapien
tgttagtatggataaatattggctt

SEQ ID NO: 1094778 - DNA, 25 bp, Homo sapien
gaggtgcaaagttcattgggatgat

SEQ ID NO: 1094779 - DNA, 25 bp, Homo sapien
gctggagtggagtagtagagtggtg

SEQ ID NO: 1094780 - DNA, 25 bp, Homo sapien
ggagtagtagagtggtgaaatcatg

SEQ ID NO: 1094781 - DNA, 25 bp, Homo sapien
aacacttaagtagtcagtggttcac

SEQ ID NO: 1094782 - DNA, 25 bp, Homo sapien
tcagaaaccagcgatgcacatgtgg

SEQ ID NO: 1094783 - DNA, 25 bp, Homo sapien
tagagtacatcctagttcatgcaaa

SEQ ID NO: 1094784 - DNA, 25 bp, Homo sapien
tggttggtggccactgtctagataa

SEQ ID NO: 1094785 - DNA, 25 bp, Homo sapien
tagcatggctgatgcagcaaagatt

SEQ ID NO: 1094786 - DNA, 25 bp, Homo sapien
gctgatgcagcaaagattctcaaag

SEQ ID NO: 1094787 - DNA, 25 bp, Homo sapien
ttccagaggcaaagcacaccagagc

SEQ ID NO: 1094788 - DNA, 25 bp, Homo sapien
tccagaggcaaagcacaccagagca

SEQ ID NO: 1094789 - DNA, 25 bp, Homo sapien
taagttctgctaacccacaatcatc

SEQ ID NO: 1094790 - DNA, 25 bp, Homo sapien
ggatgggggctgtataccaacttta

SEQ ID NO: 1094791 - DNA, 25 bp, Homo sapien
aaatttagcagtggatgggggctgt

SEQ ID NO: 1094792 - DNA, 25 bp, Homo sapien
ttagtaagttctgctaacccacaat

SEQ ID NO: 1094793 - DNA, 25 bp, Homo sapien
acttgtttcatccaagggcctcctt

SEQ ID NO: 1094794 - DNA, 25 bp, Homo sapien
gctggcctgagagagtaaattgtca

SEQ ID NO: 1094795 - DNA, 25 bp, Homo sapien
tagtaacttgtttcatccaagggcc

SEQ ID NO: 1094796 - DNA, 25 bp, Homo sapien
actggggtggctcaaaagcttaggc

SEQ ID NO: 1094797 - DNA, 25 bp, Homo sapien
cgagagtcagaggtagagctggaga

SEQ ID NO: 1094798 - DNA, 25 bp, Homo sapien
atttggatgtttcaaagatttgtgc

SEQ ID NO: 1094799 - DNA, 25 bp, Homo sapien
gtagagctggagatttggatgtttc

SEQ ID NO: 1094800 - DNA, 25 bp, Homo sapien
gctggagatttggatgtttcaaaga

SEQ ID NO: 1094801 - DNA, 25 bp, Homo sapien
tgcgcttcctgacgtcctgaacact

SEQ ID NO: 1094802 - DNA, 25 bp, Homo sapien
gctcttgaacataacccatttagct

SEQ ID NO: 1094803 - DNA, 25 bp, Homo sapien
gctcgcctaacctttgttctgccgg

SEQ ID NO: 1094804 - DNA, 25 bp, Homo sapien
cactggcagttggctcgcctaacct

SEQ ID NO: 1094805 - DNA, 25 bp, Homo sapien
tcagggcttagagccatacatgcaa

SEQ ID NO: 1094806 - DNA, 25 bp, Homo sapien
aaggcaaaagagactcaaaagccag

SEQ ID NO: 1094807 - DNA, 25 bp, Homo sapien
gggcttagagccatacatgcaatat

SEQ ID NO: 1094808 - DNA, 25 bp, Homo sapien
gaaaggcaaaagagactcaaaagcc

SEQ ID NO: 1094809 - DNA, 25 bp, Homo sapien
caactgtctcccctacacccctatt

SEQ ID NO: 1094810 - DNA, 25 bp, Homo sapien
atgccggttaggctaccaactgtct

SEQ ID NO: 1094811 - DNA, 25 bp, Homo sapien
cagatgccggttaggctaccaactg

SEQ ID NO: 1094812 - DNA, 25 bp, Homo sapien
taacagatgccggttaggctaccaa

SEQ ID NO: 1094813 - DNA, 25 bp, Homo sapien
actctttctccatccaggtattcat

SEQ ID NO: 1094814 - DNA, 25 bp, Homo sapien
ctttctccatccaggtattcattca

SEQ ID NO: 1094815 - DNA, 25 bp, Homo sapien
ggtttgggatatcaactctttctcc

SEQ ID NO: 1094816 - DNA, 25 bp, Homo sapien
aggtttgggatatcaactctttctc

SEQ ID NO: 1094817 - DNA, 25 bp, Homo sapien
ggcccaggcgccctcaggctgctat

SEQ ID NO: 1094818 - DNA, 25 bp, Homo sapien
cttccaagctcccactgggcccgac

SEQ ID NO: 1094819 - DNA, 25 bp, Homo sapien
ccaggcgccctcaggctgctatggt

SEQ ID NO: 1094820 - DNA, 25 bp, Homo sapien
ctgtttagcttcctggactgggccc

SEQ ID NO: 1094821 - DNA, 25 bp, Homo sapien
gccataggaagacgcataattgtat

SEQ ID NO: 1094822 - DNA, 25 bp, Homo sapien
tcagccataggaagacgcataattg

SEQ ID NO: 1094823 - DNA, 25 bp, Homo sapien
taggaagacgcataattgtatttct

SEQ ID NO: 1094824 - DNA, 25 bp, Homo sapien
aagacgcataattgtatttcttcca

SEQ ID NO: 1094825 - DNA, 25 bp, Homo sapien
tccagactccaagtattcaacacgg

SEQ ID NO: 1094826 - DNA, 25 bp, Homo sapien
cttccagactccaagtattcaacac

SEQ ID NO: 1094827 - DNA, 25 bp, Homo sapien
ttccagactccaagtattcaacacg

SEQ ID NO: 1094828 - DNA, 25 bp, Homo sapien
ccagactccaagtattcaacacggt

SEQ ID NO: 1094829 - DNA, 25 bp, Homo sapien
gctgtactaggcttgatctggagtc

SEQ ID NO: 1094830 - DNA, 25 bp, Homo sapien
tgtactaggcttgatctggagtctg

SEQ ID NO: 1094831 - DNA, 25 bp, Homo sapien
gctctggctgtactaggcttgatct

SEQ ID NO: 1094832 - DNA, 25 bp, Homo sapien
ctggctgtactaggcttgatctgga

SEQ ID NO: 1094833 - DNA, 25 bp, Homo sapien
gggtcccctccttattgcagagaag

SEQ ID NO: 1094834 - DNA, 25 bp, Homo sapien
ggtcccctccttattgcagagaagg

SEQ ID NO: 1094835 - DNA, 25 bp, Homo sapien
ttcttggtattgcttgggcctcact

SEQ ID NO: 1094836 - DNA, 25 bp, Homo sapien
aactccgtagatgttttaccttcat

SEQ ID NO: 1094837 - DNA, 25 bp, Homo sapien
actccgtagatgttttaccttcata

SEQ ID NO: 1094838 - DNA, 25 bp, Homo sapien
ttctcttcttggtattgcttgggcc

SEQ ID NO: 1094839 - DNA, 25 bp, Homo sapien
ttctgctggtgcagacccggagcca

SEQ ID NO: 1094840 - DNA, 25 bp, Homo sapien
agaatgtgcactacagcagcaccct

SEQ ID NO: 1094841 - DNA, 25 bp, Homo sapien
cagcagaatgtgcactacagcagca

SEQ ID NO: 1094842 - DNA, 25 bp, Homo sapien
ataagcacagacctttctgctggtg

SEQ ID NO: 1094843 - DNA, 25 bp, Homo sapien
tggctgaaattcgtgccagtcccga

SEQ ID NO: 1094844 - DNA, 25 bp, Homo sapien
gccagtcccgagaaaggtctgtggt

SEQ ID NO: 1094845 - DNA, 25 bp, Homo sapien
gaaattcgtgccagtcccgagaaag

SEQ ID NO: 1094846 - DNA, 25 bp, Homo sapien
cgtgccagtcccgagaaaggtctgt

SEQ ID NO: 1094847 - DNA, 25 bp, Homo sapien
tctctatccagtgcaactatggctg

SEQ ID NO: 1094848 - DNA, 25 bp, Homo sapien
tatccagtgcaactatggctgtctg

SEQ ID NO: 1094849 - DNA, 25 bp, Homo sapien
ctaagggcatatgctgatggcatct

SEQ ID NO: 1094850 - DNA, 25 bp, Homo sapien
tctatccagtgcaactatggctgtc

SEQ ID NO: 1094851 - DNA, 25 bp, Homo sapien
tgttcaaagctcacttccggtgagt

SEQ ID NO: 1094852 - DNA, 25 bp, Homo sapien
tcacttccggtgagtaatgagaggg

SEQ ID NO: 1094853 - DNA, 25 bp, Homo sapien
tgaagtgttcaaagctcacttccgg

SEQ ID NO: 1094854 - DNA, 25 bp, Homo sapien
gtgaagtccacggcactacggcttc

SEQ ID NO: 1094855 - DNA, 25 bp, Homo sapien
gatcaaactgactgggacaactatg

SEQ ID NO: 1094856 - DNA, 25 bp, Homo sapien
caactatgggaaactctaggacatc

SEQ ID NO: 1094857 - DNA, 25 bp, Homo sapien
gcagaacccacttattgaggcatag

SEQ ID NO: 1094858 - DNA, 25 bp, Homo sapien
tgccaaccagaccaggagccaatat

SEQ ID NO: 1094859 - DNA, 25 bp, Homo sapien
aagagaatagaaagtcaaagaccca

SEQ ID NO: 1094860 - DNA, 25 bp, Homo sapien
ataacttactttttctcttggagtg

SEQ ID NO: 1094861 - DNA, 25 bp, Homo sapien
gacccataagatgtggatatataaa

SEQ ID NO: 1094862 - DNA, 25 bp, Homo sapien
tttccatagcaggttgtatcatttg

SEQ ID NO: 1094863 - DNA, 25 bp, Homo sapien
cagactttggtgacggcatctcagg

SEQ ID NO: 1094864 - DNA, 25 bp, Homo sapien
ggaaatggtcaacactcaagaggaa

SEQ ID NO: 1094865 - DNA, 25 bp, Homo sapien
ggttataagagcaccaggccttggg

SEQ ID NO: 1094866 - DNA, 25 bp, Homo sapien
ggacctgatctttgtaagtgcccga

SEQ ID NO: 1094867 - DNA, 25 bp, Homo sapien
agacttcttcggtgggtcttaagtg

SEQ ID NO: 1094868 - DNA, 25 bp, Homo sapien
ttgaagacttcttcggtgggtctta

SEQ ID NO: 1094869 - DNA, 25 bp, Homo sapien
ctgaaaccgtgtccctttgaagact

SEQ ID NO: 1094870 - DNA, 25 bp, Homo sapien
cacagacctgaaaccgtgtcccttt

SEQ ID NO: 1094871 - DNA, 25 bp, Homo sapien
tcatagatgtagctccagacatggc

SEQ ID NO: 1094872 - DNA, 25 bp, Homo sapien
catgtggtagtgtccagaaagtccc

SEQ ID NO: 1094873 - DNA, 25 bp, Homo sapien
tatcaaaccttgcagaccaggctag

SEQ ID NO: 1094874 - DNA, 25 bp, Homo sapien
gcttaagtgtaggtcaagtgcccac

SEQ ID NO: 1094875 - DNA, 25 bp, Homo sapien
cactgcattgtgaacctgtttggct

SEQ ID NO: 1094876 - DNA, 25 bp, Homo sapien
ctctgcaggcactgcattgtgaacc

SEQ ID NO: 1094877 - DNA, 25 bp, Homo sapien
cattgtgaacctgtttggcttggct

SEQ ID NO: 1094878 - DNA, 25 bp, Homo sapien
tgcaggcactgcattgtgaacctgt

SEQ ID NO: 1094879 - DNA, 25 bp, Homo sapien
tcttggtcatataagggctggcagg

SEQ ID NO: 1094880 - DNA, 25 bp, Homo sapien
ttggtcatataagggctggcaggtc

SEQ ID NO: 1094881 - DNA, 25 bp, Homo sapien
gtcatataagggctggcaggtcctc

SEQ ID NO: 1094882 - DNA, 25 bp, Homo sapien
ttcttggtcatataagggctggcag

SEQ ID NO: 1094883 - DNA, 25 bp, Homo sapien
ttgatcttaggttcatgcttgaagg

SEQ ID NO: 1094884 - DNA, 25 bp, Homo sapien
gatgactaatctcttccagggtgta

SEQ ID NO: 1094885 - DNA, 25 bp, Homo sapien
caccttgggctgatgactaatctct

SEQ ID NO: 1094886 - DNA, 25 bp, Homo sapien
tccagggtgtattgattgatcttag

SEQ ID NO: 1094887 - DNA, 25 bp, Homo sapien
caaaggtaatcagatagtctcctgg

SEQ ID NO: 1094888 - DNA, 25 bp, Homo sapien
gagaacgaacacttctgtgctgaga

SEQ ID NO: 1094889 - DNA, 25 bp, Homo sapien
gatattttgtccatgccgcagcaat

SEQ ID NO: 1094890 - DNA, 25 bp, Homo sapien
caatgtctaatgaactctccttgcc

SEQ ID NO: 1094891 - DNA, 25 bp, Homo sapien
cactgttctcgggatgcccattgat

SEQ ID NO: 1094892 - DNA, 25 bp, Homo sapien
catgttattttcaccactgttctcg

SEQ ID NO: 1094893 - DNA, 25 bp, Homo sapien
tcgggatgcccattgatagtagtca

SEQ ID NO: 1094894 - DNA, 25 bp, Homo sapien
ttgcctcttctgtctcatgttattt

SEQ ID NO: 1094895 - DNA, 25 bp, Homo sapien
tgggtccatttgatacctgaaagaa

SEQ ID NO: 1094896 - DNA, 25 bp, Homo sapien
ttatgctacctgctccatgcttaca

SEQ ID NO: 1094897 - DNA, 25 bp, Homo sapien
tacctgaaagaaaatcttctcacaa

SEQ ID NO: 1094898 - DNA, 25 bp, Homo sapien
tctcacaaaatggtctagagcccac

SEQ ID NO: 1094899 - DNA, 25 bp, Homo sapien
tagtactccttaagaacacaaagcg

SEQ ID NO: 1094900 - DNA, 25 bp, Homo sapien
gaattgcttaccaaaggatagtgcg

SEQ ID NO: 1094901 - DNA, 25 bp, Homo sapien
tctggcctgccttcgttaactgtgt

SEQ ID NO: 1094902 - DNA, 25 bp, Homo sapien
ggctgagcctacagatgaactcttt

SEQ ID NO: 1094903 - DNA, 25 bp, Homo sapien
atcgcccggctggaggaaaaagtga

SEQ ID NO: 1094904 - DNA, 25 bp, Homo sapien
acatggagtcccaggagcggatcaa

SEQ ID NO: 1094905 - DNA, 25 bp, Homo sapien
cagtgggtgccaactcatgctaacg

SEQ ID NO: 1094906 - DNA, 25 bp, Homo sapien
cctccaagtgccgaaaaaggaagct

SEQ ID NO: 1094907 - DNA, 25 bp, Homo sapien
gagtcccggagccaacttttgcaag

SEQ ID NO: 1094908 - DNA, 25 bp, Homo sapien
caccggttgttgaacttgggcgagc

SEQ ID NO: 1094909 - DNA, 25 bp, Homo sapien
cgacttttcaaagccgggtagcgcg

SEQ ID NO: 1094910 - DNA, 25 bp, Homo sapien
gaaacgaccttctatgacgatgccc

SEQ ID NO: 1094911 - DNA, 25 bp, Homo sapien
cacccggccgggagtgcagagattt

SEQ ID NO: 1094912 - DNA, 25 bp, Homo sapien
tagaggctacccaggatatgcgccc

SEQ ID NO: 1094913 - DNA, 25 bp, Homo sapien
ccgggctccgagtactactgcgtga

SEQ ID NO: 1094914 - DNA, 25 bp, Homo sapien
tgtgtctagcgcttcctagaggcta

SEQ ID NO: 1094915 - DNA, 25 bp, Homo sapien
ggatgaagcctacagatatctggag

SEQ ID NO: 1094916 - DNA, 25 bp, Homo sapien
agtgagaggatgaagcctacagata

SEQ ID NO: 1094917 - DNA, 25 bp, Homo sapien
agcctacagatatctggaggaagag

SEQ ID NO: 1094918 - DNA, 25 bp, Homo sapien
gaggatgaagcctacagatatctgg

SEQ ID NO: 1094919 - DNA, 25 bp, Homo sapien
caacgaacggtatagcagagtggaa

SEQ ID NO: 1094920 - DNA, 25 bp, Homo sapien
aggacaagccctcacaccgtgtgac

SEQ ID NO: 1094921 - DNA, 25 bp, Homo sapien
gatgcagcccgataaagcgcgtggc

SEQ ID NO: 1094922 - DNA, 25 bp, Homo sapien
cattacaactcacccagcaggattc

SEQ ID NO: 1094923 - DNA, 25 bp, Homo sapien
ggacctgggtcctaataatgtaata

SEQ ID NO: 1094924 - DNA, 25 bp, Homo sapien
ggatccacagccttcaaacccaagt

SEQ ID NO: 1094925 - DNA, 25 bp, Homo sapien
gttacgcctctgtaaatccgctcag

SEQ ID NO: 1094926 - DNA, 25 bp, Homo sapien
ttaagtgatttacccaaggatccac

SEQ ID NO: 1094927 - DNA, 25 bp, Homo sapien
caaaaccaatgtagtcctggaggac

SEQ ID NO: 1094928 - DNA, 25 bp, Homo sapien
tcctgatttagcagccagaagcccc

SEQ ID NO: 1094929 - DNA, 25 bp, Homo sapien
gaaactaactggtctaggcgcctct

SEQ ID NO: 1094930 - DNA, 25 bp, Homo sapien
tattgaccagccaatcagtcaggtg

SEQ ID NO: 1094931 - DNA, 25 bp, Homo sapien
catgttctgagtgatcagtggagaa

SEQ ID NO: 1094932 - DNA, 25 bp, Homo sapien
tcccgaggcctgcgtagcggccgta

SEQ ID NO: 1094933 - DNA, 25 bp, Homo sapien
tgctcctccttttggccccgtggct

SEQ ID NO: 1094934 - DNA, 25 bp, Homo sapien
gactccgacggtctgagcctggatt

SEQ ID NO: 1094935 - DNA, 25 bp, Homo sapien
tacaatctcggtgacgataggtggg

SEQ ID NO: 1094936 - DNA, 25 bp, Homo sapien
ggtcaagccatttcaacgtgccgag

SEQ ID NO: 1094937 - DNA, 25 bp, Homo sapien
taactgtcacccaggaaaattcgcc

SEQ ID NO: 1094938 - DNA, 25 bp, Homo sapien
tctgggaagattcgggctgctgtct

SEQ ID NO: 1094939 - DNA, 25 bp, Homo sapien
acaaaggtatattgcctaatgctga

SEQ ID NO: 1094940 - DNA, 25 bp, Homo sapien
tgactgcatagtgttccgtggtgtg

SEQ ID NO: 1094941 - DNA, 25 bp, Homo sapien
tttttagtataattgagcttgtcac

SEQ ID NO: 1094942 - DNA, 25 bp, Homo sapien
gagcttgtcactcagatagtgagca

SEQ ID NO: 1094943 - DNA, 25 bp, Homo sapien
ccaccaccaccaccctcaccctcat

SEQ ID NO: 1094944 - DNA, 25 bp, Homo sapien
aaagaagcaaagcacacacaccacc

SEQ ID NO: 1094945 - DNA, 25 bp, Homo sapien
tactgaaagaagcaaagcacacaca

SEQ ID NO: 1094946 - DNA, 25 bp, Homo sapien
catactgaaagaagcaaagcacaca

SEQ ID NO: 1094947 - DNA, 25 bp, Homo sapien
catgtcaatcctatactgtgtgtca

SEQ ID NO: 1094948 - DNA, 25 bp, Homo sapien
aggctcatccgatcctgaaaggcta

SEQ ID NO: 1094949 - DNA, 25 bp, Homo sapien
ggctcagtaattaagagaagcagaa

SEQ ID NO: 1094950 - DNA, 25 bp, Homo sapien
tgtcatgagggctcctatcacttgg

SEQ ID NO: 1094951 - DNA, 25 bp, Homo sapien
tccaggttgcggttaccagttgaca

SEQ ID NO: 1094952 - DNA, 25 bp, Homo sapien
gaaattgccgcatccattcatcagg

SEQ ID NO: 1094953 - DNA, 25 bp, Homo sapien
cagggcagcactggctactctggag

SEQ ID NO: 1094954 - DNA, 25 bp, Homo sapien
gagggtctagaaacaatagcttcca

SEQ ID NO: 1094955 - DNA, 25 bp, Homo sapien
gacctgagcacttcctgcatgaaag

SEQ ID NO: 1094956 - DNA, 25 bp, Homo sapien
tttacacaggacctccgctgacctg

SEQ ID NO: 1094957 - DNA, 25 bp, Homo sapien
tcacttatgtggtgagttacttacc

SEQ ID NO: 1094958 - DNA, 25 bp, Homo sapien
tgggttcaaatcctcggctacatca

SEQ ID NO: 1094959 - DNA, 25 bp, Homo sapien
ggtcaaggataacccagacacattc

SEQ ID NO: 1094960 - DNA, 25 bp, Homo sapien
ccaaggtcggggactcaggaacttg

SEQ ID NO: 1094961 - DNA, 25 bp, Homo sapien
catctggtgtgctctggcagagtcc

SEQ ID NO: 1094962 - DNA, 25 bp, Homo sapien
caggaacttgggctctacggcatcc

SEQ ID NO: 1094963 - DNA, 25 bp, Homo sapien
acaccaaggcccgttttgctgtcct

SEQ ID NO: 1094964 - DNA, 25 bp, Homo sapien
ttctccagaagttacaccaaggccc

SEQ ID NO: 1094965 - DNA, 25 bp, Homo sapien
gtttctccagaagttacaccaaggc

SEQ ID NO: 1094966 - DNA, 25 bp, Homo sapien
ctccagaagttacaccaaggcccgt

SEQ ID NO: 1094967 - DNA, 25 bp, Homo sapien
tggctcttcccagcacgtgaggctc

SEQ ID NO: 1094968 - DNA, 25 bp, Homo sapien
tcagtggtatgtgaaacaggagctg

SEQ ID NO: 1094969 - DNA, 25 bp, Homo sapien
gaaacaggagctgatggggttccct

SEQ ID NO: 1094970 - DNA, 25 bp, Homo sapien
gggtcagtggtatgtgaaacaggag

SEQ ID NO: 1094971 - DNA, 25 bp, Homo sapien
gaaagcatgactaaccagattgcag

SEQ ID NO: 1094972 - DNA, 25 bp, Homo sapien
ccccgattagattgtaagtgccaca

SEQ ID NO: 1094973 - DNA, 25 bp, Homo sapien
tcctacttcgaaaagggtctctgta

SEQ ID NO: 1094974 - DNA, 25 bp, Homo sapien
cagagatagacattggagggataca

SEQ ID NO: 1094975 - DNA, 25 bp, Homo sapien
cacatttgggaggacgatctgcttt

SEQ ID NO: 1094976 - DNA, 25 bp, Homo sapien
aggtaccccacagctcagtcaagtt

SEQ ID NO: 1094977 - DNA, 25 bp, Homo sapien
tatagctacagagcaacggccttca

SEQ ID NO: 1094978 - DNA, 25 bp, Homo sapien
tctcagggcctaggaaaaaatctag

SEQ ID NO: 1094979 - DNA, 25 bp, Homo sapien
tatccttggagctactgacgaacct

SEQ ID NO: 1094980 - DNA, 25 bp, Homo sapien
gaaaatgccctgctcagaagctggg

SEQ ID NO: 1094981 - DNA, 25 bp, Homo sapien
cctagaggagtagtgaaagggccct

SEQ ID NO: 1094982 - DNA, 25 bp, Homo sapien
caggtgtcgatcttccctagaggag

SEQ ID NO: 1094983 - DNA, 25 bp, Homo sapien
gattttcaacctcagacctgtggac

SEQ ID NO: 1094984 - DNA, 25 bp, Homo sapien
gtgacctccacagactatcttgaag

SEQ ID NO: 1094985 - DNA, 25 bp, Homo sapien
aaattgtagtggcttggcatggcac

SEQ ID NO: 1094986 - DNA, 25 bp, Homo sapien
gcatggcactactagttaactgctg

SEQ ID NO: 1094987 - DNA, 25 bp, Homo sapien
gcctttattgtgatagtgtgtcatc

SEQ ID NO: 1094988 - DNA, 25 bp, Homo sapien
atccattcagataggcctcccacga

SEQ ID NO: 1094989 - DNA, 25 bp, Homo sapien
cagtaggcattgcatgcagatgata

SEQ ID NO: 1094990 - DNA, 25 bp, Homo sapien
tagaaaattcctgcggtccaagcac

SEQ ID NO: 1094991 - DNA, 25 bp, Homo sapien
tctgtgccaagaaggcagcgggtgc

SEQ ID NO: 1094992 - DNA, 25 bp, Homo sapien
gagtgagtaattctgcagcctggag

SEQ ID NO: 1094993 - DNA, 25 bp, Homo sapien
tcctgggctggccttaaccggatgg

SEQ ID NO: 1094994 - DNA, 25 bp, Homo sapien
tagcaattcaactgataaaggaggc

SEQ ID NO: 1094995 - DNA, 25 bp, Homo sapien
cataaggatcagacaaatagcagta

SEQ ID NO: 1094996 - DNA, 25 bp, Homo sapien
tagcagtatagcagccaggcagaca

SEQ ID NO: 1094997 - DNA, 25 bp, Homo sapien
tccttgtagaaggattgttgaacaa

SEQ ID NO: 1094998 - DNA, 25 bp, Homo sapien
gaagatccttgtagaaggattgttg

SEQ ID NO: 1094999 - DNA, 25 bp, Homo sapien
tcagatggacaaaagagctgccttc

SEQ ID NO: 1095000 - DNA, 25 bp, Homo sapien
taaagaacagctgagggacaagaga

SEQ ID NO: 1095001 - DNA, 25 bp, Homo sapien
gaaacattctgatgaggctctcaga

SEQ ID NO: 1095002 - DNA, 25 bp, Homo sapien
caatgtagtcatgaggcagtcgagt

SEQ ID NO: 1095003 - DNA, 25 bp, Homo sapien
tcacagcccctggtagagcatacag

SEQ ID NO: 1095004 - DNA, 25 bp, Homo sapien
gatcctattatccaagtgaagtcca

SEQ ID NO: 1095005 - DNA, 25 bp, Homo sapien
tcctaagcatctactctgggcacac

SEQ ID NO: 1095006 - DNA, 25 bp, Homo sapien
gctgagtgccgtgggaagatccaat

SEQ ID NO: 1095007 - DNA, 25 bp, Homo sapien
gcctaacagtcagagaaataggcct

SEQ ID NO: 1095008 - DNA, 25 bp, Homo sapien
ctcctatccaaggctacattcactt

SEQ ID NO: 1095009 - DNA, 25 bp, Homo sapien
gaggaaataagatgtctgcctaaca

SEQ ID NO: 1095010 - DNA, 25 bp, Homo sapien
taagatgtctgcctaacagtcagag

SEQ ID NO: 1095011 - DNA, 25 bp, Homo sapien
taagaaacaaagacacctagagtgg

SEQ ID NO: 1095012 - DNA, 25 bp, Homo sapien
cgcactaggattttagcaaggcact

SEQ ID NO: 1095013 - DNA, 25 bp, Homo sapien
gaaggcccagtcatctaaaacatgg

SEQ ID NO: 1095014 - DNA, 25 bp, Homo sapien
aaattgcggcaagttctctgaaggc

SEQ ID NO: 1095015 - DNA, 25 bp, Homo sapien
ccagtaaaatcgcacaatgcctggt

SEQ ID NO: 1095016 - DNA, 25 bp, Homo sapien
ttccagtaaaatcgcacaatgcctg

SEQ ID NO: 1095017 - DNA, 25 bp, Homo sapien
cattccagtaaaatcgcacaatgcc

SEQ ID NO: 1095018 - DNA, 25 bp, Homo sapien
attccagtaaaatcgcacaatgcct

SEQ ID NO: 1095019 - DNA, 25 bp, Homo sapien
ttgttgacttccagcgcgactgttg

SEQ ID NO: 1095020 - DNA, 25 bp, Homo sapien
catgacttgccagctgccaggctga

SEQ ID NO: 1095021 - DNA, 25 bp, Homo sapien
ggctgggtctctccctttccatttc

SEQ ID NO: 1095022 - DNA, 25 bp, Homo sapien
ttgttagctcgcagatggacaggca

SEQ ID NO: 1095023 - DNA, 25 bp, Homo sapien
ggtgagggctgtccaatcaatgact

SEQ ID NO: 1095024 - DNA, 25 bp, Homo sapien
aatgactgaacgtctcaggctcctc

SEQ ID NO: 1095025 - DNA, 25 bp, Homo sapien
tgatgaaatgagagtacttaggcct

SEQ ID NO: 1095026 - DNA, 25 bp, Homo sapien
tgagagtacttaggcctgcttcctg

SEQ ID NO: 1095027 - DNA, 25 bp, Homo sapien
tgtgagacttcactgagccaggaga

SEQ ID NO: 1095028 - DNA, 25 bp, Homo sapien
ccaataaggactatgcctggtggac

SEQ ID NO: 1095029 - DNA, 25 bp, Homo sapien
caaagtcagcgttgtcatccaggga

SEQ ID NO: 1095030 - DNA, 25 bp, Homo sapien
gcccagtcgccagaatgtcaaggtt

SEQ ID NO: 1095031 - DNA, 25 bp, Homo sapien
aaactagctgcctgccaagtagggc

SEQ ID NO: 1095032 - DNA, 25 bp, Homo sapien
taccttgagctttgttgaaaccctg

SEQ ID NO: 1095033 - DNA, 25 bp, Homo sapien
tgtggacttcgccaggcaggaacga

SEQ ID NO: 1095034 - DNA, 25 bp, Homo sapien
taagcatgtctaccaccctaaaagg

SEQ ID NO: 1095035 - DNA, 25 bp, Homo sapien
aagtacagcttcatgtgtaaaccac

SEQ ID NO: 1095036 - DNA, 25 bp, Homo sapien
actgatctaggccaatagtccctgc

SEQ ID NO: 1095037 - DNA, 25 bp, Homo sapien
agcacctcagaccagggatcgaaat

SEQ ID NO: 1095038 - DNA, 25 bp, Homo sapien
tcgaaatcccggaaggcaagctcgt

SEQ ID NO: 1095039 - DNA, 25 bp, Homo sapien
ccacactgatagtcaaccttataag

SEQ ID NO: 1095040 - DNA, 25 bp, Homo sapien
ttgatttgtttagctgtgttcgcag

SEQ ID NO: 1095041 - DNA, 25 bp, Homo sapien
taaattcatttggtagcaactcaag

SEQ ID NO: 1095042 - DNA, 25 bp, Homo sapien
cagttgtaattccatagaggcagca

SEQ ID NO: 1095043 - DNA, 25 bp, Homo sapien
ggcaggatagccttcacgctcctta

SEQ ID NO: 1095044 - DNA, 25 bp, Homo sapien
tgaatccacttctgtagtgccactg

SEQ ID NO: 1095045 - DNA, 25 bp, Homo sapien
actgcatagatcatgtccacgtggc

SEQ ID NO: 1095046 - DNA, 25 bp, Homo sapien
ggatagccttcacgctccttatggc

SEQ ID NO: 1095047 - DNA, 25 bp, Homo sapien
ccgcagccaaagcaatcctgctaac

SEQ ID NO: 1095048 - DNA, 25 bp, Homo sapien
tcccgtccatttccctgccccgcag

SEQ ID NO: 1095049 - DNA, 25 bp, Homo sapien
cctgccccgcagccaaagcaatcct

SEQ ID NO: 1095050 - DNA, 25 bp, Homo sapien
ctcccgtccatttccctgccccgca

SEQ ID NO: 1095051 - DNA, 25 bp, Homo sapien
cgggccttgtgccaaaacacggagc

SEQ ID NO: 1095052 - DNA, 25 bp, Homo sapien
ggccttgtgccaaaacacggagcaa

SEQ ID NO: 1095053 - DNA, 25 bp, Homo sapien
ccgggccttgtgccaaaacacggag

SEQ ID NO: 1095054 - DNA, 25 bp, Homo sapien
gggccttgtgccaaaacacggagca

SEQ ID NO: 1095055 - DNA, 25 bp, Homo sapien
ctgatcgctgacgacgtgcagggca

SEQ ID NO: 1095056 - DNA, 25 bp, Homo sapien
cagggcgtgcgagaacattttctca

SEQ ID NO: 1095057 - DNA, 25 bp, Homo sapien
ctgacgacgtgcagggcaagagcct

SEQ ID NO: 1095058 - DNA, 25 bp, Homo sapien
agcctccagggcgtgcgagaacatt

SEQ ID NO: 1095059 - DNA, 25 bp, Homo sapien
caggacagaatgctcccactgctgc

SEQ ID NO: 1095060 - DNA, 25 bp, Homo sapien
gcagggcggttttgtttggcatcaa

SEQ ID NO: 1095061 - DNA, 25 bp, Homo sapien
ttagatttacaacagtgaccttggg

SEQ ID NO: 1095062 - DNA, 25 bp, Homo sapien
tgcagaaggcatgggaaatgaggta

SEQ ID NO: 1095063 - DNA, 25 bp, Homo sapien
tctctaattgggcaccagctgtgtt

SEQ ID NO: 1095064 - DNA, 25 bp, Homo sapien
ctctcctgcagtttgtggtccagct

SEQ ID NO: 1095065 - DNA, 25 bp, Homo sapien
tctgctggtccattagtgtcgttca

SEQ ID NO: 1095066 - DNA, 25 bp, Homo sapien
ggtccagcttaattaagagttctgc

SEQ ID NO: 1095067 - DNA, 25 bp, Homo sapien
gcctagcgattaatagctgctgtct

SEQ ID NO: 1095068 - DNA, 25 bp, Homo sapien
taaacctttactgtctgccagaccc

SEQ ID NO: 1095069 - DNA, 25 bp, Homo sapien
ccgcttgagcctctaggtccagaaa

SEQ ID NO: 1095070 - DNA, 25 bp, Homo sapien
ggatttgggtatccacaagagtcct

SEQ ID NO: 1095071 - DNA, 25 bp, Homo sapien
gatatcacagtggatgtttccaaca

SEQ ID NO: 1095072 - DNA, 25 bp, Homo sapien
gcagctgcttcatttaggatatcac

SEQ ID NO: 1095073 - DNA, 25 bp, Homo sapien
tagaatcatgtctcctcagtgcaga

SEQ ID NO: 1095074 - DNA, 25 bp, Homo sapien
tgtgccgtctcatgtctagctgtag

SEQ ID NO: 1095075 - DNA, 25 bp, Homo sapien
cttttctctggtcataccaatccat

SEQ ID NO: 1095076 - DNA, 25 bp, Homo sapien
gcttttagccgatccttcacagtca

SEQ ID NO: 1095077 - DNA, 25 bp, Homo sapien
aaccctgttggtctggattgtcggc

SEQ ID NO: 1095078 - DNA, 25 bp, Homo sapien
tcccaaatctggatggcttttagcc

SEQ ID NO: 1095079 - DNA, 25 bp, Homo sapien
ttagcatgcttctgtggctcccaaa

SEQ ID NO: 1095080 - DNA, 25 bp, Homo sapien
ttctcaaggatagcattatctttat

SEQ ID NO: 1095081 - DNA, 25 bp, Homo sapien
tcaaggatagcattatctttattat

SEQ ID NO: 1095082 - DNA, 25 bp, Homo sapien
tctcaaggatagcattatctttatt

SEQ ID NO: 1095083 - DNA, 25 bp, Homo sapien
attctcaaggatagcattatcttta

SEQ ID NO: 1095084 - DNA, 25 bp, Homo sapien
catcttccatcactgatactttctt

SEQ ID NO: 1095085 - DNA, 25 bp, Homo sapien
tttcatcttccatcactgatacttt

SEQ ID NO: 1095086 - DNA, 25 bp, Homo sapien
ctcctttaagcacttctctgtattg

SEQ ID NO: 1095087 - DNA, 25 bp, Homo sapien
gctcctttaagcacttctctgtatt

SEQ ID NO: 1095088 - DNA, 25 bp, Homo sapien
ctgaacagctaatcggagcccctct

SEQ ID NO: 1095089 - DNA, 25 bp, Homo sapien
ctgacaccctgaagcatgattggac

SEQ ID NO: 1095090 - DNA, 25 bp, Homo sapien
tctgacaccctgaagcatgattgga

SEQ ID NO: 1095091 - DNA, 25 bp, Homo sapien
gacagcaggcctcactccagtgatt

SEQ ID NO: 1095092 - DNA, 25 bp, Homo sapien
gccagctgcaaagagtaagaatcct

SEQ ID NO: 1095093 - DNA, 25 bp, Homo sapien
aaagctcaagtctgccatcccagag

SEQ ID NO: 1095094 - DNA, 25 bp, Homo sapien
gtttcttgccattagcaacctccag

SEQ ID NO: 1095095 - DNA, 25 bp, Homo sapien
cttctgctggacctctcacacctgt

SEQ ID NO: 1095096 - DNA, 25 bp, Homo sapien
tctgctggacctctcacacctgttt

SEQ ID NO: 1095097 - DNA, 25 bp, Homo sapien
tttcttctgctggacctctcacacc

SEQ ID NO: 1095098 - DNA, 25 bp, Homo sapien
ctggacctctcacacctgtttccac

SEQ ID NO: 1095099 - DNA, 25 bp, Homo sapien
gccaaacttgcctatggactcaaac

SEQ ID NO: 1095100 - DNA, 25 bp, Homo sapien
aaacttgcctatggactcaaacact

SEQ ID NO: 1095101 - DNA, 25 bp, Homo sapien
ggccaaacttgcctatggactcaaa

SEQ ID NO: 1095102 - DNA, 25 bp, Homo sapien
caggccaaacttgcctatggactca

SEQ ID NO: 1095103 - DNA, 25 bp, Homo sapien
acggaatcggtcaaggatgacagct

SEQ ID NO: 1095104 - DNA, 25 bp, Homo sapien
cacaatttcctgtactccacggaat

SEQ ID NO: 1095105 - DNA, 25 bp, Homo sapien
ttcctgtactccacggaatcggtca

SEQ ID NO: 1095106 - DNA, 25 bp, Homo sapien
actccacggaatcggtcaaggatga

SEQ ID NO: 1095107 - DNA, 25 bp, Homo sapien
gatgagaaagtgagtcccttcccct

SEQ ID NO: 1095108 - DNA, 25 bp, Homo sapien
tgagaaagtgagtcccttcccctac

SEQ ID NO: 1095109 - DNA, 25 bp, Homo sapien
ccagaggatgagaaagtgagtccct

SEQ ID NO: 1095110 - DNA, 25 bp, Homo sapien
aggatgagaaagtgagtcccttccc

SEQ ID NO: 1095111 - DNA, 25 bp, Homo sapien
tgacacattacgtggtcaagaatgg

SEQ ID NO: 1095112 - DNA, 25 bp, Homo sapien
acacattacgtggtcaagaatggca

SEQ ID NO: 1095113 - DNA, 25 bp, Homo sapien
actgacacattacgtggtcaagaat

SEQ ID NO: 1095114 - DNA, 25 bp, Homo sapien
gacacattacgtggtcaagaatggc

SEQ ID NO: 1095115 - DNA, 25 bp, Homo sapien
tggaaggggatgtgcagtgtgatgt

SEQ ID NO: 1095116 - DNA, 25 bp, Homo sapien
gatgttgacattctgtaaatctttg

SEQ ID NO: 1095117 - DNA, 25 bp, Homo sapien
ctggaaggggatgtgcagtgtgatg

SEQ ID NO: 1095118 - DNA, 25 bp, Homo sapien
agtgtgatgttgacattctgtaaat

SEQ ID NO: 1095119 - DNA, 25 bp, Homo sapien
actgacttgagcatctcagttgtga

SEQ ID NO: 1095120 - DNA, 25 bp, Homo sapien
agcatcaaagcaaaccaccactgac

SEQ ID NO: 1095121 - DNA, 25 bp, Homo sapien
cttgagcatctcagttgtgatggat

SEQ ID NO: 1095122 - DNA, 25 bp, Homo sapien
gcatctcagttgtgatggatggcag

SEQ ID NO: 1095123 - DNA, 25 bp, Homo sapien
ctgaaggtcagatatgtcaaggaca

SEQ ID NO: 1095124 - DNA, 25 bp, Homo sapien
ggtcagatatgtcaaggacacgtcg

SEQ ID NO: 1095125 - DNA, 25 bp, Homo sapien
atatgtcaaggacacgtcgtccagg

SEQ ID NO: 1095126 - DNA, 25 bp, Homo sapien
tatgtcaaggacacgtcgtccagga

SEQ ID NO: 1095127 - DNA, 25 bp, Homo sapien
tcagcagagatgatagctgcctttt

SEQ ID NO: 1095128 - DNA, 25 bp, Homo sapien
ttctgctgcttagccttttccatca

SEQ ID NO: 1095129 - DNA, 25 bp, Homo sapien
ttttccatcacaaatctggcccttt

SEQ ID NO: 1095130 - DNA, 25 bp, Homo sapien
tccatcacaaatctggccctttctg

SEQ ID NO: 1095131 - DNA, 25 bp, Homo sapien
ccgtcccctgcagtggccagtgagt

SEQ ID NO: 1095132 - DNA, 25 bp, Homo sapien
agcttgcgcagctcgatcaggccgt

SEQ ID NO: 1095133 - DNA, 25 bp, Homo sapien
aatcagctcagctgccttggagtca

SEQ ID NO: 1095134 - DNA, 25 bp, Homo sapien
cagtgagttggcaatcagctcagct

SEQ ID NO: 1095135 - DNA, 25 bp, Homo sapien
ggaagtcgatgttaaatatcatcag

SEQ ID NO: 1095136 - DNA, 25 bp, Homo sapien
gaaggaagtcgatgttaaatatcat

SEQ ID NO: 1095137 - DNA, 25 bp, Homo sapien
ggcagaaggaagtcgatgttaaata

SEQ ID NO: 1095138 - DNA, 25 bp, Homo sapien
gcagaaggaagtcgatgttaaatat

SEQ ID NO: 1095139 - DNA, 25 bp, Homo sapien
ccccggagctcccagtgcaagaggc

SEQ ID NO: 1095140 - DNA, 25 bp, Homo sapien
ttaaactagttgtggaattcattcc

SEQ ID NO: 1095141 - DNA, 25 bp, Homo sapien
aaggcatgagtcatgtgagggcagc

SEQ ID NO: 1095142 - DNA, 25 bp, Homo sapien
agatgggcctggacgagaggtctga

SEQ ID NO: 1095143 - DNA, 25 bp, Homo sapien
aggagctcagtgaggcgcggccagg

SEQ ID NO: 1095144 - DNA, 25 bp, Homo sapien
cacagcagtttcagcgctgacagaa

SEQ ID NO: 1095145 - DNA, 25 bp, Homo sapien
ctagttccctcttctcgagctgaac

SEQ ID NO: 1095146 - DNA, 25 bp, Homo sapien
gcgctgacagaaactgcaaggagct

SEQ ID NO: 1095147 - DNA, 25 bp, Homo sapien
cccacactatacagagggaagaata

SEQ ID NO: 1095148 - DNA, 25 bp, Homo sapien
gagactttcccagggaacgaacatg

SEQ ID NO: 1095149 - DNA, 25 bp, Homo sapien
aacatggcccacactatacagaggg

SEQ ID NO: 1095150 - DNA, 25 bp, Homo sapien
atgtgaaaataattagggaagagac

SEQ ID NO: 1095151 - DNA, 25 bp, Homo sapien
ccctacatgggtccaaggggatgga

SEQ ID NO: 1095152 - DNA, 25 bp, Homo sapien
gggatggaggtacttggtggcagga

SEQ ID NO: 1095153 - DNA, 25 bp, Homo sapien
ggaggatccagacaatccgtggcac

SEQ ID NO: 1095154 - DNA, 25 bp, Homo sapien
aaatttaggcttgaccctacatggg

SEQ ID NO: 1095155 - DNA, 25 bp, Homo sapien
aaatgataaccgaggagctaggtcc

SEQ ID NO: 1095156 - DNA, 25 bp, Homo sapien
tgctgaagggtagggacatgagtat

SEQ ID NO: 1095157 - DNA, 25 bp, Homo sapien
tcattgctgaagggtagggacatga

SEQ ID NO: 1095158 - DNA, 25 bp, Homo sapien
cattgctgaagggtagggacatgag

SEQ ID NO: 1095159 - DNA, 25 bp, Homo sapien
tagggtgaatagagtggtccttaga

SEQ ID NO: 1095160 - DNA, 25 bp, Homo sapien
cactgtagggtgaatagagtggtcc

SEQ ID NO: 1095161 - DNA, 25 bp, Homo sapien
tagagtggtccttagatttagtgtt

SEQ ID NO: 1095162 - DNA, 25 bp, Homo sapien
aaaaagagcagtcactgtagggtga

SEQ ID NO: 1095163 - DNA, 25 bp, Homo sapien
agcccccataagtgagagcctggag

SEQ ID NO: 1095164 - DNA, 25 bp, Homo sapien
caggaaagcccccataagtgagagc

SEQ ID NO: 1095165 - DNA, 25 bp, Homo sapien
gggccactaggagattccatttcag

SEQ ID NO: 1095166 - DNA, 25 bp, Homo sapien
ggagaagggccactaggagattcca

SEQ ID NO: 1095167 - DNA, 25 bp, Homo sapien
ctagtttttcagtgtaacaccagag

SEQ ID NO: 1095168 - DNA, 25 bp, Homo sapien
cttctagtttttcagtgtaacacca

SEQ ID NO: 1095169 - DNA, 25 bp, Homo sapien
ttctagtttttcagtgtaacaccag

SEQ ID NO: 1095170 - DNA, 25 bp, Homo sapien
tctagtttttcagtgtaacaccaga

SEQ ID NO: 1095171 - DNA, 25 bp, Homo sapien
atacgttgatagaaatatgatgctt

SEQ ID NO: 1095172 - DNA, 25 bp, Homo sapien
caagcacagtggatacgttgataga

SEQ ID NO: 1095173 - DNA, 25 bp, Homo sapien
tgatagaaatatgatgcttctactt

SEQ ID NO: 1095174 - DNA, 25 bp, Homo sapien
aagcacagtggatacgttgatagaa

SEQ ID NO: 1095175 - DNA, 25 bp, Homo sapien
cttcactagtgggtgtcagtatccc

SEQ ID NO: 1095176 - DNA, 25 bp, Homo sapien
tcagtatcccatggacagcaggtcc

SEQ ID NO: 1095177 - DNA, 25 bp, Homo sapien
gaatgacccctcttatgctgcagca

SEQ ID NO: 1095178 - DNA, 25 bp, Homo sapien
cccagtagctgacacaggccattga

SEQ ID NO: 1095179 - DNA, 25 bp, Homo sapien
gaaattgccacgaaaaacacaacac

SEQ ID NO: 1095180 - DNA, 25 bp, Homo sapien
ttaaccggagtagaagtctaagcgc

SEQ ID NO: 1095181 - DNA, 25 bp, Homo sapien
tctaagcgcttgtgcccactgcatg

SEQ ID NO: 1095182 - DNA, 25 bp, Homo sapien
tgcccactgcatgttggtattgaaa

SEQ ID NO: 1095183 - DNA, 25 bp, Homo sapien
aatttataagggctgtataagaggg

SEQ ID NO: 1095184 - DNA, 25 bp, Homo sapien
attaaatgggataagactagaattt

SEQ ID NO: 1095185 - DNA, 25 bp, Homo sapien
ggcagagatgaaacaacgagggtta

SEQ ID NO: 1095186 - DNA, 25 bp, Homo sapien
gaaacaacgagggttatgatgatag

SEQ ID NO: 1095187 - DNA, 25 bp, Homo sapien
tttcatctcctccttctactccctc

SEQ ID NO: 1095188 - DNA, 25 bp, Homo sapien
tccctctttcctcttgttgctttca

SEQ ID NO: 1095189 - DNA, 25 bp, Homo sapien
tcatctcctccttctactccctcct

SEQ ID NO: 1095190 - DNA, 25 bp, Homo sapien
tctttcctcttgttgctttcatctc

SEQ ID NO: 1095191 - DNA, 25 bp, Homo sapien
gctttcatcccctccttctactccc

SEQ ID NO: 1095192 - DNA, 25 bp, Homo sapien
ttgttgctttcatcccctccttcta

SEQ ID NO: 1095193 - DNA, 25 bp, Homo sapien
cctcttgttgctttcatcccctcct

SEQ ID NO: 1095194 - DNA, 25 bp, Homo sapien
ttcatcccctccttctactccctcc

SEQ ID NO: 1095195 - DNA, 25 bp, Homo sapien
ggtatcatggagacagacgagtcct

SEQ ID NO: 1095196 - DNA, 25 bp, Homo sapien
gcaaaagatgtcaagggcctgcaat

SEQ ID NO: 1095197 - DNA, 25 bp, Homo sapien
gagagtctctgaagggtttccacca

SEQ ID NO: 1095198 - DNA, 25 bp, Homo sapien
tagactctaacgatgtggtgcctgc

SEQ ID NO: 1095199 - DNA, 25 bp, Homo sapien
gttgcttgtactgtcctcaacacat

SEQ ID NO: 1095200 - DNA, 25 bp, Homo sapien
tcttggaaatttgaaccgtcaatag

SEQ ID NO: 1095201 - DNA, 25 bp, Homo sapien
tgcttgtactgtcctcaacacattc

SEQ ID NO: 1095202 - DNA, 25 bp, Homo sapien
aggcgttcttgttccccaattcttg

SEQ ID NO: 1095203 - DNA, 25 bp, Homo sapien
attaggatgaggcaaatgaggcacc

SEQ ID NO: 1095204 - DNA, 25 bp, Homo sapien
gaggcacctacatgactctaagagg

SEQ ID NO: 1095205 - DNA, 25 bp, Homo sapien
tcaggagctatggaacaatgcagca

SEQ ID NO: 1095206 - DNA, 25 bp, Homo sapien
tcaagtcatgcacgaaattagccgt

SEQ ID NO: 1095207 - DNA, 25 bp, Homo sapien
cagatgtcatagtagtcattccctt

SEQ ID NO: 1095208 - DNA, 25 bp, Homo sapien
tcctgccggtgaatattacagagtc

SEQ ID NO: 1095209 - DNA, 25 bp, Homo sapien
gttttcctgccggtgaatattacag

SEQ ID NO: 1095210 - DNA, 25 bp, Homo sapien
catagtagtcattcccttgggtttt

SEQ ID NO: 1095211 - DNA, 25 bp, Homo sapien
gcagagagtcatgattgcacgattg

SEQ ID NO: 1095212 - DNA, 25 bp, Homo sapien
gagagtcatgattgcacgattgtat

SEQ ID NO: 1095213 - DNA, 25 bp, Homo sapien
agagtcatgattgcacgattgtatt

SEQ ID NO: 1095214 - DNA, 25 bp, Homo sapien
cagagagtcatgattgcacgattgt

SEQ ID NO: 1095215 - DNA, 25 bp, Homo sapien
tggtgatgtagatccagcctccatg

SEQ ID NO: 1095216 - DNA, 25 bp, Homo sapien
tccatggagtccacgggtctcgttt

SEQ ID NO: 1095217 - DNA, 25 bp, Homo sapien
caatggcactatggtgatgtagatc

SEQ ID NO: 1095218 - DNA, 25 bp, Homo sapien
gcccttgaaggaaggcaatggcact

SEQ ID NO: 1095219 - DNA, 25 bp, Homo sapien
atagaacatgttggccgaagcaggg

SEQ ID NO: 1095220 - DNA, 25 bp, Homo sapien
ctgcatagaacatgttggccgaagc

SEQ ID NO: 1095221 - DNA, 25 bp, Homo sapien
gtgaaggaagactgggaacaaacac

SEQ ID NO: 1095222 - DNA, 25 bp, Homo sapien
gcatagaacatgttggccgaagcag

SEQ ID NO: 1095223 - DNA, 25 bp, Homo sapien
gagaaagtgacagactcaagacact

SEQ ID NO: 1095224 - DNA, 25 bp, Homo sapien
gaaagtgacagactcaagacactgc

SEQ ID NO: 1095225 - DNA, 25 bp, Homo sapien
aagtgacagactcaagacactgctt

SEQ ID NO: 1095226 - DNA, 25 bp, Homo sapien
gagagaaagtgacagactcaagaca

SEQ ID NO: 1095227 - DNA, 25 bp, Homo sapien
agtgtggtgggaagtgtcttctttg

SEQ ID NO: 1095228 - DNA, 25 bp, Homo sapien
tggacagagttaaagggaagcagct

SEQ ID NO: 1095229 - DNA, 25 bp, Homo sapien
tgagaataggaagccgtggagtgtg

SEQ ID NO: 1095230 - DNA, 25 bp, Homo sapien
aagtgccactggccttgagaatagg

SEQ ID NO: 1095231 - DNA, 25 bp, Homo sapien
tgagttttgctttcgctccacgccc

SEQ ID NO: 1095232 - DNA, 25 bp, Homo sapien
atcttggtgagttttgctttcgctc

SEQ ID NO: 1095233 - DNA, 25 bp, Homo sapien
ttggtgagttttgctttcgctccac

SEQ ID NO: 1095234 - DNA, 25 bp, Homo sapien
ttgctttcgctccacgccccttcct

SEQ ID NO: 1095235 - DNA, 25 bp, Homo sapien
agtcacgtcaagcaacccacacttg

SEQ ID NO: 1095236 - DNA, 25 bp, Homo sapien
catctctgtagttaaaggggccaga

SEQ ID NO: 1095237 - DNA, 25 bp, Homo sapien
cacttgtaagttaaccccacagtca

SEQ ID NO: 1095238 - DNA, 25 bp, Homo sapien
tgatggctgattcacaaagattcct

SEQ ID NO: 1095239 - DNA, 25 bp, Homo sapien
gcccctgctgggatagtgactctga

SEQ ID NO: 1095240 - DNA, 25 bp, Homo sapien
tcatgtgtagtccaaagtatctgct

SEQ ID NO: 1095241 - DNA, 25 bp, Homo sapien
gatgacttgcttatgagccattaag

SEQ ID NO: 1095242 - DNA, 25 bp, Homo sapien
tctgccccagactcaattcgaataa

SEQ ID NO: 1095243 - DNA, 25 bp, Homo sapien
gaaatttgcactccttttagatgaa

SEQ ID NO: 1095244 - DNA, 25 bp, Homo sapien
tcctccgtgggaatggttgaagaaa

SEQ ID NO: 1095245 - DNA, 25 bp, Homo sapien
gcctctaagactcttccaaggtgaa

SEQ ID NO: 1095246 - DNA, 25 bp, Homo sapien
gaacattctaatcttgcctctaaga

SEQ ID NO: 1095247 - DNA, 25 bp, Homo sapien
aattatttacacagggagagtcagc

SEQ ID NO: 1095248 - DNA, 25 bp, Homo sapien
tgggttgtacaaagctaattctgaa

SEQ ID NO: 1095249 - DNA, 25 bp, Homo sapien
gaacacatataaatgccagaccctg

SEQ ID NO: 1095250 - DNA, 25 bp, Homo sapien
gcttatagttcaataggtggctcag

SEQ ID NO: 1095251 - DNA, 25 bp, Homo sapien
ttcattcgtaaaatagtaggtaaca

SEQ ID NO: 1095252 - DNA, 25 bp, Homo sapien
ttaaatccgtacagcaaatgcatga

SEQ ID NO: 1095253 - DNA, 25 bp, Homo sapien
cttgtgccactctactttttgtcta

SEQ ID NO: 1095254 - DNA, 25 bp, Homo sapien
attttttgagtttgacttgtgccac

SEQ ID NO: 1095255 - DNA, 25 bp, Homo sapien
ggtaaaaggcttgcccaagttctca

SEQ ID NO: 1095256 - DNA, 25 bp, Homo sapien
tcttctgattccaaggctatgttct

SEQ ID NO: 1095257 - DNA, 25 bp, Homo sapien
tctcttgtatgttcttggtcttctg

SEQ ID NO: 1095258 - DNA, 25 bp, Homo sapien
tgattccaaggctatgtatactata

SEQ ID NO: 1095259 - DNA, 25 bp, Homo sapien
gactgaccccagtataccctttcat

SEQ ID NO: 1095260 - DNA, 25 bp, Homo sapien
gaaattactatgtctaccaatctcc

SEQ ID NO: 1095261 - DNA, 25 bp, Homo sapien
tcttcctgatacagaaattactatg

SEQ ID NO: 1095262 - DNA, 25 bp, Homo sapien
tgtctccagtgaccatccacacttc

SEQ ID NO: 1095263 - DNA, 25 bp, Homo sapien
ttgggacattcccagtgcaaggaaa

SEQ ID NO: 1095264 - DNA, 25 bp, Homo sapien
ctttgggacattcccagtgcaagga

SEQ ID NO: 1095265 - DNA, 25 bp, Homo sapien
tcccagtgcaaggaaattgagagcc

SEQ ID NO: 1095266 - DNA, 25 bp, Homo sapien
cagtgcaaggaaattgagagcccat

SEQ ID NO: 1095267 - DNA, 25 bp, Homo sapien
tccgctcagtccgtgtatcagtggc

SEQ ID NO: 1095268 - DNA, 25 bp, Homo sapien
ctatcagcacggagccgaggagact

SEQ ID NO: 1095269 - DNA, 25 bp, Homo sapien
agccgaggagactgtccgctgctag

SEQ ID NO: 1095270 - DNA, 25 bp, Homo sapien
gatgtgacgtccgtgaagtccgctc

SEQ ID NO: 1095271 - DNA, 25 bp, Homo sapien
gtacattttgcccagattcaccaat

SEQ ID NO: 1095272 - DNA, 25 bp, Homo sapien
gaaaaatcctgtgtacattttgccc

SEQ ID NO: 1095273 - DNA, 25 bp, Homo sapien
ccaccaccccgccgtgtccatgtgt

SEQ ID NO: 1095274 - DNA, 25 bp, Homo sapien
ttcaaatctgtagaaaagttgcaag

SEQ ID NO: 1095275 - DNA, 25 bp, Homo sapien
caccaaatcaatagcttgtgacggg

SEQ ID NO: 1095276 - DNA, 25 bp, Homo sapien
cagatgttgtcgcttgaaatgtcag

SEQ ID NO: 1095277 - DNA, 25 bp, Homo sapien
taaatgcaagatgtgcacaccaaat

SEQ ID NO: 1095278 - DNA, 25 bp, Homo sapien
tgtgacggggacctcctgcctgtgc

SEQ ID NO: 1095279 - DNA, 25 bp, Homo sapien
ctagcaaatactgcttccagaatgg

SEQ ID NO: 1095280 - DNA, 25 bp, Homo sapien
tattttgaaatgtcaaactagcaaa

SEQ ID NO: 1095281 - DNA, 25 bp, Homo sapien
aactagcaaatactgcttccagaat

SEQ ID NO: 1095282 - DNA, 25 bp, Homo sapien
tagcaaatactgcttccagaatggt

SEQ ID NO: 1095283 - DNA, 25 bp, Homo sapien
tccctccatcctctgttccatcccc

SEQ ID NO: 1095284 - DNA, 25 bp, Homo sapien
ccctccatcctctgttccatcccca

SEQ ID NO: 1095285 - DNA, 25 bp, Homo sapien
ctccctccatcctctgttccatccc

SEQ ID NO: 1095286 - DNA, 25 bp, Homo sapien
cctccatcctctgttccatccccat

SEQ ID NO: 1095287 - DNA, 25 bp, Homo sapien
ctgccgctctgaagtttctccgcat

SEQ ID NO: 1095288 - DNA, 25 bp, Homo sapien
gactcagcaggtaacgggaaacgaa

SEQ ID NO: 1095289 - DNA, 25 bp, Homo sapien
tagactcagcaggtaacgggaaacg

SEQ ID NO: 1095290 - DNA, 25 bp, Homo sapien
ctcagcaggtaacgggaaacgaagg

SEQ ID NO: 1095291 - DNA, 25 bp, Homo sapien
actagactcagcaggtaacgggaaa

SEQ ID NO: 1095292 - DNA, 25 bp, Homo sapien
tacagttactaagcgcccactgtgt

SEQ ID NO: 1095293 - DNA, 25 bp, Homo sapien
gatttcgttcgacttctttctacag

SEQ ID NO: 1095294 - DNA, 25 bp, Homo sapien
tgtcgtttccgtgtcttgattgtgg

SEQ ID NO: 1095295 - DNA, 25 bp, Homo sapien
ccgtgtcttgattgtggcctctgcc

SEQ ID NO: 1095296 - DNA, 25 bp, Homo sapien
tccgctggcccgcgtgaaaccctct

SEQ ID NO: 1095297 - DNA, 25 bp, Homo sapien
ctccgctggcccgcgtgaaaccctc

SEQ ID NO: 1095298 - DNA, 25 bp, Homo sapien
cctccgctggcccgcgtgaaaccct

SEQ ID NO: 1095299 - DNA, 25 bp, Homo sapien
gcctccgctggcccgcgtgaaaccc

SEQ ID NO: 1095300 - DNA, 25 bp, Homo sapien
ctgcaatgccagtctctttcagcat

SEQ ID NO: 1095301 - DNA, 25 bp, Homo sapien
gcctgcaatgccagtctctttcagc

SEQ ID NO: 1095302 - DNA, 25 bp, Homo sapien
cctgcaatgccagtctctttcagca

SEQ ID NO: 1095303 - DNA, 25 bp, Homo sapien
tgcccggcaacacaacagctgtgca

SEQ ID NO: 1095304 - DNA, 25 bp, Homo sapien
ggccctggcccatacatttgcccgg

SEQ ID NO: 1095305 - DNA, 25 bp, Homo sapien
tggcccatacatttgcccggcaaca

SEQ ID NO: 1095306 - DNA, 25 bp, Homo sapien
catttgcccggcaacacaacagctg

SEQ ID NO: 1095307 - DNA, 25 bp, Homo sapien
tattttggacaaggcactcacgtag

SEQ ID NO: 1095308 - DNA, 25 bp, Homo sapien
caatagggtctgttcactggcctgg

SEQ ID NO: 1095309 - DNA, 25 bp, Homo sapien
ggacttccatggagctcagaacagg

SEQ ID NO: 1095310 - DNA, 25 bp, Homo sapien
ccaaatcccttggaggctagccgtc

SEQ ID NO: 1095311 - DNA, 25 bp, Homo sapien
ctttctgagtccctccttgtttata

SEQ ID NO: 1095312 - DNA, 25 bp, Homo sapien
cctttctgagtccctccttgtttat

SEQ ID NO: 1095313 - DNA, 25 bp, Homo sapien
tctgagtccctccttgtttatatct

SEQ ID NO: 1095314 - DNA, 25 bp, Homo sapien
tgagtccctccttgtttatatcttg

SEQ ID NO: 1095315 - DNA, 25 bp, Homo sapien
aggaaccctctgatctgaggctcct

SEQ ID NO: 1095316 - DNA, 25 bp, Homo sapien
tcctcttctttggacatcctgtttt

SEQ ID NO: 1095317 - DNA, 25 bp, Homo sapien
ggctcctcttctttggacatcctgt

SEQ ID NO: 1095318 - DNA, 25 bp, Homo sapien
cagggattcaggaaccctctgatct

SEQ ID NO: 1095319 - DNA, 25 bp, Homo sapien
tatagtcttctataatgaaatcctc

SEQ ID NO: 1095320 - DNA, 25 bp, Homo sapien
cactggccaaaggaagttttcccag

SEQ ID NO: 1095321 - DNA, 25 bp, Homo sapien
tcttggtttgggcactgattgcact

SEQ ID NO: 1095322 - DNA, 25 bp, Homo sapien
tcctcttggtttgggcactgattgc

SEQ ID NO: 1095323 - DNA, 25 bp, Homo sapien
ccttcatctagtatcctattcatca

SEQ ID NO: 1095324 - DNA, 25 bp, Homo sapien
cccttcatctagtatcctattcatc

SEQ ID NO: 1095325 - DNA, 25 bp, Homo sapien
tgcccttcatctagtatcctattca

SEQ ID NO: 1095326 - DNA, 25 bp, Homo sapien
gcccttcatctagtatcctattcat

SEQ ID NO: 1095327 - DNA, 25 bp, Homo sapien
ttgggaattcaattggctgttgagg

SEQ ID NO: 1095328 - DNA, 25 bp, Homo sapien
gtattggtgtgaattaacgcccgcc

SEQ ID NO: 1095329 - DNA, 25 bp, Homo sapien
agtctctcacttgggaattcaattg

SEQ ID NO: 1095330 - DNA, 25 bp, Homo sapien
gcccaaggtgcttgttcgtgtattg

SEQ ID NO: 1095331 - DNA, 25 bp, Homo sapien
caaatcaagcacataaaaagccaca

SEQ ID NO: 1095332 - DNA, 25 bp, Homo sapien
ctgttttcttggtagagcatacaat

SEQ ID NO: 1095333 - DNA, 25 bp, Homo sapien
tctaaggccttctgttcccttggga

SEQ ID NO: 1095334 - DNA, 25 bp, Homo sapien
tatagtgcgtcttaaattcattgtg

SEQ ID NO: 1095335 - DNA, 25 bp, Homo sapien
gccagctggaatgcgcgtgatgtaa

SEQ ID NO: 1095336 - DNA, 25 bp, Homo sapien
cagatgctcaggacaagtaagtcca

SEQ ID NO: 1095337 - DNA, 25 bp, Homo sapien
agtaagtccagtgactgtatcaggg

SEQ ID NO: 1095338 - DNA, 25 bp, Homo sapien
ctgatcaggcccaacggcagaggcc

SEQ ID NO: 1095339 - DNA, 25 bp, Homo sapien
tgttgctgggagaaattgatgcctc

SEQ ID NO: 1095340 - DNA, 25 bp, Homo sapien
ggctcagtagccaggcctgctttct

SEQ ID NO: 1095341 - DNA, 25 bp, Homo sapien
accggcccagctgaagcacgatatt

SEQ ID NO: 1095342 - DNA, 25 bp, Homo sapien
tcttggcagcttcgcctattggaag

SEQ ID NO: 1095343 - DNA, 25 bp, Homo sapien
gctcttctcatcctgataatttatc

SEQ ID NO: 1095344 - DNA, 25 bp, Homo sapien
tatcatcgtttttgtttcctccatc

SEQ ID NO: 1095345 - DNA, 25 bp, Homo sapien
ctgggtgctcttctcatcctgataa

SEQ ID NO: 1095346 - DNA, 25 bp, Homo sapien
cctccatcaaggggatatagatttt

SEQ ID NO: 1095347 - DNA, 25 bp, Homo sapien
tgcaagaaccttgttttagcaaaga

SEQ ID NO: 1095348 - DNA, 25 bp, Homo sapien
agtttgcaagaaccttgttttagca

SEQ ID NO: 1095349 - DNA, 25 bp, Homo sapien
ctgagtttgcaagaaccttgtttta

SEQ ID NO: 1095350 - DNA, 25 bp, Homo sapien
ttgcaagaaccttgttttagcaaag

SEQ ID NO: 1095351 - DNA, 25 bp, Homo sapien
gctggctgtactctttgcacaccat

SEQ ID NO: 1095352 - DNA, 25 bp, Homo sapien
tccttgttgctttccctgatgtcct

SEQ ID NO: 1095353 - DNA, 25 bp, Homo sapien
tactctttgcacaccattattgaag

SEQ ID NO: 1095354 - DNA, 25 bp, Homo sapien
tattaaagatctttgattccttgtt

SEQ ID NO: 1095355 - DNA, 25 bp, Homo sapien
tcatctctcccccgtgctccttgtt

SEQ ID NO: 1095356 - DNA, 25 bp, Homo sapien
catctctcccccgtgctccttgttc

SEQ ID NO: 1095357 - DNA, 25 bp, Homo sapien
atctctcccccgtgctccttgttcc

SEQ ID NO: 1095358 - DNA, 25 bp, Homo sapien
ctctcccccgtgctccttgttcctt

SEQ ID NO: 1095359 - DNA, 25 bp, Homo sapien
tctttgctgatctataaacatggct

SEQ ID NO: 1095360 - DNA, 25 bp, Homo sapien
ttctttgctgatctataaacatggc

SEQ ID NO: 1095361 - DNA, 25 bp, Homo sapien
tttgctgatctataaacatggcttc

SEQ ID NO: 1095362 - DNA, 25 bp, Homo sapien
ttgctgatctataaacatggcttcc

SEQ ID NO: 1095363 - DNA, 25 bp, Homo sapien
taggatggttactaacaaggcctgc

SEQ ID NO: 1095364 - DNA, 25 bp, Homo sapien
gtaggacaggctttgtttgcgtatt

SEQ ID NO: 1095365 - DNA, 25 bp, Homo sapien
tcacccactaggatggttactaaca

SEQ ID NO: 1095366 - DNA, 25 bp, Homo sapien
gtatttttcaccctccacatacagc

SEQ ID NO: 1095367 - DNA, 25 bp, Homo sapien
ttagctagacggattctgcacgtag

SEQ ID NO: 1095368 - DNA, 25 bp, Homo sapien
ggattctgcacgtagccgcgccgaa

SEQ ID NO: 1095369 - DNA, 25 bp, Homo sapien
tagacggattctgcacgtagccgcg

SEQ ID NO: 1095370 - DNA, 25 bp, Homo sapien
tacattttagctagacggattctgc

SEQ ID NO: 1095371 - DNA, 25 bp, Homo sapien
tcaacaacgtctcgggaacaacggc

SEQ ID NO: 1095372 - DNA, 25 bp, Homo sapien
aggaggaggcaacgactgcgggaaa

SEQ ID NO: 1095373 - DNA, 25 bp, Homo sapien
gtgtgagactaagcggccaggagga

SEQ ID NO: 1095374 - DNA, 25 bp, Homo sapien
gacacaggggactcaacaacgtctc

SEQ ID NO: 1095375 - DNA, 25 bp, Homo sapien
aatttaacgtcctcataaagcaagc

SEQ ID NO: 1095376 - DNA, 25 bp, Homo sapien
gactcattccgatttcctgctctgc

SEQ ID NO: 1095377 - DNA, 25 bp, Homo sapien
tacaaaatagcccactcaagaacac

SEQ ID NO: 1095378 - DNA, 25 bp, Homo sapien
caagaacacctactgatgactacat

SEQ ID NO: 1095379 - DNA, 25 bp, Homo sapien
tcagataaagcaacaaaatccattc

SEQ ID NO: 1095380 - DNA, 25 bp, Homo sapien
gctgtaagatctcggcaaattcagg

SEQ ID NO: 1095381 - DNA, 25 bp, Homo sapien
gatctcggcaaattcaggaggagct

SEQ ID NO: 1095382 - DNA, 25 bp, Homo sapien
ttactgactgctgtaagatctcggc

SEQ ID NO: 1095383 - DNA, 25 bp, Homo sapien
ccccagtaccaagaagttcacctgt

SEQ ID NO: 1095384 - DNA, 25 bp, Homo sapien
ctcaagagccccagtaccaagaagt

SEQ ID NO: 1095385 - DNA, 25 bp, Homo sapien
tggagagacctcaagagccccagta

SEQ ID NO: 1095386 - DNA, 25 bp, Homo sapien
ctgtcaccaactggagagacctcaa

SEQ ID NO: 1095387 - DNA, 25 bp, Homo sapien
ctgtaaaaacgcgtataagcatatt

SEQ ID NO: 1095388 - DNA, 25 bp, Homo sapien
tgtaaaaacgcgtataagcatattt

SEQ ID NO: 1095389 - DNA, 25 bp, Homo sapien
taaaaacgcgtataagcatattttc

SEQ ID NO: 1095390 - DNA, 25 bp, Homo sapien
cctatttcttaaggcgccactcctc

SEQ ID NO: 1095391 - DNA, 25 bp, Homo sapien
acagtgcacagaagcagtgtcccag

SEQ ID NO: 1095392 - DNA, 25 bp, Homo sapien
ccactcctccaggatttatttggtg

SEQ ID NO: 1095393 - DNA, 25 bp, Homo sapien
ttatttggtgacagtgcacagaagc

SEQ ID NO: 1095394 - DNA, 25 bp, Homo sapien
gaaattcgacctgtgagctccagca

SEQ ID NO: 1095395 - DNA, 25 bp, Homo sapien
tctgcatcataggtcccctgctctt

SEQ ID NO: 1095396 - DNA, 25 bp, Homo sapien
aagcagggatgttcaagcccttggg

SEQ ID NO: 1095397 - DNA, 25 bp, Homo sapien
ctggaacctgaaagcagggatgttc

SEQ ID NO: 1095398 - DNA, 25 bp, Homo sapien
cacgtgctcaggcttgggttcctca

SEQ ID NO: 1095399 - DNA, 25 bp, Homo sapien
cagccagccccgatgacaagacaga

SEQ ID NO: 1095400 - DNA, 25 bp, Homo sapien
gctcaggcttgggttcctcactttt

SEQ ID NO: 1095401 - DNA, 25 bp, Homo sapien
ggcttgggttcctcacttttgactc

SEQ ID NO: 1095402 - DNA, 25 bp, Homo sapien
tatagtaagcaagtgtaaaaaccat

SEQ ID NO: 1095403 - DNA, 25 bp, Homo sapien
aagtgtaaaaaccatatgaagacca

SEQ ID NO: 1095404 - DNA, 25 bp, Homo sapien
ctatagtaagcaagtgtaaaaacca

SEQ ID NO: 1095405 - DNA, 25 bp, Homo sapien
aaaaccatatgaagaccaagtggat

SEQ ID NO: 1095406 - DNA, 25 bp, Homo sapien
tgcacggacactgcctgttccaacg

SEQ ID NO: 1095407 - DNA, 25 bp, Homo sapien
ctggtccaccagagctgcacggaca

SEQ ID NO: 1095408 - DNA, 25 bp, Homo sapien
aattggctggtctgcaaaagccaac

SEQ ID NO: 1095409 - DNA, 25 bp, Homo sapien
tttgtgacaacacagcacgcagccc

SEQ ID NO: 1095410 - DNA, 25 bp, Homo sapien
tttatccttagctctatttagagca

SEQ ID NO: 1095411 - DNA, 25 bp, Homo sapien
ggcttcatagacataatccagcttg

SEQ ID NO: 1095412 - DNA, 25 bp, Homo sapien
cagtagagttctgagtggcaggtac

SEQ ID NO: 1095413 - DNA, 25 bp, Homo sapien
gttatgcaatcaccagttccctcag

SEQ ID NO: 1095414 - DNA, 25 bp, Homo sapien
ggcatcaaacccaagtcctcgaatt

SEQ ID NO: 1095415 - DNA, 25 bp, Homo sapien
tatccaaaacaaccagagaacacgt

SEQ ID NO: 1095416 - DNA, 25 bp, Homo sapien
ttgactggtaatgggtgaaactgct

SEQ ID NO: 1095417 - DNA, 25 bp, Homo sapien
gagaacacgtggcatcaaacccaag

SEQ ID NO: 1095418 - DNA, 25 bp, Homo sapien
ccacagaagtttcggggcctgcatt

SEQ ID NO: 1095419 - DNA, 25 bp, Homo sapien
atcctgttaacttgactgactgctc

SEQ ID NO: 1095420 - DNA, 25 bp, Homo sapien
cctgttaacttgactgactgctcga

SEQ ID NO: 1095421 - DNA, 25 bp, Homo sapien
taacttgactgactgctcgatggtc

SEQ ID NO: 1095422 - DNA, 25 bp, Homo sapien
tttgcatacaaaataagctgtgact

SEQ ID NO: 1095423 - DNA, 25 bp, Homo sapien
actccggtaacaggactgcagccaa

SEQ ID NO: 1095424 - DNA, 25 bp, Homo sapien
aataagctgtgactccggtaacagg

SEQ ID NO: 1095425 - DNA, 25 bp, Homo sapien
gctgtgactccggtaacaggactgc

SEQ ID NO: 1095426 - DNA, 25 bp, Homo sapien
gaatctggtccaatatacagggccc

SEQ ID NO: 1095427 - DNA, 25 bp, Homo sapien
tacagggccctggtataaacattct

SEQ ID NO: 1095428 - DNA, 25 bp, Homo sapien
cacatgccctaacagcagctgacaa

SEQ ID NO: 1095429 - DNA, 25 bp, Homo sapien
agttacaagtccagtacccaccctg

SEQ ID NO: 1095430 - DNA, 25 bp, Homo sapien
cacaagtgctttgtcatcaaatgcc

SEQ ID NO: 1095431 - DNA, 25 bp, Homo sapien
tcacaagtgctttgtcatcaaatgc

SEQ ID NO: 1095432 - DNA, 25 bp, Homo sapien
acaagtgctttgtcatcaaatgcca

SEQ ID NO: 1095433 - DNA, 25 bp, Homo sapien
caagtgctttgtcatcaaatgccat

SEQ ID NO: 1095434 - DNA, 25 bp, Homo sapien
cttgagatgccagcaggcatctgtg

SEQ ID NO: 1095435 - DNA, 25 bp, Homo sapien
gatgccagcaggcatctgtgaggat

SEQ ID NO: 1095436 - DNA, 25 bp, Homo sapien
tgccagcaggcatctgtgaggatcc

SEQ ID NO: 1095437 - DNA, 25 bp, Homo sapien
cagcaggcatctgtgaggatcccat

SEQ ID NO: 1095438 - DNA, 25 bp, Homo sapien
attataagcataggagtatctctgg

SEQ ID NO: 1095439 - DNA, 25 bp, Homo sapien
ggaattataagcataggagtatctc

SEQ ID NO: 1095440 - DNA, 25 bp, Homo sapien
aaaggaattataagcataggagtat

SEQ ID NO: 1095441 - DNA, 25 bp, Homo sapien
taagcataggagtatctctgggaac

SEQ ID NO: 1095442 - DNA, 25 bp, Homo sapien
aatgtcccgccttatcccagcaaat

SEQ ID NO: 1095443 - DNA, 25 bp, Homo sapien
ggagatcaaagaaatgtcccgcctt

SEQ ID NO: 1095444 - DNA, 25 bp, Homo sapien
ccacgataagaagtccgggagatca

SEQ ID NO: 1095445 - DNA, 25 bp, Homo sapien
gtgctgtgacacctgttgccttcca

SEQ ID NO: 1095446 - DNA, 25 bp, Homo sapien
cataatcgtcgaggtcacacagttt

SEQ ID NO: 1095447 - DNA, 25 bp, Homo sapien
tctagacgtacacagcagagaactg

SEQ ID NO: 1095448 - DNA, 25 bp, Homo sapien
tgaagagtgcacatcataatcgtcg

SEQ ID NO: 1095449 - DNA, 25 bp, Homo sapien
cataaaatccacatctagacgtaca

SEQ ID NO: 1095450 - DNA, 25 bp, Homo sapien
gatgtaggtcctgaaaaccgccaag

SEQ ID NO: 1095451 - DNA, 25 bp, Homo sapien
caagccttaagagctctagtgccac

SEQ ID NO: 1095452 - DNA, 25 bp, Homo sapien
tggttggaccagacacgagtcttac

SEQ ID NO: 1095453 - DNA, 25 bp, Homo sapien
tagtgccacttgattccaagactga

SEQ ID NO: 1095454 - DNA, 25 bp, Homo sapien
aaaatcctaagcagacaggctgtca

SEQ ID NO: 1095455 - DNA, 25 bp, Homo sapien
caggctgtcaatgttaattaaaggt

SEQ ID NO: 1095456 - DNA, 25 bp, Homo sapien
acaggctgtcaatgttaattaaagg

SEQ ID NO: 1095457 - DNA, 25 bp, Homo sapien
atcctaagcagacaggctgtcaatg

SEQ ID NO: 1095458 - DNA, 25 bp, Homo sapien
gggctgaatggaggaggtactatat

SEQ ID NO: 1095459 - DNA, 25 bp, Homo sapien
cagggctgaatggaggaggtactat

SEQ ID NO: 1095460 - DNA, 25 bp, Homo sapien
gctgaatggaggaggtactatattt

SEQ ID NO: 1095461 - DNA, 25 bp, Homo sapien
tgaatggaggaggtactatattttt

SEQ ID NO: 1095462 - DNA, 25 bp, Homo sapien
tagatgggctgattccgaagtactc

SEQ ID NO: 1095463 - DNA, 25 bp, Homo sapien
agatgggctgattccgaagtactcc

SEQ ID NO: 1095464 - DNA, 25 bp, Homo sapien
ttagatgggctgattccgaagtact

SEQ ID NO: 1095465 - DNA, 25 bp, Homo sapien
tgtcaaataggaatgagctcccttt

SEQ ID NO: 1095466 - DNA, 25 bp, Homo sapien
aaaatggatatgactgttgtcaaat

SEQ ID NO: 1095467 - DNA, 25 bp, Homo sapien
tgactgttgtcaaataggaatgagc

SEQ ID NO: 1095468 - DNA, 25 bp, Homo sapien
tggatatgactgttgtcaaatagga

SEQ ID NO: 1095469 - DNA, 25 bp, Homo sapien
tcaatgtgcatgatcaatgacaatg

SEQ ID NO: 1095470 - DNA, 25 bp, Homo sapien
gacaatgtgatagcaagggtctcca

SEQ ID NO: 1095471 - DNA, 25 bp, Homo sapien
tctggcattgcctatttcaacacgg

SEQ ID NO: 1095472 - DNA, 25 bp, Homo sapien
agtttcgtctttggtctgtctctgg

SEQ ID NO: 1095473 - DNA, 25 bp, Homo sapien
ataacaactgatgtgccagacactg

SEQ ID NO: 1095474 - DNA, 25 bp, Homo sapien
tttacgatgttattcaggttctcac

SEQ ID NO: 1095475 - DNA, 25 bp, Homo sapien
gggcttacagccatgcagtctggct

SEQ ID NO: 1095476 - DNA, 25 bp, Homo sapien
gaggcatgtcctattatcatctgag

SEQ ID NO: 1095477 - DNA, 25 bp, Homo sapien
tataaactcaaacaacacttatcaa

SEQ ID NO: 1095478 - DNA, 25 bp, Homo sapien
tcaaacaacacttatcaaactcttc

SEQ ID NO: 1095479 - DNA, 25 bp, Homo sapien
tccatcaacccatcactgaggtatt

SEQ ID NO: 1095480 - DNA, 25 bp, Homo sapien
tgtgcgtggtggattgctgcatcca

SEQ ID NO: 1095481 - DNA, 25 bp, Homo sapien
ccaacctgcaggtgggatagctgta

SEQ ID NO: 1095482 - DNA, 25 bp, Homo sapien
aaccagccgatgacagagccatgga

SEQ ID NO: 1095483 - DNA, 25 bp, Homo sapien
gaggcaccggctgctttccaagcat

SEQ ID NO: 1095484 - DNA, 25 bp, Homo sapien
cagggctaaagctcgagacccagga

SEQ ID NO: 1095485 - DNA, 25 bp, Homo sapien
taataaggactgtgccaacacaggg

SEQ ID NO: 1095486 - DNA, 25 bp, Homo sapien
cagggggcttaaaatgctgtatagc

SEQ ID NO: 1095487 - DNA, 25 bp, Homo sapien
gctctgaaggcctttctgttaatcc

SEQ ID NO: 1095488 - DNA, 25 bp, Homo sapien
ttagagccctcagggaatctcacac

SEQ ID NO: 1095489 - DNA, 25 bp, Homo sapien
tctgggccttcaaaagctgaatttc

SEQ ID NO: 1095490 - DNA, 25 bp, Homo sapien
ctttctgggccttcaaaagctgaat

SEQ ID NO: 1095491 - DNA, 25 bp, Homo sapien
tagtcctctttctgggccttcaaaa

SEQ ID NO: 1095492 - DNA, 25 bp, Homo sapien
cctctttctgggccttcaaaagctg

SEQ ID NO: 1095493 - DNA, 25 bp, Homo sapien
gtctgtgccacgatcaaagttgcat

SEQ ID NO: 1095494 - DNA, 25 bp, Homo sapien
atccctcagggatcttcaaatggag

SEQ ID NO: 1095495 - DNA, 25 bp, Homo sapien
tgccacgatcaaagttgcattttca

SEQ ID NO: 1095496 - DNA, 25 bp, Homo sapien
caggactggtctgtgccacgatcaa

SEQ ID NO: 1095497 - DNA, 25 bp, Homo sapien
tattttgctgtaattatctgcaaca

SEQ ID NO: 1095498 - DNA, 25 bp, Homo sapien
taattatctgcaacaaagtcttcca

SEQ ID NO: 1095499 - DNA, 25 bp, Homo sapien
ttttccagaaactgtcgtcccagcc

SEQ ID NO: 1095500 - DNA, 25 bp, Homo sapien
atatgtccacttacacaccagggag

SEQ ID NO: 1095501 - DNA, 25 bp, Homo sapien
ggagtagaaccaccacaggactaag

SEQ ID NO: 1095502 - DNA, 25 bp, Homo sapien
tgttgagtctctaatcggtggcccc

SEQ ID NO: 1095503 - DNA, 25 bp, Homo sapien
cagtgtgttcctagatccaaaggtc

SEQ ID NO: 1095504 - DNA, 25 bp, Homo sapien
tccaggtgccaaggtgtacttacag

SEQ ID NO: 1095505 - DNA, 25 bp, Homo sapien
tcagtcacactggtcaaaaagtagt

SEQ ID NO: 1095506 - DNA, 25 bp, Homo sapien
ggttattagataccctgtcttcctg

SEQ ID NO: 1095507 - DNA, 25 bp, Homo sapien
cttcctgtacttgcatagctgggtt

SEQ ID NO: 1095508 - DNA, 25 bp, Homo sapien
cagaatagcttagtatacccaagag

SEQ ID NO: 1095509 - DNA, 25 bp, Homo sapien
cctatatgaaagaatggatcagcaa

SEQ ID NO: 1095510 - DNA, 25 bp, Homo sapien
tttgaataagccagagcaactaggc

SEQ ID NO: 1095511 - DNA, 25 bp, Homo sapien
tctatgtatgtgtcaacaacctttg

SEQ ID NO: 1095512 - DNA, 25 bp, Homo sapien
gatgacatggtcacatatatagaga

SEQ ID NO: 1095513 - DNA, 25 bp, Homo sapien
taacaatgtgtctctacagtcaggg

SEQ ID NO: 1095514 - DNA, 25 bp, Homo sapien
tacagagacaatcaaatgactaggg

SEQ ID NO: 1095515 - DNA, 25 bp, Homo sapien
ggcaaaattcgacagtacagagaca

SEQ ID NO: 1095516 - DNA, 25 bp, Homo sapien
gacaaccaagcatttactagacaga

SEQ ID NO: 1095517 - DNA, 25 bp, Homo sapien
gggctctgtcagtaacaacacactc

SEQ ID NO: 1095518 - DNA, 25 bp, Homo sapien
cactcatgcctaacaagctggaatg

SEQ ID NO: 1095519 - DNA, 25 bp, Homo sapien
gcctggtactgagagaccatggaga

SEQ ID NO: 1095520 - DNA, 25 bp, Homo sapien
tatgtattgggtgcttgctctgtgc

SEQ ID NO: 1095521 - DNA, 25 bp, Homo sapien
tctcgtctggactactgtttgcaaa

SEQ ID NO: 1095522 - DNA, 25 bp, Homo sapien
cagtgaacactttgtcaagggccag

SEQ ID NO: 1095523 - DNA, 25 bp, Homo sapien
aatggtaacagcctcctaacaatgg

SEQ ID NO: 1095524 - DNA, 25 bp, Homo sapien
aagggccagcgttggtttctcgtct

SEQ ID NO: 1095525 - DNA, 25 bp, Homo sapien
tgggcatcaatgagtgaagctgcga

SEQ ID NO: 1095526 - DNA, 25 bp, Homo sapien
tgcgaccgcaatcccagggagaagg

SEQ ID NO: 1095527 - DNA, 25 bp, Homo sapien
ctcctgcatgggcatcaatgagtga

SEQ ID NO: 1095528 - DNA, 25 bp, Homo sapien
caatgagtgaagctgcgaccgcaat

SEQ ID NO: 1095529 - DNA, 25 bp, Homo sapien
ttccacacggctgggaggtctcata

SEQ ID NO: 1095530 - DNA, 25 bp, Homo sapien
ggaagaagcaaacgcagaaaagcct

SEQ ID NO: 1095531 - DNA, 25 bp, Homo sapien
agcaaacgcagaaaagcctgataaa

SEQ ID NO: 1095532 - DNA, 25 bp, Homo sapien
ccacacggctgggaggtctcataat

SEQ ID NO: 1095533 - DNA, 25 bp, Homo sapien
cttgctctatctgctcagggactgg

SEQ ID NO: 1095534 - DNA, 25 bp, Homo sapien
gcctacttggcagaaacacatcaat

SEQ ID NO: 1095535 - DNA, 25 bp, Homo sapien
tcaggcagtagtgggtcgcattaaa

SEQ ID NO: 1095536 - DNA, 25 bp, Homo sapien
gattccacggcatgactttatctgc

SEQ ID NO: 1095537 - DNA, 25 bp, Homo sapien
gatccattccctatactcttgtaac

SEQ ID NO: 1095538 - DNA, 25 bp, Homo sapien
ggaagagctggctgatccattccct

SEQ ID NO: 1095539 - DNA, 25 bp, Homo sapien
gagctggctgatccattccctatac

SEQ ID NO: 1095540 - DNA, 25 bp, Homo sapien
ctcctaacttgtcctggaagagctg

SEQ ID NO: 1095541 - DNA, 25 bp, Homo sapien
cagtacctgacatgaaaggcagata

SEQ ID NO: 1095542 - DNA, 25 bp, Homo sapien
tttgtccaatcagaatgggagctct

SEQ ID NO: 1095543 - DNA, 25 bp, Homo sapien
ggtgacagccggagaataatccttg

SEQ ID NO: 1095544 - DNA, 25 bp, Homo sapien
tcatactcggatggcttacttgcct

SEQ ID NO: 1095545 - DNA, 25 bp, Homo sapien
ggacagcagccccagccaagcttgg

SEQ ID NO: 1095546 - DNA, 25 bp, Homo sapien
agcagccccagccaagcttggttct

SEQ ID NO: 1095547 - DNA, 25 bp, Homo sapien
cccagccaagcttggttctcctttc

SEQ ID NO: 1095548 - DNA, 25 bp, Homo sapien
agccccagccaagcttggttctcct

SEQ ID NO: 1095549 - DNA, 25 bp, Homo sapien
tgataagagtttcggttgcaacaga

SEQ ID NO: 1095550 - DNA, 25 bp, Homo sapien
ccaagtttctataaaggctaggatt

SEQ ID NO: 1095551 - DNA, 25 bp, Homo sapien
tcagtaccacctcctgtgataagag

SEQ ID NO: 1095552 - DNA, 25 bp, Homo sapien
tcagggttagttgaacattgacaga

SEQ ID NO: 1095553 - DNA, 25 bp, Homo sapien
taggaaacctcggaagcctgctcag

SEQ ID NO: 1095554 - DNA, 25 bp, Homo sapien
gcataggaaacctcggaagcctgct

SEQ ID NO: 1095555 - DNA, 25 bp, Homo sapien
tgcataggaaacctcggaagcctgc

SEQ ID NO: 1095556 - DNA, 25 bp, Homo sapien
cataggaaacctcggaagcctgctc

SEQ ID NO: 1095557 - DNA, 25 bp, Homo sapien
acagatgacagccagccgtgacgtc

SEQ ID NO: 1095558 - DNA, 25 bp, Homo sapien
tcacagatgaggccgtgccctctca

SEQ ID NO: 1095559 - DNA, 25 bp, Homo sapien
acaagaagacgttccacagatgaca

SEQ ID NO: 1095560 - DNA, 25 bp, Homo sapien
gtgacaagaagacgttccacagatg

SEQ ID NO: 1095561 - DNA, 25 bp, Homo sapien
cacttaatttcctccatagctgctt

SEQ ID NO: 1095562 - DNA, 25 bp, Homo sapien
ggctgtgtcccgctctaatctctgc

SEQ ID NO: 1095563 - DNA, 25 bp, Homo sapien
gctgtgtcccgctctaatctctgct

SEQ ID NO: 1095564 - DNA, 25 bp, Homo sapien
atcccacttaatttcctccatagct

SEQ ID NO: 1095565 - DNA, 25 bp, Homo sapien
tcaggggtccctacagttgcaaaac

SEQ ID NO: 1095566 - DNA, 25 bp, Homo sapien
gtccctacagttgcaaaacagtctc

SEQ ID NO: 1095567 - DNA, 25 bp, Homo sapien
aggggtccctacagttgcaaaacag

SEQ ID NO: 1095568 - DNA, 25 bp, Homo sapien
gggtccctacagttgcaaaacagtc

SEQ ID NO: 1095569 - DNA, 25 bp, Homo sapien
taggagaataagtcatggaagcccc

SEQ ID NO: 1095570 - DNA, 25 bp, Homo sapien
tcaaacaagcgtgtgcagatgcacc

SEQ ID NO: 1095571 - DNA, 25 bp, Homo sapien
ggtgacacctgaactggacctttgg

SEQ ID NO: 1095572 - DNA, 25 bp, Homo sapien
ccagatgaataagagagcacaggct

SEQ ID NO: 1095573 - DNA, 25 bp, Homo sapien
tgtggtttcctgttgcgtcctggtg

SEQ ID NO: 1095574 - DNA, 25 bp, Homo sapien
tggtttcctgttgcgtcctggtgtg

SEQ ID NO: 1095575 - DNA, 25 bp, Homo sapien
gtgtctgcgttctggtttctgggtt

SEQ ID NO: 1095576 - DNA, 25 bp, Homo sapien
tgcgtcctggtgtgtctgcgttctg

SEQ ID NO: 1095577 - DNA, 25 bp, Homo sapien
tatatcctcagggtgacgtttagca

SEQ ID NO: 1095578 - DNA, 25 bp, Homo sapien
ttcacaatcttttagcaagctctgc

SEQ ID NO: 1095579 - DNA, 25 bp, Homo sapien
ctcttttatatcctcagggtgacgt

SEQ ID NO: 1095580 - DNA, 25 bp, Homo sapien
gggcctgttcgaaacctccaagata

SEQ ID NO: 1095581 - DNA, 25 bp, Homo sapien
gatgcatatacgttgttatctggct

SEQ ID NO: 1095582 - DNA, 25 bp, Homo sapien
atgcatatacgttgttatctggctt

SEQ ID NO: 1095583 - DNA, 25 bp, Homo sapien
ttgatgcatatacgttgttatctgg

SEQ ID NO: 1095584 - DNA, 25 bp, Homo sapien
tgatgcatatacgttgttatctggc

SEQ ID NO: 1095585 - DNA, 25 bp, Homo sapien
ctgttctgctgctgacggttcttgt

SEQ ID NO: 1095586 - DNA, 25 bp, Homo sapien
gctgctgacggttcttgtggtcaca

SEQ ID NO: 1095587 - DNA, 25 bp, Homo sapien
tgacggttcttgtggtcacaggcca

SEQ ID NO: 1095588 - DNA, 25 bp, Homo sapien
cggttcttgtggtcacaggccacat

SEQ ID NO: 1095589 - DNA, 25 bp, Homo sapien
tttcaaagtggttaagagtgttctc

SEQ ID NO: 1095590 - DNA, 25 bp, Homo sapien
ttcaaagtggttaagagtgttctca

SEQ ID NO: 1095591 - DNA, 25 bp, Homo sapien
tcaaagtggttaagagtgttctcat

SEQ ID NO: 1095592 - DNA, 25 bp, Homo sapien
ggctaatcgacatgtcttgttctgt

SEQ ID NO: 1095593 - DNA, 25 bp, Homo sapien
cctatgtgtgcaatgacaattttta

SEQ ID NO: 1095594 - DNA, 25 bp, Homo sapien
acctttgacctggatggctaatcga

SEQ ID NO: 1095595 - DNA, 25 bp, Homo sapien
cagctcatccagtcctatgtgtgca

SEQ ID NO: 1095596 - DNA, 25 bp, Homo sapien
cgtctctttggtaggctcttctttc

SEQ ID NO: 1095597 - DNA, 25 bp, Homo sapien
ggattctctcctatgttcatctcac

SEQ ID NO: 1095598 - DNA, 25 bp, Homo sapien
ttagcttcgtctctttggtaggctc

SEQ ID NO: 1095599 - DNA, 25 bp, Homo sapien
gcttcgtctctttggtaggctcttc

SEQ ID NO: 1095600 - DNA, 25 bp, Homo sapien
catctgcagtggtacatgtttctca

SEQ ID NO: 1095601 - DNA, 25 bp, Homo sapien
gaggctgggcagaaaatctattcat

SEQ ID NO: 1095602 - DNA, 25 bp, Homo sapien
cagaccttatttgtcttgacctcag

SEQ ID NO: 1095603 - DNA, 25 bp, Homo sapien
tagcagtcccttcaacagtaaggaa

SEQ ID NO: 1095604 - DNA, 25 bp, Homo sapien
cagacgcctggtacaaaaatcgggt

SEQ ID NO: 1095605 - DNA, 25 bp, Homo sapien
ctggtacaaaaatcgggtctttgct

SEQ ID NO: 1095606 - DNA, 25 bp, Homo sapien
ccccagacgcctggtacaaaaatcg

SEQ ID NO: 1095607 - DNA, 25 bp, Homo sapien
ccagacgcctggtacaaaaatcggg

SEQ ID NO: 1095608 - DNA, 25 bp, Homo sapien
ttcattcagccagaacccaggtacc

SEQ ID NO: 1095609 - DNA, 25 bp, Homo sapien
agtaacgctctgaccaccttcattc

SEQ ID NO: 1095610 - DNA, 25 bp, Homo sapien
cattcagccagaacccaggtaccat

SEQ ID NO: 1095611 - DNA, 25 bp, Homo sapien
caattttccagtaacgctctgacca

SEQ ID NO: 1095612 - DNA, 25 bp, Homo sapien
caggttctgcacttgtatcccggaa

SEQ ID NO: 1095613 - DNA, 25 bp, Homo sapien
ctgcaggttctgcacttgtatcccg

SEQ ID NO: 1095614 - DNA, 25 bp, Homo sapien
tgcaggttctgcacttgtatcccgg

SEQ ID NO: 1095615 - DNA, 25 bp, Homo sapien
gcaggttctgcacttgtatcccgga

SEQ ID NO: 1095616 - DNA, 25 bp, Homo sapien
ggaaataagcttcagtatctggatg

SEQ ID NO: 1095617 - DNA, 25 bp, Homo sapien
gccaaggtccagctggaaataagct

SEQ ID NO: 1095618 - DNA, 25 bp, Homo sapien
tggaaagggtgatggccaaggtcca

SEQ ID NO: 1095619 - DNA, 25 bp, Homo sapien
tatctggatgtaggaactgcacggg

SEQ ID NO: 1095620 - DNA, 25 bp, Homo sapien
aagcagcatggccttgtaccatgtg

SEQ ID NO: 1095621 - DNA, 25 bp, Homo sapien
catggccttgtaccatgtggtctat

SEQ ID NO: 1095622 - DNA, 25 bp, Homo sapien
tggcctttacttgtagttctggaaa

SEQ ID NO: 1095623 - DNA, 25 bp, Homo sapien
ggctgtggcctttacttgtagttct

SEQ ID NO: 1095624 - DNA, 25 bp, Homo sapien
ggatcatccaggtgactatctttca

SEQ ID NO: 1095625 - DNA, 25 bp, Homo sapien
tatctattaaggagtatggctggga

SEQ ID NO: 1095626 - DNA, 25 bp, Homo sapien
tatagtccctgggtatattcttggg

SEQ ID NO: 1095627 - DNA, 25 bp, Homo sapien
tgtctgtaggatctgaaaatcaccc

SEQ ID NO: 1095628 - DNA, 25 bp, Homo sapien
aatatctaagatacctaaggcatta

SEQ ID NO: 1095629 - DNA, 25 bp, Homo sapien
aaagtgttttagaaggaaggctcag

SEQ ID NO: 1095630 - DNA, 25 bp, Homo sapien
aaggctcagtgatttctagttctag

SEQ ID NO: 1095631 - DNA, 25 bp, Homo sapien
tagtttgtgattgggtgagtgatcc

SEQ ID NO: 1095632 - DNA, 25 bp, Homo sapien
aaagttctgaaccaatgatttcaaa

SEQ ID NO: 1095633 - DNA, 25 bp, Homo sapien
aagttctgaaccaatgatttcaaaa

SEQ ID NO: 1095634 - DNA, 25 bp, Homo sapien
aaagatgaaagctggtcaaccttcc

SEQ ID NO: 1095635 - DNA, 25 bp, Homo sapien
gaatgagggagtcaaaccaactcct

SEQ ID NO: 1095636 - DNA, 25 bp, Homo sapien
tagctcggtaaaatgggccagtgac

SEQ ID NO: 1095637 - DNA, 25 bp, Homo sapien
tacctcaccgggttaaatcacacca

SEQ ID NO: 1095638 - DNA, 25 bp, Homo sapien
gttagagacctgattttcaacctaa

SEQ ID NO: 1095639 - DNA, 25 bp, Homo sapien
gagttagagacctgattttcaacct

SEQ ID NO: 1095640 - DNA, 25 bp, Homo sapien
tagagacctgattttcaacctaaac

SEQ ID NO: 1095641 - DNA, 25 bp, Homo sapien
atgcagttaggatcaggagttagag

SEQ ID NO: 1095642 - DNA, 25 bp, Homo sapien
gaagattatgtatgtgaaggcgcag

SEQ ID NO: 1095643 - DNA, 25 bp, Homo sapien
tactcttagtagatgtatggccatg

SEQ ID NO: 1095644 - DNA, 25 bp, Homo sapien
gaagctagcccactgtactctcaaa

SEQ ID NO: 1095645 - DNA, 25 bp, Homo sapien
aaggtgccacatcctagtagaaagg

SEQ ID NO: 1095646 - DNA, 25 bp, Homo sapien
caacagtaaggaaacccacaggctg

SEQ ID NO: 1095647 - DNA, 25 bp, Homo sapien
tctgctaagggagaccggttgccat

SEQ ID NO: 1095648 - DNA, 25 bp, Homo sapien
ccaggtgactgttcaaatatgcata

SEQ ID NO: 1095649 - DNA, 25 bp, Homo sapien
caggctgagccttcttaatcagatc

SEQ ID NO: 1095650 - DNA, 25 bp, Homo sapien
tgtgcaaggactagctgttacttac

SEQ ID NO: 1095651 - DNA, 25 bp, Homo sapien
ttcacccatgtgcaaggactagctg

SEQ ID NO: 1095652 - DNA, 25 bp, Homo sapien
gccttcacccatgtgcaaggactag

SEQ ID NO: 1095653 - DNA, 25 bp, Homo sapien
cccatgtgcaaggactagctgttac

SEQ ID NO: 1095654 - DNA, 25 bp, Homo sapien
gtggttgagagttctcccaccaagt

SEQ ID NO: 1095655 - DNA, 25 bp, Homo sapien
ggttgagagttctcccaccaagttc

SEQ ID NO: 1095656 - DNA, 25 bp, Homo sapien
ccaagttcatctggcccctctagga

SEQ ID NO: 1095657 - DNA, 25 bp, Homo sapien
ggggtggttgagagttctcccacca

SEQ ID NO: 1095658 - DNA, 25 bp, Homo sapien
ccaaagccggaatatacagatatcc

SEQ ID NO: 1095659 - DNA, 25 bp, Homo sapien
agaactgggagagtgcaacgctgcc

SEQ ID NO: 1095660 - DNA, 25 bp, Homo sapien
gggagagtgcaacgctgccaaagcc

SEQ ID NO: 1095661 - DNA, 25 bp, Homo sapien
gccaaagccggaatatacagatatc

SEQ ID NO: 1095662 - DNA, 25 bp, Homo sapien
taaataatcgtatgtgtagccctca

SEQ ID NO: 1095663 - DNA, 25 bp, Homo sapien
tgcttcttttaaataatcgtatgtg

SEQ ID NO: 1095664 - DNA, 25 bp, Homo sapien
taatcgtatgtgtagccctcacctt

SEQ ID NO: 1095665 - DNA, 25 bp, Homo sapien
ttttaaataatcgtatgtgtagccc

SEQ ID NO: 1095666 - DNA, 25 bp, Homo sapien
ctactggccatctcgtaaagatgca

SEQ ID NO: 1095667 - DNA, 25 bp, Homo sapien
gatgcaagtaaaggccaccaagcag

SEQ ID NO: 1095668 - DNA, 25 bp, Homo sapien
agcaggagctgccaattcaagggca

SEQ ID NO: 1095669 - DNA, 25 bp, Homo sapien
gttgtgctgtctgtccatcgtgcca

SEQ ID NO: 1095670 - DNA, 25 bp, Homo sapien
tcaatagaaaagacggaatcctccc

SEQ ID NO: 1095671 - DNA, 25 bp, Homo sapien
ccaatcaatagaaaagacggaatcc

SEQ ID NO: 1095672 - DNA, 25 bp, Homo sapien
tattccaatcaatagaaaagacgga

SEQ ID NO: 1095673 - DNA, 25 bp, Homo sapien
ttccaatcaatagaaaagacggaat

SEQ ID NO: 1095674 - DNA, 25 bp, Homo sapien
agctgccgtggataaagatagttcc

SEQ ID NO: 1095675 - DNA, 25 bp, Homo sapien
atggtcaaaagaagctgccgtggat

SEQ ID NO: 1095676 - DNA, 25 bp, Homo sapien
gatagttcccatgaaatacgttcag

SEQ ID NO: 1095677 - DNA, 25 bp, Homo sapien
atgtgttttcttgccgaaacaagtt

SEQ ID NO: 1095678 - DNA, 25 bp, Homo sapien
cctgagacagtttcaatccggtgac

SEQ ID NO: 1095679 - DNA, 25 bp, Homo sapien
tggccaggtagagaatggcaagatc

SEQ ID NO: 1095680 - DNA, 25 bp, Homo sapien
ggcttgaactgtggccaggtagaga

SEQ ID NO: 1095681 - DNA, 25 bp, Homo sapien
gtcctgagacagtttcaatccggtg

SEQ ID NO: 1095682 - DNA, 25 bp, Homo sapien
tactgatggctctaagtctctttaa

SEQ ID NO: 1095683 - DNA, 25 bp, Homo sapien
catgtgctgtatcttggggagccag

SEQ ID NO: 1095684 - DNA, 25 bp, Homo sapien
gggagccagtggcctagagtatact

SEQ ID NO: 1095685 - DNA, 25 bp, Homo sapien
taaaaatggcattacagtatcttac

SEQ ID NO: 1095686 - DNA, 25 bp, Homo sapien
gtcaaatgtcctttaaccatgggaa

SEQ ID NO: 1095687 - DNA, 25 bp, Homo sapien
tgcacctgggctacaaacttatacg

SEQ ID NO: 1095688 - DNA, 25 bp, Homo sapien
catataggaagtccctcgttaacca

SEQ ID NO: 1095689 - DNA, 25 bp, Homo sapien
ccaaaacgttatgtagcagatgact

SEQ ID NO: 1095690 - DNA, 25 bp, Homo sapien
tacctaccatacaagtctgctgctg

SEQ ID NO: 1095691 - DNA, 25 bp, Homo sapien
ggcactctgctatgcactttaatag

SEQ ID NO: 1095692 - DNA, 25 bp, Homo sapien
gaagtgtccagctcacgaaaggtgc

SEQ ID NO: 1095693 - DNA, 25 bp, Homo sapien
taggcagcaaaggtaaaacttgtag

SEQ ID NO: 1095694 - DNA, 25 bp, Homo sapien
gtactgattgagtgccctgctgcct

SEQ ID NO: 1095695 - DNA, 25 bp, Homo sapien
cagtaatgtccgcatgcatttgcac

SEQ ID NO: 1095696 - DNA, 25 bp, Homo sapien
cttctataatgaagcgagtccccaa

SEQ ID NO: 1095697 - DNA, 25 bp, Homo sapien
gctgaggcctccacataggaaaaga

SEQ ID NO: 1095698 - DNA, 25 bp, Homo sapien
cgcatatatcctcctattctcactt

SEQ ID NO: 1095699 - DNA, 25 bp, Homo sapien
tgcccatttgctgccaagccaaaaa

SEQ ID NO: 1095700 - DNA, 25 bp, Homo sapien
catatatcctcctattctcacttca

SEQ ID NO: 1095701 - DNA, 25 bp, Homo sapien
catgcccatttgctgccaagccaaa

SEQ ID NO: 1095702 - DNA, 25 bp, Homo sapien
gtgccttttacagggacaaatgcaa

SEQ ID NO: 1095703 - DNA, 25 bp, Homo sapien
atactggctgcttgtgtacgtgcct

SEQ ID NO: 1095704 - DNA, 25 bp, Homo sapien
tgtgtacgtgccttttacagggaca

SEQ ID NO: 1095705 - DNA, 25 bp, Homo sapien
ggctgcttgtgtacgtgccttttac

SEQ ID NO: 1095706 - DNA, 25 bp, Homo sapien
taggaaaactagagcaatacaatgt

SEQ ID NO: 1095707 - DNA, 25 bp, Homo sapien
gcatttctgagaatcatgttccagg

SEQ ID NO: 1095708 - DNA, 25 bp, Homo sapien
tgtttaaaggcaccaatgacactac

SEQ ID NO: 1095709 - DNA, 25 bp, Homo sapien
cagtcctccctaactgtctttgtag

SEQ ID NO: 1095710 - DNA, 25 bp, Homo sapien
gaggcttaatgagagggcacacact

SEQ ID NO: 1095711 - DNA, 25 bp, Homo sapien
actgggccaggacttaagacattgc

SEQ ID NO: 1095712 - DNA, 25 bp, Homo sapien
tgataagatgtaccacacaggtgtg

SEQ ID NO: 1095713 - DNA, 25 bp, Homo sapien
caagccttctctatggacctgggac

SEQ ID NO: 1095714 - DNA, 25 bp, Homo sapien
cctgccatttgattcaagttcagat

SEQ ID NO: 1095715 - DNA, 25 bp, Homo sapien
tctgctggccgagggaatactgaga

SEQ ID NO: 1095716 - DNA, 25 bp, Homo sapien
cagatccactgatgtttattaagcg

SEQ ID NO: 1095717 - DNA, 25 bp, Homo sapien
aagctgctacctgccatttgattca

SEQ ID NO: 1095718 - DNA, 25 bp, Homo sapien
gcagcacccacaagaacggactcca

SEQ ID NO: 1095719 - DNA, 25 bp, Homo sapien
acaagaacggactccacctcttgcg

SEQ ID NO: 1095720 - DNA, 25 bp, Homo sapien
aagaacggactccacctcttgcgac

SEQ ID NO: 1095721 - DNA, 25 bp, Homo sapien
acggactccacctcttgcgacagga

SEQ ID NO: 1095722 - DNA, 25 bp, Homo sapien
cagaatctgaagctggtcctcagac

SEQ ID NO: 1095723 - DNA, 25 bp, Homo sapien
tgccagaatctgaagctggtcctca

SEQ ID NO: 1095724 - DNA, 25 bp, Homo sapien
gccagaatctgaagctggtcctcag

SEQ ID NO: 1095725 - DNA, 25 bp, Homo sapien
cttgccagaatctgaagctggtcct

SEQ ID NO: 1095726 - DNA, 25 bp, Homo sapien
tacagaaagctaatgacatctgcag

SEQ ID NO: 1095727 - DNA, 25 bp, Homo sapien
tgcattttgatctcttgtcactgtc

SEQ ID NO: 1095728 - DNA, 25 bp, Homo sapien
gctggaattaaagcttgttttgtct

SEQ ID NO: 1095729 - DNA, 25 bp, Homo sapien
ggttcaagacaaatagcactgctgg

SEQ ID NO: 1095730 - DNA, 25 bp, Homo sapien
gattgctgctaccaaccactgggtt

SEQ ID NO: 1095731 - DNA, 25 bp, Homo sapien
cagttgccatagtgtacttccctag

SEQ ID NO: 1095732 - DNA, 25 bp, Homo sapien
taccaccttgtgagaggtgtctcag

SEQ ID NO: 1095733 - DNA, 25 bp, Homo sapien
ctgatggaatacaaagagcgtgggc

SEQ ID NO: 1095734 - DNA, 25 bp, Homo sapien
cctgtcaaagggtcaccacagctgt

SEQ ID NO: 1095735 - DNA, 25 bp, Homo sapien
tgcatcctagggctaatgctccctg

SEQ ID NO: 1095736 - DNA, 25 bp, Homo sapien
gacatccttgagaagcgtctaccct

SEQ ID NO: 1095737 - DNA, 25 bp, Homo sapien
tagtgagagagaggtccggacatcc

SEQ ID NO: 1095738 - DNA, 25 bp, Homo sapien
gctgcttctctgcctgtcctaaatt

SEQ ID NO: 1095739 - DNA, 25 bp, Homo sapien
tgtcctaaattaatgtttccactcc

SEQ ID NO: 1095740 - DNA, 25 bp, Homo sapien
cttctctgcctgtcctaaattaatg

SEQ ID NO: 1095741 - DNA, 25 bp, Homo sapien
tgcttctctgcctgtcctaaattaa

SEQ ID NO: 1095742 - DNA, 25 bp, Homo sapien
ccttcccaggagttaacgttgatct

SEQ ID NO: 1095743 - DNA, 25 bp, Homo sapien
tcaactgtggtcctatctatccaac

SEQ ID NO: 1095744 - DNA, 25 bp, Homo sapien
cgttgatctccgttctgtctgtatc

SEQ ID NO: 1095745 - DNA, 25 bp, Homo sapien
ttcactactcctgaactgggaccct

SEQ ID NO: 1095746 - DNA, 25 bp, Homo sapien
tattagctctccaatcatgaacaag

SEQ ID NO: 1095747 - DNA, 25 bp, Homo sapien
gggaaccctgttggactcctgatga

SEQ ID NO: 1095748 - DNA, 25 bp, Homo sapien
cagcaccaagcttagaatgtagtgg

SEQ ID NO: 1095749 - DNA, 25 bp, Homo sapien
taagtgataagaaagcctaacgggc

SEQ ID NO: 1095750 - DNA, 25 bp, Homo sapien
gcttggcattcagttggcgtggctt

SEQ ID NO: 1095751 - DNA, 25 bp, Homo sapien
cggcccatgcaagaagactatcttc

SEQ ID NO: 1095752 - DNA, 25 bp, Homo sapien
gagaggtttacagcatcagcttggc

SEQ ID NO: 1095753 - DNA, 25 bp, Homo sapien
tattgctaggctgataagacggccc

SEQ ID NO: 1095754 - DNA, 25 bp, Homo sapien
aaactctttctagcacgtcaagctg

SEQ ID NO: 1095755 - DNA, 25 bp, Homo sapien
gatgaagcagtctgtaagcagccat

SEQ ID NO: 1095756 - DNA, 25 bp, Homo sapien
acagagctcagcacgggcagatgtg

SEQ ID NO: 1095757 - DNA, 25 bp, Homo sapien
taaaccttctgacgatgcttacaca

SEQ ID NO: 1095758 - DNA, 25 bp, Homo sapien
tccacaactgagctatctatttccc

SEQ ID NO: 1095759 - DNA, 25 bp, Homo sapien
ccattgctgctatcgtccacaactg

SEQ ID NO: 1095760 - DNA, 25 bp, Homo sapien
gctgctatcgtccacaactgagcta

SEQ ID NO: 1095761 - DNA, 25 bp, Homo sapien
tatcgtccacaactgagctatctat

SEQ ID NO: 1095762 - DNA, 25 bp, Homo sapien
gctgaagctcacgatactaaaagtt

SEQ ID NO: 1095763 - DNA, 25 bp, Homo sapien
taaataatacctggctgctaggagc

SEQ ID NO: 1095764 - DNA, 25 bp, Homo sapien
taagtacacgcactcaatgtatgcg

SEQ ID NO: 1095765 - DNA, 25 bp, Homo sapien
tggaaaacgaactcaactctggtga

SEQ ID NO: 1095766 - DNA, 25 bp, Homo sapien
tctctgcaatcaacgcgggacatgc

SEQ ID NO: 1095767 - DNA, 25 bp, Homo sapien
acttctctgcaatcaacgcgggaca

SEQ ID NO: 1095768 - DNA, 25 bp, Homo sapien
tcacttctctgcaatcaacgcggga

SEQ ID NO: 1095769 - DNA, 25 bp, Homo sapien
ttctctgcaatcaacgcgggacatg

SEQ ID NO: 1095770 - DNA, 25 bp, Homo sapien
gacattcgcacagaacaagtcaaag

SEQ ID NO: 1095771 - DNA, 25 bp, Homo sapien
gagaagcgagacattcgcacagaac

SEQ ID NO: 1095772 - DNA, 25 bp, Homo sapien
cagaacaagtcaaagcaccacatac

SEQ ID NO: 1095773 - DNA, 25 bp, Homo sapien
agagatgtgagaagcgagacattcg

SEQ ID NO: 1095774 - DNA, 25 bp, Homo sapien
aacagaggctttgggaaggcctgct

SEQ ID NO: 1095775 - DNA, 25 bp, Homo sapien
ccatgatggctgatcatctgctgat

SEQ ID NO: 1095776 - DNA, 25 bp, Homo sapien
tttgtcaagagtccatgatggctga

SEQ ID NO: 1095777 - DNA, 25 bp, Homo sapien
tatgaagtccaaggatgccgattct

SEQ ID NO: 1095778 - DNA, 25 bp, Homo sapien
taccatggaaaaatgcttcatgccc

SEQ ID NO: 1095779 - DNA, 25 bp, Homo sapien
tgactcttaacaaacccagcaagtt

SEQ ID NO: 1095780 - DNA, 25 bp, Homo sapien
ctgactcttaacaaacccagcaagt

SEQ ID NO: 1095781 - DNA, 25 bp, Homo sapien
ttctaccatggaaaaatgcttcatg

SEQ ID NO: 1095782 - DNA, 25 bp, Homo sapien
ttctgcaggaaatctgtggttcctt

SEQ ID NO: 1095783 - DNA, 25 bp, Homo sapien
ttccatttctgcaggaaatctgtgg

SEQ ID NO: 1095784 - DNA, 25 bp, Homo sapien
ctgtggttccttttcccgcttccat

SEQ ID NO: 1095785 - DNA, 25 bp, Homo sapien
gcaggaaatctgtggttccttttcc

SEQ ID NO: 1095786 - DNA, 25 bp, Homo sapien
ggttttccacgcacatctggacact

SEQ ID NO: 1095787 - DNA, 25 bp, Homo sapien
agtattccgggaaagtctgcctcac

SEQ ID NO: 1095788 - DNA, 25 bp, Homo sapien
gcctgaagtattccgggaaagtctg

SEQ ID NO: 1095789 - DNA, 25 bp, Homo sapien
ttcccagtgaggttttccacgcaca

SEQ ID NO: 1095790 - DNA, 25 bp, Homo sapien
gagagtgtgtaggacgtggacaggg

SEQ ID NO: 1095791 - DNA, 25 bp, Homo sapien
ccaggggagctcagtaggtgtttaa

SEQ ID NO: 1095792 - DNA, 25 bp, Homo sapien
cccggggactccatgaggagagtgt

SEQ ID NO: 1095793 - DNA, 25 bp, Homo sapien
tgcacaggcccggggactccatgag

SEQ ID NO: 1095794 - DNA, 25 bp, Homo sapien
gtatgcttcatgtatgtcatagctt

SEQ ID NO: 1095795 - DNA, 25 bp, Homo sapien
tgagattcaagggatgcacaggtat

SEQ ID NO: 1095796 - DNA, 25 bp, Homo sapien
gcttagctgagattcaagggatgca

SEQ ID NO: 1095797 - DNA, 25 bp, Homo sapien
catgtatgtcatagcttagctgaga

SEQ ID NO: 1095798 - DNA, 25 bp, Homo sapien
ggagagctgcttctttgtgtttgca

SEQ ID NO: 1095799 - DNA, 25 bp, Homo sapien
cagcatagatctcttcagacaatcc

SEQ ID NO: 1095800 - DNA, 25 bp, Homo sapien
aatccttaccctgttccctggagag

SEQ ID NO: 1095801 - DNA, 25 bp, Homo sapien
ttcagacaatccttaccctgttccc

SEQ ID NO: 1095802 - DNA, 25 bp, Homo sapien
taaactcatgcatactgaaaagcaa

SEQ ID NO: 1095803 - DNA, 25 bp, Homo sapien
gaagctgaaacattattggaatttt

SEQ ID NO: 1095804 - DNA, 25 bp, Homo sapien
atatataaactcatgcatactgaaa

SEQ ID NO: 1095805 - DNA, 25 bp, Homo sapien
tataaactcatgcatactgaaaagc

SEQ ID NO: 1095806 - DNA, 25 bp, Homo sapien
ccatgttggagtgagttaccaggga

SEQ ID NO: 1095807 - DNA, 25 bp, Homo sapien
gcctgggagctaccaaagggctgta

SEQ ID NO: 1095808 - DNA, 25 bp, Homo sapien
gaagccatgggttcttcagtaccct

SEQ ID NO: 1095809 - DNA, 25 bp, Homo sapien
gattccatgagtggtagacttactg

SEQ ID NO: 1095810 - DNA, 25 bp, Homo sapien
ttctcttgtggcagcactggcaaca

SEQ ID NO: 1095811 - DNA, 25 bp, Homo sapien
ggcagcactggcaacagccaggcct

SEQ ID NO: 1095812 - DNA, 25 bp, Homo sapien
gccaggggaaacacccaattctcac

SEQ ID NO: 1095813 - DNA, 25 bp, Homo sapien
atgtggccaggggaaacacccaatt

SEQ ID NO: 1095814 - DNA, 25 bp, Homo sapien
gagtctgtccagatccaaaagacaa

SEQ ID NO: 1095815 - DNA, 25 bp, Homo sapien
cactgccagagtctgtccagatcca

SEQ ID NO: 1095816 - DNA, 25 bp, Homo sapien
gccagagtctgtccagatccaaaag

SEQ ID NO: 1095817 - DNA, 25 bp, Homo sapien
agcactgccagagtctgtccagatc

SEQ ID NO: 1095818 - DNA, 25 bp, Homo sapien
agacgaagtcctgattcccttagag

SEQ ID NO: 1095819 - DNA, 25 bp, Homo sapien
gaggaccttgccttctattgccagc

SEQ ID NO: 1095820 - DNA, 25 bp, Homo sapien
tgagacaacattccaggatcgccct

SEQ ID NO: 1095821 - DNA, 25 bp, Homo sapien
cacataaacggcagacatcagggaa

SEQ ID NO: 1095822 - DNA, 25 bp, Homo sapien
ctgtagtctcgggaacacaactttc

SEQ ID NO: 1095823 - DNA, 25 bp, Homo sapien
tagtctcgggaacacaactttccca

SEQ ID NO: 1095824 - DNA, 25 bp, Homo sapien
tatcctgtagtctcgggaacacaac

SEQ ID NO: 1095825 - DNA, 25 bp, Homo sapien
tttttatcctgtagtctcgggaaca

SEQ ID NO: 1095826 - DNA, 25 bp, Homo sapien
gcaactttgtccttactcctcttgg

SEQ ID NO: 1095827 - DNA, 25 bp, Homo sapien
ttggatacacacagggacttctact

SEQ ID NO: 1095828 - DNA, 25 bp, Homo sapien
gacaaattatacttgcagccttgca

SEQ ID NO: 1095829 - DNA, 25 bp, Homo sapien
tgaaaggaataataggaaccgagac

SEQ ID NO: 1095830 - DNA, 25 bp, Homo sapien
cctgtcctatctggctgactctttg

SEQ ID NO: 1095831 - DNA, 25 bp, Homo sapien
tggtattggccatgaatcagacagc

SEQ ID NO: 1095832 - DNA, 25 bp, Homo sapien
aatcagacagcagaacagctgaagc

SEQ ID NO: 1095833 - DNA, 25 bp, Homo sapien
gactctttgggttagacctgttaga

SEQ ID NO: 1095834 - DNA, 25 bp, Homo sapien
gctaatgccttttctagagctgtgc

SEQ ID NO: 1095835 - DNA, 25 bp, Homo sapien
tgccttttctagagctgtgctcgcc

SEQ ID NO: 1095836 - DNA, 25 bp, Homo sapien
aaatgtagctaatgccttttctaga

SEQ ID NO: 1095837 - DNA, 25 bp, Homo sapien
gtagctaatgccttttctagagctg

SEQ ID NO: 1095838 - DNA, 25 bp, Homo sapien
aaaggccggacttaatggagactct

SEQ ID NO: 1095839 - DNA, 25 bp, Homo sapien
gccggacttaatggagactctttca

SEQ ID NO: 1095840 - DNA, 25 bp, Homo sapien
tggagactctttcacattgccagct

SEQ ID NO: 1095841 - DNA, 25 bp, Homo sapien
gccagcttcaataagtatttcctat

SEQ ID NO: 1095842 - DNA, 25 bp, Homo sapien
aaatatgttgaatgatctcaagaca

SEQ ID NO: 1095843 - DNA, 25 bp, Homo sapien
aatatgttgaatgatctcaagacaa

SEQ ID NO: 1095844 - DNA, 25 bp, Homo sapien
caggaatacttggtatttcttatca

SEQ ID NO: 1095845 - DNA, 25 bp, Homo sapien
catcattcatgatcgccaaatactc

SEQ ID NO: 1095846 - DNA, 25 bp, Homo sapien
ggtgttcaaccagcttcaggaatac

SEQ ID NO: 1095847 - DNA, 25 bp, Homo sapien
catgatcgccaaatactccttctgg

SEQ ID NO: 1095848 - DNA, 25 bp, Homo sapien
gaacatggatcaaatgacaagtctt

SEQ ID NO: 1095849 - DNA, 25 bp, Homo sapien
cacagaagcttctggcatcagcacc

SEQ ID NO: 1095850 - DNA, 25 bp, Homo sapien
atacctcaagggtcttgaacatgga

SEQ ID NO: 1095851 - DNA, 25 bp, Homo sapien
gacaagtctttaatgcaatggcaca

SEQ ID NO: 1095852 - DNA, 25 bp, Homo sapien
taaggtccctatatcctttggatac

SEQ ID NO: 1095853 - DNA, 25 bp, Homo sapien
actgtagaatgctattgcagagctg

SEQ ID NO: 1095854 - DNA, 25 bp, Homo sapien
tcactcggggctatgcctaaggtcc

SEQ ID NO: 1095855 - DNA, 25 bp, Homo sapien
ctgtagaatgctattgcagagctga

SEQ ID NO: 1095856 - DNA, 25 bp, Homo sapien
ctgtaacaacatggaaaatttgcaa

SEQ ID NO: 1095857 - DNA, 25 bp, Homo sapien
atttgcaaaaggttctcagcttgag

SEQ ID NO: 1095858 - DNA, 25 bp, Homo sapien
tgtaacaacatggaaaatttgcaaa

SEQ ID NO: 1095859 - DNA, 25 bp, Homo sapien
aaaatttgcaaaaggttctcagctt

SEQ ID NO: 1095860 - DNA, 25 bp, Homo sapien
tcttgtttagcaacgatgtccttca

SEQ ID NO: 1095861 - DNA, 25 bp, Homo sapien
ggcttcccataggatatcatacagg

SEQ ID NO: 1095862 - DNA, 25 bp, Homo sapien
ggtgtttctggattacaacacctct

SEQ ID NO: 1095863 - DNA, 25 bp, Homo sapien
tgcagtcctggtgaacaatgggtgt

SEQ ID NO: 1095864 - DNA, 25 bp, Homo sapien
cagccggacatcttgggtgatcttg

SEQ ID NO: 1095865 - DNA, 25 bp, Homo sapien
gtttcttcttcaatagaacaggata

SEQ ID NO: 1095866 - DNA, 25 bp, Homo sapien
gagcaagtaatttcatgtcttggga

SEQ ID NO: 1095867 - DNA, 25 bp, Homo sapien
cataatttgcatcctagaaaggtgg

SEQ ID NO: 1095868 - DNA, 25 bp, Homo sapien
aggatctgttacctatggagaaggg

SEQ ID NO: 1095869 - DNA, 25 bp, Homo sapien
aaagtagccagataggatctgttac

SEQ ID NO: 1095870 - DNA, 25 bp, Homo sapien
cagataggatctgttacctatggag

SEQ ID NO: 1095871 - DNA, 25 bp, Homo sapien
gtagccagataggatctgttaccta

SEQ ID NO: 1095872 - DNA, 25 bp, Homo sapien
cacaaattatagctgcagaggagcc

SEQ ID NO: 1095873 - DNA, 25 bp, Homo sapien
gaagatgccaccctagatttagatg

SEQ ID NO: 1095874 - DNA, 25 bp, Homo sapien
tagatgtggtaagaacctagactcc

SEQ ID NO: 1095875 - DNA, 25 bp, Homo sapien
catttcctatgcaaagggcttcgta

SEQ ID NO: 1095876 - DNA, 25 bp, Homo sapien
ctggcccattggaagaacaatctgg

SEQ ID NO: 1095877 - DNA, 25 bp, Homo sapien
acctcagtatcccttgcaggtataa

SEQ ID NO: 1095878 - DNA, 25 bp, Homo sapien
ttgacctcagtatcccttgcaggta

SEQ ID NO: 1095879 - DNA, 25 bp, Homo sapien
ggcccattggaagaacaatctggct

SEQ ID NO: 1095880 - DNA, 25 bp, Homo sapien
gatgagagcccatttaggcgtatat

SEQ ID NO: 1095881 - DNA, 25 bp, Homo sapien
tcagatcattgcaaagcttagaagg

SEQ ID NO: 1095882 - DNA, 25 bp, Homo sapien
tatggagagtcctggacagaactgg

SEQ ID NO: 1095883 - DNA, 25 bp, Homo sapien
ttaggcgtatatcatgcaccactgc

SEQ ID NO: 1095884 - DNA, 25 bp, Homo sapien
gaatgatttacacatgttgaaaaac

SEQ ID NO: 1095885 - DNA, 25 bp, Homo sapien
gtgaattctctcctatgctggttat

SEQ ID NO: 1095886 - DNA, 25 bp, Homo sapien
tgcacaaaaaatccgagacatctcc

SEQ ID NO: 1095887 - DNA, 25 bp, Homo sapien
tatgagtctcttactttgtgaattc

SEQ ID NO: 1095888 - DNA, 25 bp, Homo sapien
ctcctaggcactcattggaaaggga

SEQ ID NO: 1095889 - DNA, 25 bp, Homo sapien
gaaggaagagctgatttcctcctag

SEQ ID NO: 1095890 - DNA, 25 bp, Homo sapien
catgaattaaaactcttcgaggaag

SEQ ID NO: 1095891 - DNA, 25 bp, Homo sapien
gatttcctcctaggcactcattgga

SEQ ID NO: 1095892 - DNA, 25 bp, Homo sapien
caggaaagctcggtaccaggcccga

SEQ ID NO: 1095893 - DNA, 25 bp, Homo sapien
ccccggccgcgctgccaggcacctg

SEQ ID NO: 1095894 - DNA, 25 bp, Homo sapien
cgcgcgaaccctcgcgctgtcgacg

SEQ ID NO: 1095895 - DNA, 25 bp, Homo sapien
gacccgcgcagctcacgcgcgaacc

SEQ ID NO: 1095896 - DNA, 25 bp, Homo sapien
cttcacactccctcctaccggctct

SEQ ID NO: 1095897 - DNA, 25 bp, Homo sapien
accttcacactccctcctaccggct

SEQ ID NO: 1095898 - DNA, 25 bp, Homo sapien
ttcacactccctcctaccggctctc

SEQ ID NO: 1095899 - DNA, 25 bp, Homo sapien
ccttcacactccctcctaccggctc

SEQ ID NO: 1095900 - DNA, 25 bp, Homo sapien
atcatgaggctgtcgcacaggggca

SEQ ID NO: 1095901 - DNA, 25 bp, Homo sapien
acaggggcagcttaggctgcggcgg

SEQ ID NO: 1095902 - DNA, 25 bp, Homo sapien
gaggctgtcgcacaggggcagctta

SEQ ID NO: 1095903 - DNA, 25 bp, Homo sapien
agatcatgaggctgtcgcacagggg

SEQ ID NO: 1095904 - DNA, 25 bp, Homo sapien
tcgccctctcgcctcctcgcactca

SEQ ID NO: 1095905 - DNA, 25 bp, Homo sapien
cgccctctcgcctcctcgcactcac

SEQ ID NO: 1095906 - DNA, 25 bp, Homo sapien
ccctcgccctctcgcctcctcgcac

SEQ ID NO: 1095907 - DNA, 25 bp, Homo sapien
ctcgccctctcgcctcctcgcactc

SEQ ID NO: 1095908 - DNA, 25 bp, Homo sapien
gggaccctgtgcaggtagccccagc

SEQ ID NO: 1095909 - DNA, 25 bp, Homo sapien
tctctcggtcaagggcacgaggtga

SEQ ID NO: 1095910 - DNA, 25 bp, Homo sapien
tgcccgtcgacccgcaggtggcatt

SEQ ID NO: 1095911 - DNA, 25 bp, Homo sapien
ggcattctctcggtcaagggcacga

SEQ ID NO: 1095912 - DNA, 25 bp, Homo sapien
ctgttagggcaccaggcaggtcgaa

SEQ ID NO: 1095913 - DNA, 25 bp, Homo sapien
gagcctccactgttacgctcccaga

SEQ ID NO: 1095914 - DNA, 25 bp, Homo sapien
cactgttacgctcccagagcttcct

SEQ ID NO: 1095915 - DNA, 25 bp, Homo sapien
atcctctggttgagaccagagcctc

SEQ ID NO: 1095916 - DNA, 25 bp, Homo sapien
gatgggtgcttggttcatatcccag

SEQ ID NO: 1095917 - DNA, 25 bp, Homo sapien
gaaagggtcttcacgcccaagcgga

SEQ ID NO: 1095918 - DNA, 25 bp, Homo sapien
tgtgtccaggtagagcaaggtagtt

SEQ ID NO: 1095919 - DNA, 25 bp, Homo sapien
gaaggagcattggtccgggaactaa

SEQ ID NO: 1095920 - DNA, 25 bp, Homo sapien
gaagcggcttctacaaaatcggatg

SEQ ID NO: 1095921 - DNA, 25 bp, Homo sapien
tctccatacgggaaatacaaacatc

SEQ ID NO: 1095922 - DNA, 25 bp, Homo sapien
gagagggccagcgagaaaaagggaa

SEQ ID NO: 1095923 - DNA, 25 bp, Homo sapien
aacatctctttgaagcggcttctac

SEQ ID NO: 1095924 - DNA, 25 bp, Homo sapien
tgtcacagaaccaagtagcagaatt

SEQ ID NO: 1095925 - DNA, 25 bp, Homo sapien
taggtcatgtaagagctctgatccc

SEQ ID NO: 1095926 - DNA, 25 bp, Homo sapien
tcctcctagcgctgaaagaagagtt

SEQ ID NO: 1095927 - DNA, 25 bp, Homo sapien
tgagccagggttatcatgacaaatg

SEQ ID NO: 1095928 - DNA, 25 bp, Homo sapien
gctgtttgacatcttgacaaggtga

SEQ ID NO: 1095929 - DNA, 25 bp, Homo sapien
gatgaagaacttgtgccatggcaac

SEQ ID NO: 1095930 - DNA, 25 bp, Homo sapien
tcttgacaaggtgaggcagtattga

SEQ ID NO: 1095931 - DNA, 25 bp, Homo sapien
tggcaactccactagtcagctgttt

SEQ ID NO: 1095932 - DNA, 25 bp, Homo sapien
aaccaagattcgttaaaccaagctg

SEQ ID NO: 1095933 - DNA, 25 bp, Homo sapien
catcctctttaattcggcttaacca

SEQ ID NO: 1095934 - DNA, 25 bp, Homo sapien
aagattcgttaaaccaagctgcatc

SEQ ID NO: 1095935 - DNA, 25 bp, Homo sapien
ccaacatcctctttaattcggctta

SEQ ID NO: 1095936 - DNA, 25 bp, Homo sapien
cataattccttgaaggaccttcttt

SEQ ID NO: 1095937 - DNA, 25 bp, Homo sapien
tcataattccttgaaggaccttctt

SEQ ID NO: 1095938 - DNA, 25 bp, Homo sapien
gtttaaatcagggataagtgcttct

SEQ ID NO: 1095939 - DNA, 25 bp, Homo sapien
cattcggttatttggtttaaatcag

SEQ ID NO: 1095940 - DNA, 25 bp, Homo sapien
caacctaaaataagctggagcaacc

SEQ ID NO: 1095941 - DNA, 25 bp, Homo sapien
tcttttcacagttgatcgcacaacc

SEQ ID NO: 1095942 - DNA, 25 bp, Homo sapien
ttgaatagcagtcatgaccacatgt

SEQ ID NO: 1095943 - DNA, 25 bp, Homo sapien
gaatagcagtcatgaccacatgttg

SEQ ID NO: 1095944 - DNA, 25 bp, Homo sapien
aatagcagtcatgaccacatgttga

SEQ ID NO: 1095945 - DNA, 25 bp, Homo sapien
tgaccacatgttgaacagactcttc

SEQ ID NO: 1095946 - DNA, 25 bp, Homo sapien
tcatttggaggagagctcaatattt

SEQ ID NO: 1095947 - DNA, 25 bp, Homo sapien
atcatttggaggagagctcaatatt

SEQ ID NO: 1095948 - DNA, 25 bp, Homo sapien
catttggaggagagctcaatatttc

SEQ ID NO: 1095949 - DNA, 25 bp, Homo sapien
tttggaggagagctcaatatttctt

SEQ ID NO: 1095950 - DNA, 25 bp, Homo sapien
ctgcatatccaattcttcacatctt

SEQ ID NO: 1095951 - DNA, 25 bp, Homo sapien
tcacatctttgcctcagctcttctt

SEQ ID NO: 1095952 - DNA, 25 bp, Homo sapien
tttctgctagtgcttcctgaagttc

SEQ ID NO: 1095953 - DNA, 25 bp, Homo sapien
tgaagttcttccaaggctcttttaa

SEQ ID NO: 1095954 - DNA, 25 bp, Homo sapien
gatagaagtacactatagggtaagg

SEQ ID NO: 1095955 - DNA, 25 bp, Homo sapien
tgaaggtgctttgatagaagtacac

SEQ ID NO: 1095956 - DNA, 25 bp, Homo sapien
ctcaggcatcaaaactgggtaggac

SEQ ID NO: 1095957 - DNA, 25 bp, Homo sapien
tatctcattctagcttgagtgtagg

SEQ ID NO: 1095958 - DNA, 25 bp, Homo sapien
ttttttgcaaccactgtgtttggat

SEQ ID NO: 1095959 - DNA, 25 bp, Homo sapien
tttttgcaaccactgtgtttggatc

SEQ ID NO: 1095960 - DNA, 25 bp, Homo sapien
ctagttgtaattgtgcatgaaaata

SEQ ID NO: 1095961 - DNA, 25 bp, Homo sapien
taattgtgcatgaaaatactttttt

SEQ ID NO: 1095962 - DNA, 25 bp, Homo sapien
ggaattcgattagctgcttttcaag

SEQ ID NO: 1095963 - DNA, 25 bp, Homo sapien
gcaagactagtcaattcatcattcc

SEQ ID NO: 1095964 - DNA, 25 bp, Homo sapien
aacacggtaatcatcttttgcagct

SEQ ID NO: 1095965 - DNA, 25 bp, Homo sapien
tcatcattcctatgctggaattcga

SEQ ID NO: 1095966 - DNA, 25 bp, Homo sapien
tgtttctaattgtgtacgtgctgca

SEQ ID NO: 1095967 - DNA, 25 bp, Homo sapien
gcatatacatcatgttggtttcctg

SEQ ID NO: 1095968 - DNA, 25 bp, Homo sapien
tgtagcttctgacgatatatctcaa

SEQ ID NO: 1095969 - DNA, 25 bp, Homo sapien
cctgcttgcgaaggtcattcagatc

SEQ ID NO: 1095970 - DNA, 25 bp, Homo sapien
ctgccctcttggattcggaggaaag

SEQ ID NO: 1095971 - DNA, 25 bp, Homo sapien
tttcaaacgctagtgtgtctgccct

SEQ ID NO: 1095972 - DNA, 25 bp, Homo sapien
gtctgccctcttggattcggaggaa

SEQ ID NO: 1095973 - DNA, 25 bp, Homo sapien
catttcaaacgctagtgtgtctgcc

SEQ ID NO: 1095974 - DNA, 25 bp, Homo sapien
tcctgttgtacttgtgaacatcgaa

SEQ ID NO: 1095975 - DNA, 25 bp, Homo sapien
tgtttctttcaaagtatcacgctgc

SEQ ID NO: 1095976 - DNA, 25 bp, Homo sapien
aagtatcacgctgctcaattagtct

SEQ ID NO: 1095977 - DNA, 25 bp, Homo sapien
tgtgaacatcgaagctcttcatttg

SEQ ID NO: 1095978 - DNA, 25 bp, Homo sapien
tctcataactttttgtagcagatgc

SEQ ID NO: 1095979 - DNA, 25 bp, Homo sapien
tcataactttttgtagcagatgcat

SEQ ID NO: 1095980 - DNA, 25 bp, Homo sapien
agcagcaagattctcataacttttt

SEQ ID NO: 1095981 - DNA, 25 bp, Homo sapien
gcatagctggtagggtatgaaactc

SEQ ID NO: 1095982 - DNA, 25 bp, Homo sapien
tcttaaactccaacaaaagcttctg

SEQ ID NO: 1095983 - DNA, 25 bp, Homo sapien
gaaattcctgtccactcaatagcta

SEQ ID NO: 1095984 - DNA, 25 bp, Homo sapien
aagcaggaccagctagcatagctgg

SEQ ID NO: 1095985 - DNA, 25 bp, Homo sapien
gccttcttgctgtaagcgaagcatc

SEQ ID NO: 1095986 - DNA, 25 bp, Homo sapien
tgctgtaagcgaagcatcttatttt

SEQ ID NO: 1095987 - DNA, 25 bp, Homo sapien
tcctcaatacgttcattctcagagc

SEQ ID NO: 1095988 - DNA, 25 bp, Homo sapien
catgttgcagtcgaataaacacctc

SEQ ID NO: 1095989 - DNA, 25 bp, Homo sapien
tttcagttactaaggagcatatcac

SEQ ID NO: 1095990 - DNA, 25 bp, Homo sapien
gcctggttaaccaagaatgctgaaa

SEQ ID NO: 1095991 - DNA, 25 bp, Homo sapien
gaatcacctgacttctttcacagag

SEQ ID NO: 1095992 - DNA, 25 bp, Homo sapien
gaatcaagattttatggctcggtaa

SEQ ID NO: 1095993 - DNA, 25 bp, Homo sapien
cctgtaaagatttctggaggtcctc

SEQ ID NO: 1095994 - DNA, 25 bp, Homo sapien
ttctctaatacgctctttgctcagc

SEQ ID NO: 1095995 - DNA, 25 bp, Homo sapien
tgctgcaattctctaatacgctctt

SEQ ID NO: 1095996 - DNA, 25 bp, Homo sapien
aaccttgttcctgtaaagatttctg

SEQ ID NO: 1095997 - DNA, 25 bp, Homo sapien
ggccagccctgttggaattccagca

SEQ ID NO: 1095998 - DNA, 25 bp, Homo sapien
tccatcagaaaacggtaaggccatg

SEQ ID NO: 1095999 - DNA, 25 bp, Homo sapien
tgtagatgatcaactgacaggctcc

SEQ ID NO: 1096000 - DNA, 25 bp, Homo sapien
gaaatgagtgatgcctccaaggctg

SEQ ID NO: 1096001 - DNA, 25 bp, Homo sapien
atatgagcttccaacttctgcttta

SEQ ID NO: 1096002 - DNA, 25 bp, Homo sapien
cttccaacttctgctttaatttgct

SEQ ID NO: 1096003 - DNA, 25 bp, Homo sapien
ccaacttctgctttaatttgctgga

SEQ ID NO: 1096004 - DNA, 25 bp, Homo sapien
tatgagcttccaacttctgctttaa

SEQ ID NO: 1096005 - DNA, 25 bp, Homo sapien
tctctgccatataacatttgtggac

SEQ ID NO: 1096006 - DNA, 25 bp, Homo sapien
gttgtcatgaggatgtaaacagtca

SEQ ID NO: 1096007 - DNA, 25 bp, Homo sapien
gcacacggcaggtgccaaaaaggtt

SEQ ID NO: 1096008 - DNA, 25 bp, Homo sapien
gaaaaagcatggagactggtctctg

SEQ ID NO: 1096009 - DNA, 25 bp, Homo sapien
tttgatttatatctggctgaagatc

SEQ ID NO: 1096010 - DNA, 25 bp, Homo sapien
atatctggctgaagatcttcaatga

SEQ ID NO: 1096011 - DNA, 25 bp, Homo sapien
tgatttatatctggctgaagatctt

SEQ ID NO: 1096012 - DNA, 25 bp, Homo sapien
atctggctgaagatcttcaatgagt

SEQ ID NO: 1096013 - DNA, 25 bp, Homo sapien
cctccattgctttcatatcttcatc

SEQ ID NO: 1096014 - DNA, 25 bp, Homo sapien
agcagcttcaagttcattgatcttt

SEQ ID NO: 1096015 - DNA, 25 bp, Homo sapien
cttctgaagagcagcttcaagttca

SEQ ID NO: 1096016 - DNA, 25 bp, Homo sapien
ggctttctccaagtacattttatat

SEQ ID NO: 1096017 - DNA, 25 bp, Homo sapien
tctgccaactgctttcttagtagca

SEQ ID NO: 1096018 - DNA, 25 bp, Homo sapien
ttctctgccaactgctttcttagta

SEQ ID NO: 1096019 - DNA, 25 bp, Homo sapien
gctggatttaacttgggatccaaag

SEQ ID NO: 1096020 - DNA, 25 bp, Homo sapien
gccaactgctttcttagtagcatta

SEQ ID NO: 1096021 - DNA, 25 bp, Homo sapien
gattgcacttgtgaggcacacaatg

SEQ ID NO: 1096022 - DNA, 25 bp, Homo sapien
tattgagagaatctaaagattgcac

SEQ ID NO: 1096023 - DNA, 25 bp, Homo sapien
ccaaattactaaagatagaataatt

SEQ ID NO: 1096024 - DNA, 25 bp, Homo sapien
gaatctaaagattgcacttgtgagg

SEQ ID NO: 1096025 - DNA, 25 bp, Homo sapien
taatcacggaattttgctactttgc

SEQ ID NO: 1096026 - DNA, 25 bp, Homo sapien
ataatcacggaattttgctactttg

SEQ ID NO: 1096027 - DNA, 25 bp, Homo sapien
cataatcacggaattttgctacttt

SEQ ID NO: 1096028 - DNA, 25 bp, Homo sapien
gatgtgccgttgctgcgctaagaaa

SEQ ID NO: 1096029 - DNA, 25 bp, Homo sapien
gcagggactttaacagagagatttc

SEQ ID NO: 1096030 - DNA, 25 bp, Homo sapien
cgctaagaaagaccgcgcaggagtg

SEQ ID NO: 1096031 - DNA, 25 bp, Homo sapien
taatcagatgttgtagcagggactt

SEQ ID NO: 1096032 - DNA, 25 bp, Homo sapien
cagagagatggctaattctataatt

SEQ ID NO: 1096033 - DNA, 25 bp, Homo sapien
ttataatactctcaaaagacaaatg

SEQ ID NO: 1096034 - DNA, 25 bp, Homo sapien
gatatcccgcatcataaactctttt

SEQ ID NO: 1096035 - DNA, 25 bp, Homo sapien
ttcaatctggtagttagttgaaagg

SEQ ID NO: 1096036 - DNA, 25 bp, Homo sapien
agttctccatgtccctgcctcaaga

SEQ ID NO: 1096037 - DNA, 25 bp, Homo sapien
catgacatgacaaggtagaggtaca

SEQ ID NO: 1096038 - DNA, 25 bp, Homo sapien
gaagcccttatttgccataggtaca

SEQ ID NO: 1096039 - DNA, 25 bp, Homo sapien
taaacatgatgtccagaagccctta

SEQ ID NO: 1096040 - DNA, 25 bp, Homo sapien
tagaacaacatatcctgacaggtgc

SEQ ID NO: 1096041 - DNA, 25 bp, Homo sapien
gaaatattctatagctgccctgtcc

SEQ ID NO: 1096042 - DNA, 25 bp, Homo sapien
cagacactactgtggcctaaaggcc

SEQ ID NO: 1096043 - DNA, 25 bp, Homo sapien
gacaggtgctccctaatctcggaga

SEQ ID NO: 1096044 - DNA, 25 bp, Homo sapien
taatggacaatcatttatttaaaat

SEQ ID NO: 1096045 - DNA, 25 bp, Homo sapien
tggacaatcatttatttaaaataat

SEQ ID NO: 1096046 - DNA, 25 bp, Homo sapien
taaaataatatcctaaatacttaca

SEQ ID NO: 1096047 - DNA, 25 bp, Homo sapien
ggacaatcatttatttaaaataata

SEQ ID NO: 1096048 - DNA, 25 bp, Homo sapien
tttacttaaatcatttcacaactat

SEQ ID NO: 1096049 - DNA, 25 bp, Homo sapien
cacagaagcataaagtttatttact

SEQ ID NO: 1096050 - DNA, 25 bp, Homo sapien
tacttaaatcatttcacaactatta

SEQ ID NO: 1096051 - DNA, 25 bp, Homo sapien
tttatttacttaaatcatttcacaa

SEQ ID NO: 1096052 - DNA, 25 bp, Homo sapien
atttatgcccactaaaaacccatca

SEQ ID NO: 1096053 - DNA, 25 bp, Homo sapien
aacatgcatttatgcccactaaaaa

SEQ ID NO: 1096054 - DNA, 25 bp, Homo sapien
tatgcccactaaaaacccatcaaaa

SEQ ID NO: 1096055 - DNA, 25 bp, Homo sapien
ttcactcctctatttaatgcagcaa

SEQ ID NO: 1096056 - DNA, 25 bp, Homo sapien
gaaaagaggataatgtttccttcca

SEQ ID NO: 1096057 - DNA, 25 bp, Homo sapien
tacctttttatctaggagatgaaaa

SEQ ID NO: 1096058 - DNA, 25 bp, Homo sapien
tgtctcgtccgaattagccttggga

SEQ ID NO: 1096059 - DNA, 25 bp, Homo sapien
tgagctttaagtggtttgtaaacca

SEQ ID NO: 1096060 - DNA, 25 bp, Homo sapien
gaagcccttcggattgttaccactg

SEQ ID NO: 1096061 - DNA, 25 bp, Homo sapien
ggtctacctgggaccctctgttgaa

SEQ ID NO: 1096062 - DNA, 25 bp, Homo sapien
gaagaggccacaaacacctaaagga

SEQ ID NO: 1096063 - DNA, 25 bp, Homo sapien
gaatccactgtatttgctccgatgg

SEQ ID NO: 1096064 - DNA, 25 bp, Homo sapien
catggtaaccattgcactcccgtgc

SEQ ID NO: 1096065 - DNA, 25 bp, Homo sapien
gaaagctgtgcaaaatccagcggca

SEQ ID NO: 1096066 - DNA, 25 bp, Homo sapien
tgcgtcagcgccaccaggattggta

SEQ ID NO: 1096067 - DNA, 25 bp, Homo sapien
tctcgctattaagcatgccatggta

SEQ ID NO: 1096068 - DNA, 25 bp, Homo sapien
gacgtcttctgatggacaagatgga

SEQ ID NO: 1096069 - DNA, 25 bp, Homo sapien
cacaacgttggctagggcaaggtat

SEQ ID NO: 1096070 - DNA, 25 bp, Homo sapien
cagtagctgtcaccccagagaagag

SEQ ID NO: 1096071 - DNA, 25 bp, Homo sapien
gattacctggttgtctcttgcagac

SEQ ID NO: 1096072 - DNA, 25 bp, Homo sapien
aagaagtgagcatctgatcagccaa

SEQ ID NO: 1096073 - DNA, 25 bp, Homo sapien
agaagtgagcatctgatcagccaag

SEQ ID NO: 1096074 - DNA, 25 bp, Homo sapien
taagaagtgagcatctgatcagcca

SEQ ID NO: 1096075 - DNA, 25 bp, Homo sapien
tgcattcggtttctctgatgttggt

SEQ ID NO: 1096076 - DNA, 25 bp, Homo sapien
tctcgtcgttgtgccagcagcaaac

SEQ ID NO: 1096077 - DNA, 25 bp, Homo sapien
agccaccagctgcattcggtttctc

SEQ ID NO: 1096078 - DNA, 25 bp, Homo sapien
aaggtgatctggcattctcgtcgtt

SEQ ID NO: 1096079 - DNA, 25 bp, Homo sapien
gcggcacttgtggtggttgcagctg

SEQ ID NO: 1096080 - DNA, 25 bp, Homo sapien
tctcaagggcggcacttgtggtggt

SEQ ID NO: 1096081 - DNA, 25 bp, Homo sapien
cagctgctttgtcatagagctgcct

SEQ ID NO: 1096082 - DNA, 25 bp, Homo sapien
tgctttgtcatagagctgcctgctc

SEQ ID NO: 1096083 - DNA, 25 bp, Homo sapien
tgccgacataaaagggccgccattt

SEQ ID NO: 1096084 - DNA, 25 bp, Homo sapien
tgtcctccatttctgccgacataaa

SEQ ID NO: 1096085 - DNA, 25 bp, Homo sapien
ttctgccgacataaaagggccgcca

SEQ ID NO: 1096086 - DNA, 25 bp, Homo sapien
gccgccatttcgtggggacacctca

SEQ ID NO: 1096087 - DNA, 25 bp, Homo sapien
tggagaccttgctgacagcagcact

SEQ ID NO: 1096088 - DNA, 25 bp, Homo sapien
ttgtgtcctcccacacgccatggag

SEQ ID NO: 1096089 - DNA, 25 bp, Homo sapien
cttgactccagcttaatttagatgc

SEQ ID NO: 1096090 - DNA, 25 bp, Homo sapien
atttagatgcctctcctttgtgtcc

SEQ ID NO: 1096091 - DNA, 25 bp, Homo sapien
tgcacccaggaagatccaaattttc

SEQ ID NO: 1096092 - DNA, 25 bp, Homo sapien
cacccaggaagatccaaattttcca

SEQ ID NO: 1096093 - DNA, 25 bp, Homo sapien
cttgcacccaggaagatccaaattt

SEQ ID NO: 1096094 - DNA, 25 bp, Homo sapien
cccaggaagatccaaattttccaat

SEQ ID NO: 1096095 - DNA, 25 bp, Homo sapien
ccagccctgtttgcccgggattcct

SEQ ID NO: 1096096 - DNA, 25 bp, Homo sapien
ctgtttgcccgggattcctttatgt

SEQ ID NO: 1096097 - DNA, 25 bp, Homo sapien
agtcctggagccagtatttgcacaa

SEQ ID NO: 1096098 - DNA, 25 bp, Homo sapien
ttgcacaatggaaagtccagcattt

SEQ ID NO: 1096099 - DNA, 25 bp, Homo sapien
ctctcagtccagagcataaatcgga

SEQ ID NO: 1096100 - DNA, 25 bp, Homo sapien
tttgaaagccatcaaggctctcagt

SEQ ID NO: 1096101 - DNA, 25 bp, Homo sapien
gtccagagcataaatcggaatgatt

SEQ ID NO: 1096102 - DNA, 25 bp, Homo sapien
ttgaaagccatcaaggctctcagtc

SEQ ID NO: 1096103 - DNA, 25 bp, Homo sapien
cttccttaacttgtacccagatgct

SEQ ID NO: 1096104 - DNA, 25 bp, Homo sapien
acttccttaacttgtacccagatgc

SEQ ID NO: 1096105 - DNA, 25 bp, Homo sapien
ttgggatctattctggttccaaacc

SEQ ID NO: 1096106 - DNA, 25 bp, Homo sapien
cctcttgggatctattctggttcca

SEQ ID NO: 1096107 - DNA, 25 bp, Homo sapien
ttaagtatactgcaattcctcctcc

SEQ ID NO: 1096108 - DNA, 25 bp, Homo sapien
agtatactgcaattcctcctccaac

SEQ ID NO: 1096109 - DNA, 25 bp, Homo sapien
atactgcaattcctcctccaacaaa

SEQ ID NO: 1096110 - DNA, 25 bp, Homo sapien
taagtatactgcaattcctcctcca

SEQ ID NO: 1096111 - DNA, 25 bp, Homo sapien
aaggtgttggatctttgtgctataa

SEQ ID NO: 1096112 - DNA, 25 bp, Homo sapien
ctattatgacattaacttcaaagca

SEQ ID NO: 1096113 - DNA, 25 bp, Homo sapien
aacttcaaagcattcgacctgggcg

SEQ ID NO: 1096114 - DNA, 25 bp, Homo sapien
gcgtttgatctaccggcctgctttt

SEQ ID NO: 1096115 - DNA, 25 bp, Homo sapien
tgaccaatagtaaatagactcctaa

SEQ ID NO: 1096116 - DNA, 25 bp, Homo sapien
gccattccacataagggataaaatg

SEQ ID NO: 1096117 - DNA, 25 bp, Homo sapien
gtcaaaagaagactcattcatctcc

SEQ ID NO: 1096118 - DNA, 25 bp, Homo sapien
ctcatgtgtcttcaatctgatgacc

SEQ ID NO: 1096119 - DNA, 25 bp, Homo sapien
tttggattctcagcaccagatggtt

SEQ ID NO: 1096120 - DNA, 25 bp, Homo sapien
taacctatggttggtcccaggagcc

SEQ ID NO: 1096121 - DNA, 25 bp, Homo sapien
cttccaggtggcttctgctctatta

SEQ ID NO: 1096122 - DNA, 25 bp, Homo sapien
cagttcctgttgaggatttcccgct

SEQ ID NO: 1096123 - DNA, 25 bp, Homo sapien
tacccttctatgtgcaatgcagcta

SEQ ID NO: 1096124 - DNA, 25 bp, Homo sapien
tctatgtgcaatgcagctaacaacc

SEQ ID NO: 1096125 - DNA, 25 bp, Homo sapien
tatgtgcaatgcagctaacaacctg

SEQ ID NO: 1096126 - DNA, 25 bp, Homo sapien
ctcttctacccttctatgtgcaatg

SEQ ID NO: 1096127 - DNA, 25 bp, Homo sapien
cctgcagacgtctttccttcttctt

SEQ ID NO: 1096128 - DNA, 25 bp, Homo sapien
cttctttgtcaagaagtaaaatcat

SEQ ID NO: 1096129 - DNA, 25 bp, Homo sapien
ttcttctttgtcaagaagtaaaatc

SEQ ID NO: 1096130 - DNA, 25 bp, Homo sapien
tcttcttctttgtcaagaagtaaaa

SEQ ID NO: 1096131 - DNA, 25 bp, Homo sapien
gattaaatgaatggcagcaggtggc

SEQ ID NO: 1096132 - DNA, 25 bp, Homo sapien
tgattaaatgaatggcagcaggtgg

SEQ ID NO: 1096133 - DNA, 25 bp, Homo sapien
attaaatgaatggcagcaggtggca

SEQ ID NO: 1096134 - DNA, 25 bp, Homo sapien
atgattaaatgaatggcagcaggtg

SEQ ID NO: 1096135 - DNA, 25 bp, Homo sapien
ccccagttcacactgtaactggtgg

SEQ ID NO: 1096136 - DNA, 25 bp, Homo sapien
caggccctggtatctaatagctgct

SEQ ID NO: 1096137 - DNA, 25 bp, Homo sapien
cacagtgctgataacaaagtaaaca

SEQ ID NO: 1096138 - DNA, 25 bp, Homo sapien
tcaaaggtacttagcatgacacagt

SEQ ID NO: 1096139 - DNA, 25 bp, Homo sapien
cacatcatacatttcagttctgcct

SEQ ID NO: 1096140 - DNA, 25 bp, Homo sapien
gacatttcaaaggtacttagcatga

SEQ ID NO: 1096141 - DNA, 25 bp, Homo sapien
cggcttgctgagtattcagctgaga

SEQ ID NO: 1096142 - DNA, 25 bp, Homo sapien
gagcttgaaattctggtaccagaca

SEQ ID NO: 1096143 - DNA, 25 bp, Homo sapien
ttgaaattctggtaccagacacagt

SEQ ID NO: 1096144 - DNA, 25 bp, Homo sapien
agcacttaacggcttgctgagtatt

SEQ ID NO: 1096145 - DNA, 25 bp, Homo sapien
agcataatctgctcgacaaggatga

SEQ ID NO: 1096146 - DNA, 25 bp, Homo sapien
aaagcataatctgctcgacaaggat

SEQ ID NO: 1096147 - DNA, 25 bp, Homo sapien
tccactgtgttgacacactgtgagg

SEQ ID NO: 1096148 - DNA, 25 bp, Homo sapien
gatggctccaacactctatttcctt

SEQ ID NO: 1096149 - DNA, 25 bp, Homo sapien
gctgcgtttttgctactgtgatagc

SEQ ID NO: 1096150 - DNA, 25 bp, Homo sapien
taccacggtaaagagtgatggattt

SEQ ID NO: 1096151 - DNA, 25 bp, Homo sapien
ttcatgtatcttgcagaaagctgcg

SEQ ID NO: 1096152 - DNA, 25 bp, Homo sapien
gatgtctcttcatttcggtcttgta

SEQ ID NO: 1096153 - DNA, 25 bp, Homo sapien
ggcagaagtaattgattttagttat

SEQ ID NO: 1096154 - DNA, 25 bp, Homo sapien
gtatgcttgttaggctgtgctaaac

SEQ ID NO: 1096155 - DNA, 25 bp, Homo sapien
ttgttaggctgtgctaaacgtgaag

SEQ ID NO: 1096156 - DNA, 25 bp, Homo sapien
tgtatgcttgttaggctgtgctaaa

SEQ ID NO: 1096157 - DNA, 25 bp, Homo sapien
tgcttgttaggctgtgctaaacgtg

SEQ ID NO: 1096158 - DNA, 25 bp, Homo sapien
caatctgtcggcagtttgcagaaag

SEQ ID NO: 1096159 - DNA, 25 bp, Homo sapien
gacaaactgtcagagctgcatgcat

SEQ ID NO: 1096160 - DNA, 25 bp, Homo sapien
tcaacacatgcgtaacttgcaatct

SEQ ID NO: 1096161 - DNA, 25 bp, Homo sapien
gaaagacaaactgtcagagctgcat

SEQ ID NO: 1096162 - DNA, 25 bp, Homo sapien
tcactgatcacctaaatttccagca

SEQ ID NO: 1096163 - DNA, 25 bp, Homo sapien
ccttgaagtaattgtgttggcctgt

SEQ ID NO: 1096164 - DNA, 25 bp, Homo sapien
tccttgaagtaattgtgttggcctg

SEQ ID NO: 1096165 - DNA, 25 bp, Homo sapien
ctgatcacctaaatttccagcaaga

SEQ ID NO: 1096166 - DNA, 25 bp, Homo sapien
ctttaacagagggtgacagggtgac

SEQ ID NO: 1096167 - DNA, 25 bp, Homo sapien
ctggcaaacccgagaagctgctgta

SEQ ID NO: 1096168 - DNA, 25 bp, Homo sapien
cagatgtttttatggcaacagatgg

SEQ ID NO: 1096169 - DNA, 25 bp, Homo sapien
cagggtgaccttgacgacagatgtt

SEQ ID NO: 1096170 - DNA, 25 bp, Homo sapien
tcaggaaaaggtgatcctcatagtg

SEQ ID NO: 1096171 - DNA, 25 bp, Homo sapien
tacttgtcttatcagactgggacca

SEQ ID NO: 1096172 - DNA, 25 bp, Homo sapien
cagactgggaccagaggttcaggaa

SEQ ID NO: 1096173 - DNA, 25 bp, Homo sapien
aaattagaggaaattgctgccagat

SEQ ID NO: 1096174 - DNA, 25 bp, Homo sapien
ttaattggcagtgaacggatgtggg

SEQ ID NO: 1096175 - DNA, 25 bp, Homo sapien
cagaccctgctaactggtgcgtgct

SEQ ID NO: 1096176 - DNA, 25 bp, Homo sapien
tgtgtgctccctcaccagctgaact

SEQ ID NO: 1096177 - DNA, 25 bp, Homo sapien
acggatgtgggataagaaggaaaat

SEQ ID NO: 1096178 - DNA, 25 bp, Homo sapien
gatccttggtcatcttcgtatgaag

SEQ ID NO: 1096179 - DNA, 25 bp, Homo sapien
cctcagcaataacaaagagatcacc

SEQ ID NO: 1096180 - DNA, 25 bp, Homo sapien
gagaatcattgcacaggcctcctca

SEQ ID NO: 1096181 - DNA, 25 bp, Homo sapien
gatcacctcgagatgagggcattct

SEQ ID NO: 1096182 - DNA, 25 bp, Homo sapien
tccctggagccatgggtcaaatttg

SEQ ID NO: 1096183 - DNA, 25 bp, Homo sapien
caattccctggagccatgggtcaaa

SEQ ID NO: 1096184 - DNA, 25 bp, Homo sapien
ctgcaattccctggagccatgggtc

SEQ ID NO: 1096185 - DNA, 25 bp, Homo sapien
cctggagccatgggtcaaatttgaa

SEQ ID NO: 1096186 - DNA, 25 bp, Homo sapien
tgagccacacttgggataacctgaa

SEQ ID NO: 1096187 - DNA, 25 bp, Homo sapien
gaaagacagcttaaatccagaccca

SEQ ID NO: 1096188 - DNA, 25 bp, Homo sapien
gaagacagctgaactgatggagaat

SEQ ID NO: 1096189 - DNA, 25 bp, Homo sapien
gctgtacactaaactggagctttgt

SEQ ID NO: 1096190 - DNA, 25 bp, Homo sapien
gctaaggaaccagatgcagcagata

SEQ ID NO: 1096191 - DNA, 25 bp, Homo sapien
gaggcctgtcgaatctgctaaggaa

SEQ ID NO: 1096192 - DNA, 25 bp, Homo sapien
gagttttcaacatgtgacaagccca

SEQ ID NO: 1096193 - DNA, 25 bp, Homo sapien
ggttgccaattcagacagccagttg

SEQ ID NO: 1096194 - DNA, 25 bp, Homo sapien
ggttatcagtagatggacaaaaagc

SEQ ID NO: 1096195 - DNA, 25 bp, Homo sapien
aggttatcagtagatggacaaaaag

SEQ ID NO: 1096196 - DNA, 25 bp, Homo sapien
tacttctcaggatctgttttcccag

SEQ ID NO: 1096197 - DNA, 25 bp, Homo sapien
agacaccagccagtgcagtacttca

SEQ ID NO: 1096198 - DNA, 25 bp, Homo sapien
tacttcacaagctctgcagtacttc

SEQ ID NO: 1096199 - DNA, 25 bp, Homo sapien
aagctctgcagtacttctcaggatc

SEQ ID NO: 1096200 - DNA, 25 bp, Homo sapien
ggagctgggagcttgtgctttccat

SEQ ID NO: 1096201 - DNA, 25 bp, Homo sapien
ttgtccccattttacttgatccaaa

SEQ ID NO: 1096202 - DNA, 25 bp, Homo sapien
cccattttacttgatccaaagatct

SEQ ID NO: 1096203 - DNA, 25 bp, Homo sapien
ttttacttgatccaaagatcttgat

SEQ ID NO: 1096204 - DNA, 25 bp, Homo sapien
tctgcggtctgatacacatcactgt

SEQ ID NO: 1096205 - DNA, 25 bp, Homo sapien
gaggatttttacagcttccattggg

SEQ ID NO: 1096206 - DNA, 25 bp, Homo sapien
ggtggagaggatttttacagcttcc

SEQ ID NO: 1096207 - DNA, 25 bp, Homo sapien
cttccattgggggagagtattctgc

SEQ ID NO: 1096208 - DNA, 25 bp, Homo sapien
tatactttgcgtgatacctatcttc

SEQ ID NO: 1096209 - DNA, 25 bp, Homo sapien
tgaggatttgtgatctaacctatgg

SEQ ID NO: 1096210 - DNA, 25 bp, Homo sapien
ccttctgcgattgatttttaccatc

SEQ ID NO: 1096211 - DNA, 25 bp, Homo sapien
taacctatggtttgtcatggagaat

SEQ ID NO: 1096212 - DNA, 25 bp, Homo sapien
tatatgtttcagttctgacgaacag

SEQ ID NO: 1096213 - DNA, 25 bp, Homo sapien
cattcttctgtcaagaaacacttgg

SEQ ID NO: 1096214 - DNA, 25 bp, Homo sapien
tatgaacagggactcaaatataggt

SEQ ID NO: 1096215 - DNA, 25 bp, Homo sapien
tataggtttgagttccgacgaacag

SEQ ID NO: 1096216 - DNA, 25 bp, Homo sapien
ctgagtagtaacaagtttatcacac

SEQ ID NO: 1096217 - DNA, 25 bp, Homo sapien
cagtccaagtgatgcgatacccaag

SEQ ID NO: 1096218 - DNA, 25 bp, Homo sapien
acactctcgcagtccaagtgatgcg

SEQ ID NO: 1096219 - DNA, 25 bp, Homo sapien
tgcgatacccaagccagcaagggaa

SEQ ID NO: 1096220 - DNA, 25 bp, Homo sapien
ggcaggaatagcacactctgcagcc

SEQ ID NO: 1096221 - DNA, 25 bp, Homo sapien
caatgtgtagactgacccacacagc

SEQ ID NO: 1096222 - DNA, 25 bp, Homo sapien
gatgatttggcaggaatagcacact

SEQ ID NO: 1096223 - DNA, 25 bp, Homo sapien
acactctgcagccaatgtgtagact

SEQ ID NO: 1096224 - DNA, 25 bp, Homo sapien
gaactcccaggtggtaatctgactg

SEQ ID NO: 1096225 - DNA, 25 bp, Homo sapien
cccacttaaatctgggttcacacca

SEQ ID NO: 1096226 - DNA, 25 bp, Homo sapien
tgaagtctcagacaaaacctgcctc

SEQ ID NO: 1096227 - DNA, 25 bp, Homo sapien
gtggtaatctgactgtctgccccag

SEQ ID NO: 1096228 - DNA, 25 bp, Homo sapien
cagcaggtttcttactctctggtac

SEQ ID NO: 1096229 - DNA, 25 bp, Homo sapien
gcaggtttcttactctctggtacat

SEQ ID NO: 1096230 - DNA, 25 bp, Homo sapien
tctgactgtctttcttggagttcag

SEQ ID NO: 1096231 - DNA, 25 bp, Homo sapien
tcttcagttttctgactgtctttct

SEQ ID NO: 1096232 - DNA, 25 bp, Homo sapien
ttgtttaccaaacatattcgtcttc

SEQ ID NO: 1096233 - DNA, 25 bp, Homo sapien
gtttaccaaacatattcgtcttctg

SEQ ID NO: 1096234 - DNA, 25 bp, Homo sapien
tttaccaaacatattcgtcttctgg

SEQ ID NO: 1096235 - DNA, 25 bp, Homo sapien
accaaacatattcgtcttctggtac

SEQ ID NO: 1096236 - DNA, 25 bp, Homo sapien
tcaaacataatctcaccctgctgta

SEQ ID NO: 1096237 - DNA, 25 bp, Homo sapien
caccctgctgtagctcaaactcccc

SEQ ID NO: 1096238 - DNA, 25 bp, Homo sapien
ttgacagccatgatcaaacataatc

SEQ ID NO: 1096239 - DNA, 25 bp, Homo sapien
gacagccatgatcaaacataatctc

SEQ ID NO: 1096240 - DNA, 25 bp, Homo sapien
tatccttgcacgcatgaacatccgt

SEQ ID NO: 1096241 - DNA, 25 bp, Homo sapien
gaacatccgttttgccacacttgga

SEQ ID NO: 1096242 - DNA, 25 bp, Homo sapien
catgcaaggctgactttctaaagaa

SEQ ID NO: 1096243 - DNA, 25 bp, Homo sapien
taaagaaatacccacctcatactgc

SEQ ID NO: 1096244 - DNA, 25 bp, Homo sapien
atattgttacatagtcttattgggt

SEQ ID NO: 1096245 - DNA, 25 bp, Homo sapien
tattgttacatagtcttattgggtc

SEQ ID NO: 1096246 - DNA, 25 bp, Homo sapien
gcaagttggtccacatagccccagt

SEQ ID NO: 1096247 - DNA, 25 bp, Homo sapien
aacctgaacatatgcgtggattgga

SEQ ID NO: 1096248 - DNA, 25 bp, Homo sapien
catatgcgtggattggagcaagttg

SEQ ID NO: 1096249 - DNA, 25 bp, Homo sapien
tcaaggggcattaaaagccagcaag

SEQ ID NO: 1096250 - DNA, 25 bp, Homo sapien
tctggcacacatgcatgcttgaggc

SEQ ID NO: 1096251 - DNA, 25 bp, Homo sapien
tgaaaccagttgtgtaggcatgtct

SEQ ID NO: 1096252 - DNA, 25 bp, Homo sapien
caggtgtgatgtattcctgacacgc

SEQ ID NO: 1096253 - DNA, 25 bp, Homo sapien
gggagctgctgataaattattcata

SEQ ID NO: 1096254 - DNA, 25 bp, Homo sapien
caaagtccgttgctacatgctcaga

SEQ ID NO: 1096255 - DNA, 25 bp, Homo sapien
tcccactgcaccagtggatgatgcc

SEQ ID NO: 1096256 - DNA, 25 bp, Homo sapien
ttgctacatgctcagagtccaatgc

SEQ ID NO: 1096257 - DNA, 25 bp, Homo sapien
tggatgatgcctgcaaagtccgttg

SEQ ID NO: 1096258 - DNA, 25 bp, Homo sapien
agtttatcaagccagggtcgcaggc

SEQ ID NO: 1096259 - DNA, 25 bp, Homo sapien
cactgctagtacaaaggttactttg

SEQ ID NO: 1096260 - DNA, 25 bp, Homo sapien
tcaagccagggtcgcaggcatccat

SEQ ID NO: 1096261 - DNA, 25 bp, Homo sapien
cagttcttatccaagcagtttatca

SEQ ID NO: 1096262 - DNA, 25 bp, Homo sapien
acttcccttttcgcctcaagctctc

SEQ ID NO: 1096263 - DNA, 25 bp, Homo sapien
ttcccttttcgcctcaagctctctg

SEQ ID NO: 1096264 - DNA, 25 bp, Homo sapien
tgacttcccttttcgcctcaagctc

SEQ ID NO: 1096265 - DNA, 25 bp, Homo sapien
tgtttgaagtcaattaccatagtca

SEQ ID NO: 1096266 - DNA, 25 bp, Homo sapien
gtaggtagaccctttggtcatgcca

SEQ ID NO: 1096267 - DNA, 25 bp, Homo sapien
tgccactccttgtccatacagtcat

SEQ ID NO: 1096268 - DNA, 25 bp, Homo sapien
attctttctgtaggtagaccctttg

SEQ ID NO: 1096269 - DNA, 25 bp, Homo sapien
cagtcattcatagctctcacctttt

SEQ ID NO: 1096270 - DNA, 25 bp, Homo sapien
gggatagaccctgtcagagtcatca

SEQ ID NO: 1096271 - DNA, 25 bp, Homo sapien
aaagattcatcattgcaacgcatcc

SEQ ID NO: 1096272 - DNA, 25 bp, Homo sapien
tcatcattgcaacgcatccatattt

SEQ ID NO: 1096273 - DNA, 25 bp, Homo sapien
ttctgaagggatagaccctgtcaga

SEQ ID NO: 1096274 - DNA, 25 bp, Homo sapien
gtgtttctgactttagtttatcagg

SEQ ID NO: 1096275 - DNA, 25 bp, Homo sapien
ggtgtttctgactttagtttatcag

SEQ ID NO: 1096276 - DNA, 25 bp, Homo sapien
agtttatcagggtttttgacctcag

SEQ ID NO: 1096277 - DNA, 25 bp, Homo sapien
tttatcagggtttttgacctcagtc

SEQ ID NO: 1096278 - DNA, 25 bp, Homo sapien
cagctactctggaggtggagcttgc

SEQ ID NO: 1096279 - DNA, 25 bp, Homo sapien
attgcaccactgcactcagcctggg

SEQ ID NO: 1096280 - DNA, 25 bp, Homo sapien
gcaccactgcactcagcctgggtga

SEQ ID NO: 1096281 - DNA, 25 bp, Homo sapien
agtgagcagagattgcaccactgca

SEQ ID NO: 1096282 - DNA, 25 bp, Homo sapien
ctgaaactgatgctgaggccgtgaa

SEQ ID NO: 1096283 - DNA, 25 bp, Homo sapien
aaactgatgctgaggccgtgaacga

SEQ ID NO: 1096284 - DNA, 25 bp, Homo sapien
aggccgtgaacgacatttattatct

SEQ ID NO: 1096285 - DNA, 25 bp, Homo sapien
aactgatgctgaggccgtgaacgac

SEQ ID NO: 1096286 - DNA, 25 bp, Homo sapien
tagcatctgggccaagattaactgc

SEQ ID NO: 1096287 - DNA, 25 bp, Homo sapien
tctgggccaagattaactgctgatg

SEQ ID NO: 1096288 - DNA, 25 bp, Homo sapien
ccaagattaactgctgatgctctct

SEQ ID NO: 1096289 - DNA, 25 bp, Homo sapien
aaaatagcatctgggccaagattaa

SEQ ID NO: 1096290 - DNA, 25 bp, Homo sapien
ccaactcgccaagctggcgtcaggg

SEQ ID NO: 1096291 - DNA, 25 bp, Homo sapien
aactcgccaagctggcgtcagggca

SEQ ID NO: 1096292 - DNA, 25 bp, Homo sapien
actcgccaagctggcgtcagggcag

SEQ ID NO: 1096293 - DNA, 25 bp, Homo sapien
cgccaagctggcgtcagggcagtca

SEQ ID NO: 1096294 - DNA, 25 bp, Homo sapien
caagaatctacccatgtagcgttcc

SEQ ID NO: 1096295 - DNA, 25 bp, Homo sapien
tggaaaggaacctgggtacctgaca

SEQ ID NO: 1096296 - DNA, 25 bp, Homo sapien
tctttggaaccatggagctccactg

SEQ ID NO: 1096297 - DNA, 25 bp, Homo sapien
tccaactgaaagtcttccttgaggg

SEQ ID NO: 1096298 - DNA, 25 bp, Homo sapien
tttggattatgagctttcagctcaa

SEQ ID NO: 1096299 - DNA, 25 bp, Homo sapien
ggattatgagctttcagctcaaagc

SEQ ID NO: 1096300 - DNA, 25 bp, Homo sapien
ttatttggattatgagctttcagct

SEQ ID NO: 1096301 - DNA, 25 bp, Homo sapien
tatttggattatgagctttcagctc

SEQ ID NO: 1096302 - DNA, 25 bp, Homo sapien
ccaagagaattgcaaggatttatcc

SEQ ID NO: 1096303 - DNA, 25 bp, Homo sapien
aagaacagcaatctcactccgtgat

SEQ ID NO: 1096304 - DNA, 25 bp, Homo sapien
gctgcaatgcgatgtgctactgaca

SEQ ID NO: 1096305 - DNA, 25 bp, Homo sapien
gacatgagaccgttcccaatgggaa

SEQ ID NO: 1096306 - DNA, 25 bp, Homo sapien
gaaggtgtcgtaagatcagatacac

SEQ ID NO: 1096307 - DNA, 25 bp, Homo sapien
ggtaagctggatcctccataggaat

SEQ ID NO: 1096308 - DNA, 25 bp, Homo sapien
cagatacacttttgggtgatcagca

SEQ ID NO: 1096309 - DNA, 25 bp, Homo sapien
cataggaataggcactagctggttt

SEQ ID NO: 1096310 - DNA, 25 bp, Homo sapien
ggttctcttgaaatccagcgtctgt

SEQ ID NO: 1096311 - DNA, 25 bp, Homo sapien
aaggcagatgggtggaagagtaggg

SEQ ID NO: 1096312 - DNA, 25 bp, Homo sapien
gctgccggcccgagggtgcctttcc

SEQ ID NO: 1096313 - DNA, 25 bp, Homo sapien
tctgtcctgtcctatagcccagcag

SEQ ID NO: 1096314 - DNA, 25 bp, Homo sapien
gagtgaccagcgattgtccctgctg

SEQ ID NO: 1096315 - DNA, 25 bp, Homo sapien
tctaaagcaatcacaggagacccag

SEQ ID NO: 1096316 - DNA, 25 bp, Homo sapien
cagtttaatggcacagagtgaccag

SEQ ID NO: 1096317 - DNA, 25 bp, Homo sapien
taaatttccgctctgcttgaccttg

SEQ ID NO: 1096318 - DNA, 25 bp, Homo sapien
gatccccaatctctataaagtgttt

SEQ ID NO: 1096319 - DNA, 25 bp, Homo sapien
tgagacagttaaggcaagatcccca

SEQ ID NO: 1096320 - DNA, 25 bp, Homo sapien
gcttcagtgataggggagctagctt

SEQ ID NO: 1096321 - DNA, 25 bp, Homo sapien
cccaggtttgcaattaatgagacag

SEQ ID NO: 1096322 - DNA, 25 bp, Homo sapien
ccagtatgtgttgctcccccttgtg

SEQ ID NO: 1096323 - DNA, 25 bp, Homo sapien
ccttgtgtctatatattctcatgat

SEQ ID NO: 1096324 - DNA, 25 bp, Homo sapien
taagtgagaatgtggggtgtttgtt

SEQ ID NO: 1096325 - DNA, 25 bp, Homo sapien
cccccttgtgtctatatattctcat

SEQ ID NO: 1096326 - DNA, 25 bp, Homo sapien
caatgtgttgcctcagaatatacat

SEQ ID NO: 1096327 - DNA, 25 bp, Homo sapien
taatggtaactacaacccaggcagg

SEQ ID NO: 1096328 - DNA, 25 bp, Homo sapien
aattcagggagctaacttatttgcc

SEQ ID NO: 1096329 - DNA, 25 bp, Homo sapien
ttgcctaaggccaggttttgaacac

SEQ ID NO: 1096330 - DNA, 25 bp, Homo sapien
cgccactcctagtggacctggcaaa

SEQ ID NO: 1096331 - DNA, 25 bp, Homo sapien
cctccttggcaccaaaaccggcagg

SEQ ID NO: 1096332 - DNA, 25 bp, Homo sapien
cctccgccactcctagtggacctgg

SEQ ID NO: 1096333 - DNA, 25 bp, Homo sapien
ttggcaccaaaaccggcaggctgcc

SEQ ID NO: 1096334 - DNA, 25 bp, Homo sapien
ttgataaataatggttcatccagac

SEQ ID NO: 1096335 - DNA, 25 bp, Homo sapien
cagcctcagggtttatatccccctt

SEQ ID NO: 1096336 - DNA, 25 bp, Homo sapien
tgataaataatggttcatccagacc

SEQ ID NO: 1096337 - DNA, 25 bp, Homo sapien
tcagggtttatatcccccttgataa

SEQ ID NO: 1096338 - DNA, 25 bp, Homo sapien
tggtgacaacaacccacaaggagat

SEQ ID NO: 1096339 - DNA, 25 bp, Homo sapien
tcttgtgggtcaccactagggcctg

SEQ ID NO: 1096340 - DNA, 25 bp, Homo sapien
cctgcagtggcccaaggatcgcatt

SEQ ID NO: 1096341 - DNA, 25 bp, Homo sapien
caaacattgcgcaggtgattgacct

SEQ ID NO: 1096342 - DNA, 25 bp, Homo sapien
gggaatttctccggatagtatcctg

SEQ ID NO: 1096343 - DNA, 25 bp, Homo sapien
ttggggaatttctccggatagtatc

SEQ ID NO: 1096344 - DNA, 25 bp, Homo sapien
gaatttctccggatagtatcctgca

SEQ ID NO: 1096345 - DNA, 25 bp, Homo sapien
tggggaatttctccggatagtatcc

SEQ ID NO: 1096346 - DNA, 25 bp, Homo sapien
gtttcccctttatagcattatcttg

SEQ ID NO: 1096347 - DNA, 25 bp, Homo sapien
tctgtttcccctttatagcattatc

SEQ ID NO: 1096348 - DNA, 25 bp, Homo sapien
ctgtttcccctttatagcattatct

SEQ ID NO: 1096349 - DNA, 25 bp, Homo sapien
aaactgggtagcctttctgacttgg

SEQ ID NO: 1096350 - DNA, 25 bp, Homo sapien
caagcagaagtaacatcctttccca

SEQ ID NO: 1096351 - DNA, 25 bp, Homo sapien
gaggcagtgacttcactccacttct

SEQ ID NO: 1096352 - DNA, 25 bp, Homo sapien
tcactgtgaatttcgtcctcaggcc

SEQ ID NO: 1096353 - DNA, 25 bp, Homo sapien
gctcttcagagataagtttcactgg

SEQ ID NO: 1096354 - DNA, 25 bp, Homo sapien
aatgatgcattgaacctgggcctgg

SEQ ID NO: 1096355 - DNA, 25 bp, Homo sapien
ggaagtagtgcagctcttcagagat

SEQ ID NO: 1096356 - DNA, 25 bp, Homo sapien
gggcctggcttttcaattcatgcag

SEQ ID NO: 1096357 - DNA, 25 bp, Homo sapien
tacattgtgcccgtttgctttctcc

SEQ ID NO: 1096358 - DNA, 25 bp, Homo sapien
actgtgctacattgtgcccgtttgc

SEQ ID NO: 1096359 - DNA, 25 bp, Homo sapien
ccctggggtctgcaacccacgaaag

SEQ ID NO: 1096360 - DNA, 25 bp, Homo sapien
gcaacccacgaaagggttccatgga

SEQ ID NO: 1096361 - DNA, 25 bp, Homo sapien
actttattgctccagctctcagtga

SEQ ID NO: 1096362 - DNA, 25 bp, Homo sapien
aaagcctcactttattgctccagct

SEQ ID NO: 1096363 - DNA, 25 bp, Homo sapien
ttattgctccagctctcagtgactg

SEQ ID NO: 1096364 - DNA, 25 bp, Homo sapien
gcaaagcctcactttattgctccag

SEQ ID NO: 1096365 - DNA, 25 bp, Homo sapien
gctgcttctgctgattgtgttatag

SEQ ID NO: 1096366 - DNA, 25 bp, Homo sapien
tttgaaagacgtgttctgaatcagg

SEQ ID NO: 1096367 - DNA, 25 bp, Homo sapien
tctgaatcaggtaattcaattgcat

SEQ ID NO: 1096368 - DNA, 25 bp, Homo sapien
cctggcagttggatcattgtacttc

SEQ ID NO: 1096369 - DNA, 25 bp, Homo sapien
tctcccctgctcaagttattagtgt

SEQ ID NO: 1096370 - DNA, 25 bp, Homo sapien
aaccagccgcaaggaccatctgttt

SEQ ID NO: 1096371 - DNA, 25 bp, Homo sapien
tgtttccgatttctagctgagccaa

SEQ ID NO: 1096372 - DNA, 25 bp, Homo sapien
cactgtcctactatgttcaagtcac

SEQ ID NO: 1096373 - DNA, 25 bp, Homo sapien
gggcaacatgtagtccggtccatac

SEQ ID NO: 1096374 - DNA, 25 bp, Homo sapien
catttgcagtggcatgtggggcaac

SEQ ID NO: 1096375 - DNA, 25 bp, Homo sapien
aactcacgggagataagacacctaa

SEQ ID NO: 1096376 - DNA, 25 bp, Homo sapien
ggtccataccatatggaatcatggg

SEQ ID NO: 1096377 - DNA, 25 bp, Homo sapien
gccgagatgtcgtagcagagctgcc

SEQ ID NO: 1096378 - DNA, 25 bp, Homo sapien
gagccgtcggaagctttccctgcca

SEQ ID NO: 1096379 - DNA, 25 bp, Homo sapien
tagcagagctgccatttgatggagc

SEQ ID NO: 1096380 - DNA, 25 bp, Homo sapien
gctgccatttgatggagccgtcgga

SEQ ID NO: 1096381 - DNA, 25 bp, Homo sapien
aaaatgagggcaagcattcctggga

SEQ ID NO: 1096382 - DNA, 25 bp, Homo sapien
caatactgacttggctaaaatatcc

SEQ ID NO: 1096383 - DNA, 25 bp, Homo sapien
aactcaagtcgcagagtggcagaga

SEQ ID NO: 1096384 - DNA, 25 bp, Homo sapien
cctgagggctgggacgaatgtttca

SEQ ID NO: 1096385 - DNA, 25 bp, Homo sapien
cagagaaaaccatacaccccatagt

SEQ ID NO: 1096386 - DNA, 25 bp, Homo sapien
tagtgcccaacacgcgtcctcagaa

SEQ ID NO: 1096387 - DNA, 25 bp, Homo sapien
gcccaacacgcgtcctcagaaaatg

SEQ ID NO: 1096388 - DNA, 25 bp, Homo sapien
gccagagaaaaccatacaccccata

SEQ ID NO: 1096389 - DNA, 25 bp, Homo sapien
tcagagctagagtgcctaagagaca

SEQ ID NO: 1096390 - DNA, 25 bp, Homo sapien
gaagaattcacgcttgccgcaagaa

SEQ ID NO: 1096391 - DNA, 25 bp, Homo sapien
ggatagaatcctgcggtagctcact

SEQ ID NO: 1096392 - DNA, 25 bp, Homo sapien
tattcccggcggtaaaacatctgta

SEQ ID NO: 1096393 - DNA, 25 bp, Homo sapien
agatctgaaatgccatggtatgtgg

SEQ ID NO: 1096394 - DNA, 25 bp, Homo sapien
tctgaaatgccatggtatgtggtca

SEQ ID NO: 1096395 - DNA, 25 bp, Homo sapien
ctgaaatgccatggtatgtggtcac

SEQ ID NO: 1096396 - DNA, 25 bp, Homo sapien
gatctgaaatgccatggtatgtggt

SEQ ID NO: 1096397 - DNA, 25 bp, Homo sapien
caataatgggaaatttacattagaa

SEQ ID NO: 1096398 - DNA, 25 bp, Homo sapien
catcaataatgggaaatttacatta

SEQ ID NO: 1096399 - DNA, 25 bp, Homo sapien
tttcccatcaataatgggaaattta

SEQ ID NO: 1096400 - DNA, 25 bp, Homo sapien
tcccatcaataatgggaaatttaca

SEQ ID NO: 1096401 - DNA, 25 bp, Homo sapien
cagatgacgcatgaggtaattttaa

SEQ ID NO: 1096402 - DNA, 25 bp, Homo sapien
actccgatcttgtactgtcctttga

SEQ ID NO: 1096403 - DNA, 25 bp, Homo sapien
atttgcctttagtgtgaaactccga

SEQ ID NO: 1096404 - DNA, 25 bp, Homo sapien
tgcagccagatgacgcatgaggtaa

SEQ ID NO: 1096405 - DNA, 25 bp, Homo sapien
cctttgtatgctgggaggaccaagc

SEQ ID NO: 1096406 - DNA, 25 bp, Homo sapien
gcaaaattgcatatcccgtcgctgg

SEQ ID NO: 1096407 - DNA, 25 bp, Homo sapien
caagccggaggttcccactatgagc

SEQ ID NO: 1096408 - DNA, 25 bp, Homo sapien
gggcattcactgagttgcctttgta

SEQ ID NO: 1096409 - DNA, 25 bp, Homo sapien
tacaacctggtacaacatatgcccc

SEQ ID NO: 1096410 - DNA, 25 bp, Homo sapien
taatgactgtctacaacctggtaca

SEQ ID NO: 1096411 - DNA, 25 bp, Homo sapien
tgtctacaacctggtacaacatatg

SEQ ID NO: 1096412 - DNA, 25 bp, Homo sapien
tggagtaggtaatgactgtctacaa

SEQ ID NO: 1096413 - DNA, 25 bp, Homo sapien
ggtttctcataagtggcagcgccaa

SEQ ID NO: 1096414 - DNA, 25 bp, Homo sapien
taaagccctactgtaagcctgagtg

SEQ ID NO: 1096415 - DNA, 25 bp, Homo sapien
aaatacatgcttctagggtgcctcc

SEQ ID NO: 1096416 - DNA, 25 bp, Homo sapien
tatcaaaaagtgtagctaaagccct

SEQ ID NO: 1096417 - DNA, 25 bp, Homo sapien
gcttgcagtctgcttatactgtgag

SEQ ID NO: 1096418 - DNA, 25 bp, Homo sapien
taggcttgcttaagtaaccaatcac

SEQ ID NO: 1096419 - DNA, 25 bp, Homo sapien
gatgttgtacaaggctaacctaaaa

SEQ ID NO: 1096420 - DNA, 25 bp, Homo sapien
aataagctcaggtagagccactgca

SEQ ID NO: 1096421 - DNA, 25 bp, Homo sapien
ttcctccgcaggactgaaaagcaca

SEQ ID NO: 1096422 - DNA, 25 bp, Homo sapien
ttcaacatttgaagagggcttatca

SEQ ID NO: 1096423 - DNA, 25 bp, Homo sapien
ctccgcaggactgaaaagcacacat

SEQ ID NO: 1096424 - DNA, 25 bp, Homo sapien
aaacccagccgctaaggcatttcct

SEQ ID NO: 1096425 - DNA, 25 bp, Homo sapien
catttttggtaccagttgtcagcat

SEQ ID NO: 1096426 - DNA, 25 bp, Homo sapien
ccatttttggtaccagttgtcagca

SEQ ID NO: 1096427 - DNA, 25 bp, Homo sapien
tctgatttccagtgtagtaggacct

SEQ ID NO: 1096428 - DNA, 25 bp, Homo sapien
cataagattgatcttctggtctgat

SEQ ID NO: 1096429 - DNA, 25 bp, Homo sapien
tgctattctgcttgtctgtgttaag

SEQ ID NO: 1096430 - DNA, 25 bp, Homo sapien
tttttgtaacccagtgcttgactcc

SEQ ID NO: 1096431 - DNA, 25 bp, Homo sapien
gacagcaagggctgaaatttcttca

SEQ ID NO: 1096432 - DNA, 25 bp, Homo sapien
aaaatccttctggagactctgtcca

SEQ ID NO: 1096433 - DNA, 25 bp, Homo sapien
tgtaacatcttgatataaacagtag

SEQ ID NO: 1096434 - DNA, 25 bp, Homo sapien
ttaaggtagtttagtaatgacagca

SEQ ID NO: 1096435 - DNA, 25 bp, Homo sapien
gttgggcttcaatgtgctataaaac

SEQ ID NO: 1096436 - DNA, 25 bp, Homo sapien
caagttggagcttatgaattatgag

SEQ ID NO: 1096437 - DNA, 25 bp, Homo sapien
gctataaaactggtcttgtgtagat

SEQ ID NO: 1096438 - DNA, 25 bp, Homo sapien
tgaattatgagcttcctaccagttt

SEQ ID NO: 1096439 - DNA, 25 bp, Homo sapien
ttgtttgcaccagacacagtaccag

SEQ ID NO: 1096440 - DNA, 25 bp, Homo sapien
gctgagtgacgctttgttgtttgca

SEQ ID NO: 1096441 - DNA, 25 bp, Homo sapien
gcagcaatggtagaatgtatagccc

SEQ ID NO: 1096442 - DNA, 25 bp, Homo sapien
ttgtcatctgagaaaagtggcctca

SEQ ID NO: 1096443 - DNA, 25 bp, Homo sapien
tgaaatgacagatagcaaaagagct

SEQ ID NO: 1096444 - DNA, 25 bp, Homo sapien
gacagatagcaaaagagctttcagt

SEQ ID NO: 1096445 - DNA, 25 bp, Homo sapien
aatgacagatagcaaaagagctttc

SEQ ID NO: 1096446 - DNA, 25 bp, Homo sapien
ggtgaaatgacagatagcaaaagag

SEQ ID NO: 1096447 - DNA, 25 bp, Homo sapien
ccccaagcgggtatggaaagtggct

SEQ ID NO: 1096448 - DNA, 25 bp, Homo sapien
aagaaacgccatcgcctgttcctgg

SEQ ID NO: 1096449 - DNA, 25 bp, Homo sapien
ggtgccaaactcgaggaaaatcaag

SEQ ID NO: 1096450 - DNA, 25 bp, Homo sapien
aaagcaggcccgatctgtaacagca

SEQ ID NO: 1096451 - DNA, 25 bp, Homo sapien
aagactgaagcccagcaagatcaca

SEQ ID NO: 1096452 - DNA, 25 bp, Homo sapien
cagctggtgaatgatagataaggtc

SEQ ID NO: 1096453 - DNA, 25 bp, Homo sapien
cactactaggtaagaactgtgattc

SEQ ID NO: 1096454 - DNA, 25 bp, Homo sapien
gtcttattgccccaatgtgaaagta

SEQ ID NO: 1096455 - DNA, 25 bp, Homo sapien
atccctgaccctgtgccccaaccat

SEQ ID NO: 1096456 - DNA, 25 bp, Homo sapien
ggggccagacatcaggataagcaag

SEQ ID NO: 1096457 - DNA, 25 bp, Homo sapien
cccaaccatgaaggggccagacatc

SEQ ID NO: 1096458 - DNA, 25 bp, Homo sapien
atccctttctagcccctatccctga

SEQ ID NO: 1096459 - DNA, 25 bp, Homo sapien
tgtaaccagtccttcgtgaaactcc

SEQ ID NO: 1096460 - DNA, 25 bp, Homo sapien
tgaggagagcggactcagtcccagt

SEQ ID NO: 1096461 - DNA, 25 bp, Homo sapien
ttaagggtggtgataactctctgcc

SEQ ID NO: 1096462 - DNA, 25 bp, Homo sapien
tcccagtccgctgaaggagggacat

SEQ ID NO: 1096463 - DNA, 25 bp, Homo sapien
taagacatttggtacagtgcaggaa

SEQ ID NO: 1096464 - DNA, 25 bp, Homo sapien
cctaattactgagctggtgggtccc

SEQ ID NO: 1096465 - DNA, 25 bp, Homo sapien
gtgggtcccactgacacctgtaaga

SEQ ID NO: 1096466 - DNA, 25 bp, Homo sapien
tgcgaaactgtatacgtccaccgta

SEQ ID NO: 1096467 - DNA, 25 bp, Homo sapien
agcagagcagatgctcagcccttct

SEQ ID NO: 1096468 - DNA, 25 bp, Homo sapien
ctttccacggatggcagtggggcag

SEQ ID NO: 1096469 - DNA, 25 bp, Homo sapien
cacggatggcagtggggcagcaatg

SEQ ID NO: 1096470 - DNA, 25 bp, Homo sapien
ttccacggatggcagtggggcagca

SEQ ID NO: 1096471 - DNA, 25 bp, Homo sapien
catcctttgtgaggccctggcgttt

SEQ ID NO: 1096472 - DNA, 25 bp, Homo sapien
tctaagggttgctttgttccaggtg

SEQ ID NO: 1096473 - DNA, 25 bp, Homo sapien
ctaaggactagtgggtcggaagcta

SEQ ID NO: 1096474 - DNA, 25 bp, Homo sapien
tcggaagctaaactgatcagagaac

SEQ ID NO: 1096475 - DNA, 25 bp, Homo sapien
aaggacaaagataatcctgttagag

SEQ ID NO: 1096476 - DNA, 25 bp, Homo sapien
ggacaaagataatcctgttagagaa

SEQ ID NO: 1096477 - DNA, 25 bp, Homo sapien
aggacaaagataatcctgttagaga

SEQ ID NO: 1096478 - DNA, 25 bp, Homo sapien
tggttctcagttctgtaaatttaga

SEQ ID NO: 1096479 - DNA, 25 bp, Homo sapien
atgtactttgctgagtccaaaggcc

SEQ ID NO: 1096480 - DNA, 25 bp, Homo sapien
aaggcaatgtactttgctgagtcca

SEQ ID NO: 1096481 - DNA, 25 bp, Homo sapien
cagttctgtaaatttagaaacatga

SEQ ID NO: 1096482 - DNA, 25 bp, Homo sapien
ccattgactgaatcaaggtcgttct

SEQ ID NO: 1096483 - DNA, 25 bp, Homo sapien
gaatttctgcctgcgtgaccattga

SEQ ID NO: 1096484 - DNA, 25 bp, Homo sapien
cattgtctgattgccccagcattgc

SEQ ID NO: 1096485 - DNA, 25 bp, Homo sapien
cttctggtactctggcttaggtgcc

SEQ ID NO: 1096486 - DNA, 25 bp, Homo sapien
tcttgcacagtgcaccgattctggt

SEQ ID NO: 1096487 - DNA, 25 bp, Homo sapien
agtgcaccgattctggtcatatctg

SEQ ID NO: 1096488 - DNA, 25 bp, Homo sapien
caggcaacatgtgatctgatttctg

SEQ ID NO: 1096489 - DNA, 25 bp, Homo sapien
acttcaggcaacatgtgatctgatt

SEQ ID NO: 1096490 - DNA, 25 bp, Homo sapien
tttgtgagtggacacaccagctctg

SEQ ID NO: 1096491 - DNA, 25 bp, Homo sapien
tctttggacagtagcatagcaaggg

SEQ ID NO: 1096492 - DNA, 25 bp, Homo sapien
tggttataatactacaggaggaggg

SEQ ID NO: 1096493 - DNA, 25 bp, Homo sapien
gggttgctgaatagcatcaaactag

SEQ ID NO: 1096494 - DNA, 25 bp, Homo sapien
caatactatagcatgttctgcaccg

SEQ ID NO: 1096495 - DNA, 25 bp, Homo sapien
tttagtcagcacaaatttggaggca

SEQ ID NO: 1096496 - DNA, 25 bp, Homo sapien
tttggaggcagaagcaaacctagta

SEQ ID NO: 1096497 - DNA, 25 bp, Homo sapien
ccatttcaggacacaaagtcctttg

SEQ ID NO: 1096498 - DNA, 25 bp, Homo sapien
tcaggaagtgggtctatcagctgaa

SEQ ID NO: 1096499 - DNA, 25 bp, Homo sapien
tattaagcaggtctccgcatgggag

SEQ ID NO: 1096500 - DNA, 25 bp, Homo sapien
tgggccatgtgtgcaccagcacctt

SEQ ID NO: 1096501 - DNA, 25 bp, Homo sapien
tatgtcccagatgtgactagagggt

SEQ ID NO: 1096502 - DNA, 25 bp, Homo sapien
gatgtgccgctcattgttcctgttg

SEQ ID NO: 1096503 - DNA, 25 bp, Homo sapien
cgtgtaccgatgcatcctcaggaaa

SEQ ID NO: 1096504 - DNA, 25 bp, Homo sapien
caaggttatcgcagtcgacttcagg

SEQ ID NO: 1096505 - DNA, 25 bp, Homo sapien
tggcagagatctttccgtgtaccga

SEQ ID NO: 1096506 - DNA, 25 bp, Homo sapien
gggtgtttatatttgtggaactctc

SEQ ID NO: 1096507 - DNA, 25 bp, Homo sapien
tttaaacagctgctatgctgaagct

SEQ ID NO: 1096508 - DNA, 25 bp, Homo sapien
ctgtctggttggcagtcaccaggct

SEQ ID NO: 1096509 - DNA, 25 bp, Homo sapien
tcctgtctggttggcagtcaccagg

SEQ ID NO: 1096510 - DNA, 25 bp, Homo sapien
tgtctggttggcagtcaccaggctg

SEQ ID NO: 1096511 - DNA, 25 bp, Homo sapien
cttcctgtctggttggcagtcacca

SEQ ID NO: 1096512 - DNA, 25 bp, Homo sapien
ggaatgctccctgtcaagttcttca

SEQ ID NO: 1096513 - DNA, 25 bp, Homo sapien
gtcagacctgcagacgattgcatgc

SEQ ID NO: 1096514 - DNA, 25 bp, Homo sapien
cagacctgcagacgattgcatgcca

SEQ ID NO: 1096515 - DNA, 25 bp, Homo sapien
ctgtctccctgagtcagacctgcag

SEQ ID NO: 1096516 - DNA, 25 bp, Homo sapien
acctgcagacgattgcatgccacca

SEQ ID NO: 1096517 - DNA, 25 bp, Homo sapien
gcgaatgttctacacttcaggacac

SEQ ID NO: 1096518 - DNA, 25 bp, Homo sapien
tgtagggccgtgaattcacccttcc

SEQ ID NO: 1096519 - DNA, 25 bp, Homo sapien
tttagacatgctctgtagggccgtg

SEQ ID NO: 1096520 - DNA, 25 bp, Homo sapien
tagggcttcccgcagagaagcagtc

SEQ ID NO: 1096521 - DNA, 25 bp, Homo sapien
ggtgctccctcttgtagtcctcact

SEQ ID NO: 1096522 - DNA, 25 bp, Homo sapien
tcactccactctaagcaccctttac

SEQ ID NO: 1096523 - DNA, 25 bp, Homo sapien
agcaccctttactacctttcctctg

SEQ ID NO: 1096524 - DNA, 25 bp, Homo sapien
tcaatactggtgctccctcttgtag

SEQ ID NO: 1096525 - DNA, 25 bp, Homo sapien
aacaggcaagacagagcttgagggc

SEQ ID NO: 1096526 - DNA, 25 bp, Homo sapien
ggctgaaacgatgtaacttgggagt

SEQ ID NO: 1096527 - DNA, 25 bp, Homo sapien
tgggtccatgcgttcaggctgaaac

SEQ ID NO: 1096528 - DNA, 25 bp, Homo sapien
ggctcttgggtccatgcgttcaggc

SEQ ID NO: 1096529 - DNA, 25 bp, Homo sapien
gcagtgaacgatgaaatccaggtgt

SEQ ID NO: 1096530 - DNA, 25 bp, Homo sapien
gactgaagtgcattatgtcaaatga

SEQ ID NO: 1096531 - DNA, 25 bp, Homo sapien
actgatggcagtgaacgatgaaatc

SEQ ID NO: 1096532 - DNA, 25 bp, Homo sapien
ggtcatgagagctttattatcccag

SEQ ID NO: 1096533 - DNA, 25 bp, Homo sapien
ctgacttatctccaaggactgccat

SEQ ID NO: 1096534 - DNA, 25 bp, Homo sapien
gggattgtttgaactctcatggagc

SEQ ID NO: 1096535 - DNA, 25 bp, Homo sapien
tccatgggatttataaggatccagc

SEQ ID NO: 1096536 - DNA, 25 bp, Homo sapien
caatgggaagttttatgagacaatt

SEQ ID NO: 1096537 - DNA, 25 bp, Homo sapien
catggagcttaggatggcactggct

SEQ ID NO: 1096538 - DNA, 25 bp, Homo sapien
tgaactcggagtgttttcaagggaa

SEQ ID NO: 1096539 - DNA, 25 bp, Homo sapien
cccagctgtgccgagaacaagttgc

SEQ ID NO: 1096540 - DNA, 25 bp, Homo sapien
tggcttgttttggttcatggagctg

SEQ ID NO: 1096541 - DNA, 25 bp, Homo sapien
tgtgattgatgcagggcccgtgctc

SEQ ID NO: 1096542 - DNA, 25 bp, Homo sapien
ggactgtgaccaggttgagggtgga

SEQ ID NO: 1096543 - DNA, 25 bp, Homo sapien
gggtggaggaccaacatctattcat

SEQ ID NO: 1096544 - DNA, 25 bp, Homo sapien
gagggtggaggaccaacatctattc

SEQ ID NO: 1096545 - DNA, 25 bp, Homo sapien
gttgagggtggaggaccaacatcta

SEQ ID NO: 1096546 - DNA, 25 bp, Homo sapien
tcaagtaagctgtcagttcacatct

SEQ ID NO: 1096547 - DNA, 25 bp, Homo sapien
tccagatggcttcaagtaagctgtc

SEQ ID NO: 1096548 - DNA, 25 bp, Homo sapien
tggcttcaagtaagctgtcagttca

SEQ ID NO: 1096549 - DNA, 25 bp, Homo sapien
cagatggcttcaagtaagctgtcag

SEQ ID NO: 1096550 - DNA, 25 bp, Homo sapien
ctcggatttccctggttgaggacat

SEQ ID NO: 1096551 - DNA, 25 bp, Homo sapien
gccaaacagggtaacgtgatccaac

SEQ ID NO: 1096552 - DNA, 25 bp, Homo sapien
ccggctaataatccaaagcctcgga

SEQ ID NO: 1096553 - DNA, 25 bp, Homo sapien
taacgtgatccaacccggctaataa

SEQ ID NO: 1096554 - DNA, 25 bp, Homo sapien
tatgatggcaagtggtgcacaggcc

SEQ ID NO: 1096555 - DNA, 25 bp, Homo sapien
gcagattctcatgggtgtaagcagg

SEQ ID NO: 1096556 - DNA, 25 bp, Homo sapien
gacagtttggtatgtattgcagcag

SEQ ID NO: 1096557 - DNA, 25 bp, Homo sapien
cctggaatgttggacagctggccca

SEQ ID NO: 1096558 - DNA, 25 bp, Homo sapien
agttatctttgtcctgccaaggtca

SEQ ID NO: 1096559 - DNA, 25 bp, Homo sapien
cacaatcttcactcctatacgggta

SEQ ID NO: 1096560 - DNA, 25 bp, Homo sapien
gacaggtagctatcagttatctttg

SEQ ID NO: 1096561 - DNA, 25 bp, Homo sapien
ctatacgggtaagctgacaggtagc

SEQ ID NO: 1096562 - DNA, 25 bp, Homo sapien
cctagttccaccagggcagactctg

SEQ ID NO: 1096563 - DNA, 25 bp, Homo sapien
ggcagactctgccagcattatcatt

SEQ ID NO: 1096564 - DNA, 25 bp, Homo sapien
agactctgccagcattatcattaag

SEQ ID NO: 1096565 - DNA, 25 bp, Homo sapien
ctgctcctagttccaccagggcaga

SEQ ID NO: 1096566 - DNA, 25 bp, Homo sapien
agcttactgcgacatgcaatttgtg

SEQ ID NO: 1096567 - DNA, 25 bp, Homo sapien
acagcttactgcgacatgcaatttg

SEQ ID NO: 1096568 - DNA, 25 bp, Homo sapien
aaaggccctgtaccattgctctcca

SEQ ID NO: 1096569 - DNA, 25 bp, Homo sapien
tcaccaaaggccctgtaccattgct

SEQ ID NO: 1096570 - DNA, 25 bp, Homo sapien
gatgacctgtccatgtcctatttcc

SEQ ID NO: 1096571 - DNA, 25 bp, Homo sapien
caagtgctggaggtttggctcagac

SEQ ID NO: 1096572 - DNA, 25 bp, Homo sapien
tcctgcaagaccaacccctgttttg

SEQ ID NO: 1096573 - DNA, 25 bp, Homo sapien
agttcttgtatctgagtccttgact

SEQ ID NO: 1096574 - DNA, 25 bp, Homo sapien
ggtcagctgttttcagcgtggcccc

SEQ ID NO: 1096575 - DNA, 25 bp, Homo sapien
catggacggtgctttactctggaaa

SEQ ID NO: 1096576 - DNA, 25 bp, Homo sapien
tgggaaatagatccagtggcagcag

SEQ ID NO: 1096577 - DNA, 25 bp, Homo sapien
cagcaacttccgagacactgggaaa

SEQ ID NO: 1096578 - DNA, 25 bp, Homo sapien
tgctgcgtgctgctttggtgctgtc

SEQ ID NO: 1096579 - DNA, 25 bp, Homo sapien
gtgctgcgtgctgctttggtgctgt

SEQ ID NO: 1096580 - DNA, 25 bp, Homo sapien
gctgcgtgctgctttggtgctgtct

SEQ ID NO: 1096581 - DNA, 25 bp, Homo sapien
tgcgtgctgctttggtgctgtctct

SEQ ID NO: 1096582 - DNA, 25 bp, Homo sapien
tctgggctagaattaaagtcaagcg

SEQ ID NO: 1096583 - DNA, 25 bp, Homo sapien
ggctagaattaaagtcaagcggatt

SEQ ID NO: 1096584 - DNA, 25 bp, Homo sapien
aagtcaagcggattcattaagccaa

SEQ ID NO: 1096585 - DNA, 25 bp, Homo sapien
gattcattaagccaaatggtggccc

SEQ ID NO: 1096586 - DNA, 25 bp, Homo sapien
ttatgactggatgcgtttgcagtgc

SEQ ID NO: 1096587 - DNA, 25 bp, Homo sapien
gtgcctactcctgggcgctggatga

SEQ ID NO: 1096588 - DNA, 25 bp, Homo sapien
ggctaccagattcacttcgagaaaa

SEQ ID NO: 1096589 - DNA, 25 bp, Homo sapien
tgaactcgctgtggataacaagtcc

SEQ ID NO: 1096590 - DNA, 25 bp, Homo sapien
caagtttggtctgcatgtgttcgtc

SEQ ID NO: 1096591 - DNA, 25 bp, Homo sapien
tctcgccctctcagctggctttctg

SEQ ID NO: 1096592 - DNA, 25 bp, Homo sapien
caaaggctctgacctatttgcttgg

SEQ ID NO: 1096593 - DNA, 25 bp, Homo sapien
tgcatgtgttcgtcttccacactcc

SEQ ID NO: 1096594 - DNA, 25 bp, Homo sapien
ctttcagtttgcgaacagggtggcg

SEQ ID NO: 1096595 - DNA, 25 bp, Homo sapien
ggactttctgatcgcagcccagctc

SEQ ID NO: 1096596 - DNA, 25 bp, Homo sapien
tttaatgcgcttcgggcaaggacca

SEQ ID NO: 1096597 - DNA, 25 bp, Homo sapien
tccgcagagcggcaagacactttct

SEQ ID NO: 1096598 - DNA, 25 bp, Homo sapien
aacaactgaactcatcaaaaggtgt

SEQ ID NO: 1096599 - DNA, 25 bp, Homo sapien
taagtagcaaaccaacccgttcatc

SEQ ID NO: 1096600 - DNA, 25 bp, Homo sapien
caaaaggtgtggagttactgataga

SEQ ID NO: 1096601 - DNA, 25 bp, Homo sapien
cattggatgtaaaggtgtgcattcc

SEQ ID NO: 1096602 - DNA, 25 bp, Homo sapien
gaagagcgcgcggggaggggggcat

SEQ ID NO: 1096603 - DNA, 25 bp, Homo sapien
ggaagagcgcgcggggaggggggca

SEQ ID NO: 1096604 - DNA, 25 bp, Homo sapien
gggagaggaagagcgcgcggggagg

SEQ ID NO: 1096605 - DNA, 25 bp, Homo sapien
ctgggagaggaagagcgcgcgggga

SEQ ID NO: 1096606 - DNA, 25 bp, Homo sapien
agctgccggcgaagcgggtgccggg

SEQ ID NO: 1096607 - DNA, 25 bp, Homo sapien
cgtagcccgacctcggaggaagcgc

SEQ ID NO: 1096608 - DNA, 25 bp, Homo sapien
cagcgcttggagatcgcgccgcgta

SEQ ID NO: 1096609 - DNA, 25 bp, Homo sapien
agcgccgccccggagcgccaagctc

SEQ ID NO: 1096610 - DNA, 25 bp, Homo sapien
tcagcaattgtcaccgagtgagacc

SEQ ID NO: 1096611 - DNA, 25 bp, Homo sapien
gactcagcaattgtcaccgagtgag

SEQ ID NO: 1096612 - DNA, 25 bp, Homo sapien
tgactcagcaattgtcaccgagtga

SEQ ID NO: 1096613 - DNA, 25 bp, Homo sapien
actgactcagcaattgtcaccgagt

SEQ ID NO: 1096614 - DNA, 25 bp, Homo sapien
ccggcatgtgatgtcctgcggttga

SEQ ID NO: 1096615 - DNA, 25 bp, Homo sapien
tgcagcgctgggaacgctgggcaca

SEQ ID NO: 1096616 - DNA, 25 bp, Homo sapien
tcttactcatcaggtcccggctgca

SEQ ID NO: 1096617 - DNA, 25 bp, Homo sapien
tgcggttgagccctcttactcttac

SEQ ID NO: 1096618 - DNA, 25 bp, Homo sapien
ggcatgtgtttgcaccctgaatgaa

SEQ ID NO: 1096619 - DNA, 25 bp, Homo sapien
tccccacacttgaagtggatagctc

SEQ ID NO: 1096620 - DNA, 25 bp, Homo sapien
cacacttgaagtggatagctcttgt

SEQ ID NO: 1096621 - DNA, 25 bp, Homo sapien
gcaccctgaatgaagcttgtcccca

SEQ ID NO: 1096622 - DNA, 25 bp, Homo sapien
aatccgcttacagagagggcccgat

SEQ ID NO: 1096623 - DNA, 25 bp, Homo sapien
taaaaacgacctgctggcgatacac

SEQ ID NO: 1096624 - DNA, 25 bp, Homo sapien
cgatacacgggaaagcaaatccgct

SEQ ID NO: 1096625 - DNA, 25 bp, Homo sapien
caagattgcctaaaaacgacctgct

SEQ ID NO: 1096626 - DNA, 25 bp, Homo sapien
tcgtggtggcagctgaaacccgccg

SEQ ID NO: 1096627 - DNA, 25 bp, Homo sapien
gtggcagctgaaacccgccgggctc

SEQ ID NO: 1096628 - DNA, 25 bp, Homo sapien
tggtggcagctgaaacccgccgggc

SEQ ID NO: 1096629 - DNA, 25 bp, Homo sapien
tttcgtggtggcagctgaaacccgc

SEQ ID NO: 1096630 - DNA, 25 bp, Homo sapien
ttctcgagtaaacatctggtgaaga

SEQ ID NO: 1096631 - DNA, 25 bp, Homo sapien
caagttctcgagtaaacatctggtg

SEQ ID NO: 1096632 - DNA, 25 bp, Homo sapien
aagactgagattgcaagttctcgag

SEQ ID NO: 1096633 - DNA, 25 bp, Homo sapien
gattgcaagttctcgagtaaacatc

SEQ ID NO: 1096634 - DNA, 25 bp, Homo sapien
tccataaggccagagcataatagcc

SEQ ID NO: 1096635 - DNA, 25 bp, Homo sapien
gggtcgctaacaacattcgacacat

SEQ ID NO: 1096636 - DNA, 25 bp, Homo sapien
tttccgggtcgctaacaacattcga

SEQ ID NO: 1096637 - DNA, 25 bp, Homo sapien
cataatagccttttccgggtcgcta

SEQ ID NO: 1096638 - DNA, 25 bp, Homo sapien
gcgaggatgttctaaatggccagtt

SEQ ID NO: 1096639 - DNA, 25 bp, Homo sapien
gaaacaatgaatgatccctgaaggc

SEQ ID NO: 1096640 - DNA, 25 bp, Homo sapien
gcaagttaagagttgtgctgcatca

SEQ ID NO: 1096641 - DNA, 25 bp, Homo sapien
cagagctgggtacctatggaaacaa

SEQ ID NO: 1096642 - DNA, 25 bp, Homo sapien
gaataactgtctctggtatcaacat

SEQ ID NO: 1096643 - DNA, 25 bp, Homo sapien
tcatccccagtccagtgccagtttc

SEQ ID NO: 1096644 - DNA, 25 bp, Homo sapien
tcattacttcatgcaaaggatattc

SEQ ID NO: 1096645 - DNA, 25 bp, Homo sapien
gagaaagtgaagacatactgctggt

SEQ ID NO: 1096646 - DNA, 25 bp, Homo sapien
gaaatcaggtgcaaatctagtaggg

SEQ ID NO: 1096647 - DNA, 25 bp, Homo sapien
cttggctccaccatgccactggaaa

SEQ ID NO: 1096648 - DNA, 25 bp, Homo sapien
tctagtagggtgaatttgggttgct

SEQ ID NO: 1096649 - DNA, 25 bp, Homo sapien
ttgggttgctaaccccattgagagc

SEQ ID NO: 1096650 - DNA, 25 bp, Homo sapien
ccggtactgggcaacgtgaggataa

SEQ ID NO: 1096651 - DNA, 25 bp, Homo sapien
gcaacgtgaggataaagtacctttg

SEQ ID NO: 1096652 - DNA, 25 bp, Homo sapien
gcagtacaagttcccctgcttgcgc

SEQ ID NO: 1096653 - DNA, 25 bp, Homo sapien
ctgttggcgcagtacaagttcccct

SEQ ID NO: 1096654 - DNA, 25 bp, Homo sapien
cctgtgttactaggcccggctctcg

SEQ ID NO: 1096655 - DNA, 25 bp, Homo sapien
attcggcgcaagctccggtctggac

SEQ ID NO: 1096656 - DNA, 25 bp, Homo sapien
tctggacaccgttctgaagaaaagc

SEQ ID NO: 1096657 - DNA, 25 bp, Homo sapien
aataggagcccctacattcggcgca

SEQ ID NO: 1096658 - DNA, 25 bp, Homo sapien
gcttttgcaattgcaaggcgcgctc

SEQ ID NO: 1096659 - DNA, 25 bp, Homo sapien
taactccaaatcagaaggcttttgc

SEQ ID NO: 1096660 - DNA, 25 bp, Homo sapien
tcacttaagtgcatatgcgagctag

SEQ ID NO: 1096661 - DNA, 25 bp, Homo sapien
tctcttttgaaagcgatccaacccg

SEQ ID NO: 1096662 - DNA, 25 bp, Homo sapien
tgctgaggccagacgtcttttacag

SEQ ID NO: 1096663 - DNA, 25 bp, Homo sapien
aacagagcacgtacaggatttcccc

SEQ ID NO: 1096664 - DNA, 25 bp, Homo sapien
gccagacgtcttttacagaacagag

SEQ ID NO: 1096665 - DNA, 25 bp, Homo sapien
tcttttcgggttaggttgactgctg

SEQ ID NO: 1096666 - DNA, 25 bp, Homo sapien
tacagtcccacaattcaggcaagat

SEQ ID NO: 1096667 - DNA, 25 bp, Homo sapien
cggaagcgcttgtagctttgacagc

SEQ ID NO: 1096668 - DNA, 25 bp, Homo sapien
tgtgcttgctaaatccggaagcgct

SEQ ID NO: 1096669 - DNA, 25 bp, Homo sapien
ccaagttgtcccattgattagagga

SEQ ID NO: 1096670 - DNA, 25 bp, Homo sapien
tctaagataatcagagtaagaagtt

SEQ ID NO: 1096671 - DNA, 25 bp, Homo sapien
gcttctaagataatcagagtaagaa

SEQ ID NO: 1096672 - DNA, 25 bp, Homo sapien
tgccaaagcttctaagataatcaga

SEQ ID NO: 1096673 - DNA, 25 bp, Homo sapien
gagtaagaagttttgtaatgctgaa

SEQ ID NO: 1096674 - DNA, 25 bp, Homo sapien
gaattgggtgtctacgctgctcaga

SEQ ID NO: 1096675 - DNA, 25 bp, Homo sapien
gaacttggccagtcttaacgtccta

SEQ ID NO: 1096676 - DNA, 25 bp, Homo sapien
tatcaagcacttgtccaagaggcca

SEQ ID NO: 1096677 - DNA, 25 bp, Homo sapien
ccttgggaaatagctcgatgggaat

SEQ ID NO: 1096678 - DNA, 25 bp, Homo sapien
ggactgggattcataagcgacaaca

SEQ ID NO: 1096679 - DNA, 25 bp, Homo sapien
cagaaacgttaccttgccagcttta

SEQ ID NO: 1096680 - DNA, 25 bp, Homo sapien
gaaacagatgttcctcaaagggcag

SEQ ID NO: 1096681 - DNA, 25 bp, Homo sapien
tactaaggcacttgagagagagcag

SEQ ID NO: 1096682 - DNA, 25 bp, Homo sapien
tggatccaagttcagcaccaaagcc

SEQ ID NO: 1096683 - DNA, 25 bp, Homo sapien
tggcgcccttcgtaagacttttgga

SEQ ID NO: 1096684 - DNA, 25 bp, Homo sapien
tggatatgggacgattgtttgcgcc

SEQ ID NO: 1096685 - DNA, 25 bp, Homo sapien
attgtttgcgccctctaggcaaggg

SEQ ID NO: 1096686 - DNA, 25 bp, Homo sapien
ttccagctttctgcggttagcaata

SEQ ID NO: 1096687 - DNA, 25 bp, Homo sapien
aaacttcttttgttgcagcagtgga

SEQ ID NO: 1096688 - DNA, 25 bp, Homo sapien
aaaggactggcatgtcgccctgttt

SEQ ID NO: 1096689 - DNA, 25 bp, Homo sapien
gatgtgccccgcgatttccagcttt

SEQ ID NO: 1096690 - DNA, 25 bp, Homo sapien
aataattcccgaatgctcaagaacc

SEQ ID NO: 1096691 - DNA, 25 bp, Homo sapien
ataattcccgaatgctcaagaacca

SEQ ID NO: 1096692 - DNA, 25 bp, Homo sapien
cccacagaagattcaccggatttgg

SEQ ID NO: 1096693 - DNA, 25 bp, Homo sapien
gggtggtgaggaatcagtgcccaca

SEQ ID NO: 1096694 - DNA, 25 bp, Homo sapien
tcggtcctgtggcattcagaagcgg

SEQ ID NO: 1096695 - DNA, 25 bp, Homo sapien
ctgcaaactttgtgcagcttcggtc

SEQ ID NO: 1096696 - DNA, 25 bp, Homo sapien
cgtcggcagaggtaattatgcacac

SEQ ID NO: 1096697 - DNA, 25 bp, Homo sapien
tgtaatctctccagcgaagctttct

SEQ ID NO: 1096698 - DNA, 25 bp, Homo sapien
cagcgaagctttctgtgggaataga

SEQ ID NO: 1096699 - DNA, 25 bp, Homo sapien
ggaatagattcgtcggcagaggtaa

SEQ ID NO: 1096700 - DNA, 25 bp, Homo sapien
ttcccccactgaaatgcggtaaggc

SEQ ID NO: 1096701 - DNA, 25 bp, Homo sapien
gacctccgcggacctcggtggagga

SEQ ID NO: 1096702 - DNA, 25 bp, Homo sapien
cctccgcggacctcggtggaggact

SEQ ID NO: 1096703 - DNA, 25 bp, Homo sapien
ctgcagacctccgcggacctcggtg

SEQ ID NO: 1096704 - DNA, 25 bp, Homo sapien
cagacctccgcggacctcggtggag

SEQ ID NO: 1096705 - DNA, 25 bp, Homo sapien
cgttcacatttccaagtcggctcaa

SEQ ID NO: 1096706 - DNA, 25 bp, Homo sapien
gagctgaactttaaccccgcctaga

SEQ ID NO: 1096707 - DNA, 25 bp, Homo sapien
tatacatgcctactgtacgcgggtg

SEQ ID NO: 1096708 - DNA, 25 bp, Homo sapien
tacgcgggtgttaaaggcatagcgc

SEQ ID NO: 1096709 - DNA, 25 bp, Homo sapien
gggtgagacagagcggagaatacat

SEQ ID NO: 1096710 - DNA, 25 bp, Homo sapien
tgttagatattgcaataagaaggga

SEQ ID NO: 1096711 - DNA, 25 bp, Homo sapien
ctgttagatattgcaataagaaggg

SEQ ID NO: 1096712 - DNA, 25 bp, Homo sapien
gttagatattgcaataagaagggat

SEQ ID NO: 1096713 - DNA, 25 bp, Homo sapien
tgtttcaaaagtggtattactttga

SEQ ID NO: 1096714 - DNA, 25 bp, Homo sapien
aagtggtattactttgaatcagcat

SEQ ID NO: 1096715 - DNA, 25 bp, Homo sapien
ctgtttcaaaagtggtattactttg

SEQ ID NO: 1096716 - DNA, 25 bp, Homo sapien
tcaaaagtggtattactttgaatca

SEQ ID NO: 1096717 - DNA, 25 bp, Homo sapien
ggcccagccgccagattggcaaatc

SEQ ID NO: 1096718 - DNA, 25 bp, Homo sapien
cagactttatctgcctggcggaggc

SEQ ID NO: 1096719 - DNA, 25 bp, Homo sapien
ctttgccagaagtcgagatgcccac

SEQ ID NO: 1096720 - DNA, 25 bp, Homo sapien
agtattttcgttttcgggcctgcag

SEQ ID NO: 1096721 - DNA, 25 bp, Homo sapien
aaaatcctctcgatattcgggtcgg

SEQ ID NO: 1096722 - DNA, 25 bp, Homo sapien
gaatccggcataacgcggaggccat

SEQ ID NO: 1096723 - DNA, 25 bp, Homo sapien
gaagaatccggcataacgcggaggc

SEQ ID NO: 1096724 - DNA, 25 bp, Homo sapien
gcataacgcggaggccatcaggaaa

SEQ ID NO: 1096725 - DNA, 25 bp, Homo sapien
ctcaggaagaatccggcataacgcg

SEQ ID NO: 1096726 - DNA, 25 bp, Homo sapien
gaacttagtgagaattcgctcaaag

SEQ ID NO: 1096727 - DNA, 25 bp, Homo sapien
cctgaatgaaggtggcacctctctc

SEQ ID NO: 1096728 - DNA, 25 bp, Homo sapien
gtgagaattcgctcaaagctatgct

SEQ ID NO: 1096729 - DNA, 25 bp, Homo sapien
tcaatctttgaaaccacactggctt

SEQ ID NO: 1096730 - DNA, 25 bp, Homo sapien
ttacacaagacctgagcgttcacat

SEQ ID NO: 1096731 - DNA, 25 bp, Homo sapien
ttcacatagcacaatgagccttttg

SEQ ID NO: 1096732 - DNA, 25 bp, Homo sapien
caagacctgagcgttcacatagcac

SEQ ID NO: 1096733 - DNA, 25 bp, Homo sapien
tgagcgttcacatagcacaatgagc

SEQ ID NO: 1096734 - DNA, 25 bp, Homo sapien
ccaagttgtcatatgatacatggga

SEQ ID NO: 1096735 - DNA, 25 bp, Homo sapien
gatcatctggtaaagactggtcata

SEQ ID NO: 1096736 - DNA, 25 bp, Homo sapien
cacgtgccgggtatattgtagattc

SEQ ID NO: 1096737 - DNA, 25 bp, Homo sapien
taaattgtgaccttgccacgtgccg

SEQ ID NO: 1096738 - DNA, 25 bp, Homo sapien
tttaaaatgccgacaggctgtcccg

SEQ ID NO: 1096739 - DNA, 25 bp, Homo sapien
atgccgacaggctgtcccgtgtcct

SEQ ID NO: 1096740 - DNA, 25 bp, Homo sapien
taaaatgccgacaggctgtcccgtg

SEQ ID NO: 1096741 - DNA, 25 bp, Homo sapien
aaaatgccgacaggctgtcccgtgt

SEQ ID NO: 1096742 - DNA, 25 bp, Homo sapien
tatgacaaaccttactcagtgcctg

SEQ ID NO: 1096743 - DNA, 25 bp, Homo sapien
taatactgctatgaaagcgacagca

SEQ ID NO: 1096744 - DNA, 25 bp, Homo sapien
tgtgtgataccatgaaaacgacatc

SEQ ID NO: 1096745 - DNA, 25 bp, Homo sapien
tcttgctctggacatgtaacctggc

SEQ ID NO: 1096746 - DNA, 25 bp, Homo sapien
tttaaataattacacacacagccat

SEQ ID NO: 1096747 - DNA, 25 bp, Homo sapien
agtgcttagtttaatacacaaaggc

SEQ ID NO: 1096748 - DNA, 25 bp, Homo sapien
tctcaaagcatctagaacgaattag

SEQ ID NO: 1096749 - DNA, 25 bp, Homo sapien
ccatgtacaaaaatctgcatagtaa

SEQ ID NO: 1096750 - DNA, 25 bp, Homo sapien
agggcacgaaattgaaacatgtcca

SEQ ID NO: 1096751 - DNA, 25 bp, Homo sapien
taagggcacgaaattgaaacatgtc

SEQ ID NO: 1096752 - DNA, 25 bp, Homo sapien
atttaagggcacgaaattgaaacat

SEQ ID NO: 1096753 - DNA, 25 bp, Homo sapien
aaaaaagctcactaattcactaatt

SEQ ID NO: 1096754 - DNA, 25 bp, Homo sapien
taaaaacaggccatagaagggtctg

SEQ ID NO: 1096755 - DNA, 25 bp, Homo sapien
tagtgctggaaacctatctgctgaa

SEQ ID NO: 1096756 - DNA, 25 bp, Homo sapien
gataacggtctacaactgctctcca

SEQ ID NO: 1096757 - DNA, 25 bp, Homo sapien
tctcgggaatctatcacagtgccta

SEQ ID NO: 1096758 - DNA, 25 bp, Homo sapien
catataggccaggtttggcagctca

SEQ ID NO: 1096759 - DNA, 25 bp, Homo sapien
tatagtcaaacgatagaattcctcg

SEQ ID NO: 1096760 - DNA, 25 bp, Homo sapien
tgcctggccaggtgaactattaaat

SEQ ID NO: 1096761 - DNA, 25 bp, Homo sapien
gcaatgttaacaactggttctacaa

SEQ ID NO: 1096762 - DNA, 25 bp, Homo sapien
taaaatccacttcagcgtaaaagtc

SEQ ID NO: 1096763 - DNA, 25 bp, Homo sapien
aaaaggcaaatcagcttgacacttc

SEQ ID NO: 1096764 - DNA, 25 bp, Homo sapien
taacacatgctcacacttataagac

SEQ ID NO: 1096765 - DNA, 25 bp, Homo sapien
tataagaccccttacatgctttctg

SEQ ID NO: 1096766 - DNA, 25 bp, Homo sapien
gaaacactttatgggaaagtctgca

SEQ ID NO: 1096767 - DNA, 25 bp, Homo sapien
actgggcccaacaccttaattgtca

SEQ ID NO: 1096768 - DNA, 25 bp, Homo sapien
gacttcactatatctaactgggccc

SEQ ID NO: 1096769 - DNA, 25 bp, Homo sapien
tgataatgaacacgcctagagaaat

SEQ ID NO: 1096770 - DNA, 25 bp, Homo sapien
ttgtttagagatcagtaatacccta

SEQ ID NO: 1096771 - DNA, 25 bp, Homo sapien
gttcaactagcaacatcaaacaaga

SEQ ID NO: 1096772 - DNA, 25 bp, Homo sapien
tcatttctgtagcatcaactacgtg

SEQ ID NO: 1096773 - DNA, 25 bp, Homo sapien
aagacgagcaccacaagaaaggcca

SEQ ID NO: 1096774 - DNA, 25 bp, Homo sapien
acaatgacagttgggacctaccatt

SEQ ID NO: 1096775 - DNA, 25 bp, Homo sapien
gacagttgggacctaccatttgcca

SEQ ID NO: 1096776 - DNA, 25 bp, Homo sapien
tctgagacaagttcctatgattgat

SEQ ID NO: 1096777 - DNA, 25 bp, Homo sapien
caagttcctatgattgattattgtg

SEQ ID NO: 1096778 - DNA, 25 bp, Homo sapien
aatcctctttgtggatcaataccag

SEQ ID NO: 1096779 - DNA, 25 bp, Homo sapien
cagtatagattcaattaccacaagg

SEQ ID NO: 1096780 - DNA, 25 bp, Homo sapien
tctttgtggatcaataccagaacat

SEQ ID NO: 1096781 - DNA, 25 bp, Homo sapien
aaaagatactttgatagtgatacac

SEQ ID NO: 1096782 - DNA, 25 bp, Homo sapien
tccagagaatatgactcaaatagct

SEQ ID NO: 1096783 - DNA, 25 bp, Homo sapien
gactacagttcaagagatcactctt

SEQ ID NO: 1096784 - DNA, 25 bp, Homo sapien
caatgcctgagtggtattcttgtca

SEQ ID NO: 1096785 - DNA, 25 bp, Homo sapien
caattttaatcttggcaggaagtgg

SEQ ID NO: 1096786 - DNA, 25 bp, Homo sapien
tcatttgaacgtctacagctgtttc

SEQ ID NO: 1096787 - DNA, 25 bp, Homo sapien
tgaacgtctacagctgtttcaaaag

SEQ ID NO: 1096788 - DNA, 25 bp, Homo sapien
ctttcatttgaacgtctacagctgt

SEQ ID NO: 1096789 - DNA, 25 bp, Homo sapien
catttgaacgtctacagctgtttca

SEQ ID NO: 1096790 - DNA, 25 bp, Homo sapien
taaaactcttatgtgtgcaaatgca

SEQ ID NO: 1096791 - DNA, 25 bp, Homo sapien
gctatcacacatataagatctgggt

SEQ ID NO: 1096792 - DNA, 25 bp, Homo sapien
ccctctaggaagctaatggcaattg

SEQ ID NO: 1096793 - DNA, 25 bp, Homo sapien
aattgagcactctagcagtaacgga

SEQ ID NO: 1096794 - DNA, 25 bp, Homo sapien
cagctgtgctcacgcctttcacctg

SEQ ID NO: 1096795 - DNA, 25 bp, Homo sapien
tctgcagctgtgctcacgcctttca

SEQ ID NO: 1096796 - DNA, 25 bp, Homo sapien
aatcgtgcatatgtctgcttctgca

SEQ ID NO: 1096797 - DNA, 25 bp, Homo sapien
ctgctctaggacaaatcgtgcatat

SEQ ID NO: 1096798 - DNA, 25 bp, Homo sapien
tcagcacgaggtaaagcacgggtgc

SEQ ID NO: 1096799 - DNA, 25 bp, Homo sapien
tcaagggtcagcacgaggtaaagca

SEQ ID NO: 1096800 - DNA, 25 bp, Homo sapien
aagggtcagcacgaggtaaagcacg

SEQ ID NO: 1096801 - DNA, 25 bp, Homo sapien
agcacgaggtaaagcacgggtgctt

SEQ ID NO: 1096802 - DNA, 25 bp, Homo sapien
aaagctattaattatgtggacctgg

SEQ ID NO: 1096803 - DNA, 25 bp, Homo sapien
aagagcacttggcacaggaacagag

SEQ ID NO: 1096804 - DNA, 25 bp, Homo sapien
tggacctggtaacaaaggaagagca

SEQ ID NO: 1096805 - DNA, 25 bp, Homo sapien
cctttcaaagggagatcataattta

SEQ ID NO: 1096806 - DNA, 25 bp, Homo sapien
tacagagctcaaaccaaatcaatgg

SEQ ID NO: 1096807 - DNA, 25 bp, Homo sapien
tgaaaactgtcacggtcacggcaga

SEQ ID NO: 1096808 - DNA, 25 bp, Homo sapien
tcaatggccaagtgtacaccacaag

SEQ ID NO: 1096809 - DNA, 25 bp, Homo sapien
gaatgctcaaccctgtgtagtaaca

SEQ ID NO: 1096810 - DNA, 25 bp, Homo sapien
gagggtcagtttgtgataatacagc

SEQ ID NO: 1096811 - DNA, 25 bp, Homo sapien
tacagcatacttttacattccgagc

SEQ ID NO: 1096812 - DNA, 25 bp, Homo sapien
tgtgcacgcattttactccctagaa

SEQ ID NO: 1096813 - DNA, 25 bp, Homo sapien
gaaaagcagagttaaagatgatcac

SEQ ID NO: 1096814 - DNA, 25 bp, Homo sapien
gcatgcattcatctagaatatggag

SEQ ID NO: 1096815 - DNA, 25 bp, Homo sapien
tcctgaaactaaaagggaatgctgc

SEQ ID NO: 1096816 - DNA, 25 bp, Homo sapien
taacacatgggcttacaaaagatct

SEQ ID NO: 1096817 - DNA, 25 bp, Homo sapien
gagatccagagtcacagctgctttg

SEQ ID NO: 1096818 - DNA, 25 bp, Homo sapien
aaattgcactgcttcgtcccatccg

SEQ ID NO: 1096819 - DNA, 25 bp, Homo sapien
tggtgaacaatcctgggcttataat

SEQ ID NO: 1096820 - DNA, 25 bp, Homo sapien
accttctggtgaacaatcctgggct

SEQ ID NO: 1096821 - DNA, 25 bp, Homo sapien
cttctggtgaacaatcctgggctta

SEQ ID NO: 1096822 - DNA, 25 bp, Homo sapien
tctggtgaacaatcctgggcttata

SEQ ID NO: 1096823 - DNA, 25 bp, Homo sapien
cataagaaaagcttagagtgtaggc

SEQ ID NO: 1096824 - DNA, 25 bp, Homo sapien
tataagaaccaccacaccgggtcaa

SEQ ID NO: 1096825 - DNA, 25 bp, Homo sapien
caagattctaactctaacaggcgca

SEQ ID NO: 1096826 - DNA, 25 bp, Homo sapien
taggctggtaagactatcatgcttg

SEQ ID NO: 1096827 - DNA, 25 bp, Homo sapien
cactgaagtgtatgtggaacctaaa

SEQ ID NO: 1096828 - DNA, 25 bp, Homo sapien
gccactggcgtggtctagtaagacc

SEQ ID NO: 1096829 - DNA, 25 bp, Homo sapien
cactgatgcatgttttgtccagagc

SEQ ID NO: 1096830 - DNA, 25 bp, Homo sapien
gattaccatatgagtcagaaacctg

SEQ ID NO: 1096831 - DNA, 25 bp, Homo sapien
taccaaggaaaggtgtcaagcatgc

SEQ ID NO: 1096832 - DNA, 25 bp, Homo sapien
tactttcctagccagagtgaacttc

SEQ ID NO: 1096833 - DNA, 25 bp, Homo sapien
tctagggaggaaattcaacacatct

SEQ ID NO: 1096834 - DNA, 25 bp, Homo sapien
gaggctccagatccaatgagtacaa

SEQ ID NO: 1096835 - DNA, 25 bp, Homo sapien
tccaaaagtctacatctgcttggca

SEQ ID NO: 1096836 - DNA, 25 bp, Homo sapien
gacatagttatcatagagtagcctg

SEQ ID NO: 1096837 - DNA, 25 bp, Homo sapien
tggtttgagagtccaagtgggaatc

SEQ ID NO: 1096838 - DNA, 25 bp, Homo sapien
caattcagtgaagagatatggttac

SEQ ID NO: 1096839 - DNA, 25 bp, Homo sapien
tcagccatgttctaaacttcggtaa

SEQ ID NO: 1096840 - DNA, 25 bp, Homo sapien
cacagtcttaaaaagcctgggtggg

SEQ ID NO: 1096841 - DNA, 25 bp, Homo sapien
tctctaggtctgttgctgaatgaaa

SEQ ID NO: 1096842 - DNA, 25 bp, Homo sapien
gatcgacaggaaattaacgcagtgg

SEQ ID NO: 1096843 - DNA, 25 bp, Homo sapien
gcataatgggatttaaataatctga

SEQ ID NO: 1096844 - DNA, 25 bp, Homo sapien
gaggtaatggaatacagaggcttag

SEQ ID NO: 1096845 - DNA, 25 bp, Homo sapien
tactgatttactggaggtaatggaa

SEQ ID NO: 1096846 - DNA, 25 bp, Homo sapien
cttagtaagaacagaggagagctgt

SEQ ID NO: 1096847 - DNA, 25 bp, Homo sapien
gaaagttctcctaaggtgaggccta

SEQ ID NO: 1096848 - DNA, 25 bp, Homo sapien
taaggatggcacatagacgaaactg

SEQ ID NO: 1096849 - DNA, 25 bp, Homo sapien
caaatgtaatgctaaggtggtcaac

SEQ ID NO: 1096850 - DNA, 25 bp, Homo sapien
tacatgtatgcgagcgtaagcggag

SEQ ID NO: 1096851 - DNA, 25 bp, Homo sapien
cagccttagtttcagcacagatgaa

SEQ ID NO: 1096852 - DNA, 25 bp, Homo sapien
gctttattaaggtcacggaatgcag

SEQ ID NO: 1096853 - DNA, 25 bp, Homo sapien
tctcataggcgttagaaaggctcca

SEQ ID NO: 1096854 - DNA, 25 bp, Homo sapien
ctaatgttgattgccttcccagggc

SEQ ID NO: 1096855 - DNA, 25 bp, Homo sapien
tccaggtgattctaaatgggcagcc

SEQ ID NO: 1096856 - DNA, 25 bp, Homo sapien
gcaatgaaaacacctacgcctgagg

SEQ ID NO: 1096857 - DNA, 25 bp, Homo sapien
taaaaaatgctaacgcccagatccc

SEQ ID NO: 1096858 - DNA, 25 bp, Homo sapien
ggttgcctacctggaatcactagag

SEQ ID NO: 1096859 - DNA, 25 bp, Homo sapien
aaacaatgttatacctccgtgggag

SEQ ID NO: 1096860 - DNA, 25 bp, Homo sapien
tggattaagagtcggctacaggccc

SEQ ID NO: 1096861 - DNA, 25 bp, Homo sapien
tgcccggaccagtagcctaagatac

SEQ ID NO: 1096862 - DNA, 25 bp, Homo sapien
ggagttccggactatcctctgcatg

SEQ ID NO: 1096863 - DNA, 25 bp, Homo sapien
tgtgcttaagggaagcattaatttc

SEQ ID NO: 1096864 - DNA, 25 bp, Homo sapien
aataatttttctccttggcttagtg

SEQ ID NO: 1096865 - DNA, 25 bp, Homo sapien
tgcttaagggaagcattaatttcct

SEQ ID NO: 1096866 - DNA, 25 bp, Homo sapien
ttcctcaataatttttctccttggc

SEQ ID NO: 1096867 - DNA, 25 bp, Homo sapien
tcataacatggcaaatgagggctga

SEQ ID NO: 1096868 - DNA, 25 bp, Homo sapien
tttgccacaaaagtaatgcccagtg

SEQ ID NO: 1096869 - DNA, 25 bp, Homo sapien
gtggcacaatagatcaatgcaatga

SEQ ID NO: 1096870 - DNA, 25 bp, Homo sapien
tctatagtcagtaaaatgctctccc

SEQ ID NO: 1096871 - DNA, 25 bp, Homo sapien
taataatgattactgccctggtgcc

SEQ ID NO: 1096872 - DNA, 25 bp, Homo sapien
tatagaacagccacatgatgaatgc

SEQ ID NO: 1096873 - DNA, 25 bp, Homo sapien
gggatttaaacacagtcagggcact

SEQ ID NO: 1096874 - DNA, 25 bp, Homo sapien
tcttactgatgggataactgccaac

SEQ ID NO: 1096875 - DNA, 25 bp, Homo sapien
tgttaccaagtagtccagagctcaa

SEQ ID NO: 1096876 - DNA, 25 bp, Homo sapien
ttaaatgtggcctacagctattctg

SEQ ID NO: 1096877 - DNA, 25 bp, Homo sapien
ttaatcctatggcttctacgccaag

SEQ ID NO: 1096878 - DNA, 25 bp, Homo sapien
ttaagagacagtgggtattaatcct

SEQ ID NO: 1096879 - DNA, 25 bp, Homo sapien
agcagagaagctatgtggttggtct

SEQ ID NO: 1096880 - DNA, 25 bp, Homo sapien
ttcccaggtgactcctcgctctagg

SEQ ID NO: 1096881 - DNA, 25 bp, Homo sapien
aatgtggccaatgcatgtttaacac

SEQ ID NO: 1096882 - DNA, 25 bp, Homo sapien
aaaggttttcgaactacgtgcacag

SEQ ID NO: 1096883 - DNA, 25 bp, Homo sapien
gtacatagcttctccacagatttgg

SEQ ID NO: 1096884 - DNA, 25 bp, Homo sapien
tccttcttaagtgtaactgacctgg

SEQ ID NO: 1096885 - DNA, 25 bp, Homo sapien
cattccataaagtgtctcagatcct

SEQ ID NO: 1096886 - DNA, 25 bp, Homo sapien
gacctggtacagttaagttcttgag

SEQ ID NO: 1096887 - DNA, 25 bp, Homo sapien
aagacacataactcgtaaccacagg

SEQ ID NO: 1096888 - DNA, 25 bp, Homo sapien
taaaccctcctgaattgactgtagg

SEQ ID NO: 1096889 - DNA, 25 bp, Homo sapien
gagacaataatcatgctgagagagc

SEQ ID NO: 1096890 - DNA, 25 bp, Homo sapien
tgagagagcctatactcccaggttt

SEQ ID NO: 1096891 - DNA, 25 bp, Homo sapien
gtacaagaacactatatttatcctc

SEQ ID NO: 1096892 - DNA, 25 bp, Homo sapien
acaaatcatctcttgttgggtccca

SEQ ID NO: 1096893 - DNA, 25 bp, Homo sapien
tgttctagctacaaaggtgctcctc

SEQ ID NO: 1096894 - DNA, 25 bp, Homo sapien
ttaaatcctatacactggcattggg

SEQ ID NO: 1096895 - DNA, 25 bp, Homo sapien
gaaaagtttaagtgtcaatgctgaa

SEQ ID NO: 1096896 - DNA, 25 bp, Homo sapien
ttaatggcccaataacacggtttgc

SEQ ID NO: 1096897 - DNA, 25 bp, Homo sapien
gcgggtcttaccatccacctagata

SEQ ID NO: 1096898 - DNA, 25 bp, Homo sapien
cggtttgccaagatgttagcgggtc

SEQ ID NO: 1096899 - DNA, 25 bp, Homo sapien
gaatacgttgaattttcagccccag

SEQ ID NO: 1096900 - DNA, 25 bp, Homo sapien
ttcactggctccttaaaatggcggc

SEQ ID NO: 1096901 - DNA, 25 bp, Homo sapien
gccatgtaaggagcggaacgtcgcc

SEQ ID NO: 1096902 - DNA, 25 bp, Homo sapien
catcccaagtttgcgcacgtgtacg

SEQ ID NO: 1096903 - DNA, 25 bp, Homo sapien
caaaaaattagagtgtgtcggtcca

SEQ ID NO: 1096904 - DNA, 25 bp, Homo sapien
gaaggaaaatactggaagccacaca

SEQ ID NO: 1096905 - DNA, 25 bp, Homo sapien
cctcatggtgctgctgcggaaagaa

SEQ ID NO: 1096906 - DNA, 25 bp, Homo sapien
catgcctggcataatgttggtagca

SEQ ID NO: 1096907 - DNA, 25 bp, Homo sapien
taaaggaaccgccaacctcatggtg

SEQ ID NO: 1096908 - DNA, 25 bp, Homo sapien
tgaacttgtcatctgcccaccatgg

SEQ ID NO: 1096909 - DNA, 25 bp, Homo sapien
ctggcaaggtattttgacattttaa

SEQ ID NO: 1096910 - DNA, 25 bp, Homo sapien
tgcgcctggcaaggtattttgacat

SEQ ID NO: 1096911 - DNA, 25 bp, Homo sapien
cctgaacttgtcatctgcccaccat

SEQ ID NO: 1096912 - DNA, 25 bp, Homo sapien
cccttatataaaaccaagtatgatt

SEQ ID NO: 1096913 - DNA, 25 bp, Homo sapien
ccaaagtcaatcagaaggaagccct

SEQ ID NO: 1096914 - DNA, 25 bp, Homo sapien
agcccttatataaaaccaagtatga

SEQ ID NO: 1096915 - DNA, 25 bp, Homo sapien
tatgatttaaaagtctgatttgcat

SEQ ID NO: 1096916 - DNA, 25 bp, Homo sapien
taggtgctagcatgcctggaaagtg

SEQ ID NO: 1096917 - DNA, 25 bp, Homo sapien
caaagttctctgcttgtgcgctagg

SEQ ID NO: 1096918 - DNA, 25 bp, Homo sapien
ttccggtcgcatacagacgctgcct

SEQ ID NO: 1096919 - DNA, 25 bp, Homo sapien
tctgaagtcacagttggcagaagca

SEQ ID NO: 1096920 - DNA, 25 bp, Homo sapien
tagccagttttatctcaaggaagtg

SEQ ID NO: 1096921 - DNA, 25 bp, Homo sapien
gagaaatctaacctgacaagacact

SEQ ID NO: 1096922 - DNA, 25 bp, Homo sapien
tcagcaaccctacagaataaatggg

SEQ ID NO: 1096923 - DNA, 25 bp, Homo sapien
caggtcagttgatactattagccag

SEQ ID NO: 1096924 - DNA, 25 bp, Homo sapien
cctgctaattctcctcctgtgcaaa

SEQ ID NO: 1096925 - DNA, 25 bp, Homo sapien
taacaactgcgcatagactttacag

SEQ ID NO: 1096926 - DNA, 25 bp, Homo sapien
gacgtgatttacatgaggctttaac

SEQ ID NO: 1096927 - DNA, 25 bp, Homo sapien
acttgaagtgctgtatatagttagc

SEQ ID NO: 1096928 - DNA, 25 bp, Homo sapien
cagggtttcaacaagcagagcaaaa

SEQ ID NO: 1096929 - DNA, 25 bp, Homo sapien
catgtacactagagcacttgaagcg

SEQ ID NO: 1096930 - DNA, 25 bp, Homo sapien
ccatcccgtggaactcgtgctttaa

SEQ ID NO: 1096931 - DNA, 25 bp, Homo sapien
cacagcgggctcaaaagatacttct

SEQ ID NO: 1096932 - DNA, 25 bp, Homo sapien
taaagaagtccacctgagtgttgcc

SEQ ID NO: 1096933 - DNA, 25 bp, Homo sapien
ttaacagaacaaggtatgactcagc

SEQ ID NO: 1096934 - DNA, 25 bp, Homo sapien
gaactgtcagagatgcatgggccat

SEQ ID NO: 1096935 - DNA, 25 bp, Homo sapien
cctgtagatggagccaagagagcca

SEQ ID NO: 1096936 - DNA, 25 bp, Homo sapien
tactttcgattatccacaagtggtt

SEQ ID NO: 1096937 - DNA, 25 bp, Homo sapien
ttcctctggctcaacctcagtctgg

SEQ ID NO: 1096938 - DNA, 25 bp, Homo sapien
tatccacaagtggtttaaccacacg

SEQ ID NO: 1096939 - DNA, 25 bp, Homo sapien
tctggctcaacctcagtctgggctg

SEQ ID NO: 1096940 - DNA, 25 bp, Homo sapien
tcatgaaaagtacaaccacgagcca

SEQ ID NO: 1096941 - DNA, 25 bp, Homo sapien
tatttcaagccatcggatcgcaagg

SEQ ID NO: 1096942 - DNA, 25 bp, Homo sapien
tacttccgacgaaactcactggagc

SEQ ID NO: 1096943 - DNA, 25 bp, Homo sapien
aagttgggtaacatgcactctgacc

SEQ ID NO: 1096944 - DNA, 25 bp, Homo sapien
tacacttctacaatgatgatgaaat

SEQ ID NO: 1096945 - DNA, 25 bp, Homo sapien
ggaaaacttggaacatgcttatcaa

SEQ ID NO: 1096946 - DNA, 25 bp, Homo sapien
tgatcttttgtcttcaacagtgggt

SEQ ID NO: 1096947 - DNA, 25 bp, Homo sapien
gaaccttacattaatcagctacaga

SEQ ID NO: 1096948 - DNA, 25 bp, Homo sapien
cactggacgattatgcaaaccttac

SEQ ID NO: 1096949 - DNA, 25 bp, Homo sapien
caaactctctgatacagggaatggg

SEQ ID NO: 1096950 - DNA, 25 bp, Homo sapien
cacagtactgggttgggcatcccaa

SEQ ID NO: 1096951 - DNA, 25 bp, Homo sapien
tcagcgatgttcaacaatggcccaa

SEQ ID NO: 1096952 - DNA, 25 bp, Homo sapien
ttgaaaagtttaatcggccaggcag

SEQ ID NO: 1096953 - DNA, 25 bp, Homo sapien
tcattctgcagtaagactgtgagcc

SEQ ID NO: 1096954 - DNA, 25 bp, Homo sapien
tctggaagcacagctaaaggaatgc

SEQ ID NO: 1096955 - DNA, 25 bp, Homo sapien
ttagtggataataagcagcctgccc

SEQ ID NO: 1096956 - DNA, 25 bp, Homo sapien
tataataaagtagcgagtaacttct

SEQ ID NO: 1096957 - DNA, 25 bp, Homo sapien
caaagcctgttgctggactagccca

SEQ ID NO: 1096958 - DNA, 25 bp, Homo sapien
gaattgctattgagtttaagtatgt

SEQ ID NO: 1096959 - DNA, 25 bp, Homo sapien
tcagtggtctaaataccgcattgcc

SEQ ID NO: 1096960 - DNA, 25 bp, Homo sapien
tcgtagatacgaacaagcaaacttc

SEQ ID NO: 1096961 - DNA, 25 bp, Homo sapien
cagcaagtactgaagatgtcaatcg

SEQ ID NO: 1096962 - DNA, 25 bp, Homo sapien
aaaaaagtacgagctgggcgcgatg

SEQ ID NO: 1096963 - DNA, 25 bp, Homo sapien
gggctccatacactcacaaatctaa

SEQ ID NO: 1096964 - DNA, 25 bp, Homo sapien
gactcatcttatggcactggttcaa

SEQ ID NO: 1096965 - DNA, 25 bp, Homo sapien
tgctgcttgtcagtcaaagtgtctg

SEQ ID NO: 1096966 - DNA, 25 bp, Homo sapien
tggttcaacaccagtgaatggtgct

SEQ ID NO: 1096967 - DNA, 25 bp, Homo sapien
aaaccctgtcgctacaggcttggga

SEQ ID NO: 1096968 - DNA, 25 bp, Homo sapien
catgctaatgaaaaggtggactcgg

SEQ ID NO: 1096969 - DNA, 25 bp, Homo sapien
gggtgataccattagatgccattcc

SEQ ID NO: 1096970 - DNA, 25 bp, Homo sapien
gaaaccagaagacgcaatggccctg

SEQ ID NO: 1096971 - DNA, 25 bp, Homo sapien
taaactgtaagcatggcaacccagc

SEQ ID NO: 1096972 - DNA, 25 bp, Homo sapien
tacactgaggcatggtctctctgtg

SEQ ID NO: 1096973 - DNA, 25 bp, Homo sapien
cagtggctattctcagttacaatca

SEQ ID NO: 1096974 - DNA, 25 bp, Homo sapien
gcaccaagttgagtcctaagcatat

SEQ ID NO: 1096975 - DNA, 25 bp, Homo sapien
ggtaagcagtggcaacataaacaca

SEQ ID NO: 1096976 - DNA, 25 bp, Homo sapien
ttatgagcaatgagtgaaaaagcaa

SEQ ID NO: 1096977 - DNA, 25 bp, Homo sapien
agatggagcttgagatgggtttcaa

SEQ ID NO: 1096978 - DNA, 25 bp, Homo sapien
gggtgacgtaagtacccacagagag

SEQ ID NO: 1096979 - DNA, 25 bp, Homo sapien
ggaactaatatttacaggccagcaa

SEQ ID NO: 1096980 - DNA, 25 bp, Homo sapien
ctctcagaccattaaagcagcacag

SEQ ID NO: 1096981 - DNA, 25 bp, Homo sapien
tccgctctcagaccattaaagcagc

SEQ ID NO: 1096982 - DNA, 25 bp, Homo sapien
tgagtaacttgtaagtcatccgctc

SEQ ID NO: 1096983 - DNA, 25 bp, Homo sapien
gtaagtcatccgctctcagaccatt

SEQ ID NO: 1096984 - DNA, 25 bp, Homo sapien
ttttgccaagccacaaaacaccaca

SEQ ID NO: 1096985 - DNA, 25 bp, Homo sapien
aagcctttggcaagagtcctcagag

SEQ ID NO: 1096986 - DNA, 25 bp, Homo sapien
tatcgcagcagtcatcaacaaaaca

SEQ ID NO: 1096987 - DNA, 25 bp, Homo sapien
gacttgttggcacatagattaaaga

SEQ ID NO: 1096988 - DNA, 25 bp, Homo sapien
cagagctctccggtgcaacttaaca

SEQ ID NO: 1096989 - DNA, 25 bp, Homo sapien
tgagcatgcctagagtggaagtttc

SEQ ID NO: 1096990 - DNA, 25 bp, Homo sapien
aaattactgaggtcagatcagagcc

SEQ ID NO: 1096991 - DNA, 25 bp, Homo sapien
acttaacaataggaagcagctgtgc

SEQ ID NO: 1096992 - DNA, 25 bp, Homo sapien
tcagctagggcccagatgaactcaa

SEQ ID NO: 1096993 - DNA, 25 bp, Homo sapien
cttctaagaaaaaactcgagctatg

SEQ ID NO: 1096994 - DNA, 25 bp, Homo sapien
gatcatatggaagtggcatggtact

SEQ ID NO: 1096995 - DNA, 25 bp, Homo sapien
tttcaacaggcactaaattggccca

SEQ ID NO: 1096996 - DNA, 25 bp, Homo sapien
tgcgtatctataatgcatcataaaa

SEQ ID NO: 1096997 - DNA, 25 bp, Homo sapien
catgtgtatgtacattctttggcca

SEQ ID NO: 1096998 - DNA, 25 bp, Homo sapien
tctcatcttctgtagttatctcact

SEQ ID NO: 1096999 - DNA, 25 bp, Homo sapien
tgtctgttaataattggagctccac

SEQ ID NO: 1097000 - DNA, 25 bp, Homo sapien
tcagccatcctcaggagataggagg

SEQ ID NO: 1097001 - DNA, 25 bp, Homo sapien
ggtcaagtgccctagctcatctgga

SEQ ID NO: 1097002 - DNA, 25 bp, Homo sapien
caagttcaccatgagccacagcagt

SEQ ID NO: 1097003 - DNA, 25 bp, Homo sapien
caaaattctggcacggaaacccagg

SEQ ID NO: 1097004 - DNA, 25 bp, Homo sapien
cacaaacgtcacatggtcagggtca

SEQ ID NO: 1097005 - DNA, 25 bp, Homo sapien
taatgaaatatacagcctctgggct

SEQ ID NO: 1097006 - DNA, 25 bp, Homo sapien
ggactttcagatcgctaagccagtg

SEQ ID NO: 1097007 - DNA, 25 bp, Homo sapien
tcttgcctatccaacagaaggagtg

SEQ ID NO: 1097008 - DNA, 25 bp, Homo sapien
gaagataacgtcagaatcctttccc

SEQ ID NO: 1097009 - DNA, 25 bp, Homo sapien
tggctccctacaccctggttactga

SEQ ID NO: 1097010 - DNA, 25 bp, Homo sapien
tcttaggcacaggaggtaattacac

SEQ ID NO: 1097011 - DNA, 25 bp, Homo sapien
gtcacatgtatacagcacagatctc

SEQ ID NO: 1097012 - DNA, 25 bp, Homo sapien
tttatattagctttgaggaattggg

SEQ ID NO: 1097013 - DNA, 25 bp, Homo sapien
gacagttctaccagaagtagctatg

SEQ ID NO: 1097014 - DNA, 25 bp, Homo sapien
ttattctgaattaggcctggtatcc

SEQ ID NO: 1097015 - DNA, 25 bp, Homo sapien
acaattgcatacatagtacagaatg

SEQ ID NO: 1097016 - DNA, 25 bp, Homo sapien
gcaaccattctcttagagagaccat

SEQ ID NO: 1097017 - DNA, 25 bp, Homo sapien
tcttctccactatttatacactcga

SEQ ID NO: 1097018 - DNA, 25 bp, Homo sapien
ctcgagtctgataaagacttcatcc

SEQ ID NO: 1097019 - DNA, 25 bp, Homo sapien
cattctcttagagagaccatttcca

SEQ ID NO: 1097020 - DNA, 25 bp, Homo sapien
cataaaaatacagccaaaaattaca

SEQ ID NO: 1097021 - DNA, 25 bp, Homo sapien
tgaaaaacataaaaatacagccaaa

SEQ ID NO: 1097022 - DNA, 25 bp, Homo sapien
ctgaaaaacataaaaatacagccaa

SEQ ID NO: 1097023 - DNA, 25 bp, Homo sapien
ataaaaatacagccaaaaattacag

SEQ ID NO: 1097024 - DNA, 25 bp, Homo sapien
ctgggactttcagattgacttgaat

SEQ ID NO: 1097025 - DNA, 25 bp, Homo sapien
cttaatgtcagcgtcacttggctgg

SEQ ID NO: 1097026 - DNA, 25 bp, Homo sapien
gctgggactttcagattgacttgaa

SEQ ID NO: 1097027 - DNA, 25 bp, Homo sapien
gtccttaatgtcagcgtcacttggc

SEQ ID NO: 1097028 - DNA, 25 bp, Homo sapien
gggtgatcccgagaacaagaagctg

SEQ ID NO: 1097029 - DNA, 25 bp, Homo sapien
ctcacacttagtcggcctgctggct

SEQ ID NO: 1097030 - DNA, 25 bp, Homo sapien
cttgggaattcaggttctcatgggc

SEQ ID NO: 1097031 - DNA, 25 bp, Homo sapien
tcatgggcaccctaatagtgtttag

SEQ ID NO: 1097032 - DNA, 25 bp, Homo sapien
gcaagctttggaggactgttcacag

SEQ ID NO: 1097033 - DNA, 25 bp, Homo sapien
tgttttcagagtgccaacgctggcc

SEQ ID NO: 1097034 - DNA, 25 bp, Homo sapien
tcagtgcagccctacagaagtgtgc

SEQ ID NO: 1097035 - DNA, 25 bp, Homo sapien
ggcttaaaaccttcaggagctctgg

SEQ ID NO: 1097036 - DNA, 25 bp, Homo sapien
gaaaggtagattcaaccaatactcc

SEQ ID NO: 1097037 - DNA, 25 bp, Homo sapien
tacggatgaaaagaagtacattcct

SEQ ID NO: 1097038 - DNA, 25 bp, Homo sapien
taagtcaggaagtcagttgcactaa

SEQ ID NO: 1097039 - DNA, 25 bp, Homo sapien
agcatcatgattaatgggcttccac

SEQ ID NO: 1097040 - DNA, 25 bp, Homo sapien
tacatgtgaggaggtagtaaaaaca

SEQ ID NO: 1097041 - DNA, 25 bp, Homo sapien
aactgtaaggttgcattgcctccaa

SEQ ID NO: 1097042 - DNA, 25 bp, Homo sapien
caagtcaatggtgctagaatgctcc

SEQ ID NO: 1097043 - DNA, 25 bp, Homo sapien
ctaaaacaagcagtccatccagcag

SEQ ID NO: 1097044 - DNA, 25 bp, Homo sapien
gctgctattttggtggtcactctac

SEQ ID NO: 1097045 - DNA, 25 bp, Homo sapien
agagagactagctccattgcattgc

SEQ ID NO: 1097046 - DNA, 25 bp, Homo sapien
tctggaaaccagaaggcatttaggt

SEQ ID NO: 1097047 - DNA, 25 bp, Homo sapien
ttaatgtctccctgagttgggacct

SEQ ID NO: 1097048 - DNA, 25 bp, Homo sapien
taatttgacctattcggaagctgtg

SEQ ID NO: 1097049 - DNA, 25 bp, Homo sapien
ctcagtgtcaggcttttaatggcaa

SEQ ID NO: 1097050 - DNA, 25 bp, Homo sapien
tattcctattttgccgagccttgcc

SEQ ID NO: 1097051 - DNA, 25 bp, Homo sapien
gattttcccttaacagacgctcagt

SEQ ID NO: 1097052 - DNA, 25 bp, Homo sapien
ggtactaaaagatactgccatgaca

SEQ ID NO: 1097053 - DNA, 25 bp, Homo sapien
taatatgcacgagggaaaacctttg

SEQ ID NO: 1097054 - DNA, 25 bp, Homo sapien
ctactgtaccaagaaatgaatggac

SEQ ID NO: 1097055 - DNA, 25 bp, Homo sapien
gaatgaggtctttgtgtacaactcc

SEQ ID NO: 1097056 - DNA, 25 bp, Homo sapien
gaattccaaatgctctattatttga

SEQ ID NO: 1097057 - DNA, 25 bp, Homo sapien
ttccaaatgctctattatttgactg

SEQ ID NO: 1097058 - DNA, 25 bp, Homo sapien
tccaaatgctctattatttgactga

SEQ ID NO: 1097059 - DNA, 25 bp, Homo sapien
tgcgaattccaaatgctctattatt

SEQ ID NO: 1097060 - DNA, 25 bp, Homo sapien
tctgaggatgtagttaagcctgtgg

SEQ ID NO: 1097061 - DNA, 25 bp, Homo sapien
atccacacagaaacagtcctgttag

SEQ ID NO: 1097062 - DNA, 25 bp, Homo sapien
ttctgaggatgtagttaagcctgtg

SEQ ID NO: 1097063 - DNA, 25 bp, Homo sapien
acacagaaacagtcctgttagttct

SEQ ID NO: 1097064 - DNA, 25 bp, Homo sapien
tgacagatattttagaccagtggct

SEQ ID NO: 1097065 - DNA, 25 bp, Homo sapien
tacaggtgggtaaggactatgacga

SEQ ID NO: 1097066 - DNA, 25 bp, Homo sapien
gaaatcgaggctcaaaagcagagat

SEQ ID NO: 1097067 - DNA, 25 bp, Homo sapien
cctggagattcaagggagtttaaga

SEQ ID NO: 1097068 - DNA, 25 bp, Homo sapien
ttacccattctgccgtacttctagc

SEQ ID NO: 1097069 - DNA, 25 bp, Homo sapien
ctagctggcacagtcgaagactttt

SEQ ID NO: 1097070 - DNA, 25 bp, Homo sapien
tctgccgtacttctagctggcacag

SEQ ID NO: 1097071 - DNA, 25 bp, Homo sapien
cattctgccgtacttctagctggca

SEQ ID NO: 1097072 - DNA, 25 bp, Homo sapien
gatctttagagcctcttgataccgg

SEQ ID NO: 1097073 - DNA, 25 bp, Homo sapien
gagcctcttgataccggatgggaat

SEQ ID NO: 1097074 - DNA, 25 bp, Homo sapien
ctaaatgccaacagtgatttgaggg

SEQ ID NO: 1097075 - DNA, 25 bp, Homo sapien
tgatttgagggatctttagagcctc

SEQ ID NO: 1097076 - DNA, 25 bp, Homo sapien
ctttgagtcgctgtacaaacaagtc

SEQ ID NO: 1097077 - DNA, 25 bp, Homo sapien
atttaaactttgagtcgctgtacaa

SEQ ID NO: 1097078 - DNA, 25 bp, Homo sapien
catttggactgtttgagatttcacc

SEQ ID NO: 1097079 - DNA, 25 bp, Homo sapien
tccatttggactgtttgagatttca

SEQ ID NO: 1097080 - DNA, 25 bp, Homo sapien
tcacccggtgtcctcctgctgaagt

SEQ ID NO: 1097081 - DNA, 25 bp, Homo sapien
tagcactgactgttagcatatcacc

SEQ ID NO: 1097082 - DNA, 25 bp, Homo sapien
caaatcctttagtctatctacttga

SEQ ID NO: 1097083 - DNA, 25 bp, Homo sapien
ctttagtctatctacttgaatagca

SEQ ID NO: 1097084 - DNA, 25 bp, Homo sapien
ctgcttctcaggatttataaatttc

SEQ ID NO: 1097085 - DNA, 25 bp, Homo sapien
tgcttctcaggatttataaatttca

SEQ ID NO: 1097086 - DNA, 25 bp, Homo sapien
gcttctcaggatttataaatttcat

SEQ ID NO: 1097087 - DNA, 25 bp, Homo sapien
gagttttccgtaccctgatatgtca

SEQ ID NO: 1097088 - DNA, 25 bp, Homo sapien
aaaaggcatactggagcaggctggt

SEQ ID NO: 1097089 - DNA, 25 bp, Homo sapien
gactccaaggccagtatgtggacca

SEQ ID NO: 1097090 - DNA, 25 bp, Homo sapien
aacattaaggccatagcagctgtgg

SEQ ID NO: 1097091 - DNA, 25 bp, Homo sapien
ttcatccagttcagctacagaaggg

SEQ ID NO: 1097092 - DNA, 25 bp, Homo sapien
tatggtgtaacactcaatgagacct

SEQ ID NO: 1097093 - DNA, 25 bp, Homo sapien
aatggcaaagcatatgagcaactgc

SEQ ID NO: 1097094 - DNA, 25 bp, Homo sapien
gataacctggctgctactgcatttt

SEQ ID NO: 1097095 - DNA, 25 bp, Homo sapien
tacaaagtgttagagctcagacgaa

SEQ ID NO: 1097096 - DNA, 25 bp, Homo sapien
gactccaagattcgtaggacacacg

SEQ ID NO: 1097097 - DNA, 25 bp, Homo sapien
gataacgagtactgacactggagaa

SEQ ID NO: 1097098 - DNA, 25 bp, Homo sapien
tctggccccaaattaaagataacga

SEQ ID NO: 1097099 - DNA, 25 bp, Homo sapien
ctaatttccgttgaagtgagtgttt

SEQ ID NO: 1097100 - DNA, 25 bp, Homo sapien
atttccgttgaagtgagtgttttgc

SEQ ID NO: 1097101 - DNA, 25 bp, Homo sapien
gaagtgagtgttttgctaagaacat

SEQ ID NO: 1097102 - DNA, 25 bp, Homo sapien
tccgttgaagtgagtgttttgctaa

SEQ ID NO: 1097103 - DNA, 25 bp, Homo sapien
tttgaccttggaagattatgtgaga

SEQ ID NO: 1097104 - DNA, 25 bp, Homo sapien
ccttggaagattatgtgagatttca

SEQ ID NO: 1097105 - DNA, 25 bp, Homo sapien
tgaccttggaagattatgtgagatt

SEQ ID NO: 1097106 - DNA, 25 bp, Homo sapien
agcagccatgggtgactgccctttg

SEQ ID NO: 1097107 - DNA, 25 bp, Homo sapien
acactgttggccttcttttgtggct

SEQ ID NO: 1097108 - DNA, 25 bp, Homo sapien
cctgtgggaatgtggctcgttaatc

SEQ ID NO: 1097109 - DNA, 25 bp, Homo sapien
cacagggcccagcataagcctttat

SEQ ID NO: 1097110 - DNA, 25 bp, Homo sapien
tgaattccccactggcttatgagcc

SEQ ID NO: 1097111 - DNA, 25 bp, Homo sapien
ttatctcacattgtccacagggccc

SEQ ID NO: 1097112 - DNA, 25 bp, Homo sapien
gaagagctgttcagaggtcaaggcc

SEQ ID NO: 1097113 - DNA, 25 bp, Homo sapien
tctatccgccttttagcaggcagga

SEQ ID NO: 1097114 - DNA, 25 bp, Homo sapien
tggaaaatgccattacatgggaact

SEQ ID NO: 1097115 - DNA, 25 bp, Homo sapien
tggaggaactgaacatctatccgcc

SEQ ID NO: 1097116 - DNA, 25 bp, Homo sapien
ttttcttgtgtccacctcttaaatg

SEQ ID NO: 1097117 - DNA, 25 bp, Homo sapien
ccacctcttaaatgttggtgttctc

SEQ ID NO: 1097118 - DNA, 25 bp, Homo sapien
ctctcctggttgcccccttttcttg

SEQ ID NO: 1097119 - DNA, 25 bp, Homo sapien
aaatgttggtgttctccagggtctg

SEQ ID NO: 1097120 - DNA, 25 bp, Homo sapien
ctaaaaacacctgatgtgacaaaac

SEQ ID NO: 1097121 - DNA, 25 bp, Homo sapien
tagctcagtgacactaaaaacacct

SEQ ID NO: 1097122 - DNA, 25 bp, Homo sapien
tcagtgacactaaaaacacctgatg

SEQ ID NO: 1097123 - DNA, 25 bp, Homo sapien
gacactaaaaacacctgatgtgaca

SEQ ID NO: 1097124 - DNA, 25 bp, Homo sapien
gccaaaggatgttcatgatgccagg

SEQ ID NO: 1097125 - DNA, 25 bp, Homo sapien
gagccaaaggatgttcatgatgcca

SEQ ID NO: 1097126 - DNA, 25 bp, Homo sapien
tgagagccaaaggatgttcatgatg

SEQ ID NO: 1097127 - DNA, 25 bp, Homo sapien
ccaaaggatgttcatgatgccaggc

SEQ ID NO: 1097128 - DNA, 25 bp, Homo sapien
tgttaagcctttcaggagggtgcgt

SEQ ID NO: 1097129 - DNA, 25 bp, Homo sapien
gaggatacagaatgcaccccaggtc

SEQ ID NO: 1097130 - DNA, 25 bp, Homo sapien
gcaaaaagcatccaccatagttctg

SEQ ID NO: 1097131 - DNA, 25 bp, Homo sapien
gggatttcaactccagcatgcggct

SEQ ID NO: 1097132 - DNA, 25 bp, Homo sapien
ctctgaatttgtgaggctaagccag

SEQ ID NO: 1097133 - DNA, 25 bp, Homo sapien
gcagagccaggacaattcagctgcc

SEQ ID NO: 1097134 - DNA, 25 bp, Homo sapien
gcagctgagctttgtggcagagcca

SEQ ID NO: 1097135 - DNA, 25 bp, Homo sapien
actcaggaatcctgtagtggacccg

SEQ ID NO: 1097136 - DNA, 25 bp, Homo sapien
cagctgccggattttaatagattct

SEQ ID NO: 1097137 - DNA, 25 bp, Homo sapien
tgatcgagcacatagtttgagtaga

SEQ ID NO: 1097138 - DNA, 25 bp, Homo sapien
atagtttgagtagactgccattgaa

SEQ ID NO: 1097139 - DNA, 25 bp, Homo sapien
gctgctttaataggatattgatcga

SEQ ID NO: 1097140 - DNA, 25 bp, Homo sapien
gccattgaattgtgtaatggcaaac

SEQ ID NO: 1097141 - DNA, 25 bp, Homo sapien
tctgcagcttctacgccacagtctt

SEQ ID NO: 1097142 - DNA, 25 bp, Homo sapien
ttctctgcagcttctacgccacagt

SEQ ID NO: 1097143 - DNA, 25 bp, Homo sapien
ctgtaaaccctgtgctgatctcctg

SEQ ID NO: 1097144 - DNA, 25 bp, Homo sapien
ctttgccaagcagatttctggtctg

SEQ ID NO: 1097145 - DNA, 25 bp, Homo sapien
cttttaccgtaatatgcttcctgaa

SEQ ID NO: 1097146 - DNA, 25 bp, Homo sapien
aattcaactcctttgttatctccct

SEQ ID NO: 1097147 - DNA, 25 bp, Homo sapien
cctgaacactgcctatgagaaaggg

SEQ ID NO: 1097148 - DNA, 25 bp, Homo sapien
tggaaagtaatttatggcaagaaaa

SEQ ID NO: 1097149 - DNA, 25 bp, Homo sapien
catcctcagtgttgcatttagcaca

SEQ ID NO: 1097150 - DNA, 25 bp, Homo sapien
tacaccatcagagacgagtagctgc

SEQ ID NO: 1097151 - DNA, 25 bp, Homo sapien
caaagtcatctttctaagctgtcca

SEQ ID NO: 1097152 - DNA, 25 bp, Homo sapien
cagtaataaactatgactccaaagg

SEQ ID NO: 1097153 - DNA, 25 bp, Homo sapien
tgctgggtaaagacctcctcattgc

SEQ ID NO: 1097154 - DNA, 25 bp, Homo sapien
gctgtagtatgaagaactttccaaa

SEQ ID NO: 1097155 - DNA, 25 bp, Homo sapien
atgtgctgggtaaagacctcctcat

SEQ ID NO: 1097156 - DNA, 25 bp, Homo sapien
tcctggactcatgctgtagtatgaa

SEQ ID NO: 1097157 - DNA, 25 bp, Homo sapien
cattgctaaatccatagtgggccca

SEQ ID NO: 1097158 - DNA, 25 bp, Homo sapien
caaggtgtgcaaccatgtagcataa

SEQ ID NO: 1097159 - DNA, 25 bp, Homo sapien
ttctattactaaaggcgcattgcta

SEQ ID NO: 1097160 - DNA, 25 bp, Homo sapien
cagccttgtccttcatttcctgaga

SEQ ID NO: 1097161 - DNA, 25 bp, Homo sapien
gacactgagactgtcaccagtgttc

SEQ ID NO: 1097162 - DNA, 25 bp, Homo sapien
tgagactgtcaccagtgttcacttc

SEQ ID NO: 1097163 - DNA, 25 bp, Homo sapien
actgagactgtcaccagtgttcact

SEQ ID NO: 1097164 - DNA, 25 bp, Homo sapien
cactgagactgtcaccagtgttcac

SEQ ID NO: 1097165 - DNA, 25 bp, Homo sapien
ctccagtaaactggatattgagagc

SEQ ID NO: 1097166 - DNA, 25 bp, Homo sapien
ccagtaaactggatattgagagctt

SEQ ID NO: 1097167 - DNA, 25 bp, Homo sapien
gagctgtaatgtctgctgtgggcat

SEQ ID NO: 1097168 - DNA, 25 bp, Homo sapien
gctggcactgagctgtaatgtctgc

SEQ ID NO: 1097169 - DNA, 25 bp, Homo sapien
tagacgctgtcgttcaagggactca

SEQ ID NO: 1097170 - DNA, 25 bp, Homo sapien
gaatatgagaacgacactggccttt

SEQ ID NO: 1097171 - DNA, 25 bp, Homo sapien
tcagttagatctagccccaaaggcc

SEQ ID NO: 1097172 - DNA, 25 bp, Homo sapien
tggaggcttccgagacaactttact

SEQ ID NO: 1097173 - DNA, 25 bp, Homo sapien
gatattgcacgtctggactttctcc

SEQ ID NO: 1097174 - DNA, 25 bp, Homo sapien
atagaagatattgcacgtctggact

SEQ ID NO: 1097175 - DNA, 25 bp, Homo sapien
aagggtggaggttatagaagatatt

SEQ ID NO: 1097176 - DNA, 25 bp, Homo sapien
cacagcgagtgagaagggtggaggt

SEQ ID NO: 1097177 - DNA, 25 bp, Homo sapien
tctaattggtatgctcatgtcacac

SEQ ID NO: 1097178 - DNA, 25 bp, Homo sapien
ttccaggacctagccaaagaaagcc

SEQ ID NO: 1097179 - DNA, 25 bp, Homo sapien
gtcttgcagatcaggagcattccag

SEQ ID NO: 1097180 - DNA, 25 bp, Homo sapien
tatcagatatttcgaacataacccc

SEQ ID NO: 1097181 - DNA, 25 bp, Homo sapien
tgttcagtctggtgagtcactggat

SEQ ID NO: 1097182 - DNA, 25 bp, Homo sapien
tgtttcctttgaggaataagcggct

SEQ ID NO: 1097183 - DNA, 25 bp, Homo sapien
tgtagaacaaagtcttgggtctgtg

SEQ ID NO: 1097184 - DNA, 25 bp, Homo sapien
aggaataagcggctggctctagctc

SEQ ID NO: 1097185 - DNA, 25 bp, Homo sapien
ccaagggaggaagcaattgggcaac

SEQ ID NO: 1097186 - DNA, 25 bp, Homo sapien
caaatgggtgcatgtttaaaagcaa

SEQ ID NO: 1097187 - DNA, 25 bp, Homo sapien
caacttaatgtagttctaggactcc

SEQ ID NO: 1097188 - DNA, 25 bp, Homo sapien
taaaagcaatcgcaaccacctttct

SEQ ID NO: 1097189 - DNA, 25 bp, Homo sapien
ggcctgtataaaatggctcctcacc

SEQ ID NO: 1097190 - DNA, 25 bp, Homo sapien
gctcctcaccaggactgtccatttc

SEQ ID NO: 1097191 - DNA, 25 bp, Homo sapien
tcctccacagacttgaggcgctttg

SEQ ID NO: 1097192 - DNA, 25 bp, Homo sapien
acttcctggggagcgcccttggcct

SEQ ID NO: 1097193 - DNA, 25 bp, Homo sapien
gagaccctaaaatgctgctccaaat

SEQ ID NO: 1097194 - DNA, 25 bp, Homo sapien
acatgagtgtctgacccaatgtggg

SEQ ID NO: 1097195 - DNA, 25 bp, Homo sapien
tctctttagaggcaggatcattata

SEQ ID NO: 1097196 - DNA, 25 bp, Homo sapien
accagtccaggacatgagaccctaa

SEQ ID NO: 1097197 - DNA, 25 bp, Homo sapien
ctagtaattggatttgactgaaagc

SEQ ID NO: 1097198 - DNA, 25 bp, Homo sapien
gacttgctagtaattggatttgact

SEQ ID NO: 1097199 - DNA, 25 bp, Homo sapien
tgctagtaattggatttgactgaaa

SEQ ID NO: 1097200 - DNA, 25 bp, Homo sapien
cttgctagtaattggatttgactga

SEQ ID NO: 1097201 - DNA, 25 bp, Homo sapien
caaaattcaactatgctgccagtag

SEQ ID NO: 1097202 - DNA, 25 bp, Homo sapien
tgttggcagtcaaattaggaccagc

SEQ ID NO: 1097203 - DNA, 25 bp, Homo sapien
aatgccctgggtcgctgactgacca

SEQ ID NO: 1097204 - DNA, 25 bp, Homo sapien
tgacccctagttctgaatgccctgg

SEQ ID NO: 1097205 - DNA, 25 bp, Homo sapien
gacagagctggataaataggcatta

SEQ ID NO: 1097206 - DNA, 25 bp, Homo sapien
cagtacttggtgtgccattcaggaa

SEQ ID NO: 1097207 - DNA, 25 bp, Homo sapien
gacaaagaccagagaatcaagaacc

SEQ ID NO: 1097208 - DNA, 25 bp, Homo sapien
tactctgtcgacgtgagcatttctc

SEQ ID NO: 1097209 - DNA, 25 bp, Homo sapien
tagacgatacctacagactggaatg

SEQ ID NO: 1097210 - DNA, 25 bp, Homo sapien
tctcattacatacaaagtagacgat

SEQ ID NO: 1097211 - DNA, 25 bp, Homo sapien
caaagtgtgggagtattgtctgaat

SEQ ID NO: 1097212 - DNA, 25 bp, Homo sapien
tgcttggaccacagtaaatcatcaa

SEQ ID NO: 1097213 - DNA, 25 bp, Homo sapien
ccctactcccaagttatgatatttt

SEQ ID NO: 1097214 - DNA, 25 bp, Homo sapien
cccctactcccaagttatgatattt

SEQ ID NO: 1097215 - DNA, 25 bp, Homo sapien
ccatattgtgaaagggcctgtgaca

SEQ ID NO: 1097216 - DNA, 25 bp, Homo sapien
aattaaggtccccaatcaggtgagt

SEQ ID NO: 1097217 - DNA, 25 bp, Homo sapien
tatattatccctggagggcctgacc

SEQ ID NO: 1097218 - DNA, 25 bp, Homo sapien
gcctgtgacagccacatggtaagga

SEQ ID NO: 1097219 - DNA, 25 bp, Homo sapien
caagtaatatgaaccctaaggctgt

SEQ ID NO: 1097220 - DNA, 25 bp, Homo sapien
gaagaaataccgtcagcatgcagga

SEQ ID NO: 1097221 - DNA, 25 bp, Homo sapien
tgatgatagcaaatggctggactca

SEQ ID NO: 1097222 - DNA, 25 bp, Homo sapien
tgcaggaacaaccagccaaactatg

SEQ ID NO: 1097223 - DNA, 25 bp, Homo sapien
caagaaggatcaactggtaagtaca

SEQ ID NO: 1097224 - DNA, 25 bp, Homo sapien
ggatcaactggtaagtacactttaa

SEQ ID NO: 1097225 - DNA, 25 bp, Homo sapien
ctggcaagaaggatcaactggtaag

SEQ ID NO: 1097226 - DNA, 25 bp, Homo sapien
caactggtaagtacactttaattca

SEQ ID NO: 1097227 - DNA, 25 bp, Homo sapien
tgaaaccagacttctccgacttctt

SEQ ID NO: 1097228 - DNA, 25 bp, Homo sapien
aaccagacttctccgacttcttcag

SEQ ID NO: 1097229 - DNA, 25 bp, Homo sapien
ccagacttctccgacttcttcagtg

SEQ ID NO: 1097230 - DNA, 25 bp, Homo sapien
gacttctccgacttcttcagtgtgg

SEQ ID NO: 1097231 - DNA, 25 bp, Homo sapien
tctgggtcctgtaatgacaggtcgg

SEQ ID NO: 1097232 - DNA, 25 bp, Homo sapien
aggtcggtgatgctgtgtgaacgcc

SEQ ID NO: 1097233 - DNA, 25 bp, Homo sapien
tgtgaacgccgttcccagggaggag

SEQ ID NO: 1097234 - DNA, 25 bp, Homo sapien
cctgtaatgacaggtcggtgatgct

SEQ ID NO: 1097235 - DNA, 25 bp, Homo sapien
tgatataagcacaaccaagggtgcc

SEQ ID NO: 1097236 - DNA, 25 bp, Homo sapien
cattttgctacttgggtccaaaggc

SEQ ID NO: 1097237 - DNA, 25 bp, Homo sapien
ggtctctaaaattccaaggctgccc

SEQ ID NO: 1097238 - DNA, 25 bp, Homo sapien
actcactgcctcacgagtgttcagg

SEQ ID NO: 1097239 - DNA, 25 bp, Homo sapien
cacacacacaacttgtagaacagat

SEQ ID NO: 1097240 - DNA, 25 bp, Homo sapien
acaacttgtagaacagatttgattt

SEQ ID NO: 1097241 - DNA, 25 bp, Homo sapien
acacacacaacttgtagaacagatt

SEQ ID NO: 1097242 - DNA, 25 bp, Homo sapien
cacacaacttgtagaacagatttga

SEQ ID NO: 1097243 - DNA, 25 bp, Homo sapien
tgcacacagagcacattcataaagg

SEQ ID NO: 1097244 - DNA, 25 bp, Homo sapien
caaatcatatttctcgtggacacat

SEQ ID NO: 1097245 - DNA, 25 bp, Homo sapien
gaatgaagactgctcgtcaacaccc

SEQ ID NO: 1097246 - DNA, 25 bp, Homo sapien
tatgaaaccagctggtaggtcacag

SEQ ID NO: 1097247 - DNA, 25 bp, Homo sapien
agactttccagaaaggagagccgag

SEQ ID NO: 1097248 - DNA, 25 bp, Homo sapien
ctgagtagactttccagaaaggaga

SEQ ID NO: 1097249 - DNA, 25 bp, Homo sapien
ctttccagaaaggagagccgaggat

SEQ ID NO: 1097250 - DNA, 25 bp, Homo sapien
tccagaaaggagagccgaggatgct

SEQ ID NO: 1097251 - DNA, 25 bp, Homo sapien
tcaatccctgatggcactgcaagtg

SEQ ID NO: 1097252 - DNA, 25 bp, Homo sapien
agtgccaccctatcagccttgaatc

SEQ ID NO: 1097253 - DNA, 25 bp, Homo sapien
ccactgaaacatgtctaggagaaga

SEQ ID NO: 1097254 - DNA, 25 bp, Homo sapien
gcgcccatgctgtgacctcataaaa

SEQ ID NO: 1097255 - DNA, 25 bp, Homo sapien
gacaatagcggttgggtctcctgtg

SEQ ID NO: 1097256 - DNA, 25 bp, Homo sapien
taatgggtccccagatagtaatagg

SEQ ID NO: 1097257 - DNA, 25 bp, Homo sapien
gacttgcgtagtgccagatgccact

SEQ ID NO: 1097258 - DNA, 25 bp, Homo sapien
ttttccatgcccataatgcgaaggc

SEQ ID NO: 1097259 - DNA, 25 bp, Homo sapien
gtgaccccaacttcctgaaaggtga

SEQ ID NO: 1097260 - DNA, 25 bp, Homo sapien
caacttcctgaaaggtgatcttaat

SEQ ID NO: 1097261 - DNA, 25 bp, Homo sapien
caaactgggagatattgttaacttc

SEQ ID NO: 1097262 - DNA, 25 bp, Homo sapien
gaccttcagatgtttcatcactgag

SEQ ID NO: 1097263 - DNA, 25 bp, Homo sapien
tggaaatctctatcatttcccttga

SEQ ID NO: 1097264 - DNA, 25 bp, Homo sapien
tcgtgttagttattgggagtttgct

SEQ ID NO: 1097265 - DNA, 25 bp, Homo sapien
aatacatattgactactagaaatac

SEQ ID NO: 1097266 - DNA, 25 bp, Homo sapien
agaaatacttttcggctgggtgtga

SEQ ID NO: 1097267 - DNA, 25 bp, Homo sapien
caactatattttgaggtggccagat

SEQ ID NO: 1097268 - DNA, 25 bp, Homo sapien
aatgcacgaagaatggtatgagtcc

SEQ ID NO: 1097269 - DNA, 25 bp, Homo sapien
gagaaatcattcgagatcctgaacc

SEQ ID NO: 1097270 - DNA, 25 bp, Homo sapien
caaattgggcaattgctgagtctgc

SEQ ID NO: 1097271 - DNA, 25 bp, Homo sapien
gaaatgaagagtcgatggtgttgca

SEQ ID NO: 1097272 - DNA, 25 bp, Homo sapien
cccaggctgctggataatgggtgat

SEQ ID NO: 1097273 - DNA, 25 bp, Homo sapien
tcctgagggtgatagcggatggctg

SEQ ID NO: 1097274 - DNA, 25 bp, Homo sapien
aattctttcagcgtctcctgagggt

SEQ ID NO: 1097275 - DNA, 25 bp, Homo sapien
gaaggaatgggttgtgcaccttgcc

SEQ ID NO: 1097276 - DNA, 25 bp, Homo sapien
gtgggaaggaatgggttgtgcacct

SEQ ID NO: 1097277 - DNA, 25 bp, Homo sapien
gggttgtgcaccttgccttggctgc

SEQ ID NO: 1097278 - DNA, 25 bp, Homo sapien
ccttgccttggctgctcccattggg

SEQ ID NO: 1097279 - DNA, 25 bp, Homo sapien
acctccttctgttgacgtggttgga

SEQ ID NO: 1097280 - DNA, 25 bp, Homo sapien
ttctgttgacgtggttggaggcttt

SEQ ID NO: 1097281 - DNA, 25 bp, Homo sapien
ctgcacctccttctgttgacgtggt

SEQ ID NO: 1097282 - DNA, 25 bp, Homo sapien
tccttctgttgacgtggttggaggc

SEQ ID NO: 1097283 - DNA, 25 bp, Homo sapien
ggcgccttgtcgcagccatacttac

SEQ ID NO: 1097284 - DNA, 25 bp, Homo sapien
tacagctttagaagtgaccggcgcc

SEQ ID NO: 1097285 - DNA, 25 bp, Homo sapien
ctttagaagtgaccggcgccttgtc

SEQ ID NO: 1097286 - DNA, 25 bp, Homo sapien
tggattccagtgcatacagctttag

SEQ ID NO: 1097287 - DNA, 25 bp, Homo sapien
ctagagcctatacagtgagggacaa

SEQ ID NO: 1097288 - DNA, 25 bp, Homo sapien
tagagcctatacagtgagggacaaa

SEQ ID NO: 1097289 - DNA, 25 bp, Homo sapien
agagcctatacagtgagggacaaag

SEQ ID NO: 1097290 - DNA, 25 bp, Homo sapien
ctatgacgatgtaattgggggttca

SEQ ID NO: 1097291 - DNA, 25 bp, Homo sapien
tatgacgatgtaattgggggttcag

SEQ ID NO: 1097292 - DNA, 25 bp, Homo sapien
ctggtgggaagcacactgccacccg

SEQ ID NO: 1097293 - DNA, 25 bp, Homo sapien
cggaccatatgtaggaagggctgct

SEQ ID NO: 1097294 - DNA, 25 bp, Homo sapien
gctttacaggctagggcggaccata

SEQ ID NO: 1097295 - DNA, 25 bp, Homo sapien
gcaccttcatgccatcagctttaca

SEQ ID NO: 1097296 - DNA, 25 bp, Homo sapien
gagggagaagctacttcactcctga

SEQ ID NO: 1097297 - DNA, 25 bp, Homo sapien
tctcacctgttactctctaggttgt

SEQ ID NO: 1097298 - DNA, 25 bp, Homo sapien
tctaggttgtaagggcttcaaagga

SEQ ID NO: 1097299 - DNA, 25 bp, Homo sapien
gaagctacttcactcctgatattta

SEQ ID NO: 1097300 - DNA, 25 bp, Homo sapien
agcatcctggctgaatgaccttgag

SEQ ID NO: 1097301 - DNA, 25 bp, Homo sapien
cataccttgtctttctcaatctggc

SEQ ID NO: 1097302 - DNA, 25 bp, Homo sapien
caagcctatgagctctaggttgaag

SEQ ID NO: 1097303 - DNA, 25 bp, Homo sapien
caaagatcctcatgctacagccaag

SEQ ID NO: 1097304 - DNA, 25 bp, Homo sapien
tgaatgtggcttactgactgctagc

SEQ ID NO: 1097305 - DNA, 25 bp, Homo sapien
tatatctgcaaaaacgaaccatggc

SEQ ID NO: 1097306 - DNA, 25 bp, Homo sapien
tgaacggcctctacgtcctcagaaa

SEQ ID NO: 1097307 - DNA, 25 bp, Homo sapien
tgtccctgagaggactgaacggcct

SEQ ID NO: 1097308 - DNA, 25 bp, Homo sapien
cagaagccattctgggggttgaggg

SEQ ID NO: 1097309 - DNA, 25 bp, Homo sapien
acagaagccattctgggggttgagg

SEQ ID NO: 1097310 - DNA, 25 bp, Homo sapien
catactggggacatccaaaacaagc

SEQ ID NO: 1097311 - DNA, 25 bp, Homo sapien
ccaaaacaagcatgctaactgatcc

SEQ ID NO: 1097312 - DNA, 25 bp, Homo sapien
gcggcacgagattgcacacacaaac

SEQ ID NO: 1097313 - DNA, 25 bp, Homo sapien
ttcaggaagcggcacgagattgcac

SEQ ID NO: 1097314 - DNA, 25 bp, Homo sapien
tgaagggaagggacacatgcgttca

SEQ ID NO: 1097315 - DNA, 25 bp, Homo sapien
gacacatgcgttcaggaagcggcac

SEQ ID NO: 1097316 - DNA, 25 bp, Homo sapien
caacactgacgaatcggtttgcggg

SEQ ID NO: 1097317 - DNA, 25 bp, Homo sapien
atttacaaagcttggatcccgtggt

SEQ ID NO: 1097318 - DNA, 25 bp, Homo sapien
tggtccaacactgacgaatcggttt

SEQ ID NO: 1097319 - DNA, 25 bp, Homo sapien
cttggatcccgtggtccaacactga

SEQ ID NO: 1097320 - DNA, 25 bp, Homo sapien
ataatacaagctgcaccacatacag

SEQ ID NO: 1097321 - DNA, 25 bp, Homo sapien
gaataatacaagctgcaccacatac

SEQ ID NO: 1097322 - DNA, 25 bp, Homo sapien
tgaataatacaagctgcaccacata

SEQ ID NO: 1097323 - DNA, 25 bp, Homo sapien
taatacaagctgcaccacatacaga

SEQ ID NO: 1097324 - DNA, 25 bp, Homo sapien
tctaatgaatacagaggagtggctg

SEQ ID NO: 1097325 - DNA, 25 bp, Homo sapien
tctgtctgcttgcatttagaggacc

SEQ ID NO: 1097326 - DNA, 25 bp, Homo sapien
catgcccagcatgcactctgatgtc

SEQ ID NO: 1097327 - DNA, 25 bp, Homo sapien
gatattactttcaggttctgtaggg

SEQ ID NO: 1097328 - DNA, 25 bp, Homo sapien
tcgtgcagcgctgaaacaatgccaa

SEQ ID NO: 1097329 - DNA, 25 bp, Homo sapien
cacagatttcttgttacgggaggaa

SEQ ID NO: 1097330 - DNA, 25 bp, Homo sapien
caaagaaatttgctagcagggtgca

SEQ ID NO: 1097331 - DNA, 25 bp, Homo sapien
cagaggctctaagcatgaggctgaa

SEQ ID NO: 1097332 - DNA, 25 bp, Homo sapien
gacctcacgtgagatcttcgatgga

SEQ ID NO: 1097333 - DNA, 25 bp, Homo sapien
gctatatcccaaaaagacagggcac

SEQ ID NO: 1097334 - DNA, 25 bp, Homo sapien
caagacaagggatccggcttatcac

SEQ ID NO: 1097335 - DNA, 25 bp, Homo sapien
gactcattagaagccctgggaaagc

SEQ ID NO: 1097336 - DNA, 25 bp, Homo sapien
gaccaatggaaggaagactgcgctt

SEQ ID NO: 1097337 - DNA, 25 bp, Homo sapien
ccagcttagtatggtgccaggaaca

SEQ ID NO: 1097338 - DNA, 25 bp, Homo sapien
tctaagatcaatcatgcagctggcg

SEQ ID NO: 1097339 - DNA, 25 bp, Homo sapien
cataactctaagtggaatgcaggca

SEQ ID NO: 1097340 - DNA, 25 bp, Homo sapien
tggacagaaaacgaagccttcacct

SEQ ID NO: 1097341 - DNA, 25 bp, Homo sapien
gcaattcaatgaggatcaccacccc

SEQ ID NO: 1097342 - DNA, 25 bp, Homo sapien
gaagctctccgtatggattcctcag

SEQ ID NO: 1097343 - DNA, 25 bp, Homo sapien
tccttacaacgagaaactggcgacg

SEQ ID NO: 1097344 - DNA, 25 bp, Homo sapien
aattactgtaccagccactctggca

SEQ ID NO: 1097345 - DNA, 25 bp, Homo sapien
tgatacaccattatctacactggag

SEQ ID NO: 1097346 - DNA, 25 bp, Homo sapien
cagcagcaaggcagactaatctgat

SEQ ID NO: 1097347 - DNA, 25 bp, Homo sapien
ctagatggacgcatatgtagcaggt

SEQ ID NO: 1097348 - DNA, 25 bp, Homo sapien
caccatcggagtgagatcaatgttt

SEQ ID NO: 1097349 - DNA, 25 bp, Homo sapien
aggtccacaccatcggagtgagatc

SEQ ID NO: 1097350 - DNA, 25 bp, Homo sapien
aatactcgtcctgtcatgtggcacc

SEQ ID NO: 1097351 - DNA, 25 bp, Homo sapien
gtttcccataatactcgtcctgtca

SEQ ID NO: 1097352 - DNA, 25 bp, Homo sapien
ggcaaaactgcaggttgtggcattc

SEQ ID NO: 1097353 - DNA, 25 bp, Homo sapien
cattcccagtacccagattcagcag

SEQ ID NO: 1097354 - DNA, 25 bp, Homo sapien
tggcaaaactgcaggttgtggcatt

SEQ ID NO: 1097355 - DNA, 25 bp, Homo sapien
tgtgcaaggtgaagatcctatagca

SEQ ID NO: 1097356 - DNA, 25 bp, Homo sapien
acagtctccgtgaagggccttacca

SEQ ID NO: 1097357 - DNA, 25 bp, Homo sapien
gctgcggttgggatttgtgcaaggt

SEQ ID NO: 1097358 - DNA, 25 bp, Homo sapien
tagcattgacagtctccgtgaaggg

SEQ ID NO: 1097359 - DNA, 25 bp, Homo sapien
tccattaaattgagcctgcgccacg

SEQ ID NO: 1097360 - DNA, 25 bp, Homo sapien
ctatttggtcatgatggcactgccg

SEQ ID NO: 1097361 - DNA, 25 bp, Homo sapien
tctaatgaagcacgactctgggagc

SEQ ID NO: 1097362 - DNA, 25 bp, Homo sapien
aatgacccgatgaaattgtccagag

SEQ ID NO: 1097363 - DNA, 25 bp, Homo sapien
cagtggttctgacgtagcaggccca

SEQ ID NO: 1097364 - DNA, 25 bp, Homo sapien
tttctggacgagacctcagggcact

SEQ ID NO: 1097365 - DNA, 25 bp, Homo sapien
ttcagtatgtgccttgccgacaagg

SEQ ID NO: 1097366 - DNA, 25 bp, Homo sapien
tcagggcactacaaaaatctgcagt

SEQ ID NO: 1097367 - DNA, 25 bp, Homo sapien
ctgcaacttttatcccaggtaccag

SEQ ID NO: 1097368 - DNA, 25 bp, Homo sapien
tgcaacttttatcccaggtaccagg

SEQ ID NO: 1097369 - DNA, 25 bp, Homo sapien
gcaacttttatcccaggtaccagga

SEQ ID NO: 1097370 - DNA, 25 bp, Homo sapien
gaaggggtcaggtggtctgtctggt

SEQ ID NO: 1097371 - DNA, 25 bp, Homo sapien
gagaaggggtcaggtggtctgtctg

SEQ ID NO: 1097372 - DNA, 25 bp, Homo sapien
agttgagaaggggtcaggtggtctg

SEQ ID NO: 1097373 - DNA, 25 bp, Homo sapien
gggtcaggtggtctgtctggtggat

SEQ ID NO: 1097374 - DNA, 25 bp, Homo sapien
ccccttccgctgatagtgaagttgt

SEQ ID NO: 1097375 - DNA, 25 bp, Homo sapien
tccatgtacaagttgatttgaatcg

SEQ ID NO: 1097376 - DNA, 25 bp, Homo sapien
catgtacaagttgatttgaatcggt

SEQ ID NO: 1097377 - DNA, 25 bp, Homo sapien
tgaagttgtaactgcgctgggttga

SEQ ID NO: 1097378 - DNA, 25 bp, Homo sapien
aaaacattgccctttgactgtcccg

SEQ ID NO: 1097379 - DNA, 25 bp, Homo sapien
gaagtcagtgagcaagggtagtcct

SEQ ID NO: 1097380 - DNA, 25 bp, Homo sapien
aaacagccaggctccgtaaggaaag

SEQ ID NO: 1097381 - DNA, 25 bp, Homo sapien
taatgctcacgctaccatggaaaca

SEQ ID NO: 1097382 - DNA, 25 bp, Homo sapien
gctcccctttttcttgcaaggctgt

SEQ ID NO: 1097383 - DNA, 25 bp, Homo sapien
cataaaaagcaaaaatagctcccct

SEQ ID NO: 1097384 - DNA, 25 bp, Homo sapien
tagctcccctttttcttgcaaggct

SEQ ID NO: 1097385 - DNA, 25 bp, Homo sapien
aaatagctcccctttttcttgcaag

SEQ ID NO: 1097386 - DNA, 25 bp, Homo sapien
gatgttgaaactgacgatggctgac

SEQ ID NO: 1097387 - DNA, 25 bp, Homo sapien
gcagggcttgccaaccagaacgtat

SEQ ID NO: 1097388 - DNA, 25 bp, Homo sapien
gaaaccttcttgaagtcgcatggga

SEQ ID NO: 1097389 - DNA, 25 bp, Homo sapien
caaataatcgctatccagggcaagg

SEQ ID NO: 1097390 - DNA, 25 bp, Homo sapien
ttagacgaatgcacagccttggacg

SEQ ID NO: 1097391 - DNA, 25 bp, Homo sapien
agtctccgcatagcatcagtcaagg

SEQ ID NO: 1097392 - DNA, 25 bp, Homo sapien
tagtatctcagtggcgaggctacca

SEQ ID NO: 1097393 - DNA, 25 bp, Homo sapien
tagattagaggtagcacttccactg

SEQ ID NO: 1097394 - DNA, 25 bp, Homo sapien
tggacgcccacagtgattctcaacc

SEQ ID NO: 1097395 - DNA, 25 bp, Homo sapien
ttgaataagaatggacgcccacagt

SEQ ID NO: 1097396 - DNA, 25 bp, Homo sapien
aagagttaaactaatccacaccagc

SEQ ID NO: 1097397 - DNA, 25 bp, Homo sapien
tctcaaccaattacaaattttcaca

SEQ ID NO: 1097398 - DNA, 25 bp, Homo sapien
gcataggaaatgcagtacttgcttc

SEQ ID NO: 1097399 - DNA, 25 bp, Homo sapien
ttgtattgtaatgtgagaaggtggt

SEQ ID NO: 1097400 - DNA, 25 bp, Homo sapien
gaaatgcagtacttgcttccagtaa

SEQ ID NO: 1097401 - DNA, 25 bp, Homo sapien
gcagtacttgcttccagtaattgta

SEQ ID NO: 1097402 - DNA, 25 bp, Homo sapien
cactgttaagtccagatcctgtgta

SEQ ID NO: 1097403 - DNA, 25 bp, Homo sapien
cccaggagatgatgaggctcaattc

SEQ ID NO: 1097404 - DNA, 25 bp, Homo sapien
ggatttgccctgactgaacatgtag

SEQ ID NO: 1097405 - DNA, 25 bp, Homo sapien
caatgggccaagagtaggaatctct

SEQ ID NO: 1097406 - DNA, 25 bp, Homo sapien
tcgaggtggctccttggaagcccat

SEQ ID NO: 1097407 - DNA, 25 bp, Homo sapien
tgtctgttacctgactaaatccgtg

SEQ ID NO: 1097408 - DNA, 25 bp, Homo sapien
tctctgttctcaatgtccactcctg

SEQ ID NO: 1097409 - DNA, 25 bp, Homo sapien
tcctgcctctgtagcttcgaggtgg

SEQ ID NO: 1097410 - DNA, 25 bp, Homo sapien
ccatctaaatatgcccatggcctgg

SEQ ID NO: 1097411 - DNA, 25 bp, Homo sapien
gctcaatggccaagtagttaatttt

SEQ ID NO: 1097412 - DNA, 25 bp, Homo sapien
acttggtattccttatctctccagc

SEQ ID NO: 1097413 - DNA, 25 bp, Homo sapien
cctggctctgagtcacgagggcata

SEQ ID NO: 1097414 - DNA, 25 bp, Homo sapien
gtctacaggatctgacctagaatac

SEQ ID NO: 1097415 - DNA, 25 bp, Homo sapien
tacatggaaagaaggagtctgtcct

SEQ ID NO: 1097416 - DNA, 25 bp, Homo sapien
ttacatggaaagaaggagtctgtcc

SEQ ID NO: 1097417 - DNA, 25 bp, Homo sapien
tctcccttgtctacaggatctgacc

SEQ ID NO: 1097418 - DNA, 25 bp, Homo sapien
catgtaagtattgtcctgggtcagc

SEQ ID NO: 1097419 - DNA, 25 bp, Homo sapien
tggctgcttcgaatggccctgggta

SEQ ID NO: 1097420 - DNA, 25 bp, Homo sapien
tgggtcagcgtaaaagacaggagtt

SEQ ID NO: 1097421 - DNA, 25 bp, Homo sapien
gactgtggaagaatggctgcttcga

SEQ ID NO: 1097422 - DNA, 25 bp, Homo sapien
aatgaaaagattaccaggcagcagc

SEQ ID NO: 1097423 - DNA, 25 bp, Homo sapien
ctgttaatgaaaagattaccaggca

SEQ ID NO: 1097424 - DNA, 25 bp, Homo sapien
tatctagtgtagaattttggctcca

SEQ ID NO: 1097425 - DNA, 25 bp, Homo sapien
caggcagcagcatatctagtgtaga

SEQ ID NO: 1097426 - DNA, 25 bp, Homo sapien
ctctgtgccaacagtaattgatgat

SEQ ID NO: 1097427 - DNA, 25 bp, Homo sapien
cagtaattgatgattccaattggcg

SEQ ID NO: 1097428 - DNA, 25 bp, Homo sapien
gttggaaaaggactgtgaattctct

SEQ ID NO: 1097429 - DNA, 25 bp, Homo sapien
ttgatgattccaattggcggatggc

SEQ ID NO: 1097430 - DNA, 25 bp, Homo sapien
cagattctgaaaccccccagtggag

SEQ ID NO: 1097431 - DNA, 25 bp, Homo sapien
gggacatgcggctgaaatgaatcca

SEQ ID NO: 1097432 - DNA, 25 bp, Homo sapien
tcctcttcacaaaacaatgcagatt

SEQ ID NO: 1097433 - DNA, 25 bp, Homo sapien
atgaatccaggcctggtatgcccac

SEQ ID NO: 1097434 - DNA, 25 bp, Homo sapien
tgttggcaaacacctctgatgttgt

SEQ ID NO: 1097435 - DNA, 25 bp, Homo sapien
tgaaaggagacccatagcttgagcc

SEQ ID NO: 1097436 - DNA, 25 bp, Homo sapien
tgttcacaggttctacctccacaga

SEQ ID NO: 1097437 - DNA, 25 bp, Homo sapien
gaaacaacactagccaggaccttga

SEQ ID NO: 1097438 - DNA, 25 bp, Homo sapien
gggaccaggcagtcactatcacatt

SEQ ID NO: 1097439 - DNA, 25 bp, Homo sapien
agtcactatcacattgcatgggcag

SEQ ID NO: 1097440 - DNA, 25 bp, Homo sapien
atctggggaccaggcagtcactatc

SEQ ID NO: 1097441 - DNA, 25 bp, Homo sapien
ggcagtcactatcacattgcatggg

SEQ ID NO: 1097442 - DNA, 25 bp, Homo sapien
ggaacagatggagcatctcgtctga

SEQ ID NO: 1097443 - DNA, 25 bp, Homo sapien
tggagcatctcgtctgaagtcatgc

SEQ ID NO: 1097444 - DNA, 25 bp, Homo sapien
catctggatgggtctaacctgggtt

SEQ ID NO: 1097445 - DNA, 25 bp, Homo sapien
ggtctaacctgggttgcatgtccac

SEQ ID NO: 1097446 - DNA, 25 bp, Homo sapien
cctttgctccttggctctcctggaa

SEQ ID NO: 1097447 - DNA, 25 bp, Homo sapien
aagccctgacttgccctcaagctgg

SEQ ID NO: 1097448 - DNA, 25 bp, Homo sapien
gaagccctgacttgccctcaagctg

SEQ ID NO: 1097449 - DNA, 25 bp, Homo sapien
cactccgacagagaaggcctttgga

SEQ ID NO: 1097450 - DNA, 25 bp, Homo sapien
ctttggaatccacacttagtcctca

SEQ ID NO: 1097451 - DNA, 25 bp, Homo sapien
caagccgtcctgagaaatcaggtgg

SEQ ID NO: 1097452 - DNA, 25 bp, Homo sapien
caggtggttcccatagtgaagaatc

SEQ ID NO: 1097453 - DNA, 25 bp, Homo sapien
taatatattcgacattgcaggtgca

SEQ ID NO: 1097454 - DNA, 25 bp, Homo sapien
aacaagatgagcttattgccttcac

SEQ ID NO: 1097455 - DNA, 25 bp, Homo sapien
tgcaggtgcataaatctccatgaaa

SEQ ID NO: 1097456 - DNA, 25 bp, Homo sapien
cccatagggtcttcggaaagaacat

SEQ ID NO: 1097457 - DNA, 25 bp, Homo sapien
gtggacaagttcctaaatgcttttg

SEQ ID NO: 1097458 - DNA, 25 bp, Homo sapien
gcagggccagagaccttctggtcac

SEQ ID NO: 1097459 - DNA, 25 bp, Homo sapien
tttgtggacaagttccagtttgtgg

SEQ ID NO: 1097460 - DNA, 25 bp, Homo sapien
ctggtcactactgagatgtccactg

SEQ ID NO: 1097461 - DNA, 25 bp, Homo sapien
gaataacagcacactctagacaaca

SEQ ID NO: 1097462 - DNA, 25 bp, Homo sapien
caatatggttgagcagaataacagc

SEQ ID NO: 1097463 - DNA, 25 bp, Homo sapien
taacattactgagccctctcagtcc

SEQ ID NO: 1097464 - DNA, 25 bp, Homo sapien
tctcagtccaatccagagggcatca

SEQ ID NO: 1097465 - DNA, 25 bp, Homo sapien
agctaggtccttcaacttagttttg

SEQ ID NO: 1097466 - DNA, 25 bp, Homo sapien
gccaagtaggcctgattcaaacagt

SEQ ID NO: 1097467 - DNA, 25 bp, Homo sapien
tccatgacaaatcgcctaggaaact

SEQ ID NO: 1097468 - DNA, 25 bp, Homo sapien
tgcacgaggccacgggtaaaagcta

SEQ ID NO: 1097469 - DNA, 25 bp, Homo sapien
gagctccactagcacagaccttcat

SEQ ID NO: 1097470 - DNA, 25 bp, Homo sapien
cctgagctccactagcacagacctt

SEQ ID NO: 1097471 - DNA, 25 bp, Homo sapien
tagctcttgtcccttcactgcttcc

SEQ ID NO: 1097472 - DNA, 25 bp, Homo sapien
cttcctgagctccactagcacagac

SEQ ID NO: 1097473 - DNA, 25 bp, Homo sapien
gttcccgcaggttggccaagaacca

SEQ ID NO: 1097474 - DNA, 25 bp, Homo sapien
gttggccaagaaccactaggtggca

SEQ ID NO: 1097475 - DNA, 25 bp, Homo sapien
gcaggttggccaagaaccactaggt

SEQ ID NO: 1097476 - DNA, 25 bp, Homo sapien
ccgcaggttggccaagaaccactag

SEQ ID NO: 1097477 - DNA, 25 bp, Homo sapien
catggtatgtgggagctcatttcca

SEQ ID NO: 1097478 - DNA, 25 bp, Homo sapien
aagggtgggtcacaatgcgcctgca

SEQ ID NO: 1097479 - DNA, 25 bp, Homo sapien
tgtggtatcttcttacagcaggcct

SEQ ID NO: 1097480 - DNA, 25 bp, Homo sapien
gccttgaccccagctggaaaatctg

SEQ ID NO: 1097481 - DNA, 25 bp, Homo sapien
gagacttccgggacaaaacgctcca

SEQ ID NO: 1097482 - DNA, 25 bp, Homo sapien
ggaacagccggcaaggctctttgga

SEQ ID NO: 1097483 - DNA, 25 bp, Homo sapien
tcctaaaacactaatctgagtaagc

SEQ ID NO: 1097484 - DNA, 25 bp, Homo sapien
aagccaggcccgacgttgccaggaa

SEQ ID NO: 1097485 - DNA, 25 bp, Homo sapien
tgctacgtacttgaccgcatggaga

SEQ ID NO: 1097486 - DNA, 25 bp, Homo sapien
ctacgtacttgaccgcatggagatg

SEQ ID NO: 1097487 - DNA, 25 bp, Homo sapien
ccactgctacgtacttgaccgcatg

SEQ ID NO: 1097488 - DNA, 25 bp, Homo sapien
cgtacttgaccgcatggagatgaat

SEQ ID NO: 1097489 - DNA, 25 bp, Homo sapien
aactgagatccgctccaagaacact

SEQ ID NO: 1097490 - DNA, 25 bp, Homo sapien
cactggtgctctattggtggttcca

SEQ ID NO: 1097491 - DNA, 25 bp, Homo sapien
gcagaactgagatccgctccaagaa

SEQ ID NO: 1097492 - DNA, 25 bp, Homo sapien
gctctattggtggttccaaaacctc

SEQ ID NO: 1097493 - DNA, 25 bp, Homo sapien
tcatgagcctgcttgttagcagaaa

SEQ ID NO: 1097494 - DNA, 25 bp, Homo sapien
aggtactgagtctggtcatcactgc

SEQ ID NO: 1097495 - DNA, 25 bp, Homo sapien
tcatcactgccccatagctgctttt

SEQ ID NO: 1097496 - DNA, 25 bp, Homo sapien
ccatgaaggtgttaaccaggtactg

SEQ ID NO: 1097497 - DNA, 25 bp, Homo sapien
tggaagcgttgactgtctccttctt

SEQ ID NO: 1097498 - DNA, 25 bp, Homo sapien
tctttccttggaagcgttgactgtc

SEQ ID NO: 1097499 - DNA, 25 bp, Homo sapien
cagtcttggaggccgaagctgccaa

SEQ ID NO: 1097500 - DNA, 25 bp, Homo sapien
ttccttggaagcgttgactgtctcc

SEQ ID NO: 1097501 - DNA, 25 bp, Homo sapien
ggagcaaacctgaatgcgcgtcttg

SEQ ID NO: 1097502 - DNA, 25 bp, Homo sapien
acctgaatgcgcgtcttgccagcat

SEQ ID NO: 1097503 - DNA, 25 bp, Homo sapien
tcttgataccgggagcaaacctgaa

SEQ ID NO: 1097504 - DNA, 25 bp, Homo sapien
gtctcatcttgataccgggagcaaa

SEQ ID NO: 1097505 - DNA, 25 bp, Homo sapien
acttagagacggctgccaggtttct

SEQ ID NO: 1097506 - DNA, 25 bp, Homo sapien
tgccagacttagagacggctgccag

SEQ ID NO: 1097507 - DNA, 25 bp, Homo sapien
gaggtgaaatcgtgccagacttaga

SEQ ID NO: 1097508 - DNA, 25 bp, Homo sapien
ctgaggtgaaatcgtgccagactta

SEQ ID NO: 1097509 - DNA, 25 bp, Homo sapien
acgccgaggcgtctactaggtttgc

SEQ ID NO: 1097510 - DNA, 25 bp, Homo sapien
gccgccgagcggtaggtttgctctc

SEQ ID NO: 1097511 - DNA, 25 bp, Homo sapien
tctcatgtgcggtctccctcaacat

SEQ ID NO: 1097512 - DNA, 25 bp, Homo sapien
caacatccaaaccaaccgagtgcgt

SEQ ID NO: 1097513 - DNA, 25 bp, Homo sapien
gcaattatcaaagttcccccagccc

SEQ ID NO: 1097514 - DNA, 25 bp, Homo sapien
ctaggcaattatcaaagttccccca

SEQ ID NO: 1097515 - DNA, 25 bp, Homo sapien
aggcaattatcaaagttcccccagc

SEQ ID NO: 1097516 - DNA, 25 bp, Homo sapien
taggcaattatcaaagttcccccag

SEQ ID NO: 1097517 - DNA, 25 bp, Homo sapien
atcgctgaatctgatatgactgtgg

SEQ ID NO: 1097518 - DNA, 25 bp, Homo sapien
cctccaaataagaatcgctgaatct

SEQ ID NO: 1097519 - DNA, 25 bp, Homo sapien
ccaaataagaatcgctgaatctgat

SEQ ID NO: 1097520 - DNA, 25 bp, Homo sapien
taagaatcgctgaatctgatatgac

SEQ ID NO: 1097521 - DNA, 25 bp, Homo sapien
accagttaaaattcctaggtcatag

SEQ ID NO: 1097522 - DNA, 25 bp, Homo sapien
tattgcctgagcatgctatgtgctg

SEQ ID NO: 1097523 - DNA, 25 bp, Homo sapien
tgttattgcctgagcatgctatgtg

SEQ ID NO: 1097524 - DNA, 25 bp, Homo sapien
tcattcattcaaatgttattgcctg

SEQ ID NO: 1097525 - DNA, 25 bp, Homo sapien
attactagccatcaaaaatgcctga

SEQ ID NO: 1097526 - DNA, 25 bp, Homo sapien
gacaactcatacatatacctgaaaa

SEQ ID NO: 1097527 - DNA, 25 bp, Homo sapien
gtagtaattactagccatcaaaaat

SEQ ID NO: 1097528 - DNA, 25 bp, Homo sapien
atgcctgacaactcatacatatacc

SEQ ID NO: 1097529 - DNA, 25 bp, Homo sapien
tctgattttttgttcagatgtccca

SEQ ID NO: 1097530 - DNA, 25 bp, Homo sapien
caggagaggcctgacatgagaagtc

SEQ ID NO: 1097531 - DNA, 25 bp, Homo sapien
atatcccctgcttgcaacctcatca

SEQ ID NO: 1097532 - DNA, 25 bp, Homo sapien
gattgtgcccgttttcactcttact

SEQ ID NO: 1097533 - DNA, 25 bp, Homo sapien
tcacgaactttccaaaatagtttca

SEQ ID NO: 1097534 - DNA, 25 bp, Homo sapien
tttccaaaatagtttcaagattatc

SEQ ID NO: 1097535 - DNA, 25 bp, Homo sapien
ctttccaaaatagtttcaagattat

SEQ ID NO: 1097536 - DNA, 25 bp, Homo sapien
taggttaactgttctccccgagaca

SEQ ID NO: 1097537 - DNA, 25 bp, Homo sapien
cgagacagtcttgacctacttaggc

SEQ ID NO: 1097538 - DNA, 25 bp, Homo sapien
caatggacattctaacaagagggaa

SEQ ID NO: 1097539 - DNA, 25 bp, Homo sapien
gctgctaaggataccctgacaacgt

SEQ ID NO: 1097540 - DNA, 25 bp, Homo sapien
ccaggactggttggtaaggccttcg

SEQ ID NO: 1097541 - DNA, 25 bp, Homo sapien
aggccttcgagacgctgcaagtccg

SEQ ID NO: 1097542 - DNA, 25 bp, Homo sapien
gttgctgcagctcctcggtcctggg

SEQ ID NO: 1097543 - DNA, 25 bp, Homo sapien
gaggtcaagttcagcgcccagtctt

SEQ ID NO: 1097544 - DNA, 25 bp, Homo sapien
ggccatgtacatagacacccaacgg

SEQ ID NO: 1097545 - DNA, 25 bp, Homo sapien
ggtccatggaggtctaccgggctaa

SEQ ID NO: 1097546 - DNA, 25 bp, Homo sapien
cataatccagggtgccacatccaga

SEQ ID NO: 1097547 - DNA, 25 bp, Homo sapien
gacgccaggacctcaacagaatgtt

SEQ ID NO: 1097548 - DNA, 25 bp, Homo sapien
tgaagggcaatagatgttcttcttc

SEQ ID NO: 1097549 - DNA, 25 bp, Homo sapien
tgcattaaattgttgacctttctat

SEQ ID NO: 1097550 - DNA, 25 bp, Homo sapien
taggtaaagctcgtagctcagtggt

SEQ ID NO: 1097551 - DNA, 25 bp, Homo sapien
cagtggttgacacatatgaagggca

SEQ ID NO: 1097552 - DNA, 25 bp, Homo sapien
tttttgttgccccagcagtcactgg

SEQ ID NO: 1097553 - DNA, 25 bp, Homo sapien
tgctctactgtgtgttaccttgggc

SEQ ID NO: 1097554 - DNA, 25 bp, Homo sapien
tagtgaattggaatcctgactgctc

SEQ ID NO: 1097555 - DNA, 25 bp, Homo sapien
cagtcactggtatgtagtgccaagg

SEQ ID NO: 1097556 - DNA, 25 bp, Homo sapien
cagcttggtggactctttatattcc

SEQ ID NO: 1097557 - DNA, 25 bp, Homo sapien
ctttctgtggcccagatcttttctg

SEQ ID NO: 1097558 - DNA, 25 bp, Homo sapien
ttctgaagtgtttctatcagcttgg

SEQ ID NO: 1097559 - DNA, 25 bp, Homo sapien
aatgcacattatcctcactctgctg

SEQ ID NO: 1097560 - DNA, 25 bp, Homo sapien
gtcctgaggattccagctttcttct

SEQ ID NO: 1097561 - DNA, 25 bp, Homo sapien
ccagtcctgaggattccagctttct

SEQ ID NO: 1097562 - DNA, 25 bp, Homo sapien
cagctttcttctccccttttcctca

SEQ ID NO: 1097563 - DNA, 25 bp, Homo sapien
agctttcttctccccttttcctcat

SEQ ID NO: 1097564 - DNA, 25 bp, Homo sapien
tgaagcacacttccaagtccggctc

SEQ ID NO: 1097565 - DNA, 25 bp, Homo sapien
actgaagcacacttccaagtccggc

SEQ ID NO: 1097566 - DNA, 25 bp, Homo sapien
taactgaagcacacttccaagtccg

SEQ ID NO: 1097567 - DNA, 25 bp, Homo sapien
agcacacttccaagtccggctccat

SEQ ID NO: 1097568 - DNA, 25 bp, Homo sapien
caggtgccttaagtgatgtaccagt

SEQ ID NO: 1097569 - DNA, 25 bp, Homo sapien
gatggacaaggtgggagcaccaaac

SEQ ID NO: 1097570 - DNA, 25 bp, Homo sapien
aatgtcttccatctgtgagcaccac

SEQ ID NO: 1097571 - DNA, 25 bp, Homo sapien
tgggagcaccaaacagatgattaat

SEQ ID NO: 1097572 - DNA, 25 bp, Homo sapien
tttggaagaccagatgctgactcat

SEQ ID NO: 1097573 - DNA, 25 bp, Homo sapien
ggcctctgaggtgtgaacttcttcc

SEQ ID NO: 1097574 - DNA, 25 bp, Homo sapien
ggtatccagggagctaaagatcatt

SEQ ID NO: 1097575 - DNA, 25 bp, Homo sapien
tgggagtgctacactagcttttgga

SEQ ID NO: 1097576 - DNA, 25 bp, Homo sapien
tttctcgggcttctgtctctatgag

SEQ ID NO: 1097577 - DNA, 25 bp, Homo sapien
gagagatagcttattactctgatac

SEQ ID NO: 1097578 - DNA, 25 bp, Homo sapien
ttaataggacttcctttgaaagctg

SEQ ID NO: 1097579 - DNA, 25 bp, Homo sapien
actctgatactctttaatcttttac

SEQ ID NO: 1097580 - DNA, 25 bp, Homo sapien
tagttcactttgagctgtctagcag

SEQ ID NO: 1097581 - DNA, 25 bp, Homo sapien
tgctgaagtcagagataccatcctt

SEQ ID NO: 1097582 - DNA, 25 bp, Homo sapien
catgggattgaacagtgacacaccc

SEQ ID NO: 1097583 - DNA, 25 bp, Homo sapien
gaagctttcatagacacagacaggt

SEQ ID NO: 1097584 - DNA, 25 bp, Homo sapien
tttcgccattttagtcaggctagtc

SEQ ID NO: 1097585 - DNA, 25 bp, Homo sapien
ggtttcgccattttagtcaggctag

SEQ ID NO: 1097586 - DNA, 25 bp, Homo sapien
accaccatgcccgggtaacttgtat

SEQ ID NO: 1097587 - DNA, 25 bp, Homo sapien
cgccattttagtcaggctagtcttg

SEQ ID NO: 1097588 - DNA, 25 bp, Homo sapien
aaaaagatgtgcatgaactcttcac

SEQ ID NO: 1097589 - DNA, 25 bp, Homo sapien
tgcatgaactcttcactaaccatta

SEQ ID NO: 1097590 - DNA, 25 bp, Homo sapien
tgaaatgtatccaacagaatataaa

SEQ ID NO: 1097591 - DNA, 25 bp, Homo sapien
aataaaagtgttacatcaattttga

SEQ ID NO: 1097592 - DNA, 25 bp, Homo sapien
gaatgcataaattctggcactgtgt

SEQ ID NO: 1097593 - DNA, 25 bp, Homo sapien
tagcctttacttgcagacagctgaa

SEQ ID NO: 1097594 - DNA, 25 bp, Homo sapien
gatggatacaggttgcattagcctt

SEQ ID NO: 1097595 - DNA, 25 bp, Homo sapien
ggttctgagacgaatcccaatgcta

SEQ ID NO: 1097596 - DNA, 25 bp, Homo sapien
taaattggaaaaccgaagtgactga

SEQ ID NO: 1097597 - DNA, 25 bp, Homo sapien
gacatcaaatctttcagatagctcc

SEQ ID NO: 1097598 - DNA, 25 bp, Homo sapien
ctgtcatgtgaccttaattaggtag

SEQ ID NO: 1097599 - DNA, 25 bp, Homo sapien
taaccctggtgtgatatattgggaa

SEQ ID NO: 1097600 - DNA, 25 bp, Homo sapien
cttgtcaattaccataaaagcattg

SEQ ID NO: 1097601 - DNA, 25 bp, Homo sapien
tgtcaccttgtcaattaccataaaa

SEQ ID NO: 1097602 - DNA, 25 bp, Homo sapien
gtcaccttgtcaattaccataaaag

SEQ ID NO: 1097603 - DNA, 25 bp, Homo sapien
caccttgtcaattaccataaaagca

SEQ ID NO: 1097604 - DNA, 25 bp, Homo sapien
tctaaatttttgagtctagggtcta

SEQ ID NO: 1097605 - DNA, 25 bp, Homo sapien
ttttgagtctagggtctagcttcat

SEQ ID NO: 1097606 - DNA, 25 bp, Homo sapien
tgtctaaatttttgagtctagggtc

SEQ ID NO: 1097607 - DNA, 25 bp, Homo sapien
taaatttttgagtctagggtctagc

SEQ ID NO: 1097608 - DNA, 25 bp, Homo sapien
caagatcaaggaaattgaggaggat

SEQ ID NO: 1097609 - DNA, 25 bp, Homo sapien
ttgaggaggatatcgatgaaagcgt

SEQ ID NO: 1097610 - DNA, 25 bp, Homo sapien
tgcgtgtagagcgagacccaagatc

SEQ ID NO: 1097611 - DNA, 25 bp, Homo sapien
gggtcaatccgcttaacactttgtc

SEQ ID NO: 1097612 - DNA, 25 bp, Homo sapien
tcgggcgggctcggtgtcggccctg

SEQ ID NO: 1097613 - DNA, 25 bp, Homo sapien
cgggctcggtgtcggccctgcctca

SEQ ID NO: 1097614 - DNA, 25 bp, Homo sapien
ggcgggctcggtgtcggccctgcct

SEQ ID NO: 1097615 - DNA, 25 bp, Homo sapien
agcaggtgggagcccgggtcgggcg

SEQ ID NO: 1097616 - DNA, 25 bp, Homo sapien
ggagagcgcgggggcagggcaggca

SEQ ID NO: 1097617 - DNA, 25 bp, Homo sapien
cggggagagcgcgggggcagggcag

SEQ ID NO: 1097618 - DNA, 25 bp, Homo sapien
gggagagcgcgggggcagggcaggc

SEQ ID NO: 1097619 - DNA, 25 bp, Homo sapien
gcggggagagcgcgggggcagggca

SEQ ID NO: 1097620 - DNA, 25 bp, Homo sapien
cgcctcccgggtcagcgcggacgca

SEQ ID NO: 1097621 - DNA, 25 bp, Homo sapien
ggcccgacgcaggaggacggcgccc

SEQ ID NO: 1097622 - DNA, 25 bp, Homo sapien
cccgcctcccgggtcagcgcggacg

SEQ ID NO: 1097623 - DNA, 25 bp, Homo sapien
cctcccgggtcagcgcggacgcacg

SEQ ID NO: 1097624 - DNA, 25 bp, Homo sapien
tggaagcactttccgacagaacctc

SEQ ID NO: 1097625 - DNA, 25 bp, Homo sapien
ggaatttcccctaaggctggaagca

SEQ ID NO: 1097626 - DNA, 25 bp, Homo sapien
gagtgggagtgatctgaaaatgctt

SEQ ID NO: 1097627 - DNA, 25 bp, Homo sapien
acttaattcggcctgcgtgcgggac

SEQ ID NO: 1097628 - DNA, 25 bp, Homo sapien
taagatgctctccataacacctgcc

SEQ ID NO: 1097629 - DNA, 25 bp, Homo sapien
tcaacaatggccaactctggctttc

SEQ ID NO: 1097630 - DNA, 25 bp, Homo sapien
ggttgccaggcctgataagatgctc

SEQ ID NO: 1097631 - DNA, 25 bp, Homo sapien
ccagtaatggcatcttcaacaatgg

SEQ ID NO: 1097632 - DNA, 25 bp, Homo sapien
ggaagggtattgacaggcactaaat

SEQ ID NO: 1097633 - DNA, 25 bp, Homo sapien
ttgacaggcactaaatttctcccca

SEQ ID NO: 1097634 - DNA, 25 bp, Homo sapien
tctccccatttgcaccggaacctaa

SEQ ID NO: 1097635 - DNA, 25 bp, Homo sapien
agggtattgacaggcactaaatttc

SEQ ID NO: 1097636 - DNA, 25 bp, Homo sapien
gacttcctagcaaacatgataaagg

SEQ ID NO: 1097637 - DNA, 25 bp, Homo sapien
tgggggattccctgcatgacagctg

SEQ ID NO: 1097638 - DNA, 25 bp, Homo sapien
tgtggctcactccttcagccacagg

SEQ ID NO: 1097639 - DNA, 25 bp, Homo sapien
cacattggaagaggaggattgtttg

SEQ ID NO: 1097640 - DNA, 25 bp, Homo sapien
ttattctcttcaatcactcttaaag

SEQ ID NO: 1097641 - DNA, 25 bp, Homo sapien
tctcttcaatcactcttaaagacac

SEQ ID NO: 1097642 - DNA, 25 bp, Homo sapien
gaattattctcttcaatcactctta

SEQ ID NO: 1097643 - DNA, 25 bp, Homo sapien
tattctcttcaatcactcttaaaga

SEQ ID NO: 1097644 - DNA, 25 bp, Homo sapien
taacttctcattctgcgacgtgtca

SEQ ID NO: 1097645 - DNA, 25 bp, Homo sapien
tcaggcgatcaagtacctgcagcac

SEQ ID NO: 1097646 - DNA, 25 bp, Homo sapien
agtatctggttgaagagaggactct

SEQ ID NO: 1097647 - DNA, 25 bp, Homo sapien
gatggactgctgaagtgtgagtatc

SEQ ID NO: 1097648 - DNA, 25 bp, Homo sapien
agtactataccagcatgattgcagg

SEQ ID NO: 1097649 - DNA, 25 bp, Homo sapien
tttgtgagcctaaaaaccgaggcac

SEQ ID NO: 1097650 - DNA, 25 bp, Homo sapien
gagcaacaaaagatccacaggtagt

SEQ ID NO: 1097651 - DNA, 25 bp, Homo sapien
gagtcacggagccacttaaacattg

SEQ ID NO: 1097652 - DNA, 25 bp, Homo sapien
ccattagtgatggaaccatctgtga

SEQ ID NO: 1097653 - DNA, 25 bp, Homo sapien
ctgtgaacactaacaaacctttcct

SEQ ID NO: 1097654 - DNA, 25 bp, Homo sapien
tcaaagttggctgaacaatctgagg

SEQ ID NO: 1097655 - DNA, 25 bp, Homo sapien
gatacagtcgagttattagagggcc

SEQ ID NO: 1097656 - DNA, 25 bp, Homo sapien
cacactgaatccaaggcctccagtt

SEQ ID NO: 1097657 - DNA, 25 bp, Homo sapien
ttccgagattttgacttctgagggc

SEQ ID NO: 1097658 - DNA, 25 bp, Homo sapien
gcctccagttgaaggccgttctata

SEQ ID NO: 1097659 - DNA, 25 bp, Homo sapien
catccttcacgaagatatcaacttt

SEQ ID NO: 1097660 - DNA, 25 bp, Homo sapien
actgagcacttatcatgagtcaggt

SEQ ID NO: 1097661 - DNA, 25 bp, Homo sapien
cacttatcatgagtcaggtactatg

SEQ ID NO: 1097662 - DNA, 25 bp, Homo sapien
caatctcccaactgctagccagggt

SEQ ID NO: 1097663 - DNA, 25 bp, Homo sapien
ctagccagggtaagaaggactcttt

SEQ ID NO: 1097664 - DNA, 25 bp, Homo sapien
tcaggcagagttgtatcatttaggc

SEQ ID NO: 1097665 - DNA, 25 bp, Homo sapien
gaaatgttctgatccaatggcgtgt

SEQ ID NO: 1097666 - DNA, 25 bp, Homo sapien
tcatttaggctgctagaagtactgc

SEQ ID NO: 1097667 - DNA, 25 bp, Homo sapien
caatcagtctcaaagatccagtggt

SEQ ID NO: 1097668 - DNA, 25 bp, Homo sapien
ttccaaaacctagtccagagccatc

SEQ ID NO: 1097669 - DNA, 25 bp, Homo sapien
aatgagctcaacctcttcaacatgg

SEQ ID NO: 1097670 - DNA, 25 bp, Homo sapien
tcgatctgctaatcctccaggaact

SEQ ID NO: 1097671 - DNA, 25 bp, Homo sapien
ccaggaactatagtcctcacaacca

SEQ ID NO: 1097672 - DNA, 25 bp, Homo sapien
tggtcattccctgcacgtttgtgcc

SEQ ID NO: 1097673 - DNA, 25 bp, Homo sapien
aatcttcaagatgtggtcccctgtc

SEQ ID NO: 1097674 - DNA, 25 bp, Homo sapien
gttccttagaacttgtgcaacttgc

SEQ ID NO: 1097675 - DNA, 25 bp, Homo sapien
tagcaacgagcatcctgactgaatt

SEQ ID NO: 1097676 - DNA, 25 bp, Homo sapien
gcttagtggcatacctgtgtgtaca

SEQ ID NO: 1097677 - DNA, 25 bp, Homo sapien
tatgcttagtggcatacctgtgtgt

SEQ ID NO: 1097678 - DNA, 25 bp, Homo sapien
atatatgcttagtggcatacctgtg

SEQ ID NO: 1097679 - DNA, 25 bp, Homo sapien
agtggcatacctgtgtgtacatagt

SEQ ID NO: 1097680 - DNA, 25 bp, Homo sapien
tgcccatcttttctcacaagctcaa

SEQ ID NO: 1097681 - DNA, 25 bp, Homo sapien
caacaattctaattccaagactctg

SEQ ID NO: 1097682 - DNA, 25 bp, Homo sapien
tgtatgagatgttccaacatagcca

SEQ ID NO: 1097683 - DNA, 25 bp, Homo sapien
tcaacattataagtttcaaaaagag

SEQ ID NO: 1097684 - DNA, 25 bp, Homo sapien
gactgcttgctagtatagactcatg

SEQ ID NO: 1097685 - DNA, 25 bp, Homo sapien
tgttaatggatatcaagccagctat

SEQ ID NO: 1097686 - DNA, 25 bp, Homo sapien
gccagctataaaactattgagataa

SEQ ID NO: 1097687 - DNA, 25 bp, Homo sapien
cactaagctggccaattatattctt

SEQ ID NO: 1097688 - DNA, 25 bp, Homo sapien
gccaggtattatacttttcacataa

SEQ ID NO: 1097689 - DNA, 25 bp, Homo sapien
cattgtggtacgcagcactgccagg

SEQ ID NO: 1097690 - DNA, 25 bp, Homo sapien
tgtggccattgtggtacgcagcact

SEQ ID NO: 1097691 - DNA, 25 bp, Homo sapien
tttgtcattcacttgaatgtggcca

SEQ ID NO: 1097692 - DNA, 25 bp, Homo sapien
ggttaggtgtaccacctgccctgca

SEQ ID NO: 1097693 - DNA, 25 bp, Homo sapien
gaggatgtcttccttcgaactaggg

SEQ ID NO: 1097694 - DNA, 25 bp, Homo sapien
ctgccctgcatttcgtaatacttca

SEQ ID NO: 1097695 - DNA, 25 bp, Homo sapien
ttcaacaacatcatggttggcaaaa

SEQ ID NO: 1097696 - DNA, 25 bp, Homo sapien
ggtttcagtggttctacaacagttc

SEQ ID NO: 1097697 - DNA, 25 bp, Homo sapien
tggtttcagtggttctacaacagtt

SEQ ID NO: 1097698 - DNA, 25 bp, Homo sapien
tcttcaccatccacattagtttcag

SEQ ID NO: 1097699 - DNA, 25 bp, Homo sapien
ttctaaggcttgtatgttgtcattt

SEQ ID NO: 1097700 - DNA, 25 bp, Homo sapien
ccatccacattagtttcagtttcca

SEQ ID NO: 1097701 - DNA, 25 bp, Homo sapien
tttttctaaggcttgtatgttgtca

SEQ ID NO: 1097702 - DNA, 25 bp, Homo sapien
caggacccaacaggttttcccatct

SEQ ID NO: 1097703 - DNA, 25 bp, Homo sapien
gatttcagctcattttctggagagt

SEQ ID NO: 1097704 - DNA, 25 bp, Homo sapien
ttcccatctggatttcagctcattt

SEQ ID NO: 1097705 - DNA, 25 bp, Homo sapien
ttacttcataatcaggacccaacag

SEQ ID NO: 1097706 - DNA, 25 bp, Homo sapien
tcatctgcaatctgtgtgtccaaag

SEQ ID NO: 1097707 - DNA, 25 bp, Homo sapien
agcatcatctgcaatctgtgtgtcc

SEQ ID NO: 1097708 - DNA, 25 bp, Homo sapien
actcagcatcatctgcaatctgtgt

SEQ ID NO: 1097709 - DNA, 25 bp, Homo sapien
tcagcatcatctgcaatctgtgtgt

SEQ ID NO: 1097710 - DNA, 25 bp, Homo sapien
cagttggccgacacagtcacaacaa

SEQ ID NO: 1097711 - DNA, 25 bp, Homo sapien
gtcacaacaatgaagtgactcaaga

SEQ ID NO: 1097712 - DNA, 25 bp, Homo sapien
caacaatgaagtgactcaagatgca

SEQ ID NO: 1097713 - DNA, 25 bp, Homo sapien
acaatgaagtgactcaagatgcagg

SEQ ID NO: 1097714 - DNA, 25 bp, Homo sapien
tccaggtcaggaaatataactcaag

SEQ ID NO: 1097715 - DNA, 25 bp, Homo sapien
tcaggaaatataactcaagagagaa

SEQ ID NO: 1097716 - DNA, 25 bp, Homo sapien
ccaggtcaggaaatataactcaaga

SEQ ID NO: 1097717 - DNA, 25 bp, Homo sapien
gtatcattccaattttagtatatgt

SEQ ID NO: 1097718 - DNA, 25 bp, Homo sapien
gtatatgtgctgcctaagcaagcat

SEQ ID NO: 1097719 - DNA, 25 bp, Homo sapien
cacttcacgaatttgtgcgtcatcc

SEQ ID NO: 1097720 - DNA, 25 bp, Homo sapien
ttgcacaggggccatgctaatctct

SEQ ID NO: 1097721 - DNA, 25 bp, Homo sapien
ctgtaggagacccaatgtatcaaca

SEQ ID NO: 1097722 - DNA, 25 bp, Homo sapien
gacccaatgtatcaacaggaccacc

SEQ ID NO: 1097723 - DNA, 25 bp, Homo sapien
tggtgcccatcaaaggaatccactt

SEQ ID NO: 1097724 - DNA, 25 bp, Homo sapien
gtatcaacaggaccaccagaaacaa

SEQ ID NO: 1097725 - DNA, 25 bp, Homo sapien
ttcttgcctgtgtctttctttcccc

SEQ ID NO: 1097726 - DNA, 25 bp, Homo sapien
agattcttgcctgtgtctttctttc

SEQ ID NO: 1097727 - DNA, 25 bp, Homo sapien
gcctgtgtctttctttccccataaa

SEQ ID NO: 1097728 - DNA, 25 bp, Homo sapien
ttgcctgtgtctttctttccccata

SEQ ID NO: 1097729 - DNA, 25 bp, Homo sapien
aatctctaaaatcaaggcccatggg

SEQ ID NO: 1097730 - DNA, 25 bp, Homo sapien
tatcctaacacttgggagaaccctc

SEQ ID NO: 1097731 - DNA, 25 bp, Homo sapien
tctaagaggctcatattacattggc

SEQ ID NO: 1097732 - DNA, 25 bp, Homo sapien
tgaatccaacctagggcttcttgtg

SEQ ID NO: 1097733 - DNA, 25 bp, Homo sapien
tctcggcgagattttccataaagct

SEQ ID NO: 1097734 - DNA, 25 bp, Homo sapien
gaaaggagactgcttctcggcgaga

SEQ ID NO: 1097735 - DNA, 25 bp, Homo sapien
tcagtgcgccttggttcatctacag

SEQ ID NO: 1097736 - DNA, 25 bp, Homo sapien
caacctccgacagcaaaccaaagta

SEQ ID NO: 1097737 - DNA, 25 bp, Homo sapien
accgcgcccggctgagtttcataat

SEQ ID NO: 1097738 - DNA, 25 bp, Homo sapien
cgcgcccggctgagtttcataattt

SEQ ID NO: 1097739 - DNA, 25 bp, Homo sapien
ccaccgcgcccggctgagtttcata

SEQ ID NO: 1097740 - DNA, 25 bp, Homo sapien
taggtgttccacccacctcggcctc

SEQ ID NO: 1097741 - DNA, 25 bp, Homo sapien
ctttagagggaagccaccacccata

SEQ ID NO: 1097742 - DNA, 25 bp, Homo sapien
caaggcattcaaggtacataagata

SEQ ID NO: 1097743 - DNA, 25 bp, Homo sapien
aaagtgtggcatttgagtaccctcc

SEQ ID NO: 1097744 - DNA, 25 bp, Homo sapien
gcaatcaactaatgggcaggaaggt

SEQ ID NO: 1097745 - DNA, 25 bp, Homo sapien
atcttcttcagtattgacatccata

SEQ ID NO: 1097746 - DNA, 25 bp, Homo sapien
tttacaatcttttactagttcaaca

SEQ ID NO: 1097747 - DNA, 25 bp, Homo sapien
tcttcttcagtattgacatccatat

SEQ ID NO: 1097748 - DNA, 25 bp, Homo sapien
tcttttactagttcaacaatcttga

SEQ ID NO: 1097749 - DNA, 25 bp, Homo sapien
tatggctcatcaagaattggctgca

SEQ ID NO: 1097750 - DNA, 25 bp, Homo sapien
ttatataaaacgcaaacttctggcc

SEQ ID NO: 1097751 - DNA, 25 bp, Homo sapien
caattgggtaattcacatatggctc

SEQ ID NO: 1097752 - DNA, 25 bp, Homo sapien
ctggccaataatccacaattgggta

SEQ ID NO: 1097753 - DNA, 25 bp, Homo sapien
agtaatcttccacggagaccatagt

SEQ ID NO: 1097754 - DNA, 25 bp, Homo sapien
tcagtaatcttccacggagaccata

SEQ ID NO: 1097755 - DNA, 25 bp, Homo sapien
cagtaatcttccacggagaccatag

SEQ ID NO: 1097756 - DNA, 25 bp, Homo sapien
aaagaggtagctctataagtaccaa

SEQ ID NO: 1097757 - DNA, 25 bp, Homo sapien
taagggattatggtcagaggtagat

SEQ ID NO: 1097758 - DNA, 25 bp, Homo sapien
cattctgttgtgcatagggtaagga

SEQ ID NO: 1097759 - DNA, 25 bp, Homo sapien
ccaactgggtacaggaggctgatga

SEQ ID NO: 1097760 - DNA, 25 bp, Homo sapien
gcagaaactgtcatggataaacacg

SEQ ID NO: 1097761 - DNA, 25 bp, Homo sapien
actagacacaatgggattttttgcc

SEQ ID NO: 1097762 - DNA, 25 bp, Homo sapien
ttttgccacattcgtattccagagc

SEQ ID NO: 1097763 - DNA, 25 bp, Homo sapien
aaaggaaagctaccctatgagaaag

SEQ ID NO: 1097764 - DNA, 25 bp, Homo sapien
attcttgcacaagggtcgtgctgat

SEQ ID NO: 1097765 - DNA, 25 bp, Homo sapien
tcttgcacaagggtcgtgctgatct

SEQ ID NO: 1097766 - DNA, 25 bp, Homo sapien
aaatatatgaagcgcttcacaaatg

SEQ ID NO: 1097767 - DNA, 25 bp, Homo sapien
ttattcttgcacaagggtcgtgctg

SEQ ID NO: 1097768 - DNA, 25 bp, Homo sapien
gatctttcacccgttgggagagccc

SEQ ID NO: 1097769 - DNA, 25 bp, Homo sapien
cacccgttgggagagccccatattt

SEQ ID NO: 1097770 - DNA, 25 bp, Homo sapien
cttgatattaaacaccgaggacaac

SEQ ID NO: 1097771 - DNA, 25 bp, Homo sapien
tgatattaaacaccgaggacaacat

SEQ ID NO: 1097772 - DNA, 25 bp, Homo sapien
caaagaagaaggatgagtccatgca

SEQ ID NO: 1097773 - DNA, 25 bp, Homo sapien
gtgaatcgagcaaagaagaaggatg

SEQ ID NO: 1097774 - DNA, 25 bp, Homo sapien
ctgtgaatcgagcaaagaagaagga

SEQ ID NO: 1097775 - DNA, 25 bp, Homo sapien
agcaaagaagaaggatgagtccatg

SEQ ID NO: 1097776 - DNA, 25 bp, Homo sapien
ccaaggtgtactaggcctggtggca

SEQ ID NO: 1097777 - DNA, 25 bp, Homo sapien
tattcattgactgagaccaggcggt

SEQ ID NO: 1097778 - DNA, 25 bp, Homo sapien
tcaatatttccacagcttcagcaag

SEQ ID NO: 1097779 - DNA, 25 bp, Homo sapien
taccagggagcggatcacaatcact

SEQ ID NO: 1097780 - DNA, 25 bp, Homo sapien
gaagatccatgcctggttccttgaa

SEQ ID NO: 1097781 - DNA, 25 bp, Homo sapien
gaccccagatgttaaaggaagctta

SEQ ID NO: 1097782 - DNA, 25 bp, Homo sapien
catgaggatccacacccagttgcta

SEQ ID NO: 1097783 - DNA, 25 bp, Homo sapien
tcagagtaatgctccaaggtccttc

SEQ ID NO: 1097784 - DNA, 25 bp, Homo sapien
cttcattactgcttgaatgtaaaat

SEQ ID NO: 1097785 - DNA, 25 bp, Homo sapien
gaaaattcagtcttgtcttcattac

SEQ ID NO: 1097786 - DNA, 25 bp, Homo sapien
taaaatataacaactttcttcttca

SEQ ID NO: 1097787 - DNA, 25 bp, Homo sapien
tcttgtcttcattactgcttgaatg

SEQ ID NO: 1097788 - DNA, 25 bp, Homo sapien
cttgggtgcttcgagtattaaagat

SEQ ID NO: 1097789 - DNA, 25 bp, Homo sapien
gtgcttcgagtattaaagatgaatt

SEQ ID NO: 1097790 - DNA, 25 bp, Homo sapien
tgggtgcttcgagtattaaagatga

SEQ ID NO: 1097791 - DNA, 25 bp, Homo sapien
gggtgcttcgagtattaaagatgaa

SEQ ID NO: 1097792 - DNA, 25 bp, Homo sapien
gaatagacagtcctcccggttcttg

SEQ ID NO: 1097793 - DNA, 25 bp, Homo sapien
gaatgtgcgacaagggatacaactc

SEQ ID NO: 1097794 - DNA, 25 bp, Homo sapien
tcttgcctcttgagactcggatggt

SEQ ID NO: 1097795 - DNA, 25 bp, Homo sapien
ttttcagggcaatagccatacggct

SEQ ID NO: 1097796 - DNA, 25 bp, Homo sapien
gaaaagacgagcttatacttacagc

SEQ ID NO: 1097797 - DNA, 25 bp, Homo sapien
gacacatcttgtaaacagtgacgac

SEQ ID NO: 1097798 - DNA, 25 bp, Homo sapien
tacagctagacactggatgacacat

SEQ ID NO: 1097799 - DNA, 25 bp, Homo sapien
cagtgacgacttacggaaaggccca

SEQ ID NO: 1097800 - DNA, 25 bp, Homo sapien
taatagtaaaggcaaatctattaaa

SEQ ID NO: 1097801 - DNA, 25 bp, Homo sapien
gtaaaggcaaatctattaaaatata

SEQ ID NO: 1097802 - DNA, 25 bp, Homo sapien
tataatgctcttcgctgggcacagt

SEQ ID NO: 1097803 - DNA, 25 bp, Homo sapien
ggagatgggagatgcttgaccccag

SEQ ID NO: 1097804 - DNA, 25 bp, Homo sapien
tggtacagatggtagggactccatg

SEQ ID NO: 1097805 - DNA, 25 bp, Homo sapien
tggtagggactccatgacaaaattt

SEQ ID NO: 1097806 - DNA, 25 bp, Homo sapien
tccagactagtttttgctaatgaat

SEQ ID NO: 1097807 - DNA, 25 bp, Homo sapien
gattttccaggtcgtcaaatctgcc

SEQ ID NO: 1097808 - DNA, 25 bp, Homo sapien
aatatgacggtgaaattcatgtata

SEQ ID NO: 1097809 - DNA, 25 bp, Homo sapien
gcagacataaattcaaagcatcata

SEQ ID NO: 1097810 - DNA, 25 bp, Homo sapien
atatgacggtgaaattcatgtatac

SEQ ID NO: 1097811 - DNA, 25 bp, Homo sapien
ttaagcagacataaattcaaagcat

SEQ ID NO: 1097812 - DNA, 25 bp, Homo sapien
gaaaaagattgagtcctgtagggcc

SEQ ID NO: 1097813 - DNA, 25 bp, Homo sapien
tgtcacagcgcttcacgcagttaca

SEQ ID NO: 1097814 - DNA, 25 bp, Homo sapien
ccaggagcccatgaaaaagattgag

SEQ ID NO: 1097815 - DNA, 25 bp, Homo sapien
cacgcagttacactttacagagctg

SEQ ID NO: 1097816 - DNA, 25 bp, Homo sapien
tcccatatgacaatcaaagcactgc

SEQ ID NO: 1097817 - DNA, 25 bp, Homo sapien
tatgacaatcaaagcactgccccac

SEQ ID NO: 1097818 - DNA, 25 bp, Homo sapien
gggcctccattcccatatgacaatc

SEQ ID NO: 1097819 - DNA, 25 bp, Homo sapien
catccccatactcccctttgctccc

SEQ ID NO: 1097820 - DNA, 25 bp, Homo sapien
tgggattaacggaagtctcagttac

SEQ ID NO: 1097821 - DNA, 25 bp, Homo sapien
gtgggattaacggaagtctcagtta

SEQ ID NO: 1097822 - DNA, 25 bp, Homo sapien
tcaggtgggattaacggaagtctca

SEQ ID NO: 1097823 - DNA, 25 bp, Homo sapien
aggtgggattaacggaagtctcagt

SEQ ID NO: 1097824 - DNA, 25 bp, Homo sapien
taaaaaatatctggtagagcttaac

SEQ ID NO: 1097825 - DNA, 25 bp, Homo sapien
ctgttttgctaaactcttgcaaaca

SEQ ID NO: 1097826 - DNA, 25 bp, Homo sapien
gctaaactcttgcaaacatgatgct

SEQ ID NO: 1097827 - DNA, 25 bp, Homo sapien
ctcttgcaaacatgatgcttttctc

SEQ ID NO: 1097828 - DNA, 25 bp, Homo sapien
ttgctaaactcttgcaaacatgatg

SEQ ID NO: 1097829 - DNA, 25 bp, Homo sapien
ccacaacaggaaggtcaatgagcaa

SEQ ID NO: 1097830 - DNA, 25 bp, Homo sapien
ccttggacatcattcgggatcatgc

SEQ ID NO: 1097831 - DNA, 25 bp, Homo sapien
caatgagcaagctaggaccttggac

SEQ ID NO: 1097832 - DNA, 25 bp, Homo sapien
aggccttggaaataactcgtgtcgc

SEQ ID NO: 1097833 - DNA, 25 bp, Homo sapien
aaaaaatagtgaccaggtctcactg

SEQ ID NO: 1097834 - DNA, 25 bp, Homo sapien
attctcggtggaccccagtggctaa

SEQ ID NO: 1097835 - DNA, 25 bp, Homo sapien
cagtggctaaaatttggagtttctt

SEQ ID NO: 1097836 - DNA, 25 bp, Homo sapien
tggaccccagtggctaaaatttgga

SEQ ID NO: 1097837 - DNA, 25 bp, Homo sapien
ctcggtggaccccagtggctaaaat

SEQ ID NO: 1097838 - DNA, 25 bp, Homo sapien
ttttaagtgcgttcgtcttccctgc

SEQ ID NO: 1097839 - DNA, 25 bp, Homo sapien
cacattgggttctctaaaaatctca

SEQ ID NO: 1097840 - DNA, 25 bp, Homo sapien
tactgatcccaagagacacattggg

SEQ ID NO: 1097841 - DNA, 25 bp, Homo sapien
tgctggactgtcttctaaaacttgt

SEQ ID NO: 1097842 - DNA, 25 bp, Homo sapien
cataaagaaaggtcttctagctaaa

SEQ ID NO: 1097843 - DNA, 25 bp, Homo sapien
agagcacaccaactgtacacacacg

SEQ ID NO: 1097844 - DNA, 25 bp, Homo sapien
tacaatgtacaaactaaggcatata

SEQ ID NO: 1097845 - DNA, 25 bp, Homo sapien
tgagaaactcataaattgtgcatac

SEQ ID NO: 1097846 - DNA, 25 bp, Homo sapien
tcaactgcttcgctgtgtgaggcat

SEQ ID NO: 1097847 - DNA, 25 bp, Homo sapien
cagggtttcctgcattcttaatggc

SEQ ID NO: 1097848 - DNA, 25 bp, Homo sapien
ggcattctgcaaatctactccagac

SEQ ID NO: 1097849 - DNA, 25 bp, Homo sapien
tgtgaggcattctgcaaatctactc

SEQ ID NO: 1097850 - DNA, 25 bp, Homo sapien
tctggttaccggtgattttgttggc

SEQ ID NO: 1097851 - DNA, 25 bp, Homo sapien
ccttgttatgtacgttaggaatgac

SEQ ID NO: 1097852 - DNA, 25 bp, Homo sapien
ttgttggccttgttatgtacgttag

SEQ ID NO: 1097853 - DNA, 25 bp, Homo sapien
gtgtcctggttctggttaccggtga

SEQ ID NO: 1097854 - DNA, 25 bp, Homo sapien
caattaaattgtgatgcctcagaga

SEQ ID NO: 1097855 - DNA, 25 bp, Homo sapien
tgtgtacttgtaattcctcgctgat

SEQ ID NO: 1097856 - DNA, 25 bp, Homo sapien
gcaattcatgagctgtttaagccca

SEQ ID NO: 1097857 - DNA, 25 bp, Homo sapien
gagttaaacaaatacctggcacctg

SEQ ID NO: 1097858 - DNA, 25 bp, Homo sapien
taaggaggaggaagtttcattggcg

SEQ ID NO: 1097859 - DNA, 25 bp, Homo sapien
cattggcggtggagcagttccttgc

SEQ ID NO: 1097860 - DNA, 25 bp, Homo sapien
ttggcggtggagcagttccttgcct

SEQ ID NO: 1097861 - DNA, 25 bp, Homo sapien
tttcattggcggtggagcagttcct

SEQ ID NO: 1097862 - DNA, 25 bp, Homo sapien
gaagctgagaactaaagcccacagt

SEQ ID NO: 1097863 - DNA, 25 bp, Homo sapien
tttgcattatcccttccgaggtggt

SEQ ID NO: 1097864 - DNA, 25 bp, Homo sapien
ccgaggtggtggctcaatcaagaca

SEQ ID NO: 1097865 - DNA, 25 bp, Homo sapien
tatcaaagactcactatgtggcagg

SEQ ID NO: 1097866 - DNA, 25 bp, Homo sapien
agctccattccgtggcagctgacat

SEQ ID NO: 1097867 - DNA, 25 bp, Homo sapien
tccattccgtggcagctgacatgat

SEQ ID NO: 1097868 - DNA, 25 bp, Homo sapien
gctccattccgtggcagctgacatg

SEQ ID NO: 1097869 - DNA, 25 bp, Homo sapien
cattccgtggcagctgacatgatat

SEQ ID NO: 1097870 - DNA, 25 bp, Homo sapien
tagaacataatcttaggtgcacacc

SEQ ID NO: 1097871 - DNA, 25 bp, Homo sapien
cccacatagataagcaagtgtgaat

SEQ ID NO: 1097872 - DNA, 25 bp, Homo sapien
caataactgggcaaatactggcctt

SEQ ID NO: 1097873 - DNA, 25 bp, Homo sapien
tttccaaaaactcacaactagcaag

SEQ ID NO: 1097874 - DNA, 25 bp, Homo sapien
tctgctccccatagttgaaaaatgt

SEQ ID NO: 1097875 - DNA, 25 bp, Homo sapien
tgctccccatagttgaaaaatgtcg

SEQ ID NO: 1097876 - DNA, 25 bp, Homo sapien
ttctgctccccatagttgaaaaatg

SEQ ID NO: 1097877 - DNA, 25 bp, Homo sapien
ctgctccccatagttgaaaaatgtc

SEQ ID NO: 1097878 - DNA, 25 bp, Homo sapien
aaacaaaatacctatgacagcgtgc

SEQ ID NO: 1097879 - DNA, 25 bp, Homo sapien
tatgcttcataatccaaatatactc

SEQ ID NO: 1097880 - DNA, 25 bp, Homo sapien
ctggccacacaggttaattttataa

SEQ ID NO: 1097881 - DNA, 25 bp, Homo sapien
cattatgatataagatgaccaggtc

SEQ ID NO: 1097882 - DNA, 25 bp, Homo sapien
cattgctaggttcttgaggacagtg

SEQ ID NO: 1097883 - DNA, 25 bp, Homo sapien
ggtgagcttaatgcattgctaggtt

SEQ ID NO: 1097884 - DNA, 25 bp, Homo sapien
ggctagcaagtattctgttttctcc

SEQ ID NO: 1097885 - DNA, 25 bp, Homo sapien
actccatgggaacacataagaatta

SEQ ID NO: 1097886 - DNA, 25 bp, Homo sapien
tttcttgagaagatctccacatttt

SEQ ID NO: 1097887 - DNA, 25 bp, Homo sapien
gatctccacattttatccccaaatg

SEQ ID NO: 1097888 - DNA, 25 bp, Homo sapien
gaagatctccacattttatccccaa

SEQ ID NO: 1097889 - DNA, 25 bp, Homo sapien
ttatccccaaatgagtacacagtcg

SEQ ID NO: 1097890 - DNA, 25 bp, Homo sapien
ttagcaatctgggtgctcctatatt

SEQ ID NO: 1097891 - DNA, 25 bp, Homo sapien
agcaatctgggtgctcctatattgg

SEQ ID NO: 1097892 - DNA, 25 bp, Homo sapien
ctttagcaatctgggtgctcctata

SEQ ID NO: 1097893 - DNA, 25 bp, Homo sapien
tgctttagcaatctgggtgctccta

SEQ ID NO: 1097894 - DNA, 25 bp, Homo sapien
gaatggtaggagctcttttttgtac

SEQ ID NO: 1097895 - DNA, 25 bp, Homo sapien
ggaatggtaggagctcttttttgta

SEQ ID NO: 1097896 - DNA, 25 bp, Homo sapien
aaggaatggtaggagctcttttttg

SEQ ID NO: 1097897 - DNA, 25 bp, Homo sapien
aggaatggtaggagctcttttttgt

SEQ ID NO: 1097898 - DNA, 25 bp, Homo sapien
tctcttctgacgaccttgggcctat

SEQ ID NO: 1097899 - DNA, 25 bp, Homo sapien
caaatatccaatgctggacgcagct

SEQ ID NO: 1097900 - DNA, 25 bp, Homo sapien
tatgccggagaagcaaaatccctgg

SEQ ID NO: 1097901 - DNA, 25 bp, Homo sapien
ggatgcttcacgctgctgactgtga

SEQ ID NO: 1097902 - DNA, 25 bp, Homo sapien
tgagacactttgatagttaacagcc

SEQ ID NO: 1097903 - DNA, 25 bp, Homo sapien
gactgaatgccaaagcagtgaacat

SEQ ID NO: 1097904 - DNA, 25 bp, Homo sapien
aaattctctacagaccgaggcctca

SEQ ID NO: 1097905 - DNA, 25 bp, Homo sapien
aatcaatcctgatcatgaacactga

SEQ ID NO: 1097906 - DNA, 25 bp, Homo sapien
tatgaattcctcacactatacaagg

SEQ ID NO: 1097907 - DNA, 25 bp, Homo sapien
tgcatcaccacagtaactgcggcta

SEQ ID NO: 1097908 - DNA, 25 bp, Homo sapien
tgcggctatgctatacttccaccaa

SEQ ID NO: 1097909 - DNA, 25 bp, Homo sapien
taagagtttggcataccagccaggc

SEQ ID NO: 1097910 - DNA, 25 bp, Homo sapien
tcaggcaacactgagccaaaaccca

SEQ ID NO: 1097911 - DNA, 25 bp, Homo sapien
tgcactggcttttgtaagattccag

SEQ ID NO: 1097912 - DNA, 25 bp, Homo sapien
agatatggaaaacccgaagcaggtt

SEQ ID NO: 1097913 - DNA, 25 bp, Homo sapien
ggaaaacccgaagcaggttcaggca

SEQ ID NO: 1097914 - DNA, 25 bp, Homo sapien
gttccagagcgtgtagctttctcca

SEQ ID NO: 1097915 - DNA, 25 bp, Homo sapien
gtagctttctccaactcacccaaag

SEQ ID NO: 1097916 - DNA, 25 bp, Homo sapien
gagcgtgtagctttctccaactcac

SEQ ID NO: 1097917 - DNA, 25 bp, Homo sapien
ttggcatcgttccagagcgtgtagc

SEQ ID NO: 1097918 - DNA, 25 bp, Homo sapien
gacattgaatactttgatgatagta

SEQ ID NO: 1097919 - DNA, 25 bp, Homo sapien
tagagtgtagagagacaatgacttg

SEQ ID NO: 1097920 - DNA, 25 bp, Homo sapien
ttaacttagtccagcctcagactgg

SEQ ID NO: 1097921 - DNA, 25 bp, Homo sapien
tctgcaagaggctaacagtatattc

SEQ ID NO: 1097922 - DNA, 25 bp, Homo sapien
aggagctggcaattttcttaaagaa

SEQ ID NO: 1097923 - DNA, 25 bp, Homo sapien
tgagaaagaacatcagcaatattat

SEQ ID NO: 1097924 - DNA, 25 bp, Homo sapien
tagtattatgagaaagaacatcagc

SEQ ID NO: 1097925 - DNA, 25 bp, Homo sapien
gaaagaacatcagcaatattataaa

SEQ ID NO: 1097926 - DNA, 25 bp, Homo sapien
ttatgagaaagaacatcagcaatat

SEQ ID NO: 1097927 - DNA, 25 bp, Homo sapien
taattaactgtgcatctggttcttt

SEQ ID NO: 1097928 - DNA, 25 bp, Homo sapien
gccagtggaggttatggaacttgcc

SEQ ID NO: 1097929 - DNA, 25 bp, Homo sapien
tttaaggcgagacatggaacacgta

SEQ ID NO: 1097930 - DNA, 25 bp, Homo sapien
cttttggaatcgacaatttaaggcg

SEQ ID NO: 1097931 - DNA, 25 bp, Homo sapien
ggaacacgtataggcaatccccaga

SEQ ID NO: 1097932 - DNA, 25 bp, Homo sapien
cagaacacaagatcaggccaggtgt

SEQ ID NO: 1097933 - DNA, 25 bp, Homo sapien
tttgctacctctatgttagggtcaa

SEQ ID NO: 1097934 - DNA, 25 bp, Homo sapien
ggctgtgtctcacttgtgttggttc

SEQ ID NO: 1097935 - DNA, 25 bp, Homo sapien
tcaaaaggacctgttttaggagatg

SEQ ID NO: 1097936 - DNA, 25 bp, Homo sapien
accacactgacaaatcagtgtgagg

SEQ ID NO: 1097937 - DNA, 25 bp, Homo sapien
tttcaagttcaataatgtgcagttc

SEQ ID NO: 1097938 - DNA, 25 bp, Homo sapien
ctttttcaagttcaataatgtgcag

SEQ ID NO: 1097939 - DNA, 25 bp, Homo sapien
ataatgtgcagttctccaggcagat

SEQ ID NO: 1097940 - DNA, 25 bp, Homo sapien
cagttctccaggcagatctgcatat

SEQ ID NO: 1097941 - DNA, 25 bp, Homo sapien
agagttcatctccaatacgcattcg

SEQ ID NO: 1097942 - DNA, 25 bp, Homo sapien
caaatatgctcatgcgtgatcggtc

SEQ ID NO: 1097943 - DNA, 25 bp, Homo sapien
ggtctttattaccagcaaggctgag

SEQ ID NO: 1097944 - DNA, 25 bp, Homo sapien
caatacgcattcgtccatctgcggc

SEQ ID NO: 1097945 - DNA, 25 bp, Homo sapien
acccatccacttcaccaaaagataa

SEQ ID NO: 1097946 - DNA, 25 bp, Homo sapien
taagttaaaaacacatgcttctcac

SEQ ID NO: 1097947 - DNA, 25 bp, Homo sapien
ctgcacccatccacttcaccaaaag

SEQ ID NO: 1097948 - DNA, 25 bp, Homo sapien
tccacttcaccaaaagataagttaa

SEQ ID NO: 1097949 - DNA, 25 bp, Homo sapien
caagtaagcagtctaacactcagtg

SEQ ID NO: 1097950 - DNA, 25 bp, Homo sapien
cagtgtctccatgatttagctcccc

SEQ ID NO: 1097951 - DNA, 25 bp, Homo sapien
taggctttaaagcacaatggtttac

SEQ ID NO: 1097952 - DNA, 25 bp, Homo sapien
ctacaagtcaaactgcctgccattg

SEQ ID NO: 1097953 - DNA, 25 bp, Homo sapien
tgtaaattctattctgagtcagagt

SEQ ID NO: 1097954 - DNA, 25 bp, Homo sapien
aatgtgggtcccattcgtggtgcta

SEQ ID NO: 1097955 - DNA, 25 bp, Homo sapien
gtcagtgttacgacccaatgtgggt

SEQ ID NO: 1097956 - DNA, 25 bp, Homo sapien
gagaagcaaccaaggtttggaagaa

SEQ ID NO: 1097957 - DNA, 25 bp, Homo sapien
ggccagctgtggcagtagttattat

SEQ ID NO: 1097958 - DNA, 25 bp, Homo sapien
caataaccaaaagaatcgagacaag

SEQ ID NO: 1097959 - DNA, 25 bp, Homo sapien
tcgagacaagttacggtaggtcttc

SEQ ID NO: 1097960 - DNA, 25 bp, Homo sapien
tggagtatttccatgtaccaagcaa

SEQ ID NO: 1097961 - DNA, 25 bp, Homo sapien
gcttgctgccacatacatagtgctg

SEQ ID NO: 1097962 - DNA, 25 bp, Homo sapien
aaagaactgagctatacaacgctga

SEQ ID NO: 1097963 - DNA, 25 bp, Homo sapien
gatgctgtacaatcactagactgga

SEQ ID NO: 1097964 - DNA, 25 bp, Homo sapien
tcttcaggatgttgcatagagccat

SEQ ID NO: 1097965 - DNA, 25 bp, Homo sapien
gacagactttcagagacaaaggcat

SEQ ID NO: 1097966 - DNA, 25 bp, Homo sapien
ttttggtgacttcttccatacagaa

SEQ ID NO: 1097967 - DNA, 25 bp, Homo sapien
gggcagtcttaataatggcagatgc

SEQ ID NO: 1097968 - DNA, 25 bp, Homo sapien
tcttccatacagaatctgattgttt

SEQ ID NO: 1097969 - DNA, 25 bp, Homo sapien
tgatgaaaaccagcttgacctttga

SEQ ID NO: 1097970 - DNA, 25 bp, Homo sapien
gattagtgccctagaaagtaggccc

SEQ ID NO: 1097971 - DNA, 25 bp, Homo sapien
caaagtcgcatctgtggtactgaga

SEQ ID NO: 1097972 - DNA, 25 bp, Homo sapien
catgaaggtattaataggcagggcc

SEQ ID NO: 1097973 - DNA, 25 bp, Homo sapien
aagggagcccctcctgttacgtgag

SEQ ID NO: 1097974 - DNA, 25 bp, Homo sapien
cataacatttgaccgcttaccaggt

SEQ ID NO: 1097975 - DNA, 25 bp, Homo sapien
gcattctgacctacacaactgtgag

SEQ ID NO: 1097976 - DNA, 25 bp, Homo sapien
catggtcaccggaaatataactaga

SEQ ID NO: 1097977 - DNA, 25 bp, Homo sapien
cctaggaagtcagagattggaagca

SEQ ID NO: 1097978 - DNA, 25 bp, Homo sapien
gagccatcaagccgggtgaaacttt

SEQ ID NO: 1097979 - DNA, 25 bp, Homo sapien
gtgagccatcaagccgggtgaaact

SEQ ID NO: 1097980 - DNA, 25 bp, Homo sapien
ccatcaagccgggtgaaactttcct

SEQ ID NO: 1097981 - DNA, 25 bp, Homo sapien
gccatcaagccgggtgaaactttcc

SEQ ID NO: 1097982 - DNA, 25 bp, Homo sapien
gaaagggagtaacggccatctgatt

SEQ ID NO: 1097983 - DNA, 25 bp, Homo sapien
gtaacggccatctgattgactgcat

SEQ ID NO: 1097984 - DNA, 25 bp, Homo sapien
gccatctgattgactgcatcctcgt

SEQ ID NO: 1097985 - DNA, 25 bp, Homo sapien
tgatggcactggaaagggagtaacg

SEQ ID NO: 1097986 - DNA, 25 bp, Homo sapien
attgtatcttctatgcgctgctcca

SEQ ID NO: 1097987 - DNA, 25 bp, Homo sapien
atctgacagggtcccatggcaaccc

SEQ ID NO: 1097988 - DNA, 25 bp, Homo sapien
tgtatcttctatgcgctgctccaag

SEQ ID NO: 1097989 - DNA, 25 bp, Homo sapien
tgacagggtcccatggcaacccaga

SEQ ID NO: 1097990 - DNA, 25 bp, Homo sapien
ccattttgtgtactgccactgtgaa

SEQ ID NO: 1097991 - DNA, 25 bp, Homo sapien
ttgtgtactgccactgtgaagccat

SEQ ID NO: 1097992 - DNA, 25 bp, Homo sapien
cagtccataatgttaaaaagcaatt

SEQ ID NO: 1097993 - DNA, 25 bp, Homo sapien
gacaattaacaaaggtaggatggag

SEQ ID NO: 1097994 - DNA, 25 bp, Homo sapien
caaaggtaggatggagttcctatga

SEQ ID NO: 1097995 - DNA, 25 bp, Homo sapien
actttagtagttctacaagacaatt

SEQ ID NO: 1097996 - DNA, 25 bp, Homo sapien
acgcccggcctagcctgctttattt

SEQ ID NO: 1097997 - DNA, 25 bp, Homo sapien
cacgcccggcctagcctgctttatt

SEQ ID NO: 1097998 - DNA, 25 bp, Homo sapien
gcccggcctagcctgctttatttta

SEQ ID NO: 1097999 - DNA, 25 bp, Homo sapien
accacgcccggcctagcctgcttta

SEQ ID NO: 1098000 - DNA, 25 bp, Homo sapien
gaggctgggagttctactagagggc

SEQ ID NO: 1098001 - DNA, 25 bp, Homo sapien
gataatataagtacaatcacaacaa

SEQ ID NO: 1098002 - DNA, 25 bp, Homo sapien
gagttctactagagggctgtgataa

SEQ ID NO: 1098003 - DNA, 25 bp, Homo sapien
aacccatcatgttgtatatgataaa

SEQ ID NO: 1098004 - DNA, 25 bp, Homo sapien
ctctccttcctctaaattgtaacat

SEQ ID NO: 1098005 - DNA, 25 bp, Homo sapien
catctctccttcctctaaattgtaa

SEQ ID NO: 1098006 - DNA, 25 bp, Homo sapien
acatctctccttcctctaaattgta

SEQ ID NO: 1098007 - DNA, 25 bp, Homo sapien
ctgggggacatctctccttcctcta

SEQ ID NO: 1098008 - DNA, 25 bp, Homo sapien
ctccctcgaattgtacagatactca

SEQ ID NO: 1098009 - DNA, 25 bp, Homo sapien
actccctcgaattgtacagatactc

SEQ ID NO: 1098010 - DNA, 25 bp, Homo sapien
cctcgaattgtacagatactcaatg

SEQ ID NO: 1098011 - DNA, 25 bp, Homo sapien
tccctcgaattgtacagatactcaa

SEQ ID NO: 1098012 - DNA, 25 bp, Homo sapien
taataccaacttcgacgctgccatc

SEQ ID NO: 1098013 - DNA, 25 bp, Homo sapien
cactttcaggcaattgtttaatacc

SEQ ID NO: 1098014 - DNA, 25 bp, Homo sapien
tcttcctcactactaataggttcgg

SEQ ID NO: 1098015 - DNA, 25 bp, Homo sapien
taataggttcggtgccgctctgatc

SEQ ID NO: 1098016 - DNA, 25 bp, Homo sapien
aactgcctctcttctaatgccctag

SEQ ID NO: 1098017 - DNA, 25 bp, Homo sapien
ctagcccctggataagtttaagtat

SEQ ID NO: 1098018 - DNA, 25 bp, Homo sapien
tatcttttgcttggaatcaatggaa

SEQ ID NO: 1098019 - DNA, 25 bp, Homo sapien
tagggtacataaggagaaagagttc

SEQ ID NO: 1098020 - DNA, 25 bp, Homo sapien
gagttagatgacactcctaagtgat

SEQ ID NO: 1098021 - DNA, 25 bp, Homo sapien
aaaatcagagttagatgacactcct

SEQ ID NO: 1098022 - DNA, 25 bp, Homo sapien
tcagagttagatgacactcctaagt

SEQ ID NO: 1098023 - DNA, 25 bp, Homo sapien
gttagatgacactcctaagtgatta

SEQ ID NO: 1098024 - DNA, 25 bp, Homo sapien
taaactgctagtactcttcatgcca

SEQ ID NO: 1098025 - DNA, 25 bp, Homo sapien
ggtctcaggtcccatgtagggttta

SEQ ID NO: 1098026 - DNA, 25 bp, Homo sapien
taagctcactttctaggatatgcaa

SEQ ID NO: 1098027 - DNA, 25 bp, Homo sapien
catgagtggcccattacaatttcca

SEQ ID NO: 1098028 - DNA, 25 bp, Homo sapien
taatacttcattacaagacaatgac

SEQ ID NO: 1098029 - DNA, 25 bp, Homo sapien
gaatgagtccatgagggaaggcatt

SEQ ID NO: 1098030 - DNA, 25 bp, Homo sapien
gatgtactgtctatcttccttcccc

SEQ ID NO: 1098031 - DNA, 25 bp, Homo sapien
catttatgtatatgttaggttgaac

SEQ ID NO: 1098032 - DNA, 25 bp, Homo sapien
tagccacggcagtgaccttgggtcg

SEQ ID NO: 1098033 - DNA, 25 bp, Homo sapien
cagagctgaggtaactgcggcacag

SEQ ID NO: 1098034 - DNA, 25 bp, Homo sapien
aaaaaatcatggcagtagccacggc

SEQ ID NO: 1098035 - DNA, 25 bp, Homo sapien
tagccagcaatgacatagtgattcc

SEQ ID NO: 1098036 - DNA, 25 bp, Homo sapien
actacacgagcaacaacacactcgg

SEQ ID NO: 1098037 - DNA, 25 bp, Homo sapien
ctgggactacacgagcaacaacaca

SEQ ID NO: 1098038 - DNA, 25 bp, Homo sapien
aattggcagagctcgttatagcgtc

SEQ ID NO: 1098039 - DNA, 25 bp, Homo sapien
gagctcgttatagcgtcaaacttct

SEQ ID NO: 1098040 - DNA, 25 bp, Homo sapien
tataacgcacgcaaccccagaagag

SEQ ID NO: 1098041 - DNA, 25 bp, Homo sapien
ggtctataacgcacgcaaccccaga

SEQ ID NO: 1098042 - DNA, 25 bp, Homo sapien
ttggaacccggtctataacgcacgc

SEQ ID NO: 1098043 - DNA, 25 bp, Homo sapien
acgcaaccccagaagagcaaaacct

SEQ ID NO: 1098044 - DNA, 25 bp, Homo sapien
gagaggtgaacacaagatatttgca

SEQ ID NO: 1098045 - DNA, 25 bp, Homo sapien
caacctcctgtcaagtaataaaaga

SEQ ID NO: 1098046 - DNA, 25 bp, Homo sapien
gatttcaggttgcatgacactccac

SEQ ID NO: 1098047 - DNA, 25 bp, Homo sapien
ttttagcagacttgctatgttggcc

SEQ ID NO: 1098048 - DNA, 25 bp, Homo sapien
gattctgtcagtggaaagctgtgcc

SEQ ID NO: 1098049 - DNA, 25 bp, Homo sapien
agaaataggaccaaggtaactgctc

SEQ ID NO: 1098050 - DNA, 25 bp, Homo sapien
gaagagtctggtagtgaagcaccag

SEQ ID NO: 1098051 - DNA, 25 bp, Homo sapien
ggagtctagaaataggaccaaggta

SEQ ID NO: 1098052 - DNA, 25 bp, Homo sapien
gtatgatgaagctggtgctaatggt

SEQ ID NO: 1098053 - DNA, 25 bp, Homo sapien
ggtgctaatggtatctcttgtgaac

SEQ ID NO: 1098054 - DNA, 25 bp, Homo sapien
tctcttgtgaactgaaggagacttt

SEQ ID NO: 1098055 - DNA, 25 bp, Homo sapien
tgaagctggtgctaatggtatctct

SEQ ID NO: 1098056 - DNA, 25 bp, Homo sapien
acacgttgcggggtccactgacaga

SEQ ID NO: 1098057 - DNA, 25 bp, Homo sapien
cccacaatgctgagaccaagccctg

SEQ ID NO: 1098058 - DNA, 25 bp, Homo sapien
cgtcccttggatatttctataatca

SEQ ID NO: 1098059 - DNA, 25 bp, Homo sapien
tccagggacaatgggacacgttgcg

SEQ ID NO: 1098060 - DNA, 25 bp, Homo sapien
tactttttatctacaattccattaa

SEQ ID NO: 1098061 - DNA, 25 bp, Homo sapien
tgcctcggttaccatgctggcctga

SEQ ID NO: 1098062 - DNA, 25 bp, Homo sapien
ctgatgtatactttttatctacaat

SEQ ID NO: 1098063 - DNA, 25 bp, Homo sapien
ctgcctcggttaccatgctggcctg

SEQ ID NO: 1098064 - DNA, 25 bp, Homo sapien
caggaaacactaatattctacaccg

SEQ ID NO: 1098065 - DNA, 25 bp, Homo sapien
caataaaaagtcaatcatcccagga

SEQ ID NO: 1098066 - DNA, 25 bp, Homo sapien
tatgagtagatatgaaaatggtcag

SEQ ID NO: 1098067 - DNA, 25 bp, Homo sapien
taatattctacaccgacttctaaaa

SEQ ID NO: 1098068 - DNA, 25 bp, Homo sapien
caaagtcagattaacagcggcaaaa

SEQ ID NO: 1098069 - DNA, 25 bp, Homo sapien
taggctggacgtgctgatgaaattc

SEQ ID NO: 1098070 - DNA, 25 bp, Homo sapien
tattgaagacccaagagcagcacag

SEQ ID NO: 1098071 - DNA, 25 bp, Homo sapien
gacacatctcgttcaggtattccaa

SEQ ID NO: 1098072 - DNA, 25 bp, Homo sapien
atgtagtggtgcaataaaagtttac

SEQ ID NO: 1098073 - DNA, 25 bp, Homo sapien
tatgctgggaagagtactggctatg

SEQ ID NO: 1098074 - DNA, 25 bp, Homo sapien
tgagccagtttttctgcctctgcaa

SEQ ID NO: 1098075 - DNA, 25 bp, Homo sapien
tggctatggccagataaacctgtgt

SEQ ID NO: 1098076 - DNA, 25 bp, Homo sapien
tctatcaaggttgccagaggaattt

SEQ ID NO: 1098077 - DNA, 25 bp, Homo sapien
gccgtaaaccaacgagggctgataa

SEQ ID NO: 1098078 - DNA, 25 bp, Homo sapien
ggctgataatatggcggaggtggca

SEQ ID NO: 1098079 - DNA, 25 bp, Homo sapien
tggcaaaatcctcaatctagtgctg

SEQ ID NO: 1098080 - DNA, 25 bp, Homo sapien
gacagccatgtcttctacacagtag

SEQ ID NO: 1098081 - DNA, 25 bp, Homo sapien
tgttcaagctgccaacaggtagata

SEQ ID NO: 1098082 - DNA, 25 bp, Homo sapien
ggcttaattacactgcttgcaggca

SEQ ID NO: 1098083 - DNA, 25 bp, Homo sapien
tatgtcttattaccctgcattaggg

SEQ ID NO: 1098084 - DNA, 25 bp, Homo sapien
ttaactaagggtctcctgtgggctg

SEQ ID NO: 1098085 - DNA, 25 bp, Homo sapien
aaatggagtaagacaccaagcttct

SEQ ID NO: 1098086 - DNA, 25 bp, Homo sapien
aacttctgtcacaggatgatgcagc

SEQ ID NO: 1098087 - DNA, 25 bp, Homo sapien
ttgcccttcaacttctgtcacagga

SEQ ID NO: 1098088 - DNA, 25 bp, Homo sapien
gcccttcaacttctgtcacaggatg

SEQ ID NO: 1098089 - DNA, 25 bp, Homo sapien
tcaccagatgctggctccatgctct

SEQ ID NO: 1098090 - DNA, 25 bp, Homo sapien
ttctggtgccaagtccagagtaggc

SEQ ID NO: 1098091 - DNA, 25 bp, Homo sapien
tgtgagtcaccactacgtaagttca

SEQ ID NO: 1098092 - DNA, 25 bp, Homo sapien
catccttgatggaagccttcaggac

SEQ ID NO: 1098093 - DNA, 25 bp, Homo sapien
cctttaaggcgtgattgggtaatga

SEQ ID NO: 1098094 - DNA, 25 bp, Homo sapien
ttaccttcagcttttcagtcctatt

SEQ ID NO: 1098095 - DNA, 25 bp, Homo sapien
cttcatagacttcatggataactat

SEQ ID NO: 1098096 - DNA, 25 bp, Homo sapien
tagacttcatggataactatagcat

SEQ ID NO: 1098097 - DNA, 25 bp, Homo sapien
ctaatatctggtcaccagcccaaag

SEQ ID NO: 1098098 - DNA, 25 bp, Homo sapien
ctctaatatctggtcaccagcccaa

SEQ ID NO: 1098099 - DNA, 25 bp, Homo sapien
cagaacgcctggcatcgccttctcc

SEQ ID NO: 1098100 - DNA, 25 bp, Homo sapien
aacgcctggcatcgccttctccttc

SEQ ID NO: 1098101 - DNA, 25 bp, Homo sapien
gaacgcctggcatcgccttctcctt

SEQ ID NO: 1098102 - DNA, 25 bp, Homo sapien
agaacgcctggcatcgccttctcct

SEQ ID NO: 1098103 - DNA, 25 bp, Homo sapien
ctctatgggttgaaggtgaactttc

SEQ ID NO: 1098104 - DNA, 25 bp, Homo sapien
tgggttgaaggtgaactttctaagc

SEQ ID NO: 1098105 - DNA, 25 bp, Homo sapien
tttctaagcctctaaatactgttcg

SEQ ID NO: 1098106 - DNA, 25 bp, Homo sapien
tctaaatactgttcgaaaggcccta

SEQ ID NO: 1098107 - DNA, 25 bp, Homo sapien
ttacacagctagcaggtggaggagc

SEQ ID NO: 1098108 - DNA, 25 bp, Homo sapien
cagatggtagagtgcttgagctccc

SEQ ID NO: 1098109 - DNA, 25 bp, Homo sapien
tgattccctcaaggttgcagctagg

SEQ ID NO: 1098110 - DNA, 25 bp, Homo sapien
cacagaggtttagggacttgaccca

SEQ ID NO: 1098111 - DNA, 25 bp, Homo sapien
ctgagtttctgggactgcatgtgtg

SEQ ID NO: 1098112 - DNA, 25 bp, Homo sapien
gcatgaatgctggcttactgcagcc

SEQ ID NO: 1098113 - DNA, 25 bp, Homo sapien
cagtggcatgaatgctggcttactg

SEQ ID NO: 1098114 - DNA, 25 bp, Homo sapien
taaattctggagagatgaggtcttg

SEQ ID NO: 1098115 - DNA, 25 bp, Homo sapien
tgaccacaagcagtatgagctgctt

SEQ ID NO: 1098116 - DNA, 25 bp, Homo sapien
gaccacaagcagtatgagctgcttt

SEQ ID NO: 1098117 - DNA, 25 bp, Homo sapien
tataaaggagatggcccttaaaata

SEQ ID NO: 1098118 - DNA, 25 bp, Homo sapien
ttgaatataaaggagatggccctta

SEQ ID NO: 1098119 - DNA, 25 bp, Homo sapien
ctggaacaatgggcatcctgagctg

SEQ ID NO: 1098120 - DNA, 25 bp, Homo sapien
tctctgtctgctgaatctccttgat

SEQ ID NO: 1098121 - DNA, 25 bp, Homo sapien
gaacaatgggcatcctgagctgggc

SEQ ID NO: 1098122 - DNA, 25 bp, Homo sapien
gctgctgatggcagaggtctctgcc

SEQ ID NO: 1098123 - DNA, 25 bp, Homo sapien
gcttcttcgtggctggagttcctca

SEQ ID NO: 1098124 - DNA, 25 bp, Homo sapien
cggtagtgtgcctcatctctataca

SEQ ID NO: 1098125 - DNA, 25 bp, Homo sapien
tgcctcagggctgtgatggcttctt

SEQ ID NO: 1098126 - DNA, 25 bp, Homo sapien
agttctcctcatcccggtagtgtgc

SEQ ID NO: 1098127 - DNA, 25 bp, Homo sapien
cagtatcacgaaaagcaatgttcca

SEQ ID NO: 1098128 - DNA, 25 bp, Homo sapien
gaccttgctcagaaatatgacccat

SEQ ID NO: 1098129 - DNA, 25 bp, Homo sapien
tatttcaaaagagtagcctggccac

SEQ ID NO: 1098130 - DNA, 25 bp, Homo sapien
tcagagctctggatgaaaaaggcag

SEQ ID NO: 1098131 - DNA, 25 bp, Homo sapien
ccaggtatacgcatgtgtcaaaaca

SEQ ID NO: 1098132 - DNA, 25 bp, Homo sapien
cactaggctagtcaccagaggtctg

SEQ ID NO: 1098133 - DNA, 25 bp, Homo sapien
tgctgtaaataaaaccgcaccaggt

SEQ ID NO: 1098134 - DNA, 25 bp, Homo sapien
cctggaaatcctatagccctgttgg

SEQ ID NO: 1098135 - DNA, 25 bp, Homo sapien
ctgaatcaatctcccatccaggtct

SEQ ID NO: 1098136 - DNA, 25 bp, Homo sapien
ggctccgcctttcacgatgtcagaa

SEQ ID NO: 1098137 - DNA, 25 bp, Homo sapien
agaaataaacactccgcttccattt

SEQ ID NO: 1098138 - DNA, 25 bp, Homo sapien
taagatctgatctccctgaatcaat

SEQ ID NO: 1098139 - DNA, 25 bp, Homo sapien
cactggacttcagttgtgccagctg

SEQ ID NO: 1098140 - DNA, 25 bp, Homo sapien
ccactggacttcagttgtgccagct

SEQ ID NO: 1098141 - DNA, 25 bp, Homo sapien
ctgggtaaaaagcagcctagcaact

SEQ ID NO: 1098142 - DNA, 25 bp, Homo sapien
ggttccctttcattctgttagtcaa

SEQ ID NO: 1098143 - DNA, 25 bp, Homo sapien
gatggatacttagaattctcacaag

SEQ ID NO: 1098144 - DNA, 25 bp, Homo sapien
tggagggcccatctcatcaaatgca

SEQ ID NO: 1098145 - DNA, 25 bp, Homo sapien
gaaagcaacaggcatagccctagag

SEQ ID NO: 1098146 - DNA, 25 bp, Homo sapien
ttccaatctctagctgcacaagtcc

SEQ ID NO: 1098147 - DNA, 25 bp, Homo sapien
ctgtgatgtcgtccttgcggaggtc

SEQ ID NO: 1098148 - DNA, 25 bp, Homo sapien
cggagtcttccaatctctagctgca

SEQ ID NO: 1098149 - DNA, 25 bp, Homo sapien
gtccaggaaccagctcggagtcttc

SEQ ID NO: 1098150 - DNA, 25 bp, Homo sapien
agtctgatgagaagccatcgacaac

SEQ ID NO: 1098151 - DNA, 25 bp, Homo sapien
tagagagaaaagagcttccaagaaa

SEQ ID NO: 1098152 - DNA, 25 bp, Homo sapien
cagctgtgtacatgcgtgcataggc

SEQ ID NO: 1098153 - DNA, 25 bp, Homo sapien
catgaaagttcactaaacttggtgc

SEQ ID NO: 1098154 - DNA, 25 bp, Homo sapien
tttggagtgagattcaatggaacct

SEQ ID NO: 1098155 - DNA, 25 bp, Homo sapien
taccttacctatcgatcagtccaaa

SEQ ID NO: 1098156 - DNA, 25 bp, Homo sapien
tgctcacatacatctctcaagaggg

SEQ ID NO: 1098157 - DNA, 25 bp, Homo sapien
aaaattatgaagatgcggctgggcg

SEQ ID NO: 1098158 - DNA, 25 bp, Homo sapien
taacagaaaatcgtgaggaggccag

SEQ ID NO: 1098159 - DNA, 25 bp, Homo sapien
tatggtttcaatcaccaaggtggag

SEQ ID NO: 1098160 - DNA, 25 bp, Homo sapien
tagtgtgccaattactgatgtcacc

SEQ ID NO: 1098161 - DNA, 25 bp, Homo sapien
tgtgtgcagacactgacttgacccc

SEQ ID NO: 1098162 - DNA, 25 bp, Homo sapien
gccagtgatgacaggagcgaaggag

SEQ ID NO: 1098163 - DNA, 25 bp, Homo sapien
ccagtgatgacaggagcgaaggagg

SEQ ID NO: 1098164 - DNA, 25 bp, Homo sapien
cagtgatgacaggagcgaaggaggg

SEQ ID NO: 1098165 - DNA, 25 bp, Homo sapien
gatctgaaactctttttgtgccaac

SEQ ID NO: 1098166 - DNA, 25 bp, Homo sapien
tctgggaaggatctgaaactctttt

SEQ ID NO: 1098167 - DNA, 25 bp, Homo sapien
tttctgggaaggatctgaaactctt

SEQ ID NO: 1098168 - DNA, 25 bp, Homo sapien
gaaggatctgaaactctttttgtgc

SEQ ID NO: 1098169 - DNA, 25 bp, Homo sapien
tgctctgggtgtgtccgtgtaatac

SEQ ID NO: 1098170 - DNA, 25 bp, Homo sapien
ttgctctgggtgtgtccgtgtaata

SEQ ID NO: 1098171 - DNA, 25 bp, Homo sapien
tttgctctgggtgtgtccgtgtaat

SEQ ID NO: 1098172 - DNA, 25 bp, Homo sapien
aacagtccttggttccatatctgtg

SEQ ID NO: 1098173 - DNA, 25 bp, Homo sapien
caacagtccttggttccatatctgt

SEQ ID NO: 1098174 - DNA, 25 bp, Homo sapien
acagtccttggttccatatctgtgc

SEQ ID NO: 1098175 - DNA, 25 bp, Homo sapien
tcaacagtccttggttccatatctg

SEQ ID NO: 1098176 - DNA, 25 bp, Homo sapien
cttctgtgtccgtgcggccactccg

SEQ ID NO: 1098177 - DNA, 25 bp, Homo sapien
gggatatctcctaagggacttcctc

SEQ ID NO: 1098178 - DNA, 25 bp, Homo sapien
cctccagcaatactgattccaaggg

SEQ ID NO: 1098179 - DNA, 25 bp, Homo sapien
tccgctagcctgaatcatggcaata

SEQ ID NO: 1098180 - DNA, 25 bp, Homo sapien
gttagtctttcaaccagttctctcg

SEQ ID NO: 1098181 - DNA, 25 bp, Homo sapien
tcagcctgggtctctgatggctact

SEQ ID NO: 1098182 - DNA, 25 bp, Homo sapien
cacatattgttagtctttcaaccag

SEQ ID NO: 1098183 - DNA, 25 bp, Homo sapien
gctactggaattccaactttaaaca

SEQ ID NO: 1098184 - DNA, 25 bp, Homo sapien
gcgttcttcagcagattaaccacat

SEQ ID NO: 1098185 - DNA, 25 bp, Homo sapien
ctgcaggataatgcgcccgtaggcg

SEQ ID NO: 1098186 - DNA, 25 bp, Homo sapien
atccgcgtgagacagcccatccaaa

SEQ ID NO: 1098187 - DNA, 25 bp, Homo sapien
caaaggttgcccgttaatgctgaca

SEQ ID NO: 1098188 - DNA, 25 bp, Homo sapien
cagcacttgggcagttcagtaacag

SEQ ID NO: 1098189 - DNA, 25 bp, Homo sapien
catgctcactacctgtatgggtggc

SEQ ID NO: 1098190 - DNA, 25 bp, Homo sapien
cagctgcgtgctccgttgatcgcaa

SEQ ID NO: 1098191 - DNA, 25 bp, Homo sapien
tacgcgtgacaatttaacagtgttg

SEQ ID NO: 1098192 - DNA, 25 bp, Homo sapien
catctgaagggctaaaatataagca

SEQ ID NO: 1098193 - DNA, 25 bp, Homo sapien
ccacagctgataaacaattgtctgc

SEQ ID NO: 1098194 - DNA, 25 bp, Homo sapien
tgtgcctctgaacaatacagctggg

SEQ ID NO: 1098195 - DNA, 25 bp, Homo sapien
tcaatctcagagacatctgaagggc

SEQ ID NO: 1098196 - DNA, 25 bp, Homo sapien
tacctctgcagacctatggtaagca

SEQ ID NO: 1098197 - DNA, 25 bp, Homo sapien
tcactgccagtatgctgcctctcag

SEQ ID NO: 1098198 - DNA, 25 bp, Homo sapien
cattaatgaaactcactgccagtat

SEQ ID NO: 1098199 - DNA, 25 bp, Homo sapien
cagacctatggtaagcatacatttc

SEQ ID NO: 1098200 - DNA, 25 bp, Homo sapien
tgggctttattctttatacctataa

SEQ ID NO: 1098201 - DNA, 25 bp, Homo sapien
atggggtatcataccatgttgccca

SEQ ID NO: 1098202 - DNA, 25 bp, Homo sapien
gagatggggtatcataccatgttgc

SEQ ID NO: 1098203 - DNA, 25 bp, Homo sapien
tgtagagatggggtatcataccatg

SEQ ID NO: 1098204 - DNA, 25 bp, Homo sapien
tttgtagagatggggtatcatacca

SEQ ID NO: 1098205 - DNA, 25 bp, Homo sapien
tgtccactgactccctactctaaga

SEQ ID NO: 1098206 - DNA, 25 bp, Homo sapien
gaaatgtactatcttggtgtccact

SEQ ID NO: 1098207 - DNA, 25 bp, Homo sapien
gagatgaaaatttagctcgccaaac

SEQ ID NO: 1098208 - DNA, 25 bp, Homo sapien
gccctccctagaagcacattgaact

SEQ ID NO: 1098209 - DNA, 25 bp, Homo sapien
aaatatagtatagctctgggagtcc

SEQ ID NO: 1098210 - DNA, 25 bp, Homo sapien
gggcacagctgcctaaaatgctaaa

SEQ ID NO: 1098211 - DNA, 25 bp, Homo sapien
tgccagcaatgcaaagctcgacttg

SEQ ID NO: 1098212 - DNA, 25 bp, Homo sapien
ttctcactgcacaaatacagaggga

SEQ ID NO: 1098213 - DNA, 25 bp, Homo sapien
tgttcagcagtgggcgaaccaaggt

SEQ ID NO: 1098214 - DNA, 25 bp, Homo sapien
ctatggcgcttatattggtatctgc

SEQ ID NO: 1098215 - DNA, 25 bp, Homo sapien
ttttcaagctgagctgctatggcgc

SEQ ID NO: 1098216 - DNA, 25 bp, Homo sapien
gaaccaaggtggtagcctgtagaca

SEQ ID NO: 1098217 - DNA, 25 bp, Homo sapien
gaacaactttaactgcgatgactgg

SEQ ID NO: 1098218 - DNA, 25 bp, Homo sapien
cacaataaagcagcgtgcacctggg

SEQ ID NO: 1098219 - DNA, 25 bp, Homo sapien
gaactcatgtggtggaattaagcct

SEQ ID NO: 1098220 - DNA, 25 bp, Homo sapien
tgcacctgggctatacatccgtggt

SEQ ID NO: 1098221 - DNA, 25 bp, Homo sapien
agttctcttaaaactggctccagtt

SEQ ID NO: 1098222 - DNA, 25 bp, Homo sapien
tgcaccactatgctggatccagttc

SEQ ID NO: 1098223 - DNA, 25 bp, Homo sapien
gagttatgccccatatccatggttt

SEQ ID NO: 1098224 - DNA, 25 bp, Homo sapien
tcttaagcttaagcatcagcttctc

SEQ ID NO: 1098225 - DNA, 25 bp, Homo sapien
ttcagctggttcacattgttaccag

SEQ ID NO: 1098226 - DNA, 25 bp, Homo sapien
agacatccatagttactgctgacga

SEQ ID NO: 1098227 - DNA, 25 bp, Homo sapien
ttactgtttgtttacagcagacatc

SEQ ID NO: 1098228 - DNA, 25 bp, Homo sapien
accagttgtttgttgatgtacttac

SEQ ID NO: 1098229 - DNA, 25 bp, Homo sapien
ttctctcttagaaacaacatggcta

SEQ ID NO: 1098230 - DNA, 25 bp, Homo sapien
tcatccagtgtggaagtcttctctc

SEQ ID NO: 1098231 - DNA, 25 bp, Homo sapien
cctatgtgggctcccagtaatttaa

SEQ ID NO: 1098232 - DNA, 25 bp, Homo sapien
ctaagtttaggtgatgccaatttct

SEQ ID NO: 1098233 - DNA, 25 bp, Homo sapien
cagaggtagcgtgtctcctagtgtg

SEQ ID NO: 1098234 - DNA, 25 bp, Homo sapien
taaacttactgctgacagctgaagg

SEQ ID NO: 1098235 - DNA, 25 bp, Homo sapien
catccttgaagcatgtgcatggaga

SEQ ID NO: 1098236 - DNA, 25 bp, Homo sapien
aacatcagctcgcagctcaggaaac

SEQ ID NO: 1098237 - DNA, 25 bp, Homo sapien
tacagtcttgacataaattggcagg

SEQ ID NO: 1098238 - DNA, 25 bp, Homo sapien
ctttgcaaatacagtcttgacataa

SEQ ID NO: 1098239 - DNA, 25 bp, Homo sapien
acataaattggcaggtctccatggg

SEQ ID NO: 1098240 - DNA, 25 bp, Homo sapien
tcttgacataaattggcaggtctcc

SEQ ID NO: 1098241 - DNA, 25 bp, Homo sapien
tatcatgaagtgaacgggtgactgc

SEQ ID NO: 1098242 - DNA, 25 bp, Homo sapien
cagcaggccagcagaacgtgttaaa

SEQ ID NO: 1098243 - DNA, 25 bp, Homo sapien
tagctgtatgttctggtgccccgtc

SEQ ID NO: 1098244 - DNA, 25 bp, Homo sapien
tctggtgccatcaaaaggtgtctgg

SEQ ID NO: 1098245 - DNA, 25 bp, Homo sapien
catttttaggtgtgccattctgtaa

SEQ ID NO: 1098246 - DNA, 25 bp, Homo sapien
caatatctattccttacaatgtttc

SEQ ID NO: 1098247 - DNA, 25 bp, Homo sapien
tgtttctacttctatgggtgcttcc

SEQ ID NO: 1098248 - DNA, 25 bp, Homo sapien
cattctgtaagtaacgaaatacatg

SEQ ID NO: 1098249 - DNA, 25 bp, Homo sapien
ctcaccaaagtaaatcttataataa

SEQ ID NO: 1098250 - DNA, 25 bp, Homo sapien
gaaggacttgacagcctattagtca

SEQ ID NO: 1098251 - DNA, 25 bp, Homo sapien
agtgatcattcgcaggcactttggg

SEQ ID NO: 1098252 - DNA, 25 bp, Homo sapien
tacgcccaaagtgccagtgatcatt

SEQ ID NO: 1098253 - DNA, 25 bp, Homo sapien
gcactttgggtgtgtaggagttata

SEQ ID NO: 1098254 - DNA, 25 bp, Homo sapien
ttttaagaaagtaatgtgtcaactg

SEQ ID NO: 1098255 - DNA, 25 bp, Homo sapien
taaattttacatgctaagatttaag

SEQ ID NO: 1098256 - DNA, 25 bp, Homo sapien
aaaaagtattcgaaatcaggtctat

SEQ ID NO: 1098257 - DNA, 25 bp, Homo sapien
aaatcagaattactaggcaaagttg

SEQ ID NO: 1098258 - DNA, 25 bp, Homo sapien
cctcgttttaatcggccgtcatctg

SEQ ID NO: 1098259 - DNA, 25 bp, Homo sapien
taacagctaaaatctgatcccctcg

SEQ ID NO: 1098260 - DNA, 25 bp, Homo sapien
aatctgatcccctcgttttaatcgg

SEQ ID NO: 1098261 - DNA, 25 bp, Homo sapien
cttccagggtctcgccattaacagc

SEQ ID NO: 1098262 - DNA, 25 bp, Homo sapien
ctctggtgttttagaatggcgactg

SEQ ID NO: 1098263 - DNA, 25 bp, Homo sapien
atgacagcacagttaaggttacagt

SEQ ID NO: 1098264 - DNA, 25 bp, Homo sapien
tggcgactgcttgctcatgagtaac

SEQ ID NO: 1098265 - DNA, 25 bp, Homo sapien
agaatggcgactgcttgctcatgag

SEQ ID NO: 1098266 - DNA, 25 bp, Homo sapien
tagaaatcaacctcgccaacaggtg

SEQ ID NO: 1098267 - DNA, 25 bp, Homo sapien
tctatcttgtgatcaggcccgaggc

SEQ ID NO: 1098268 - DNA, 25 bp, Homo sapien
gggtgcttttcatacccactcagaa

SEQ ID NO: 1098269 - DNA, 25 bp, Homo sapien
tgcaaaacaggtagactcatttaag

SEQ ID NO: 1098270 - DNA, 25 bp, Homo sapien
aatgatgcctgccaactgaaatgcc

SEQ ID NO: 1098271 - DNA, 25 bp, Homo sapien
gctggcctgactactatggaggtaa

SEQ ID NO: 1098272 - DNA, 25 bp, Homo sapien
gttaaaatcagaatactgggctggg

SEQ ID NO: 1098273 - DNA, 25 bp, Homo sapien
tgagatctgaggttgctgttaagcc

SEQ ID NO: 1098274 - DNA, 25 bp, Homo sapien
ttccaacaagagttaatgcactttg

SEQ ID NO: 1098275 - DNA, 25 bp, Homo sapien
gaatgagatcctaacaacattgcac

SEQ ID NO: 1098276 - DNA, 25 bp, Homo sapien
aaagccatgtgtaatttcagaaaac

SEQ ID NO: 1098277 - DNA, 25 bp, Homo sapien
taggcactctatactttggaatagc

SEQ ID NO: 1098278 - DNA, 25 bp, Homo sapien
cagaaccgattatgacaagtactag

SEQ ID NO: 1098279 - DNA, 25 bp, Homo sapien
ctgaaatggcccaaatgatgaggcc

SEQ ID NO: 1098280 - DNA, 25 bp, Homo sapien
tgatgaggccaaatataagagcact

SEQ ID NO: 1098281 - DNA, 25 bp, Homo sapien
tcatgtgagcggagacagaaccgat

SEQ ID NO: 1098282 - DNA, 25 bp, Homo sapien
tctccattggtctggatggttccag

SEQ ID NO: 1098283 - DNA, 25 bp, Homo sapien
tgaggactcagctaaatgaacatgt

SEQ ID NO: 1098284 - DNA, 25 bp, Homo sapien
tggaggtcaggaatgcttgcactac

SEQ ID NO: 1098285 - DNA, 25 bp, Homo sapien
ggttccagagacaatcagctgcagt

SEQ ID NO: 1098286 - DNA, 25 bp, Homo sapien
gagagatactcattactttagtgcc

SEQ ID NO: 1098287 - DNA, 25 bp, Homo sapien
aagcatgaagaattttgccaagatt

SEQ ID NO: 1098288 - DNA, 25 bp, Homo sapien
actggttactatagtactaaggagg

SEQ ID NO: 1098289 - DNA, 25 bp, Homo sapien
gaagccaataatttaagcatgaaga

SEQ ID NO: 1098290 - DNA, 25 bp, Homo sapien
cgcattccgccctaagcaattgctg

SEQ ID NO: 1098291 - DNA, 25 bp, Homo sapien
tgtctccaccgtgcctccgcttgaa

SEQ ID NO: 1098292 - DNA, 25 bp, Homo sapien
gcctcctccccggaaatcgcattcc

SEQ ID NO: 1098293 - DNA, 25 bp, Homo sapien
ctcagacccgactccagactcaaat

SEQ ID NO: 1098294 - DNA, 25 bp, Homo sapien
ggatggagccttgtaactaaggact

SEQ ID NO: 1098295 - DNA, 25 bp, Homo sapien
aggatggagccttgtaactaaggac

SEQ ID NO: 1098296 - DNA, 25 bp, Homo sapien
tggcgaaaaaggaatccgcctggac

SEQ ID NO: 1098297 - DNA, 25 bp, Homo sapien
ctggcgaaaaaggaatccgcctgga

SEQ ID NO: 1098298 - DNA, 25 bp, Homo sapien
gcgaaaaaggaatccgcctggacga

SEQ ID NO: 1098299 - DNA, 25 bp, Homo sapien
gcgcgccccggaccccacgcgcctg

SEQ ID NO: 1098300 - DNA, 25 bp, Homo sapien
gcaggactcgggtctactctaagct

SEQ ID NO: 1098301 - DNA, 25 bp, Homo sapien
aagtctcagcagttcatccgcctct

SEQ ID NO: 1098302 - DNA, 25 bp, Homo sapien
ttcgctgggaagacgaactccgcag

SEQ ID NO: 1098303 - DNA, 25 bp, Homo sapien
tccgcctctgtaccttcgctgggaa

SEQ ID NO: 1098304 - DNA, 25 bp, Homo sapien
tggtatctctcacaacgtacaggtg

SEQ ID NO: 1098305 - DNA, 25 bp, Homo sapien
tctgaggccacccaaagtttggtgt

SEQ ID NO: 1098306 - DNA, 25 bp, Homo sapien
ggtcacaaactccagggaccaagtg

SEQ ID NO: 1098307 - DNA, 25 bp, Homo sapien
ctcgcccagcgtggcaagcagtggt

SEQ ID NO: 1098308 - DNA, 25 bp, Homo sapien
tacaggcctgctagacttcagaagt

SEQ ID NO: 1098309 - DNA, 25 bp, Homo sapien
ctgtttttaattcctacagaatgat

SEQ ID NO: 1098310 - DNA, 25 bp, Homo sapien
tttttgttcttacaggcctgctaga

SEQ ID NO: 1098311 - DNA, 25 bp, Homo sapien
gttcttacaggcctgctagacttca

SEQ ID NO: 1098312 - DNA, 25 bp, Homo sapien
tacctcaggtattgtagcttttccc

SEQ ID NO: 1098313 - DNA, 25 bp, Homo sapien
gctaccagggtaagtactgctcctt

SEQ ID NO: 1098314 - DNA, 25 bp, Homo sapien
aataccggagctatgtccttatcag

SEQ ID NO: 1098315 - DNA, 25 bp, Homo sapien
tgctgatgaaaggtcggctaccagg

SEQ ID NO: 1098316 - DNA, 25 bp, Homo sapien
ttctccagctctatgctttgagtct

SEQ ID NO: 1098317 - DNA, 25 bp, Homo sapien
gctttgagtctattagggttttatc

SEQ ID NO: 1098318 - DNA, 25 bp, Homo sapien
tcaagccatcactggttatttctcc

SEQ ID NO: 1098319 - DNA, 25 bp, Homo sapien
tcctctagctcggaaaactcttcct

SEQ ID NO: 1098320 - DNA, 25 bp, Homo sapien
gattcagaatcctctacagagtcaa

SEQ ID NO: 1098321 - DNA, 25 bp, Homo sapien
tgattcagaatcctctacagagtca

SEQ ID NO: 1098322 - DNA, 25 bp, Homo sapien
cagacagggtgtgccagttccttga

SEQ ID NO: 1098323 - DNA, 25 bp, Homo sapien
gatgttagttcttctgtgtgcagag

SEQ ID NO: 1098324 - DNA, 25 bp, Homo sapien
tggtgactcctgttgaaatactcaa

SEQ ID NO: 1098325 - DNA, 25 bp, Homo sapien
cctgggttttgtgcaccacctggtg

SEQ ID NO: 1098326 - DNA, 25 bp, Homo sapien
tactaggtactcgacaagcactgac

SEQ ID NO: 1098327 - DNA, 25 bp, Homo sapien
caccaagatgtgtctaggagtcagt

SEQ ID NO: 1098328 - DNA, 25 bp, Homo sapien
tgttgcaacttctagatctctcctc

SEQ ID NO: 1098329 - DNA, 25 bp, Homo sapien
tccagtgataagtctgctgtcaacc

SEQ ID NO: 1098330 - DNA, 25 bp, Homo sapien
tattattccccagtaattctctcaa

SEQ ID NO: 1098331 - DNA, 25 bp, Homo sapien
tattccccagtaattctctcaaggt

SEQ ID NO: 1098332 - DNA, 25 bp, Homo sapien
tgggcatatgcaaaacataatctct

SEQ ID NO: 1098333 - DNA, 25 bp, Homo sapien
aattctctcaaggtgggcatatgca

SEQ ID NO: 1098334 - DNA, 25 bp, Homo sapien
ggaggaaagcatattgtttgtagtc

SEQ ID NO: 1098335 - DNA, 25 bp, Homo sapien
gggaggaaagcatattgtttgtagt

SEQ ID NO: 1098336 - DNA, 25 bp, Homo sapien
tattgtttgtagtcaccctggcgtg

SEQ ID NO: 1098337 - DNA, 25 bp, Homo sapien
tcatccccaagtacgctattagctg

SEQ ID NO: 1098338 - DNA, 25 bp, Homo sapien
gctcctcatccccaagtacgctatt

SEQ ID NO: 1098339 - DNA, 25 bp, Homo sapien
caagtacgctattagctgtccatcc

SEQ ID NO: 1098340 - DNA, 25 bp, Homo sapien
ccccaagtacgctattagctgtcca

SEQ ID NO: 1098341 - DNA, 25 bp, Homo sapien
gtcaactgcagtagggaggtggtgg

SEQ ID NO: 1098342 - DNA, 25 bp, Homo sapien
agtcaactgcagtagggaggtggtg

SEQ ID NO: 1098343 - DNA, 25 bp, Homo sapien
caggttatcttgacaggtgcagccc

SEQ ID NO: 1098344 - DNA, 25 bp, Homo sapien
tacaggtatgaggaactgagcactt

SEQ ID NO: 1098345 - DNA, 25 bp, Homo sapien
tcttagacaagctagcacaatatac

SEQ ID NO: 1098346 - DNA, 25 bp, Homo sapien
ttgtagacactttcgccacattgcc

SEQ ID NO: 1098347 - DNA, 25 bp, Homo sapien
tggggcaagaattcaaaaagatatt

SEQ ID NO: 1098348 - DNA, 25 bp, Homo sapien
tcgaggacgtcacactgagtgaaat

SEQ ID NO: 1098349 - DNA, 25 bp, Homo sapien
gtccatctaaaggtgagtacatgaa

SEQ ID NO: 1098350 - DNA, 25 bp, Homo sapien
ccacaaaaacgtccatctaaaggtg

SEQ ID NO: 1098351 - DNA, 25 bp, Homo sapien
ccatcctccttgaattcctctgggg

SEQ ID NO: 1098352 - DNA, 25 bp, Homo sapien
tcctccttgaattcctctggggttc

SEQ ID NO: 1098353 - DNA, 25 bp, Homo sapien
catcctccttgaattcctctggggt

SEQ ID NO: 1098354 - DNA, 25 bp, Homo sapien
cccatcctccttgaattcctctggg

SEQ ID NO: 1098355 - DNA, 25 bp, Homo sapien
tgctggaccgtagcttcagaatcac

SEQ ID NO: 1098356 - DNA, 25 bp, Homo sapien
gagtgaatttcataggcttcaagac

SEQ ID NO: 1098357 - DNA, 25 bp, Homo sapien
tcaagaccatagcatgccatgctgg

SEQ ID NO: 1098358 - DNA, 25 bp, Homo sapien
gatgccaagtttgttgaagagtgaa

SEQ ID NO: 1098359 - DNA, 25 bp, Homo sapien
ctggtcaggtagacaaggggacaga

SEQ ID NO: 1098360 - DNA, 25 bp, Homo sapien
ccaggggccaggatttgccgcccag

SEQ ID NO: 1098361 - DNA, 25 bp, Homo sapien
aggcaggcgggaccataccaggggc

SEQ ID NO: 1098362 - DNA, 25 bp, Homo sapien
gcgggaccataccaggggccaggat

SEQ ID NO: 1098363 - DNA, 25 bp, Homo sapien
cctaggtcccaacatgaggtaggac

SEQ ID NO: 1098364 - DNA, 25 bp, Homo sapien
tacagaagacacaatggtgctccct

SEQ ID NO: 1098365 - DNA, 25 bp, Homo sapien
agggcatccaggccttgaagttcag

SEQ ID NO: 1098366 - DNA, 25 bp, Homo sapien
gttgtacaacagagcgccctaggtc

SEQ ID NO: 1098367 - DNA, 25 bp, Homo sapien
acacattccctggtcagcacaccgg

SEQ ID NO: 1098368 - DNA, 25 bp, Homo sapien
cccaagccccacacattccctggtc

SEQ ID NO: 1098369 - DNA, 25 bp, Homo sapien
gtagatgacgcctagcttggtccag

SEQ ID NO: 1098370 - DNA, 25 bp, Homo sapien
cctggtcagcacaccgggcttgtag

SEQ ID NO: 1098371 - DNA, 25 bp, Homo sapien
gggatttgagagtacattctccaat

SEQ ID NO: 1098372 - DNA, 25 bp, Homo sapien
gtctggaaagggctgcggagcctct

SEQ ID NO: 1098373 - DNA, 25 bp, Homo sapien
agcaagcagaacaattctgttgctg

SEQ ID NO: 1098374 - DNA, 25 bp, Homo sapien
catttccacgcttgggagaggtctg

SEQ ID NO: 1098375 - DNA, 25 bp, Homo sapien
ttcttgacagttccaaatccattcc

SEQ ID NO: 1098376 - DNA, 25 bp, Homo sapien
gttcttgacagttccaaatccattc

SEQ ID NO: 1098377 - DNA, 25 bp, Homo sapien
gagttcttgacagttccaaatccat

SEQ ID NO: 1098378 - DNA, 25 bp, Homo sapien
agttcttgacagttccaaatccatt

SEQ ID NO: 1098379 - DNA, 25 bp, Homo sapien
aggaagaccccagatgatacctact

SEQ ID NO: 1098380 - DNA, 25 bp, Homo sapien
gatgatacctactcttgaattctgt

SEQ ID NO: 1098381 - DNA, 25 bp, Homo sapien
ggcttctctggagcaacacttgttc

SEQ ID NO: 1098382 - DNA, 25 bp, Homo sapien
ctggagcaacacttgttccttcagg

SEQ ID NO: 1098383 - DNA, 25 bp, Homo sapien
ccgtccaagggatgatagaacagca

SEQ ID NO: 1098384 - DNA, 25 bp, Homo sapien
caaactggctgaaagcgctgggcac

SEQ ID NO: 1098385 - DNA, 25 bp, Homo sapien
agtcagaaggagcataggtccccaa

SEQ ID NO: 1098386 - DNA, 25 bp, Homo sapien
ggcagcctgtccttaagtgagtcat

SEQ ID NO: 1098387 - DNA, 25 bp, Homo sapien
gccaagccataacgatgcctaggag

SEQ ID NO: 1098388 - DNA, 25 bp, Homo sapien
tcacatgttagaaacagcactccag

SEQ ID NO: 1098389 - DNA, 25 bp, Homo sapien
tgggttacagccagacaccattccc

SEQ ID NO: 1098390 - DNA, 25 bp, Homo sapien
ggcaggtgtaagctaacgaccacta

SEQ ID NO: 1098391 - DNA, 25 bp, Homo sapien
tggagatgaactcatacagagtcga

SEQ ID NO: 1098392 - DNA, 25 bp, Homo sapien
ggagatgaactcatacagagtcgaa

SEQ ID NO: 1098393 - DNA, 25 bp, Homo sapien
tcagaacctggtagtctccagctgc

SEQ ID NO: 1098394 - DNA, 25 bp, Homo sapien
tagggagggtcagaacctggtagtc

SEQ ID NO: 1098395 - DNA, 25 bp, Homo sapien
gcctctggcctatccttattgtttg

SEQ ID NO: 1098396 - DNA, 25 bp, Homo sapien
gatgctgatgctatcgagccacaac

SEQ ID NO: 1098397 - DNA, 25 bp, Homo sapien
tatcgagccacaaccacactttgag

SEQ ID NO: 1098398 - DNA, 25 bp, Homo sapien
caagcctctggcctatccttattgt

SEQ ID NO: 1098399 - DNA, 25 bp, Homo sapien
caaggtttatatggtcagtagctca

SEQ ID NO: 1098400 - DNA, 25 bp, Homo sapien
gctgcaataggagcaagggacccag

SEQ ID NO: 1098401 - DNA, 25 bp, Homo sapien
gcagagcaataccttccgaagcttc

SEQ ID NO: 1098402 - DNA, 25 bp, Homo sapien
tcctcctgaggatgggttattgtca

SEQ ID NO: 1098403 - DNA, 25 bp, Homo sapien
gttgttcaccctcctggtacttggc

SEQ ID NO: 1098404 - DNA, 25 bp, Homo sapien
gatggttgttcttagaagatttccc

SEQ ID NO: 1098405 - DNA, 25 bp, Homo sapien
cacgtttatcccatggtgttgttca

SEQ ID NO: 1098406 - DNA, 25 bp, Homo sapien
ggtacttggcacagtagacccctag

SEQ ID NO: 1098407 - DNA, 25 bp, Homo sapien
ctggccagcgccatcaagcagccag

SEQ ID NO: 1098408 - DNA, 25 bp, Homo sapien
cggagctggccagcgccatcaagca

SEQ ID NO: 1098409 - DNA, 25 bp, Homo sapien
gctcagcagcatccagagccagctg

SEQ ID NO: 1098410 - DNA, 25 bp, Homo sapien
ctgctgagctccctcaacctgctgc

SEQ ID NO: 1098411 - DNA, 25 bp, Homo sapien
ctggcctggtagctgcacgtggact

SEQ ID NO: 1098412 - DNA, 25 bp, Homo sapien
atggtttccagtctggcctggtagc

SEQ ID NO: 1098413 - DNA, 25 bp, Homo sapien
cctggtagctgcacgtggactatca

SEQ ID NO: 1098414 - DNA, 25 bp, Homo sapien
tccagtctggcctggtagctgcacg

SEQ ID NO: 1098415 - DNA, 25 bp, Homo sapien
tgcaatgcaggcgaaaatgacacac

SEQ ID NO: 1098416 - DNA, 25 bp, Homo sapien
gcaatgcaggcgaaaatgacacaca

SEQ ID NO: 1098417 - DNA, 25 bp, Homo sapien
tcctttaacagctgcgaaacagaca

SEQ ID NO: 1098418 - DNA, 25 bp, Homo sapien
tgaaggcacgagctatcagctccgg

SEQ ID NO: 1098419 - DNA, 25 bp, Homo sapien
ctttctgggaaggagacgagtcctc

SEQ ID NO: 1098420 - DNA, 25 bp, Homo sapien
ggtaatgtgggcacagcgttcctcc

SEQ ID NO: 1098421 - DNA, 25 bp, Homo sapien
ttgcccgggacactctgaaaccttg

SEQ ID NO: 1098422 - DNA, 25 bp, Homo sapien
gagtctctggtctgcgctgcagtta

SEQ ID NO: 1098423 - DNA, 25 bp, Homo sapien
gctgcagttagaaaccctgcctgga

SEQ ID NO: 1098424 - DNA, 25 bp, Homo sapien
cagtaatttggtcgtcacagcaggt

SEQ ID NO: 1098425 - DNA, 25 bp, Homo sapien
cgtggtgtgctcagaggtattgcca

SEQ ID NO: 1098426 - DNA, 25 bp, Homo sapien
agggtgagtcccctcctcatcaaca

SEQ ID NO: 1098427 - DNA, 25 bp, Homo sapien
cagaggtattgccacggcctgaagt

SEQ ID NO: 1098428 - DNA, 25 bp, Homo sapien
gccacggcctgaagttcctctcttg

SEQ ID NO: 1098429 - DNA, 25 bp, Homo sapien
cgtgttcacgtgtttctagggtcat

SEQ ID NO: 1098430 - DNA, 25 bp, Homo sapien
gcgtgttcacgtgtttctagggtca

SEQ ID NO: 1098431 - DNA, 25 bp, Homo sapien
ctcctgcgtgttcacgtgtttctag

SEQ ID NO: 1098432 - DNA, 25 bp, Homo sapien
ctgcgtgttcacgtgtttctagggt

SEQ ID NO: 1098433 - DNA, 25 bp, Homo sapien
gagtatttgtgcctacccttgagag

SEQ ID NO: 1098434 - DNA, 25 bp, Homo sapien
gagaggctttcgctgaagtgaccca

SEQ ID NO: 1098435 - DNA, 25 bp, Homo sapien
cactcgctcctactttgcagtggga

SEQ ID NO: 1098436 - DNA, 25 bp, Homo sapien
gcaaaagactttgtggcccactgag

SEQ ID NO: 1098437 - DNA, 25 bp, Homo sapien
tgcaactcgagctgtggcacccagc

SEQ ID NO: 1098438 - DNA, 25 bp, Homo sapien
ctgcaactcgagctgtggcacccag

SEQ ID NO: 1098439 - DNA, 25 bp, Homo sapien
aaggatgttggggaacggcacacac

SEQ ID NO: 1098440 - DNA, 25 bp, Homo sapien
gaaccaggtgggaggattcacataa

SEQ ID NO: 1098441 - DNA, 25 bp, Homo sapien
aaagccatggacaaatggagccaat

SEQ ID NO: 1098442 - DNA, 25 bp, Homo sapien
tattggaattcccaatgaaggggcc

SEQ ID NO: 1098443 - DNA, 25 bp, Homo sapien
gctccttggcaatccttccttgagg

SEQ ID NO: 1098444 - DNA, 25 bp, Homo sapien
cacccccggtcctgtactgtgccat

SEQ ID NO: 1098445 - DNA, 25 bp, Homo sapien
cccgccccttctcttgtgcctgatt

SEQ ID NO: 1098446 - DNA, 25 bp, Homo sapien
ccttggcaatccttccttgaggctt

SEQ ID NO: 1098447 - DNA, 25 bp, Homo sapien
tgccgaggggctgggcccaaaacgc

SEQ ID NO: 1098448 - DNA, 25 bp, Homo sapien
atgccgaggggctgggcccaaaacg

SEQ ID NO: 1098449 - DNA, 25 bp, Homo sapien
gggctgggcccaaaacgccttctga

SEQ ID NO: 1098450 - DNA, 25 bp, Homo sapien
ggctgggcccaaaacgccttctgac

SEQ ID NO: 1098451 - DNA, 25 bp, Homo sapien
agtgggtaagtatgtcggacaggct

SEQ ID NO: 1098452 - DNA, 25 bp, Homo sapien
gaggcatttgtgttgggcttggcag

SEQ ID NO: 1098453 - DNA, 25 bp, Homo sapien
ggcatttgtgttgggcttggcaggt

SEQ ID NO: 1098454 - DNA, 25 bp, Homo sapien
gggtaagtatgtcggacaggctgca

SEQ ID NO: 1098455 - DNA, 25 bp, Homo sapien
ctctgagcagtcgtggagagactgg

SEQ ID NO: 1098456 - DNA, 25 bp, Homo sapien
gggactcaatggttgagaaagcatt

SEQ ID NO: 1098457 - DNA, 25 bp, Homo sapien
tgaacttcatgccttgtggccagtg

SEQ ID NO: 1098458 - DNA, 25 bp, Homo sapien
actggagcctcacttttgccctgga

SEQ ID NO: 1098459 - DNA, 25 bp, Homo sapien
cctttctctcctgaattgcactgga

SEQ ID NO: 1098460 - DNA, 25 bp, Homo sapien
tcttgtcaacccttgacgtctgcct

SEQ ID NO: 1098461 - DNA, 25 bp, Homo sapien
ttttgaaactaagcccgagcctcac

SEQ ID NO: 1098462 - DNA, 25 bp, Homo sapien
ggaaaacagccaaagcgtagcccat

SEQ ID NO: 1098463 - DNA, 25 bp, Homo sapien
tcttgtcatcactggaaggcttgtg

SEQ ID NO: 1098464 - DNA, 25 bp, Homo sapien
ccttcttgtcatcactggaaggctt

SEQ ID NO: 1098465 - DNA, 25 bp, Homo sapien
ggcccagtgcagagctagaagggga

SEQ ID NO: 1098466 - DNA, 25 bp, Homo sapien
tgcagagctagaaggggagaatcct

SEQ ID NO: 1098467 - DNA, 25 bp, Homo sapien
tgcttgcttgccttgctgtagtgcc

SEQ ID NO: 1098468 - DNA, 25 bp, Homo sapien
cttttgaaccattgctttgggctac

SEQ ID NO: 1098469 - DNA, 25 bp, Homo sapien
tggctttgccgactgctgaatggag

SEQ ID NO: 1098470 - DNA, 25 bp, Homo sapien
tctatccccatgtcccttggctttg

SEQ ID NO: 1098471 - DNA, 25 bp, Homo sapien
cagtcctccctgcatcctaccttgg

SEQ ID NO: 1098472 - DNA, 25 bp, Homo sapien
cctccctgcatcctaccttggccat

SEQ ID NO: 1098473 - DNA, 25 bp, Homo sapien
gtcctccctgcatcctaccttggcc

SEQ ID NO: 1098474 - DNA, 25 bp, Homo sapien
ctttctttggcccctgctgctttct

SEQ ID NO: 1098475 - DNA, 25 bp, Homo sapien
cctacgattgcacgaagctctcttt

SEQ ID NO: 1098476 - DNA, 25 bp, Homo sapien
ggttctctgcaagtgaggctttctc

SEQ ID NO: 1098477 - DNA, 25 bp, Homo sapien
catcctgatgtctgagctggttctc

SEQ ID NO: 1098478 - DNA, 25 bp, Homo sapien
cttcaagttccagagagcatcctga

SEQ ID NO: 1098479 - DNA, 25 bp, Homo sapien
aaaagagcagccttcggtgccgatt

SEQ ID NO: 1098480 - DNA, 25 bp, Homo sapien
ctcggtgccatcgatttggatgttc

SEQ ID NO: 1098481 - DNA, 25 bp, Homo sapien
agaatttgctccacacaaggataaa

SEQ ID NO: 1098482 - DNA, 25 bp, Homo sapien
cgccagctctcggtgccatcgattt

SEQ ID NO: 1098483 - DNA, 25 bp, Homo sapien
aggcccagctattgaccttgtcaaa

SEQ ID NO: 1098484 - DNA, 25 bp, Homo sapien
cttggtggaccattgagatcagagg

SEQ ID NO: 1098485 - DNA, 25 bp, Homo sapien
ggacgcccttggtggaccattgaga

SEQ ID NO: 1098486 - DNA, 25 bp, Homo sapien
ctgggtcctggattgggccatgtgg

SEQ ID NO: 1098487 - DNA, 25 bp, Homo sapien
tctgttggctgagttactaccaggg

SEQ ID NO: 1098488 - DNA, 25 bp, Homo sapien
tagaggaactgaaagcctctgttgg

SEQ ID NO: 1098489 - DNA, 25 bp, Homo sapien
ctaaggtgagtagcagagtgggtta

SEQ ID NO: 1098490 - DNA, 25 bp, Homo sapien
tgtgcatcccattgactggtccagt

SEQ ID NO: 1098491 - DNA, 25 bp, Homo sapien
aaagtgggatctgagtgatacatct

SEQ ID NO: 1098492 - DNA, 25 bp, Homo sapien
cttaaagtgggatctgagtgataca

SEQ ID NO: 1098493 - DNA, 25 bp, Homo sapien
cctggcagtcctgtcttaaagtggg

SEQ ID NO: 1098494 - DNA, 25 bp, Homo sapien
gtcttaaagtgggatctgagtgata

SEQ ID NO: 1098495 - DNA, 25 bp, Homo sapien
gttggggaagtttatcaggaacagc

SEQ ID NO: 1098496 - DNA, 25 bp, Homo sapien
ttggggaagtttatcaggaacagcc

SEQ ID NO: 1098497 - DNA, 25 bp, Homo sapien
tggggaagtttatcaggaacagccc

SEQ ID NO: 1098498 - DNA, 25 bp, Homo sapien
tgcgtgggctcggactgctgagata

SEQ ID NO: 1098499 - DNA, 25 bp, Homo sapien
tcacctcctcgggacattgagattt

SEQ ID NO: 1098500 - DNA, 25 bp, Homo sapien
cagctccgggagcattgcgtgggct

SEQ ID NO: 1098501 - DNA, 25 bp, Homo sapien
cagcagtgcacataggtgaatcggg

SEQ ID NO: 1098502 - DNA, 25 bp, Homo sapien
tctcattggagatccttcaagccag

SEQ ID NO: 1098503 - DNA, 25 bp, Homo sapien
cttccagtctcattggagatccttc

SEQ ID NO: 1098504 - DNA, 25 bp, Homo sapien
cttcctctcctgacaaatccttgtt

SEQ ID NO: 1098505 - DNA, 25 bp, Homo sapien
ttcaagccagctcctcagcttgtgc

SEQ ID NO: 1098506 - DNA, 25 bp, Homo sapien
catgcagtctgtccgctgcgggact

SEQ ID NO: 1098507 - DNA, 25 bp, Homo sapien
tcctcggaagattccagatggtgga

SEQ ID NO: 1098508 - DNA, 25 bp, Homo sapien
gaggccacaggaactcctcggaaga

SEQ ID NO: 1098509 - DNA, 25 bp, Homo sapien
agacatgcagtctgtccgctgcggg

SEQ ID NO: 1098510 - DNA, 25 bp, Homo sapien
tattggcaaggtaactccatgctcc

SEQ ID NO: 1098511 - DNA, 25 bp, Homo sapien
tcacctttgggatgttattggcaag

SEQ ID NO: 1098512 - DNA, 25 bp, Homo sapien
gagcagccagttcccgaatcctggc

SEQ ID NO: 1098513 - DNA, 25 bp, Homo sapien
tccactgaattgcaaccgcctgcat

SEQ ID NO: 1098514 - DNA, 25 bp, Homo sapien
tctctcccgtttgtccactacagta

SEQ ID NO: 1098515 - DNA, 25 bp, Homo sapien
ctctcccgtttgtccactacagtag

SEQ ID NO: 1098516 - DNA, 25 bp, Homo sapien
ctcccgtttgtccactacagtaggt

SEQ ID NO: 1098517 - DNA, 25 bp, Homo sapien
tctcccgtttgtccactacagtagg

SEQ ID NO: 1098518 - DNA, 25 bp, Homo sapien
catagtgggatcttgtctttcaaaa

SEQ ID NO: 1098519 - DNA, 25 bp, Homo sapien
gggaaggtacagaatattgcaatct

SEQ ID NO: 1098520 - DNA, 25 bp, Homo sapien
tagcttgggtgacaccctatttcaa

SEQ ID NO: 1098521 - DNA, 25 bp, Homo sapien
aagctcacagtgtagagggatgtgg

SEQ ID NO: 1098522 - DNA, 25 bp, Homo sapien
tcgggggcatacttctatgtccctg

SEQ ID NO: 1098523 - DNA, 25 bp, Homo sapien
gctcatcagtccacctcgggggcat

SEQ ID NO: 1098524 - DNA, 25 bp, Homo sapien
gattaggatccagcactggctcatc

SEQ ID NO: 1098525 - DNA, 25 bp, Homo sapien
cagtcacacaagtcataagattagg

SEQ ID NO: 1098526 - DNA, 25 bp, Homo sapien
aaaacaggacctgacacctgacggt

SEQ ID NO: 1098527 - DNA, 25 bp, Homo sapien
ggacctgacacctgacggtagcata

SEQ ID NO: 1098528 - DNA, 25 bp, Homo sapien
cacctgacggtagcatacggtggcc

SEQ ID NO: 1098529 - DNA, 25 bp, Homo sapien
ggcaaaacaggacctgacacctgac

SEQ ID NO: 1098530 - DNA, 25 bp, Homo sapien
ggagacagcacccatgatgcagcaa

SEQ ID NO: 1098531 - DNA, 25 bp, Homo sapien
tcagcatgtagcaaggaagagtcct

SEQ ID NO: 1098532 - DNA, 25 bp, Homo sapien
ggtcagccctgacagcgaggcttca

SEQ ID NO: 1098533 - DNA, 25 bp, Homo sapien
ggcgatttcatgagaagtggtcagc

SEQ ID NO: 1098534 - DNA, 25 bp, Homo sapien
gaaactgttggctgcaattgccaca

SEQ ID NO: 1098535 - DNA, 25 bp, Homo sapien
gctgcttcttggctatgttcgaaca

SEQ ID NO: 1098536 - DNA, 25 bp, Homo sapien
gccatatcccggctcttgctttgtt

SEQ ID NO: 1098537 - DNA, 25 bp, Homo sapien
agagctgtcactggcactgatgtgc

SEQ ID NO: 1098538 - DNA, 25 bp, Homo sapien
aataaagccaagttaaggagtcctg

SEQ ID NO: 1098539 - DNA, 25 bp, Homo sapien
agccaagttaaggagtcctggctcc

SEQ ID NO: 1098540 - DNA, 25 bp, Homo sapien
aagaactctcgtgggctaaactcca

SEQ ID NO: 1098541 - DNA, 25 bp, Homo sapien
caagaactctcgtgggctaaactcc

SEQ ID NO: 1098542 - DNA, 25 bp, Homo sapien
acaaagccaagaactctcgtgggct

SEQ ID NO: 1098543 - DNA, 25 bp, Homo sapien
gacaaagccaagaactctcgtgggc

SEQ ID NO: 1098544 - DNA, 25 bp, Homo sapien
gattcagatgatgcttaagcaaggg

SEQ ID NO: 1098545 - DNA, 25 bp, Homo sapien
gaggtaaatgactgttccccaaaga

SEQ ID NO: 1098546 - DNA, 25 bp, Homo sapien
tgtaagacctagacaagcacgtacc

SEQ ID NO: 1098547 - DNA, 25 bp, Homo sapien
ccaacaggagcttcagaagagtaca

SEQ ID NO: 1098548 - DNA, 25 bp, Homo sapien
tttcacatcttatgctccagctttg

SEQ ID NO: 1098549 - DNA, 25 bp, Homo sapien
tcctttcacatcttatgctccagct

SEQ ID NO: 1098550 - DNA, 25 bp, Homo sapien
tcacatcttatgctccagctttgtc

SEQ ID NO: 1098551 - DNA, 25 bp, Homo sapien
tcccttcctttcacatcttatgctc

SEQ ID NO: 1098552 - DNA, 25 bp, Homo sapien
cactgaggtttctgctaatgctgct

SEQ ID NO: 1098553 - DNA, 25 bp, Homo sapien
tgcctaggaaaccaccatcagaaag

SEQ ID NO: 1098554 - DNA, 25 bp, Homo sapien
tctatgatcaggaaatgacgtctct

SEQ ID NO: 1098555 - DNA, 25 bp, Homo sapien
agtgccatgcatatcctacgtcccg

SEQ ID NO: 1098556 - DNA, 25 bp, Homo sapien
gagtgttcctcaggcgcggtgcccc

SEQ ID NO: 1098557 - DNA, 25 bp, Homo sapien
cattggcgctcgagtgcgcgctttc

SEQ ID NO: 1098558 - DNA, 25 bp, Homo sapien
tgttaatcctcgacggtgggacgcc

SEQ ID NO: 1098559 - DNA, 25 bp, Homo sapien
gcgcgctttcgctgccgactgttaa

SEQ ID NO: 1098560 - DNA, 25 bp, Homo sapien
ccaattagatgggcgggagcagcaa

SEQ ID NO: 1098561 - DNA, 25 bp, Homo sapien
tccagccaatcattgttcgacatac

SEQ ID NO: 1098562 - DNA, 25 bp, Homo sapien
ttagatgggcgggagcagcaagccc

SEQ ID NO: 1098563 - DNA, 25 bp, Homo sapien
aaagccaattagatgggcgggagca

SEQ ID NO: 1098564 - DNA, 25 bp, Homo sapien
tacgggtcgggagacgggacagaga

SEQ ID NO: 1098565 - DNA, 25 bp, Homo sapien
ttaaccattcgtgcgcgcgagttga

SEQ ID NO: 1098566 - DNA, 25 bp, Homo sapien
gctcgagcctcacacccttttttta

SEQ ID NO: 1098567 - DNA, 25 bp, Homo sapien
gggagacgggacagagagcagacgg

SEQ ID NO: 1098568 - DNA, 25 bp, Homo sapien
cacagagccgggcagctcgtgcggg

SEQ ID NO: 1098569 - DNA, 25 bp, Homo sapien
cgcgcgcgaggtgctagcggcctgg

SEQ ID NO: 1098570 - DNA, 25 bp, Homo sapien
agggcgcgcgcgaggtgctagcggc

SEQ ID NO: 1098571 - DNA, 25 bp, Homo sapien
cgggcagctcgtgcgggtcctcgct

SEQ ID NO: 1098572 - DNA, 25 bp, Homo sapien
gctgggactgtagttccccaaaagc

SEQ ID NO: 1098573 - DNA, 25 bp, Homo sapien
agctgggactgtagttccccaaaag

SEQ ID NO: 1098574 - DNA, 25 bp, Homo sapien
ccagctgggactgtagttccccaaa

SEQ ID NO: 1098575 - DNA, 25 bp, Homo sapien
cagctgggactgtagttccccaaaa

SEQ ID NO: 1098576 - DNA, 25 bp, Homo sapien
acgaaaggcaggagccgtctcgcga

SEQ ID NO: 1098577 - DNA, 25 bp, Homo sapien
tgaaattgccggttccagtctccac

SEQ ID NO: 1098578 - DNA, 25 bp, Homo sapien
tctccacgctgcagagacacgaaag

SEQ ID NO: 1098579 - DNA, 25 bp, Homo sapien
gaacgtggcgtcctttgaaattgcc

SEQ ID NO: 1098580 - DNA, 25 bp, Homo sapien
aggaaaatctggtcggctcgccctc

SEQ ID NO: 1098581 - DNA, 25 bp, Homo sapien
cgaacgcctgaaccgctagggtctt

SEQ ID NO: 1098582 - DNA, 25 bp, Homo sapien
tggtcatggcccaaagcgaagtccg

SEQ ID NO: 1098583 - DNA, 25 bp, Homo sapien
caagtccaacccgaatgagtgtggg

SEQ ID NO: 1098584 - DNA, 25 bp, Homo sapien
tcaccgctctcgggaacggaaagaa

SEQ ID NO: 1098585 - DNA, 25 bp, Homo sapien
aggaaagttgtaatcaccaattata

SEQ ID NO: 1098586 - DNA, 25 bp, Homo sapien
ggaaagttgtaatcaccaattatat

SEQ ID NO: 1098587 - DNA, 25 bp, Homo sapien
atcccaaggagtgtcaagagttaat

SEQ ID NO: 1098588 - DNA, 25 bp, Homo sapien
gaggaaagttgtaatcaccaattat

SEQ ID NO: 1098589 - DNA, 25 bp, Homo sapien
ttctttgaagggctacctcttgaaa

SEQ ID NO: 1098590 - DNA, 25 bp, Homo sapien
tttgaagggctacctcttgaaagtc

SEQ ID NO: 1098591 - DNA, 25 bp, Homo sapien
tctttgaagggctacctcttgaaag

SEQ ID NO: 1098592 - DNA, 25 bp, Homo sapien
ctttgaagggctacctcttgaaagt

SEQ ID NO: 1098593 - DNA, 25 bp, Homo sapien
tcagtcccacaaatggtaacaagtt

SEQ ID NO: 1098594 - DNA, 25 bp, Homo sapien
tattaagatagcaagtattgccgag

SEQ ID NO: 1098595 - DNA, 25 bp, Homo sapien
tattgccgagattattcagtcccac

SEQ ID NO: 1098596 - DNA, 25 bp, Homo sapien
gtttataggtgaagactgtgctgca

SEQ ID NO: 1098597 - DNA, 25 bp, Homo sapien
atattaaataagtgctttactccag

SEQ ID NO: 1098598 - DNA, 25 bp, Homo sapien
taagtgctttactccagatttaaaa

SEQ ID NO: 1098599 - DNA, 25 bp, Homo sapien
gattggcttcatcctttagagcttc

SEQ ID NO: 1098600 - DNA, 25 bp, Homo sapien
tttgattggcttcatcctttagagc

SEQ ID NO: 1098601 - DNA, 25 bp, Homo sapien
cacagattacaggagcaaacattgt

SEQ ID NO: 1098602 - DNA, 25 bp, Homo sapien
ggaattatctagttagccaccttga

SEQ ID NO: 1098603 - DNA, 25 bp, Homo sapien
taaataagttgtacatgggtataac

SEQ ID NO: 1098604 - DNA, 25 bp, Homo sapien
taactcaatttgaaaacacaatggg

SEQ ID NO: 1098605 - DNA, 25 bp, Homo sapien
tagcctggagctgttcaaccgaaat

SEQ ID NO: 1098606 - DNA, 25 bp, Homo sapien
ctcagtgtgttaagcagtcgccttg

SEQ ID NO: 1098607 - DNA, 25 bp, Homo sapien
ccttggctgagtggcaagttcatca

SEQ ID NO: 1098608 - DNA, 25 bp, Homo sapien
caaccgaaatgattaaggactgtaa

SEQ ID NO: 1098609 - DNA, 25 bp, Homo sapien
taaataaaaatttccatttcatcta

SEQ ID NO: 1098610 - DNA, 25 bp, Homo sapien
tataaataaaaatttccatttcatc

SEQ ID NO: 1098611 - DNA, 25 bp, Homo sapien
aaataaaaatttccatttcatctat

SEQ ID NO: 1098612 - DNA, 25 bp, Homo sapien
aataaaaatttccatttcatctatt

SEQ ID NO: 1098613 - DNA, 25 bp, Homo sapien
ggaggactctctaatgtatcacttg

SEQ ID NO: 1098614 - DNA, 25 bp, Homo sapien
aatgctgggttgcttagttgcagac

SEQ ID NO: 1098615 - DNA, 25 bp, Homo sapien
taccttagtaggtaattctgccaca

SEQ ID NO: 1098616 - DNA, 25 bp, Homo sapien
gagggtcttggactctcattttcag

SEQ ID NO: 1098617 - DNA, 25 bp, Homo sapien
actggcacactgatgtcttgaaaat

SEQ ID NO: 1098618 - DNA, 25 bp, Homo sapien
gcaacgcgtccttaataccagctga

SEQ ID NO: 1098619 - DNA, 25 bp, Homo sapien
tctcctctactttggaaagctcatc

SEQ ID NO: 1098620 - DNA, 25 bp, Homo sapien
taatttctccactagctcaaaacca

SEQ ID NO: 1098621 - DNA, 25 bp, Homo sapien
tgtgaaattgcccatctcagggtct

SEQ ID NO: 1098622 - DNA, 25 bp, Homo sapien
catctcagggtcttcatttctgttt

SEQ ID NO: 1098623 - DNA, 25 bp, Homo sapien
ctactgaagcaaattgtgaaattgc

SEQ ID NO: 1098624 - DNA, 25 bp, Homo sapien
aattgtgaaattgcccatctcaggg

SEQ ID NO: 1098625 - DNA, 25 bp, Homo sapien
gaaatatttatcttctcctacaatc

SEQ ID NO: 1098626 - DNA, 25 bp, Homo sapien
tgtcaaacaaaagacttcgttcagc

SEQ ID NO: 1098627 - DNA, 25 bp, Homo sapien
cagcttcagtataatgatggcagtt

SEQ ID NO: 1098628 - DNA, 25 bp, Homo sapien
tccaaaccactagcagcaaagcact

SEQ ID NO: 1098629 - DNA, 25 bp, Homo sapien
tataccccaatctgaaaccaagtaa

SEQ ID NO: 1098630 - DNA, 25 bp, Homo sapien
ttttgtgcagttaagaaaataaatg

SEQ ID NO: 1098631 - DNA, 25 bp, Homo sapien
aatctgaatgaacccttaatatcca

SEQ ID NO: 1098632 - DNA, 25 bp, Homo sapien
atagactgaaccggaaccaaaaatg

SEQ ID NO: 1098633 - DNA, 25 bp, Homo sapien
taatccatagctgtcgttagttggc

SEQ ID NO: 1098634 - DNA, 25 bp, Homo sapien
tcatgggtcccagtagtatcactag

SEQ ID NO: 1098635 - DNA, 25 bp, Homo sapien
tgttgatcttggaaagtccaccacc

SEQ ID NO: 1098636 - DNA, 25 bp, Homo sapien
ttaacagaagcagtgtaatgcccac

SEQ ID NO: 1098637 - DNA, 25 bp, Homo sapien
tagcaagtaaggagtagaagtagga

SEQ ID NO: 1098638 - DNA, 25 bp, Homo sapien
ataaaatagcaagtaaggagtagaa

SEQ ID NO: 1098639 - DNA, 25 bp, Homo sapien
aatagcaagtaaggagtagaagtag

SEQ ID NO: 1098640 - DNA, 25 bp, Homo sapien
caagtaaggagtagaagtaggagat

SEQ ID NO: 1098641 - DNA, 25 bp, Homo sapien
taatgcatcactagtctctactgag

SEQ ID NO: 1098642 - DNA, 25 bp, Homo sapien
tgtttaaatgcctccgttttggata

SEQ ID NO: 1098643 - DNA, 25 bp, Homo sapien
agaaccgatacaagtttgttcccag

SEQ ID NO: 1098644 - DNA, 25 bp, Homo sapien
tggagaatacaaatacgagcacttt

SEQ ID NO: 1098645 - DNA, 25 bp, Homo sapien
gatgtactatatacagatcgtgcag

SEQ ID NO: 1098646 - DNA, 25 bp, Homo sapien
tcttgtgtagaagcgaactgtccag

SEQ ID NO: 1098647 - DNA, 25 bp, Homo sapien
tatactagggtacagaatcatcttc

SEQ ID NO: 1098648 - DNA, 25 bp, Homo sapien
tagtccatgcccaaaaagatatact

SEQ ID NO: 1098649 - DNA, 25 bp, Homo sapien
acaagtaaaaaattcaaatattcat

SEQ ID NO: 1098650 - DNA, 25 bp, Homo sapien
tacaagtaaaaaattcaaatattca

SEQ ID NO: 1098651 - DNA, 25 bp, Homo sapien
caagtaaaaaattcaaatattcata

SEQ ID NO: 1098652 - DNA, 25 bp, Homo sapien
tattaaagtgttaccccaatagcat

SEQ ID NO: 1098653 - DNA, 25 bp, Homo sapien
gtattaaagtgttaccccaatagca

SEQ ID NO: 1098654 - DNA, 25 bp, Homo sapien
cagccaggtgtagtagcccgtgcct

SEQ ID NO: 1098655 - DNA, 25 bp, Homo sapien
aaatcagccaggtgtagtagcccgt

SEQ ID NO: 1098656 - DNA, 25 bp, Homo sapien
agcccgtgcctgtaatccgaactac

SEQ ID NO: 1098657 - DNA, 25 bp, Homo sapien
gcaagactcttaagtcaaaaacaaa

SEQ ID NO: 1098658 - DNA, 25 bp, Homo sapien
gcatagtaatgatttccagaacagt

SEQ ID NO: 1098659 - DNA, 25 bp, Homo sapien
acaatggtttttgggtagtagtgca

SEQ ID NO: 1098660 - DNA, 25 bp, Homo sapien
cacttaagaactaaccagatctggg

SEQ ID NO: 1098661 - DNA, 25 bp, Homo sapien
ttttccaaaacgatgcatagtaatg

SEQ ID NO: 1098662 - DNA, 25 bp, Homo sapien
tatcttattatgaggtcgtaggcag

SEQ ID NO: 1098663 - DNA, 25 bp, Homo sapien
cgtaggcagtgcatggaaatccata

SEQ ID NO: 1098664 - DNA, 25 bp, Homo sapien
tgctttgcccacatgtgctagctgt

SEQ ID NO: 1098665 - DNA, 25 bp, Homo sapien
gatttcttatgccaatgctttgccc

SEQ ID NO: 1098666 - DNA, 25 bp, Homo sapien
gttagcttagtaacaattttgataa

SEQ ID NO: 1098667 - DNA, 25 bp, Homo sapien
gcttgcccatcataagtttttctga

SEQ ID NO: 1098668 - DNA, 25 bp, Homo sapien
tctgaagtttgttagcttagtaaca

SEQ ID NO: 1098669 - DNA, 25 bp, Homo sapien
cttcaatgtcacaagcagcttgccc

SEQ ID NO: 1098670 - DNA, 25 bp, Homo sapien
tgaaggaacaatggatatgtggtca

SEQ ID NO: 1098671 - DNA, 25 bp, Homo sapien
gaaggaacaatggatatgtggtcat

SEQ ID NO: 1098672 - DNA, 25 bp, Homo sapien
ttttcaatttcaagcaacgtggaac

SEQ ID NO: 1098673 - DNA, 25 bp, Homo sapien
caatttcaagcaacgtggaactgtt

SEQ ID NO: 1098674 - DNA, 25 bp, Homo sapien
atttcaagcaacgtggaactgtttt

SEQ ID NO: 1098675 - DNA, 25 bp, Homo sapien
ttcaatttcaagcaacgtggaactg

SEQ ID NO: 1098676 - DNA, 25 bp, Homo sapien
aaagaaggagcttaattgtgaacat

SEQ ID NO: 1098677 - DNA, 25 bp, Homo sapien
caataaaaagaaggagcttaattgt

SEQ ID NO: 1098678 - DNA, 25 bp, Homo sapien
ataaaaagaaggagcttaattgtga

SEQ ID NO: 1098679 - DNA, 25 bp, Homo sapien
aaaagaaggagcttaattgtgaaca

SEQ ID NO: 1098680 - DNA, 25 bp, Homo sapien
gaattgtcttgatcaattctggagg

SEQ ID NO: 1098681 - DNA, 25 bp, Homo sapien
aattgtcttgatcaattctggagga

SEQ ID NO: 1098682 - DNA, 25 bp, Homo sapien
attgtcttgatcaattctggaggaa

SEQ ID NO: 1098683 - DNA, 25 bp, Homo sapien
gtctttaagaccatgtcccaactga

SEQ ID NO: 1098684 - DNA, 25 bp, Homo sapien
cactggtttgcagcgatagatcata

SEQ ID NO: 1098685 - DNA, 25 bp, Homo sapien
aatttggcccttcgtcttatggaca

SEQ ID NO: 1098686 - DNA, 25 bp, Homo sapien
tcccaactgaaggaggccattggct

SEQ ID NO: 1098687 - DNA, 25 bp, Homo sapien
cataaacatgaaccctctttatttt

SEQ ID NO: 1098688 - DNA, 25 bp, Homo sapien
ttcaacaatgcaacaaagtatttca

SEQ ID NO: 1098689 - DNA, 25 bp, Homo sapien
tcaacaatgcaacaaagtatttcaa

SEQ ID NO: 1098690 - DNA, 25 bp, Homo sapien
tcaaatggcatgccttagaaatatt

SEQ ID NO: 1098691 - DNA, 25 bp, Homo sapien
tatattggtcttccacggtctggag

SEQ ID NO: 1098692 - DNA, 25 bp, Homo sapien
tattggtcttccacggtctggagaa

SEQ ID NO: 1098693 - DNA, 25 bp, Homo sapien
ttatattggtcttccacggtctgga

SEQ ID NO: 1098694 - DNA, 25 bp, Homo sapien
attggtcttccacggtctggagaag

SEQ ID NO: 1098695 - DNA, 25 bp, Homo sapien
tgtgggttcttgaatactagtcctt

SEQ ID NO: 1098696 - DNA, 25 bp, Homo sapien
gttcttgaatactagtccttctgag

SEQ ID NO: 1098697 - DNA, 25 bp, Homo sapien
tctgtgggttcttgaatactagtcc

SEQ ID NO: 1098698 - DNA, 25 bp, Homo sapien
gggttcttgaatactagtccttctg

SEQ ID NO: 1098699 - DNA, 25 bp, Homo sapien
tgttttacatttcttatttcattca

SEQ ID NO: 1098700 - DNA, 25 bp, Homo sapien
gttttacatttcttatttcattcaa

SEQ ID NO: 1098701 - DNA, 25 bp, Homo sapien
catcatgttttacatttcttatttc

SEQ ID NO: 1098702 - DNA, 25 bp, Homo sapien
tcatgttttacatttcttatttcat

SEQ ID NO: 1098703 - DNA, 25 bp, Homo sapien
aaaacttgagagttgctgggtctga

SEQ ID NO: 1098704 - DNA, 25 bp, Homo sapien
tgttcacctctgttataaatggtgg

SEQ ID NO: 1098705 - DNA, 25 bp, Homo sapien
tgggtctgatggcatacatgccact

SEQ ID NO: 1098706 - DNA, 25 bp, Homo sapien
aaatggtggtacattcagcaggaat

SEQ ID NO: 1098707 - DNA, 25 bp, Homo sapien
tgttgaattaatgtccatggactac

SEQ ID NO: 1098708 - DNA, 25 bp, Homo sapien
tgtgatccatctattcgatgttgaa

SEQ ID NO: 1098709 - DNA, 25 bp, Homo sapien
caagcctcccaaaaccatatttgta

SEQ ID NO: 1098710 - DNA, 25 bp, Homo sapien
gtagttctcccacgtttcattgaag

SEQ ID NO: 1098711 - DNA, 25 bp, Homo sapien
tgagtacttagacatcattcatgga

SEQ ID NO: 1098712 - DNA, 25 bp, Homo sapien
tagttatgatcattgtaagccgtgg

SEQ ID NO: 1098713 - DNA, 25 bp, Homo sapien
taggagtggttcttttcacagctta

SEQ ID NO: 1098714 - DNA, 25 bp, Homo sapien
tagagtgactaatgctaggagtggt

SEQ ID NO: 1098715 - DNA, 25 bp, Homo sapien
ggagtatatcttctctaggcccaac

SEQ ID NO: 1098716 - DNA, 25 bp, Homo sapien
gtatagttggtttcgtgatttccca

SEQ ID NO: 1098717 - DNA, 25 bp, Homo sapien
cagtaatcgcaactagatgtagcgt

SEQ ID NO: 1098718 - DNA, 25 bp, Homo sapien
tgaataaccctctggacagttgaag

SEQ ID NO: 1098719 - DNA, 25 bp, Homo sapien
gagagaaaacgcttatttgggattc

SEQ ID NO: 1098720 - DNA, 25 bp, Homo sapien
aaaagttgtcattgcagataatagc

SEQ ID NO: 1098721 - DNA, 25 bp, Homo sapien
cagactcgtatgtagttactgttac

SEQ ID NO: 1098722 - DNA, 25 bp, Homo sapien
aatacctgattgaactagaatgaac

SEQ ID NO: 1098723 - DNA, 25 bp, Homo sapien
agagtataaccttccattttgagac

SEQ ID NO: 1098724 - DNA, 25 bp, Homo sapien
acttccaagataatcctcttctcct

SEQ ID NO: 1098725 - DNA, 25 bp, Homo sapien
tgctcttggtttgttatatttacca

SEQ ID NO: 1098726 - DNA, 25 bp, Homo sapien
gttggatggatcaacattttggttg

SEQ ID NO: 1098727 - DNA, 25 bp, Homo sapien
taataccagattattagaccacatt

SEQ ID NO: 1098728 - DNA, 25 bp, Homo sapien
taccagattattagaccacattaac

SEQ ID NO: 1098729 - DNA, 25 bp, Homo sapien
gattattagaccacattaacttgga

SEQ ID NO: 1098730 - DNA, 25 bp, Homo sapien
tagaccacattaacttggaatgagg

SEQ ID NO: 1098731 - DNA, 25 bp, Homo sapien
gattataatctagattgtgaccatc

SEQ ID NO: 1098732 - DNA, 25 bp, Homo sapien
ttaaatagacagtgactttaagata

SEQ ID NO: 1098733 - DNA, 25 bp, Homo sapien
tgagaaatgtaaacggtattcttta

SEQ ID NO: 1098734 - DNA, 25 bp, Homo sapien
tctaaaattgattcccacatcacaa

SEQ ID NO: 1098735 - DNA, 25 bp, Homo sapien
gaactgtacaattaccagtcctctg

SEQ ID NO: 1098736 - DNA, 25 bp, Homo sapien
aagttgtgatattagctcatatgat

SEQ ID NO: 1098737 - DNA, 25 bp, Homo sapien
catactctgtgctgacgatttttag

SEQ ID NO: 1098738 - DNA, 25 bp, Homo sapien
ttaatactacaacatttaagaactg

SEQ ID NO: 1098739 - DNA, 25 bp, Homo sapien
tctacttgaaaacctacacgaatgt

SEQ ID NO: 1098740 - DNA, 25 bp, Homo sapien
tacctcatgttaaagtcaatgtgac

SEQ ID NO: 1098741 - DNA, 25 bp, Homo sapien
tcaggctgtttaaacgttcagtaac

SEQ ID NO: 1098742 - DNA, 25 bp, Homo sapien
tataaactttaactcgatgccacaa

SEQ ID NO: 1098743 - DNA, 25 bp, Homo sapien
gcttagtctgtggtcctgaaaatta

SEQ ID NO: 1098744 - DNA, 25 bp, Homo sapien
taagtattgacaaaggtaggtcacc

SEQ ID NO: 1098745 - DNA, 25 bp, Homo sapien
gcgttaatttcgacagcttagtctg

SEQ ID NO: 1098746 - DNA, 25 bp, Homo sapien
ataacttgggcactatatcctttaa

SEQ ID NO: 1098747 - DNA, 25 bp, Homo sapien
tacaaagttgagtgaaaagccagag

SEQ ID NO: 1098748 - DNA, 25 bp, Homo sapien
tgagcttgaaagacacaggtccagg

SEQ ID NO: 1098749 - DNA, 25 bp, Homo sapien
taaaggagtccgtgagagcagatag

SEQ ID NO: 1098750 - DNA, 25 bp, Homo sapien
gatgtcttccgggttccaggcttct

SEQ ID NO: 1098751 - DNA, 25 bp, Homo sapien
tatatgggacgtgcaagttcacagg

SEQ ID NO: 1098752 - DNA, 25 bp, Homo sapien
gagtatacattcttgtgagggcaca

SEQ ID NO: 1098753 - DNA, 25 bp, Homo sapien
tcatgaccttgaactgtgcaccagt

SEQ ID NO: 1098754 - DNA, 25 bp, Homo sapien
gatatctgcaccttaaaatacggca

SEQ ID NO: 1098755 - DNA, 25 bp, Homo sapien
ctgggacctgtcggggtggggctag

SEQ ID NO: 1098756 - DNA, 25 bp, Homo sapien
gctgtggttggtttactacattcat

SEQ ID NO: 1098757 - DNA, 25 bp, Homo sapien
tgctgtggttggtttactacattca

SEQ ID NO: 1098758 - DNA, 25 bp, Homo sapien
ttttctaaatagtaataagcatcaa

SEQ ID NO: 1098759 - DNA, 25 bp, Homo sapien
tgagatgtctataatagttgtgata

SEQ ID NO: 1098760 - DNA, 25 bp, Homo sapien
tctaaatagtaataagcatcaacaa

SEQ ID NO: 1098761 - DNA, 25 bp, Homo sapien
atgtatgtttcaaattagttcaacc

SEQ ID NO: 1098762 - DNA, 25 bp, Homo sapien
gggactgcaggcgcctgccatcccg

SEQ ID NO: 1098763 - DNA, 25 bp, Homo sapien
tgcaggcgcctgccatcccgcccgg

SEQ ID NO: 1098764 - DNA, 25 bp, Homo sapien
actgcaggcgcctgccatcccgccc

SEQ ID NO: 1098765 - DNA, 25 bp, Homo sapien
gactgcaggcgcctgccatcccgcc

SEQ ID NO: 1098766 - DNA, 25 bp, Homo sapien
tgtgtacttgaattatagggctctt

SEQ ID NO: 1098767 - DNA, 25 bp, Homo sapien
tcttgagggctaggaaactttgact

SEQ ID NO: 1098768 - DNA, 25 bp, Homo sapien
atgtgtacttgaattatagggctct

SEQ ID NO: 1098769 - DNA, 25 bp, Homo sapien
gtgtacttgaattatagggctcttg

SEQ ID NO: 1098770 - DNA, 25 bp, Homo sapien
ggaggagcggtttctcgttgcgcgc

SEQ ID NO: 1098771 - DNA, 25 bp, Homo sapien
aggagcggtttctcgttgcgcgcct

SEQ ID NO: 1098772 - DNA, 25 bp, Homo sapien
ggggaggagcggtttctcgttgcgc

SEQ ID NO: 1098773 - DNA, 25 bp, Homo sapien
ctgggggaggagcggtttctcgttg

SEQ ID NO: 1098774 - DNA, 25 bp, Homo sapien
tctcggtcgtgcaggctccgcggca

SEQ ID NO: 1098775 - DNA, 25 bp, Homo sapien
gtctctggcttctctccgcgacctc

SEQ ID NO: 1098776 - DNA, 25 bp, Homo sapien
gctggcgcctcgcttcctcagcgct

SEQ ID NO: 1098777 - DNA, 25 bp, Homo sapien
tcgccaggtcgctggcctgtctctg

SEQ ID NO: 1098778 - DNA, 25 bp, Homo sapien
cagaccctaaactctttgaggacag

SEQ ID NO: 1098779 - DNA, 25 bp, Homo sapien
taggttatataacagggctaaggac

SEQ ID NO: 1098780 - DNA, 25 bp, Homo sapien
tttatatgcactccaatagcttcct

SEQ ID NO: 1098781 - DNA, 25 bp, Homo sapien
tcccggagttgcagccagcctttct

SEQ ID NO: 1098782 - DNA, 25 bp, Homo sapien
ctctgccaaattggtcctggcttct

SEQ ID NO: 1098783 - DNA, 25 bp, Homo sapien
ggcttctggcaagtagtttctttgt

SEQ ID NO: 1098784 - DNA, 25 bp, Homo sapien
ctggcttctggcaagtagtttcttt

SEQ ID NO: 1098785 - DNA, 25 bp, Homo sapien
ggacttagtacactggtatgtctaa

SEQ ID NO: 1098786 - DNA, 25 bp, Homo sapien
gcttgagggacttagtacactggta

SEQ ID NO: 1098787 - DNA, 25 bp, Homo sapien
tagtacactggtatgtctaatgaaa

SEQ ID NO: 1098788 - DNA, 25 bp, Homo sapien
ctggtatgtctaatgaaaactgttc

SEQ ID NO: 1098789 - DNA, 25 bp, Homo sapien
tggtaccctgtacttcaccccatgg

SEQ ID NO: 1098790 - DNA, 25 bp, Homo sapien
tgtagtctctgcattactttcaggg

SEQ ID NO: 1098791 - DNA, 25 bp, Homo sapien
gggatctgtaatagacactgttggt

SEQ ID NO: 1098792 - DNA, 25 bp, Homo sapien
tattctggcaagatccctattgtag

SEQ ID NO: 1098793 - DNA, 25 bp, Homo sapien
ttttaagggaaagagcagatacacc

SEQ ID NO: 1098794 - DNA, 25 bp, Homo sapien
cactgacttgaccataccaaaaggg

SEQ ID NO: 1098795 - DNA, 25 bp, Homo sapien
gaagctaacatctgtaccaggcact

SEQ ID NO: 1098796 - DNA, 25 bp, Homo sapien
tatagcaaacagcacagtgaactcc

SEQ ID NO: 1098797 - DNA, 25 bp, Homo sapien
gcttggacaacaggcgcctgccagc

SEQ ID NO: 1098798 - DNA, 25 bp, Homo sapien
agcttggacaacaggcgcctgccag

SEQ ID NO: 1098799 - DNA, 25 bp, Homo sapien
taactgtgatgctgtaagaaggtaa

SEQ ID NO: 1098800 - DNA, 25 bp, Homo sapien
gccagataccccaaagcaaggcata

SEQ ID NO: 1098801 - DNA, 25 bp, Homo sapien
tggttaaatatacatcaagggagac

SEQ ID NO: 1098802 - DNA, 25 bp, Homo sapien
taaatggaagacctctcagagagga

SEQ ID NO: 1098803 - DNA, 25 bp, Homo sapien
gacagtgcaggctataacaaggcat

SEQ ID NO: 1098804 - DNA, 25 bp, Homo sapien
cactgagaggcaagatagcacacct

SEQ ID NO: 1098805 - DNA, 25 bp, Homo sapien
gagcattgttcctaaaagttccaga

SEQ ID NO: 1098806 - DNA, 25 bp, Homo sapien
ggatctaagtgctcaaaccaatgct

SEQ ID NO: 1098807 - DNA, 25 bp, Homo sapien
taatagctaaaacagcagggctgga

SEQ ID NO: 1098808 - DNA, 25 bp, Homo sapien
gaatttgattgaacagccagactag

SEQ ID NO: 1098809 - DNA, 25 bp, Homo sapien
tgttaaacttatgagactgcaggtg

SEQ ID NO: 1098810 - DNA, 25 bp, Homo sapien
gaaaataaagcgtggaatgtggcca

SEQ ID NO: 1098811 - DNA, 25 bp, Homo sapien
gacacacttttagttgcttgcataa

SEQ ID NO: 1098812 - DNA, 25 bp, Homo sapien
caataacaatcactgagtagatggt

SEQ ID NO: 1098813 - DNA, 25 bp, Homo sapien
tgtgaagcagagaatattgacacac

SEQ ID NO: 1098814 - DNA, 25 bp, Homo sapien
tgttcatactgcacacatacaggca

SEQ ID NO: 1098815 - DNA, 25 bp, Homo sapien
catggaagagttcacagggcacaat

SEQ ID NO: 1098816 - DNA, 25 bp, Homo sapien
ggtttctggcacttacaactgaagg

SEQ ID NO: 1098817 - DNA, 25 bp, Homo sapien
cattatttgagtcccttagcacagt

SEQ ID NO: 1098818 - DNA, 25 bp, Homo sapien
gataaacttgagtgagacacctccc

SEQ ID NO: 1098819 - DNA, 25 bp, Homo sapien
aatatatcggttagctgttcaagac

SEQ ID NO: 1098820 - DNA, 25 bp, Homo sapien
catcccatcctaggccagttgagag

SEQ ID NO: 1098821 - DNA, 25 bp, Homo sapien
caatgtatagagttcatagccctac

SEQ ID NO: 1098822 - DNA, 25 bp, Homo sapien
cagatacatagcaccatgccgggca

SEQ ID NO: 1098823 - DNA, 25 bp, Homo sapien
taaagattgtgtgtccagagttcat

SEQ ID NO: 1098824 - DNA, 25 bp, Homo sapien
ctggagttgttcgtccctccccagg

SEQ ID NO: 1098825 - DNA, 25 bp, Homo sapien
cgcttggtgataggcgatagtccca

SEQ ID NO: 1098826 - DNA, 25 bp, Homo sapien
tccccaggggtccatgatctcactg

SEQ ID NO: 1098827 - DNA, 25 bp, Homo sapien
atggcgcgggcaggccggcagtgct

SEQ ID NO: 1098828 - DNA, 25 bp, Homo sapien
gagcgctgtgcgcagcctcggttcc

SEQ ID NO: 1098829 - DNA, 25 bp, Homo sapien
ctgaggcctggcgagaattcgagca

SEQ ID NO: 1098830 - DNA, 25 bp, Homo sapien
gccactctgattgcagggcctgcca

SEQ ID NO: 1098831 - DNA, 25 bp, Homo sapien
agcagccgccacaaaaccagcccgc

SEQ ID NO: 1098832 - DNA, 25 bp, Homo sapien
gcacacacgcagacgttccgacctc

SEQ ID NO: 1098833 - DNA, 25 bp, Homo sapien
acacgcagacgttccgacctcagcg

SEQ ID NO: 1098834 - DNA, 25 bp, Homo sapien
tcagcgccgcagctacaggtacttt

SEQ ID NO: 1098835 - DNA, 25 bp, Homo sapien
gagaactgtaaaaatgtgcaggagc

SEQ ID NO: 1098836 - DNA, 25 bp, Homo sapien
gaactgtaaaaatgtgcaggagcca

SEQ ID NO: 1098837 - DNA, 25 bp, Homo sapien
agaactgtaaaaatgtgcaggagcc

SEQ ID NO: 1098838 - DNA, 25 bp, Homo sapien
aactgtaaaaatgtgcaggagccac

SEQ ID NO: 1098839 - DNA, 25 bp, Homo sapien
aaagccatcacttgattgcattctt

SEQ ID NO: 1098840 - DNA, 25 bp, Homo sapien
agccatcacttgattgcattcttct

SEQ ID NO: 1098841 - DNA, 25 bp, Homo sapien
aggaaaagccatcacttgattgcat

SEQ ID NO: 1098842 - DNA, 25 bp, Homo sapien
gaaaagccatcacttgattgcattc

SEQ ID NO: 1098843 - DNA, 25 bp, Homo sapien
ggtttttagcttgtcaacttcatct

SEQ ID NO: 1098844 - DNA, 25 bp, Homo sapien
catgttgttccaagcagatataaat

SEQ ID NO: 1098845 - DNA, 25 bp, Homo sapien
ttcatgttgttccaagcagatataa

SEQ ID NO: 1098846 - DNA, 25 bp, Homo sapien
tttagcttgtcaacttcatctgttc

SEQ ID NO: 1098847 - DNA, 25 bp, Homo sapien
gcaataatacaggagaatttctact

SEQ ID NO: 1098848 - DNA, 25 bp, Homo sapien
catacggtctaaagataaccagaga

SEQ ID NO: 1098849 - DNA, 25 bp, Homo sapien
tacggtctaaagataaccagagaaa

SEQ ID NO: 1098850 - DNA, 25 bp, Homo sapien
aacatacggtctaaagataaccaga

SEQ ID NO: 1098851 - DNA, 25 bp, Homo sapien
taaacatacggtctaaagataacca

SEQ ID NO: 1098852 - DNA, 25 bp, Homo sapien
aaagctgagccttctatttgaggga

SEQ ID NO: 1098853 - DNA, 25 bp, Homo sapien
tacgtgatcctctattgtacatccc

SEQ ID NO: 1098854 - DNA, 25 bp, Homo sapien
tacatttcctgcaattacgtgatcc

SEQ ID NO: 1098855 - DNA, 25 bp, Homo sapien
gagggaattcttccctgtaggtcag

SEQ ID NO: 1098856 - DNA, 25 bp, Homo sapien
aagaaagtgtagtatgagtccttga

SEQ ID NO: 1098857 - DNA, 25 bp, Homo sapien
caagaaagtgtagtatgagtccttg

SEQ ID NO: 1098858 - DNA, 25 bp, Homo sapien
gattcagagatctagtgaggactga

SEQ ID NO: 1098859 - DNA, 25 bp, Homo sapien
tcctgtacgtttcttcagaataact

SEQ ID NO: 1098860 - DNA, 25 bp, Homo sapien
caagacaatccccaaacatgcatgt

SEQ ID NO: 1098861 - DNA, 25 bp, Homo sapien
ccttgcccatgactgcacaagacta

SEQ ID NO: 1098862 - DNA, 25 bp, Homo sapien
tattcaaagcatcaggccaggtcca

SEQ ID NO: 1098863 - DNA, 25 bp, Homo sapien
attcaaagcatcaggccaggtccaa

SEQ ID NO: 1098864 - DNA, 25 bp, Homo sapien
tagttgatgtaagccaaaaagagcc

SEQ ID NO: 1098865 - DNA, 25 bp, Homo sapien
gacagtgtgggaagtccatgattca

SEQ ID NO: 1098866 - DNA, 25 bp, Homo sapien
gaaagtgatgcttcaaatgatgcag

SEQ ID NO: 1098867 - DNA, 25 bp, Homo sapien
gataaacttcatttcgcatttcatg

SEQ ID NO: 1098868 - DNA, 25 bp, Homo sapien
caatcttgtgcaacataaatagtta

SEQ ID NO: 1098869 - DNA, 25 bp, Homo sapien
aaatagttattccttgtaaatcagg

SEQ ID NO: 1098870 - DNA, 25 bp, Homo sapien
ggatgccttgcttcttcaactgctt

SEQ ID NO: 1098871 - DNA, 25 bp, Homo sapien
gtaaatcaggatgccttgcttcttc

SEQ ID NO: 1098872 - DNA, 25 bp, Homo sapien
ccagtttttcaatgatgggaagcca

SEQ ID NO: 1098873 - DNA, 25 bp, Homo sapien
gagaacagttacaaagccgctgcag

SEQ ID NO: 1098874 - DNA, 25 bp, Homo sapien
gctagctactatatgacactgggcc

SEQ ID NO: 1098875 - DNA, 25 bp, Homo sapien
agtataattagcatgtcccaggaac

SEQ ID NO: 1098876 - DNA, 25 bp, Homo sapien
tccaccaagtctaacaggaactaga

SEQ ID NO: 1098877 - DNA, 25 bp, Homo sapien
cttcacaaattctaagtagtcggtg

SEQ ID NO: 1098878 - DNA, 25 bp, Homo sapien
gaactagaataataacagctttgtc

SEQ ID NO: 1098879 - DNA, 25 bp, Homo sapien
ttgtcatctgcattatcagaagtca

SEQ ID NO: 1098880 - DNA, 25 bp, Homo sapien
tgactgtttaggtttgccaccaata

SEQ ID NO: 1098881 - DNA, 25 bp, Homo sapien
cacaatattccaggcttaaaatacc

SEQ ID NO: 1098882 - DNA, 25 bp, Homo sapien
taatacccacacaatattccaggct

SEQ ID NO: 1098883 - DNA, 25 bp, Homo sapien
tgaaatccagcaaagtaatatgact

SEQ ID NO: 1098884 - DNA, 25 bp, Homo sapien
tatgctgacatctacaaaagattgg

SEQ ID NO: 1098885 - DNA, 25 bp, Homo sapien
tgctgacatctacaaaagattggca

SEQ ID NO: 1098886 - DNA, 25 bp, Homo sapien
agattggcagtaatgaggatccatg

SEQ ID NO: 1098887 - DNA, 25 bp, Homo sapien
tgaggatccatgtaaatcaaactgt

SEQ ID NO: 1098888 - DNA, 25 bp, Homo sapien
ttttctgaattaaaatactggatca

SEQ ID NO: 1098889 - DNA, 25 bp, Homo sapien
gaattaaaatactggatcacaaaat

SEQ ID NO: 1098890 - DNA, 25 bp, Homo sapien
ttctgaattaaaatactggatcaca

SEQ ID NO: 1098891 - DNA, 25 bp, Homo sapien
ctgaattaaaatactggatcacaaa

SEQ ID NO: 1098892 - DNA, 25 bp, Homo sapien
attactttagtctgtaaaagcacca

SEQ ID NO: 1098893 - DNA, 25 bp, Homo sapien
tactttagtctgtaaaagcaccaac

SEQ ID NO: 1098894 - DNA, 25 bp, Homo sapien
ttagtctgtaaaagcaccaactggg

SEQ ID NO: 1098895 - DNA, 25 bp, Homo sapien
ctttagtctgtaaaagcaccaactg

SEQ ID NO: 1098896 - DNA, 25 bp, Homo sapien
ctttttgggagaagggcagtggaat

SEQ ID NO: 1098897 - DNA, 25 bp, Homo sapien
tttttgggagaagggcagtggaatg

SEQ ID NO: 1098898 - DNA, 25 bp, Homo sapien
catttcgacagtaaaatcctattgt

SEQ ID NO: 1098899 - DNA, 25 bp, Homo sapien
ttcagaagctcgtttgaagtcctga

SEQ ID NO: 1098900 - DNA, 25 bp, Homo sapien
cgacagtaaaatcctattgtacagc

SEQ ID NO: 1098901 - DNA, 25 bp, Homo sapien
gaagtcctgaacatttcgacagtaa

SEQ ID NO: 1098902 - DNA, 25 bp, Homo sapien
cctactcctaattcatggcttccaa

SEQ ID NO: 1098903 - DNA, 25 bp, Homo sapien
ccacagggatttccacagttgacca

SEQ ID NO: 1098904 - DNA, 25 bp, Homo sapien
caaacacgccaaactctactgttca

SEQ ID NO: 1098905 - DNA, 25 bp, Homo sapien
taaaagatactactaaactgacttg

SEQ ID NO: 1098906 - DNA, 25 bp, Homo sapien
tattccatagagatgctgaagtctg

SEQ ID NO: 1098907 - DNA, 25 bp, Homo sapien
ttcaagttttccactctcaactctc

SEQ ID NO: 1098908 - DNA, 25 bp, Homo sapien
gtaaacctgacttcatcatactcat

SEQ ID NO: 1098909 - DNA, 25 bp, Homo sapien
ttgttttggaggcacttccagtaaa

SEQ ID NO: 1098910 - DNA, 25 bp, Homo sapien
caagaatggctacattgtcaaaacc

SEQ ID NO: 1098911 - DNA, 25 bp, Homo sapien
tttaggctatctatgtgacatggag

SEQ ID NO: 1098912 - DNA, 25 bp, Homo sapien
cttaaaagtccttccataatggatg

SEQ ID NO: 1098913 - DNA, 25 bp, Homo sapien
aagattcaaatctgtgtcccaggtg

SEQ ID NO: 1098914 - DNA, 25 bp, Homo sapien
agtgctactcctttgcctgttctgg

SEQ ID NO: 1098915 - DNA, 25 bp, Homo sapien
tagtgcacactaagaccacacgaca

SEQ ID NO: 1098916 - DNA, 25 bp, Homo sapien
ccttattggatgcaatagtgcacac

SEQ ID NO: 1098917 - DNA, 25 bp, Homo sapien
gacaaatctactgttttagccctga

SEQ ID NO: 1098918 - DNA, 25 bp, Homo sapien
aaagcaagacaaactcttccgtgct

SEQ ID NO: 1098919 - DNA, 25 bp, Homo sapien
taagggatatttctccttagaagaa

SEQ ID NO: 1098920 - DNA, 25 bp, Homo sapien
catagtctctggaatgaccatttac

SEQ ID NO: 1098921 - DNA, 25 bp, Homo sapien
cttccgtgctaaatctttttaattg

SEQ ID NO: 1098922 - DNA, 25 bp, Homo sapien
aattcttcttatcaagcacaaatgt

SEQ ID NO: 1098923 - DNA, 25 bp, Homo sapien
tatttattagaaagcaagattcatt

SEQ ID NO: 1098924 - DNA, 25 bp, Homo sapien
ttatcaagcacaaatgtgctaatct

SEQ ID NO: 1098925 - DNA, 25 bp, Homo sapien
tagaaagcaagattcattaaatcat

SEQ ID NO: 1098926 - DNA, 25 bp, Homo sapien
cagatttgccttacaggtggcctca

SEQ ID NO: 1098927 - DNA, 25 bp, Homo sapien
ggttcaacagcaagcataatgagga

SEQ ID NO: 1098928 - DNA, 25 bp, Homo sapien
gcaggaggctagacagcattaaagt

SEQ ID NO: 1098929 - DNA, 25 bp, Homo sapien
taaaatttcgcccttgagataggaa

SEQ ID NO: 1098930 - DNA, 25 bp, Homo sapien
acagaattcatttgagacactgatt

SEQ ID NO: 1098931 - DNA, 25 bp, Homo sapien
tcaaatgaaaggattaaaataatcc

SEQ ID NO: 1098932 - DNA, 25 bp, Homo sapien
tgaacagaattcatttgagacactg

SEQ ID NO: 1098933 - DNA, 25 bp, Homo sapien
ttttcagagcaatatatgcatttat

SEQ ID NO: 1098934 - DNA, 25 bp, Homo sapien
tctgatggaagagatcaatgacttt

SEQ ID NO: 1098935 - DNA, 25 bp, Homo sapien
tcaggtatactaaaacaatccgccc

SEQ ID NO: 1098936 - DNA, 25 bp, Homo sapien
tctctttcagctttacatgcaactc

SEQ ID NO: 1098937 - DNA, 25 bp, Homo sapien
ttctacactgaaacatgaaagctcc

SEQ ID NO: 1098938 - DNA, 25 bp, Homo sapien
cacagaatatattagattcagaaag

SEQ ID NO: 1098939 - DNA, 25 bp, Homo sapien
ttattaaatttctccggagaccatg

SEQ ID NO: 1098940 - DNA, 25 bp, Homo sapien
gaaagggccgcaatgtcaatgacac

SEQ ID NO: 1098941 - DNA, 25 bp, Homo sapien
gcagctgtgttaacagttaagggcc

SEQ ID NO: 1098942 - DNA, 25 bp, Homo sapien
ccttaattaccagagattttatagc

SEQ ID NO: 1098943 - DNA, 25 bp, Homo sapien
gcaggtaataattaagttgattcac

SEQ ID NO: 1098944 - DNA, 25 bp, Homo sapien
gcaattactgtcaaatcccccttaa

SEQ ID NO: 1098945 - DNA, 25 bp, Homo sapien
attatacgtctgctgtaatgcattg

SEQ ID NO: 1098946 - DNA, 25 bp, Homo sapien
gaaacaaagtacactgctccagggc

SEQ ID NO: 1098947 - DNA, 25 bp, Homo sapien
tatggtcctcgcaacagatatgcat

SEQ ID NO: 1098948 - DNA, 25 bp, Homo sapien
tctgacagccagaagccgtatagcc

SEQ ID NO: 1098949 - DNA, 25 bp, Homo sapien
cagctgtaggactgtcagagaccca

SEQ ID NO: 1098950 - DNA, 25 bp, Homo sapien
tgggttattggattctagctcagcc

SEQ ID NO: 1098951 - DNA, 25 bp, Homo sapien
tagctcagccaatgtatattgctca

SEQ ID NO: 1098952 - DNA, 25 bp, Homo sapien
tctttctgctgctaaaggagactga

SEQ ID NO: 1098953 - DNA, 25 bp, Homo sapien
gactccatatactcatggcacttga

SEQ ID NO: 1098954 - DNA, 25 bp, Homo sapien
ctatggagatgcaccacattgccat

SEQ ID NO: 1098955 - DNA, 25 bp, Homo sapien
tctatggagatgcaccacattgcca

SEQ ID NO: 1098956 - DNA, 25 bp, Homo sapien
ctctatggagatgcaccacattgcc

SEQ ID NO: 1098957 - DNA, 25 bp, Homo sapien
gcttgcctcaatgtcatcgtctatg

SEQ ID NO: 1098958 - DNA, 25 bp, Homo sapien
caatgtcatcgtctatgataaatga

SEQ ID NO: 1098959 - DNA, 25 bp, Homo sapien
ttccaggtcatatccaaggcttgcc

SEQ ID NO: 1098960 - DNA, 25 bp, Homo sapien
tcattccaggtcatatccaaggctt

SEQ ID NO: 1098961 - DNA, 25 bp, Homo sapien
tgccaatggcccgagtcagatcctt

SEQ ID NO: 1098962 - DNA, 25 bp, Homo sapien
tcctcctgttggtcacatgtttgcc

SEQ ID NO: 1098963 - DNA, 25 bp, Homo sapien
gatccttagagctaagttggatcat

SEQ ID NO: 1098964 - DNA, 25 bp, Homo sapien
ggtcacatgtttgccaatggcccga

SEQ ID NO: 1098965 - DNA, 25 bp, Homo sapien
gaaaatgggccacagtacgcaaaca

SEQ ID NO: 1098966 - DNA, 25 bp, Homo sapien
tccctgggctgatcaagagtggagc

SEQ ID NO: 1098967 - DNA, 25 bp, Homo sapien
tatcagaggcttggcactggagtcc

SEQ ID NO: 1098968 - DNA, 25 bp, Homo sapien
tcttgttacaactcggatgccctgc

SEQ ID NO: 1098969 - DNA, 25 bp, Homo sapien
ggctgtagtgagctgtgatcctgtc

SEQ ID NO: 1098970 - DNA, 25 bp, Homo sapien
gctgtagtgagctgtgatcctgtca

SEQ ID NO: 1098971 - DNA, 25 bp, Homo sapien
aggctgtagtgagctgtgatcctgt

SEQ ID NO: 1098972 - DNA, 25 bp, Homo sapien
tagtgatggcatcaggaccagagac

SEQ ID NO: 1098973 - DNA, 25 bp, Homo sapien
gaggctccaggatgatgctacagaa

SEQ ID NO: 1098974 - DNA, 25 bp, Homo sapien
ggaccagcgatcctctttacagatg

SEQ ID NO: 1098975 - DNA, 25 bp, Homo sapien
tgaaagaatgctgagagcccgaaca

SEQ ID NO: 1098976 - DNA, 25 bp, Homo sapien
tcagcagcacgaggagaaggtgttc

SEQ ID NO: 1098977 - DNA, 25 bp, Homo sapien
tacatcagtgagcaactaggcgtga

SEQ ID NO: 1098978 - DNA, 25 bp, Homo sapien
aaataccagggccaaaatgaagcgc

SEQ ID NO: 1098979 - DNA, 25 bp, Homo sapien
aacatttggctcaggcgctgaaccc

SEQ ID NO: 1098980 - DNA, 25 bp, Homo sapien
tcagaatgcagggaagacaataggt

SEQ ID NO: 1098981 - DNA, 25 bp, Homo sapien
caataggtatattggaacagcaaca

SEQ ID NO: 1098982 - DNA, 25 bp, Homo sapien
taatgattgagtgcggtccagcacc

SEQ ID NO: 1098983 - DNA, 25 bp, Homo sapien
ctgggaatagtaatgcacaagccat

SEQ ID NO: 1098984 - DNA, 25 bp, Homo sapien
cagtcatcagatggtactggccttc

SEQ ID NO: 1098985 - DNA, 25 bp, Homo sapien
tgtctacaccagtcatcagatggta

SEQ ID NO: 1098986 - DNA, 25 bp, Homo sapien
catcagatggtactggccttccaat

SEQ ID NO: 1098987 - DNA, 25 bp, Homo sapien
gatggtactggccttccaatctctc

SEQ ID NO: 1098988 - DNA, 25 bp, Homo sapien
gaataacatggacatgtctgatgca

SEQ ID NO: 1098989 - DNA, 25 bp, Homo sapien
cttcctggaactgcgagacaatggg

SEQ ID NO: 1098990 - DNA, 25 bp, Homo sapien
gggacggcagcgcataatacttcct

SEQ ID NO: 1098991 - DNA, 25 bp, Homo sapien
ttctctggaatggaccgaatatgga

SEQ ID NO: 1098992 - DNA, 25 bp, Homo sapien
cttttgtattctgtccatttgctcc

SEQ ID NO: 1098993 - DNA, 25 bp, Homo sapien
tgtattctgtccatttgctcctcgt

SEQ ID NO: 1098994 - DNA, 25 bp, Homo sapien
tctgtccatttgctcctcgttgtca

SEQ ID NO: 1098995 - DNA, 25 bp, Homo sapien
tattctgtccatttgctcctcgttg

SEQ ID NO: 1098996 - DNA, 25 bp, Homo sapien
gtctagtgggccagccaataccttc

SEQ ID NO: 1098997 - DNA, 25 bp, Homo sapien
gaagataattgagaagttagccaga

SEQ ID NO: 1098998 - DNA, 25 bp, Homo sapien
gttagccagaataaatgaagtttcg

SEQ ID NO: 1098999 - DNA, 25 bp, Homo sapien
tttgcacttttacacatctccactg

SEQ ID NO: 1099000 - DNA, 25 bp, Homo sapien
tcttcagcaacacaaggcgcagctc

SEQ ID NO: 1099001 - DNA, 25 bp, Homo sapien
aacagtcttcagcaacacaaggcgc

SEQ ID NO: 1099002 - DNA, 25 bp, Homo sapien
aaggcgcagctcctggcgttttgga

SEQ ID NO: 1099003 - DNA, 25 bp, Homo sapien
aaatgatgttgttaaaagtttcaat

SEQ ID NO: 1099004 - DNA, 25 bp, Homo sapien
ataagaggacaatcgcttacattcc

SEQ ID NO: 1099005 - DNA, 25 bp, Homo sapien
ctggataagaggacaatcgcttaca

SEQ ID NO: 1099006 - DNA, 25 bp, Homo sapien
ggataagaggacaatcgcttacatt

SEQ ID NO: 1099007 - DNA, 25 bp, Homo sapien
gataagaggacaatcgcttacattc

SEQ ID NO: 1099008 - DNA, 25 bp, Homo sapien
tggccccatgacatcgggaatgaac

SEQ ID NO: 1099009 - DNA, 25 bp, Homo sapien
aggtcccgatcttagctggccccat

SEQ ID NO: 1099010 - DNA, 25 bp, Homo sapien
ccatgacatcgggaatgaacttggc

SEQ ID NO: 1099011 - DNA, 25 bp, Homo sapien
cttagctggccccatgacatcggga

SEQ ID NO: 1099012 - DNA, 25 bp, Homo sapien
caatgtcatctaaggaaatacccat

SEQ ID NO: 1099013 - DNA, 25 bp, Homo sapien
ttcaccttccgccatgtttgtgagg

SEQ ID NO: 1099014 - DNA, 25 bp, Homo sapien
accttccgccatgtttgtgaggcct

SEQ ID NO: 1099015 - DNA, 25 bp, Homo sapien
ctttcaccttccgccatgtttgtga

SEQ ID NO: 1099016 - DNA, 25 bp, Homo sapien
caccttccgccatgtttgtgaggcc

SEQ ID NO: 1099017 - DNA, 25 bp, Homo sapien
ctcgttggctttgaggtttgacact

SEQ ID NO: 1099018 - DNA, 25 bp, Homo sapien
tcgttggctttgaggtttgacactt

SEQ ID NO: 1099019 - DNA, 25 bp, Homo sapien
tctcgttggctttgaggtttgacac

SEQ ID NO: 1099020 - DNA, 25 bp, Homo sapien
caagaagggatagttgggggccagg

SEQ ID NO: 1099021 - DNA, 25 bp, Homo sapien
ttgggggccaggctttcagtcccat

SEQ ID NO: 1099022 - DNA, 25 bp, Homo sapien
tgtcaaggaccaagaagggatagtt

SEQ ID NO: 1099023 - DNA, 25 bp, Homo sapien
tcaaggaccaagaagggatagttgg

SEQ ID NO: 1099024 - DNA, 25 bp, Homo sapien
gcagccccgagaattcacaccgaag

SEQ ID NO: 1099025 - DNA, 25 bp, Homo sapien
ccgagaattcacaccgaagccttct

SEQ ID NO: 1099026 - DNA, 25 bp, Homo sapien
gaattcacaccgaagccttcttttg

SEQ ID NO: 1099027 - DNA, 25 bp, Homo sapien
cacaccgaagccttcttttggctca

SEQ ID NO: 1099028 - DNA, 25 bp, Homo sapien
cactccttgccaacctgaggacagt

SEQ ID NO: 1099029 - DNA, 25 bp, Homo sapien
gcttgcatctgagcctcgccaggcc

SEQ ID NO: 1099030 - DNA, 25 bp, Homo sapien
cccactccttgccaacctgaggaca

SEQ ID NO: 1099031 - DNA, 25 bp, Homo sapien
aggcctcaggcgggactctgcaggg

SEQ ID NO: 1099032 - DNA, 25 bp, Homo sapien
caaaacgcgtaaactctgagcaggc

SEQ ID NO: 1099033 - DNA, 25 bp, Homo sapien
cgcgtaaactctgagcaggcttggg

SEQ ID NO: 1099034 - DNA, 25 bp, Homo sapien
cttccaaaacgcgtaaactctgagc

SEQ ID NO: 1099035 - DNA, 25 bp, Homo sapien
cttcttccaaaacgcgtaaactctg

SEQ ID NO: 1099036 - DNA, 25 bp, Homo sapien
gctagatccatgaacgcccagtttt

SEQ ID NO: 1099037 - DNA, 25 bp, Homo sapien
caaacagacggatggcaaatatgca

SEQ ID NO: 1099038 - DNA, 25 bp, Homo sapien
caaatatgcaaagcgggaggaatgg

SEQ ID NO: 1099039 - DNA, 25 bp, Homo sapien
ccgagctggctctgctagatccatg

SEQ ID NO: 1099040 - DNA, 25 bp, Homo sapien
ttcagagcatgacgaatacagatca

SEQ ID NO: 1099041 - DNA, 25 bp, Homo sapien
atgggctggagcttcagagcatgac

SEQ ID NO: 1099042 - DNA, 25 bp, Homo sapien
tggagcttcagagcatgacgaatac

SEQ ID NO: 1099043 - DNA, 25 bp, Homo sapien
gcttcagagcatgacgaatacagat

SEQ ID NO: 1099044 - DNA, 25 bp, Homo sapien
gatttgtaggctttacaaggccctg

SEQ ID NO: 1099045 - DNA, 25 bp, Homo sapien
gctgtgctgcggcagagaataataa

SEQ ID NO: 1099046 - DNA, 25 bp, Homo sapien
agatttgtaggctttacaaggccct

SEQ ID NO: 1099047 - DNA, 25 bp, Homo sapien
tctgagagaattgaatctcgctgtg

SEQ ID NO: 1099048 - DNA, 25 bp, Homo sapien
gacatttggatctgccgcagctgcc

SEQ ID NO: 1099049 - DNA, 25 bp, Homo sapien
gggacatttctgatgtgtcaaattc

SEQ ID NO: 1099050 - DNA, 25 bp, Homo sapien
tgaacaggttgacaaatgtggaagg

SEQ ID NO: 1099051 - DNA, 25 bp, Homo sapien
gacaagactacaattgcaaatctga

SEQ ID NO: 1099052 - DNA, 25 bp, Homo sapien
gaggctccagaagcgagcatctccc

SEQ ID NO: 1099053 - DNA, 25 bp, Homo sapien
cgaggctccagaagcgagcatctcc

SEQ ID NO: 1099054 - DNA, 25 bp, Homo sapien
cccgaggctccagaagcgagcatct

SEQ ID NO: 1099055 - DNA, 25 bp, Homo sapien
ccgaggctccagaagcgagcatctc

SEQ ID NO: 1099056 - DNA, 25 bp, Homo sapien
tgtgtgagcttgttgtgccgccgcc

SEQ ID NO: 1099057 - DNA, 25 bp, Homo sapien
actgggttgtgaaatgaagaaggcc

SEQ ID NO: 1099058 - DNA, 25 bp, Homo sapien
tttgtggcagccaaataccagagtc

SEQ ID NO: 1099059 - DNA, 25 bp, Homo sapien
tgagcagctcagagtgacagcgact

SEQ ID NO: 1099060 - DNA, 25 bp, Homo sapien
ttattgattaaccagtgtgttggta

SEQ ID NO: 1099061 - DNA, 25 bp, Homo sapien
tgccctctagtgtgctgactgtcca

SEQ ID NO: 1099062 - DNA, 25 bp, Homo sapien
cctgatttggtgtagtcttggtgcc

SEQ ID NO: 1099063 - DNA, 25 bp, Homo sapien
gctgactgtccaccttagaagttga

SEQ ID NO: 1099064 - DNA, 25 bp, Homo sapien
agtcttggtgccctctagtgtgctg

SEQ ID NO: 1099065 - DNA, 25 bp, Homo sapien
gttttggcccgagctcaagggctgc

SEQ ID NO: 1099066 - DNA, 25 bp, Homo sapien
gcttgagagattaggttttggcccg

SEQ ID NO: 1099067 - DNA, 25 bp, Homo sapien
tcccaagttgactgtgcccattcag

SEQ ID NO: 1099068 - DNA, 25 bp, Homo sapien
ttggtttggatagcctgcagggaca

SEQ ID NO: 1099069 - DNA, 25 bp, Homo sapien
catcagtcctagagttaaatccttg

SEQ ID NO: 1099070 - DNA, 25 bp, Homo sapien
taaatccttgttccttgcaagcccc

SEQ ID NO: 1099071 - DNA, 25 bp, Homo sapien
ccatcacatcagtcctagagttaaa

SEQ ID NO: 1099072 - DNA, 25 bp, Homo sapien
gcaagccccaagtaaagactcctgt

SEQ ID NO: 1099073 - DNA, 25 bp, Homo sapien
tgcagtagattgcgttatgatccaa

SEQ ID NO: 1099074 - DNA, 25 bp, Homo sapien
catgcagtagattgcgttatgatcc

SEQ ID NO: 1099075 - DNA, 25 bp, Homo sapien
atgcagtagattgcgttatgatcca

SEQ ID NO: 1099076 - DNA, 25 bp, Homo sapien
ctctagggcatgtctccttacacct

SEQ ID NO: 1099077 - DNA, 25 bp, Homo sapien
ctagggcatgtctccttacaccttc

SEQ ID NO: 1099078 - DNA, 25 bp, Homo sapien
ctcctctagggcatgtctccttaca

SEQ ID NO: 1099079 - DNA, 25 bp, Homo sapien
tgcctcctctagggcatgtctcctt

SEQ ID NO: 1099080 - DNA, 25 bp, Homo sapien
ctgaaggagcatatcaaattacaca

SEQ ID NO: 1099081 - DNA, 25 bp, Homo sapien
tgaaggagcatatcaaattacacaa

SEQ ID NO: 1099082 - DNA, 25 bp, Homo sapien
aaatactgtactgaccgttatggaa

SEQ ID NO: 1099083 - DNA, 25 bp, Homo sapien
ctgaccgttatggaatcattcttaa

SEQ ID NO: 1099084 - DNA, 25 bp, Homo sapien
tcccacttgcctgctcacgattgtt

SEQ ID NO: 1099085 - DNA, 25 bp, Homo sapien
ggtctccagatggtaaacttcctta

SEQ ID NO: 1099086 - DNA, 25 bp, Homo sapien
aatgtcttgatttcacactcattct

SEQ ID NO: 1099087 - DNA, 25 bp, Homo sapien
aacttccttagaattgcattgctga

SEQ ID NO: 1099088 - DNA, 25 bp, Homo sapien
tattgtggctgtgaatcatctgccg

SEQ ID NO: 1099089 - DNA, 25 bp, Homo sapien
taggttgtgcagagagctagaactc

SEQ ID NO: 1099090 - DNA, 25 bp, Homo sapien
catgcaggctgctgtactggtcagg

SEQ ID NO: 1099091 - DNA, 25 bp, Homo sapien
ccccagtgttgccaatgctattgtg

SEQ ID NO: 1099092 - DNA, 25 bp, Homo sapien
gagatgtgactccatgtaaacgacc

SEQ ID NO: 1099093 - DNA, 25 bp, Homo sapien
taaacgacctcagcgattactgtgg

SEQ ID NO: 1099094 - DNA, 25 bp, Homo sapien
acccagggcagttctgatgagatgt

SEQ ID NO: 1099095 - DNA, 25 bp, Homo sapien
tgtgtgaatcctgggggaacaactt

SEQ ID NO: 1099096 - DNA, 25 bp, Homo sapien
tctagcagcgtgcactggaaactca

SEQ ID NO: 1099097 - DNA, 25 bp, Homo sapien
gactgtctagcagcgtgcactggaa

SEQ ID NO: 1099098 - DNA, 25 bp, Homo sapien
tcattgactgtctagcagcgtgcac

SEQ ID NO: 1099099 - DNA, 25 bp, Homo sapien
ggatggggtgcttcatccccaccat

SEQ ID NO: 1099100 - DNA, 25 bp, Homo sapien
tcttgcttacttaatttgggtggca

SEQ ID NO: 1099101 - DNA, 25 bp, Homo sapien
tgagtacttctaagcctccccaagt

SEQ ID NO: 1099102 - DNA, 25 bp, Homo sapien
ccaagtttcttgcttacttaatttg

SEQ ID NO: 1099103 - DNA, 25 bp, Homo sapien
agcctccccaagtttcttgcttact

SEQ ID NO: 1099104 - DNA, 25 bp, Homo sapien
tctccatggccgtaggaaagcgatc

SEQ ID NO: 1099105 - DNA, 25 bp, Homo sapien
tggccgtaggaaagcgatccaattc

SEQ ID NO: 1099106 - DNA, 25 bp, Homo sapien
ttggctctccatggccgtaggaaag

SEQ ID NO: 1099107 - DNA, 25 bp, Homo sapien
ggaaagcgatccaattcttcagtga

SEQ ID NO: 1099108 - DNA, 25 bp, Homo sapien
tttttccgcagagcaaaatctttct

SEQ ID NO: 1099109 - DNA, 25 bp, Homo sapien
aagcctttgccggattggaaaggcg

SEQ ID NO: 1099110 - DNA, 25 bp, Homo sapien
tgataggtttaaagcccctcaggtg

SEQ ID NO: 1099111 - DNA, 25 bp, Homo sapien
tggaaaggcggttccattctgcttt

SEQ ID NO: 1099112 - DNA, 25 bp, Homo sapien
ggatgctgatctcagagatgctgaa

SEQ ID NO: 1099113 - DNA, 25 bp, Homo sapien
cttgttccttgtgcaggatcatagg

SEQ ID NO: 1099114 - DNA, 25 bp, Homo sapien
ggatcataggaagggctgacctcag

SEQ ID NO: 1099115 - DNA, 25 bp, Homo sapien
gaggatgctgatctcagagatgctg

SEQ ID NO: 1099116 - DNA, 25 bp, Homo sapien
tgagaggttctgatcgcccttaaga

SEQ ID NO: 1099117 - DNA, 25 bp, Homo sapien
gatcgcccttaagaagctctgtgtg

SEQ ID NO: 1099118 - DNA, 25 bp, Homo sapien
ctcgggtcctctcgtggcaggactc

SEQ ID NO: 1099119 - DNA, 25 bp, Homo sapien
cccactggaatagaagctttctgag

SEQ ID NO: 1099120 - DNA, 25 bp, Homo sapien
cagaatgatccgttccagccaaact

SEQ ID NO: 1099121 - DNA, 25 bp, Homo sapien
ccacagaggcctgtgcacacctcca

SEQ ID NO: 1099122 - DNA, 25 bp, Homo sapien
agaatgatccgttccagccaaactg

SEQ ID NO: 1099123 - DNA, 25 bp, Homo sapien
cccacagaggcctgtgcacacctcc

SEQ ID NO: 1099124 - DNA, 25 bp, Homo sapien
ggtaaatattcttcataccacttcc

SEQ ID NO: 1099125 - DNA, 25 bp, Homo sapien
tagcgtcctgtcatcagaacacttg

SEQ ID NO: 1099126 - DNA, 25 bp, Homo sapien
agcgtcctgtcatcagaacacttgg

SEQ ID NO: 1099127 - DNA, 25 bp, Homo sapien
cagctcacaaggtttaagaagccca

SEQ ID NO: 1099128 - DNA, 25 bp, Homo sapien
ggtggagtccacattcttaaaacag

SEQ ID NO: 1099129 - DNA, 25 bp, Homo sapien
gaaaagatgtagaaccttccaagcc

SEQ ID NO: 1099130 - DNA, 25 bp, Homo sapien
aaaatccccaggcaatttggaggct

SEQ ID NO: 1099131 - DNA, 25 bp, Homo sapien
tataagcctttgagcaaaattcctg

SEQ ID NO: 1099132 - DNA, 25 bp, Homo sapien
tgaaattcagttagtgggcattcac

SEQ ID NO: 1099133 - DNA, 25 bp, Homo sapien
cctataagcctttgagcaaaattcc

SEQ ID NO: 1099134 - DNA, 25 bp, Homo sapien
cagttagtgggcattcacttagaat

SEQ ID NO: 1099135 - DNA, 25 bp, Homo sapien
gaagatctagttcatctcccagtgc

SEQ ID NO: 1099136 - DNA, 25 bp, Homo sapien
ttcttcttgacaatgttcatgacag

SEQ ID NO: 1099137 - DNA, 25 bp, Homo sapien
tcttgacaatgttcatgacagtttt

SEQ ID NO: 1099138 - DNA, 25 bp, Homo sapien
ttgaagatctagttcatctcccagt

SEQ ID NO: 1099139 - DNA, 25 bp, Homo sapien
caactctgaccaaggttcaggaccg

SEQ ID NO: 1099140 - DNA, 25 bp, Homo sapien
tctctgatgaacatcccctctccag

SEQ ID NO: 1099141 - DNA, 25 bp, Homo sapien
agtgggccaactctgaccaaggttc

SEQ ID NO: 1099142 - DNA, 25 bp, Homo sapien
tcaggaccgtttggaacagagccat

SEQ ID NO: 1099143 - DNA, 25 bp, Homo sapien
tctctcttttgcatcgaatccctct

SEQ ID NO: 1099144 - DNA, 25 bp, Homo sapien
tcttttgcatcgaatccctctttta

SEQ ID NO: 1099145 - DNA, 25 bp, Homo sapien
tgtttacgttcttctcatggaccat

SEQ ID NO: 1099146 - DNA, 25 bp, Homo sapien
tcgaatccctcttttattccaccag

SEQ ID NO: 1099147 - DNA, 25 bp, Homo sapien
tgagagactgaagaatctctgtcaa

SEQ ID NO: 1099148 - DNA, 25 bp, Homo sapien
tgtgtccttggaacaagaatttccc

SEQ ID NO: 1099149 - DNA, 25 bp, Homo sapien
gtcaaggccgttctctgctttgcca

SEQ ID NO: 1099150 - DNA, 25 bp, Homo sapien
agtattcatttagctgttcctctcc

SEQ ID NO: 1099151 - DNA, 25 bp, Homo sapien
tgcacagagtccctcaagttgctcc

SEQ ID NO: 1099152 - DNA, 25 bp, Homo sapien
ttactgcacagagtccctcaagttg

SEQ ID NO: 1099153 - DNA, 25 bp, Homo sapien
tactgcacagagtccctcaagttgc

SEQ ID NO: 1099154 - DNA, 25 bp, Homo sapien
actgcacagagtccctcaagttgct

SEQ ID NO: 1099155 - DNA, 25 bp, Homo sapien
ctgtttgaggcgaaggaaaaacatt

SEQ ID NO: 1099156 - DNA, 25 bp, Homo sapien
gtttgaggcgaaggaaaaacattca

SEQ ID NO: 1099157 - DNA, 25 bp, Homo sapien
tgtttgaggcgaaggaaaaacattc

SEQ ID NO: 1099158 - DNA, 25 bp, Homo sapien
tcatgcttgcttctccgacttgact

SEQ ID NO: 1099159 - DNA, 25 bp, Homo sapien
tatagtaatattgctaagggcctgt

SEQ ID NO: 1099160 - DNA, 25 bp, Homo sapien
tgctttggcttaaggttagtttctg

SEQ ID NO: 1099161 - DNA, 25 bp, Homo sapien
tatgatttcatttccacaggcaggt

SEQ ID NO: 1099162 - DNA, 25 bp, Homo sapien
caaaggggaatggttatgatttcat

SEQ ID NO: 1099163 - DNA, 25 bp, Homo sapien
ttatttgctgtttcatacccctgtg

SEQ ID NO: 1099164 - DNA, 25 bp, Homo sapien
tgaatagtggttgtctttaagaggc

SEQ ID NO: 1099165 - DNA, 25 bp, Homo sapien
gcatctcttaatcaatttgtccatc

SEQ ID NO: 1099166 - DNA, 25 bp, Homo sapien
ttcatacccctgtgacagtactcac

SEQ ID NO: 1099167 - DNA, 25 bp, Homo sapien
ccacatgttgtttgcttttgctgaa

SEQ ID NO: 1099168 - DNA, 25 bp, Homo sapien
gtgtgcactgagtgacaggtaaaga

SEQ ID NO: 1099169 - DNA, 25 bp, Homo sapien
tgagagaaggcatagcgagggtggg

SEQ ID NO: 1099170 - DNA, 25 bp, Homo sapien
tgctgaattttagtgtgcactgagt

SEQ ID NO: 1099171 - DNA, 25 bp, Homo sapien
cagtttccagcataaggatggacca

SEQ ID NO: 1099172 - DNA, 25 bp, Homo sapien
aacagatggacaagggagataggca

SEQ ID NO: 1099173 - DNA, 25 bp, Homo sapien
aaatgaatgctagtccttgctgtgc

SEQ ID NO: 1099174 - DNA, 25 bp, Homo sapien
gacacattgctgtccaaacagatgg

SEQ ID NO: 1099175 - DNA, 25 bp, Homo sapien
ttctctctgtcatggttcatttttc

SEQ ID NO: 1099176 - DNA, 25 bp, Homo sapien
cactgattggcatggctacatcttg

SEQ ID NO: 1099177 - DNA, 25 bp, Homo sapien
tgggttctgggttcagctgttttct

SEQ ID NO: 1099178 - DNA, 25 bp, Homo sapien
gcatggctacatcttgggttctggg

SEQ ID NO: 1099179 - DNA, 25 bp, Homo sapien
taaatggtcagaagatgagctgaga

SEQ ID NO: 1099180 - DNA, 25 bp, Homo sapien
tgagcattgaataaaatcgcagcta

SEQ ID NO: 1099181 - DNA, 25 bp, Homo sapien
tataataaatggtcagaagatgagc

SEQ ID NO: 1099182 - DNA, 25 bp, Homo sapien
gaataaaatcgcagctaatttcaaa

SEQ ID NO: 1099183 - DNA, 25 bp, Homo sapien
aatgaggtagcctgttcaccagtga

SEQ ID NO: 1099184 - DNA, 25 bp, Homo sapien
gagcctctgtgggtagcatctggat

SEQ ID NO: 1099185 - DNA, 25 bp, Homo sapien
gattccctaactgcctggagagcct

SEQ ID NO: 1099186 - DNA, 25 bp, Homo sapien
tgcccggcagcatctactaactagg

SEQ ID NO: 1099187 - DNA, 25 bp, Homo sapien
cacaataccactatcacatctgaga

SEQ ID NO: 1099188 - DNA, 25 bp, Homo sapien
cattgtatattactatgcctcatta

SEQ ID NO: 1099189 - DNA, 25 bp, Homo sapien
tgtaaagcatttatgctagttgtcc

SEQ ID NO: 1099190 - DNA, 25 bp, Homo sapien
tcactttctcccaattagctaaaaa

SEQ ID NO: 1099191 - DNA, 25 bp, Homo sapien
ccagaactaatgaagccagcctggc

SEQ ID NO: 1099192 - DNA, 25 bp, Homo sapien
aaagatgtacatgggaaggttagga

SEQ ID NO: 1099193 - DNA, 25 bp, Homo sapien
tattcttgacagcatgcagctgaag

SEQ ID NO: 1099194 - DNA, 25 bp, Homo sapien
aaggttaggatgaaggagaccccag

SEQ ID NO: 1099195 - DNA, 25 bp, Homo sapien
ttccttttgtagtgtatcatttgga

SEQ ID NO: 1099196 - DNA, 25 bp, Homo sapien
catcttcagggcataaagggctcca

SEQ ID NO: 1099197 - DNA, 25 bp, Homo sapien
tcatcttcagggcataaagggctcc

SEQ ID NO: 1099198 - DNA, 25 bp, Homo sapien
cttcatcttcagggcataaagggct

SEQ ID NO: 1099199 - DNA, 25 bp, Homo sapien
aaccagaaataagagtggctccagt

SEQ ID NO: 1099200 - DNA, 25 bp, Homo sapien
aggaaccagaaataagagtggctcc

SEQ ID NO: 1099201 - DNA, 25 bp, Homo sapien
gaaccagaaataagagtggctccag

SEQ ID NO: 1099202 - DNA, 25 bp, Homo sapien
aaaggaaccagaaataagagtggct

SEQ ID NO: 1099203 - DNA, 25 bp, Homo sapien
gattgaacattccactaccttatgg

SEQ ID NO: 1099204 - DNA, 25 bp, Homo sapien
cttacagaactggactgacaatttc

SEQ ID NO: 1099205 - DNA, 25 bp, Homo sapien
tatggatgggagcaaacattcttac

SEQ ID NO: 1099206 - DNA, 25 bp, Homo sapien
ctttcccacgagagagactgattga

SEQ ID NO: 1099207 - DNA, 25 bp, Homo sapien
cagaacatcgggtgcgattaacggg

SEQ ID NO: 1099208 - DNA, 25 bp, Homo sapien
ttaacgggctgggagactgatcccc

SEQ ID NO: 1099209 - DNA, 25 bp, Homo sapien
cttgcttaggcaacactgaagtctg

SEQ ID NO: 1099210 - DNA, 25 bp, Homo sapien
gcagggactctcaaaacttctagct

SEQ ID NO: 1099211 - DNA, 25 bp, Homo sapien
cagctgatgagagtaccatttcttc

SEQ ID NO: 1099212 - DNA, 25 bp, Homo sapien
ccagctgatgagagtaccatttctt

SEQ ID NO: 1099213 - DNA, 25 bp, Homo sapien
agcccttccgtcttgttacgtccag

SEQ ID NO: 1099214 - DNA, 25 bp, Homo sapien
tccaggcaagttggcctggctttcg

SEQ ID NO: 1099215 - DNA, 25 bp, Homo sapien
aagggttcggcttgtcctcctctgg

SEQ ID NO: 1099216 - DNA, 25 bp, Homo sapien
ccggcctcctgaagggttcggcttg

SEQ ID NO: 1099217 - DNA, 25 bp, Homo sapien
cgccgatcgatttattgggagcaaa

SEQ ID NO: 1099218 - DNA, 25 bp, Homo sapien
gagcaaataaatagaccgttttgga

SEQ ID NO: 1099219 - DNA, 25 bp, Homo sapien
ggccacatcgattctttaatcaccg

SEQ ID NO: 1099220 - DNA, 25 bp, Homo sapien
ttcaattgctggcttgacggttggg

SEQ ID NO: 1099221 - DNA, 25 bp, Homo sapien
tctgtcaaacaatatgatgctgctc

SEQ ID NO: 1099222 - DNA, 25 bp, Homo sapien
catgcgagatcattctgtcaaacaa

SEQ ID NO: 1099223 - DNA, 25 bp, Homo sapien
ggagccgacacttcatcatgcgaga

SEQ ID NO: 1099224 - DNA, 25 bp, Homo sapien
ccttcggagccgacacttcatcatg

SEQ ID NO: 1099225 - DNA, 25 bp, Homo sapien
tttgaaatgtttcaaccaaaggaga

SEQ ID NO: 1099226 - DNA, 25 bp, Homo sapien
tttcaaccaaaggagaatggaatga

SEQ ID NO: 1099227 - DNA, 25 bp, Homo sapien
cccttcggttcctctggagcgggca

SEQ ID NO: 1099228 - DNA, 25 bp, Homo sapien
aatgtttcaaccaaaggagaatgga

SEQ ID NO: 1099229 - DNA, 25 bp, Homo sapien
gggagaatgagtagacacacacacg

SEQ ID NO: 1099230 - DNA, 25 bp, Homo sapien
ggtcgtcagttaccgccaagctgta

SEQ ID NO: 1099231 - DNA, 25 bp, Homo sapien
cggaagaagcgagacagatacagag

SEQ ID NO: 1099232 - DNA, 25 bp, Homo sapien
ccaagctgtaggacagagacggaag

SEQ ID NO: 1099233 - DNA, 25 bp, Homo sapien
ctaaataaattgtttgccgcgtagt

SEQ ID NO: 1099234 - DNA, 25 bp, Homo sapien
tttgccgcgtagttgcagtttgcag

SEQ ID NO: 1099235 - DNA, 25 bp, Homo sapien
aataaattgtttgccgcgtagttgc

SEQ ID NO: 1099236 - DNA, 25 bp, Homo sapien
attgtttgccgcgtagttgcagttt

SEQ ID NO: 1099237 - DNA, 25 bp, Homo sapien
cagcggaagggtccgatcccgacgc

SEQ ID NO: 1099238 - DNA, 25 bp, Homo sapien
tcctgccggagaccggctagatgtc

SEQ ID NO: 1099239 - DNA, 25 bp, Homo sapien
atcccgacgcggtgcagggtcctgc

SEQ ID NO: 1099240 - DNA, 25 bp, Homo sapien
cctgctggccttgacgcaggaggcc

SEQ ID NO: 1099241 - DNA, 25 bp, Homo sapien
caggcggaccatagcgcctgcacaa

SEQ ID NO: 1099242 - DNA, 25 bp, Homo sapien
gcccgcgccggcctaatatcgattt

SEQ ID NO: 1099243 - DNA, 25 bp, Homo sapien
gcagaggatttttccgcggccgctc

SEQ ID NO: 1099244 - DNA, 25 bp, Homo sapien
tctcggctcaggaaccggccgccgg

SEQ ID NO: 1099245 - DNA, 25 bp, Homo sapien
atctcttgttcaatcagtgttacca

SEQ ID NO: 1099246 - DNA, 25 bp, Homo sapien
tacagaaacttttcgactcgattag

SEQ ID NO: 1099247 - DNA, 25 bp, Homo sapien
caatcagtgttaccatctgatgctg

SEQ ID NO: 1099248 - DNA, 25 bp, Homo sapien
ttagagatctattgtgctaatctct

SEQ ID NO: 1099249 - DNA, 25 bp, Homo sapien
gggtggaggacgaacaactcccagc

SEQ ID NO: 1099250 - DNA, 25 bp, Homo sapien
tcccagctgccggttccatttgttg

SEQ ID NO: 1099251 - DNA, 25 bp, Homo sapien
ggtggaggacgaacaactcccagct

SEQ ID NO: 1099252 - DNA, 25 bp, Homo sapien
tgccggttccatttgttgcgctttt

SEQ ID NO: 1099253 - DNA, 25 bp, Homo sapien
cggtctcgaagtagtctccaaatga

SEQ ID NO: 1099254 - DNA, 25 bp, Homo sapien
cgattccgccgtccgcagaggctag

SEQ ID NO: 1099255 - DNA, 25 bp, Homo sapien
agcctgatccgtccattccccggtg

SEQ ID NO: 1099256 - DNA, 25 bp, Homo sapien
tccattccccggtgtctccttggaa

SEQ ID NO: 1099257 - DNA, 25 bp, Homo sapien
cagagttgatttccgtagctccaca

SEQ ID NO: 1099258 - DNA, 25 bp, Homo sapien
ggccctaaaacgcatctcagagttg

SEQ ID NO: 1099259 - DNA, 25 bp, Homo sapien
cgcaggctccgaaccgtttacaatg

SEQ ID NO: 1099260 - DNA, 25 bp, Homo sapien
gccgtctagacagctttccgcgaaa

SEQ ID NO: 1099261 - DNA, 25 bp, Homo sapien
agggtttgagtgcccccgaaagatg

SEQ ID NO: 1099262 - DNA, 25 bp, Homo sapien
gcgctcggtactaggcgctcgctac

SEQ ID NO: 1099263 - DNA, 25 bp, Homo sapien
gctccgcgaactcctgccgtccctg

SEQ ID NO: 1099264 - DNA, 25 bp, Homo sapien
ccccgcatcgcgtggcgcgggctct

SEQ ID NO: 1099265 - DNA, 25 bp, Homo sapien
gcagcgggcgatgagggtgttcggg

SEQ ID NO: 1099266 - DNA, 25 bp, Homo sapien
ctcctcggggttggtagcggcggcg

SEQ ID NO: 1099267 - DNA, 25 bp, Homo sapien
ggcagcgggcgatgagggtgttcgg

SEQ ID NO: 1099268 - DNA, 25 bp, Homo sapien
agcgggcgatgagggtgttcggggg

SEQ ID NO: 1099269 - DNA, 25 bp, Homo sapien
accacatcgatgtccacgtcctcgg

SEQ ID NO: 1099270 - DNA, 25 bp, Homo sapien
tctggccggacatgtcgctggcgct

SEQ ID NO: 1099271 - DNA, 25 bp, Homo sapien
tatcgcaacctgcgtcgctgtcctt

SEQ ID NO: 1099272 - DNA, 25 bp, Homo sapien
gtcctcggccgtcagcaccgtctgg

SEQ ID NO: 1099273 - DNA, 25 bp, Homo sapien
cgtccgcctcgtccaggcgcagctc

SEQ ID NO: 1099274 - DNA, 25 bp, Homo sapien
ccttgcagccgtccgcctccggcgc

SEQ ID NO: 1099275 - DNA, 25 bp, Homo sapien
gtacgagtaaggcggcttcactagg

SEQ ID NO: 1099276 - DNA, 25 bp, Homo sapien
gctgtccgtgatggggtgccgccgg

SEQ ID NO: 1099277 - DNA, 25 bp, Homo sapien
ggcctcccgccgaaccgctgcccgc

SEQ ID NO: 1099278 - DNA, 25 bp, Homo sapien
gaactcgcagatgccgctcagggtc

SEQ ID NO: 1099279 - DNA, 25 bp, Homo sapien
atgaactcgcagatgccgctcaggg

SEQ ID NO: 1099280 - DNA, 25 bp, Homo sapien
gatgaactcgcagatgccgctcagg

SEQ ID NO: 1099281 - DNA, 25 bp, Homo sapien
actcgcagatgccgctcagggtcag

SEQ ID NO: 1099282 - DNA, 25 bp, Homo sapien
ctctgcatcatgagcgccgtctgct

SEQ ID NO: 1099283 - DNA, 25 bp, Homo sapien
gcggcagcgcgtacgggtactggag

SEQ ID NO: 1099284 - DNA, 25 bp, Homo sapien
ccgctgccgggtgcgaataggcacc

SEQ ID NO: 1099285 - DNA, 25 bp, Homo sapien
gccaggctgtaagcgccgaagctct

SEQ ID NO: 1099286 - DNA, 25 bp, Homo sapien
ctttgcggcccagctcgcccgaggg

SEQ ID NO: 1099287 - DNA, 25 bp, Homo sapien
aaggcggccgctttgcggcccagct

SEQ ID NO: 1099288 - DNA, 25 bp, Homo sapien
ctgtgagccgaaggcggccgctttg

SEQ ID NO: 1099289 - DNA, 25 bp, Homo sapien
ggccgagctgtgagccgaaggcggc

SEQ ID NO: 1099290 - DNA, 25 bp, Homo sapien
cggcgcccaggctattgagctgcag

SEQ ID NO: 1099291 - DNA, 25 bp, Homo sapien
tcggacttgatgagcgacgcggtgg

SEQ ID NO: 1099292 - DNA, 25 bp, Homo sapien
gcggcgcccaggctattgagctgca

SEQ ID NO: 1099293 - DNA, 25 bp, Homo sapien
tgagcgacgcggtggtgcccgcggc

SEQ ID NO: 1099294 - DNA, 25 bp, Homo sapien
gtggccgcagaaacgactgcgccgt

SEQ ID NO: 1099295 - DNA, 25 bp, Homo sapien
tatgatgttctcgatgctgaacgac

SEQ ID NO: 1099296 - DNA, 25 bp, Homo sapien
gagcgctgccgactgcacggtcccg

SEQ ID NO: 1099297 - DNA, 25 bp, Homo sapien
cccacctatgatgttctcgatgctg

SEQ ID NO: 1099298 - DNA, 25 bp, Homo sapien
gtcgtccggctcagcgacagcggtt

SEQ ID NO: 1099299 - DNA, 25 bp, Homo sapien
agaaactgtccggagagtggcacgc

SEQ ID NO: 1099300 - DNA, 25 bp, Homo sapien
aatgggcgcgatggtggcagtcgtc

SEQ ID NO: 1099301 - DNA, 25 bp, Homo sapien
tattgcgccggccatttggcttgag

SEQ ID NO: 1099302 - DNA, 25 bp, Homo sapien
ggtgcatttgttgctcgaggccgcc

SEQ ID NO: 1099303 - DNA, 25 bp, Homo sapien
ctgtatggaaagctatccccggcgg

SEQ ID NO: 1099304 - DNA, 25 bp, Homo sapien
atccccacggtactaagagcaggcg

SEQ ID NO: 1099305 - DNA, 25 bp, Homo sapien
tgagtttgctcgaccagcttaggtg

SEQ ID NO: 1099306 - DNA, 25 bp, Homo sapien
catctttaggccgtcgttcaagggt

SEQ ID NO: 1099307 - DNA, 25 bp, Homo sapien
gagtttcctgccttccacgacataa

SEQ ID NO: 1099308 - DNA, 25 bp, Homo sapien
tgaatgtagcgctggaaaaagccct

SEQ ID NO: 1099309 - DNA, 25 bp, Homo sapien
gactttaaacaaccgctggcagctt

SEQ ID NO: 1099310 - DNA, 25 bp, Homo sapien
ggcggtcccaactcagaccttggtc

SEQ ID NO: 1099311 - DNA, 25 bp, Homo sapien
tcaacagccggcacatgttttgctc

SEQ ID NO: 1099312 - DNA, 25 bp, Homo sapien
gaggaactagatacgggcggtccca

SEQ ID NO: 1099313 - DNA, 25 bp, Homo sapien
gaccttggtcctgagaacgctctag

SEQ ID NO: 1099314 - DNA, 25 bp, Homo sapien
tccttcgtaattaattcgtattctc

SEQ ID NO: 1099315 - DNA, 25 bp, Homo sapien
gagcttcgggcctgcagttgccgcc

SEQ ID NO: 1099316 - DNA, 25 bp, Homo sapien
agcactgtggttgggccgctgggcg

SEQ ID NO: 1099317 - DNA, 25 bp, Homo sapien
ttggggaccgatccccgacacgaca

SEQ ID NO: 1099318 - DNA, 25 bp, Homo sapien
aaggctggagtacagtggtgggatc

SEQ ID NO: 1099319 - DNA, 25 bp, Homo sapien
caggtgcccaccactacgcttggct

SEQ ID NO: 1099320 - DNA, 25 bp, Homo sapien
gtgcccaccactacgcttggctaat

SEQ ID NO: 1099321 - DNA, 25 bp, Homo sapien
gacgtaggcttgctctgtcaccaag

SEQ ID NO: 1099322 - DNA, 25 bp, Homo sapien
gtccaaatagtcacaggaaagcaca

SEQ ID NO: 1099323 - DNA, 25 bp, Homo sapien
aattctccttcgctgtcaaatccag

SEQ ID NO: 1099324 - DNA, 25 bp, Homo sapien
ggaaagcacaattctccttcgctgt

SEQ ID NO: 1099325 - DNA, 25 bp, Homo sapien
gctgtcaaatccagaggtactttta

SEQ ID NO: 1099326 - DNA, 25 bp, Homo sapien
aagacctaggggcttctcatggcgg

SEQ ID NO: 1099327 - DNA, 25 bp, Homo sapien
ggctccaactactttgtcttctaag

SEQ ID NO: 1099328 - DNA, 25 bp, Homo sapien
tcatggcggttgcttctggctccaa

SEQ ID NO: 1099329 - DNA, 25 bp, Homo sapien
cttggtctttagtctatattgctgc

SEQ ID NO: 1099330 - DNA, 25 bp, Homo sapien
cactccttatcattttggagcaggc

SEQ ID NO: 1099331 - DNA, 25 bp, Homo sapien
ttggagcaggcttcactctctccac

SEQ ID NO: 1099332 - DNA, 25 bp, Homo sapien
cagctttcactccttatcattttgg

SEQ ID NO: 1099333 - DNA, 25 bp, Homo sapien
tatcattttggagcaggcttcactc

SEQ ID NO: 1099334 - DNA, 25 bp, Homo sapien
ttaattacattctggattgctcttt

SEQ ID NO: 1099335 - DNA, 25 bp, Homo sapien
aattacattctggattgctcttttc

SEQ ID NO: 1099336 - DNA, 25 bp, Homo sapien
atttgatcgaaacccccacgtagag

SEQ ID NO: 1099337 - DNA, 25 bp, Homo sapien
tttctggtccttacttgctgctact

SEQ ID NO: 1099338 - DNA, 25 bp, Homo sapien
tagtaagttagtaagacctgcacac

SEQ ID NO: 1099339 - DNA, 25 bp, Homo sapien
cagcgggcagcttgaatcacctggt

SEQ ID NO: 1099340 - DNA, 25 bp, Homo sapien
cacatgcctgcgaagaagaagactg

SEQ ID NO: 1099341 - DNA, 25 bp, Homo sapien
tgaacatccaaccatttgcgagagc

SEQ ID NO: 1099342 - DNA, 25 bp, Homo sapien
ctgtgccctcgaggagccagaaagc

SEQ ID NO: 1099343 - DNA, 25 bp, Homo sapien
tgccctcgaggagccagaaagccaa

SEQ ID NO: 1099344 - DNA, 25 bp, Homo sapien
tgtgccctcgaggagccagaaagcc

SEQ ID NO: 1099345 - DNA, 25 bp, Homo sapien
gcctgtgccctcgaggagccagaaa

SEQ ID NO: 1099346 - DNA, 25 bp, Homo sapien
tcgcgcctgccgtgggtcccaggaa

SEQ ID NO: 1099347 - DNA, 25 bp, Homo sapien
gccgctgggattcgcgcctgccgtg

SEQ ID NO: 1099348 - DNA, 25 bp, Homo sapien
gtcccaggaaggcgcatgcgcgctc

SEQ ID NO: 1099349 - DNA, 25 bp, Homo sapien
ccgccggccgctgggattcgcgcct

SEQ ID NO: 1099350 - DNA, 25 bp, Homo sapien
atcgattcttcgcaattaggagttt

SEQ ID NO: 1099351 - DNA, 25 bp, Homo sapien
tcttgaaatgttatcgattcttcgc

SEQ ID NO: 1099352 - DNA, 25 bp, Homo sapien
atgttatcgattcttcgcaattagg

SEQ ID NO: 1099353 - DNA, 25 bp, Homo sapien
acttgattatgtctatgtagaagta

SEQ ID NO: 1099354 - DNA, 25 bp, Homo sapien
ctgtcatcaagtaccatttctccat

SEQ ID NO: 1099355 - DNA, 25 bp, Homo sapien
gaataagaattaagagacactgtcc

SEQ ID NO: 1099356 - DNA, 25 bp, Homo sapien
gaattaagagacactgtccatcgta

SEQ ID NO: 1099357 - DNA, 25 bp, Homo sapien
gagacactgtccatcgtactgttag

SEQ ID NO: 1099358 - DNA, 25 bp, Homo sapien
actgtccatcgtactgttagtccta

SEQ ID NO: 1099359 - DNA, 25 bp, Homo sapien
catattctttctattagaactggac

SEQ ID NO: 1099360 - DNA, 25 bp, Homo sapien
ttctcaaccatatcaaaaaggcctg

SEQ ID NO: 1099361 - DNA, 25 bp, Homo sapien
gctttctcacatcacaaagcgcatg

SEQ ID NO: 1099362 - DNA, 25 bp, Homo sapien
ctgtactggtcagaaaatggtaaac

SEQ ID NO: 1099363 - DNA, 25 bp, Homo sapien
tgggaaacaagttcctatccagagt

SEQ ID NO: 1099364 - DNA, 25 bp, Homo sapien
taatgactctctttagggttgggaa

SEQ ID NO: 1099365 - DNA, 25 bp, Homo sapien
ccagagtctgacctacttcaataaa

SEQ ID NO: 1099366 - DNA, 25 bp, Homo sapien
gaatggataatgactctctttaggg

SEQ ID NO: 1099367 - DNA, 25 bp, Homo sapien
ctaagatcaaaggtaaaaagagcaa

SEQ ID NO: 1099368 - DNA, 25 bp, Homo sapien
gatcaaaggtaaaaagagcaaaaca

SEQ ID NO: 1099369 - DNA, 25 bp, Homo sapien
gcaaaacaacaatgtactttagcat

SEQ ID NO: 1099370 - DNA, 25 bp, Homo sapien
agagcaaaacaacaatgtactttag

SEQ ID NO: 1099371 - DNA, 25 bp, Homo sapien
aaaagttatttcttgccagtgtctc

SEQ ID NO: 1099372 - DNA, 25 bp, Homo sapien
tcaccaaacataggcggtttaccag

SEQ ID NO: 1099373 - DNA, 25 bp, Homo sapien
taatcaccaaacataggcggtttac

SEQ ID NO: 1099374 - DNA, 25 bp, Homo sapien
tcataatcaccaaacataggcggtt

SEQ ID NO: 1099375 - DNA, 25 bp, Homo sapien
ttggagccccttttggcagcttgaa

SEQ ID NO: 1099376 - DNA, 25 bp, Homo sapien
agaagcagcgagtctaagaatctct

SEQ ID NO: 1099377 - DNA, 25 bp, Homo sapien
aagaatctctgggttagttggagcc

SEQ ID NO: 1099378 - DNA, 25 bp, Homo sapien
aagccaagaagcagcgagtctaaga

SEQ ID NO: 1099379 - DNA, 25 bp, Homo sapien
ggccattgtccctccagaaacatcc

SEQ ID NO: 1099380 - DNA, 25 bp, Homo sapien
cattgtccctccagaaacatccatg

SEQ ID NO: 1099381 - DNA, 25 bp, Homo sapien
attgtccctccagaaacatccatgt

SEQ ID NO: 1099382 - DNA, 25 bp, Homo sapien
gccattgtccctccagaaacatcca

SEQ ID NO: 1099383 - DNA, 25 bp, Homo sapien
tcaaggcatggtagacagccaagac

SEQ ID NO: 1099384 - DNA, 25 bp, Homo sapien
gccaagacatctgggcatagagtac

SEQ ID NO: 1099385 - DNA, 25 bp, Homo sapien
ggtagacagccaagacatctgggca

SEQ ID NO: 1099386 - DNA, 25 bp, Homo sapien
tgggcatagagtactacagtatggt

SEQ ID NO: 1099387 - DNA, 25 bp, Homo sapien
tgcacataggagactatgataagct

SEQ ID NO: 1099388 - DNA, 25 bp, Homo sapien
gtgggtaatccaatccccaatactg

SEQ ID NO: 1099389 - DNA, 25 bp, Homo sapien
caatactgtaaattgttatcactgc

SEQ ID NO: 1099390 - DNA, 25 bp, Homo sapien
taagctgtaagaggtgggtaatcca

SEQ ID NO: 1099391 - DNA, 25 bp, Homo sapien
gaagagcttatgtgcctgactctca

SEQ ID NO: 1099392 - DNA, 25 bp, Homo sapien
cctgactctcatatccacgtgatgt

SEQ ID NO: 1099393 - DNA, 25 bp, Homo sapien
gatgtatggagagcaatccagtctg

SEQ ID NO: 1099394 - DNA, 25 bp, Homo sapien
tacgcatgaagagcttatgtgcctg

SEQ ID NO: 1099395 - DNA, 25 bp, Homo sapien
agcaacaacagtacaaaaccactgc

SEQ ID NO: 1099396 - DNA, 25 bp, Homo sapien
ctggatacagcaagatgcataatgc

SEQ ID NO: 1099397 - DNA, 25 bp, Homo sapien
tgaaaatgtccatagtctataagaa

SEQ ID NO: 1099398 - DNA, 25 bp, Homo sapien
tagtctataagaataaggcctggat

SEQ ID NO: 1099399 - DNA, 25 bp, Homo sapien
aggcctggatacagcaagatgcata

SEQ ID NO: 1099400 - DNA, 25 bp, Homo sapien
gaagcttctagctactactatctga

SEQ ID NO: 1099401 - DNA, 25 bp, Homo sapien
caaaggatagaagacatgttacact

SEQ ID NO: 1099402 - DNA, 25 bp, Homo sapien
tagagtataaccatacttggcactc

SEQ ID NO: 1099403 - DNA, 25 bp, Homo sapien
tactagatgacagcaatgtacacat

SEQ ID NO: 1099404 - DNA, 25 bp, Homo sapien
cacaagatattccaagaacacccca

SEQ ID NO: 1099405 - DNA, 25 bp, Homo sapien
aatggcaaggcgtggtaaagttcca

SEQ ID NO: 1099406 - DNA, 25 bp, Homo sapien
caaggcgtggtaaagttccatctgt

SEQ ID NO: 1099407 - DNA, 25 bp, Homo sapien
gccagtgaccctaggaggtcgcagt

SEQ ID NO: 1099408 - DNA, 25 bp, Homo sapien
agctagcttaactagcaacacaaac

SEQ ID NO: 1099409 - DNA, 25 bp, Homo sapien
tacaagctagcttaactagcaacac

SEQ ID NO: 1099410 - DNA, 25 bp, Homo sapien
gccacaacaatacaagctagcttaa

SEQ ID NO: 1099411 - DNA, 25 bp, Homo sapien
caacaatacaagctagcttaactag

SEQ ID NO: 1099412 - DNA, 25 bp, Homo sapien
aagagtcttcttagaacctgcaggg

SEQ ID NO: 1099413 - DNA, 25 bp, Homo sapien
ggaagagtcttcttagaacctgcag

SEQ ID NO: 1099414 - DNA, 25 bp, Homo sapien
gagtcttcttagaacctgcagggtt

SEQ ID NO: 1099415 - DNA, 25 bp, Homo sapien
cgggaagagtcttcttagaacctgc

SEQ ID NO: 1099416 - DNA, 25 bp, Homo sapien
aggtcacaggtaaggtacagtaaca

SEQ ID NO: 1099417 - DNA, 25 bp, Homo sapien
tcacaggtaaggtacagtaacagaa

SEQ ID NO: 1099418 - DNA, 25 bp, Homo sapien
caggtaaggtacagtaacagaaagg

SEQ ID NO: 1099419 - DNA, 25 bp, Homo sapien
ggtcacaggtaaggtacagtaacag

SEQ ID NO: 1099420 - DNA, 25 bp, Homo sapien
caaagagcagtgcactatccctgaa

SEQ ID NO: 1099421 - DNA, 25 bp, Homo sapien
tgatcaaaagcattggcccaccata

SEQ ID NO: 1099422 - DNA, 25 bp, Homo sapien
tcctccaggaataaacatatacgca

SEQ ID NO: 1099423 - DNA, 25 bp, Homo sapien
tattaaaacccatgaagtacagccc

SEQ ID NO: 1099424 - DNA, 25 bp, Homo sapien
tggatgtgacgtggcaaaatatcct

SEQ ID NO: 1099425 - DNA, 25 bp, Homo sapien
aaatatccttaatcttcagaaagac

SEQ ID NO: 1099426 - DNA, 25 bp, Homo sapien
ctcattattaattggatgtgacgtg

SEQ ID NO: 1099427 - DNA, 25 bp, Homo sapien
tattaattggatgtgacgtggcaaa

SEQ ID NO: 1099428 - DNA, 25 bp, Homo sapien
taattttatgcatgcaggaagcagg

SEQ ID NO: 1099429 - DNA, 25 bp, Homo sapien
caggctcaaaaacgtagaacaaaag

SEQ ID NO: 1099430 - DNA, 25 bp, Homo sapien
tcctttggaagagggctgaagtatt

SEQ ID NO: 1099431 - DNA, 25 bp, Homo sapien
aatttgaatcctttggaagagggct

SEQ ID NO: 1099432 - DNA, 25 bp, Homo sapien
aaaaagaatgatagcgcacagctaa

SEQ ID NO: 1099433 - DNA, 25 bp, Homo sapien
aaaagaatgatagcgcacagctaac

SEQ ID NO: 1099434 - DNA, 25 bp, Homo sapien
taaaaagaatgatagcgcacagcta

SEQ ID NO: 1099435 - DNA, 25 bp, Homo sapien
ataaaaagaatgatagcgcacagct

SEQ ID NO: 1099436 - DNA, 25 bp, Homo sapien
ggaatatatcccatgtgcacaaaac

SEQ ID NO: 1099437 - DNA, 25 bp, Homo sapien
tctggaatatatcccatgtgcacaa

SEQ ID NO: 1099438 - DNA, 25 bp, Homo sapien
ttgtctggaatatatcccatgtgca

SEQ ID NO: 1099439 - DNA, 25 bp, Homo sapien
aatatatcccatgtgcacaaaacag

SEQ ID NO: 1099440 - DNA, 25 bp, Homo sapien
cagactaaattagcctagacacagg

SEQ ID NO: 1099441 - DNA, 25 bp, Homo sapien
gtctgattttcagcggtagcttaaa

SEQ ID NO: 1099442 - DNA, 25 bp, Homo sapien
acagccaggaaggtcttcatatgga

SEQ ID NO: 1099443 - DNA, 25 bp, Homo sapien
ggtgtcaactcctcataataattgg

SEQ ID NO: 1099444 - DNA, 25 bp, Homo sapien
ttcacttaaaactaagcagactggt

SEQ ID NO: 1099445 - DNA, 25 bp, Homo sapien
tcaaaccataaccacttcataaaaa

SEQ ID NO: 1099446 - DNA, 25 bp, Homo sapien
ttagtttacaagaattatactgaaa

SEQ ID NO: 1099447 - DNA, 25 bp, Homo sapien
aaattagtttacaagaattatactg

SEQ ID NO: 1099448 - DNA, 25 bp, Homo sapien
ttcaaaccataaccacttcataaaa

SEQ ID NO: 1099449 - DNA, 25 bp, Homo sapien
acaacagagggcattaggagttcat

SEQ ID NO: 1099450 - DNA, 25 bp, Homo sapien
tggaaaaggatttcaactgcagttc

SEQ ID NO: 1099451 - DNA, 25 bp, Homo sapien
aaaggatttcaactgcagttcttct

SEQ ID NO: 1099452 - DNA, 25 bp, Homo sapien
catccttcaatagaagaggtagcat

SEQ ID NO: 1099453 - DNA, 25 bp, Homo sapien
aggcagaaactggctgtccaaggaa

SEQ ID NO: 1099454 - DNA, 25 bp, Homo sapien
ttgttatggcagctatcacagacta

SEQ ID NO: 1099455 - DNA, 25 bp, Homo sapien
ccaaagtaggcaaatctaaagaggc

SEQ ID NO: 1099456 - DNA, 25 bp, Homo sapien
caaagtaggcaaatctaaagaggca

SEQ ID NO: 1099457 - DNA, 25 bp, Homo sapien
gagatatagccttttaggaggtaaa

SEQ ID NO: 1099458 - DNA, 25 bp, Homo sapien
atggtagaaccttgatcttgatctt

SEQ ID NO: 1099459 - DNA, 25 bp, Homo sapien
aaccaaccctgatggtagaaccttg

SEQ ID NO: 1099460 - DNA, 25 bp, Homo sapien
aagagacaacagaggtctctctcca

SEQ ID NO: 1099461 - DNA, 25 bp, Homo sapien
aacgtcagaagcaccatagtgatga

SEQ ID NO: 1099462 - DNA, 25 bp, Homo sapien
ggatccagtgtgacagtcatcaacg

SEQ ID NO: 1099463 - DNA, 25 bp, Homo sapien
gtcatcaacgtcagaagcaccatag

SEQ ID NO: 1099464 - DNA, 25 bp, Homo sapien
cagaaaacaagtccggtagtttctg

SEQ ID NO: 1099465 - DNA, 25 bp, Homo sapien
gtataccaagaagaacaggaagttc

SEQ ID NO: 1099466 - DNA, 25 bp, Homo sapien
aagtataccaagaagaacaggaagt

SEQ ID NO: 1099467 - DNA, 25 bp, Homo sapien
aaagtataccaagaagaacaggaag

SEQ ID NO: 1099468 - DNA, 25 bp, Homo sapien
agaagaacaggaagttcaagcaaga

SEQ ID NO: 1099469 - DNA, 25 bp, Homo sapien
ccacttttggaatcccacataataa

SEQ ID NO: 1099470 - DNA, 25 bp, Homo sapien
tccacttttggaatcccacataata

SEQ ID NO: 1099471 - DNA, 25 bp, Homo sapien
tagacaacaatgacttttcaccatt

SEQ ID NO: 1099472 - DNA, 25 bp, Homo sapien
tttgtgtagacaacaatgacttttc

SEQ ID NO: 1099473 - DNA, 25 bp, Homo sapien
tgtagacaacaatgacttttcacca

SEQ ID NO: 1099474 - DNA, 25 bp, Homo sapien
tttattttgtgtagacaacaatgac

SEQ ID NO: 1099475 - DNA, 25 bp, Homo sapien
tgtgactgtccgtgtctagaaccag

SEQ ID NO: 1099476 - DNA, 25 bp, Homo sapien
ctgattcggcagtgattcaaggctg

SEQ ID NO: 1099477 - DNA, 25 bp, Homo sapien
tattctgcgttgacctgccctttga

SEQ ID NO: 1099478 - DNA, 25 bp, Homo sapien
tggtgaccatggacagcaatgttct

SEQ ID NO: 1099479 - DNA, 25 bp, Homo sapien
gcatgtataaaagtggcacctttgg

SEQ ID NO: 1099480 - DNA, 25 bp, Homo sapien
taagaagaaatgcactcaccatgag

SEQ ID NO: 1099481 - DNA, 25 bp, Homo sapien
taaataccagctcgtagcagttggc

SEQ ID NO: 1099482 - DNA, 25 bp, Homo sapien
tgtgtagcctctatctcaggagtga

SEQ ID NO: 1099483 - DNA, 25 bp, Homo sapien
gactgtcccatacagattcactccc

SEQ ID NO: 1099484 - DNA, 25 bp, Homo sapien
gtcccatacagattcactcccagag

SEQ ID NO: 1099485 - DNA, 25 bp, Homo sapien
ctgtcccatacagattcactcccag

SEQ ID NO: 1099486 - DNA, 25 bp, Homo sapien
ggactgtcccatacagattcactcc

SEQ ID NO: 1099487 - DNA, 25 bp, Homo sapien
tcaaacaaaaatcttgagaccctta

SEQ ID NO: 1099488 - DNA, 25 bp, Homo sapien
tttatgaagtagagttcatggagaa

SEQ ID NO: 1099489 - DNA, 25 bp, Homo sapien
gaatgaaacgtatctgggtaaatgt

SEQ ID NO: 1099490 - DNA, 25 bp, Homo sapien
aacaaaattgtctctgtcttgacag

SEQ ID NO: 1099491 - DNA, 25 bp, Homo sapien
ttcttaggaatgaaacgtatctggg

SEQ ID NO: 1099492 - DNA, 25 bp, Homo sapien
tgacagtaccaaagttcacataaaa

SEQ ID NO: 1099493 - DNA, 25 bp, Homo sapien
cttatatgccagttggttgaagtgg

SEQ ID NO: 1099494 - DNA, 25 bp, Homo sapien
gggaaagagatggcccttatatgcc

SEQ ID NO: 1099495 - DNA, 25 bp, Homo sapien
gatggcccttatatgccagttggtt

SEQ ID NO: 1099496 - DNA, 25 bp, Homo sapien
aaagagatggcccttatatgccagt

SEQ ID NO: 1099497 - DNA, 25 bp, Homo sapien
taccaatatgttgctgaagggggaa

SEQ ID NO: 1099498 - DNA, 25 bp, Homo sapien
cttaccaatatgttgctgaaggggg

SEQ ID NO: 1099499 - DNA, 25 bp, Homo sapien
accaatatgttgctgaagggggaag

SEQ ID NO: 1099500 - DNA, 25 bp, Homo sapien
caatatgttgctgaagggggaaggc

SEQ ID NO: 1099501 - DNA, 25 bp, Homo sapien
ttctttgggagatggtaacattgtt

SEQ ID NO: 1099502 - DNA, 25 bp, Homo sapien
cgttctcttcatgaagtaaattgtc

SEQ ID NO: 1099503 - DNA, 25 bp, Homo sapien
tggaaaagaatgaccgtttcagaac

SEQ ID NO: 1099504 - DNA, 25 bp, Homo sapien
cccaaagctgttctttgggagatgg

SEQ ID NO: 1099505 - DNA, 25 bp, Homo sapien
taacacctagtgcactgtttctgta

SEQ ID NO: 1099506 - DNA, 25 bp, Homo sapien
cctagtgcactgtttctgtactgta

SEQ ID NO: 1099507 - DNA, 25 bp, Homo sapien
tagtgcactgtttctgtactgtact

SEQ ID NO: 1099508 - DNA, 25 bp, Homo sapien
ctttaacacctagtgcactgtttct

SEQ ID NO: 1099509 - DNA, 25 bp, Homo sapien
ctttctgtttctacgatgcttttga

SEQ ID NO: 1099510 - DNA, 25 bp, Homo sapien
cagcggtactcatacgatagtcctc

SEQ ID NO: 1099511 - DNA, 25 bp, Homo sapien
tttgacagatttcgtaaactgtggg

SEQ ID NO: 1099512 - DNA, 25 bp, Homo sapien
tactcatacgatagtcctccttcgc

SEQ ID NO: 1099513 - DNA, 25 bp, Homo sapien
tcgttttattcagcggcagtggtgc

SEQ ID NO: 1099514 - DNA, 25 bp, Homo sapien
cagtggtgctttcccgaatctcaga

SEQ ID NO: 1099515 - DNA, 25 bp, Homo sapien
tcagaatgccgtaggtatctcctcc

SEQ ID NO: 1099516 - DNA, 25 bp, Homo sapien
catgccttggcgtttcctttggcgg

SEQ ID NO: 1099517 - DNA, 25 bp, Homo sapien
cagctggacagatctcggcctttct

SEQ ID NO: 1099518 - DNA, 25 bp, Homo sapien
caccggaaataagatgcagagccct

SEQ ID NO: 1099519 - DNA, 25 bp, Homo sapien
caaacgatccggctagaaatctagg

SEQ ID NO: 1099520 - DNA, 25 bp, Homo sapien
gaaatctaggaagcgctgatccgga

SEQ ID NO: 1099521 - DNA, 25 bp, Homo sapien
ttcggcgattcagcgttcctctcac

SEQ ID NO: 1099522 - DNA, 25 bp, Homo sapien
gaagcgcagccaattctcttcggcg

SEQ ID NO: 1099523 - DNA, 25 bp, Homo sapien
tcacaaacaaggaagcgcagccaat

SEQ ID NO: 1099524 - DNA, 25 bp, Homo sapien
ttctagctcacaaacaaggaagcgc

SEQ ID NO: 1099525 - DNA, 25 bp, Homo sapien
gaaggtgttgatttctgactggaga

SEQ ID NO: 1099526 - DNA, 25 bp, Homo sapien
tgactggagaaagttgcatcgcttc

SEQ ID NO: 1099527 - DNA, 25 bp, Homo sapien
tctttgttcgaggactctctgaagg

SEQ ID NO: 1099528 - DNA, 25 bp, Homo sapien
gcatcgcttcgtggactgatcgcca

SEQ ID NO: 1099529 - DNA, 25 bp, Homo sapien
aagacagttaagtaggcagctctac

SEQ ID NO: 1099530 - DNA, 25 bp, Homo sapien
tatgatagctgaatggtactccact

SEQ ID NO: 1099531 - DNA, 25 bp, Homo sapien
catctattgatgaactcttacgttg

SEQ ID NO: 1099532 - DNA, 25 bp, Homo sapien
ttttactagtgtcaccctgttgtgc

SEQ ID NO: 1099533 - DNA, 25 bp, Homo sapien
gctcccacagataagaaagaatgtg

SEQ ID NO: 1099534 - DNA, 25 bp, Homo sapien
ctataaaggctttgtggaaattcat

SEQ ID NO: 1099535 - DNA, 25 bp, Homo sapien
tcagagctaacagaagttgtagttg

SEQ ID NO: 1099536 - DNA, 25 bp, Homo sapien
agagctaacagaagttgtagttgtg

SEQ ID NO: 1099537 - DNA, 25 bp, Homo sapien
cagagctaacagaagttgtagttgt

SEQ ID NO: 1099538 - DNA, 25 bp, Homo sapien
ttcagagctaacagaagttgtagtt

SEQ ID NO: 1099539 - DNA, 25 bp, Homo sapien
gtttgaggagtccaatacttattaa

SEQ ID NO: 1099540 - DNA, 25 bp, Homo sapien
tgaggagtccaatacttattaatgg

SEQ ID NO: 1099541 - DNA, 25 bp, Homo sapien
catcaaaattcagtttggcagtttg

SEQ ID NO: 1099542 - DNA, 25 bp, Homo sapien
aggagtccaatacttattaatggtc

SEQ ID NO: 1099543 - DNA, 25 bp, Homo sapien
taattgcttaaatgattttagtagt

SEQ ID NO: 1099544 - DNA, 25 bp, Homo sapien
catctaattgcttaaatgattttag

SEQ ID NO: 1099545 - DNA, 25 bp, Homo sapien
catttacatctaattgcttaaatga

SEQ ID NO: 1099546 - DNA, 25 bp, Homo sapien
tacatctaattgcttaaatgatttt

SEQ ID NO: 1099547 - DNA, 25 bp, Homo sapien
tacatcagccaaatttattatggca

SEQ ID NO: 1099548 - DNA, 25 bp, Homo sapien
atgtagtcaaatttgccatcagcat

SEQ ID NO: 1099549 - DNA, 25 bp, Homo sapien
ccatcagcatttacatcagccaaat

SEQ ID NO: 1099550 - DNA, 25 bp, Homo sapien
tattatggcatttacttcttctcga

SEQ ID NO: 1099551 - DNA, 25 bp, Homo sapien
tactgtcaacctctagtttttctag

SEQ ID NO: 1099552 - DNA, 25 bp, Homo sapien
tactggtgatgggtccctttcaggg

SEQ ID NO: 1099553 - DNA, 25 bp, Homo sapien
acccttcgatgtggtttccaaactg

SEQ ID NO: 1099554 - DNA, 25 bp, Homo sapien
ggtgacgcatcaatttactgtcaac

SEQ ID NO: 1099555 - DNA, 25 bp, Homo sapien
gttgctgacagtaaagaactcctgg

SEQ ID NO: 1099556 - DNA, 25 bp, Homo sapien
tcctggttgctgacagtaaagaact

SEQ ID NO: 1099557 - DNA, 25 bp, Homo sapien
tgctgacagtaaagaactcctggtg

SEQ ID NO: 1099558 - DNA, 25 bp, Homo sapien
aacttcctggttgctgacagtaaag

SEQ ID NO: 1099559 - DNA, 25 bp, Homo sapien
ccctgtagacactgcacagttatta

SEQ ID NO: 1099560 - DNA, 25 bp, Homo sapien
gtcatctgttaacttaaaatactat

SEQ ID NO: 1099561 - DNA, 25 bp, Homo sapien
tttactggttccctgtagacactgc

SEQ ID NO: 1099562 - DNA, 25 bp, Homo sapien
cttcataaactttactggttccctg

SEQ ID NO: 1099563 - DNA, 25 bp, Homo sapien
taatgttttatatttctgtaactat

SEQ ID NO: 1099564 - DNA, 25 bp, Homo sapien
ttctgtaactattattttctgttga

SEQ ID NO: 1099565 - DNA, 25 bp, Homo sapien
atatttctgtaactattattttctg

SEQ ID NO: 1099566 - DNA, 25 bp, Homo sapien
tgtaactattattttctgttgaaag

SEQ ID NO: 1099567 - DNA, 25 bp, Homo sapien
aaagttgacagtatgcccttttctt

SEQ ID NO: 1099568 - DNA, 25 bp, Homo sapien
agaaatagatagcaagcaacagtgg

SEQ ID NO: 1099569 - DNA, 25 bp, Homo sapien
caacagtgggcaatatcaagatccg

SEQ ID NO: 1099570 - DNA, 25 bp, Homo sapien
tgtctagcaggttctctgtttttcc

SEQ ID NO: 1099571 - DNA, 25 bp, Homo sapien
tcaacttgactcaggtttaatggct

SEQ ID NO: 1099572 - DNA, 25 bp, Homo sapien
gttagataaaccatggacctctgag

SEQ ID NO: 1099573 - DNA, 25 bp, Homo sapien
accttttgattgcatgtgttgccag

SEQ ID NO: 1099574 - DNA, 25 bp, Homo sapien
tgtactgatgactaatgatttcacc

SEQ ID NO: 1099575 - DNA, 25 bp, Homo sapien
tgatgtctggtatataaggccctcg

SEQ ID NO: 1099576 - DNA, 25 bp, Homo sapien
caggtccaggctagtttactgaagg

SEQ ID NO: 1099577 - DNA, 25 bp, Homo sapien
taaccataactgtgtgagcaagccc

SEQ ID NO: 1099578 - DNA, 25 bp, Homo sapien
aacaagcctggctcagactaagaac

SEQ ID NO: 1099579 - DNA, 25 bp, Homo sapien
tattcaatcaaagaagtgaggctgt

SEQ ID NO: 1099580 - DNA, 25 bp, Homo sapien
ttttccggcggagtcatagtggcgc

SEQ ID NO: 1099581 - DNA, 25 bp, Homo sapien
gaattggttctctgctacaggtcaa

SEQ ID NO: 1099582 - DNA, 25 bp, Homo sapien
aacattttgttccttgcagtacacc

SEQ ID NO: 1099583 - DNA, 25 bp, Homo sapien
actctcctgtagtcctctgagtaag

SEQ ID NO: 1099584 - DNA, 25 bp, Homo sapien
ctggatactctcctgtagtcctctg

SEQ ID NO: 1099585 - DNA, 25 bp, Homo sapien
gatactctcctgtagtcctctgagt

SEQ ID NO: 1099586 - DNA, 25 bp, Homo sapien
tctcctgtagtcctctgagtaagct

SEQ ID NO: 1099587 - DNA, 25 bp, Homo sapien
tcctttttgatagtattcaacgaga

SEQ ID NO: 1099588 - DNA, 25 bp, Homo sapien
aggaaggtacagtaattatccacct

SEQ ID NO: 1099589 - DNA, 25 bp, Homo sapien
ttgatagtattcaacgagaaataac

SEQ ID NO: 1099590 - DNA, 25 bp, Homo sapien
gtattcaacgagaaataacacttta

SEQ ID NO: 1099591 - DNA, 25 bp, Homo sapien
gttttagtagtactatgagaacctg

SEQ ID NO: 1099592 - DNA, 25 bp, Homo sapien
ataaaaggtgtatctaagtttctca

SEQ ID NO: 1099593 - DNA, 25 bp, Homo sapien
aaaaggtgtatctaagtttctcaat

SEQ ID NO: 1099594 - DNA, 25 bp, Homo sapien
gtactatgagaacctgtatctctga

SEQ ID NO: 1099595 - DNA, 25 bp, Homo sapien
gatagcatttgcaataaggcacaaa

SEQ ID NO: 1099596 - DNA, 25 bp, Homo sapien
aataaggcacaaacctaaatacagc

SEQ ID NO: 1099597 - DNA, 25 bp, Homo sapien
tttatgtgtaaacatgatagcattt

SEQ ID NO: 1099598 - DNA, 25 bp, Homo sapien
ggcacaaacctaaatacagcaacct

SEQ ID NO: 1099599 - DNA, 25 bp, Homo sapien
aagctgtagatttgcttgactctca

SEQ ID NO: 1099600 - DNA, 25 bp, Homo sapien
tcgtagttcggtaaaacacacaagc

SEQ ID NO: 1099601 - DNA, 25 bp, Homo sapien
acaaggcagtatcaacggataacca

SEQ ID NO: 1099602 - DNA, 25 bp, Homo sapien
aggcagtatcaacggataaccaagg

SEQ ID NO: 1099603 - DNA, 25 bp, Homo sapien
aacattagaaaataaatatgtatac

SEQ ID NO: 1099604 - DNA, 25 bp, Homo sapien
taaacattagaaaataaatatgtat

SEQ ID NO: 1099605 - DNA, 25 bp, Homo sapien
aattaaacattagaaaataaatatg

SEQ ID NO: 1099606 - DNA, 25 bp, Homo sapien
gaacaaccccatgggcaacatataa

SEQ ID NO: 1099607 - DNA, 25 bp, Homo sapien
taagtcaagcctgaggatagtaatc

SEQ ID NO: 1099608 - DNA, 25 bp, Homo sapien
aatgttcacacatgaggcatcaggg

SEQ ID NO: 1099609 - DNA, 25 bp, Homo sapien
taagtaagacaaacgtctacagcag

SEQ ID NO: 1099610 - DNA, 25 bp, Homo sapien
tgagatcattagatacagcagttct

SEQ ID NO: 1099611 - DNA, 25 bp, Homo sapien
caatcatcagtcttaatcttttcat

SEQ ID NO: 1099612 - DNA, 25 bp, Homo sapien
caaatgcctaaaactgtaataggta

SEQ ID NO: 1099613 - DNA, 25 bp, Homo sapien
aaattctattatagtcctatcagtc

SEQ ID NO: 1099614 - DNA, 25 bp, Homo sapien
ggaataattcccctgtttcatctct

SEQ ID NO: 1099615 - DNA, 25 bp, Homo sapien
cagcctacagccagttgtggaagga

SEQ ID NO: 1099616 - DNA, 25 bp, Homo sapien
tccaggtcctagttcaccagtccat

SEQ ID NO: 1099617 - DNA, 25 bp, Homo sapien
aagttgggcttcatctgttactggt

SEQ ID NO: 1099618 - DNA, 25 bp, Homo sapien
tctgcagacagcccaagcatcttca

SEQ ID NO: 1099619 - DNA, 25 bp, Homo sapien
ggctaagaagaccatttccatctaa

SEQ ID NO: 1099620 - DNA, 25 bp, Homo sapien
gacagcccaagcatcttcatcacat

SEQ ID NO: 1099621 - DNA, 25 bp, Homo sapien
cagacagcccaagcatcttcatcac

SEQ ID NO: 1099622 - DNA, 25 bp, Homo sapien
cataaatccttgtcttgttagttca

SEQ ID NO: 1099623 - DNA, 25 bp, Homo sapien
ttctcgatcattagcttccattaga

SEQ ID NO: 1099624 - DNA, 25 bp, Homo sapien
tagagttacccaaaggtcacaagga

SEQ ID NO: 1099625 - DNA, 25 bp, Homo sapien
gagctttattgtagcccatagagtg

SEQ ID NO: 1099626 - DNA, 25 bp, Homo sapien
gcatcaccgttgctaagaacagatt

SEQ ID NO: 1099627 - DNA, 25 bp, Homo sapien
gccatccattactttggcatcaccg

SEQ ID NO: 1099628 - DNA, 25 bp, Homo sapien
tctgcatagatatcaatgacaaatg

SEQ ID NO: 1099629 - DNA, 25 bp, Homo sapien
tctcaagttgtccactacatgcctc

SEQ ID NO: 1099630 - DNA, 25 bp, Homo sapien
tgacgttatccaggtgtcacaactg

SEQ ID NO: 1099631 - DNA, 25 bp, Homo sapien
ttcaataactgacgttatccaggtg

SEQ ID NO: 1099632 - DNA, 25 bp, Homo sapien
acgttatccaggtgtcacaactgta

SEQ ID NO: 1099633 - DNA, 25 bp, Homo sapien
taactgacgttatccaggtgtcaca

SEQ ID NO: 1099634 - DNA, 25 bp, Homo sapien
ggatacttaattaccacatacgaat

SEQ ID NO: 1099635 - DNA, 25 bp, Homo sapien
cgaatagagtaaggaataagatgaa

SEQ ID NO: 1099636 - DNA, 25 bp, Homo sapien
cattattaatgtgatgggatactta

SEQ ID NO: 1099637 - DNA, 25 bp, Homo sapien
agtaagctttgtagcaaaatgagga

SEQ ID NO: 1099638 - DNA, 25 bp, Homo sapien
ttaccactcccagtttgagttagaa

SEQ ID NO: 1099639 - DNA, 25 bp, Homo sapien
tataggatctctgcaacgttagtgt

SEQ ID NO: 1099640 - DNA, 25 bp, Homo sapien
gcaggtcttgggacagtagaataca

SEQ ID NO: 1099641 - DNA, 25 bp, Homo sapien
tacccagattgtgctctatattcac

SEQ ID NO: 1099642 - DNA, 25 bp, Homo sapien
taatcagcttgatgaaagcaggtct

SEQ ID NO: 1099643 - DNA, 25 bp, Homo sapien
gagcacctagccatcttatataaag

SEQ ID NO: 1099644 - DNA, 25 bp, Homo sapien
cataaactccttgaacgcagagatc

SEQ ID NO: 1099645 - DNA, 25 bp, Homo sapien
taaaaatatgtctcacgtaggacct

SEQ ID NO: 1099646 - DNA, 25 bp, Homo sapien
tctcaggttgactaaaaacgctgcc

SEQ ID NO: 1099647 - DNA, 25 bp, Homo sapien
tccccaacctctatggtccaaatta

SEQ ID NO: 1099648 - DNA, 25 bp, Homo sapien
tcccatatcacagttcccttgcccc

SEQ ID NO: 1099649 - DNA, 25 bp, Homo sapien
cttccccaacctctatggtccaaat

SEQ ID NO: 1099650 - DNA, 25 bp, Homo sapien
tcaaatcccatatcacagttccctt

SEQ ID NO: 1099651 - DNA, 25 bp, Homo sapien
gaagatgaacattagctcggactgg

SEQ ID NO: 1099652 - DNA, 25 bp, Homo sapien
caccctctgaggcatgattggtcca

SEQ ID NO: 1099653 - DNA, 25 bp, Homo sapien
tgaaaactgcaatctactaggtggg

SEQ ID NO: 1099654 - DNA, 25 bp, Homo sapien
caatggcctctaggatggataggga

SEQ ID NO: 1099655 - DNA, 25 bp, Homo sapien
cattgtagatttgggtcccacttct

SEQ ID NO: 1099656 - DNA, 25 bp, Homo sapien
ttgggtcccacttctactgcaaata

SEQ ID NO: 1099657 - DNA, 25 bp, Homo sapien
ggtcccacttctactgcaaatatgt

SEQ ID NO: 1099658 - DNA, 25 bp, Homo sapien
gtagatttgggtcccacttctactg

SEQ ID NO: 1099659 - DNA, 25 bp, Homo sapien
ttcacttgcccagtaggtagctcta

SEQ ID NO: 1099660 - DNA, 25 bp, Homo sapien
tgctaacaccagaactacagctttt

SEQ ID NO: 1099661 - DNA, 25 bp, Homo sapien
cctttgaacccctggctaaatcaga

SEQ ID NO: 1099662 - DNA, 25 bp, Homo sapien
tatttaaaactcagaggcattgtcc

SEQ ID NO: 1099663 - DNA, 25 bp, Homo sapien
tatttgtccttagcagagactagca

SEQ ID NO: 1099664 - DNA, 25 bp, Homo sapien
gagactagcaatctatgatctgagg

SEQ ID NO: 1099665 - DNA, 25 bp, Homo sapien
tgtataagaatatccctgtacagat

SEQ ID NO: 1099666 - DNA, 25 bp, Homo sapien
acaacatttctaggccttgtataag

SEQ ID NO: 1099667 - DNA, 25 bp, Homo sapien
tcaaaggcattacatgttgacaaac

SEQ ID NO: 1099668 - DNA, 25 bp, Homo sapien
agactaaatctgaaataattcttag

SEQ ID NO: 1099669 - DNA, 25 bp, Homo sapien
taacagactaaatctgaaataattc

SEQ ID NO: 1099670 - DNA, 25 bp, Homo sapien
cagactaaatctgaaataattctta

SEQ ID NO: 1099671 - DNA, 25 bp, Homo sapien
ataataaagtacataccatggacat

SEQ ID NO: 1099672 - DNA, 25 bp, Homo sapien
taaagtacataccatggacataaaa

SEQ ID NO: 1099673 - DNA, 25 bp, Homo sapien
tattatttaggtacatcagttaagt

SEQ ID NO: 1099674 - DNA, 25 bp, Homo sapien
tacataccatggacataaaatgaaa

SEQ ID NO: 1099675 - DNA, 25 bp, Homo sapien
gaatcaggtccactatttgctttat

SEQ ID NO: 1099676 - DNA, 25 bp, Homo sapien
tctatatcctctgaatcaggtccac

SEQ ID NO: 1099677 - DNA, 25 bp, Homo sapien
acatgaatctcatctatatcctctg

SEQ ID NO: 1099678 - DNA, 25 bp, Homo sapien
tcctcaaatcattacagttcttttt

SEQ ID NO: 1099679 - DNA, 25 bp, Homo sapien
gtagacctcattgacaccttcagtg

SEQ ID NO: 1099680 - DNA, 25 bp, Homo sapien
ccagggacattgtgccagatcaaaa

SEQ ID NO: 1099681 - DNA, 25 bp, Homo sapien
aaaaggtggtcgcttactggcaaag

SEQ ID NO: 1099682 - DNA, 25 bp, Homo sapien
gcgttgacattcctttccacagagt

SEQ ID NO: 1099683 - DNA, 25 bp, Homo sapien
tctaggccggcgtttggccctcctc

SEQ ID NO: 1099684 - DNA, 25 bp, Homo sapien
cgggtgggggctacgccgcactcta

SEQ ID NO: 1099685 - DNA, 25 bp, Homo sapien
tacgccgcactctaggccggcgttt

SEQ ID NO: 1099686 - DNA, 25 bp, Homo sapien
gggctacgccgcactctaggccggc

SEQ ID NO: 1099687 - DNA, 25 bp, Homo sapien
agcggcggacttggctggcggaggg

SEQ ID NO: 1099688 - DNA, 25 bp, Homo sapien
ctgccgggggtcagagcggcggact

SEQ ID NO: 1099689 - DNA, 25 bp, Homo sapien
gtcagagcggcggacttggctggcg

SEQ ID NO: 1099690 - DNA, 25 bp, Homo sapien
agagcggcggacttggctggcggag

SEQ ID NO: 1099691 - DNA, 25 bp, Homo sapien
gatggcctccttcatgtagaaccgg

SEQ ID NO: 1099692 - DNA, 25 bp, Homo sapien
gcttctggtcctggtacgcctgggt

SEQ ID NO: 1099693 - DNA, 25 bp, Homo sapien
aagttctccgcgtagttggcgctgc

SEQ ID NO: 1099694 - DNA, 25 bp, Homo sapien
gatgcgagcgatgagctggatggcc

SEQ ID NO: 1099695 - DNA, 25 bp, Homo sapien
caaggttagggcaaatgtcagacgc

SEQ ID NO: 1099696 - DNA, 25 bp, Homo sapien
gcactctgcgccgtaatcgtatctt

SEQ ID NO: 1099697 - DNA, 25 bp, Homo sapien
tgcgccgtaatcgtatcttccaagg

SEQ ID NO: 1099698 - DNA, 25 bp, Homo sapien
tttcctgcttaaggcgacagcactc

SEQ ID NO: 1099699 - DNA, 25 bp, Homo sapien
tccgagccagcgggaagcgccagtc

SEQ ID NO: 1099700 - DNA, 25 bp, Homo sapien
ccacagtgtcgggctccgagccagc

SEQ ID NO: 1099701 - DNA, 25 bp, Homo sapien
ggatgggtgctctcgccacccttgc

SEQ ID NO: 1099702 - DNA, 25 bp, Homo sapien
gggatgggtgctctcgccacccttg

SEQ ID NO: 1099703 - DNA, 25 bp, Homo sapien
taagggcgtctttgggtatgttgcc

SEQ ID NO: 1099704 - DNA, 25 bp, Homo sapien
cacgactgcttgcttgcgtaagggc

SEQ ID NO: 1099705 - DNA, 25 bp, Homo sapien
caaggtgttgcggtaatttcctggc

SEQ ID NO: 1099706 - DNA, 25 bp, Homo sapien
tggacccgcccaatcaagtcagtta

SEQ ID NO: 1099707 - DNA, 25 bp, Homo sapien
tagaatcaggagagtaagcaaggcc

SEQ ID NO: 1099708 - DNA, 25 bp, Homo sapien
catgaatttagcaactggcaagtcc

SEQ ID NO: 1099709 - DNA, 25 bp, Homo sapien
cagtgaaatggcgagtaaaccggag

SEQ ID NO: 1099710 - DNA, 25 bp, Homo sapien
ttataaatgtttggcccaggaaggc

SEQ ID NO: 1099711 - DNA, 25 bp, Homo sapien
gcagatacaggtaaaacacaggtct

SEQ ID NO: 1099712 - DNA, 25 bp, Homo sapien
tctctagttggaggccgttgacatg

SEQ ID NO: 1099713 - DNA, 25 bp, Homo sapien
cattgaatgctacatagtcctaggc

SEQ ID NO: 1099714 - DNA, 25 bp, Homo sapien
gctggctttaaatcaagtgctagaa

SEQ ID NO: 1099715 - DNA, 25 bp, Homo sapien
tgtttagtgactaagtgtccggctc

SEQ ID NO: 1099716 - DNA, 25 bp, Homo sapien
aagggtagccccatcttctatcgca

SEQ ID NO: 1099717 - DNA, 25 bp, Homo sapien
tgtccggctctaaaaaagagtcctg

SEQ ID NO: 1099718 - DNA, 25 bp, Homo sapien
cataattggttttaggtgcaggcac

SEQ ID NO: 1099719 - DNA, 25 bp, Homo sapien
tataagcccggtagaaaggcacagg

SEQ ID NO: 1099720 - DNA, 25 bp, Homo sapien
ctctgagtagcatcaagaatgtgca

SEQ ID NO: 1099721 - DNA, 25 bp, Homo sapien
tctgcagcggtaagatcaagccttg

SEQ ID NO: 1099722 - DNA, 25 bp, Homo sapien
aaggcacagggcataagtgctccaa

SEQ ID NO: 1099723 - DNA, 25 bp, Homo sapien
aagacgggagctcaggcaagggctg

SEQ ID NO: 1099724 - DNA, 25 bp, Homo sapien
taaagacgggagctcaggcaagggc

SEQ ID NO: 1099725 - DNA, 25 bp, Homo sapien
aaagacgggagctcaggcaagggct

SEQ ID NO: 1099726 - DNA, 25 bp, Homo sapien
tgagtggcaccttagaattcacaaa

SEQ ID NO: 1099727 - DNA, 25 bp, Homo sapien
ttagataagttaagcagtatacatg

SEQ ID NO: 1099728 - DNA, 25 bp, Homo sapien
gactttcctgaagcaacattacagt

SEQ ID NO: 1099729 - DNA, 25 bp, Homo sapien
gaattaatcccactttactggtgag

SEQ ID NO: 1099730 - DNA, 25 bp, Homo sapien
ccgaaagtagacaggcactggtagc

SEQ ID NO: 1099731 - DNA, 25 bp, Homo sapien
tgccctctgtcaagaatgccgctgt

SEQ ID NO: 1099732 - DNA, 25 bp, Homo sapien
tctgtcaagaatgccgctgtgttcc

SEQ ID NO: 1099733 - DNA, 25 bp, Homo sapien
caagtagcatccgaaagtagacagg

SEQ ID NO: 1099734 - DNA, 25 bp, Homo sapien
ttcacttccaccgactggctcagtg

SEQ ID NO: 1099735 - DNA, 25 bp, Homo sapien
aaataggtctgtccaacctgaagct

SEQ ID NO: 1099736 - DNA, 25 bp, Homo sapien
gcaacagtgtcgtatgagtaactaa

SEQ ID NO: 1099737 - DNA, 25 bp, Homo sapien
tgagggtgtccagaaagcagtcaag

SEQ ID NO: 1099738 - DNA, 25 bp, Homo sapien
tgtagcaaaagtcaacagagggaga

SEQ ID NO: 1099739 - DNA, 25 bp, Homo sapien
ccatttttctatatgtcccagaaat

SEQ ID NO: 1099740 - DNA, 25 bp, Homo sapien
tttctatatgtcccagaaatccatt

SEQ ID NO: 1099741 - DNA, 25 bp, Homo sapien
cagagggagaggaccttcttccatt

SEQ ID NO: 1099742 - DNA, 25 bp, Homo sapien
tggatgaaattctccagatagcatg

SEQ ID NO: 1099743 - DNA, 25 bp, Homo sapien
ttcttccgtaatccacttgttcctg

SEQ ID NO: 1099744 - DNA, 25 bp, Homo sapien
gatccctggcgatcttttaggtcta

SEQ ID NO: 1099745 - DNA, 25 bp, Homo sapien
gctgatttattaaagtaccgcccat

SEQ ID NO: 1099746 - DNA, 25 bp, Homo sapien
gggacagtgtaccagatccactcaa

SEQ ID NO: 1099747 - DNA, 25 bp, Homo sapien
tgaaaatattgcttgggctgccaac

SEQ ID NO: 1099748 - DNA, 25 bp, Homo sapien
ttatttagcaaaccttcagagggca

SEQ ID NO: 1099749 - DNA, 25 bp, Homo sapien
tttcacaggtttaaagcgcatccga

SEQ ID NO: 1099750 - DNA, 25 bp, Homo sapien
taattaatgccagggaaccatacac

SEQ ID NO: 1099751 - DNA, 25 bp, Homo sapien
gactgccaggtcataaggataaata

SEQ ID NO: 1099752 - DNA, 25 bp, Homo sapien
tcagccaggcactaagagtccatcc

SEQ ID NO: 1099753 - DNA, 25 bp, Homo sapien
tgacacattctacagcccggataag

SEQ ID NO: 1099754 - DNA, 25 bp, Homo sapien
tctgtccgataaccaagcgaccgat

SEQ ID NO: 1099755 - DNA, 25 bp, Homo sapien
aggattccattctgtccgataacca

SEQ ID NO: 1099756 - DNA, 25 bp, Homo sapien
gattccattctgtccgataaccaag

SEQ ID NO: 1099757 - DNA, 25 bp, Homo sapien
cattctgtccgataaccaagcgacc

SEQ ID NO: 1099758 - DNA, 25 bp, Homo sapien
cccctgggttgtgactggctgtcag

SEQ ID NO: 1099759 - DNA, 25 bp, Homo sapien
ccctgggttgtgactggctgtcaga

SEQ ID NO: 1099760 - DNA, 25 bp, Homo sapien
gctgtcagaatgatcccaccaatgg

SEQ ID NO: 1099761 - DNA, 25 bp, Homo sapien
ctggctgtcagaatgatcccaccaa

SEQ ID NO: 1099762 - DNA, 25 bp, Homo sapien
ctgtcctcaaaatgacagcaaactc

SEQ ID NO: 1099763 - DNA, 25 bp, Homo sapien
gtcctcaaaatgacagcaaactcac

SEQ ID NO: 1099764 - DNA, 25 bp, Homo sapien
tgtcctcaaaatgacagcaaactca

SEQ ID NO: 1099765 - DNA, 25 bp, Homo sapien
ttatcagttattgcttctggagcag

SEQ ID NO: 1099766 - DNA, 25 bp, Homo sapien
tcagttattgcttctggagcaggac

SEQ ID NO: 1099767 - DNA, 25 bp, Homo sapien
tcccagaacaccaaggtctactttc

SEQ ID NO: 1099768 - DNA, 25 bp, Homo sapien
acaccaaggtctactttcaggtcag

SEQ ID NO: 1099769 - DNA, 25 bp, Homo sapien
caaagctgaagaccctctactaaaa

SEQ ID NO: 1099770 - DNA, 25 bp, Homo sapien
atctttccaaagctgaagaccctct

SEQ ID NO: 1099771 - DNA, 25 bp, Homo sapien
aggaaaatcgctcaacttggaaata

SEQ ID NO: 1099772 - DNA, 25 bp, Homo sapien
aaatcgctcaacttggaaataggag

SEQ ID NO: 1099773 - DNA, 25 bp, Homo sapien
ttcagtgcactgaaatcaaagatgc

SEQ ID NO: 1099774 - DNA, 25 bp, Homo sapien
ccatgcatagcatcaatacggatct

SEQ ID NO: 1099775 - DNA, 25 bp, Homo sapien
gcataagcttctaccgaatccacaa

SEQ ID NO: 1099776 - DNA, 25 bp, Homo sapien
gatcttcagtcggtttggcccagaa

SEQ ID NO: 1099777 - DNA, 25 bp, Homo sapien
agcatggaataaatgtatgcagaat

SEQ ID NO: 1099778 - DNA, 25 bp, Homo sapien
gcatggaataaatgtatgcagaatc

SEQ ID NO: 1099779 - DNA, 25 bp, Homo sapien
tccagaggaacgcagttaactgccg

SEQ ID NO: 1099780 - DNA, 25 bp, Homo sapien
ttcgcaggggcaccgagttcttcac

SEQ ID NO: 1099781 - DNA, 25 bp, Homo sapien
gatcttctttacatacggtcccaca

SEQ ID NO: 1099782 - DNA, 25 bp, Homo sapien
tccaccaggtcagctgcataggtga

SEQ ID NO: 1099783 - DNA, 25 bp, Homo sapien
actcgtgggcatgctccgtgcaaag

SEQ ID NO: 1099784 - DNA, 25 bp, Homo sapien
cagtctgctggaaatacggaatgct

SEQ ID NO: 1099785 - DNA, 25 bp, Homo sapien
tcacaaagaacccatgcttgcccag

SEQ ID NO: 1099786 - DNA, 25 bp, Homo sapien
gcttgcccagaatcatgtttcgatc

SEQ ID NO: 1099787 - DNA, 25 bp, Homo sapien
cctccccacaaagggacagtttgct

SEQ ID NO: 1099788 - DNA, 25 bp, Homo sapien
caaagcaatctttgtagcactagcc

SEQ ID NO: 1099789 - DNA, 25 bp, Homo sapien
ccagttggggtctcatacaaagcaa

SEQ ID NO: 1099790 - DNA, 25 bp, Homo sapien
tttgctcgcgtccatcaaattccca

SEQ ID NO: 1099791 - DNA, 25 bp, Homo sapien
ataagcccagctgcactcgttcaca

SEQ ID NO: 1099792 - DNA, 25 bp, Homo sapien
gagtcactaatgtctaccctgagaa

SEQ ID NO: 1099793 - DNA, 25 bp, Homo sapien
tataccaaggagaagctaaaaccat

SEQ ID NO: 1099794 - DNA, 25 bp, Homo sapien
caacagcgatctatggctatgcagc

SEQ ID NO: 1099795 - DNA, 25 bp, Homo sapien
agcaagctgctgtaagaaacgtgct

SEQ ID NO: 1099796 - DNA, 25 bp, Homo sapien
gcaagctgctgtaagaaacgtgctt

SEQ ID NO: 1099797 - DNA, 25 bp, Homo sapien
gaaattccggccatacttttgccaa

SEQ ID NO: 1099798 - DNA, 25 bp, Homo sapien
tctttctcacggatgtggtcagaac

SEQ ID NO: 1099799 - DNA, 25 bp, Homo sapien
gatctttgagaatgtcctccacact

SEQ ID NO: 1099800 - DNA, 25 bp, Homo sapien
cttgcgggtggctaggatggagagc

SEQ ID NO: 1099801 - DNA, 25 bp, Homo sapien
tcccgcaaaactatctaacttcaga

SEQ ID NO: 1099802 - DNA, 25 bp, Homo sapien
cagaataaagctctaagatgtttca

SEQ ID NO: 1099803 - DNA, 25 bp, Homo sapien
agatcacaccaaggcctatcagtca

SEQ ID NO: 1099804 - DNA, 25 bp, Homo sapien
gggttatgagcttctgaataagcag

SEQ ID NO: 1099805 - DNA, 25 bp, Homo sapien
aagtcacgaagttgaggcccacggg

SEQ ID NO: 1099806 - DNA, 25 bp, Homo sapien
gaagaagtcacgaagttgaggccca

SEQ ID NO: 1099807 - DNA, 25 bp, Homo sapien
tcacgaagttgaggcccacgggctg

SEQ ID NO: 1099808 - DNA, 25 bp, Homo sapien
agaagtcacgaagttgaggcccacg

SEQ ID NO: 1099809 - DNA, 25 bp, Homo sapien
gctgtattcaaagttatcggccttc

SEQ ID NO: 1099810 - DNA, 25 bp, Homo sapien
caaaggagcgatcaaacatcagggc

SEQ ID NO: 1099811 - DNA, 25 bp, Homo sapien
catccactgggtcgctgtattcaaa

SEQ ID NO: 1099812 - DNA, 25 bp, Homo sapien
cagtgtaaactttgtcatttgctga

SEQ ID NO: 1099813 - DNA, 25 bp, Homo sapien
tgagagtcacgtgggacagcagaaa

SEQ ID NO: 1099814 - DNA, 25 bp, Homo sapien
taagaacagctaccctagaaaaaca

SEQ ID NO: 1099815 - DNA, 25 bp, Homo sapien
acgagtgcatgtgagagtcacgtgg

SEQ ID NO: 1099816 - DNA, 25 bp, Homo sapien
cagaaaaccaggtaagaacagctac

SEQ ID NO: 1099817 - DNA, 25 bp, Homo sapien
ctggacagtgcacagaacaagggca

SEQ ID NO: 1099818 - DNA, 25 bp, Homo sapien
tgcatgtacaatggacacatcatct

SEQ ID NO: 1099819 - DNA, 25 bp, Homo sapien
tcttgcatatcattccagagagtgc

SEQ ID NO: 1099820 - DNA, 25 bp, Homo sapien
tcactctgctataatctgctgacag

SEQ ID NO: 1099821 - DNA, 25 bp, Homo sapien
gagttgacatctaagttcccacagt

SEQ ID NO: 1099822 - DNA, 25 bp, Homo sapien
ctgctgttcgtcaccaatccccatc

SEQ ID NO: 1099823 - DNA, 25 bp, Homo sapien
gtcaccaatccccatctggtgttta

SEQ ID NO: 1099824 - DNA, 25 bp, Homo sapien
caatccccatctggtgtttaatggt

SEQ ID NO: 1099825 - DNA, 25 bp, Homo sapien
tgttcgtcaccaatccccatctggt

SEQ ID NO: 1099826 - DNA, 25 bp, Homo sapien
tctcatagctatcgatgtacagccg

SEQ ID NO: 1099827 - DNA, 25 bp, Homo sapien
cagtgccgctcagtcggaagacgat

SEQ ID NO: 1099828 - DNA, 25 bp, Homo sapien
ggtcctggttaatcttggcaacgtc

SEQ ID NO: 1099829 - DNA, 25 bp, Homo sapien
gatgtacagccgaatggtggccccg

SEQ ID NO: 1099830 - DNA, 25 bp, Homo sapien
ccctctcgggaggtaccatattgat

SEQ ID NO: 1099831 - DNA, 25 bp, Homo sapien
tgcagacacccgacaggcatagcac

SEQ ID NO: 1099832 - DNA, 25 bp, Homo sapien
tcccctctcgggaggtaccatattg

SEQ ID NO: 1099833 - DNA, 25 bp, Homo sapien
acacccgacaggcatagcacactat

SEQ ID NO: 1099834 - DNA, 25 bp, Homo sapien
gcagctccccggctagatggtgata

SEQ ID NO: 1099835 - DNA, 25 bp, Homo sapien
tgtgggaacctcacaccatccactg

SEQ ID NO: 1099836 - DNA, 25 bp, Homo sapien
gatggtgatacacctgggcattgtg

SEQ ID NO: 1099837 - DNA, 25 bp, Homo sapien
ctgaggactatggttcagaggaaac

SEQ ID NO: 1099838 - DNA, 25 bp, Homo sapien
tggaaaaggagaatcaactccacct

SEQ ID NO: 1099839 - DNA, 25 bp, Homo sapien
ccacaaagtgctgatggcctagcag

SEQ ID NO: 1099840 - DNA, 25 bp, Homo sapien
gctgaaactaccacatttcccctta

SEQ ID NO: 1099841 - DNA, 25 bp, Homo sapien
catttccccttagggcttgggcagt

SEQ ID NO: 1099842 - DNA, 25 bp, Homo sapien
tatctaaatctccaccgatccatta

SEQ ID NO: 1099843 - DNA, 25 bp, Homo sapien
ttatctaaatctccaccgatccatt

SEQ ID NO: 1099844 - DNA, 25 bp, Homo sapien
tctaaatctccaccgatccattata

SEQ ID NO: 1099845 - DNA, 25 bp, Homo sapien
ctaaatctccaccgatccattatac

SEQ ID NO: 1099846 - DNA, 25 bp, Homo sapien
aaactactaatctggttgaactgcc

SEQ ID NO: 1099847 - DNA, 25 bp, Homo sapien
tagtacattttctactgctgaatgc

SEQ ID NO: 1099848 - DNA, 25 bp, Homo sapien
tagcagagccaggagtagtacattt

SEQ ID NO: 1099849 - DNA, 25 bp, Homo sapien
gatttgactaaatgactcaatagca

SEQ ID NO: 1099850 - DNA, 25 bp, Homo sapien
cccacatctacttctcgcttaaaga

SEQ ID NO: 1099851 - DNA, 25 bp, Homo sapien
gcacccggcctaatacaggaatctt

SEQ ID NO: 1099852 - DNA, 25 bp, Homo sapien
ccctccccacatctacttctcgctt

SEQ ID NO: 1099853 - DNA, 25 bp, Homo sapien
cacccggcctaatacaggaatcttt

SEQ ID NO: 1099854 - DNA, 25 bp, Homo sapien
tgcttagctccaaacccgtacgtct

SEQ ID NO: 1099855 - DNA, 25 bp, Homo sapien
acttcctctaaacacagatgcttag

SEQ ID NO: 1099856 - DNA, 25 bp, Homo sapien
gtacgtctgactgcctacttccagg

SEQ ID NO: 1099857 - DNA, 25 bp, Homo sapien
ctaaacacagatgcttagctccaaa

SEQ ID NO: 1099858 - DNA, 25 bp, Homo sapien
tgggtgcagtgcgtcccgtcctctc

SEQ ID NO: 1099859 - DNA, 25 bp, Homo sapien
actttcagagcaatggaaataaggg

SEQ ID NO: 1099860 - DNA, 25 bp, Homo sapien
cagtgggtgcagtgcgtcccgtcct

SEQ ID NO: 1099861 - DNA, 25 bp, Homo sapien
caatggaaataaggggggccaacat

SEQ ID NO: 1099862 - DNA, 25 bp, Homo sapien
catcctaaggatgaagaatggcctc

SEQ ID NO: 1099863 - DNA, 25 bp, Homo sapien
aatgcactgctcgtcaactggttag

SEQ ID NO: 1099864 - DNA, 25 bp, Homo sapien
taaggagacaaatacccacgcagca

SEQ ID NO: 1099865 - DNA, 25 bp, Homo sapien
tgagattgatctaagcccgcaggtc

SEQ ID NO: 1099866 - DNA, 25 bp, Homo sapien
gggacaatgtcgcaaaacaaggcag

SEQ ID NO: 1099867 - DNA, 25 bp, Homo sapien
atgggacaatgtcgcaaaacaaggc

SEQ ID NO: 1099868 - DNA, 25 bp, Homo sapien
tgaatgggacaatgtcgcaaaacaa

SEQ ID NO: 1099869 - DNA, 25 bp, Homo sapien
gacaatgtcgcaaaacaaggcagaa

SEQ ID NO: 1099870 - DNA, 25 bp, Homo sapien
tgcagagcacgtaccagtgctttgc

SEQ ID NO: 1099871 - DNA, 25 bp, Homo sapien
tgtcagtaaccctgctctcagattc

SEQ ID NO: 1099872 - DNA, 25 bp, Homo sapien
tccgcactgcagagcacgtaccagt

SEQ ID NO: 1099873 - DNA, 25 bp, Homo sapien
ccttcaataagcgtcaaggcatctc

SEQ ID NO: 1099874 - DNA, 25 bp, Homo sapien
gaaatacgatcagggaggaggaaat

SEQ ID NO: 1099875 - DNA, 25 bp, Homo sapien
atttttgaagccattccaggggcca

SEQ ID NO: 1099876 - DNA, 25 bp, Homo sapien
aagcagttgaaatacgatcagggag

SEQ ID NO: 1099877 - DNA, 25 bp, Homo sapien
cagttgaaatacgatcagggaggag

SEQ ID NO: 1099878 - DNA, 25 bp, Homo sapien
agagacacagtgatccttactaccc

SEQ ID NO: 1099879 - DNA, 25 bp, Homo sapien
gacacagtgatccttactacccaca

SEQ ID NO: 1099880 - DNA, 25 bp, Homo sapien
gagacacagtgatccttactaccca

SEQ ID NO: 1099881 - DNA, 25 bp, Homo sapien
ggagagacacagtgatccttactac

SEQ ID NO: 1099882 - DNA, 25 bp, Homo sapien
cacatcaacgctggaaggcggggaa

SEQ ID NO: 1099883 - DNA, 25 bp, Homo sapien
ccacatcaacgctggaaggcgggga

SEQ ID NO: 1099884 - DNA, 25 bp, Homo sapien
acatcaacgctggaaggcggggaag

SEQ ID NO: 1099885 - DNA, 25 bp, Homo sapien
ctggggcacacacactgcggcatct

SEQ ID NO: 1099886 - DNA, 25 bp, Homo sapien
cactggaagcctggccactgtgtag

SEQ ID NO: 1099887 - DNA, 25 bp, Homo sapien
tcactccctatgaggcagagcccag

SEQ ID NO: 1099888 - DNA, 25 bp, Homo sapien
taggcctggggcacatcgctgaaca

SEQ ID NO: 1099889 - DNA, 25 bp, Homo sapien
acatcgctgaacaggaaactgcttc

SEQ ID NO: 1099890 - DNA, 25 bp, Homo sapien
gctggcaacactgaatgctggcact

SEQ ID NO: 1099891 - DNA, 25 bp, Homo sapien
ggccggtggcggtgaggctggcaac

SEQ ID NO: 1099892 - DNA, 25 bp, Homo sapien
cggtggcggtgaggctggcaacact

SEQ ID NO: 1099893 - DNA, 25 bp, Homo sapien
gtggcggtgaggctggcaacactga

SEQ ID NO: 1099894 - DNA, 25 bp, Homo sapien
gaacccgaattccttctcgcaccat

SEQ ID NO: 1099895 - DNA, 25 bp, Homo sapien
gcattctctgaccatgttccaggaa

SEQ ID NO: 1099896 - DNA, 25 bp, Homo sapien
ggaacccgaattccttctcgcacca

SEQ ID NO: 1099897 - DNA, 25 bp, Homo sapien
tggccctgggacttggcgtccacgg

SEQ ID NO: 1099898 - DNA, 25 bp, Homo sapien
acacacagctcctttaaaaacctgg

SEQ ID NO: 1099899 - DNA, 25 bp, Homo sapien
ctggccctgggacttggcgtccacg

SEQ ID NO: 1099900 - DNA, 25 bp, Homo sapien
cagctcctttaaaaacctggccctg

SEQ ID NO: 1099901 - DNA, 25 bp, Homo sapien
aagcaccaggaggtagcaactctgt

SEQ ID NO: 1099902 - DNA, 25 bp, Homo sapien
gatccatcattcgagttggggagga

SEQ ID NO: 1099903 - DNA, 25 bp, Homo sapien
gtatgaatagggagaatcttccaaa

SEQ ID NO: 1099904 - DNA, 25 bp, Homo sapien
ccaggaggtagcaactctgtggcct

SEQ ID NO: 1099905 - DNA, 25 bp, Homo sapien
ggccagggtgaacctcaggattccc

SEQ ID NO: 1099906 - DNA, 25 bp, Homo sapien
aaaacgcttccagtgctacagccca

SEQ ID NO: 1099907 - DNA, 25 bp, Homo sapien
cagcagggccaaaacgcttccagtg

SEQ ID NO: 1099908 - DNA, 25 bp, Homo sapien
aagcaacgaactgaaagggagccaa

SEQ ID NO: 1099909 - DNA, 25 bp, Homo sapien
catgcgggacccctggacggttcgg

SEQ ID NO: 1099910 - DNA, 25 bp, Homo sapien
gaataagagtcttgatagagaaatc

SEQ ID NO: 1099911 - DNA, 25 bp, Homo sapien
agcaagcaggcatgcgggacccctg

SEQ ID NO: 1099912 - DNA, 25 bp, Homo sapien
ccttgctggggactaggagcaagca

SEQ ID NO: 1099913 - DNA, 25 bp, Homo sapien
gaacacctgttgtgggtagcttgaa

SEQ ID NO: 1099914 - DNA, 25 bp, Homo sapien
caggttgtactgtctagcatcaatc

SEQ ID NO: 1099915 - DNA, 25 bp, Homo sapien
aactagtcagcatagctgtgatgga

SEQ ID NO: 1099916 - DNA, 25 bp, Homo sapien
gcatcaatcttcctttccattaggg

SEQ ID NO: 1099917 - DNA, 25 bp, Homo sapien
gccacatttggtttcgtcatcaaga

SEQ ID NO: 1099918 - DNA, 25 bp, Homo sapien
cacatttggtttcgtcatcaagaag

SEQ ID NO: 1099919 - DNA, 25 bp, Homo sapien
aaagccacatttggtttcgtcatca

SEQ ID NO: 1099920 - DNA, 25 bp, Homo sapien
atttggtttcgtcatcaagaagtgc

SEQ ID NO: 1099921 - DNA, 25 bp, Homo sapien
tgccagagttttcgccaagactgag

SEQ ID NO: 1099922 - DNA, 25 bp, Homo sapien
cctgtaatagtttcacgggagcatg

SEQ ID NO: 1099923 - DNA, 25 bp, Homo sapien
actgagattggaaggaggtgcccct

SEQ ID NO: 1099924 - DNA, 25 bp, Homo sapien
cctgtggctacagcttcctgtaata

SEQ ID NO: 1099925 - DNA, 25 bp, Homo sapien
tctctaatgagaggtaatgaaggag

SEQ ID NO: 1099926 - DNA, 25 bp, Homo sapien
tgtggtccaattgcttctctaatga

SEQ ID NO: 1099927 - DNA, 25 bp, Homo sapien
ggaagtcagccatctggactgcagg

SEQ ID NO: 1099928 - DNA, 25 bp, Homo sapien
aagtggggaagtcagccatctggac

SEQ ID NO: 1099929 - DNA, 25 bp, Homo sapien
gtcaggccttatgctaggtccttta

SEQ ID NO: 1099930 - DNA, 25 bp, Homo sapien
gggaccagcccttcataaaactatc

SEQ ID NO: 1099931 - DNA, 25 bp, Homo sapien
tataccatctcctgttccatttact

SEQ ID NO: 1099932 - DNA, 25 bp, Homo sapien
tcctttatatgggtgtattagtcca

SEQ ID NO: 1099933 - DNA, 25 bp, Homo sapien
ataataaaaatcaaagcagggccgg

SEQ ID NO: 1099934 - DNA, 25 bp, Homo sapien
gaaataataaaaatcaaagcagggc

SEQ ID NO: 1099935 - DNA, 25 bp, Homo sapien
ataaaaatcaaagcagggccgggca

SEQ ID NO: 1099936 - DNA, 25 bp, Homo sapien
aagaaataataaaaatcaaagcagg

SEQ ID NO: 1099937 - DNA, 25 bp, Homo sapien
aatcaacacaacaacattttggggt

SEQ ID NO: 1099938 - DNA, 25 bp, Homo sapien
taatagagaaggggtattgctttgc

SEQ ID NO: 1099939 - DNA, 25 bp, Homo sapien
tgatagtggacgcagaaaattcaaa

SEQ ID NO: 1099940 - DNA, 25 bp, Homo sapien
tagtggacgcagaaaattcaaaaga

SEQ ID NO: 1099941 - DNA, 25 bp, Homo sapien
tcagtcccaggctgtccgggtcgca

SEQ ID NO: 1099942 - DNA, 25 bp, Homo sapien
gggtcggactccgagaacagcgcac

SEQ ID NO: 1099943 - DNA, 25 bp, Homo sapien
ctggatgccgcgagcgcgatccctt

SEQ ID NO: 1099944 - DNA, 25 bp, Homo sapien
ccgggtcgcaccagtgggcgtgagt

SEQ ID NO: 1099945 - DNA, 25 bp, Homo sapien
gccgcctcgtcccggccgctggcgc

SEQ ID NO: 1099946 - DNA, 25 bp, Homo sapien
gctggcgctcgcaggacgccgggga

SEQ ID NO: 1099947 - DNA, 25 bp, Homo sapien
ccggggacgtctgcaaagctctttg

SEQ ID NO: 1099948 - DNA, 25 bp, Homo sapien
gacgccggggacgtctgcaaagctc

SEQ ID NO: 1099949 - DNA, 25 bp, Homo sapien
cagaacatccacgggctcttcccgg

SEQ ID NO: 1099950 - DNA, 25 bp, Homo sapien
agaacatccacgggctcttcccggg

SEQ ID NO: 1099951 - DNA, 25 bp, Homo sapien
agccccgcgtgcggccagcagcagc

SEQ ID NO: 1099952 - DNA, 25 bp, Homo sapien
ttgggcagcagccccgcgtgcggcc

SEQ ID NO: 1099953 - DNA, 25 bp, Homo sapien
aggagcggcgggcgcgtcccgcggc

SEQ ID NO: 1099954 - DNA, 25 bp, Homo sapien
agcgccaggagcggcgggcgcgtcc

SEQ ID NO: 1099955 - DNA, 25 bp, Homo sapien
ctgcacagaagtgccccgatcaccc

SEQ ID NO: 1099956 - DNA, 25 bp, Homo sapien
gcacagaagtgccccgatcaccccc

SEQ ID NO: 1099957 - DNA, 25 bp, Homo sapien
caggaccctcaaacccctccacgct

SEQ ID NO: 1099958 - DNA, 25 bp, Homo sapien
acagaagtgccccgatcacccccag

SEQ ID NO: 1099959 - DNA, 25 bp, Homo sapien
gggcaggatagacttgcctgaacac

SEQ ID NO: 1099960 - DNA, 25 bp, Homo sapien
cttccgggccggctcgcaacttggg

SEQ ID NO: 1099961 - DNA, 25 bp, Homo sapien
atagacttgcctgaacaccggctgg

SEQ ID NO: 1099962 - DNA, 25 bp, Homo sapien
caggatagacttgcctgaacaccgg

SEQ ID NO: 1099963 - DNA, 25 bp, Homo sapien
agggcttttgtttgcgtcgatccgc

SEQ ID NO: 1099964 - DNA, 25 bp, Homo sapien
tttgtttgcgtcgatccgcgagccg

SEQ ID NO: 1099965 - DNA, 25 bp, Homo sapien
aggacagggcttttgtttgcgtcga

SEQ ID NO: 1099966 - DNA, 25 bp, Homo sapien
gtttgcgtcgatccgcgagccgcct

SEQ ID NO: 1099967 - DNA, 25 bp, Homo sapien
cagcttcccgcagcgaactaagacg

SEQ ID NO: 1099968 - DNA, 25 bp, Homo sapien
ggcttgcggtgaagtctttctctaa

SEQ ID NO: 1099969 - DNA, 25 bp, Homo sapien
aagacgctccggcttgcggtgaagt

SEQ ID NO: 1099970 - DNA, 25 bp, Homo sapien
gtgtaccggctcagacgcagcaagg

SEQ ID NO: 1099971 - DNA, 25 bp, Homo sapien
caaagaatgaatcggttgtctccac

SEQ ID NO: 1099972 - DNA, 25 bp, Homo sapien
cctccaaagaatgaatcggttgtct

SEQ ID NO: 1099973 - DNA, 25 bp, Homo sapien
gaatgaatcggttgtctccacaggc

SEQ ID NO: 1099974 - DNA, 25 bp, Homo sapien
cctccaacctccaaagaatgaatcg

SEQ ID NO: 1099975 - DNA, 25 bp, Homo sapien
caaccttttcatctgaggatgttgt

SEQ ID NO: 1099976 - DNA, 25 bp, Homo sapien
ggatgttgtagccttctgctgcctt

SEQ ID NO: 1099977 - DNA, 25 bp, Homo sapien
atacaaccttttcatctgaggatgt

SEQ ID NO: 1099978 - DNA, 25 bp, Homo sapien
tcatctgaggatgttgtagccttct

SEQ ID NO: 1099979 - DNA, 25 bp, Homo sapien
gataccgcatatctaagaagattga

SEQ ID NO: 1099980 - DNA, 25 bp, Homo sapien
gatgggctgatgatccgcaagccaa

SEQ ID NO: 1099981 - DNA, 25 bp, Homo sapien
gatccgcaagccaatgactgtccat

SEQ ID NO: 1099982 - DNA, 25 bp, Homo sapien
aaagggtacaaccaatgcccggatg

SEQ ID NO: 1099983 - DNA, 25 bp, Homo sapien
gatggctcggctctgatcacaggca

SEQ ID NO: 1099984 - DNA, 25 bp, Homo sapien
agtgaccgctgaagcaaccaccact

SEQ ID NO: 1099985 - DNA, 25 bp, Homo sapien
tgccagctacacaggtatatacctg

SEQ ID NO: 1099986 - DNA, 25 bp, Homo sapien
gccagtcatcaccaagtgaccgctg

SEQ ID NO: 1099987 - DNA, 25 bp, Homo sapien
agaattgtttaaacccaggagacag

SEQ ID NO: 1099988 - DNA, 25 bp, Homo sapien
gaattgtttaaacccaggagacaga

SEQ ID NO: 1099989 - DNA, 25 bp, Homo sapien
attgtttaaacccaggagacagaag

SEQ ID NO: 1099990 - DNA, 25 bp, Homo sapien
ttgcagtaagccgagatcatgccac

SEQ ID NO: 1099991 - DNA, 25 bp, Homo sapien
ccacctcttgagttctattctgaca

SEQ ID NO: 1099992 - DNA, 25 bp, Homo sapien
tcagtagggtttgatcccaaagctt

SEQ ID NO: 1099993 - DNA, 25 bp, Homo sapien
taactcactagatcgggcagggctc

SEQ ID NO: 1099994 - DNA, 25 bp, Homo sapien
cacctagtgtccaaggatgctccgt

SEQ ID NO: 1099995 - DNA, 25 bp, Homo sapien
tatttgcttgtaggttgctagaggt

SEQ ID NO: 1099996 - DNA, 25 bp, Homo sapien
tgctagaggtgattaaatgtctaac

SEQ ID NO: 1099997 - DNA, 25 bp, Homo sapien
gtatgttactattactgatatgccc

SEQ ID NO: 1099998 - DNA, 25 bp, Homo sapien
tgccctatgatggtaacataatgct

SEQ ID NO: 1099999 - DNA, 25 bp, Homo sapien
gatcaataattcctccctcacagtg

SEQ ID NO: 1100000 - DNA, 25 bp, Homo sapien
tggtgggaagcacctaacagcactc

SEQ ID NO: 1100001 - DNA, 25 bp, Homo sapien
tactgcctgtttcataggtagcact

SEQ ID NO: 1100002 - DNA, 25 bp, Homo sapien
tgctcaatgccttaccagctctgtg

SEQ ID NO: 1100003 - DNA, 25 bp, Homo sapien
catatgcgaggtatctaagttgcgt

SEQ ID NO: 1100004 - DNA, 25 bp, Homo sapien
caccccatcggtggaagaactatct

SEQ ID NO: 1100005 - DNA, 25 bp, Homo sapien
caaatcaagaaaggagtatgtgcaa

SEQ ID NO: 1100006 - DNA, 25 bp, Homo sapien
taaggagttgctccagtctgagatt

SEQ ID NO: 1100007 - DNA, 25 bp, Homo sapien
tatggtggtcaaacttgaatcttcc

SEQ ID NO: 1100008 - DNA, 25 bp, Homo sapien
gagcatgctaatgatactgtactga

SEQ ID NO: 1100009 - DNA, 25 bp, Homo sapien
aactgccctgctggaaatatgaacc

SEQ ID NO: 1100010 - DNA, 25 bp, Homo sapien
tcttctgccaaagagcaaacagtgc

SEQ ID NO: 1100011 - DNA, 25 bp, Homo sapien
taaacagcacctgtaggcaaaggtt

SEQ ID NO: 1100012 - DNA, 25 bp, Homo sapien
tcacaaactatgcacccagcaaagg

SEQ ID NO: 1100013 - DNA, 25 bp, Homo sapien
gtattgattacctcagaaccccacc

SEQ ID NO: 1100014 - DNA, 25 bp, Homo sapien
catgcagccagcaaccattatgaaa

SEQ ID NO: 1100015 - DNA, 25 bp, Homo sapien
tctaggaaaacctggaacttggctg

SEQ ID NO: 1100016 - DNA, 25 bp, Homo sapien
ccctgcagtgagtagggcaccagct

SEQ ID NO: 1100017 - DNA, 25 bp, Homo sapien
tggagaacacaagcaattggaaacc

SEQ ID NO: 1100018 - DNA, 25 bp, Homo sapien
tgggagcctgaagctaatgagaaaa

SEQ ID NO: 1100019 - DNA, 25 bp, Homo sapien
ttgtttcaagcatcaactaggtggc

SEQ ID NO: 1100020 - DNA, 25 bp, Homo sapien
gataagaatgcaacgactcacagct

SEQ ID NO: 1100021 - DNA, 25 bp, Homo sapien
gataagaacaacctcctggcagact

SEQ ID NO: 1100022 - DNA, 25 bp, Homo sapien
gaaccatgaggttttccaatgccaa

SEQ ID NO: 1100023 - DNA, 25 bp, Homo sapien
tagtaagctccatcaatttaacatt

SEQ ID NO: 1100024 - DNA, 25 bp, Homo sapien
gatctagtaagctccatcaatttaa

SEQ ID NO: 1100025 - DNA, 25 bp, Homo sapien
tgtcagatctagtaagctccatcaa

SEQ ID NO: 1100026 - DNA, 25 bp, Homo sapien
tttctctgtcagatctagtaagctc

SEQ ID NO: 1100027 - DNA, 25 bp, Homo sapien
tctaagtgcctcagacaaaggagtc

SEQ ID NO: 1100028 - DNA, 25 bp, Homo sapien
gctctaagtgcctcagacaaaggag

SEQ ID NO: 1100029 - DNA, 25 bp, Homo sapien
ctaagtgcctcagacaaaggagtcc

SEQ ID NO: 1100030 - DNA, 25 bp, Homo sapien
cagctctaagtgcctcagacaaagg

SEQ ID NO: 1100031 - DNA, 25 bp, Homo sapien
taggcaaccgctcacacctgcaagt

SEQ ID NO: 1100032 - DNA, 25 bp, Homo sapien
caatcctgaaatgacattcctaggc

SEQ ID NO: 1100033 - DNA, 25 bp, Homo sapien
gcaagtcttcccatgaggtgcattt

SEQ ID NO: 1100034 - DNA, 25 bp, Homo sapien
tgaaatgacattcctaggcaaccgc

SEQ ID NO: 1100035 - DNA, 25 bp, Homo sapien
ggtagactgtgtccaccactctaga

SEQ ID NO: 1100036 - DNA, 25 bp, Homo sapien
tcccctcgaagaaacacagtggtag

SEQ ID NO: 1100037 - DNA, 25 bp, Homo sapien
ccactctagagacagggaaaccgca

SEQ ID NO: 1100038 - DNA, 25 bp, Homo sapien
cctctgcggctgacaccatagaaat

SEQ ID NO: 1100039 - DNA, 25 bp, Homo sapien
tgggatgagaccagcaaggatctac

SEQ ID NO: 1100040 - DNA, 25 bp, Homo sapien
ttttgtccataaggcagagatggcc

SEQ ID NO: 1100041 - DNA, 25 bp, Homo sapien
ggaacccggtaccatgctttgcaga

SEQ ID NO: 1100042 - DNA, 25 bp, Homo sapien
taagcatctattatggtgcccgaca

SEQ ID NO: 1100043 - DNA, 25 bp, Homo sapien
gagactgaggcgaataaacaactgc

SEQ ID NO: 1100044 - DNA, 25 bp, Homo sapien
cctgagaaaacgtgtgcagacttca

SEQ ID NO: 1100045 - DNA, 25 bp, Homo sapien
aagaggtcccgtcccttgagactag

SEQ ID NO: 1100046 - DNA, 25 bp, Homo sapien
aaaacttcacgcacttgaaaggcag

SEQ ID NO: 1100047 - DNA, 25 bp, Homo sapien
aaagcctgacacctacagcttgaga

SEQ ID NO: 1100048 - DNA, 25 bp, Homo sapien
tgacccaggatcacatcttaattcg

SEQ ID NO: 1100049 - DNA, 25 bp, Homo sapien
cactgtcattttcacggccaaagcc

SEQ ID NO: 1100050 - DNA, 25 bp, Homo sapien
tcagcatatctcttgtacaggtcca

SEQ ID NO: 1100051 - DNA, 25 bp, Homo sapien
gaggcctgctgattaccggcatgag

SEQ ID NO: 1100052 - DNA, 25 bp, Homo sapien
cggcatgagctgaaatactggggac

SEQ ID NO: 1100053 - DNA, 25 bp, Homo sapien
ccggcatgagctgaaatactgggga

SEQ ID NO: 1100054 - DNA, 25 bp, Homo sapien
gcatgagctgaaatactggggacag

SEQ ID NO: 1100055 - DNA, 25 bp, Homo sapien
acatctccattttcctggacagtca

SEQ ID NO: 1100056 - DNA, 25 bp, Homo sapien
ttcctggacagtcactcttgatttc

SEQ ID NO: 1100057 - DNA, 25 bp, Homo sapien
atctgccacatctccattttcctgg

SEQ ID NO: 1100058 - DNA, 25 bp, Homo sapien
cacagtcatttcctgtggccagggc

SEQ ID NO: 1100059 - DNA, 25 bp, Homo sapien
gtctccccagagctggctttctcat

SEQ ID NO: 1100060 - DNA, 25 bp, Homo sapien
gaacaacagttgtctccccagagct

SEQ ID NO: 1100061 - DNA, 25 bp, Homo sapien
ttggaacaacagttgtctccccaga

SEQ ID NO: 1100062 - DNA, 25 bp, Homo sapien
acaacagttgtctccccagagctgg

SEQ ID NO: 1100063 - DNA, 25 bp, Homo sapien
ctgagagccactgctaatttcttag

SEQ ID NO: 1100064 - DNA, 25 bp, Homo sapien
cactgctaatttcttagccggatgg

SEQ ID NO: 1100065 - DNA, 25 bp, Homo sapien
tttcttagccggatggtcactaaca

SEQ ID NO: 1100066 - DNA, 25 bp, Homo sapien
ggaagctggcagttgttttcattat

SEQ ID NO: 1100067 - DNA, 25 bp, Homo sapien
caatgctctgaagacgagtgattct

SEQ ID NO: 1100068 - DNA, 25 bp, Homo sapien
tctgaagacgagtgattcttccacc

SEQ ID NO: 1100069 - DNA, 25 bp, Homo sapien
cataccgcaatgctctgaagacgag

SEQ ID NO: 1100070 - DNA, 25 bp, Homo sapien
aagacgagtgattcttccacccacc

SEQ ID NO: 1100071 - DNA, 25 bp, Homo sapien
gttttggtgacttccatgaggacaa

SEQ ID NO: 1100072 - DNA, 25 bp, Homo sapien
agagcagcctcacggttcaaaacca

SEQ ID NO: 1100073 - DNA, 25 bp, Homo sapien
tcaaaaccacgcagttgccagcatg

SEQ ID NO: 1100074 - DNA, 25 bp, Homo sapien
gccatttgacaaacggttttggtga

SEQ ID NO: 1100075 - DNA, 25 bp, Homo sapien
gagcttgcgattgccaagtgcttca

SEQ ID NO: 1100076 - DNA, 25 bp, Homo sapien
cgattgccaagtgcttcaagatcaa

SEQ ID NO: 1100077 - DNA, 25 bp, Homo sapien
tatggagcttgcgattgccaagtgc

SEQ ID NO: 1100078 - DNA, 25 bp, Homo sapien
gattcttatggagcttgcgattgcc

SEQ ID NO: 1100079 - DNA, 25 bp, Homo sapien
tttcattgaacagcaatccgatcag

SEQ ID NO: 1100080 - DNA, 25 bp, Homo sapien
cattgaacagcaatccgatcagtat

SEQ ID NO: 1100081 - DNA, 25 bp, Homo sapien
gattaatatcatgggcttcacggag

SEQ ID NO: 1100082 - DNA, 25 bp, Homo sapien
atgtgattaatatcatgggcttcac

SEQ ID NO: 1100083 - DNA, 25 bp, Homo sapien
tagagaacaatccagacaacgccag

SEQ ID NO: 1100084 - DNA, 25 bp, Homo sapien
tatatctaatccagaggccatatcc

SEQ ID NO: 1100085 - DNA, 25 bp, Homo sapien
tagaatacctgtcatgcacacaacc

SEQ ID NO: 1100086 - DNA, 25 bp, Homo sapien
gacagccgggctccatttatttact

SEQ ID NO: 1100087 - DNA, 25 bp, Homo sapien
gctgagaccaattgctctaacctgg

SEQ ID NO: 1100088 - DNA, 25 bp, Homo sapien
tcccttgggcttcactcaaggattg

SEQ ID NO: 1100089 - DNA, 25 bp, Homo sapien
ttgctacagaggagcaaccattccc

SEQ ID NO: 1100090 - DNA, 25 bp, Homo sapien
gctgaggtttagccttcccttgggc

SEQ ID NO: 1100091 - DNA, 25 bp, Homo sapien
gtgagggaccagtggagctgggttc

SEQ ID NO: 1100092 - DNA, 25 bp, Homo sapien
accacactggtgagggaccagtgga

SEQ ID NO: 1100093 - DNA, 25 bp, Homo sapien
ggtatctgctctgctaatgccagca

SEQ ID NO: 1100094 - DNA, 25 bp, Homo sapien
ccggtatctgctctgctaatgccag

SEQ ID NO: 1100095 - DNA, 25 bp, Homo sapien
tacttagtactttgcatcttagaag

SEQ ID NO: 1100096 - DNA, 25 bp, Homo sapien
caaagtcaaggttctctctgcaaat

SEQ ID NO: 1100097 - DNA, 25 bp, Homo sapien
atcacaagtgaaaattaggaatgcc

SEQ ID NO: 1100098 - DNA, 25 bp, Homo sapien
gcggggagcagttaaccacatggct

SEQ ID NO: 1100099 - DNA, 25 bp, Homo sapien
atatgaaatcctaaagggtggagga

SEQ ID NO: 1100100 - DNA, 25 bp, Homo sapien
tggaggataggcttcattggtatca

SEQ ID NO: 1100101 - DNA, 25 bp, Homo sapien
taggcttcattggtatcaggtatca

SEQ ID NO: 1100102 - DNA, 25 bp, Homo sapien
tgaaatcctaaagggtggaggatag

SEQ ID NO: 1100103 - DNA, 25 bp, Homo sapien
aattgaattcggacctgatttcgtc

SEQ ID NO: 1100104 - DNA, 25 bp, Homo sapien
tgatttcgtctattttagcctttcc

SEQ ID NO: 1100105 - DNA, 25 bp, Homo sapien
ctgatgaaattgaattcggacctga

SEQ ID NO: 1100106 - DNA, 25 bp, Homo sapien
cggacctgatttcgtctattttagc

SEQ ID NO: 1100107 - DNA, 25 bp, Homo sapien
tggaaactgcggtgattctaacaga

SEQ ID NO: 1100108 - DNA, 25 bp, Homo sapien
actttaatctgtggacttgcctcga

SEQ ID NO: 1100109 - DNA, 25 bp, Homo sapien
tccagaggctatcaggacattccct

SEQ ID NO: 1100110 - DNA, 25 bp, Homo sapien
gcctcgaattctgtcttgcgcaaga

SEQ ID NO: 1100111 - DNA, 25 bp, Homo sapien
cacaaaaaccctgctactaaaacag

SEQ ID NO: 1100112 - DNA, 25 bp, Homo sapien
gcccttgcattcacctgtggtgctt

SEQ ID NO: 1100113 - DNA, 25 bp, Homo sapien
gaggctgaaagctcctgccctgtat

SEQ ID NO: 1100114 - DNA, 25 bp, Homo sapien
cgtcctcactggtcattatatgtga

SEQ ID NO: 1100115 - DNA, 25 bp, Homo sapien
aatagtttaactcttgcagggaatc

SEQ ID NO: 1100116 - DNA, 25 bp, Homo sapien
caaaatagtttaactcttgcaggga

SEQ ID NO: 1100117 - DNA, 25 bp, Homo sapien
ttaactcttgcagggaatctctcat

SEQ ID NO: 1100118 - DNA, 25 bp, Homo sapien
ggtgtatagctttgatgaaatttca

SEQ ID NO: 1100119 - DNA, 25 bp, Homo sapien
ttctacttcagccaatccccaaaga

SEQ ID NO: 1100120 - DNA, 25 bp, Homo sapien
cttctacttcagccaatccccaaag

SEQ ID NO: 1100121 - DNA, 25 bp, Homo sapien
ccttctacttcagccaatccccaaa

SEQ ID NO: 1100122 - DNA, 25 bp, Homo sapien
tctacttcagccaatccccaaagag

SEQ ID NO: 1100123 - DNA, 25 bp, Homo sapien
tgagccatggtcattcttttgctaa

SEQ ID NO: 1100124 - DNA, 25 bp, Homo sapien
gtgagccatggtcattcttttgcta

SEQ ID NO: 1100125 - DNA, 25 bp, Homo sapien
cagccatagacttccttaacagaca

SEQ ID NO: 1100126 - DNA, 25 bp, Homo sapien
gaggatgtcaagtccagatgccagg

SEQ ID NO: 1100127 - DNA, 25 bp, Homo sapien
tctattacccacttctattggccct

SEQ ID NO: 1100128 - DNA, 25 bp, Homo sapien
ccagacctgaagcagaggatgtcaa

SEQ ID NO: 1100129 - DNA, 25 bp, Homo sapien
cggctgtctaactgtgcccagcaaa

SEQ ID NO: 1100130 - DNA, 25 bp, Homo sapien
gtgaatcctagctccttagctcatg

SEQ ID NO: 1100131 - DNA, 25 bp, Homo sapien
atgttgattcgggtagcaagccggc

SEQ ID NO: 1100132 - DNA, 25 bp, Homo sapien
cctagctccttagctcatgttgatt

SEQ ID NO: 1100133 - DNA, 25 bp, Homo sapien
caagtgtctggacttattgaaggac

SEQ ID NO: 1100134 - DNA, 25 bp, Homo sapien
gcaagtgtctggacttattgaagga

SEQ ID NO: 1100135 - DNA, 25 bp, Homo sapien
aagtgtctggacttattgaaggaca

SEQ ID NO: 1100136 - DNA, 25 bp, Homo sapien
ctgtgacatcaaaagcggatagtga

SEQ ID NO: 1100137 - DNA, 25 bp, Homo sapien
tgctaagggattagagaggccttct

SEQ ID NO: 1100138 - DNA, 25 bp, Homo sapien
ggtaaatttactgtcctgccctgga

SEQ ID NO: 1100139 - DNA, 25 bp, Homo sapien
gatgacccagtgtgatacatgctgt

SEQ ID NO: 1100140 - DNA, 25 bp, Homo sapien
gatgatgtctcatgagtcccttcag

SEQ ID NO: 1100141 - DNA, 25 bp, Homo sapien
taatataacagcaattccaagcatg

SEQ ID NO: 1100142 - DNA, 25 bp, Homo sapien
caagcatgctcgtgcttcgacgaag

SEQ ID NO: 1100143 - DNA, 25 bp, Homo sapien
tctcccttgacggtcttgaccacag

SEQ ID NO: 1100144 - DNA, 25 bp, Homo sapien
aaacagatgcagaagtatgcacagg

SEQ ID NO: 1100145 - DNA, 25 bp, Homo sapien
ataaacagatgcagaagtatgcaca

SEQ ID NO: 1100146 - DNA, 25 bp, Homo sapien
taaacagatgcagaagtatgcacag

SEQ ID NO: 1100147 - DNA, 25 bp, Homo sapien
tgggggctaacaaggagaaggagag

SEQ ID NO: 1100148 - DNA, 25 bp, Homo sapien
ctgcctcagaagcgtgggcaccact

SEQ ID NO: 1100149 - DNA, 25 bp, Homo sapien
ctccctgcctcagaagcgtgggcac

SEQ ID NO: 1100150 - DNA, 25 bp, Homo sapien
cctcagaagcgtgggcaccactggc

SEQ ID NO: 1100151 - DNA, 25 bp, Homo sapien
gcaccgcttcgtgtgtgttcagcaa

SEQ ID NO: 1100152 - DNA, 25 bp, Homo sapien
ggacactgtggcaccgcttcgtgtg

SEQ ID NO: 1100153 - DNA, 25 bp, Homo sapien
tatacttccgggcatgaaaaagaaa

SEQ ID NO: 1100154 - DNA, 25 bp, Homo sapien
gaaaggtttccgcataactgcttaa

SEQ ID NO: 1100155 - DNA, 25 bp, Homo sapien
cagaaccctgaaaaggtgtggaaag

SEQ ID NO: 1100156 - DNA, 25 bp, Homo sapien
ggtgtggaaagtccagcctgaagtt

SEQ ID NO: 1100157 - DNA, 25 bp, Homo sapien
catcacttctagaggggtcccgctt

SEQ ID NO: 1100158 - DNA, 25 bp, Homo sapien
tgaagtttctcagccatcacttcta

SEQ ID NO: 1100159 - DNA, 25 bp, Homo sapien
ctttcgatccgtgattctctttctt

SEQ ID NO: 1100160 - DNA, 25 bp, Homo sapien
ccctttcgatccgtgattctctttc

SEQ ID NO: 1100161 - DNA, 25 bp, Homo sapien
tgccctttcgatccgtgattctctt

SEQ ID NO: 1100162 - DNA, 25 bp, Homo sapien
ctgccctttcgatccgtgattctct

SEQ ID NO: 1100163 - DNA, 25 bp, Homo sapien
catgaggaaggtacacgggaacagg

SEQ ID NO: 1100164 - DNA, 25 bp, Homo sapien
gtagtccttggtctctcttaaggag

SEQ ID NO: 1100165 - DNA, 25 bp, Homo sapien
gaacaggtagtccttggtctctctt

SEQ ID NO: 1100166 - DNA, 25 bp, Homo sapien
cacgggaacaggtagtccttggtct

SEQ ID NO: 1100167 - DNA, 25 bp, Homo sapien
aagataatttcaattcgcaagctca

SEQ ID NO: 1100168 - DNA, 25 bp, Homo sapien
tttcaattcgcaagctcattaagtg

SEQ ID NO: 1100169 - DNA, 25 bp, Homo sapien
caagctcattaagtgattgtgctga

SEQ ID NO: 1100170 - DNA, 25 bp, Homo sapien
gattctggggagttttgttctcaac

SEQ ID NO: 1100171 - DNA, 25 bp, Homo sapien
tgttccatgatgaggtaggcactaa

SEQ ID NO: 1100172 - DNA, 25 bp, Homo sapien
ggtaggcactaattcagcactgact

SEQ ID NO: 1100173 - DNA, 25 bp, Homo sapien
tgagttcacttgagatgttccatga

SEQ ID NO: 1100174 - DNA, 25 bp, Homo sapien
ctttgttgagttcacttgagatgtt

SEQ ID NO: 1100175 - DNA, 25 bp, Homo sapien
gaataagttcacaaaaaagcaccca

SEQ ID NO: 1100176 - DNA, 25 bp, Homo sapien
aagtgcctagtaaagtataaccagc

SEQ ID NO: 1100177 - DNA, 25 bp, Homo sapien
tgttggcaccataaggaacttgcag

SEQ ID NO: 1100178 - DNA, 25 bp, Homo sapien
tggcacagagcaggtactaagttaa

SEQ ID NO: 1100179 - DNA, 25 bp, Homo sapien
gatgatgccaagcatcctcgtacct

SEQ ID NO: 1100180 - DNA, 25 bp, Homo sapien
cttctagagaaagatgatgccaagc

SEQ ID NO: 1100181 - DNA, 25 bp, Homo sapien
aagcatcctcgtacctccagaaagc

SEQ ID NO: 1100182 - DNA, 25 bp, Homo sapien
cagaaagccatccatactctctgga

SEQ ID NO: 1100183 - DNA, 25 bp, Homo sapien
ggcattaaagcccaccaagagatgg

SEQ ID NO: 1100184 - DNA, 25 bp, Homo sapien
tcaaatcctttagcccaaatgagcc

SEQ ID NO: 1100185 - DNA, 25 bp, Homo sapien
tatctgttctattgcaaagggtggt

SEQ ID NO: 1100186 - DNA, 25 bp, Homo sapien
tattttactgcttctccacgtgagg

SEQ ID NO: 1100187 - DNA, 25 bp, Homo sapien
tgccagtgactggactcatgtaaca

SEQ ID NO: 1100188 - DNA, 25 bp, Homo sapien
gacccatcaatagtagctttcagcg

SEQ ID NO: 1100189 - DNA, 25 bp, Homo sapien
gatagacaggtaactggttaatgcc

SEQ ID NO: 1100190 - DNA, 25 bp, Homo sapien
cagaacactgggacctgagtgtggc

SEQ ID NO: 1100191 - DNA, 25 bp, Homo sapien
cctcttgtgactgagtatggtagaa

SEQ ID NO: 1100192 - DNA, 25 bp, Homo sapien
ttaggcagtatttggttctgaagca

SEQ ID NO: 1100193 - DNA, 25 bp, Homo sapien
ggttgagcccctgtagatccattta

SEQ ID NO: 1100194 - DNA, 25 bp, Homo sapien
gctgcctatgggagcaatttccagc

SEQ ID NO: 1100195 - DNA, 25 bp, Homo sapien
tgcaacgggttgcagagctcgccgt

SEQ ID NO: 1100196 - DNA, 25 bp, Homo sapien
agagctcgccgtctgctgaattctt

SEQ ID NO: 1100197 - DNA, 25 bp, Homo sapien
tcataataatgtctgcaacgggttg

SEQ ID NO: 1100198 - DNA, 25 bp, Homo sapien
cataataatgtctgcaacgggttgc

SEQ ID NO: 1100199 - DNA, 25 bp, Homo sapien
aggtgccaaacaagacaccctcgtt

SEQ ID NO: 1100200 - DNA, 25 bp, Homo sapien
ggtgccaaacaagacaccctcgttc

SEQ ID NO: 1100201 - DNA, 25 bp, Homo sapien
tgccaaacaagacaccctcgttcat

SEQ ID NO: 1100202 - DNA, 25 bp, Homo sapien
gtgccaaacaagacaccctcgttca

SEQ ID NO: 1100203 - DNA, 25 bp, Homo sapien
gactcactatctcgggaaatatttt

SEQ ID NO: 1100204 - DNA, 25 bp, Homo sapien
tcttaataaactcaatgcaaagcat

SEQ ID NO: 1100205 - DNA, 25 bp, Homo sapien
tatcttaataaactcaatgcaaagc

SEQ ID NO: 1100206 - DNA, 25 bp, Homo sapien
tcaccataaatacttctgactcact

SEQ ID NO: 1100207 - DNA, 25 bp, Homo sapien
aacacattcatatccacatggcaca

SEQ ID NO: 1100208 - DNA, 25 bp, Homo sapien
tcaaaaattggaaaagtaggagcaa

SEQ ID NO: 1100209 - DNA, 25 bp, Homo sapien
ggaaaagtaggagcaacacattcat

SEQ ID NO: 1100210 - DNA, 25 bp, Homo sapien
tccacatggcacaagatcagaaagg

SEQ ID NO: 1100211 - DNA, 25 bp, Homo sapien
cattggttcatcgagggtcaggtaa

SEQ ID NO: 1100212 - DNA, 25 bp, Homo sapien
atggtggaccgaaaggagagcctcc

SEQ ID NO: 1100213 - DNA, 25 bp, Homo sapien
cgtttgttgccacgcactggaagta

SEQ ID NO: 1100214 - DNA, 25 bp, Homo sapien
gaggtttctaatccgcagccgagag

SEQ ID NO: 1100215 - DNA, 25 bp, Homo sapien
ggctgagggccaaagtccatcccca

SEQ ID NO: 1100216 - DNA, 25 bp, Homo sapien
gctgagggccaaagtccatccccag

SEQ ID NO: 1100217 - DNA, 25 bp, Homo sapien
gggctgagggccaaagtccatcccc

SEQ ID NO: 1100218 - DNA, 25 bp, Homo sapien
tgtccctgtggactctagccatcct

SEQ ID NO: 1100219 - DNA, 25 bp, Homo sapien
gtccctgtggactctagccatccta

SEQ ID NO: 1100220 - DNA, 25 bp, Homo sapien
tcctgtccctgtggactctagccat

SEQ ID NO: 1100221 - DNA, 25 bp, Homo sapien
tccttcctgtccctgtggactctag

SEQ ID NO: 1100222 - DNA, 25 bp, Homo sapien
gagtatcctggacttgcagtgggag

SEQ ID NO: 1100223 - DNA, 25 bp, Homo sapien
cctggacttgcagtgggaggggggc

SEQ ID NO: 1100224 - DNA, 25 bp, Homo sapien
atcctggacttgcagtgggaggggg

SEQ ID NO: 1100225 - DNA, 25 bp, Homo sapien
gtatcctggacttgcagtgggaggg

SEQ ID NO: 1100226 - DNA, 25 bp, Homo sapien
tcatgtggaaacctgatgcagtccc

SEQ ID NO: 1100227 - DNA, 25 bp, Homo sapien
ggccatagtcccaagggtccctaca

SEQ ID NO: 1100228 - DNA, 25 bp, Homo sapien
tgcttgtactcatgccccaggtcct

SEQ ID NO: 1100229 - DNA, 25 bp, Homo sapien
aaatgaagcctaaatctatgaacgg

SEQ ID NO: 1100230 - DNA, 25 bp, Homo sapien
tagagcctaggagaaactacactgg

SEQ ID NO: 1100231 - DNA, 25 bp, Homo sapien
gatctggcaatgagtgctcgcacaa

SEQ ID NO: 1100232 - DNA, 25 bp, Homo sapien
gaaggtgaccacaactgcatactgt

SEQ ID NO: 1100233 - DNA, 25 bp, Homo sapien
aagagtacgcatggaaccctttgcc

SEQ ID NO: 1100234 - DNA, 25 bp, Homo sapien
aataccagggtatctagtcaaagct

SEQ ID NO: 1100235 - DNA, 25 bp, Homo sapien
tagatggctctaagatcaaaggaga

SEQ ID NO: 1100236 - DNA, 25 bp, Homo sapien
gttccacaatccaaactgtccactg

SEQ ID NO: 1100237 - DNA, 25 bp, Homo sapien
cactgaatgttctacctgaaggttg

SEQ ID NO: 1100238 - DNA, 25 bp, Homo sapien
tctttcccgccatgataaccaacgg

SEQ ID NO: 1100239 - DNA, 25 bp, Homo sapien
gccccgttgctgttaacaagatcag

SEQ ID NO: 1100240 - DNA, 25 bp, Homo sapien
cattcagaaatcgacaattaacccc

SEQ ID NO: 1100241 - DNA, 25 bp, Homo sapien
tccaagactaataacggcatccagg

SEQ ID NO: 1100242 - DNA, 25 bp, Homo sapien
tctcagaatgaatgccaaccgcatt

SEQ ID NO: 1100243 - DNA, 25 bp, Homo sapien
tgccaaccgcattggcagaacacaa

SEQ ID NO: 1100244 - DNA, 25 bp, Homo sapien
ttggcagaacacaatcgccatccat

SEQ ID NO: 1100245 - DNA, 25 bp, Homo sapien
cctggtggctccagtgtggttctga

SEQ ID NO: 1100246 - DNA, 25 bp, Homo sapien
tctttcatggccatgggcattttca

SEQ ID NO: 1100247 - DNA, 25 bp, Homo sapien
cagatctttcatggccatgggcatt

SEQ ID NO: 1100248 - DNA, 25 bp, Homo sapien
tccagatctttcatggccatgggca

SEQ ID NO: 1100249 - DNA, 25 bp, Homo sapien
tttcatggccatgggcattttcaga

SEQ ID NO: 1100250 - DNA, 25 bp, Homo sapien
tattcagcaactgccaatccttcat

SEQ ID NO: 1100251 - DNA, 25 bp, Homo sapien
cctgtcgagtggcagaaatattgat

SEQ ID NO: 1100252 - DNA, 25 bp, Homo sapien
tttgaaagggctgaagttcctgtcg

SEQ ID NO: 1100253 - DNA, 25 bp, Homo sapien
atttgtgacaagcacatgatccagg

SEQ ID NO: 1100254 - DNA, 25 bp, Homo sapien
ctggaacgaatttgaaagggctgaa

SEQ ID NO: 1100255 - DNA, 25 bp, Homo sapien
tgattccatactttccacgctcctt

SEQ ID NO: 1100256 - DNA, 25 bp, Homo sapien
cttcttgtggtgctgctaagcggag

SEQ ID NO: 1100257 - DNA, 25 bp, Homo sapien
cactgacagggatagaggcaataga

SEQ ID NO: 1100258 - DNA, 25 bp, Homo sapien
tgtaaaaaccgcacaaacagatctg

SEQ ID NO: 1100259 - DNA, 25 bp, Homo sapien
gggatgatctgccttccagtttaaa

SEQ ID NO: 1100260 - DNA, 25 bp, Homo sapien
gaatggcttggaaacttaagagcag

SEQ ID NO: 1100261 - DNA, 25 bp, Homo sapien
taacatccaagctaccaaatcagac

SEQ ID NO: 1100262 - DNA, 25 bp, Homo sapien
ctcttaggagcttcaaatgagggtc

SEQ ID NO: 1100263 - DNA, 25 bp, Homo sapien
gctttcccaagaatgcagcctggca

SEQ ID NO: 1100264 - DNA, 25 bp, Homo sapien
taacatgtgcacattcgccaggcat

SEQ ID NO: 1100265 - DNA, 25 bp, Homo sapien
gaccaagagttcacgagaaacttcc

SEQ ID NO: 1100266 - DNA, 25 bp, Homo sapien
cccacagctggaatgtaaggattct

SEQ ID NO: 1100267 - DNA, 25 bp, Homo sapien
gaagtcatccagaacaaggtaaaca

SEQ ID NO: 1100268 - DNA, 25 bp, Homo sapien
tccctgactggagtgtggccatgaa

SEQ ID NO: 1100269 - DNA, 25 bp, Homo sapien
cagagatacccttccagctatggag

SEQ ID NO: 1100270 - DNA, 25 bp, Homo sapien
gagagcctcctctagactggaggga

SEQ ID NO: 1100271 - DNA, 25 bp, Homo sapien
aagaaagaagatagggctgagcaaa

SEQ ID NO: 1100272 - DNA, 25 bp, Homo sapien
aagaagatagggctgagcaaaaaaa

SEQ ID NO: 1100273 - DNA, 25 bp, Homo sapien
aaagaaagaagatagggctgagcaa

SEQ ID NO: 1100274 - DNA, 25 bp, Homo sapien
gaaagaagatagggctgagcaaaaa

SEQ ID NO: 1100275 - DNA, 25 bp, Homo sapien
ttctgatcaaggtgtaccacctctg

SEQ ID NO: 1100276 - DNA, 25 bp, Homo sapien
cttctgatcaaggtgtaccacctct

SEQ ID NO: 1100277 - DNA, 25 bp, Homo sapien
caaggtgtaccacctctgggtcagg

SEQ ID NO: 1100278 - DNA, 25 bp, Homo sapien
taattaaggttaatatgtagcatat

SEQ ID NO: 1100279 - DNA, 25 bp, Homo sapien
cacaaaccacagataattaaggtta

SEQ ID NO: 1100280 - DNA, 25 bp, Homo sapien
gaagggaattaaaatcatctacatc

SEQ ID NO: 1100281 - DNA, 25 bp, Homo sapien
tataagataccccagggcattctca

SEQ ID NO: 1100282 - DNA, 25 bp, Homo sapien
tgagtgaagcaattaccccatgttt

SEQ ID NO: 1100283 - DNA, 25 bp, Homo sapien
gttcgaaagtttaacagtgcatcta

SEQ ID NO: 1100284 - DNA, 25 bp, Homo sapien
gaaagcaagacactcctgtagattc

SEQ ID NO: 1100285 - DNA, 25 bp, Homo sapien
tactgcacaaaatacatctcttagg

SEQ ID NO: 1100286 - DNA, 25 bp, Homo sapien
tgtgtcgaatatcacatgctggttc

SEQ ID NO: 1100287 - DNA, 25 bp, Homo sapien
taagcaattttgaggtgactgtgtc

SEQ ID NO: 1100288 - DNA, 25 bp, Homo sapien
ttattggaatgcctttgtaagcata

SEQ ID NO: 1100289 - DNA, 25 bp, Homo sapien
tggaatgcctttgtaagcataagca

SEQ ID NO: 1100290 - DNA, 25 bp, Homo sapien
caggagtatcctctaattggaagcg

SEQ ID NO: 1100291 - DNA, 25 bp, Homo sapien
cagacatagctgaaccgatcggtac

SEQ ID NO: 1100292 - DNA, 25 bp, Homo sapien
tcatcagaatatacagggcatgggc

SEQ ID NO: 1100293 - DNA, 25 bp, Homo sapien
cgatcggtactgacaaatttggtcc

SEQ ID NO: 1100294 - DNA, 25 bp, Homo sapien
gcaggggtgctttgtgatgggagct

SEQ ID NO: 1100295 - DNA, 25 bp, Homo sapien
caggggtgctttgtgatgggagctc

SEQ ID NO: 1100296 - DNA, 25 bp, Homo sapien
catgatgtcaaggtgcaggggtgct

SEQ ID NO: 1100297 - DNA, 25 bp, Homo sapien
ggggtgctttgtgatgggagctcat

SEQ ID NO: 1100298 - DNA, 25 bp, Homo sapien
agaatgaaagaatctccttgagaag

SEQ ID NO: 1100299 - DNA, 25 bp, Homo sapien
aaaaaagaatgaaagaatctccttg

SEQ ID NO: 1100300 - DNA, 25 bp, Homo sapien
aaaagaatgaaagaatctccttgag

SEQ ID NO: 1100301 - DNA, 25 bp, Homo sapien
aaagaatgaaagaatctccttgaga

SEQ ID NO: 1100302 - DNA, 25 bp, Homo sapien
cagcttgaaggtctagcgtaggagt

SEQ ID NO: 1100303 - DNA, 25 bp, Homo sapien
tctgccctacatgggaaagtcatta

SEQ ID NO: 1100304 - DNA, 25 bp, Homo sapien
ctgcctgccacgtgtataagttgac

SEQ ID NO: 1100305 - DNA, 25 bp, Homo sapien
catttgggcatccttaggcaagctg

SEQ ID NO: 1100306 - DNA, 25 bp, Homo sapien
cctcagagcaaagtcaggagaacaa

SEQ ID NO: 1100307 - DNA, 25 bp, Homo sapien
caaagactccatatagacggtgcgg

SEQ ID NO: 1100308 - DNA, 25 bp, Homo sapien
gactccatatagacggtgcggttgc

SEQ ID NO: 1100309 - DNA, 25 bp, Homo sapien
ggttgccaataaatcttgcacatgc

SEQ ID NO: 1100310 - DNA, 25 bp, Homo sapien
cggtgcggttgccaataaatcttgc

SEQ ID NO: 1100311 - DNA, 25 bp, Homo sapien
cattcatcgcgacacaagtcacggg

SEQ ID NO: 1100312 - DNA, 25 bp, Homo sapien
ccggatacagttcgcagcttctggg

SEQ ID NO: 1100313 - DNA, 25 bp, Homo sapien
gaagtttcatcgcagtacgggaagg

SEQ ID NO: 1100314 - DNA, 25 bp, Homo sapien
gaaggaatggcgaactgagaacact

SEQ ID NO: 1100315 - DNA, 25 bp, Homo sapien
gcactggcgccctgatttggtcaca

SEQ ID NO: 1100316 - DNA, 25 bp, Homo sapien
ccttttgattccctgggttgcggca

SEQ ID NO: 1100317 - DNA, 25 bp, Homo sapien
ccaaggtgaagcaccagggagcttc

SEQ ID NO: 1100318 - DNA, 25 bp, Homo sapien
cacgctgggatgtcacacagatcag

SEQ ID NO: 1100319 - DNA, 25 bp, Homo sapien
gctgggtccctgttacatccatgag

SEQ ID NO: 1100320 - DNA, 25 bp, Homo sapien
catccatgagtgcaatggctgcagg

SEQ ID NO: 1100321 - DNA, 25 bp, Homo sapien
gaaggacacagtttacccacagatt

SEQ ID NO: 1100322 - DNA, 25 bp, Homo sapien
tccacttggacgcagaccattctgg

SEQ ID NO: 1100323 - DNA, 25 bp, Homo sapien
tttactagctggatgaccctggggc

SEQ ID NO: 1100324 - DNA, 25 bp, Homo sapien
agaaagatttattgggcccaggagt

SEQ ID NO: 1100325 - DNA, 25 bp, Homo sapien
accaataacccgaagtagcacagaa

SEQ ID NO: 1100326 - DNA, 25 bp, Homo sapien
ctctgtacatcaaccaataacccga

SEQ ID NO: 1100327 - DNA, 25 bp, Homo sapien
gaaaccccatggagattctgaaatc

SEQ ID NO: 1100328 - DNA, 25 bp, Homo sapien
tatcagtaggaaaatgagaaacccc

SEQ ID NO: 1100329 - DNA, 25 bp, Homo sapien
tgtagaaaagagttcctcaacccca

SEQ ID NO: 1100330 - DNA, 25 bp, Homo sapien
gagataatgcctaaaagtgtcagca

SEQ ID NO: 1100331 - DNA, 25 bp, Homo sapien
taaaatgccacgcacataagagcag

SEQ ID NO: 1100332 - DNA, 25 bp, Homo sapien
tagatgccggcacagatatcttagc

SEQ ID NO: 1100333 - DNA, 25 bp, Homo sapien
tgtaggctacacaagggcatggtct

SEQ ID NO: 1100334 - DNA, 25 bp, Homo sapien
aactaagtcctaggctagatgccgg

SEQ ID NO: 1100335 - DNA, 25 bp, Homo sapien
ctgtaaaccaccacgttgcagaata

SEQ ID NO: 1100336 - DNA, 25 bp, Homo sapien
ccaccacgttgcagaatatggtttg

SEQ ID NO: 1100337 - DNA, 25 bp, Homo sapien
taaaccaccacgttgcagaatatgg

SEQ ID NO: 1100338 - DNA, 25 bp, Homo sapien
ccacgttgcagaatatggtttgtga

SEQ ID NO: 1100339 - DNA, 25 bp, Homo sapien
gttaaaaatggcagtgttcacaatc

SEQ ID NO: 1100340 - DNA, 25 bp, Homo sapien
ccatccaattcactgtaacgttcaa

SEQ ID NO: 1100341 - DNA, 25 bp, Homo sapien
gaaagacaaattgccttacaacagg

SEQ ID NO: 1100342 - DNA, 25 bp, Homo sapien
aatggcagtgttcacaatctggaaa

SEQ ID NO: 1100343 - DNA, 25 bp, Homo sapien
tgaggccaacctctactgatagtgt

SEQ ID NO: 1100344 - DNA, 25 bp, Homo sapien
aacctatgggagtcatttgccagag

SEQ ID NO: 1100345 - DNA, 25 bp, Homo sapien
tgtggcttccagttaggttgaacct

SEQ ID NO: 1100346 - DNA, 25 bp, Homo sapien
tatatccctctaccaaaggccacag

SEQ ID NO: 1100347 - DNA, 25 bp, Homo sapien
ttttagaggatcgtactcgacaggc

SEQ ID NO: 1100348 - DNA, 25 bp, Homo sapien
tggccagaatctaggaaagatacct

SEQ ID NO: 1100349 - DNA, 25 bp, Homo sapien
ctcgacaggctaatataatgaatcc

SEQ ID NO: 1100350 - DNA, 25 bp, Homo sapien
gggctatgcttgaggaatcctgcct

SEQ ID NO: 1100351 - DNA, 25 bp, Homo sapien
tgtaaacgagggtctgggacaaatc

SEQ ID NO: 1100352 - DNA, 25 bp, Homo sapien
tgtattcatgccctatcagattatt

SEQ ID NO: 1100353 - DNA, 25 bp, Homo sapien
ctgcctggcaaacaaaggagtctat

SEQ ID NO: 1100354 - DNA, 25 bp, Homo sapien
ttattcatggaaggtcttctattgt

SEQ ID NO: 1100355 - DNA, 25 bp, Homo sapien
gacttctggttattccgacagacgc

SEQ ID NO: 1100356 - DNA, 25 bp, Homo sapien
ggactggtgccgacgatgacttctg

SEQ ID NO: 1100357 - DNA, 25 bp, Homo sapien
tccgacagacgcaaatgaagaagaa

SEQ ID NO: 1100358 - DNA, 25 bp, Homo sapien
tgacctctgacgtgttttggttgcc

SEQ ID NO: 1100359 - DNA, 25 bp, Homo sapien
taacatggtgctttaacttgaagcc

SEQ ID NO: 1100360 - DNA, 25 bp, Homo sapien
taacttgaagcccacggaacaaatg

SEQ ID NO: 1100361 - DNA, 25 bp, Homo sapien
tgggagggttataacatggtgcttt

SEQ ID NO: 1100362 - DNA, 25 bp, Homo sapien
agcccacggaacaaatgtagctctg

SEQ ID NO: 1100363 - DNA, 25 bp, Homo sapien
cagcattcgaagactattggaagga

SEQ ID NO: 1100364 - DNA, 25 bp, Homo sapien
cgaagactattggaaggacaacact

SEQ ID NO: 1100365 - DNA, 25 bp, Homo sapien
tattggaaggacaacacttccttaa

SEQ ID NO: 1100366 - DNA, 25 bp, Homo sapien
cataaaacagcattcgaagactatt

SEQ ID NO: 1100367 - DNA, 25 bp, Homo sapien
tataccttaggtgacaatacatttg

SEQ ID NO: 1100368 - DNA, 25 bp, Homo sapien
gtgaagcagcctactactaacctat

SEQ ID NO: 1100369 - DNA, 25 bp, Homo sapien
gatggataaagagggcagactcagt

SEQ ID NO: 1100370 - DNA, 25 bp, Homo sapien
accttggtggctgtagatggataaa

SEQ ID NO: 1100371 - DNA, 25 bp, Homo sapien
aacattttagatgcgagtcatttag

SEQ ID NO: 1100372 - DNA, 25 bp, Homo sapien
tctaaactgctgataagagagacca

SEQ ID NO: 1100373 - DNA, 25 bp, Homo sapien
aattgtagtactttctaaactgctg

SEQ ID NO: 1100374 - DNA, 25 bp, Homo sapien
catttagatgtgagtcagatgggaa

SEQ ID NO: 1100375 - DNA, 25 bp, Homo sapien
ctgaaacaggctttcagtttcaatg

SEQ ID NO: 1100376 - DNA, 25 bp, Homo sapien
cttaaaactgaaacaggctttcagt

SEQ ID NO: 1100377 - DNA, 25 bp, Homo sapien
aaactgaaacaggctttcagtttca

SEQ ID NO: 1100378 - DNA, 25 bp, Homo sapien
gaaacaggctttcagtttcaatgtt

SEQ ID NO: 1100379 - DNA, 25 bp, Homo sapien
tagttgaaggacaagatggcctcgg

SEQ ID NO: 1100380 - DNA, 25 bp, Homo sapien
actggaatgaatagggtcccgggct

SEQ ID NO: 1100381 - DNA, 25 bp, Homo sapien
tatcactccctccattagttgaagg

SEQ ID NO: 1100382 - DNA, 25 bp, Homo sapien
taaaatacacatgaggcatggtgcc

SEQ ID NO: 1100383 - DNA, 25 bp, Homo sapien
caaaggcacactcacccaattcttc

SEQ ID NO: 1100384 - DNA, 25 bp, Homo sapien
ccataaagcgtacagcagaaagagg

SEQ ID NO: 1100385 - DNA, 25 bp, Homo sapien
gggagatagagatggcctttataga

SEQ ID NO: 1100386 - DNA, 25 bp, Homo sapien
tcacccaattcttccataaagcgta

SEQ ID NO: 1100387 - DNA, 25 bp, Homo sapien
gacaggtattccatgccagctgcaa

SEQ ID NO: 1100388 - DNA, 25 bp, Homo sapien
tgttgaaattccgtccattgctggg

SEQ ID NO: 1100389 - DNA, 25 bp, Homo sapien
tgcagaaaatctccgtggtccaggc

SEQ ID NO: 1100390 - DNA, 25 bp, Homo sapien
tgttcctgagtgacggcacctagaa

SEQ ID NO: 1100391 - DNA, 25 bp, Homo sapien
tcttcagagcatggtaagagctgcc

SEQ ID NO: 1100392 - DNA, 25 bp, Homo sapien
gaccgaagccggacgtgaatatctt

SEQ ID NO: 1100393 - DNA, 25 bp, Homo sapien
tgaaaccagcaatctggccctgtgg

SEQ ID NO: 1100394 - DNA, 25 bp, Homo sapien
tgagattactcactgggctggcact

SEQ ID NO: 1100395 - DNA, 25 bp, Homo sapien
tcctgatgagggcaagctagtcaca

SEQ ID NO: 1100396 - DNA, 25 bp, Homo sapien
tattggcgtctcctagtaaagatgc

SEQ ID NO: 1100397 - DNA, 25 bp, Homo sapien
catatccaggaggtattgggtatcc

SEQ ID NO: 1100398 - DNA, 25 bp, Homo sapien
cagtgctgaatcactctgggaggac

SEQ ID NO: 1100399 - DNA, 25 bp, Homo sapien
tataaatcttttctacggccgtcta

SEQ ID NO: 1100400 - DNA, 25 bp, Homo sapien
gaaggtacttgttgcgatgtctgct

SEQ ID NO: 1100401 - DNA, 25 bp, Homo sapien
gatgtctgctaaatgagaaccttac

SEQ ID NO: 1100402 - DNA, 25 bp, Homo sapien
tctggccgagtgtctgtcctgcttg

SEQ ID NO: 1100403 - DNA, 25 bp, Homo sapien
caatggagtgcacatcccacaatgt

SEQ ID NO: 1100404 - DNA, 25 bp, Homo sapien
ggattcacaaaaaggcacactctac

SEQ ID NO: 1100405 - DNA, 25 bp, Homo sapien
gctttcagtgctcgaaaccacatgt

SEQ ID NO: 1100406 - DNA, 25 bp, Homo sapien
tgggaaagaccctcatgatcagagg

SEQ ID NO: 1100407 - DNA, 25 bp, Homo sapien
taaacttggcaaaagatggtcggca

SEQ ID NO: 1100408 - DNA, 25 bp, Homo sapien
gaccataagcactccaatgcctcgg

SEQ ID NO: 1100409 - DNA, 25 bp, Homo sapien
ggcgcctcattcctaatccagcaaa

SEQ ID NO: 1100410 - DNA, 25 bp, Homo sapien
gggcgtgctcatctgtagccacaca

SEQ ID NO: 1100411 - DNA, 25 bp, Homo sapien
tgacaagagctgtacctaaaacaga

SEQ ID NO: 1100412 - DNA, 25 bp, Homo sapien
gtgttaaatagcagatatggacaac

SEQ ID NO: 1100413 - DNA, 25 bp, Homo sapien
aacagatggataaggccctaaaggt

SEQ ID NO: 1100414 - DNA, 25 bp, Homo sapien
tattgagtttgattgttgaggtggt

SEQ ID NO: 1100415 - DNA, 25 bp, Homo sapien
tggtaaggtatcttgccaatcccgg

SEQ ID NO: 1100416 - DNA, 25 bp, Homo sapien
tgtagcttgggagcagtatgccata

SEQ ID NO: 1100417 - DNA, 25 bp, Homo sapien
accataatgtttgcaccgtgacgaa

SEQ ID NO: 1100418 - DNA, 25 bp, Homo sapien
caatcccggtcagcaaatgttatgg

SEQ ID NO: 1100419 - DNA, 25 bp, Homo sapien
cctgcagtcaggtttggcctcagaa

SEQ ID NO: 1100420 - DNA, 25 bp, Homo sapien
gcaactgtctgtacctctccgcagg

SEQ ID NO: 1100421 - DNA, 25 bp, Homo sapien
tccgcaggcggagatatgtccatgt

SEQ ID NO: 1100422 - DNA, 25 bp, Homo sapien
tattcactcagggattcagctgcct

SEQ ID NO: 1100423 - DNA, 25 bp, Homo sapien
gtgttgctgtatgcaccgcggtgcc

SEQ ID NO: 1100424 - DNA, 25 bp, Homo sapien
tgatcacctaatatgcctcatgcgg

SEQ ID NO: 1100425 - DNA, 25 bp, Homo sapien
gaaatattggtcacctcagcctacg

SEQ ID NO: 1100426 - DNA, 25 bp, Homo sapien
gtcatgctgcgctagaaggccgcct

SEQ ID NO: 1100427 - DNA, 25 bp, Homo sapien
gttatggaacggctaaattgagcta

SEQ ID NO: 1100428 - DNA, 25 bp, Homo sapien
ccccacaacaaacctatattactag

SEQ ID NO: 1100429 - DNA, 25 bp, Homo sapien
ggcatttatatgatactttagcaca

SEQ ID NO: 1100430 - DNA, 25 bp, Homo sapien
ccaaatgcctggttgtcacccagct

SEQ ID NO: 1100431 - DNA, 25 bp, Homo sapien
gggaactgcttaaaatttctctgat

SEQ ID NO: 1100432 - DNA, 25 bp, Homo sapien
tgcatgctattatgtcatcaaaccc

SEQ ID NO: 1100433 - DNA, 25 bp, Homo sapien
tacaatcaccctgggaaagtgctcc

SEQ ID NO: 1100434 - DNA, 25 bp, Homo sapien
taggagtttaccacattccttccac

SEQ ID NO: 1100435 - DNA, 25 bp, Homo sapien
tgagattcgtggtcaaggcaacacc

SEQ ID NO: 1100436 - DNA, 25 bp, Homo sapien
caggacccagcatgtaagtcacaga

SEQ ID NO: 1100437 - DNA, 25 bp, Homo sapien
gactggtaggtacaggtctgcataa

SEQ ID NO: 1100438 - DNA, 25 bp, Homo sapien
tctcaggccacgaacatggactgta

SEQ ID NO: 1100439 - DNA, 25 bp, Homo sapien
cggaggaagcaaatcggttgccaac

SEQ ID NO: 1100440 - DNA, 25 bp, Homo sapien
gggttggccgctctcacccaatcag

SEQ ID NO: 1100441 - DNA, 25 bp, Homo sapien
agcaaatcggttgccaaccaacagg

SEQ ID NO: 1100442 - DNA, 25 bp, Homo sapien
tctcacccaatcagcgacagggggc

SEQ ID NO: 1100443 - DNA, 25 bp, Homo sapien
gaggtgtacgcctatcagggtccta

SEQ ID NO: 1100444 - DNA, 25 bp, Homo sapien
cggtaccaagataagcggcttctaa

SEQ ID NO: 1100445 - DNA, 25 bp, Homo sapien
gacttgggcacttcctcatctgcgg

SEQ ID NO: 1100446 - DNA, 25 bp, Homo sapien
gatgagtaacggagacaagcccatg

SEQ ID NO: 1100447 - DNA, 25 bp, Homo sapien
ttgttctccttgagatcacagaagt

SEQ ID NO: 1100448 - DNA, 25 bp, Homo sapien
agtctctgtgcagcaagaggtaagc

SEQ ID NO: 1100449 - DNA, 25 bp, Homo sapien
gcaagaggtaagctctgccgtgcat

SEQ ID NO: 1100450 - DNA, 25 bp, Homo sapien
tctccttgagatcacagaagtctct

SEQ ID NO: 1100451 - DNA, 25 bp, Homo sapien
gaatgttcgctgttggactccataa

SEQ ID NO: 1100452 - DNA, 25 bp, Homo sapien
gctcaggatgagcagaaacaatatc

SEQ ID NO: 1100453 - DNA, 25 bp, Homo sapien
gcaactgtgggaagcactctatacc

SEQ ID NO: 1100454 - DNA, 25 bp, Homo sapien
tgaactacacctgaagcaactgtgg

SEQ ID NO: 1100455 - DNA, 25 bp, Homo sapien
cttatgaattacgttaagtaacaca

SEQ ID NO: 1100456 - DNA, 25 bp, Homo sapien
tccaatggagggacaagaatgtatt

SEQ ID NO: 1100457 - DNA, 25 bp, Homo sapien
tatacttgaggagttgttccaatgg

SEQ ID NO: 1100458 - DNA, 25 bp, Homo sapien
tatgaattacgttaagtaacacact

SEQ ID NO: 1100459 - DNA, 25 bp, Homo sapien
tccatcatatcttcacttacaggct

SEQ ID NO: 1100460 - DNA, 25 bp, Homo sapien
cacttacaggcttagcagtgatacc

SEQ ID NO: 1100461 - DNA, 25 bp, Homo sapien
ttcacttacaggcttagcagtgata

SEQ ID NO: 1100462 - DNA, 25 bp, Homo sapien
ttcccattccatcatatcttcactt

SEQ ID NO: 1100463 - DNA, 25 bp, Homo sapien
ttcacaactggaggagcatagttgt

SEQ ID NO: 1100464 - DNA, 25 bp, Homo sapien
tgtattgtcagttggaagactaaac

SEQ ID NO: 1100465 - DNA, 25 bp, Homo sapien
gagcatagttgtactccgatgtaaa

SEQ ID NO: 1100466 - DNA, 25 bp, Homo sapien
catttggatgaaacggaattgttat

SEQ ID NO: 1100467 - DNA, 25 bp, Homo sapien
tatacagggctgaccagtgtgtggg

SEQ ID NO: 1100468 - DNA, 25 bp, Homo sapien
tacagggctgaccagtgtgtgggtc

SEQ ID NO: 1100469 - DNA, 25 bp, Homo sapien
cagggctgaccagtgtgtgggtcta

SEQ ID NO: 1100470 - DNA, 25 bp, Homo sapien
ctatacagggctgaccagtgtgtgg

SEQ ID NO: 1100471 - DNA, 25 bp, Homo sapien
gtatagtttgtattccacttctcag

SEQ ID NO: 1100472 - DNA, 25 bp, Homo sapien
atagtttgtattccacttctcaggg

SEQ ID NO: 1100473 - DNA, 25 bp, Homo sapien
gatgctgctcaatgtatagtttgta

SEQ ID NO: 1100474 - DNA, 25 bp, Homo sapien
aagatgctgctcaatgtatagtttg

SEQ ID NO: 1100475 - DNA, 25 bp, Homo sapien
gagattcatctttaaccagtattct

SEQ ID NO: 1100476 - DNA, 25 bp, Homo sapien
tggattctctagcactggattagaa

SEQ ID NO: 1100477 - DNA, 25 bp, Homo sapien
gaaaagtcttagaattgttctgtac

SEQ ID NO: 1100478 - DNA, 25 bp, Homo sapien
caaattcactggattctctagcact

SEQ ID NO: 1100479 - DNA, 25 bp, Homo sapien
ggcaccatccatgcatatgaccata

SEQ ID NO: 1100480 - DNA, 25 bp, Homo sapien
gactagtttcatttggcaccatcca

SEQ ID NO: 1100481 - DNA, 25 bp, Homo sapien
gtttcatttggcaccatccatgcat

SEQ ID NO: 1100482 - DNA, 25 bp, Homo sapien
ctttatgatgggtggactagtttca

SEQ ID NO: 1100483 - DNA, 25 bp, Homo sapien
acccttctgtgcacaagaagccaga

SEQ ID NO: 1100484 - DNA, 25 bp, Homo sapien
cccttctgtgcacaagaagccagaa

SEQ ID NO: 1100485 - DNA, 25 bp, Homo sapien
ctcagctgtgggaaacccttctgtg

SEQ ID NO: 1100486 - DNA, 25 bp, Homo sapien
ctgatacatttacgtgggtctttag

SEQ ID NO: 1100487 - DNA, 25 bp, Homo sapien
tgatacatttacgtgggtctttagg

SEQ ID NO: 1100488 - DNA, 25 bp, Homo sapien
tgtggcttttgatgtagctattctg

SEQ ID NO: 1100489 - DNA, 25 bp, Homo sapien
tctggtagtaatcactaaatgaggt

SEQ ID NO: 1100490 - DNA, 25 bp, Homo sapien
ctgtggcttttgatgtagctattct

SEQ ID NO: 1100491 - DNA, 25 bp, Homo sapien
ggtagtaatcactaaatgaggttgt

SEQ ID NO: 1100492 - DNA, 25 bp, Homo sapien
actgtccaatgaaatttggaacttt

SEQ ID NO: 1100493 - DNA, 25 bp, Homo sapien
tccatttgtaatactgtccaatgaa

SEQ ID NO: 1100494 - DNA, 25 bp, Homo sapien
tgtccaatgaaatttggaactttga

SEQ ID NO: 1100495 - DNA, 25 bp, Homo sapien
ccatttgtaatactgtccaatgaaa

SEQ ID NO: 1100496 - DNA, 25 bp, Homo sapien
tcaaaatacagcacgttatctttat

SEQ ID NO: 1100497 - DNA, 25 bp, Homo sapien
gcacgttatctttattcatcgtgta

SEQ ID NO: 1100498 - DNA, 25 bp, Homo sapien
gaaattcaaaatacagcacgttatc

SEQ ID NO: 1100499 - DNA, 25 bp, Homo sapien
tacagcacgttatctttattcatcg

SEQ ID NO: 1100500 - DNA, 25 bp, Homo sapien
tgcaaaagcttttctctactttagc

SEQ ID NO: 1100501 - DNA, 25 bp, Homo sapien
gaaaaactcagtctgaactatatga

SEQ ID NO: 1100502 - DNA, 25 bp, Homo sapien
aagaaagttgttacagaatcaacag

SEQ ID NO: 1100503 - DNA, 25 bp, Homo sapien
cctgtaatttatcctgaaagcagaa

SEQ ID NO: 1100504 - DNA, 25 bp, Homo sapien
gaatgagggccacagtaaagtttta

SEQ ID NO: 1100505 - DNA, 25 bp, Homo sapien
tccagtgcccctgcgcttaagagct

SEQ ID NO: 1100506 - DNA, 25 bp, Homo sapien
gaggtaggtacacttattactgcca

SEQ ID NO: 1100507 - DNA, 25 bp, Homo sapien
aaagaccttgctgatccgaggcaga

SEQ ID NO: 1100508 - DNA, 25 bp, Homo sapien
taataagcgtcaaatgcaaaacaac

SEQ ID NO: 1100509 - DNA, 25 bp, Homo sapien
caactttgcaagataggtaaggtta

SEQ ID NO: 1100510 - DNA, 25 bp, Homo sapien
tcatgctcttcccctatgctgcttc

SEQ ID NO: 1100511 - DNA, 25 bp, Homo sapien
tttatttatatctcgaatgaaatca

SEQ ID NO: 1100512 - DNA, 25 bp, Homo sapien
gaggatgcgtttttcaactaacatt

SEQ ID NO: 1100513 - DNA, 25 bp, Homo sapien
gaatatttatgagctgcttataatg

SEQ ID NO: 1100514 - DNA, 25 bp, Homo sapien
tacaccttagaactcccaaaataga

SEQ ID NO: 1100515 - DNA, 25 bp, Homo sapien
taacaaagacttgccaaattagaga

SEQ ID NO: 1100516 - DNA, 25 bp, Homo sapien
tatcagtaacctcaggaaaactcgc

SEQ ID NO: 1100517 - DNA, 25 bp, Homo sapien
caaagtggtctgacttggagtacag

SEQ ID NO: 1100518 - DNA, 25 bp, Homo sapien
gactgtcaactccacaggatggcca

SEQ ID NO: 1100519 - DNA, 25 bp, Homo sapien
gatgggtcttaggagcggttatcca

SEQ ID NO: 1100520 - DNA, 25 bp, Homo sapien
gacaggacaactaagtccagagtgg

SEQ ID NO: 1100521 - DNA, 25 bp, Homo sapien
aaagacaggacaactaagtccagag

SEQ ID NO: 1100522 - DNA, 25 bp, Homo sapien
ttaaaagacaggacaactaagtcca

SEQ ID NO: 1100523 - DNA, 25 bp, Homo sapien
caggacaactaagtccagagtggga

SEQ ID NO: 1100524 - DNA, 25 bp, Homo sapien
gtgagtgacttcatgaggcattctt

SEQ ID NO: 1100525 - DNA, 25 bp, Homo sapien
aagccaacacttgataacggaatac

SEQ ID NO: 1100526 - DNA, 25 bp, Homo sapien
tttcttccattgagtgagtgacttc

SEQ ID NO: 1100527 - DNA, 25 bp, Homo sapien
caagccaacacttgataacggaata

SEQ ID NO: 1100528 - DNA, 25 bp, Homo sapien
ctgccaaatctctggtgagtttctc

SEQ ID NO: 1100529 - DNA, 25 bp, Homo sapien
tcccactggcaaactatgacatgcc

SEQ ID NO: 1100530 - DNA, 25 bp, Homo sapien
tctcccactggcaaactatgacatg

SEQ ID NO: 1100531 - DNA, 25 bp, Homo sapien
gagtttctcccactggcaaactatg

SEQ ID NO: 1100532 - DNA, 25 bp, Homo sapien
tataatgaagtgtcactcttccacc

SEQ ID NO: 1100533 - DNA, 25 bp, Homo sapien
aatgtctgtgatgctatttattgca

SEQ ID NO: 1100534 - DNA, 25 bp, Homo sapien
tttgtattgagagtattggtccagg

SEQ ID NO: 1100535 - DNA, 25 bp, Homo sapien
cagttggtgactcaagaaaaatttc

SEQ ID NO: 1100536 - DNA, 25 bp, Homo sapien
taatttgtacttgcagtgagtgggt

SEQ ID NO: 1100537 - DNA, 25 bp, Homo sapien
tctaatttgtacttgcagtgagtgg

SEQ ID NO: 1100538 - DNA, 25 bp, Homo sapien
ctaatttgtacttgcagtgagtggg

SEQ ID NO: 1100539 - DNA, 25 bp, Homo sapien
atttgtacttgcagtgagtgggtga

SEQ ID NO: 1100540 - DNA, 25 bp, Homo sapien
ggtcctcgctggtatcaattttcca

SEQ ID NO: 1100541 - DNA, 25 bp, Homo sapien
tccatgtacccccagaagattcaac

SEQ ID NO: 1100542 - DNA, 25 bp, Homo sapien
cgctggtatcaattttccatgtacc

SEQ ID NO: 1100543 - DNA, 25 bp, Homo sapien
tctctcaaggtcctcgctggtatca

SEQ ID NO: 1100544 - DNA, 25 bp, Homo sapien
tgccatcccccttagtctggactgg

SEQ ID NO: 1100545 - DNA, 25 bp, Homo sapien
aattggtagataagagaagttgctc

SEQ ID NO: 1100546 - DNA, 25 bp, Homo sapien
tgcaattggtagataagagaagttg

SEQ ID NO: 1100547 - DNA, 25 bp, Homo sapien
tagtctggactggaagatgtagtaa

SEQ ID NO: 1100548 - DNA, 25 bp, Homo sapien
ccttatctcaccgaggagggaactg

SEQ ID NO: 1100549 - DNA, 25 bp, Homo sapien
gactagcccattactgtgaatggtc

SEQ ID NO: 1100550 - DNA, 25 bp, Homo sapien
tatctcaccgaggagggaactgact

SEQ ID NO: 1100551 - DNA, 25 bp, Homo sapien
gagggaactgactagcccattactg

SEQ ID NO: 1100552 - DNA, 25 bp, Homo sapien
cagcgtacttcatagatgtcatcat

SEQ ID NO: 1100553 - DNA, 25 bp, Homo sapien
ccagcgtacttcatagatgtcatca

SEQ ID NO: 1100554 - DNA, 25 bp, Homo sapien
taatgacttcttagtaaagacattc

SEQ ID NO: 1100555 - DNA, 25 bp, Homo sapien
caataatgacttcttagtaaagaca

SEQ ID NO: 1100556 - DNA, 25 bp, Homo sapien
aataatgacttcttagtaaagacat

SEQ ID NO: 1100557 - DNA, 25 bp, Homo sapien
aatgacttcttagtaaagacattct

SEQ ID NO: 1100558 - DNA, 25 bp, Homo sapien
ttctctctggtgaccgagacacagc

SEQ ID NO: 1100559 - DNA, 25 bp, Homo sapien
acagcatacgacacagctcctctgg

SEQ ID NO: 1100560 - DNA, 25 bp, Homo sapien
cagttccgtgggcatgttaatgagc

SEQ ID NO: 1100561 - DNA, 25 bp, Homo sapien
agctggccagttccgtgggcatgtt

SEQ ID NO: 1100562 - DNA, 25 bp, Homo sapien
tggatccaacttgggccaatagtaa

SEQ ID NO: 1100563 - DNA, 25 bp, Homo sapien
tatattcaggaatggtgggagccac

SEQ ID NO: 1100564 - DNA, 25 bp, Homo sapien
agttctggattggtctggacaggac

SEQ ID NO: 1100565 - DNA, 25 bp, Homo sapien
ccctggaccagttggttgaactgga

SEQ ID NO: 1100566 - DNA, 25 bp, Homo sapien
actctcaggatctatgtatgtgcac

SEQ ID NO: 1100567 - DNA, 25 bp, Homo sapien
agactctcaggatctatgtatgtgc

SEQ ID NO: 1100568 - DNA, 25 bp, Homo sapien
gactctcaggatctatgtatgtgca

SEQ ID NO: 1100569 - DNA, 25 bp, Homo sapien
gatcccacagtggaggctagtccct

SEQ ID NO: 1100570 - DNA, 25 bp, Homo sapien
gaccatctgtgagtaatgatcccac

SEQ ID NO: 1100571 - DNA, 25 bp, Homo sapien
ctttcctggcgttggatcaacttca

SEQ ID NO: 1100572 - DNA, 25 bp, Homo sapien
ctgtcctttggcagagtgcagtagg

SEQ ID NO: 1100573 - DNA, 25 bp, Homo sapien
taactcaatttgtgccccaattcca

SEQ ID NO: 1100574 - DNA, 25 bp, Homo sapien
ctcaatttgtgccccaattccacag

SEQ ID NO: 1100575 - DNA, 25 bp, Homo sapien
aactcaatttgtgccccaattccac

SEQ ID NO: 1100576 - DNA, 25 bp, Homo sapien
actcaatttgtgccccaattccaca

SEQ ID NO: 1100577 - DNA, 25 bp, Homo sapien
gtttccggagcaaacatactcacac

SEQ ID NO: 1100578 - DNA, 25 bp, Homo sapien
agacactccatcacgcacatctcgg

SEQ ID NO: 1100579 - DNA, 25 bp, Homo sapien
tcccttactgtttccggagcaaaca

SEQ ID NO: 1100580 - DNA, 25 bp, Homo sapien
tctcgggcagtcttggagaagcacc

SEQ ID NO: 1100581 - DNA, 25 bp, Homo sapien
ctgcaacagggaaagctggtgagaa

SEQ ID NO: 1100582 - DNA, 25 bp, Homo sapien
tgggagtcgctgtggtgaggttaaa

SEQ ID NO: 1100583 - DNA, 25 bp, Homo sapien
gtaagaggctcccaagaatggagtg

SEQ ID NO: 1100584 - DNA, 25 bp, Homo sapien
tgcgagtataaccagctgcaacagg

SEQ ID NO: 1100585 - DNA, 25 bp, Homo sapien
tgagcaaacctcaaaacctgtagtt

SEQ ID NO: 1100586 - DNA, 25 bp, Homo sapien
tccagctgcttgaatgtagccagac

SEQ ID NO: 1100587 - DNA, 25 bp, Homo sapien
gggtccagagcccagccatgtggat

SEQ ID NO: 1100588 - DNA, 25 bp, Homo sapien
tagttggtaaccttctggaactggc

SEQ ID NO: 1100589 - DNA, 25 bp, Homo sapien
tggcatccctcactaaggagctgga

SEQ ID NO: 1100590 - DNA, 25 bp, Homo sapien
acttccctaaattggcaggcccagt

SEQ ID NO: 1100591 - DNA, 25 bp, Homo sapien
tgattccagctggatccaaacttcc

SEQ ID NO: 1100592 - DNA, 25 bp, Homo sapien
cctaaattggcaggcccagtgtgag

SEQ ID NO: 1100593 - DNA, 25 bp, Homo sapien
gacaagtcaactggctggattccac

SEQ ID NO: 1100594 - DNA, 25 bp, Homo sapien
ttatagggctagtgatgagggacaa

SEQ ID NO: 1100595 - DNA, 25 bp, Homo sapien
tgatgagggacaagtcaactggctg

SEQ ID NO: 1100596 - DNA, 25 bp, Homo sapien
tgagggacaagtcaactggctggat

SEQ ID NO: 1100597 - DNA, 25 bp, Homo sapien
ggagatgcaagtacggattgctcat

SEQ ID NO: 1100598 - DNA, 25 bp, Homo sapien
caggaggggagatgcaagtacggat

SEQ ID NO: 1100599 - DNA, 25 bp, Homo sapien
ctgcttaaagtgcttaaaggtgaag

SEQ ID NO: 1100600 - DNA, 25 bp, Homo sapien
gcttaaagtgcttaaaggtgaagca

SEQ ID NO: 1100601 - DNA, 25 bp, Homo sapien
aagtacaaagtaccaccgtagtgag

SEQ ID NO: 1100602 - DNA, 25 bp, Homo sapien
gattatgttacaaggagaaaggcct

SEQ ID NO: 1100603 - DNA, 25 bp, Homo sapien
cttgtctgtcctaatgattatgtta

SEQ ID NO: 1100604 - DNA, 25 bp, Homo sapien
cgactgtgaattacacacaacaaag

SEQ ID NO: 1100605 - DNA, 25 bp, Homo sapien
tctgtcatacagctgccgaggtggc

SEQ ID NO: 1100606 - DNA, 25 bp, Homo sapien
cagggaagattccagcttgaactca

SEQ ID NO: 1100607 - DNA, 25 bp, Homo sapien
tgctgttggccagggcatgtgatct

SEQ ID NO: 1100608 - DNA, 25 bp, Homo sapien
tcttatggtcctcacagatggccaa

SEQ ID NO: 1100609 - DNA, 25 bp, Homo sapien
acagatctttccagaaccagcagtg

SEQ ID NO: 1100610 - DNA, 25 bp, Homo sapien
caaagccttgttagcagttgggtgg

SEQ ID NO: 1100611 - DNA, 25 bp, Homo sapien
gtacggtatccggtactgggaatga

SEQ ID NO: 1100612 - DNA, 25 bp, Homo sapien
ttcaaagccttgttagcagttgggt

SEQ ID NO: 1100613 - DNA, 25 bp, Homo sapien
aaatgacttcacaaccagccagacc

SEQ ID NO: 1100614 - DNA, 25 bp, Homo sapien
aacagccgtgggatctctgcttcct

SEQ ID NO: 1100615 - DNA, 25 bp, Homo sapien
ttggagctggtacaataacagccgt

SEQ ID NO: 1100616 - DNA, 25 bp, Homo sapien
aataacagccgtgggatctctgctt

SEQ ID NO: 1100617 - DNA, 25 bp, Homo sapien
caatcttcactcttaattacgggga

SEQ ID NO: 1100618 - DNA, 25 bp, Homo sapien
tcttcactcttaattacggggacca

SEQ ID NO: 1100619 - DNA, 25 bp, Homo sapien
tcactcttaattacggggaccataa

SEQ ID NO: 1100620 - DNA, 25 bp, Homo sapien
tcaatcttcactcttaattacgggg

SEQ ID NO: 1100621 - DNA, 25 bp, Homo sapien
aaaggcagctcagaatgtttatgca

SEQ ID NO: 1100622 - DNA, 25 bp, Homo sapien
ttatgccaacatgggtcaaggcgga

SEQ ID NO: 1100623 - DNA, 25 bp, Homo sapien
tatgcaagagatagacacaacaggc

SEQ ID NO: 1100624 - DNA, 25 bp, Homo sapien
catctgggtcagataaaaaggcagc

SEQ ID NO: 1100625 - DNA, 25 bp, Homo sapien
atgtaacaggaaaggactctaatac

SEQ ID NO: 1100626 - DNA, 25 bp, Homo sapien
tatgtaacaggaaaggactctaata

SEQ ID NO: 1100627 - DNA, 25 bp, Homo sapien
tgtaacaggaaaggactctaatacc

SEQ ID NO: 1100628 - DNA, 25 bp, Homo sapien
taacaggaaaggactctaatacctc

SEQ ID NO: 1100629 - DNA, 25 bp, Homo sapien
tgaggtgtagaattcccctgaacca

SEQ ID NO: 1100630 - DNA, 25 bp, Homo sapien
tcaccttcaccaacataaaaggcag

SEQ ID NO: 1100631 - DNA, 25 bp, Homo sapien
cttagagcaactctcaaatctgaga

SEQ ID NO: 1100632 - DNA, 25 bp, Homo sapien
aatatttgaagatcccagtgtggac

SEQ ID NO: 1100633 - DNA, 25 bp, Homo sapien
atgcacatccatgaaatacctttca

SEQ ID NO: 1100634 - DNA, 25 bp, Homo sapien
taaggagatttataaagtcaatggg

SEQ ID NO: 1100635 - DNA, 25 bp, Homo sapien
tgcacatccatgaaatacctttcat

SEQ ID NO: 1100636 - DNA, 25 bp, Homo sapien
tacctttcatacaatttaaggagat

SEQ ID NO: 1100637 - DNA, 25 bp, Homo sapien
gcagaattccagtgtccaattttaa

SEQ ID NO: 1100638 - DNA, 25 bp, Homo sapien
ggcaacagcaattttgctgatctgt

SEQ ID NO: 1100639 - DNA, 25 bp, Homo sapien
tttaaacttttggtgctggaggcaa

SEQ ID NO: 1100640 - DNA, 25 bp, Homo sapien
tgatctgtctcactaattccctaga

SEQ ID NO: 1100641 - DNA, 25 bp, Homo sapien
tatagttccttagctgacttccctg

SEQ ID NO: 1100642 - DNA, 25 bp, Homo sapien
gacttccctgaatcagatctctcag

SEQ ID NO: 1100643 - DNA, 25 bp, Homo sapien
tctttctcctcatttggaatatagt

SEQ ID NO: 1100644 - DNA, 25 bp, Homo sapien
gcatctgtgcttccctcactaggaa

SEQ ID NO: 1100645 - DNA, 25 bp, Homo sapien
ctagatcctcgtctctttatactca

SEQ ID NO: 1100646 - DNA, 25 bp, Homo sapien
tagatcctcgtctctttatactcag

SEQ ID NO: 1100647 - DNA, 25 bp, Homo sapien
cctcgtctctttatactcagtgctc

SEQ ID NO: 1100648 - DNA, 25 bp, Homo sapien
gatcctcgtctctttatactcagtg

SEQ ID NO: 1100649 - DNA, 25 bp, Homo sapien
ttcaacacaatctgcacggagataa

SEQ ID NO: 1100650 - DNA, 25 bp, Homo sapien
cttgggactgggagaagcatcaaag

SEQ ID NO: 1100651 - DNA, 25 bp, Homo sapien
gagaagcatcaaagatgttttcaac

SEQ ID NO: 1100652 - DNA, 25 bp, Homo sapien
gatgttttcaacacaatctgcacgg

SEQ ID NO: 1100653 - DNA, 25 bp, Homo sapien
tggttgccaatgaccctggtgttac

SEQ ID NO: 1100654 - DNA, 25 bp, Homo sapien
caggttctgctccttataggcttct

SEQ ID NO: 1100655 - DNA, 25 bp, Homo sapien
tggtgttactatctacttggctact

SEQ ID NO: 1100656 - DNA, 25 bp, Homo sapien
tggcaaggcctgcttagctgcagct

SEQ ID NO: 1100657 - DNA, 25 bp, Homo sapien
caagctgtaaggcagagacggcaga

SEQ ID NO: 1100658 - DNA, 25 bp, Homo sapien
cataagaagccctgattggcaagga

SEQ ID NO: 1100659 - DNA, 25 bp, Homo sapien
gagagaattcctagccttcctgtgg

SEQ ID NO: 1100660 - DNA, 25 bp, Homo sapien
gagcgatctcgcttgcttcataaga

SEQ ID NO: 1100661 - DNA, 25 bp, Homo sapien
gctgacagtcggaatcggagtcgga

SEQ ID NO: 1100662 - DNA, 25 bp, Homo sapien
gggaggcttcacaaacccacacaac

SEQ ID NO: 1100663 - DNA, 25 bp, Homo sapien
ctgcgagtcccagcgcagcgagcag

SEQ ID NO: 1100664 - DNA, 25 bp, Homo sapien
gcagagggcgtctccgagagcaggg

SEQ ID NO: 1100665 - DNA, 25 bp, Homo sapien
cggctacagcgcgggagcgcgggcg

SEQ ID NO: 1100666 - DNA, 25 bp, Homo sapien
ggcgcccggctacagcgcgggagcg

SEQ ID NO: 1100667 - DNA, 25 bp, Homo sapien
cgcggtggcgaaggctcccaaactt

SEQ ID NO: 1100668 - DNA, 25 bp, Homo sapien
cggtggcgaaggctcccaaacttag

SEQ ID NO: 1100669 - DNA, 25 bp, Homo sapien
ttcctccggctggcgggccatgctg

SEQ ID NO: 1100670 - DNA, 25 bp, Homo sapien
cgcccaggagccagcacgcgaccag

SEQ ID NO: 1100671 - DNA, 25 bp, Homo sapien
caggatggagaagtcggcttcggcc

SEQ ID NO: 1100672 - DNA, 25 bp, Homo sapien
gggccacggccgtctcctcttcctc

SEQ ID NO: 1100673 - DNA, 25 bp, Homo sapien
tccgcatctggctcgccagcacttg

SEQ ID NO: 1100674 - DNA, 25 bp, Homo sapien
ctgcatggtgacgacccccagctcc

SEQ ID NO: 1100675 - DNA, 25 bp, Homo sapien
agcctccgcatctggctcgccagca

SEQ ID NO: 1100676 - DNA, 25 bp, Homo sapien
tgcatggtgacgacccccagctcct

SEQ ID NO: 1100677 - DNA, 25 bp, Homo sapien
cgggaagccgggctctatgtatgca

SEQ ID NO: 1100678 - DNA, 25 bp, Homo sapien
gaaaggcgggatgtctggccagctc

SEQ ID NO: 1100679 - DNA, 25 bp, Homo sapien
tagacgaatgcatggaagaagagtt

SEQ ID NO: 1100680 - DNA, 25 bp, Homo sapien
aggagccgatgcacacagtccaggg

SEQ ID NO: 1100681 - DNA, 25 bp, Homo sapien
gaatgacaatgtgttgggatccaat

SEQ ID NO: 1100682 - DNA, 25 bp, Homo sapien
ctgaatgacaatgtgttgggatcca

SEQ ID NO: 1100683 - DNA, 25 bp, Homo sapien
tgaatgacaatgtgttgggatccaa

SEQ ID NO: 1100684 - DNA, 25 bp, Homo sapien
aatgacaatgtgttgggatccaatt

SEQ ID NO: 1100685 - DNA, 25 bp, Homo sapien
ttttgacttttatccatgatgtatg

SEQ ID NO: 1100686 - DNA, 25 bp, Homo sapien
caccagacccatgaggagatgatga

SEQ ID NO: 1100687 - DNA, 25 bp, Homo sapien
cccagacctcaatgccaccatggct

SEQ ID NO: 1100688 - DNA, 25 bp, Homo sapien
ttttatccatgatgtatgatgtctg

SEQ ID NO: 1100689 - DNA, 25 bp, Homo sapien
taagtgcctggcgaaatggctccca

SEQ ID NO: 1100690 - DNA, 25 bp, Homo sapien
cagatatgccttctaacaagcaggc

SEQ ID NO: 1100691 - DNA, 25 bp, Homo sapien
tttactgcatacaaagaagcgttgc

SEQ ID NO: 1100692 - DNA, 25 bp, Homo sapien
caagttcatagtaagtgtgcccagc

SEQ ID NO: 1100693 - DNA, 25 bp, Homo sapien
caaaggtccgtgaaccatatcttaa

SEQ ID NO: 1100694 - DNA, 25 bp, Homo sapien
atggctttgcaccacatccaaaggt

SEQ ID NO: 1100695 - DNA, 25 bp, Homo sapien
tttcttcagaaagccccaagcatgg

SEQ ID NO: 1100696 - DNA, 25 bp, Homo sapien
aagccccaagcatggctttgcacca

SEQ ID NO: 1100697 - DNA, 25 bp, Homo sapien
cagtagtccaatgtgtgtgcctaga

SEQ ID NO: 1100698 - DNA, 25 bp, Homo sapien
tcaccaatggttttattcaggcaca

SEQ ID NO: 1100699 - DNA, 25 bp, Homo sapien
tcccagtcttgtggagaaagccagg

SEQ ID NO: 1100700 - DNA, 25 bp, Homo sapien
gactatatgccagcctttaagaaaa

SEQ ID NO: 1100701 - DNA, 25 bp, Homo sapien
gaattcgatatagcaaccctgggtg

SEQ ID NO: 1100702 - DNA, 25 bp, Homo sapien
tgaactgacctctagaaacatgaat

SEQ ID NO: 1100703 - DNA, 25 bp, Homo sapien
gtcatgtgacaacattggacccaca

SEQ ID NO: 1100704 - DNA, 25 bp, Homo sapien
ggtttagcctctctggataggacag

SEQ ID NO: 1100705 - DNA, 25 bp, Homo sapien
aagtcactttggctgagttttctag

SEQ ID NO: 1100706 - DNA, 25 bp, Homo sapien
gggaggcagaatccagaaatgtagc

SEQ ID NO: 1100707 - DNA, 25 bp, Homo sapien
gctgaagtgtctgagtctgaagtca

SEQ ID NO: 1100708 - DNA, 25 bp, Homo sapien
aggccttggcaactggtgactgctg

SEQ ID NO: 1100709 - DNA, 25 bp, Homo sapien
ccatacttggcgacttttatctgca

SEQ ID NO: 1100710 - DNA, 25 bp, Homo sapien
tgtcagtctctgctaatgcaacaag

SEQ ID NO: 1100711 - DNA, 25 bp, Homo sapien
ggacagctgcactctctgcgtttga

SEQ ID NO: 1100712 - DNA, 25 bp, Homo sapien
gcaacaagacttacatccctaatga

SEQ ID NO: 1100713 - DNA, 25 bp, Homo sapien
acagcagcaacaactctgtgactaa

SEQ ID NO: 1100714 - DNA, 25 bp, Homo sapien
cagcagcaacaactctgtgactaac

SEQ ID NO: 1100715 - DNA, 25 bp, Homo sapien
ctgtgagaggttagggggcatgacg

SEQ ID NO: 1100716 - DNA, 25 bp, Homo sapien
gagaggttagggggcatgacgaaca

SEQ ID NO: 1100717 - DNA, 25 bp, Homo sapien
tgagaggttagggggcatgacgaac

SEQ ID NO: 1100718 - DNA, 25 bp, Homo sapien
tgtgagaggttagggggcatgacga

SEQ ID NO: 1100719 - DNA, 25 bp, Homo sapien
tatggggtacttctaagtgccaagc

SEQ ID NO: 1100720 - DNA, 25 bp, Homo sapien
cctctccgttgattggttcctcctt

SEQ ID NO: 1100721 - DNA, 25 bp, Homo sapien
cccttttagagttgtcgctcccgct

SEQ ID NO: 1100722 - DNA, 25 bp, Homo sapien
tccttctgttggaatgctagacccc

SEQ ID NO: 1100723 - DNA, 25 bp, Homo sapien
gagtagaatcaacccagctctagga

SEQ ID NO: 1100724 - DNA, 25 bp, Homo sapien
gctttgggctctaggagtaggtcct

SEQ ID NO: 1100725 - DNA, 25 bp, Homo sapien
aaaggaggtccagcataaccaagac

SEQ ID NO: 1100726 - DNA, 25 bp, Homo sapien
tattccactaaggtccaatcagagt

SEQ ID NO: 1100727 - DNA, 25 bp, Homo sapien
tgacagagagacttgggaagcgccc

SEQ ID NO: 1100728 - DNA, 25 bp, Homo sapien
gatccactttcactagggctcagag

SEQ ID NO: 1100729 - DNA, 25 bp, Homo sapien
tcccattattctggagcaggtcctt

SEQ ID NO: 1100730 - DNA, 25 bp, Homo sapien
taactaagaggataagaagccacca

SEQ ID NO: 1100731 - DNA, 25 bp, Homo sapien
taaagctttccgaggttggctcagc

SEQ ID NO: 1100732 - DNA, 25 bp, Homo sapien
cctgtaggaaggcagtccatgtcat

SEQ ID NO: 1100733 - DNA, 25 bp, Homo sapien
cataaatctgaagacccctcgggtt

SEQ ID NO: 1100734 - DNA, 25 bp, Homo sapien
gaaattgggcttccatgcacgagtg

SEQ ID NO: 1100735 - DNA, 25 bp, Homo sapien
atcaaaagccggctttggtctttca

SEQ ID NO: 1100736 - DNA, 25 bp, Homo sapien
gatccaagtgacagggtgtcatgga

SEQ ID NO: 1100737 - DNA, 25 bp, Homo sapien
caaaagccggctttggtctttcatc

SEQ ID NO: 1100738 - DNA, 25 bp, Homo sapien
ctggatccaagtgacagggtgtcat

SEQ ID NO: 1100739 - DNA, 25 bp, Homo sapien
gagacagccaccctgacagtaatgc

SEQ ID NO: 1100740 - DNA, 25 bp, Homo sapien
gaggctcttgactgccctcctgtat

SEQ ID NO: 1100741 - DNA, 25 bp, Homo sapien
caagacgagcaataaggagacagcc

SEQ ID NO: 1100742 - DNA, 25 bp, Homo sapien
ctcgcagcatagtgacagttgcaag

SEQ ID NO: 1100743 - DNA, 25 bp, Homo sapien
tggaacactgccagacacctagaga

SEQ ID NO: 1100744 - DNA, 25 bp, Homo sapien
tagagagcattcaataggccgtcgt

SEQ ID NO: 1100745 - DNA, 25 bp, Homo sapien
acttaagaaggcgtgcagactgcaa

SEQ ID NO: 1100746 - DNA, 25 bp, Homo sapien
cagtccagtctgacaggtgaagccc

SEQ ID NO: 1100747 - DNA, 25 bp, Homo sapien
ctcctgggctgtctgcggattccta

SEQ ID NO: 1100748 - DNA, 25 bp, Homo sapien
gctgtctgcggattcctactccagt

SEQ ID NO: 1100749 - DNA, 25 bp, Homo sapien
gtgttcctaatacaacctgagtttc

SEQ ID NO: 1100750 - DNA, 25 bp, Homo sapien
cctggctcgtgttcctaatacaacc

SEQ ID NO: 1100751 - DNA, 25 bp, Homo sapien
gaatacctctccaggcattctcatg

SEQ ID NO: 1100752 - DNA, 25 bp, Homo sapien
caccttcacaccagcatttgtgtag

SEQ ID NO: 1100753 - DNA, 25 bp, Homo sapien
tgcgttacacttaatacaagaatac

SEQ ID NO: 1100754 - DNA, 25 bp, Homo sapien
caagaatacctctccaggcattctc

SEQ ID NO: 1100755 - DNA, 25 bp, Homo sapien
aagtttatcagtcaggcccaagaag

SEQ ID NO: 1100756 - DNA, 25 bp, Homo sapien
tttatcagtcaggcccaagaagcta

SEQ ID NO: 1100757 - DNA, 25 bp, Homo sapien
gtttatcagtcaggcccaagaagct

SEQ ID NO: 1100758 - DNA, 25 bp, Homo sapien
agtttatcagtcaggcccaagaagc

SEQ ID NO: 1100759 - DNA, 25 bp, Homo sapien
tgctgggtccaagccagatcattta

SEQ ID NO: 1100760 - DNA, 25 bp, Homo sapien
acctgctgggtccaagccagatcat

SEQ ID NO: 1100761 - DNA, 25 bp, Homo sapien
caagccagatcatttagcatctgga

SEQ ID NO: 1100762 - DNA, 25 bp, Homo sapien
gggtccaagccagatcatttagcat

SEQ ID NO: 1100763 - DNA, 25 bp, Homo sapien
taaagataacagaactctcctctgg

SEQ ID NO: 1100764 - DNA, 25 bp, Homo sapien
cccttgtatgaataagagtgtagcc

SEQ ID NO: 1100765 - DNA, 25 bp, Homo sapien
catgagtccggcacagttggaggac

SEQ ID NO: 1100766 - DNA, 25 bp, Homo sapien
tgataggcttgtcccctaagtggac

SEQ ID NO: 1100767 - DNA, 25 bp, Homo sapien
gggaaaacgcaatcatcggctaacc

SEQ ID NO: 1100768 - DNA, 25 bp, Homo sapien
gaacaaattatccaaaccgtctgag

SEQ ID NO: 1100769 - DNA, 25 bp, Homo sapien
tttaaagagaataggagggctggtc

SEQ ID NO: 1100770 - DNA, 25 bp, Homo sapien
taaatggcatgaccagctaagacag

SEQ ID NO: 1100771 - DNA, 25 bp, Homo sapien
cagaagataagtgaagccaagttca

SEQ ID NO: 1100772 - DNA, 25 bp, Homo sapien
ctgcatggttgtggtacagaagata

SEQ ID NO: 1100773 - DNA, 25 bp, Homo sapien
ggtacagaagataagtgaagccaag

SEQ ID NO: 1100774 - DNA, 25 bp, Homo sapien
atggttgtggtacagaagataagtg

SEQ ID NO: 1100775 - DNA, 25 bp, Homo sapien
tgtaaacaaaggagttgaatatccg

SEQ ID NO: 1100776 - DNA, 25 bp, Homo sapien
agtgtaaacaaaggagttgaatatc

SEQ ID NO: 1100777 - DNA, 25 bp, Homo sapien
tttctcagtgtaaacaaaggagttg

SEQ ID NO: 1100778 - DNA, 25 bp, Homo sapien
tgagattttctcagtgtaaacaaag

SEQ ID NO: 1100779 - DNA, 25 bp, Homo sapien
gctctttgattctgtatcccacact

SEQ ID NO: 1100780 - DNA, 25 bp, Homo sapien
cagagtcttgcttggaccttgagtt

SEQ ID NO: 1100781 - DNA, 25 bp, Homo sapien
ccttactgaggctgtccaaaaaaga

SEQ ID NO: 1100782 - DNA, 25 bp, Homo sapien
ccatctcaaaagatgaggctctttg

SEQ ID NO: 1100783 - DNA, 25 bp, Homo sapien
ccctaaagaagcagtaccagtccct

SEQ ID NO: 1100784 - DNA, 25 bp, Homo sapien
cagtaccagtcccttcatttgtttc

SEQ ID NO: 1100785 - DNA, 25 bp, Homo sapien
ctgccctgccgcaaggcccccgctg

SEQ ID NO: 1100786 - DNA, 25 bp, Homo sapien
tgcaacacccattccccctaaagaa

SEQ ID NO: 1100787 - DNA, 25 bp, Homo sapien
aatagcccatccaacagagaaacag

SEQ ID NO: 1100788 - DNA, 25 bp, Homo sapien
ggagatgcagtagggccagtctgaa

SEQ ID NO: 1100789 - DNA, 25 bp, Homo sapien
gatgtgagggaatagcccatccaac

SEQ ID NO: 1100790 - DNA, 25 bp, Homo sapien
ggagacttcagggtagtctgacaga

SEQ ID NO: 1100791 - DNA, 25 bp, Homo sapien
gaaatcgaggctcagtggtttgccc

SEQ ID NO: 1100792 - DNA, 25 bp, Homo sapien
gaagaaaaatgtgaactctcccaga

SEQ ID NO: 1100793 - DNA, 25 bp, Homo sapien
tggtttgcccaagctcgtgctgagt

SEQ ID NO: 1100794 - DNA, 25 bp, Homo sapien
gattccaatggactgacttgcccaa

SEQ ID NO: 1100795 - DNA, 25 bp, Homo sapien
ggtgacacactatggaaacctcatc

SEQ ID NO: 1100796 - DNA, 25 bp, Homo sapien
cagcaagcataacagaacctcagag

SEQ ID NO: 1100797 - DNA, 25 bp, Homo sapien
caataaactgaagaggaccgaaggg

SEQ ID NO: 1100798 - DNA, 25 bp, Homo sapien
gaatctctgttagcacgccaaccaa

SEQ ID NO: 1100799 - DNA, 25 bp, Homo sapien
ttaggtgagccgtataggatgcttc

SEQ ID NO: 1100800 - DNA, 25 bp, Homo sapien
tacaacttgcttgttccgattgacc

SEQ ID NO: 1100801 - DNA, 25 bp, Homo sapien
tgaccacatccaagtaacggttgaa

SEQ ID NO: 1100802 - DNA, 25 bp, Homo sapien
catcatggaaggtgggatagtacag

SEQ ID NO: 1100803 - DNA, 25 bp, Homo sapien
taacagtagtagaaagtcgatcaca

SEQ ID NO: 1100804 - DNA, 25 bp, Homo sapien
tgaaggcccggctattaacagtagt

SEQ ID NO: 1100805 - DNA, 25 bp, Homo sapien
ttaagtctcgtcctggattgaaggc

SEQ ID NO: 1100806 - DNA, 25 bp, Homo sapien
tagacacattggtattaaagttccc

SEQ ID NO: 1100807 - DNA, 25 bp, Homo sapien
tgcaatgttaccaagatcgaagttt

SEQ ID NO: 1100808 - DNA, 25 bp, Homo sapien
cccgtgaatcccgtttctcaatgaa

SEQ ID NO: 1100809 - DNA, 25 bp, Homo sapien
ctcaatgaagactgcaatgttacca

SEQ ID NO: 1100810 - DNA, 25 bp, Homo sapien
atcgaagtttgcgacttcaaatgct

SEQ ID NO: 1100811 - DNA, 25 bp, Homo sapien
tctaaggcccacctgtacatcctat

SEQ ID NO: 1100812 - DNA, 25 bp, Homo sapien
tctgaagtcagtgtaatagggtcgt

SEQ ID NO: 1100813 - DNA, 25 bp, Homo sapien
gatgaagccacaacaatcgacagcc

SEQ ID NO: 1100814 - DNA, 25 bp, Homo sapien
gctgaagcaattgggcataaaaagg

SEQ ID NO: 1100815 - DNA, 25 bp, Homo sapien
ggagatactgcagctcagttctcga

SEQ ID NO: 1100816 - DNA, 25 bp, Homo sapien
gagatactgcagctcagttctcgac

SEQ ID NO: 1100817 - DNA, 25 bp, Homo sapien
ttggagatactgcagctcagttctc

SEQ ID NO: 1100818 - DNA, 25 bp, Homo sapien
gatactgcagctcagttctcgaccc

SEQ ID NO: 1100819 - DNA, 25 bp, Homo sapien
acaatgactcgtattaggtcaaaat

SEQ ID NO: 1100820 - DNA, 25 bp, Homo sapien
ggacaatgactcgtattaggtcaaa

SEQ ID NO: 1100821 - DNA, 25 bp, Homo sapien
gtggacaatgactcgtattaggtca

SEQ ID NO: 1100822 - DNA, 25 bp, Homo sapien
tggacaatgactcgtattaggtcaa

SEQ ID NO: 1100823 - DNA, 25 bp, Homo sapien
tcccatccgtttgcttcacttcttt

SEQ ID NO: 1100824 - DNA, 25 bp, Homo sapien
tgactttctgcaggaacactttaga

SEQ ID NO: 1100825 - DNA, 25 bp, Homo sapien
tctttgagagggcagacatagacat

SEQ ID NO: 1100826 - DNA, 25 bp, Homo sapien
gctagatttggtcagcggtcctcta

SEQ ID NO: 1100827 - DNA, 25 bp, Homo sapien
cttcagtctggtacagtgatcgacc

SEQ ID NO: 1100828 - DNA, 25 bp, Homo sapien
aagatgaccaatgtgcaagaggagg

SEQ ID NO: 1100829 - DNA, 25 bp, Homo sapien
tacagagaagggctatggaaatcca

SEQ ID NO: 1100830 - DNA, 25 bp, Homo sapien
gctaggcgccttctacaaagtatgg

SEQ ID NO: 1100831 - DNA, 25 bp, Homo sapien
taagagcttgcgtgaggtacagaga

SEQ ID NO: 1100832 - DNA, 25 bp, Homo sapien
ttgcaatgaaggaaacagcatacat

SEQ ID NO: 1100833 - DNA, 25 bp, Homo sapien
tttgcaatgaaggaaacagcataca

SEQ ID NO: 1100834 - DNA, 25 bp, Homo sapien
gaaatattgccacttaattccaggg

SEQ ID NO: 1100835 - DNA, 25 bp, Homo sapien
ccttacaccggaacttgtgtgctgg

SEQ ID NO: 1100836 - DNA, 25 bp, Homo sapien
tccagggttggatttcaggttgtct

SEQ ID NO: 1100837 - DNA, 25 bp, Homo sapien
tactgcggtgttcgtagctgccctt

SEQ ID NO: 1100838 - DNA, 25 bp, Homo sapien
cttgtcatgttcatcgatggcgctg

SEQ ID NO: 1100839 - DNA, 25 bp, Homo sapien
tactatgtgctttgactgcggccgg

SEQ ID NO: 1100840 - DNA, 25 bp, Homo sapien
cgtggtccagaatcactactatgtg

SEQ ID NO: 1100841 - DNA, 25 bp, Homo sapien
gatgacctgagcagcgtccttggca

SEQ ID NO: 1100842 - DNA, 25 bp, Homo sapien
tcttatagcactggtctagtgagca

SEQ ID NO: 1100843 - DNA, 25 bp, Homo sapien
aagtccggacggtatctgccacagt

SEQ ID NO: 1100844 - DNA, 25 bp, Homo sapien
tggagacaagaaggtcttatagcac

SEQ ID NO: 1100845 - DNA, 25 bp, Homo sapien
tctagtgagcaagtccggacggtat

SEQ ID NO: 1100846 - DNA, 25 bp, Homo sapien
cttttggaatcccactgcgtgctgg

SEQ ID NO: 1100847 - DNA, 25 bp, Homo sapien
tattgtttgtacttcgaatcagctg

SEQ ID NO: 1100848 - DNA, 25 bp, Homo sapien
tgtttgtacttcgaatcagctgaaa

SEQ ID NO: 1100849 - DNA, 25 bp, Homo sapien
tgccttttggaatcccactgcgtgc

SEQ ID NO: 1100850 - DNA, 25 bp, Homo sapien
gatcaaggcaagaattcctgctgcc

SEQ ID NO: 1100851 - DNA, 25 bp, Homo sapien
tgcccacttcacgtccacatgtgca

SEQ ID NO: 1100852 - DNA, 25 bp, Homo sapien
tgtgcacaagcagacttccactcca

SEQ ID NO: 1100853 - DNA, 25 bp, Homo sapien
ctgacaatcagcattagaaaggatg

SEQ ID NO: 1100854 - DNA, 25 bp, Homo sapien
tgcggcaggcaacctcaaacttggt

SEQ ID NO: 1100855 - DNA, 25 bp, Homo sapien
tataatgactagaatgcggcagagg

SEQ ID NO: 1100856 - DNA, 25 bp, Homo sapien
gaggttgctctaaagtgactgcggc

SEQ ID NO: 1100857 - DNA, 25 bp, Homo sapien
taagcagtcctatggagaggcaagg

SEQ ID NO: 1100858 - DNA, 25 bp, Homo sapien
ccagctgacaggtaaatgatgacca

SEQ ID NO: 1100859 - DNA, 25 bp, Homo sapien
gagggcataggtgagaatcattaca

SEQ ID NO: 1100860 - DNA, 25 bp, Homo sapien
tcttcttccgaagagtcctttgatg

SEQ ID NO: 1100861 - DNA, 25 bp, Homo sapien
tcttcattgatgacttggagagtcg

SEQ ID NO: 1100862 - DNA, 25 bp, Homo sapien
gaaaactgtgctgcactcagactag

SEQ ID NO: 1100863 - DNA, 25 bp, Homo sapien
caatgtattaacaggcggagagata

SEQ ID NO: 1100864 - DNA, 25 bp, Homo sapien
caatgggcctaaagatgtcatggga

SEQ ID NO: 1100865 - DNA, 25 bp, Homo sapien
agatggccactttgaatactgaggg

SEQ ID NO: 1100866 - DNA, 25 bp, Homo sapien
gtctggcacaccgtacttccctgaa

SEQ ID NO: 1100867 - DNA, 25 bp, Homo sapien
tttgtgtagaacctgcccactgtgg

SEQ ID NO: 1100868 - DNA, 25 bp, Homo sapien
tgtggtctccaggttgctcaactga

SEQ ID NO: 1100869 - DNA, 25 bp, Homo sapien
gaagacggcttcatcaatcatccgg

SEQ ID NO: 1100870 - DNA, 25 bp, Homo sapien
caaagagtcttggtaatacgtcacg

SEQ ID NO: 1100871 - DNA, 25 bp, Homo sapien
caaaataacagggtttactcacagt

SEQ ID NO: 1100872 - DNA, 25 bp, Homo sapien
cgtcacgtcttcaagaatgtaagcc

SEQ ID NO: 1100873 - DNA, 25 bp, Homo sapien
tctatgagaaaagtataggaagcca

SEQ ID NO: 1100874 - DNA, 25 bp, Homo sapien
ggtagcctcagtatctgttgtcctc

SEQ ID NO: 1100875 - DNA, 25 bp, Homo sapien
tagcctcagtatctgttgtcctcct

SEQ ID NO: 1100876 - DNA, 25 bp, Homo sapien
cctcagtatctgttgtcctcctctt

SEQ ID NO: 1100877 - DNA, 25 bp, Homo sapien
gcctcagtatctgttgtcctcctct

SEQ ID NO: 1100878 - DNA, 25 bp, Homo sapien
taagagatgggtgcataagtgtata

SEQ ID NO: 1100879 - DNA, 25 bp, Homo sapien
ggatattttgccgaactaattcaaa

SEQ ID NO: 1100880 - DNA, 25 bp, Homo sapien
aatgtatgatgtcagtatgaagtgg

SEQ ID NO: 1100881 - DNA, 25 bp, Homo sapien
taaatatggcctggtaagagatggg

SEQ ID NO: 1100882 - DNA, 25 bp, Homo sapien
taacattgtaggcttcctttccagt

SEQ ID NO: 1100883 - DNA, 25 bp, Homo sapien
ggatgagttcacagggactgcgata

SEQ ID NO: 1100884 - DNA, 25 bp, Homo sapien
catcttccaggcatagctaacattg

SEQ ID NO: 1100885 - DNA, 25 bp, Homo sapien
tctcagcttgtttatgtgccaagac

SEQ ID NO: 1100886 - DNA, 25 bp, Homo sapien
gatccagccggtggtacagcagctt

SEQ ID NO: 1100887 - DNA, 25 bp, Homo sapien
gggaacagtgttgaggttcttcagt

SEQ ID NO: 1100888 - DNA, 25 bp, Homo sapien
ggttgtatcaccacaatacacagaa

SEQ ID NO: 1100889 - DNA, 25 bp, Homo sapien
gctgtttgaagtggaggcaagcact

SEQ ID NO: 1100890 - DNA, 25 bp, Homo sapien
gggtggatggtattcaaaaggatat

SEQ ID NO: 1100891 - DNA, 25 bp, Homo sapien
cagctgactctgcaggcattcagta

SEQ ID NO: 1100892 - DNA, 25 bp, Homo sapien
tgctagacgatctgatttgaggcca

SEQ ID NO: 1100893 - DNA, 25 bp, Homo sapien
ggccaggcttcaaatcgttttcata

SEQ ID NO: 1100894 - DNA, 25 bp, Homo sapien
tagaccacgaatgcctagtatgtgt

SEQ ID NO: 1100895 - DNA, 25 bp, Homo sapien
ggtttggtgacaacatagaccacga

SEQ ID NO: 1100896 - DNA, 25 bp, Homo sapien
cagttggccagttgtgtgatgattc

SEQ ID NO: 1100897 - DNA, 25 bp, Homo sapien
caaatcaatcacatgtcaactcagg

SEQ ID NO: 1100898 - DNA, 25 bp, Homo sapien
aacagttcccaattaggagccagga

SEQ ID NO: 1100899 - DNA, 25 bp, Homo sapien
tgtcttgtctcctggtagcctggtg

SEQ ID NO: 1100900 - DNA, 25 bp, Homo sapien
cggtgccacactgcaagatgtagca

SEQ ID NO: 1100901 - DNA, 25 bp, Homo sapien
taatctgtagaaatagcttgaggcc

SEQ ID NO: 1100902 - DNA, 25 bp, Homo sapien
cagtcctaagaatgaaccagtaaag

SEQ ID NO: 1100903 - DNA, 25 bp, Homo sapien
gaaaccagtctggattaaagccatt

SEQ ID NO: 1100904 - DNA, 25 bp, Homo sapien
gcccggcggcggcttaatatctaaa

SEQ ID NO: 1100905 - DNA, 25 bp, Homo sapien
catgcgccaataaacacaagtgctg

SEQ ID NO: 1100906 - DNA, 25 bp, Homo sapien
tgagataggcggtgtagtgctctac

SEQ ID NO: 1100907 - DNA, 25 bp, Homo sapien
tctaccatgcgctttgtctctggct

SEQ ID NO: 1100908 - DNA, 25 bp, Homo sapien
ttgaggcccgggttagcaatgaggc

SEQ ID NO: 1100909 - DNA, 25 bp, Homo sapien
caatgaggcgggtgttgtcgctgag

SEQ ID NO: 1100910 - DNA, 25 bp, Homo sapien
tccatgtggcccacggggcttcttc

SEQ ID NO: 1100911 - DNA, 25 bp, Homo sapien
tgcttctaaggcctgtaacagattc

SEQ ID NO: 1100912 - DNA, 25 bp, Homo sapien
tagtctctaaatcacatccctctaa

SEQ ID NO: 1100913 - DNA, 25 bp, Homo sapien
cacatccctctaacatcactggaaa

SEQ ID NO: 1100914 - DNA, 25 bp, Homo sapien
cattgggtgttgctatgtaacggcg

SEQ ID NO: 1100915 - DNA, 25 bp, Homo sapien
tcctagtgggatcaaatgctttgtc

SEQ ID NO: 1100916 - DNA, 25 bp, Homo sapien
tgctttgtccatgagggaaccagga

SEQ ID NO: 1100917 - DNA, 25 bp, Homo sapien
gataaattctgaggacgccattggg

SEQ ID NO: 1100918 - DNA, 25 bp, Homo sapien
ctggatgaatgaattgtgtgactga

SEQ ID NO: 1100919 - DNA, 25 bp, Homo sapien
tggattagctactgcatggagatac

SEQ ID NO: 1100920 - DNA, 25 bp, Homo sapien
ccaacatctaagtaaggaccagtca

SEQ ID NO: 1100921 - DNA, 25 bp, Homo sapien
gattgtcacaacataaccagctcct

SEQ ID NO: 1100922 - DNA, 25 bp, Homo sapien
tctaagccttggtgcgcgtactctt

SEQ ID NO: 1100923 - DNA, 25 bp, Homo sapien
cataaacatcatcatggctgccaag

SEQ ID NO: 1100924 - DNA, 25 bp, Homo sapien
gttactaggaatacaagtgtgcccc

SEQ ID NO: 1100925 - DNA, 25 bp, Homo sapien
gaaagctacggaattgaaggtgaca

SEQ ID NO: 1100926 - DNA, 25 bp, Homo sapien
gaagtatctgagtgtgaagtcaatg

SEQ ID NO: 1100927 - DNA, 25 bp, Homo sapien
tgtgaagtcaatgcccatcacagcc

SEQ ID NO: 1100928 - DNA, 25 bp, Homo sapien
ataggtccatcagaactttgtagaa

SEQ ID NO: 1100929 - DNA, 25 bp, Homo sapien
catcttggttacagacaggtaatag

SEQ ID NO: 1100930 - DNA, 25 bp, Homo sapien
ccatgaggtggaactaagaaagcta

SEQ ID NO: 1100931 - DNA, 25 bp, Homo sapien
tcaaaagtcctacccaagagtcctc

SEQ ID NO: 1100932 - DNA, 25 bp, Homo sapien
tagtaccaaagatatgggaagcctc

SEQ ID NO: 1100933 - DNA, 25 bp, Homo sapien
gggtatgcccttgctttgatcagac

SEQ ID NO: 1100934 - DNA, 25 bp, Homo sapien
tcttgctagccctgaaacaaactgc

SEQ ID NO: 1100935 - DNA, 25 bp, Homo sapien
tccgagtaagatggactcagacctt

SEQ ID NO: 1100936 - DNA, 25 bp, Homo sapien
aatgcgctcacccagtccgagtaag

SEQ ID NO: 1100937 - DNA, 25 bp, Homo sapien
catgatttttgaggttgcgggtcac

SEQ ID NO: 1100938 - DNA, 25 bp, Homo sapien
gggtgcgccaccagataacccctgt

SEQ ID NO: 1100939 - DNA, 25 bp, Homo sapien
tgctccacaggtgcatgtcctttgg

SEQ ID NO: 1100940 - DNA, 25 bp, Homo sapien
atgtcctttggggtcgatgagagtc

SEQ ID NO: 1100941 - DNA, 25 bp, Homo sapien
ggtcgatgagagtcgggtgcgccac

SEQ ID NO: 1100942 - DNA, 25 bp, Homo sapien
tgtcactgaagctgttgcacaggtt

SEQ ID NO: 1100943 - DNA, 25 bp, Homo sapien
gttgaggatatcatttgctaccagg

SEQ ID NO: 1100944 - DNA, 25 bp, Homo sapien
gctggtgttgaatttataaaacctc

SEQ ID NO: 1100945 - DNA, 25 bp, Homo sapien
acctctggaccgttctgtcactgaa

SEQ ID NO: 1100946 - DNA, 25 bp, Homo sapien
gttcctgggatccttgctaatctgt

SEQ ID NO: 1100947 - DNA, 25 bp, Homo sapien
caacaaacgcgttggttcctgggat

SEQ ID NO: 1100948 - DNA, 25 bp, Homo sapien
caagagagtcgcaggtttcgttgac

SEQ ID NO: 1100949 - DNA, 25 bp, Homo sapien
cagtggctgccatgcacaaggttcg

SEQ ID NO: 1100950 - DNA, 25 bp, Homo sapien
cattggtgaggttgccagtgcactc

SEQ ID NO: 1100951 - DNA, 25 bp, Homo sapien
tctgcattggtgaggttgccagtgc

SEQ ID NO: 1100952 - DNA, 25 bp, Homo sapien
gcactcattgacctctagagggcac

SEQ ID NO: 1100953 - DNA, 25 bp, Homo sapien
tctagagggcactcacaaggacatt

SEQ ID NO: 1100954 - DNA, 25 bp, Homo sapien
gaattctggctcactgaacagttag

SEQ ID NO: 1100955 - DNA, 25 bp, Homo sapien
gcataacgtactcaacacatggtag

SEQ ID NO: 1100956 - DNA, 25 bp, Homo sapien
aaacacttgcatatttatcacaggg

SEQ ID NO: 1100957 - DNA, 25 bp, Homo sapien
tggcactacggagcttgaattctgg

SEQ ID NO: 1100958 - DNA, 25 bp, Homo sapien
tagctgtgtatgtcaccggctcctg

SEQ ID NO: 1100959 - DNA, 25 bp, Homo sapien
gcaggccagggtcaatagctgtgta

SEQ ID NO: 1100960 - DNA, 25 bp, Homo sapien
gccagggtcaatagctgtgtatgtc

SEQ ID NO: 1100961 - DNA, 25 bp, Homo sapien
gtatgtcaccggctcctggtggacc

SEQ ID NO: 1100962 - DNA, 25 bp, Homo sapien
aatccccccgaagcattctttctgg

SEQ ID NO: 1100963 - DNA, 25 bp, Homo sapien
tattgctcccatgtcatcaacgtag

SEQ ID NO: 1100964 - DNA, 25 bp, Homo sapien
accattcacaatccagcaccccaaa

SEQ ID NO: 1100965 - DNA, 25 bp, Homo sapien
catcaacgtagggacttttggctcc

SEQ ID NO: 1100966 - DNA, 25 bp, Homo sapien
cgtacacggccctgtgcttctgaca

SEQ ID NO: 1100967 - DNA, 25 bp, Homo sapien
gaaaccagtccttatatttatcaga

SEQ ID NO: 1100968 - DNA, 25 bp, Homo sapien
ccagttctgaaggtaattatctgcc

SEQ ID NO: 1100969 - DNA, 25 bp, Homo sapien
gctggcgtgcatatccaaacagact

SEQ ID NO: 1100970 - DNA, 25 bp, Homo sapien
cttcagtgaaagagcaagaagatgt

SEQ ID NO: 1100971 - DNA, 25 bp, Homo sapien
ttcagtgaaagagcaagaagatgtt

SEQ ID NO: 1100972 - DNA, 25 bp, Homo sapien
tcagtgaaagagcaagaagatgttt

SEQ ID NO: 1100973 - DNA, 25 bp, Homo sapien
taatcatgtttaatgtgatcacctc

SEQ ID NO: 1100974 - DNA, 25 bp, Homo sapien
gacatatgctgatggctccggcgat

SEQ ID NO: 1100975 - DNA, 25 bp, Homo sapien
caggaccaagaccatgatgcatccc

SEQ ID NO: 1100976 - DNA, 25 bp, Homo sapien
aatctggtggcggtaggcatacacc

SEQ ID NO: 1100977 - DNA, 25 bp, Homo sapien
cactgggggctaatgctggtaagga

SEQ ID NO: 1100978 - DNA, 25 bp, Homo sapien
aaatagagcttgtagggtttaggca

SEQ ID NO: 1100979 - DNA, 25 bp, Homo sapien
gggctaatgctggtaaggagaggat

SEQ ID NO: 1100980 - DNA, 25 bp, Homo sapien
gatccagggatttttccggggatca

SEQ ID NO: 1100981 - DNA, 25 bp, Homo sapien
ccaggttggacatacgcactgacat

SEQ ID NO: 1100982 - DNA, 25 bp, Homo sapien
tgtcttcgtggctgtcgtcgtccct

SEQ ID NO: 1100983 - DNA, 25 bp, Homo sapien
ggctgtcgtcgtccctttcatctct

SEQ ID NO: 1100984 - DNA, 25 bp, Homo sapien
ctccaggttggacatacgcactgac

SEQ ID NO: 1100985 - DNA, 25 bp, Homo sapien
tgatcgaccccagtagcggcgcctt

SEQ ID NO: 1100986 - DNA, 25 bp, Homo sapien
gactgtgtgcatgtcgttcgatgac

SEQ ID NO: 1100987 - DNA, 25 bp, Homo sapien
ccgcagctataaaccgagtgttgct

SEQ ID NO: 1100988 - DNA, 25 bp, Homo sapien
ttctgttcctgatcgaccccagtag

SEQ ID NO: 1100989 - DNA, 25 bp, Homo sapien
cagctgagagcttcaagacgcagac

SEQ ID NO: 1100990 - DNA, 25 bp, Homo sapien
ttctagggcactgggaggtattcct

SEQ ID NO: 1100991 - DNA, 25 bp, Homo sapien
gaaatctgggcttccgcctgaatgc

SEQ ID NO: 1100992 - DNA, 25 bp, Homo sapien
tgaatgcctgaatgtgacgccacaa

SEQ ID NO: 1100993 - DNA, 25 bp, Homo sapien
tgtgtaccgtgacggccgcctgtaa

SEQ ID NO: 1100994 - DNA, 25 bp, Homo sapien
cattctgcatcgacagtgtgtaccg

SEQ ID NO: 1100995 - DNA, 25 bp, Homo sapien
gaacttgtgacttagtagggcagca

SEQ ID NO: 1100996 - DNA, 25 bp, Homo sapien
tcattgttgcatggaggattttcac

SEQ ID NO: 1100997 - DNA, 25 bp, Homo sapien
tccaggtaccgctaagaaacaaagc

SEQ ID NO: 1100998 - DNA, 25 bp, Homo sapien
ccagttaaggagagctgaatgcttc

SEQ ID NO: 1100999 - DNA, 25 bp, Homo sapien
taaccatgtcgacaggcaggaaatg

SEQ ID NO: 1101000 - DNA, 25 bp, Homo sapien
tacagcaactgtggtatccaggtac

SEQ ID NO: 1101001 - DNA, 25 bp, Homo sapien
tctccacattcagtgtggaaaggga

SEQ ID NO: 1101002 - DNA, 25 bp, Homo sapien
cacattcagtgtggaaagggatcat

SEQ ID NO: 1101003 - DNA, 25 bp, Homo sapien
tccacattcagtgtggaaagggatc

SEQ ID NO: 1101004 - DNA, 25 bp, Homo sapien
atctccacattcagtgtggaaaggg

SEQ ID NO: 1101005 - DNA, 25 bp, Homo sapien
aggatggatcttacctgctggcttc

SEQ ID NO: 1101006 - DNA, 25 bp, Homo sapien
ccagataggatggatcttacctgct

SEQ ID NO: 1101007 - DNA, 25 bp, Homo sapien
ataaagatgacagccagataggatg

SEQ ID NO: 1101008 - DNA, 25 bp, Homo sapien
aataaagatgacagccagataggat

SEQ ID NO: 1101009 - DNA, 25 bp, Homo sapien
tgtccatggcatcagtgtcaccctg

SEQ ID NO: 1101010 - DNA, 25 bp, Homo sapien
tggcatcagtgtcaccctgaagctg

SEQ ID NO: 1101011 - DNA, 25 bp, Homo sapien
cagtgtcaccctgaagctgctgaca

SEQ ID NO: 1101012 - DNA, 25 bp, Homo sapien
actgtccatggcatcagtgtcaccc

SEQ ID NO: 1101013 - DNA, 25 bp, Homo sapien
agctgtcttccactggtgcctgtca

SEQ ID NO: 1101014 - DNA, 25 bp, Homo sapien
actccttcagctgtcttccactggt

SEQ ID NO: 1101015 - DNA, 25 bp, Homo sapien
cactccttcagctgtcttccactgg

SEQ ID NO: 1101016 - DNA, 25 bp, Homo sapien
ttcagctgtcttccactggtgcctg

SEQ ID NO: 1101017 - DNA, 25 bp, Homo sapien
cactagcatagacactgtctgctga

SEQ ID NO: 1101018 - DNA, 25 bp, Homo sapien
actagcatagacactgtctgctgaa

SEQ ID NO: 1101019 - DNA, 25 bp, Homo sapien
gattaatacatcagtgggtcaacaa

SEQ ID NO: 1101020 - DNA, 25 bp, Homo sapien
ttttcttgaatacctctgaagttct

SEQ ID NO: 1101021 - DNA, 25 bp, Homo sapien
gtatccttgtgctttacatattcaa

SEQ ID NO: 1101022 - DNA, 25 bp, Homo sapien
gaatgaataactaacttgattggtc

SEQ ID NO: 1101023 - DNA, 25 bp, Homo sapien
tgtacactcatggatcctggagtta

SEQ ID NO: 1101024 - DNA, 25 bp, Homo sapien
atttgctgtagccaagggtgtaggg

SEQ ID NO: 1101025 - DNA, 25 bp, Homo sapien
cactcatggatcctggagttacctc

SEQ ID NO: 1101026 - DNA, 25 bp, Homo sapien
caagggtgtagggtcattttgtaca

SEQ ID NO: 1101027 - DNA, 25 bp, Homo sapien
gcaaggtgcacattacggctgttct

SEQ ID NO: 1101028 - DNA, 25 bp, Homo sapien
aggtgcacattacggctgttcttga

SEQ ID NO: 1101029 - DNA, 25 bp, Homo sapien
aaggtgcacattacggctgttcttg

SEQ ID NO: 1101030 - DNA, 25 bp, Homo sapien
caaggtgcacattacggctgttctt

SEQ ID NO: 1101031 - DNA, 25 bp, Homo sapien
tgccctgagaatgctacactgtgaa

SEQ ID NO: 1101032 - DNA, 25 bp, Homo sapien
ctgagaatgctacactgtgaatggc

SEQ ID NO: 1101033 - DNA, 25 bp, Homo sapien
tgccatggcccaaccaagtagagag

SEQ ID NO: 1101034 - DNA, 25 bp, Homo sapien
aatgccatggcccaaccaagtagag

SEQ ID NO: 1101035 - DNA, 25 bp, Homo sapien
catcatgcatggagcctagcagcag

SEQ ID NO: 1101036 - DNA, 25 bp, Homo sapien
aattttccccatcatgcatggagcc

SEQ ID NO: 1101037 - DNA, 25 bp, Homo sapien
ggagcctagcagcagggctactata

SEQ ID NO: 1101038 - DNA, 25 bp, Homo sapien
gcagcagggctactatattgcacac

SEQ ID NO: 1101039 - DNA, 25 bp, Homo sapien
ttgaacagaaataagccacagcact

SEQ ID NO: 1101040 - DNA, 25 bp, Homo sapien
gaacagaaataagccacagcactcc

SEQ ID NO: 1101041 - DNA, 25 bp, Homo sapien
tgaacagaaataagccacagcactc

SEQ ID NO: 1101042 - DNA, 25 bp, Homo sapien
tttgaacagaaataagccacagcac

SEQ ID NO: 1101043 - DNA, 25 bp, Homo sapien
atttggcttcgagtggagtagcaca

SEQ ID NO: 1101044 - DNA, 25 bp, Homo sapien
aaaacaccaaccctaagcttctctg

SEQ ID NO: 1101045 - DNA, 25 bp, Homo sapien
catttggcttcgagtggagtagcac

SEQ ID NO: 1101046 - DNA, 25 bp, Homo sapien
ttcctctagcttgagcccgatccag

SEQ ID NO: 1101047 - DNA, 25 bp, Homo sapien
aagggttatgttctattctttcact

SEQ ID NO: 1101048 - DNA, 25 bp, Homo sapien
gatccaggctcccagtcatggagtg

SEQ ID NO: 1101049 - DNA, 25 bp, Homo sapien
gagtggaaagggttatgttctattc

SEQ ID NO: 1101050 - DNA, 25 bp, Homo sapien
ccttatgatagttgacttcacttgc

SEQ ID NO: 1101051 - DNA, 25 bp, Homo sapien
cctagaaatttctggagatcattcc

SEQ ID NO: 1101052 - DNA, 25 bp, Homo sapien
tgccatcattcccatgcggggaagg

SEQ ID NO: 1101053 - DNA, 25 bp, Homo sapien
ggagatcattccatcccttatgata

SEQ ID NO: 1101054 - DNA, 25 bp, Homo sapien
cagcgcggcgggcatcgggtccggg

SEQ ID NO: 1101055 - DNA, 25 bp, Homo sapien
tccggggcgccctcgtgcgcttcgg

SEQ ID NO: 1101056 - DNA, 25 bp, Homo sapien
tgcagcgcggcgggcatcgggtccg

SEQ ID NO: 1101057 - DNA, 25 bp, Homo sapien
cgccctcgtgcgcttcggctgaggg

SEQ ID NO: 1101058 - DNA, 25 bp, Homo sapien
caggattttcctgcggttgctcagc

SEQ ID NO: 1101059 - DNA, 25 bp, Homo sapien
tgcggttgctcagctcccgctgcat

SEQ ID NO: 1101060 - DNA, 25 bp, Homo sapien
tttcaccaggattttcctgcggttg

SEQ ID NO: 1101061 - DNA, 25 bp, Homo sapien
tgcatccgctgcagtcgcgcggcga

SEQ ID NO: 1101062 - DNA, 25 bp, Homo sapien
tcagtcaaaccgaggggccgctctc

SEQ ID NO: 1101063 - DNA, 25 bp, Homo sapien
actcggcgccgacccactccccagg

SEQ ID NO: 1101064 - DNA, 25 bp, Homo sapien
ggccgctctcaccactcggcgccga

SEQ ID NO: 1101065 - DNA, 25 bp, Homo sapien
tccccaggaccgctctgaggcgccc

SEQ ID NO: 1101066 - DNA, 25 bp, Homo sapien
taacaatattttaagtcatagtctt

SEQ ID NO: 1101067 - DNA, 25 bp, Homo sapien
ctgttcgtttatttctgtccacata

SEQ ID NO: 1101068 - DNA, 25 bp, Homo sapien
catagtcttttaacaaatcatgaac

SEQ ID NO: 1101069 - DNA, 25 bp, Homo sapien
ttatttctgtccacataacaatatt

SEQ ID NO: 1101070 - DNA, 25 bp, Homo sapien
gaatatcttttttcgcactctacac

SEQ ID NO: 1101071 - DNA, 25 bp, Homo sapien
ctgtgtggccacatgtgttactcaa

SEQ ID NO: 1101072 - DNA, 25 bp, Homo sapien
tgtaaggtagtactccttggggtgc

SEQ ID NO: 1101073 - DNA, 25 bp, Homo sapien
tgtgtggccgctgaatatctttttt

SEQ ID NO: 1101074 - DNA, 25 bp, Homo sapien
ggcttgttccccattcaataaggta

SEQ ID NO: 1101075 - DNA, 25 bp, Homo sapien
catagcctttggaatggccagtaac

SEQ ID NO: 1101076 - DNA, 25 bp, Homo sapien
gaaatgggcacgttggtaatacaca

SEQ ID NO: 1101077 - DNA, 25 bp, Homo sapien
tccattgtgcaaagagtgctgatgc

SEQ ID NO: 1101078 - DNA, 25 bp, Homo sapien
ggcaaaacacaggtttatggacact

SEQ ID NO: 1101079 - DNA, 25 bp, Homo sapien
aaacacaggtttatggacactggaa

SEQ ID NO: 1101080 - DNA, 25 bp, Homo sapien
caaaacacaggtttatggacactgg

SEQ ID NO: 1101081 - DNA, 25 bp, Homo sapien
ctggcaaaacacaggtttatggaca

SEQ ID NO: 1101082 - DNA, 25 bp, Homo sapien
tgctaatgtacttcgccctggcgct

SEQ ID NO: 1101083 - DNA, 25 bp, Homo sapien
cgttgagccgctatcaatgctgcta

SEQ ID NO: 1101084 - DNA, 25 bp, Homo sapien
tgcccttgatggtcataccgtctgc

SEQ ID NO: 1101085 - DNA, 25 bp, Homo sapien
tgcaaagccaccaacgtaactacct

SEQ ID NO: 1101086 - DNA, 25 bp, Homo sapien
aatggagaacggacaaggacaactg

SEQ ID NO: 1101087 - DNA, 25 bp, Homo sapien
tgagattaaaatgagctggccttac

SEQ ID NO: 1101088 - DNA, 25 bp, Homo sapien
cacatactgcgaaattgagagggag

SEQ ID NO: 1101089 - DNA, 25 bp, Homo sapien
gaaggtgatgcatccaagaaactga

SEQ ID NO: 1101090 - DNA, 25 bp, Homo sapien
agtaagcccttttgattactgtgca

SEQ ID NO: 1101091 - DNA, 25 bp, Homo sapien
gctctggaagtaagcccttttgatt

SEQ ID NO: 1101092 - DNA, 25 bp, Homo sapien
ttaacagctcgtccacataactggg

SEQ ID NO: 1101093 - DNA, 25 bp, Homo sapien
tagaagaacttgcaacatggcaggg

SEQ ID NO: 1101094 - DNA, 25 bp, Homo sapien
gtggaacacaagaacatagataagg

SEQ ID NO: 1101095 - DNA, 25 bp, Homo sapien
ggagaccactgtataggcattcatt

SEQ ID NO: 1101096 - DNA, 25 bp, Homo sapien
actgtggaacacaagaacatagata

SEQ ID NO: 1101097 - DNA, 25 bp, Homo sapien
gagaccactgtataggcattcattt

SEQ ID NO: 1101098 - DNA, 25 bp, Homo sapien
aattagtaaagatagcccagagtcc

SEQ ID NO: 1101099 - DNA, 25 bp, Homo sapien
cacatcatattttgggacaacccag

SEQ ID NO: 1101100 - DNA, 25 bp, Homo sapien
taatttagttggctcagagaaggcc

SEQ ID NO: 1101101 - DNA, 25 bp, Homo sapien
cccagagtccaaagaggcagatgat

SEQ ID NO: 1101102 - DNA, 25 bp, Homo sapien
gactaaaaattgcacaactactgga

SEQ ID NO: 1101103 - DNA, 25 bp, Homo sapien
gaactcctctgcaagtgatagggaa

SEQ ID NO: 1101104 - DNA, 25 bp, Homo sapien
tttgagtggaaaactggtacacgga

SEQ ID NO: 1101105 - DNA, 25 bp, Homo sapien
tctgggcaaagatgttatgggtcac

SEQ ID NO: 1101106 - DNA, 25 bp, Homo sapien
aaatgcaggagagatggatggattc

SEQ ID NO: 1101107 - DNA, 25 bp, Homo sapien
taaaaatgcaggagagatggatgga

SEQ ID NO: 1101108 - DNA, 25 bp, Homo sapien
aatgcaggagagatggatggattca

SEQ ID NO: 1101109 - DNA, 25 bp, Homo sapien
gatggatggattcatcagatgtggc

SEQ ID NO: 1101110 - DNA, 25 bp, Homo sapien
attagaagtattacccataactgag

SEQ ID NO: 1101111 - DNA, 25 bp, Homo sapien
aattagaagtattacccataactga

SEQ ID NO: 1101112 - DNA, 25 bp, Homo sapien
ttagaagtattacccataactgagc

SEQ ID NO: 1101113 - DNA, 25 bp, Homo sapien
tagaagtattacccataactgagct

SEQ ID NO: 1101114 - DNA, 25 bp, Homo sapien
gttgttgtgccagtggtatatgaga

SEQ ID NO: 1101115 - DNA, 25 bp, Homo sapien
acttcattaattgttgttgtgccag

SEQ ID NO: 1101116 - DNA, 25 bp, Homo sapien
cattaattgttgttgtgccagtggt

SEQ ID NO: 1101117 - DNA, 25 bp, Homo sapien
ttgttgttgtgccagtggtatatga

SEQ ID NO: 1101118 - DNA, 25 bp, Homo sapien
ttttcaatggaagcactgaccctat

SEQ ID NO: 1101119 - DNA, 25 bp, Homo sapien
agtgcagtctgaagtaccacagctg

SEQ ID NO: 1101120 - DNA, 25 bp, Homo sapien
cctatccctagtgcagtctgaagta

SEQ ID NO: 1101121 - DNA, 25 bp, Homo sapien
tggaagcactgaccctatccctagt

SEQ ID NO: 1101122 - DNA, 25 bp, Homo sapien
catggatccatatgtgctgtcagcc

SEQ ID NO: 1101123 - DNA, 25 bp, Homo sapien
taagaagtcttagtataacaccatg

SEQ ID NO: 1101124 - DNA, 25 bp, Homo sapien
aacctgactgtttactgacttctca

SEQ ID NO: 1101125 - DNA, 25 bp, Homo sapien
aatcgaaaagccaagagggttctca

SEQ ID NO: 1101126 - DNA, 25 bp, Homo sapien
tgtccagtcaatttcaacagtcaga

SEQ ID NO: 1101127 - DNA, 25 bp, Homo sapien
aatacagaccccatgatatcacaaa

SEQ ID NO: 1101128 - DNA, 25 bp, Homo sapien
caaaaggttaagtaagctacgcata

SEQ ID NO: 1101129 - DNA, 25 bp, Homo sapien
ttttttggaaatacagaccccatga

SEQ ID NO: 1101130 - DNA, 25 bp, Homo sapien
gcaactttcagggtaacctcaatga

SEQ ID NO: 1101131 - DNA, 25 bp, Homo sapien
cagtcacagctggagtattcacaaa

SEQ ID NO: 1101132 - DNA, 25 bp, Homo sapien
tttatgcccagtcattgcaacttga

SEQ ID NO: 1101133 - DNA, 25 bp, Homo sapien
ccagctatcaagttaagtgtcttca

SEQ ID NO: 1101134 - DNA, 25 bp, Homo sapien
ctgttatcgttgtttgagttggaat

SEQ ID NO: 1101135 - DNA, 25 bp, Homo sapien
cgttgtttgagttggaatcaggcta

SEQ ID NO: 1101136 - DNA, 25 bp, Homo sapien
gtttgagttggaatcaggctagatg

SEQ ID NO: 1101137 - DNA, 25 bp, Homo sapien
atcgttgtttgagttggaatcaggc

SEQ ID NO: 1101138 - DNA, 25 bp, Homo sapien
tggaaagaatggtaacatgcccatt

SEQ ID NO: 1101139 - DNA, 25 bp, Homo sapien
aagaatggtaacatgcccattccag

SEQ ID NO: 1101140 - DNA, 25 bp, Homo sapien
gaaagaatggtaacatgcccattcc

SEQ ID NO: 1101141 - DNA, 25 bp, Homo sapien
ttggaaagaatggtaacatgcccat

SEQ ID NO: 1101142 - DNA, 25 bp, Homo sapien
ctggctgtttctcctgagtattact

SEQ ID NO: 1101143 - DNA, 25 bp, Homo sapien
gtttctcctgagtattactgtgccc

SEQ ID NO: 1101144 - DNA, 25 bp, Homo sapien
tctcctgagtattactgtgccctgg

SEQ ID NO: 1101145 - DNA, 25 bp, Homo sapien
cctgagtattactgtgccctggccc

SEQ ID NO: 1101146 - DNA, 25 bp, Homo sapien
gctgctgcttatggtgtcccaccag

SEQ ID NO: 1101147 - DNA, 25 bp, Homo sapien
tatctctgtgccttttggctggctt

SEQ ID NO: 1101148 - DNA, 25 bp, Homo sapien
ggaaagctctgaagataaggctgcg

SEQ ID NO: 1101149 - DNA, 25 bp, Homo sapien
tccagcagcaaggtttggaaagctc

SEQ ID NO: 1101150 - DNA, 25 bp, Homo sapien
ggtacaacccctactgacagaaaga

SEQ ID NO: 1101151 - DNA, 25 bp, Homo sapien
tataaagaattgacggccaggtgca

SEQ ID NO: 1101152 - DNA, 25 bp, Homo sapien
ggtagactcaagacttactggccaa

SEQ ID NO: 1101153 - DNA, 25 bp, Homo sapien
tgaactaagctacacacagaaggac

SEQ ID NO: 1101154 - DNA, 25 bp, Homo sapien
gttctcccaagagtgaagtttgatt

SEQ ID NO: 1101155 - DNA, 25 bp, Homo sapien
atgataagcacacactgggcaacac

SEQ ID NO: 1101156 - DNA, 25 bp, Homo sapien
gggcaacacacttgccaaattcaag

SEQ ID NO: 1101157 - DNA, 25 bp, Homo sapien
caagtatggatttttactgagccga

SEQ ID NO: 1101158 - DNA, 25 bp, Homo sapien
ccctgagagattgcatccagaatgc

SEQ ID NO: 1101159 - DNA, 25 bp, Homo sapien
gcaattccagtcttatgaagagtgg

SEQ ID NO: 1101160 - DNA, 25 bp, Homo sapien
ccaatgcgtgttgtgattcacttcc

SEQ ID NO: 1101161 - DNA, 25 bp, Homo sapien
ccaaaaggtggagaataagcaatgc

SEQ ID NO: 1101162 - DNA, 25 bp, Homo sapien
gcaggccacatagtctctactgtca

SEQ ID NO: 1101163 - DNA, 25 bp, Homo sapien
ttaggtctacactagtgcaaaccag

SEQ ID NO: 1101164 - DNA, 25 bp, Homo sapien
ccactaagagtaagctgaagaaggg

SEQ ID NO: 1101165 - DNA, 25 bp, Homo sapien
gattccataatcacacagggctaac

SEQ ID NO: 1101166 - DNA, 25 bp, Homo sapien
gactccaacgaacaggatagatctg

SEQ ID NO: 1101167 - DNA, 25 bp, Homo sapien
ccaacgaacaggatagatctgagaa

SEQ ID NO: 1101168 - DNA, 25 bp, Homo sapien
caggatagatctgagaagaagctgg

SEQ ID NO: 1101169 - DNA, 25 bp, Homo sapien
gagacaagactccaacgaacaggat

SEQ ID NO: 1101170 - DNA, 25 bp, Homo sapien
cgtgcgctagaagcagggactgtca

SEQ ID NO: 1101171 - DNA, 25 bp, Homo sapien
tctagtactcttataatcaggcgtc

SEQ ID NO: 1101172 - DNA, 25 bp, Homo sapien
aacacgagagagagaacaaatccca

SEQ ID NO: 1101173 - DNA, 25 bp, Homo sapien
cattttatgaacaagcgtgcgctag

SEQ ID NO: 1101174 - DNA, 25 bp, Homo sapien
tacatttcaacagcttgctttcctt

SEQ ID NO: 1101175 - DNA, 25 bp, Homo sapien
agccgaaatacatttcaacagcttg

SEQ ID NO: 1101176 - DNA, 25 bp, Homo sapien
ccgcccagccgaaatacatttcaac

SEQ ID NO: 1101177 - DNA, 25 bp, Homo sapien
ccaccccgcccagccgaaatacatt

SEQ ID NO: 1101178 - DNA, 25 bp, Homo sapien
tacggagaaccaaaatgggactgca

SEQ ID NO: 1101179 - DNA, 25 bp, Homo sapien
cctttcttatagcttcaagtccagc

SEQ ID NO: 1101180 - DNA, 25 bp, Homo sapien
gagatctgaatcaagcccctaatgt

SEQ ID NO: 1101181 - DNA, 25 bp, Homo sapien
gggactgcactagttctcctgagat

SEQ ID NO: 1101182 - DNA, 25 bp, Homo sapien
ctgacactctgacatggaaaaactg

SEQ ID NO: 1101183 - DNA, 25 bp, Homo sapien
tgaacaccgtaatctactagagcct

SEQ ID NO: 1101184 - DNA, 25 bp, Homo sapien
taatgtgcttctcgctttgggcacc

SEQ ID NO: 1101185 - DNA, 25 bp, Homo sapien
gctccttcagcaaatagtcatgggc

SEQ ID NO: 1101186 - DNA, 25 bp, Homo sapien
ccttcgctggtaggtgatctttctg

SEQ ID NO: 1101187 - DNA, 25 bp, Homo sapien
tttctgaatgttggaccccagccac

SEQ ID NO: 1101188 - DNA, 25 bp, Homo sapien
gcctcttggttattctctccagctg

SEQ ID NO: 1101189 - DNA, 25 bp, Homo sapien
attagggccccttcgctggtaggtg

SEQ ID NO: 1101190 - DNA, 25 bp, Homo sapien
gagatatgatgagcctcgcttttca

SEQ ID NO: 1101191 - DNA, 25 bp, Homo sapien
ccatgtaatatgctcctgtgccctg

SEQ ID NO: 1101192 - DNA, 25 bp, Homo sapien
ctgaaccaccttctggggcagagat

SEQ ID NO: 1101193 - DNA, 25 bp, Homo sapien
tgccctgagaatgctggtcaacaca

SEQ ID NO: 1101194 - DNA, 25 bp, Homo sapien
cacaaaagcgggtggtagaccaaat

SEQ ID NO: 1101195 - DNA, 25 bp, Homo sapien
tgcacccttgtagttctaggaaaag

SEQ ID NO: 1101196 - DNA, 25 bp, Homo sapien
ttaaggcagcgatgaacagcagaga

SEQ ID NO: 1101197 - DNA, 25 bp, Homo sapien
cagagatactgcagagaaccttagg

SEQ ID NO: 1101198 - DNA, 25 bp, Homo sapien
tagtctacgctatgaaatgagcaca

SEQ ID NO: 1101199 - DNA, 25 bp, Homo sapien
cattgaagaggctgaatgcaacagg

SEQ ID NO: 1101200 - DNA, 25 bp, Homo sapien
ccttgtagcgtaagagtgccacaga

SEQ ID NO: 1101201 - DNA, 25 bp, Homo sapien
gtgatcaaaataggccccattctag

SEQ ID NO: 1101202 - DNA, 25 bp, Homo sapien
gttacttttcacctgttgagcccaa

SEQ ID NO: 1101203 - DNA, 25 bp, Homo sapien
gattcaatgtgaacgattacggtct

SEQ ID NO: 1101204 - DNA, 25 bp, Homo sapien
aaacctgtggccactctatatgcac

SEQ ID NO: 1101205 - DNA, 25 bp, Homo sapien
aattcaggattggttcagtggcagc

SEQ ID NO: 1101206 - DNA, 25 bp, Homo sapien
tattacaccgtcaaggatgaccggg

SEQ ID NO: 1101207 - DNA, 25 bp, Homo sapien
tctggcctgactcaaggttagagaa

SEQ ID NO: 1101208 - DNA, 25 bp, Homo sapien
gccctgtgttttggtaactgaatca

SEQ ID NO: 1101209 - DNA, 25 bp, Homo sapien
caaagcaattgaaaccgataaggag

SEQ ID NO: 1101210 - DNA, 25 bp, Homo sapien
ttcaccgttgagtgccaagatcacg

SEQ ID NO: 1101211 - DNA, 25 bp, Homo sapien
tctcctaagcaggaataatgccgat

SEQ ID NO: 1101212 - DNA, 25 bp, Homo sapien
cttctagagcaagtctgctatgaga

SEQ ID NO: 1101213 - DNA, 25 bp, Homo sapien
aagatcacggtgcatgctttgcccc

SEQ ID NO: 1101214 - DNA, 25 bp, Homo sapien
ctttgacaaaacattacggtgctga

SEQ ID NO: 1101215 - DNA, 25 bp, Homo sapien
gaggaaccttctcaccaggatgcgg

SEQ ID NO: 1101216 - DNA, 25 bp, Homo sapien
cgtgtccacgcatgacctgaaggtg

SEQ ID NO: 1101217 - DNA, 25 bp, Homo sapien
tcattcgaatgacggtggaaacgtt

SEQ ID NO: 1101218 - DNA, 25 bp, Homo sapien
aattgctgctatagttagaagtgag

SEQ ID NO: 1101219 - DNA, 25 bp, Homo sapien
cctggaattgctgctatagttagaa

SEQ ID NO: 1101220 - DNA, 25 bp, Homo sapien
tgctatagttagaagtgagttattc

SEQ ID NO: 1101221 - DNA, 25 bp, Homo sapien
tgctgctatagttagaagtgagtta

SEQ ID NO: 1101222 - DNA, 25 bp, Homo sapien
tctttggcgatatatcttttgttgt

SEQ ID NO: 1101223 - DNA, 25 bp, Homo sapien
ctaattcttctttggcgatatatct

SEQ ID NO: 1101224 - DNA, 25 bp, Homo sapien
cttgctatgtgcttgggttgctaat

SEQ ID NO: 1101225 - DNA, 25 bp, Homo sapien
tatgtgcttgggttgctaattcttc

SEQ ID NO: 1101226 - DNA, 25 bp, Homo sapien
cttgggtagtatcccctcagaagaa

SEQ ID NO: 1101227 - DNA, 25 bp, Homo sapien
ggactttccacttgaggaattcaca

SEQ ID NO: 1101228 - DNA, 25 bp, Homo sapien
tctgcattctccttgggtagtatcc

SEQ ID NO: 1101229 - DNA, 25 bp, Homo sapien
ggaattcacatgaatctggggatct

SEQ ID NO: 1101230 - DNA, 25 bp, Homo sapien
tcatccaacatgacttttgtgcatt

SEQ ID NO: 1101231 - DNA, 25 bp, Homo sapien
ggaaggtagaatttcatccaacatg

SEQ ID NO: 1101232 - DNA, 25 bp, Homo sapien
tcttctgaatcatcaagggaaggta

SEQ ID NO: 1101233 - DNA, 25 bp, Homo sapien
cctgagaaggtctgatatggtcttc

SEQ ID NO: 1101234 - DNA, 25 bp, Homo sapien
tcccaggttttcgtaagctgtttga

SEQ ID NO: 1101235 - DNA, 25 bp, Homo sapien
tcggatacagttgacgttgtctgct

SEQ ID NO: 1101236 - DNA, 25 bp, Homo sapien
cattctaaatgtgaatcggatacag

SEQ ID NO: 1101237 - DNA, 25 bp, Homo sapien
tgttctgggaagaccctgtagccag

SEQ ID NO: 1101238 - DNA, 25 bp, Homo sapien
tctgctggacaaggagttttgagta

SEQ ID NO: 1101239 - DNA, 25 bp, Homo sapien
gcagaaacagtccttccctatattt

SEQ ID NO: 1101240 - DNA, 25 bp, Homo sapien
aaaggtagtagtatacactcctccg

SEQ ID NO: 1101241 - DNA, 25 bp, Homo sapien
gaggtagtgtggaatagcagaaaca

SEQ ID NO: 1101242 - DNA, 25 bp, Homo sapien
cccagatggggtgcacgtgccagct

SEQ ID NO: 1101243 - DNA, 25 bp, Homo sapien
ccagatggggtgcacgtgccagctt

SEQ ID NO: 1101244 - DNA, 25 bp, Homo sapien
ccctctttcaccacggcccagatgg

SEQ ID NO: 1101245 - DNA, 25 bp, Homo sapien
gcttgcctctgagcccctctttcac

SEQ ID NO: 1101246 - DNA, 25 bp, Homo sapien
gatcaaactcagttccttggcctga

SEQ ID NO: 1101247 - DNA, 25 bp, Homo sapien
aaactcagttccttggcctgaccaa

SEQ ID NO: 1101248 - DNA, 25 bp, Homo sapien
aagagggggatcaaactcagttcct

SEQ ID NO: 1101249 - DNA, 25 bp, Homo sapien
gggatcaaactcagttccttggcct

SEQ ID NO: 1101250 - DNA, 25 bp, Homo sapien
gtagaacttgtattgctcattggaa

SEQ ID NO: 1101251 - DNA, 25 bp, Homo sapien
cctgggtcattctttctggcccaac

SEQ ID NO: 1101252 - DNA, 25 bp, Homo sapien
gtattgctcattggaacccagttta

SEQ ID NO: 1101253 - DNA, 25 bp, Homo sapien
cagtttattccagggccctgggtca

SEQ ID NO: 1101254 - DNA, 25 bp, Homo sapien
tagacgtttgagttgatcgatactc

SEQ ID NO: 1101255 - DNA, 25 bp, Homo sapien
catcgttgaccaaatagagagaatg

SEQ ID NO: 1101256 - DNA, 25 bp, Homo sapien
tcattgtggctgcttaatagacgtt

SEQ ID NO: 1101257 - DNA, 25 bp, Homo sapien
gagttgatcgatactcatcgttgac

SEQ ID NO: 1101258 - DNA, 25 bp, Homo sapien
gctgtgtgctcaagtgacatccttt

SEQ ID NO: 1101259 - DNA, 25 bp, Homo sapien
tgggtctctttatgctcctctaagc

SEQ ID NO: 1101260 - DNA, 25 bp, Homo sapien
ggttgctcagaacatagcttgaaaa

SEQ ID NO: 1101261 - DNA, 25 bp, Homo sapien
ttttatagcactcagaaccttttgg

SEQ ID NO: 1101262 - DNA, 25 bp, Homo sapien
tggatcctgtcagttcgccctccag

SEQ ID NO: 1101263 - DNA, 25 bp, Homo sapien
tcctactggatcctgtcagttcgcc

SEQ ID NO: 1101264 - DNA, 25 bp, Homo sapien
tactggatcctgtcagttcgccctc

SEQ ID NO: 1101265 - DNA, 25 bp, Homo sapien
ttcctactggatcctgtcagttcgc

SEQ ID NO: 1101266 - DNA, 25 bp, Homo sapien
aaatactcttagagtccatccatgg

SEQ ID NO: 1101267 - DNA, 25 bp, Homo sapien
tagaggcttatttggcctaataatg

SEQ ID NO: 1101268 - DNA, 25 bp, Homo sapien
tatggatagttattgccatggagga

SEQ ID NO: 1101269 - DNA, 25 bp, Homo sapien
agttgagggtaaatgtagaggctta

SEQ ID NO: 1101270 - DNA, 25 bp, Homo sapien
catccaagatatatcgaatttcatc

SEQ ID NO: 1101271 - DNA, 25 bp, Homo sapien
gatatatcgaatttcatcattcaaa

SEQ ID NO: 1101272 - DNA, 25 bp, Homo sapien
aagatatatcgaatttcatcattca

SEQ ID NO: 1101273 - DNA, 25 bp, Homo sapien
ttccatccaagatatatcgaatttc

SEQ ID NO: 1101274 - DNA, 25 bp, Homo sapien
agatccatgtgtcctctatatcttt

SEQ ID NO: 1101275 - DNA, 25 bp, Homo sapien
tcagatccatgtgtcctctatatct

SEQ ID NO: 1101276 - DNA, 25 bp, Homo sapien
gtgtcctctatatcttttatgtcaa

SEQ ID NO: 1101277 - DNA, 25 bp, Homo sapien
tctatatcttttatgtcaaaatacc

SEQ ID NO: 1101278 - DNA, 25 bp, Homo sapien
ttattcaacaaacaccttctcaaaa

SEQ ID NO: 1101279 - DNA, 25 bp, Homo sapien
tattcaacaaacaccttctcaaaat

SEQ ID NO: 1101280 - DNA, 25 bp, Homo sapien
tgccacatttcaagatttactctgg

SEQ ID NO: 1101281 - DNA, 25 bp, Homo sapien
caagatttactctggagatgtgagg

SEQ ID NO: 1101282 - DNA, 25 bp, Homo sapien
catgttaaatggctggaagatagtc

SEQ ID NO: 1101283 - DNA, 25 bp, Homo sapien
tttactctggagatgtgaggtggaa

SEQ ID NO: 1101284 - DNA, 25 bp, Homo sapien
agcaaaggagttagctgtatcttcc

SEQ ID NO: 1101285 - DNA, 25 bp, Homo sapien
gaaaagcgctattgatgtcattctc

SEQ ID NO: 1101286 - DNA, 25 bp, Homo sapien
aacagttgttgccacgtgattggaa

SEQ ID NO: 1101287 - DNA, 25 bp, Homo sapien
tctcatcccatatgctttgacagca

SEQ ID NO: 1101288 - DNA, 25 bp, Homo sapien
tccacattatccctagactagtggt

SEQ ID NO: 1101289 - DNA, 25 bp, Homo sapien
gggaacaagaggacttgctactagc

SEQ ID NO: 1101290 - DNA, 25 bp, Homo sapien
tctcagtggggtgtgattttgcacc

SEQ ID NO: 1101291 - DNA, 25 bp, Homo sapien
tagcacctagtagtcagaggtcaga

SEQ ID NO: 1101292 - DNA, 25 bp, Homo sapien
cgcaagctggtctcattttgaactc

SEQ ID NO: 1101293 - DNA, 25 bp, Homo sapien
tgaactcctgaacccattttgaact

SEQ ID NO: 1101294 - DNA, 25 bp, Homo sapien
tgcgcaagctggtctcattttgaac

SEQ ID NO: 1101295 - DNA, 25 bp, Homo sapien
atgttgcgcaagctggtctcatttt

SEQ ID NO: 1101296 - DNA, 25 bp, Homo sapien
atggctgccaaacccagggagcttt

SEQ ID NO: 1101297 - DNA, 25 bp, Homo sapien
tcgccattgttttacagctggtgcc

SEQ ID NO: 1101298 - DNA, 25 bp, Homo sapien
gtaacaaggtggagacaatatcgcc

SEQ ID NO: 1101299 - DNA, 25 bp, Homo sapien
gacaatatcgccattgttttacagc

SEQ ID NO: 1101300 - DNA, 25 bp, Homo sapien
tgttttacagctggtgccatatttc

SEQ ID NO: 1101301 - DNA, 25 bp, Homo sapien
tcttagagttaccagggcacttatc

SEQ ID NO: 1101302 - DNA, 25 bp, Homo sapien
aaacccttcctgactcatttcctgt

SEQ ID NO: 1101303 - DNA, 25 bp, Homo sapien
ccttcatagccctgtgggtttctct

SEQ ID NO: 1101304 - DNA, 25 bp, Homo sapien
ggtttctcttagagttaccagggca

SEQ ID NO: 1101305 - DNA, 25 bp, Homo sapien
tcagacctgagtgtcagctcccatt

SEQ ID NO: 1101306 - DNA, 25 bp, Homo sapien
tgagtgtcagctcccattttacact

SEQ ID NO: 1101307 - DNA, 25 bp, Homo sapien
cagacctgagtgtcagctcccattt

SEQ ID NO: 1101308 - DNA, 25 bp, Homo sapien
acctgagtgtcagctcccattttac

SEQ ID NO: 1101309 - DNA, 25 bp, Homo sapien
ttggagtcaaaacgagacagattcc

SEQ ID NO: 1101310 - DNA, 25 bp, Homo sapien
taaacactatgattcttggagagct

SEQ ID NO: 1101311 - DNA, 25 bp, Homo sapien
gaaagcgttggcctatagacaccca

SEQ ID NO: 1101312 - DNA, 25 bp, Homo sapien
tggagagctccaaatcgtgtctctg

SEQ ID NO: 1101313 - DNA, 25 bp, Homo sapien
tccactagaacaggaagaggttcag

SEQ ID NO: 1101314 - DNA, 25 bp, Homo sapien
tcctaactccactccccttcttctc

SEQ ID NO: 1101315 - DNA, 25 bp, Homo sapien
ctagaacaggaagaggttcagacat

SEQ ID NO: 1101316 - DNA, 25 bp, Homo sapien
tccctgccatccactagaacaggaa

SEQ ID NO: 1101317 - DNA, 25 bp, Homo sapien
cactttgctgtggggtcacttcaac

SEQ ID NO: 1101318 - DNA, 25 bp, Homo sapien
tgacagagctgttgtctctcagctg

SEQ ID NO: 1101319 - DNA, 25 bp, Homo sapien
gacagagctgttgtctctcagctga

SEQ ID NO: 1101320 - DNA, 25 bp, Homo sapien
tttgctgtggggtcacttcaacctc

SEQ ID NO: 1101321 - DNA, 25 bp, Homo sapien
tcagatgactcaggccaccatagtt

SEQ ID NO: 1101322 - DNA, 25 bp, Homo sapien
cagatgactcaggccaccatagttc

SEQ ID NO: 1101323 - DNA, 25 bp, Homo sapien
agatgactcaggccaccatagttct

SEQ ID NO: 1101324 - DNA, 25 bp, Homo sapien
gattagaaagtggttccctcagcag

SEQ ID NO: 1101325 - DNA, 25 bp, Homo sapien
tatggtgataggattagaaagtggt

SEQ ID NO: 1101326 - DNA, 25 bp, Homo sapien
aagtggttccctcagcagggtgcag

SEQ ID NO: 1101327 - DNA, 25 bp, Homo sapien
catttacatgcaatcccagagcagg

SEQ ID NO: 1101328 - DNA, 25 bp, Homo sapien
tcttatgtagaaattctggggctac

SEQ ID NO: 1101329 - DNA, 25 bp, Homo sapien
ttatgtagaaattctggggctacca

SEQ ID NO: 1101330 - DNA, 25 bp, Homo sapien
ctggggctaccaatggaacagttcc

SEQ ID NO: 1101331 - DNA, 25 bp, Homo sapien
cttatgtagaaattctggggctacc

SEQ ID NO: 1101332 - DNA, 25 bp, Homo sapien
tatccatgtggaatacctttcccct

SEQ ID NO: 1101333 - DNA, 25 bp, Homo sapien
tttatccatgtggaatacctttccc

SEQ ID NO: 1101334 - DNA, 25 bp, Homo sapien
ctttccttttatccatgtggaatac

SEQ ID NO: 1101335 - DNA, 25 bp, Homo sapien
ttccttttatccatgtggaatacct

SEQ ID NO: 1101336 - DNA, 25 bp, Homo sapien
tcagtttgggcacttgacatttcag

SEQ ID NO: 1101337 - DNA, 25 bp, Homo sapien
aggaaatcctgagcccagattgcag

SEQ ID NO: 1101338 - DNA, 25 bp, Homo sapien
tcgccacggtaataaggagctcttg

SEQ ID NO: 1101339 - DNA, 25 bp, Homo sapien
aggccctctttttccgtgatgatac

SEQ ID NO: 1101340 - DNA, 25 bp, Homo sapien
tagaagcttagatcctctggaatgg

SEQ ID NO: 1101341 - DNA, 25 bp, Homo sapien
ggtctacctgtgatcaacccgggtg

SEQ ID NO: 1101342 - DNA, 25 bp, Homo sapien
aacccgggtgtgctgtggacatcag

SEQ ID NO: 1101343 - DNA, 25 bp, Homo sapien
ggagtgctgtaaccacctttctggg

SEQ ID NO: 1101344 - DNA, 25 bp, Homo sapien
gggttctttaagctgtctgacaagg

SEQ ID NO: 1101345 - DNA, 25 bp, Homo sapien
gaaccatttcgatttagtctgtaga

SEQ ID NO: 1101346 - DNA, 25 bp, Homo sapien
ggtatggaacattctcagctgggtt

SEQ ID NO: 1101347 - DNA, 25 bp, Homo sapien
caaggtttcgggttgtaatacatgc

SEQ ID NO: 1101348 - DNA, 25 bp, Homo sapien
actgcgcccagcctgattttgtatt

SEQ ID NO: 1101349 - DNA, 25 bp, Homo sapien
ctgcgcccagcctgattttgtattt

SEQ ID NO: 1101350 - DNA, 25 bp, Homo sapien
ttacaggcatgcgccgccatgcttg

SEQ ID NO: 1101351 - DNA, 25 bp, Homo sapien
tgcctcccgggtcccagcgattctc

SEQ ID NO: 1101352 - DNA, 25 bp, Homo sapien
tgtgcctcccgggtcccagcgattc

SEQ ID NO: 1101353 - DNA, 25 bp, Homo sapien
ttggctcactgcaacctgtgcctcc

SEQ ID NO: 1101354 - DNA, 25 bp, Homo sapien
aaagagtctcagtctgcggtcaggc

SEQ ID NO: 1101355 - DNA, 25 bp, Homo sapien
agaaagagtctcagtctgcggtcag

SEQ ID NO: 1101356 - DNA, 25 bp, Homo sapien
aagagtctcagtctgcggtcaggct

SEQ ID NO: 1101357 - DNA, 25 bp, Homo sapien
gaaagagtctcagtctgcggtcagg

SEQ ID NO: 1101358 - DNA, 25 bp, Homo sapien
ttccatcagctagagctcgtggttt

SEQ ID NO: 1101359 - DNA, 25 bp, Homo sapien
tatttccatcagctagagctcgtgg

SEQ ID NO: 1101360 - DNA, 25 bp, Homo sapien
tttccatcagctagagctcgtggtt

SEQ ID NO: 1101361 - DNA, 25 bp, Homo sapien
tttatttccatcagctagagctcgt

SEQ ID NO: 1101362 - DNA, 25 bp, Homo sapien
cacgaggccgggacgctggagtctg

SEQ ID NO: 1101363 - DNA, 25 bp, Homo sapien
gggaagaggggtccgtcagtggcat

SEQ ID NO: 1101364 - DNA, 25 bp, Homo sapien
gcgggaagaggggtccgtcagtggc

SEQ ID NO: 1101365 - DNA, 25 bp, Homo sapien
cgggacgctggagtctggggtagga

SEQ ID NO: 1101366 - DNA, 25 bp, Homo sapien
tagataatcctcatgcaaatagcgg

SEQ ID NO: 1101367 - DNA, 25 bp, Homo sapien
gccttgctgcgtcattagataatcc

SEQ ID NO: 1101368 - DNA, 25 bp, Homo sapien
acggtcacgttgtggcgagccttgc

SEQ ID NO: 1101369 - DNA, 25 bp, Homo sapien
aaacagaaaaatggcgacggtcacg

SEQ ID NO: 1101370 - DNA, 25 bp, Homo sapien
cacaacggtacagccgcccgggagg

SEQ ID NO: 1101371 - DNA, 25 bp, Homo sapien
acggcggcctttaaactctattatg

SEQ ID NO: 1101372 - DNA, 25 bp, Homo sapien
tctattatgtccctgctcatggcaa

SEQ ID NO: 1101373 - DNA, 25 bp, Homo sapien
gggacttctctgaacgtagcccaca

SEQ ID NO: 1101374 - DNA, 25 bp, Homo sapien
gatacagcaactgtgccgtacgctg

SEQ ID NO: 1101375 - DNA, 25 bp, Homo sapien
tacagcaactgtgccgtacgctgat

SEQ ID NO: 1101376 - DNA, 25 bp, Homo sapien
atacagcaactgtgccgtacgctga

SEQ ID NO: 1101377 - DNA, 25 bp, Homo sapien
agatacagcaactgtgccgtacgct

SEQ ID NO: 1101378 - DNA, 25 bp, Homo sapien
tgtgacaatccagatcctcctctga

SEQ ID NO: 1101379 - DNA, 25 bp, Homo sapien
gtctgcccatgatgatttgcttcca

SEQ ID NO: 1101380 - DNA, 25 bp, Homo sapien
cccaggaagaatcagagtcttgtct

SEQ ID NO: 1101381 - DNA, 25 bp, Homo sapien
gatgctaacatcttttcaacagtcc

SEQ ID NO: 1101382 - DNA, 25 bp, Homo sapien
ccatccagaggaatacatgtagatc

SEQ ID NO: 1101383 - DNA, 25 bp, Homo sapien
atgtagatcatgttcagatatgcaa

SEQ ID NO: 1101384 - DNA, 25 bp, Homo sapien
ttaccccatccagaggaatacatgt

SEQ ID NO: 1101385 - DNA, 25 bp, Homo sapien
ccccatccagaggaatacatgtaga

SEQ ID NO: 1101386 - DNA, 25 bp, Homo sapien
ttttccgagtatcatgctaggtgct

SEQ ID NO: 1101387 - DNA, 25 bp, Homo sapien
ggcagagctgagattagtaccagac

SEQ ID NO: 1101388 - DNA, 25 bp, Homo sapien
aataacttgcccagactgacacagt

SEQ ID NO: 1101389 - DNA, 25 bp, Homo sapien
cactacatggtacctcagaagacta

SEQ ID NO: 1101390 - DNA, 25 bp, Homo sapien
gaaagagctggcaagggtgaaaaac

SEQ ID NO: 1101391 - DNA, 25 bp, Homo sapien
aaaactatatgtgggctccagccaa

SEQ ID NO: 1101392 - DNA, 25 bp, Homo sapien
ggttcggggcagaaatccagttcca

SEQ ID NO: 1101393 - DNA, 25 bp, Homo sapien
ggtgaaaaactatatgtgggctcca

SEQ ID NO: 1101394 - DNA, 25 bp, Homo sapien
taagtagaatgtcccacctctgtgt

SEQ ID NO: 1101395 - DNA, 25 bp, Homo sapien
tctgtgtacccatgattccctggga

SEQ ID NO: 1101396 - DNA, 25 bp, Homo sapien
tcccctctattgcttgttgctttcc

SEQ ID NO: 1101397 - DNA, 25 bp, Homo sapien
aaccataaacccctgctaagcaggg

SEQ ID NO: 1101398 - DNA, 25 bp, Homo sapien
ttgccatagccaccgtcagattcca

SEQ ID NO: 1101399 - DNA, 25 bp, Homo sapien
tgtcaggagccctagtctcttgcca

SEQ ID NO: 1101400 - DNA, 25 bp, Homo sapien
catctagccatgttgacagggacag

SEQ ID NO: 1101401 - DNA, 25 bp, Homo sapien
gtttcaccatggagtcatctagcca

SEQ ID NO: 1101402 - DNA, 25 bp, Homo sapien
ctcagtcaacttgggcagtcctctg

SEQ ID NO: 1101403 - DNA, 25 bp, Homo sapien
cctgggccagtctacccctcctcag

SEQ ID NO: 1101404 - DNA, 25 bp, Homo sapien
ctgggccagtctacccctcctcagt

SEQ ID NO: 1101405 - DNA, 25 bp, Homo sapien
cctcagtcaacttgggcagtcctct

SEQ ID NO: 1101406 - DNA, 25 bp, Homo sapien
ttccagcccggatcctgcagggcgg

SEQ ID NO: 1101407 - DNA, 25 bp, Homo sapien
tccagcccggatcctgcagggcggc

SEQ ID NO: 1101408 - DNA, 25 bp, Homo sapien
gcttccagcccggatcctgcagggc

SEQ ID NO: 1101409 - DNA, 25 bp, Homo sapien
gaggcttccagcccggatcctgcag

SEQ ID NO: 1101410 - DNA, 25 bp, Homo sapien
cctgcccggtcctcgcacgtgggca

SEQ ID NO: 1101411 - DNA, 25 bp, Homo sapien
ttcatccttaactccagctcgctcc

SEQ ID NO: 1101412 - DNA, 25 bp, Homo sapien
aacgtgtggtctgcgtctcgtcccc

SEQ ID NO: 1101413 - DNA, 25 bp, Homo sapien
gcacaagcgggggtgactcaaagcc

SEQ ID NO: 1101414 - DNA, 25 bp, Homo sapien
tcagcccagcgccgggaccgagtag

SEQ ID NO: 1101415 - DNA, 25 bp, Homo sapien
ccagcgccgggaccgagtagcaggc

SEQ ID NO: 1101416 - DNA, 25 bp, Homo sapien
gccgggaccgagtagcaggcggact

SEQ ID NO: 1101417 - DNA, 25 bp, Homo sapien
gcgccgggaccgagtagcaggcgga

SEQ ID NO: 1101418 - DNA, 25 bp, Homo sapien
ggaggggggcggtcaaacgcgcagc

SEQ ID NO: 1101419 - DNA, 25 bp, Homo sapien
ggggcggtcaaacgcgcagccccga

SEQ ID NO: 1101420 - DNA, 25 bp, Homo sapien
tttctcggccccctacctctggcac

SEQ ID NO: 1101421 - DNA, 25 bp, Homo sapien
accctccgctctcactgggactcgc

SEQ ID NO: 1101422 - DNA, 25 bp, Homo sapien
cgggcggcccgaggatgaccgcgcg

SEQ ID NO: 1101423 - DNA, 25 bp, Homo sapien
ccgggcggcccgaggatgaccgcgc

SEQ ID NO: 1101424 - DNA, 25 bp, Homo sapien
gaaggcgacaacgaacagacaggcc

SEQ ID NO: 1101425 - DNA, 25 bp, Homo sapien
tagaaggcgacaacgaacagacagg

SEQ ID NO: 1101426 - DNA, 25 bp, Homo sapien
gcgacaacgaacagacaggcctttc

SEQ ID NO: 1101427 - DNA, 25 bp, Homo sapien
cttagaaggcgacaacgaacagaca

SEQ ID NO: 1101428 - DNA, 25 bp, Homo sapien
attttcagcagtggctccagtacag

SEQ ID NO: 1101429 - DNA, 25 bp, Homo sapien
gctgaattttcagcagtggctccag

SEQ ID NO: 1101430 - DNA, 25 bp, Homo sapien
aattttcagcagtggctccagtaca

SEQ ID NO: 1101431 - DNA, 25 bp, Homo sapien
ctggctgaattttcagcagtggctc

SEQ ID NO: 1101432 - DNA, 25 bp, Homo sapien
cttaataaaactgatatcgttcgcg

SEQ ID NO: 1101433 - DNA, 25 bp, Homo sapien
aaaactgatatcgttcgcgtactga

SEQ ID NO: 1101434 - DNA, 25 bp, Homo sapien
cagcacgtattgaggccacatttct

SEQ ID NO: 1101435 - DNA, 25 bp, Homo sapien
catttctggatcagacagtgccggt

SEQ ID NO: 1101436 - DNA, 25 bp, Homo sapien
gccagggttacaggttactgctgcc

SEQ ID NO: 1101437 - DNA, 25 bp, Homo sapien
cccctgcaaatgttggttatgacca

SEQ ID NO: 1101438 - DNA, 25 bp, Homo sapien
tctgtctggctaagtaagggatgct

SEQ ID NO: 1101439 - DNA, 25 bp, Homo sapien
tgcattcattagtcagtccagggcc

SEQ ID NO: 1101440 - DNA, 25 bp, Homo sapien
tttctgaagcagtattccaaagaaa

SEQ ID NO: 1101441 - DNA, 25 bp, Homo sapien
ctcggacatcattaggcgtgtgatc

SEQ ID NO: 1101442 - DNA, 25 bp, Homo sapien
tggccacgcctgttctccaactcgg

SEQ ID NO: 1101443 - DNA, 25 bp, Homo sapien
gcctgttctccaactcggacatcat

SEQ ID NO: 1101444 - DNA, 25 bp, Homo sapien
gcgtgtgatcacatggtctggaacc

SEQ ID NO: 1101445 - DNA, 25 bp, Homo sapien
ttagcacgctcaacaggcacgtcct

SEQ ID NO: 1101446 - DNA, 25 bp, Homo sapien
aatcacctttagcacgctcaacagg

SEQ ID NO: 1101447 - DNA, 25 bp, Homo sapien
tcaatcacctttagcacgctcaaca

SEQ ID NO: 1101448 - DNA, 25 bp, Homo sapien
acctttagcacgctcaacaggcacg

SEQ ID NO: 1101449 - DNA, 25 bp, Homo sapien
ctacagccatatggaccaagatgat

SEQ ID NO: 1101450 - DNA, 25 bp, Homo sapien
ggaccaagatgatgagtcatctgtc

SEQ ID NO: 1101451 - DNA, 25 bp, Homo sapien
gaatgcctttttcgacctttccaca

SEQ ID NO: 1101452 - DNA, 25 bp, Homo sapien
cagaatgcctttttcgacctttcca

SEQ ID NO: 1101453 - DNA, 25 bp, Homo sapien
aacaacctcaagatcatctataaac

SEQ ID NO: 1101454 - DNA, 25 bp, Homo sapien
tctttccccgcaaacctctgccaca

SEQ ID NO: 1101455 - DNA, 25 bp, Homo sapien
gatcatctataaactctttccccgc

SEQ ID NO: 1101456 - DNA, 25 bp, Homo sapien
agcccaaacaacctcaagatcatct

SEQ ID NO: 1101457 - DNA, 25 bp, Homo sapien
caaactgatcactagatccacttca

SEQ ID NO: 1101458 - DNA, 25 bp, Homo sapien
ttcaaactgatcactagatccactt

SEQ ID NO: 1101459 - DNA, 25 bp, Homo sapien
tcaaactgatcactagatccacttc

SEQ ID NO: 1101460 - DNA, 25 bp, Homo sapien
ggtggattgaagtccaggttatata

SEQ ID NO: 1101461 - DNA, 25 bp, Homo sapien
atgaggtggattgaagtccaggtta

SEQ ID NO: 1101462 - DNA, 25 bp, Homo sapien
gtggattgaagtccaggttatatac

SEQ ID NO: 1101463 - DNA, 25 bp, Homo sapien
gaggtggattgaagtccaggttata

SEQ ID NO: 1101464 - DNA, 25 bp, Homo sapien
ttatgagaatctctgcgtcagcagg

SEQ ID NO: 1101465 - DNA, 25 bp, Homo sapien
cgtcagcaggtctggacaaatgcaa

SEQ ID NO: 1101466 - DNA, 25 bp, Homo sapien
taaagcgtctgtgttggacttcagt

SEQ ID NO: 1101467 - DNA, 25 bp, Homo sapien
tctcactgggactttactgacacaa

SEQ ID NO: 1101468 - DNA, 25 bp, Homo sapien
gactaacggttcaccagtgacgtca

SEQ ID NO: 1101469 - DNA, 25 bp, Homo sapien
acgtctttgtactgtcttagcctgg

SEQ ID NO: 1101470 - DNA, 25 bp, Homo sapien
cggttcaccagtgacgtcatcaata

SEQ ID NO: 1101471 - DNA, 25 bp, Homo sapien
gctggactaacggttcaccagtgac

SEQ ID NO: 1101472 - DNA, 25 bp, Homo sapien
aaagtgtgtaaacgtagggccagat

SEQ ID NO: 1101473 - DNA, 25 bp, Homo sapien
gaaaattggtggagcactcctcggc

SEQ ID NO: 1101474 - DNA, 25 bp, Homo sapien
cagattttgttcgtctccgttccgg

SEQ ID NO: 1101475 - DNA, 25 bp, Homo sapien
tatgcttctttggactgaataggtg

SEQ ID NO: 1101476 - DNA, 25 bp, Homo sapien
ggagaaccagagactatcaccatca

SEQ ID NO: 1101477 - DNA, 25 bp, Homo sapien
gaaaagatgctgcaagctacctcag

SEQ ID NO: 1101478 - DNA, 25 bp, Homo sapien
agagccctcaggattcattctcagg

SEQ ID NO: 1101479 - DNA, 25 bp, Homo sapien
gcttgagacatgtgcagagacacct

SEQ ID NO: 1101480 - DNA, 25 bp, Homo sapien
ctaaatacttaacttcccatgcttt

SEQ ID NO: 1101481 - DNA, 25 bp, Homo sapien
aatacttaacttcccatgctttttg

SEQ ID NO: 1101482 - DNA, 25 bp, Homo sapien
acttaacttcccatgctttttgagg

SEQ ID NO: 1101483 - DNA, 25 bp, Homo sapien
tacttaacttcccatgctttttgag

SEQ ID NO: 1101484 - DNA, 25 bp, Homo sapien
ggccaccccataggatgaatctttg

SEQ ID NO: 1101485 - DNA, 25 bp, Homo sapien
cactcataggagtgaaacactgtca

SEQ ID NO: 1101486 - DNA, 25 bp, Homo sapien
tccaggcacagctagtacaacattc

SEQ ID NO: 1101487 - DNA, 25 bp, Homo sapien
aatatgtttgggtcactcataggag

SEQ ID NO: 1101488 - DNA, 25 bp, Homo sapien
gccaccaagtctggaaaccaggcaa

SEQ ID NO: 1101489 - DNA, 25 bp, Homo sapien
gcaagaattattcaaggtggccacc

SEQ ID NO: 1101490 - DNA, 25 bp, Homo sapien
gtggccaccaagtctggaaaccagg

SEQ ID NO: 1101491 - DNA, 25 bp, Homo sapien
ccttcccagaagacagcaagaatta

SEQ ID NO: 1101492 - DNA, 25 bp, Homo sapien
tggagtcctggctacactggtcacc

SEQ ID NO: 1101493 - DNA, 25 bp, Homo sapien
gacaagacaggaagtgaatctcccc

SEQ ID NO: 1101494 - DNA, 25 bp, Homo sapien
ccttcatagattagcctgggcccaa

SEQ ID NO: 1101495 - DNA, 25 bp, Homo sapien
taagcagaaccaagcagactcaagg

SEQ ID NO: 1101496 - DNA, 25 bp, Homo sapien
ctagagggcagcaggggggtgatcc

SEQ ID NO: 1101497 - DNA, 25 bp, Homo sapien
tagggtaacaatggaactcatctga

SEQ ID NO: 1101498 - DNA, 25 bp, Homo sapien
caaagagatgggcacacctagggta

SEQ ID NO: 1101499 - DNA, 25 bp, Homo sapien
cacacctagggtaacaatggaactc

SEQ ID NO: 1101500 - DNA, 25 bp, Homo sapien
tgggcacacctagggtaacaatgga

SEQ ID NO: 1101501 - DNA, 25 bp, Homo sapien
tgcctatacctgaacacacttggaa

SEQ ID NO: 1101502 - DNA, 25 bp, Homo sapien
tagatacagtgtgcaactaccagtg

SEQ ID NO: 1101503 - DNA, 25 bp, Homo sapien
cagggagctcaaactagggaaaggt

SEQ ID NO: 1101504 - DNA, 25 bp, Homo sapien
gagtacagatgagacacgccctctg

SEQ ID NO: 1101505 - DNA, 25 bp, Homo sapien
ttatgaattgcctctctagcaaaat

SEQ ID NO: 1101506 - DNA, 25 bp, Homo sapien
tatgaattgcctctctagcaaaatc

SEQ ID NO: 1101507 - DNA, 25 bp, Homo sapien
cttatgaattgcctctctagcaaaa

SEQ ID NO: 1101508 - DNA, 25 bp, Homo sapien
tgaattgcctctctagcaaaatcaa

SEQ ID NO: 1101509 - DNA, 25 bp, Homo sapien
taagggatggcaagtatgaacaact

SEQ ID NO: 1101510 - DNA, 25 bp, Homo sapien
caagaactgtgcaaattgttacaag

SEQ ID NO: 1101511 - DNA, 25 bp, Homo sapien
tctcatttggaaaccagattgggtc

SEQ ID NO: 1101512 - DNA, 25 bp, Homo sapien
caagtcatactatgaacaggacctc

SEQ ID NO: 1101513 - DNA, 25 bp, Homo sapien
gaattagacacatatcaaccctagg

SEQ ID NO: 1101514 - DNA, 25 bp, Homo sapien
tcatcataaacacacgacttctggg

SEQ ID NO: 1101515 - DNA, 25 bp, Homo sapien
ggaatcttcaaggtggtctgctcct

SEQ ID NO: 1101516 - DNA, 25 bp, Homo sapien
tacaccaaaattaagagggccagca

SEQ ID NO: 1101517 - DNA, 25 bp, Homo sapien
tggcacatccagtggattgaaacag

SEQ ID NO: 1101518 - DNA, 25 bp, Homo sapien
cacatccagtggattgaaacagctc

SEQ ID NO: 1101519 - DNA, 25 bp, Homo sapien
catccagtggattgaaacagctcct

SEQ ID NO: 1101520 - DNA, 25 bp, Homo sapien
cagtggattgaaacagctccttgga

SEQ ID NO: 1101521 - DNA, 25 bp, Homo sapien
ttctcagtggcgcccatcggtgcgc

SEQ ID NO: 1101522 - DNA, 25 bp, Homo sapien
cggccgccgcaaggaaaacagcttc

SEQ ID NO: 1101523 - DNA, 25 bp, Homo sapien
gggtcgccttccacggccgccgcaa

SEQ ID NO: 1101524 - DNA, 25 bp, Homo sapien
cgcctggcgagctgagcgtggcctc

SEQ ID NO: 1101525 - DNA, 25 bp, Homo sapien
ctgcctcagggtaacaggtcccgac

SEQ ID NO: 1101526 - DNA, 25 bp, Homo sapien
tgcctcagggtaacaggtcccgacc

SEQ ID NO: 1101527 - DNA, 25 bp, Homo sapien
caccgtggcttccctgtgtccagag

SEQ ID NO: 1101528 - DNA, 25 bp, Homo sapien
aaaggagactgtgccgacatcagcc

SEQ ID NO: 1101529 - DNA, 25 bp, Homo sapien
tcagtgaggctgtgtcgccgcgcca

SEQ ID NO: 1101530 - DNA, 25 bp, Homo sapien
ttcgggcgtcgcctaggcatccagg

SEQ ID NO: 1101531 - DNA, 25 bp, Homo sapien
tctagaagtagttccaagatccggg

SEQ ID NO: 1101532 - DNA, 25 bp, Homo sapien
gcttcgaaatcaccgcaggcaggta

SEQ ID NO: 1101533 - DNA, 25 bp, Homo sapien
gacaaacgctctacaggtgacgaaa

SEQ ID NO: 1101534 - DNA, 25 bp, Homo sapien
gactatatcgatggcagggtcctgg

SEQ ID NO: 1101535 - DNA, 25 bp, Homo sapien
ttaataggtgctaacactttataac

SEQ ID NO: 1101536 - DNA, 25 bp, Homo sapien
ggtgctaacactttataactactaa

SEQ ID NO: 1101537 - DNA, 25 bp, Homo sapien
ctaacactttataactactaactcg

SEQ ID NO: 1101538 - DNA, 25 bp, Homo sapien
taggtgctaacactttataactact

SEQ ID NO: 1101539 - DNA, 25 bp, Homo sapien
tctaatccaagttactacagtggca

SEQ ID NO: 1101540 - DNA, 25 bp, Homo sapien
caaggaatacttgttgcaatcatcg

SEQ ID NO: 1101541 - DNA, 25 bp, Homo sapien
gtggtcagccttcggccctattaag

SEQ ID NO: 1101542 - DNA, 25 bp, Homo sapien
gaacatcctacatgtgtatcccgga

SEQ ID NO: 1101543 - DNA, 25 bp, Homo sapien
tgagagaataaaccactgatcgacg

SEQ ID NO: 1101544 - DNA, 25 bp, Homo sapien
tcaaccaccacagggtttagaggag

SEQ ID NO: 1101545 - DNA, 25 bp, Homo sapien
gaaactgactctagttccaacctgt

SEQ ID NO: 1101546 - DNA, 25 bp, Homo sapien
taacctacggactttgatatttgag

SEQ ID NO: 1101547 - DNA, 25 bp, Homo sapien
taatgcaaggactcacagcagacct

SEQ ID NO: 1101548 - DNA, 25 bp, Homo sapien
ttagggctagccacagaagagggca

SEQ ID NO: 1101549 - DNA, 25 bp, Homo sapien
catcatccattttttgagaacttat

SEQ ID NO: 1101550 - DNA, 25 bp, Homo sapien
tttgaatcccaacttactagttgta

SEQ ID NO: 1101551 - DNA, 25 bp, Homo sapien
gaccaagtccaggatagccaaaatg

SEQ ID NO: 1101552 - DNA, 25 bp, Homo sapien
caaatgcgacattggctaaaccaca

SEQ ID NO: 1101553 - DNA, 25 bp, Homo sapien
gcatctttatctccaaggaccaagt

SEQ ID NO: 1101554 - DNA, 25 bp, Homo sapien
cacatcagagaaaccggcatcttta

SEQ ID NO: 1101555 - DNA, 25 bp, Homo sapien
ggagcactcgggctatgataattgc

SEQ ID NO: 1101556 - DNA, 25 bp, Homo sapien
tgtcattcacagtcagcggtctcgg

SEQ ID NO: 1101557 - DNA, 25 bp, Homo sapien
taattgcatgcaagtcggtgtgcgg

SEQ ID NO: 1101558 - DNA, 25 bp, Homo sapien
gcgaagtctctcaacggaggagcac

SEQ ID NO: 1101559 - DNA, 25 bp, Homo sapien
agttctgaaggtcagcgacggctcc

SEQ ID NO: 1101560 - DNA, 25 bp, Homo sapien
caaaaatctgggagctagtctaagg

SEQ ID NO: 1101561 - DNA, 25 bp, Homo sapien
tcattaaaggattctccgtcagcgt

SEQ ID NO: 1101562 - DNA, 25 bp, Homo sapien
ccccatggagcgcttctaaaaagat

SEQ ID NO: 1101563 - DNA, 25 bp, Homo sapien
cagaatatttaaggagcctccgaat

SEQ ID NO: 1101564 - DNA, 25 bp, Homo sapien
cagaatcctccagaatgcttgttgt

SEQ ID NO: 1101565 - DNA, 25 bp, Homo sapien
agaatatttaaggagcctccgaatt

SEQ ID NO: 1101566 - DNA, 25 bp, Homo sapien
aaaccccagaatcctccagaatgct

SEQ ID NO: 1101567 - DNA, 25 bp, Homo sapien
ggatcggggaacacgtgtagcctcc

SEQ ID NO: 1101568 - DNA, 25 bp, Homo sapien
gggaacacgtgtagcctccggagac

SEQ ID NO: 1101569 - DNA, 25 bp, Homo sapien
cacgtgtagcctccggagacctagg

SEQ ID NO: 1101570 - DNA, 25 bp, Homo sapien
gagacctaggggtccatcgctcctc

SEQ ID NO: 1101571 - DNA, 25 bp, Homo sapien
gggcacgcgactccgctgcgccctt

SEQ ID NO: 1101572 - DNA, 25 bp, Homo sapien
ccagcgcaataggaaggaagggctc

SEQ ID NO: 1101573 - DNA, 25 bp, Homo sapien
gtcctccgcccggacgggcacgcga

SEQ ID NO: 1101574 - DNA, 25 bp, Homo sapien
ggccaggagcacgaccagcgcaata

SEQ ID NO: 1101575 - DNA, 25 bp, Homo sapien
agactgctgcgcagcggctcgcacg

SEQ ID NO: 1101576 - DNA, 25 bp, Homo sapien
ctcgcacggaaagcgggtgaaaaga

SEQ ID NO: 1101577 - DNA, 25 bp, Homo sapien
taaaacacagcgcactcgaagcgca

SEQ ID NO: 1101578 - DNA, 25 bp, Homo sapien
cctaaaattagcgttccggaagcag

SEQ ID NO: 1101579 - DNA, 25 bp, Homo sapien
tgcgcgaaacctgcccaacgggctg

SEQ ID NO: 1101580 - DNA, 25 bp, Homo sapien
gaaacctgcccaacgggctgcgtgc

SEQ ID NO: 1101581 - DNA, 25 bp, Homo sapien
gggagggtcgctgcgcgaaacctgc

SEQ ID NO: 1101582 - DNA, 25 bp, Homo sapien
gagcccaaggggcaagcgccggggc

SEQ ID NO: 1101583 - DNA, 25 bp, Homo sapien
ggtgggaatcctataacaagccaga

SEQ ID NO: 1101584 - DNA, 25 bp, Homo sapien
tgactcccgaggactggagaaggcc

SEQ ID NO: 1101585 - DNA, 25 bp, Homo sapien
gtatatatcattgcccaccacgagg

SEQ ID NO: 1101586 - DNA, 25 bp, Homo sapien
caatacgtggctgtgaatgatccag

SEQ ID NO: 1101587 - DNA, 25 bp, Homo sapien
ggctggggatctgagcttaaaacac

SEQ ID NO: 1101588 - DNA, 25 bp, Homo sapien
gggatctgagcttaaaacacactga

SEQ ID NO: 1101589 - DNA, 25 bp, Homo sapien
aacacactgatacactgagaaacca

SEQ ID NO: 1101590 - DNA, 25 bp, Homo sapien
gcttaaaacacactgatacactgag

SEQ ID NO: 1101591 - DNA, 25 bp, Homo sapien
gaaatagagtcctgtcctaggtcac

SEQ ID NO: 1101592 - DNA, 25 bp, Homo sapien
tgttgcctaagactcactaagttgc

SEQ ID NO: 1101593 - DNA, 25 bp, Homo sapien
gaatacggcttatacccacatgcat

SEQ ID NO: 1101594 - DNA, 25 bp, Homo sapien
taacctatttggagtcttagaatcc

SEQ ID NO: 1101595 - DNA, 25 bp, Homo sapien
gaatggctctcacggtctggttgct

SEQ ID NO: 1101596 - DNA, 25 bp, Homo sapien
caccaactggtaatttgggacccag

SEQ ID NO: 1101597 - DNA, 25 bp, Homo sapien
tctggttgctatggtcacacctaca

SEQ ID NO: 1101598 - DNA, 25 bp, Homo sapien
catacacttatctggtctctgtcaa

SEQ ID NO: 1101599 - DNA, 25 bp, Homo sapien
gttttaacatacaatgctcagacag

SEQ ID NO: 1101600 - DNA, 25 bp, Homo sapien
ggactcaatataaatctctaagaaa

SEQ ID NO: 1101601 - DNA, 25 bp, Homo sapien
ttcaaaggactcaatataaatctct

SEQ ID NO: 1101602 - DNA, 25 bp, Homo sapien
gaatttcggttcatccaaagacacc

SEQ ID NO: 1101603 - DNA, 25 bp, Homo sapien
catcatccgggaaagacattagtgt

SEQ ID NO: 1101604 - DNA, 25 bp, Homo sapien
tatgacacagtggttctgagactat

SEQ ID NO: 1101605 - DNA, 25 bp, Homo sapien
agactattagcttcaatatggccaa

SEQ ID NO: 1101606 - DNA, 25 bp, Homo sapien
ccttctggccaagcatctgtcattt

SEQ ID NO: 1101607 - DNA, 25 bp, Homo sapien
cctagtacagctatcccttcctttg

SEQ ID NO: 1101608 - DNA, 25 bp, Homo sapien
ggacccctgactctgttaccagtga

SEQ ID NO: 1101609 - DNA, 25 bp, Homo sapien
tcatcctgctatccagagactgcct

SEQ ID NO: 1101610 - DNA, 25 bp, Homo sapien
taccagtgaactccctagtacagct

SEQ ID NO: 1101611 - DNA, 25 bp, Homo sapien
ttgtccttcaacatagctcagtcta

SEQ ID NO: 1101612 - DNA, 25 bp, Homo sapien
gaattacaagttcatgtggtcatgg

SEQ ID NO: 1101613 - DNA, 25 bp, Homo sapien
catatagtgagggttcaatgaatgc

SEQ ID NO: 1101614 - DNA, 25 bp, Homo sapien
aatttgataacctctaaacctgtgt

SEQ ID NO: 1101615 - DNA, 25 bp, Homo sapien
cggccaccggagagaagcttcgccg

SEQ ID NO: 1101616 - DNA, 25 bp, Homo sapien
ttcgccgggcgaggcgaagccgccg

SEQ ID NO: 1101617 - DNA, 25 bp, Homo sapien
aaaaaattaagtgcccgacatgacg

SEQ ID NO: 1101618 - DNA, 25 bp, Homo sapien
gtgcccgacatgacgcaaagaggag

SEQ ID NO: 1101619 - DNA, 25 bp, Homo sapien
tgggaagcgaaaagggagatggaag

SEQ ID NO: 1101620 - DNA, 25 bp, Homo sapien
ctgggaagcgaaaagggagatggaa

SEQ ID NO: 1101621 - DNA, 25 bp, Homo sapien
gcgaaaagggagatggaaggtggaa

SEQ ID NO: 1101622 - DNA, 25 bp, Homo sapien
gaagcgaaaagggagatggaaggtg

SEQ ID NO: 1101623 - DNA, 25 bp, Homo sapien
gcccggagaaaagagaaaataatca

SEQ ID NO: 1101624 - DNA, 25 bp, Homo sapien
gcaagcccggagaaaagagaaaata

SEQ ID NO: 1101625 - DNA, 25 bp, Homo sapien
ccagctgcaaagattcataaccatc

SEQ ID NO: 1101626 - DNA, 25 bp, Homo sapien
tttccggtagctcccgaggaggctc

SEQ ID NO: 1101627 - DNA, 25 bp, Homo sapien
gcacttaagtccccgttactgtcca

SEQ ID NO: 1101628 - DNA, 25 bp, Homo sapien
catcgttgctggtctttttccggta

SEQ ID NO: 1101629 - DNA, 25 bp, Homo sapien
gcggtccggaggctgtcgggcggga

SEQ ID NO: 1101630 - DNA, 25 bp, Homo sapien
gcgcggtccggaggctgtcgggcgg

SEQ ID NO: 1101631 - DNA, 25 bp, Homo sapien
ccatggtgctggcgcggtccggagg

SEQ ID NO: 1101632 - DNA, 25 bp, Homo sapien
gtccatggtgctggcgcggtccgga

SEQ ID NO: 1101633 - DNA, 25 bp, Homo sapien
tcctctgaacatgtacccctctttt

SEQ ID NO: 1101634 - DNA, 25 bp, Homo sapien
ctctgaacatgtacccctcttttat

SEQ ID NO: 1101635 - DNA, 25 bp, Homo sapien
attcctctgaacatgtacccctctt

SEQ ID NO: 1101636 - DNA, 25 bp, Homo sapien
ttcctctgaacatgtacccctcttt

SEQ ID NO: 1101637 - DNA, 25 bp, Homo sapien
ctggtgaaagcttgtgccaagctaa

SEQ ID NO: 1101638 - DNA, 25 bp, Homo sapien
gctaacagtattctcagcccttcca

SEQ ID NO: 1101639 - DNA, 25 bp, Homo sapien
gccaagctaacagtattctcagccc

SEQ ID NO: 1101640 - DNA, 25 bp, Homo sapien
aagctgaaagcctggtgaaagcttg

SEQ ID NO: 1101641 - DNA, 25 bp, Homo sapien
gctgtgcctccatcaacaagcaagg

SEQ ID NO: 1101642 - DNA, 25 bp, Homo sapien
gatacagacaccgtactggcctcgg

SEQ ID NO: 1101643 - DNA, 25 bp, Homo sapien
tggcctcgggccttaggcctggact

SEQ ID NO: 1101644 - DNA, 25 bp, Homo sapien
cagagtctagggctctcccagtgag

SEQ ID NO: 1101645 - DNA, 25 bp, Homo sapien
tttattttttccagagaattctgaa

SEQ ID NO: 1101646 - DNA, 25 bp, Homo sapien
ttattttttccagagaattctgaaa

SEQ ID NO: 1101647 - DNA, 25 bp, Homo sapien
tattttttccagagaattctgaaaa

SEQ ID NO: 1101648 - DNA, 25 bp, Homo sapien
ttttattttttccagagaattctga

SEQ ID NO: 1101649 - DNA, 25 bp, Homo sapien
tgggcacaatcaacataaacaaggg

SEQ ID NO: 1101650 - DNA, 25 bp, Homo sapien
gaaccatcagcaggtagaaggctgg

SEQ ID NO: 1101651 - DNA, 25 bp, Homo sapien
taaacaagggcttgccacataagtg

SEQ ID NO: 1101652 - DNA, 25 bp, Homo sapien
cataagtgctgtggccgaagtgcag

SEQ ID NO: 1101653 - DNA, 25 bp, Homo sapien
tagaggtctcagtgcaatcgccaat

SEQ ID NO: 1101654 - DNA, 25 bp, Homo sapien
cattacaacaacctgctgtggtgga

SEQ ID NO: 1101655 - DNA, 25 bp, Homo sapien
ttctgataagagcaggagcctggac

SEQ ID NO: 1101656 - DNA, 25 bp, Homo sapien
ggctatagctatggaagggcccaaa

SEQ ID NO: 1101657 - DNA, 25 bp, Homo sapien
gaagaaccaaactgtaaatatgctt

SEQ ID NO: 1101658 - DNA, 25 bp, Homo sapien
ccgaagaaccaaactgtaaatatgc

SEQ ID NO: 1101659 - DNA, 25 bp, Homo sapien
cgaagaaccaaactgtaaatatgct

SEQ ID NO: 1101660 - DNA, 25 bp, Homo sapien
cccgaagaaccaaactgtaaatatg

SEQ ID NO: 1101661 - DNA, 25 bp, Homo sapien
ttgactctcatgttcaaaagccaca

SEQ ID NO: 1101662 - DNA, 25 bp, Homo sapien
cacacacagcctttagggtcaatag

SEQ ID NO: 1101663 - DNA, 25 bp, Homo sapien
caccagcattccaggggtagtggca

SEQ ID NO: 1101664 - DNA, 25 bp, Homo sapien
caatagctgctgtctttgactctca

SEQ ID NO: 1101665 - DNA, 25 bp, Homo sapien
cagatgagtattgcgtctccactac

SEQ ID NO: 1101666 - DNA, 25 bp, Homo sapien
acactgacagatgagtattgcgtct

SEQ ID NO: 1101667 - DNA, 25 bp, Homo sapien
tgagtattgcgtctccactacacag

SEQ ID NO: 1101668 - DNA, 25 bp, Homo sapien
gacagatgagtattgcgtctccact

SEQ ID NO: 1101669 - DNA, 25 bp, Homo sapien
attctcgactcaataataaccactc

SEQ ID NO: 1101670 - DNA, 25 bp, Homo sapien
aattctcgactcaataataaccact

SEQ ID NO: 1101671 - DNA, 25 bp, Homo sapien
gactccttccactcaaaaattgact

SEQ ID NO: 1101672 - DNA, 25 bp, Homo sapien
tccactcaaaaattgactctccacg

SEQ ID NO: 1101673 - DNA, 25 bp, Homo sapien
tcttcagactccttccactcaaaaa

SEQ ID NO: 1101674 - DNA, 25 bp, Homo sapien
caaaaattgactctccacgtgttac

SEQ ID NO: 1101675 - DNA, 25 bp, Homo sapien
atgtcaaagagacctcccccatagc

SEQ ID NO: 1101676 - DNA, 25 bp, Homo sapien
tggtcacagattgtatcactctaga

SEQ ID NO: 1101677 - DNA, 25 bp, Homo sapien
ttaggttactaaagagcctccctgc

SEQ ID NO: 1101678 - DNA, 25 bp, Homo sapien
tgagggtgtctttcaagttgtcctt

SEQ ID NO: 1101679 - DNA, 25 bp, Homo sapien
tctggaggtaacataagtgaagtct

SEQ ID NO: 1101680 - DNA, 25 bp, Homo sapien
caataattctggaggtaacataagt

SEQ ID NO: 1101681 - DNA, 25 bp, Homo sapien
cataagtgaagtctaaatctccctt

SEQ ID NO: 1101682 - DNA, 25 bp, Homo sapien
taacataagtgaagtctaaatctcc

SEQ ID NO: 1101683 - DNA, 25 bp, Homo sapien
ccggctgtgaaacttggcagttcga

SEQ ID NO: 1101684 - DNA, 25 bp, Homo sapien
tccaaaaagcttcgaatgtcatcaa

SEQ ID NO: 1101685 - DNA, 25 bp, Homo sapien
cgataagacttaggtgacagattgt

SEQ ID NO: 1101686 - DNA, 25 bp, Homo sapien
tgtcatcaacctgattcctgaatcc

SEQ ID NO: 1101687 - DNA, 25 bp, Homo sapien
ttagttacactgatagatgcctttc

SEQ ID NO: 1101688 - DNA, 25 bp, Homo sapien
cctcctcttctagggcaagtaagag

SEQ ID NO: 1101689 - DNA, 25 bp, Homo sapien
aaataatggcactgacttagcctcc

SEQ ID NO: 1101690 - DNA, 25 bp, Homo sapien
caggaactgttgttctaggtatcca

SEQ ID NO: 1101691 - DNA, 25 bp, Homo sapien
gagcctgcctaatgggccaactgca

SEQ ID NO: 1101692 - DNA, 25 bp, Homo sapien
ctgggagcctgcctaatgggccaac

SEQ ID NO: 1101693 - DNA, 25 bp, Homo sapien
ttctgcagtagccagttatacatat

SEQ ID NO: 1101694 - DNA, 25 bp, Homo sapien
atattccgacacacagcaaaaaggt

SEQ ID NO: 1101695 - DNA, 25 bp, Homo sapien
tagagtccccacactatgtgagttg

SEQ ID NO: 1101696 - DNA, 25 bp, Homo sapien
caattcctaaatatgggctcagtaa

SEQ ID NO: 1101697 - DNA, 25 bp, Homo sapien
caatggcatttttagctgtgcacac

SEQ ID NO: 1101698 - DNA, 25 bp, Homo sapien
taccattgtgtacaggctcatccat

SEQ ID NO: 1101699 - DNA, 25 bp, Homo sapien
acatgatcaaatcagccattctcca

SEQ ID NO: 1101700 - DNA, 25 bp, Homo sapien
tcattatgaacatgatcaaatcagc

SEQ ID NO: 1101701 - DNA, 25 bp, Homo sapien
taaaatcattatgaacatgatcaaa

SEQ ID NO: 1101702 - DNA, 25 bp, Homo sapien
tatgaacatgatcaaatcagccatt

SEQ ID NO: 1101703 - DNA, 25 bp, Homo sapien
gtccaattcctggtcgctttgcata

SEQ ID NO: 1101704 - DNA, 25 bp, Homo sapien
tgaacatagcaccaaccagaattga

SEQ ID NO: 1101705 - DNA, 25 bp, Homo sapien
catatagcaatcgaatggctgggcc

SEQ ID NO: 1101706 - DNA, 25 bp, Homo sapien
ccaggagtagagtagagattacaga

SEQ ID NO: 1101707 - DNA, 25 bp, Homo sapien
gaaaaagggtattggactgacagtg

SEQ ID NO: 1101708 - DNA, 25 bp, Homo sapien
taggtcacacatatagcccaggtat

SEQ ID NO: 1101709 - DNA, 25 bp, Homo sapien
cgttcaaaatctgtgcaagtcgaat

SEQ ID NO: 1101710 - DNA, 25 bp, Homo sapien
tacatcacagtaagggcgacatcca

SEQ ID NO: 1101711 - DNA, 25 bp, Homo sapien
tacatggaaacaaccacgtctcctt

SEQ ID NO: 1101712 - DNA, 25 bp, Homo sapien
gcctgtagccggctcccaatggttg

SEQ ID NO: 1101713 - DNA, 25 bp, Homo sapien
ggctcccaatggttgacctcaagtg

SEQ ID NO: 1101714 - DNA, 25 bp, Homo sapien
aaccacgtctccttgcacagtgatg

SEQ ID NO: 1101715 - DNA, 25 bp, Homo sapien
cagtggtatgaatccagtgtgaaac

SEQ ID NO: 1101716 - DNA, 25 bp, Homo sapien
gctggaatatctgtgtgttggtcac

SEQ ID NO: 1101717 - DNA, 25 bp, Homo sapien
tttaaaactgttgtgtccagtggta

SEQ ID NO: 1101718 - DNA, 25 bp, Homo sapien
gtccagtggtatgaatccagtgtga

SEQ ID NO: 1101719 - DNA, 25 bp, Homo sapien
taaggccagcgtatcttgatgttcc

SEQ ID NO: 1101720 - DNA, 25 bp, Homo sapien
gaagaggatgctgggattgacatct

SEQ ID NO: 1101721 - DNA, 25 bp, Homo sapien
tacatcacatgcatctaactcaggc

SEQ ID NO: 1101722 - DNA, 25 bp, Homo sapien
tgtgcagtaatgttcccatggtgga

SEQ ID NO: 1101723 - DNA, 25 bp, Homo sapien
gggttgtctggagggatatctattg

SEQ ID NO: 1101724 - DNA, 25 bp, Homo sapien
gaaaccactttgtccgtaatgcctg

SEQ ID NO: 1101725 - DNA, 25 bp, Homo sapien
tgtccgtaatgcctggggttgtctg

SEQ ID NO: 1101726 - DNA, 25 bp, Homo sapien
cctggggttgtctggagggatatct

SEQ ID NO: 1101727 - DNA, 25 bp, Homo sapien
gactccatgaggcttgtcaccattg

SEQ ID NO: 1101728 - DNA, 25 bp, Homo sapien
cattggcattgccatgcggactgga

SEQ ID NO: 1101729 - DNA, 25 bp, Homo sapien
gattcactagggcagcgtggtcctc

SEQ ID NO: 1101730 - DNA, 25 bp, Homo sapien
ggaaagtgtcagaagttcatcatct

SEQ ID NO: 1101731 - DNA, 25 bp, Homo sapien
ccttccaggcccaaaaggtccacat

SEQ ID NO: 1101732 - DNA, 25 bp, Homo sapien
caaacaggtcactcagtagttcaga

SEQ ID NO: 1101733 - DNA, 25 bp, Homo sapien
attggtgggaggagccgctggcgga

SEQ ID NO: 1101734 - DNA, 25 bp, Homo sapien
gaagctgttactcattgcagaccct

SEQ ID NO: 1101735 - DNA, 25 bp, Homo sapien
ccactcttagggttggagacgcaga

SEQ ID NO: 1101736 - DNA, 25 bp, Homo sapien
tgttgactgggtagacgcaggtcca

SEQ ID NO: 1101737 - DNA, 25 bp, Homo sapien
cttctcccactcttagggttggaga

SEQ ID NO: 1101738 - DNA, 25 bp, Homo sapien
cactaggatgaaacacatcttccac

SEQ ID NO: 1101739 - DNA, 25 bp, Homo sapien
actggaagcactggatgtgttcaga

SEQ ID NO: 1101740 - DNA, 25 bp, Homo sapien
gctggagaaaggggtcactggaagc

SEQ ID NO: 1101741 - DNA, 25 bp, Homo sapien
atgtactgtgggcgaaggacttctt

SEQ ID NO: 1101742 - DNA, 25 bp, Homo sapien
catgtactgtgggcgaaggacttct

SEQ ID NO: 1101743 - DNA, 25 bp, Homo sapien
aatgttcacagcaggcgtactagaa

SEQ ID NO: 1101744 - DNA, 25 bp, Homo sapien
tttagcatgccagtcccaacctcca

SEQ ID NO: 1101745 - DNA, 25 bp, Homo sapien
tggtttagcatgccagtcccaacct

SEQ ID NO: 1101746 - DNA, 25 bp, Homo sapien
atgttcacagcaggcgtactagaag

SEQ ID NO: 1101747 - DNA, 25 bp, Homo sapien
tgcgaggatccggttgggctggtgg

SEQ ID NO: 1101748 - DNA, 25 bp, Homo sapien
tcggcaaaaggatccagagtctggg

SEQ ID NO: 1101749 - DNA, 25 bp, Homo sapien
ctagtgtcccaaggtcggcaaaagg

SEQ ID NO: 1101750 - DNA, 25 bp, Homo sapien
ttgctttgatgggtgggagtaccat

SEQ ID NO: 1101751 - DNA, 25 bp, Homo sapien
cacccaatccagttggtgtggtggg

SEQ ID NO: 1101752 - DNA, 25 bp, Homo sapien
tgatcctttcccacgttcgttctgg

SEQ ID NO: 1101753 - DNA, 25 bp, Homo sapien
gctgccagttgtaggcacctccctg

SEQ ID NO: 1101754 - DNA, 25 bp, Homo sapien
ctcacgttgtagttgggtcggttct

SEQ ID NO: 1101755 - DNA, 25 bp, Homo sapien
ggcatgactctatggaattgtccag

SEQ ID NO: 1101756 - DNA, 25 bp, Homo sapien
tccctgctagtcaagaacaaacatg

SEQ ID NO: 1101757 - DNA, 25 bp, Homo sapien
gagcacctgtgttctagccagtaga

SEQ ID NO: 1101758 - DNA, 25 bp, Homo sapien
gatgttacatatccccgacaactga

SEQ ID NO: 1101759 - DNA, 25 bp, Homo sapien
atctcagctattgtccgaggcccct

SEQ ID NO: 1101760 - DNA, 25 bp, Homo sapien
ttgtgagcattgaaaccttgaccag

SEQ ID NO: 1101761 - DNA, 25 bp, Homo sapien
gcattgaaaccttgaccagagagta

SEQ ID NO: 1101762 - DNA, 25 bp, Homo sapien
accttgaccagagagtaggtcttca

SEQ ID NO: 1101763 - DNA, 25 bp, Homo sapien
ttatctgggtgcaccaccaggacag

SEQ ID NO: 1101764 - DNA, 25 bp, Homo sapien
tccccagcccatagtacggtatgca

SEQ ID NO: 1101765 - DNA, 25 bp, Homo sapien
ggacagccttcctgtacaccttctt

SEQ ID NO: 1101766 - DNA, 25 bp, Homo sapien
tctggtgttaccaggtctgccatgc

SEQ ID NO: 1101767 - DNA, 25 bp, Homo sapien
gagccaccgtactcagacacaattt

SEQ ID NO: 1101768 - DNA, 25 bp, Homo sapien
aaaataggccatatgaaccagcaca

SEQ ID NO: 1101769 - DNA, 25 bp, Homo sapien
caaacttgagggctcgagcgattcg

SEQ ID NO: 1101770 - DNA, 25 bp, Homo sapien
taagcccctgtaatatatagtttga

SEQ ID NO: 1101771 - DNA, 25 bp, Homo sapien
catctttgcgtattgttcatagggt

SEQ ID NO: 1101772 - DNA, 25 bp, Homo sapien
ttttcaaattcagaccaggcatcat

SEQ ID NO: 1101773 - DNA, 25 bp, Homo sapien
atcattgagctccatgaaaatcatc

SEQ ID NO: 1101774 - DNA, 25 bp, Homo sapien
gaaaatcatctttgcgtattgttca

SEQ ID NO: 1101775 - DNA, 25 bp, Homo sapien
tcttggagtctgcataaagccactg

SEQ ID NO: 1101776 - DNA, 25 bp, Homo sapien
taagcattagcacaggtctgcagca

SEQ ID NO: 1101777 - DNA, 25 bp, Homo sapien
ccagtctgagatcgggaaagcattc

SEQ ID NO: 1101778 - DNA, 25 bp, Homo sapien
tagaatgctgagtaggctccccaaa

SEQ ID NO: 1101779 - DNA, 25 bp, Homo sapien
tttccggtatagcttgccacaagaa

SEQ ID NO: 1101780 - DNA, 25 bp, Homo sapien
acaggtcacagcaacatgtctcaca

SEQ ID NO: 1101781 - DNA, 25 bp, Homo sapien
gacaagcacatactggatcaaacat

SEQ ID NO: 1101782 - DNA, 25 bp, Homo sapien
tatttttgacatgccgcttttccgg

SEQ ID NO: 1101783 - DNA, 25 bp, Homo sapien
tacaaatattttagaccaatcacat

SEQ ID NO: 1101784 - DNA, 25 bp, Homo sapien
gctttgtcacaaccagttatttaaa

SEQ ID NO: 1101785 - DNA, 25 bp, Homo sapien
cctgttggtctgcatatattaagag

SEQ ID NO: 1101786 - DNA, 25 bp, Homo sapien
cagtgaatctgatcaacaacaagct

SEQ ID NO: 1101787 - DNA, 25 bp, Homo sapien
tgctcattccctacacagactgtgt

SEQ ID NO: 1101788 - DNA, 25 bp, Homo sapien
catgtagatagtacagtgacaggtc

SEQ ID NO: 1101789 - DNA, 25 bp, Homo sapien
cataatcaaaatcatgtgtgcgtgc

SEQ ID NO: 1101790 - DNA, 25 bp, Homo sapien
tcattcacggcattaggattcaact

SEQ ID NO: 1101791 - DNA, 25 bp, Homo sapien
ggtgaactattcctgcagttactgc

SEQ ID NO: 1101792 - DNA, 25 bp, Homo sapien
cattaccaggctgatgtgtggaatg

SEQ ID NO: 1101793 - DNA, 25 bp, Homo sapien
tagatgctacatttattttagccaa

SEQ ID NO: 1101794 - DNA, 25 bp, Homo sapien
attgtacatggatagaagacatatc

SEQ ID NO: 1101795 - DNA, 25 bp, Homo sapien
tctcttgctttttctccgttttcaa

SEQ ID NO: 1101796 - DNA, 25 bp, Homo sapien
ccctcttctcttgctttttctccgt

SEQ ID NO: 1101797 - DNA, 25 bp, Homo sapien
gtgccgtccctcttctcttgctttt

SEQ ID NO: 1101798 - DNA, 25 bp, Homo sapien
ctcttctcttgctttttctccgttt

SEQ ID NO: 1101799 - DNA, 25 bp, Homo sapien
gagtgtgtgcctgtctgccttcaca

SEQ ID NO: 1101800 - DNA, 25 bp, Homo sapien
cgagtgtgtgcctgtctgccttcac

SEQ ID NO: 1101801 - DNA, 25 bp, Homo sapien
gcgagtgtgtgcctgtctgccttca

SEQ ID NO: 1101802 - DNA, 25 bp, Homo sapien
tgagccctccaagtaatcctcaagc

SEQ ID NO: 1101803 - DNA, 25 bp, Homo sapien
ctcaagcccgttcaatgtgggttgg

SEQ ID NO: 1101804 - DNA, 25 bp, Homo sapien
gtcccacagagctttcccagagtaa

SEQ ID NO: 1101805 - DNA, 25 bp, Homo sapien
ggcctctcagaacgcagtgcacgca

SEQ ID NO: 1101806 - DNA, 25 bp, Homo sapien
tgcccaagccagaccgggagtcgcc

SEQ ID NO: 1101807 - DNA, 25 bp, Homo sapien
ccggcttcctgccacggcccgggca

SEQ ID NO: 1101808 - DNA, 25 bp, Homo sapien
cagaccgggagtcgccccgcggatc

SEQ ID NO: 1101809 - DNA, 25 bp, Homo sapien
gcccgggcagcctgcccaagccaga

SEQ ID NO: 1101810 - DNA, 25 bp, Homo sapien
catgtgtaacacgtgtaaaaccaaa

SEQ ID NO: 1101811 - DNA, 25 bp, Homo sapien
aagaactaggcctgtacttccacct

SEQ ID NO: 1101812 - DNA, 25 bp, Homo sapien
ggtgcaggcccttaacctcttattc

SEQ ID NO: 1101813 - DNA, 25 bp, Homo sapien
caatgaatcagtaggtcaaggtgac

SEQ ID NO: 1101814 - DNA, 25 bp, Homo sapien
gtccaatagccccactgaaggataa

SEQ ID NO: 1101815 - DNA, 25 bp, Homo sapien
taagaaaagtcagtccaatagcccc

SEQ ID NO: 1101816 - DNA, 25 bp, Homo sapien
aggcacatcccagcataagaaaagt

SEQ ID NO: 1101817 - DNA, 25 bp, Homo sapien
ccactgaaggataatgccacgagag

SEQ ID NO: 1101818 - DNA, 25 bp, Homo sapien
tgtccccagctagtccagagtaggt

SEQ ID NO: 1101819 - DNA, 25 bp, Homo sapien
taaactgggctccactaactcactg

SEQ ID NO: 1101820 - DNA, 25 bp, Homo sapien
ttatccgagctccagcgtactgtgc

SEQ ID NO: 1101821 - DNA, 25 bp, Homo sapien
gaaactcaggtgcactttatccgag

SEQ ID NO: 1101822 - DNA, 25 bp, Homo sapien
cctgggagacatctaagaactctcc

SEQ ID NO: 1101823 - DNA, 25 bp, Homo sapien
aatcacctgggagacatctaagaac

SEQ ID NO: 1101824 - DNA, 25 bp, Homo sapien
ggagacatctaagaactctccctcc

SEQ ID NO: 1101825 - DNA, 25 bp, Homo sapien
agacatctaagaactctccctcctt

SEQ ID NO: 1101826 - DNA, 25 bp, Homo sapien
atagatgataatcctggttcactat

SEQ ID NO: 1101827 - DNA, 25 bp, Homo sapien
agatgataatcctggttcactatca

SEQ ID NO: 1101828 - DNA, 25 bp, Homo sapien
aaacaggtagcaggttatatgtggc

SEQ ID NO: 1101829 - DNA, 25 bp, Homo sapien
aaaacaggtagcaggttatatgtgg

SEQ ID NO: 1101830 - DNA, 25 bp, Homo sapien
catatcaccacaatactgtaatcac

SEQ ID NO: 1101831 - DNA, 25 bp, Homo sapien
caggagttgggatgaagccacacta

SEQ ID NO: 1101832 - DNA, 25 bp, Homo sapien
ccatcagacatttcttatgcttcat

SEQ ID NO: 1101833 - DNA, 25 bp, Homo sapien
cactacaataattcatatcaccaca

SEQ ID NO: 1101834 - DNA, 25 bp, Homo sapien
tgcaaaagctagttcggtaaagatc

SEQ ID NO: 1101835 - DNA, 25 bp, Homo sapien
taaagatcttttgagtgcacgcatg

SEQ ID NO: 1101836 - DNA, 25 bp, Homo sapien
tgccctagcctacaaagcctttatg

SEQ ID NO: 1101837 - DNA, 25 bp, Homo sapien
tgttttctgtaccactgagccacaa

SEQ ID NO: 1101838 - DNA, 25 bp, Homo sapien
agatggcgtggaaaatcaggacgaa

SEQ ID NO: 1101839 - DNA, 25 bp, Homo sapien
tggaaaatcaggacgaataagggcc

SEQ ID NO: 1101840 - DNA, 25 bp, Homo sapien
tggcgtggaaaatcaggacgaataa

SEQ ID NO: 1101841 - DNA, 25 bp, Homo sapien
tcaggacgaataagggccagtaaac

SEQ ID NO: 1101842 - DNA, 25 bp, Homo sapien
gacaggcactactggttgcatctga

SEQ ID NO: 1101843 - DNA, 25 bp, Homo sapien
gaaatatgccagttcccgacaggca

SEQ ID NO: 1101844 - DNA, 25 bp, Homo sapien
aattccagtagtgaagaaatatgcc

SEQ ID NO: 1101845 - DNA, 25 bp, Homo sapien
gccacacgagcaagaataacaggaa

SEQ ID NO: 1101846 - DNA, 25 bp, Homo sapien
gaaggcatggccgaactactgttag

SEQ ID NO: 1101847 - DNA, 25 bp, Homo sapien
ttgagtccatgatcccatttgcagg

SEQ ID NO: 1101848 - DNA, 25 bp, Homo sapien
tgagcatgaaatggaggtcccagac

SEQ ID NO: 1101849 - DNA, 25 bp, Homo sapien
gaagtaaactcagcaacggttgggc

SEQ ID NO: 1101850 - DNA, 25 bp, Homo sapien
tgaatgtcattccatacaacagcca

SEQ ID NO: 1101851 - DNA, 25 bp, Homo sapien
caggagcagagacagtacctatttc

SEQ ID NO: 1101852 - DNA, 25 bp, Homo sapien
ggcccatatcaaatgccagtcggaa

SEQ ID NO: 1101853 - DNA, 25 bp, Homo sapien
aatgctatttatccttagaggccca

SEQ ID NO: 1101854 - DNA, 25 bp, Homo sapien
taatgtaacaggagacaatgaactg

SEQ ID NO: 1101855 - DNA, 25 bp, Homo sapien
caattacaatattgggtactgaaag

SEQ ID NO: 1101856 - DNA, 25 bp, Homo sapien
tgagtctaattacttctgtgatgct

SEQ ID NO: 1101857 - DNA, 25 bp, Homo sapien
gattgccttaagtaaaactcaagtg

SEQ ID NO: 1101858 - DNA, 25 bp, Homo sapien
tgactgcattgcctgccaacacaag

SEQ ID NO: 1101859 - DNA, 25 bp, Homo sapien
cttgaattgtaaggaaaatgactgc

SEQ ID NO: 1101860 - DNA, 25 bp, Homo sapien
ttgcctgccaacacaaggccgcagg

SEQ ID NO: 1101861 - DNA, 25 bp, Homo sapien
cccttgaattgtaaggaaaatgact

SEQ ID NO: 1101862 - DNA, 25 bp, Homo sapien
tgagcaggtaacacccagagaggtt

SEQ ID NO: 1101863 - DNA, 25 bp, Homo sapien
gcacatccccaagcaaaaggtttcg

SEQ ID NO: 1101864 - DNA, 25 bp, Homo sapien
gagagcaccgtgactacatgaacag

SEQ ID NO: 1101865 - DNA, 25 bp, Homo sapien
tagcatggactacaacacaaagagg

SEQ ID NO: 1101866 - DNA, 25 bp, Homo sapien
atatctcttcgggaagaagccagag

SEQ ID NO: 1101867 - DNA, 25 bp, Homo sapien
ctatatctcttcgggaagaagccag

SEQ ID NO: 1101868 - DNA, 25 bp, Homo sapien
aagccagagccgtagagaagtcagg

SEQ ID NO: 1101869 - DNA, 25 bp, Homo sapien
agccagagccgtagagaagtcaggg

SEQ ID NO: 1101870 - DNA, 25 bp, Homo sapien
tgattacaggatccaacatgacagg

SEQ ID NO: 1101871 - DNA, 25 bp, Homo sapien
ggaagacaagtacatcaacacgtag

SEQ ID NO: 1101872 - DNA, 25 bp, Homo sapien
tactcagatcacaagcctcaaggat

SEQ ID NO: 1101873 - DNA, 25 bp, Homo sapien
gaaaagacctacaggacggaagaca

SEQ ID NO: 1101874 - DNA, 25 bp, Homo sapien
gcttggcctgggaactcaatcacca

SEQ ID NO: 1101875 - DNA, 25 bp, Homo sapien
taaaaacgcaggtgcagcagtcatg

SEQ ID NO: 1101876 - DNA, 25 bp, Homo sapien
cagtcatgggaatggcagtcggccc

SEQ ID NO: 1101877 - DNA, 25 bp, Homo sapien
tgtggaaaagtgtctcaaagtctgc

SEQ ID NO: 1101878 - DNA, 25 bp, Homo sapien
cttctataagctgctggaatctttc

SEQ ID NO: 1101879 - DNA, 25 bp, Homo sapien
tttcttcattccgttctcccattct

SEQ ID NO: 1101880 - DNA, 25 bp, Homo sapien
atccttctataagctgctggaatct

SEQ ID NO: 1101881 - DNA, 25 bp, Homo sapien
gaatctttcttcattccgttctccc

SEQ ID NO: 1101882 - DNA, 25 bp, Homo sapien
aacaactatgaaaagcaggaccagc

SEQ ID NO: 1101883 - DNA, 25 bp, Homo sapien
gacaccacctaagcatttccctgag

SEQ ID NO: 1101884 - DNA, 25 bp, Homo sapien
cactgttgtacgctggtagcatggc

SEQ ID NO: 1101885 - DNA, 25 bp, Homo sapien
atcgtcctctcacatcacatttggg

SEQ ID NO: 1101886 - DNA, 25 bp, Homo sapien
gctggtacttcttccctctaggtca

SEQ ID NO: 1101887 - DNA, 25 bp, Homo sapien
tgcagtctcccttgtatagtaaccc

SEQ ID NO: 1101888 - DNA, 25 bp, Homo sapien
agtggtaagagttggcatatcagcc

SEQ ID NO: 1101889 - DNA, 25 bp, Homo sapien
tcagtgattcaggatcctcaggctc

SEQ ID NO: 1101890 - DNA, 25 bp, Homo sapien
gaagtatatttacatacctggaata

SEQ ID NO: 1101891 - DNA, 25 bp, Homo sapien
gataatgtgtctgaagttgtaccaa

SEQ ID NO: 1101892 - DNA, 25 bp, Homo sapien
ttagaatgaaatgagttgggcaact

SEQ ID NO: 1101893 - DNA, 25 bp, Homo sapien
cctatgtcttaaacattggtctata

SEQ ID NO: 1101894 - DNA, 25 bp, Homo sapien
catatgatatgtggtccttcaccac

SEQ ID NO: 1101895 - DNA, 25 bp, Homo sapien
tacatatgatatgtggtccttcacc

SEQ ID NO: 1101896 - DNA, 25 bp, Homo sapien
atgatatgtggtccttcaccacatg

SEQ ID NO: 1101897 - DNA, 25 bp, Homo sapien
gcttacatatgatatgtggtccttc

SEQ ID NO: 1101898 - DNA, 25 bp, Homo sapien
taatacgccagtacagaaatttcct

SEQ ID NO: 1101899 - DNA, 25 bp, Homo sapien
tcaattatgtgttcctggcttgctg

SEQ ID NO: 1101900 - DNA, 25 bp, Homo sapien
caaagcagacggaatcaactccttg

SEQ ID NO: 1101901 - DNA, 25 bp, Homo sapien
aatagcaccatgtaacagttaagcc

SEQ ID NO: 1101902 - DNA, 25 bp, Homo sapien
ccctgtttcttgtaccctatccaag

SEQ ID NO: 1101903 - DNA, 25 bp, Homo sapien
tcttgtaccctatccaagcataaga

SEQ ID NO: 1101904 - DNA, 25 bp, Homo sapien
gtttcttgtaccctatccaagcata

SEQ ID NO: 1101905 - DNA, 25 bp, Homo sapien
ctgtttcttgtaccctatccaagca

SEQ ID NO: 1101906 - DNA, 25 bp, Homo sapien
cagtgttttcttccgcttcagcaga

SEQ ID NO: 1101907 - DNA, 25 bp, Homo sapien
agtgttttcttccgcttcagcagag

SEQ ID NO: 1101908 - DNA, 25 bp, Homo sapien
ctcgcccaaggtgcggggcaactct

SEQ ID NO: 1101909 - DNA, 25 bp, Homo sapien
tcgggcacctgcgtcgcgcgcgctc

SEQ ID NO: 1101910 - DNA, 25 bp, Homo sapien
gcgcgctcggctggccgtgggctct

SEQ ID NO: 1101911 - DNA, 25 bp, Homo sapien
tccaactcgaccgaaggcagagatg

SEQ ID NO: 1101912 - DNA, 25 bp, Homo sapien
agaggtggcaatagggggtgtcgga

SEQ ID NO: 1101913 - DNA, 25 bp, Homo sapien
gcaatagggggtgtcggagagggaa

SEQ ID NO: 1101914 - DNA, 25 bp, Homo sapien
tggcaatagggggtgtcggagaggg

SEQ ID NO: 1101915 - DNA, 25 bp, Homo sapien
ggaagaggtggcaatagggggtgtc

SEQ ID NO: 1101916 - DNA, 25 bp, Homo sapien
gggctccgcgtctgccacgcgcgtc

SEQ ID NO: 1101917 - DNA, 25 bp, Homo sapien
ctgccccggactcccagtccctaag

SEQ ID NO: 1101918 - DNA, 25 bp, Homo sapien
cagtccctaagcggcccgcggggct

SEQ ID NO: 1101919 - DNA, 25 bp, Homo sapien
gcgcgtcccaaagccccattctcga

SEQ ID NO: 1101920 - DNA, 25 bp, Homo sapien
tgttttaggtggcagtcccttcagt

SEQ ID NO: 1101921 - DNA, 25 bp, Homo sapien
gtgggaaacaaaagctgaggtctaa

SEQ ID NO: 1101922 - DNA, 25 bp, Homo sapien
ttgtcattcgaaccagcaaattctc

SEQ ID NO: 1101923 - DNA, 25 bp, Homo sapien
tgaggtctaaaccatccctacagaa

SEQ ID NO: 1101924 - DNA, 25 bp, Homo sapien
tcagttgggtctctttttctcacca

SEQ ID NO: 1101925 - DNA, 25 bp, Homo sapien
tgcggttcccaaatgattcctcagt

SEQ ID NO: 1101926 - DNA, 25 bp, Homo sapien
aggccacccttcagtataaagaact

SEQ ID NO: 1101927 - DNA, 25 bp, Homo sapien
ggccacccttcagtataaagaactc

SEQ ID NO: 1101928 - DNA, 25 bp, Homo sapien
actccattaggctgacaagagccca

SEQ ID NO: 1101929 - DNA, 25 bp, Homo sapien
aaagaactccattaggctgacaaga

SEQ ID NO: 1101930 - DNA, 25 bp, Homo sapien
tctacttcaccagagaatatgaggg

SEQ ID NO: 1101931 - DNA, 25 bp, Homo sapien
gaccgtgagctgttggatccatcca

SEQ ID NO: 1101932 - DNA, 25 bp, Homo sapien
ttccaaatgacttagcaaccagggt

SEQ ID NO: 1101933 - DNA, 25 bp, Homo sapien
attgctgagagagtaagtccccaca

SEQ ID NO: 1101934 - DNA, 25 bp, Homo sapien
acaaaaccacacagaatttttgaca

SEQ ID NO: 1101935 - DNA, 25 bp, Homo sapien
tcatacagtgcattgtcatgcaacc

SEQ ID NO: 1101936 - DNA, 25 bp, Homo sapien
taagtatcccggtaaatactgataa

SEQ ID NO: 1101937 - DNA, 25 bp, Homo sapien
caatcaggaattggtcaaatagact

SEQ ID NO: 1101938 - DNA, 25 bp, Homo sapien
gacacatgaagtttcaatgcagtat

SEQ ID NO: 1101939 - DNA, 25 bp, Homo sapien
ggttcaacagctgtctcataatgtc

SEQ ID NO: 1101940 - DNA, 25 bp, Homo sapien
caatgttgtctgcacataaggagca

SEQ ID NO: 1101941 - DNA, 25 bp, Homo sapien
atttggtggcatgcaagacaactta

SEQ ID NO: 1101942 - DNA, 25 bp, Homo sapien
ttggatatgacaagttaaacgcagt

SEQ ID NO: 1101943 - DNA, 25 bp, Homo sapien
tattctttcagagatattccttgcc

SEQ ID NO: 1101944 - DNA, 25 bp, Homo sapien
gatgcagaatttttaactacactag

SEQ ID NO: 1101945 - DNA, 25 bp, Homo sapien
tacactagctacaatcagtatgcat

SEQ ID NO: 1101946 - DNA, 25 bp, Homo sapien
gcagtttgttacacagatcatcaca

SEQ ID NO: 1101947 - DNA, 25 bp, Homo sapien
tcatcacgcttttaagggaggaaaa

SEQ ID NO: 1101948 - DNA, 25 bp, Homo sapien
aatcatcacgcttttaagggaggaa

SEQ ID NO: 1101949 - DNA, 25 bp, Homo sapien
catcacgcttttaagggaggaaaag

SEQ ID NO: 1101950 - DNA, 25 bp, Homo sapien
ccaatcatcacgcttttaagggagg

SEQ ID NO: 1101951 - DNA, 25 bp, Homo sapien
ccgcctaggcctcctaaatgctagg

SEQ ID NO: 1101952 - DNA, 25 bp, Homo sapien
gtggcatgatcatgtgatcatggct

SEQ ID NO: 1101953 - DNA, 25 bp, Homo sapien
gattgcaggcagttaagccactgtg

SEQ ID NO: 1101954 - DNA, 25 bp, Homo sapien
agcctccatctctcaagcaatcttc

SEQ ID NO: 1101955 - DNA, 25 bp, Homo sapien
taaaagatggaccttatagttataa

SEQ ID NO: 1101956 - DNA, 25 bp, Homo sapien
agtctccttttagccagcactgtat

SEQ ID NO: 1101957 - DNA, 25 bp, Homo sapien
tagttataattcctgaatagattct

SEQ ID NO: 1101958 - DNA, 25 bp, Homo sapien
ttttaagtctccttttagccagcac

SEQ ID NO: 1101959 - DNA, 25 bp, Homo sapien
tccgtggaggattcaactgagggct

SEQ ID NO: 1101960 - DNA, 25 bp, Homo sapien
cccctttctgagctaggatgagcag

SEQ ID NO: 1101961 - DNA, 25 bp, Homo sapien
gggctgcacttcaaataggagcttg

SEQ ID NO: 1101962 - DNA, 25 bp, Homo sapien
caaagtcaccgataatggctggagg

SEQ ID NO: 1101963 - DNA, 25 bp, Homo sapien
ctgtgcagttttggtttttgttcat

SEQ ID NO: 1101964 - DNA, 25 bp, Homo sapien
aacctggggatagggagatagtgca

SEQ ID NO: 1101965 - DNA, 25 bp, Homo sapien
gaacctggggatagggagatagtgc

SEQ ID NO: 1101966 - DNA, 25 bp, Homo sapien
acctggggatagggagatagtgcat

SEQ ID NO: 1101967 - DNA, 25 bp, Homo sapien
gactggaaaattactccaccagatg

SEQ ID NO: 1101968 - DNA, 25 bp, Homo sapien
tgcaattgcagtgaaccatctgaaa

SEQ ID NO: 1101969 - DNA, 25 bp, Homo sapien
gaactgacattagaggtgactggaa

SEQ ID NO: 1101970 - DNA, 25 bp, Homo sapien
caggcacaagacattcacaacattc

SEQ ID NO: 1101971 - DNA, 25 bp, Homo sapien
tatgcaaacctaatggtggatcagg

SEQ ID NO: 1101972 - DNA, 25 bp, Homo sapien
tattgaagtggaaatggtaccaatg

SEQ ID NO: 1101973 - DNA, 25 bp, Homo sapien
gcaaacctaatggtggatcaggctt

SEQ ID NO: 1101974 - DNA, 25 bp, Homo sapien
ccatatgcaaacctaatggtggatc

SEQ ID NO: 1101975 - DNA, 25 bp, Homo sapien
taatatcttacacagtagttatctg

SEQ ID NO: 1101976 - DNA, 25 bp, Homo sapien
aagtgaggataagctaatctcatca

SEQ ID NO: 1101977 - DNA, 25 bp, Homo sapien
gccacagcggaattaaaacaaacat

SEQ ID NO: 1101978 - DNA, 25 bp, Homo sapien
tgatgtggaacctttactaaaagtg

SEQ ID NO: 1101979 - DNA, 25 bp, Homo sapien
ggaagtatactgtctactagcaggg

SEQ ID NO: 1101980 - DNA, 25 bp, Homo sapien
ctgaacctcatacgaagacccagga

SEQ ID NO: 1101981 - DNA, 25 bp, Homo sapien
tgtggtaaagacacgaggagtactc

SEQ ID NO: 1101982 - DNA, 25 bp, Homo sapien
tagcagggatgtagctgagacaatc

SEQ ID NO: 1101983 - DNA, 25 bp, Homo sapien
ggcctcaaaatgtaagatgcttata

SEQ ID NO: 1101984 - DNA, 25 bp, Homo sapien
gcctagaggctctgacagaatttta

SEQ ID NO: 1101985 - DNA, 25 bp, Homo sapien
tatttccctcccagtagaagtggct

SEQ ID NO: 1101986 - DNA, 25 bp, Homo sapien
aattcacaaattggcctgttcaaag

SEQ ID NO: 1101987 - DNA, 25 bp, Homo sapien
gcagcagtacactgcatcataggta

SEQ ID NO: 1101988 - DNA, 25 bp, Homo sapien
tataattcagcatagcgatgatggc

SEQ ID NO: 1101989 - DNA, 25 bp, Homo sapien
gcagtgaaaagaaacattagaccca

SEQ ID NO: 1101990 - DNA, 25 bp, Homo sapien
cacaacatcatactggctttgagga

SEQ ID NO: 1101991 - DNA, 25 bp, Homo sapien
tatgatacctcaattgcaaagtgct

SEQ ID NO: 1101992 - DNA, 25 bp, Homo sapien
ttccgcaagtgactggattgtactg

SEQ ID NO: 1101993 - DNA, 25 bp, Homo sapien
tactggttgaccatctgcaagtcat

SEQ ID NO: 1101994 - DNA, 25 bp, Homo sapien
gcaagtcattttagttaagtaccca

SEQ ID NO: 1101995 - DNA, 25 bp, Homo sapien
gacacatgttggtggagagtcaagt

SEQ ID NO: 1101996 - DNA, 25 bp, Homo sapien
gctcagatatgggatgaatagatgg

SEQ ID NO: 1101997 - DNA, 25 bp, Homo sapien
tccacattgtgtagccagataatag

SEQ ID NO: 1101998 - DNA, 25 bp, Homo sapien
tagagagtgattgatcctaatccac

SEQ ID NO: 1101999 - DNA, 25 bp, Homo sapien
atgcctggtacagcagaggcctctg

SEQ ID NO: 1102000 - DNA, 25 bp, Homo sapien
ctgcccacggctcagaacctaaaag

SEQ ID NO: 1102001 - DNA, 25 bp, Homo sapien
cagaacctaaaaggtcaatgcctgg

SEQ ID NO: 1102002 - DNA, 25 bp, Homo sapien
ctaaaaggtcaatgcctggtacagc

SEQ ID NO: 1102003 - DNA, 25 bp, Homo sapien
tcttttccacttaaaccatagcgaa

SEQ ID NO: 1102004 - DNA, 25 bp, Homo sapien
tctggaattgaaggttattctctgg

SEQ ID NO: 1102005 - DNA, 25 bp, Homo sapien
ctgctttcacactggatggaggcag

SEQ ID NO: 1102006 - DNA, 25 bp, Homo sapien
tcaataatccaatgtttatagtaat

SEQ ID NO: 1102007 - DNA, 25 bp, Homo sapien
gcatagactgcacacaagtctggaa

SEQ ID NO: 1102008 - DNA, 25 bp, Homo sapien
gactgcacacaagtctggaactggg

SEQ ID NO: 1102009 - DNA, 25 bp, Homo sapien
aacagcatagactgcacacaagtct

SEQ ID NO: 1102010 - DNA, 25 bp, Homo sapien
tgcacacaagtctggaactgggaga

SEQ ID NO: 1102011 - DNA, 25 bp, Homo sapien
ttatatccatgacaactgtgtaggc

SEQ ID NO: 1102012 - DNA, 25 bp, Homo sapien
tgctccaattactccaatatcccag

SEQ ID NO: 1102013 - DNA, 25 bp, Homo sapien
gacaactgtgtaggctggattgctc

SEQ ID NO: 1102014 - DNA, 25 bp, Homo sapien
agtccatctagcctcttacagcgca

SEQ ID NO: 1102015 - DNA, 25 bp, Homo sapien
ttcatagtatctccattaattattc

SEQ ID NO: 1102016 - DNA, 25 bp, Homo sapien
catagtatctccattaattattctc

SEQ ID NO: 1102017 - DNA, 25 bp, Homo sapien
atagtatctccattaattattctcc

SEQ ID NO: 1102018 - DNA, 25 bp, Homo sapien
tttttcatagtatctccattaatta

SEQ ID NO: 1102019 - DNA, 25 bp, Homo sapien
cagaaccgtaacagtatgtgcttgc

SEQ ID NO: 1102020 - DNA, 25 bp, Homo sapien
tctgaacactgcacaatgagtcatt

SEQ ID NO: 1102021 - DNA, 25 bp, Homo sapien
tctgaccatgttccattgcaggaag

SEQ ID NO: 1102022 - DNA, 25 bp, Homo sapien
caattgaattgatggccagaaccgt

SEQ ID NO: 1102023 - DNA, 25 bp, Homo sapien
aatacattagcttgtaatcactggg

SEQ ID NO: 1102024 - DNA, 25 bp, Homo sapien
tcactgggtgatagtatccaggaaa

SEQ ID NO: 1102025 - DNA, 25 bp, Homo sapien
ctgctgtttaaaggataagcactga

SEQ ID NO: 1102026 - DNA, 25 bp, Homo sapien
cagatgaagagattctaagccattt

SEQ ID NO: 1102027 - DNA, 25 bp, Homo sapien
tagtgtcatattaatccatgagagc

SEQ ID NO: 1102028 - DNA, 25 bp, Homo sapien
ccatgagagcaacttactaaagtat

SEQ ID NO: 1102029 - DNA, 25 bp, Homo sapien
ttcattaactggctatattaataga

SEQ ID NO: 1102030 - DNA, 25 bp, Homo sapien
tatgtattaggatggtagtatcctc

SEQ ID NO: 1102031 - DNA, 25 bp, Homo sapien
aatgagaaaatgtcaaaggaaacag

SEQ ID NO: 1102032 - DNA, 25 bp, Homo sapien
atgagaaaatgtcaaaggaaacaga

SEQ ID NO: 1102033 - DNA, 25 bp, Homo sapien
tgagaaaatgtcaaaggaaacagaa

SEQ ID NO: 1102034 - DNA, 25 bp, Homo sapien
gagaaaatgtcaaaggaaacagaat

SEQ ID NO: 1102035 - DNA, 25 bp, Homo sapien
ctggtacttctcaatggggataaaa

SEQ ID NO: 1102036 - DNA, 25 bp, Homo sapien
ggtacttctcaatggggataaaatg

SEQ ID NO: 1102037 - DNA, 25 bp, Homo sapien
aagactgaactggtacttctcaatg

SEQ ID NO: 1102038 - DNA, 25 bp, Homo sapien
gactgaactggtacttctcaatggg

SEQ ID NO: 1102039 - DNA, 25 bp, Homo sapien
gactttggactcttccatgattcta

SEQ ID NO: 1102040 - DNA, 25 bp, Homo sapien
tttggactcttccatgattctatca

SEQ ID NO: 1102041 - DNA, 25 bp, Homo sapien
tggactcttccatgattctatcaga

SEQ ID NO: 1102042 - DNA, 25 bp, Homo sapien
gactcttccatgattctatcagaaa

SEQ ID NO: 1102043 - DNA, 25 bp, Homo sapien
tggcacaattacatataaacctgca

SEQ ID NO: 1102044 - DNA, 25 bp, Homo sapien
tgcatcactctggtgtttttcaata

SEQ ID NO: 1102045 - DNA, 25 bp, Homo sapien
tacatataaacctgcatcactctgg

SEQ ID NO: 1102046 - DNA, 25 bp, Homo sapien
taaacctgcatcactctggtgtttt

SEQ ID NO: 1102047 - DNA, 25 bp, Homo sapien
tattaataatgttccaagcaataag

SEQ ID NO: 1102048 - DNA, 25 bp, Homo sapien
tggtgtgatattaataatgttccaa

SEQ ID NO: 1102049 - DNA, 25 bp, Homo sapien
tgttccaagcaataagatggaagag

SEQ ID NO: 1102050 - DNA, 25 bp, Homo sapien
ctttggtgtgatattaataatgttc

SEQ ID NO: 1102051 - DNA, 25 bp, Homo sapien
tgaagttatgttgtccttgacagag

SEQ ID NO: 1102052 - DNA, 25 bp, Homo sapien
gaagttatgttgtccttgacagagc

SEQ ID NO: 1102053 - DNA, 25 bp, Homo sapien
cttccttgaagttatgttgtccttg

SEQ ID NO: 1102054 - DNA, 25 bp, Homo sapien
tcttccttgaagttatgttgtcctt

SEQ ID NO: 1102055 - DNA, 25 bp, Homo sapien
gccatttttgccacctccaagaaca

SEQ ID NO: 1102056 - DNA, 25 bp, Homo sapien
cccaaactgcagaactctgaaagcc

SEQ ID NO: 1102057 - DNA, 25 bp, Homo sapien
taggatttcctgttataagcttgtt

SEQ ID NO: 1102058 - DNA, 25 bp, Homo sapien
cacctccaagaacatactgcttagg

SEQ ID NO: 1102059 - DNA, 25 bp, Homo sapien
tcagcacagagagtatcatggcacc

SEQ ID NO: 1102060 - DNA, 25 bp, Homo sapien
tcataaatgaactgactgctccagg

SEQ ID NO: 1102061 - DNA, 25 bp, Homo sapien
tgctccaggtcaccactaaaaggct

SEQ ID NO: 1102062 - DNA, 25 bp, Homo sapien
catccacggaactcaggcatttgcc

SEQ ID NO: 1102063 - DNA, 25 bp, Homo sapien
ctgaaaattaagtccttgtgcccag

SEQ ID NO: 1102064 - DNA, 25 bp, Homo sapien
caattcttggggttcggaacatctt

SEQ ID NO: 1102065 - DNA, 25 bp, Homo sapien
tcttggggttcggaacatcttccca

SEQ ID NO: 1102066 - DNA, 25 bp, Homo sapien
tgaaaattaagtccttgtgcccagg

SEQ ID NO: 1102067 - DNA, 25 bp, Homo sapien
catatggcgtctagattgcaatcgt

SEQ ID NO: 1102068 - DNA, 25 bp, Homo sapien
tgttctccatcagattgacccttaa

SEQ ID NO: 1102069 - DNA, 25 bp, Homo sapien
gaactctcatacgataaactatgcg

SEQ ID NO: 1102070 - DNA, 25 bp, Homo sapien
tgtgacacagaagcaacatatgtat

SEQ ID NO: 1102071 - DNA, 25 bp, Homo sapien
tgcaggtttaaactgcattttgctg

SEQ ID NO: 1102072 - DNA, 25 bp, Homo sapien
ggaaaaataatttgctgcaggttta

SEQ ID NO: 1102073 - DNA, 25 bp, Homo sapien
tgatgtgggcctgatcatttcatgg

SEQ ID NO: 1102074 - DNA, 25 bp, Homo sapien
attttgctgatgtgggcctgatcat

SEQ ID NO: 1102075 - DNA, 25 bp, Homo sapien
gtagttcctttgtgccaggcatttt

SEQ ID NO: 1102076 - DNA, 25 bp, Homo sapien
ctccacccagtagttcctttgtgcc

SEQ ID NO: 1102077 - DNA, 25 bp, Homo sapien
ccacccagtagttcctttgtgccag

SEQ ID NO: 1102078 - DNA, 25 bp, Homo sapien
cagtagttcctttgtgccaggcatt

SEQ ID NO: 1102079 - DNA, 25 bp, Homo sapien
gtggcagcattgtgcacacctcagg

SEQ ID NO: 1102080 - DNA, 25 bp, Homo sapien
tagtgttatttatgcgcctggtcag

SEQ ID NO: 1102081 - DNA, 25 bp, Homo sapien
gcctggtcagccctagtaataaact

SEQ ID NO: 1102082 - DNA, 25 bp, Homo sapien
cagcgaggtaggacgtagtctacaa

SEQ ID NO: 1102083 - DNA, 25 bp, Homo sapien
ttgacatcggaaccactgagaagtg

SEQ ID NO: 1102084 - DNA, 25 bp, Homo sapien
gagtaaatcctcgttgtagccagaa

SEQ ID NO: 1102085 - DNA, 25 bp, Homo sapien
caaactaacaatcgaggagggcaga

SEQ ID NO: 1102086 - DNA, 25 bp, Homo sapien
gaacaacacctccagtaaagatggg

SEQ ID NO: 1102087 - DNA, 25 bp, Homo sapien
caggaacacacgacctagaaggaac

SEQ ID NO: 1102088 - DNA, 25 bp, Homo sapien
gaaaattagccctgccgtatacagc

SEQ ID NO: 1102089 - DNA, 25 bp, Homo sapien
gaccagaatatatccagctgcagct

SEQ ID NO: 1102090 - DNA, 25 bp, Homo sapien
cgtatacagcggagacagtgcgtga

SEQ ID NO: 1102091 - DNA, 25 bp, Homo sapien
ggagagaagaacaacgagctggaaa

SEQ ID NO: 1102092 - DNA, 25 bp, Homo sapien
ttttgaactaaggtggcttctccca

SEQ ID NO: 1102093 - DNA, 25 bp, Homo sapien
caagcatgggttctggactataaat

SEQ ID NO: 1102094 - DNA, 25 bp, Homo sapien
ctaaggacagctttaattaccccag

SEQ ID NO: 1102095 - DNA, 25 bp, Homo sapien
tctggtcccgtcaatctgacctggg

SEQ ID NO: 1102096 - DNA, 25 bp, Homo sapien
ttcaaaagaacacccgaataggctg

SEQ ID NO: 1102097 - DNA, 25 bp, Homo sapien
tgtgggcaaaaagctcaattcatac

SEQ ID NO: 1102098 - DNA, 25 bp, Homo sapien
tgtgagcaacgcagcataattcgtg

SEQ ID NO: 1102099 - DNA, 25 bp, Homo sapien
tgtctctggctttcgtcctcatagg

SEQ ID NO: 1102100 - DNA, 25 bp, Homo sapien
ctgttgttgaaagtagagagaccac

SEQ ID NO: 1102101 - DNA, 25 bp, Homo sapien
ttttgctagagaagcacttggtgac

SEQ ID NO: 1102102 - DNA, 25 bp, Homo sapien
tcagcgtggcgtatttaacaaaggg

SEQ ID NO: 1102103 - DNA, 25 bp, Homo sapien
gaacaagtttggaattgaggcatgt

SEQ ID NO: 1102104 - DNA, 25 bp, Homo sapien
ttacacagttaggtcacacatcttg

SEQ ID NO: 1102105 - DNA, 25 bp, Homo sapien
ccatgatcttatgagtctgagtaga

SEQ ID NO: 1102106 - DNA, 25 bp, Homo sapien
cctggagaactctgatgtccgtgaa

SEQ ID NO: 1102107 - DNA, 25 bp, Homo sapien
tacatctcacaaaagatggtgtctg

SEQ ID NO: 1102108 - DNA, 25 bp, Homo sapien
acaacacgccctctgaaaaaacaat

SEQ ID NO: 1102109 - DNA, 25 bp, Homo sapien
cattggtaggcttatgaaggctttc

SEQ ID NO: 1102110 - DNA, 25 bp, Homo sapien
ttatttctagctggaaacaagggac

SEQ ID NO: 1102111 - DNA, 25 bp, Homo sapien
catctttaaggagtatcatagtaac

SEQ ID NO: 1102112 - DNA, 25 bp, Homo sapien
cacagtggttggtttatgtagacag

SEQ ID NO: 1102113 - DNA, 25 bp, Homo sapien
cactgactgtaactgtgggcaaatt

SEQ ID NO: 1102114 - DNA, 25 bp, Homo sapien
ggttaaggtatgtaaagtactgcac

SEQ ID NO: 1102115 - DNA, 25 bp, Homo sapien
gcatattgtccaactccgcctgtga

SEQ ID NO: 1102116 - DNA, 25 bp, Homo sapien
aaacctcatgaagggctaggcgcgg

SEQ ID NO: 1102117 - DNA, 25 bp, Homo sapien
tacagcactacagtggtcctgggac

SEQ ID NO: 1102118 - DNA, 25 bp, Homo sapien
cgcctgtgagccctgtatgcataat

SEQ ID NO: 1102119 - DNA, 25 bp, Homo sapien
taccatgtatgaaactgatagttcc

SEQ ID NO: 1102120 - DNA, 25 bp, Homo sapien
aaaaagagacatgtggacctaggcc

SEQ ID NO: 1102121 - DNA, 25 bp, Homo sapien
ggtgaaattatgatcccaaagtctg

SEQ ID NO: 1102122 - DNA, 25 bp, Homo sapien
gacctaggccaaaatacttaccatg

SEQ ID NO: 1102123 - DNA, 25 bp, Homo sapien
atggatggccgagctacaataaaac

SEQ ID NO: 1102124 - DNA, 25 bp, Homo sapien
ctgatggatggccgagctacaataa

SEQ ID NO: 1102125 - DNA, 25 bp, Homo sapien
atgctgatggatggccgagctacaa

SEQ ID NO: 1102126 - DNA, 25 bp, Homo sapien
aatgctgatggatggccgagctaca

SEQ ID NO: 1102127 - DNA, 25 bp, Homo sapien
aaggcaaagcagaaggacggttgtc

SEQ ID NO: 1102128 - DNA, 25 bp, Homo sapien
gcacaaggcaaagcagaaggacggt

SEQ ID NO: 1102129 - DNA, 25 bp, Homo sapien
agagcacaaggcaaagcagaaggac

SEQ ID NO: 1102130 - DNA, 25 bp, Homo sapien
cacaaggcaaagcagaaggacggtt

SEQ ID NO: 1102131 - DNA, 25 bp, Homo sapien
atgtcaccgtagtcactctgcaggg

SEQ ID NO: 1102132 - DNA, 25 bp, Homo sapien
aacaattgcagatgtcaccgtagtc

SEQ ID NO: 1102133 - DNA, 25 bp, Homo sapien
ggctgcactggcaaagatcccagag

SEQ ID NO: 1102134 - DNA, 25 bp, Homo sapien
ctgcactggcaaagatcccagagca

SEQ ID NO: 1102135 - DNA, 25 bp, Homo sapien
gagccaagcatctcctgaggggcct

SEQ ID NO: 1102136 - DNA, 25 bp, Homo sapien
ctctcttgcttaagtccatacgcag

SEQ ID NO: 1102137 - DNA, 25 bp, Homo sapien
ttagccagaggagtcctgaattgca

SEQ ID NO: 1102138 - DNA, 25 bp, Homo sapien
cgcagaatttcgttagccagaggag

SEQ ID NO: 1102139 - DNA, 25 bp, Homo sapien
gtggtctgcgttctgtactcacttt

SEQ ID NO: 1102140 - DNA, 25 bp, Homo sapien
caggtggtctgcgttctgtactcac

SEQ ID NO: 1102141 - DNA, 25 bp, Homo sapien
cagcaggtggtctgcgttctgtact

SEQ ID NO: 1102142 - DNA, 25 bp, Homo sapien
ggtggtctgcgttctgtactcactt

SEQ ID NO: 1102143 - DNA, 25 bp, Homo sapien
cttgcggtttctgtcccaagtggga

SEQ ID NO: 1102144 - DNA, 25 bp, Homo sapien
caagtgggaccgttgtcctcattct

SEQ ID NO: 1102145 - DNA, 25 bp, Homo sapien
gatgttagtggagttagagacctac

SEQ ID NO: 1102146 - DNA, 25 bp, Homo sapien
tcaggactgacaattccttgcggtt

SEQ ID NO: 1102147 - DNA, 25 bp, Homo sapien
ctaagcatgtatctgtgaatcattt

SEQ ID NO: 1102148 - DNA, 25 bp, Homo sapien
gaatggttgagatcatggacctcat

SEQ ID NO: 1102149 - DNA, 25 bp, Homo sapien
tcttcagctttcagaggaacccctt

SEQ ID NO: 1102150 - DNA, 25 bp, Homo sapien
tgagcctctgcaaacatacaggtgc

SEQ ID NO: 1102151 - DNA, 25 bp, Homo sapien
gggaggcgagagagccagcggggca

SEQ ID NO: 1102152 - DNA, 25 bp, Homo sapien
ggggaggcgagagagccagcggggc

SEQ ID NO: 1102153 - DNA, 25 bp, Homo sapien
tgggggaggcgagagagccagcggg

SEQ ID NO: 1102154 - DNA, 25 bp, Homo sapien
ggaggcgagagagccagcggggcac

SEQ ID NO: 1102155 - DNA, 25 bp, Homo sapien
tcactcgctgtgcatctgccatgaa

SEQ ID NO: 1102156 - DNA, 25 bp, Homo sapien
gagctctgcagctactggctgcaca

SEQ ID NO: 1102157 - DNA, 25 bp, Homo sapien
gaatacaagacgaagagctctgcag

SEQ ID NO: 1102158 - DNA, 25 bp, Homo sapien
attcgccgtccctggaacgtgtcag

SEQ ID NO: 1102159 - DNA, 25 bp, Homo sapien
gaaggattacgcacagccctgcgtg

SEQ ID NO: 1102160 - DNA, 25 bp, Homo sapien
ccagagaccgaaaatcctggtttga

SEQ ID NO: 1102161 - DNA, 25 bp, Homo sapien
tcctgcaatattccgcgggcacggt

SEQ ID NO: 1102162 - DNA, 25 bp, Homo sapien
cctgcgtgcctatccaaagccagag

SEQ ID NO: 1102163 - DNA, 25 bp, Homo sapien
caggctgccctcgcagaagccgccc

SEQ ID NO: 1102164 - DNA, 25 bp, Homo sapien
tcaggctgccctcgcagaagccgcc

SEQ ID NO: 1102165 - DNA, 25 bp, Homo sapien
cagtgacttgtcaagaggtccaagg

SEQ ID NO: 1102166 - DNA, 25 bp, Homo sapien
tgacttgtcaagaggtccaagggcg

SEQ ID NO: 1102167 - DNA, 25 bp, Homo sapien
cttgtcaagaggtccaagggcggaa

SEQ ID NO: 1102168 - DNA, 25 bp, Homo sapien
gagaagatgagggcgaaaggctagg

SEQ ID NO: 1102169 - DNA, 25 bp, Homo sapien
ttgaagtaccgcacaaggaaggtgg

SEQ ID NO: 1102170 - DNA, 25 bp, Homo sapien
ccatagtgggttccgatttgtgttt

SEQ ID NO: 1102171 - DNA, 25 bp, Homo sapien
taaagctgttggccatagtgggttc

SEQ ID NO: 1102172 - DNA, 25 bp, Homo sapien
cgatttgtgtttgaagtaccgcaca

SEQ ID NO: 1102173 - DNA, 25 bp, Homo sapien
cttaggaactgaatcactgaatgcc

SEQ ID NO: 1102174 - DNA, 25 bp, Homo sapien
aatgccacagtggttcactggatgc

SEQ ID NO: 1102175 - DNA, 25 bp, Homo sapien
tgctcgacacatagaaattagagtc

SEQ ID NO: 1102176 - DNA, 25 bp, Homo sapien
tgtttatctggaccaaatcctctct

SEQ ID NO: 1102177 - DNA, 25 bp, Homo sapien
tatgatctttgaattggtatctgaa

SEQ ID NO: 1102178 - DNA, 25 bp, Homo sapien
atctttgaattggtatctgaattac

SEQ ID NO: 1102179 - DNA, 25 bp, Homo sapien
tgatctttgaattggtatctgaatt

SEQ ID NO: 1102180 - DNA, 25 bp, Homo sapien
ctatgatctttgaattggtatctga

SEQ ID NO: 1102181 - DNA, 25 bp, Homo sapien
ttgaaagtgtgtttctactatagtt

SEQ ID NO: 1102182 - DNA, 25 bp, Homo sapien
tgaaagtgtgtttctactatagttt

SEQ ID NO: 1102183 - DNA, 25 bp, Homo sapien
ttgatggcttttagttcactgtttt

SEQ ID NO: 1102184 - DNA, 25 bp, Homo sapien
tgatggcttttagttcactgttttg

SEQ ID NO: 1102185 - DNA, 25 bp, Homo sapien
gatggcttttagttcactgttttgg

SEQ ID NO: 1102186 - DNA, 25 bp, Homo sapien
ttgattggaataatgacatgatggc

SEQ ID NO: 1102187 - DNA, 25 bp, Homo sapien
tgattggaataatgacatgatggct

SEQ ID NO: 1102188 - DNA, 25 bp, Homo sapien
cttgattggaataatgacatgatgg

SEQ ID NO: 1102189 - DNA, 25 bp, Homo sapien
taaggtccccttgcccgatagtcta

SEQ ID NO: 1102190 - DNA, 25 bp, Homo sapien
ggaaggtgttgagatgaggcccttc

SEQ ID NO: 1102191 - DNA, 25 bp, Homo sapien
cctgtaacggggcagtaggagcttt

SEQ ID NO: 1102192 - DNA, 25 bp, Homo sapien
tttgacgccttctctaaggaaggtg

SEQ ID NO: 1102193 - DNA, 25 bp, Homo sapien
gcagtttgctgacactttttaatac

SEQ ID NO: 1102194 - DNA, 25 bp, Homo sapien
tcaatgcagtttgctgacacttttt

SEQ ID NO: 1102195 - DNA, 25 bp, Homo sapien
tgcagtttgctgacactttttaata

SEQ ID NO: 1102196 - DNA, 25 bp, Homo sapien
aatgcagtttgctgacactttttaa

SEQ ID NO: 1102197 - DNA, 25 bp, Homo sapien
aatatcccctcttaggatgtctgtt

SEQ ID NO: 1102198 - DNA, 25 bp, Homo sapien
aaatatcccctcttaggatgtctgt

SEQ ID NO: 1102199 - DNA, 25 bp, Homo sapien
atatcccctcttaggatgtctgtta

SEQ ID NO: 1102200 - DNA, 25 bp, Homo sapien
aaaatatcccctcttaggatgtctg

SEQ ID NO: 1102201 - DNA, 25 bp, Homo sapien
catcaccgtcatcacactcctgctt

SEQ ID NO: 1102202 - DNA, 25 bp, Homo sapien
atcaccgtcatcacactcctgcttt

SEQ ID NO: 1102203 - DNA, 25 bp, Homo sapien
tcaccgtcatcacactcctgctttt

SEQ ID NO: 1102204 - DNA, 25 bp, Homo sapien
tagactataacttaaggaaatgccc

SEQ ID NO: 1102205 - DNA, 25 bp, Homo sapien
ataacttaaggaaatgcccttctgg

SEQ ID NO: 1102206 - DNA, 25 bp, Homo sapien
ttcttttaggtatcctgagcaacgc

SEQ ID NO: 1102207 - DNA, 25 bp, Homo sapien
gctggtactgagaacttagactata

SEQ ID NO: 1102208 - DNA, 25 bp, Homo sapien
ggtcgatcccaagtgtgttactgga

SEQ ID NO: 1102209 - DNA, 25 bp, Homo sapien
tggaaataccatctccctcaggagt

SEQ ID NO: 1102210 - DNA, 25 bp, Homo sapien
taagtttcctgagcaacaccttctc

SEQ ID NO: 1102211 - DNA, 25 bp, Homo sapien
gcttggaagcgttgtcaaaggcagt

SEQ ID NO: 1102212 - DNA, 25 bp, Homo sapien
tgtagccaaaagattccagtgggtg

SEQ ID NO: 1102213 - DNA, 25 bp, Homo sapien
gagttgttgactgcagtacttgaag

SEQ ID NO: 1102214 - DNA, 25 bp, Homo sapien
agtttctgtagccaaaagattccag

SEQ ID NO: 1102215 - DNA, 25 bp, Homo sapien
ctgcagtacttgaagcacgaatcac

SEQ ID NO: 1102216 - DNA, 25 bp, Homo sapien
caggctttctcctcacagtgctttc

SEQ ID NO: 1102217 - DNA, 25 bp, Homo sapien
gcagagtaattaggtgcttctttca

SEQ ID NO: 1102218 - DNA, 25 bp, Homo sapien
agactggtaggagaaacttgccagg

SEQ ID NO: 1102219 - DNA, 25 bp, Homo sapien
tgctttctggttttagcagagtaat

SEQ ID NO: 1102220 - DNA, 25 bp, Homo sapien
taaggagtgctagctttcaccatcc

SEQ ID NO: 1102221 - DNA, 25 bp, Homo sapien
tgcctctgaaaatgcgccaaagtgc

SEQ ID NO: 1102222 - DNA, 25 bp, Homo sapien
tactcgaagaatagcaagtcaggct

SEQ ID NO: 1102223 - DNA, 25 bp, Homo sapien
tcacaaggagctttatcaggctggc

SEQ ID NO: 1102224 - DNA, 25 bp, Homo sapien
tccttggtgaactgcgtggagaaat

SEQ ID NO: 1102225 - DNA, 25 bp, Homo sapien
tcctggtaatctcggaagctcaagt

SEQ ID NO: 1102226 - DNA, 25 bp, Homo sapien
gacgacgctgccgaatgcttttatt

SEQ ID NO: 1102227 - DNA, 25 bp, Homo sapien
gaaagtctttatgcaaacctcaggt

SEQ ID NO: 1102228 - DNA, 25 bp, Homo sapien
gaaaagcactgtagatacctccaag

SEQ ID NO: 1102229 - DNA, 25 bp, Homo sapien
cactggtgctaatgcgagaatctga

SEQ ID NO: 1102230 - DNA, 25 bp, Homo sapien
tctacactgctagatcactggtgct

SEQ ID NO: 1102231 - DNA, 25 bp, Homo sapien
aaaagtcacctaccacctcaacaga

SEQ ID NO: 1102232 - DNA, 25 bp, Homo sapien
aaacatgatggtacaatacattaag

SEQ ID NO: 1102233 - DNA, 25 bp, Homo sapien
ggtttatatgctataaacatgatgg

SEQ ID NO: 1102234 - DNA, 25 bp, Homo sapien
ttaaagtaactgaccatgcaatttc

SEQ ID NO: 1102235 - DNA, 25 bp, Homo sapien
agtcaataaatcaaaaactcactgg

SEQ ID NO: 1102236 - DNA, 25 bp, Homo sapien
catgtatattaaaggtggcaggctc

SEQ ID NO: 1102237 - DNA, 25 bp, Homo sapien
tgctatggtccctgctagaaaaaac

SEQ ID NO: 1102238 - DNA, 25 bp, Homo sapien
tataatgttgattggcaacccagca

SEQ ID NO: 1102239 - DNA, 25 bp, Homo sapien
taggctttgaaagactaaccacgtg

SEQ ID NO: 1102240 - DNA, 25 bp, Homo sapien
tttgcatataaactgcatcctctgc

SEQ ID NO: 1102241 - DNA, 25 bp, Homo sapien
gcattgtttagcttcatcatgaaaa

SEQ ID NO: 1102242 - DNA, 25 bp, Homo sapien
ctgcattgtttagcttcatcatgaa

SEQ ID NO: 1102243 - DNA, 25 bp, Homo sapien
tgcatataaactgcatcctctgcat

SEQ ID NO: 1102244 - DNA, 25 bp, Homo sapien
tggcatcctaaagtctctatgtcgt

SEQ ID NO: 1102245 - DNA, 25 bp, Homo sapien
ttttatgggtgaactcacacctggc

SEQ ID NO: 1102246 - DNA, 25 bp, Homo sapien
tctatgtcgttttgataaatgagca

SEQ ID NO: 1102247 - DNA, 25 bp, Homo sapien
aacagccagggttaatcccatgaaa

SEQ ID NO: 1102248 - DNA, 25 bp, Homo sapien
caatctggtgtttatccattgacaa

SEQ ID NO: 1102249 - DNA, 25 bp, Homo sapien
taagcgatgtcaatctggtgtttat

SEQ ID NO: 1102250 - DNA, 25 bp, Homo sapien
cattgacaaaggactaacatacaca

SEQ ID NO: 1102251 - DNA, 25 bp, Homo sapien
tggtgtttatccattgacaaaggac

SEQ ID NO: 1102252 - DNA, 25 bp, Homo sapien
tcatccccacgaagattaatcatct

SEQ ID NO: 1102253 - DNA, 25 bp, Homo sapien
agaaatagagctaaatatcacatgc

SEQ ID NO: 1102254 - DNA, 25 bp, Homo sapien
gagaaagatgattaatcttcgtggg

SEQ ID NO: 1102255 - DNA, 25 bp, Homo sapien
gcaatattgttgaagcaaggagaga

SEQ ID NO: 1102256 - DNA, 25 bp, Homo sapien
gcagggtatttagcaacattcgtaa

SEQ ID NO: 1102257 - DNA, 25 bp, Homo sapien
gcagttggactctaatcttacacga

SEQ ID NO: 1102258 - DNA, 25 bp, Homo sapien
tatagctatgtggtctgagtttccc

SEQ ID NO: 1102259 - DNA, 25 bp, Homo sapien
tggaccaaagtatgagaggaactcc

SEQ ID NO: 1102260 - DNA, 25 bp, Homo sapien
tactatagggcctgctattgcatgg

SEQ ID NO: 1102261 - DNA, 25 bp, Homo sapien
gagcatatgctaccttgttcttggc

SEQ ID NO: 1102262 - DNA, 25 bp, Homo sapien
tttgtctgtgccaaaaaatgctctt

SEQ ID NO: 1102263 - DNA, 25 bp, Homo sapien
gtttattgtctctgccactaattgg

SEQ ID NO: 1102264 - DNA, 25 bp, Homo sapien
gagagctaccttttctcctgattga

SEQ ID NO: 1102265 - DNA, 25 bp, Homo sapien
tggaaaaaacacaattctacctctg

SEQ ID NO: 1102266 - DNA, 25 bp, Homo sapien
taatttacttgcaggctacagccca

SEQ ID NO: 1102267 - DNA, 25 bp, Homo sapien
gccaagcagctccacttaaacacag

SEQ ID NO: 1102268 - DNA, 25 bp, Homo sapien
tagtagtgaataaagcgccaccgtc

SEQ ID NO: 1102269 - DNA, 25 bp, Homo sapien
gaatagcatgcactggtcctgggag

SEQ ID NO: 1102270 - DNA, 25 bp, Homo sapien
tgaacatgtagaacctgagccaggc

SEQ ID NO: 1102271 - DNA, 25 bp, Homo sapien
ggcaacacatggcagggagtctata

SEQ ID NO: 1102272 - DNA, 25 bp, Homo sapien
tgaaaagcagttaatctgtctgctt

SEQ ID NO: 1102273 - DNA, 25 bp, Homo sapien
tctgctttaggcatgcaattgattt

SEQ ID NO: 1102274 - DNA, 25 bp, Homo sapien
acaataaaggtattggcattttcca

SEQ ID NO: 1102275 - DNA, 25 bp, Homo sapien
tctgtctgctttaggcatgcaattg

SEQ ID NO: 1102276 - DNA, 25 bp, Homo sapien
taaagattgatgttaactaagaact

SEQ ID NO: 1102277 - DNA, 25 bp, Homo sapien
gatgctacttaaaattgatggcaac

SEQ ID NO: 1102278 - DNA, 25 bp, Homo sapien
cattcaatgacatacggtaataacc

SEQ ID NO: 1102279 - DNA, 25 bp, Homo sapien
gaaaaagtttgacgcagaaatctaa

SEQ ID NO: 1102280 - DNA, 25 bp, Homo sapien
atcttctttcggctactgacccatg

SEQ ID NO: 1102281 - DNA, 25 bp, Homo sapien
gctggctcattgtagacaatcagta

SEQ ID NO: 1102282 - DNA, 25 bp, Homo sapien
ggctcattgtagacaatcagtaaat

SEQ ID NO: 1102283 - DNA, 25 bp, Homo sapien
ttccttatcttctttcggctactga

SEQ ID NO: 1102284 - DNA, 25 bp, Homo sapien
ctgtttagtgtccacaatgtacatg

SEQ ID NO: 1102285 - DNA, 25 bp, Homo sapien
tgtttagtgtccacaatgtacatga

SEQ ID NO: 1102286 - DNA, 25 bp, Homo sapien
gtttagtgtccacaatgtacatgac

SEQ ID NO: 1102287 - DNA, 25 bp, Homo sapien
gcctctcatgagacaaatccataac

SEQ ID NO: 1102288 - DNA, 25 bp, Homo sapien
catcgcctctcatgagacaaatcca

SEQ ID NO: 1102289 - DNA, 25 bp, Homo sapien
gcacatcgcctctcatgagacaaat

SEQ ID NO: 1102290 - DNA, 25 bp, Homo sapien
taagcacatcgcctctcatgagaca

SEQ ID NO: 1102291 - DNA, 25 bp, Homo sapien
tatgccagtcctgcttcactcaaac

SEQ ID NO: 1102292 - DNA, 25 bp, Homo sapien
ttatgccagtcctgcttcactcaaa

SEQ ID NO: 1102293 - DNA, 25 bp, Homo sapien
cagtcctgcttcactcaaactgatg

SEQ ID NO: 1102294 - DNA, 25 bp, Homo sapien
tcctgcttcactcaaactgatgttc

SEQ ID NO: 1102295 - DNA, 25 bp, Homo sapien
catgtgggatgagttagatagctgc

SEQ ID NO: 1102296 - DNA, 25 bp, Homo sapien
tatttcacattagctggcccatgca

SEQ ID NO: 1102297 - DNA, 25 bp, Homo sapien
gatgatagtgttaacctagcaaggt

SEQ ID NO: 1102298 - DNA, 25 bp, Homo sapien
tgtaaagatttgagccatgtgggat

SEQ ID NO: 1102299 - DNA, 25 bp, Homo sapien
tattgagaaggtagcaagacaccag

SEQ ID NO: 1102300 - DNA, 25 bp, Homo sapien
cagcctgtaggctcaatgactcaag

SEQ ID NO: 1102301 - DNA, 25 bp, Homo sapien
ctgggccccaaggattacaaggagg

SEQ ID NO: 1102302 - DNA, 25 bp, Homo sapien
cctaagagtacaaagggcctgggct

SEQ ID NO: 1102303 - DNA, 25 bp, Homo sapien
catctgacatctctttcctgtatct

SEQ ID NO: 1102304 - DNA, 25 bp, Homo sapien
ttcctgtatctctaaatgcctagtc

SEQ ID NO: 1102305 - DNA, 25 bp, Homo sapien
tctctttcctgtatctctaaatgcc

SEQ ID NO: 1102306 - DNA, 25 bp, Homo sapien
gacatctctttcctgtatctctaaa

SEQ ID NO: 1102307 - DNA, 25 bp, Homo sapien
ctggccctctctgaggcggtttcga

SEQ ID NO: 1102308 - DNA, 25 bp, Homo sapien
gcctttctggatttgcaagattggc

SEQ ID NO: 1102309 - DNA, 25 bp, Homo sapien
ctctctgaggcggtttcgagtggct

SEQ ID NO: 1102310 - DNA, 25 bp, Homo sapien
ggctggcctttctggatttgcaaga

SEQ ID NO: 1102311 - DNA, 25 bp, Homo sapien
cttgcataggtggtggtgtgctgct

SEQ ID NO: 1102312 - DNA, 25 bp, Homo sapien
gctgccacagccagtgctgccaccc

SEQ ID NO: 1102313 - DNA, 25 bp, Homo sapien
cagtgctgccaccctgcctgctcat

SEQ ID NO: 1102314 - DNA, 25 bp, Homo sapien
agccagtgctgccaccctgcctgct

SEQ ID NO: 1102315 - DNA, 25 bp, Homo sapien
ggaggctttacttcaaggacatctg

SEQ ID NO: 1102316 - DNA, 25 bp, Homo sapien
tgagagtaggaatttgacaactggg

SEQ ID NO: 1102317 - DNA, 25 bp, Homo sapien
ccaagagatgagagtaggaatttga

SEQ ID NO: 1102318 - DNA, 25 bp, Homo sapien
ggaagagacgatatttaaaccagaa

SEQ ID NO: 1102319 - DNA, 25 bp, Homo sapien
gcataatcatctatatcgctgctga

SEQ ID NO: 1102320 - DNA, 25 bp, Homo sapien
caggcttcactgtactaattttacc

SEQ ID NO: 1102321 - DNA, 25 bp, Homo sapien
tactaattttaccttcagcataatc

SEQ ID NO: 1102322 - DNA, 25 bp, Homo sapien
catgtcggtgctgaaacaggcttca

SEQ ID NO: 1102323 - DNA, 25 bp, Homo sapien
ttttaatagcgtccttggaagaaca

SEQ ID NO: 1102324 - DNA, 25 bp, Homo sapien
tcactgttttaatagcgtccttgga

SEQ ID NO: 1102325 - DNA, 25 bp, Homo sapien
catttatgtaattggtgtcatagct

SEQ ID NO: 1102326 - DNA, 25 bp, Homo sapien
atagcgtccttggaagaacaaaaag

SEQ ID NO: 1102327 - DNA, 25 bp, Homo sapien
cacctagggacttagttcattttca

SEQ ID NO: 1102328 - DNA, 25 bp, Homo sapien
aatgtgcaacatcctgaaaagctgg

SEQ ID NO: 1102329 - DNA, 25 bp, Homo sapien
gatggcatgccacttactattgcag

SEQ ID NO: 1102330 - DNA, 25 bp, Homo sapien
cgctattcatatcccacacctaggg

SEQ ID NO: 1102331 - DNA, 25 bp, Homo sapien
tgagggcttatccagccctattgcc

SEQ ID NO: 1102332 - DNA, 25 bp, Homo sapien
gccttttcagcgttgtcacaagcaa

SEQ ID NO: 1102333 - DNA, 25 bp, Homo sapien
tgaagttctcttgagggcttatcca

SEQ ID NO: 1102334 - DNA, 25 bp, Homo sapien
tattgccttttcagcgttgtcacaa

SEQ ID NO: 1102335 - DNA, 25 bp, Homo sapien
tttccctgaagtatccctcacaggt

SEQ ID NO: 1102336 - DNA, 25 bp, Homo sapien
ttcagtgacttctccgaagtaagtg

SEQ ID NO: 1102337 - DNA, 25 bp, Homo sapien
tattttaaagctctgagatgataac

SEQ ID NO: 1102338 - DNA, 25 bp, Homo sapien
gacttctccgaagtaagtgaagcac

SEQ ID NO: 1102339 - DNA, 25 bp, Homo sapien
agacaaatgaaacctgttcctgagc

SEQ ID NO: 1102340 - DNA, 25 bp, Homo sapien
gttcctgagctagtggaccatgcaa

SEQ ID NO: 1102341 - DNA, 25 bp, Homo sapien
gctagtggaccatgcaatctctgaa

SEQ ID NO: 1102342 - DNA, 25 bp, Homo sapien
gaccatgcaatctctgaacttccac

SEQ ID NO: 1102343 - DNA, 25 bp, Homo sapien
gagaacctgtgcctgtctctcaagg

SEQ ID NO: 1102344 - DNA, 25 bp, Homo sapien
ggtacctctctagaactggctggtg

SEQ ID NO: 1102345 - DNA, 25 bp, Homo sapien
tagaaaccatttatgagcagtggcg

SEQ ID NO: 1102346 - DNA, 25 bp, Homo sapien
taattgacctactcattgtggccca

SEQ ID NO: 1102347 - DNA, 25 bp, Homo sapien
gatcactgactctaaaagcaatgcc

SEQ ID NO: 1102348 - DNA, 25 bp, Homo sapien
agtggtgactatgacttgcatgaga

SEQ ID NO: 1102349 - DNA, 25 bp, Homo sapien
agcaatgccattaatcaggaggatt

SEQ ID NO: 1102350 - DNA, 25 bp, Homo sapien
gagaagcctgactgacagtggtgac

SEQ ID NO: 1102351 - DNA, 25 bp, Homo sapien
aatttaagtatttgaggaaacacat

SEQ ID NO: 1102352 - DNA, 25 bp, Homo sapien
tcaaatttaagtatttgaggaaaca

SEQ ID NO: 1102353 - DNA, 25 bp, Homo sapien
taagtatttgaggaaacacatttgc

SEQ ID NO: 1102354 - DNA, 25 bp, Homo sapien
gtatttgaggaaacacatttgcaaa

SEQ ID NO: 1102355 - DNA, 25 bp, Homo sapien
gcagatggcagcagactgccacact

SEQ ID NO: 1102356 - DNA, 25 bp, Homo sapien
ctggtgacacgtgagccagcagatg

SEQ ID NO: 1102357 - DNA, 25 bp, Homo sapien
ttttcaatatgagcaggaacgttct

SEQ ID NO: 1102358 - DNA, 25 bp, Homo sapien
ttctctggcccacagttattctcct

SEQ ID NO: 1102359 - DNA, 25 bp, Homo sapien
tacacaaactcgcaggaggagaaaa

SEQ ID NO: 1102360 - DNA, 25 bp, Homo sapien
ttacacaaactcgcaggaggagaaa

SEQ ID NO: 1102361 - DNA, 25 bp, Homo sapien
gaagtaccagcccagcggaagagct

SEQ ID NO: 1102362 - DNA, 25 bp, Homo sapien
aaatgactctctgcgctggctgtgc

SEQ ID NO: 1102363 - DNA, 25 bp, Homo sapien
tgtagagaaatgactctctgcgctg

SEQ ID NO: 1102364 - DNA, 25 bp, Homo sapien
tcgcctttggtgacaagtcatagtc

SEQ ID NO: 1102365 - DNA, 25 bp, Homo sapien
agagatgaggtaaatgtgaaactgg

SEQ ID NO: 1102366 - DNA, 25 bp, Homo sapien
ggtagagatgaggtaaatgtgaaac

SEQ ID NO: 1102367 - DNA, 25 bp, Homo sapien
tgaggtaaatgtgaaactggaagcc

SEQ ID NO: 1102368 - DNA, 25 bp, Homo sapien
aaatgtgaaactggaagccagacag

SEQ ID NO: 1102369 - DNA, 25 bp, Homo sapien
tagattaatggggaattgttgttgc

SEQ ID NO: 1102370 - DNA, 25 bp, Homo sapien
catagattaatggggaattgttgtt

SEQ ID NO: 1102371 - DNA, 25 bp, Homo sapien
gaattgttgttgctgccactgtgac

SEQ ID NO: 1102372 - DNA, 25 bp, Homo sapien
ggggaattgttgttgctgccactgt

SEQ ID NO: 1102373 - DNA, 25 bp, Homo sapien
tatcagcagtgctttacagggcggt

SEQ ID NO: 1102374 - DNA, 25 bp, Homo sapien
tgttgtgtctcaccaaggagccagg

SEQ ID NO: 1102375 - DNA, 25 bp, Homo sapien
caaaggctactgagacagcatgcat

SEQ ID NO: 1102376 - DNA, 25 bp, Homo sapien
tggagcctcatgaaaactgcacaca

SEQ ID NO: 1102377 - DNA, 25 bp, Homo sapien
aaattagtactagattcatgactcc

SEQ ID NO: 1102378 - DNA, 25 bp, Homo sapien
tagtactagattcatgactcctgaa

SEQ ID NO: 1102379 - DNA, 25 bp, Homo sapien
tttggcacgaaagggtattccaaga

SEQ ID NO: 1102380 - DNA, 25 bp, Homo sapien
ctgaatttacagtgactacacataa

SEQ ID NO: 1102381 - DNA, 25 bp, Homo sapien
gggcaaaaggagttacaatcaagtc

SEQ ID NO: 1102382 - DNA, 25 bp, Homo sapien
tgggcaaaaggagttacaatcaagt

SEQ ID NO: 1102383 - DNA, 25 bp, Homo sapien
ggcaaaaggagttacaatcaagtca

SEQ ID NO: 1102384 - DNA, 25 bp, Homo sapien
tcacacttcgcaagctggcaaggac

SEQ ID NO: 1102385 - DNA, 25 bp, Homo sapien
catgaaggtttgtcagtatagtgaa

SEQ ID NO: 1102386 - DNA, 25 bp, Homo sapien
ggtttgtcagtatagtgaagttgtt

SEQ ID NO: 1102387 - DNA, 25 bp, Homo sapien
tgtttctcacacttcgcaagctggc

SEQ ID NO: 1102388 - DNA, 25 bp, Homo sapien
tgctttggaccaagggtgacacaag

SEQ ID NO: 1102389 - DNA, 25 bp, Homo sapien
cactggaggcctgctttttgtgata

SEQ ID NO: 1102390 - DNA, 25 bp, Homo sapien
gccgtgatttgaagggtagtcctca

SEQ ID NO: 1102391 - DNA, 25 bp, Homo sapien
tgcttcagctgtgctatggcaatta

SEQ ID NO: 1102392 - DNA, 25 bp, Homo sapien
aggctgactagcagctggggacctc

SEQ ID NO: 1102393 - DNA, 25 bp, Homo sapien
gtgggttgactctggagacaggagg

SEQ ID NO: 1102394 - DNA, 25 bp, Homo sapien
actctggagacaggaggctgactag

SEQ ID NO: 1102395 - DNA, 25 bp, Homo sapien
ggagacaggaggctgactagcagct

SEQ ID NO: 1102396 - DNA, 25 bp, Homo sapien
tagatagaccttatgacatggccta

SEQ ID NO: 1102397 - DNA, 25 bp, Homo sapien
catctagatagaccttatgacatgg

SEQ ID NO: 1102398 - DNA, 25 bp, Homo sapien
aacatctagatagaccttatgacat

SEQ ID NO: 1102399 - DNA, 25 bp, Homo sapien
tctagatagaccttatgacatggcc

SEQ ID NO: 1102400 - DNA, 25 bp, Homo sapien
caccaagaaaagtggatgcactgtc

SEQ ID NO: 1102401 - DNA, 25 bp, Homo sapien
caacagaactccatggtgttccttc

SEQ ID NO: 1102402 - DNA, 25 bp, Homo sapien
caaatatcatagaactggttgcatt

SEQ ID NO: 1102403 - DNA, 25 bp, Homo sapien
agttccaacagaactccatggtgtt

SEQ ID NO: 1102404 - DNA, 25 bp, Homo sapien
gattttaagtatgaagcgctgctgg

SEQ ID NO: 1102405 - DNA, 25 bp, Homo sapien
gcaacattgcctcactggtaggcca

SEQ ID NO: 1102406 - DNA, 25 bp, Homo sapien
gaaatagtacatgcagcacaccagg

SEQ ID NO: 1102407 - DNA, 25 bp, Homo sapien
tacgaggctctagagtaaactcacc

SEQ ID NO: 1102408 - DNA, 25 bp, Homo sapien
tgaacctccggagggatagtcataa

SEQ ID NO: 1102409 - DNA, 25 bp, Homo sapien
cttgtccactacttgaagagaccct

SEQ ID NO: 1102410 - DNA, 25 bp, Homo sapien
agaccctgcatctggtacacccaca

SEQ ID NO: 1102411 - DNA, 25 bp, Homo sapien
ccggagggatagtcataatcaagta

SEQ ID NO: 1102412 - DNA, 25 bp, Homo sapien
tgaattccttaaaatcgaagataac

SEQ ID NO: 1102413 - DNA, 25 bp, Homo sapien
acggaatcaatgtcatgactttctg

SEQ ID NO: 1102414 - DNA, 25 bp, Homo sapien
caaagaatgagaacggaatcaatgt

SEQ ID NO: 1102415 - DNA, 25 bp, Homo sapien
ttccttaaaatcgaagataactcac

SEQ ID NO: 1102416 - DNA, 25 bp, Homo sapien
taactgaaatacttactaacatgca

SEQ ID NO: 1102417 - DNA, 25 bp, Homo sapien
ctatttaatgactccattgacgtca

SEQ ID NO: 1102418 - DNA, 25 bp, Homo sapien
ttaatgactccattgacgtcaatag

SEQ ID NO: 1102419 - DNA, 25 bp, Homo sapien
aatgactccattgacgtcaatagca

SEQ ID NO: 1102420 - DNA, 25 bp, Homo sapien
ctttcctgaaatcagaggcacacat

SEQ ID NO: 1102421 - DNA, 25 bp, Homo sapien
tgagttaaagctatgtacaccctgg

SEQ ID NO: 1102422 - DNA, 25 bp, Homo sapien
atgtttacgtctgctgtgccagtca

SEQ ID NO: 1102423 - DNA, 25 bp, Homo sapien
tacaccctggtgacgatgtttacgt

SEQ ID NO: 1102424 - DNA, 25 bp, Homo sapien
caccctcttgttcctgagctacatt

SEQ ID NO: 1102425 - DNA, 25 bp, Homo sapien
tgtttatgttgccaaaataggcaaa

SEQ ID NO: 1102426 - DNA, 25 bp, Homo sapien
catttttcaccaatgtgatgggaag

SEQ ID NO: 1102427 - DNA, 25 bp, Homo sapien
caaaataggcaaactgtgaattctc

SEQ ID NO: 1102428 - DNA, 25 bp, Homo sapien
gtgaccacaagttttcccatgttta

SEQ ID NO: 1102429 - DNA, 25 bp, Homo sapien
accccatccacttgctaccaggccc

SEQ ID NO: 1102430 - DNA, 25 bp, Homo sapien
cccatccacttgctaccaggccctc

SEQ ID NO: 1102431 - DNA, 25 bp, Homo sapien
ccccatccacttgctaccaggccct

SEQ ID NO: 1102432 - DNA, 25 bp, Homo sapien
gccctccagaacgaagagtcctgac

SEQ ID NO: 1102433 - DNA, 25 bp, Homo sapien
ttgtcctccctaaggaagctccctc

SEQ ID NO: 1102434 - DNA, 25 bp, Homo sapien
tgtcctccctaaggaagctccctca

SEQ ID NO: 1102435 - DNA, 25 bp, Homo sapien
gtcctccctaaggaagctccctcac

SEQ ID NO: 1102436 - DNA, 25 bp, Homo sapien
gtttggattcgaagatggaggctcc

SEQ ID NO: 1102437 - DNA, 25 bp, Homo sapien
tattatctctaatagagtgagatcg

SEQ ID NO: 1102438 - DNA, 25 bp, Homo sapien
ggaggctccactcgccagttgtggg

SEQ ID NO: 1102439 - DNA, 25 bp, Homo sapien
tagagtgagatcgaattgtttggat

SEQ ID NO: 1102440 - DNA, 25 bp, Homo sapien
ctccagcttttgcagattatatgcc

SEQ ID NO: 1102441 - DNA, 25 bp, Homo sapien
gccatttaattccactaaggtacaa

SEQ ID NO: 1102442 - DNA, 25 bp, Homo sapien
cttccccatatttctagcccacaaa

SEQ ID NO: 1102443 - DNA, 25 bp, Homo sapien
tcttgtgactgtgacctgatccttc

SEQ ID NO: 1102444 - DNA, 25 bp, Homo sapien
aaacattcgtactaaagtcattgga

SEQ ID NO: 1102445 - DNA, 25 bp, Homo sapien
tttgcaaacattcgtactaaagtca

SEQ ID NO: 1102446 - DNA, 25 bp, Homo sapien
tgcaaacattcgtactaaagtcatt

SEQ ID NO: 1102447 - DNA, 25 bp, Homo sapien
cctttgcaaacattcgtactaaagt

SEQ ID NO: 1102448 - DNA, 25 bp, Homo sapien
gagccccagacagcataatatgact

SEQ ID NO: 1102449 - DNA, 25 bp, Homo sapien
taatatgactatagtgactttggag

SEQ ID NO: 1102450 - DNA, 25 bp, Homo sapien
tatagtgactttggagtaatcttca

SEQ ID NO: 1102451 - DNA, 25 bp, Homo sapien
tttcaatgaagagccccagacagca

SEQ ID NO: 1102452 - DNA, 25 bp, Homo sapien
cagaaatgagtataggacagagcac

SEQ ID NO: 1102453 - DNA, 25 bp, Homo sapien
ggacagagcactgcaatttcgaagc

SEQ ID NO: 1102454 - DNA, 25 bp, Homo sapien
cagagaggctggtttgtggatgaac

SEQ ID NO: 1102455 - DNA, 25 bp, Homo sapien
ctgcaatttcgaagcagtttagctt

SEQ ID NO: 1102456 - DNA, 25 bp, Homo sapien
tgcaggacctcaccaatttcagtac

SEQ ID NO: 1102457 - DNA, 25 bp, Homo sapien
ccgcttttaaccatctgcttcagtg

SEQ ID NO: 1102458 - DNA, 25 bp, Homo sapien
caccactttgtgctgtggaggcttc

SEQ ID NO: 1102459 - DNA, 25 bp, Homo sapien
gaggcttctctatctccgcttttaa

SEQ ID NO: 1102460 - DNA, 25 bp, Homo sapien
tgtggtgctacgtatctgggtattc

SEQ ID NO: 1102461 - DNA, 25 bp, Homo sapien
aatctgtggtgctacgtatctgggt

SEQ ID NO: 1102462 - DNA, 25 bp, Homo sapien
tctgtggtgctacgtatctgggtat

SEQ ID NO: 1102463 - DNA, 25 bp, Homo sapien
ggtgctacgtatctgggtattcccc

SEQ ID NO: 1102464 - DNA, 25 bp, Homo sapien
aggttccaagcctgctatcatcagc

SEQ ID NO: 1102465 - DNA, 25 bp, Homo sapien
atcagaggccctcccacatgaggct

SEQ ID NO: 1102466 - DNA, 25 bp, Homo sapien
acctgaattttgtaggtgcccagag

SEQ ID NO: 1102467 - DNA, 25 bp, Homo sapien
cacaggatgtaagctaccaaggttc

SEQ ID NO: 1102468 - DNA, 25 bp, Homo sapien
ctaacggggtgctttctgctccata

SEQ ID NO: 1102469 - DNA, 25 bp, Homo sapien
acggggtgctttctgctccatagat

SEQ ID NO: 1102470 - DNA, 25 bp, Homo sapien
aacggggtgctttctgctccataga

SEQ ID NO: 1102471 - DNA, 25 bp, Homo sapien
taacggggtgctttctgctccatag

SEQ ID NO: 1102472 - DNA, 25 bp, Homo sapien
aaagaaatgtggatttagatgtgag

SEQ ID NO: 1102473 - DNA, 25 bp, Homo sapien
ctgcttttactattgaaaaagcttt

SEQ ID NO: 1102474 - DNA, 25 bp, Homo sapien
ctctatatccgtgtttctctagagg

SEQ ID NO: 1102475 - DNA, 25 bp, Homo sapien
gaaatgtggatttagatgtgaggaa

SEQ ID NO: 1102476 - DNA, 25 bp, Homo sapien
tcccacgtggttgcaaggatttagg

SEQ ID NO: 1102477 - DNA, 25 bp, Homo sapien
ttgctgcgaaggattacaactctcc

SEQ ID NO: 1102478 - DNA, 25 bp, Homo sapien
ggtcagggccaaatacttacaagag

SEQ ID NO: 1102479 - DNA, 25 bp, Homo sapien
tgagtttgtcttgactcccacgtgg

SEQ ID NO: 1102480 - DNA, 25 bp, Homo sapien
ctacacttcctcgtaggtagggagg

SEQ ID NO: 1102481 - DNA, 25 bp, Homo sapien
agtgaaaactctgaattccacagtt

SEQ ID NO: 1102482 - DNA, 25 bp, Homo sapien
tgaattccacagttcccatactaca

SEQ ID NO: 1102483 - DNA, 25 bp, Homo sapien
tggccaaggctcagaaccaagccct

SEQ ID NO: 1102484 - DNA, 25 bp, Homo sapien
ccaaaagtagtgtggtcagggccaa

SEQ ID NO: 1102485 - DNA, 25 bp, Homo sapien
gaacctggaaacttgaatctaggct

SEQ ID NO: 1102486 - DNA, 25 bp, Homo sapien
tcctcatctacctttcgagagaggt

SEQ ID NO: 1102487 - DNA, 25 bp, Homo sapien
tcttctggtcactacaggcttcacc

SEQ ID NO: 1102488 - DNA, 25 bp, Homo sapien
cagaggctgcagagatagagttcaa

SEQ ID NO: 1102489 - DNA, 25 bp, Homo sapien
ccacattcaggcatcttgttgcaag

SEQ ID NO: 1102490 - DNA, 25 bp, Homo sapien
caagagttactagaatcccacgtgg

SEQ ID NO: 1102491 - DNA, 25 bp, Homo sapien
caagtctctgtgcaccaagagttac

SEQ ID NO: 1102492 - DNA, 25 bp, Homo sapien
tgggaaacattttgcctctcaatag

SEQ ID NO: 1102493 - DNA, 25 bp, Homo sapien
attagttgaaatgtagacatgccca

SEQ ID NO: 1102494 - DNA, 25 bp, Homo sapien
gacatgcccaacatatcaacagatg

SEQ ID NO: 1102495 - DNA, 25 bp, Homo sapien
caacagatgggctatgcattaccaa

SEQ ID NO: 1102496 - DNA, 25 bp, Homo sapien
cagagagtgcagttctcctcagaca

SEQ ID NO: 1102497 - DNA, 25 bp, Homo sapien
taggatgcagcctagtgtcatctcc

SEQ ID NO: 1102498 - DNA, 25 bp, Homo sapien
gagcccagtggcaaatcagagtcca

SEQ ID NO: 1102499 - DNA, 25 bp, Homo sapien
tccctatgtgggaggccaaattcta

SEQ ID NO: 1102500 - DNA, 25 bp, Homo sapien
ctttgttacataagatgttacttct

SEQ ID NO: 1102501 - DNA, 25 bp, Homo sapien
agtgattaaaagcttggtctctggg

SEQ ID NO: 1102502 - DNA, 25 bp, Homo sapien
cttggttcatattccagtaccacca

SEQ ID NO: 1102503 - DNA, 25 bp, Homo sapien
gactgccttggttcatattccagta

SEQ ID NO: 1102504 - DNA, 25 bp, Homo sapien
ttagagtgcaacatttcaagagggc

SEQ ID NO: 1102505 - DNA, 25 bp, Homo sapien
tcataaaagaagaggttcactgccc

SEQ ID NO: 1102506 - DNA, 25 bp, Homo sapien
tacagagataggcttagtcaaggca

SEQ ID NO: 1102507 - DNA, 25 bp, Homo sapien
cttttttgctaaaccactgggcctg

SEQ ID NO: 1102508 - DNA, 25 bp, Homo sapien
gagggaacggtctcttataagctca

SEQ ID NO: 1102509 - DNA, 25 bp, Homo sapien
ttctaattcagcgaacactgacccg

SEQ ID NO: 1102510 - DNA, 25 bp, Homo sapien
cattacgttcaaagtctaggcagtc

SEQ ID NO: 1102511 - DNA, 25 bp, Homo sapien
cactgacccgcacaagtaagaggca

SEQ ID NO: 1102512 - DNA, 25 bp, Homo sapien
aaccccccgcctggatgaggtgtcg

SEQ ID NO: 1102513 - DNA, 25 bp, Homo sapien
ccaaccccccgcctggatgaggtgt

SEQ ID NO: 1102514 - DNA, 25 bp, Homo sapien
ccccccgcctggatgaggtgtcggt

SEQ ID NO: 1102515 - DNA, 25 bp, Homo sapien
cccgcctggatgaggtgtcggtgat

SEQ ID NO: 1102516 - DNA, 25 bp, Homo sapien
ttgcacgctggctccttccttccag

SEQ ID NO: 1102517 - DNA, 25 bp, Homo sapien
tatttgcacgctggctccttccttc

SEQ ID NO: 1102518 - DNA, 25 bp, Homo sapien
gcacgctggctccttccttccagct

SEQ ID NO: 1102519 - DNA, 25 bp, Homo sapien
tttgcacgctggctccttccttcca

SEQ ID NO: 1102520 - DNA, 25 bp, Homo sapien
cacaggcatgtagttaggctggagc

SEQ ID NO: 1102521 - DNA, 25 bp, Homo sapien
tgtccatagcagagtcaccgctacc

SEQ ID NO: 1102522 - DNA, 25 bp, Homo sapien
agagtcaccgctaccaccgctgatt

SEQ ID NO: 1102523 - DNA, 25 bp, Homo sapien
gattccggtgctactgaaggtgccc

SEQ ID NO: 1102524 - DNA, 25 bp, Homo sapien
cagtctaattcctccagcgtttcca

SEQ ID NO: 1102525 - DNA, 25 bp, Homo sapien
tatggtctctagctggtctaaacac

SEQ ID NO: 1102526 - DNA, 25 bp, Homo sapien
tctcactgacagaccggtaggtctg

SEQ ID NO: 1102527 - DNA, 25 bp, Homo sapien
ccggtaggtctgtatggtctctagc

SEQ ID NO: 1102528 - DNA, 25 bp, Homo sapien
ggagctccctgcatgatcacacttt

SEQ ID NO: 1102529 - DNA, 25 bp, Homo sapien
cctgcatgatcacactttaatgaat

SEQ ID NO: 1102530 - DNA, 25 bp, Homo sapien
aatgaataaaaagatcatctcttac

SEQ ID NO: 1102531 - DNA, 25 bp, Homo sapien
gctccctgcatgatcacactttaat

SEQ ID NO: 1102532 - DNA, 25 bp, Homo sapien
aatatgtgacacctgattgcaatgc

SEQ ID NO: 1102533 - DNA, 25 bp, Homo sapien
gatttggaagctttacagacagaca

SEQ ID NO: 1102534 - DNA, 25 bp, Homo sapien
tgtagcatcaagacacaagtagagt

SEQ ID NO: 1102535 - DNA, 25 bp, Homo sapien
ttatcttaggtcatgccagcatcgc

SEQ ID NO: 1102536 - DNA, 25 bp, Homo sapien
gactgtggccagcattaagggatca

SEQ ID NO: 1102537 - DNA, 25 bp, Homo sapien
ggactgtggccagcattaagggatc

SEQ ID NO: 1102538 - DNA, 25 bp, Homo sapien
aacagaggacgatgtttcttagcta

SEQ ID NO: 1102539 - DNA, 25 bp, Homo sapien
gaaatttgggccaaacagaggacga

SEQ ID NO: 1102540 - DNA, 25 bp, Homo sapien
gacaggaaattgtagtcaccctcac

SEQ ID NO: 1102541 - DNA, 25 bp, Homo sapien
tcctcctctaatgacgttggttggc

SEQ ID NO: 1102542 - DNA, 25 bp, Homo sapien
taatggagagccaaagcatcctgtt

SEQ ID NO: 1102543 - DNA, 25 bp, Homo sapien
tgaaggtcaggaagataggtcactg

SEQ ID NO: 1102544 - DNA, 25 bp, Homo sapien
ccttcctcagccactgttgttgcaa

SEQ ID NO: 1102545 - DNA, 25 bp, Homo sapien
tctgggttggtccttcctcagccac

SEQ ID NO: 1102546 - DNA, 25 bp, Homo sapien
caaccctgtactttactgactgcgt

SEQ ID NO: 1102547 - DNA, 25 bp, Homo sapien
ctgttgttgcaaccctgtactttac

SEQ ID NO: 1102548 - DNA, 25 bp, Homo sapien
tctgaataccacagtatgttcatct

SEQ ID NO: 1102549 - DNA, 25 bp, Homo sapien
ctgggtaagaatgacccttttgacg

SEQ ID NO: 1102550 - DNA, 25 bp, Homo sapien
cttgaatatagcttttctgaatacc

SEQ ID NO: 1102551 - DNA, 25 bp, Homo sapien
tctaggtgaaagactaggtttctca

SEQ ID NO: 1102552 - DNA, 25 bp, Homo sapien
cctaggagccttttagactcggaca

SEQ ID NO: 1102553 - DNA, 25 bp, Homo sapien
gacaacaatggcatacaacctagga

SEQ ID NO: 1102554 - DNA, 25 bp, Homo sapien
cacttgagggaaacatcacgtacaa

SEQ ID NO: 1102555 - DNA, 25 bp, Homo sapien
tactgcaaatgcaagcaccatcgcc

SEQ ID NO: 1102556 - DNA, 25 bp, Homo sapien
aattatctggcacttcccaaagcag

SEQ ID NO: 1102557 - DNA, 25 bp, Homo sapien
cattatgcactatgctgttagcaaa

SEQ ID NO: 1102558 - DNA, 25 bp, Homo sapien
agttaaaacattatgcactatgctg

SEQ ID NO: 1102559 - DNA, 25 bp, Homo sapien
gaacagaatggcaagatttatagct

SEQ ID NO: 1102560 - DNA, 25 bp, Homo sapien
gcagagagaacccaaggcttaacaa

SEQ ID NO: 1102561 - DNA, 25 bp, Homo sapien
cactaggatcttggtaatatgactc

SEQ ID NO: 1102562 - DNA, 25 bp, Homo sapien
tatcccaagatgctcaattcctcga

SEQ ID NO: 1102563 - DNA, 25 bp, Homo sapien
taaactatttacaaggcagctgcca

SEQ ID NO: 1102564 - DNA, 25 bp, Homo sapien
tagcctatgaagagattggatttcc

SEQ ID NO: 1102565 - DNA, 25 bp, Homo sapien
ttccaatgagaaacgtaagacctaa

SEQ ID NO: 1102566 - DNA, 25 bp, Homo sapien
tagcagaaacctttttcaacagatg

SEQ ID NO: 1102567 - DNA, 25 bp, Homo sapien
ggatttccaggccatacactcatta

SEQ ID NO: 1102568 - DNA, 25 bp, Homo sapien
tgtggctgcctcctacagtttggac

SEQ ID NO: 1102569 - DNA, 25 bp, Homo sapien
tagctcctgggtaaaactgtgtccc

SEQ ID NO: 1102570 - DNA, 25 bp, Homo sapien
gactcgaaggtaaaatagctcctgg

SEQ ID NO: 1102571 - DNA, 25 bp, Homo sapien
tacacgtttcatccagactcgaagg

SEQ ID NO: 1102572 - DNA, 25 bp, Homo sapien
tatgagccttttgctaagggcacag

SEQ ID NO: 1102573 - DNA, 25 bp, Homo sapien
gacaggcacctaggctgaagactca

SEQ ID NO: 1102574 - DNA, 25 bp, Homo sapien
caatatggaatcagggaggtggctc

SEQ ID NO: 1102575 - DNA, 25 bp, Homo sapien
tttcaagcatccaagcccggagtca

SEQ ID NO: 1102576 - DNA, 25 bp, Homo sapien
taggctgccagtacacaagaatttt

SEQ ID NO: 1102577 - DNA, 25 bp, Homo sapien
gattatttgtcgcacacaccaagcg

SEQ ID NO: 1102578 - DNA, 25 bp, Homo sapien
caagcgtgtgccagtgcatttagcc

SEQ ID NO: 1102579 - DNA, 25 bp, Homo sapien
gaaaagtacttcctatgcagcatgt

SEQ ID NO: 1102580 - DNA, 25 bp, Homo sapien
tcacagttctgagagagcaatcccg

SEQ ID NO: 1102581 - DNA, 25 bp, Homo sapien
gcaagaagcctatgctccctgctta

SEQ ID NO: 1102582 - DNA, 25 bp, Homo sapien
gaaatcaggaattgcacgaaggagc

SEQ ID NO: 1102583 - DNA, 25 bp, Homo sapien
aagagcctgtccaaatgtattcagc

SEQ ID NO: 1102584 - DNA, 25 bp, Homo sapien
cctgatcggctcatctctgagaggt

SEQ ID NO: 1102585 - DNA, 25 bp, Homo sapien
ttgaaatgtattcagacacctggtt

SEQ ID NO: 1102586 - DNA, 25 bp, Homo sapien
catctctgagaggtgtgtcagctcc

SEQ ID NO: 1102587 - DNA, 25 bp, Homo sapien
agacacctggttccctgatcggctc

SEQ ID NO: 1102588 - DNA, 25 bp, Homo sapien
gctcccagctaatgaaaaatcgttg

SEQ ID NO: 1102589 - DNA, 25 bp, Homo sapien
taaagttagattccaggcacctctg

SEQ ID NO: 1102590 - DNA, 25 bp, Homo sapien
gagactacaaacgaagaggactgct

SEQ ID NO: 1102591 - DNA, 25 bp, Homo sapien
tcgttgggcattacacagagcaggg

SEQ ID NO: 1102592 - DNA, 25 bp, Homo sapien
tgattcctaaagacttgtttccaaa

SEQ ID NO: 1102593 - DNA, 25 bp, Homo sapien
tatatgttctgcgttcctaacagcc

SEQ ID NO: 1102594 - DNA, 25 bp, Homo sapien
tatttttagctccaacaatcctgat

SEQ ID NO: 1102595 - DNA, 25 bp, Homo sapien
ttctttcctcgttaaaggattgaca

SEQ ID NO: 1102596 - DNA, 25 bp, Homo sapien
ctccgctggttacagtgaaaattag

SEQ ID NO: 1102597 - DNA, 25 bp, Homo sapien
ccgctggttacagtgaaaattagta

SEQ ID NO: 1102598 - DNA, 25 bp, Homo sapien
aattagtaggaagacaactttgcca

SEQ ID NO: 1102599 - DNA, 25 bp, Homo sapien
attagtaggaagacaactttgccat

SEQ ID NO: 1102600 - DNA, 25 bp, Homo sapien
ctttctgggtaggagatgggatctc

SEQ ID NO: 1102601 - DNA, 25 bp, Homo sapien
cactccacttatctgggtcatgagc

SEQ ID NO: 1102602 - DNA, 25 bp, Homo sapien
tgtttaggcttgaactatgcattaa

SEQ ID NO: 1102603 - DNA, 25 bp, Homo sapien
tgttgactccaaagcgtgagatgct

SEQ ID NO: 1102604 - DNA, 25 bp, Homo sapien
atagcatacatgatgcatgttaggg

SEQ ID NO: 1102605 - DNA, 25 bp, Homo sapien
ctggaatatagcatacatgatgcat

SEQ ID NO: 1102606 - DNA, 25 bp, Homo sapien
ggaatatagcatacatgatgcatgt

SEQ ID NO: 1102607 - DNA, 25 bp, Homo sapien
gcatgttaggggtctattgtgagaa

SEQ ID NO: 1102608 - DNA, 25 bp, Homo sapien
caggctgttgtgatatgccacgtca

SEQ ID NO: 1102609 - DNA, 25 bp, Homo sapien
tctgaatgtctttaggaggtctctt

SEQ ID NO: 1102610 - DNA, 25 bp, Homo sapien
aacatgggtcgactgggctacatca

SEQ ID NO: 1102611 - DNA, 25 bp, Homo sapien
tgccacgtcagaatggtaatggtct

SEQ ID NO: 1102612 - DNA, 25 bp, Homo sapien
gacctgctgtacacattgttgatga

SEQ ID NO: 1102613 - DNA, 25 bp, Homo sapien
tcatttgtcaagtaagagtatgacc

SEQ ID NO: 1102614 - DNA, 25 bp, Homo sapien
ttgggagtacttgaccatcattttc

SEQ ID NO: 1102615 - DNA, 25 bp, Homo sapien
gatatcggtatacacaaatgcatta

SEQ ID NO: 1102616 - DNA, 25 bp, Homo sapien
tggagactccaggatgatcaacgtc

SEQ ID NO: 1102617 - DNA, 25 bp, Homo sapien
gagaaactgattggagactccagga

SEQ ID NO: 1102618 - DNA, 25 bp, Homo sapien
tgtgttgatgagaaactgattggag

SEQ ID NO: 1102619 - DNA, 25 bp, Homo sapien
gatgatcaacgtcatggatggcagc

SEQ ID NO: 1102620 - DNA, 25 bp, Homo sapien
gattcatcattatacatcaaagcaa

SEQ ID NO: 1102621 - DNA, 25 bp, Homo sapien
cccacagcaaggtgatgattttcca

SEQ ID NO: 1102622 - DNA, 25 bp, Homo sapien
cattatacatcaaagcaagttctga

SEQ ID NO: 1102623 - DNA, 25 bp, Homo sapien
ttcctgagtgtctgacgctgcttct

SEQ ID NO: 1102624 - DNA, 25 bp, Homo sapien
gagaagaacgcctgaacttgtaact

SEQ ID NO: 1102625 - DNA, 25 bp, Homo sapien
cttcgtttctaccattgtcttcagg

SEQ ID NO: 1102626 - DNA, 25 bp, Homo sapien
ggtctgccagcaggctcatatgttt

SEQ ID NO: 1102627 - DNA, 25 bp, Homo sapien
gaatgcgatcggtatagttgtctag

SEQ ID NO: 1102628 - DNA, 25 bp, Homo sapien
taaatactgccggaacatctcatgc

SEQ ID NO: 1102629 - DNA, 25 bp, Homo sapien
cctctcatactagtacgcttggtac

SEQ ID NO: 1102630 - DNA, 25 bp, Homo sapien
ctcataaaattaggtgtaaatactg

SEQ ID NO: 1102631 - DNA, 25 bp, Homo sapien
catactagtacgcttggtactaaac

SEQ ID NO: 1102632 - DNA, 25 bp, Homo sapien
aagctgtgtgtttatcacacattgg

SEQ ID NO: 1102633 - DNA, 25 bp, Homo sapien
tccattcccctctcccgctctttgt

SEQ ID NO: 1102634 - DNA, 25 bp, Homo sapien
gtgtttatcacacattgggctaatt

SEQ ID NO: 1102635 - DNA, 25 bp, Homo sapien
ggtctgtccattgccgatacaattc

SEQ ID NO: 1102636 - DNA, 25 bp, Homo sapien
taatggagaagtcgcatgagtcctg

SEQ ID NO: 1102637 - DNA, 25 bp, Homo sapien
tcaccgtgggcttgattaaggacag

SEQ ID NO: 1102638 - DNA, 25 bp, Homo sapien
tattctgcagctattggcatctgga

SEQ ID NO: 1102639 - DNA, 25 bp, Homo sapien
gacaagacagggctttgactatgca

SEQ ID NO: 1102640 - DNA, 25 bp, Homo sapien
tgtatgaatcctgagagcacccagt

SEQ ID NO: 1102641 - DNA, 25 bp, Homo sapien
tattccctagatcacaggacgagag

SEQ ID NO: 1102642 - DNA, 25 bp, Homo sapien
aatcagacagtgttcagcagagccc

SEQ ID NO: 1102643 - DNA, 25 bp, Homo sapien
gagctttactgctgggccaatcaga

SEQ ID NO: 1102644 - DNA, 25 bp, Homo sapien
tccagggacccaaaataacaagctc

SEQ ID NO: 1102645 - DNA, 25 bp, Homo sapien
aaataacaagctcaaggtaatggag

SEQ ID NO: 1102646 - DNA, 25 bp, Homo sapien
agggacccaaaataacaagctcaag

SEQ ID NO: 1102647 - DNA, 25 bp, Homo sapien
caagctcaaggtaatggagaaaatt

SEQ ID NO: 1102648 - DNA, 25 bp, Homo sapien
tataggtctctttccacactactgg

SEQ ID NO: 1102649 - DNA, 25 bp, Homo sapien
caggcccaggtctaacgtgttttga

SEQ ID NO: 1102650 - DNA, 25 bp, Homo sapien
gagcacgcagtcatttccaacaggt

SEQ ID NO: 1102651 - DNA, 25 bp, Homo sapien
tgttttggatctacagagcacgcag

SEQ ID NO: 1102652 - DNA, 25 bp, Homo sapien
tctggatcaatcacacaaagcgtct

SEQ ID NO: 1102653 - DNA, 25 bp, Homo sapien
gaatcttcctcatcgagagtcagtt

SEQ ID NO: 1102654 - DNA, 25 bp, Homo sapien
aggtatcgagaatgtcctgagcatc

SEQ ID NO: 1102655 - DNA, 25 bp, Homo sapien
tgtctatgtcagtctctcccaggga

SEQ ID NO: 1102656 - DNA, 25 bp, Homo sapien
taaactccaggtattcaacaggcat

SEQ ID NO: 1102657 - DNA, 25 bp, Homo sapien
catcaaggcaagtcaaccgtgggat

SEQ ID NO: 1102658 - DNA, 25 bp, Homo sapien
aaatttaacaccaccattggcaggc

SEQ ID NO: 1102659 - DNA, 25 bp, Homo sapien
gcagaagtagcaactcaggcaggga

SEQ ID NO: 1102660 - DNA, 25 bp, Homo sapien
ctgacatcagtaagaggcctaacaa

SEQ ID NO: 1102661 - DNA, 25 bp, Homo sapien
taattactgagtcacaatgctgaac

SEQ ID NO: 1102662 - DNA, 25 bp, Homo sapien
acattggtcatgcacatttgtgcca

SEQ ID NO: 1102663 - DNA, 25 bp, Homo sapien
cagtgttcatagacatacattggtc

SEQ ID NO: 1102664 - DNA, 25 bp, Homo sapien
cagctttgccagtaaaacaaaggcc

SEQ ID NO: 1102665 - DNA, 25 bp, Homo sapien
ccacaatagtcccgagcccagggat

SEQ ID NO: 1102666 - DNA, 25 bp, Homo sapien
tcaaagggatatctgtgacccacaa

SEQ ID NO: 1102667 - DNA, 25 bp, Homo sapien
ggcctgggtcagctttgccagtaaa

SEQ ID NO: 1102668 - DNA, 25 bp, Homo sapien
cctgatgcactccttttccgtgaaa

SEQ ID NO: 1102669 - DNA, 25 bp, Homo sapien
tgcactccttttccgtgaaataagt

SEQ ID NO: 1102670 - DNA, 25 bp, Homo sapien
gatgcactccttttccgtgaaataa

SEQ ID NO: 1102671 - DNA, 25 bp, Homo sapien
ctcctgatgcactccttttccgtga

SEQ ID NO: 1102672 - DNA, 25 bp, Homo sapien
tgcagctggtgttcgcactggtgtc

SEQ ID NO: 1102673 - DNA, 25 bp, Homo sapien
gcagctggtgttcgcactggtgtcc

SEQ ID NO: 1102674 - DNA, 25 bp, Homo sapien
aacagtgtgtgcaaaaggagtcaca

SEQ ID NO: 1102675 - DNA, 25 bp, Homo sapien
gctgcagctggtgttcgcactggtg

SEQ ID NO: 1102676 - DNA, 25 bp, Homo sapien
catggtggatgattgactctctttg

SEQ ID NO: 1102677 - DNA, 25 bp, Homo sapien
catgggcgagccagaactcgagttt

SEQ ID NO: 1102678 - DNA, 25 bp, Homo sapien
tgtaagcatacatgggcgagccaga

SEQ ID NO: 1102679 - DNA, 25 bp, Homo sapien
tacaccatctacgtgagcccctgta

SEQ ID NO: 1102680 - DNA, 25 bp, Homo sapien
cacatctggaatggagaggtcacca

SEQ ID NO: 1102681 - DNA, 25 bp, Homo sapien
gacagaagacatcaccactgcaatt

SEQ ID NO: 1102682 - DNA, 25 bp, Homo sapien
gaagcctttggtatcggcagtgaca

SEQ ID NO: 1102683 - DNA, 25 bp, Homo sapien
tcatgaacgatactgcctgagccag

SEQ ID NO: 1102684 - DNA, 25 bp, Homo sapien
cagtaaaacttagaggtgagcacca

SEQ ID NO: 1102685 - DNA, 25 bp, Homo sapien
taatgtgccagactttgagagcatg

SEQ ID NO: 1102686 - DNA, 25 bp, Homo sapien
tgagagcatgcaatgcacaaagcgg

SEQ ID NO: 1102687 - DNA, 25 bp, Homo sapien
tacaattttagggtagcttctgaca

SEQ ID NO: 1102688 - DNA, 25 bp, Homo sapien
atttctattacttaggtgtccttgg

SEQ ID NO: 1102689 - DNA, 25 bp, Homo sapien
ttcttttaggaaattattccactgc

SEQ ID NO: 1102690 - DNA, 25 bp, Homo sapien
cttttaggaaattattccactgctg

SEQ ID NO: 1102691 - DNA, 25 bp, Homo sapien
tacttaggtgtccttggtgtccttc

SEQ ID NO: 1102692 - DNA, 25 bp, Homo sapien
ttgcactcctgttccaatcctcgtg

SEQ ID NO: 1102693 - DNA, 25 bp, Homo sapien
tcctgttccaatcctcgtgctttca

SEQ ID NO: 1102694 - DNA, 25 bp, Homo sapien
cacagtttggcattcgcctcttctt

SEQ ID NO: 1102695 - DNA, 25 bp, Homo sapien
tcgtgctttcactccacagtttggc

SEQ ID NO: 1102696 - DNA, 25 bp, Homo sapien
cactcataagcggatgaggtttccg

SEQ ID NO: 1102697 - DNA, 25 bp, Homo sapien
tgtttccagagtgcatatgccttca

SEQ ID NO: 1102698 - DNA, 25 bp, Homo sapien
ccgtgattggcttagttatgatctg

SEQ ID NO: 1102699 - DNA, 25 bp, Homo sapien
gatctgtttccagagtgcatatgcc

SEQ ID NO: 1102700 - DNA, 25 bp, Homo sapien
agctttcatgacaggacaccaaaag

SEQ ID NO: 1102701 - DNA, 25 bp, Homo sapien
aagctttcatgacaggacaccaaaa

SEQ ID NO: 1102702 - DNA, 25 bp, Homo sapien
gttttaagagaagcaggtttctctg

SEQ ID NO: 1102703 - DNA, 25 bp, Homo sapien
ttttaagagaagcaggtttctctga

SEQ ID NO: 1102704 - DNA, 25 bp, Homo sapien
caaccagctttcatttctcgttgct

SEQ ID NO: 1102705 - DNA, 25 bp, Homo sapien
tcaaccagctttcatttctcgttgc

SEQ ID NO: 1102706 - DNA, 25 bp, Homo sapien
cacttgcagttttacattactgggc

SEQ ID NO: 1102707 - DNA, 25 bp, Homo sapien
ttcttcacaggacctgcttgaaagg

SEQ ID NO: 1102708 - DNA, 25 bp, Homo sapien
ctgcctaatctgctcttggttttcc

SEQ ID NO: 1102709 - DNA, 25 bp, Homo sapien
caatttccacggtatccattttcca

SEQ ID NO: 1102710 - DNA, 25 bp, Homo sapien
tctggttgtgaacctaccctgacaa

SEQ ID NO: 1102711 - DNA, 25 bp, Homo sapien
gggtatatttgtagccccattgtca

SEQ ID NO: 1102712 - DNA, 25 bp, Homo sapien
tttcagtttctttgaacccacatca

SEQ ID NO: 1102713 - DNA, 25 bp, Homo sapien
taagctttgcgctatagttctgatc

SEQ ID NO: 1102714 - DNA, 25 bp, Homo sapien
aatgctatatctcagatggcaaaag

SEQ ID NO: 1102715 - DNA, 25 bp, Homo sapien
ctctggcaggttgcgtgtctgatga

SEQ ID NO: 1102716 - DNA, 25 bp, Homo sapien
gttgcatcctccagaggcaatgcta

SEQ ID NO: 1102717 - DNA, 25 bp, Homo sapien
caaggctctggcaggttgcgtgtct

SEQ ID NO: 1102718 - DNA, 25 bp, Homo sapien
tccgtgcacatctgtgcgtctctct

SEQ ID NO: 1102719 - DNA, 25 bp, Homo sapien
ctccgtgcacatctgtgcgtctctc

SEQ ID NO: 1102720 - DNA, 25 bp, Homo sapien
agccaaaagacaggccatggatgct

SEQ ID NO: 1102721 - DNA, 25 bp, Homo sapien
ggtgcttcttcacctacaggcaggc

SEQ ID NO: 1102722 - DNA, 25 bp, Homo sapien
caggctaccaagaagatgctgagag

SEQ ID NO: 1102723 - DNA, 25 bp, Homo sapien
ttaagccaaaagacaggccatggat

SEQ ID NO: 1102724 - DNA, 25 bp, Homo sapien
ccacgccgctgctgaggtctattcc

SEQ ID NO: 1102725 - DNA, 25 bp, Homo sapien
cacgccgctgctgaggtctattccg

SEQ ID NO: 1102726 - DNA, 25 bp, Homo sapien
accacgccgctgctgaggtctattc

SEQ ID NO: 1102727 - DNA, 25 bp, Homo sapien
tccaaggagtctgaaaaaacacagg

SEQ ID NO: 1102728 - DNA, 25 bp, Homo sapien
aaacacaggaggatacgattccagg

SEQ ID NO: 1102729 - DNA, 25 bp, Homo sapien
aggaggatacgattccaggtcccag

SEQ ID NO: 1102730 - DNA, 25 bp, Homo sapien
ttccaaggagtctgaaaaaacacag

SEQ ID NO: 1102731 - DNA, 25 bp, Homo sapien
tcagtctgtgagtttacatcatgac

SEQ ID NO: 1102732 - DNA, 25 bp, Homo sapien
attgaattgagaaaagataagccac

SEQ ID NO: 1102733 - DNA, 25 bp, Homo sapien
tgggacttactcagacacatgagcc

SEQ ID NO: 1102734 - DNA, 25 bp, Homo sapien
catgttccaagtaaccagctcacaa

SEQ ID NO: 1102735 - DNA, 25 bp, Homo sapien
gcaagacccagttcaaccgtgaccc

SEQ ID NO: 1102736 - DNA, 25 bp, Homo sapien
gttcaaccgtgacccaaacatggag

SEQ ID NO: 1102737 - DNA, 25 bp, Homo sapien
ccgctgaagactgcaagacccagtt

SEQ ID NO: 1102738 - DNA, 25 bp, Homo sapien
caaacatggagctgtcgtcccagca

SEQ ID NO: 1102739 - DNA, 25 bp, Homo sapien
tgaacctacgtcaagttgagccaac

SEQ ID NO: 1102740 - DNA, 25 bp, Homo sapien
tccattgcaagcctggaagcaagtc

SEQ ID NO: 1102741 - DNA, 25 bp, Homo sapien
cttgcagtgaagagctgcctaggac

SEQ ID NO: 1102742 - DNA, 25 bp, Homo sapien
taccagtgacacatatccaaggcca

SEQ ID NO: 1102743 - DNA, 25 bp, Homo sapien
catttgaacagggtccagttggcat

SEQ ID NO: 1102744 - DNA, 25 bp, Homo sapien
gaacagggtccagttggcatcagaa

SEQ ID NO: 1102745 - DNA, 25 bp, Homo sapien
ttgaacagggtccagttggcatcag

SEQ ID NO: 1102746 - DNA, 25 bp, Homo sapien
ccagttggcatcagaagtagggcac

SEQ ID NO: 1102747 - DNA, 25 bp, Homo sapien
tctcctgaggagctttcaagtttgc

SEQ ID NO: 1102748 - DNA, 25 bp, Homo sapien
ttacacctgctagcccttctctggg

SEQ ID NO: 1102749 - DNA, 25 bp, Homo sapien
gaattattaatctggaacccaagtg

SEQ ID NO: 1102750 - DNA, 25 bp, Homo sapien
tcacaactcctgcatggtaggattc

SEQ ID NO: 1102751 - DNA, 25 bp, Homo sapien
gaaatcttcgatttgggaagtcagg

SEQ ID NO: 1102752 - DNA, 25 bp, Homo sapien
ccatttgaataaaaggcctctgcta

SEQ ID NO: 1102753 - DNA, 25 bp, Homo sapien
ctatctaaagcagtaacaatgtcag

SEQ ID NO: 1102754 - DNA, 25 bp, Homo sapien
tatctgtttcagacattggcctccc

SEQ ID NO: 1102755 - DNA, 25 bp, Homo sapien
gagaacctttcacctgccaaattgc

SEQ ID NO: 1102756 - DNA, 25 bp, Homo sapien
taaataccacatgcaagagagtgtg

SEQ ID NO: 1102757 - DNA, 25 bp, Homo sapien
caaaggattacattacagcaaggca

SEQ ID NO: 1102758 - DNA, 25 bp, Homo sapien
ccacatctaagaaggcccaaagtat

SEQ ID NO: 1102759 - DNA, 25 bp, Homo sapien
gcttagattgtgttctgtagccagc

SEQ ID NO: 1102760 - DNA, 25 bp, Homo sapien
tctggacagtgggaatgggattcac

SEQ ID NO: 1102761 - DNA, 25 bp, Homo sapien
gaagggcaaggaaattctggacagt

SEQ ID NO: 1102762 - DNA, 25 bp, Homo sapien
gacttgaatggcaagcttatgagct

SEQ ID NO: 1102763 - DNA, 25 bp, Homo sapien
gaaattctatgcaatgagatacact

SEQ ID NO: 1102764 - DNA, 25 bp, Homo sapien
taataacctaggcaaattgaaggca

SEQ ID NO: 1102765 - DNA, 25 bp, Homo sapien
tgatcatgggaaaaaaggactaact

SEQ ID NO: 1102766 - DNA, 25 bp, Homo sapien
gatgtaatatctagagcagccacta

SEQ ID NO: 1102767 - DNA, 25 bp, Homo sapien
caagttttggcaagctacttggagg

SEQ ID NO: 1102768 - DNA, 25 bp, Homo sapien
aagtcaaggtggcagtgagctagga

SEQ ID NO: 1102769 - DNA, 25 bp, Homo sapien
tccaagttttggcaagctacttgga

SEQ ID NO: 1102770 - DNA, 25 bp, Homo sapien
tactaaggacatcatggttgcttcc

SEQ ID NO: 1102771 - DNA, 25 bp, Homo sapien
tagcatcctagtcaggttggcccag

SEQ ID NO: 1102772 - DNA, 25 bp, Homo sapien
ggcttaactagtgcaaacctctgtg

SEQ ID NO: 1102773 - DNA, 25 bp, Homo sapien
tacttggtgtggcattaggacctgg

SEQ ID NO: 1102774 - DNA, 25 bp, Homo sapien
gaaactcagttgaaaccagaggcta

SEQ ID NO: 1102775 - DNA, 25 bp, Homo sapien
cccaccgagtttccaaagtccattg

SEQ ID NO: 1102776 - DNA, 25 bp, Homo sapien
taccattttagttgagagttgagaa

SEQ ID NO: 1102777 - DNA, 25 bp, Homo sapien
tggtgtcattctcaaagcggtggat

SEQ ID NO: 1102778 - DNA, 25 bp, Homo sapien
tcctcactggaagctggtgccgtgc

SEQ ID NO: 1102779 - DNA, 25 bp, Homo sapien
tccaacagtatgctttccgattcct

SEQ ID NO: 1102780 - DNA, 25 bp, Homo sapien
cagtgctccttctacttgggttaga

SEQ ID NO: 1102781 - DNA, 25 bp, Homo sapien
gcagcaggaaaatacagcattgatg

SEQ ID NO: 1102782 - DNA, 25 bp, Homo sapien
tgatctgaaagtaggtcagtgctcc

SEQ ID NO: 1102783 - DNA, 25 bp, Homo sapien
agtataactctttcatgcagcagga

SEQ ID NO: 1102784 - DNA, 25 bp, Homo sapien
gtctcaagagatgtcattgactaac

SEQ ID NO: 1102785 - DNA, 25 bp, Homo sapien
gagatgtcattgactaacatctatc

SEQ ID NO: 1102786 - DNA, 25 bp, Homo sapien
tcaagagatgtcattgactaacatc

SEQ ID NO: 1102787 - DNA, 25 bp, Homo sapien
gatgtcattgactaacatctatcat

SEQ ID NO: 1102788 - DNA, 25 bp, Homo sapien
atcagtgtccttttctttcttccgt

SEQ ID NO: 1102789 - DNA, 25 bp, Homo sapien
cagtgtccttttctttcttccgtat

SEQ ID NO: 1102790 - DNA, 25 bp, Homo sapien
tcagtgtccttttctttcttccgta

SEQ ID NO: 1102791 - DNA, 25 bp, Homo sapien
gcaaatagcttcttcgaggaggcaa

SEQ ID NO: 1102792 - DNA, 25 bp, Homo sapien
tattgactgtgataagagcatctct

SEQ ID NO: 1102793 - DNA, 25 bp, Homo sapien
cacaatatccgagaaaactgtggcc

SEQ ID NO: 1102794 - DNA, 25 bp, Homo sapien
aactgtggccatcttatattgactg

SEQ ID NO: 1102795 - DNA, 25 bp, Homo sapien
tgaacaatgagaacacttgaacaca

SEQ ID NO: 1102796 - DNA, 25 bp, Homo sapien
aggaaggggaacatcacacaccggg

SEQ ID NO: 1102797 - DNA, 25 bp, Homo sapien
cgcgaggacaaaaaatcaaacacca

SEQ ID NO: 1102798 - DNA, 25 bp, Homo sapien
catgttctcactcataggtgggaat

SEQ ID NO: 1102799 - DNA, 25 bp, Homo sapien
gattttagactagaatatggcctcc

SEQ ID NO: 1102800 - DNA, 25 bp, Homo sapien
taaccccactgtatatcttaggagg

SEQ ID NO: 1102801 - DNA, 25 bp, Homo sapien
tgtgtctaccctagcaggttgctga

SEQ ID NO: 1102802 - DNA, 25 bp, Homo sapien
ccacagtgagttgtagcagccctga

SEQ ID NO: 1102803 - DNA, 25 bp, Homo sapien
gcagccgttgggatggtcttccaca

SEQ ID NO: 1102804 - DNA, 25 bp, Homo sapien
caatgtcgatttcctagctgcagaa

SEQ ID NO: 1102805 - DNA, 25 bp, Homo sapien
caaaagctcggagattggcctggct

SEQ ID NO: 1102806 - DNA, 25 bp, Homo sapien
cataagtgaagaacctgagacagtc

SEQ ID NO: 1102807 - DNA, 25 bp, Homo sapien
aattccatctctatctggtgaacct

SEQ ID NO: 1102808 - DNA, 25 bp, Homo sapien
ctgagacagagttaacgagagggct

SEQ ID NO: 1102809 - DNA, 25 bp, Homo sapien
tgagacagagttaacgagagggctc

SEQ ID NO: 1102810 - DNA, 25 bp, Homo sapien
agacagagttaacgagagggctctg

SEQ ID NO: 1102811 - DNA, 25 bp, Homo sapien
gagacagagttaacgagagggctct

SEQ ID NO: 1102812 - DNA, 25 bp, Homo sapien
aaaaagtggttaaaagatctgcttg

SEQ ID NO: 1102813 - DNA, 25 bp, Homo sapien
tttttcctccttcacgcgcacactc

SEQ ID NO: 1102814 - DNA, 25 bp, Homo sapien
tctgctttgctattgtagggtggtt

SEQ ID NO: 1102815 - DNA, 25 bp, Homo sapien
tagggtggttcgtgtgggctgggct

SEQ ID NO: 1102816 - DNA, 25 bp, Homo sapien
tccttcacgcgcacactctgctttg

SEQ ID NO: 1102817 - DNA, 25 bp, Homo sapien
gagtttgggctagggtcagcatccc

SEQ ID NO: 1102818 - DNA, 25 bp, Homo sapien
caacacggctataggtactacagag

SEQ ID NO: 1102819 - DNA, 25 bp, Homo sapien
tctccactgtggtagacctgactca

SEQ ID NO: 1102820 - DNA, 25 bp, Homo sapien
taattctatagaacagcacggccca

SEQ ID NO: 1102821 - DNA, 25 bp, Homo sapien
tcccaatcaatttccgcataaaatc

SEQ ID NO: 1102822 - DNA, 25 bp, Homo sapien
caatttccgcataaaatccatttgg

SEQ ID NO: 1102823 - DNA, 25 bp, Homo sapien
tccgcataaaatccatttggtgccc

SEQ ID NO: 1102824 - DNA, 25 bp, Homo sapien
ataaaatccatttggtgccccattg

SEQ ID NO: 1102825 - DNA, 25 bp, Homo sapien
ggtaacagatcagtcagccatagga

SEQ ID NO: 1102826 - DNA, 25 bp, Homo sapien
gagagtgctggtactcccagttgaa

SEQ ID NO: 1102827 - DNA, 25 bp, Homo sapien
gaagagggtctacataccatggaaa

SEQ ID NO: 1102828 - DNA, 25 bp, Homo sapien
gatcccaggtgtttcagactatacc

SEQ ID NO: 1102829 - DNA, 25 bp, Homo sapien
cgggttcctcgggtctgatgctgta

SEQ ID NO: 1102830 - DNA, 25 bp, Homo sapien
ggttcctcgggtctgatgctgtagc

SEQ ID NO: 1102831 - DNA, 25 bp, Homo sapien
gttcctcgggtctgatgctgtagcc

SEQ ID NO: 1102832 - DNA, 25 bp, Homo sapien
agccgggttcctcgggtctgatgct

SEQ ID NO: 1102833 - DNA, 25 bp, Homo sapien
tttctgagagtgaatgaaaattaaa

SEQ ID NO: 1102834 - DNA, 25 bp, Homo sapien
gttttctgagagtgaatgaaaatta

SEQ ID NO: 1102835 - DNA, 25 bp, Homo sapien
tctgagagtgaatgaaaattaaaat

SEQ ID NO: 1102836 - DNA, 25 bp, Homo sapien
tgttttctgagagtgaatgaaaatt

SEQ ID NO: 1102837 - DNA, 25 bp, Homo sapien
gtagaacacagttaaagatacataa

SEQ ID NO: 1102838 - DNA, 25 bp, Homo sapien
agttaaagatacataactctttctt

SEQ ID NO: 1102839 - DNA, 25 bp, Homo sapien
gaacacagttaaagatacataactc

SEQ ID NO: 1102840 - DNA, 25 bp, Homo sapien
cagttaaagatacataactctttct

SEQ ID NO: 1102841 - DNA, 25 bp, Homo sapien
taagaatgtctttagattgcaatgg

SEQ ID NO: 1102842 - DNA, 25 bp, Homo sapien
gggaaagtgcgatgttgcctattga

SEQ ID NO: 1102843 - DNA, 25 bp, Homo sapien
tacagttgcagcattcttaagaatg

SEQ ID NO: 1102844 - DNA, 25 bp, Homo sapien
tgatgccttcaattcatctacagtt

SEQ ID NO: 1102845 - DNA, 25 bp, Homo sapien
tatggtgaccatatgcaggcttcaa

SEQ ID NO: 1102846 - DNA, 25 bp, Homo sapien
gattgacttaatgcatataggcaga

SEQ ID NO: 1102847 - DNA, 25 bp, Homo sapien
aaaatgcttgcaggaaaataagtca

SEQ ID NO: 1102848 - DNA, 25 bp, Homo sapien
caattttctcaagctagaatgagct

SEQ ID NO: 1102849 - DNA, 25 bp, Homo sapien
tggtgttaccaagcagcggcaaatt

SEQ ID NO: 1102850 - DNA, 25 bp, Homo sapien
tacagccatgagatctgaagctccg

SEQ ID NO: 1102851 - DNA, 25 bp, Homo sapien
aggcactagcctacacgccagggta

SEQ ID NO: 1102852 - DNA, 25 bp, Homo sapien
gaggaactcgcctatgaccacacag

SEQ ID NO: 1102853 - DNA, 25 bp, Homo sapien
ttttcactgaactcaatggggtgct

SEQ ID NO: 1102854 - DNA, 25 bp, Homo sapien
tgttttcactgaactcaatggggtg

SEQ ID NO: 1102855 - DNA, 25 bp, Homo sapien
ttgttttcactgaactcaatggggt

SEQ ID NO: 1102856 - DNA, 25 bp, Homo sapien
ttcactgaactcaatggggtgctga

SEQ ID NO: 1102857 - DNA, 25 bp, Homo sapien
ctaagcccatgtctgggatttagtg

SEQ ID NO: 1102858 - DNA, 25 bp, Homo sapien
agggggctggcttctaagcccatgt

SEQ ID NO: 1102859 - DNA, 25 bp, Homo sapien
tagctgatttttgtccagctgcctg

SEQ ID NO: 1102860 - DNA, 25 bp, Homo sapien
cagctgcctgcaggtctgtctagag

SEQ ID NO: 1102861 - DNA, 25 bp, Homo sapien
ggtcagcttgcccagacagtataaa

SEQ ID NO: 1102862 - DNA, 25 bp, Homo sapien
catctactgagaaggtacaaccaac

SEQ ID NO: 1102863 - DNA, 25 bp, Homo sapien
taacccttacatttcaggaagagag

SEQ ID NO: 1102864 - DNA, 25 bp, Homo sapien
tactaaatattcatacagctcaggg

SEQ ID NO: 1102865 - DNA, 25 bp, Homo sapien
gcttgcttcctagcttaacaaggaa

SEQ ID NO: 1102866 - DNA, 25 bp, Homo sapien
atgaaggtttcgtgctctgattaca

SEQ ID NO: 1102867 - DNA, 25 bp, Homo sapien
ggtttcgtgctctgattacatctct

SEQ ID NO: 1102868 - DNA, 25 bp, Homo sapien
caaggaattgagctgccatgggaat

SEQ ID NO: 1102869 - DNA, 25 bp, Homo sapien
gacagcacatgagcttcctagctga

SEQ ID NO: 1102870 - DNA, 25 bp, Homo sapien
tccctgtgagtggtcaatggcccct

SEQ ID NO: 1102871 - DNA, 25 bp, Homo sapien
tactcatgcattgtagctgggcacg

SEQ ID NO: 1102872 - DNA, 25 bp, Homo sapien
tcccaagtcaccatggctagagccg

SEQ ID NO: 1102873 - DNA, 25 bp, Homo sapien
acttttcctctaaaagcgtaggcat

SEQ ID NO: 1102874 - DNA, 25 bp, Homo sapien
gatcgtgtggctgtgattgaaccag

SEQ ID NO: 1102875 - DNA, 25 bp, Homo sapien
gagacctggtcatggttcgcaaaga

SEQ ID NO: 1102876 - DNA, 25 bp, Homo sapien
aaatctgttcctcgtgttgctctaa

SEQ ID NO: 1102877 - DNA, 25 bp, Homo sapien
catcgtatcagacttgtgttgccac

SEQ ID NO: 1102878 - DNA, 25 bp, Homo sapien
cctgtggatatttgaggtggccaaa

SEQ ID NO: 1102879 - DNA, 25 bp, Homo sapien
cagtcctgtggatatttgaggtggc

SEQ ID NO: 1102880 - DNA, 25 bp, Homo sapien
tgaggtggccaaatttggttaattc

SEQ ID NO: 1102881 - DNA, 25 bp, Homo sapien
cacacagtcctgtggatatttgagg

SEQ ID NO: 1102882 - DNA, 25 bp, Homo sapien
gctgcgcctctgtgatcagcaaaaa

SEQ ID NO: 1102883 - DNA, 25 bp, Homo sapien
gggctgcgcctctgtgatcagcaaa

SEQ ID NO: 1102884 - DNA, 25 bp, Homo sapien
cgcctctgtgatcagcaaaaaggaa

SEQ ID NO: 1102885 - DNA, 25 bp, Homo sapien
tgcgcctctgtgatcagcaaaaagg

SEQ ID NO: 1102886 - DNA, 25 bp, Homo sapien
tgtagtttagcagagaaccaccaac

SEQ ID NO: 1102887 - DNA, 25 bp, Homo sapien
taattgactaattggattggcacag

SEQ ID NO: 1102888 - DNA, 25 bp, Homo sapien
ggcacaggcctagggatatttcaga

SEQ ID NO: 1102889 - DNA, 25 bp, Homo sapien
gaatggcattagctatgtagtttag

SEQ ID NO: 1102890 - DNA, 25 bp, Homo sapien
tcatccgtagattagcagtctctgc

SEQ ID NO: 1102891 - DNA, 25 bp, Homo sapien
gggttggaatcatccgtagattagc

SEQ ID NO: 1102892 - DNA, 25 bp, Homo sapien
gaatcatccgtagattagcagtctc

SEQ ID NO: 1102893 - DNA, 25 bp, Homo sapien
tggaatcatccgtagattagcagtc

SEQ ID NO: 1102894 - DNA, 25 bp, Homo sapien
gactgaggtgatgtcgaccacacaa

SEQ ID NO: 1102895 - DNA, 25 bp, Homo sapien
aaagaaagtcctgctatctgctgga

SEQ ID NO: 1102896 - DNA, 25 bp, Homo sapien
gatctctgatgaccttaatgttgca

SEQ ID NO: 1102897 - DNA, 25 bp, Homo sapien
aaaacctccctttgtcaagcgactg

SEQ ID NO: 1102898 - DNA, 25 bp, Homo sapien
gaacccatttatgctacgggagcag

SEQ ID NO: 1102899 - DNA, 25 bp, Homo sapien
cagcttaggacaaggtttagcacct

SEQ ID NO: 1102900 - DNA, 25 bp, Homo sapien
tatggaagtttggatacaggttcgc

SEQ ID NO: 1102901 - DNA, 25 bp, Homo sapien
tatggccatgtaaatctgctgagga

SEQ ID NO: 1102902 - DNA, 25 bp, Homo sapien
actttttctcagaaccgcatttaag

SEQ ID NO: 1102903 - DNA, 25 bp, Homo sapien
tatttcactcaaagattatagagag

SEQ ID NO: 1102904 - DNA, 25 bp, Homo sapien
tagacactataaggtttaagaccac

SEQ ID NO: 1102905 - DNA, 25 bp, Homo sapien
aggaaattgtagatacacacacaga

SEQ ID NO: 1102906 - DNA, 25 bp, Homo sapien
tggataagttccttttaattgcacc

SEQ ID NO: 1102907 - DNA, 25 bp, Homo sapien
catacactatttctggtagctaaga

SEQ ID NO: 1102908 - DNA, 25 bp, Homo sapien
taagcccaggaatgtataattcata

SEQ ID NO: 1102909 - DNA, 25 bp, Homo sapien
tatactccaagatccaaggaactgt

SEQ ID NO: 1102910 - DNA, 25 bp, Homo sapien
taatcactcagaacccacaagtgcc

SEQ ID NO: 1102911 - DNA, 25 bp, Homo sapien
agttggtgtggaacgcctgggtctt

SEQ ID NO: 1102912 - DNA, 25 bp, Homo sapien
gttctggagttggtgtggaacgcct

SEQ ID NO: 1102913 - DNA, 25 bp, Homo sapien
tggaacgcctgggtcttgccacttc

SEQ ID NO: 1102914 - DNA, 25 bp, Homo sapien
gtgtggaacgcctgggtcttgccac

SEQ ID NO: 1102915 - DNA, 25 bp, Homo sapien
tcaaaagctgattctagtggtgggc

SEQ ID NO: 1102916 - DNA, 25 bp, Homo sapien
agagaggagcaagggccgtagtgtc

SEQ ID NO: 1102917 - DNA, 25 bp, Homo sapien
aagctgattctagtggtgggccaaa

SEQ ID NO: 1102918 - DNA, 25 bp, Homo sapien
ggccgtagtgtcatctggaggcttt

SEQ ID NO: 1102919 - DNA, 25 bp, Homo sapien
gattaattggttggcctgaacccca

SEQ ID NO: 1102920 - DNA, 25 bp, Homo sapien
gcgactccatgcttggattaattgg

SEQ ID NO: 1102921 - DNA, 25 bp, Homo sapien
taattggttggcctgaaccccatat

SEQ ID NO: 1102922 - DNA, 25 bp, Homo sapien
ggccttgttaactttggcgactcca

SEQ ID NO: 1102923 - DNA, 25 bp, Homo sapien
accggtgaacggctatctggatctt

SEQ ID NO: 1102924 - DNA, 25 bp, Homo sapien
ccaccaccggtgaacggctatctgg

SEQ ID NO: 1102925 - DNA, 25 bp, Homo sapien
gtgaacggctatctggatcttcagg

SEQ ID NO: 1102926 - DNA, 25 bp, Homo sapien
caccaccggtgaacggctatctgga

SEQ ID NO: 1102927 - DNA, 25 bp, Homo sapien
caattgttaagggggatcctgttcg

SEQ ID NO: 1102928 - DNA, 25 bp, Homo sapien
tggggtagctggtacattttttgga

SEQ ID NO: 1102929 - DNA, 25 bp, Homo sapien
taaaataagtctgcataagaaattc

SEQ ID NO: 1102930 - DNA, 25 bp, Homo sapien
aagaaattctaatgaaagcaaaact

SEQ ID NO: 1102931 - DNA, 25 bp, Homo sapien
aagggcatgttcatccggggccact

SEQ ID NO: 1102932 - DNA, 25 bp, Homo sapien
agcaaaactgaatgccaacattgtg

SEQ ID NO: 1102933 - DNA, 25 bp, Homo sapien
agtcagctgggttgtctggtgtagc

SEQ ID NO: 1102934 - DNA, 25 bp, Homo sapien
taacagcaacagacttgggggacaa

SEQ ID NO: 1102935 - DNA, 25 bp, Homo sapien
aatactggcccaaaaatgctgtcca

SEQ ID NO: 1102936 - DNA, 25 bp, Homo sapien
tcaactccggagtaacatgttccgg

SEQ ID NO: 1102937 - DNA, 25 bp, Homo sapien
ttgagcggcgatagtacattgcgag

SEQ ID NO: 1102938 - DNA, 25 bp, Homo sapien
cgatagtacattgcgaggaggccca

SEQ ID NO: 1102939 - DNA, 25 bp, Homo sapien
cttctaaattgagcggcgatagtac

SEQ ID NO: 1102940 - DNA, 25 bp, Homo sapien
tctggacttcttctaaattgagcgg

SEQ ID NO: 1102941 - DNA, 25 bp, Homo sapien
gggaggtggagttgctctttgtccc

SEQ ID NO: 1102942 - DNA, 25 bp, Homo sapien
ggtggagttgctctttgtcccaacc

SEQ ID NO: 1102943 - DNA, 25 bp, Homo sapien
gtggagttgctctttgtcccaaccc

SEQ ID NO: 1102944 - DNA, 25 bp, Homo sapien
gaggtggagttgctctttgtcccaa

SEQ ID NO: 1102945 - DNA, 25 bp, Homo sapien
cggaccagggcccgagccaggtccg

SEQ ID NO: 1102946 - DNA, 25 bp, Homo sapien
tggccattccccgtcacaagaagca

SEQ ID NO: 1102947 - DNA, 25 bp, Homo sapien
ccgtcacaagaagcacactcaagca

SEQ ID NO: 1102948 - DNA, 25 bp, Homo sapien
cacaagaagcacactcaagcataag

SEQ ID NO: 1102949 - DNA, 25 bp, Homo sapien
gaagcacactcaagcataagacata

SEQ ID NO: 1102950 - DNA, 25 bp, Homo sapien
cagttcattgcctccagcttgtaaa

SEQ ID NO: 1102951 - DNA, 25 bp, Homo sapien
ctgagtatgaatccagttcattgcc

SEQ ID NO: 1102952 - DNA, 25 bp, Homo sapien
gcaaattacttgatatctctgagcc

SEQ ID NO: 1102953 - DNA, 25 bp, Homo sapien
cagcttgtaaacttgggcaaattac

SEQ ID NO: 1102954 - DNA, 25 bp, Homo sapien
gaattagaggagcacagacgagtac

SEQ ID NO: 1102955 - DNA, 25 bp, Homo sapien
caaaccttacaaaagtgcctggaga

SEQ ID NO: 1102956 - DNA, 25 bp, Homo sapien
gcctggagagcacactggttaacaa

SEQ ID NO: 1102957 - DNA, 25 bp, Homo sapien
gagatggatgctgtaaccctctaga

SEQ ID NO: 1102958 - DNA, 25 bp, Homo sapien
ttttcctttacggatgccccattga

SEQ ID NO: 1102959 - DNA, 25 bp, Homo sapien
tagatacccgtgatgatgattaaga

SEQ ID NO: 1102960 - DNA, 25 bp, Homo sapien
tagcttcgtgaaaaccatgcatagg

SEQ ID NO: 1102961 - DNA, 25 bp, Homo sapien
tgcctgggaaagtactaaggagact

SEQ ID NO: 1102962 - DNA, 25 bp, Homo sapien
ggcatgcacatcagtcagcacacca

SEQ ID NO: 1102963 - DNA, 25 bp, Homo sapien
tgtcaatgacaaacgtatgaaacac

SEQ ID NO: 1102964 - DNA, 25 bp, Homo sapien
gcacatcagtcagcacaccagtggg

SEQ ID NO: 1102965 - DNA, 25 bp, Homo sapien
gacaaacgtatgaaacacagaagac

SEQ ID NO: 1102966 - DNA, 25 bp, Homo sapien
caggttttcctggaggtagctttgg

SEQ ID NO: 1102967 - DNA, 25 bp, Homo sapien
gctggtcgagcaggggatgatgcac

SEQ ID NO: 1102968 - DNA, 25 bp, Homo sapien
aggaaccaaaggagtggctggtcga

SEQ ID NO: 1102969 - DNA, 25 bp, Homo sapien
tcctggaggtagctttggccgggat

SEQ ID NO: 1102970 - DNA, 25 bp, Homo sapien
gactttagacgttagcccagccaaa

SEQ ID NO: 1102971 - DNA, 25 bp, Homo sapien
tcagggactcagcaggtaacacaga

SEQ ID NO: 1102972 - DNA, 25 bp, Homo sapien
tctgactcctgtgtgcaaatgccaa

SEQ ID NO: 1102973 - DNA, 25 bp, Homo sapien
tgtatctaacccactgtagcagagg

SEQ ID NO: 1102974 - DNA, 25 bp, Homo sapien
ttggttgacgatattgaagaagtgc

SEQ ID NO: 1102975 - DNA, 25 bp, Homo sapien
agcccgcgctaagggtgctattgga

SEQ ID NO: 1102976 - DNA, 25 bp, Homo sapien
gaatgggagggctaaaaggtctgga

SEQ ID NO: 1102977 - DNA, 25 bp, Homo sapien
gctgcgctcaaggaattggttgacg

SEQ ID NO: 1102978 - DNA, 25 bp, Homo sapien
caagaccttccttggcgatttctta

SEQ ID NO: 1102979 - DNA, 25 bp, Homo sapien
tagctctgtatggaacagcataaga

SEQ ID NO: 1102980 - DNA, 25 bp, Homo sapien
cacaaacggattaaaagagaggaga

SEQ ID NO: 1102981 - DNA, 25 bp, Homo sapien
tcctgcaaaacacaggtgttaatgt

SEQ ID NO: 1102982 - DNA, 25 bp, Homo sapien
acaggtttatctgaggtcacttggg

SEQ ID NO: 1102983 - DNA, 25 bp, Homo sapien
tctatgaatcacagtgcattgaaag

SEQ ID NO: 1102984 - DNA, 25 bp, Homo sapien
gagtgacagtttactcttactttcc

SEQ ID NO: 1102985 - DNA, 25 bp, Homo sapien
gggtcagctttctgagtgacagttt

SEQ ID NO: 1102986 - DNA, 25 bp, Homo sapien
cacagcaggtgaaaagacgaggcag

SEQ ID NO: 1102987 - DNA, 25 bp, Homo sapien
gaattcagcaggaagatggacacca

SEQ ID NO: 1102988 - DNA, 25 bp, Homo sapien
tcagtatgctccttagtaatgaagc

SEQ ID NO: 1102989 - DNA, 25 bp, Homo sapien
caatgtgactatcctcttatgtggc

SEQ ID NO: 1102990 - DNA, 25 bp, Homo sapien
agtcagttatgattaggccctttgg

SEQ ID NO: 1102991 - DNA, 25 bp, Homo sapien
tttgactacattaagttgacattcc

SEQ ID NO: 1102992 - DNA, 25 bp, Homo sapien
aggccctttggtgttgaacagccca

SEQ ID NO: 1102993 - DNA, 25 bp, Homo sapien
cattaagttgacattccaagtcagt

SEQ ID NO: 1102994 - DNA, 25 bp, Homo sapien
gaaatgttgagctaccaacctcaga

SEQ ID NO: 1102995 - DNA, 25 bp, Homo sapien
tgctgtgtagaaggtttagacttgc

SEQ ID NO: 1102996 - DNA, 25 bp, Homo sapien
tgccccaattttggttcaagtacca

SEQ ID NO: 1102997 - DNA, 25 bp, Homo sapien
ggttcaagtaccataggaaatgtca

SEQ ID NO: 1102998 - DNA, 25 bp, Homo sapien
gctcttcttcattcgagtgtgacaa

SEQ ID NO: 1102999 - DNA, 25 bp, Homo sapien
ggctcattgattctaaactgtgcac

SEQ ID NO: 1103000 - DNA, 25 bp, Homo sapien
catttttcaatcgagggtgtcttca

SEQ ID NO: 1103001 - DNA, 25 bp, Homo sapien
taaaaggcagttgtataggagctct

SEQ ID NO: 1103002 - DNA, 25 bp, Homo sapien
tgacagctcaacaggatcactcagc

SEQ ID NO: 1103003 - DNA, 25 bp, Homo sapien
gaatctcctgacagagcagtgacag

SEQ ID NO: 1103004 - DNA, 25 bp, Homo sapien
gcaacagtataaatccaaggtccct

SEQ ID NO: 1103005 - DNA, 25 bp, Homo sapien
caaggtccctgtatgaactatccca

SEQ ID NO: 1103006 - DNA, 25 bp, Homo sapien
caggaatgattttagtggaaaaagg

SEQ ID NO: 1103007 - DNA, 25 bp, Homo sapien
actggaattatgattacgatataaa

SEQ ID NO: 1103008 - DNA, 25 bp, Homo sapien
ttcttattttgtgatgattctatga

SEQ ID NO: 1103009 - DNA, 25 bp, Homo sapien
gattacgatataaagaagtgttttc

SEQ ID NO: 1103010 - DNA, 25 bp, Homo sapien
tttcacagcgcctttcaaacgaggg

SEQ ID NO: 1103011 - DNA, 25 bp, Homo sapien
ctgcaggcgtttcacagcgcctttc

SEQ ID NO: 1103012 - DNA, 25 bp, Homo sapien
cagcgcctttcaaacgagggcagtt

SEQ ID NO: 1103013 - DNA, 25 bp, Homo sapien
tcaaacgagggcagtttgtcataaa

SEQ ID NO: 1103014 - DNA, 25 bp, Homo sapien
gaggcactggacactcatgaggtga

SEQ ID NO: 1103015 - DNA, 25 bp, Homo sapien
aattttcagtggcacgagttccatg

SEQ ID NO: 1103016 - DNA, 25 bp, Homo sapien
ggcatccagacacaaaacacccttt

SEQ ID NO: 1103017 - DNA, 25 bp, Homo sapien
gaccggacatgtaattctgagcagt

SEQ ID NO: 1103018 - DNA, 25 bp, Homo sapien
atttcatcttcaatgtcatcccctt

SEQ ID NO: 1103019 - DNA, 25 bp, Homo sapien
tccatttcatcttcaatgtcatccc

SEQ ID NO: 1103020 - DNA, 25 bp, Homo sapien
tcattcagcaattgctgtatccatt

SEQ ID NO: 1103021 - DNA, 25 bp, Homo sapien
gcaattgctgtatccatttcatctt

SEQ ID NO: 1103022 - DNA, 25 bp, Homo sapien
caaagctatggaggcctaaaggaat

SEQ ID NO: 1103023 - DNA, 25 bp, Homo sapien
taactgcactaatttgggcaaactg

SEQ ID NO: 1103024 - DNA, 25 bp, Homo sapien
tgtgtgcatggagcagaagtcttcc

SEQ ID NO: 1103025 - DNA, 25 bp, Homo sapien
ccattagcgtgcaggaaaaagggaa

SEQ ID NO: 1103026 - DNA, 25 bp, Homo sapien
gttacagagcaggtcattaatctca

SEQ ID NO: 1103027 - DNA, 25 bp, Homo sapien
gagaaggacacaatgtgagttacag

SEQ ID NO: 1103028 - DNA, 25 bp, Homo sapien
gtgagttacagagcaggtcattaat

SEQ ID NO: 1103029 - DNA, 25 bp, Homo sapien
caggagttgaagcgggatgggaagg

SEQ ID NO: 1103030 - DNA, 25 bp, Homo sapien
caaacgagggaaggctgttcattct

SEQ ID NO: 1103031 - DNA, 25 bp, Homo sapien
tgtcaaaccaaacgagggaaggctg

SEQ ID NO: 1103032 - DNA, 25 bp, Homo sapien
tcctctgtcaaaccaaacgagggaa

SEQ ID NO: 1103033 - DNA, 25 bp, Homo sapien
aaccaaacgagggaaggctgttcat

SEQ ID NO: 1103034 - DNA, 25 bp, Homo sapien
gcggggtttcggcatgttggctgtg

SEQ ID NO: 1103035 - DNA, 25 bp, Homo sapien
aggcggggtttcggcatgttggctg

SEQ ID NO: 1103036 - DNA, 25 bp, Homo sapien
ggggtttcggcatgttggctgtgct

SEQ ID NO: 1103037 - DNA, 25 bp, Homo sapien
tttcggcatgttggctgtgctggtc

SEQ ID NO: 1103038 - DNA, 25 bp, Homo sapien
aaagggtgtacagcaacgcagtggc

SEQ ID NO: 1103039 - DNA, 25 bp, Homo sapien
ttgtcttgctccgtaccagcagaga

SEQ ID NO: 1103040 - DNA, 25 bp, Homo sapien
gagtacactggcaggcagaccatta

SEQ ID NO: 1103041 - DNA, 25 bp, Homo sapien
catctcccatcagtgttgacacaga

SEQ ID NO: 1103042 - DNA, 25 bp, Homo sapien
taggcagccaaagtctgtggacagc

SEQ ID NO: 1103043 - DNA, 25 bp, Homo sapien
aatagaaacaaacgctatagaggtc

SEQ ID NO: 1103044 - DNA, 25 bp, Homo sapien
catgttgaaggctcagaaccatcca

SEQ ID NO: 1103045 - DNA, 25 bp, Homo sapien
gaggtcatcagccagcgattgcatg

SEQ ID NO: 1103046 - DNA, 25 bp, Homo sapien
tccttgcagttacaaattggatgct

SEQ ID NO: 1103047 - DNA, 25 bp, Homo sapien
aaagcctgctatttgagctgctagt

SEQ ID NO: 1103048 - DNA, 25 bp, Homo sapien
tctcccaatgggactgataaatatg

SEQ ID NO: 1103049 - DNA, 25 bp, Homo sapien
gccattgtttgcctgcctgaaagcc

SEQ ID NO: 1103050 - DNA, 25 bp, Homo sapien
aaaacaaggtctaacagaggctctc

SEQ ID NO: 1103051 - DNA, 25 bp, Homo sapien
taatctacaggcttaaaagggccaa

SEQ ID NO: 1103052 - DNA, 25 bp, Homo sapien
caaagatgtgaatgcccctggacaa

SEQ ID NO: 1103053 - DNA, 25 bp, Homo sapien
cagactatgcaactgctggtgggag

SEQ ID NO: 1103054 - DNA, 25 bp, Homo sapien
gctcaaattgatttcctcagtctaa

SEQ ID NO: 1103055 - DNA, 25 bp, Homo sapien
actttcacatagacagtggtgagag

SEQ ID NO: 1103056 - DNA, 25 bp, Homo sapien
gaagactcatacagccaaattttaa

SEQ ID NO: 1103057 - DNA, 25 bp, Homo sapien
gaaaagtgaatgtacacttgctcaa

SEQ ID NO: 1103058 - DNA, 25 bp, Homo sapien
tgcaccactaatgccagatgccata

SEQ ID NO: 1103059 - DNA, 25 bp, Homo sapien
cactaatgccagatgccataagaac

SEQ ID NO: 1103060 - DNA, 25 bp, Homo sapien
aaggaaggatctgcaccactaatgc

SEQ ID NO: 1103061 - DNA, 25 bp, Homo sapien
ccaaggaaggatctgcaccactaat

SEQ ID NO: 1103062 - DNA, 25 bp, Homo sapien
tgtggacctccgacaaaaaagcatc

SEQ ID NO: 1103063 - DNA, 25 bp, Homo sapien
gagttgctgccattagtctgtggac

SEQ ID NO: 1103064 - DNA, 25 bp, Homo sapien
cctgataacgtgtttgtgatacccc

SEQ ID NO: 1103065 - DNA, 25 bp, Homo sapien
aaacagaactgtgatgcaaaccaag

SEQ ID NO: 1103066 - DNA, 25 bp, Homo sapien
gaaataggcattgactgtttctgta

SEQ ID NO: 1103067 - DNA, 25 bp, Homo sapien
ctcctttgaaataggcattgactgt

SEQ ID NO: 1103068 - DNA, 25 bp, Homo sapien
ttgaaataggcattgactgtttctg

SEQ ID NO: 1103069 - DNA, 25 bp, Homo sapien
ctttgaaataggcattgactgtttc

SEQ ID NO: 1103070 - DNA, 25 bp, Homo sapien
ctgggtttgcttggagataggtaca

SEQ ID NO: 1103071 - DNA, 25 bp, Homo sapien
tatgttgcagtttcacgcacatctt

SEQ ID NO: 1103072 - DNA, 25 bp, Homo sapien
catcttatctactattgtgaagaca

SEQ ID NO: 1103073 - DNA, 25 bp, Homo sapien
gaagacaagttctgggtcataggtt

SEQ ID NO: 1103074 - DNA, 25 bp, Homo sapien
ctcttcgagtaacatgagtaatgcc

SEQ ID NO: 1103075 - DNA, 25 bp, Homo sapien
tgtacaatgttatcacattatttcc

SEQ ID NO: 1103076 - DNA, 25 bp, Homo sapien
ggacttgtcttacttagctcttcga

SEQ ID NO: 1103077 - DNA, 25 bp, Homo sapien
aatgttatcacattatttcctggac

SEQ ID NO: 1103078 - DNA, 25 bp, Homo sapien
ttctccggtaatcttaacgatacat

SEQ ID NO: 1103079 - DNA, 25 bp, Homo sapien
tgctgaaatttatcacccgaaaagt

SEQ ID NO: 1103080 - DNA, 25 bp, Homo sapien
tatcacccgaaaagtcagagcagct

SEQ ID NO: 1103081 - DNA, 25 bp, Homo sapien
aatttatcacccgaaaagtcagagc

SEQ ID NO: 1103082 - DNA, 25 bp, Homo sapien
acgggttgttggcaaagtgtctggt

SEQ ID NO: 1103083 - DNA, 25 bp, Homo sapien
cagagaagttgggggtttggcagga

SEQ ID NO: 1103084 - DNA, 25 bp, Homo sapien
agcagagaagttgggggtttggcag

SEQ ID NO: 1103085 - DNA, 25 bp, Homo sapien
cagcagagaagttgggggtttggca

SEQ ID NO: 1103086 - DNA, 25 bp, Homo sapien
tgggggtttggcaggacgtgttcta

SEQ ID NO: 1103087 - DNA, 25 bp, Homo sapien
tgttaagcaaaaccactttgagtga

SEQ ID NO: 1103088 - DNA, 25 bp, Homo sapien
taaactggctcaacgtgcacaacca

SEQ ID NO: 1103089 - DNA, 25 bp, Homo sapien
aaagctgtaactatgacaccagtca

SEQ ID NO: 1103090 - DNA, 25 bp, Homo sapien
tccattccctcacggtttgcacagt

SEQ ID NO: 1103091 - DNA, 25 bp, Homo sapien
aaaatgattgagtagcatcttaaaa

SEQ ID NO: 1103092 - DNA, 25 bp, Homo sapien
gaagaaaaatgattgagtagcatct

SEQ ID NO: 1103093 - DNA, 25 bp, Homo sapien
gaaaaatgattgagtagcatcttaa

SEQ ID NO: 1103094 - DNA, 25 bp, Homo sapien
aatgattgagtagcatcttaaaaca

SEQ ID NO: 1103095 - DNA, 25 bp, Homo sapien
cttggtattggcatcattttgtgta

SEQ ID NO: 1103096 - DNA, 25 bp, Homo sapien
ttccttggtattggcatcattttgt

SEQ ID NO: 1103097 - DNA, 25 bp, Homo sapien
aattccttggtattggcatcatttt

SEQ ID NO: 1103098 - DNA, 25 bp, Homo sapien
ccttggtattggcatcattttgtgt

SEQ ID NO: 1103099 - DNA, 25 bp, Homo sapien
ctgatatttgagcatgtcaacgtta

SEQ ID NO: 1103100 - DNA, 25 bp, Homo sapien
tcaacgttataatatgtagcctggg

SEQ ID NO: 1103101 - DNA, 25 bp, Homo sapien
cactttctttaggtgagtcatcaaa

SEQ ID NO: 1103102 - DNA, 25 bp, Homo sapien
gttcagacactttctttaggtgagt

SEQ ID NO: 1103103 - DNA, 25 bp, Homo sapien
gcaggtcagtgcttgaaggctcaca

SEQ ID NO: 1103104 - DNA, 25 bp, Homo sapien
gttgagggccacagcagtcgtcatt

SEQ ID NO: 1103105 - DNA, 25 bp, Homo sapien
tatttgtaatctatgcgcaggtcag

SEQ ID NO: 1103106 - DNA, 25 bp, Homo sapien
gcttggtgactcctccgtcgatggg

SEQ ID NO: 1103107 - DNA, 25 bp, Homo sapien
gacttctgagagatatcaggaatct

SEQ ID NO: 1103108 - DNA, 25 bp, Homo sapien
ttctgacttctgagagatatcagga

SEQ ID NO: 1103109 - DNA, 25 bp, Homo sapien
ttctgagagatatcaggaatcttcc

SEQ ID NO: 1103110 - DNA, 25 bp, Homo sapien
ctgagagatatcaggaatcttccac

SEQ ID NO: 1103111 - DNA, 25 bp, Homo sapien
actgaaatcttgccaacaaagaacc

SEQ ID NO: 1103112 - DNA, 25 bp, Homo sapien
aactgaaatcttgccaacaaagaac

SEQ ID NO: 1103113 - DNA, 25 bp, Homo sapien
gcacaaccaatggagaaggtttgct

SEQ ID NO: 1103114 - DNA, 25 bp, Homo sapien
tgtgaactgcacaaccaatggagaa

SEQ ID NO: 1103115 - DNA, 25 bp, Homo sapien
gtcacagccagaaagggtgcttcct

SEQ ID NO: 1103116 - DNA, 25 bp, Homo sapien
gagtgaaaatcgataccctgctcca

SEQ ID NO: 1103117 - DNA, 25 bp, Homo sapien
acaaaacagcatgtcaacaggttat

SEQ ID NO: 1103118 - DNA, 25 bp, Homo sapien
agttctccattatatgaatcctcca

SEQ ID NO: 1103119 - DNA, 25 bp, Homo sapien
tccattatatgaatcctccaaatcc

SEQ ID NO: 1103120 - DNA, 25 bp, Homo sapien
atcagttctccattatatgaatcct

SEQ ID NO: 1103121 - DNA, 25 bp, Homo sapien
attatatgaatcctccaaatccttg

SEQ ID NO: 1103122 - DNA, 25 bp, Homo sapien
cacatttgcgaaactgtagagaggg

SEQ ID NO: 1103123 - DNA, 25 bp, Homo sapien
tataccttgcaacgatgaaacgaca

SEQ ID NO: 1103124 - DNA, 25 bp, Homo sapien
ctaaatgttcatatggcagggccag

SEQ ID NO: 1103125 - DNA, 25 bp, Homo sapien
caagtgtctaactgccttactggaa

SEQ ID NO: 1103126 - DNA, 25 bp, Homo sapien
tgttagagattactgtaatctatgt

SEQ ID NO: 1103127 - DNA, 25 bp, Homo sapien
tcattctagatctatacaaaataaa

SEQ ID NO: 1103128 - DNA, 25 bp, Homo sapien
gagattactgtaatctatgttttta

SEQ ID NO: 1103129 - DNA, 25 bp, Homo sapien
aattactaattcattctagatctat

SEQ ID NO: 1103130 - DNA, 25 bp, Homo sapien
attgcctgggaccattttcaggaca

SEQ ID NO: 1103131 - DNA, 25 bp, Homo sapien
taactgagactctttcattgcctgg

SEQ ID NO: 1103132 - DNA, 25 bp, Homo sapien
ggatatagatgtaacaggagattat

SEQ ID NO: 1103133 - DNA, 25 bp, Homo sapien
aatgaatctgacttaatgtctttga

SEQ ID NO: 1103134 - DNA, 25 bp, Homo sapien
tggacaaagcaattaaggcgtttcc

SEQ ID NO: 1103135 - DNA, 25 bp, Homo sapien
ctctagtgactggtacatggtaaac

SEQ ID NO: 1103136 - DNA, 25 bp, Homo sapien
tgcttataaagcctcaaaaggtggt

SEQ ID NO: 1103137 - DNA, 25 bp, Homo sapien
tgggttactttcagctgccgtgtca

SEQ ID NO: 1103138 - DNA, 25 bp, Homo sapien
tggtcaatgccaacaaataggtgtc

SEQ ID NO: 1103139 - DNA, 25 bp, Homo sapien
tgaggctggtcatccaaatagtccc

SEQ ID NO: 1103140 - DNA, 25 bp, Homo sapien
catagacatacccatttaggagaga

SEQ ID NO: 1103141 - DNA, 25 bp, Homo sapien
tgagggccaatcaagaggttcacca

SEQ ID NO: 1103142 - DNA, 25 bp, Homo sapien
tctgacctgaaaaatcaacacagct

SEQ ID NO: 1103143 - DNA, 25 bp, Homo sapien
cacaaactctggatggattaaaaac

SEQ ID NO: 1103144 - DNA, 25 bp, Homo sapien
ctgactttggatcttgggacagtgg

SEQ ID NO: 1103145 - DNA, 25 bp, Homo sapien
aatggcttatgatctatcaggctga

SEQ ID NO: 1103146 - DNA, 25 bp, Homo sapien
aatgggagccctagttgcagtaacg

SEQ ID NO: 1103147 - DNA, 25 bp, Homo sapien
tgctacatagatcaaagagagctct

SEQ ID NO: 1103148 - DNA, 25 bp, Homo sapien
gctgtatacattactgcttggcctg

SEQ ID NO: 1103149 - DNA, 25 bp, Homo sapien
ttccaattccccttagacagagagg

SEQ ID NO: 1103150 - DNA, 25 bp, Homo sapien
gtcccaggcttcattcagccggcgg

SEQ ID NO: 1103151 - DNA, 25 bp, Homo sapien
cctcccagacctccggcactgcaga

SEQ ID NO: 1103152 - DNA, 25 bp, Homo sapien
cgcccgcgcactctccctggactct

SEQ ID NO: 1103153 - DNA, 25 bp, Homo sapien
actgcagacactgcgcgcggcgcgg

SEQ ID NO: 1103154 - DNA, 25 bp, Homo sapien
ctttgatgcgcccatgaatttcctt

SEQ ID NO: 1103155 - DNA, 25 bp, Homo sapien
caaaattcatgattacttagagaag

SEQ ID NO: 1103156 - DNA, 25 bp, Homo sapien
ctgcctttagcattgtctgacatca

SEQ ID NO: 1103157 - DNA, 25 bp, Homo sapien
catgaatgagctgctctgcctttag

SEQ ID NO: 1103158 - DNA, 25 bp, Homo sapien
gacatgtgctgggattgctactcct

SEQ ID NO: 1103159 - DNA, 25 bp, Homo sapien
acctgtaaaaggcattgtatgtgta

SEQ ID NO: 1103160 - DNA, 25 bp, Homo sapien
gcattgtatgtgtaatccacagact

SEQ ID NO: 1103161 - DNA, 25 bp, Homo sapien
gctgggattgctactcctttatagt

SEQ ID NO: 1103162 - DNA, 25 bp, Homo sapien
acaaaaaagactagatgacagcaca

SEQ ID NO: 1103163 - DNA, 25 bp, Homo sapien
gcacatctgttttacggcatagttt

SEQ ID NO: 1103164 - DNA, 25 bp, Homo sapien
gactttcttggtagcagctaatgca

SEQ ID NO: 1103165 - DNA, 25 bp, Homo sapien
ggagtaatttcgaccttcatctcat

SEQ ID NO: 1103166 - DNA, 25 bp, Homo sapien
cagaaggtattcataaaaactcaat

SEQ ID NO: 1103167 - DNA, 25 bp, Homo sapien
gaagaagaggtggtacaaaactcaa

SEQ ID NO: 1103168 - DNA, 25 bp, Homo sapien
cataatacagaaggtattcataaaa

SEQ ID NO: 1103169 - DNA, 25 bp, Homo sapien
agaggtggtacaaaactcaaattag

SEQ ID NO: 1103170 - DNA, 25 bp, Homo sapien
aactgataggtgttttccatctgaa

SEQ ID NO: 1103171 - DNA, 25 bp, Homo sapien
tatcatcacgctgactgggttcttc

SEQ ID NO: 1103172 - DNA, 25 bp, Homo sapien
gaactgtaaggcgagagatatcatc

SEQ ID NO: 1103173 - DNA, 25 bp, Homo sapien
gggttcttccatataagacacagta

SEQ ID NO: 1103174 - DNA, 25 bp, Homo sapien
tatactgtatgcatcagtgccaccc

SEQ ID NO: 1103175 - DNA, 25 bp, Homo sapien
tatctatgtacccagaaatactcag

SEQ ID NO: 1103176 - DNA, 25 bp, Homo sapien
gagaatcagtcaccaatttagaagt

SEQ ID NO: 1103177 - DNA, 25 bp, Homo sapien
tccttcacctaacaacactgattgg

SEQ ID NO: 1103178 - DNA, 25 bp, Homo sapien
aggacgtaagtctggagacagtgag

SEQ ID NO: 1103179 - DNA, 25 bp, Homo sapien
caagatgaaagaggacgtaagtctg

SEQ ID NO: 1103180 - DNA, 25 bp, Homo sapien
agatgaaagaggacgtaagtctgga

SEQ ID NO: 1103181 - DNA, 25 bp, Homo sapien
aaagaggacgtaagtctggagacag

SEQ ID NO: 1103182 - DNA, 25 bp, Homo sapien
tccacgttcagaggagaagcttcaa

SEQ ID NO: 1103183 - DNA, 25 bp, Homo sapien
tagtcttccaatagatctctgaggt

SEQ ID NO: 1103184 - DNA, 25 bp, Homo sapien
gatttatatacattgagtaacctgc

SEQ ID NO: 1103185 - DNA, 25 bp, Homo sapien
tgcatcccaggaatattagccatat

SEQ ID NO: 1103186 - DNA, 25 bp, Homo sapien
taagcaagctcggattttatcctcc

SEQ ID NO: 1103187 - DNA, 25 bp, Homo sapien
agcaagctcggattttatcctcctc

SEQ ID NO: 1103188 - DNA, 25 bp, Homo sapien
caagctcggattttatcctcctcag

SEQ ID NO: 1103189 - DNA, 25 bp, Homo sapien
agctcggattttatcctcctcagag

SEQ ID NO: 1103190 - DNA, 25 bp, Homo sapien
aaaagagtatggaaacatggaggga

SEQ ID NO: 1103191 - DNA, 25 bp, Homo sapien
acccaccccataggctaatcaaaag

SEQ ID NO: 1103192 - DNA, 25 bp, Homo sapien
cataggctaatcaaaagagtatgga

SEQ ID NO: 1103193 - DNA, 25 bp, Homo sapien
tatggaaacatggagggatttaatc

SEQ ID NO: 1103194 - DNA, 25 bp, Homo sapien
aatggttttagtcatctgtctacag

SEQ ID NO: 1103195 - DNA, 25 bp, Homo sapien
caaaatatgattgacggtgaccaca

SEQ ID NO: 1103196 - DNA, 25 bp, Homo sapien
gatagctggttactacatctttcaa

SEQ ID NO: 1103197 - DNA, 25 bp, Homo sapien
gctctggttcatattcttctacttg

SEQ ID NO: 1103198 - DNA, 25 bp, Homo sapien
caataagtatgctctgcctgttcag

SEQ ID NO: 1103199 - DNA, 25 bp, Homo sapien
ggaatcatcaagtccttgacctggg

SEQ ID NO: 1103200 - DNA, 25 bp, Homo sapien
ggtatcacttttaggatcccagagg

SEQ ID NO: 1103201 - DNA, 25 bp, Homo sapien
catagacatttgcaagagcgaagag

SEQ ID NO: 1103202 - DNA, 25 bp, Homo sapien
ttttagcttgcagcccgtgggacca

SEQ ID NO: 1103203 - DNA, 25 bp, Homo sapien
taaatgatccgtggcgtaagataca

SEQ ID NO: 1103204 - DNA, 25 bp, Homo sapien
taggcagtccacttaccatccaaga

SEQ ID NO: 1103205 - DNA, 25 bp, Homo sapien
tccacgaagggagatgttcaccaat

SEQ ID NO: 1103206 - DNA, 25 bp, Homo sapien
aaatgatgatcagtggaagactgga

SEQ ID NO: 1103207 - DNA, 25 bp, Homo sapien
tgccgtgttatccagactcatctcg

SEQ ID NO: 1103208 - DNA, 25 bp, Homo sapien
gctttgttcaactcatgggtaatgg

SEQ ID NO: 1103209 - DNA, 25 bp, Homo sapien
tgggtaatggtgtgaaaaacatgct

SEQ ID NO: 1103210 - DNA, 25 bp, Homo sapien
gagcacttactatttccctggactg

SEQ ID NO: 1103211 - DNA, 25 bp, Homo sapien
ttttgcacagtagtctctcaggtag

SEQ ID NO: 1103212 - DNA, 25 bp, Homo sapien
tattaaatgctaccccgattccagc

SEQ ID NO: 1103213 - DNA, 25 bp, Homo sapien
cacttttatatacgactgtctggga

SEQ ID NO: 1103214 - DNA, 25 bp, Homo sapien
ctcctgtgtgagaagggatatccta

SEQ ID NO: 1103215 - DNA, 25 bp, Homo sapien
tatagctgtaccttatcaagttcag

SEQ ID NO: 1103216 - DNA, 25 bp, Homo sapien
catgaatgtgcaatgaatttcgtca

SEQ ID NO: 1103217 - DNA, 25 bp, Homo sapien
tttgcataccttgaaaaaacgccat

SEQ ID NO: 1103218 - DNA, 25 bp, Homo sapien
gagacagaaacactgagattttttg

SEQ ID NO: 1103219 - DNA, 25 bp, Homo sapien
actgagattttttgacttgcccaca

SEQ ID NO: 1103220 - DNA, 25 bp, Homo sapien
tgagattttttgacttgcccacagt

SEQ ID NO: 1103221 - DNA, 25 bp, Homo sapien
cagaaacactgagattttttgactt

SEQ ID NO: 1103222 - DNA, 25 bp, Homo sapien
ccaaggaccttggatcaagttctga

SEQ ID NO: 1103223 - DNA, 25 bp, Homo sapien
caaccaggactaatatagtagagtc

SEQ ID NO: 1103224 - DNA, 25 bp, Homo sapien
gactgtcctaaaggtttatggccaa

SEQ ID NO: 1103225 - DNA, 25 bp, Homo sapien
agtagagtctttacccctggtgaag

SEQ ID NO: 1103226 - DNA, 25 bp, Homo sapien
cggccgcttgttgagccagggctcc

SEQ ID NO: 1103227 - DNA, 25 bp, Homo sapien
cttgttgagccagggctccaccgtc

SEQ ID NO: 1103228 - DNA, 25 bp, Homo sapien
cgcgcggccgcttgttgagccaggg

SEQ ID NO: 1103229 - DNA, 25 bp, Homo sapien
gccgcttgttgagccagggctccac

SEQ ID NO: 1103230 - DNA, 25 bp, Homo sapien
gcctgaggcccgggccgcccgcctc

SEQ ID NO: 1103231 - DNA, 25 bp, Homo sapien
ctgaggcccgggccgcccgcctcct

SEQ ID NO: 1103232 - DNA, 25 bp, Homo sapien
cgcctgcagccgggagactcagagc

SEQ ID NO: 1103233 - DNA, 25 bp, Homo sapien
ccgcctgcagccgggagactcagag

SEQ ID NO: 1103234 - DNA, 25 bp, Homo sapien
tgccgccgccaccttcgctgctgcc

SEQ ID NO: 1103235 - DNA, 25 bp, Homo sapien
cgccgccaccttcgctgctgccgcc

SEQ ID NO: 1103236 - DNA, 25 bp, Homo sapien
tgccgccaccgcctgaagaagcccc

SEQ ID NO: 1103237 - DNA, 25 bp, Homo sapien
cgccaccgcctgaagaagccccatc

SEQ ID NO: 1103238 - DNA, 25 bp, Homo sapien
aggcgaactcactccgcagcggatt

SEQ ID NO: 1103239 - DNA, 25 bp, Homo sapien
gggcgctgctcaccataaaggctgc

SEQ ID NO: 1103240 - DNA, 25 bp, Homo sapien
gactccatccgaaaagggcaagttg

SEQ ID NO: 1103241 - DNA, 25 bp, Homo sapien
taaaggctgcagtgcaagcgagagc

SEQ ID NO: 1103242 - DNA, 25 bp, Homo sapien
aggcactgggagaatcgagcgacca

SEQ ID NO: 1103243 - DNA, 25 bp, Homo sapien
tgcattgaacctcaaccagttggtt

SEQ ID NO: 1103244 - DNA, 25 bp, Homo sapien
ttcttaaccacgtccgaaactcagc

SEQ ID NO: 1103245 - DNA, 25 bp, Homo sapien
tgtctgcattgaacctcaaccagtt

SEQ ID NO: 1103246 - DNA, 25 bp, Homo sapien
ggaagccccacatctatagtgacaa

SEQ ID NO: 1103247 - DNA, 25 bp, Homo sapien
caggagccaccttacggaatgaaaa

SEQ ID NO: 1103248 - DNA, 25 bp, Homo sapien
ggagcacaatcttacttcaaccagt

SEQ ID NO: 1103249 - DNA, 25 bp, Homo sapien
tagcctattacatttggaagcccca

SEQ ID NO: 1103250 - DNA, 25 bp, Homo sapien
ggaaaagagtccacagacagtctgt

SEQ ID NO: 1103251 - DNA, 25 bp, Homo sapien
taaacataaacatctgatgcacatt

SEQ ID NO: 1103252 - DNA, 25 bp, Homo sapien
cagacagtctgtaaaccaattaaac

SEQ ID NO: 1103253 - DNA, 25 bp, Homo sapien
ggtaatttgacaggaaaagagtcca

SEQ ID NO: 1103254 - DNA, 25 bp, Homo sapien
ttctagactctatcaagcattttcc

SEQ ID NO: 1103255 - DNA, 25 bp, Homo sapien
tccaaataatgtgaaccaatactac

SEQ ID NO: 1103256 - DNA, 25 bp, Homo sapien
tgttaatttgaaactgttatgtcca

SEQ ID NO: 1103257 - DNA, 25 bp, Homo sapien
tagctgctaagtgaaaggacattac

SEQ ID NO: 1103258 - DNA, 25 bp, Homo sapien
ccaattggccgtgatgccaatgctg

SEQ ID NO: 1103259 - DNA, 25 bp, Homo sapien
caattggccgtgatgccaatgctga

SEQ ID NO: 1103260 - DNA, 25 bp, Homo sapien
attggccgtgatgccaatgctgatg

SEQ ID NO: 1103261 - DNA, 25 bp, Homo sapien
tgccaattggccgtgatgccaatgc

SEQ ID NO: 1103262 - DNA, 25 bp, Homo sapien
acccggatgtgagactcagcaacgg

SEQ ID NO: 1103263 - DNA, 25 bp, Homo sapien
atttgccgtactgccgggtcacatc

SEQ ID NO: 1103264 - DNA, 25 bp, Homo sapien
tcagcaacgggactccggccgctgc

SEQ ID NO: 1103265 - DNA, 25 bp, Homo sapien
ggccagaacccggatgtgagactca

SEQ ID NO: 1103266 - DNA, 25 bp, Homo sapien
tgaaactatctacaagtaactgaag

SEQ ID NO: 1103267 - DNA, 25 bp, Homo sapien
gaatgaatctactgagagctcaaag

SEQ ID NO: 1103268 - DNA, 25 bp, Homo sapien
gacacagatcacgaaagttcctcta

SEQ ID NO: 1103269 - DNA, 25 bp, Homo sapien
aagccaaccaagcatttctcctttg

SEQ ID NO: 1103270 - DNA, 25 bp, Homo sapien
ctaaactaaagctaagtaagtgctt

SEQ ID NO: 1103271 - DNA, 25 bp, Homo sapien
tgagcccagaaagcgccaccgcact

SEQ ID NO: 1103272 - DNA, 25 bp, Homo sapien
tgcagtgagcccagaaagcgccacc

SEQ ID NO: 1103273 - DNA, 25 bp, Homo sapien
gtgcttatttataacaatacctatt

SEQ ID NO: 1103274 - DNA, 25 bp, Homo sapien
ctggacttgaagattcaacagatgg

SEQ ID NO: 1103275 - DNA, 25 bp, Homo sapien
ggactatgaccacaacacacagcta

SEQ ID NO: 1103276 - DNA, 25 bp, Homo sapien
aaaaatcacaattcttaaccatttg

SEQ ID NO: 1103277 - DNA, 25 bp, Homo sapien
cctggccctaaaaatcacaattctt

SEQ ID NO: 1103278 - DNA, 25 bp, Homo sapien
gctgggactatgaccacaacacaca

SEQ ID NO: 1103279 - DNA, 25 bp, Homo sapien
cagcatgtcagctgatggatcaaat

SEQ ID NO: 1103280 - DNA, 25 bp, Homo sapien
agcatgtcagctgatggatcaaatt

SEQ ID NO: 1103281 - DNA, 25 bp, Homo sapien
ccagcatgtcagctgatggatcaaa

SEQ ID NO: 1103282 - DNA, 25 bp, Homo sapien
gcatgtcagctgatggatcaaattc

SEQ ID NO: 1103283 - DNA, 25 bp, Homo sapien
ccttgcaagatcttctatttcagag

SEQ ID NO: 1103284 - DNA, 25 bp, Homo sapien
tgcaagatcttctatttcagagctg

SEQ ID NO: 1103285 - DNA, 25 bp, Homo sapien
cagagctgaagtttgtttctccttc

SEQ ID NO: 1103286 - DNA, 25 bp, Homo sapien
agagctgaagtttgtttctccttcc

SEQ ID NO: 1103287 - DNA, 25 bp, Homo sapien
taagaggccattatcatgcaggtgg

SEQ ID NO: 1103288 - DNA, 25 bp, Homo sapien
taggcagcaatggatcaagagtcgg

SEQ ID NO: 1103289 - DNA, 25 bp, Homo sapien
cttgagtaacggaagaagagtctgc

SEQ ID NO: 1103290 - DNA, 25 bp, Homo sapien
tctcaaaaccagtggaggtacagac

SEQ ID NO: 1103291 - DNA, 25 bp, Homo sapien
catacaatacttttgagtgagcact

SEQ ID NO: 1103292 - DNA, 25 bp, Homo sapien
ttagaacataccagactgatatatc

SEQ ID NO: 1103293 - DNA, 25 bp, Homo sapien
gaacataccagactgatatatccat

SEQ ID NO: 1103294 - DNA, 25 bp, Homo sapien
gagcactcttgcaaggtaccatgaa

SEQ ID NO: 1103295 - DNA, 25 bp, Homo sapien
aagttcatgaattggcatgtcgcct

SEQ ID NO: 1103296 - DNA, 25 bp, Homo sapien
tcttcaggtagtcgaacagtactac

SEQ ID NO: 1103297 - DNA, 25 bp, Homo sapien
gtactaccataaccataaaggctga

SEQ ID NO: 1103298 - DNA, 25 bp, Homo sapien
tagtcgaacagtactaccataacca

SEQ ID NO: 1103299 - DNA, 25 bp, Homo sapien
caaaatatttacatcgacgtgggcg

SEQ ID NO: 1103300 - DNA, 25 bp, Homo sapien
cgtgggcggattatttcctgggcat

SEQ ID NO: 1103301 - DNA, 25 bp, Homo sapien
ttgtgatggatcatcattggaagac

SEQ ID NO: 1103302 - DNA, 25 bp, Homo sapien
ctgggcatcttgagaagcaacagat

SEQ ID NO: 1103303 - DNA, 25 bp, Homo sapien
ttccagtcttctgatggaatataat

SEQ ID NO: 1103304 - DNA, 25 bp, Homo sapien
tttccagtcttctgatggaatataa

SEQ ID NO: 1103305 - DNA, 25 bp, Homo sapien
tccagtcttctgatggaatataatc

SEQ ID NO: 1103306 - DNA, 25 bp, Homo sapien
accacaccccgccagaaatgtagat

SEQ ID NO: 1103307 - DNA, 25 bp, Homo sapien
tctaatctaacctagatgtgttaag

SEQ ID NO: 1103308 - DNA, 25 bp, Homo sapien
gtcataaaagggcttacatcgattt

SEQ ID NO: 1103309 - DNA, 25 bp, Homo sapien
cctagatgtgttaagaaggaatctg

SEQ ID NO: 1103310 - DNA, 25 bp, Homo sapien
tggtgaaatttcacaatgcaaggag

SEQ ID NO: 1103311 - DNA, 25 bp, Homo sapien
gcaggttatggcttgactttcatta

SEQ ID NO: 1103312 - DNA, 25 bp, Homo sapien
caaatcacagattaggtgaaactgg

SEQ ID NO: 1103313 - DNA, 25 bp, Homo sapien
caaggagaccaagattacatgaacc

SEQ ID NO: 1103314 - DNA, 25 bp, Homo sapien
caaacctactgaaactctggggaca

SEQ ID NO: 1103315 - DNA, 25 bp, Homo sapien
tgattctgacatagactgaagtctg

SEQ ID NO: 1103316 - DNA, 25 bp, Homo sapien
taggtgattctgacatagactgaag

SEQ ID NO: 1103317 - DNA, 25 bp, Homo sapien
gggacaggactcagtcattggtatt

SEQ ID NO: 1103318 - DNA, 25 bp, Homo sapien
attagtaagatctagtaacagattt

SEQ ID NO: 1103319 - DNA, 25 bp, Homo sapien
cattagtaagatctagtaacagatt

SEQ ID NO: 1103320 - DNA, 25 bp, Homo sapien
cttgaaacatggagcccaccataat

SEQ ID NO: 1103321 - DNA, 25 bp, Homo sapien
gcttgaaacatggagcccaccataa

SEQ ID NO: 1103322 - DNA, 25 bp, Homo sapien
tgcttgaaacatggagcccaccata

SEQ ID NO: 1103323 - DNA, 25 bp, Homo sapien
ttgaaacatggagcccaccataatc

SEQ ID NO: 1103324 - DNA, 25 bp, Homo sapien
gtggctcacacctgtaatcccagca

SEQ ID NO: 1103325 - DNA, 25 bp, Homo sapien
taaaaaaaatcttcagccaggcatg

SEQ ID NO: 1103326 - DNA, 25 bp, Homo sapien
cagactctttaaaaaaaatcttcag

SEQ ID NO: 1103327 - DNA, 25 bp, Homo sapien
cggatcacgaggtgaggagtttaag

SEQ ID NO: 1103328 - DNA, 25 bp, Homo sapien
gacctgctgcttgccctgagagtag

SEQ ID NO: 1103329 - DNA, 25 bp, Homo sapien
gagtaggtgcatacttagaatataa

SEQ ID NO: 1103330 - DNA, 25 bp, Homo sapien
gctgcttgccctgagagtaggtgca

SEQ ID NO: 1103331 - DNA, 25 bp, Homo sapien
ctctgacctgctgcttgccctgaga

SEQ ID NO: 1103332 - DNA, 25 bp, Homo sapien
tcatcacctgttcttctagatgcat

SEQ ID NO: 1103333 - DNA, 25 bp, Homo sapien
cctgttcttctagatgcatctttaa

SEQ ID NO: 1103334 - DNA, 25 bp, Homo sapien
aggaattgcttctacacccttctca

SEQ ID NO: 1103335 - DNA, 25 bp, Homo sapien
cactttatcttctggtaagtactca

SEQ ID NO: 1103336 - DNA, 25 bp, Homo sapien
caaaattgcatttaaccaattcata

SEQ ID NO: 1103337 - DNA, 25 bp, Homo sapien
tcaaaattgcatttaaccaattcat

SEQ ID NO: 1103338 - DNA, 25 bp, Homo sapien
atcaaaattgcatttaaccaattca

SEQ ID NO: 1103339 - DNA, 25 bp, Homo sapien
ttattagcctgaatcaaatgaaaat

SEQ ID NO: 1103340 - DNA, 25 bp, Homo sapien
tttattagcctgaatcaaatgaaaa

SEQ ID NO: 1103341 - DNA, 25 bp, Homo sapien
ttaaaaggaaatccagtgtctgtat

SEQ ID NO: 1103342 - DNA, 25 bp, Homo sapien
agtggcaccaaaccgctaactgcag

SEQ ID NO: 1103343 - DNA, 25 bp, Homo sapien
actgcaccggcaatactgaccattt

SEQ ID NO: 1103344 - DNA, 25 bp, Homo sapien
tgtgttctggatgcaatatacttct

SEQ ID NO: 1103345 - DNA, 25 bp, Homo sapien
ccacatgtaatagaatgctacacat

SEQ ID NO: 1103346 - DNA, 25 bp, Homo sapien
cattcaccaactgaccttgttcgga

SEQ ID NO: 1103347 - DNA, 25 bp, Homo sapien
tccaaatcgtgtttgctgagcaaag

SEQ ID NO: 1103348 - DNA, 25 bp, Homo sapien
tacaccaggatgaagattatatttc

SEQ ID NO: 1103349 - DNA, 25 bp, Homo sapien
tcaatgggactacactagagttaca

SEQ ID NO: 1103350 - DNA, 25 bp, Homo sapien
taacaaattgccagtggtagtggaa

SEQ ID NO: 1103351 - DNA, 25 bp, Homo sapien
gtagtggaatgtttcactccaaagc

SEQ ID NO: 1103352 - DNA, 25 bp, Homo sapien
gctagactgaatgaggtgtagacaa

SEQ ID NO: 1103353 - DNA, 25 bp, Homo sapien
accaactaagccagcccacactttg

SEQ ID NO: 1103354 - DNA, 25 bp, Homo sapien
atcacagaggaccaactaagccagc

SEQ ID NO: 1103355 - DNA, 25 bp, Homo sapien
caactaagccagcccacactttggt

SEQ ID NO: 1103356 - DNA, 25 bp, Homo sapien
acagaggaccaactaagccagccca

SEQ ID NO: 1103357 - DNA, 25 bp, Homo sapien
tcaggataatgtgctctgaattatg

SEQ ID NO: 1103358 - DNA, 25 bp, Homo sapien
tgtgctctgaattatggattttgac

SEQ ID NO: 1103359 - DNA, 25 bp, Homo sapien
caggataatgtgctctgaattatgg

SEQ ID NO: 1103360 - DNA, 25 bp, Homo sapien
taatgtgctctgaattatggatttt

SEQ ID NO: 1103361 - DNA, 25 bp, Homo sapien
tgctcgactagatgcagcactttca

SEQ ID NO: 1103362 - DNA, 25 bp, Homo sapien
ggatggtgctcgactagatgcagca

SEQ ID NO: 1103363 - DNA, 25 bp, Homo sapien
tggtgctcgactagatgcagcactt

SEQ ID NO: 1103364 - DNA, 25 bp, Homo sapien
gctcgactagatgcagcactttcac

SEQ ID NO: 1103365 - DNA, 25 bp, Homo sapien
tgattagcagtgcttacagtgccat

SEQ ID NO: 1103366 - DNA, 25 bp, Homo sapien
tttgattagcagtgcttacagtgcc

SEQ ID NO: 1103367 - DNA, 25 bp, Homo sapien
atcttctttctcagactggctgtta

SEQ ID NO: 1103368 - DNA, 25 bp, Homo sapien
ttctttctcagactggctgttacta

SEQ ID NO: 1103369 - DNA, 25 bp, Homo sapien
tattcggcataaaggatgagcctca

SEQ ID NO: 1103370 - DNA, 25 bp, Homo sapien
gttaaaaaactaatgccgcactatc

SEQ ID NO: 1103371 - DNA, 25 bp, Homo sapien
tatccaagcatatacttgaaagtgc

SEQ ID NO: 1103372 - DNA, 25 bp, Homo sapien
agaagtaaaatatagggtgcatcac

SEQ ID NO: 1103373 - DNA, 25 bp, Homo sapien
tctgtttcataaccattagtatcca

SEQ ID NO: 1103374 - DNA, 25 bp, Homo sapien
tttgggtcagtggtaaggttatctg

SEQ ID NO: 1103375 - DNA, 25 bp, Homo sapien
catatctgcatgaagtggtttctta

SEQ ID NO: 1103376 - DNA, 25 bp, Homo sapien
ttccacctgttggtccattaatgtg

SEQ ID NO: 1103377 - DNA, 25 bp, Homo sapien
cttttccattgctgtttacccttcg

SEQ ID NO: 1103378 - DNA, 25 bp, Homo sapien
aaattcagaagaacctggactttct

SEQ ID NO: 1103379 - DNA, 25 bp, Homo sapien
gactgcttcttggaaaaattcagaa

SEQ ID NO: 1103380 - DNA, 25 bp, Homo sapien
gctgtttacccttcgccttttggca

SEQ ID NO: 1103381 - DNA, 25 bp, Homo sapien
taagaaaggacagctcagtcaagac

SEQ ID NO: 1103382 - DNA, 25 bp, Homo sapien
tacaaggctatgcagatggataatc

SEQ ID NO: 1103383 - DNA, 25 bp, Homo sapien
tgtgtgtgccaatatctaagtatca

SEQ ID NO: 1103384 - DNA, 25 bp, Homo sapien
taaaatcgatactgcctgccaacag

SEQ ID NO: 1103385 - DNA, 25 bp, Homo sapien
tttaaaaaggcattggctcttgaac

SEQ ID NO: 1103386 - DNA, 25 bp, Homo sapien
ttggtgaagggaagcagtccgaaca

SEQ ID NO: 1103387 - DNA, 25 bp, Homo sapien
gcagtccgaacatatgttaacagta

SEQ ID NO: 1103388 - DNA, 25 bp, Homo sapien
gggtaaggcctgaatgctaatttct

SEQ ID NO: 1103389 - DNA, 25 bp, Homo sapien
tacatcagacagttgagccattaaa

SEQ ID NO: 1103390 - DNA, 25 bp, Homo sapien
gctaaagctactgccattctggata

SEQ ID NO: 1103391 - DNA, 25 bp, Homo sapien
tagtaagagtttgcaagaacttcac

SEQ ID NO: 1103392 - DNA, 25 bp, Homo sapien
tcaaaaagtacagcatccctaatct

SEQ ID NO: 1103393 - DNA, 25 bp, Homo sapien
ttcagaatggcagacaaggaatggg

SEQ ID NO: 1103394 - DNA, 25 bp, Homo sapien
cataatgtgatatgaactccactac

SEQ ID NO: 1103395 - DNA, 25 bp, Homo sapien
gactgaaaggatctcttgtggcaaa

SEQ ID NO: 1103396 - DNA, 25 bp, Homo sapien
tccactacaaaatacgggaacacat

SEQ ID NO: 1103397 - DNA, 25 bp, Homo sapien
gagaaacagagtgaatggaggtcta

SEQ ID NO: 1103398 - DNA, 25 bp, Homo sapien
catgaaatcagtctgtaagtgggtg

SEQ ID NO: 1103399 - DNA, 25 bp, Homo sapien
tccacgtccgtatagttggcaaaag

SEQ ID NO: 1103400 - DNA, 25 bp, Homo sapien
gcacaatactaagggtacatgacaa

SEQ ID NO: 1103401 - DNA, 25 bp, Homo sapien
tgtggaaaaccctttaagattctgc

SEQ ID NO: 1103402 - DNA, 25 bp, Homo sapien
gagtcctaaataatccacagctgct

SEQ ID NO: 1103403 - DNA, 25 bp, Homo sapien
tagctagacttacatggcaaagagg

SEQ ID NO: 1103404 - DNA, 25 bp, Homo sapien
ctgttatggtagaaccagctctgca

SEQ ID NO: 1103405 - DNA, 25 bp, Homo sapien
ccaaatttgcattaggcgtcctctc

SEQ ID NO: 1103406 - DNA, 25 bp, Homo sapien
gtgcgtagagtccaacctgttttgt

SEQ ID NO: 1103407 - DNA, 25 bp, Homo sapien
gcctgtgcgcagaagatacaagagg

SEQ ID NO: 1103408 - DNA, 25 bp, Homo sapien
gctaaggttacacaagatccaggag

SEQ ID NO: 1103409 - DNA, 25 bp, Homo sapien
tagtttctactactggaagttccag

SEQ ID NO: 1103410 - DNA, 25 bp, Homo sapien
atatatctgagtccccatcttgcca

SEQ ID NO: 1103411 - DNA, 25 bp, Homo sapien
tatcaaaatatatctgagtccccat

SEQ ID NO: 1103412 - DNA, 25 bp, Homo sapien
cagtaaagtatatgatgtttgaggg

SEQ ID NO: 1103413 - DNA, 25 bp, Homo sapien
gatgtttgagggtgaaagaaatgtc

SEQ ID NO: 1103414 - DNA, 25 bp, Homo sapien
tcctagtgttgttttagaggtgaaa

SEQ ID NO: 1103415 - DNA, 25 bp, Homo sapien
caatcctttaaagttagtcctagtg

SEQ ID NO: 1103416 - DNA, 25 bp, Homo sapien
tttttagcaccttgtgtattgacac

SEQ ID NO: 1103417 - DNA, 25 bp, Homo sapien
gacagtggtatttgtgagacagtct

SEQ ID NO: 1103418 - DNA, 25 bp, Homo sapien
tatctgctggacacaattacggcca

SEQ ID NO: 1103419 - DNA, 25 bp, Homo sapien
tgtgccacatgtccggccaggaaaa

SEQ ID NO: 1103420 - DNA, 25 bp, Homo sapien
tattaggccctcagcaaatgtggct

SEQ ID NO: 1103421 - DNA, 25 bp, Homo sapien
tgaattgaaagcacttgaccccatg

SEQ ID NO: 1103422 - DNA, 25 bp, Homo sapien
tagaattctgtaagtagcttgaggc

SEQ ID NO: 1103423 - DNA, 25 bp, Homo sapien
ggagtccgtgattttgtaaccaaga

SEQ ID NO: 1103424 - DNA, 25 bp, Homo sapien
tctagctctgagatagcaacacagc

SEQ ID NO: 1103425 - DNA, 25 bp, Homo sapien
tgattttagggacgccccacagagc

SEQ ID NO: 1103426 - DNA, 25 bp, Homo sapien
tagtgagcagctcttgtatgccaag

SEQ ID NO: 1103427 - DNA, 25 bp, Homo sapien
gatagcctcgttcagtgagcaaaga

SEQ ID NO: 1103428 - DNA, 25 bp, Homo sapien
agtgagcaaagacttagtgagcagc

SEQ ID NO: 1103429 - DNA, 25 bp, Homo sapien
gggcctgccttacttgatagcctcg

SEQ ID NO: 1103430 - DNA, 25 bp, Homo sapien
aattctttgtcctgttaactgcctc

SEQ ID NO: 1103431 - DNA, 25 bp, Homo sapien
tgtttgatatttactaggcagaaat

SEQ ID NO: 1103432 - DNA, 25 bp, Homo sapien
ctggtactgtggcacctcccagaaa

SEQ ID NO: 1103433 - DNA, 25 bp, Homo sapien
tgtggcacctcccagaaagtctggt

SEQ ID NO: 1103434 - DNA, 25 bp, Homo sapien
gtgtgcagtaaagaacaagcgccag

SEQ ID NO: 1103435 - DNA, 25 bp, Homo sapien
tcctgctttcttcctagtgggaaca

SEQ ID NO: 1103436 - DNA, 25 bp, Homo sapien
gaacaagcgccagtgcctgatcctg

SEQ ID NO: 1103437 - DNA, 25 bp, Homo sapien
gaacaagagctaggcgtctctcacc

SEQ ID NO: 1103438 - DNA, 25 bp, Homo sapien
tgagttaagagttggtagtgccact

SEQ ID NO: 1103439 - DNA, 25 bp, Homo sapien
tggtgtctcccagctgtatctgcca

SEQ ID NO: 1103440 - DNA, 25 bp, Homo sapien
gtgtctcccagctgtatctgccaca

SEQ ID NO: 1103441 - DNA, 25 bp, Homo sapien
cacagaggtctctgtgagttaagag

SEQ ID NO: 1103442 - DNA, 25 bp, Homo sapien
tcaaaagtggatcagagcagataaa

SEQ ID NO: 1103443 - DNA, 25 bp, Homo sapien
ggccacagggttgctatattgaaag

SEQ ID NO: 1103444 - DNA, 25 bp, Homo sapien
tatgtccatgactgtaggtttagga

SEQ ID NO: 1103445 - DNA, 25 bp, Homo sapien
gaagcagttcggcacgttccattca

SEQ ID NO: 1103446 - DNA, 25 bp, Homo sapien
aatgcctggaggagttaatccttag

SEQ ID NO: 1103447 - DNA, 25 bp, Homo sapien
taatccttagtatggccaagagaca

SEQ ID NO: 1103448 - DNA, 25 bp, Homo sapien
taattgtaactatgtgcagtgcaag

SEQ ID NO: 1103449 - DNA, 25 bp, Homo sapien
gtaacagttctgtgaccttacaaca

SEQ ID NO: 1103450 - DNA, 25 bp, Homo sapien
caaaggaaagcctggatatggcttc

SEQ ID NO: 1103451 - DNA, 25 bp, Homo sapien
aagaactaatgccaatcttactgaa

SEQ ID NO: 1103452 - DNA, 25 bp, Homo sapien
atgtcactgatgaatagtagtggag

SEQ ID NO: 1103453 - DNA, 25 bp, Homo sapien
tagtggagaaatcctcaacaaaaat

SEQ ID NO: 1103454 - DNA, 25 bp, Homo sapien
tcagggaggtcatctaattggtcca

SEQ ID NO: 1103455 - DNA, 25 bp, Homo sapien
gggtcgtcatttctaggaatcctac

SEQ ID NO: 1103456 - DNA, 25 bp, Homo sapien
tgctagctacacatccacagagatc

SEQ ID NO: 1103457 - DNA, 25 bp, Homo sapien
catttaccgaaaactagctctttgc

SEQ ID NO: 1103458 - DNA, 25 bp, Homo sapien
ggatctacggaattccagattaggg

SEQ ID NO: 1103459 - DNA, 25 bp, Homo sapien
ccagattaggggctagagtgaccat

SEQ ID NO: 1103460 - DNA, 25 bp, Homo sapien
tagttgctggggatctacggaattc

SEQ ID NO: 1103461 - DNA, 25 bp, Homo sapien
tcttttagttgctggggatctacgg

SEQ ID NO: 1103462 - DNA, 25 bp, Homo sapien
tatggtaacacgacaatatgtttct

SEQ ID NO: 1103463 - DNA, 25 bp, Homo sapien
ctcccttggctacatatatggtaac

SEQ ID NO: 1103464 - DNA, 25 bp, Homo sapien
gctacatatatggtaacacgacaat

SEQ ID NO: 1103465 - DNA, 25 bp, Homo sapien
ggtaacacgacaatatgtttctcct

SEQ ID NO: 1103466 - DNA, 25 bp, Homo sapien
cttgcttccactcctactcttgctg

SEQ ID NO: 1103467 - DNA, 25 bp, Homo sapien
gctgttttctcccacaaaccaggca

SEQ ID NO: 1103468 - DNA, 25 bp, Homo sapien
ccaaagaggcatatatatgactctc

SEQ ID NO: 1103469 - DNA, 25 bp, Homo sapien
aaccaggcaggacgggatgatcttg

SEQ ID NO: 1103470 - DNA, 25 bp, Homo sapien
cttcacatcacaaatactctcaggg

SEQ ID NO: 1103471 - DNA, 25 bp, Homo sapien
tcacatcacaaatactctcagggaa

SEQ ID NO: 1103472 - DNA, 25 bp, Homo sapien
ttcacatcacaaatactctcaggga

SEQ ID NO: 1103473 - DNA, 25 bp, Homo sapien
acatcacaaatactctcagggaaaa

SEQ ID NO: 1103474 - DNA, 25 bp, Homo sapien
tagaaaatttgctcagcgttcatgt

SEQ ID NO: 1103475 - DNA, 25 bp, Homo sapien
aaaatttgctcagcgttcatgtgga

SEQ ID NO: 1103476 - DNA, 25 bp, Homo sapien
caggtagaaaatttgctcagcgttc

SEQ ID NO: 1103477 - DNA, 25 bp, Homo sapien
aacaggtagaaaatttgctcagcgt

SEQ ID NO: 1103478 - DNA, 25 bp, Homo sapien
taatcggttttaatatccgtaagca

SEQ ID NO: 1103479 - DNA, 25 bp, Homo sapien
gaaattcgatgtttccaggaaagca

SEQ ID NO: 1103480 - DNA, 25 bp, Homo sapien
tccactccttcagcataatcggttt

SEQ ID NO: 1103481 - DNA, 25 bp, Homo sapien
ctgcaagctgtatggtggactttgt

SEQ ID NO: 1103482 - DNA, 25 bp, Homo sapien
atgaaagcaatcttccatcaaatat

SEQ ID NO: 1103483 - DNA, 25 bp, Homo sapien
ataaactgttgacttccattcagac

SEQ ID NO: 1103484 - DNA, 25 bp, Homo sapien
catagacatcgacaggcactgtggc

SEQ ID NO: 1103485 - DNA, 25 bp, Homo sapien
gactttacaagtccacaaaattatc

SEQ ID NO: 1103486 - DNA, 25 bp, Homo sapien
tatcacttttgatattgcatgcaca

SEQ ID NO: 1103487 - DNA, 25 bp, Homo sapien
ttgatattgcatgcacataagacat

SEQ ID NO: 1103488 - DNA, 25 bp, Homo sapien
gttgaacatcttggtttcggtcttc

SEQ ID NO: 1103489 - DNA, 25 bp, Homo sapien
tctctgggcatgtctaaagatctgg

SEQ ID NO: 1103490 - DNA, 25 bp, Homo sapien
caagggaagagaatgccatggcaca

SEQ ID NO: 1103491 - DNA, 25 bp, Homo sapien
gatctggtagggttcatattcttgg

SEQ ID NO: 1103492 - DNA, 25 bp, Homo sapien
cctgtttgaagcacataattccact

SEQ ID NO: 1103493 - DNA, 25 bp, Homo sapien
cttgttggctgtgtcatgtcttctt

SEQ ID NO: 1103494 - DNA, 25 bp, Homo sapien
tgcctgcctgtcagcactcacttta

SEQ ID NO: 1103495 - DNA, 25 bp, Homo sapien
ctttcaacctgtttgaagcacataa

SEQ ID NO: 1103496 - DNA, 25 bp, Homo sapien
tctggaagcaggaaaagactgtttc

SEQ ID NO: 1103497 - DNA, 25 bp, Homo sapien
gtctggaagcaggaaaagactgttt

SEQ ID NO: 1103498 - DNA, 25 bp, Homo sapien
ctggaagcaggaaaagactgtttcc

SEQ ID NO: 1103499 - DNA, 25 bp, Homo sapien
tggaagcaggaaaagactgtttccc

SEQ ID NO: 1103500 - DNA, 25 bp, Homo sapien
tcccattgaatagtgacctgattca

SEQ ID NO: 1103501 - DNA, 25 bp, Homo sapien
ccatgacaccagctgaagagtatgt

SEQ ID NO: 1103502 - DNA, 25 bp, Homo sapien
tgtaaagggctattactgcatccca

SEQ ID NO: 1103503 - DNA, 25 bp, Homo sapien
ctgcatcccattgaatagtgacctg

SEQ ID NO: 1103504 - DNA, 25 bp, Homo sapien
tgtttgggacattcagcagtgcagt

SEQ ID NO: 1103505 - DNA, 25 bp, Homo sapien
tggctggttctacccagatgtggcc

SEQ ID NO: 1103506 - DNA, 25 bp, Homo sapien
agtttttataccaaagccgagctgt

SEQ ID NO: 1103507 - DNA, 25 bp, Homo sapien
cagtgcagtacatagaagcatgtgg

SEQ ID NO: 1103508 - DNA, 25 bp, Homo sapien
aacagaggactgtaggagactctcc

SEQ ID NO: 1103509 - DNA, 25 bp, Homo sapien
tatagtgatttaaacacctccagga

SEQ ID NO: 1103510 - DNA, 25 bp, Homo sapien
gagactctccctatgttttatcaaa

SEQ ID NO: 1103511 - DNA, 25 bp, Homo sapien
tatataattatacgagccagcccat

SEQ ID NO: 1103512 - DNA, 25 bp, Homo sapien
gcttttgggagtaatcagttataca

SEQ ID NO: 1103513 - DNA, 25 bp, Homo sapien
cttctacattgcctggtgttgggtt

SEQ ID NO: 1103514 - DNA, 25 bp, Homo sapien
ccagccaacacttgggagggctttt

SEQ ID NO: 1103515 - DNA, 25 bp, Homo sapien
gagggcttttgggagtaatcagtta

SEQ ID NO: 1103516 - DNA, 25 bp, Homo sapien
tcttcacatgtaccacgtattttgt

SEQ ID NO: 1103517 - DNA, 25 bp, Homo sapien
caggtgcaagtcatgttgcctgaat

SEQ ID NO: 1103518 - DNA, 25 bp, Homo sapien
ttgtgtctatgtaggtgagcttccc

SEQ ID NO: 1103519 - DNA, 25 bp, Homo sapien
ttcataaatgacacaggttacttca

SEQ ID NO: 1103520 - DNA, 25 bp, Homo sapien
acaaatttgcatgccgtccttgatc

SEQ ID NO: 1103521 - DNA, 25 bp, Homo sapien
caggggtcatgccatcttctttgtc

SEQ ID NO: 1103522 - DNA, 25 bp, Homo sapien
atttgcatgccgtccttgatcaggg

SEQ ID NO: 1103523 - DNA, 25 bp, Homo sapien
cttgatcaggggtcatgccatcttc

SEQ ID NO: 1103524 - DNA, 25 bp, Homo sapien
tcatccaggtgaatttgcagttgtt

SEQ ID NO: 1103525 - DNA, 25 bp, Homo sapien
tagtgcgtttgctgcttggacccaa

SEQ ID NO: 1103526 - DNA, 25 bp, Homo sapien
caccttgtaatgaatcagtggagat

SEQ ID NO: 1103527 - DNA, 25 bp, Homo sapien
ttttgactcttccatgcctagtgcg

SEQ ID NO: 1103528 - DNA, 25 bp, Homo sapien
cattctaggacccttttggcaaaag

SEQ ID NO: 1103529 - DNA, 25 bp, Homo sapien
taaagcaggtcagtgcaatccagat

SEQ ID NO: 1103530 - DNA, 25 bp, Homo sapien
gttatagcagcacaagcattctagg

SEQ ID NO: 1103531 - DNA, 25 bp, Homo sapien
cacctctgagttcggcttggccact

SEQ ID NO: 1103532 - DNA, 25 bp, Homo sapien
cacaggaaaccttttcaattgttgt

SEQ ID NO: 1103533 - DNA, 25 bp, Homo sapien
caattgttgtttgactatcccaata

SEQ ID NO: 1103534 - DNA, 25 bp, Homo sapien
tgtagcatttatagtctcagccctg

SEQ ID NO: 1103535 - DNA, 25 bp, Homo sapien
ccaataaattatggtcttgggcact

SEQ ID NO: 1103536 - DNA, 25 bp, Homo sapien
aaaggctcttcttacttagtggtgg

SEQ ID NO: 1103537 - DNA, 25 bp, Homo sapien
aaaaggctcttcttacttagtggtg

SEQ ID NO: 1103538 - DNA, 25 bp, Homo sapien
atagtacccaaatcaccacttgaat

SEQ ID NO: 1103539 - DNA, 25 bp, Homo sapien
gggcctccaagcccgtgatgggagg

SEQ ID NO: 1103540 - DNA, 25 bp, Homo sapien
tgctgccattacatttatagataag

SEQ ID NO: 1103541 - DNA, 25 bp, Homo sapien
tgtaaggaagttgttagtctccaat

SEQ ID NO: 1103542 - DNA, 25 bp, Homo sapien
tgtgccaaagatttgactctcaaat

SEQ ID NO: 1103543 - DNA, 25 bp, Homo sapien
aaatgcactctgcttcatattagtg

SEQ ID NO: 1103544 - DNA, 25 bp, Homo sapien
cctgtttcttgacatctcacttgaa

SEQ ID NO: 1103545 - DNA, 25 bp, Homo sapien
tggctccaagtagaattctgactgt

SEQ ID NO: 1103546 - DNA, 25 bp, Homo sapien
tacgtacttaatgtttggctccaag

SEQ ID NO: 1103547 - DNA, 25 bp, Homo sapien
attctgactgttgcacatatgtaaa

SEQ ID NO: 1103548 - DNA, 25 bp, Homo sapien
gaaaaaacagtgaactccaaggctg

SEQ ID NO: 1103549 - DNA, 25 bp, Homo sapien
aaaaaacagtgaactccaaggctgc

SEQ ID NO: 1103550 - DNA, 25 bp, Homo sapien
ggcctgcatcataaaggctttgatt

SEQ ID NO: 1103551 - DNA, 25 bp, Homo sapien
gattagagcagacacatggactttt

SEQ ID NO: 1103552 - DNA, 25 bp, Homo sapien
gcgcttgccaatcttgatgtcaaag

SEQ ID NO: 1103553 - DNA, 25 bp, Homo sapien
aagccacagtaaccaaggcctgcat

SEQ ID NO: 1103554 - DNA, 25 bp, Homo sapien
tacgtccataatgagacagttccat

SEQ ID NO: 1103555 - DNA, 25 bp, Homo sapien
ggtgtttgtggtgttacgtccataa

SEQ ID NO: 1103556 - DNA, 25 bp, Homo sapien
tatttggtgtttgtggtgttacgtc

SEQ ID NO: 1103557 - DNA, 25 bp, Homo sapien
tgtggtgttacgtccataatgagac

SEQ ID NO: 1103558 - DNA, 25 bp, Homo sapien
aaggtgccctgtagagatggaagca

SEQ ID NO: 1103559 - DNA, 25 bp, Homo sapien
gaatgcttttgatgtgacctgggga

SEQ ID NO: 1103560 - DNA, 25 bp, Homo sapien
tagagatggaagcaactgttagccc

SEQ ID NO: 1103561 - DNA, 25 bp, Homo sapien
ccatgtgtcatgttggaatgctttt

SEQ ID NO: 1103562 - DNA, 25 bp, Homo sapien
caacataacagcaaagacgatcatt

SEQ ID NO: 1103563 - DNA, 25 bp, Homo sapien
taacagcaaagacgatcattcccaa

SEQ ID NO: 1103564 - DNA, 25 bp, Homo sapien
gcaaagacgatcattcccaataaaa

SEQ ID NO: 1103565 - DNA, 25 bp, Homo sapien
cataacagcaaagacgatcattccc

SEQ ID NO: 1103566 - DNA, 25 bp, Homo sapien
cttcataaagccactttggtattaa

SEQ ID NO: 1103567 - DNA, 25 bp, Homo sapien
taaagccactttggtattaacaata

SEQ ID NO: 1103568 - DNA, 25 bp, Homo sapien
cataaagccactttggtattaacaa

SEQ ID NO: 1103569 - DNA, 25 bp, Homo sapien
agccactttggtattaacaataaga

SEQ ID NO: 1103570 - DNA, 25 bp, Homo sapien
cattttcacaacattgctgtttttc

SEQ ID NO: 1103571 - DNA, 25 bp, Homo sapien
tagcattttcacaacattgctgttt

SEQ ID NO: 1103572 - DNA, 25 bp, Homo sapien
ctgtagcattttcacaacattgctg

SEQ ID NO: 1103573 - DNA, 25 bp, Homo sapien
gtagcattttcacaacattgctgtt

SEQ ID NO: 1103574 - DNA, 25 bp, Homo sapien
gcatggtggtttcctcctctactga

SEQ ID NO: 1103575 - DNA, 25 bp, Homo sapien
catgggatcaacatataggacctgc

SEQ ID NO: 1103576 - DNA, 25 bp, Homo sapien
tattattgctgagatggcttccctc

SEQ ID NO: 1103577 - DNA, 25 bp, Homo sapien
aattaggatgcttttgtaacctggg

SEQ ID NO: 1103578 - DNA, 25 bp, Homo sapien
gagtgaaatcctattgaagtggctt

SEQ ID NO: 1103579 - DNA, 25 bp, Homo sapien
ttaatagatggcaactcctcattca

SEQ ID NO: 1103580 - DNA, 25 bp, Homo sapien
taatagatggcaactcctcattcac

SEQ ID NO: 1103581 - DNA, 25 bp, Homo sapien
aatcctattgaagtggctttccaaa

SEQ ID NO: 1103582 - DNA, 25 bp, Homo sapien
gcatgttccaccttcgggaccttaa

SEQ ID NO: 1103583 - DNA, 25 bp, Homo sapien
attaaaaaggcatggagctcccggg

SEQ ID NO: 1103584 - DNA, 25 bp, Homo sapien
tacatgaggcgtccacataatgctg

SEQ ID NO: 1103585 - DNA, 25 bp, Homo sapien
cccaagttcagattgcaaggcagct

SEQ ID NO: 1103586 - DNA, 25 bp, Homo sapien
agcatgagccaccacgcctggccta

SEQ ID NO: 1103587 - DNA, 25 bp, Homo sapien
ttacaagcacctgccaccatggccg

SEQ ID NO: 1103588 - DNA, 25 bp, Homo sapien
catgagccaccacgcctggcctaat

SEQ ID NO: 1103589 - DNA, 25 bp, Homo sapien
tgagccaccacgcctggcctaatga

SEQ ID NO: 1103590 - DNA, 25 bp, Homo sapien
ataggtgtactagtgaaaaattgga

SEQ ID NO: 1103591 - DNA, 25 bp, Homo sapien
tatgttgtgaagctggtgttggact

SEQ ID NO: 1103592 - DNA, 25 bp, Homo sapien
ggtatctgtccctgacaacctaaca

SEQ ID NO: 1103593 - DNA, 25 bp, Homo sapien
catatgtacaagaggaattattaaa

SEQ ID NO: 1103594 - DNA, 25 bp, Homo sapien
cagtgccagtttctggtgtgccttt

SEQ ID NO: 1103595 - DNA, 25 bp, Homo sapien
tagtagaagtgttatcgatttgaag

SEQ ID NO: 1103596 - DNA, 25 bp, Homo sapien
gtagaagtgttatcgatttgaagtt

SEQ ID NO: 1103597 - DNA, 25 bp, Homo sapien
cctttttagtagaagtgttatcgat

SEQ ID NO: 1103598 - DNA, 25 bp, Homo sapien
ttttagtagaagtgttatcgatttg

SEQ ID NO: 1103599 - DNA, 25 bp, Homo sapien
tcttgataattctctttatcgtgat

SEQ ID NO: 1103600 - DNA, 25 bp, Homo sapien
tattgttaaagacattaactggctg

SEQ ID NO: 1103601 - DNA, 25 bp, Homo sapien
gctccttaacacttattgttaaaga

SEQ ID NO: 1103602 - DNA, 25 bp, Homo sapien
aagacattaactggctgtcttcttc

SEQ ID NO: 1103603 - DNA, 25 bp, Homo sapien
gctgccagaagcaaatgttaatcct

SEQ ID NO: 1103604 - DNA, 25 bp, Homo sapien
taacagtggttctcttatcctgcat

SEQ ID NO: 1103605 - DNA, 25 bp, Homo sapien
aagtgaagacttgcactgattgcca

SEQ ID NO: 1103606 - DNA, 25 bp, Homo sapien
attgataacagtggttctcttatcc

SEQ ID NO: 1103607 - DNA, 25 bp, Homo sapien
tcaagtgaagacttgcactgattgc

SEQ ID NO: 1103608 - DNA, 25 bp, Homo sapien
caccaagatatgataggcgcgataa

SEQ ID NO: 1103609 - DNA, 25 bp, Homo sapien
tcacagccatagagacgtggcactt

SEQ ID NO: 1103610 - DNA, 25 bp, Homo sapien
gagaggactcgcttctcagttcagc

SEQ ID NO: 1103611 - DNA, 25 bp, Homo sapien
gataaaatcgtgtgctcagcgttca

SEQ ID NO: 1103612 - DNA, 25 bp, Homo sapien
agcgggcgcggtcccgggcctgcgg

SEQ ID NO: 1103613 - DNA, 25 bp, Homo sapien
gctggcggcgagtgaggatcgggcc

SEQ ID NO: 1103614 - DNA, 25 bp, Homo sapien
tctctgccggcgctcgggcgttccc

SEQ ID NO: 1103615 - DNA, 25 bp, Homo sapien
ccccggtgctctgggccgcacgtgt

SEQ ID NO: 1103616 - DNA, 25 bp, Homo sapien
tctggtatagaactccgtattcttc

SEQ ID NO: 1103617 - DNA, 25 bp, Homo sapien
aactctggtatagaactccgtattc

SEQ ID NO: 1103618 - DNA, 25 bp, Homo sapien
atcaactctggtatagaactccgta

SEQ ID NO: 1103619 - DNA, 25 bp, Homo sapien
tcaactctggtatagaactccgtat

SEQ ID NO: 1103620 - DNA, 25 bp, Homo sapien
tttgctttaatcaacagccacgtga

SEQ ID NO: 1103621 - DNA, 25 bp, Homo sapien
caacagccacgtgattataaacata

SEQ ID NO: 1103622 - DNA, 25 bp, Homo sapien
tgccaatgagcatcctctaaaagta

SEQ ID NO: 1103623 - DNA, 25 bp, Homo sapien
gagcatcctctaaaagtatgtgcca

SEQ ID NO: 1103624 - DNA, 25 bp, Homo sapien
tcacagtcacatcgcctctcttgca

SEQ ID NO: 1103625 - DNA, 25 bp, Homo sapien
gtcacatcgcctctcttgcacgcat

SEQ ID NO: 1103626 - DNA, 25 bp, Homo sapien
aaggcttcacagtcacatcgcctct

SEQ ID NO: 1103627 - DNA, 25 bp, Homo sapien
atgggaaggcttcacagtcacatcg

SEQ ID NO: 1103628 - DNA, 25 bp, Homo sapien
attgatacaggccagtttgcagaca

SEQ ID NO: 1103629 - DNA, 25 bp, Homo sapien
acttgagaattgagggagtggccat

SEQ ID NO: 1103630 - DNA, 25 bp, Homo sapien
cagacaaacaaggttgtaccaaggg

SEQ ID NO: 1103631 - DNA, 25 bp, Homo sapien
tctgtcaaacttgtacaggattaac

SEQ ID NO: 1103632 - DNA, 25 bp, Homo sapien
ctgcagagatccattttttctgcca

SEQ ID NO: 1103633 - DNA, 25 bp, Homo sapien
cccttctgtatgcaggataaatttt

SEQ ID NO: 1103634 - DNA, 25 bp, Homo sapien
tagagtatactcagtgtataagtgg

SEQ ID NO: 1103635 - DNA, 25 bp, Homo sapien
gtatgcaggataaattttgaggctg

SEQ ID NO: 1103636 - DNA, 25 bp, Homo sapien
tgtataagtgggtgtctcgtcctct

SEQ ID NO: 1103637 - DNA, 25 bp, Homo sapien
gattcaggggtgaggttgattccaa

SEQ ID NO: 1103638 - DNA, 25 bp, Homo sapien
ctttacattgcttctgccaggttaa

SEQ ID NO: 1103639 - DNA, 25 bp, Homo sapien
gactattgacagcagtaaccttggc

SEQ ID NO: 1103640 - DNA, 25 bp, Homo sapien
aagaggagcttccaagactattgac

SEQ ID NO: 1103641 - DNA, 25 bp, Homo sapien
tccaataaagggtacatctgctcac

SEQ ID NO: 1103642 - DNA, 25 bp, Homo sapien
gttactgggccgatatctgagtcga

SEQ ID NO: 1103643 - DNA, 25 bp, Homo sapien
tgagtcgattaagcagtaccagtcc

SEQ ID NO: 1103644 - DNA, 25 bp, Homo sapien
taatgtcccacggaggaagaggcct

SEQ ID NO: 1103645 - DNA, 25 bp, Homo sapien
tgttttttccttcactctaaagata

SEQ ID NO: 1103646 - DNA, 25 bp, Homo sapien
tcagtgttttttccttcactctaaa

SEQ ID NO: 1103647 - DNA, 25 bp, Homo sapien
ttaagaatgcttcagtgttttttcc

SEQ ID NO: 1103648 - DNA, 25 bp, Homo sapien
tttccttcactctaaagataattac

SEQ ID NO: 1103649 - DNA, 25 bp, Homo sapien
tctgtaaatggtttcagatccagca

SEQ ID NO: 1103650 - DNA, 25 bp, Homo sapien
tgattcactccaatcactccaactt

SEQ ID NO: 1103651 - DNA, 25 bp, Homo sapien
gtttgtgctctcaatgattcactcc

SEQ ID NO: 1103652 - DNA, 25 bp, Homo sapien
taaagatgtagcttagaggaaatct

SEQ ID NO: 1103653 - DNA, 25 bp, Homo sapien
cataaccataatgagttgctatact

SEQ ID NO: 1103654 - DNA, 25 bp, Homo sapien
tcctaggttcaattcataatcatcc

SEQ ID NO: 1103655 - DNA, 25 bp, Homo sapien
gactgaataagccagcttcctaggt

SEQ ID NO: 1103656 - DNA, 25 bp, Homo sapien
gttcataaccataatgagttgctat

SEQ ID NO: 1103657 - DNA, 25 bp, Homo sapien
cgtttacatcagttggtgtttcata

SEQ ID NO: 1103658 - DNA, 25 bp, Homo sapien
cttttacgtttacatcagttggtgt

SEQ ID NO: 1103659 - DNA, 25 bp, Homo sapien
catcagttggtgtttcataaagaaa

SEQ ID NO: 1103660 - DNA, 25 bp, Homo sapien
tacatcagttggtgtttcataaaga

SEQ ID NO: 1103661 - DNA, 25 bp, Homo sapien
tcattagttgaatctgcatgagtct

SEQ ID NO: 1103662 - DNA, 25 bp, Homo sapien
ccttcatgggagagaaatcattagt

SEQ ID NO: 1103663 - DNA, 25 bp, Homo sapien
gagagaaatcattagttgaatctgc

SEQ ID NO: 1103664 - DNA, 25 bp, Homo sapien
tgcaatgtataccttcatgggagag

SEQ ID NO: 1103665 - DNA, 25 bp, Homo sapien
acttagaggtaagcaacacttatgt

SEQ ID NO: 1103666 - DNA, 25 bp, Homo sapien
tgcagtagtatttacctttgcagtg

SEQ ID NO: 1103667 - DNA, 25 bp, Homo sapien
ctttgcagtagtatttacctttgca

SEQ ID NO: 1103668 - DNA, 25 bp, Homo sapien
tttgcagtagtatttacctttgcag

SEQ ID NO: 1103669 - DNA, 25 bp, Homo sapien
ccagcgcagcacttagaatataata

SEQ ID NO: 1103670 - DNA, 25 bp, Homo sapien
tatttggtgtgtgatcattagacaa

SEQ ID NO: 1103671 - DNA, 25 bp, Homo sapien
caatgatgtacttaaagggaagtcc

SEQ ID NO: 1103672 - DNA, 25 bp, Homo sapien
cctagacttatcatggtatagtaca

SEQ ID NO: 1103673 - DNA, 25 bp, Homo sapien
tctactgtagtcaatgtgccgtttc

SEQ ID NO: 1103674 - DNA, 25 bp, Homo sapien
tgtgccgtttcatgtaccagacatc

SEQ ID NO: 1103675 - DNA, 25 bp, Homo sapien
gaaatctgttgtctactgtagtcaa

SEQ ID NO: 1103676 - DNA, 25 bp, Homo sapien
accagacatctaacatcccagtagg

SEQ ID NO: 1103677 - DNA, 25 bp, Homo sapien
tgtgctcattcagattcataattcc

SEQ ID NO: 1103678 - DNA, 25 bp, Homo sapien
ttcagattcataattccaaaacttt

SEQ ID NO: 1103679 - DNA, 25 bp, Homo sapien
cattcagattcataattccaaaact

SEQ ID NO: 1103680 - DNA, 25 bp, Homo sapien
gctcattcagattcataattccaaa

SEQ ID NO: 1103681 - DNA, 25 bp, Homo sapien
atcacttgagcataggaggtgaagg

SEQ ID NO: 1103682 - DNA, 25 bp, Homo sapien
cgtggtgatggatgcctgtagtctc

SEQ ID NO: 1103683 - DNA, 25 bp, Homo sapien
acttgagcataggaggtgaaggctg

SEQ ID NO: 1103684 - DNA, 25 bp, Homo sapien
tgtctctgtgacaaacaaaaattag

SEQ ID NO: 1103685 - DNA, 25 bp, Homo sapien
gccaaatccatagaggtgtccctct

SEQ ID NO: 1103686 - DNA, 25 bp, Homo sapien
taggcgagctcaaccatcatccttc

SEQ ID NO: 1103687 - DNA, 25 bp, Homo sapien
aatttttaatcatgcatgtggctcc

SEQ ID NO: 1103688 - DNA, 25 bp, Homo sapien
tggactgtgagctccaggacatgag

SEQ ID NO: 1103689 - DNA, 25 bp, Homo sapien
cacagcccaatttccggttctagga

SEQ ID NO: 1103690 - DNA, 25 bp, Homo sapien
tgttaatacgagtgggcagagaact

SEQ ID NO: 1103691 - DNA, 25 bp, Homo sapien
tcctgcaaggtcacctgatagtgga

SEQ ID NO: 1103692 - DNA, 25 bp, Homo sapien
ccggttctaggaatgactgtggtcc

SEQ ID NO: 1103693 - DNA, 25 bp, Homo sapien
cacattgtagggtcgactccgtagc

SEQ ID NO: 1103694 - DNA, 25 bp, Homo sapien
gaacagcagagggatctttcctggg

SEQ ID NO: 1103695 - DNA, 25 bp, Homo sapien
gaggctgccaagtcaccagaatgtt

SEQ ID NO: 1103696 - DNA, 25 bp, Homo sapien
tttgcagagacctggcgaggagcca

SEQ ID NO: 1103697 - DNA, 25 bp, Homo sapien
tgcatcctccttgatcccctgagag

SEQ ID NO: 1103698 - DNA, 25 bp, Homo sapien
gagagtgcatacacacggatttcat

SEQ ID NO: 1103699 - DNA, 25 bp, Homo sapien
caggatggagctgcatcctccttga

SEQ ID NO: 1103700 - DNA, 25 bp, Homo sapien
tgtgcttagagttacccaggatgga

SEQ ID NO: 1103701 - DNA, 25 bp, Homo sapien
ctataatggaggaggcagcccattt

SEQ ID NO: 1103702 - DNA, 25 bp, Homo sapien
tcctctgtgatggcattaatgtggg

SEQ ID NO: 1103703 - DNA, 25 bp, Homo sapien
agcccatttgctcctggactggaat

SEQ ID NO: 1103704 - DNA, 25 bp, Homo sapien
tctgtgatggcattaatgtgggggc

SEQ ID NO: 1103705 - DNA, 25 bp, Homo sapien
tggagtcccgttccttccagtatat

SEQ ID NO: 1103706 - DNA, 25 bp, Homo sapien
ttggagtcccgttccttccagtata

SEQ ID NO: 1103707 - DNA, 25 bp, Homo sapien
ggagtcccgttccttccagtatatc

SEQ ID NO: 1103708 - DNA, 25 bp, Homo sapien
ggccccactcactgcatttggttct

SEQ ID NO: 1103709 - DNA, 25 bp, Homo sapien
gtgttttcctgacatccaaacaaga

SEQ ID NO: 1103710 - DNA, 25 bp, Homo sapien
cactcactgcatttggttctcacac

SEQ ID NO: 1103711 - DNA, 25 bp, Homo sapien
tgacatccaaacaagaaggccccac

SEQ ID NO: 1103712 - DNA, 25 bp, Homo sapien
ggtactagacaaaacagctgcactg

SEQ ID NO: 1103713 - DNA, 25 bp, Homo sapien
gatgtgatagttgccagtcgttgga

SEQ ID NO: 1103714 - DNA, 25 bp, Homo sapien
cagggtgattcaatgataaaggcac

SEQ ID NO: 1103715 - DNA, 25 bp, Homo sapien
ggcaccagtgtaggaagatgtgata

SEQ ID NO: 1103716 - DNA, 25 bp, Homo sapien
aggaagataaaggaagaaaggcatg

SEQ ID NO: 1103717 - DNA, 25 bp, Homo sapien
aaaggaagaaaggcatgtattaaag

SEQ ID NO: 1103718 - DNA, 25 bp, Homo sapien
taaaggaagaaaggcatgtattaaa

SEQ ID NO: 1103719 - DNA, 25 bp, Homo sapien
aagataaaggaagaaaggcatgtat

SEQ ID NO: 1103720 - DNA, 25 bp, Homo sapien
ctgcaggctgtttattggatgtgaa

SEQ ID NO: 1103721 - DNA, 25 bp, Homo sapien
gtcatccacaggacatatgtcactc

SEQ ID NO: 1103722 - DNA, 25 bp, Homo sapien
gctgcaggctgtttattggatgtga

SEQ ID NO: 1103723 - DNA, 25 bp, Homo sapien
ggacatatgtcactcggggctgcag

SEQ ID NO: 1103724 - DNA, 25 bp, Homo sapien
gatgatagcaatgcaaatgcttggt

SEQ ID NO: 1103725 - DNA, 25 bp, Homo sapien
gtaatgcgttgagaaaatgcccacc

SEQ ID NO: 1103726 - DNA, 25 bp, Homo sapien
tgctggaagtaatgcgttgagaaaa

SEQ ID NO: 1103727 - DNA, 25 bp, Homo sapien
tggtgccacaaacgccatccaattg

SEQ ID NO: 1103728 - DNA, 25 bp, Homo sapien
atttctctgctacaccactgaggtc

SEQ ID NO: 1103729 - DNA, 25 bp, Homo sapien
ctctgcaatgggatatttcttagcg

SEQ ID NO: 1103730 - DNA, 25 bp, Homo sapien
tctgagggctgctaggagaacaaac

SEQ ID NO: 1103731 - DNA, 25 bp, Homo sapien
tagcgcaagtgctatttgctggatc

SEQ ID NO: 1103732 - DNA, 25 bp, Homo sapien
gctgatcaacctctcctttaaaacc

SEQ ID NO: 1103733 - DNA, 25 bp, Homo sapien
tgccagctgatcaacctctccttta

SEQ ID NO: 1103734 - DNA, 25 bp, Homo sapien
atctgccagctgatcaacctctcct

SEQ ID NO: 1103735 - DNA, 25 bp, Homo sapien
gcacaatggaatgatgtactggctt

SEQ ID NO: 1103736 - DNA, 25 bp, Homo sapien
gcgtgggccagtctatcaggagcct

SEQ ID NO: 1103737 - DNA, 25 bp, Homo sapien
cagaggcctgatgaccttggattcc

SEQ ID NO: 1103738 - DNA, 25 bp, Homo sapien
ggacttcactgatgaccagcggttc

SEQ ID NO: 1103739 - DNA, 25 bp, Homo sapien
gttcaggatcttcaggcgtgggcca

SEQ ID NO: 1103740 - DNA, 25 bp, Homo sapien
gtacagatccaccagttgtctgctc

SEQ ID NO: 1103741 - DNA, 25 bp, Homo sapien
ttgtacagatccaccagttgtctgc

SEQ ID NO: 1103742 - DNA, 25 bp, Homo sapien
tgtacagatccaccagttgtctgct

SEQ ID NO: 1103743 - DNA, 25 bp, Homo sapien
cttgtacagatccaccagttgtctg

SEQ ID NO: 1103744 - DNA, 25 bp, Homo sapien
cagggacaggctgggttttcgggct

SEQ ID NO: 1103745 - DNA, 25 bp, Homo sapien
gctttgggtcggagcccctgctctc

SEQ ID NO: 1103746 - DNA, 25 bp, Homo sapien
ctgctgggagcaccgtccagggaca

SEQ ID NO: 1103747 - DNA, 25 bp, Homo sapien
tcgggctttgggtcggagcccctgc

SEQ ID NO: 1103748 - DNA, 25 bp, Homo sapien
tgttggagggtaagtagccatcatg

SEQ ID NO: 1103749 - DNA, 25 bp, Homo sapien
gagtcagcttatcaccacaggagaa

SEQ ID NO: 1103750 - DNA, 25 bp, Homo sapien
catctatgttggagggtaagtagcc

SEQ ID NO: 1103751 - DNA, 25 bp, Homo sapien
tcttccagagagtcagcgagaggtg

SEQ ID NO: 1103752 - DNA, 25 bp, Homo sapien
cagccaatgtgcctagtgtctaatg

SEQ ID NO: 1103753 - DNA, 25 bp, Homo sapien
tatgccattactactaagagctgtg

SEQ ID NO: 1103754 - DNA, 25 bp, Homo sapien
cacactgactttaaggcttgaagcc

SEQ ID NO: 1103755 - DNA, 25 bp, Homo sapien
gaatggtcctctagactgtatgcca

SEQ ID NO: 1103756 - DNA, 25 bp, Homo sapien
tagagctgtgcactccaatacagta

SEQ ID NO: 1103757 - DNA, 25 bp, Homo sapien
ctagagctgtgcactccaatacagt

SEQ ID NO: 1103758 - DNA, 25 bp, Homo sapien
taggttgatttgttttgaaggctct

SEQ ID NO: 1103759 - DNA, 25 bp, Homo sapien
gaaggctctcaataatctaggagcc

SEQ ID NO: 1103760 - DNA, 25 bp, Homo sapien
gatttgttttgaaggctctcaataa

SEQ ID NO: 1103761 - DNA, 25 bp, Homo sapien
ttttgaaggctctcaataatctagg

SEQ ID NO: 1103762 - DNA, 25 bp, Homo sapien
cggccagaaaaaggtacattcttag

SEQ ID NO: 1103763 - DNA, 25 bp, Homo sapien
cagtcatgaccaccttgggggccct

SEQ ID NO: 1103764 - DNA, 25 bp, Homo sapien
ccagaaaaaggtacattcttagact

SEQ ID NO: 1103765 - DNA, 25 bp, Homo sapien
tcttagacttctgcaaatgagacca

SEQ ID NO: 1103766 - DNA, 25 bp, Homo sapien
tcatgttccaagtccatgttgtgga

SEQ ID NO: 1103767 - DNA, 25 bp, Homo sapien
tctccgggaatgaaagctgtgcctt

SEQ ID NO: 1103768 - DNA, 25 bp, Homo sapien
cagaggaccagctcaatatcttctc

SEQ ID NO: 1103769 - DNA, 25 bp, Homo sapien
ctcaacttgagctggcagaggacca

SEQ ID NO: 1103770 - DNA, 25 bp, Homo sapien
tgctttcaagttgtctgcagtccaa

SEQ ID NO: 1103771 - DNA, 25 bp, Homo sapien
catccttaggagtctttaggagtca

SEQ ID NO: 1103772 - DNA, 25 bp, Homo sapien
tgaggactgcagtatcatatgagac

SEQ ID NO: 1103773 - DNA, 25 bp, Homo sapien
tattggtagctactatggaccaggc

SEQ ID NO: 1103774 - DNA, 25 bp, Homo sapien
cacaatttgcctacgagggcttcaa

SEQ ID NO: 1103775 - DNA, 25 bp, Homo sapien
tgggacaaaggatacacagaactca

SEQ ID NO: 1103776 - DNA, 25 bp, Homo sapien
aaagaggacaccttatctggcagag

SEQ ID NO: 1103777 - DNA, 25 bp, Homo sapien
gatactgctgcgaaaagacaatcag

SEQ ID NO: 1103778 - DNA, 25 bp, Homo sapien
gctcccatgcgccaccttttaggaa

SEQ ID NO: 1103779 - DNA, 25 bp, Homo sapien
catgttcagctatcatctggacgct

SEQ ID NO: 1103780 - DNA, 25 bp, Homo sapien
caagtagtcaagattatgggcatgt

SEQ ID NO: 1103781 - DNA, 25 bp, Homo sapien
tggacgctctcacgctctctgaatc

SEQ ID NO: 1103782 - DNA, 25 bp, Homo sapien
gttacaggagagcatggatgtttcc

SEQ ID NO: 1103783 - DNA, 25 bp, Homo sapien
gcaaaggaatccagtcaatttaagt

SEQ ID NO: 1103784 - DNA, 25 bp, Homo sapien
tctacagctactctgccaaagacag

SEQ ID NO: 1103785 - DNA, 25 bp, Homo sapien
taatctcacaagcaggttaaaagtg

SEQ ID NO: 1103786 - DNA, 25 bp, Homo sapien
tagccaatgaataacgtccaagtaa

SEQ ID NO: 1103787 - DNA, 25 bp, Homo sapien
gactaaaatgttctattagccaatg

SEQ ID NO: 1103788 - DNA, 25 bp, Homo sapien
tattagccaatgaataacgtccaag

SEQ ID NO: 1103789 - DNA, 25 bp, Homo sapien
ttgttggattgggactaaaatgttc

SEQ ID NO: 1103790 - DNA, 25 bp, Homo sapien
tacttctgtactaaactggtagcca

SEQ ID NO: 1103791 - DNA, 25 bp, Homo sapien
gcctggtggtaactttgtatctgag

SEQ ID NO: 1103792 - DNA, 25 bp, Homo sapien
gataattggttcatactaggtgctc

SEQ ID NO: 1103793 - DNA, 25 bp, Homo sapien
tatgtggcaattcctagtgctcttg

SEQ ID NO: 1103794 - DNA, 25 bp, Homo sapien
caggtatattagtggacctccagtc

SEQ ID NO: 1103795 - DNA, 25 bp, Homo sapien
taggaaagtaccatcatgtggaagg

SEQ ID NO: 1103796 - DNA, 25 bp, Homo sapien
ccagtccaatggtatagcaaattcc

SEQ ID NO: 1103797 - DNA, 25 bp, Homo sapien
ttctagttgccagagatggttgcac

SEQ ID NO: 1103798 - DNA, 25 bp, Homo sapien
tctgtgtgtgaaaggtcccaaaatc

SEQ ID NO: 1103799 - DNA, 25 bp, Homo sapien
tacacacatacgtgctacccagaga

SEQ ID NO: 1103800 - DNA, 25 bp, Homo sapien
ctttgtaaggttggaacagcagcac

SEQ ID NO: 1103801 - DNA, 25 bp, Homo sapien
tgttgcaagctttcaagatagcctg

SEQ ID NO: 1103802 - DNA, 25 bp, Homo sapien
cacacatggtcaactgggacatgtt

SEQ ID NO: 1103803 - DNA, 25 bp, Homo sapien
tattggacatactggttttaatacc

SEQ ID NO: 1103804 - DNA, 25 bp, Homo sapien
tcagtacttgaacaaattcaaagca

SEQ ID NO: 1103805 - DNA, 25 bp, Homo sapien
tgctgtgtggaatactaactatatg

SEQ ID NO: 1103806 - DNA, 25 bp, Homo sapien
tttgtattgctgcttgcaaatatgc

SEQ ID NO: 1103807 - DNA, 25 bp, Homo sapien
ataattttcagagattatgcattct

SEQ ID NO: 1103808 - DNA, 25 bp, Homo sapien
acttttgtattgctgcttgcaaata

SEQ ID NO: 1103809 - DNA, 25 bp, Homo sapien
taattttcagagattatgcattctt

SEQ ID NO: 1103810 - DNA, 25 bp, Homo sapien
agcttttgcatgcttaaggattcca

SEQ ID NO: 1103811 - DNA, 25 bp, Homo sapien
aagcttttgcatgcttaaggattcc

SEQ ID NO: 1103812 - DNA, 25 bp, Homo sapien
gcttttgcatgcttaaggattccaa

SEQ ID NO: 1103813 - DNA, 25 bp, Homo sapien
aaagcttttgcatgcttaaggattc

SEQ ID NO: 1103814 - DNA, 25 bp, Homo sapien
caatttacagttttgcgtgtcatcc

SEQ ID NO: 1103815 - DNA, 25 bp, Homo sapien
ccttgtggggatcatgctaataatc

SEQ ID NO: 1103816 - DNA, 25 bp, Homo sapien
ggggatcatgctaataatctttgta

SEQ ID NO: 1103817 - DNA, 25 bp, Homo sapien
atatagaacaatttacagttttgcg

SEQ ID NO: 1103818 - DNA, 25 bp, Homo sapien
gacaaacgtggaggtagcggatctc

SEQ ID NO: 1103819 - DNA, 25 bp, Homo sapien
cctgaagcacgaggacaaacgtgga

SEQ ID NO: 1103820 - DNA, 25 bp, Homo sapien
tggaggtagcggatctcacaactgg

SEQ ID NO: 1103821 - DNA, 25 bp, Homo sapien
aagcacgaggacaaacgtggaggta

SEQ ID NO: 1103822 - DNA, 25 bp, Homo sapien
cgattattgaccgacctattcgagg

SEQ ID NO: 1103823 - DNA, 25 bp, Homo sapien
ttctcgtggcaaacgtgaatttgat

SEQ ID NO: 1103824 - DNA, 25 bp, Homo sapien
ataggcatagtggaagtgatagatc

SEQ ID NO: 1103825 - DNA, 25 bp, Homo sapien
cctattcgaggtcgtggtggtcttg

SEQ ID NO: 1103826 - DNA, 25 bp, Homo sapien
gaacgaagattcgaaaagccacttg

SEQ ID NO: 1103827 - DNA, 25 bp, Homo sapien
gaccacctcgtgaacgaagattcga

SEQ ID NO: 1103828 - DNA, 25 bp, Homo sapien
gaccagaaaggcgaccacctcgtga

SEQ ID NO: 1103829 - DNA, 25 bp, Homo sapien
gaaggaggcgaattttcagttgata

SEQ ID NO: 1103830 - DNA, 25 bp, Homo sapien
cacagaatttagaatgctcttgagc

SEQ ID NO: 1103831 - DNA, 25 bp, Homo sapien
tgagctaggaaggttctgtctaatt

SEQ ID NO: 1103832 - DNA, 25 bp, Homo sapien
aactcaaggattttaccagcgcatt

SEQ ID NO: 1103833 - DNA, 25 bp, Homo sapien
gagctgtggagaatccctaaagtta

SEQ ID NO: 1103834 - DNA, 25 bp, Homo sapien
tcccctctcttgtctaacttccata

SEQ ID NO: 1103835 - DNA, 25 bp, Homo sapien
taacttccataacctcttcatcagt

SEQ ID NO: 1103836 - DNA, 25 bp, Homo sapien
tgtctaacttccataacctcttcat

SEQ ID NO: 1103837 - DNA, 25 bp, Homo sapien
ctctcttgtctaacttccataacct

SEQ ID NO: 1103838 - DNA, 25 bp, Homo sapien
agctaagaagacctgtaatttcaat

SEQ ID NO: 1103839 - DNA, 25 bp, Homo sapien
tagctaagaagacctgtaatttcaa

SEQ ID NO: 1103840 - DNA, 25 bp, Homo sapien
ttagctaagaagacctgtaatttca

SEQ ID NO: 1103841 - DNA, 25 bp, Homo sapien
gaaaaacttatagctcaaccccatg

SEQ ID NO: 1103842 - DNA, 25 bp, Homo sapien
gccaagttgagttggttctgagaaa

SEQ ID NO: 1103843 - DNA, 25 bp, Homo sapien
ccagaggccagatctgatttaatta

SEQ ID NO: 1103844 - DNA, 25 bp, Homo sapien
ctttaccaaactggacagagatatg

SEQ ID NO: 1103845 - DNA, 25 bp, Homo sapien
tgtgaaaacctgcaaaggcttaagt

SEQ ID NO: 1103846 - DNA, 25 bp, Homo sapien
ttttggctccctagccttcatcacc

SEQ ID NO: 1103847 - DNA, 25 bp, Homo sapien
cctgcagcgtactgatggaaagttc

SEQ ID NO: 1103848 - DNA, 25 bp, Homo sapien
tggaaagttcctccactgtgaaaac

SEQ ID NO: 1103849 - DNA, 25 bp, Homo sapien
taccagatggaagcacgtggtttcc

SEQ ID NO: 1103850 - DNA, 25 bp, Homo sapien
tggtttccaggttttacttgctcag

SEQ ID NO: 1103851 - DNA, 25 bp, Homo sapien
tccacggtgtgaggctaccagatgg

SEQ ID NO: 1103852 - DNA, 25 bp, Homo sapien
agtcccggtggcagtggactgcccc

SEQ ID NO: 1103853 - DNA, 25 bp, Homo sapien
aatactgaaacacggttgggggcag

SEQ ID NO: 1103854 - DNA, 25 bp, Homo sapien
atactgaaacacggttgggggcagg

SEQ ID NO: 1103855 - DNA, 25 bp, Homo sapien
gggggcagggagcaagtttgctgtt

SEQ ID NO: 1103856 - DNA, 25 bp, Homo sapien
gaatgtgttctcctccaaaaccctc

SEQ ID NO: 1103857 - DNA, 25 bp, Homo sapien
cagctgtaaacaatccatgcttcta

SEQ ID NO: 1103858 - DNA, 25 bp, Homo sapien
cccagctgtaaacaatccatgcttc

SEQ ID NO: 1103859 - DNA, 25 bp, Homo sapien
gtaaacaatccatgcttctattgac

SEQ ID NO: 1103860 - DNA, 25 bp, Homo sapien
gctgtaaacaatccatgcttctatt

SEQ ID NO: 1103861 - DNA, 25 bp, Homo sapien
cactagctttggagctccgaagtct

SEQ ID NO: 1103862 - DNA, 25 bp, Homo sapien
aatgcactagctttggagctccgaa

SEQ ID NO: 1103863 - DNA, 25 bp, Homo sapien
tagctttggagctccgaagtcttca

SEQ ID NO: 1103864 - DNA, 25 bp, Homo sapien
ttaaaatgcactagctttggagctc

SEQ ID NO: 1103865 - DNA, 25 bp, Homo sapien
gcgtgatcttggcacacctctgcct

SEQ ID NO: 1103866 - DNA, 25 bp, Homo sapien
ggcgtgatcttggcacacctctgcc

SEQ ID NO: 1103867 - DNA, 25 bp, Homo sapien
gtggcgtgatcttggcacacctctg

SEQ ID NO: 1103868 - DNA, 25 bp, Homo sapien
tggcgtgatcttggcacacctctgc

SEQ ID NO: 1103869 - DNA, 25 bp, Homo sapien
aaatgatgtcataggctttgtagag

SEQ ID NO: 1103870 - DNA, 25 bp, Homo sapien
cctgggaaggctatctctagtggtg

SEQ ID NO: 1103871 - DNA, 25 bp, Homo sapien
tctagtggtggtacctcgaagacga

SEQ ID NO: 1103872 - DNA, 25 bp, Homo sapien
tgtagagtttaaagctggcagcccc

SEQ ID NO: 1103873 - DNA, 25 bp, Homo sapien
tattcccatttaactcgactctaac

SEQ ID NO: 1103874 - DNA, 25 bp, Homo sapien
cattggccagacctacactagcaac

SEQ ID NO: 1103875 - DNA, 25 bp, Homo sapien
tcagtgctggttctgcattggccag

SEQ ID NO: 1103876 - DNA, 25 bp, Homo sapien
tgactcttccgcaaatacatctgga

SEQ ID NO: 1103877 - DNA, 25 bp, Homo sapien
ctgcctcagcaagaagagccatgtt

SEQ ID NO: 1103878 - DNA, 25 bp, Homo sapien
tgcctcagcaagaagagccatgttc

SEQ ID NO: 1103879 - DNA, 25 bp, Homo sapien
tatggccctcactggctgttcactc

SEQ ID NO: 1103880 - DNA, 25 bp, Homo sapien
catgttctcagctatggccctcact

SEQ ID NO: 1103881 - DNA, 25 bp, Homo sapien
tctttttctatggttctgctctctg

SEQ ID NO: 1103882 - DNA, 25 bp, Homo sapien
gattccctggagaaacattctttgt

SEQ ID NO: 1103883 - DNA, 25 bp, Homo sapien
tttctatggttctgctctctgacat

SEQ ID NO: 1103884 - DNA, 25 bp, Homo sapien
tctctgacatccaatgaatgttggt

SEQ ID NO: 1103885 - DNA, 25 bp, Homo sapien
tgttcttcagatgtgggctccctgt

SEQ ID NO: 1103886 - DNA, 25 bp, Homo sapien
tatttggtacttgctgttcttcaga

SEQ ID NO: 1103887 - DNA, 25 bp, Homo sapien
tacttgctgttcttcagatgtgggc

SEQ ID NO: 1103888 - DNA, 25 bp, Homo sapien
ttgccctatttggtacttgctgttc

SEQ ID NO: 1103889 - DNA, 25 bp, Homo sapien
taatcgtttcagtgacaatagctaa

SEQ ID NO: 1103890 - DNA, 25 bp, Homo sapien
tttccttccactggataatcgtttc

SEQ ID NO: 1103891 - DNA, 25 bp, Homo sapien
gaaacatttgatcacagggtgcagg

SEQ ID NO: 1103892 - DNA, 25 bp, Homo sapien
tgaaacatttgatcacagggtgcag

SEQ ID NO: 1103893 - DNA, 25 bp, Homo sapien
cagggcccgtttagtagcgaccgca

SEQ ID NO: 1103894 - DNA, 25 bp, Homo sapien
agggcccgtttagtagcgaccgcat

SEQ ID NO: 1103895 - DNA, 25 bp, Homo sapien
gaagtagttggtgccttagaaaaga

SEQ ID NO: 1103896 - DNA, 25 bp, Homo sapien
agtagttggtgccttagaaaagact

SEQ ID NO: 1103897 - DNA, 25 bp, Homo sapien
cactcttccaaatgctctaagggag

SEQ ID NO: 1103898 - DNA, 25 bp, Homo sapien
acactcttccaaatgctctaaggga

SEQ ID NO: 1103899 - DNA, 25 bp, Homo sapien
catgtcatccttgtgcaagggccat

SEQ ID NO: 1103900 - DNA, 25 bp, Homo sapien
ctaatgttctctgtatcactccaat

SEQ ID NO: 1103901 - DNA, 25 bp, Homo sapien
aaatataaaacacttcacgaatttg

SEQ ID NO: 1103902 - DNA, 25 bp, Homo sapien
tgtgcaagggccatgctaatgttct

SEQ ID NO: 1103903 - DNA, 25 bp, Homo sapien
cattgtttggatgagcgggagcaaa

SEQ ID NO: 1103904 - DNA, 25 bp, Homo sapien
gatgagcgggagcaaacattctccc

SEQ ID NO: 1103905 - DNA, 25 bp, Homo sapien
tcctgcccctgcaagtggacctcag

SEQ ID NO: 1103906 - DNA, 25 bp, Homo sapien
agtatgcagcggttccacagctcct

SEQ ID NO: 1103907 - DNA, 25 bp, Homo sapien
tcagagttgttagtctctggcagca

SEQ ID NO: 1103908 - DNA, 25 bp, Homo sapien
caatgagcctgtagaacgccgtggc

SEQ ID NO: 1103909 - DNA, 25 bp, Homo sapien
gtagaacgccgtggctcatccagtt

SEQ ID NO: 1103910 - DNA, 25 bp, Homo sapien
gccacaatgagcctgtagaacgccg

SEQ ID NO: 1103911 - DNA, 25 bp, Homo sapien
catttgtagtgacctagtgtgtctc

SEQ ID NO: 1103912 - DNA, 25 bp, Homo sapien
gtgacctagtgtgtctctccaaagg

SEQ ID NO: 1103913 - DNA, 25 bp, Homo sapien
agtgatagcggccagtgccaggttc

SEQ ID NO: 1103914 - DNA, 25 bp, Homo sapien
cttcagtggcccatttgtagtgacc

SEQ ID NO: 1103915 - DNA, 25 bp, Homo sapien
tataaataatacagaaagagacaaa

SEQ ID NO: 1103916 - DNA, 25 bp, Homo sapien
ataaataatacagaaagagacaaac

SEQ ID NO: 1103917 - DNA, 25 bp, Homo sapien
ctataaataatacagaaagagacaa

SEQ ID NO: 1103918 - DNA, 25 bp, Homo sapien
acctgcagtcctggtatgccatgtt

SEQ ID NO: 1103919 - DNA, 25 bp, Homo sapien
tctgcgttgtcacatgtaaaagcac

SEQ ID NO: 1103920 - DNA, 25 bp, Homo sapien
ttagaaagttctgcgttgtcacatg

SEQ ID NO: 1103921 - DNA, 25 bp, Homo sapien
cctggtatgccatgttagaaagttc

SEQ ID NO: 1103922 - DNA, 25 bp, Homo sapien
tcaagacctggaagctcttcgcttt

SEQ ID NO: 1103923 - DNA, 25 bp, Homo sapien
aatcaagacctggaagctcttcgct

SEQ ID NO: 1103924 - DNA, 25 bp, Homo sapien
atcaagacctggaagctcttcgctt

SEQ ID NO: 1103925 - DNA, 25 bp, Homo sapien
ccagaatgaatctggcagtatgcaa

SEQ ID NO: 1103926 - DNA, 25 bp, Homo sapien
catttaccaaccagagatttaggga

SEQ ID NO: 1103927 - DNA, 25 bp, Homo sapien
gatagtggatcataatctaggacat

SEQ ID NO: 1103928 - DNA, 25 bp, Homo sapien
taacacataatcagaggaggaaaga

SEQ ID NO: 1103929 - DNA, 25 bp, Homo sapien
ttgtggactgcggcacccctagatt

SEQ ID NO: 1103930 - DNA, 25 bp, Homo sapien
tggactgcggcacccctagatttat

SEQ ID NO: 1103931 - DNA, 25 bp, Homo sapien
gagtttgtggactgcggcaccccta

SEQ ID NO: 1103932 - DNA, 25 bp, Homo sapien
agtttgtggactgcggcacccctag

SEQ ID NO: 1103933 - DNA, 25 bp, Homo sapien
gtacagtgcaccagagctgcctgcc

SEQ ID NO: 1103934 - DNA, 25 bp, Homo sapien
tcctgggggaaatccccactcagcc

SEQ ID NO: 1103935 - DNA, 25 bp, Homo sapien
ctgagatgaaaagtacagtgcacca

SEQ ID NO: 1103936 - DNA, 25 bp, Homo sapien
cctcctgggggaaatccccactcag

SEQ ID NO: 1103937 - DNA, 25 bp, Homo sapien
ctgaaccagcaagccatcgatgcca

SEQ ID NO: 1103938 - DNA, 25 bp, Homo sapien
agcaagccatcgatgccaaccactg

SEQ ID NO: 1103939 - DNA, 25 bp, Homo sapien
gccatcgatgccaaccactggatga

SEQ ID NO: 1103940 - DNA, 25 bp, Homo sapien
gaaccagcaagccatcgatgccaac

SEQ ID NO: 1103941 - DNA, 25 bp, Homo sapien
ttgcacaggccagggggtgggccat

SEQ ID NO: 1103942 - DNA, 25 bp, Homo sapien
agaggcggccactgtcattctggct

SEQ ID NO: 1103943 - DNA, 25 bp, Homo sapien
ctcagggcactggtcacgctgcaat

SEQ ID NO: 1103944 - DNA, 25 bp, Homo sapien
gctgtcaagggccagtgttccactg

SEQ ID NO: 1103945 - DNA, 25 bp, Homo sapien
agcacaagccctgcaaagcgccagg

SEQ ID NO: 1103946 - DNA, 25 bp, Homo sapien
tgttggcagtcctcagaaaatcgac

SEQ ID NO: 1103947 - DNA, 25 bp, Homo sapien
gaaattcaggtacaggtgcagctta

SEQ ID NO: 1103948 - DNA, 25 bp, Homo sapien
gggtgattagggtgcagatctctca

SEQ ID NO: 1103949 - DNA, 25 bp, Homo sapien
tgtcaggctacagtcacctcaaggg

SEQ ID NO: 1103950 - DNA, 25 bp, Homo sapien
cagctgggaaaacacgagcttctcg

SEQ ID NO: 1103951 - DNA, 25 bp, Homo sapien
cttctcgagtttgtttggcttctga

SEQ ID NO: 1103952 - DNA, 25 bp, Homo sapien
tctgagcgatgtgggtgagcgcaag

SEQ ID NO: 1103953 - DNA, 25 bp, Homo sapien
tccacaacacaaccttgtttacttg

SEQ ID NO: 1103954 - DNA, 25 bp, Homo sapien
tagatttcttgatacttcatgaaaa

SEQ ID NO: 1103955 - DNA, 25 bp, Homo sapien
cagctgaagcaattattcccctgac

SEQ ID NO: 1103956 - DNA, 25 bp, Homo sapien
aaggccagctgaagcaattattccc

SEQ ID NO: 1103957 - DNA, 25 bp, Homo sapien
ataaaaagtaaaggccagctgaagc

SEQ ID NO: 1103958 - DNA, 25 bp, Homo sapien
actgcagcttggaaatgactcacaa

SEQ ID NO: 1103959 - DNA, 25 bp, Homo sapien
tctcaggactaatcacatggcctcg

SEQ ID NO: 1103960 - DNA, 25 bp, Homo sapien
gatagttgctgtggcctcaatgaga

SEQ ID NO: 1103961 - DNA, 25 bp, Homo sapien
caattgtcttccatgcagtgactca

SEQ ID NO: 1103962 - DNA, 25 bp, Homo sapien
gctgcacactgctcttcataaaaca

SEQ ID NO: 1103963 - DNA, 25 bp, Homo sapien
gaacagcgctgcacactgctcttca

SEQ ID NO: 1103964 - DNA, 25 bp, Homo sapien
gaagtgaaagcgctgtaatttcaca

SEQ ID NO: 1103965 - DNA, 25 bp, Homo sapien
atccactgaagtgaaagcgctgtaa

SEQ ID NO: 1103966 - DNA, 25 bp, Homo sapien
tatattttgccattgctgggtgtct

SEQ ID NO: 1103967 - DNA, 25 bp, Homo sapien
gatttaggatgccaaatctcagatg

SEQ ID NO: 1103968 - DNA, 25 bp, Homo sapien
gcgcattgaatgttcttgttccaac

SEQ ID NO: 1103969 - DNA, 25 bp, Homo sapien
tgagatcgccagtcagcgcattgaa

SEQ ID NO: 1103970 - DNA, 25 bp, Homo sapien
gccctggggacttaggctgctgcaa

SEQ ID NO: 1103971 - DNA, 25 bp, Homo sapien
cctctagaaactggcgtaggccctt

SEQ ID NO: 1103972 - DNA, 25 bp, Homo sapien
cttcccatgtttgtacgtcagcatg

SEQ ID NO: 1103973 - DNA, 25 bp, Homo sapien
tgtttgtacgtcagcatgccctggg

SEQ ID NO: 1103974 - DNA, 25 bp, Homo sapien
tgtcttcctagcgactggccacttt

SEQ ID NO: 1103975 - DNA, 25 bp, Homo sapien
ccttatagattaagatcttccttgc

SEQ ID NO: 1103976 - DNA, 25 bp, Homo sapien
tggacggactgtcttcctagcgact

SEQ ID NO: 1103977 - DNA, 25 bp, Homo sapien
tatccctggacggactgtcttccta

SEQ ID NO: 1103978 - DNA, 25 bp, Homo sapien
tgcactgggtcctgctggccaaacg

SEQ ID NO: 1103979 - DNA, 25 bp, Homo sapien
tcattttgcactgggtcctgctggc

SEQ ID NO: 1103980 - DNA, 25 bp, Homo sapien
actgggtcctgctggccaaacgtca

SEQ ID NO: 1103981 - DNA, 25 bp, Homo sapien
ctgggtcctgctggccaaacgtcat

SEQ ID NO: 1103982 - DNA, 25 bp, Homo sapien
tgtagtaccaggaaagctgacccct

SEQ ID NO: 1103983 - DNA, 25 bp, Homo sapien
tggtcccgatgtagtgcctcagaac

SEQ ID NO: 1103984 - DNA, 25 bp, Homo sapien
gaacataaattaactggtagcaccc

SEQ ID NO: 1103985 - DNA, 25 bp, Homo sapien
gataacactgatgtgcaccagattg

SEQ ID NO: 1103986 - DNA, 25 bp, Homo sapien
taactgggaaatcgtgagctggtct

SEQ ID NO: 1103987 - DNA, 25 bp, Homo sapien
actgggaaatcgtgagctggtctgc

SEQ ID NO: 1103988 - DNA, 25 bp, Homo sapien
cggtgtaactgggaaatcgtgagct

SEQ ID NO: 1103989 - DNA, 25 bp, Homo sapien
ctgcccggtgtaactgggaaatcgt

SEQ ID NO: 1103990 - DNA, 25 bp, Homo sapien
tccgcctcatttgcatgcagcttgg

SEQ ID NO: 1103991 - DNA, 25 bp, Homo sapien
gcctgctccagcaatttgaccccag

SEQ ID NO: 1103992 - DNA, 25 bp, Homo sapien
tgcagcttggccattgggctatgca

SEQ ID NO: 1103993 - DNA, 25 bp, Homo sapien
actggaggacaaagggccccgctct

SEQ ID NO: 1103994 - DNA, 25 bp, Homo sapien
ggctgctcctgccacggctagcgcg

SEQ ID NO: 1103995 - DNA, 25 bp, Homo sapien
agagagcgcggcgtgcgggctgctc

SEQ ID NO: 1103996 - DNA, 25 bp, Homo sapien
gcacgacactaattgggccgctgcc

SEQ ID NO: 1103997 - DNA, 25 bp, Homo sapien
tgctttctgcactcactcacaggcg

SEQ ID NO: 1103998 - DNA, 25 bp, Homo sapien
ttctgctctccagccgagaattcct

SEQ ID NO: 1103999 - DNA, 25 bp, Homo sapien
ggccggaagagtccgcaggccgact

SEQ ID NO: 1104000 - DNA, 25 bp, Homo sapien
aagttcgggccggaagagtccgcag

SEQ ID NO: 1104001 - DNA, 25 bp, Homo sapien
cggaagagtccgcaggccgactcac

SEQ ID NO: 1104002 - DNA, 25 bp, Homo sapien
ttcgggccggaagagtccgcaggcc

SEQ ID NO: 1104003 - DNA, 25 bp, Homo sapien
ctgggctctacgaaaacccggcgct

SEQ ID NO: 1104004 - DNA, 25 bp, Homo sapien
gtcccgtgagaagtcccgagagtgc

SEQ ID NO: 1104005 - DNA, 25 bp, Homo sapien
ctctttcagtccgtgggagctccac

SEQ ID NO: 1104006 - DNA, 25 bp, Homo sapien
gcgggagttgccctgtgcaaacttt

SEQ ID NO: 1104007 - DNA, 25 bp, Homo sapien
gttgagcagcttggccgcttcgtac

SEQ ID NO: 1104008 - DNA, 25 bp, Homo sapien
tcgtgcgctgactcagggctttgct

SEQ ID NO: 1104009 - DNA, 25 bp, Homo sapien
ccccgacagtgatcgtgcgctgact

SEQ ID NO: 1104010 - DNA, 25 bp, Homo sapien
ttcgtacaccccgacagtgatcgtg

SEQ ID NO: 1104011 - DNA, 25 bp, Homo sapien
atgggggacgcgcaagggccccact

SEQ ID NO: 1104012 - DNA, 25 bp, Homo sapien
cctcccttccgagacaggcagaaaa

SEQ ID NO: 1104013 - DNA, 25 bp, Homo sapien
agccaaggcgacctcccgggctggg

SEQ ID NO: 1104014 - DNA, 25 bp, Homo sapien
agcgcagaagcgcgggcgccctcaa

SEQ ID NO: 1104015 - DNA, 25 bp, Homo sapien
ggccagcgtcggtctccaagagcag

SEQ ID NO: 1104016 - DNA, 25 bp, Homo sapien
gccacatctctgtcgtcgtcctcgt

SEQ ID NO: 1104017 - DNA, 25 bp, Homo sapien
ctcgcagcaaaacgcctggatcagg

SEQ ID NO: 1104018 - DNA, 25 bp, Homo sapien
ttgctgacgcgcaggatgttgatgt

SEQ ID NO: 1104019 - DNA, 25 bp, Homo sapien
aacttgttaccctgacctgagtgaa

SEQ ID NO: 1104020 - DNA, 25 bp, Homo sapien
tcttcaaggtagttgggttccctgc

SEQ ID NO: 1104021 - DNA, 25 bp, Homo sapien
taaaggaattagtcacgggaggcag

SEQ ID NO: 1104022 - DNA, 25 bp, Homo sapien
taatcgggctgtcacttgactagac

SEQ ID NO: 1104023 - DNA, 25 bp, Homo sapien
aacccattgatccatgtagcgactt

SEQ ID NO: 1104024 - DNA, 25 bp, Homo sapien
gcaggatccttccattgagatgaat

SEQ ID NO: 1104025 - DNA, 25 bp, Homo sapien
acaaataagttgacttaaggcagga

SEQ ID NO: 1104026 - DNA, 25 bp, Homo sapien
catgtagcgactttcccggcaaaaa

SEQ ID NO: 1104027 - DNA, 25 bp, Homo sapien
tgcaaagtcatctatctccgggccc

SEQ ID NO: 1104028 - DNA, 25 bp, Homo sapien
tagttgaactcactcagccccttgg

SEQ ID NO: 1104029 - DNA, 25 bp, Homo sapien
taactgcttgagtaactacaaaggt

SEQ ID NO: 1104030 - DNA, 25 bp, Homo sapien
tctgtaatccttgcatcagtgtagg

SEQ ID NO: 1104031 - DNA, 25 bp, Homo sapien
ccaaaaatacccaaactatggctgc

SEQ ID NO: 1104032 - DNA, 25 bp, Homo sapien
tcaaatatgattaaccctttcggct

SEQ ID NO: 1104033 - DNA, 25 bp, Homo sapien
tcttttacttgagggcatataaacc

SEQ ID NO: 1104034 - DNA, 25 bp, Homo sapien
tgagaatttaatatctcatcaaaat

SEQ ID NO: 1104035 - DNA, 25 bp, Homo sapien
ccagtttattgtaggtattgtgttt

SEQ ID NO: 1104036 - DNA, 25 bp, Homo sapien
tattcataccagtttattgtaggta

SEQ ID NO: 1104037 - DNA, 25 bp, Homo sapien
taccagtttattgtaggtattgtgt

SEQ ID NO: 1104038 - DNA, 25 bp, Homo sapien
tcataccagtttattgtaggtattg

SEQ ID NO: 1104039 - DNA, 25 bp, Homo sapien
tttcttctgattgtatgtagtcatg

SEQ ID NO: 1104040 - DNA, 25 bp, Homo sapien
tctgattgtatgtagtcatgactag

SEQ ID NO: 1104041 - DNA, 25 bp, Homo sapien
tgtagtcatgactaggatgaaagac

SEQ ID NO: 1104042 - DNA, 25 bp, Homo sapien
tgtatgtagtcatgactaggatgaa

SEQ ID NO: 1104043 - DNA, 25 bp, Homo sapien
gagaaatatgcatcccttttggtgg

SEQ ID NO: 1104044 - DNA, 25 bp, Homo sapien
ggttctggtacacctcttcatggga

SEQ ID NO: 1104045 - DNA, 25 bp, Homo sapien
atgggaatccctgcaatttttgcag

SEQ ID NO: 1104046 - DNA, 25 bp, Homo sapien
tgtagtgatcacctgagttaacttg

SEQ ID NO: 1104047 - DNA, 25 bp, Homo sapien
tgcagtagatgatggctgagagccc

SEQ ID NO: 1104048 - DNA, 25 bp, Homo sapien
ccaacgtgttggtgctataagctgc

SEQ ID NO: 1104049 - DNA, 25 bp, Homo sapien
ttgatgtaagatctatataggcccc

SEQ ID NO: 1104050 - DNA, 25 bp, Homo sapien
tagcttacgtagtggaggatgtgcc

SEQ ID NO: 1104051 - DNA, 25 bp, Homo sapien
gctttttcgttctgcgatatgccca

SEQ ID NO: 1104052 - DNA, 25 bp, Homo sapien
ttcgttctgcgatatgcccagttcc

SEQ ID NO: 1104053 - DNA, 25 bp, Homo sapien
gcgatatgcccagttcccaaatcaa

SEQ ID NO: 1104054 - DNA, 25 bp, Homo sapien
tcatctgctttttcgttctgcgata

SEQ ID NO: 1104055 - DNA, 25 bp, Homo sapien
tgttcacataccatccaagaggcac

SEQ ID NO: 1104056 - DNA, 25 bp, Homo sapien
gaggcacataggctacccaagagag

SEQ ID NO: 1104057 - DNA, 25 bp, Homo sapien
tcagtggtacactccttgggcccaa

SEQ ID NO: 1104058 - DNA, 25 bp, Homo sapien
caagagagccttggattcagtggta

SEQ ID NO: 1104059 - DNA, 25 bp, Homo sapien
tgaaacggagtgaacatgagcccag

SEQ ID NO: 1104060 - DNA, 25 bp, Homo sapien
aatcttgctggacctcttaggctac

SEQ ID NO: 1104061 - DNA, 25 bp, Homo sapien
tactggattagggataggcacctct

SEQ ID NO: 1104062 - DNA, 25 bp, Homo sapien
gacccgttagggcttcaatgatgct

SEQ ID NO: 1104063 - DNA, 25 bp, Homo sapien
ttccgcaagcccaatctctaacagt

SEQ ID NO: 1104064 - DNA, 25 bp, Homo sapien
gagtaaggtactgcctcttcccatg

SEQ ID NO: 1104065 - DNA, 25 bp, Homo sapien
tctaacagtaaatcctgaagctcca

SEQ ID NO: 1104066 - DNA, 25 bp, Homo sapien
gaagctccacaacttggctccagag

SEQ ID NO: 1104067 - DNA, 25 bp, Homo sapien
gatctgcagatgctaacttcagtcc

SEQ ID NO: 1104068 - DNA, 25 bp, Homo sapien
gaaagcaaggctgcagaagtgatag

SEQ ID NO: 1104069 - DNA, 25 bp, Homo sapien
tgatagccagagtgttatccgactg

SEQ ID NO: 1104070 - DNA, 25 bp, Homo sapien
tgtctaggagccgaaactgtcttgt

SEQ ID NO: 1104071 - DNA, 25 bp, Homo sapien
gcaggtggcaggagttgctttcttt

SEQ ID NO: 1104072 - DNA, 25 bp, Homo sapien
ggagtggagccgtgattaaactcaa

SEQ ID NO: 1104073 - DNA, 25 bp, Homo sapien
gagtggagccgtgattaaactcaat

SEQ ID NO: 1104074 - DNA, 25 bp, Homo sapien
caggtggcaggagttgctttctttg

SEQ ID NO: 1104075 - DNA, 25 bp, Homo sapien
ttctagcactgtgcgaaaatcaggg

SEQ ID NO: 1104076 - DNA, 25 bp, Homo sapien
cactgtgcgaaaatcagggtttgaa

SEQ ID NO: 1104077 - DNA, 25 bp, Homo sapien
cctttcggtgaaatgcgagccaact

SEQ ID NO: 1104078 - DNA, 25 bp, Homo sapien
caggagcgcggaaagacccctttgt

SEQ ID NO: 1104079 - DNA, 25 bp, Homo sapien
aaaacgatctatccatgggtcaggg

SEQ ID NO: 1104080 - DNA, 25 bp, Homo sapien
tgtgtatgccccttctgtagctaga

SEQ ID NO: 1104081 - DNA, 25 bp, Homo sapien
caatggacagtcctaagcgggagga

SEQ ID NO: 1104082 - DNA, 25 bp, Homo sapien
ggttgcataaccttcccatgggtgg

SEQ ID NO: 1104083 - DNA, 25 bp, Homo sapien
catagtgaacttagccagtggccca

SEQ ID NO: 1104084 - DNA, 25 bp, Homo sapien
tgagacactttgaacatggttacgg

SEQ ID NO: 1104085 - DNA, 25 bp, Homo sapien
cagtggcccatcacataatacatgt

SEQ ID NO: 1104086 - DNA, 25 bp, Homo sapien
taacaataaggctcaacctgcccag

SEQ ID NO: 1104087 - DNA, 25 bp, Homo sapien
gcgtcagctccctctcacattttgg

SEQ ID NO: 1104088 - DNA, 25 bp, Homo sapien
gagggagatgcatatcaaactcacc

SEQ ID NO: 1104089 - DNA, 25 bp, Homo sapien
cacattttggttcctgagggagatg

SEQ ID NO: 1104090 - DNA, 25 bp, Homo sapien
ccacatacagcttttgaaacccttt

SEQ ID NO: 1104091 - DNA, 25 bp, Homo sapien
catgccaaagccctctcggggagaa

SEQ ID NO: 1104092 - DNA, 25 bp, Homo sapien
gggtcctctcactctcatgccaaag

SEQ ID NO: 1104093 - DNA, 25 bp, Homo sapien
tctggtttccagtcggactctcttt

SEQ ID NO: 1104094 - DNA, 25 bp, Homo sapien
gactgtcacatctgatgctaagtta

SEQ ID NO: 1104095 - DNA, 25 bp, Homo sapien
acaacatacagtcaagcccaaggtt

SEQ ID NO: 1104096 - DNA, 25 bp, Homo sapien
aactgttgacaacatacagtcaagc

SEQ ID NO: 1104097 - DNA, 25 bp, Homo sapien
ttgaaagagaaaagacactatgcta

SEQ ID NO: 1104098 - DNA, 25 bp, Homo sapien
gagaaaagacactatgctattatca

SEQ ID NO: 1104099 - DNA, 25 bp, Homo sapien
taattgattgtggatctccagtcgg

SEQ ID NO: 1104100 - DNA, 25 bp, Homo sapien
tccagtcggccagtgttccgaaaag

SEQ ID NO: 1104101 - DNA, 25 bp, Homo sapien
tgtggatctccagtcggccagtgtt

SEQ ID NO: 1104102 - DNA, 25 bp, Homo sapien
ccagtgttccgaaaagggcagtagc

SEQ ID NO: 1104103 - DNA, 25 bp, Homo sapien
taatttgctggtgcatccaataact

SEQ ID NO: 1104104 - DNA, 25 bp, Homo sapien
aatttgctggtgcatccaataactg

SEQ ID NO: 1104105 - DNA, 25 bp, Homo sapien
tgctcggatcccaaattgttttaaa

SEQ ID NO: 1104106 - DNA, 25 bp, Homo sapien
tgtggtttttgtgctcggatcccaa

SEQ ID NO: 1104107 - DNA, 25 bp, Homo sapien
gattcagagtctggttgtggccagc

SEQ ID NO: 1104108 - DNA, 25 bp, Homo sapien
gcaggattcagtgatcctgtctcag

SEQ ID NO: 1104109 - DNA, 25 bp, Homo sapien
tatactccccagctcattcacaggg

SEQ ID NO: 1104110 - DNA, 25 bp, Homo sapien
ctctgccgtacaggcaacattgtta

SEQ ID NO: 1104111 - DNA, 25 bp, Homo sapien
ttctgcatcttctgcagaccgaagg

SEQ ID NO: 1104112 - DNA, 25 bp, Homo sapien
gcatcttctgcagaccgaaggccat

SEQ ID NO: 1104113 - DNA, 25 bp, Homo sapien
tgcatcttctgcagaccgaaggcca

SEQ ID NO: 1104114 - DNA, 25 bp, Homo sapien
cattgaagtctttctgcatcttctg

SEQ ID NO: 1104115 - DNA, 25 bp, Homo sapien
ggatgccttttgaatcgggacttaa

SEQ ID NO: 1104116 - DNA, 25 bp, Homo sapien
cttttgaatcgggacttaatagcgg

SEQ ID NO: 1104117 - DNA, 25 bp, Homo sapien
atcgggacttaatagcgggcccttg

SEQ ID NO: 1104118 - DNA, 25 bp, Homo sapien
caaagagcattagcctggatgacgt

SEQ ID NO: 1104119 - DNA, 25 bp, Homo sapien
ttggctgcatcctgcccgattgtgc

SEQ ID NO: 1104120 - DNA, 25 bp, Homo sapien
ccttggctgcatcctgcccgattgt

SEQ ID NO: 1104121 - DNA, 25 bp, Homo sapien
ggcctggggaagtgcgctcatctac

SEQ ID NO: 1104122 - DNA, 25 bp, Homo sapien
gcgctcatctacaccaaaggtctgg

SEQ ID NO: 1104123 - DNA, 25 bp, Homo sapien
tcaggggaccttacgatcaagttgt

SEQ ID NO: 1104124 - DNA, 25 bp, Homo sapien
cgatcaagttgtcgatgcagataca

SEQ ID NO: 1104125 - DNA, 25 bp, Homo sapien
ccttacgatcaagttgtcgatgcag

SEQ ID NO: 1104126 - DNA, 25 bp, Homo sapien
gttgtcgatgcagatacataaatac

SEQ ID NO: 1104127 - DNA, 25 bp, Homo sapien
cagaggcaaggtgcgtgcggttgaa

SEQ ID NO: 1104128 - DNA, 25 bp, Homo sapien
cttgcaggcatggtgtccgtcagac

SEQ ID NO: 1104129 - DNA, 25 bp, Homo sapien
gtgcgtgcggttgaaaaagagatca

SEQ ID NO: 1104130 - DNA, 25 bp, Homo sapien
cttctaggtggaaagtggacctttg

SEQ ID NO: 1104131 - DNA, 25 bp, Homo sapien
ccactgtttcctcgtgatttgcttc

SEQ ID NO: 1104132 - DNA, 25 bp, Homo sapien
tcactccttttaccgaatcaccttc

SEQ ID NO: 1104133 - DNA, 25 bp, Homo sapien
caccactgtttcctcgtgatttgct

SEQ ID NO: 1104134 - DNA, 25 bp, Homo sapien
ctgtttcctcgtgatttgcttctgc

SEQ ID NO: 1104135 - DNA, 25 bp, Homo sapien
tcttgagaaagctaaatctgaggat

SEQ ID NO: 1104136 - DNA, 25 bp, Homo sapien
catttcgacacagtaacccacaggg

SEQ ID NO: 1104137 - DNA, 25 bp, Homo sapien
tgagtgttactcatggccagcgtca

SEQ ID NO: 1104138 - DNA, 25 bp, Homo sapien
cctggcaagtcgtgtttcatggaaa

SEQ ID NO: 1104139 - DNA, 25 bp, Homo sapien
tattggtgtatgctgctaggtaaaa

SEQ ID NO: 1104140 - DNA, 25 bp, Homo sapien
ttggtgtatgctgctaggtaaaaac

SEQ ID NO: 1104141 - DNA, 25 bp, Homo sapien
aaattattggtgtatgctgctaggt

SEQ ID NO: 1104142 - DNA, 25 bp, Homo sapien
aattattggtgtatgctgctaggta

SEQ ID NO: 1104143 - DNA, 25 bp, Homo sapien
caatcttgtcctgttcttcacactt

SEQ ID NO: 1104144 - DNA, 25 bp, Homo sapien
ccaatcttgtcctgttcttcacact

SEQ ID NO: 1104145 - DNA, 25 bp, Homo sapien
gccaatcttgtcctgttcttcacac

SEQ ID NO: 1104146 - DNA, 25 bp, Homo sapien
gagctgttgaactccaccttagctt

SEQ ID NO: 1104147 - DNA, 25 bp, Homo sapien
actgactttcacatgagaacctacc

SEQ ID NO: 1104148 - DNA, 25 bp, Homo sapien
tgagaacctacctgcctaaacccag

SEQ ID NO: 1104149 - DNA, 25 bp, Homo sapien
ctcctgagctgttgaactccacctt

SEQ ID NO: 1104150 - DNA, 25 bp, Homo sapien
agggtcaccagcacccgttgtgtag

SEQ ID NO: 1104151 - DNA, 25 bp, Homo sapien
gcctggtgcagggaatggagtagta

SEQ ID NO: 1104152 - DNA, 25 bp, Homo sapien
agtagtagtaactcctgggaacgtg

SEQ ID NO: 1104153 - DNA, 25 bp, Homo sapien
cccgttgtgtagttggcctggtgca

SEQ ID NO: 1104154 - DNA, 25 bp, Homo sapien
cttgccactctttagccatagcagt

SEQ ID NO: 1104155 - DNA, 25 bp, Homo sapien
gaaggaactgactcgctaaatcctg

SEQ ID NO: 1104156 - DNA, 25 bp, Homo sapien
agcctacctctttcatccctggact

SEQ ID NO: 1104157 - DNA, 25 bp, Homo sapien
ctctttagccatagcagttaacact

SEQ ID NO: 1104158 - DNA, 25 bp, Homo sapien
ccaactgggactgagtggaggcatt

SEQ ID NO: 1104159 - DNA, 25 bp, Homo sapien
taaggaagccgtgattcttgttcac

SEQ ID NO: 1104160 - DNA, 25 bp, Homo sapien
tggagtgaaactttgcccaactggg

SEQ ID NO: 1104161 - DNA, 25 bp, Homo sapien
tcttgttcacgtcgccgcagtggag

SEQ ID NO: 1104162 - DNA, 25 bp, Homo sapien
gcagccttggaatccgctgggcgct

SEQ ID NO: 1104163 - DNA, 25 bp, Homo sapien
tctagcagggaaatagcgggtcgca

SEQ ID NO: 1104164 - DNA, 25 bp, Homo sapien
cccagtgttcccagccgtggcttgt

SEQ ID NO: 1104165 - DNA, 25 bp, Homo sapien
gaaaggtctccccttgagctcgctt

SEQ ID NO: 1104166 - DNA, 25 bp, Homo sapien
tggtttcagaataggagcctccact

SEQ ID NO: 1104167 - DNA, 25 bp, Homo sapien
tggcagatttacagacagactagct

SEQ ID NO: 1104168 - DNA, 25 bp, Homo sapien
gcaattgaatagaacttggcctaca

SEQ ID NO: 1104169 - DNA, 25 bp, Homo sapien
gagtaaagtcaccagcattgcagtg

SEQ ID NO: 1104170 - DNA, 25 bp, Homo sapien
ccttgaaaagcgaagatgtacagac

SEQ ID NO: 1104171 - DNA, 25 bp, Homo sapien
tccacttgattgtaagacactgcca

SEQ ID NO: 1104172 - DNA, 25 bp, Homo sapien
tagacatgtggtaagcctctctgaa

SEQ ID NO: 1104173 - DNA, 25 bp, Homo sapien
gaaaccctactctgtatttgagaaa

SEQ ID NO: 1104174 - DNA, 25 bp, Homo sapien
caagagctgaactgattgggaggaa

SEQ ID NO: 1104175 - DNA, 25 bp, Homo sapien
cctaggctgccaagagggatttctg

SEQ ID NO: 1104176 - DNA, 25 bp, Homo sapien
tataggtgtgcattatcatgctggc

SEQ ID NO: 1104177 - DNA, 25 bp, Homo sapien
ctttccagaaaaagattgcagcaga

SEQ ID NO: 1104178 - DNA, 25 bp, Homo sapien
agtttcccaagttcccgcaatcgca

SEQ ID NO: 1104179 - DNA, 25 bp, Homo sapien
ttggtcccttgtgtcaaaatgcctg

SEQ ID NO: 1104180 - DNA, 25 bp, Homo sapien
cgcaatcgcaatcgacaaaagtcag

SEQ ID NO: 1104181 - DNA, 25 bp, Homo sapien
taaccagacctcagggaatagtttg

SEQ ID NO: 1104182 - DNA, 25 bp, Homo sapien
gtctgccccaacctttgccccagaa

SEQ ID NO: 1104183 - DNA, 25 bp, Homo sapien
gccccagtgctactgcctgcatctg

SEQ ID NO: 1104184 - DNA, 25 bp, Homo sapien
aaggcagcgtgcctggttcagcagg

SEQ ID NO: 1104185 - DNA, 25 bp, Homo sapien
tctggacttcccacaatctagcaac

SEQ ID NO: 1104186 - DNA, 25 bp, Homo sapien
aaacctaacttccctgatatcactg

SEQ ID NO: 1104187 - DNA, 25 bp, Homo sapien
acctaacttccctgatatcactgat

SEQ ID NO: 1104188 - DNA, 25 bp, Homo sapien
cctaacttccctgatatcactgatg

SEQ ID NO: 1104189 - DNA, 25 bp, Homo sapien
aacctaacttccctgatatcactga

SEQ ID NO: 1104190 - DNA, 25 bp, Homo sapien
taatgcaaggtctctactaggtttc

SEQ ID NO: 1104191 - DNA, 25 bp, Homo sapien
aggatggaaaacccaggatactcac

SEQ ID NO: 1104192 - DNA, 25 bp, Homo sapien
tactaggtttcattgctctgaaaga

SEQ ID NO: 1104193 - DNA, 25 bp, Homo sapien
tacgatcagctgattgaagtataat

SEQ ID NO: 1104194 - DNA, 25 bp, Homo sapien
acactcctttggaagggcttcaaga

SEQ ID NO: 1104195 - DNA, 25 bp, Homo sapien
ggtaatctgctcagcatggaaattg

SEQ ID NO: 1104196 - DNA, 25 bp, Homo sapien
gtaatctgctcagcatggaaattgt

SEQ ID NO: 1104197 - DNA, 25 bp, Homo sapien
tatatatggcaataaagacttggat

SEQ ID NO: 1104198 - DNA, 25 bp, Homo sapien
acagagtgtccctcagggaaaaggt

SEQ ID NO: 1104199 - DNA, 25 bp, Homo sapien
ggcacagagtgtccctcagggaaaa

SEQ ID NO: 1104200 - DNA, 25 bp, Homo sapien
atatggcaataaagacttggatggg

SEQ ID NO: 1104201 - DNA, 25 bp, Homo sapien
accctctctggcacttcagcaaagg

SEQ ID NO: 1104202 - DNA, 25 bp, Homo sapien
caaaggacgaagtttgtctccccag

SEQ ID NO: 1104203 - DNA, 25 bp, Homo sapien
catggtaaccgccagggccctcatc

SEQ ID NO: 1104204 - DNA, 25 bp, Homo sapien
tggtaaccgccagggccctcatctg

SEQ ID NO: 1104205 - DNA, 25 bp, Homo sapien
gtttttttatatcctctgagtgtag

SEQ ID NO: 1104206 - DNA, 25 bp, Homo sapien
tcatctgccagatggtttttttata

SEQ ID NO: 1104207 - DNA, 25 bp, Homo sapien
gtctccccggctctgctctgcctca

SEQ ID NO: 1104208 - DNA, 25 bp, Homo sapien
cccagtctccccggctctgctctgc

SEQ ID NO: 1104209 - DNA, 25 bp, Homo sapien
cagtctccccggctctgctctgcct

SEQ ID NO: 1104210 - DNA, 25 bp, Homo sapien
tctccccggctctgctctgcctcac

SEQ ID NO: 1104211 - DNA, 25 bp, Homo sapien
gctgtcaggttcctaccctcggaaa

SEQ ID NO: 1104212 - DNA, 25 bp, Homo sapien
cactagaagcctcagacaccctatg

SEQ ID NO: 1104213 - DNA, 25 bp, Homo sapien
cctcctgagtctgggccaagctggt

SEQ ID NO: 1104214 - DNA, 25 bp, Homo sapien
gacaccctatgattatcgaagagaa

SEQ ID NO: 1104215 - DNA, 25 bp, Homo sapien
cacaagatgagggacggatttacct

SEQ ID NO: 1104216 - DNA, 25 bp, Homo sapien
ctgggcaggtgtagaacaagtcaga

SEQ ID NO: 1104217 - DNA, 25 bp, Homo sapien
gatgaagcagtatcaactcagtgct

SEQ ID NO: 1104218 - DNA, 25 bp, Homo sapien
cagtgcttgtattttcgtgatgaaa

SEQ ID NO: 1104219 - DNA, 25 bp, Homo sapien
ctaagaaacatgagagtgctcctgt

SEQ ID NO: 1104220 - DNA, 25 bp, Homo sapien
cctgcatgtattcatttggccagat

SEQ ID NO: 1104221 - DNA, 25 bp, Homo sapien
caagtggaattagtccttttgttct

SEQ ID NO: 1104222 - DNA, 25 bp, Homo sapien
tccttcatctctcacaagtggaatt

SEQ ID NO: 1104223 - DNA, 25 bp, Homo sapien
cacacaagtagggatgacagcatcg

SEQ ID NO: 1104224 - DNA, 25 bp, Homo sapien
tgatatgaacccttgactagcccca

SEQ ID NO: 1104225 - DNA, 25 bp, Homo sapien
tacaagtgacctgtggatggtaccc

SEQ ID NO: 1104226 - DNA, 25 bp, Homo sapien
tattcctgagacgatggccattgtc

SEQ ID NO: 1104227 - DNA, 25 bp, Homo sapien
gatggtgacagcgaagtagtggaga

SEQ ID NO: 1104228 - DNA, 25 bp, Homo sapien
catcaggttcaggaaagtagggagt

SEQ ID NO: 1104229 - DNA, 25 bp, Homo sapien
tacatagatattgtccatcaggttc

SEQ ID NO: 1104230 - DNA, 25 bp, Homo sapien
tgaaggatggatagttggatgaggg

SEQ ID NO: 1104231 - DNA, 25 bp, Homo sapien
gagcccacaaaaggctctagaagca

SEQ ID NO: 1104232 - DNA, 25 bp, Homo sapien
agcagagtcagcttcaactcctgca

SEQ ID NO: 1104233 - DNA, 25 bp, Homo sapien
ttggcactgctaacacaggagccca

SEQ ID NO: 1104234 - DNA, 25 bp, Homo sapien
aaaaggctctagaagcacgggcagg

SEQ ID NO: 1104235 - DNA, 25 bp, Homo sapien
cctccagaagaaggatgagagccca

SEQ ID NO: 1104236 - DNA, 25 bp, Homo sapien
tgtaactgatgaggtcgctgccctg

SEQ ID NO: 1104237 - DNA, 25 bp, Homo sapien
ctccagaagaaggatgagagcccag

SEQ ID NO: 1104238 - DNA, 25 bp, Homo sapien
ctcctccagaagaaggatgagagcc

SEQ ID NO: 1104239 - DNA, 25 bp, Homo sapien
ttctcacccaaatcacctgacgtca

SEQ ID NO: 1104240 - DNA, 25 bp, Homo sapien
gtcatgctgagatcgctggaactgg

SEQ ID NO: 1104241 - DNA, 25 bp, Homo sapien
cagtcatgctgagatcgctggaact

SEQ ID NO: 1104242 - DNA, 25 bp, Homo sapien
tcacctgacgtcaccaaaatgagcc

SEQ ID NO: 1104243 - DNA, 25 bp, Homo sapien
tcctcataggcaaaaagtctgtagc

SEQ ID NO: 1104244 - DNA, 25 bp, Homo sapien
ttcatgattcaagaaggttgctgaa

SEQ ID NO: 1104245 - DNA, 25 bp, Homo sapien
agtctgtagctagtcagtctaggac

SEQ ID NO: 1104246 - DNA, 25 bp, Homo sapien
cgtgtggtgctccaaagtgtcaagg

SEQ ID NO: 1104247 - DNA, 25 bp, Homo sapien
tgtgttctcatccatatctcatctt

SEQ ID NO: 1104248 - DNA, 25 bp, Homo sapien
gttctcatccatatctcatcttaaa

SEQ ID NO: 1104249 - DNA, 25 bp, Homo sapien
aacaaacatgaagatagagttgata

SEQ ID NO: 1104250 - DNA, 25 bp, Homo sapien
catgaagatagagttgatatggttt

SEQ ID NO: 1104251 - DNA, 25 bp, Homo sapien
tccaagatgactagtcaaagggcgg

SEQ ID NO: 1104252 - DNA, 25 bp, Homo sapien
cacaaaaccggtaagtagcagagcc

SEQ ID NO: 1104253 - DNA, 25 bp, Homo sapien
gctgggaaattaatggactcgggac

SEQ ID NO: 1104254 - DNA, 25 bp, Homo sapien
tctgattcttgcgtgggcagcagga

SEQ ID NO: 1104255 - DNA, 25 bp, Homo sapien
cagcccctgaaatgacgaccacgtg

SEQ ID NO: 1104256 - DNA, 25 bp, Homo sapien
tgacgaccacgtgctttgcttttgc

SEQ ID NO: 1104257 - DNA, 25 bp, Homo sapien
gaaatgacgaccacgtgctttgctt

SEQ ID NO: 1104258 - DNA, 25 bp, Homo sapien
cctgaaatgacgaccacgtgctttg

SEQ ID NO: 1104259 - DNA, 25 bp, Homo sapien
catgacctccggcttgtctgaaggg

SEQ ID NO: 1104260 - DNA, 25 bp, Homo sapien
ccagcagggcatcacattcgatggt

SEQ ID NO: 1104261 - DNA, 25 bp, Homo sapien
cccagaaaagcgtgggcagaggaca

SEQ ID NO: 1104262 - DNA, 25 bp, Homo sapien
ggtgccgcccatggatattctgtca

SEQ ID NO: 1104263 - DNA, 25 bp, Homo sapien
aagggtgagctgtctgtcaacctcc

SEQ ID NO: 1104264 - DNA, 25 bp, Homo sapien
cagaaaggcgggatccaagtttttg

SEQ ID NO: 1104265 - DNA, 25 bp, Homo sapien
cacacccggcaagtttcccaactgg

SEQ ID NO: 1104266 - DNA, 25 bp, Homo sapien
aaccacagggcgtgaggttgcggca

SEQ ID NO: 1104267 - DNA, 25 bp, Homo sapien
gggtacaccacagggggagtatgtg

SEQ ID NO: 1104268 - DNA, 25 bp, Homo sapien
ctgcggggtacaccacagggggagt

SEQ ID NO: 1104269 - DNA, 25 bp, Homo sapien
ggtacaccacagggggagtatgtgc

SEQ ID NO: 1104270 - DNA, 25 bp, Homo sapien
cggggtacaccacagggggagtatg

SEQ ID NO: 1104271 - DNA, 25 bp, Homo sapien
cattttcatgaccagcaaggggttc

SEQ ID NO: 1104272 - DNA, 25 bp, Homo sapien
gaggtggtctccatgttaaattcgg

SEQ ID NO: 1104273 - DNA, 25 bp, Homo sapien
gtcactggcactcccttggcagaca

SEQ ID NO: 1104274 - DNA, 25 bp, Homo sapien
gggttcaggaagcatcctaccacag

SEQ ID NO: 1104275 - DNA, 25 bp, Homo sapien
taaattgctgcgtgacatatactaa

SEQ ID NO: 1104276 - DNA, 25 bp, Homo sapien
ggcctttagtaatgaatgtaatgag

SEQ ID NO: 1104277 - DNA, 25 bp, Homo sapien
tatttcacatcctgtaagtgcttaa

SEQ ID NO: 1104278 - DNA, 25 bp, Homo sapien
cattggcatttgaagaggagaacaa

SEQ ID NO: 1104279 - DNA, 25 bp, Homo sapien
tgcacatcaccgacagcaagagtgg

SEQ ID NO: 1104280 - DNA, 25 bp, Homo sapien
tctgcagcgccacgttatagcccgg

SEQ ID NO: 1104281 - DNA, 25 bp, Homo sapien
gtggcgacggcaaccgcgctctgca

SEQ ID NO: 1104282 - DNA, 25 bp, Homo sapien
aaaatacctactgccagttgctggg

SEQ ID NO: 1104283 - DNA, 25 bp, Homo sapien
tttaccaggatcacattctgggtca

SEQ ID NO: 1104284 - DNA, 25 bp, Homo sapien
cacattcttctcaaatggaatgttt

SEQ ID NO: 1104285 - DNA, 25 bp, Homo sapien
ggaatgtttaccaggatcacattct

SEQ ID NO: 1104286 - DNA, 25 bp, Homo sapien
caaatggaatgtttaccaggatcac

SEQ ID NO: 1104287 - DNA, 25 bp, Homo sapien
gtttttcacatccatttgtactgtt

SEQ ID NO: 1104288 - DNA, 25 bp, Homo sapien
gagctggctttaggtggttggtgca

SEQ ID NO: 1104289 - DNA, 25 bp, Homo sapien
attgctataatgatatcactcctgg

SEQ ID NO: 1104290 - DNA, 25 bp, Homo sapien
taatctacttctaattgctataatg

SEQ ID NO: 1104291 - DNA, 25 bp, Homo sapien
agttttctgttgtaggagcacccac

SEQ ID NO: 1104292 - DNA, 25 bp, Homo sapien
ttagttttctgttgtaggagcaccc

SEQ ID NO: 1104293 - DNA, 25 bp, Homo sapien
ttttctgttgtaggagcacccactt

SEQ ID NO: 1104294 - DNA, 25 bp, Homo sapien
gcacccacttcaaagtatcaatgtt

SEQ ID NO: 1104295 - DNA, 25 bp, Homo sapien
gaatatttaggacacgctcaccact

SEQ ID NO: 1104296 - DNA, 25 bp, Homo sapien
caagcatataggaagtactcagggc

SEQ ID NO: 1104297 - DNA, 25 bp, Homo sapien
catgcccgaggttatactagtgaca

SEQ ID NO: 1104298 - DNA, 25 bp, Homo sapien
gcataagtgggatttaggccctcaa

SEQ ID NO: 1104299 - DNA, 25 bp, Homo sapien
caaactgcatccaagtgcagtttcc

SEQ ID NO: 1104300 - DNA, 25 bp, Homo sapien
accttcaaactgcatccaagtgcag

SEQ ID NO: 1104301 - DNA, 25 bp, Homo sapien
tcctggatgaatcaactccaccttc

SEQ ID NO: 1104302 - DNA, 25 bp, Homo sapien
ttcctgtggactccaattgctatgt

SEQ ID NO: 1104303 - DNA, 25 bp, Homo sapien
gaatgcaactcccatgtaaatcgag

SEQ ID NO: 1104304 - DNA, 25 bp, Homo sapien
tattccttcatcaatgacaacgcag

SEQ ID NO: 1104305 - DNA, 25 bp, Homo sapien
tgtttcggaactttatcaagaattg

SEQ ID NO: 1104306 - DNA, 25 bp, Homo sapien
tgttcagcgcttcgaaatattcctt

SEQ ID NO: 1104307 - DNA, 25 bp, Homo sapien
caggtacggaaggatgactagagct

SEQ ID NO: 1104308 - DNA, 25 bp, Homo sapien
tattgagtatacaagccctgggagt

SEQ ID NO: 1104309 - DNA, 25 bp, Homo sapien
tacagccaatctcctacaggtacgg

SEQ ID NO: 1104310 - DNA, 25 bp, Homo sapien
ccctgggagtgtgcgttttagatac

SEQ ID NO: 1104311 - DNA, 25 bp, Homo sapien
gcaggttccgcacccaaccatggat

SEQ ID NO: 1104312 - DNA, 25 bp, Homo sapien
tattatagtcagtcctctgtatccg

SEQ ID NO: 1104313 - DNA, 25 bp, Homo sapien
ggttccgcacccaaccatggattgg

SEQ ID NO: 1104314 - DNA, 25 bp, Homo sapien
gcacccaaccatggattggaaatat

SEQ ID NO: 1104315 - DNA, 25 bp, Homo sapien
gccacaaagagtccattccgacagc

SEQ ID NO: 1104316 - DNA, 25 bp, Homo sapien
tgccacaaagagtccattccgacag

SEQ ID NO: 1104317 - DNA, 25 bp, Homo sapien
agagtccattccgacagccttatga

SEQ ID NO: 1104318 - DNA, 25 bp, Homo sapien
gtccattccgacagccttatgatct

SEQ ID NO: 1104319 - DNA, 25 bp, Homo sapien
gaagggtgtgtgacttcattcttac

SEQ ID NO: 1104320 - DNA, 25 bp, Homo sapien
tccttaagaggaagggtgtgtgact

SEQ ID NO: 1104321 - DNA, 25 bp, Homo sapien
ggaagggtgtgtgacttcattctta

SEQ ID NO: 1104322 - DNA, 25 bp, Homo sapien
agaggaagggtgtgtgacttcattc

SEQ ID NO: 1104323 - DNA, 25 bp, Homo sapien
tacatttcaaggcccgttccaactc

SEQ ID NO: 1104324 - DNA, 25 bp, Homo sapien
tctgggtagtagagcttctctgatt

SEQ ID NO: 1104325 - DNA, 25 bp, Homo sapien
caactcttctgggtagtagagcttc

SEQ ID NO: 1104326 - DNA, 25 bp, Homo sapien
tcaaggcccgttccaactcttctgg

SEQ ID NO: 1104327 - DNA, 25 bp, Homo sapien
gctcccagacctgaaggacactggt

SEQ ID NO: 1104328 - DNA, 25 bp, Homo sapien
taaccgtatactttcccagctgttg

SEQ ID NO: 1104329 - DNA, 25 bp, Homo sapien
tcccttaggaacactcaagctgcag

SEQ ID NO: 1104330 - DNA, 25 bp, Homo sapien
cacacactgggaaattctgaggaca

SEQ ID NO: 1104331 - DNA, 25 bp, Homo sapien
caggcccggtgatttggccaagacc

SEQ ID NO: 1104332 - DNA, 25 bp, Homo sapien
cggtgatttggccaagaccacaagg

SEQ ID NO: 1104333 - DNA, 25 bp, Homo sapien
gaaaagacagcaggcccggtgattt

SEQ ID NO: 1104334 - DNA, 25 bp, Homo sapien
acagcaggcccggtgatttggccaa

SEQ ID NO: 1104335 - DNA, 25 bp, Homo sapien
aggatatttagccagcagggtcccc

SEQ ID NO: 1104336 - DNA, 25 bp, Homo sapien
cacactggcatttagggtgcaactg

SEQ ID NO: 1104337 - DNA, 25 bp, Homo sapien
ggtgcaactgtctcacacattggag

SEQ ID NO: 1104338 - DNA, 25 bp, Homo sapien
aagggctcgttcaaaggactgttat

SEQ ID NO: 1104339 - DNA, 25 bp, Homo sapien
cataaagtatccaaatgtttcccga

SEQ ID NO: 1104340 - DNA, 25 bp, Homo sapien
gacctgcatgcttcataaagtatcc

SEQ ID NO: 1104341 - DNA, 25 bp, Homo sapien
ggagacctgcatgcttcataaagta

SEQ ID NO: 1104342 - DNA, 25 bp, Homo sapien
gcatgcttcataaagtatccaaatg

SEQ ID NO: 1104343 - DNA, 25 bp, Homo sapien
ctggtccctattgtaaggtcctgtg

SEQ ID NO: 1104344 - DNA, 25 bp, Homo sapien
tgctcctggtccctattgtaaggtc

SEQ ID NO: 1104345 - DNA, 25 bp, Homo sapien
ctgaatctccgagctgctgctcctg

SEQ ID NO: 1104346 - DNA, 25 bp, Homo sapien
gccaaaggcggcctgaatctccgag

SEQ ID NO: 1104347 - DNA, 25 bp, Homo sapien
ggccctgctgattgttgtccctgtc

SEQ ID NO: 1104348 - DNA, 25 bp, Homo sapien
ctgctgattgttgtccctgtcctct

SEQ ID NO: 1104349 - DNA, 25 bp, Homo sapien
ccctgctgattgttgtccctgtcct

SEQ ID NO: 1104350 - DNA, 25 bp, Homo sapien
acgggccctgctgattgttgtccct

SEQ ID NO: 1104351 - DNA, 25 bp, Homo sapien
gtcagaggagtcatccataagaagt

SEQ ID NO: 1104352 - DNA, 25 bp, Homo sapien
tgtggttgtcagaggagtcatccat

SEQ ID NO: 1104353 - DNA, 25 bp, Homo sapien
ggttgtcagaggagtcatccataag

SEQ ID NO: 1104354 - DNA, 25 bp, Homo sapien
cccgtgtggttgtcagaggagtcat

SEQ ID NO: 1104355 - DNA, 25 bp, Homo sapien
gacaaacagggaccacacgagcctc

SEQ ID NO: 1104356 - DNA, 25 bp, Homo sapien
cagtgagccgaggaagtcagtggca

SEQ ID NO: 1104357 - DNA, 25 bp, Homo sapien
aagctgatggccgtattgactggat

SEQ ID NO: 1104358 - DNA, 25 bp, Homo sapien
ggaagataagcgtccactgcagcac

SEQ ID NO: 1104359 - DNA, 25 bp, Homo sapien
cacagattagtgtgaaaatgtccct

SEQ ID NO: 1104360 - DNA, 25 bp, Homo sapien
aaatgtcccttcctgtactagggct

SEQ ID NO: 1104361 - DNA, 25 bp, Homo sapien
tccagctggcacagattagtgtgaa

SEQ ID NO: 1104362 - DNA, 25 bp, Homo sapien
gcatcctagcttctcagggttccaa

SEQ ID NO: 1104363 - DNA, 25 bp, Homo sapien
aattctgatgcctgagttcagccta

SEQ ID NO: 1104364 - DNA, 25 bp, Homo sapien
tataatctcatagctgatcgggccc

SEQ ID NO: 1104365 - DNA, 25 bp, Homo sapien
tgaaataagtgattccacgtgtgac

SEQ ID NO: 1104366 - DNA, 25 bp, Homo sapien
gtattgttcctacaagaaaatgtcc

SEQ ID NO: 1104367 - DNA, 25 bp, Homo sapien
caagagtacaagttgatgagttagc

SEQ ID NO: 1104368 - DNA, 25 bp, Homo sapien
tcagagttttgggaccaagagtaca

SEQ ID NO: 1104369 - DNA, 25 bp, Homo sapien
taatgtaagccacaagccaaatcag

SEQ ID NO: 1104370 - DNA, 25 bp, Homo sapien
gttagcatcgaaggagtgaaaagac

SEQ ID NO: 1104371 - DNA, 25 bp, Homo sapien
ataaggtcggcgatcaggcctggct

SEQ ID NO: 1104372 - DNA, 25 bp, Homo sapien
ggcacataggaatggaaatagcaga

SEQ ID NO: 1104373 - DNA, 25 bp, Homo sapien
gggatcagcagtacaaaaatcatag

SEQ ID NO: 1104374 - DNA, 25 bp, Homo sapien
aaatagcagatgatgagccctgtgc

SEQ ID NO: 1104375 - DNA, 25 bp, Homo sapien
gattcctgcagccactaatgcattg

SEQ ID NO: 1104376 - DNA, 25 bp, Homo sapien
cttctgacggtagcttttggaggaa

SEQ ID NO: 1104377 - DNA, 25 bp, Homo sapien
ggtttcttggaccagcggcatggac

SEQ ID NO: 1104378 - DNA, 25 bp, Homo sapien
aatgcctcatggctcttagctgtgg

SEQ ID NO: 1104379 - DNA, 25 bp, Homo sapien
gaaggcttgtgagctaggcagcctt

SEQ ID NO: 1104380 - DNA, 25 bp, Homo sapien
gcttgtgagctaggcagccttcttc

SEQ ID NO: 1104381 - DNA, 25 bp, Homo sapien
tggtttgactgactgttttgctaga

SEQ ID NO: 1104382 - DNA, 25 bp, Homo sapien
gactgttttgctagaaggcttgtga

SEQ ID NO: 1104383 - DNA, 25 bp, Homo sapien
ggcggcgtcacagtccaagtgaaca

SEQ ID NO: 1104384 - DNA, 25 bp, Homo sapien
caggtaacggaaggccattggaaat

SEQ ID NO: 1104385 - DNA, 25 bp, Homo sapien
accatcctttctccgcaggtaacgg

SEQ ID NO: 1104386 - DNA, 25 bp, Homo sapien
gctctgatgttcttgtatgcaccat

SEQ ID NO: 1104387 - DNA, 25 bp, Homo sapien
gaattaatctatggtgcatcaggcc

SEQ ID NO: 1104388 - DNA, 25 bp, Homo sapien
cattaagccgagtgagtggtagaca

SEQ ID NO: 1104389 - DNA, 25 bp, Homo sapien
tcatcttgtcttacattaagccgag

SEQ ID NO: 1104390 - DNA, 25 bp, Homo sapien
catcaggccttaaagacatggcagc

SEQ ID NO: 1104391 - DNA, 25 bp, Homo sapien
gaaatggatcccagccttaggtaaa

SEQ ID NO: 1104392 - DNA, 25 bp, Homo sapien
caatgagctcacctgaaaggaaacc

SEQ ID NO: 1104393 - DNA, 25 bp, Homo sapien
tctcgccaggatattgaagctctga

SEQ ID NO: 1104394 - DNA, 25 bp, Homo sapien
gacatctaagacgttttccggcata

SEQ ID NO: 1104395 - DNA, 25 bp, Homo sapien
gccgtgtagcacaacactaacaagc

SEQ ID NO: 1104396 - DNA, 25 bp, Homo sapien
gaattgttatcctagcttgctagac

SEQ ID NO: 1104397 - DNA, 25 bp, Homo sapien
gcatcacaaaaatcctacgaggtaa

SEQ ID NO: 1104398 - DNA, 25 bp, Homo sapien
gagaaaaacttatcaagccgtgtag

SEQ ID NO: 1104399 - DNA, 25 bp, Homo sapien
tggccaaatggactaaattttctct

SEQ ID NO: 1104400 - DNA, 25 bp, Homo sapien
ctggccaaatggactaaattttctc

SEQ ID NO: 1104401 - DNA, 25 bp, Homo sapien
gcctgcgctgccatgactgtcatct

SEQ ID NO: 1104402 - DNA, 25 bp, Homo sapien
catgcttatcaccttggcctgcgct

SEQ ID NO: 1104403 - DNA, 25 bp, Homo sapien
caaggtgagaatgtctctgcagaga

SEQ ID NO: 1104404 - DNA, 25 bp, Homo sapien
catcgttagtcaggtaagtggaccc

SEQ ID NO: 1104405 - DNA, 25 bp, Homo sapien
tagaatgaggattaaacggccaaga

SEQ ID NO: 1104406 - DNA, 25 bp, Homo sapien
tattgaccatctaggatatctgcaa

SEQ ID NO: 1104407 - DNA, 25 bp, Homo sapien
tgtagccttagtagaccagattagt

SEQ ID NO: 1104408 - DNA, 25 bp, Homo sapien
ggtagctgggtagatatcatacacc

SEQ ID NO: 1104409 - DNA, 25 bp, Homo sapien
tgggaggggcgggagccaccgccac

SEQ ID NO: 1104410 - DNA, 25 bp, Homo sapien
gaggggcgggagccaccgccaccgc

SEQ ID NO: 1104411 - DNA, 25 bp, Homo sapien
gggcgggagccaccgccaccgcggc

SEQ ID NO: 1104412 - DNA, 25 bp, Homo sapien
gtgggaggggcgggagccaccgcca

SEQ ID NO: 1104413 - DNA, 25 bp, Homo sapien
tacatccaatcttgtgcgaggacac

SEQ ID NO: 1104414 - DNA, 25 bp, Homo sapien
agttggatggtccatctagcacagg

SEQ ID NO: 1104415 - DNA, 25 bp, Homo sapien
agtatgaatgtcaccaaaatataga

SEQ ID NO: 1104416 - DNA, 25 bp, Homo sapien
tatagagcaaaccacttgtttgatg

SEQ ID NO: 1104417 - DNA, 25 bp, Homo sapien
taagcacattacttggacaacatca

SEQ ID NO: 1104418 - DNA, 25 bp, Homo sapien
tcattataaggctcctccataggca

SEQ ID NO: 1104419 - DNA, 25 bp, Homo sapien
caggagcatgggaacctttggcttt

SEQ ID NO: 1104420 - DNA, 25 bp, Homo sapien
ctttggaattgaccgttgtgagcat

SEQ ID NO: 1104421 - DNA, 25 bp, Homo sapien
tcaagatgggcttacatggccagtc

SEQ ID NO: 1104422 - DNA, 25 bp, Homo sapien
tttcattgttggctagtgtcactag

SEQ ID NO: 1104423 - DNA, 25 bp, Homo sapien
tctcagagacttaaatggagtaggg

SEQ ID NO: 1104424 - DNA, 25 bp, Homo sapien
ggtacggaagttgtcagtattcaag

SEQ ID NO: 1104425 - DNA, 25 bp, Homo sapien
tgttgtaacgatgactggatttttc

SEQ ID NO: 1104426 - DNA, 25 bp, Homo sapien
ggttatgttgtaacgatgactggat

SEQ ID NO: 1104427 - DNA, 25 bp, Homo sapien
tgtaacgatgactggatttttctgt

SEQ ID NO: 1104428 - DNA, 25 bp, Homo sapien
tattcaaggttatgttgtaacgatg

SEQ ID NO: 1104429 - DNA, 25 bp, Homo sapien
tttttacaactggagcatcctgtgc

SEQ ID NO: 1104430 - DNA, 25 bp, Homo sapien
tgctctcttccaaggctaagccctg

SEQ ID NO: 1104431 - DNA, 25 bp, Homo sapien
caaggctaagccctgccgaaagcta

SEQ ID NO: 1104432 - DNA, 25 bp, Homo sapien
tgccgaaagctaccctcagctcttt

SEQ ID NO: 1104433 - DNA, 25 bp, Homo sapien
gcttgtttgccacgtagatcctgac

SEQ ID NO: 1104434 - DNA, 25 bp, Homo sapien
caagtaatgtaagccaagtggcgct

SEQ ID NO: 1104435 - DNA, 25 bp, Homo sapien
taaatgtgtgcccatggtgagctga

SEQ ID NO: 1104436 - DNA, 25 bp, Homo sapien
taagagtttggctcgctgtcccaaa

SEQ ID NO: 1104437 - DNA, 25 bp, Homo sapien
gctacactccactgttccttcaaca

SEQ ID NO: 1104438 - DNA, 25 bp, Homo sapien
acactccactgttccttcaacacca

SEQ ID NO: 1104439 - DNA, 25 bp, Homo sapien
agctacactccactgttccttcaac

SEQ ID NO: 1104440 - DNA, 25 bp, Homo sapien
tacactccactgttccttcaacacc

SEQ ID NO: 1104441 - DNA, 25 bp, Homo sapien
ttaggaacagttctttgatctctcc

SEQ ID NO: 1104442 - DNA, 25 bp, Homo sapien
ttatgggggtataattcactgtgct

SEQ ID NO: 1104443 - DNA, 25 bp, Homo sapien
taattcactgtgctaaatacatcag

SEQ ID NO: 1104444 - DNA, 25 bp, Homo sapien
atatgcagttggctgtagcttgtcc

SEQ ID NO: 1104445 - DNA, 25 bp, Homo sapien
gcaacataaagcaccgttcctgtga

SEQ ID NO: 1104446 - DNA, 25 bp, Homo sapien
taaatagacttagctctcttgagct

SEQ ID NO: 1104447 - DNA, 25 bp, Homo sapien
ggcttagaagtgtatgctatgactt

SEQ ID NO: 1104448 - DNA, 25 bp, Homo sapien
gttcctgtgaaagtaagtcccttgc

SEQ ID NO: 1104449 - DNA, 25 bp, Homo sapien
tttctcatgttgcctctatggaaga

SEQ ID NO: 1104450 - DNA, 25 bp, Homo sapien
tctatggaagacatagcctctttgg

SEQ ID NO: 1104451 - DNA, 25 bp, Homo sapien
ttggtccagtctccaagtagggatt

SEQ ID NO: 1104452 - DNA, 25 bp, Homo sapien
tctttggtccagtctccaagtaggg

SEQ ID NO: 1104453 - DNA, 25 bp, Homo sapien
cttatgcattctagacccacactcc

SEQ ID NO: 1104454 - DNA, 25 bp, Homo sapien
ctcctaacacgcctttctaagacat

SEQ ID NO: 1104455 - DNA, 25 bp, Homo sapien
acactcctaacacgcctttctaaga

SEQ ID NO: 1104456 - DNA, 25 bp, Homo sapien
atgcattctagacccacactcctaa

SEQ ID NO: 1104457 - DNA, 25 bp, Homo sapien
ctctcctcttgtagtgatgagcggc

SEQ ID NO: 1104458 - DNA, 25 bp, Homo sapien
tcctcttgtagtgatgagcggctgg

SEQ ID NO: 1104459 - DNA, 25 bp, Homo sapien
gctggggctttccgcccagtggacc

SEQ ID NO: 1104460 - DNA, 25 bp, Homo sapien
ctggggctttccgcccagtggacct

SEQ ID NO: 1104461 - DNA, 25 bp, Homo sapien
ttagtgacaattcctggaacttggc

SEQ ID NO: 1104462 - DNA, 25 bp, Homo sapien
aagctcattgcaacacgggttcctg

SEQ ID NO: 1104463 - DNA, 25 bp, Homo sapien
tggatggcaacaggatgtcccagca

SEQ ID NO: 1104464 - DNA, 25 bp, Homo sapien
ccaagttgctggtgaagatcattag

SEQ ID NO: 1104465 - DNA, 25 bp, Homo sapien
aatgcccttgacaggaaaatatagt

SEQ ID NO: 1104466 - DNA, 25 bp, Homo sapien
cactgtcttcagcttatagatctgg

SEQ ID NO: 1104467 - DNA, 25 bp, Homo sapien
gagtgggaatgaattcattcgcaca

SEQ ID NO: 1104468 - DNA, 25 bp, Homo sapien
tccaggttcctgcacacaagctgtg

SEQ ID NO: 1104469 - DNA, 25 bp, Homo sapien
aatgccaactttgcagcgggcgcgg

SEQ ID NO: 1104470 - DNA, 25 bp, Homo sapien
ccggcacaaacttcaatgccaactt

SEQ ID NO: 1104471 - DNA, 25 bp, Homo sapien
caagatttgggacatcccggcacaa

SEQ ID NO: 1104472 - DNA, 25 bp, Homo sapien
cagcgggcgcggacgggaggttcgg

SEQ ID NO: 1104473 - DNA, 25 bp, Homo sapien
ctgtaaccacggacgtaacctctgg

SEQ ID NO: 1104474 - DNA, 25 bp, Homo sapien
tctgtaaccacggacgtaacctctg

SEQ ID NO: 1104475 - DNA, 25 bp, Homo sapien
ctctgtaaccacggacgtaacctct

SEQ ID NO: 1104476 - DNA, 25 bp, Homo sapien
tctctgtaaccacggacgtaacctc

SEQ ID NO: 1104477 - DNA, 25 bp, Homo sapien
atgtgatccttgagtgacgaaatca

SEQ ID NO: 1104478 - DNA, 25 bp, Homo sapien
tgtgatccttgagtgacgaaatcat

SEQ ID NO: 1104479 - DNA, 25 bp, Homo sapien
gaagctccggatccataggaaaccc

SEQ ID NO: 1104480 - DNA, 25 bp, Homo sapien
tcacagaacctaacagaagctccgg

SEQ ID NO: 1104481 - DNA, 25 bp, Homo sapien
gcttaaggccgccaaaagctactgt

SEQ ID NO: 1104482 - DNA, 25 bp, Homo sapien
ggatggcgttccctctgcttaaggc

SEQ ID NO: 1104483 - DNA, 25 bp, Homo sapien
gtagattcccaacccgtctcctcag

SEQ ID NO: 1104484 - DNA, 25 bp, Homo sapien
tgtgattccttctatgtctgcattc

SEQ ID NO: 1104485 - DNA, 25 bp, Homo sapien
tggtgttgtcctctactacatggtt

SEQ ID NO: 1104486 - DNA, 25 bp, Homo sapien
tgggtggtgttgtcctctactacat

SEQ ID NO: 1104487 - DNA, 25 bp, Homo sapien
gcttgcacatcctctgtgacttgtt

SEQ ID NO: 1104488 - DNA, 25 bp, Homo sapien
tttagtgacactgagtggactctga

SEQ ID NO: 1104489 - DNA, 25 bp, Homo sapien
tgacttgttcgtaagagttgctgat

SEQ ID NO: 1104490 - DNA, 25 bp, Homo sapien
gcagcaaatgactctgagactattt

SEQ ID NO: 1104491 - DNA, 25 bp, Homo sapien
tgttaactcctaaagactcccctga

SEQ ID NO: 1104492 - DNA, 25 bp, Homo sapien
taaagactcccctgacacaactcgc

SEQ ID NO: 1104493 - DNA, 25 bp, Homo sapien
ttaactcctaaagactcccctgaca

SEQ ID NO: 1104494 - DNA, 25 bp, Homo sapien
tcccctgacacaactcgcagttcca

SEQ ID NO: 1104495 - DNA, 25 bp, Homo sapien
ggctggggaagttgctgccacaagg

SEQ ID NO: 1104496 - DNA, 25 bp, Homo sapien
tgtagttcttgatttggcctccgtg

SEQ ID NO: 1104497 - DNA, 25 bp, Homo sapien
gatttggcctccgtgtcttccgcca

SEQ ID NO: 1104498 - DNA, 25 bp, Homo sapien
tcttgatttggcctccgtgtcttcc

SEQ ID NO: 1104499 - DNA, 25 bp, Homo sapien
gcagtggaattccaggtaggtctac

SEQ ID NO: 1104500 - DNA, 25 bp, Homo sapien
tcagtgcaagatttccagattgcct

SEQ ID NO: 1104501 - DNA, 25 bp, Homo sapien
ttttcagtgcaagatttccagattg

SEQ ID NO: 1104502 - DNA, 25 bp, Homo sapien
caagatttccagattgcctcctcct

SEQ ID NO: 1104503 - DNA, 25 bp, Homo sapien
ctttttcagtgcaagatttccagat

SEQ ID NO: 1104504 - DNA, 25 bp, Homo sapien
tcctgaagggtccacatttgcgggc

SEQ ID NO: 1104505 - DNA, 25 bp, Homo sapien
catttggtaactcgactggagcggg

SEQ ID NO: 1104506 - DNA, 25 bp, Homo sapien
ttccaaagaatgaattggcctcatt

SEQ ID NO: 1104507 - DNA, 25 bp, Homo sapien
gacaaacagaaacccggagagccca

SEQ ID NO: 1104508 - DNA, 25 bp, Homo sapien
ggagacacagtcacaactaggcaga

SEQ ID NO: 1104509 - DNA, 25 bp, Homo sapien
agagctgtgaaagtagccgccaaat

SEQ ID NO: 1104510 - DNA, 25 bp, Homo sapien
gtgaaagtagccgccaaatcccaca

SEQ ID NO: 1104511 - DNA, 25 bp, Homo sapien
tgaaagtagccgccaaatcccacag

SEQ ID NO: 1104512 - DNA, 25 bp, Homo sapien
gctgtgaaagtagccgccaaatccc

SEQ ID NO: 1104513 - DNA, 25 bp, Homo sapien
tgccataagtggtgttattagaggg

SEQ ID NO: 1104514 - DNA, 25 bp, Homo sapien
cattctgtggggacaatgatcctcg

SEQ ID NO: 1104515 - DNA, 25 bp, Homo sapien
tcgcctgtctgccataagtggtgtt

SEQ ID NO: 1104516 - DNA, 25 bp, Homo sapien
gcctgtctgccataagtggtgttat

SEQ ID NO: 1104517 - DNA, 25 bp, Homo sapien
atgcctgcctatttttttgtttttg

SEQ ID NO: 1104518 - DNA, 25 bp, Homo sapien
ctgcctcccaggtgcacactattct

SEQ ID NO: 1104519 - DNA, 25 bp, Homo sapien
caccatgcctgcctatttttttgtt

SEQ ID NO: 1104520 - DNA, 25 bp, Homo sapien
ctctgcctcccaggtgcacactatt

SEQ ID NO: 1104521 - DNA, 25 bp, Homo sapien
attaacccatggacagcaggcactt

SEQ ID NO: 1104522 - DNA, 25 bp, Homo sapien
ttctctggtagacgcttgttatcat

SEQ ID NO: 1104523 - DNA, 25 bp, Homo sapien
aggcacttctctggtagacgcttgt

SEQ ID NO: 1104524 - DNA, 25 bp, Homo sapien
ttaacccatggacagcaggcacttc

SEQ ID NO: 1104525 - DNA, 25 bp, Homo sapien
tctccagggcaacatcagggctctg

SEQ ID NO: 1104526 - DNA, 25 bp, Homo sapien
gcataatttgacactaacgggaaaa

SEQ ID NO: 1104527 - DNA, 25 bp, Homo sapien
taacgggaaaaagctcttgaggatg

SEQ ID NO: 1104528 - DNA, 25 bp, Homo sapien
tagtacgcttccaaatgcctccatt

SEQ ID NO: 1104529 - DNA, 25 bp, Homo sapien
gccttttccatactggcataatttg

SEQ ID NO: 1104530 - DNA, 25 bp, Homo sapien
tccttcaatgtctgtcgatgccact

SEQ ID NO: 1104531 - DNA, 25 bp, Homo sapien
gaaatcctaacagtccttcaatgtc

SEQ ID NO: 1104532 - DNA, 25 bp, Homo sapien
aatgtctgtcgatgccacttcttcc

SEQ ID NO: 1104533 - DNA, 25 bp, Homo sapien
agtccttcaatgtctgtcgatgcca

SEQ ID NO: 1104534 - DNA, 25 bp, Homo sapien
actgatcccacttcatgcacagcag

SEQ ID NO: 1104535 - DNA, 25 bp, Homo sapien
ttctccggtggaactgatcccactt

SEQ ID NO: 1104536 - DNA, 25 bp, Homo sapien
aactgatcccacttcatgcacagca

SEQ ID NO: 1104537 - DNA, 25 bp, Homo sapien
ggttgttctccggtggaactgatcc

SEQ ID NO: 1104538 - DNA, 25 bp, Homo sapien
ggttgcccacgcatcaaatatggag

SEQ ID NO: 1104539 - DNA, 25 bp, Homo sapien
aaacagcaggccacggttgtctagc

SEQ ID NO: 1104540 - DNA, 25 bp, Homo sapien
gagtggatctctgaccccttaagct

SEQ ID NO: 1104541 - DNA, 25 bp, Homo sapien
tgaggacattgccactaccaaccag

SEQ ID NO: 1104542 - DNA, 25 bp, Homo sapien
cccctagaaaagcaggacttgtcac

SEQ ID NO: 1104543 - DNA, 25 bp, Homo sapien
gccccctagaaaagcaggacttgtc

SEQ ID NO: 1104544 - DNA, 25 bp, Homo sapien
cctagaaaagcaggacttgtcacta

SEQ ID NO: 1104545 - DNA, 25 bp, Homo sapien
tagaaaagcaggacttgtcactaag

SEQ ID NO: 1104546 - DNA, 25 bp, Homo sapien
cttccactctgagagttaccggaag

SEQ ID NO: 1104547 - DNA, 25 bp, Homo sapien
cactctgagagttaccggaagctcg

SEQ ID NO: 1104548 - DNA, 25 bp, Homo sapien
ttccactctgagagttaccggaagc

SEQ ID NO: 1104549 - DNA, 25 bp, Homo sapien
tctgagagttaccggaagctcggca

SEQ ID NO: 1104550 - DNA, 25 bp, Homo sapien
tggacagaaagcctacagggtgcag

SEQ ID NO: 1104551 - DNA, 25 bp, Homo sapien
gacagaaagcctacagggtgcagtc

SEQ ID NO: 1104552 - DNA, 25 bp, Homo sapien
tttgagagatcagtcggtcacgatt

SEQ ID NO: 1104553 - DNA, 25 bp, Homo sapien
atcagtcggtcacgattggcaggga

SEQ ID NO: 1104554 - DNA, 25 bp, Homo sapien
tggactgtaccttgtgtaacattct

SEQ ID NO: 1104555 - DNA, 25 bp, Homo sapien
acaatggtaattgtgagacctaaag

SEQ ID NO: 1104556 - DNA, 25 bp, Homo sapien
gatgcccaggtaacatatgcttcag

SEQ ID NO: 1104557 - DNA, 25 bp, Homo sapien
agtgccccgagttcgtcctaatcga

SEQ ID NO: 1104558 - DNA, 25 bp, Homo sapien
tcctgcgagggctaagtgccccgag

SEQ ID NO: 1104559 - DNA, 25 bp, Homo sapien
catatttattactgctcgagctgag

SEQ ID NO: 1104560 - DNA, 25 bp, Homo sapien
cattagaaagggttatatttctctt

SEQ ID NO: 1104561 - DNA, 25 bp, Homo sapien
gcattagaaagggttatatttctct

SEQ ID NO: 1104562 - DNA, 25 bp, Homo sapien
tggcattagaaagggttatatttct

SEQ ID NO: 1104563 - DNA, 25 bp, Homo sapien
ttggcattagaaagggttatatttc

SEQ ID NO: 1104564 - DNA, 25 bp, Homo sapien
ccagaatatgcaagatagtcaacac

SEQ ID NO: 1104565 - DNA, 25 bp, Homo sapien
gaatatgcaagatagtcaacaccac

SEQ ID NO: 1104566 - DNA, 25 bp, Homo sapien
aatatttctaacctggttgtaagct

SEQ ID NO: 1104567 - DNA, 25 bp, Homo sapien
gcaagatagtcaacaccaccactga

SEQ ID NO: 1104568 - DNA, 25 bp, Homo sapien
tcaaatccttgaggggccagttcat

SEQ ID NO: 1104569 - DNA, 25 bp, Homo sapien
tctagaagagactcaaatccttgag

SEQ ID NO: 1104570 - DNA, 25 bp, Homo sapien
taggctgtataaagggtcatcatat

SEQ ID NO: 1104571 - DNA, 25 bp, Homo sapien
ggtcatcatatttcacaggctcttc

SEQ ID NO: 1104572 - DNA, 25 bp, Homo sapien
agacaacctgaaacgatagggctgc

SEQ ID NO: 1104573 - DNA, 25 bp, Homo sapien
ttggtaaagacaacctgaaacgata

SEQ ID NO: 1104574 - DNA, 25 bp, Homo sapien
attcaacttgaaaccacataaataa

SEQ ID NO: 1104575 - DNA, 25 bp, Homo sapien
ggctcttaaggtaagcagttgagta

SEQ ID NO: 1104576 - DNA, 25 bp, Homo sapien
gaaagcagttactgcgtgcacactc

SEQ ID NO: 1104577 - DNA, 25 bp, Homo sapien
cactcttaaaagtttggcaatgaag

SEQ ID NO: 1104578 - DNA, 25 bp, Homo sapien
agagatattatggatgctaagcccc

SEQ ID NO: 1104579 - DNA, 25 bp, Homo sapien
caatattccgggctccactgttgaa

SEQ ID NO: 1104580 - DNA, 25 bp, Homo sapien
gggtggagcccatcacatgcctatg

SEQ ID NO: 1104581 - DNA, 25 bp, Homo sapien
gagacactacaactgccttggatgg

SEQ ID NO: 1104582 - DNA, 25 bp, Homo sapien
gactgcagtggaaaaacatcttgac

SEQ ID NO: 1104583 - DNA, 25 bp, Homo sapien
tctttcttaatggatcatcatcagg

SEQ ID NO: 1104584 - DNA, 25 bp, Homo sapien
tctcgatgtgtgttatgctgtgctg

SEQ ID NO: 1104585 - DNA, 25 bp, Homo sapien
tcttcaagtaccctcttacttacag

SEQ ID NO: 1104586 - DNA, 25 bp, Homo sapien
gtttgtggctacatcacagtttcag

SEQ ID NO: 1104587 - DNA, 25 bp, Homo sapien
acagtttcagatagatccagtggga

SEQ ID NO: 1104588 - DNA, 25 bp, Homo sapien
actgtcatacagttgcatcttaatt

SEQ ID NO: 1104589 - DNA, 25 bp, Homo sapien
ccttcaaatcaactgagtgccttct

SEQ ID NO: 1104590 - DNA, 25 bp, Homo sapien
ggccggccctcagttaccttagcat

SEQ ID NO: 1104591 - DNA, 25 bp, Homo sapien
tgaactcagatacgctgaaataggc

SEQ ID NO: 1104592 - DNA, 25 bp, Homo sapien
tttaggagctccataccaggtacca

SEQ ID NO: 1104593 - DNA, 25 bp, Homo sapien
catctgtcttgcacgtttgtaaccg

SEQ ID NO: 1104594 - DNA, 25 bp, Homo sapien
aggaagcgccgcgcgtaggccgcac

SEQ ID NO: 1104595 - DNA, 25 bp, Homo sapien
gtctgggcctcaggtccgaaaggaa

SEQ ID NO: 1104596 - DNA, 25 bp, Homo sapien
agcgccgcgcgtaggccgcaccaga

SEQ ID NO: 1104597 - DNA, 25 bp, Homo sapien
gcgtaggccgcaccagactcgctat

SEQ ID NO: 1104598 - DNA, 25 bp, Homo sapien
cattatagagatgctgagtcaccat

SEQ ID NO: 1104599 - DNA, 25 bp, Homo sapien
aagaacattatagagatgctgagtc

SEQ ID NO: 1104600 - DNA, 25 bp, Homo sapien
aacattatagagatgctgagtcacc

SEQ ID NO: 1104601 - DNA, 25 bp, Homo sapien
gaacattatagagatgctgagtcac

SEQ ID NO: 1104602 - DNA, 25 bp, Homo sapien
ctccctggcatctagggagttcctc

SEQ ID NO: 1104603 - DNA, 25 bp, Homo sapien
ccctggcatctagggagttcctccg

SEQ ID NO: 1104604 - DNA, 25 bp, Homo sapien
ctggcatctagggagttcctccgca

SEQ ID NO: 1104605 - DNA, 25 bp, Homo sapien
tggcatctagggagttcctccgcat

SEQ ID NO: 1104606 - DNA, 25 bp, Homo sapien
tcctcaccgtttctctaaaactcat

SEQ ID NO: 1104607 - DNA, 25 bp, Homo sapien
gctgtaagaggagctcttctcctca

SEQ ID NO: 1104608 - DNA, 25 bp, Homo sapien
ctgctgtaagaggagctcttctcct

SEQ ID NO: 1104609 - DNA, 25 bp, Homo sapien
aggagctcttctcctcaccgtttct

SEQ ID NO: 1104610 - DNA, 25 bp, Homo sapien
gcaacaatcggtcaatgccttcaga

SEQ ID NO: 1104611 - DNA, 25 bp, Homo sapien
ttttcaggatgccttatactattat

SEQ ID NO: 1104612 - DNA, 25 bp, Homo sapien
accagcaacaatcggtcaatgcctt

SEQ ID NO: 1104613 - DNA, 25 bp, Homo sapien
caatcggtcaatgccttcagagtca

SEQ ID NO: 1104614 - DNA, 25 bp, Homo sapien
atctagaatgttccacagcacctac

SEQ ID NO: 1104615 - DNA, 25 bp, Homo sapien
attttatcctcatagcagtcctcag

SEQ ID NO: 1104616 - DNA, 25 bp, Homo sapien
ggagtgccaggattgtagtacgcat

SEQ ID NO: 1104617 - DNA, 25 bp, Homo sapien
tatttgtaacacttagaggagtgcc

SEQ ID NO: 1104618 - DNA, 25 bp, Homo sapien
cagtcctcagagttcattaatatta

SEQ ID NO: 1104619 - DNA, 25 bp, Homo sapien
cttctactcccagttcagaaaggag

SEQ ID NO: 1104620 - DNA, 25 bp, Homo sapien
ctgaacctaagagaggatctagcac

SEQ ID NO: 1104621 - DNA, 25 bp, Homo sapien
ctccacctgaacctaagagaggatc

SEQ ID NO: 1104622 - DNA, 25 bp, Homo sapien
taacgagtaaccacttctactccca

SEQ ID NO: 1104623 - DNA, 25 bp, Homo sapien
ctccacagggaataggaagcttcat

SEQ ID NO: 1104624 - DNA, 25 bp, Homo sapien
cataagcttagagagtcaccaggag

SEQ ID NO: 1104625 - DNA, 25 bp, Homo sapien
tgtgagataggagagcacatggcct

SEQ ID NO: 1104626 - DNA, 25 bp, Homo sapien
cattgcggaagctcaaaactgtata

SEQ ID NO: 1104627 - DNA, 25 bp, Homo sapien
tttggaggttttcctgattgtgaac

SEQ ID NO: 1104628 - DNA, 25 bp, Homo sapien
tttcttgttttaggcctgcatggct

SEQ ID NO: 1104629 - DNA, 25 bp, Homo sapien
tctttcttgttttaggcctgcatgg

SEQ ID NO: 1104630 - DNA, 25 bp, Homo sapien
cataagcgtaagtgtggtttttagc

SEQ ID NO: 1104631 - DNA, 25 bp, Homo sapien
ataggcatttgcatttttgccatca

SEQ ID NO: 1104632 - DNA, 25 bp, Homo sapien
aggaataggcatttgcatttttgcc

SEQ ID NO: 1104633 - DNA, 25 bp, Homo sapien
aaggaataggcatttgcatttttgc

SEQ ID NO: 1104634 - DNA, 25 bp, Homo sapien
ggcatttgcatttttgccatcattc

SEQ ID NO: 1104635 - DNA, 25 bp, Homo sapien
gagatagtatttcagaacaaccaac

SEQ ID NO: 1104636 - DNA, 25 bp, Homo sapien
caattgtatgacgtttttccaatcc

SEQ ID NO: 1104637 - DNA, 25 bp, Homo sapien
caactgacccaaaatctgtgaagat

SEQ ID NO: 1104638 - DNA, 25 bp, Homo sapien
gacgtttttccaatccaagagagat

SEQ ID NO: 1104639 - DNA, 25 bp, Homo sapien
tcaacatgatggatctgtgtttcct

SEQ ID NO: 1104640 - DNA, 25 bp, Homo sapien
gaaagaacctcatacaaactgtctc

SEQ ID NO: 1104641 - DNA, 25 bp, Homo sapien
caaactgtctccaaccagagtctca

SEQ ID NO: 1104642 - DNA, 25 bp, Homo sapien
tgtttcctgtgatgctcctctggcc

SEQ ID NO: 1104643 - DNA, 25 bp, Homo sapien
ttatctgcacactcagagacggcat

SEQ ID NO: 1104644 - DNA, 25 bp, Homo sapien
agcatcaaccagcattatctgcaca

SEQ ID NO: 1104645 - DNA, 25 bp, Homo sapien
caaccagcattatctgcacactcag

SEQ ID NO: 1104646 - DNA, 25 bp, Homo sapien
ccagcattatctgcacactcagaga

SEQ ID NO: 1104647 - DNA, 25 bp, Homo sapien
ccttgaaagctggaacgtgctttga

SEQ ID NO: 1104648 - DNA, 25 bp, Homo sapien
agctggaacgtgctttgaggacaca

SEQ ID NO: 1104649 - DNA, 25 bp, Homo sapien
gaggacacaggccaattcagcaaca

SEQ ID NO: 1104650 - DNA, 25 bp, Homo sapien
agacccagagcctcttgcggagagg

SEQ ID NO: 1104651 - DNA, 25 bp, Homo sapien
aaattgtgggtaatctaatgaaact

SEQ ID NO: 1104652 - DNA, 25 bp, Homo sapien
gaaattgtgggtaatctaatgaaac

SEQ ID NO: 1104653 - DNA, 25 bp, Homo sapien
tgtgagggtctgaaagtatatacct

SEQ ID NO: 1104654 - DNA, 25 bp, Homo sapien
ggcagaagccatgaacaccagaatc

SEQ ID NO: 1104655 - DNA, 25 bp, Homo sapien
ttgtaggtgctattcctttcttcgg

SEQ ID NO: 1104656 - DNA, 25 bp, Homo sapien
ttgttgtcccaaagggttagctgtg

SEQ ID NO: 1104657 - DNA, 25 bp, Homo sapien
atttttcgtcgatggcattcttcaa

SEQ ID NO: 1104658 - DNA, 25 bp, Homo sapien
agatttttcgtcgatggcattcttc

SEQ ID NO: 1104659 - DNA, 25 bp, Homo sapien
tcaagatttttcgtcgatggcattc

SEQ ID NO: 1104660 - DNA, 25 bp, Homo sapien
caagatttttcgtcgatggcattct

SEQ ID NO: 1104661 - DNA, 25 bp, Homo sapien
tctttgtgaagaccaacaaaagagg

SEQ ID NO: 1104662 - DNA, 25 bp, Homo sapien
ccctctttgtgaagaccaacaaaag

SEQ ID NO: 1104663 - DNA, 25 bp, Homo sapien
tgtgaagaccaacaaaagaggccat

SEQ ID NO: 1104664 - DNA, 25 bp, Homo sapien
ttccacgaacagctttttgccattt

SEQ ID NO: 1104665 - DNA, 25 bp, Homo sapien
tgtctaatctgtcctatggaatcct

SEQ ID NO: 1104666 - DNA, 25 bp, Homo sapien
gctcttctttgtctaatctgtccta

SEQ ID NO: 1104667 - DNA, 25 bp, Homo sapien
tgtcctatggaatccttgttagacc

SEQ ID NO: 1104668 - DNA, 25 bp, Homo sapien
tatggaatccttgttagacctcttt

SEQ ID NO: 1104669 - DNA, 25 bp, Homo sapien
tcccatatgccagcacctgaagggc

SEQ ID NO: 1104670 - DNA, 25 bp, Homo sapien
tttcccatatgccagcacctgaagg

SEQ ID NO: 1104671 - DNA, 25 bp, Homo sapien
attttcccatatgccagcacctgaa

SEQ ID NO: 1104672 - DNA, 25 bp, Homo sapien
tgaattttcccatatgccagcacct

SEQ ID NO: 1104673 - DNA, 25 bp, Homo sapien
catcttgttgacaccgcctaaactc

SEQ ID NO: 1104674 - DNA, 25 bp, Homo sapien
agcacctacatcttgttgacaccgc

SEQ ID NO: 1104675 - DNA, 25 bp, Homo sapien
cctacatcttgttgacaccgcctaa

SEQ ID NO: 1104676 - DNA, 25 bp, Homo sapien
tttctcagcacctacatcttgttga

SEQ ID NO: 1104677 - DNA, 25 bp, Homo sapien
tctattaagccacatttgttggcac

SEQ ID NO: 1104678 - DNA, 25 bp, Homo sapien
tcattctattaagccacatttgttg

SEQ ID NO: 1104679 - DNA, 25 bp, Homo sapien
tattaagccacatttgttggcacca

SEQ ID NO: 1104680 - DNA, 25 bp, Homo sapien
taagccacatttgttggcaccaaat

SEQ ID NO: 1104681 - DNA, 25 bp, Homo sapien
catgttgtaagcctctgtatttctc

SEQ ID NO: 1104682 - DNA, 25 bp, Homo sapien
tctccatgttgtaagcctctgtatt

SEQ ID NO: 1104683 - DNA, 25 bp, Homo sapien
ctccattctccatgttgtaagcctc

SEQ ID NO: 1104684 - DNA, 25 bp, Homo sapien
tgtaagcctctgtatttctctgtaa

SEQ ID NO: 1104685 - DNA, 25 bp, Homo sapien
aaaattggagttcggaggagccaag

SEQ ID NO: 1104686 - DNA, 25 bp, Homo sapien
tcaaaattggagttcggaggagcca

SEQ ID NO: 1104687 - DNA, 25 bp, Homo sapien
caaaattggagttcggaggagccaa

SEQ ID NO: 1104688 - DNA, 25 bp, Homo sapien
ggttgaggtggctgtcataatttct

SEQ ID NO: 1104689 - DNA, 25 bp, Homo sapien
aagtaaggcttagtggcttccatcc

SEQ ID NO: 1104690 - DNA, 25 bp, Homo sapien
tacttcatgcttcagagccctaggg

SEQ ID NO: 1104691 - DNA, 25 bp, Homo sapien
gccaggatctggtgcaagctactta

SEQ ID NO: 1104692 - DNA, 25 bp, Homo sapien
cttggcaggtggctagttagtcccc

SEQ ID NO: 1104693 - DNA, 25 bp, Homo sapien
tatcaagccttacaaaaatgactcc

SEQ ID NO: 1104694 - DNA, 25 bp, Homo sapien
gaaagctcttgagatttaactgaga

SEQ ID NO: 1104695 - DNA, 25 bp, Homo sapien
tcaccctagggtttatgaaagctct

SEQ ID NO: 1104696 - DNA, 25 bp, Homo sapien
tattaaatgccagtgtcaccctagg

SEQ ID NO: 1104697 - DNA, 25 bp, Homo sapien
tctatccctaatgttacctcttttc

SEQ ID NO: 1104698 - DNA, 25 bp, Homo sapien
actctatccctaatgttacctcttt

SEQ ID NO: 1104699 - DNA, 25 bp, Homo sapien
cactctatccctaatgttacctctt

SEQ ID NO: 1104700 - DNA, 25 bp, Homo sapien
tatccctaatgttacctcttttctc

SEQ ID NO: 1104701 - DNA, 25 bp, Homo sapien
tcctcagcctcaatatttccttgag

SEQ ID NO: 1104702 - DNA, 25 bp, Homo sapien
gcctcaatatttccttgagtcttcc

SEQ ID NO: 1104703 - DNA, 25 bp, Homo sapien
tcagcctcaatatttccttgagtct

SEQ ID NO: 1104704 - DNA, 25 bp, Homo sapien
cttcctcagcctcaatatttccttg

SEQ ID NO: 1104705 - DNA, 25 bp, Homo sapien
ggctgcatgagctcctgcttccgac

SEQ ID NO: 1104706 - DNA, 25 bp, Homo sapien
tacagtgtcatcacagaaaggcaga

SEQ ID NO: 1104707 - DNA, 25 bp, Homo sapien
cttctgttgcttttaactcaccggg

SEQ ID NO: 1104708 - DNA, 25 bp, Homo sapien
tgttctacaataacctgctgccttt

SEQ ID NO: 1104709 - DNA, 25 bp, Homo sapien
ggagagaagagttatggctgtctga

SEQ ID NO: 1104710 - DNA, 25 bp, Homo sapien
gcaacagcgacagcagttctaatta

SEQ ID NO: 1104711 - DNA, 25 bp, Homo sapien
cagcgacagcagttctaattaaagg

SEQ ID NO: 1104712 - DNA, 25 bp, Homo sapien
cagcagttctaattaaaggccgttt

SEQ ID NO: 1104713 - DNA, 25 bp, Homo sapien
ttggccggtggctttcctcagttca

SEQ ID NO: 1104714 - DNA, 25 bp, Homo sapien
tcttctccaaggttaccatcaaggt

SEQ ID NO: 1104715 - DNA, 25 bp, Homo sapien
agtttcttgaggaatgcggactgag

SEQ ID NO: 1104716 - DNA, 25 bp, Homo sapien
tccagcaagacaggtactacagttg

SEQ ID NO: 1104717 - DNA, 25 bp, Homo sapien
gctctgatgactgctccttcggagg

SEQ ID NO: 1104718 - DNA, 25 bp, Homo sapien
gaggccactgctggttcccttgaag

SEQ ID NO: 1104719 - DNA, 25 bp, Homo sapien
tgaccctcacaaagaacctcctctg

SEQ ID NO: 1104720 - DNA, 25 bp, Homo sapien
ccttcggaggttcctctgcttgctg

SEQ ID NO: 1104721 - DNA, 25 bp, Homo sapien
tttgaagtcatgtgggtcagacttc

SEQ ID NO: 1104722 - DNA, 25 bp, Homo sapien
aatttgaagtcatgtgggtcagact

SEQ ID NO: 1104723 - DNA, 25 bp, Homo sapien
aactgaaaaggcaatcgaataaaat

SEQ ID NO: 1104724 - DNA, 25 bp, Homo sapien
ggcaatcgaataaaatttgaagtca

SEQ ID NO: 1104725 - DNA, 25 bp, Homo sapien
tcattgtggtcaaattccattttgc

SEQ ID NO: 1104726 - DNA, 25 bp, Homo sapien
tgatggaactacaaagaacccccat

SEQ ID NO: 1104727 - DNA, 25 bp, Homo sapien
caaccagaaggagcacgagctatga

SEQ ID NO: 1104728 - DNA, 25 bp, Homo sapien
cagaaaatcccataaaatccctcaa

SEQ ID NO: 1104729 - DNA, 25 bp, Homo sapien
tgatgctgtgatcaaatccctgagt

SEQ ID NO: 1104730 - DNA, 25 bp, Homo sapien
ggtgaaggaatgtgcacagatttta

SEQ ID NO: 1104731 - DNA, 25 bp, Homo sapien
cagaggtgaaggaatgtgcacagat

SEQ ID NO: 1104732 - DNA, 25 bp, Homo sapien
gattttagctctcatgtagcccagg

SEQ ID NO: 1104733 - DNA, 25 bp, Homo sapien
gccagatggatcagggagccctgac

SEQ ID NO: 1104734 - DNA, 25 bp, Homo sapien
tgcagggtcttttctgtcaacagca

SEQ ID NO: 1104735 - DNA, 25 bp, Homo sapien
gaagtcagttcagagcaaatttgga

SEQ ID NO: 1104736 - DNA, 25 bp, Homo sapien
aatttgttcaagagtgggcacttgc

SEQ ID NO: 1104737 - DNA, 25 bp, Homo sapien
gcctcagtaatttgttcaagagtgg

SEQ ID NO: 1104738 - DNA, 25 bp, Homo sapien
ggcaggtaatccaagtttggccaat

SEQ ID NO: 1104739 - DNA, 25 bp, Homo sapien
taagtgaatattgtggcattctaaa

SEQ ID NO: 1104740 - DNA, 25 bp, Homo sapien
aagtgaatattgtggcattctaaag

SEQ ID NO: 1104741 - DNA, 25 bp, Homo sapien
gtaagtgaatattgtggcattctaa

SEQ ID NO: 1104742 - DNA, 25 bp, Homo sapien
gctaacaatgcaggttgaatagatt

SEQ ID NO: 1104743 - DNA, 25 bp, Homo sapien
gtgtttctgtgatcctcttaaattt

SEQ ID NO: 1104744 - DNA, 25 bp, Homo sapien
gttttctgtgatcctcgtaagtttg

SEQ ID NO: 1104745 - DNA, 25 bp, Homo sapien
tagattggctataagttggtgtagg

SEQ ID NO: 1104746 - DNA, 25 bp, Homo sapien
cagtaaaagcaaccagagtaagttt

SEQ ID NO: 1104747 - DNA, 25 bp, Homo sapien
tggagcaagaaggaaccgtaggcag

SEQ ID NO: 1104748 - DNA, 25 bp, Homo sapien
taggcatagggtctgctccttagca

SEQ ID NO: 1104749 - DNA, 25 bp, Homo sapien
cctaggcatagggtctgctccttag

SEQ ID NO: 1104750 - DNA, 25 bp, Homo sapien
gtgtttcaatgaccccacattgggc

SEQ ID NO: 1104751 - DNA, 25 bp, Homo sapien
gtttcaatgaccccacattgggcac

SEQ ID NO: 1104752 - DNA, 25 bp, Homo sapien
gaggtgtttcaatgaccccacattg

SEQ ID NO: 1104753 - DNA, 25 bp, Homo sapien
ggtgtttcaatgaccccacattggg

SEQ ID NO: 1104754 - DNA, 25 bp, Homo sapien
ttccattcttaattgggcactacag

SEQ ID NO: 1104755 - DNA, 25 bp, Homo sapien
tccattcttaattgggcactacagg

SEQ ID NO: 1104756 - DNA, 25 bp, Homo sapien
cttccattcttaattgggcactaca

SEQ ID NO: 1104757 - DNA, 25 bp, Homo sapien
aggcatggattgcaatcctagtcta

SEQ ID NO: 1104758 - DNA, 25 bp, Homo sapien
catggattgcaatcctagtctatga

SEQ ID NO: 1104759 - DNA, 25 bp, Homo sapien
gcatggattgcaatcctagtctatg

SEQ ID NO: 1104760 - DNA, 25 bp, Homo sapien
ggcatggattgcaatcctagtctat

SEQ ID NO: 1104761 - DNA, 25 bp, Homo sapien
gctttggctgcagacctcacagctt

SEQ ID NO: 1104762 - DNA, 25 bp, Homo sapien
ctttggctgcagacctcacagcttg

SEQ ID NO: 1104763 - DNA, 25 bp, Homo sapien
gcagacctcacagcttgtggatcaa

SEQ ID NO: 1104764 - DNA, 25 bp, Homo sapien
ggctgcagacctcacagcttgtgga

SEQ ID NO: 1104765 - DNA, 25 bp, Homo sapien
aacccataacagccactgcgaaatc

SEQ ID NO: 1104766 - DNA, 25 bp, Homo sapien
caacccataacagccactgcgaaat

SEQ ID NO: 1104767 - DNA, 25 bp, Homo sapien
ctgttctgtagctcctcatcttaaa

SEQ ID NO: 1104768 - DNA, 25 bp, Homo sapien
gaagaatttccttgaaggtatgcag

SEQ ID NO: 1104769 - DNA, 25 bp, Homo sapien
aaatgtcttggctgtttttgaagaa

SEQ ID NO: 1104770 - DNA, 25 bp, Homo sapien
ggtatgcagacttcaaaagctgaaa

SEQ ID NO: 1104771 - DNA, 25 bp, Homo sapien
ggcatggtaacaatgactttcaagt

SEQ ID NO: 1104772 - DNA, 25 bp, Homo sapien
cctttgagatgatggcaatgataac

SEQ ID NO: 1104773 - DNA, 25 bp, Homo sapien
gataactataggcattctcaaaggc

SEQ ID NO: 1104774 - DNA, 25 bp, Homo sapien
actttcaagtctgtgatgttcagaa

SEQ ID NO: 1104775 - DNA, 25 bp, Homo sapien
tcaatttcattgccacctgccccat

SEQ ID NO: 1104776 - DNA, 25 bp, Homo sapien
tccaaaatcaatttcattgccacct

SEQ ID NO: 1104777 - DNA, 25 bp, Homo sapien
aaaatcaatttcattgccacctgcc

SEQ ID NO: 1104778 - DNA, 25 bp, Homo sapien
aaatcaatttcattgccacctgccc

SEQ ID NO: 1104779 - DNA, 25 bp, Homo sapien
taattcactcttcagtaggcatgag

SEQ ID NO: 1104780 - DNA, 25 bp, Homo sapien
cctttaattcactcttcagtaggca

SEQ ID NO: 1104781 - DNA, 25 bp, Homo sapien
attcactcttcagtaggcatgagtc

SEQ ID NO: 1104782 - DNA, 25 bp, Homo sapien
ctagccctttaattcactcttcagt

SEQ ID NO: 1104783 - DNA, 25 bp, Homo sapien
tcagttgtagcattctgcattgttt

SEQ ID NO: 1104784 - DNA, 25 bp, Homo sapien
gctaattggggtgatttgctggcaa

SEQ ID NO: 1104785 - DNA, 25 bp, Homo sapien
ttgatggagctaattggggtgattt

SEQ ID NO: 1104786 - DNA, 25 bp, Homo sapien
agataatcaactttttggttgatgg

SEQ ID NO: 1104787 - DNA, 25 bp, Homo sapien
ctctgttgcaaggagcctactgctc

SEQ ID NO: 1104788 - DNA, 25 bp, Homo sapien
ggagcctactgctctcagtaagaca

SEQ ID NO: 1104789 - DNA, 25 bp, Homo sapien
agtaagacaaggagtttgcattttc

SEQ ID NO: 1104790 - DNA, 25 bp, Homo sapien
gcaaggagcctactgctctcagtaa

SEQ ID NO: 1104791 - DNA, 25 bp, Homo sapien
ttccacttctaaggcaaatttcctc

SEQ ID NO: 1104792 - DNA, 25 bp, Homo sapien
cacttctaaggcaaatttcctctga

SEQ ID NO: 1104793 - DNA, 25 bp, Homo sapien
cttctaaggcaaatttcctctgaca

SEQ ID NO: 1104794 - DNA, 25 bp, Homo sapien
ccacttctaaggcaaatttcctctg

SEQ ID NO: 1104795 - DNA, 25 bp, Homo sapien
agacaagcaaatgctaagggagttt

SEQ ID NO: 1104796 - DNA, 25 bp, Homo sapien
gacaagcaaatgctaagggagtttg

SEQ ID NO: 1104797 - DNA, 25 bp, Homo sapien
taaggctactttccctagcattaag

SEQ ID NO: 1104798 - DNA, 25 bp, Homo sapien
tctttgttcttgttaatggtttatg

SEQ ID NO: 1104799 - DNA, 25 bp, Homo sapien
tactttccctagcattaagatccat

SEQ ID NO: 1104800 - DNA, 25 bp, Homo sapien
cacagtaaggctactttccctagca

SEQ ID NO: 1104801 - DNA, 25 bp, Homo sapien
tcttctgtgctttatgatgaggcat

SEQ ID NO: 1104802 - DNA, 25 bp, Homo sapien
gaccgtttgatccaaatgccacacc

SEQ ID NO: 1104803 - DNA, 25 bp, Homo sapien
ttatgatgaggcattcaatttgtaa

SEQ ID NO: 1104804 - DNA, 25 bp, Homo sapien
tgatccaaatgccacaccagtagtc

SEQ ID NO: 1104805 - DNA, 25 bp, Homo sapien
agatactctgagctcccgctctgta

SEQ ID NO: 1104806 - DNA, 25 bp, Homo sapien
caagatactctgagctcccgctctg

SEQ ID NO: 1104807 - DNA, 25 bp, Homo sapien
tactctgagctcccgctctgtattt

SEQ ID NO: 1104808 - DNA, 25 bp, Homo sapien
gatactctgagctcccgctctgtat

SEQ ID NO: 1104809 - DNA, 25 bp, Homo sapien
taaacactttctaagctgtgttctg

SEQ ID NO: 1104810 - DNA, 25 bp, Homo sapien
aaacactttctaagctgtgttctgt

SEQ ID NO: 1104811 - DNA, 25 bp, Homo sapien
aacactttctaagctgtgttctgtg

SEQ ID NO: 1104812 - DNA, 25 bp, Homo sapien
gtggttttgtgttacatctcacata

SEQ ID NO: 1104813 - DNA, 25 bp, Homo sapien
gttttgtgttacatctcacataaag

SEQ ID NO: 1104814 - DNA, 25 bp, Homo sapien
atgtggttttgtgttacatctcaca

SEQ ID NO: 1104815 - DNA, 25 bp, Homo sapien
ttttgtgttacatctcacataaagc

SEQ ID NO: 1104816 - DNA, 25 bp, Homo sapien
taacaacaaggtgcactggagcatg

SEQ ID NO: 1104817 - DNA, 25 bp, Homo sapien
tggcagacccttattaccacctggt

SEQ ID NO: 1104818 - DNA, 25 bp, Homo sapien
gattttgaaggtggaatggagacca

SEQ ID NO: 1104819 - DNA, 25 bp, Homo sapien
cctttggcagtactaggcaaatgcc

SEQ ID NO: 1104820 - DNA, 25 bp, Homo sapien
tctatatcctgtaggcaaaaactca

SEQ ID NO: 1104821 - DNA, 25 bp, Homo sapien
gagtttcagtttggagtctcttcta

SEQ ID NO: 1104822 - DNA, 25 bp, Homo sapien
tctctatatctatgcctgtatccac

SEQ ID NO: 1104823 - DNA, 25 bp, Homo sapien
tcttgattctggctacatacttgta

SEQ ID NO: 1104824 - DNA, 25 bp, Homo sapien
tgctgttccgtagcccacatcttta

SEQ ID NO: 1104825 - DNA, 25 bp, Homo sapien
gctgttccgtagcccacatctttac

SEQ ID NO: 1104826 - DNA, 25 bp, Homo sapien
tgttcctcgagctttgaatgatgac

SEQ ID NO: 1104827 - DNA, 25 bp, Homo sapien
tccatcacctgagttggaagtatca

SEQ ID NO: 1104828 - DNA, 25 bp, Homo sapien
gcggtgtccctggtaaatattctca

SEQ ID NO: 1104829 - DNA, 25 bp, Homo sapien
gaagtatcactgctgttcctcgagc

SEQ ID NO: 1104830 - DNA, 25 bp, Homo sapien
agacccaatgcagagctccttcact

SEQ ID NO: 1104831 - DNA, 25 bp, Homo sapien
acttttcagacccaatgcagagctc

SEQ ID NO: 1104832 - DNA, 25 bp, Homo sapien
gacccaatgcagagctccttcactg

SEQ ID NO: 1104833 - DNA, 25 bp, Homo sapien
tatccaagtgggatagtaagaacaa

SEQ ID NO: 1104834 - DNA, 25 bp, Homo sapien
gggcactgcctgattatatccaagt

SEQ ID NO: 1104835 - DNA, 25 bp, Homo sapien
gtgggatagtaagaacaattccctg

SEQ ID NO: 1104836 - DNA, 25 bp, Homo sapien
gcctgattatatccaagtgggatag

SEQ ID NO: 1104837 - DNA, 25 bp, Homo sapien
tatttcacattgatttgactcaaag

SEQ ID NO: 1104838 - DNA, 25 bp, Homo sapien
acattgatttgactcaaagagagaa

SEQ ID NO: 1104839 - DNA, 25 bp, Homo sapien
attgatttgactcaaagagagaaac

SEQ ID NO: 1104840 - DNA, 25 bp, Homo sapien
ttctatttcacattgatttgactca

SEQ ID NO: 1104841 - DNA, 25 bp, Homo sapien
gcagctttgcgtgcctctcgaaggc

SEQ ID NO: 1104842 - DNA, 25 bp, Homo sapien
ccagtcacagcaactcgtagggtaa

SEQ ID NO: 1104843 - DNA, 25 bp, Homo sapien
gacactggacgggtaactcttgtta

SEQ ID NO: 1104844 - DNA, 25 bp, Homo sapien
cgtagggtaagcttgctagccagca

SEQ ID NO: 1104845 - DNA, 25 bp, Homo sapien
ctgggactaggcatgatcaaaatgg

SEQ ID NO: 1104846 - DNA, 25 bp, Homo sapien
gttgtttgaaacactcctgacaaag

SEQ ID NO: 1104847 - DNA, 25 bp, Homo sapien
cctgacaaagtggactactggattg

SEQ ID NO: 1104848 - DNA, 25 bp, Homo sapien
tccaggacctttcacaatgcagatg

SEQ ID NO: 1104849 - DNA, 25 bp, Homo sapien
aagtccagtgggttcacagatgttg

SEQ ID NO: 1104850 - DNA, 25 bp, Homo sapien
tacatagtaatggaacaacctgctc

SEQ ID NO: 1104851 - DNA, 25 bp, Homo sapien
taagatatgaacaccacagaactac

SEQ ID NO: 1104852 - DNA, 25 bp, Homo sapien
aaaacctacttgaatctctgggacg

SEQ ID NO: 1104853 - DNA, 25 bp, Homo sapien
cacatacttagaggtaaaacactcc

SEQ ID NO: 1104854 - DNA, 25 bp, Homo sapien
cccccttttccgacgacaccagctg

SEQ ID NO: 1104855 - DNA, 25 bp, Homo sapien
ccaggattggcaggcgaggaggcgc

SEQ ID NO: 1104856 - DNA, 25 bp, Homo sapien
tcttggctgtgtctcaccgctctcc

SEQ ID NO: 1104857 - DNA, 25 bp, Homo sapien
tgccaggattggcaggcgaggaggc

SEQ ID NO: 1104858 - DNA, 25 bp, Homo sapien
cggagtagggtcctcctcggtgcag

SEQ ID NO: 1104859 - DNA, 25 bp, Homo sapien
ccggagtagggtcctcctcggtgca

SEQ ID NO: 1104860 - DNA, 25 bp, Homo sapien
ctgtgcagggcgaggatccccaggg

SEQ ID NO: 1104861 - DNA, 25 bp, Homo sapien
aggaaaggcgaatcctgcacccaac

SEQ ID NO: 1104862 - DNA, 25 bp, Homo sapien
gaaggctccacagacaataaatcct

SEQ ID NO: 1104863 - DNA, 25 bp, Homo sapien
atcctgggcggagaagagacaagca

SEQ ID NO: 1104864 - DNA, 25 bp, Homo sapien
ttagaccatgatgccagtgcccttc

SEQ ID NO: 1104865 - DNA, 25 bp, Homo sapien
gcccttcaggtggacggctggagag

SEQ ID NO: 1104866 - DNA, 25 bp, Homo sapien
ggctggagaggttcccgcgggaagc

SEQ ID NO: 1104867 - DNA, 25 bp, Homo sapien
caggaaggtgccacgttagaccatg

SEQ ID NO: 1104868 - DNA, 25 bp, Homo sapien
cagctgccaagggttattccttaag

SEQ ID NO: 1104869 - DNA, 25 bp, Homo sapien
tccttaagtgttcaggggtccgcag

SEQ ID NO: 1104870 - DNA, 25 bp, Homo sapien
tttcggagagcgtagtcgtgcagct

SEQ ID NO: 1104871 - DNA, 25 bp, Homo sapien
cgccggcgggagaaactgcccatga

SEQ ID NO: 1104872 - DNA, 25 bp, Homo sapien
tctttccacgtcgaatccgaaacac

SEQ ID NO: 1104873 - DNA, 25 bp, Homo sapien
gtcgaatccgaaacacgtcctgcat

SEQ ID NO: 1104874 - DNA, 25 bp, Homo sapien
cttaataactcggagaggaggacgc

SEQ ID NO: 1104875 - DNA, 25 bp, Homo sapien
gaaacacgtcctgcatccttaataa

SEQ ID NO: 1104876 - DNA, 25 bp, Homo sapien
tcatgccagacaccctgaagactgg

SEQ ID NO: 1104877 - DNA, 25 bp, Homo sapien
ttcatgccagacaccctgaagactg

SEQ ID NO: 1104878 - DNA, 25 bp, Homo sapien
ctggaagaggcttagggagccccat

SEQ ID NO: 1104879 - DNA, 25 bp, Homo sapien
gttttcatgccagacaccctgaaga

SEQ ID NO: 1104880 - DNA, 25 bp, Homo sapien
tgtcccccgccacattgaaaatctc

SEQ ID NO: 1104881 - DNA, 25 bp, Homo sapien
taggatcccagaaaaacagagaggc

SEQ ID NO: 1104882 - DNA, 25 bp, Homo sapien
agctgctggcgagtccctgctgcat

SEQ ID NO: 1104883 - DNA, 25 bp, Homo sapien
tgaattctccccctaggatcccaga

SEQ ID NO: 1104884 - DNA, 25 bp, Homo sapien
tagtgagacatgaacgcgtctgagc

SEQ ID NO: 1104885 - DNA, 25 bp, Homo sapien
ctaaatgtttctgatgtgagcatga

SEQ ID NO: 1104886 - DNA, 25 bp, Homo sapien
acgcgtctgagctaaatgtttctga

SEQ ID NO: 1104887 - DNA, 25 bp, Homo sapien
gacatgaacgcgtctgagctaaatg

SEQ ID NO: 1104888 - DNA, 25 bp, Homo sapien
gattgttctcattcaatacactgaa

SEQ ID NO: 1104889 - DNA, 25 bp, Homo sapien
aattagctctatgtacaccaaatgc

SEQ ID NO: 1104890 - DNA, 25 bp, Homo sapien
tcattctctgcgtgcctcaccaaca

SEQ ID NO: 1104891 - DNA, 25 bp, Homo sapien
gacaccagattgttctcattcaata

SEQ ID NO: 1104892 - DNA, 25 bp, Homo sapien
cagccccagtgcttcgatcagatct

SEQ ID NO: 1104893 - DNA, 25 bp, Homo sapien
cgatcagatctggtaatggagagta

SEQ ID NO: 1104894 - DNA, 25 bp, Homo sapien
aaagaagaaattcccagagcttgga

SEQ ID NO: 1104895 - DNA, 25 bp, Homo sapien
aaaagaagaaattcccagagcttgg

SEQ ID NO: 1104896 - DNA, 25 bp, Homo sapien
gggccaaaataagatcaaggtcctc

SEQ ID NO: 1104897 - DNA, 25 bp, Homo sapien
caaggtcctcaagcaagatgttcct

SEQ ID NO: 1104898 - DNA, 25 bp, Homo sapien
agattctgacaatcttttggggcca

SEQ ID NO: 1104899 - DNA, 25 bp, Homo sapien
gcaagatgttcctgagggttacacc

SEQ ID NO: 1104900 - DNA, 25 bp, Homo sapien
gcatctgccagttctcaaaacatac

SEQ ID NO: 1104901 - DNA, 25 bp, Homo sapien
aggggcatctgccagttctcaaaac

SEQ ID NO: 1104902 - DNA, 25 bp, Homo sapien
gggcatctgccagttctcaaaacat

SEQ ID NO: 1104903 - DNA, 25 bp, Homo sapien
tcaggggcatctgccagttctcaaa

SEQ ID NO: 1104904 - DNA, 25 bp, Homo sapien
acggataaatttataatctgcttcc

SEQ ID NO: 1104905 - DNA, 25 bp, Homo sapien
gatccttgggaatcttatacttttc

SEQ ID NO: 1104906 - DNA, 25 bp, Homo sapien
tatacttttcaaatcggatgatacg

SEQ ID NO: 1104907 - DNA, 25 bp, Homo sapien
cctggatgaagaggatccttgggaa

SEQ ID NO: 1104908 - DNA, 25 bp, Homo sapien
cgattactattggtatccaagaccc

SEQ ID NO: 1104909 - DNA, 25 bp, Homo sapien
caaaagtggtctccttgatttccat

SEQ ID NO: 1104910 - DNA, 25 bp, Homo sapien
cctcaggttagcctcccaggaatca

SEQ ID NO: 1104911 - DNA, 25 bp, Homo sapien
tattttgggaatactcatgagcaga

SEQ ID NO: 1104912 - DNA, 25 bp, Homo sapien
cttctctggtattgcgggggattcc

SEQ ID NO: 1104913 - DNA, 25 bp, Homo sapien
caaggacttctctggtattgcgggg

SEQ ID NO: 1104914 - DNA, 25 bp, Homo sapien
cttccgaagtgctgcacgaacctct

SEQ ID NO: 1104915 - DNA, 25 bp, Homo sapien
aggcctcttccgaagtgctgcacga

SEQ ID NO: 1104916 - DNA, 25 bp, Homo sapien
tgatagttttcgaaggtggcacctt

SEQ ID NO: 1104917 - DNA, 25 bp, Homo sapien
ccttactctggaggatcctatggtc

SEQ ID NO: 1104918 - DNA, 25 bp, Homo sapien
tgtgggagttgaccgacaagtcttg

SEQ ID NO: 1104919 - DNA, 25 bp, Homo sapien
gaatgaccatctaacattgctgcaa

SEQ ID NO: 1104920 - DNA, 25 bp, Homo sapien
tgacactgggtgaaagataggaaga

SEQ ID NO: 1104921 - DNA, 25 bp, Homo sapien
cactgggtgaaagataggaagacac

SEQ ID NO: 1104922 - DNA, 25 bp, Homo sapien
ttatgacactgggtgaaagatagga

SEQ ID NO: 1104923 - DNA, 25 bp, Homo sapien
gctgccaccattaccaccagatagg

SEQ ID NO: 1104924 - DNA, 25 bp, Homo sapien
taaataggatgcgtctgtttgccct

SEQ ID NO: 1104925 - DNA, 25 bp, Homo sapien
ttcaggaacagatagaatggaggtc

SEQ ID NO: 1104926 - DNA, 25 bp, Homo sapien
tcaatgttaaacactaggccagctt

SEQ ID NO: 1104927 - DNA, 25 bp, Homo sapien
tcagctgctctgtaggaccctattg

SEQ ID NO: 1104928 - DNA, 25 bp, Homo sapien
aagcaaaaaatgtgcgagttttcct

SEQ ID NO: 1104929 - DNA, 25 bp, Homo sapien
atgtgcgagttttcctgtccatcag

SEQ ID NO: 1104930 - DNA, 25 bp, Homo sapien
ctgtccatcagaagtaggccacaca

SEQ ID NO: 1104931 - DNA, 25 bp, Homo sapien
ttcctgtccatcagaagtaggccac

SEQ ID NO: 1104932 - DNA, 25 bp, Homo sapien
tataaaatagcgaagccagcctcac

SEQ ID NO: 1104933 - DNA, 25 bp, Homo sapien
gggctagcattgctattctataaaa

SEQ ID NO: 1104934 - DNA, 25 bp, Homo sapien
ccagcctcacagtagatggaaatct

SEQ ID NO: 1104935 - DNA, 25 bp, Homo sapien
ctaagctcctacgtcattttctttt

SEQ ID NO: 1104936 - DNA, 25 bp, Homo sapien
gcagacttctaggttgtgaccactt

SEQ ID NO: 1104937 - DNA, 25 bp, Homo sapien
tctaggttgtgaccactttgacttg

SEQ ID NO: 1104938 - DNA, 25 bp, Homo sapien
ggttgtgaccactttgacttgcatt

SEQ ID NO: 1104939 - DNA, 25 bp, Homo sapien
tgtgaccactttgacttgcattttt

SEQ ID NO: 1104940 - DNA, 25 bp, Homo sapien
tcaaaacttgatttcctggtatcgg

SEQ ID NO: 1104941 - DNA, 25 bp, Homo sapien
gtgtgaagctggttgtagtctctct

SEQ ID NO: 1104942 - DNA, 25 bp, Homo sapien
tgtgaagctggttgtagtctctctc

SEQ ID NO: 1104943 - DNA, 25 bp, Homo sapien
tcctggtatcggaacactcagggca

SEQ ID NO: 1104944 - DNA, 25 bp, Homo sapien
tctcgctttgacatgttaaattgct

SEQ ID NO: 1104945 - DNA, 25 bp, Homo sapien
tcccactttcaatgtcacaaataag

SEQ ID NO: 1104946 - DNA, 25 bp, Homo sapien
caatgtcacaaataagtccgatttt

SEQ ID NO: 1104947 - DNA, 25 bp, Homo sapien
gaatgttggacgttgtcttcttctc

SEQ ID NO: 1104948 - DNA, 25 bp, Homo sapien
aaagacctcctttggcacctgctga

SEQ ID NO: 1104949 - DNA, 25 bp, Homo sapien
ttcacctcggaaacatcggcatggc

SEQ ID NO: 1104950 - DNA, 25 bp, Homo sapien
gattggcatctagataaagctcctc

SEQ ID NO: 1104951 - DNA, 25 bp, Homo sapien
gcatggcaccagacggccgatgatt

SEQ ID NO: 1104952 - DNA, 25 bp, Homo sapien
tcgtagagcttgacagttgaacaat

SEQ ID NO: 1104953 - DNA, 25 bp, Homo sapien
ttgaaaggtcgttatcaggaatact

SEQ ID NO: 1104954 - DNA, 25 bp, Homo sapien
caggaatacttagttttcgtagagc

SEQ ID NO: 1104955 - DNA, 25 bp, Homo sapien
ctagcaatagtggttggcagatttg

SEQ ID NO: 1104956 - DNA, 25 bp, Homo sapien
taaaagccccgaggtaatagttgca

SEQ ID NO: 1104957 - DNA, 25 bp, Homo sapien
gtactatactagtattgcagagtgg

SEQ ID NO: 1104958 - DNA, 25 bp, Homo sapien
agagtggttcgccatcttttgcatg

SEQ ID NO: 1104959 - DNA, 25 bp, Homo sapien
aatcataagcatagctaaaagcccc

SEQ ID NO: 1104960 - DNA, 25 bp, Homo sapien
actttaacaccataacccagaggag

SEQ ID NO: 1104961 - DNA, 25 bp, Homo sapien
ctttaacaccataacccagaggaga

SEQ ID NO: 1104962 - DNA, 25 bp, Homo sapien
tactttaacaccataacccagagga

SEQ ID NO: 1104963 - DNA, 25 bp, Homo sapien
tagaaatgggattgacactggcttc

SEQ ID NO: 1104964 - DNA, 25 bp, Homo sapien
agaaatgggattgacactggcttca

SEQ ID NO: 1104965 - DNA, 25 bp, Homo sapien
ttagaaatgggattgacactggctt

SEQ ID NO: 1104966 - DNA, 25 bp, Homo sapien
tatttcggatcctacgctgcctagc

SEQ ID NO: 1104967 - DNA, 25 bp, Homo sapien
ggatcctacgctgcctagcaacagt

SEQ ID NO: 1104968 - DNA, 25 bp, Homo sapien
tttcggatcctacgctgcctagcaa

SEQ ID NO: 1104969 - DNA, 25 bp, Homo sapien
tacgctgcctagcaacagttgccat

SEQ ID NO: 1104970 - DNA, 25 bp, Homo sapien
caattctgttactgaaaatgcactc

SEQ ID NO: 1104971 - DNA, 25 bp, Homo sapien
attctgttactgaaaatgcactcac

SEQ ID NO: 1104972 - DNA, 25 bp, Homo sapien
aattctgttactgaaaatgcactca

SEQ ID NO: 1104973 - DNA, 25 bp, Homo sapien
ctcaattctgttactgaaaatgcac

SEQ ID NO: 1104974 - DNA, 25 bp, Homo sapien
gaaattcaagaaaggcgtcattcag

SEQ ID NO: 1104975 - DNA, 25 bp, Homo sapien
tccaaaattggctggaagaaattca

SEQ ID NO: 1104976 - DNA, 25 bp, Homo sapien
aagaaaggcgtcattcaggtagagc

SEQ ID NO: 1104977 - DNA, 25 bp, Homo sapien
ttcaagaaaggcgtcattcaggtag

SEQ ID NO: 1104978 - DNA, 25 bp, Homo sapien
tgctcaagtatatgctgttcataag

SEQ ID NO: 1104979 - DNA, 25 bp, Homo sapien
tatgctgttcataagtgtagtgatg

SEQ ID NO: 1104980 - DNA, 25 bp, Homo sapien
ttaaaactgctcaagtatatgctgt

SEQ ID NO: 1104981 - DNA, 25 bp, Homo sapien
ttcataagtgtagtgatgtcgtgat

SEQ ID NO: 1104982 - DNA, 25 bp, Homo sapien
tcttaactccaagatccgcaatttg

SEQ ID NO: 1104983 - DNA, 25 bp, Homo sapien
ctccaagatccgcaatttgacaagt

SEQ ID NO: 1104984 - DNA, 25 bp, Homo sapien
ttggtagagttttcaagtgattttc

SEQ ID NO: 1104985 - DNA, 25 bp, Homo sapien
aagtgattttctcttaactccaaga

SEQ ID NO: 1104986 - DNA, 25 bp, Homo sapien
tctgacttcatgctgctctccaaga

SEQ ID NO: 1104987 - DNA, 25 bp, Homo sapien
tcatttgtccttgtctgacttcatg

SEQ ID NO: 1104988 - DNA, 25 bp, Homo sapien
gctctccaagactaatctgattata

SEQ ID NO: 1104989 - DNA, 25 bp, Homo sapien
tccttgtctgacttcatgctgctct

SEQ ID NO: 1104990 - DNA, 25 bp, Homo sapien
tgtcatctggatcctgctgtgtaac

SEQ ID NO: 1104991 - DNA, 25 bp, Homo sapien
tgactcataatttagtggataggaa

SEQ ID NO: 1104992 - DNA, 25 bp, Homo sapien
tgacttcctgagcagttgtcatctg

SEQ ID NO: 1104993 - DNA, 25 bp, Homo sapien
tcataatttagtggataggaagagt

SEQ ID NO: 1104994 - DNA, 25 bp, Homo sapien
tgttctcaggtgaaataaccagtca

SEQ ID NO: 1104995 - DNA, 25 bp, Homo sapien
tatattcccagttgccacagtaaga

SEQ ID NO: 1104996 - DNA, 25 bp, Homo sapien
tcaaggaccagcaatctttgtgccc

SEQ ID NO: 1104997 - DNA, 25 bp, Homo sapien
tgaccaaattactgagtgctgactg

SEQ ID NO: 1104998 - DNA, 25 bp, Homo sapien
cttgtcaactgaagcctctactgga

SEQ ID NO: 1104999 - DNA, 25 bp, Homo sapien
caactgaagcctctactggaaccat

SEQ ID NO: 1105000 - DNA, 25 bp, Homo sapien
gtcaactgaagcctctactggaacc

SEQ ID NO: 1105001 - DNA, 25 bp, Homo sapien
ttgtcaactgaagcctctactggaa

SEQ ID NO: 1105002 - DNA, 25 bp, Homo sapien
tcatgcaaccgagtgcctgaaactg

SEQ ID NO: 1105003 - DNA, 25 bp, Homo sapien
gctacccttagctcgttttttctga

SEQ ID NO: 1105004 - DNA, 25 bp, Homo sapien
tacattttaaacgaatactggctgc

SEQ ID NO: 1105005 - DNA, 25 bp, Homo sapien
ctgtattcttatagctacccttagc

SEQ ID NO: 1105006 - DNA, 25 bp, Homo sapien
cctccagtttgatgctccacttgca

SEQ ID NO: 1105007 - DNA, 25 bp, Homo sapien
ccacctttgacacaacaactctgtc

SEQ ID NO: 1105008 - DNA, 25 bp, Homo sapien
ttcatcaccaagcctgctgctgagt

SEQ ID NO: 1105009 - DNA, 25 bp, Homo sapien
acagctcccataaagagctcttagc

SEQ ID NO: 1105010 - DNA, 25 bp, Homo sapien
ctcaggcgattgggcaaggggcaca

SEQ ID NO: 1105011 - DNA, 25 bp, Homo sapien
ccacatcctctgttgtaggtgtcac

SEQ ID NO: 1105012 - DNA, 25 bp, Homo sapien
tttctggtgcccgaaaagctgctcc

SEQ ID NO: 1105013 - DNA, 25 bp, Homo sapien
tctacaaagtctattcgtgctgatg

SEQ ID NO: 1105014 - DNA, 25 bp, Homo sapien
aagtctattcgtgctgatgctcctg

SEQ ID NO: 1105015 - DNA, 25 bp, Homo sapien
aaaagcccgtaagtgcaatgtgtcc

SEQ ID NO: 1105016 - DNA, 25 bp, Homo sapien
tggtacaaacacagtaagcagactt

SEQ ID NO: 1105017 - DNA, 25 bp, Homo sapien
cagctaagaacaaggtggtacaaac

SEQ ID NO: 1105018 - DNA, 25 bp, Homo sapien
cacaatggaacatcatcagggagta

SEQ ID NO: 1105019 - DNA, 25 bp, Homo sapien
cctcactacaggttatgccagatta

SEQ ID NO: 1105020 - DNA, 25 bp, Homo sapien
gaacttgggcacttggataatagaa

SEQ ID NO: 1105021 - DNA, 25 bp, Homo sapien
tgtttgtctaataataatctggcag

SEQ ID NO: 1105022 - DNA, 25 bp, Homo sapien
taactgtgaataagcaggaagaact

SEQ ID NO: 1105023 - DNA, 25 bp, Homo sapien
aatcagtcgtgcattctctaaaaac

SEQ ID NO: 1105024 - DNA, 25 bp, Homo sapien
tacgacttgaatgacctcatcatgc

SEQ ID NO: 1105025 - DNA, 25 bp, Homo sapien
tctcagtgtgactatcaaaatgtcc

SEQ ID NO: 1105026 - DNA, 25 bp, Homo sapien
gataatacagcttgttctagatgca

SEQ ID NO: 1105027 - DNA, 25 bp, Homo sapien
aaattcgctttatcttcagttctac

SEQ ID NO: 1105028 - DNA, 25 bp, Homo sapien
ctccaaaattcgctttatcttcagt

SEQ ID NO: 1105029 - DNA, 25 bp, Homo sapien
tgaatatagactcagaaaatctgcc

SEQ ID NO: 1105030 - DNA, 25 bp, Homo sapien
cagttagtggggtggatcttgaata

SEQ ID NO: 1105031 - DNA, 25 bp, Homo sapien
tagtatcattatccatcatgcagag

SEQ ID NO: 1105032 - DNA, 25 bp, Homo sapien
tagctgcattataaacctgtgattt

SEQ ID NO: 1105033 - DNA, 25 bp, Homo sapien
tcccattagctgcattataaacctg

SEQ ID NO: 1105034 - DNA, 25 bp, Homo sapien
tatagtatcattatccatcatgcag

SEQ ID NO: 1105035 - DNA, 25 bp, Homo sapien
gttgccacccgatcagcataataca

SEQ ID NO: 1105036 - DNA, 25 bp, Homo sapien
gtgttgccacccgatcagcataata

SEQ ID NO: 1105037 - DNA, 25 bp, Homo sapien
gccacccgatcagcataatacacta

SEQ ID NO: 1105038 - DNA, 25 bp, Homo sapien
tagtgttgccacccgatcagcataa

SEQ ID NO: 1105039 - DNA, 25 bp, Homo sapien
gaagtcctacagtgcaagctcctga

SEQ ID NO: 1105040 - DNA, 25 bp, Homo sapien
ctccagctcccacaaggagcccacg

SEQ ID NO: 1105041 - DNA, 25 bp, Homo sapien
tcagcgctgaagtcctacagtgcaa

SEQ ID NO: 1105042 - DNA, 25 bp, Homo sapien
gagagaataattctcctcctttgac

SEQ ID NO: 1105043 - DNA, 25 bp, Homo sapien
caaactcaacaatgttctagcagca

SEQ ID NO: 1105044 - DNA, 25 bp, Homo sapien
cggaagtgacagctatacgcatatt

SEQ ID NO: 1105045 - DNA, 25 bp, Homo sapien
aagattgcatttcctctgattgcca

SEQ ID NO: 1105046 - DNA, 25 bp, Homo sapien
catacaagtactggtttcattggaa

SEQ ID NO: 1105047 - DNA, 25 bp, Homo sapien
ttttaaatgaaaatgggctaaatgc

SEQ ID NO: 1105048 - DNA, 25 bp, Homo sapien
ccatcaaggctaggaagaaaactgc

SEQ ID NO: 1105049 - DNA, 25 bp, Homo sapien
aggcctgccctaaaagacctcctga

SEQ ID NO: 1105050 - DNA, 25 bp, Homo sapien
aatgctggcagattttgtcaccccc

SEQ ID NO: 1105051 - DNA, 25 bp, Homo sapien
ctttcctcctcacgctcttgttttt

SEQ ID NO: 1105052 - DNA, 25 bp, Homo sapien
ttttcccagccaggcggcagtttct

SEQ ID NO: 1105053 - DNA, 25 bp, Homo sapien
cctgaggggcggctcatgcgctttt

SEQ ID NO: 1105054 - DNA, 25 bp, Homo sapien
ccctcggcctgaggggcggctcatg

SEQ ID NO: 1105055 - DNA, 25 bp, Homo sapien
gggcggctcatgcgcttttcccagc

SEQ ID NO: 1105056 - DNA, 25 bp, Homo sapien
actgctgctgttcccgctgggccgc

SEQ ID NO: 1105057 - DNA, 25 bp, Homo sapien
ccactgctgctgttcccgctgggcc

SEQ ID NO: 1105058 - DNA, 25 bp, Homo sapien
tgctgctgttcccgctgggccgctc

SEQ ID NO: 1105059 - DNA, 25 bp, Homo sapien
ctgccagattttgccgccactgctg

SEQ ID NO: 1105060 - DNA, 25 bp, Homo sapien
cgccaggtcgagggccgccttgact

SEQ ID NO: 1105061 - DNA, 25 bp, Homo sapien
gccgccaggtcgagggccgccttga

SEQ ID NO: 1105062 - DNA, 25 bp, Homo sapien
ctgccgccaggtcgagggccgcctt

SEQ ID NO: 1105063 - DNA, 25 bp, Homo sapien
ccaggtcgagggccgccttgactgg

SEQ ID NO: 1105064 - DNA, 25 bp, Homo sapien
ccttgatcttctggatgtagccgct

SEQ ID NO: 1105065 - DNA, 25 bp, Homo sapien
atgtagccgctgatcagctccaggg

SEQ ID NO: 1105066 - DNA, 25 bp, Homo sapien
tctctcctgccttgatcttctggat

SEQ ID NO: 1105067 - DNA, 25 bp, Homo sapien
cttctggatgtagccgctgatcagc

SEQ ID NO: 1105068 - DNA, 25 bp, Homo sapien
ttctgcatctgacctttgctgaagg

SEQ ID NO: 1105069 - DNA, 25 bp, Homo sapien
catctgacctttgctgaaggcaccc

SEQ ID NO: 1105070 - DNA, 25 bp, Homo sapien
tccgccgcgcaaaccaggggtcttc

SEQ ID NO: 1105071 - DNA, 25 bp, Homo sapien
ctgcagtcgctgaattgtgaggccg

SEQ ID NO: 1105072 - DNA, 25 bp, Homo sapien
ggacaatgacgtggatgccggaatc

SEQ ID NO: 1105073 - DNA, 25 bp, Homo sapien
tgcggacaatgacgtggatgccgga

SEQ ID NO: 1105074 - DNA, 25 bp, Homo sapien
cggacaatgacgtggatgccggaat

SEQ ID NO: 1105075 - DNA, 25 bp, Homo sapien
gcggacaatgacgtggatgccggaa

SEQ ID NO: 1105076 - DNA, 25 bp, Homo sapien
cagctgggcccacgagtgtttgctt

SEQ ID NO: 1105077 - DNA, 25 bp, Homo sapien
catgctgaagtcaactccttaatgg

SEQ ID NO: 1105078 - DNA, 25 bp, Homo sapien
tggcctaactacaaacaactctggg

SEQ ID NO: 1105079 - DNA, 25 bp, Homo sapien
agagcatgctcaagtctatctggca

SEQ ID NO: 1105080 - DNA, 25 bp, Homo sapien
ttcattattgcctaggtcaagtctt

SEQ ID NO: 1105081 - DNA, 25 bp, Homo sapien
tgcctaggtcaagtctttccaactg

SEQ ID NO: 1105082 - DNA, 25 bp, Homo sapien
tattgcctaggtcaagtctttccaa

SEQ ID NO: 1105083 - DNA, 25 bp, Homo sapien
cattattgcctaggtcaagtctttc

SEQ ID NO: 1105084 - DNA, 25 bp, Homo sapien
cactactgaggtcatggctggtgag

SEQ ID NO: 1105085 - DNA, 25 bp, Homo sapien
ggccatggggccactactgaggtca

SEQ ID NO: 1105086 - DNA, 25 bp, Homo sapien
tcacaacacaaactggggatggact

SEQ ID NO: 1105087 - DNA, 25 bp, Homo sapien
ggccactactgaggtcatggctggt

SEQ ID NO: 1105088 - DNA, 25 bp, Homo sapien
cttcttgaaatagtcctccccagtt

SEQ ID NO: 1105089 - DNA, 25 bp, Homo sapien
aataaccattgtactccctgccttc

SEQ ID NO: 1105090 - DNA, 25 bp, Homo sapien
gataaggaaattaggtccttcttga

SEQ ID NO: 1105091 - DNA, 25 bp, Homo sapien
gcaaagacaagggaatttcacataa

SEQ ID NO: 1105092 - DNA, 25 bp, Homo sapien
tcacatcctaattccaagaacctat

SEQ ID NO: 1105093 - DNA, 25 bp, Homo sapien
gagatcaaggcgatgtgaggaaggg

SEQ ID NO: 1105094 - DNA, 25 bp, Homo sapien
caagggctgcacaaacttgtagtag

SEQ ID NO: 1105095 - DNA, 25 bp, Homo sapien
tacatggtggctcataggccaaggg

SEQ ID NO: 1105096 - DNA, 25 bp, Homo sapien
cacttgtaatgcattattatccatc

SEQ ID NO: 1105097 - DNA, 25 bp, Homo sapien
tccatccataactccctcaaatttt

SEQ ID NO: 1105098 - DNA, 25 bp, Homo sapien
attttgtatttgatccagaacttca

SEQ ID NO: 1105099 - DNA, 25 bp, Homo sapien
tttgtatttgatccagaacttcagg

SEQ ID NO: 1105100 - DNA, 25 bp, Homo sapien
actcagggttagttgagagactttc

SEQ ID NO: 1105101 - DNA, 25 bp, Homo sapien
cagggttagttgagagactttcaca

SEQ ID NO: 1105102 - DNA, 25 bp, Homo sapien
tagttgagagactttcacaagacat

SEQ ID NO: 1105103 - DNA, 25 bp, Homo sapien
atgacattgcataaactcagggtta

SEQ ID NO: 1105104 - DNA, 25 bp, Homo sapien
ttgacatatccaggtataccaacat

SEQ ID NO: 1105105 - DNA, 25 bp, Homo sapien
gttttttgacatatccaggtatacc

SEQ ID NO: 1105106 - DNA, 25 bp, Homo sapien
ttttgacatatccaggtataccaac

SEQ ID NO: 1105107 - DNA, 25 bp, Homo sapien
ttttttgacatatccaggtatacca

SEQ ID NO: 1105108 - DNA, 25 bp, Homo sapien
tatagaatcaggcaattgttgcaac

SEQ ID NO: 1105109 - DNA, 25 bp, Homo sapien
atagaatcaggcaattgttgcaaca

SEQ ID NO: 1105110 - DNA, 25 bp, Homo sapien
ctatagaatcaggcaattgttgcaa

SEQ ID NO: 1105111 - DNA, 25 bp, Homo sapien
gtagcattgtaagttgattgtcatc

SEQ ID NO: 1105112 - DNA, 25 bp, Homo sapien
gggtagcattgtaagttgattgtca

SEQ ID NO: 1105113 - DNA, 25 bp, Homo sapien
gcattgtaagttgattgtcatctac

SEQ ID NO: 1105114 - DNA, 25 bp, Homo sapien
tgggtagcattgtaagttgattgtc

SEQ ID NO: 1105115 - DNA, 25 bp, Homo sapien
ggaataagccttttgtccaagcaag

SEQ ID NO: 1105116 - DNA, 25 bp, Homo sapien
aagccttttgtccaagcaagtgaaa

SEQ ID NO: 1105117 - DNA, 25 bp, Homo sapien
tggaataagccttttgtccaagcaa

SEQ ID NO: 1105118 - DNA, 25 bp, Homo sapien
aataagccttttgtccaagcaagtg

SEQ ID NO: 1105119 - DNA, 25 bp, Homo sapien
tttgcccacaggacataaacagtca

SEQ ID NO: 1105120 - DNA, 25 bp, Homo sapien
catttcatgcatgcaggagtaagta

SEQ ID NO: 1105121 - DNA, 25 bp, Homo sapien
tttgacttgaaaaccaactgctatg

SEQ ID NO: 1105122 - DNA, 25 bp, Homo sapien
ttgtgtgtgccgatgtgaagatgcc

SEQ ID NO: 1105123 - DNA, 25 bp, Homo sapien
caaagttgcttggtgtgggaaatcc

SEQ ID NO: 1105124 - DNA, 25 bp, Homo sapien
tgagttaaactgtagggcacccagc

SEQ ID NO: 1105125 - DNA, 25 bp, Homo sapien
tctaacttcaggtaggtgtgtcgaa

SEQ ID NO: 1105126 - DNA, 25 bp, Homo sapien
cccagctggtatccactgagaactg

SEQ ID NO: 1105127 - DNA, 25 bp, Homo sapien
actattggataatgctcttggtcac

SEQ ID NO: 1105128 - DNA, 25 bp, Homo sapien
ttggtcaccctaattctcttggaga

SEQ ID NO: 1105129 - DNA, 25 bp, Homo sapien
tacattgtgatcagtgaccggtcac

SEQ ID NO: 1105130 - DNA, 25 bp, Homo sapien
tctctcagcagtagacagatactat

SEQ ID NO: 1105131 - DNA, 25 bp, Homo sapien
aattctcatcaactgctaatgtccg

SEQ ID NO: 1105132 - DNA, 25 bp, Homo sapien
ccaatagtagaaggtagtgactcca

SEQ ID NO: 1105133 - DNA, 25 bp, Homo sapien
ccgaagactatgaaggtagccaata

SEQ ID NO: 1105134 - DNA, 25 bp, Homo sapien
tgactccagttcattacagctacag

SEQ ID NO: 1105135 - DNA, 25 bp, Homo sapien
gactgttacattcttacaacttcca

SEQ ID NO: 1105136 - DNA, 25 bp, Homo sapien
caaatttaggactcttagtttctgc

SEQ ID NO: 1105137 - DNA, 25 bp, Homo sapien
ctaatttgttggagcgtagagacat

SEQ ID NO: 1105138 - DNA, 25 bp, Homo sapien
ctcaaatttaggactcttagtttct

SEQ ID NO: 1105139 - DNA, 25 bp, Homo sapien
aattctaatttgttggagcgtagag

SEQ ID NO: 1105140 - DNA, 25 bp, Homo sapien
tttggtaaatgagaatggtaaattc

SEQ ID NO: 1105141 - DNA, 25 bp, Homo sapien
gctgcaagctctttaagtttggtaa

SEQ ID NO: 1105142 - DNA, 25 bp, Homo sapien
aagctgcaagctctttaagtttggt

SEQ ID NO: 1105143 - DNA, 25 bp, Homo sapien
ttaagtttggtaaatgagaatggta

SEQ ID NO: 1105144 - DNA, 25 bp, Homo sapien
cacgaggctgctggggaaacatgta

SEQ ID NO: 1105145 - DNA, 25 bp, Homo sapien
tggatgggcttctgtttgtaaaggg

SEQ ID NO: 1105146 - DNA, 25 bp, Homo sapien
ctggatgggcttctgtttgtaaagg

SEQ ID NO: 1105147 - DNA, 25 bp, Homo sapien
acgaggctgctggggaaacatgtag

SEQ ID NO: 1105148 - DNA, 25 bp, Homo sapien
tcttcccacagtgtagggttaaagc

SEQ ID NO: 1105149 - DNA, 25 bp, Homo sapien
aaattcaaaggcaacagtcatgcgt

SEQ ID NO: 1105150 - DNA, 25 bp, Homo sapien
aacagtcatgcgttgttgtctctgc

SEQ ID NO: 1105151 - DNA, 25 bp, Homo sapien
actttcccagcattttcgtcatctt

SEQ ID NO: 1105152 - DNA, 25 bp, Homo sapien
tgtctgccacttagagagggaagag

SEQ ID NO: 1105153 - DNA, 25 bp, Homo sapien
ggaggccacttatacaaccccatgc

SEQ ID NO: 1105154 - DNA, 25 bp, Homo sapien
ttggagagtaatcccacgctggccc

SEQ ID NO: 1105155 - DNA, 25 bp, Homo sapien
caactggcaatggagtacacatgct

SEQ ID NO: 1105156 - DNA, 25 bp, Homo sapien
tactagcagaatttactggccttgg

SEQ ID NO: 1105157 - DNA, 25 bp, Homo sapien
gaggaagttccaggtcttataaagc

SEQ ID NO: 1105158 - DNA, 25 bp, Homo sapien
ggtcacatccccagaatatgtttga

SEQ ID NO: 1105159 - DNA, 25 bp, Homo sapien
tccaaagtcttgtgagggaccctat

SEQ ID NO: 1105160 - DNA, 25 bp, Homo sapien
tcacagtttgctccgtgttagcagt

SEQ ID NO: 1105161 - DNA, 25 bp, Homo sapien
tgaattctcaacacgcactccatgg

SEQ ID NO: 1105162 - DNA, 25 bp, Homo sapien
tccatggcttggcttacccaccaaa

SEQ ID NO: 1105163 - DNA, 25 bp, Homo sapien
tctgggtaaggagttggatatcgtt

SEQ ID NO: 1105164 - DNA, 25 bp, Homo sapien
ccactgtaatctcctttggggctac

SEQ ID NO: 1105165 - DNA, 25 bp, Homo sapien
ctccactgtaatctcctttggggct

SEQ ID NO: 1105166 - DNA, 25 bp, Homo sapien
tccactgtaatctcctttggggcta

SEQ ID NO: 1105167 - DNA, 25 bp, Homo sapien
cacattcagtactcaggtcatcttg

SEQ ID NO: 1105168 - DNA, 25 bp, Homo sapien
tcttacccttatgaacgaagtgatg

SEQ ID NO: 1105169 - DNA, 25 bp, Homo sapien
ttgtgaatcaaaaacagccttagtg

SEQ ID NO: 1105170 - DNA, 25 bp, Homo sapien
gaccggaactctgcatggtagctct

SEQ ID NO: 1105171 - DNA, 25 bp, Homo sapien
cattacttcactgtcgggtcctata

SEQ ID NO: 1105172 - DNA, 25 bp, Homo sapien
cagaggttcctggttttctcacacc

SEQ ID NO: 1105173 - DNA, 25 bp, Homo sapien
taacgagcaacatcgatacacgact

SEQ ID NO: 1105174 - DNA, 25 bp, Homo sapien
actattttcagttaaccaggcaggg

SEQ ID NO: 1105175 - DNA, 25 bp, Homo sapien
ccccaatcctcatttcattagctgg

SEQ ID NO: 1105176 - DNA, 25 bp, Homo sapien
tccctagcagaacaagtttgggtgg

SEQ ID NO: 1105177 - DNA, 25 bp, Homo sapien
cattagctggatgaacaaaagaatc

SEQ ID NO: 1105178 - DNA, 25 bp, Homo sapien
ggtctcagctaatgaagggtgaagt

SEQ ID NO: 1105179 - DNA, 25 bp, Homo sapien
ctgggaaggcgagtagtctgagtaa

SEQ ID NO: 1105180 - DNA, 25 bp, Homo sapien
gtagtctgagtaagtgcctgaggaa

SEQ ID NO: 1105181 - DNA, 25 bp, Homo sapien
actgttattcagacagtgagttttg

SEQ ID NO: 1105182 - DNA, 25 bp, Homo sapien
tattcagacagtgagttttgtcaac

SEQ ID NO: 1105183 - DNA, 25 bp, Homo sapien
tagctgttgtctgcaaggaccccac

SEQ ID NO: 1105184 - DNA, 25 bp, Homo sapien
tactgcatctttagctgttgtctgc

SEQ ID NO: 1105185 - DNA, 25 bp, Homo sapien
cccacaaagaattatgtactgcatc

SEQ ID NO: 1105186 - DNA, 25 bp, Homo sapien
tgtctgcaaggaccccactttaacc

SEQ ID NO: 1105187 - DNA, 25 bp, Homo sapien
caatgggaagaagaaattgaaaagg

SEQ ID NO: 1105188 - DNA, 25 bp, Homo sapien
ctgtgaacacaatgggaagaagaaa

SEQ ID NO: 1105189 - DNA, 25 bp, Homo sapien
agaagaaattgaaaaggacgaagag

SEQ ID NO: 1105190 - DNA, 25 bp, Homo sapien
agaaattgaaaaggacgaagagttg

SEQ ID NO: 1105191 - DNA, 25 bp, Homo sapien
aggctgtgggaaagatggtgcaatc

SEQ ID NO: 1105192 - DNA, 25 bp, Homo sapien
tttgaatcaagaggctgtgggaaag

SEQ ID NO: 1105193 - DNA, 25 bp, Homo sapien
aagaggctgtgggaaagatggtgca

SEQ ID NO: 1105194 - DNA, 25 bp, Homo sapien
ctttgaatcaagaggctgtgggaaa

SEQ ID NO: 1105195 - DNA, 25 bp, Homo sapien
aaaggcctgcgtccatgcgaagatg

SEQ ID NO: 1105196 - DNA, 25 bp, Homo sapien
gaaagtatcactcatgggcagccgg

SEQ ID NO: 1105197 - DNA, 25 bp, Homo sapien
tgcgagccatcagtccagttgtcag

SEQ ID NO: 1105198 - DNA, 25 bp, Homo sapien
cacctttagaagattccgggcggca

SEQ ID NO: 1105199 - DNA, 25 bp, Homo sapien
ctgagtagaggaaataatcatgtga

SEQ ID NO: 1105200 - DNA, 25 bp, Homo sapien
tgtgacagggtgtgaacacatgctc

SEQ ID NO: 1105201 - DNA, 25 bp, Homo sapien
tagaggaaataatcatgtgacaggg

SEQ ID NO: 1105202 - DNA, 25 bp, Homo sapien
taatcatgtgacagggtgtgaacac

SEQ ID NO: 1105203 - DNA, 25 bp, Homo sapien
cagcatgccaaggttaactgtattg

SEQ ID NO: 1105204 - DNA, 25 bp, Homo sapien
aatacctccatagggcagcatgcca

SEQ ID NO: 1105205 - DNA, 25 bp, Homo sapien
agtttaaagtcatgcttctgcctgc

SEQ ID NO: 1105206 - DNA, 25 bp, Homo sapien
tagacttagtctgcaagtttaaagt

SEQ ID NO: 1105207 - DNA, 25 bp, Homo sapien
ttctcctaatttaggaatctatgtc

SEQ ID NO: 1105208 - DNA, 25 bp, Homo sapien
cagctacttaattctcctaatttag

SEQ ID NO: 1105209 - DNA, 25 bp, Homo sapien
tcctaatttaggaatctatgtcttt

SEQ ID NO: 1105210 - DNA, 25 bp, Homo sapien
gctacttaattctcctaatttagga

SEQ ID NO: 1105211 - DNA, 25 bp, Homo sapien
gaaaatgactcattggtttccacta

SEQ ID NO: 1105212 - DNA, 25 bp, Homo sapien
aaaagctgtggctacaaatgtcttc

SEQ ID NO: 1105213 - DNA, 25 bp, Homo sapien
tctactcacagtatgaaccaaactg

SEQ ID NO: 1105214 - DNA, 25 bp, Homo sapien
taaaatgtaactaagacagaaggca

SEQ ID NO: 1105215 - DNA, 25 bp, Homo sapien
cagcatctaactagagatagctagt

SEQ ID NO: 1105216 - DNA, 25 bp, Homo sapien
gcaaagaagtcttaaggacctgaga

SEQ ID NO: 1105217 - DNA, 25 bp, Homo sapien
tgaataaaagagacagcttcagaat

SEQ ID NO: 1105218 - DNA, 25 bp, Homo sapien
atggatactacaactccatttccag

SEQ ID NO: 1105219 - DNA, 25 bp, Homo sapien
aaatgttgctttgctgggacggggt

SEQ ID NO: 1105220 - DNA, 25 bp, Homo sapien
taaaatgttgctttgctgggacggg

SEQ ID NO: 1105221 - DNA, 25 bp, Homo sapien
tgtctaaaatgttgctttgctggga

SEQ ID NO: 1105222 - DNA, 25 bp, Homo sapien
tctaaaatgttgctttgctgggacg

SEQ ID NO: 1105223 - DNA, 25 bp, Homo sapien
taatggtgtccggaggtacatcccg

SEQ ID NO: 1105224 - DNA, 25 bp, Homo sapien
ggataaggattccattggccactag

SEQ ID NO: 1105225 - DNA, 25 bp, Homo sapien
cattggccactaggagatacatctt

SEQ ID NO: 1105226 - DNA, 25 bp, Homo sapien
tcccgcctcccaagtggataaggat

SEQ ID NO: 1105227 - DNA, 25 bp, Homo sapien
ccacatttgttctctatagtgcttg

SEQ ID NO: 1105228 - DNA, 25 bp, Homo sapien
tctctatagtgcttgaagtactggc

SEQ ID NO: 1105229 - DNA, 25 bp, Homo sapien
tgtctaaggttttggatccacagct

SEQ ID NO: 1105230 - DNA, 25 bp, Homo sapien
aaggttttggatccacagcttggaa

SEQ ID NO: 1105231 - DNA, 25 bp, Homo sapien
gaatacctctctggtaaagcggcac

SEQ ID NO: 1105232 - DNA, 25 bp, Homo sapien
taaagcggcaccatttgggctctca

SEQ ID NO: 1105233 - DNA, 25 bp, Homo sapien
ctggtaaagcggcaccatttgggct

SEQ ID NO: 1105234 - DNA, 25 bp, Homo sapien
ctctctggtaaagcggcaccatttg

SEQ ID NO: 1105235 - DNA, 25 bp, Homo sapien
agtttgaattaagcaccgtccaggc

SEQ ID NO: 1105236 - DNA, 25 bp, Homo sapien
tgaaggctttgggaccccatcaacg

SEQ ID NO: 1105237 - DNA, 25 bp, Homo sapien
tcccggctgcgatgctgaaggcttt

SEQ ID NO: 1105238 - DNA, 25 bp, Homo sapien
tcaacgtctggatgtggctgcctgc

SEQ ID NO: 1105239 - DNA, 25 bp, Homo sapien
ctgaagatttttcagtaataaagaa

SEQ ID NO: 1105240 - DNA, 25 bp, Homo sapien
tcagtaataaagaaacacttctcac

SEQ ID NO: 1105241 - DNA, 25 bp, Homo sapien
tgaagatttttcagtaataaagaaa

SEQ ID NO: 1105242 - DNA, 25 bp, Homo sapien
tttcagtaataaagaaacacttctc

SEQ ID NO: 1105243 - DNA, 25 bp, Homo sapien
tccccaacatcccaaatcatgaatg

SEQ ID NO: 1105244 - DNA, 25 bp, Homo sapien
aatgatggcattaggggtagggtcc

SEQ ID NO: 1105245 - DNA, 25 bp, Homo sapien
gttttatagtagtatgggggaatga

SEQ ID NO: 1105246 - DNA, 25 bp, Homo sapien
tgaatgaaagtctattaaacatgac

SEQ ID NO: 1105247 - DNA, 25 bp, Homo sapien
gaaactcgcttgaaattacctgggc

SEQ ID NO: 1105248 - DNA, 25 bp, Homo sapien
gaagagtttcaagtctagcagcagc

SEQ ID NO: 1105249 - DNA, 25 bp, Homo sapien
tttagtttgagaaagtagccacagc

SEQ ID NO: 1105250 - DNA, 25 bp, Homo sapien
ttacctgggcaagaagatattagca

SEQ ID NO: 1105251 - DNA, 25 bp, Homo sapien
cactgatactaaatccaaggccagg

SEQ ID NO: 1105252 - DNA, 25 bp, Homo sapien
ttccaccactgatactaaatccaag

SEQ ID NO: 1105253 - DNA, 25 bp, Homo sapien
tggatttccttgtccactaattcca

SEQ ID NO: 1105254 - DNA, 25 bp, Homo sapien
aatggatttccttgtccactaattc

SEQ ID NO: 1105255 - DNA, 25 bp, Homo sapien
gataactgattctctggccccaatg

SEQ ID NO: 1105256 - DNA, 25 bp, Homo sapien
cactttcagaatagggcactagggc

SEQ ID NO: 1105257 - DNA, 25 bp, Homo sapien
gaatacatgctgactcccaaggact

SEQ ID NO: 1105258 - DNA, 25 bp, Homo sapien
tacacttcattgagaggacagaggc

SEQ ID NO: 1105259 - DNA, 25 bp, Homo sapien
taatattctttcgatggcttggaat

SEQ ID NO: 1105260 - DNA, 25 bp, Homo sapien
ctcctaatattctttcgatggcttg

SEQ ID NO: 1105261 - DNA, 25 bp, Homo sapien
ttctttcgatggcttggaattttac

SEQ ID NO: 1105262 - DNA, 25 bp, Homo sapien
tatgctcctaatattctttcgatgg

SEQ ID NO: 1105263 - DNA, 25 bp, Homo sapien
tggtataaatcgtcacacctgtagg

SEQ ID NO: 1105264 - DNA, 25 bp, Homo sapien
taaataaatgcataggcaagcacgg

SEQ ID NO: 1105265 - DNA, 25 bp, Homo sapien
tttaattccacactagagaggttgc

SEQ ID NO: 1105266 - DNA, 25 bp, Homo sapien
caattctgcatgtctaagggtcctt

SEQ ID NO: 1105267 - DNA, 25 bp, Homo sapien
gaaggtgaacgattgtgacagtctc

SEQ ID NO: 1105268 - DNA, 25 bp, Homo sapien
taagggacctatgacttcaacgtat

SEQ ID NO: 1105269 - DNA, 25 bp, Homo sapien
tagctgatgctgagaaattggtttc

SEQ ID NO: 1105270 - DNA, 25 bp, Homo sapien
gaaaagtcttggctctagctgatgc

SEQ ID NO: 1105271 - DNA, 25 bp, Homo sapien
tctgtctaccacactgtgcaagcag

SEQ ID NO: 1105272 - DNA, 25 bp, Homo sapien
tgtccagcctaggatgtttttgaga

SEQ ID NO: 1105273 - DNA, 25 bp, Homo sapien
tgcaagcagtggtcaagagcatagc

SEQ ID NO: 1105274 - DNA, 25 bp, Homo sapien
tagctcttgagtttacctgtctgtg

SEQ ID NO: 1105275 - DNA, 25 bp, Homo sapien
gctgaaccctagtaacaaagatacc

SEQ ID NO: 1105276 - DNA, 25 bp, Homo sapien
cccatcaggctgaaccctagtaaca

SEQ ID NO: 1105277 - DNA, 25 bp, Homo sapien
taggtttgatgctggcccatcaggc

SEQ ID NO: 1105278 - DNA, 25 bp, Homo sapien
gaaggatcttatcaccaggctgcag

SEQ ID NO: 1105279 - DNA, 25 bp, Homo sapien
tgagcctcgctccaactcatctcca

SEQ ID NO: 1105280 - DNA, 25 bp, Homo sapien
ctgagcctcgctccaactcatctcc

SEQ ID NO: 1105281 - DNA, 25 bp, Homo sapien
gagcctcgctccaactcatctccat

SEQ ID NO: 1105282 - DNA, 25 bp, Homo sapien
cctgagcctcgctccaactcatctc

SEQ ID NO: 1105283 - DNA, 25 bp, Homo sapien
gccatatcttgctcgctgtctcccc

SEQ ID NO: 1105284 - DNA, 25 bp, Homo sapien
gaatgccatatcttgctcgctgtct

SEQ ID NO: 1105285 - DNA, 25 bp, Homo sapien
cttgaatgccatatcttgctcgctg

SEQ ID NO: 1105286 - DNA, 25 bp, Homo sapien
agccttgaatgccatatcttgctcg

SEQ ID NO: 1105287 - DNA, 25 bp, Homo sapien
gaaggcaggaacttggttacattca

SEQ ID NO: 1105288 - DNA, 25 bp, Homo sapien
cacaatactttgtacacagtgggca

SEQ ID NO: 1105289 - DNA, 25 bp, Homo sapien
gtctatttccaggactaggttgtgg

SEQ ID NO: 1105290 - DNA, 25 bp, Homo sapien
tgttcctgctctgtataatttgggt

SEQ ID NO: 1105291 - DNA, 25 bp, Homo sapien
aactcttcagtagtaatacagcttt

SEQ ID NO: 1105292 - DNA, 25 bp, Homo sapien
gtctactgtgttctggaaactcttc

SEQ ID NO: 1105293 - DNA, 25 bp, Homo sapien
aaactcttcagtagtaatacagctt

SEQ ID NO: 1105294 - DNA, 25 bp, Homo sapien
gatacaggtagaccacagctctgag

SEQ ID NO: 1105295 - DNA, 25 bp, Homo sapien
taatgcatgcaaccaactccgggaa

SEQ ID NO: 1105296 - DNA, 25 bp, Homo sapien
tttgggtcccagagataaatggcta

SEQ ID NO: 1105297 - DNA, 25 bp, Homo sapien
gcttgtgtgtgcttccgtgctccga

SEQ ID NO: 1105298 - DNA, 25 bp, Homo sapien
ctgcctgttctcagtatgcaacatg

SEQ ID NO: 1105299 - DNA, 25 bp, Homo sapien
tctcagtatgcaacatggcagtact

SEQ ID NO: 1105300 - DNA, 25 bp, Homo sapien
catggcagtactattgacagtgagg

SEQ ID NO: 1105301 - DNA, 25 bp, Homo sapien
cttttccagttggtcaaggatccct

SEQ ID NO: 1105302 - DNA, 25 bp, Homo sapien
gagttggagggacggatctatagca

SEQ ID NO: 1105303 - DNA, 25 bp, Homo sapien
gcagcaatgaagacaggtcagtttt

SEQ ID NO: 1105304 - DNA, 25 bp, Homo sapien
aatgaagacaggtcagttttacacg

SEQ ID NO: 1105305 - DNA, 25 bp, Homo sapien
gagggacggatctatagcagcaact

SEQ ID NO: 1105306 - DNA, 25 bp, Homo sapien
cgaacagctatcactctaagagggt

SEQ ID NO: 1105307 - DNA, 25 bp, Homo sapien
cattataagcactccatctttgggc

SEQ ID NO: 1105308 - DNA, 25 bp, Homo sapien
ttaatgctactactccaggttcctg

SEQ ID NO: 1105309 - DNA, 25 bp, Homo sapien
tcccaaattgggagctgtaaccatc

SEQ ID NO: 1105310 - DNA, 25 bp, Homo sapien
ggaagactctaccagctgaagaaat

SEQ ID NO: 1105311 - DNA, 25 bp, Homo sapien
tctaccagctgaagaaatgcctctg

SEQ ID NO: 1105312 - DNA, 25 bp, Homo sapien
caactgggaagactctaccagctga

SEQ ID NO: 1105313 - DNA, 25 bp, Homo sapien
gaaatgcctctgaagttaaccagta

SEQ ID NO: 1105314 - DNA, 25 bp, Homo sapien
tatcaagtgcaagatacccgttgct

SEQ ID NO: 1105315 - DNA, 25 bp, Homo sapien
tggacaagcagcacccttggagtcg

SEQ ID NO: 1105316 - DNA, 25 bp, Homo sapien
cataatgagactgtgagaacctatc

SEQ ID NO: 1105317 - DNA, 25 bp, Homo sapien
caaaactggctatcaaagatggctg

SEQ ID NO: 1105318 - DNA, 25 bp, Homo sapien
gctgtttgatagtacatgcaggacc

SEQ ID NO: 1105319 - DNA, 25 bp, Homo sapien
gagttcattactgaagcctttgaca

SEQ ID NO: 1105320 - DNA, 25 bp, Homo sapien
tctgaaatccaataaaacgcctgaa

SEQ ID NO: 1105321 - DNA, 25 bp, Homo sapien
actggacagatttcactagacatgc

SEQ ID NO: 1105322 - DNA, 25 bp, Homo sapien
gccgtgtctccgaagctttcctgaa

SEQ ID NO: 1105323 - DNA, 25 bp, Homo sapien
gctctaaggagactgtacctgccgt

SEQ ID NO: 1105324 - DNA, 25 bp, Homo sapien
tcaaaccagactgtaggagtccagg

SEQ ID NO: 1105325 - DNA, 25 bp, Homo sapien
taaaaacataacgtccacctgggca

SEQ ID NO: 1105326 - DNA, 25 bp, Homo sapien
ggcagctattgtaagtaccctagaa

SEQ ID NO: 1105327 - DNA, 25 bp, Homo sapien
cctgatgaggttaagcttgcagccc

SEQ ID NO: 1105328 - DNA, 25 bp, Homo sapien
tcatgtgatacaagtcctccctgtg

SEQ ID NO: 1105329 - DNA, 25 bp, Homo sapien
cattagccaagggaactgtagtcaa

SEQ ID NO: 1105330 - DNA, 25 bp, Homo sapien
tgaaccctgaattgtcccaactgaa

SEQ ID NO: 1105331 - DNA, 25 bp, Homo sapien
tgcagccaccagttaacaatgtcct

SEQ ID NO: 1105332 - DNA, 25 bp, Homo sapien
tgggctacacctcagttgcgaactg

SEQ ID NO: 1105333 - DNA, 25 bp, Homo sapien
gaaagttgcttctcgatgctgctcc

SEQ ID NO: 1105334 - DNA, 25 bp, Homo sapien
caaagagacagaaaaggccccaatt

SEQ ID NO: 1105335 - DNA, 25 bp, Homo sapien
taaaggagctctggttacttggcct

SEQ ID NO: 1105336 - DNA, 25 bp, Homo sapien
gaaaaatggctctgctatacactgc

SEQ ID NO: 1105337 - DNA, 25 bp, Homo sapien
aatgtgaagaggtgtttcctgcccc

SEQ ID NO: 1105338 - DNA, 25 bp, Homo sapien
gataggacttttgtgatatggctaa

SEQ ID NO: 1105339 - DNA, 25 bp, Homo sapien
ggctaatctcagtacacatttcaac

SEQ ID NO: 1105340 - DNA, 25 bp, Homo sapien
aattgacttgaatatgactagccag

SEQ ID NO: 1105341 - DNA, 25 bp, Homo sapien
tatcttgggccacatgtcaaaagaa

SEQ ID NO: 1105342 - DNA, 25 bp, Homo sapien
catgcccgtggggtgactccaattt

SEQ ID NO: 1105343 - DNA, 25 bp, Homo sapien
tccaattttttgctcctctgtgcct

SEQ ID NO: 1105344 - DNA, 25 bp, Homo sapien
ctccaattttttgctcctctgtgcc

SEQ ID NO: 1105345 - DNA, 25 bp, Homo sapien
gggaacatgcccgtggggtgactcc

SEQ ID NO: 1105346 - DNA, 25 bp, Homo sapien
gtcctccaagcagaattagtccctg

SEQ ID NO: 1105347 - DNA, 25 bp, Homo sapien
agcagaattagtccctgatttccca

SEQ ID NO: 1105348 - DNA, 25 bp, Homo sapien
tttcccatcatgcttcatttggact

SEQ ID NO: 1105349 - DNA, 25 bp, Homo sapien
catttggacttatttgtacgatttt

SEQ ID NO: 1105350 - DNA, 25 bp, Homo sapien
taatccttataacaagtgtatatgt

SEQ ID NO: 1105351 - DNA, 25 bp, Homo sapien
cttgtcctttctagtatatagattg

SEQ ID NO: 1105352 - DNA, 25 bp, Homo sapien
agatgaggaagctaatgcatagtga

SEQ ID NO: 1105353 - DNA, 25 bp, Homo sapien
tatatagattgcaccattattgtca

SEQ ID NO: 1105354 - DNA, 25 bp, Homo sapien
tgtaataggtagtcatctagttggg

SEQ ID NO: 1105355 - DNA, 25 bp, Homo sapien
attttctcacaggtattttcattat

SEQ ID NO: 1105356 - DNA, 25 bp, Homo sapien
tttcttctaacattgctcccagatc

SEQ ID NO: 1105357 - DNA, 25 bp, Homo sapien
cagatctttccaacagtaaatgaga

SEQ ID NO: 1105358 - DNA, 25 bp, Homo sapien
caataattgaaagcccattggccaa

SEQ ID NO: 1105359 - DNA, 25 bp, Homo sapien
tctgcggagcagattaacagagctc

SEQ ID NO: 1105360 - DNA, 25 bp, Homo sapien
ctagcagtctgccacaataagcaat

SEQ ID NO: 1105361 - DNA, 25 bp, Homo sapien
ggccaaatgtcagtagaatctttta

SEQ ID NO: 1105362 - DNA, 25 bp, Homo sapien
ggtacaagcgatttgccttcttcgg

SEQ ID NO: 1105363 - DNA, 25 bp, Homo sapien
tttgaggaacaggagattactgact

SEQ ID NO: 1105364 - DNA, 25 bp, Homo sapien
gaacagccgtttggtcatcttcaaa

SEQ ID NO: 1105365 - DNA, 25 bp, Homo sapien
gactaatagttttgtacactggcaa

SEQ ID NO: 1105366 - DNA, 25 bp, Homo sapien
taagttgaagatcaggatagatgcc

SEQ ID NO: 1105367 - DNA, 25 bp, Homo sapien
tatattttctaagttgaagatcagg

SEQ ID NO: 1105368 - DNA, 25 bp, Homo sapien
ttttctaagttgaagatcaggatag

SEQ ID NO: 1105369 - DNA, 25 bp, Homo sapien
agatcaggatagatgccacacagag

SEQ ID NO: 1105370 - DNA, 25 bp, Homo sapien
ttgaaggcagcgaggaagagcggcc

SEQ ID NO: 1105371 - DNA, 25 bp, Homo sapien
aaggcagcgaggaagagcggccagt

SEQ ID NO: 1105372 - DNA, 25 bp, Homo sapien
gcagcgaggaagagcggccagttaa

SEQ ID NO: 1105373 - DNA, 25 bp, Homo sapien
cagcgaggaagagcggccagttaaa

SEQ ID NO: 1105374 - DNA, 25 bp, Homo sapien
gcttctggacctaggactttgaaca

SEQ ID NO: 1105375 - DNA, 25 bp, Homo sapien
aacggcgccacctttaagcgtcacg

SEQ ID NO: 1105376 - DNA, 25 bp, Homo sapien
actttgaacatgtcgcgcctgaagc

SEQ ID NO: 1105377 - DNA, 25 bp, Homo sapien
gatctccgcgctggtttcaaagcag

SEQ ID NO: 1105378 - DNA, 25 bp, Homo sapien
tctggactgcgccgcagagagtgaa

SEQ ID NO: 1105379 - DNA, 25 bp, Homo sapien
ccagagcgcgcgctcacgaaaggag

SEQ ID NO: 1105380 - DNA, 25 bp, Homo sapien
agtgaaggcccagcgcgaggccgcg

SEQ ID NO: 1105381 - DNA, 25 bp, Homo sapien
caggcgctggtgctgacgacatctg

SEQ ID NO: 1105382 - DNA, 25 bp, Homo sapien
aagtggcttctattctattccctga

SEQ ID NO: 1105383 - DNA, 25 bp, Homo sapien
ttagccacatgagctaatgtgtccc

SEQ ID NO: 1105384 - DNA, 25 bp, Homo sapien
tactgtctcctaccatgtcttgtca

SEQ ID NO: 1105385 - DNA, 25 bp, Homo sapien
tagcagagtgcccaacacgtaggca

SEQ ID NO: 1105386 - DNA, 25 bp, Homo sapien
aggctcctcgaggaggaagaattgc

SEQ ID NO: 1105387 - DNA, 25 bp, Homo sapien
ttgtatttagatggaaggtctttta

SEQ ID NO: 1105388 - DNA, 25 bp, Homo sapien
gtcctaatgaacaagctttagttct

SEQ ID NO: 1105389 - DNA, 25 bp, Homo sapien
cgtaaaacaatactaatcctcttag

SEQ ID NO: 1105390 - DNA, 25 bp, Homo sapien
tcaggtctagtatggcagactttca

SEQ ID NO: 1105391 - DNA, 25 bp, Homo sapien
tctacaatatcattgagaggcagtc

SEQ ID NO: 1105392 - DNA, 25 bp, Homo sapien
tatgtacgtaaatctgttccaagga

SEQ ID NO: 1105393 - DNA, 25 bp, Homo sapien
tatctgctgagaccttactaaaagg

SEQ ID NO: 1105394 - DNA, 25 bp, Homo sapien
acttcacttctaagaacctgtgtca

SEQ ID NO: 1105395 - DNA, 25 bp, Homo sapien
ccacccctgtcatcaagcatgtgat

SEQ ID NO: 1105396 - DNA, 25 bp, Homo sapien
tgaagattcttgtaggtctaataga

SEQ ID NO: 1105397 - DNA, 25 bp, Homo sapien
tcagtcaaatgaagagttgaatcat

SEQ ID NO: 1105398 - DNA, 25 bp, Homo sapien
tctctgtgatgggtacacataaatc

SEQ ID NO: 1105399 - DNA, 25 bp, Homo sapien
tcttttatatgactctacatttttc

SEQ ID NO: 1105400 - DNA, 25 bp, Homo sapien
tgatgggtacacataaatcttttat

SEQ ID NO: 1105401 - DNA, 25 bp, Homo sapien
gtatgtttgacacatttcataatta

SEQ ID NO: 1105402 - DNA, 25 bp, Homo sapien
cgcctccaaccacgacactagcggg

SEQ ID NO: 1105403 - DNA, 25 bp, Homo sapien
ctcgcctccaaccacgacactagcg

SEQ ID NO: 1105404 - DNA, 25 bp, Homo sapien
tcgcctccaaccacgacactagcgg

SEQ ID NO: 1105405 - DNA, 25 bp, Homo sapien
gcctccaaccacgacactagcgggc

SEQ ID NO: 1105406 - DNA, 25 bp, Homo sapien
atgagagcgcgcgagctcgagacca

SEQ ID NO: 1105407 - DNA, 25 bp, Homo sapien
gcgcgagctcgagaccacgagaaaa

SEQ ID NO: 1105408 - DNA, 25 bp, Homo sapien
agaggagggtgtccgatgctacagc

SEQ ID NO: 1105409 - DNA, 25 bp, Homo sapien
aagaggaaccggattgcgggagaga

SEQ ID NO: 1105410 - DNA, 25 bp, Homo sapien
agtgctggggacgacggtagtgttg

SEQ ID NO: 1105411 - DNA, 25 bp, Homo sapien
tgcagtgctggggacgacggtagtg

SEQ ID NO: 1105412 - DNA, 25 bp, Homo sapien
tggggacgacggtagtgttgctcat

SEQ ID NO: 1105413 - DNA, 25 bp, Homo sapien
tgctggggacgacggtagtgttgct

SEQ ID NO: 1105414 - DNA, 25 bp, Homo sapien
ctccgccaccgggcccgccgctggg

SEQ ID NO: 1105415 - DNA, 25 bp, Homo sapien
cacctccgccaccgggcccgccgct

SEQ ID NO: 1105416 - DNA, 25 bp, Homo sapien
gccaccaccacctccgccaccgggc

SEQ ID NO: 1105417 - DNA, 25 bp, Homo sapien
cgccaccaccacctccgccaccggg

SEQ ID NO: 1105418 - DNA, 25 bp, Homo sapien
aagaggcgcagttcgtcgatcttgc

SEQ ID NO: 1105419 - DNA, 25 bp, Homo sapien
cgctcggggagacattagtcacctg

SEQ ID NO: 1105420 - DNA, 25 bp, Homo sapien
agagctagcgctcggggagacatta

SEQ ID NO: 1105421 - DNA, 25 bp, Homo sapien
tccggcgggaagaggcgcagttcgt

SEQ ID NO: 1105422 - DNA, 25 bp, Homo sapien
tatatacgacgtacagactgcggtt

SEQ ID NO: 1105423 - DNA, 25 bp, Homo sapien
tagtcttgcgttaagtccccaaagc

SEQ ID NO: 1105424 - DNA, 25 bp, Homo sapien
tgtaggcctggaacacaaccgtctt

SEQ ID NO: 1105425 - DNA, 25 bp, Homo sapien
aatttcccgagaataacagccagtg

SEQ ID NO: 1105426 - DNA, 25 bp, Homo sapien
cattactgatcaaatgtagaaggcc

SEQ ID NO: 1105427 - DNA, 25 bp, Homo sapien
ccagatcatatagttgagggagaca

SEQ ID NO: 1105428 - DNA, 25 bp, Homo sapien
tctggtccatcacaacttcctctag

SEQ ID NO: 1105429 - DNA, 25 bp, Homo sapien
ggagacattctcaagcacacactag

SEQ ID NO: 1105430 - DNA, 25 bp, Homo sapien
tcctccaactaagagcggtggtgta

SEQ ID NO: 1105431 - DNA, 25 bp, Homo sapien
cagttcttacgtgtcctctgagggc

SEQ ID NO: 1105432 - DNA, 25 bp, Homo sapien
taatataagatagaggactgatgcc

SEQ ID NO: 1105433 - DNA, 25 bp, Homo sapien
caagtttttgatggtatctgggccc

SEQ ID NO: 1105434 - DNA, 25 bp, Homo sapien
tcaataagcaaaagggctagttccc

SEQ ID NO: 1105435 - DNA, 25 bp, Homo sapien
gatttctggcttggagcactttcag

SEQ ID NO: 1105436 - DNA, 25 bp, Homo sapien
ggcacacatgggagtagtactacgt

SEQ ID NO: 1105437 - DNA, 25 bp, Homo sapien
gacaattttatgcacccagggtaca

SEQ ID NO: 1105438 - DNA, 25 bp, Homo sapien
taacaaagcagacacgagatgagac

SEQ ID NO: 1105439 - DNA, 25 bp, Homo sapien
atgctgtgccacaactgctgagtct

SEQ ID NO: 1105440 - DNA, 25 bp, Homo sapien
aagcagacacgagatgagactggca

SEQ ID NO: 1105441 - DNA, 25 bp, Homo sapien
cagatgctgtgccacaactgctgag

SEQ ID NO: 1105442 - DNA, 25 bp, Homo sapien
tgaaggctctgtaagcatacatgga

SEQ ID NO: 1105443 - DNA, 25 bp, Homo sapien
tctcagggagttacaataagggaca

SEQ ID NO: 1105444 - DNA, 25 bp, Homo sapien
ggtcatcttaggatgcccacatagg

SEQ ID NO: 1105445 - DNA, 25 bp, Homo sapien
tctgcaagcaaaaattacggactgc

SEQ ID NO: 1105446 - DNA, 25 bp, Homo sapien
taagctacaggaaatcttgaacttt

SEQ ID NO: 1105447 - DNA, 25 bp, Homo sapien
gcaacccttggtatactgaaattca

SEQ ID NO: 1105448 - DNA, 25 bp, Homo sapien
tgcccatttggcacctaagctacag

SEQ ID NO: 1105449 - DNA, 25 bp, Homo sapien
ctttcacgaaaaccaaaatcactgc

SEQ ID NO: 1105450 - DNA, 25 bp, Homo sapien
tgtttttcaggcatctggaagggtt

SEQ ID NO: 1105451 - DNA, 25 bp, Homo sapien
catctggaagggttttgcatttgcc

SEQ ID NO: 1105452 - DNA, 25 bp, Homo sapien
gaagggttttgcatttgccttctcc

SEQ ID NO: 1105453 - DNA, 25 bp, Homo sapien
aggcatctggaagggttttgcattt

SEQ ID NO: 1105454 - DNA, 25 bp, Homo sapien
cacttgagtgcttgctggcctttag

SEQ ID NO: 1105455 - DNA, 25 bp, Homo sapien
tgaccaagagctaacaccgaagtgt

SEQ ID NO: 1105456 - DNA, 25 bp, Homo sapien
tagaatcccctgtagctgcagagga

SEQ ID NO: 1105457 - DNA, 25 bp, Homo sapien
gatggtcttatcctacaacaggcac

SEQ ID NO: 1105458 - DNA, 25 bp, Homo sapien
cacctatactgagaagtgccgataa

SEQ ID NO: 1105459 - DNA, 25 bp, Homo sapien
tagtgcatttgcaacatttctggca

SEQ ID NO: 1105460 - DNA, 25 bp, Homo sapien
tgtgagacacctgatagaagatctg

SEQ ID NO: 1105461 - DNA, 25 bp, Homo sapien
taaaaatagcaatgaggcccctcac

SEQ ID NO: 1105462 - DNA, 25 bp, Homo sapien
gagaaactggataagctgcagaaga

SEQ ID NO: 1105463 - DNA, 25 bp, Homo sapien
tggtatatagttcaggctgaaccag

SEQ ID NO: 1105464 - DNA, 25 bp, Homo sapien
atatgtacagggcacttaagagaaa

SEQ ID NO: 1105465 - DNA, 25 bp, Homo sapien
tgtacagggcacttaagagaaactg

SEQ ID NO: 1105466 - DNA, 25 bp, Homo sapien
ctgtaatacatattaagaaactgca

SEQ ID NO: 1105467 - DNA, 25 bp, Homo sapien
ttctgtaatacatattaagaaactg

SEQ ID NO: 1105468 - DNA, 25 bp, Homo sapien
aatacatattaagaaactgcatctc

SEQ ID NO: 1105469 - DNA, 25 bp, Homo sapien
gtaatacatattaagaaactgcatc

SEQ ID NO: 1105470 - DNA, 25 bp, Homo sapien
tctgttggaatcaagcgtagggctt

SEQ ID NO: 1105471 - DNA, 25 bp, Homo sapien
aatgctttatgtttcgccatgtgcc

SEQ ID NO: 1105472 - DNA, 25 bp, Homo sapien
catacagtgccagttgaaaagctaa

SEQ ID NO: 1105473 - DNA, 25 bp, Homo sapien
catggcacattccttacctgtacag

SEQ ID NO: 1105474 - DNA, 25 bp, Homo sapien
gctgttttatgaacaacgactcgtg

SEQ ID NO: 1105475 - DNA, 25 bp, Homo sapien
agcaagcacagtcggttctccaggg

SEQ ID NO: 1105476 - DNA, 25 bp, Homo sapien
ctgtactcgatttttaagtcatgaa

SEQ ID NO: 1105477 - DNA, 25 bp, Homo sapien
tgaaccaaacgtaagcaagcacagt

SEQ ID NO: 1105478 - DNA, 25 bp, Homo sapien
aatagcacaatacacactacttttt

SEQ ID NO: 1105479 - DNA, 25 bp, Homo sapien
aaatagcacaatacacactactttt

SEQ ID NO: 1105480 - DNA, 25 bp, Homo sapien
atagcacaatacacactactttttt

SEQ ID NO: 1105481 - DNA, 25 bp, Homo sapien
aaaatagcacaatacacactacttt

SEQ ID NO: 1105482 - DNA, 25 bp, Homo sapien
tgaacttcaatgtgtgaaaatttgt

SEQ ID NO: 1105483 - DNA, 25 bp, Homo sapien
tatgtcagaatgaacttcaatgtgt

SEQ ID NO: 1105484 - DNA, 25 bp, Homo sapien
agcttgatttctatgattatttatc

SEQ ID NO: 1105485 - DNA, 25 bp, Homo sapien
tacaaagcttgatttctatgattat

SEQ ID NO: 1105486 - DNA, 25 bp, Homo sapien
tccctgatacaccacctgagtttgt

SEQ ID NO: 1105487 - DNA, 25 bp, Homo sapien
aacacccagaaaatgtctccctgat

SEQ ID NO: 1105488 - DNA, 25 bp, Homo sapien
caccacctgagtttgttgaaagtac

SEQ ID NO: 1105489 - DNA, 25 bp, Homo sapien
gaaaatgtctccctgatacaccacc

SEQ ID NO: 1105490 - DNA, 25 bp, Homo sapien
gagaaacatccttgcattagaacac

SEQ ID NO: 1105491 - DNA, 25 bp, Homo sapien
ctgcagagaaacatccttgcattag

SEQ ID NO: 1105492 - DNA, 25 bp, Homo sapien
gcagagaaacatccttgcattagaa

SEQ ID NO: 1105493 - DNA, 25 bp, Homo sapien
agagaaacatccttgcattagaaca

SEQ ID NO: 1105494 - DNA, 25 bp, Homo sapien
gctttagcttcatcaggaataactc

SEQ ID NO: 1105495 - DNA, 25 bp, Homo sapien
ggagtaggcaggagtccaccaccag

SEQ ID NO: 1105496 - DNA, 25 bp, Homo sapien
agtaggcaggagtccaccaccaggc

SEQ ID NO: 1105497 - DNA, 25 bp, Homo sapien
agctttagcttcatcaggaataact

SEQ ID NO: 1105498 - DNA, 25 bp, Homo sapien
aggaagcccaagtgcagcaagggca

SEQ ID NO: 1105499 - DNA, 25 bp, Homo sapien
ccaggaagcccaagtgcagcaaggg

SEQ ID NO: 1105500 - DNA, 25 bp, Homo sapien
tgagagttcaagtttgctccaggaa

SEQ ID NO: 1105501 - DNA, 25 bp, Homo sapien
aagcagccagtggaacagcgccaat

SEQ ID NO: 1105502 - DNA, 25 bp, Homo sapien
tcagcaactgatctgcagcaagaga

SEQ ID NO: 1105503 - DNA, 25 bp, Homo sapien
ctttactagaggtatccgatttcag

SEQ ID NO: 1105504 - DNA, 25 bp, Homo sapien
tttactagaggtatccgatttcaga

SEQ ID NO: 1105505 - DNA, 25 bp, Homo sapien
ctggttctatagcagcagaaattag

SEQ ID NO: 1105506 - DNA, 25 bp, Homo sapien
tctatagcagcagaaattagggact

SEQ ID NO: 1105507 - DNA, 25 bp, Homo sapien
agcagaaattagggactgtgcttct

SEQ ID NO: 1105508 - DNA, 25 bp, Homo sapien
ggactgtgcttctcgtactcttttc

SEQ ID NO: 1105509 - DNA, 25 bp, Homo sapien
ctcctagaacgtgatcttgatcttg

SEQ ID NO: 1105510 - DNA, 25 bp, Homo sapien
cctcctagaacgtgatcttgatctt

SEQ ID NO: 1105511 - DNA, 25 bp, Homo sapien
tcctcctagaacgtgatcttgatct

SEQ ID NO: 1105512 - DNA, 25 bp, Homo sapien
taacggacactaagaaaaggcagac

SEQ ID NO: 1105513 - DNA, 25 bp, Homo sapien
tctaggattcaagtcacactgctct

SEQ ID NO: 1105514 - DNA, 25 bp, Homo sapien
gaacttctcagtatctgtgacatga

SEQ ID NO: 1105515 - DNA, 25 bp, Homo sapien
ggataacccctgtaatacttcaaga

SEQ ID NO: 1105516 - DNA, 25 bp, Homo sapien
cttgtgaaagtcatggtcatttaac

SEQ ID NO: 1105517 - DNA, 25 bp, Homo sapien
tggtgagggttaccacaacccacaa

SEQ ID NO: 1105518 - DNA, 25 bp, Homo sapien
tgatgcttgatactacaactgggct

SEQ ID NO: 1105519 - DNA, 25 bp, Homo sapien
ggtcatttaacacactatgtgatgc

SEQ ID NO: 1105520 - DNA, 25 bp, Homo sapien
ggaacccatgtatagtcaggactga

SEQ ID NO: 1105521 - DNA, 25 bp, Homo sapien
ttttcctatatgtggattccagagg

SEQ ID NO: 1105522 - DNA, 25 bp, Homo sapien
tgccataactccctaaaacaactgc

SEQ ID NO: 1105523 - DNA, 25 bp, Homo sapien
gtactaatatagcttctgttgccat

SEQ ID NO: 1105524 - DNA, 25 bp, Homo sapien
ggcttttggatcgtcgccgactcct

SEQ ID NO: 1105525 - DNA, 25 bp, Homo sapien
gaccgccgtctcgatctgcttcttg

SEQ ID NO: 1105526 - DNA, 25 bp, Homo sapien
tcctagacttagaatgtgaccgccg

SEQ ID NO: 1105527 - DNA, 25 bp, Homo sapien
gatcgtcgccgactcctagacttag

SEQ ID NO: 1105528 - DNA, 25 bp, Homo sapien
cttgtttttgatgtgctccttgacc

SEQ ID NO: 1105529 - DNA, 25 bp, Homo sapien
tgtttttgatgtgctccttgacctt

SEQ ID NO: 1105530 - DNA, 25 bp, Homo sapien
gtttttgatgtgctccttgaccttc

SEQ ID NO: 1105531 - DNA, 25 bp, Homo sapien
tttgatgtgctccttgaccttctac

SEQ ID NO: 1105532 - DNA, 25 bp, Homo sapien
gcggctattatgaactattcagggc

SEQ ID NO: 1105533 - DNA, 25 bp, Homo sapien
gccaaaacccatagagcactaccaa

SEQ ID NO: 1105534 - DNA, 25 bp, Homo sapien
taagttaactatctctaggctcctc

SEQ ID NO: 1105535 - DNA, 25 bp, Homo sapien
tgtcaacctctatcatggatcaagc

SEQ ID NO: 1105536 - DNA, 25 bp, Homo sapien
agactcagctgatgccaatttatat

SEQ ID NO: 1105537 - DNA, 25 bp, Homo sapien
cattagaagactcagctgatgccaa

SEQ ID NO: 1105538 - DNA, 25 bp, Homo sapien
tagaagactcagctgatgccaattt

SEQ ID NO: 1105539 - DNA, 25 bp, Homo sapien
tgcattagaagactcagctgatgcc

SEQ ID NO: 1105540 - DNA, 25 bp, Homo sapien
tgcacttctagaacgtctggctgtg

SEQ ID NO: 1105541 - DNA, 25 bp, Homo sapien
cttgcacttctagaacgtctggctg

SEQ ID NO: 1105542 - DNA, 25 bp, Homo sapien
tgcttgcacttctagaacgtctggc

SEQ ID NO: 1105543 - DNA, 25 bp, Homo sapien
ctgcttgcacttctagaacgtctgg

SEQ ID NO: 1105544 - DNA, 25 bp, Homo sapien
ctttaaataacagcaaaatgtaact

SEQ ID NO: 1105545 - DNA, 25 bp, Homo sapien
taacagcaaaatgtaacttttttca

SEQ ID NO: 1105546 - DNA, 25 bp, Homo sapien
actacattattcttcacaaattgcc

SEQ ID NO: 1105547 - DNA, 25 bp, Homo sapien
cattattcttcacaaattgcctttt

SEQ ID NO: 1105548 - DNA, 25 bp, Homo sapien
gaattccatgttacttcaaatatac

SEQ ID NO: 1105549 - DNA, 25 bp, Homo sapien
tctcttgaattccatgttacttcaa

SEQ ID NO: 1105550 - DNA, 25 bp, Homo sapien
ctctcttgaattccatgttacttca

SEQ ID NO: 1105551 - DNA, 25 bp, Homo sapien
cttgaattccatgttacttcaaata

SEQ ID NO: 1105552 - DNA, 25 bp, Homo sapien
tctcaagtactaacatgcagatgat

SEQ ID NO: 1105553 - DNA, 25 bp, Homo sapien
tggaacaattcagtatggtttagcc

SEQ ID NO: 1105554 - DNA, 25 bp, Homo sapien
caagcactgcagcaaaacatgtgaa

SEQ ID NO: 1105555 - DNA, 25 bp, Homo sapien
taagaatgacacaaaccagaacctg

SEQ ID NO: 1105556 - DNA, 25 bp, Homo sapien
tacagcatgagaaggcacttacaag

SEQ ID NO: 1105557 - DNA, 25 bp, Homo sapien
caaacattgtcacgactgtgcacct

SEQ ID NO: 1105558 - DNA, 25 bp, Homo sapien
gtagcacaactacaaacacagtggg

SEQ ID NO: 1105559 - DNA, 25 bp, Homo sapien
cacggcctttcatggatgtttgcaa

SEQ ID NO: 1105560 - DNA, 25 bp, Homo sapien
gaagatatacagctgatatacagcc

SEQ ID NO: 1105561 - DNA, 25 bp, Homo sapien
gaaaccttatactctagcaaaatcg

SEQ ID NO: 1105562 - DNA, 25 bp, Homo sapien
caatgaaagatgtggccagatgtag

SEQ ID NO: 1105563 - DNA, 25 bp, Homo sapien
tcagtgttcagagtaagtacagaat

SEQ ID NO: 1105564 - DNA, 25 bp, Homo sapien
ctcctaggggatggtgagcgggaca

SEQ ID NO: 1105565 - DNA, 25 bp, Homo sapien
gatggtgagcgggacaattttcttt

SEQ ID NO: 1105566 - DNA, 25 bp, Homo sapien
ggagaccgaggctttttaggagatc

SEQ ID NO: 1105567 - DNA, 25 bp, Homo sapien
taggagatcttgtgccactcctgct

SEQ ID NO: 1105568 - DNA, 25 bp, Homo sapien
tataagtagtacagcaaagatccaa

SEQ ID NO: 1105569 - DNA, 25 bp, Homo sapien
gacagtaaaatgtacagcaacaggt

SEQ ID NO: 1105570 - DNA, 25 bp, Homo sapien
tcacaagtcagaaggagaatacatt

SEQ ID NO: 1105571 - DNA, 25 bp, Homo sapien
aacttgtttagatgatgagcctgac

SEQ ID NO: 1105572 - DNA, 25 bp, Homo sapien
tgttgatcgttctctttcatcccta

SEQ ID NO: 1105573 - DNA, 25 bp, Homo sapien
gttgatcgttctctttcatccctac

SEQ ID NO: 1105574 - DNA, 25 bp, Homo sapien
gatcgttctctttcatccctacttc

SEQ ID NO: 1105575 - DNA, 25 bp, Homo sapien
tgcttgttgatcgttctctttcatc

SEQ ID NO: 1105576 - DNA, 25 bp, Homo sapien
ctttgccaaggagaataataaaagt

SEQ ID NO: 1105577 - DNA, 25 bp, Homo sapien
tttgccaaggagaataataaaagta

SEQ ID NO: 1105578 - DNA, 25 bp, Homo sapien
tgccaaggagaataataaaagtaaa

SEQ ID NO: 1105579 - DNA, 25 bp, Homo sapien
ttgccaaggagaataataaaagtaa

SEQ ID NO: 1105580 - DNA, 25 bp, Homo sapien
cactttggattctcttagtgaatca

SEQ ID NO: 1105581 - DNA, 25 bp, Homo sapien
actttggattctcttagtgaatcac

SEQ ID NO: 1105582 - DNA, 25 bp, Homo sapien
tgccacaaggcttaaaggattatct

SEQ ID NO: 1105583 - DNA, 25 bp, Homo sapien
caccgtgtgcataagattactactg

SEQ ID NO: 1105584 - DNA, 25 bp, Homo sapien
gatgcaggtatacagttggactccc

SEQ ID NO: 1105585 - DNA, 25 bp, Homo sapien
catgacaagaattggttacctcgta

SEQ ID NO: 1105586 - DNA, 25 bp, Homo sapien
aaatacacaacagaactcggtgtgg

SEQ ID NO: 1105587 - DNA, 25 bp, Homo sapien
tagcatcttgtcagtggcactactt

SEQ ID NO: 1105588 - DNA, 25 bp, Homo sapien
taaaaggcttgtgtcccagtgcaac

SEQ ID NO: 1105589 - DNA, 25 bp, Homo sapien
gattacaagtgagggaacacactgt

SEQ ID NO: 1105590 - DNA, 25 bp, Homo sapien
taagggccccataatcaaatagcag

SEQ ID NO: 1105591 - DNA, 25 bp, Homo sapien
gggtcttgctattacccaacctgga

SEQ ID NO: 1105592 - DNA, 25 bp, Homo sapien
gaacacagttatctccagctctatg

SEQ ID NO: 1105593 - DNA, 25 bp, Homo sapien
tgtcccaggcaccaaaggctacatt

SEQ ID NO: 1105594 - DNA, 25 bp, Homo sapien
acagcacagctatgaatattttgct

SEQ ID NO: 1105595 - DNA, 25 bp, Homo sapien
tcttttctctgatcacaaagagcaa

SEQ ID NO: 1105596 - DNA, 25 bp, Homo sapien
gaaacagattatccattccaaaatg

SEQ ID NO: 1105597 - DNA, 25 bp, Homo sapien
gcttatggttgattaatttcctaac

SEQ ID NO: 1105598 - DNA, 25 bp, Homo sapien
ttcctaataagtacacatcggtctg

SEQ ID NO: 1105599 - DNA, 25 bp, Homo sapien
gaatgtctcaagaatgcatctgtca

SEQ ID NO: 1105600 - DNA, 25 bp, Homo sapien
caagttttttagactgaccagtagc

SEQ ID NO: 1105601 - DNA, 25 bp, Homo sapien
tattccaaggtggtttgaaggtcca

SEQ ID NO: 1105602 - DNA, 25 bp, Homo sapien
tgcgcctgaccttaatattttatgg

SEQ ID NO: 1105603 - DNA, 25 bp, Homo sapien
gcagaccataccaaaccagaatgta

SEQ ID NO: 1105604 - DNA, 25 bp, Homo sapien
atgcactaggcaccagcagaccata

SEQ ID NO: 1105605 - DNA, 25 bp, Homo sapien
tgtattagattagcctcctgcatgc

SEQ ID NO: 1105606 - DNA, 25 bp, Homo sapien
tggcatcagtatagaggaggcactg

SEQ ID NO: 1105607 - DNA, 25 bp, Homo sapien
ggcttgaaggcatttcaattacaga

SEQ ID NO: 1105608 - DNA, 25 bp, Homo sapien
cctgtttcattagatagccatggca

SEQ ID NO: 1105609 - DNA, 25 bp, Homo sapien
gagttatctggtattgcaccaacct

SEQ ID NO: 1105610 - DNA, 25 bp, Homo sapien
tctcccattgttggccagacaaaag

SEQ ID NO: 1105611 - DNA, 25 bp, Homo sapien
tgagctcagtctttgacagggctgc

SEQ ID NO: 1105612 - DNA, 25 bp, Homo sapien
ccagaatagtatgccaggtttcaac

SEQ ID NO: 1105613 - DNA, 25 bp, Homo sapien
taatagcgggaatgctgagctcagt

SEQ ID NO: 1105614 - DNA, 25 bp, Homo sapien
gctgtgcgcagtggcatgagcctat

SEQ ID NO: 1105615 - DNA, 25 bp, Homo sapien
aaaatcagctgtgcgcagtggcatg

SEQ ID NO: 1105616 - DNA, 25 bp, Homo sapien
gagcccgggagactgaggctacaat

SEQ ID NO: 1105617 - DNA, 25 bp, Homo sapien
tcagctgtgcgcagtggcatgagcc

SEQ ID NO: 1105618 - DNA, 25 bp, Homo sapien
agcgtgaaacctaatgttattatta

SEQ ID NO: 1105619 - DNA, 25 bp, Homo sapien
aagcgtgaaacctaatgttattatt

SEQ ID NO: 1105620 - DNA, 25 bp, Homo sapien
gcgtgaaacctaatgttattattat

SEQ ID NO: 1105621 - DNA, 25 bp, Homo sapien
aaagcgtgaaacctaatgttattat

SEQ ID NO: 1105622 - DNA, 25 bp, Homo sapien
ggcggaagccatcagctatggagat

SEQ ID NO: 1105623 - DNA, 25 bp, Homo sapien
aaaatgctcagggatggagccctct

SEQ ID NO: 1105624 - DNA, 25 bp, Homo sapien
gatggagccctctggcggaagccat

SEQ ID NO: 1105625 - DNA, 25 bp, Homo sapien
caatgctccagtcaaggtgaaaaat

SEQ ID NO: 1105626 - DNA, 25 bp, Homo sapien
cctttacaccttgctgtgatgttag

SEQ ID NO: 1105627 - DNA, 25 bp, Homo sapien
ttacaccttgctgtgatgttaggaa

SEQ ID NO: 1105628 - DNA, 25 bp, Homo sapien
tttacaccttgctgtgatgttagga

SEQ ID NO: 1105629 - DNA, 25 bp, Homo sapien
accttgctgtgatgttaggaaataa

SEQ ID NO: 1105630 - DNA, 25 bp, Homo sapien
taatagatacccattaaatgccagc

SEQ ID NO: 1105631 - DNA, 25 bp, Homo sapien
aatagtgtgaccacgactctgcagc

SEQ ID NO: 1105632 - DNA, 25 bp, Homo sapien
aatatacagcatagtgcccaacaca

SEQ ID NO: 1105633 - DNA, 25 bp, Homo sapien
ggagtcctgagattcaaaagcttga

SEQ ID NO: 1105634 - DNA, 25 bp, Homo sapien
gaagatccgctcactgcggagggac

SEQ ID NO: 1105635 - DNA, 25 bp, Homo sapien
aaccccgttgctgtcgtcgcggatg

SEQ ID NO: 1105636 - DNA, 25 bp, Homo sapien
tgccctcggcggtacctttaccaga

SEQ ID NO: 1105637 - DNA, 25 bp, Homo sapien
ggcaagggcggcaaagcttgtcata

SEQ ID NO: 1105638 - DNA, 25 bp, Homo sapien
cgcccacaaaaagcgcggttggcgg

SEQ ID NO: 1105639 - DNA, 25 bp, Homo sapien
gctgtggtttccgaccgcccacaaa

SEQ ID NO: 1105640 - DNA, 25 bp, Homo sapien
agctctgggcggaaacacactgcct

SEQ ID NO: 1105641 - DNA, 25 bp, Homo sapien
aaacacactgcctcggaggcgccgg

SEQ ID NO: 1105642 - DNA, 25 bp, Homo sapien
tgacatcacatcctgcgtgccgtgg

SEQ ID NO: 1105643 - DNA, 25 bp, Homo sapien
taaatgttggttgactgagtatcct

SEQ ID NO: 1105644 - DNA, 25 bp, Homo sapien
ggttgtttataacatgcaccgaaca

SEQ ID NO: 1105645 - DNA, 25 bp, Homo sapien
tcctctgcatctcggtgacatcaca

SEQ ID NO: 1105646 - DNA, 25 bp, Homo sapien
gcaatcagtactggtgctgtacata

SEQ ID NO: 1105647 - DNA, 25 bp, Homo sapien
cagtgctccctgcaatcagtactgg

SEQ ID NO: 1105648 - DNA, 25 bp, Homo sapien
ttctacagtgctccctgcaatcagt

SEQ ID NO: 1105649 - DNA, 25 bp, Homo sapien
cttcattcctcttctacagtgctcc

SEQ ID NO: 1105650 - DNA, 25 bp, Homo sapien
gacatctgcccgaaattcattcatc

SEQ ID NO: 1105651 - DNA, 25 bp, Homo sapien
aagtcagcacctaaactcttctatg

SEQ ID NO: 1105652 - DNA, 25 bp, Homo sapien
tccgattgctggacagcccatcatt

SEQ ID NO: 1105653 - DNA, 25 bp, Homo sapien
taaatatttgagtggcctcccctct

SEQ ID NO: 1105654 - DNA, 25 bp, Homo sapien
cctgctcggcctctgtagtaactgg

SEQ ID NO: 1105655 - DNA, 25 bp, Homo sapien
ctgctcggcctctgtagtaactggg

SEQ ID NO: 1105656 - DNA, 25 bp, Homo sapien
tcctgctcggcctctgtagtaactg

SEQ ID NO: 1105657 - DNA, 25 bp, Homo sapien
tgctcggcctctgtagtaactggga

SEQ ID NO: 1105658 - DNA, 25 bp, Homo sapien
tgatcatgttctgtgacacagacct

SEQ ID NO: 1105659 - DNA, 25 bp, Homo sapien
aacatgtgtctcaggtggtccggga

SEQ ID NO: 1105660 - DNA, 25 bp, Homo sapien
ccaaatgtgagtgatcatgttctgt

SEQ ID NO: 1105661 - DNA, 25 bp, Homo sapien
gacaactcaaagtggttggtgagga

SEQ ID NO: 1105662 - DNA, 25 bp, Homo sapien
ttgccagacgaaatacaaggtgtcg

SEQ ID NO: 1105663 - DNA, 25 bp, Homo sapien
caaggtgtcggcgaaaagagtcaat

SEQ ID NO: 1105664 - DNA, 25 bp, Homo sapien
gaatttggcgttattattcccacac

SEQ ID NO: 1105665 - DNA, 25 bp, Homo sapien
aactctaaacaactcaaacaaatgg

SEQ ID NO: 1105666 - DNA, 25 bp, Homo sapien
tcaaattctttcttgcaagagatcc

SEQ ID NO: 1105667 - DNA, 25 bp, Homo sapien
aatgctctcttggggtctggatagg

SEQ ID NO: 1105668 - DNA, 25 bp, Homo sapien
tcttgcaagagatccaagaatgctc

SEQ ID NO: 1105669 - DNA, 25 bp, Homo sapien
tgcaagagatccaagaatgctctct

SEQ ID NO: 1105670 - DNA, 25 bp, Homo sapien
aaattttatattcgagtgctacttc

SEQ ID NO: 1105671 - DNA, 25 bp, Homo sapien
tattcttagttgagcagcctgtgcc

SEQ ID NO: 1105672 - DNA, 25 bp, Homo sapien
gagtattcttagttgagcagcctgt

SEQ ID NO: 1105673 - DNA, 25 bp, Homo sapien
ttcgagtgctacttcttttgtggca

SEQ ID NO: 1105674 - DNA, 25 bp, Homo sapien
cttctatatagaagtaacttgcctt

SEQ ID NO: 1105675 - DNA, 25 bp, Homo sapien
cacccttctatatagaagtaacttg

SEQ ID NO: 1105676 - DNA, 25 bp, Homo sapien
tgtttgatctgtaagggtgcaccct

SEQ ID NO: 1105677 - DNA, 25 bp, Homo sapien
cattgtttgatctgtaagggtgcac

SEQ ID NO: 1105678 - DNA, 25 bp, Homo sapien
cataaatactcgtgttccagtgaac

SEQ ID NO: 1105679 - DNA, 25 bp, Homo sapien
ttccagtgaaccaacaacactccag

SEQ ID NO: 1105680 - DNA, 25 bp, Homo sapien
aggaagttaaggaggtcggcacaat

SEQ ID NO: 1105681 - DNA, 25 bp, Homo sapien
gagcaagactatcagaggtgtttga

SEQ ID NO: 1105682 - DNA, 25 bp, Homo sapien
tcagaggtctgacacacatcactaa

SEQ ID NO: 1105683 - DNA, 25 bp, Homo sapien
aggagaaggaagttcacaggttaat

SEQ ID NO: 1105684 - DNA, 25 bp, Homo sapien
gaaggaagttcacaggttaatcgct

SEQ ID NO: 1105685 - DNA, 25 bp, Homo sapien
agaaggaagttcacaggttaatcgc

SEQ ID NO: 1105686 - DNA, 25 bp, Homo sapien
ggaagttcacaggttaatcgctcag

SEQ ID NO: 1105687 - DNA, 25 bp, Homo sapien
caccatgattgtacgttccctgagt

SEQ ID NO: 1105688 - DNA, 25 bp, Homo sapien
ttgtaatcctcatgtgtctagggag

SEQ ID NO: 1105689 - DNA, 25 bp, Homo sapien
tgattggctgatgccggtggtttcc

SEQ ID NO: 1105690 - DNA, 25 bp, Homo sapien
tccttgtgataataagagttttctc

SEQ ID NO: 1105691 - DNA, 25 bp, Homo sapien
tttcaggttagatacacaagtggga

SEQ ID NO: 1105692 - DNA, 25 bp, Homo sapien
attgaccttaggctgaaaacagagc

SEQ ID NO: 1105693 - DNA, 25 bp, Homo sapien
aaaacagagctaccagaccatgctc

SEQ ID NO: 1105694 - DNA, 25 bp, Homo sapien
ggtcatcaggatagctgttcaccag

SEQ ID NO: 1105695 - DNA, 25 bp, Homo sapien
gcaacacagctagagattgcaccca

SEQ ID NO: 1105696 - DNA, 25 bp, Homo sapien
gagattgcacccaagtcagcagaca

SEQ ID NO: 1105697 - DNA, 25 bp, Homo sapien
cagctagagattgcacccaagtcag

SEQ ID NO: 1105698 - DNA, 25 bp, Homo sapien
cagctgagcaacacagctagagatt

SEQ ID NO: 1105699 - DNA, 25 bp, Homo sapien
taaaagacgtaagccacaacgtgga

SEQ ID NO: 1105700 - DNA, 25 bp, Homo sapien
catcagtcacagcttgcgttttagg

SEQ ID NO: 1105701 - DNA, 25 bp, Homo sapien
taatgacccagtgcttacgatgacg

SEQ ID NO: 1105702 - DNA, 25 bp, Homo sapien
ccctgagggcggtgctaaaagacgt

SEQ ID NO: 1105703 - DNA, 25 bp, Homo sapien
tgagagccacccgggcgtctctgtg

SEQ ID NO: 1105704 - DNA, 25 bp, Homo sapien
ttcgcccgagacgtggcggaaagct

SEQ ID NO: 1105705 - DNA, 25 bp, Homo sapien
acctcaggccggaggttcgcccgag

SEQ ID NO: 1105706 - DNA, 25 bp, Homo sapien
gctggcttagtgttgaaaccgggta

SEQ ID NO: 1105707 - DNA, 25 bp, Homo sapien
tccctgcgggcgaaattcctgagta

SEQ ID NO: 1105708 - DNA, 25 bp, Homo sapien
tccaagtggtgttagtccctgcggg

SEQ ID NO: 1105709 - DNA, 25 bp, Homo sapien
tctgcagtctcacgatcacagtggg

SEQ ID NO: 1105710 - DNA, 25 bp, Homo sapien
caaagcggagtgaagctggagtccc

SEQ ID NO: 1105711 - DNA, 25 bp, Homo sapien
gctaaagcacgcaggtagagccgac

SEQ ID NO: 1105712 - DNA, 25 bp, Homo sapien
gctgaaccgcgaaagaagaagagag

SEQ ID NO: 1105713 - DNA, 25 bp, Homo sapien
gatcaggcgagaaggagctaaagca

SEQ ID NO: 1105714 - DNA, 25 bp, Homo sapien
tataaccagtcgaagccgggtgtcc

SEQ ID NO: 1105715 - DNA, 25 bp, Homo sapien
gtgaggaggcgtctttttcctgcat

SEQ ID NO: 1105716 - DNA, 25 bp, Homo sapien
ctgcgtggcgaaatgttggaagtgt

SEQ ID NO: 1105717 - DNA, 25 bp, Homo sapien
ccttgtgaggaggcgtctttttcct

SEQ ID NO: 1105718 - DNA, 25 bp, Homo sapien
gcgaaatgttggaagtgtggcagga

SEQ ID NO: 1105719 - DNA, 25 bp, Homo sapien
gcgccccttgcttgaacgtggtgga

SEQ ID NO: 1105720 - DNA, 25 bp, Homo sapien
gatggggggcactacagccctggag

SEQ ID NO: 1105721 - DNA, 25 bp, Homo sapien
caggcgccccttgcttgaacgtggt

SEQ ID NO: 1105722 - DNA, 25 bp, Homo sapien
ccccttgcttgaacgtggtggacag

SEQ ID NO: 1105723 - DNA, 25 bp, Homo sapien
ttcataagccgtatctcttttaccg

SEQ ID NO: 1105724 - DNA, 25 bp, Homo sapien
gtatctcttttaccgcccaactgtg

SEQ ID NO: 1105725 - DNA, 25 bp, Homo sapien
ttcaaattcataagccgtatctctt

SEQ ID NO: 1105726 - DNA, 25 bp, Homo sapien
taagccgtatctcttttaccgccca

SEQ ID NO: 1105727 - DNA, 25 bp, Homo sapien
tggacaaacggctccttccagtcct

SEQ ID NO: 1105728 - DNA, 25 bp, Homo sapien
caaaagaaatacgatcactggacca

SEQ ID NO: 1105729 - DNA, 25 bp, Homo sapien
tagaaacatctttcggttgccttcc

SEQ ID NO: 1105730 - DNA, 25 bp, Homo sapien
gaccatccgatacaaagctgtgctg

SEQ ID NO: 1105731 - DNA, 25 bp, Homo sapien
aaccctacacaagaaacgaactgca

SEQ ID NO: 1105732 - DNA, 25 bp, Homo sapien
ctgaatggtaaacttttgcactaag

SEQ ID NO: 1105733 - DNA, 25 bp, Homo sapien
accctacacaagaaacgaactgcat

SEQ ID NO: 1105734 - DNA, 25 bp, Homo sapien
gttccaaagcttgggcagctacact

SEQ ID NO: 1105735 - DNA, 25 bp, Homo sapien
gggatttccagaacggctatattca

SEQ ID NO: 1105736 - DNA, 25 bp, Homo sapien
cctagtgggatttccagaacggcta

SEQ ID NO: 1105737 - DNA, 25 bp, Homo sapien
aaggcaattcctagtgggatttcca

SEQ ID NO: 1105738 - DNA, 25 bp, Homo sapien
ttccagaacggctatattcaaaacc

SEQ ID NO: 1105739 - DNA, 25 bp, Homo sapien
aaaagatgggtaatagttacagtgg

SEQ ID NO: 1105740 - DNA, 25 bp, Homo sapien
taaaagatgggtaatagttacagtg

SEQ ID NO: 1105741 - DNA, 25 bp, Homo sapien
cacttgcctgaagtacctgtttgta

SEQ ID NO: 1105742 - DNA, 25 bp, Homo sapien
taattgctgcctctagtaatttgat

SEQ ID NO: 1105743 - DNA, 25 bp, Homo sapien
gctgcctctagtaatttgattttgg

SEQ ID NO: 1105744 - DNA, 25 bp, Homo sapien
aaattcagatgccacttgcctgaag

SEQ ID NO: 1105745 - DNA, 25 bp, Homo sapien
ttagaaagattcagaccagggcccg

SEQ ID NO: 1105746 - DNA, 25 bp, Homo sapien
caagttggtagagtcactatataaa

SEQ ID NO: 1105747 - DNA, 25 bp, Homo sapien
aaggtattaattcaagttggtagag

SEQ ID NO: 1105748 - DNA, 25 bp, Homo sapien
tgacaagacttactgtactcataat

SEQ ID NO: 1105749 - DNA, 25 bp, Homo sapien
tgttatccacgaccaaaataatgtc

SEQ ID NO: 1105750 - DNA, 25 bp, Homo sapien
tgtctccatgcttatggacaatatg

SEQ ID NO: 1105751 - DNA, 25 bp, Homo sapien
caatgtcaatcaccttctgggtggg

SEQ ID NO: 1105752 - DNA, 25 bp, Homo sapien
ctggaaatatggtgacataaaagtg

SEQ ID NO: 1105753 - DNA, 25 bp, Homo sapien
acatagaaatatcagctcccagagc

SEQ ID NO: 1105754 - DNA, 25 bp, Homo sapien
cattcatgtattttgttgcagaata

SEQ ID NO: 1105755 - DNA, 25 bp, Homo sapien
gttgcagaatacatagaaatatcag

SEQ ID NO: 1105756 - DNA, 25 bp, Homo sapien
gtattttgttgcagaatacatagaa

SEQ ID NO: 1105757 - DNA, 25 bp, Homo sapien
agttttgcaagaaacgaagtctatt

SEQ ID NO: 1105758 - DNA, 25 bp, Homo sapien
caagaaacgaagtctattatgaagg

SEQ ID NO: 1105759 - DNA, 25 bp, Homo sapien
ggctttcacaattaacagacaccag

SEQ ID NO: 1105760 - DNA, 25 bp, Homo sapien
cgaagtctattatgaaggctttcac

SEQ ID NO: 1105761 - DNA, 25 bp, Homo sapien
gggcaactgccattccgtttttgaa

SEQ ID NO: 1105762 - DNA, 25 bp, Homo sapien
gagtcttcagacctcgattgcagag

SEQ ID NO: 1105763 - DNA, 25 bp, Homo sapien
caataggagatggaactgctccaag

SEQ ID NO: 1105764 - DNA, 25 bp, Homo sapien
tccattcggacatgtagagtcttca

SEQ ID NO: 1105765 - DNA, 25 bp, Homo sapien
tacaacctgtacactgacgcttcac

SEQ ID NO: 1105766 - DNA, 25 bp, Homo sapien
taggttcttgaggaaaatctcagca

SEQ ID NO: 1105767 - DNA, 25 bp, Homo sapien
taaaaggtgaccatccctgtacaac

SEQ ID NO: 1105768 - DNA, 25 bp, Homo sapien
aagagtgcccttaatataaaaggtg

SEQ ID NO: 1105769 - DNA, 25 bp, Homo sapien
ctatagcaaagaaaacatgaattta

SEQ ID NO: 1105770 - DNA, 25 bp, Homo sapien
gaaaacatgaatttagattttctag

SEQ ID NO: 1105771 - DNA, 25 bp, Homo sapien
ggccaagtcaggcggatcaccgagg

SEQ ID NO: 1105772 - DNA, 25 bp, Homo sapien
ccaagtcaggcggatcaccgaggtc

SEQ ID NO: 1105773 - DNA, 25 bp, Homo sapien
gcaaggctttcgaatcctcccaagc

SEQ ID NO: 1105774 - DNA, 25 bp, Homo sapien
ccaagctctcggccagagtaaatag

SEQ ID NO: 1105775 - DNA, 25 bp, Homo sapien
agcaaggctttcgaatcctcccaag

SEQ ID NO: 1105776 - DNA, 25 bp, Homo sapien
tcctcccaagctctcggccagagta

SEQ ID NO: 1105777 - DNA, 25 bp, Homo sapien
tcagtgtgtcactaattccaaggac

SEQ ID NO: 1105778 - DNA, 25 bp, Homo sapien
gctgccttcaaagcttgatctagat

SEQ ID NO: 1105779 - DNA, 25 bp, Homo sapien
acatctctgtcattcttaagaactg

SEQ ID NO: 1105780 - DNA, 25 bp, Homo sapien
aagcccacagaaagtcgaatcagtg

SEQ ID NO: 1105781 - DNA, 25 bp, Homo sapien
agctgtgacttccacttggagggtg

SEQ ID NO: 1105782 - DNA, 25 bp, Homo sapien
ctagctgtgacttccacttggaggg

SEQ ID NO: 1105783 - DNA, 25 bp, Homo sapien
tagctgtgacttccacttggagggt

SEQ ID NO: 1105784 - DNA, 25 bp, Homo sapien
taatctcccaaagtagcacaaatct

SEQ ID NO: 1105785 - DNA, 25 bp, Homo sapien
caggaagcagcttctaatagcagct

SEQ ID NO: 1105786 - DNA, 25 bp, Homo sapien
gaggtgccttaaaatttccgcttga

SEQ ID NO: 1105787 - DNA, 25 bp, Homo sapien
tcacacttgatttaagaacattcgt

SEQ ID NO: 1105788 - DNA, 25 bp, Homo sapien
tcttaaatcagtagaatttcacagt

SEQ ID NO: 1105789 - DNA, 25 bp, Homo sapien
agtatttgattttcggcttatggta

SEQ ID NO: 1105790 - DNA, 25 bp, Homo sapien
tcaagtatttgattttcggcttatg

SEQ ID NO: 1105791 - DNA, 25 bp, Homo sapien
taagtatagtcttaaatcagtagaa

SEQ ID NO: 1105792 - DNA, 25 bp, Homo sapien
tggcataaaagtcccaggtcttggg

SEQ ID NO: 1105793 - DNA, 25 bp, Homo sapien
accatagtgagataggacctgcctc

SEQ ID NO: 1105794 - DNA, 25 bp, Homo sapien
caattggcccagaatcgtcaggaaa

SEQ ID NO: 1105795 - DNA, 25 bp, Homo sapien
tatagaaatggacagtggccatgcc

SEQ ID NO: 1105796 - DNA, 25 bp, Homo sapien
gtgaaaatagcgtcctgaaggcctg

SEQ ID NO: 1105797 - DNA, 25 bp, Homo sapien
tgttccctctacaaaaccagatgga

SEQ ID NO: 1105798 - DNA, 25 bp, Homo sapien
cataacggtgtcttctcaggcagtg

SEQ ID NO: 1105799 - DNA, 25 bp, Homo sapien
catgatgctgcgtgcctactgaaga

SEQ ID NO: 1105800 - DNA, 25 bp, Homo sapien
gctgactagagccacttcaccagga

SEQ ID NO: 1105801 - DNA, 25 bp, Homo sapien
taaccacaacattatagccacagtt

SEQ ID NO: 1105802 - DNA, 25 bp, Homo sapien
tgggtgagacataaattactaccta

SEQ ID NO: 1105803 - DNA, 25 bp, Homo sapien
tactacctatactggatgctataac

SEQ ID NO: 1105804 - DNA, 25 bp, Homo sapien
tattgagcacctaatgcatccatgc

SEQ ID NO: 1105805 - DNA, 25 bp, Homo sapien
tgtcaggaaacattattagccccat

SEQ ID NO: 1105806 - DNA, 25 bp, Homo sapien
agagccaggttttgaacttagaaag

SEQ ID NO: 1105807 - DNA, 25 bp, Homo sapien
tagctggtaagcaccagagccaggt

SEQ ID NO: 1105808 - DNA, 25 bp, Homo sapien
tttgaatgaaactcccaggacaaat

SEQ ID NO: 1105809 - DNA, 25 bp, Homo sapien
catcatcactcaccccagatagatc

SEQ ID NO: 1105810 - DNA, 25 bp, Homo sapien
tgaaactcccaggacaaatggtctt

SEQ ID NO: 1105811 - DNA, 25 bp, Homo sapien
gaatgaaactcccaggacaaatggt

SEQ ID NO: 1105812 - DNA, 25 bp, Homo sapien
atattttgggggtgtctcaatctcc

SEQ ID NO: 1105813 - DNA, 25 bp, Homo sapien
ctcgtaacactgtctgagctgtgtc

SEQ ID NO: 1105814 - DNA, 25 bp, Homo sapien
aaactttcctcgtaacactgtctga

SEQ ID NO: 1105815 - DNA, 25 bp, Homo sapien
tgtcttctgctaactttcaggttgg

SEQ ID NO: 1105816 - DNA, 25 bp, Homo sapien
taacccagcttgtactcagacacca

SEQ ID NO: 1105817 - DNA, 25 bp, Homo sapien
tcataacccagcttgtactcagaca

SEQ ID NO: 1105818 - DNA, 25 bp, Homo sapien
ctgctcataacccagcttgtactca

SEQ ID NO: 1105819 - DNA, 25 bp, Homo sapien
gctcataacccagcttgtactcaga

SEQ ID NO: 1105820 - DNA, 25 bp, Homo sapien
tattgatgaaagatgaggcataaag

SEQ ID NO: 1105821 - DNA, 25 bp, Homo sapien
ttcattattgatgaaagatgaggca

SEQ ID NO: 1105822 - DNA, 25 bp, Homo sapien
tgaaagatgaggcataaagtgaaca

SEQ ID NO: 1105823 - DNA, 25 bp, Homo sapien
gatgaaagatgaggcataaagtgaa

SEQ ID NO: 1105824 - DNA, 25 bp, Homo sapien
tgcatccaaagagaaatttaaaagt

SEQ ID NO: 1105825 - DNA, 25 bp, Homo sapien
gcatccaaagagaaatttaaaagta

SEQ ID NO: 1105826 - DNA, 25 bp, Homo sapien
ctgcatccaaagagaaatttaaaag

SEQ ID NO: 1105827 - DNA, 25 bp, Homo sapien
ggcagtttctctcctcggtgtgacc

SEQ ID NO: 1105828 - DNA, 25 bp, Homo sapien
tagggcaaaggacctctggggcttg

SEQ ID NO: 1105829 - DNA, 25 bp, Homo sapien
ctgtctatctgaaatatatcagtaa

SEQ ID NO: 1105830 - DNA, 25 bp, Homo sapien
gtgacctgaggatgcgacactgtct

SEQ ID NO: 1105831 - DNA, 25 bp, Homo sapien
aggcagcctgacagcaacactcgat

SEQ ID NO: 1105832 - DNA, 25 bp, Homo sapien
ccagaaaagacccttgcactggaag

SEQ ID NO: 1105833 - DNA, 25 bp, Homo sapien
acactcgatgagaaccagaactgag

SEQ ID NO: 1105834 - DNA, 25 bp, Homo sapien
cttgcactggaaggccgcccagctt

SEQ ID NO: 1105835 - DNA, 25 bp, Homo sapien
ggatgcattagccactcccatgtca

SEQ ID NO: 1105836 - DNA, 25 bp, Homo sapien
gatgacagtttatcaagagcttgtt

SEQ ID NO: 1105837 - DNA, 25 bp, Homo sapien
tctacctttggtacagcctacaatg

SEQ ID NO: 1105838 - DNA, 25 bp, Homo sapien
tcatctgggcttggcatttttattg

SEQ ID NO: 1105839 - DNA, 25 bp, Homo sapien
cctgatgacagtttatcaagagctt

SEQ ID NO: 1105840 - DNA, 25 bp, Homo sapien
gaatctttagcatatgttgaaatgg

SEQ ID NO: 1105841 - DNA, 25 bp, Homo sapien
tgaatctttagcatatgttgaaatg

SEQ ID NO: 1105842 - DNA, 25 bp, Homo sapien
tctactcaactaagttctgtgaatc

SEQ ID NO: 1105843 - DNA, 25 bp, Homo sapien
tgcttctactcaactaagttctgtg

SEQ ID NO: 1105844 - DNA, 25 bp, Homo sapien
atctgttgggtcatctttttgcttt

SEQ ID NO: 1105845 - DNA, 25 bp, Homo sapien
caatctgttgggtcatctttttgct

SEQ ID NO: 1105846 - DNA, 25 bp, Homo sapien
aatctgttgggtcatctttttgctt

SEQ ID NO: 1105847 - DNA, 25 bp, Homo sapien
tcaatctgttgggtcatctttttgc

SEQ ID NO: 1105848 - DNA, 25 bp, Homo sapien
tctgaacgtactatagacccagtct

SEQ ID NO: 1105849 - DNA, 25 bp, Homo sapien
gaaaacagtctggtaaggccaggca

SEQ ID NO: 1105850 - DNA, 25 bp, Homo sapien
tgttgcgcaacctgcctagtgaggg

SEQ ID NO: 1105851 - DNA, 25 bp, Homo sapien
tgttagggacccatgtggaaaacag

SEQ ID NO: 1105852 - DNA, 25 bp, Homo sapien
cctggaatcaattacgttatcagac

SEQ ID NO: 1105853 - DNA, 25 bp, Homo sapien
gaatcaattacgttatcagacacaa

SEQ ID NO: 1105854 - DNA, 25 bp, Homo sapien
tttggagccactcctggaatcaatt

SEQ ID NO: 1105855 - DNA, 25 bp, Homo sapien
ggatgtgaattttggagccactcct

SEQ ID NO: 1105856 - DNA, 25 bp, Homo sapien
ccctgtgatatgcagaaagcctctg

SEQ ID NO: 1105857 - DNA, 25 bp, Homo sapien
gcagaaagcctctgttatgaatttt

SEQ ID NO: 1105858 - DNA, 25 bp, Homo sapien
ttctacccctgtgatatgcagaaag

SEQ ID NO: 1105859 - DNA, 25 bp, Homo sapien
gatatgcagaaagcctctgttatga

SEQ ID NO: 1105860 - DNA, 25 bp, Homo sapien
tacgaaaatgtagtgctgtgctcag

SEQ ID NO: 1105861 - DNA, 25 bp, Homo sapien
tgactcccatgagagagtctttcca

SEQ ID NO: 1105862 - DNA, 25 bp, Homo sapien
gaagtccaatacgaaaatgtagtgc

SEQ ID NO: 1105863 - DNA, 25 bp, Homo sapien
ggaatcagactgaagtccaatacga

SEQ ID NO: 1105864 - DNA, 25 bp, Homo sapien
cgtggttggtgattttgtatgaaga

SEQ ID NO: 1105865 - DNA, 25 bp, Homo sapien
taaatcatccccatagatatctgtc

SEQ ID NO: 1105866 - DNA, 25 bp, Homo sapien
ttagaaattcagtctgcagtcgtgg

SEQ ID NO: 1105867 - DNA, 25 bp, Homo sapien
gatatctgtctctttagcctcatac

SEQ ID NO: 1105868 - DNA, 25 bp, Homo sapien
atgcagagcaaagcgggcagctgct

SEQ ID NO: 1105869 - DNA, 25 bp, Homo sapien
gctgaagccatgcagatgcagagca

SEQ ID NO: 1105870 - DNA, 25 bp, Homo sapien
aagataccactctggactggagctc

SEQ ID NO: 1105871 - DNA, 25 bp, Homo sapien
agtaaaagataccactctggactgg

SEQ ID NO: 1105872 - DNA, 25 bp, Homo sapien
cacttgaacactgagcaaacatgca

SEQ ID NO: 1105873 - DNA, 25 bp, Homo sapien
acttgaacactgagcaaacatgcag

SEQ ID NO: 1105874 - DNA, 25 bp, Homo sapien
ttgaacactgagcaaacatgcagtt

SEQ ID NO: 1105875 - DNA, 25 bp, Homo sapien
gaacactgagcaaacatgcagttta

SEQ ID NO: 1105876 - DNA, 25 bp, Homo sapien
ccactgtcactgagtccactgctca

SEQ ID NO: 1105877 - DNA, 25 bp, Homo sapien
tccactgtcactgagtccactgctc

SEQ ID NO: 1105878 - DNA, 25 bp, Homo sapien
gcaaagagggataggcgatatcagt

SEQ ID NO: 1105879 - DNA, 25 bp, Homo sapien
caaagagggataggcgatatcagta

SEQ ID NO: 1105880 - DNA, 25 bp, Homo sapien
ggataggcgatatcagtataaacac

SEQ ID NO: 1105881 - DNA, 25 bp, Homo sapien
agagggataggcgatatcagtataa

SEQ ID NO: 1105882 - DNA, 25 bp, Homo sapien
gtagtagtaaatcaaaggtgaatgg

SEQ ID NO: 1105883 - DNA, 25 bp, Homo sapien
agtgggtgtagtagtaaatcaaagg

SEQ ID NO: 1105884 - DNA, 25 bp, Homo sapien
tgtagtagtaaatcaaaggtgaatg

SEQ ID NO: 1105885 - DNA, 25 bp, Homo sapien
gggtgtagtagtaaatcaaaggtga

SEQ ID NO: 1105886 - DNA, 25 bp, Homo sapien
ggcacagttagaagcactgtcaggt

SEQ ID NO: 1105887 - DNA, 25 bp, Homo sapien
tgtcaggtctgcttctaacacggga

SEQ ID NO: 1105888 - DNA, 25 bp, Homo sapien
attactaggattgtctctgcaaagg

SEQ ID NO: 1105889 - DNA, 25 bp, Homo sapien
taacacgggaagtctggatcttttc

SEQ ID NO: 1105890 - DNA, 25 bp, Homo sapien
aagacttggtcacaggtagcgtggg

SEQ ID NO: 1105891 - DNA, 25 bp, Homo sapien
tatctaatgtggtgagtggccctcg

SEQ ID NO: 1105892 - DNA, 25 bp, Homo sapien
tagcgtggggataacttctggcttt

SEQ ID NO: 1105893 - DNA, 25 bp, Homo sapien
gggctgagagccacgtgtaagactt

SEQ ID NO: 1105894 - DNA, 25 bp, Homo sapien
cacttctcttttcatcaaaatgctt

SEQ ID NO: 1105895 - DNA, 25 bp, Homo sapien
gtaatttccacttctcttttcatca

SEQ ID NO: 1105896 - DNA, 25 bp, Homo sapien
tcaaaatgctttaccatgaacggtt

SEQ ID NO: 1105897 - DNA, 25 bp, Homo sapien
tagaccacaatgaagtaatttccac

SEQ ID NO: 1105898 - DNA, 25 bp, Homo sapien
gctgccctcgcagaaaggcaaacgg

SEQ ID NO: 1105899 - DNA, 25 bp, Homo sapien
cactcaagccgtccgcggatggcaa

SEQ ID NO: 1105900 - DNA, 25 bp, Homo sapien
gaaaggcaaacggtccaccgagctg

SEQ ID NO: 1105901 - DNA, 25 bp, Homo sapien
ccgagctggttaacactcaagccgt

SEQ ID NO: 1105902 - DNA, 25 bp, Homo sapien
aataatctaaccagttgatcccaga

SEQ ID NO: 1105903 - DNA, 25 bp, Homo sapien
ggttcattcaatgttagcaactggt

SEQ ID NO: 1105904 - DNA, 25 bp, Homo sapien
gctgggattttaacgcgggctgcct

SEQ ID NO: 1105905 - DNA, 25 bp, Homo sapien
tcagtagcctttgaacgatagactt

SEQ ID NO: 1105906 - DNA, 25 bp, Homo sapien
tttcaaaaatgttatatgagtatag

SEQ ID NO: 1105907 - DNA, 25 bp, Homo sapien
aaatgttatatgagtatagaaaatc

SEQ ID NO: 1105908 - DNA, 25 bp, Homo sapien
aatgttatatgagtatagaaaatct

SEQ ID NO: 1105909 - DNA, 25 bp, Homo sapien
caaaaatgttatatgagtatagaaa

SEQ ID NO: 1105910 - DNA, 25 bp, Homo sapien
ctcatcacgttcacgttgaggctga

SEQ ID NO: 1105911 - DNA, 25 bp, Homo sapien
ttcacgttgaggctgaacatgtagg

SEQ ID NO: 1105912 - DNA, 25 bp, Homo sapien
tcacgttcacgttgaggctgaacat

SEQ ID NO: 1105913 - DNA, 25 bp, Homo sapien
catcctcatcacgttcacgttgagg

SEQ ID NO: 1105914 - DNA, 25 bp, Homo sapien
gctgctatgagggtatcattctctt

SEQ ID NO: 1105915 - DNA, 25 bp, Homo sapien
cttctcaccattatttttagaatgc

SEQ ID NO: 1105916 - DNA, 25 bp, Homo sapien
gagcaaagaagatgcgctgctatga

SEQ ID NO: 1105917 - DNA, 25 bp, Homo sapien
cttcttgtaaattctgctacctctc

SEQ ID NO: 1105918 - DNA, 25 bp, Homo sapien
catcttttgcatcaagtatctgaat

SEQ ID NO: 1105919 - DNA, 25 bp, Homo sapien
ttttgcatcaagtatctgaattgtg

SEQ ID NO: 1105920 - DNA, 25 bp, Homo sapien
tcttttgcatcaagtatctgaattg

SEQ ID NO: 1105921 - DNA, 25 bp, Homo sapien
cttttgcatcaagtatctgaattgt

SEQ ID NO: 1105922 - DNA, 25 bp, Homo sapien
catagctggtaagactgtttctttc

SEQ ID NO: 1105923 - DNA, 25 bp, Homo sapien
tagctggtaagactgtttctttcca

SEQ ID NO: 1105924 - DNA, 25 bp, Homo sapien
atagctggtaagactgtttctttcc

SEQ ID NO: 1105925 - DNA, 25 bp, Homo sapien
tcatagctggtaagactgtttcttt

SEQ ID NO: 1105926 - DNA, 25 bp, Homo sapien
cttcctctaaccactcaggattcat

SEQ ID NO: 1105927 - DNA, 25 bp, Homo sapien
gggcagacactagaaggagcccagt

SEQ ID NO: 1105928 - DNA, 25 bp, Homo sapien
ctgtgcactgggcagttcccacagc

SEQ ID NO: 1105929 - DNA, 25 bp, Homo sapien
gcccagtcagtggactgtgcactgg

SEQ ID NO: 1105930 - DNA, 25 bp, Homo sapien
ttgggccagctactggggcagacac

SEQ ID NO: 1105931 - DNA, 25 bp, Homo sapien
gacagaatcccacaggaatgtcaga

SEQ ID NO: 1105932 - DNA, 25 bp, Homo sapien
ctggaaagacagaatcccacaggaa

SEQ ID NO: 1105933 - DNA, 25 bp, Homo sapien
ggaaagacagaatcccacaggaatg

SEQ ID NO: 1105934 - DNA, 25 bp, Homo sapien
aaagacagaatcccacaggaatgtc

SEQ ID NO: 1105935 - DNA, 25 bp, Homo sapien
tgacttgagttgtttcccattcctt

SEQ ID NO: 1105936 - DNA, 25 bp, Homo sapien
tccgtaaggctagacacataagaca

SEQ ID NO: 1105937 - DNA, 25 bp, Homo sapien
ttaatttgacttgagttgtttccca

SEQ ID NO: 1105938 - DNA, 25 bp, Homo sapien
cttgtaaccaaatatccgtaaggct

SEQ ID NO: 1105939 - DNA, 25 bp, Homo sapien
cttcttcatgtttggcaatatcacc

SEQ ID NO: 1105940 - DNA, 25 bp, Homo sapien
tatcagtggaataacggtttcacct

SEQ ID NO: 1105941 - DNA, 25 bp, Homo sapien
tgattatcagtggaataacggtttc

SEQ ID NO: 1105942 - DNA, 25 bp, Homo sapien
atcttcttcatgtttggcaatatca

SEQ ID NO: 1105943 - DNA, 25 bp, Homo sapien
gtgcgttgattttgtcttaaagaat

SEQ ID NO: 1105944 - DNA, 25 bp, Homo sapien
tagcaaagctctcataataaatccc

SEQ ID NO: 1105945 - DNA, 25 bp, Homo sapien
gaatgagatgtctgctagcaaagct

SEQ ID NO: 1105946 - DNA, 25 bp, Homo sapien
cagacacattgaaggtttgctcact

SEQ ID NO: 1105947 - DNA, 25 bp, Homo sapien
attcgtcgcaggctccttgagaggg

SEQ ID NO: 1105948 - DNA, 25 bp, Homo sapien
tcgtcgcaggctccttgagagggat

SEQ ID NO: 1105949 - DNA, 25 bp, Homo sapien
gggattcgtcgcaggctccttgaga

SEQ ID NO: 1105950 - DNA, 25 bp, Homo sapien
cacgggggattcgtcgcaggctcct

SEQ ID NO: 1105951 - DNA, 25 bp, Homo sapien
tgcaatccagtataagaggctcccc

SEQ ID NO: 1105952 - DNA, 25 bp, Homo sapien
cagcccttaggttttcagtggtcca

SEQ ID NO: 1105953 - DNA, 25 bp, Homo sapien
caggacaaatatgtgcccatgcagg

SEQ ID NO: 1105954 - DNA, 25 bp, Homo sapien
cggataacctacatttggaacgtgg

SEQ ID NO: 1105955 - DNA, 25 bp, Homo sapien
gactgctcccagaatacccatagca

SEQ ID NO: 1105956 - DNA, 25 bp, Homo sapien
ccagaatacccatagcagttacatg

SEQ ID NO: 1105957 - DNA, 25 bp, Homo sapien
aacagctgttatttgggtgccccag

SEQ ID NO: 1105958 - DNA, 25 bp, Homo sapien
tgctggcaacagctgttatttgggt

SEQ ID NO: 1105959 - DNA, 25 bp, Homo sapien
gtgtcaccatagtactaagtctctg

SEQ ID NO: 1105960 - DNA, 25 bp, Homo sapien
taaaggcaggtttaatgggtgaatc

SEQ ID NO: 1105961 - DNA, 25 bp, Homo sapien
tccttagctacaggacccaacagtg

SEQ ID NO: 1105962 - DNA, 25 bp, Homo sapien
tagaattgtctctgttccctaacag

SEQ ID NO: 1105963 - DNA, 25 bp, Homo sapien
gggctcgtaaccccactcagtaagc

SEQ ID NO: 1105964 - DNA, 25 bp, Homo sapien
ctcgtaaccccactcagtaagcttt

SEQ ID NO: 1105965 - DNA, 25 bp, Homo sapien
tttgaggggctcgtaaccccactca

SEQ ID NO: 1105966 - DNA, 25 bp, Homo sapien
gaggggctcgtaaccccactcagta

SEQ ID NO: 1105967 - DNA, 25 bp, Homo sapien
gaaatccgattgaggtactggtgct

SEQ ID NO: 1105968 - DNA, 25 bp, Homo sapien
gggttaatttgcctgtcgctaaaga

SEQ ID NO: 1105969 - DNA, 25 bp, Homo sapien
cgctaaagagcaagttagcatatat

SEQ ID NO: 1105970 - DNA, 25 bp, Homo sapien
ttaagtggaaatccgattgaggtac

SEQ ID NO: 1105971 - DNA, 25 bp, Homo sapien
aattggtggaccagagattatggca

SEQ ID NO: 1105972 - DNA, 25 bp, Homo sapien
taggcagaaactgggtgtcacttgg

SEQ ID NO: 1105973 - DNA, 25 bp, Homo sapien
tatggcacatatgttgaggttgaca

SEQ ID NO: 1105974 - DNA, 25 bp, Homo sapien
tatgttgaggttgacagattccacc

SEQ ID NO: 1105975 - DNA, 25 bp, Homo sapien
catggctgaggagatgtcagaatta

SEQ ID NO: 1105976 - DNA, 25 bp, Homo sapien
tggctgaggagatgtcagaattatg

SEQ ID NO: 1105977 - DNA, 25 bp, Homo sapien
ctgaggagatgtcagaattatggtg

SEQ ID NO: 1105978 - DNA, 25 bp, Homo sapien
gctgaggagatgtcagaattatggt

SEQ ID NO: 1105979 - DNA, 25 bp, Homo sapien
atgtaactcccttccgccgcataaa

SEQ ID NO: 1105980 - DNA, 25 bp, Homo sapien
tgtgtatgtaactcccttccgccgc

SEQ ID NO: 1105981 - DNA, 25 bp, Homo sapien
tcgtatatttatccgtagatgtgtg

SEQ ID NO: 1105982 - DNA, 25 bp, Homo sapien
aacaaatctttcgtatatttatccg

SEQ ID NO: 1105983 - DNA, 25 bp, Homo sapien
gccaagatcgtcctgggcgacagag

SEQ ID NO: 1105984 - DNA, 25 bp, Homo sapien
cagtgagccaagatcgtcctgggcg

SEQ ID NO: 1105985 - DNA, 25 bp, Homo sapien
agccaagatcgtcctgggcgacaga

SEQ ID NO: 1105986 - DNA, 25 bp, Homo sapien
tgagccaagatcgtcctgggcgaca

SEQ ID NO: 1105987 - DNA, 25 bp, Homo sapien
tcccagctactcaggaggctgaggt

SEQ ID NO: 1105988 - DNA, 25 bp, Homo sapien
gaggctgaggtgagagaatcgcttg

SEQ ID NO: 1105989 - DNA, 25 bp, Homo sapien
caggcgtggtggtaggctcctgtag

SEQ ID NO: 1105990 - DNA, 25 bp, Homo sapien
gctgaggtgagagaatcgcttgaac

SEQ ID NO: 1105991 - DNA, 25 bp, Homo sapien
gtcttcatttacaaaggaagcaaat

SEQ ID NO: 1105992 - DNA, 25 bp, Homo sapien
caatcgatagttagcatttagtttc

SEQ ID NO: 1105993 - DNA, 25 bp, Homo sapien
ggtaaaagtaattaagcatgcaatc

SEQ ID NO: 1105994 - DNA, 25 bp, Homo sapien
taggtaaggaacagtagagttaaga

SEQ ID NO: 1105995 - DNA, 25 bp, Homo sapien
tacatgacctttcctacaccaaatt

SEQ ID NO: 1105996 - DNA, 25 bp, Homo sapien
tttgtaatcagcaaacaagtgtttg

SEQ ID NO: 1105997 - DNA, 25 bp, Homo sapien
gaaattgctcctgactttgatacat

SEQ ID NO: 1105998 - DNA, 25 bp, Homo sapien
ttttgtgaattatgcactgaaactc

SEQ ID NO: 1105999 - DNA, 25 bp, Homo sapien
gtgaaggctacatcatctgagttgg

SEQ ID NO: 1106000 - DNA, 25 bp, Homo sapien
cagtgaaggctacatcatctgagtt

SEQ ID NO: 1106001 - DNA, 25 bp, Homo sapien
gaaggctacatcatctgagttggtt

SEQ ID NO: 1106002 - DNA, 25 bp, Homo sapien
ggctacatcatctgagttggtttca

SEQ ID NO: 1106003 - DNA, 25 bp, Homo sapien
tatcattagccatctgctgaaccaa

SEQ ID NO: 1106004 - DNA, 25 bp, Homo sapien
tcctctgcaagtgccagcaagaata

SEQ ID NO: 1106005 - DNA, 25 bp, Homo sapien
tctgcaagtgccagcaagaatattc

SEQ ID NO: 1106006 - DNA, 25 bp, Homo sapien
attatcattagccatctgctgaacc

SEQ ID NO: 1106007 - DNA, 25 bp, Homo sapien
ggcatccttggagtgtcataaaaaa

SEQ ID NO: 1106008 - DNA, 25 bp, Homo sapien
tttgaggttgaatgattagctgcgc

SEQ ID NO: 1106009 - DNA, 25 bp, Homo sapien
ttagctgcgcagttagagtgataaa

SEQ ID NO: 1106010 - DNA, 25 bp, Homo sapien
catttagtaactcaggaatctgctt

SEQ ID NO: 1106011 - DNA, 25 bp, Homo sapien
tcacgaagtggtgtgagaacgctca

SEQ ID NO: 1106012 - DNA, 25 bp, Homo sapien
acgctcaatggaaggacggtcccca

SEQ ID NO: 1106013 - DNA, 25 bp, Homo sapien
cacgaagtggtgtgagaacgctcaa

SEQ ID NO: 1106014 - DNA, 25 bp, Homo sapien
tgtgagaacgctcaatggaaggacg

SEQ ID NO: 1106015 - DNA, 25 bp, Homo sapien
tccaagcagcgttgggagcacatcg

SEQ ID NO: 1106016 - DNA, 25 bp, Homo sapien
tatgcgagccacatgaagacgcgtg

SEQ ID NO: 1106017 - DNA, 25 bp, Homo sapien
cgtgtgcgagtaagcgggaacctaa

SEQ ID NO: 1106018 - DNA, 25 bp, Homo sapien
gaccgagacggccattcagcttatg

SEQ ID NO: 1106019 - DNA, 25 bp, Homo sapien
aagatgggacttgagaattgctgag

SEQ ID NO: 1106020 - DNA, 25 bp, Homo sapien
gagagacttcaggaacattctttaa

SEQ ID NO: 1106021 - DNA, 25 bp, Homo sapien
agcagttatgggacccatgtcagga

SEQ ID NO: 1106022 - DNA, 25 bp, Homo sapien
tctgctgagagcagttatgggaccc

SEQ ID NO: 1106023 - DNA, 25 bp, Homo sapien
taagtgtgccagtttcattccaaac

SEQ ID NO: 1106024 - DNA, 25 bp, Homo sapien
cccttgaggcttgattaagtgtgcc

SEQ ID NO: 1106025 - DNA, 25 bp, Homo sapien
tgggccacacatgacttcaaacggc

SEQ ID NO: 1106026 - DNA, 25 bp, Homo sapien
catgacttcaaacggcccttgaggc

SEQ ID NO: 1106027 - DNA, 25 bp, Homo sapien
tcctgaacctattgggtcatggagc

SEQ ID NO: 1106028 - DNA, 25 bp, Homo sapien
ctagtcctgaacctattgggtcatg

SEQ ID NO: 1106029 - DNA, 25 bp, Homo sapien
agtcctgaacctattgggtcatgga

SEQ ID NO: 1106030 - DNA, 25 bp, Homo sapien
cctgaacctattgggtcatggagca

SEQ ID NO: 1106031 - DNA, 25 bp, Homo sapien
ctcctgaggctgtccttcccgtggc

SEQ ID NO: 1106032 - DNA, 25 bp, Homo sapien
ctgaggctgtccttcccgtggccat

SEQ ID NO: 1106033 - DNA, 25 bp, Homo sapien
cctgaggctgtccttcccgtggcca

SEQ ID NO: 1106034 - DNA, 25 bp, Homo sapien
tcctgaggctgtccttcccgtggcc

SEQ ID NO: 1106035 - DNA, 25 bp, Homo sapien
gggagcaggcaaggagggtccttgt

SEQ ID NO: 1106036 - DNA, 25 bp, Homo sapien
tagggagcaggcaaggagggtcctt

SEQ ID NO: 1106037 - DNA, 25 bp, Homo sapien
agcaggcaaggagggtccttgtcca

SEQ ID NO: 1106038 - DNA, 25 bp, Homo sapien
ctgtagggagcaggcaaggagggtc

SEQ ID NO: 1106039 - DNA, 25 bp, Homo sapien
attgaaagtggcctgcagcacacag

SEQ ID NO: 1106040 - DNA, 25 bp, Homo sapien
gggacaccccagttgacaccgtgtg

SEQ ID NO: 1106041 - DNA, 25 bp, Homo sapien
tgtgccagcaaagttgggacctgat

SEQ ID NO: 1106042 - DNA, 25 bp, Homo sapien
tggttttgggaacgtaggtcattga

SEQ ID NO: 1106043 - DNA, 25 bp, Homo sapien
tggccccagaacagccgctgagtgc

SEQ ID NO: 1106044 - DNA, 25 bp, Homo sapien
caagcagagatgtttgtgagaacag

SEQ ID NO: 1106045 - DNA, 25 bp, Homo sapien
agttcccgcagactcgagtgaattg

SEQ ID NO: 1106046 - DNA, 25 bp, Homo sapien
gactcgagtgaattgggctccggca

SEQ ID NO: 1106047 - DNA, 25 bp, Homo sapien
aaatgttcttcgctggaaagcattc

SEQ ID NO: 1106048 - DNA, 25 bp, Homo sapien
aagctttgtaagaccattgtaggag

SEQ ID NO: 1106049 - DNA, 25 bp, Homo sapien
tccttcaggagagggtagaacatgt

SEQ ID NO: 1106050 - DNA, 25 bp, Homo sapien
gtccaaggaggccatttcttcataa

SEQ ID NO: 1106051 - DNA, 25 bp, Homo sapien
tagtcagggaggttagacaaacact

SEQ ID NO: 1106052 - DNA, 25 bp, Homo sapien
tgactggtttttctcacgattagac

SEQ ID NO: 1106053 - DNA, 25 bp, Homo sapien
caaaaccagcgttggtatgttacta

SEQ ID NO: 1106054 - DNA, 25 bp, Homo sapien
agtactagccaggtatcctctagaa

SEQ ID NO: 1106055 - DNA, 25 bp, Homo sapien
gctgcgtttatgtaggttgcacaag

SEQ ID NO: 1106056 - DNA, 25 bp, Homo sapien
tctaccttctaaattgccccgacga

SEQ ID NO: 1106057 - DNA, 25 bp, Homo sapien
ggctgtactaagcaaatgcaaggtt

SEQ ID NO: 1106058 - DNA, 25 bp, Homo sapien
taaagcctgtgagtcaagcatcaag

SEQ ID NO: 1106059 - DNA, 25 bp, Homo sapien
aaatctgctagtagaggtgcatgcc

SEQ ID NO: 1106060 - DNA, 25 bp, Homo sapien
gaagtgctaaatctgctagtagagg

SEQ ID NO: 1106061 - DNA, 25 bp, Homo sapien
tggtcagaagtgctaaatctgctag

SEQ ID NO: 1106062 - DNA, 25 bp, Homo sapien
gaggtgcatgcctttcattgctttt

SEQ ID NO: 1106063 - DNA, 25 bp, Homo sapien
gaaagagaagtcgttctagatcttc

SEQ ID NO: 1106064 - DNA, 25 bp, Homo sapien
tctggtgatcgcaaaaaaagacgaa

SEQ ID NO: 1106065 - DNA, 25 bp, Homo sapien
agatcacggtcacccgaaaggtttg

SEQ ID NO: 1106066 - DNA, 25 bp, Homo sapien
acgaacaagatcacggtcacccgaa

SEQ ID NO: 1106067 - DNA, 25 bp, Homo sapien
taaacgtaaagtcctgttaatgcag

SEQ ID NO: 1106068 - DNA, 25 bp, Homo sapien
tgttgctgtgccatatacctggttt

SEQ ID NO: 1106069 - DNA, 25 bp, Homo sapien
ggtttacagaacacccatcatattc

SEQ ID NO: 1106070 - DNA, 25 bp, Homo sapien
tcatggttgatccagaagtcttctg

SEQ ID NO: 1106071 - DNA, 25 bp, Homo sapien
catgtagtcacatctgtagagggaa

SEQ ID NO: 1106072 - DNA, 25 bp, Homo sapien
tcatattgaagtctaactgtggctg

SEQ ID NO: 1106073 - DNA, 25 bp, Homo sapien
gcattaaagggctgccacagtataa

SEQ ID NO: 1106074 - DNA, 25 bp, Homo sapien
aaacaggtcctgttttgcacggcag

SEQ ID NO: 1106075 - DNA, 25 bp, Homo sapien
gttccagagaacgttcgagatctcg

SEQ ID NO: 1106076 - DNA, 25 bp, Homo sapien
cattgccagcagtgtgccaagacat

SEQ ID NO: 1106077 - DNA, 25 bp, Homo sapien
gagatctcgtgggtcgaaatcaagg

SEQ ID NO: 1106078 - DNA, 25 bp, Homo sapien
tccagttcgcagtcaagatctcgtt

SEQ ID NO: 1106079 - DNA, 25 bp, Homo sapien
cggagcaaattcagccatattagtt

SEQ ID NO: 1106080 - DNA, 25 bp, Homo sapien
catattagttctgttgacttcatgc

SEQ ID NO: 1106081 - DNA, 25 bp, Homo sapien
cagtattgtgaataacggagcaaat

SEQ ID NO: 1106082 - DNA, 25 bp, Homo sapien
tttgagaagtccaggcgtaaactaa

SEQ ID NO: 1106083 - DNA, 25 bp, Homo sapien
aaccccacgcccctgaattgatcag

SEQ ID NO: 1106084 - DNA, 25 bp, Homo sapien
cccctgaattgatcagtcacttccg

SEQ ID NO: 1106085 - DNA, 25 bp, Homo sapien
cacgcccctgaattgatcagtcact

SEQ ID NO: 1106086 - DNA, 25 bp, Homo sapien
aattgatcagtcacttccgcctcca

SEQ ID NO: 1106087 - DNA, 25 bp, Homo sapien
ggagtatttgcctattcagaagcca

SEQ ID NO: 1106088 - DNA, 25 bp, Homo sapien
ggcaggacctgtgaatacaatgaga

SEQ ID NO: 1106089 - DNA, 25 bp, Homo sapien
tgagatggccatgtaattaggacct

SEQ ID NO: 1106090 - DNA, 25 bp, Homo sapien
gaagtaaactccgttttgagatggc

SEQ ID NO: 1106091 - DNA, 25 bp, Homo sapien
aatttgaaagaaatctgtgtgacaa

SEQ ID NO: 1106092 - DNA, 25 bp, Homo sapien
catcccataaactatgccattctta

SEQ ID NO: 1106093 - DNA, 25 bp, Homo sapien
catgaatactcacacacatcccata

SEQ ID NO: 1106094 - DNA, 25 bp, Homo sapien
tgtgagacttgagtgtccatgaata

SEQ ID NO: 1106095 - DNA, 25 bp, Homo sapien
gctccaaacgaggtcatacacaggg

SEQ ID NO: 1106096 - DNA, 25 bp, Homo sapien
ggtttcatggctccaaacgaggtca

SEQ ID NO: 1106097 - DNA, 25 bp, Homo sapien
tggctccaaacgaggtcatacacag

SEQ ID NO: 1106098 - DNA, 25 bp, Homo sapien
tcatggctccaaacgaggtcataca

SEQ ID NO: 1106099 - DNA, 25 bp, Homo sapien
ttgaacctggaaggcagagattgca

SEQ ID NO: 1106100 - DNA, 25 bp, Homo sapien
aacctggaaggcagagattgcagcg

SEQ ID NO: 1106101 - DNA, 25 bp, Homo sapien
acctggaaggcagagattgcagcga

SEQ ID NO: 1106102 - DNA, 25 bp, Homo sapien
tggaaggcagagattgcagcgagcc

SEQ ID NO: 1106103 - DNA, 25 bp, Homo sapien
ttccactcaggtggtattaattaac

SEQ ID NO: 1106104 - DNA, 25 bp, Homo sapien
tgtgttccactcaggtggtattaat

SEQ ID NO: 1106105 - DNA, 25 bp, Homo sapien
tgttccactcaggtggtattaatta

SEQ ID NO: 1106106 - DNA, 25 bp, Homo sapien
tctgtgttccactcaggtggtatta

SEQ ID NO: 1106107 - DNA, 25 bp, Homo sapien
gatcctggatttgtagggacgaact

SEQ ID NO: 1106108 - DNA, 25 bp, Homo sapien
gatctcatagggtacgcatggcccc

SEQ ID NO: 1106109 - DNA, 25 bp, Homo sapien
actggagcctagtatcacaggagcc

SEQ ID NO: 1106110 - DNA, 25 bp, Homo sapien
cgaacttgtaacctgggaccgtgag

SEQ ID NO: 1106111 - DNA, 25 bp, Homo sapien
ccacagtagaatagggcaccggtta

SEQ ID NO: 1106112 - DNA, 25 bp, Homo sapien
ggtagtacacaacaccagtctggtg

SEQ ID NO: 1106113 - DNA, 25 bp, Homo sapien
cacaagacagtatgggtgccagctc

SEQ ID NO: 1106114 - DNA, 25 bp, Homo sapien
tagattcctagggtgtccaatgaca

SEQ ID NO: 1106115 - DNA, 25 bp, Homo sapien
ccataaaatttcactctcaagaaga

SEQ ID NO: 1106116 - DNA, 25 bp, Homo sapien
tgttattcctaggtatgagaaatct

SEQ ID NO: 1106117 - DNA, 25 bp, Homo sapien
gataggtatcttcagaattaccttc

SEQ ID NO: 1106118 - DNA, 25 bp, Homo sapien
actctcaagaagataggtatcttca

SEQ ID NO: 1106119 - DNA, 25 bp, Homo sapien
cctctggccaccaaggtctgctttg

SEQ ID NO: 1106120 - DNA, 25 bp, Homo sapien
agctctacctgagggctcccctctg

SEQ ID NO: 1106121 - DNA, 25 bp, Homo sapien
ttctaacacaaactgccagcatctg

SEQ ID NO: 1106122 - DNA, 25 bp, Homo sapien
ggccaccaaggtctgctttgctcat

SEQ ID NO: 1106123 - DNA, 25 bp, Homo sapien
aaatagcactgtttgaattcctaat

SEQ ID NO: 1106124 - DNA, 25 bp, Homo sapien
gaagagtggagtctacaatttacct

SEQ ID NO: 1106125 - DNA, 25 bp, Homo sapien
ctaggcatctgtttagccccggaac

SEQ ID NO: 1106126 - DNA, 25 bp, Homo sapien
accttttggtggctaattctaggca

SEQ ID NO: 1106127 - DNA, 25 bp, Homo sapien
catctttatattgtagaaaagccac

SEQ ID NO: 1106128 - DNA, 25 bp, Homo sapien
catttccatctttatattgtagaaa

SEQ ID NO: 1106129 - DNA, 25 bp, Homo sapien
tgcaatgaacatcttcttcccattt

SEQ ID NO: 1106130 - DNA, 25 bp, Homo sapien
taatttgcaatgaacatcttcttcc

SEQ ID NO: 1106131 - DNA, 25 bp, Homo sapien
atgttatttccattcgtgaactcgt

SEQ ID NO: 1106132 - DNA, 25 bp, Homo sapien
acactaagaagatgaaaaactcttg

SEQ ID NO: 1106133 - DNA, 25 bp, Homo sapien
tatttccattcgtgaactcgtggaa

SEQ ID NO: 1106134 - DNA, 25 bp, Homo sapien
cattcgtgaactcgtggaagagctt

SEQ ID NO: 1106135 - DNA, 25 bp, Homo sapien
tcaaccatgttattgcctcccttag

SEQ ID NO: 1106136 - DNA, 25 bp, Homo sapien
gggcttcctgggtatcatcaacata

SEQ ID NO: 1106137 - DNA, 25 bp, Homo sapien
tctgggatgcacagacagtttgtag

SEQ ID NO: 1106138 - DNA, 25 bp, Homo sapien
tcttttcacctgcacaagcttcctg

SEQ ID NO: 1106139 - DNA, 25 bp, Homo sapien
tgtacctatttgtaccacttagatg

SEQ ID NO: 1106140 - DNA, 25 bp, Homo sapien
tgtactatgccttctcacaggcctg

SEQ ID NO: 1106141 - DNA, 25 bp, Homo sapien
tacttaacagcaaccactatggcaa

SEQ ID NO: 1106142 - DNA, 25 bp, Homo sapien
ggcaaatattatcaatgactggcat

SEQ ID NO: 1106143 - DNA, 25 bp, Homo sapien
tattatccctgtgatagagaggtgc

SEQ ID NO: 1106144 - DNA, 25 bp, Homo sapien
tgggtgtagggcctcacaagaccct

SEQ ID NO: 1106145 - DNA, 25 bp, Homo sapien
tatagggtctctaacagataatctg

SEQ ID NO: 1106146 - DNA, 25 bp, Homo sapien
tacatgtgttcgcataaaaggtgaa

SEQ ID NO: 1106147 - DNA, 25 bp, Homo sapien
gacaggaactcctttcgtaacagac

SEQ ID NO: 1106148 - DNA, 25 bp, Homo sapien
gaagcagtcaggcacatagcgcaaa

SEQ ID NO: 1106149 - DNA, 25 bp, Homo sapien
gaatatgccttcagtaggcctggag

SEQ ID NO: 1106150 - DNA, 25 bp, Homo sapien
gatggaaatgataggcacagagacc

SEQ ID NO: 1106151 - DNA, 25 bp, Homo sapien
tatctcttccttttaagacattttg

SEQ ID NO: 1106152 - DNA, 25 bp, Homo sapien
tctcttccttttaagacattttgga

SEQ ID NO: 1106153 - DNA, 25 bp, Homo sapien
ctttatctcttccttttaagacatt

SEQ ID NO: 1106154 - DNA, 25 bp, Homo sapien
actttatctcttccttttaagacat

SEQ ID NO: 1106155 - DNA, 25 bp, Homo sapien
ccagttatgaggaggcaaccagaaa

SEQ ID NO: 1106156 - DNA, 25 bp, Homo sapien
tcttgatatagggagggagataccc

SEQ ID NO: 1106157 - DNA, 25 bp, Homo sapien
caatatatacatgggaaatgcctcc

SEQ ID NO: 1106158 - DNA, 25 bp, Homo sapien
cagagttaagtcagtgtcctcgtca

SEQ ID NO: 1106159 - DNA, 25 bp, Homo sapien
tatcttcatgtatgccaatccagtg

SEQ ID NO: 1106160 - DNA, 25 bp, Homo sapien
tagtggagtattatgagtgctctgc

SEQ ID NO: 1106161 - DNA, 25 bp, Homo sapien
taatggtgtcctcactgtagtggag

SEQ ID NO: 1106162 - DNA, 25 bp, Homo sapien
gacaagctgtaggatttcaagggac

SEQ ID NO: 1106163 - DNA, 25 bp, Homo sapien
caaacaagtctgtgtccattgccaa

SEQ ID NO: 1106164 - DNA, 25 bp, Homo sapien
cattaaaagaggagtctatatgcca

SEQ ID NO: 1106165 - DNA, 25 bp, Homo sapien
gccatgagcatgaataaaatcactc

SEQ ID NO: 1106166 - DNA, 25 bp, Homo sapien
gatgggacatatggttctcgtggcc

SEQ ID NO: 1106167 - DNA, 25 bp, Homo sapien
ttatattgccgtatgtgtatgttgt

SEQ ID NO: 1106168 - DNA, 25 bp, Homo sapien
tttatattgccgtatgtgtatgttg

SEQ ID NO: 1106169 - DNA, 25 bp, Homo sapien
tctgtttttatattgccgtatgtgt

SEQ ID NO: 1106170 - DNA, 25 bp, Homo sapien
gtctgtttttatattgccgtatgtg

SEQ ID NO: 1106171 - DNA, 25 bp, Homo sapien
gacatatccctgaaccttttaagaa

SEQ ID NO: 1106172 - DNA, 25 bp, Homo sapien
gggtgtcctagaaacaaatcctgca

SEQ ID NO: 1106173 - DNA, 25 bp, Homo sapien
aaatattcagaattcgggaagcttc

SEQ ID NO: 1106174 - DNA, 25 bp, Homo sapien
tatgggagactaaagtccaagagga

SEQ ID NO: 1106175 - DNA, 25 bp, Homo sapien
caggctgagcgttgtagcaggctat

SEQ ID NO: 1106176 - DNA, 25 bp, Homo sapien
acctgcaggctgagcgttgtagcag

SEQ ID NO: 1106177 - DNA, 25 bp, Homo sapien
gctgagcgttgtagcaggctattgt

SEQ ID NO: 1106178 - DNA, 25 bp, Homo sapien
tgcaggctgagcgttgtagcaggct

SEQ ID NO: 1106179 - DNA, 25 bp, Homo sapien
gagaagactgagtaaattgccaact

SEQ ID NO: 1106180 - DNA, 25 bp, Homo sapien
ctaccgagaagactgagtaaattgc

SEQ ID NO: 1106181 - DNA, 25 bp, Homo sapien
tgtctagtctgtacaggtcattaac

SEQ ID NO: 1106182 - DNA, 25 bp, Homo sapien
aattgccaactgtctagtctgtaca

SEQ ID NO: 1106183 - DNA, 25 bp, Homo sapien
gtcatcaggaggcagactcaagaca

SEQ ID NO: 1106184 - DNA, 25 bp, Homo sapien
tccagcattgtaaagagagacgctc

SEQ ID NO: 1106185 - DNA, 25 bp, Homo sapien
aacattatttttggtagcggacatt

SEQ ID NO: 1106186 - DNA, 25 bp, Homo sapien
gctgagcacatgacataaattaagt

SEQ ID NO: 1106187 - DNA, 25 bp, Homo sapien
gtctatttttgtattgttctcattc

SEQ ID NO: 1106188 - DNA, 25 bp, Homo sapien
cccctacaatgctttcagttttgac

SEQ ID NO: 1106189 - DNA, 25 bp, Homo sapien
ctacaatgctttcagttttgacgac

SEQ ID NO: 1106190 - DNA, 25 bp, Homo sapien
ctcatcccctacaatgctttcagtt

SEQ ID NO: 1106191 - DNA, 25 bp, Homo sapien
ttcctttcttgatgtttttccagca

SEQ ID NO: 1106192 - DNA, 25 bp, Homo sapien
ttaattttggctctccatcttcctt

SEQ ID NO: 1106193 - DNA, 25 bp, Homo sapien
ttgatgtttttccagcaaaaccagg

SEQ ID NO: 1106194 - DNA, 25 bp, Homo sapien
tgtttttccagcaaaaccaggctta

SEQ ID NO: 1106195 - DNA, 25 bp, Homo sapien
cttctctctcctcccgtggaataat

SEQ ID NO: 1106196 - DNA, 25 bp, Homo sapien
ctaaattctctcagaggcattctct

SEQ ID NO: 1106197 - DNA, 25 bp, Homo sapien
tctcctcccgtggaataatctcttc

SEQ ID NO: 1106198 - DNA, 25 bp, Homo sapien
gaataatctcttcaaggagtttagg

SEQ ID NO: 1106199 - DNA, 25 bp, Homo sapien
aaccacgtgaacataatcccattgc

SEQ ID NO: 1106200 - DNA, 25 bp, Homo sapien
tgttgccctacgactgaattccagc

SEQ ID NO: 1106201 - DNA, 25 bp, Homo sapien
ataatatgcagcacatacaggcctg

SEQ ID NO: 1106202 - DNA, 25 bp, Homo sapien
tcatatgatgtagatggtggagcca

SEQ ID NO: 1106203 - DNA, 25 bp, Homo sapien
cactggttcaattatagaggtccta

SEQ ID NO: 1106204 - DNA, 25 bp, Homo sapien
tattcccttttagtgctgagcaccc

SEQ ID NO: 1106205 - DNA, 25 bp, Homo sapien
tcagtagcccaagaagatcacaatt

SEQ ID NO: 1106206 - DNA, 25 bp, Homo sapien
taagcattcttagcaaaggtcctag

SEQ ID NO: 1106207 - DNA, 25 bp, Homo sapien
gttgctgctgagtcataaagctgcc

SEQ ID NO: 1106208 - DNA, 25 bp, Homo sapien
gcagaactggccaacttaacagaga

SEQ ID NO: 1106209 - DNA, 25 bp, Homo sapien
gtctctgccacaattaagttgctgc

SEQ ID NO: 1106210 - DNA, 25 bp, Homo sapien
tgctgagtcataaagctgcctccac

SEQ ID NO: 1106211 - DNA, 25 bp, Homo sapien
ggtatggaaaccacttgatcgtggt

SEQ ID NO: 1106212 - DNA, 25 bp, Homo sapien
tggtatggaaaccacttgatcgtgg

SEQ ID NO: 1106213 - DNA, 25 bp, Homo sapien
gacaatcttaggatactagcaccat

SEQ ID NO: 1106214 - DNA, 25 bp, Homo sapien
accacactgaaatgaggtactcatg

SEQ ID NO: 1106215 - DNA, 25 bp, Homo sapien
ccaaaggaagaagcctaagggtctg

SEQ ID NO: 1106216 - DNA, 25 bp, Homo sapien
gagtttggccttcagattgattaaa

SEQ ID NO: 1106217 - DNA, 25 bp, Homo sapien
ggagagtgatcttaaattagcaaca

SEQ ID NO: 1106218 - DNA, 25 bp, Homo sapien
tcttggtatcctacctaatgagata

SEQ ID NO: 1106219 - DNA, 25 bp, Homo sapien
catttgtaaaagaagcggcattcgc

SEQ ID NO: 1106220 - DNA, 25 bp, Homo sapien
catttgttgccattagcagaatgac

SEQ ID NO: 1106221 - DNA, 25 bp, Homo sapien
gctattatgatgaataaagagaacc

SEQ ID NO: 1106222 - DNA, 25 bp, Homo sapien
tggctattatgatgaataaagagaa

SEQ ID NO: 1106223 - DNA, 25 bp, Homo sapien
agaacctggaccactccgtggacac

SEQ ID NO: 1106224 - DNA, 25 bp, Homo sapien
ggaccactccgtggacaccaggagc

SEQ ID NO: 1106225 - DNA, 25 bp, Homo sapien
catttgcgatctgtactgtattacc

SEQ ID NO: 1106226 - DNA, 25 bp, Homo sapien
gtactgtattaccatatttcacaaa

SEQ ID NO: 1106227 - DNA, 25 bp, Homo sapien
tttccagatcacactggctgtcatt

SEQ ID NO: 1106228 - DNA, 25 bp, Homo sapien
tttcacaaatgtcaacgtttggata

SEQ ID NO: 1106229 - DNA, 25 bp, Homo sapien
tcgcatgtatcttctttttgtatag

SEQ ID NO: 1106230 - DNA, 25 bp, Homo sapien
gcatgtatcttctttttgtatagca

SEQ ID NO: 1106231 - DNA, 25 bp, Homo sapien
catgtatcttctttttgtatagcat

SEQ ID NO: 1106232 - DNA, 25 bp, Homo sapien
aatcgcatgtatcttctttttgtat

SEQ ID NO: 1106233 - DNA, 25 bp, Homo sapien
gacacacagccttgggttgtatgag

SEQ ID NO: 1106234 - DNA, 25 bp, Homo sapien
ccttgggttgtatgagactggtcac

SEQ ID NO: 1106235 - DNA, 25 bp, Homo sapien
cacagccttgggttgtatgagactg

SEQ ID NO: 1106236 - DNA, 25 bp, Homo sapien
ggttgtatgagactggtcacaccaa

SEQ ID NO: 1106237 - DNA, 25 bp, Homo sapien
aacaaatacatgctttccggtattc

SEQ ID NO: 1106238 - DNA, 25 bp, Homo sapien
agaattgatatcactggtggaaaga

SEQ ID NO: 1106239 - DNA, 25 bp, Homo sapien
tcaagttagtggaatttgatccaaa

SEQ ID NO: 1106240 - DNA, 25 bp, Homo sapien
gaactttccaagaatcatacacctt

SEQ ID NO: 1106241 - DNA, 25 bp, Homo sapien
tttgatccaaacacccgtcaatgta

SEQ ID NO: 1106242 - DNA, 25 bp, Homo sapien
cgtcaatgtactccctctgaacttt

SEQ ID NO: 1106243 - DNA, 25 bp, Homo sapien
ctggctaccttttgattattgtcaa

SEQ ID NO: 1106244 - DNA, 25 bp, Homo sapien
tcagtgctttccccgatgcacctgg

SEQ ID NO: 1106245 - DNA, 25 bp, Homo sapien
tgtcagtgctttccccgatgcacct

SEQ ID NO: 1106246 - DNA, 25 bp, Homo sapien
aatgtcagtgctttccccgatgcac

SEQ ID NO: 1106247 - DNA, 25 bp, Homo sapien
ttttctggactcttctttggaccag

SEQ ID NO: 1106248 - DNA, 25 bp, Homo sapien
tggactcttctttggaccagaattc

SEQ ID NO: 1106249 - DNA, 25 bp, Homo sapien
gactcttctttggaccagaattccc

SEQ ID NO: 1106250 - DNA, 25 bp, Homo sapien
tcttctttggaccagaattccctaa

SEQ ID NO: 1106251 - DNA, 25 bp, Homo sapien
aggaaccatggatgtaaacttaatg

SEQ ID NO: 1106252 - DNA, 25 bp, Homo sapien
tttgcaatatctacaaaaatgagcc

SEQ ID NO: 1106253 - DNA, 25 bp, Homo sapien
ttaaaaatgcacacctctctctgtt

SEQ ID NO: 1106254 - DNA, 25 bp, Homo sapien
ggatgtaaacttaatgctaataaac

SEQ ID NO: 1106255 - DNA, 25 bp, Homo sapien
ccctgacctcgagcttgaatagtaa

SEQ ID NO: 1106256 - DNA, 25 bp, Homo sapien
tactcttagatactagtgtgctagg

SEQ ID NO: 1106257 - DNA, 25 bp, Homo sapien
gagctccatatgcttgaggtactaa

SEQ ID NO: 1106258 - DNA, 25 bp, Homo sapien
gctaaatgttgtagatgcctactct

SEQ ID NO: 1106259 - DNA, 25 bp, Homo sapien
caggtgctgttcttattgcaatcac

SEQ ID NO: 1106260 - DNA, 25 bp, Homo sapien
tatgggattttcaaagcaggtgctg

SEQ ID NO: 1106261 - DNA, 25 bp, Homo sapien
ggcatttctttgatatgggattttc

SEQ ID NO: 1106262 - DNA, 25 bp, Homo sapien
ttgcaatcacattgtcacactccat

SEQ ID NO: 1106263 - DNA, 25 bp, Homo sapien
gcacattacagtctgggtcatgtag

SEQ ID NO: 1106264 - DNA, 25 bp, Homo sapien
cacattacagtctgggtcatgtagg

SEQ ID NO: 1106265 - DNA, 25 bp, Homo sapien
agcacattacagtctgggtcatgta

SEQ ID NO: 1106266 - DNA, 25 bp, Homo sapien
tggcacggctattgactttaacatg

SEQ ID NO: 1106267 - DNA, 25 bp, Homo sapien
tgcaatctggatcacaggtttgtct

SEQ ID NO: 1106268 - DNA, 25 bp, Homo sapien
tgaggacagtccatgctattggcac

SEQ ID NO: 1106269 - DNA, 25 bp, Homo sapien
actttaacatgctgtgcaatctgga

SEQ ID NO: 1106270 - DNA, 25 bp, Homo sapien
tcctcctgtgagtgtaccaagagca

SEQ ID NO: 1106271 - DNA, 25 bp, Homo sapien
tggccagtatagcttgctcctcctg

SEQ ID NO: 1106272 - DNA, 25 bp, Homo sapien
gtgcctctggccagtatagcttgct

SEQ ID NO: 1106273 - DNA, 25 bp, Homo sapien
ctgtgagtgtaccaagagcagggca

SEQ ID NO: 1106274 - DNA, 25 bp, Homo sapien
aaaggcagaataatcagttctgccc

SEQ ID NO: 1106275 - DNA, 25 bp, Homo sapien
gctgagcctgagtgtacagatccac

SEQ ID NO: 1106276 - DNA, 25 bp, Homo sapien
gaataatcagttctgcccattctcc

SEQ ID NO: 1106277 - DNA, 25 bp, Homo sapien
tctccacttatcctccaccactggc

SEQ ID NO: 1106278 - DNA, 25 bp, Homo sapien
aatgtccttgggaatgtccagtagg

SEQ ID NO: 1106279 - DNA, 25 bp, Homo sapien
cagaattgtacttgaccgctggcct

SEQ ID NO: 1106280 - DNA, 25 bp, Homo sapien
aaatgtccttgggaatgtccagtag

SEQ ID NO: 1106281 - DNA, 25 bp, Homo sapien
aattgtacttgaccgctggccttct

SEQ ID NO: 1106282 - DNA, 25 bp, Homo sapien
gagcagacctgggaatgcgttgtta

SEQ ID NO: 1106283 - DNA, 25 bp, Homo sapien
tgcgttgttatctggataatgtgct

SEQ ID NO: 1106284 - DNA, 25 bp, Homo sapien
ttcaaaatagtcaggacccttacag

SEQ ID NO: 1106285 - DNA, 25 bp, Homo sapien
gacccttacagtctgagcagacctg

SEQ ID NO: 1106286 - DNA, 25 bp, Homo sapien
tcttcttctaaaagggtctgttgaa

SEQ ID NO: 1106287 - DNA, 25 bp, Homo sapien
caagacgctgcagttcaccgtgtga

SEQ ID NO: 1106288 - DNA, 25 bp, Homo sapien
tatattcgactccactgtgtagact

SEQ ID NO: 1106289 - DNA, 25 bp, Homo sapien
ccttcaacaccaagacgctgcagtt

SEQ ID NO: 1106290 - DNA, 25 bp, Homo sapien
agtttgttattatattcgactccac

SEQ ID NO: 1106291 - DNA, 25 bp, Homo sapien
catgccaaggttgataaggtctaaa

SEQ ID NO: 1106292 - DNA, 25 bp, Homo sapien
ggtggattcatcagatatgcaagac

SEQ ID NO: 1106293 - DNA, 25 bp, Homo sapien
cagcagtggtacttttactggtgga

SEQ ID NO: 1106294 - DNA, 25 bp, Homo sapien
aaatatatttgcgtgatttcagcag

SEQ ID NO: 1106295 - DNA, 25 bp, Homo sapien
acagtactaatggagggcaagaatc

SEQ ID NO: 1106296 - DNA, 25 bp, Homo sapien
tcccagcaaagcagagaaggtagca

SEQ ID NO: 1106297 - DNA, 25 bp, Homo sapien
catgctgcaggcataaacagtacta

SEQ ID NO: 1106298 - DNA, 25 bp, Homo sapien
aaagggccacggagtttcaagcaag

SEQ ID NO: 1106299 - DNA, 25 bp, Homo sapien
taaatatttagcctgtccggaagag

SEQ ID NO: 1106300 - DNA, 25 bp, Homo sapien
cgaaaacagtttcccagaagcaaag

SEQ ID NO: 1106301 - DNA, 25 bp, Homo sapien
ttagactgggattggtgcgaaaaca

SEQ ID NO: 1106302 - DNA, 25 bp, Homo sapien
tatccaaccagctaaaatgggatgc

SEQ ID NO: 1106303 - DNA, 25 bp, Homo sapien
gagttacaacatcaataagagcctg

SEQ ID NO: 1106304 - DNA, 25 bp, Homo sapien
caaatttgggcttagtgagacaact

SEQ ID NO: 1106305 - DNA, 25 bp, Homo sapien
aaacttccaggatatactccaggga

SEQ ID NO: 1106306 - DNA, 25 bp, Homo sapien
tattagtaacacaacctttccatgg

SEQ ID NO: 1106307 - DNA, 25 bp, Homo sapien
ggcattctttgacatgtcaccagtg

SEQ ID NO: 1106308 - DNA, 25 bp, Homo sapien
ccagtgagtggacatacttgtatcg

SEQ ID NO: 1106309 - DNA, 25 bp, Homo sapien
taaactctatcaagggcaaacatat

SEQ ID NO: 1106310 - DNA, 25 bp, Homo sapien
tagagttccatacacatagcaagat

SEQ ID NO: 1106311 - DNA, 25 bp, Homo sapien
gatctgaccctgatttgaagtttac

SEQ ID NO: 1106312 - DNA, 25 bp, Homo sapien
tctatctgtgatatgtcctcctgtt

SEQ ID NO: 1106313 - DNA, 25 bp, Homo sapien
tacttgtcctcgtctatctgtgata

SEQ ID NO: 1106314 - DNA, 25 bp, Homo sapien
cctgatttgaagtttacgtctttga

SEQ ID NO: 1106315 - DNA, 25 bp, Homo sapien
gaagcaccttggacttatttttcat

SEQ ID NO: 1106316 - DNA, 25 bp, Homo sapien
taaggtttagtatggcagttctcag

SEQ ID NO: 1106317 - DNA, 25 bp, Homo sapien
tttccaacaccttgaccatgagagg

SEQ ID NO: 1106318 - DNA, 25 bp, Homo sapien
gaggttccccggcttcatgcttctg

SEQ ID NO: 1106319 - DNA, 25 bp, Homo sapien
caaggcagtatctagataaggttgg

SEQ ID NO: 1106320 - DNA, 25 bp, Homo sapien
cagtatctagataaggttggtttct

SEQ ID NO: 1106321 - DNA, 25 bp, Homo sapien
ggcagtatctagataaggttggttt

SEQ ID NO: 1106322 - DNA, 25 bp, Homo sapien
tcacaaggcagtatctagataaggt

SEQ ID NO: 1106323 - DNA, 25 bp, Homo sapien
gcctcacttagtgtgaaggtatcac

SEQ ID NO: 1106324 - DNA, 25 bp, Homo sapien
ggagggtgcctcacttagtgtgaag

SEQ ID NO: 1106325 - DNA, 25 bp, Homo sapien
ggtgcctcacttagtgtgaaggtat

SEQ ID NO: 1106326 - DNA, 25 bp, Homo sapien
cacttagtgtgaaggtatcacagtg

SEQ ID NO: 1106327 - DNA, 25 bp, Homo sapien
aaatttgtagagcacagttttagcc

SEQ ID NO: 1106328 - DNA, 25 bp, Homo sapien
gaagtcaaatccagattggagccca

SEQ ID NO: 1106329 - DNA, 25 bp, Homo sapien
ttggagcccaatgcctaaaaggatc

SEQ ID NO: 1106330 - DNA, 25 bp, Homo sapien
tgtaagatgtctttgaaacagcgac

SEQ ID NO: 1106331 - DNA, 25 bp, Homo sapien
actgaagagtcagctggcactctct

SEQ ID NO: 1106332 - DNA, 25 bp, Homo sapien
tgaagaaactgaagagtcagctggc

SEQ ID NO: 1106333 - DNA, 25 bp, Homo sapien
gtgaagaaactgaagagtcagctgg

SEQ ID NO: 1106334 - DNA, 25 bp, Homo sapien
agtcagctggcactctctgcaggtt

SEQ ID NO: 1106335 - DNA, 25 bp, Homo sapien
tcaaagatagacatcagtaatttgg

SEQ ID NO: 1106336 - DNA, 25 bp, Homo sapien
ctggaatcaaagatagacatcagta

SEQ ID NO: 1106337 - DNA, 25 bp, Homo sapien
aaagatagacatcagtaatttggca

SEQ ID NO: 1106338 - DNA, 25 bp, Homo sapien
gaatcaaagatagacatcagtaatt

SEQ ID NO: 1106339 - DNA, 25 bp, Homo sapien
gagtggtacatacttcgtatcaatc

SEQ ID NO: 1106340 - DNA, 25 bp, Homo sapien
ttttctctgagtggtacatacttcg

SEQ ID NO: 1106341 - DNA, 25 bp, Homo sapien
tatgcataacattcaataattctga

SEQ ID NO: 1106342 - DNA, 25 bp, Homo sapien
ccaacatttaatggtattagcctaa

SEQ ID NO: 1106343 - DNA, 25 bp, Homo sapien
gacttgtaaagaacaccagatcaca

SEQ ID NO: 1106344 - DNA, 25 bp, Homo sapien
ctgtctgaggacagaaaattgttga

SEQ ID NO: 1106345 - DNA, 25 bp, Homo sapien
tcattatgataaatcactgtctgag

SEQ ID NO: 1106346 - DNA, 25 bp, Homo sapien
cattctctgtagttagacttgtaaa

SEQ ID NO: 1106347 - DNA, 25 bp, Homo sapien
aactctatgggcagccactcattct

SEQ ID NO: 1106348 - DNA, 25 bp, Homo sapien
ccagcagtatagtatgttccttaga

SEQ ID NO: 1106349 - DNA, 25 bp, Homo sapien
tccagcagtatagtatgttccttag

SEQ ID NO: 1106350 - DNA, 25 bp, Homo sapien
gttccttagataactctatgggcag

SEQ ID NO: 1106351 - DNA, 25 bp, Homo sapien
tgatttaagttgcagcctaagggcc

SEQ ID NO: 1106352 - DNA, 25 bp, Homo sapien
cacacttgcattgattctgcctgca

SEQ ID NO: 1106353 - DNA, 25 bp, Homo sapien
caacctttgaccagggcagcgttca

SEQ ID NO: 1106354 - DNA, 25 bp, Homo sapien
caggcaattctgtgcgctttcagct

SEQ ID NO: 1106355 - DNA, 25 bp, Homo sapien
caaagtctgggccactgtatcatct

SEQ ID NO: 1106356 - DNA, 25 bp, Homo sapien
aattttgactccatctaaagtggga

SEQ ID NO: 1106357 - DNA, 25 bp, Homo sapien
cacgtaataaggtggcaaagtctgg

SEQ ID NO: 1106358 - DNA, 25 bp, Homo sapien
taaagtgggatccaatggtttgagc

SEQ ID NO: 1106359 - DNA, 25 bp, Homo sapien
aaatagagactgaggtccataaaat

SEQ ID NO: 1106360 - DNA, 25 bp, Homo sapien
aatagagactgaggtccataaaatg

SEQ ID NO: 1106361 - DNA, 25 bp, Homo sapien
gaaaatagagactgaggtccataaa

SEQ ID NO: 1106362 - DNA, 25 bp, Homo sapien
aaaatagagactgaggtccataaaa

SEQ ID NO: 1106363 - DNA, 25 bp, Homo sapien
tgtctccaggccatagtccggctgc

SEQ ID NO: 1106364 - DNA, 25 bp, Homo sapien
ttccacttcgttcacaaatgtctcc

SEQ ID NO: 1106365 - DNA, 25 bp, Homo sapien
gcatggcagggctcaaggccttgat

SEQ ID NO: 1106366 - DNA, 25 bp, Homo sapien
tgggccagagcggattccacttcgt

SEQ ID NO: 1106367 - DNA, 25 bp, Homo sapien
tcactggggatgtttcttgttgctt

SEQ ID NO: 1106368 - DNA, 25 bp, Homo sapien
tcttgttgcttatttgtctgctaac

SEQ ID NO: 1106369 - DNA, 25 bp, Homo sapien
tttcttgttgcttatttgtctgcta

SEQ ID NO: 1106370 - DNA, 25 bp, Homo sapien
actggggatgtttcttgttgcttat

SEQ ID NO: 1106371 - DNA, 25 bp, Homo sapien
ttgtggtctgtaacaggaggtgcag

SEQ ID NO: 1106372 - DNA, 25 bp, Homo sapien
tggtctgtaacaggaggtgcagtct

SEQ ID NO: 1106373 - DNA, 25 bp, Homo sapien
ggtgcagtcttcgaaaaagtcagca

SEQ ID NO: 1106374 - DNA, 25 bp, Homo sapien
taacaggaggtgcagtcttcgaaaa

SEQ ID NO: 1106375 - DNA, 25 bp, Homo sapien
tactgtgtgctggtcattggactcc

SEQ ID NO: 1106376 - DNA, 25 bp, Homo sapien
cagtgaggcgctctgtttgaccaac

SEQ ID NO: 1106377 - DNA, 25 bp, Homo sapien
tctttgtaaacccacgatgtagagg

SEQ ID NO: 1106378 - DNA, 25 bp, Homo sapien
tagcaattgtagaagtgatttcctc

SEQ ID NO: 1106379 - DNA, 25 bp, Homo sapien
ggcgttggccgtaaatctgcaggca

SEQ ID NO: 1106380 - DNA, 25 bp, Homo sapien
gatggcaaaataggcggcgttggcc

SEQ ID NO: 1106381 - DNA, 25 bp, Homo sapien
gggcaggtggtaaatctgctatcat

SEQ ID NO: 1106382 - DNA, 25 bp, Homo sapien
taaatctgcaggcagtaaatgggca

SEQ ID NO: 1106383 - DNA, 25 bp, Homo sapien
tcaaacagccgatagaggcgtatct

SEQ ID NO: 1106384 - DNA, 25 bp, Homo sapien
tcatgcatcttctttgtggcgtatg

SEQ ID NO: 1106385 - DNA, 25 bp, Homo sapien
tctttgtggcgtatgaaagctgaga

SEQ ID NO: 1106386 - DNA, 25 bp, Homo sapien
gaggcgtatcttctatcatgcatct

SEQ ID NO: 1106387 - DNA, 25 bp, Homo sapien
tttcatcacaagtctcatgttttgg

SEQ ID NO: 1106388 - DNA, 25 bp, Homo sapien
ctgatgtgacacttgaggcaatgcc

SEQ ID NO: 1106389 - DNA, 25 bp, Homo sapien
ctctccagttcaattaaaagaaggc

SEQ ID NO: 1106390 - DNA, 25 bp, Homo sapien
tccagttcaattaaaagaaggctag

SEQ ID NO: 1106391 - DNA, 25 bp, Homo sapien
ctccctctccagttcaattaaaaga

SEQ ID NO: 1106392 - DNA, 25 bp, Homo sapien
ccctctccagttcaattaaaagaag

SEQ ID NO: 1106393 - DNA, 25 bp, Homo sapien
tggcaggattgtagtttcctacaaa

SEQ ID NO: 1106394 - DNA, 25 bp, Homo sapien
tttcaatacgtgcaaacgggtcaag

SEQ ID NO: 1106395 - DNA, 25 bp, Homo sapien
cgtgcaaacgggtcaaggacagctt

SEQ ID NO: 1106396 - DNA, 25 bp, Homo sapien
gagtggtttcaatacgtgcaaacgg

SEQ ID NO: 1106397 - DNA, 25 bp, Homo sapien
cttccttacagggttcatcagtgac

SEQ ID NO: 1106398 - DNA, 25 bp, Homo sapien
ttccttacagggttcatcagtgacc

SEQ ID NO: 1106399 - DNA, 25 bp, Homo sapien
tcaaaatagcctatacattcccttt

SEQ ID NO: 1106400 - DNA, 25 bp, Homo sapien
aaaatagcctatacattccctttct

SEQ ID NO: 1106401 - DNA, 25 bp, Homo sapien
cttagtgtgtacctctcttctttca

SEQ ID NO: 1106402 - DNA, 25 bp, Homo sapien
tgcctcaatgaactgttcttagtgt

SEQ ID NO: 1106403 - DNA, 25 bp, Homo sapien
gagtatcttggattatgttcaaagc

SEQ ID NO: 1106404 - DNA, 25 bp, Homo sapien
taattttgctactgtcttgagtatc

SEQ ID NO: 1106405 - DNA, 25 bp, Homo sapien
ggattatgttcaaagcccaacacaa

SEQ ID NO: 1106406 - DNA, 25 bp, Homo sapien
gctactgtcttgagtatcttggatt

SEQ ID NO: 1106407 - DNA, 25 bp, Homo sapien
tacacattgtgtttgcaagacagtc

SEQ ID NO: 1106408 - DNA, 25 bp, Homo sapien
gacagtcagccatgaaagattcagt

SEQ ID NO: 1106409 - DNA, 25 bp, Homo sapien
tcttgaaaggtcttctaattgagga

SEQ ID NO: 1106410 - DNA, 25 bp, Homo sapien
ccacgtgggcagttcccattaataa

SEQ ID NO: 1106411 - DNA, 25 bp, Homo sapien
tcttattagctttcaagctagggac

SEQ ID NO: 1106412 - DNA, 25 bp, Homo sapien
tttactgtgcttattattctgtgac

SEQ ID NO: 1106413 - DNA, 25 bp, Homo sapien
ctgtttgttggatgatgctaattgt

SEQ ID NO: 1106414 - DNA, 25 bp, Homo sapien
caagctagggacaaacagatgccac

SEQ ID NO: 1106415 - DNA, 25 bp, Homo sapien
tataatgagcttagtctttacaaga

SEQ ID NO: 1106416 - DNA, 25 bp, Homo sapien
tagaacattgcttcttgtcctggtt

SEQ ID NO: 1106417 - DNA, 25 bp, Homo sapien
atctgacatttgtgttataatgagc

SEQ ID NO: 1106418 - DNA, 25 bp, Homo sapien
tacaagatattcatgtcgggaaatg

SEQ ID NO: 1106419 - DNA, 25 bp, Homo sapien
caaaagttcttaagggtggctgcag

SEQ ID NO: 1106420 - DNA, 25 bp, Homo sapien
tgatactgaccctttggacacttgg

SEQ ID NO: 1106421 - DNA, 25 bp, Homo sapien
tggacccttgaccattgatactgac

SEQ ID NO: 1106422 - DNA, 25 bp, Homo sapien
gccagggcatttagagtggaccctt

SEQ ID NO: 1106423 - DNA, 25 bp, Homo sapien
tgctgagctcaactgctgactggag

SEQ ID NO: 1106424 - DNA, 25 bp, Homo sapien
ggtggtttgagcatgtagaagcaat

SEQ ID NO: 1106425 - DNA, 25 bp, Homo sapien
gcagttgtaggaggctataattgct

SEQ ID NO: 1106426 - DNA, 25 bp, Homo sapien
gccattcaatactgagaggagcagc

SEQ ID NO: 1106427 - DNA, 25 bp, Homo sapien
gggtatcagcatagttttgaagcat

SEQ ID NO: 1106428 - DNA, 25 bp, Homo sapien
aagttcagggaatacattaataggc

SEQ ID NO: 1106429 - DNA, 25 bp, Homo sapien
aaagtcaaccccacttaagctacat

SEQ ID NO: 1106430 - DNA, 25 bp, Homo sapien
tagaagttgattgacatgtaggcgg

SEQ ID NO: 1106431 - DNA, 25 bp, Homo sapien
gatgatggcccatacacgtgttctg

SEQ ID NO: 1106432 - DNA, 25 bp, Homo sapien
gactaggaagcagttaacaatgttg

SEQ ID NO: 1106433 - DNA, 25 bp, Homo sapien
tcagaactgctatattgtgaaagac

SEQ ID NO: 1106434 - DNA, 25 bp, Homo sapien
gactcaacatacacccagaacaatg

SEQ ID NO: 1106435 - DNA, 25 bp, Homo sapien
aaaaacagcgtgtaactcaaatatg

SEQ ID NO: 1106436 - DNA, 25 bp, Homo sapien
ccatcagtaggtatagaaaaaacag

SEQ ID NO: 1106437 - DNA, 25 bp, Homo sapien
tccaagctgagagtaactctatccg

SEQ ID NO: 1106438 - DNA, 25 bp, Homo sapien
tctatccggtgtggttgaaggagca

SEQ ID NO: 1106439 - DNA, 25 bp, Homo sapien
ttgacttgcctgctgatgtgattga

SEQ ID NO: 1106440 - DNA, 25 bp, Homo sapien
cttgcctgctgatgtgattgaggca

SEQ ID NO: 1106441 - DNA, 25 bp, Homo sapien
gacttgcctgctgatgtgattgagg

SEQ ID NO: 1106442 - DNA, 25 bp, Homo sapien
ctgcaggaattttgacttgcctgct

SEQ ID NO: 1106443 - DNA, 25 bp, Homo sapien
gaaagttgatgtcatatagagaata

SEQ ID NO: 1106444 - DNA, 25 bp, Homo sapien
aaagttgatgtcatatagagaatac

SEQ ID NO: 1106445 - DNA, 25 bp, Homo sapien
aagttgatgtcatatagagaatact

SEQ ID NO: 1106446 - DNA, 25 bp, Homo sapien
aatcatctttatgcacattggcagg

SEQ ID NO: 1106447 - DNA, 25 bp, Homo sapien
agtggatcctttcagtgtctcctct

SEQ ID NO: 1106448 - DNA, 25 bp, Homo sapien
tgtgtctctcattggttgagtggat

SEQ ID NO: 1106449 - DNA, 25 bp, Homo sapien
ctctttccagtgcaatttgcacatt

SEQ ID NO: 1106450 - DNA, 25 bp, Homo sapien
taatgtggctaatgtgcatggcccc

SEQ ID NO: 1106451 - DNA, 25 bp, Homo sapien
tgtcctttagactggattcctgagg

SEQ ID NO: 1106452 - DNA, 25 bp, Homo sapien
tcagcatgtccaatgaacagttgtg

SEQ ID NO: 1106453 - DNA, 25 bp, Homo sapien
tttgaatccctacagagatagtgag

SEQ ID NO: 1106454 - DNA, 25 bp, Homo sapien
cttgtcactgcccttatgccttcca

SEQ ID NO: 1106455 - DNA, 25 bp, Homo sapien
tccactaaaccttgtaaagcctatc

SEQ ID NO: 1106456 - DNA, 25 bp, Homo sapien
taaagcctatcacctgataggtctc

SEQ ID NO: 1106457 - DNA, 25 bp, Homo sapien
ttgaatccataatgacatctccttg

SEQ ID NO: 1106458 - DNA, 25 bp, Homo sapien
tcagcagtgtactatttggtcggcg

SEQ ID NO: 1106459 - DNA, 25 bp, Homo sapien
gagattttcccctggccagaaatga

SEQ ID NO: 1106460 - DNA, 25 bp, Homo sapien
tcctactgctgaatggtagctgaaa

SEQ ID NO: 1106461 - DNA, 25 bp, Homo sapien
gatcattgaagaccactaggcgcct

SEQ ID NO: 1106462 - DNA, 25 bp, Homo sapien
tgctgttaataggcacagtggccac

SEQ ID NO: 1106463 - DNA, 25 bp, Homo sapien
gccaggggacctgtctgtacgtgct

SEQ ID NO: 1106464 - DNA, 25 bp, Homo sapien
tgtgacctcttcttgctgttaatag

SEQ ID NO: 1106465 - DNA, 25 bp, Homo sapien
ggacctgtctgtacgtgctcttcat

SEQ ID NO: 1106466 - DNA, 25 bp, Homo sapien
cagtcggtggctaactccagctaaa

SEQ ID NO: 1106467 - DNA, 25 bp, Homo sapien
caaatttggccatgaagcaacctgc

SEQ ID NO: 1106468 - DNA, 25 bp, Homo sapien
catgataataggacagggaaaaccc

SEQ ID NO: 1106469 - DNA, 25 bp, Homo sapien
taaaagttggcgctcttaagtctcc

SEQ ID NO: 1106470 - DNA, 25 bp, Homo sapien
gaatccatacaaagctaacttccct

SEQ ID NO: 1106471 - DNA, 25 bp, Homo sapien
ggtgtaactcctggctctttaacaa

SEQ ID NO: 1106472 - DNA, 25 bp, Homo sapien
ggaaaatacgccttccacattgtac

SEQ ID NO: 1106473 - DNA, 25 bp, Homo sapien
cacattgtaccagaggaatccatac

SEQ ID NO: 1106474 - DNA, 25 bp, Homo sapien
tcaaatgtcagggtagcgaatgttt

SEQ ID NO: 1106475 - DNA, 25 bp, Homo sapien
gaaaaactttgttcacgaacatgac

SEQ ID NO: 1106476 - DNA, 25 bp, Homo sapien
tgttcacgaacatgacagtcagcta

SEQ ID NO: 1106477 - DNA, 25 bp, Homo sapien
cagggtagcgaatgtttgaaaaact

SEQ ID NO: 1106478 - DNA, 25 bp, Homo sapien
ggagttatgtctgctttctttaata

SEQ ID NO: 1106479 - DNA, 25 bp, Homo sapien
gaaagtagttaggagttatgtctgc

SEQ ID NO: 1106480 - DNA, 25 bp, Homo sapien
tagttaggagttatgtctgctttct

SEQ ID NO: 1106481 - DNA, 25 bp, Homo sapien
agacaggaaagtagttaggagttat

SEQ ID NO: 1106482 - DNA, 25 bp, Homo sapien
taatggaggatgtaatcccaatccg

SEQ ID NO: 1106483 - DNA, 25 bp, Homo sapien
gaaacggctccattgtctcaggtat

SEQ ID NO: 1106484 - DNA, 25 bp, Homo sapien
tttctgagtatgcttcacccaaagg

SEQ ID NO: 1106485 - DNA, 25 bp, Homo sapien
tctgaatgccatgtttagtagctgt

SEQ ID NO: 1106486 - DNA, 25 bp, Homo sapien
attgttactagcagggtcttttctc

SEQ ID NO: 1106487 - DNA, 25 bp, Homo sapien
ttgttactagcagggtcttttctct

SEQ ID NO: 1106488 - DNA, 25 bp, Homo sapien
gttactagcagggtcttttctctgg

SEQ ID NO: 1106489 - DNA, 25 bp, Homo sapien
tactagcagggtcttttctctggac

SEQ ID NO: 1106490 - DNA, 25 bp, Homo sapien
gttatatcatatgcaaagttccatc

SEQ ID NO: 1106491 - DNA, 25 bp, Homo sapien
tgactgagttatatcatatgcaaag

SEQ ID NO: 1106492 - DNA, 25 bp, Homo sapien
ttgactgagttatatcatatgcaaa

SEQ ID NO: 1106493 - DNA, 25 bp, Homo sapien
gactgagttatatcatatgcaaagt

SEQ ID NO: 1106494 - DNA, 25 bp, Homo sapien
ttttcagtgccatgaccgagaggga

SEQ ID NO: 1106495 - DNA, 25 bp, Homo sapien
gaaaaatggtgtagtgccgataaaa

SEQ ID NO: 1106496 - DNA, 25 bp, Homo sapien
agtaggagtatagcaaaagtccttt

SEQ ID NO: 1106497 - DNA, 25 bp, Homo sapien
caacgcttttttaatgacgtagaag

SEQ ID NO: 1106498 - DNA, 25 bp, Homo sapien
tctaatgtgctatgatttcacctgt

SEQ ID NO: 1106499 - DNA, 25 bp, Homo sapien
taaacacttaagctcaggatttcga

SEQ ID NO: 1106500 - DNA, 25 bp, Homo sapien
gataaacacttaagctcaggatttc

SEQ ID NO: 1106501 - DNA, 25 bp, Homo sapien
aggttctaatgtgctatgatttcac

SEQ ID NO: 1106502 - DNA, 25 bp, Homo sapien
gggaatatggaaagacagcagatgc

SEQ ID NO: 1106503 - DNA, 25 bp, Homo sapien
gaacacacctagtttgacaattgca

SEQ ID NO: 1106504 - DNA, 25 bp, Homo sapien
tactctttcacataccagggacaac

SEQ ID NO: 1106505 - DNA, 25 bp, Homo sapien
tttgggcaatcagcgggaagatacc

SEQ ID NO: 1106506 - DNA, 25 bp, Homo sapien
cattacttgtgtgattgcatctctc

SEQ ID NO: 1106507 - DNA, 25 bp, Homo sapien
gatgctcgtctgtcagcattacttg

SEQ ID NO: 1106508 - DNA, 25 bp, Homo sapien
ccattcctttgatgctcgtctgtca

SEQ ID NO: 1106509 - DNA, 25 bp, Homo sapien
tcgtctgtcagcattacttgtgtga

SEQ ID NO: 1106510 - DNA, 25 bp, Homo sapien
gttagttacatatgcattgctggtg

SEQ ID NO: 1106511 - DNA, 25 bp, Homo sapien
agttagttacatatgcattgctggt

SEQ ID NO: 1106512 - DNA, 25 bp, Homo sapien
attgctggtggaaattacgtgcgta

SEQ ID NO: 1106513 - DNA, 25 bp, Homo sapien
gtgcgtataatacttcctttttgtc

SEQ ID NO: 1106514 - DNA, 25 bp, Homo sapien
catgacactgggtaaaacttctatt

SEQ ID NO: 1106515 - DNA, 25 bp, Homo sapien
tgacactgggtaaaacttctattaa

SEQ ID NO: 1106516 - DNA, 25 bp, Homo sapien
tgggtaaaacttctattaactgtca

SEQ ID NO: 1106517 - DNA, 25 bp, Homo sapien
cactgggtaaaacttctattaactg

SEQ ID NO: 1106518 - DNA, 25 bp, Homo sapien
agggtatgcttgtgctctttaaaac

SEQ ID NO: 1106519 - DNA, 25 bp, Homo sapien
tccatacagctagggtatgcttgtg

SEQ ID NO: 1106520 - DNA, 25 bp, Homo sapien
tacagctagggtatgcttgtgctct

SEQ ID NO: 1106521 - DNA, 25 bp, Homo sapien
cctttttccatacagctagggtatg

SEQ ID NO: 1106522 - DNA, 25 bp, Homo sapien
tattcccatcagacatggtgcacca

SEQ ID NO: 1106523 - DNA, 25 bp, Homo sapien
tcatttcgccggttgataccactga

SEQ ID NO: 1106524 - DNA, 25 bp, Homo sapien
tcaagaacactacagtcaacaccat

SEQ ID NO: 1106525 - DNA, 25 bp, Homo sapien
catttattgcttcgtctcaagaaca

SEQ ID NO: 1106526 - DNA, 25 bp, Homo sapien
taaagaccatccaggttgtcctctc

SEQ ID NO: 1106527 - DNA, 25 bp, Homo sapien
ctatagcatggacaaagaaagtgca

SEQ ID NO: 1106528 - DNA, 25 bp, Homo sapien
ccaaccttatcttgtgcttcagggt

SEQ ID NO: 1106529 - DNA, 25 bp, Homo sapien
tgacaccaagagatgacttccagat

SEQ ID NO: 1106530 - DNA, 25 bp, Homo sapien
tagttcatggagcttattctttgtt

SEQ ID NO: 1106531 - DNA, 25 bp, Homo sapien
taattcattatactctctcttagtt

SEQ ID NO: 1106532 - DNA, 25 bp, Homo sapien
ctcttagttcatggagcttattctt

SEQ ID NO: 1106533 - DNA, 25 bp, Homo sapien
tctctcttagttcatggagcttatt

SEQ ID NO: 1106534 - DNA, 25 bp, Homo sapien
attagatgctttcatggtatcatca

SEQ ID NO: 1106535 - DNA, 25 bp, Homo sapien
agatgctttcatggtatcatcatct

SEQ ID NO: 1106536 - DNA, 25 bp, Homo sapien
tattagatgctttcatggtatcatc

SEQ ID NO: 1106537 - DNA, 25 bp, Homo sapien
tagatgctttcatggtatcatcatc

SEQ ID NO: 1106538 - DNA, 25 bp, Homo sapien
tctgactgctctctcatagtacttc

SEQ ID NO: 1106539 - DNA, 25 bp, Homo sapien
ctgactgctctctcatagtacttca

SEQ ID NO: 1106540 - DNA, 25 bp, Homo sapien
tgactgctctctcatagtacttcat

SEQ ID NO: 1106541 - DNA, 25 bp, Homo sapien
ttgtgaagctctaccctattcattt

SEQ ID NO: 1106542 - DNA, 25 bp, Homo sapien
tttgtgaagctctaccctattcatt

SEQ ID NO: 1106543 - DNA, 25 bp, Homo sapien
tgtgaagctctaccctattcatttc

SEQ ID NO: 1106544 - DNA, 25 bp, Homo sapien
cgttttagatgtctcatgtccttct

SEQ ID NO: 1106545 - DNA, 25 bp, Homo sapien
ttactgtgaagtttcaaagttctac

SEQ ID NO: 1106546 - DNA, 25 bp, Homo sapien
cttttccccattcgaaaactatcag

SEQ ID NO: 1106547 - DNA, 25 bp, Homo sapien
tcttactgtgaagtttcaaagttct

SEQ ID NO: 1106548 - DNA, 25 bp, Homo sapien
aaactatcagtgaatttccattgcc

SEQ ID NO: 1106549 - DNA, 25 bp, Homo sapien
aaaccaagtatctttctgaactgca

SEQ ID NO: 1106550 - DNA, 25 bp, Homo sapien
ggaaaccaagtatctttctgaactg

SEQ ID NO: 1106551 - DNA, 25 bp, Homo sapien
tttgggaaaccaagtatctttctga

SEQ ID NO: 1106552 - DNA, 25 bp, Homo sapien
tgggaaaccaagtatctttctgaac

SEQ ID NO: 1106553 - DNA, 25 bp, Homo sapien
ttgaaagttcttctgtgccacagct

SEQ ID NO: 1106554 - DNA, 25 bp, Homo sapien
ggttccctggtatgaggcacattga

SEQ ID NO: 1106555 - DNA, 25 bp, Homo sapien
cagctttgatattgtccaattttgg

SEQ ID NO: 1106556 - DNA, 25 bp, Homo sapien
tttattccataagtatgatccccgg

SEQ ID NO: 1106557 - DNA, 25 bp, Homo sapien
aatcctctggtgaattcgactgggg

SEQ ID NO: 1106558 - DNA, 25 bp, Homo sapien
tttctattttgccaaaggatcttca

SEQ ID NO: 1106559 - DNA, 25 bp, Homo sapien
tctggtgaattcgactgggggttcc

SEQ ID NO: 1106560 - DNA, 25 bp, Homo sapien
ttttctattttgccaaaggatcttc

SEQ ID NO: 1106561 - DNA, 25 bp, Homo sapien
tatccaatctaggatagcttcccag

SEQ ID NO: 1106562 - DNA, 25 bp, Homo sapien
tctaggatagcttcccagtgaaatg

SEQ ID NO: 1106563 - DNA, 25 bp, Homo sapien
ctgccacccagttatccaatctagg

SEQ ID NO: 1106564 - DNA, 25 bp, Homo sapien
tcccagtgaaatgctaagatgccca

SEQ ID NO: 1106565 - DNA, 25 bp, Homo sapien
ttggcctgcaattgggtcaggggcc

SEQ ID NO: 1106566 - DNA, 25 bp, Homo sapien
ggcctgcaattgggtcaggggccat

SEQ ID NO: 1106567 - DNA, 25 bp, Homo sapien
tggcctgcaattgggtcaggggcca

SEQ ID NO: 1106568 - DNA, 25 bp, Homo sapien
cttggcctgcaattgggtcaggggc

SEQ ID NO: 1106569 - DNA, 25 bp, Homo sapien
ccatagagtggttaaaggtatgggc

SEQ ID NO: 1106570 - DNA, 25 bp, Homo sapien
catagagtggttaaaggtatgggct

SEQ ID NO: 1106571 - DNA, 25 bp, Homo sapien
ctccaaggccatagagtggttaaag

SEQ ID NO: 1106572 - DNA, 25 bp, Homo sapien
caaggccatagagtggttaaaggta

SEQ ID NO: 1106573 - DNA, 25 bp, Homo sapien
ggtacctccataaatagcacttagc

SEQ ID NO: 1106574 - DNA, 25 bp, Homo sapien
ataggtacctccataaatagcactt

SEQ ID NO: 1106575 - DNA, 25 bp, Homo sapien
taaatagcacttagccttgcaaatc

SEQ ID NO: 1106576 - DNA, 25 bp, Homo sapien
agccttgcaaatccttggggcagtt

SEQ ID NO: 1106577 - DNA, 25 bp, Homo sapien
gatgaactgcttacagcaagcaatt

SEQ ID NO: 1106578 - DNA, 25 bp, Homo sapien
gaactgcttacagcaagcaatttct

SEQ ID NO: 1106579 - DNA, 25 bp, Homo sapien
gcaagcaatttctccttccgatttt

SEQ ID NO: 1106580 - DNA, 25 bp, Homo sapien
gcaatttctccttccgattttactc

SEQ ID NO: 1106581 - DNA, 25 bp, Homo sapien
tttctgctcagttggttccaagagc

SEQ ID NO: 1106582 - DNA, 25 bp, Homo sapien
tgttcccaagtctttcggtatcagg

SEQ ID NO: 1106583 - DNA, 25 bp, Homo sapien
aagtctttcggtatcaggaggtcac

SEQ ID NO: 1106584 - DNA, 25 bp, Homo sapien
ttctgttcccaagtctttcggtatc

SEQ ID NO: 1106585 - DNA, 25 bp, Homo sapien
tcccaagtctttcggtatcaggagg

SEQ ID NO: 1106586 - DNA, 25 bp, Homo sapien
agaaaaacacatgggtggcatcgta

SEQ ID NO: 1106587 - DNA, 25 bp, Homo sapien
ttagaaaaacacatgggtggcatcg

SEQ ID NO: 1106588 - DNA, 25 bp, Homo sapien
gaaaaacacatgggtggcatcgtac

SEQ ID NO: 1106589 - DNA, 25 bp, Homo sapien
tagaaaaacacatgggtggcatcgt

SEQ ID NO: 1106590 - DNA, 25 bp, Homo sapien
ccactgggtggtagttggcttgtaa

SEQ ID NO: 1106591 - DNA, 25 bp, Homo sapien
gcacaacatcagtgtacatgacatg

SEQ ID NO: 1106592 - DNA, 25 bp, Homo sapien
ggcttgtaagtctggcttgcacaac

SEQ ID NO: 1106593 - DNA, 25 bp, Homo sapien
tttctccactgggtggtagttggct

SEQ ID NO: 1106594 - DNA, 25 bp, Homo sapien
tacggtgcctcgagaggtaaaacgc

SEQ ID NO: 1106595 - DNA, 25 bp, Homo sapien
tggcgccgaccacaacttggaggac

SEQ ID NO: 1106596 - DNA, 25 bp, Homo sapien
ttggaggacttcaaacttacggtgc

SEQ ID NO: 1106597 - DNA, 25 bp, Homo sapien
agaatccctctagcgcttacgacag

SEQ ID NO: 1106598 - DNA, 25 bp, Homo sapien
cagagagtcttgcttcggtgcgctt

SEQ ID NO: 1106599 - DNA, 25 bp, Homo sapien
tgcctcgtaaagagctcagtctgcg

SEQ ID NO: 1106600 - DNA, 25 bp, Homo sapien
gcaaatgtctccgttagctgcccag

SEQ ID NO: 1106601 - DNA, 25 bp, Homo sapien
tggtcacaggtgatgggaacccttc

SEQ ID NO: 1106602 - DNA, 25 bp, Homo sapien
caaattcctctgtgtgccatagcac

SEQ ID NO: 1106603 - DNA, 25 bp, Homo sapien
tattctttaacacagagctcaaatg

SEQ ID NO: 1106604 - DNA, 25 bp, Homo sapien
gttaattgcaaattcctctgtgtgc

SEQ ID NO: 1106605 - DNA, 25 bp, Homo sapien
ttctctaatgtgaagactgttaatt

SEQ ID NO: 1106606 - DNA, 25 bp, Homo sapien
tcctgccacccttctttgtgggagc

SEQ ID NO: 1106607 - DNA, 25 bp, Homo sapien
gaatggcccttttttcttcctgcca

SEQ ID NO: 1106608 - DNA, 25 bp, Homo sapien
cttcctgccacccttctttgtggga

SEQ ID NO: 1106609 - DNA, 25 bp, Homo sapien
tgatggcagaatggcccttttttct

SEQ ID NO: 1106610 - DNA, 25 bp, Homo sapien
tgcttgtgaatgttgatggtgtatt

SEQ ID NO: 1106611 - DNA, 25 bp, Homo sapien
tccatagatgtgcttgtgaatgttg

SEQ ID NO: 1106612 - DNA, 25 bp, Homo sapien
ccatagatgtgcttgtgaatgttga

SEQ ID NO: 1106613 - DNA, 25 bp, Homo sapien
atgtgcttgtgaatgttgatggtgt

SEQ ID NO: 1106614 - DNA, 25 bp, Homo sapien
caactgcacacagattcggtgtgag

SEQ ID NO: 1106615 - DNA, 25 bp, Homo sapien
tgcacacagattcggtgtgagacat

SEQ ID NO: 1106616 - DNA, 25 bp, Homo sapien
tccttattcctcgggcccagacaag

SEQ ID NO: 1106617 - DNA, 25 bp, Homo sapien
attcctcgggcccagacaaggcaca

SEQ ID NO: 1106618 - DNA, 25 bp, Homo sapien
ctaaccaatcacataatccatgcta

SEQ ID NO: 1106619 - DNA, 25 bp, Homo sapien
taaccaatcacataatccatgctat

SEQ ID NO: 1106620 - DNA, 25 bp, Homo sapien
tctgggtgtctgatgactgagtcct

SEQ ID NO: 1106621 - DNA, 25 bp, Homo sapien
ggtggttgctcctaactcctggagg

SEQ ID NO: 1106622 - DNA, 25 bp, Homo sapien
gaccaaggtgatgcaagagtagaaa

SEQ ID NO: 1106623 - DNA, 25 bp, Homo sapien
ggtaccacagggctataatctgggt

SEQ ID NO: 1106624 - DNA, 25 bp, Homo sapien
aatatttcatcctgcaagccttaat

SEQ ID NO: 1106625 - DNA, 25 bp, Homo sapien
gccttaataccaccgtttggcagaa

SEQ ID NO: 1106626 - DNA, 25 bp, Homo sapien
cccttagggcaattggagtgtagaa

SEQ ID NO: 1106627 - DNA, 25 bp, Homo sapien
acagaaaattatgcctgcttctcag

SEQ ID NO: 1106628 - DNA, 25 bp, Homo sapien
gacattgatcctgccattccatgga

SEQ ID NO: 1106629 - DNA, 25 bp, Homo sapien
tagaaacctaacttatcatgctgga

SEQ ID NO: 1106630 - DNA, 25 bp, Homo sapien
tctccaccaagtagttagagtgatt

SEQ ID NO: 1106631 - DNA, 25 bp, Homo sapien
gcaagcatcaaatctcacctagaga

SEQ ID NO: 1106632 - DNA, 25 bp, Homo sapien
gcacccagactattgcctttcagag

SEQ ID NO: 1106633 - DNA, 25 bp, Homo sapien
tgtatattatttcaagcacccagac

SEQ ID NO: 1106634 - DNA, 25 bp, Homo sapien
gatggaactggaatggctaaaatca

SEQ ID NO: 1106635 - DNA, 25 bp, Homo sapien
tatgggctcttgagacaggcaaact

SEQ ID NO: 1106636 - DNA, 25 bp, Homo sapien
aataaggtcaccatccaagtactgg

SEQ ID NO: 1106637 - DNA, 25 bp, Homo sapien
ccaaagactaattgtgcaaatcaag

SEQ ID NO: 1106638 - DNA, 25 bp, Homo sapien
taaaaaactacatgtgcttcccatt

SEQ ID NO: 1106639 - DNA, 25 bp, Homo sapien
tgtcgcttctttccgcaaacaaata

SEQ ID NO: 1106640 - DNA, 25 bp, Homo sapien
gacagttggcttaggtgcaaatcac

SEQ ID NO: 1106641 - DNA, 25 bp, Homo sapien
tgaccaagttacagaatacagatga

SEQ ID NO: 1106642 - DNA, 25 bp, Homo sapien
taaacgcagatttccctttcagcta

SEQ ID NO: 1106643 - DNA, 25 bp, Homo sapien
aatgtggacttccaagacagttggc

SEQ ID NO: 1106644 - DNA, 25 bp, Homo sapien
tgggccggcagtcgggaccaactgg

SEQ ID NO: 1106645 - DNA, 25 bp, Homo sapien
tctttctctgaagtgcctgaaggta

SEQ ID NO: 1106646 - DNA, 25 bp, Homo sapien
aacagagaggcgtaggtggccctgc

SEQ ID NO: 1106647 - DNA, 25 bp, Homo sapien
gggactaagacgatgtccaccgtcc

SEQ ID NO: 1106648 - DNA, 25 bp, Homo sapien
gattccatagaattagagtcacgtt

SEQ ID NO: 1106649 - DNA, 25 bp, Homo sapien
cgtttttctttgcagcgaaactcca

SEQ ID NO: 1106650 - DNA, 25 bp, Homo sapien
tagagtcacgtttttctttgcagcg

SEQ ID NO: 1106651 - DNA, 25 bp, Homo sapien
ctccagattccatagaattagagtc

SEQ ID NO: 1106652 - DNA, 25 bp, Homo sapien
tgaccatcacgggaaatgtctgccg

SEQ ID NO: 1106653 - DNA, 25 bp, Homo sapien
ctaagagtttctgagggtgaggctc

SEQ ID NO: 1106654 - DNA, 25 bp, Homo sapien
taatgttgaaacttagcaatgccga

SEQ ID NO: 1106655 - DNA, 25 bp, Homo sapien
tcaggtaccaagtttgacatgtggg

SEQ ID NO: 1106656 - DNA, 25 bp, Homo sapien
gaggtcaccacgctagtggaatccg

SEQ ID NO: 1106657 - DNA, 25 bp, Homo sapien
aaaggtctttatgcctctaaccagg

SEQ ID NO: 1106658 - DNA, 25 bp, Homo sapien
cctggctcgaagctgaaaggtctta

SEQ ID NO: 1106659 - DNA, 25 bp, Homo sapien
cacttagggaatgtctagccgcagc

SEQ ID NO: 1106660 - DNA, 25 bp, Homo sapien
tatggttccatgctgaatagaaact

SEQ ID NO: 1106661 - DNA, 25 bp, Homo sapien
tacagttcggtcaacatgacaaatt

SEQ ID NO: 1106662 - DNA, 25 bp, Homo sapien
aaggcataccgaagtctgggtaatt

SEQ ID NO: 1106663 - DNA, 25 bp, Homo sapien
tacattggctagaatatatggttcc

SEQ ID NO: 1106664 - DNA, 25 bp, Homo sapien
aattcatcctccatggacttcttag

SEQ ID NO: 1106665 - DNA, 25 bp, Homo sapien
attcatcctccatggacttcttagt

SEQ ID NO: 1106666 - DNA, 25 bp, Homo sapien
ttttggcatttcttctatcatctgt

SEQ ID NO: 1106667 - DNA, 25 bp, Homo sapien
acttttggcatttcttctatcatct

SEQ ID NO: 1106668 - DNA, 25 bp, Homo sapien
catctgtttgtacagtttcttgagt

SEQ ID NO: 1106669 - DNA, 25 bp, Homo sapien
tgtttgtacagtttcttgagtcttg

SEQ ID NO: 1106670 - DNA, 25 bp, Homo sapien
tgttaataaaatcatcaagcattcc

SEQ ID NO: 1106671 - DNA, 25 bp, Homo sapien
gttaataaaatcatcaagcattcct

SEQ ID NO: 1106672 - DNA, 25 bp, Homo sapien
gtgttaataaaatcatcaagcattc

SEQ ID NO: 1106673 - DNA, 25 bp, Homo sapien
taactttgctagcatagagggcatc

SEQ ID NO: 1106674 - DNA, 25 bp, Homo sapien
cacatgattatctgttagacatcca

SEQ ID NO: 1106675 - DNA, 25 bp, Homo sapien
tagacatccacaacgtgttcgaatg

SEQ ID NO: 1106676 - DNA, 25 bp, Homo sapien
gagggcatccttattagaatgttca

SEQ ID NO: 1106677 - DNA, 25 bp, Homo sapien
tttctttctctaggcctaagtctat

SEQ ID NO: 1106678 - DNA, 25 bp, Homo sapien
tttctctaggcctaagtctatgtat

SEQ ID NO: 1106679 - DNA, 25 bp, Homo sapien
aggcctaagtctatgtattgcgtac

SEQ ID NO: 1106680 - DNA, 25 bp, Homo sapien
tctaggcctaagtctatgtattgcg

SEQ ID NO: 1106681 - DNA, 25 bp, Homo sapien
tgaggtgaggctcatgatattgccc

SEQ ID NO: 1106682 - DNA, 25 bp, Homo sapien
gataatggcctcttctaacttgagt

SEQ ID NO: 1106683 - DNA, 25 bp, Homo sapien
gcaactgcaaatgtcgccctaaaat

SEQ ID NO: 1106684 - DNA, 25 bp, Homo sapien
ccctaaaataaccaacacatcagct

SEQ ID NO: 1106685 - DNA, 25 bp, Homo sapien
ttcctgaatttccacgatgccagtc

SEQ ID NO: 1106686 - DNA, 25 bp, Homo sapien
gagccagggaccaagtcttcagaac

SEQ ID NO: 1106687 - DNA, 25 bp, Homo sapien
gaaagtgaacgctcctttgaaagaa

SEQ ID NO: 1106688 - DNA, 25 bp, Homo sapien
ttgaaagaaatacaagctgtgcact

SEQ ID NO: 1106689 - DNA, 25 bp, Homo sapien
ggctcagcagttctcgctctggttc

SEQ ID NO: 1106690 - DNA, 25 bp, Homo sapien
gaatgactggctcagcagttctcgc

SEQ ID NO: 1106691 - DNA, 25 bp, Homo sapien
tcaagggaatgactggctcagcagt

SEQ ID NO: 1106692 - DNA, 25 bp, Homo sapien
tgcatatggttatcctgaagcttct

SEQ ID NO: 1106693 - DNA, 25 bp, Homo sapien
agagccatccatggagaaagaggaa

SEQ ID NO: 1106694 - DNA, 25 bp, Homo sapien
gcatggtacaatccttctctggctt

SEQ ID NO: 1106695 - DNA, 25 bp, Homo sapien
gagccatccatggagaaagaggaaa

SEQ ID NO: 1106696 - DNA, 25 bp, Homo sapien
acagaagcatggtacaatccttctc

SEQ ID NO: 1106697 - DNA, 25 bp, Homo sapien
ttaatactcctttcaccaacaaagc

SEQ ID NO: 1106698 - DNA, 25 bp, Homo sapien
gagatcagagagattggtaaaataa

SEQ ID NO: 1106699 - DNA, 25 bp, Homo sapien
ctttcaccaacaaagctagagccat

SEQ ID NO: 1106700 - DNA, 25 bp, Homo sapien
gatcagagagattggtaaaataatt

SEQ ID NO: 1106701 - DNA, 25 bp, Homo sapien
aaatattgacacattggcaaagcga

SEQ ID NO: 1106702 - DNA, 25 bp, Homo sapien
gaataagtctctcaaaaggctggca

SEQ ID NO: 1106703 - DNA, 25 bp, Homo sapien
ggtaatatgatatagagatgagctc

SEQ ID NO: 1106704 - DNA, 25 bp, Homo sapien
tgctgcttttggcatggtaatatga

SEQ ID NO: 1106705 - DNA, 25 bp, Homo sapien
aacagtgcttatttatctgcggata

SEQ ID NO: 1106706 - DNA, 25 bp, Homo sapien
catgttgagtgccattttttcctac

SEQ ID NO: 1106707 - DNA, 25 bp, Homo sapien
taactggctggtaaacaacatgttg

SEQ ID NO: 1106708 - DNA, 25 bp, Homo sapien
ttttactccatctcaacttgaagca

SEQ ID NO: 1106709 - DNA, 25 bp, Homo sapien
ggtcttttcatcaggttccaggata

SEQ ID NO: 1106710 - DNA, 25 bp, Homo sapien
gattcaggctttccaatagagctgg

SEQ ID NO: 1106711 - DNA, 25 bp, Homo sapien
gctgctaaggcttggcccagagaca

SEQ ID NO: 1106712 - DNA, 25 bp, Homo sapien
tgctttcactcagagctttgacctc

SEQ ID NO: 1106713 - DNA, 25 bp, Homo sapien
ctgtttctgacctagcagcagcaag

SEQ ID NO: 1106714 - DNA, 25 bp, Homo sapien
ctgacctagcagcagcaagtagtgt

SEQ ID NO: 1106715 - DNA, 25 bp, Homo sapien
gacctagcagcagcaagtagtgttt

SEQ ID NO: 1106716 - DNA, 25 bp, Homo sapien
agttttctgtttctgacctagcagc

SEQ ID NO: 1106717 - DNA, 25 bp, Homo sapien
tatcaagaattagctatacaaagat

SEQ ID NO: 1106718 - DNA, 25 bp, Homo sapien
tactttaccattgagtaagccagga

SEQ ID NO: 1106719 - DNA, 25 bp, Homo sapien
tgtaaatagtcacaaaggctaagtt

SEQ ID NO: 1106720 - DNA, 25 bp, Homo sapien
tgtttatacaacattgggtgacata

SEQ ID NO: 1106721 - DNA, 25 bp, Homo sapien
ccgctaatttgtgtctgtttggcca

SEQ ID NO: 1106722 - DNA, 25 bp, Homo sapien
taggcagaataaccacattgatgac

SEQ ID NO: 1106723 - DNA, 25 bp, Homo sapien
tgatgacattcttacctagcatgga

SEQ ID NO: 1106724 - DNA, 25 bp, Homo sapien
tacatttagaattggagcataggca

SEQ ID NO: 1106725 - DNA, 25 bp, Homo sapien
tctgatgcagtattggcttcctgac

SEQ ID NO: 1106726 - DNA, 25 bp, Homo sapien
ggtccttcaattgctgtaactgtcc

SEQ ID NO: 1106727 - DNA, 25 bp, Homo sapien
ttcaggtccttcaattgctgtaact

SEQ ID NO: 1106728 - DNA, 25 bp, Homo sapien
tcataacagctgaagggtagtaatg

SEQ ID NO: 1106729 - DNA, 25 bp, Homo sapien
gcgtagcaaattgtcaaagggcttt

SEQ ID NO: 1106730 - DNA, 25 bp, Homo sapien
cccagtacatacaagaggcgtagca

SEQ ID NO: 1106731 - DNA, 25 bp, Homo sapien
tgtgacatctcctactagcaaactt

SEQ ID NO: 1106732 - DNA, 25 bp, Homo sapien
gaattctgtgacatctcctactagc

SEQ ID NO: 1106733 - DNA, 25 bp, Homo sapien
tcagttatgatggtataggattgag

SEQ ID NO: 1106734 - DNA, 25 bp, Homo sapien
agctgtcagttatgatggtatagga

SEQ ID NO: 1106735 - DNA, 25 bp, Homo sapien
ctctaccactgttgtggagctgtca

SEQ ID NO: 1106736 - DNA, 25 bp, Homo sapien
gcatctgagtcctccttggaatgaa

SEQ ID NO: 1106737 - DNA, 25 bp, Homo sapien
tcaacatgacattgctgagagttta

SEQ ID NO: 1106738 - DNA, 25 bp, Homo sapien
ttcgggatccttgtgtttcccatac

SEQ ID NO: 1106739 - DNA, 25 bp, Homo sapien
ctggcaggtaattcgggatccttgt

SEQ ID NO: 1106740 - DNA, 25 bp, Homo sapien
gacattgctgagagtttaacgtttc

SEQ ID NO: 1106741 - DNA, 25 bp, Homo sapien
agctctccatcagaacgccaatcat

SEQ ID NO: 1106742 - DNA, 25 bp, Homo sapien
agaaagaaggccatccgacagctct

SEQ ID NO: 1106743 - DNA, 25 bp, Homo sapien
cagaacgccaatcataaattagtac

SEQ ID NO: 1106744 - DNA, 25 bp, Homo sapien
caataaatcaatgtagaagaggagg

SEQ ID NO: 1106745 - DNA, 25 bp, Homo sapien
ctctcaatttgaggtgaatgccagc

SEQ ID NO: 1106746 - DNA, 25 bp, Homo sapien
gctctccagagtggtacattgtgat

SEQ ID NO: 1106747 - DNA, 25 bp, Homo sapien
catctctgcatttaaacttattggg

SEQ ID NO: 1106748 - DNA, 25 bp, Homo sapien
tcttttcagtagcaggattgatgca

SEQ ID NO: 1106749 - DNA, 25 bp, Homo sapien
tatcttcatcccagtcctccagccc

SEQ ID NO: 1106750 - DNA, 25 bp, Homo sapien
tgttccttaatatcttcatcccagt

SEQ ID NO: 1106751 - DNA, 25 bp, Homo sapien
ttaatatcttcatcccagtcctcca

SEQ ID NO: 1106752 - DNA, 25 bp, Homo sapien
cattctgttctgttccttaatatct

SEQ ID NO: 1106753 - DNA, 25 bp, Homo sapien
cccactgttcttcgatttgataagg

SEQ ID NO: 1106754 - DNA, 25 bp, Homo sapien
caaaatcgtcccactgttcttcgat

SEQ ID NO: 1106755 - DNA, 25 bp, Homo sapien
cgatttgataaggtagatgagacat

SEQ ID NO: 1106756 - DNA, 25 bp, Homo sapien
tacaaccaaaatcgtcccactgttc

SEQ ID NO: 1106757 - DNA, 25 bp, Homo sapien
cttgccttcatttttaaagaagagt

SEQ ID NO: 1106758 - DNA, 25 bp, Homo sapien
tctctcctcaacagttcgaaatgag

SEQ ID NO: 1106759 - DNA, 25 bp, Homo sapien
ccaagtggagttagttgatattact

SEQ ID NO: 1106760 - DNA, 25 bp, Homo sapien
gtcaattttttaccatcttagatag

SEQ ID NO: 1106761 - DNA, 25 bp, Homo sapien
tcctcgtttccatgcggtccaagtg

SEQ ID NO: 1106762 - DNA, 25 bp, Homo sapien
aggcaaaacccatggagtggttcat

SEQ ID NO: 1106763 - DNA, 25 bp, Homo sapien
aaggcaaaacccatggagtggttca

SEQ ID NO: 1106764 - DNA, 25 bp, Homo sapien
acaaggcaaaacccatggagtggtt

SEQ ID NO: 1106765 - DNA, 25 bp, Homo sapien
caaggcaaaacccatggagtggttc

SEQ ID NO: 1106766 - DNA, 25 bp, Homo sapien
ttgttcttcagcactaccatgattt

SEQ ID NO: 1106767 - DNA, 25 bp, Homo sapien
ctttgttcttcagcactaccatgat

SEQ ID NO: 1106768 - DNA, 25 bp, Homo sapien
tctttgttcttcagcactaccatga

SEQ ID NO: 1106769 - DNA, 25 bp, Homo sapien
cttctttgttcttcagcactaccat

SEQ ID NO: 1106770 - DNA, 25 bp, Homo sapien
ttttccatcctgtgttaaatctcag

SEQ ID NO: 1106771 - DNA, 25 bp, Homo sapien
tttccatcctgtgttaaatctcagg

SEQ ID NO: 1106772 - DNA, 25 bp, Homo sapien
cttttccatcctgtgttaaatctca

SEQ ID NO: 1106773 - DNA, 25 bp, Homo sapien
ttccatcctgtgttaaatctcagga

SEQ ID NO: 1106774 - DNA, 25 bp, Homo sapien
tttccatagtttcacataaaatgag

SEQ ID NO: 1106775 - DNA, 25 bp, Homo sapien
gcctctgctctctagaggtcacagt

SEQ ID NO: 1106776 - DNA, 25 bp, Homo sapien
gagagattgtcctactttccatagt

SEQ ID NO: 1106777 - DNA, 25 bp, Homo sapien
tgagacactatatatgtatgaagca

SEQ ID NO: 1106778 - DNA, 25 bp, Homo sapien
accatttctgccatttagttgtcat

SEQ ID NO: 1106779 - DNA, 25 bp, Homo sapien
actttgcatctgctaggcctgagct

SEQ ID NO: 1106780 - DNA, 25 bp, Homo sapien
gaccagggaatatgtactcaggagg

SEQ ID NO: 1106781 - DNA, 25 bp, Homo sapien
tgtccagtattcttgaaccttcatt

SEQ ID NO: 1106782 - DNA, 25 bp, Homo sapien
tatagctctgttccacctgacttag

SEQ ID NO: 1106783 - DNA, 25 bp, Homo sapien
tgattgtgagtaccttagatgatga

SEQ ID NO: 1106784 - DNA, 25 bp, Homo sapien
taatccaggatctatgtgggaaaaa

SEQ ID NO: 1106785 - DNA, 25 bp, Homo sapien
gtgactactgtatgcacctccaaag

SEQ ID NO: 1106786 - DNA, 25 bp, Homo sapien
gttcctacatggtttgaccttcctg

SEQ ID NO: 1106787 - DNA, 25 bp, Homo sapien
tccaaagatgactcgagaaacaagg

SEQ ID NO: 1106788 - DNA, 25 bp, Homo sapien
gattgcagctgggatgacggttcct

SEQ ID NO: 1106789 - DNA, 25 bp, Homo sapien
ggcaaatctcaagcaagtccaaaga

SEQ ID NO: 1106790 - DNA, 25 bp, Homo sapien
gacacatcccaaaatctacttgtat

SEQ ID NO: 1106791 - DNA, 25 bp, Homo sapien
tccacacttgcatttgcagacacat

SEQ ID NO: 1106792 - DNA, 25 bp, Homo sapien
tgcatttgcagacacatcccaaaat

SEQ ID NO: 1106793 - DNA, 25 bp, Homo sapien
tctatgtattccacacttgcatttg

SEQ ID NO: 1106794 - DNA, 25 bp, Homo sapien
tgtgatcctgtcttgccacttgatg

SEQ ID NO: 1106795 - DNA, 25 bp, Homo sapien
tgtggccacagagacctagtcttga

SEQ ID NO: 1106796 - DNA, 25 bp, Homo sapien
gcttgtttcaatgttggtgacctga

SEQ ID NO: 1106797 - DNA, 25 bp, Homo sapien
tactccaggactctactgtatgtga

SEQ ID NO: 1106798 - DNA, 25 bp, Homo sapien
tacatttagtggtgaaagtccaccc

SEQ ID NO: 1106799 - DNA, 25 bp, Homo sapien
cataattggtcattaaatactccct

SEQ ID NO: 1106800 - DNA, 25 bp, Homo sapien
ctttatcctcctcacataattggtc

SEQ ID NO: 1106801 - DNA, 25 bp, Homo sapien
actacatttagtggtgaaagtccac

SEQ ID NO: 1106802 - DNA, 25 bp, Homo sapien
gagatatattccaaggacctaaagc

SEQ ID NO: 1106803 - DNA, 25 bp, Homo sapien
aacttgactaggctgtagtatccag

SEQ ID NO: 1106804 - DNA, 25 bp, Homo sapien
taaataatctgagtacgcctcaccc

SEQ ID NO: 1106805 - DNA, 25 bp, Homo sapien
gctaatgcagtaattgggatgacca

SEQ ID NO: 1106806 - DNA, 25 bp, Homo sapien
aatcttttgcagaagacttgacaag

SEQ ID NO: 1106807 - DNA, 25 bp, Homo sapien
gatattaactctgttgggaatcttt

SEQ ID NO: 1106808 - DNA, 25 bp, Homo sapien
tttgagatattaactctgttgggaa

SEQ ID NO: 1106809 - DNA, 25 bp, Homo sapien
cttgacaagtgagctgctgccagct

SEQ ID NO: 1106810 - DNA, 25 bp, Homo sapien
ctggctgatcttacttgtataccgg

SEQ ID NO: 1106811 - DNA, 25 bp, Homo sapien
cttacttgtataccggcacaagatg

SEQ ID NO: 1106812 - DNA, 25 bp, Homo sapien
gatcttacttgtataccggcacaag

SEQ ID NO: 1106813 - DNA, 25 bp, Homo sapien
tgtataccggcacaagatgagatga

SEQ ID NO: 1106814 - DNA, 25 bp, Homo sapien
aaactggtctccagtttatccaaat

SEQ ID NO: 1106815 - DNA, 25 bp, Homo sapien
agagatattccttagagatttcagc

SEQ ID NO: 1106816 - DNA, 25 bp, Homo sapien
gaacagagaagagacttgggccgtc

SEQ ID NO: 1106817 - DNA, 25 bp, Homo sapien
caaatcattacttgaaaacaggaac

SEQ ID NO: 1106818 - DNA, 25 bp, Homo sapien
gcaataccagactcttcttcctggc

SEQ ID NO: 1106819 - DNA, 25 bp, Homo sapien
cagactcttcttcctggcaccttgt

SEQ ID NO: 1106820 - DNA, 25 bp, Homo sapien
agcaataccagactcttcttcctgg

SEQ ID NO: 1106821 - DNA, 25 bp, Homo sapien
actcttcttcctggcaccttgtcat

SEQ ID NO: 1106822 - DNA, 25 bp, Homo sapien
tgtgggcataagagcagtagagcaa

SEQ ID NO: 1106823 - DNA, 25 bp, Homo sapien
ggtgtcctttcatccatacaagcat

SEQ ID NO: 1106824 - DNA, 25 bp, Homo sapien
cagtagagcaaggagcatctggtgt

SEQ ID NO: 1106825 - DNA, 25 bp, Homo sapien
tttaaggttgatgaagaattgggtg

SEQ ID NO: 1106826 - DNA, 25 bp, Homo sapien
tgtagatctgtttctttatagcatc

SEQ ID NO: 1106827 - DNA, 25 bp, Homo sapien
attgcatcccgcttgcttccaatgt

SEQ ID NO: 1106828 - DNA, 25 bp, Homo sapien
tgtggcttccttgtagatctgtttc

SEQ ID NO: 1106829 - DNA, 25 bp, Homo sapien
gcctggatctcagctgcattgcatc

SEQ ID NO: 1106830 - DNA, 25 bp, Homo sapien
cctaaaggtggcaggtaccctgcca

SEQ ID NO: 1106831 - DNA, 25 bp, Homo sapien
taaaggtggcaggtaccctgccata

SEQ ID NO: 1106832 - DNA, 25 bp, Homo sapien
aaaggtggcaggtaccctgccataa

SEQ ID NO: 1106833 - DNA, 25 bp, Homo sapien
aggtggcaggtaccctgccataagc

SEQ ID NO: 1106834 - DNA, 25 bp, Homo sapien
ccagcaatatcgatgaactctccag

SEQ ID NO: 1106835 - DNA, 25 bp, Homo sapien
agcaatatcgatgaactctccaggg

SEQ ID NO: 1106836 - DNA, 25 bp, Homo sapien
aatatcgatgaactctccagggcca

SEQ ID NO: 1106837 - DNA, 25 bp, Homo sapien
ctgcccagcaatatcgatgaactct

SEQ ID NO: 1106838 - DNA, 25 bp, Homo sapien
ccttcttttgtccgggcaaatgtct

SEQ ID NO: 1106839 - DNA, 25 bp, Homo sapien
tttgtccgggcaaatgtctgcacca

SEQ ID NO: 1106840 - DNA, 25 bp, Homo sapien
attaatcacataatagatcccttct

SEQ ID NO: 1106841 - DNA, 25 bp, Homo sapien
taatcacataatagatcccttcttt

SEQ ID NO: 1106842 - DNA, 25 bp, Homo sapien
ccagtaggattcataggatcagcca

SEQ ID NO: 1106843 - DNA, 25 bp, Homo sapien
tttcattggtctcaacagcctccta

SEQ ID NO: 1106844 - DNA, 25 bp, Homo sapien
taaaatagatcttgacccatgatgg

SEQ ID NO: 1106845 - DNA, 25 bp, Homo sapien
tgagaggccgtcaagatggtttctt

SEQ ID NO: 1106846 - DNA, 25 bp, Homo sapien
agaagaaagtttcacaaggtcatca

SEQ ID NO: 1106847 - DNA, 25 bp, Homo sapien
aattttgcggtttatgtagacattc

SEQ ID NO: 1106848 - DNA, 25 bp, Homo sapien
tattgacaataatacagaggcctgc

SEQ ID NO: 1106849 - DNA, 25 bp, Homo sapien
cagaggcctgctatgctatttatct

SEQ ID NO: 1106850 - DNA, 25 bp, Homo sapien
gtagacattcagtgttattgacaat

SEQ ID NO: 1106851 - DNA, 25 bp, Homo sapien
accggactcactcttgtaggagcag

SEQ ID NO: 1106852 - DNA, 25 bp, Homo sapien
tggtgatgcttcccataccacagga

SEQ ID NO: 1106853 - DNA, 25 bp, Homo sapien
taccacaggacctgccatagcctct

SEQ ID NO: 1106854 - DNA, 25 bp, Homo sapien
ccggactcactcttgtaggagcagc

SEQ ID NO: 1106855 - DNA, 25 bp, Homo sapien
tccaactgctgccgaaggttgatgt

SEQ ID NO: 1106856 - DNA, 25 bp, Homo sapien
gttgctccgaggcatcttctgtgct

SEQ ID NO: 1106857 - DNA, 25 bp, Homo sapien
ctccaactgctgccgaaggttgatg

SEQ ID NO: 1106858 - DNA, 25 bp, Homo sapien
tctccaactgctgccgaaggttgat

SEQ ID NO: 1106859 - DNA, 25 bp, Homo sapien
ctatctccactttgttcgtgtaagc

SEQ ID NO: 1106860 - DNA, 25 bp, Homo sapien
agccgttccaggtgagactctatct

SEQ ID NO: 1106861 - DNA, 25 bp, Homo sapien
tctccactttgttcgtgtaagcttc

SEQ ID NO: 1106862 - DNA, 25 bp, Homo sapien
tcagccgttccaggtgagactctat

SEQ ID NO: 1106863 - DNA, 25 bp, Homo sapien
aagctcctcgtactgccccttgact

SEQ ID NO: 1106864 - DNA, 25 bp, Homo sapien
gctcctcgtactgccccttgacttc

SEQ ID NO: 1106865 - DNA, 25 bp, Homo sapien
agctcctcgtactgccccttgactt

SEQ ID NO: 1106866 - DNA, 25 bp, Homo sapien
tgccagcatctgcagatcctcatac

SEQ ID NO: 1106867 - DNA, 25 bp, Homo sapien
ctgccagcatctgcagatcctcata

SEQ ID NO: 1106868 - DNA, 25 bp, Homo sapien
tggcattgttaagggccagctcccc

SEQ ID NO: 1106869 - DNA, 25 bp, Homo sapien
cccatgctgctcgaaatctgccgtg

SEQ ID NO: 1106870 - DNA, 25 bp, Homo sapien
cttggtgttggcattgttaagggcc

SEQ ID NO: 1106871 - DNA, 25 bp, Homo sapien
tgctcgaaatctgccgtggcagcct

SEQ ID NO: 1106872 - DNA, 25 bp, Homo sapien
gatgaagcccgcccaagagtcaaag

SEQ ID NO: 1106873 - DNA, 25 bp, Homo sapien
tgaagcccgcccaagagtcaaagct

SEQ ID NO: 1106874 - DNA, 25 bp, Homo sapien
agatgaagcccgcccaagagtcaaa

SEQ ID NO: 1106875 - DNA, 25 bp, Homo sapien
atgaagcccgcccaagagtcaaagc

SEQ ID NO: 1106876 - DNA, 25 bp, Homo sapien
gacgccctgctgtctatgtgttgga

SEQ ID NO: 1106877 - DNA, 25 bp, Homo sapien
tgtctatgtgttggaccagattccc

SEQ ID NO: 1106878 - DNA, 25 bp, Homo sapien
aggctactgtccagggacgccctgc

SEQ ID NO: 1106879 - DNA, 25 bp, Homo sapien
ttttgactgaggaaccttgtgctgc

SEQ ID NO: 1106880 - DNA, 25 bp, Homo sapien
agtcaatattgcctgttagggttgt

SEQ ID NO: 1106881 - DNA, 25 bp, Homo sapien
cgagcctttataggcaccatcctca

SEQ ID NO: 1106882 - DNA, 25 bp, Homo sapien
tggcattgggctacactagccgagc

SEQ ID NO: 1106883 - DNA, 25 bp, Homo sapien
ttagggttgtttggcattgggctac

SEQ ID NO: 1106884 - DNA, 25 bp, Homo sapien
gagttagaatatgagcaaatttgcc

SEQ ID NO: 1106885 - DNA, 25 bp, Homo sapien
ctttgcctctgacaaagagttagaa

SEQ ID NO: 1106886 - DNA, 25 bp, Homo sapien
aagagttagaatatgagcaaatttg

SEQ ID NO: 1106887 - DNA, 25 bp, Homo sapien
gttagaatatgagcaaatttgccca

SEQ ID NO: 1106888 - DNA, 25 bp, Homo sapien
tatggtagggataattgcaatgcac

SEQ ID NO: 1106889 - DNA, 25 bp, Homo sapien
cccaggccaccaggaattactatgg

SEQ ID NO: 1106890 - DNA, 25 bp, Homo sapien
tgttgggggatctgaagtactccca

SEQ ID NO: 1106891 - DNA, 25 bp, Homo sapien
gtgtttggacaccagctttgttggg

SEQ ID NO: 1106892 - DNA, 25 bp, Homo sapien
tggattttagattttgtcgtattaa

SEQ ID NO: 1106893 - DNA, 25 bp, Homo sapien
tattaatttgactagtacttaagac

SEQ ID NO: 1106894 - DNA, 25 bp, Homo sapien
tagattttgtcgtattaatttgact

SEQ ID NO: 1106895 - DNA, 25 bp, Homo sapien
gtcgtattaatttgactagtactta

SEQ ID NO: 1106896 - DNA, 25 bp, Homo sapien
ctctctgtgatatgcagtgtccttt

SEQ ID NO: 1106897 - DNA, 25 bp, Homo sapien
ctgtgatatgcagtgtccttttctc

SEQ ID NO: 1106898 - DNA, 25 bp, Homo sapien
tgagtgtaacatctatgcatctctc

SEQ ID NO: 1106899 - DNA, 25 bp, Homo sapien
ttctgagtgtaacatctatgcatct

SEQ ID NO: 1106900 - DNA, 25 bp, Homo sapien
tactgcgtgcgattcaggttcagaa

SEQ ID NO: 1106901 - DNA, 25 bp, Homo sapien
taaatgttggcttcaggagaacacc

SEQ ID NO: 1106902 - DNA, 25 bp, Homo sapien
ggctttatgttcactacacttttgc

SEQ ID NO: 1106903 - DNA, 25 bp, Homo sapien
gaaacttggtacagaggacatccac

SEQ ID NO: 1106904 - DNA, 25 bp, Homo sapien
cagaaatggctctttggacaaaatc

SEQ ID NO: 1106905 - DNA, 25 bp, Homo sapien
caatgtttaggctagatctccagaa

SEQ ID NO: 1106906 - DNA, 25 bp, Homo sapien
gttatgataacagtaaagttgcaga

SEQ ID NO: 1106907 - DNA, 25 bp, Homo sapien
ttactgacctggtgaacttctaccc

SEQ ID NO: 1106908 - DNA, 25 bp, Homo sapien
ggctaactcttcctaacatccctca

SEQ ID NO: 1106909 - DNA, 25 bp, Homo sapien
tgaggcccagtttgcgtcatcctgg

SEQ ID NO: 1106910 - DNA, 25 bp, Homo sapien
catcctggtttcagcgcagcagtgg

SEQ ID NO: 1106911 - DNA, 25 bp, Homo sapien
cctcagcctgcaggattctgcatct

SEQ ID NO: 1106912 - DNA, 25 bp, Homo sapien
tgtggagagagtgtgactgtcatac

SEQ ID NO: 1106913 - DNA, 25 bp, Homo sapien
tttggaagatagtccagaagttcca

SEQ ID NO: 1106914 - DNA, 25 bp, Homo sapien
catacgtggctggtgaaaatgtaca

SEQ ID NO: 1106915 - DNA, 25 bp, Homo sapien
tacacactaggctgtcttttatttg

SEQ ID NO: 1106916 - DNA, 25 bp, Homo sapien
tgtcatttgccacacagctgcagtc

SEQ ID NO: 1106917 - DNA, 25 bp, Homo sapien
tcatttgccacacagctgcagtctc

SEQ ID NO: 1106918 - DNA, 25 bp, Homo sapien
cccaacagcaaaatccggtgccact

SEQ ID NO: 1106919 - DNA, 25 bp, Homo sapien
aaaatccggtgccacttcagtagga

SEQ ID NO: 1106920 - DNA, 25 bp, Homo sapien
ttggtgacaggttcccaactcagcc

SEQ ID NO: 1106921 - DNA, 25 bp, Homo sapien
ccttggacagcccaactctcagagg

SEQ ID NO: 1106922 - DNA, 25 bp, Homo sapien
ttcagcacatgcatataaccacagc

SEQ ID NO: 1106923 - DNA, 25 bp, Homo sapien
ttgtgatagccacccgcaccactgt

SEQ ID NO: 1106924 - DNA, 25 bp, Homo sapien
caccagtccaggagggtacaaggag

SEQ ID NO: 1106925 - DNA, 25 bp, Homo sapien
gaggcctccttcagttgcttgtacc

SEQ ID NO: 1106926 - DNA, 25 bp, Homo sapien
tctcaccaggttacaagcaatgctt

SEQ ID NO: 1106927 - DNA, 25 bp, Homo sapien
taagtgtccaacgttgtctctccag

SEQ ID NO: 1106928 - DNA, 25 bp, Homo sapien
gagatcactcgtactttctagaggc

SEQ ID NO: 1106929 - DNA, 25 bp, Homo sapien
agtgataaatactcaaatggctagg

SEQ ID NO: 1106930 - DNA, 25 bp, Homo sapien
cctagaagattaccatgtagaaaat

SEQ ID NO: 1106931 - DNA, 25 bp, Homo sapien
tcatgttagggcaaaagatgtttct

SEQ ID NO: 1106932 - DNA, 25 bp, Homo sapien
tctgtaaatgctgagaagtttgtca

SEQ ID NO: 1106933 - DNA, 25 bp, Homo sapien
gatttgctccatattctctgtatcc

SEQ ID NO: 1106934 - DNA, 25 bp, Homo sapien
taacaggtgcagagtctgaggtgac

SEQ ID NO: 1106935 - DNA, 25 bp, Homo sapien
tgtatccagtcagtataagtcctta

SEQ ID NO: 1106936 - DNA, 25 bp, Homo sapien
catgtcggctctttacagggcttta

SEQ ID NO: 1106937 - DNA, 25 bp, Homo sapien
actcattgatctgagccttcactga

SEQ ID NO: 1106938 - DNA, 25 bp, Homo sapien
tcattgatctgagccttcactgaac

SEQ ID NO: 1106939 - DNA, 25 bp, Homo sapien
ttgatctgagccttcactgaacatc

SEQ ID NO: 1106940 - DNA, 25 bp, Homo sapien
attgatctgagccttcactgaacat

SEQ ID NO: 1106941 - DNA, 25 bp, Homo sapien
ccagaatcatctacagatctagtaa

SEQ ID NO: 1106942 - DNA, 25 bp, Homo sapien
tcttctgatctagtatggtaagaat

SEQ ID NO: 1106943 - DNA, 25 bp, Homo sapien
catcatttgctgtcttatttgacca

SEQ ID NO: 1106944 - DNA, 25 bp, Homo sapien
caaatgaccaagtaattctattgaa

SEQ ID NO: 1106945 - DNA, 25 bp, Homo sapien
tttcatgcgataaaatatctagcag

SEQ ID NO: 1106946 - DNA, 25 bp, Homo sapien
actaaggcttatttatttcatgcga

SEQ ID NO: 1106947 - DNA, 25 bp, Homo sapien
atccttagaataaagtgttgattac

SEQ ID NO: 1106948 - DNA, 25 bp, Homo sapien
tcaaggtgtcagtttatattctaag

SEQ ID NO: 1106949 - DNA, 25 bp, Homo sapien
agcactcaaagtaggccctagagaa

SEQ ID NO: 1106950 - DNA, 25 bp, Homo sapien
actcaaagtaggccctagagaatgg

SEQ ID NO: 1106951 - DNA, 25 bp, Homo sapien
caaagtaggccctagagaatgggag

SEQ ID NO: 1106952 - DNA, 25 bp, Homo sapien
tcaaagtaggccctagagaatggga

SEQ ID NO: 1106953 - DNA, 25 bp, Homo sapien
gactgaacttgtttaaactgcacag

SEQ ID NO: 1106954 - DNA, 25 bp, Homo sapien
cactgtgagttcaagcagactagag

SEQ ID NO: 1106955 - DNA, 25 bp, Homo sapien
taaagtaacattccccagcctaagc

SEQ ID NO: 1106956 - DNA, 25 bp, Homo sapien
taatgttttcttaccatagaggcag

SEQ ID NO: 1106957 - DNA, 25 bp, Homo sapien
caatctcaaaagagatgttttctct

SEQ ID NO: 1106958 - DNA, 25 bp, Homo sapien
ttttctcttctgatatacatgaaca

SEQ ID NO: 1106959 - DNA, 25 bp, Homo sapien
cagaacaatctcaaaagagatgttt

SEQ ID NO: 1106960 - DNA, 25 bp, Homo sapien
tttctcttctgatatacatgaacat

SEQ ID NO: 1106961 - DNA, 25 bp, Homo sapien
ttattatagtgccatatttgaagta

SEQ ID NO: 1106962 - DNA, 25 bp, Homo sapien
ttatagtgccatatttgaagtactc

SEQ ID NO: 1106963 - DNA, 25 bp, Homo sapien
tatagtgccatatttgaagtactcc

SEQ ID NO: 1106964 - DNA, 25 bp, Homo sapien
tagtgccatatttgaagtactccat

SEQ ID NO: 1106965 - DNA, 25 bp, Homo sapien
tgaaggccatgttgattactacagc

SEQ ID NO: 1106966 - DNA, 25 bp, Homo sapien
tctgatggacctggggcgaataacc

SEQ ID NO: 1106967 - DNA, 25 bp, Homo sapien
gagcatgccttgagtgtgaatctga

SEQ ID NO: 1106968 - DNA, 25 bp, Homo sapien
gatttcccaacacttgagcatgcct

SEQ ID NO: 1106969 - DNA, 25 bp, Homo sapien
gattccagaccaagtctttatccat

SEQ ID NO: 1106970 - DNA, 25 bp, Homo sapien
tgtgaggcgaatgtaggagcagatt

SEQ ID NO: 1106971 - DNA, 25 bp, Homo sapien
ctgtgaggcgaatgtaggagcagat

SEQ ID NO: 1106972 - DNA, 25 bp, Homo sapien
agattccagaccaagtctttatcca

SEQ ID NO: 1106973 - DNA, 25 bp, Homo sapien
ttttgatcagttcataccctggatc

SEQ ID NO: 1106974 - DNA, 25 bp, Homo sapien
tctccaggcttattgactataagca

SEQ ID NO: 1106975 - DNA, 25 bp, Homo sapien
cagttcataccctggatctccaggc

SEQ ID NO: 1106976 - DNA, 25 bp, Homo sapien
tggatctccaggcttattgactata

SEQ ID NO: 1106977 - DNA, 25 bp, Homo sapien
ctaaagttcattggcgatgtcggga

SEQ ID NO: 1106978 - DNA, 25 bp, Homo sapien
aactccaccttgtacagccagactt

SEQ ID NO: 1106979 - DNA, 25 bp, Homo sapien
tcgggattaacataggagccagggt

SEQ ID NO: 1106980 - DNA, 25 bp, Homo sapien
tgtacagccagacttttactgtctc

SEQ ID NO: 1106981 - DNA, 25 bp, Homo sapien
ttatcctgagcaccaatgacaaact

SEQ ID NO: 1106982 - DNA, 25 bp, Homo sapien
tgtctttcagactcaatggcttcga

SEQ ID NO: 1106983 - DNA, 25 bp, Homo sapien
tcaggtcagaggcactagacatatc

SEQ ID NO: 1106984 - DNA, 25 bp, Homo sapien
tcgagaactctatgtgacacagtat

SEQ ID NO: 1106985 - DNA, 25 bp, Homo sapien
tctgaaaagctattgcttactggat

SEQ ID NO: 1106986 - DNA, 25 bp, Homo sapien
tctgagaacagagccgtaaaggtgg

SEQ ID NO: 1106987 - DNA, 25 bp, Homo sapien
tggcagaatactctgtgggcagagg

SEQ ID NO: 1106988 - DNA, 25 bp, Homo sapien
tgtcctcctctcaatcgtaaactgg

SEQ ID NO: 1106989 - DNA, 25 bp, Homo sapien
gatgctaaatgcttgccagtctggg

SEQ ID NO: 1106990 - DNA, 25 bp, Homo sapien
catccagcgtgatgctaaatgcttg

SEQ ID NO: 1106991 - DNA, 25 bp, Homo sapien
tctgcatccagcgtgatgctaaatg

SEQ ID NO: 1106992 - DNA, 25 bp, Homo sapien
cagcgtgatgctaaatgcttgccag

SEQ ID NO: 1106993 - DNA, 25 bp, Homo sapien
ttccacaaagtagccatcccatctg

SEQ ID NO: 1106994 - DNA, 25 bp, Homo sapien
ttttccacaaagtagccatcccatc

SEQ ID NO: 1106995 - DNA, 25 bp, Homo sapien
acaaagtagccatcccatctggtga

SEQ ID NO: 1106996 - DNA, 25 bp, Homo sapien
ccacaaagtagccatcccatctggt

SEQ ID NO: 1106997 - DNA, 25 bp, Homo sapien
gtcccatcactgtagtcttctcttc

SEQ ID NO: 1106998 - DNA, 25 bp, Homo sapien
catcactgtagtcttctcttctctc

SEQ ID NO: 1106999 - DNA, 25 bp, Homo sapien
ctggtcccatcactgtagtcttctc

SEQ ID NO: 1107000 - DNA, 25 bp, Homo sapien
ccatcactgtagtcttctcttctct

SEQ ID NO: 1107001 - DNA, 25 bp, Homo sapien
taagaggcaacttctgaccacagat

SEQ ID NO: 1107002 - DNA, 25 bp, Homo sapien
caaggagggttgaagatttccctgg

SEQ ID NO: 1107003 - DNA, 25 bp, Homo sapien
tcaactttcatggtactggctggac

SEQ ID NO: 1107004 - DNA, 25 bp, Homo sapien
tttcttcagagttcaagcaagcttc

SEQ ID NO: 1107005 - DNA, 25 bp, Homo sapien
gagtggcccaccaatcaacttcttg

SEQ ID NO: 1107006 - DNA, 25 bp, Homo sapien
gaaccaggaagttacagatgtagga

SEQ ID NO: 1107007 - DNA, 25 bp, Homo sapien
ttgatggtcataaaatggagaagtg

SEQ ID NO: 1107008 - DNA, 25 bp, Homo sapien
gaattgaaagcaaaggcaggaatac

SEQ ID NO: 1107009 - DNA, 25 bp, Homo sapien
ggtgtaaagttgtaactccagatgg

SEQ ID NO: 1107010 - DNA, 25 bp, Homo sapien
tcaaataggctggaattacacatag

SEQ ID NO: 1107011 - DNA, 25 bp, Homo sapien
ctccagatggattcaagcgtagata

SEQ ID NO: 1107012 - DNA, 25 bp, Homo sapien
ttagaatgaatgaccctagaaaggg

SEQ ID NO: 1107013 - DNA, 25 bp, Homo sapien
tgtgaacaagaacgttggtagcccc

SEQ ID NO: 1107014 - DNA, 25 bp, Homo sapien
ggtgctaaccatagagagatgctca

SEQ ID NO: 1107015 - DNA, 25 bp, Homo sapien
aaagcacatgctacagattgggaga

SEQ ID NO: 1107016 - DNA, 25 bp, Homo sapien
tacccacgagaaagacattcagtta

SEQ ID NO: 1107017 - DNA, 25 bp, Homo sapien
ttggtctccaatggcgttctcccca

SEQ ID NO: 1107018 - DNA, 25 bp, Homo sapien
ggcgttctccccatggattgcacat

SEQ ID NO: 1107019 - DNA, 25 bp, Homo sapien
gagtgctcctttggtctccaatggc

SEQ ID NO: 1107020 - DNA, 25 bp, Homo sapien
tcctttggtctccaatggcgttctc

SEQ ID NO: 1107021 - DNA, 25 bp, Homo sapien
catgacttagccctatcttggcagt

SEQ ID NO: 1107022 - DNA, 25 bp, Homo sapien
gcagtcagcaaggtggcgggctgca

SEQ ID NO: 1107023 - DNA, 25 bp, Homo sapien
tgccagagggtgacatgacttagcc

SEQ ID NO: 1107024 - DNA, 25 bp, Homo sapien
tctgtgtacaagcacagcactgcca

SEQ ID NO: 1107025 - DNA, 25 bp, Homo sapien
gtggctgtactactggccaggtccc

SEQ ID NO: 1107026 - DNA, 25 bp, Homo sapien
gagtgtgaggcttggcggtcacccc

SEQ ID NO: 1107027 - DNA, 25 bp, Homo sapien
tggccaggtccctaaagcatcgcag

SEQ ID NO: 1107028 - DNA, 25 bp, Homo sapien
gcggtcacccccgatgtgggttgac

SEQ ID NO: 1107029 - DNA, 25 bp, Homo sapien
ttgatacttgactgaaactttgctg

SEQ ID NO: 1107030 - DNA, 25 bp, Homo sapien
gtcttcttgatacttgactgaaact

SEQ ID NO: 1107031 - DNA, 25 bp, Homo sapien
ttcttgatacttgactgaaactttg

SEQ ID NO: 1107032 - DNA, 25 bp, Homo sapien
tcttgatacttgactgaaactttgc

SEQ ID NO: 1107033 - DNA, 25 bp, Homo sapien
acaggctgtgcaagcaggggacact

SEQ ID NO: 1107034 - DNA, 25 bp, Homo sapien
caggctgtgcaagcaggggacactg

SEQ ID NO: 1107035 - DNA, 25 bp, Homo sapien
cacaggctgtgcaagcaggggacac

SEQ ID NO: 1107036 - DNA, 25 bp, Homo sapien
aggctgtgcaagcaggggacactga

SEQ ID NO: 1107037 - DNA, 25 bp, Homo sapien
gtgtgacagatgtcaaaggaagtga

SEQ ID NO: 1107038 - DNA, 25 bp, Homo sapien
aaagtgtgacagatgtcaaaggaag

SEQ ID NO: 1107039 - DNA, 25 bp, Homo sapien
tgtgacagatgtcaaaggaagtgac

SEQ ID NO: 1107040 - DNA, 25 bp, Homo sapien
aagtgtgacagatgtcaaaggaagt

SEQ ID NO: 1107041 - DNA, 25 bp, Homo sapien
tgaaatgatattgctgtcctgctgt

SEQ ID NO: 1107042 - DNA, 25 bp, Homo sapien
accctggagcttaaatactgtcctg

SEQ ID NO: 1107043 - DNA, 25 bp, Homo sapien
acgtttgtgacagttcttcggtcat

SEQ ID NO: 1107044 - DNA, 25 bp, Homo sapien
ttgtgacagttcttcggtcatttta

SEQ ID NO: 1107045 - DNA, 25 bp, Homo sapien
gacagttcttcggtcattttaaaga

SEQ ID NO: 1107046 - DNA, 25 bp, Homo sapien
ctacgtttgtgacagttcttcggtc

SEQ ID NO: 1107047 - DNA, 25 bp, Homo sapien
ctgtactgctaaccagagcctctca

SEQ ID NO: 1107048 - DNA, 25 bp, Homo sapien
tgtgctggggtaagaatgggggctc

SEQ ID NO: 1107049 - DNA, 25 bp, Homo sapien
ctctgtactgctaaccagagcctct

SEQ ID NO: 1107050 - DNA, 25 bp, Homo sapien
taagaatgggggctctgtactgcta

SEQ ID NO: 1107051 - DNA, 25 bp, Homo sapien
gcagggtagtgggaaaacagttata

SEQ ID NO: 1107052 - DNA, 25 bp, Homo sapien
cagggtagtgggaaaacagttatat

SEQ ID NO: 1107053 - DNA, 25 bp, Homo sapien
tgcagggtagtgggaaaacagttat

SEQ ID NO: 1107054 - DNA, 25 bp, Homo sapien
ctgcagggtagtgggaaaacagtta

SEQ ID NO: 1107055 - DNA, 25 bp, Homo sapien
tagagcttattaggtatcacagtgg

SEQ ID NO: 1107056 - DNA, 25 bp, Homo sapien
ctgtggaatgtgattccctgccccg

SEQ ID NO: 1107057 - DNA, 25 bp, Homo sapien
aatgtgattccctgccccgttgaag

SEQ ID NO: 1107058 - DNA, 25 bp, Homo sapien
cagtggcatataggtgctgtggaat

SEQ ID NO: 1107059 - DNA, 25 bp, Homo sapien
gactggtgagaaccatatggcctaa

SEQ ID NO: 1107060 - DNA, 25 bp, Homo sapien
agaagtacatctggctcttttggca

SEQ ID NO: 1107061 - DNA, 25 bp, Homo sapien
aaattcatcacaccacgatccagcg

SEQ ID NO: 1107062 - DNA, 25 bp, Homo sapien
gcatataccaccacattctagtttg

SEQ ID NO: 1107063 - DNA, 25 bp, Homo sapien
gtctctcgtcaatactggatgacaa

SEQ ID NO: 1107064 - DNA, 25 bp, Homo sapien
tgtctctcgtcaatactggatgaca

SEQ ID NO: 1107065 - DNA, 25 bp, Homo sapien
tctgtctctcgtcaatactggatga

SEQ ID NO: 1107066 - DNA, 25 bp, Homo sapien
gtctgtctctcgtcaatactggatg

SEQ ID NO: 1107067 - DNA, 25 bp, Homo sapien
ggaaaagtccgctttgccaaagtca

SEQ ID NO: 1107068 - DNA, 25 bp, Homo sapien
ctgggaaaagtccgctttgccaaag

SEQ ID NO: 1107069 - DNA, 25 bp, Homo sapien
gaaaagtccgctttgccaaagtcat

SEQ ID NO: 1107070 - DNA, 25 bp, Homo sapien
gttcatggctactgtcccactttga

SEQ ID NO: 1107071 - DNA, 25 bp, Homo sapien
cctgtctccctatgatccctccagt

SEQ ID NO: 1107072 - DNA, 25 bp, Homo sapien
tcacaggtattccaagagcgtaacc

SEQ ID NO: 1107073 - DNA, 25 bp, Homo sapien
gaaatctgtccagagtcatacctcc

SEQ ID NO: 1107074 - DNA, 25 bp, Homo sapien
gggacttagcttccccttgccgaga

SEQ ID NO: 1107075 - DNA, 25 bp, Homo sapien
ggcagcatgtgtgaatcccaagata

SEQ ID NO: 1107076 - DNA, 25 bp, Homo sapien
tctgatcagtgccagtccatttctg

SEQ ID NO: 1107077 - DNA, 25 bp, Homo sapien
aaactgcaccagtgtgggacttagc

SEQ ID NO: 1107078 - DNA, 25 bp, Homo sapien
ttctcttagcctttgcttctgatgt

SEQ ID NO: 1107079 - DNA, 25 bp, Homo sapien
gcctttgcttctgatgtaatttttc

SEQ ID NO: 1107080 - DNA, 25 bp, Homo sapien
tagcatctggatcaatattttttac

SEQ ID NO: 1107081 - DNA, 25 bp, Homo sapien
gcatctggatcaatattttttactc

SEQ ID NO: 1107082 - DNA, 25 bp, Homo sapien
ctacactgcgtgctgttcatacttc

SEQ ID NO: 1107083 - DNA, 25 bp, Homo sapien
tgcatatcagctctttacaaaggct

SEQ ID NO: 1107084 - DNA, 25 bp, Homo sapien
catatcagctctttacaaaggcttt

SEQ ID NO: 1107085 - DNA, 25 bp, Homo sapien
gcatatcagctctttacaaaggctt

SEQ ID NO: 1107086 - DNA, 25 bp, Homo sapien
ttgcatatcagctctttacaaaggc

SEQ ID NO: 1107087 - DNA, 25 bp, Homo sapien
ctccctctttacttgaaggtctcat

SEQ ID NO: 1107088 - DNA, 25 bp, Homo sapien
agagaggaagtaagaaagatctctc

SEQ ID NO: 1107089 - DNA, 25 bp, Homo sapien
ttaatccacggattccaaatctgag

SEQ ID NO: 1107090 - DNA, 25 bp, Homo sapien
tcttcatgataaacaggcactccca

SEQ ID NO: 1107091 - DNA, 25 bp, Homo sapien
tccaaatctgagtcttcatgataaa

SEQ ID NO: 1107092 - DNA, 25 bp, Homo sapien
gtcttcatgataaacaggcactccc

SEQ ID NO: 1107093 - DNA, 25 bp, Homo sapien
ctctgtgcattcatatgggtgatac

SEQ ID NO: 1107094 - DNA, 25 bp, Homo sapien
gtataacacggccaatctctgtgca

SEQ ID NO: 1107095 - DNA, 25 bp, Homo sapien
tttgcagagtatgaatccaggcgtc

SEQ ID NO: 1107096 - DNA, 25 bp, Homo sapien
ccaggaaagaatgcttgctgttgat

SEQ ID NO: 1107097 - DNA, 25 bp, Homo sapien
acactcattacggtccaacattgat

SEQ ID NO: 1107098 - DNA, 25 bp, Homo sapien
ggtccaacattgatctcatctgtgc

SEQ ID NO: 1107099 - DNA, 25 bp, Homo sapien
cagtgtttgctaccaatcactttca

SEQ ID NO: 1107100 - DNA, 25 bp, Homo sapien
ttacagtgtttgctaccaatcactt

SEQ ID NO: 1107101 - DNA, 25 bp, Homo sapien
ctctactaagcaatggtcattaggg

SEQ ID NO: 1107102 - DNA, 25 bp, Homo sapien
gggtgtcatagggagagttcatgtg

SEQ ID NO: 1107103 - DNA, 25 bp, Homo sapien
tgtcatagggagagttcatgtgtct

SEQ ID NO: 1107104 - DNA, 25 bp, Homo sapien
caatggtcattaggggtgtcatagg

SEQ ID NO: 1107105 - DNA, 25 bp, Homo sapien
ctctttcgacttgaaagtggctgtg

SEQ ID NO: 1107106 - DNA, 25 bp, Homo sapien
taagtgtagcctgagatatggacgt

SEQ ID NO: 1107107 - DNA, 25 bp, Homo sapien
tatggacgtaattgtgtataagatc

SEQ ID NO: 1107108 - DNA, 25 bp, Homo sapien
gacaggtaaagcaatcggtcctctt

SEQ ID NO: 1107109 - DNA, 25 bp, Homo sapien
ggtttaacgtgaccaacagctcact

SEQ ID NO: 1107110 - DNA, 25 bp, Homo sapien
tgcatgacaatgcacagaggtcacc

SEQ ID NO: 1107111 - DNA, 25 bp, Homo sapien
gaatcatagtagcatcccaccactc

SEQ ID NO: 1107112 - DNA, 25 bp, Homo sapien
caactaacccaaatgaatggagagt

SEQ ID NO: 1107113 - DNA, 25 bp, Homo sapien
tgtggaagtacccccttcccattgc

SEQ ID NO: 1107114 - DNA, 25 bp, Homo sapien
ctgtggaagtacccccttcccattg

SEQ ID NO: 1107115 - DNA, 25 bp, Homo sapien
tgcctgtggaagtacccccttccca

SEQ ID NO: 1107116 - DNA, 25 bp, Homo sapien
gtggaagtacccccttcccattgca

SEQ ID NO: 1107117 - DNA, 25 bp, Homo sapien
ctggaagtgtcatgagggcaagtca

SEQ ID NO: 1107118 - DNA, 25 bp, Homo sapien
tggaagtgtcatgagggcaagtcat

SEQ ID NO: 1107119 - DNA, 25 bp, Homo sapien
agacaattagactacccaaactctt

SEQ ID NO: 1107120 - DNA, 25 bp, Homo sapien
cagacaattagactacccaaactct

SEQ ID NO: 1107121 - DNA, 25 bp, Homo sapien
ggaaaaagtgatgctcctcgtatca

SEQ ID NO: 1107122 - DNA, 25 bp, Homo sapien
tactgaagaaccaagcatcctggag

SEQ ID NO: 1107123 - DNA, 25 bp, Homo sapien
tcgtatcacctttcactgtagctag

SEQ ID NO: 1107124 - DNA, 25 bp, Homo sapien
catcctggagtatcaggtagtgccc

SEQ ID NO: 1107125 - DNA, 25 bp, Homo sapien
tatcttttcttcgactatttcttga

SEQ ID NO: 1107126 - DNA, 25 bp, Homo sapien
tcttttcttcgactatttcttgact

SEQ ID NO: 1107127 - DNA, 25 bp, Homo sapien
tttcttgactttcttgggaggctgc

SEQ ID NO: 1107128 - DNA, 25 bp, Homo sapien
ttgtatcttttcttcgactatttct

SEQ ID NO: 1107129 - DNA, 25 bp, Homo sapien
tttggaagccattgagaagtgtgtc

SEQ ID NO: 1107130 - DNA, 25 bp, Homo sapien
tggaagccattgagaagtgtgtctt

SEQ ID NO: 1107131 - DNA, 25 bp, Homo sapien
gtctttggaagccattgagaagtgt

SEQ ID NO: 1107132 - DNA, 25 bp, Homo sapien
gaagccattgagaagtgtgtctttt

SEQ ID NO: 1107133 - DNA, 25 bp, Homo sapien
ggcactggtgatacttgtgttgcac

SEQ ID NO: 1107134 - DNA, 25 bp, Homo sapien
catccaggaaaatgtagttcgcagc

SEQ ID NO: 1107135 - DNA, 25 bp, Homo sapien
ctcaggaagttgtgctctgccactg

SEQ ID NO: 1107136 - DNA, 25 bp, Homo sapien
cagcactcctggaaaagcgcatcca

SEQ ID NO: 1107137 - DNA, 25 bp, Homo sapien
tccaaatggtgttaatgttccccca

SEQ ID NO: 1107138 - DNA, 25 bp, Homo sapien
gagttcacctgattttgcctttctt

SEQ ID NO: 1107139 - DNA, 25 bp, Homo sapien
attgcaagtccagcagagttcacct

SEQ ID NO: 1107140 - DNA, 25 bp, Homo sapien
tagctgacatctggcactgtcctaa

SEQ ID NO: 1107141 - DNA, 25 bp, Homo sapien
actgtcctaaactgtcgtgcatgag

SEQ ID NO: 1107142 - DNA, 25 bp, Homo sapien
ccagtcaaacgtagatttggtcttt

SEQ ID NO: 1107143 - DNA, 25 bp, Homo sapien
accagtcaaacgtagatttggtctt

SEQ ID NO: 1107144 - DNA, 25 bp, Homo sapien
ttggggttgctcttctcaaggaata

SEQ ID NO: 1107145 - DNA, 25 bp, Homo sapien
gggttgctcttctcaaggaatatct

SEQ ID NO: 1107146 - DNA, 25 bp, Homo sapien
catcagtggcttaaacacccaggca

SEQ ID NO: 1107147 - DNA, 25 bp, Homo sapien
gcaaaggaaacatctttttggccca

SEQ ID NO: 1107148 - DNA, 25 bp, Homo sapien
tcagtggcttaaacacccaggcaaa

SEQ ID NO: 1107149 - DNA, 25 bp, Homo sapien
gtggcttaaacacccaggcaaagga

SEQ ID NO: 1107150 - DNA, 25 bp, Homo sapien
tgggaataaaacgtgcttgacttaa

SEQ ID NO: 1107151 - DNA, 25 bp, Homo sapien
tctcctgtttgggaataaaacgtgc

SEQ ID NO: 1107152 - DNA, 25 bp, Homo sapien
agtaatcagtatctgaatcttctcc

SEQ ID NO: 1107153 - DNA, 25 bp, Homo sapien
gtatctgaatcttctcctgtttggg

SEQ ID NO: 1107154 - DNA, 25 bp, Homo sapien
ccttccctgagaccgcgccgcacag

SEQ ID NO: 1107155 - DNA, 25 bp, Homo sapien
gagaccgcgccgcacagcacgcatg

SEQ ID NO: 1107156 - DNA, 25 bp, Homo sapien
agaccgcgccgcacagcacgcatgc

SEQ ID NO: 1107157 - DNA, 25 bp, Homo sapien
cccaccttccctgagaccgcgccgc

SEQ ID NO: 1107158 - DNA, 25 bp, Homo sapien
cttccggagggtccctagcagctgc

SEQ ID NO: 1107159 - DNA, 25 bp, Homo sapien
tcttagctcggaaaacctccgcaat

SEQ ID NO: 1107160 - DNA, 25 bp, Homo sapien
cctccgcaattttcgctgggtggct

SEQ ID NO: 1107161 - DNA, 25 bp, Homo sapien
ctgggtggcttctcgcagcgatact

SEQ ID NO: 1107162 - DNA, 25 bp, Homo sapien
gagaactccggtgccttctctggta

SEQ ID NO: 1107163 - DNA, 25 bp, Homo sapien
gcccaggagaactccggtgccttct

SEQ ID NO: 1107164 - DNA, 25 bp, Homo sapien
ctcctggcacgtaaaagcaccctcc

SEQ ID NO: 1107165 - DNA, 25 bp, Homo sapien
cctggcacgtaaaagcaccctccct

SEQ ID NO: 1107166 - DNA, 25 bp, Homo sapien
aaaacgtgatattgaactccaaggg

SEQ ID NO: 1107167 - DNA, 25 bp, Homo sapien
gctccagcaggatccacaaaaacgt

SEQ ID NO: 1107168 - DNA, 25 bp, Homo sapien
gaattctccacgtgctacaagtttg

SEQ ID NO: 1107169 - DNA, 25 bp, Homo sapien
tcatcagccgctgttattgcaacta

SEQ ID NO: 1107170 - DNA, 25 bp, Homo sapien
cagagtgaattaataagatggtaaa

SEQ ID NO: 1107171 - DNA, 25 bp, Homo sapien
ccaaacattgaagggcacaaagtgt

SEQ ID NO: 1107172 - DNA, 25 bp, Homo sapien
tttccaaacattgaagggcacaaag

SEQ ID NO: 1107173 - DNA, 25 bp, Homo sapien
gagtgaattaataagatggtaaaag

SEQ ID NO: 1107174 - DNA, 25 bp, Homo sapien
taagaatgaaaaagtgccttggaag

SEQ ID NO: 1107175 - DNA, 25 bp, Homo sapien
taggcttcaaaccagaacttggatg

SEQ ID NO: 1107176 - DNA, 25 bp, Homo sapien
tctaaaatacctgtccctggactgg

SEQ ID NO: 1107177 - DNA, 25 bp, Homo sapien
aattatctaactatgcatttcctgg

SEQ ID NO: 1107178 - DNA, 25 bp, Homo sapien
atttggaagtcgttgactgtagcca

SEQ ID NO: 1107179 - DNA, 25 bp, Homo sapien
tttggaagtcgttgactgtagccac

SEQ ID NO: 1107180 - DNA, 25 bp, Homo sapien
caagaggtaaagcagtgaaaatttt

SEQ ID NO: 1107181 - DNA, 25 bp, Homo sapien
tgaaaatttttcccagagcacttgc

SEQ ID NO: 1107182 - DNA, 25 bp, Homo sapien
gtgaaaatttttcccagagcacttg

SEQ ID NO: 1107183 - DNA, 25 bp, Homo sapien
gcagtgaaaatttttcccagagcac

SEQ ID NO: 1107184 - DNA, 25 bp, Homo sapien
tatggactgtaagccgagctctgac

SEQ ID NO: 1107185 - DNA, 25 bp, Homo sapien
tatgaaggaaacgatggcaagacct

SEQ ID NO: 1107186 - DNA, 25 bp, Homo sapien
tccatgtgtggtacctatcgtcaaa

SEQ ID NO: 1107187 - DNA, 25 bp, Homo sapien
gcacaggtaaccagaattccaggat

SEQ ID NO: 1107188 - DNA, 25 bp, Homo sapien
cagcttttgttaggatgtaagaacc

SEQ ID NO: 1107189 - DNA, 25 bp, Homo sapien
cttgaatccagtatgctttgaatga

SEQ ID NO: 1107190 - DNA, 25 bp, Homo sapien
gccaggtgccacagaacatcttgaa

SEQ ID NO: 1107191 - DNA, 25 bp, Homo sapien
gatgttttgccagagcattctggta

SEQ ID NO: 1107192 - DNA, 25 bp, Homo sapien
gccatagttgcatactttaagcatc

SEQ ID NO: 1107193 - DNA, 25 bp, Homo sapien
catctaagcatgacaggaaacagac

SEQ ID NO: 1107194 - DNA, 25 bp, Homo sapien
tatatctgacaatgttttcacactc

SEQ ID NO: 1107195 - DNA, 25 bp, Homo sapien
gaacagttcctctgtaactttaaga

SEQ ID NO: 1107196 - DNA, 25 bp, Homo sapien
gatgttataactgagtcactcaaag

SEQ ID NO: 1107197 - DNA, 25 bp, Homo sapien
agcatttaacatctttagggatgtt

SEQ ID NO: 1107198 - DNA, 25 bp, Homo sapien
aaactgggaaaatgcgtgcagtcca

SEQ ID NO: 1107199 - DNA, 25 bp, Homo sapien
ggaaaatgcgtgcagtccacaaact

SEQ ID NO: 1107200 - DNA, 25 bp, Homo sapien
gttccctgtaagttatcatatcttc

SEQ ID NO: 1107201 - DNA, 25 bp, Homo sapien
cagcaacttatagctattcaggctg

SEQ ID NO: 1107202 - DNA, 25 bp, Homo sapien
tagctattcaggctgaatgctgact

SEQ ID NO: 1107203 - DNA, 25 bp, Homo sapien
gataagcatttcttcaatggacagc

SEQ ID NO: 1107204 - DNA, 25 bp, Homo sapien
tctgaagaccctacagtatgccatt

SEQ ID NO: 1107205 - DNA, 25 bp, Homo sapien
aactgagttcagtgaaacagcctac

SEQ ID NO: 1107206 - DNA, 25 bp, Homo sapien
tcataactgagggttgtggacaagt

SEQ ID NO: 1107207 - DNA, 25 bp, Homo sapien
tagaaggactgataggagataatgc

SEQ ID NO: 1107208 - DNA, 25 bp, Homo sapien
ataactgatggcacttcagatttgg

SEQ ID NO: 1107209 - DNA, 25 bp, Homo sapien
atggtgattcttataactgatggca

SEQ ID NO: 1107210 - DNA, 25 bp, Homo sapien
aatggtgattcttataactgatggc

SEQ ID NO: 1107211 - DNA, 25 bp, Homo sapien
tataactgatggcacttcagatttg

SEQ ID NO: 1107212 - DNA, 25 bp, Homo sapien
cagagaagatggtactaggtggaca

SEQ ID NO: 1107213 - DNA, 25 bp, Homo sapien
taaggacctgtgattaaactgaaag

SEQ ID NO: 1107214 - DNA, 25 bp, Homo sapien
gaagggtatcaaatcttgcaggagt

SEQ ID NO: 1107215 - DNA, 25 bp, Homo sapien
cagacataagtgtggtagagcactc

SEQ ID NO: 1107216 - DNA, 25 bp, Homo sapien
gccaggcagcaatagtcatggagtt

SEQ ID NO: 1107217 - DNA, 25 bp, Homo sapien
taacatcctctgaacgctctgtaag

SEQ ID NO: 1107218 - DNA, 25 bp, Homo sapien
aaccagaatccatgcattgtacagg

SEQ ID NO: 1107219 - DNA, 25 bp, Homo sapien
gtataatagctattagccaggcagc

SEQ ID NO: 1107220 - DNA, 25 bp, Homo sapien
cactgcattattcagggattaaatt

SEQ ID NO: 1107221 - DNA, 25 bp, Homo sapien
tagtcacttcttatcaaaaacacac

SEQ ID NO: 1107222 - DNA, 25 bp, Homo sapien
tcaaacttatccatgtaggtcttat

SEQ ID NO: 1107223 - DNA, 25 bp, Homo sapien
aacacacttctcctctatcatcatg

SEQ ID NO: 1107224 - DNA, 25 bp, Homo sapien
tatatgatgtaagtgccatgatttc

SEQ ID NO: 1107225 - DNA, 25 bp, Homo sapien
gagtatatgatgtaagtgccatgat

SEQ ID NO: 1107226 - DNA, 25 bp, Homo sapien
tatgatgtaagtgccatgatttcat

SEQ ID NO: 1107227 - DNA, 25 bp, Homo sapien
ctgagtatatgatgtaagtgccatg

SEQ ID NO: 1107228 - DNA, 25 bp, Homo sapien
ccatgcccttgttgatagttattaa

SEQ ID NO: 1107229 - DNA, 25 bp, Homo sapien
ctgctttgcttagagaataaatgcc

SEQ ID NO: 1107230 - DNA, 25 bp, Homo sapien
cagtatacactgatacatatccttt

SEQ ID NO: 1107231 - DNA, 25 bp, Homo sapien
ttatagttacaaatagcaggctttt

SEQ ID NO: 1107232 - DNA, 25 bp, Homo sapien
tgggaattaatcctggattcatgcc

SEQ ID NO: 1107233 - DNA, 25 bp, Homo sapien
gactagatcatcacaggttatggga

SEQ ID NO: 1107234 - DNA, 25 bp, Homo sapien
gtagctacagaagatgactagatca

SEQ ID NO: 1107235 - DNA, 25 bp, Homo sapien
cattaggagtactatgtagctacag

SEQ ID NO: 1107236 - DNA, 25 bp, Homo sapien
ccattgtaactctgctaggctagac

SEQ ID NO: 1107237 - DNA, 25 bp, Homo sapien
gaggtgccttaatcctgagccgcca

SEQ ID NO: 1107238 - DNA, 25 bp, Homo sapien
gaggcacagaagactcaagttaact

SEQ ID NO: 1107239 - DNA, 25 bp, Homo sapien
tcaacctcaatagaaataggctttc

SEQ ID NO: 1107240 - DNA, 25 bp, Homo sapien
taacagtgactcatttacaggcatc

SEQ ID NO: 1107241 - DNA, 25 bp, Homo sapien
tctactaaactacggccaaattggc

SEQ ID NO: 1107242 - DNA, 25 bp, Homo sapien
ccaaactggtatgactagactttct

SEQ ID NO: 1107243 - DNA, 25 bp, Homo sapien
tatgtgcaacggctaagagatccct

SEQ ID NO: 1107244 - DNA, 25 bp, Homo sapien
acaacgtgtgcatatctcgtaaggg

SEQ ID NO: 1107245 - DNA, 25 bp, Homo sapien
catgcaagcccaaacagaactaact

SEQ ID NO: 1107246 - DNA, 25 bp, Homo sapien
ttctggagaggatatggtgatgccc

SEQ ID NO: 1107247 - DNA, 25 bp, Homo sapien
taggcgctcagctcatagaattgtg

SEQ ID NO: 1107248 - DNA, 25 bp, Homo sapien
gtacctgaagagtggtataagccag

SEQ ID NO: 1107249 - DNA, 25 bp, Homo sapien
taatagcagtgctaggaacaaagct

SEQ ID NO: 1107250 - DNA, 25 bp, Homo sapien
taagccagtgttctgtaagtgggag

SEQ ID NO: 1107251 - DNA, 25 bp, Homo sapien
tctagcacaccatttcagacttgca

SEQ ID NO: 1107252 - DNA, 25 bp, Homo sapien
gctcccgttgtatctcatacccttt

SEQ ID NO: 1107253 - DNA, 25 bp, Homo sapien
gtctcttaaacccataatttggtca

SEQ ID NO: 1107254 - DNA, 25 bp, Homo sapien
gttgtccttgctgctcccgttgtat

SEQ ID NO: 1107255 - DNA, 25 bp, Homo sapien
tgctgctcccgttgtatctcatacc

SEQ ID NO: 1107256 - DNA, 25 bp, Homo sapien
ccttgtctggtaatatggagagtga

SEQ ID NO: 1107257 - DNA, 25 bp, Homo sapien
cacagaaagccatttttaggagttc

SEQ ID NO: 1107258 - DNA, 25 bp, Homo sapien
gagtgattgctctagtattcttgcc

SEQ ID NO: 1107259 - DNA, 25 bp, Homo sapien
caacatggattatcaagagtagact

SEQ ID NO: 1107260 - DNA, 25 bp, Homo sapien
tgataaatagggacttagttcctgc

SEQ ID NO: 1107261 - DNA, 25 bp, Homo sapien
gatttcctgtctagactatctatct

SEQ ID NO: 1107262 - DNA, 25 bp, Homo sapien
cagcctatatgtatctttatagaca

SEQ ID NO: 1107263 - DNA, 25 bp, Homo sapien
gcctccctttcagtgaaggtgattt

SEQ ID NO: 1107264 - DNA, 25 bp, Homo sapien
tttctacattgacccactgaatatt

SEQ ID NO: 1107265 - DNA, 25 bp, Homo sapien
atttctacattgacccactgaatat

SEQ ID NO: 1107266 - DNA, 25 bp, Homo sapien
ttaaaagacttgcaatctcccaggg

SEQ ID NO: 1107267 - DNA, 25 bp, Homo sapien
atcttgaagaccatactggatagct

SEQ ID NO: 1107268 - DNA, 25 bp, Homo sapien
gaccttcctgcttaatctcttcttc

SEQ ID NO: 1107269 - DNA, 25 bp, Homo sapien
ccagggaccttcctgcttaatctct

SEQ ID NO: 1107270 - DNA, 25 bp, Homo sapien
aaaccagacatcttcagttccacca

SEQ ID NO: 1107271 - DNA, 25 bp, Homo sapien
ttctccagggcagttcttcaagtta

SEQ ID NO: 1107272 - DNA, 25 bp, Homo sapien
ctttctccagggcagttcttcaagt

SEQ ID NO: 1107273 - DNA, 25 bp, Homo sapien
tcctttctccagggcagttcttcaa

SEQ ID NO: 1107274 - DNA, 25 bp, Homo sapien
ctccagggcagttcttcaagttata

SEQ ID NO: 1107275 - DNA, 25 bp, Homo sapien
agtacaagtttgggttggtctagat

SEQ ID NO: 1107276 - DNA, 25 bp, Homo sapien
cagtacaagtttgggttggtctaga

SEQ ID NO: 1107277 - DNA, 25 bp, Homo sapien
caagtttgggttggtctagatttat

SEQ ID NO: 1107278 - DNA, 25 bp, Homo sapien
ccaatgagttgttagttatcagtaa

SEQ ID NO: 1107279 - DNA, 25 bp, Homo sapien
gaagaacccattcgatattggataa

SEQ ID NO: 1107280 - DNA, 25 bp, Homo sapien
catgctgccttatcttccgtataca

SEQ ID NO: 1107281 - DNA, 25 bp, Homo sapien
caatctctagttgcaagacggtttt

SEQ ID NO: 1107282 - DNA, 25 bp, Homo sapien
ccaaatatattccttagttctgtca

SEQ ID NO: 1107283 - DNA, 25 bp, Homo sapien
tattgtgataacatatgattcactg

SEQ ID NO: 1107284 - DNA, 25 bp, Homo sapien
gtcatcttctaatctttctattgtg

SEQ ID NO: 1107285 - DNA, 25 bp, Homo sapien
caaatatattccttagttctgtcag

SEQ ID NO: 1107286 - DNA, 25 bp, Homo sapien
cagacaatggtactctaaggtgccc

SEQ ID NO: 1107287 - DNA, 25 bp, Homo sapien
gaagtcacatgtggagagccatcac

SEQ ID NO: 1107288 - DNA, 25 bp, Homo sapien
caggtataacatggcaattgcaaca

SEQ ID NO: 1107289 - DNA, 25 bp, Homo sapien
cacttacttcagagggttgttaaca

SEQ ID NO: 1107290 - DNA, 25 bp, Homo sapien
agttttgtgatccaattaaacttct

SEQ ID NO: 1107291 - DNA, 25 bp, Homo sapien
tttcagtgcggtaatttaaattgac

SEQ ID NO: 1107292 - DNA, 25 bp, Homo sapien
ttcagtgcggtaatttaaattgact

SEQ ID NO: 1107293 - DNA, 25 bp, Homo sapien
ttttcagtgcggtaatttaaattga

SEQ ID NO: 1107294 - DNA, 25 bp, Homo sapien
catttcttgtcagtcgagatgggcg

SEQ ID NO: 1107295 - DNA, 25 bp, Homo sapien
tgcaaggctgtaaatccatttcttg

SEQ ID NO: 1107296 - DNA, 25 bp, Homo sapien
cttgtaaactgctaaatgcaaggct

SEQ ID NO: 1107297 - DNA, 25 bp, Homo sapien
ggcggagccctttcaacataagagt

SEQ ID NO: 1107298 - DNA, 25 bp, Homo sapien
ccatgactatcattcactaccttcc

SEQ ID NO: 1107299 - DNA, 25 bp, Homo sapien
atgactatcattcactaccttcctg

SEQ ID NO: 1107300 - DNA, 25 bp, Homo sapien
cattcactaccttcctgttccttgg

SEQ ID NO: 1107301 - DNA, 25 bp, Homo sapien
tgactatcattcactaccttcctgt

SEQ ID NO: 1107302 - DNA, 25 bp, Homo sapien
gaccataatttgagttgccacgctt

SEQ ID NO: 1107303 - DNA, 25 bp, Homo sapien
ccattagggttgaacaggcagagac

SEQ ID NO: 1107304 - DNA, 25 bp, Homo sapien
tgccacgcttgaacagtaatccaca

SEQ ID NO: 1107305 - DNA, 25 bp, Homo sapien
gatatgggcatgacagaacaactta

SEQ ID NO: 1107306 - DNA, 25 bp, Homo sapien
ccaataatcttggtgagggctaaag

SEQ ID NO: 1107307 - DNA, 25 bp, Homo sapien
tagtttagccatggataggctgcca

SEQ ID NO: 1107308 - DNA, 25 bp, Homo sapien
ggagttaactctcactttaccaata

SEQ ID NO: 1107309 - DNA, 25 bp, Homo sapien
tactggaagcgagaaaacgtctact

SEQ ID NO: 1107310 - DNA, 25 bp, Homo sapien
cactccctctgcttcacgagttagg

SEQ ID NO: 1107311 - DNA, 25 bp, Homo sapien
actccctctgcttcacgagttaggc

SEQ ID NO: 1107312 - DNA, 25 bp, Homo sapien
ctccctctgcttcacgagttaggca

SEQ ID NO: 1107313 - DNA, 25 bp, Homo sapien
tctaggtggccagctattgtagcaa

SEQ ID NO: 1107314 - DNA, 25 bp, Homo sapien
ctgctgtatatcagctccactgtga

SEQ ID NO: 1107315 - DNA, 25 bp, Homo sapien
gtatatcagctccactgtgaagcag

SEQ ID NO: 1107316 - DNA, 25 bp, Homo sapien
gggcagtgaggccaccgtatccaac

SEQ ID NO: 1107317 - DNA, 25 bp, Homo sapien
agtctcaaagacagtatttcaaaac

SEQ ID NO: 1107318 - DNA, 25 bp, Homo sapien
tgttaattgatgattaaatacactg

SEQ ID NO: 1107319 - DNA, 25 bp, Homo sapien
tgactatccaaagctcatttataca

SEQ ID NO: 1107320 - DNA, 25 bp, Homo sapien
gactgaattgactatccaaagctca

SEQ ID NO: 1107321 - DNA, 25 bp, Homo sapien
taaagagcataaagatccagggctg

SEQ ID NO: 1107322 - DNA, 25 bp, Homo sapien
caaagccatgtgttagtgagtccct

SEQ ID NO: 1107323 - DNA, 25 bp, Homo sapien
actgtaaaagatctggacacgggcc

SEQ ID NO: 1107324 - DNA, 25 bp, Homo sapien
caggacctgcccagatgtggagatc

SEQ ID NO: 1107325 - DNA, 25 bp, Homo sapien
caatggcaaggctgtgtgatatagc

SEQ ID NO: 1107326 - DNA, 25 bp, Homo sapien
cagtttgcaaattttgacagcagta

SEQ ID NO: 1107327 - DNA, 25 bp, Homo sapien
gaagtatttccatgctatcaatggc

SEQ ID NO: 1107328 - DNA, 25 bp, Homo sapien
tatgccagagagcacaattcccatg

SEQ ID NO: 1107329 - DNA, 25 bp, Homo sapien
tccatgttgcaacagcacatcagca

SEQ ID NO: 1107330 - DNA, 25 bp, Homo sapien
gacattagctccatgttgcaacagc

SEQ ID NO: 1107331 - DNA, 25 bp, Homo sapien
tcatgtccatagtacgctgcaatat

SEQ ID NO: 1107332 - DNA, 25 bp, Homo sapien
tgcaatatgcaatggagtgaaaaaa

SEQ ID NO: 1107333 - DNA, 25 bp, Homo sapien
ggaggggtctatctccaacttcacc

SEQ ID NO: 1107334 - DNA, 25 bp, Homo sapien
tgcaatattcaagaatccttttgca

SEQ ID NO: 1107335 - DNA, 25 bp, Homo sapien
tccttttgcagatgctaggtggagg

SEQ ID NO: 1107336 - DNA, 25 bp, Homo sapien
tttacatcagcaccaaatttcaaaa

SEQ ID NO: 1107337 - DNA, 25 bp, Homo sapien
tccaaatcactttgcagcagatact

SEQ ID NO: 1107338 - DNA, 25 bp, Homo sapien
catggtgtccaaatcgagaacagaa

SEQ ID NO: 1107339 - DNA, 25 bp, Homo sapien
gaaatggagtgggacatggtcttca

SEQ ID NO: 1107340 - DNA, 25 bp, Homo sapien
caacatgaggttgaacttccaaatc

SEQ ID NO: 1107341 - DNA, 25 bp, Homo sapien
gcaacttcaaatttgccattgtagc

SEQ ID NO: 1107342 - DNA, 25 bp, Homo sapien
ggcaacttcaaatttgccattgtag

SEQ ID NO: 1107343 - DNA, 25 bp, Homo sapien
caacttcaaatttgccattgtagca

SEQ ID NO: 1107344 - DNA, 25 bp, Homo sapien
tgggatgcaacccatgaaaatcaat

SEQ ID NO: 1107345 - DNA, 25 bp, Homo sapien
ggatgcaacccatgaaaatcaataa

SEQ ID NO: 1107346 - DNA, 25 bp, Homo sapien
ccctgggatgcaacccatgaaaatc

SEQ ID NO: 1107347 - DNA, 25 bp, Homo sapien
gcagaaaagtttttagctttcatgc

SEQ ID NO: 1107348 - DNA, 25 bp, Homo sapien
gatcagagcagaactgcaggaaatg

SEQ ID NO: 1107349 - DNA, 25 bp, Homo sapien
gcaggaaatggagacacaaaaaacc

SEQ ID NO: 1107350 - DNA, 25 bp, Homo sapien
gctggttttttgaaaagatcaacaa

SEQ ID NO: 1107351 - DNA, 25 bp, Homo sapien
cttcaaaaaatcaatgaatccagga

SEQ ID NO: 1107352 - DNA, 25 bp, Homo sapien
taggtcaatgctcttgccataggta

SEQ ID NO: 1107353 - DNA, 25 bp, Homo sapien
caagaagaaatttgactaggtcaat

SEQ ID NO: 1107354 - DNA, 25 bp, Homo sapien
ttgactaggtcaatgctcttgccat

SEQ ID NO: 1107355 - DNA, 25 bp, Homo sapien
aatgctcttgccataggtacaagca

SEQ ID NO: 1107356 - DNA, 25 bp, Homo sapien
gctgggatcacaagccactagattc

SEQ ID NO: 1107357 - DNA, 25 bp, Homo sapien
taagcccacatcaaacatgtctgct

SEQ ID NO: 1107358 - DNA, 25 bp, Homo sapien
ccgtggtagcaagcagagtgtaatc

SEQ ID NO: 1107359 - DNA, 25 bp, Homo sapien
gtaagaactgaaccaggcgaatgtg

SEQ ID NO: 1107360 - DNA, 25 bp, Homo sapien
ctatagagacacgatgattaaaaat

SEQ ID NO: 1107361 - DNA, 25 bp, Homo sapien
tatagagacacgatgattaaaaata

SEQ ID NO: 1107362 - DNA, 25 bp, Homo sapien
tgttcattattagatcagaggcgac

SEQ ID NO: 1107363 - DNA, 25 bp, Homo sapien
cttgttccttaatcagcaggcccca

SEQ ID NO: 1107364 - DNA, 25 bp, Homo sapien
gatgtcactggtcctttaccttaag

SEQ ID NO: 1107365 - DNA, 25 bp, Homo sapien
tggacaattgcccttcaatggctca

SEQ ID NO: 1107366 - DNA, 25 bp, Homo sapien
tgagttagtgatcacacccttgatg

SEQ ID NO: 1107367 - DNA, 25 bp, Homo sapien
caaagcttaattcacagagcccacc

SEQ ID NO: 1107368 - DNA, 25 bp, Homo sapien
tatagaattgacatcggctgacaga

SEQ ID NO: 1107369 - DNA, 25 bp, Homo sapien
gagggcctcatgctttccccaatga

SEQ ID NO: 1107370 - DNA, 25 bp, Homo sapien
tcctccaggctgagaatattcatta

SEQ ID NO: 1107371 - DNA, 25 bp, Homo sapien
caggagtgtgacaatggcatcatgc

SEQ ID NO: 1107372 - DNA, 25 bp, Homo sapien
tacagggcaattcatcttgtggtct

SEQ ID NO: 1107373 - DNA, 25 bp, Homo sapien
ggtctcttataatgcttcaggagtg

SEQ ID NO: 1107374 - DNA, 25 bp, Homo sapien
cttccccaagggtgatggaacagac

SEQ ID NO: 1107375 - DNA, 25 bp, Homo sapien
tccccaagggtgatggaacagacac

SEQ ID NO: 1107376 - DNA, 25 bp, Homo sapien
cccaagggtgatggaacagacacat

SEQ ID NO: 1107377 - DNA, 25 bp, Homo sapien
ccccaagggtgatggaacagacaca

SEQ ID NO: 1107378 - DNA, 25 bp, Homo sapien
tgtgaaggcaatccagctcttagga

SEQ ID NO: 1107379 - DNA, 25 bp, Homo sapien
aaggcaatccagctcttaggaggag

SEQ ID NO: 1107380 - DNA, 25 bp, Homo sapien
tgaaggcaatccagctcttaggagg

SEQ ID NO: 1107381 - DNA, 25 bp, Homo sapien
atgtgaaggcaatccagctcttagg

SEQ ID NO: 1107382 - DNA, 25 bp, Homo sapien
tctgcatcgtcctttatatactttc

SEQ ID NO: 1107383 - DNA, 25 bp, Homo sapien
ttttatttctgcatcgtcctttata

SEQ ID NO: 1107384 - DNA, 25 bp, Homo sapien
tatttctgcatcgtcctttatatac

SEQ ID NO: 1107385 - DNA, 25 bp, Homo sapien
tgcatcgtcctttatatactttccc

SEQ ID NO: 1107386 - DNA, 25 bp, Homo sapien
tattgagtgacaatggcaaactggc

SEQ ID NO: 1107387 - DNA, 25 bp, Homo sapien
gaatggacacctctcggcaaaacat

SEQ ID NO: 1107388 - DNA, 25 bp, Homo sapien
cacatctgacttggagcagtaggta

SEQ ID NO: 1107389 - DNA, 25 bp, Homo sapien
ggctgggatcattcaagcaagcacc

SEQ ID NO: 1107390 - DNA, 25 bp, Homo sapien
ggaatgtccaaggataaatcagaac

SEQ ID NO: 1107391 - DNA, 25 bp, Homo sapien
aaacacagttattaggcataaatta

SEQ ID NO: 1107392 - DNA, 25 bp, Homo sapien
tattgcaagagtagtttctacggaa

SEQ ID NO: 1107393 - DNA, 25 bp, Homo sapien
gggaaaccctctgaagtattgcaag

SEQ ID NO: 1107394 - DNA, 25 bp, Homo sapien
ctttggcaacatctactgcaataat

SEQ ID NO: 1107395 - DNA, 25 bp, Homo sapien
tcaagtcacgatgtataattggctg

SEQ ID NO: 1107396 - DNA, 25 bp, Homo sapien
taattggctgtgtcaggttgtgaag

SEQ ID NO: 1107397 - DNA, 25 bp, Homo sapien
tgtgaaggtactccatgcctttggc

SEQ ID NO: 1107398 - DNA, 25 bp, Homo sapien
taagctctctgagggaaaggaccca

SEQ ID NO: 1107399 - DNA, 25 bp, Homo sapien
tcctgcctgacaactggtggtaaca

SEQ ID NO: 1107400 - DNA, 25 bp, Homo sapien
tactgacctgggaactagttagctg

SEQ ID NO: 1107401 - DNA, 25 bp, Homo sapien
cagtctgagctgtatgagcaacaca

SEQ ID NO: 1107402 - DNA, 25 bp, Homo sapien
ttgaaatcctctgaaagttgctctt

SEQ ID NO: 1107403 - DNA, 25 bp, Homo sapien
tcctctgaaagttgctctttcatca

SEQ ID NO: 1107404 - DNA, 25 bp, Homo sapien
aaatcctctgaaagttgctctttca

SEQ ID NO: 1107405 - DNA, 25 bp, Homo sapien
cctctgaaagttgctctttcatcat

SEQ ID NO: 1107406 - DNA, 25 bp, Homo sapien
aaatataaaagtgccccatcccgtg

SEQ ID NO: 1107407 - DNA, 25 bp, Homo sapien
tgctacagcaattaataccagggac

SEQ ID NO: 1107408 - DNA, 25 bp, Homo sapien
tctaggtaccatgctaaagcagagg

SEQ ID NO: 1107409 - DNA, 25 bp, Homo sapien
tcctatgaaggtagtgtagtcccca

SEQ ID NO: 1107410 - DNA, 25 bp, Homo sapien
caggagaccagatgacccagtttat

SEQ ID NO: 1107411 - DNA, 25 bp, Homo sapien
gtttatcagtctgggtggtagcagc

SEQ ID NO: 1107412 - DNA, 25 bp, Homo sapien
agatgatatcatagggtgtcaaagt

SEQ ID NO: 1107413 - DNA, 25 bp, Homo sapien
gaaaagtttaattcacgcacagcca

SEQ ID NO: 1107414 - DNA, 25 bp, Homo sapien
tacaggtagccctaatccctaaggc

SEQ ID NO: 1107415 - DNA, 25 bp, Homo sapien
taacatcatggatagggaccgcctc

SEQ ID NO: 1107416 - DNA, 25 bp, Homo sapien
tgctcacttgaatttggttgacccc

SEQ ID NO: 1107417 - DNA, 25 bp, Homo sapien
gttatggactctatcgttacagcag

SEQ ID NO: 1107418 - DNA, 25 bp, Homo sapien
gggtcaatgtagcacagacttctgg

SEQ ID NO: 1107419 - DNA, 25 bp, Homo sapien
gagctgactgtatcacccaatgcca

SEQ ID NO: 1107420 - DNA, 25 bp, Homo sapien
aaatgtgtgccatgctaatgcctgg

SEQ ID NO: 1107421 - DNA, 25 bp, Homo sapien
tatggtgccaccaagacagagctga

SEQ ID NO: 1107422 - DNA, 25 bp, Homo sapien
ttgggacacagttggccctctggaa

SEQ ID NO: 1107423 - DNA, 25 bp, Homo sapien
caaggttctctaaatacagtggcca

SEQ ID NO: 1107424 - DNA, 25 bp, Homo sapien
gacaccaacaactgagtgcagctca

SEQ ID NO: 1107425 - DNA, 25 bp, Homo sapien
ctatgagcattagtcgaggaggcag

SEQ ID NO: 1107426 - DNA, 25 bp, Homo sapien
ccaccagttacaggaaagcatttga

SEQ ID NO: 1107427 - DNA, 25 bp, Homo sapien
gtaacaccagaaaattgcaggccag

SEQ ID NO: 1107428 - DNA, 25 bp, Homo sapien
tagaaaatggcaatgtaagaaacca

SEQ ID NO: 1107429 - DNA, 25 bp, Homo sapien
cagtgagttcaccaccagttacagg

SEQ ID NO: 1107430 - DNA, 25 bp, Homo sapien
ctctttctaagattttcacattttt

SEQ ID NO: 1107431 - DNA, 25 bp, Homo sapien
ctaagattttcacatttttgtattt

SEQ ID NO: 1107432 - DNA, 25 bp, Homo sapien
ttcacatttttgtatttaccaccca

SEQ ID NO: 1107433 - DNA, 25 bp, Homo sapien
gattttcacatttttgtatttacca

SEQ ID NO: 1107434 - DNA, 25 bp, Homo sapien
aaagtaagtgcacagtctcaaaggc

SEQ ID NO: 1107435 - DNA, 25 bp, Homo sapien
tgaactcttaacctttgcagacagc

SEQ ID NO: 1107436 - DNA, 25 bp, Homo sapien
catcaatgccatcttagtaaacctt

SEQ ID NO: 1107437 - DNA, 25 bp, Homo sapien
gacctcagtgtgatacaggtttgta

SEQ ID NO: 1107438 - DNA, 25 bp, Homo sapien
ggaacacaaccaagccatatcagat

SEQ ID NO: 1107439 - DNA, 25 bp, Homo sapien
gaatgtgtacagtggaactcccttt

SEQ ID NO: 1107440 - DNA, 25 bp, Homo sapien
tcaatactgaataggtctgaagtct

SEQ ID NO: 1107441 - DNA, 25 bp, Homo sapien
taaagacgtacacaatactgggtaa

SEQ ID NO: 1107442 - DNA, 25 bp, Homo sapien
tctttcatcagagagtctttttcca

SEQ ID NO: 1107443 - DNA, 25 bp, Homo sapien
cagacttctttcatcagagagtctt

SEQ ID NO: 1107444 - DNA, 25 bp, Homo sapien
ccatggcatatctcacttgaccaga

SEQ ID NO: 1107445 - DNA, 25 bp, Homo sapien
gacttctttcatcagagagtctttt

SEQ ID NO: 1107446 - DNA, 25 bp, Homo sapien
ccagaaactctagatgcaaaaacag

SEQ ID NO: 1107447 - DNA, 25 bp, Homo sapien
cacaggaaaacagctataagtggct

SEQ ID NO: 1107448 - DNA, 25 bp, Homo sapien
gattatttgccacctctatgagtac

SEQ ID NO: 1107449 - DNA, 25 bp, Homo sapien
gaagacacttatgatactgcctgaa

SEQ ID NO: 1107450 - DNA, 25 bp, Homo sapien
tctgctaatcgtcacaatgacagcc

SEQ ID NO: 1107451 - DNA, 25 bp, Homo sapien
cactgctttctgctaatcgtcacaa

SEQ ID NO: 1107452 - DNA, 25 bp, Homo sapien
gcacactgctttctgctaatcgtca

SEQ ID NO: 1107453 - DNA, 25 bp, Homo sapien
tgctttctgctaatcgtcacaatga

SEQ ID NO: 1107454 - DNA, 25 bp, Homo sapien
aagaaaactgccctgcaattatgag

SEQ ID NO: 1107455 - DNA, 25 bp, Homo sapien
tgcttttccatcctatctatatccc

SEQ ID NO: 1107456 - DNA, 25 bp, Homo sapien
tatctatatccctaactaactcaat

SEQ ID NO: 1107457 - DNA, 25 bp, Homo sapien
tgccctgcaattatgagaataaaat

SEQ ID NO: 1107458 - DNA, 25 bp, Homo sapien
tatgggttctgcagggagacaagac

SEQ ID NO: 1107459 - DNA, 25 bp, Homo sapien
tcaaacacgaggttgcccagttgct

SEQ ID NO: 1107460 - DNA, 25 bp, Homo sapien
taaatcaggtgggatgcatctcccc

SEQ ID NO: 1107461 - DNA, 25 bp, Homo sapien
gagttccccatataggccaccaggt

SEQ ID NO: 1107462 - DNA, 25 bp, Homo sapien
cctaggcctagaattcttatttcac

SEQ ID NO: 1107463 - DNA, 25 bp, Homo sapien
ctaggcctagaattcttatttcaca

SEQ ID NO: 1107464 - DNA, 25 bp, Homo sapien
gcggctcactgcaacgtccacctcc

SEQ ID NO: 1107465 - DNA, 25 bp, Homo sapien
tctcaaactcctgagtttgatccac

SEQ ID NO: 1107466 - DNA, 25 bp, Homo sapien
gcaatggcatgatctgggcggctca

SEQ ID NO: 1107467 - DNA, 25 bp, Homo sapien
tggtctcaaactcctgagtttgatc

SEQ ID NO: 1107468 - DNA, 25 bp, Homo sapien
tttaatgaaattgtcacactattat

SEQ ID NO: 1107469 - DNA, 25 bp, Homo sapien
aactgtttcaacctgagggagcggc

SEQ ID NO: 1107470 - DNA, 25 bp, Homo sapien
tcagggaaggactcactaataggat

SEQ ID NO: 1107471 - DNA, 25 bp, Homo sapien
cgtcgtggctgggatagagtaaacc

SEQ ID NO: 1107472 - DNA, 25 bp, Homo sapien
tggcaaaaagctaggactctcatct

SEQ ID NO: 1107473 - DNA, 25 bp, Homo sapien
acaattatctaaagcatattccttt

SEQ ID NO: 1107474 - DNA, 25 bp, Homo sapien
gacaattatctaaagcatattcctt

SEQ ID NO: 1107475 - DNA, 25 bp, Homo sapien
ctgttctttgtgtccacaaaactcc

SEQ ID NO: 1107476 - DNA, 25 bp, Homo sapien
tatttggacgcttgagaaccagaga

SEQ ID NO: 1107477 - DNA, 25 bp, Homo sapien
aaatgtgactcccacgtacagcacc

SEQ ID NO: 1107478 - DNA, 25 bp, Homo sapien
cagagatactctggtgaaaagggta

SEQ ID NO: 1107479 - DNA, 25 bp, Homo sapien
tggagcctgggatcagtctcagact

SEQ ID NO: 1107480 - DNA, 25 bp, Homo sapien
ggtgctatgctatgcttcatgccaa

SEQ ID NO: 1107481 - DNA, 25 bp, Homo sapien
tacatgaaatatagccaacacggca

SEQ ID NO: 1107482 - DNA, 25 bp, Homo sapien
gcaatgtgccccaaataaaatcagg

SEQ ID NO: 1107483 - DNA, 25 bp, Homo sapien
tagtgtagcccgtcactaaggtccc

SEQ ID NO: 1107484 - DNA, 25 bp, Homo sapien
tcattcgttaggaactgagatgcct

SEQ ID NO: 1107485 - DNA, 25 bp, Homo sapien
tgcctcatgttcaaagatggctgct

SEQ ID NO: 1107486 - DNA, 25 bp, Homo sapien
aatcacatacatagttcaggaagcc

SEQ ID NO: 1107487 - DNA, 25 bp, Homo sapien
cctagaggcaggcttctatggctga

SEQ ID NO: 1107488 - DNA, 25 bp, Homo sapien
tttccctgaactgaggatctaagca

SEQ ID NO: 1107489 - DNA, 25 bp, Homo sapien
ttccctgaactgaggatctaagcat

SEQ ID NO: 1107490 - DNA, 25 bp, Homo sapien
ctgatgctaaggagtcctggtcttc

SEQ ID NO: 1107491 - DNA, 25 bp, Homo sapien
agtcctggtcttccgatctgctggc

SEQ ID NO: 1107492 - DNA, 25 bp, Homo sapien
taaggagtcctggtcttccgatctg

SEQ ID NO: 1107493 - DNA, 25 bp, Homo sapien
gatgctaaggagtcctggtcttccg

SEQ ID NO: 1107494 - DNA, 25 bp, Homo sapien
atcagggaggttgtgtgaagggtca

SEQ ID NO: 1107495 - DNA, 25 bp, Homo sapien
aaaatcagggaggttgtgtgaaggg

SEQ ID NO: 1107496 - DNA, 25 bp, Homo sapien
tttaaaatcagggaggttgtgtgaa

SEQ ID NO: 1107497 - DNA, 25 bp, Homo sapien
tcagggaggttgtgtgaagggtcag

SEQ ID NO: 1107498 - DNA, 25 bp, Homo sapien
catatgtctttgatgcccattttac

SEQ ID NO: 1107499 - DNA, 25 bp, Homo sapien
cacagcatgcccatcctcatagaga

SEQ ID NO: 1107500 - DNA, 25 bp, Homo sapien
tgcccatcctcatagagaagaatat

SEQ ID NO: 1107501 - DNA, 25 bp, Homo sapien
gcatgcccatcctcatagagaagaa

SEQ ID NO: 1107502 - DNA, 25 bp, Homo sapien
tccaaaatctgccaccacagcatgc

SEQ ID NO: 1107503 - DNA, 25 bp, Homo sapien
tttgtcatgttgtcttcatccagag

SEQ ID NO: 1107504 - DNA, 25 bp, Homo sapien
ttcatccagagactgtagaaatctt

SEQ ID NO: 1107505 - DNA, 25 bp, Homo sapien
ttgtcatgttgtcttcatccagaga

SEQ ID NO: 1107506 - DNA, 25 bp, Homo sapien
tgttgtcttcatccagagactgtag

SEQ ID NO: 1107507 - DNA, 25 bp, Homo sapien
ctgcacatcaagaaacatccacaag

SEQ ID NO: 1107508 - DNA, 25 bp, Homo sapien
catcaagaaacatccacaagccatt

SEQ ID NO: 1107509 - DNA, 25 bp, Homo sapien
cacatcaagaaacatccacaagcca

SEQ ID NO: 1107510 - DNA, 25 bp, Homo sapien
tgcacatcaagaaacatccacaagc

SEQ ID NO: 1107511 - DNA, 25 bp, Homo sapien
gtgagaatttcccacagacacagag

SEQ ID NO: 1107512 - DNA, 25 bp, Homo sapien
gacacagagcatagctgaagacatc

SEQ ID NO: 1107513 - DNA, 25 bp, Homo sapien
gtgcactgcgtgaacacctcaggag

SEQ ID NO: 1107514 - DNA, 25 bp, Homo sapien
cgaatggaatttcgccagtgagaat

SEQ ID NO: 1107515 - DNA, 25 bp, Homo sapien
tgtgattagattcctcaccttcact

SEQ ID NO: 1107516 - DNA, 25 bp, Homo sapien
tgattagattcctcaccttcacttt

SEQ ID NO: 1107517 - DNA, 25 bp, Homo sapien
ctgtgattagattcctcaccttcac

SEQ ID NO: 1107518 - DNA, 25 bp, Homo sapien
gtgattagattcctcaccttcactt

SEQ ID NO: 1107519 - DNA, 25 bp, Homo sapien
ttttcaatgacgtatcaccagagtg

SEQ ID NO: 1107520 - DNA, 25 bp, Homo sapien
gagtgtatagcatctgagagagacc

SEQ ID NO: 1107521 - DNA, 25 bp, Homo sapien
gctgcggtgagacaaagcaaatgtg

SEQ ID NO: 1107522 - DNA, 25 bp, Homo sapien
tgtgttctacaatcccagcaagagc

SEQ ID NO: 1107523 - DNA, 25 bp, Homo sapien
cttgggaatggaatagccaatggga

SEQ ID NO: 1107524 - DNA, 25 bp, Homo sapien
ggtaagccatgtctgctgccgcagc

SEQ ID NO: 1107525 - DNA, 25 bp, Homo sapien
ttcaggacatgcgttccaccctcgt

SEQ ID NO: 1107526 - DNA, 25 bp, Homo sapien
tatcagcagagatgatatgggcttg

SEQ ID NO: 1107527 - DNA, 25 bp, Homo sapien
tggccaggataagaggttatcttct

SEQ ID NO: 1107528 - DNA, 25 bp, Homo sapien
aagcatccagctttagatgttagtg

SEQ ID NO: 1107529 - DNA, 25 bp, Homo sapien
ggtagtgatggaagattctaaacaa

SEQ ID NO: 1107530 - DNA, 25 bp, Homo sapien
gatgagactgggtaatgacttggtc

SEQ ID NO: 1107531 - DNA, 25 bp, Homo sapien
gaggcagcaatcctagttctcctgg

SEQ ID NO: 1107532 - DNA, 25 bp, Homo sapien
cactaactgactctcaggaggcagc

SEQ ID NO: 1107533 - DNA, 25 bp, Homo sapien
tatgccacctatctgccttgcctga

SEQ ID NO: 1107534 - DNA, 25 bp, Homo sapien
cacctttaaggtgagacgagtatct

SEQ ID NO: 1107535 - DNA, 25 bp, Homo sapien
tgaaaactaaataacctattagtgc

SEQ ID NO: 1107536 - DNA, 25 bp, Homo sapien
ttagtgcatagctttcaaggtctga

SEQ ID NO: 1107537 - DNA, 25 bp, Homo sapien
tcttgggtttcgcatgccactgttg

SEQ ID NO: 1107538 - DNA, 25 bp, Homo sapien
caaggtctgatctcttgggtttcgc

SEQ ID NO: 1107539 - DNA, 25 bp, Homo sapien
tttagaagaacagggcttgaagatc

SEQ ID NO: 1107540 - DNA, 25 bp, Homo sapien
ggatagttggctgttcccataaaga

SEQ ID NO: 1107541 - DNA, 25 bp, Homo sapien
tatatatccactaggtggagatctc

SEQ ID NO: 1107542 - DNA, 25 bp, Homo sapien
ttaaggatttccagggatagttggc

SEQ ID NO: 1107543 - DNA, 25 bp, Homo sapien
catatctcaattagtggtattacaa

SEQ ID NO: 1107544 - DNA, 25 bp, Homo sapien
gtagtgtaactgatatgcatattgg

SEQ ID NO: 1107545 - DNA, 25 bp, Homo sapien
gctttctacatggataattatatat

SEQ ID NO: 1107546 - DNA, 25 bp, Homo sapien
tcagctttgttaactgtagtgtaac

SEQ ID NO: 1107547 - DNA, 25 bp, Homo sapien
ctcaatgttgcagagacactcttct

SEQ ID NO: 1107548 - DNA, 25 bp, Homo sapien
ttaatgctgccacatgactccggcc

SEQ ID NO: 1107549 - DNA, 25 bp, Homo sapien
tgctgttacttgatgcaggagacat

SEQ ID NO: 1107550 - DNA, 25 bp, Homo sapien
agaagaaggtgagagagacccactg

SEQ ID NO: 1107551 - DNA, 25 bp, Homo sapien
gacaaagcagcataggaccttgcat

SEQ ID NO: 1107552 - DNA, 25 bp, Homo sapien
ggtgactgtgctttagaaatatcaa

SEQ ID NO: 1107553 - DNA, 25 bp, Homo sapien
ctcaggtgactgtgctttagaaata

SEQ ID NO: 1107554 - DNA, 25 bp, Homo sapien
caaaatctggctgttcagagaaata

SEQ ID NO: 1107555 - DNA, 25 bp, Homo sapien
agaaatatcaaaatctggctgttca

SEQ ID NO: 1107556 - DNA, 25 bp, Homo sapien
gactcctgaatcaattggactccgg

SEQ ID NO: 1107557 - DNA, 25 bp, Homo sapien
caaaaagcctaggatgcatctgaga

SEQ ID NO: 1107558 - DNA, 25 bp, Homo sapien
tgttgcaaacgctaggaagcagaga

SEQ ID NO: 1107559 - DNA, 25 bp, Homo sapien
gaaccactggaacgtatgatgaaaa

SEQ ID NO: 1107560 - DNA, 25 bp, Homo sapien
aagaagatacagagggagtccacgg

SEQ ID NO: 1107561 - DNA, 25 bp, Homo sapien
tacaaatgtggtcagagagtgaggc

SEQ ID NO: 1107562 - DNA, 25 bp, Homo sapien
ttatgtgctctgattggttgtcgct

SEQ ID NO: 1107563 - DNA, 25 bp, Homo sapien
gattggttgtcgctacttttacaaa

SEQ ID NO: 1107564 - DNA, 25 bp, Homo sapien
gtgaggctcctaaagacatcagtac

SEQ ID NO: 1107565 - DNA, 25 bp, Homo sapien
gatccacagaagatggcttcaccag

SEQ ID NO: 1107566 - DNA, 25 bp, Homo sapien
tcagacatcagaaccttgaaggcag

SEQ ID NO: 1107567 - DNA, 25 bp, Homo sapien
gcttcaccagtaagttgattgtcct

SEQ ID NO: 1107568 - DNA, 25 bp, Homo sapien
tgtccagctcatagcccatgctaag

SEQ ID NO: 1107569 - DNA, 25 bp, Homo sapien
gaagaatccctaacacacaggaggt

SEQ ID NO: 1107570 - DNA, 25 bp, Homo sapien
cagtctgggcacctctacttcctag

SEQ ID NO: 1107571 - DNA, 25 bp, Homo sapien
tgagatggtatacacgcaaagcgct

SEQ ID NO: 1107572 - DNA, 25 bp, Homo sapien
taaactctttgaacatgcagaacat

SEQ ID NO: 1107573 - DNA, 25 bp, Homo sapien
agaacattgatcttcacaaaccatt

SEQ ID NO: 1107574 - DNA, 25 bp, Homo sapien
acattgatcttcacaaaccatttga

SEQ ID NO: 1107575 - DNA, 25 bp, Homo sapien
aaactccctaaactctttgaacatg

SEQ ID NO: 1107576 - DNA, 25 bp, Homo sapien
cttgcagaaactcacagagctagcc

SEQ ID NO: 1107577 - DNA, 25 bp, Homo sapien
aatagcacatgtcttctcattgttc

SEQ ID NO: 1107578 - DNA, 25 bp, Homo sapien
gctcagaaagttcgaatgacttgca

SEQ ID NO: 1107579 - DNA, 25 bp, Homo sapien
taattgcttatacttgcagaaggct

SEQ ID NO: 1107580 - DNA, 25 bp, Homo sapien
accttgagaggaatattgtccagca

SEQ ID NO: 1107581 - DNA, 25 bp, Homo sapien
gacagaccttgagaggaatattgtc

SEQ ID NO: 1107582 - DNA, 25 bp, Homo sapien
tcaatgggtgtgtattgaagacttc

SEQ ID NO: 1107583 - DNA, 25 bp, Homo sapien
cagaccttgagaggaatattgtcca

SEQ ID NO: 1107584 - DNA, 25 bp, Homo sapien
tcaaaggatgccctatgttttgtgt

SEQ ID NO: 1107585 - DNA, 25 bp, Homo sapien
gatgccctatgttttgtgtttatga

SEQ ID NO: 1107586 - DNA, 25 bp, Homo sapien
gccctatgttttgtgtttatgaagt

SEQ ID NO: 1107587 - DNA, 25 bp, Homo sapien
aaggatgccctatgttttgtgttta

SEQ ID NO: 1107588 - DNA, 25 bp, Homo sapien
gagctcatgggatcggatacatagc

SEQ ID NO: 1107589 - DNA, 25 bp, Homo sapien
tgaaaatgcattgagctcatgggat

SEQ ID NO: 1107590 - DNA, 25 bp, Homo sapien
ctatttcggcaagaatgaaaatgca

SEQ ID NO: 1107591 - DNA, 25 bp, Homo sapien
agctgctactatttcggcaagaatg

SEQ ID NO: 1107592 - DNA, 25 bp, Homo sapien
tctccttaggtatacgccgaatgct

SEQ ID NO: 1107593 - DNA, 25 bp, Homo sapien
gccgtggttggaatcgttgctgtca

SEQ ID NO: 1107594 - DNA, 25 bp, Homo sapien
tagttggaagccagcttgccgtggt

SEQ ID NO: 1107595 - DNA, 25 bp, Homo sapien
ggctccatttccaagtaacgatcta

SEQ ID NO: 1107596 - DNA, 25 bp, Homo sapien
gttttctccagaaggctcaaggtgt

SEQ ID NO: 1107597 - DNA, 25 bp, Homo sapien
taattagggaaaatgcagtacacag

SEQ ID NO: 1107598 - DNA, 25 bp, Homo sapien
tcacagttgttcaggagattggtac

SEQ ID NO: 1107599 - DNA, 25 bp, Homo sapien
gaagccggtgtctaaatcttgccgc

SEQ ID NO: 1107600 - DNA, 25 bp, Homo sapien
gtacactgatgtccaaaaactgctg

SEQ ID NO: 1107601 - DNA, 25 bp, Homo sapien
taatccatagcttaacaagccctgc

SEQ ID NO: 1107602 - DNA, 25 bp, Homo sapien
tacactggaccagatagtagactgg

SEQ ID NO: 1107603 - DNA, 25 bp, Homo sapien
tcttggtgggttccagtaatccata

SEQ ID NO: 1107604 - DNA, 25 bp, Homo sapien
ggaagatcccataatggcagaaaag

SEQ ID NO: 1107605 - DNA, 25 bp, Homo sapien
tgaggaagatcccataatggcagaa

SEQ ID NO: 1107606 - DNA, 25 bp, Homo sapien
ggaggagtggatgtcgtgctaagga

SEQ ID NO: 1107607 - DNA, 25 bp, Homo sapien
atgtcgtgctaaggacccaggaagc

SEQ ID NO: 1107608 - DNA, 25 bp, Homo sapien
gataataacagaacccttggcattg

SEQ ID NO: 1107609 - DNA, 25 bp, Homo sapien
taagggcacatcattacctaggaag

SEQ ID NO: 1107610 - DNA, 25 bp, Homo sapien
tcctctgcaaaagacggcctgtttc

SEQ ID NO: 1107611 - DNA, 25 bp, Homo sapien
ctggaggttgacacaagtggcagta

SEQ ID NO: 1107612 - DNA, 25 bp, Homo sapien
aagtatggccgttgagttgagctgc

SEQ ID NO: 1107613 - DNA, 25 bp, Homo sapien
gcagagggtttatctgagaagtccg

SEQ ID NO: 1107614 - DNA, 25 bp, Homo sapien
gagaagtccgggaaacatgtttctg

SEQ ID NO: 1107615 - DNA, 25 bp, Homo sapien
gagaccaagccgatgccaatagacg

SEQ ID NO: 1107616 - DNA, 25 bp, Homo sapien
ggttcttaccacagacgtactgaat

SEQ ID NO: 1107617 - DNA, 25 bp, Homo sapien
tgccattgtccagggatttggagaa

SEQ ID NO: 1107618 - DNA, 25 bp, Homo sapien
gaaggcagtccctagaccaatagca

SEQ ID NO: 1107619 - DNA, 25 bp, Homo sapien
gaaacagaggtaaaacccagcaatc

SEQ ID NO: 1107620 - DNA, 25 bp, Homo sapien
tctaatttctggactacgttctttc

SEQ ID NO: 1107621 - DNA, 25 bp, Homo sapien
cttctaatttctggactacgttctt

SEQ ID NO: 1107622 - DNA, 25 bp, Homo sapien
ccttctaatttctggactacgttct

SEQ ID NO: 1107623 - DNA, 25 bp, Homo sapien
ctggactacgttctttccactgctc

SEQ ID NO: 1107624 - DNA, 25 bp, Homo sapien
caaatccaataaactgcagggtgaa

SEQ ID NO: 1107625 - DNA, 25 bp, Homo sapien
tgttgcacgaataagctgtccccga

SEQ ID NO: 1107626 - DNA, 25 bp, Homo sapien
ggtgaatcacacctaaataacttgg

SEQ ID NO: 1107627 - DNA, 25 bp, Homo sapien
taaatccacgtttgtcagcatagga

SEQ ID NO: 1107628 - DNA, 25 bp, Homo sapien
gatgacaccgatcttcagaatgacc

SEQ ID NO: 1107629 - DNA, 25 bp, Homo sapien
ggatagtcccaagcccaaattattg

SEQ ID NO: 1107630 - DNA, 25 bp, Homo sapien
tcctcgtagaggtcaggcaaacact

SEQ ID NO: 1107631 - DNA, 25 bp, Homo sapien
tgaatgcccctgtgaaactggatag

SEQ ID NO: 1107632 - DNA, 25 bp, Homo sapien
gatggaatcagctcaaattactgcc

SEQ ID NO: 1107633 - DNA, 25 bp, Homo sapien
actgccttggatccacttaaagttg

SEQ ID NO: 1107634 - DNA, 25 bp, Homo sapien
tgttgcagcgttgttattctttaga

SEQ ID NO: 1107635 - DNA, 25 bp, Homo sapien
tatactttcagatggttgctagcag

SEQ ID NO: 1107636 - DNA, 25 bp, Homo sapien
tctcatcttgggaatgggctagcca

SEQ ID NO: 1107637 - DNA, 25 bp, Homo sapien
caatgagaaagttgcctagtgagca

SEQ ID NO: 1107638 - DNA, 25 bp, Homo sapien
caccaagagatgtcatagtcaaggc

SEQ ID NO: 1107639 - DNA, 25 bp, Homo sapien
ttaatcgtataaggcctatatggcc

SEQ ID NO: 1107640 - DNA, 25 bp, Homo sapien
gactgtccaggctaactaaacgaac

SEQ ID NO: 1107641 - DNA, 25 bp, Homo sapien
caaaagtggtggtgcttcatccagg

SEQ ID NO: 1107642 - DNA, 25 bp, Homo sapien
tcatccagggaagactgcttacagt

SEQ ID NO: 1107643 - DNA, 25 bp, Homo sapien
ctgttttagccagggtccaggaata

SEQ ID NO: 1107644 - DNA, 25 bp, Homo sapien
gatgctaagcatgctagggtcagca

SEQ ID NO: 1107645 - DNA, 25 bp, Homo sapien
ctttggtagagggacccagctggcc

SEQ ID NO: 1107646 - DNA, 25 bp, Homo sapien
tcctgaggttagtgggtgtagtccc

SEQ ID NO: 1107647 - DNA, 25 bp, Homo sapien
ggaaaaccaactagggatgctaagc

SEQ ID NO: 1107648 - DNA, 25 bp, Homo sapien
atgcagagttgggttaattggagaa

SEQ ID NO: 1107649 - DNA, 25 bp, Homo sapien
ctgagctagatgcagagttgggtta

SEQ ID NO: 1107650 - DNA, 25 bp, Homo sapien
gagctagatgcagagttgggttaat

SEQ ID NO: 1107651 - DNA, 25 bp, Homo sapien
tagatgcagagttgggttaattgga

SEQ ID NO: 1107652 - DNA, 25 bp, Homo sapien
ttcaacattttaagctggtgatcca

SEQ ID NO: 1107653 - DNA, 25 bp, Homo sapien
agtgcctgatgctggttggaacaga

SEQ ID NO: 1107654 - DNA, 25 bp, Homo sapien
tcaacattttaagctggtgatccat

SEQ ID NO: 1107655 - DNA, 25 bp, Homo sapien
attcaacattttaagctggtgatcc

SEQ ID NO: 1107656 - DNA, 25 bp, Homo sapien
ttccagcttccgcaggctcggttcc

SEQ ID NO: 1107657 - DNA, 25 bp, Homo sapien
tccgcaggctcggttccagtagcgc

SEQ ID NO: 1107658 - DNA, 25 bp, Homo sapien
agcttccgcaggctcggttccagta

SEQ ID NO: 1107659 - DNA, 25 bp, Homo sapien
aggctcggttccagtagcgcctccg

SEQ ID NO: 1107660 - DNA, 25 bp, Homo sapien
ctagagcaacagagcaggggcttgc

SEQ ID NO: 1107661 - DNA, 25 bp, Homo sapien
ggggcttgcttgggtctcctcccta

SEQ ID NO: 1107662 - DNA, 25 bp, Homo sapien
caggggcttgcttgggtctcctccc

SEQ ID NO: 1107663 - DNA, 25 bp, Homo sapien
agcaggggcttgcttgggtctcctc

SEQ ID NO: 1107664 - DNA, 25 bp, Homo sapien
tctcctttcctcagttccaaatcac

SEQ ID NO: 1107665 - DNA, 25 bp, Homo sapien
tctctcctttcctcagttccaaatc

SEQ ID NO: 1107666 - DNA, 25 bp, Homo sapien
tcctttcctcagttccaaatcacag

SEQ ID NO: 1107667 - DNA, 25 bp, Homo sapien
gttccaaatcacagcctccattcat

SEQ ID NO: 1107668 - DNA, 25 bp, Homo sapien
ttctgctttgctgtaacatattaat

SEQ ID NO: 1107669 - DNA, 25 bp, Homo sapien
tcagcatgatttttggcttttctgc

SEQ ID NO: 1107670 - DNA, 25 bp, Homo sapien
tgctttgctgtaacatattaattgg

SEQ ID NO: 1107671 - DNA, 25 bp, Homo sapien
gctttgctgtaacatattaattggg

SEQ ID NO: 1107672 - DNA, 25 bp, Homo sapien
gcccattcttgatgaaaagtagaga

SEQ ID NO: 1107673 - DNA, 25 bp, Homo sapien
gtggccttagggctactacatagtc

SEQ ID NO: 1107674 - DNA, 25 bp, Homo sapien
cttagggctactacatagtcttcag

SEQ ID NO: 1107675 - DNA, 25 bp, Homo sapien
ttcagtgcccattcttgatgaaaag

SEQ ID NO: 1107676 - DNA, 25 bp, Homo sapien
ctgattagccatgactgtattggac

SEQ ID NO: 1107677 - DNA, 25 bp, Homo sapien
aaggttctctagtctctgattagcc

SEQ ID NO: 1107678 - DNA, 25 bp, Homo sapien
caatgaccccatatgttctgtgaga

SEQ ID NO: 1107679 - DNA, 25 bp, Homo sapien
tacatagtctccaaataggtaatac

SEQ ID NO: 1107680 - DNA, 25 bp, Homo sapien
ttgtaagagccagcgtccaacatcc

SEQ ID NO: 1107681 - DNA, 25 bp, Homo sapien
tcctggtacctagtgcaatcccggg

SEQ ID NO: 1107682 - DNA, 25 bp, Homo sapien
ggaactttatctgaccatggcaggc

SEQ ID NO: 1107683 - DNA, 25 bp, Homo sapien
ccaagagcccaaaagagttagtgca

SEQ ID NO: 1107684 - DNA, 25 bp, Homo sapien
gcaagatggaaaggacttaggacat

SEQ ID NO: 1107685 - DNA, 25 bp, Homo sapien
cctagaaagggtaaagatgatataa

SEQ ID NO: 1107686 - DNA, 25 bp, Homo sapien
ttaggacataggtagagagattggc

SEQ ID NO: 1107687 - DNA, 25 bp, Homo sapien
ttttaaggatagacaagacttgaac

SEQ ID NO: 1107688 - DNA, 25 bp, Homo sapien
tccagcattagggaacagactgccc

SEQ ID NO: 1107689 - DNA, 25 bp, Homo sapien
tagttttattgaccctgtgacgccc

SEQ ID NO: 1107690 - DNA, 25 bp, Homo sapien
tagcgcagcgagttcagcagcaaat

SEQ ID NO: 1107691 - DNA, 25 bp, Homo sapien
cacaattacaggtttcccggagctt

SEQ ID NO: 1107692 - DNA, 25 bp, Homo sapien
gatttctcctaggtagggctccttc

SEQ ID NO: 1107693 - DNA, 25 bp, Homo sapien
ttctcctaggtagtgccccttcgca

SEQ ID NO: 1107694 - DNA, 25 bp, Homo sapien
cctgtcagctgtaggggatttctcc

SEQ ID NO: 1107695 - DNA, 25 bp, Homo sapien
tgatttcttctcctaggtagggccc

SEQ ID NO: 1107696 - DNA, 25 bp, Homo sapien
cttcatggtagcctcgtctctccct

SEQ ID NO: 1107697 - DNA, 25 bp, Homo sapien
gggtgacggactcagggtctgcgct

SEQ ID NO: 1107698 - DNA, 25 bp, Homo sapien
ctgcgctcggctccttcatggtagc

SEQ ID NO: 1107699 - DNA, 25 bp, Homo sapien
ggactcagggtctgcgctcggctcc

SEQ ID NO: 1107700 - DNA, 25 bp, Homo sapien
gtcaacactgcccttccggctgagg

SEQ ID NO: 1107701 - DNA, 25 bp, Homo sapien
gctttgctcaaacattgcgccttcc

SEQ ID NO: 1107702 - DNA, 25 bp, Homo sapien
gaaactgcacaagctctaccacatc

SEQ ID NO: 1107703 - DNA, 25 bp, Homo sapien
ggtggtgaaaaactgatctcgcatg

SEQ ID NO: 1107704 - DNA, 25 bp, Homo sapien
cacaagatagttcccaggtcagcag

SEQ ID NO: 1107705 - DNA, 25 bp, Homo sapien
caaacacagacatgctggatccggt

SEQ ID NO: 1107706 - DNA, 25 bp, Homo sapien
gaaatgcacagtatcaggccctacc

SEQ ID NO: 1107707 - DNA, 25 bp, Homo sapien
taaagtttcgcactagaaggcaggc

SEQ ID NO: 1107708 - DNA, 25 bp, Homo sapien
gactgctgttgactggggtaactga

SEQ ID NO: 1107709 - DNA, 25 bp, Homo sapien
actgctgttgactggggtaactgaa

SEQ ID NO: 1107710 - DNA, 25 bp, Homo sapien
ctgctgttgactggggtaactgaac

SEQ ID NO: 1107711 - DNA, 25 bp, Homo sapien
tacacaaagtttgtgtgtaaccagt

SEQ ID NO: 1107712 - DNA, 25 bp, Homo sapien
aaagtttgtgtgtaaccagtagcca

SEQ ID NO: 1107713 - DNA, 25 bp, Homo sapien
gtgtaaccagtagccagcaacagtt

SEQ ID NO: 1107714 - DNA, 25 bp, Homo sapien
gtttgtgtgtaaccagtagccagca

SEQ ID NO: 1107715 - DNA, 25 bp, Homo sapien
ccataatttgttctaggttacaggg

SEQ ID NO: 1107716 - DNA, 25 bp, Homo sapien
ggttacagggttttcaaatagcaga

SEQ ID NO: 1107717 - DNA, 25 bp, Homo sapien
gatccaataggtgtccaatatccat

SEQ ID NO: 1107718 - DNA, 25 bp, Homo sapien
cacagagatagtgctaatccccttc

SEQ ID NO: 1107719 - DNA, 25 bp, Homo sapien
cagaatctgtgcatcctgcaattgt

SEQ ID NO: 1107720 - DNA, 25 bp, Homo sapien
caattgtcgacactgcacatgaaga

SEQ ID NO: 1107721 - DNA, 25 bp, Homo sapien
tgcacatgaagaacaaatggttcaa

SEQ ID NO: 1107722 - DNA, 25 bp, Homo sapien
ttcaaagtggcatcaccatttgctt

SEQ ID NO: 1107723 - DNA, 25 bp, Homo sapien
gcccctagtacttgacacactgaga

SEQ ID NO: 1107724 - DNA, 25 bp, Homo sapien
gatgtttacctcatgcatgctcatt

SEQ ID NO: 1107725 - DNA, 25 bp, Homo sapien
atcactgtgcccctagtacttgaca

SEQ ID NO: 1107726 - DNA, 25 bp, Homo sapien
gacagtctttaatcttgttcatcac

SEQ ID NO: 1107727 - DNA, 25 bp, Homo sapien
cacacttcaacttcagcacacccca

SEQ ID NO: 1107728 - DNA, 25 bp, Homo sapien
acacttcaacttcagcacaccccat

SEQ ID NO: 1107729 - DNA, 25 bp, Homo sapien
tccccttcaagctgtagcgggaggg

SEQ ID NO: 1107730 - DNA, 25 bp, Homo sapien
gcccaacttgggtacatgtctcctt

SEQ ID NO: 1107731 - DNA, 25 bp, Homo sapien
tagcatccctatagctccccttcct

SEQ ID NO: 1107732 - DNA, 25 bp, Homo sapien
aaacgcctgggctatcagttatgtc

SEQ ID NO: 1107733 - DNA, 25 bp, Homo sapien
gctgctcaagctccaaacctagata

SEQ ID NO: 1107734 - DNA, 25 bp, Homo sapien
gatagccccgatgctttctacttct

SEQ ID NO: 1107735 - DNA, 25 bp, Homo sapien
accatcatctatctagctgctcaag

SEQ ID NO: 1107736 - DNA, 25 bp, Homo sapien
gcgcctggcccggtctttctaatta

SEQ ID NO: 1107737 - DNA, 25 bp, Homo sapien
tcctctctttcccaccgttatgcca

SEQ ID NO: 1107738 - DNA, 25 bp, Homo sapien
tcccaccgttatgccagagttcctg

SEQ ID NO: 1107739 - DNA, 25 bp, Homo sapien
caccgttatgccagagttcctgaaa

SEQ ID NO: 1107740 - DNA, 25 bp, Homo sapien
ctctttcccaccgttatgccagagt

SEQ ID NO: 1107741 - DNA, 25 bp, Homo sapien
ttggagggactcaaggagaagacct

SEQ ID NO: 1107742 - DNA, 25 bp, Homo sapien
ctaaagtaagaagactagtcgggag

SEQ ID NO: 1107743 - DNA, 25 bp, Homo sapien
gacaatggtaaagactgaggttagg

SEQ ID NO: 1107744 - DNA, 25 bp, Homo sapien
gggcagcatggataggacctataac

SEQ ID NO: 1107745 - DNA, 25 bp, Homo sapien
gcatctgcaatgttctaggctccct

SEQ ID NO: 1107746 - DNA, 25 bp, Homo sapien
tggcaagaaaatgttgaagagaagc

SEQ ID NO: 1107747 - DNA, 25 bp, Homo sapien
taaggcatgaagatacagggtgact

SEQ ID NO: 1107748 - DNA, 25 bp, Homo sapien
ggtgactataacatgacctctggct

SEQ ID NO: 1107749 - DNA, 25 bp, Homo sapien
acttctaagccatgtgtactccgga

SEQ ID NO: 1107750 - DNA, 25 bp, Homo sapien
ctaagccatgtgtactccggacagc

SEQ ID NO: 1107751 - DNA, 25 bp, Homo sapien
cccttatggcttaatggaacttcta

SEQ ID NO: 1107752 - DNA, 25 bp, Homo sapien
tcctccattttttgatttgccacat

SEQ ID NO: 1107753 - DNA, 25 bp, Homo sapien
attttatagttggtgaacgtggctc

SEQ ID NO: 1107754 - DNA, 25 bp, Homo sapien
taacttcaccaggtgtacagttagt

SEQ ID NO: 1107755 - DNA, 25 bp, Homo sapien
tgatcttgggctctatttataagct

SEQ ID NO: 1107756 - DNA, 25 bp, Homo sapien
tggtgaacgtggctcaattaacttc

SEQ ID NO: 1107757 - DNA, 25 bp, Homo sapien
ttaatccagggctagaatgctggtg

SEQ ID NO: 1107758 - DNA, 25 bp, Homo sapien
ggcaaaattgaatggtgcaaaagaa

SEQ ID NO: 1107759 - DNA, 25 bp, Homo sapien
cagggctagaatgctggtggcaaaa

SEQ ID NO: 1107760 - DNA, 25 bp, Homo sapien
ggtggcaaaattgaatggtgcaaaa

SEQ ID NO: 1107761 - DNA, 25 bp, Homo sapien
ttttaaggatagacaagacttgaac

SEQ ID NO: 1107762 - DNA, 25 bp, Homo sapien
cctagaaagggtaaagatgatataa

SEQ ID NO: 1107763 - DNA, 25 bp, Homo sapien
ttaggacataggtagagagattggc

SEQ ID NO: 1107764 - DNA, 25 bp, Homo sapien
gcaagatggaaaggacttaggacat

SEQ ID NO: 1107765 - DNA, 25 bp, Homo sapien
tagcgcagcgagttcagcagcaaat

SEQ ID NO: 1107766 - DNA, 25 bp, Homo sapien
tccagcattagggaacagactgccc

SEQ ID NO: 1107767 - DNA, 25 bp, Homo sapien
cacaattacaggtttcccggagctt

SEQ ID NO: 1107768 - DNA, 25 bp, Homo sapien
tagttttattgaccctgtgacgccc

SEQ ID NO: 1107769 - DNA, 25 bp, Homo sapien
gatttctcctaggtagggctccttc

SEQ ID NO: 1107770 - DNA, 25 bp, Homo sapien
ttctcctaggtagtgccccttcgca

SEQ ID NO: 1107771 - DNA, 25 bp, Homo sapien
cctgtcagctgtaggggatttctcc

SEQ ID NO: 1107772 - DNA, 25 bp, Homo sapien
tgatttcttctcctaggtagggccc

SEQ ID NO: 1107773 - DNA, 25 bp, Homo sapien
gggtgacggactcagggtctgcgct

SEQ ID NO: 1107774 - DNA, 25 bp, Homo sapien
ctgcgctcggctccttcatggtagc

SEQ ID NO: 1107775 - DNA, 25 bp, Homo sapien
ggactcagggtctgcgctcggctcc

SEQ ID NO: 1107776 - DNA, 25 bp, Homo sapien
cttcatggtagcctcgtctctccct

SEQ ID NO: 1107777 - DNA, 25 bp, Homo sapien
gtcaacactgcccttccggctgagg

SEQ ID NO: 1107778 - DNA, 25 bp, Homo sapien
gctttgctcaaacattgcgccttcc

SEQ ID NO: 1107779 - DNA, 25 bp, Homo sapien
gaaactgcacaagctctaccacatc

SEQ ID NO: 1107780 - DNA, 25 bp, Homo sapien
ggtggtgaaaaactgatctcgcatg

SEQ ID NO: 1107781 - DNA, 25 bp, Homo sapien
actgctgttgactggggtaactgaa

SEQ ID NO: 1107782 - DNA, 25 bp, Homo sapien
gactgctgttgactggggtaactga

SEQ ID NO: 1107783 - DNA, 25 bp, Homo sapien
ctgctgttgactggggtaactgaac

SEQ ID NO: 1107784 - DNA, 25 bp, Homo sapien
aaagtttgtgtgtaaccagtagcca

SEQ ID NO: 1107785 - DNA, 25 bp, Homo sapien
tacacaaagtttgtgtgtaaccagt

SEQ ID NO: 1107786 - DNA, 25 bp, Homo sapien
gtttgtgtgtaaccagtagccagca

SEQ ID NO: 1107787 - DNA, 25 bp, Homo sapien
gtgtaaccagtagccagcaacagtt

SEQ ID NO: 1107788 - DNA, 25 bp, Homo sapien
ggttacagggttttcaaatagcaga

SEQ ID NO: 1107789 - DNA, 25 bp, Homo sapien
ccataatttgttctaggttacaggg

SEQ ID NO: 1107790 - DNA, 25 bp, Homo sapien
cacagagatagtgctaatccccttc

SEQ ID NO: 1107791 - DNA, 25 bp, Homo sapien
gatccaataggtgtccaatatccat

SEQ ID NO: 1107792 - DNA, 25 bp, Homo sapien
gcactagtaagctcacaaatagcag

SEQ ID NO: 1107793 - DNA, 25 bp, Homo sapien
cactagtaagctcacaaatagcagt

SEQ ID NO: 1107794 - DNA, 25 bp, Homo sapien
gcagcactagtaagctcacaaatag

SEQ ID NO: 1107795 - DNA, 25 bp, Homo sapien
cagcagcactagtaagctcacaaat

SEQ ID NO: 1107796 - DNA, 25 bp, Homo sapien
cagaatctgtgcatcctgcaattgt

SEQ ID NO: 1107797 - DNA, 25 bp, Homo sapien
caattgtcgacactgcacatgaaga

SEQ ID NO: 1107798 - DNA, 25 bp, Homo sapien
tgcacatgaagaacaaatggttcaa

SEQ ID NO: 1107799 - DNA, 25 bp, Homo sapien
ttcaaagtggcatcaccatttgctt

SEQ ID NO: 1107800 - DNA, 25 bp, Homo sapien
gatgtttacctcatgcatgctcatt

SEQ ID NO: 1107801 - DNA, 25 bp, Homo sapien
atcactgtgcccctagtacttgaca

SEQ ID NO: 1107802 - DNA, 25 bp, Homo sapien
gacagtctttaatcttgttcatcac

SEQ ID NO: 1107803 - DNA, 25 bp, Homo sapien
gcccctagtacttgacacactgaga

SEQ ID NO: 1107804 - DNA, 25 bp, Homo sapien
acacttcaacttcagcacaccccat

SEQ ID NO: 1107805 - DNA, 25 bp, Homo sapien
cacacttcaacttcagcacacccca

SEQ ID NO: 1107806 - DNA, 25 bp, Homo sapien
gatacacctgcgaaccattggagga

SEQ ID NO: 1107807 - DNA, 25 bp, Homo sapien
tctttgtgggaaggaccatactcgg

SEQ ID NO: 1107808 - DNA, 25 bp, Homo sapien
gggctcagtccctatgaaatgctgt

SEQ ID NO: 1107809 - DNA, 25 bp, Homo sapien
tcagctcaggagtcccaagatcagc

SEQ ID NO: 1107810 - DNA, 25 bp, Homo sapien
tccccttcaagctgtagcgggaggg

SEQ ID NO: 1107811 - DNA, 25 bp, Homo sapien
tagcatccctatagctccccttcct

SEQ ID NO: 1107812 - DNA, 25 bp, Homo sapien
aaacgcctgggctatcagttatgtc

SEQ ID NO: 1107813 - DNA, 25 bp, Homo sapien
gcccaacttgggtacatgtctcctt

SEQ ID NO: 1107814 - DNA, 25 bp, Homo sapien
accatcatctatctagctgctcaag

SEQ ID NO: 1107815 - DNA, 25 bp, Homo sapien
gatagccccgatgctttctacttct

SEQ ID NO: 1107816 - DNA, 25 bp, Homo sapien
gcgcctggcccggtctttctaatta

SEQ ID NO: 1107817 - DNA, 25 bp, Homo sapien
gctgctcaagctccaaacctagata

SEQ ID NO: 1107818 - DNA, 25 bp, Homo sapien
tacacatatatacgcacccatatat

SEQ ID NO: 1107819 - DNA, 25 bp, Homo sapien
tatacacatatatacgcacccatat

SEQ ID NO: 1107820 - DNA, 25 bp, Homo sapien
gtgtatacacatatatacgcaccca

SEQ ID NO: 1107821 - DNA, 25 bp, Homo sapien
tatgtacacatgtgtatacatatac

SEQ ID NO: 1107822 - DNA, 25 bp, Homo sapien
taaccagatcatctgtttggctcca

SEQ ID NO: 1107823 - DNA, 25 bp, Homo sapien
cagatcatctgtttggctccacaaa

SEQ ID NO: 1107824 - DNA, 25 bp, Homo sapien
tactgtgggtaaccagatcatctgt

SEQ ID NO: 1107825 - DNA, 25 bp, Homo sapien
tacattttgatactgtgggtaacca

SEQ ID NO: 1107826 - DNA, 25 bp, Homo sapien
tcccaccgttatgccagagttcctg

SEQ ID NO: 1107827 - DNA, 25 bp, Homo sapien
tcctctctttcccaccgttatgcca

SEQ ID NO: 1107828 - DNA, 25 bp, Homo sapien
caccgttatgccagagttcctgaaa

SEQ ID NO: 1107829 - DNA, 25 bp, Homo sapien
ctctttcccaccgttatgccagagt

SEQ ID NO: 1107830 - DNA, 25 bp, Homo sapien
gacaatggtaaagactgaggttagg

SEQ ID NO: 1107831 - DNA, 25 bp, Homo sapien
ttggagggactcaaggagaagacct

SEQ ID NO: 1107832 - DNA, 25 bp, Homo sapien
ctaaagtaagaagactagtcgggag

SEQ ID NO: 1107833 - DNA, 25 bp, Homo sapien
gggcagcatggataggacctataac

SEQ ID NO: 1107834 - DNA, 25 bp, Homo sapien
ggtgactataacatgacctctggct

SEQ ID NO: 1107835 - DNA, 25 bp, Homo sapien
taaggcatgaagatacagggtgact

SEQ ID NO: 1107836 - DNA, 25 bp, Homo sapien
tggcaagaaaatgttgaagagaagc

SEQ ID NO: 1107837 - DNA, 25 bp, Homo sapien
gcatctgcaatgttctaggctccct

SEQ ID NO: 1107838 - DNA, 25 bp, Homo sapien
tatggcttaatggaacttctaagcc

SEQ ID NO: 1107839 - DNA, 25 bp, Homo sapien
tcctccattttttgatttgccacat

SEQ ID NO: 1107840 - DNA, 25 bp, Homo sapien
cccttatggcttaatggaacttcta

SEQ ID NO: 1107841 - DNA, 25 bp, Homo sapien
ttctaagccatgtgtactccggaca

SEQ ID NO: 1107842 - DNA, 25 bp, Homo sapien
gactggtatccttctcatgttccac

SEQ ID NO: 1107843 - DNA, 25 bp, Homo sapien
tcttgtcaccatcttaggtgatgtc

SEQ ID NO: 1107844 - DNA, 25 bp, Homo sapien
gatgtcaatgactggtatccttctc

SEQ ID NO: 1107845 - DNA, 25 bp, Homo sapien
gaaaacttctatgcttgacttgatc

SEQ ID NO: 1107846 - DNA, 25 bp, Homo sapien
tagtcatcgtttccctttccaaagc

SEQ ID NO: 1107847 - DNA, 25 bp, Homo sapien
gatcttgggatgtaagttagtcatc

SEQ ID NO: 1107848 - DNA, 25 bp, Homo sapien
cactgggcacgtgttttttctgggt

SEQ ID NO: 1107849 - DNA, 25 bp, Homo sapien
tttctttagtaatacactgggcacg

SEQ ID NO: 1107850 - DNA, 25 bp, Homo sapien
ttacggccaagacacatcagaacca

SEQ ID NO: 1107851 - DNA, 25 bp, Homo sapien
tagaaacattacggccaagacacat

SEQ ID NO: 1107852 - DNA, 25 bp, Homo sapien
aaacattacggccaagacacatcag

SEQ ID NO: 1107853 - DNA, 25 bp, Homo sapien
ggccaagacacatcagaaccaaagc

SEQ ID NO: 1107854 - DNA, 25 bp, Homo sapien
ttcaggtgaagtcgtaggataagcc

SEQ ID NO: 1107855 - DNA, 25 bp, Homo sapien
gaagctctgcacttgtcattactgg

SEQ ID NO: 1107856 - DNA, 25 bp, Homo sapien
tgctgagagcttagatgacaactgc

SEQ ID NO: 1107857 - DNA, 25 bp, Homo sapien
tgcacatcctctgggcaacaaagtt

SEQ ID NO: 1107858 - DNA, 25 bp, Homo sapien
aaagtgtacacatgaaatccctggc

SEQ ID NO: 1107859 - DNA, 25 bp, Homo sapien
gaaactgccttagacccaatggtaa

SEQ ID NO: 1107860 - DNA, 25 bp, Homo sapien
tatgactgtcaccacaaacgtgggt

SEQ ID NO: 1107861 - DNA, 25 bp, Homo sapien
catgctagattagaacggcccttca

SEQ ID NO: 1107862 - DNA, 25 bp, Homo sapien
tctttggtaataatgcttagcttat

SEQ ID NO: 1107863 - DNA, 25 bp, Homo sapien
ctttggtaataatgcttagcttatt

SEQ ID NO: 1107864 - DNA, 25 bp, Homo sapien
tcaataaattaaccttggctcacaa

SEQ ID NO: 1107865 - DNA, 25 bp, Homo sapien
aataaattaaccttggctcacaatg

SEQ ID NO: 1107866 - DNA, 25 bp, Homo sapien
aaattaaccttggctcacaatgaac

SEQ ID NO: 1107867 - DNA, 25 bp, Homo sapien
taaattaaccttggctcacaatgaa

SEQ ID NO: 1107868 - DNA, 25 bp, Homo sapien
gctgctgctggtaatcacttttgtg

SEQ ID NO: 1107869 - DNA, 25 bp, Homo sapien
aacaaatgcattaattaccaatagt

SEQ ID NO: 1107870 - DNA, 25 bp, Homo sapien
ttaccaatagttttgtccacatttc

SEQ ID NO: 1107871 - DNA, 25 bp, Homo sapien
tttctaccagatttgcctggtgagc

SEQ ID NO: 1107872 - DNA, 25 bp, Homo sapien
aaacttgactatccttaataggcct

SEQ ID NO: 1107873 - DNA, 25 bp, Homo sapien
acttgactatccttaataggccttt

SEQ ID NO: 1107874 - DNA, 25 bp, Homo sapien
aacttgactatccttaataggcctt

SEQ ID NO: 1107875 - DNA, 25 bp, Homo sapien
gcttatttggcgcactgaggaattc

SEQ ID NO: 1107876 - DNA, 25 bp, Homo sapien
tgtaatgcaaacagtcggagacata

SEQ ID NO: 1107877 - DNA, 25 bp, Homo sapien
ggagacatatgtccctttaccatgc

SEQ ID NO: 1107878 - DNA, 25 bp, Homo sapien
tctgaagatgcatcaaatagaatgt

SEQ ID NO: 1107879 - DNA, 25 bp, Homo sapien
gagccaatactcaccgagagagcag

SEQ ID NO: 1107880 - DNA, 25 bp, Homo sapien
caggatttccctggtgagccaatac

SEQ ID NO: 1107881 - DNA, 25 bp, Homo sapien
gctgagaccgagatgtcaggatttc

SEQ ID NO: 1107882 - DNA, 25 bp, Homo sapien
tatggagtttcctcggacatgaggc

SEQ ID NO: 1107883 - DNA, 25 bp, Homo sapien
gttaggtagttgactgccacatgat

SEQ ID NO: 1107884 - DNA, 25 bp, Homo sapien
tatgaggtgtgaccccagttaggta

SEQ ID NO: 1107885 - DNA, 25 bp, Homo sapien
gaccccagttaggtagttgactgcc

SEQ ID NO: 1107886 - DNA, 25 bp, Homo sapien
gaaacagcctgaatatgaggtgtga

SEQ ID NO: 1107887 - DNA, 25 bp, Homo sapien
ctccttgtgttttatttttgtcatc

SEQ ID NO: 1107888 - DNA, 25 bp, Homo sapien
tgtgttttatttttgtcatcttttg

SEQ ID NO: 1107889 - DNA, 25 bp, Homo sapien
ctctccttgtgttttatttttgtca

SEQ ID NO: 1107890 - DNA, 25 bp, Homo sapien
gttttatttttgtcatcttttgtca

SEQ ID NO: 1107891 - DNA, 25 bp, Homo sapien
cagtattttcgaatcaactccaagg

SEQ ID NO: 1107892 - DNA, 25 bp, Homo sapien
tcagtattttcgaatcaactccaag

SEQ ID NO: 1107893 - DNA, 25 bp, Homo sapien
gtatgttgtgtgtttgtttttgttg

SEQ ID NO: 1107894 - DNA, 25 bp, Homo sapien
atgttgtgtgtttgtttttgttggt

SEQ ID NO: 1107895 - DNA, 25 bp, Homo sapien
tgtgtgtttgtttttgttggtttca

SEQ ID NO: 1107896 - DNA, 25 bp, Homo sapien
tatgttgtgtgtttgtttttgttgg

SEQ ID NO: 1107897 - DNA, 25 bp, Homo sapien
agtgcatataactgacagttttgtc

SEQ ID NO: 1107898 - DNA, 25 bp, Homo sapien
tgctaaaagagatatacgggaccat

SEQ ID NO: 1107899 - DNA, 25 bp, Homo sapien
tgtcatgctaaaagagatatacggg

SEQ ID NO: 1107900 - DNA, 25 bp, Homo sapien
agaaactggtgtggatggatttgta

SEQ ID NO: 1107901 - DNA, 25 bp, Homo sapien
aatgcttcatgctaaaatctctcaa

SEQ ID NO: 1107902 - DNA, 25 bp, Homo sapien
atcgtctcagtgcaaaatctcctca

SEQ ID NO: 1107903 - DNA, 25 bp, Homo sapien
tcaacaatgcttcatgctaaaatct

SEQ ID NO: 1107904 - DNA, 25 bp, Homo sapien
catcgtctcagtgcaaaatctcctc

SEQ ID NO: 1107905 - DNA, 25 bp, Homo sapien
gagagccacagcctaagagactcca

SEQ ID NO: 1107906 - DNA, 25 bp, Homo sapien
gattgctcttggctataagaacagg

SEQ ID NO: 1107907 - DNA, 25 bp, Homo sapien
tccctctttaagattgctcttggct

SEQ ID NO: 1107908 - DNA, 25 bp, Homo sapien
catgatatcttctaaccacccttct

SEQ ID NO: 1107909 - DNA, 25 bp, Homo sapien
ggaaaggtgctttaggtcacagtga

SEQ ID NO: 1107910 - DNA, 25 bp, Homo sapien
gaagagggtcagagttgggacggta

SEQ ID NO: 1107911 - DNA, 25 bp, Homo sapien
gtttggcagattagttggcatattc

SEQ ID NO: 1107912 - DNA, 25 bp, Homo sapien
tcagagttgggacggtattggaaag

SEQ ID NO: 1107913 - DNA, 25 bp, Homo sapien
tcttcccattctcagaaggatgaac

SEQ ID NO: 1107914 - DNA, 25 bp, Homo sapien
cattctcagaaggatgaacctccat

SEQ ID NO: 1107915 - DNA, 25 bp, Homo sapien
tagaataatataaccatggattggc

SEQ ID NO: 1107916 - DNA, 25 bp, Homo sapien
aatataaccatggattggcctgatc

SEQ ID NO: 1107917 - DNA, 25 bp, Homo sapien
tcatcagcaaggccttctttggtca

SEQ ID NO: 1107918 - DNA, 25 bp, Homo sapien
ccttctttggtcatgaaaaagtcac

SEQ ID NO: 1107919 - DNA, 25 bp, Homo sapien
cagcaaggccttctttggtcatgaa

SEQ ID NO: 1107920 - DNA, 25 bp, Homo sapien
gtttcatcagcaaggccttctttgg

SEQ ID NO: 1107921 - DNA, 25 bp, Homo sapien
ttttcaagacaaatgatgaacactt

SEQ ID NO: 1107922 - DNA, 25 bp, Homo sapien
gaagcaaggattagttttagatttc

SEQ ID NO: 1107923 - DNA, 25 bp, Homo sapien
ctgaagcaaggattagttttagatt

SEQ ID NO: 1107924 - DNA, 25 bp, Homo sapien
ttcaagacaaatgatgaacacttgg

SEQ ID NO: 1107925 - DNA, 25 bp, Homo sapien
gacacccagaggcacggtgagatga

SEQ ID NO: 1107926 - DNA, 25 bp, Homo sapien
ggcacggtgagatgaatacctaacc

SEQ ID NO: 1107927 - DNA, 25 bp, Homo sapien
ttgatacttgagtgggattgggtga

SEQ ID NO: 1107928 - DNA, 25 bp, Homo sapien
atacctaacctggacctttcctgca

SEQ ID NO: 1107929 - DNA, 25 bp, Homo sapien
atgtgtacagagattggaagtgctc

SEQ ID NO: 1107930 - DNA, 25 bp, Homo sapien
tgtgtacagagattggaagtgctct

SEQ ID NO: 1107931 - DNA, 25 bp, Homo sapien
tgtacagagattggaagtgctcttg

SEQ ID NO: 1107932 - DNA, 25 bp, Homo sapien
gatgtgtacagagattggaagtgct

SEQ ID NO: 1107933 - DNA, 25 bp, Homo sapien
tgtagcatgtgactcaaccaaatcc

SEQ ID NO: 1107934 - DNA, 25 bp, Homo sapien
taagatatagaacaggaacggacac

SEQ ID NO: 1107935 - DNA, 25 bp, Homo sapien
tctacatcgacgtaaaagcagacac

SEQ ID NO: 1107936 - DNA, 25 bp, Homo sapien
gaagggcagttgtcttgaagtcagc

SEQ ID NO: 1107937 - DNA, 25 bp, Homo sapien
agaacataattgtccacttccagga

SEQ ID NO: 1107938 - DNA, 25 bp, Homo sapien
gtggacatcagtggatttaccagga

SEQ ID NO: 1107939 - DNA, 25 bp, Homo sapien
gctcaggatctctccaattctcttt

SEQ ID NO: 1107940 - DNA, 25 bp, Homo sapien
tccttggtggacatcagtggattta

SEQ ID NO: 1107941 - DNA, 25 bp, Homo sapien
aagtagccagcacggtatcctgcag

SEQ ID NO: 1107942 - DNA, 25 bp, Homo sapien
caagccccactggttgacacaggta

SEQ ID NO: 1107943 - DNA, 25 bp, Homo sapien
tgacacgtgctgaagtagcctccat

SEQ ID NO: 1107944 - DNA, 25 bp, Homo sapien
cctgcaggatacagtccataaggtg

SEQ ID NO: 1107945 - DNA, 25 bp, Homo sapien
aatgtatcacctctgtagatatgac

SEQ ID NO: 1107946 - DNA, 25 bp, Homo sapien
gctgtgacttcttttacgaattcca

SEQ ID NO: 1107947 - DNA, 25 bp, Homo sapien
gcaatcttgtatttcccatgactta

SEQ ID NO: 1107948 - DNA, 25 bp, Homo sapien
gttctactctcatcttccttcattc

SEQ ID NO: 1107949 - DNA, 25 bp, Homo sapien
cttggtaaatgttattccatccctt

SEQ ID NO: 1107950 - DNA, 25 bp, Homo sapien
gcttggtaaatgttattccatccct

SEQ ID NO: 1107951 - DNA, 25 bp, Homo sapien
ttgcttggtaaatgttattccatcc

SEQ ID NO: 1107952 - DNA, 25 bp, Homo sapien
atttgcttggtaaatgttattccat

SEQ ID NO: 1107953 - DNA, 25 bp, Homo sapien
gatttgaacggtctcattgggaatt

SEQ ID NO: 1107954 - DNA, 25 bp, Homo sapien
aatgatgattctcttgcataggatt

SEQ ID NO: 1107955 - DNA, 25 bp, Homo sapien
ttctgaataaagagccattccttgg

SEQ ID NO: 1107956 - DNA, 25 bp, Homo sapien
aataaagagccattccttggttggg

SEQ ID NO: 1107957 - DNA, 25 bp, Homo sapien
catctacgacttcaatttgcctcat

SEQ ID NO: 1107958 - DNA, 25 bp, Homo sapien
tattgtaaccactacaaactgtggg

SEQ ID NO: 1107959 - DNA, 25 bp, Homo sapien
cattattgtaaccactacaaactgt

SEQ ID NO: 1107960 - DNA, 25 bp, Homo sapien
ttgtcataggtccaattagttccat

SEQ ID NO: 1107961 - DNA, 25 bp, Homo sapien
aaggtcttttgtcataggtccaatt

SEQ ID NO: 1107962 - DNA, 25 bp, Homo sapien
tactatcctactgaaaccagatttg

SEQ ID NO: 1107963 - DNA, 25 bp, Homo sapien
atttgtagctcagaactgctgtttc

SEQ ID NO: 1107964 - DNA, 25 bp, Homo sapien
tactgaaaccagatttgtagctcag

SEQ ID NO: 1107965 - DNA, 25 bp, Homo sapien
tggctttctgggctactatcctact

SEQ ID NO: 1107966 - DNA, 25 bp, Homo sapien
ctggtagtgatttgtcatttaccag

SEQ ID NO: 1107967 - DNA, 25 bp, Homo sapien
aggttttgggcttgcagccaggtca

SEQ ID NO: 1107968 - DNA, 25 bp, Homo sapien
ggttttgggcttgcagccaggtcag

SEQ ID NO: 1107969 - DNA, 25 bp, Homo sapien
ttgtctgcatcgaagtggacgttgc

SEQ ID NO: 1107970 - DNA, 25 bp, Homo sapien
ttctcgcttgtctgcatcgaagtgg

SEQ ID NO: 1107971 - DNA, 25 bp, Homo sapien
tcgaagtggacgttgcaagcaattc

SEQ ID NO: 1107972 - DNA, 25 bp, Homo sapien
aggctttccttctcgcttgtctgca

SEQ ID NO: 1107973 - DNA, 25 bp, Homo sapien
ccgatggtcagttgttgtggcaata

SEQ ID NO: 1107974 - DNA, 25 bp, Homo sapien
tcttctgattaggttctccgatggt

SEQ ID NO: 1107975 - DNA, 25 bp, Homo sapien
cagttggtatcctcttctgattagg

SEQ ID NO: 1107976 - DNA, 25 bp, Homo sapien
ggcaatagataattgaccaaaggca

SEQ ID NO: 1107977 - DNA, 25 bp, Homo sapien
cctcgagagaaacgccctggagtca

SEQ ID NO: 1107978 - DNA, 25 bp, Homo sapien
tgttgggagcatccccaccgcgcgg

SEQ ID NO: 1107979 - DNA, 25 bp, Homo sapien
aggcaggtccccacggctttcaggc

SEQ ID NO: 1107980 - DNA, 25 bp, Homo sapien
gctggcgcctgccttcgaaagcgac

SEQ ID NO: 1107981 - DNA, 25 bp, Homo sapien
tgctcagttcctgcatctttcaagc

SEQ ID NO: 1107982 - DNA, 25 bp, Homo sapien
ttgctcagttcctgcatctttcaag

SEQ ID NO: 1107983 - DNA, 25 bp, Homo sapien
tgatagttctttaccactccagcac

SEQ ID NO: 1107984 - DNA, 25 bp, Homo sapien
aactactttgcggtgtttgtcctct

SEQ ID NO: 1107985 - DNA, 25 bp, Homo sapien
cctctttagggtgagttcagaaatg

SEQ ID NO: 1107986 - DNA, 25 bp, Homo sapien
gacgtccgacgcgaatgcctgactt

SEQ ID NO: 1107987 - DNA, 25 bp, Homo sapien
ctggatgtagaggagccaccaaagg

SEQ ID NO: 1107988 - DNA, 25 bp, Homo sapien
tggatgtagaggagccaccaaaggc

SEQ ID NO: 1107989 - DNA, 25 bp, Homo sapien
caaaggcccaatttccccagtgaag

SEQ ID NO: 1107990 - DNA, 25 bp, Homo sapien
agggtaggtcaatgttcttcagcga

SEQ ID NO: 1107991 - DNA, 25 bp, Homo sapien
ctccggtgtaactcgtaaagctatg

SEQ ID NO: 1107992 - DNA, 25 bp, Homo sapien
acacttccacctccggtgtaactcg

SEQ ID NO: 1107993 - DNA, 25 bp, Homo sapien
ccacaactttggtgtctaaggttct

SEQ ID NO: 1107994 - DNA, 25 bp, Homo sapien
cgaccgcccacaactttggtgtcta

SEQ ID NO: 1107995 - DNA, 25 bp, Homo sapien
tctggaggaccaatagcggaaagcc

SEQ ID NO: 1107996 - DNA, 25 bp, Homo sapien
cactgtgggccaagactgaggtttg

SEQ ID NO: 1107997 - DNA, 25 bp, Homo sapien
ggtgtttctttccagccggttcgca

SEQ ID NO: 1107998 - DNA, 25 bp, Homo sapien
gccaagttctgcgaccaagagtctg

SEQ ID NO: 1107999 - DNA, 25 bp, Homo sapien
acgccagtggaggtcgccaaaagcg

SEQ ID NO: 1108000 - DNA, 25 bp, Homo sapien
ttttattcacgccagtggaggtcgc

SEQ ID NO: 1108001 - DNA, 25 bp, Homo sapien
gtgcttttattcacgccagtggagg

SEQ ID NO: 1108002 - DNA, 25 bp, Homo sapien
gcgggcgagggcctccgtctgggac

SEQ ID NO: 1108003 - DNA, 25 bp, Homo sapien
tcccagactccgttttataccttgc

SEQ ID NO: 1108004 - DNA, 25 bp, Homo sapien
cccagactccgttttataccttgct

SEQ ID NO: 1108005 - DNA, 25 bp, Homo sapien
cagagctgtatacgggctcaccttg

SEQ ID NO: 1108006 - DNA, 25 bp, Homo sapien
atggcagagctgtatacgggctcac

SEQ ID NO: 1108007 - DNA, 25 bp, Homo sapien
gcagagctgtatacgggctcacctt

SEQ ID NO: 1108008 - DNA, 25 bp, Homo sapien
cagaatctgcataacccctcagaga

SEQ ID NO: 1108009 - DNA, 25 bp, Homo sapien
taagaaggtgcggattctggcagaa

SEQ ID NO: 1108010 - DNA, 25 bp, Homo sapien
ggagactttcgcgatcataagaagg

SEQ ID NO: 1108011 - DNA, 25 bp, Homo sapien
caagggtacagtgggccataggact

SEQ ID NO: 1108012 - DNA, 25 bp, Homo sapien
tggcagaattctggttggcgactcc

SEQ ID NO: 1108013 - DNA, 25 bp, Homo sapien
gagccttccgcctcggtaattctta

SEQ ID NO: 1108014 - DNA, 25 bp, Homo sapien
cgagcagctgcgaaatttgtaatcg

SEQ ID NO: 1108015 - DNA, 25 bp, Homo sapien
ggctgcgagcagctgcgaaatttgt

SEQ ID NO: 1108016 - DNA, 25 bp, Homo sapien
tttgtaatcgtctaatgagccttcc

SEQ ID NO: 1108017 - DNA, 25 bp, Homo sapien
ccagagggtggaacctaatataaag

SEQ ID NO: 1108018 - DNA, 25 bp, Homo sapien
tttccagagggtggaacctaatata

SEQ ID NO: 1108019 - DNA, 25 bp, Homo sapien
tccagagggtggaacctaatataaa

SEQ ID NO: 1108020 - DNA, 25 bp, Homo sapien
cagagggtggaacctaatataaagg

SEQ ID NO: 1108021 - DNA, 25 bp, Homo sapien
taatgctacaagtgtgtcttcgtcc

SEQ ID NO: 1108022 - DNA, 25 bp, Homo sapien
tgaccactttctgatgaaccgttct

SEQ ID NO: 1108023 - DNA, 25 bp, Homo sapien
ttcgtccaaagaggccgctgtggcc

SEQ ID NO: 1108024 - DNA, 25 bp, Homo sapien
ctgatgccgagaaggataatgctac

SEQ ID NO: 1108025 - DNA, 25 bp, Homo sapien
gctccggcacgtcctttgctactag

SEQ ID NO: 1108026 - DNA, 25 bp, Homo sapien
atctgatcgttcttccaatacatgg

SEQ ID NO: 1108027 - DNA, 25 bp, Homo sapien
aatacatggcactgctagggctgct

SEQ ID NO: 1108028 - DNA, 25 bp, Homo sapien
gcttatcacataccaactccagagg

SEQ ID NO: 1108029 - DNA, 25 bp, Homo sapien
gtctggccaggcgtcggctcgctca

SEQ ID NO: 1108030 - DNA, 25 bp, Homo sapien
ctggtctggccaggcgtcggctcgc

SEQ ID NO: 1108031 - DNA, 25 bp, Homo sapien
agctggtctggccaggcgtcggctc

SEQ ID NO: 1108032 - DNA, 25 bp, Homo sapien
tcagctggtctggccaggcgtcggc

SEQ ID NO: 1108033 - DNA, 25 bp, Homo sapien
ctgagagcgccttaggctcgaggct

SEQ ID NO: 1108034 - DNA, 25 bp, Homo sapien
gagagcgccttaggctcgaggcttc

SEQ ID NO: 1108035 - DNA, 25 bp, Homo sapien
gagcgccttaggctcgaggcttcat

SEQ ID NO: 1108036 - DNA, 25 bp, Homo sapien
gccttaggctcgaggcttcatctcc

SEQ ID NO: 1108037 - DNA, 25 bp, Homo sapien
cgatcaccacagcaaatagaacaaa

SEQ ID NO: 1108038 - DNA, 25 bp, Homo sapien
gcaaatagaacaaaagcacgactca

SEQ ID NO: 1108039 - DNA, 25 bp, Homo sapien
caaatagaacaaaagcacgactcac

SEQ ID NO: 1108040 - DNA, 25 bp, Homo sapien
acagcaaatagaacaaaagcacgac

SEQ ID NO: 1108041 - DNA, 25 bp, Homo sapien
gatcccggaggcctttctggagccc

SEQ ID NO: 1108042 - DNA, 25 bp, Homo sapien
cattttaggtaaaatggctctcccg

SEQ ID NO: 1108043 - DNA, 25 bp, Homo sapien
agccgaacgaaacgagccaggtctc

SEQ ID NO: 1108044 - DNA, 25 bp, Homo sapien
cgcgtgactcgttttgtgccctgcg

SEQ ID NO: 1108045 - DNA, 25 bp, Homo sapien
tttgcgagtcctcccggccgccagg

SEQ ID NO: 1108046 - DNA, 25 bp, Homo sapien
cttccccggcgcctttgcgagtcct

SEQ ID NO: 1108047 - DNA, 25 bp, Homo sapien
cgccagggctgtagtccgcccgcac

SEQ ID NO: 1108048 - DNA, 25 bp, Homo sapien
actcctctgacatgagcccctgaca

SEQ ID NO: 1108049 - DNA, 25 bp, Homo sapien
gcacacacacttgccaggagggcag

SEQ ID NO: 1108050 - DNA, 25 bp, Homo sapien
gaggaggagcacgagtcctcgtccc

SEQ ID NO: 1108051 - DNA, 25 bp, Homo sapien
gaaggtatttgtccacgatctccag

SEQ ID NO: 1108052 - DNA, 25 bp, Homo sapien
atctccaggccgcaactgttgcaca

SEQ ID NO: 1108053 - DNA, 25 bp, Homo sapien
cctagggaggttctgcaaacactgc

SEQ ID NO: 1108054 - DNA, 25 bp, Homo sapien
taatataacagctggtgtgccttcc

SEQ ID NO: 1108055 - DNA, 25 bp, Homo sapien
tgaaataatcaagtttgcagaaaat

SEQ ID NO: 1108056 - DNA, 25 bp, Homo sapien
agagacaccggacatgccagcatag

SEQ ID NO: 1108057 - DNA, 25 bp, Homo sapien
tcctatcacaatcacagtcgtggcc

SEQ ID NO: 1108058 - DNA, 25 bp, Homo sapien
tttgttatgtctcctatcacaatca

SEQ ID NO: 1108059 - DNA, 25 bp, Homo sapien
tatcacaatcacagtcgtggccctg

SEQ ID NO: 1108060 - DNA, 25 bp, Homo sapien
tgactggaactctttgttatgtctc

SEQ ID NO: 1108061 - DNA, 25 bp, Homo sapien
cagtcagtagaatggatgtgtctcc

SEQ ID NO: 1108062 - DNA, 25 bp, Homo sapien
tgtgtctcccacatcgagagcagcg

SEQ ID NO: 1108063 - DNA, 25 bp, Homo sapien
cagtcataatgtactctgcagagga

SEQ ID NO: 1108064 - DNA, 25 bp, Homo sapien
gcatgccaagtgatagacattcccc

SEQ ID NO: 1108065 - DNA, 25 bp, Homo sapien
tcaaaagtatttaagtacatattta

SEQ ID NO: 1108066 - DNA, 25 bp, Homo sapien
gctggtccgagctctttttgctggt

SEQ ID NO: 1108067 - DNA, 25 bp, Homo sapien
gagggcaccttccacactaatccca

SEQ ID NO: 1108068 - DNA, 25 bp, Homo sapien
tttggatggttaacatcttgctctg

SEQ ID NO: 1108069 - DNA, 25 bp, Homo sapien
aacatcttgctctgtgaggagggca

SEQ ID NO: 1108070 - DNA, 25 bp, Homo sapien
aaaacatgtatgtagtaaatagcta

SEQ ID NO: 1108071 - DNA, 25 bp, Homo sapien
aacatgtatgtagtaaatagctaaa

SEQ ID NO: 1108072 - DNA, 25 bp, Homo sapien
aaacatgtatgtagtaaatagctaa

SEQ ID NO: 1108073 - DNA, 25 bp, Homo sapien
tatcacacgtctgctcaagcctgtc

SEQ ID NO: 1108074 - DNA, 25 bp, Homo sapien
ctgtatcacacgtctgctcaagcct

SEQ ID NO: 1108075 - DNA, 25 bp, Homo sapien
gttgttgtcctgagcaaattgtgct

SEQ ID NO: 1108076 - DNA, 25 bp, Homo sapien
tgggttgttgtcctgagcaaattgt

SEQ ID NO: 1108077 - DNA, 25 bp, Homo sapien
catccatataactatgcagcgcagt

SEQ ID NO: 1108078 - DNA, 25 bp, Homo sapien
ggcacgtaggcagaataagccattt

SEQ ID NO: 1108079 - DNA, 25 bp, Homo sapien
taggactgacgtgtttcttgtggcg

SEQ ID NO: 1108080 - DNA, 25 bp, Homo sapien
gcagttaacatcgttccatcttggg

SEQ ID NO: 1108081 - DNA, 25 bp, Homo sapien
agtccaagagttgttggtgaatgag

SEQ ID NO: 1108082 - DNA, 25 bp, Homo sapien
tgtgtcattgaatggggtaacaagg

SEQ ID NO: 1108083 - DNA, 25 bp, Homo sapien
gttgtgtcattgaatggggtaacaa

SEQ ID NO: 1108084 - DNA, 25 bp, Homo sapien
ggagtccaagagttgttggtgaatg

SEQ ID NO: 1108085 - DNA, 25 bp, Homo sapien
tgcatggcatgctacaacagaagct

SEQ ID NO: 1108086 - DNA, 25 bp, Homo sapien
tatagatacatacctgggcagcaaa

SEQ ID NO: 1108087 - DNA, 25 bp, Homo sapien
cactagagtgaactatttccagaca

SEQ ID NO: 1108088 - DNA, 25 bp, Homo sapien
tgtcttgcaggccaactatagatac

SEQ ID NO: 1108089 - DNA, 25 bp, Homo sapien
caggttcttgtactcgatagtccaa

SEQ ID NO: 1108090 - DNA, 25 bp, Homo sapien
tttcagctgagcagagaaaaatgat

SEQ ID NO: 1108091 - DNA, 25 bp, Homo sapien
caaggtgactggtctaaaatccaca

SEQ ID NO: 1108092 - DNA, 25 bp, Homo sapien
tagtccaaaagaaatcgtagcccag

SEQ ID NO: 1108093 - DNA, 25 bp, Homo sapien
cctctgccattcagtctttaagatg

SEQ ID NO: 1108094 - DNA, 25 bp, Homo sapien
tgccattcagtctttaagatggcca

SEQ ID NO: 1108095 - DNA, 25 bp, Homo sapien
tctgccattcagtctttaagatggc

SEQ ID NO: 1108096 - DNA, 25 bp, Homo sapien
gccattcagtctttaagatggccat

SEQ ID NO: 1108097 - DNA, 25 bp, Homo sapien
tggaatctcccaaaagactcccaga

SEQ ID NO: 1108098 - DNA, 25 bp, Homo sapien
cagcacttaatgacagagccctttc

SEQ ID NO: 1108099 - DNA, 25 bp, Homo sapien
acaatcagcacttaatgacagagcc

SEQ ID NO: 1108100 - DNA, 25 bp, Homo sapien
aacaggttgagcatactcacaatca

SEQ ID NO: 1108101 - DNA, 25 bp, Homo sapien
tatggaacactccacacattgcata

SEQ ID NO: 1108102 - DNA, 25 bp, Homo sapien
gaacactccacacattgcatatcat

SEQ ID NO: 1108103 - DNA, 25 bp, Homo sapien
tggaacactccacacattgcatatc

SEQ ID NO: 1108104 - DNA, 25 bp, Homo sapien
atatggaacactccacacattgcat

SEQ ID NO: 1108105 - DNA, 25 bp, Homo sapien
caggatcaaggacactggctgcggt

SEQ ID NO: 1108106 - DNA, 25 bp, Homo sapien
gtgcctcctttgtagcattgcatgg

SEQ ID NO: 1108107 - DNA, 25 bp, Homo sapien
gcactgctcctctgaaataaatcct

SEQ ID NO: 1108108 - DNA, 25 bp, Homo sapien
aagagcttccagcatgccacctgtg

SEQ ID NO: 1108109 - DNA, 25 bp, Homo sapien
ctaacatgttttagtaacaggagac

SEQ ID NO: 1108110 - DNA, 25 bp, Homo sapien
tgttttagtaacaggagacaggaaa

SEQ ID NO: 1108111 - DNA, 25 bp, Homo sapien
taacatgttttagtaacaggagaca

SEQ ID NO: 1108112 - DNA, 25 bp, Homo sapien
catgttttagtaacaggagacagga

SEQ ID NO: 1108113 - DNA, 25 bp, Homo sapien
ttccaggcagatgaatgtgcacggc

SEQ ID NO: 1108114 - DNA, 25 bp, Homo sapien
attcttccaggcagatgaatgtgca

SEQ ID NO: 1108115 - DNA, 25 bp, Homo sapien
ttaacgtggagcctgaacttgatcc

SEQ ID NO: 1108116 - DNA, 25 bp, Homo sapien
gatgaatgtgcacggctgcatgtgt

SEQ ID NO: 1108117 - DNA, 25 bp, Homo sapien
tcaaaagtgtcagttggcttcacat

SEQ ID NO: 1108118 - DNA, 25 bp, Homo sapien
tagtgacctctacctgagaatttgt

SEQ ID NO: 1108119 - DNA, 25 bp, Homo sapien
gatgtgagccacgatgtgaattatt

SEQ ID NO: 1108120 - DNA, 25 bp, Homo sapien
acattttggcaaagagccttctgca

SEQ ID NO: 1108121 - DNA, 25 bp, Homo sapien
tctgtaagaaggtttcacaattgta

SEQ ID NO: 1108122 - DNA, 25 bp, Homo sapien
ttccccagagacataggttctgtcc

SEQ ID NO: 1108123 - DNA, 25 bp, Homo sapien
aacaactaccaaagggactagtgtg

SEQ ID NO: 1108124 - DNA, 25 bp, Homo sapien
ccagagacataggttctgtccctta

SEQ ID NO: 1108125 - DNA, 25 bp, Homo sapien
accacaaagaccttcaaaggtgagc

SEQ ID NO: 1108126 - DNA, 25 bp, Homo sapien
gtgatgcctccggcaccacaaagac

SEQ ID NO: 1108127 - DNA, 25 bp, Homo sapien
tgatgcctccggcaccacaaagacc

SEQ ID NO: 1108128 - DNA, 25 bp, Homo sapien
gatgcctccggcaccacaaagacct

SEQ ID NO: 1108129 - DNA, 25 bp, Homo sapien
ggtatctcatgaaactcaacgctgg

SEQ ID NO: 1108130 - DNA, 25 bp, Homo sapien
gcttcaggtaggaactagaccacaa

SEQ ID NO: 1108131 - DNA, 25 bp, Homo sapien
tgtaagccaagagagaacgaattat

SEQ ID NO: 1108132 - DNA, 25 bp, Homo sapien
taaatgccattaggaccattgtctc

SEQ ID NO: 1108133 - DNA, 25 bp, Homo sapien
ccagttaggctgctcggggtttagg

SEQ ID NO: 1108134 - DNA, 25 bp, Homo sapien
tccacccagttggagcttcctggct

SEQ ID NO: 1108135 - DNA, 25 bp, Homo sapien
cagttaggctgctcggggtttaggg

SEQ ID NO: 1108136 - DNA, 25 bp, Homo sapien
cccagttggagcttcctggctgctt

SEQ ID NO: 1108137 - DNA, 25 bp, Homo sapien
tgtatttccctctacacgctgcttt

SEQ ID NO: 1108138 - DNA, 25 bp, Homo sapien
gtgctatgtatttccctctacacgc

SEQ ID NO: 1108139 - DNA, 25 bp, Homo sapien
tatgtatttccctctacacgctgct

SEQ ID NO: 1108140 - DNA, 25 bp, Homo sapien
gctatgtatttccctctacacgctg

SEQ ID NO: 1108141 - DNA, 25 bp, Homo sapien
taaatgaaacatggcacctggtgca

SEQ ID NO: 1108142 - DNA, 25 bp, Homo sapien
caaaagttcacgttgcctctgggaa

SEQ ID NO: 1108143 - DNA, 25 bp, Homo sapien
tctgcccatgaggtctatagacgga

SEQ ID NO: 1108144 - DNA, 25 bp, Homo sapien
tggagcacacagacctaagtttgaa

SEQ ID NO: 1108145 - DNA, 25 bp, Homo sapien
gcaggactcacatcaatgcgttcca

SEQ ID NO: 1108146 - DNA, 25 bp, Homo sapien
gattatgggtctagggtcttgcttc

SEQ ID NO: 1108147 - DNA, 25 bp, Homo sapien
tcaggatgacacaataggagcagga

SEQ ID NO: 1108148 - DNA, 25 bp, Homo sapien
aatgaagtgtggtaaaaggcccagc

SEQ ID NO: 1108149 - DNA, 25 bp, Homo sapien
atcaggagaaacaacatccggttga

SEQ ID NO: 1108150 - DNA, 25 bp, Homo sapien
caggagaaacaacatccggttgacc

SEQ ID NO: 1108151 - DNA, 25 bp, Homo sapien
ggagaaacaacatccggttgaccca

SEQ ID NO: 1108152 - DNA, 25 bp, Homo sapien
gagaaacaacatccggttgacccat

SEQ ID NO: 1108153 - DNA, 25 bp, Homo sapien
gttgggtattttcagccagaataca

SEQ ID NO: 1108154 - DNA, 25 bp, Homo sapien
tgccgtataaactctattgccttac

SEQ ID NO: 1108155 - DNA, 25 bp, Homo sapien
ctagctaggtatgccgtataaactc

SEQ ID NO: 1108156 - DNA, 25 bp, Homo sapien
tcagccagaatacatactagctagg

SEQ ID NO: 1108157 - DNA, 25 bp, Homo sapien
agtaggttttagtgtattggacatc

SEQ ID NO: 1108158 - DNA, 25 bp, Homo sapien
cttgggtaaatcctgtaacacctct

SEQ ID NO: 1108159 - DNA, 25 bp, Homo sapien
ttttagtgtattggacatccttggg

SEQ ID NO: 1108160 - DNA, 25 bp, Homo sapien
tcctttgaaccctcaggcatcattc

SEQ ID NO: 1108161 - DNA, 25 bp, Homo sapien
tacggtaggcacttgataaagcttt

SEQ ID NO: 1108162 - DNA, 25 bp, Homo sapien
tcactgtcccaagcatacggtaggc

SEQ ID NO: 1108163 - DNA, 25 bp, Homo sapien
cacttgggacttctggtgtctatca

SEQ ID NO: 1108164 - DNA, 25 bp, Homo sapien
tactgcattaacaggcgaaagaaag

SEQ ID NO: 1108165 - DNA, 25 bp, Homo sapien
ttgatttcctgacctcataaacctc

SEQ ID NO: 1108166 - DNA, 25 bp, Homo sapien
atttcctgacctcataaacctcctg

SEQ ID NO: 1108167 - DNA, 25 bp, Homo sapien
tgccttggcctctcaaagtgctggg

SEQ ID NO: 1108168 - DNA, 25 bp, Homo sapien
gatttcctgacctcataaacctcct

SEQ ID NO: 1108169 - DNA, 25 bp, Homo sapien
gcttttgcaggggagatatctgagc

SEQ ID NO: 1108170 - DNA, 25 bp, Homo sapien
agttgcttttgcaggggagatatct

SEQ ID NO: 1108171 - DNA, 25 bp, Homo sapien
gttgcttttgcaggggagatatctg

SEQ ID NO: 1108172 - DNA, 25 bp, Homo sapien
ttgcttttgcaggggagatatctga

SEQ ID NO: 1108173 - DNA, 25 bp, Homo sapien
agactgggaagagcaactttcacac

SEQ ID NO: 1108174 - DNA, 25 bp, Homo sapien
cattcttgtgctggagttaatccac

SEQ ID NO: 1108175 - DNA, 25 bp, Homo sapien
tatgactaaagagtcgggagaggac

SEQ ID NO: 1108176 - DNA, 25 bp, Homo sapien
ggttctaagccattatgcatatgac

SEQ ID NO: 1108177 - DNA, 25 bp, Homo sapien
atgatatatttgcaatataagatgc

SEQ ID NO: 1108178 - DNA, 25 bp, Homo sapien
gcaatataagatgcataagcaggct

SEQ ID NO: 1108179 - DNA, 25 bp, Homo sapien
gatatatttgcaatataagatgcat

SEQ ID NO: 1108180 - DNA, 25 bp, Homo sapien
tatttgcaatataagatgcataagc

SEQ ID NO: 1108181 - DNA, 25 bp, Homo sapien
ccaattggtctgagatttgtggtta

SEQ ID NO: 1108182 - DNA, 25 bp, Homo sapien
gagcaggccaattggtctgagattt

SEQ ID NO: 1108183 - DNA, 25 bp, Homo sapien
ggccaattggtctgagatttgtggt

SEQ ID NO: 1108184 - DNA, 25 bp, Homo sapien
gcaggccaattggtctgagatttgt

SEQ ID NO: 1108185 - DNA, 25 bp, Homo sapien
actgctgctgttataactttgtgca

SEQ ID NO: 1108186 - DNA, 25 bp, Homo sapien
tgcattagtggcagttttgtgaggc

SEQ ID NO: 1108187 - DNA, 25 bp, Homo sapien
tttgtgaggctagctgaatttttcg

SEQ ID NO: 1108188 - DNA, 25 bp, Homo sapien
tgaggatacagcattggccataatt

SEQ ID NO: 1108189 - DNA, 25 bp, Homo sapien
tggaagtgaaagctcagtatccttt

SEQ ID NO: 1108190 - DNA, 25 bp, Homo sapien
ctggaagtgaaagctcagtatcctt

SEQ ID NO: 1108191 - DNA, 25 bp, Homo sapien
gtctgcactgtaacccgtggctcct

SEQ ID NO: 1108192 - DNA, 25 bp, Homo sapien
actgtaacccgtggctcctgaagcg

SEQ ID NO: 1108193 - DNA, 25 bp, Homo sapien
ttctgtgccatattcgggaccagtt

SEQ ID NO: 1108194 - DNA, 25 bp, Homo sapien
catattcgggaccagttgtgtgtgg

SEQ ID NO: 1108195 - DNA, 25 bp, Homo sapien
tagcctttgcacgtgcactcatggc

SEQ ID NO: 1108196 - DNA, 25 bp, Homo sapien
tgatagcctttgcacgtgcactcat

SEQ ID NO: 1108197 - DNA, 25 bp, Homo sapien
cagggccttgatagcctttgcacgt

SEQ ID NO: 1108198 - DNA, 25 bp, Homo sapien
ccttgatagcctttgcacgtgcact

SEQ ID NO: 1108199 - DNA, 25 bp, Homo sapien
cctttggcaatgtgggcatgatcat

SEQ ID NO: 1108200 - DNA, 25 bp, Homo sapien
ttgaaccctttgtagtggcctgggc

SEQ ID NO: 1108201 - DNA, 25 bp, Homo sapien
tgggcatgatcatgcttcccaagct

SEQ ID NO: 1108202 - DNA, 25 bp, Homo sapien
accctttgtagtggcctgggcgcct

SEQ ID NO: 1108203 - DNA, 25 bp, Homo sapien
ctcacattggcttgcctgaaatcca

SEQ ID NO: 1108204 - DNA, 25 bp, Homo sapien
gtgtatacccacaaatgaccagatt

SEQ ID NO: 1108205 - DNA, 25 bp, Homo sapien
tgcctgatggtcaacacgtttttca

SEQ ID NO: 1108206 - DNA, 25 bp, Homo sapien
gagtgccagacgcagtaaaacctcc

SEQ ID NO: 1108207 - DNA, 25 bp, Homo sapien
ctatcagttagttttaggccagcca

SEQ ID NO: 1108208 - DNA, 25 bp, Homo sapien
cccaggttagagtgtcgctctggtc

SEQ ID NO: 1108209 - DNA, 25 bp, Homo sapien
ggtcttcagccctacttctgcactg

SEQ ID NO: 1108210 - DNA, 25 bp, Homo sapien
gaaccaaaaacctgaccgcaaatca

SEQ ID NO: 1108211 - DNA, 25 bp, Homo sapien
tagagtgtcgctctggtccacttct

SEQ ID NO: 1108212 - DNA, 25 bp, Homo sapien
tctgcttttttgagtactgattcct

SEQ ID NO: 1108213 - DNA, 25 bp, Homo sapien
tagaagatactttccaaattgaagc

SEQ ID NO: 1108214 - DNA, 25 bp, Homo sapien
ttcctggctcctctagttcatttag

SEQ ID NO: 1108215 - DNA, 25 bp, Homo sapien
ccttgagtttcttgtagcagcttgc

SEQ ID NO: 1108216 - DNA, 25 bp, Homo sapien
cattttactgtagagatgttggtaa

SEQ ID NO: 1108217 - DNA, 25 bp, Homo sapien
gctagttaaggaaatcatgctcttg

SEQ ID NO: 1108218 - DNA, 25 bp, Homo sapien
ctgtttgttggaggtagttgcttga

SEQ ID NO: 1108219 - DNA, 25 bp, Homo sapien
gatggattacagacctcacaaatga

SEQ ID NO: 1108220 - DNA, 25 bp, Homo sapien
tatcctgggccctcactattaagaa

SEQ ID NO: 1108221 - DNA, 25 bp, Homo sapien
aattcgggctcgctatcctcgagga

SEQ ID NO: 1108222 - DNA, 25 bp, Homo sapien
aaagaacgtggccactgtaaccaag

SEQ ID NO: 1108223 - DNA, 25 bp, Homo sapien
caacatctgagagcgtgaacttccc

SEQ ID NO: 1108224 - DNA, 25 bp, Homo sapien
tatgaagctatatttagaagggctg

SEQ ID NO: 1108225 - DNA, 25 bp, Homo sapien
tttgagatgatatcgcacatatcag

SEQ ID NO: 1108226 - DNA, 25 bp, Homo sapien
acatcttcattgtgagaggaattgg

SEQ ID NO: 1108227 - DNA, 25 bp, Homo sapien
aagtctgagaatgggtctattttgc

SEQ ID NO: 1108228 - DNA, 25 bp, Homo sapien
cataggtggctcttactgaggtata

SEQ ID NO: 1108229 - DNA, 25 bp, Homo sapien
ggtgtagaattgtatcatcagtgaa

SEQ ID NO: 1108230 - DNA, 25 bp, Homo sapien
tgaatgttattgaatcctactgatt

SEQ ID NO: 1108231 - DNA, 25 bp, Homo sapien
taggtgtaatgcgagtgggcatcct

SEQ ID NO: 1108232 - DNA, 25 bp, Homo sapien
aaaatagttgttttgctccacttgt

SEQ ID NO: 1108233 - DNA, 25 bp, Homo sapien
aaatgctgagcgtcccaaccaactt

SEQ ID NO: 1108234 - DNA, 25 bp, Homo sapien
tgctccacttgtatgccaagtaata

SEQ ID NO: 1108235 - DNA, 25 bp, Homo sapien
tatgccaagtaatatgtcaaatgct

SEQ ID NO: 1108236 - DNA, 25 bp, Homo sapien
tgtagctcttgtgctccccaagcag

SEQ ID NO: 1108237 - DNA, 25 bp, Homo sapien
ttgggtcaaggcctatgcagtctga

SEQ ID NO: 1108238 - DNA, 25 bp, Homo sapien
tatctgcttctatgggaatttgccc

SEQ ID NO: 1108239 - DNA, 25 bp, Homo sapien
tgaactatcagtgaccttgctgccc

SEQ ID NO: 1108240 - DNA, 25 bp, Homo sapien
gttgatacgaccaacaagaggccca

SEQ ID NO: 1108241 - DNA, 25 bp, Homo sapien
taaatcagatgtactactgtaccca

SEQ ID NO: 1108242 - DNA, 25 bp, Homo sapien
gccatgagctgaaatattgtgctga

SEQ ID NO: 1108243 - DNA, 25 bp, Homo sapien
gacttttcctgcacataagatagca

SEQ ID NO: 1108244 - DNA, 25 bp, Homo sapien
tctgtagcaatagtaatagaactgg

SEQ ID NO: 1108245 - DNA, 25 bp, Homo sapien
tgattataccactgccaagcctctg

SEQ ID NO: 1108246 - DNA, 25 bp, Homo sapien
caagcctctggtgttacttaaggct

SEQ ID NO: 1108247 - DNA, 25 bp, Homo sapien
ttgtcagccttgccaatgaaaagcc

SEQ ID NO: 1108248 - DNA, 25 bp, Homo sapien
cttttttgcaatggtcccagagcct

SEQ ID NO: 1108249 - DNA, 25 bp, Homo sapien
ttttttgcaatggtcccagagcctt

SEQ ID NO: 1108250 - DNA, 25 bp, Homo sapien
tgtccttggatatgcgggtgcaatc

SEQ ID NO: 1108251 - DNA, 25 bp, Homo sapien
tgacttgtccgctgatgtggtgtcc

SEQ ID NO: 1108252 - DNA, 25 bp, Homo sapien
ggtgcaatccgaggctgtccaaagc

SEQ ID NO: 1108253 - DNA, 25 bp, Homo sapien
tcccaaggctgtttatgacttgtcc

SEQ ID NO: 1108254 - DNA, 25 bp, Homo sapien
agcgcggaaagagagccagggcggg

SEQ ID NO: 1108255 - DNA, 25 bp, Homo sapien
tgggagggcccggttgcgctgaacg

SEQ ID NO: 1108256 - DNA, 25 bp, Homo sapien
ctgaccgcagcgcggaaagagagcc

SEQ ID NO: 1108257 - DNA, 25 bp, Homo sapien
gagggcccggttgcgctgaacggtg

SEQ ID NO: 1108258 - DNA, 25 bp, Homo sapien
ccctctccgggcaatctctgatagt

SEQ ID NO: 1108259 - DNA, 25 bp, Homo sapien
ctccgggcaatctctgatagtcctg

SEQ ID NO: 1108260 - DNA, 25 bp, Homo sapien
ttgcgtgcgccgtcgctgcgacctg

SEQ ID NO: 1108261 - DNA, 25 bp, Homo sapien
gggtcgcatcccctctccgggcaat

SEQ ID NO: 1108262 - DNA, 25 bp, Homo sapien
cggcgccgggtagccaacgcatgct

SEQ ID NO: 1108263 - DNA, 25 bp, Homo sapien
gcgctaggcggggtggcagcggtcc

SEQ ID NO: 1108264 - DNA, 25 bp, Homo sapien
aaggacggggcgctgcgctaggcgg

SEQ ID NO: 1108265 - DNA, 25 bp, Homo sapien
gggtagccaacgcatgctccgtgac

SEQ ID NO: 1108266 - DNA, 25 bp, Homo sapien
acgggtcacggccttgacatactcc

SEQ ID NO: 1108267 - DNA, 25 bp, Homo sapien
aataatacacgggtcacggccttga

SEQ ID NO: 1108268 - DNA, 25 bp, Homo sapien
ccgttccggccactcggacaataat

SEQ ID NO: 1108269 - DNA, 25 bp, Homo sapien
tgacatactccccgaacgcgggact

SEQ ID NO: 1108270 - DNA, 25 bp, Homo sapien
tattctaaagagaggatgccggcta

SEQ ID NO: 1108271 - DNA, 25 bp, Homo sapien
ttttcccgtggttctgacacagaga

SEQ ID NO: 1108272 - DNA, 25 bp, Homo sapien
tacggaaaatgaaacgctaggctac

SEQ ID NO: 1108273 - DNA, 25 bp, Homo sapien
tcgcctgacgggaggatacggaaaa

SEQ ID NO: 1108274 - DNA, 25 bp, Homo sapien
gcacctggccaaccgagggaattta

SEQ ID NO: 1108275 - DNA, 25 bp, Homo sapien
aacagaaacagcacgggatctggag

SEQ ID NO: 1108276 - DNA, 25 bp, Homo sapien
caaccatatttgtggccgtagacag

SEQ ID NO: 1108277 - DNA, 25 bp, Homo sapien
caaaggttgctattaccagaataca

SEQ ID NO: 1108278 - DNA, 25 bp, Homo sapien
gctgtgatctccaatgaaaacgaga

SEQ ID NO: 1108279 - DNA, 25 bp, Homo sapien
gtcgattggcttttgtatgctgtga

SEQ ID NO: 1108280 - DNA, 25 bp, Homo sapien
tcctggttcacgttgtcgattggct

SEQ ID NO: 1108281 - DNA, 25 bp, Homo sapien
aaatcctaatcctggttcacgttgt

SEQ ID NO: 1108282 - DNA, 25 bp, Homo sapien
gtcaaaagatagaaccgaacatata

SEQ ID NO: 1108283 - DNA, 25 bp, Homo sapien
aagtcaaaagatagaaccgaacata

SEQ ID NO: 1108284 - DNA, 25 bp, Homo sapien
tcaaaagatagaaccgaacatatac

SEQ ID NO: 1108285 - DNA, 25 bp, Homo sapien
agtcaaaagatagaaccgaacatat

SEQ ID NO: 1108286 - DNA, 25 bp, Homo sapien
cagtggactggttctactcattgaa

SEQ ID NO: 1108287 - DNA, 25 bp, Homo sapien
taaattatctgtggacagtggactg

SEQ ID NO: 1108288 - DNA, 25 bp, Homo sapien
ttattttgggctaaacactcagaaa

SEQ ID NO: 1108289 - DNA, 25 bp, Homo sapien
tgtatgtatgctgctaaaacagatc

SEQ ID NO: 1108290 - DNA, 25 bp, Homo sapien
ctagctgtgagttatcgcagctgcc

SEQ ID NO: 1108291 - DNA, 25 bp, Homo sapien
gttatcgcagctgcctttaactatt

SEQ ID NO: 1108292 - DNA, 25 bp, Homo sapien
tgtgagttatcgcagctgcctttaa

SEQ ID NO: 1108293 - DNA, 25 bp, Homo sapien
gctgtgagttatcgcagctgccttt

SEQ ID NO: 1108294 - DNA, 25 bp, Homo sapien
ggtttcaccaggatctcgatcttct

SEQ ID NO: 1108295 - DNA, 25 bp, Homo sapien
aatctctctttttattgataaacta

SEQ ID NO: 1108296 - DNA, 25 bp, Homo sapien
ttcaccaggatctcgatcttctgac

SEQ ID NO: 1108297 - DNA, 25 bp, Homo sapien
tgcgcccagccaaatctctcttttt

SEQ ID NO: 1108298 - DNA, 25 bp, Homo sapien
tcctgctgcaatgctaataaatggt

SEQ ID NO: 1108299 - DNA, 25 bp, Homo sapien
ggttgcatctaacgtcaaagattag

SEQ ID NO: 1108300 - DNA, 25 bp, Homo sapien
catgcctaggcttacagctccttta

SEQ ID NO: 1108301 - DNA, 25 bp, Homo sapien
gcacaaagcaactggtaaaagtggt

SEQ ID NO: 1108302 - DNA, 25 bp, Homo sapien
gccactgggatgatttcctctctgg

SEQ ID NO: 1108303 - DNA, 25 bp, Homo sapien
cagccactgggatgatttcctctct

SEQ ID NO: 1108304 - DNA, 25 bp, Homo sapien
ctctctggcaaatttacgagcagta

SEQ ID NO: 1108305 - DNA, 25 bp, Homo sapien
gagcagtagcttgaaattctttctg

SEQ ID NO: 1108306 - DNA, 25 bp, Homo sapien
tgttcattaaaccaagttcccaggc

SEQ ID NO: 1108307 - DNA, 25 bp, Homo sapien
ctcatatgcattccagtattaaaaa

SEQ ID NO: 1108308 - DNA, 25 bp, Homo sapien
gtcatttaatggcaagaaatatttg

SEQ ID NO: 1108309 - DNA, 25 bp, Homo sapien
aaaatgactgagtagagttccacaa

SEQ ID NO: 1108310 - DNA, 25 bp, Homo sapien
aggaagacaaaggtagaaagtcatt

SEQ ID NO: 1108311 - DNA, 25 bp, Homo sapien
taggtatagagtgcaagcttccaaa

SEQ ID NO: 1108312 - DNA, 25 bp, Homo sapien
tccaaaagtgggcaaacactgtagt

SEQ ID NO: 1108313 - DNA, 25 bp, Homo sapien
gaaggaaaaacgcatctaggtatag

SEQ ID NO: 1108314 - DNA, 25 bp, Homo sapien
taggtgcaagttaaggttggaacca

SEQ ID NO: 1108315 - DNA, 25 bp, Homo sapien
atatagaagataggaataaaacaca

SEQ ID NO: 1108316 - DNA, 25 bp, Homo sapien
tagaagataggaataaaacacaaca

SEQ ID NO: 1108317 - DNA, 25 bp, Homo sapien
aattgaccaactctagaaacggaag

SEQ ID NO: 1108318 - DNA, 25 bp, Homo sapien
tgaccaactctagaaacggaagtta

SEQ ID NO: 1108319 - DNA, 25 bp, Homo sapien
aagcatcaaaagttccaagtccaag

SEQ ID NO: 1108320 - DNA, 25 bp, Homo sapien
caatagcagtctgaacccctgtaca

SEQ ID NO: 1108321 - DNA, 25 bp, Homo sapien
gaacccctgtacatccataagccaa

SEQ ID NO: 1108322 - DNA, 25 bp, Homo sapien
ttcttcactaattaaacaagcatca

SEQ ID NO: 1108323 - DNA, 25 bp, Homo sapien
cacatcaatggctcctcagtcattc

SEQ ID NO: 1108324 - DNA, 25 bp, Homo sapien
acacatcaatggctcctcagtcatt

SEQ ID NO: 1108325 - DNA, 25 bp, Homo sapien
catcaatggctcctcagtcattctc

SEQ ID NO: 1108326 - DNA, 25 bp, Homo sapien
acatcaatggctcctcagtcattct

SEQ ID NO: 1108327 - DNA, 25 bp, Homo sapien
ggtctttataccagctacatcagag

SEQ ID NO: 1108328 - DNA, 25 bp, Homo sapien
tgctttggtctttataccagctaca

SEQ ID NO: 1108329 - DNA, 25 bp, Homo sapien
ttctgctttggtctttataccagct

SEQ ID NO: 1108330 - DNA, 25 bp, Homo sapien
tataccagctacatcagagcctgct

SEQ ID NO: 1108331 - DNA, 25 bp, Homo sapien
ttgttccttcctgcgttatagtggg

SEQ ID NO: 1108332 - DNA, 25 bp, Homo sapien
gctgacatttgacactagggccagt

SEQ ID NO: 1108333 - DNA, 25 bp, Homo sapien
taagttgctgtaagcccgtgggctg

SEQ ID NO: 1108334 - DNA, 25 bp, Homo sapien
caccctgagggtgttagtagatagt

SEQ ID NO: 1108335 - DNA, 25 bp, Homo sapien
gtggaaccaagcgtagtcccgaaga

SEQ ID NO: 1108336 - DNA, 25 bp, Homo sapien
agtggaaccaagcgtagtcccgaag

SEQ ID NO: 1108337 - DNA, 25 bp, Homo sapien
tggaaccaagcgtagtcccgaagaa

SEQ ID NO: 1108338 - DNA, 25 bp, Homo sapien
cagtggaaccaagcgtagtcccgaa

SEQ ID NO: 1108339 - DNA, 25 bp, Homo sapien
cctgaggtcacgtgttgtaatcatc

SEQ ID NO: 1108340 - DNA, 25 bp, Homo sapien
cattctcgattccacttgtatggag

SEQ ID NO: 1108341 - DNA, 25 bp, Homo sapien
ttccctgaggtcacgtgttgtaatc

SEQ ID NO: 1108342 - DNA, 25 bp, Homo sapien
ttctcgattccacttgtatggaggg

SEQ ID NO: 1108343 - DNA, 25 bp, Homo sapien
tttcctccgcaaaatcaaggcagcg

SEQ ID NO: 1108344 - DNA, 25 bp, Homo sapien
gaagcagagcactatgtaaccagca

SEQ ID NO: 1108345 - DNA, 25 bp, Homo sapien
gacaggcacatgctgttggcctcaa

SEQ ID NO: 1108346 - DNA, 25 bp, Homo sapien
tgctggtatactatagagaaacccc

SEQ ID NO: 1108347 - DNA, 25 bp, Homo sapien
tctgagtcactggtactatgggcat

SEQ ID NO: 1108348 - DNA, 25 bp, Homo sapien
cagcgtttgcagaacctgtcacaga

SEQ ID NO: 1108349 - DNA, 25 bp, Homo sapien
taccctaacagcaggaaggttgtca

SEQ ID NO: 1108350 - DNA, 25 bp, Homo sapien
tgctgggcccactttatagattaaa

SEQ ID NO: 1108351 - DNA, 25 bp, Homo sapien
aaaacttgcctagtcacgtacctag

SEQ ID NO: 1108352 - DNA, 25 bp, Homo sapien
tatggaagagctagtatttgaggtc

SEQ ID NO: 1108353 - DNA, 25 bp, Homo sapien
gataatatcggcaaataacacatgg

SEQ ID NO: 1108354 - DNA, 25 bp, Homo sapien
gtcttaataacacagtaggccctcc

SEQ ID NO: 1108355 - DNA, 25 bp, Homo sapien
ctggatcagaacgtgccaataaaaa

SEQ ID NO: 1108356 - DNA, 25 bp, Homo sapien
ggatcagaacgtgccaataaaaaat

SEQ ID NO: 1108357 - DNA, 25 bp, Homo sapien
atcagaacgtgccaataaaaaatac

SEQ ID NO: 1108358 - DNA, 25 bp, Homo sapien
tggatcagaacgtgccaataaaaaa

SEQ ID NO: 1108359 - DNA, 25 bp, Homo sapien
agtaaaggctttattagcaggagct

SEQ ID NO: 1108360 - DNA, 25 bp, Homo sapien
gctttattagcaggagctttaggat

SEQ ID NO: 1108361 - DNA, 25 bp, Homo sapien
atctgaattcctggggtatctgctt

SEQ ID NO: 1108362 - DNA, 25 bp, Homo sapien
gaattcctggggtatctgcttccac

SEQ ID NO: 1108363 - DNA, 25 bp, Homo sapien
gtaaggtcctaggataccttcatat

SEQ ID NO: 1108364 - DNA, 25 bp, Homo sapien
atacagtatcagaaactatactggg

SEQ ID NO: 1108365 - DNA, 25 bp, Homo sapien
tctgcctctaactttgggactttgg

SEQ ID NO: 1108366 - DNA, 25 bp, Homo sapien
tttgtcaagtgcagtctacctttaa

SEQ ID NO: 1108367 - DNA, 25 bp, Homo sapien
acattttctttaggcactttcacat

SEQ ID NO: 1108368 - DNA, 25 bp, Homo sapien
gaagacaattcctctagtatctgaa

SEQ ID NO: 1108369 - DNA, 25 bp, Homo sapien
ggttttatcaaaagctcccattgca

SEQ ID NO: 1108370 - DNA, 25 bp, Homo sapien
gaaaccagctccgtcaccaattaaa

SEQ ID NO: 1108371 - DNA, 25 bp, Homo sapien
ctctacaagtagctttccgaaagtt

SEQ ID NO: 1108372 - DNA, 25 bp, Homo sapien
tcatccaaagctctttgtgctaatc

SEQ ID NO: 1108373 - DNA, 25 bp, Homo sapien
caaagctctttgtgctaatccaaca

SEQ ID NO: 1108374 - DNA, 25 bp, Homo sapien
ccagggcatacttggtagcttcatc

SEQ ID NO: 1108375 - DNA, 25 bp, Homo sapien
ggagactgtggtgaaccgagattgt

SEQ ID NO: 1108376 - DNA, 25 bp, Homo sapien
gaggcggagactgtggtgaaccgag

SEQ ID NO: 1108377 - DNA, 25 bp, Homo sapien
gggaggcggagactgtggtgaaccg

SEQ ID NO: 1108378 - DNA, 25 bp, Homo sapien
gcggagactgtggtgaaccgagatt

SEQ ID NO: 1108379 - DNA, 25 bp, Homo sapien
tctgctgggactttctagaagaaat

SEQ ID NO: 1108380 - DNA, 25 bp, Homo sapien
tgggactttctagaagaaattgctg

SEQ ID NO: 1108381 - DNA, 25 bp, Homo sapien
gcctctgctgggactttctagaaga

SEQ ID NO: 1108382 - DNA, 25 bp, Homo sapien
gctgggactttctagaagaaattgc

SEQ ID NO: 1108383 - DNA, 25 bp, Homo sapien
catagtgccatgatcgagaacagga

SEQ ID NO: 1108384 - DNA, 25 bp, Homo sapien
aacatattaccaaaccatagtgcca

SEQ ID NO: 1108385 - DNA, 25 bp, Homo sapien
ccaaaccatagtgccatgatcgaga

SEQ ID NO: 1108386 - DNA, 25 bp, Homo sapien
catgatcgagaacaggacattaaca

SEQ ID NO: 1108387 - DNA, 25 bp, Homo sapien
gctgctctctggtaactcattctag

SEQ ID NO: 1108388 - DNA, 25 bp, Homo sapien
tgcctttgcaatagaagcataatag

SEQ ID NO: 1108389 - DNA, 25 bp, Homo sapien
caagtatctgcacagcatcagtagc

SEQ ID NO: 1108390 - DNA, 25 bp, Homo sapien
gcataataggtatttcgacgaccag

SEQ ID NO: 1108391 - DNA, 25 bp, Homo sapien
catatatagggtctgtagcctctac

SEQ ID NO: 1108392 - DNA, 25 bp, Homo sapien
gaggctgcactacgtgtaacattcc

SEQ ID NO: 1108393 - DNA, 25 bp, Homo sapien
ggctcacagccatatatgacagtca

SEQ ID NO: 1108394 - DNA, 25 bp, Homo sapien
ggaagagtatcaccacataaacctg

SEQ ID NO: 1108395 - DNA, 25 bp, Homo sapien
ttgtcaatgtgttcacgggctacaa

SEQ ID NO: 1108396 - DNA, 25 bp, Homo sapien
taagtctttgaatttgtgaagtacc

SEQ ID NO: 1108397 - DNA, 25 bp, Homo sapien
tcacgggctacaataagtctttgaa

SEQ ID NO: 1108398 - DNA, 25 bp, Homo sapien
tctttgaatttgtgaagtaccttca

SEQ ID NO: 1108399 - DNA, 25 bp, Homo sapien
ttctgtgccaaacagaaagtttcac

SEQ ID NO: 1108400 - DNA, 25 bp, Homo sapien
cagtggcttgtgttctagttattca

SEQ ID NO: 1108401 - DNA, 25 bp, Homo sapien
taatgtaattcaagtaaagtggtac

SEQ ID NO: 1108402 - DNA, 25 bp, Homo sapien
cattaagtctacaaagttactgtca

SEQ ID NO: 1108403 - DNA, 25 bp, Homo sapien
agtgaaatatgggctcagaattaaa

SEQ ID NO: 1108404 - DNA, 25 bp, Homo sapien
tgaaatatgggctcagaattaaata

SEQ ID NO: 1108405 - DNA, 25 bp, Homo sapien
gaaatatgggctcagaattaaataa

SEQ ID NO: 1108406 - DNA, 25 bp, Homo sapien
aacatatgaaatgagattgtgtaca

SEQ ID NO: 1108407 - DNA, 25 bp, Homo sapien
caatagaccaaaggctacctagaga

SEQ ID NO: 1108408 - DNA, 25 bp, Homo sapien
ggctacctagagaccaacagtcata

SEQ ID NO: 1108409 - DNA, 25 bp, Homo sapien
gagattgtgtacaatagaccaaagg

SEQ ID NO: 1108410 - DNA, 25 bp, Homo sapien
tacacgaagtaatgaaatttcctgg

SEQ ID NO: 1108411 - DNA, 25 bp, Homo sapien
ttcatcatagtaaatacaagaaata

SEQ ID NO: 1108412 - DNA, 25 bp, Homo sapien
tatacactattacacgaagtaatga

SEQ ID NO: 1108413 - DNA, 25 bp, Homo sapien
agaaatatacactattacacgaagt

SEQ ID NO: 1108414 - DNA, 25 bp, Homo sapien
acggctgccgtaggaccccactgat

SEQ ID NO: 1108415 - DNA, 25 bp, Homo sapien
aagtcctgcgaccatatgcttgtcc

SEQ ID NO: 1108416 - DNA, 25 bp, Homo sapien
ccactgatcgctcataggtgtcctc

SEQ ID NO: 1108417 - DNA, 25 bp, Homo sapien
aggcagagcagttccacggctgccg

SEQ ID NO: 1108418 - DNA, 25 bp, Homo sapien
aggcccccatcgcgctccgatatag

SEQ ID NO: 1108419 - DNA, 25 bp, Homo sapien
gcccccatcgcgctccgatatagct

SEQ ID NO: 1108420 - DNA, 25 bp, Homo sapien
tcaggcccccatcgcgctccgatat

SEQ ID NO: 1108421 - DNA, 25 bp, Homo sapien
ccccatcgcgctccgatatagctga

SEQ ID NO: 1108422 - DNA, 25 bp, Homo sapien
ctgggtagacttaggagccgggcgc

SEQ ID NO: 1108423 - DNA, 25 bp, Homo sapien
agttcctgggtagacttaggagccg

SEQ ID NO: 1108424 - DNA, 25 bp, Homo sapien
ggtagacttaggagccgggcgcctg

SEQ ID NO: 1108425 - DNA, 25 bp, Homo sapien
tcagttcctgggtagacttaggagc

SEQ ID NO: 1108426 - DNA, 25 bp, Homo sapien
gacagcagcgctaaactcacactta

SEQ ID NO: 1108427 - DNA, 25 bp, Homo sapien
caggaaaccaatcctaaggtgacca

SEQ ID NO: 1108428 - DNA, 25 bp, Homo sapien
catccggacagcagcgctaaactca

SEQ ID NO: 1108429 - DNA, 25 bp, Homo sapien
gaccagtgtgcttaaccctactcca

SEQ ID NO: 1108430 - DNA, 25 bp, Homo sapien
gggttcagaaatcgggctgctcaac

SEQ ID NO: 1108431 - DNA, 25 bp, Homo sapien
gataaaattagaagcggcattgccc

SEQ ID NO: 1108432 - DNA, 25 bp, Homo sapien
cattgcccgcgaggtctgcagaaaa

SEQ ID NO: 1108433 - DNA, 25 bp, Homo sapien
tgtatttgcagaagtccccatgtga

SEQ ID NO: 1108434 - DNA, 25 bp, Homo sapien
ccttaacttgcaagcgaattcttgc

SEQ ID NO: 1108435 - DNA, 25 bp, Homo sapien
gaattcttgcttaatcaaatgcagg

SEQ ID NO: 1108436 - DNA, 25 bp, Homo sapien
tgcaagcgaattcttgcttaatcaa

SEQ ID NO: 1108437 - DNA, 25 bp, Homo sapien
aacttgcaagcgaattcttgcttaa

SEQ ID NO: 1108438 - DNA, 25 bp, Homo sapien
ggtttacatgtggcagaaagcatat

SEQ ID NO: 1108439 - DNA, 25 bp, Homo sapien
acaccatagaatatcaaagcttatc

SEQ ID NO: 1108440 - DNA, 25 bp, Homo sapien
aacaccatagaatatcaaagcttat

SEQ ID NO: 1108441 - DNA, 25 bp, Homo sapien
gttgttcacttttcattcaaaaaga

SEQ ID NO: 1108442 - DNA, 25 bp, Homo sapien
agtagtaataatcaactttagattc

SEQ ID NO: 1108443 - DNA, 25 bp, Homo sapien
ttcagaatacatgccaactcatcat

SEQ ID NO: 1108444 - DNA, 25 bp, Homo sapien
aatcaactttagattcagaatacat

SEQ ID NO: 1108445 - DNA, 25 bp, Homo sapien
taattctagagctaaagtagtaata

SEQ ID NO: 1108446 - DNA, 25 bp, Homo sapien
tgccccacagcatagattcaacata

SEQ ID NO: 1108447 - DNA, 25 bp, Homo sapien
tcattcaggcttcgtcttagtcacg

SEQ ID NO: 1108448 - DNA, 25 bp, Homo sapien
cttagtcacgattcaggtaattttc

SEQ ID NO: 1108449 - DNA, 25 bp, Homo sapien
tgggcgaccggagaccgactcaaaa

SEQ ID NO: 1108450 - DNA, 25 bp, Homo sapien
gagccataggatgcgatataatctg

SEQ ID NO: 1108451 - DNA, 25 bp, Homo sapien
gccataggatgcgatataatctgca

SEQ ID NO: 1108452 - DNA, 25 bp, Homo sapien
ttctccaataacaaagtgtccggtg

SEQ ID NO: 1108453 - DNA, 25 bp, Homo sapien
ccggtgcatctgacttgataataac

SEQ ID NO: 1108454 - DNA, 25 bp, Homo sapien
gacgtccaaagcacacttaactgaa

SEQ ID NO: 1108455 - DNA, 25 bp, Homo sapien
ctaataagcccacagcctcagacgt

SEQ ID NO: 1108456 - DNA, 25 bp, Homo sapien
aatactgtctcactgcttatgactg

SEQ ID NO: 1108457 - DNA, 25 bp, Homo sapien
ggcaagccctctcagtataggtaaa

SEQ ID NO: 1108458 - DNA, 25 bp, Homo sapien
gctaaagtgttattacacatcagca

SEQ ID NO: 1108459 - DNA, 25 bp, Homo sapien
cacatcagcaatagattcagataat

SEQ ID NO: 1108460 - DNA, 25 bp, Homo sapien
tcagataatacatgccaacacatca

SEQ ID NO: 1108461 - DNA, 25 bp, Homo sapien
aattctagagctaaagtgttattac

SEQ ID NO: 1108462 - DNA, 25 bp, Homo sapien
tatggctgacaatacaaacagtgct

SEQ ID NO: 1108463 - DNA, 25 bp, Homo sapien
taacaggtggtgcatcttagtttgc

SEQ ID NO: 1108464 - DNA, 25 bp, Homo sapien
tcccacaaatcggtagactaagaca

SEQ ID NO: 1108465 - DNA, 25 bp, Homo sapien
ttcaggtggctcacttaaacccagg

SEQ ID NO: 1108466 - DNA, 25 bp, Homo sapien
gaccccaatagatgccactcattct

SEQ ID NO: 1108467 - DNA, 25 bp, Homo sapien
tctcaaatactcagacatacagtat

SEQ ID NO: 1108468 - DNA, 25 bp, Homo sapien
tgtcagaccccaatagatgccactc

SEQ ID NO: 1108469 - DNA, 25 bp, Homo sapien
tactgtcagaccccaatagatgcca

SEQ ID NO: 1108470 - DNA, 25 bp, Homo sapien
cagaatctcttctctattcatgcga

SEQ ID NO: 1108471 - DNA, 25 bp, Homo sapien
cttctctattcatgcgatgaagttg

SEQ ID NO: 1108472 - DNA, 25 bp, Homo sapien
ctctattcatgcgatgaagttgtcc

SEQ ID NO: 1108473 - DNA, 25 bp, Homo sapien
tctcttctctattcatgcgatgaag

SEQ ID NO: 1108474 - DNA, 25 bp, Homo sapien
ttccaccacattcatgttggcaaga

SEQ ID NO: 1108475 - DNA, 25 bp, Homo sapien
tccaccacattcatgttggcaagac

SEQ ID NO: 1108476 - DNA, 25 bp, Homo sapien
gtataaaagatgaggatcatgtccg

SEQ ID NO: 1108477 - DNA, 25 bp, Homo sapien
cagcactaagagtgtataaaagatg

SEQ ID NO: 1108478 - DNA, 25 bp, Homo sapien
taaaagatgaggatcatgtccgata

SEQ ID NO: 1108479 - DNA, 25 bp, Homo sapien
ctggacagcactaagagtgtataaa

SEQ ID NO: 1108480 - DNA, 25 bp, Homo sapien
gaacatactatcaagatcgttgcaa

SEQ ID NO: 1108481 - DNA, 25 bp, Homo sapien
tactatcaagatcgttgcaattttg

SEQ ID NO: 1108482 - DNA, 25 bp, Homo sapien
tgaagtaagagaacatactatcaag

SEQ ID NO: 1108483 - DNA, 25 bp, Homo sapien
ttttgaccaaatcctgatacagttt

SEQ ID NO: 1108484 - DNA, 25 bp, Homo sapien
gattcagctaatacatgccattaca

SEQ ID NO: 1108485 - DNA, 25 bp, Homo sapien
agtattaggtaaatgtccctttcag

SEQ ID NO: 1108486 - DNA, 25 bp, Homo sapien
tccttttgtctctgtgtatataacc

SEQ ID NO: 1108487 - DNA, 25 bp, Homo sapien
gatactcaagtatactaactcacat

SEQ ID NO: 1108488 - DNA, 25 bp, Homo sapien
ttctcaaatatgcagactctcctgt

SEQ ID NO: 1108489 - DNA, 25 bp, Homo sapien
tctgtagacctttaacatattccac

SEQ ID NO: 1108490 - DNA, 25 bp, Homo sapien
gtagacctttaacatattccacaac

SEQ ID NO: 1108491 - DNA, 25 bp, Homo sapien
tctttctgtagacctttaacatatt

SEQ ID NO: 1108492 - DNA, 25 bp, Homo sapien
tcttctttctgtagacctttaacat

SEQ ID NO: 1108493 - DNA, 25 bp, Homo sapien
tggttactagcaaaaccagtacatt

SEQ ID NO: 1108494 - DNA, 25 bp, Homo sapien
actggttactagcaaaaccagtaca

SEQ ID NO: 1108495 - DNA, 25 bp, Homo sapien
ataaactggttactagcaaaaccag

SEQ ID NO: 1108496 - DNA, 25 bp, Homo sapien
tataaactggttactagcaaaacca

SEQ ID NO: 1108497 - DNA, 25 bp, Homo sapien
aactccagttagaccagctgcttag

SEQ ID NO: 1108498 - DNA, 25 bp, Homo sapien
ccacagtgcatgctggaagttccag

SEQ ID NO: 1108499 - DNA, 25 bp, Homo sapien
cttatcttttagactggccccctct

SEQ ID NO: 1108500 - DNA, 25 bp, Homo sapien
gccccctctgttccagtgctcctgt

SEQ ID NO: 1108501 - DNA, 25 bp, Homo sapien
agcagagattatctacgtttatcaa

SEQ ID NO: 1108502 - DNA, 25 bp, Homo sapien
aaagcagagattatctacgtttatc

SEQ ID NO: 1108503 - DNA, 25 bp, Homo sapien
cagagattatctacgtttatcaaat

SEQ ID NO: 1108504 - DNA, 25 bp, Homo sapien
ctaaagcagagattatctacgttta

SEQ ID NO: 1108505 - DNA, 25 bp, Homo sapien
gatttttcacatcccatgaagcagc

SEQ ID NO: 1108506 - DNA, 25 bp, Homo sapien
ctctctggcctgcactgtgttcatc

SEQ ID NO: 1108507 - DNA, 25 bp, Homo sapien
tttttcacatcccatgaagcagctg

SEQ ID NO: 1108508 - DNA, 25 bp, Homo sapien
agtagatttttcacatcccatgaag

SEQ ID NO: 1108509 - DNA, 25 bp, Homo sapien
aaagagaatcttgtgtcaatttctc

SEQ ID NO: 1108510 - DNA, 25 bp, Homo sapien
ccaaagttgccaccgcacaaaaaga

SEQ ID NO: 1108511 - DNA, 25 bp, Homo sapien
agccaaagttgccaccgcacaaaaa

SEQ ID NO: 1108512 - DNA, 25 bp, Homo sapien
aaagccaaagttgccaccgcacaaa

SEQ ID NO: 1108513 - DNA, 25 bp, Homo sapien
tggtctgcaaccaaatccaccgtca

SEQ ID NO: 1108514 - DNA, 25 bp, Homo sapien
aatccaccgtcaaagttcatacagg

SEQ ID NO: 1108515 - DNA, 25 bp, Homo sapien
tttccacattaatagcatcaagctt

SEQ ID NO: 1108516 - DNA, 25 bp, Homo sapien
acaaattcgattgccttttccacat

SEQ ID NO: 1108517 - DNA, 25 bp, Homo sapien
tttgcttaggtcagacgaatccacc

SEQ ID NO: 1108518 - DNA, 25 bp, Homo sapien
tccaccgacagagaaaggtatatag

SEQ ID NO: 1108519 - DNA, 25 bp, Homo sapien
gcaaagtaatgatagcaattaagca

SEQ ID NO: 1108520 - DNA, 25 bp, Homo sapien
gcaattcttatgtaagatgccctat

SEQ ID NO: 1108521 - DNA, 25 bp, Homo sapien
ggccttccattgagcccgcctgagg

SEQ ID NO: 1108522 - DNA, 25 bp, Homo sapien
cagaatttacttgatgcaactgact

SEQ ID NO: 1108523 - DNA, 25 bp, Homo sapien
gaatttacttgatgcaactgacttg

SEQ ID NO: 1108524 - DNA, 25 bp, Homo sapien
ggtaattgtcgttcacaaagccacc

SEQ ID NO: 1108525 - DNA, 25 bp, Homo sapien
gaagctgccctagattgtgtgcaag

SEQ ID NO: 1108526 - DNA, 25 bp, Homo sapien
catttaaatatagtcctgggtcagg

SEQ ID NO: 1108527 - DNA, 25 bp, Homo sapien
catggagattcctgtacaagactgt

SEQ ID NO: 1108528 - DNA, 25 bp, Homo sapien
aaataaaaatacaggccgagcacag

SEQ ID NO: 1108529 - DNA, 25 bp, Homo sapien
aaagtgggttaagtctcactcttag

SEQ ID NO: 1108530 - DNA, 25 bp, Homo sapien
gccacaatttcattctcttttattt

SEQ ID NO: 1108531 - DNA, 25 bp, Homo sapien
caatttcattctcttttatttccct

SEQ ID NO: 1108532 - DNA, 25 bp, Homo sapien
gttgccacaatttcattctctttta

SEQ ID NO: 1108533 - DNA, 25 bp, Homo sapien
ccacaatttcattctcttttatttc

SEQ ID NO: 1108534 - DNA, 25 bp, Homo sapien
caccatgagtagcatacatctggta

SEQ ID NO: 1108535 - DNA, 25 bp, Homo sapien
tatcaatccaatgaagtcttccaat

SEQ ID NO: 1108536 - DNA, 25 bp, Homo sapien
aaaatgaaattacgcagtttctctc

SEQ ID NO: 1108537 - DNA, 25 bp, Homo sapien
aagccaggacccaccatgagtagca

SEQ ID NO: 1108538 - DNA, 25 bp, Homo sapien
tacctgacctttaccatatactaat

SEQ ID NO: 1108539 - DNA, 25 bp, Homo sapien
acaagcgacaagaaatttctgtaag

SEQ ID NO: 1108540 - DNA, 25 bp, Homo sapien
ctaattttgttagcaacaagcgaca

SEQ ID NO: 1108541 - DNA, 25 bp, Homo sapien
gaaccatgaagtaatgcaaacgctg

SEQ ID NO: 1108542 - DNA, 25 bp, Homo sapien
agctcaggctgaacattcactctct

SEQ ID NO: 1108543 - DNA, 25 bp, Homo sapien
ttcttcaggcatgcaaaagacagga

SEQ ID NO: 1108544 - DNA, 25 bp, Homo sapien
aggctgaacattcactctctgaagc

SEQ ID NO: 1108545 - DNA, 25 bp, Homo sapien
caggattaacaggtttaatctgttc

SEQ ID NO: 1108546 - DNA, 25 bp, Homo sapien
tagtcacttttagattcgataagca

SEQ ID NO: 1108547 - DNA, 25 bp, Homo sapien
taacagtagtcacttttagattcga

SEQ ID NO: 1108548 - DNA, 25 bp, Homo sapien
ttagattcgataagcacttcaaata

SEQ ID NO: 1108549 - DNA, 25 bp, Homo sapien
aatattaacagtagtcacttttaga

SEQ ID NO: 1108550 - DNA, 25 bp, Homo sapien
tacacaaagaactgtagtcagaata

SEQ ID NO: 1108551 - DNA, 25 bp, Homo sapien
tcatgtatgggttctatccactttc

SEQ ID NO: 1108552 - DNA, 25 bp, Homo sapien
ataacaggacttcagaataaaaagc

SEQ ID NO: 1108553 - DNA, 25 bp, Homo sapien
tcttgttgacaaaccaatttacatc

SEQ ID NO: 1108554 - DNA, 25 bp, Homo sapien
ttgaagacaactccttctttgggta

SEQ ID NO: 1108555 - DNA, 25 bp, Homo sapien
tgtttccttatttgaagacaactcc

SEQ ID NO: 1108556 - DNA, 25 bp, Homo sapien
tagtgtttccttatttgaagacaac

SEQ ID NO: 1108557 - DNA, 25 bp, Homo sapien
gttagtgtttccttatttgaagaca

SEQ ID NO: 1108558 - DNA, 25 bp, Homo sapien
agatccatggattaaacatgacgaa

SEQ ID NO: 1108559 - DNA, 25 bp, Homo sapien
cagagatccatggattaaacatgac

SEQ ID NO: 1108560 - DNA, 25 bp, Homo sapien
ttaaacatgacgaaattatctggat

SEQ ID NO: 1108561 - DNA, 25 bp, Homo sapien
taaacatgacgaaattatctggata

SEQ ID NO: 1108562 - DNA, 25 bp, Homo sapien
gaagtatgaggtttctgagcgaccc

SEQ ID NO: 1108563 - DNA, 25 bp, Homo sapien
tccagtagcccaactacagaagctg

SEQ ID NO: 1108564 - DNA, 25 bp, Homo sapien
gtttctgagcgacccctccagtagc

SEQ ID NO: 1108565 - DNA, 25 bp, Homo sapien
aaccttccctgacccgagaagtatg

SEQ ID NO: 1108566 - DNA, 25 bp, Homo sapien
gggcagaaggcgaggttgatgagat

SEQ ID NO: 1108567 - DNA, 25 bp, Homo sapien
gcgaggttgatgagatctcaggcct

SEQ ID NO: 1108568 - DNA, 25 bp, Homo sapien
cagaaggcgaggttgatgagatctc

SEQ ID NO: 1108569 - DNA, 25 bp, Homo sapien
ttgatgagatctcaggcctcagcat

SEQ ID NO: 1108570 - DNA, 25 bp, Homo sapien
tcctggagtccgaaattgtagcggg

SEQ ID NO: 1108571 - DNA, 25 bp, Homo sapien
cacctggaccgaagggcggctctgt

SEQ ID NO: 1108572 - DNA, 25 bp, Homo sapien
ccgcagctcctgacgtgccaggaca

SEQ ID NO: 1108573 - DNA, 25 bp, Homo sapien
cagagaccacctggaccgaagggcg

SEQ ID NO: 1108574 - DNA, 25 bp, Homo sapien
tgccggcctctagcctcaaggagac

SEQ ID NO: 1108575 - DNA, 25 bp, Homo sapien
actgtggtaaccaccacccacgtgc

SEQ ID NO: 1108576 - DNA, 25 bp, Homo sapien
aaccaaatcacaacttcactgtggt

SEQ ID NO: 1108577 - DNA, 25 bp, Homo sapien
tgaactgccggcctctagcctcaag

SEQ ID NO: 1108578 - DNA, 25 bp, Homo sapien
ttttctcaagaatgcgctccagctg

SEQ ID NO: 1108579 - DNA, 25 bp, Homo sapien
gctgggcaacgtaggaaaacactgt

SEQ ID NO: 1108580 - DNA, 25 bp, Homo sapien
taccgtctgcctagtaagaagccag

SEQ ID NO: 1108581 - DNA, 25 bp, Homo sapien
tcataaagacgtgtgtagaaccagc

SEQ ID NO: 1108582 - DNA, 25 bp, Homo sapien
gataattagtatctcgtgcagaaga

SEQ ID NO: 1108583 - DNA, 25 bp, Homo sapien
aagtaaaatttgatgcaactgtgtt

SEQ ID NO: 1108584 - DNA, 25 bp, Homo sapien
gctcttataacctgatctctgagga

SEQ ID NO: 1108585 - DNA, 25 bp, Homo sapien
gaatatcccacttgtggtgtccagc

SEQ ID NO: 1108586 - DNA, 25 bp, Homo sapien
tggggagtgtgcagaaatcgcagat

SEQ ID NO: 1108587 - DNA, 25 bp, Homo sapien
gatggggagtgtgcagaaatcgcag

SEQ ID NO: 1108588 - DNA, 25 bp, Homo sapien
tgatggggagtgtgcagaaatcgca

SEQ ID NO: 1108589 - DNA, 25 bp, Homo sapien
atggggagtgtgcagaaatcgcaga

SEQ ID NO: 1108590 - DNA, 25 bp, Homo sapien
tgtctgcaaactgggatagtataat

SEQ ID NO: 1108591 - DNA, 25 bp, Homo sapien
gtctgcaaactgggatagtataatt

SEQ ID NO: 1108592 - DNA, 25 bp, Homo sapien
ttgtctgcaaactgggatagtataa

SEQ ID NO: 1108593 - DNA, 25 bp, Homo sapien
tgataaaattttaagtttagtgatc

SEQ ID NO: 1108594 - DNA, 25 bp, Homo sapien
gataaaattttaagtttagtgatca

SEQ ID NO: 1108595 - DNA, 25 bp, Homo sapien
ccacagcacaagcagtatttgacat

SEQ ID NO: 1108596 - DNA, 25 bp, Homo sapien
agagtgaacaacttggtggaattcc

SEQ ID NO: 1108597 - DNA, 25 bp, Homo sapien
tctgtgatcagagtgaacaacttgg

SEQ ID NO: 1108598 - DNA, 25 bp, Homo sapien
aaattttctgtgatcagagtgaaca

SEQ ID NO: 1108599 - DNA, 25 bp, Homo sapien
cctttggatagtagtgaaattaaca

SEQ ID NO: 1108600 - DNA, 25 bp, Homo sapien
cctccattaggacagtgctgaattc

SEQ ID NO: 1108601 - DNA, 25 bp, Homo sapien
tgttcaatgtactctaatccttttg

SEQ ID NO: 1108602 - DNA, 25 bp, Homo sapien
tctgctatgcataactgttcaatgt

SEQ ID NO: 1108603 - DNA, 25 bp, Homo sapien
gggctgatgatgaatctatcatggc

SEQ ID NO: 1108604 - DNA, 25 bp, Homo sapien
cagtgattttggtgcataaactgaa

SEQ ID NO: 1108605 - DNA, 25 bp, Homo sapien
catggctgtctgttcactaccctgg

SEQ ID NO: 1108606 - DNA, 25 bp, Homo sapien
acaattcaaggttttgggctgatga

SEQ ID NO: 1108607 - DNA, 25 bp, Homo sapien
gaagtcgtctactccctccaggagt

SEQ ID NO: 1108608 - DNA, 25 bp, Homo sapien
tttagaacaccaaagagagtgtgat

SEQ ID NO: 1108609 - DNA, 25 bp, Homo sapien
tctaatatattagaacgaagtcgtc

SEQ ID NO: 1108610 - DNA, 25 bp, Homo sapien
aaaatagttcctcatcttgaagtag

SEQ ID NO: 1108611 - DNA, 25 bp, Homo sapien
atgaaattaagtttggctggatgaa

SEQ ID NO: 1108612 - DNA, 25 bp, Homo sapien
agctgctctgtatcaagaaatcttg

SEQ ID NO: 1108613 - DNA, 25 bp, Homo sapien
aagctgctctgtatcaagaaatctt

SEQ ID NO: 1108614 - DNA, 25 bp, Homo sapien
cctcctctgcgtagaagggcagctt

SEQ ID NO: 1108615 - DNA, 25 bp, Homo sapien
acacaggttttggatcccaagtagg

SEQ ID NO: 1108616 - DNA, 25 bp, Homo sapien
aagtaggctgaagaaagcctcctct

SEQ ID NO: 1108617 - DNA, 25 bp, Homo sapien
tgacacaggttttggatcccaagta

SEQ ID NO: 1108618 - DNA, 25 bp, Homo sapien
tagaccagaagacttttctaaaatc

SEQ ID NO: 1108619 - DNA, 25 bp, Homo sapien
acttttctaaaatctgatagtcaaa

SEQ ID NO: 1108620 - DNA, 25 bp, Homo sapien
aagacttttctaaaatctgatagtc

SEQ ID NO: 1108621 - DNA, 25 bp, Homo sapien
ctagaccagaagacttttctaaaat

SEQ ID NO: 1108622 - DNA, 25 bp, Homo sapien
tgttatctttgattcagcagcattg

SEQ ID NO: 1108623 - DNA, 25 bp, Homo sapien
ctttaaaggatccacaagttccaag

SEQ ID NO: 1108624 - DNA, 25 bp, Homo sapien
gatccacaagttccaaggtatgttt

SEQ ID NO: 1108625 - DNA, 25 bp, Homo sapien
aatttgttatctttgattcagcagc

SEQ ID NO: 1108626 - DNA, 25 bp, Homo sapien
aaggaaccatagtaagctcttaata

SEQ ID NO: 1108627 - DNA, 25 bp, Homo sapien
tcttaataaaggtgtgttacagttc

SEQ ID NO: 1108628 - DNA, 25 bp, Homo sapien
ccatagtaagctcttaataaaggtg

SEQ ID NO: 1108629 - DNA, 25 bp, Homo sapien
taagctcttaataaaggtgtgttac

SEQ ID NO: 1108630 - DNA, 25 bp, Homo sapien
tgcatcatcattaattactgtttta

SEQ ID NO: 1108631 - DNA, 25 bp, Homo sapien
cctttcatgtatcttgcatcatcat

SEQ ID NO: 1108632 - DNA, 25 bp, Homo sapien
tcttgcatcatcattaattactgtt

SEQ ID NO: 1108633 - DNA, 25 bp, Homo sapien
ttaggcatcctttcatgtatcttgc

SEQ ID NO: 1108634 - DNA, 25 bp, Homo sapien
tctgtgtatgttcttcttgctatgt

SEQ ID NO: 1108635 - DNA, 25 bp, Homo sapien
tcatttatgttagacctcactgcat

SEQ ID NO: 1108636 - DNA, 25 bp, Homo sapien
tatgttagacctcactgcatagcac

SEQ ID NO: 1108637 - DNA, 25 bp, Homo sapien
tctctgtgtatgttcttcttgctat

SEQ ID NO: 1108638 - DNA, 25 bp, Homo sapien
taaaggtagactatatttttctcca

SEQ ID NO: 1108639 - DNA, 25 bp, Homo sapien
catctggatgaaaaatcctcgagca

SEQ ID NO: 1108640 - DNA, 25 bp, Homo sapien
ggaagttgatcactaggtagggcta

SEQ ID NO: 1108641 - DNA, 25 bp, Homo sapien
tcctcgagcagagctaaaacttgtc

SEQ ID NO: 1108642 - DNA, 25 bp, Homo sapien
tataagtcatgtgatagatttctct

SEQ ID NO: 1108643 - DNA, 25 bp, Homo sapien
agatttctctcaaagattcttggca

SEQ ID NO: 1108644 - DNA, 25 bp, Homo sapien
aatctgctgatgtaaagctgtaaga

SEQ ID NO: 1108645 - DNA, 25 bp, Homo sapien
tttaattaaatctgctgatgtaaag

SEQ ID NO: 1108646 - DNA, 25 bp, Homo sapien
ctcactaagcagtttgcacactatc

SEQ ID NO: 1108647 - DNA, 25 bp, Homo sapien
tcataaatctcactaagcagtttgc

SEQ ID NO: 1108648 - DNA, 25 bp, Homo sapien
gacacagtgtcagatagtttatata

SEQ ID NO: 1108649 - DNA, 25 bp, Homo sapien
aaatgacagtagcatatccagcatt

SEQ ID NO: 1108650 - DNA, 25 bp, Homo sapien
gatgccatccctgtttgattgctaa

SEQ ID NO: 1108651 - DNA, 25 bp, Homo sapien
tattgttggcaataggtttttccgc

SEQ ID NO: 1108652 - DNA, 25 bp, Homo sapien
taaagtatcagtaaattctggtcga

SEQ ID NO: 1108653 - DNA, 25 bp, Homo sapien
aaattactcccttctgtaacatagg

SEQ ID NO: 1108654 - DNA, 25 bp, Homo sapien
caatctgggccataatctgacaaag

SEQ ID NO: 1108655 - DNA, 25 bp, Homo sapien
cataatctgacaaagagcaatctgt

SEQ ID NO: 1108656 - DNA, 25 bp, Homo sapien
gagcaatctgttttaaatatgtgga

SEQ ID NO: 1108657 - DNA, 25 bp, Homo sapien
gccataatctgacaaagagcaatct

SEQ ID NO: 1108658 - DNA, 25 bp, Homo sapien
catttctttcataaatgttgatgaa

SEQ ID NO: 1108659 - DNA, 25 bp, Homo sapien
tcatcagtactaattcttgtaaaaa

SEQ ID NO: 1108660 - DNA, 25 bp, Homo sapien
aaaatctgtttagcaattctaaagg

SEQ ID NO: 1108661 - DNA, 25 bp, Homo sapien
tttgtttcgatatcatcatcagtac

SEQ ID NO: 1108662 - DNA, 25 bp, Homo sapien
gtgagagaatttaatgtttttaaca

SEQ ID NO: 1108663 - DNA, 25 bp, Homo sapien
gagagaatttaatgtttttaacata

SEQ ID NO: 1108664 - DNA, 25 bp, Homo sapien
tagtgagagaatttaatgtttttaa

SEQ ID NO: 1108665 - DNA, 25 bp, Homo sapien
ttagtgagagaatttaatgttttta

SEQ ID NO: 1108666 - DNA, 25 bp, Homo sapien
ctcagtagatattcacaaacagcat

SEQ ID NO: 1108667 - DNA, 25 bp, Homo sapien
tcttccgtattagtacctctgccaa

SEQ ID NO: 1108668 - DNA, 25 bp, Homo sapien
taacaaatgccaataccttcttccg

SEQ ID NO: 1108669 - DNA, 25 bp, Homo sapien
catcaattaatatgagcgatttgtc

SEQ ID NO: 1108670 - DNA, 25 bp, Homo sapien
tgtaggtatacaaaattgcttcttt

SEQ ID NO: 1108671 - DNA, 25 bp, Homo sapien
catcaatatggcatagttccaggaa

SEQ ID NO: 1108672 - DNA, 25 bp, Homo sapien
tctgtgagtcccttagaaagtttgt

SEQ ID NO: 1108673 - DNA, 25 bp, Homo sapien
tgttttctacattaggatacagggc

SEQ ID NO: 1108674 - DNA, 25 bp, Homo sapien
gaagtgatgacacctctgcagcttt

SEQ ID NO: 1108675 - DNA, 25 bp, Homo sapien
gtctcgtaatttgagttgtgatttc

SEQ ID NO: 1108676 - DNA, 25 bp, Homo sapien
caaaatttgtctcgtaatttgagtt

SEQ ID NO: 1108677 - DNA, 25 bp, Homo sapien
ccttggcatccaagacaattgatgg

SEQ ID NO: 1108678 - DNA, 25 bp, Homo sapien
ttgaacaagcctagtggctagatgg

SEQ ID NO: 1108679 - DNA, 25 bp, Homo sapien
taaactgtctggatccaattgagag

SEQ ID NO: 1108680 - DNA, 25 bp, Homo sapien
taaatatattcgtaaactgtctgga

SEQ ID NO: 1108681 - DNA, 25 bp, Homo sapien
tgagagtttcgagcagtttgaacaa

SEQ ID NO: 1108682 - DNA, 25 bp, Homo sapien
cattcctttaagtagttctcatttg

SEQ ID NO: 1108683 - DNA, 25 bp, Homo sapien
tgttattttccttatctctaaggag

SEQ ID NO: 1108684 - DNA, 25 bp, Homo sapien
aatgaacttaggtcttaataatgtg

SEQ ID NO: 1108685 - DNA, 25 bp, Homo sapien
ctataacttgtaagtataaatgaac

SEQ ID NO: 1108686 - DNA, 25 bp, Homo sapien
ccaatcaattgcagtttaataaagt

SEQ ID NO: 1108687 - DNA, 25 bp, Homo sapien
agctgggttccaatcaattgcagtt

SEQ ID NO: 1108688 - DNA, 25 bp, Homo sapien
tgggttccaatcaattgcagtttaa

SEQ ID NO: 1108689 - DNA, 25 bp, Homo sapien
atttatagctgggttccaatcaatt

SEQ ID NO: 1108690 - DNA, 25 bp, Homo sapien
tgtccaagcccattaagtggcatca

SEQ ID NO: 1108691 - DNA, 25 bp, Homo sapien
ttcacaccagtatactgtccaagcc

SEQ ID NO: 1108692 - DNA, 25 bp, Homo sapien
tcagacaagacagtctaatatcttc

SEQ ID NO: 1108693 - DNA, 25 bp, Homo sapien
cacctctcttttatgtagctcagac

SEQ ID NO: 1108694 - DNA, 25 bp, Homo sapien
ttaaccttcagtttagtctagattc

SEQ ID NO: 1108695 - DNA, 25 bp, Homo sapien
gattcatagagtggaaaactccttt

SEQ ID NO: 1108696 - DNA, 25 bp, Homo sapien
cagtttagtctagattcatagagtg

SEQ ID NO: 1108697 - DNA, 25 bp, Homo sapien
tagtctagattcatagagtggaaaa

SEQ ID NO: 1108698 - DNA, 25 bp, Homo sapien
ccagagctacatcagttttgtaata

SEQ ID NO: 1108699 - DNA, 25 bp, Homo sapien
cctaagcagtacagatttctcaact

SEQ ID NO: 1108700 - DNA, 25 bp, Homo sapien
cagttttgtaatactgtcctaagca

SEQ ID NO: 1108701 - DNA, 25 bp, Homo sapien
gatttctcaactagaattgctatga

SEQ ID NO: 1108702 - DNA, 25 bp, Homo sapien
gaaaaatttgcattactgggggctc

SEQ ID NO: 1108703 - DNA, 25 bp, Homo sapien
atttgcattactgggggctctgtgg

SEQ ID NO: 1108704 - DNA, 25 bp, Homo sapien
aaaatttgcattactgggggctctg

SEQ ID NO: 1108705 - DNA, 25 bp, Homo sapien
gagaaaaatttgcattactgggggc

SEQ ID NO: 1108706 - DNA, 25 bp, Homo sapien
aagcaggtattcttggtggactggc

SEQ ID NO: 1108707 - DNA, 25 bp, Homo sapien
caggtattcttggtggactggcata

SEQ ID NO: 1108708 - DNA, 25 bp, Homo sapien
tattcttggtggactggcataagga

SEQ ID NO: 1108709 - DNA, 25 bp, Homo sapien
ttggtggactggcataaggaagaac

SEQ ID NO: 1108710 - DNA, 25 bp, Homo sapien
gaatgatgagccaaaacagctcaaa

SEQ ID NO: 1108711 - DNA, 25 bp, Homo sapien
gatagctgtagcctaattctccaaa

SEQ ID NO: 1108712 - DNA, 25 bp, Homo sapien
ggctggtgcacacataagaatgatg

SEQ ID NO: 1108713 - DNA, 25 bp, Homo sapien
ataagaatgatgagccaaaacagct

SEQ ID NO: 1108714 - DNA, 25 bp, Homo sapien
tcctaccagctggggtgcccaatca

SEQ ID NO: 1108715 - DNA, 25 bp, Homo sapien
agctggggtgcccaatcagagatat

SEQ ID NO: 1108716 - DNA, 25 bp, Homo sapien
accagctggggtgcccaatcagaga

SEQ ID NO: 1108717 - DNA, 25 bp, Homo sapien
gctggggtgcccaatcagagatatc

SEQ ID NO: 1108718 - DNA, 25 bp, Homo sapien
agtaggaagtgatcagttggaaacc

SEQ ID NO: 1108719 - DNA, 25 bp, Homo sapien
caatgcctctatctggatgttcagc

SEQ ID NO: 1108720 - DNA, 25 bp, Homo sapien
ggaaaccatgcatgtcaatgcctct

SEQ ID NO: 1108721 - DNA, 25 bp, Homo sapien
tggatgttcagcagtacaagaaagg

SEQ ID NO: 1108722 - DNA, 25 bp, Homo sapien
gcatggggagaacatgcaaattcca

SEQ ID NO: 1108723 - DNA, 25 bp, Homo sapien
tgtgggagaatatcagtgcaggcat

SEQ ID NO: 1108724 - DNA, 25 bp, Homo sapien
ccagccagagagcttttttgtcttc

SEQ ID NO: 1108725 - DNA, 25 bp, Homo sapien
cacatagagagtggctccagccaga

SEQ ID NO: 1108726 - DNA, 25 bp, Homo sapien
agttcagggtcatgggtggctgaat

SEQ ID NO: 1108727 - DNA, 25 bp, Homo sapien
cagggtcatgggtggctgaatcttc

SEQ ID NO: 1108728 - DNA, 25 bp, Homo sapien
tcagggtcatgggtggctgaatctt

SEQ ID NO: 1108729 - DNA, 25 bp, Homo sapien
ttcagggtcatgggtggctgaatct

SEQ ID NO: 1108730 - DNA, 25 bp, Homo sapien
tgaccatgggaaccttcactgacct

SEQ ID NO: 1108731 - DNA, 25 bp, Homo sapien
cactgaccttggtgcatctggaggg

SEQ ID NO: 1108732 - DNA, 25 bp, Homo sapien
tgatgctgcaactgcagtcattttc

SEQ ID NO: 1108733 - DNA, 25 bp, Homo sapien
gggttaatgcatgttgtcactttga

SEQ ID NO: 1108734 - DNA, 25 bp, Homo sapien
ggattcgaaagattaacaagagaag

SEQ ID NO: 1108735 - DNA, 25 bp, Homo sapien
tgctggaataagaaccaaggattcg

SEQ ID NO: 1108736 - DNA, 25 bp, Homo sapien
gaaccaaggattcgaaagattaaca

SEQ ID NO: 1108737 - DNA, 25 bp, Homo sapien
acgctgttgctggaataagaaccaa

SEQ ID NO: 1108738 - DNA, 25 bp, Homo sapien
ccctgtacgtcaatagttctcaaag

SEQ ID NO: 1108739 - DNA, 25 bp, Homo sapien
tgtacgtcaatagttctcaaagtgc

SEQ ID NO: 1108740 - DNA, 25 bp, Homo sapien
ttccctgtacgtcaatagttctcaa

SEQ ID NO: 1108741 - DNA, 25 bp, Homo sapien
cctgtacgtcaatagttctcaaagt

SEQ ID NO: 1108742 - DNA, 25 bp, Homo sapien
tctgatccaggcaaatggggcactg

SEQ ID NO: 1108743 - DNA, 25 bp, Homo sapien
ggggcactgggttattttatattca

SEQ ID NO: 1108744 - DNA, 25 bp, Homo sapien
tactccctggatttctgatccaggc

SEQ ID NO: 1108745 - DNA, 25 bp, Homo sapien
tcctggggttgtctgagtatactcc

SEQ ID NO: 1108746 - DNA, 25 bp, Homo sapien
tagacataagatctttacaaactga

SEQ ID NO: 1108747 - DNA, 25 bp, Homo sapien
gaccaagtagacataagatctttac

SEQ ID NO: 1108748 - DNA, 25 bp, Homo sapien
tgaccaagtagacataagatcttta

SEQ ID NO: 1108749 - DNA, 25 bp, Homo sapien
caagtagacataagatctttacaaa

SEQ ID NO: 1108750 - DNA, 25 bp, Homo sapien
cctgcattcaactatactgggaaaa

SEQ ID NO: 1108751 - DNA, 25 bp, Homo sapien
tactttaggcttatccctctcacaa

SEQ ID NO: 1108752 - DNA, 25 bp, Homo sapien
tagcatgttcaaggacagaggcaaa

SEQ ID NO: 1108753 - DNA, 25 bp, Homo sapien
tgttcacggtgttgatgcctcctct

SEQ ID NO: 1108754 - DNA, 25 bp, Homo sapien
tatctggaagcgcttctcgctcttc

SEQ ID NO: 1108755 - DNA, 25 bp, Homo sapien
acagataatacatggatcagttaca

SEQ ID NO: 1108756 - DNA, 25 bp, Homo sapien
ggaagcgcttctcgctcttccactt

SEQ ID NO: 1108757 - DNA, 25 bp, Homo sapien
gaacagataatacatggatcagtta

SEQ ID NO: 1108758 - DNA, 25 bp, Homo sapien
caaataaaggcttgctgtctttcag

SEQ ID NO: 1108759 - DNA, 25 bp, Homo sapien
catcaagtaatgaaacctgtagatt

SEQ ID NO: 1108760 - DNA, 25 bp, Homo sapien
tttgatgtaaataggacgaaatgtc

SEQ ID NO: 1108761 - DNA, 25 bp, Homo sapien
aaataggacgaaatgtctttggaca

SEQ ID NO: 1108762 - DNA, 25 bp, Homo sapien
tagcaaaatgatgcatttgagatga

SEQ ID NO: 1108763 - DNA, 25 bp, Homo sapien
aatgatgcatttgagatgacatttc

SEQ ID NO: 1108764 - DNA, 25 bp, Homo sapien
gagatgacatttctgcagagtacat

SEQ ID NO: 1108765 - DNA, 25 bp, Homo sapien
tttgagatgacatttctgcagagta

SEQ ID NO: 1108766 - DNA, 25 bp, Homo sapien
ccgtggattccatgtatgtctgcat

SEQ ID NO: 1108767 - DNA, 25 bp, Homo sapien
aatgtgtgtatctggcattgagcct

SEQ ID NO: 1108768 - DNA, 25 bp, Homo sapien
tatttccctcaatgctaaactccct

SEQ ID NO: 1108769 - DNA, 25 bp, Homo sapien
gatgagagactttctatttccctca

SEQ ID NO: 1108770 - DNA, 25 bp, Homo sapien
aaggtgttcatagcccccaaataag

SEQ ID NO: 1108771 - DNA, 25 bp, Homo sapien
tcttggccagagaatacctacatta

SEQ ID NO: 1108772 - DNA, 25 bp, Homo sapien
ttcttcagcaaacccaaaaatccac

SEQ ID NO: 1108773 - DNA, 25 bp, Homo sapien
gtgaatggttacagatgagtagctg

SEQ ID NO: 1108774 - DNA, 25 bp, Homo sapien
ttttggtactctcatcattccattt

SEQ ID NO: 1108775 - DNA, 25 bp, Homo sapien
cgaaccctcctgtttgtatctattt

SEQ ID NO: 1108776 - DNA, 25 bp, Homo sapien
aattcttcgtgtcaataccatcccc

SEQ ID NO: 1108777 - DNA, 25 bp, Homo sapien
cccgaaccctcctgtttgtatctat

SEQ ID NO: 1108778 - DNA, 25 bp, Homo sapien
ctaattcttcgtgtcaataccatcc

SEQ ID NO: 1108779 - DNA, 25 bp, Homo sapien
tggaggctggtaccacggcaggacc

SEQ ID NO: 1108780 - DNA, 25 bp, Homo sapien
gcagatccaaataaggggaccgcgg

SEQ ID NO: 1108781 - DNA, 25 bp, Homo sapien
ccacattcccgcagatccaaataag

SEQ ID NO: 1108782 - DNA, 25 bp, Homo sapien
gaggctggtaccacggcaggacctc

SEQ ID NO: 1108783 - DNA, 25 bp, Homo sapien
ctcctgccaccgagcagcgggcgcg

SEQ ID NO: 1108784 - DNA, 25 bp, Homo sapien
ctgccaccgagcagcgggcgcgcct

SEQ ID NO: 1108785 - DNA, 25 bp, Homo sapien
tgccaccgagcagcgggcgcgcctg

SEQ ID NO: 1108786 - DNA, 25 bp, Homo sapien
tcctgccaccgagcagcgggcgcgc

SEQ ID NO: 1108787 - DNA, 25 bp, Homo sapien
aaaagtttacttagcacagaagcca

SEQ ID NO: 1108788 - DNA, 25 bp, Homo sapien
caggacatcggacaatttacttagg

SEQ ID NO: 1108789 - DNA, 25 bp, Homo sapien
gttatcaatccatccaaagagcact

SEQ ID NO: 1108790 - DNA, 25 bp, Homo sapien
gctttacaaccacacgaagtcaggg

SEQ ID NO: 1108791 - DNA, 25 bp, Homo sapien
tattaatcacaaagccaggatggga

SEQ ID NO: 1108792 - DNA, 25 bp, Homo sapien
taaggcaaacgcttcacaaagagag

SEQ ID NO: 1108793 - DNA, 25 bp, Homo sapien
tatcccactagtcccaaatagaggg

SEQ ID NO: 1108794 - DNA, 25 bp, Homo sapien
ggtaccactttctctgataaggcaa

SEQ ID NO: 1108795 - DNA, 25 bp, Homo sapien
cctgcgcaattgcaaggctgtcata

SEQ ID NO: 1108796 - DNA, 25 bp, Homo sapien
ggctgtcataattggaacaagtcat

SEQ ID NO: 1108797 - DNA, 25 bp, Homo sapien
ttttctgataaacattcggcctgcg

SEQ ID NO: 1108798 - DNA, 25 bp, Homo sapien
caaagggcaatgaccagtggcaatg

SEQ ID NO: 1108799 - DNA, 25 bp, Homo sapien
tgtaaaaggtataggtgaccaagac

SEQ ID NO: 1108800 - DNA, 25 bp, Homo sapien
tatgagagttctccgcatatgtgga

SEQ ID NO: 1108801 - DNA, 25 bp, Homo sapien
cctgacattcacagtaaggtgtaaa

SEQ ID NO: 1108802 - DNA, 25 bp, Homo sapien
caggagtatcaatatccaggttata

SEQ ID NO: 1108803 - DNA, 25 bp, Homo sapien
caatgagctcacgaaagtcctgaag

SEQ ID NO: 1108804 - DNA, 25 bp, Homo sapien
gatcactgcaacacggagcaacttt

SEQ ID NO: 1108805 - DNA, 25 bp, Homo sapien
tgagtaacacagttcttgccatgct

SEQ ID NO: 1108806 - DNA, 25 bp, Homo sapien
tatctttaagccaaagtagacacag

SEQ ID NO: 1108807 - DNA, 25 bp, Homo sapien
gatagggacacatatgactcctgga

SEQ ID NO: 1108808 - DNA, 25 bp, Homo sapien
gagccgcatgggtggaaacctatcc

SEQ ID NO: 1108809 - DNA, 25 bp, Homo sapien
cacctaagagtataggagagccgca

SEQ ID NO: 1108810 - DNA, 25 bp, Homo sapien
tatcttgggtgacaggtagctccac

SEQ ID NO: 1108811 - DNA, 25 bp, Homo sapien
tcagggcaacagtgaattcagagcc

SEQ ID NO: 1108812 - DNA, 25 bp, Homo sapien
tagagcgaagttttaccacaacaga

SEQ ID NO: 1108813 - DNA, 25 bp, Homo sapien
catacaaactagctcccttgcaggg

SEQ ID NO: 1108814 - DNA, 25 bp, Homo sapien
gaatctcttggaagggttcctagcc

SEQ ID NO: 1108815 - DNA, 25 bp, Homo sapien
ttggtaaatgtaaaaaggcactcta

SEQ ID NO: 1108816 - DNA, 25 bp, Homo sapien
ctggaagtcctttgcattgtttggt

SEQ ID NO: 1108817 - DNA, 25 bp, Homo sapien
tgtaaaaaggcactctactgaagtt

SEQ ID NO: 1108818 - DNA, 25 bp, Homo sapien
taaatgtaaaaaggcactctactga

SEQ ID NO: 1108819 - DNA, 25 bp, Homo sapien
gataagatttcctccgcatcttaaa

SEQ ID NO: 1108820 - DNA, 25 bp, Homo sapien
gtgataagatttcctccgcatctta

SEQ ID NO: 1108821 - DNA, 25 bp, Homo sapien
taagatttcctccgcatcttaaata

SEQ ID NO: 1108822 - DNA, 25 bp, Homo sapien
agatttcctccgcatcttaaataac

SEQ ID NO: 1108823 - DNA, 25 bp, Homo sapien
caaagctaaaccatgtactgggcaa

SEQ ID NO: 1108824 - DNA, 25 bp, Homo sapien
catatagttgccagcaggagctccc

SEQ ID NO: 1108825 - DNA, 25 bp, Homo sapien
ggagctgaatgttggccctctaaaa

SEQ ID NO: 1108826 - DNA, 25 bp, Homo sapien
cccagagttagagtacacagtgcag

SEQ ID NO: 1108827 - DNA, 25 bp, Homo sapien
tggaggatttttcacgtctctatca

SEQ ID NO: 1108828 - DNA, 25 bp, Homo sapien
tgatcttagttattagttacttgtt

SEQ ID NO: 1108829 - DNA, 25 bp, Homo sapien
cacgtctctatcaccatcaattctt

SEQ ID NO: 1108830 - DNA, 25 bp, Homo sapien
tctgatcttagttatccacttagtt

SEQ ID NO: 1108831 - DNA, 25 bp, Homo sapien
cattaagtagcgtattatagaacat

SEQ ID NO: 1108832 - DNA, 25 bp, Homo sapien
tccaggaagaacagattaagtaagt

SEQ ID NO: 1108833 - DNA, 25 bp, Homo sapien
gaaaaatcagatgtccaggaagaac

SEQ ID NO: 1108834 - DNA, 25 bp, Homo sapien
tacaaaggatgtaatcaaagacgtg

SEQ ID NO: 1108835 - DNA, 25 bp, Homo sapien
gttgacatcctctgaccctgtgtgg

SEQ ID NO: 1108836 - DNA, 25 bp, Homo sapien
gggattgaagtgtgcaggcccacta

SEQ ID NO: 1108837 - DNA, 25 bp, Homo sapien
gagtaagacttataccctcttggcc

SEQ ID NO: 1108838 - DNA, 25 bp, Homo sapien
tgcccaccagaagctagtacagcat

SEQ ID NO: 1108839 - DNA, 25 bp, Homo sapien
cagggccaggatcccttaaggaagc

SEQ ID NO: 1108840 - DNA, 25 bp, Homo sapien
gaatatgagcacacaaagcattttc

SEQ ID NO: 1108841 - DNA, 25 bp, Homo sapien
ttctcccagcagataggcacccttg

SEQ ID NO: 1108842 - DNA, 25 bp, Homo sapien
ttttctcccagcagataggcaccct

SEQ ID NO: 1108843 - DNA, 25 bp, Homo sapien
tgaaatgaaatagctggaagccagc

SEQ ID NO: 1108844 - DNA, 25 bp, Homo sapien
gagagcagctcttgataaatcatga

SEQ ID NO: 1108845 - DNA, 25 bp, Homo sapien
caatctcagttcaggactacaggca

SEQ ID NO: 1108846 - DNA, 25 bp, Homo sapien
ttttccaagtcgactagagagcagc

SEQ ID NO: 1108847 - DNA, 25 bp, Homo sapien
caggagataacccactacaaattta

SEQ ID NO: 1108848 - DNA, 25 bp, Homo sapien
gttcaggagataacccactacaaat

SEQ ID NO: 1108849 - DNA, 25 bp, Homo sapien
ttgggcagtgtgaaattaccaggaa

SEQ ID NO: 1108850 - DNA, 25 bp, Homo sapien
tgtgcatagttgggcagtgtgaaat

SEQ ID NO: 1108851 - DNA, 25 bp, Homo sapien
cacatgcaggcaaccatctgagctg

SEQ ID NO: 1108852 - DNA, 25 bp, Homo sapien
tctcagaggcgtttctggtccccac

SEQ ID NO: 1108853 - DNA, 25 bp, Homo sapien
tgcaaatggcctggattcctagacc

SEQ ID NO: 1108854 - DNA, 25 bp, Homo sapien
aaaaacactggaccttgggacattg

SEQ ID NO: 1108855 - DNA, 25 bp, Homo sapien
ggaaccaatcagcacatctacatag

SEQ ID NO: 1108856 - DNA, 25 bp, Homo sapien
ggttttaaaatgtgctgctgtggtt

SEQ ID NO: 1108857 - DNA, 25 bp, Homo sapien
caggttttaaaatgtgctgctgtgg

SEQ ID NO: 1108858 - DNA, 25 bp, Homo sapien
ttttaaaatgtgctgctgtggtttg

SEQ ID NO: 1108859 - DNA, 25 bp, Homo sapien
ttaaaatgtgctgctgtggtttgac

SEQ ID NO: 1108860 - DNA, 25 bp, Homo sapien
actgcatacttagggagatggtgat

SEQ ID NO: 1108861 - DNA, 25 bp, Homo sapien
ttgtaactgcatacttagggagatg

SEQ ID NO: 1108862 - DNA, 25 bp, Homo sapien
taactgcatacttagggagatggtg

SEQ ID NO: 1108863 - DNA, 25 bp, Homo sapien
tgtaactgcatacttagggagatgg

SEQ ID NO: 1108864 - DNA, 25 bp, Homo sapien
gtgtgcgtgcatgtttccaatctcc

SEQ ID NO: 1108865 - DNA, 25 bp, Homo sapien
agtatatacaagacaatacaagtat

SEQ ID NO: 1108866 - DNA, 25 bp, Homo sapien
cagtaaatgctcttacaagacaagt

SEQ ID NO: 1108867 - DNA, 25 bp, Homo sapien
ttcagatatacaagacagtaaatgc

SEQ ID NO: 1108868 - DNA, 25 bp, Homo sapien
cagtaaaacctaatgctaggtatac

SEQ ID NO: 1108869 - DNA, 25 bp, Homo sapien
tcccaaactagagccgacttaacag

SEQ ID NO: 1108870 - DNA, 25 bp, Homo sapien
tgtacatttgggcaccccttccatg

SEQ ID NO: 1108871 - DNA, 25 bp, Homo sapien
gaagattggcaacattactcctaac

SEQ ID NO: 1108872 - DNA, 25 bp, Homo sapien
gactgttcatggtttcattcggcaa

SEQ ID NO: 1108873 - DNA, 25 bp, Homo sapien
ggctagcacaggttgattgataata

SEQ ID NO: 1108874 - DNA, 25 bp, Homo sapien
tgtcttccagcaaaagattccaccc

SEQ ID NO: 1108875 - DNA, 25 bp, Homo sapien
ttgattgataataactgtgtcttcc

SEQ ID NO: 1108876 - DNA, 25 bp, Homo sapien
tctggaggcctgttggctagcacag

SEQ ID NO: 1108877 - DNA, 25 bp, Homo sapien
aggctcctctttcccgtttcttctg

SEQ ID NO: 1108878 - DNA, 25 bp, Homo sapien
caccctttcccacaaaggctcctct

SEQ ID NO: 1108879 - DNA, 25 bp, Homo sapien
gctcctctttcccgtttcttctgta

SEQ ID NO: 1108880 - DNA, 25 bp, Homo sapien
tatggccactactgcctctgacaag

SEQ ID NO: 1108881 - DNA, 25 bp, Homo sapien
gtgattatggccactactgcctctg

SEQ ID NO: 1108882 - DNA, 25 bp, Homo sapien
gattatggccactactgcctctgac

SEQ ID NO: 1108883 - DNA, 25 bp, Homo sapien
ttatggccactactgcctctgacaa

SEQ ID NO: 1108884 - DNA, 25 bp, Homo sapien
caagatgctgaataggcccaaggca

SEQ ID NO: 1108885 - DNA, 25 bp, Homo sapien
caataggcagcataatcgagtagca

SEQ ID NO: 1108886 - DNA, 25 bp, Homo sapien
acacttgaaaatgagaacaagatgc

SEQ ID NO: 1108887 - DNA, 25 bp, Homo sapien
gccaattcggtctaaaaatgtgtta

SEQ ID NO: 1108888 - DNA, 25 bp, Homo sapien
gttccggagcactcttgggtactgt

SEQ ID NO: 1108889 - DNA, 25 bp, Homo sapien
ctcttgggtactgtggaagctcaga

SEQ ID NO: 1108890 - DNA, 25 bp, Homo sapien
tcttgggtactgtggaagctcagag

SEQ ID NO: 1108891 - DNA, 25 bp, Homo sapien
cattgttccggagcactcttgggta

SEQ ID NO: 1108892 - DNA, 25 bp, Homo sapien
aaatcctggtaaacagaagcatctg

SEQ ID NO: 1108893 - DNA, 25 bp, Homo sapien
tagtcatagcttaggcccacaggct

SEQ ID NO: 1108894 - DNA, 25 bp, Homo sapien
cacaggctccaaaggtagccaatta

SEQ ID NO: 1108895 - DNA, 25 bp, Homo sapien
caaagcttctagacaatagtcatag

SEQ ID NO: 1108896 - DNA, 25 bp, Homo sapien
accacccatctgaacttctttgcag

SEQ ID NO: 1108897 - DNA, 25 bp, Homo sapien
agcagttactgcttgcaccacccat

SEQ ID NO: 1108898 - DNA, 25 bp, Homo sapien
ggagacccataccattcagccagac

SEQ ID NO: 1108899 - DNA, 25 bp, Homo sapien
ggttgacttgacaattatgtgtgcc

SEQ ID NO: 1108900 - DNA, 25 bp, Homo sapien
aaaaggagcagcgacatgtagggcc

SEQ ID NO: 1108901 - DNA, 25 bp, Homo sapien
gcaaatgtcccagtatgagataagg

SEQ ID NO: 1108902 - DNA, 25 bp, Homo sapien
caccccagggatgttactgctagga

SEQ ID NO: 1108903 - DNA, 25 bp, Homo sapien
aagacctggcttctggtcctggaca

SEQ ID NO: 1108904 - DNA, 25 bp, Homo sapien
ctcgctcggtaaataggtcaggaca

SEQ ID NO: 1108905 - DNA, 25 bp, Homo sapien
tgctttggctcaacagctcgctcgg

SEQ ID NO: 1108906 - DNA, 25 bp, Homo sapien
ttatggcggtcacttagaacatcca

SEQ ID NO: 1108907 - DNA, 25 bp, Homo sapien
aagaaaccctttcgatatgccgttg

SEQ ID NO: 1108908 - DNA, 25 bp, Homo sapien
aattggccgggcctcatgctctctg

SEQ ID NO: 1108909 - DNA, 25 bp, Homo sapien
ggcagcgaggccacattgaattggc

SEQ ID NO: 1108910 - DNA, 25 bp, Homo sapien
tccggcaggaatccctctgacagag

SEQ ID NO: 1108911 - DNA, 25 bp, Homo sapien
tgcaggatgccccttcggctggcgt

SEQ ID NO: 1108912 - DNA, 25 bp, Homo sapien
ttagaactccgacaagcagcctgct

SEQ ID NO: 1108913 - DNA, 25 bp, Homo sapien
tacttggatgcgatttccaatctgc

SEQ ID NO: 1108914 - DNA, 25 bp, Homo sapien
gcagcctgctctttcgggatccaaa

SEQ ID NO: 1108915 - DNA, 25 bp, Homo sapien
tcctctttaacttggtgattgtaac

SEQ ID NO: 1108916 - DNA, 25 bp, Homo sapien
caatcgtaaggattcttgttcagta

SEQ ID NO: 1108917 - DNA, 25 bp, Homo sapien
tctcctttgcccatcaatcgtaagg

SEQ ID NO: 1108918 - DNA, 25 bp, Homo sapien
cctttgcccatcaatcgtaaggatt

SEQ ID NO: 1108919 - DNA, 25 bp, Homo sapien
tgcccatcaatcgtaaggattcttg

SEQ ID NO: 1108920 - DNA, 25 bp, Homo sapien
atttttcttcttgtcaagattgcac

SEQ ID NO: 1108921 - DNA, 25 bp, Homo sapien
gatttttcttcttgtcaagattgca

SEQ ID NO: 1108922 - DNA, 25 bp, Homo sapien
ttgagatttttcttcttgtcaagat

SEQ ID NO: 1108923 - DNA, 25 bp, Homo sapien
gagatttttcttcttgtcaagattg

SEQ ID NO: 1108924 - DNA, 25 bp, Homo sapien
tcattgttgtcaccgttgtggtcac

SEQ ID NO: 1108925 - DNA, 25 bp, Homo sapien
gtggtatcattgttgtcaccgttgt

SEQ ID NO: 1108926 - DNA, 25 bp, Homo sapien
atatggtggtatcattgttgtcacc

SEQ ID NO: 1108927 - DNA, 25 bp, Homo sapien
tatcattgttgtcaccgttgtggtc

SEQ ID NO: 1108928 - DNA, 25 bp, Homo sapien
taagcttctaatcatgaaaaactgt

SEQ ID NO: 1108929 - DNA, 25 bp, Homo sapien
agcttctaatcatgaaaaactgttt

SEQ ID NO: 1108930 - DNA, 25 bp, Homo sapien
ctgttttaatttgctcctctgtgga

SEQ ID NO: 1108931 - DNA, 25 bp, Homo sapien
ctcatttaagcttctaatcatgaaa

SEQ ID NO: 1108932 - DNA, 25 bp, Homo sapien
accttatgtaggtgactagttgacg

SEQ ID NO: 1108933 - DNA, 25 bp, Homo sapien
tagttaggaggctatcccaattgcc

SEQ ID NO: 1108934 - DNA, 25 bp, Homo sapien
ctagttgacgggtgtagcaaaccac

SEQ ID NO: 1108935 - DNA, 25 bp, Homo sapien
tataggtaggcagtgactagttagg

SEQ ID NO: 1108936 - DNA, 25 bp, Homo sapien
gaccaaattgtcctagtgtgctggg

SEQ ID NO: 1108937 - DNA, 25 bp, Homo sapien
cgaaggattctgtcattcagcatat

SEQ ID NO: 1108938 - DNA, 25 bp, Homo sapien
atgactttcaaccaaaggcagtcac

SEQ ID NO: 1108939 - DNA, 25 bp, Homo sapien
ttcataggggtcgaaggattctgtc

SEQ ID NO: 1108940 - DNA, 25 bp, Homo sapien
atttacaagacgcacaaccagcagg

SEQ ID NO: 1108941 - DNA, 25 bp, Homo sapien
tatgtatccatagtgagttcgaagg

SEQ ID NO: 1108942 - DNA, 25 bp, Homo sapien
aaaggaacgctgctatgaagctcac

SEQ ID NO: 1108943 - DNA, 25 bp, Homo sapien
tttgtaccaggttgtccaaagcagt

SEQ ID NO: 1108944 - DNA, 25 bp, Homo sapien
tcagtgagttggaagccctctggct

SEQ ID NO: 1108945 - DNA, 25 bp, Homo sapien
gagagatatgtacgttgtgccacaa

SEQ ID NO: 1108946 - DNA, 25 bp, Homo sapien
aagatgttgtcagggacccaagcaa

SEQ ID NO: 1108947 - DNA, 25 bp, Homo sapien
tccaactgctaggtaaccctctggg

SEQ ID NO: 1108948 - DNA, 25 bp, Homo sapien
caaacaggcttggactttgtgtctc

SEQ ID NO: 1108949 - DNA, 25 bp, Homo sapien
caaaatgacctttcgatgggagctg

SEQ ID NO: 1108950 - DNA, 25 bp, Homo sapien
gtagcttgtacctttgttaccaaca

SEQ ID NO: 1108951 - DNA, 25 bp, Homo sapien
gactctccctagtaatgtagacaca

SEQ ID NO: 1108952 - DNA, 25 bp, Homo sapien
cattgatgttggacttgcccatgta

SEQ ID NO: 1108953 - DNA, 25 bp, Homo sapien
tttggcctgtgaagtcagccccgct

SEQ ID NO: 1108954 - DNA, 25 bp, Homo sapien
gcaaatgcagatgccctctttggcc

SEQ ID NO: 1108955 - DNA, 25 bp, Homo sapien
cctgccatgagcagattcgaataat

SEQ ID NO: 1108956 - DNA, 25 bp, Homo sapien
tccactctggcagcgcaatatgtca

SEQ ID NO: 1108957 - DNA, 25 bp, Homo sapien
ggtgctccatggagggccacgtggc

SEQ ID NO: 1108958 - DNA, 25 bp, Homo sapien
gtgctccatggagggccacgtggct

SEQ ID NO: 1108959 - DNA, 25 bp, Homo sapien
tgctccatggagggccacgtggctc

SEQ ID NO: 1108960 - DNA, 25 bp, Homo sapien
cttcattagcatactgtgcagttcc

SEQ ID NO: 1108961 - DNA, 25 bp, Homo sapien
tactgtgcagttcccccacgcaggg

SEQ ID NO: 1108962 - DNA, 25 bp, Homo sapien
ctccttcattagcatactgtgcagt

SEQ ID NO: 1108963 - DNA, 25 bp, Homo sapien
gttcccccacgcagggcagctgttg

SEQ ID NO: 1108964 - DNA, 25 bp, Homo sapien
aaagcagtccacccataaaaatgtt

SEQ ID NO: 1108965 - DNA, 25 bp, Homo sapien
gaccacagggtttaaggactacagc

SEQ ID NO: 1108966 - DNA, 25 bp, Homo sapien
gcagattagttgctggcaaggctgg

SEQ ID NO: 1108967 - DNA, 25 bp, Homo sapien
tctctctttgtatgcccccatgaca

SEQ ID NO: 1108968 - DNA, 25 bp, Homo sapien
gggtatcagaggctatcctaactgc

SEQ ID NO: 1108969 - DNA, 25 bp, Homo sapien
gacagaaaagccgactgctctgggc

SEQ ID NO: 1108970 - DNA, 25 bp, Homo sapien
aaagaagtagcgatataggaatttc

SEQ ID NO: 1108971 - DNA, 25 bp, Homo sapien
aagaaagaagtagcgatataggaat

SEQ ID NO: 1108972 - DNA, 25 bp, Homo sapien
agtagcgatataggaatttcttctg

SEQ ID NO: 1108973 - DNA, 25 bp, Homo sapien
gaagtagcgatataggaatttcttc

SEQ ID NO: 1108974 - DNA, 25 bp, Homo sapien
cagatgtcccttgtaagccacagcc

SEQ ID NO: 1108975 - DNA, 25 bp, Homo sapien
tgtcccttgtaagccacagccaagg

SEQ ID NO: 1108976 - DNA, 25 bp, Homo sapien
ttacagattaatcagatgtcccttg

SEQ ID NO: 1108977 - DNA, 25 bp, Homo sapien
gatgtcccttgtaagccacagccaa

SEQ ID NO: 1108978 - DNA, 25 bp, Homo sapien
tgatggtgtacctgcttgctgcacc

SEQ ID NO: 1108979 - DNA, 25 bp, Homo sapien
ctcatggtgacaaagaggcaatcag

SEQ ID NO: 1108980 - DNA, 25 bp, Homo sapien
ccacaagcagggtgatggtgtacct

SEQ ID NO: 1108981 - DNA, 25 bp, Homo sapien
cacacatggtaaggagctggcctca

SEQ ID NO: 1108982 - DNA, 25 bp, Homo sapien
ctgcttgggtttggggagtaggctg

SEQ ID NO: 1108983 - DNA, 25 bp, Homo sapien
tgcttgggtttggggagtaggctgg

SEQ ID NO: 1108984 - DNA, 25 bp, Homo sapien
gaacggaaccagaatattagccaag

SEQ ID NO: 1108985 - DNA, 25 bp, Homo sapien
catcatgagtccagtacacaaaggc

SEQ ID NO: 1108986 - DNA, 25 bp, Homo sapien
aaataggagctactggcaagaacgg

SEQ ID NO: 1108987 - DNA, 25 bp, Homo sapien
ctatatcaccagagtctagatcggg

SEQ ID NO: 1108988 - DNA, 25 bp, Homo sapien
ttctcattaccaggaggcaggatac

SEQ ID NO: 1108989 - DNA, 25 bp, Homo sapien
cattaccaggaggcaggatactgga

SEQ ID NO: 1108990 - DNA, 25 bp, Homo sapien
ctcattaccaggaggcaggatactg

SEQ ID NO: 1108991 - DNA, 25 bp, Homo sapien
ctttctcattaccaggaggcaggat

SEQ ID NO: 1108992 - DNA, 25 bp, Homo sapien
tgaaaatcaaccgttggtcctgggc

SEQ ID NO: 1108993 - DNA, 25 bp, Homo sapien
tgggcttctagtcacttcacgctgt

SEQ ID NO: 1108994 - DNA, 25 bp, Homo sapien
ctttgaaaatcaaccgttggtcctg

SEQ ID NO: 1108995 - DNA, 25 bp, Homo sapien
tggcacagattgattttcgcagatg

SEQ ID NO: 1108996 - DNA, 25 bp, Homo sapien
acctggcacagattgattttcgcag

SEQ ID NO: 1108997 - DNA, 25 bp, Homo sapien
cctggcacagattgattttcgcaga

SEQ ID NO: 1108998 - DNA, 25 bp, Homo sapien
gcacagattgattttcgcagatggg

SEQ ID NO: 1108999 - DNA, 25 bp, Homo sapien
caatatcttgtgcagatccccaaca

SEQ ID NO: 1109000 - DNA, 25 bp, Homo sapien
aacagatggtagatgacactcctga

SEQ ID NO: 1109001 - DNA, 25 bp, Homo sapien
gaaaggttcagtatggcttaaacaa

SEQ ID NO: 1109002 - DNA, 25 bp, Homo sapien
tgagttacacactcctagagccaat

SEQ ID NO: 1109003 - DNA, 25 bp, Homo sapien
gcacagcatggaggttattaaaatc

SEQ ID NO: 1109004 - DNA, 25 bp, Homo sapien
aaagagatatgaattggcgttccat

SEQ ID NO: 1109005 - DNA, 25 bp, Homo sapien
taaaatcccatatgtgagaaccaca

SEQ ID NO: 1109006 - DNA, 25 bp, Homo sapien
tggcgttccatggagataatgctat

SEQ ID NO: 1109007 - DNA, 25 bp, Homo sapien
tattccaagaagttgcttcgttgtg

SEQ ID NO: 1109008 - DNA, 25 bp, Homo sapien
tacattccatttgctattccaagaa

SEQ ID NO: 1109009 - DNA, 25 bp, Homo sapien
gaagttgcttcgttgtgtaataaaa

SEQ ID NO: 1109010 - DNA, 25 bp, Homo sapien
atggtgcggggggttacattccatt

SEQ ID NO: 1109011 - DNA, 25 bp, Homo sapien
tgcctgatttaaattgtgtgtatca

SEQ ID NO: 1109012 - DNA, 25 bp, Homo sapien
atcaatgcctgatttaaattgtgtg

SEQ ID NO: 1109013 - DNA, 25 bp, Homo sapien
ttaaattgtgtgtatcatatggcat

SEQ ID NO: 1109014 - DNA, 25 bp, Homo sapien
gcaaatcaatgcctgatttaaattg

SEQ ID NO: 1109015 - DNA, 25 bp, Homo sapien
tcttcttgccagacggcttgcagca

SEQ ID NO: 1109016 - DNA, 25 bp, Homo sapien
ttagctgagtcctccaattcactta

SEQ ID NO: 1109017 - DNA, 25 bp, Homo sapien
caatagagaagaacataatattctt

SEQ ID NO: 1109018 - DNA, 25 bp, Homo sapien
ctgacatccattactcttagctgag

SEQ ID NO: 1109019 - DNA, 25 bp, Homo sapien
taaattagtaaattccacttagtca

SEQ ID NO: 1109020 - DNA, 25 bp, Homo sapien
agagaaagaaggcatgtaaattagt

SEQ ID NO: 1109021 - DNA, 25 bp, Homo sapien
agtaaattccacttagtcaaacaag

SEQ ID NO: 1109022 - DNA, 25 bp, Homo sapien
aaatagagaaagaaggcatgtaaat

SEQ ID NO: 1109023 - DNA, 25 bp, Homo sapien
atggcacaaaggtcacagtccagtt

SEQ ID NO: 1109024 - DNA, 25 bp, Homo sapien
cacaaaggtcacagtccagttgcaa

SEQ ID NO: 1109025 - DNA, 25 bp, Homo sapien
ggcacaaaggtcacagtccagttgc

SEQ ID NO: 1109026 - DNA, 25 bp, Homo sapien
tggcacaaaggtcacagtccagttg

SEQ ID NO: 1109027 - DNA, 25 bp, Homo sapien
taactcatgcgcttctctgtggtca

SEQ ID NO: 1109028 - DNA, 25 bp, Homo sapien
cctcatattgcggaaaggtccccaa

SEQ ID NO: 1109029 - DNA, 25 bp, Homo sapien
tatttgggcattcggatagatacca

SEQ ID NO: 1109030 - DNA, 25 bp, Homo sapien
ggaacgctggtatgggacacaactc

SEQ ID NO: 1109031 - DNA, 25 bp, Homo sapien
caatatcttcccttaacagttcttt

SEQ ID NO: 1109032 - DNA, 25 bp, Homo sapien
aacagttctttattagcgctagata

SEQ ID NO: 1109033 - DNA, 25 bp, Homo sapien
tcaatatcttcccttaacagttctt

SEQ ID NO: 1109034 - DNA, 25 bp, Homo sapien
tattagcgctagatataagaactaa

SEQ ID NO: 1109035 - DNA, 25 bp, Homo sapien
gatcaacccacattaccaaaggaga

SEQ ID NO: 1109036 - DNA, 25 bp, Homo sapien
tagcagatgctcaatttatccatga

SEQ ID NO: 1109037 - DNA, 25 bp, Homo sapien
caaaggagagttgatccacctaagg

SEQ ID NO: 1109038 - DNA, 25 bp, Homo sapien
tcagcattcaaattacatccagaga

SEQ ID NO: 1109039 - DNA, 25 bp, Homo sapien
gtttctacttagcagatcctgaaga

SEQ ID NO: 1109040 - DNA, 25 bp, Homo sapien
cagggactctcatgataaaaacaag

SEQ ID NO: 1109041 - DNA, 25 bp, Homo sapien
ccaattattgccagacagggactct

SEQ ID NO: 1109042 - DNA, 25 bp, Homo sapien
gccttctttgcccaattattgccag

SEQ ID NO: 1109043 - DNA, 25 bp, Homo sapien
aatgagggctgtatccagcaggagt

SEQ ID NO: 1109044 - DNA, 25 bp, Homo sapien
tgtgagaaaatgagggctgtatcca

SEQ ID NO: 1109045 - DNA, 25 bp, Homo sapien
aaaatgagggctgtatccagcagga

SEQ ID NO: 1109046 - DNA, 25 bp, Homo sapien
agaaaatgagggctgtatccagcag

SEQ ID NO: 1109047 - DNA, 25 bp, Homo sapien
gaagcaagggttatgttcccaagca

SEQ ID NO: 1109048 - DNA, 25 bp, Homo sapien
taaagagagcaacggacacaatgga

SEQ ID NO: 1109049 - DNA, 25 bp, Homo sapien
tgcaactgtagtcctctcccagaga

SEQ ID NO: 1109050 - DNA, 25 bp, Homo sapien
ctacagataagggtaaagaggctct

SEQ ID NO: 1109051 - DNA, 25 bp, Homo sapien
tatcaaactccaaagtctgccacgg

SEQ ID NO: 1109052 - DNA, 25 bp, Homo sapien
tgcttttgaggcttaagggcacagg

SEQ ID NO: 1109053 - DNA, 25 bp, Homo sapien
gatataaaggctccagcacgaagca

SEQ ID NO: 1109054 - DNA, 25 bp, Homo sapien
taaagaacaatttcaccgtgaggag

SEQ ID NO: 1109055 - DNA, 25 bp, Homo sapien
caaagctgatgacaagaattccctt

SEQ ID NO: 1109056 - DNA, 25 bp, Homo sapien
gaattcccttgcaaaatggtatccc

SEQ ID NO: 1109057 - DNA, 25 bp, Homo sapien
ggtatatcattatgcttcccctccc

SEQ ID NO: 1109058 - DNA, 25 bp, Homo sapien
caagttaatagaattttgaggctgg

SEQ ID NO: 1109059 - DNA, 25 bp, Homo sapien
tagggagcctagcataccatcagga

SEQ ID NO: 1109060 - DNA, 25 bp, Homo sapien
catcaggagtataacacgtggtcac

SEQ ID NO: 1109061 - DNA, 25 bp, Homo sapien
ttgccatatcgatgacaacagctgc

SEQ ID NO: 1109062 - DNA, 25 bp, Homo sapien
gaagaagcacgtacagggtgccaag

SEQ ID NO: 1109063 - DNA, 25 bp, Homo sapien
tgtcttatctccaatgagctgtgca

SEQ ID NO: 1109064 - DNA, 25 bp, Homo sapien
tcaaaagcttggctctgcagagtca

SEQ ID NO: 1109065 - DNA, 25 bp, Homo sapien
caaaagtttggcatgtgaagtcaaa

SEQ ID NO: 1109066 - DNA, 25 bp, Homo sapien
tttcaatttgctgctcaaccgatca

SEQ ID NO: 1109067 - DNA, 25 bp, Homo sapien
gttaacaggtcatcagtgttggccc

SEQ ID NO: 1109068 - DNA, 25 bp, Homo sapien
tagatcccagtcttcagctagccag

SEQ ID NO: 1109069 - DNA, 25 bp, Homo sapien
cacatgcagtgggagtagatcccag

SEQ ID NO: 1109070 - DNA, 25 bp, Homo sapien
gaatcttttgcaaccataagctgtg

SEQ ID NO: 1109071 - DNA, 25 bp, Homo sapien
tcagttgaaggttttaatggcagct

SEQ ID NO: 1109072 - DNA, 25 bp, Homo sapien
ccataaagccctgtattcaaactgc

SEQ ID NO: 1109073 - DNA, 25 bp, Homo sapien
gcctgatgccataaagccctgtatt

SEQ ID NO: 1109074 - DNA, 25 bp, Homo sapien
cttatgcctgatgccataaagccct

SEQ ID NO: 1109075 - DNA, 25 bp, Homo sapien
gagggtgggcgatggtccggctgac

SEQ ID NO: 1109076 - DNA, 25 bp, Homo sapien
tcaagctacttgtacacaacatgag

SEQ ID NO: 1109077 - DNA, 25 bp, Homo sapien
gctacttgtacacaacatgagtaga

SEQ ID NO: 1109078 - DNA, 25 bp, Homo sapien
tgtacacaacatgagtagagctgag

SEQ ID NO: 1109079 - DNA, 25 bp, Homo sapien
tatggagctccaaactataacagtt

SEQ ID NO: 1109080 - DNA, 25 bp, Homo sapien
tgtatgaccccttgaagatgctgtg

SEQ ID NO: 1109081 - DNA, 25 bp, Homo sapien
ttggaggcagtttctgtatgacccc

SEQ ID NO: 1109082 - DNA, 25 bp, Homo sapien
gggaagtcatttgaacaaatctgca

SEQ ID NO: 1109083 - DNA, 25 bp, Homo sapien
agtgctcttgctacaagttcttggg

SEQ ID NO: 1109084 - DNA, 25 bp, Homo sapien
tgtttactgaataagagtcacaggg

SEQ ID NO: 1109085 - DNA, 25 bp, Homo sapien
tgtaaagggcataagagagagctca

SEQ ID NO: 1109086 - DNA, 25 bp, Homo sapien
agtcaaagggcttcaggctatctcc

SEQ ID NO: 1109087 - DNA, 25 bp, Homo sapien
tggtcctgtccctgatcaatgcagt

SEQ ID NO: 1109088 - DNA, 25 bp, Homo sapien
gactctgtgtggtttgataagtgct

SEQ ID NO: 1109089 - DNA, 25 bp, Homo sapien
gttcacaccctaccagatattgcag

SEQ ID NO: 1109090 - DNA, 25 bp, Homo sapien
taagtgctttatcctgtaactccag

SEQ ID NO: 1109091 - DNA, 25 bp, Homo sapien
taaatactgccaattcccttccgga

SEQ ID NO: 1109092 - DNA, 25 bp, Homo sapien
aacttctgccagagctcaactgcat

SEQ ID NO: 1109093 - DNA, 25 bp, Homo sapien
cagctcctgagcgatatagctctgg

SEQ ID NO: 1109094 - DNA, 25 bp, Homo sapien
ccaacaggattgaagctagcagcag

SEQ ID NO: 1109095 - DNA, 25 bp, Homo sapien
cagcagaggcatgtgtttgatcctg

SEQ ID NO: 1109096 - DNA, 25 bp, Homo sapien
agcgacctctccctccaagttcacc

SEQ ID NO: 1109097 - DNA, 25 bp, Homo sapien
aacttcaaacacaatgctgccttcc

SEQ ID NO: 1109098 - DNA, 25 bp, Homo sapien
tgggtcccaggtgccgaacttcaaa

SEQ ID NO: 1109099 - DNA, 25 bp, Homo sapien
ccttcccgaagtctctttggatgcc

SEQ ID NO: 1109100 - DNA, 25 bp, Homo sapien
gggttatgcttcagcaatactgggt

SEQ ID NO: 1109101 - DNA, 25 bp, Homo sapien
taagcccctggctggtgcttgctgt

SEQ ID NO: 1109102 - DNA, 25 bp, Homo sapien
gcccctggctggtgcttgctgtgaa

SEQ ID NO: 1109103 - DNA, 25 bp, Homo sapien
gaagctctctgcattctctgactac

SEQ ID NO: 1109104 - DNA, 25 bp, Homo sapien
gctggtgcttgctgtgaagctctct

SEQ ID NO: 1109105 - DNA, 25 bp, Homo sapien
caacttttccataatgtaaaagtga

SEQ ID NO: 1109106 - DNA, 25 bp, Homo sapien
aaagtgacagtgtgttccggtagct

SEQ ID NO: 1109107 - DNA, 25 bp, Homo sapien
tttccataatgtaaaagtgacagtg

SEQ ID NO: 1109108 - DNA, 25 bp, Homo sapien
tgacagtgtgttccggtagctgtaa

SEQ ID NO: 1109109 - DNA, 25 bp, Homo sapien
agaaagagcaattttaggacatact

SEQ ID NO: 1109110 - DNA, 25 bp, Homo sapien
gtatttaaacaaacacgatgtgaga

SEQ ID NO: 1109111 - DNA, 25 bp, Homo sapien
tatttcgatcattacaacaaatgtg

SEQ ID NO: 1109112 - DNA, 25 bp, Homo sapien
tagaagccatgtcagatatacataa

SEQ ID NO: 1109113 - DNA, 25 bp, Homo sapien
tgaattaactcatggagaatgccca

SEQ ID NO: 1109114 - DNA, 25 bp, Homo sapien
gagggattctcctagaaaagagtac

SEQ ID NO: 1109115 - DNA, 25 bp, Homo sapien
gtcactgactcaacaagcaaaaagg

SEQ ID NO: 1109116 - DNA, 25 bp, Homo sapien
tatgataaaagcaactggctgctat

SEQ ID NO: 1109117 - DNA, 25 bp, Homo sapien
tttgacctcccacgtcatgaagtta

SEQ ID NO: 1109118 - DNA, 25 bp, Homo sapien
acttcagtctttggcataaaggtca

SEQ ID NO: 1109119 - DNA, 25 bp, Homo sapien
aagttaacacggttcctgcctccag

SEQ ID NO: 1109120 - DNA, 25 bp, Homo sapien
gcagaactgagtctattttatcaat

SEQ ID NO: 1109121 - DNA, 25 bp, Homo sapien
cttcataaggcccattgttccagtc

SEQ ID NO: 1109122 - DNA, 25 bp, Homo sapien
ctatcccagtatccctgcttcataa

SEQ ID NO: 1109123 - DNA, 25 bp, Homo sapien
gtctgttactgtgcagctgtgtttg

SEQ ID NO: 1109124 - DNA, 25 bp, Homo sapien
tgttccagtctgttactgtgcagct

SEQ ID NO: 1109125 - DNA, 25 bp, Homo sapien
tgaagcagatgaagtcagtaaagag

SEQ ID NO: 1109126 - DNA, 25 bp, Homo sapien
cctccaaatgggcagtataatttgg

SEQ ID NO: 1109127 - DNA, 25 bp, Homo sapien
ttggggtcagatatgaagcagatga

SEQ ID NO: 1109128 - DNA, 25 bp, Homo sapien
gagcaccaacaatcaagaatccagg

SEQ ID NO: 1109129 - DNA, 25 bp, Homo sapien
tacttgaatgcagataatcagtaaa

SEQ ID NO: 1109130 - DNA, 25 bp, Homo sapien
catacttgaatgcagataatcagta

SEQ ID NO: 1109131 - DNA, 25 bp, Homo sapien
atacttgaatgcagataatcagtaa

SEQ ID NO: 1109132 - DNA, 25 bp, Homo sapien
gttcccgaccttccctgagtgagtg

SEQ ID NO: 1109133 - DNA, 25 bp, Homo sapien
gtcggtacttaactgtaggctccca

SEQ ID NO: 1109134 - DNA, 25 bp, Homo sapien
ccaaagtaggcccaaggacagagtg

SEQ ID NO: 1109135 - DNA, 25 bp, Homo sapien
tgtctaaaaacaaggcagtcggtac

SEQ ID NO: 1109136 - DNA, 25 bp, Homo sapien
tttaatctttcatccgcatccttcc

SEQ ID NO: 1109137 - DNA, 25 bp, Homo sapien
acagctatccaatccttttaatctt

SEQ ID NO: 1109138 - DNA, 25 bp, Homo sapien
ttaatctttcatccgcatccttcct

SEQ ID NO: 1109139 - DNA, 25 bp, Homo sapien
tagctttctgtagctaaactacagc

SEQ ID NO: 1109140 - DNA, 25 bp, Homo sapien
ttgtctgagagggtaggcattagca

SEQ ID NO: 1109141 - DNA, 25 bp, Homo sapien
cattgcctaggaaggtttgtctgag

SEQ ID NO: 1109142 - DNA, 25 bp, Homo sapien
cattagtccagaaagtacacccttt

SEQ ID NO: 1109143 - DNA, 25 bp, Homo sapien
gaagtccaccaagtacaccattagt

SEQ ID NO: 1109144 - DNA, 25 bp, Homo sapien
agatcctttgacaagcagtactcat

SEQ ID NO: 1109145 - DNA, 25 bp, Homo sapien
tcagatcctttgacaagcagtactc

SEQ ID NO: 1109146 - DNA, 25 bp, Homo sapien
cagatcctttgacaagcagtactca

SEQ ID NO: 1109147 - DNA, 25 bp, Homo sapien
tatcagatcctttgacaagcagtac

SEQ ID NO: 1109148 - DNA, 25 bp, Homo sapien
ttatgcagcaagtctacaaagggaa

SEQ ID NO: 1109149 - DNA, 25 bp, Homo sapien
tgctgttcgatcaatcaacactgca

SEQ ID NO: 1109150 - DNA, 25 bp, Homo sapien
ggaaagaactttacacaaagccaca

SEQ ID NO: 1109151 - DNA, 25 bp, Homo sapien
aatctttgaaccactgacatgggta

SEQ ID NO: 1109152 - DNA, 25 bp, Homo sapien
ttcatcaaaggcttctcaaactgct

SEQ ID NO: 1109153 - DNA, 25 bp, Homo sapien
aagccctgcatgtcaatagccagtg

SEQ ID NO: 1109154 - DNA, 25 bp, Homo sapien
cagtctcagcactatcacttgcata

SEQ ID NO: 1109155 - DNA, 25 bp, Homo sapien
cacttgcatacattttgtcggccat

SEQ ID NO: 1109156 - DNA, 25 bp, Homo sapien
ttaggctctcgcctctctggaagcg

SEQ ID NO: 1109157 - DNA, 25 bp, Homo sapien
tattcctgggccctcaactgtggat

SEQ ID NO: 1109158 - DNA, 25 bp, Homo sapien
cagtgtgtccaactatgccttggag

SEQ ID NO: 1109159 - DNA, 25 bp, Homo sapien
gatctggttccagcatgaactgtgc

SEQ ID NO: 1109160 - DNA, 25 bp, Homo sapien
taaatatatggtaagcaagcaacat

SEQ ID NO: 1109161 - DNA, 25 bp, Homo sapien
cagcaagcgacatatacttactgaa

SEQ ID NO: 1109162 - DNA, 25 bp, Homo sapien
tagatcccactaacaagggaaggaa

SEQ ID NO: 1109163 - DNA, 25 bp, Homo sapien
attaccaggacccagcaagcgacat

SEQ ID NO: 1109164 - DNA, 25 bp, Homo sapien
tcaggctgggtttgtagcaattctc

SEQ ID NO: 1109165 - DNA, 25 bp, Homo sapien
tttaagtagccctgaccagagaaga

SEQ ID NO: 1109166 - DNA, 25 bp, Homo sapien
gaaagcttctgtagttctccgtcag

SEQ ID NO: 1109167 - DNA, 25 bp, Homo sapien
gccgatttgcacatcgtcagagaag

SEQ ID NO: 1109168 - DNA, 25 bp, Homo sapien
ataatcaacaaagccccacggtgac

SEQ ID NO: 1109169 - DNA, 25 bp, Homo sapien
agtttcataatcaacaaagccccac

SEQ ID NO: 1109170 - DNA, 25 bp, Homo sapien
tcataatcaacaaagccccacggtg

SEQ ID NO: 1109171 - DNA, 25 bp, Homo sapien
tttcataatcaacaaagccccacgg

SEQ ID NO: 1109172 - DNA, 25 bp, Homo sapien
cctcctgcttttggttgcccccatg

SEQ ID NO: 1109173 - DNA, 25 bp, Homo sapien
tggttgcccccatgcacccacttac

SEQ ID NO: 1109174 - DNA, 25 bp, Homo sapien
tcctgcttttggttgcccccatgca

SEQ ID NO: 1109175 - DNA, 25 bp, Homo sapien
tttggttgcccccatgcacccactt

SEQ ID NO: 1109176 - DNA, 25 bp, Homo sapien
tgatgtttacccctattccttcatg

SEQ ID NO: 1109177 - DNA, 25 bp, Homo sapien
cagggattcctcgtctgttcagcta

SEQ ID NO: 1109178 - DNA, 25 bp, Homo sapien
tattccttcatgtcgaaaggccatc

SEQ ID NO: 1109179 - DNA, 25 bp, Homo sapien
catcacatggatacagggattcctc

SEQ ID NO: 1109180 - DNA, 25 bp, Homo sapien
ggtaatcaagatacttacaacttgg

SEQ ID NO: 1109181 - DNA, 25 bp, Homo sapien
aatttactggcatatctcttgggaa

SEQ ID NO: 1109182 - DNA, 25 bp, Homo sapien
atttactggcatatctcttgggaaa

SEQ ID NO: 1109183 - DNA, 25 bp, Homo sapien
tccttggtaatcaagatacttacaa

SEQ ID NO: 1109184 - DNA, 25 bp, Homo sapien
tagcactggctccagaatgtcttgt

SEQ ID NO: 1109185 - DNA, 25 bp, Homo sapien
tggcctgatagcactggctccagaa

SEQ ID NO: 1109186 - DNA, 25 bp, Homo sapien
tgatagcactggctccagaatgtct

SEQ ID NO: 1109187 - DNA, 25 bp, Homo sapien
ccagaatgtcttgtagccgtaccat

SEQ ID NO: 1109188 - DNA, 25 bp, Homo sapien
tcccgtagacgtgaatgccataaca

SEQ ID NO: 1109189 - DNA, 25 bp, Homo sapien
gtaggtgtcatttatcatcccgtag

SEQ ID NO: 1109190 - DNA, 25 bp, Homo sapien
gctgagatatgagccagactggact

SEQ ID NO: 1109191 - DNA, 25 bp, Homo sapien
aatgccataacaggcgtccatggcc

SEQ ID NO: 1109192 - DNA, 25 bp, Homo sapien
cagtgataaacctatgacccccata

SEQ ID NO: 1109193 - DNA, 25 bp, Homo sapien
tggatgtgtaaatattatcctgtgc

SEQ ID NO: 1109194 - DNA, 25 bp, Homo sapien
gtaaatattatcctgtgcttcttgg

SEQ ID NO: 1109195 - DNA, 25 bp, Homo sapien
ccccatatggggcatgttcatgaag

SEQ ID NO: 1109196 - DNA, 25 bp, Homo sapien
tcacattaagtgatgcggcaagatc

SEQ ID NO: 1109197 - DNA, 25 bp, Homo sapien
taagatacttgcaccctgatagcag

SEQ ID NO: 1109198 - DNA, 25 bp, Homo sapien
tttggagaaacacaccttgggccta

SEQ ID NO: 1109199 - DNA, 25 bp, Homo sapien
aatacacagacaatagcccaatggg

SEQ ID NO: 1109200 - DNA, 25 bp, Homo sapien
cacaccttctgctatagagtgaggg

SEQ ID NO: 1109201 - DNA, 25 bp, Homo sapien
taaattaagttcatgtcccaagcca

SEQ ID NO: 1109202 - DNA, 25 bp, Homo sapien
gaacaaataagagttggcccttcat

SEQ ID NO: 1109203 - DNA, 25 bp, Homo sapien
gaaagctacaacgaggcaggagagc

SEQ ID NO: 1109204 - DNA, 25 bp, Homo sapien
aaggtcagcaggtccccaattcaga

SEQ ID NO: 1109205 - DNA, 25 bp, Homo sapien
tgttacaacgcccaaggacagttct

SEQ ID NO: 1109206 - DNA, 25 bp, Homo sapien
cagcagctcttggtgtatcaatggc

SEQ ID NO: 1109207 - DNA, 25 bp, Homo sapien
ggtatctgggctcaaaggtcacatg

SEQ ID NO: 1109208 - DNA, 25 bp, Homo sapien
gtatctgagtcacccttggaaacaa

SEQ ID NO: 1109209 - DNA, 25 bp, Homo sapien
ttagcaggccgaatagagaggactc

SEQ ID NO: 1109210 - DNA, 25 bp, Homo sapien
cataccaaggcacgcgagtgaggct

SEQ ID NO: 1109211 - DNA, 25 bp, Homo sapien
caagaactctcaacaatgcatggtg

SEQ ID NO: 1109212 - DNA, 25 bp, Homo sapien
agttctgcgtatttcactgatacat

SEQ ID NO: 1109213 - DNA, 25 bp, Homo sapien
catgaatgccgttttatccatcaaa

SEQ ID NO: 1109214 - DNA, 25 bp, Homo sapien
catttgcctgatattgttgtcctca

SEQ ID NO: 1109215 - DNA, 25 bp, Homo sapien
ttccttattgaacggccaggcacag

SEQ ID NO: 1109216 - DNA, 25 bp, Homo sapien
cagcatattgcctatttccaggtaa

SEQ ID NO: 1109217 - DNA, 25 bp, Homo sapien
tatgtcgccgtggtccaagttggca

SEQ ID NO: 1109218 - DNA, 25 bp, Homo sapien
tccaggtaatttccaccgtctatgt

SEQ ID NO: 1109219 - DNA, 25 bp, Homo sapien
aaaagaataagccagcatattgcct

SEQ ID NO: 1109220 - DNA, 25 bp, Homo sapien
tgcaattcccattccctttgccgct

SEQ ID NO: 1109221 - DNA, 25 bp, Homo sapien
tctgcaattcccattccctttgccg

SEQ ID NO: 1109222 - DNA, 25 bp, Homo sapien
aattcccattccctttgccgcttca

SEQ ID NO: 1109223 - DNA, 25 bp, Homo sapien
cccattccctttgccgcttcactca

SEQ ID NO: 1109224 - DNA, 25 bp, Homo sapien
gcaattactgccaattgcattggga

SEQ ID NO: 1109225 - DNA, 25 bp, Homo sapien
gtcgtggcagccttgctgagactgc

SEQ ID NO: 1109226 - DNA, 25 bp, Homo sapien
gggatattttgtgtgagagaatgcc

SEQ ID NO: 1109227 - DNA, 25 bp, Homo sapien
ccagcttgctgtgtgggtcgtggca

SEQ ID NO: 1109228 - DNA, 25 bp, Homo sapien
gccaggctggtgatgtcatcatctt

SEQ ID NO: 1109229 - DNA, 25 bp, Homo sapien
ggtgcagccatcttttcagccaggc

SEQ ID NO: 1109230 - DNA, 25 bp, Homo sapien
cttggacgcagactgtagatgatgt

SEQ ID NO: 1109231 - DNA, 25 bp, Homo sapien
gatgatgtggccctctggtgcagcc

SEQ ID NO: 1109232 - DNA, 25 bp, Homo sapien
ccagagtcaaggttgtcatctgcat

SEQ ID NO: 1109233 - DNA, 25 bp, Homo sapien
gtaagttaggtatctagactccttc

SEQ ID NO: 1109234 - DNA, 25 bp, Homo sapien
gcaggtgcaatgagtgccagagtca

SEQ ID NO: 1109235 - DNA, 25 bp, Homo sapien
cttgcctgctatagatgttgagaat

SEQ ID NO: 1109236 - DNA, 25 bp, Homo sapien
tcccagtgacgttctttctgactag

SEQ ID NO: 1109237 - DNA, 25 bp, Homo sapien
ggtgacatcaataagccccacaggt

SEQ ID NO: 1109238 - DNA, 25 bp, Homo sapien
agtttgattacccagataggatgtc

SEQ ID NO: 1109239 - DNA, 25 bp, Homo sapien
tcctggagagtctgaaggtagaatc

SEQ ID NO: 1109240 - DNA, 25 bp, Homo sapien
tgcggacgagctcccgcagactctg

SEQ ID NO: 1109241 - DNA, 25 bp, Homo sapien
gcagactctgctttcgcccgttcat

SEQ ID NO: 1109242 - DNA, 25 bp, Homo sapien
agactctgctttcgcccgttcatct

SEQ ID NO: 1109243 - DNA, 25 bp, Homo sapien
accttggccgcgttcagagtgcgga

SEQ ID NO: 1109244 - DNA, 25 bp, Homo sapien
aggcagtaggcggagtacaaaccac

SEQ ID NO: 1109245 - DNA, 25 bp, Homo sapien
tcgatataggcagtaggcggagtac

SEQ ID NO: 1109246 - DNA, 25 bp, Homo sapien
cacgtggctctgcagtctttgatca

SEQ ID NO: 1109247 - DNA, 25 bp, Homo sapien
tctgccgggcgaagtcgatataggc

SEQ ID NO: 1109248 - DNA, 25 bp, Homo sapien
ctttgtctgctcgaaaacaaccttc

SEQ ID NO: 1109249 - DNA, 25 bp, Homo sapien
gcccacacaggctcataggccagga

SEQ ID NO: 1109250 - DNA, 25 bp, Homo sapien
ccaatggcccacacaggctcatagg

SEQ ID NO: 1109251 - DNA, 25 bp, Homo sapien
tgcgatgacctttgtctgctcgaaa

SEQ ID NO: 1109252 - DNA, 25 bp, Homo sapien
gcttgtcgtgtacttcctggtcctg

SEQ ID NO: 1109253 - DNA, 25 bp, Homo sapien
tgacaccatcagaagcatgtgcagg

SEQ ID NO: 1109254 - DNA, 25 bp, Homo sapien
ggaagggcagttactgggcttctgg

SEQ ID NO: 1109255 - DNA, 25 bp, Homo sapien
gggctgcttagtccctggcttggca

SEQ ID NO: 1109256 - DNA, 25 bp, Homo sapien
acaggaaggagcagatgacaccatc

SEQ ID NO: 1109257 - DNA, 25 bp, Homo sapien
cagaggcacgggcaccatgggagag

SEQ ID NO: 1109258 - DNA, 25 bp, Homo sapien
tacagggtgaagatataaacagtaa

SEQ ID NO: 1109259 - DNA, 25 bp, Homo sapien
ttggcctggtcccaaccattacagg

SEQ ID NO: 1109260 - DNA, 25 bp, Homo sapien
ggtcccaaccattacagggtgaaga

SEQ ID NO: 1109261 - DNA, 25 bp, Homo sapien
aatggtgctttttggctatcagaca

SEQ ID NO: 1109262 - DNA, 25 bp, Homo sapien
tactctacagcttattggaatacag

SEQ ID NO: 1109263 - DNA, 25 bp, Homo sapien
gataggagaactggcaattactcta

SEQ ID NO: 1109264 - DNA, 25 bp, Homo sapien
aaggggtaatgcattctgtttacac

SEQ ID NO: 1109265 - DNA, 25 bp, Homo sapien
tctgaaggcgtacaagtttgggtgc

SEQ ID NO: 1109266 - DNA, 25 bp, Homo sapien
tcaggtaagaaatacttgctttctg

SEQ ID NO: 1109267 - DNA, 25 bp, Homo sapien
catctcagcgttcactgcatatcca

SEQ ID NO: 1109268 - DNA, 25 bp, Homo sapien
ttccgcagcagtttccaacaaatac

SEQ ID NO: 1109269 - DNA, 25 bp, Homo sapien
gccacgggcaatgccaccggaatac

SEQ ID NO: 1109270 - DNA, 25 bp, Homo sapien
cgggcaatgccaccggaatactggt

SEQ ID NO: 1109271 - DNA, 25 bp, Homo sapien
tctgagctttcactagcatgtgtgt

SEQ ID NO: 1109272 - DNA, 25 bp, Homo sapien
aatgccaccggaatactggtgcaga

SEQ ID NO: 1109273 - DNA, 25 bp, Homo sapien
ctcctcgaaatagccttttagccat

SEQ ID NO: 1109274 - DNA, 25 bp, Homo sapien
tgggatgggcctcctcgaaatagcc

SEQ ID NO: 1109275 - DNA, 25 bp, Homo sapien
gaccaccttggtgggatgggcctcc

SEQ ID NO: 1109276 - DNA, 25 bp, Homo sapien
tccttgaccaccttggtgggatggg

SEQ ID NO: 1109277 - DNA, 25 bp, Homo sapien
ccccccagctctgcaatcttcaaag

SEQ ID NO: 1109278 - DNA, 25 bp, Homo sapien
ctccccccagctctgcaatcttcaa

SEQ ID NO: 1109279 - DNA, 25 bp, Homo sapien
cccccagctctgcaatcttcaaagt

SEQ ID NO: 1109280 - DNA, 25 bp, Homo sapien
tccccccagctctgcaatcttcaaa

SEQ ID NO: 1109281 - DNA, 25 bp, Homo sapien
cattgcatacatattacataccaga

SEQ ID NO: 1109282 - DNA, 25 bp, Homo sapien
taatcgattgattaaccagaaagac

SEQ ID NO: 1109283 - DNA, 25 bp, Homo sapien
tctatgctccgatcatgtgttaggt

SEQ ID NO: 1109284 - DNA, 25 bp, Homo sapien
gaacaatctgattaactaagtctgc

SEQ ID NO: 1109285 - DNA, 25 bp, Homo sapien
ctctgaatcattccagtttagtata

SEQ ID NO: 1109286 - DNA, 25 bp, Homo sapien
tttgcatgtcatccacgtgcaaagg

SEQ ID NO: 1109287 - DNA, 25 bp, Homo sapien
tcatccacgtgcaaaggccatgcta

SEQ ID NO: 1109288 - DNA, 25 bp, Homo sapien
catgtcatccacgtgcaaaggccat

SEQ ID NO: 1109289 - DNA, 25 bp, Homo sapien
gtggactgtgcaactctgaaaaacc

SEQ ID NO: 1109290 - DNA, 25 bp, Homo sapien
ctttatagctgcttgggctaaacca

SEQ ID NO: 1109291 - DNA, 25 bp, Homo sapien
ggctaaaccaatccctggtagtgga

SEQ ID NO: 1109292 - DNA, 25 bp, Homo sapien
caatccctggtagtggactgtgcaa

SEQ ID NO: 1109293 - DNA, 25 bp, Homo sapien
gggctctcaataaccaggctgaaga

SEQ ID NO: 1109294 - DNA, 25 bp, Homo sapien
tcaataaccaggctgaagagaatgc

SEQ ID NO: 1109295 - DNA, 25 bp, Homo sapien
caggctgaagagaatgccatgagta

SEQ ID NO: 1109296 - DNA, 25 bp, Homo sapien
taaccaggctgaagagaatgccatg

SEQ ID NO: 1109297 - DNA, 25 bp, Homo sapien
tcagacagtcttgtaccaggcagcc

SEQ ID NO: 1109298 - DNA, 25 bp, Homo sapien
ggagatctcctttccactggcacag

SEQ ID NO: 1109299 - DNA, 25 bp, Homo sapien
gggtcaactgcaatatctcatgggc

SEQ ID NO: 1109300 - DNA, 25 bp, Homo sapien
tcctatagaaagagagacccacggc

SEQ ID NO: 1109301 - DNA, 25 bp, Homo sapien
aaaggctgcacccaagctctacttc

SEQ ID NO: 1109302 - DNA, 25 bp, Homo sapien
ccagcagtaactagggtctcttctt

SEQ ID NO: 1109303 - DNA, 25 bp, Homo sapien
caatgagccagcagtaactagggtc

SEQ ID NO: 1109304 - DNA, 25 bp, Homo sapien
tgagccagcagtaactagggtctct

SEQ ID NO: 1109305 - DNA, 25 bp, Homo sapien
agcctggggtggtgcactgctctca

SEQ ID NO: 1109306 - DNA, 25 bp, Homo sapien
cctggggtggtgcactgctctcacc

SEQ ID NO: 1109307 - DNA, 25 bp, Homo sapien
caagagcctggggtggtgcactgct

SEQ ID NO: 1109308 - DNA, 25 bp, Homo sapien
gagcctggggtggtgcactgctctc

SEQ ID NO: 1109309 - DNA, 25 bp, Homo sapien
taatcctgatctgcgactgaattca

SEQ ID NO: 1109310 - DNA, 25 bp, Homo sapien
tcagtctgagaaataagtgagagct

SEQ ID NO: 1109311 - DNA, 25 bp, Homo sapien
gatgtacagatagtcaatttttcca

SEQ ID NO: 1109312 - DNA, 25 bp, Homo sapien
tgagagctgatatgatgcacggcaa

SEQ ID NO: 1109313 - DNA, 25 bp, Homo sapien
tgaagatggttccaccaaatacatt

SEQ ID NO: 1109314 - DNA, 25 bp, Homo sapien
gaagatggttccaccaaatacatta

SEQ ID NO: 1109315 - DNA, 25 bp, Homo sapien
aagatggttccaccaaatacattac

SEQ ID NO: 1109316 - DNA, 25 bp, Homo sapien
ctgaagatggttccaccaaatacat

SEQ ID NO: 1109317 - DNA, 25 bp, Homo sapien
ctgctgtggttgacatcggattagg

SEQ ID NO: 1109318 - DNA, 25 bp, Homo sapien
tggttgacatcggattaggaagccc

SEQ ID NO: 1109319 - DNA, 25 bp, Homo sapien
gattaggaagcccagatctttttct

SEQ ID NO: 1109320 - DNA, 25 bp, Homo sapien
atgagacggccaccgaggcacttcc

SEQ ID NO: 1109321 - DNA, 25 bp, Homo sapien
caccggcatattaaatgtggcgtat

SEQ ID NO: 1109322 - DNA, 25 bp, Homo sapien
ggcgtatttgaggataggccaacaa

SEQ ID NO: 1109323 - DNA, 25 bp, Homo sapien
gggattcataaaccccaccggcata

SEQ ID NO: 1109324 - DNA, 25 bp, Homo sapien
gaaagcatgcctaatctctgttggg

SEQ ID NO: 1109325 - DNA, 25 bp, Homo sapien
agtctttacactcattgagtcttct

SEQ ID NO: 1109326 - DNA, 25 bp, Homo sapien
tttacactcattgagtcttctaagg

SEQ ID NO: 1109327 - DNA, 25 bp, Homo sapien
ctgttcttcgaattcacagtcttta

SEQ ID NO: 1109328 - DNA, 25 bp, Homo sapien
gtctttacactcattgagtcttcta

SEQ ID NO: 1109329 - DNA, 25 bp, Homo sapien
ccggaccctcgtagtctctcagcga

SEQ ID NO: 1109330 - DNA, 25 bp, Homo sapien
gaaccggaccctcgtagtctctcag

SEQ ID NO: 1109331 - DNA, 25 bp, Homo sapien
cggaccctcgtagtctctcagcgat

SEQ ID NO: 1109332 - DNA, 25 bp, Homo sapien
actgaaccggaccctcgtagtctct

SEQ ID NO: 1109333 - DNA, 25 bp, Homo sapien
gagggtttccatgatgggtaatggg

SEQ ID NO: 1109334 - DNA, 25 bp, Homo sapien
ctcttttgtgcagaatcctcaggct

SEQ ID NO: 1109335 - DNA, 25 bp, Homo sapien
ggcggaggcggctctgatttttgcc

SEQ ID NO: 1109336 - DNA, 25 bp, Homo sapien
gccgcggcagatcgcgcgcgggagc

SEQ ID NO: 1109337 - DNA, 25 bp, Homo sapien
gcgaggcaaccccgagttcccatcc

SEQ ID NO: 1109338 - DNA, 25 bp, Homo sapien
gaggcgaggcaaccccgagttccca

SEQ ID NO: 1109339 - DNA, 25 bp, Homo sapien
taggaggcgaggcaaccccgagttc

SEQ ID NO: 1109340 - DNA, 25 bp, Homo sapien
ctaggaggcgaggcaaccccgagtt

SEQ ID NO: 1109341 - DNA, 25 bp, Homo sapien
atcgctcctgcagctctccgccacc

SEQ ID NO: 1109342 - DNA, 25 bp, Homo sapien
ctccatcgctcctgcagctctccgc

SEQ ID NO: 1109343 - DNA, 25 bp, Homo sapien
ccatcccttgagcaatctgcccact

SEQ ID NO: 1109344 - DNA, 25 bp, Homo sapien
ccccctcggacctctcgccggagat

SEQ ID NO: 1109345 - DNA, 25 bp, Homo sapien
atctaagaaaacgaagaaagtctgc

SEQ ID NO: 1109346 - DNA, 25 bp, Homo sapien
ggatccttgcgatccttgcaagttt

SEQ ID NO: 1109347 - DNA, 25 bp, Homo sapien
ccttgcgatccttgcaagtttgaaa

SEQ ID NO: 1109348 - DNA, 25 bp, Homo sapien
cgtccctcttagtttttggcaggct

SEQ ID NO: 1109349 - DNA, 25 bp, Homo sapien
gtgcacatggtggtgagcgctaaac

SEQ ID NO: 1109350 - DNA, 25 bp, Homo sapien
ggtgagcgctaaacacactgccaga

SEQ ID NO: 1109351 - DNA, 25 bp, Homo sapien
tggtggtgagcgctaaacacactgc

SEQ ID NO: 1109352 - DNA, 25 bp, Homo sapien
gctaaacacactgccagaccatggc

SEQ ID NO: 1109353 - DNA, 25 bp, Homo sapien
gccactccgaggtatccgtccagtg

SEQ ID NO: 1109354 - DNA, 25 bp, Homo sapien
aggtatccgtccagtggccgcggtc

SEQ ID NO: 1109355 - DNA, 25 bp, Homo sapien
cttgtggtccgccactccgaggtat

SEQ ID NO: 1109356 - DNA, 25 bp, Homo sapien
tggtccgccactccgaggtatccgt

SEQ ID NO: 1109357 - DNA, 25 bp, Homo sapien
cccaggctgagtggcgagcgggctg

SEQ ID NO: 1109358 - DNA, 25 bp, Homo sapien
caggctgagtggcgagcgggctggc

SEQ ID NO: 1109359 - DNA, 25 bp, Homo sapien
ccccaggctgagtggcgagcgggct

SEQ ID NO: 1109360 - DNA, 25 bp, Homo sapien
aggctgagtggcgagcgggctggcg

SEQ ID NO: 1109361 - DNA, 25 bp, Homo sapien
taggctttggggtccacgcacctca

SEQ ID NO: 1109362 - DNA, 25 bp, Homo sapien
ttctgctgggaaattaggctttggg

SEQ ID NO: 1109363 - DNA, 25 bp, Homo sapien
gttccagggccgatttctgctggga

SEQ ID NO: 1109364 - DNA, 25 bp, Homo sapien
ggatcagggagttctagttccaggg

SEQ ID NO: 1109365 - DNA, 25 bp, Homo sapien
cgaggcttcaggaaccggacctcca

SEQ ID NO: 1109366 - DNA, 25 bp, Homo sapien
tcagaggaacgctcaggctggtacc

SEQ ID NO: 1109367 - DNA, 25 bp, Homo sapien
cggttccgggtcagaggaacgctca

SEQ ID NO: 1109368 - DNA, 25 bp, Homo sapien
tcggcggccaaacccgaggcttcag

SEQ ID NO: 1109369 - DNA, 25 bp, Homo sapien
cagggctgagagaattcagcccaaa

SEQ ID NO: 1109370 - DNA, 25 bp, Homo sapien
agatcagaggggaacgctggatccc

SEQ ID NO: 1109371 - DNA, 25 bp, Homo sapien
aacgctggatcccgagcagtggccg

SEQ ID NO: 1109372 - DNA, 25 bp, Homo sapien
caaagcaatgcgctggagagatcag

SEQ ID NO: 1109373 - DNA, 25 bp, Homo sapien
tagttcagtgggacaattgggataa

SEQ ID NO: 1109374 - DNA, 25 bp, Homo sapien
gaccttcttctactaggaattccaa

SEQ ID NO: 1109375 - DNA, 25 bp, Homo sapien
catatagcacttcacaatttgtaaa

SEQ ID NO: 1109376 - DNA, 25 bp, Homo sapien
gcttgtggtgacgtgaactccctca

SEQ ID NO: 1109377 - DNA, 25 bp, Homo sapien
tcatcactgacttgacttgcagcat

SEQ ID NO: 1109378 - DNA, 25 bp, Homo sapien
tattttaagcctcaacacatgccgc

SEQ ID NO: 1109379 - DNA, 25 bp, Homo sapien
tgcagccatatgagacaagaccatc

SEQ ID NO: 1109380 - DNA, 25 bp, Homo sapien
gaaattacaattgcagctcacatag

SEQ ID NO: 1109381 - DNA, 25 bp, Homo sapien
gaagacacagacatgtaacacgatg

SEQ ID NO: 1109382 - DNA, 25 bp, Homo sapien
caaatcgggactgagagagtaatgt

SEQ ID NO: 1109383 - DNA, 25 bp, Homo sapien
tatcattggcttccacaaatcggga

SEQ ID NO: 1109384 - DNA, 25 bp, Homo sapien
gaatacagatatagtacctgaagac

SEQ ID NO: 1109385 - DNA, 25 bp, Homo sapien
cttggaggacctgatcttgctcatc

SEQ ID NO: 1109386 - DNA, 25 bp, Homo sapien
gaggacctgatcttgctcatcatag

SEQ ID NO: 1109387 - DNA, 25 bp, Homo sapien
tgcgatgtataactccttggaggac

SEQ ID NO: 1109388 - DNA, 25 bp, Homo sapien
gaccagtcagtattgcgatgtataa

SEQ ID NO: 1109389 - DNA, 25 bp, Homo sapien
gagaagacaatgagtatacctgcat

SEQ ID NO: 1109390 - DNA, 25 bp, Homo sapien
cttatttcttttcgacatgttatac

SEQ ID NO: 1109391 - DNA, 25 bp, Homo sapien
tttcaaaactagcatcctggatttc

SEQ ID NO: 1109392 - DNA, 25 bp, Homo sapien
acatgttatactggggatgaggcga

SEQ ID NO: 1109393 - DNA, 25 bp, Homo sapien
aaaataaaggcaaacgtgaggctgc

SEQ ID NO: 1109394 - DNA, 25 bp, Homo sapien
tatggacaggaaattgcatcacgga

SEQ ID NO: 1109395 - DNA, 25 bp, Homo sapien
gctgcatatgtacaaaggactgccc

SEQ ID NO: 1109396 - DNA, 25 bp, Homo sapien
gaagatggcgatcacctctaacagt

SEQ ID NO: 1109397 - DNA, 25 bp, Homo sapien
cacggcctccatggatatgagagtt

SEQ ID NO: 1109398 - DNA, 25 bp, Homo sapien
tgagagttggagactcaagtgctgc

SEQ ID NO: 1109399 - DNA, 25 bp, Homo sapien
ccatggatatgagagttggagactc

SEQ ID NO: 1109400 - DNA, 25 bp, Homo sapien
ggtgggaacggctggaagtagcacg

SEQ ID NO: 1109401 - DNA, 25 bp, Homo sapien
taatcctaaacatccacggttgtgt

SEQ ID NO: 1109402 - DNA, 25 bp, Homo sapien
caggttttaccgcagctaagaagga

SEQ ID NO: 1109403 - DNA, 25 bp, Homo sapien
taagaaggagctagtcactgcttca

SEQ ID NO: 1109404 - DNA, 25 bp, Homo sapien
tcaaatgccgtaaagatttgcaggt

SEQ ID NO: 1109405 - DNA, 25 bp, Homo sapien
tatctacatgccagagatgaagctg

SEQ ID NO: 1109406 - DNA, 25 bp, Homo sapien
gacaccaaaagtataagtgagacaa

SEQ ID NO: 1109407 - DNA, 25 bp, Homo sapien
gatgaagctggacctctctgtcaca

SEQ ID NO: 1109408 - DNA, 25 bp, Homo sapien
ttcaaactgagtcatagacctaaat

SEQ ID NO: 1109409 - DNA, 25 bp, Homo sapien
tttcacccttcttaccatctggcat

SEQ ID NO: 1109410 - DNA, 25 bp, Homo sapien
cagacatgtgtagtagactttcacc

SEQ ID NO: 1109411 - DNA, 25 bp, Homo sapien
cgacctcgcagacatgtgtagtaga

SEQ ID NO: 1109412 - DNA, 25 bp, Homo sapien
catgtgtagtagactttcacccttc

SEQ ID NO: 1109413 - DNA, 25 bp, Homo sapien
gggaattcagcaacagcacgataga

SEQ ID NO: 1109414 - DNA, 25 bp, Homo sapien
cacgatagaaggcacctttctccat

SEQ ID NO: 1109415 - DNA, 25 bp, Homo sapien
ctttctccatcttaacaccagctaa

SEQ ID NO: 1109416 - DNA, 25 bp, Homo sapien
gctaaaaaagcgctccctctaagga

SEQ ID NO: 1109417 - DNA, 25 bp, Homo sapien
tccattactgatgttgtggtaaaaa

SEQ ID NO: 1109418 - DNA, 25 bp, Homo sapien
cttccattactgatgttgtggtaaa

SEQ ID NO: 1109419 - DNA, 25 bp, Homo sapien
attactgatgttgtggtaaaaatga

SEQ ID NO: 1109420 - DNA, 25 bp, Homo sapien
ccattactgatgttgtggtaaaaat

SEQ ID NO: 1109421 - DNA, 25 bp, Homo sapien
ggtagagtgaatagtctcactttgt

SEQ ID NO: 1109422 - DNA, 25 bp, Homo sapien
ccatagctatatcaggtagagtgaa

SEQ ID NO: 1109423 - DNA, 25 bp, Homo sapien
cacactatcttgataaccatagcta

SEQ ID NO: 1109424 - DNA, 25 bp, Homo sapien
ttgatcaatgtgtctatacctctgg

SEQ ID NO: 1109425 - DNA, 25 bp, Homo sapien
ctgcaatatcataaccagggtactg

SEQ ID NO: 1109426 - DNA, 25 bp, Homo sapien
tatttcattgccataaggatccctc

SEQ ID NO: 1109427 - DNA, 25 bp, Homo sapien
tgcctatggatgttcaattgcacca

SEQ ID NO: 1109428 - DNA, 25 bp, Homo sapien
ggtactgacactgatccagttgaga

SEQ ID NO: 1109429 - DNA, 25 bp, Homo sapien
tgaaggtgcacatgaccagtgggtt

SEQ ID NO: 1109430 - DNA, 25 bp, Homo sapien
gctgtgcctcactctatacttggac

SEQ ID NO: 1109431 - DNA, 25 bp, Homo sapien
gaagtgaagcaatgtgcctccagtc

SEQ ID NO: 1109432 - DNA, 25 bp, Homo sapien
gctagcagctatcgtaatgcacagg

SEQ ID NO: 1109433 - DNA, 25 bp, Homo sapien
cacatatgtattgtgggccaggagt

SEQ ID NO: 1109434 - DNA, 25 bp, Homo sapien
aatccctctgatgctagtaaaaaga

SEQ ID NO: 1109435 - DNA, 25 bp, Homo sapien
taactgaatcattgtctgccaacct

SEQ ID NO: 1109436 - DNA, 25 bp, Homo sapien
aaatgttgttacttcagggactctg

SEQ ID NO: 1109437 - DNA, 25 bp, Homo sapien
tgctggacacaaaccgaaatctctt

SEQ ID NO: 1109438 - DNA, 25 bp, Homo sapien
cctagttactctcagcaaatgggaa

SEQ ID NO: 1109439 - DNA, 25 bp, Homo sapien
tggtaacttgtcaaggccaacagac

SEQ ID NO: 1109440 - DNA, 25 bp, Homo sapien
caaagtctgcatgtgtgcaagaggg

SEQ ID NO: 1109441 - DNA, 25 bp, Homo sapien
caaggatacgtctcttctcccgggt

SEQ ID NO: 1109442 - DNA, 25 bp, Homo sapien
tcttgccaaagtactcacagactgt

SEQ ID NO: 1109443 - DNA, 25 bp, Homo sapien
aaagaattgactggccatactgacc

SEQ ID NO: 1109444 - DNA, 25 bp, Homo sapien
tctcccgggttcacagaagatagtt

SEQ ID NO: 1109445 - DNA, 25 bp, Homo sapien
aactggaaaaatagtggtggtctat

SEQ ID NO: 1109446 - DNA, 25 bp, Homo sapien
gctatagatacaataatttggcaaa

SEQ ID NO: 1109447 - DNA, 25 bp, Homo sapien
tcatcagttgcacccataggttagc

SEQ ID NO: 1109448 - DNA, 25 bp, Homo sapien
tccaacacaggtctttttggtttca

SEQ ID NO: 1109449 - DNA, 25 bp, Homo sapien
tgatgttgcaatacacatgatggac

SEQ ID NO: 1109450 - DNA, 25 bp, Homo sapien
taccaaaggagccttctccaaatac

SEQ ID NO: 1109451 - DNA, 25 bp, Homo sapien
gagaccattcaatatcttcattcta

SEQ ID NO: 1109452 - DNA, 25 bp, Homo sapien
aactacagtgttataggatactccg

SEQ ID NO: 1109453 - DNA, 25 bp, Homo sapien
ccttttgactttccactgtaagtct

SEQ ID NO: 1109454 - DNA, 25 bp, Homo sapien
ttccactgtaagtctctaaactttc

SEQ ID NO: 1109455 - DNA, 25 bp, Homo sapien
ccactgtaagtctctaaactttctg

SEQ ID NO: 1109456 - DNA, 25 bp, Homo sapien
gactttccactgtaagtctctaaac

SEQ ID NO: 1109457 - DNA, 25 bp, Homo sapien
atgcttttaggttcttttgttgcta

SEQ ID NO: 1109458 - DNA, 25 bp, Homo sapien
cactttaggatctgcattgtgtaaa

SEQ ID NO: 1109459 - DNA, 25 bp, Homo sapien
ttttccaaatctgcactttaggatc

SEQ ID NO: 1109460 - DNA, 25 bp, Homo sapien
tgcttttaggttcttttgttgctat

SEQ ID NO: 1109461 - DNA, 25 bp, Homo sapien
tcttccacaaatgtccctggtaatc

SEQ ID NO: 1109462 - DNA, 25 bp, Homo sapien
tagtcatcccacctccctggttttc

SEQ ID NO: 1109463 - DNA, 25 bp, Homo sapien
ttagctcagtctgttcctagtcatc

SEQ ID NO: 1109464 - DNA, 25 bp, Homo sapien
cacaaatgtccctggtaatcctatg

SEQ ID NO: 1109465 - DNA, 25 bp, Homo sapien
tatatgatggtcacctaaaccagac

SEQ ID NO: 1109466 - DNA, 25 bp, Homo sapien
tctgtaggttacaagtccaaagcag

SEQ ID NO: 1109467 - DNA, 25 bp, Homo sapien
taaaccagaccaggcttgtgatttg

SEQ ID NO: 1109468 - DNA, 25 bp, Homo sapien
aagcagcctgagtgcttctggcagc

SEQ ID NO: 1109469 - DNA, 25 bp, Homo sapien
tgaaatcaatatcccacgcaagtgt

SEQ ID NO: 1109470 - DNA, 25 bp, Homo sapien
caatatcccacgcaagtgtgctact

SEQ ID NO: 1109471 - DNA, 25 bp, Homo sapien
tatcccacgcaagtgtgctactctc

SEQ ID NO: 1109472 - DNA, 25 bp, Homo sapien
aaatcaatatcccacgcaagtgtgc

SEQ ID NO: 1109473 - DNA, 25 bp, Homo sapien
gtttgcctgggtatctccaatgtag

SEQ ID NO: 1109474 - DNA, 25 bp, Homo sapien
cctgggtatctccaatgtaggctgc

SEQ ID NO: 1109475 - DNA, 25 bp, Homo sapien
atctccaatgtaggctgcagaatag

SEQ ID NO: 1109476 - DNA, 25 bp, Homo sapien
tgttctttgatgttggttacctatg

SEQ ID NO: 1109477 - DNA, 25 bp, Homo sapien
aaatctgggttgaaatttcttctct

SEQ ID NO: 1109478 - DNA, 25 bp, Homo sapien
ctctcttctggcttttaggctttcc

SEQ ID NO: 1109479 - DNA, 25 bp, Homo sapien
ggtgttctttgtctcctttgatctt

SEQ ID NO: 1109480 - DNA, 25 bp, Homo sapien
ttatgtaatggtgttctttgtctcc

SEQ ID NO: 1109481 - DNA, 25 bp, Homo sapien
gcttctgtagttcttctaattttga

SEQ ID NO: 1109482 - DNA, 25 bp, Homo sapien
cagagattctgacacgttgtgtctt

SEQ ID NO: 1109483 - DNA, 25 bp, Homo sapien
gtcccagagattctgacacgttgtg

SEQ ID NO: 1109484 - DNA, 25 bp, Homo sapien
tgccttctgctagcattttaatttg

SEQ ID NO: 1109485 - DNA, 25 bp, Homo sapien
tcatggctgcgtcatgcagccttct

SEQ ID NO: 1109486 - DNA, 25 bp, Homo sapien
agccctggcagagtcgggctttgca

SEQ ID NO: 1109487 - DNA, 25 bp, Homo sapien
gccagataagtagttacagtcatta

SEQ ID NO: 1109488 - DNA, 25 bp, Homo sapien
cagagatttgccagataagtagtta

SEQ ID NO: 1109489 - DNA, 25 bp, Homo sapien
ccctggcagagtcgggctttgcaaa

SEQ ID NO: 1109490 - DNA, 25 bp, Homo sapien
cttgtccgtcaataagatagtctga

SEQ ID NO: 1109491 - DNA, 25 bp, Homo sapien
tgtaacttgtccgtcaataagatag

SEQ ID NO: 1109492 - DNA, 25 bp, Homo sapien
tgtccgtcaataagatagtctgagg

SEQ ID NO: 1109493 - DNA, 25 bp, Homo sapien
taacttgtccgtcaataagatagtc

SEQ ID NO: 1109494 - DNA, 25 bp, Homo sapien
cagcagtgatccactactcctggta

SEQ ID NO: 1109495 - DNA, 25 bp, Homo sapien
tgactcgtagttccgcatagctgtg

SEQ ID NO: 1109496 - DNA, 25 bp, Homo sapien
tggtctcgctcttaacacatgggaa

SEQ ID NO: 1109497 - DNA, 25 bp, Homo sapien
tctccacctggtctcgctcttaaca

SEQ ID NO: 1109498 - DNA, 25 bp, Homo sapien
gccagcataaagttgaagagcccca

SEQ ID NO: 1109499 - DNA, 25 bp, Homo sapien
tgtggaagtaagtgatgcataatgg

SEQ ID NO: 1109500 - DNA, 25 bp, Homo sapien
ctgtcacttggctgacggaatggta

SEQ ID NO: 1109501 - DNA, 25 bp, Homo sapien
gcataatggatcatgggatttaaaa

SEQ ID NO: 1109502 - DNA, 25 bp, Homo sapien
cttggagcacataatgcaccattca

SEQ ID NO: 1109503 - DNA, 25 bp, Homo sapien
cttttggttcaatgattgtacccga

SEQ ID NO: 1109504 - DNA, 25 bp, Homo sapien
tattacgagaaagcccagtctcatt

SEQ ID NO: 1109505 - DNA, 25 bp, Homo sapien
tcagaaatattacgagaaagcccag

SEQ ID NO: 1109506 - DNA, 25 bp, Homo sapien
aatatcttgtggaaacatcccctgt

SEQ ID NO: 1109507 - DNA, 25 bp, Homo sapien
gttctacttcattgacattccgatg

SEQ ID NO: 1109508 - DNA, 25 bp, Homo sapien
cagagagtaagactgtctgtcatct

SEQ ID NO: 1109509 - DNA, 25 bp, Homo sapien
gctaccaattctactctccagtgaa

SEQ ID NO: 1109510 - DNA, 25 bp, Homo sapien
agaaagagctaaccgcctaaacact

SEQ ID NO: 1109511 - DNA, 25 bp, Homo sapien
agagctaaccgcctaaacacttcaa

SEQ ID NO: 1109512 - DNA, 25 bp, Homo sapien
ttctagcagaaagagctaaccgcct

SEQ ID NO: 1109513 - DNA, 25 bp, Homo sapien
tagcagaaagagctaaccgcctaaa

SEQ ID NO: 1109514 - DNA, 25 bp, Homo sapien
gggatccaatgataacctagcacta

SEQ ID NO: 1109515 - DNA, 25 bp, Homo sapien
ggatccaatgataacctagcactat

SEQ ID NO: 1109516 - DNA, 25 bp, Homo sapien
tgataacctagcactatcaactaga

SEQ ID NO: 1109517 - DNA, 25 bp, Homo sapien
tagcactatcaactagagtaatggt

SEQ ID NO: 1109518 - DNA, 25 bp, Homo sapien
gacttgtgccatcctgcagttctga

SEQ ID NO: 1109519 - DNA, 25 bp, Homo sapien
gacattatagctccatgccgctttg

SEQ ID NO: 1109520 - DNA, 25 bp, Homo sapien
cgctttgtcagcacaaacctccagt

SEQ ID NO: 1109521 - DNA, 25 bp, Homo sapien
gaagagcttcaatggtgcttaccgg

SEQ ID NO: 1109522 - DNA, 25 bp, Homo sapien
tcatgtttcccacccgtggagggtg

SEQ ID NO: 1109523 - DNA, 25 bp, Homo sapien
catgtttcccacccgtggagggtgg

SEQ ID NO: 1109524 - DNA, 25 bp, Homo sapien
ggaagagattggacataaaggcccc

SEQ ID NO: 1109525 - DNA, 25 bp, Homo sapien
ctaggaagagattggacataaaggc

SEQ ID NO: 1109526 - DNA, 25 bp, Homo sapien
attggacataaaggccccctgcgct

SEQ ID NO: 1109527 - DNA, 25 bp, Homo sapien
agattggacataaaggccccctgcg

SEQ ID NO: 1109528 - DNA, 25 bp, Homo sapien
aggtcactcgtatgcaattacttcc

SEQ ID NO: 1109529 - DNA, 25 bp, Homo sapien
cagtgccttcaaataactccctgat

SEQ ID NO: 1109530 - DNA, 25 bp, Homo sapien
gccttcaaataactccctgatgtga

SEQ ID NO: 1109531 - DNA, 25 bp, Homo sapien
ttcaaaggtcactcgtatgcaatta

SEQ ID NO: 1109532 - DNA, 25 bp, Homo sapien
gtacaacacccttaagtctagagag

SEQ ID NO: 1109533 - DNA, 25 bp, Homo sapien
aataagtgccaccaaagctaagtga

SEQ ID NO: 1109534 - DNA, 25 bp, Homo sapien
ccttgtatgtggaggccccactagc

SEQ ID NO: 1109535 - DNA, 25 bp, Homo sapien
taagtgattctattgggctccaagc

SEQ ID NO: 1109536 - DNA, 25 bp, Homo sapien
caaactttaaactgagctctgtgtc

SEQ ID NO: 1109537 - DNA, 25 bp, Homo sapien
gaatgatcccatcacaaatgtagtg

SEQ ID NO: 1109538 - DNA, 25 bp, Homo sapien
gtcatggctctcaagatctgcagct

SEQ ID NO: 1109539 - DNA, 25 bp, Homo sapien
gaactctcccttgcttacactgtca

SEQ ID NO: 1109540 - DNA, 25 bp, Homo sapien
tgtgcttccggctttcaaaactagg

SEQ ID NO: 1109541 - DNA, 25 bp, Homo sapien
taactttgaacaggacacgctggct

SEQ ID NO: 1109542 - DNA, 25 bp, Homo sapien
gataatgtaattacggcccgaggcc

SEQ ID NO: 1109543 - DNA, 25 bp, Homo sapien
taggattattggtcagtgcggagcc

SEQ ID NO: 1109544 - DNA, 25 bp, Homo sapien
tggatgctggaatgcgcgatgaccc

SEQ ID NO: 1109545 - DNA, 25 bp, Homo sapien
tgcagcatcttgtggcgagtaatca

SEQ ID NO: 1109546 - DNA, 25 bp, Homo sapien
cacactctgtctggtcaatctggga

SEQ ID NO: 1109547 - DNA, 25 bp, Homo sapien
aatctgggagccttgccgactgtgc

SEQ ID NO: 1109548 - DNA, 25 bp, Homo sapien
tcttgtaaagtcagcttgagcagcc

SEQ ID NO: 1109549 - DNA, 25 bp, Homo sapien
tcttcctcaaaaataaggccctgaa

SEQ ID NO: 1109550 - DNA, 25 bp, Homo sapien
gaggaccctacaagtgaactctagc

SEQ ID NO: 1109551 - DNA, 25 bp, Homo sapien
gagcccacaacaaaagcctgtagca

SEQ ID NO: 1109552 - DNA, 25 bp, Homo sapien
cagtgctgagccaagtgttggatat

SEQ ID NO: 1109553 - DNA, 25 bp, Homo sapien
ccagccagtgctgagccaagtgttg

SEQ ID NO: 1109554 - DNA, 25 bp, Homo sapien
tgtaaaccagccagtgctgagccaa

SEQ ID NO: 1109555 - DNA, 25 bp, Homo sapien
taaaccagccagtgctgagccaagt

SEQ ID NO: 1109556 - DNA, 25 bp, Homo sapien
ccatgccataaacattgatcctgtc

SEQ ID NO: 1109557 - DNA, 25 bp, Homo sapien
accatgccataaacattgatcctgt

SEQ ID NO: 1109558 - DNA, 25 bp, Homo sapien
tctctcctcctttgcggcctgactc

SEQ ID NO: 1109559 - DNA, 25 bp, Homo sapien
cttccatatcaattagtattgttgc

SEQ ID NO: 1109560 - DNA, 25 bp, Homo sapien
ctctcctcctttgcggcctgactct

SEQ ID NO: 1109561 - DNA, 25 bp, Homo sapien
gcctgactcttccatatcaattagt

SEQ ID NO: 1109562 - DNA, 25 bp, Homo sapien
tttcctccagatgacactcttcact

SEQ ID NO: 1109563 - DNA, 25 bp, Homo sapien
cttcacttctctgacagaacttggg

SEQ ID NO: 1109564 - DNA, 25 bp, Homo sapien
gtcttgtgcaaacaactatcaaagc

SEQ ID NO: 1109565 - DNA, 25 bp, Homo sapien
tctctgacagaacttgggcgtaggg

SEQ ID NO: 1109566 - DNA, 25 bp, Homo sapien
tttatgactgagcagaatgctctct

SEQ ID NO: 1109567 - DNA, 25 bp, Homo sapien
cagcttctgcgcttaactgatgtga

SEQ ID NO: 1109568 - DNA, 25 bp, Homo sapien
catctgatacccagggagacagtcc

SEQ ID NO: 1109569 - DNA, 25 bp, Homo sapien
ggcaagtattgcagctcccatttga

SEQ ID NO: 1109570 - DNA, 25 bp, Homo sapien
gattcaaatggtggaaagctccttg

SEQ ID NO: 1109571 - DNA, 25 bp, Homo sapien
aaatgagggactaggaaaccatcct

SEQ ID NO: 1109572 - DNA, 25 bp, Homo sapien
aattgtcgcaggcaagatgcaccaa

SEQ ID NO: 1109573 - DNA, 25 bp, Homo sapien
cctcagaacgttgcagtaattgtcg

SEQ ID NO: 1109574 - DNA, 25 bp, Homo sapien
cttcggatgacttggagaggaactc

SEQ ID NO: 1109575 - DNA, 25 bp, Homo sapien
agtagggggcaattggaaaccagct

SEQ ID NO: 1109576 - DNA, 25 bp, Homo sapien
tggaaaccagctaaagatgctacag

SEQ ID NO: 1109577 - DNA, 25 bp, Homo sapien
gggcaattggaaaccagctaaagat

SEQ ID NO: 1109578 - DNA, 25 bp, Homo sapien
caattggaaaccagctaaagatgct

SEQ ID NO: 1109579 - DNA, 25 bp, Homo sapien
ggtacattgtacattcatcaggtcc

SEQ ID NO: 1109580 - DNA, 25 bp, Homo sapien
aagtgaatattgaatgtccgtgccc

SEQ ID NO: 1109581 - DNA, 25 bp, Homo sapien
tccgtgcccagttcttaaagactcg

SEQ ID NO: 1109582 - DNA, 25 bp, Homo sapien
taaagcggtgatgactgcccttgcg

SEQ ID NO: 1109583 - DNA, 25 bp, Homo sapien
caaaaaggaaactagggctcaagag

SEQ ID NO: 1109584 - DNA, 25 bp, Homo sapien
tatactccttcagaccagggaatgg

SEQ ID NO: 1109585 - DNA, 25 bp, Homo sapien
tttgctattgtagccagggaacccc

SEQ ID NO: 1109586 - DNA, 25 bp, Homo sapien
aagttacaaacgagatggagctacc

SEQ ID NO: 1109587 - DNA, 25 bp, Homo sapien
gcagcatgctgaatatttacctcct

SEQ ID NO: 1109588 - DNA, 25 bp, Homo sapien
caggtactaaatgggtgcatgtgcc

SEQ ID NO: 1109589 - DNA, 25 bp, Homo sapien
gtagcccttaggagtacacaccagg

SEQ ID NO: 1109590 - DNA, 25 bp, Homo sapien
cacaccagggttagcaaagcacagg

SEQ ID NO: 1109591 - DNA, 25 bp, Homo sapien
tatggtagccagatatattcctccc

SEQ ID NO: 1109592 - DNA, 25 bp, Homo sapien
tgtagagtgttaacatcacctccca

SEQ ID NO: 1109593 - DNA, 25 bp, Homo sapien
caatttgaaccatcaccctggtgga

SEQ ID NO: 1109594 - DNA, 25 bp, Homo sapien
taggaacatggacccttctttcaga

SEQ ID NO: 1109595 - DNA, 25 bp, Homo sapien
catttcaacaccctgagaaggtggg

SEQ ID NO: 1109596 - DNA, 25 bp, Homo sapien
tattatagttctctttgacgtggcc

SEQ ID NO: 1109597 - DNA, 25 bp, Homo sapien
taggcaattggttcacacatcctgc

SEQ ID NO: 1109598 - DNA, 25 bp, Homo sapien
tctggcatgtgctaacacctaggca

SEQ ID NO: 1109599 - DNA, 25 bp, Homo sapien
tgttcttccgcctttctgcagatgg

SEQ ID NO: 1109600 - DNA, 25 bp, Homo sapien
tgtgcttagtacagccaggattagc

SEQ ID NO: 1109601 - DNA, 25 bp, Homo sapien
tgctaagagcagttcactaacagcg

SEQ ID NO: 1109602 - DNA, 25 bp, Homo sapien
aatccagtgggtcaacattaagagg

SEQ ID NO: 1109603 - DNA, 25 bp, Homo sapien
tgcttcatggaaacaaaatgttttt

SEQ ID NO: 1109604 - DNA, 25 bp, Homo sapien
ctgcttcatggaaacaaaatgtttt

SEQ ID NO: 1109605 - DNA, 25 bp, Homo sapien
tggtagaggtgaaaccattttggat

SEQ ID NO: 1109606 - DNA, 25 bp, Homo sapien
ctggtagaggtgaaaccattttgga

SEQ ID NO: 1109607 - DNA, 25 bp, Homo sapien
tggtgattcaggagcctgcgatgct

SEQ ID NO: 1109608 - DNA, 25 bp, Homo sapien
tgggatgtaactgaacaccgggttc

SEQ ID NO: 1109609 - DNA, 25 bp, Homo sapien
gattcaggagcctgcgatgctctgc

SEQ ID NO: 1109610 - DNA, 25 bp, Homo sapien
actgaacaccgggttctggccaggt

SEQ ID NO: 1109611 - DNA, 25 bp, Homo sapien
acatagaagaatgctcggtacaaga

SEQ ID NO: 1109612 - DNA, 25 bp, Homo sapien
gaagaatgctcggtacaagacatgc

SEQ ID NO: 1109613 - DNA, 25 bp, Homo sapien
gaatgctcggtacaagacatgctgt

SEQ ID NO: 1109614 - DNA, 25 bp, Homo sapien
gctcggtacaagacatgctgtgtgt

SEQ ID NO: 1109615 - DNA, 25 bp, Homo sapien
gcctataggattaaatttctgccaa

SEQ ID NO: 1109616 - DNA, 25 bp, Homo sapien
tttctgccaagaagtacatggtgac

SEQ ID NO: 1109617 - DNA, 25 bp, Homo sapien
cctttcccacttaatggaggcatga

SEQ ID NO: 1109618 - DNA, 25 bp, Homo sapien
gaagtgccttgtacctcaatttttg

SEQ ID NO: 1109619 - DNA, 25 bp, Homo sapien
gcaacatatatctgaataactcatg

SEQ ID NO: 1109620 - DNA, 25 bp, Homo sapien
taagtccacgtggaatattcatcaa

SEQ ID NO: 1109621 - DNA, 25 bp, Homo sapien
gatgtttgaccacaatggaacagag

SEQ ID NO: 1109622 - DNA, 25 bp, Homo sapien
cattatggaccattaagaaaagtct

SEQ ID NO: 1109623 - DNA, 25 bp, Homo sapien
gctctctgcttgcagtgactctgtc

SEQ ID NO: 1109624 - DNA, 25 bp, Homo sapien
cagacaacttgggatcccttttttg

SEQ ID NO: 1109625 - DNA, 25 bp, Homo sapien
ccttttttgtccgttgctatgtcac

SEQ ID NO: 1109626 - DNA, 25 bp, Homo sapien
ttatttgtgtgccagcataagccca

SEQ ID NO: 1109627 - DNA, 25 bp, Homo sapien
aaaaaacatgttagcggccaatcgg

SEQ ID NO: 1109628 - DNA, 25 bp, Homo sapien
cctgtaaccctgctaataagggaga

SEQ ID NO: 1109629 - DNA, 25 bp, Homo sapien
ggaatacagaacacattgaacgggt

SEQ ID NO: 1109630 - DNA, 25 bp, Homo sapien
aagctgtttgcagattaagcctgaa

SEQ ID NO: 1109631 - DNA, 25 bp, Homo sapien
catttgtaagcgttctgtgatcttc

SEQ ID NO: 1109632 - DNA, 25 bp, Homo sapien
aattggtcacgtcctcttcattttc

SEQ ID NO: 1109633 - DNA, 25 bp, Homo sapien
tgtaagcgttctgtgatcttctaca

SEQ ID NO: 1109634 - DNA, 25 bp, Homo sapien
tgtgatcttctacaattggtcacgt

SEQ ID NO: 1109635 - DNA, 25 bp, Homo sapien
tggaccacttacattgtaccaaatg

SEQ ID NO: 1109636 - DNA, 25 bp, Homo sapien
taaaagcgaatgagacagagatcag

SEQ ID NO: 1109637 - DNA, 25 bp, Homo sapien
cacagtcttctattgttggaccact

SEQ ID NO: 1109638 - DNA, 25 bp, Homo sapien
cagagatcagaatacattgactgtt

SEQ ID NO: 1109639 - DNA, 25 bp, Homo sapien
tgtgtcaccgtcatttccttgaaag

SEQ ID NO: 1109640 - DNA, 25 bp, Homo sapien
agatgagttagtttctagattcccc

SEQ ID NO: 1109641 - DNA, 25 bp, Homo sapien
acttcagatctagacttcagttgga

SEQ ID NO: 1109642 - DNA, 25 bp, Homo sapien
cagttggaagatgcctaaagggaag

SEQ ID NO: 1109643 - DNA, 25 bp, Homo sapien
ttgtatccagagcttgtgaggacct

SEQ ID NO: 1109644 - DNA, 25 bp, Homo sapien
tatggaagactaggaagaattcagc

SEQ ID NO: 1109645 - DNA, 25 bp, Homo sapien
tacataactaagacaaattggcctg

SEQ ID NO: 1109646 - DNA, 25 bp, Homo sapien
tcaccagtgccctgaaaagaagaaa

SEQ ID NO: 1109647 - DNA, 25 bp, Homo sapien
gctataggtagtttcttgtcatgca

SEQ ID NO: 1109648 - DNA, 25 bp, Homo sapien
tgatttagcctcactataagctgtg

SEQ ID NO: 1109649 - DNA, 25 bp, Homo sapien
tagaactctgccaaaaacgcaggta

SEQ ID NO: 1109650 - DNA, 25 bp, Homo sapien
tgtacatgaacaattcccaaccctg

SEQ ID NO: 1109651 - DNA, 25 bp, Homo sapien
tttcacagattacctcaggctgctt

SEQ ID NO: 1109652 - DNA, 25 bp, Homo sapien
gttctccgggtcaagtgagtagcga

SEQ ID NO: 1109653 - DNA, 25 bp, Homo sapien
ccgggtcaagtgagtagcgaaccat

SEQ ID NO: 1109654 - DNA, 25 bp, Homo sapien
tccgggtcaagtgagtagcgaacca

SEQ ID NO: 1109655 - DNA, 25 bp, Homo sapien
tctccgggtcaagtgagtagcgaac

SEQ ID NO: 1109656 - DNA, 25 bp, Homo sapien
agttgtcaccggaaagaacaaagct

SEQ ID NO: 1109657 - DNA, 25 bp, Homo sapien
gagttgtcaccggaaagaacaaagc

SEQ ID NO: 1109658 - DNA, 25 bp, Homo sapien
gaacaaagcttaggagaaacacaca

SEQ ID NO: 1109659 - DNA, 25 bp, Homo sapien
tgagttgtcaccggaaagaacaaag

SEQ ID NO: 1109660 - DNA, 25 bp, Homo sapien
tctgagcagattcaggttattcttc

SEQ ID NO: 1109661 - DNA, 25 bp, Homo sapien
gtctgggttgttcctgctatgggca

SEQ ID NO: 1109662 - DNA, 25 bp, Homo sapien
ggttattcttctgcaggagcttggt

SEQ ID NO: 1109663 - DNA, 25 bp, Homo sapien
cctgctatgggcagtgtgcacagcc

SEQ ID NO: 1109664 - DNA, 25 bp, Homo sapien
tgacccaatctcattggcaatgata

SEQ ID NO: 1109665 - DNA, 25 bp, Homo sapien
caatctcattggcaatgatattcat

SEQ ID NO: 1109666 - DNA, 25 bp, Homo sapien
cccaatctcattggcaatgatattc

SEQ ID NO: 1109667 - DNA, 25 bp, Homo sapien
tctgacccaatctcattggcaatga

SEQ ID NO: 1109668 - DNA, 25 bp, Homo sapien
tccgcccgctggctcaacttggtgg

SEQ ID NO: 1109669 - DNA, 25 bp, Homo sapien
ggagaagtgcctgtgcctccgcccg

SEQ ID NO: 1109670 - DNA, 25 bp, Homo sapien
tggctcaacttggtggtcttgccct

SEQ ID NO: 1109671 - DNA, 25 bp, Homo sapien
ctggagaagtgcctgtgcctccgcc

SEQ ID NO: 1109672 - DNA, 25 bp, Homo sapien
tgaccaaaagattcctgtggaaaca

SEQ ID NO: 1109673 - DNA, 25 bp, Homo sapien
accaaaagattcctgtggaaacagg

SEQ ID NO: 1109674 - DNA, 25 bp, Homo sapien
gaccaaaagattcctgtggaaacag

SEQ ID NO: 1109675 - DNA, 25 bp, Homo sapien
gggactcctgtaccaaaatatattc

SEQ ID NO: 1109676 - DNA, 25 bp, Homo sapien
cctttgcagagaggttttcactgac

SEQ ID NO: 1109677 - DNA, 25 bp, Homo sapien
cacccgcagatgtttgcatcgctag

SEQ ID NO: 1109678 - DNA, 25 bp, Homo sapien
catatagggttcagcgctatctgtg

SEQ ID NO: 1109679 - DNA, 25 bp, Homo sapien
ctagggagtaaccacggctaacagt

SEQ ID NO: 1109680 - DNA, 25 bp, Homo sapien
tattgctaccataataagtaaccac

SEQ ID NO: 1109681 - DNA, 25 bp, Homo sapien
tctgtagactctagggaaaaattag

SEQ ID NO: 1109682 - DNA, 25 bp, Homo sapien
taaagcaaatgtattacctggcacc

SEQ ID NO: 1109683 - DNA, 25 bp, Homo sapien
gctcttgtgctgaaagtaatcccaa

SEQ ID NO: 1109684 - DNA, 25 bp, Homo sapien
taatttttagtacccagtgatacag

SEQ ID NO: 1109685 - DNA, 25 bp, Homo sapien
cattagtgcctattcattacagaga

SEQ ID NO: 1109686 - DNA, 25 bp, Homo sapien
cattactgctctaagtgttacagac

SEQ ID NO: 1109687 - DNA, 25 bp, Homo sapien
ctgttttgtcccaaacagtgagatt

SEQ ID NO: 1109688 - DNA, 25 bp, Homo sapien
tctgattttggctcttgattgttct

SEQ ID NO: 1109689 - DNA, 25 bp, Homo sapien
agtcacttcagtcgcttcttttttc

SEQ ID NO: 1109690 - DNA, 25 bp, Homo sapien
tcatcagtctgctttaagttttttc

SEQ ID NO: 1109691 - DNA, 25 bp, Homo sapien
agatatttgggcctctcgctgtttc

SEQ ID NO: 1109692 - DNA, 25 bp, Homo sapien
tataagatatttgggcctctcgctg

SEQ ID NO: 1109693 - DNA, 25 bp, Homo sapien
aagatatttgggcctctcgctgttt

SEQ ID NO: 1109694 - DNA, 25 bp, Homo sapien
gactataagatatttgggcctctcg

SEQ ID NO: 1109695 - DNA, 25 bp, Homo sapien
gggtctgcatctggtttcctatttg

SEQ ID NO: 1109696 - DNA, 25 bp, Homo sapien
tacactgggtctgcatctggtttcc

SEQ ID NO: 1109697 - DNA, 25 bp, Homo sapien
atttgcacagtccacattggtatct

SEQ ID NO: 1109698 - DNA, 25 bp, Homo sapien
tcctatttgcacagtccacattggt

SEQ ID NO: 1109699 - DNA, 25 bp, Homo sapien
tgttacaactatagcaatcatactc

SEQ ID NO: 1109700 - DNA, 25 bp, Homo sapien
catactcccggatgttctgaggcac

SEQ ID NO: 1109701 - DNA, 25 bp, Homo sapien
caatgactctcttctatgttacaac

SEQ ID NO: 1109702 - DNA, 25 bp, Homo sapien
caatactgccccgatgtttctgctg

SEQ ID NO: 1109703 - DNA, 25 bp, Homo sapien
agagtccgcgccgagcagcggtgca

SEQ ID NO: 1109704 - DNA, 25 bp, Homo sapien
ctttctcacgcgcactcagctcagc

SEQ ID NO: 1109705 - DNA, 25 bp, Homo sapien
gccgagcagctgtgccgcggcttcc

SEQ ID NO: 1109706 - DNA, 25 bp, Homo sapien
acagcgtggcgaacgcaaggcagca

SEQ ID NO: 1109707 - DNA, 25 bp, Homo sapien
agctgagggatttccctccgggcca

SEQ ID NO: 1109708 - DNA, 25 bp, Homo sapien
tccgggccagatactccttggcatc

SEQ ID NO: 1109709 - DNA, 25 bp, Homo sapien
tactccttggcatcgttggtgttca

SEQ ID NO: 1109710 - DNA, 25 bp, Homo sapien
gagggatttccctccgggccagata

SEQ ID NO: 1109711 - DNA, 25 bp, Homo sapien
tcaggagttcattcagcgaaagcgc

SEQ ID NO: 1109712 - DNA, 25 bp, Homo sapien
ttgtcgagcactggcgaaacctgcg

SEQ ID NO: 1109713 - DNA, 25 bp, Homo sapien
gaagacctgtaattatggcaaccca

SEQ ID NO: 1109714 - DNA, 25 bp, Homo sapien
tgaagactgagcaacaggagtccgc

SEQ ID NO: 1109715 - DNA, 25 bp, Homo sapien
ttgttaaaatagtattatggctcat

SEQ ID NO: 1109716 - DNA, 25 bp, Homo sapien
tttgttaaaatagtattatggctca

SEQ ID NO: 1109717 - DNA, 25 bp, Homo sapien
ctttgttaaaatagtattatggctc

SEQ ID NO: 1109718 - DNA, 25 bp, Homo sapien
ctactggatcttcgggcttagaaca

SEQ ID NO: 1109719 - DNA, 25 bp, Homo sapien
aaaggatctccgtgactgtcctcca

SEQ ID NO: 1109720 - DNA, 25 bp, Homo sapien
ttttcctggcttacaaatgtatccc

SEQ ID NO: 1109721 - DNA, 25 bp, Homo sapien
ccatttagtggaggtaaggtcttct

SEQ ID NO: 1109722 - DNA, 25 bp, Homo sapien
acaggaaaagaagtaagtgctggtt

SEQ ID NO: 1109723 - DNA, 25 bp, Homo sapien
caggaaaagaagtaagtgctggttt

SEQ ID NO: 1109724 - DNA, 25 bp, Homo sapien
caacttggccatggtagtatgaaag

SEQ ID NO: 1109725 - DNA, 25 bp, Homo sapien
tcttcacacttaaacagttagtaaa

SEQ ID NO: 1109726 - DNA, 25 bp, Homo sapien
tggaagaagtctccctaagtggtca

SEQ ID NO: 1109727 - DNA, 25 bp, Homo sapien
taagtggtcagcaggctttattgta

SEQ ID NO: 1109728 - DNA, 25 bp, Homo sapien
gagccggtcataccgccgatatgga

SEQ ID NO: 1109729 - DNA, 25 bp, Homo sapien
ggtcataccgccgatatggaaagtt

SEQ ID NO: 1109730 - DNA, 25 bp, Homo sapien
ataccgccgatatggaaagtttgag

SEQ ID NO: 1109731 - DNA, 25 bp, Homo sapien
attggagggagccggtcataccgcc

SEQ ID NO: 1109732 - DNA, 25 bp, Homo sapien
aggtctggtaggatcaaaaacctca

SEQ ID NO: 1109733 - DNA, 25 bp, Homo sapien
gtctcagagagatccgtgtcacttt

SEQ ID NO: 1109734 - DNA, 25 bp, Homo sapien
aagaatgatttttggtcgaggtctg

SEQ ID NO: 1109735 - DNA, 25 bp, Homo sapien
tttttggtcgaggtctggtaggatc

SEQ ID NO: 1109736 - DNA, 25 bp, Homo sapien
caaactctgagtaccctttccactt

SEQ ID NO: 1109737 - DNA, 25 bp, Homo sapien
tctttcttaataattctcccacaga

SEQ ID NO: 1109738 - DNA, 25 bp, Homo sapien
tattggaatccatatcgttctgcaa

SEQ ID NO: 1109739 - DNA, 25 bp, Homo sapien
ttatcttggcaataagactccattt

SEQ ID NO: 1109740 - DNA, 25 bp, Homo sapien
ctcttggaaatccatcaataacaat

SEQ ID NO: 1109741 - DNA, 25 bp, Homo sapien
ttggtcctcaaaagatagagcctgg

SEQ ID NO: 1109742 - DNA, 25 bp, Homo sapien
tctcttggaaatccatcaataacaa

SEQ ID NO: 1109743 - DNA, 25 bp, Homo sapien
tcttggaaatccatcaataacaatg

SEQ ID NO: 1109744 - DNA, 25 bp, Homo sapien
ttaaaatataaggagatattcttac

SEQ ID NO: 1109745 - DNA, 25 bp, Homo sapien
gtagttcatttaaaatataaggaga

SEQ ID NO: 1109746 - DNA, 25 bp, Homo sapien
agtagttcatttaaaatataaggag

SEQ ID NO: 1109747 - DNA, 25 bp, Homo sapien
tcatttaaaatataaggagatattc

SEQ ID NO: 1109748 - DNA, 25 bp, Homo sapien
agccagaacaattagaaccaagcct

SEQ ID NO: 1109749 - DNA, 25 bp, Homo sapien
ttaagctgactgagcaccagagttt

SEQ ID NO: 1109750 - DNA, 25 bp, Homo sapien
cagagtttctggacttatggtggga

SEQ ID NO: 1109751 - DNA, 25 bp, Homo sapien
cagaacaattagaaccaagccttta

SEQ ID NO: 1109752 - DNA, 25 bp, Homo sapien
tagagacccatgactgaccacttga

SEQ ID NO: 1109753 - DNA, 25 bp, Homo sapien
gaaaaatggcgctatgcactgcaag

SEQ ID NO: 1109754 - DNA, 25 bp, Homo sapien
gcaagcggcttgtggtagactccta

SEQ ID NO: 1109755 - DNA, 25 bp, Homo sapien
tacagtcgagataaagccatgtgac

SEQ ID NO: 1109756 - DNA, 25 bp, Homo sapien
ggatcctaagaatcacggcagcagc

SEQ ID NO: 1109757 - DNA, 25 bp, Homo sapien
taaaagaagtaacaggatcctaaga

SEQ ID NO: 1109758 - DNA, 25 bp, Homo sapien
gtaacaggatcctaagaatcacggc

SEQ ID NO: 1109759 - DNA, 25 bp, Homo sapien
gaagtaacaggatcctaagaatcac

SEQ ID NO: 1109760 - DNA, 25 bp, Homo sapien
gagaggatctgactgcacaggcatc

SEQ ID NO: 1109761 - DNA, 25 bp, Homo sapien
tctttgtctgagggcgtaggctgta

SEQ ID NO: 1109762 - DNA, 25 bp, Homo sapien
agaggatctgactgcacaggcatct

SEQ ID NO: 1109763 - DNA, 25 bp, Homo sapien
tactatggaccttacaggtgttcgc

SEQ ID NO: 1109764 - DNA, 25 bp, Homo sapien
ctcaaggaagatatgtggcaggcag

SEQ ID NO: 1109765 - DNA, 25 bp, Homo sapien
tgggttcagaacaatggcacatagc

SEQ ID NO: 1109766 - DNA, 25 bp, Homo sapien
ggagaatcttgacggactggacata

SEQ ID NO: 1109767 - DNA, 25 bp, Homo sapien
tttaaggagatgtttctcctatata

SEQ ID NO: 1109768 - DNA, 25 bp, Homo sapien
gattggctctaataatttgctctaa

SEQ ID NO: 1109769 - DNA, 25 bp, Homo sapien
tggaaaggcctgctagggattttaa

SEQ ID NO: 1109770 - DNA, 25 bp, Homo sapien
gacaagaagaatcaatgattggctc

SEQ ID NO: 1109771 - DNA, 25 bp, Homo sapien
ccaaggctctacaaggcaatagcta

SEQ ID NO: 1109772 - DNA, 25 bp, Homo sapien
gcaatagctattataagaacgggtc

SEQ ID NO: 1109773 - DNA, 25 bp, Homo sapien
tgagttgaacccagacttttgagtc

SEQ ID NO: 1109774 - DNA, 25 bp, Homo sapien
taaatgggtagattgccaaggctct

SEQ ID NO: 1109775 - DNA, 25 bp, Homo sapien
atgactgttctgttaaaagaacctg

SEQ ID NO: 1109776 - DNA, 25 bp, Homo sapien
gaatgactgttctgttaaaagaacc

SEQ ID NO: 1109777 - DNA, 25 bp, Homo sapien
aatgactgttctgttaaaagaacct

SEQ ID NO: 1109778 - DNA, 25 bp, Homo sapien
ccataaggatgctcatgggattcct

SEQ ID NO: 1109779 - DNA, 25 bp, Homo sapien
cccagccataaggatgctcatggga

SEQ ID NO: 1109780 - DNA, 25 bp, Homo sapien
tcatgggattccttgtaacccctgc

SEQ ID NO: 1109781 - DNA, 25 bp, Homo sapien
ggattccttgtaacccctgcataca

SEQ ID NO: 1109782 - DNA, 25 bp, Homo sapien
gttcattagtctcctttgggtagct

SEQ ID NO: 1109783 - DNA, 25 bp, Homo sapien
aagccaggaataccaccaaatcggg

SEQ ID NO: 1109784 - DNA, 25 bp, Homo sapien
ttttacattgtcgtctggtcggccc

SEQ ID NO: 1109785 - DNA, 25 bp, Homo sapien
cctgctgttctgcacgcttcagtaa

SEQ ID NO: 1109786 - DNA, 25 bp, Homo sapien
tcatctctgtgcctgcgtcacaaac

SEQ ID NO: 1109787 - DNA, 25 bp, Homo sapien
tgtgcctgcgtcacaaactccctga

SEQ ID NO: 1109788 - DNA, 25 bp, Homo sapien
taccctggatatgggaaaatgtcat

SEQ ID NO: 1109789 - DNA, 25 bp, Homo sapien
catgatcaggcatgtcaacagatag

SEQ ID NO: 1109790 - DNA, 25 bp, Homo sapien
cctgaacttgacagcaattgtggaa

SEQ ID NO: 1109791 - DNA, 25 bp, Homo sapien
aaatctctcatggttgctgacacct

SEQ ID NO: 1109792 - DNA, 25 bp, Homo sapien
tcctccttgatcctgaacttgacag

SEQ ID NO: 1109793 - DNA, 25 bp, Homo sapien
ttctttgaagcaacactctgtggta

SEQ ID NO: 1109794 - DNA, 25 bp, Homo sapien
tgcccaaactttgtataagttgctt

SEQ ID NO: 1109795 - DNA, 25 bp, Homo sapien
tctctgtccattctagagatggaga

SEQ ID NO: 1109796 - DNA, 25 bp, Homo sapien
taatacacagggctcatgatacaca

SEQ ID NO: 1109797 - DNA, 25 bp, Homo sapien
catcagaggtaaacttctctgtcca

SEQ ID NO: 1109798 - DNA, 25 bp, Homo sapien
tcctttactgtgataacataatggc

SEQ ID NO: 1109799 - DNA, 25 bp, Homo sapien
taagaatgtcaatattgcttgaggg

SEQ ID NO: 1109800 - DNA, 25 bp, Homo sapien
aattaaaacattgtgctcactgaag

SEQ ID NO: 1109801 - DNA, 25 bp, Homo sapien
gcatatataataaagcccacttttt

SEQ ID NO: 1109802 - DNA, 25 bp, Homo sapien
gatagtgtcattgggttgaaacccc

SEQ ID NO: 1109803 - DNA, 25 bp, Homo sapien
ggactgatagtgtcattgggttgaa

SEQ ID NO: 1109804 - DNA, 25 bp, Homo sapien
gctgtaaagtactctttccacctgg

SEQ ID NO: 1109805 - DNA, 25 bp, Homo sapien
tttccaaatagcacctccagtgctg

SEQ ID NO: 1109806 - DNA, 25 bp, Homo sapien
cctctggatttgcactcagggagaa

SEQ ID NO: 1109807 - DNA, 25 bp, Homo sapien
ggagttttcacgcacagccaggagt

SEQ ID NO: 1109808 - DNA, 25 bp, Homo sapien
tactgtagacctagtgggcacactt

SEQ ID NO: 1109809 - DNA, 25 bp, Homo sapien
taagtaaacaccatcagagtctgct

SEQ ID NO: 1109810 - DNA, 25 bp, Homo sapien
tccctggagagctctctcagttcca

SEQ ID NO: 1109811 - DNA, 25 bp, Homo sapien
cctggagagctctctcagttccatc

SEQ ID NO: 1109812 - DNA, 25 bp, Homo sapien
ccctggagagctctctcagttccat

SEQ ID NO: 1109813 - DNA, 25 bp, Homo sapien
ttccctggagagctctctcagttcc

SEQ ID NO: 1109814 - DNA, 25 bp, Homo sapien
atcaccccagacccacaaagatcaa

SEQ ID NO: 1109815 - DNA, 25 bp, Homo sapien
gctccttcctgttcaaccgctggtt

SEQ ID NO: 1109816 - DNA, 25 bp, Homo sapien
ccttcctgttcaaccgctggttcct

SEQ ID NO: 1109817 - DNA, 25 bp, Homo sapien
tccttcctgttcaaccgctggttcc

SEQ ID NO: 1109818 - DNA, 25 bp, Homo sapien
taatgaggccatccaacatatatgc

SEQ ID NO: 1109819 - DNA, 25 bp, Homo sapien
cagttaactgtttactgatactgag

SEQ ID NO: 1109820 - DNA, 25 bp, Homo sapien
ttactgatactgagtaatgaggcca

SEQ ID NO: 1109821 - DNA, 25 bp, Homo sapien
catttttatcagttaactgtttact

SEQ ID NO: 1109822 - DNA, 25 bp, Homo sapien
tcaatctttcctctgcgattctgct

SEQ ID NO: 1109823 - DNA, 25 bp, Homo sapien
aatctttcctctgcgattctgcttt

SEQ ID NO: 1109824 - DNA, 25 bp, Homo sapien
caatctttcctctgcgattctgctt

SEQ ID NO: 1109825 - DNA, 25 bp, Homo sapien
cctctgcgattctgcttttgattaa

SEQ ID NO: 1109826 - DNA, 25 bp, Homo sapien
catcctcatcgcggtcggcatcaaa

SEQ ID NO: 1109827 - DNA, 25 bp, Homo sapien
gatgtcatagaacacctcatcctca

SEQ ID NO: 1109828 - DNA, 25 bp, Homo sapien
acctcatcctcatcgcggtcggcat

SEQ ID NO: 1109829 - DNA, 25 bp, Homo sapien
gctgatgtcatagaacacctcatcc

SEQ ID NO: 1109830 - DNA, 25 bp, Homo sapien
tggaaataacttgttgtcaactgcc

SEQ ID NO: 1109831 - DNA, 25 bp, Homo sapien
ggaaataacttgttgtcaactgcca

SEQ ID NO: 1109832 - DNA, 25 bp, Homo sapien
gaaataacttgttgtcaactgccat

SEQ ID NO: 1109833 - DNA, 25 bp, Homo sapien
ttggaaataacttgttgtcaactgc

SEQ ID NO: 1109834 - DNA, 25 bp, Homo sapien
ttctcagatatagacctgtccccga

SEQ ID NO: 1109835 - DNA, 25 bp, Homo sapien
gggacttctgaagcacaactgattc

SEQ ID NO: 1109836 - DNA, 25 bp, Homo sapien
ttcttagtcagaatatccaatgagt

SEQ ID NO: 1109837 - DNA, 25 bp, Homo sapien
taagttctaagcagtaatgccagtg

SEQ ID NO: 1109838 - DNA, 25 bp, Homo sapien
ttcctcaagccttcgggtcacctta

SEQ ID NO: 1109839 - DNA, 25 bp, Homo sapien
ctgaaaactcgagtttttcctcaag

SEQ ID NO: 1109840 - DNA, 25 bp, Homo sapien
tcaagccttcgggtcaccttagttg

SEQ ID NO: 1109841 - DNA, 25 bp, Homo sapien
tgaaaactcgagtttttcctcaagc

SEQ ID NO: 1109842 - DNA, 25 bp, Homo sapien
tatcaatgatctctccagtgtccaa

SEQ ID NO: 1109843 - DNA, 25 bp, Homo sapien
cagatcctgtatcaatgatctctcc

SEQ ID NO: 1109844 - DNA, 25 bp, Homo sapien
ctccagtgtccaatatcatcgaagg

SEQ ID NO: 1109845 - DNA, 25 bp, Homo sapien
tctctccagtgtccaatatcatcga

SEQ ID NO: 1109846 - DNA, 25 bp, Homo sapien
cacaaaatgagtttttataattcaa

SEQ ID NO: 1109847 - DNA, 25 bp, Homo sapien
tcataaaacatttacaaaggttcaa

SEQ ID NO: 1109848 - DNA, 25 bp, Homo sapien
tataattcaaattttcataaaacat

SEQ ID NO: 1109849 - DNA, 25 bp, Homo sapien
ttatctgtatatatttcacaaaatg

SEQ ID NO: 1109850 - DNA, 25 bp, Homo sapien
ttgaagctggttgaatggacaaagg

SEQ ID NO: 1109851 - DNA, 25 bp, Homo sapien
aataagcctaataatggagtggaag

SEQ ID NO: 1109852 - DNA, 25 bp, Homo sapien
gctggttgaatggacaaaggtacaa

SEQ ID NO: 1109853 - DNA, 25 bp, Homo sapien
aagcctaataatggagtggaaggcc

SEQ ID NO: 1109854 - DNA, 25 bp, Homo sapien
tagcaattgcttagggtgatttaac

SEQ ID NO: 1109855 - DNA, 25 bp, Homo sapien
aaatgctggtatgtagaggctctca

SEQ ID NO: 1109856 - DNA, 25 bp, Homo sapien
aattacagtagttccatgacagcca

SEQ ID NO: 1109857 - DNA, 25 bp, Homo sapien
caagctatccagtacacctaagagt

SEQ ID NO: 1109858 - DNA, 25 bp, Homo sapien
tttcaacatcaagcacaagtgtttc

SEQ ID NO: 1109859 - DNA, 25 bp, Homo sapien
tgactttcaacatcaagcacaagtg

SEQ ID NO: 1109860 - DNA, 25 bp, Homo sapien
atttttgcagtagaccaccaatgac

SEQ ID NO: 1109861 - DNA, 25 bp, Homo sapien
ttgcagtagaccaccaatgactttc

SEQ ID NO: 1109862 - DNA, 25 bp, Homo sapien
tcagtctttggggaaagctggactt

SEQ ID NO: 1109863 - DNA, 25 bp, Homo sapien
cagtctttggggaaagctggactta

SEQ ID NO: 1109864 - DNA, 25 bp, Homo sapien
gacaatggtaacttctgctccttgg

SEQ ID NO: 1109865 - DNA, 25 bp, Homo sapien
aatggtaacttctgctccttggcaa

SEQ ID NO: 1109866 - DNA, 25 bp, Homo sapien
caatggtaacttctgctccttggca

SEQ ID NO: 1109867 - DNA, 25 bp, Homo sapien
ttagacaatggtaacttctgctcct

SEQ ID NO: 1109868 - DNA, 25 bp, Homo sapien
caaatacatttaactggtcatcacc

SEQ ID NO: 1109869 - DNA, 25 bp, Homo sapien
tgtcctctccaaatacatttaactg

SEQ ID NO: 1109870 - DNA, 25 bp, Homo sapien
agtgtcctctccaaatacatttaac

SEQ ID NO: 1109871 - DNA, 25 bp, Homo sapien
ctccaaatacatttaactggtcatc

SEQ ID NO: 1109872 - DNA, 25 bp, Homo sapien
taattttacactttctcaaatcttc

SEQ ID NO: 1109873 - DNA, 25 bp, Homo sapien
ggcagtctcagtgcttgcctcaaca

SEQ ID NO: 1109874 - DNA, 25 bp, Homo sapien
tctagcaaatcgtcctctgaagagg

SEQ ID NO: 1109875 - DNA, 25 bp, Homo sapien
aacagggtcatacgcaactggccca

SEQ ID NO: 1109876 - DNA, 25 bp, Homo sapien
gactacaatagtccaaacagggtca

SEQ ID NO: 1109877 - DNA, 25 bp, Homo sapien
gcctttcaaggtttggcccatctcc

SEQ ID NO: 1109878 - DNA, 25 bp, Homo sapien
ggtcttcagtcaacatcacattcat

SEQ ID NO: 1109879 - DNA, 25 bp, Homo sapien
tcacattcatgcatctaggcctttc

SEQ ID NO: 1109880 - DNA, 25 bp, Homo sapien
cccgttcctgggctacgaggggcat

SEQ ID NO: 1109881 - DNA, 25 bp, Homo sapien
tgaaactgatggtttttagtagtct

SEQ ID NO: 1109882 - DNA, 25 bp, Homo sapien
gtacattcccgtatcttcttataat

SEQ ID NO: 1109883 - DNA, 25 bp, Homo sapien
cttgctcaaacatttaggtttatca

SEQ ID NO: 1109884 - DNA, 25 bp, Homo sapien
ttccaaaacttgctcaaacatttag

SEQ ID NO: 1109885 - DNA, 25 bp, Homo sapien
gaactgaaaccatctgcatcacctc

SEQ ID NO: 1109886 - DNA, 25 bp, Homo sapien
caggagcaatcctctcctgtgagat

SEQ ID NO: 1109887 - DNA, 25 bp, Homo sapien
atcacctcggcatgcccacgtgggt

SEQ ID NO: 1109888 - DNA, 25 bp, Homo sapien
tgcccacgtgggtcacgttttccag

SEQ ID NO: 1109889 - DNA, 25 bp, Homo sapien
tgcggttggcaacttccctcttaag

SEQ ID NO: 1109890 - DNA, 25 bp, Homo sapien
gacaacattagttgttgaccctttc

SEQ ID NO: 1109891 - DNA, 25 bp, Homo sapien
ccctcttaagggacaacattagttg

SEQ ID NO: 1109892 - DNA, 25 bp, Homo sapien
agaaaatccaggaaaggtctgagtt

SEQ ID NO: 1109893 - DNA, 25 bp, Homo sapien
attctgcggttttcctggtttgcct

SEQ ID NO: 1109894 - DNA, 25 bp, Homo sapien
ctcattctgcggttttcctggtttg

SEQ ID NO: 1109895 - DNA, 25 bp, Homo sapien
ttacaactcattctgcggttttcct

SEQ ID NO: 1109896 - DNA, 25 bp, Homo sapien
tacaactcattctgcggttttcctg

SEQ ID NO: 1109897 - DNA, 25 bp, Homo sapien
tccataatgtctctgatcaatttgc

SEQ ID NO: 1109898 - DNA, 25 bp, Homo sapien
cctcacgcaggagctcgccagttga

SEQ ID NO: 1109899 - DNA, 25 bp, Homo sapien
gagctcgccagttgagagatgtgta

SEQ ID NO: 1109900 - DNA, 25 bp, Homo sapien
gagatgtgtaaatccatatttttcc

SEQ ID NO: 1109901 - DNA, 25 bp, Homo sapien
tccttcaggagctccaaaacgatgc

SEQ ID NO: 1109902 - DNA, 25 bp, Homo sapien
ttcacctcccgaggatagccgtcaa

SEQ ID NO: 1109903 - DNA, 25 bp, Homo sapien
ctcccgaggatagccgtcaatcagg

SEQ ID NO: 1109904 - DNA, 25 bp, Homo sapien
tgcgtccgaactcttccccttgctt

SEQ ID NO: 1109905 - DNA, 25 bp, Homo sapien
tctggaaggatgcccgtaacaacca

SEQ ID NO: 1109906 - DNA, 25 bp, Homo sapien
aaggatgcccgtaacaaccactcac

SEQ ID NO: 1109907 - DNA, 25 bp, Homo sapien
tggaaggatgcccgtaacaaccact

SEQ ID NO: 1109908 - DNA, 25 bp, Homo sapien
ggaaggatgcccgtaacaaccactc

SEQ ID NO: 1109909 - DNA, 25 bp, Homo sapien
tagttctagttaggcttcttctctg

SEQ ID NO: 1109910 - DNA, 25 bp, Homo sapien
cattgagtgtaactgtccagtcacc

SEQ ID NO: 1109911 - DNA, 25 bp, Homo sapien
catgaattttagcattgagtgtaac

SEQ ID NO: 1109912 - DNA, 25 bp, Homo sapien
accatgttgatgactttcttgttcc

SEQ ID NO: 1109913 - DNA, 25 bp, Homo sapien
gctgcctcttgggatctagtgggac

SEQ ID NO: 1109914 - DNA, 25 bp, Homo sapien
gcctcttgggatctagtgggactga

SEQ ID NO: 1109915 - DNA, 25 bp, Homo sapien
gatctagtgggactgagaggtgaca

SEQ ID NO: 1109916 - DNA, 25 bp, Homo sapien
tcacagcccccgctcgatgtcagcg

SEQ ID NO: 1109917 - DNA, 25 bp, Homo sapien
cgagctgtgagtaaatgaaggcttg

SEQ ID NO: 1109918 - DNA, 25 bp, Homo sapien
cttgccacattcgagctgtgagtaa

SEQ ID NO: 1109919 - DNA, 25 bp, Homo sapien
cattcgagctgtgagtaaatgaagg

SEQ ID NO: 1109920 - DNA, 25 bp, Homo sapien
ccacattcgagctgtgagtaaatga

SEQ ID NO: 1109921 - DNA, 25 bp, Homo sapien
ggtaacatacgtatgctccttggca

SEQ ID NO: 1109922 - DNA, 25 bp, Homo sapien
tctatgaggcttaggttccccgtgt

SEQ ID NO: 1109923 - DNA, 25 bp, Homo sapien
ccgtgtgcagggattaagaattctc

SEQ ID NO: 1109924 - DNA, 25 bp, Homo sapien
tacagcagacactcactaacgattc

SEQ ID NO: 1109925 - DNA, 25 bp, Homo sapien
gtgatgcagacgagtatatgccacc

SEQ ID NO: 1109926 - DNA, 25 bp, Homo sapien
agacgagtatatgccacccactgca

SEQ ID NO: 1109927 - DNA, 25 bp, Homo sapien
tgcagacgagtatatgccacccact

SEQ ID NO: 1109928 - DNA, 25 bp, Homo sapien
gatgcagacgagtatatgccaccca

SEQ ID NO: 1109929 - DNA, 25 bp, Homo sapien
agaaacctcaccctgctgatgttct

SEQ ID NO: 1109930 - DNA, 25 bp, Homo sapien
acagtcagaaacctcaccctgctga

SEQ ID NO: 1109931 - DNA, 25 bp, Homo sapien
aacacagtcagaaacctcaccctgc

SEQ ID NO: 1109932 - DNA, 25 bp, Homo sapien
agtcagaaacctcaccctgctgatg

SEQ ID NO: 1109933 - DNA, 25 bp, Homo sapien
tggtgtctgccgagcagtccataca

SEQ ID NO: 1109934 - DNA, 25 bp, Homo sapien
tggagaaggcggttggtcatggtgt

SEQ ID NO: 1109935 - DNA, 25 bp, Homo sapien
gtcatggtgtctgccgagcagtcca

SEQ ID NO: 1109936 - DNA, 25 bp, Homo sapien
gtctgccgagcagtccatacagatc

SEQ ID NO: 1109937 - DNA, 25 bp, Homo sapien
gtcttggtggtgtcgtccacaggca

SEQ ID NO: 1109938 - DNA, 25 bp, Homo sapien
ctcggtagtaggcttctaggcgctt

SEQ ID NO: 1109939 - DNA, 25 bp, Homo sapien
gcttctaggcgcttggcgatggtct

SEQ ID NO: 1109940 - DNA, 25 bp, Homo sapien
gatggacgctcggtagtaggcttct

SEQ ID NO: 1109941 - DNA, 25 bp, Homo sapien
tttttgtctcgtagtaggcgatcac

SEQ ID NO: 1109942 - DNA, 25 bp, Homo sapien
attcccagatcccttaactaaaatg

SEQ ID NO: 1109943 - DNA, 25 bp, Homo sapien
aatgctacatttcagttacttatgg

SEQ ID NO: 1109944 - DNA, 25 bp, Homo sapien
gctacatttcagttacttatggcca

SEQ ID NO: 1109945 - DNA, 25 bp, Homo sapien
caaatgctacatttcagttacttat

SEQ ID NO: 1109946 - DNA, 25 bp, Homo sapien
tacatttcagttacttatggccata

SEQ ID NO: 1109947 - DNA, 25 bp, Homo sapien
ggggctttctgatgcacaggcccat

SEQ ID NO: 1109948 - DNA, 25 bp, Homo sapien
ggctttctgatgcacaggcccatat

SEQ ID NO: 1109949 - DNA, 25 bp, Homo sapien
gctttctgatgcacaggcccatatt

SEQ ID NO: 1109950 - DNA, 25 bp, Homo sapien
gggctttctgatgcacaggcccata

SEQ ID NO: 1109951 - DNA, 25 bp, Homo sapien
gggtgcaaacagtattgcatcgaat

SEQ ID NO: 1109952 - DNA, 25 bp, Homo sapien
gcatcgaatcaaaacgtctttgcgg

SEQ ID NO: 1109953 - DNA, 25 bp, Homo sapien
tcagcaggaccgcaggggtgcaaac

SEQ ID NO: 1109954 - DNA, 25 bp, Homo sapien
acgtctttgcgggaatctggtgaag

SEQ ID NO: 1109955 - DNA, 25 bp, Homo sapien
caaacgcttgatttattatttacac

SEQ ID NO: 1109956 - DNA, 25 bp, Homo sapien
gaaaggaaggggttgctaactcaca

SEQ ID NO: 1109957 - DNA, 25 bp, Homo sapien
ctgtagcagggacgggtaagaaggt

SEQ ID NO: 1109958 - DNA, 25 bp, Homo sapien
gggttgctaactcacattcccgccc

SEQ ID NO: 1109959 - DNA, 25 bp, Homo sapien
tgcccacagcccactatacagtcac

SEQ ID NO: 1109960 - DNA, 25 bp, Homo sapien
agcaaatctgtttctgcccacagcc

SEQ ID NO: 1109961 - DNA, 25 bp, Homo sapien
tcagcaaatctgtttctgcccacag

SEQ ID NO: 1109962 - DNA, 25 bp, Homo sapien
tctgcccacagcccactatacagtc

SEQ ID NO: 1109963 - DNA, 25 bp, Homo sapien
tgtcacgaaggccaagttcttcggc

SEQ ID NO: 1109964 - DNA, 25 bp, Homo sapien
ccaaagtagcctgctgtcacgaagg

SEQ ID NO: 1109965 - DNA, 25 bp, Homo sapien
aaggccaagttcttcggcaggagag

SEQ ID NO: 1109966 - DNA, 25 bp, Homo sapien
caaagtagcctgctgtcacgaaggc

SEQ ID NO: 1109967 - DNA, 25 bp, Homo sapien
gaaaatagagtcaatagctgtgcag

SEQ ID NO: 1109968 - DNA, 25 bp, Homo sapien
gagtcaatagctgtgcagagttgaa

SEQ ID NO: 1109969 - DNA, 25 bp, Homo sapien
aaaatagagtcaatagctgtgcaga

SEQ ID NO: 1109970 - DNA, 25 bp, Homo sapien
cagaaaatagagtcaatagctgtgc

SEQ ID NO: 1109971 - DNA, 25 bp, Homo sapien
tttccattctaacaaacatgcattt

SEQ ID NO: 1109972 - DNA, 25 bp, Homo sapien
ccattctaacaaacatgcatttttg

SEQ ID NO: 1109973 - DNA, 25 bp, Homo sapien
tctgtttccattctaacaaacatgc

SEQ ID NO: 1109974 - DNA, 25 bp, Homo sapien
gtttccattctaacaaacatgcatt

SEQ ID NO: 1109975 - DNA, 25 bp, Homo sapien
cacaggtctagctgggaagcaaaca

SEQ ID NO: 1109976 - DNA, 25 bp, Homo sapien
ggcctgcatgatacaaagtgtgtgt

SEQ ID NO: 1109977 - DNA, 25 bp, Homo sapien
tgtgccgtgagtgcagacagttgtc

SEQ ID NO: 1109978 - DNA, 25 bp, Homo sapien
catgtactgactagctctgagtgtg

SEQ ID NO: 1109979 - DNA, 25 bp, Homo sapien
gtggatgagagttgacaaaacagcc

SEQ ID NO: 1109980 - DNA, 25 bp, Homo sapien
aaccagatgatcagggtctagcaag

SEQ ID NO: 1109981 - DNA, 25 bp, Homo sapien
cagtatgtaagaggaaggtgtgact

SEQ ID NO: 1109982 - DNA, 25 bp, Homo sapien
cctccattggggaacagtatgtaag

SEQ ID NO: 1109983 - DNA, 25 bp, Homo sapien
tgatagcacaaaagagaacccaaac

SEQ ID NO: 1109984 - DNA, 25 bp, Homo sapien
aaactcctggaaagggcccatatga

SEQ ID NO: 1109985 - DNA, 25 bp, Homo sapien
tgaacacaccacttactgacatgcc

SEQ ID NO: 1109986 - DNA, 25 bp, Homo sapien
tagccatgacgacagtattccaagt

SEQ ID NO: 1109987 - DNA, 25 bp, Homo sapien
tacaaacctgagcatatgtccaggc

SEQ ID NO: 1109988 - DNA, 25 bp, Homo sapien
gattacttcagagtcagcgtctgcc

SEQ ID NO: 1109989 - DNA, 25 bp, Homo sapien
cctgatgtggtgtgcttcctaagag

SEQ ID NO: 1109990 - DNA, 25 bp, Homo sapien
tccccttgtgtcaggcaacactagg

SEQ ID NO: 1109991 - DNA, 25 bp, Homo sapien
catttgtcaggagaactgtgagaaa

SEQ ID NO: 1109992 - DNA, 25 bp, Homo sapien
aaatttagtctgcacagtgagcaag

SEQ ID NO: 1109993 - DNA, 25 bp, Homo sapien
cacagtgagcaagggttcacatgca

SEQ ID NO: 1109994 - DNA, 25 bp, Homo sapien
tctgtgtatacagtatgttcttgaa

SEQ ID NO: 1109995 - DNA, 25 bp, Homo sapien
taggagaaacttatcacataggtct

SEQ ID NO: 1109996 - DNA, 25 bp, Homo sapien
gagtagacactataaagtaggagaa

SEQ ID NO: 1109997 - DNA, 25 bp, Homo sapien
tgtttagtgacctagggaacagcca

SEQ ID NO: 1109998 - DNA, 25 bp, Homo sapien
ccttttagaagtgacttttgtgaga

SEQ ID NO: 1109999 - DNA, 25 bp, Homo sapien
tccggttttacagcattggatgtat

SEQ ID NO: 1110000 - DNA, 25 bp, Homo sapien
taggagaggcatccggttttacagc

SEQ ID NO: 1110001 - DNA, 25 bp, Homo sapien
agttgctgttccactagagtcggct

SEQ ID NO: 1110002 - DNA, 25 bp, Homo sapien
tagagtcggcttaggagaggcatcc

SEQ ID NO: 1110003 - DNA, 25 bp, Homo sapien
ccactcctgaccctgctttgcttct

SEQ ID NO: 1110004 - DNA, 25 bp, Homo sapien
tgggcacattcgggctggtatggcc

SEQ ID NO: 1110005 - DNA, 25 bp, Homo sapien
agattgggcacattcgggctggtat

SEQ ID NO: 1110006 - DNA, 25 bp, Homo sapien
acattcgggctggtatggccataaa

SEQ ID NO: 1110007 - DNA, 25 bp, Homo sapien
caagggaatcttgatctgactggtt

SEQ ID NO: 1110008 - DNA, 25 bp, Homo sapien
ctagggataaattgaaaaggtcatc

SEQ ID NO: 1110009 - DNA, 25 bp, Homo sapien
ggtctgttcccataagaatctttga

SEQ ID NO: 1110010 - DNA, 25 bp, Homo sapien
gaagttactaacttgcctctgttat

SEQ ID NO: 1110011 - DNA, 25 bp, Homo sapien
caaaggatatttcgaaggatccaaa

SEQ ID NO: 1110012 - DNA, 25 bp, Homo sapien
caggttacccacagtttcggtctga

SEQ ID NO: 1110013 - DNA, 25 bp, Homo sapien
caatcacaaatggtaggtcctcagg

SEQ ID NO: 1110014 - DNA, 25 bp, Homo sapien
ggctacaaattggagggtcccacca

SEQ ID NO: 1110015 - DNA, 25 bp, Homo sapien
tgtgtttcatgtaagttaccagatc

SEQ ID NO: 1110016 - DNA, 25 bp, Homo sapien
tcatgtaagttaccagatctaaatt

SEQ ID NO: 1110017 - DNA, 25 bp, Homo sapien
tatgctttccggtttaggggctgtg

SEQ ID NO: 1110018 - DNA, 25 bp, Homo sapien
gggctgtgtttcatgtaagttacca

SEQ ID NO: 1110019 - DNA, 25 bp, Homo sapien
gattgatacattgaggagtttatct

SEQ ID NO: 1110020 - DNA, 25 bp, Homo sapien
gagtttatctttgaatgaatatgtg

SEQ ID NO: 1110021 - DNA, 25 bp, Homo sapien
tcatgattctttagtgattgataca

SEQ ID NO: 1110022 - DNA, 25 bp, Homo sapien
gttggctttcatgagtcaccttcct

SEQ ID NO: 1110023 - DNA, 25 bp, Homo sapien
tgctttaattccagggctagttttg

SEQ ID NO: 1110024 - DNA, 25 bp, Homo sapien
ggaaaattatgggacactcagtgtt

SEQ ID NO: 1110025 - DNA, 25 bp, Homo sapien
aattctgtagaacatataaccatgc

SEQ ID NO: 1110026 - DNA, 25 bp, Homo sapien
cagtgtttgttacccatgaaagaaa

SEQ ID NO: 1110027 - DNA, 25 bp, Homo sapien
gctgaagggcagtcacatcactaca

SEQ ID NO: 1110028 - DNA, 25 bp, Homo sapien
gggcagtcacatcactacacccttg

SEQ ID NO: 1110029 - DNA, 25 bp, Homo sapien
aggctgaagggcagtcacatcacta

SEQ ID NO: 1110030 - DNA, 25 bp, Homo sapien
aggcaggcttcactacacctggata

SEQ ID NO: 1110031 - DNA, 25 bp, Homo sapien
tgtagcacttgaataagcatcaagg

SEQ ID NO: 1110032 - DNA, 25 bp, Homo sapien
atttgggaagtcctctaggacaaga

SEQ ID NO: 1110033 - DNA, 25 bp, Homo sapien
tgtctggctaattgggtactaaaac

SEQ ID NO: 1110034 - DNA, 25 bp, Homo sapien
tacttgatgtcgagaatttgggaag

SEQ ID NO: 1110035 - DNA, 25 bp, Homo sapien
tgttttgtttagagaagagggctca

SEQ ID NO: 1110036 - DNA, 25 bp, Homo sapien
gacacacacaaccacgtctggctaa

SEQ ID NO: 1110037 - DNA, 25 bp, Homo sapien
tacagacacacacaaccacgtctgg

SEQ ID NO: 1110038 - DNA, 25 bp, Homo sapien
gtttagagaagagggctcactatgt

SEQ ID NO: 1110039 - DNA, 25 bp, Homo sapien
cttggcccattctgccgtccttagg

SEQ ID NO: 1110040 - DNA, 25 bp, Homo sapien
taggcgacctggtcataccctgctc

SEQ ID NO: 1110041 - DNA, 25 bp, Homo sapien
ccgtccttaggcgacctggtcatac

SEQ ID NO: 1110042 - DNA, 25 bp, Homo sapien
cattctgccgtccttaggcgacctg

SEQ ID NO: 1110043 - DNA, 25 bp, Homo sapien
ggctagcaggaacttcactctgaat

SEQ ID NO: 1110044 - DNA, 25 bp, Homo sapien
aaaacaaggatatgtgttgttaggc

SEQ ID NO: 1110045 - DNA, 25 bp, Homo sapien
aatgttttagtcagaggctagcagg

SEQ ID NO: 1110046 - DNA, 25 bp, Homo sapien
tatgatctgttatggcacttaggga

SEQ ID NO: 1110047 - DNA, 25 bp, Homo sapien
aacataggattcaactggtttcttt

SEQ ID NO: 1110048 - DNA, 25 bp, Homo sapien
aaaacataggattcaactggtttct

SEQ ID NO: 1110049 - DNA, 25 bp, Homo sapien
caaaacataggattcaactggtttc

SEQ ID NO: 1110050 - DNA, 25 bp, Homo sapien
tcaaaacataggattcaactggttt

SEQ ID NO: 1110051 - DNA, 25 bp, Homo sapien
gttttgctgtcttcagcaagttgag

SEQ ID NO: 1110052 - DNA, 25 bp, Homo sapien
cagttttgctgtcttcagcaagttg

SEQ ID NO: 1110053 - DNA, 25 bp, Homo sapien
tgctgtcttcagcaagttgagattc

SEQ ID NO: 1110054 - DNA, 25 bp, Homo sapien
tcttcagcaagttgagattcctgtg

SEQ ID NO: 1110055 - DNA, 25 bp, Homo sapien
tgttgttatccatccaaactctttg

SEQ ID NO: 1110056 - DNA, 25 bp, Homo sapien
ctgttcatcaaggtgttgttatcca

SEQ ID NO: 1110057 - DNA, 25 bp, Homo sapien
tactactactccagtttgattctga

SEQ ID NO: 1110058 - DNA, 25 bp, Homo sapien
gatagtttttatcatgcatacccgc

SEQ ID NO: 1110059 - DNA, 25 bp, Homo sapien
ccattggagttagggacattggcag

SEQ ID NO: 1110060 - DNA, 25 bp, Homo sapien
ttggccattggagttagggacattg

SEQ ID NO: 1110061 - DNA, 25 bp, Homo sapien
tcagtgttggccattggagttaggg

SEQ ID NO: 1110062 - DNA, 25 bp, Homo sapien
tgttggccattggagttagggacat

SEQ ID NO: 1110063 - DNA, 25 bp, Homo sapien
cagcaacaacatagtcagaccacgt

SEQ ID NO: 1110064 - DNA, 25 bp, Homo sapien
cagtattgggtcttgggaaatacca

SEQ ID NO: 1110065 - DNA, 25 bp, Homo sapien
gctaatgaacttcagtgatcagagg

SEQ ID NO: 1110066 - DNA, 25 bp, Homo sapien
aggtctgacaccatgccaatttcca

SEQ ID NO: 1110067 - DNA, 25 bp, Homo sapien
cttgaagggaatacagtaaccccat

SEQ ID NO: 1110068 - DNA, 25 bp, Homo sapien
cagttgtcctggatggcggagcctt

SEQ ID NO: 1110069 - DNA, 25 bp, Homo sapien
tgccgggatacgtgctgcatcagct

SEQ ID NO: 1110070 - DNA, 25 bp, Homo sapien
tctacaaggcaagtcgttagggagg

SEQ ID NO: 1110071 - DNA, 25 bp, Homo sapien
gcctgggacctgcaactctttctac

SEQ ID NO: 1110072 - DNA, 25 bp, Homo sapien
cgagtgggtttgtatcgcgagatct

SEQ ID NO: 1110073 - DNA, 25 bp, Homo sapien
tctagtggaagctcgcgagatgcga

SEQ ID NO: 1110074 - DNA, 25 bp, Homo sapien
cgagatctctcgattctcgcgggac

SEQ ID NO: 1110075 - DNA, 25 bp, Homo sapien
taccgccatgttgggtctagtggaa

SEQ ID NO: 1110076 - DNA, 25 bp, Homo sapien
gtccgaccccgcgtgaaaggtgagc

SEQ ID NO: 1110077 - DNA, 25 bp, Homo sapien
tccccaagtggcccgttgcgtccga

SEQ ID NO: 1110078 - DNA, 25 bp, Homo sapien
accccgcgtgaaaggtgagcaagag

SEQ ID NO: 1110079 - DNA, 25 bp, Homo sapien
cgttgcgtccgaccccgcgtgaaag

SEQ ID NO: 1110080 - DNA, 25 bp, Homo sapien
ctatcgagcttcctgcagcggtggc

SEQ ID NO: 1110081 - DNA, 25 bp, Homo sapien
tggccacccgagcaagtgccgtggc

SEQ ID NO: 1110082 - DNA, 25 bp, Homo sapien
tgcagcggtggccacccgagcaagt

SEQ ID NO: 1110083 - DNA, 25 bp, Homo sapien
ggcgccgctatcgagcttcctgcag

SEQ ID NO: 1110084 - DNA, 25 bp, Homo sapien
tacaaatctctcaggaggccacaaa

SEQ ID NO: 1110085 - DNA, 25 bp, Homo sapien
tgaagccgatttccaatggcggagc

SEQ ID NO: 1110086 - DNA, 25 bp, Homo sapien
ccacaaagggcaggatgaagccgat

SEQ ID NO: 1110087 - DNA, 25 bp, Homo sapien
tggcggagctacgaggacgcctttc

SEQ ID NO: 1110088 - DNA, 25 bp, Homo sapien
taaatcaccctgactctgaccagtc

SEQ ID NO: 1110089 - DNA, 25 bp, Homo sapien
gcagatccatagtatcctttgtagt

SEQ ID NO: 1110090 - DNA, 25 bp, Homo sapien
tttttgcactgcagcatatacacta

SEQ ID NO: 1110091 - DNA, 25 bp, Homo sapien
gctcaggaaactagggtgtcacttt

SEQ ID NO: 1110092 - DNA, 25 bp, Homo sapien
gtccagtagtaaccttgcaagattg

SEQ ID NO: 1110093 - DNA, 25 bp, Homo sapien
ctcatgtgtccctagctggttttgg

SEQ ID NO: 1110094 - DNA, 25 bp, Homo sapien
gaagcatatgctccacaagggtgga

SEQ ID NO: 1110095 - DNA, 25 bp, Homo sapien
caaagcaggatcatgtggcgaagca

SEQ ID NO: 1110096 - DNA, 25 bp, Homo sapien
gatgacgtctgtcgtagaccgtcac

SEQ ID NO: 1110097 - DNA, 25 bp, Homo sapien
gtgacggtctacgacagacgtcatc

SEQ ID NO: 1110098 - DNA, 25 bp, Homo sapien
gaattgctctcaagtcaggataggg

SEQ ID NO: 1110099 - DNA, 25 bp, Homo sapien
tttaagtaaacatcccagtgatgaa

SEQ ID NO: 1110100 - DNA, 25 bp, Homo sapien
gagaccgaaccccttctatttcatc

SEQ ID NO: 1110101 - DNA, 25 bp, Homo sapien
tacatttatggtggccaaggatcat

SEQ ID NO: 1110102 - DNA, 25 bp, Homo sapien
tcataaaattatagaacccgaggat

SEQ ID NO: 1110103 - DNA, 25 bp, Homo sapien
gagcttcaggtgacaatttagtagt

SEQ ID NO: 1110104 - DNA, 25 bp, Homo sapien
tgcatgtgagtattagtcataaaat

SEQ ID NO: 1110105 - DNA, 25 bp, Homo sapien
cagatgtcttttgtgtagtcatgca

SEQ ID NO: 1110106 - DNA, 25 bp, Homo sapien
ataagcccctgcatccagcggaagt

SEQ ID NO: 1110107 - DNA, 25 bp, Homo sapien
ccagcggaagttgatcttcagatca

SEQ ID NO: 1110108 - DNA, 25 bp, Homo sapien
ctgcatccagcggaagttgatcttc

SEQ ID NO: 1110109 - DNA, 25 bp, Homo sapien
gcccctgcatccagcggaagttgat

SEQ ID NO: 1110110 - DNA, 25 bp, Homo sapien
ctgcttccaccgatttactttgtaa

SEQ ID NO: 1110111 - DNA, 25 bp, Homo sapien
tacgattacactattggtggctggg

SEQ ID NO: 1110112 - DNA, 25 bp, Homo sapien
tattactgcacaatactgcttccac

SEQ ID NO: 1110113 - DNA, 25 bp, Homo sapien
ggtgcatgccagtgctcccagataa

SEQ ID NO: 1110114 - DNA, 25 bp, Homo sapien
aatatgctgttctgactttctcaag

SEQ ID NO: 1110115 - DNA, 25 bp, Homo sapien
ggatccctttggtcatcatgttcaa

SEQ ID NO: 1110116 - DNA, 25 bp, Homo sapien
gaacatgtgtatcaagtcctggcat

SEQ ID NO: 1110117 - DNA, 25 bp, Homo sapien
tgtatttgaaccgaagtcttcaccg

SEQ ID NO: 1110118 - DNA, 25 bp, Homo sapien
ctgcagcctttgtttggatgaaaga

SEQ ID NO: 1110119 - DNA, 25 bp, Homo sapien
ccatctgcagcctttgtttggatga

SEQ ID NO: 1110120 - DNA, 25 bp, Homo sapien
gcctttgtttggatgaaagatccat

SEQ ID NO: 1110121 - DNA, 25 bp, Homo sapien
cagcctttgtttggatgaaagatcc

SEQ ID NO: 1110122 - DNA, 25 bp, Homo sapien
tgggtgactgaaagccctgcagcgc

SEQ ID NO: 1110123 - DNA, 25 bp, Homo sapien
tgtgaacggaaaaaccgaggtgtca

SEQ ID NO: 1110124 - DNA, 25 bp, Homo sapien
tccccactcaggcttgccagtccct

SEQ ID NO: 1110125 - DNA, 25 bp, Homo sapien
ggtttcgcttttcggcgctgttgag

SEQ ID NO: 1110126 - DNA, 25 bp, Homo sapien
tgatttgaggaagggtcctcagggg

SEQ ID NO: 1110127 - DNA, 25 bp, Homo sapien
ttgatttgaggaagggtcctcaggg

SEQ ID NO: 1110128 - DNA, 25 bp, Homo sapien
tgtcaacggtcggtggaggatggga

SEQ ID NO: 1110129 - DNA, 25 bp, Homo sapien
gtcaacggtcggtggaggatgggaa

SEQ ID NO: 1110130 - DNA, 25 bp, Homo sapien
ctgtcaacggtcggtggaggatggg

SEQ ID NO: 1110131 - DNA, 25 bp, Homo sapien
ctgcgttgcagagataatctagtgg

SEQ ID NO: 1110132 - DNA, 25 bp, Homo sapien
aaagaggagcttgcggaggtgcggc

SEQ ID NO: 1110133 - DNA, 25 bp, Homo sapien
tgcaggccgttgttggtcgagctgg

SEQ ID NO: 1110134 - DNA, 25 bp, Homo sapien
ggcccaagggcgtttcgctcgcgtc

SEQ ID NO: 1110135 - DNA, 25 bp, Homo sapien
tctgttctcgcttccgcgcgctggg

SEQ ID NO: 1110136 - DNA, 25 bp, Homo sapien
ctatcgccggagacgcctgcggcgg

SEQ ID NO: 1110137 - DNA, 25 bp, Homo sapien
gttttccggccctcctgacgcgaca

SEQ ID NO: 1110138 - DNA, 25 bp, Homo sapien
cccggagacaccggaaggagccgcg

SEQ ID NO: 1110139 - DNA, 25 bp, Homo sapien
ctgctgcgggaagtggccagttcag

SEQ ID NO: 1110140 - DNA, 25 bp, Homo sapien
ctgtgtcagtccagaaagatccttt

SEQ ID NO: 1110141 - DNA, 25 bp, Homo sapien
tgtgtcagtccagaaagatcctttc

SEQ ID NO: 1110142 - DNA, 25 bp, Homo sapien
gatacattgctgagccaagagactg

SEQ ID NO: 1110143 - DNA, 25 bp, Homo sapien
aatcaggggactaaggactaggtca

SEQ ID NO: 1110144 - DNA, 25 bp, Homo sapien
tgtctgtccaaaaggactgtcagtt

SEQ ID NO: 1110145 - DNA, 25 bp, Homo sapien
tggccatccagaagatacattgctg

SEQ ID NO: 1110146 - DNA, 25 bp, Homo sapien
tgaaagaaggttgtagaataaacat

SEQ ID NO: 1110147 - DNA, 25 bp, Homo sapien
aggattgatgaaagaaggttgtaga

SEQ ID NO: 1110148 - DNA, 25 bp, Homo sapien
gatgaaagaaggttgtagaataaac

SEQ ID NO: 1110149 - DNA, 25 bp, Homo sapien
ttgatgaaagaaggttgtagaataa

SEQ ID NO: 1110150 - DNA, 25 bp, Homo sapien
tctaaaagaggatgccagaccatcc

SEQ ID NO: 1110151 - DNA, 25 bp, Homo sapien
cctgagcattctaaaagaggatgcc

SEQ ID NO: 1110152 - DNA, 25 bp, Homo sapien
gaggatgccagaccatccccatagg

SEQ ID NO: 1110153 - DNA, 25 bp, Homo sapien
gatgccagaccatccccataggaca

SEQ ID NO: 1110154 - DNA, 25 bp, Homo sapien
agaccagttgaataaaagtgcacac

SEQ ID NO: 1110155 - DNA, 25 bp, Homo sapien
cttgagaccagttgaataaaagtgc

SEQ ID NO: 1110156 - DNA, 25 bp, Homo sapien
tgacttgagaccagttgaataaaag

SEQ ID NO: 1110157 - DNA, 25 bp, Homo sapien
ctgtatactgacttgagaccagttg

SEQ ID NO: 1110158 - DNA, 25 bp, Homo sapien
cctcccgagagtagatactccatgt

SEQ ID NO: 1110159 - DNA, 25 bp, Homo sapien
ctcccgagagtagatactccatgtg

SEQ ID NO: 1110160 - DNA, 25 bp, Homo sapien
caacttctacaacgagccgcgtgtg

SEQ ID NO: 1110161 - DNA, 25 bp, Homo sapien
cagtgggaaatcgtgcatggcatca

SEQ ID NO: 1110162 - DNA, 25 bp, Homo sapien
tcactatcggcaaggagcggttcca

SEQ ID NO: 1110163 - DNA, 25 bp, Homo sapien
tcataaagatcctcgtggagcgccg

SEQ ID NO: 1110164 - DNA, 25 bp, Homo sapien
gagggactacgtgtgaagcagctcc

SEQ ID NO: 1110165 - DNA, 25 bp, Homo sapien
tcaggagtgcgaaggtggagagaaa

SEQ ID NO: 1110166 - DNA, 25 bp, Homo sapien
ttccaggctttctgcgtgagggact

SEQ ID NO: 1110167 - DNA, 25 bp, Homo sapien
ttctgcgtgagggactacgtgtgaa

SEQ ID NO: 1110168 - DNA, 25 bp, Homo sapien
cagctgatgcctggcgctgagcagc

SEQ ID NO: 1110169 - DNA, 25 bp, Homo sapien
ccagctgatgcctggcgctgagcag

SEQ ID NO: 1110170 - DNA, 25 bp, Homo sapien
tccgagagctaacgccagcgatgga

SEQ ID NO: 1110171 - DNA, 25 bp, Homo sapien
agagctaacgccagcgatggagtcc

SEQ ID NO: 1110172 - DNA, 25 bp, Homo sapien
gcactccgagagctaacgccagcga

SEQ ID NO: 1110173 - DNA, 25 bp, Homo sapien
gagagctaacgccagcgatggagtc

SEQ ID NO: 1110174 - DNA, 25 bp, Homo sapien
tcgggggtgttcagggtggcacggc

SEQ ID NO: 1110175 - DNA, 25 bp, Homo sapien
atgagacgaggtcgggggtgttcag

SEQ ID NO: 1110176 - DNA, 25 bp, Homo sapien
tctgagatgagacgaggtcgggggt

SEQ ID NO: 1110177 - DNA, 25 bp, Homo sapien
agatgagacgaggtcgggggtgttc

SEQ ID NO: 1110178 - DNA, 25 bp, Homo sapien
gcgagcccatcccaattccgcgctt

SEQ ID NO: 1110179 - DNA, 25 bp, Homo sapien
cagtggcgagcccatcccaattccg

SEQ ID NO: 1110180 - DNA, 25 bp, Homo sapien
cctccagctcggccgtccagaccct

SEQ ID NO: 1110181 - DNA, 25 bp, Homo sapien
ccaattccgcgcttcctttgcaggc

SEQ ID NO: 1110182 - DNA, 25 bp, Homo sapien
gatttctggttactttaccaatgaa

SEQ ID NO: 1110183 - DNA, 25 bp, Homo sapien
agatttctggttactttaccaatga

SEQ ID NO: 1110184 - DNA, 25 bp, Homo sapien
cttagcgctgctgtcttcaaggaaa

SEQ ID NO: 1110185 - DNA, 25 bp, Homo sapien
ggaagatcaaacactcttagcgctg

SEQ ID NO: 1110186 - DNA, 25 bp, Homo sapien
gagagaatagtaccaagtcagagga

SEQ ID NO: 1110187 - DNA, 25 bp, Homo sapien
tgggagagagaatagtaccaagtca

SEQ ID NO: 1110188 - DNA, 25 bp, Homo sapien
ccttatatagcagtcttgaaatgac

SEQ ID NO: 1110189 - DNA, 25 bp, Homo sapien
tcaccagggattaggaatggtgcga

SEQ ID NO: 1110190 - DNA, 25 bp, Homo sapien
acagattagggttcaccagggatta

SEQ ID NO: 1110191 - DNA, 25 bp, Homo sapien
ttctcagccttatatagcagtcttg

SEQ ID NO: 1110192 - DNA, 25 bp, Homo sapien
cagtaaatgaatggttaacaaattg

SEQ ID NO: 1110193 - DNA, 25 bp, Homo sapien
ttcaacagctttgctggaactcaag

SEQ ID NO: 1110194 - DNA, 25 bp, Homo sapien
ggaacaaactggtaatacattcaac

SEQ ID NO: 1110195 - DNA, 25 bp, Homo sapien
catacataccatggagtacaaaata

SEQ ID NO: 1110196 - DNA, 25 bp, Homo sapien
tctgatgctgctcttttagtgtatt

SEQ ID NO: 1110197 - DNA, 25 bp, Homo sapien
agatatagcactcactgcagttacc

SEQ ID NO: 1110198 - DNA, 25 bp, Homo sapien
attcaagtatgaggtgctctggttc

SEQ ID NO: 1110199 - DNA, 25 bp, Homo sapien
attacagatatagcactcactgcag

SEQ ID NO: 1110200 - DNA, 25 bp, Homo sapien
agaggccaaactctgtgcagaacct

SEQ ID NO: 1110201 - DNA, 25 bp, Homo sapien
tagttacaaacttgagatcctttgt

SEQ ID NO: 1110202 - DNA, 25 bp, Homo sapien
cctccattagcatagttacaaactt

SEQ ID NO: 1110203 - DNA, 25 bp, Homo sapien
tttggtagaacttaaagataatgtc

SEQ ID NO: 1110204 - DNA, 25 bp, Homo sapien
agaattgccacaagcgcagctatga

SEQ ID NO: 1110205 - DNA, 25 bp, Homo sapien
tatgacaagaattgacactctggac

SEQ ID NO: 1110206 - DNA, 25 bp, Homo sapien
tttgtcccaggaattagaattgcca

SEQ ID NO: 1110207 - DNA, 25 bp, Homo sapien
gtataagttctctggagtagtcaca

SEQ ID NO: 1110208 - DNA, 25 bp, Homo sapien
ttagtatgcatttccactaaaagga

SEQ ID NO: 1110209 - DNA, 25 bp, Homo sapien
agtatgcatttccactaaaaggagg

SEQ ID NO: 1110210 - DNA, 25 bp, Homo sapien
tatgcatttccactaaaaggaggat

SEQ ID NO: 1110211 - DNA, 25 bp, Homo sapien
gcatttccactaaaaggaggatagc

SEQ ID NO: 1110212 - DNA, 25 bp, Homo sapien
ccatcgacgcaatgcctcttcaaac

SEQ ID NO: 1110213 - DNA, 25 bp, Homo sapien
catcgacgcaatgcctcttcaaaca

SEQ ID NO: 1110214 - DNA, 25 bp, Homo sapien
atggcatctcctgcacccagtttaa

SEQ ID NO: 1110215 - DNA, 25 bp, Homo sapien
cacccagtttaatggaaccacaggc

SEQ ID NO: 1110216 - DNA, 25 bp, Homo sapien
tattgcgaaaggtcagagcttgttc

SEQ ID NO: 1110217 - DNA, 25 bp, Homo sapien
tcttcagcctgtctattgcgaaagg

SEQ ID NO: 1110218 - DNA, 25 bp, Homo sapien
ggagagaaaaagtacacagaacaaa

SEQ ID NO: 1110219 - DNA, 25 bp, Homo sapien
aagtacacagaacaaattaaattct

SEQ ID NO: 1110220 - DNA, 25 bp, Homo sapien
gtgagtaatataaaaaaacaactga

SEQ ID NO: 1110221 - DNA, 25 bp, Homo sapien
taaaaggcaaagaaagtgagtaata

SEQ ID NO: 1110222 - DNA, 25 bp, Homo sapien
tgccccaagggtagcttcaaactcc

SEQ ID NO: 1110223 - DNA, 25 bp, Homo sapien
tcaaactcctcttggagacgatagg

SEQ ID NO: 1110224 - DNA, 25 bp, Homo sapien
tcagatgccccaagggtagcttcaa

SEQ ID NO: 1110225 - DNA, 25 bp, Homo sapien
gcagagcttcgagtttatggataaa

SEQ ID NO: 1110226 - DNA, 25 bp, Homo sapien
cagacacttatgcagatgattccaa

SEQ ID NO: 1110227 - DNA, 25 bp, Homo sapien
aagacagacacttatgcagatgatt

SEQ ID NO: 1110228 - DNA, 25 bp, Homo sapien
taagtaacctattattacataagac

SEQ ID NO: 1110229 - DNA, 25 bp, Homo sapien
acacttatgcagatgattccaagga

SEQ ID NO: 1110230 - DNA, 25 bp, Homo sapien
cagcttttcctatgctctgccagag

SEQ ID NO: 1110231 - DNA, 25 bp, Homo sapien
gccagagaatttgtgcagtcagtac

SEQ ID NO: 1110232 - DNA, 25 bp, Homo sapien
gattatgagccttacacatgggagg

SEQ ID NO: 1110233 - DNA, 25 bp, Homo sapien
gaggacaaggtctcagagcttcaac

SEQ ID NO: 1110234 - DNA, 25 bp, Homo sapien
ctagtagagattccaaagatgccac

SEQ ID NO: 1110235 - DNA, 25 bp, Homo sapien
cttccttagaccaatccaagtgggt

SEQ ID NO: 1110236 - DNA, 25 bp, Homo sapien
cactgtacacagatatcaacgatga

SEQ ID NO: 1110237 - DNA, 25 bp, Homo sapien
caaaaatctgactggatccaagcct

SEQ ID NO: 1110238 - DNA, 25 bp, Homo sapien
cgtggatgcgatgctcaaggtgtct

SEQ ID NO: 1110239 - DNA, 25 bp, Homo sapien
tgcggaagcaaaggaatccgtggat

SEQ ID NO: 1110240 - DNA, 25 bp, Homo sapien
caaaggaatccgtggatgcgatgct

SEQ ID NO: 1110241 - DNA, 25 bp, Homo sapien
gatgctcaaggtgtctcgcaggcca

SEQ ID NO: 1110242 - DNA, 25 bp, Homo sapien
tactgttggtgtagtttctggattg

SEQ ID NO: 1110243 - DNA, 25 bp, Homo sapien
tctactgaacgtggccctactgttg

SEQ ID NO: 1110244 - DNA, 25 bp, Homo sapien
ccctactgttggtgtagtttctgga

SEQ ID NO: 1110245 - DNA, 25 bp, Homo sapien
tcccatatctactgaacgtggccct

SEQ ID NO: 1110246 - DNA, 25 bp, Homo sapien
cctttttttcctgcatttcatcata

SEQ ID NO: 1110247 - DNA, 25 bp, Homo sapien
ttttttcctgcatttcatcataaat

SEQ ID NO: 1110248 - DNA, 25 bp, Homo sapien
ctttcagtctttccccaaaagcaat

SEQ ID NO: 1110249 - DNA, 25 bp, Homo sapien
agcaatttagtattgttttcctcct

SEQ ID NO: 1110250 - DNA, 25 bp, Homo sapien
tctcaactgcttttagcaagttgtg

SEQ ID NO: 1110251 - DNA, 25 bp, Homo sapien
cttttccatttctctttctctctgt

SEQ ID NO: 1110252 - DNA, 25 bp, Homo sapien
tttccatttctctttctctctgtat

SEQ ID NO: 1110253 - DNA, 25 bp, Homo sapien
ccatttctctttctctctgtatttc

SEQ ID NO: 1110254 - DNA, 25 bp, Homo sapien
tccatttctctttctctctgtattt

SEQ ID NO: 1110255 - DNA, 25 bp, Homo sapien
ctgcttgatttagtaagtgtctata

SEQ ID NO: 1110256 - DNA, 25 bp, Homo sapien
tagtaagtgtctataaaatccactg

SEQ ID NO: 1110257 - DNA, 25 bp, Homo sapien
atttagtaagtgtctataaaatcca

SEQ ID NO: 1110258 - DNA, 25 bp, Homo sapien
gcttgatttagtaagtgtctataaa

SEQ ID NO: 1110259 - DNA, 25 bp, Homo sapien
ttgaacttacttcatcagagtagcc

SEQ ID NO: 1110260 - DNA, 25 bp, Homo sapien
ttcatcagagtagccccttgatttc

SEQ ID NO: 1110261 - DNA, 25 bp, Homo sapien
gaacttacttcatcagagtagcccc

SEQ ID NO: 1110262 - DNA, 25 bp, Homo sapien
tacttcatcagagtagccccttgat

SEQ ID NO: 1110263 - DNA, 25 bp, Homo sapien
tgatgattcagaattagagggtttc

SEQ ID NO: 1110264 - DNA, 25 bp, Homo sapien
gatgattcagaattagagggtttct

SEQ ID NO: 1110265 - DNA, 25 bp, Homo sapien
cagtgatgattcagaattagagggt

SEQ ID NO: 1110266 - DNA, 25 bp, Homo sapien
gtgatgattcagaattagagggttt

SEQ ID NO: 1110267 - DNA, 25 bp, Homo sapien
ttgcaaacttgctcactgcctcagg

SEQ ID NO: 1110268 - DNA, 25 bp, Homo sapien
gctcactgcctcaggtggtctctct

SEQ ID NO: 1110269 - DNA, 25 bp, Homo sapien
tcactgcctcaggtggtctctcttg

SEQ ID NO: 1110270 - DNA, 25 bp, Homo sapien
aacttgctcactgcctcaggtggtc

SEQ ID NO: 1110271 - DNA, 25 bp, Homo sapien
tcttgtttgtcaatatagctctttg

SEQ ID NO: 1110272 - DNA, 25 bp, Homo sapien
aagaaacttccaaatgcttgtcctg

SEQ ID NO: 1110273 - DNA, 25 bp, Homo sapien
aacttccaaatgcttgtcctgccat

SEQ ID NO: 1110274 - DNA, 25 bp, Homo sapien
ttggtcagggtggaagaaacttcca

SEQ ID NO: 1110275 - DNA, 25 bp, Homo sapien
gaaacttccaaatgcttgtcctgcc

SEQ ID NO: 1110276 - DNA, 25 bp, Homo sapien
agcaacagctattactgttgcttgc

SEQ ID NO: 1110277 - DNA, 25 bp, Homo sapien
gcaacagctattactgttgcttgca

SEQ ID NO: 1110278 - DNA, 25 bp, Homo sapien
gcatggcttcctcgtaaaatgggca

SEQ ID NO: 1110279 - DNA, 25 bp, Homo sapien
aaatgggcagtgacaaagggactcc

SEQ ID NO: 1110280 - DNA, 25 bp, Homo sapien
ggctgtaggtatgccgtacttctct

SEQ ID NO: 1110281 - DNA, 25 bp, Homo sapien
gactccaggctgtaggtatgccgta

SEQ ID NO: 1110282 - DNA, 25 bp, Homo sapien
taagtaccacacaaacaccttaata

SEQ ID NO: 1110283 - DNA, 25 bp, Homo sapien
taataaacaggggagacaattgtta

SEQ ID NO: 1110284 - DNA, 25 bp, Homo sapien
aaacatgttttttcaatactgacag

SEQ ID NO: 1110285 - DNA, 25 bp, Homo sapien
ttggattcaaacaaggcttaacctc

SEQ ID NO: 1110286 - DNA, 25 bp, Homo sapien
tctcctaggcactccaacatttcag

SEQ ID NO: 1110287 - DNA, 25 bp, Homo sapien
ctgtctcctaggcactccaacattt

SEQ ID NO: 1110288 - DNA, 25 bp, Homo sapien
ctgaaaagcctgtcgaatacagtga

SEQ ID NO: 1110289 - DNA, 25 bp, Homo sapien
cgaatacagtgaagtttggcaagaa

SEQ ID NO: 1110290 - DNA, 25 bp, Homo sapien
gacctataatgaatgtgaatggaca

SEQ ID NO: 1110291 - DNA, 25 bp, Homo sapien
ctgttttgacaaagtgtcgtgggcc

SEQ ID NO: 1110292 - DNA, 25 bp, Homo sapien
tagggataatcaagagcacagagct

SEQ ID NO: 1110293 - DNA, 25 bp, Homo sapien
catgtggtgctatttcaacaggcag

SEQ ID NO: 1110294 - DNA, 25 bp, Homo sapien
gataaaattttccttccgctctcag

SEQ ID NO: 1110295 - DNA, 25 bp, Homo sapien
ggaatatcctgttagctgattctga

SEQ ID NO: 1110296 - DNA, 25 bp, Homo sapien
tccgctctcagcgaggaatatcctg

SEQ ID NO: 1110297 - DNA, 25 bp, Homo sapien
atatcctgttagctgattctgaaag

SEQ ID NO: 1110298 - DNA, 25 bp, Homo sapien
tgcagaagccaagataaagaatgtc

SEQ ID NO: 1110299 - DNA, 25 bp, Homo sapien
tccagatttctgagacctacgctat

SEQ ID NO: 1110300 - DNA, 25 bp, Homo sapien
gactttatacatagttcaacccgag

SEQ ID NO: 1110301 - DNA, 25 bp, Homo sapien
cagtgatggttatagcagcagatct

SEQ ID NO: 1110302 - DNA, 25 bp, Homo sapien
tagcagcaagttccatttcagtact

SEQ ID NO: 1110303 - DNA, 25 bp, Homo sapien
tcagtactaccccagtgatcggtct

SEQ ID NO: 1110304 - DNA, 25 bp, Homo sapien
gttccatttcagtactaccccagtg

SEQ ID NO: 1110305 - DNA, 25 bp, Homo sapien
taccccagtgatcggtctgctctaa

SEQ ID NO: 1110306 - DNA, 25 bp, Homo sapien
tgtgtatacagccaattccccagcc

SEQ ID NO: 1110307 - DNA, 25 bp, Homo sapien
ccaaagctgtccttgcatgggccac

SEQ ID NO: 1110308 - DNA, 25 bp, Homo sapien
gagtgtggtttatgacttcgtcaga

SEQ ID NO: 1110309 - DNA, 25 bp, Homo sapien
tactgccccaacgtacaaggagtgt

SEQ ID NO: 1110310 - DNA, 25 bp, Homo sapien
tatctatatattttttgagccagag

SEQ ID NO: 1110311 - DNA, 25 bp, Homo sapien
tatatctatatattttttgagccag

SEQ ID NO: 1110312 - DNA, 25 bp, Homo sapien
catgccggaccgatatctatatcta

SEQ ID NO: 1110313 - DNA, 25 bp, Homo sapien
gcgcgatcttgactctctgccacct

SEQ ID NO: 1110314 - DNA, 25 bp, Homo sapien
cctcacgatctgcccgtctcagcct

SEQ ID NO: 1110315 - DNA, 25 bp, Homo sapien
gtgctgggatttcattccttttgtg

SEQ ID NO: 1110316 - DNA, 25 bp, Homo sapien
tgtgtgtgtgtgacggagtctcgct

SEQ ID NO: 1110317 - DNA, 25 bp, Homo sapien
ctgccacccaggctgggattacagg

SEQ ID NO: 1110318 - DNA, 25 bp, Homo sapien
taaagactactgatgtagcccagag

SEQ ID NO: 1110319 - DNA, 25 bp, Homo sapien
aattagacgcctagagtatagtggg

SEQ ID NO: 1110320 - DNA, 25 bp, Homo sapien
ccaattatgaactgtgtgaagcaca

SEQ ID NO: 1110321 - DNA, 25 bp, Homo sapien
tgagcagggaatcgggaaatataaa

SEQ ID NO: 1110322 - DNA, 25 bp, Homo sapien
ctttatggttttataacagcagggg

SEQ ID NO: 1110323 - DNA, 25 bp, Homo sapien
ggctttatggttttataacagcagg

SEQ ID NO: 1110324 - DNA, 25 bp, Homo sapien
gctttatggttttataacagcaggg

SEQ ID NO: 1110325 - DNA, 25 bp, Homo sapien
gggctttatggttttataacagcag

SEQ ID NO: 1110326 - DNA, 25 bp, Homo sapien
atttactacattctgtatggatgtg

SEQ ID NO: 1110327 - DNA, 25 bp, Homo sapien
gtttagccatcgattatttactaca

SEQ ID NO: 1110328 - DNA, 25 bp, Homo sapien
tgtgggtgggttttccaaatcttca

SEQ ID NO: 1110329 - DNA, 25 bp, Homo sapien
caaaggagtccattaatataaaatc

SEQ ID NO: 1110330 - DNA, 25 bp, Homo sapien
ttaatcaaacttaaaaggctgagaa

SEQ ID NO: 1110331 - DNA, 25 bp, Homo sapien
tttaatcaaacttaaaaggctgaga

SEQ ID NO: 1110332 - DNA, 25 bp, Homo sapien
tttctgtttcagcaccgaccaacaa

SEQ ID NO: 1110333 - DNA, 25 bp, Homo sapien
tcttttctgtttcagcaccgaccaa

SEQ ID NO: 1110334 - DNA, 25 bp, Homo sapien
ttttctgtttcagcaccgaccaaca

SEQ ID NO: 1110335 - DNA, 25 bp, Homo sapien
tgtcttttctgtttcagcaccgacc

SEQ ID NO: 1110336 - DNA, 25 bp, Homo sapien
taacaaaggaattcaggacataacg

SEQ ID NO: 1110337 - DNA, 25 bp, Homo sapien
gctgccaattcccaccggagaagtg

SEQ ID NO: 1110338 - DNA, 25 bp, Homo sapien
ttcccaccggagaagtgactcagaa

SEQ ID NO: 1110339 - DNA, 25 bp, Homo sapien
gaattcaggacataacgaattttac

SEQ ID NO: 1110340 - DNA, 25 bp, Homo sapien
aaaagccccaggctaggacaggact

SEQ ID NO: 1110341 - DNA, 25 bp, Homo sapien
taggctccctcgttttatagataaa

SEQ ID NO: 1110342 - DNA, 25 bp, Homo sapien
tgaaactcactgtaagcaaactgta

SEQ ID NO: 1110343 - DNA, 25 bp, Homo sapien
tctgaaagggtcattagcgatcaac

SEQ ID NO: 1110344 - DNA, 25 bp, Homo sapien
tcaaagaatgatttgccccaagtca

SEQ ID NO: 1110345 - DNA, 25 bp, Homo sapien
tcagtgcggcgaatgagtaactgca

SEQ ID NO: 1110346 - DNA, 25 bp, Homo sapien
taggccattaaaagctcagtgcggc

SEQ ID NO: 1110347 - DNA, 25 bp, Homo sapien
agtctctgtacttgaatagcgcacc

SEQ ID NO: 1110348 - DNA, 25 bp, Homo sapien
tatgcctcagggcatctgcttcaag

SEQ ID NO: 1110349 - DNA, 25 bp, Homo sapien
taacatgaccatgactgcttagaca

SEQ ID NO: 1110350 - DNA, 25 bp, Homo sapien
gtagcccagtggacataacatgacc

SEQ ID NO: 1110351 - DNA, 25 bp, Homo sapien
tggacataacatgaccatgactgct

SEQ ID NO: 1110352 - DNA, 25 bp, Homo sapien
catgaccatgactgcttagacaact

SEQ ID NO: 1110353 - DNA, 25 bp, Homo sapien
tatattcttgcatgtgtgggccaca

SEQ ID NO: 1110354 - DNA, 25 bp, Homo sapien
cagagttatctcatgtagtagcagc

SEQ ID NO: 1110355 - DNA, 25 bp, Homo sapien
tgtgtgaaggccaaagataccgcaa

SEQ ID NO: 1110356 - DNA, 25 bp, Homo sapien
taatatgacaaattcccactgggct

SEQ ID NO: 1110357 - DNA, 25 bp, Homo sapien
ggccacatcttgctaaagtagcagc

SEQ ID NO: 1110358 - DNA, 25 bp, Homo sapien
tgaatttgacaaaccaacctgctga

SEQ ID NO: 1110359 - DNA, 25 bp, Homo sapien
ccaacctgctgaatataagcaactt

SEQ ID NO: 1110360 - DNA, 25 bp, Homo sapien
gtagcagctactgaactgaccagaa

SEQ ID NO: 1110361 - DNA, 25 bp, Homo sapien
gagatatttcctatacttattgtcc

SEQ ID NO: 1110362 - DNA, 25 bp, Homo sapien
tatatgtcttaagtacccttctgca

SEQ ID NO: 1110363 - DNA, 25 bp, Homo sapien
aagttcaagtttcttatcttacgat

SEQ ID NO: 1110364 - DNA, 25 bp, Homo sapien
tattgtcctaaaattctatttggtc

SEQ ID NO: 1110365 - DNA, 25 bp, Homo sapien
tcaggagtgacttaattgaagtccc

SEQ ID NO: 1110366 - DNA, 25 bp, Homo sapien
atatggaagtggatggtagagctca

SEQ ID NO: 1110367 - DNA, 25 bp, Homo sapien
ggcaagggcaattccatgattaagt

SEQ ID NO: 1110368 - DNA, 25 bp, Homo sapien
aagttctttggagcttactgtgaca

SEQ ID NO: 1110369 - DNA, 25 bp, Homo sapien
acttacaggctcaaacaaacattcc

SEQ ID NO: 1110370 - DNA, 25 bp, Homo sapien
ccttaaaagacatgctggccagctg

SEQ ID NO: 1110371 - DNA, 25 bp, Homo sapien
aagtgagtcttccagccccaatcag

SEQ ID NO: 1110372 - DNA, 25 bp, Homo sapien
aactaaggtctcttgccaatggcaa

SEQ ID NO: 1110373 - DNA, 25 bp, Homo sapien
ttacttgtatacttatcacgagtga

SEQ ID NO: 1110374 - DNA, 25 bp, Homo sapien
aagcattacttgtatacttatcacg

SEQ ID NO: 1110375 - DNA, 25 bp, Homo sapien
tttactcagatagggaaggttgtgg

SEQ ID NO: 1110376 - DNA, 25 bp, Homo sapien
gatctgcccatttgtataagcatta

SEQ ID NO: 1110377 - DNA, 25 bp, Homo sapien
cagcaagtttccataaaagtcctgg

SEQ ID NO: 1110378 - DNA, 25 bp, Homo sapien
gagctctggccgctaacacttctgc

SEQ ID NO: 1110379 - DNA, 25 bp, Homo sapien
cgaaggtacttctttccgcgtggag

SEQ ID NO: 1110380 - DNA, 25 bp, Homo sapien
tggtgtgcagcctgttcccgcattc

SEQ ID NO: 1110381 - DNA, 25 bp, Homo sapien
gccaatgggccgctgctacatgaat

SEQ ID NO: 1110382 - DNA, 25 bp, Homo sapien
gagcatctctaagtcactgcagtaa

SEQ ID NO: 1110383 - DNA, 25 bp, Homo sapien
tgttgtgactcgaaggccaatgggc

SEQ ID NO: 1110384 - DNA, 25 bp, Homo sapien
tatgtggtccactcaataacgtgtg

SEQ ID NO: 1110385 - DNA, 25 bp, Homo sapien
gtcttgggctgattatgaagctctg

SEQ ID NO: 1110386 - DNA, 25 bp, Homo sapien
tggtcttgggctgattatgaagctc

SEQ ID NO: 1110387 - DNA, 25 bp, Homo sapien
ggctgattatgaagctctgtatata

SEQ ID NO: 1110388 - DNA, 25 bp, Homo sapien
cttgggctgattatgaagctctgta

SEQ ID NO: 1110389 - DNA, 25 bp, Homo sapien
cagccttttgggaaatatcattcat

SEQ ID NO: 1110390 - DNA, 25 bp, Homo sapien
ctcagccttttgggaaatatcattc

SEQ ID NO: 1110391 - DNA, 25 bp, Homo sapien
tcagccttttgggaaatatcattca

SEQ ID NO: 1110392 - DNA, 25 bp, Homo sapien
tttttgggacaggtttagatgaaga

SEQ ID NO: 1110393 - DNA, 25 bp, Homo sapien
cccttgccaagttttggtacatagg

SEQ ID NO: 1110394 - DNA, 25 bp, Homo sapien
aaacttatcctttacatcacccttg

SEQ ID NO: 1110395 - DNA, 25 bp, Homo sapien
gtttttcgtctctagatctcctttg

SEQ ID NO: 1110396 - DNA, 25 bp, Homo sapien
tatgcagagtttaaattaggttaca

SEQ ID NO: 1110397 - DNA, 25 bp, Homo sapien
tcacattatatgcagagtttaaatt

SEQ ID NO: 1110398 - DNA, 25 bp, Homo sapien
tgtccaaaaattagactaaatcaca

SEQ ID NO: 1110399 - DNA, 25 bp, Homo sapien
aaattaatgtgagcacatgtccaaa

SEQ ID NO: 1110400 - DNA, 25 bp, Homo sapien
ccttttctactttagaagatacatc

SEQ ID NO: 1110401 - DNA, 25 bp, Homo sapien
gccttttctactttagaagatacat

SEQ ID NO: 1110402 - DNA, 25 bp, Homo sapien
tactttagaagatacatcttcctca

SEQ ID NO: 1110403 - DNA, 25 bp, Homo sapien
tttctactttagaagatacatcttc

SEQ ID NO: 1110404 - DNA, 25 bp, Homo sapien
tcagcaaatctacccttcacagttc

SEQ ID NO: 1110405 - DNA, 25 bp, Homo sapien
tcttttctaacatatcctgctcaat

SEQ ID NO: 1110406 - DNA, 25 bp, Homo sapien
ctgctcaattctgcgttttcgttcc

SEQ ID NO: 1110407 - DNA, 25 bp, Homo sapien
attctgcgttttcgttcctcctccg

SEQ ID NO: 1110408 - DNA, 25 bp, Homo sapien
ccctttttgctaattcacgctgtat

SEQ ID NO: 1110409 - DNA, 25 bp, Homo sapien
tgctgattcagttcccgtattgttt

SEQ ID NO: 1110410 - DNA, 25 bp, Homo sapien
ctgattcagttcccgtattgtttat

SEQ ID NO: 1110411 - DNA, 25 bp, Homo sapien
tgattcagttcccgtattgtttatg

SEQ ID NO: 1110412 - DNA, 25 bp, Homo sapien
gctgattcagttcccgtattgttta

SEQ ID NO: 1110413 - DNA, 25 bp, Homo sapien
cttaatcaaaattgggtttcatggg

SEQ ID NO: 1110414 - DNA, 25 bp, Homo sapien
tttacctccatcataggtgaatttc

SEQ ID NO: 1110415 - DNA, 25 bp, Homo sapien
ctccatcataggtgaatttcattac

SEQ ID NO: 1110416 - DNA, 25 bp, Homo sapien
aaatagataattagcctatttcttc

SEQ ID NO: 1110417 - DNA, 25 bp, Homo sapien
gacactttgcttccttgagagatgg

SEQ ID NO: 1110418 - DNA, 25 bp, Homo sapien
tatcttcctcgtacttgatcctttc

SEQ ID NO: 1110419 - DNA, 25 bp, Homo sapien
tatatgatttgacaggtaccacagt

SEQ ID NO: 1110420 - DNA, 25 bp, Homo sapien
gagagatggtcgttgttcttcatat

SEQ ID NO: 1110421 - DNA, 25 bp, Homo sapien
ataaaggaaaatgctgctaacttaa

SEQ ID NO: 1110422 - DNA, 25 bp, Homo sapien
cataaaggaaaatgctgctaactta

SEQ ID NO: 1110423 - DNA, 25 bp, Homo sapien
tatgaaaacccaccttttagtcata

SEQ ID NO: 1110424 - DNA, 25 bp, Homo sapien
tcaattttccgggagaaagtgattc

SEQ ID NO: 1110425 - DNA, 25 bp, Homo sapien
ttcagcttgcttctttcggttttct

SEQ ID NO: 1110426 - DNA, 25 bp, Homo sapien
ctcttcagcttgcttctttcggttt

SEQ ID NO: 1110427 - DNA, 25 bp, Homo sapien
caattttccgggagaaagtgattct

SEQ ID NO: 1110428 - DNA, 25 bp, Homo sapien
catttgccgccttgcttcttcaaaa

SEQ ID NO: 1110429 - DNA, 25 bp, Homo sapien
atttgccgccttgcttcttcaaaag

SEQ ID NO: 1110430 - DNA, 25 bp, Homo sapien
tttgccgccttgcttcttcaaaagc

SEQ ID NO: 1110431 - DNA, 25 bp, Homo sapien
tgccgccttgcttcttcaaaagcac

SEQ ID NO: 1110432 - DNA, 25 bp, Homo sapien
ctgtgtcttggttttcctcatcttc

SEQ ID NO: 1110433 - DNA, 25 bp, Homo sapien
cttggttttcctcatcttcatttac

SEQ ID NO: 1110434 - DNA, 25 bp, Homo sapien
tgtcttggttttcctcatcttcatt

SEQ ID NO: 1110435 - DNA, 25 bp, Homo sapien
tgtgtcttggttttcctcatcttca

SEQ ID NO: 1110436 - DNA, 25 bp, Homo sapien
tctccttgcttcagcaaacgccttc

SEQ ID NO: 1110437 - DNA, 25 bp, Homo sapien
ctccttgcttcagcaaacgccttct

SEQ ID NO: 1110438 - DNA, 25 bp, Homo sapien
tcttcaaaactgagtttgagtttac

SEQ ID NO: 1110439 - DNA, 25 bp, Homo sapien
gcgctatgatagaagagtactaaat

SEQ ID NO: 1110440 - DNA, 25 bp, Homo sapien
ggaaaagacagccataagtggtaac

SEQ ID NO: 1110441 - DNA, 25 bp, Homo sapien
tcatggagtggaaaagacagccata

SEQ ID NO: 1110442 - DNA, 25 bp, Homo sapien
caatacaggattagcgctatgatag

SEQ ID NO: 1110443 - DNA, 25 bp, Homo sapien
caagttttatcaaggtaatccaggc

SEQ ID NO: 1110444 - DNA, 25 bp, Homo sapien
ggcgcggtataacataaccctctgg

SEQ ID NO: 1110445 - DNA, 25 bp, Homo sapien
tctggcctgaactgtgactctgtgg

SEQ ID NO: 1110446 - DNA, 25 bp, Homo sapien
ccaggctttaccacagaactatttc

SEQ ID NO: 1110447 - DNA, 25 bp, Homo sapien
aattggattgaaacgactccccagg

SEQ ID NO: 1110448 - DNA, 25 bp, Homo sapien
cagtaaacaaggaagtctcaacaca

SEQ ID NO: 1110449 - DNA, 25 bp, Homo sapien
tctattctccattacagtgaagaca

SEQ ID NO: 1110450 - DNA, 25 bp, Homo sapien
taccatgagtactttaaattagaca

SEQ ID NO: 1110451 - DNA, 25 bp, Homo sapien
ctctggccagaattacacatactaa

SEQ ID NO: 1110452 - DNA, 25 bp, Homo sapien
cacatactaaaaagggactatttct

SEQ ID NO: 1110453 - DNA, 25 bp, Homo sapien
ataattattttatcactctggccag

SEQ ID NO: 1110454 - DNA, 25 bp, Homo sapien
tcactctggccagaattacacatac

SEQ ID NO: 1110455 - DNA, 25 bp, Homo sapien
tagcttatgcttccgttcctcctct

SEQ ID NO: 1110456 - DNA, 25 bp, Homo sapien
tctccatttctagcttatgcttccg

SEQ ID NO: 1110457 - DNA, 25 bp, Homo sapien
tatgcttccgttcctcctctgttcg

SEQ ID NO: 1110458 - DNA, 25 bp, Homo sapien
ttcctgtctcagttgttcaaattct

SEQ ID NO: 1110459 - DNA, 25 bp, Homo sapien
taatttcaaggtcaattgctctcct

SEQ ID NO: 1110460 - DNA, 25 bp, Homo sapien
cagacaactgtccaattttttcaaa

SEQ ID NO: 1110461 - DNA, 25 bp, Homo sapien
tctgctcaatccaaaggtttcattt

SEQ ID NO: 1110462 - DNA, 25 bp, Homo sapien
tagcttgaatagagccactcctttt

SEQ ID NO: 1110463 - DNA, 25 bp, Homo sapien
ccgcacccggctgtagactaaactt

SEQ ID NO: 1110464 - DNA, 25 bp, Homo sapien
tatctacaactaacccaggccttag

SEQ ID NO: 1110465 - DNA, 25 bp, Homo sapien
tatccacatatatatccccaaaaca

SEQ ID NO: 1110466 - DNA, 25 bp, Homo sapien
ggccttaggcttgtatgtcacacaa

SEQ ID NO: 1110467 - DNA, 25 bp, Homo sapien
aagttcagccatgtcctaataccac

SEQ ID NO: 1110468 - DNA, 25 bp, Homo sapien
catccatgtatactagagagccagt

SEQ ID NO: 1110469 - DNA, 25 bp, Homo sapien
gcgctcagccgctaacaagttttta

SEQ ID NO: 1110470 - DNA, 25 bp, Homo sapien
ccagaaagatatgataggagggact

SEQ ID NO: 1110471 - DNA, 25 bp, Homo sapien
tgtggatctagttggaaatctcacc

SEQ ID NO: 1110472 - DNA, 25 bp, Homo sapien
catagtactatgaggaaattgctcc

SEQ ID NO: 1110473 - DNA, 25 bp, Homo sapien
cacttcagtttgaggtgttgcacct

SEQ ID NO: 1110474 - DNA, 25 bp, Homo sapien
cagattgccacatccaactaaaggg

SEQ ID NO: 1110475 - DNA, 25 bp, Homo sapien
tgtaaagatcacaatatcactggga

SEQ ID NO: 1110476 - DNA, 25 bp, Homo sapien
ccagttcaggaaaagtgatagatac

SEQ ID NO: 1110477 - DNA, 25 bp, Homo sapien
tgtttgtcctaccaactctgcttgg

SEQ ID NO: 1110478 - DNA, 25 bp, Homo sapien
tcactgggatcctagcctgtttgtc

SEQ ID NO: 1110479 - DNA, 25 bp, Homo sapien
ttgcaggcctaacatcaacatcatc

SEQ ID NO: 1110480 - DNA, 25 bp, Homo sapien
catgcgtagtaacttttgttcttca

SEQ ID NO: 1110481 - DNA, 25 bp, Homo sapien
cctttgttcaaactgcatgcgtagt

SEQ ID NO: 1110482 - DNA, 25 bp, Homo sapien
taaatggagcctcgctttttcttgc

SEQ ID NO: 1110483 - DNA, 25 bp, Homo sapien
tatattgatagtcttctccatcctg

SEQ ID NO: 1110484 - DNA, 25 bp, Homo sapien
cttcttgaaccatggagctcctgat

SEQ ID NO: 1110485 - DNA, 25 bp, Homo sapien
cttcaaaccaccatgtaatttctgg

SEQ ID NO: 1110486 - DNA, 25 bp, Homo sapien
cgtaaatctgactggctcactgtct

SEQ ID NO: 1110487 - DNA, 25 bp, Homo sapien
agagaagaagaaaagtgattttaag

SEQ ID NO: 1110488 - DNA, 25 bp, Homo sapien
aatagaataaaagataaaaagagtg

SEQ ID NO: 1110489 - DNA, 25 bp, Homo sapien
atagaataaaagataaaaagagtga

SEQ ID NO: 1110490 - DNA, 25 bp, Homo sapien
gccccgccacagaaaagatggatgt

SEQ ID NO: 1110491 - DNA, 25 bp, Homo sapien
taagaagtcagcatagtggcactcc

SEQ ID NO: 1110492 - DNA, 25 bp, Homo sapien
agttggagtgaaagagaaagttcca

SEQ ID NO: 1110493 - DNA, 25 bp, Homo sapien
agatggatgtagtaagaaagttgga

SEQ ID NO: 1110494 - DNA, 25 bp, Homo sapien
tgctgtaaacgtctatgggaaatac

SEQ ID NO: 1110495 - DNA, 25 bp, Homo sapien
tctgaaaggagtgacagttttcccc

SEQ ID NO: 1110496 - DNA, 25 bp, Homo sapien
gaattttaaatcgaaggttgtgcca

SEQ ID NO: 1110497 - DNA, 25 bp, Homo sapien
gaagccttcgactatgttgaaagtg

SEQ ID NO: 1110498 - DNA, 25 bp, Homo sapien
atgtttactgtgagaaaaaatgatt

SEQ ID NO: 1110499 - DNA, 25 bp, Homo sapien
tttaatgataaaagggtaacatctg

SEQ ID NO: 1110500 - DNA, 25 bp, Homo sapien
ggttgcacaagtcttaaaatacaga

SEQ ID NO: 1110501 - DNA, 25 bp, Homo sapien
ataaaagggtaacatctggttgcac

SEQ ID NO: 1110502 - DNA, 25 bp, Homo sapien
cccgtgtgtaaaaagaagattggct

SEQ ID NO: 1110503 - DNA, 25 bp, Homo sapien
tcagtgatacccctatagaaactct

SEQ ID NO: 1110504 - DNA, 25 bp, Homo sapien
gaacagtgtcttagggagatgcagc

SEQ ID NO: 1110505 - DNA, 25 bp, Homo sapien
catgctcgatgcattttcgtcctga

SEQ ID NO: 1110506 - DNA, 25 bp, Homo sapien
tcatagctcataaaatcaggtcctg

SEQ ID NO: 1110507 - DNA, 25 bp, Homo sapien
gaatcctttgagtgtatgccattgg

SEQ ID NO: 1110508 - DNA, 25 bp, Homo sapien
cattggtgagccgatgagcatggac

SEQ ID NO: 1110509 - DNA, 25 bp, Homo sapien
catggaccatagaagggctcaatgt

SEQ ID NO: 1110510 - DNA, 25 bp, Homo sapien
taagagtagggtattgacgtgaaca

SEQ ID NO: 1110511 - DNA, 25 bp, Homo sapien
aatgttgagattacctacaggatgg

SEQ ID NO: 1110512 - DNA, 25 bp, Homo sapien
gacgtgaacaattgcagtattttgc

SEQ ID NO: 1110513 - DNA, 25 bp, Homo sapien
ttatataacctagagtgacttccct

SEQ ID NO: 1110514 - DNA, 25 bp, Homo sapien
gactgtgctgtgtatcatccttgat

SEQ ID NO: 1110515 - DNA, 25 bp, Homo sapien
tgcaggtttgatccagccagtatag

SEQ ID NO: 1110516 - DNA, 25 bp, Homo sapien
gcaaatgccatacgttgtgtgaata

SEQ ID NO: 1110517 - DNA, 25 bp, Homo sapien
ccagtatagaactagctctgtaggg

SEQ ID NO: 1110518 - DNA, 25 bp, Homo sapien
ccattgcattaacagtgaaatttcc

SEQ ID NO: 1110519 - DNA, 25 bp, Homo sapien
catgtgtgtacaatgatcttttggc

SEQ ID NO: 1110520 - DNA, 25 bp, Homo sapien
aatgatatgaaacctcctgtgtcgg

SEQ ID NO: 1110521 - DNA, 25 bp, Homo sapien
ccccttgcagtatagtggtagattg

SEQ ID NO: 1110522 - DNA, 25 bp, Homo sapien
gagtattatagacaacaagcagcct

SEQ ID NO: 1110523 - DNA, 25 bp, Homo sapien
ttatgcccagacaagtccccaggga

SEQ ID NO: 1110524 - DNA, 25 bp, Homo sapien
tttctactccagtctgttttctgca

SEQ ID NO: 1110525 - DNA, 25 bp, Homo sapien
tccagcacctcaggtataatgtaat

SEQ ID NO: 1110526 - DNA, 25 bp, Homo sapien
gatgtggtagactctgaaccctgaa

SEQ ID NO: 1110527 - DNA, 25 bp, Homo sapien
gaaaatctattcatgcaaggctggc

SEQ ID NO: 1110528 - DNA, 25 bp, Homo sapien
gaatcttgcaagctaactctagagc

SEQ ID NO: 1110529 - DNA, 25 bp, Homo sapien
gaagaatctggtaccttaagcctaa

SEQ ID NO: 1110530 - DNA, 25 bp, Homo sapien
aaagaaattctgttctcgcgaagtc

SEQ ID NO: 1110531 - DNA, 25 bp, Homo sapien
cttaaacttaatcctcgcgacgtct

SEQ ID NO: 1110532 - DNA, 25 bp, Homo sapien
aacgcgcggagaggaggtgccaaaa

SEQ ID NO: 1110533 - DNA, 25 bp, Homo sapien
tctctgttcctgtcgttctttctca

SEQ ID NO: 1110534 - DNA, 25 bp, Homo sapien
tacgccgggcagacgttttcaggag

SEQ ID NO: 1110535 - DNA, 25 bp, Homo sapien
tgacccatagcggaaaattctaccg

SEQ ID NO: 1110536 - DNA, 25 bp, Homo sapien
gagacactgttgcttcgccgtcacg

SEQ ID NO: 1110537 - DNA, 25 bp, Homo sapien
ctgaggcagcgaccggtaagaaaca

SEQ ID NO: 1110538 - DNA, 25 bp, Homo sapien
aaagggcagtcatacttttagagcc

SEQ ID NO: 1110539 - DNA, 25 bp, Homo sapien
gaattcaacacccaccctcgtgata

SEQ ID NO: 1110540 - DNA, 25 bp, Homo sapien
tatggtcgagaactaacaggcttcc

SEQ ID NO: 1110541 - DNA, 25 bp, Homo sapien
ctaaaaaatcggacagtctgtaagt

SEQ ID NO: 1110542 - DNA, 25 bp, Homo sapien
ctagtcctgtgatgacaattcagaa

SEQ ID NO: 1110543 - DNA, 25 bp, Homo sapien
cttacatttgagtacccacaggatg

SEQ ID NO: 1110544 - DNA, 25 bp, Homo sapien
gtgggagaaactacgcctaagaagc

SEQ ID NO: 1110545 - DNA, 25 bp, Homo sapien
gaaactacgcctaagaagctacaaa

SEQ ID NO: 1110546 - DNA, 25 bp, Homo sapien
cattccagcctgggcaacagagact

SEQ ID NO: 1110547 - DNA, 25 bp, Homo sapien
tgcattccagcctgggcaacagaga

SEQ ID NO: 1110548 - DNA, 25 bp, Homo sapien
attgcattccagcctgggcaacaga

SEQ ID NO: 1110549 - DNA, 25 bp, Homo sapien
ggttgtagtgactgagatcgcacca

SEQ ID NO: 1110550 - DNA, 25 bp, Homo sapien
catgctcagttgacatacactttca

SEQ ID NO: 1110551 - DNA, 25 bp, Homo sapien
catacctctcacatgcacatttagg

SEQ ID NO: 1110552 - DNA, 25 bp, Homo sapien
cttggaaatgaggaatctacgtgat

SEQ ID NO: 1110553 - DNA, 25 bp, Homo sapien
gcctgtgaatctcagcccaagtata

SEQ ID NO: 1110554 - DNA, 25 bp, Homo sapien
tgtatggcgagctaatatacttttc

SEQ ID NO: 1110555 - DNA, 25 bp, Homo sapien
caagcaacaactagcccttctttgt

SEQ ID NO: 1110556 - DNA, 25 bp, Homo sapien
tgaaagcttgctaatgactagtgaa

SEQ ID NO: 1110557 - DNA, 25 bp, Homo sapien
ttctaactgggatgaataaaatatt

SEQ ID NO: 1110558 - DNA, 25 bp, Homo sapien
cacccaggggatcagacatatttta

SEQ ID NO: 1110559 - DNA, 25 bp, Homo sapien
gcactttagaagcacgaggtgagag

SEQ ID NO: 1110560 - DNA, 25 bp, Homo sapien
ttactagatttggagacacccaggg

SEQ ID NO: 1110561 - DNA, 25 bp, Homo sapien
acaaagtgagaattccatccctaca

SEQ ID NO: 1110562 - DNA, 25 bp, Homo sapien
tgctcttcaaaaagcactaattcaa

SEQ ID NO: 1110563 - DNA, 25 bp, Homo sapien
cgcctgtggttctggctactctaga

SEQ ID NO: 1110564 - DNA, 25 bp, Homo sapien
acttgatgactgctcttttatgctc

SEQ ID NO: 1110565 - DNA, 25 bp, Homo sapien
tcattaataatctgtaagcttcctg

SEQ ID NO: 1110566 - DNA, 25 bp, Homo sapien
taaaacttcccataggtagcattca

SEQ ID NO: 1110567 - DNA, 25 bp, Homo sapien
gattggcacgtagtgaggaatacca

SEQ ID NO: 1110568 - DNA, 25 bp, Homo sapien
tcagttctcccacttaacaggtgag

SEQ ID NO: 1110569 - DNA, 25 bp, Homo sapien
aaagtgctggctactcttatcatga

SEQ ID NO: 1110570 - DNA, 25 bp, Homo sapien
taaaactgaatgaggtccctgccac

SEQ ID NO: 1110571 - DNA, 25 bp, Homo sapien
cagcgtccccagtcttagcaacaga

SEQ ID NO: 1110572 - DNA, 25 bp, Homo sapien
tatacactacacaggagacagcctc

SEQ ID NO: 1110573 - DNA, 25 bp, Homo sapien
cagcaaatgctacaggacgtcactt

SEQ ID NO: 1110574 - DNA, 25 bp, Homo sapien
tgccttgaaattaacttagatttcc

SEQ ID NO: 1110575 - DNA, 25 bp, Homo sapien
ttcgaatgccttgaaattaacttag

SEQ ID NO: 1110576 - DNA, 25 bp, Homo sapien
aatgccttgaaattaacttagattt

SEQ ID NO: 1110577 - DNA, 25 bp, Homo sapien
cgaatgccttgaaattaacttagat

SEQ ID NO: 1110578 - DNA, 25 bp, Homo sapien
tgttcttgtccggatgaaatttgag

SEQ ID NO: 1110579 - DNA, 25 bp, Homo sapien
ctgcctgaggagatttgttcttgtc

SEQ ID NO: 1110580 - DNA, 25 bp, Homo sapien
ccaaaatgcaataatagtctttccc

SEQ ID NO: 1110581 - DNA, 25 bp, Homo sapien
taggatcactcaatacttcataagc

SEQ ID NO: 1110582 - DNA, 25 bp, Homo sapien
aaggataaccttaacaagctgagag

SEQ ID NO: 1110583 - DNA, 25 bp, Homo sapien
ggataaccttaacaagctgagagag

SEQ ID NO: 1110584 - DNA, 25 bp, Homo sapien
tttaaggataaccttaacaagctga

SEQ ID NO: 1110585 - DNA, 25 bp, Homo sapien
taaccttaacaagctgagagagagg

SEQ ID NO: 1110586 - DNA, 25 bp, Homo sapien
tttcattcatggctctgcaatactc

SEQ ID NO: 1110587 - DNA, 25 bp, Homo sapien
ggcaaacaaggacatttcattcatg

SEQ ID NO: 1110588 - DNA, 25 bp, Homo sapien
acatttcattcatggctctgcaata

SEQ ID NO: 1110589 - DNA, 25 bp, Homo sapien
aaaaggcaaacaaggacatttcatt

SEQ ID NO: 1110590 - DNA, 25 bp, Homo sapien
tattggtagtatctcagaatcctgc

SEQ ID NO: 1110591 - DNA, 25 bp, Homo sapien
tcaattttgggcaactcatagacca

SEQ ID NO: 1110592 - DNA, 25 bp, Homo sapien
ctttgtaagaacctgacactgtagg

SEQ ID NO: 1110593 - DNA, 25 bp, Homo sapien
tatcatgcaagattgaactgcccag

SEQ ID NO: 1110594 - DNA, 25 bp, Homo sapien
gctctaagtcccaagactgtaataa

SEQ ID NO: 1110595 - DNA, 25 bp, Homo sapien
gacacctatggaaccacgtctggag

SEQ ID NO: 1110596 - DNA, 25 bp, Homo sapien
cacccagctagccaactgtttttaa

SEQ ID NO: 1110597 - DNA, 25 bp, Homo sapien
tagtgtttccatagtcctaaagttc

SEQ ID NO: 1110598 - DNA, 25 bp, Homo sapien
catagtttctgaggttcatcaatgg

SEQ ID NO: 1110599 - DNA, 25 bp, Homo sapien
tatttgtagctaatccccgctccca

SEQ ID NO: 1110600 - DNA, 25 bp, Homo sapien
catcaatggtgtagcatgtttcaca

SEQ ID NO: 1110601 - DNA, 25 bp, Homo sapien
actttagagagtggttcagaatcca

SEQ ID NO: 1110602 - DNA, 25 bp, Homo sapien
aagtatcacttgcattgtctagcac

SEQ ID NO: 1110603 - DNA, 25 bp, Homo sapien
tgcctatgatttagcaagactgcta

SEQ ID NO: 1110604 - DNA, 25 bp, Homo sapien
tgtgtgatcaaaaaacgcaccagag

SEQ ID NO: 1110605 - DNA, 25 bp, Homo sapien
ctagacatcgtcatcactttgtgtg

SEQ ID NO: 1110606 - DNA, 25 bp, Homo sapien
ttaatattggccagaaatgccactt

SEQ ID NO: 1110607 - DNA, 25 bp, Homo sapien
aaatgtattaatattggccagaaat

SEQ ID NO: 1110608 - DNA, 25 bp, Homo sapien
tgtattaatattggccagaaatgcc

SEQ ID NO: 1110609 - DNA, 25 bp, Homo sapien
attaatattggccagaaatgccact

SEQ ID NO: 1110610 - DNA, 25 bp, Homo sapien
cagcaaatgtagcatgaggatcgcc

SEQ ID NO: 1110611 - DNA, 25 bp, Homo sapien
gatcgccatgaaaggtgtaccggaa

SEQ ID NO: 1110612 - DNA, 25 bp, Homo sapien
gttggaccctccgaaaaatgcagca

SEQ ID NO: 1110613 - DNA, 25 bp, Homo sapien
tcagcgtttagcctttttcgagaaa

SEQ ID NO: 1110614 - DNA, 25 bp, Homo sapien
tatagtatctgggaaggacacctca

SEQ ID NO: 1110615 - DNA, 25 bp, Homo sapien
ggtacattaattgagcagccacaca

SEQ ID NO: 1110616 - DNA, 25 bp, Homo sapien
tctattagaaggtcaccacgttggt

SEQ ID NO: 1110617 - DNA, 25 bp, Homo sapien
tcctcattccgggtttcacaatatc

SEQ ID NO: 1110618 - DNA, 25 bp, Homo sapien
tcttttacagataccagccctatag

SEQ ID NO: 1110619 - DNA, 25 bp, Homo sapien
tctacatcagtaaactaccagtcct

SEQ ID NO: 1110620 - DNA, 25 bp, Homo sapien
agcagcagttagtgtttattttccc

SEQ ID NO: 1110621 - DNA, 25 bp, Homo sapien
caagcaattgggatttccacaggag

SEQ ID NO: 1110622 - DNA, 25 bp, Homo sapien
ggtatatccatatgacgtgccacac

SEQ ID NO: 1110623 - DNA, 25 bp, Homo sapien
tattctactaaaaggcgataggatc

SEQ ID NO: 1110624 - DNA, 25 bp, Homo sapien
cattctcactatagttataaaacag

SEQ ID NO: 1110625 - DNA, 25 bp, Homo sapien
taagggtaaactttatggcatgtaa

SEQ ID NO: 1110626 - DNA, 25 bp, Homo sapien
acatgctaaagcattgtcaatatcc

SEQ ID NO: 1110627 - DNA, 25 bp, Homo sapien
ttcaaaactattccggctatccaag

SEQ ID NO: 1110628 - DNA, 25 bp, Homo sapien
tctttatgggatctatagtacttca

SEQ ID NO: 1110629 - DNA, 25 bp, Homo sapien
aaaactgagcagttactacatgcta

SEQ ID NO: 1110630 - DNA, 25 bp, Homo sapien
tacatcaaacctgctctttaactac

SEQ ID NO: 1110631 - DNA, 25 bp, Homo sapien
taaaacttcatctatttactcacat

SEQ ID NO: 1110632 - DNA, 25 bp, Homo sapien
taactacagacaagccacttagcct

SEQ ID NO: 1110633 - DNA, 25 bp, Homo sapien
gcctctctgggtttacttctttatc

SEQ ID NO: 1110634 - DNA, 25 bp, Homo sapien
cataataggcacatcaagaaggcga

SEQ ID NO: 1110635 - DNA, 25 bp, Homo sapien
aatataatttcccagtctgaagcag

SEQ ID NO: 1110636 - DNA, 25 bp, Homo sapien
tagaattcctggctaatggttcatc

SEQ ID NO: 1110637 - DNA, 25 bp, Homo sapien
tactctgaagttagctgtgccaatt

SEQ ID NO: 1110638 - DNA, 25 bp, Homo sapien
acatttctcataggaggagggcata

SEQ ID NO: 1110639 - DNA, 25 bp, Homo sapien
taacacagatcttggcacagaggag

SEQ ID NO: 1110640 - DNA, 25 bp, Homo sapien
tgcccctaaatgatacctaggcaga

SEQ ID NO: 1110641 - DNA, 25 bp, Homo sapien
taggcagaaacaactactagtggta

SEQ ID NO: 1110642 - DNA, 25 bp, Homo sapien
tccttgggagaggaatacaccagcc

SEQ ID NO: 1110643 - DNA, 25 bp, Homo sapien
tttgcactgccctgataatactctg

SEQ ID NO: 1110644 - DNA, 25 bp, Homo sapien
tccttagtgagaagcctccttggga

SEQ ID NO: 1110645 - DNA, 25 bp, Homo sapien
tactctgcagtatcagcatgcacac

SEQ ID NO: 1110646 - DNA, 25 bp, Homo sapien
gaaagttacgtagtccctcatccta

SEQ ID NO: 1110647 - DNA, 25 bp, Homo sapien
ctactccttgtaaaaaatggctcta

SEQ ID NO: 1110648 - DNA, 25 bp, Homo sapien
tacgtgaacgcctgaggatgccgac

SEQ ID NO: 1110649 - DNA, 25 bp, Homo sapien
ggatgccgacgctacagaacaatac

SEQ ID NO: 1110650 - DNA, 25 bp, Homo sapien
tgcagggccgagagcgcgggcccac

SEQ ID NO: 1110651 - DNA, 25 bp, Homo sapien
cgcaggtaaaagcagcctccaatgg

SEQ ID NO: 1110652 - DNA, 25 bp, Homo sapien
cggcgcctcggactttgcgccccgg

SEQ ID NO: 1110653 - DNA, 25 bp, Homo sapien
cttccgcctggctgcgtcgggtcag

SEQ ID NO: 1110654 - DNA, 25 bp, Homo sapien
tccaccagcccggcggtctccttgg

SEQ ID NO: 1110655 - DNA, 25 bp, Homo sapien
ctgcgcgtggaagaccagcctgcgt

SEQ ID NO: 1110656 - DNA, 25 bp, Homo sapien
gcccgcgcccgtcggctcgccctcc

SEQ ID NO: 1110657 - DNA, 25 bp, Homo sapien
ctgcgtgcgggagcccgggacgctg

SEQ ID NO: 1110658 - DNA, 25 bp, Homo sapien
gcgagatttcaaacgcgcccgcgat

SEQ ID NO: 1110659 - DNA, 25 bp, Homo sapien
gatgctggagaagccctccactcgg

SEQ ID NO: 1110660 - DNA, 25 bp, Homo sapien
tgggcgtagagctcctggatgctgg

SEQ ID NO: 1110661 - DNA, 25 bp, Homo sapien
ggcccgtggcactaccgtgcgccag

SEQ ID NO: 1110662 - DNA, 25 bp, Homo sapien
catgctgtgcaattgtttatgtgca

SEQ ID NO: 1110663 - DNA, 25 bp, Homo sapien
cttagtaaacctatctgtaaggtag

SEQ ID NO: 1110664 - DNA, 25 bp, Homo sapien
agaaattaccacagtcagagcagtc

SEQ ID NO: 1110665 - DNA, 25 bp, Homo sapien
tcagggactgcttctcacacttttt

SEQ ID NO: 1110666 - DNA, 25 bp, Homo sapien
ttgttagtgatatctctgatttctt

SEQ ID NO: 1110667 - DNA, 25 bp, Homo sapien
tctttgggcagtgttccatagttct

SEQ ID NO: 1110668 - DNA, 25 bp, Homo sapien
atttgttagtgatatctctgatttc

SEQ ID NO: 1110669 - DNA, 25 bp, Homo sapien
tttgttagtgatatctctgatttct

SEQ ID NO: 1110670 - DNA, 25 bp, Homo sapien
tttgcacctgctataggactctata

SEQ ID NO: 1110671 - DNA, 25 bp, Homo sapien
tgatctcaaaccctatgcttcccta

SEQ ID NO: 1110672 - DNA, 25 bp, Homo sapien
tgtaccattgttctggacacctaac

SEQ ID NO: 1110673 - DNA, 25 bp, Homo sapien
gtcatctacaggaatcaaacccagg

SEQ ID NO: 1110674 - DNA, 25 bp, Homo sapien
cctcatcagaagagtccgggctagt

SEQ ID NO: 1110675 - DNA, 25 bp, Homo sapien
tagactaaggaccatccacagagag

SEQ ID NO: 1110676 - DNA, 25 bp, Homo sapien
tttgattgaaagagccctcatcaga

SEQ ID NO: 1110677 - DNA, 25 bp, Homo sapien
taatccatgcaggtagtttagacta

SEQ ID NO: 1110678 - DNA, 25 bp, Homo sapien
ttcttccaactctctgcttgccaac

SEQ ID NO: 1110679 - DNA, 25 bp, Homo sapien
ttccaactctctgcttgccaacatt

SEQ ID NO: 1110680 - DNA, 25 bp, Homo sapien
aactctctgcttgccaacattaccg

SEQ ID NO: 1110681 - DNA, 25 bp, Homo sapien
ctctgcttgccaacattaccgccat

SEQ ID NO: 1110682 - DNA, 25 bp, Homo sapien
aatcactgctatttcccccgtcagg

SEQ ID NO: 1110683 - DNA, 25 bp, Homo sapien
tatttcccccgtcaggtgctgttaa

SEQ ID NO: 1110684 - DNA, 25 bp, Homo sapien
catgctttctgaaccacttatcttc

SEQ ID NO: 1110685 - DNA, 25 bp, Homo sapien
gctatttcccccgtcaggtgctgtt

SEQ ID NO: 1110686 - DNA, 25 bp, Homo sapien
cagtgggtcccaaacaccaatataa

SEQ ID NO: 1110687 - DNA, 25 bp, Homo sapien
taccatgatggtataacaggataga

SEQ ID NO: 1110688 - DNA, 25 bp, Homo sapien
tgtccatggtattcacagtgggtcc

SEQ ID NO: 1110689 - DNA, 25 bp, Homo sapien
ggaaatctcacacaaactgaacttc

SEQ ID NO: 1110690 - DNA, 25 bp, Homo sapien
tgcaaagaaaaataaaatgtcaggt

SEQ ID NO: 1110691 - DNA, 25 bp, Homo sapien
aagaaaaataaaatgtcaggtccat

SEQ ID NO: 1110692 - DNA, 25 bp, Homo sapien
ctgcaaagaaaaataaaatgtcagg

SEQ ID NO: 1110693 - DNA, 25 bp, Homo sapien
gcaaagaaaaataaaatgtcaggtc

SEQ ID NO: 1110694 - DNA, 25 bp, Homo sapien
ttaggtgtgtttaaagtgcaatata

SEQ ID NO: 1110695 - DNA, 25 bp, Homo sapien
tcaattttaggtgtgtttaaagtgc

SEQ ID NO: 1110696 - DNA, 25 bp, Homo sapien
ggtgtgtttaaagtgcaatataaga

SEQ ID NO: 1110697 - DNA, 25 bp, Homo sapien
caattttaggtgtgtttaaagtgca

SEQ ID NO: 1110698 - DNA, 25 bp, Homo sapien
cattatctgtaatggtgagaccaag

SEQ ID NO: 1110699 - DNA, 25 bp, Homo sapien
aaagcatagccaacaccattatctg

SEQ ID NO: 1110700 - DNA, 25 bp, Homo sapien
tagtcctagttgtcctcctaagagt

SEQ ID NO: 1110701 - DNA, 25 bp, Homo sapien
tctttttcgattcctttcacatggg

SEQ ID NO: 1110702 - DNA, 25 bp, Homo sapien
tagactttcctttcagttagttcta

SEQ ID NO: 1110703 - DNA, 25 bp, Homo sapien
tcaatggaaataagccagaaattca

SEQ ID NO: 1110704 - DNA, 25 bp, Homo sapien
ggaaataagccagaaattcatcaga

SEQ ID NO: 1110705 - DNA, 25 bp, Homo sapien
gccagaaattcatcagatgttaaaa

SEQ ID NO: 1110706 - DNA, 25 bp, Homo sapien
taagccagaaattcatcagatgtta

SEQ ID NO: 1110707 - DNA, 25 bp, Homo sapien
ctaatccagcatgagcaagtaggct

SEQ ID NO: 1110708 - DNA, 25 bp, Homo sapien
ccagcatgagcaagtaggcttcatc

SEQ ID NO: 1110709 - DNA, 25 bp, Homo sapien
tcatccccaggatgcaagattggtt

SEQ ID NO: 1110710 - DNA, 25 bp, Homo sapien
catcaaaaacctaatccagcatgag

SEQ ID NO: 1110711 - DNA, 25 bp, Homo sapien
gatggcagacacgacgaacgcattc

SEQ ID NO: 1110712 - DNA, 25 bp, Homo sapien
cccgaagaagatcgcgaaggacttg

SEQ ID NO: 1110713 - DNA, 25 bp, Homo sapien
acacgacgaacgcattcccgaagaa

SEQ ID NO: 1110714 - DNA, 25 bp, Homo sapien
gaacgcattcccgaagaagatcgcg

SEQ ID NO: 1110715 - DNA, 25 bp, Homo sapien
cagcttcagaaagttttctagtcac

SEQ ID NO: 1110716 - DNA, 25 bp, Homo sapien
gacatccttctattatcagcttcag

SEQ ID NO: 1110717 - DNA, 25 bp, Homo sapien
atctttctccttccgagacatcctt

SEQ ID NO: 1110718 - DNA, 25 bp, Homo sapien
ctttggaaacagtatcctccctctt

SEQ ID NO: 1110719 - DNA, 25 bp, Homo sapien
aaatggaaaatgttgtagcttcaga

SEQ ID NO: 1110720 - DNA, 25 bp, Homo sapien
aaaatgttgtagcttcagaatcagc

SEQ ID NO: 1110721 - DNA, 25 bp, Homo sapien
aatgttgtagcttcagaatcagcaa

SEQ ID NO: 1110722 - DNA, 25 bp, Homo sapien
ttgtagcttcagaatcagcaacttc

SEQ ID NO: 1110723 - DNA, 25 bp, Homo sapien
aaacatcttgtgtgtctcccatcct

SEQ ID NO: 1110724 - DNA, 25 bp, Homo sapien
cactatcagaggcagcagataagaa

SEQ ID NO: 1110725 - DNA, 25 bp, Homo sapien
ttcactatcagaggcagcagataag

SEQ ID NO: 1110726 - DNA, 25 bp, Homo sapien
actatcagaggcagcagataagaat

SEQ ID NO: 1110727 - DNA, 25 bp, Homo sapien
tcactatcagaggcagcagataaga

SEQ ID NO: 1110728 - DNA, 25 bp, Homo sapien
gattcaatatgatccccaacacaga

SEQ ID NO: 1110729 - DNA, 25 bp, Homo sapien
agtgacgccacccaacaatattttc

SEQ ID NO: 1110730 - DNA, 25 bp, Homo sapien
taacttcttagcaacatcatagtga

SEQ ID NO: 1110731 - DNA, 25 bp, Homo sapien
caacacagattgttttaactgagtc

SEQ ID NO: 1110732 - DNA, 25 bp, Homo sapien
aaagagatctatgggtcagattcca

SEQ ID NO: 1110733 - DNA, 25 bp, Homo sapien
ttacagtaatctcatgcctgaatct

SEQ ID NO: 1110734 - DNA, 25 bp, Homo sapien
caggccagagcgattacagtaatct

SEQ ID NO: 1110735 - DNA, 25 bp, Homo sapien
gttttgtgtgcatctccggattttt

SEQ ID NO: 1110736 - DNA, 25 bp, Homo sapien
gagcctgaaagcaggttccaaggaa

SEQ ID NO: 1110737 - DNA, 25 bp, Homo sapien
aagagcctgaaagcaggttccaagg

SEQ ID NO: 1110738 - DNA, 25 bp, Homo sapien
agcctgaaagcaggttccaaggaag

SEQ ID NO: 1110739 - DNA, 25 bp, Homo sapien
agagcctgaaagcaggttccaagga

SEQ ID NO: 1110740 - DNA, 25 bp, Homo sapien
cttttgatctcaggcgaagtgttgc

SEQ ID NO: 1110741 - DNA, 25 bp, Homo sapien
gaagtgttgcccttccacaaccaat

SEQ ID NO: 1110742 - DNA, 25 bp, Homo sapien
caggcgaagtgttgcccttccacaa

SEQ ID NO: 1110743 - DNA, 25 bp, Homo sapien
tggcaggaccttttgatctcaggcg

SEQ ID NO: 1110744 - DNA, 25 bp, Homo sapien
tcctgaagggacgtggcatttttcc

SEQ ID NO: 1110745 - DNA, 25 bp, Homo sapien
ctgaagggacgtggcatttttcctg

SEQ ID NO: 1110746 - DNA, 25 bp, Homo sapien
cctttgtgagctgtttaaaggtctg

SEQ ID NO: 1110747 - DNA, 25 bp, Homo sapien
tgtgagctgtttaaaggtctgctca

SEQ ID NO: 1110748 - DNA, 25 bp, Homo sapien
ctaaatcaatatctcgaattcccat

SEQ ID NO: 1110749 - DNA, 25 bp, Homo sapien
aatatctcgaattcccatgtacaac

SEQ ID NO: 1110750 - DNA, 25 bp, Homo sapien
tcaatatctcgaattcccatgtaca

SEQ ID NO: 1110751 - DNA, 25 bp, Homo sapien
tctcgaattcccatgtacaactcaa

SEQ ID NO: 1110752 - DNA, 25 bp, Homo sapien
ttaagtcacgttgttgccatattac

SEQ ID NO: 1110753 - DNA, 25 bp, Homo sapien
tatatttcatgctaatcagatctga

SEQ ID NO: 1110754 - DNA, 25 bp, Homo sapien
tttgaggatagtgttttaagtcacg

SEQ ID NO: 1110755 - DNA, 25 bp, Homo sapien
tcctaatttaacaatggcttacatt

SEQ ID NO: 1110756 - DNA, 25 bp, Homo sapien
ctccatgaaatcctttgtccacagc

SEQ ID NO: 1110757 - DNA, 25 bp, Homo sapien
ccacagctggaagagatatccccat

SEQ ID NO: 1110758 - DNA, 25 bp, Homo sapien
tctctcctccatgaaatcctttgtc

SEQ ID NO: 1110759 - DNA, 25 bp, Homo sapien
tgaaatcctttgtccacagctggaa

SEQ ID NO: 1110760 - DNA, 25 bp, Homo sapien
aaattcatctggatttactttgtcc

SEQ ID NO: 1110761 - DNA, 25 bp, Homo sapien
caaacatcaaagacaaattcgtctg

SEQ ID NO: 1110762 - DNA, 25 bp, Homo sapien
aagagtttcgtcaagtgccacagca

SEQ ID NO: 1110763 - DNA, 25 bp, Homo sapien
ttcgtctgggaacgcaaagtctcca

SEQ ID NO: 1110764 - DNA, 25 bp, Homo sapien
tcataatcctcttcgtttggcatca

SEQ ID NO: 1110765 - DNA, 25 bp, Homo sapien
tcctcttcgtttggcatcaccaatg

SEQ ID NO: 1110766 - DNA, 25 bp, Homo sapien
ttcgtttggcatcaccaatgactcc

SEQ ID NO: 1110767 - DNA, 25 bp, Homo sapien
taatcctcttcgtttggcatcacca

SEQ ID NO: 1110768 - DNA, 25 bp, Homo sapien
taagcaacagcaataaggcagtcca

SEQ ID NO: 1110769 - DNA, 25 bp, Homo sapien
tacaaagatgcttggtcatgccatg

SEQ ID NO: 1110770 - DNA, 25 bp, Homo sapien
gccatagaaatcaacatgccacagg

SEQ ID NO: 1110771 - DNA, 25 bp, Homo sapien
tcttccctggagtgcttataaaagg

SEQ ID NO: 1110772 - DNA, 25 bp, Homo sapien
tcagaacctccaaaacgaactcact

SEQ ID NO: 1110773 - DNA, 25 bp, Homo sapien
tattaagaattaataggtatttcag

SEQ ID NO: 1110774 - DNA, 25 bp, Homo sapien
cgaactcactaaacgagtaccaaca

SEQ ID NO: 1110775 - DNA, 25 bp, Homo sapien
tatgggcctcctaagtcatcttatg

SEQ ID NO: 1110776 - DNA, 25 bp, Homo sapien
tatgttcaaggcctcatcgagccca

SEQ ID NO: 1110777 - DNA, 25 bp, Homo sapien
gcactgagcgttacaaaaaggcaga

SEQ ID NO: 1110778 - DNA, 25 bp, Homo sapien
aacagacgcttttggtgcactgagc

SEQ ID NO: 1110779 - DNA, 25 bp, Homo sapien
caagtgtgtctttatgcatgcccaa

SEQ ID NO: 1110780 - DNA, 25 bp, Homo sapien
cttgacagatcataagttcttgaag

SEQ ID NO: 1110781 - DNA, 25 bp, Homo sapien
cactccttcggcatacaaattagag

SEQ ID NO: 1110782 - DNA, 25 bp, Homo sapien
ttagagttttagtccagaagtgggc

SEQ ID NO: 1110783 - DNA, 25 bp, Homo sapien
ggaattcaataaggatgtccccatt

SEQ ID NO: 1110784 - DNA, 25 bp, Homo sapien
tgagggaagcctcatgagtattcct

SEQ ID NO: 1110785 - DNA, 25 bp, Homo sapien
cctgaagggtgactccaagggtcag

SEQ ID NO: 1110786 - DNA, 25 bp, Homo sapien
caagggtcagcaggattcaggacaa

SEQ ID NO: 1110787 - DNA, 25 bp, Homo sapien
tacattaaggaccttgggtgagcct

SEQ ID NO: 1110788 - DNA, 25 bp, Homo sapien
gatggaatttctagacctgccctgc

SEQ ID NO: 1110789 - DNA, 25 bp, Homo sapien
agttaggctacacagtgttcaggcc

SEQ ID NO: 1110790 - DNA, 25 bp, Homo sapien
gttaggctacacagtgttcaggccc

SEQ ID NO: 1110791 - DNA, 25 bp, Homo sapien
gggtcacggtaggagcatgggcttt

SEQ ID NO: 1110792 - DNA, 25 bp, Homo sapien
tttctgggggggcacataatcaatg

SEQ ID NO: 1110793 - DNA, 25 bp, Homo sapien
cataatcaatgacaggggtcacggt

SEQ ID NO: 1110794 - DNA, 25 bp, Homo sapien
cacggtaggagcatgggctttgaaa

SEQ ID NO: 1110795 - DNA, 25 bp, Homo sapien
gtaatgttcccacattggtgcttta

SEQ ID NO: 1110796 - DNA, 25 bp, Homo sapien
atgttcccacattggtgctttaaga

SEQ ID NO: 1110797 - DNA, 25 bp, Homo sapien
gaatggggaagaaatattgactatc

SEQ ID NO: 1110798 - DNA, 25 bp, Homo sapien
gctgaatggggaagaaatattgact

SEQ ID NO: 1110799 - DNA, 25 bp, Homo sapien
aatccgagggtttactggtatatgc

SEQ ID NO: 1110800 - DNA, 25 bp, Homo sapien
aaatccgagggtttactggtatatg

SEQ ID NO: 1110801 - DNA, 25 bp, Homo sapien
aactactgactgaggtaaggtaact

SEQ ID NO: 1110802 - DNA, 25 bp, Homo sapien
gaaacttcaagaataaactactgac

SEQ ID NO: 1110803 - DNA, 25 bp, Homo sapien
taattaacagatagctgccaagatg

SEQ ID NO: 1110804 - DNA, 25 bp, Homo sapien
tgccaagatgttgatccagattgcc

SEQ ID NO: 1110805 - DNA, 25 bp, Homo sapien
tattagaagaggtcaagatttacag

SEQ ID NO: 1110806 - DNA, 25 bp, Homo sapien
ccaatgcaagaacctatttgaagaa

SEQ ID NO: 1110807 - DNA, 25 bp, Homo sapien
agatttacagcccacaaaagtgctt

SEQ ID NO: 1110808 - DNA, 25 bp, Homo sapien
agtgcttagacttaatatcttctga

SEQ ID NO: 1110809 - DNA, 25 bp, Homo sapien
tgatacccagtaacaaagctatgac

SEQ ID NO: 1110810 - DNA, 25 bp, Homo sapien
gatgacagtagcattaccttagcag

SEQ ID NO: 1110811 - DNA, 25 bp, Homo sapien
ttgtaatcccctagtcaaacaggga

SEQ ID NO: 1110812 - DNA, 25 bp, Homo sapien
cagcctagcctagagaaagcagtca

SEQ ID NO: 1110813 - DNA, 25 bp, Homo sapien
tccgcttgatcaattcggccattga

SEQ ID NO: 1110814 - DNA, 25 bp, Homo sapien
cttccgcttgatcaattcggccatt

SEQ ID NO: 1110815 - DNA, 25 bp, Homo sapien
ttctagttagcaatttttctaaaca

SEQ ID NO: 1110816 - DNA, 25 bp, Homo sapien
ctagttagcaatttttctaaacatt

SEQ ID NO: 1110817 - DNA, 25 bp, Homo sapien
agacccagcatgtgatgtacccctc

SEQ ID NO: 1110818 - DNA, 25 bp, Homo sapien
gacaagacccagcatgtgatgtacc

SEQ ID NO: 1110819 - DNA, 25 bp, Homo sapien
caagacccagcatgtgatgtacccc

SEQ ID NO: 1110820 - DNA, 25 bp, Homo sapien
ctgacaagacccagcatgtgatgta

SEQ ID NO: 1110821 - DNA, 25 bp, Homo sapien
ccatgctgggaataaatagggtagg

SEQ ID NO: 1110822 - DNA, 25 bp, Homo sapien
agtggatttaggtccatgctgggaa

SEQ ID NO: 1110823 - DNA, 25 bp, Homo sapien
ttttggctgaagtggatttaggtcc

SEQ ID NO: 1110824 - DNA, 25 bp, Homo sapien
aataaatagggtaggctctgaggtg

SEQ ID NO: 1110825 - DNA, 25 bp, Homo sapien
cagaaagaaccccacttttgcaagc

SEQ ID NO: 1110826 - DNA, 25 bp, Homo sapien
atggagaggactacgtggacagaca

SEQ ID NO: 1110827 - DNA, 25 bp, Homo sapien
agaggactacgtggacagacaggac

SEQ ID NO: 1110828 - DNA, 25 bp, Homo sapien
gcctcgaggatcagcttctactctt

SEQ ID NO: 1110829 - DNA, 25 bp, Homo sapien
cagacacccctcaatggaaaatagc

SEQ ID NO: 1110830 - DNA, 25 bp, Homo sapien
tctgtttatgaagtcggcacacaat

SEQ ID NO: 1110831 - DNA, 25 bp, Homo sapien
gctgctttcccaatagagccctgtg

SEQ ID NO: 1110832 - DNA, 25 bp, Homo sapien
aaatagcaaggccagttgaaggcca

SEQ ID NO: 1110833 - DNA, 25 bp, Homo sapien
cacttccaaggacaacaagaacacc

SEQ ID NO: 1110834 - DNA, 25 bp, Homo sapien
caaccaacccatgggcttttgctta

SEQ ID NO: 1110835 - DNA, 25 bp, Homo sapien
caaataaagtgtttacgagaatctt

SEQ ID NO: 1110836 - DNA, 25 bp, Homo sapien
tggaagccacattccaactggagtt

SEQ ID NO: 1110837 - DNA, 25 bp, Homo sapien
gaagctacgtcgcacaaagtgggca

SEQ ID NO: 1110838 - DNA, 25 bp, Homo sapien
acaggcatcggtggacagagccaga

SEQ ID NO: 1110839 - DNA, 25 bp, Homo sapien
tagtgcccttcatcaggtagatagg

SEQ ID NO: 1110840 - DNA, 25 bp, Homo sapien
cagagccagagtgaccgcctggtag

SEQ ID NO: 1110841 - DNA, 25 bp, Homo sapien
gcaagagtacatccagactttcttc

SEQ ID NO: 1110842 - DNA, 25 bp, Homo sapien
gcttctgcaagagtacatccagact

SEQ ID NO: 1110843 - DNA, 25 bp, Homo sapien
tgcttctgcaagagtacatccagac

SEQ ID NO: 1110844 - DNA, 25 bp, Homo sapien
tctgcaagagtacatccagactttc

SEQ ID NO: 1110845 - DNA, 25 bp, Homo sapien
caaaaactgtcttccttgggcctca

SEQ ID NO: 1110846 - DNA, 25 bp, Homo sapien
tcatgtcaacggatttccttgggac

SEQ ID NO: 1110847 - DNA, 25 bp, Homo sapien
gcaactagaccagcacagagatgac

SEQ ID NO: 1110848 - DNA, 25 bp, Homo sapien
tcaatctgacaactttatgggcaac

SEQ ID NO: 1110849 - DNA, 25 bp, Homo sapien
cttccaggtgagcagggcacaaagt

SEQ ID NO: 1110850 - DNA, 25 bp, Homo sapien
ttccaggtgagcagggcacaaagtc

SEQ ID NO: 1110851 - DNA, 25 bp, Homo sapien
ccagccacctaaccgagggcttatt

SEQ ID NO: 1110852 - DNA, 25 bp, Homo sapien
tcttcccagccacctaaccgagggc

SEQ ID NO: 1110853 - DNA, 25 bp, Homo sapien
tgtgcacagtagcttgtcagttctc

SEQ ID NO: 1110854 - DNA, 25 bp, Homo sapien
cacagtagcttgtcagttctctcat

SEQ ID NO: 1110855 - DNA, 25 bp, Homo sapien
cttttcctaggggtatttcagcatc

SEQ ID NO: 1110856 - DNA, 25 bp, Homo sapien
ttaccaggtacatcaaatttgcttc

SEQ ID NO: 1110857 - DNA, 25 bp, Homo sapien
tttctctctgagaactttaccaggt

SEQ ID NO: 1110858 - DNA, 25 bp, Homo sapien
tctgagaactttaccaggtacatca

SEQ ID NO: 1110859 - DNA, 25 bp, Homo sapien
ttgccaaaatcttttgttctcctgc

SEQ ID NO: 1110860 - DNA, 25 bp, Homo sapien
gccaaaatcttttgttctcctgctc

SEQ ID NO: 1110861 - DNA, 25 bp, Homo sapien
tcacttgccaaaatcttttgttctc

SEQ ID NO: 1110862 - DNA, 25 bp, Homo sapien
caaaatcttttgttctcctgctcac

SEQ ID NO: 1110863 - DNA, 25 bp, Homo sapien
gtttcactggcaacatgggtcacat

SEQ ID NO: 1110864 - DNA, 25 bp, Homo sapien
tcagtggagcagagaactgtccctc

SEQ ID NO: 1110865 - DNA, 25 bp, Homo sapien
cttcatcactgccaaagccaaagaa

SEQ ID NO: 1110866 - DNA, 25 bp, Homo sapien
tggccatacctagcttcagtggagc

SEQ ID NO: 1110867 - DNA, 25 bp, Homo sapien
cgtataggttgacccacacagttca

SEQ ID NO: 1110868 - DNA, 25 bp, Homo sapien
tccacgtataggttgacccacacag

SEQ ID NO: 1110869 - DNA, 25 bp, Homo sapien
cacgtataggttgacccacacagtt

SEQ ID NO: 1110870 - DNA, 25 bp, Homo sapien
ccacgtataggttgacccacacagt

SEQ ID NO: 1110871 - DNA, 25 bp, Homo sapien
ttcaacaaatctctagaagttccaa

SEQ ID NO: 1110872 - DNA, 25 bp, Homo sapien
gaatcatggtgggaagtgaaaggta

SEQ ID NO: 1110873 - DNA, 25 bp, Homo sapien
tcatggtgggaagtgaaaggtacgt

SEQ ID NO: 1110874 - DNA, 25 bp, Homo sapien
ttcagatatcttttcagcaatgccc

SEQ ID NO: 1110875 - DNA, 25 bp, Homo sapien
taaaggttgtacacaatatttgtta

SEQ ID NO: 1110876 - DNA, 25 bp, Homo sapien
tgttacaaagaacatataaaatatc

SEQ ID NO: 1110877 - DNA, 25 bp, Homo sapien
gttacaaagaacatataaaatatct

SEQ ID NO: 1110878 - DNA, 25 bp, Homo sapien
ggttgtacacaatatttgttacaaa

SEQ ID NO: 1110879 - DNA, 25 bp, Homo sapien
tgtagatccctccaggcatacagct

SEQ ID NO: 1110880 - DNA, 25 bp, Homo sapien
tagatccctccaggcatacagctac

SEQ ID NO: 1110881 - DNA, 25 bp, Homo sapien
gtctggctgtagatccctccaggca

SEQ ID NO: 1110882 - DNA, 25 bp, Homo sapien
ggctgtagatccctccaggcataca

SEQ ID NO: 1110883 - DNA, 25 bp, Homo sapien
cagttcacattctgttcagtgctca

SEQ ID NO: 1110884 - DNA, 25 bp, Homo sapien
gagtacaagtaccaccaggttgatg

SEQ ID NO: 1110885 - DNA, 25 bp, Homo sapien
ttctcacagtagacagcagagtaca

SEQ ID NO: 1110886 - DNA, 25 bp, Homo sapien
aggttgatgtacaattaatcttgga

SEQ ID NO: 1110887 - DNA, 25 bp, Homo sapien
ttaggcatcattccaaatcattatg

SEQ ID NO: 1110888 - DNA, 25 bp, Homo sapien
tttattttattaggcatcattccaa

SEQ ID NO: 1110889 - DNA, 25 bp, Homo sapien
ttattttattaggcatcattccaaa

SEQ ID NO: 1110890 - DNA, 25 bp, Homo sapien
tattttattaggcatcattccaaat

SEQ ID NO: 1110891 - DNA, 25 bp, Homo sapien
tggccactgttgtagaaatgatctc

SEQ ID NO: 1110892 - DNA, 25 bp, Homo sapien
taagaaactatgctcccatgagaat

SEQ ID NO: 1110893 - DNA, 25 bp, Homo sapien
ggcactccactgctaaatttttgca

SEQ ID NO: 1110894 - DNA, 25 bp, Homo sapien
taactaagcaatgaccaggcactcc

SEQ ID NO: 1110895 - DNA, 25 bp, Homo sapien
gtatacaagcggatatgcataggtt

SEQ ID NO: 1110896 - DNA, 25 bp, Homo sapien
gcaaccttggatttttatacccaca

SEQ ID NO: 1110897 - DNA, 25 bp, Homo sapien
ccatatcagcggattccacatctgc

SEQ ID NO: 1110898 - DNA, 25 bp, Homo sapien
aattcgtttgggatatcgggtcagc

SEQ ID NO: 1110899 - DNA, 25 bp, Homo sapien
ctgaaggcttgaagattagagattt

SEQ ID NO: 1110900 - DNA, 25 bp, Homo sapien
tggtcctcatgagctgagtccatct

SEQ ID NO: 1110901 - DNA, 25 bp, Homo sapien
tctcttgattggaggtgagtcatga

SEQ ID NO: 1110902 - DNA, 25 bp, Homo sapien
gattttcaaggatagtatggtgggc

SEQ ID NO: 1110903 - DNA, 25 bp, Homo sapien
ctgaagatttctagggtcccttttg

SEQ ID NO: 1110904 - DNA, 25 bp, Homo sapien
taatcacatagccttttaatggatg

SEQ ID NO: 1110905 - DNA, 25 bp, Homo sapien
ccaacttgaagtgatttctaccatc

SEQ ID NO: 1110906 - DNA, 25 bp, Homo sapien
ttttaatctaatcacatagcctttt

SEQ ID NO: 1110907 - DNA, 25 bp, Homo sapien
gtgtcctatgtcctccaaacgcctg

SEQ ID NO: 1110908 - DNA, 25 bp, Homo sapien
agtgtcctatgtcctccaaacgcct

SEQ ID NO: 1110909 - DNA, 25 bp, Homo sapien
ccaaacgcctgcactagttcttcaa

SEQ ID NO: 1110910 - DNA, 25 bp, Homo sapien
cctgcactagttcttcaacaggtgt

SEQ ID NO: 1110911 - DNA, 25 bp, Homo sapien
gggatagtttcagtaaggatgctac

SEQ ID NO: 1110912 - DNA, 25 bp, Homo sapien
tatttgttctgatcctagtttctag

SEQ ID NO: 1110913 - DNA, 25 bp, Homo sapien
ataaatatgttgcttgcctcataga

SEQ ID NO: 1110914 - DNA, 25 bp, Homo sapien
gatatcggctctggatttttcacag

SEQ ID NO: 1110915 - DNA, 25 bp, Homo sapien
gctgttgctgaacaatccacccaca

SEQ ID NO: 1110916 - DNA, 25 bp, Homo sapien
caaactctttgctggtaagggacca

SEQ ID NO: 1110917 - DNA, 25 bp, Homo sapien
taatatggtttcactgtcatgcaaa

SEQ ID NO: 1110918 - DNA, 25 bp, Homo sapien
tcaacaatcagttgagcagcaactg

SEQ ID NO: 1110919 - DNA, 25 bp, Homo sapien
cattagctccacacaagtcgtgaag

SEQ ID NO: 1110920 - DNA, 25 bp, Homo sapien
gctccacacaagtcgtgaagcacag

SEQ ID NO: 1110921 - DNA, 25 bp, Homo sapien
cacaagtcgtgaagcacagccttga

SEQ ID NO: 1110922 - DNA, 25 bp, Homo sapien
tctgctttacactcagtcttgatct

SEQ ID NO: 1110923 - DNA, 25 bp, Homo sapien
tcgtcttccacaaaggatctgactg

SEQ ID NO: 1110924 - DNA, 25 bp, Homo sapien
taaaattgatgacgctatgaacaca

SEQ ID NO: 1110925 - DNA, 25 bp, Homo sapien
gaaacaaccagaagcataggtcact

SEQ ID NO: 1110926 - DNA, 25 bp, Homo sapien
tctgactgtgtgacttgaaggaggc

SEQ ID NO: 1110927 - DNA, 25 bp, Homo sapien
gagagaccacaaaataaacagctgt

SEQ ID NO: 1110928 - DNA, 25 bp, Homo sapien
cagtgactgggtcttagacatcaca

SEQ ID NO: 1110929 - DNA, 25 bp, Homo sapien
gaatgaataagctcccatggcattt

SEQ ID NO: 1110930 - DNA, 25 bp, Homo sapien
tatctcctatcatagtgcctgcggg

SEQ ID NO: 1110931 - DNA, 25 bp, Homo sapien
ctgtaggtttgccataaacagctct

SEQ ID NO: 1110932 - DNA, 25 bp, Homo sapien
ttggctgtaggtttgccataaacag

SEQ ID NO: 1110933 - DNA, 25 bp, Homo sapien
aggtttgccataaacagctcttatt

SEQ ID NO: 1110934 - DNA, 25 bp, Homo sapien
tattggctgtaggtttgccataaac

SEQ ID NO: 1110935 - DNA, 25 bp, Homo sapien
aagagggcaccgtgctcggatgcat

SEQ ID NO: 1110936 - DNA, 25 bp, Homo sapien
tcagagctgcacttagccgctggac

SEQ ID NO: 1110937 - DNA, 25 bp, Homo sapien
cttagccgctggaccagctaaagaa

SEQ ID NO: 1110938 - DNA, 25 bp, Homo sapien
cgtgctcggatgcatcagagctgca

SEQ ID NO: 1110939 - DNA, 25 bp, Homo sapien
ctctgcacctagctgcgctggcagc

SEQ ID NO: 1110940 - DNA, 25 bp, Homo sapien
atccctctgcacctagctgcgctgg

SEQ ID NO: 1110941 - DNA, 25 bp, Homo sapien
tgggatccctctgcacctagctgcg

SEQ ID NO: 1110942 - DNA, 25 bp, Homo sapien
ctgggatccctctgcacctagctgc

SEQ ID NO: 1110943 - DNA, 25 bp, Homo sapien
cgcactcgttcccttagcgcggaaa

SEQ ID NO: 1110944 - DNA, 25 bp, Homo sapien
atcgggcgccggctgtggtccagcc

SEQ ID NO: 1110945 - DNA, 25 bp, Homo sapien
agcgcggagatcctgatcgggcgcc

SEQ ID NO: 1110946 - DNA, 25 bp, Homo sapien
aagttccaccgatcccagcgcggag

SEQ ID NO: 1110947 - DNA, 25 bp, Homo sapien
tctctgaggagcagaagacggagcc

SEQ ID NO: 1110948 - DNA, 25 bp, Homo sapien
aagacggagccgctcggtgtgccat

SEQ ID NO: 1110949 - DNA, 25 bp, Homo sapien
cttgtcatcccaggccgccagccgg

SEQ ID NO: 1110950 - DNA, 25 bp, Homo sapien
gagcagaagacggagccgctcggtg

SEQ ID NO: 1110951 - DNA, 25 bp, Homo sapien
ctgggaattccggagccagcctttc

SEQ ID NO: 1110952 - DNA, 25 bp, Homo sapien
gtttcccgagcagctagctttcccg

SEQ ID NO: 1110953 - DNA, 25 bp, Homo sapien
cagacactggatacacaaggccacg

SEQ ID NO: 1110954 - DNA, 25 bp, Homo sapien
tcttctctgagctaattcgattggc

SEQ ID NO: 1110955 - DNA, 25 bp, Homo sapien
gttgaagcctgaggcacagacactg

SEQ ID NO: 1110956 - DNA, 25 bp, Homo sapien
ttacagcttcagagtagcaacattc

SEQ ID NO: 1110957 - DNA, 25 bp, Homo sapien
acagcttcagagtagcaacattcaa

SEQ ID NO: 1110958 - DNA, 25 bp, Homo sapien
cgaagtatttgcttgtcactctttc

SEQ ID NO: 1110959 - DNA, 25 bp, Homo sapien
agcaacattcaaggcgaagtatttg

SEQ ID NO: 1110960 - DNA, 25 bp, Homo sapien
ggaattatgaacaccgcattactgc

SEQ ID NO: 1110961 - DNA, 25 bp, Homo sapien
cattactgctcatctgacgtttatg

SEQ ID NO: 1110962 - DNA, 25 bp, Homo sapien
tatgaacaccgcattactgctcatc

SEQ ID NO: 1110963 - DNA, 25 bp, Homo sapien
atctgacgtttatgactgacgtgcc

SEQ ID NO: 1110964 - DNA, 25 bp, Homo sapien
tctccctctcaaaactgtgcaggat

SEQ ID NO: 1110965 - DNA, 25 bp, Homo sapien
agtcatctccctctcaaaactgtgc

SEQ ID NO: 1110966 - DNA, 25 bp, Homo sapien
cctctcaaaactgtgcaggattgca

SEQ ID NO: 1110967 - DNA, 25 bp, Homo sapien
aaaagccaaccactcaagtcatctc

SEQ ID NO: 1110968 - DNA, 25 bp, Homo sapien
tgtagaaacaccaggtcctcgacgc

SEQ ID NO: 1110969 - DNA, 25 bp, Homo sapien
tatagtctcgatgtccaaggatggg

SEQ ID NO: 1110970 - DNA, 25 bp, Homo sapien
caatgaaacaccaagggctaagagc

SEQ ID NO: 1110971 - DNA, 25 bp, Homo sapien
tacaggagacacacattatcgccag

SEQ ID NO: 1110972 - DNA, 25 bp, Homo sapien
ggagaacccagtagctaatatgccc

SEQ ID NO: 1110973 - DNA, 25 bp, Homo sapien
tcaggctatcacatacagatgctgg

SEQ ID NO: 1110974 - DNA, 25 bp, Homo sapien
gcaacaattcttgggcaatgagcct

SEQ ID NO: 1110975 - DNA, 25 bp, Homo sapien
tgaactatccatgcagtacacctga

SEQ ID NO: 1110976 - DNA, 25 bp, Homo sapien
ctctttcccattcaaaattattctg

SEQ ID NO: 1110977 - DNA, 25 bp, Homo sapien
aaatcactttgctcttcatatactt

SEQ ID NO: 1110978 - DNA, 25 bp, Homo sapien
tctctttcccattcaaaattattct

SEQ ID NO: 1110979 - DNA, 25 bp, Homo sapien
atgtaagaaatcactttgctcttca

SEQ ID NO: 1110980 - DNA, 25 bp, Homo sapien
ttgccttgttttcacccttgcgttc

SEQ ID NO: 1110981 - DNA, 25 bp, Homo sapien
cagctttctgctgccctaattgcct

SEQ ID NO: 1110982 - DNA, 25 bp, Homo sapien
ttccaacagagttcccaaaacatga

SEQ ID NO: 1110983 - DNA, 25 bp, Homo sapien
tcaccctcataccaccagctttctg

SEQ ID NO: 1110984 - DNA, 25 bp, Homo sapien
ttatctctttacaccatttagcagg

SEQ ID NO: 1110985 - DNA, 25 bp, Homo sapien
tacctgaatgcacaggacatctttc

SEQ ID NO: 1110986 - DNA, 25 bp, Homo sapien
tctctttacaccatttagcaggtaa

SEQ ID NO: 1110987 - DNA, 25 bp, Homo sapien
caggacatctttcagaggcatcact

SEQ ID NO: 1110988 - DNA, 25 bp, Homo sapien
aaagcattaactcgaaagtcccaag

SEQ ID NO: 1110989 - DNA, 25 bp, Homo sapien
tagtcctccaaagcattaactcgaa

SEQ ID NO: 1110990 - DNA, 25 bp, Homo sapien
caagccttcgcaatagtcctccaaa

SEQ ID NO: 1110991 - DNA, 25 bp, Homo sapien
caaaatacagtcaagccttcgcaat

SEQ ID NO: 1110992 - DNA, 25 bp, Homo sapien
ctaacaatcacggcagcaggttaag

SEQ ID NO: 1110993 - DNA, 25 bp, Homo sapien
ggcagcaggttaagggggcacaggt

SEQ ID NO: 1110994 - DNA, 25 bp, Homo sapien
ggttaagggggcacaggtgcatcac

SEQ ID NO: 1110995 - DNA, 25 bp, Homo sapien
gcaggttaagggggcacaggtgcat

SEQ ID NO: 1110996 - DNA, 25 bp, Homo sapien
tgtgtctggtaaaggcctaagaaaa

SEQ ID NO: 1110997 - DNA, 25 bp, Homo sapien
ctgtgtctggtaaaggcctaagaaa

SEQ ID NO: 1110998 - DNA, 25 bp, Homo sapien
gacaggattaaaaagcgtagctcag

SEQ ID NO: 1110999 - DNA, 25 bp, Homo sapien
tgctggggaccttgccattacttgc

SEQ ID NO: 1111000 - DNA, 25 bp, Homo sapien
tgaactcagagttgttgcaagcatg

SEQ ID NO: 1111001 - DNA, 25 bp, Homo sapien
aaagcgtagctcagatttcctcccc

SEQ ID NO: 1111002 - DNA, 25 bp, Homo sapien
tcctctacaaaacaatctagtgcaa

SEQ ID NO: 1111003 - DNA, 25 bp, Homo sapien
cattctccaggtaacagcctatggg

SEQ ID NO: 1111004 - DNA, 25 bp, Homo sapien
ttcagcatacctaagcagaaaattg

SEQ ID NO: 1111005 - DNA, 25 bp, Homo sapien
caatgtatacccaagcattctccag

SEQ ID NO: 1111006 - DNA, 25 bp, Homo sapien
aaggaagggccacaattgaagatca

SEQ ID NO: 1111007 - DNA, 25 bp, Homo sapien
ttaaggaagggccacaattgaagat

SEQ ID NO: 1111008 - DNA, 25 bp, Homo sapien
taaggaagggccacaattgaagatc

SEQ ID NO: 1111009 - DNA, 25 bp, Homo sapien
cttaaggaagggccacaattgaaga

SEQ ID NO: 1111010 - DNA, 25 bp, Homo sapien
tcaggtgtcacgtctgagccagcac

SEQ ID NO: 1111011 - DNA, 25 bp, Homo sapien
gagccagcacccatgtataagttgt

SEQ ID NO: 1111012 - DNA, 25 bp, Homo sapien
tcatttctcgttgagtgtcttatcg

SEQ ID NO: 1111013 - DNA, 25 bp, Homo sapien
tttctgtcatttctcgttgagtgtc

SEQ ID NO: 1111014 - DNA, 25 bp, Homo sapien
tcccctgcaaattccgtatgataca

SEQ ID NO: 1111015 - DNA, 25 bp, Homo sapien
gataccaatggttgaagaataaatg

SEQ ID NO: 1111016 - DNA, 25 bp, Homo sapien
cctcagctagctccttgatgatgca

SEQ ID NO: 1111017 - DNA, 25 bp, Homo sapien
ttttgagttacatggtgcacactcc

SEQ ID NO: 1111018 - DNA, 25 bp, Homo sapien
gaacaaacactgataccagtaactg

SEQ ID NO: 1111019 - DNA, 25 bp, Homo sapien
taaacagaatcacctaagggagaac

SEQ ID NO: 1111020 - DNA, 25 bp, Homo sapien
aaacactgatggagacaaatgaatc

SEQ ID NO: 1111021 - DNA, 25 bp, Homo sapien
cttctgagaatagtaaatgcaaagc

SEQ ID NO: 1111022 - DNA, 25 bp, Homo sapien
ttattccaatgttggccattgtaac

SEQ ID NO: 1111023 - DNA, 25 bp, Homo sapien
cacaggtttccagagaatgatttcc

SEQ ID NO: 1111024 - DNA, 25 bp, Homo sapien
taaggacagcctttcgtagaagaat

SEQ ID NO: 1111025 - DNA, 25 bp, Homo sapien
taagctgatgacatgcactccacag

SEQ ID NO: 1111026 - DNA, 25 bp, Homo sapien
tgccattcggagagcaaaaagtgtt

SEQ ID NO: 1111027 - DNA, 25 bp, Homo sapien
taggtgcttgctgatttctctgcaa

SEQ ID NO: 1111028 - DNA, 25 bp, Homo sapien
ggcattagacctcaacagatgattc

SEQ ID NO: 1111029 - DNA, 25 bp, Homo sapien
tataagggttagctacagagcggtg

SEQ ID NO: 1111030 - DNA, 25 bp, Homo sapien
gttctagccccacacagatttactg

SEQ ID NO: 1111031 - DNA, 25 bp, Homo sapien
taagatgttctctggcaaataggcc

SEQ ID NO: 1111032 - DNA, 25 bp, Homo sapien
gatctcctcaagtcagtacacatgg

SEQ ID NO: 1111033 - DNA, 25 bp, Homo sapien
cctggagcccctgaatgagagtttc

SEQ ID NO: 1111034 - DNA, 25 bp, Homo sapien
cattctagataggattgcagggtca

SEQ ID NO: 1111035 - DNA, 25 bp, Homo sapien
tattcatagaagcattgtacccagc

SEQ ID NO: 1111036 - DNA, 25 bp, Homo sapien
gatggtatacaggtgaagctagcaa

SEQ ID NO: 1111037 - DNA, 25 bp, Homo sapien
tgccagtaacaagttgaagtccaac

SEQ ID NO: 1111038 - DNA, 25 bp, Homo sapien
tcaagtccaaaagtgtgcaaacaag

SEQ ID NO: 1111039 - DNA, 25 bp, Homo sapien
tttgggttctaaactcagagtaggc

SEQ ID NO: 1111040 - DNA, 25 bp, Homo sapien
cagacaatactgcaacaatgcttgg

SEQ ID NO: 1111041 - DNA, 25 bp, Homo sapien
caaagagtgagtcctaaatgtttct

SEQ ID NO: 1111042 - DNA, 25 bp, Homo sapien
agtgctgtctacaaattagtttccg

SEQ ID NO: 1111043 - DNA, 25 bp, Homo sapien
gaccatgcttgtcagtacttacaaa

SEQ ID NO: 1111044 - DNA, 25 bp, Homo sapien
gcttcaccacctctttcaatctgtc

SEQ ID NO: 1111045 - DNA, 25 bp, Homo sapien
ttcactcagtccacactggcataga

SEQ ID NO: 1111046 - DNA, 25 bp, Homo sapien
gctgaattcataaggcattacactg

SEQ ID NO: 1111047 - DNA, 25 bp, Homo sapien
gccaagcctgtctgcactggaacaa

SEQ ID NO: 1111048 - DNA, 25 bp, Homo sapien
tggaacaaacagatgatgattcggc

SEQ ID NO: 1111049 - DNA, 25 bp, Homo sapien
aattgaggattaactgttctgtctg

SEQ ID NO: 1111050 - DNA, 25 bp, Homo sapien
gatttatcgagcagccacggtttgg

SEQ ID NO: 1111051 - DNA, 25 bp, Homo sapien
aactgttctgtctgatttatcgagc

SEQ ID NO: 1111052 - DNA, 25 bp, Homo sapien
gagcagccacggtttggagacagaa

SEQ ID NO: 1111053 - DNA, 25 bp, Homo sapien
tctcactcacacgtggaagcttaaa

SEQ ID NO: 1111054 - DNA, 25 bp, Homo sapien
tcactcacacgtggaagcttaaaat

SEQ ID NO: 1111055 - DNA, 25 bp, Homo sapien
ttctcactcacacgtggaagcttaa

SEQ ID NO: 1111056 - DNA, 25 bp, Homo sapien
cactcacacgtggaagcttaaaata

SEQ ID NO: 1111057 - DNA, 25 bp, Homo sapien
gagagaatctcctagcatagcagac

SEQ ID NO: 1111058 - DNA, 25 bp, Homo sapien
caccacattgtaaaagatagctgaa

SEQ ID NO: 1111059 - DNA, 25 bp, Homo sapien
gctattttagagtctgtacaccaca

SEQ ID NO: 1111060 - DNA, 25 bp, Homo sapien
tgttaccgttaagtcacagtttcca

SEQ ID NO: 1111061 - DNA, 25 bp, Homo sapien
tcctagccagaacaagtaggccaaa

SEQ ID NO: 1111062 - DNA, 25 bp, Homo sapien
gataaaacccaagtccttccatgat

SEQ ID NO: 1111063 - DNA, 25 bp, Homo sapien
tcatagttaacatcatattcagcag

SEQ ID NO: 1111064 - DNA, 25 bp, Homo sapien
aagtataatcatctctgctcacaga

SEQ ID NO: 1111065 - DNA, 25 bp, Homo sapien
taaaatggtctgaagataaacaact

SEQ ID NO: 1111066 - DNA, 25 bp, Homo sapien
gaataagtggacaaatttctagaaa

SEQ ID NO: 1111067 - DNA, 25 bp, Homo sapien
aaacactgctgacactgataaaggg

SEQ ID NO: 1111068 - DNA, 25 bp, Homo sapien
aacgtaagagaaaacatcagtccag

SEQ ID NO: 1111069 - DNA, 25 bp, Homo sapien
gataagctaggcatttgggagcaca

SEQ ID NO: 1111070 - DNA, 25 bp, Homo sapien
tatagaagtcttacagcagcatact

SEQ ID NO: 1111071 - DNA, 25 bp, Homo sapien
tatatggctggaacagaggtcatca

SEQ ID NO: 1111072 - DNA, 25 bp, Homo sapien
tattgaacagacagtatatgccaga

SEQ ID NO: 1111073 - DNA, 25 bp, Homo sapien
cagcttgcgcagatgattttcatca

SEQ ID NO: 1111074 - DNA, 25 bp, Homo sapien
tcaatgctacctccatgaacactag

SEQ ID NO: 1111075 - DNA, 25 bp, Homo sapien
tatagagaagactcaaagaaacatt

SEQ ID NO: 1111076 - DNA, 25 bp, Homo sapien
catgaacactagacttatagagaag

SEQ ID NO: 1111077 - DNA, 25 bp, Homo sapien
acattccaaatactgacggtggcca

SEQ ID NO: 1111078 - DNA, 25 bp, Homo sapien
tgttatagtacatccctgacggctg

SEQ ID NO: 1111079 - DNA, 25 bp, Homo sapien
agggaatcatttggctctgtagaac

SEQ ID NO: 1111080 - DNA, 25 bp, Homo sapien
ttcgataaacgacacaccagttgct

SEQ ID NO: 1111081 - DNA, 25 bp, Homo sapien
gttctaagggtcatataagggtctg

SEQ ID NO: 1111082 - DNA, 25 bp, Homo sapien
ttttcttgcataacccagggctgag

SEQ ID NO: 1111083 - DNA, 25 bp, Homo sapien
tctgcacattaacttgctctggaag

SEQ ID NO: 1111084 - DNA, 25 bp, Homo sapien
caaagcagcctatacgttctggata

SEQ ID NO: 1111085 - DNA, 25 bp, Homo sapien
tatcctctttatgtcgtctaggtta

SEQ ID NO: 1111086 - DNA, 25 bp, Homo sapien
tatgtcgtctaggttatccttaatt

SEQ ID NO: 1111087 - DNA, 25 bp, Homo sapien
ctctttatgtcgtctaggttatcct

SEQ ID NO: 1111088 - DNA, 25 bp, Homo sapien
ctttatgtcgtctaggttatcctta

SEQ ID NO: 1111089 - DNA, 25 bp, Homo sapien
tatagtggttaaatacagcatcaga

SEQ ID NO: 1111090 - DNA, 25 bp, Homo sapien
atagtggttaaatacagcatcagaa

SEQ ID NO: 1111091 - DNA, 25 bp, Homo sapien
tctgaaaccaagtctgcatagggcc

SEQ ID NO: 1111092 - DNA, 25 bp, Homo sapien
catagggcctatagtctctgatgtc

SEQ ID NO: 1111093 - DNA, 25 bp, Homo sapien
tggtgatatcagaccccactacggc

SEQ ID NO: 1111094 - DNA, 25 bp, Homo sapien
ctggacccaccaaaagaatacgaat

SEQ ID NO: 1111095 - DNA, 25 bp, Homo sapien
catttaattgtatattaggattgcc

SEQ ID NO: 1111096 - DNA, 25 bp, Homo sapien
taatatagcacaatggaggtggttc

SEQ ID NO: 1111097 - DNA, 25 bp, Homo sapien
caatggaggtggttctgatcaaaat

SEQ ID NO: 1111098 - DNA, 25 bp, Homo sapien
gaaagcttctctgtataatatagca

SEQ ID NO: 1111099 - DNA, 25 bp, Homo sapien
ctttatataactgcttcttccatcc

SEQ ID NO: 1111100 - DNA, 25 bp, Homo sapien
taggagaataggacttaccagtgcc

SEQ ID NO: 1111101 - DNA, 25 bp, Homo sapien
gcagaggcgtaatcccactgaagat

SEQ ID NO: 1111102 - DNA, 25 bp, Homo sapien
tctcattgggccatgaaacgcagag

SEQ ID NO: 1111103 - DNA, 25 bp, Homo sapien
tgctggcaagggtgtagtatcactc

SEQ ID NO: 1111104 - DNA, 25 bp, Homo sapien
agtgtcacacaacataaatggcaga

SEQ ID NO: 1111105 - DNA, 25 bp, Homo sapien
acaaccttttaagatgtggggaatg

SEQ ID NO: 1111106 - DNA, 25 bp, Homo sapien
tgatatctgtctggcatacaacctt

SEQ ID NO: 1111107 - DNA, 25 bp, Homo sapien
ctgtctggcatacaaccttttaaga

SEQ ID NO: 1111108 - DNA, 25 bp, Homo sapien
tatctgtctggcatacaacctttta

SEQ ID NO: 1111109 - DNA, 25 bp, Homo sapien
gaagtgtgcaacttacgggtaaaca

SEQ ID NO: 1111110 - DNA, 25 bp, Homo sapien
cacattatgggagttgaaattgcct

SEQ ID NO: 1111111 - DNA, 25 bp, Homo sapien
caaaaagtgcaagggattaagtgac

SEQ ID NO: 1111112 - DNA, 25 bp, Homo sapien
ggtaaacatctgttagtagcaaagc

SEQ ID NO: 1111113 - DNA, 25 bp, Homo sapien
caaacagtagcacctcctctttact

SEQ ID NO: 1111114 - DNA, 25 bp, Homo sapien
ctttccactgtgagcataatgccat

SEQ ID NO: 1111115 - DNA, 25 bp, Homo sapien
gccattatatctctcttataggaaa

SEQ ID NO: 1111116 - DNA, 25 bp, Homo sapien
tactgtaactactgatctccctctt

SEQ ID NO: 1111117 - DNA, 25 bp, Homo sapien
gaatgctcaggtgtaattggtttac

SEQ ID NO: 1111118 - DNA, 25 bp, Homo sapien
gctcaggtgtaattggtttacggga

SEQ ID NO: 1111119 - DNA, 25 bp, Homo sapien
tagaatgctcaggtgtaattggttt

SEQ ID NO: 1111120 - DNA, 25 bp, Homo sapien
aatgctcaggtgtaattggtttacg

SEQ ID NO: 1111121 - DNA, 25 bp, Homo sapien
taagacataagccacacagtgaatc

SEQ ID NO: 1111122 - DNA, 25 bp, Homo sapien
agattgtcaatagagttgatgtcta

SEQ ID NO: 1111123 - DNA, 25 bp, Homo sapien
ccaacattttagagtagagattgtc

SEQ ID NO: 1111124 - DNA, 25 bp, Homo sapien
atgtctaagacataagccacacagt

SEQ ID NO: 1111125 - DNA, 25 bp, Homo sapien
aaatgccagtcaaggaagctcccag

SEQ ID NO: 1111126 - DNA, 25 bp, Homo sapien
gctatgctaacaactgcttatgagg

SEQ ID NO: 1111127 - DNA, 25 bp, Homo sapien
tgatttcacagttctaatagggacc

SEQ ID NO: 1111128 - DNA, 25 bp, Homo sapien
gcatttatgagagcaaactgtactg

SEQ ID NO: 1111129 - DNA, 25 bp, Homo sapien
ttgagaagtcatagatctactcatg

SEQ ID NO: 1111130 - DNA, 25 bp, Homo sapien
tccactttagtaagcaaggccacat

SEQ ID NO: 1111131 - DNA, 25 bp, Homo sapien
gttgtcttgaagaacctcactgcaa

SEQ ID NO: 1111132 - DNA, 25 bp, Homo sapien
gtaagcaaggccacatatgctatac

SEQ ID NO: 1111133 - DNA, 25 bp, Homo sapien
tattggaaataggaatgcctagcat

SEQ ID NO: 1111134 - DNA, 25 bp, Homo sapien
cagtttcctcaagaggcaaatcttc

SEQ ID NO: 1111135 - DNA, 25 bp, Homo sapien
caaatctgaagcataatttccaacc

SEQ ID NO: 1111136 - DNA, 25 bp, Homo sapien
gcctcagtgcagagaggatgagaat

SEQ ID NO: 1111137 - DNA, 25 bp, Homo sapien
tctaaaaaatcatctgcagcccgca

SEQ ID NO: 1111138 - DNA, 25 bp, Homo sapien
accagtgatctatgacagggggaga

SEQ ID NO: 1111139 - DNA, 25 bp, Homo sapien
cagtgatctatgacagggggagaaa

SEQ ID NO: 1111140 - DNA, 25 bp, Homo sapien
aaaaggcaccagtgatctatgacag

SEQ ID NO: 1111141 - DNA, 25 bp, Homo sapien
aaggcaccagtgatctatgacaggg

SEQ ID NO: 1111142 - DNA, 25 bp, Homo sapien
ggtgggccccagtcatctaataact

SEQ ID NO: 1111143 - DNA, 25 bp, Homo sapien
aatgaaacatatatcctaatgtagc

SEQ ID NO: 1111144 - DNA, 25 bp, Homo sapien
gctttcaggactagggcatgcaggt

SEQ ID NO: 1111145 - DNA, 25 bp, Homo sapien
ctaatgtagctttcaggactagggc

SEQ ID NO: 1111146 - DNA, 25 bp, Homo sapien
caaatgcagggctgtaacgctctct

SEQ ID NO: 1111147 - DNA, 25 bp, Homo sapien
aatgcagggctgtaacgctctctca

SEQ ID NO: 1111148 - DNA, 25 bp, Homo sapien
tcaaatgcagggctgtaacgctctc

SEQ ID NO: 1111149 - DNA, 25 bp, Homo sapien
tgcagggctgtaacgctctctcaat

SEQ ID NO: 1111150 - DNA, 25 bp, Homo sapien
tagcccaccgcttctcaggttttgg

SEQ ID NO: 1111151 - DNA, 25 bp, Homo sapien
ccaaggacagaaggcaaaacgaaca

SEQ ID NO: 1111152 - DNA, 25 bp, Homo sapien
tacaggctgggccaaatgtcagaat

SEQ ID NO: 1111153 - DNA, 25 bp, Homo sapien
gattgactctcattgcggcacacca

SEQ ID NO: 1111154 - DNA, 25 bp, Homo sapien
ccagtaacctaaatggaaggacaca

SEQ ID NO: 1111155 - DNA, 25 bp, Homo sapien
ggacttcagaattatttggagcata

SEQ ID NO: 1111156 - DNA, 25 bp, Homo sapien
ttcttactgatttgccccagtaacc

SEQ ID NO: 1111157 - DNA, 25 bp, Homo sapien
tactagctttcacagctagtaagag

SEQ ID NO: 1111158 - DNA, 25 bp, Homo sapien
gtggtcacaaggcactaacttccct

SEQ ID NO: 1111159 - DNA, 25 bp, Homo sapien
tcaggctccaccaaagggttgggtg

SEQ ID NO: 1111160 - DNA, 25 bp, Homo sapien
ggtaactgtgaaaccatcctaatga

SEQ ID NO: 1111161 - DNA, 25 bp, Homo sapien
aatcatgccctactttttggacctg

SEQ ID NO: 1111162 - DNA, 25 bp, Homo sapien
gaaatgttcctcattgtttctctct

SEQ ID NO: 1111163 - DNA, 25 bp, Homo sapien
tccaactccttcataagggcactct

SEQ ID NO: 1111164 - DNA, 25 bp, Homo sapien
cttgcaggatctccaactccttcat

SEQ ID NO: 1111165 - DNA, 25 bp, Homo sapien
ccttgcaggatctccaactccttca

SEQ ID NO: 1111166 - DNA, 25 bp, Homo sapien
cagaggctctagcattgacatttca

SEQ ID NO: 1111167 - DNA, 25 bp, Homo sapien
gtgcaaggcagctagtcgggaacaa

SEQ ID NO: 1111168 - DNA, 25 bp, Homo sapien
tatttgggccaagcatgagggttac

SEQ ID NO: 1111169 - DNA, 25 bp, Homo sapien
gggcctgcatacctcatagaactca

SEQ ID NO: 1111170 - DNA, 25 bp, Homo sapien
gattccatgacgactttgatcagcc

SEQ ID NO: 1111171 - DNA, 25 bp, Homo sapien
tgggagggtacagctgaacattgac

SEQ ID NO: 1111172 - DNA, 25 bp, Homo sapien
gccatcttgtgggtaccttagcatt

SEQ ID NO: 1111173 - DNA, 25 bp, Homo sapien
cactgatcatctgtctggtagaaga

SEQ ID NO: 1111174 - DNA, 25 bp, Homo sapien
gagttaatgctgaaaatagttaata

SEQ ID NO: 1111175 - DNA, 25 bp, Homo sapien
tccctctttgctaggcactcatttt

SEQ ID NO: 1111176 - DNA, 25 bp, Homo sapien
aatcacagagacagtttctcccatc

SEQ ID NO: 1111177 - DNA, 25 bp, Homo sapien
gaaataattgaatcacagagacagt

SEQ ID NO: 1111178 - DNA, 25 bp, Homo sapien
ctgtagtatcagctagagctgaggg

SEQ ID NO: 1111179 - DNA, 25 bp, Homo sapien
ctgctctgtctggatagctaggcag

SEQ ID NO: 1111180 - DNA, 25 bp, Homo sapien
gtatcagctagagctgagggtagct

SEQ ID NO: 1111181 - DNA, 25 bp, Homo sapien
tagctaggcaggcacaaaatgggag

SEQ ID NO: 1111182 - DNA, 25 bp, Homo sapien
tagtggcaaatcatatatattttcc

SEQ ID NO: 1111183 - DNA, 25 bp, Homo sapien
ctagtggcaaatcatatatattttc

SEQ ID NO: 1111184 - DNA, 25 bp, Homo sapien
gtggcaaatcatatatattttccat

SEQ ID NO: 1111185 - DNA, 25 bp, Homo sapien
ggcaaatcatatatattttccatta

SEQ ID NO: 1111186 - DNA, 25 bp, Homo sapien
taagccgcttccctccaaaatgatt

SEQ ID NO: 1111187 - DNA, 25 bp, Homo sapien
caggatcttttcgtgcaaccatgtc

SEQ ID NO: 1111188 - DNA, 25 bp, Homo sapien
aaatcactgttagagtaggcccttg

SEQ ID NO: 1111189 - DNA, 25 bp, Homo sapien
gaatccatggacactacccttatag

SEQ ID NO: 1111190 - DNA, 25 bp, Homo sapien
tgtttctggtgtacatagtcctagt

SEQ ID NO: 1111191 - DNA, 25 bp, Homo sapien
tctggtgtacatagtcctagtttcc

SEQ ID NO: 1111192 - DNA, 25 bp, Homo sapien
tacatagtcctagtttccattctga

SEQ ID NO: 1111193 - DNA, 25 bp, Homo sapien
ggggagttatattttgtaacatcac

SEQ ID NO: 1111194 - DNA, 25 bp, Homo sapien
attgtctttaagtccataatcactt

SEQ ID NO: 1111195 - DNA, 25 bp, Homo sapien
ttccattgtctttaagtccataatc

SEQ ID NO: 1111196 - DNA, 25 bp, Homo sapien
ttgtctttaagtccataatcacttt

SEQ ID NO: 1111197 - DNA, 25 bp, Homo sapien
ccattgtctttaagtccataatcac

SEQ ID NO: 1111198 - DNA, 25 bp, Homo sapien
cttcgcatcgaaaaacttcataatc

SEQ ID NO: 1111199 - DNA, 25 bp, Homo sapien
taagactagcaaagtgcaagtacaa

SEQ ID NO: 1111200 - DNA, 25 bp, Homo sapien
ggaaatagcaatatgaacctttatg

SEQ ID NO: 1111201 - DNA, 25 bp, Homo sapien
aaggataaggataagcgatgctacc

SEQ ID NO: 1111202 - DNA, 25 bp, Homo sapien
taaacatggctatatgtatggcaac

SEQ ID NO: 1111203 - DNA, 25 bp, Homo sapien
agaataatgtagattagaagttgtc

SEQ ID NO: 1111204 - DNA, 25 bp, Homo sapien
tagattagaagttgtcgaataattg

SEQ ID NO: 1111205 - DNA, 25 bp, Homo sapien
atgtagattagaagttgtcgaataa

SEQ ID NO: 1111206 - DNA, 25 bp, Homo sapien
agattagaagttgtcgaataattgg

SEQ ID NO: 1111207 - DNA, 25 bp, Homo sapien
tgaccccttttatctttctttcatc

SEQ ID NO: 1111208 - DNA, 25 bp, Homo sapien
tttatctttctttcatccagtgaat

SEQ ID NO: 1111209 - DNA, 25 bp, Homo sapien
ccttttatctttctttcatccagtg

SEQ ID NO: 1111210 - DNA, 25 bp, Homo sapien
atgaccccttttatctttctttcat

SEQ ID NO: 1111211 - DNA, 25 bp, Homo sapien
ggcagacagtaagctcttcctgagc

SEQ ID NO: 1111212 - DNA, 25 bp, Homo sapien
tcaaggcagacagtaagctcttcct

SEQ ID NO: 1111213 - DNA, 25 bp, Homo sapien
aaggcagacagtaagctcttcctga

SEQ ID NO: 1111214 - DNA, 25 bp, Homo sapien
ctcaaggcagacagtaagctcttcc

SEQ ID NO: 1111215 - DNA, 25 bp, Homo sapien
ttcgtatttgttgaaccagggatcc

SEQ ID NO: 1111216 - DNA, 25 bp, Homo sapien
ccagggatccatatggttcataagt

SEQ ID NO: 1111217 - DNA, 25 bp, Homo sapien
ttcccagctccaattggacccagca

SEQ ID NO: 1111218 - DNA, 25 bp, Homo sapien
gatgcgttacatgcccttggaaaac

SEQ ID NO: 1111219 - DNA, 25 bp, Homo sapien
atatcccagttgtattagtgcccac

SEQ ID NO: 1111220 - DNA, 25 bp, Homo sapien
gatatcccagttgtattagtgccca

SEQ ID NO: 1111221 - DNA, 25 bp, Homo sapien
cagatatcccagttgtattagtgcc

SEQ ID NO: 1111222 - DNA, 25 bp, Homo sapien
tctcagatatcccagttgtattagt

SEQ ID NO: 1111223 - DNA, 25 bp, Homo sapien
tctatatgtaataaagttgatctgc

SEQ ID NO: 1111224 - DNA, 25 bp, Homo sapien
ctatatgtaataaagttgatctgca

SEQ ID NO: 1111225 - DNA, 25 bp, Homo sapien
ttgagatgaagtctatatgtaataa

SEQ ID NO: 1111226 - DNA, 25 bp, Homo sapien
attgagatgaagtctatatgtaata

SEQ ID NO: 1111227 - DNA, 25 bp, Homo sapien
taccgttcaagatatagaatatgtc

SEQ ID NO: 1111228 - DNA, 25 bp, Homo sapien
ctggtatctatcacgaatgttaccg

SEQ ID NO: 1111229 - DNA, 25 bp, Homo sapien
cgtctctaatagagtatgtcctata

SEQ ID NO: 1111230 - DNA, 25 bp, Homo sapien
gatatagaatatgtcatccctgcac

SEQ ID NO: 1111231 - DNA, 25 bp, Homo sapien
gggaggcatatcttaacagcccatg

SEQ ID NO: 1111232 - DNA, 25 bp, Homo sapien
cagccatacgtctcagtcaggtggg

SEQ ID NO: 1111233 - DNA, 25 bp, Homo sapien
gattcagtttctagtcacggtcctc

SEQ ID NO: 1111234 - DNA, 25 bp, Homo sapien
gctatgacacattatacagatcggg

SEQ ID NO: 1111235 - DNA, 25 bp, Homo sapien
gataagagaggcaatctgcccacag

SEQ ID NO: 1111236 - DNA, 25 bp, Homo sapien
tggtaccatcaagcagagcgcaagg

SEQ ID NO: 1111237 - DNA, 25 bp, Homo sapien
tcatctagcacttctctgttgggaa

SEQ ID NO: 1111238 - DNA, 25 bp, Homo sapien
cttctctaagaagggagtagcagca

SEQ ID NO: 1111239 - DNA, 25 bp, Homo sapien
aggagaagtattgaatagagctggc

SEQ ID NO: 1111240 - DNA, 25 bp, Homo sapien
ttctgtccttcagcgatggggaatc

SEQ ID NO: 1111241 - DNA, 25 bp, Homo sapien
gaatagagctggcatcaaatacaaa

SEQ ID NO: 1111242 - DNA, 25 bp, Homo sapien
tcaatgtagtcatgatgatttaatt

SEQ ID NO: 1111243 - DNA, 25 bp, Homo sapien
cagcgtttaccaactcccttcgaat

SEQ ID NO: 1111244 - DNA, 25 bp, Homo sapien
tcccttcgaattcttttgatcttta

SEQ ID NO: 1111245 - DNA, 25 bp, Homo sapien
tcgaattcttttgatctttactatc

SEQ ID NO: 1111246 - DNA, 25 bp, Homo sapien
ccttcgaattcttttgatctttact

SEQ ID NO: 1111247 - DNA, 25 bp, Homo sapien
cttagcaaagtggaatgagactcac

SEQ ID NO: 1111248 - DNA, 25 bp, Homo sapien
tagtggtattacccttagcaaagtg

SEQ ID NO: 1111249 - DNA, 25 bp, Homo sapien
tggtattacccttagcaaagtggaa

SEQ ID NO: 1111250 - DNA, 25 bp, Homo sapien
cttagtggtattacccttagcaaag

SEQ ID NO: 1111251 - DNA, 25 bp, Homo sapien
taaggtcaccttttgtaatcaaatc

SEQ ID NO: 1111252 - DNA, 25 bp, Homo sapien
gtgagcaaagccacatgtaccacac

SEQ ID NO: 1111253 - DNA, 25 bp, Homo sapien
ctatttctataaggtcaccttttgt

SEQ ID NO: 1111254 - DNA, 25 bp, Homo sapien
tccatgctatccacatgagtgagca

SEQ ID NO: 1111255 - DNA, 25 bp, Homo sapien
tgtgtttacgaagggcatcattcat

SEQ ID NO: 1111256 - DNA, 25 bp, Homo sapien
ccagaaaatgtgtttacgaagggca

SEQ ID NO: 1111257 - DNA, 25 bp, Homo sapien
aatgtgtttacgaagggcatcattc

SEQ ID NO: 1111258 - DNA, 25 bp, Homo sapien
gaaaatgtgtttacgaagggcatca

SEQ ID NO: 1111259 - DNA, 25 bp, Homo sapien
tatacacactagtatgtgattgtag

SEQ ID NO: 1111260 - DNA, 25 bp, Homo sapien
gaactaatcccctgcaaataccaag

SEQ ID NO: 1111261 - DNA, 25 bp, Homo sapien
gattttggtaacaatgcaaagtcct

SEQ ID NO: 1111262 - DNA, 25 bp, Homo sapien
cacactagtatgtgattgtagtaac

SEQ ID NO: 1111263 - DNA, 25 bp, Homo sapien
tatcattgcattctcccaactggtg

SEQ ID NO: 1111264 - DNA, 25 bp, Homo sapien
gtaacacactggctcaaccttaaag

SEQ ID NO: 1111265 - DNA, 25 bp, Homo sapien
tgctcagcactgtcaataaacgttg

SEQ ID NO: 1111266 - DNA, 25 bp, Homo sapien
tgaaagccgtttccctgtgccgttc

SEQ ID NO: 1111267 - DNA, 25 bp, Homo sapien
ccatagcattcgtctcagagcagaa

SEQ ID NO: 1111268 - DNA, 25 bp, Homo sapien
ccaccgagatgtcagaaagagcaaa

SEQ ID NO: 1111269 - DNA, 25 bp, Homo sapien
ccactcagaggaataattgctaacc

SEQ ID NO: 1111270 - DNA, 25 bp, Homo sapien
tagaacatcctttacagggtccagc

SEQ ID NO: 1111271 - DNA, 25 bp, Homo sapien
aagcttccacaccaccaaaccatct

SEQ ID NO: 1111272 - DNA, 25 bp, Homo sapien
caagcttccacaccaccaaaccatc

SEQ ID NO: 1111273 - DNA, 25 bp, Homo sapien
tatctcaggaaaggcaaccagaggg

SEQ ID NO: 1111274 - DNA, 25 bp, Homo sapien
caaaggtctcatctgatcaggagca

SEQ ID NO: 1111275 - DNA, 25 bp, Homo sapien
tattaggagcacacgtaccatgagg

SEQ ID NO: 1111276 - DNA, 25 bp, Homo sapien
taatagatccaagcagaaagtagcc

SEQ ID NO: 1111277 - DNA, 25 bp, Homo sapien
ccttgtgcacagttgataatttcct

SEQ ID NO: 1111278 - DNA, 25 bp, Homo sapien
cttgtgcacagttgataatttcctc

SEQ ID NO: 1111279 - DNA, 25 bp, Homo sapien
ttttccttgtgcacagttgataatt

SEQ ID NO: 1111280 - DNA, 25 bp, Homo sapien
tttttttccttgtgcacagttgata

SEQ ID NO: 1111281 - DNA, 25 bp, Homo sapien
catccctttggtcttagatacttct

SEQ ID NO: 1111282 - DNA, 25 bp, Homo sapien
tacaagtactacaatgttctatgca

SEQ ID NO: 1111283 - DNA, 25 bp, Homo sapien
tctgtgatgtgaggaaatttacgtg

SEQ ID NO: 1111284 - DNA, 25 bp, Homo sapien
tcatcctagacattaataaaacaca

SEQ ID NO: 1111285 - DNA, 25 bp, Homo sapien
catgtcacccactccagcagtggaa

SEQ ID NO: 1111286 - DNA, 25 bp, Homo sapien
acacaattgatcttggctcctatca

SEQ ID NO: 1111287 - DNA, 25 bp, Homo sapien
ccttcacagacatgatatagagatt

SEQ ID NO: 1111288 - DNA, 25 bp, Homo sapien
aacacaattgatcttggctcctatc

SEQ ID NO: 1111289 - DNA, 25 bp, Homo sapien
tcttccagaagattgtcagttgaac

SEQ ID NO: 1111290 - DNA, 25 bp, Homo sapien
tgaacatgatgactcctaggtgcag

SEQ ID NO: 1111291 - DNA, 25 bp, Homo sapien
ccagctcagctcaagggtaagattt

SEQ ID NO: 1111292 - DNA, 25 bp, Homo sapien
attccagcctattagaaatgcagtg

SEQ ID NO: 1111293 - DNA, 25 bp, Homo sapien
gattcctgagaaataattccttcta

SEQ ID NO: 1111294 - DNA, 25 bp, Homo sapien
gcacttcattaccacatcaaattta

SEQ ID NO: 1111295 - DNA, 25 bp, Homo sapien
ttattgtctaactggcctacccagc

SEQ ID NO: 1111296 - DNA, 25 bp, Homo sapien
tccagaaaaccatctgcacttcatt

SEQ ID NO: 1111297 - DNA, 25 bp, Homo sapien
tactgctttgatggcaagtgaaaat

SEQ ID NO: 1111298 - DNA, 25 bp, Homo sapien
ctgctttgatggcaagtgaaaatgg

SEQ ID NO: 1111299 - DNA, 25 bp, Homo sapien
gctttgatggcaagtgaaaatgggc

SEQ ID NO: 1111300 - DNA, 25 bp, Homo sapien
tgctttgatggcaagtgaaaatggg

SEQ ID NO: 1111301 - DNA, 25 bp, Homo sapien
aaactcagatgacgtaaagggccca

SEQ ID NO: 1111302 - DNA, 25 bp, Homo sapien
cagctgcgtagaaatgcccatgaag

SEQ ID NO: 1111303 - DNA, 25 bp, Homo sapien
tgtctgcagaccaatgtcgtacact

SEQ ID NO: 1111304 - DNA, 25 bp, Homo sapien
gaaatgagctgtgccaaaataaaga

SEQ ID NO: 1111305 - DNA, 25 bp, Homo sapien
tatttgaggtctacaacatgatttt

SEQ ID NO: 1111306 - DNA, 25 bp, Homo sapien
tgaggcagttgttcttaccaccatt

SEQ ID NO: 1111307 - DNA, 25 bp, Homo sapien
aggcgggcacctccatgccaggtta

SEQ ID NO: 1111308 - DNA, 25 bp, Homo sapien
gcctggtctacaacatggtcttatg

SEQ ID NO: 1111309 - DNA, 25 bp, Homo sapien
tagctggcaaagaaactaacctcct

SEQ ID NO: 1111310 - DNA, 25 bp, Homo sapien
cttacataatgccttagctggcaaa

SEQ ID NO: 1111311 - DNA, 25 bp, Homo sapien
gctggcaaagaaactaacctcctcc

SEQ ID NO: 1111312 - DNA, 25 bp, Homo sapien
ccttagctggcaaagaaactaacct

SEQ ID NO: 1111313 - DNA, 25 bp, Homo sapien
tgtgctcgacttttcataaaattca

SEQ ID NO: 1111314 - DNA, 25 bp, Homo sapien
tacaatagctaaattatagccaaaa

SEQ ID NO: 1111315 - DNA, 25 bp, Homo sapien
acagagctgtgctcgacttttcata

SEQ ID NO: 1111316 - DNA, 25 bp, Homo sapien
cagaacagagctgtgctcgactttt

SEQ ID NO: 1111317 - DNA, 25 bp, Homo sapien
ttaatgtacaggtaaggtgatacag

SEQ ID NO: 1111318 - DNA, 25 bp, Homo sapien
aatgtacaggtaaggtgatacagac

SEQ ID NO: 1111319 - DNA, 25 bp, Homo sapien
cttaatgtacaggtaaggtgataca

SEQ ID NO: 1111320 - DNA, 25 bp, Homo sapien
taatgtacaggtaaggtgatacaga

SEQ ID NO: 1111321 - DNA, 25 bp, Homo sapien
tttgaaatcattctgtgctcatagt

SEQ ID NO: 1111322 - DNA, 25 bp, Homo sapien
ctcagcccaatagaatcatcattct

SEQ ID NO: 1111323 - DNA, 25 bp, Homo sapien
gcccaatagaatcatcattcttatg

SEQ ID NO: 1111324 - DNA, 25 bp, Homo sapien
atagaatcatcattcttatgctgct

SEQ ID NO: 1111325 - DNA, 25 bp, Homo sapien
caatagaatcatcattcttatgctg

SEQ ID NO: 1111326 - DNA, 25 bp, Homo sapien
gtaggtgcaggtgttttatctggca

SEQ ID NO: 1111327 - DNA, 25 bp, Homo sapien
tccggaagagacaaatgaagtctgc

SEQ ID NO: 1111328 - DNA, 25 bp, Homo sapien
ttccggaagagacaaatgaagtctg

SEQ ID NO: 1111329 - DNA, 25 bp, Homo sapien
tgagtaggtgcaggtgttttatctg

SEQ ID NO: 1111330 - DNA, 25 bp, Homo sapien
taataaccgaagcgtccagcctttc

SEQ ID NO: 1111331 - DNA, 25 bp, Homo sapien
ctaataaccgaagcgtccagccttt

SEQ ID NO: 1111332 - DNA, 25 bp, Homo sapien
actgtccttgtcgagtgattccatc

SEQ ID NO: 1111333 - DNA, 25 bp, Homo sapien
tgtcgagtgattccatcatatttga

SEQ ID NO: 1111334 - DNA, 25 bp, Homo sapien
gaatggccagcgcactagatatttt

SEQ ID NO: 1111335 - DNA, 25 bp, Homo sapien
agtctggatcatttgcattcgtaac

SEQ ID NO: 1111336 - DNA, 25 bp, Homo sapien
gtggtacagctttttataaggctac

SEQ ID NO: 1111337 - DNA, 25 bp, Homo sapien
tgtggtacagctttttataaggcta

SEQ ID NO: 1111338 - DNA, 25 bp, Homo sapien
agctgcctgaactggcgtgactgcg

SEQ ID NO: 1111339 - DNA, 25 bp, Homo sapien
cagctgcctgaactggcgtgactgc

SEQ ID NO: 1111340 - DNA, 25 bp, Homo sapien
tgaactggcgtgactgcggtgacct

SEQ ID NO: 1111341 - DNA, 25 bp, Homo sapien
gcctgaactggcgtgactgcggtga

SEQ ID NO: 1111342 - DNA, 25 bp, Homo sapien
ctaccatccgactaaccctctgttt

SEQ ID NO: 1111343 - DNA, 25 bp, Homo sapien
ccctctgtttaactccagagttgaa

SEQ ID NO: 1111344 - DNA, 25 bp, Homo sapien
taccatccgactaaccctctgttta

SEQ ID NO: 1111345 - DNA, 25 bp, Homo sapien
ctccagagttgaaagccactccttg

SEQ ID NO: 1111346 - DNA, 25 bp, Homo sapien
ttcggctaggagaatgcatgacagg

SEQ ID NO: 1111347 - DNA, 25 bp, Homo sapien
ctttcggctaggagaatgcatgaca

SEQ ID NO: 1111348 - DNA, 25 bp, Homo sapien
tttcggctaggagaatgcatgacag

SEQ ID NO: 1111349 - DNA, 25 bp, Homo sapien
tcggctaggagaatgcatgacaggc

SEQ ID NO: 1111350 - DNA, 25 bp, Homo sapien
tgcatttttccagttagaaataaaa

SEQ ID NO: 1111351 - DNA, 25 bp, Homo sapien
tttgcatttttccagttagaaataa

SEQ ID NO: 1111352 - DNA, 25 bp, Homo sapien
ttgcatttttccagttagaaataaa

SEQ ID NO: 1111353 - DNA, 25 bp, Homo sapien
ctttgcatttttccagttagaaata

SEQ ID NO: 1111354 - DNA, 25 bp, Homo sapien
tccacagcttcacaagccttctgat

SEQ ID NO: 1111355 - DNA, 25 bp, Homo sapien
cagcaatgtagaggatcaccaatgt

SEQ ID NO: 1111356 - DNA, 25 bp, Homo sapien
tcagcaatgtagaggatcaccaatg

SEQ ID NO: 1111357 - DNA, 25 bp, Homo sapien
caatgtagaggatcaccaatgtggc

SEQ ID NO: 1111358 - DNA, 25 bp, Homo sapien
gtcatgccggatttcattcctctca

SEQ ID NO: 1111359 - DNA, 25 bp, Homo sapien
tgtcatgccggatttcattcctctc

SEQ ID NO: 1111360 - DNA, 25 bp, Homo sapien
tcatgccggatttcattcctctcac

SEQ ID NO: 1111361 - DNA, 25 bp, Homo sapien
ctgtcatgccggatttcattcctct

SEQ ID NO: 1111362 - DNA, 25 bp, Homo sapien
cgagcctttggtcgtactgaccttc

SEQ ID NO: 1111363 - DNA, 25 bp, Homo sapien
tggaagttcaaggattaggaacaca

SEQ ID NO: 1111364 - DNA, 25 bp, Homo sapien
tcgtactgaccttcattggaagttc

SEQ ID NO: 1111365 - DNA, 25 bp, Homo sapien
ttgacgagcctttggtcgtactgac

SEQ ID NO: 1111366 - DNA, 25 bp, Homo sapien
ctgggttctaggtcatcgttataca

SEQ ID NO: 1111367 - DNA, 25 bp, Homo sapien
ggtcatcgttatacatgtccttgtc

SEQ ID NO: 1111368 - DNA, 25 bp, Homo sapien
tgcttacagcctgaaccagaaaact

SEQ ID NO: 1111369 - DNA, 25 bp, Homo sapien
tagagccaccgtgctgtttcacttc

SEQ ID NO: 1111370 - DNA, 25 bp, Homo sapien
tccacaggtatcgacatgtgtcacc

SEQ ID NO: 1111371 - DNA, 25 bp, Homo sapien
gtataattccacaggtatcgacatg

SEQ ID NO: 1111372 - DNA, 25 bp, Homo sapien
tcgacatgtgtcacctgtgttgcag

SEQ ID NO: 1111373 - DNA, 25 bp, Homo sapien
tattatgctgtataattccacaggt

SEQ ID NO: 1111374 - DNA, 25 bp, Homo sapien
ggagcacttccactttttgatagcc

SEQ ID NO: 1111375 - DNA, 25 bp, Homo sapien
ggtaaagccatgtgccatctactgc

SEQ ID NO: 1111376 - DNA, 25 bp, Homo sapien
taccatgactttcgctcttaactgg

SEQ ID NO: 1111377 - DNA, 25 bp, Homo sapien
taagtccatctctaaagaagcaatg

SEQ ID NO: 1111378 - DNA, 25 bp, Homo sapien
ctgaatgatgttctttttattttcc

SEQ ID NO: 1111379 - DNA, 25 bp, Homo sapien
gttctttttattttcctgaatcagc

SEQ ID NO: 1111380 - DNA, 25 bp, Homo sapien
tctttttattttcctgaatcagcat

SEQ ID NO: 1111381 - DNA, 25 bp, Homo sapien
atgttctttttattttcctgaatca

SEQ ID NO: 1111382 - DNA, 25 bp, Homo sapien
gctaaaaatagccaaccaattgatc

SEQ ID NO: 1111383 - DNA, 25 bp, Homo sapien
aatagccaaccaattgatccctagg

SEQ ID NO: 1111384 - DNA, 25 bp, Homo sapien
tcatttgatcatatcagcttggtca

SEQ ID NO: 1111385 - DNA, 25 bp, Homo sapien
cataactgatggtcaaggctttgat

SEQ ID NO: 1111386 - DNA, 25 bp, Homo sapien
ctttacttaaatcgccttttgagat

SEQ ID NO: 1111387 - DNA, 25 bp, Homo sapien
acttaaatcgccttttgagatttct

SEQ ID NO: 1111388 - DNA, 25 bp, Homo sapien
cttaaatcgccttttgagatttctc

SEQ ID NO: 1111389 - DNA, 25 bp, Homo sapien
tacttaaatcgccttttgagatttc

SEQ ID NO: 1111390 - DNA, 25 bp, Homo sapien
gactttcacggctaacagtggagcc

SEQ ID NO: 1111391 - DNA, 25 bp, Homo sapien
cagtggagccaaatatccagcgtct

SEQ ID NO: 1111392 - DNA, 25 bp, Homo sapien
gaactctacaattgatggtgtccca

SEQ ID NO: 1111393 - DNA, 25 bp, Homo sapien
tccatttgcctctggccttatagcc

SEQ ID NO: 1111394 - DNA, 25 bp, Homo sapien
tgccttcttctgtagcatatttctc

SEQ ID NO: 1111395 - DNA, 25 bp, Homo sapien
gccttcttctgtagcatatttctcc

SEQ ID NO: 1111396 - DNA, 25 bp, Homo sapien
ccttgccttcttctgtagcatattt

SEQ ID NO: 1111397 - DNA, 25 bp, Homo sapien
cttgccttcttctgtagcatatttc

SEQ ID NO: 1111398 - DNA, 25 bp, Homo sapien
tggacccatgttgatgagccaaaac

SEQ ID NO: 1111399 - DNA, 25 bp, Homo sapien
taccctacattgatggcttgagcaa

SEQ ID NO: 1111400 - DNA, 25 bp, Homo sapien
gtttagctgcaacggatctcttctg

SEQ ID NO: 1111401 - DNA, 25 bp, Homo sapien
gctgtatatcaacatctaagggcca

SEQ ID NO: 1111402 - DNA, 25 bp, Homo sapien
ggagtgatatcactgcacccaagga

SEQ ID NO: 1111403 - DNA, 25 bp, Homo sapien
agtcccctaccacctcggtaatgag

SEQ ID NO: 1111404 - DNA, 25 bp, Homo sapien
cacgagaagtatatgaatgtcctga

SEQ ID NO: 1111405 - DNA, 25 bp, Homo sapien
ctgtgactcgtgttgcctttgaaac

SEQ ID NO: 1111406 - DNA, 25 bp, Homo sapien
ttctcatatgtgataggtcttgtgc

SEQ ID NO: 1111407 - DNA, 25 bp, Homo sapien
catttctcatatgtgataggtcttg

SEQ ID NO: 1111408 - DNA, 25 bp, Homo sapien
gcatttctcatatgtgataggtctt

SEQ ID NO: 1111409 - DNA, 25 bp, Homo sapien
tttctcatatgtgataggtcttgtg

SEQ ID NO: 1111410 - DNA, 25 bp, Homo sapien
ttgggaattcctgcaacattacatt

SEQ ID NO: 1111411 - DNA, 25 bp, Homo sapien
acattacatttgaaatcaaagcatg

SEQ ID NO: 1111412 - DNA, 25 bp, Homo sapien
ctttgggaattcctgcaacattaca

SEQ ID NO: 1111413 - DNA, 25 bp, Homo sapien
attacatttgaaatcaaagcatgca

SEQ ID NO: 1111414 - DNA, 25 bp, Homo sapien
ttcataaacaggttgctttcggtac

SEQ ID NO: 1111415 - DNA, 25 bp, Homo sapien
aacaggttgctttcggtaccacttg

SEQ ID NO: 1111416 - DNA, 25 bp, Homo sapien
ttcggtaccacttgtactgataatt

SEQ ID NO: 1111417 - DNA, 25 bp, Homo sapien
gttgctttcggtaccacttgtactg

SEQ ID NO: 1111418 - DNA, 25 bp, Homo sapien
gaaattgtggcttttcatccttcat

SEQ ID NO: 1111419 - DNA, 25 bp, Homo sapien
ctggaaattgtggcttttcatcctt

SEQ ID NO: 1111420 - DNA, 25 bp, Homo sapien
tggaaattgtggcttttcatccttc

SEQ ID NO: 1111421 - DNA, 25 bp, Homo sapien
ggaaattgtggcttttcatccttca

SEQ ID NO: 1111422 - DNA, 25 bp, Homo sapien
tatttagatacttttcaattgccat

SEQ ID NO: 1111423 - DNA, 25 bp, Homo sapien
gttatttagatacttttcaattgcc

SEQ ID NO: 1111424 - DNA, 25 bp, Homo sapien
ttgttatttagatacttttcaattg

SEQ ID NO: 1111425 - DNA, 25 bp, Homo sapien
ttatttagatacttttcaattgcca

SEQ ID NO: 1111426 - DNA, 25 bp, Homo sapien
gtgtctgtagttgtcacctctaccc

SEQ ID NO: 1111427 - DNA, 25 bp, Homo sapien
tcacctctaccccaatcttccactc

SEQ ID NO: 1111428 - DNA, 25 bp, Homo sapien
ttaactggatccatagaccaacgtc

SEQ ID NO: 1111429 - DNA, 25 bp, Homo sapien
aatttcgtgtctgtagttgtcacct

SEQ ID NO: 1111430 - DNA, 25 bp, Homo sapien
tcatctctagctctctcaactccaa

SEQ ID NO: 1111431 - DNA, 25 bp, Homo sapien
gttataccaactgtgtcctcatctc

SEQ ID NO: 1111432 - DNA, 25 bp, Homo sapien
tggtagccatgacttggtcctgtta

SEQ ID NO: 1111433 - DNA, 25 bp, Homo sapien
tgtaaactgttctggtagccatgac

SEQ ID NO: 1111434 - DNA, 25 bp, Homo sapien
catactctagtatatcaggataagt

SEQ ID NO: 1111435 - DNA, 25 bp, Homo sapien
tatagtcaattacaccatctgtccc

SEQ ID NO: 1111436 - DNA, 25 bp, Homo sapien
gagtttttcaaaatagtcaacatag

SEQ ID NO: 1111437 - DNA, 25 bp, Homo sapien
tttcaaaatagtcaacatagcccat

SEQ ID NO: 1111438 - DNA, 25 bp, Homo sapien
agggcttttgatccttatatggata

SEQ ID NO: 1111439 - DNA, 25 bp, Homo sapien
taagggcttttgatccttatatgga

SEQ ID NO: 1111440 - DNA, 25 bp, Homo sapien
tttaagggcttttgatccttatatg

SEQ ID NO: 1111441 - DNA, 25 bp, Homo sapien
ggcttttgatccttatatggatata

SEQ ID NO: 1111442 - DNA, 25 bp, Homo sapien
ttgttaagtttctaagctgatcagc

SEQ ID NO: 1111443 - DNA, 25 bp, Homo sapien
taagtttctaagctgatcagcattc

SEQ ID NO: 1111444 - DNA, 25 bp, Homo sapien
tccatcattgttaagtttctaagct

SEQ ID NO: 1111445 - DNA, 25 bp, Homo sapien
gcattctgtggttctctgccagaca

SEQ ID NO: 1111446 - DNA, 25 bp, Homo sapien
tctttctataacatgagatgcccac

SEQ ID NO: 1111447 - DNA, 25 bp, Homo sapien
ttctataacatgagatgcccacaag

SEQ ID NO: 1111448 - DNA, 25 bp, Homo sapien
tttctctctaggatatgactctatg

SEQ ID NO: 1111449 - DNA, 25 bp, Homo sapien
tgactctatgttccactattctttc

SEQ ID NO: 1111450 - DNA, 25 bp, Homo sapien
gaatctgcacctaatgaattaagtt

SEQ ID NO: 1111451 - DNA, 25 bp, Homo sapien
gcttttggttatactggacatgaag

SEQ ID NO: 1111452 - DNA, 25 bp, Homo sapien
aaattcagaggtcctgaagagaatc

SEQ ID NO: 1111453 - DNA, 25 bp, Homo sapien
taatgggatgtaaattcaagttatg

SEQ ID NO: 1111454 - DNA, 25 bp, Homo sapien
tcaacagattaaagtcgtggctcat

SEQ ID NO: 1111455 - DNA, 25 bp, Homo sapien
ctgcaacccaactgctgagtacgac

SEQ ID NO: 1111456 - DNA, 25 bp, Homo sapien
caactgctgagtacgacttcaacag

SEQ ID NO: 1111457 - DNA, 25 bp, Homo sapien
gctgagtacgacttcaacagattaa

SEQ ID NO: 1111458 - DNA, 25 bp, Homo sapien
gcacacaggacgaaagacagcacat

SEQ ID NO: 1111459 - DNA, 25 bp, Homo sapien
tccaaagcacacgtgcagtggagaa

SEQ ID NO: 1111460 - DNA, 25 bp, Homo sapien
ctcaacaggaagtcacagggcaagg

SEQ ID NO: 1111461 - DNA, 25 bp, Homo sapien
tatcctcattggctagactcaacag

SEQ ID NO: 1111462 - DNA, 25 bp, Homo sapien
tatccaggtataataggttgccgcc

SEQ ID NO: 1111463 - DNA, 25 bp, Homo sapien
cttttgatggtactatgatggtata

SEQ ID NO: 1111464 - DNA, 25 bp, Homo sapien
tgtggtctacttcaacagcctctgc

SEQ ID NO: 1111465 - DNA, 25 bp, Homo sapien
ctcttgctttaatcgtgtggtctac

SEQ ID NO: 1111466 - DNA, 25 bp, Homo sapien
gattcagaaaagtctaagtgcagga

SEQ ID NO: 1111467 - DNA, 25 bp, Homo sapien
cctgattttccagggacgaaggagc

SEQ ID NO: 1111468 - DNA, 25 bp, Homo sapien
ttttgggggcacagaacttgcaggt

SEQ ID NO: 1111469 - DNA, 25 bp, Homo sapien
aagtctaagtgcaggatgtgtgtcc

SEQ ID NO: 1111470 - DNA, 25 bp, Homo sapien
cagaaacagccaaagtcatttttaa

SEQ ID NO: 1111471 - DNA, 25 bp, Homo sapien
tcagaaacagccaaagtcattttta

SEQ ID NO: 1111472 - DNA, 25 bp, Homo sapien
acgtatatggggaaagatcctcaga

SEQ ID NO: 1111473 - DNA, 25 bp, Homo sapien
tcctcagaaacatttgcccagcctt

SEQ ID NO: 1111474 - DNA, 25 bp, Homo sapien
atttatctgtatctcccaaacgtat

SEQ ID NO: 1111475 - DNA, 25 bp, Homo sapien
tctgtatctcccaaacgtatatggg

SEQ ID NO: 1111476 - DNA, 25 bp, Homo sapien
tcagacagccatgccaggcattact

SEQ ID NO: 1111477 - DNA, 25 bp, Homo sapien
tggaaatttcagaaacagccgttgt

SEQ ID NO: 1111478 - DNA, 25 bp, Homo sapien
gcctccagctcctttggaaatttca

SEQ ID NO: 1111479 - DNA, 25 bp, Homo sapien
attacttccttaactgcctccagct

SEQ ID NO: 1111480 - DNA, 25 bp, Homo sapien
tgttcctgcaattgccactatttcc

SEQ ID NO: 1111481 - DNA, 25 bp, Homo sapien
ggtgttcctgcaattgccactattt

SEQ ID NO: 1111482 - DNA, 25 bp, Homo sapien
agaggtgttcctgcaattgccacta

SEQ ID NO: 1111483 - DNA, 25 bp, Homo sapien
gaggtgttcctgcaattgccactat

SEQ ID NO: 1111484 - DNA, 25 bp, Homo sapien
ggcaggtacagacaatggtcttgtc

SEQ ID NO: 1111485 - DNA, 25 bp, Homo sapien
ttatggaaggaatgtttcaggctag

SEQ ID NO: 1111486 - DNA, 25 bp, Homo sapien
atggtcttgtctacaagatcctttt

SEQ ID NO: 1111487 - DNA, 25 bp, Homo sapien
tatggaaggaatgtttcaggctagg

SEQ ID NO: 1111488 - DNA, 25 bp, Homo sapien
tgtgaaacatgttggtcagtgcctg

SEQ ID NO: 1111489 - DNA, 25 bp, Homo sapien
caaggttctattgtagcttcttcga

SEQ ID NO: 1111490 - DNA, 25 bp, Homo sapien
tatcaataaatggtaccacagtgcc

SEQ ID NO: 1111491 - DNA, 25 bp, Homo sapien
ggtctatcaaagcagggtgattgtg

SEQ ID NO: 1111492 - DNA, 25 bp, Homo sapien
cacttttatgagagtccacatgata

SEQ ID NO: 1111493 - DNA, 25 bp, Homo sapien
ttttagccaagccattgctgaggat

SEQ ID NO: 1111494 - DNA, 25 bp, Homo sapien
gagagtccacatgataattcctgcc

SEQ ID NO: 1111495 - DNA, 25 bp, Homo sapien
ggatgtcgtttactatattgctcaa

SEQ ID NO: 1111496 - DNA, 25 bp, Homo sapien
ttgaaataataacatcagtgtctgc

SEQ ID NO: 1111497 - DNA, 25 bp, Homo sapien
tattgttggctcatgattgtagggc

SEQ ID NO: 1111498 - DNA, 25 bp, Homo sapien
tggctcatgattgtagggcttgaaa

SEQ ID NO: 1111499 - DNA, 25 bp, Homo sapien
gtagggcttgaaataataacatcag

SEQ ID NO: 1111500 - DNA, 25 bp, Homo sapien
aagtgatctgtgtctcaaagttgcc

SEQ ID NO: 1111501 - DNA, 25 bp, Homo sapien
tctgtgtctcaaagttgccttcttc

SEQ ID NO: 1111502 - DNA, 25 bp, Homo sapien
gaagacaagtgatctgtgtctcaaa

SEQ ID NO: 1111503 - DNA, 25 bp, Homo sapien
cctgaagacaagtgatctgtgtctc

SEQ ID NO: 1111504 - DNA, 25 bp, Homo sapien
tattgcctgaacaaaacagtaaagt

SEQ ID NO: 1111505 - DNA, 25 bp, Homo sapien
gtgttctctttattgcctgaacaaa

SEQ ID NO: 1111506 - DNA, 25 bp, Homo sapien
agtcacttgaaattctcctcctgtt

SEQ ID NO: 1111507 - DNA, 25 bp, Homo sapien
gcctgaacaaaacagtaaagtcact

SEQ ID NO: 1111508 - DNA, 25 bp, Homo sapien
ttctggcgcttctcacatttgttgc

SEQ ID NO: 1111509 - DNA, 25 bp, Homo sapien
taattctggcgcttctcacatttgt

SEQ ID NO: 1111510 - DNA, 25 bp, Homo sapien
attctggcgcttctcacatttgttg

SEQ ID NO: 1111511 - DNA, 25 bp, Homo sapien
ttaattctggcgcttctcacatttg

SEQ ID NO: 1111512 - DNA, 25 bp, Homo sapien
acatcaattctggaacagtcagccc

SEQ ID NO: 1111513 - DNA, 25 bp, Homo sapien
agatgagctgcgttcctcacggagc

SEQ ID NO: 1111514 - DNA, 25 bp, Homo sapien
acggagcacgggcacatcaattctg

SEQ ID NO: 1111515 - DNA, 25 bp, Homo sapien
ggagccaacacatttgctggtacag

SEQ ID NO: 1111516 - DNA, 25 bp, Homo sapien
tcccatactcccttcatgccttttg

SEQ ID NO: 1111517 - DNA, 25 bp, Homo sapien
ctcccatactcccttcatgcctttt

SEQ ID NO: 1111518 - DNA, 25 bp, Homo sapien
attccttcccatactcccatactcc

SEQ ID NO: 1111519 - DNA, 25 bp, Homo sapien
tactcccatactcccttcatgcctt

SEQ ID NO: 1111520 - DNA, 25 bp, Homo sapien
ctgcctcaatggctcattgcgctga

SEQ ID NO: 1111521 - DNA, 25 bp, Homo sapien
tgcgctgatgtgttcgaatttcact

SEQ ID NO: 1111522 - DNA, 25 bp, Homo sapien
tgctcggtgactctacattcacctg

SEQ ID NO: 1111523 - DNA, 25 bp, Homo sapien
tgctacaaacttgcctgctcggtga

SEQ ID NO: 1111524 - DNA, 25 bp, Homo sapien
aatacagacacagtttacaggagaa

SEQ ID NO: 1111525 - DNA, 25 bp, Homo sapien
ggtggttgccttcataattccacag

SEQ ID NO: 1111526 - DNA, 25 bp, Homo sapien
gacggtgctaaggaagctgcctata

SEQ ID NO: 1111527 - DNA, 25 bp, Homo sapien
catcttgtgctaagggacggtgcta

SEQ ID NO: 1111528 - DNA, 25 bp, Homo sapien
atctttaaaattgtgaaggtcacag

SEQ ID NO: 1111529 - DNA, 25 bp, Homo sapien
tatctttaaaattgtgaaggtcaca

SEQ ID NO: 1111530 - DNA, 25 bp, Homo sapien
agtatctttaaaattgtgaaggtca

SEQ ID NO: 1111531 - DNA, 25 bp, Homo sapien
gtatctttaaaattgtgaaggtcac

SEQ ID NO: 1111532 - DNA, 25 bp, Homo sapien
cctgaggtgacacatattgttcttt

SEQ ID NO: 1111533 - DNA, 25 bp, Homo sapien
tgaggtgacacatattgttctttga

SEQ ID NO: 1111534 - DNA, 25 bp, Homo sapien
ccctgaggtgacacatattgttctt

SEQ ID NO: 1111535 - DNA, 25 bp, Homo sapien
ctgaggtgacacatattgttctttg

SEQ ID NO: 1111536 - DNA, 25 bp, Homo sapien
gaacacatgggcacaaagaaacaac

SEQ ID NO: 1111537 - DNA, 25 bp, Homo sapien
acaacagaccctgggacctactgga

SEQ ID NO: 1111538 - DNA, 25 bp, Homo sapien
ccctgggacctactggagggtggag

SEQ ID NO: 1111539 - DNA, 25 bp, Homo sapien
gccagaaagggcatttttgatgaga

SEQ ID NO: 1111540 - DNA, 25 bp, Homo sapien
tttctgctggtagcaggactgaacc

SEQ ID NO: 1111541 - DNA, 25 bp, Homo sapien
ctttctgctggtagcaggactgaac

SEQ ID NO: 1111542 - DNA, 25 bp, Homo sapien
ttctgctggtagcaggactgaacct

SEQ ID NO: 1111543 - DNA, 25 bp, Homo sapien
cttctgcctttgcttcatgagtcac

SEQ ID NO: 1111544 - DNA, 25 bp, Homo sapien
tgcctttgcttcatgagtcacctca

SEQ ID NO: 1111545 - DNA, 25 bp, Homo sapien
tctgcctttgcttcatgagtcacct

SEQ ID NO: 1111546 - DNA, 25 bp, Homo sapien
ttcttctgcctttgcttcatgagtc

SEQ ID NO: 1111547 - DNA, 25 bp, Homo sapien
tctttgagtcagttgatattgatgt

SEQ ID NO: 1111548 - DNA, 25 bp, Homo sapien
ttttcctcattgcagacgtagttaa

SEQ ID NO: 1111549 - DNA, 25 bp, Homo sapien
cgtagttaagttgactgccaaacgt

SEQ ID NO: 1111550 - DNA, 25 bp, Homo sapien
cattgcagacgtagttaagttgact

SEQ ID NO: 1111551 - DNA, 25 bp, Homo sapien
tgattctgatgtcatgccgaaattg

SEQ ID NO: 1111552 - DNA, 25 bp, Homo sapien
gaagttcctatctctctttgctcga

SEQ ID NO: 1111553 - DNA, 25 bp, Homo sapien
gccgaaattgagtccactgagggat

SEQ ID NO: 1111554 - DNA, 25 bp, Homo sapien
actgagggatgaagttcctatctct

SEQ ID NO: 1111555 - DNA, 25 bp, Homo sapien
tctgctggatacatgtaaaaggtca

SEQ ID NO: 1111556 - DNA, 25 bp, Homo sapien
tcaaatctattgagcaagtgggtaa

SEQ ID NO: 1111557 - DNA, 25 bp, Homo sapien
ttcacacttgaacccatgaaaatgg

SEQ ID NO: 1111558 - DNA, 25 bp, Homo sapien
ttcattggaggatcaaaagaaccac

SEQ ID NO: 1111559 - DNA, 25 bp, Homo sapien
atctcaatttgaacttcatgagcct

SEQ ID NO: 1111560 - DNA, 25 bp, Homo sapien
aaaccacagtggcaacaatctcaat

SEQ ID NO: 1111561 - DNA, 25 bp, Homo sapien
tttgcaagtaaatctgctggtacca

SEQ ID NO: 1111562 - DNA, 25 bp, Homo sapien
ctttcctttgcaagtaaatctgctg

SEQ ID NO: 1111563 - DNA, 25 bp, Homo sapien
cctttgcaagtaaatctgctggtac

SEQ ID NO: 1111564 - DNA, 25 bp, Homo sapien
ttcctttgcaagtaaatctgctggt

SEQ ID NO: 1111565 - DNA, 25 bp, Homo sapien
ttttggaaacagagatatcagccac

SEQ ID NO: 1111566 - DNA, 25 bp, Homo sapien
ggaaacagagatatcagccacaact

SEQ ID NO: 1111567 - DNA, 25 bp, Homo sapien
tattttggaaacagagatatcagcc

SEQ ID NO: 1111568 - DNA, 25 bp, Homo sapien
tatcagccacaactgtgtattcaga

SEQ ID NO: 1111569 - DNA, 25 bp, Homo sapien
aaggccaactttatccaaacgtgct

SEQ ID NO: 1111570 - DNA, 25 bp, Homo sapien
ggccaactttatccaaacgtgctaa

SEQ ID NO: 1111571 - DNA, 25 bp, Homo sapien
agaaggccaactttatccaaacgtg

SEQ ID NO: 1111572 - DNA, 25 bp, Homo sapien
gaaggccaactttatccaaacgtgc

SEQ ID NO: 1111573 - DNA, 25 bp, Homo sapien
aaaatcctgaggactaatgcattca

SEQ ID NO: 1111574 - DNA, 25 bp, Homo sapien
aaatcctgaggactaatgcattcag

SEQ ID NO: 1111575 - DNA, 25 bp, Homo sapien
catggtaacccccgatccaaatcct

SEQ ID NO: 1111576 - DNA, 25 bp, Homo sapien
ctggtgacatgcctcaagtgctgct

SEQ ID NO: 1111577 - DNA, 25 bp, Homo sapien
ctagccctggtgacatgcctcaagt

SEQ ID NO: 1111578 - DNA, 25 bp, Homo sapien
ccctggtgacatgcctcaagtgctg

SEQ ID NO: 1111579 - DNA, 25 bp, Homo sapien
tagccctggtgacatgcctcaagtg

SEQ ID NO: 1111580 - DNA, 25 bp, Homo sapien
aatgaatgagtggcaatttctccac

SEQ ID NO: 1111581 - DNA, 25 bp, Homo sapien
ctggaatgaatgagtggcaatttct

SEQ ID NO: 1111582 - DNA, 25 bp, Homo sapien
ggaatgaatgagtggcaatttctcc

SEQ ID NO: 1111583 - DNA, 25 bp, Homo sapien
gaatgaatgagtggcaatttctcca

SEQ ID NO: 1111584 - DNA, 25 bp, Homo sapien
catcctccaatggcaatgcctttcc

SEQ ID NO: 1111585 - DNA, 25 bp, Homo sapien
tcctccaatggcaatgcctttccat

SEQ ID NO: 1111586 - DNA, 25 bp, Homo sapien
atcctccaatggcaatgcctttcca

SEQ ID NO: 1111587 - DNA, 25 bp, Homo sapien
agattgtgagtcataaactcatcag

SEQ ID NO: 1111588 - DNA, 25 bp, Homo sapien
gattgtgagtcataaactcatcagc

SEQ ID NO: 1111589 - DNA, 25 bp, Homo sapien
attgtgagtcataaactcatcagct

SEQ ID NO: 1111590 - DNA, 25 bp, Homo sapien
tcttcatggatactgaactccagtc

SEQ ID NO: 1111591 - DNA, 25 bp, Homo sapien
tcttgctgaacattccatttgacat

SEQ ID NO: 1111592 - DNA, 25 bp, Homo sapien
cactgactgttgagcacactctatc

SEQ ID NO: 1111593 - DNA, 25 bp, Homo sapien
tagtgaatcttcatggatactgaac

SEQ ID NO: 1111594 - DNA, 25 bp, Homo sapien
cctcggaaaggctatgactcagtaa

SEQ ID NO: 1111595 - DNA, 25 bp, Homo sapien
taaccgtgtaagatgcctcagagaa

SEQ ID NO: 1111596 - DNA, 25 bp, Homo sapien
tcgatgactctttagcctcggaaag

SEQ ID NO: 1111597 - DNA, 25 bp, Homo sapien
tctccaaacccgatatactgggcta

SEQ ID NO: 1111598 - DNA, 25 bp, Homo sapien
agaatttgagaaatcatagattact

SEQ ID NO: 1111599 - DNA, 25 bp, Homo sapien
cttaaaagaatttgagaaatcatag

SEQ ID NO: 1111600 - DNA, 25 bp, Homo sapien
tttgagaaatcatagattactcctt

SEQ ID NO: 1111601 - DNA, 25 bp, Homo sapien
aatttgagaaatcatagattactcc

SEQ ID NO: 1111602 - DNA, 25 bp, Homo sapien
tttctacaatttgaactcgtgtgag

SEQ ID NO: 1111603 - DNA, 25 bp, Homo sapien
atttctacaatttgaactcgtgtga

SEQ ID NO: 1111604 - DNA, 25 bp, Homo sapien
ggatttctacaatttgaactcgtgt

SEQ ID NO: 1111605 - DNA, 25 bp, Homo sapien
gatttctacaatttgaactcgtgtg

SEQ ID NO: 1111606 - DNA, 25 bp, Homo sapien
cctcttggcttaacgtcacactggg

SEQ ID NO: 1111607 - DNA, 25 bp, Homo sapien
gacaaacataagagcctgagatgct

SEQ ID NO: 1111608 - DNA, 25 bp, Homo sapien
tccagtggaaggtggctagcaaaaa

SEQ ID NO: 1111609 - DNA, 25 bp, Homo sapien
gatgctgccttatgaacaactgact

SEQ ID NO: 1111610 - DNA, 25 bp, Homo sapien
caaagttgcaagttctctgtgtctc

SEQ ID NO: 1111611 - DNA, 25 bp, Homo sapien
gaatcacccctttcggcaagatcaa

SEQ ID NO: 1111612 - DNA, 25 bp, Homo sapien
gaatttcaaatgctcctgaggactc

SEQ ID NO: 1111613 - DNA, 25 bp, Homo sapien
tggtaaggtatttccacactttcaa

SEQ ID NO: 1111614 - DNA, 25 bp, Homo sapien
catcagataagcatgcctttgccaa

SEQ ID NO: 1111615 - DNA, 25 bp, Homo sapien
ggctcggtagttaacactgcaaaca

SEQ ID NO: 1111616 - DNA, 25 bp, Homo sapien
gctcaagacactggctcggtagtta

SEQ ID NO: 1111617 - DNA, 25 bp, Homo sapien
tgtgtatgctcaagctcaagacact

SEQ ID NO: 1111618 - DNA, 25 bp, Homo sapien
cactgcagcactgcgtatcagacat

SEQ ID NO: 1111619 - DNA, 25 bp, Homo sapien
caaccaatacttaccaaaaatcctg

SEQ ID NO: 1111620 - DNA, 25 bp, Homo sapien
caagcaggaactgctgttgtgttgc

SEQ ID NO: 1111621 - DNA, 25 bp, Homo sapien
ttgtgttgccacatgaccagtgttg

SEQ ID NO: 1111622 - DNA, 25 bp, Homo sapien
accaacagccactgctgtcgcagtt

SEQ ID NO: 1111623 - DNA, 25 bp, Homo sapien
gcccctccacatccaagcaggaact

SEQ ID NO: 1111624 - DNA, 25 bp, Homo sapien
agcaaaagttcccttagcatttatc

SEQ ID NO: 1111625 - DNA, 25 bp, Homo sapien
ctaggcatacctgacatctggaaac

SEQ ID NO: 1111626 - DNA, 25 bp, Homo sapien
gatcagaaaccaatatcacaaccac

SEQ ID NO: 1111627 - DNA, 25 bp, Homo sapien
tcagaaaccaatatcacaaccacca

SEQ ID NO: 1111628 - DNA, 25 bp, Homo sapien
ggatcagaaaccaatatcacaacca

SEQ ID NO: 1111629 - DNA, 25 bp, Homo sapien
ctggatcagaaaccaatatcacaac

SEQ ID NO: 1111630 - DNA, 25 bp, Homo sapien
tcatctgcaggtaccatgatccaaa

SEQ ID NO: 1111631 - DNA, 25 bp, Homo sapien
catctgcaggtaccatgatccaaac

SEQ ID NO: 1111632 - DNA, 25 bp, Homo sapien
gagtgtgctccgtggcctttgaagt

SEQ ID NO: 1111633 - DNA, 25 bp, Homo sapien
gataacccagagacattgtttggag

SEQ ID NO: 1111634 - DNA, 25 bp, Homo sapien
tggaagagactgaaatcttagctct

SEQ ID NO: 1111635 - DNA, 25 bp, Homo sapien
ttgaagtgccattaccttctataga

SEQ ID NO: 1111636 - DNA, 25 bp, Homo sapien
ctgtgtcagaagccaacagatcaaa

SEQ ID NO: 1111637 - DNA, 25 bp, Homo sapien
tgtcagaagccaacagatcaaatag

SEQ ID NO: 1111638 - DNA, 25 bp, Homo sapien
gtcagaagccaacagatcaaataga

SEQ ID NO: 1111639 - DNA, 25 bp, Homo sapien
tgtgtcagaagccaacagatcaaat

SEQ ID NO: 1111640 - DNA, 25 bp, Homo sapien
caccatcttttacaccataagaact

SEQ ID NO: 1111641 - DNA, 25 bp, Homo sapien
tgcccctgctacatgtacttttgct

SEQ ID NO: 1111642 - DNA, 25 bp, Homo sapien
ttttgcttctaccagtggagttgcc

SEQ ID NO: 1111643 - DNA, 25 bp, Homo sapien
catatctgtagccattgcactgccc

SEQ ID NO: 1111644 - DNA, 25 bp, Homo sapien
ctcttgatggtgtttatcttgacgg

SEQ ID NO: 1111645 - DNA, 25 bp, Homo sapien
tgtttatcttgacggtgtttacctc

SEQ ID NO: 1111646 - DNA, 25 bp, Homo sapien
cacaccaagtattctcttgatggtg

SEQ ID NO: 1111647 - DNA, 25 bp, Homo sapien
tgatggtgtttatcttgacggtgtt

SEQ ID NO: 1111648 - DNA, 25 bp, Homo sapien
gatggacagacaagtcctcaaacat

SEQ ID NO: 1111649 - DNA, 25 bp, Homo sapien
gtcctcaaacataccaagcacatgc

SEQ ID NO: 1111650 - DNA, 25 bp, Homo sapien
tgatggacagacaagtcctcaaaca

SEQ ID NO: 1111651 - DNA, 25 bp, Homo sapien
tcaaacataccaagcacatgctcct

SEQ ID NO: 1111652 - DNA, 25 bp, Homo sapien
gcctagtgattactggtccttttgg

SEQ ID NO: 1111653 - DNA, 25 bp, Homo sapien
ccagggtagcagcagactcctgtcc

SEQ ID NO: 1111654 - DNA, 25 bp, Homo sapien
agctggggcttgctcctgttccagg

SEQ ID NO: 1111655 - DNA, 25 bp, Homo sapien
cttttggctctttggttgaaagaat

SEQ ID NO: 1111656 - DNA, 25 bp, Homo sapien
tcagagaactgtcactgcggctgcc

SEQ ID NO: 1111657 - DNA, 25 bp, Homo sapien
gcggctgccgtctcgtcttctacag

SEQ ID NO: 1111658 - DNA, 25 bp, Homo sapien
gggttgttacagtcagcggatcata

SEQ ID NO: 1111659 - DNA, 25 bp, Homo sapien
taatgtaggtcagagaactgtcact

SEQ ID NO: 1111660 - DNA, 25 bp, Homo sapien
cagttgaggctttctaattgtgtag

SEQ ID NO: 1111661 - DNA, 25 bp, Homo sapien
tgtagtccctgaagaaatagcactt

SEQ ID NO: 1111662 - DNA, 25 bp, Homo sapien
gcttattgacaccaaccagttgagg

SEQ ID NO: 1111663 - DNA, 25 bp, Homo sapien
cacatttccatgtgcagaaaatgga

SEQ ID NO: 1111664 - DNA, 25 bp, Homo sapien
tatttgatttgttcagcagtggccc

SEQ ID NO: 1111665 - DNA, 25 bp, Homo sapien
atatttgatttgttcagcagtggcc

SEQ ID NO: 1111666 - DNA, 25 bp, Homo sapien
atttgatttgttcagcagtggccct

SEQ ID NO: 1111667 - DNA, 25 bp, Homo sapien
gactgagagttcttaagtgtgaaaa

SEQ ID NO: 1111668 - DNA, 25 bp, Homo sapien
ctgactgagagttcttaagtgtgaa

SEQ ID NO: 1111669 - DNA, 25 bp, Homo sapien
gctgactgagagttcttaagtgtga

SEQ ID NO: 1111670 - DNA, 25 bp, Homo sapien
tggctgactgagagttcttaagtgt

SEQ ID NO: 1111671 - DNA, 25 bp, Homo sapien
cagggccccttctggccacaattaa

SEQ ID NO: 1111672 - DNA, 25 bp, Homo sapien
tggatttgcccaaaagcttcagggc

SEQ ID NO: 1111673 - DNA, 25 bp, Homo sapien
agggtggatttgcccaaaagcttca

SEQ ID NO: 1111674 - DNA, 25 bp, Homo sapien
gtggatttgcccaaaagcttcaggg

SEQ ID NO: 1111675 - DNA, 25 bp, Homo sapien
tgagcttcctagagtgtcactggcc

SEQ ID NO: 1111676 - DNA, 25 bp, Homo sapien
gactcaagttggcactaacgctaga

SEQ ID NO: 1111677 - DNA, 25 bp, Homo sapien
gcctgaactggcctaaaaagactca

SEQ ID NO: 1111678 - DNA, 25 bp, Homo sapien
tttccagtttggtgcatgagcttcc

SEQ ID NO: 1111679 - DNA, 25 bp, Homo sapien
tcagaatctcactcagaaccgctca

SEQ ID NO: 1111680 - DNA, 25 bp, Homo sapien
gattcagaatctcactcagaaccgc

SEQ ID NO: 1111681 - DNA, 25 bp, Homo sapien
aggattcagaatctcactcagaacc

SEQ ID NO: 1111682 - DNA, 25 bp, Homo sapien
ttcagaatctcactcagaaccgctc

SEQ ID NO: 1111683 - DNA, 25 bp, Homo sapien
aaggatacccaggaattgaactcag

SEQ ID NO: 1111684 - DNA, 25 bp, Homo sapien
tacccaggaattgaactcagctctg

SEQ ID NO: 1111685 - DNA, 25 bp, Homo sapien
gatacccaggaattgaactcagctc

SEQ ID NO: 1111686 - DNA, 25 bp, Homo sapien
ggatacccaggaattgaactcagct

SEQ ID NO: 1111687 - DNA, 25 bp, Homo sapien
aaaatccattggttatcattgtccc

SEQ ID NO: 1111688 - DNA, 25 bp, Homo sapien
cctccttgcatctaaaatccattgg

SEQ ID NO: 1111689 - DNA, 25 bp, Homo sapien
cccagagctgactcaattggctcat

SEQ ID NO: 1111690 - DNA, 25 bp, Homo sapien
ttggttatcattgtcccagagctga

SEQ ID NO: 1111691 - DNA, 25 bp, Homo sapien
gtgataatccaccaataaatttctt

SEQ ID NO: 1111692 - DNA, 25 bp, Homo sapien
tctttcttagtcgtgatgataaacc

SEQ ID NO: 1111693 - DNA, 25 bp, Homo sapien
taaatttcttatccaagaacacagg

SEQ ID NO: 1111694 - DNA, 25 bp, Homo sapien
cgccatcctgatattcactgtgctg

SEQ ID NO: 1111695 - DNA, 25 bp, Homo sapien
tcaggtatgggttcttctgttactt

SEQ ID NO: 1111696 - DNA, 25 bp, Homo sapien
tgtaaccgacatgtaacacgcagag

SEQ ID NO: 1111697 - DNA, 25 bp, Homo sapien
cattttcagtgccagtatccttgtg

SEQ ID NO: 1111698 - DNA, 25 bp, Homo sapien
taatgtagttggtcatgtaaccgac

SEQ ID NO: 1111699 - DNA, 25 bp, Homo sapien
ggaagaaatgtgcggagaagagtgt

SEQ ID NO: 1111700 - DNA, 25 bp, Homo sapien
aagaaatgtgcggagaagagtgtga

SEQ ID NO: 1111701 - DNA, 25 bp, Homo sapien
gaaatgtgcggagaagagtgtgaag

SEQ ID NO: 1111702 - DNA, 25 bp, Homo sapien
aatgtgcggagaagagtgtgaagag

SEQ ID NO: 1111703 - DNA, 25 bp, Homo sapien
tccatgtcctcaaaaccttcaaaat

SEQ ID NO: 1111704 - DNA, 25 bp, Homo sapien
gcattgtgcaagttcctacaaatac

SEQ ID NO: 1111705 - DNA, 25 bp, Homo sapien
aatacaaagactaacaagacagcat

SEQ ID NO: 1111706 - DNA, 25 bp, Homo sapien
cattgtgcaagttcctacaaataca

SEQ ID NO: 1111707 - DNA, 25 bp, Homo sapien
gaagtgcaaacgcattgagacaagc

SEQ ID NO: 1111708 - DNA, 25 bp, Homo sapien
ttgcgattggcctgatggtgatcca

SEQ ID NO: 1111709 - DNA, 25 bp, Homo sapien
tcaagtaaagctgtagggaaggcat

SEQ ID NO: 1111710 - DNA, 25 bp, Homo sapien
taggcctgaataaattgcaacgtct

SEQ ID NO: 1111711 - DNA, 25 bp, Homo sapien
aatgcctgttgcctctcggggtcct

SEQ ID NO: 1111712 - DNA, 25 bp, Homo sapien
caccagtattaaacaatgcctgttg

SEQ ID NO: 1111713 - DNA, 25 bp, Homo sapien
ctggattgtagccagttcaccagta

SEQ ID NO: 1111714 - DNA, 25 bp, Homo sapien
cttttggtcaaatggcaagacaagt

SEQ ID NO: 1111715 - DNA, 25 bp, Homo sapien
gtttgacctggatctattgacttac

SEQ ID NO: 1111716 - DNA, 25 bp, Homo sapien
gatctattgacttacttaactgagg

SEQ ID NO: 1111717 - DNA, 25 bp, Homo sapien
tgacttacttaactgaggtccttgg

SEQ ID NO: 1111718 - DNA, 25 bp, Homo sapien
ctgtcttgtttgacctggatctatt

SEQ ID NO: 1111719 - DNA, 25 bp, Homo sapien
tatcgggatctgtgttttcaaaaat

SEQ ID NO: 1111720 - DNA, 25 bp, Homo sapien
tgttgtatcgggatctgtgttttca

SEQ ID NO: 1111721 - DNA, 25 bp, Homo sapien
tttactagtactattgttgctgttg

SEQ ID NO: 1111722 - DNA, 25 bp, Homo sapien
tattgttgctgttgtatcgggatct

SEQ ID NO: 1111723 - DNA, 25 bp, Homo sapien
ccctgaggcagagcttaagggagtt

SEQ ID NO: 1111724 - DNA, 25 bp, Homo sapien
tacatccccctgaggcagagcttaa

SEQ ID NO: 1111725 - DNA, 25 bp, Homo sapien
actgactgggaaagattgacatatt

SEQ ID NO: 1111726 - DNA, 25 bp, Homo sapien
catatttgagctctggtgtggcctt

SEQ ID NO: 1111727 - DNA, 25 bp, Homo sapien
aaacctgcctccatcgcactccaca

SEQ ID NO: 1111728 - DNA, 25 bp, Homo sapien
gcactccacaatatgaactaagtct

SEQ ID NO: 1111729 - DNA, 25 bp, Homo sapien
tgcctccatcgcactccacaatatg

SEQ ID NO: 1111730 - DNA, 25 bp, Homo sapien
tccatcgcactccacaatatgaact

SEQ ID NO: 1111731 - DNA, 25 bp, Homo sapien
cataggtttcttctatagcatcttt

SEQ ID NO: 1111732 - DNA, 25 bp, Homo sapien
ctccataggtttcttctatagcatc

SEQ ID NO: 1111733 - DNA, 25 bp, Homo sapien
cagttctccataggtttcttctata

SEQ ID NO: 1111734 - DNA, 25 bp, Homo sapien
aggtttcttctatagcatcttttac

SEQ ID NO: 1111735 - DNA, 25 bp, Homo sapien
gttgtttgatgatgaagtggacctc

SEQ ID NO: 1111736 - DNA, 25 bp, Homo sapien
tgatgatgaagtggacctctttgag

SEQ ID NO: 1111737 - DNA, 25 bp, Homo sapien
tggtcaccaaccagtttgaccagtt

SEQ ID NO: 1111738 - DNA, 25 bp, Homo sapien
gctttggctgcatggtcaccaacca

SEQ ID NO: 1111739 - DNA, 25 bp, Homo sapien
cagtcgctgggagctacatctcaag

SEQ ID NO: 1111740 - DNA, 25 bp, Homo sapien
gaatagatgcccactcttaccaggg

SEQ ID NO: 1111741 - DNA, 25 bp, Homo sapien
gaatgatgtgctaagactgaaaccc

SEQ ID NO: 1111742 - DNA, 25 bp, Homo sapien
gaaaacatctctctgcaggcctaaa

SEQ ID NO: 1111743 - DNA, 25 bp, Homo sapien
tgatcccctagttgccacacagaag

SEQ ID NO: 1111744 - DNA, 25 bp, Homo sapien
taatccacggcaggtggctctgaag

SEQ ID NO: 1111745 - DNA, 25 bp, Homo sapien
cagtgacactcagcataatccacgg

SEQ ID NO: 1111746 - DNA, 25 bp, Homo sapien
agccaacggccagctgaagaacaca

SEQ ID NO: 1111747 - DNA, 25 bp, Homo sapien
catactaatgcagctatcatgacct

SEQ ID NO: 1111748 - DNA, 25 bp, Homo sapien
tcaatccatactaatgcagctatca

SEQ ID NO: 1111749 - DNA, 25 bp, Homo sapien
tgcagctatcatgacctttatcttt

SEQ ID NO: 1111750 - DNA, 25 bp, Homo sapien
ttcccataaagtgaactgtctttct

SEQ ID NO: 1111751 - DNA, 25 bp, Homo sapien
ccttaaatcaatcaagtcgattggc

SEQ ID NO: 1111752 - DNA, 25 bp, Homo sapien
acgtcttaggagctaggtgtccaga

SEQ ID NO: 1111753 - DNA, 25 bp, Homo sapien
cttaaatcaatcaagtcgattggca

SEQ ID NO: 1111754 - DNA, 25 bp, Homo sapien
ttcttaacgtcttaggagctaggtg

SEQ ID NO: 1111755 - DNA, 25 bp, Homo sapien
tcttccttgatacctcagtctccca

SEQ ID NO: 1111756 - DNA, 25 bp, Homo sapien
ccaagtgcagggattagagtgtgac

SEQ ID NO: 1111757 - DNA, 25 bp, Homo sapien
gtgcagggattagagtgtgacccat

SEQ ID NO: 1111758 - DNA, 25 bp, Homo sapien
tcttgcttattttctattcttcctt

SEQ ID NO: 1111759 - DNA, 25 bp, Homo sapien
aaggcttgccggcttttgctgtgtc

SEQ ID NO: 1111760 - DNA, 25 bp, Homo sapien
ctggataccgtttcttgtgctcctc

SEQ ID NO: 1111761 - DNA, 25 bp, Homo sapien
tcataacaaggcttgccggcttttg

SEQ ID NO: 1111762 - DNA, 25 bp, Homo sapien
ggtgacagaagtatctggataccgt

SEQ ID NO: 1111763 - DNA, 25 bp, Homo sapien
tgtcattacaccatagggttgccta

SEQ ID NO: 1111764 - DNA, 25 bp, Homo sapien
cattacaccatagggttgcctatgc

SEQ ID NO: 1111765 - DNA, 25 bp, Homo sapien
cacttgtcattacaccatagggttg

SEQ ID NO: 1111766 - DNA, 25 bp, Homo sapien
caccatagggttgcctatgctgcat

SEQ ID NO: 1111767 - DNA, 25 bp, Homo sapien
cttatggcagtgcacccaaatggag

SEQ ID NO: 1111768 - DNA, 25 bp, Homo sapien
gaagaaattgtcatgtgctacctga

SEQ ID NO: 1111769 - DNA, 25 bp, Homo sapien
tttgctgagctatagggactggtga

SEQ ID NO: 1111770 - DNA, 25 bp, Homo sapien
tacctgaaatttggagagcatatga

SEQ ID NO: 1111771 - DNA, 25 bp, Homo sapien
ttgtgttcatttgatgcttcagtca

SEQ ID NO: 1111772 - DNA, 25 bp, Homo sapien
tgtgttcatttgatgcttcagtcat

SEQ ID NO: 1111773 - DNA, 25 bp, Homo sapien
aactgatgtcgaccatctgcctcct

SEQ ID NO: 1111774 - DNA, 25 bp, Homo sapien
ccaaaactgatgtcgaccatctgcc

SEQ ID NO: 1111775 - DNA, 25 bp, Homo sapien
gggccaaaactgatgtcgaccatct

SEQ ID NO: 1111776 - DNA, 25 bp, Homo sapien
cttggggccaaaactgatgtcgacc

SEQ ID NO: 1111777 - DNA, 25 bp, Homo sapien
tctccaagatcctgatttgtctgct

SEQ ID NO: 1111778 - DNA, 25 bp, Homo sapien
gattctccaagatcctgatttgtct

SEQ ID NO: 1111779 - DNA, 25 bp, Homo sapien
tatatagacacggattctccaagat

SEQ ID NO: 1111780 - DNA, 25 bp, Homo sapien
ccaagatcctgatttgtctgctttc

SEQ ID NO: 1111781 - DNA, 25 bp, Homo sapien
cttcttccacaggatcatccttgag

SEQ ID NO: 1111782 - DNA, 25 bp, Homo sapien
gatcaatgctgctaaagctacacac

SEQ ID NO: 1111783 - DNA, 25 bp, Homo sapien
tcatccttgagatcaattagatcaa

SEQ ID NO: 1111784 - DNA, 25 bp, Homo sapien
gctacacactggaaattgatacact

SEQ ID NO: 1111785 - DNA, 25 bp, Homo sapien
gagtcagggcctagtttcataaaga

SEQ ID NO: 1111786 - DNA, 25 bp, Homo sapien
tgaaaactgcatgctacaacgaagg

SEQ ID NO: 1111787 - DNA, 25 bp, Homo sapien
gaactagtgacatagccagctgtgg

SEQ ID NO: 1111788 - DNA, 25 bp, Homo sapien
gcaccccaatgcagagatgacgttt

SEQ ID NO: 1111789 - DNA, 25 bp, Homo sapien
gaaacttcagtagctttggtggcag

SEQ ID NO: 1111790 - DNA, 25 bp, Homo sapien
ttggtggtagtcgtggaggtgttta

SEQ ID NO: 1111791 - DNA, 25 bp, Homo sapien
tgatgatggaggcagttttggaggt

SEQ ID NO: 1111792 - DNA, 25 bp, Homo sapien
tgtttatggtgggaatgacaacttt

SEQ ID NO: 1111793 - DNA, 25 bp, Homo sapien
cttctgtgacattatttgaagtaac

SEQ ID NO: 1111794 - DNA, 25 bp, Homo sapien
caccaacaaaattgcacttctccat

SEQ ID NO: 1111795 - DNA, 25 bp, Homo sapien
aaatcttctgtgacattatttgaag

SEQ ID NO: 1111796 - DNA, 25 bp, Homo sapien
gacattatttgaagtaacaccaaca

SEQ ID NO: 1111797 - DNA, 25 bp, Homo sapien
aacttcatttatggttcatgcacac

SEQ ID NO: 1111798 - DNA, 25 bp, Homo sapien
tcagggttgagactcaagtctaaac

SEQ ID NO: 1111799 - DNA, 25 bp, Homo sapien
tcatgcacaccttatatatattggc

SEQ ID NO: 1111800 - DNA, 25 bp, Homo sapien
aaagtatgtgtgcactgaaccatca

SEQ ID NO: 1111801 - DNA, 25 bp, Homo sapien
ggaatactctctattattaaattga

SEQ ID NO: 1111802 - DNA, 25 bp, Homo sapien
tctcttattaggaattaatgtgtgt

SEQ ID NO: 1111803 - DNA, 25 bp, Homo sapien
acatttctcttattaggaattaatg

SEQ ID NO: 1111804 - DNA, 25 bp, Homo sapien
ataaagaaggaatactctctattat

SEQ ID NO: 1111805 - DNA, 25 bp, Homo sapien
ctgtatgctactccggggagcacga

SEQ ID NO: 1111806 - DNA, 25 bp, Homo sapien
tcagcatgctgtatgctactccggg

SEQ ID NO: 1111807 - DNA, 25 bp, Homo sapien
ttcagcatgctgtatgctactccgg

SEQ ID NO: 1111808 - DNA, 25 bp, Homo sapien
acattcagcatgctgtatgctactc

SEQ ID NO: 1111809 - DNA, 25 bp, Homo sapien
gatgaactcgtgtccctagtgctct

SEQ ID NO: 1111810 - DNA, 25 bp, Homo sapien
cgtgtccctagtgctctccgtggtg

SEQ ID NO: 1111811 - DNA, 25 bp, Homo sapien
actcgtgtccctagtgctctccgtg

SEQ ID NO: 1111812 - DNA, 25 bp, Homo sapien
gggatgaactcgtgtccctagtgct

SEQ ID NO: 1111813 - DNA, 25 bp, Homo sapien
tgaacagatgtgcatgtggacacat

SEQ ID NO: 1111814 - DNA, 25 bp, Homo sapien
tctgaacagatgtgcatgtggacac

SEQ ID NO: 1111815 - DNA, 25 bp, Homo sapien
tttctgaacagatgtgcatgtggac

SEQ ID NO: 1111816 - DNA, 25 bp, Homo sapien
ctttctgaacagatgtgcatgtgga

SEQ ID NO: 1111817 - DNA, 25 bp, Homo sapien
aagatggctgccaggtaggacattt

SEQ ID NO: 1111818 - DNA, 25 bp, Homo sapien
gtcagcttctctataaagcttaatt

SEQ ID NO: 1111819 - DNA, 25 bp, Homo sapien
gtgctggggtctggtcccacagctc

SEQ ID NO: 1111820 - DNA, 25 bp, Homo sapien
cattttatagagagctggtgtcagc

SEQ ID NO: 1111821 - DNA, 25 bp, Homo sapien
cctctggtagaggtgtcaaaatatt

SEQ ID NO: 1111822 - DNA, 25 bp, Homo sapien
tcctctggtagaggtgtcaaaatat

SEQ ID NO: 1111823 - DNA, 25 bp, Homo sapien
ctcctctggtagaggtgtcaaaata

SEQ ID NO: 1111824 - DNA, 25 bp, Homo sapien
gaggagaatattataccagtaaatc

SEQ ID NO: 1111825 - DNA, 25 bp, Homo sapien
ccttccatcctacctcatgaggaga

SEQ ID NO: 1111826 - DNA, 25 bp, Homo sapien
tttcaatacgtgaaaaaaatctgta

SEQ ID NO: 1111827 - DNA, 25 bp, Homo sapien
tcctacctcatgaggagaatattat

SEQ ID NO: 1111828 - DNA, 25 bp, Homo sapien
gacaaacgctgtcaggaaacaccac

SEQ ID NO: 1111829 - DNA, 25 bp, Homo sapien
cttgacaaacgctgtcaggaaacac

SEQ ID NO: 1111830 - DNA, 25 bp, Homo sapien
caaacgctgtcaggaaacaccacat

SEQ ID NO: 1111831 - DNA, 25 bp, Homo sapien
aaacgctgtcaggaaacaccacatt

SEQ ID NO: 1111832 - DNA, 25 bp, Homo sapien
ccatcagtgctttattttcgacctt

SEQ ID NO: 1111833 - DNA, 25 bp, Homo sapien
cagtgctttattttcgacctttcct

SEQ ID NO: 1111834 - DNA, 25 bp, Homo sapien
tcagtgctttattttcgacctttcc

SEQ ID NO: 1111835 - DNA, 25 bp, Homo sapien
catcagtgctttattttcgaccttt

SEQ ID NO: 1111836 - DNA, 25 bp, Homo sapien
tcctgtacaggccatacttctttat

SEQ ID NO: 1111837 - DNA, 25 bp, Homo sapien
tactgacctatcttaaagtctacga

SEQ ID NO: 1111838 - DNA, 25 bp, Homo sapien
tctcaacaccagaatctgtacttga

SEQ ID NO: 1111839 - DNA, 25 bp, Homo sapien
tatatgctagctgatgaggtactgt

SEQ ID NO: 1111840 - DNA, 25 bp, Homo sapien
cattttcaccctataatatttgcac

SEQ ID NO: 1111841 - DNA, 25 bp, Homo sapien
tggattattcactgctaattattga

SEQ ID NO: 1111842 - DNA, 25 bp, Homo sapien
ttccaattcatgaactcaaaaatgt

SEQ ID NO: 1111843 - DNA, 25 bp, Homo sapien
caatgtctgcaaaatggcagttggg

SEQ ID NO: 1111844 - DNA, 25 bp, Homo sapien
caaatatgctagaactgatgcacac

SEQ ID NO: 1111845 - DNA, 25 bp, Homo sapien
ggataactcatctaactaatgcagc

SEQ ID NO: 1111846 - DNA, 25 bp, Homo sapien
gagagccacagttctgaacataagt

SEQ ID NO: 1111847 - DNA, 25 bp, Homo sapien
gccagcattacgcagagcacaataa

SEQ ID NO: 1111848 - DNA, 25 bp, Homo sapien
tgatttcatggcacagacgtacaga

SEQ ID NO: 1111849 - DNA, 25 bp, Homo sapien
gacaccagttgaaaaaatgccatct

SEQ ID NO: 1111850 - DNA, 25 bp, Homo sapien
gctactactgaacgagagagattaa

SEQ ID NO: 1111851 - DNA, 25 bp, Homo sapien
gcatattattcgatatcagtttgag

SEQ ID NO: 1111852 - DNA, 25 bp, Homo sapien
atatgctcggtggtgttggtgtcat

SEQ ID NO: 1111853 - DNA, 25 bp, Homo sapien
gataatttggatcaaaattcagtga

SEQ ID NO: 1111854 - DNA, 25 bp, Homo sapien
tacccctgcacaggtagggataatt

SEQ ID NO: 1111855 - DNA, 25 bp, Homo sapien
ctgtcaatcttcagattcaaggata

SEQ ID NO: 1111856 - DNA, 25 bp, Homo sapien
cattctagtagttaatgtttcaaaa

SEQ ID NO: 1111857 - DNA, 25 bp, Homo sapien
tgaaaaataaggagtaggtgcctta

SEQ ID NO: 1111858 - DNA, 25 bp, Homo sapien
gtatgcattcattctagtagttaat

SEQ ID NO: 1111859 - DNA, 25 bp, Homo sapien
gtaggtgccttacagtatgcattca

SEQ ID NO: 1111860 - DNA, 25 bp, Homo sapien
tctacaagtgtagggtctctaagag

SEQ ID NO: 1111861 - DNA, 25 bp, Homo sapien
tctttcagcagtgagactctcgttg

SEQ ID NO: 1111862 - DNA, 25 bp, Homo sapien
aaacaatatttgcattccagaatgg

SEQ ID NO: 1111863 - DNA, 25 bp, Homo sapien
tgtctggaagaatcataactctaag

SEQ ID NO: 1111864 - DNA, 25 bp, Homo sapien
ttgtgtatccctatttaaatgccag

SEQ ID NO: 1111865 - DNA, 25 bp, Homo sapien
ccatgtaatgagaacatattttgaa

SEQ ID NO: 1111866 - DNA, 25 bp, Homo sapien
attgtgtatccctatttaaatgcca

SEQ ID NO: 1111867 - DNA, 25 bp, Homo sapien
tgtgtatccctatttaaatgccaga

SEQ ID NO: 1111868 - DNA, 25 bp, Homo sapien
cactgctggcgttcttaaaggtgat

SEQ ID NO: 1111869 - DNA, 25 bp, Homo sapien
tggtaccactgctggcgttcttaaa

SEQ ID NO: 1111870 - DNA, 25 bp, Homo sapien
gctggcgttcttaaaggtgatgaag

SEQ ID NO: 1111871 - DNA, 25 bp, Homo sapien
tcttaaaggtgatgaagtgttttgg

SEQ ID NO: 1111872 - DNA, 25 bp, Homo sapien
gagtaattgcccatatttctcatat

SEQ ID NO: 1111873 - DNA, 25 bp, Homo sapien
tttcttcagagagtaattgcccata

SEQ ID NO: 1111874 - DNA, 25 bp, Homo sapien
tgataagcatatggactgcagtagc

SEQ ID NO: 1111875 - DNA, 25 bp, Homo sapien
aaaatcctcataattgataagcata

SEQ ID NO: 1111876 - DNA, 25 bp, Homo sapien
gaggtatagaggcaggaatggtggc

SEQ ID NO: 1111877 - DNA, 25 bp, Homo sapien
tagaggtatagaggcaggaatggtg

SEQ ID NO: 1111878 - DNA, 25 bp, Homo sapien
tttagaggtatagaggcaggaatgg

SEQ ID NO: 1111879 - DNA, 25 bp, Homo sapien
aggtatagaggcaggaatggtggct

SEQ ID NO: 1111880 - DNA, 25 bp, Homo sapien
gccacaaagaaatctattgataagt

SEQ ID NO: 1111881 - DNA, 25 bp, Homo sapien
acttcattagtaaaagccacaaaga

SEQ ID NO: 1111882 - DNA, 25 bp, Homo sapien
agattgtaaattagccacacaactt

SEQ ID NO: 1111883 - DNA, 25 bp, Homo sapien
tcagattgtaaattagccacacaac

SEQ ID NO: 1111884 - DNA, 25 bp, Homo sapien
taacagttacattggcccaaggtat

SEQ ID NO: 1111885 - DNA, 25 bp, Homo sapien
ggttaactgattagtacagagcctc

SEQ ID NO: 1111886 - DNA, 25 bp, Homo sapien
tgctggtttggaagccatggacctt

SEQ ID NO: 1111887 - DNA, 25 bp, Homo sapien
cagagcctcttgacatacagacatt

SEQ ID NO: 1111888 - DNA, 25 bp, Homo sapien
taaggccatgtgacaagtaaaccat

SEQ ID NO: 1111889 - DNA, 25 bp, Homo sapien
ggactatgtagatattaaggccatg

SEQ ID NO: 1111890 - DNA, 25 bp, Homo sapien
gttgtcaaaccggaaattgctagcc

SEQ ID NO: 1111891 - DNA, 25 bp, Homo sapien
tgattacacagtaggactatgtaga

SEQ ID NO: 1111892 - DNA, 25 bp, Homo sapien
aggatatttgtgctggatgtaatac

SEQ ID NO: 1111893 - DNA, 25 bp, Homo sapien
gaaggatatttgtgctggatgtaat

SEQ ID NO: 1111894 - DNA, 25 bp, Homo sapien
aaggatatttgtgctggatgtaata

SEQ ID NO: 1111895 - DNA, 25 bp, Homo sapien
gactggattgatttggggtacacat

SEQ ID NO: 1111896 - DNA, 25 bp, Homo sapien
gctgaaaatactggtgactggattg

SEQ ID NO: 1111897 - DNA, 25 bp, Homo sapien
aaaatactggtgactggattgattt

SEQ ID NO: 1111898 - DNA, 25 bp, Homo sapien
tgaaaatactggtgactggattgat

SEQ ID NO: 1111899 - DNA, 25 bp, Homo sapien
gatcgtttttgttgccgttcctctg

SEQ ID NO: 1111900 - DNA, 25 bp, Homo sapien
gatgatcgtttttgttgccgttcct

SEQ ID NO: 1111901 - DNA, 25 bp, Homo sapien
tggtccaaggatgatcgtttttgtt

SEQ ID NO: 1111902 - DNA, 25 bp, Homo sapien
caaggatgatcgtttttgttgccgt

SEQ ID NO: 1111903 - DNA, 25 bp, Homo sapien
gattatatagtagcttattacccaa

SEQ ID NO: 1111904 - DNA, 25 bp, Homo sapien
taacccattgctattgtaaacccaa

SEQ ID NO: 1111905 - DNA, 25 bp, Homo sapien
acatttgttcaaagtgcaatagttc

SEQ ID NO: 1111906 - DNA, 25 bp, Homo sapien
tcatttcactctaataactccacct

SEQ ID NO: 1111907 - DNA, 25 bp, Homo sapien
caagctgtggtaggctccacgcagt

SEQ ID NO: 1111908 - DNA, 25 bp, Homo sapien
agctagaccacttgtctccttggtg

SEQ ID NO: 1111909 - DNA, 25 bp, Homo sapien
tgccaagctgtggtaggctccacgc

SEQ ID NO: 1111910 - DNA, 25 bp, Homo sapien
gagctagaccacttgtctccttggt

SEQ ID NO: 1111911 - DNA, 25 bp, Homo sapien
catagggaaaccaagaggtggcagt

SEQ ID NO: 1111912 - DNA, 25 bp, Homo sapien
ccatagggaaaccaagaggtggcag

SEQ ID NO: 1111913 - DNA, 25 bp, Homo sapien
cttcacagacttcttaaggccatag

SEQ ID NO: 1111914 - DNA, 25 bp, Homo sapien
tgcatgtgggaaccttgtaccattc

SEQ ID NO: 1111915 - DNA, 25 bp, Homo sapien
ccatgcatgtgggaaccttgtacca

SEQ ID NO: 1111916 - DNA, 25 bp, Homo sapien
cattccgaaaatctctgggggttct

SEQ ID NO: 1111917 - DNA, 25 bp, Homo sapien
tgtgggaaccttgtaccattccgaa

SEQ ID NO: 1111918 - DNA, 25 bp, Homo sapien
gttacaccaggtgatgtacactgac

SEQ ID NO: 1111919 - DNA, 25 bp, Homo sapien
tgactcctcagaatgcccacaaaat

SEQ ID NO: 1111920 - DNA, 25 bp, Homo sapien
tcaggcccataatctgcaacttggc

SEQ ID NO: 1111921 - DNA, 25 bp, Homo sapien
tggaagctaccattgactcctcaga

SEQ ID NO: 1111922 - DNA, 25 bp, Homo sapien
taggtttggcaaagtgatatttatt

SEQ ID NO: 1111923 - DNA, 25 bp, Homo sapien
tattaggtttggcaaagtgatattt

SEQ ID NO: 1111924 - DNA, 25 bp, Homo sapien
aatgaatttattaggtttggcaaag

SEQ ID NO: 1111925 - DNA, 25 bp, Homo sapien
gaatttattaggtttggcaaagtga

SEQ ID NO: 1111926 - DNA, 25 bp, Homo sapien
tggcaagaggaagatctttggatac

SEQ ID NO: 1111927 - DNA, 25 bp, Homo sapien
tttggatacgaagacatttattatt

SEQ ID NO: 1111928 - DNA, 25 bp, Homo sapien
agaggaagatctttggatacgaaga

SEQ ID NO: 1111929 - DNA, 25 bp, Homo sapien
caatttgccttgtggcaagaggaag

SEQ ID NO: 1111930 - DNA, 25 bp, Homo sapien
cctggtaagcaaggtgggcccacag

SEQ ID NO: 1111931 - DNA, 25 bp, Homo sapien
catttctgtaatggcccagcttctg

SEQ ID NO: 1111932 - DNA, 25 bp, Homo sapien
cctttgaccctttggtcacctctgc

SEQ ID NO: 1111933 - DNA, 25 bp, Homo sapien
gcccctggtaagcaaggtgggccca

SEQ ID NO: 1111934 - DNA, 25 bp, Homo sapien
gggctctcttccaatctccttgcat

SEQ ID NO: 1111935 - DNA, 25 bp, Homo sapien
gctttgatcacgtacacacaaacaa

SEQ ID NO: 1111936 - DNA, 25 bp, Homo sapien
ttccagctttgatcacgtacacaca

SEQ ID NO: 1111937 - DNA, 25 bp, Homo sapien
gatcacgtacacacaaacaaaaggg

SEQ ID NO: 1111938 - DNA, 25 bp, Homo sapien
ttttctgtgttcagcacagtaactc

SEQ ID NO: 1111939 - DNA, 25 bp, Homo sapien
gtttttctgtgttcagcacagtaac

SEQ ID NO: 1111940 - DNA, 25 bp, Homo sapien
ttctgtgttcagcacagtaactcac

SEQ ID NO: 1111941 - DNA, 25 bp, Homo sapien
taaaggcttagtttttctgtgttca

SEQ ID NO: 1111942 - DNA, 25 bp, Homo sapien
tcaacgattcgtttaaatttcacta

SEQ ID NO: 1111943 - DNA, 25 bp, Homo sapien
taaatttcactagctccatgaacat

SEQ ID NO: 1111944 - DNA, 25 bp, Homo sapien
tttaaatttcactagctccatgaac

SEQ ID NO: 1111945 - DNA, 25 bp, Homo sapien
ttcatatttttcaacgattcgttta

SEQ ID NO: 1111946 - DNA, 25 bp, Homo sapien
tttctacaaatagtctttctagccc

SEQ ID NO: 1111947 - DNA, 25 bp, Homo sapien
tttgccagctcacatctgttcttga

SEQ ID NO: 1111948 - DNA, 25 bp, Homo sapien
ttgatggtgttgcacaagatttctg

SEQ ID NO: 1111949 - DNA, 25 bp, Homo sapien
tcagattagaatctcctgttggtct

SEQ ID NO: 1111950 - DNA, 25 bp, Homo sapien
gatatatcaagctctttaattgggc

SEQ ID NO: 1111951 - DNA, 25 bp, Homo sapien
taaaaccctgtctgatatatcaagc

SEQ ID NO: 1111952 - DNA, 25 bp, Homo sapien
aaacatataatccattctccttagc

SEQ ID NO: 1111953 - DNA, 25 bp, Homo sapien
tagctacagtgcttgtattccatgc

SEQ ID NO: 1111954 - DNA, 25 bp, Homo sapien
ctcttgggtgtttgttgctaatgga

SEQ ID NO: 1111955 - DNA, 25 bp, Homo sapien
aaaatgtagaggcatatccaggtgg

SEQ ID NO: 1111956 - DNA, 25 bp, Homo sapien
ggcctctctcgaggaaattgccatt

SEQ ID NO: 1111957 - DNA, 25 bp, Homo sapien
atatccaggtggtatagttgtctgc

SEQ ID NO: 1111958 - DNA, 25 bp, Homo sapien
tggatgcccagtcgtgccatatact

SEQ ID NO: 1111959 - DNA, 25 bp, Homo sapien
gccatatactgtggtccttggtgat

SEQ ID NO: 1111960 - DNA, 25 bp, Homo sapien
cacagttggcactgtttattaccca

SEQ ID NO: 1111961 - DNA, 25 bp, Homo sapien
gatttctcagcaacactttggctct

SEQ ID NO: 1111962 - DNA, 25 bp, Homo sapien
cagcagtgccgtcatctgctggcag

SEQ ID NO: 1111963 - DNA, 25 bp, Homo sapien
agcttccagaagtgtagacacaaac

SEQ ID NO: 1111964 - DNA, 25 bp, Homo sapien
ctaatcaacagcagtgccgtcatct

SEQ ID NO: 1111965 - DNA, 25 bp, Homo sapien
aatcaacagcagtgccgtcatctgc

SEQ ID NO: 1111966 - DNA, 25 bp, Homo sapien
aatgccattagtgatacgttcatga

SEQ ID NO: 1111967 - DNA, 25 bp, Homo sapien
tagtaaacaatccatcagcatccac

SEQ ID NO: 1111968 - DNA, 25 bp, Homo sapien
caatgatccctgagctcttctagta

SEQ ID NO: 1111969 - DNA, 25 bp, Homo sapien
tgactcgcagctagacttgctaaag

SEQ ID NO: 1111970 - DNA, 25 bp, Homo sapien
tgcagtacgagtatggtggcttcgt

SEQ ID NO: 1111971 - DNA, 25 bp, Homo sapien
tacgagtatggtggcttcgtgtcat

SEQ ID NO: 1111972 - DNA, 25 bp, Homo sapien
gagtatggtggcttcgtgtcatttc

SEQ ID NO: 1111973 - DNA, 25 bp, Homo sapien
tatggtggcttcgtgtcatttcttc

SEQ ID NO: 1111974 - DNA, 25 bp, Homo sapien
cacttaaaataaacctggcttgttg

SEQ ID NO: 1111975 - DNA, 25 bp, Homo sapien
gcttgttgagctgttgtttttagcc

SEQ ID NO: 1111976 - DNA, 25 bp, Homo sapien
tagcagtttggtcctgcaagagaac

SEQ ID NO: 1111977 - DNA, 25 bp, Homo sapien
ttgtagcagtttggtcctgcaagag

SEQ ID NO: 1111978 - DNA, 25 bp, Homo sapien
aagggagtgtttagtgcctgtagca

SEQ ID NO: 1111979 - DNA, 25 bp, Homo sapien
cctcagctaagtattgtcatctcca

SEQ ID NO: 1111980 - DNA, 25 bp, Homo sapien
catctccaaagttacgctgcctact

SEQ ID NO: 1111981 - DNA, 25 bp, Homo sapien
tgtagcatcctatagtaaatcctgt

SEQ ID NO: 1111982 - DNA, 25 bp, Homo sapien
cttgcaaatccccagaacttccagt

SEQ ID NO: 1111983 - DNA, 25 bp, Homo sapien
ttccacttgcaaatccccagaactt

SEQ ID NO: 1111984 - DNA, 25 bp, Homo sapien
ccagttttccaattagcgtattcat

SEQ ID NO: 1111985 - DNA, 25 bp, Homo sapien
cagttttccaattagcgtattcatc

SEQ ID NO: 1111986 - DNA, 25 bp, Homo sapien
agtcttgaccatgagcacccactgg

SEQ ID NO: 1111987 - DNA, 25 bp, Homo sapien
taagtaggtctaggtgcaaaccaca

SEQ ID NO: 1111988 - DNA, 25 bp, Homo sapien
caaaccacatgtcttagatgggcca

SEQ ID NO: 1111989 - DNA, 25 bp, Homo sapien
taaccccagattgcacttaagtagg

SEQ ID NO: 1111990 - DNA, 25 bp, Homo sapien
agaatccctatcctccaggatgaat

SEQ ID NO: 1111991 - DNA, 25 bp, Homo sapien
aatccctatcctccaggatgaattc

SEQ ID NO: 1111992 - DNA, 25 bp, Homo sapien
aatgctgtcgaatataaggaggggt

SEQ ID NO: 1111993 - DNA, 25 bp, Homo sapien
tgtcgaatataaggaggggtgacat

SEQ ID NO: 1111994 - DNA, 25 bp, Homo sapien
cttggtctaatatgaggccccattg

SEQ ID NO: 1111995 - DNA, 25 bp, Homo sapien
tctcctcaaccatatgattttcttg

SEQ ID NO: 1111996 - DNA, 25 bp, Homo sapien
caaccatatgattttcttggtctaa

SEQ ID NO: 1111997 - DNA, 25 bp, Homo sapien
ggtctaatatgaggccccattggaa

SEQ ID NO: 1111998 - DNA, 25 bp, Homo sapien
ttgaggatccattaaccaccagttt

SEQ ID NO: 1111999 - DNA, 25 bp, Homo sapien
ttttttagtgaatgcctgatcattt

SEQ ID NO: 1112000 - DNA, 25 bp, Homo sapien
caccagttttccacgtgaagtgttt

SEQ ID NO: 1112001 - DNA, 25 bp, Homo sapien
cagttttccacgtgaagtgttttca

SEQ ID NO: 1112002 - DNA, 25 bp, Homo sapien
tctggaagactgcagaacagtcctc

SEQ ID NO: 1112003 - DNA, 25 bp, Homo sapien
gataagggtcttcgtgagaagtcga

SEQ ID NO: 1112004 - DNA, 25 bp, Homo sapien
gatttttgacttggcagaaaggatg

SEQ ID NO: 1112005 - DNA, 25 bp, Homo sapien
tgtgattctgctttagataagggtc

SEQ ID NO: 1112006 - DNA, 25 bp, Homo sapien
tattcgtatatatttcttgcatgaa

SEQ ID NO: 1112007 - DNA, 25 bp, Homo sapien
tgaaagcagggatattgcattcttt

SEQ ID NO: 1112008 - DNA, 25 bp, Homo sapien
caacacacatttctgagacatagcc

SEQ ID NO: 1112009 - DNA, 25 bp, Homo sapien
acagcttctaagtgtacaacacaca

SEQ ID NO: 1112010 - DNA, 25 bp, Homo sapien
ttcagtgatttgaagtggcaaagct

SEQ ID NO: 1112011 - DNA, 25 bp, Homo sapien
tcaagtaaagtagcgccacagcatc

SEQ ID NO: 1112012 - DNA, 25 bp, Homo sapien
atggatgcgggatgccaactgcttc

SEQ ID NO: 1112013 - DNA, 25 bp, Homo sapien
gtctgcttttggcacggaagtgtca

SEQ ID NO: 1112014 - DNA, 25 bp, Homo sapien
gttgttcatttgtcgcattgtctgc

SEQ ID NO: 1112015 - DNA, 25 bp, Homo sapien
caggtgtaacaaagtttaaatggat

SEQ ID NO: 1112016 - DNA, 25 bp, Homo sapien
cggtgtcgcaagagactttgctgct

SEQ ID NO: 1112017 - DNA, 25 bp, Homo sapien
tacacggtgtcgcaagagactttgc

SEQ ID NO: 1112018 - DNA, 25 bp, Homo sapien
cgtacacggtgtcgcaagagacttt

SEQ ID NO: 1112019 - DNA, 25 bp, Homo sapien
ctcgtacacggtgtcgcaagagact

SEQ ID NO: 1112020 - DNA, 25 bp, Homo sapien
tgggagtcacagttcctcaaactaa

SEQ ID NO: 1112021 - DNA, 25 bp, Homo sapien
ctgggagtcacagttcctcaaacta

SEQ ID NO: 1112022 - DNA, 25 bp, Homo sapien
gggagtcacagttcctcaaactaat

SEQ ID NO: 1112023 - DNA, 25 bp, Homo sapien
acggtgtccgagaggtgcttgtcct

SEQ ID NO: 1112024 - DNA, 25 bp, Homo sapien
agtgttgctggtaccccgggacaca

SEQ ID NO: 1112025 - DNA, 25 bp, Homo sapien
ttaagcctgacggtgtccgagaggt

SEQ ID NO: 1112026 - DNA, 25 bp, Homo sapien
tcgtcacagtgttgctggtaccccg

SEQ ID NO: 1112027 - DNA, 25 bp, Homo sapien
gatccacttgatcagaggctctgag

SEQ ID NO: 1112028 - DNA, 25 bp, Homo sapien
ttgtgggatccacttgatcagaggc

SEQ ID NO: 1112029 - DNA, 25 bp, Homo sapien
gggatccacttgatcagaggctctg

SEQ ID NO: 1112030 - DNA, 25 bp, Homo sapien
tttgtgggatccacttgatcagagg

SEQ ID NO: 1112031 - DNA, 25 bp, Homo sapien
taatataggtgctgaggcttgccca

SEQ ID NO: 1112032 - DNA, 25 bp, Homo sapien
ttaatataggtgctgaggcttgccc

SEQ ID NO: 1112033 - DNA, 25 bp, Homo sapien
gatatataaggccaggacattctgc

SEQ ID NO: 1112034 - DNA, 25 bp, Homo sapien
atggtgctcttgatatataaggcca

SEQ ID NO: 1112035 - DNA, 25 bp, Homo sapien
tatgaatgtggttagtccctgtggt

SEQ ID NO: 1112036 - DNA, 25 bp, Homo sapien
ccctgtggtaggatgggctactacc

SEQ ID NO: 1112037 - DNA, 25 bp, Homo sapien
tgaatgtggttagtccctgtggtag

SEQ ID NO: 1112038 - DNA, 25 bp, Homo sapien
aatgtggttagtccctgtggtagga

SEQ ID NO: 1112039 - DNA, 25 bp, Homo sapien
tgctaaatcaaggccttctgctagt

SEQ ID NO: 1112040 - DNA, 25 bp, Homo sapien
tttttccctttcgatctgctaaatc

SEQ ID NO: 1112041 - DNA, 25 bp, Homo sapien
tttccctttcgatctgctaaatcaa

SEQ ID NO: 1112042 - DNA, 25 bp, Homo sapien
aaatcaaggccttctgctagtttgc

SEQ ID NO: 1112043 - DNA, 25 bp, Homo sapien
tgttaaacaaaccataccagtcatt

SEQ ID NO: 1112044 - DNA, 25 bp, Homo sapien
tttaattaaggattcagtgttccat

SEQ ID NO: 1112045 - DNA, 25 bp, Homo sapien
ccataccagtcattcacctttttaa

SEQ ID NO: 1112046 - DNA, 25 bp, Homo sapien
attaaggattcagtgttccatccct

SEQ ID NO: 1112047 - DNA, 25 bp, Homo sapien
tctgtaagaattctttgcttcacat

SEQ ID NO: 1112048 - DNA, 25 bp, Homo sapien
gtttgagggtaattctggctcatat

SEQ ID NO: 1112049 - DNA, 25 bp, Homo sapien
ctgtaagaattctttgcttcacatt

SEQ ID NO: 1112050 - DNA, 25 bp, Homo sapien
agatagaagcatgcccaagtcatcc

SEQ ID NO: 1112051 - DNA, 25 bp, Homo sapien
tagaagcatgcccaagtcatccttc

SEQ ID NO: 1112052 - DNA, 25 bp, Homo sapien
ccagatagaagcatgcccaagtcat

SEQ ID NO: 1112053 - DNA, 25 bp, Homo sapien
tccagatagaagcatgcccaagtca

SEQ ID NO: 1112054 - DNA, 25 bp, Homo sapien
tatgattgtgcatttataacttagt

SEQ ID NO: 1112055 - DNA, 25 bp, Homo sapien
ctttctctaaagttgcaatcaccat

SEQ ID NO: 1112056 - DNA, 25 bp, Homo sapien
gattgtgcatttataacttagtgaa

SEQ ID NO: 1112057 - DNA, 25 bp, Homo sapien
gctttctctaaagttgcaatcacca

SEQ ID NO: 1112058 - DNA, 25 bp, Homo sapien
aactcctggccgctgcggttcaggc

SEQ ID NO: 1112059 - DNA, 25 bp, Homo sapien
gttctatttaatgtcaggagcagat

SEQ ID NO: 1112060 - DNA, 25 bp, Homo sapien
tcctggccgctgcggttcaggcgtt

SEQ ID NO: 1112061 - DNA, 25 bp, Homo sapien
ttttggagttctatttaatgtcagg

SEQ ID NO: 1112062 - DNA, 25 bp, Homo sapien
tggtctacggggcttccgaggcgat

SEQ ID NO: 1112063 - DNA, 25 bp, Homo sapien
tcggcgtccgtgatggtctacgggg

SEQ ID NO: 1112064 - DNA, 25 bp, Homo sapien
gctcggcgtccgtgatggtctacgg

SEQ ID NO: 1112065 - DNA, 25 bp, Homo sapien
gtgagagttacccgaagctcggcgt

SEQ ID NO: 1112066 - DNA, 25 bp, Homo sapien
caggagtggaggtcacaaagtgctc

SEQ ID NO: 1112067 - DNA, 25 bp, Homo sapien
cgggcaggagtggaggtcacaaagt

SEQ ID NO: 1112068 - DNA, 25 bp, Homo sapien
agtggaggtcacaaagtgctcagtg

SEQ ID NO: 1112069 - DNA, 25 bp, Homo sapien
ggcgggcaggagtggaggtcacaaa

SEQ ID NO: 1112070 - DNA, 25 bp, Homo sapien
caatccgaatcaaacttggtgatca

SEQ ID NO: 1112071 - DNA, 25 bp, Homo sapien
caggagggatgcatgggaagtggta

SEQ ID NO: 1112072 - DNA, 25 bp, Homo sapien
caggggagcaaagctactcttgaca

SEQ ID NO: 1112073 - DNA, 25 bp, Homo sapien
cttgacaggaataatggtcttcctc

SEQ ID NO: 1112074 - DNA, 25 bp, Homo sapien
aagatggcaaagagggttccagatt

SEQ ID NO: 1112075 - DNA, 25 bp, Homo sapien
aatgggaccaggagggtagagatga

SEQ ID NO: 1112076 - DNA, 25 bp, Homo sapien
ggaccaggagggtagagatgaggga

SEQ ID NO: 1112077 - DNA, 25 bp, Homo sapien
ggaaaaggtccaagatggcaaagag

SEQ ID NO: 1112078 - DNA, 25 bp, Homo sapien
acatttgtaaaggttagagacattt

SEQ ID NO: 1112079 - DNA, 25 bp, Homo sapien
tctgcaataaaagctatgtcagtgg

SEQ ID NO: 1112080 - DNA, 25 bp, Homo sapien
cagtggtgccacataatacatttgt

SEQ ID NO: 1112081 - DNA, 25 bp, Homo sapien
gctatgtcagtggtgccacataata

SEQ ID NO: 1112082 - DNA, 25 bp, Homo sapien
catggcttttagagtaggcaacaaa

SEQ ID NO: 1112083 - DNA, 25 bp, Homo sapien
ctcaaatttcctaatggaggaatca

SEQ ID NO: 1112084 - DNA, 25 bp, Homo sapien
gagttcacattgaagaaccacggga

SEQ ID NO: 1112085 - DNA, 25 bp, Homo sapien
aaatgatccgaactttcctgtagga

SEQ ID NO: 1112086 - DNA, 25 bp, Homo sapien
tagcctttgggccactgaacaaaac

SEQ ID NO: 1112087 - DNA, 25 bp, Homo sapien
tgccctcaaggtatagtcactaaac

SEQ ID NO: 1112088 - DNA, 25 bp, Homo sapien
aaatatccttcatagatgttctagc

SEQ ID NO: 1112089 - DNA, 25 bp, Homo sapien
gcatctgctaatcttagcctttggg

SEQ ID NO: 1112090 - DNA, 25 bp, Homo sapien
gaacgagtgacctcctcaagctgag

SEQ ID NO: 1112091 - DNA, 25 bp, Homo sapien
gatacatttaaattgagctggcaca

SEQ ID NO: 1112092 - DNA, 25 bp, Homo sapien
aagttgtaagtaaagccaggcagca

SEQ ID NO: 1112093 - DNA, 25 bp, Homo sapien
agtgcatgaatgagggacagcgcaa

SEQ ID NO: 1112094 - DNA, 25 bp, Homo sapien
aatcacagtatttgtacctaatgcc

SEQ ID NO: 1112095 - DNA, 25 bp, Homo sapien
agcagacagtggaggcattacacac

SEQ ID NO: 1112096 - DNA, 25 bp, Homo sapien
ctaatgccagcaacaatataaagca

SEQ ID NO: 1112097 - DNA, 25 bp, Homo sapien
cgtctttagaagaatcagacttcct

SEQ ID NO: 1112098 - DNA, 25 bp, Homo sapien
acccagcacttaaacaattgtacct

SEQ ID NO: 1112099 - DNA, 25 bp, Homo sapien
agtggatactctaatctttctggca

SEQ ID NO: 1112100 - DNA, 25 bp, Homo sapien
gttaagtaacaaaagcgtgaggcac

SEQ ID NO: 1112101 - DNA, 25 bp, Homo sapien
gagggaaaacttgatagaggattat

SEQ ID NO: 1112102 - DNA, 25 bp, Homo sapien
tttgcttccatcgttgcttaggacc

SEQ ID NO: 1112103 - DNA, 25 bp, Homo sapien
tccatcgttgcttaggaccctaact

SEQ ID NO: 1112104 - DNA, 25 bp, Homo sapien
ccctaactcctcttaacgtattcat

SEQ ID NO: 1112105 - DNA, 25 bp, Homo sapien
tgcttaggaccctaactcctcttaa

SEQ ID NO: 1112106 - DNA, 25 bp, Homo sapien
acacgtgctggtccataggcatcag

SEQ ID NO: 1112107 - DNA, 25 bp, Homo sapien
taagagccgtagaaattaacacgtg

SEQ ID NO: 1112108 - DNA, 25 bp, Homo sapien
caggccttaaggatattaaatcaag

SEQ ID NO: 1112109 - DNA, 25 bp, Homo sapien
ggtccataggcatcaggccttaagg

SEQ ID NO: 1112110 - DNA, 25 bp, Homo sapien
tacatgaagcaatgatgagggaatc

SEQ ID NO: 1112111 - DNA, 25 bp, Homo sapien
gacgtaattacactaacagtgcact

SEQ ID NO: 1112112 - DNA, 25 bp, Homo sapien
gcattttgcactgcctaatacatgt

SEQ ID NO: 1112113 - DNA, 25 bp, Homo sapien
ggcagtctgtgtttaaggaattcat

SEQ ID NO: 1112114 - DNA, 25 bp, Homo sapien
gttcagatagtgaacctttattatc

SEQ ID NO: 1112115 - DNA, 25 bp, Homo sapien
ctgttcagatagtgaacctttatta

SEQ ID NO: 1112116 - DNA, 25 bp, Homo sapien
caaaggaaaggcttccgcagatctc

SEQ ID NO: 1112117 - DNA, 25 bp, Homo sapien
tcagatagtgaacctttattatcac

SEQ ID NO: 1112118 - DNA, 25 bp, Homo sapien
ttagtgttgatgagctttagcaggc

SEQ ID NO: 1112119 - DNA, 25 bp, Homo sapien
caaatatatgtaactcccaatgagc

SEQ ID NO: 1112120 - DNA, 25 bp, Homo sapien
catctggttgtatggtcacatgaga

SEQ ID NO: 1112121 - DNA, 25 bp, Homo sapien
tagcaggcaggtacatcatagatac

SEQ ID NO: 1112122 - DNA, 25 bp, Homo sapien
aaacatctgtgtatgccggtatgac

SEQ ID NO: 1112123 - DNA, 25 bp, Homo sapien
caaattgcttgaaaagtgaaatggc

SEQ ID NO: 1112124 - DNA, 25 bp, Homo sapien
tgtgttttggctacctgccactgaa

SEQ ID NO: 1112125 - DNA, 25 bp, Homo sapien
tttagaacaagggagccgctcttaa

SEQ ID NO: 1112126 - DNA, 25 bp, Homo sapien
ggaagaaactctcaaggctgttcca

SEQ ID NO: 1112127 - DNA, 25 bp, Homo sapien
ggtagaactaacacagagaggaact

SEQ ID NO: 1112128 - DNA, 25 bp, Homo sapien
ggttttggaaatcagtacaagctgc

SEQ ID NO: 1112129 - DNA, 25 bp, Homo sapien
ggcactatggaaacttactaactga

SEQ ID NO: 1112130 - DNA, 25 bp, Homo sapien
ctgaattataatcaatcgatccagc

SEQ ID NO: 1112131 - DNA, 25 bp, Homo sapien
acagataagctttccaggttgtaca

SEQ ID NO: 1112132 - DNA, 25 bp, Homo sapien
gataagctttccaggttgtacaggt

SEQ ID NO: 1112133 - DNA, 25 bp, Homo sapien
ttataatcaatcgatccagcaacag

SEQ ID NO: 1112134 - DNA, 25 bp, Homo sapien
gcaggctggaaaagttcccaaaata

SEQ ID NO: 1112135 - DNA, 25 bp, Homo sapien
tggaaacattatggcatttgggctg

SEQ ID NO: 1112136 - DNA, 25 bp, Homo sapien
cccagttaggcattttggaaacatt

SEQ ID NO: 1112137 - DNA, 25 bp, Homo sapien
tgggtttagtcaacccagttaggca

SEQ ID NO: 1112138 - DNA, 25 bp, Homo sapien
taacctacacaatggcgtgcaattg

SEQ ID NO: 1112139 - DNA, 25 bp, Homo sapien
caaaacctgcattatggcgatgaat

SEQ ID NO: 1112140 - DNA, 25 bp, Homo sapien
gtgaacaacagactaactcccctgg

SEQ ID NO: 1112141 - DNA, 25 bp, Homo sapien
cagcagctacccctattgtgtgtta

SEQ ID NO: 1112142 - DNA, 25 bp, Homo sapien
caaccaggtaatgagttttaagatt

SEQ ID NO: 1112143 - DNA, 25 bp, Homo sapien
cttcacatacccactcctttctatc

SEQ ID NO: 1112144 - DNA, 25 bp, Homo sapien
ccaaccaggtaatgagttttaagat

SEQ ID NO: 1112145 - DNA, 25 bp, Homo sapien
aacttgatatctggttggacaactg

SEQ ID NO: 1112146 - DNA, 25 bp, Homo sapien
tggtggcaattaggtaatggtgttc

SEQ ID NO: 1112147 - DNA, 25 bp, Homo sapien
actgtgaaggttatggtggcaatta

SEQ ID NO: 1112148 - DNA, 25 bp, Homo sapien
ttgaataggaggaagataaagtcgt

SEQ ID NO: 1112149 - DNA, 25 bp, Homo sapien
taaataaatttataggatcatcact

SEQ ID NO: 1112150 - DNA, 25 bp, Homo sapien
tcttgctaaagaataatagtgggtt

SEQ ID NO: 1112151 - DNA, 25 bp, Homo sapien
ccgaaagctgtatcttgctaaagaa

SEQ ID NO: 1112152 - DNA, 25 bp, Homo sapien
agccccgaaagctgtatcttgctaa

SEQ ID NO: 1112153 - DNA, 25 bp, Homo sapien
ccaggacaaaggcaatgcgtgcttc

SEQ ID NO: 1112154 - DNA, 25 bp, Homo sapien
catctggtattggatgcacatctgt

SEQ ID NO: 1112155 - DNA, 25 bp, Homo sapien
gcctggccaccaaaaatacgaggtc

SEQ ID NO: 1112156 - DNA, 25 bp, Homo sapien
tgttgcagagaaaatcactgtgagt

SEQ ID NO: 1112157 - DNA, 25 bp, Homo sapien
tcctatgtttacaattgggtgttca

SEQ ID NO: 1112158 - DNA, 25 bp, Homo sapien
ctatgtttacaattgggtgttcacc

SEQ ID NO: 1112159 - DNA, 25 bp, Homo sapien
tgagaatgcatctctcctatgttta

SEQ ID NO: 1112160 - DNA, 25 bp, Homo sapien
ttactgacatcatgagaatgcatct

SEQ ID NO: 1112161 - DNA, 25 bp, Homo sapien
gcatccaacatcttgtagtcattaa

SEQ ID NO: 1112162 - DNA, 25 bp, Homo sapien
caaagtgtctgtgctctcttgattt

SEQ ID NO: 1112163 - DNA, 25 bp, Homo sapien
ttcaaagtgtctgtgctctcttgat

SEQ ID NO: 1112164 - DNA, 25 bp, Homo sapien
ttaatataccaaaggcaggggctaa

SEQ ID NO: 1112165 - DNA, 25 bp, Homo sapien
agtaatagtggcaactaaaatggtc

SEQ ID NO: 1112166 - DNA, 25 bp, Homo sapien
aatgcccttggataatgtgataggt

SEQ ID NO: 1112167 - DNA, 25 bp, Homo sapien
cctccaatcattttggagccagtaa

SEQ ID NO: 1112168 - DNA, 25 bp, Homo sapien
gaatttgaattactcctccaatcat

SEQ ID NO: 1112169 - DNA, 25 bp, Homo sapien
catccagttcagtcctttaagtgtc

SEQ ID NO: 1112170 - DNA, 25 bp, Homo sapien
agctggaagtcatttccgaaccctt

SEQ ID NO: 1112171 - DNA, 25 bp, Homo sapien
cattttattactgtgggaagctgga

SEQ ID NO: 1112172 - DNA, 25 bp, Homo sapien
gcaagggtgctatgtagagcatcca

SEQ ID NO: 1112173 - DNA, 25 bp, Homo sapien
ataacaatgttatcaactgtggtat

SEQ ID NO: 1112174 - DNA, 25 bp, Homo sapien
taacaatgttatcaactgtggtatt

SEQ ID NO: 1112175 - DNA, 25 bp, Homo sapien
aataacaatgttatcaactgtggta

SEQ ID NO: 1112176 - DNA, 25 bp, Homo sapien
aacaatgttatcaactgtggtattt

SEQ ID NO: 1112177 - DNA, 25 bp, Homo sapien
caatctctctgtgatccagcagact

SEQ ID NO: 1112178 - DNA, 25 bp, Homo sapien
ccacaatctctctgtgatccagcag

SEQ ID NO: 1112179 - DNA, 25 bp, Homo sapien
ctccacaatctctctgtgatccagc

SEQ ID NO: 1112180 - DNA, 25 bp, Homo sapien
cacaatctctctgtgatccagcaga

SEQ ID NO: 1112181 - DNA, 25 bp, Homo sapien
ttcataactatttccgctgccacca

SEQ ID NO: 1112182 - DNA, 25 bp, Homo sapien
atagttgccaccatcgcctctaagt

SEQ ID NO: 1112183 - DNA, 25 bp, Homo sapien
caccatcgcctctaagtccattata

SEQ ID NO: 1112184 - DNA, 25 bp, Homo sapien
atcacctccttcataactatttccg

SEQ ID NO: 1112185 - DNA, 25 bp, Homo sapien
cccttacatgggttcgtaatttgat

SEQ ID NO: 1112186 - DNA, 25 bp, Homo sapien
ttacatgggttcgtaatttgattgc

SEQ ID NO: 1112187 - DNA, 25 bp, Homo sapien
acatgggttcgtaatttgattgctg

SEQ ID NO: 1112188 - DNA, 25 bp, Homo sapien
ctgcccccttacatgggttcgtaat

SEQ ID NO: 1112189 - DNA, 25 bp, Homo sapien
tatctattctgtccacacgtcagca

SEQ ID NO: 1112190 - DNA, 25 bp, Homo sapien
caaatatctattctgtccacacgtc

SEQ ID NO: 1112191 - DNA, 25 bp, Homo sapien
cacaaatatctattctgtccacacg

SEQ ID NO: 1112192 - DNA, 25 bp, Homo sapien
acacacaaatatctattctgtccac

SEQ ID NO: 1112193 - DNA, 25 bp, Homo sapien
gaaatatgatgttccaacgacagct

SEQ ID NO: 1112194 - DNA, 25 bp, Homo sapien
gaaagacgtttatagatgctgcaca

SEQ ID NO: 1112195 - DNA, 25 bp, Homo sapien
gaacggcccatgattgtacaaagga

SEQ ID NO: 1112196 - DNA, 25 bp, Homo sapien
caatccagtgccttttccaagcagg

SEQ ID NO: 1112197 - DNA, 25 bp, Homo sapien
gtggttaaaactcagggcacacttc

SEQ ID NO: 1112198 - DNA, 25 bp, Homo sapien
gaccggatgtctgtagcctgatagc

SEQ ID NO: 1112199 - DNA, 25 bp, Homo sapien
gcctaaccctagagtaagatcagct

SEQ ID NO: 1112200 - DNA, 25 bp, Homo sapien
taactacagggtaccaggcaagccc

SEQ ID NO: 1112201 - DNA, 25 bp, Homo sapien
gggcatcggatagatgtctgataag

SEQ ID NO: 1112202 - DNA, 25 bp, Homo sapien
tagatgtctgataagagtacttcag

SEQ ID NO: 1112203 - DNA, 25 bp, Homo sapien
cacctttgtagcagataaatactca

SEQ ID NO: 1112204 - DNA, 25 bp, Homo sapien
cggatagatgtctgataagagtact

SEQ ID NO: 1112205 - DNA, 25 bp, Homo sapien
gaagtttagagtaagtggtctgtaa

SEQ ID NO: 1112206 - DNA, 25 bp, Homo sapien
tgtgaagtttagagtaagtggtctg

SEQ ID NO: 1112207 - DNA, 25 bp, Homo sapien
ttcagaaccatttgtgaagtttaga

SEQ ID NO: 1112208 - DNA, 25 bp, Homo sapien
ccatttgtgaagtttagagtaagtg

SEQ ID NO: 1112209 - DNA, 25 bp, Homo sapien
tattgccgtgtcttgattgtcctga

SEQ ID NO: 1112210 - DNA, 25 bp, Homo sapien
gccttgatgtagaatgtctgcattt

SEQ ID NO: 1112211 - DNA, 25 bp, Homo sapien
tcttgattgtcctgacacctcatga

SEQ ID NO: 1112212 - DNA, 25 bp, Homo sapien
ttttaaaatattgccgtgtcttgat

SEQ ID NO: 1112213 - DNA, 25 bp, Homo sapien
tggagctgtgtattggagcttcaca

SEQ ID NO: 1112214 - DNA, 25 bp, Homo sapien
tccaaaactgagctggtgcatgtct

SEQ ID NO: 1112215 - DNA, 25 bp, Homo sapien
gattgatttcgtttccttcaaagga

SEQ ID NO: 1112216 - DNA, 25 bp, Homo sapien
gagcttcacagaatagtccaaattt

SEQ ID NO: 1112217 - DNA, 25 bp, Homo sapien
ctgtaagccttgaatttttgatgcg

SEQ ID NO: 1112218 - DNA, 25 bp, Homo sapien
catcttctgtggagtggttattaaa

SEQ ID NO: 1112219 - DNA, 25 bp, Homo sapien
tcaatacaaagatgatacttggaaa

SEQ ID NO: 1112220 - DNA, 25 bp, Homo sapien
gcgatcaatgacaccagtggagcca

SEQ ID NO: 1112221 - DNA, 25 bp, Homo sapien
cacaaacaggatgttcactctgact

SEQ ID NO: 1112222 - DNA, 25 bp, Homo sapien
tccacaaacaggatgttcactctga

SEQ ID NO: 1112223 - DNA, 25 bp, Homo sapien
caaacaggatgttcactctgacttt

SEQ ID NO: 1112224 - DNA, 25 bp, Homo sapien
ttccacaaacaggatgttcactctg

SEQ ID NO: 1112225 - DNA, 25 bp, Homo sapien
gggcttgctggccttacacctatgg

SEQ ID NO: 1112226 - DNA, 25 bp, Homo sapien
cacctatggtcttgaatttgtcgtt

SEQ ID NO: 1112227 - DNA, 25 bp, Homo sapien
ctggtcatctaacggatctttgggc

SEQ ID NO: 1112228 - DNA, 25 bp, Homo sapien
catctaacggatctttgggcttgct

SEQ ID NO: 1112229 - DNA, 25 bp, Homo sapien
gagcgcttgatgctgtatctacaat

SEQ ID NO: 1112230 - DNA, 25 bp, Homo sapien
tgctgaacagcatatatgtgtagtt

SEQ ID NO: 1112231 - DNA, 25 bp, Homo sapien
gtttcgaatcctgctaagaaacaga

SEQ ID NO: 1112232 - DNA, 25 bp, Homo sapien
tcacgtttcaaattcctctgagcgc

SEQ ID NO: 1112233 - DNA, 25 bp, Homo sapien
atattctggagatatcaacccaatc

SEQ ID NO: 1112234 - DNA, 25 bp, Homo sapien
gagatatcaacccaatcacttcaaa

SEQ ID NO: 1112235 - DNA, 25 bp, Homo sapien
tcaacccaatcacttcaaacactat

SEQ ID NO: 1112236 - DNA, 25 bp, Homo sapien
taggcaaatgggaggacatcaaact

SEQ ID NO: 1112237 - DNA, 25 bp, Homo sapien
tgaaatccgacagcagttgcagcct

SEQ ID NO: 1112238 - DNA, 25 bp, Homo sapien
gaacacgaccttgtgaagtaagtag

SEQ ID NO: 1112239 - DNA, 25 bp, Homo sapien
gtaagtagttgagggccaattgctc

SEQ ID NO: 1112240 - DNA, 25 bp, Homo sapien
gagtctggttcatttgctgtctaca

SEQ ID NO: 1112241 - DNA, 25 bp, Homo sapien
cataaagtatcgtagcctcaggtca

SEQ ID NO: 1112242 - DNA, 25 bp, Homo sapien
cactagggatctaaccgcacaatgg

SEQ ID NO: 1112243 - DNA, 25 bp, Homo sapien
tatagcaagatctggcataggcaca

SEQ ID NO: 1112244 - DNA, 25 bp, Homo sapien
tgaacagacttgctagccccatgag

SEQ ID NO: 1112245 - DNA, 25 bp, Homo sapien
caatgagctctaggaaaccaaggaa

SEQ ID NO: 1112246 - DNA, 25 bp, Homo sapien
gggttcctagcgcagttgtcacata

SEQ ID NO: 1112247 - DNA, 25 bp, Homo sapien
gaactatactggtggcagcataaat

SEQ ID NO: 1112248 - DNA, 25 bp, Homo sapien
cctaaggaacgaattgtgatgactc

SEQ ID NO: 1112249 - DNA, 25 bp, Homo sapien
ttgtaaacaccttatgggtagaatc

SEQ ID NO: 1112250 - DNA, 25 bp, Homo sapien
caagtctaagctgaactaatgttct

SEQ ID NO: 1112251 - DNA, 25 bp, Homo sapien
tctgactcaattaccaaaacaaagc

SEQ ID NO: 1112252 - DNA, 25 bp, Homo sapien
agcatactgtatatttatcattgga

SEQ ID NO: 1112253 - DNA, 25 bp, Homo sapien
acagcatttatgctgcctaaggcac

SEQ ID NO: 1112254 - DNA, 25 bp, Homo sapien
ggcttctgtgatcacatgtgtgaat

SEQ ID NO: 1112255 - DNA, 25 bp, Homo sapien
gattgtgtggtccttaccatatagg

SEQ ID NO: 1112256 - DNA, 25 bp, Homo sapien
aatcacagcatttatgctgcctaag

SEQ ID NO: 1112257 - DNA, 25 bp, Homo sapien
taggctcaaatgatgaaacgttacc

SEQ ID NO: 1112258 - DNA, 25 bp, Homo sapien
gggttctcacaagggcatagattct

SEQ ID NO: 1112259 - DNA, 25 bp, Homo sapien
ttcaggttcacatcatgctgtctca

SEQ ID NO: 1112260 - DNA, 25 bp, Homo sapien
tttgttagaaccaacaccagcaaga

SEQ ID NO: 1112261 - DNA, 25 bp, Homo sapien
tggcatgactctgaacctgggcaca

SEQ ID NO: 1112262 - DNA, 25 bp, Homo sapien
atgactctgaacctgggcacagccc

SEQ ID NO: 1112263 - DNA, 25 bp, Homo sapien
cagagtggcatgactctgaacctgg

SEQ ID NO: 1112264 - DNA, 25 bp, Homo sapien
cccacagagtggcatgactctgaac

SEQ ID NO: 1112265 - DNA, 25 bp, Homo sapien
aggagccaggtgtggctgcttctgt

SEQ ID NO: 1112266 - DNA, 25 bp, Homo sapien
gcagaggagccaggtgtggctgctt

SEQ ID NO: 1112267 - DNA, 25 bp, Homo sapien
cagaggagccaggtgtggctgcttc

SEQ ID NO: 1112268 - DNA, 25 bp, Homo sapien
ctgcagaggagccaggtgtggctgc

SEQ ID NO: 1112269 - DNA, 25 bp, Homo sapien
tggaactctggctaagggacctaag

SEQ ID NO: 1112270 - DNA, 25 bp, Homo sapien
taagggagtgctgccagaaggtctc

SEQ ID NO: 1112271 - DNA, 25 bp, Homo sapien
tttgggcatacaagaactgggcttc

SEQ ID NO: 1112272 - DNA, 25 bp, Homo sapien
cactctgggatcttggcgagctact

SEQ ID NO: 1112273 - DNA, 25 bp, Homo sapien
ttggcaaaatctcgagagatctctc

SEQ ID NO: 1112274 - DNA, 25 bp, Homo sapien
tggcaaaatctcgagagatctctct

SEQ ID NO: 1112275 - DNA, 25 bp, Homo sapien
cttggcaaaatctcgagagatctct

SEQ ID NO: 1112276 - DNA, 25 bp, Homo sapien
gcaaaatctcgagagatctctcttc

SEQ ID NO: 1112277 - DNA, 25 bp, Homo sapien
caggaactctttcctttcaggatca

SEQ ID NO: 1112278 - DNA, 25 bp, Homo sapien
cataaagacgaagaggtcatccagg

SEQ ID NO: 1112279 - DNA, 25 bp, Homo sapien
caggatcaccgtccagttcatacag

SEQ ID NO: 1112280 - DNA, 25 bp, Homo sapien
tgcataaagacgaagaggtcatcca

SEQ ID NO: 1112281 - DNA, 25 bp, Homo sapien
ccagatcttcttgttgatgatctcc

SEQ ID NO: 1112282 - DNA, 25 bp, Homo sapien
cagatcttcttgttgatgatctcca

SEQ ID NO: 1112283 - DNA, 25 bp, Homo sapien
agatcttcttgttgatgatctccac

SEQ ID NO: 1112284 - DNA, 25 bp, Homo sapien
caggtttaggcctttggtgatctcc

SEQ ID NO: 1112285 - DNA, 25 bp, Homo sapien
aaggcagcgctggtgatggatgtgg

SEQ ID NO: 1112286 - DNA, 25 bp, Homo sapien
tgagggtgaaggcagcgctggtgat

SEQ ID NO: 1112287 - DNA, 25 bp, Homo sapien
gatgtgggcaggtttaggcctttgg

SEQ ID NO: 1112288 - DNA, 25 bp, Homo sapien
gatgggaaagcggatcttgggtggg

SEQ ID NO: 1112289 - DNA, 25 bp, Homo sapien
agtagccgcagcaggtgagtagcca

SEQ ID NO: 1112290 - DNA, 25 bp, Homo sapien
tggagccaagcccaaggatgggaaa

SEQ ID NO: 1112291 - DNA, 25 bp, Homo sapien
ggttgccatcaattgctgcctggag

SEQ ID NO: 1112292 - DNA, 25 bp, Homo sapien
taggtggtgccatcgatgtccacag

SEQ ID NO: 1112293 - DNA, 25 bp, Homo sapien
gctgccgtgccatgctgaaaaagtt

SEQ ID NO: 1112294 - DNA, 25 bp, Homo sapien
aaaaagttgcgctggaaggcctgct

SEQ ID NO: 1112295 - DNA, 25 bp, Homo sapien
caatgctactcgtggtcaggttcag

SEQ ID NO: 1112296 - DNA, 25 bp, Homo sapien
cacaggcttctgggcaaacagcaca

SEQ ID NO: 1112297 - DNA, 25 bp, Homo sapien
acaggcttctgggcaaacagcacac

SEQ ID NO: 1112298 - DNA, 25 bp, Homo sapien
tgccccgggatgaggtaggacttgg

SEQ ID NO: 1112299 - DNA, 25 bp, Homo sapien
gtgccccgggatgaggtaggacttg

SEQ ID NO: 1112300 - DNA, 25 bp, Homo sapien
ccccgggatgaggtaggacttggtg

SEQ ID NO: 1112301 - DNA, 25 bp, Homo sapien
gacggacacgtccaaactctcaatg

SEQ ID NO: 1112302 - DNA, 25 bp, Homo sapien
aatccctgattggacaacgctgtct

SEQ ID NO: 1112303 - DNA, 25 bp, Homo sapien
ctctcaatgtctggccaaatggtgc

SEQ ID NO: 1112304 - DNA, 25 bp, Homo sapien
caaatggtgctcgtcgacgtgggct

SEQ ID NO: 1112305 - DNA, 25 bp, Homo sapien
tggaagggcaccaaccatgctcagc

SEQ ID NO: 1112306 - DNA, 25 bp, Homo sapien
ctggaagggcaccaaccatgctcag

SEQ ID NO: 1112307 - DNA, 25 bp, Homo sapien
gctggaagggcaccaaccatgctca

SEQ ID NO: 1112308 - DNA, 25 bp, Homo sapien
ggaagggcaccaaccatgctcagca

SEQ ID NO: 1112309 - DNA, 25 bp, Homo sapien
gggccctgaggactgattcaagact

SEQ ID NO: 1112310 - DNA, 25 bp, Homo sapien
caagacttgtgtttgagggacccgt

SEQ ID NO: 1112311 - DNA, 25 bp, Homo sapien
cttcagaccattagaagggggatct

SEQ ID NO: 1112312 - DNA, 25 bp, Homo sapien
tggccctgaactgccctcacagcct

SEQ ID NO: 1112313 - DNA, 25 bp, Homo sapien
tgagggttcactccaacggtgtggc

SEQ ID NO: 1112314 - DNA, 25 bp, Homo sapien
ggctctgggtgacaccctgctgttg

SEQ ID NO: 1112315 - DNA, 25 bp, Homo sapien
ctaggctacccatgtgctatcacat

SEQ ID NO: 1112316 - DNA, 25 bp, Homo sapien
gaatacatataagatggagagcagg

SEQ ID NO: 1112317 - DNA, 25 bp, Homo sapien
caacatgttcttgaatttcatagga

SEQ ID NO: 1112318 - DNA, 25 bp, Homo sapien
taatatttaatgaggcggcctctct

SEQ ID NO: 1112319 - DNA, 25 bp, Homo sapien
ttaaaaggtgctaccagcctgtccc

SEQ ID NO: 1112320 - DNA, 25 bp, Homo sapien
gacctgtatttgatgcaaacaccac

SEQ ID NO: 1112321 - DNA, 25 bp, Homo sapien
ttcaatcatggctcattttaaggga

SEQ ID NO: 1112322 - DNA, 25 bp, Homo sapien
tatatttcacgtgctaaagagtttg

SEQ ID NO: 1112323 - DNA, 25 bp, Homo sapien
tgtttgtcaggttaacacttctggt

SEQ ID NO: 1112324 - DNA, 25 bp, Homo sapien
catccttacgatgaaaaaattccct

SEQ ID NO: 1112325 - DNA, 25 bp, Homo sapien
ttactttgagaggtagtaatttata

SEQ ID NO: 1112326 - DNA, 25 bp, Homo sapien
gtcaaataatagtatctggttgtag

SEQ ID NO: 1112327 - DNA, 25 bp, Homo sapien
aataatagtatctggttgtagctaa

SEQ ID NO: 1112328 - DNA, 25 bp, Homo sapien
tgtgcctggcttgttagttgtggct

SEQ ID NO: 1112329 - DNA, 25 bp, Homo sapien
ctctccctcctattacttcctcttt

SEQ ID NO: 1112330 - DNA, 25 bp, Homo sapien
tgggtgcttcctctccctcctatta

SEQ ID NO: 1112331 - DNA, 25 bp, Homo sapien
ttcctctccctcctattacttcctc

SEQ ID NO: 1112332 - DNA, 25 bp, Homo sapien
tgcttcctctccctcctattacttc

SEQ ID NO: 1112333 - DNA, 25 bp, Homo sapien
ataagccatgcaaggtgtctctcag

SEQ ID NO: 1112334 - DNA, 25 bp, Homo sapien
taagccatgcaaggtgtctctcaga

SEQ ID NO: 1112335 - DNA, 25 bp, Homo sapien
gcaagtctgatggtgttcaaacctg

SEQ ID NO: 1112336 - DNA, 25 bp, Homo sapien
cactctgggaatggtaatggccacg

SEQ ID NO: 1112337 - DNA, 25 bp, Homo sapien
gacttggagagatatacacgttacc

SEQ ID NO: 1112338 - DNA, 25 bp, Homo sapien
cacgttaccatccacaagaactggg

SEQ ID NO: 1112339 - DNA, 25 bp, Homo sapien
gttactgaactttgaggaagagtcc

SEQ ID NO: 1112340 - DNA, 25 bp, Homo sapien
ggaagagtccactgtaataacagta

SEQ ID NO: 1112341 - DNA, 25 bp, Homo sapien
cagccaaagtattgattcttacaga

SEQ ID NO: 1112342 - DNA, 25 bp, Homo sapien
taaaagcgtttctccattatgagca

SEQ ID NO: 1112343 - DNA, 25 bp, Homo sapien
ggcactctgccaatatttggttttg

SEQ ID NO: 1112344 - DNA, 25 bp, Homo sapien
aagtggcactctgccaatatttggt

SEQ ID NO: 1112345 - DNA, 25 bp, Homo sapien
tatttggttttgatgctgacgaggc

SEQ ID NO: 1112346 - DNA, 25 bp, Homo sapien
ttgatgctgacgaggccattcacag

SEQ ID NO: 1112347 - DNA, 25 bp, Homo sapien
tttcttcagccttgaaggccccttc

SEQ ID NO: 1112348 - DNA, 25 bp, Homo sapien
cccacatgtactgacatccactcat

SEQ ID NO: 1112349 - DNA, 25 bp, Homo sapien
ttgttttcttcagccttgaaggccc

SEQ ID NO: 1112350 - DNA, 25 bp, Homo sapien
ttgaaggccccttcccacatgtact

SEQ ID NO: 1112351 - DNA, 25 bp, Homo sapien
caggacaaatgcttcactatcttct

SEQ ID NO: 1112352 - DNA, 25 bp, Homo sapien
ttctgactggcagtactcctgtggc

SEQ ID NO: 1112353 - DNA, 25 bp, Homo sapien
gactggcagtactcctgtggctctg

SEQ ID NO: 1112354 - DNA, 25 bp, Homo sapien
aatgcttcactatcttctgactggc

SEQ ID NO: 1112355 - DNA, 25 bp, Homo sapien
cttgaggaggcgtctgccaacatcc

SEQ ID NO: 1112356 - DNA, 25 bp, Homo sapien
gcgtctgccaacatccctgcacctc

SEQ ID NO: 1112357 - DNA, 25 bp, Homo sapien
gaggaggcgtctgccaacatccctg

SEQ ID NO: 1112358 - DNA, 25 bp, Homo sapien
cgtctgccaacatccctgcacctct

SEQ ID NO: 1112359 - DNA, 25 bp, Homo sapien
gtatccctcgggactccttggccta

SEQ ID NO: 1112360 - DNA, 25 bp, Homo sapien
tgaaaagccggccagcatcggtatc

SEQ ID NO: 1112361 - DNA, 25 bp, Homo sapien
cttgataaagctgagccgctggcac

SEQ ID NO: 1112362 - DNA, 25 bp, Homo sapien
tcaacgttcagcttgaaaagccggc

SEQ ID NO: 1112363 - DNA, 25 bp, Homo sapien
tattgctcagtgtagccagaagttt

SEQ ID NO: 1112364 - DNA, 25 bp, Homo sapien
aaactgttattgctcagtgtagcca

SEQ ID NO: 1112365 - DNA, 25 bp, Homo sapien
attcaaactgttattgctcagtgta

SEQ ID NO: 1112366 - DNA, 25 bp, Homo sapien
gactatgtcaactgcactgattagg

SEQ ID NO: 1112367 - DNA, 25 bp, Homo sapien
ttgtctttgcctcttctgcggcccg

SEQ ID NO: 1112368 - DNA, 25 bp, Homo sapien
tctttgcctcttctgcggcccgctc

SEQ ID NO: 1112369 - DNA, 25 bp, Homo sapien
tttgcctcttctgcggcccgctccc

SEQ ID NO: 1112370 - DNA, 25 bp, Homo sapien
ttttgtctttgcctcttctgcggcc

SEQ ID NO: 1112371 - DNA, 25 bp, Homo sapien
gaagccaagttacaatgattttcac

SEQ ID NO: 1112372 - DNA, 25 bp, Homo sapien
tgattttcactagacgtttctcaaa

SEQ ID NO: 1112373 - DNA, 25 bp, Homo sapien
gacgtttctcaaatcctatgggtga

SEQ ID NO: 1112374 - DNA, 25 bp, Homo sapien
tgggtgacacgagcccatttcctct

SEQ ID NO: 1112375 - DNA, 25 bp, Homo sapien
aatctgttgtggattaccaatatca

SEQ ID NO: 1112376 - DNA, 25 bp, Homo sapien
ctgttgtggattaccaatatcatca

SEQ ID NO: 1112377 - DNA, 25 bp, Homo sapien
tctgttgtggattaccaatatcatc

SEQ ID NO: 1112378 - DNA, 25 bp, Homo sapien
aaatctgttgtggattaccaatatc

SEQ ID NO: 1112379 - DNA, 25 bp, Homo sapien
gaagcagcatggttgatgctctttg

SEQ ID NO: 1112380 - DNA, 25 bp, Homo sapien
aataagatggaatgtattatataca

SEQ ID NO: 1112381 - DNA, 25 bp, Homo sapien
aatggaagcagcatggttgatgctc

SEQ ID NO: 1112382 - DNA, 25 bp, Homo sapien
agcagcatggttgatgctctttgag

SEQ ID NO: 1112383 - DNA, 25 bp, Homo sapien
taataagtagcaagtgccaggatca

SEQ ID NO: 1112384 - DNA, 25 bp, Homo sapien
gatcagtttgtcattttagatacac

SEQ ID NO: 1112385 - DNA, 25 bp, Homo sapien
tcgtattgccaaacagtgatcttgt

SEQ ID NO: 1112386 - DNA, 25 bp, Homo sapien
tttagatacacatcccctcgtattg

SEQ ID NO: 1112387 - DNA, 25 bp, Homo sapien
tgcttaacgatgcagtatcccctgt

SEQ ID NO: 1112388 - DNA, 25 bp, Homo sapien
gcatcacgcctgttcaaaaactggg

SEQ ID NO: 1112389 - DNA, 25 bp, Homo sapien
tactctagaaatccccgataggctg

SEQ ID NO: 1112390 - DNA, 25 bp, Homo sapien
tgtaaatcagcatgggcatacctcc

SEQ ID NO: 1112391 - DNA, 25 bp, Homo sapien
tcggctctgatttggtaatgttttg

SEQ ID NO: 1112392 - DNA, 25 bp, Homo sapien
tgttttgtaaagcataaggacagcc

SEQ ID NO: 1112393 - DNA, 25 bp, Homo sapien
ttttcttttcggctctgatttggta

SEQ ID NO: 1112394 - DNA, 25 bp, Homo sapien
tgtaaagcataaggacagccacaag

SEQ ID NO: 1112395 - DNA, 25 bp, Homo sapien
caatccatctagacctgcagaagta

SEQ ID NO: 1112396 - DNA, 25 bp, Homo sapien
gaagtagtcacccataaggaggaac

SEQ ID NO: 1112397 - DNA, 25 bp, Homo sapien
acctgcagaagtagtcacccataag

SEQ ID NO: 1112398 - DNA, 25 bp, Homo sapien
tcagacaatccatctagacctgcag

SEQ ID NO: 1112399 - DNA, 25 bp, Homo sapien
gatcatttcgggatgagaatccaca

SEQ ID NO: 1112400 - DNA, 25 bp, Homo sapien
ctaagacatgggatcatttcgggat

SEQ ID NO: 1112401 - DNA, 25 bp, Homo sapien
gacatgggatcatttcgggatgaga

SEQ ID NO: 1112402 - DNA, 25 bp, Homo sapien
catgggatcatttcgggatgagaat

SEQ ID NO: 1112403 - DNA, 25 bp, Homo sapien
aaaagaatctcgaagtgaaaggaca

SEQ ID NO: 1112404 - DNA, 25 bp, Homo sapien
gaaaggaaaagaatctcgaagtgaa

SEQ ID NO: 1112405 - DNA, 25 bp, Homo sapien
gaagtgaaaggacaagttcgaatgc

SEQ ID NO: 1112406 - DNA, 25 bp, Homo sapien
agaatctcgaagtgaaaggacaagt

SEQ ID NO: 1112407 - DNA, 25 bp, Homo sapien
tcactctaacgagctgcaatgtaaa

SEQ ID NO: 1112408 - DNA, 25 bp, Homo sapien
tgtaaaatctctggagaaggtgtga

SEQ ID NO: 1112409 - DNA, 25 bp, Homo sapien
tcactgaattcgaatcactctaacg

SEQ ID NO: 1112410 - DNA, 25 bp, Homo sapien
tgcaatgtaaaatctctggagaagg

SEQ ID NO: 1112411 - DNA, 25 bp, Homo sapien
tcgctcttgccaaggaacaagtcgg

SEQ ID NO: 1112412 - DNA, 25 bp, Homo sapien
gttcgctcttgccaaggaacaagtc

SEQ ID NO: 1112413 - DNA, 25 bp, Homo sapien
gctcttgccaaggaacaagtcggtc

SEQ ID NO: 1112414 - DNA, 25 bp, Homo sapien
cgctgttcgctcttgccaaggaaca

SEQ ID NO: 1112415 - DNA, 25 bp, Homo sapien
aagatcagtgctaaagtgaactgtc

SEQ ID NO: 1112416 - DNA, 25 bp, Homo sapien
tctctctgtggcatgtaattcctca

SEQ ID NO: 1112417 - DNA, 25 bp, Homo sapien
tcctcagggacatacaccaaattga

SEQ ID NO: 1112418 - DNA, 25 bp, Homo sapien
gcatacaattgtgcattagtggtgt

SEQ ID NO: 1112419 - DNA, 25 bp, Homo sapien
cacatcagtcttgagtgaaccattc

SEQ ID NO: 1112420 - DNA, 25 bp, Homo sapien
tgaaccattcatgcaagattgtgga

SEQ ID NO: 1112421 - DNA, 25 bp, Homo sapien
ccattcatgcaagattgtggaggga

SEQ ID NO: 1112422 - DNA, 25 bp, Homo sapien
cttctggaatattgtcacatcagtc

SEQ ID NO: 1112423 - DNA, 25 bp, Homo sapien
gattgaatcattgttagctaagaga

SEQ ID NO: 1112424 - DNA, 25 bp, Homo sapien
tacacatagtagtctcagtgagtgg

SEQ ID NO: 1112425 - DNA, 25 bp, Homo sapien
gatttattatccaggctcacttctt

SEQ ID NO: 1112426 - DNA, 25 bp, Homo sapien
tatcagcaggtctagggtaaggcct

SEQ ID NO: 1112427 - DNA, 25 bp, Homo sapien
ttttaggaggattagcaagatccag

SEQ ID NO: 1112428 - DNA, 25 bp, Homo sapien
cttttttaggaggattagcaagatc

SEQ ID NO: 1112429 - DNA, 25 bp, Homo sapien
gcccaggagattcaatggaaggcat

SEQ ID NO: 1112430 - DNA, 25 bp, Homo sapien
ggaggattagcaagatccaggccct

SEQ ID NO: 1112431 - DNA, 25 bp, Homo sapien
ttcatgcacagaaacatcccactcc

SEQ ID NO: 1112432 - DNA, 25 bp, Homo sapien
ccttcccaggctttcatgcacagaa

SEQ ID NO: 1112433 - DNA, 25 bp, Homo sapien
gtttttgtgccttgcttggcattgc

SEQ ID NO: 1112434 - DNA, 25 bp, Homo sapien
tgtttttgtgccttgcttggcattg

SEQ ID NO: 1112435 - DNA, 25 bp, Homo sapien
tatcttgttcacagatatgaactag

SEQ ID NO: 1112436 - DNA, 25 bp, Homo sapien
caattgccgtattgaactaagtgga

SEQ ID NO: 1112437 - DNA, 25 bp, Homo sapien
gtattatgccaataacaattgccgt

SEQ ID NO: 1112438 - DNA, 25 bp, Homo sapien
tcaaggagtttagaggtattatgcc

SEQ ID NO: 1112439 - DNA, 25 bp, Homo sapien
gaggtagggattgtgccttgttcct

SEQ ID NO: 1112440 - DNA, 25 bp, Homo sapien
cataaaaatatggtcccctttctgc

SEQ ID NO: 1112441 - DNA, 25 bp, Homo sapien
gcagatagtgtagaacagaacacct

SEQ ID NO: 1112442 - DNA, 25 bp, Homo sapien
cacacttgatagatccaggagggaa

SEQ ID NO: 1112443 - DNA, 25 bp, Homo sapien
ctttaaaactgtgctagtgcctggg

SEQ ID NO: 1112444 - DNA, 25 bp, Homo sapien
gaccaattagttgctatggtgtcaa

SEQ ID NO: 1112445 - DNA, 25 bp, Homo sapien
tggtgtcaataagtgcaaattgctg

SEQ ID NO: 1112446 - DNA, 25 bp, Homo sapien
tagggaaatctccactgggtcagtg

SEQ ID NO: 1112447 - DNA, 25 bp, Homo sapien
cctgaaagtttgcaggtcgtgaaga

SEQ ID NO: 1112448 - DNA, 25 bp, Homo sapien
cacaggaaaggtggcttaaattgac

SEQ ID NO: 1112449 - DNA, 25 bp, Homo sapien
ttacattgatccctgacacaggaaa

SEQ ID NO: 1112450 - DNA, 25 bp, Homo sapien
cattgatccctgacacaggaaaggt

SEQ ID NO: 1112451 - DNA, 25 bp, Homo sapien
attgatccctgacacaggaaaggtg

SEQ ID NO: 1112452 - DNA, 25 bp, Homo sapien
ggccaaagagaggaaagcacttcag

SEQ ID NO: 1112453 - DNA, 25 bp, Homo sapien
gagaggaaagcacttcagcttccag

SEQ ID NO: 1112454 - DNA, 25 bp, Homo sapien
gggctgctcatctagatggccaaag

SEQ ID NO: 1112455 - DNA, 25 bp, Homo sapien
gctgctcatctagatggccaaagag

SEQ ID NO: 1112456 - DNA, 25 bp, Homo sapien
tttttcaactttctaggtaagagca

SEQ ID NO: 1112457 - DNA, 25 bp, Homo sapien
tttctaggtaagagcaccacaaaga

SEQ ID NO: 1112458 - DNA, 25 bp, Homo sapien
ctatttgatgttggcggttttgttt

SEQ ID NO: 1112459 - DNA, 25 bp, Homo sapien
caactttctaggtaagagcaccaca

SEQ ID NO: 1112460 - DNA, 25 bp, Homo sapien
ctgcctactttggatttcatttgct

SEQ ID NO: 1112461 - DNA, 25 bp, Homo sapien
tcttctgcctactttggatttcatt

SEQ ID NO: 1112462 - DNA, 25 bp, Homo sapien
ttctgcctactttggatttcatttg

SEQ ID NO: 1112463 - DNA, 25 bp, Homo sapien
tctgcctactttggatttcatttgc

SEQ ID NO: 1112464 - DNA, 25 bp, Homo sapien
gcctttgtactgatttgggaaggta

SEQ ID NO: 1112465 - DNA, 25 bp, Homo sapien
gggaaggtattcgtttgcatgagat

SEQ ID NO: 1112466 - DNA, 25 bp, Homo sapien
catgagatacttgcacctggcctga

SEQ ID NO: 1112467 - DNA, 25 bp, Homo sapien
tatttcgtttcagtgtggtggatcc

SEQ ID NO: 1112468 - DNA, 25 bp, Homo sapien
aagttccatcgctgcattctgtcac

SEQ ID NO: 1112469 - DNA, 25 bp, Homo sapien
tctaaagttccatcgctgcattctg

SEQ ID NO: 1112470 - DNA, 25 bp, Homo sapien
caattctaaagttccatcgctgcat

SEQ ID NO: 1112471 - DNA, 25 bp, Homo sapien
acaggagccaattctaaagttccat

SEQ ID NO: 1112472 - DNA, 25 bp, Homo sapien
tcttcagaagcagtaccagaacaac

SEQ ID NO: 1112473 - DNA, 25 bp, Homo sapien
cctgctgctgattggaacttcttca

SEQ ID NO: 1112474 - DNA, 25 bp, Homo sapien
gcagtaccagaacaaccaggtcttc

SEQ ID NO: 1112475 - DNA, 25 bp, Homo sapien
tttcccctgctgctgattggaactt

SEQ ID NO: 1112476 - DNA, 25 bp, Homo sapien
cagttatcaagctctcttcaaattc

SEQ ID NO: 1112477 - DNA, 25 bp, Homo sapien
taatgctggatccacatagaacaca

SEQ ID NO: 1112478 - DNA, 25 bp, Homo sapien
catagaacacagttatcaagctctc

SEQ ID NO: 1112479 - DNA, 25 bp, Homo sapien
cttatcagttgtaatgctggatcca

SEQ ID NO: 1112480 - DNA, 25 bp, Homo sapien
ttgtacatcatgaagataccctgga

SEQ ID NO: 1112481 - DNA, 25 bp, Homo sapien
cctggagttctttcaccatcctgga

SEQ ID NO: 1112482 - DNA, 25 bp, Homo sapien
aaccactgttccgaaattactgtgt

SEQ ID NO: 1112483 - DNA, 25 bp, Homo sapien
tacttgtgatatgtagcatgagaag

SEQ ID NO: 1112484 - DNA, 25 bp, Homo sapien
tcaacaagacccttagacttgggat

SEQ ID NO: 1112485 - DNA, 25 bp, Homo sapien
tggtcaacaagacccttagacttgg

SEQ ID NO: 1112486 - DNA, 25 bp, Homo sapien
gtcaacaagacccttagacttggga

SEQ ID NO: 1112487 - DNA, 25 bp, Homo sapien
atgcatttgcttcagacatttgctt

SEQ ID NO: 1112488 - DNA, 25 bp, Homo sapien
tctttttctgcagaagtgtcttttt

SEQ ID NO: 1112489 - DNA, 25 bp, Homo sapien
tttctgcagaagtgtctttttctgc

SEQ ID NO: 1112490 - DNA, 25 bp, Homo sapien
gcttcagacatttgctttgccagta

SEQ ID NO: 1112491 - DNA, 25 bp, Homo sapien
atttagtactcagaataacaccggg

SEQ ID NO: 1112492 - DNA, 25 bp, Homo sapien
gcatttgagcccatgtccagatttc

SEQ ID NO: 1112493 - DNA, 25 bp, Homo sapien
taaggaagctgcttaaggtcatgca

SEQ ID NO: 1112494 - DNA, 25 bp, Homo sapien
tatgaccctgacaaatcacagatgg

SEQ ID NO: 1112495 - DNA, 25 bp, Homo sapien
acattttcacaagggcctgctcgtt

SEQ ID NO: 1112496 - DNA, 25 bp, Homo sapien
attttcacaagggcctgctcgttca

SEQ ID NO: 1112497 - DNA, 25 bp, Homo sapien
acacattttcacaagggcctgctcg

SEQ ID NO: 1112498 - DNA, 25 bp, Homo sapien
tacacattttcacaagggcctgctc

SEQ ID NO: 1112499 - DNA, 25 bp, Homo sapien
ttcttctgcaatttcctgtgcccta

SEQ ID NO: 1112500 - DNA, 25 bp, Homo sapien
gcctaggcgtctgtgtgctttccct

SEQ ID NO: 1112501 - DNA, 25 bp, Homo sapien
tccctcgccatttgtaaggctgagc

SEQ ID NO: 1112502 - DNA, 25 bp, Homo sapien
atgggctacatcttcccagtggcct

SEQ ID NO: 1112503 - DNA, 25 bp, Homo sapien
aaagagccatagtgagcttctgact

SEQ ID NO: 1112504 - DNA, 25 bp, Homo sapien
tggaaaagagccatagtgagcttct

SEQ ID NO: 1112505 - DNA, 25 bp, Homo sapien
agccatagtgagcttctgactgtgg

SEQ ID NO: 1112506 - DNA, 25 bp, Homo sapien
gagccatagtgagcttctgactgtg

SEQ ID NO: 1112507 - DNA, 25 bp, Homo sapien
caggcatttcccccaggaaagccac

SEQ ID NO: 1112508 - DNA, 25 bp, Homo sapien
taccaggcatttcccccaggaaagc

SEQ ID NO: 1112509 - DNA, 25 bp, Homo sapien
ccaggcatttcccccaggaaagcca

SEQ ID NO: 1112510 - DNA, 25 bp, Homo sapien
ttgggttgctgtggtattttgacaa

SEQ ID NO: 1112511 - DNA, 25 bp, Homo sapien
atgtctgcaagaacctctagatcac

SEQ ID NO: 1112512 - DNA, 25 bp, Homo sapien
ggttgctgtggtattttgacaaatt

SEQ ID NO: 1112513 - DNA, 25 bp, Homo sapien
ctgcatgtctgcaagaacctctaga

SEQ ID NO: 1112514 - DNA, 25 bp, Homo sapien
cttgactcccaattggctgacaatt

SEQ ID NO: 1112515 - DNA, 25 bp, Homo sapien
gcttgactcccaattggctgacaat

SEQ ID NO: 1112516 - DNA, 25 bp, Homo sapien
tgcttgactcccaattggctgacaa

SEQ ID NO: 1112517 - DNA, 25 bp, Homo sapien
ctaaaagcacagtacacattttcag

SEQ ID NO: 1112518 - DNA, 25 bp, Homo sapien
aaaaatctaaaagcacagtacacat

SEQ ID NO: 1112519 - DNA, 25 bp, Homo sapien
attttactattacccacttatggtg

SEQ ID NO: 1112520 - DNA, 25 bp, Homo sapien
attacccacttatggtgatatttgc

SEQ ID NO: 1112521 - DNA, 25 bp, Homo sapien
ctttaacaagtgactacaaactggg

SEQ ID NO: 1112522 - DNA, 25 bp, Homo sapien
tgtacagctgttagcaatccttggt

SEQ ID NO: 1112523 - DNA, 25 bp, Homo sapien
tctctctcctaagtttgtacagctg

SEQ ID NO: 1112524 - DNA, 25 bp, Homo sapien
atggcctggccaacttacacctctt

SEQ ID NO: 1112525 - DNA, 25 bp, Homo sapien
cagtctctggtgatagcaaacatta

SEQ ID NO: 1112526 - DNA, 25 bp, Homo sapien
agtctctggtgatagcaaacattag

SEQ ID NO: 1112527 - DNA, 25 bp, Homo sapien
gcttttactagccaattccatttgg

SEQ ID NO: 1112528 - DNA, 25 bp, Homo sapien
caaaagcttttactagccaattcca

SEQ ID NO: 1112529 - DNA, 25 bp, Homo sapien
tcatgaagcttgtttccaaatgctc

SEQ ID NO: 1112530 - DNA, 25 bp, Homo sapien
gcaaatggtcatgaagcttgtttcc

SEQ ID NO: 1112531 - DNA, 25 bp, Homo sapien
ctagcaaatggtcatgaagcttgtt

SEQ ID NO: 1112532 - DNA, 25 bp, Homo sapien
gtcatgaagcttgtttccaaatgct

SEQ ID NO: 1112533 - DNA, 25 bp, Homo sapien
agttggcaaatcctactctggagaa

SEQ ID NO: 1112534 - DNA, 25 bp, Homo sapien
caagttggcaaatcctactctggag

SEQ ID NO: 1112535 - DNA, 25 bp, Homo sapien
agcaagttggcaaatcctactctgg

SEQ ID NO: 1112536 - DNA, 25 bp, Homo sapien
tggcaaatcctactctggagaaaca

SEQ ID NO: 1112537 - DNA, 25 bp, Homo sapien
cattctgggaaagatgaaatttttc

SEQ ID NO: 1112538 - DNA, 25 bp, Homo sapien
gaaagatgaaatttttcattgtgcc

SEQ ID NO: 1112539 - DNA, 25 bp, Homo sapien
gggaaagatgaaatttttcattgtg

SEQ ID NO: 1112540 - DNA, 25 bp, Homo sapien
tctgggaaagatgaaatttttcatt

SEQ ID NO: 1112541 - DNA, 25 bp, Homo sapien
agaagtaactgtgggcaatcctttt

SEQ ID NO: 1112542 - DNA, 25 bp, Homo sapien
cataagaagtaactgtgggcaatcc

SEQ ID NO: 1112543 - DNA, 25 bp, Homo sapien
ggcaatcctttttccttcgacttgc

SEQ ID NO: 1112544 - DNA, 25 bp, Homo sapien
caatcctttttccttcgacttgcct

SEQ ID NO: 1112545 - DNA, 25 bp, Homo sapien
tggaaatgtgtttcactggaccatc

SEQ ID NO: 1112546 - DNA, 25 bp, Homo sapien
ggataatatattcttcgaatggttt

SEQ ID NO: 1112547 - DNA, 25 bp, Homo sapien
ctggataatatattcttcgaatggt

SEQ ID NO: 1112548 - DNA, 25 bp, Homo sapien
ctggaccatccacactcttagtcat

SEQ ID NO: 1112549 - DNA, 25 bp, Homo sapien
cagccaggcagagcctacgatggac

SEQ ID NO: 1112550 - DNA, 25 bp, Homo sapien
ccttgcccctctcggttggcaatgt

SEQ ID NO: 1112551 - DNA, 25 bp, Homo sapien
aggcagagcctacgatggacctaag

SEQ ID NO: 1112552 - DNA, 25 bp, Homo sapien
cccctctcggttggcaatgtcagca

SEQ ID NO: 1112553 - DNA, 25 bp, Homo sapien
agagctgttaggtctgtttccctca

SEQ ID NO: 1112554 - DNA, 25 bp, Homo sapien
gagctgttaggtctgtttccctcat

SEQ ID NO: 1112555 - DNA, 25 bp, Homo sapien
cagagctgttaggtctgtttccctc

SEQ ID NO: 1112556 - DNA, 25 bp, Homo sapien
acagagctgttaggtctgtttccct

SEQ ID NO: 1112557 - DNA, 25 bp, Homo sapien
cgcgggggacgctccagggttaatg

SEQ ID NO: 1112558 - DNA, 25 bp, Homo sapien
aaagaacgtctgttcgccgcggctg

SEQ ID NO: 1112559 - DNA, 25 bp, Homo sapien
agaaagaacgtctgttcgccgcggc

SEQ ID NO: 1112560 - DNA, 25 bp, Homo sapien
taatgcgtctttgatacctgagatt

SEQ ID NO: 1112561 - DNA, 25 bp, Homo sapien
cttttctccacgcaccgagccagag

SEQ ID NO: 1112562 - DNA, 25 bp, Homo sapien
tcttttctccacgcaccgagccaga

SEQ ID NO: 1112563 - DNA, 25 bp, Homo sapien
ttctccacgcaccgagccagaggcc

SEQ ID NO: 1112564 - DNA, 25 bp, Homo sapien
tccacgcaccgagccagaggccccg

SEQ ID NO: 1112565 - DNA, 25 bp, Homo sapien
tctgcgagcgcgccccgagggaggg

SEQ ID NO: 1112566 - DNA, 25 bp, Homo sapien
ctgcgagcgcgccccgagggagggc

SEQ ID NO: 1112567 - DNA, 25 bp, Homo sapien
tgcgagcgcgccccgagggagggcc

SEQ ID NO: 1112568 - DNA, 25 bp, Homo sapien
gaagagagtgccttagaacctggcc

SEQ ID NO: 1112569 - DNA, 25 bp, Homo sapien
caaagagcaaactcggtgggacccg

SEQ ID NO: 1112570 - DNA, 25 bp, Homo sapien
tacgtccgttaaatctatgcctctg

SEQ ID NO: 1112571 - DNA, 25 bp, Homo sapien
tgggacccgttccacacataaatag

SEQ ID NO: 1112572 - DNA, 25 bp, Homo sapien
gcaacagtgactatcataaaacaaa

SEQ ID NO: 1112573 - DNA, 25 bp, Homo sapien
ttgccatttgcaagggctccacagc

SEQ ID NO: 1112574 - DNA, 25 bp, Homo sapien
cttgccatttgcaagggctccacag

SEQ ID NO: 1112575 - DNA, 25 bp, Homo sapien
caggcaacagtgactatcataaaac

SEQ ID NO: 1112576 - DNA, 25 bp, Homo sapien
tgatatacaatctcaatggcacaga

SEQ ID NO: 1112577 - DNA, 25 bp, Homo sapien
gatcagataaataaactaccataaa

SEQ ID NO: 1112578 - DNA, 25 bp, Homo sapien
ggatcatccgattacacttaagcta

SEQ ID NO: 1112579 - DNA, 25 bp, Homo sapien
tcagggtaaggatataatgatatac

SEQ ID NO: 1112580 - DNA, 25 bp, Homo sapien
tctaaattcgttttctgttgccaac

SEQ ID NO: 1112581 - DNA, 25 bp, Homo sapien
gtcatctaaatgttgaaaaatcttc

SEQ ID NO: 1112582 - DNA, 25 bp, Homo sapien
tttgttctaccccacatgattcaat

SEQ ID NO: 1112583 - DNA, 25 bp, Homo sapien
tgccaacacatagtaacccagtgat

SEQ ID NO: 1112584 - DNA, 25 bp, Homo sapien
tagcttctgatttccaccgaatttt

SEQ ID NO: 1112585 - DNA, 25 bp, Homo sapien
ggaagctgactactaaagataagac

SEQ ID NO: 1112586 - DNA, 25 bp, Homo sapien
ttagacatacagaatagaaaaacag

SEQ ID NO: 1112587 - DNA, 25 bp, Homo sapien
cctttaaagctgtttgtatgccatc

SEQ ID NO: 1112588 - DNA, 25 bp, Homo sapien
tcaatgcagcctcgtactcatgggc

SEQ ID NO: 1112589 - DNA, 25 bp, Homo sapien
caagaattctctagtgctgtgcgtc

SEQ ID NO: 1112590 - DNA, 25 bp, Homo sapien
cgcacttggccaaaagaaatcattc

SEQ ID NO: 1112591 - DNA, 25 bp, Homo sapien
gcttggcagtatcttgtggccttgg

SEQ ID NO: 1112592 - DNA, 25 bp, Homo sapien
ttgtcccttggctaactactgttcc

SEQ ID NO: 1112593 - DNA, 25 bp, Homo sapien
tccatagtacagagtgctcatccct

SEQ ID NO: 1112594 - DNA, 25 bp, Homo sapien
tcaaggcactgaggcttaaactgca

SEQ ID NO: 1112595 - DNA, 25 bp, Homo sapien
taagtgctccttatggaccatgact

SEQ ID NO: 1112596 - DNA, 25 bp, Homo sapien
cactgtttctgtcaaacttacttgc

SEQ ID NO: 1112597 - DNA, 25 bp, Homo sapien
tcaaaaatacttaattcagcactgt

SEQ ID NO: 1112598 - DNA, 25 bp, Homo sapien
ccctccacctaataaacttcagaat

SEQ ID NO: 1112599 - DNA, 25 bp, Homo sapien
cacctgtgccataaagccaacctta

SEQ ID NO: 1112600 - DNA, 25 bp, Homo sapien
ggcgtatgcctgcaatcttagccac

SEQ ID NO: 1112601 - DNA, 25 bp, Homo sapien
cgtatgcctgcaatcttagccactt

SEQ ID NO: 1112602 - DNA, 25 bp, Homo sapien
atcacaaggtaaggagagatcgaga

SEQ ID NO: 1112603 - DNA, 25 bp, Homo sapien
gtggcgtatgcctgcaatcttagcc

SEQ ID NO: 1112604 - DNA, 25 bp, Homo sapien
tcaaaaccatcagtctgcatcattg

SEQ ID NO: 1112605 - DNA, 25 bp, Homo sapien
aaaccatcagtctgcatcattgatc

SEQ ID NO: 1112606 - DNA, 25 bp, Homo sapien
gttataaatgcccagcttcatcaaa

SEQ ID NO: 1112607 - DNA, 25 bp, Homo sapien
ccttaatgaatctagttataaatgc

SEQ ID NO: 1112608 - DNA, 25 bp, Homo sapien
cttctgtatttggtaagaagctgat

SEQ ID NO: 1112609 - DNA, 25 bp, Homo sapien
tggtaagaagctgattacaatgata

SEQ ID NO: 1112610 - DNA, 25 bp, Homo sapien
caatgataaaccacagacttcgcat

SEQ ID NO: 1112611 - DNA, 25 bp, Homo sapien
gaagctgattacaatgataaaccac

SEQ ID NO: 1112612 - DNA, 25 bp, Homo sapien
tttccgccaacaacagacctactgg

SEQ ID NO: 1112613 - DNA, 25 bp, Homo sapien
ctggtgaatcaacgaagactgtgga

SEQ ID NO: 1112614 - DNA, 25 bp, Homo sapien
aattaaggtgctttaaatgcctcct

SEQ ID NO: 1112615 - DNA, 25 bp, Homo sapien
tttaccgaaattaaacagccacgca

SEQ ID NO: 1112616 - DNA, 25 bp, Homo sapien
caaatgatctgctgataggcactgc

SEQ ID NO: 1112617 - DNA, 25 bp, Homo sapien
cagaccaatgtaggctgtggcttca

SEQ ID NO: 1112618 - DNA, 25 bp, Homo sapien
cagctgatcgaaaaagacatggttc

SEQ ID NO: 1112619 - DNA, 25 bp, Homo sapien
gaagaagcccatacgtttctcttgt

SEQ ID NO: 1112620 - DNA, 25 bp, Homo sapien
acaagcacctgccattacgcccagc

SEQ ID NO: 1112621 - DNA, 25 bp, Homo sapien
ttacaagcacctgccattacgccca

SEQ ID NO: 1112622 - DNA, 25 bp, Homo sapien
tacaagcacctgccattacgcccag

SEQ ID NO: 1112623 - DNA, 25 bp, Homo sapien
attacaagcacctgccattacgccc

SEQ ID NO: 1112624 - DNA, 25 bp, Homo sapien
aaacttctgatctccggttatccgc

SEQ ID NO: 1112625 - DNA, 25 bp, Homo sapien
gcatcacaggcgcaagggattctcc

SEQ ID NO: 1112626 - DNA, 25 bp, Homo sapien
tgcccagcttcgtaacttttagaaa

SEQ ID NO: 1112627 - DNA, 25 bp, Homo sapien
catgcccagcttcgtaacttttaga

SEQ ID NO: 1112628 - DNA, 25 bp, Homo sapien
tatattccagtaatgaagcacttac

SEQ ID NO: 1112629 - DNA, 25 bp, Homo sapien
tctcaaattcttgtgtctagaaaca

SEQ ID NO: 1112630 - DNA, 25 bp, Homo sapien
ttacttgccactttaaattctgtgc

SEQ ID NO: 1112631 - DNA, 25 bp, Homo sapien
tttaaataacatagatctcaaattc

SEQ ID NO: 1112632 - DNA, 25 bp, Homo sapien
ctcaaggatacactttcagctttat

SEQ ID NO: 1112633 - DNA, 25 bp, Homo sapien
aagaaagaaaactcagatcaggaag

SEQ ID NO: 1112634 - DNA, 25 bp, Homo sapien
gaaagcaagtggagaaacatttcag

SEQ ID NO: 1112635 - DNA, 25 bp, Homo sapien
aaactcaaggatacactttcagctt

SEQ ID NO: 1112636 - DNA, 25 bp, Homo sapien
tccagaacctcaagtacacacatta

SEQ ID NO: 1112637 - DNA, 25 bp, Homo sapien
tactggctccttctatgatttaaca

SEQ ID NO: 1112638 - DNA, 25 bp, Homo sapien
caaagcacagaaagggtaagtggcc

SEQ ID NO: 1112639 - DNA, 25 bp, Homo sapien
tggcccaaggtcatgaacagaagag

SEQ ID NO: 1112640 - DNA, 25 bp, Homo sapien
catgcattctggttagagactgaga

SEQ ID NO: 1112641 - DNA, 25 bp, Homo sapien
ctgaacagggccatgcgacgataca

SEQ ID NO: 1112642 - DNA, 25 bp, Homo sapien
tctgccataattgctgtgatcccca

SEQ ID NO: 1112643 - DNA, 25 bp, Homo sapien
tgtaacatgcactcagcttgactga

SEQ ID NO: 1112644 - DNA, 25 bp, Homo sapien
tctttattactcctgtttatatatg

SEQ ID NO: 1112645 - DNA, 25 bp, Homo sapien
ttattactcctgtttatatatgtta

SEQ ID NO: 1112646 - DNA, 25 bp, Homo sapien
tgaaatctctttattactcctgttt

SEQ ID NO: 1112647 - DNA, 25 bp, Homo sapien
aatctctttattactcctgtttata

SEQ ID NO: 1112648 - DNA, 25 bp, Homo sapien
gctgggcatgagtttccactctcta

SEQ ID NO: 1112649 - DNA, 25 bp, Homo sapien
ctgggcatgagtttccactctctac

SEQ ID NO: 1112650 - DNA, 25 bp, Homo sapien
tgctgggcatgagtttccactctct

SEQ ID NO: 1112651 - DNA, 25 bp, Homo sapien
agtcttaaagctttggtcacagtca

SEQ ID NO: 1112652 - DNA, 25 bp, Homo sapien
gtcttaaagctttggtcacagtcat

SEQ ID NO: 1112653 - DNA, 25 bp, Homo sapien
acaggataattctcgcctcaccagc

SEQ ID NO: 1112654 - DNA, 25 bp, Homo sapien
catccgtccgaccatagttagcgct

SEQ ID NO: 1112655 - DNA, 25 bp, Homo sapien
gagtcataattttgaaggcatcggg

SEQ ID NO: 1112656 - DNA, 25 bp, Homo sapien
gcccgggcatcgcagatctatagaa

SEQ ID NO: 1112657 - DNA, 25 bp, Homo sapien
caagccgaaatctataatcatgaag

SEQ ID NO: 1112658 - DNA, 25 bp, Homo sapien
agaatggatgatcaatgtaaaaagt

SEQ ID NO: 1112659 - DNA, 25 bp, Homo sapien
aaagttgagaggactgtacgtcaac

SEQ ID NO: 1112660 - DNA, 25 bp, Homo sapien
tcaacgagagtatacacaagccgaa

SEQ ID NO: 1112661 - DNA, 25 bp, Homo sapien
caccagcttttgaaagtttgttaca

SEQ ID NO: 1112662 - DNA, 25 bp, Homo sapien
tctccaccagcttttgaaagtttgt

SEQ ID NO: 1112663 - DNA, 25 bp, Homo sapien
tccaccagcttttgaaagtttgtta

SEQ ID NO: 1112664 - DNA, 25 bp, Homo sapien
ccttctccaccagcttttgaaagtt

SEQ ID NO: 1112665 - DNA, 25 bp, Homo sapien
gaaatcctcaaatcactaacttggt

SEQ ID NO: 1112666 - DNA, 25 bp, Homo sapien
taaacaactgtgtgttagatatccc

SEQ ID NO: 1112667 - DNA, 25 bp, Homo sapien
tatttattcatacctacagtgatct

SEQ ID NO: 1112668 - DNA, 25 bp, Homo sapien
cacacccttacacctctcagaaatg

SEQ ID NO: 1112669 - DNA, 25 bp, Homo sapien
tatacactgtgttcgattgttgcac

SEQ ID NO: 1112670 - DNA, 25 bp, Homo sapien
tcaaggtatttgtatgttccaggac

SEQ ID NO: 1112671 - DNA, 25 bp, Homo sapien
tctgacccagtaactactatacact

SEQ ID NO: 1112672 - DNA, 25 bp, Homo sapien
gatcaggaaacacatctgacccagt

SEQ ID NO: 1112673 - DNA, 25 bp, Homo sapien
tttgctccacttctattttaagcat

SEQ ID NO: 1112674 - DNA, 25 bp, Homo sapien
ttttgctccacttctattttaagca

SEQ ID NO: 1112675 - DNA, 25 bp, Homo sapien
aagtatcggtacgatagggagtcca

SEQ ID NO: 1112676 - DNA, 25 bp, Homo sapien
tttcaaggtcccaggacacacaaaa

SEQ ID NO: 1112677 - DNA, 25 bp, Homo sapien
ttgcaccaagcacccgccttttgtt

SEQ ID NO: 1112678 - DNA, 25 bp, Homo sapien
gcctgaagagggtccttgcaccaag

SEQ ID NO: 1112679 - DNA, 25 bp, Homo sapien
cacgtttgtcgtatacagtctccca

SEQ ID NO: 1112680 - DNA, 25 bp, Homo sapien
tgttcagtggcgtaaatgacccata

SEQ ID NO: 1112681 - DNA, 25 bp, Homo sapien
gaggactccgcatatcataaaagca

SEQ ID NO: 1112682 - DNA, 25 bp, Homo sapien
gatcaggtggaccaaactccagaga

SEQ ID NO: 1112683 - DNA, 25 bp, Homo sapien
tctgaggccactttatccccttgga

SEQ ID NO: 1112684 - DNA, 25 bp, Homo sapien
tcccttagggcatggtcgttcaacc

SEQ ID NO: 1112685 - DNA, 25 bp, Homo sapien
tatggttttgaacagctcagctgaa

SEQ ID NO: 1112686 - DNA, 25 bp, Homo sapien
tccccttggagtctaatgcttcaca

SEQ ID NO: 1112687 - DNA, 25 bp, Homo sapien
atcatgcagagatatgaggcagttc

SEQ ID NO: 1112688 - DNA, 25 bp, Homo sapien
tgtgaggtacagttgctaagatcgg

SEQ ID NO: 1112689 - DNA, 25 bp, Homo sapien
gagccagctgattcacccagtgtga

SEQ ID NO: 1112690 - DNA, 25 bp, Homo sapien
gcccttagggttccatgttccagtg

SEQ ID NO: 1112691 - DNA, 25 bp, Homo sapien
gcagctgtgcatcaaggatgtccac

SEQ ID NO: 1112692 - DNA, 25 bp, Homo sapien
cattggcaagactagcagcattttc

SEQ ID NO: 1112693 - DNA, 25 bp, Homo sapien
cttgttataactccgtccagctgaa

SEQ ID NO: 1112694 - DNA, 25 bp, Homo sapien
tgaagaacttacatccccagcaaac

SEQ ID NO: 1112695 - DNA, 25 bp, Homo sapien
ttaaggtaagccctgcatgtcttct

SEQ ID NO: 1112696 - DNA, 25 bp, Homo sapien
agccctgcatgtcttctctcgtttt

SEQ ID NO: 1112697 - DNA, 25 bp, Homo sapien
aaggtaagccctgcatgtcttctct

SEQ ID NO: 1112698 - DNA, 25 bp, Homo sapien
ggtaagccctgcatgtcttctctcg

SEQ ID NO: 1112699 - DNA, 25 bp, Homo sapien
gaaaactatcattagttttgaccgc

SEQ ID NO: 1112700 - DNA, 25 bp, Homo sapien
cagtagctgatgagtgacaattgta

SEQ ID NO: 1112701 - DNA, 25 bp, Homo sapien
gaaccaaagtgattttcagtagctg

SEQ ID NO: 1112702 - DNA, 25 bp, Homo sapien
ttgaccgcttttagaaccaaagtga

SEQ ID NO: 1112703 - DNA, 25 bp, Homo sapien
tgattccaaagcttcgggtctcaga

SEQ ID NO: 1112704 - DNA, 25 bp, Homo sapien
tccttcttccaatgtatcgagtaac

SEQ ID NO: 1112705 - DNA, 25 bp, Homo sapien
tgcagtatgtgcttgttcagaagaa

SEQ ID NO: 1112706 - DNA, 25 bp, Homo sapien
tgagacccttgttggttctaaaaga

SEQ ID NO: 1112707 - DNA, 25 bp, Homo sapien
taaaacgattaagcatttgccacag

SEQ ID NO: 1112708 - DNA, 25 bp, Homo sapien
tattctgcaatctatgaagcacgga

SEQ ID NO: 1112709 - DNA, 25 bp, Homo sapien
aagtgaattcctacctctcagtggt

SEQ ID NO: 1112710 - DNA, 25 bp, Homo sapien
gaagcacggatgttctgcattgtgg

SEQ ID NO: 1112711 - DNA, 25 bp, Homo sapien
tgttcagaatatatctcaaactggg

SEQ ID NO: 1112712 - DNA, 25 bp, Homo sapien
tcttgcacaattgaagaggcataag

SEQ ID NO: 1112713 - DNA, 25 bp, Homo sapien
gctgatgggagcatagatgtgaacc

SEQ ID NO: 1112714 - DNA, 25 bp, Homo sapien
gaggtcataatatgccacttcggta

SEQ ID NO: 1112715 - DNA, 25 bp, Homo sapien
gaaatttaaagtcttggatctgtcc

SEQ ID NO: 1112716 - DNA, 25 bp, Homo sapien
gacagttggattgagctgcctgctc

SEQ ID NO: 1112717 - DNA, 25 bp, Homo sapien
acggtatttgcggacagttggattg

SEQ ID NO: 1112718 - DNA, 25 bp, Homo sapien
gatctgtccttctgtactgagtacg

SEQ ID NO: 1112719 - DNA, 25 bp, Homo sapien
cagggtaaaaagcacaggatcagtc

SEQ ID NO: 1112720 - DNA, 25 bp, Homo sapien
tatactcggctggactctttattga

SEQ ID NO: 1112721 - DNA, 25 bp, Homo sapien
cccaggctccggtaaatgatgaaca

SEQ ID NO: 1112722 - DNA, 25 bp, Homo sapien
tctgtactaaggaactgtcccaggc

SEQ ID NO: 1112723 - DNA, 25 bp, Homo sapien
tgcaatttccctgtgggccatgaga

SEQ ID NO: 1112724 - DNA, 25 bp, Homo sapien
caaaattggttaggtggctgcatgc

SEQ ID NO: 1112725 - DNA, 25 bp, Homo sapien
gctgcatgcacacgttgttcgagtt

SEQ ID NO: 1112726 - DNA, 25 bp, Homo sapien
tgcagccctgggtagaccaatatcc

SEQ ID NO: 1112727 - DNA, 25 bp, Homo sapien
ctgaaaataaaaagatatgaggaac

SEQ ID NO: 1112728 - DNA, 25 bp, Homo sapien
gaaaataaaaagatatgaggaacat

SEQ ID NO: 1112729 - DNA, 25 bp, Homo sapien
tgaaaataaaaagatatgaggaaca

SEQ ID NO: 1112730 - DNA, 25 bp, Homo sapien
tgaagatgcagatagccaggcaaac

SEQ ID NO: 1112731 - DNA, 25 bp, Homo sapien
tatttcggtcactctgtaggccacg

SEQ ID NO: 1112732 - DNA, 25 bp, Homo sapien
agggaaatgacaattcccacccagg

SEQ ID NO: 1112733 - DNA, 25 bp, Homo sapien
aagaagtaattcatgaacgccatct

SEQ ID NO: 1112734 - DNA, 25 bp, Homo sapien
aagaaaaagtgtagaagtcctgcaa

SEQ ID NO: 1112735 - DNA, 25 bp, Homo sapien
gcagctgaaactccaaccactgtgg

SEQ ID NO: 1112736 - DNA, 25 bp, Homo sapien
tctaggcacatccaagcaaaagctg

SEQ ID NO: 1112737 - DNA, 25 bp, Homo sapien
taacattaggtagagctgcacacct

SEQ ID NO: 1112738 - DNA, 25 bp, Homo sapien
ggtccaatgaagctccatataaagt

SEQ ID NO: 1112739 - DNA, 25 bp, Homo sapien
gctccatataaagtagttatcaaca

SEQ ID NO: 1112740 - DNA, 25 bp, Homo sapien
gtagttatcaacatgaagccagcaa

SEQ ID NO: 1112741 - DNA, 25 bp, Homo sapien
gaaggtaacaggtccaatgaagctc

SEQ ID NO: 1112742 - DNA, 25 bp, Homo sapien
tcttttgcaagacgctgttttgtac

SEQ ID NO: 1112743 - DNA, 25 bp, Homo sapien
agatattcttttgcaagacgctgtt

SEQ ID NO: 1112744 - DNA, 25 bp, Homo sapien
tttgcaagacgctgttttgtactcc

SEQ ID NO: 1112745 - DNA, 25 bp, Homo sapien
gttttgtactcctataccactctta

SEQ ID NO: 1112746 - DNA, 25 bp, Homo sapien
ataataactctagtgcctgtaggca

SEQ ID NO: 1112747 - DNA, 25 bp, Homo sapien
taataactctagtgcctgtaggcaa

SEQ ID NO: 1112748 - DNA, 25 bp, Homo sapien
ccctggagcttttgctacctggcaa

SEQ ID NO: 1112749 - DNA, 25 bp, Homo sapien
gaagtaacctagctgaactgtgcac

SEQ ID NO: 1112750 - DNA, 25 bp, Homo sapien
tacctggcaaatgcaactctaaagc

SEQ ID NO: 1112751 - DNA, 25 bp, Homo sapien
catccgtctgagcttagcagcttaa

SEQ ID NO: 1112752 - DNA, 25 bp, Homo sapien
tctgcctttgagaaattagaggtcc

SEQ ID NO: 1112753 - DNA, 25 bp, Homo sapien
gactataataggtaagatggctgct

SEQ ID NO: 1112754 - DNA, 25 bp, Homo sapien
tgaagtgtacaggaccataatttgg

SEQ ID NO: 1112755 - DNA, 25 bp, Homo sapien
gcaaaaatcagggacaactttccaa

SEQ ID NO: 1112756 - DNA, 25 bp, Homo sapien
tttgcacaatgtgatcaccaagaag

SEQ ID NO: 1112757 - DNA, 25 bp, Homo sapien
tgcacaatgtgatcaccaagaagat

SEQ ID NO: 1112758 - DNA, 25 bp, Homo sapien
cacaatgtgatcaccaagaagataa

SEQ ID NO: 1112759 - DNA, 25 bp, Homo sapien
gcacaatgtgatcaccaagaagata

SEQ ID NO: 1112760 - DNA, 25 bp, Homo sapien
tttccaacctgctagaatctggttt

SEQ ID NO: 1112761 - DNA, 25 bp, Homo sapien
tcaaagtgtttgaatgcttcaccat

SEQ ID NO: 1112762 - DNA, 25 bp, Homo sapien
ccaacctgctagaatctggtttcaa

SEQ ID NO: 1112763 - DNA, 25 bp, Homo sapien
cctgctagaatctggtttcaaagtg

SEQ ID NO: 1112764 - DNA, 25 bp, Homo sapien
gtagccatcacaaacacggtaatta

SEQ ID NO: 1112765 - DNA, 25 bp, Homo sapien
gtaagtccgtattatagtagccatc

SEQ ID NO: 1112766 - DNA, 25 bp, Homo sapien
tagtagccatcacaaacacggtaat

SEQ ID NO: 1112767 - DNA, 25 bp, Homo sapien
ccaggtaagtccgtattatagtagc

SEQ ID NO: 1112768 - DNA, 25 bp, Homo sapien
gataaatggcttattatcttcatag

SEQ ID NO: 1112769 - DNA, 25 bp, Homo sapien
tgataaatggcttattatcttcata

SEQ ID NO: 1112770 - DNA, 25 bp, Homo sapien
ttgataaatggcttattatcttcat

SEQ ID NO: 1112771 - DNA, 25 bp, Homo sapien
cagaagagcgaaagcgccaagcacc

SEQ ID NO: 1112772 - DNA, 25 bp, Homo sapien
gaagagatatgccatcacaatagtc

SEQ ID NO: 1112773 - DNA, 25 bp, Homo sapien
ccaaaggaccaggtgaggccaagaa

SEQ ID NO: 1112774 - DNA, 25 bp, Homo sapien
tgaaaatgaacactccctggaaagc

SEQ ID NO: 1112775 - DNA, 25 bp, Homo sapien
taaaaagtgaagtccgaacaactgc

SEQ ID NO: 1112776 - DNA, 25 bp, Homo sapien
tgacaagactactttggcacaagaa

SEQ ID NO: 1112777 - DNA, 25 bp, Homo sapien
catgtcctcttaggtaggtcaatac

SEQ ID NO: 1112778 - DNA, 25 bp, Homo sapien
gattgcatagttctgcgggtaacct

SEQ ID NO: 1112779 - DNA, 25 bp, Homo sapien
gaccaagggattaatataacacact

SEQ ID NO: 1112780 - DNA, 25 bp, Homo sapien
gaacagtgaagacaaccgaaaagaa

SEQ ID NO: 1112781 - DNA, 25 bp, Homo sapien
tgtccactagactggctagtagagt

SEQ ID NO: 1112782 - DNA, 25 bp, Homo sapien
cattgaataatcacaagaccaaggg

SEQ ID NO: 1112783 - DNA, 25 bp, Homo sapien
gaggcctccacagcagtatgagtgt

SEQ ID NO: 1112784 - DNA, 25 bp, Homo sapien
gggactctcagttgggaggcctcca

SEQ ID NO: 1112785 - DNA, 25 bp, Homo sapien
aatagcgagcactggttctggtggt

SEQ ID NO: 1112786 - DNA, 25 bp, Homo sapien
tgatgccttcactgaactgtgggga

SEQ ID NO: 1112787 - DNA, 25 bp, Homo sapien
taagtgttgaagtgctattgatgtc

SEQ ID NO: 1112788 - DNA, 25 bp, Homo sapien
cttgattaagtgttgaagtgctatt

SEQ ID NO: 1112789 - DNA, 25 bp, Homo sapien
gtgttgaagtgctattgatgtcacc

SEQ ID NO: 1112790 - DNA, 25 bp, Homo sapien
ttgaagtgctattgatgtcacctga

SEQ ID NO: 1112791 - DNA, 25 bp, Homo sapien
aatggtagtaactcaaattttcctg

SEQ ID NO: 1112792 - DNA, 25 bp, Homo sapien
gtaactcaaattttcctgataactg

SEQ ID NO: 1112793 - DNA, 25 bp, Homo sapien
aactcaaattttcctgataactgac

SEQ ID NO: 1112794 - DNA, 25 bp, Homo sapien
tagtaactcaaattttcctgataac

SEQ ID NO: 1112795 - DNA, 25 bp, Homo sapien
tttcagcgagcaatgtgttataggg

SEQ ID NO: 1112796 - DNA, 25 bp, Homo sapien
gggcattacatacaactgtttcagc

SEQ ID NO: 1112797 - DNA, 25 bp, Homo sapien
gctgaaggggcattacatacaactg

SEQ ID NO: 1112798 - DNA, 25 bp, Homo sapien
tacaactgtttcagcgagcaatgtg

SEQ ID NO: 1112799 - DNA, 25 bp, Homo sapien
taataatatattaagatttatgcca

SEQ ID NO: 1112800 - DNA, 25 bp, Homo sapien
aataatatattaagatttatgccac

SEQ ID NO: 1112801 - DNA, 25 bp, Homo sapien
tgtaataatatattaagatttatgc

SEQ ID NO: 1112802 - DNA, 25 bp, Homo sapien
gtaataatatattaagatttatgcc

SEQ ID NO: 1112803 - DNA, 25 bp, Homo sapien
gctctcagaccatgtgatgtcagtc

SEQ ID NO: 1112804 - DNA, 25 bp, Homo sapien
ggctctcagaccatgtgatgtcagt

SEQ ID NO: 1112805 - DNA, 25 bp, Homo sapien
ttgaagatgggctctcagaccatgt

SEQ ID NO: 1112806 - DNA, 25 bp, Homo sapien
tgggctctcagaccatgtgatgtca

SEQ ID NO: 1112807 - DNA, 25 bp, Homo sapien
actcccatacttgtctctctgtagg

SEQ ID NO: 1112808 - DNA, 25 bp, Homo sapien
cccatacttgtctctctgtaggttg

SEQ ID NO: 1112809 - DNA, 25 bp, Homo sapien
aagttttactcccatacttgtctct

SEQ ID NO: 1112810 - DNA, 25 bp, Homo sapien
tgataggcaaagttaagttttactc

SEQ ID NO: 1112811 - DNA, 25 bp, Homo sapien
ttttccacagcctgtagcaagatta

SEQ ID NO: 1112812 - DNA, 25 bp, Homo sapien
attttccacagcctgtagcaagatt

SEQ ID NO: 1112813 - DNA, 25 bp, Homo sapien
cagagtccactgtacaagataggcc

SEQ ID NO: 1112814 - DNA, 25 bp, Homo sapien
gcaccgaatgaaccagcagagtcca

SEQ ID NO: 1112815 - DNA, 25 bp, Homo sapien
aatggccccaggcttctagtggtca

SEQ ID NO: 1112816 - DNA, 25 bp, Homo sapien
tcagtcacagtgacagcaccgaatg

SEQ ID NO: 1112817 - DNA, 25 bp, Homo sapien
gagggggagttatcattactgtctc

SEQ ID NO: 1112818 - DNA, 25 bp, Homo sapien
taatgtcgttcaggacaaagttgta

SEQ ID NO: 1112819 - DNA, 25 bp, Homo sapien
ctttttaatgtcgttcaggacaaag

SEQ ID NO: 1112820 - DNA, 25 bp, Homo sapien
acacttgaaaagtgccaggctttcc

SEQ ID NO: 1112821 - DNA, 25 bp, Homo sapien
tgctgctgccccgtaagttgttgtg

SEQ ID NO: 1112822 - DNA, 25 bp, Homo sapien
catttagcggtagagtatccatggc

SEQ ID NO: 1112823 - DNA, 25 bp, Homo sapien
caggtttgactggtagcgtgagctc

SEQ ID NO: 1112824 - DNA, 25 bp, Homo sapien
tatagtcacccttgtgcagcgagta

SEQ ID NO: 1112825 - DNA, 25 bp, Homo sapien
agaatcttaaaatacctggctggca

SEQ ID NO: 1112826 - DNA, 25 bp, Homo sapien
tttgagggagctgcgtcaggccaat

SEQ ID NO: 1112827 - DNA, 25 bp, Homo sapien
gcatgtggcccttggaattccttag

SEQ ID NO: 1112828 - DNA, 25 bp, Homo sapien
tatttattaatactcgcatgtggcc

SEQ ID NO: 1112829 - DNA, 25 bp, Homo sapien
tcataacatgtgcaaccaagagctt

SEQ ID NO: 1112830 - DNA, 25 bp, Homo sapien
actagaaagtttgtgagaagtgccc

SEQ ID NO: 1112831 - DNA, 25 bp, Homo sapien
ttaacaggtttacacaaagggatga

SEQ ID NO: 1112832 - DNA, 25 bp, Homo sapien
gaataggcaccttttgttcactaga

SEQ ID NO: 1112833 - DNA, 25 bp, Homo sapien
tagtcctggtacaatgcaacaaaca

SEQ ID NO: 1112834 - DNA, 25 bp, Homo sapien
ccaaggtgggaatggaccaacatgt

SEQ ID NO: 1112835 - DNA, 25 bp, Homo sapien
ccatggactttggtatgacgttact

SEQ ID NO: 1112836 - DNA, 25 bp, Homo sapien
cccaaatttgatggcagaacttcca

SEQ ID NO: 1112837 - DNA, 25 bp, Homo sapien
ttcaggtgaagtctaggcagaccca

SEQ ID NO: 1112838 - DNA, 25 bp, Homo sapien
tattactgaaccagcctgactctag

SEQ ID NO: 1112839 - DNA, 25 bp, Homo sapien
ccatttaggtacgatgcagtgttca

SEQ ID NO: 1112840 - DNA, 25 bp, Homo sapien
cagagtgaatgtctctaggaagaac

SEQ ID NO: 1112841 - DNA, 25 bp, Homo sapien
aagattccacattaatgagctgcag

SEQ ID NO: 1112842 - DNA, 25 bp, Homo sapien
ggaaaccactgagcaatatgcttga

SEQ ID NO: 1112843 - DNA, 25 bp, Homo sapien
ccaagcaagccagggattcgataag

SEQ ID NO: 1112844 - DNA, 25 bp, Homo sapien
tttaagggaaaccactgagcaatat

SEQ ID NO: 1112845 - DNA, 25 bp, Homo sapien
tgggatctttcccagaagcagctgc

SEQ ID NO: 1112846 - DNA, 25 bp, Homo sapien
caggctccatgggatctttcccaga

SEQ ID NO: 1112847 - DNA, 25 bp, Homo sapien
aagcagctgcagcactctcttcaag

SEQ ID NO: 1112848 - DNA, 25 bp, Homo sapien
gcagctgcagcactctcttcaagca

SEQ ID NO: 1112849 - DNA, 25 bp, Homo sapien
tggatggaaccaccaacagattgac

SEQ ID NO: 1112850 - DNA, 25 bp, Homo sapien
gattggatggaaccaccaacagatt

SEQ ID NO: 1112851 - DNA, 25 bp, Homo sapien
agattggatggaaccaccaacagat

SEQ ID NO: 1112852 - DNA, 25 bp, Homo sapien
cctagattggatggaaccaccaaca

SEQ ID NO: 1112853 - DNA, 25 bp, Homo sapien
gcttctttatggagactgagctccg

SEQ ID NO: 1112854 - DNA, 25 bp, Homo sapien
cgtttcagcttctttatggagactg

SEQ ID NO: 1112855 - DNA, 25 bp, Homo sapien
tatggagactgagctccgatttgag

SEQ ID NO: 1112856 - DNA, 25 bp, Homo sapien
agactgagctccgatttgagaggtt

SEQ ID NO: 1112857 - DNA, 25 bp, Homo sapien
ggattaggccatttgctaagcaaag

SEQ ID NO: 1112858 - DNA, 25 bp, Homo sapien
gttcaggccatgcaaccgctcggat

SEQ ID NO: 1112859 - DNA, 25 bp, Homo sapien
tgtgtccacgcgttcaggccatgca

SEQ ID NO: 1112860 - DNA, 25 bp, Homo sapien
gcaaccgctcggattaggccatttg

SEQ ID NO: 1112861 - DNA, 25 bp, Homo sapien
caggtcactgaagtggcaattagca

SEQ ID NO: 1112862 - DNA, 25 bp, Homo sapien
ggtcactgaagtggcaattagcaag

SEQ ID NO: 1112863 - DNA, 25 bp, Homo sapien
tcaggtcactgaagtggcaattagc

SEQ ID NO: 1112864 - DNA, 25 bp, Homo sapien
tcactgaagtggcaattagcaagta

SEQ ID NO: 1112865 - DNA, 25 bp, Homo sapien
ccagtgtgaagtagttctgaactac

SEQ ID NO: 1112866 - DNA, 25 bp, Homo sapien
cagtgtgaagtagttctgaactact

SEQ ID NO: 1112867 - DNA, 25 bp, Homo sapien
gtgaagtagttctgaactactttgc

SEQ ID NO: 1112868 - DNA, 25 bp, Homo sapien
ctccagtgtgaagtagttctgaact

SEQ ID NO: 1112869 - DNA, 25 bp, Homo sapien
cacttttctgctaaactgtatttaa

SEQ ID NO: 1112870 - DNA, 25 bp, Homo sapien
tgctaaactgtatttaatcctttgt

SEQ ID NO: 1112871 - DNA, 25 bp, Homo sapien
taaactgtatttaatcctttgtgtc

SEQ ID NO: 1112872 - DNA, 25 bp, Homo sapien
acttttctgctaaactgtatttaat

SEQ ID NO: 1112873 - DNA, 25 bp, Homo sapien
tattggcatgtattgaaatagtctg

SEQ ID NO: 1112874 - DNA, 25 bp, Homo sapien
ttctctgtgggtatgactccatttt

SEQ ID NO: 1112875 - DNA, 25 bp, Homo sapien
gcagggaagatatacatattggcat

SEQ ID NO: 1112876 - DNA, 25 bp, Homo sapien
caaattatcatctagttgagatggg

SEQ ID NO: 1112877 - DNA, 25 bp, Homo sapien
cctagtttattctggctctgattca

SEQ ID NO: 1112878 - DNA, 25 bp, Homo sapien
attagaaatcctagtttattctggc

SEQ ID NO: 1112879 - DNA, 25 bp, Homo sapien
ttggaagaggtccaagtttgtctcc

SEQ ID NO: 1112880 - DNA, 25 bp, Homo sapien
gatccctttgcaatattcgtcctaa

SEQ ID NO: 1112881 - DNA, 25 bp, Homo sapien
gattcacggcctaagtcagtcagtg

SEQ ID NO: 1112882 - DNA, 25 bp, Homo sapien
ttcttctttcacactagaagaggcc

SEQ ID NO: 1112883 - DNA, 25 bp, Homo sapien
gcccagcagcagattcacggcctaa

SEQ ID NO: 1112884 - DNA, 25 bp, Homo sapien
cacactagaagaggccagactcagg

SEQ ID NO: 1112885 - DNA, 25 bp, Homo sapien
cagtattaatagttttcagaatttc

SEQ ID NO: 1112886 - DNA, 25 bp, Homo sapien
tattaatagttttcagaatttcttc

SEQ ID NO: 1112887 - DNA, 25 bp, Homo sapien
agtattaatagttttcagaatttct

SEQ ID NO: 1112888 - DNA, 25 bp, Homo sapien
ttaatagttttcagaatttcttcac

SEQ ID NO: 1112889 - DNA, 25 bp, Homo sapien
caatgactgtataaagcctggagac

SEQ ID NO: 1112890 - DNA, 25 bp, Homo sapien
tgtgcaacaccagcatcaacctgtg

SEQ ID NO: 1112891 - DNA, 25 bp, Homo sapien
gaccctgttctcttcaaacggcact

SEQ ID NO: 1112892 - DNA, 25 bp, Homo sapien
tccttccttcaagtaagcttttaca

SEQ ID NO: 1112893 - DNA, 25 bp, Homo sapien
tgctccttccaccttagcagctacc

SEQ ID NO: 1112894 - DNA, 25 bp, Homo sapien
atgtattcaaattcaggagaccaaa

SEQ ID NO: 1112895 - DNA, 25 bp, Homo sapien
tattcaaattcaggagaccaaacat

SEQ ID NO: 1112896 - DNA, 25 bp, Homo sapien
tagcagctaccctccttttgtattg

SEQ ID NO: 1112897 - DNA, 25 bp, Homo sapien
tccccggtcatgggcttcttttgtg

SEQ ID NO: 1112898 - DNA, 25 bp, Homo sapien
attccccggtcatgggcttcttttg

SEQ ID NO: 1112899 - DNA, 25 bp, Homo sapien
agattccccggtcatgggcttcttt

SEQ ID NO: 1112900 - DNA, 25 bp, Homo sapien
tcagattccccggtcatgggcttct

SEQ ID NO: 1112901 - DNA, 25 bp, Homo sapien
ggaaaaccatccagacatcagtaga

SEQ ID NO: 1112902 - DNA, 25 bp, Homo sapien
agaggtaatcctgaacagagtggcc

SEQ ID NO: 1112903 - DNA, 25 bp, Homo sapien
tgttcagagaacatgcggcaggaaa

SEQ ID NO: 1112904 - DNA, 25 bp, Homo sapien
cagagtggccatgaaccaggagcaa

SEQ ID NO: 1112905 - DNA, 25 bp, Homo sapien
ctgttatttgggctttccaagtcta

SEQ ID NO: 1112906 - DNA, 25 bp, Homo sapien
agcacatctaacgtgtagctttggg

SEQ ID NO: 1112907 - DNA, 25 bp, Homo sapien
gtaggaataaaagaggatgaagtaa

SEQ ID NO: 1112908 - DNA, 25 bp, Homo sapien
gtaatctgcagatttgagaagtagg

SEQ ID NO: 1112909 - DNA, 25 bp, Homo sapien
cgcttccaaatggtgaattagtaat

SEQ ID NO: 1112910 - DNA, 25 bp, Homo sapien
cccagtgagcaacgcttccaaatgg

SEQ ID NO: 1112911 - DNA, 25 bp, Homo sapien
ccactaatttgtcagctaagctgtg

SEQ ID NO: 1112912 - DNA, 25 bp, Homo sapien
ctgtgtcttatagaacatgttattt

SEQ ID NO: 1112913 - DNA, 25 bp, Homo sapien
caccacgtgcaaaacaaccgtttcg

SEQ ID NO: 1112914 - DNA, 25 bp, Homo sapien
attctgcttcaccacgtgcaaaaca

SEQ ID NO: 1112915 - DNA, 25 bp, Homo sapien
gcttcaccacgtgcaaaacaaccgt

SEQ ID NO: 1112916 - DNA, 25 bp, Homo sapien
tcacactctaaatccgactcctagt

SEQ ID NO: 1112917 - DNA, 25 bp, Homo sapien
tagagccttccaccccaacaaagtc

SEQ ID NO: 1112918 - DNA, 25 bp, Homo sapien
caccccaacaaagtctctatttcta

SEQ ID NO: 1112919 - DNA, 25 bp, Homo sapien
aatttctcactccactctactagag

SEQ ID NO: 1112920 - DNA, 25 bp, Homo sapien
taactgagctgacaatttctcactc

SEQ ID NO: 1112921 - DNA, 25 bp, Homo sapien
actgtgtggtactccctcaggcttt

SEQ ID NO: 1112922 - DNA, 25 bp, Homo sapien
ttcttttccactgggtgatgctaat

SEQ ID NO: 1112923 - DNA, 25 bp, Homo sapien
gtgatgctaatttgccttgactgtg

SEQ ID NO: 1112924 - DNA, 25 bp, Homo sapien
cactgggtgatgctaatttgccttg

SEQ ID NO: 1112925 - DNA, 25 bp, Homo sapien
aagccgtcatcagaaatgactagca

SEQ ID NO: 1112926 - DNA, 25 bp, Homo sapien
gaccaaggggtatctggcacctcga

SEQ ID NO: 1112927 - DNA, 25 bp, Homo sapien
gactagcatattggtggaagctttg

SEQ ID NO: 1112928 - DNA, 25 bp, Homo sapien
tgttgcttataaacacagccaaact

SEQ ID NO: 1112929 - DNA, 25 bp, Homo sapien
atctgacaatccattgtattaattt

SEQ ID NO: 1112930 - DNA, 25 bp, Homo sapien
tgtgtgacatctgcttctatatact

SEQ ID NO: 1112931 - DNA, 25 bp, Homo sapien
tgcatgctttgaagtggaacaatgg

SEQ ID NO: 1112932 - DNA, 25 bp, Homo sapien
aattgcatgctttgaagtggaacaa

SEQ ID NO: 1112933 - DNA, 25 bp, Homo sapien
gcaataggccaccatttgaattcac

SEQ ID NO: 1112934 - DNA, 25 bp, Homo sapien
gcagcaataggccaccatttgaatt

SEQ ID NO: 1112935 - DNA, 25 bp, Homo sapien
catggaacaactaagtacaatatga

SEQ ID NO: 1112936 - DNA, 25 bp, Homo sapien
tccattttgtcccatggaacaacta

SEQ ID NO: 1112937 - DNA, 25 bp, Homo sapien
ctgcttagttcctatacgtttacat

SEQ ID NO: 1112938 - DNA, 25 bp, Homo sapien
gtaaccaacagtcatctgtcagcat

SEQ ID NO: 1112939 - DNA, 25 bp, Homo sapien
actggatggaaactcgcgtccccat

SEQ ID NO: 1112940 - DNA, 25 bp, Homo sapien
atggaaactcgcgtccccattccag

SEQ ID NO: 1112941 - DNA, 25 bp, Homo sapien
agactggatggaaactcgcgtcccc

SEQ ID NO: 1112942 - DNA, 25 bp, Homo sapien
tggatggaaactcgcgtccccattc

SEQ ID NO: 1112943 - DNA, 25 bp, Homo sapien
gcccagccacgtttgataaccaaag

SEQ ID NO: 1112944 - DNA, 25 bp, Homo sapien
acccgtgagggataggaagaaccat

SEQ ID NO: 1112945 - DNA, 25 bp, Homo sapien
ttttgcaaacatacccgtgagggat

SEQ ID NO: 1112946 - DNA, 25 bp, Homo sapien
tgcccagccacgtttgataaccaaa

SEQ ID NO: 1112947 - DNA, 25 bp, Homo sapien
catgctgataggaatgcttaagaaa

SEQ ID NO: 1112948 - DNA, 25 bp, Homo sapien
atgctgataggaatgcttaagaaac

SEQ ID NO: 1112949 - DNA, 25 bp, Homo sapien
gataatgcgggtatgggatgcggac

SEQ ID NO: 1112950 - DNA, 25 bp, Homo sapien
tccataggtaaaaaatgtagagcct

SEQ ID NO: 1112951 - DNA, 25 bp, Homo sapien
tgtagagcctggaaactgttgtgga

SEQ ID NO: 1112952 - DNA, 25 bp, Homo sapien
gagttcatggtgatgccctccatag

SEQ ID NO: 1112953 - DNA, 25 bp, Homo sapien
caaacaaggcgatgctaaatgctca

SEQ ID NO: 1112954 - DNA, 25 bp, Homo sapien
aaccccaaagggagctgcatcaagc

SEQ ID NO: 1112955 - DNA, 25 bp, Homo sapien
tctatcgctactaccataatggcct

SEQ ID NO: 1112956 - DNA, 25 bp, Homo sapien
tgtgattcatcaaactgctttcccc

SEQ ID NO: 1112957 - DNA, 25 bp, Homo sapien
ttcaggtaggaagaacgatcatttt

SEQ ID NO: 1112958 - DNA, 25 bp, Homo sapien
cactcagcagattctatctgctcca

SEQ ID NO: 1112959 - DNA, 25 bp, Homo sapien
aatacacatttcacgaaccactcag

SEQ ID NO: 1112960 - DNA, 25 bp, Homo sapien
ccatagtcgtgaattctgaggagga

SEQ ID NO: 1112961 - DNA, 25 bp, Homo sapien
ctacctttttgggcctgataacaat

SEQ ID NO: 1112962 - DNA, 25 bp, Homo sapien
cctttttgggcctgataacaattga

SEQ ID NO: 1112963 - DNA, 25 bp, Homo sapien
tgggcctgataacaattgactccat

SEQ ID NO: 1112964 - DNA, 25 bp, Homo sapien
acctttttgggcctgataacaattg

SEQ ID NO: 1112965 - DNA, 25 bp, Homo sapien
tccatacagtcatggcatcaggctc

SEQ ID NO: 1112966 - DNA, 25 bp, Homo sapien
attccatacagtcatggcatcaggc

SEQ ID NO: 1112967 - DNA, 25 bp, Homo sapien
catacagtcatggcatcaggctctg

SEQ ID NO: 1112968 - DNA, 25 bp, Homo sapien
ccatacagtcatggcatcaggctct

SEQ ID NO: 1112969 - DNA, 25 bp, Homo sapien
tggatattatatccgaagaaacaga

SEQ ID NO: 1112970 - DNA, 25 bp, Homo sapien
gatattatatccgaagaaacagatt

SEQ ID NO: 1112971 - DNA, 25 bp, Homo sapien
taatggatattatatccgaagaaac

SEQ ID NO: 1112972 - DNA, 25 bp, Homo sapien
tttgtaatggatattatatccgaag

SEQ ID NO: 1112973 - DNA, 25 bp, Homo sapien
gctgaaatggtcggatgaatacttc

SEQ ID NO: 1112974 - DNA, 25 bp, Homo sapien
ggctgaaatggtcggatgaatactt

SEQ ID NO: 1112975 - DNA, 25 bp, Homo sapien
tgaaatggtcggatgaatacttcat

SEQ ID NO: 1112976 - DNA, 25 bp, Homo sapien
ctgaaatggtcggatgaatacttca

SEQ ID NO: 1112977 - DNA, 25 bp, Homo sapien
gctcattaagatcagatacgtcatg

SEQ ID NO: 1112978 - DNA, 25 bp, Homo sapien
ccgcttcagtgtgatgggtttccta

SEQ ID NO: 1112979 - DNA, 25 bp, Homo sapien
tgcattaaccttgggctccgcttca

SEQ ID NO: 1112980 - DNA, 25 bp, Homo sapien
cagcaactgctttaagctcattaag

SEQ ID NO: 1112981 - DNA, 25 bp, Homo sapien
tacaattttggtccatagataattc

SEQ ID NO: 1112982 - DNA, 25 bp, Homo sapien
tttgggaggtttattaaatgcagcc

SEQ ID NO: 1112983 - DNA, 25 bp, Homo sapien
taggattcttcttaactgttacaaa

SEQ ID NO: 1112984 - DNA, 25 bp, Homo sapien
gataattcaacttagatttgggagg

SEQ ID NO: 1112985 - DNA, 25 bp, Homo sapien
aatataacatcaatccccttgatca

SEQ ID NO: 1112986 - DNA, 25 bp, Homo sapien
ataagactgtatttgatctctgaat

SEQ ID NO: 1112987 - DNA, 25 bp, Homo sapien
ttcaaatataacatcaatccccttg

SEQ ID NO: 1112988 - DNA, 25 bp, Homo sapien
ctcttcaaatataacatcaatcccc

SEQ ID NO: 1112989 - DNA, 25 bp, Homo sapien
ttgatacagatatggaacaactttc

SEQ ID NO: 1112990 - DNA, 25 bp, Homo sapien
cagatatggaacaactttcacagtc

SEQ ID NO: 1112991 - DNA, 25 bp, Homo sapien
tccctggaatccataatatcaggtg

SEQ ID NO: 1112992 - DNA, 25 bp, Homo sapien
ccataatatcaggtgttgatacaga

SEQ ID NO: 1112993 - DNA, 25 bp, Homo sapien
caggcacacactcacgcctccaaca

SEQ ID NO: 1112994 - DNA, 25 bp, Homo sapien
cactcacgcctccaacatacatcat

SEQ ID NO: 1112995 - DNA, 25 bp, Homo sapien
ggcacacactcacgcctccaacata

SEQ ID NO: 1112996 - DNA, 25 bp, Homo sapien
acacactcacgcctccaacatacat

SEQ ID NO: 1112997 - DNA, 25 bp, Homo sapien
ctatttcagtggttccaaaagatca

SEQ ID NO: 1112998 - DNA, 25 bp, Homo sapien
tctccttgattttacaacgctgagc

SEQ ID NO: 1112999 - DNA, 25 bp, Homo sapien
gagcacgttctctcaccctggatga

SEQ ID NO: 1113000 - DNA, 25 bp, Homo sapien
caccctggatgactgggcagaagaa

SEQ ID NO: 1113001 - DNA, 25 bp, Homo sapien
cttcaaaatgctttgccctatcctg

SEQ ID NO: 1113002 - DNA, 25 bp, Homo sapien
aaatgctttgccctatcctgatcat

SEQ ID NO: 1113003 - DNA, 25 bp, Homo sapien
tgccttagttcatgggtaccttcca

SEQ ID NO: 1113004 - DNA, 25 bp, Homo sapien
gctgccttagttcatgggtaccttc

SEQ ID NO: 1113005 - DNA, 25 bp, Homo sapien
tgaagatgaccagatgaccagaact

SEQ ID NO: 1113006 - DNA, 25 bp, Homo sapien
tgccttccaatatgaagatgaccag

SEQ ID NO: 1113007 - DNA, 25 bp, Homo sapien
aatgccttccaatatgaagatgacc

SEQ ID NO: 1113008 - DNA, 25 bp, Homo sapien
gccttccaatatgaagatgaccaga

SEQ ID NO: 1113009 - DNA, 25 bp, Homo sapien
ttaactttaacggtataatatctga

SEQ ID NO: 1113010 - DNA, 25 bp, Homo sapien
ctgggccccttatacttcttcccat

SEQ ID NO: 1113011 - DNA, 25 bp, Homo sapien
ttaacggtataatatctgaattctt

SEQ ID NO: 1113012 - DNA, 25 bp, Homo sapien
actttaacggtataatatctgaatt

SEQ ID NO: 1113013 - DNA, 25 bp, Homo sapien
tcttccttgggttcttctgcacaac

SEQ ID NO: 1113014 - DNA, 25 bp, Homo sapien
cagttgtttcatctcttccttgggt

SEQ ID NO: 1113015 - DNA, 25 bp, Homo sapien
ccttgggttcttctgcacaacccat

SEQ ID NO: 1113016 - DNA, 25 bp, Homo sapien
tctcttccttgggttcttctgcaca

SEQ ID NO: 1113017 - DNA, 25 bp, Homo sapien
ccagataagtcatagtgattcagca

SEQ ID NO: 1113018 - DNA, 25 bp, Homo sapien
gacaaactttcttttgctaatgttg

SEQ ID NO: 1113019 - DNA, 25 bp, Homo sapien
agtcatagtgattcagcaacaagac

SEQ ID NO: 1113020 - DNA, 25 bp, Homo sapien
gataagtcatagtgattcagcaaca

SEQ ID NO: 1113021 - DNA, 25 bp, Homo sapien
ttcttctttttgattgactcggcat

SEQ ID NO: 1113022 - DNA, 25 bp, Homo sapien
tttcttctttttgattgactcggca

SEQ ID NO: 1113023 - DNA, 25 bp, Homo sapien
ctctttcttctttttgattgactcg

SEQ ID NO: 1113024 - DNA, 25 bp, Homo sapien
ctttcttctttttgattgactcggc

SEQ ID NO: 1113025 - DNA, 25 bp, Homo sapien
tggcccaagtgttcgcctgtcaatc

SEQ ID NO: 1113026 - DNA, 25 bp, Homo sapien
ctctggcccaagtgttcgcctgtca

SEQ ID NO: 1113027 - DNA, 25 bp, Homo sapien
gcccaagtgttcgcctgtcaatctg

SEQ ID NO: 1113028 - DNA, 25 bp, Homo sapien
tctggcccaagtgttcgcctgtcaa

SEQ ID NO: 1113029 - DNA, 25 bp, Homo sapien
gggcaggccatgtgataaaaattgc

SEQ ID NO: 1113030 - DNA, 25 bp, Homo sapien
ccaccagaggacactgggcctggag

SEQ ID NO: 1113031 - DNA, 25 bp, Homo sapien
cacggaatggtactggagaagaagc

SEQ ID NO: 1113032 - DNA, 25 bp, Homo sapien
caaggatacttctacccaccagagg

SEQ ID NO: 1113033 - DNA, 25 bp, Homo sapien
gtctgttccatttctcgcctcttta

SEQ ID NO: 1113034 - DNA, 25 bp, Homo sapien
acactgttgaacatcctaaaataat

SEQ ID NO: 1113035 - DNA, 25 bp, Homo sapien
cgcctctttagattgcacgtccaga

SEQ ID NO: 1113036 - DNA, 25 bp, Homo sapien
tgcccacaggatttgaatttgcact

SEQ ID NO: 1113037 - DNA, 25 bp, Homo sapien
ctgagtcattaatagtaactttttg

SEQ ID NO: 1113038 - DNA, 25 bp, Homo sapien
gaaggaacaggattgctctcaccac

SEQ ID NO: 1113039 - DNA, 25 bp, Homo sapien
gatgctcgctttctcctactgaagg

SEQ ID NO: 1113040 - DNA, 25 bp, Homo sapien
tgtgtcaaagcgacctgtcacagct

SEQ ID NO: 1113041 - DNA, 25 bp, Homo sapien
cacagctttcacgatttggaacagg

SEQ ID NO: 1113042 - DNA, 25 bp, Homo sapien
tgcagtctggagagaacttctgtgc

SEQ ID NO: 1113043 - DNA, 25 bp, Homo sapien
acttctgtgctttagagcaccagag

SEQ ID NO: 1113044 - DNA, 25 bp, Homo sapien
gctgcagtctggagagaacttctgt

SEQ ID NO: 1113045 - DNA, 25 bp, Homo sapien
tgctttagagcaccagagctgctaa

SEQ ID NO: 1113046 - DNA, 25 bp, Homo sapien
tgcaaatttactattcattgaagcc

SEQ ID NO: 1113047 - DNA, 25 bp, Homo sapien
gaagtgcaatcatagatgccaactg

SEQ ID NO: 1113048 - DNA, 25 bp, Homo sapien
gcaatcatagatgccaactgcaaat

SEQ ID NO: 1113049 - DNA, 25 bp, Homo sapien
tagatgccaactgcaaatttactat

SEQ ID NO: 1113050 - DNA, 25 bp, Homo sapien
gggagatcatcacaggaaagaagaa

SEQ ID NO: 1113051 - DNA, 25 bp, Homo sapien
tatcctagggtctcttgttaattga

SEQ ID NO: 1113052 - DNA, 25 bp, Homo sapien
ggtagagtcagtactgaatccctta

SEQ ID NO: 1113053 - DNA, 25 bp, Homo sapien
gctcaggttggcataactattcaaa

SEQ ID NO: 1113054 - DNA, 25 bp, Homo sapien
tgcctgatgcttgaagccagtccag

SEQ ID NO: 1113055 - DNA, 25 bp, Homo sapien
aactgcttgcctgatgcttgaagcc

SEQ ID NO: 1113056 - DNA, 25 bp, Homo sapien
aaaactgcttgcctgatgcttgaag

SEQ ID NO: 1113057 - DNA, 25 bp, Homo sapien
gcttgcctgatgcttgaagccagtc

SEQ ID NO: 1113058 - DNA, 25 bp, Homo sapien
gtgacagaccatggtcactgacagc

SEQ ID NO: 1113059 - DNA, 25 bp, Homo sapien
ggtagtgacagaccatggtcactga

SEQ ID NO: 1113060 - DNA, 25 bp, Homo sapien
tagtgacagaccatggtcactgaca

SEQ ID NO: 1113061 - DNA, 25 bp, Homo sapien
tggtagtgacagaccatggtcactg

SEQ ID NO: 1113062 - DNA, 25 bp, Homo sapien
gaaacatggctgaactcagcagtct

SEQ ID NO: 1113063 - DNA, 25 bp, Homo sapien
taactccgctagagccactgtggtc

SEQ ID NO: 1113064 - DNA, 25 bp, Homo sapien
tgtccatgggcaggagaaacatctc

SEQ ID NO: 1113065 - DNA, 25 bp, Homo sapien
agcaggcactccgagcacactgaag

SEQ ID NO: 1113066 - DNA, 25 bp, Homo sapien
ttagtaatgcaagtccagtgtagta

SEQ ID NO: 1113067 - DNA, 25 bp, Homo sapien
taggataattggttagtaatgcaag

SEQ ID NO: 1113068 - DNA, 25 bp, Homo sapien
taattggttagtaatgcaagtccag

SEQ ID NO: 1113069 - DNA, 25 bp, Homo sapien
gtgtaggataattggttagtaatgc

SEQ ID NO: 1113070 - DNA, 25 bp, Homo sapien
cgcaagtccatgttgcattagaata

SEQ ID NO: 1113071 - DNA, 25 bp, Homo sapien
tctaaggccttcttaatagatttta

SEQ ID NO: 1113072 - DNA, 25 bp, Homo sapien
tttggaaatgatcatcgcaagtcca

SEQ ID NO: 1113073 - DNA, 25 bp, Homo sapien
aatgatcatcgcaagtccatgttgc

SEQ ID NO: 1113074 - DNA, 25 bp, Homo sapien
tccaatcagaattaagctcttgtct

SEQ ID NO: 1113075 - DNA, 25 bp, Homo sapien
ccaatcagaattaagctcttgtctt

SEQ ID NO: 1113076 - DNA, 25 bp, Homo sapien
gaattaagctcttgtctttggcact

SEQ ID NO: 1113077 - DNA, 25 bp, Homo sapien
agaattaagctcttgtctttggcac

SEQ ID NO: 1113078 - DNA, 25 bp, Homo sapien
tacagatgcctactttaatcaatat

SEQ ID NO: 1113079 - DNA, 25 bp, Homo sapien
tgattttacagatgcctactttaat

SEQ ID NO: 1113080 - DNA, 25 bp, Homo sapien
gcctactttaatcaatatcactact

SEQ ID NO: 1113081 - DNA, 25 bp, Homo sapien
ccagcagtttctccaatccattaac

SEQ ID NO: 1113082 - DNA, 25 bp, Homo sapien
ctattggcttgctgtgtcaactgac

SEQ ID NO: 1113083 - DNA, 25 bp, Homo sapien
tgtgtcaactgactttgatgctgta

SEQ ID NO: 1113084 - DNA, 25 bp, Homo sapien
tgactttgatgctgtaacatccaga

SEQ ID NO: 1113085 - DNA, 25 bp, Homo sapien
gatgctgtaacatccagatgttcaa

SEQ ID NO: 1113086 - DNA, 25 bp, Homo sapien
tagaccttagatcataaaagatgtg

SEQ ID NO: 1113087 - DNA, 25 bp, Homo sapien
cactgaacgtgcatgctgtggttga

SEQ ID NO: 1113088 - DNA, 25 bp, Homo sapien
taaatacagggaacataaccaaggc

SEQ ID NO: 1113089 - DNA, 25 bp, Homo sapien
cttgtatccaagttttagaccttag

SEQ ID NO: 1113090 - DNA, 25 bp, Homo sapien
ggctgatattcaactgcatcttggg

SEQ ID NO: 1113091 - DNA, 25 bp, Homo sapien
gcatttggacattgccttctaccat

SEQ ID NO: 1113092 - DNA, 25 bp, Homo sapien
taccatggtcaattcacaatgtgtc

SEQ ID NO: 1113093 - DNA, 25 bp, Homo sapien
ctcttgagctcttggctgatattca

SEQ ID NO: 1113094 - DNA, 25 bp, Homo sapien
cctaagcatgcattgacaaggagga

SEQ ID NO: 1113095 - DNA, 25 bp, Homo sapien
caaggaggaccagggttgttacagt

SEQ ID NO: 1113096 - DNA, 25 bp, Homo sapien
gcttctgcggataaaaagctcccta

SEQ ID NO: 1113097 - DNA, 25 bp, Homo sapien
tgcaaataatgggtctctgggagat

SEQ ID NO: 1113098 - DNA, 25 bp, Homo sapien
aatgccctctatagattatatcatg

SEQ ID NO: 1113099 - DNA, 25 bp, Homo sapien
gatattgcccactgcattgcacaat

SEQ ID NO: 1113100 - DNA, 25 bp, Homo sapien
aaaacttctctcaggattcaggacc

SEQ ID NO: 1113101 - DNA, 25 bp, Homo sapien
tctttccaataatgaggatgatgta

SEQ ID NO: 1113102 - DNA, 25 bp, Homo sapien
tcaaagcttcgaaatttattcttaa

SEQ ID NO: 1113103 - DNA, 25 bp, Homo sapien
ttcaaagcttcgaaatttattctta

SEQ ID NO: 1113104 - DNA, 25 bp, Homo sapien
ctggtctgggtgctttttcaagcca

SEQ ID NO: 1113105 - DNA, 25 bp, Homo sapien
gtctgggtgctttttcaagccatat

SEQ ID NO: 1113106 - DNA, 25 bp, Homo sapien
caagccatatccctctctgagttgc

SEQ ID NO: 1113107 - DNA, 25 bp, Homo sapien
ttcaagccatatccctctctgagtt

SEQ ID NO: 1113108 - DNA, 25 bp, Homo sapien
tttagctaggaaaaagcactgtggc

SEQ ID NO: 1113109 - DNA, 25 bp, Homo sapien
ccagacattctccaatagttatatg

SEQ ID NO: 1113110 - DNA, 25 bp, Homo sapien
tttaggatcaaatatgccgcagagc

SEQ ID NO: 1113111 - DNA, 25 bp, Homo sapien
caaaacagcagttgttacttctgcc

SEQ ID NO: 1113112 - DNA, 25 bp, Homo sapien
acctaagggaggagatagtcatgta

SEQ ID NO: 1113113 - DNA, 25 bp, Homo sapien
tatcgagtgatgtacaggatgttga

SEQ ID NO: 1113114 - DNA, 25 bp, Homo sapien
gatagtcatgtatcgagtgatgtac

SEQ ID NO: 1113115 - DNA, 25 bp, Homo sapien
gatgtacaggatgttgatatgagta

SEQ ID NO: 1113116 - DNA, 25 bp, Homo sapien
tattgtcttattcggcaatgaactc

SEQ ID NO: 1113117 - DNA, 25 bp, Homo sapien
ttattcggcaatgaactctgttgag

SEQ ID NO: 1113118 - DNA, 25 bp, Homo sapien
gccctctgctatctctggcctgtct

SEQ ID NO: 1113119 - DNA, 25 bp, Homo sapien
cctggccaagctttggttcccctag

SEQ ID NO: 1113120 - DNA, 25 bp, Homo sapien
ttcctttaggaatagcgcccctgct

SEQ ID NO: 1113121 - DNA, 25 bp, Homo sapien
ctgctcccaccgtttatcccgctct

SEQ ID NO: 1113122 - DNA, 25 bp, Homo sapien
cgtttatcccgctcttcccttctgc

SEQ ID NO: 1113123 - DNA, 25 bp, Homo sapien
tcctttaggaatagcgcccctgctc

SEQ ID NO: 1113124 - DNA, 25 bp, Homo sapien
cctaatttctggattgtcactggca

SEQ ID NO: 1113125 - DNA, 25 bp, Homo sapien
gcaattttattaaactcctgcagct

SEQ ID NO: 1113126 - DNA, 25 bp, Homo sapien
cagaatgccagttgcaatttgaaaa

SEQ ID NO: 1113127 - DNA, 25 bp, Homo sapien
tccaactctcagaatgccagttgca

SEQ ID NO: 1113128 - DNA, 25 bp, Homo sapien
ttaacaatcatcttcggccggctcc

SEQ ID NO: 1113129 - DNA, 25 bp, Homo sapien
actggtaccagcgtaaaagtttctg

SEQ ID NO: 1113130 - DNA, 25 bp, Homo sapien
tcctagactgtcagacaggccctcg

SEQ ID NO: 1113131 - DNA, 25 bp, Homo sapien
ccctcgaactgaggatcacaatact

SEQ ID NO: 1113132 - DNA, 25 bp, Homo sapien
gaagtgcccagagatttcatctgtc

SEQ ID NO: 1113133 - DNA, 25 bp, Homo sapien
ggctccctattaggcaaatagaagg

SEQ ID NO: 1113134 - DNA, 25 bp, Homo sapien
gagcgcaaggctccctattaggcaa

SEQ ID NO: 1113135 - DNA, 25 bp, Homo sapien
ttttgctttaggaaatgctgagcgc

SEQ ID NO: 1113136 - DNA, 25 bp, Homo sapien
tctcatatggacttgagtatgccag

SEQ ID NO: 1113137 - DNA, 25 bp, Homo sapien
acttgagtatgccagaaggccaccg

SEQ ID NO: 1113138 - DNA, 25 bp, Homo sapien
tatggtcttcagtctcatatggact

SEQ ID NO: 1113139 - DNA, 25 bp, Homo sapien
tctgtctgtgtaaactgttatggtc

SEQ ID NO: 1113140 - DNA, 25 bp, Homo sapien
tgaggctctgtgcactgtgtaccat

SEQ ID NO: 1113141 - DNA, 25 bp, Homo sapien
cacaggttaaagaatattcagtaat

SEQ ID NO: 1113142 - DNA, 25 bp, Homo sapien
ccttctcagctgttgtagttctgtt

SEQ ID NO: 1113143 - DNA, 25 bp, Homo sapien
tctgtgcactgtgcaccacatgcac

SEQ ID NO: 1113144 - DNA, 25 bp, Homo sapien
tatatataccagacaccattacagc

SEQ ID NO: 1113145 - DNA, 25 bp, Homo sapien
ttcttaagttcggtcaaatgctcag

SEQ ID NO: 1113146 - DNA, 25 bp, Homo sapien
agagaattatcctgtggcagtgggt

SEQ ID NO: 1113147 - DNA, 25 bp, Homo sapien
ttggctccttgctaggtactaaagc

SEQ ID NO: 1113148 - DNA, 25 bp, Homo sapien
gcatactcgccggtttatggtagcg

SEQ ID NO: 1113149 - DNA, 25 bp, Homo sapien
agaacctccagtccccttggggcat

SEQ ID NO: 1113150 - DNA, 25 bp, Homo sapien
ctcgccggtttatggtagcgatgaa

SEQ ID NO: 1113151 - DNA, 25 bp, Homo sapien
ccttggggcatactcgccggtttat

SEQ ID NO: 1113152 - DNA, 25 bp, Homo sapien
tctcgcagcttgaaattgttgtccg

SEQ ID NO: 1113153 - DNA, 25 bp, Homo sapien
ttgttgtccgttgtgccaacacagc

SEQ ID NO: 1113154 - DNA, 25 bp, Homo sapien
catttgcatcttctcgcagcttgaa

SEQ ID NO: 1113155 - DNA, 25 bp, Homo sapien
actggtggccatttgcatcttctcg

SEQ ID NO: 1113156 - DNA, 25 bp, Homo sapien
tttgatctgattgccgaaggtccat

SEQ ID NO: 1113157 - DNA, 25 bp, Homo sapien
tgaaaacgtctggtttccatcctgc

SEQ ID NO: 1113158 - DNA, 25 bp, Homo sapien
cagagtatgtcatgaagcattgcag

SEQ ID NO: 1113159 - DNA, 25 bp, Homo sapien
gttaaccaaacattgacattcagag

SEQ ID NO: 1113160 - DNA, 25 bp, Homo sapien
tcagttattttcagctacgatgttg

SEQ ID NO: 1113161 - DNA, 25 bp, Homo sapien
tcagctacgatgttgtcattataat

SEQ ID NO: 1113162 - DNA, 25 bp, Homo sapien
gctacgatgttgtcattataatttg

SEQ ID NO: 1113163 - DNA, 25 bp, Homo sapien
tattttcagctacgatgttgtcatt

SEQ ID NO: 1113164 - DNA, 25 bp, Homo sapien
ccctgagttcttaggagttggcaac

SEQ ID NO: 1113165 - DNA, 25 bp, Homo sapien
ggaaaaggatgttcccaagagcagt

SEQ ID NO: 1113166 - DNA, 25 bp, Homo sapien
ggcccacgagcagatgtgacaagtt

SEQ ID NO: 1113167 - DNA, 25 bp, Homo sapien
gtttctgacgtctctgccaaatgga

SEQ ID NO: 1113168 - DNA, 25 bp, Homo sapien
ttaaccataatgacttggtcaacat

SEQ ID NO: 1113169 - DNA, 25 bp, Homo sapien
tggtcaacatcgttgtaaaactcat

SEQ ID NO: 1113170 - DNA, 25 bp, Homo sapien
aatttaaccataatgacttggtcaa

SEQ ID NO: 1113171 - DNA, 25 bp, Homo sapien
ttggtcaacatcgttgtaaaactca

SEQ ID NO: 1113172 - DNA, 25 bp, Homo sapien
gccatcagtactagaagtagcaatc

SEQ ID NO: 1113173 - DNA, 25 bp, Homo sapien
catgaagcccataagagttaggtgt

SEQ ID NO: 1113174 - DNA, 25 bp, Homo sapien
ttattgtgttcagtgcggttgactc

SEQ ID NO: 1113175 - DNA, 25 bp, Homo sapien
aaattgtatttgcacccttattgtg

SEQ ID NO: 1113176 - DNA, 25 bp, Homo sapien
gaacatgggtaaagcaacaaaagtc

SEQ ID NO: 1113177 - DNA, 25 bp, Homo sapien
tcagatacacaccagccataaggct

SEQ ID NO: 1113178 - DNA, 25 bp, Homo sapien
cagctgtattgaagtgctttagcct

SEQ ID NO: 1113179 - DNA, 25 bp, Homo sapien
caaaagtcgtcaccatcagatacac

SEQ ID NO: 1113180 - DNA, 25 bp, Homo sapien
gtccttcctagtcttaaacttgcca

SEQ ID NO: 1113181 - DNA, 25 bp, Homo sapien
aaacttgccattccccagaagcttg

SEQ ID NO: 1113182 - DNA, 25 bp, Homo sapien
gttgttatctgtccggtgctcttct

SEQ ID NO: 1113183 - DNA, 25 bp, Homo sapien
atttttctcatttcgtaatacgttg

SEQ ID NO: 1113184 - DNA, 25 bp, Homo sapien
catctgagaatgattggtagtgtca

SEQ ID NO: 1113185 - DNA, 25 bp, Homo sapien
gtgtcattgtcaacgataatggcat

SEQ ID NO: 1113186 - DNA, 25 bp, Homo sapien
aaagtcatctgagaatgattggtag

SEQ ID NO: 1113187 - DNA, 25 bp, Homo sapien
tggtagtgtcattgtcaacgataat

SEQ ID NO: 1113188 - DNA, 25 bp, Homo sapien
gatcctccatcaatcgggatgtgtg

SEQ ID NO: 1113189 - DNA, 25 bp, Homo sapien
cattaagaggtaagccagtaactga

SEQ ID NO: 1113190 - DNA, 25 bp, Homo sapien
taagactgaataatagtgccggggc

SEQ ID NO: 1113191 - DNA, 25 bp, Homo sapien
gatgtgtgccagagtaataccctca

SEQ ID NO: 1113192 - DNA, 25 bp, Homo sapien
gtgcccactatcagagagccttagt

SEQ ID NO: 1113193 - DNA, 25 bp, Homo sapien
agcccaatgtctccaagtgcctact

SEQ ID NO: 1113194 - DNA, 25 bp, Homo sapien
ccatctccgtagaagccagttgact

SEQ ID NO: 1113195 - DNA, 25 bp, Homo sapien
gaattctagatcacaaaccttggag

SEQ ID NO: 1113196 - DNA, 25 bp, Homo sapien
taatatccataacagcaggggcatc

SEQ ID NO: 1113197 - DNA, 25 bp, Homo sapien
gtaaaggcgttgatgataaggatgc

SEQ ID NO: 1113198 - DNA, 25 bp, Homo sapien
gcatcaagctgactgaggtaagtaa

SEQ ID NO: 1113199 - DNA, 25 bp, Homo sapien
taagttcacaacatcattaatatcc

SEQ ID NO: 1113200 - DNA, 25 bp, Homo sapien
tcctgtagatgacagacttctcatg

SEQ ID NO: 1113201 - DNA, 25 bp, Homo sapien
tctggagaatagacgttccaggtca

SEQ ID NO: 1113202 - DNA, 25 bp, Homo sapien
gacttctcatggtgtacccacatgg

SEQ ID NO: 1113203 - DNA, 25 bp, Homo sapien
caggtcaaagtctggcaaagtcagt

SEQ ID NO: 1113204 - DNA, 25 bp, Homo sapien
ccaacattactgctcttctccaatt

SEQ ID NO: 1113205 - DNA, 25 bp, Homo sapien
aaaattcctttccaacattactgct

SEQ ID NO: 1113206 - DNA, 25 bp, Homo sapien
caattttttcctcaaatgaaacaca

SEQ ID NO: 1113207 - DNA, 25 bp, Homo sapien
aattttttcctcaaatgaaacacag

SEQ ID NO: 1113208 - DNA, 25 bp, Homo sapien
ttttaattgcatcttgtggcatacc

SEQ ID NO: 1113209 - DNA, 25 bp, Homo sapien
tagtgagttgcttaagcttactcat

SEQ ID NO: 1113210 - DNA, 25 bp, Homo sapien
attagtgagttgcttaagcttactc

SEQ ID NO: 1113211 - DNA, 25 bp, Homo sapien
ttagtgagttgcttaagcttactca

SEQ ID NO: 1113212 - DNA, 25 bp, Homo sapien
ggctttgatgccagatgtaaccaca

SEQ ID NO: 1113213 - DNA, 25 bp, Homo sapien
aggctttgatgccagatgtaaccac

SEQ ID NO: 1113214 - DNA, 25 bp, Homo sapien
caaaggctttgatgccagatgtaac

SEQ ID NO: 1113215 - DNA, 25 bp, Homo sapien
aaaggctttgatgccagatgtaacc

SEQ ID NO: 1113216 - DNA, 25 bp, Homo sapien
ccacagtcaaactgaactgcctggc

SEQ ID NO: 1113217 - DNA, 25 bp, Homo sapien
gcataatcttgggtcggacaagccc

SEQ ID NO: 1113218 - DNA, 25 bp, Homo sapien
tgggtcggacaagcccctcgaagaa

SEQ ID NO: 1113219 - DNA, 25 bp, Homo sapien
actgaactgcctggcataatcttgg

SEQ ID NO: 1113220 - DNA, 25 bp, Homo sapien
gaaacaattttacacggcttctgat

SEQ ID NO: 1113221 - DNA, 25 bp, Homo sapien
tgatcattacagaagataccaacgg

SEQ ID NO: 1113222 - DNA, 25 bp, Homo sapien
gataccaacggacatgtccataatt

SEQ ID NO: 1113223 - DNA, 25 bp, Homo sapien
tatcaagagacaagttatatcgaac

SEQ ID NO: 1113224 - DNA, 25 bp, Homo sapien
acattaaacagtgaggcccatctcc

SEQ ID NO: 1113225 - DNA, 25 bp, Homo sapien
ttttgccccacgcaggaaaatggaa

SEQ ID NO: 1113226 - DNA, 25 bp, Homo sapien
tgattctactgaagctaaagcagaa

SEQ ID NO: 1113227 - DNA, 25 bp, Homo sapien
tgctgtctttggttcagtaacagtg

SEQ ID NO: 1113228 - DNA, 25 bp, Homo sapien
gctgagttccaaggactgtttcttc

SEQ ID NO: 1113229 - DNA, 25 bp, Homo sapien
ctgctcaacaccctccaacttggca

SEQ ID NO: 1113230 - DNA, 25 bp, Homo sapien
aaatgctgagttccaaggactgttt

SEQ ID NO: 1113231 - DNA, 25 bp, Homo sapien
cttggcaaaatgctgagttccaagg

SEQ ID NO: 1113232 - DNA, 25 bp, Homo sapien
tcaggcttggattgacccacgaggt

SEQ ID NO: 1113233 - DNA, 25 bp, Homo sapien
gattgacccacgaggtaagcctgca

SEQ ID NO: 1113234 - DNA, 25 bp, Homo sapien
aggatttcaggcttggattgaccca

SEQ ID NO: 1113235 - DNA, 25 bp, Homo sapien
cccacgaggtaagcctgcaagatgt

SEQ ID NO: 1113236 - DNA, 25 bp, Homo sapien
gctgctgccagaagactatggactt

SEQ ID NO: 1113237 - DNA, 25 bp, Homo sapien
gaaaataagagtcatcatcatcctg

SEQ ID NO: 1113238 - DNA, 25 bp, Homo sapien
ctgcacacttgcaaagtcgaggtcc

SEQ ID NO: 1113239 - DNA, 25 bp, Homo sapien
gaactacaagctatggctgctgcca

SEQ ID NO: 1113240 - DNA, 25 bp, Homo sapien
gaattttacctctttgacacatcca

SEQ ID NO: 1113241 - DNA, 25 bp, Homo sapien
gaaactatttatgtccactcccatt

SEQ ID NO: 1113242 - DNA, 25 bp, Homo sapien
tctttgacacatccatttggttctg

SEQ ID NO: 1113243 - DNA, 25 bp, Homo sapien
agaaactatttatgtccactcccat

SEQ ID NO: 1113244 - DNA, 25 bp, Homo sapien
tcccagtttctctcagtgattctgt

SEQ ID NO: 1113245 - DNA, 25 bp, Homo sapien
tctctttcagaatcttcatttgtga

SEQ ID NO: 1113246 - DNA, 25 bp, Homo sapien
tcttcccagtttctctcagtgattc

SEQ ID NO: 1113247 - DNA, 25 bp, Homo sapien
ctcttcccagtttctctcagtgatt

SEQ ID NO: 1113248 - DNA, 25 bp, Homo sapien
tctagtaaagtatcctctgtaacac

SEQ ID NO: 1113249 - DNA, 25 bp, Homo sapien
gtaaagtatcctctgtaacactatt

SEQ ID NO: 1113250 - DNA, 25 bp, Homo sapien
tagtaaagtatcctctgtaacacta

SEQ ID NO: 1113251 - DNA, 25 bp, Homo sapien
aagtatcctctgtaacactatttac

SEQ ID NO: 1113252 - DNA, 25 bp, Homo sapien
gacagtctccatggtttgagccctc

SEQ ID NO: 1113253 - DNA, 25 bp, Homo sapien
tgctcatcacaagtccacgttggac

SEQ ID NO: 1113254 - DNA, 25 bp, Homo sapien
tcagacccctgatgctacaagctct

SEQ ID NO: 1113255 - DNA, 25 bp, Homo sapien
actagcttggtgtttgcatgcatgc

SEQ ID NO: 1113256 - DNA, 25 bp, Homo sapien
caaaaatgaatgcatcggccaccac

SEQ ID NO: 1113257 - DNA, 25 bp, Homo sapien
tgaatgcataacctagaaaaagagc

SEQ ID NO: 1113258 - DNA, 25 bp, Homo sapien
agaatgaaacgcaggagggaaagcc

SEQ ID NO: 1113259 - DNA, 25 bp, Homo sapien
gagcttgcatgcagaccattaggga

SEQ ID NO: 1113260 - DNA, 25 bp, Homo sapien
tgaataacctggctagttgtatatt

SEQ ID NO: 1113261 - DNA, 25 bp, Homo sapien
caaaataaagggcattggtaattgc

SEQ ID NO: 1113262 - DNA, 25 bp, Homo sapien
ggcattggtaattgcaattataaac

SEQ ID NO: 1113263 - DNA, 25 bp, Homo sapien
ataacctggctagttgtatattcaa

SEQ ID NO: 1113264 - DNA, 25 bp, Homo sapien
tactaatcgtacattctatcctgga

SEQ ID NO: 1113265 - DNA, 25 bp, Homo sapien
cacccccagcctatgaagaaggagc

SEQ ID NO: 1113266 - DNA, 25 bp, Homo sapien
ccttgctggtttaatgccattatcc

SEQ ID NO: 1113267 - DNA, 25 bp, Homo sapien
tctttgtatacacccccagcctatg

SEQ ID NO: 1113268 - DNA, 25 bp, Homo sapien
taaatctgacagtcgagaaaatgct

SEQ ID NO: 1113269 - DNA, 25 bp, Homo sapien
ttgaaatactgccagcctaaatctg

SEQ ID NO: 1113270 - DNA, 25 bp, Homo sapien
taacatcagctggaatatagcccaa

SEQ ID NO: 1113271 - DNA, 25 bp, Homo sapien
gtcgagaaaatgctgtagtgttaac

SEQ ID NO: 1113272 - DNA, 25 bp, Homo sapien
tcaaaaactacatccttgatcccag

SEQ ID NO: 1113273 - DNA, 25 bp, Homo sapien
ggcagctatcagtgcagattcatta

SEQ ID NO: 1113274 - DNA, 25 bp, Homo sapien
cagctatcagtgcagattcattatt

SEQ ID NO: 1113275 - DNA, 25 bp, Homo sapien
caaaaactacatccttgatcccagg

SEQ ID NO: 1113276 - DNA, 25 bp, Homo sapien
agtggatcacgatgaaggtctccat

SEQ ID NO: 1113277 - DNA, 25 bp, Homo sapien
ttagaagtggatcacgatgaaggtc

SEQ ID NO: 1113278 - DNA, 25 bp, Homo sapien
attaattagaagtggatcacgatga

SEQ ID NO: 1113279 - DNA, 25 bp, Homo sapien
gaagtggatcacgatgaaggtctcc

SEQ ID NO: 1113280 - DNA, 25 bp, Homo sapien
gtctgatcacccagttcggcccaag

SEQ ID NO: 1113281 - DNA, 25 bp, Homo sapien
gatcacccagttcggcccaagcctc

SEQ ID NO: 1113282 - DNA, 25 bp, Homo sapien
tgatcacccagttcggcccaagcct

SEQ ID NO: 1113283 - DNA, 25 bp, Homo sapien
gatgtctgatcacccagttcggccc

SEQ ID NO: 1113284 - DNA, 25 bp, Homo sapien
gtgtctgaggtcttggcactggctg

SEQ ID NO: 1113285 - DNA, 25 bp, Homo sapien
gtctgaggtcttggcactggctgtc

SEQ ID NO: 1113286 - DNA, 25 bp, Homo sapien
tctgaggtcttggcactggctgtcc

SEQ ID NO: 1113287 - DNA, 25 bp, Homo sapien
tgtctgaggtcttggcactggctgt

SEQ ID NO: 1113288 - DNA, 25 bp, Homo sapien
gagagtgcttaccttagggagccaa

SEQ ID NO: 1113289 - DNA, 25 bp, Homo sapien
tagcatgttcagtacttaagggccc

SEQ ID NO: 1113290 - DNA, 25 bp, Homo sapien
aatgattggtgataacaggtccctc

SEQ ID NO: 1113291 - DNA, 25 bp, Homo sapien
tcagacccgcagctgtgtagggcaa

SEQ ID NO: 1113292 - DNA, 25 bp, Homo sapien
ccttagtgtagaaggcagttgcctt

SEQ ID NO: 1113293 - DNA, 25 bp, Homo sapien
gtgttttgattgcttctaataccct

SEQ ID NO: 1113294 - DNA, 25 bp, Homo sapien
gattgcttctaataccctgtttatt

SEQ ID NO: 1113295 - DNA, 25 bp, Homo sapien
ctattccttagtgtagaaggcagtt

SEQ ID NO: 1113296 - DNA, 25 bp, Homo sapien
tttgatgatgccctctgtggtacag

SEQ ID NO: 1113297 - DNA, 25 bp, Homo sapien
caataaactttgatgatgccctctg

SEQ ID NO: 1113298 - DNA, 25 bp, Homo sapien
atgatgccctctgtggtacagatca

SEQ ID NO: 1113299 - DNA, 25 bp, Homo sapien
tgatgatgccctctgtggtacagat

SEQ ID NO: 1113300 - DNA, 25 bp, Homo sapien
caaaaactatcagaaagaatttctt

SEQ ID NO: 1113301 - DNA, 25 bp, Homo sapien
gattggtactgattgctccagcttt

SEQ ID NO: 1113302 - DNA, 25 bp, Homo sapien
gtgaggagtgattggtactgattgc

SEQ ID NO: 1113303 - DNA, 25 bp, Homo sapien
ttttgagtgaggagtgattggtact

SEQ ID NO: 1113304 - DNA, 25 bp, Homo sapien
gagtgattggtactgattgctccag

SEQ ID NO: 1113305 - DNA, 25 bp, Homo sapien
tcttagaacttgacagtgtgcgtct

SEQ ID NO: 1113306 - DNA, 25 bp, Homo sapien
caagtgctcttcattggtaagatag

SEQ ID NO: 1113307 - DNA, 25 bp, Homo sapien
tgtgcgtctgctgctagggtcacag

SEQ ID NO: 1113308 - DNA, 25 bp, Homo sapien
gatagaacaattaagctcatctgca

SEQ ID NO: 1113309 - DNA, 25 bp, Homo sapien
cacttgcattggctcaatttgattt

SEQ ID NO: 1113310 - DNA, 25 bp, Homo sapien
tgcattggctcaatttgatttctgt

SEQ ID NO: 1113311 - DNA, 25 bp, Homo sapien
cttgcattggctcaatttgatttct

SEQ ID NO: 1113312 - DNA, 25 bp, Homo sapien
tcacttgcattggctcaatttgatt

SEQ ID NO: 1113313 - DNA, 25 bp, Homo sapien
tgggtgttacacaagctttacccac

SEQ ID NO: 1113314 - DNA, 25 bp, Homo sapien
caaacctgggtgttacacaagcttt

SEQ ID NO: 1113315 - DNA, 25 bp, Homo sapien
tgttacacaagctttacccacaggg

SEQ ID NO: 1113316 - DNA, 25 bp, Homo sapien
ggaaacatcaaacctgggtgttaca

SEQ ID NO: 1113317 - DNA, 25 bp, Homo sapien
gcatttacattagtggccttatatt

SEQ ID NO: 1113318 - DNA, 25 bp, Homo sapien
ttctccatgtctattcactccagga

SEQ ID NO: 1113319 - DNA, 25 bp, Homo sapien
ggattctggctactattgcttgtca

SEQ ID NO: 1113320 - DNA, 25 bp, Homo sapien
gattctggctactattgcttgtcat

SEQ ID NO: 1113321 - DNA, 25 bp, Homo sapien
actccaggattctggctactattgc

SEQ ID NO: 1113322 - DNA, 25 bp, Homo sapien
tcttcactgtcctcaagggatttat

SEQ ID NO: 1113323 - DNA, 25 bp, Homo sapien
tccatttaagctctcattgaagaaa

SEQ ID NO: 1113324 - DNA, 25 bp, Homo sapien
tgaagaaatcggaaggatgggaagg

SEQ ID NO: 1113325 - DNA, 25 bp, Homo sapien
ggatgggaaggtgatctcaaagtta

SEQ ID NO: 1113326 - DNA, 25 bp, Homo sapien
tgaactcctttgtgctagcccatag

SEQ ID NO: 1113327 - DNA, 25 bp, Homo sapien
tcaagtctgtgtaagctgccatggc

SEQ ID NO: 1113328 - DNA, 25 bp, Homo sapien
gctttgcttccacaataaagagagg

SEQ ID NO: 1113329 - DNA, 25 bp, Homo sapien
tagcccataggtggttggccttcaa

SEQ ID NO: 1113330 - DNA, 25 bp, Homo sapien
gaggtagtgcttgttcctcattatt

SEQ ID NO: 1113331 - DNA, 25 bp, Homo sapien
ttctaacctttggtccacattctgg

SEQ ID NO: 1113332 - DNA, 25 bp, Homo sapien
gattccaatgtggagtcttctaacc

SEQ ID NO: 1113333 - DNA, 25 bp, Homo sapien
cctcattatttaacggcggacccag

SEQ ID NO: 1113334 - DNA, 25 bp, Homo sapien
atggtattaagtttgatggcaaaat

SEQ ID NO: 1113335 - DNA, 25 bp, Homo sapien
aatggtattaagtttgatggcaaaa

SEQ ID NO: 1113336 - DNA, 25 bp, Homo sapien
tggtattaagtttgatggcaaaata

SEQ ID NO: 1113337 - DNA, 25 bp, Homo sapien
aaatggtattaagtttgatggcaaa

SEQ ID NO: 1113338 - DNA, 25 bp, Homo sapien
gcagagtttgtaacaaaagccttca

SEQ ID NO: 1113339 - DNA, 25 bp, Homo sapien
tgaaggtcaagccatatatcctgtt

SEQ ID NO: 1113340 - DNA, 25 bp, Homo sapien
cgagcacgagcagagtttgtaacaa

SEQ ID NO: 1113341 - DNA, 25 bp, Homo sapien
aaaaagtgagaaaacgagcacgagc

SEQ ID NO: 1113342 - DNA, 25 bp, Homo sapien
gagaatagacatcgccaatcacatt

SEQ ID NO: 1113343 - DNA, 25 bp, Homo sapien
caatcacatttctatgttgtaccaa

SEQ ID NO: 1113344 - DNA, 25 bp, Homo sapien
gcccctgagaatagacatcgccaat

SEQ ID NO: 1113345 - DNA, 25 bp, Homo sapien
agacatcgccaatcacatttctatg

SEQ ID NO: 1113346 - DNA, 25 bp, Homo sapien
tattcagaataatagccttcagtgg

SEQ ID NO: 1113347 - DNA, 25 bp, Homo sapien
ttattcagaataatagccttcagtg

SEQ ID NO: 1113348 - DNA, 25 bp, Homo sapien
tcagaataatagccttcagtggtac

SEQ ID NO: 1113349 - DNA, 25 bp, Homo sapien
ttcagaataatagccttcagtggta

SEQ ID NO: 1113350 - DNA, 25 bp, Homo sapien
cactgggcccaatttttaccctgag

SEQ ID NO: 1113351 - DNA, 25 bp, Homo sapien
gctgtaggcactcatgtagcactgc

SEQ ID NO: 1113352 - DNA, 25 bp, Homo sapien
taagacattcaacaccttgcataaa

SEQ ID NO: 1113353 - DNA, 25 bp, Homo sapien
ccatgattcattcttacactgggcc

SEQ ID NO: 1113354 - DNA, 25 bp, Homo sapien
ctatactccaccctcctccagtccc

SEQ ID NO: 1113355 - DNA, 25 bp, Homo sapien
tccaccctcctccagtccctggact

SEQ ID NO: 1113356 - DNA, 25 bp, Homo sapien
caccctcctccagtccctggactgc

SEQ ID NO: 1113357 - DNA, 25 bp, Homo sapien
actccaccctcctccagtccctgga

SEQ ID NO: 1113358 - DNA, 25 bp, Homo sapien
tgataggggctactcccctaagacc

SEQ ID NO: 1113359 - DNA, 25 bp, Homo sapien
gctactcccctaagaccaattcctc

SEQ ID NO: 1113360 - DNA, 25 bp, Homo sapien
gccactcacaatctcacagcgggag

SEQ ID NO: 1113361 - DNA, 25 bp, Homo sapien
ccagagacgtgataggggctactcc

SEQ ID NO: 1113362 - DNA, 25 bp, Homo sapien
tctgctagaagaataagttatcgac

SEQ ID NO: 1113363 - DNA, 25 bp, Homo sapien
ttctttctgctagaagaataagtta

SEQ ID NO: 1113364 - DNA, 25 bp, Homo sapien
ctttctgctagaagaataagttatc

SEQ ID NO: 1113365 - DNA, 25 bp, Homo sapien
tttctgctagaagaataagttatcg

SEQ ID NO: 1113366 - DNA, 25 bp, Homo sapien
aattgtgttcctatgggcttcttgc

SEQ ID NO: 1113367 - DNA, 25 bp, Homo sapien
tcctatgggcttcttgcttaatctt

SEQ ID NO: 1113368 - DNA, 25 bp, Homo sapien
tgttcctatgggcttcttgcttaat

SEQ ID NO: 1113369 - DNA, 25 bp, Homo sapien
atgggcttcttgcttaatcttttgg

SEQ ID NO: 1113370 - DNA, 25 bp, Homo sapien
gaaaactggtaggaggactttgcaa

SEQ ID NO: 1113371 - DNA, 25 bp, Homo sapien
accgagtccacaggccatatgtctg

SEQ ID NO: 1113372 - DNA, 25 bp, Homo sapien
gctgactggctgaaaactggtagga

SEQ ID NO: 1113373 - DNA, 25 bp, Homo sapien
tgggccaaaccgagtccacaggcca

SEQ ID NO: 1113374 - DNA, 25 bp, Homo sapien
ggataaacttggtacatcaggacag

SEQ ID NO: 1113375 - DNA, 25 bp, Homo sapien
atggataaacttggtacatcaggac

SEQ ID NO: 1113376 - DNA, 25 bp, Homo sapien
caaaacatagaacaaccaagatgtc

SEQ ID NO: 1113377 - DNA, 25 bp, Homo sapien
tacttgccaaaacatagaacaacca

SEQ ID NO: 1113378 - DNA, 25 bp, Homo sapien
tataaaggtcttagacactgcctgc

SEQ ID NO: 1113379 - DNA, 25 bp, Homo sapien
tcaatctgcttaagtgatgtatgtc

SEQ ID NO: 1113380 - DNA, 25 bp, Homo sapien
gcttcatggaatcagaggcccttga

SEQ ID NO: 1113381 - DNA, 25 bp, Homo sapien
gataggagaggaatgatcaatctgc

SEQ ID NO: 1113382 - DNA, 25 bp, Homo sapien
ctaaattccaaaagagtactcttgg

SEQ ID NO: 1113383 - DNA, 25 bp, Homo sapien
tcttctacttgtaaggctgtttata

SEQ ID NO: 1113384 - DNA, 25 bp, Homo sapien
caaaagagtactcttggaattcttc

SEQ ID NO: 1113385 - DNA, 25 bp, Homo sapien
tatgttctaaagaccctcgtgagac

SEQ ID NO: 1113386 - DNA, 25 bp, Homo sapien
ccctaggatgtcctttgtcccactt

SEQ ID NO: 1113387 - DNA, 25 bp, Homo sapien
ctaggatgtcctttgtcccacttgg

SEQ ID NO: 1113388 - DNA, 25 bp, Homo sapien
cctaggatgtcctttgtcccacttg

SEQ ID NO: 1113389 - DNA, 25 bp, Homo sapien
ctagttatcatagccacgacgatat

SEQ ID NO: 1113390 - DNA, 25 bp, Homo sapien
ttctgatgtagggttgggatcaaca

SEQ ID NO: 1113391 - DNA, 25 bp, Homo sapien
ccacgacgatatcccttctgatgta

SEQ ID NO: 1113392 - DNA, 25 bp, Homo sapien
tagggttgggatcaacagaaacagc

SEQ ID NO: 1113393 - DNA, 25 bp, Homo sapien
tataatttatagtaggaaaggctgg

SEQ ID NO: 1113394 - DNA, 25 bp, Homo sapien
taatccttaactggctaaacaattc

SEQ ID NO: 1113395 - DNA, 25 bp, Homo sapien
tccagtcagtaaaatgatatatttg

SEQ ID NO: 1113396 - DNA, 25 bp, Homo sapien
taatacatagagttaggtctcacta

SEQ ID NO: 1113397 - DNA, 25 bp, Homo sapien
gggcatgagtgtacttctctgagtg

SEQ ID NO: 1113398 - DNA, 25 bp, Homo sapien
tggtggtggcatttgtgaaagctca

SEQ ID NO: 1113399 - DNA, 25 bp, Homo sapien
gaatgctatgtacaactagagctgg

SEQ ID NO: 1113400 - DNA, 25 bp, Homo sapien
aaactgtacaacttaataggtgcat

SEQ ID NO: 1113401 - DNA, 25 bp, Homo sapien
catgacaaaaagggacgtggctgtg

SEQ ID NO: 1113402 - DNA, 25 bp, Homo sapien
tggctgtgaaacatctcaagtccac

SEQ ID NO: 1113403 - DNA, 25 bp, Homo sapien
tgacaaaaagggacgtggctgtgaa

SEQ ID NO: 1113404 - DNA, 25 bp, Homo sapien
gacgtggctgtgaaacatctcaagt

SEQ ID NO: 1113405 - DNA, 25 bp, Homo sapien
ggatactacttctatgatggacgaa

SEQ ID NO: 1113406 - DNA, 25 bp, Homo sapien
ccaggatgccaccttacgtggaaat

SEQ ID NO: 1113407 - DNA, 25 bp, Homo sapien
tacttctatgatggacgaagaggag

SEQ ID NO: 1113408 - DNA, 25 bp, Homo sapien
tacgtggaaatgtggatactacttc

SEQ ID NO: 1113409 - DNA, 25 bp, Homo sapien
ggtcaggaaactatcagcagctttc

SEQ ID NO: 1113410 - DNA, 25 bp, Homo sapien
aggtcaggaaactatcagcagcttt

SEQ ID NO: 1113411 - DNA, 25 bp, Homo sapien
gtcaggaaactatcagcagctttct

SEQ ID NO: 1113412 - DNA, 25 bp, Homo sapien
gttctgctacagcttgaaccagtga

SEQ ID NO: 1113413 - DNA, 25 bp, Homo sapien
cacattaacagatttgacagagcag

SEQ ID NO: 1113414 - DNA, 25 bp, Homo sapien
tgcactcagttctttgcagtctttc

SEQ ID NO: 1113415 - DNA, 25 bp, Homo sapien
ttaacagatttgacagagcagcttg

SEQ ID NO: 1113416 - DNA, 25 bp, Homo sapien
cactcagttctttgcagtctttctt

SEQ ID NO: 1113417 - DNA, 25 bp, Homo sapien
tttcagagtgtcaataatcttattc

SEQ ID NO: 1113418 - DNA, 25 bp, Homo sapien
tgtcaataatcttattcaggtgctc

SEQ ID NO: 1113419 - DNA, 25 bp, Homo sapien
gtgtcaataatcttattcaggtgct

SEQ ID NO: 1113420 - DNA, 25 bp, Homo sapien
cctttcagagtgtcaataatcttat

SEQ ID NO: 1113421 - DNA, 25 bp, Homo sapien
tgctctgcgcatctaaataattttc

SEQ ID NO: 1113422 - DNA, 25 bp, Homo sapien
gctgcattgagaacatatgaagtaa

SEQ ID NO: 1113423 - DNA, 25 bp, Homo sapien
agcttgctgtctgctgcattgagaa

SEQ ID NO: 1113424 - DNA, 25 bp, Homo sapien
ctctgtgctctgcgcatctaaataa

SEQ ID NO: 1113425 - DNA, 25 bp, Homo sapien
tctttcgtggcccctggatttgctc

SEQ ID NO: 1113426 - DNA, 25 bp, Homo sapien
gatttgctcttcaggagggtcttcc

SEQ ID NO: 1113427 - DNA, 25 bp, Homo sapien
ttagtcggtccatctggcagtccca

SEQ ID NO: 1113428 - DNA, 25 bp, Homo sapien
tgaagtgagttctttagtcggtcca

SEQ ID NO: 1113429 - DNA, 25 bp, Homo sapien
cgggttgtcgtttcttgacatgatt

SEQ ID NO: 1113430 - DNA, 25 bp, Homo sapien
agatggacagccacttggggaccac

SEQ ID NO: 1113431 - DNA, 25 bp, Homo sapien
ctaacgggttgtcgtttcttgacat

SEQ ID NO: 1113432 - DNA, 25 bp, Homo sapien
aacgggttgtcgtttcttgacatga

SEQ ID NO: 1113433 - DNA, 25 bp, Homo sapien
acatttacaatataagtgctcagag

SEQ ID NO: 1113434 - DNA, 25 bp, Homo sapien
cagtctgagcagctaagaggctatc

SEQ ID NO: 1113435 - DNA, 25 bp, Homo sapien
taaagaaattgagcaagcatgctcc

SEQ ID NO: 1113436 - DNA, 25 bp, Homo sapien
tagtattatcagtttctaagcctcc

SEQ ID NO: 1113437 - DNA, 25 bp, Homo sapien
cagtaatgagcaactggcattagtt

SEQ ID NO: 1113438 - DNA, 25 bp, Homo sapien
gtttttgtctttaccaccatgacag

SEQ ID NO: 1113439 - DNA, 25 bp, Homo sapien
ggcttgtggcccagtcttgagctgt

SEQ ID NO: 1113440 - DNA, 25 bp, Homo sapien
cattttggcttgtggcccagtcttg

SEQ ID NO: 1113441 - DNA, 25 bp, Homo sapien
tcagggagttaggagtgagtggctc

SEQ ID NO: 1113442 - DNA, 25 bp, Homo sapien
cagggagttaggagtgagtggctcc

SEQ ID NO: 1113443 - DNA, 25 bp, Homo sapien
ctttcttaattttgaggtcctcatg

SEQ ID NO: 1113444 - DNA, 25 bp, Homo sapien
atttctggacatctttcttaatttt

SEQ ID NO: 1113445 - DNA, 25 bp, Homo sapien
ttcttaattttgaggtcctcatggc

SEQ ID NO: 1113446 - DNA, 25 bp, Homo sapien
catctttcttaattttgaggtcctc

SEQ ID NO: 1113447 - DNA, 25 bp, Homo sapien
gtctggatggttttctagtcctttc

SEQ ID NO: 1113448 - DNA, 25 bp, Homo sapien
cactaggtgtttttaacagttggct

SEQ ID NO: 1113449 - DNA, 25 bp, Homo sapien
ctgaaggcaggtcatctgtgcacta

SEQ ID NO: 1113450 - DNA, 25 bp, Homo sapien
tgcccccttgacatgaatctacagt

SEQ ID NO: 1113451 - DNA, 25 bp, Homo sapien
taacagttggctttgaaggggatac

SEQ ID NO: 1113452 - DNA, 25 bp, Homo sapien
gcacttgtactttgaaccataaaac

SEQ ID NO: 1113453 - DNA, 25 bp, Homo sapien
gctttccaccataagttagaaatga

SEQ ID NO: 1113454 - DNA, 25 bp, Homo sapien
acatttccttggtctctggtgctgc

SEQ ID NO: 1113455 - DNA, 25 bp, Homo sapien
aataagcacttgtactttgaaccat

SEQ ID NO: 1113456 - DNA, 25 bp, Homo sapien
gaatgaggagctatggttgctactc

SEQ ID NO: 1113457 - DNA, 25 bp, Homo sapien
tgcttggtggtaccatggaagagca

SEQ ID NO: 1113458 - DNA, 25 bp, Homo sapien
taaagacaatgacctgactgtggtg

SEQ ID NO: 1113459 - DNA, 25 bp, Homo sapien
aagagcaggtgtagaaaccaggagc

SEQ ID NO: 1113460 - DNA, 25 bp, Homo sapien
gaatgttgccagtctttgatgtcac

SEQ ID NO: 1113461 - DNA, 25 bp, Homo sapien
gactgtcttgcgaggctttctaatg

SEQ ID NO: 1113462 - DNA, 25 bp, Homo sapien
tgcccgtgcaagcaacgactgtctt

SEQ ID NO: 1113463 - DNA, 25 bp, Homo sapien
tctcaagggcacttagcagagctgt

SEQ ID NO: 1113464 - DNA, 25 bp, Homo sapien
tgcacaaaaataaagggcttgccag

SEQ ID NO: 1113465 - DNA, 25 bp, Homo sapien
ttcttggtgagttccgaatgcacaa

SEQ ID NO: 1113466 - DNA, 25 bp, Homo sapien
gtgaacataattatgacttcacagc

SEQ ID NO: 1113467 - DNA, 25 bp, Homo sapien
taaagggcttgccagttgccagtgg

SEQ ID NO: 1113468 - DNA, 25 bp, Homo sapien
tattgataacaatagatgttttagg

SEQ ID NO: 1113469 - DNA, 25 bp, Homo sapien
tagatgttttaggaattggcaaact

SEQ ID NO: 1113470 - DNA, 25 bp, Homo sapien
tcctagatggaatggcagaatagcc

SEQ ID NO: 1113471 - DNA, 25 bp, Homo sapien
tattttgtaaagtccgctttgtgaa

SEQ ID NO: 1113472 - DNA, 25 bp, Homo sapien
ggttgatatcattggcctaggatga

SEQ ID NO: 1113473 - DNA, 25 bp, Homo sapien
gattacagttcacagtacagccatg

SEQ ID NO: 1113474 - DNA, 25 bp, Homo sapien
cctaggatgagctgctatgtctcaa

SEQ ID NO: 1113475 - DNA, 25 bp, Homo sapien
tctagcagttaagcttcgtaaccca

SEQ ID NO: 1113476 - DNA, 25 bp, Homo sapien
ctcatttatttggctggacatggca

SEQ ID NO: 1113477 - DNA, 25 bp, Homo sapien
gactttatttggtgatctgcttttt

SEQ ID NO: 1113478 - DNA, 25 bp, Homo sapien
tgaccgggatgaagtaaaaacaaca

SEQ ID NO: 1113479 - DNA, 25 bp, Homo sapien
acaacaaccatgaagttcagtctca

SEQ ID NO: 1113480 - DNA, 25 bp, Homo sapien
cacaagccacataaccttggctttg

SEQ ID NO: 1113481 - DNA, 25 bp, Homo sapien
ccttggctttgtccaataccacaca

SEQ ID NO: 1113482 - DNA, 25 bp, Homo sapien
gaagcacaagccacataaccttggc

SEQ ID NO: 1113483 - DNA, 25 bp, Homo sapien
aggaagcacaagccacataaccttg

SEQ ID NO: 1113484 - DNA, 25 bp, Homo sapien
agttgaatctcagtatccagtaatt

SEQ ID NO: 1113485 - DNA, 25 bp, Homo sapien
gttgaatctcagtatccagtaattc

SEQ ID NO: 1113486 - DNA, 25 bp, Homo sapien
gagttgaatctcagtatccagtaat

SEQ ID NO: 1113487 - DNA, 25 bp, Homo sapien
gaagaggctgtaggtcttcttatga

SEQ ID NO: 1113488 - DNA, 25 bp, Homo sapien
tgtaggtcttcttatgacttcttag

SEQ ID NO: 1113489 - DNA, 25 bp, Homo sapien
ggctgtaggtcttcttatgacttct

SEQ ID NO: 1113490 - DNA, 25 bp, Homo sapien
gaggctgtaggtcttcttatgactt

SEQ ID NO: 1113491 - DNA, 25 bp, Homo sapien
tttcacaaaaatttatggcaaagcc

SEQ ID NO: 1113492 - DNA, 25 bp, Homo sapien
ttcacaaaaatttatggcaaagcca

SEQ ID NO: 1113493 - DNA, 25 bp, Homo sapien
cagtgccaatacccagtaactccat

SEQ ID NO: 1113494 - DNA, 25 bp, Homo sapien
ggcaaagccagtgccaatacccagt

SEQ ID NO: 1113495 - DNA, 25 bp, Homo sapien
cttggcataacatcatggctctttc

SEQ ID NO: 1113496 - DNA, 25 bp, Homo sapien
gctctttccagaaaggctttgtctg

SEQ ID NO: 1113497 - DNA, 25 bp, Homo sapien
tggcataacatcatggctctttcca

SEQ ID NO: 1113498 - DNA, 25 bp, Homo sapien
tctttccagaaaggctttgtctggc

SEQ ID NO: 1113499 - DNA, 25 bp, Homo sapien
tgctacagcatgaccattaaacaaa

SEQ ID NO: 1113500 - DNA, 25 bp, Homo sapien
ggcaggatatggtaaaccagatgca

SEQ ID NO: 1113501 - DNA, 25 bp, Homo sapien
caataaggattgtatggccccataa

SEQ ID NO: 1113502 - DNA, 25 bp, Homo sapien
aaaacatactagatgggcaggatat

SEQ ID NO: 1113503 - DNA, 25 bp, Homo sapien
agtgtgtcactaaaagctgcctgaa

SEQ ID NO: 1113504 - DNA, 25 bp, Homo sapien
ggttcttgacaatgctgatctgtaa

SEQ ID NO: 1113505 - DNA, 25 bp, Homo sapien
taatgctcaacgaaacaataaattt

SEQ ID NO: 1113506 - DNA, 25 bp, Homo sapien
gctttatactcattcagcccatcat

SEQ ID NO: 1113507 - DNA, 25 bp, Homo sapien
cctgtgtcccatgttgtattctttc

SEQ ID NO: 1113508 - DNA, 25 bp, Homo sapien
ctgtgtcccatgttgtattctttct

SEQ ID NO: 1113509 - DNA, 25 bp, Homo sapien
caatcttgttagtaggggtagtgtc

SEQ ID NO: 1113510 - DNA, 25 bp, Homo sapien
gtagtgtcccccttctggtcaagga

SEQ ID NO: 1113511 - DNA, 25 bp, Homo sapien
attggaagttggagcactgttggaa

SEQ ID NO: 1113512 - DNA, 25 bp, Homo sapien
ctggtcaaggagcagattggaagtt

SEQ ID NO: 1113513 - DNA, 25 bp, Homo sapien
tagtccaaagactacagtaacattg

SEQ ID NO: 1113514 - DNA, 25 bp, Homo sapien
ctgtcgttggctggttaaaagggca

SEQ ID NO: 1113515 - DNA, 25 bp, Homo sapien
agggcagtcgttagttagtccaaag

SEQ ID NO: 1113516 - DNA, 25 bp, Homo sapien
tttcttagtacagcaactgtcgttg

SEQ ID NO: 1113517 - DNA, 25 bp, Homo sapien
aattttggctcagtcgctgtgctca

SEQ ID NO: 1113518 - DNA, 25 bp, Homo sapien
tgagcaattttggctcagtcgctgt

SEQ ID NO: 1113519 - DNA, 25 bp, Homo sapien
caattttggctcagtcgctgtgctc

SEQ ID NO: 1113520 - DNA, 25 bp, Homo sapien
agcaattttggctcagtcgctgtgc

SEQ ID NO: 1113521 - DNA, 25 bp, Homo sapien
actgagcaccatctcatcagtcagc

SEQ ID NO: 1113522 - DNA, 25 bp, Homo sapien
gctccactttaatgctgccaggtag

SEQ ID NO: 1113523 - DNA, 25 bp, Homo sapien
cagaacacaattgcattccagaggc

SEQ ID NO: 1113524 - DNA, 25 bp, Homo sapien
actttgttggttggagcactgagca

SEQ ID NO: 1113525 - DNA, 25 bp, Homo sapien
agctgggtctgtgatttcctaaccg

SEQ ID NO: 1113526 - DNA, 25 bp, Homo sapien
tgtgagagccgcctgcttcggcttc

SEQ ID NO: 1113527 - DNA, 25 bp, Homo sapien
ctgtgatttcctaaccgaatgctgc

SEQ ID NO: 1113528 - DNA, 25 bp, Homo sapien
cagatctcttgtgagagccgcctgc

SEQ ID NO: 1113529 - DNA, 25 bp, Homo sapien
tctctttagggtagttaacacatgc

SEQ ID NO: 1113530 - DNA, 25 bp, Homo sapien
cctgagtctccacttgaattgtggg

SEQ ID NO: 1113531 - DNA, 25 bp, Homo sapien
ggaatctttgctataatacgggacc

SEQ ID NO: 1113532 - DNA, 25 bp, Homo sapien
tcaggtttgggaacgatttgggctc

SEQ ID NO: 1113533 - DNA, 25 bp, Homo sapien
gaagatgatcaattatagcgaagct

SEQ ID NO: 1113534 - DNA, 25 bp, Homo sapien
gccaggtagtcacacattcagcatg

SEQ ID NO: 1113535 - DNA, 25 bp, Homo sapien
caaggcccaaagtgttgactggaag

SEQ ID NO: 1113536 - DNA, 25 bp, Homo sapien
gggccacatctcaggcaagctttgc

SEQ ID NO: 1113537 - DNA, 25 bp, Homo sapien
gagatacatgccttattcatgtgtt

SEQ ID NO: 1113538 - DNA, 25 bp, Homo sapien
tgcccatcctacaaactattcctga

SEQ ID NO: 1113539 - DNA, 25 bp, Homo sapien
gacttaactaagtagagatacatgc

SEQ ID NO: 1113540 - DNA, 25 bp, Homo sapien
ggccttagccatgaacctagtgatg

SEQ ID NO: 1113541 - DNA, 25 bp, Homo sapien
cccagttttgccaatttacttgtga

SEQ ID NO: 1113542 - DNA, 25 bp, Homo sapien
tgtgaggaaacgagttgagggacta

SEQ ID NO: 1113543 - DNA, 25 bp, Homo sapien
tgagggactaggttccttgtccact

SEQ ID NO: 1113544 - DNA, 25 bp, Homo sapien
ccagttttgccaatttacttgtgag

SEQ ID NO: 1113545 - DNA, 25 bp, Homo sapien
gtacagtggagactgtcaagatcct

SEQ ID NO: 1113546 - DNA, 25 bp, Homo sapien
tttatgtaattgtacagtggagact

SEQ ID NO: 1113547 - DNA, 25 bp, Homo sapien
gtggagactgtcaagatcctctcac

SEQ ID NO: 1113548 - DNA, 25 bp, Homo sapien
aatttatgtaattgtacagtggaga

SEQ ID NO: 1113549 - DNA, 25 bp, Homo sapien
ctacattccagttgaagtagcaaag

SEQ ID NO: 1113550 - DNA, 25 bp, Homo sapien
gcgggctataattagacaaccataa

SEQ ID NO: 1113551 - DNA, 25 bp, Homo sapien
taggcctgcgggctataattagaca

SEQ ID NO: 1113552 - DNA, 25 bp, Homo sapien
ggtcctaatggggagaattcactgg

SEQ ID NO: 1113553 - DNA, 25 bp, Homo sapien
ctttccagcttttttgcacaacttt

SEQ ID NO: 1113554 - DNA, 25 bp, Homo sapien
gatcagtcatatcccacagtttatg

SEQ ID NO: 1113555 - DNA, 25 bp, Homo sapien
cacatgtagtactgtggatcagtca

SEQ ID NO: 1113556 - DNA, 25 bp, Homo sapien
tttttgcacaactttcctacacatg

SEQ ID NO: 1113557 - DNA, 25 bp, Homo sapien
cactggttattaagaaacatggacg

SEQ ID NO: 1113558 - DNA, 25 bp, Homo sapien
gcacacgatgcgcaacactggttat

SEQ ID NO: 1113559 - DNA, 25 bp, Homo sapien
tggacggatgagagggccctcctca

SEQ ID NO: 1113560 - DNA, 25 bp, Homo sapien
gcagctttagggtgaagcacagcac

SEQ ID NO: 1113561 - DNA, 25 bp, Homo sapien
gagctgacacaagttctccaaggta

SEQ ID NO: 1113562 - DNA, 25 bp, Homo sapien
tgtgaaccatggtcccagactggag

SEQ ID NO: 1113563 - DNA, 25 bp, Homo sapien
tgagtgcttcgtccacatgacacaa

SEQ ID NO: 1113564 - DNA, 25 bp, Homo sapien
gaatcatgagttccctgatatccac

SEQ ID NO: 1113565 - DNA, 25 bp, Homo sapien
ttctagatttccagcaactgggagt

SEQ ID NO: 1113566 - DNA, 25 bp, Homo sapien
cgattctagatttccagcaactggg

SEQ ID NO: 1113567 - DNA, 25 bp, Homo sapien
attctagatttccagcaactgggag

SEQ ID NO: 1113568 - DNA, 25 bp, Homo sapien
gattctagatttccagcaactggga

SEQ ID NO: 1113569 - DNA, 25 bp, Homo sapien
gcatcgtgctgagctagtgtctgcc

SEQ ID NO: 1113570 - DNA, 25 bp, Homo sapien
taattaaggcacgtgaactctcctg

SEQ ID NO: 1113571 - DNA, 25 bp, Homo sapien
gaacattaacttgctcagcatcgtg

SEQ ID NO: 1113572 - DNA, 25 bp, Homo sapien
agaaaagtcgttgcgcaagaagtgg

SEQ ID NO: 1113573 - DNA, 25 bp, Homo sapien
tgcgggtacagtgtggcacaataaa

SEQ ID NO: 1113574 - DNA, 25 bp, Homo sapien
ctgcgggtacagtgtggcacaataa

SEQ ID NO: 1113575 - DNA, 25 bp, Homo sapien
gggtacagtgtggcacaataaagac

SEQ ID NO: 1113576 - DNA, 25 bp, Homo sapien
cgggtacagtgtggcacaataaaga

SEQ ID NO: 1113577 - DNA, 25 bp, Homo sapien
tctgaaagattgtatagtctggttc

SEQ ID NO: 1113578 - DNA, 25 bp, Homo sapien
tgtatagtctggttcatcattagat

SEQ ID NO: 1113579 - DNA, 25 bp, Homo sapien
ggtcgagtctctggtaaattctgaa

SEQ ID NO: 1113580 - DNA, 25 bp, Homo sapien
cataaacttgtgtttcgagctagtt

SEQ ID NO: 1113581 - DNA, 25 bp, Homo sapien
cacttcctttgatcgtactcaccat

SEQ ID NO: 1113582 - DNA, 25 bp, Homo sapien
tggagggaaaatgtcgacaatgata

SEQ ID NO: 1113583 - DNA, 25 bp, Homo sapien
gagggaaaatgtcgacaatgatatc

SEQ ID NO: 1113584 - DNA, 25 bp, Homo sapien
tttcctcacttcctttgatcgtact

SEQ ID NO: 1113585 - DNA, 25 bp, Homo sapien
ccctaaagttttggtcctgagtgct

SEQ ID NO: 1113586 - DNA, 25 bp, Homo sapien
tgagtttctcaagaaggcccctaaa

SEQ ID NO: 1113587 - DNA, 25 bp, Homo sapien
ctacttaatgagatgcagtgataca

SEQ ID NO: 1113588 - DNA, 25 bp, Homo sapien
tggtcctgagtgctgaaaaagaatc

SEQ ID NO: 1113589 - DNA, 25 bp, Homo sapien
gacctggccctcaattctgtctgta

SEQ ID NO: 1113590 - DNA, 25 bp, Homo sapien
caattctgtctgtactacccattca

SEQ ID NO: 1113591 - DNA, 25 bp, Homo sapien
ttttctgacctggccctcaattctg

SEQ ID NO: 1113592 - DNA, 25 bp, Homo sapien
gtctgtactacccattcacatagca

SEQ ID NO: 1113593 - DNA, 25 bp, Homo sapien
tgatgttatatgggattccacatct

SEQ ID NO: 1113594 - DNA, 25 bp, Homo sapien
ttagtttgatgttatatgggattcc

SEQ ID NO: 1113595 - DNA, 25 bp, Homo sapien
ttccacatttatcatgccaataaaa

SEQ ID NO: 1113596 - DNA, 25 bp, Homo sapien
tttccacatttatcatgccaataaa

SEQ ID NO: 1113597 - DNA, 25 bp, Homo sapien
gatttgcaaactttccaaagagagt

SEQ ID NO: 1113598 - DNA, 25 bp, Homo sapien
tggggatttgcaaactttccaaaga

SEQ ID NO: 1113599 - DNA, 25 bp, Homo sapien
tttgcaaactttccaaagagagtgc

SEQ ID NO: 1113600 - DNA, 25 bp, Homo sapien
tgcaaactttccaaagagagtgcat

SEQ ID NO: 1113601 - DNA, 25 bp, Homo sapien
gtcgctgtctagcaagatgccatgt

SEQ ID NO: 1113602 - DNA, 25 bp, Homo sapien
acattccttcctccggtgaaggaga

SEQ ID NO: 1113603 - DNA, 25 bp, Homo sapien
tgttggatcccccaagtgtcgctgt

SEQ ID NO: 1113604 - DNA, 25 bp, Homo sapien
gaaggagaatggcacgcacaccagg

SEQ ID NO: 1113605 - DNA, 25 bp, Homo sapien
gggtctgcctgctgtgaagtcagtg

SEQ ID NO: 1113606 - DNA, 25 bp, Homo sapien
tcagtggccgttctctgtgggactg

SEQ ID NO: 1113607 - DNA, 25 bp, Homo sapien
cctgctgtgaagtcagtggccgttc

SEQ ID NO: 1113608 - DNA, 25 bp, Homo sapien
ctgtgggactgaagtcagcagatcc

SEQ ID NO: 1113609 - DNA, 25 bp, Homo sapien
accccagacagctccggtgatttat

SEQ ID NO: 1113610 - DNA, 25 bp, Homo sapien
agacagctccggtgatttatctgag

SEQ ID NO: 1113611 - DNA, 25 bp, Homo sapien
cagtagctggctgacccttgctctc

SEQ ID NO: 1113612 - DNA, 25 bp, Homo sapien
ccagacagctccggtgatttatctg

SEQ ID NO: 1113613 - DNA, 25 bp, Homo sapien
caccagcggtttgtatttagcctga

SEQ ID NO: 1113614 - DNA, 25 bp, Homo sapien
cattagcgagttcatctgatgggcc

SEQ ID NO: 1113615 - DNA, 25 bp, Homo sapien
tttagcctgagaaatagcattagcg

SEQ ID NO: 1113616 - DNA, 25 bp, Homo sapien
tgatgggcccgataggcttagctgt

SEQ ID NO: 1113617 - DNA, 25 bp, Homo sapien
ctctgattttcctgtctctgcccca

SEQ ID NO: 1113618 - DNA, 25 bp, Homo sapien
ctggctcagcccaagtcctctgatt

SEQ ID NO: 1113619 - DNA, 25 bp, Homo sapien
tctgattttcctgtctctgccccat

SEQ ID NO: 1113620 - DNA, 25 bp, Homo sapien
gtcctctgattttcctgtctctgcc

SEQ ID NO: 1113621 - DNA, 25 bp, Homo sapien
cagccctaagtatgtctccaaaagg

SEQ ID NO: 1113622 - DNA, 25 bp, Homo sapien
tctgtggcaaagcacaagctgcaac

SEQ ID NO: 1113623 - DNA, 25 bp, Homo sapien
gctttatctcatgtaatcgccaagg

SEQ ID NO: 1113624 - DNA, 25 bp, Homo sapien
gctgcaactctaatgctcagtaaga

SEQ ID NO: 1113625 - DNA, 25 bp, Homo sapien
ttgagtaccaagagaaaatgtaaaa

SEQ ID NO: 1113626 - DNA, 25 bp, Homo sapien
cttgagtaccaagagaaaatgtaaa

SEQ ID NO: 1113627 - DNA, 25 bp, Homo sapien
gaatgaaagtttcatggaattcctg

SEQ ID NO: 1113628 - DNA, 25 bp, Homo sapien
gcttgaatgaaagtttcatggaatt

SEQ ID NO: 1113629 - DNA, 25 bp, Homo sapien
ttgaatgaaagtttcatggaattcc

SEQ ID NO: 1113630 - DNA, 25 bp, Homo sapien
tgaatgaaagtttcatggaattcct

SEQ ID NO: 1113631 - DNA, 25 bp, Homo sapien
gataaattagctctcgttcagcagc

SEQ ID NO: 1113632 - DNA, 25 bp, Homo sapien
taattcattccaggtatggctctct

SEQ ID NO: 1113633 - DNA, 25 bp, Homo sapien
gatgcatgggacactggatggatcc

SEQ ID NO: 1113634 - DNA, 25 bp, Homo sapien
cccacctagagagggccttttggca

SEQ ID NO: 1113635 - DNA, 25 bp, Homo sapien
ttctatagccattggaaactgcaca

SEQ ID NO: 1113636 - DNA, 25 bp, Homo sapien
ctctgatgttggtcttcaatgtaac

SEQ ID NO: 1113637 - DNA, 25 bp, Homo sapien
caatgtaactcataagccccaagaa

SEQ ID NO: 1113638 - DNA, 25 bp, Homo sapien
ctgagtccttcccttgcaaatatgg

SEQ ID NO: 1113639 - DNA, 25 bp, Homo sapien
tttctatacaaatccatgaacgagg

SEQ ID NO: 1113640 - DNA, 25 bp, Homo sapien
taagatcattaaaagccccattctc

SEQ ID NO: 1113641 - DNA, 25 bp, Homo sapien
ggtatgcaaatggattttctataca

SEQ ID NO: 1113642 - DNA, 25 bp, Homo sapien
tgaacgagggtaagatttggcttgt

SEQ ID NO: 1113643 - DNA, 25 bp, Homo sapien
caaaccatagcatactcgatcaatg

SEQ ID NO: 1113644 - DNA, 25 bp, Homo sapien
gggcatcccgatccaaaccatagca

SEQ ID NO: 1113645 - DNA, 25 bp, Homo sapien
actgttggggcatcccgatccaaac

SEQ ID NO: 1113646 - DNA, 25 bp, Homo sapien
catactcgatcaatgcctgaaattc

SEQ ID NO: 1113647 - DNA, 25 bp, Homo sapien
gatgcaactcggtgcctgttctcct

SEQ ID NO: 1113648 - DNA, 25 bp, Homo sapien
gttctcctgcatgggtaagattccc

SEQ ID NO: 1113649 - DNA, 25 bp, Homo sapien
ggctgatgcaactcggtgcctgttc

SEQ ID NO: 1113650 - DNA, 25 bp, Homo sapien
tgctgccgtctaggctgaagtttgt

SEQ ID NO: 1113651 - DNA, 25 bp, Homo sapien
tggcactgggtaatgtattaatatg

SEQ ID NO: 1113652 - DNA, 25 bp, Homo sapien
aatatgtaaccttgtggaattgagg

SEQ ID NO: 1113653 - DNA, 25 bp, Homo sapien
tcctagcccgcagtatctcagtttt

SEQ ID NO: 1113654 - DNA, 25 bp, Homo sapien
gaactcctgttggtccttgggctgg

SEQ ID NO: 1113655 - DNA, 25 bp, Homo sapien
gacctttgcataattgtgctccttg

SEQ ID NO: 1113656 - DNA, 25 bp, Homo sapien
tctcgctgcaaatatccttgaacat

SEQ ID NO: 1113657 - DNA, 25 bp, Homo sapien
gtgctccttgagtgctcttctctcg

SEQ ID NO: 1113658 - DNA, 25 bp, Homo sapien
cagaatgaacccacatgcattttga

SEQ ID NO: 1113659 - DNA, 25 bp, Homo sapien
gaatcagcagctcgggtcagaaaag

SEQ ID NO: 1113660 - DNA, 25 bp, Homo sapien
ttccagatgtcagatatatggttga

SEQ ID NO: 1113661 - DNA, 25 bp, Homo sapien
tgaaacctgttggaatagatccctt

SEQ ID NO: 1113662 - DNA, 25 bp, Homo sapien
ctcgggtcagaaaagcattccagat

SEQ ID NO: 1113663 - DNA, 25 bp, Homo sapien
gccatgtcctactgtcagcttgcca

SEQ ID NO: 1113664 - DNA, 25 bp, Homo sapien
tgtgacctcgaattgtcagctccac

SEQ ID NO: 1113665 - DNA, 25 bp, Homo sapien
ttagctcaaacagccatgtcctact

SEQ ID NO: 1113666 - DNA, 25 bp, Homo sapien
tgccattgacgacccagtgtgacct

SEQ ID NO: 1113667 - DNA, 25 bp, Homo sapien
gtccaaccaacccagagtccaaagc

SEQ ID NO: 1113668 - DNA, 25 bp, Homo sapien
accaacccagagtccaaagcagaac

SEQ ID NO: 1113669 - DNA, 25 bp, Homo sapien
tccaaagcagaacttgccccaacag

SEQ ID NO: 1113670 - DNA, 25 bp, Homo sapien
gaaacctgtagccacgtccaaccaa

SEQ ID NO: 1113671 - DNA, 25 bp, Homo sapien
ctgggggcaaaaactgaccttggat

SEQ ID NO: 1113672 - DNA, 25 bp, Homo sapien
aggtctgcatacactggggaacttc

SEQ ID NO: 1113673 - DNA, 25 bp, Homo sapien
ctgggatgctggcattggtcttttc

SEQ ID NO: 1113674 - DNA, 25 bp, Homo sapien
cctccatcaggtctgcatacactgg

SEQ ID NO: 1113675 - DNA, 25 bp, Homo sapien
actggggaacttccggtgactgctg

SEQ ID NO: 1113676 - DNA, 25 bp, Homo sapien
aggcatattgagcaaagggacatgt

SEQ ID NO: 1113677 - DNA, 25 bp, Homo sapien
tcccaaggcatattgagcaaaggga

SEQ ID NO: 1113678 - DNA, 25 bp, Homo sapien
caaggcatattgagcaaagggacat

SEQ ID NO: 1113679 - DNA, 25 bp, Homo sapien
ccaaggcatattgagcaaagggaca

SEQ ID NO: 1113680 - DNA, 25 bp, Homo sapien
cacgtcttgttcattgcctgtcttg

SEQ ID NO: 1113681 - DNA, 25 bp, Homo sapien
cttgctcattgccacgtcttgttca

SEQ ID NO: 1113682 - DNA, 25 bp, Homo sapien
ttgttcattgccacgtctctcttat

SEQ ID NO: 1113683 - DNA, 25 bp, Homo sapien
gccacgtctctcttatttagctcag

SEQ ID NO: 1113684 - DNA, 25 bp, Homo sapien
ctgaatctcatgagcctctagaggg

SEQ ID NO: 1113685 - DNA, 25 bp, Homo sapien
aggcaccagggagcctccagattgc

SEQ ID NO: 1113686 - DNA, 25 bp, Homo sapien
tccaggagacaatctctgaaattcc

SEQ ID NO: 1113687 - DNA, 25 bp, Homo sapien
gcagcaatttccagagccaaggacc

SEQ ID NO: 1113688 - DNA, 25 bp, Homo sapien
tgggggactcccctagatgaggcag

SEQ ID NO: 1113689 - DNA, 25 bp, Homo sapien
ctgggggactcccctagatgaggca

SEQ ID NO: 1113690 - DNA, 25 bp, Homo sapien
cctgggggactcccctagatgaggc

SEQ ID NO: 1113691 - DNA, 25 bp, Homo sapien
ggagcttatttatgagggctgctga

SEQ ID NO: 1113692 - DNA, 25 bp, Homo sapien
gatggtttaattgtaactggctaag

SEQ ID NO: 1113693 - DNA, 25 bp, Homo sapien
aaattgctagtcagtgtttcacagc

SEQ ID NO: 1113694 - DNA, 25 bp, Homo sapien
gcctgattccagtttaaattgctag

SEQ ID NO: 1113695 - DNA, 25 bp, Homo sapien
cttatacacccgaaacaaacaagtg

SEQ ID NO: 1113696 - DNA, 25 bp, Homo sapien
gcatctggagtcttcatggaagtga

SEQ ID NO: 1113697 - DNA, 25 bp, Homo sapien
gtgagaagtttgcaggtttgcagct

SEQ ID NO: 1113698 - DNA, 25 bp, Homo sapien
tggcggcatgcaaagctctaaggtg

SEQ ID NO: 1113699 - DNA, 25 bp, Homo sapien
tggggagccaagctgaaacctctct

SEQ ID NO: 1113700 - DNA, 25 bp, Homo sapien
tttgtacatctgcttaaactgtctc

SEQ ID NO: 1113701 - DNA, 25 bp, Homo sapien
ctaaaatgtgcactcttgccatcag

SEQ ID NO: 1113702 - DNA, 25 bp, Homo sapien
gccattgccttgttgaactgattca

SEQ ID NO: 1113703 - DNA, 25 bp, Homo sapien
ctgggctctggaagaagcaaagttc

SEQ ID NO: 1113704 - DNA, 25 bp, Homo sapien
ttaacggtgtcagtatgagagagac

SEQ ID NO: 1113705 - DNA, 25 bp, Homo sapien
tttccagtgatgagaagtgctgtct

SEQ ID NO: 1113706 - DNA, 25 bp, Homo sapien
taaacttttatagtgccagtctgct

SEQ ID NO: 1113707 - DNA, 25 bp, Homo sapien
gatgacaccgctgctagctgtcgtt

SEQ ID NO: 1113708 - DNA, 25 bp, Homo sapien
tgctggcaggtctaggaaatccttg

SEQ ID NO: 1113709 - DNA, 25 bp, Homo sapien
tacttgggctattcctctccttacc

SEQ ID NO: 1113710 - DNA, 25 bp, Homo sapien
ggtcttatacttgggctattcctct

SEQ ID NO: 1113711 - DNA, 25 bp, Homo sapien
gttgtgcttgggtcttatacttggg

SEQ ID NO: 1113712 - DNA, 25 bp, Homo sapien
ctgcctactgaagccagctgcattt

SEQ ID NO: 1113713 - DNA, 25 bp, Homo sapien
ccagtgtggactacagaagacaagt

SEQ ID NO: 1113714 - DNA, 25 bp, Homo sapien
gcctgttgcaagtactgtcagttca

SEQ ID NO: 1113715 - DNA, 25 bp, Homo sapien
tcaagactgtacaagggaaagccat

SEQ ID NO: 1113716 - DNA, 25 bp, Homo sapien
aaatcggaatttgatcctcttttca

SEQ ID NO: 1113717 - DNA, 25 bp, Homo sapien
ggacctgcaggatctaagataaaaa

SEQ ID NO: 1113718 - DNA, 25 bp, Homo sapien
cctgaggcatgtcattaaaatcgga

SEQ ID NO: 1113719 - DNA, 25 bp, Homo sapien
atggcagttgtcctgagggcaccct

SEQ ID NO: 1113720 - DNA, 25 bp, Homo sapien
gattgagtaatgacaatagttcagt

SEQ ID NO: 1113721 - DNA, 25 bp, Homo sapien
ttcagtaggaaagcgtacagaaaga

SEQ ID NO: 1113722 - DNA, 25 bp, Homo sapien
aaaataatgccccagagcacatcag

SEQ ID NO: 1113723 - DNA, 25 bp, Homo sapien
ccagagcacatcagtagtaaaagta

SEQ ID NO: 1113724 - DNA, 25 bp, Homo sapien
cgtgcaacatcttggtgtgaaaaca

SEQ ID NO: 1113725 - DNA, 25 bp, Homo sapien
taggaaaaacagctaaacgtgcaac

SEQ ID NO: 1113726 - DNA, 25 bp, Homo sapien
ttctcttctataggaaaaacagcta

SEQ ID NO: 1113727 - DNA, 25 bp, Homo sapien
aacagctaaacgtgcaacatcttgg

SEQ ID NO: 1113728 - DNA, 25 bp, Homo sapien
gttgccacgggaatcaaataagata

SEQ ID NO: 1113729 - DNA, 25 bp, Homo sapien
tctaccttattaagttgccacggga

SEQ ID NO: 1113730 - DNA, 25 bp, Homo sapien
aatgtagatgatgatgcttactctc

SEQ ID NO: 1113731 - DNA, 25 bp, Homo sapien
ataggtctgaaagtgcgctctaaac

SEQ ID NO: 1113732 - DNA, 25 bp, Homo sapien
taaacatttgccgtattctatcttg

SEQ ID NO: 1113733 - DNA, 25 bp, Homo sapien
cttcagagtagaaacagtatggtcc

SEQ ID NO: 1113734 - DNA, 25 bp, Homo sapien
aatctccatctccataaagcctaac

SEQ ID NO: 1113735 - DNA, 25 bp, Homo sapien
acaccttctatgttgatttccaaat

SEQ ID NO: 1113736 - DNA, 25 bp, Homo sapien
ctccataaatggtttttggcaactg

SEQ ID NO: 1113737 - DNA, 25 bp, Homo sapien
tggtctcacttcaataagaatctga

SEQ ID NO: 1113738 - DNA, 25 bp, Homo sapien
cataaatggtttttggcaactgcat

SEQ ID NO: 1113739 - DNA, 25 bp, Homo sapien
catggaccattcttgacttgctgct

SEQ ID NO: 1113740 - DNA, 25 bp, Homo sapien
tcttttattagacagccaccagcaa

SEQ ID NO: 1113741 - DNA, 25 bp, Homo sapien
atcttttattagacagccaccagca

SEQ ID NO: 1113742 - DNA, 25 bp, Homo sapien
gcaaatacacaggtgatccctgtaa

SEQ ID NO: 1113743 - DNA, 25 bp, Homo sapien
tacaacagccggtattcaacatttg

SEQ ID NO: 1113744 - DNA, 25 bp, Homo sapien
catatggtgcctaatgatttcttca

SEQ ID NO: 1113745 - DNA, 25 bp, Homo sapien
aatcaagatgttgggttccagaagc

SEQ ID NO: 1113746 - DNA, 25 bp, Homo sapien
gaagcccatatgctaattcacagat

SEQ ID NO: 1113747 - DNA, 25 bp, Homo sapien
aatgactacataatactatctctag

SEQ ID NO: 1113748 - DNA, 25 bp, Homo sapien
tgtatctggccatataactattgat

SEQ ID NO: 1113749 - DNA, 25 bp, Homo sapien
tatctctagagaggcaccatgtttt

SEQ ID NO: 1113750 - DNA, 25 bp, Homo sapien
actgtatctggccatataactattg

SEQ ID NO: 1113751 - DNA, 25 bp, Homo sapien
actgcagccttcaaatcctgggctc

SEQ ID NO: 1113752 - DNA, 25 bp, Homo sapien
gcagccttcaaatcctgggctcaag

SEQ ID NO: 1113753 - DNA, 25 bp, Homo sapien
ctgggctcaagcaatacccccatct

SEQ ID NO: 1113754 - DNA, 25 bp, Homo sapien
agccttcaaatcctgggctcaagca

SEQ ID NO: 1113755 - DNA, 25 bp, Homo sapien
tatttttatatcagggtagttgaaa

SEQ ID NO: 1113756 - DNA, 25 bp, Homo sapien
ttttatatcagggtagttgaaacaa

SEQ ID NO: 1113757 - DNA, 25 bp, Homo sapien
tatcagggtagttgaaacaatttaa

SEQ ID NO: 1113758 - DNA, 25 bp, Homo sapien
tatatcagggtagttgaaacaattt

SEQ ID NO: 1113759 - DNA, 25 bp, Homo sapien
ctctgtcactttcagcaaaagccat

SEQ ID NO: 1113760 - DNA, 25 bp, Homo sapien
cttttggatctctaggccactgtgg

SEQ ID NO: 1113761 - DNA, 25 bp, Homo sapien
ggcttgaaccatctggccaggatgc

SEQ ID NO: 1113762 - DNA, 25 bp, Homo sapien
tttggatctctaggccactgtggga

SEQ ID NO: 1113763 - DNA, 25 bp, Homo sapien
ttcttttggatctctaggccactgt

SEQ ID NO: 1113764 - DNA, 25 bp, Homo sapien
ccaaatgcagaaacgcgaccaaaag

SEQ ID NO: 1113765 - DNA, 25 bp, Homo sapien
cagtgcaagtggtgcagttgacttt

SEQ ID NO: 1113766 - DNA, 25 bp, Homo sapien
gaaacgcgaccaaaagatcttcaaa

SEQ ID NO: 1113767 - DNA, 25 bp, Homo sapien
gtgcaagtggtgcagttgactttca

SEQ ID NO: 1113768 - DNA, 25 bp, Homo sapien
tgaagcctctatgcctaaaaaagcg

SEQ ID NO: 1113769 - DNA, 25 bp, Homo sapien
gacctcgtcataaagggatgtatcg

SEQ ID NO: 1113770 - DNA, 25 bp, Homo sapien
gcatcaagttcagtttgtctgctga

SEQ ID NO: 1113771 - DNA, 25 bp, Homo sapien
tggtggtgtgattttgcctcagcaa

SEQ ID NO: 1113772 - DNA, 25 bp, Homo sapien
cagtttctcggccactcatttgcat

SEQ ID NO: 1113773 - DNA, 25 bp, Homo sapien
tgaaagttatttcaagaagtggccc

SEQ ID NO: 1113774 - DNA, 25 bp, Homo sapien
tcacagcctgaagaattggcaacct

SEQ ID NO: 1113775 - DNA, 25 bp, Homo sapien
aataagaatgcccatcactaggaga

SEQ ID NO: 1113776 - DNA, 25 bp, Homo sapien
gaagcaattatctatttgtaagaaa

SEQ ID NO: 1113777 - DNA, 25 bp, Homo sapien
gaagtgtaggtaagttgctaattta

SEQ ID NO: 1113778 - DNA, 25 bp, Homo sapien
gagagtacgatattaataatacagg

SEQ ID NO: 1113779 - DNA, 25 bp, Homo sapien
ttccactaagtggtactgaagcaat

SEQ ID NO: 1113780 - DNA, 25 bp, Homo sapien
gttttgttgctatccagttgtattg

SEQ ID NO: 1113781 - DNA, 25 bp, Homo sapien
ttactcacctgaatagcctgttttg

SEQ ID NO: 1113782 - DNA, 25 bp, Homo sapien
tccagttgtattggctctttgcatg

SEQ ID NO: 1113783 - DNA, 25 bp, Homo sapien
ctcacctgaatagcctgttttgttg

SEQ ID NO: 1113784 - DNA, 25 bp, Homo sapien
ggagctgctgcgttcgtgcaaatga

SEQ ID NO: 1113785 - DNA, 25 bp, Homo sapien
cacatcgtggtataagcctccgcga

SEQ ID NO: 1113786 - DNA, 25 bp, Homo sapien
gattcagcaccattcgtgccctgag

SEQ ID NO: 1113787 - DNA, 25 bp, Homo sapien
aattccgtcgttttcccacatcgtg

SEQ ID NO: 1113788 - DNA, 25 bp, Homo sapien
gccgtggctgccacgggcggtgggc

SEQ ID NO: 1113789 - DNA, 25 bp, Homo sapien
tcgagcaccggagtcccgagccgtg

SEQ ID NO: 1113790 - DNA, 25 bp, Homo sapien
cggaggagagcaccggaccaccagt

SEQ ID NO: 1113791 - DNA, 25 bp, Homo sapien
ggcagcgacagctgttccaggcact

SEQ ID NO: 1113792 - DNA, 25 bp, Homo sapien
cagcaggcgaatggtctggcccgtc

SEQ ID NO: 1113793 - DNA, 25 bp, Homo sapien
tggtctggcccgtcggtagccgcca

SEQ ID NO: 1113794 - DNA, 25 bp, Homo sapien
ccggccgcagcaggcgaatggtctg

SEQ ID NO: 1113795 - DNA, 25 bp, Homo sapien
atggtctggcccgtcggtagccgcc

SEQ ID NO: 1113796 - DNA, 25 bp, Homo sapien
tgtctgtggtcagataggcaggtgg

SEQ ID NO: 1113797 - DNA, 25 bp, Homo sapien
tcagataggcaggtggatcgggcgc

SEQ ID NO: 1113798 - DNA, 25 bp, Homo sapien
tgtggtcagataggcaggtggatcg

SEQ ID NO: 1113799 - DNA, 25 bp, Homo sapien
ctgttttgtgggaagatgtctgtgg

SEQ ID NO: 1113800 - DNA, 25 bp, Homo sapien
tcaccatgctctgaaatgaacctgt

SEQ ID NO: 1113801 - DNA, 25 bp, Homo sapien
tacaactgccgtggttcaacatttg

SEQ ID NO: 1113802 - DNA, 25 bp, Homo sapien
aactctaggtcagagctgtccctca

SEQ ID NO: 1113803 - DNA, 25 bp, Homo sapien
catttgcttagcaggaactctaggt

SEQ ID NO: 1113804 - DNA, 25 bp, Homo sapien
gcaggctcaaaaccatttgaggact

SEQ ID NO: 1113805 - DNA, 25 bp, Homo sapien
agcaggctcaaaaccatttgaggac

SEQ ID NO: 1113806 - DNA, 25 bp, Homo sapien
cacagcaggctcaaaaccatttgag

SEQ ID NO: 1113807 - DNA, 25 bp, Homo sapien
ttacacagcaggctcaaaaccattt

SEQ ID NO: 1113808 - DNA, 25 bp, Homo sapien
ttaaatataaatggactaaattctg

SEQ ID NO: 1113809 - DNA, 25 bp, Homo sapien
tataaatggactaaattctgcaatt

SEQ ID NO: 1113810 - DNA, 25 bp, Homo sapien
aatataaatggactaaattctgcaa

SEQ ID NO: 1113811 - DNA, 25 bp, Homo sapien
taaatataaatggactaaattctgc

SEQ ID NO: 1113812 - DNA, 25 bp, Homo sapien
gataggcactcagtaactataactg

SEQ ID NO: 1113813 - DNA, 25 bp, Homo sapien
gaaaagctttgagcattttagtcag

SEQ ID NO: 1113814 - DNA, 25 bp, Homo sapien
taacttttgttatgtgataggcact

SEQ ID NO: 1113815 - DNA, 25 bp, Homo sapien
tggtttggccagtatctacgacgaa

SEQ ID NO: 1113816 - DNA, 25 bp, Homo sapien
tgacctagtgccaaagtggaattat

SEQ ID NO: 1113817 - DNA, 25 bp, Homo sapien
aacaattgactctggttgagtaacc

SEQ ID NO: 1113818 - DNA, 25 bp, Homo sapien
aaagataccacattaaataccaggc

SEQ ID NO: 1113819 - DNA, 25 bp, Homo sapien
tcttgttgggcgtaattctaatcct

SEQ ID NO: 1113820 - DNA, 25 bp, Homo sapien
cattgtatttagcaacttctgtgta

SEQ ID NO: 1113821 - DNA, 25 bp, Homo sapien
ttcaaaatagactgtaacttcccaa

SEQ ID NO: 1113822 - DNA, 25 bp, Homo sapien
tgtggcactctagcatttttgttgt

SEQ ID NO: 1113823 - DNA, 25 bp, Homo sapien
gcatgttccattgaactttgctctg

SEQ ID NO: 1113824 - DNA, 25 bp, Homo sapien
ggtattcgctcagcccaccacgttg

SEQ ID NO: 1113825 - DNA, 25 bp, Homo sapien
ggttcgagcttttcgttctctcgca

SEQ ID NO: 1113826 - DNA, 25 bp, Homo sapien
ctggtccctaggcacggtcgtggtt

SEQ ID NO: 1113827 - DNA, 25 bp, Homo sapien
ttctctcgcacattgaggtattcgc

SEQ ID NO: 1113828 - DNA, 25 bp, Homo sapien
ggagccgcaccgtcgggttggagat

SEQ ID NO: 1113829 - DNA, 25 bp, Homo sapien
ccgtcgggttggagatcgcgcgcaa

SEQ ID NO: 1113830 - DNA, 25 bp, Homo sapien
ccgcaccgtcgggttggagatcgcg

SEQ ID NO: 1113831 - DNA, 25 bp, Homo sapien
caccgtcgggttggagatcgcgcgc

SEQ ID NO: 1113832 - DNA, 25 bp, Homo sapien
gaatactgttcagcggctcgggtgg

SEQ ID NO: 1113833 - DNA, 25 bp, Homo sapien
tggagtgcagtcgcggaatactgtt

SEQ ID NO: 1113834 - DNA, 25 bp, Homo sapien
ttttccttgcgtcccgccacgcggc

SEQ ID NO: 1113835 - DNA, 25 bp, Homo sapien
tgttcagcggctcgggtggttttcc

SEQ ID NO: 1113836 - DNA, 25 bp, Homo sapien
agtctgggacaactcccgcgtctgc

SEQ ID NO: 1113837 - DNA, 25 bp, Homo sapien
tgcgcctagcgctggcgccaggagt

SEQ ID NO: 1113838 - DNA, 25 bp, Homo sapien
cccgtcagagcggtgagtgcgccta

SEQ ID NO: 1113839 - DNA, 25 bp, Homo sapien
aggaaagggctccagcgaactcctt

SEQ ID NO: 1113840 - DNA, 25 bp, Homo sapien
tcttggcggtcgccgcgttccccat

SEQ ID NO: 1113841 - DNA, 25 bp, Homo sapien
ttcttggcggtcgccgcgttcccca

SEQ ID NO: 1113842 - DNA, 25 bp, Homo sapien
gcctttcttggcggtcgccgcgttc

SEQ ID NO: 1113843 - DNA, 25 bp, Homo sapien
tgcctttcttggcggtcgccgcgtt

SEQ ID NO: 1113844 - DNA, 25 bp, Homo sapien
cggcctcagaagctgcgacccggag

SEQ ID NO: 1113845 - DNA, 25 bp, Homo sapien
gcggatacccagacccggccttcaa

SEQ ID NO: 1113846 - DNA, 25 bp, Homo sapien
cccagaacgactcccggcggccgct

SEQ ID NO: 1113847 - DNA, 25 bp, Homo sapien
cggccgctgctaggcctggcccgtg

SEQ ID NO: 1113848 - DNA, 25 bp, Homo sapien
tgttccagaacgtgtgcaagtcctc

SEQ ID NO: 1113849 - DNA, 25 bp, Homo sapien
cctcctcgctagagtgagaaaggga

SEQ ID NO: 1113850 - DNA, 25 bp, Homo sapien
gaatcccagggaacgctcttcccag

SEQ ID NO: 1113851 - DNA, 25 bp, Homo sapien
gggatggcactagggacttctttcc

SEQ ID NO: 1113852 - DNA, 25 bp, Homo sapien
aattagcctaattcttatgttacaa

SEQ ID NO: 1113853 - DNA, 25 bp, Homo sapien
ccaaaaccttactgatgaaacataa

SEQ ID NO: 1113854 - DNA, 25 bp, Homo sapien
taaatctccgtataacatgctgtgt

SEQ ID NO: 1113855 - DNA, 25 bp, Homo sapien
tcttggcttatataatagctcatca

SEQ ID NO: 1113856 - DNA, 25 bp, Homo sapien
gctgactaacatacttaagaactag

SEQ ID NO: 1113857 - DNA, 25 bp, Homo sapien
tacaggtcagcacttgctaatgaaa

SEQ ID NO: 1113858 - DNA, 25 bp, Homo sapien
tacctgataacactgctccaaatga

SEQ ID NO: 1113859 - DNA, 25 bp, Homo sapien
tattccaaggttatttcacagctat

SEQ ID NO: 1113860 - DNA, 25 bp, Homo sapien
tggtggtgtatatggtctgggctga

SEQ ID NO: 1113861 - DNA, 25 bp, Homo sapien
tgagaggtggccaccgatcctgaga

SEQ ID NO: 1113862 - DNA, 25 bp, Homo sapien
tccagaagtgagaggtggccaccga

SEQ ID NO: 1113863 - DNA, 25 bp, Homo sapien
taatggtcattgaggagatgctggt

SEQ ID NO: 1113864 - DNA, 25 bp, Homo sapien
tttcctatgctgcttgaccaccatc

SEQ ID NO: 1113865 - DNA, 25 bp, Homo sapien
agcactttcctatgctgcttgacca

SEQ ID NO: 1113866 - DNA, 25 bp, Homo sapien
tcagcactttcctatgctgcttgac

SEQ ID NO: 1113867 - DNA, 25 bp, Homo sapien
gccatcagcactttcctatgctgct

SEQ ID NO: 1113868 - DNA, 25 bp, Homo sapien
aatggaaactctcctacactgctac

SEQ ID NO: 1113869 - DNA, 25 bp, Homo sapien
acttagactaagttacagcaccagg

SEQ ID NO: 1113870 - DNA, 25 bp, Homo sapien
tacctgtcaataccaaggatggtga

SEQ ID NO: 1113871 - DNA, 25 bp, Homo sapien
tctcctgctattggacgtcagtgct

SEQ ID NO: 1113872 - DNA, 25 bp, Homo sapien
gcctttcagtctaaataaaggtctg

SEQ ID NO: 1113873 - DNA, 25 bp, Homo sapien
ttattatgtaaatcactgctccctg

SEQ ID NO: 1113874 - DNA, 25 bp, Homo sapien
ctttaaattatctgaggtcatagca

SEQ ID NO: 1113875 - DNA, 25 bp, Homo sapien
cacaggaatctagagaattctctaa

SEQ ID NO: 1113876 - DNA, 25 bp, Homo sapien
tcaccaattgttgccactgtatagc

SEQ ID NO: 1113877 - DNA, 25 bp, Homo sapien
gaggagtgtttttagctctcttggc

SEQ ID NO: 1113878 - DNA, 25 bp, Homo sapien
tatttttctagaagtgcacattgct

SEQ ID NO: 1113879 - DNA, 25 bp, Homo sapien
tatgtgatactacgtgacttgttca

SEQ ID NO: 1113880 - DNA, 25 bp, Homo sapien
tgctaatggagtggcaccaggcatt

SEQ ID NO: 1113881 - DNA, 25 bp, Homo sapien
tgttcacaaggacacatgcttttgt

SEQ ID NO: 1113882 - DNA, 25 bp, Homo sapien
taccctgggagagattctagcattg

SEQ ID NO: 1113883 - DNA, 25 bp, Homo sapien
ctctcaagtgcaggcaacccttcta

SEQ ID NO: 1113884 - DNA, 25 bp, Homo sapien
tctgcattcctggtacctatcacag

SEQ ID NO: 1113885 - DNA, 25 bp, Homo sapien
tggaaaaatactagtaaacgtcaca

SEQ ID NO: 1113886 - DNA, 25 bp, Homo sapien
ggcagattagccatatgattcttct

SEQ ID NO: 1113887 - DNA, 25 bp, Homo sapien
gacactatgacttaatatatggcag

SEQ ID NO: 1113888 - DNA, 25 bp, Homo sapien
caatattataagctacggagtcagc

SEQ ID NO: 1113889 - DNA, 25 bp, Homo sapien
cacaatattataagctacggagtca

SEQ ID NO: 1113890 - DNA, 25 bp, Homo sapien
atattataagctacggagtcagcca

SEQ ID NO: 1113891 - DNA, 25 bp, Homo sapien
ctcacaatattataagctacggagt

SEQ ID NO: 1113892 - DNA, 25 bp, Homo sapien
actgcgaacctcaggcatttgactg

SEQ ID NO: 1113893 - DNA, 25 bp, Homo sapien
tgagaaccctcaagagcactgatag

SEQ ID NO: 1113894 - DNA, 25 bp, Homo sapien
gactgctagtgtagttgcctgactc

SEQ ID NO: 1113895 - DNA, 25 bp, Homo sapien
gcactgatagggcaaactgcgaacc

SEQ ID NO: 1113896 - DNA, 25 bp, Homo sapien
cttcttccctcaaccaccactacca

SEQ ID NO: 1113897 - DNA, 25 bp, Homo sapien
ggcatgggatagtcactcctttcac

SEQ ID NO: 1113898 - DNA, 25 bp, Homo sapien
tgcagggcatgggatagtcactcct

SEQ ID NO: 1113899 - DNA, 25 bp, Homo sapien
catgggatagtcactcctttcactc

SEQ ID NO: 1113900 - DNA, 25 bp, Homo sapien
cctagtcatggttgatgtgggcact

SEQ ID NO: 1113901 - DNA, 25 bp, Homo sapien
taacgccctagccaagactatagcc

SEQ ID NO: 1113902 - DNA, 25 bp, Homo sapien
tagagcccttcgtgttgatgagaaa

SEQ ID NO: 1113903 - DNA, 25 bp, Homo sapien
gattctgccagaagtatggatcagc

SEQ ID NO: 1113904 - DNA, 25 bp, Homo sapien
caggtaacatacacagctgtcaaga

SEQ ID NO: 1113905 - DNA, 25 bp, Homo sapien
tcaggtaacatacacagctgtcaag

SEQ ID NO: 1113906 - DNA, 25 bp, Homo sapien
aggtaacatacacagctgtcaagac

SEQ ID NO: 1113907 - DNA, 25 bp, Homo sapien
ccttcatattattagttgtttccga

SEQ ID NO: 1113908 - DNA, 25 bp, Homo sapien
cgacctatacacattggaaacccca

SEQ ID NO: 1113909 - DNA, 25 bp, Homo sapien
ccccaacagacaatattgttaactt

SEQ ID NO: 1113910 - DNA, 25 bp, Homo sapien
catatcttaatgaacttaagaggag

SEQ ID NO: 1113911 - DNA, 25 bp, Homo sapien
cagagctctgttggtatggtagtaa

SEQ ID NO: 1113912 - DNA, 25 bp, Homo sapien
caccatgttgcattgagtaataaga

SEQ ID NO: 1113913 - DNA, 25 bp, Homo sapien
gcattgttattataccagagctctg

SEQ ID NO: 1113914 - DNA, 25 bp, Homo sapien
taatctggccaggaggtaagctgtg

SEQ ID NO: 1113915 - DNA, 25 bp, Homo sapien
gaggttcctggatctatattttaaa

SEQ ID NO: 1113916 - DNA, 25 bp, Homo sapien
aatataatgtgcacggtttacttac

SEQ ID NO: 1113917 - DNA, 25 bp, Homo sapien
tattctgttcttctataggtaagtt

SEQ ID NO: 1113918 - DNA, 25 bp, Homo sapien
cattcttggccattattacttcaca

SEQ ID NO: 1113919 - DNA, 25 bp, Homo sapien
ttctttgtgctgtaagtgctgtgga

SEQ ID NO: 1113920 - DNA, 25 bp, Homo sapien
tccctgaaccttggcacctaatgat

SEQ ID NO: 1113921 - DNA, 25 bp, Homo sapien
cctaatgatattttttaccactggt

SEQ ID NO: 1113922 - DNA, 25 bp, Homo sapien
gccatgtatccaataatttcacaac

SEQ ID NO: 1113923 - DNA, 25 bp, Homo sapien
ttacactttacttaatgtaactgca

SEQ ID NO: 1113924 - DNA, 25 bp, Homo sapien
cacagaagctaagagctatgcatgt

SEQ ID NO: 1113925 - DNA, 25 bp, Homo sapien
gcatttacactttacttaatgtaac

SEQ ID NO: 1113926 - DNA, 25 bp, Homo sapien
acactttacttaatgtaactgcaaa

SEQ ID NO: 1113927 - DNA, 25 bp, Homo sapien
tacaaggtggttctctataagctgc

SEQ ID NO: 1113928 - DNA, 25 bp, Homo sapien
ctggttacaaggtggttctctataa

SEQ ID NO: 1113929 - DNA, 25 bp, Homo sapien
ggttacaaggtggttctctataagc

SEQ ID NO: 1113930 - DNA, 25 bp, Homo sapien
caaggtggttctctataagctgcca

SEQ ID NO: 1113931 - DNA, 25 bp, Homo sapien
tgtctatgaaataaccggctagcaa

SEQ ID NO: 1113932 - DNA, 25 bp, Homo sapien
tgtgcagtacctttagagtgtctat

SEQ ID NO: 1113933 - DNA, 25 bp, Homo sapien
tgatctgtcccataaggcagtatgt

SEQ ID NO: 1113934 - DNA, 25 bp, Homo sapien
aaaccttccaatttctgaagagctg

SEQ ID NO: 1113935 - DNA, 25 bp, Homo sapien
gaacaaggccttgacactcttcaat

SEQ ID NO: 1113936 - DNA, 25 bp, Homo sapien
tagtgccctcaaaaactatgctaaa

SEQ ID NO: 1113937 - DNA, 25 bp, Homo sapien
ttaacagtgctctattggaagaaga

SEQ ID NO: 1113938 - DNA, 25 bp, Homo sapien
ttctataaaggctaagagtggtgag

SEQ ID NO: 1113939 - DNA, 25 bp, Homo sapien
tcaaatgcttctctaccgaggagga

SEQ ID NO: 1113940 - DNA, 25 bp, Homo sapien
gtcaaatgcttctctaccgaggagg

SEQ ID NO: 1113941 - DNA, 25 bp, Homo sapien
acagttggcttgaaatagatctttg

SEQ ID NO: 1113942 - DNA, 25 bp, Homo sapien
ggaaacagttggcttgaaatagatc

SEQ ID NO: 1113943 - DNA, 25 bp, Homo sapien
cctaaacgtctttcaattacaccag

SEQ ID NO: 1113944 - DNA, 25 bp, Homo sapien
caatcccatgttgaacctggcaagg

SEQ ID NO: 1113945 - DNA, 25 bp, Homo sapien
tcttactgctagctgtggacctcac

SEQ ID NO: 1113946 - DNA, 25 bp, Homo sapien
cctggcaaggagcaaacagcagaat

SEQ ID NO: 1113947 - DNA, 25 bp, Homo sapien
ccctagaagcaaagcataactgcct

SEQ ID NO: 1113948 - DNA, 25 bp, Homo sapien
cacacacactggagcatgcagcaca

SEQ ID NO: 1113949 - DNA, 25 bp, Homo sapien
taactgcctagcatgagatatcact

SEQ ID NO: 1113950 - DNA, 25 bp, Homo sapien
gaagaaccgatggtgtaaacacaca

SEQ ID NO: 1113951 - DNA, 25 bp, Homo sapien
aacagatctatttcagtaacaggaa

SEQ ID NO: 1113952 - DNA, 25 bp, Homo sapien
gaggtttatattgtactgtagcagg

SEQ ID NO: 1113953 - DNA, 25 bp, Homo sapien
tgaggtgatctccagttatgaaaga

SEQ ID NO: 1113954 - DNA, 25 bp, Homo sapien
gactgttatgttatcagagaaacca

SEQ ID NO: 1113955 - DNA, 25 bp, Homo sapien
acattcacccacattcaagagatga

SEQ ID NO: 1113956 - DNA, 25 bp, Homo sapien
gatttgtttgcaggaacattcaccc

SEQ ID NO: 1113957 - DNA, 25 bp, Homo sapien
aagatttgtttgcaggaacattcac

SEQ ID NO: 1113958 - DNA, 25 bp, Homo sapien
attcacccacattcaagagatgaaa

SEQ ID NO: 1113959 - DNA, 25 bp, Homo sapien
tattcccaaaagtatacattttcaa

SEQ ID NO: 1113960 - DNA, 25 bp, Homo sapien
tgtatgatttaaatagtctatcaca

SEQ ID NO: 1113961 - DNA, 25 bp, Homo sapien
aattgaacaaagtagatactacaaa

SEQ ID NO: 1113962 - DNA, 25 bp, Homo sapien
tctatcacattgcattctaaaggaa

SEQ ID NO: 1113963 - DNA, 25 bp, Homo sapien
gttcctgaaaacatactagaaagta

SEQ ID NO: 1113964 - DNA, 25 bp, Homo sapien
ccatgatacattaaagagctattta

SEQ ID NO: 1113965 - DNA, 25 bp, Homo sapien
aaagacatgtcatctattgtgataa

SEQ ID NO: 1113966 - DNA, 25 bp, Homo sapien
taagaaccttctcaaatctctaaga

SEQ ID NO: 1113967 - DNA, 25 bp, Homo sapien
gagttggattctcccattttttcaa

SEQ ID NO: 1113968 - DNA, 25 bp, Homo sapien
ttggctttggctagaaactctttca

SEQ ID NO: 1113969 - DNA, 25 bp, Homo sapien
ctgagttggattctcccattttttc

SEQ ID NO: 1113970 - DNA, 25 bp, Homo sapien
tctttggctttggctagaaactctt

SEQ ID NO: 1113971 - DNA, 25 bp, Homo sapien
ccaacatgactcttccaaatgaacc

SEQ ID NO: 1113972 - DNA, 25 bp, Homo sapien
tcagtggctttgtgttttaccaaca

SEQ ID NO: 1113973 - DNA, 25 bp, Homo sapien
tctgcttatctaagatcttcatggc

SEQ ID NO: 1113974 - DNA, 25 bp, Homo sapien
tcatggcataatactgttcagtggc

SEQ ID NO: 1113975 - DNA, 25 bp, Homo sapien
cttaaaagcatactccagtcgaaca

SEQ ID NO: 1113976 - DNA, 25 bp, Homo sapien
ggaaaattcactgcctgtaatattc

SEQ ID NO: 1113977 - DNA, 25 bp, Homo sapien
tactccagtcgaacaaggaaaggaa

SEQ ID NO: 1113978 - DNA, 25 bp, Homo sapien
tcaaagtatgctctatttgcttcag

SEQ ID NO: 1113979 - DNA, 25 bp, Homo sapien
gatgtgaaaacatttcacccccagg

SEQ ID NO: 1113980 - DNA, 25 bp, Homo sapien
ccttccaattcttcttagatgtgaa

SEQ ID NO: 1113981 - DNA, 25 bp, Homo sapien
tcacccccagggacatattccataa

SEQ ID NO: 1113982 - DNA, 25 bp, Homo sapien
ccataaccatgtataaattagaatt

SEQ ID NO: 1113983 - DNA, 25 bp, Homo sapien
taatggaaagctctaaatgggaaaa

SEQ ID NO: 1113984 - DNA, 25 bp, Homo sapien
gaaataatgagcatactgcagaaga

SEQ ID NO: 1113985 - DNA, 25 bp, Homo sapien
gcctgatgcagaaacgtttatctta

SEQ ID NO: 1113986 - DNA, 25 bp, Homo sapien
tgtacactcaataaccctggacaca

SEQ ID NO: 1113987 - DNA, 25 bp, Homo sapien
tgagctgcatagaaccgtgcatggg

SEQ ID NO: 1113988 - DNA, 25 bp, Homo sapien
ggtctagtgaatggaggtactcgaa

SEQ ID NO: 1113989 - DNA, 25 bp, Homo sapien
gaatgttagcactatctgagctgca

SEQ ID NO: 1113990 - DNA, 25 bp, Homo sapien
ctggatatagccttgatggtcaatt

SEQ ID NO: 1113991 - DNA, 25 bp, Homo sapien
gagccaaatactctggagttccaca

SEQ ID NO: 1113992 - DNA, 25 bp, Homo sapien
ttccacataatgtccaagttctgcc

SEQ ID NO: 1113993 - DNA, 25 bp, Homo sapien
agttccacataatgtccaagttctg

SEQ ID NO: 1113994 - DNA, 25 bp, Homo sapien
caaatactctggagttccacataat

SEQ ID NO: 1113995 - DNA, 25 bp, Homo sapien
tttcataaatctgaattggttggtc

SEQ ID NO: 1113996 - DNA, 25 bp, Homo sapien
ttcataaatctgaattggttggtct

SEQ ID NO: 1113997 - DNA, 25 bp, Homo sapien
gccatttcatagattagcactccta

SEQ ID NO: 1113998 - DNA, 25 bp, Homo sapien
ccatttcatagattagcactcctaa

SEQ ID NO: 1113999 - DNA, 25 bp, Homo sapien
ttctactttagatgagtaaagggag

SEQ ID NO: 1114000 - DNA, 25 bp, Homo sapien
ggtgcccaggatttagactgttatg

SEQ ID NO: 1114001 - DNA, 25 bp, Homo sapien
tagagaatgattggcaaatcgaggc

SEQ ID NO: 1114002 - DNA, 25 bp, Homo sapien
tagttatgacagtatccttgttaga

SEQ ID NO: 1114003 - DNA, 25 bp, Homo sapien
ctaaccagagagacaataatatttt

SEQ ID NO: 1114004 - DNA, 25 bp, Homo sapien
gaatagagacacattctagtttgaa

SEQ ID NO: 1114005 - DNA, 25 bp, Homo sapien
ataatatttttgcaatgtgaataga

SEQ ID NO: 1114006 - DNA, 25 bp, Homo sapien
tagtttccaatttggcttttagcca

SEQ ID NO: 1114007 - DNA, 25 bp, Homo sapien
caggttccgtagaaggtccttgaga

SEQ ID NO: 1114008 - DNA, 25 bp, Homo sapien
gaaggtccttgagatctgaactgaa

SEQ ID NO: 1114009 - DNA, 25 bp, Homo sapien
ctgcagcaggttccgtagaaggtcc

SEQ ID NO: 1114010 - DNA, 25 bp, Homo sapien
cttgagatctgaactgaagtgggat

SEQ ID NO: 1114011 - DNA, 25 bp, Homo sapien
ggcaaaccacttgtgagtttttata

SEQ ID NO: 1114012 - DNA, 25 bp, Homo sapien
ccaatctgtcgtggcaaaccacttg

SEQ ID NO: 1114013 - DNA, 25 bp, Homo sapien
actgacaccattctttagatttcca

SEQ ID NO: 1114014 - DNA, 25 bp, Homo sapien
gtaaatagcaatccaatctgtcgtg

SEQ ID NO: 1114015 - DNA, 25 bp, Homo sapien
gtacaaggatgaattggtaccattc

SEQ ID NO: 1114016 - DNA, 25 bp, Homo sapien
aggtacaaggatgaattggtaccat

SEQ ID NO: 1114017 - DNA, 25 bp, Homo sapien
ccagaggtacaaggatgaattggta

SEQ ID NO: 1114018 - DNA, 25 bp, Homo sapien
caaggatgaattggtaccattcctt

SEQ ID NO: 1114019 - DNA, 25 bp, Homo sapien
tgagctacgggaggacattcaaacc

SEQ ID NO: 1114020 - DNA, 25 bp, Homo sapien
aaattactctgagctacgggaggac

SEQ ID NO: 1114021 - DNA, 25 bp, Homo sapien
acagagaagtgcttaaaggagctga

SEQ ID NO: 1114022 - DNA, 25 bp, Homo sapien
ttactctgagctacgggaggacatt

SEQ ID NO: 1114023 - DNA, 25 bp, Homo sapien
catttttctgttatagagacacgga

SEQ ID NO: 1114024 - DNA, 25 bp, Homo sapien
agagacacggatatcttcttcttca

SEQ ID NO: 1114025 - DNA, 25 bp, Homo sapien
atcaaagttgctggtatctccagag

SEQ ID NO: 1114026 - DNA, 25 bp, Homo sapien
caaagttgctggtatctccagagcc

SEQ ID NO: 1114027 - DNA, 25 bp, Homo sapien
tgctggtaccaagtgagagaatctg

SEQ ID NO: 1114028 - DNA, 25 bp, Homo sapien
taactgcttcaacaaggacggtctc

SEQ ID NO: 1114029 - DNA, 25 bp, Homo sapien
tacataggtggatgcagagtgcgca

SEQ ID NO: 1114030 - DNA, 25 bp, Homo sapien
tgttaatgacctacctgcaccgata

SEQ ID NO: 1114031 - DNA, 25 bp, Homo sapien
caactgggtattcagcatcggtgag

SEQ ID NO: 1114032 - DNA, 25 bp, Homo sapien
gaattaggacagacaccaaggctct

SEQ ID NO: 1114033 - DNA, 25 bp, Homo sapien
ggccaatgggcagttaacacaagaa

SEQ ID NO: 1114034 - DNA, 25 bp, Homo sapien
gaatagccctcaaaaccaacgtatg

SEQ ID NO: 1114035 - DNA, 25 bp, Homo sapien
gactggcggatatattcctccccaa

SEQ ID NO: 1114036 - DNA, 25 bp, Homo sapien
aatgataaaatgaagcgagcactgg

SEQ ID NO: 1114037 - DNA, 25 bp, Homo sapien
taagcatctcttgtatcagcggaaa

SEQ ID NO: 1114038 - DNA, 25 bp, Homo sapien
caccaagtagaattcacgactcaat

SEQ ID NO: 1114039 - DNA, 25 bp, Homo sapien
ggatgaagtcttcccatatgacctc

SEQ ID NO: 1114040 - DNA, 25 bp, Homo sapien
tgagtctagaagtcccaagtcaaga

SEQ ID NO: 1114041 - DNA, 25 bp, Homo sapien
caaagtcagcttctttggaggcctc

SEQ ID NO: 1114042 - DNA, 25 bp, Homo sapien
tgtccttgccctatagatggtcatc

SEQ ID NO: 1114043 - DNA, 25 bp, Homo sapien
ggctgcacacggataaattgctgct

SEQ ID NO: 1114044 - DNA, 25 bp, Homo sapien
gctgcacacggataaattgctgctc

SEQ ID NO: 1114045 - DNA, 25 bp, Homo sapien
tgcacacggataaattgctgctcct

SEQ ID NO: 1114046 - DNA, 25 bp, Homo sapien
cacacggataaattgctgctcctac

SEQ ID NO: 1114047 - DNA, 25 bp, Homo sapien
cctctgctgttgtggagggattccc

SEQ ID NO: 1114048 - DNA, 25 bp, Homo sapien
tctgctgttgtggagggattccctc

SEQ ID NO: 1114049 - DNA, 25 bp, Homo sapien
agcctctgctgttgtggagggattc

SEQ ID NO: 1114050 - DNA, 25 bp, Homo sapien
tttgccactgtagatgagcctctgc

SEQ ID NO: 1114051 - DNA, 25 bp, Homo sapien
cacctaaaatcttgtaatcagctgc

SEQ ID NO: 1114052 - DNA, 25 bp, Homo sapien
caacaccaggtgaaggactgaacca

SEQ ID NO: 1114053 - DNA, 25 bp, Homo sapien
ggactgaaccacctaaaatcttgta

SEQ ID NO: 1114054 - DNA, 25 bp, Homo sapien
ccaggtgaaggactgaaccacctaa

SEQ ID NO: 1114055 - DNA, 25 bp, Homo sapien
tcattacgagcgacagggtagggag

SEQ ID NO: 1114056 - DNA, 25 bp, Homo sapien
cattacgagcgacagggtagggagg

SEQ ID NO: 1114057 - DNA, 25 bp, Homo sapien
ctcattacgagcgacagggtaggga

SEQ ID NO: 1114058 - DNA, 25 bp, Homo sapien
cagggacacagccataagagagaga

SEQ ID NO: 1114059 - DNA, 25 bp, Homo sapien
atattttattgacaaccagggacac

SEQ ID NO: 1114060 - DNA, 25 bp, Homo sapien
gacacagccataagagagagaagca

SEQ ID NO: 1114061 - DNA, 25 bp, Homo sapien
acaaccagggacacagccataagag

SEQ ID NO: 1114062 - DNA, 25 bp, Homo sapien
gtcttccaccttgtaatttctgtca

SEQ ID NO: 1114063 - DNA, 25 bp, Homo sapien
gagctctaattttgtaagacagagg

SEQ ID NO: 1114064 - DNA, 25 bp, Homo sapien
tccatctgttacgtcttccaccttg

SEQ ID NO: 1114065 - DNA, 25 bp, Homo sapien
taattttgtaagacagaggccctct

SEQ ID NO: 1114066 - DNA, 25 bp, Homo sapien
tttccaaagttataagatggccaac

SEQ ID NO: 1114067 - DNA, 25 bp, Homo sapien
ttatttctaatgaattggacattac

SEQ ID NO: 1114068 - DNA, 25 bp, Homo sapien
ctgctggccttgaatcaggaccaac

SEQ ID NO: 1114069 - DNA, 25 bp, Homo sapien
ggccaacagaccatgaaaagacaat

SEQ ID NO: 1114070 - DNA, 25 bp, Homo sapien
tgcctctgacgcagtccctttctcc

SEQ ID NO: 1114071 - DNA, 25 bp, Homo sapien
attctgcctctgacgcagtcccttt

SEQ ID NO: 1114072 - DNA, 25 bp, Homo sapien
tgattctgcctctgacgcagtccct

SEQ ID NO: 1114073 - DNA, 25 bp, Homo sapien
cctctgacgcagtccctttctcctc

SEQ ID NO: 1114074 - DNA, 25 bp, Homo sapien
tcttgctctgcttggtaaaaggtga

SEQ ID NO: 1114075 - DNA, 25 bp, Homo sapien
ccatattggagtagggtggacacta

SEQ ID NO: 1114076 - DNA, 25 bp, Homo sapien
caggaattgaagttgtgctgccaca

SEQ ID NO: 1114077 - DNA, 25 bp, Homo sapien
gacagtaggatccaggcttatttgg

SEQ ID NO: 1114078 - DNA, 25 bp, Homo sapien
cgcaaagccccggtgcagccggccg

SEQ ID NO: 1114079 - DNA, 25 bp, Homo sapien
cgggagttgtagtccagcgccggtc

SEQ ID NO: 1114080 - DNA, 25 bp, Homo sapien
agtactagaagggacaagatctggg

SEQ ID NO: 1114081 - DNA, 25 bp, Homo sapien
gcatggccgcgccgggaggtttgcc

SEQ ID NO: 1114082 - DNA, 25 bp, Homo sapien
acgtccgtgggtgcaacgagctgca

SEQ ID NO: 1114083 - DNA, 25 bp, Homo sapien
gactttcacggagaggcagttcgct

SEQ ID NO: 1114084 - DNA, 25 bp, Homo sapien
tctctgtggcactggcgacaaagcg

SEQ ID NO: 1114085 - DNA, 25 bp, Homo sapien
cacacggccaagatgtgtttttggg

SEQ ID NO: 1114086 - DNA, 25 bp, Homo sapien
tctggcctgctgtgatcaaaagttt

SEQ ID NO: 1114087 - DNA, 25 bp, Homo sapien
ctggcctgctgtgatcaaaagtttg

SEQ ID NO: 1114088 - DNA, 25 bp, Homo sapien
atctggcctgctgtgatcaaaagtt

SEQ ID NO: 1114089 - DNA, 25 bp, Homo sapien
tggcctgctgtgatcaaaagtttgc

SEQ ID NO: 1114090 - DNA, 25 bp, Homo sapien
aacaaaagcatgttcagctctccac

SEQ ID NO: 1114091 - DNA, 25 bp, Homo sapien
gcgagttggactgggagttctgtgt

SEQ ID NO: 1114092 - DNA, 25 bp, Homo sapien
ctgctcagaacaaaagcatgttcag

SEQ ID NO: 1114093 - DNA, 25 bp, Homo sapien
ctcccagtaaatccaaattggaagc

SEQ ID NO: 1114094 - DNA, 25 bp, Homo sapien
ttcaataaggaggtacaatttgaca

SEQ ID NO: 1114095 - DNA, 25 bp, Homo sapien
ttatcaagaacagccaaagaaaccc

SEQ ID NO: 1114096 - DNA, 25 bp, Homo sapien
tttctttcacaaagtaggctggcaa

SEQ ID NO: 1114097 - DNA, 25 bp, Homo sapien
gcaaaggaattcaataaggaggtac

SEQ ID NO: 1114098 - DNA, 25 bp, Homo sapien
gctccatgctaacagaatatgattt

SEQ ID NO: 1114099 - DNA, 25 bp, Homo sapien
gagtagacaggaagatagtgctgct

SEQ ID NO: 1114100 - DNA, 25 bp, Homo sapien
tactctgcaacaccacactacattg

SEQ ID NO: 1114101 - DNA, 25 bp, Homo sapien
gttggaaactgttacacattcacca

SEQ ID NO: 1114102 - DNA, 25 bp, Homo sapien
cacattctcaacgaaagcctcaaaa

SEQ ID NO: 1114103 - DNA, 25 bp, Homo sapien
cattctcaacgaaagcctcaaaaac

SEQ ID NO: 1114104 - DNA, 25 bp, Homo sapien
ctcacattctcaacgaaagcctcaa

SEQ ID NO: 1114105 - DNA, 25 bp, Homo sapien
tcacattctcaacgaaagcctcaaa

SEQ ID NO: 1114106 - DNA, 25 bp, Homo sapien
tccatgtcaacagatagcatgggaa

SEQ ID NO: 1114107 - DNA, 25 bp, Homo sapien
catgtcaacagatagcatgggaagg

SEQ ID NO: 1114108 - DNA, 25 bp, Homo sapien
gtcaacagatagcatgggaaggctg

SEQ ID NO: 1114109 - DNA, 25 bp, Homo sapien
tttccatgtcaacagatagcatggg

SEQ ID NO: 1114110 - DNA, 25 bp, Homo sapien
cagttcataaaattaggacggagga

SEQ ID NO: 1114111 - DNA, 25 bp, Homo sapien
taagtccctctgttgtttgcagaag

SEQ ID NO: 1114112 - DNA, 25 bp, Homo sapien
cagtgtagacaaaccaaggcgaccc

SEQ ID NO: 1114113 - DNA, 25 bp, Homo sapien
tttgcagaagcagaactcagaagcc

SEQ ID NO: 1114114 - DNA, 25 bp, Homo sapien
ggggcgggggatgtatacacattca

SEQ ID NO: 1114115 - DNA, 25 bp, Homo sapien
catcatttggatggtagtaaacaaa

SEQ ID NO: 1114116 - DNA, 25 bp, Homo sapien
tatcatcatttggatggtagtaaac

SEQ ID NO: 1114117 - DNA, 25 bp, Homo sapien
tctatcatcatttggatggtagtaa

SEQ ID NO: 1114118 - DNA, 25 bp, Homo sapien
ttgctgtttttttgggaagaagagc

SEQ ID NO: 1114119 - DNA, 25 bp, Homo sapien
ttccacattgctgtttttttgggaa

SEQ ID NO: 1114120 - DNA, 25 bp, Homo sapien
cacatcactgcattcaggtagggtg

SEQ ID NO: 1114121 - DNA, 25 bp, Homo sapien
gcattccaggaaccatcacacacat

SEQ ID NO: 1114122 - DNA, 25 bp, Homo sapien
tggtggtaacatccatccagctaaa

SEQ ID NO: 1114123 - DNA, 25 bp, Homo sapien
cagagatcatgcgtagactagggtg

SEQ ID NO: 1114124 - DNA, 25 bp, Homo sapien
taatgtgggctataagtctacagca

SEQ ID NO: 1114125 - DNA, 25 bp, Homo sapien
tgcagtcatgcaacccagagatcat

SEQ ID NO: 1114126 - DNA, 25 bp, Homo sapien
ggaaataattgacgacatccatcac

SEQ ID NO: 1114127 - DNA, 25 bp, Homo sapien
tgttcctgaaaagcactagcttgct

SEQ ID NO: 1114128 - DNA, 25 bp, Homo sapien
tgctcctcaaatcccacggttcgga

SEQ ID NO: 1114129 - DNA, 25 bp, Homo sapien
cacggttcggaaataattgacgaca

SEQ ID NO: 1114130 - DNA, 25 bp, Homo sapien
tcactgattcctccctgctctttgg

SEQ ID NO: 1114131 - DNA, 25 bp, Homo sapien
cttcctcctcactcccttctgccca

SEQ ID NO: 1114132 - DNA, 25 bp, Homo sapien
actgattcctccctgctctttggtc

SEQ ID NO: 1114133 - DNA, 25 bp, Homo sapien
tccctgctctttggtcctcttcctc

SEQ ID NO: 1114134 - DNA, 25 bp, Homo sapien
cagcctaaaatgtttgtctgctaga

SEQ ID NO: 1114135 - DNA, 25 bp, Homo sapien
aaatgtttgtctgctagaaggtgct

SEQ ID NO: 1114136 - DNA, 25 bp, Homo sapien
ctaaaatgtttgtctgctagaaggt

SEQ ID NO: 1114137 - DNA, 25 bp, Homo sapien
aaaatgtttgtctgctagaaggtgc

SEQ ID NO: 1114138 - DNA, 25 bp, Homo sapien
atactatcacaaggctcttgggatg

SEQ ID NO: 1114139 - DNA, 25 bp, Homo sapien
tggtgaactattcaagtttacacca

SEQ ID NO: 1114140 - DNA, 25 bp, Homo sapien
ccaagcccttttgaatactatcaca

SEQ ID NO: 1114141 - DNA, 25 bp, Homo sapien
tttgaatactatcacaaggctcttg

SEQ ID NO: 1114142 - DNA, 25 bp, Homo sapien
agcattttgaggcacacctagtact

SEQ ID NO: 1114143 - DNA, 25 bp, Homo sapien
tttgaggcacacctagtactttgta

SEQ ID NO: 1114144 - DNA, 25 bp, Homo sapien
attttgaggcacacctagtactttg

SEQ ID NO: 1114145 - DNA, 25 bp, Homo sapien
gaggcacacctagtactttgtagta

SEQ ID NO: 1114146 - DNA, 25 bp, Homo sapien
gcagagccaactggtgataagcctt

SEQ ID NO: 1114147 - DNA, 25 bp, Homo sapien
ctgcagagccaactggtgataagcc

SEQ ID NO: 1114148 - DNA, 25 bp, Homo sapien
tgcagagccaactggtgataagcct

SEQ ID NO: 1114149 - DNA, 25 bp, Homo sapien
tgcctctttgttccctgggttcttg

SEQ ID NO: 1114150 - DNA, 25 bp, Homo sapien
agatgcctctttgttccctgggttc

SEQ ID NO: 1114151 - DNA, 25 bp, Homo sapien
tcagatgcctctttgttccctgggt

SEQ ID NO: 1114152 - DNA, 25 bp, Homo sapien
cctcagatgcctctttgttccctgg

SEQ ID NO: 1114153 - DNA, 25 bp, Homo sapien
tggttcggttccttctggacttgtc

SEQ ID NO: 1114154 - DNA, 25 bp, Homo sapien
gacaagacctcataggcctcttgct

SEQ ID NO: 1114155 - DNA, 25 bp, Homo sapien
gacttgtcatactcatttcatttcc

SEQ ID NO: 1114156 - DNA, 25 bp, Homo sapien
catcagacaagacctcataggcctc

SEQ ID NO: 1114157 - DNA, 25 bp, Homo sapien
gaaaaatcatcacctgagaatcctg

SEQ ID NO: 1114158 - DNA, 25 bp, Homo sapien
tggagcccagagataaaaaagtgga

SEQ ID NO: 1114159 - DNA, 25 bp, Homo sapien
tggaggaatctcatgaaacagtctt

SEQ ID NO: 1114160 - DNA, 25 bp, Homo sapien
tactgtctggctacaaatggtgacc

SEQ ID NO: 1114161 - DNA, 25 bp, Homo sapien
tactgtcccagatggtgcataaggg

SEQ ID NO: 1114162 - DNA, 25 bp, Homo sapien
aatttatgaaggtcgggctctgcgc

SEQ ID NO: 1114163 - DNA, 25 bp, Homo sapien
taagctgacctctgtccatcctagt

SEQ ID NO: 1114164 - DNA, 25 bp, Homo sapien
tactaggttcttacacaacatctgg

SEQ ID NO: 1114165 - DNA, 25 bp, Homo sapien
tactaggtaactctgaattgaagct

SEQ ID NO: 1114166 - DNA, 25 bp, Homo sapien
gctatttgtgatatggtccatggga

SEQ ID NO: 1114167 - DNA, 25 bp, Homo sapien
taggaagagacaaagagtagccatc

SEQ ID NO: 1114168 - DNA, 25 bp, Homo sapien
catcaagacaggcaactaggcaatt

SEQ ID NO: 1114169 - DNA, 25 bp, Homo sapien
tgctgcaagtattattgaggtaact

SEQ ID NO: 1114170 - DNA, 25 bp, Homo sapien
gtagaattcctgacatgcactgatc

SEQ ID NO: 1114171 - DNA, 25 bp, Homo sapien
gacatgcactgatcactcaataaat

SEQ ID NO: 1114172 - DNA, 25 bp, Homo sapien
tatgtgatgggggaaagtaactact

SEQ ID NO: 1114173 - DNA, 25 bp, Homo sapien
gcatggaagtaaagttccgagatga

SEQ ID NO: 1114174 - DNA, 25 bp, Homo sapien
taaagttccgagatgataggtttaa

SEQ ID NO: 1114175 - DNA, 25 bp, Homo sapien
ggaagtaaagttccgagatgatagg

SEQ ID NO: 1114176 - DNA, 25 bp, Homo sapien
ttccgagatgataggtttaaatttc

SEQ ID NO: 1114177 - DNA, 25 bp, Homo sapien
tgtgtgttaactgataatcatttgt

SEQ ID NO: 1114178 - DNA, 25 bp, Homo sapien
cttgggaattgtgtgttaactgata

SEQ ID NO: 1114179 - DNA, 25 bp, Homo sapien
ggaattgtgtgttaactgataatca

SEQ ID NO: 1114180 - DNA, 25 bp, Homo sapien
atcttgggaattgtgtgttaactga

SEQ ID NO: 1114181 - DNA, 25 bp, Homo sapien
gaaaccacagtagccgtgctgaaga

SEQ ID NO: 1114182 - DNA, 25 bp, Homo sapien
cctggaaaccacagtagccgtgctg

SEQ ID NO: 1114183 - DNA, 25 bp, Homo sapien
cagtagccgtgctgaagacactgtg

SEQ ID NO: 1114184 - DNA, 25 bp, Homo sapien
accacagtagccgtgctgaagacac

SEQ ID NO: 1114185 - DNA, 25 bp, Homo sapien
ctccaactctcatgtgccttgcttg

SEQ ID NO: 1114186 - DNA, 25 bp, Homo sapien
tccaactctcatgtgccttgcttgc

SEQ ID NO: 1114187 - DNA, 25 bp, Homo sapien
aactctcatgtgccttgcttgccag

SEQ ID NO: 1114188 - DNA, 25 bp, Homo sapien
caactctcatgtgccttgcttgcca

SEQ ID NO: 1114189 - DNA, 25 bp, Homo sapien
ctgcactccaggtattctggagaga

SEQ ID NO: 1114190 - DNA, 25 bp, Homo sapien
tctcaatggatcctcaaacttccaa

SEQ ID NO: 1114191 - DNA, 25 bp, Homo sapien
tccctctcaatggatcctcaaactt

SEQ ID NO: 1114192 - DNA, 25 bp, Homo sapien
ggtagtgaggggtagggccctgcca

SEQ ID NO: 1114193 - DNA, 25 bp, Homo sapien
cactccctctcaatggatcctcaaa

SEQ ID NO: 1114194 - DNA, 25 bp, Homo sapien
ttcagagcaggccccaattttaact

SEQ ID NO: 1114195 - DNA, 25 bp, Homo sapien
ttaactgaagtcctgtcaacacatc

SEQ ID NO: 1114196 - DNA, 25 bp, Homo sapien
catttcttgtcatcaatagcaggga

SEQ ID NO: 1114197 - DNA, 25 bp, Homo sapien
atgatattcgtagattttcagagca

SEQ ID NO: 1114198 - DNA, 25 bp, Homo sapien
tatgaagagttgttctttaaatgct

SEQ ID NO: 1114199 - DNA, 25 bp, Homo sapien
ctatgaagagttgttctttaaatgc

SEQ ID NO: 1114200 - DNA, 25 bp, Homo sapien
ctttaaatgctttgtctgcagaggt

SEQ ID NO: 1114201 - DNA, 25 bp, Homo sapien
aatgctttgtctgcagaggttttac

SEQ ID NO: 1114202 - DNA, 25 bp, Homo sapien
gctttttgacctgtaactctcggca

SEQ ID NO: 1114203 - DNA, 25 bp, Homo sapien
tgaacagagatgtagcaagcccact

SEQ ID NO: 1114204 - DNA, 25 bp, Homo sapien
gatggatatcctcagtacacaacgg

SEQ ID NO: 1114205 - DNA, 25 bp, Homo sapien
ggcaattccgtccaagtaacacaag

SEQ ID NO: 1114206 - DNA, 25 bp, Homo sapien
cggtaacagcaagttgtccctcaat

SEQ ID NO: 1114207 - DNA, 25 bp, Homo sapien
agttgacttagttgaacgcgagttc

SEQ ID NO: 1114208 - DNA, 25 bp, Homo sapien
tgggctcatggtttccaataaaaac

SEQ ID NO: 1114209 - DNA, 25 bp, Homo sapien
ccaagtactcctagagcagtccaaa

SEQ ID NO: 1114210 - DNA, 25 bp, Homo sapien
gcctattttgatcacattggttttc

SEQ ID NO: 1114211 - DNA, 25 bp, Homo sapien
tggcctattttgatcacattggttt

SEQ ID NO: 1114212 - DNA, 25 bp, Homo sapien
ctttttggcctattttgatcacatt

SEQ ID NO: 1114213 - DNA, 25 bp, Homo sapien
ttttggcctattttgatcacattgg

SEQ ID NO: 1114214 - DNA, 25 bp, Homo sapien
catgttggcttagattccactgaaa

SEQ ID NO: 1114215 - DNA, 25 bp, Homo sapien
aaagtggccagtttgtgacctcacc

SEQ ID NO: 1114216 - DNA, 25 bp, Homo sapien
aacacacacatactgcattggccaa

SEQ ID NO: 1114217 - DNA, 25 bp, Homo sapien
aaattggagttttcagcctcactag

SEQ ID NO: 1114218 - DNA, 25 bp, Homo sapien
cagtcgcctttgctagacctttacg

SEQ ID NO: 1114219 - DNA, 25 bp, Homo sapien
tggagttggccctttgcagtcgcct

SEQ ID NO: 1114220 - DNA, 25 bp, Homo sapien
tcctttcctccggactctgagctgt

SEQ ID NO: 1114221 - DNA, 25 bp, Homo sapien
acttgaagccttctaaccagacaca

SEQ ID NO: 1114222 - DNA, 25 bp, Homo sapien
taataagtcttttgaggcagcattt

SEQ ID NO: 1114223 - DNA, 25 bp, Homo sapien
tctaccccaatatagaagcgtaata

SEQ ID NO: 1114224 - DNA, 25 bp, Homo sapien
taccggcagattttaactagagaaa

SEQ ID NO: 1114225 - DNA, 25 bp, Homo sapien
caataccggcagattttaactagag

SEQ ID NO: 1114226 - DNA, 25 bp, Homo sapien
gccattaattagaatctgaagcctt

SEQ ID NO: 1114227 - DNA, 25 bp, Homo sapien
ccagaatgccattaattagaatctg

SEQ ID NO: 1114228 - DNA, 25 bp, Homo sapien
taccagaatgccattaattagaatc

SEQ ID NO: 1114229 - DNA, 25 bp, Homo sapien
gaatgccattaattagaatctgaag

SEQ ID NO: 1114230 - DNA, 25 bp, Homo sapien
tggtcccacatgctgtacatccagc

SEQ ID NO: 1114231 - DNA, 25 bp, Homo sapien
gcagcagtatttactttagaggaag

SEQ ID NO: 1114232 - DNA, 25 bp, Homo sapien
cacatgctgtacatccagccacaag

SEQ ID NO: 1114233 - DNA, 25 bp, Homo sapien
aaggagaggcagcagtatttacttt

SEQ ID NO: 1114234 - DNA, 25 bp, Homo sapien
agtggcctctagcaggctttgacca

SEQ ID NO: 1114235 - DNA, 25 bp, Homo sapien
gaagcctcacaatccttcgggccag

SEQ ID NO: 1114236 - DNA, 25 bp, Homo sapien
aggctttgaccaccatcagctgcag

SEQ ID NO: 1114237 - DNA, 25 bp, Homo sapien
aatgtgagtggcctctagcaggctt

SEQ ID NO: 1114238 - DNA, 25 bp, Homo sapien
tcctttggcggataagggataatga

SEQ ID NO: 1114239 - DNA, 25 bp, Homo sapien
ctttggcggataagggataatgaag

SEQ ID NO: 1114240 - DNA, 25 bp, Homo sapien
tatcctttggcggataagggataat

SEQ ID NO: 1114241 - DNA, 25 bp, Homo sapien
tcatatcctttggcggataagggat

SEQ ID NO: 1114242 - DNA, 25 bp, Homo sapien
taaatgcatgatgagaacgttacct

SEQ ID NO: 1114243 - DNA, 25 bp, Homo sapien
gggacttagagcatatcatgtaact

SEQ ID NO: 1114244 - DNA, 25 bp, Homo sapien
catgccagaggcaggatagtactgt

SEQ ID NO: 1114245 - DNA, 25 bp, Homo sapien
gatgagaacgttacctcagtcttct

SEQ ID NO: 1114246 - DNA, 25 bp, Homo sapien
tcctgacagggagtaattaggcctc

SEQ ID NO: 1114247 - DNA, 25 bp, Homo sapien
tttgtgggctgcaggaaccataggc

SEQ ID NO: 1114248 - DNA, 25 bp, Homo sapien
gaattgacgccagctcattagtgaa

SEQ ID NO: 1114249 - DNA, 25 bp, Homo sapien
tagtggctatcgcaggaattgacgc

SEQ ID NO: 1114250 - DNA, 25 bp, Homo sapien
ggtgtgcattctaggtatttatctc

SEQ ID NO: 1114251 - DNA, 25 bp, Homo sapien
gaccactccagctctcgattggtgt

SEQ ID NO: 1114252 - DNA, 25 bp, Homo sapien
gcagccctttgatttgaccactcca

SEQ ID NO: 1114253 - DNA, 25 bp, Homo sapien
gaagtaggccttatcatagcagcag

SEQ ID NO: 1114254 - DNA, 25 bp, Homo sapien
tagcacaaaacagtgtgcacctgtg

SEQ ID NO: 1114255 - DNA, 25 bp, Homo sapien
tattagttgtacatctatagcacaa

SEQ ID NO: 1114256 - DNA, 25 bp, Homo sapien
gtgggatcctcagtcttctttatca

SEQ ID NO: 1114257 - DNA, 25 bp, Homo sapien
tgtgcacctgtgtgggatcctcagt

SEQ ID NO: 1114258 - DNA, 25 bp, Homo sapien
gactctggatgcctttgtgctgaat

SEQ ID NO: 1114259 - DNA, 25 bp, Homo sapien
cccatgtaattgtgcgattctgtca

SEQ ID NO: 1114260 - DNA, 25 bp, Homo sapien
gattctgtcacaacatgccagcgtg

SEQ ID NO: 1114261 - DNA, 25 bp, Homo sapien
agagtgggatggatcccatgtaatt

SEQ ID NO: 1114262 - DNA, 25 bp, Homo sapien
gctgtgctggctctgacgtttgatt

SEQ ID NO: 1114263 - DNA, 25 bp, Homo sapien
tccccatagattgtggagtctgagt

SEQ ID NO: 1114264 - DNA, 25 bp, Homo sapien
gagtctgagtttcaaggcgctctca

SEQ ID NO: 1114265 - DNA, 25 bp, Homo sapien
ttcatgccacagcaggacactttcc

SEQ ID NO: 1114266 - DNA, 25 bp, Homo sapien
agagcaaagcaaaggatgttcttag

SEQ ID NO: 1114267 - DNA, 25 bp, Homo sapien
gcaaagcaaaggatgttcttagcag

SEQ ID NO: 1114268 - DNA, 25 bp, Homo sapien
gagcaaagcaaaggatgttcttagc

SEQ ID NO: 1114269 - DNA, 25 bp, Homo sapien
aaagcaaaggatgttcttagcagtc

SEQ ID NO: 1114270 - DNA, 25 bp, Homo sapien
cccaaaacactcttggtgtcattca

SEQ ID NO: 1114271 - DNA, 25 bp, Homo sapien
cattcattagttgctcactcttcct

SEQ ID NO: 1114272 - DNA, 25 bp, Homo sapien
ttgtagagtctaggtacaggtactc

SEQ ID NO: 1114273 - DNA, 25 bp, Homo sapien
atatagctgttgtaatgtccttccc

SEQ ID NO: 1114274 - DNA, 25 bp, Homo sapien
gctacccagcctgcaatacattgct

SEQ ID NO: 1114275 - DNA, 25 bp, Homo sapien
catgagaagtcatctattcccctaa

SEQ ID NO: 1114276 - DNA, 25 bp, Homo sapien
ggttataatggcgtaaatcttccac

SEQ ID NO: 1114277 - DNA, 25 bp, Homo sapien
ccccatcaatatgaagcctgtgaca

SEQ ID NO: 1114278 - DNA, 25 bp, Homo sapien
atattagataggctgtgttgttact

SEQ ID NO: 1114279 - DNA, 25 bp, Homo sapien
ccatcattgtatattagataggctg

SEQ ID NO: 1114280 - DNA, 25 bp, Homo sapien
gggactccatcattgtatattagat

SEQ ID NO: 1114281 - DNA, 25 bp, Homo sapien
ctttctgctgtaattcacaggttta

SEQ ID NO: 1114282 - DNA, 25 bp, Homo sapien
tcagccagaacccttgaactctgtt

SEQ ID NO: 1114283 - DNA, 25 bp, Homo sapien
gaatcagccagaacccttgaactct

SEQ ID NO: 1114284 - DNA, 25 bp, Homo sapien
agaacccttgaactctgttccacag

SEQ ID NO: 1114285 - DNA, 25 bp, Homo sapien
gaatgaatcagccagaacccttgaa

SEQ ID NO: 1114286 - DNA, 25 bp, Homo sapien
tgtgggtggataatcatagccttct

SEQ ID NO: 1114287 - DNA, 25 bp, Homo sapien
actttgtccatttcgtctccctgtg

SEQ ID NO: 1114288 - DNA, 25 bp, Homo sapien
agttatgcagatgccactttgtcca

SEQ ID NO: 1114289 - DNA, 25 bp, Homo sapien
tacttgaaagttatgcagatgccac

SEQ ID NO: 1114290 - DNA, 25 bp, Homo sapien
ctaagaatttttcgctgagcttgaa

SEQ ID NO: 1114291 - DNA, 25 bp, Homo sapien
atctaagaatttttcgctgagcttg

SEQ ID NO: 1114292 - DNA, 25 bp, Homo sapien
aaatctaagaatttttcgctgagct

SEQ ID NO: 1114293 - DNA, 25 bp, Homo sapien
aagaatttttcgctgagcttgaaat

SEQ ID NO: 1114294 - DNA, 25 bp, Homo sapien
ctgggatggagcagctatagacgtt

SEQ ID NO: 1114295 - DNA, 25 bp, Homo sapien
gagctcctggtgaaaggtggctggg

SEQ ID NO: 1114296 - DNA, 25 bp, Homo sapien
aatgagctcctggtgaaaggtggct

SEQ ID NO: 1114297 - DNA, 25 bp, Homo sapien
gggttgcagaccaagagctgagaat

SEQ ID NO: 1114298 - DNA, 25 bp, Homo sapien
ccgactgaagtgtggtgaggagcct

SEQ ID NO: 1114299 - DNA, 25 bp, Homo sapien
gaatttttgtccctgggccgactga

SEQ ID NO: 1114300 - DNA, 25 bp, Homo sapien
aagaatccgactttgcaaaatggag

SEQ ID NO: 1114301 - DNA, 25 bp, Homo sapien
cgtcaagaaaagaatccgactttgc

SEQ ID NO: 1114302 - DNA, 25 bp, Homo sapien
ggagatggctatggccccttgccaa

SEQ ID NO: 1114303 - DNA, 25 bp, Homo sapien
gagactgagttttcactggcccgtg

SEQ ID NO: 1114304 - DNA, 25 bp, Homo sapien
tatagccggctgatgtttgaactga

SEQ ID NO: 1114305 - DNA, 25 bp, Homo sapien
tttgtggttgactcatatagccggc

SEQ ID NO: 1114306 - DNA, 25 bp, Homo sapien
tctagtgcctaacacagggcttggc

SEQ ID NO: 1114307 - DNA, 25 bp, Homo sapien
gaacattgagcaagtgaaggccctg

SEQ ID NO: 1114308 - DNA, 25 bp, Homo sapien
gcttggctagtagtaggcattcagt

SEQ ID NO: 1114309 - DNA, 25 bp, Homo sapien
gacaaatcaaggtatgctgaggctg

SEQ ID NO: 1114310 - DNA, 25 bp, Homo sapien
tatttacacttagattagtccctga

SEQ ID NO: 1114311 - DNA, 25 bp, Homo sapien
gaatggaaatcatctttcacccctg

SEQ ID NO: 1114312 - DNA, 25 bp, Homo sapien
ggatgtcacgagcacaataataaca

SEQ ID NO: 1114313 - DNA, 25 bp, Homo sapien
tcacccctgatatgtggatgtcacg

SEQ ID NO: 1114314 - DNA, 25 bp, Homo sapien
caagtgtgtcttcagccgttgagcc

SEQ ID NO: 1114315 - DNA, 25 bp, Homo sapien
tcttcagccgttgagccatccaggc

SEQ ID NO: 1114316 - DNA, 25 bp, Homo sapien
gctcttgtctttttcgctgccaggt

SEQ ID NO: 1114317 - DNA, 25 bp, Homo sapien
gtgtcttcagccgttgagccatcca

SEQ ID NO: 1114318 - DNA, 25 bp, Homo sapien
ttgggaaatacaccacttggcatga

SEQ ID NO: 1114319 - DNA, 25 bp, Homo sapien
ggactccgatttaggtctccaatac

SEQ ID NO: 1114320 - DNA, 25 bp, Homo sapien
tctgaaggcttggtgtggactccga

SEQ ID NO: 1114321 - DNA, 25 bp, Homo sapien
tacatgtccagcgatttttggtgcc

SEQ ID NO: 1114322 - DNA, 25 bp, Homo sapien
gtgatatgcaggttataagtatatt

SEQ ID NO: 1114323 - DNA, 25 bp, Homo sapien
taagtatattcacaggcctttaaaa

SEQ ID NO: 1114324 - DNA, 25 bp, Homo sapien
gttttcaatgatagtacctgtgtcc

SEQ ID NO: 1114325 - DNA, 25 bp, Homo sapien
gaaggtgtaatggaagaagacccat

SEQ ID NO: 1114326 - DNA, 25 bp, Homo sapien
tactaggtggccagtcaatccataa

SEQ ID NO: 1114327 - DNA, 25 bp, Homo sapien
tatgtctatgatatatagtgcaaag

SEQ ID NO: 1114328 - DNA, 25 bp, Homo sapien
aacaattggagttgactaatgtgga

SEQ ID NO: 1114329 - DNA, 25 bp, Homo sapien
ggagaggaaatgtaatctactaggt

SEQ ID NO: 1114330 - DNA, 25 bp, Homo sapien
catccaattagtaagtagtagctga

SEQ ID NO: 1114331 - DNA, 25 bp, Homo sapien
ggaattcaaactcaaatgccaccat

SEQ ID NO: 1114332 - DNA, 25 bp, Homo sapien
caagtgaatggctcaagatcatcca

SEQ ID NO: 1114333 - DNA, 25 bp, Homo sapien
aagtgtcatctatgtgccgggctct

SEQ ID NO: 1114334 - DNA, 25 bp, Homo sapien
tatgcctgagaaagattagccctct

SEQ ID NO: 1114335 - DNA, 25 bp, Homo sapien
aaagatagttcctcagtctccctgc

SEQ ID NO: 1114336 - DNA, 25 bp, Homo sapien
tatcagcatgactgggtagccgtcc

SEQ ID NO: 1114337 - DNA, 25 bp, Homo sapien
tgtgcaacagcatgtataagcctgg

SEQ ID NO: 1114338 - DNA, 25 bp, Homo sapien
tcctcatgatggaggtaacttatat

SEQ ID NO: 1114339 - DNA, 25 bp, Homo sapien
tctggaccctataggaccactttgt

SEQ ID NO: 1114340 - DNA, 25 bp, Homo sapien
gaggtaacttatattctggacccta

SEQ ID NO: 1114341 - DNA, 25 bp, Homo sapien
taggaccactttgtattcttgttca

SEQ ID NO: 1114342 - DNA, 25 bp, Homo sapien
tgctctcagaacctgtagaccttct

SEQ ID NO: 1114343 - DNA, 25 bp, Homo sapien
agaacctgtagaccttcttcactct

SEQ ID NO: 1114344 - DNA, 25 bp, Homo sapien
ttgctctcagaacctgtagaccttc

SEQ ID NO: 1114345 - DNA, 25 bp, Homo sapien
tctcagaacctgtagaccttcttca

SEQ ID NO: 1114346 - DNA, 25 bp, Homo sapien
gggttccttgatgtatattgtcttc

SEQ ID NO: 1114347 - DNA, 25 bp, Homo sapien
ggaacgccagttctgttgcctctca

SEQ ID NO: 1114348 - DNA, 25 bp, Homo sapien
cataatatgtagataacgcagtagg

SEQ ID NO: 1114349 - DNA, 25 bp, Homo sapien
tagcccactggttctctttaaatga

SEQ ID NO: 1114350 - DNA, 25 bp, Homo sapien
cagttcccttatgcgggacaggcca

SEQ ID NO: 1114351 - DNA, 25 bp, Homo sapien
tccaatccaagtagcatctcaactg

SEQ ID NO: 1114352 - DNA, 25 bp, Homo sapien
ttctgacaccttccttagcaatgtg

SEQ ID NO: 1114353 - DNA, 25 bp, Homo sapien
tcaggaagccatacaagggcctctg

SEQ ID NO: 1114354 - DNA, 25 bp, Homo sapien
taatctccgaaatgctaaagcctgg

SEQ ID NO: 1114355 - DNA, 25 bp, Homo sapien
cgtgaacattaagtgtcgccgctgt

SEQ ID NO: 1114356 - DNA, 25 bp, Homo sapien
tgctgctgtttccaccgcgtgaaca

SEQ ID NO: 1114357 - DNA, 25 bp, Homo sapien
cctgaagttcttcggcagcggcttt

SEQ ID NO: 1114358 - DNA, 25 bp, Homo sapien
tagagtctccaaactagggcgaggg

SEQ ID NO: 1114359 - DNA, 25 bp, Homo sapien
taagcgtcaggaacaacgcgcaagc

SEQ ID NO: 1114360 - DNA, 25 bp, Homo sapien
agaacacttttgagaccagcagaca

SEQ ID NO: 1114361 - DNA, 25 bp, Homo sapien
ttcccacggagccacagagaacact

SEQ ID NO: 1114362 - DNA, 25 bp, Homo sapien
cccaggaaagagcctatcaagataa

SEQ ID NO: 1114363 - DNA, 25 bp, Homo sapien
cttgtgaatctagcgtcccaggaaa

SEQ ID NO: 1114364 - DNA, 25 bp, Homo sapien
agctttccttgtgaatctagcgtcc

SEQ ID NO: 1114365 - DNA, 25 bp, Homo sapien
tttccttgtgaatctagcgtcccag

SEQ ID NO: 1114366 - DNA, 25 bp, Homo sapien
cttatcgccaagagcctctctttct

SEQ ID NO: 1114367 - DNA, 25 bp, Homo sapien
cagcaaacagggcaaatgttcaaca

SEQ ID NO: 1114368 - DNA, 25 bp, Homo sapien
aaactgtgcagaagtaacaaggaga

SEQ ID NO: 1114369 - DNA, 25 bp, Homo sapien
taacaaagcgacatccgtacatgac

SEQ ID NO: 1114370 - DNA, 25 bp, Homo sapien
tactagaagaatggccaacactgaa

SEQ ID NO: 1114371 - DNA, 25 bp, Homo sapien
tcatacactcgctggttgtcaatgg

SEQ ID NO: 1114372 - DNA, 25 bp, Homo sapien
ggtttcatcatacactcgctggttg

SEQ ID NO: 1114373 - DNA, 25 bp, Homo sapien
tactgtggtttcatcatacactcgc

SEQ ID NO: 1114374 - DNA, 25 bp, Homo sapien
cactcgctggttgtcaatggtcttg

SEQ ID NO: 1114375 - DNA, 25 bp, Homo sapien
agtccattatgcaacttggccagcc

SEQ ID NO: 1114376 - DNA, 25 bp, Homo sapien
taccattcagggattatatgacaaa

SEQ ID NO: 1114377 - DNA, 25 bp, Homo sapien
atatgccaacattttagctgaatca

SEQ ID NO: 1114378 - DNA, 25 bp, Homo sapien
tctatagcattattgggaaattcaa

SEQ ID NO: 1114379 - DNA, 25 bp, Homo sapien
ggtctatctgatgttgtgatgagaa

SEQ ID NO: 1114380 - DNA, 25 bp, Homo sapien
aatcttgggagaagtctgtttgttg

SEQ ID NO: 1114381 - DNA, 25 bp, Homo sapien
gggagaagtctgtttgttgaagtaa

SEQ ID NO: 1114382 - DNA, 25 bp, Homo sapien
cccatgaggtctatctgatgttgtg

SEQ ID NO: 1114383 - DNA, 25 bp, Homo sapien
gagctgttcacagagtcgtactgtt

SEQ ID NO: 1114384 - DNA, 25 bp, Homo sapien
cattaataacaatcaggtctgtgaa

SEQ ID NO: 1114385 - DNA, 25 bp, Homo sapien
catgtgagtttggtataactgtgga

SEQ ID NO: 1114386 - DNA, 25 bp, Homo sapien
aaatctcttgcgatgcactgtggaa

SEQ ID NO: 1114387 - DNA, 25 bp, Homo sapien
ttttctgaaagttataggcaatatt

SEQ ID NO: 1114388 - DNA, 25 bp, Homo sapien
tattttctgaaagttataggcaata

SEQ ID NO: 1114389 - DNA, 25 bp, Homo sapien
ttctgaaagttataggcaatatttc

SEQ ID NO: 1114390 - DNA, 25 bp, Homo sapien
ctgaaagttataggcaatatttcct

SEQ ID NO: 1114391 - DNA, 25 bp, Homo sapien
cagtatgactgaggtgttactggca

SEQ ID NO: 1114392 - DNA, 25 bp, Homo sapien
tactggcatttagaatccaaaggcc

SEQ ID NO: 1114393 - DNA, 25 bp, Homo sapien
gcacaaataattaccctacctcaaa

SEQ ID NO: 1114394 - DNA, 25 bp, Homo sapien
tggaagctgccaagagtgtagcaca

SEQ ID NO: 1114395 - DNA, 25 bp, Homo sapien
tgtatggtcacgatatgctgtcaac

SEQ ID NO: 1114396 - DNA, 25 bp, Homo sapien
gaataacatcccatgagaccagact

SEQ ID NO: 1114397 - DNA, 25 bp, Homo sapien
taatagttaatcacgctcaataggg

SEQ ID NO: 1114398 - DNA, 25 bp, Homo sapien
gcaaatagagtatgagtttacctcc

SEQ ID NO: 1114399 - DNA, 25 bp, Homo sapien
aatttctttacgaagacgaacactg

SEQ ID NO: 1114400 - DNA, 25 bp, Homo sapien
ggcaagtgactcaaaataagtccat

SEQ ID NO: 1114401 - DNA, 25 bp, Homo sapien
cagttgggccatttggcaagtgact

SEQ ID NO: 1114402 - DNA, 25 bp, Homo sapien
tacgaagacgaacactgctcatttt

SEQ ID NO: 1114403 - DNA, 25 bp, Homo sapien
gagatgcaaacatacgtccaattga

SEQ ID NO: 1114404 - DNA, 25 bp, Homo sapien
gcaacctgccttccgataaattgag

SEQ ID NO: 1114405 - DNA, 25 bp, Homo sapien
tgattgtggaatgtggcaacctgcc

SEQ ID NO: 1114406 - DNA, 25 bp, Homo sapien
tccaattgaatgacccagccgtgtt

SEQ ID NO: 1114407 - DNA, 25 bp, Homo sapien
caaaggttcctttctgaagagacct

SEQ ID NO: 1114408 - DNA, 25 bp, Homo sapien
cttatggacccattcatactctcca

SEQ ID NO: 1114409 - DNA, 25 bp, Homo sapien
atttagaatcaaaggttcctttctg

SEQ ID NO: 1114410 - DNA, 25 bp, Homo sapien
gaatcaaaggttcctttctgaagag

SEQ ID NO: 1114411 - DNA, 25 bp, Homo sapien
taatgtttatacttcagatgagcca

SEQ ID NO: 1114412 - DNA, 25 bp, Homo sapien
taatggtgctggtctcgctttgaga

SEQ ID NO: 1114413 - DNA, 25 bp, Homo sapien
taataggttcctaggtaatggtgct

SEQ ID NO: 1114414 - DNA, 25 bp, Homo sapien
ggttaatcaccagacccagatattg

SEQ ID NO: 1114415 - DNA, 25 bp, Homo sapien
attttcttctacttgtatccatttc

SEQ ID NO: 1114416 - DNA, 25 bp, Homo sapien
tttcttctacttgtatccatttccc

SEQ ID NO: 1114417 - DNA, 25 bp, Homo sapien
cttctacttgtatccatttcccggg

SEQ ID NO: 1114418 - DNA, 25 bp, Homo sapien
tcttctacttgtatccatttcccgg

SEQ ID NO: 1114419 - DNA, 25 bp, Homo sapien
taccaaagttcaagataggcctgtt

SEQ ID NO: 1114420 - DNA, 25 bp, Homo sapien
ccaaagttcaagataggcctgttca

SEQ ID NO: 1114421 - DNA, 25 bp, Homo sapien
atttaccaaagttcaagataggcct

SEQ ID NO: 1114422 - DNA, 25 bp, Homo sapien
aagttcaagataggcctgttcagca

SEQ ID NO: 1114423 - DNA, 25 bp, Homo sapien
tcgtccagacgtgaaaggtttatga

SEQ ID NO: 1114424 - DNA, 25 bp, Homo sapien
acacagtggcaattcatggcatttg

SEQ ID NO: 1114425 - DNA, 25 bp, Homo sapien
aacacacagtggcaattcatggcat

SEQ ID NO: 1114426 - DNA, 25 bp, Homo sapien
catttggtaattcgtccagacgtga

SEQ ID NO: 1114427 - DNA, 25 bp, Homo sapien
ccatcaaaataacttttatttgtat

SEQ ID NO: 1114428 - DNA, 25 bp, Homo sapien
gccatcaaaataacttttatttgta

SEQ ID NO: 1114429 - DNA, 25 bp, Homo sapien
gcaagactgctagggaattaaaggt

SEQ ID NO: 1114430 - DNA, 25 bp, Homo sapien
cactgggaatccaaggttaatctgg

SEQ ID NO: 1114431 - DNA, 25 bp, Homo sapien
tgcaactttgctttaaaccctggta

SEQ ID NO: 1114432 - DNA, 25 bp, Homo sapien
taagttctacgggtttccatccatg

SEQ ID NO: 1114433 - DNA, 25 bp, Homo sapien
cacatgtgccataatatacaaactt

SEQ ID NO: 1114434 - DNA, 25 bp, Homo sapien
tgtacaaaagcttatccctgtaaca

SEQ ID NO: 1114435 - DNA, 25 bp, Homo sapien
tatccctgtaacacatgtgccataa

SEQ ID NO: 1114436 - DNA, 25 bp, Homo sapien
tatacaaacttctactttcgtcagt

SEQ ID NO: 1114437 - DNA, 25 bp, Homo sapien
cacatgaagaagtaattcactttca

SEQ ID NO: 1114438 - DNA, 25 bp, Homo sapien
agttcttgtattcactttacagtgg

SEQ ID NO: 1114439 - DNA, 25 bp, Homo sapien
tctgtataagtacatgtttccagta

SEQ ID NO: 1114440 - DNA, 25 bp, Homo sapien
ccctttgaaaacaggtgtcatgtgc

SEQ ID NO: 1114441 - DNA, 25 bp, Homo sapien
ggttctggtcgggatcattaaaggc

SEQ ID NO: 1114442 - DNA, 25 bp, Homo sapien
ttctggttctggtcgggatcattaa

SEQ ID NO: 1114443 - DNA, 25 bp, Homo sapien
tctggtcgggatcattaaaggcacc

SEQ ID NO: 1114444 - DNA, 25 bp, Homo sapien
cttcagtagacttctggttctggtc

SEQ ID NO: 1114445 - DNA, 25 bp, Homo sapien
gagtgtaaagttccggtcagtgccc

SEQ ID NO: 1114446 - DNA, 25 bp, Homo sapien
aaagcgtgcatttcatacctatggc

SEQ ID NO: 1114447 - DNA, 25 bp, Homo sapien
cgtacaacctcgaacaaagcgtgca

SEQ ID NO: 1114448 - DNA, 25 bp, Homo sapien
taagcatttttcgaaacgatcctgg

SEQ ID NO: 1114449 - DNA, 25 bp, Homo sapien
ttctcggctggtctcaccaacagct

SEQ ID NO: 1114450 - DNA, 25 bp, Homo sapien
ccttggcagccttctcggctggtct

SEQ ID NO: 1114451 - DNA, 25 bp, Homo sapien
tctcatcggacagggtattttccga

SEQ ID NO: 1114452 - DNA, 25 bp, Homo sapien
tattttccgacttttgattcagagc

SEQ ID NO: 1114453 - DNA, 25 bp, Homo sapien
ccccaggactttccgaggcgggctg

SEQ ID NO: 1114454 - DNA, 25 bp, Homo sapien
cgcgtgggtctacgctgtgttttag

SEQ ID NO: 1114455 - DNA, 25 bp, Homo sapien
tgaaccgtggccgacattccggtcc

SEQ ID NO: 1114456 - DNA, 25 bp, Homo sapien
ccctgggttgaaccgtggccgacat

SEQ ID NO: 1114457 - DNA, 25 bp, Homo sapien
ctatgaagaaagtggttcaacagct

SEQ ID NO: 1114458 - DNA, 25 bp, Homo sapien
gaagaaagtggttcaacagctccgg

SEQ ID NO: 1114459 - DNA, 25 bp, Homo sapien
tatgaagaaagtggttcaacagctc

SEQ ID NO: 1114460 - DNA, 25 bp, Homo sapien
tgaagaaagtggttcaacagctccg

SEQ ID NO: 1114461 - DNA, 25 bp, Homo sapien
cggcccggccgtcgcgtgcaccatg

SEQ ID NO: 1114462 - DNA, 25 bp, Homo sapien
cgaatcggcccggccgtcgcgtgca

SEQ ID NO: 1114463 - DNA, 25 bp, Homo sapien
ccggccgtcgcgtgcaccatgtctg

SEQ ID NO: 1114464 - DNA, 25 bp, Homo sapien
atcggcccggccgtcgcgtgcacca

SEQ ID NO: 1114465 - DNA, 25 bp, Homo sapien
aaacttaagagtcgggtcgcgctag

SEQ ID NO: 1114466 - DNA, 25 bp, Homo sapien
cttaagagtcgggtcgcgctagcct

SEQ ID NO: 1114467 - DNA, 25 bp, Homo sapien
gtcgggtcgcgctagcctccagcag

SEQ ID NO: 1114468 - DNA, 25 bp, Homo sapien
taagagtcgggtcgcgctagcctcc

SEQ ID NO: 1114469 - DNA, 25 bp, Homo sapien
cttcgcggctaacggtaagctctct

SEQ ID NO: 1114470 - DNA, 25 bp, Homo sapien
cgcggctaacggtaagctctctcct

SEQ ID NO: 1114471 - DNA, 25 bp, Homo sapien
ccctcttagttcttcgcggctaacg

SEQ ID NO: 1114472 - DNA, 25 bp, Homo sapien
tcctcttcagaccccctcttagttc

SEQ ID NO: 1114473 - DNA, 25 bp, Homo sapien
gctccgctgggtacgcgacagcgac

SEQ ID NO: 1114474 - DNA, 25 bp, Homo sapien
taaagtcaaacctcgagaagatccc

SEQ ID NO: 1114475 - DNA, 25 bp, Homo sapien
aaaccgattcaagagctaagaagcc

SEQ ID NO: 1114476 - DNA, 25 bp, Homo sapien
gaagatcccttctccagcgaatcag

SEQ ID NO: 1114477 - DNA, 25 bp, Homo sapien
gaaacatctgcccttagtgctgtga

SEQ ID NO: 1114478 - DNA, 25 bp, Homo sapien
gagcagacaggtgtaatcttcagcc

SEQ ID NO: 1114479 - DNA, 25 bp, Homo sapien
cagcgcattcggagattgactaccc

SEQ ID NO: 1114480 - DNA, 25 bp, Homo sapien
tgttgaccagtgcaattacacatgc

SEQ ID NO: 1114481 - DNA, 25 bp, Homo sapien
tcctgggttcgagaaatctacctgc

SEQ ID NO: 1114482 - DNA, 25 bp, Homo sapien
agatagcattccactcatttctggt

SEQ ID NO: 1114483 - DNA, 25 bp, Homo sapien
gatagcattccactcatttctggtc

SEQ ID NO: 1114484 - DNA, 25 bp, Homo sapien
atagcattccactcatttctggtct

SEQ ID NO: 1114485 - DNA, 25 bp, Homo sapien
taatgtctgaatgggataattatca

SEQ ID NO: 1114486 - DNA, 25 bp, Homo sapien
tctgaatgggataattatcaattgg

SEQ ID NO: 1114487 - DNA, 25 bp, Homo sapien
attcactaatgtctgaatgggataa

SEQ ID NO: 1114488 - DNA, 25 bp, Homo sapien
cactaatgtctgaatgggataatta

SEQ ID NO: 1114489 - DNA, 25 bp, Homo sapien
aggaaggtcgacttggattgagtga

SEQ ID NO: 1114490 - DNA, 25 bp, Homo sapien
aaggtcgacttggattgagtgacat

SEQ ID NO: 1114491 - DNA, 25 bp, Homo sapien
tctgatgaggaaggtcgacttggat

SEQ ID NO: 1114492 - DNA, 25 bp, Homo sapien
ctctgatgaggaaggtcgacttgga

SEQ ID NO: 1114493 - DNA, 25 bp, Homo sapien
attttctccctattacagttctgat

SEQ ID NO: 1114494 - DNA, 25 bp, Homo sapien
ctattacagttctgatgattgctag

SEQ ID NO: 1114495 - DNA, 25 bp, Homo sapien
tcactccccacctactcagttccat

SEQ ID NO: 1114496 - DNA, 25 bp, Homo sapien
tactcagttccattggggtgatccc

SEQ ID NO: 1114497 - DNA, 25 bp, Homo sapien
tatttagcttatagttccatgatcc

SEQ ID NO: 1114498 - DNA, 25 bp, Homo sapien
tgaatttgttaacaacttctgttga

SEQ ID NO: 1114499 - DNA, 25 bp, Homo sapien
aatggtatttagcttatagttccat

SEQ ID NO: 1114500 - DNA, 25 bp, Homo sapien
tagcttatagttccatgatccttca

SEQ ID NO: 1114501 - DNA, 25 bp, Homo sapien
gcatattgttacatgactacacaac

SEQ ID NO: 1114502 - DNA, 25 bp, Homo sapien
caggcatattgttacatgactacac

SEQ ID NO: 1114503 - DNA, 25 bp, Homo sapien
ggcatattgttacatgactacacaa

SEQ ID NO: 1114504 - DNA, 25 bp, Homo sapien
gattcttctttcaggcatattgtta

SEQ ID NO: 1114505 - DNA, 25 bp, Homo sapien
tcgtaaagtaagttgaggagatact

SEQ ID NO: 1114506 - DNA, 25 bp, Homo sapien
tcacccaggaactcaccaagacgct

SEQ ID NO: 1114507 - DNA, 25 bp, Homo sapien
ttctgcaatagcatcttcacccagg

SEQ ID NO: 1114508 - DNA, 25 bp, Homo sapien
aagacgctccctcagggctcgtaaa

SEQ ID NO: 1114509 - DNA, 25 bp, Homo sapien
aatgatttgagtttcagttctgatt

SEQ ID NO: 1114510 - DNA, 25 bp, Homo sapien
atgatttgagtttcagttctgattc

SEQ ID NO: 1114511 - DNA, 25 bp, Homo sapien
gattcttgttaggaagctctttcaa

SEQ ID NO: 1114512 - DNA, 25 bp, Homo sapien
taacaccattattagtctgccgctc

SEQ ID NO: 1114513 - DNA, 25 bp, Homo sapien
ggattgttccatcagcctcattaac

SEQ ID NO: 1114514 - DNA, 25 bp, Homo sapien
taaatggtccattacaggaagcaaa

SEQ ID NO: 1114515 - DNA, 25 bp, Homo sapien
ctaaaatgtactataatagcctctt

SEQ ID NO: 1114516 - DNA, 25 bp, Homo sapien
taaaatgtactataatagcctcttt

SEQ ID NO: 1114517 - DNA, 25 bp, Homo sapien
aatgtactataatagcctctttctt

SEQ ID NO: 1114518 - DNA, 25 bp, Homo sapien
aaaatgtactataatagcctctttc

SEQ ID NO: 1114519 - DNA, 25 bp, Homo sapien
tggtctctgagtaataccaaagttt

SEQ ID NO: 1114520 - DNA, 25 bp, Homo sapien
taggtttgctcagggtttgcttaca

SEQ ID NO: 1114521 - DNA, 25 bp, Homo sapien
aaagttttatgcagtcacctttcct

SEQ ID NO: 1114522 - DNA, 25 bp, Homo sapien
tctgaaatacgtatgttccccaaca

SEQ ID NO: 1114523 - DNA, 25 bp, Homo sapien
attttaatataagaggctttaagag

SEQ ID NO: 1114524 - DNA, 25 bp, Homo sapien
taatataagaggctttaagagtctg

SEQ ID NO: 1114525 - DNA, 25 bp, Homo sapien
taatgacacagatctatatttatta

SEQ ID NO: 1114526 - DNA, 25 bp, Homo sapien
tataagaggctttaagagtctgtat

SEQ ID NO: 1114527 - DNA, 25 bp, Homo sapien
agtttcttgactttaagttctgatt

SEQ ID NO: 1114528 - DNA, 25 bp, Homo sapien
ctggcacactgtccaatcctgagaa

SEQ ID NO: 1114529 - DNA, 25 bp, Homo sapien
gaagtttcttgactttaagttctga

SEQ ID NO: 1114530 - DNA, 25 bp, Homo sapien
ggcacactgtccaatcctgagaagt

SEQ ID NO: 1114531 - DNA, 25 bp, Homo sapien
tttgaatcttccaatgatcctggca

SEQ ID NO: 1114532 - DNA, 25 bp, Homo sapien
atgatcctggcaactcagaatttcc

SEQ ID NO: 1114533 - DNA, 25 bp, Homo sapien
gaatcttccaatgatcctggcaact

SEQ ID NO: 1114534 - DNA, 25 bp, Homo sapien
tccaatgatcctggcaactcagaat

SEQ ID NO: 1114535 - DNA, 25 bp, Homo sapien
aaacatgatcccatgaatattagct

SEQ ID NO: 1114536 - DNA, 25 bp, Homo sapien
tgatcccatgaatattagcttttca

SEQ ID NO: 1114537 - DNA, 25 bp, Homo sapien
aaggaaatgacaggtttgaaagtca

SEQ ID NO: 1114538 - DNA, 25 bp, Homo sapien
gaaatgacaggtttgaaagtcatta

SEQ ID NO: 1114539 - DNA, 25 bp, Homo sapien
gtcttctactgatagctgtatcatc

SEQ ID NO: 1114540 - DNA, 25 bp, Homo sapien
gattgtcctgtcttctactgatagc

SEQ ID NO: 1114541 - DNA, 25 bp, Homo sapien
tactgatagctgtatcatcttcatt

SEQ ID NO: 1114542 - DNA, 25 bp, Homo sapien
tgtcctgtcttctactgatagctgt

SEQ ID NO: 1114543 - DNA, 25 bp, Homo sapien
tgttgaggccatcaccagaactacg

SEQ ID NO: 1114544 - DNA, 25 bp, Homo sapien
ctaggtctggtctcctaaaatgatg

SEQ ID NO: 1114545 - DNA, 25 bp, Homo sapien
tctggtctcctaaaatgatgtttcc

SEQ ID NO: 1114546 - DNA, 25 bp, Homo sapien
gatgtttccattagtgaaattacca

SEQ ID NO: 1114547 - DNA, 25 bp, Homo sapien
ggtgctcctgatttaagaaacacag

SEQ ID NO: 1114548 - DNA, 25 bp, Homo sapien
aaacaaacacgccatgaagcagaga

SEQ ID NO: 1114549 - DNA, 25 bp, Homo sapien
tataaaataatctagcactcatgca

SEQ ID NO: 1114550 - DNA, 25 bp, Homo sapien
gagaaaaacttaccaatgctcccaa

SEQ ID NO: 1114551 - DNA, 25 bp, Homo sapien
tcagttacccacggtacagtacaat

SEQ ID NO: 1114552 - DNA, 25 bp, Homo sapien
cagttacccacggtacagtacaata

SEQ ID NO: 1114553 - DNA, 25 bp, Homo sapien
ttcagttacccacggtacagtacaa

SEQ ID NO: 1114554 - DNA, 25 bp, Homo sapien
tttcacttgcccgtaggtatttgat

SEQ ID NO: 1114555 - DNA, 25 bp, Homo sapien
gcccgtaggtatttgataatgcaaa

SEQ ID NO: 1114556 - DNA, 25 bp, Homo sapien
taagatcggctacactgtcacattc

SEQ ID NO: 1114557 - DNA, 25 bp, Homo sapien
tgaaaatgagtaagatcggctacac

SEQ ID NO: 1114558 - DNA, 25 bp, Homo sapien
agaacaggttgacaaggaagtgaag

SEQ ID NO: 1114559 - DNA, 25 bp, Homo sapien
tgaagaaagaacaggttgacaagga

SEQ ID NO: 1114560 - DNA, 25 bp, Homo sapien
agtgaagggtgatctggtagggtga

SEQ ID NO: 1114561 - DNA, 25 bp, Homo sapien
gtagggtgatgtactctttttcagc

SEQ ID NO: 1114562 - DNA, 25 bp, Homo sapien
ttcagtttgtaataaagatatatca

SEQ ID NO: 1114563 - DNA, 25 bp, Homo sapien
tttcagtttgtaataaagatatatc

SEQ ID NO: 1114564 - DNA, 25 bp, Homo sapien
tcagtttgtaataaagatatatcag

SEQ ID NO: 1114565 - DNA, 25 bp, Homo sapien
tcctttacttgtttcatttgtttga

SEQ ID NO: 1114566 - DNA, 25 bp, Homo sapien
cttgtttcatttgtttgataatctt

SEQ ID NO: 1114567 - DNA, 25 bp, Homo sapien
tgtttcatttgtttgataatcttct

SEQ ID NO: 1114568 - DNA, 25 bp, Homo sapien
tctttccagataccttctttcttcc

SEQ ID NO: 1114569 - DNA, 25 bp, Homo sapien
catgatatcgttttaatttgctttg

SEQ ID NO: 1114570 - DNA, 25 bp, Homo sapien
tgctttgttcaaatagcttttcaac

SEQ ID NO: 1114571 - DNA, 25 bp, Homo sapien
tatcgttttaatttgctttgttcaa

SEQ ID NO: 1114572 - DNA, 25 bp, Homo sapien
ttgctttgttcaaatagcttttcaa

SEQ ID NO: 1114573 - DNA, 25 bp, Homo sapien
atctccctggcttcaagttgcatga

SEQ ID NO: 1114574 - DNA, 25 bp, Homo sapien
gatgctgtgactttctttgtttcca

SEQ ID NO: 1114575 - DNA, 25 bp, Homo sapien
agagttccaaatcttctcgaagttt

SEQ ID NO: 1114576 - DNA, 25 bp, Homo sapien
tgttaaaacctcctccattgatgct

SEQ ID NO: 1114577 - DNA, 25 bp, Homo sapien
agctggtcaattgcatgctgtacct

SEQ ID NO: 1114578 - DNA, 25 bp, Homo sapien
tcagtgatctggattattaggtaat

SEQ ID NO: 1114579 - DNA, 25 bp, Homo sapien
tcttaagctggtcaattgcatgctg

SEQ ID NO: 1114580 - DNA, 25 bp, Homo sapien
tttgtcagtatctagttttctctta

SEQ ID NO: 1114581 - DNA, 25 bp, Homo sapien
taagcatgcttatctactggtgaga

SEQ ID NO: 1114582 - DNA, 25 bp, Homo sapien
ccttgtttatgagtagatagggaca

SEQ ID NO: 1114583 - DNA, 25 bp, Homo sapien
catcatagttgtcatgtaaacaggg

SEQ ID NO: 1114584 - DNA, 25 bp, Homo sapien
agtgctttcaactcccactggatta

SEQ ID NO: 1114585 - DNA, 25 bp, Homo sapien
ttcaatgttcgtaaatctgaaactg

SEQ ID NO: 1114586 - DNA, 25 bp, Homo sapien
gttcgtaaatctgaaactgcttgtt

SEQ ID NO: 1114587 - DNA, 25 bp, Homo sapien
ctaattgagattgtagagatgtatt

SEQ ID NO: 1114588 - DNA, 25 bp, Homo sapien
caatgttcgtaaatctgaaactgct

SEQ ID NO: 1114589 - DNA, 25 bp, Homo sapien
tgcagttgaacttgattctgttcac

SEQ ID NO: 1114590 - DNA, 25 bp, Homo sapien
aataataggaataacttgcagttga

SEQ ID NO: 1114591 - DNA, 25 bp, Homo sapien
cactgtcacacttctaattattcat

SEQ ID NO: 1114592 - DNA, 25 bp, Homo sapien
taggaataacttgcagttgaacttg

SEQ ID NO: 1114593 - DNA, 25 bp, Homo sapien
taaagccaaagctgttacagagatg

SEQ ID NO: 1114594 - DNA, 25 bp, Homo sapien
aatgcaaactgtcttgactactctg

SEQ ID NO: 1114595 - DNA, 25 bp, Homo sapien
tatatacaaaactatcgcttacggg

SEQ ID NO: 1114596 - DNA, 25 bp, Homo sapien
gccactttcatcaagtatggtatga

SEQ ID NO: 1114597 - DNA, 25 bp, Homo sapien
ttgacttggctgattcatcataaac

SEQ ID NO: 1114598 - DNA, 25 bp, Homo sapien
acttggctgattcatcataaacaaa

SEQ ID NO: 1114599 - DNA, 25 bp, Homo sapien
tttgacttggctgattcatcataaa

SEQ ID NO: 1114600 - DNA, 25 bp, Homo sapien
aggatgtacttttctcctccattgc

SEQ ID NO: 1114601 - DNA, 25 bp, Homo sapien
ctagaaaaggatgtacttttctcct

SEQ ID NO: 1114602 - DNA, 25 bp, Homo sapien
aaaggatgtacttttctcctccatt

SEQ ID NO: 1114603 - DNA, 25 bp, Homo sapien
gaaaaggatgtacttttctcctcca

SEQ ID NO: 1114604 - DNA, 25 bp, Homo sapien
tgggtttgcccctgaatcttcaata

SEQ ID NO: 1114605 - DNA, 25 bp, Homo sapien
gagactattctaattccaggagtgc

SEQ ID NO: 1114606 - DNA, 25 bp, Homo sapien
gcaatagcagctcatcttggactca

SEQ ID NO: 1114607 - DNA, 25 bp, Homo sapien
caactattactagggcatgcatggc

SEQ ID NO: 1114608 - DNA, 25 bp, Homo sapien
cagaatgtattgcagcagccaatgc

SEQ ID NO: 1114609 - DNA, 25 bp, Homo sapien
taaaaatctgacgtaatatgcacac

SEQ ID NO: 1114610 - DNA, 25 bp, Homo sapien
ttcaagttctatgtgtgtcaaaccc

SEQ ID NO: 1114611 - DNA, 25 bp, Homo sapien
gatgtagcttggtctccaaagaaca

SEQ ID NO: 1114612 - DNA, 25 bp, Homo sapien
gcttcagggcacgaagagaagttag

SEQ ID NO: 1114613 - DNA, 25 bp, Homo sapien
catccagatttcgaggtcagcgcct

SEQ ID NO: 1114614 - DNA, 25 bp, Homo sapien
ttcgacgctggcgcctcgtctctag

SEQ ID NO: 1114615 - DNA, 25 bp, Homo sapien
ggagcctgagctctgccgcccgatt

SEQ ID NO: 1114616 - DNA, 25 bp, Homo sapien
ctgctgtgagcttgatcaagtcact

SEQ ID NO: 1114617 - DNA, 25 bp, Homo sapien
tgctgtgagcttgatcaagtcactg

SEQ ID NO: 1114618 - DNA, 25 bp, Homo sapien
gctgtgagcttgatcaagtcactgc

SEQ ID NO: 1114619 - DNA, 25 bp, Homo sapien
gctgctgtgagcttgatcaagtcac

SEQ ID NO: 1114620 - DNA, 25 bp, Homo sapien
cattgcggtcacttgcttcttgggc

SEQ ID NO: 1114621 - DNA, 25 bp, Homo sapien
cacagattggttcagtcaggcgtga

SEQ ID NO: 1114622 - DNA, 25 bp, Homo sapien
ctgcagtcaggaaagcttggaggca

SEQ ID NO: 1114623 - DNA, 25 bp, Homo sapien
tagtcaggcttgagaaggcattgtc

SEQ ID NO: 1114624 - DNA, 25 bp, Homo sapien
cctgcttagtctattctgctatgaa

SEQ ID NO: 1114625 - DNA, 25 bp, Homo sapien
tatttcggaaagataggcttcaagc

SEQ ID NO: 1114626 - DNA, 25 bp, Homo sapien
ttgggttacaacatgcctctttagc

SEQ ID NO: 1114627 - DNA, 25 bp, Homo sapien
taaactggctattttggctctcagc

SEQ ID NO: 1114628 - DNA, 25 bp, Homo sapien
tcacataacacaagttcgtggccat

SEQ ID NO: 1114629 - DNA, 25 bp, Homo sapien
gacctgctgccgcttttgctactgt

SEQ ID NO: 1114630 - DNA, 25 bp, Homo sapien
tgctgtgtcagagctcgaggtgtca

SEQ ID NO: 1114631 - DNA, 25 bp, Homo sapien
caagttcgtggccatggaggctgct

SEQ ID NO: 1114632 - DNA, 25 bp, Homo sapien
cacttccgcattgaagtcacaggat

SEQ ID NO: 1114633 - DNA, 25 bp, Homo sapien
gaaattgatcacttccgcattgaag

SEQ ID NO: 1114634 - DNA, 25 bp, Homo sapien
ctgcaggttgaaattgatcacttcc

SEQ ID NO: 1114635 - DNA, 25 bp, Homo sapien
caggttgaaattgatcacttccgca

SEQ ID NO: 1114636 - DNA, 25 bp, Homo sapien
cttagaggacggtgataatggtcat

SEQ ID NO: 1114637 - DNA, 25 bp, Homo sapien
aggacggtgataatggtcatgtgta

SEQ ID NO: 1114638 - DNA, 25 bp, Homo sapien
gacggtgataatggtcatgtgtaac

SEQ ID NO: 1114639 - DNA, 25 bp, Homo sapien
tagaggacggtgataatggtcatgt

SEQ ID NO: 1114640 - DNA, 25 bp, Homo sapien
tcataatcggtagtgctgggcagct

SEQ ID NO: 1114641 - DNA, 25 bp, Homo sapien
ctggcggccgaagtccactgttttt

SEQ ID NO: 1114642 - DNA, 25 bp, Homo sapien
aagtttctgctggcggccgaagtcc

SEQ ID NO: 1114643 - DNA, 25 bp, Homo sapien
gggcagctgttatatctagaacaag

SEQ ID NO: 1114644 - DNA, 25 bp, Homo sapien
agcagtacccagctgtttagtaacc

SEQ ID NO: 1114645 - DNA, 25 bp, Homo sapien
agtacccagctgtttagtaaccacg

SEQ ID NO: 1114646 - DNA, 25 bp, Homo sapien
tagtaaccacgctctgattggtgtg

SEQ ID NO: 1114647 - DNA, 25 bp, Homo sapien
cagctgtttagtaaccacgctctga

SEQ ID NO: 1114648 - DNA, 25 bp, Homo sapien
tggggaagtcctgtagtgctccctg

SEQ ID NO: 1114649 - DNA, 25 bp, Homo sapien
gcctgtggggaagtcctgtagtgct

SEQ ID NO: 1114650 - DNA, 25 bp, Homo sapien
tgccatcattggtggtgtccctcgg

SEQ ID NO: 1114651 - DNA, 25 bp, Homo sapien
tgtggggaagtcctgtagtgctccc

SEQ ID NO: 1114652 - DNA, 25 bp, Homo sapien
cctaggaagagaagaactaaaactg

SEQ ID NO: 1114653 - DNA, 25 bp, Homo sapien
ttatcctaggaagagaagaactaaa

SEQ ID NO: 1114654 - DNA, 25 bp, Homo sapien
taggaagagaagaactaaaactggc

SEQ ID NO: 1114655 - DNA, 25 bp, Homo sapien
agagaagaactaaaactggcccctg

SEQ ID NO: 1114656 - DNA, 25 bp, Homo sapien
caagattaccatgtttttcagccat

SEQ ID NO: 1114657 - DNA, 25 bp, Homo sapien
tgtggatataacatgtcctagttgc

SEQ ID NO: 1114658 - DNA, 25 bp, Homo sapien
tcctagttgccacaagattaccatg

SEQ ID NO: 1114659 - DNA, 25 bp, Homo sapien
tataacatgtcctagttgccacaag

SEQ ID NO: 1114660 - DNA, 25 bp, Homo sapien
caagtgcctgattgcatgccgctga

SEQ ID NO: 1114661 - DNA, 25 bp, Homo sapien
gacggactgagcttgagaaatgatc

SEQ ID NO: 1114662 - DNA, 25 bp, Homo sapien
gaatctgatgaacttgcaagtgcct

SEQ ID NO: 1114663 - DNA, 25 bp, Homo sapien
tgttgcccgacaggtctggacggac

SEQ ID NO: 1114664 - DNA, 25 bp, Homo sapien
ccaaatcagagcgagcagactagca

SEQ ID NO: 1114665 - DNA, 25 bp, Homo sapien
taaacattaagtcggtgtggcgtaa

SEQ ID NO: 1114666 - DNA, 25 bp, Homo sapien
tatgaagctcctgataaagatccac

SEQ ID NO: 1114667 - DNA, 25 bp, Homo sapien
ttagctatgccatctggacgcatgg

SEQ ID NO: 1114668 - DNA, 25 bp, Homo sapien
tgaatctagtcttgactgcccctgg

SEQ ID NO: 1114669 - DNA, 25 bp, Homo sapien
ctgcccctggtggaacatttgaaag

SEQ ID NO: 1114670 - DNA, 25 bp, Homo sapien
cgcatgatgaagagagcaccgtgaa

SEQ ID NO: 1114671 - DNA, 25 bp, Homo sapien
taaatttgtgagttagcaagaccct

SEQ ID NO: 1114672 - DNA, 25 bp, Homo sapien
gacactaccatatgctaaaggaaga

SEQ ID NO: 1114673 - DNA, 25 bp, Homo sapien
gaagaaatctagctgggatatagga

SEQ ID NO: 1114674 - DNA, 25 bp, Homo sapien
cacattgtacaaaatatcgaagaca

SEQ ID NO: 1114675 - DNA, 25 bp, Homo sapien
tcactaccttcagcttgatgcatgg

SEQ ID NO: 1114676 - DNA, 25 bp, Homo sapien
atttaccttcccctgtactggcagt

SEQ ID NO: 1114677 - DNA, 25 bp, Homo sapien
gtctctgtacatagaagcctgcaca

SEQ ID NO: 1114678 - DNA, 25 bp, Homo sapien
gctttaagtgcctaaccctgcttgt

SEQ ID NO: 1114679 - DNA, 25 bp, Homo sapien
taatatctgtatactaactagggct

SEQ ID NO: 1114680 - DNA, 25 bp, Homo sapien
gatttttaacaaagcgagttctata

SEQ ID NO: 1114681 - DNA, 25 bp, Homo sapien
cctttacttgaatgtatactgtaga

SEQ ID NO: 1114682 - DNA, 25 bp, Homo sapien
ttggcattggaagtttagcctttac

SEQ ID NO: 1114683 - DNA, 25 bp, Homo sapien
tagcctttacttgaatgtatactgt

SEQ ID NO: 1114684 - DNA, 25 bp, Homo sapien
gatggtctgagttgtttgtttggac

SEQ ID NO: 1114685 - DNA, 25 bp, Homo sapien
caaaagcactagactgagtttcctc

SEQ ID NO: 1114686 - DNA, 25 bp, Homo sapien
caaagagttgaaatcttaaatctat

SEQ ID NO: 1114687 - DNA, 25 bp, Homo sapien
aacaaaagcactagactgagtttcc

SEQ ID NO: 1114688 - DNA, 25 bp, Homo sapien
taccttagacatgtggactggaatt

SEQ ID NO: 1114689 - DNA, 25 bp, Homo sapien
tgagctacacaaattctcatgtaga

SEQ ID NO: 1114690 - DNA, 25 bp, Homo sapien
aagatgacttaccttagacatgtgg

SEQ ID NO: 1114691 - DNA, 25 bp, Homo sapien
gtttcacatctaagttgaaacaggg

SEQ ID NO: 1114692 - DNA, 25 bp, Homo sapien
gattaaactaggcatgcactactac

SEQ ID NO: 1114693 - DNA, 25 bp, Homo sapien
ttaaactaggcatgcactactactc

SEQ ID NO: 1114694 - DNA, 25 bp, Homo sapien
aactaggcatgcactactactccca

SEQ ID NO: 1114695 - DNA, 25 bp, Homo sapien
taaactaggcatgcactactactcc

SEQ ID NO: 1114696 - DNA, 25 bp, Homo sapien
taaacaacatccgtggcatagaaac

SEQ ID NO: 1114697 - DNA, 25 bp, Homo sapien
aaaggctgtgccttagattccaggc

SEQ ID NO: 1114698 - DNA, 25 bp, Homo sapien
gaagcattttggatctcggtttata

SEQ ID NO: 1114699 - DNA, 25 bp, Homo sapien
aaatcatagggtgttgcaagttaaa

SEQ ID NO: 1114700 - DNA, 25 bp, Homo sapien
cagccagtgggtagtatcctgtata

SEQ ID NO: 1114701 - DNA, 25 bp, Homo sapien
ggaatgcctaggtagcatccacatt

SEQ ID NO: 1114702 - DNA, 25 bp, Homo sapien
gatttttgaagcattatagcaagag

SEQ ID NO: 1114703 - DNA, 25 bp, Homo sapien
tttaagtggatgaacaatgacctct

SEQ ID NO: 1114704 - DNA, 25 bp, Homo sapien
cctcaggtatgaagactgcattacc

SEQ ID NO: 1114705 - DNA, 25 bp, Homo sapien
tccctcaggtatgaagactgcatta

SEQ ID NO: 1114706 - DNA, 25 bp, Homo sapien
ccctcaggtatgaagactgcattac

SEQ ID NO: 1114707 - DNA, 25 bp, Homo sapien
tgatgggccagattcccacagacat

SEQ ID NO: 1114708 - DNA, 25 bp, Homo sapien
tagttggggaaaagtctggcctctg

SEQ ID NO: 1114709 - DNA, 25 bp, Homo sapien
ccagggggagagtccacttttgcca

SEQ ID NO: 1114710 - DNA, 25 bp, Homo sapien
tgccaggtctgccagtactccatgg

SEQ ID NO: 1114711 - DNA, 25 bp, Homo sapien
ggagctgcgcctgcggagcgctctg

SEQ ID NO: 1114712 - DNA, 25 bp, Homo sapien
ctcagcgccccgttgttcggcggga

SEQ ID NO: 1114713 - DNA, 25 bp, Homo sapien
ccgttgcagggtgcgggcgagcgtc

SEQ ID NO: 1114714 - DNA, 25 bp, Homo sapien
ctctcgctggcgttcgcggagctgc

SEQ ID NO: 1114715 - DNA, 25 bp, Homo sapien
ggctcggaaaacgtgctctaaagta

SEQ ID NO: 1114716 - DNA, 25 bp, Homo sapien
ttcagtggggctcggaaaacgtgct

SEQ ID NO: 1114717 - DNA, 25 bp, Homo sapien
gtgctctaaagtagccacgaccccg

SEQ ID NO: 1114718 - DNA, 25 bp, Homo sapien
ggctctcctggaagcttcacttttg

SEQ ID NO: 1114719 - DNA, 25 bp, Homo sapien
ctaggtgcccgcagtttatttctcc

SEQ ID NO: 1114720 - DNA, 25 bp, Homo sapien
tctaggtgcccgcagtttatttctc

SEQ ID NO: 1114721 - DNA, 25 bp, Homo sapien
cctaattctaggtgcccgcagttta

SEQ ID NO: 1114722 - DNA, 25 bp, Homo sapien
ctgacctaattctaggtgcccgcag

SEQ ID NO: 1114723 - DNA, 25 bp, Homo sapien
gattgtttgcatccacgactcccga

SEQ ID NO: 1114724 - DNA, 25 bp, Homo sapien
tacatataactttctcccggctgga

SEQ ID NO: 1114725 - DNA, 25 bp, Homo sapien
gccacgggtgcagcaggcatacatt

SEQ ID NO: 1114726 - DNA, 25 bp, Homo sapien
cccagtgaattttaggctgccatga

SEQ ID NO: 1114727 - DNA, 25 bp, Homo sapien
gatacgtgcatgcaaactgggaggt

SEQ ID NO: 1114728 - DNA, 25 bp, Homo sapien
gagaccgctggtttattcaggcaga

SEQ ID NO: 1114729 - DNA, 25 bp, Homo sapien
tgttaatggtaacgccacctgggct

SEQ ID NO: 1114730 - DNA, 25 bp, Homo sapien
cctgaagttgtcaccgtggcgtgct

SEQ ID NO: 1114731 - DNA, 25 bp, Homo sapien
cattaaagatatgggcaaaatttta

SEQ ID NO: 1114732 - DNA, 25 bp, Homo sapien
tacaggtaaaagttcaggagaatcc

SEQ ID NO: 1114733 - DNA, 25 bp, Homo sapien
gatacaattacaggtaaaagttcag

SEQ ID NO: 1114734 - DNA, 25 bp, Homo sapien
gagcctcttgcaatttagatacaat

SEQ ID NO: 1114735 - DNA, 25 bp, Homo sapien
caagtccaacacttggagctttagg

SEQ ID NO: 1114736 - DNA, 25 bp, Homo sapien
tcagcagatggcaaatgcgaacaga

SEQ ID NO: 1114737 - DNA, 25 bp, Homo sapien
ctttgaggatcagatagacttcccc

SEQ ID NO: 1114738 - DNA, 25 bp, Homo sapien
gcaaatgcgaacagaagactttgag

SEQ ID NO: 1114739 - DNA, 25 bp, Homo sapien
ggatcagatagacttccccgcatac

SEQ ID NO: 1114740 - DNA, 25 bp, Homo sapien
tttatggctcttagttgaagaaact

SEQ ID NO: 1114741 - DNA, 25 bp, Homo sapien
tattttatggctcttagttgaagaa

SEQ ID NO: 1114742 - DNA, 25 bp, Homo sapien
attttatggctcttagttgaagaaa

SEQ ID NO: 1114743 - DNA, 25 bp, Homo sapien
ttttatggctcttagttgaagaaac

SEQ ID NO: 1114744 - DNA, 25 bp, Homo sapien
ttgttgatgaacttgttctttggac

SEQ ID NO: 1114745 - DNA, 25 bp, Homo sapien
gagagggatgaaatcgagagattag

SEQ ID NO: 1114746 - DNA, 25 bp, Homo sapien
cctgctatagtgaatttgatttctg

SEQ ID NO: 1114747 - DNA, 25 bp, Homo sapien
tctccacccactgaggggatttctg

SEQ ID NO: 1114748 - DNA, 25 bp, Homo sapien
aggtgatgccgaaacgcccagccct

SEQ ID NO: 1114749 - DNA, 25 bp, Homo sapien
gtgatgccgaaacgcccagccctga

SEQ ID NO: 1114750 - DNA, 25 bp, Homo sapien
ggaggtgatgccgaaacgcccagcc

SEQ ID NO: 1114751 - DNA, 25 bp, Homo sapien
ctaggaggtgatgccgaaacgccca

SEQ ID NO: 1114752 - DNA, 25 bp, Homo sapien
tatctctcgcttggattttgcaggc

SEQ ID NO: 1114753 - DNA, 25 bp, Homo sapien
gcacagtaccgaagttgagcaaccg

SEQ ID NO: 1114754 - DNA, 25 bp, Homo sapien
gccttttggcagcacatactgtgag

SEQ ID NO: 1114755 - DNA, 25 bp, Homo sapien
caaccggttccagtgtctttaagca

SEQ ID NO: 1114756 - DNA, 25 bp, Homo sapien
tatctgaatttataaaccagtctgt

SEQ ID NO: 1114757 - DNA, 25 bp, Homo sapien
tgaatttataaaccagtctgtgcac

SEQ ID NO: 1114758 - DNA, 25 bp, Homo sapien
gctgagtctctgaacgagaacattc

SEQ ID NO: 1114759 - DNA, 25 bp, Homo sapien
tccggcagcaagatatatctgaatt

SEQ ID NO: 1114760 - DNA, 25 bp, Homo sapien
tgacaagcctcttaacttcatatgc

SEQ ID NO: 1114761 - DNA, 25 bp, Homo sapien
ctgtgatagaggaaacctgacaagc

SEQ ID NO: 1114762 - DNA, 25 bp, Homo sapien
gtgatagaggaaacctgacaagcct

SEQ ID NO: 1114763 - DNA, 25 bp, Homo sapien
aacctgacaagcctcttaacttcat

SEQ ID NO: 1114764 - DNA, 25 bp, Homo sapien
ttgcacatcagaccagcagattcca

SEQ ID NO: 1114765 - DNA, 25 bp, Homo sapien
tagagttgcacatcagaccagcaga

SEQ ID NO: 1114766 - DNA, 25 bp, Homo sapien
gagttgcacatcagaccagcagatt

SEQ ID NO: 1114767 - DNA, 25 bp, Homo sapien
caggttccactgcagatttgctgac

SEQ ID NO: 1114768 - DNA, 25 bp, Homo sapien
gtttcagaggccctagtcaagagtc

SEQ ID NO: 1114769 - DNA, 25 bp, Homo sapien
gagtccttccccataggtccaggtg

SEQ ID NO: 1114770 - DNA, 25 bp, Homo sapien
cagcactgtataggcaaagaggatc

SEQ ID NO: 1114771 - DNA, 25 bp, Homo sapien
cacattgtcagcactgtataggcaa

SEQ ID NO: 1114772 - DNA, 25 bp, Homo sapien
gaataaacaagcttaatggattagt

SEQ ID NO: 1114773 - DNA, 25 bp, Homo sapien
ataaacaagcttaatggattagtat

SEQ ID NO: 1114774 - DNA, 25 bp, Homo sapien
aataaacaagcttaatggattagta

SEQ ID NO: 1114775 - DNA, 25 bp, Homo sapien
gaatcaccgacttccagaatgcatg

SEQ ID NO: 1114776 - DNA, 25 bp, Homo sapien
agagcggctctgctaacctaatggg

SEQ ID NO: 1114777 - DNA, 25 bp, Homo sapien
aaagtctgtctagctagtggccaca

SEQ ID NO: 1114778 - DNA, 25 bp, Homo sapien
gaatgcatgctgtctctcagcggca

SEQ ID NO: 1114779 - DNA, 25 bp, Homo sapien
gggtcaccttttcacaccgaggaca

SEQ ID NO: 1114780 - DNA, 25 bp, Homo sapien
caccttttcacaccgaggacagcag

SEQ ID NO: 1114781 - DNA, 25 bp, Homo sapien
gcaagcaggtgcgatgggcagtggg

SEQ ID NO: 1114782 - DNA, 25 bp, Homo sapien
ggtgaccgacgagagatagcaagca

SEQ ID NO: 1114783 - DNA, 25 bp, Homo sapien
cacagcttgaagtgagtgactttga

SEQ ID NO: 1114784 - DNA, 25 bp, Homo sapien
ccttctgcacacactccggcctcag

SEQ ID NO: 1114785 - DNA, 25 bp, Homo sapien
gagccacgaggtcattctgaccccg

SEQ ID NO: 1114786 - DNA, 25 bp, Homo sapien
ttcctcaagagccacgaggtcattc

SEQ ID NO: 1114787 - DNA, 25 bp, Homo sapien
tttcttgcccgtacaatgggcacca

SEQ ID NO: 1114788 - DNA, 25 bp, Homo sapien
tcttgcccgtacaatgggcaccaac

SEQ ID NO: 1114789 - DNA, 25 bp, Homo sapien
tacttgcctcgccaggacatagaag

SEQ ID NO: 1114790 - DNA, 25 bp, Homo sapien
agtgctgcctgtacttgcctcgcca

SEQ ID NO: 1114791 - DNA, 25 bp, Homo sapien
tcacatgtcacagccccatggacgg

SEQ ID NO: 1114792 - DNA, 25 bp, Homo sapien
tgtgctcacatgtcacagccccatg

SEQ ID NO: 1114793 - DNA, 25 bp, Homo sapien
ggagctgcaccagcctgtgctcaca

SEQ ID NO: 1114794 - DNA, 25 bp, Homo sapien
catcatggagctgcaccagcctgtg

SEQ ID NO: 1114795 - DNA, 25 bp, Homo sapien
catttcccttagcagatgatttcag

SEQ ID NO: 1114796 - DNA, 25 bp, Homo sapien
gcaaaacatctttcaccgtgcttgg

SEQ ID NO: 1114797 - DNA, 25 bp, Homo sapien
tattgtgcttgtaagacaagctgac

SEQ ID NO: 1114798 - DNA, 25 bp, Homo sapien
aagctgactgatgtgctttgaaaaa

SEQ ID NO: 1114799 - DNA, 25 bp, Homo sapien
tacggtaagtgtggcatccaggcaa

SEQ ID NO: 1114800 - DNA, 25 bp, Homo sapien
tgtggtcagaacagtggaaggccat

SEQ ID NO: 1114801 - DNA, 25 bp, Homo sapien
tctcctcccgaagatagtacggtaa

SEQ ID NO: 1114802 - DNA, 25 bp, Homo sapien
gccatgaactttgccggcgagtgcc

SEQ ID NO: 1114803 - DNA, 25 bp, Homo sapien
tgacctgaaaaaggccttagtatgg

SEQ ID NO: 1114804 - DNA, 25 bp, Homo sapien
tggccagtagctaggtgttcagtag

SEQ ID NO: 1114805 - DNA, 25 bp, Homo sapien
tagtatggtcctccatgcatgtgtg

SEQ ID NO: 1114806 - DNA, 25 bp, Homo sapien
gggaatgcttaatctgactattgaa

SEQ ID NO: 1114807 - DNA, 25 bp, Homo sapien
tagcaaactgaatggtcagcagtgc

SEQ ID NO: 1114808 - DNA, 25 bp, Homo sapien
ggcacaagtgaagggcagctctcca

SEQ ID NO: 1114809 - DNA, 25 bp, Homo sapien
tatggctgcatcatgagggcacaag

SEQ ID NO: 1114810 - DNA, 25 bp, Homo sapien
cagggaccacgggtatggctgcatc

SEQ ID NO: 1114811 - DNA, 25 bp, Homo sapien
atcatggtggatcggcagtacagca

SEQ ID NO: 1114812 - DNA, 25 bp, Homo sapien
gggcctgtttatggctgacaacaca

SEQ ID NO: 1114813 - DNA, 25 bp, Homo sapien
actgtgactgccctttcgtggggga

SEQ ID NO: 1114814 - DNA, 25 bp, Homo sapien
tacagcactgttagcgcaggtggtc

SEQ ID NO: 1114815 - DNA, 25 bp, Homo sapien
gggttccatcaggactgctgacagc

SEQ ID NO: 1114816 - DNA, 25 bp, Homo sapien
gccagtgctcccagcttgattgtta

SEQ ID NO: 1114817 - DNA, 25 bp, Homo sapien
gatttcaagaacgtgacagcagagc

SEQ ID NO: 1114818 - DNA, 25 bp, Homo sapien
ctcctttgtgcggtggctggttaca

SEQ ID NO: 1114819 - DNA, 25 bp, Homo sapien
gctctgtagctacatttgcattgct

SEQ ID NO: 1114820 - DNA, 25 bp, Homo sapien
aacaccactgtgtaggatgaaccat

SEQ ID NO: 1114821 - DNA, 25 bp, Homo sapien
tgtaggatgaaccatagtgcacacc

SEQ ID NO: 1114822 - DNA, 25 bp, Homo sapien
tagtgcacacctaagtgcagctctg

SEQ ID NO: 1114823 - DNA, 25 bp, Homo sapien
acttggggactgtgtctgacttatg

SEQ ID NO: 1114824 - DNA, 25 bp, Homo sapien
catctgccgtgatagtagttccact

SEQ ID NO: 1114825 - DNA, 25 bp, Homo sapien
gatcatctgccgtgatagtagttcc

SEQ ID NO: 1114826 - DNA, 25 bp, Homo sapien
tctaaagatcatctgccgtgatagt

SEQ ID NO: 1114827 - DNA, 25 bp, Homo sapien
ttttctgattctccaaggccctccg

SEQ ID NO: 1114828 - DNA, 25 bp, Homo sapien
tctttcttgtctcgcttgctaaaag

SEQ ID NO: 1114829 - DNA, 25 bp, Homo sapien
tactctttggagctacacgggcaat

SEQ ID NO: 1114830 - DNA, 25 bp, Homo sapien
gcttacgtacttgcaaaaagtcttg

SEQ ID NO: 1114831 - DNA, 25 bp, Homo sapien
ttctcttttcctggccatgggcctt

SEQ ID NO: 1114832 - DNA, 25 bp, Homo sapien
catgggccttttgttcctcccttcg

SEQ ID NO: 1114833 - DNA, 25 bp, Homo sapien
tttctcttttcctggccatgggcct

SEQ ID NO: 1114834 - DNA, 25 bp, Homo sapien
tgctttctcttttcctggccatggg

SEQ ID NO: 1114835 - DNA, 25 bp, Homo sapien
attgattgtcactatcatataacta

SEQ ID NO: 1114836 - DNA, 25 bp, Homo sapien
atcatataactaagaaaataggtca

SEQ ID NO: 1114837 - DNA, 25 bp, Homo sapien
gattgtcactatcatataactaaga

SEQ ID NO: 1114838 - DNA, 25 bp, Homo sapien
tatcatataactaagaaaataggtc

SEQ ID NO: 1114839 - DNA, 25 bp, Homo sapien
tagtggcctgagtccagtaaacaga

SEQ ID NO: 1114840 - DNA, 25 bp, Homo sapien
gcagtggatctgatatttagtggcc

SEQ ID NO: 1114841 - DNA, 25 bp, Homo sapien
catggacttttgtatcgctgagaag

SEQ ID NO: 1114842 - DNA, 25 bp, Homo sapien
ggattttccattgatccatcaacag

SEQ ID NO: 1114843 - DNA, 25 bp, Homo sapien
aaaatcggcgttgcgtccgctgctg

SEQ ID NO: 1114844 - DNA, 25 bp, Homo sapien
ccatcgatggtgattaggaaactgg

SEQ ID NO: 1114845 - DNA, 25 bp, Homo sapien
cacgggttgcgtctgcctttgcaca

SEQ ID NO: 1114846 - DNA, 25 bp, Homo sapien
ttccccgctaggagcaaaaagcaat

SEQ ID NO: 1114847 - DNA, 25 bp, Homo sapien
gttgcctctgggggctgtccgcacc

SEQ ID NO: 1114848 - DNA, 25 bp, Homo sapien
tgaggtttccagcgttaggtcgggc

SEQ ID NO: 1114849 - DNA, 25 bp, Homo sapien
tcgggcttggagtagagcctgcctc

SEQ ID NO: 1114850 - DNA, 25 bp, Homo sapien
tggagtagagcctgcctcccacggg

SEQ ID NO: 1114851 - DNA, 25 bp, Homo sapien
ctatttgccccaggaggccaagaaa

SEQ ID NO: 1114852 - DNA, 25 bp, Homo sapien
tgccccaggaggccaagaaacctct

SEQ ID NO: 1114853 - DNA, 25 bp, Homo sapien
tatttgccccaggaggccaagaaac

SEQ ID NO: 1114854 - DNA, 25 bp, Homo sapien
ttgccccaggaggccaagaaacctc

SEQ ID NO: 1114855 - DNA, 25 bp, Homo sapien
caggttgcccttcagcaccgtgatg

SEQ ID NO: 1114856 - DNA, 25 bp, Homo sapien
aaggctcttagtggtgtttacagtc

SEQ ID NO: 1114857 - DNA, 25 bp, Homo sapien
gacagagagagctctttccgacccc

SEQ ID NO: 1114858 - DNA, 25 bp, Homo sapien
cacctttgttgcgtcaagtattcag

SEQ ID NO: 1114859 - DNA, 25 bp, Homo sapien
gctcagccagctcagggcaacttgg

SEQ ID NO: 1114860 - DNA, 25 bp, Homo sapien
catgaatgaaagtgcggcttgctcc

SEQ ID NO: 1114861 - DNA, 25 bp, Homo sapien
cactgtgtgaataccttttggctca

SEQ ID NO: 1114862 - DNA, 25 bp, Homo sapien
tcatgaaaacacgaacagcctctgt

SEQ ID NO: 1114863 - DNA, 25 bp, Homo sapien
aaagacctcatgctcatgcagtgga

SEQ ID NO: 1114864 - DNA, 25 bp, Homo sapien
catgtggaagtgacctgtagcagcg

SEQ ID NO: 1114865 - DNA, 25 bp, Homo sapien
tagcagcggtcactcattttaacaa

SEQ ID NO: 1114866 - DNA, 25 bp, Homo sapien
taacaattgaactctgctgggttgg

SEQ ID NO: 1114867 - DNA, 25 bp, Homo sapien
tccagggctcagtcgatcctcctgc

SEQ ID NO: 1114868 - DNA, 25 bp, Homo sapien
ctccagggctcagtcgatcctcctg

SEQ ID NO: 1114869 - DNA, 25 bp, Homo sapien
gaggacagtggtataatcctacctc

SEQ ID NO: 1114870 - DNA, 25 bp, Homo sapien
ggtataatcctacctcattatagcc

SEQ ID NO: 1114871 - DNA, 25 bp, Homo sapien
tggaggacagtggtataatcctacc

SEQ ID NO: 1114872 - DNA, 25 bp, Homo sapien
ggaggacagtggtataatcctacct

SEQ ID NO: 1114873 - DNA, 25 bp, Homo sapien
ctttttgttgatgcagagtataaaa

SEQ ID NO: 1114874 - DNA, 25 bp, Homo sapien
tattaatagtaaagacaagacaggg

SEQ ID NO: 1114875 - DNA, 25 bp, Homo sapien
acagatttagtgatacaatatgata

SEQ ID NO: 1114876 - DNA, 25 bp, Homo sapien
tgtttaaaacagatttagtgataca

SEQ ID NO: 1114877 - DNA, 25 bp, Homo sapien
cagttagcaggtgatgaatgctgcc

SEQ ID NO: 1114878 - DNA, 25 bp, Homo sapien
tgctgccaggaatgggttcttccct

SEQ ID NO: 1114879 - DNA, 25 bp, Homo sapien
gaatgctgccaggaatgggttcttc

SEQ ID NO: 1114880 - DNA, 25 bp, Homo sapien
ctcttcagttagcaggtgatgaatg

SEQ ID NO: 1114881 - DNA, 25 bp, Homo sapien
tccaagattgggtccctagtgcctt

SEQ ID NO: 1114882 - DNA, 25 bp, Homo sapien
tttctccaagattgggtccctagtg

SEQ ID NO: 1114883 - DNA, 25 bp, Homo sapien
ttctccaagattgggtccctagtgc

SEQ ID NO: 1114884 - DNA, 25 bp, Homo sapien
ctccaagattgggtccctagtgcct

SEQ ID NO: 1114885 - DNA, 25 bp, Homo sapien
tgtagtcaccttggagtgctatcaa

SEQ ID NO: 1114886 - DNA, 25 bp, Homo sapien
tcactgtagtcaccttggagtgcta

SEQ ID NO: 1114887 - DNA, 25 bp, Homo sapien
tattcactgtagtcaccttggagtg

SEQ ID NO: 1114888 - DNA, 25 bp, Homo sapien
tattattcactgtagtcaccttgga

SEQ ID NO: 1114889 - DNA, 25 bp, Homo sapien
cctgcgcccagacaggtgtagccgt

SEQ ID NO: 1114890 - DNA, 25 bp, Homo sapien
tctgtaaggcgcttctccggcagac

SEQ ID NO: 1114891 - DNA, 25 bp, Homo sapien
gtgtagccgtcccacgctaggtgtc

SEQ ID NO: 1114892 - DNA, 25 bp, Homo sapien
ccgtaccgcagcgttgggcacttgg

SEQ ID NO: 1114893 - DNA, 25 bp, Homo sapien
ctggggccgtgcgccctccctccgc

SEQ ID NO: 1114894 - DNA, 25 bp, Homo sapien
gccgggccacgctgacgctccctcc

SEQ ID NO: 1114895 - DNA, 25 bp, Homo sapien
cctggggccgtgcgccctccctccg

SEQ ID NO: 1114896 - DNA, 25 bp, Homo sapien
gcccgccgggccacgctgacgctcc

SEQ ID NO: 1114897 - DNA, 25 bp, Homo sapien
tgttcgatttcccacaggcgtcttc

SEQ ID NO: 1114898 - DNA, 25 bp, Homo sapien
taagattcacgaacggcgaccgatt

SEQ ID NO: 1114899 - DNA, 25 bp, Homo sapien
ccaagagggaaaagcaacggcggct

SEQ ID NO: 1114900 - DNA, 25 bp, Homo sapien
gtcttcctttcgtgcaccaagaggg

SEQ ID NO: 1114901 - DNA, 25 bp, Homo sapien
tggtcatgtactgacgactctcatc

SEQ ID NO: 1114902 - DNA, 25 bp, Homo sapien
ctaacatcactaggagccgaacacg

SEQ ID NO: 1114903 - DNA, 25 bp, Homo sapien
agccgaacacggcttttggtcatgt

SEQ ID NO: 1114904 - DNA, 25 bp, Homo sapien
ctaccaagctaacatcactaggagc

SEQ ID NO: 1114905 - DNA, 25 bp, Homo sapien
actctggtgactcatatgcacatta

SEQ ID NO: 1114906 - DNA, 25 bp, Homo sapien
caggtcctactgaatcagtctgctt

SEQ ID NO: 1114907 - DNA, 25 bp, Homo sapien
gatcctcagatctcccttttgaaac

SEQ ID NO: 1114908 - DNA, 25 bp, Homo sapien
tgaaactatttctccgtctgcaggg

SEQ ID NO: 1114909 - DNA, 25 bp, Homo sapien
aacacggtatggtagaagctctccc

SEQ ID NO: 1114910 - DNA, 25 bp, Homo sapien
tggttataaacctgggcagagaccc

SEQ ID NO: 1114911 - DNA, 25 bp, Homo sapien
gatgcaactgattgagtcacctggg

SEQ ID NO: 1114912 - DNA, 25 bp, Homo sapien
taggttgacacttagcagctgccac

SEQ ID NO: 1114913 - DNA, 25 bp, Homo sapien
ccacctgtgctcctgaaaagcggcc

SEQ ID NO: 1114914 - DNA, 25 bp, Homo sapien
gcagctccggagcaaacctggcaaa

SEQ ID NO: 1114915 - DNA, 25 bp, Homo sapien
tggagtcgctcgctgactcgccctg

SEQ ID NO: 1114916 - DNA, 25 bp, Homo sapien
cagggaacgggcacaacgccggctt

SEQ ID NO: 1114917 - DNA, 25 bp, Homo sapien
cggagctaggcgctatagatcccgc

SEQ ID NO: 1114918 - DNA, 25 bp, Homo sapien
atagatcccgcacccgcggagcccg

SEQ ID NO: 1114919 - DNA, 25 bp, Homo sapien
tatagatcccgcacccgcggagccc

SEQ ID NO: 1114920 - DNA, 25 bp, Homo sapien
agctaggcgctatagatcccgcacc

SEQ ID NO: 1114921 - DNA, 25 bp, Homo sapien
catcttatctcactggaagatgtcc

SEQ ID NO: 1114922 - DNA, 25 bp, Homo sapien
aggcttacacaaggtcaggattaac

SEQ ID NO: 1114923 - DNA, 25 bp, Homo sapien
cctgaggctatttgacagctggctt

SEQ ID NO: 1114924 - DNA, 25 bp, Homo sapien
tgtccaggggtaataacaggcatgg

SEQ ID NO: 1114925 - DNA, 25 bp, Homo sapien
aaaccgcagcaactctgccgactgt

SEQ ID NO: 1114926 - DNA, 25 bp, Homo sapien
tggaggtgggagtttgactctcctc

SEQ ID NO: 1114927 - DNA, 25 bp, Homo sapien
ctgttgccaggacgcatctgtcgct

SEQ ID NO: 1114928 - DNA, 25 bp, Homo sapien
aaagctccttcgagagctggaggtg

SEQ ID NO: 1114929 - DNA, 25 bp, Homo sapien
ttcaaagagtttgtgttccctgttc

SEQ ID NO: 1114930 - DNA, 25 bp, Homo sapien
tcaaagagtttgtgttccctgttca

SEQ ID NO: 1114931 - DNA, 25 bp, Homo sapien
caaagagtttgtgttccctgttcat

SEQ ID NO: 1114932 - DNA, 25 bp, Homo sapien
cagctaatactggttttagtctttt

SEQ ID NO: 1114933 - DNA, 25 bp, Homo sapien
ctccatatttactggttccatgtct

SEQ ID NO: 1114934 - DNA, 25 bp, Homo sapien
tatttactggttccatgtcttcact

SEQ ID NO: 1114935 - DNA, 25 bp, Homo sapien
gctctccatatttactggttccatg

SEQ ID NO: 1114936 - DNA, 25 bp, Homo sapien
ccatgctctccatatttactggttc

SEQ ID NO: 1114937 - DNA, 25 bp, Homo sapien
cagtttcttggagcatgacagccat

SEQ ID NO: 1114938 - DNA, 25 bp, Homo sapien
gtttcttggagcatgacagccatca

SEQ ID NO: 1114939 - DNA, 25 bp, Homo sapien
ctcagtttcttggagcatgacagcc

SEQ ID NO: 1114940 - DNA, 25 bp, Homo sapien
tttcttggagcatgacagccatcag

SEQ ID NO: 1114941 - DNA, 25 bp, Homo sapien
tgtaaaacaactgctattgggtagg

SEQ ID NO: 1114942 - DNA, 25 bp, Homo sapien
actaaactaaccagggcaaggcctg

SEQ ID NO: 1114943 - DNA, 25 bp, Homo sapien
tattgggtaggctttgaggcacaca

SEQ ID NO: 1114944 - DNA, 25 bp, Homo sapien
aactaaccagggcaaggcctgatgc

SEQ ID NO: 1114945 - DNA, 25 bp, Homo sapien
acagaggcattcagaagaccagaaa

SEQ ID NO: 1114946 - DNA, 25 bp, Homo sapien
tgctagtgccgaaaagaaggcagct

SEQ ID NO: 1114947 - DNA, 25 bp, Homo sapien
gaaggcagctgtccctaataaaaca

SEQ ID NO: 1114948 - DNA, 25 bp, Homo sapien
tgtgctagtgccgaaaagaaggcag

SEQ ID NO: 1114949 - DNA, 25 bp, Homo sapien
gaaatcagatactgcagctctgttg

SEQ ID NO: 1114950 - DNA, 25 bp, Homo sapien
gcttataaggttgttcatctgtgac

SEQ ID NO: 1114951 - DNA, 25 bp, Homo sapien
ttttttgactgggtggaaatcagat

SEQ ID NO: 1114952 - DNA, 25 bp, Homo sapien
gacatcttcatctattcggcagtta

SEQ ID NO: 1114953 - DNA, 25 bp, Homo sapien
aagttaagtccatatttgaagtctt

SEQ ID NO: 1114954 - DNA, 25 bp, Homo sapien
ttgtcataaacaagcagaagctcat

SEQ ID NO: 1114955 - DNA, 25 bp, Homo sapien
tgaagtctttgtcataaacaagcag

SEQ ID NO: 1114956 - DNA, 25 bp, Homo sapien
ccctcttcagttgcaataagataaa

SEQ ID NO: 1114957 - DNA, 25 bp, Homo sapien
tctaggtgccagaacccgatctggg

SEQ ID NO: 1114958 - DNA, 25 bp, Homo sapien
ctatgtatagggatccccgcagagg

SEQ ID NO: 1114959 - DNA, 25 bp, Homo sapien
gatccccgcagaggtaccgcttctg

SEQ ID NO: 1114960 - DNA, 25 bp, Homo sapien
gaacaagaataatcatcactatgta

SEQ ID NO: 1114961 - DNA, 25 bp, Homo sapien
agggagtggaatattgtctgtaata

SEQ ID NO: 1114962 - DNA, 25 bp, Homo sapien
tatactactctgtagttttttctaa

SEQ ID NO: 1114963 - DNA, 25 bp, Homo sapien
taaaattctggataattaagtgtag

SEQ ID NO: 1114964 - DNA, 25 bp, Homo sapien
ttgaaaatgttaaggctaaatgaaa

SEQ ID NO: 1114965 - DNA, 25 bp, Homo sapien
aacccatggtttagagacaggtggt

SEQ ID NO: 1114966 - DNA, 25 bp, Homo sapien
cactgcccaaagaaacccatggttt

SEQ ID NO: 1114967 - DNA, 25 bp, Homo sapien
tagattccgtaactgattcttcctc

SEQ ID NO: 1114968 - DNA, 25 bp, Homo sapien
tgtagattccgtaactgattcttcc

SEQ ID NO: 1114969 - DNA, 25 bp, Homo sapien
aacttaattggtgcaccaaattcac

SEQ ID NO: 1114970 - DNA, 25 bp, Homo sapien
tctgggtaggctgtacattcaatat

SEQ ID NO: 1114971 - DNA, 25 bp, Homo sapien
aattcacttcgttttcgagaaatca

SEQ ID NO: 1114972 - DNA, 25 bp, Homo sapien
tttacactggaagcattctggtcac

SEQ ID NO: 1114973 - DNA, 25 bp, Homo sapien
tttgtctgagtgcttatgtccttta

SEQ ID NO: 1114974 - DNA, 25 bp, Homo sapien
tgagtgcttatgtcctttatttggg

SEQ ID NO: 1114975 - DNA, 25 bp, Homo sapien
tgtctgagtgcttatgtcctttatt

SEQ ID NO: 1114976 - DNA, 25 bp, Homo sapien
cattttgtctgagtgcttatgtcct

SEQ ID NO: 1114977 - DNA, 25 bp, Homo sapien
ttggataatattgcgtagtagcatt

SEQ ID NO: 1114978 - DNA, 25 bp, Homo sapien
tcttggataatattgcgtagtagca

SEQ ID NO: 1114979 - DNA, 25 bp, Homo sapien
tctcttggataatattgcgtagtag

SEQ ID NO: 1114980 - DNA, 25 bp, Homo sapien
ggataatattgcgtagtagcatttt

SEQ ID NO: 1114981 - DNA, 25 bp, Homo sapien
agctgtccactattcttttctttat

SEQ ID NO: 1114982 - DNA, 25 bp, Homo sapien
cataaagctgtccactattcttttc

SEQ ID NO: 1114983 - DNA, 25 bp, Homo sapien
ctgggccagtgctattataattcct

SEQ ID NO: 1114984 - DNA, 25 bp, Homo sapien
tataattcctgtgccaattttcctc

SEQ ID NO: 1114985 - DNA, 25 bp, Homo sapien
attttgctgcagggctatttcaaca

SEQ ID NO: 1114986 - DNA, 25 bp, Homo sapien
tcattttgctgcagggctatttcaa

SEQ ID NO: 1114987 - DNA, 25 bp, Homo sapien
cattttgctgcagggctatttcaac

SEQ ID NO: 1114988 - DNA, 25 bp, Homo sapien
tttcaggtgggtatcggtcttgtcc

SEQ ID NO: 1114989 - DNA, 25 bp, Homo sapien
gttggatgccatgagacacaggtaa

SEQ ID NO: 1114990 - DNA, 25 bp, Homo sapien
aaaggactggtactctttcaggtgg

SEQ ID NO: 1114991 - DNA, 25 bp, Homo sapien
caggtaatcattttctccgttgggc

SEQ ID NO: 1114992 - DNA, 25 bp, Homo sapien
tggctgcagcaataatttaccagaa

SEQ ID NO: 1114993 - DNA, 25 bp, Homo sapien
gaggatgtataggatcagagaagct

SEQ ID NO: 1114994 - DNA, 25 bp, Homo sapien
taccagaaaagtgaactctgtcttc

SEQ ID NO: 1114995 - DNA, 25 bp, Homo sapien
tctgtcttcaaaagaaagtcgcacg

SEQ ID NO: 1114996 - DNA, 25 bp, Homo sapien
gcaatgatattaggatcactcggac

SEQ ID NO: 1114997 - DNA, 25 bp, Homo sapien
attgatacagcctccagcaatgata

SEQ ID NO: 1114998 - DNA, 25 bp, Homo sapien
aggatcactcggacagaacttgaag

SEQ ID NO: 1114999 - DNA, 25 bp, Homo sapien
tacagcctccagcaatgatattagg

SEQ ID NO: 1115000 - DNA, 25 bp, Homo sapien
tctactaccacctgccttaatgttt

SEQ ID NO: 1115001 - DNA, 25 bp, Homo sapien
taatgttttctatgcgatctgcatg

SEQ ID NO: 1115002 - DNA, 25 bp, Homo sapien
gtgcggtgatatcccacatgacaat

SEQ ID NO: 1115003 - DNA, 25 bp, Homo sapien
tcagtgtggctcttttacttctact

SEQ ID NO: 1115004 - DNA, 25 bp, Homo sapien
tctttattactctccggttcaagga

SEQ ID NO: 1115005 - DNA, 25 bp, Homo sapien
tgtaattactttcttatgtccattt

SEQ ID NO: 1115006 - DNA, 25 bp, Homo sapien
cttctttattactctccggttcaag

SEQ ID NO: 1115007 - DNA, 25 bp, Homo sapien
ttattactctccggttcaaggagaa

SEQ ID NO: 1115008 - DNA, 25 bp, Homo sapien
ttcgattctcaaagacggagcccat

SEQ ID NO: 1115009 - DNA, 25 bp, Homo sapien
gacagcatattccacttcgattctc

SEQ ID NO: 1115010 - DNA, 25 bp, Homo sapien
tgacaagttgacagcatattccact

SEQ ID NO: 1115011 - DNA, 25 bp, Homo sapien
ccacttcgattctcaaagacggagc

SEQ ID NO: 1115012 - DNA, 25 bp, Homo sapien
ttgttcctgctacccaaatctctgg

SEQ ID NO: 1115013 - DNA, 25 bp, Homo sapien
tgtggtctaatatcccaaaaacata

SEQ ID NO: 1115014 - DNA, 25 bp, Homo sapien
ggtttctgtggtctaatatcccaaa

SEQ ID NO: 1115015 - DNA, 25 bp, Homo sapien
ttctgtggtctaatatcccaaaaac

SEQ ID NO: 1115016 - DNA, 25 bp, Homo sapien
tctaatatcccaaaaacatattgtg

SEQ ID NO: 1115017 - DNA, 25 bp, Homo sapien
aagtagatggtacatcaaaaggaat

SEQ ID NO: 1115018 - DNA, 25 bp, Homo sapien
tatcttggttggacagtggtctaaa

SEQ ID NO: 1115019 - DNA, 25 bp, Homo sapien
tcttggttggacagtggtctaaact

SEQ ID NO: 1115020 - DNA, 25 bp, Homo sapien
cttggttggacagtggtctaaactt

SEQ ID NO: 1115021 - DNA, 25 bp, Homo sapien
tggttggacagtggtctaaacttgt

SEQ ID NO: 1115022 - DNA, 25 bp, Homo sapien
tttcagaggagtgtgggtagaagaa

SEQ ID NO: 1115023 - DNA, 25 bp, Homo sapien
agaggagtgtgggtagaagaagtac

SEQ ID NO: 1115024 - DNA, 25 bp, Homo sapien
ctttcagaggagtgtgggtagaaga

SEQ ID NO: 1115025 - DNA, 25 bp, Homo sapien
tcagaggagtgtgggtagaagaagt

SEQ ID NO: 1115026 - DNA, 25 bp, Homo sapien
cttctctgttttgctctgtgctaac

SEQ ID NO: 1115027 - DNA, 25 bp, Homo sapien
ttctctgttttgctctgtgctaaca

SEQ ID NO: 1115028 - DNA, 25 bp, Homo sapien
tctctgttttgctctgtgctaacat

SEQ ID NO: 1115029 - DNA, 25 bp, Homo sapien
tcccactttccagattatgatacgg

SEQ ID NO: 1115030 - DNA, 25 bp, Homo sapien
ccagattatgatacgggttcatttc

SEQ ID NO: 1115031 - DNA, 25 bp, Homo sapien
gagaagattggccatcccactttcc

SEQ ID NO: 1115032 - DNA, 25 bp, Homo sapien
gcagaagtcatctattggcttgaga

SEQ ID NO: 1115033 - DNA, 25 bp, Homo sapien
acataagtcggccagtttcagggtc

SEQ ID NO: 1115034 - DNA, 25 bp, Homo sapien
ataagtcggccagtttcagggtctt

SEQ ID NO: 1115035 - DNA, 25 bp, Homo sapien
tttccattttccaatctgtgtatat

SEQ ID NO: 1115036 - DNA, 25 bp, Homo sapien
aatctgtgtatatcacttcgccttc

SEQ ID NO: 1115037 - DNA, 25 bp, Homo sapien
acttccactcgcatgattgactaga

SEQ ID NO: 1115038 - DNA, 25 bp, Homo sapien
aatccagctgctctaccacactgct

SEQ ID NO: 1115039 - DNA, 25 bp, Homo sapien
gactagatacccttctgcaaagaat

SEQ ID NO: 1115040 - DNA, 25 bp, Homo sapien
gcatgattgactagatacccttctg

SEQ ID NO: 1115041 - DNA, 25 bp, Homo sapien
ctattggagtgaaagaagaccatct

SEQ ID NO: 1115042 - DNA, 25 bp, Homo sapien
tcatctttaataacactgtttgcat

SEQ ID NO: 1115043 - DNA, 25 bp, Homo sapien
gaccatctcatctttaataacactg

SEQ ID NO: 1115044 - DNA, 25 bp, Homo sapien
agaagaccatctcatctttaataac

SEQ ID NO: 1115045 - DNA, 25 bp, Homo sapien
tagtgtggacagttccgtcgtgaat

SEQ ID NO: 1115046 - DNA, 25 bp, Homo sapien
tgaatagtgtggacagttccgtcgt

SEQ ID NO: 1115047 - DNA, 25 bp, Homo sapien
acagttccgtcgtgaatggtgtggt

SEQ ID NO: 1115048 - DNA, 25 bp, Homo sapien
tggacagttccgtcgtgaatggtgt

SEQ ID NO: 1115049 - DNA, 25 bp, Homo sapien
cgttccaacctccaaccgtgagaat

SEQ ID NO: 1115050 - DNA, 25 bp, Homo sapien
tttccatatggccacgttccaacct

SEQ ID NO: 1115051 - DNA, 25 bp, Homo sapien
ccgtgagaataatgtcgttgtagaa

SEQ ID NO: 1115052 - DNA, 25 bp, Homo sapien
taatgtcgttgtagaaaggtgatct

SEQ ID NO: 1115053 - DNA, 25 bp, Homo sapien
cagcatgactgaaggagcggtccag

SEQ ID NO: 1115054 - DNA, 25 bp, Homo sapien
tcaatgtatccatcttctcggccga

SEQ ID NO: 1115055 - DNA, 25 bp, Homo sapien
gatgtagaaaactccgggccgagtc

SEQ ID NO: 1115056 - DNA, 25 bp, Homo sapien
cagaaggtcccagatatcaatgtat

SEQ ID NO: 1115057 - DNA, 25 bp, Homo sapien
ggcgacttaatgtccaaggaatttc

SEQ ID NO: 1115058 - DNA, 25 bp, Homo sapien
cagctgtggctataaattgctgttt

SEQ ID NO: 1115059 - DNA, 25 bp, Homo sapien
gtccaaggaatttctaatatatgca

SEQ ID NO: 1115060 - DNA, 25 bp, Homo sapien
ctcattggtggaagggcgacttaat

SEQ ID NO: 1115061 - DNA, 25 bp, Homo sapien
ttttgcgctgttctacgtattccag

SEQ ID NO: 1115062 - DNA, 25 bp, Homo sapien
caaaatagtggttgacacttgccat

SEQ ID NO: 1115063 - DNA, 25 bp, Homo sapien
tcttgctcacgaatttttttgcgct

SEQ ID NO: 1115064 - DNA, 25 bp, Homo sapien
tctctttcaaaatagtggttgacac

SEQ ID NO: 1115065 - DNA, 25 bp, Homo sapien
ccactggtgttcgaggaaaacatct

SEQ ID NO: 1115066 - DNA, 25 bp, Homo sapien
cactggtgttcgaggaaaacatctt

SEQ ID NO: 1115067 - DNA, 25 bp, Homo sapien
tccactggtgttcgaggaaaacatc

SEQ ID NO: 1115068 - DNA, 25 bp, Homo sapien
actggtgttcgaggaaaacatcttt

SEQ ID NO: 1115069 - DNA, 25 bp, Homo sapien
gaggatgtatgtatttggctatacg

SEQ ID NO: 1115070 - DNA, 25 bp, Homo sapien
acggcgcccagtgccacatgctaat

SEQ ID NO: 1115071 - DNA, 25 bp, Homo sapien
tgaaggcctcatgtgagtaactgtg

SEQ ID NO: 1115072 - DNA, 25 bp, Homo sapien
acactttgtcaccaaacatgttttg

SEQ ID NO: 1115073 - DNA, 25 bp, Homo sapien
ccagttccagataactctcatagtc

SEQ ID NO: 1115074 - DNA, 25 bp, Homo sapien
tctcatagtccatttttaattcagc

SEQ ID NO: 1115075 - DNA, 25 bp, Homo sapien
gataactctcatagtccatttttaa

SEQ ID NO: 1115076 - DNA, 25 bp, Homo sapien
ttgattaggccaaggttgataagaa

SEQ ID NO: 1115077 - DNA, 25 bp, Homo sapien
ctccatgtatgaccccttctctgtg

SEQ ID NO: 1115078 - DNA, 25 bp, Homo sapien
ccatgtatgaccccttctctgtgac

SEQ ID NO: 1115079 - DNA, 25 bp, Homo sapien
tccatgtatgaccccttctctgtga

SEQ ID NO: 1115080 - DNA, 25 bp, Homo sapien
tatgttcagcatgccagttcacctg

SEQ ID NO: 1115081 - DNA, 25 bp, Homo sapien
gttcagcatgccagttcacctgaca

SEQ ID NO: 1115082 - DNA, 25 bp, Homo sapien
gcatgccagttcacctgacataaaa

SEQ ID NO: 1115083 - DNA, 25 bp, Homo sapien
tatatatgttcagcatgccagttca

SEQ ID NO: 1115084 - DNA, 25 bp, Homo sapien
taatccagctccttagcttggtaaa

SEQ ID NO: 1115085 - DNA, 25 bp, Homo sapien
tccttagcttggtaaacaggagcct

SEQ ID NO: 1115086 - DNA, 25 bp, Homo sapien
tgttgctttttggtgcctatgctag

SEQ ID NO: 1115087 - DNA, 25 bp, Homo sapien
taaacaggagccttcacaatctggc

SEQ ID NO: 1115088 - DNA, 25 bp, Homo sapien
tgccctggcaatggcaacttagcaa

SEQ ID NO: 1115089 - DNA, 25 bp, Homo sapien
gcaacttagcaacccggtggagcag

SEQ ID NO: 1115090 - DNA, 25 bp, Homo sapien
ttgtgaggaccttgctcagttgcac

SEQ ID NO: 1115091 - DNA, 25 bp, Homo sapien
ccttgctcagttgcacagatctgcc

SEQ ID NO: 1115092 - DNA, 25 bp, Homo sapien
ttgtcagcttctcggttagcactcc

SEQ ID NO: 1115093 - DNA, 25 bp, Homo sapien
tctatgagcctgacctttataggcc

SEQ ID NO: 1115094 - DNA, 25 bp, Homo sapien
gattccttgaatgctctgaagacca

SEQ ID NO: 1115095 - DNA, 25 bp, Homo sapien
tctctttagtaccagaagtcaacac

SEQ ID NO: 1115096 - DNA, 25 bp, Homo sapien
cataatgaacacattgatggctaca

SEQ ID NO: 1115097 - DNA, 25 bp, Homo sapien
cagctattgctattaggagtacggc

SEQ ID NO: 1115098 - DNA, 25 bp, Homo sapien
tgtactgatctttataaacgctggg

SEQ ID NO: 1115099 - DNA, 25 bp, Homo sapien
tattaacagtttccagcagtaaaca

SEQ ID NO: 1115100 - DNA, 25 bp, Homo sapien
ccttggattatgcacagatttctca

SEQ ID NO: 1115101 - DNA, 25 bp, Homo sapien
gattcatacatatacggacaactga

SEQ ID NO: 1115102 - DNA, 25 bp, Homo sapien
catctcataccatatgtaaaagtga

SEQ ID NO: 1115103 - DNA, 25 bp, Homo sapien
gtaatggcatcaaaatagacaaatc

SEQ ID NO: 1115104 - DNA, 25 bp, Homo sapien
tcctgtgcccaacagaatctgtctc

SEQ ID NO: 1115105 - DNA, 25 bp, Homo sapien
ccttcctgtgcccaacagaatctgt

SEQ ID NO: 1115106 - DNA, 25 bp, Homo sapien
ctcagatatcccaagcagtcttgcc

SEQ ID NO: 1115107 - DNA, 25 bp, Homo sapien
tcagatatcccaagcagtcttgcct

SEQ ID NO: 1115108 - DNA, 25 bp, Homo sapien
tccaggctagaaagattcggacaag

SEQ ID NO: 1115109 - DNA, 25 bp, Homo sapien
gagctaaaagaatctgccagtggac

SEQ ID NO: 1115110 - DNA, 25 bp, Homo sapien
actatgaaaggagtagggcctgagc

SEQ ID NO: 1115111 - DNA, 25 bp, Homo sapien
gcatccagttttgcagtagtccagg

SEQ ID NO: 1115112 - DNA, 25 bp, Homo sapien
gctgctacaaatagtactgaattgg

SEQ ID NO: 1115113 - DNA, 25 bp, Homo sapien
gaatttctgcctatgtgaaagcctg

SEQ ID NO: 1115114 - DNA, 25 bp, Homo sapien
taattgggataatgcagtattctgc

SEQ ID NO: 1115115 - DNA, 25 bp, Homo sapien
ctgaattgggaattatggaaccatc

SEQ ID NO: 1115116 - DNA, 25 bp, Homo sapien
tagacctttgccactcaaaatgtgg

SEQ ID NO: 1115117 - DNA, 25 bp, Homo sapien
gagtgtcatggaacattggagttgc

SEQ ID NO: 1115118 - DNA, 25 bp, Homo sapien
gaaagtcctacatttctagaccagt

SEQ ID NO: 1115119 - DNA, 25 bp, Homo sapien
tctcacatccccgaagttttacaaa

SEQ ID NO: 1115120 - DNA, 25 bp, Homo sapien
ggactcctcggatgcggccgtcctg

SEQ ID NO: 1115121 - DNA, 25 bp, Homo sapien
tgatccaggccatgcacgacctgcc

SEQ ID NO: 1115122 - DNA, 25 bp, Homo sapien
tggccgagcgacagctggatcaggt

SEQ ID NO: 1115123 - DNA, 25 bp, Homo sapien
gaggcctattatctgctgatccagg

SEQ ID NO: 1115124 - DNA, 25 bp, Homo sapien
caggaattcaagaccagcctgggca

SEQ ID NO: 1115125 - DNA, 25 bp, Homo sapien
aggactgcttgagaccaggaattca

SEQ ID NO: 1115126 - DNA, 25 bp, Homo sapien
gaggactgcttgagaccaggaattc

SEQ ID NO: 1115127 - DNA, 25 bp, Homo sapien
tgggaggactgcttgagaccaggaa

SEQ ID NO: 1115128 - DNA, 25 bp, Homo sapien
tgggcagtgccctaaagcagcactc

SEQ ID NO: 1115129 - DNA, 25 bp, Homo sapien
gcaatgttaggcgaggtggctccct

SEQ ID NO: 1115130 - DNA, 25 bp, Homo sapien
cagttcttgaagcaggatgcagctg

SEQ ID NO: 1115131 - DNA, 25 bp, Homo sapien
ctggaccgaccagtcattggaggtg

SEQ ID NO: 1115132 - DNA, 25 bp, Homo sapien
gagctttaagccacaagttctgcct

SEQ ID NO: 1115133 - DNA, 25 bp, Homo sapien
cagacaagcccacgaaatgacaggt

SEQ ID NO: 1115134 - DNA, 25 bp, Homo sapien
tgtctcgcttttctaggcccacaga

SEQ ID NO: 1115135 - DNA, 25 bp, Homo sapien
tttagaatcatagcacctggcatgg

SEQ ID NO: 1115136 - DNA, 25 bp, Homo sapien
gaacttgtagggtgcttttcaacag

SEQ ID NO: 1115137 - DNA, 25 bp, Homo sapien
cacagaattggtgacatgctttgag

SEQ ID NO: 1115138 - DNA, 25 bp, Homo sapien
ttggatgcattcttgctctcacaga

SEQ ID NO: 1115139 - DNA, 25 bp, Homo sapien
tgtctgtgacaagtaccctatttgt

SEQ ID NO: 1115140 - DNA, 25 bp, Homo sapien
cttgccaagttcactagtgagaggg

SEQ ID NO: 1115141 - DNA, 25 bp, Homo sapien
aacttgccaagttcactagtgagag

SEQ ID NO: 1115142 - DNA, 25 bp, Homo sapien
aggagttctgtctgtgactgaacaa

SEQ ID NO: 1115143 - DNA, 25 bp, Homo sapien
aaaaacttgccaagttcactagtga

SEQ ID NO: 1115144 - DNA, 25 bp, Homo sapien
agtttcccatactatcttgcactga

SEQ ID NO: 1115145 - DNA, 25 bp, Homo sapien
ttagccctgaaaactagccattgcc

SEQ ID NO: 1115146 - DNA, 25 bp, Homo sapien
taatgcagcacagaaaaagttactt

SEQ ID NO: 1115147 - DNA, 25 bp, Homo sapien
aatttaggatgacttgacaggatgc

SEQ ID NO: 1115148 - DNA, 25 bp, Homo sapien
tatctgtttcctgacattgtctcct

SEQ ID NO: 1115149 - DNA, 25 bp, Homo sapien
taatgaggaccaatgtacagttgaa

SEQ ID NO: 1115150 - DNA, 25 bp, Homo sapien
tatttgaacaagtgggccattagcc

SEQ ID NO: 1115151 - DNA, 25 bp, Homo sapien
cacctagcctgatgagatttttaaa

SEQ ID NO: 1115152 - DNA, 25 bp, Homo sapien
ggttttacatcgctaaacgcagagc

SEQ ID NO: 1115153 - DNA, 25 bp, Homo sapien
tgaagaaggacgtgagtaacgcagc

SEQ ID NO: 1115154 - DNA, 25 bp, Homo sapien
tctacgagagggaaggaacgctgct

SEQ ID NO: 1115155 - DNA, 25 bp, Homo sapien
cgtggcttgaggaaacgcccgctgt

SEQ ID NO: 1115156 - DNA, 25 bp, Homo sapien
tgccttatgaggaagctaacccggg

SEQ ID NO: 1115157 - DNA, 25 bp, Homo sapien
agtaactggcaaacgtaacaacagg

SEQ ID NO: 1115158 - DNA, 25 bp, Homo sapien
aaggtactgacaagcccagaccgga

SEQ ID NO: 1115159 - DNA, 25 bp, Homo sapien
cacccacggaaacgatgccttatga

SEQ ID NO: 1115160 - DNA, 25 bp, Homo sapien
catagtagttaaaatacggtctggg

SEQ ID NO: 1115161 - DNA, 25 bp, Homo sapien
gcttcttacacagcgccatagtagt

SEQ ID NO: 1115162 - DNA, 25 bp, Homo sapien
cggtctggggatagtcgtctcttca

SEQ ID NO: 1115163 - DNA, 25 bp, Homo sapien
ctcaggttgcttcttacacagcgcc

SEQ ID NO: 1115164 - DNA, 25 bp, Homo sapien
actgtccttgtgtaatgtgtcaaca

SEQ ID NO: 1115165 - DNA, 25 bp, Homo sapien
gatggttcagtaaatcggatggaag

SEQ ID NO: 1115166 - DNA, 25 bp, Homo sapien
gaatcccttgctgtgattctggttt

SEQ ID NO: 1115167 - DNA, 25 bp, Homo sapien
catgttgtccaagccaccgtcttgg

SEQ ID NO: 1115168 - DNA, 25 bp, Homo sapien
gccaaacatgctgctcaagaacctc

SEQ ID NO: 1115169 - DNA, 25 bp, Homo sapien
cctggtgagtccagcttgggtccag

SEQ ID NO: 1115170 - DNA, 25 bp, Homo sapien
gcagctgatacagggttcagaaaaa

SEQ ID NO: 1115171 - DNA, 25 bp, Homo sapien
atcttgtccactcaactatgaaggg

SEQ ID NO: 1115172 - DNA, 25 bp, Homo sapien
taggatttcacttcccaccctgatt

SEQ ID NO: 1115173 - DNA, 25 bp, Homo sapien
ggaagaccctttgaggtgctcccca

SEQ ID NO: 1115174 - DNA, 25 bp, Homo sapien
ccaggacgctgttggagtctcagta

SEQ ID NO: 1115175 - DNA, 25 bp, Homo sapien
gttggagtctcagtaataggatttc

SEQ ID NO: 1115176 - DNA, 25 bp, Homo sapien
gagaccaccgtagatgattgtgcag

SEQ ID NO: 1115177 - DNA, 25 bp, Homo sapien
ctggcagatatctctgagaccaccg

SEQ ID NO: 1115178 - DNA, 25 bp, Homo sapien
gatatctctgagaccaccgtagatg

SEQ ID NO: 1115179 - DNA, 25 bp, Homo sapien
tctgagaccaccgtagatgattgtg

SEQ ID NO: 1115180 - DNA, 25 bp, Homo sapien
ttcccatctgctgaaggatgagtgg

SEQ ID NO: 1115181 - DNA, 25 bp, Homo sapien
tcccatctgctgaaggatgagtggg

SEQ ID NO: 1115182 - DNA, 25 bp, Homo sapien
ccttcccatctgctgaaggatgagt

SEQ ID NO: 1115183 - DNA, 25 bp, Homo sapien
ctccttcccatctgctgaaggatga

SEQ ID NO: 1115184 - DNA, 25 bp, Homo sapien
cataaaattctgaggctcagatgca

SEQ ID NO: 1115185 - DNA, 25 bp, Homo sapien
aattctgaggctcagatgcaatttc

SEQ ID NO: 1115186 - DNA, 25 bp, Homo sapien
aacataaaattctgaggctcagatg

SEQ ID NO: 1115187 - DNA, 25 bp, Homo sapien
ctgaggctcagatgcaatttctggg

SEQ ID NO: 1115188 - DNA, 25 bp, Homo sapien
taaagcagcataacacgtgcccatt

SEQ ID NO: 1115189 - DNA, 25 bp, Homo sapien
cctttaggattttataaacatcgat

SEQ ID NO: 1115190 - DNA, 25 bp, Homo sapien
gtccaaaatgagtctaaaatccagg

SEQ ID NO: 1115191 - DNA, 25 bp, Homo sapien
tgagaatcctctggctagaatccca

SEQ ID NO: 1115192 - DNA, 25 bp, Homo sapien
gaaagaatctaagaataatgagagc

SEQ ID NO: 1115193 - DNA, 25 bp, Homo sapien
ctggtagcaggtgtttcaggggaaa

SEQ ID NO: 1115194 - DNA, 25 bp, Homo sapien
tggtagcaggtgtttcaggggaaaa

SEQ ID NO: 1115195 - DNA, 25 bp, Homo sapien
aaaagaaagaatctaagaataatga

SEQ ID NO: 1115196 - DNA, 25 bp, Homo sapien
aaaattgtggagtaacagcgccctc

SEQ ID NO: 1115197 - DNA, 25 bp, Homo sapien
gccgaccttagcttttgcagaaaaa

SEQ ID NO: 1115198 - DNA, 25 bp, Homo sapien
gtttgccgaccttagcttttgcaga

SEQ ID NO: 1115199 - DNA, 25 bp, Homo sapien
tagtcactcgcgttttctcagccgg

SEQ ID NO: 1115200 - DNA, 25 bp, Homo sapien
gcctcaaaaacaatggaaatccgaa

SEQ ID NO: 1115201 - DNA, 25 bp, Homo sapien
ttccatatgaatgccgatccgacag

SEQ ID NO: 1115202 - DNA, 25 bp, Homo sapien
gaggcatcttttgatttagcctcaa

SEQ ID NO: 1115203 - DNA, 25 bp, Homo sapien
tgccgatccgacagtgcatgttgcc

SEQ ID NO: 1115204 - DNA, 25 bp, Homo sapien
ctactccagaaataactcgggattt

SEQ ID NO: 1115205 - DNA, 25 bp, Homo sapien
caggtttccctggtagctgacatgg

SEQ ID NO: 1115206 - DNA, 25 bp, Homo sapien
ctcgggattttcatcacggatgcct

SEQ ID NO: 1115207 - DNA, 25 bp, Homo sapien
gacggcttccgtggtgaattcacag

SEQ ID NO: 1115208 - DNA, 25 bp, Homo sapien
acaagtgcccgtactctgccaggct

SEQ ID NO: 1115209 - DNA, 25 bp, Homo sapien
tgaagaatgctggtcatcaacgatt

SEQ ID NO: 1115210 - DNA, 25 bp, Homo sapien
caacgattttagacgagtgagcacg

SEQ ID NO: 1115211 - DNA, 25 bp, Homo sapien
gagtacagctccgatctttccagaa

SEQ ID NO: 1115212 - DNA, 25 bp, Homo sapien
tcacggccctttagttcagagaagt

SEQ ID NO: 1115213 - DNA, 25 bp, Homo sapien
caatggataaactaacggaaactgc

SEQ ID NO: 1115214 - DNA, 25 bp, Homo sapien
taaggtaaagagttgcatgtcagtc

SEQ ID NO: 1115215 - DNA, 25 bp, Homo sapien
tgtatggttatccactctgtgtgcc

SEQ ID NO: 1115216 - DNA, 25 bp, Homo sapien
tagccacatgcccaagttaacaaag

SEQ ID NO: 1115217 - DNA, 25 bp, Homo sapien
tatgtgcatcctgtgaataaaccac

SEQ ID NO: 1115218 - DNA, 25 bp, Homo sapien
taccagagagagaacgaatgttagc

SEQ ID NO: 1115219 - DNA, 25 bp, Homo sapien
caaaaattctccctgtgagagctca

SEQ ID NO: 1115220 - DNA, 25 bp, Homo sapien
tactgaccatatatgaccttggagg

SEQ ID NO: 1115221 - DNA, 25 bp, Homo sapien
cacaactttgaactgacacggatct

SEQ ID NO: 1115222 - DNA, 25 bp, Homo sapien
tacacagaggcacatcctgacaggg

SEQ ID NO: 1115223 - DNA, 25 bp, Homo sapien
cttacaaagaacaatgcggcactga

SEQ ID NO: 1115224 - DNA, 25 bp, Homo sapien
ctaatcagggctgtaaagaaagacc

SEQ ID NO: 1115225 - DNA, 25 bp, Homo sapien
taccagacggtagcaggtcataaca

SEQ ID NO: 1115226 - DNA, 25 bp, Homo sapien
tcgtaacaaaagagctacttgggtc

SEQ ID NO: 1115227 - DNA, 25 bp, Homo sapien
gagatgtccagttaagtcctttacc

SEQ ID NO: 1115228 - DNA, 25 bp, Homo sapien
tttatgcattctcactaaggtattt

SEQ ID NO: 1115229 - DNA, 25 bp, Homo sapien
ttttatgcattctcactaaggtatt

SEQ ID NO: 1115230 - DNA, 25 bp, Homo sapien
gatcatgtaaccagaggccagtggg

SEQ ID NO: 1115231 - DNA, 25 bp, Homo sapien
ggccagtgggaatatgaccatttca

SEQ ID NO: 1115232 - DNA, 25 bp, Homo sapien
gactacagaaggcagcatggatcat

SEQ ID NO: 1115233 - DNA, 25 bp, Homo sapien
gcttgtacatcctggaagatgccag

SEQ ID NO: 1115234 - DNA, 25 bp, Homo sapien
gagtagagactctagcctcacagag

SEQ ID NO: 1115235 - DNA, 25 bp, Homo sapien
gagtaggtcaccatgctaagagctt

SEQ ID NO: 1115236 - DNA, 25 bp, Homo sapien
tctgtatgggatagtctagactccc

SEQ ID NO: 1115237 - DNA, 25 bp, Homo sapien
tgagtaaagcattgagcacagggtc

SEQ ID NO: 1115238 - DNA, 25 bp, Homo sapien
caacttggattatgcattcttttgc

SEQ ID NO: 1115239 - DNA, 25 bp, Homo sapien
ggtcttctagaatcgtcaacttgga

SEQ ID NO: 1115240 - DNA, 25 bp, Homo sapien
tcagatataaaaacgactagaattt

SEQ ID NO: 1115241 - DNA, 25 bp, Homo sapien
tttcgttagaagttgaggtcttcta

SEQ ID NO: 1115242 - DNA, 25 bp, Homo sapien
gttgctgaagttacccactaggtgg

SEQ ID NO: 1115243 - DNA, 25 bp, Homo sapien
tgagtgcatgaccaaaactaagggc

SEQ ID NO: 1115244 - DNA, 25 bp, Homo sapien
gagccaggccggatactcattatat

SEQ ID NO: 1115245 - DNA, 25 bp, Homo sapien
gctgtccacggcatgcagttagcaa

SEQ ID NO: 1115246 - DNA, 25 bp, Homo sapien
tctacagttcaataataggaatttt

SEQ ID NO: 1115247 - DNA, 25 bp, Homo sapien
aaagctgcttcttagtcaggtgcag

SEQ ID NO: 1115248 - DNA, 25 bp, Homo sapien
ggaattttaagagctcaaaagctgc

SEQ ID NO: 1115249 - DNA, 25 bp, Homo sapien
cttttaagtaagatagtaattgtgc

SEQ ID NO: 1115250 - DNA, 25 bp, Homo sapien
caatccgggtcagactgttcttcag

SEQ ID NO: 1115251 - DNA, 25 bp, Homo sapien
aaagattgcggaggaactgcttccc

SEQ ID NO: 1115252 - DNA, 25 bp, Homo sapien
gcagttctggatggcaatttgatgg

SEQ ID NO: 1115253 - DNA, 25 bp, Homo sapien
caggtggatgttaaaacagggaatc

SEQ ID NO: 1115254 - DNA, 25 bp, Homo sapien
cttcaaatggctcagcagttgccat

SEQ ID NO: 1115255 - DNA, 25 bp, Homo sapien
agattcctccctttcagagcagaag

SEQ ID NO: 1115256 - DNA, 25 bp, Homo sapien
ctggtttctcaagattcctcccttt

SEQ ID NO: 1115257 - DNA, 25 bp, Homo sapien
ctctggtttctcaagattcctccct

SEQ ID NO: 1115258 - DNA, 25 bp, Homo sapien
tttctctggtttctcaagattcctc

SEQ ID NO: 1115259 - DNA, 25 bp, Homo sapien
aagatcgtcttgtgttgagtgaagg

SEQ ID NO: 1115260 - DNA, 25 bp, Homo sapien
ggaagatcgtcttgtgttgagtgaa

SEQ ID NO: 1115261 - DNA, 25 bp, Homo sapien
cacaggaagatcgtcttgtgttgag

SEQ ID NO: 1115262 - DNA, 25 bp, Homo sapien
tcagtcacaggaagatcgtcttgtg

SEQ ID NO: 1115263 - DNA, 25 bp, Homo sapien
aaagttaaatgtacagtgcctgacc

SEQ ID NO: 1115264 - DNA, 25 bp, Homo sapien
ttgttacccacaccgtatatggaga

SEQ ID NO: 1115265 - DNA, 25 bp, Homo sapien
gagaactaactctcctggcaccatt

SEQ ID NO: 1115266 - DNA, 25 bp, Homo sapien
ctctctttgttgtgagctatagccc

SEQ ID NO: 1115267 - DNA, 25 bp, Homo sapien
cttcaccagcgccaactcctggctg

SEQ ID NO: 1115268 - DNA, 25 bp, Homo sapien
agcagagtcccttcactaaaatcat

SEQ ID NO: 1115269 - DNA, 25 bp, Homo sapien
cagcacagtagactgatccagccct

SEQ ID NO: 1115270 - DNA, 25 bp, Homo sapien
ccagcttggctgtcggggtctcaga

SEQ ID NO: 1115271 - DNA, 25 bp, Homo sapien
gactgactaaacttacaattcctgg

SEQ ID NO: 1115272 - DNA, 25 bp, Homo sapien
catttgaatctttggcaagccttgg

SEQ ID NO: 1115273 - DNA, 25 bp, Homo sapien
gattcctttaggttgcaaataactg

SEQ ID NO: 1115274 - DNA, 25 bp, Homo sapien
agtaaacgggagctacctccaggct

SEQ ID NO: 1115275 - DNA, 25 bp, Homo sapien
cacagcactgtatagggtctccaag

SEQ ID NO: 1115276 - DNA, 25 bp, Homo sapien
ctggctcctgactacaatgggtgga

SEQ ID NO: 1115277 - DNA, 25 bp, Homo sapien
gaatttagggatgcagccggctcct

SEQ ID NO: 1115278 - DNA, 25 bp, Homo sapien
tccagtgtttctgtcaaggattagc

SEQ ID NO: 1115279 - DNA, 25 bp, Homo sapien
gaggtggttttgactaccctatagc

SEQ ID NO: 1115280 - DNA, 25 bp, Homo sapien
tactgagcagtaccatgcacagagt

SEQ ID NO: 1115281 - DNA, 25 bp, Homo sapien
caataatacaggtaaggtactgagc

SEQ ID NO: 1115282 - DNA, 25 bp, Homo sapien
tcaacccaggtatctagagacacat

SEQ ID NO: 1115283 - DNA, 25 bp, Homo sapien
tgttcatagttagactcagggcact

SEQ ID NO: 1115284 - DNA, 25 bp, Homo sapien
tcagtatggaaagacatggctaaca

SEQ ID NO: 1115285 - DNA, 25 bp, Homo sapien
gctagactgacatgagcccagagtg

SEQ ID NO: 1115286 - DNA, 25 bp, Homo sapien
gaacaggtacccaatttcagtatgg

SEQ ID NO: 1115287 - DNA, 25 bp, Homo sapien
acagctgaaccaggtactgcccctt

SEQ ID NO: 1115288 - DNA, 25 bp, Homo sapien
ttcatctgcagaaccatctgatgga

SEQ ID NO: 1115289 - DNA, 25 bp, Homo sapien
actgccccttcccaaacacaaatgc

SEQ ID NO: 1115290 - DNA, 25 bp, Homo sapien
ctgatggatggcagacagctgaacc

SEQ ID NO: 1115291 - DNA, 25 bp, Homo sapien
gtctgtaacgttgccactcgtcgct

SEQ ID NO: 1115292 - DNA, 25 bp, Homo sapien
tgaagacctcccagtagtgaattgc

SEQ ID NO: 1115293 - DNA, 25 bp, Homo sapien
ttcagcatgtctccttggttcccag

SEQ ID NO: 1115294 - DNA, 25 bp, Homo sapien
tgccactcgtcgctgaggctcctgg

SEQ ID NO: 1115295 - DNA, 25 bp, Homo sapien
tagtcctgttggctatccctcagaa

SEQ ID NO: 1115296 - DNA, 25 bp, Homo sapien
tggctatccctcagaatctcttcaa

SEQ ID NO: 1115297 - DNA, 25 bp, Homo sapien
gaagtcaccgctatagtcctgttgg

SEQ ID NO: 1115298 - DNA, 25 bp, Homo sapien
tgaagcaatccttgagggaagtcac

SEQ ID NO: 1115299 - DNA, 25 bp, Homo sapien
ggagaaggtagtgaaagaataataa

SEQ ID NO: 1115300 - DNA, 25 bp, Homo sapien
gagaaggtagtgaaagaataataag

SEQ ID NO: 1115301 - DNA, 25 bp, Homo sapien
gaggagaaggtagtgaaagaataat

SEQ ID NO: 1115302 - DNA, 25 bp, Homo sapien
gaaggtagtgaaagaataataagaa

SEQ ID NO: 1115303 - DNA, 25 bp, Homo sapien
aagctttatggagaaagtttggatt

SEQ ID NO: 1115304 - DNA, 25 bp, Homo sapien
tccagcgtagcagactggataagct

SEQ ID NO: 1115305 - DNA, 25 bp, Homo sapien
gactggataagctttatggagaaag

SEQ ID NO: 1115306 - DNA, 25 bp, Homo sapien
ctggcataaattccagcgtagcaga

SEQ ID NO: 1115307 - DNA, 25 bp, Homo sapien
gcagtgacaagcaagggacagcaag

SEQ ID NO: 1115308 - DNA, 25 bp, Homo sapien
ggctgaagccagagggatctgagaa

SEQ ID NO: 1115309 - DNA, 25 bp, Homo sapien
ttccagcagttgagcatgtgtgatc

SEQ ID NO: 1115310 - DNA, 25 bp, Homo sapien
cagcaaggaggtcctcaaaagtgtc

SEQ ID NO: 1115311 - DNA, 25 bp, Homo sapien
gtgttcaatgagatccaccaccagg

SEQ ID NO: 1115312 - DNA, 25 bp, Homo sapien
cagaggccccgagtgttctggtagt

SEQ ID NO: 1115313 - DNA, 25 bp, Homo sapien
ctatggatagtgagaaaatctggct

SEQ ID NO: 1115314 - DNA, 25 bp, Homo sapien
tcaatccactgactggtagctatgg

SEQ ID NO: 1115315 - DNA, 25 bp, Homo sapien
ggctctcttacgaaggttttcagca

SEQ ID NO: 1115316 - DNA, 25 bp, Homo sapien
tcagattggccattaaagacagcat

SEQ ID NO: 1115317 - DNA, 25 bp, Homo sapien
cagcatagcagggatctttcagatt

SEQ ID NO: 1115318 - DNA, 25 bp, Homo sapien
ggcaatccgtggtaaggctctctta

SEQ ID NO: 1115319 - DNA, 25 bp, Homo sapien
cattctttgccgctgacaacttccc

SEQ ID NO: 1115320 - DNA, 25 bp, Homo sapien
tgtttctccgtaggtgcccattctt

SEQ ID NO: 1115321 - DNA, 25 bp, Homo sapien
ttctaaataattctgtttctccgta

SEQ ID NO: 1115322 - DNA, 25 bp, Homo sapien
ctggcttattaagtactgggatgat

SEQ ID NO: 1115323 - DNA, 25 bp, Homo sapien
ttctccaccgccatccaaatatgca

SEQ ID NO: 1115324 - DNA, 25 bp, Homo sapien
caccgccatccaaatatgcagccat

SEQ ID NO: 1115325 - DNA, 25 bp, Homo sapien
tccaccgccatccaaatatgcagcc

SEQ ID NO: 1115326 - DNA, 25 bp, Homo sapien
tctccaccgccatccaaatatgcag

SEQ ID NO: 1115327 - DNA, 25 bp, Homo sapien
caaaattgcatgctgctgtggaaat

SEQ ID NO: 1115328 - DNA, 25 bp, Homo sapien
tccttgaagtgatcaacttttgtca

SEQ ID NO: 1115329 - DNA, 25 bp, Homo sapien
taccagatatcaaaattgcatgctg

SEQ ID NO: 1115330 - DNA, 25 bp, Homo sapien
tgtctaaaccattgcggaaattacc

SEQ ID NO: 1115331 - DNA, 25 bp, Homo sapien
tttccctctgccttagaaaggctca

SEQ ID NO: 1115332 - DNA, 25 bp, Homo sapien
ggagaagaatgttgaccctctgctt

SEQ ID NO: 1115333 - DNA, 25 bp, Homo sapien
agttggttgactctttcagcttctt

SEQ ID NO: 1115334 - DNA, 25 bp, Homo sapien
ctgtgctttgagagttggttgactc

SEQ ID NO: 1115335 - DNA, 25 bp, Homo sapien
cccagaggtatcatgagcagcccaa

SEQ ID NO: 1115336 - DNA, 25 bp, Homo sapien
tctaacaatccgtttcccagaggta

SEQ ID NO: 1115337 - DNA, 25 bp, Homo sapien
taacaatccgtttcccagaggtatc

SEQ ID NO: 1115338 - DNA, 25 bp, Homo sapien
atttctaacaatccgtttcccagag

SEQ ID NO: 1115339 - DNA, 25 bp, Homo sapien
gataaactactgaaaaatgctctgc

SEQ ID NO: 1115340 - DNA, 25 bp, Homo sapien
caggcaaaggtgtcttgattcagga

SEQ ID NO: 1115341 - DNA, 25 bp, Homo sapien
gacagtgcactaatcacagcccttg

SEQ ID NO: 1115342 - DNA, 25 bp, Homo sapien
caaagttaagacttctccaggagac

SEQ ID NO: 1115343 - DNA, 25 bp, Homo sapien
gttgggtcgatcagccactctgaat

SEQ ID NO: 1115344 - DNA, 25 bp, Homo sapien
cattcatgagaagttgggtcgatca

SEQ ID NO: 1115345 - DNA, 25 bp, Homo sapien
agccaagcactgagtttttgtgcat

SEQ ID NO: 1115346 - DNA, 25 bp, Homo sapien
cactgagtttttgtgcattcatgag

SEQ ID NO: 1115347 - DNA, 25 bp, Homo sapien
tcaggagaagcaactagaaagggcc

SEQ ID NO: 1115348 - DNA, 25 bp, Homo sapien
gaatagaggagaagtccttgagtcc

SEQ ID NO: 1115349 - DNA, 25 bp, Homo sapien
tccttgagtcccagttcaggagaag

SEQ ID NO: 1115350 - DNA, 25 bp, Homo sapien
agcaactagaaagggccagcgtgca

SEQ ID NO: 1115351 - DNA, 25 bp, Homo sapien
cgtggattcatttcttgttatcacc

SEQ ID NO: 1115352 - DNA, 25 bp, Homo sapien
gacattctcgtggattcatttcttg

SEQ ID NO: 1115353 - DNA, 25 bp, Homo sapien
ctcgtggattcatttcttgttatca

SEQ ID NO: 1115354 - DNA, 25 bp, Homo sapien
ttaggacattctcgtggattcattt

SEQ ID NO: 1115355 - DNA, 25 bp, Homo sapien
ccgcgagagggtgcgggacgcgagg

SEQ ID NO: 1115356 - DNA, 25 bp, Homo sapien
ggagagggtccgcaccgcgagaggg

SEQ ID NO: 1115357 - DNA, 25 bp, Homo sapien
agagggtccgcaccgcgagagggtg

SEQ ID NO: 1115358 - DNA, 25 bp, Homo sapien
tccgcaccgcgagagggtgcgggac

SEQ ID NO: 1115359 - DNA, 25 bp, Homo sapien
gcggagagggcggtcggctccggga

SEQ ID NO: 1115360 - DNA, 25 bp, Homo sapien
ctgggtggccgacgcgcggagaggg

SEQ ID NO: 1115361 - DNA, 25 bp, Homo sapien
cccatccccttggcttgacagccag

SEQ ID NO: 1115362 - DNA, 25 bp, Homo sapien
aactgggtggccgacgcgcggagag

SEQ ID NO: 1115363 - DNA, 25 bp, Homo sapien
attctgtatggctcttttgctagtt

SEQ ID NO: 1115364 - DNA, 25 bp, Homo sapien
ttgcttcgggtgctaattctgtatg

SEQ ID NO: 1115365 - DNA, 25 bp, Homo sapien
cttgggctgccttggattgcaatcc

SEQ ID NO: 1115366 - DNA, 25 bp, Homo sapien
tgccccaggaggaaataacggactg

SEQ ID NO: 1115367 - DNA, 25 bp, Homo sapien
gtcctgcccaaagaccgtccagaaa

SEQ ID NO: 1115368 - DNA, 25 bp, Homo sapien
atcgacgacattaggcaagagaaac

SEQ ID NO: 1115369 - DNA, 25 bp, Homo sapien
ctagtaatcgacgacattaggcaag

SEQ ID NO: 1115370 - DNA, 25 bp, Homo sapien
aagtcctgcccaaagaccgtccaga

SEQ ID NO: 1115371 - DNA, 25 bp, Homo sapien
cgtatataccttaattggaggttgg

SEQ ID NO: 1115372 - DNA, 25 bp, Homo sapien
cagtggatcatccaactggccgtat

SEQ ID NO: 1115373 - DNA, 25 bp, Homo sapien
gcactgcgttcaaacacacgccatt

SEQ ID NO: 1115374 - DNA, 25 bp, Homo sapien
gagatccagtctgccgcactgcgtt

SEQ ID NO: 1115375 - DNA, 25 bp, Homo sapien
atatagatttaacttctcttcccag

SEQ ID NO: 1115376 - DNA, 25 bp, Homo sapien
tatttgggtatagcagtagcctgcg

SEQ ID NO: 1115377 - DNA, 25 bp, Homo sapien
gttatccaaccacaaagcattcttg

SEQ ID NO: 1115378 - DNA, 25 bp, Homo sapien
ctgcctctgttatccaaccacaaag

SEQ ID NO: 1115379 - DNA, 25 bp, Homo sapien
agcgcggcgacgaagacgccaacaa

SEQ ID NO: 1115380 - DNA, 25 bp, Homo sapien
tttcgctcgaggtcccggcggagaa

SEQ ID NO: 1115381 - DNA, 25 bp, Homo sapien
caacaagctggtgtgcagcggacag

SEQ ID NO: 1115382 - DNA, 25 bp, Homo sapien
gcgggcgtctttcgctcgaggtccc

SEQ ID NO: 1115383 - DNA, 25 bp, Homo sapien
cgactaaggcgagcgccctggcgat

SEQ ID NO: 1115384 - DNA, 25 bp, Homo sapien
gggtgacgactaaggcgagcgccct

SEQ ID NO: 1115385 - DNA, 25 bp, Homo sapien
gcgccctggcgatgcgggagctcat

SEQ ID NO: 1115386 - DNA, 25 bp, Homo sapien
gtggagaagggtgacgactaaggcg

SEQ ID NO: 1115387 - DNA, 25 bp, Homo sapien
ctacccgcaaacgatcgcgaacttt

SEQ ID NO: 1115388 - DNA, 25 bp, Homo sapien
gtgcttaaagaaacggctacccgca

SEQ ID NO: 1115389 - DNA, 25 bp, Homo sapien
aacggctacccgcaaacgatcgcga

SEQ ID NO: 1115390 - DNA, 25 bp, Homo sapien
cctgccgtgggcaatctgggaccag

SEQ ID NO: 1115391 - DNA, 25 bp, Homo sapien
ggagcctctgatctcgtccagcccg

SEQ ID NO: 1115392 - DNA, 25 bp, Homo sapien
ctgctcccaccaagaggtcccgaca

SEQ ID NO: 1115393 - DNA, 25 bp, Homo sapien
ggccacctcggaaggctgctcccac

SEQ ID NO: 1115394 - DNA, 25 bp, Homo sapien
cctatcgacggggagcctctgatct

SEQ ID NO: 1115395 - DNA, 25 bp, Homo sapien
gcagtgagggacgggggtctccgac

SEQ ID NO: 1115396 - DNA, 25 bp, Homo sapien
gccgcagtgagggacgggggtctcc

SEQ ID NO: 1115397 - DNA, 25 bp, Homo sapien
cgcagtgagggacgggggtctccga

SEQ ID NO: 1115398 - DNA, 25 bp, Homo sapien
ctgccgcagtgagggacgggggtct

SEQ ID NO: 1115399 - DNA, 25 bp, Homo sapien
tgagactcggcgcggtgcgcaggag

SEQ ID NO: 1115400 - DNA, 25 bp, Homo sapien
agaagatacgcgtgagactcggcgc

SEQ ID NO: 1115401 - DNA, 25 bp, Homo sapien
gaagggggagaagatacgcgtgaga

SEQ ID NO: 1115402 - DNA, 25 bp, Homo sapien
gggagaagatacgcgtgagactcgg

SEQ ID NO: 1115403 - DNA, 25 bp, Homo sapien
gaagttgcattccagccccttggtg

SEQ ID NO: 1115404 - DNA, 25 bp, Homo sapien
tgcttggcgcagaccttacagcagc

SEQ ID NO: 1115405 - DNA, 25 bp, Homo sapien
tgcagatccccttcagagcggtgga

SEQ ID NO: 1115406 - DNA, 25 bp, Homo sapien
cgttttgctgcagtcctcgttgagc

SEQ ID NO: 1115407 - DNA, 25 bp, Homo sapien
cgtatgcgctttcgttgggcccaga

SEQ ID NO: 1115408 - DNA, 25 bp, Homo sapien
catgtgcctttctgccaagctacca

SEQ ID NO: 1115409 - DNA, 25 bp, Homo sapien
caggaatcacttttccgtatgcgct

SEQ ID NO: 1115410 - DNA, 25 bp, Homo sapien
gaacaataagttagtcaggaatcac

SEQ ID NO: 1115411 - DNA, 25 bp, Homo sapien
agattccaaaccaccgcctgaaact

SEQ ID NO: 1115412 - DNA, 25 bp, Homo sapien
ttccaaaccaccgcctgaaactcat

SEQ ID NO: 1115413 - DNA, 25 bp, Homo sapien
gattccaaaccaccgcctgaaactc

SEQ ID NO: 1115414 - DNA, 25 bp, Homo sapien
taagattccaaaccaccgcctgaaa

SEQ ID NO: 1115415 - DNA, 25 bp, Homo sapien
ggcgccatcaatacatgtgcactga

SEQ ID NO: 1115416 - DNA, 25 bp, Homo sapien
gtttctcgtcaactccacctcggag

SEQ ID NO: 1115417 - DNA, 25 bp, Homo sapien
tccttgccaaggaggccgtcctggt

SEQ ID NO: 1115418 - DNA, 25 bp, Homo sapien
cagcactgcccggtaactttgacca

SEQ ID NO: 1115419 - DNA, 25 bp, Homo sapien
gatttagaccagaaatgcatctcag

SEQ ID NO: 1115420 - DNA, 25 bp, Homo sapien
cagtgtctgaagtgctcagtctcca

SEQ ID NO: 1115421 - DNA, 25 bp, Homo sapien
ggcataccgacacaaacaggctcaa

SEQ ID NO: 1115422 - DNA, 25 bp, Homo sapien
ctagagacatataagagggaagact

SEQ ID NO: 1115423 - DNA, 25 bp, Homo sapien
tttctttcacaaggcggcactcagg

SEQ ID NO: 1115424 - DNA, 25 bp, Homo sapien
cactcagggttgtcattggtaactc

SEQ ID NO: 1115425 - DNA, 25 bp, Homo sapien
tgtataggatgcgaggctccattcc

SEQ ID NO: 1115426 - DNA, 25 bp, Homo sapien
taactcgtgtggagataccagttcc

SEQ ID NO: 1115427 - DNA, 25 bp, Homo sapien
cagtctacacgtccctgaaggaact

SEQ ID NO: 1115428 - DNA, 25 bp, Homo sapien
caggcaacagtctacacgtccctga

SEQ ID NO: 1115429 - DNA, 25 bp, Homo sapien
acctgccaggcaacagtctacacgt

SEQ ID NO: 1115430 - DNA, 25 bp, Homo sapien
ggcaacagtctacacgtccctgaag

SEQ ID NO: 1115431 - DNA, 25 bp, Homo sapien
tccacgcaggaaccgcagtacttgg

SEQ ID NO: 1115432 - DNA, 25 bp, Homo sapien
agcgtaagtaaacctgactggttcg

SEQ ID NO: 1115433 - DNA, 25 bp, Homo sapien
gcagcatcggccgtccacgcaggaa

SEQ ID NO: 1115434 - DNA, 25 bp, Homo sapien
cggtatttcttcacactcaaacatc

SEQ ID NO: 1115435 - DNA, 25 bp, Homo sapien
cagcctgtagaagggaaacgctgct

SEQ ID NO: 1115436 - DNA, 25 bp, Homo sapien
cttcattggcatgcgggcagttgta

SEQ ID NO: 1115437 - DNA, 25 bp, Homo sapien
acgctgcttcattggcatgcgggca

SEQ ID NO: 1115438 - DNA, 25 bp, Homo sapien
gaagggaaacgctgcttcattggca

SEQ ID NO: 1115439 - DNA, 25 bp, Homo sapien
ccaatcgtggctgcattagtgtcca

SEQ ID NO: 1115440 - DNA, 25 bp, Homo sapien
ttcaggaagggatggaatgccctcc

SEQ ID NO: 1115441 - DNA, 25 bp, Homo sapien
gaagcaaagtattctccaatcgtgg

SEQ ID NO: 1115442 - DNA, 25 bp, Homo sapien
ttgtctaggtgtgccctggaaaccc

SEQ ID NO: 1115443 - DNA, 25 bp, Homo sapien
tgctgtatcccaataagtcctgttt

SEQ ID NO: 1115444 - DNA, 25 bp, Homo sapien
tgtgcttcatacaatgtcgtgttca

SEQ ID NO: 1115445 - DNA, 25 bp, Homo sapien
tgaataattgagtacgtgagctagg

SEQ ID NO: 1115446 - DNA, 25 bp, Homo sapien
gagcacctctaaaaataccgaatgg

SEQ ID NO: 1115447 - DNA, 25 bp, Homo sapien
catgaagcgctgttttcttaaatca

SEQ ID NO: 1115448 - DNA, 25 bp, Homo sapien
gaacatgaagcgctgttttcttaaa

SEQ ID NO: 1115449 - DNA, 25 bp, Homo sapien
aggctttatattctgatgaacatga

SEQ ID NO: 1115450 - DNA, 25 bp, Homo sapien
ctgatgaacatgaagcgctgttttc

SEQ ID NO: 1115451 - DNA, 25 bp, Homo sapien
tccagtgttggagagcaatacttca

SEQ ID NO: 1115452 - DNA, 25 bp, Homo sapien
tacttccctgcacactgaaaggatc

SEQ ID NO: 1115453 - DNA, 25 bp, Homo sapien
cataagaagcaatttgttggactcc

SEQ ID NO: 1115454 - DNA, 25 bp, Homo sapien
caatacttcagggttgatgcttggg

SEQ ID NO: 1115455 - DNA, 25 bp, Homo sapien
agagagttccagttggagtgagatc

SEQ ID NO: 1115456 - DNA, 25 bp, Homo sapien
ttccagttggagtgagatcatcatg

SEQ ID NO: 1115457 - DNA, 25 bp, Homo sapien
tatcaagtaatcagtgagagagttc

SEQ ID NO: 1115458 - DNA, 25 bp, Homo sapien
gagttccagttggagtgagatcatc

SEQ ID NO: 1115459 - DNA, 25 bp, Homo sapien
gggacaggcctgtccgcatcaccag

SEQ ID NO: 1115460 - DNA, 25 bp, Homo sapien
caggcctgtccgcatcaccagggca

SEQ ID NO: 1115461 - DNA, 25 bp, Homo sapien
gcctgtccgcatcaccagggcacat

SEQ ID NO: 1115462 - DNA, 25 bp, Homo sapien
ggacaggcctgtccgcatcaccagg

SEQ ID NO: 1115463 - DNA, 25 bp, Homo sapien
ggtcctgtcggcctgagaccaacct

SEQ ID NO: 1115464 - DNA, 25 bp, Homo sapien
agaccaacctgtcatagcagtctgc

SEQ ID NO: 1115465 - DNA, 25 bp, Homo sapien
gctgggtcctgtcggcctgagacca

SEQ ID NO: 1115466 - DNA, 25 bp, Homo sapien
cctgtcatagcagtctgctctcttg

SEQ ID NO: 1115467 - DNA, 25 bp, Homo sapien
gatggcaagtcctcatacatctgtg

SEQ ID NO: 1115468 - DNA, 25 bp, Homo sapien
tcctagatggcaagtcctcatacat

SEQ ID NO: 1115469 - DNA, 25 bp, Homo sapien
tgattctctgactcctagatggcaa

SEQ ID NO: 1115470 - DNA, 25 bp, Homo sapien
tctctgactcctagatggcaagtcc

SEQ ID NO: 1115471 - DNA, 25 bp, Homo sapien
ttccatatgggccatgggaaaacca

SEQ ID NO: 1115472 - DNA, 25 bp, Homo sapien
ggttcccttccatatgggccatggg

SEQ ID NO: 1115473 - DNA, 25 bp, Homo sapien
tgggccatgggaaaaccagagtgaa

SEQ ID NO: 1115474 - DNA, 25 bp, Homo sapien
gcagcaggaacaggtctaggtggca

SEQ ID NO: 1115475 - DNA, 25 bp, Homo sapien
ccgaaatagccagctcccacaatcc

SEQ ID NO: 1115476 - DNA, 25 bp, Homo sapien
cagaaggttccccgaaatagccagc

SEQ ID NO: 1115477 - DNA, 25 bp, Homo sapien
ctcccacaatccacttaaactgtga

SEQ ID NO: 1115478 - DNA, 25 bp, Homo sapien
cacaatccacttaaactgtgatttt

SEQ ID NO: 1115479 - DNA, 25 bp, Homo sapien
aactacaggagcaaagatcttttca

SEQ ID NO: 1115480 - DNA, 25 bp, Homo sapien
cttctagcctgcaaaactacaggag

SEQ ID NO: 1115481 - DNA, 25 bp, Homo sapien
gaaattcaaaggttgtgagggcaag

SEQ ID NO: 1115482 - DNA, 25 bp, Homo sapien
aaattcaaaggttgtgagggcaaga

SEQ ID NO: 1115483 - DNA, 25 bp, Homo sapien
tagaaattcaaaggttgtgagggca

SEQ ID NO: 1115484 - DNA, 25 bp, Homo sapien
tatagaaattcaaaggttgtgaggg

SEQ ID NO: 1115485 - DNA, 25 bp, Homo sapien
gatacatgtggactctttaaggcat

SEQ ID NO: 1115486 - DNA, 25 bp, Homo sapien
catgtggactctttaaggcatttac

SEQ ID NO: 1115487 - DNA, 25 bp, Homo sapien
gaattttggatacatgtggactctt

SEQ ID NO: 1115488 - DNA, 25 bp, Homo sapien
tttggatacatgtggactctttaag

SEQ ID NO: 1115489 - DNA, 25 bp, Homo sapien
ctgcgagggcatatgtagtcctgat

SEQ ID NO: 1115490 - DNA, 25 bp, Homo sapien
gagggcatatgtagtcctgattgaa

SEQ ID NO: 1115491 - DNA, 25 bp, Homo sapien
tcctgattgaatgggcttctgtctt

SEQ ID NO: 1115492 - DNA, 25 bp, Homo sapien
catatgtagtcctgattgaatgggc

SEQ ID NO: 1115493 - DNA, 25 bp, Homo sapien
gcggcgcagcggtcaccgaataggg

SEQ ID NO: 1115494 - DNA, 25 bp, Homo sapien
gcgcagcggtcaccgaataggggcc

SEQ ID NO: 1115495 - DNA, 25 bp, Homo sapien
ggcggcgcagcggtcaccgaatagg

SEQ ID NO: 1115496 - DNA, 25 bp, Homo sapien
ctggcggcgcagcggtcaccgaata

SEQ ID NO: 1115497 - DNA, 25 bp, Homo sapien
cgccctcaggttccacaaagctggg

SEQ ID NO: 1115498 - DNA, 25 bp, Homo sapien
cacacgccgtcggtcctgagggacg

SEQ ID NO: 1115499 - DNA, 25 bp, Homo sapien
tgcgtcaagcgccagcggcgtgact

SEQ ID NO: 1115500 - DNA, 25 bp, Homo sapien
tcgtggccattgtcttgcaggaggc

SEQ ID NO: 1115501 - DNA, 25 bp, Homo sapien
gcacacaaacctttggaattgctgt

SEQ ID NO: 1115502 - DNA, 25 bp, Homo sapien
tggccgcctgcctgtaccagggatg

SEQ ID NO: 1115503 - DNA, 25 bp, Homo sapien
tttcaggactcatgggttggccgcc

SEQ ID NO: 1115504 - DNA, 25 bp, Homo sapien
cacccagctctaccaagcacacaaa

SEQ ID NO: 1115505 - DNA, 25 bp, Homo sapien
catcctttagcatttgatgagctgc

SEQ ID NO: 1115506 - DNA, 25 bp, Homo sapien
catcatgttgttgctagtttgagca

SEQ ID NO: 1115507 - DNA, 25 bp, Homo sapien
tgaacattttccatactggagtgtg

SEQ ID NO: 1115508 - DNA, 25 bp, Homo sapien
tggcatcagcatttgagagatactg

SEQ ID NO: 1115509 - DNA, 25 bp, Homo sapien
ataaatatgaattggctaggcacag

SEQ ID NO: 1115510 - DNA, 25 bp, Homo sapien
gttccactgcattcctgggcactgc

SEQ ID NO: 1115511 - DNA, 25 bp, Homo sapien
tttataaatatgaattggctaggca

SEQ ID NO: 1115512 - DNA, 25 bp, Homo sapien
cactgcattcctgggcactgcctgg

SEQ ID NO: 1115513 - DNA, 25 bp, Homo sapien
ttctggtgtgtaaacaaactccttg

SEQ ID NO: 1115514 - DNA, 25 bp, Homo sapien
tagatgtttgtagcattgagaccca

SEQ ID NO: 1115515 - DNA, 25 bp, Homo sapien
ggaggccctctccatgttagcttat

SEQ ID NO: 1115516 - DNA, 25 bp, Homo sapien
tatcctgtagtttccactgctcagg

SEQ ID NO: 1115517 - DNA, 25 bp, Homo sapien
tatactgtgttttgatatgtctagc

SEQ ID NO: 1115518 - DNA, 25 bp, Homo sapien
catcattactgcagaagggtgttgt

SEQ ID NO: 1115519 - DNA, 25 bp, Homo sapien
catggcttaacttatacgttatggc

SEQ ID NO: 1115520 - DNA, 25 bp, Homo sapien
gctctgtatacagtttgatctcatg

SEQ ID NO: 1115521 - DNA, 25 bp, Homo sapien
gaactctcctttgcacttgatcagc

SEQ ID NO: 1115522 - DNA, 25 bp, Homo sapien
catgcgtgacgaaacccaaggatca

SEQ ID NO: 1115523 - DNA, 25 bp, Homo sapien
caagtggtatgagcatagcttcctc

SEQ ID NO: 1115524 - DNA, 25 bp, Homo sapien
ggctcgaatggtcctctcactgcag

SEQ ID NO: 1115525 - DNA, 25 bp, Homo sapien
cagaatatcaacttgaggccggcac

SEQ ID NO: 1115526 - DNA, 25 bp, Homo sapien
tcagaatatcaacttgaggccggca

SEQ ID NO: 1115527 - DNA, 25 bp, Homo sapien
tatgccttctgtatcaggtcctgaa

SEQ ID NO: 1115528 - DNA, 25 bp, Homo sapien
gatccttctagaggaacatcagtta

SEQ ID NO: 1115529 - DNA, 25 bp, Homo sapien
tgtatgaggtatttgtttgatccaa

SEQ ID NO: 1115530 - DNA, 25 bp, Homo sapien
gattgaaccacctaaatgtatgagg

SEQ ID NO: 1115531 - DNA, 25 bp, Homo sapien
ttgtgttgcttggtgctctttcgaa

SEQ ID NO: 1115532 - DNA, 25 bp, Homo sapien
cttatggctttcatagactatttcc

SEQ ID NO: 1115533 - DNA, 25 bp, Homo sapien
tttcgaaaacaaggtgcttatggct

SEQ ID NO: 1115534 - DNA, 25 bp, Homo sapien
gttgcttggtgctctttcgaaaaca

SEQ ID NO: 1115535 - DNA, 25 bp, Homo sapien
cagctggcataaggcaacatttctt

SEQ ID NO: 1115536 - DNA, 25 bp, Homo sapien
cgaaagtattacattgacagcagtt

SEQ ID NO: 1115537 - DNA, 25 bp, Homo sapien
tagttccgaattcaggctgttggcc

SEQ ID NO: 1115538 - DNA, 25 bp, Homo sapien
caggaacctaatcaacttccagtga

SEQ ID NO: 1115539 - DNA, 25 bp, Homo sapien
atcagatagttgtaggtaagcggcg

SEQ ID NO: 1115540 - DNA, 25 bp, Homo sapien
cagatagttgtaggtaagcggcgtt

SEQ ID NO: 1115541 - DNA, 25 bp, Homo sapien
gatagttgtaggtaagcggcgttat

SEQ ID NO: 1115542 - DNA, 25 bp, Homo sapien
ttgtaggtaagcggcgttatttctg

SEQ ID NO: 1115543 - DNA, 25 bp, Homo sapien
gaagcaaactcaagggtattacttg

SEQ ID NO: 1115544 - DNA, 25 bp, Homo sapien
taaagggattcccatggtagcttcc

SEQ ID NO: 1115545 - DNA, 25 bp, Homo sapien
tgctttgtataggataacacttagc

SEQ ID NO: 1115546 - DNA, 25 bp, Homo sapien
acatggagaaactattgaataaccc

SEQ ID NO: 1115547 - DNA, 25 bp, Homo sapien
ttatagcagtttacacacagttgcc

SEQ ID NO: 1115548 - DNA, 25 bp, Homo sapien
caaatctaactttctgcattgaagg

SEQ ID NO: 1115549 - DNA, 25 bp, Homo sapien
tatagggttaatatagtgacttccc

SEQ ID NO: 1115550 - DNA, 25 bp, Homo sapien
taaccatggtctctaaaaagtagct

SEQ ID NO: 1115551 - DNA, 25 bp, Homo sapien
tctggatcccgtagtgacaatgtca

SEQ ID NO: 1115552 - DNA, 25 bp, Homo sapien
caataattcgttagggagcagcagg

SEQ ID NO: 1115553 - DNA, 25 bp, Homo sapien
tgacccacatctggcacaaactttg

SEQ ID NO: 1115554 - DNA, 25 bp, Homo sapien
gcagcaggattctgacaactgaaag

SEQ ID NO: 1115555 - DNA, 25 bp, Homo sapien
tagagtagtgatcaccctgtccctg

SEQ ID NO: 1115556 - DNA, 25 bp, Homo sapien
tcagtactagccaaggaaacctgct

SEQ ID NO: 1115557 - DNA, 25 bp, Homo sapien
tgagtaaccatattgacagggctac

SEQ ID NO: 1115558 - DNA, 25 bp, Homo sapien
tataggaatcgaagagtagctcagg

SEQ ID NO: 1115559 - DNA, 25 bp, Homo sapien
gagcatggagtatgattcagtttta

SEQ ID NO: 1115560 - DNA, 25 bp, Homo sapien
tatagtcagtcttatgagcatggag

SEQ ID NO: 1115561 - DNA, 25 bp, Homo sapien
tttccttacattttaggtagagcga

SEQ ID NO: 1115562 - DNA, 25 bp, Homo sapien
tataattattaggtacacgatatgt

SEQ ID NO: 1115563 - DNA, 25 bp, Homo sapien
ccgacttgatttccgaagtgggtgt

SEQ ID NO: 1115564 - DNA, 25 bp, Homo sapien
taacaccggccggatttgcttggct

SEQ ID NO: 1115565 - DNA, 25 bp, Homo sapien
agtcaacgccgagcgcctgcagttg

SEQ ID NO: 1115566 - DNA, 25 bp, Homo sapien
cttgtttgacaaacgttcgggcgcg

SEQ ID NO: 1115567 - DNA, 25 bp, Homo sapien
ggcaactctgtattgagcaagtcag

SEQ ID NO: 1115568 - DNA, 25 bp, Homo sapien
cacattcaaacaggtagtatgcacg

SEQ ID NO: 1115569 - DNA, 25 bp, Homo sapien
gaaatgattttaagcttagggatag

SEQ ID NO: 1115570 - DNA, 25 bp, Homo sapien
tattttaggcccttggtgagtaaga

SEQ ID NO: 1115571 - DNA, 25 bp, Homo sapien
tgcttccacgtcctcgctattcagt

SEQ ID NO: 1115572 - DNA, 25 bp, Homo sapien
cttccacgtcctcgctattcagtct

SEQ ID NO: 1115573 - DNA, 25 bp, Homo sapien
acgtcctcgctattcagtctggcct

SEQ ID NO: 1115574 - DNA, 25 bp, Homo sapien
tccacgtcctcgctattcagtctgg

SEQ ID NO: 1115575 - DNA, 25 bp, Homo sapien
cttaaatgcatgggcagcaccaaaa

SEQ ID NO: 1115576 - DNA, 25 bp, Homo sapien
gaacagcattcttctaatgggtgtt

SEQ ID NO: 1115577 - DNA, 25 bp, Homo sapien
ggtgtttggcctctgatttcagtct

SEQ ID NO: 1115578 - DNA, 25 bp, Homo sapien
cagcattcttctaatgggtgtttgg

SEQ ID NO: 1115579 - DNA, 25 bp, Homo sapien
ctagtatctgcggagaaccatagca

SEQ ID NO: 1115580 - DNA, 25 bp, Homo sapien
gaaaatgatctgaacctgctcagtc

SEQ ID NO: 1115581 - DNA, 25 bp, Homo sapien
ccagcttcaagcaagggcaactttt

SEQ ID NO: 1115582 - DNA, 25 bp, Homo sapien
ggcaacttttccctgtgtctggttc

SEQ ID NO: 1115583 - DNA, 25 bp, Homo sapien
ggaaagtatatcaatgtcatccgta

SEQ ID NO: 1115584 - DNA, 25 bp, Homo sapien
cgtattcttgtacttgctttcccga

SEQ ID NO: 1115585 - DNA, 25 bp, Homo sapien
tgctttcccgaataatttttatcaa

SEQ ID NO: 1115586 - DNA, 25 bp, Homo sapien
tttatcaacacattggcaccagctg

SEQ ID NO: 1115587 - DNA, 25 bp, Homo sapien
actccaactccattcttgttccttg

SEQ ID NO: 1115588 - DNA, 25 bp, Homo sapien
tgaagcccactccaactccattctt

SEQ ID NO: 1115589 - DNA, 25 bp, Homo sapien
gcttctgaagcccactccaactcca

SEQ ID NO: 1115590 - DNA, 25 bp, Homo sapien
ctccaactccattcttgttccttgg

SEQ ID NO: 1115591 - DNA, 25 bp, Homo sapien
atgagaatacatggatacagggcag

SEQ ID NO: 1115592 - DNA, 25 bp, Homo sapien
gaatacatggatacagggcagggaa

SEQ ID NO: 1115593 - DNA, 25 bp, Homo sapien
gagggataacattagaaattcctaa

SEQ ID NO: 1115594 - DNA, 25 bp, Homo sapien
atacatggatacagggcagggaaca

SEQ ID NO: 1115595 - DNA, 25 bp, Homo sapien
tagtcagaacaaaacgtcgatcacc

SEQ ID NO: 1115596 - DNA, 25 bp, Homo sapien
catgaaacagtcaattggcatagaa

SEQ ID NO: 1115597 - DNA, 25 bp, Homo sapien
gatgctttagtccactcagccatga

SEQ ID NO: 1115598 - DNA, 25 bp, Homo sapien
tactgtgttttttccaggatccaga

SEQ ID NO: 1115599 - DNA, 25 bp, Homo sapien
cccccatgacacaagctgacctgtg

SEQ ID NO: 1115600 - DNA, 25 bp, Homo sapien
gattagcctaaattactaattgaaa

SEQ ID NO: 1115601 - DNA, 25 bp, Homo sapien
cacagtggggcctttcagagggtgg

SEQ ID NO: 1115602 - DNA, 25 bp, Homo sapien
atgtcaaacgacatagattagccta

SEQ ID NO: 1115603 - DNA, 25 bp, Homo sapien
gaatgccagatactacacagaaact

SEQ ID NO: 1115604 - DNA, 25 bp, Homo sapien
tagctgggcagtagacaattacggc

SEQ ID NO: 1115605 - DNA, 25 bp, Homo sapien
cacgaaagtgctgcagcgaggaact

SEQ ID NO: 1115606 - DNA, 25 bp, Homo sapien
aactattaggtgttcctgtctcagg

SEQ ID NO: 1115607 - DNA, 25 bp, Homo sapien
cctgtaatctcataactgaaagata

SEQ ID NO: 1115608 - DNA, 25 bp, Homo sapien
tgagtactgctttcaaggccgagta

SEQ ID NO: 1115609 - DNA, 25 bp, Homo sapien
aatatatacactacttccaatagct

SEQ ID NO: 1115610 - DNA, 25 bp, Homo sapien
taggatatatttaactgtatggtca

SEQ ID NO: 1115611 - DNA, 25 bp, Homo sapien
tttatatcaatcttatgcttttgca

SEQ ID NO: 1115612 - DNA, 25 bp, Homo sapien
taagttgaaacttccactatgtgta

SEQ ID NO: 1115613 - DNA, 25 bp, Homo sapien
tcacttataatagctgtctccaact

SEQ ID NO: 1115614 - DNA, 25 bp, Homo sapien
tagttcctaaagtcctttatatcaa

SEQ ID NO: 1115615 - DNA, 25 bp, Homo sapien
cccaacactgacaagttgtacagaa

SEQ ID NO: 1115616 - DNA, 25 bp, Homo sapien
atatgtgtctttgttgcacccaaca

SEQ ID NO: 1115617 - DNA, 25 bp, Homo sapien
tgatagatagtgtcactcttatcat

SEQ ID NO: 1115618 - DNA, 25 bp, Homo sapien
tgtacagaagtacatttgtcagtta

SEQ ID NO: 1115619 - DNA, 25 bp, Homo sapien
aacgtctaattcagagccctttttg

SEQ ID NO: 1115620 - DNA, 25 bp, Homo sapien
caatatggatgcagatggtttcttc

SEQ ID NO: 1115621 - DNA, 25 bp, Homo sapien
ttttagaacacaagatgaaggaggt

SEQ ID NO: 1115622 - DNA, 25 bp, Homo sapien
tagagaagcctccagttcactcaca

SEQ ID NO: 1115623 - DNA, 25 bp, Homo sapien
gagcctgctgcatacattgtgtcag

SEQ ID NO: 1115624 - DNA, 25 bp, Homo sapien
gaacttaaggcaaccaggagagtca

SEQ ID NO: 1115625 - DNA, 25 bp, Homo sapien
ctgaacttaaggcaaccaggagagt

SEQ ID NO: 1115626 - DNA, 25 bp, Homo sapien
caggttgcaaataggacctgcaatg

SEQ ID NO: 1115627 - DNA, 25 bp, Homo sapien
gcaaataggacctgcaatgctcctt

SEQ ID NO: 1115628 - DNA, 25 bp, Homo sapien
gcaatgagcaatccattatacccat

SEQ ID NO: 1115629 - DNA, 25 bp, Homo sapien
ctgattctcaggtacctgaggatta

SEQ ID NO: 1115630 - DNA, 25 bp, Homo sapien
gattaattgcaatgagcaatccatt

SEQ ID NO: 1115631 - DNA, 25 bp, Homo sapien
tacccattgtcttgaagctgtactc

SEQ ID NO: 1115632 - DNA, 25 bp, Homo sapien
catgtggcaggtattaaaatcttta

SEQ ID NO: 1115633 - DNA, 25 bp, Homo sapien
tattagctttccatgtggcaggtat

SEQ ID NO: 1115634 - DNA, 25 bp, Homo sapien
tagctttccatgtggcaggtattaa

SEQ ID NO: 1115635 - DNA, 25 bp, Homo sapien
ctttccatgtggcaggtattaaaat

SEQ ID NO: 1115636 - DNA, 25 bp, Homo sapien
ctcgtgatccgtagccagctgttaa

SEQ ID NO: 1115637 - DNA, 25 bp, Homo sapien
gctgttaagttatcattcagtagga

SEQ ID NO: 1115638 - DNA, 25 bp, Homo sapien
tattgtagggtgtatggatcatctc

SEQ ID NO: 1115639 - DNA, 25 bp, Homo sapien
ttcagtaggaaattaggtgtgaaat

SEQ ID NO: 1115640 - DNA, 25 bp, Homo sapien
ggcccattcatggacaaacactcgg

SEQ ID NO: 1115641 - DNA, 25 bp, Homo sapien
tcatcgaacacaccccaacggaggt

SEQ ID NO: 1115642 - DNA, 25 bp, Homo sapien
cccatttatgtagaaaggtttgtca

SEQ ID NO: 1115643 - DNA, 25 bp, Homo sapien
ggtttgtcattgttatactcatcga

SEQ ID NO: 1115644 - DNA, 25 bp, Homo sapien
catgaacattattgatgcagttgca

SEQ ID NO: 1115645 - DNA, 25 bp, Homo sapien
cagttgcattttgggtgctattgta

SEQ ID NO: 1115646 - DNA, 25 bp, Homo sapien
gaagataaactttgcatgaacatta

SEQ ID NO: 1115647 - DNA, 25 bp, Homo sapien
tagataaaggtgcatccttctttaa

SEQ ID NO: 1115648 - DNA, 25 bp, Homo sapien
tctttaataaagagaggcacttctc

SEQ ID NO: 1115649 - DNA, 25 bp, Homo sapien
ctttaataaagagaggcacttctcc

SEQ ID NO: 1115650 - DNA, 25 bp, Homo sapien
aaagcaaacatagttctcattctca

SEQ ID NO: 1115651 - DNA, 25 bp, Homo sapien
aagcaaacatagttctcattctcaa

SEQ ID NO: 1115652 - DNA, 25 bp, Homo sapien
ctgcacatctggttctgtaggtttg

SEQ ID NO: 1115653 - DNA, 25 bp, Homo sapien
tcttggttgtgggtacttgcattac

SEQ ID NO: 1115654 - DNA, 25 bp, Homo sapien
gaggctgcacatctggttctgtagg

SEQ ID NO: 1115655 - DNA, 25 bp, Homo sapien
gggtacttgcattacaaaattcaac

SEQ ID NO: 1115656 - DNA, 25 bp, Homo sapien
catcttgctggacacatccagcact

SEQ ID NO: 1115657 - DNA, 25 bp, Homo sapien
cagcctgtacaagcgagaatgtggg

SEQ ID NO: 1115658 - DNA, 25 bp, Homo sapien
catccagcactaaacagaccacttt

SEQ ID NO: 1115659 - DNA, 25 bp, Homo sapien
actttgtcaccagcctgtacaagcg

SEQ ID NO: 1115660 - DNA, 25 bp, Homo sapien
ggtgggcagatatgaaaccagcaac

SEQ ID NO: 1115661 - DNA, 25 bp, Homo sapien
tgctgtcgaaactggcaatgcccac

SEQ ID NO: 1115662 - DNA, 25 bp, Homo sapien
tcttaagccctgaacaaatgctgat

SEQ ID NO: 1115663 - DNA, 25 bp, Homo sapien
tgttttagctgatacagtggtgggc

SEQ ID NO: 1115664 - DNA, 25 bp, Homo sapien
gaattgttgaaccactgctgagcac

SEQ ID NO: 1115665 - DNA, 25 bp, Homo sapien
taatatcatcacagagccataagct

SEQ ID NO: 1115666 - DNA, 25 bp, Homo sapien
gaacccagggcaatggagtgaattg

SEQ ID NO: 1115667 - DNA, 25 bp, Homo sapien
ttatcatctccgctggtcactaata

SEQ ID NO: 1115668 - DNA, 25 bp, Homo sapien
atgctattggagtttgatatatctg

SEQ ID NO: 1115669 - DNA, 25 bp, Homo sapien
tgctattggagtttgatatatctgg

SEQ ID NO: 1115670 - DNA, 25 bp, Homo sapien
gctattggagtttgatatatctgga

SEQ ID NO: 1115671 - DNA, 25 bp, Homo sapien
ggaaatataacattgagaaaattct

SEQ ID NO: 1115672 - DNA, 25 bp, Homo sapien
ctggaaatataacattgagaaaatt

SEQ ID NO: 1115673 - DNA, 25 bp, Homo sapien
gaaatataacattgagaaaattctg

SEQ ID NO: 1115674 - DNA, 25 bp, Homo sapien
aatataacattgagaaaattctgac

SEQ ID NO: 1115675 - DNA, 25 bp, Homo sapien
ggaatccaaagactagctgtccgaa

SEQ ID NO: 1115676 - DNA, 25 bp, Homo sapien
taatataatctcaggaggaccactg

SEQ ID NO: 1115677 - DNA, 25 bp, Homo sapien
actggcctgccacgtaactagaaac

SEQ ID NO: 1115678 - DNA, 25 bp, Homo sapien
tagaaacatagtgtcgttgcccaca

SEQ ID NO: 1115679 - DNA, 25 bp, Homo sapien
atctggaataaatgcgaatcttcta

SEQ ID NO: 1115680 - DNA, 25 bp, Homo sapien
tctggaataaatgcgaatcttctaa

SEQ ID NO: 1115681 - DNA, 25 bp, Homo sapien
aaaacttctggagaattttgctctt

SEQ ID NO: 1115682 - DNA, 25 bp, Homo sapien
aaacttctggagaattttgctcttg

SEQ ID NO: 1115683 - DNA, 25 bp, Homo sapien
agtcttattgttttggaaagtgtga

SEQ ID NO: 1115684 - DNA, 25 bp, Homo sapien
acaagtcttattgttttggaaagtg

SEQ ID NO: 1115685 - DNA, 25 bp, Homo sapien
tcttattgttttggaaagtgtgaaa

SEQ ID NO: 1115686 - DNA, 25 bp, Homo sapien
ctgtaaaacaagtcttattgttttg

SEQ ID NO: 1115687 - DNA, 25 bp, Homo sapien
atgggtattgttcagggtgtaagtc

SEQ ID NO: 1115688 - DNA, 25 bp, Homo sapien
tcactttcagggcttgcagagaatg

SEQ ID NO: 1115689 - DNA, 25 bp, Homo sapien
ttgttcagggtgtaagtccagtgcc

SEQ ID NO: 1115690 - DNA, 25 bp, Homo sapien
ttggaggcgcgagaggtcactgtca

SEQ ID NO: 1115691 - DNA, 25 bp, Homo sapien
gcgtaacaggatctccagtctctgg

SEQ ID NO: 1115692 - DNA, 25 bp, Homo sapien
ggataaaatccctgtttcacattgg

SEQ ID NO: 1115693 - DNA, 25 bp, Homo sapien
cagtgacagtggcattaagaatggg

SEQ ID NO: 1115694 - DNA, 25 bp, Homo sapien
gctccatcatcaaggagtctcagcg

SEQ ID NO: 1115695 - DNA, 25 bp, Homo sapien
tcttgggaccaaattacacacgtaa

SEQ ID NO: 1115696 - DNA, 25 bp, Homo sapien
taatgtatgatgacgaggctctgaa

SEQ ID NO: 1115697 - DNA, 25 bp, Homo sapien
aaaaagtgggttcgctgtcactgca

SEQ ID NO: 1115698 - DNA, 25 bp, Homo sapien
tgtgctagaactgagctgtgccctc

SEQ ID NO: 1115699 - DNA, 25 bp, Homo sapien
tgcactttcaagctatatctaccat

SEQ ID NO: 1115700 - DNA, 25 bp, Homo sapien
tgcttatgctgggagagtgattgac

SEQ ID NO: 1115701 - DNA, 25 bp, Homo sapien
aaaatacctcgagtaaattccatca

SEQ ID NO: 1115702 - DNA, 25 bp, Homo sapien
tatatctaccatttgcagcaaagga

SEQ ID NO: 1115703 - DNA, 25 bp, Homo sapien
cctggtacatacatagcatgactcc

SEQ ID NO: 1115704 - DNA, 25 bp, Homo sapien
cgtttgctgtgtaacctggtacata

SEQ ID NO: 1115705 - DNA, 25 bp, Homo sapien
tgctgtgtaacctggtacatacata

SEQ ID NO: 1115706 - DNA, 25 bp, Homo sapien
ctgtgtaacctggtacatacatagc

SEQ ID NO: 1115707 - DNA, 25 bp, Homo sapien
tgatttccttggagcattcatctga

SEQ ID NO: 1115708 - DNA, 25 bp, Homo sapien
ctgcctactgatttccttggagcat

SEQ ID NO: 1115709 - DNA, 25 bp, Homo sapien
ctactgatttccttggagcattcat

SEQ ID NO: 1115710 - DNA, 25 bp, Homo sapien
ttccttggagcattcatctgaatat

SEQ ID NO: 1115711 - DNA, 25 bp, Homo sapien
tcccagcactgaaaaggagcctcct

SEQ ID NO: 1115712 - DNA, 25 bp, Homo sapien
tctacttttacagcttccaggtcaa

SEQ ID NO: 1115713 - DNA, 25 bp, Homo sapien
tcctgagctgactcggctaaagccc

SEQ ID NO: 1115714 - DNA, 25 bp, Homo sapien
caggtgctgtccaagatagggtcaa

SEQ ID NO: 1115715 - DNA, 25 bp, Homo sapien
aaatgctgtcttatggaaaaatagg

SEQ ID NO: 1115716 - DNA, 25 bp, Homo sapien
gctgtcttatggaaaaataggtaat

SEQ ID NO: 1115717 - DNA, 25 bp, Homo sapien
taggtaatgaaatgagcaaacctac

SEQ ID NO: 1115718 - DNA, 25 bp, Homo sapien
tgctgtcttatggaaaaataggtaa

SEQ ID NO: 1115719 - DNA, 25 bp, Homo sapien
ctttatctagtcaagtttattgtaa

SEQ ID NO: 1115720 - DNA, 25 bp, Homo sapien
tttctgctttatctagtcaagttta

SEQ ID NO: 1115721 - DNA, 25 bp, Homo sapien
ttatctagtcaagtttattgtaaat

SEQ ID NO: 1115722 - DNA, 25 bp, Homo sapien
gctttatctagtcaagtttattgta

SEQ ID NO: 1115723 - DNA, 25 bp, Homo sapien
tacacaaggactcatattaaaatcc

SEQ ID NO: 1115724 - DNA, 25 bp, Homo sapien
ctttaaaacactacacaaggactca

SEQ ID NO: 1115725 - DNA, 25 bp, Homo sapien
ggactcatattaaaatccaaggatt

SEQ ID NO: 1115726 - DNA, 25 bp, Homo sapien
cataacgagaaatatgaatacaagc

SEQ ID NO: 1115727 - DNA, 25 bp, Homo sapien
ctgatgttcaggtccattcgtggaa

SEQ ID NO: 1115728 - DNA, 25 bp, Homo sapien
ggaataaacagaggcgcctgggcaa

SEQ ID NO: 1115729 - DNA, 25 bp, Homo sapien
tatctccctgatgccagcttgctga

SEQ ID NO: 1115730 - DNA, 25 bp, Homo sapien
tacagcagactgtaaggagttccta

SEQ ID NO: 1115731 - DNA, 25 bp, Homo sapien
aactcctttcaatataagataatct

SEQ ID NO: 1115732 - DNA, 25 bp, Homo sapien
ctttttcctgcttaaagtatgatgt

SEQ ID NO: 1115733 - DNA, 25 bp, Homo sapien
aaagtatgatgtgtcacaactataa

SEQ ID NO: 1115734 - DNA, 25 bp, Homo sapien
tgtcacaactataataaggcaaatg

SEQ ID NO: 1115735 - DNA, 25 bp, Homo sapien
ttttcctgcttaaagtatgatgtgt

SEQ ID NO: 1115736 - DNA, 25 bp, Homo sapien
taagaaggaagacactttggatatt

SEQ ID NO: 1115737 - DNA, 25 bp, Homo sapien
aagaaggaagacactttggatattt

SEQ ID NO: 1115738 - DNA, 25 bp, Homo sapien
gaaggaagacactttggatatttat

SEQ ID NO: 1115739 - DNA, 25 bp, Homo sapien
agaaggaagacactttggatattta

SEQ ID NO: 1115740 - DNA, 25 bp, Homo sapien
cttatctgtattgtacaaaaactca

SEQ ID NO: 1115741 - DNA, 25 bp, Homo sapien
tgtttttgtagtcgaaggccatggg

SEQ ID NO: 1115742 - DNA, 25 bp, Homo sapien
tttgtagtcgaaggccatgggtctt

SEQ ID NO: 1115743 - DNA, 25 bp, Homo sapien
tctgtattgtacaaaaactcaatgc

SEQ ID NO: 1115744 - DNA, 25 bp, Homo sapien
caaggcaataacttagaaagctgct

SEQ ID NO: 1115745 - DNA, 25 bp, Homo sapien
aaagatctctgagcattagcagtga

SEQ ID NO: 1115746 - DNA, 25 bp, Homo sapien
tttccaaaggttagtatctccctgc

SEQ ID NO: 1115747 - DNA, 25 bp, Homo sapien
gacagttataatgcagacctaccct

SEQ ID NO: 1115748 - DNA, 25 bp, Homo sapien
gattttattgttcgataatctttta

SEQ ID NO: 1115749 - DNA, 25 bp, Homo sapien
tgattttattgttcgataatctttt

SEQ ID NO: 1115750 - DNA, 25 bp, Homo sapien
tatatattcttcaataaagttttaa

SEQ ID NO: 1115751 - DNA, 25 bp, Homo sapien
tactcactaatttctggacttaagt

SEQ ID NO: 1115752 - DNA, 25 bp, Homo sapien
gcctcttatactcactaatttctgg

SEQ ID NO: 1115753 - DNA, 25 bp, Homo sapien
taatttctggacttaagtccatttg

SEQ ID NO: 1115754 - DNA, 25 bp, Homo sapien
cactaatttctggacttaagtccat

SEQ ID NO: 1115755 - DNA, 25 bp, Homo sapien
tcatgctccccttaaacaagaaaat

SEQ ID NO: 1115756 - DNA, 25 bp, Homo sapien
cacatccatttgtaccaaaagcatt

SEQ ID NO: 1115757 - DNA, 25 bp, Homo sapien
tccatttgtaccaaaagcattagca

SEQ ID NO: 1115758 - DNA, 25 bp, Homo sapien
gacataacctcaacacctcttcatg

SEQ ID NO: 1115759 - DNA, 25 bp, Homo sapien
tattgctcttgtcttcaataggaga

SEQ ID NO: 1115760 - DNA, 25 bp, Homo sapien
atgcgggttacgaaggtgtctttct

SEQ ID NO: 1115761 - DNA, 25 bp, Homo sapien
tagtctcaaattgcgtacttgtaaa

SEQ ID NO: 1115762 - DNA, 25 bp, Homo sapien
tatcggaagtggtttatcacaggtc

SEQ ID NO: 1115763 - DNA, 25 bp, Homo sapien
gctgtacatctccctgtgatttctc

SEQ ID NO: 1115764 - DNA, 25 bp, Homo sapien
ctgtacatctccctgtgatttctct

SEQ ID NO: 1115765 - DNA, 25 bp, Homo sapien
tgctgtacatctccctgtgatttct

SEQ ID NO: 1115766 - DNA, 25 bp, Homo sapien
gaaggtgaagaatcaagatgaacac

SEQ ID NO: 1115767 - DNA, 25 bp, Homo sapien
gaagaatcaagatgaacacagaact

SEQ ID NO: 1115768 - DNA, 25 bp, Homo sapien
ggtgaagaatcaagatgaacacaga

SEQ ID NO: 1115769 - DNA, 25 bp, Homo sapien
tagaaggtgaagaatcaagatgaac

SEQ ID NO: 1115770 - DNA, 25 bp, Homo sapien
gattgcaacgacaatgccttcatag

SEQ ID NO: 1115771 - DNA, 25 bp, Homo sapien
cacattggggtcgattgcaacgaca

SEQ ID NO: 1115772 - DNA, 25 bp, Homo sapien
gccttcatagccattgttgttcagc

SEQ ID NO: 1115773 - DNA, 25 bp, Homo sapien
aatgccttcatagccattgttgttc

SEQ ID NO: 1115774 - DNA, 25 bp, Homo sapien
tttcctgtagcttcaagcagataca

SEQ ID NO: 1115775 - DNA, 25 bp, Homo sapien
tcttccatgtttcaggaatcaaaat

SEQ ID NO: 1115776 - DNA, 25 bp, Homo sapien
ttgtcttccatgtttcaggaatcaa

SEQ ID NO: 1115777 - DNA, 25 bp, Homo sapien
ttccatgtttcaggaatcaaaatgg

SEQ ID NO: 1115778 - DNA, 25 bp, Homo sapien
atcaaaatggcaacatttttgaaat

SEQ ID NO: 1115779 - DNA, 25 bp, Homo sapien
tgtaggtctcaagttttggtctcac

SEQ ID NO: 1115780 - DNA, 25 bp, Homo sapien
ttgtaggtctcaagttttggtctca

SEQ ID NO: 1115781 - DNA, 25 bp, Homo sapien
tttgtaggtctcaagttttggtctc

SEQ ID NO: 1115782 - DNA, 25 bp, Homo sapien
gtagggttcatcattacctggagga

SEQ ID NO: 1115783 - DNA, 25 bp, Homo sapien
gaggagtagactcagcaaccagaac

SEQ ID NO: 1115784 - DNA, 25 bp, Homo sapien
attacctggaggagtagactcagca

SEQ ID NO: 1115785 - DNA, 25 bp, Homo sapien
tgtagggttcatcattacctggagg

SEQ ID NO: 1115786 - DNA, 25 bp, Homo sapien
ttgtggtccatattcagctaacttt

SEQ ID NO: 1115787 - DNA, 25 bp, Homo sapien
ttttcctgcaatgaaatcaggagtg

SEQ ID NO: 1115788 - DNA, 25 bp, Homo sapien
cttgtggtccatattcagctaactt

SEQ ID NO: 1115789 - DNA, 25 bp, Homo sapien
tgtggtccatattcagctaactttt

SEQ ID NO: 1115790 - DNA, 25 bp, Homo sapien
ctcatcattattgtactcgtcaaat

SEQ ID NO: 1115791 - DNA, 25 bp, Homo sapien
tgtactcgtcaaatactccccatcg

SEQ ID NO: 1115792 - DNA, 25 bp, Homo sapien
aatactccccatcgtagatgagccc

SEQ ID NO: 1115793 - DNA, 25 bp, Homo sapien
ccatcgtagatgagcccactcatgg

SEQ ID NO: 1115794 - DNA, 25 bp, Homo sapien
tgtaccagtaatacctgctgaacat

SEQ ID NO: 1115795 - DNA, 25 bp, Homo sapien
tgttactttattgaatgtgcatctt

SEQ ID NO: 1115796 - DNA, 25 bp, Homo sapien
tacatttgtaccagtaatacctgct

SEQ ID NO: 1115797 - DNA, 25 bp, Homo sapien
actttattgaatgtgcatcttttgg

SEQ ID NO: 1115798 - DNA, 25 bp, Homo sapien
gaatcaacatgttgtgcaaacatta

SEQ ID NO: 1115799 - DNA, 25 bp, Homo sapien
ccgtctggcgggattggagaacaaa

SEQ ID NO: 1115800 - DNA, 25 bp, Homo sapien
gaagccttctccgtctggcgggatt

SEQ ID NO: 1115801 - DNA, 25 bp, Homo sapien
gcaaacattatagaagccttctccg

SEQ ID NO: 1115802 - DNA, 25 bp, Homo sapien
tgcttccagatttgtcaaggactaa

SEQ ID NO: 1115803 - DNA, 25 bp, Homo sapien
ggatcacttcccatgtgcttcggag

SEQ ID NO: 1115804 - DNA, 25 bp, Homo sapien
tccaatctgcagcaatgagaaggtg

SEQ ID NO: 1115805 - DNA, 25 bp, Homo sapien
agtcctcagaatcacggatcacttc

SEQ ID NO: 1115806 - DNA, 25 bp, Homo sapien
tcttttggcgagtgtgtccctgtca

SEQ ID NO: 1115807 - DNA, 25 bp, Homo sapien
aaagctggcctgcttgattcagtcg

SEQ ID NO: 1115808 - DNA, 25 bp, Homo sapien
agtaaatgccgatcgaagcccgctg

SEQ ID NO: 1115809 - DNA, 25 bp, Homo sapien
tcagtcgattgaggcggttaccagt

SEQ ID NO: 1115810 - DNA, 25 bp, Homo sapien
aaacaggcaaatgttgccacatatc

SEQ ID NO: 1115811 - DNA, 25 bp, Homo sapien
tttcttgtcgcactccccataactg

SEQ ID NO: 1115812 - DNA, 25 bp, Homo sapien
ggattttcttgtcgcactccccata

SEQ ID NO: 1115813 - DNA, 25 bp, Homo sapien
tttggattttcttgtcgcactcccc

SEQ ID NO: 1115814 - DNA, 25 bp, Homo sapien
tgtttgacctcgttaaagcacccac

SEQ ID NO: 1115815 - DNA, 25 bp, Homo sapien
gctcctctagttcttgagctgcaga

SEQ ID NO: 1115816 - DNA, 25 bp, Homo sapien
ccccaaagcgactgtgtggatgatg

SEQ ID NO: 1115817 - DNA, 25 bp, Homo sapien
tagtgttgtcttccccatccgtcag

SEQ ID NO: 1115818 - DNA, 25 bp, Homo sapien
cttgatctgaagcatatgtctgtaa

SEQ ID NO: 1115819 - DNA, 25 bp, Homo sapien
catttcctgatgaaagggccccaaa

SEQ ID NO: 1115820 - DNA, 25 bp, Homo sapien
ctggatggagcgctgagagacagct

SEQ ID NO: 1115821 - DNA, 25 bp, Homo sapien
gatggagcgctgagagacagctcca

SEQ ID NO: 1115822 - DNA, 25 bp, Homo sapien
gctgcattgtccaggtgataagaaa

SEQ ID NO: 1115823 - DNA, 25 bp, Homo sapien
cacggtgctgtccacgatcactgtg

SEQ ID NO: 1115824 - DNA, 25 bp, Homo sapien
cactggctgttctggagggttaatc

SEQ ID NO: 1115825 - DNA, 25 bp, Homo sapien
caaagtgtcctttcccacggtgctg

SEQ ID NO: 1115826 - DNA, 25 bp, Homo sapien
aaacacatgtaaacatttccaatga

SEQ ID NO: 1115827 - DNA, 25 bp, Homo sapien
ctgaccaaaacacatgtaaacattt

SEQ ID NO: 1115828 - DNA, 25 bp, Homo sapien
acatgtaaacatttccaatgaataa

SEQ ID NO: 1115829 - DNA, 25 bp, Homo sapien
aacacatgtaaacatttccaatgaa

SEQ ID NO: 1115830 - DNA, 25 bp, Homo sapien
tagcattggacgcacgggacgtgac

SEQ ID NO: 1115831 - DNA, 25 bp, Homo sapien
acagtcagggtcaaggtttgtgagc

SEQ ID NO: 1115832 - DNA, 25 bp, Homo sapien
cactgtaattggaggcagggtagca

SEQ ID NO: 1115833 - DNA, 25 bp, Homo sapien
ttggaagtcactgtaattggaggca

SEQ ID NO: 1115834 - DNA, 25 bp, Homo sapien
ggcgaatatttgcataaactaccag

SEQ ID NO: 1115835 - DNA, 25 bp, Homo sapien
ggctccttggcgaatatttgcataa

SEQ ID NO: 1115836 - DNA, 25 bp, Homo sapien
gggaggctccttggcgaatatttgc

SEQ ID NO: 1115837 - DNA, 25 bp, Homo sapien
atatttgcataaactaccagagggc

SEQ ID NO: 1115838 - DNA, 25 bp, Homo sapien
cactgattcaatcagggctgtgaca

SEQ ID NO: 1115839 - DNA, 25 bp, Homo sapien
tcactgattcaatcagggctgtgac

SEQ ID NO: 1115840 - DNA, 25 bp, Homo sapien
cctcttggcattccctggttgcttc

SEQ ID NO: 1115841 - DNA, 25 bp, Homo sapien
atgccctcttggcattccctggttg

SEQ ID NO: 1115842 - DNA, 25 bp, Homo sapien
gaccatgccctcttggcattccctg

SEQ ID NO: 1115843 - DNA, 25 bp, Homo sapien
tggcattccctggttgcttcttgga

SEQ ID NO: 1115844 - DNA, 25 bp, Homo sapien
tggctgcgttaactcctcccagagc

SEQ ID NO: 1115845 - DNA, 25 bp, Homo sapien
tatgtacagtgctccactctgctgg

SEQ ID NO: 1115846 - DNA, 25 bp, Homo sapien
taccttgagtagacaccgtcatcct

SEQ ID NO: 1115847 - DNA, 25 bp, Homo sapien
gggtatcactctccgtctggctgcg

SEQ ID NO: 1115848 - DNA, 25 bp, Homo sapien
cttggctcactacaacctctgcctc

SEQ ID NO: 1115849 - DNA, 25 bp, Homo sapien
tgtcatccaggctggtgtggcgcaa

SEQ ID NO: 1115850 - DNA, 25 bp, Homo sapien
gtcatccaggctggtgtggcgcaat

SEQ ID NO: 1115851 - DNA, 25 bp, Homo sapien
ctgggttcaggtgattctcctgcct

SEQ ID NO: 1115852 - DNA, 25 bp, Homo sapien
cttgtgttgaacatcatccttatta

SEQ ID NO: 1115853 - DNA, 25 bp, Homo sapien
tcttggtggattccattgtatttca

SEQ ID NO: 1115854 - DNA, 25 bp, Homo sapien
aggtcttggtggattccattgtatt

SEQ ID NO: 1115855 - DNA, 25 bp, Homo sapien
cacttgcttgtgttgaacatcatcc

SEQ ID NO: 1115856 - DNA, 25 bp, Homo sapien
aatttccgccttcaggtcggtgatt

SEQ ID NO: 1115857 - DNA, 25 bp, Homo sapien
aagagatcaggtatgggagcatttg

SEQ ID NO: 1115858 - DNA, 25 bp, Homo sapien
gcatttgggacatcagaagccacaa

SEQ ID NO: 1115859 - DNA, 25 bp, Homo sapien
caagtcagattaatgagactgcccc

SEQ ID NO: 1115860 - DNA, 25 bp, Homo sapien
tcatcaggactaggtgtctctggcg

SEQ ID NO: 1115861 - DNA, 25 bp, Homo sapien
agatcgaccttatcaacagcctgaa

SEQ ID NO: 1115862 - DNA, 25 bp, Homo sapien
caaggagcagacgtttcatcaggac

SEQ ID NO: 1115863 - DNA, 25 bp, Homo sapien
tcctttgggatgagagcagtagtat

SEQ ID NO: 1115864 - DNA, 25 bp, Homo sapien
taggctattgacagctgcagttctc

SEQ ID NO: 1115865 - DNA, 25 bp, Homo sapien
ctaggctattgacagctgcagttct

SEQ ID NO: 1115866 - DNA, 25 bp, Homo sapien
aatgatttattttatttatctgaca

SEQ ID NO: 1115867 - DNA, 25 bp, Homo sapien
gaatgatttattttatttatctgac

SEQ ID NO: 1115868 - DNA, 25 bp, Homo sapien
gatttattttatttatctgacaaaa

SEQ ID NO: 1115869 - DNA, 25 bp, Homo sapien
tattttatttatctgacaaaaattc

SEQ ID NO: 1115870 - DNA, 25 bp, Homo sapien
catttattgatgcaagccctgtttc

SEQ ID NO: 1115871 - DNA, 25 bp, Homo sapien
taacgttcatttctgtgcctaggga

SEQ ID NO: 1115872 - DNA, 25 bp, Homo sapien
catattcctagtgatgctggtccaa

SEQ ID NO: 1115873 - DNA, 25 bp, Homo sapien
tggcttaaagcatcactaactcttg

SEQ ID NO: 1115874 - DNA, 25 bp, Homo sapien
ttgaaagaactgaattacattaaat

SEQ ID NO: 1115875 - DNA, 25 bp, Homo sapien
gttgaaagaactgaattacattaaa

SEQ ID NO: 1115876 - DNA, 25 bp, Homo sapien
tgttgaaagaactgaattacattaa

SEQ ID NO: 1115877 - DNA, 25 bp, Homo sapien
gatacaacgcagagcgtaccagcgc

SEQ ID NO: 1115878 - DNA, 25 bp, Homo sapien
agataatgggcggtctgactcaccg

SEQ ID NO: 1115879 - DNA, 25 bp, Homo sapien
tctggcagataaagaggatacaacg

SEQ ID NO: 1115880 - DNA, 25 bp, Homo sapien
gactcaccgcaatctggcagataaa

SEQ ID NO: 1115881 - DNA, 25 bp, Homo sapien
ggaagggaatgaagtagagagagga

SEQ ID NO: 1115882 - DNA, 25 bp, Homo sapien
aagggaatgaagtagagagaggagc

SEQ ID NO: 1115883 - DNA, 25 bp, Homo sapien
gggaatgaagtagagagaggagcac

SEQ ID NO: 1115884 - DNA, 25 bp, Homo sapien
ctacggaagggaatgaagtagagag

SEQ ID NO: 1115885 - DNA, 25 bp, Homo sapien
gtcccttgggcagtttccaatctcc

SEQ ID NO: 1115886 - DNA, 25 bp, Homo sapien
gctctggtccgtccttatcctcact

SEQ ID NO: 1115887 - DNA, 25 bp, Homo sapien
gaaaaggctctggtccgtccttatc

SEQ ID NO: 1115888 - DNA, 25 bp, Homo sapien
ctagaaaaaatatcctgctcatgtc

SEQ ID NO: 1115889 - DNA, 25 bp, Homo sapien
cacggctgcaagcaggatagatgcc

SEQ ID NO: 1115890 - DNA, 25 bp, Homo sapien
acggctgcaagcaggatagatgcct

SEQ ID NO: 1115891 - DNA, 25 bp, Homo sapien
acgcgctgggtagcagcacagagcc

SEQ ID NO: 1115892 - DNA, 25 bp, Homo sapien
gatgtctagcaaacagatacaagaa

SEQ ID NO: 1115893 - DNA, 25 bp, Homo sapien
catctgcagatgtctagcaaacaga

SEQ ID NO: 1115894 - DNA, 25 bp, Homo sapien
tcttccctggttgtcgacgcgctgg

SEQ ID NO: 1115895 - DNA, 25 bp, Homo sapien
gaatcacacgtgaactcagtgtgcc

SEQ ID NO: 1115896 - DNA, 25 bp, Homo sapien
tgcctgaatcacacgtgaactcagt

SEQ ID NO: 1115897 - DNA, 25 bp, Homo sapien
cctgtgcctgcctgaatcacacgtg

SEQ ID NO: 1115898 - DNA, 25 bp, Homo sapien
cacacgtgaactcagtgtgccctct

SEQ ID NO: 1115899 - DNA, 25 bp, Homo sapien
cctaggttgttcacatacatggctt

SEQ ID NO: 1115900 - DNA, 25 bp, Homo sapien
tctgtttctttaggctgccagtacc

SEQ ID NO: 1115901 - DNA, 25 bp, Homo sapien
ggttgttcacatacatggcttcctc

SEQ ID NO: 1115902 - DNA, 25 bp, Homo sapien
tgttcacatacatggcttcctcctt

SEQ ID NO: 1115903 - DNA, 25 bp, Homo sapien
agtcagacttcttatattgaacaga

SEQ ID NO: 1115904 - DNA, 25 bp, Homo sapien
ggcagtcagacttcttatattgaac

SEQ ID NO: 1115905 - DNA, 25 bp, Homo sapien
taaatggcagtcagacttcttatat

SEQ ID NO: 1115906 - DNA, 25 bp, Homo sapien
ttaaatggcagtcagacttcttata

SEQ ID NO: 1115907 - DNA, 25 bp, Homo sapien
cctgaactccagctttggtggctcc

SEQ ID NO: 1115908 - DNA, 25 bp, Homo sapien
caggaaatcccttctgactcgttga

SEQ ID NO: 1115909 - DNA, 25 bp, Homo sapien
tggtggctccaagaaaaccaagcat

SEQ ID NO: 1115910 - DNA, 25 bp, Homo sapien
tgatcccatcccatagaacttgtgt

SEQ ID NO: 1115911 - DNA, 25 bp, Homo sapien
gttcctctctagttattcctggctc

SEQ ID NO: 1115912 - DNA, 25 bp, Homo sapien
tgttcctctctagttattcctggct

SEQ ID NO: 1115913 - DNA, 25 bp, Homo sapien
tcctctctagttattcctggctcaa

SEQ ID NO: 1115914 - DNA, 25 bp, Homo sapien
tctctagttattcctggctcaaatg

SEQ ID NO: 1115915 - DNA, 25 bp, Homo sapien
cattattattcagcttaatgaagga

SEQ ID NO: 1115916 - DNA, 25 bp, Homo sapien
tatttgactggtgcagcaggcacag

SEQ ID NO: 1115917 - DNA, 25 bp, Homo sapien
tcttctggcacactaggatctataa

SEQ ID NO: 1115918 - DNA, 25 bp, Homo sapien
cactaggatctataacaatgacaat

SEQ ID NO: 1115919 - DNA, 25 bp, Homo sapien
tgtctgacgcgtggacacgtgagca

SEQ ID NO: 1115920 - DNA, 25 bp, Homo sapien
tggaccacatggtggagatcctggt

SEQ ID NO: 1115921 - DNA, 25 bp, Homo sapien
gccctgagcgctcgcagctgtgtct

SEQ ID NO: 1115922 - DNA, 25 bp, Homo sapien
tctgcaagtccgatctgggcgagct

SEQ ID NO: 1115923 - DNA, 25 bp, Homo sapien
tcctcgtacagcttgcagcggcagt

SEQ ID NO: 1115924 - DNA, 25 bp, Homo sapien
caggatcgtcgtgacaaaggcttcg

SEQ ID NO: 1115925 - DNA, 25 bp, Homo sapien
cagcttgctggaatagaggatctct

SEQ ID NO: 1115926 - DNA, 25 bp, Homo sapien
gacacaatgtttgcacgaggactga

SEQ ID NO: 1115927 - DNA, 25 bp, Homo sapien
cctgagcggcgggaagcaggcggca

SEQ ID NO: 1115928 - DNA, 25 bp, Homo sapien
taaaggccccgcgctggcgggcgct

SEQ ID NO: 1115929 - DNA, 25 bp, Homo sapien
cggtggcgtcggctgagcagaggac

SEQ ID NO: 1115930 - DNA, 25 bp, Homo sapien
ggcggtggcgtcggctgagcagagg

SEQ ID NO: 1115931 - DNA, 25 bp, Homo sapien
aattctcaggaattaatatagatac

SEQ ID NO: 1115932 - DNA, 25 bp, Homo sapien
ggtacgtagaagctgtagtcaccat

SEQ ID NO: 1115933 - DNA, 25 bp, Homo sapien
gaggattttccttccaattctcagg

SEQ ID NO: 1115934 - DNA, 25 bp, Homo sapien
tgtggcttcaaacaggtacgtagaa

SEQ ID NO: 1115935 - DNA, 25 bp, Homo sapien
caggggtgaagtgaatgtattcgcc

SEQ ID NO: 1115936 - DNA, 25 bp, Homo sapien
actgcttggtgtatggttcatctct

SEQ ID NO: 1115937 - DNA, 25 bp, Homo sapien
tgtaggtggtgcaactataacatca

SEQ ID NO: 1115938 - DNA, 25 bp, Homo sapien
tcatctctacctgggagtgtaggtg

SEQ ID NO: 1115939 - DNA, 25 bp, Homo sapien
ttagcacggtagaaaggctgatctt

SEQ ID NO: 1115940 - DNA, 25 bp, Homo sapien
ttcattgtactcatcaaacactccc

SEQ ID NO: 1115941 - DNA, 25 bp, Homo sapien
caaacactccccaccggaggtgagc

SEQ ID NO: 1115942 - DNA, 25 bp, Homo sapien
gaggtgagcccactcatggacaaac

SEQ ID NO: 1115943 - DNA, 25 bp, Homo sapien
tgcatgctctactaagacagctgcc

SEQ ID NO: 1115944 - DNA, 25 bp, Homo sapien
ctgcatgctctactaagacagctgc

SEQ ID NO: 1115945 - DNA, 25 bp, Homo sapien
catgctctactaagacagctgcctc

SEQ ID NO: 1115946 - DNA, 25 bp, Homo sapien
cttgacacttataaactctatttct

SEQ ID NO: 1115947 - DNA, 25 bp, Homo sapien
acattatggatgctttttctgtttg

SEQ ID NO: 1115948 - DNA, 25 bp, Homo sapien
agaatcaatactttgcataaacatt

SEQ ID NO: 1115949 - DNA, 25 bp, Homo sapien
caattctttgactgatcttcagcaa

SEQ ID NO: 1115950 - DNA, 25 bp, Homo sapien
taatcacctcccatgtacttctaaa

SEQ ID NO: 1115951 - DNA, 25 bp, Homo sapien
tatcaagaactaagcacacaattct

SEQ ID NO: 1115952 - DNA, 25 bp, Homo sapien
cccatgcttccagacttatcaagaa

SEQ ID NO: 1115953 - DNA, 25 bp, Homo sapien
cttgattcattcgatttaggcggtc

SEQ ID NO: 1115954 - DNA, 25 bp, Homo sapien
tcattcgatttaggcggtccttacc

SEQ ID NO: 1115955 - DNA, 25 bp, Homo sapien
tgattcattcgatttaggcggtcct

SEQ ID NO: 1115956 - DNA, 25 bp, Homo sapien
gattcattcgatttaggcggtcctt

SEQ ID NO: 1115957 - DNA, 25 bp, Homo sapien
tacaatagtggcagtactatcaaag

SEQ ID NO: 1115958 - DNA, 25 bp, Homo sapien
ctcccagaggatatgtaggtaatcc

SEQ ID NO: 1115959 - DNA, 25 bp, Homo sapien
ggatatgtaggtaatcctgccatga

SEQ ID NO: 1115960 - DNA, 25 bp, Homo sapien
tttatttggattagcttatttacaa

SEQ ID NO: 1115961 - DNA, 25 bp, Homo sapien
gttgggaatgtagctctccaatcac

SEQ ID NO: 1115962 - DNA, 25 bp, Homo sapien
tacttcggatccatcgagttgggaa

SEQ ID NO: 1115963 - DNA, 25 bp, Homo sapien
tcagtcagcagcagtacttcggatc

SEQ ID NO: 1115964 - DNA, 25 bp, Homo sapien
catcgagttgggaatgtagctctcc

SEQ ID NO: 1115965 - DNA, 25 bp, Homo sapien
gtatttcctgatgtaagagccccaa

SEQ ID NO: 1115966 - DNA, 25 bp, Homo sapien
tatttcctgatgtaagagccccaaa

SEQ ID NO: 1115967 - DNA, 25 bp, Homo sapien
tgggagagatcagtatttcctgatg

SEQ ID NO: 1115968 - DNA, 25 bp, Homo sapien
agtatttcctgatgtaagagcccca

SEQ ID NO: 1115969 - DNA, 25 bp, Homo sapien
tttcttgtggcaaaagtgaacatga

SEQ ID NO: 1115970 - DNA, 25 bp, Homo sapien
ggctatagctaagggtaatttctat

SEQ ID NO: 1115971 - DNA, 25 bp, Homo sapien
tatggaactcaaaacttataaccac

SEQ ID NO: 1115972 - DNA, 25 bp, Homo sapien
tcaccaattaatttggctatagcta

SEQ ID NO: 1115973 - DNA, 25 bp, Homo sapien
cagtaaatatattcaacaagagggc

SEQ ID NO: 1115974 - DNA, 25 bp, Homo sapien
tcacacagatagagggagtagcact

SEQ ID NO: 1115975 - DNA, 25 bp, Homo sapien
gaaacaagggttttacagtcatgaa

SEQ ID NO: 1115976 - DNA, 25 bp, Homo sapien
gatacataaaggttgggatcctgag

SEQ ID NO: 1115977 - DNA, 25 bp, Homo sapien
gaatactgagataggccattttgga

SEQ ID NO: 1115978 - DNA, 25 bp, Homo sapien
gacagtgtcgttcatccaggcatta

SEQ ID NO: 1115979 - DNA, 25 bp, Homo sapien
cagagagaaatactgggaggcagac

SEQ ID NO: 1115980 - DNA, 25 bp, Homo sapien
catgtgatgagaaagaacgtgtcct

SEQ ID NO: 1115981 - DNA, 25 bp, Homo sapien
tgaagattgtatgcccaagtgccca

SEQ ID NO: 1115982 - DNA, 25 bp, Homo sapien
tctgcgtaaacaatcattgggctgg

SEQ ID NO: 1115983 - DNA, 25 bp, Homo sapien
gaaagcagtcacattggctccaaga

SEQ ID NO: 1115984 - DNA, 25 bp, Homo sapien
taatgtttctgggttcgctttggct

SEQ ID NO: 1115985 - DNA, 25 bp, Homo sapien
cagctgtcgaggattactcctgctt

SEQ ID NO: 1115986 - DNA, 25 bp, Homo sapien
gacctggtatctgatgccccagtga

SEQ ID NO: 1115987 - DNA, 25 bp, Homo sapien
agttctcaggactatatttatactt

SEQ ID NO: 1115988 - DNA, 25 bp, Homo sapien
ttttgtggcagtgctagctgcctct

SEQ ID NO: 1115989 - DNA, 25 bp, Homo sapien
gccgtaattttagcctggcagtgtt

SEQ ID NO: 1115990 - DNA, 25 bp, Homo sapien
tccatgagcccgaacttttaagcta

SEQ ID NO: 1115991 - DNA, 25 bp, Homo sapien
ctgtaaaatacctggagtagactcc

SEQ ID NO: 1115992 - DNA, 25 bp, Homo sapien
tatgtacgcggctctattcagtgga

SEQ ID NO: 1115993 - DNA, 25 bp, Homo sapien
tcctggtttataatgggcaaaacta

SEQ ID NO: 1115994 - DNA, 25 bp, Homo sapien
acctccggatgctgttcggctgaaa

SEQ ID NO: 1115995 - DNA, 25 bp, Homo sapien
tcggctgaaatcctccaaggtggtc

SEQ ID NO: 1115996 - DNA, 25 bp, Homo sapien
aaggcttgggacttgtgataccaca

SEQ ID NO: 1115997 - DNA, 25 bp, Homo sapien
taatcttatcctcatgaactgtggc

SEQ ID NO: 1115998 - DNA, 25 bp, Homo sapien
cctttggtgacagatcagtagtatt

SEQ ID NO: 1115999 - DNA, 25 bp, Homo sapien
cagtagtatttacttgaagagcatc

SEQ ID NO: 1116000 - DNA, 25 bp, Homo sapien
aagctttccttggagttggcctcct

SEQ ID NO: 1116001 - DNA, 25 bp, Homo sapien
gcttttatctatacttttaatggca

SEQ ID NO: 1116002 - DNA, 25 bp, Homo sapien
ttgcttgagggataaacaaagttac

SEQ ID NO: 1116003 - DNA, 25 bp, Homo sapien
aataccagcgtagaaatattaactc

SEQ ID NO: 1116004 - DNA, 25 bp, Homo sapien
tattaactccagaattatgactttt

SEQ ID NO: 1116005 - DNA, 25 bp, Homo sapien
taggagtaggtgtaggatcaatgtc

SEQ ID NO: 1116006 - DNA, 25 bp, Homo sapien
acagtttttacatatccatgagtgt

SEQ ID NO: 1116007 - DNA, 25 bp, Homo sapien
cttgtattttgactactcagataga

SEQ ID NO: 1116008 - DNA, 25 bp, Homo sapien
tatgagtttatgatcacacatggga

SEQ ID NO: 1116009 - DNA, 25 bp, Homo sapien
aaactctcttctaggtctacttgaa

SEQ ID NO: 1116010 - DNA, 25 bp, Homo sapien
aatgtccttgacagatataatcggg

SEQ ID NO: 1116011 - DNA, 25 bp, Homo sapien
tgcatttggatgagtctgaccttga

SEQ ID NO: 1116012 - DNA, 25 bp, Homo sapien
caagtgtgaagtaagtttttaggtg

SEQ ID NO: 1116013 - DNA, 25 bp, Homo sapien
ctgaccttgatatctttgaaactga

SEQ ID NO: 1116014 - DNA, 25 bp, Homo sapien
cttttcaatacaggcgagagaagca

SEQ ID NO: 1116015 - DNA, 25 bp, Homo sapien
ttttcaatacaggcgagagaagcaa

SEQ ID NO: 1116016 - DNA, 25 bp, Homo sapien
ctggtacactgggattaattgcaat

SEQ ID NO: 1116017 - DNA, 25 bp, Homo sapien
gattaattgcaatgacaatgccatc

SEQ ID NO: 1116018 - DNA, 25 bp, Homo sapien
cttctggtacactgggattaattgc

SEQ ID NO: 1116019 - DNA, 25 bp, Homo sapien
tggtacactgggattaattgcaatg

SEQ ID NO: 1116020 - DNA, 25 bp, Homo sapien
tgttttgggattaagtactcagatt

SEQ ID NO: 1116021 - DNA, 25 bp, Homo sapien
ggtaagtagatgcttcagttaccat

SEQ ID NO: 1116022 - DNA, 25 bp, Homo sapien
gattttgatttgtaggtcattggaa

SEQ ID NO: 1116023 - DNA, 25 bp, Homo sapien
taagctctttgtttggtggcatgaa

SEQ ID NO: 1116024 - DNA, 25 bp, Homo sapien
tcgaggcccataggtagccaagtta

SEQ ID NO: 1116025 - DNA, 25 bp, Homo sapien
tccacattgtccatattgaagtgta

SEQ ID NO: 1116026 - DNA, 25 bp, Homo sapien
caggtaaagatcagcaactatgaca

SEQ ID NO: 1116027 - DNA, 25 bp, Homo sapien
gatcatctccgtatttcaggtaaag

SEQ ID NO: 1116028 - DNA, 25 bp, Homo sapien
tcaaatactccccaccggagatggg

SEQ ID NO: 1116029 - DNA, 25 bp, Homo sapien
tggctggtccacattatactcatca

SEQ ID NO: 1116030 - DNA, 25 bp, Homo sapien
tggtccacattatactcatcaaata

SEQ ID NO: 1116031 - DNA, 25 bp, Homo sapien
caaatactccccaccggagatgggc

SEQ ID NO: 1116032 - DNA, 25 bp, Homo sapien
cttgcattcgttcaaaaccatgtaa

SEQ ID NO: 1116033 - DNA, 25 bp, Homo sapien
cattcgttcaaaaccatgtaaacag

SEQ ID NO: 1116034 - DNA, 25 bp, Homo sapien
aaccatgtaaacagtaatacgagtg

SEQ ID NO: 1116035 - DNA, 25 bp, Homo sapien
gtaaacagtaatacgagtggaacat

SEQ ID NO: 1116036 - DNA, 25 bp, Homo sapien
catacagccctgtctttgagtcacg

SEQ ID NO: 1116037 - DNA, 25 bp, Homo sapien
caatggattccttggcagtctggga

SEQ ID NO: 1116038 - DNA, 25 bp, Homo sapien
tcaagattttgcataaacacaatgg

SEQ ID NO: 1116039 - DNA, 25 bp, Homo sapien
gggatctctttgggataaatgtaca

SEQ ID NO: 1116040 - DNA, 25 bp, Homo sapien
cccaaggattcctttgagaaactgg

SEQ ID NO: 1116041 - DNA, 25 bp, Homo sapien
ccccaaggattcctttgagaaactg

SEQ ID NO: 1116042 - DNA, 25 bp, Homo sapien
caaggattcctttgagaaactggaa

SEQ ID NO: 1116043 - DNA, 25 bp, Homo sapien
ccaaggattcctttgagaaactgga

SEQ ID NO: 1116044 - DNA, 25 bp, Homo sapien
ttttttcagtacaaaattcagtcac

SEQ ID NO: 1116045 - DNA, 25 bp, Homo sapien
taggtttggagcttctttattgtgt

SEQ ID NO: 1116046 - DNA, 25 bp, Homo sapien
ctataggtttggagcttctttattg

SEQ ID NO: 1116047 - DNA, 25 bp, Homo sapien
ggtttggagcttctttattgtgtgt

SEQ ID NO: 1116048 - DNA, 25 bp, Homo sapien
cagactacacgctgtttggacttga

SEQ ID NO: 1116049 - DNA, 25 bp, Homo sapien
catgcttccagatttatcaagtacc

SEQ ID NO: 1116050 - DNA, 25 bp, Homo sapien
gagctcatgattacatcccatgtgc

SEQ ID NO: 1116051 - DNA, 25 bp, Homo sapien
gcaatgaaaatgtaggacgaggtaa

SEQ ID NO: 1116052 - DNA, 25 bp, Homo sapien
ctgtcaaatgtgaccaacccaacca

SEQ ID NO: 1116053 - DNA, 25 bp, Homo sapien
aaatgtgaccaacccaaccaaggat

SEQ ID NO: 1116054 - DNA, 25 bp, Homo sapien
ctgcttgattcattcgaaagagacg

SEQ ID NO: 1116055 - DNA, 25 bp, Homo sapien
gattcattcgaaagagacggtcttc

SEQ ID NO: 1116056 - DNA, 25 bp, Homo sapien
tcagcttcttgaggcaggtttgcag

SEQ ID NO: 1116057 - DNA, 25 bp, Homo sapien
ttgcagtgatcttttggtaagtgtt

SEQ ID NO: 1116058 - DNA, 25 bp, Homo sapien
cagtgatcttttggtaagtgttatc

SEQ ID NO: 1116059 - DNA, 25 bp, Homo sapien
gatcttttggtaagtgttatcatca

SEQ ID NO: 1116060 - DNA, 25 bp, Homo sapien
aatcctgctttgagtcccctgcaaa

SEQ ID NO: 1116061 - DNA, 25 bp, Homo sapien
gctttgagtcccctgcaaattgaag

SEQ ID NO: 1116062 - DNA, 25 bp, Homo sapien
gagtcccctgcaaattgaagtgcca

SEQ ID NO: 1116063 - DNA, 25 bp, Homo sapien
aaatcctgctttgagtcccctgcaa

SEQ ID NO: 1116064 - DNA, 25 bp, Homo sapien
tatgatttcagaaccgaaagtactc

SEQ ID NO: 1116065 - DNA, 25 bp, Homo sapien
ccgaaagtactctgattactctggg

SEQ ID NO: 1116066 - DNA, 25 bp, Homo sapien
gaaccgaaagtactctgattactct

SEQ ID NO: 1116067 - DNA, 25 bp, Homo sapien
ttcagaaccgaaagtactctgatta

SEQ ID NO: 1116068 - DNA, 25 bp, Homo sapien
gcataagcttatttgataatcttcc

SEQ ID NO: 1116069 - DNA, 25 bp, Homo sapien
tacctctccaaagcataagcttatt

SEQ ID NO: 1116070 - DNA, 25 bp, Homo sapien
ctttgttttacctctccaaagcata

SEQ ID NO: 1116071 - DNA, 25 bp, Homo sapien
taagcttatttgataatcttcccca

SEQ ID NO: 1116072 - DNA, 25 bp, Homo sapien
cagacggccccagagcaatggtgtg

SEQ ID NO: 1116073 - DNA, 25 bp, Homo sapien
agcaatggtgtggatgactgtgcca

SEQ ID NO: 1116074 - DNA, 25 bp, Homo sapien
ggtctccagttcttcgtcagcagac

SEQ ID NO: 1116075 - DNA, 25 bp, Homo sapien
agttcttcgtcagcagacggcccca

SEQ ID NO: 1116076 - DNA, 25 bp, Homo sapien
agcactttatgaactttcagtatat

SEQ ID NO: 1116077 - DNA, 25 bp, Homo sapien
ccagcactttatgaactttcagtat

SEQ ID NO: 1116078 - DNA, 25 bp, Homo sapien
gcactttatgaactttcagtatatc

SEQ ID NO: 1116079 - DNA, 25 bp, Homo sapien
cagcactttatgaactttcagtata

SEQ ID NO: 1116080 - DNA, 25 bp, Homo sapien
gagatgctgccacttctagatgaaa

SEQ ID NO: 1116081 - DNA, 25 bp, Homo sapien
tgaaagcatcaataaggccatttat

SEQ ID NO: 1116082 - DNA, 25 bp, Homo sapien
gaaagcatcaataaggccatttatg

SEQ ID NO: 1116083 - DNA, 25 bp, Homo sapien
ctgccacttctagatgaaattctgc

SEQ ID NO: 1116084 - DNA, 25 bp, Homo sapien
tatccatttcttcgctgggatattc

SEQ ID NO: 1116085 - DNA, 25 bp, Homo sapien
cacaggcactgtaccatttatccat

SEQ ID NO: 1116086 - DNA, 25 bp, Homo sapien
gtgacaacaaaggaagtatcatttc

SEQ ID NO: 1116087 - DNA, 25 bp, Homo sapien
tcgctgggatattcaaagttttact

SEQ ID NO: 1116088 - DNA, 25 bp, Homo sapien
tattgctggcttttgtatcgtccat

SEQ ID NO: 1116089 - DNA, 25 bp, Homo sapien
aattattgctggcttttgtatcgtc

SEQ ID NO: 1116090 - DNA, 25 bp, Homo sapien
tcttgaagaattattgctggctttt

SEQ ID NO: 1116091 - DNA, 25 bp, Homo sapien
gaagaattattgctggcttttgtat

SEQ ID NO: 1116092 - DNA, 25 bp, Homo sapien
ttcgaagacgggcagaccgaatatt

SEQ ID NO: 1116093 - DNA, 25 bp, Homo sapien
cgggcagaccgaatatttagttcac

SEQ ID NO: 1116094 - DNA, 25 bp, Homo sapien
ctggtattcgaagacgggcagaccg

SEQ ID NO: 1116095 - DNA, 25 bp, Homo sapien
gaagacgggcagaccgaatatttag

SEQ ID NO: 1116096 - DNA, 25 bp, Homo sapien
cgagtggtcattgtcacagttagca

SEQ ID NO: 1116097 - DNA, 25 bp, Homo sapien
tgtcacagttagcaattgagatttg

SEQ ID NO: 1116098 - DNA, 25 bp, Homo sapien
gtagggcttcttgctcgagtggtca

SEQ ID NO: 1116099 - DNA, 25 bp, Homo sapien
tttcgaacgctgtaagtccaagtgc

SEQ ID NO: 1116100 - DNA, 25 bp, Homo sapien
ctagggtaatgagctgtattttgac

SEQ ID NO: 1116101 - DNA, 25 bp, Homo sapien
gctagggtaatgagctgtattttga

SEQ ID NO: 1116102 - DNA, 25 bp, Homo sapien
tgggctagggtaatgagctgtattt

SEQ ID NO: 1116103 - DNA, 25 bp, Homo sapien
gggctagggtaatgagctgtatttt

SEQ ID NO: 1116104 - DNA, 25 bp, Homo sapien
ctgttacattgattcccagaacagg

SEQ ID NO: 1116105 - DNA, 25 bp, Homo sapien
gttacattgattcccagaacaggaa

SEQ ID NO: 1116106 - DNA, 25 bp, Homo sapien
tacattgattcccagaacaggaaga

SEQ ID NO: 1116107 - DNA, 25 bp, Homo sapien
acattgattcccagaacaggaagaa

SEQ ID NO: 1116108 - DNA, 25 bp, Homo sapien
gtcccagagctccaatgttacttga

SEQ ID NO: 1116109 - DNA, 25 bp, Homo sapien
gccattgtcccagagctccaatgtt

SEQ ID NO: 1116110 - DNA, 25 bp, Homo sapien
ttgtcccagagctccaatgttactt

SEQ ID NO: 1116111 - DNA, 25 bp, Homo sapien
gcgccattgtcccagagctccaatg

SEQ ID NO: 1116112 - DNA, 25 bp, Homo sapien
gcttgggccacttgctaactctgtg

SEQ ID NO: 1116113 - DNA, 25 bp, Homo sapien
gaatcagactattttggttgaaagc

SEQ ID NO: 1116114 - DNA, 25 bp, Homo sapien
aaaattgtgctcttaagttccatgg

SEQ ID NO: 1116115 - DNA, 25 bp, Homo sapien
taatttgggagatagtatgtagcac

SEQ ID NO: 1116116 - DNA, 25 bp, Homo sapien
cattttcagcatagcgcggtacata

SEQ ID NO: 1116117 - DNA, 25 bp, Homo sapien
tttccatggtaatctgtaaaatacc

SEQ ID NO: 1116118 - DNA, 25 bp, Homo sapien
aataccttgagtagatgccatcatt

SEQ ID NO: 1116119 - DNA, 25 bp, Homo sapien
tgacttagcctagctgtgttttttc

SEQ ID NO: 1116120 - DNA, 25 bp, Homo sapien
aatgattaccattaggaggcactcc

SEQ ID NO: 1116121 - DNA, 25 bp, Homo sapien
tacagtaaacgaccctccagagatg

SEQ ID NO: 1116122 - DNA, 25 bp, Homo sapien
aagtcgtctgtttgagctccttcca

SEQ ID NO: 1116123 - DNA, 25 bp, Homo sapien
tcctttatcgaggaccttgccaggg

SEQ ID NO: 1116124 - DNA, 25 bp, Homo sapien
atattaaaatcactaggatgccttg

SEQ ID NO: 1116125 - DNA, 25 bp, Homo sapien
aaatcactaggatgccttgctacca

SEQ ID NO: 1116126 - DNA, 25 bp, Homo sapien
caaatagatacttcagatatattaa

SEQ ID NO: 1116127 - DNA, 25 bp, Homo sapien
actaggatgccttgctaccaccaca

SEQ ID NO: 1116128 - DNA, 25 bp, Homo sapien
caatgtttgaaacctctgaggtgac

SEQ ID NO: 1116129 - DNA, 25 bp, Homo sapien
tcttggaggtccaggaaatgtttac

SEQ ID NO: 1116130 - DNA, 25 bp, Homo sapien
tttctactgaaccaggctccttagg

SEQ ID NO: 1116131 - DNA, 25 bp, Homo sapien
gaattgcaatatagaatgtcgtacc

SEQ ID NO: 1116132 - DNA, 25 bp, Homo sapien
aaattacagctaatccaaaaattgc
